United States Patent Application Publication US 2017/0114356 A1 - sequence listing, part 121

SEQ ID NO: 221432 - DNA, 2115 bp, Zea Mays
atggcggcaggcagccaggaacagggagatgggcttattgacaaaatcagaggagacattgctatccttacattgctcgccgaagtattatgtcttttggacatgattgtaaattcttttgcgcatacaatatctacaaagcctgttgatcgctacacaagaccagagttcacagatgatggtccaatggcaatcaatgctggacgacaccctattcttgagaccttgcatactaattttgttcctaacaatatatttctctctgaagcatctaatatggttcttgtcatggggccaaatatgagcgggaaaagcacatatctccaacagatatgtttaattgtcattcttgcacaaattggctgttatgttccagctcagtttgcatccttaagagttcttgatcgtatatttacacggattggtaacggggacaatgttgagaacaactcgagtacgtttatgacagaaatgaaagaaactgctttcatcatgcaaaatgtttcttcaaggagtttggttgttgtggatgaacttggaagagcaacatcttcctcagatgggttggcaatcgcatggagttgctgtgaataccttctttctgtgaaagcatacactgtttttgccacgcacatggaacgcttgtcagaactttcaacaatgtatccaaatgtgaagatcctccattttgaggttgacttgagaaatgaccgcttggatttcaagttctgcctaaaggatggcatccgacgggtaccacactatgggcttctgctggccagagtagctggtatccctacttcggtgatcgacacttcaacaagtatcacttcacagatcacagagcaggaaatgacaaggatgaatgccaattgcgaggagtactggtcgcttcagatgacgtaccaggttgtgcagcggcttatctgcctgaagtactcgaaccatggcgacgactacatccgtgaagcactgcagaatctcaaggagagctattctgcgggccggctaacataagaggtctcatcagtgtatgccgctggaggatccataagccaatgtatatattcctccgtcaatgtgatactatcttaggtcctcaaacgcacatctatcgttatcgcacatgccatgtaacatcttatcccctattcatatagatgatcacgaagcaagacagcatgtgaatgtttagaacaagtgattattatgacctcagccacatagcttttacgaaaagatttactggaatatatggaacaccaaagtaggagattagagtggtcgatacatacaaactgtaggtttgaacagcaaatgttggcattgttttctgccaatacattaatcgatacagtagcatgagaggaggaggagcacagaaggcggcctagaccacacaagagagcgggaggtagtgtggagccgagcaggacaagaattcatgagggacaaaaaaaaaatgtatggcaaaatcattcattgtcataaaaaacttgtgttttatataatttcagtttcatgtcaatgtatcaataaaataagcaaatataccgttaagtttttgttgaccgagacaattccaaccaatcaactatttatataatctagatatttatctcaatctatcaataatcaatccaattatccaagtgtcaaatgcaaactctactgctattgtgtcgtctggaagaagctgcatgccttcccatcgtgccggaaagactgaaggggcatgctcctgctgactggaaaggcagggcgtgcttgggagcagacagcaggaaccggcttggggcggggacgccgccatgccaggagcccaggaagggagcggacagcaaggacgggcttggggcggggacgccgccatgccaggagcccaggaagggagcggacagcaaggacgggccgccgccatgccaggagcccaggaagggagcggacagcaaggacgggcttggggcggggacgccgccatgccaggagcccaggaagggagcggacagcaaggacgggcttggggcggcgtgcgcgttctccacgtcggcgtcgggaagtagcggacttaccgagccggcatacgagagtagcaagccagagtgtcggcgttag

SEQ ID NO: 221433 - DNA, 6168 bp, Zea Mays
gccgccgccgccgccgccgcgtgttctctctcatctagggtttcatctccatctagtcgagcattcccgtgctggggtggggagtgggagactcgactcgatttgattcgactccatttcgtgctagcgcctagcgctgcagagcgagtgaggtgacgggaatggcggctccggggcggaggacggcggacgtgtcctcgtcctcgccctctccgtcccctgccgccccctccaccggcaggcgcctcctgcgcacgcagaccgtcgccaacctcggcgagtccatcttcgacagcgaggtcgtgccgtcctcgctcgtcgagatcgcgcccatcctccgcgtcgccaacgaggtcgaggttgaaaacccgcgcgtcgcctacctctgtcgcttctacgctttcgagaaggctcaccgcctcgacccgacttccagtggccgtggtgttcgtcagtttaagaccgcacttctgcagaggcttgagagggaaaatgaccccacactgaagggaagggtccacaagagcgatgctagtgagatgcaacgcttctaccgcgaatactacaggaagtacatccaggcactgcaaactgtcgttaataaggatgaccgtgcgcgcctcactaaggcataccaaacggctgctatcttgtttgaggttttgagggctgttaatgattcccagtccgttgaagtcgatcaagcgattttggatacacacatcaaggtcgaagaaaagaaaaagctgtttctaccttataacattctcccgctcgatcctgaaagtactggcgaagccattatgcgatatccagagattcaagctgctgtttatgctcttcgcaatactagaggtctgccatggccaaaggaccaagacaagaagcctgaagagaagaatactggcaaagaccttcttgattggcttcaggctatgtttgggtttcagaaagacaatgtgtccaaccaaagggaacatttgatactgttgcttgcaaatgttcatataaggaaaatacccaaggctgaccaacaaccgaagttggatgacaaagctctggatgatgtaatgaagaagctatttaagaattataagaagtggtgcaagtacctcggccgcaaaagcagtttatggttgccaaccatccagcaggaagtgcagcagcgtaagcttctttatatgggtctctacctgctgatttggggtgaggcggccaacttgagattcatgccagagtgtatttgttacatctaccatcatatggcttttgaactctatggcatgctggctggaaatgtgagcccaatgactggtgaaaatgttagaccagcatatggtggtgacgaagaagcctttttgacgaaagtcgtgactccaatatacaaagttatagagaaggaagctgaaaggagcaagaccatgaaatcaaagcattcacattggagaaactatgatgatctgaatgagtacttttggtcagttgattgtttccggctaggatggcctatgagagccgacgctgactttttcaaaactccaaaagatccttatctgaatcatttgaatggagagaacagatctgcaggcaatgtccattggatgggaaaagttaattttgtggagatacgttcattttggcacatattccgtagttttgacagaatgtggatcttcttaatattgtccttacaggccatgataattattgcttggaatggtggaacaccaagtgatatctttgatgctggcgtatttaagaaggttttgagcatatttatttctgcagcaattttgaagttgggtcaagtgacttacgcgtacacttgggagaatcctactggtcttgcaagaacaataaaaagctggcttggggatggtcagaatcagccatctttgtatatactggcagtagtgatatatatggcaccaaacatacttgcttctatgctatttcttttcccatttatgagaagaatcctagagagttcaaatgttaaggtcataacgatcatgatgtggtggtctcagcctcggttatttgttggtagagggatgcacgaaggtgcattctccctcttcaagtataccatgttctggattattcttttagcaatgaagttgattgtaagcttctatattgagatcaaacctctggtacagccaaccaaagatataatgagagaacctatcaggacattccagtggcacgagtttttccctcatggaactaacaatattggtgttgttatatcactctgggctccaataatcctggtatatttcatggacacccaaatttggtatgcactgttctctactctgattggtggcatctacggggcttatcgtcgtcttggtgagatacgtacattaggaatgttgagatctcgctttgaatctttgcctgaggccttcaatgaacgcttgattccttctgatgcaaataagagtaaaggtcttcgtgctgctttttcgagtagacccaaggcttctggtgacgaaagtgagagagagaaaagagctgcaaggtttgctcaaatgtggaacgccattattacaagtttccgcgaagaggatctcatagacaatagggagaaggatctgctactggttccagactgtaaagaccgtgaacttgatatattccaatggccgcctttcctacttgctagcaagatcccaatagcactggatatggcagcagacagtggtggaaaagaccgtgatctgacgaagaggataaagtcagatccatacttttcctttgctatcagagaatgctatgcttcattcaagaacatcatcaataccttagtatttggtcagcgggagaaagatgtcctagtacagattttcacagttgttgataagcatatagaagaggaaactctgataacgggtctcaatatgaagaaccttcctgcactgagcaagaagtttgttgaattacttgagttactgcaaaaaaacaaggaggaagacttgggtcaggtagttattttgttccaagatatgctcgaggtggtcacgagggatataatggaggaacaggacctgctcgagacgttggattctttacatggtgccaatagtagaaaacatgaaggaattacaccgctagatcagcaagaccagttgtttgctaaagctattaagtttcctgtggtggaatcaaatgcatggactgaaaagataaagaggcttcatcttctgttaactgtgaaagagtctgctatggatgttcctattaatcttgatgctaggcggcggatatcgttcttcgcaaattctctatttatggatatgcccaatgctccaaaagttcggaacatgttgcccttctctatcttgactccttattacaaggaagatgttctgttttcattacaaaatctggaagagcgaaatgaggatggagtttccattcttttctacttgcaaaaaatttacccagatgaatggaaaaatttcctcgaaagggtgggctgcaagaatgaagaggtactccgtgaagatgaacagctggaagagaagctttgtctttgggtgtcatatagggggcagacattaacaagaactgtaagagggatgatgtactatcgaaaagctttggagcttcaggcttttcttgatatggccaacaatgatgatcttatgaaaggctacagagcaatggaagtaatgtctgaggactcaccattaaagactcaatgcaaggctatagccgacatgaagtttacatatgttgtctcatgccaactatatggaattcagaagcgttctaatgagccttgcgcacatgatattttgagactaatgacagagtatccatcacttagggtcgcctatattgatgaagttgaagcacccagcaaagatagaatcaagaagattgaaaaggtttactactcagtgttagtgaaggcttctgttacaaaacctaatgagcctggtcagagccttgatcaggtcatctacaagataaaactaccaggtaatgccattttaggtgaaggaaagccagaaaaccagaaccatgcaataatattcacccgaggcgaatgtctccaaactatagatatgaatcaggagcactatatggaggaggctttgaaaatgagaaatctgctgcaagagtttgagaagaaacatggagtgagacatccatcaatacttggagtcagagaacacatatttacgggcagtgtgtcatcccttgcttggttcatgtcaaatcaggaaactagttttgtgacaattggacaacgagtgcttgccaatccactgagggttcggtttcattatggccatcctgatgtcttcgatcgtcttttccacgttacgaggggcggtgtcagtaaagcatccaaaattatcaatcttagtgaggacatctttgcaggattcaattccacattgcgcgaaggcaatgttactcaccatgaatacatgcaagttggcaaaggaagggatgtaggtctcaatcaaatatctctgtttgaggcaaagatagcaaatggcaatggcgaacaaacgctgagccgtgacatctaccggctaggtcatcgctttgatttcttcaggatgctgtcttgttactacacaacaattggtttctacttcagtacaatgattacagtatggactgtatatgttttcctctacggccggctatatcttgtacttagtggactcgatgaagcactggctactggaaagagcttcagttggcctctgttttcttcacattctcgttgggaacaaaaactcactactacggaaggacgttactccatggaggagcggaatacagagccactggacgtgggtttgtggtgttccatgccaaatttgctgagaactatcgactttattcccgtagccattttgtcaagggccttgagctgatgattctactagttgtgtatgaaatatttggtcagtcatatagaggggctataacttacatcttcatcaccgtatccatgtggttcatggtgggcacttggctctttgcaccattcctgttcaatccttctggatttgagtggcagaagattgtggatgactggactgattggcacaagtggatcagcaatcgtggaggtattggtgtggcaccagagaaaagctgggagtcatggtgggaaaaagagcaggagccccttcgttactctgggaagcgtggtactattgttgaaatactgcttgcattgcgtttctttatctatcaatatggactcgtgtatcatctgaatataacgaagaagataaccaaggataaccagagtgtgctggtttattgcttctcatgggttgtaattttcgttgttttactcgttatgaagaccgtatcagtggggaggaggaggttcagtgcagagttccagctagtgttccggctgatcaagggtctcatatttataacttttacagccatcgtggtaatcctaatagcaatccctggcatgacggttctggacatctttgtttgcatccttgccttcatgcccactggatggggtttgctcctgattgcccaagctatcaggcctgtgattcaaaagatcgggctgtgggggtcgatcaaggctcttgcccggggctacgagatcctaatggggcttctcctgttcacgcccattgctttccttgcctggttcccgttcgtgtccgagttccagaccaggatgctgttcaaccaggccttcagcagaggtctgcagatctcccgtatcctgggaggacacaagaaagaccgagggacgcggagcaaggagtagtagggctgctgattgaaggtccgtctatcgggagttatgtcgtcctggagcggtctatcaggttcagagaatattagggtccgtatgtatgtatgtgtgtgtcgcacctagcaccagtagtatgtatgtatgtatgcgtatgtaggttcagagaatattagggtccctatgtatatgtatgtatcaggattgctatggtcttttggattggaagatctgagatttgctggtgcaatggccagtatctgacatccaaatgttgaaactataattaggctctgctaatagttagctaacttacagctaacaattagtttattagctggcttacgactaagtagtcagattaaagttgggatgtcggtcgccccctttaggtttag

SEQ ID NO: 221434 - DNA, 5960 bp, Zea Mays
gccgccgccgccgccgccgcgtgttctctctcatctagggtttcatctccatctagtcgagcattcccgtgctggggtggggagtgggagactcgactcgatttgattcgactccatttcgtgctagcgcctagcgctgcagagcgagtgaggtgacgggaatggcggctccggggcggaggacggcggacgtgtcctcgtcctcgccctctccgtcccctgccgccccctccaccggcaggcgcctcctgcgcacgcagaccgtcgccaacctcggcgagtccatcttcgacagcgaggtcgtgccgtcctcgctcgtcgagatcgcgcccatcctccgcgtcgccaacgaggtcgaggttgaaaacccgcgcgtcgcctacctctgtcgcttctacgctttcgagaaggctcaccgcctcgacccgacttccagtggccgtggtgttcgtcagtttaagaccgcacttctgcagaggcttgagagggaaaatgaccccacactgaagggaagggtccacaagagcgatgctagtgagatgcaacgcttctaccgcgaatactacaggaagtacatccaggcactgcaaactgtcgttaataaggatgaccgtgcgcgcctcactaaggcataccaaacggctgctatcttgtttgaggttttgagggctgttaatgattcccagtccgttgaagtcgatcaagcgattttggatacacacatcaaggtcgaagaaaagaaaaagctgtttctaccttataacattctcccgctcgatcctgaaagtactggcgaagccattatgcgatatccagagattcaagctgctgtttatgctcttcgcaatactagaggtctgccatggccaaaggaccaagacaagaagcctgaagagaagaatactggcaaagaccttcttgattggcttcaggctatgtttgggtttcagaaagacaatgtgtccaaccaaagggaacatttgatactgttgcttgcaaatgttcatataaggaaaatacccaaggctgaccaacaaccgaagttggatgacaaagctctggatgatgtaatgaagaagctatttaagaattataagaagtggtgcaagtacctcggccgcaaaagcagtttatggttgccaaccatccagcaggaagtgcagcagcgtaagcttctttatatgggtctctacctgctgatttggggtgaggcggccaacttgagattcatgccagagtgtatttgttacatctaccatcatatggcttttgaactctatggcatgctggctggaaatgtgagcccaatgactggtgaaaatgttagaccagcatatggtggtgacgaagaagcctttttgacgaaagtcgtgactccaatatacaaagttatagagaaggaagctgaaaggagcaagaccatgaaatcaaagcattcacattggagaaactatgatgatctgaatgagtacttttggtcagttgattgtttccggctaggatggcctatgagagccgacgctgactttttcaaaactccaaaagatccttatctgaatcatttgaatggagagaacagatctgcaggcaatgtccattggatgggaaaagttaattttgtggagatacgttcattttggcacatattccgtagttttgacagaatgtggatcttcttaatattgtccttacaggccatgataattattgcttggaatggtggaacaccaagtgatatctttgatgctggcgtatttaagaaggttttgagcatatttatttctgcagcaattttgaagttgggtcaagatcaaacctctggtacagccaaccaaagatataatgagagaacctatcaggacattccagtggcacgagtttttccctcatggaactaacaatattggtgttgttatatcactctgggctccaataatcctggtatatttcatggacacccaaatttggtatgcactgttctctactctgattggtggcatctacggggcttatcgtcgtcttggtgagatacgtacattaggaatgttgagatctcgctttgaatctttgcctgaggccttcaatgaacgcttgattccttctgatgcaaataagagtaaaggtcttcgtgctgctttttcgagtagacccaaggcttctggtgacgaaagtgagagagagaaaagagctgcaaggtttgctcaaatgtggaacgccattattacaagtttccgcgaagaggatctcatagacaatagggagaaggatctgctactggttccagactgtaaagaccgtgaacttgatatattccaatggccgcctttcctacttgctagcaagatcccaatagcactggatatggcagcagacagtggtggaaaagaccgtgatctgacgaagaggataaagtcagatccatacttttcctttgctatcagagaatgctatgcttcattcaagaacatcatcaataccttagtatttggtcagcgggagaaagatgtcctagtacagattttcacagttgttgataagcatatagaagaggaaactctgataacgggtctcaatatgaagaaccttcctgcactgagcaagaagtttgttgaattacttgagttactgcaaaaaaacaaggaggaagacttgggtcaggtagttattttgttccaagatatgctcgaggtggtcacgagggatataatggaggaacaggacctgctcgagacgttggattctttacatggtgccaatagtagaaaacatgaaggaattacaccgctagatcagcaagaccagttgtttgctaaagctattaagtttcctgtggtggaatcaaatgcatggactgaaaagataaagaggcttcatcttctgttaactgtgaaagagtctgctatggatgttcctattaatcttgatgctaggcggcggatatcgttcttcgcaaattctctatttatggatatgcccaatgctccaaaagttcggaacatgttgcccttctctatcttgactccttattacaaggaagatgttctgttttcattacaaaatctggaagagcgaaatgaggatggagtttccattcttttctacttgcaaaaaatttacccagatgaatggaaaaatttcctcgaaagggtgggctgcaagaatgaagaggtactccgtgaagatgaacagctggaagagaagctttgtctttgggtgtcatatagggggcagacattaacaagaactgtaagagggatgatgtactatcgaaaagctttggagcttcaggcttttcttgatatggccaacaatgatgatcttatgaaaggctacagagcaatggaagtaatgtctgaggactcaccattaaagactcaatgcaaggctatagccgacatgaagtttacatatgttgtctcatgccaactatatggaattcagaagcgttctaatgagccttgcgcacatgatattttgagactaatgacagagtatccatcacttagggtcgcctatattgatgaagttgaagcacccagcaaagatagaatcaagaagattgaaaaggtttactactcagtgttagtgaaggcttctgttacaaaacctaatgagcctggtcagagccttgatcaggtcatctacaagataaaactaccaggtaatgccattttaggtgaaggaaagccagaaaaccagaaccatgcaataatattcacccgaggcgaatgtctccaaactatagatatgaatcaggctttgaaaatgagaaatctgctgcaagagtttgagaagaaacatggagtgagacatccatcaatacttggagtcagagaacacatatttacgggcagtgtgtcatcccttgcttggttcatgtcaaatcaggaaactagttttgtgacaattggacaacgagtgcttgccaatccactgagggttcggtttcattatggccatcctgatgtcttcgatcgtcttttccacgttacgaggggcggtgtcagtaaagcatccaaaattatcaatcttagtgaggacatctttgcaggattcaattccacattgcgcgaaggcaatgttactcaccatgaatacatgcaagttggcaaaggaagggatgtaggtctcaatcaaatatctctgtttgaggcaaagatagcaaatggcaatggcgaacaaacgctgagccgtgacatctaccggctaggtcatcgctttgatttcttcaggatgctgtcttgttactacacaacaattggtttctacttcagtacaatgattacagtatggactgtatatgttttcctctacggccggctatatcttgtacttagtggactcgatgaagcactggctactggaaagaggtttgtgcacaatacacctctccaggttgctcttgcgtcagagtcttttgtgcaacttggatttttgatggcgctgcccatgatgatggaaatcggtttggagagaggattcagaactgcattgagtgattttatactgatgcagcttcagttggcctctgttttcttcacattctcgttgggaacaaaaactcactactacggaaggacgttactccatggaggagcggaatacagagccactggacgtgggtttgtggtgttccatgccaaatttgctgagaactatcgactttattcccgtagccattttgtcaagggccttgagctgatgattctactagttgtgtatgaaatatttggtcagtcatatagaggggctataacttacatcttcatcaccgtatccatgtggttcatggtgggcacttggctctttgcaccattcctgttcaatccttctggatttgagtggcagaagattgtggatgactggactgattggcacaagtggatcagcaatcgtggaggtattggtgtggcaccagagaaaagctgggagtcatggtgggaaaaagagcaggagccccttcgttactctgggaagcgtggtactattgttgaaatactgcttgcattgcgtttctttatctatcaatatggactcgtgtatcatctgaatataacgaagaagataaccaaggataaccagagtgtgctggtttattgcttctcatgggttgtaattttcgttgttttactcgttatgaagaccgtatcagtggggaggaggaggttcagtgcagagttccagctagtgttccggctgatcaagggtctcatatttataacttttacagccatcgtggtaatcctaatagcaatccctggcatgacggttctggacatctttgtttgcatccttgccttcatgcccactggatggggtttgctcctgattgcccaagctatcaggcctgtgattcaaaagatcgggctgtgggggtcgatcaaggctcttgcccggggctacgagatcctaatggggcttctcctgttcacgcccattgctttccttgcctggttcccgttcgtgtccgagttccagaccaggatgctgttcaaccaggccttcagcagaggtctgcagatctcccgtatcctgggaggacacaagaaagaccgagggacgcggagcaaggagtagtagggctgctgattgaaggtccgtctatcgggagttatgtcgtcctggagcggtctatcaggttcagagaatattagggtccgtatgtatgtatgtgtgtgtcgcacctagcaccagtagtatgtatgtatgtatgcgtatgtaggttcagagaatattagggtccctatgtatatgtatgtatcaggattgctatggtcttttggattggaagatctgagatttgctggtgcaatggccagtatctgacatccaaatgttgaaactataattaggctctgctaatagttagctaacttacagctaacaattagtttattagctggcttacgactaagtagtcagattaaagttgggatgtcggtcgccccctttaggtttag

SEQ ID NO: 221435 - DNA, 6352 bp, Zea Mays
catcatcccattccttccccaccaccacctcctgcttctacactactggactgctgctgctgctctccccctcccctcccctcccctcccctcccggccgccgccgccgccgccgcgtgttctctctcatctagggtttcatctccatctagtcgagcattcccgtgctggggtggggagtgggagactcgactcgatttgattcgactccatttcgtgctagcgcctagcgctgcagagcgagtgaggtgacgggaatggcggctccggggcggaggacggcggacgtgtcctcgtcctcgccctctccgtcccctgccgccccctccaccggcaggcgcctcctgcgcacgcagaccgtcgccaacctcggcgagtccatcttcgacagcgaggtcgtgccgtcctcgctcgtcgagatcgcgcccatcctccgcgtcgccaacgaggtcgaggttgaaaacccgcgcgtcgcctacctctgtcgcttctacgctttcgagaaggctcaccgcctcgacccgacttccagtggccgtggtgttcgtcagtttaagaccgcacttctgcagaggcttgagagggaaaatgaccccacactgaagggaagggtccacaagagcgatgctagtgagatgcaacgcttctaccgcgaatactacaggaagtacatccaggcactgcaaactgtcgttaataaggatgaccgtgcgcgcctcactaaggcataccaaacggctgctatcttgtttgaggttttgagggctgttaatgattcccagtccgttgaagtcgatcaagcgattttggatacacacatcaaggtcgaagaaaagaaaaagctgtttctaccttataacattctcccgctcgatcctgaaagtactggcgaagccattatgcgatatccagagattcaagctgctgtttatgctcttcgcaatactagaggtctgccatggccaaaggaccaagacaagaagcctgaagagaagaatactggcaaagaccttcttgattggcttcaggctatgtttgggtttcagaaagacaatgtgtccaaccaaagggaacatttgatactgttgcttgcaaatgttcatataaggaaaatacccaaggctgaccaacaaccgaagttggatgacaaagctctggatgatgtaatgaagaagctatttaagaattataagaagtggtgcaagtacctcggccgcaaaagcagtttatggttgccaaccatccagcaggaagtgcagcagcgtaagcttctttatatgggtctctacctgctgatttggggtgaggcggccaacttgagattcatgccagagtgtatttgttacatctaccatcatatggcttttgaactctatggcatgctggctggaaatgtgagcccaatgactggtgaaaatgttagaccagcatatggtggtgacgaagaagcctttttgacgaaagtcgtgactccaatatacaaagttatagagaaggaagctgaaaggagcaagaccatgaaatcaaagcattcacattggagaaactatgatgatctgaatgagtacttttggtcagttgattgtttccggctaggatggcctatgagagccgacgctgactttttcaaaactccaaaagatccttatctgaatcatttgaatggagagaacagatctgcaggcaatgtccattggatgggaaaagttaattttgtggagatacgttcattttggcacatattccgtagttttgacagaatgtggatcttcttaatattgtccttacaggccatgataattattgcttggaatggtggaacaccaagtgatatctttgatgctggcgtatttaagaaggttttgagcatatttatttctgcagcaattttgaagttgggtcaagcaatcctagatctcgtatttggctggaaagcaaaaagaagcatgtcatttgcagtcaagctacgatatgtcttgaaattaatatctgctgctgcatgggttgtgattttaccagtgacttacgcgtacacttgggagaatcctactggtcttgcaagaacaataaaaagctggcttggggatggtcagaatcagccatctttgtatatactggcagtagtgatatatatggcaccaaacatacttgcttctatgctatttcttttcccatttatgagaagaatcctagagagttcaaatgttaaggtcataacgatcatgatgtggtggtctcagcctcggttatttgttggtagagggatgcacgaaggtgcattctccctcttcaagtatgttaaaatgttaacccatcttcacattgtcttgtcttgtattgcatccttctcaattactgaacattgttgtcctgacaggtataccatgttctggattattcttttagcaatgaagttgattgtaagcttctatattgagatcaaacctctggtacagccaaccaaagatataatgagagaacctatcaggacattccagtggcacgagtttttccctcatggaactaacaatattggtgttgttatatcactctgggctccaataatcctggtatatttcatggacacccaaatttggtatgcactgttctctactctgattggtggcatctacggggcttatcgtcgtcttggtgagatacgtacattaggaatgttgagatctcgctttgaatctttgcctgaggccttcaatgaacgcttgattccttctgatgcaaataagagtaaaggtcttcgtgctgctttttcgagtagacccaaggcttctggtgacgaaagtgagagagagaaaagagctgcaaggtttgctcaaatgtggaacgccattattacaagtttccgcgaagaggatctcatagacaatagggagaaggatctgctactggttccagactgtaaagaccgtgaacttgatatattccaatggccgcctttcctacttgctagcaagatcccaatagcactggatatggcagcagacagtggtggaaaagaccgtgatctgacgaagaggataaagtcagatccatacttttcctttgctatcagagaatgctatgcttcattcaagaacatcatcaataccttagtatttggtcagcgggagaaagatgtcctagtacagattttcacagttgttgataagcatatagaagaggaaactctgataacgggtctcaatatgaagaaccttcctgcactgagcaagaagtttgttgaattacttgagttactgcaaaaaaacaaggaggaagacttgggtcaggtagttattttgttccaagatatgctcgaggtggtcacgagggatataatggaggaacaggacctgctcgagacgttggattctttacatggtgccaatagtagaaaacatgaaggaattacaccgctagatcagcaagaccagttgtttgctaaagctattaagtttcctgtggtggaatcaaatgcatggactgaaaagataaagaggcttcatcttctgttaactgtgaaagagtctgctatggatgttcctattaatcttgatgctaggcggcggatatcgttcttcgcaaattctctatttatggatatgcccaatgctccaaaagttcggaacatgttgcccttctcatgaatggaaaaatttcctcgaaagggtgggctgcaagaatgaagaggtactccgtgaagatgaacagctggaagagaagctttgtctttgggtgtcatatagggggcagacattaacaagaactgtaagagggatgatgtactatcgaaaagctttggagcttcaggcttttcttgatatggccaacaatgatgatcttatgaaaggctacagagcaatggaagtaatgtctgaggactcaccattaaagactcaatgcaaggctatagccgacatgaagtttacatatgttgtctcatgccaactatatggaattcagaagcgttctaatgagccttgcgcacatgatattttgagactaatgacagagtatccatcacttagggtcgcctatattgatgaagttgaagcacccagcaaagatagaatcaagaagattgaaaaggtttactactcagtgttagtgaaggcttctgttacaaaacctaatgagcctggtcagagccttgatcaggtcatctacaagataaaactaccaggtaatgccattttaggtgaaggaaagccagaaaaccagaaccatgcaataatattcacccgaggcgaatgtctccaaactatagatatgaatcaggagcactatatggaggaggctttgaaaatgagaaatctgctgcaagagtttgagaagaaacatggagtgagacatccatcaatacttggagtcagagaacacatatttacgggcagtgtgtcatcccttgcttggttcatgtcaaatcaggaaactagttttgtgacaattggacaacgagtgcttgccaatccactgagggttcggtttcattatggccatcctgatgtcttcgatcgtcttttccacgttacgaggggcggtgtcagtaaagcatccaaaattatcaatcttagtgaggacatctttgcaggattcaattccacattgcgcgaaggcaatgttactcaccatgaatacatgcaagttggcaaaggaagggatgtaggtctcaatcaaatatctctgtttgaggcaaagatagcaaatggcaatggcgaacaaacgctgagccgtgacatctaccggctaggtcatcgctttgatttcttcaggatgctgtcttgttactacacaacaattggtttctacttcagtacaatgattacagtatggactgtatatgttttcctctacggccggctatatcttgtacttagtggactcgatgaagcactggctactggaaagagcttcagttggcctctgttttcttcacattctcgttgggaacaaaaactcactactacggaaggacgttactccatggaggagcggaatacagagccactggacgtgggtttgtggtgttccatgccaaatttgctgagaactatcgactttattcccgtagccattttgtcaagggccttgagctgatgattctactagttgtgtatgaaatatttggtcagtcatatagaggggctataacttacatcttcatcaccgtatccatgtggttcatggtgggcacttggctctttgcaccattcctgttcaatccttctggatttgagtggcagaagattgtggatgactggactgattggcacaagtggatcagcaatcgtggaggtattggtgtggcaccagagaaaagctgggagtcatggtgggaaaaagagcaggagccccttcgttactctgggaagcgtggtactattgttgaaatactgcttgcattgcgtttctttatctatcaatatggactcgtgtatcatctgaatataacgaagaagataaccaaggataaccagagtgtgctggtttattgcttctcatgggttgtaattttcgttgttttactcgttatgaagaccgtatcagtggggaggaggaggttcagtgcagagttccagctagtgttccggctgatcaagggtctcatatttataacttttacagccatcgtggtaatcctaatagcaatccctggcatgacggttctggacatctttgtttgcatccttgccttcatgcccactggatggggtttgctcctgattgcccaagctatcaggcctgtgattcaaaagatcgggctgtgggggtcgatcaaggctcttgcccggggctacgagatcctaatggggcttctcctgttcacgcccattgctttccttgcctggttcccgttcgtgtccgagttccagaccaggatgctgttcaaccaggccttcagcagaggtctgcagatctcccgtatcctgggaggacacaagaaagaccgagggacgcggagcaaggagtagtagggctgctgattgaaggtccgtctatcgggagttatgtcgtcctggagcggtctatcaggttcagagaatattagggtccgtatgtatgtatgtgtgtgtcgcacctagcaccagtagtatgtatgtatgtatgcgtatgtaggttcagagaatattagggtccctatgtatatgtatgtatcaggattgctatggtcttttggattggaagatctgagatttgctggtgcaatggccagtatctgacatccaaatgttgaaactataattaggctctgctaatagttagctaacttacagctaacaattagtttattagctggcttacgactaagtagtcagattaaagttgggatgtcggtcgccccctttaggtttag

SEQ ID NO: 221436 - DNA, 6521 bp, Zea Mays
aaaacctttccgtccgttactgctatagcgttcatcatcccattccttccccaccaccacctcctgcttctacactactggactgctgctgctgctctccccctcccctcccctcccctcccctcccggccgccgccgccgccgccgcgtgttctctctcatctagggtttcatctccatctagtcgagcattcccgtgctggggtggggagtgggagactcgactcgatttgattcgactccatttcgtgctagcgcctagcgctgcagagcgagtgaggtgacgggaatggcggctccggggcggaggacggcggacgtgtcctcgtcctcgccctctccgtcccctgccgccccctccaccggcaggcgcctcctgcgcacgcagaccgtcgccaacctcggcgagtccatcttcgacagcgaggtcgtgccgtcctcgctcgtcgagatcgcgcccatcctccgcgtcgccaacgaggtcgaggttgaaaacccgcgcgtcgcctacctctgtcgcttctacgctttcgagaaggctcaccgcctcgacccgacttccagtggccgtggtgttcgtcagtttaagaccgcacttctgcagaggcttgagagggaaaatgaccccacactgaagggaagggtccacaagagcgatgctagtgagatgcaacgcttctaccgcgaatactacaggaagtacatccaggcactgcaaactgtcgttaataaggatgaccgtgcgcgcctcactaaggcataccaaacggctgctatcttgtttgaggttttgagggctgttaatgattcccagtccgttgaagtcgatcaagcgattttggatacacacatcaaggtcgaagaaaagaaaaagctgtttctaccttataacattctcccgctcgatcctgaaagtactggcgaagccattatgcgatatccagagattcaagctgctgtttatgctcttcgcaatactagaggtctgccatggccaaaggaccaagacaagaagcctgaagagaagaatactggcaaagaccttcttgattggcttcaggctatgtttgggtttcagaaagacaatgtgtccaaccaaagggaacatttgatactgttgcttgcaaatgttcatataaggaaaatacccaaggctgaccaacaaccgaagttggatgacaaagctctggatgatgtaatgaagaagctatttaagaattataagaagtggtgcaagtacctcggccgcaaaagcagtttatggttgccaaccatccagcaggaagtgcagcagcgtaagcttctttatatgggtctctacctgctgatttggggtgaggcggccaacttgagattcatgccagagtgtatttgttacatctaccatcatatggcttttgaactctatggcatgctggctggaaatgtgagcccaatgactggtgaaaatgttagaccagcatatggtggtgacgaagaagcctttttgacgaaagtcgtgactccaatatacaaagttatagagaaggaagctgaaaggagcaagaccatgaaatcaaagcattcacattggagaaactatgatgatctgaatgagtacttttggtcagttgattgtttccggctaggatggcctatgagagccgacgctgactttttcaaaactccaaaagatccttatctgaatcatttgaatggagagaacagatctgcaggcaatgtccattggatgggaaaagttaattttgtggagatacgttcattttggcacatattccgtagttttgacagaatgtggatcttcttaatattgtccttacaggccatgataattattgcttggaatggtggaacaccaagtgatatctttgatgctggcgtatttaagaaggttttgagcatatttatttctgcagcaattttgaagttgggtcaagcaatcctagatctcgtatttggctggaaagcaaaaagaagcatgtcatttgcagtcaagctacgatatgtcttgaaattaatatctgctgctgcatgggttgtgattttaccagtgacttacgcgtacacttgggagaatcctactggtcttgcaagaacaataaaaagctggcttggggatggtcagaatcagccatctttgtatatactggcagtagtgatatatatggcaccaaacatacttgcttctatgctatttcttttcccatttatgagaagaatcctagagagttcaaatgttaaggtcataacgatcatgatgtggtggtctcagcctcggttatttgttggtagagggatgcacgaaggtgcattctccctcttcaagtataccatgttctggattattcttttagcaatgaagttgattgtaagcttctatattgagatcaaacctctggtacagccaaccaaagatataatgagagaacctatcaggacattccagtggcacgagtttttccctcatggaactaacaatattggtgttgttatatcactctgggctccaataatcctggtatatttcatggacacccaaatttggtatgcactgttctctactctgattggtggcatctacggggcttatcgtcgtcttggtgagatacgtacattaggaatgttgagatctcgctttgaatctttgcctgaggccttcaatgaacgcttgattccttctgatgcaaataagagtaaaggtcttcgtgctgctttttcgagtagacccaaggcttctggtgacgaaagtgagagagagaaaagagctgcaaggtttgctcaaatgtggaacgccattattacaagtttccgcgaagaggatctcatagacaatagggagaaggatctgctactggttccagactgtaaagaccgtgaacttgatatattccaatggccgcctttcctacttgctagcaagatcccaatagcactggatatggcagcagacagtggtggaaaagaccgtgatctgacgaagaggataaagtcagatccatacttttcctttgctatcagagaatgctatgcttcattcaagaacatcatcaataccttagtatttggtcagcgggagaaagatgtcctagtacagattttcacagttgttgataagcatatagaagaggaaactctgataacgggtctcaatatgaagaaccttcctgcactgagcaagaagtttgttgaattacttgagttactgcaaaaaaacaaggaggaagacttgggtcaggtagttattttgttccaagatatgctcgaggtggtcacgagggatataatggaggaacaggacctgctcgagacgttggattctttacatggtgccaatagtagaaaacatgaaggaattacaccgctagatcagcaagaccagttgtttgctaaagctattaagtttcctgtggtggaatcaaatgcatggactgaaaagataaagaggcttcatcttctgttaactgtgaaagagtctgctatggatgttcctattaatcttgatgctaggcggcggatatcgttcttcgcaaattctctatttatggatatgcccaatgctccaaaagttcggaacatgttgcccttctctatcttgactccttattacaaggaagatgttctgttttcattacaaaatctggaagagcgaaatgaggatggagtttccattcttttctacttgcaaaaaatttacccagatgaatggaaaaatttcctcgaaagggtgggctgcaagaatgaagaggtactccgtgaagatgaacagctggaagagaagctttgtctttgggtgtcatatagggggcagacattaacaagaactgtaagagggatgatgtactatcgaaaagctttggagcttcaggcttttcttgatatggccaacaatgatgatcttatgaaaggctacagagcaatggaagtaatgtctgaggactcaccattaaagactcaatgcaaggctatagccgacatgaagtttacatatgttgtctcatgccaactatatggaattcagaagcgttctaatgagccttgcgcacatgatattttgagactaatgacagagtatccatcacttagggtcgcctatattgatgaagttgaagcacccagcaaagatagaatcaagaagattgaaaaggtttactactcagtgttagtgaaggcttctgttacaaaacctaatgagcctggtcagagccttgatcaggtcatctacaagataaaactaccaggtaatgccattttaggtgaaggaaagccagaaaaccagaaccatgcaataatattcacccgaggcgaatgtctccaaactatagatatgaatcaggagcactatatggaggaggctttgaaaatgagaaatctgctgcaagagtttgagaagaaacatggagtgagacatccatcaatacttggagtcagagaacacatatttacgggcaggaaactagttttgtgacaattggacaacgagtgcttgccaatccactgagggttcggtttcattatggccatcctgatgtcttcgatcgtcttttccacgttacgaggggcggtgtcagtaaagcatccaaaattatcaatcttagtgaggacatctttgcaggattcaattccacattgcgcgaaggcaatgttactcaccatgaatacatgcaagttggcaaaggaagggatgtaggtctcaatcaaatatctctgtttgaggcaaagatagcaaatggcaatggcgaacaaacgctgagccgtgacatctaccggctaggtcatcgctttgatttcttcaggatgctgtcttgttactacacaacaattggtttctacttcagtacaatgattacagtatggactgtatatgttttcctctacggccggctatatcttgtacttagtggactcgatgaagcactggctactggaaagaggtttgtgcacaatacacctctccaggttgctcttgcgtcagagtcttttgtgcaacttggatttttgatggcgctgcccatgatgatggaaatcggtttggagagaggattcagaactgcattgagtgattttatactgatgcagcttcagttggcctctgttttcttcacattctcgttgggaacaaaaactcactactacggaaggacgttactccatggaggagcggaatacagagccactggacgtgggtttgtggtgttccatgccaaatttgctgagaactatcgactttattcccgtagccattttgtcaagggccttgagctgatgattctactagttgtgtatgaaatatttggtcagtcatatagaggggctataacttacatcttcatcaccgtatccatgtggttcatggtgggcacttggctctttgcaccattcctgttcaatccttctggatttgagtggcagaagattgtggatgactggactgattggcacaagtggatcagcaatcgtggaggtattggtgtggcaccagagaaaagctgggagtcatggtgggaaaaagagcaggagccccttcgttactctgggaagcgtggtactattgttgaaatactgcttgcattgcgtttctttatctatcaatatggactcgtgtatcatctgaatataacgaagaagataaccaaggataaccagagtgtgctggtttattgcttctcatgggttgtaattttcgttgttttactcgttatgaagaccgtatcagtggggaggaggaggttcagtgcagagttccagctagtgttccggctgatcaagggtctcatatttataacttttacagccatcgtggtaatcctaatagcaatccctggcatgacggttctggacatctttgtttgcatccttgccttcatgcccactggatggggtttgctcctgattgcccaagctatcaggcctgtgattcaaaagatcgggctgtgggggtcgatcaaggctcttgcccggggctacgagatcctaatggggcttctcctgttcacgcccattgctttccttgcctggttcccgttcgtgtccgagttccagaccaggatgctgttcaaccaggccttcagcagaggtctgcagatctcccgtatcctgggaggacacaagaaagaccgagggacgcggagcaaggagtagtagggctgctgattgaaggtccgtctatcgggagttatgtcgtcctggagcggtctatcaggttcagagaatattagggtccgtatgtatgtatgtgtgtgtcgcacctagcaccagtagtatgtatgtatgtatgcgtatgtaggttcagagaatattagggtccctatgtatatgtatgtatcaggattgctatggtcttttggattggaagatctgagatttgctggtgcaatggccagtatctgacatccaaatgttgaaactataattaggctctgctaatagttagctaacttacagctaacaattagtttattagctggcttacgactaagtagtcagattaaagttgggatgtcggtcgccccctttaggtttag

SEQ ID NO: 221437 - DNA, 6515 bp, Zea Mays
aaaacctttccgtccgttactgctatagcgttcatcatcccattccttccccaccaccacctcctgcttctacactactggactgctgctgctgctctccccctcccctcccctcccctcccctcccggccgccgccgccgccgccgcgtgttctctctcatctagggtttcatctccatctagtcgagcattcccgtgctggggtggggagtgggagactcgactcgatttgattcgactccatttcgtgctagcgcctagcgctgcagagcgagtgaggtgacgggaatggcggctccggggcggaggacggcggacgtgtcctcgtcctcgccctctccgtcccctgccgccccctccaccggcaggcgcctcctgcgcacgcagaccgtcgccaacctcggcgagtccatcttcgacagcgaggtcgtgccgtcctcgctcgtcgagatcgcgcccatcctccgcgtcgccaacgaggtcgaggttgaaaacccgcgcgtcgcctacctctgtcgcttctacgctttcgagaaggctcaccgcctcgacccgacttccagtggccgtggtgttcgtcagtttaagaccgcacttctgcagaggcttgagagggaaaatgaccccacactgaagggaagggtccacaagagcgatgctagtgagatgcaacgcttctaccgcgaatactacaggaagtacatccaggcactgcaaactgtcgttaataaggatgaccgtgcgcgcctcactaaggcataccaaacggctgctatcttgtttgaggttttgagggctgttaatgattcccagtccgttgaagtcgatcaagcgattttggatacacacatcaaggtcgaagaaaagaaaaagctgtttctaccttataacattctcccgctcgatcctgaaagtactggcgaagccattatgcgatatccagagattcaagctgctgtttatgctcttcgcaatactagaggtctgccatggccaaaggaccaagacaagaagcctgaagagaagaatactggcaaagaccttcttgattggcttcaggctatgtttgggtttcagaaagacaatgtgtccaaccaaagggaacatttgatactgttgcttgcaaatgttcatataaggaaaatacccaaggctgaccaacaaccgaagttggatgacaaagctctggatgatgtaatgaagaagctatttaagaattataagaagtggtgcaagtacctcggccgcaaaagcagtttatggttgccaaccatccagcaggaagtgcagcagcgtaagcttctttatatgggtctctacctgctgatttggggtgaggcggccaacttgagattcatgccagagtgtatttgttacatctaccatcatatggcttttgaactctatggcatgctggctggaaatgtgagcccaatgactggtgaaaatgttagaccagcatatggtggtgacgaagaagcctttttgacgaaagtcgtgactccaatatacaaagttatagagaaggaagctgaaaggagcaagaccatgaaatcaaagcattcacattggagaaactatgatgatctgaatgagtacttttggtcagttgattgtttccggctaggatggcctatgagagccgacgctgactttttcaaaactccaaaagatccttatctgaatcatttgaatggagagaacagatctgcaggcaatgtccattggatgggaaaagttaattttgtggagatacgttcattttggcacatattccgtagttttgacagaatgtggatcttcttaatattgtccttacaggccatgataattattgcttggaatggtggaacaccaagtgatatctttgatgctggcgtatttaagaaggttttgagcatatttatttctgcagcaattttgaagttgggtcaagcaatcctagatctcgtatttggctggaaagcaaaaagaagcatgtcatttgcagtcaagctacgatatgtcttgaaattaatatctgctgctgcatgggttgtgattttaccagtgacttacgcgtacacttgggagaatcctactggtcttgcaagaacaataaaaagctggcttggggatggtcagaatcagccatctttgtatatactggcagtagtgatatatatggcaccaaacatacttgcttctatgctatttcttttcccatttatgagaagaatcctagagagttcaaatgttaaggtcataacgatcatgatgtggtggtctcagcctcggttatttgttggtagagggatgcacgaaggtgcattctccctcttcaagtatgttaaaatgttaacccatcttcacattgtcttgtcttgtattgcatccttctcaattactgaacattgttgtcctgacaggtataccatgttctggattattcttttagcaatgaagttgattgtaagcttctatattgagatcaaacctctggtacagccaaccaaagatataatgagagaacctatcaggacattccagtggcacgagtttttccctcatggaactaacaatattggtgttgttatatcactctgggctccaataatcctggtatatttcatggacacccaaatttggtatgcactgttctctactctgattggtggcatctacggggcttatcgtcgtcttggtgagatacgtacattaggaatgttgagatctcgctttgaatctttgcctgaggccttcaatgaacgcttgattccttctgatgcaaataagagtaaaggtcttcgtgctgctttttcgagtagacccaaggcttctggtgacgaaagtgagagagagaaaagagctgcaaggtttgctcaaatgtggaacgccattattacaagtttccgcgaagaggatctcatagacaatagggagaaggatctgctactggttccagactgtaaagaccgtgaacttgatatattccaatggccgcctttcctacttgctagcaagatcccaatagcactggatatggcagcagacagtggtggaaaagaccgtgatctgacgaagaggataaagtcagatccatacttttcctttgctatcagagaatgctatgcttcattcaagaacatcatcaataccttagtatttggtcagcgggagaaagatgtcctagtacagattttcacagttgttgataagcatatagaagaggaaactctgataacgggtctcaatatgaagaaccttcctgcactgagcaagaagtttgttgaattacttgagttactgcaaaaaaacaaggaggaagacttgggtcaggtagttattttgttccaagatatgctcgaggtggtcacgagggatataatggaggaacaggacctgctcgagacgttggattctttacatggtgccaatagtagaaaacatgaaggaattacaccgctagatcagcaagaccagttgtttgctaaagctattaagtttcctgtggtggaatcaaatgcatggactgaaaagataaagaggcttcatcttctgttaactgtgaaagagtctgctatggatgttcctattaatcttgatgctaggcggcggatatcgttcttcgcaaattctctatttatggatatgcccaatgctccaaaagttcggaacatgttgcccttctctatcttgactccttattacaaggaagatgttctgttttcattacaaaatctggaagagcgaaatgaggatggagtttccattcttttctacttgcaaaaaatttacccagatgaatggaaaaatttcctcgaaagggtgggctgcaagaatgaagaggtactccgtgaagatgaacagctggaagagaagctttgtctttgggtgtcatatagggggcagacattaacaagaactgtaagagggatgatgtactatcgaaaagctttggagcttcaggcttttcttgatatggccaacaatgatgatcttatgaaaggctacagagcaatggaagtaatgtctgaggactcaccattaaagactcaatgcaaggctatagccgacatgaagtttacatatgttgtctcatgccaactatatggaattcagaagcgttctaatgagccttgcgcacatgatattttgagactaatgacagagtatccatcacttagggtcgcctatattgatgaagttgaagcacccagcaaagatagaatcaagaagattgaaaaggtttactactcagtgttagtgaaggcttctgttacaaaacctaatgagcctggtcagagccttgatcaggtcatctacaagataaaactaccaggtaatgccattttaggtgaaggaaagccagaaaaccagaaccatgcaataatattcacccgaggcgaatgtctccaaactatagatatgaatcaggagcactatatggaggaggctttgaaaatgagaaatctgctgcaagagtttgagaagaaacatggagtgagacatccatcaatacttggagtcagagaacacatatttacgggcaggaaactagttttgtgacaattggacaacgagtgcttgccaatccactgagggttcggtttcattatggccatcctgatgtcttcgatcgtcttttccacgttacgaggggcggtgtcagtaaagcatccaaaattatcaatcttagtgaggacatctttgcaggattcaattccacattgcgcgaaggcaatgttactcaccatgaatacatgcaagttggcaaaggaagggatgtaggtctcaatcaaatatctctgtttgaggcaaagatagcaaatggcaatggcgaacaaacgctgagccgtgacatctaccggctaggtcatcgctttgatttcttcaggatgctgtcttgttactacacaacaattggtttctacttcagtacaatgattacagtatggactgtatatgttttcctctacggccggctatatcttgtacttagtggactcgatgaagcactggctactggaaagaggtttgtgcacaatacacctctccaggttgctcttgcgtcagagtcttttgtgcaacttggatttttgatggcgctgcccatgatgatggaaatcggtttggagagaggattcagaactgcattgagtgattttatactgatgcagcttcagttggcctctgttttcttcacattctcgttgggaacaaaaactcactactacggaaggacgttactccatggaggagcggaatacagagccactggacgtgggtttgtggtgttccatgccaaatttgctgagaactatcgactttattcccgtagccattttgtcaagggccttgagctgatgattctactagttgtgtatgaaatatttggtcagtcatatagaggggctataacttacatcttcatcaccgtatccatgtggttcatggtgggcacttggctctttgcaccattcctgttcaatccttctggatttgagtggcagaagattgtggatgactggactgattggcacaagtggatcagcaatcgtggaggtattggtgtggcaccagagaaaagctgggagtcatggtgggaaaaagagcaggagccccttcgttactctgggaagcgtggtactattgttgaaatactgcttgcattgcgtttctttatctatcaatatggactcgtgtatcatctgaatataacgaagaagataaccaaggataaccagagtgtgctggtttattgcttctcatgggttgtaattttcgttgttttactcgttatgaagaccgtatcagtggggaggaggaggttcagtgcagagttccagctagtgttccggctgatcaagggtctcatatttataacttttacagccatcgtgattgcccaagctatcaggcctgtgattcaaaagatcgggctgtgggggtcgatcaaggctcttgcccggggctacgagatcctaatggggcttctcctgttcacgcccattgctttccttgcctggttcccgttcgtgtccgagttccagaccaggatgctgttcaaccaggccttcagcagaggtctgcagatctcccgtatcctgggaggacacaagaaagaccgagggacgcggagcaaggagtagtagggctgctgattgaaggtccgtctatcgggagttatgtcgtcctggagcggtctatcaggttcagagaatattagggtccgtatgtatgtatgtgtgtgtcgcacctagcaccagtagtatgtatgtatgtatgcgtatgtaggttcagagaatattagggtccctatgtatatgtatgtatcaggattgctatggtcttttggattggaagatctgagatttgctggtgcaatggccagtatctgacatccaaatgttgaaactataattaggctctgctaatagttagctaacttacagctaacaattagtttattagctggcttacgactaagtagtcagattaaagttgggatgtcggtcgccccctttaggtttag

SEQ ID NO: 221438 - DNA, 6451 bp, Zea Mays
ctcaactagggtcccaaactaaaagggtaacaaagcctagcaaaacctttccgtccgttactgctatagcgttcatcatcccattccttccccaccaccacctcctgcttctacactactggactgctgctgctgctctccccctcccctcccctcccctcccctcccggccgccgccgccgccgccgcgtgttctctctcatctagggtttcatctccatctagtcgagcattcccgtgctggggtggggagtgggagactcgactcgatttgattcgactccatttcgtgctagcgcctagcgctgcagagcgagtgaggtgacgggaatggcggctccggggcggaggacggcggacgtgtcctcgtcctcgccctctccgtcccctgccgccccctccaccggcaggcgcctcctgcgcacgcagaccgtcgccaacctcggcgagtccatcttcgacagcgaggtcgtgccgtcctcgctcgtcgagatcgcgcccatcctccgcgtcgccaacgaggtcgaggttgaaaacccgcgcgtcgcctacctctgtcgcttctacgctttcgagaaggctcaccgcctcgacccgacttccagtggccgtggtgttcgtcagtttaagaccgcacttctgcagaggcttgagagggaaaatgaccccacactgaagggaagggtccacaagagcgatgctagtgagatgcaacgcttctaccgcgaatactacaggaagtacatccaggcactgcaaactgtcgttaataaggatgaccgtgcgcgcctcactaaggcataccaaacggctgctatcttgtttgaggttttgagggctgttaatgattcccagtccgttgaagtcgatcaagcgattttggatacacacatcaaggtcgaagaaaagaaaaagctgtttctaccttataacattctcccgctcgatcctgaaagtactggcgaagccattatgcgatatccagagattcaagctgctgtttatgctcttcgcaatactagaggtctgccatggccaaaggaccaagacaagaagcctgaagagaagaatactggcaaagaccttcttgattggcttcaggctatgtttgggtttcagaaagacaatgtgtccaaccaaagggaacatttgatactgttgcttgcaaatgttcatataaggaaaatacccaaggctgaccaacaaccgaagttggatgacaaagctctggatgatgtaatgaagaagctatttaagaattataagaagtggtgcaagtacctcggccgcaaaagcagtttatggttgccaaccatccagcaggaagtgcagcagcgtaagcttctttatatgggtctctacctgctgatttggggtgaggcggccaacttgagattcatgccagagtgtatttgttacatctaccatcatatggcttttgaactctatggcatgctggctggaaatgtgagcccaatgactggtgaaaatgttagaccagcatatggtggtgacgaagaagcctttttgacgaaagtcgtgactccaatatacaaagttatagagaaggaagctgaaaggagcaagaccatgaaatcaaagcattcacattggagaaactatgatgatctgaatgagtacttttggtcagttgattgtttccggctaggatggcctatgagagccgacgctgactttttcaaaactccaaaagatccttatctgaatcatttgaatggagagaacagatctgcaggcaatgtccattggatgggaaaagttaattttgtggagatacgttcattttggcacatattccgtagttttgacagaatgtggatcttcttaatattgtccttacaggccatgataattattgcttggaatggtggaacaccaagtgatatctttgatgctggcgtatttaagaaggttttgagcatatttatttctgcagcaattttgaagttgggtcaagcaatcctagatctcgtatttggctggaaagcaaaaagaagcatgtcatttgcagtcaagctacgatatgtcttgaaattaatatctgctgctgcatgggttgtgattttaccagtgacttacgcgtacacttgggagaatcctactggtcttgcaagaacaataaaaagctggcttggggatggtcagaatcagccatctttgtatatactggcagtagtgatatatatggcaccaaacatacttgcttctatgctatttcttttcccatttatgagaagaatcctagagagttcaaatgttaaggtcataacgatcatgatgtggtggtctcagcctcggttatttgttggtagagggatgcacgaaggtgcattctccctcttcaagtataccatgttctggattattcttttagcaatgaagttgattgtaagcttctatattgagatcaaacctctggtacagccaaccaaagatataatgagagaacctatcaggacattccagtggcacgagtttttccctcatggaactaacaatattggtgttgttatatcactctgggctccaataatcctggtatatttcatggacacccaaatttggtatgcactgttctctactctgattggtggcatctacggggcttatcgtcgtcttggtgagatacgtacattaggaatgttgagatctcgctttgaatctttgcctgaggccttcaatgaacgcttgattccttctgatgcaaataagagtaaaggtcttcgtgctgctttttcgagtagacccaaggcttctggtgacgaaagtgagagagagaaaagagctgcaaggtttgctcaaatgtggaacgccattattacaagtttccgcgaagaggatctcatagacaatagggagaaggatctgctactggttccagactgtaaagaccgtgaacttgatatattccaatggccgcctttcctacttgctagcaagatcccaatagcactggatatggcagcagacagtggtggaaaagaccgtgatctgacgaagaggataaagtcagatccatacttttcctttgctatcagagaatgctatgcttcattcaagaacatcatcaataccttagtatttggtcagcgggagaaagatgtcctagtacagattttcacagttgttgataagcatatagaagaggaaactctgataacgggtctcaatatgaagaaccttcctgcactgagcaagaagtttgttgaattacttgagttactgcaaaaaaacaaggaggaagacttgggtcaggtagttattttgttccaagatatgctcgaggtggtcacgagggatataatggaggaacaggacctgctcgagacgttggattctttacatggtgccaatagtagaaaacatgaaggaattacaccgctagatcagcaagaccagttgtttgctaaagctattaagtttcctgtggtggaatcaaatgcatggactgaaaagataaagaggcttcatcttctgttaactgtgaaagagtctgctatggatgttcctattaatcttgatgctaggcggcggatatcgttcttcgcaaattctctatttatggatatgcccaatgctccaaaagttcggaacatgttgcccttctctatcttgactccttattacaaggaagatgttctgttttcattacaaaatctggaagagcgaaatgaggatggagtttccattcttttctacttgcaaaaaatttacccagatgaatggaaaaatttcctcgaaagggtgggctgcaagaatgaagaggtactccgtgaagatgaacagctggaagagaagctttgtctttgggtgtcatatagggggcagacattaacaagaactgtaagagggatgatgtactatcgaaaagctttggagcttcaggcttttcttgatatggccaacaatgatgatcttatgaaaggctacagagcaatggaagtaatgtctgaggactcaccattaaagactcaatgcaaggctatagccgacatgaagtttacatatgttgtctcatgccaactatatggaattcagaagcgttctaatgagccttgcgcacatgatattttgagactaatgacagagtatccatcacttagggtcgcctatattgatgaagttgaagcacccagcaaagatagaatcaagaagattgaaaaggtttactactcagtgttagtgaaggcttctgttacaaaacctaatgagcctggtcagagccttgatcaggtcatctacaagataaaactaccaggtaatgccattttaggtgaaggaaagccagaaaaccagaaccatgcaataatattcacccgaggcgaatgtctccaaactatagatatgaatcaggagcactatatggaggaggctttgaaaatgagaaatctgctgcaagagtttgagaagaaacatggagtgagacatccatcaatacttggagtcagagaacacatatttacgggcagtgtgtcatcccttgcttggttcatgtcaaatcaggaaactagttttgtgacaattggacaacgagtgcttgccaatccactgagggttcggtttcattatggccatcctgatgtcttcgatcgtcttttccacgttacgaggggcggtgtcagtaaagcatccaaaattatcaatcttagtgaggacatctttgcaggattcaattccacattgcgcgaaggcaatgttactcaccatgaatacatgcaagttggcaaaggaagggatgtaggtctcaatcaaatatctctgtttgaggcaaagatagcaaatggcaatggcgaacaaacgctgagccgtgacatctaccggctaggtcatcgctttgatttcttcaggatgctgtcttgttactacacaacaattggtttctacttcagtacaatgattacagtatggactgtatatgttttcctctacggccggctatatcttgtacttagtggactcgatgaagcactggctactggaaagagcttcagttggcctctgttttcttcacattctcgttgggaacaaaaactcactactacggaaggacgttactccatggaggagcggaatacagagccactggacgtgggtttgtggtgttccatgccaaatttgctgagaactatcgactttattcccgtagccattttgtcaagggccttgagctgatgattctactagttgtgtatgaaatatttggtcagtcatatagaggggctataacttacatcttcatcaccgtatccatgtggttcatggtgggcacttggctctttgcaccattcctgttcaatccttctggatttgagtggcagaagattgtggatgactggactgattggcacaagtggatcagcaatcgtggaggtattggtgtggcaccagagaaaagctgggagtcatggtgggaaaaagagcaggagccccttcgttactctgggaagcgtggtactattgttgaaatactgcttgcattgcgtttctttatctatcaatatggactcgtgtatcatctgaatataacgaagaagataaccaaggataaccagagtgtgctggtttattgcttctcatgggttgtaattttcgttgttttactcgttatgaagaccgtatcagtggggaggaggaggttcagtgcagagttccagctagtgttccggctgatcaagggtctcatatttataacttttacagccatcgtggtaatcctaatagcaatccctggcatgacggttctggacatctttgtttgcatccttgccttcatgcccactggatggggtttgctcctgattgcccaagctatcaggcctgtgattcaaaagatcgggctgtgggggtcgatcaaggctcttgcccggggctacgagatcctaatggggcttctcctgttcacgcccattgctttccttgcctggttcccgttcgtgtccgagttccagaccaggatgctgttcaaccaggccttcagcagaggtctgcagatctcccgtatcctgggaggacacaagaaagaccgagggacgcggagcaaggagtagtagggctgctgattgaaggtccgtctatcgggagttatgtcgtcctggagcggtctatcaggttcagagaatattagggtccgtatgtatgtatgtgtgtgtcgcacctagcaccagtagtatgtatgtatgtatgcgtatgtaggttcagagaatattagggtccctatgtatatgtatgtatcaggattgctatggtcttttggattggaagatctgagatttgctggtgcaatggccagtatctgacatccaaatgttgaaactataattaggctctgctaatagttagctaacttacagctaacaattagtttattagctggcttacgactaagtagtcagattaaagttgggatgtcggtcgccccctttaggtttag

SEQ ID NO: 221439 - DNA, 4411 bp, Zea Mays
atggggcggatcggcaccgccgtccgaggaggaagggctcgaatcagaccatctctgggacctagaacgttccgcatgggaagttgggttgcaaggagcagcgggtcccgacgccagaggggtggaagacgacggggtggccgtcggtttcggggtggttgctggcgtgaggctggtggaggggttggcgccgggaagggaagggacaggggcggaagacggagggaagaccgaagggcaggagacggaagggcggccatcttatctagatgcatcgaatggggagagacaccccctgacttttttttcttaagttggtgccgtgactcgaacccgggctggctcagcagaccgcttctttggcgtgtccggctgaccagttgcaccatcaaacctctggtacagccaaccaaagatataatgagagaacctatcaggacattccagtggcacgagtttttccctcatggaactaacaatattggtgttgttatatcactctgggctccaataatcctggtatatttcatggacacccaaatttggtatgcactgttctctactctgattggtggcatctacggggcttatcgtcgtcttggtgagatacgtacattaggaatgttgagatctcgctttgaatctttgcctgaggccttcaatgaacgcttgattccttctgatgcaaataagagtaaaggtcttcgtgctgctttttcgagtagacccaaggcttctggtgacgaaagtgagagagagaaaagagctgcaaggtttgctcaaatgtggaacgccattattacaagtttccgcgaagaggatctcatagacaatagggagaaggatctgctactggttccagactgtaaagaccgtgaacttgatatattccaatggccgcctttcctacttgctagcaagatcccaatagcactggatatggcagcagacagtggtggaaaagaccgtgatctgacgaagaggataaagtcagatccatacttttcctttgctatcagagaatgctatgcttcattcaagaacatcatcaataccttagtatttggtcagcgggagaaagatgtcctagtacagattttcacagttgttgataagcatatagaagaggaaactctgataacgggtctcaatatgaagaaccttcctgcactgagcaagaagtttgttgaattacttgagttactgcaaaaaaacaaggaggaagacttgggtcaggtagttattttgttccaagatatgctcgaggtggtcacgagggatataatggaggaacaggacctgctcgagacgttggattctttacatggtgccaatagtagaaaacatgaaggaattacaccgctagatcagcaagaccagttgtttgctaaagctattaagtttcctgtggtggaatcaaatgcatggactgaaaagataaagaggcttcatcttctgttaactgtgaaagagtctgctatggatgttcctattaatcttgatgctaggcggcggatatcgttcttcgcaaattctctatttatggatatgcccaatgctccaaaagttcggaacatgttgcccttctctatcttgactccttattacaaggaagatgttctgttttcattacaaaatctggaagagcgaaatgaggatggagtttccattcttttctacttgcaaaaaatttacccagatgaatggaaaaatttcctcgaaagggtgggctgcaagaatgaagaggtactccgtgaagatgaacagctggaagagaagctttgtctttgggtgtcatatagggggcagacattaacaagaactgtaagagggatgatgtactatcgaaaagctttggagcttcaggcttttcttgatatggccaacaatgatgatcttatgaaaggctacagagcaatggaagtaatgtctgaggactcaccattaaagactcaatgcaaggctatagccgacatgaagtttacatatgttgtctcatgccaactatatggaattcagaagcgttctaatgagccttgcgcacatgatattttgagactaatgacagagtatccatcacttagggtcgcctatattgatgaagttgaagcacccagcaaagatagaatcaagaagattgaaaaggtttactactcagtgttagtgaaggcttctgttacaaaacctaatgagcctggtcagagccttgatcaggtcatctacaagataaaactaccaggtaatgccattttaggtgaaggaaagccagaaaaccagaaccatgcaataatattcacccgaggcgaatgtctccaaactatagatatgaatcaggagcactatatggaggaggctttgaaaatgagaaatctgctgcaagagtttgagaagaaacatggagtgagacatccatcaatacttggagtcagagaacacatatttacgggcagtgtgtcatcccttgcttggttcatgtcaaatcaggaaactagttttgtgacaattggacaacgagtgcttgccaatccactgagggttcggtttcattatggccatcctgatgtcttcgatcgtcttttccacgttacgaggggcggtgtcagtaaagcatccaaaattatcaatcttagtgaggacatctttgcaggattcaattccacattgcgcgaaggcaatgttactcaccatgaatacatgcaagttggcaaaggaagggatgtaggtctcaatcaaatatctctgtttgaggcaaagatagcaaatggcaatggcgaacaaacgctgagccgtgacatctaccggctaggtcatcgctttgatttcttcaggatgctgtcttgttactacacaacaattggtttctacttcagtacaatgattacagtatggactgtatatgttttcctctacggccggctatatcttgtacttagtggactcgatgaagcactggctactggaaagagcttcagttggcctctgttttcttcacattctcgttgggaacaaaaactcactactacggaaggacgttactccatggaggagcggaatacagagccactggacgtgggtttgtggtgttccatgccaaatttgctgagaactatcgactttattcccgtagccattttgtcaagggccttgagctgatgattctactagttgtgtatgaaatatttggtcagtcatatagaggggctataacttacatcttcatcaccgtatccatgtggttcatggtgggcacttggctctttgcaccattcctgttcaatccttctggatttgagtggcagaagattgtggatgactggactgattggcacaagtggatcagcaatcgtggaggtattggtgtggcaccagagaaaagctgggagtcatggtgggaaaaagagcaggagccccttcgttactctgggaagcgtggtactattgttgaaatactgcttgcattgcgtttctttatctatcaatatggactcgtgtatcatctgaatataacgaagaagataaccaaggataaccagagtgtgctggtttattgcttctcatgggttgtaattttcgttgttttactcgttatgaagaccgtatcagtggggaggaggaggttcagtgcagagttccagctagtgttccggctgatcaagggtctcatatttataacttttacagccatcgtggtaatcctaatagcaatccctggcatgacggttctggacatctttgtttgcatccttgccttcatgcccactggatggggtttgctcctgattgcccaagctatcaggcctgtgattcaaaagatcgggctgtgggggtcgatcaaggctcttgcccggggctacgagatcctaatggggcttctcctgttcacgcccattgctttccttgcctggttcccgttcgtgtccgagttccagaccaggatgctgttcaaccaggccttcagcagaggtctgcagatctcccgtatcctgggaggacacaagaaagaccgagggacgcggagcaaggagtagtagggctgctgattgaaggtccgtctatcgggagttatgtcgtcctggagcggtctatcaggttcagagaatattagggtccgtatgtatgtatgtgtgtgtcgcacctagcaccagtagtatgtatgtatgtatgcgtatgtaggttcagagaatattagggtccctatgtatatgtatgtatcaggattgctatggtcttttggattggaagatctgagatttgctggtgcaatggccagtatctgacatccaaatgttgaaactataattaggctctgctaatagttagctaacttacagctaacaattagtttattagctggcttacgactaagtagtcagattaaagttgggatgtcggtcgccccctttaggtttag

SEQ ID NO: 221440 - DNA, 1227 bp, Zea Mays
cttttagcaatgaagttgattatcaaacctctggtacagccaaccaaagatataatgagagaacctatcaggacattccagtggcacgagtttttccctcatggaactaacaatattggtgttgttatatcactctgggctccaataatcctggtatatttcatggacacccaaatttggtatgcactgttctctactctgattggtggcatctacggggcttatcgtcgtcttggtgagatacgtacattaggaatgttgagatctcgctttgaatctttgcctgaggccttcaatgaacgcttgattccttctgatgcaaataagagtaaaggtcttcgtgctgctttttcgagtagacccaaggcttctggtgacgaaagtgagagagagaaaagagctgcaaggtttgctcaaatgtggaacgccattattacaagtttccgcgaagaggatctcatagacaatagggagaaggatctgctactggttccagactgtaaagaccgtgaacttgatatattccaatggccgcctttcctacttgctagcaagatcccaatagcactggatatggcagcagacagtggtggaaaagaccgtgatctgacgaagaggataaagtcagatccatacttttcctttgctatcagagaatgctatgcttcattcaagaacatcatcaataccttagtatttggtcagcgggagaaagatgtcctagtacagattttcacagttgttgataagcatatagaagaggaaactctgataacgggtctcaatatgaagaaccttcctgcactgagcaagaagtttgttgaattacttgagttactgcaaaaaaacaaggaggaagacttgggtcaggtagttattttgttccaagatatgctcgaggtggtcacgagggatataatggaggaacaggacctgctcgagacgttggattctttacatggtgccaatagtagaaaacatgaaggaattacaccgctagatcagcaagaccagttgtttgctaaagctattaagtttcctgtggtggaatcaaatgcatggactgaaaagataaagaggcttcatcttctgttaactgtgaaagagtctgctatggatgttcctattaatcttgatgctaggcggcggatatcgttcttcgcaaattctctatttatggatatgcccaatgctccaaaagttcggaacatgttgcccttctcgtaa

SEQ ID NO: 221441 - DNA, 1106 bp, Zea Mays
atcccgcgccaggccaagtgatccgcaactccggtttcgttacgcgcgcttgctgctccctctcaccctgtcgctctcgcctctcaggctctcactcacagactcactcacctctctagactctagtagtataaactaccggcgcagcttgccctgctagctcacctcgtgctacctgcactgctcgatccaaaccgtccagtccaacaatccaatccaagcagagtttcagtcgattatcatcacagattccacaggcacaggcggaggtgggttcgggtctggctacgggggagaagcagaggacggtggtggtggtcgctgtggacgacagcgaccacagctaccacgcgctggagtggacggtgcggcacgtggcggcgcccggcggcgtggcgggcggggggggccgacctcgtcatcgtccacgccaagccctcgccgtcctccatcgtcagcttcggcggccccggagccggcgaggcgatcaggcacgtggacgccggcctgcgcaagacggcggaggccgtcgtcgccagggcgcgccgcgtctgcgccgccgccagctcggcgcgcgccctggtcgaggtggtggaaggcgagcccaggaccgtgctgtgcagcgcggcggagaagcaccgcgccgacctgctcgtgctgggcagccacggctacggcgccgtcaagagggcgctgctcgggagcgtcagcgactactgcgcgcaccacgcgcactgctccgtcatgatagtcaagcagccaacaaaatccaaatgaaaacaaaaaagaaaaaaaaattgacagcctgctgatgatgatgaaggtggtgatcgagcggccgcagcgcaaatccatgttaccccgttagcgattacaggcagcagccagcccacaggcccagtgatagcgcgctgtgtataaatatgtgcagcgtgtggagtgtgtcctgtgtatgtgttctgtgttgtttaattttgttgcgagtaactgcatgtaaaataaaggagatagggaaatagtaaattagcttccagcgtgaggaggaggtttgactagccacatatccatctaacagaattagattaaaaaaagtgaaatgatttcac

SEQ ID NO: 221442 - DNA, 293 bp, Zea Mays
cgcgcacctagcatcccttggccacaccaaatccgaccctgagccaaaccagtaaagtgctgtgtgtttgtcacagacagcagtgagagaaagcgaggagacatggactgggggaagccgcctccgtcattcatcgtccacaatgccgatggggcctggggtcaattgcttgctggtgatgatgcttcgtcgggggaccgcaccgatccgcagatggggtatcgccgcgctatgcactgcgaggtttcgagtcacctgaagatcaccctggtaactggaatctcaagtgccag

SEQ ID NO: 221443 - DNA, 365 bp, Zea Mays
atggcgatctgtgataggtcatcgggccgccaagcgattcttcctgcgggagcggatcttccctgttcgttgagcggacgatcttcgatggcgcagagggtcatcttctccgcgaaagttcgtgaaagtagttcaatcttgattttctatgatctgttcactgaacttgatgactactgtactcaggttattctggctcctcgactcctggtcattcagatggtgattcttctaacagaacgaactgatgctgaagaagcactacaaggattaaatggatcactcattggaaagcaggcagttcgcctttcatgggtccgcagcccatcgcataagcaggggtgactccgtcaacaggaggaaca

SEQ ID NO: 221444 - DNA, 604 bp, Zea Mays
caaaggattggaggaggacgtcgccgaggccagcggatcggaggagtttgtcatcgaaggatgtcgaagccacccacgtctcgtgcggccgccatcaccgaagacaaccgcgcctcgtgtgaccgccgaagcgacccgtgtctaccgtggccgccaccgccactactgaagcctatcgcggctcgcgcaaccgccatcgtcaccggatgcaaacatacttgatgtgtttgtccccagggtgcggcaaacatttgatacaagggaagaagtctacctcttttaccttgactatgcaaagttggctgattttagtgtcaggacaaagagatgcaactgctggtatggttcgaaaattgtagcattctgtcgggagcgtgcggaagggacgaagacgaagtgtcggttcggcctgggtggggcggttggctcggaccaggatgcaaacatacttgatgtgtttgtccacagggtgcggcaaacattttatacaagggaagaagcctacctcttttaccttgactatgcaaagttggctggttttagtgtcaggataaagaggtgtaattgcaactgctggtgtggtgtgattgcaaccccgcattag

SEQ ID NO: 221445 - DNA, 4554 bp, Zea Mays
atgccggcgaatggcaagctctcggcgaagccctccccctcgccgatggttgctcccgcctcgcgccccaaatttacagctgttacctttctcggtgactgcgacgacgacgatgacttccaacctcctcgcccccgccccttgaagccttgcattggcgccgccgcacttcggttccgtaagaagctcaaggctccatcctccgggaaggagaatagttccgccgccggtggtgccgttactgtggtgggggtcgcttcgacggccgtgaaggatgccgaaaccctagccgccggctctagggttagtggcgacgttcccaaaacgaagagacgaaagaccggtgaaagttgcggcctgtcgaggtacggatctgatagcactaaactaagctgtaaaccgaagatagaattggatagatacggatatggcaaagggtgctgcagtttcttgcccagtgcgatagactcgacggttttggcgctcggtgcggtatgtgattttggagttaggcgttgtgatgaggctcaaatagctgtctccaggcattgtacctcagttcttgaggcggggcacgccacagaagagctgacaccgacaggctctgggtgtgatccacccaaaacggagaagaagccgggcagttctgaagctgtggagggacatcacgactccaggttgattgaaccgaggcttgttgaatcagatgcaaacctcgagtttgtaactgggattcttggctcactgactgataaacaggacacgaagaaagcaaacggggtggtatttggatgtggtgttggatttcagaatgggaactatcacttggattctctacagccagagcttctaacgtcgaactcaaagtatgattctagagtttgtgttagcaatgaaatccaagagcctggtttgggagcctgtaacttgatttcacaggagaggaaagtagcagctggacattctgcatgtgcaacccctgaaaatgtgactgcagagaataaatcaagtgcacctgaggcttgtaaggggcaatgccactccgattcatctgcatcaaagcttccagaatcccatatgatccatgactttgaagttgatggttgcgataattttgagattgggacccagctcagtgagctcattaacttgtgtatgaaggattccatagagggacaatcaaactttggtgcagctcccatggaacagaacactttagactctaagagactcagttcagactatgaagcgaaatgccctctatgtggatcggatatttctgatttaagcgaggagctccggcagctgcatactaacaattgccttgacgaaccagctaaggaatctagtcccaaccataaaaaagagcccagtgttggacaaaatgttgaaactggacgtgttgtcgaatggttaagaaaccttgggttatccaagtatgaggaagtttttatcagagaagaagttgactgggaaaccttgcagtggctcactgaagaggacctgttgggtattgggatcagctctcttggaccaagaaagaaaattatccatgctctaggagagttactgaagaaacatgatgatcccagtgaaatggaagctgtgttaaattcaggaaatactaagaagactaaacttccgatgaatggtaataaattaattaccgaatactttcaatgttcctcatttgatcaaagacaaagaagggtatgcaaagcaaacaagccatctaatctgaacgagaagaaaatttctagtgctaaagtacccactagaagaactgctggtaaaggaaagattaaggatacgcctctttggtgttgcatcccagggaccccttttcgagtggatgcatttcgctacttgagaggtgattgttctcactggtttctcacacactttcatgtggatcattatcaaggcttgactagaagcttttgtcatgggaagatatactgttcgtcaattacagcgagtcttgtgcatcataagattggtatcccatgggatagattgcatgtattgaccctaaatgaaaagctcaatattgctggagttaatttgatatgttttgatgccaaccattgcccaggatcaatcattattctctttgagcctccaaatggtaaagctgttttgcacactggagatttccgtttttcttccaagatggccaacaatcctgttttgcagtcttcctgtgtccacactctaatacttgacacaacctattgcaatccacggtatgatttcccaagtcaagaaatcgtaatacagttcgtcattgaggccatccaagcagaagctttcaatccaaaaacattgtttttgattggaagctacacaattggaaaagaaagattgtttatggaggttgctcgtttgcttcagaagaaagtatatgttggagctgcaaagctgcaaatactgaaacatttagagcttcctcaggagattatgcactggtttacagccaatgaagcagaaagtcacatacatgttgtccccatgtggactctagcaagcttcaagcggatgaaatatctatcgaatcaatatgctggccggtatgaccttatagtggcgttttgtcctactggttgggcatttggcaaaggtaggaaaaagacaccaggcaaaaggtggcaacaaggatcaatcattagatatgaagtgccctacagtgaacacagcagtttcacggaactgcagcagtttgtcaagttcatatcaccagagcacataatccctagcgtaaacaacgacggccctgagagtgcaaacgctatgcttgcccagctgttaaacgagtagaggaattcgttcgtcgcttcaatatcttcggcttggctacagttttctcttcgaaaaccatttgatgaaagggatggacgctggacgagctaacttccaaggactaatacagtgatggcggaagcattcctgatggtgccacccagagttctgacgtggaaatccagagatacagggtgcatagatgcgcacgcagacacccgttggcgccgtggaggtgctggttgacaaatcgtcagccaagattctgtactggaatgggtaccggcgatagcgtgtattgccgaaaccatgtgaaccgtgatttgtgactgtcaagccaagcgagtgaacttgcatgtcattatgagcccatttgtacacgaacttgtccagggtttttctagtgatggtgaaaagtcctgccatgagtgtcacctttctttaaaaaaaaacgtcgatcaaactggcaaaatccgtaggagacccacttgtcagctaaccaccccttgcagtcatccgcaccagggcaccaccaccactccagatgttctagaactatcaggcggcttcctccccctaaccgcaacagttaaaacgccgtagcaactagcaacgctaccacagtgcgcgcttgaagatagtgtcatttgcagttcccggtagcagccatggcgtcggtgcagctgtctgggccgcgggtggtggcggctgcgaaaccggctgcgttgggcgggctcctcctgacgccgtcccttgcggtgccaaaggggcggagggccaggggcctcgtggtgagggccgccacggtcgtgtcacctaaggttggtgcacaagttgtctactcgaaatatgcaggcacagaattgaaattcaatgacgccgaccatctcattttgaaagaagatgacataattggtattcttgacagtgatgatgtgaaggatatgaaaccactgaatgatcgcattctgattaaggttgctgaagctgaagaacgaactgctggtggtttgctattgacgcaggcaactaaggagaaaccttctgttggatcagtggtagccgttggcccagggccgttgggcgaggacggcagcaggaatcccctgtcgatcactcctggaagcaacgtgatgtattccaagtatgcggggagtgagttcaagggcgaggacggtgagtacatcgtgctcagggcgtctgacgtgatggctgttctttcctgatccccaaaccatacagcgccaggtgcgcgataggaagttttgatgttgaggccgaaccttatcttttatttgctcttgtttggaattggtggaggcttttgaactgtaatctggtgcgaattataaggaaaataagccgagttgtgtagacttgagacaggactgtgctgtgctgtttggctggtaggtgagctaaccagtgttcagctggtgggtgagctgaccagcacgtcgggttcggctgttcttcctgatgtcagcgttgtacgccaaggttggccaacggcatcaatattactaatagcatctaggctaccgtttgagtttttcatggattaatgacaacacaagatgtgactattatatacttcctctgtttttttatttgtcatgttttagttcaaaaataaacctgttttagttcaaaaatgaactagcggacgacaaatattcaagaatagaagatagtattttgcaaagataactaggcttatagttgggctttgatgttaaaaatttctgattaatt

SEQ ID NO: 221446 - DNA, 730 bp, Zea Mays
cagcgtcgccctcgcctcctgctggttggtgtggggaagttcgtgatgttatttacactgacagtggaaaggtgacggtcatataccgcgtgactgtgcgcggaacagatggagaggttcacagggaggctgctggaacagcatcgctgagcgatgaacggttcgacgaccccgtgtctgcggcagaagaggcagcgttctgcaaagcctgcgcgaggttcggtttcggcctttacctgtaccatgaagacgagacaccatagaagaccaacaatttctccacatcgtctatgccggccctgttctgtttagatttgcgcttgaggggctgtgctctactgttgttgatcagtaagtctatcagatacccatcccattgctgctaggtccttgagctgttgtaacgctggtactatgttgtttgctcgttttggtagctttgtcttgcaaaaaaatgttgtcagctacaattggtatggattatggaactattagtatatatgcaatacttttttgttgcttacctctaatatacacatctcacactgttcaagtttatagaaaaaatcacgtagcatcgaatttgtttcaatgaatccgccatgaaatatttcttattttgtattctggactagatgctgacatattttttttttctaaaatcttagaagttactgaaaatggtttgacacaagctctgtctctttttaagcggaccggcgaaccagtt

SEQ ID NO: 221447 - DNA, 886 bp, Zea Mays
attcgagtccatggcaggccagccctcaagcctgcagctggacctgggctatatgtgagagaacagccgctgtctattgcctgttgggccgaactgggcagcgtggaaaggctacgaagagcggagaggcgctccattgaagcggacggcgacgagctctgcatgctgcgctgcgcccttctcaccgccgccagcccgccagaacgtctcctccccgtctctagagtggctctttctttctccgtcaaatggctctcgcgtgcgcctctcacgcgtgccgctttctcctcgccggccaggcgagatctttccacgcccagccctaccatgagaaaattgattttgagttttgcacacaagtaccgtcttggtctctggaagccccaagcagaacccaggaaagtttaaagttggttcgttcttgaaagatagtctactgttggactgaggcatgtttgggacattgaatatttgctttgtaatttagaaacctcaaacctttgttctctgtctctagccatacttatttgcaaccattacgcaaaaaaaaaagattctagaaagattccaacttattgtgtgtgggtttgttccttttgtaataacaaatcataaggctttgttggtttcatccctaatccatcgggattagagtggattgagggaggttttgacttgtaggggattcaatccctctcaatccttgcggtttgataaaaccgaacagggtcaaaggtgcagccccctgtgataatctgtcacttgatgtttgtatttttacttaggtttcttaccaacaacattgcagttttgttaacgtagcctaagtaaattgattaggttcagagttggacccgacggtccacaattcaacaatgttgtaatg

SEQ ID NO: 221448 - DNA, 835 bp, Zea Mays
ttcctgcgctagggcggtggtgatggaggggaacatggcgttggggttccctgatggtgatggagatgtggcagggagtgtggtgggggagtgggggacatgaggagcggcaggaagcgagcccttctagatcccacggaccgcgccgtcatgcaatggtagaagctcatgatcaagaaccgagagttcgatgtccagggataggaaacaggcatgcatcgtagagacggattcgcaggttatgcaggtcgaggaggagcatatagaaccattaagggagcaggtggcagcaaattttgatagacaaccttgttggatatgatactatacctacaaacagcttggtgatttctcctggtcatggttatttatacaactttgagatgaaggagctttatggtcttagttataggcatgaaacaccagaaggtcctacaagatttggagactagcttggatcatggtgctacgttttcaagagctgctagccaacgccaatgcatctcgtttaagatcgtgcatgtgacatttcctctcctctcctgatgttaggccttcacaacttgtgttatgtgcggggcaaaaaaatccactcttttatatagcaaccacctgctgttaagaccttttgactctagatcctaaggttgtaaactgtgttctctaagtatctgtgcagccaacatcttttattggcccaaaaatatatttgattccatgcctcacttatggttgtttacttttatttggagttatttctgtaccttaagtctagctggaggtgcttttatatacttgtgctaactgaaggttagtattataccttaagtctaac

SEQ ID NO: 221449 - DNA, 852 bp, Zea Mays
gggcatgtctgcctgacctagatccaggtggcagcaaattttgatagacaaccttgttggatatgatactatacctacaaacagcttggtgatttctcctggtcatggttatttatacaactttgagatgaaggagctttatggtcttagttataggcatgaaacaccagaaggtcctacaagatttggagaaggcatgttaaccccgctggaccccaaccctctattcacgccaaacctcagccatttggaacatcttctcttcctccggttcatctctaatcttcatcgcttcaagtgttagagcatccacctcaactttgtcatagacttcttccacgagcacacgtgccttcctccttctcacaatcttacaaataacgcttggcagcagactttatctcagatagatcattgagcagtttggaattcattatctctgcactctgttactgtttcctctcctgattcaattcttcctttgagccaataaaaatagtggcaacatcaacattcttataactaccctcccttgaacactattggctgataagtatggactgggccaaggaaaacgtcattagctgcagctgcaatccctgcattcaatctagctcagcgtagcgttagtgagacaactgacctaattatcattgcaaaagaagggcactagaattatagataaccagtatcatagagaccttgcatctgaattttgagtgctatctaaaaagagatcgagagaatgtggatatgctaaactcagaacaagatcgcagcaacctgaatagggtacaaatccagagaatgtggatgtgctgaaccctgagcaggaccaccgtttttgctgtt

SEQ ID NO: 221450 - DNA, 1427 bp, Zea Mays
ggttgatgtcagaaaaggggaagaggagacagacgacgggtggagagcgagagaagtggggaaggcgagcagagcaacaaatcaagtctgtttcatttcagcaatcagcaccaacccccgtccaatcgctgcggctggatgattgggcagtgtcagcctcgcgttcgttcatttaatgtttctggtagcggtcaatgcgggatggttgggtggcggattggtattttgggactccatgtactacttcctgtcttcctccaccttcccggagaagcagcagaggaagggagggtgaaagaagaaatggtcgcaaagaggtggagggaaggaaagggtcaatgctgctcggtgtccctcaacctcaacacgggcgcccctactttacttgcttgttcccggtgtccctatcactctcagaggtggacgatggatcgtccctttcacatttcacacaccctccgttgccatttcaatattatcctagtcgccagcgtaagctcgccgtagctacctgctctgctactcgaccgctggcactggcgcgtttctttattgcttcgtccccttcatccggcaactccactgtcagcgccctattcggctcaatccatccctctgcttggcgtcctctctgctgcttgatttgctacctgtacctggtgctgggaatggattctgctatcagagggatcctgcaagtgtgaaatctatatattctggacaaatggggcaaaatatgttacagccacaagtgctctgcctgtgctccattatcctcacgttattttttacccttttgcaaccgaccgctgcacagatcactgcaccatgggaagttgatgccctcaaggctattaggggcagcttgatagatccacacggaaatcttagcagctggaaccgaggagatccatgcatgggaaattggtcccatgttatctgttacaatgcaacaggcagtgatggatacttccatacagctcctaagtttgaatctatctggaattttggctcctgagcttggtcagctttctcaaatgaaaattatggattttatgtggaattcgattggcgggaccatacctaaggaggtcggaaatatcacttctctggagttaatgctcctgaatggaaaccaattgaatggctctttaccagaggagattggcttccttcctaatctgaatcggattcagattgatcagaaccatatatctggacttatacctaaatcatttgctaacctgaataaaaccaagcactttcacatgaacaacaactcattgagcggtcaaatcccacctgagttatccagattaccttcacttgttcacctattattggataacaataacttgtcaggctacattcctccagaactatcaaagttgccaaatgtgctcatcatgtatgtagagtttttttaa

SEQ ID NO: 221451 - DNA, 702 bp, Zea Mays
cactccgtcagaagacaaagatggctccagggaagaggtccacatggacctcacggaaacccgaagaacctgtgccaactgattacgagaaaataagggctatgaatatgatgaagaacaatcaattgtttcaacggctaggccttggacaactgaaatcactagtgactgctacagctacaaacaacaaagaagactgtcctcagcaatcagagagtttatatgatggtgaaaacactgacaattctaatgaagaggaatcccaatgtcgtaacgatggtcgtgccaacatatccaatgatggtgatcagatctcaacaaaagtaacaagaggaaataaaagaattgtggcacctgtgcaggagcgaacaattagagtcactaggcaaagaattgctgaaataaaccaagaaaatagccacaacctgtctgttcataaacaactcagttcatgtcctgctacaaaccatgattcgatcgaaactcttgttgttcctacacaacctagtgcaaataccaccatagacaataacccaacacataacatagataatgctatagagcctaattctctgatacaggaggagagtgataaccacaatgcagttgaaggaacaatagatatcataccaaggagaaaaagtatgggcaaacaacttgaatcgttaagtagaggactaggaatgaagattccaatccaaa

SEQ ID NO: 221452 - DNA, 882 bp, Zea Mays
caaatattgacctatgctaatcaagagttgaacgaaagaagtgaagattcttctgtgtgcagacaaccgaaacttttcttgaattgcctcaagattactaatacatttgttgacttacacttctaaatgggatacatgtaactgtcctgcctaagtgcccatgaggatgacccctgtctattttagtaatctataggctttttatgatatgcaggtttatgaggttgtcaagttttcatttcaatgcaaatccagctggacaacaccatgtcacaaagcaggcatctcacattaaaggaagatgttattcttttcgagtgtgcttctagatacagttcagtcttggcgtcatcgaatcaatgaaacatgaagttagaagcacaccgagatccagtggcttgtgaccccttgaccctttagaggaagcgcactagagtcgttggcaagaagaagaggatcgccaagaagaagtctgaggctgccgagtaccaaaagcttcttgctcagaggctgaaggaatagagagaccgcgagagcttggccaagaggaggtccaagctttctgccgcttccaaggcttccgctaccatcgccgcttaagaatgttcgatgctttgatatgtttcaagacctatcttgttacagcttaaataccttatgctactctgattgtgttgcaacttgcaactgcccctgtacttgatagatttgtattagatgctcaagctacagagggtaggttcctaattatgaccatatgactatgtactaaattatatatctgttgctaagttaaaatacatacaaaataagtttactccgaccatcttgtagaaaaacaagttatagtgactaaggatatctgaattgctcctatgttac

SEQ ID NO: 221453 - DNA, 847 bp, Zea Mays
atcaaatattgacctatgctaatcaagagttgaacgaaagaagtgaagattcttctgtgtgcagacaaccgaaacttttcttgaattgcctcaagattactaatacatttgttgacttacacttctaaatgggatacatgtaactgtcctgcctaagtgcccatgaggatgacccctgtctattttagtaatctataggctttttatgatatgcaggtttatgaggttgtcaagttttcatttcaatgcaaatccagctggacaacaccatgtcacaaagcagtgtgcttctagatacagttcagtcttggcgtcatcgaatcaatgaaacatgaagttagaagcacaccgagatccagtggcttgtgaccccttgaccctttagaggaagcgcactagagtcgttggcaagaagaagaggatcgccaagaagaagtctgaggctgccgagtaccaaaagcttcttgctcagaggctgaaggaatagagagaccgcgagagcttggccaagaggaggtccaagctttctgccgcttccaaggcttccgctaccatcgccgcttaagaatgttcgatgctttgatatgtttcaagacctatcttgttacagcttaaataccttatgctactctgattgtgttgcaacttgcaactgcccctgtacttgatagatttgtattagatgctcaagctacagagggtaggttcctaattatgaccatatgactatgtactaaattatatatctgttgctaagttaaaatacatacaaaataagtttactccgaccatcttgtagaaaaacaagttatagtgactaaggatatctgaattgctcctatgttac

SEQ ID NO: 221454 - DNA, 836 bp, Zea Mays
atcaaatattgacctatgctaatcaagagttgaacgaaagaagtgaagattcttctgtgtgcagacaaccgaaacttttcttgaattgcctcaagattactaatacatttgttgacttacacttctaaatgggatacatgtaactgtcctgcctaagtgcccatgaggatgacccctgtctattttagtaatctataggctttttatgatatgcaggtttatgaggttgtcaagttttcatttcaatgcaaatccagctggacaacaccatgtcacaaagcagatacagttcagtcttggcgtcatcgaatcaatgaaacatgaagttagaagcacaccgagatccagtggcttgtgaccccttgaccctttagaggaagcgcactagagtcgttggcaagaagaagaggatcgccaagaagaagtctgaggctgccgagtaccaaaagcttcttgctcagaggctgaaggaatagagagaccgcgagagcttggccaagaggaggtccaagctttctgccgcttccaaggcttccgctaccatcgccgcttaagaatgttcgatgctttgatatgtttcaagacctatcttgttacagcttaaataccttatgctactctgattgtgttgcaacttgcaactgcccctgtacttgatagatttgtattagatgctcaagctacagagggtaggttcctaattatgaccatatgactatgtactaaattatatatctgttgctaagttaaaatacatacaaaataagtttactccgaccatcttgtagaaaaacaagttatagtgactaaggatatctgaattgctcctatgttac

SEQ ID NO: 221455 - DNA, 662 bp, Zea Mays
gataggtttatgaggttgtcaagttttcatttcaatgcaaatccagctggacaacaccatgtcacaaagcaggcatctcacattaaaggaagatgttattcttttcgagatacagttcagtcttggcgtcatcgaatcaatgaaacatgaagttagaagcacaccgagatccagtggcttgtgaccccttgaccctttagaggaagcgcactagagtcgttggcaagaagaagaggatcgccaagaagaagtctgaggctgccgagtaccaaaagcttcttgctcagaggctgaaggaatagagagaccgcgagagcttggccaagaggaggtccaagctttctgccgcttccaaggcttccgctaccatcgccgcttaagaatgttcgatgctttgatatgtttcaagacctatcttgttacagcttaaataccttatgctactctgattgtgttgcaacttgcaactgcccctgtacttgatagatttgtattagatgctcaagctacagagggtaggttcctaattatgaccatatgactatgtactaaattatatatctgttgctaagttaaaatacatacaaaataagtttactccgaccatcttgtagaaaaacaagttatagtgactaaggatatctgaattgctcctatgttac

SEQ ID NO: 221456 - DNA, 777 bp, Zea Mays
ggcagggccattgctactgcaagtcgcccctaagcctggtactaagagttgtaggaggcaagaattcacagttatctttgtctacatgctattctttgaacacaatatttacgagcttgataggcctgttttggaatacaaattatgtgtccgataggtttatgaggttgtcaagttttcatttcaatgcaaatccagctggacaacaccatgtcacaaagcagatacagttcagtcttggcgtcatcgaatcaatgaaacatgaagttagaagcacaccgagatccagtggcttgtgaccccttgaccctttagaggaagcgcactagagtcgttggcaagaagaagaggatcgccaagaagaagtctgaggctgccgagtaccaaaagcttcttgctcagaggctgaaggaatagagagaccgcgagagcttggccaagaggaggtccaagctttctgccgcttccaaggcttccgctaccatcgccgcttaagaatgttcgatgctttgatatgtttcaagacctatcttgttacagcttaaataccttatgctactctgattgtgttgcaacttgcaactgcccctgtacttgatagatttgtattagatgctcaagctacagagggtaggttcctaattatgaccatatgactatgtactaaattatatatctgttgctaagttaaaatacatacaaaataagtttactccgaccatcttgtagaaaaacaagttatagtgactaaggatatctgaattgctcctatgttac

SEQ ID NO: 221457 - DNA, 829 bp, Zea Mays
gagaggcagggccattgctactgcaagtcgcccctaagcctggtactaagagttgtaggaggcaagaattcacagttatctttgtctacatgctattctttgaacacaatatttacgagcttgataggcctgttttggaatacaaattatgtgtccgataggtttatgaggttgtcaagttttcatttcaatgcaaatccagctggacaacaccatgtcacaaagcaggcatctcacattaaaggaagatgttattcttttcgagtgtgcttctagatacagttcagtcttggcgtcatcgaatcaatgaaacatgaagttagaagcacaccgagatccagtggcttgtgaccccttgaccctttagaggaagcgcactagagtcgttggcaagaagaagaggatcgccaagaagaagtctgaggctgccgagtaccaaaagcttcttgctcagaggctgaaggaatagagagaccgcgagagcttggccaagaggaggtccaagctttctgccgcttccaaggcttccgctaccatcgccgcttaagaatgttcgatgctttgatatgtttcaagacctatcttgttacagcttaaataccttatgctactctgattgtgttgcaacttgcaactgcccctgtacttgatagatttgtattagatgctcaagctacagagggtaggttcctaattatgaccatatgactatgtactaaattatatatctgttgctaagttaaaatacatacaaaataagtttactccgaccatcttgtagaaaaacaagttatagtgactaaggatatctgaattgctcctatgttac

SEQ ID NO: 221458 - DNA, 799 bp, Zea Mays
gagagtggagaggcagggccattgctactgcaagtcgcccctaagcctggtactaagagttgtaggaggcaagaattcacagttatctttgtctacatgctattctttgaacacaatatttacgagcttgataggcctgttttggaatacaaattatgtgtccgataggtttatgaggttgtcaagttttcatttcaatgcaaatccagctggacaacaccatgtcacaaagcagtgtgcttctagatacagttcagtcttggcgtcatcgaatcaatgaaacatgaagttagaagcacaccgagatccagtggcttgtgaccccttgaccctttagaggaagcgcactagagtcgttggcaagaagaagaggatcgccaagaagaagtctgaggctgccgagtaccaaaagcttcttgctcagaggctgaaggaatagagagaccgcgagagcttggccaagaggaggtccaagctttctgccgcttccaaggcttccgctaccatcgccgcttaagaatgttcgatgctttgatatgtttcaagacctatcttgttacagcttaaataccttatgctactctgattgtgttgcaacttgcaactgcccctgtacttgatagatttgtattagatgctcaagctacagagggtaggttcctaattatgaccatatgactatgtactaaattatatatctgttgctaagttaaaatacatacaaaataagtttactccgaccatcttgtagaaaaacaagttatagtgactaaggatatctgaattgctcctatgttac

SEQ ID NO: 221459 - DNA, 538 bp, Zea Mays
tcttgcaaggtttatgaggttgtcaagttttcatttcaatgcaaatccagctggacaacaccatgtcacaaagcagaggaagcgcactagagtcgttggcaagaagaagaggatcgccaagaagaagtctgaggctgccgagtaccaaaagcttcttgctcagaggctgaaggaatagagagaccgcgagagcttggccaagaggaggtccaagctttctgccgcttccaaggcttccgctaccatcgccgcttaagaatgttcgatgctttgatatgtttcaagacctatcttgttacagcttaaataccttatgctactctgattgtgttgcaacttgcaactgcccctgtacttgatagatttgtattagatgctcaagctacagagggtaggttcctaattatgaccatatgactatgtactaaattatatatctgttgctaagttaaaatacatacaaaataagtttactccgaccatcttgtagaaaaacaagttatagtgactaaggatatctgaattgctcctatgttac

SEQ ID NO: 221460 - DNA, 1405 bp, Zea Mays
aaaatagctagactgtttaaatgtattcaagtaactctaatgcattaaaacactcctctagaatatttaatattttgatgcgttctaatgaattggctcttttttcattcacgtcggccccgcctcttctccccccgacgcgcttgccgatccgcccattccgccgctaccactctcccgccgccgccgcgcgcctcagccgcccgtggcccggacatggagggcgccgccggggaggagggcgcctccacgccggcggcgagagggggagcggaggcaggggcaggggcaggggcaggtggagggatgctgaaggggaggtcctgcaagggctgcctctactactcgtcaaagctcaggtcgcgagcgcgcggccccgtctgcgtcggcgtcacccgcgcccttccccaagtttctgagcgtaaggttggaaaacttgaactggaagctatccaagaaggtcgttatcttgcagatttcagatatgcatgcattggctattcaatgtacttaaatggcaaggaaactcctacgggggtacgagataagccacgtgcccatctgcctgtttgtgctggagtcgagctgttgatagatagaaaagtcccaacaaacgttaagaaagaagctccaaaaccacgtcaatataaaccagggcatgcaggagatgatttcttaacgaaatttcagaggaatgcaggtcttgtggccagtggtgtggctaagaacctgaatagagttgggacctacatcaaagacactgtcagtgatatgatgcagcctcaccgcaagcgtcccaaataaaacataggcctgtctctcctaaatcctgtatggaagtaaacattagaaattagatgatcggggaacatcggatcaatcacttcctcccatacacacccagcgcagcagtagcttagctttctgttggtttcagaaactctagagaattgagagaagatctatggttaggaaaaatagccacttgaaacatgttatccactagctcatggggcttcgattccccctgtctcgccccattttgggagccattgttgttttcactaggcccctccggcaaaacaaccacgttccgccccttctgacaataacgtggtgccgttgagaggtccagtgatgcattttttgttggagcattgaagtatcagtgtacgtagatgatatactaaactcttattctgttactactagatacgtgccctcttattctgttactagattagtgccctcttattctgccttttttatctgcttctagtgctgtggcaagtcatggtccagcacgtcactaagcgccctggatgcttgtacaagctcctctggactgaaaaccatatatgatttaggtatcagttggtgttccaaacatataatcataagggcg

SEQ ID NO: 221461 - DNA, 1114 bp, Zea Mays
ccggccagaaacagaatgtttcgatcgatctacgagatggagtgcgtagctgcaacgacgatagagtttcgatgtcgcgtcggtccagtgcctgctccgggaccaggtcaagcggataccggatactttcacgtcatttgagagttacttggattcgtttacttggccgctgattgaagaagtacatgctgatgtattctcatcgctagatggttattctgaggcaaactttatagaagtaacacaggtgggaaatcttgatgctagtaaaccaatactcggttttcgagttgcagaaccagtgaaggatgagaagtcaagggagacatatgtaccagtggagaatgatataattgtcctgtcctcacataagccaaggcatgtgtctgatttgacacaaaacaagtcatcatttgtgttaggttcggtaattaaaactggagaagaagatgggttccctccggactggtgtgttgttcacttgtcatctgccattctcgttgaggcagactgtcatacaaaaattccaaaaaggccactgtttcttgtgttccttataaatatgaagacatacaatcgcatatggagatgccttcatttgggacaaaattgtagtaatctctttgagcttcagaacaaaaagagtagtggtcccgtaactaaggcgtgggagttcaagccaaaggtgtgttggtcctatgcacacaaacccgcggaagcggaaagttcccaatgctcccaaccatctcaatgttttgatggtaggttgattgaatggcttggccttgagaaattcggtctaaatgattcacagttgaatgcagtgtcagattgtgtatcattaatggatagcaactcttcatctataaagctattatggggtccccctgggacaggtaaaactaaaactatcagctctatattatgggccatgctcatcaagggcaggaggacacttgcctgtgcacctacgaatactgctgtgttagagattgcggctcggatcgtcaatctaactgcgaagtcttcagatggcaccgtcttcctgaatgacattgttctgtttggaaacaaaaagaagatgaagatagataatgactattatctttcaaag

SEQ ID NO: 221462 - DNA, 2433 bp, Zea Mays
gtggcccagcccgcgtgcgctctctccctccgccgctagccgctaggtgccgaggccttcatcggtcttccgctggcgacggttcgcctcgcgcgtgcgacgcctgggtggacaaccgccgcggcggcctcaggtgccgaggcattcgtcggtgtcttagctggcgacgaacaccaccaggtggccgacgaatttgcaacgtctttataagacggctgtaaatctgtgacagttaatattttgcagttgaagctctgtgattttgctgtgggcacattctgtttattgtcttatgatatggcagaatcacggactgtttcgaattctgagaataagcgcactctcccagcatggatgttgaaagcaacctcaggtaatcaaacagcaaagaccgcagatcagaataagcaggcactggaatctgctgacattggggctcttgatcagagcaaacccatcaaaaggaacaacagacggccgctaaaaaacttggattcagtagctgctggtgaactgggagttttgcagcgatgtgagggtagaggaaaggccagaaggaagagcaaggatgctgtcaaagatgaagttgaagaaattgtggaattaaagagtaagaatgcaagaaaaacgagtggaagaggtgctgcaaagaatagcaagaaacggaagttggataatgtcgaatcaggaccatcatcgccagtatcaactgatgatgacatagagcttactgttgaggatcttgtgagcatagctgaagagtttgttaatgctgataaacagaagcaatgtgaactacaaactgtggaggttaccaggcataaagagcatcatctgtgccctaaaatttccactgaggtagatagagggcagtcagtagtaaatgctcaatcagtgaaaggatcgatgcagtgcgcaacagccacaagtaatacaggtgcaatcaagtatacagaagatgagagcactagccatcaagaagtgcaattttcaagtttcaaaacgacagaagatgttgctcaggatatgataaacctgttattcggtcacctattgagtaaacctgttgccaacacagagaagtctgatcctgtagaatcaacgactagaactgtaaatcaggtgccagaggggagaggctggcacagcgaagtaccaaggcaggaggaacctgtgaagaaaccagagcctgtagtagaatcaatgcctacgactataaatcatgtgccagagaagaaagactggcgtagcgagttaacaaagctgggcgaacctgtggcaaagaagaagagcagcctcagggacaaggtggccttgtttctttgactgcatcagatgagatttgggcagtagattgtgattcgtatgggaccgtgtctgctggttctgagcgtgtcccagtcccacggcattgtttttgcatatagttatacctttggttaataagctgtcctctttaaatctagcaagccagccctcactgttgctagatggtattcctgtgtataaaggatgcatggtgcattttctgttggttgaagtacgactgtatgaagtatcggtgttcctcaacgcgacaactacactagagggaagcggtttaaacatcgtagagttattaggcatggaggagcccagctatctccttactcgccatggagcctttgcagaagttgctggagactgacacagctgagagtgtcctgttcccaatcatttacagtgctgcaaaactatggatcagtatgggcgctgatgatgcagccatcttcgtaaaagtggtaatggatcgttgtctatctttgggaggatcagaagaggtttcctttggacaagctctggcgatcggcagatgcaaaaatttgggggcattgagtgtcagacctggatgtgcacagattgccactcccggtaatgctgttgacaggcagttcatcaaggccaacaccatcctcactcttggggatgaggaataccaatggacatgggtgtcgaacttctacgccgcatgcaacaagaacagaacggtcagggacgttttgcacggagtatgtttcttgaatacgaaaacagtgacagagatggcagaattgttatgctatgggactttctcagtaacagaaagacctgacgagaatgaaaccggttagctctggcaccacaaccggaagagccgcgacaaaagccgtgggcggggcttgtgccttgtggggaggagtcctgtcaaacgagtttggctccggagcggggctcctgtctttatgtactcccctgttccaaaatagttgttttagccttttaacaaattcattcaataattaatatatttgttttgtatatgtgtctagatttattatcatattttaaatatagacataaaaatgaagctaaaacgatactaggggagtacacaatctagttatgacacttagg

SEQ ID NO: 221463 - DNA, 817 bp, Zea Mays
cagaggggcaggcaaagcacaggttcaggagctcgaagaaccatcaccattcaccatgtgtcggcagctgcatgaggggtttaagcggcggaagggtttggtgaggatggcctgtaagctgatagcaggatgttacgtcgaggtctcgacggtagcggtggaagttccggtggtggccctgacttctcagggccgaaatgcagatgcgttagcgctttattttggagaagatccagcacgatgtccatttgagcaagtagttacaacactccaaaattttgtgagattgttcacgcgttcccatgaagagaactgtaagcaactggatcttgaaaagaagaaagctctgaaggaagcagaagacaatagtaaacaactggaccttgaaaagaagaaaacccagaaggaagcagaaacagagaaaataaagaagaaatctgacagtgagaaagcttgtaagaaagaactggaaaatgataaatcttctaagaaggattcagcaaatgagaaaggcaagcttaacaatcccatcaaagagctagatatatcacttcaatcacctgcacaaactgccagtgccaaatgacgaccgtaccagatgaactaacagtagcttttccgaaagaggaaaactagttttggctgctcccaacagtgcttccttttgacgaatcatgcaggataaggaagccgaaaactgcacttttaatacgttctcaggggattgtcgaagaaattaacctggcgacaagctgtacagatctgacataataatagccttttcttttggggttgacccctgcttggatggtttatt

SEQ ID NO: 221464 - DNA, 927 bp, Zea Mays
acagtgtcaggcaatggatgcaaacacgctgctgatgtacttttgtggaaagacaagaagacctctgctgcggtagttggtggtgcaactgtcctatgggttctgttcgaaattgtagaataccatctcctgaccctggtttctcatgtgctgatcgctgcactgaccatcttgttcctgtggtccaatgcgactgtctttatcaaaaagagtcctcctgatgttcctgaagtgcagatatctgaagaccttgctgtaaacattgcgctagcattgcgtgctgacatcaacaaggcacttgccctgcttcgggagattgctctgggccataacctgatgaagttcctaggcgtggtcgtcgccctttggattctttcagagatcggggagctatgtgatctcctgagattgatgtacattgtggtcttgatcctccacacagtgccgatactgtaccacaagtatcaggaccaggtggacaatttcgctgcaaaggcgcacagggagctctgcaagcaatacgcggtcctggatgccaaagttctgagcaagattccaagagctccaccaaaagataagaaacagaactagaacgtggaggatgacaagcgccttgttttcggcttgggcgacgagagtttgtagccaatggtctgatgtggttcgtgggctttgtgtaggtgcacagtttcacgtatatgttctggtcgtgtaatctatatgtttatataaacctgtaggggtgttgatgaccatcgaaagtgtcgtaaatattcagtagtatatgtagcttagggcttaagcggttgtgtttataaggtcattgtcgttgtcgatgggaagtattatcatgttattttcaggactcaggagtataaaatgaaataaaatgtgaattcatctgaagctgaaacccaaactaagaga

SEQ ID NO: 221465 - DNA, 999 bp, Zea Mays
atgagccttttcctcatcttcttgtcttatattgtgattttcctctcttttttttttgcaagttgattgcttcgtcgggctgaaattctgcgttcctcaactgctgatgtacttttgtggaaagacaagaagacctctgctgcggtagttggtggtgcaactgtcctatgggttctgttcgaaattgtagaataccatctcctgaccctggtttctcatgtgctgatcgctgcactgaccatcttgttcctgtggtccaatgcgactgtctttatcaaaaagagtcctcctgatgttcctgaagtgcagatatctgaagaccttgctgtaaacattgcgctagcattgcgtgctgacatcaacaaggcacttgccctgcttcgggagattgctctgggccataacctgatgaagttcctaggcgtggtcgtcgccctttggattctttcagagatcggggagctatgtgatctcctgagattgatgtacattgtggtcttgatcctccacacagtgccgatactgtaccacaagtatcaggaccaggtggacaatttcgctgcaaaggcgcacagggagctctgcaagcaatacgcggtcctggatgccaaagttctgagcaagattccaagagctccaccaaaagataagaaacagaactagaacgtggaggatgacaagcgccttgttttcggcttgggcgacgagagtttgtagccaatggtctgatgtggttcgtgggctttgtgtaggtgcacagtttcacgtatatgttctggtcgtgtaatctatatgtttatataaacctgtaggggtgttgatgaccatcgaaagtgtcgtaaatattcagtagtatatgtagcttagggcttaagcggttgtgtttataaggtcattgtcgttgtcgatgggaagtattatcatgttattttcaggactcaggagtataaaatgaaataaaatgtgaattcatctgaagctgaaacccaaactaagaga

SEQ ID NO: 221466 - DNA, 2040 bp, Zea Mays
gaaagctctcgcagcgcttctccccggctcggatctcgcccagcggccctggccctcggccatggagcctgcactgctccagttcggccgctcgtctccctgtaccccagctccctctgccggccgtcgtcgagccctctgcacacgtacgctgcgcccagctccagcgcttgttccctgctcctatggcggccgagctctccgatgccgcgcgttgagctccctgccgtcgctcaactcgccggcgtgcatcctactccttacgcgccgtgcgccgggaagtccctgcgcgcaagctatctgttggccgcgcgcgaagctctctgttcgtcgtcatcgctaagctatctgttggccgcgcgcgaagctctctgttcgtcgtcatcgcgaggtcgcacgacagactgattgcgtgtcgtgtgtcgcacatcctaggtcctcgtcgtcgggtttcgtgcgtgctcgcgtttaccgtcgagtcgtcgaacctgtcatcctctgctcaaaccccacctcgccagctcgctctaaacacgatctcgtcgtccgcaagtcaccaagaaaccccaaaaatcgggtaaagacggagcaagcagcgtgatgttcaccaagtgcgcgacaaaaagctcgaacatcctgcgcgactcaagttcgattcatcaaaattattcagtcgaggaaaagatcttcagcaattgattaccgaagaaaagaaggcccctgggtgacgtcaatcggaacccgtagtcatgcttctgactatctcgtcaaattagtcagggatcactcttcggatgacaaagtcgacgatgaaccccatggagtaaacgacgacgttgttgtatccaccacatggagacgaatgacgacaacggcacaacggcacgagcagaaaggcttggccagggcagagtccgagcgggttgacggcgagccggaccgtgatagatcaaggctgaggctgagggagagtgaccgggccacaagcaagctgcgcgagctgagggcgtggccatggaagagcaggggatgggcgagctcggaccaaggcgacaacgcgatggagcttgctgggaagcccgtccaaggagcaacgttcggcgagctccggcgagaggagggaagcgacggcaaatacgtcgagcagggagtgctgggcgagttccacatcgaactagaggagaaagacagagggaggtcgagcgctgagagcaaaacgcccaggcgttgtgctggggaagatcactcttcggatgacaaagtcgacgatgaaccccatggagtaaacaacgacgttgttgtatccaccatatggagacgaatgacgacaacggcacaacggcacgagcaaaaaggcttggccagggcagagtccgagcgggttgacggcgagccggaccgtgatagttcaaggctgaggctgagggagagtgaccgggccacaagcaagctgcgcgagctgagggcgtggccatggaagagcaggggatgggcgagctcggaccaaggcgacaacgcgatggagcttgctgggaagcccgtccaaggagcaacgttcggcgagctccggcgagaggagggaagcgacggcaaatacgtcgagcagggagtgctgggcgagttccacatcgaactagaggagaaagacagagggaggtcgagcgctgagagcaaaacgcccaggcgttgtgctggggaagtaagagggagaaggcacgacctgttgaacgcggaggaaaatatccaggggagagcggtggttggatgagaacaaagtccaggaaatgataattagcaagagacgtatgcacaccagctttcccaaggagctagatattttcttttctgttgttttttttttgatttttcccccctgtgcgcggatgagaacgatgactgcagatgagaaaaaaaaaagaatctggacaggggacggcgtgataggataggatctctgggatattttccattttccattttccatttttttataacggaaatagtaaatatttcggattcggataaattcatctgtttttg

SEQ ID NO: 221467 - DNA, 6377 bp, Zea Mays
caccaccagcacgctcacgtcgagtagtcgcaactcacaagctcaaagttgcctccctcgacatggcaccaccagcaccgagtagtcctggcaaaagtatccagccatcggcgtcatctttggctcgggcagcacgattgcttttcggggaaaatgcaccaccacctattaccaacatcacgtggtccaaaggctctacgactgcagctgcaaatcttcaagtgttaggcaagagaaaacctgttgaagttaatgctcctggtggtatctcaacatcatcatcaacaccaatttccatcccatccgatgaaccaaatccaagtggaactagaacaacagctactggtactggtagtggcacaactgggactaatactgggacagatacaccacaacaaagaaaattagaagttcttgccattgatggtgtggatgtccaagactctgcagataggaagaggacaaagaaattgacatctgatgtctggcagtacttcactaaaaatgagaaggtagtagaggttggtggaaagaaatatatccagatgtggggatattgcaactttcctaattgcagggcgaaatacagagctgagagcaactatggaacaactggctttcggaaccatttgaaatcgacccatagcatagtaaaggggcagctacaactcaaaacagaaaaggaccatggcaaagatatcactgttatcgagccctacaagtatgatcaggaagtaagtttaaagaagctttacttagcaatagtcatgcatgagtatccttttaatatggtagagcatgactattttgttgagttcatcaagtctttgcgtccttcgttcccacttaagtcacgtgtgactgttaggaaagatatcatggacatttttttggaacaaaaagagaaattatattcatacttgaaaactgttcagtgccggtttagtacaacaatggacatgtggacttcttgtcaaaacaaatcctatatgtgtgttactattcattgggtagatgaggaatggtgtatgcagaaaagaattataggattttttcatgttgaagggcgtcacacaggtcaaaagttgtcacaaaccttttcagaattgatggttaagtggtatattgaaaagaagttgttttccttaactttggacaatgctagtgcaaatgaggtggctgtgaaagatgtaattgctgatctacaagaaagtaatggaaatttggtttgtggcggcatgttttttcatgtgaggtgtgcttgccatatactaaatctggttgctagggatggtatgagtgttatttctagcacaatagacaagataaaagcaattgtgttagttgcaaaaggatctcctcttcaaatggaagaacttatgaaacgtgctaccgagtgtgggctagatacaacaaaaggtctctcaatagatgtatcaacaaggtggaactcaacttatctaatgttgagggatgcattgtattacaagccagcatttttgaggctcaagtcgtctgatcggcgtaggttagtttcattcatgatacctttcagtttcaatctgctaacactactctgaatttgtgtataaatattaatttcattttcctttgtaggtatgatcacatctgtcctagtccttttgagtggagcatggcatcaaccatttttcaatgcttgaagaagttttatgatctcactgagttgctctccggtacttcatatcccacagcaaatttattttatagaggtttttgtgagataaaagagcttcttgataaatggcgtattagtgaagaacccactattaaaataatggcaatggctatgattgccaaatttgaaaagtattggaagaagtctagtactgttttagctgtcgccagcttctttgatcctagatacaagagaagattgattgaattctacttgaaaaaattttatggtgatatgtaccaacagcagatagaagactttctcagtgtgcttaagaaactatatcagttttatgctaatttagccccttctcttgaaaagaacaatagtgatgaggtaggaactagtaacacagttgacgatctcatggaaactcagaatgatgaactggactgctacctctatgacacaaatgttgctgatctaaacaacttaaatgagctggaaaagtatatggcagatcctttgttgaagcatagtggatcattcgacattttatcttggtggagaggcaagacaaaagagtaccccattctaacacaaattgctcgagatgttttagcagtacaggtttcgacagtagcttccgaatctgcctttagttctggtggtcgtgttattgatccctatcgtagttcacttaaacctgaaatggtagaagctttaatatgcaccaaggattggatattagcatagagaaaaggtaacatatgcatgctatgttgatgtctttagtttaataatgctcatgtctttaatttaatcatgctcatggctttatttgtaattgtttttcaagattcgaagaaactgccatccttgatgtatgattttgaagatgttatgaatgcactagatgttgcaatgaagcatgatgttcagaatgcagcatatagcagcgaagaaagtgacccagatgctatagatgattatggggagctgtaactgtttgtgtcagttcacatgtaatagtttgttgcatagaaagtgacccagatgctatagatgattatggggagctgtaactgtttgtgtcagttcacatgtaatagtttgttgcatatagcagtgaataaagtttcatgtacaactatctgttcgtgaccatatgaattaaattgtaacttgttcatttcattcatttgatccaggagataaaagaagctacagataaggggaaaattgtgtcttctgtgaacaaaatgattatgagtagttgtagaatggcacctcgcaaaccgagacaaaactaagacagtttaaataagttattatgttttgtgaacttagcctagttgtgggctattatgctgttgttatggtatactattgatgatttatgcgaaggtccgacttgattaaccgtttaccgatcgataccgctataattctattcgtattatatcgttttcgaattttcggattttttcgatcgttttcgttaccggctatcccgttttcgtttccgtccgttgttaaaaaaacagtaacagtaacggtaaaggtgttttcccgaccgttcccgtccgttttcaggcctagacgtcgtgcactgagtgtgggtccacggcgcgccggagccgggcgcagtccttgggtgatgatcttctaggtcgatcgttccgcgagcatttgatccttgatcggcacacttctctcggaagctcccacgaggttctttccgaggggagggccgccctccaccgacctagttggcgtagggaggtcgtcgagctccaaacgggttatccaagtgagatccaaccaccctctggcagggtttgatttcggcgagtggtcccactggtggctcgactcgctaggggcatcccacttagtccttccttattcaatcctgttttagccctttggtcggtctggccgaccaaagggggcccatggctaccccgtcagccaggtttccgcagaagaatgtgaggtttgaccttggacgtggatgtgagcaaatgacctatgggccagtcacctagcttgcggctcactgggggcttgctcagtccacccctcgctctgcgtgagaagttagggtggtttaggtttttacctggttggtatgatgcagttactgctgcgaaatggtaaagggggtggtcataatgacaccgctcggcgtgggcgacttgacgaaatgcaaaacggcatgtcggcctcgtaacgctcgggtggcgtggtggcttggttaaccgcctcgctcgttactggtgtatcttctgcggcgtgccccgctggcgctctgtcccaagcggcgagaacctacaaggcacacagtcttttcttgcctgatacccaaggtggcccttggtcgaagggacaaatcctcaggtgtcgtttggggtggccctacctttcaggcgtcatccttgttccctacacttctgcagtagagggggagtgctcgggttggtatcgcttaccatattcttgcgcttgaacccttgcttcctttcttccctagaagccctctggctattgtgcctccttgcttcctcgtgcccgtccagcttgcctactacacgtatggcgtcattccacgtttccttgatctgagagagtcgtctccatggtctggataagaaggggttcccccctcgagagaggtctcagggtgtagactggagggtgagggtgaaatgcctcgtcccggggatgacgagttggtcgtacttgcgtccttctatgagcgcgagttcggcttgcccctgcatccctttgtgggcggactcccccactactatcagctggaggttcataaccttcaacccaacaatatccttcacgtggtgtgcttcatcacgctatgtgaggcgttcatggggatcgaccctcactggaagctgtggcagtatttcttcagagcgcatgtggccccgggtcgcggcggtcagttgtatgttggctcgaccaatattcagcttgtgcaggccggaaaacagagtactttaagatcccccttccttcatctatgtgatatgaaggggagtggttctttgtcaagaacgtggctaggagtgtcccgccgttcaccagtcgagagccggtatcggcggaggactggcaccacggggtggaggcgagcctcatgagtgaggtggagcatcttctgatggcgatctggacattgaagcagcgagatctcaccagcgcgcggctggtgtgcacttttatgcatcgccagattcagcccttgatggcctattagagaccgatgcaccagtactccggcgtcgacgatcctgaccgccattcctccaagcacctcgcactgacagagatcgaggcccgggtcaaggttgtcacggcgttgtcatcggaatccttcatggacgaggactcgccccttcctctctaaggatgtcgtgagcactctggtgagttccttcttcctgacgtttttcattcatttgtcttccttcgttcgttgtgtctgatgcggactctacaagggatcggacccccgacgtcgtgtcttccgcccctccctaagggcattatcgtcatggcggagcgggagagagacgcgggggagaccttggcagcacgctcgaagcgcctccaagcgaagaaagagaagagggcctcccgccctgctcgcgcagaaccaaggggggtgtcccttcttcctctgattcggaggatatgacctccactgcctaaggggggatggaggtcctagcggcagtgggtggtccatctcattatggcgatgttgaggccagctccaacgtccccgcctagacggacgggttggcccatgacgttgcagcacctacggtatgctcaaagtgtcgcgtggaattcgcttggacctgggggtggcgagggagcaatggcgcaggtggtgtcacacccctcggtgtcatcggtgttgctagggcatcacgcgggaaagagctcgtgggaactccctcctccgtggttgaagtggcgtcacggatggcgcttcaagcggtgccgccacctccggcaccttcaacggttgctcggaagaaagtgaccacccggaaacgctcctcgtggtatgttgttgttgggtcctcttgctcttgtcttcggttttggtcttcgtttcgtattttttctcttatttccttggtcagcatgtatgtgtcgcgcaagttggtgaaggacgcggcttcagcggcgaggggggcttacgactccttcggacctcccgcctctgtcgttggagggaacggctcctttgaccgacgtggccgtcccgccagccgacgttgttgccagcggctatgggtgggagggaggggaaggaaaatgagatctagcactataccatgttggaaaccttccctgactagggttgggacttgtatatatagactaagagttggtgggtctgacccattacacaagggtaaaacagtaattacaaggggctaactcaaaaaccctaagcagggctctagcaagatgcattgttgctttgtggattgcaattttttaaagcacagaagggcagacccagtgccggatgctcccacgtgagtgaggtctaggaaagggataaaccgagactcttccttcccccgtaaatgaggagagactgattcgaacccataacctggttactaaatgagacggccatcaccgctgcactaggcctgcccttcacaagaagcac

SEQ ID NO: 221468 - DNA, 1225 bp, Zea Mays
gcgctttgctcgcttgcgccttcaccggttggaacgtgcgcacctcactttcccgagcatgcagagttgcagacaaacgagtgcttttatagatctggaatgcaccaacgtacaggctccggccgtgccatgcagttaaccaatcaatggcacaactgcagtcaacacatgcaacggcctgtacgcggacagctgggcaccaatcatgcaaactgtgtactgaacgaagctaggcgtctcttcgatcgagcacgcactacgtctacgtcgatcgatctccaggcttccagctagcaagcatagggatcgatcgaccgatccatgcatccatggcactgagggagctggtgtgccactgcctccacaagaaggtggccttcgacttcgagcgcatcacgccggggacgctcgtcgaggtcgacctgcacgcccgcgagccgtggcccgtgggagctcccagaggtggcgaagctgacggccaccgacactgatgctacttcttcagcttccgggaccgcaagtacgcgacggggtcgcgcaccagccgtgccaccaagtcgggctactgctggtaggccacttgcaagctaccgcgagcatttctcaagtctgaataatgaatgagcaatggcaattggcggcgccgacggccaagacggcccctcctcctcgcccgccttcacacgccatggcgccggaaccggaccactccgcgtcaggaggctactacggcctctcttttgcgccgcagcaggaggtggcgcacgagctcttccacagtattacggcggcggcacggtcaccgtcgaccaccactacggcttcacgcgagccagcgggggaggagtcgccggcggtcagtgcgggtttggctgcttcgacgacatggccagccttggtggagacaccggtactcttgaaggagtacaattattatgacatggggtttgacaggtagattaaaactagattggctttgaaatgccgtgaggagcttgacaatgtatattgtgtcttggcagtgttttgatgtctagattcacagcatggttccatgcatttggaccccaacttatatttagatttatgcatgtttgttttgaggattgagttagtccatcatattcttttttttgaacgtagtccatcatgttctcagtcctcacttttttgtttggtttattgaatagaatgatttgatccatcattatttcatttctcattg

SEQ ID NO: 221469 - DNA, 632 bp, Zea Mays
ccgaagcgaaattgaacttgcatcagactatggagtcaggcgaaaaggacagtgaaaggaacaggaaaaccttaaaaacttatcttgaccgaaccgacgacgccatcaagtgaaagagcaccacctgaacgtgcacgcaacatgtcaatattatccgtgcatcacccactcaaaagtcaggacaaatctccacagcaagcaatcactttgtcatgctctcgagagagttctttgaaaataactgggaagaactctttactcctcgacgacaacgctgatctggcccttgtcaagcatgtcatagaaggacctagtcttcctctgctcgttccagtggtgcatcttccacatgcctcccgcgatcagacccagggtcagtccaatgaagatctccttcaccacactcgggcccttgagggtggcatgcgcaaccctgccgcctgccatttgctttcttgcttgttgaggtcagacgccaagcgcctcgaaccggcagaagttggggaagttgtgcgggccgagggaatgaaacgaggatggggtgctgaggcaaggaggcgaggcgtggggtggtgtgcacggacacgacgacgacgcgacaagcgcttgggcgacagcacgacgaggcacag

SEQ ID NO: 221470 - DNA, 500 bp, Zea Mays
ttggccgcggcagagtcgacatctgagatatatgaggccttggaattgaggaatggtggatctgattattttggcaagggtgttcttaagaatcgagtcaagagcggctactgccgggacaaatactcttcactgctcgtcgtgaggccgcactggcctggatcgcagctgccaatgaaggccttttctatgcgccagaacggtggtgcctgttttgatctcctccttccttacccttcagcccattatatgtcgattctgaagccaagcaccgtttgatgacctgacaaagggttatcaaaccatagtaaaaggatatgaagatcaacaacagcatgatgacctattttgttcaagcaaagctaaatagaaagatgaacaagagacaaagagcaagcttgctggaactgatgcaatgaagatacaaaatttctattaccaatactgtagaaaatatcttcacaaaggtgatgaaaaaggaaactgttcagtttctcaac

SEQ ID NO: 221471 - DNA, 841 bp, Zea Mays
tgacgatattaccctcgaccctcgaggtctcgagtcttgaccaacccatacgcacccaccctccgccgccgtttttctctccccatctcgcccgccgttttcgtccttatcgatctcctcgcacctcgtggcggcacctctccccttcgatccaccaagggtttaggatcggcggcgatggcggcgaggctggcacagctgcgcgctcaggcggtgcaggcggcggagttcgcctcgaagcacggcggctcctactacaaggagctcatggagaagaacaagcagtacgtcgtgcagccccccaccatcgagaaatgccaggagctctccaagcagctcttctacacccgcctcgcaagcctaccaggtcggtatgagtcattctggaaggagcttgatggtgtcaagcaggtatggaagaacaggaaggacctcaaggttgaggaccttgggattgcgactttatttggagttgagctttatgcatggttctgcgtaggcgagattgttggcagaggtttcaccttaaccggctataaggtctagttgatttccagtgatttaagacctgctttataaatcgacactttagctgatgcttgtcgaaacgacgatgatacctgccttccttcacaattttgtttcttgtaagagtctacctagtgctgaatgccagcaaagacgggcacatggttgcaacattgcctcaataatttgcccgcgcaattcttgattttgatgcatgtaattctttgtcagttgcatgtgctgcagtccctgcgtgcagactcatttcgtgtctttcgttctgcccacaaaataaattctttctgcgttacat

SEQ ID NO: 221472 - DNA, 396 bp, Zea Mays
gacgatattaccctcgaccctcgaggtctcgagtcttgaccaacccatacgcacccaccctccgccgccgtttttctctccccatctcgcccgccgttttcgtccttatcgatctcctcgcacctcgtggcggcacctctccccttcgatccaccaagggtttaggatcggcggcgatggcggcgaggctggcacagctgcgcgctcaggcggtgcaggcggcggagttcgcctcgaagcacggcggctcctactacaaggagctcatggagaagaacaagcagtacgtcgtgcagccccccaccatcgagaaatgccaggagctctccaagcagctcttctacacccgcctcgcaagggccctggtgctaactaatactccctatgtttccaaat

SEQ ID NO: 221473 - DNA, 2190 bp, Zea Mays
cttcctcctccctcgtctcgacccggctcgcccctgttatccgtctcgtctcccaccgctgcgcgcgcgagatagactctgtcgcatctcgatcaccaaccgggccattccattcgtgtgggtttgctcattttggctgggatttcacgcgggaccgatcaccgcacgccggtgtgcgcgtgcgtctggcgcacggccggcgtcctcctcccaacgcgccggaaataggcaggcggtgcatgcatgagcaggaagaggagagaaggaggcggcggcggaagaggcgctgggccggtggaccatcacggcggcggcaaggggtcggaggccggcgctgccgccaccgatgccgtgtccatggacggcggcctccgcgaggtgtctgtccccgtcgtcttctcggtttggtgcctcctcttcctcctgcgatcccagttcctccacagccaggccgacgacgacccttcgtcaggttctacgaggagcacggcatgcgcgacagctactgcaaggtgaggccgttggaggcctacgtgctcccctaccataacgactcgtgtcagtcctcctactcgcactcacagccgccccaagaagcgccctcgtcgtccgcgctcgcgtcgccgcagtacaatgccaccaccggcggcaacgcgtcgtcgcccgaggcggcgttcgtgggcctcgacgagttccgcagccgcatgatgcagggcaaggcggagaacgacaccggcccgcccacggatggcggcgtcgcgcaccgcctcgagcccaacggcgccgagtacaactacgccgcggcggccaagggcgccaaggtgctcgcgcacaacaaggaggccaagggcgccgccaacatcctcggcggcgacaaggacaagtacctgcgcaacccgtgctccgccgccgacaagttcgtcgtggtcgagctctcggaggagacgctcgtcgacaccgtcgcgctggcgaacctggagcactactcgtccaacttcagggagttcgaggtgtacggcagcacgagctacccgacggaggcgtgggagctgctggggcgtttcaccgccgagaacgccaagcacgcgcagcgcttcgtgctgccggagcccaggtggacgcggtacctccgcctgcgcctcgtcagccactacggatccggcttctactgcatcctcagttacctcgaggtctacggcgtcgacgccgtcgagcggatgctacaggacttcatcgctggcgctggcgccggcgccggcgccgaggccgacgcctccagggaccgcgcgcccatcgacttcgccaaccgggacgccgactgcaacgacaccaccgctcagcaggatgggaacggcggcgctgggaggaatgacagcaccgccggcgacggcaagagcaacagctccaggagcggcgacgcgaagctgccgccgcaggtagcggcgttggcatcgcccacggggcggatccacagcgacggcgtgctaaagatcctgatgcagaagatgcggtcgctggagctgagcctgtcgacgctggaggagtacacgagggagctcaaccagcggtacggcgccaagctgccggacctgcagaacgggctctcgcagacggccgtggcgctggagaagatgaaggccgacgtgcacgacctcgtcgacgggaaggacagcgtggccaaggacctggacgacctcaaggcctggaagtcgaccgtctccggcaagctggacgatctgatcaaggagaaccaggagatgaggtggagcgtcgaggagatgcggggcgtgcaggagacgctgcagaacaaggagctggcggtgctgtccatcagcctcttcttcgcgtgcctggcgctcttcaaactggcgtgcgaccgcgtgttctgcctcttcgccggcaagggcagggaggaacccgacgcggaggagcacacaaggagcagtagggcgtggatgctcgtgctcgccagcagcagcttcaccaccctcatcgtcctgctctacaactgaagctttctagagtttcgcttgctagcacggagcaacgttcttttagccatgttcttgtccccgcatagctcattaactcccctctcaagtagatggggtaacgtatgtactcactatttcagaataaagatgaacacaggttccttgttcattgtaaaacaacctggaataatccaat

SEQ ID NO: 221474 - DNA, 1316 bp, Zea Mays
ctcgagtgagccagacaataaacgagtgtcaaataaataaatccaaatcaagagaatacaaagtgcggcatataaggaaaagaaaaaaaagctaataaaggccttccatttccactccccgtcgtgtcgcttcctccctcttcctccggagctgcgaaattttgagacccagccgggaaagcggaggcggagactacccaccccaccaccagccccccggaattcgcgcaaatcacagaagctccctagccgccggcgagcactcgtgcgctcccctggaagcggcggaggcggcggcggagcccgcctctctgccggcgccggcgatgggcaactcactggggtgctcggcttccggcgagcggctcgtctcggcggcgcgcgacggggacgccatcgaggcgcggatgctgctggagctcagccccgcgctcgcgcgctactccaccttcggcggcctcaacactccgctacacttcgccgccgccaagggccatctcgacattgtcacgatgctgctggagaaaggcgctgacgttaacgcgcgcaactactgcggccagactgcgctgatgcatgcttgtcggcatgggcactgggaggtggtgcagatgcttcttctatttagatgcaatgttactagggcagattacttgagtggtcgaacagcactgcattttgctgcacatgatggatttgttcggtgtattaggcttttagttgcagactttgtcccgagtgtggccttggaggatattgcttcttctgtggtggatggtggtgattgccagacaaacagtgggagcagtcctaattcatcgtcggggcagaagtttaatgaatcggcccgtgtgaggtacatcaacaaacctgcagatggtggtgttacagcacttcacatggcagcattgaacggtcacttagattgcatgcagttgttgattgacttgggcgctaatgtctcagctgtctcattcccctatggcactactgcaaatttgataggagctggcagtacaccgttgcattatgcagcaggtggggggaaacaagaatgctgtgagctactaatatcaaaaggcgctagcaggttgacactcaattgcaatgggtaagttttttttgttaatgatgctatgtagtatttagaagggcaggcatggtgcagtggagagctgtctcactgagtcaccaggttatgggttcgaagcaacctcttggtttatctctttcttagatcccactcatgtgggagcctccgacactaggtctgcccctttttatgatatgtttagtattccaattctttagtaatc

SEQ ID NO: 221475 - DNA, 2367 bp, Zea Mays
atgtgcatgtcctcactaatcgctcccacgcggccacgccgcttgtcatttgagaacagcaagcgtctcgaggaagcgtcgacggactacatggacgcggagagagacatcaagcccttcgtcttccctaccgtgcccaccaccattcagcggaacttccacggccccggcgctcgtcagccaacggcacggccattggagcgctgtggcactcgagtgctaccgcaaactcatcgaccttgctctgcgccacggcttagtaggaagttctggggcgccggcgattatgacgcggtggcggggaggtctgcgccacagcctccgagtctacagaatcgcatgtgcgtccacccggaatttctccactccaacgcgacctcgcataaatggccgtttggagccgtggcagagttgttggacaatgcggtggatgagatagaaactggtggtgctacaacgatattgctggacaaactcatcgacaaacggaatggatcaccagcattactaattcaagatgatggtggaggcatggatcctgattctttgaggcggtgcatgagctttggattttcagagaaacaatcagggtcttcgattggacaatacggaaatggattcaagactagcacaatgcggctcggggcagatgctattgttttcagtcgctgctgcaccaggagcagtgggcctacacaatccattggtctcctctcttacactttcttggtggaaacaggacatacaaatgttgtagttccaatgggttggagcgtcatggttcgaaacagttcttctcaaatttgtcggcgttgttgaaatggtccccttttgcaacagaagaagagctgatgcagaatttctgtgacattggtccacatggcaccaagattatagtgttcaatctgtggtccaacgacgatggtaatttggagctcgacttcgacacgaatccggaggatattatgatcagtggagcgccaaacccagaacaaatcagcaactctgttaggagggctaacgagaaccatctggcaaatcgactacgctattctcttagggtctatgcttctgtactgtatctacagctaccagattactttaggatcatgcttcgagggcgagaagttgagcgtcatcacattgcctctgacttgatatatcctgaacgcatcagttatagaccacaaagttgcggaataataagagaggctgaggttcttacaacaattgggttcttaaagggtgccccaaccattagcgtgcacggattcaacatctatcacaaaaaccgccttatcttgccattccatagagtgctgagtaccgcgagcagcaaaggcagaagcgtctctggagtgttggaggtagacttcatcaagcccacccatgacaaacaggactttgagaagtcgcagctgtttcagcggctgatgaaccgcctcaaggagatgactaacgagtactgggatctttacagtaacaagatcggatacgtgaaagtgccacgcgtgagagcagctcccactcctgctcctccagtgatgctggcaatagagaatggccccgccgaaccatcagaaaggagcgcgcctgctccgacgcaacccttgagatggcagcacggcaactccagctgcgtgaacgcagttccaatcgccatggcgccccctgcttttcacccagctcctgtcaaaacagagactgatgcaccaggagcgcctacgggctacgcctactcctactccccgtcctggccaagcgtgcaagccatgcaaatcgagaagataaaggaggaaccttccatggcggcgcctggcaccgattgggtagagacaagaaaaaggacgaacgacgatggcgccacgacggttgcgttattcaaaaggaggaaggctccgcaggagttggctggcagtggcagcagatccgctactgatcaggtatcccggtacgtgggagagggagagctgaatgaattctgcttcctgaagatggagaaccggatgctccgtggagagtgctcagaatttgagatggcagagaaggaactacgagtcaaggaacagaatctacggctcgagattgagatggcgcaggagcagttcaagagactactgggcgaatacgtctcgttctcatctatgccgacgcgtaaaccataggcaccgcttccgaagccaactcattagcgcaaaaggcgtgtgtacctgtacctagctctcagaaactcggcttcggttcattttctgtgtgacgaaaaggtctatatgggaaattgagctgaaaatggggggaaaatattcgccgtgttaattttctatagagatcggttacgatagacgggtagagagagtagcccacgga

SEQ ID NO: 221476 - DNA, 1110 bp, Zea Mays
gcgtccaccacccttaccgtgcccccgctccagccccgcccgcgccgtcttcctccctgcaatcccgccaccgcccgcgcgtcgtcctttcccttcaatctcgccctcgcccgcgccgtcccttccctgcatcccgtccccgtccgtgagccccctccacacgctcccgtccgcgaccccagatcccgtgactgccgccgtgtcttcgcccctagctccatcatcccgtcgtgtcccgccgtgccatcctccgctccgcgaccaccgcctctgctcccctcgtgcccagcgccgcgtccgcgaaccagcacccctcactctctctcccgcccggctctcctcgcccaactctctctcccgcaatcccacggcctcgccccaaatcgccgccccggctctcggtcctcgcccaagctctccatggaaggagatcgaggaatccgcgtccgctgcgcccggctctctctgcgtccgtagtctccctggaaggcgattcctcgatccgcgtctgctcgcttcggctcctccgttcccaaacctcctcaaccagcatctctagggttttcgcagccaccgcccatggctgccactccggaccgcgtcaatgccgaccttcatcgtcgcctcgccgtcgacactccaccgccgccccaggtagccaggaggaatcgtccaggcactaagcacaaggaacagatggaatgggtactccatggattaccaaggaaaaaacaagctggtttttagcctaactgatccgaaatcatgcacagcacaaggttagagttcatgttgattgcacccaagaggcaatgtaaaaactgggatttcgaaattgggggatcttttgcaggtagagactgtacgatagttgattgcaccagaaaaatagtagcccagatgggtaagaaagagctgatgggaggcaaggacttctaccatgtggaagtacagtcaggatatgaccaagctttcatcattggggtgatggcaattcttgacagcatacatggagaaagacatgggacaaatagaagacatctaaagctttccaaggcagatgcctccagaggatatctactctctggtcatatgatcgatgcatagatc

SEQ ID NO: 221477 - DNA, 982 bp, Zea Mays
gcgtccaccacccttaccgtgcccccgctccagccccgcccgcgccgtcttcctccctgcaatcccgccaccgcccgcgcgtcgtcctttcccttcaatctcgccctcgcccgcgccgtcccttccctgcatcccgtccccgtccgtgagccccctccacacgctcccgtccgcgaccccagatcccgtgactgccgccgtgtcttcgcccctagctccatcatcccgtcgtgtcccgccgtgccatcctccgctccgcgaccaccgcctctgctcccctcgtgcccagcgccgcgtccgcgaaccagcacccctcactctctctcccgcccggctctcctcgcccaactctctctcccgcaatcccacggcctcgccccaaatcgccgccccggctctcggtcctcgcccaagctctccatggaaggagatcgaggaatccgcgtccgctgcgcccggctctctctgcgtccgtagtctccctggaaggcgattcctcgatccgcgtctgctcgcttcggctcctccgttcccaaacctcctcaaccagcatctctagggttttcgcagccaccgcccatggctgccactccggaccgcgtcaatgccgaccttcatcgtcgcctcgccgtcgacactccaccgccgccccagggaggaatcgtccaggcactaagcacaaggaacagatggaatgggtactccatggattaccaaggaaaaaacaagctggtttttagcctaactgatccgaaatcatgcacagcacaagatgggtaagaaagagctgatgggaggcaaggacttctaccatgtggaagtacagtcaggatatgaccaagctttcatcattggggtgatggcaattcttgacagcatacatggagaaagacatgggacaaatagaagacatctaaagctttccaaggcagatgcctccagaggatatctactctctggtcatatgatcgatgcatagatc

SEQ ID NO: 221478 - DNA, 958 bp, Zea Mays
gcgtccaccacccttaccgtgcccccgctccagccccgcccgcgccgtcttcctccctgcaatcccgccaccgcccgcgcgtcgtcctttcccttcaatctcgccctcgcccgcgccgtcccttccctgcatcccgtccccgtccgtgagccccctccacacgctcccgtccgcgaccccagatcccgtgactgccgccgtgtcttcgcccctagctccatcatcccgtcgtgtcccgccgtgccatcctccgctccgcgaccaccgcctctgctcccctcgtgcccagcgccgcgtccgcgaaccagcacccctcactctctctcccgcccggctctcctcgcccaactctctctcccgcaatcccacggcctcgccccaaatcgccgccccggctctcggtcctcgcccaagctctccatggaaggagatcgaggaatccgcgtccgctgcgcccggctctctctgcgtccgtagtctccctggaagccaccgcccatggctgccactccggaccgcgtcaatgccgaccttcatcgtcgcctcgccgtcgacactccaccgccgccccaggtagccagagggaggaatcgtccaggcactaagcacaaggaacagatggaatgggtactccatggattaccaaggaaaaaacaagctggtttttagcctaactgatccgaaatcatgcacagcacaaggtagagactgtacgatagttgattgcaccagaaaaatagtagcccagatgggtaagaaagagctgatgggaggcaaggacttctaccatgtggaagtacagtcaggatatgaccaagctttcatcattggggtgatggcaattcttgacagcatacatggagaaagacatgggacaaatagaagacatctaaagctttccaaggcagatgcctccagaggatatctactctctggtcatatgatcgatgcatagatc

SEQ ID NO: 221479 - DNA, 1285 bp, Zea Mays
gcgtccaccacccttaccgtgcccccgctccagccccgcccgcgccgtcttcctccctgcaatcccgccaccgcccgcgcgtcgtcctttcccttcaatctcgccctcgcccgcgccgtcccttccctgcatcccgtccccgtccgtgagccccctccacacgctcccgtccgcgaccccagatcccgtgactgccgccgtgtcttcgcccctagctccatcatcccgtcgtgtcccgccgtgccatcctccgctccgcgaccaccgcctctgctcccctcgtgcccagcgccgcgtccgcgaaccagcacccctcactctctctcccgcccggctctcctcgcccaactctctctcccgcaatcccacggcctcgccccaaatcgccgccccggctctcggtcctcgcccaagctctccatggaaggagatcgaggaatccgcgtccgctgcgcccggctctctctgcgtccgtagtctccctggaaggcgattcctcgatccgcgtctgctcgcttcggctcctccgttcccaaacctcctcaaccagcatctctagggttttcgcagccaccgcccatggctgccactccggaccgcgtcaatgccgaccttcatcgtcgcctcgccgtcgacactccaccgccgccccaggtagccagagggaggaatcgtccaggcactaagcacaaggaacagatggaatgggtactccatggattaccaaggaaaaaacaagctggtttttagcctaactgatccgaaatcatgcacagcacaaggtagagactgtacgatagttgattgcaccagaaaaatagtagcccagattaaaggcatatcccatgagagcagaaaataatatgtctacatctagatgtctatagacatggtgcatttttttggctaagaaaaatgtataaccgtctctagaaatagtgctaccctgtgatgtacatgtgtttgcaagtacttgtatgaaagtgtagaagtttaagggcagcattacactcatgccaccagcatttgagtgtcagaggggttgagatctaaagacatagtatatgttctgcagatgggtaagaaagagctgatgggaggcaaggacttctaccatgtggaagtacagtcaggatatgaccaagctttcatcattggggtgatggcaattcttgacagcatacatggagaaagacatgggacaaatagaagacatctaaagctttccaaggcagatgcctccagaggatatctactctctggtcatatgatcgatgcatagatc

SEQ ID NO: 221480 - DNA, 1029 bp, Zea Mays
gcgtccaccacccttaccgtgcccccgctccagccccgcccgcgccgtcttcctccctgcaatcccgccaccgcccgcgcgtcgtcctttcccttcaatctcgccctcgcccgcgccgtcccttccctgcatcccgtccccgtccgtgagccccctccacacgctcccgtccgcgaccccagatcccgtgactgccgccgtgtcttcgcccctagctccatcatcccgtcgtgtcccgccgtgccatcctccgctccgcgaccaccgcctctgctcccctcgtgcccagcgccgcgtccgcgaaccagcacccctcactctctctcccgcccggctctcctcgcccaactctctctcccgcaatcccacggcctcgccccaaatcgccgccccggctctcggtcctcgcccaagctctccatggaaggagatcgaggaatccgcgtccgctgcgcccggctctctctgcgtccgtagtctccctggaaggcgattcctcgatccgcgtctgctcgcttcggctcctccgttcccaaacctcctcaaccagcatctctagggttttcgcagccaccgcccatggctgccactccggaccgcgtcaatgccgaccttcatcgtcgcctcgccgtcgacactccaccgccgccccagggaggaatcgtccaggcactaagcacaaggaacagatggaatgggtactccatggattaccaaggaaaaaacaagctggtttttagcctaactgatccgaaatcatgcacagcacaaggtagagactgtacgatagttgattgcaccagaaaaatagtagcccagatgggtaagaaagagctgatgggaggcaaggacttctaccatgtggaagtacagtcaggatatgaccaagctttcatcattggggtgatggcaattcttgacagcatacatggagaaagacatgggacaaatagaagacatctaaagctttccaaggcagatgcctccagaggatatctactctctggtcatatgatcgatgcatagatc

SEQ ID NO: 221481 - DNA, 1034 bp, Zea Mays
cgctgcagctggactcgtctccgatcctccaccaccaacttccattttccccaaccctccacgcccttctccaagaaacagagcgacgatagccgtgtcgacgagatcgacccagcagcaggatcgatcggtcagagacgatgatgatggattccgcggagcatcagaaggtgatggggatcgcgccggcggcggcgcccgcagcggaggcggggagaccgtgctgcgtcgagtgccgcaccaccgcgacgcccatgtggcgcggcgggccgacagggcccagggaagaagcggaggcaagagctaggtctcgatagcgccaagaaaccacaacaaaaccagcggccgccgccgccacagcagcagcagcagcaagaggatcactgtccggcaacaagtgcagtcgctgtcagagacaacaccaaaagcagcaggctccaagtggtgaagaaacggagggtcctgatgggagtggaggaggccgcagtcctgctcatggccttgtcctcctcatccagatccacgctgctacatggctaggaactcggcacatcacccaaaaaagggctgctcgttgtgtacatacatatacaggacgcacaaacacaaacaggccacccaggggttccaagccagcgatgtatctgttgggtctatgcttcgtcgccgaaggtcttcaagggagaagcggcttaaaatgtgtgagcaggtatcttcggactcgtatcagaaagggaaaagctacaaaggttgacacagcgccgaagctgtgaagcaggaaagcttcgacatgttcgcagaaaagggaaccgacttaaagatgaaaaggccatttagacctcgatagagtgctatagaattatcaccaaatgtaaaggacatgtatgtaattttgtatgggttgtaccccgtgcctataaataggtgaacagtacccccgtactgttcacgtgaacttggcatttgcttttgcgtcacacttgtattttcatctccttccaagccgaaggtacatttataattcgatattgtct

SEQ ID NO: 221482 - DNA, 1786 bp, Zea Mays
cgcagttcctttattatcgttgtggcgcgcggcttgcttccacactcctgccgctgcagctggactcgtctccgatcctccaccaccaacttccattttccccaaccctccacgcccttctccaagaaacagagcgacgatagccgtgtcgacgagatcgacccagcagcaggatcgatcggtcagagacgatgatgatggattccgcggagcatcagaaggtgatggggatcgcgccggcggcggcgcccgcagcggaggcggggagaccgtgctgcgtcgagtgccgcaccaccgcgacgcccatgtggcgcggcgggccgacagggcccagggtgagccctcgctgttctctcgctctcgctctctccctccctccgcttctttctctctgttcctagcttgtcgtgctgcctggagccctggaggccgtcggactctcgatcataagcatggcgtgatcagagcagttgatcgccgccgatcacctcttcattcttggtgtggattaactgcagttcggattcatgtggtagtttggatttaggagacgggtgcggcgatgacggtgacatgcccggtgaatgattgggtattccaatccaatcataggctgggctccatcgattggccgccgccgccgtcgcatgcggagaaagctcgatcgagccgctttgagctgattggttccgctttgggtggttaggtgagctgttctaagcaaggcaagggaagggtgctaacctcccctcccacccgcggccagttccccgcccctagctgtgaacgcttttaaaaaaatgggttcctaatctccttttgtttatatatatcttattattgctccagcctattgtttagggacatccatgcatacatgtctccatcacagctgtttgttcctatccagtattaggatcaacagagcaagcaatcaaccagaaactaacttagaaaaaccagcgttttggatgagcaatcttgttaatttggtttggttgcagtcgctctgcaacgcgtgtgggatccggtacaggaagaagcggaggcaagagctaggtctcgatagcgccaagaaaccacaacaaaaccagcggccgccgccgccacagcagcagcagcagcaagaggatcactgtccggcaacaagtgcagtcgctgtcagagacaacaccaaaagcagcaggctccaagtggtgaagaaacggagggtcctgatgggagtggaggaggccgcagtcctgctcatggccttgtcctcctcatccagatccacgctgctacatggctaggaactcggcacatcacccaaaaaagggctgctcgttgtgtacatacatatacaggacgcacaaacacaaacaggccacccaggggttccaagccagcgatgtatctgttgggtctatgcttcgtcgccgaaggtcttcaagggagaagcggcttaaaatgtgtgagcaggtatcttcggactcgtatcagaaagggaaaagctacaaaggttgacacagcgccgaagctgtgaagcaggaaagcttcgacatgttcgcagaaaagggaaccgacttaaagatgaaaaggccatttagacctcgatagagtgctatagaattatcaccaaatgtaaaggacatgtatgtaattttgtatgggttgtaccccgtgcctataaataggtgaacagtacccccgtactgttcacgtgaacttggcatttgcttttgcgtcacacttgtattttcatctccttccaagccgaaggtacatttataattcgatattgtct

SEQ ID NO: 221483 - DNA, 1122 bp, Zea Mays
cctcccgcccgcccccactagtcaatactgagcacaatacgccacccaccacccctccatcaaagaaaagggcggcaggccgggggaggggaaggggctgagcatcagagcatgacgtcgggagcggcggcggtgggaggcctcgggcggacgccgacatggaaggagcgggagaacaacaagcgccgggagcgccggcggagggccatcgccgccaagatcttcacgggcctccgcgcgctcggcaactacaagctgcccaagcactgcgacaacaacgaggtgctcaaggcgctgtgccgcgaggcggggtgggtcgtcgaggacgacggcaccacctaccgaaagggatgcaagccgccgccagggatgatgagcccgtgctcgtcctcgcagctgctgagcgcgccgtcctcgagcttcccgagcccggtgccgtcctaccacgccagcccggcgtcgtcgagcttcccgagcccgacgcgcctcgaccacggcagcggcagcaacagccacacccccggccccgccgccgcagcagccgcagcggcggcggcggcctcctccctgctcccgttcctccggggcctgccgccgctccgcgtctccagcagcgcgcccgtgacgccgccgctctcgtcgcccacggcgggcgtcgcggccgcccgccaaggtccgcaagcccgactgggacgccgccgccgccgccgacccgttccgccaccccttcttcgcggtgtccgcccccgccagcccgacccgcgcgcgccggcgcgaagagcacccggacaccatccccgagtgcgacgagtccgacgtctgctgctccgcggtgatgattctgttgttttgattcatggactggtaaaatgaggtgaatcggaacagtcgatcgtccgtccggattgaattattgataacgctggctcgtcctttgttagcgcttcgaaatgcgtggtctcgtgggtaaaaaagaggacgcgctgaactttgtggctggacgatcttgtctctcttggtcttggccgtgactgtgactgcacgacattttactcttcacgtgctactcttgtttttatttttgacagtttatcacagtgggactgtgggagtatcttctct

SEQ ID NO: 221484 - DNA, 3070 bp, Zea Mays
cctgctcaatcttccccttcgtttattgctcttctccggtccttctccgcaacccctggccctgtcaagcagacgcagggtgacaccaggcagcagcccacctccacgcgaacacgccgcaccacaccatcaccggcaccgcagcacggcagccagtcaccaggactccaggagtgatctttgatccccaccaggccgccacgctactgtcggtaaggccagggaccctgctgcatctgccggctgctcctctccccgcccccggttccatgagaggtcggcggtttcgataacacacaccaactgctccctccactccttccccctgccttcagcccttcccgcaccactcccaactcgtaaacgctgtgcgccaacgccgtcgcccttccggatccgtcgtccttccgccggcgccgtgatggacccaagcgattccaactccgccgcaggaggaaagacacaaaatgtttcagtaccgcctgttgaaggtgtagctggaggaggaactagctatggatgggtggatggaggtttgcggggtacaaatattggtgctggtgtgattgatcctacaaaagtacactcagatgatcttttgcacgtctggtctatgcccagcacagcaaatgttagccagcaagaagcgcctcggcctctagagaaagtcaaccttttggcagcaagaaatgaaagggaaagttttcaaattgctttacgcccaaaggtttcatgggcaacttcaggtattgcagggtctgtgcagatacaatgcaccgatctctgctcctcctcaggagacaggttagtcgttggtcagtccataactttgcgacgtgtggtgcctatcttaggtgtaccagatgcacttgttcctattgatccactcagtcctcaaataagtattcaaccaggggagacagctgcagtttgggtatcagtaaatgttccatgtgggcaaccgcctggtttatatgagggtgaaatattcattactgcagttaagacagaattagattccagaacagaatctctaccaaaatctgaaaagtgtaggctatacagagaattaagaagttgtcttgacctcactggacccagagactactcgtcaccagaggaaatggtacaaagactaacatcagcttctactgtactaaggagggtgttggataatccagcactccaggactgtcaagagaataatggatttggagacatgatggatgaagatgttataaacaatatttcagttcgcttgaagttaagccttactgtttgggacttcactctcccagtgacaccttctttacctgctgtttttggtatatctgaaactgtcattgaagatcgattctgtttggagcatggcactgaaggatggtatagtgcactggatcatcactttaggtggctcctccaatataggattagtccatttttctgcagatggggtgatagcatgcgcattctagcatacacatgcccttggcctgccgatcatccgaaggctaatgaatattactctgacccaagattagcagcatatgctgtaccctatgcacctatcctatcgtgtacggatgctgcaaaaaattccctgaggagagaggttgaaatcttaaaatcgaagcctcattggtccaaagcttacttctatttgtgggatgagccattaaatgtggaacagtatgacatgatatgcaacatctctaatgagctacggtcatatgcacctgatgtgcgaattttgacaacttactattgtggtccaagtggctctgaactggctccctctacatttgaagcttttgcaaaagttccaaatgttctgcgtccgcacacgcaaatcttttgcacaagtgaatgggttcttggcacaagagaagacctagtgaaggatattgttgctgaattacggcctgatcttggtgaggagtggtggacatatgtttgtatgggtccttctgatcctcaaccaaactggcaccttgggatgcgtggaacccagcaccgggcagtgatgtggcgagtgtggaaggaaggtgggacaggatttctttattggggttccaactgctatgagaaggctatgatcccaagtgctgagatctgtttccgacgcggccttcctcctggcgacggtgtcctgttttaccctggtgaagtgttttcttcgtcacatgaaccagttgcttccacccggctagagcgcattctcagtggcatgcaggacatcgaatacctgaagctttattcttcacggtatgggagggaggaaggcctggcccttatagagaagactggcatgtaccttggaccggatcgatatacgctggatcatggaccggtagatgtgatgaggggtgaggtgtaccgcacctgcaggtcttagtgtagcaatgcctgccagatgctgtccttccagtctagggcgtctgttgtattatatatggtggtatgtgatctatgtagcgaattaatctacccttggtgatcgatcagatcatcaaacctggactaaactagtcctggtgcatcttttgaatctggctcgagagttgcatcaagtcgggagaaaaaaaacccaagagatctggccaagagatggagcgacccaggtccggctctggtacaaggcccagttagctaccggaagtgggccctatctgctgcaacaggattgagacgagattggcattgtcctctcgattccatgacgctgtgcccgcatacagctgaagctgaaatattctcctattagctgttaccttccatttcctttctgcgatttgcaccgcaggttacaccctccaaaggcgcattcgtttctaccgtgtgccgtgacgaggattcccgtctcagcaacggacgctgccgccgcgatgccctgtctctttcgaggtcggtagcgccatggcctaacgcggagctgtgtttggttggaagggaataatgcatgcgatgcatggtgaggaaggatgagtctatcccgagctctgtttggtccagagacatgaaaattaggtccagactgttaagtaaccctagttagggttatgtgggcaaa

SEQ ID NO: 221485 - DNA, 772 bp, Zea Mays
cttcgtactaagagcacctccaacaggctagttcttcatactgctttcctgctccctggcggtgttctgcaacatgagccaatacctctgcatcgggcggttctcagcgacctcattccaggtcctgggccacatgaagaccgtgtgcgtgctgatcctgggctggatcctgtttgactcggccctcaccgtgaagaacatcctcgggatgctgctcgccgtgatgggcatggtggtctacagctgggccgtggaagcggagaagaaggcggcagccccgatcccccggaacaagggcggcatgctcgacggcgaggacgtgcccctcaaggccagggtgagcggcgtgcccgcggtcgacctcgaggacggcgacgtgaagggctagccgctgatccgttcattcttctcgttcttttgtaactgtgcgcgcgcggtcgctcgatgcaaagttgcttgttcgtcggttctcagctatcgacactacactgttaattttgttggccccttgttggggggagtctgctcgtaggtgaccccccctcccccgggttcgacgtagatgaaacacacgcgggcaaattgttaggatttttcaggcggggaggtggcgacatgctgttatagatggtgacaagactttatataatggaaatgcaggtgtttttgaggtttcgctgttcagttctggttgctggggttctgacatgtttcagtcctagcacacgccacgggcatcatgggtttcgtcggagctgttccacatgggatg

SEQ ID NO: 221486 - DNA, 1618 bp, Zea Mays
ctcgcgctccccgttgctcccttccttgcctaggcggcaacgccctcgtgctttataacccagcggcccctcccgcgtgaggcaaccgagacgggaggagaccagaccagcagcagcccatccgaaccccgcctcctcctcctcctcccgggttcgcgtgaggctgtgtgctgctgggaggcggcgccggcgccggcgccatggaggcggagaagaagccgccggcggtgtccgacgtgggcgcgtgggcgatgaacgtcgtcagctccgtcagcctcatcatggccaacaagcagctcatgtcctcctccggctacgccttcgccttcgccaccacgctcaccgggttccacttcaccgtcacggcgctcgtcgggtggatctccaacgccaccggctactccgtctccaagcacgtcccgctctgggagctcgtctggttctcgctcgtcgccaacacctccatcaccgggatgaacctcagcctcatgctcaactccgtcggattctaccaatctccaaactgagcatgattccggtggtctgcctcatggaatgggtgctcaacagcaagcactacaccactaaggtcatatccgcagtcatcgtcgtggccgccggtgtcgggatttgtactgtcacggatgtcgaggtcaatgccaaggggttcatctgcgcttgcgtggcagtgttctgcacgtcgcttcaacagatcacaattggctcctttcagaagaagtacaacattggatcatttgagctgctgagcaaaactgcgccaattcaggcactttcactcattatactgggcccctttgtggactactatctaaatgggcggtcattgttgaactaccctttttcaggaggggcaactttcttcatactgctttcctgctccctggcggtgttctgcaacatgagccaatacctctgcatcgggcggttctcagcgacctcattccaggtcctgggccacatgaagaccgtgtgcgtgctgatcctgggctggatcctgtttgactcggccctcaccgtgaagaacatcctcgggatgctgctcgccgtgatgggcatggtggtctacagctgggccgtggaagcggagaagaaggcggcagccccgatcccccggaacaagggcggcatgctcgacggcgaggacgtgcccctcaaggccagggtgagcggcgtgcccgcggtcgacctcgaggacggcgacgtgaagggctagccgctgatccgttcattcttctcgttcttttgtaactgtgcgcgcgcggtcgctcgatgcaaagttgcttgttcgtcggttctcagctatcgacactacactgttaattttgttggccccttgttggggggagtctgctcgtaggtgaccccccctcccccgggttcgacgtagatgaaacacacgcgggcaaattgttaggatttttcaggcggggaggtggcgacatgctgttatagatggtgacaagactttatataatggaaatgcaggtgtttttgaggtttcgctgttcagttctggttgctggggttctgacatgtttcagtcctagcacacgccacgggcatcatgggtttcgtcggagctgttccacatgggatg

SEQ ID NO: 221487 - DNA, 1783 bp, Zea Mays
tcgtctcctcgtcaccccgcgagcttttttcaccgctgccctgccctgcccccgcgcccgttgacgtttccggcccccaattcgaaagcctcgcgctccccgttgctcccttccttgcctaggcggcaacgccctcgtgctttataacccagcggcccctcccgcgtgaggcaaccgagacgggaggagaccagaccagcagcagcccatccgaaccccgcctcctcctcctcctcccgggttcgcgtgaggctgtgtgctgctgggaggcggcgccggcgccggcgccatggaggcggagaagaagccgccggcggtgtccgacgtgggcgcgtgggcgatgaacgtcgtcagctccgtcagcctcatcatggccaacaagcagctcatgtcctcctccggctacgccttcgccttcgccaccacgctcaccgggttccacttcaccgtcacggcgctcgtcgggtggatctccaacgccaccggctactccgtctccaagcacgtcccgctctgggagctcgtctggttctcgctcgtcgccaacacctccatcaccgggatgaacctcagcctcatgctcaactccgtcggattctaccagatctccaaactgagcatgattccggtggtctgcctcatggaatgggtgctcaacagcaagcactacaccactaaggtcatatccgcagtcatcgtcgtggccgccggtgtcgggatttgtactgtcacggatgtcgaggtcaatgccaaggggttcatctgcgcttgcgtggcagtgttctgcacgtcgcttcaacagatccaaggcactgttattggaagcccgaactttgcaactcggctctgaactacagtaatacagatcaatggtaaaaagacaattggctcctttcagaagaagtacaacattggatcatttgagctgctgagcaaaactgcgccaattcaggcactttcactcattatactgggcccctttgtggactactatctaaatgggcggtcattgttgaactaccctttttcaggaggggcaactttcttcatactgctttcctgctccctggcggtgttctgcaacatgagccaatacctctgcatcgggcggttctcagcgacctcattccaggtcctgggccacatgaagaccgtgtgcgtgctgatcctgggctggatcctgtttgactcggccctcaccgtgaagaacatcctcgggatgctgctcgccgtgatgggcatggtggtctacagctgggccgtggaagcggagaagaaggcggcagccccgatcccccggaacaagggcggcatgctcgacggcgaggacgtgcccctcaaggccagggtgagcggcgtgcccgcggtcgacctcgaggacggcgacgtgaagggctagccgctgatccgttcattcttctcgttcttttgtaactgtgcgcgcgcggtcgctcgatgcaaagttgcttgttcgtcggttctcagctatcgacactacactgttaattttgttggccccttgttggggggagtctgctcgtaggtgaccccccctcccccgggttcgacgtagatgaaacacacgcgggcaaattgttaggatttttcaggcggggaggtggcgacatgctgttatagatggtgacaagactttatataatggaaatgcaggtgtttttgaggtttcgctgttcagttctggttgctggggttctgacatgtttcagtcctagcacacgccacgggcatcatgggtttcgtcggagctgttccacatgggatg

SEQ ID NO: 221488 - DNA, 1788 bp, Zea Mays
gtcgtctcctcgtcaccccgcgagcttttttcaccgctgccctgccctgcccccgcgcccgttgacgtttccggcccccaattcgaaagcctcgcgctccccgttgctcccttccttgcctaggcggcaacgccctcgtgctttataacccagcggcccctcccgcgtgaggcaaccgagacgggaggagaccagaccagcagcagcccatccgaaccccgcctcctcctcctcctcccgggttcgcgtgaggctgtgtgctgctgggaggcggcgccggcgccggcgccatggaggcggagaagaagccgccggcggtgtccgacgtgggcgcgtgggcgatgaacgtcgtcagctccgtcagcctcatcatggccaacaagcagctcatgtcctcctccggctacgccttcgccttcgccaccacgctcaccgggttccacttcaccgtcacggcgctcgtcgggtggatctccaacgccaccggctactccgtctccaagcacgtcccgctctgggagctcgtctggttctcgctcgtcgccaacacctccatcaccgggatgaacctcagcctcatgctcaactccgtcggattctaccagatctccaaactgagcatgattccggtggtctgcctcatggaatgggtgctcaacagcaagcactacaccactaaggtcatatccgcagtcatcgtcgtggccgccggtgtcgggatttgtactgtcacggatgtcgaggtcaatgccaaggggttcatctgcgcttgcgtggcagtgttctgcacgtcgcttcaacagatcgcagcaaggcactgttattggaagcccgaactttgcaactcggctctgaactacagtaatacagatcaatggtaaaaagacaattggctcctttcagaagaagtacaacattggatcatttgagctgctgagcaaaactgcgccaattcaggcactttcactcattatactgggcccctttgtggactactatctaaatgggcggtcattgttgaactaccctttttcaggaggggcaactttcttcatactgctttcctgctccctggcggtgttctgcaacatgagccaatacctctgcatcgggcggttctcagcgacctcattccaggtcctgggccacatgaagaccgtgtgcgtgctgatcctgggctggatcctgtttgactcggccctcaccgtgaagaacatcctcgggatgctgctcgccgtgatgggcatggtggtctacagctgggccgtggaagcggagaagaaggcggcagccccgatcccccggaacaagggcggcatgctcgacggcgaggacgtgcccctcaaggccagggtgagcggcgtgcccgcggtcgacctcgaggacggcgacgtgaagggctagccgctgatccgttcattcttctcgttcttttgtaactgtgcgcgcgcggtcgctcgatgcaaagttgcttgttcgtcggttctcagctatcgacactacactgttaattttgttggccccttgttggggggagtctgctcgtaggtgaccccccctcccccgggttcgacgtagatgaaacacacgcgggcaaattgttaggatttttcaggcggggaggtggcgacatgctgttatagatggtgacaagactttatataatggaaatgcaggtgtttttgaggtttcgctgttcagttctggttgctggggttctgacatgtttcagtcctagcacacgccacgggcatcatgggtttcgtcggagctgttccacatgggatg

SEQ ID NO: 221489 - DNA, 1765 bp, Zea Mays
aaactatatgctagtatatcaaaatacactacaagattgtggcacaaatttaaacaaacaatgtcactccaactggggtgaattttactaagatacatctgaattgcatatatagttacctaaatcagctttcaggcagtccatcgcacacaccacgccttgtcaggaaataacagcaactaaacaagcaagatgcaccagaaatagacgacgcagacacgcagtacatactaacacagacacctgaccagaccagcagcagcccatccgaaccccgcctcctcctcctcctcccgggttcgcgtgaggctgtgtgctgctgggaggcggcgccggcgccggcgccatggaggcggagaagaagccgccggcggtgtccgacgtgggcgcgtgggcgatgaacgtcgtcagctccgtcagcctcatcatggccaacaagcagctcatgtcctcctccggctacgccttcgccttcgccaccacgctcaccgggttccacttcaccgtcacggcgctcgtcgggtggatctccaacgccaccggctactccgtctccaagcacgtcccgctctgggagctcgtctggttctcgctcgtcgccaacacctccatcaccgggatgaacctcagcctcatgctcaactccgtcggattctaccagatctccaaactgagcatgattccggtggtctgcctcatggaatgggtgctcaacagcaagcactacaccactaaggtcatatccgcagtcatcgtcgtggccgccggtgtcgggatttgtactgtcacggatgtcgaggtcaatgccaaggggttcatctgcgcttgcgtggcagtgttctgcacgtcgcttcaacagatcacaattggctcctttcagaagaagtacaacattggatcatttgagctgctgagcaaaactgcgccaattcaggcactttcactcattatactgggcccctttgtggactactatctaaatgggcggtcattgttgaactaccctttttcaggaggggcaactttcttcatactgctttcctgctccctggcggtgttctgcaacatgagccaatacctctgcatcgggcggttctcagcgacctcattccaggtcctgggccacatgaagaccgtgtgcgtgctgatcctgggctggatcctgtttgactcggccctcaccgtgaagaacatcctcgggatgctgctcgccgtgatgggcatggtggtctacagctgggccgtggaagcggagaagaaggcggcagccccgatcccccggaacaagggcggcatgctcgacggcgaggacgtgcccctcaaggccagggtgagcggcgtgcccgcggtcgacctcgaggacggcgacgtgaagggctagccgctgatccgttcattcttctcgttcttttgtaactgtgcgcgcgcggtcgctcgatgcaaagttgcttgttcgtcggttctcagctatcgacactacactgttaattttgttggccccttgttggggggagtctgctcgtaggtgaccccccctcccccgggttcgacgtagatgaaacacacgcgggcaaattgttaggatttttcaggcggggaggtggcgacatgctgttatagatggtgacaagactttatataatggaaatgcaggtgtttttgaggtttcgctgttcagttctggttgctggggttctgacatgtttcagtcctagcacacgccacgggcatcatgggtttcgtcggagctgttccacatgggatg

SEQ ID NO: 221490 - DNA, 762 bp, Zea Mays
ttttgcatggttaattaggcaaatggtgatggagtttttgttgattgtaactttgtgcctacagattctaagattcaatcagtactgccactgacgaaaactgaaagaaagaaaaggataaaagagaagatggatctgaagaagaaagagaaggatagtaacaaggacaaagatgatgaggataccaaggataaagatgatgggaaagaagaggatagtaacgaggacagagatgatgaggagaccgaggagaaagatgatgggaatgttgcccctcaaacctatttcttgcagggcaggcatatcaacttgaatgttaggcctatcaattttcttggactatctacccatgttatccaccagataaatgatggcccatgcgcccttattgcagcaatgttctattctcagggggacatctcttttgaaccacatgaaactgtggtgtcaatggagtatctacttggccttgtcctcgctcttcttggaggaagtgtgaaaatgcaggactattctgatgaaagaaaaagtcagatattgaatgtggtgaagagtctggccggagggtttgatatggatgttatcttcaccagaacggatggttttacaatgactccagagtggttgcttctggattgcttagatctcaaccttcgacatggttggattgctgctaggatcaatggagtattaaattctctagtcactgattctaattatttagaaactcgtgtagtttggcagacgcttgacgggatgtag

SEQ ID NO: 221491 - DNA, 8912 bp, Zea Mays
gcgcccggctggcttcgcctggccgtggcacccctcacctctctctctctctctctctctctctctcccctgtccgcggtcgcgtcgccttccaccaccaccccaccagcccacccgcatccgcgtcgctgctgctgctgccaccgtcgtgcgtctccgcgccacgcgtgcgcgtacccgtggcggatcgcgctgcagcagaggcgatcggcgagcgatccaggggaggagatcgcttgtcggcgccgccgctgccgccgccgatcgagccgcgactcctcccgttcggtcccctcgcagctcccgtccgggcccgtccctcgaggcagggcggggtggctcgatcgcccgcagatgaaacatggcttcgacgttaaacattgtaataggttctcatgtatgggtggaagataaagatttgtcctgggttgatggcgaggtatcccggattgatggtaaaaaagcccatgttcgcacaaccaaggggaagacggtcattgcaaatatatcggatatccaccctaaagacacagaagcaccgcctgatggggtggatgacatgacaaggttatcatacttgcatgagcctggtgttttagataacctggctgtcagatatgcgaaaaatatcatttatacctatactggtaacattctgattgcaataaatccattccaaaggctacctaatctggttgatgcccgtactatggaaaaatacaaaggtgcaaatcttggtgacctagatcctcatgtatttgcaatagctgacgtctcttacaggcaaatgataaatgaaggaaagagtaactccattttggtcagtggtgaaagtggtgctggtaagactgaaactacgaagttgttgatgggatatcttgcatatctgggtgggcgatctggaacaggagagaggacagttgaacagcaagtattagaatctaatccagttcttgaagcctttgggaatgcgaaaactgttcggaacaacaactcaagtcgatttggtaaatttgttgaaatccaatttgacaagagcggtaagatatctggtgctgccattagaacttacttgctcgagagatctcgagtttgccaaattaatagtccagagaggaactaccattgcttttacttcctatgtgcagcaccatcagaggatctcaagaagtataagctcggggacccatcgttgtttcactatctcaaccagtcagcttgtattaaagttgatggaatcaatgatgctgaagaataccttgcaacaagaaaagcaatggatactgttggcattactgatcaagaacaggaagctatattccgggttgttgctgctgtgcttcatcttggaaacataaattttacaaaagggagagaagcagattcatccataataaaggatgacaaatctagattccatcttaatacagcaggagagctcttaatgtgtgattgtgagaagttggagaatgccttgataaagagggaaattaatacaccagaaggagtgattaccacaacagttggtccgaattctgctactattagccgggatggtttagcaaagcagatatactctcgattgtttgactggcttgtaaacagaataaatgcatcgataggacaagacccaaactctaacaaactgattggggtacttgatatatatggttttgaaagttttaaaaccaacagttttgaacaactgtgcatcaattttaccaatgaaaaactccagcaacattttaatcagaatgtcttcaaaatggaacaagaggaatacacaagggagcaaattaattggagttacatagagtttgttgacaatcaagatgtacttgacctgattgaaaggaaaccaggtggcattattgcgcttcttgatgaagcctgcatgtttccaaagtccacacacgagacattgtctcagaagctgtacgaaaagttcaagaaccacaaaagatttaccaaaccaaagctttctcgtactgcatttacaattcaacattatgctggagatgtaacatatcaatctgatcaattcctggacaagaacaaggactatgtggtagcagagcatcaggaattacttaatgcttctaagtgctcttttgtatcagggttatttccacaagcaacagaagagaacacaaaatcatcaaaatcctcaattgcaactcgctttaagatacaacttcatgaactcatggagactttgagctctacagagccacattacataagatgtataaaaccaaatagtgtccttaagcctggcatttttgagaataccaatgttctgcagcagcttcgatgttctggtgttcttgaagccattagaatcagctgtgctggttatcccacaaggaaactatttcatgattttctacatcgttttcgtgttcttgctcctgaaattttgaaagagaaaaatgatgaaaaagtctcctgtcaaaaggttttggacaaaatgggactacagggttatcagataggaagaactaaggtattcctgagggctggtcaaatggctgatctggatgccagaagaacagagatgcgaaacaatgcagcaaaaggcgttcagagtcaattccgtactcatgttgctcgtgagcagttcctagtactacgggacacatctatttatttgcaatctttcgttagagccagattggcatgtaagcaacatgaattcctgagacaacaagcagcagctttgagaattcagaaaaatgcacgatggtattttgcctggaaaacttattaccaactacgattgtcagccattacattgcaggccgggctaaggtccatggcagctcgtaatgagttcacctttagaaagaaaaataaagcttcagtccatatccagtcccagtggcgatgccaccgagattactcaaattatatgaatttgaagagagccgcactaacatatcagtgtgcttggcgaagaagggttgctaggaaggagctgaggaagctcaaactggctgcaagagatacacaggctctaaaggtggccaaagagaaacttgaggaacgtgtggaagagctaacaagtcgcctggaccgcgaaaagaaactaagggctgatttggagaagtctaaagcagatgaagtttccaaattgaaagaagctcttcatgagatggagcagcgagtagaagaagtgaaagcgatgcaggaacaagaatcagcaaaaaaggctgttgaagaagctctagctcaagaaagagaaaagatcagtttattgactactgaaattgagggcctaaaggttctgctagtagctgaacgagaggagaatgataaaatgaagaaagcgcatgctaatgctctggaaacaaatgaagagttaaataaggaagtcagtgatgcagatgaaaagatcaaacaatttagtgatactgtaagaagactagaagggactgtaagcgaacatgagggccttttgctaactgaaaggcaacaaaatgaagcagctaatgctgcacttgctgaatctcaagcgagaaatgaagcactggtaagcaagcttgaagatgctgtgaaacaaaatgatctcctccatgaagctgaccaaagatttcaagaagctacaaaaaatttggaatcttcactgacatttgagaagcaacgacatgaggcaaatttgatagaattagctgaagcacgagaaaagattgaagaacttcaaagagaagttggggacactgatgaaaaattcaccctgcttcagactagtatacaaagcgttgaagaaaggttaagagagaaggatgctctattgacaacagaaagactagaaagtgaagcaactaagaaatcactaaatgaatctgaggatagaaaccaggacttactactgaaaattgaaattgctcagaaagacattgctcacttccaagaaaccgtccgaagacatgaagaaaatatggcagcactggaaacttcgttgagatctgaaaggcagcaaaatgatgcaatcatgaaacaactagctgaatctcagggggaaataggagagctgcaaaggaagcttgaagatgctgatgccagaaatgggcttcttcaagattctttacagagacatgaagaaaatatggcagcactggaaacttcgttgagatctgaaaggcagcaaaatgatgcaatcatgaaacaactagctgaatctcagggggaaataggagagctgcaaaggaagcttgaagatgctgatgccagaaatgggcttcttcaagattctttacagagacatgaagaaaatatggcagcactggaaacttcgttgagatctgaaaggcagcaaaatgatgcaatcatgaaacaactagctgaatctcagggggaaataggagagctgcaaaggaagcttgaagatgctgatgccagaaatgggcttcttcaagattctttacagagacttgaagacgatgctactacaagagaagctttaatggaaactgaaaggaaagaaactgaaatgacaaaaaagacactgactgaagctctggatcaaatcgaggaattagtcaaagaagttgagtgtgctaaccacagtgtgcatcagcttcaagatagtatgcagagaatggagcaaaccgcagttgcaagggaagcaactttactagcagaacatcaggaaaaagatgcgacatcaaaagcattagcagaggcacaagggaggattgaaggtttactgaaggaaatttattctgctaatagaaaaaatgatcaacttcaaagtactatagaaagaagagggtgcaacaacgacagatgctctttacttagcagaaagaaaagggcatgatcaaacgaagaaatcactttctgaagctcaagaaacaaacaaggagttactaaaaaaaattgagaaagctgagaaaaacatagatcagcttctggagaatgtggaaagacttgaaaaagatgcaattacaagagagtctttactgcttacaacaaagcaaagctatggtgacaccgcaaaattgctgcttgaatctcaagagaaaaaccaagagttagtgcacaaagtagaggactcagatagcaaaattgttctgcttgaagattcagtaaaaagactcgaagaaagtactgcagataaagattctttattggctatagaaagacatgaaaacagtgaaaccaagaaagaattagttggttctcagaaaaagattgcggaattgctaactgaagtgcaagatactcgtgcaaatgttgcagaacttgaggacttgattaggagactcgaaggaaaattggcaataactgaagctttattgctaactgaaaaggaacagaatgcttccaccttaaaattacttgcagaagcacaattgagaatcgaagaattaataaaaaaacttgaaggttcagatagaaaatctgatagccttcaggatacaataacaagacttgaacaagatgtcactgccaaagaggccttattgcttacagaaaaggaggcacacgacgcaacaaggaagactctgactgaagctcaggaagagagtggagaacttctgaagaaaattcatgataatgataaacatattcttcagcttcagtttactatacaaaggcttgaggaaactacagttgcaaatgagaatttgctgttgagggagagggagcagaatgacataacaacaaaagcgcacaatgaaagtcaagaaaaatatgaagaattactaagcaaatttgttgatgttgacaggaaaatcgaccttcttcaaggtaccatagaaaggcttggagaaaatacaacaaaggattctctgttgctatcagagagacatgaaaaggatgctattaagaaagcacttactgaggctcaagagaaaaatgaagagttactgatgaaagttgaagatgctaatgaaaaaatagaacaacttcaaactacgatagatatgcttgaagataatgtagctgcaaaagatgtttctttagaagctgcaatgaaggaaaatgatgcaattaggagatctcttactgaagctcaagagagaaatgatgaattactcaagaaaattagtgacagtgaatacaggatccatttacttcaagacacgatacaaaagcttcaagtagatgcaatatcaagattgtcgtcttttgtaatggaaaaacaagaaagtgatgcttcaaagagagctgttactgaagctcatgaaagaaatgaagatttactgaagagaaatgaggacctcctcaagaggaatgatgatctgattaagaaaattgaagactctagtaaaattgtcactcaacttcaggaagctctacaaaggcttgaaggaaaagcatgcaacttagaggctgagaaccaagttcttcgtcaacaagcaacttcaactccaccaacttcagctaaatctccagcttcacgtgcaaagatctcaaggatccatagaagtccagagaatggccataatttgaatggtgacattaggcaaactgaaatgaagccctccactggcacatcagaagcaataacctcagcagctaatgttcctgacttgggcgaccaaaaagattttgaacatggagaaaaactgcaaagaataccaaaacagaaatatcagccttctcatcaccagcagccccaggacgatcagcagtggctactcgcttgtattccacaacatcttggattttctgggagcaaaccagttgcagctctccttatataccaatgccttctccattggaaatcatttgaagccatgaagacaggtgtcttcgacagcattttgcatgctataaactcagccacagaggctcaaaatgacatgagaacattggcatattggttgtccaacttatctacattaacagttctccttcaacgatcattcaaaactactaggacggcaatctcaactccacaaaggagaagattttcatcggagaggatctttcatggaaatcaaacttcaaatgctgggcttgcttatctcagtggtcaatcagttgttgggtctgctggactgccccaagttgaagcaaaatatcctgctttgctattcaaacagcagctcgtggatctaattgaaaaggtttatggcatgataagtgacagcgtgaagaaggagctaaaccctttgcttgaattgtgtatacaggatccacgaacttctcactcgagtatcgcaaaaggcaatcttaatggcatgggtcaacagaaccaactcacatattggctgggcatagtgaaaattctcactagctacttggatgtactgagggtaaatcacgttccatcaattctggtgcataaactcttcactcagatattctcattgattgatgttcaactatttaaccggttacttttgcggcgtgagtgctgttcttttagtaacggggaatatgtcagagctggactaactgaactaaaacattggtccgacaatgctacaagagagtttgcaggttcagcgtgggaggcattgaggcatattagacaagctgtcgatttcctggtgatttctcttaaaccaatgaggacattaagagagatacacactgatgtgtgccctgccctcagcatacaacagctagagcgaatagttagtatgtactgggatgatgtgaatggaacaaacactatttcagcagagtttacatcaagcttgaaatctgcggtgcgtgatgaatcgaatatggccacaagtttttctatattgctagatgatgattccagtatacctttttcacttgatgatattacaaagacactgccagtcattgaggtggctgatgacgactttgtgccttttgtccatgaaaacccaagctttgcgtttttattgcaaagaggggagtagtccatttttcctcaccatggtgacttcacccacctgtggataagtcaggattcctgcctaggatgtacagtacgcgtgattctttttgtaccaggtagcaaggcattaaagattagatgctaggtgagcttataggattctggttttattgatttgtgtgttgattgtccatttgtattcaggttttccttgccattttttttctgtttgtagttatttttttgggcttgtatactaggggctaagggcagaaggccctgtcctgtaagcaaagtagcacaaggttttgctgtaggtgggaaagctgtacatgtgttgtaggagggggagtagcggttatcctgctggtcagggctaagaacgacagttgttgagaaggcaacggttatgccgtttttcctggatgagcagaatatcttgtcctggactgctggacagcagagcagtgcccacggaggtctctgcgcgctcgatcgcgacgatgcggccactatggtagtagatgcactcattacctgttatactagtaatttgctcgcgcctcgcgcaagtcgttaaccgatgagtttatacaattaaaagagtgttgctttagccatataaatacagaagtagtaatatatgtggatacataaacatagaagtgacaaaattatataaacatacaattgtttgcgttggtagataagttcagtagcatcgtgagcagcctagatgtcaaaattttgaagacaacaaaatactggtcttgaaggccacaaaatgcagagcaacattacaatgcacggatccttttcatgatcgtgctcactttttatgaaattcattgcttgttgtattgaatgtatatgtatacattaaggtacaattattagaattgtctcaatatgtaacgaagtaacatgaatagatagctttgcttagcacagaatgtcatgtgaatgtagcaaaaaataagtcagttttataattattatcgatttttattgtgctatcgtttgtcatgtaatatactttaagtatgatttagatttttttcgcaaaaaaaatgaataagac

SEQ ID NO: 221492 - DNA, 8245 bp, Zea Mays
gcgcccggctggcttcgcctggccgtggcacccctcacctctctctctctctctctctctctctctcccctgtccgcggtcgcgtcgccttccaccaccaccccaccagcccacccgcatccgcgtcgctgctgctgctgccaccgtcgtgcgtctccgcgccacgcgtgcgcgtacccgtggcggatcgcgctgcagcagaggcgatcggcgagcgatccaggggaggagatcgcttgtcggcgccgccgctgccgccgccgatcgagccgcgactcctcccgttcggtcccctcgcagctcccgtccgggcccgtccctcgaggcagggcggggtggctcgatcgcccgcagatgaaacatggcttcgacgttaaacattgtaataggttctcatgtatgggtggaagataaagatttgtcctgggttgatggcgaggtatcccggattgatggtaaaaaagcccatgttcgcacaaccaaggggaagacggtcattgcaaatatatcggatatccaccctaaagacacagaagcaccgcctgatggggtggatgacatgacaaggttatcatacttgcatgagcctggtgttttagataacctggctgtcagatatgcgaaaaatatcatttatacctatactggtaacattctgattgcaataaatccattccaaaggctacctaatctggttgatgcccgtactatggaaaaatacaaaggtgcaaatcttggtgacctagatcctcatgtatttgcaatagctgacgtctcttacaggcaaatgataaatgaaggaaagagtaactccattttggtcagtggtgaaagtggtgctggtaagactgaaactacgaagttgttgatgggatatcttgcatatctgggtgggcgatctggaacaggagagaggacagttgaacagcaagtattagaatctaatccagttcttgaagcctttgggaatgcgaaaactgttcggaacaacaactcaagtcgatttggtaaatttgttgaaatccaatttgacaagagcggtaagatatctggtgctgccattagaacttacttgctcgagagatctcgagtttgccaaattaatagtccagagaggaactaccattgcttttacttcctatgtgcagcaccatcagaggatctcaagaagtataagctcggggacccatcgttgtttcactatctcaaccagtcagcttgtattaaagttgatggaatcaatgatgctgaagaataccttgcaacaagaaaagcaatggatactgttggcattactgatcaagaacaggaagctatattccgggttgttgctgctgtgcttcatcttggaaacataaattttacaaaagggagagaagcagattcatccataataaaggatgacaaatctagattccatcttaatacagcaggagagctcttaatgtgtgattgtgagaagttggagaatgccttgataaagagggaaattaatacaccagaaggagtgattaccacaacagttggtccgaattctgctactattagccgggatggtttagcaaagcagatatactctcgattgtttgactggcttgtaaacagaataaatgcatcgataggacaagacccaaactctaacaaactgattggggtacttgatatatatggttttgaaagttttaaaaccaacagttttgaacaactgtgcatcaattttaccaatgaaaaactccagcaacattttaatcagaatgtcttcaaaatggaacaagaggaatacacaagggagcaaattaattggagttacatagagtttgttgacaatcaagatgtacttgacctgattgaaaggaaaccaggtggcattattgcgcttcttgatgaagcctgcatgtttccaaagtccacacacgagacattgtctcagaagctgtacgaaaagttcaagaaccacaaaagatttaccaaaccaaagctttctcgtactgcatttacaattcaacattatgctggagatgtaacatatcaatctgatcaattcctggacaagaacaaggactatgtggtagcagagcatcaggaattacttaatgcttctaagtgctcttttgtatcagggttatttccacaagcaacagaagagaacacaaaatcatcaaaatcctcaattgcaactcgctttaagatacaacttcatgaactcatggagactttgagctctacagagccacattacataagatgtataaaaccaaatagtgtccttaagcctggcatttttgagaataccaatgttctgcagcagcttcgatgttctggtgttcttgaagccattagaatcagctgtgctggttatcccacaaggaaactatttcatgattttctacatcgttttcgtgttcttgctcctgaaattttgaaagagaaaaatgatgaaaaagtctcctgtcaaaaggttttggacaaaatgggactacagggttatcagataggaagaactaaggtattcctgagggctggtcaaatggctgatctggatgccagaagaacagagatgcgaaacaatgcagcaaaaggcgttcagagtcaattccgtactcatgttgctcgtgagcagttcctagtactacgggacacatctatttatttgcaatctttcgttagagccagattggcatgtaagcaacatgaattcctgagacaacaagcagcagctttgagaattcagaaaaatgcacgatggtattttgcctggaaaacttattaccaactacgattgtcagccattacattgcaggccgggctaaggtccatggcagctcgtaatgagttcacctttagaaagaaaaataaagcttcagtccatatccagtcccagtggcgatgccaccgagattactcaaattatatgaatttgaagagagccgcactaacatatcagtgtgcttggcgaagaagggttgctaggaaggagctgaggaagctcaaactggctgcaagagatacacaggctctaaaggtggccaaagagaaacttgaggaacgtgtggaagagctaacaagtcgcctggaccgcgaaaagaaactaagggctgatttggagaagtctaaagcagatgaagtttccaaattgaaagaagctcttcatgagatggagcagcgagtagaagaagtgaaagcgatgcaggaacaagaatcagcaaaaaaggctgttgaagaagctctagctcaagaaagagaaaagatcagtttattgactactgaaattgagggcctaaaggttctgctagtagctgaacgagaggagaatgataaaatgaagaaagcgcatgctaatgctctggaaacaaatgaagagttaaataaggaagtcagtgatgcagatgaaaagatcaaacaatttagtgatactgtaagaagactagaagggactgtaagcgaacatgagggccttttgctaactgaaaggcaacaaaatgaagcagctaatgctgcacttgctgaatctcaagcgagaaatgaagcactggtaagcaagcttgaagatgctgtgaaacaaaatgatctcctccatgaagctgaccaaagatttcaagaagctacaaaaaatttggaatcttcactgacatttgagaagcaacgacatgaggcaaatttgatagaattagctgaagcacgagaaaagattgaagaacttcaaagagaagttggggacactgatgaaaaattcaccctgcttcagactagtatacaaagcgttgaagaaaggttaagagagaaggatgctctattgacaacagaaagactagaaagtgaagcaactaagaaatcactaaatgaatctgaggatagaaaccaggacttactactgaaaattgaaattgctcagaaagacattgctcacttccaagaaaccgtccgaagacatgaagaaaatatggcagcactggaaacttcgttgagatctgaaaggcagcaaaatgatgcaatcatgaaacaactagctgaatctcagggggaaataggagagctgcaaaggaagcttgaagatgctgatgccagaaatgggcttcttcaagattctttacagagacatgaagaaaatatggcagcactggaaacttcgttgagatctgaaaggcagcaaaatgatgcaatcatgaaacaactagctgaatctcagggggaaataggagagctgcaaaggaagcttgaagatgctgatgccagaaatgggcttcttcaagattctttacagagacatgaagaaaatatggcagcactggaaacttcgttgagatctgaaaggcagcaaaatgatgcaatcatgaaacaactagctgaatctcagggggaaataggagagctgcaaaggaagcttgaagatgctgatgccagaaatgggcttcttcaagattctttacagagacttgaagacgatgctactacaagagaagctttaatggaaactgaaaggaaagaaactgaaatgacaaaaaagacactgactgaagctctggatcaaatcgaggaattagtcaaagaagttgagtgtgctaaccacagtgtgcatcagcttcaagatagtatgcagagaatggagcaaaccgcagttgcaagggaagcaactttactagcagaacatcaggaaaaagatgcgacatcaaaagcattagcagaggcacaagggaggattgaaggtttactgaaggaaatttattctgctaatagaaaaaatgatcaacttcaaagtactatagaaagacttgaacaagatgtcactgccaaagaggccttattgcttacagaaaaggaggcacacgacgcaacaaggaagactctgactgaagctcaggaagagagtggagaacttctgaagaaaattcatgataatgataaacatattcttcagcttcagtttactatacaaaggcttgaggaaactacagttgcaaatgagaatttgctgttgagggagagggagcagaatgacataacaacaaaagcgcacaatgaaagtcaagaaaaatatgaagaattactaagcaaatttgttgatgttgacaggaaaatcgaccttcttcaaggtaccatagaaaggcttggagaaaatacaacaaaggattctctgttgctatcagagagacatgaaaaggatgctattaagaaagcacttactgaggctcaagagaaaaatgaagagttactgatgaaagttgaagatgctaatgaaaaaatagaacaacttcaaactacgatagatatgcttgaagataatgtagctgcaaaagatgtttctttagaagctgcaatgaaggaaaatgatgcaattaggagatctcttactgaagctcaagagagaaatgatgaattactcaagaaaattagtgacagtgaatacaggatccatttacttcaagacacgatacaaaagcttcaagtagatgcaatatcaagattgtcgtcttttgtaatggaaaaacaagaaagtgatgcttcaaagagagctgttactgaagctcatgaaagaaatgaagatttactgaagagaaatgaggacctcctcaagaggaatgatgatctgattaagaaaattgaagactctagtaaaattgtcactcaacttcaggaagctctacaaaggcttgaaggaaaagcatgcaacttagaggctgagaaccaagttcttcgtcaacaagcaacttcaactccaccaacttcagctaaatctccagcttcacgtgcaaagatctcaaggatccatagaagtccagagaatggccataatttgaatggtgacattaggcaaactgaaatgaagccctccactggcacatcagaagcaataacctcagcagctaatgttcctgacttgggcgaccaaaaagattttgaacatggagaaaaactgcaaagaataccaaaacagaaatatcagccttctcatcaccagcagccccaggacgatcagcagtggctactcgcttgtattccacaacatcttggattttctgggagcaaaccagttgcagctctccttatataccaatgccttctccattggaaatcatttgaagccatgaagacaggtgtcttcgacagcattttgcatgctataaactcagccacagaggctcaaaatgacatgagaacattggcatattggttgtccaacttatctacattaacagttctccttcaacgatcattcaaaactactaggacggcaatctcaactccacaaaggagaagattttcatcggagaggatctttcatggaaatcaaacttcaaatgctgggcttgcttatctcagtggtcaatcagttgttgggtctgctggactgccccaagttgaagcaaaatatcctgctttgctattcaaacagcagctcgtggatctaattgaaaaggtttatggcatgataagtgacagcgtgaagaaggagctaaaccctttgcttgaattgtgtatacaggatccacgaacttctcactcgagtatcgcaaaaggcaatcttaatggcatgggtcaacagaaccaactcacatattggctgggcatagtgaaaattctcactagctacttggatgtactgagggtaaatcacgttccatcaattctggtgcataaactcttcactcagatattctcattgattgatgttcaactatttaaccggttacttttgcggcgtgagtgctgttcttttagtaacggggaatatgtcagagctggactaactgaactaaaacattggtccgacaatgctacaagagagtttgcaggttcagcgtgggaggcattgaggcatattagacaagctgtcgatttcctggtgatttctcttaaaccaatgaggacattaagagagatacacactgatgtgtgccctgccctcagcatacaacagctagagcgaatagttagtatgtactgggatgatgtgaatggaacaaacactatttcagcagagtttacatcaagcttgaaatctgcggtgcgtgatgaatcgaatatggccacaagtttttctatattgctagatgatgattccagtatacctttttcacttgatgatattacaaagacactgccagtcattgaggtggctgatgacgactttgtgccttttgtccatgaaaacccaagctttgcgtttttattgcaaagaggggagtagtccatttttcctcaccatggtgacttcacccacctgtggataagtcaggattcctgcctaggatgtacagtacgcgtgattctttttgtaccaggtagcaaggcattaaagattagatgctaggtgagcttataggattctggttttattgatttgtgtgttgattgtccatttgtattcaggttttccttgccattttttttctgtttgtagttatttttttgggcttgtatactaggggctaagggcagaaggccctgtcctgtaagcaaagtagcacaaggttttgctgtaggtgggaaagctgtacatgtgttgtaggagggggagtagcggttatcctgctggtcagggctaagaacgacagttgttgagaaggcaacggttatgccgtttttcctggatgagcagaatatcttgtcctggactgctggacagcagagcagtgcccacggaggtctctgcgcgctcgatcgcgacgatgcggccactatggtagtagatgcactcattacctgttatactagtaatttgctcgcgcctcgcgcaagtcgttaaccgatgagtttatacaattaaaagagtgttgctttagccatataaatacagaagtagtaatatatgtggatacataaacatagaagtgacaaaattatataaacatacaattgtttgcgttggtagataagttcagtagcatcgtgagcagcctagatgtcaaaattttgaagacaacaaaatactggtcttgaaggccacaaaatgcagagcaacattacaatgcacggatccttttcatgatcgtgctcactttttatgaaattcattgcttgttgtattgaatgtatatgtatacattaaggtacaattattagaattgtctcaatatgtaacgaagtaacatgaatagatagctttgcttagcacagaatgtcatgtgaatgtagcaaaaaataagtcagttttataattattatcgatttttattgtgctatcgtttgtcatgtaatatactttaagtatgatttagatttttttcgcaaaaaaaatgaataagac

SEQ ID NO: 221493 - DNA, 8879 bp, Zea Mays
tctctctcccctgtccgcggtcgcgtcgccttccaccaccaccccaccagcccacccgcatccgcgtcgctgctgctgctgccaccgtcgtgcgtctccgcgccacgcgtgcgcgtacccgtggcggatcgcgctgcagcagaggcgatcggcgagcgatccaggggaggagatcgcttgtcggcgccgccgctgccgccgccgatcgagccgcgactcctcccgttcggtcccctcgcagctcccgtccgggcccgtccctcgaggcagggcggggtggctcgatcgcccgcagatgaaacatggcttcgacgttaaacattgtaataggttctcatgtatgggtggaagataaagatttgtcctgggttgatggcgaggtatcccggattgatggtaaaaaagcccatgttcgcacaaccaaggggaagacggtcattgcaaatatatcggatatccaccctaaagacacagaagcaccgcctgatggggtggatgacatgacaaggttatcatacttgcatgagcctggtgttttagataacctggctgtcagatatgcgaaaaatatcatttatacctatactggtaacattctgattgcaataaatccattccaaaggctacctaatctggttgatgcccgtactatggaaaaatacaaaggtgcaaatcttggtgacctagatcctcatgtatttgcaatagctgacgtctcttacaggcaaatgataaatgaaggaaagagtaactccattttggtcagtggtgaaagtggtgctggtaagactgaaactacgaagttgttgatgggatatcttgcatatctgggtgggcgatctggaacaggagagaggacagttgaacagcaagtattagaatctaatccagttcttgaagcctttgggaatgcgaaaactgttcggaacaacaactcaagtcgatttggtaaatttgttgaaatccaatttgacaagagcggtaagatatctggtgctgccattagaacttacttgctcgagagatctcgagtttgccaaattaatagtccagagaggaactaccattgcttttacttcctatgtgcagcaccatcagaggatctcaagaagtataagctcggggacccatcgttgtttcactatctcaaccagtcagcttgtattaaagttgatggaatcaatgatgctgaagaataccttgcaacaagaaaagcaatggatactgttggcattactgatcaagaacaggaagctatattccgggttgttgctgctgtgcttcatcttggaaacataaattttacaaaagggagagaagcagattcatccataataaaggatgacaaatctagattccatcttaatacagcaggagagctcttaatgtgtgattgtgagaagttggagaatgccttgataaagagggaaattaatacaccagaaggagtgattaccacaacagttggtccgaattctgctactattagccgggatggtttagcaaagcagatatactctcgattgtttgactggcttgtaaacagaataaatgcatcgataggacaagacccaaactctaacaaactgattggggtacttgatatatatggttttgaaagttttaaaaccaacagttttgaacaactgtgcatcaattttaccaatgaaaaactccagcaacattttaatcagaatgtcttcaaaatggaacaagaggaatacacaagggagcaaattaattggagttacatagagtttgttgacaatcaagatgtacttgacctgattgaaaggaaaccaggtggcattattgcgcttcttgatgaagcctgcatgtttccaaagtccacacacgagacattgtctcagaagctgtacgaaaagttcaagaaccacaaaagatttaccaaaccaaagctttctcgtactgcatttacaattcaacattatgctggagatgtaacatatcaatctgatcaattcctggacaagaacaaggactatgtggtagcagagcatcaggaattacttaatgcttctaagtgctcttttgtatcagggttatttccacaagcaacagaagagaacacaaaatcatcaaaatcctcaattgcaactcgctttaagatacaacttcatgaactcatggagactttgagctctacagagccacattacataagatgtataaaaccaaatagtgtccttaagcctggcatttttgagaataccaatgttctgcagcagcttcgatgttctggtgttcttgaagccattagaatcagctgtgctggttatcccacaaggaaactatttcatgattttctacatcgttttcgtgttcttgctcctgaaattttgaaagagaaaaatgatgaaaaagtctcctgtcaaaaggttttggacaaaatgggactacagggttatcagataggaagaactaaggtattcctgagggctggtcaaatggctgatctggatgccagaagaacagagatgcgaaacaatgcagcaaaaggcgttcagagtcaattccgtactcatgttgctcgtgagcagttcctagtactacgggacacatctatttatttgcaatctttcgttagagccagattggcatgtaagcaacatgaattcctgagacaacaagcagcagctttgagaattcagaaaaatgcacgatggtattttgcctggaaaacttattaccaactacgattgtcagccattacattgcaggccgggctaaggtccatggcagctcgtaatgagttcacctttagaaagaaaaataaagcttcagtccatatccagtcccagtggcgatgccaccgagattactcaaattatatgaatttgaagagagccgcactaacatatcagtgtgcttggcgaagaagggttgctaggaaggagctgaggaagctcaaactggctgcaagagatacacaggctctaaaggtggccaaagagaaacttgaggaacgtgtggaagagctaacaagtcgcctggaccgcgaaaagaaactaagggctgatttggagaagtctaaagcagatgaagtttccaaattgaaagaagctcttcatgagatggagcagcgagtagaagaagtgaaagcgatgcaggaacaagaatcagcaaaaaaggctgttgaagaagctctagctcaagaaagagaaaagatcagtttattgactactgaaattgagggcctaaaggttctgctagtagctgaacgagaggagaatgataaaatgaagaaagcgcatgctaatgctctggaaacaaatgaagagttaaataaggaagtcagtgatgcagatgaaaagatcaaacaatttagtgatactgtaagaagactagaagggactgtaagcgaacatgagggccttttgctaactgaaaggcaacaaaatgaagcagctaatgctgcacttgctgaatctcaagcgagaaatgaagcactggtaagcaagcttgaagatgctgtgaaacaaaatgatctcctccatgaagctgaccaaagatttcaagaagctacaaaaaatttggaatcttcactgacatttgagaagcaacgacatgaggcaaatttgatagaattagctgaagcacgagaaaagattgaagaacttcaaagagaagttggggacactgatgaaaaattcaccctgcttcagactagtatacaaagcgttgaagaaaggttaagagagaaggatgctctattgacaacagaaagactagaaagtgaagcaactaagaaatcactaaatgaatctgaggatagaaaccaggacttactactgaaaattgaaattgctcagaaagacattgctcacttccaagaaaccgtccgaagacatgaagaaaatatggcagcactggaaacttcgttgagatctgaaaggcagcaaaatgatgcaatcatgaaacaactagctgaatctcagggggaaataggagagctgcaaaggaagcttgaagatgctgatgccagaaatgggcttcttcaagattctttacagagacatgaagaaaatatggcagcactggaaacttcgttgagatctgaaaggcagcaaaatgatgcaatcatgaaacaactagctgaatctcagggggaaataggagagctgcaaaggaagcttgaagatgctgatgccagaaatgggcttcttcaagattctttacagagacatgaagaaaatatggcagcactggaaacttcgttgagatctgaaaggcagcaaaatgatgcaatcatgaaacaactagctgaatctcagggggaaataggagagctgcaaaggaagcttgaagatgctgatgccagaaatgggcttcttcaagattctttacagagacttgaagacgatgctactacaagagaagctttaatggaaactgaaaggaaagaaactgaaatgacaaaaaagacactgactgaagctctggatcaaatcgaggaattagtcaaagaagttgagtgtgctaaccacagtgtgcatcagcttcaagatagtatgcagagaatggagcaaaccgcagttgcaagggaagcaactttactagcagaacatcaggaaaaagatgcgacatcaaaagcattagcagaggcacaagggaggattgaaggtttactgaaggaaatttattctgctaatagaaaaaatgatcaacttcaaagtactatagaaaggttagaagagggtgcaacaacgacagatgctctttacttagcagaaagaaaagggcatgatcaaacgaagaaatcactttctgaagctcaagaaacaaacaaggagttactaaaaaaaattgagaaagctgagaaaaacatagatcagcttctggagaatgtggaaagacttgaaaaagatgcaattacaagagagtctttactgcttacaacaaagcaaagctatggtgacaccgcaaaattgctgcttgaatctcaagagaaaaaccaagagttagtgcacaaagtagaggactcagatagcaaaattgttctgcttgaagattcagtaaaaaggtttaaccacttttcttacagactcgaagaaagtactgcagataaagattctttattggctatagaaagacatgaaaacagtgaaaccaagaaagaattagttggttctcagaaaaagattgcggaattgctaactgaagtgcaagatactcgtgcaaatgttgcagaacttgaggacttgattaggagactcgaaggaaaattggcaataactgaagctttattgctaactgaaaaggaacagaatgcttccaccttaaaattacttgcagaagcacaattgagaatcgaagaattaataaaaaaacttgaaggttcagatagaaaatctgatagccttcaggatacaataacaagacttgaacaagatgtcactgccaaagaggccttattgcttacagaaaaggaggcacacgacgcaacaaggaagactctgactgaagctcaggaagagagtggagaacttctgaagaaaattcatgataatgataaacatattcttcagcttcagtttactatacaaaggcttgaggaaactacagttgcaaatgagaatttgctgttgagggagagggagcagaatgacataacaacaaaagcgcacaatgaaagtcaagaaaaatatgaagaattactaagcaaatttgttgatgttgacaggaaaatcgaccttcttcaaggtaccatagaaaggcttggagaaaatacaacaaaggattctctgttgctatcagagagacatgaaaaggatgctattaagaaagcacttactgaggctcaagagaaaaatgaagagttactgatgaaagttgaagatgctaatgaaaaaatagaacaacttcaaactacgatagatatgcttgaagataatgtagctgcaaaagatgtttctttagaagctgcaatgaaggaaaatgatgcaattaggagatctcttactgaagctcaagagagaaatgatgaattactcaagaaaattagtgacagtgaatacaggatccatttacttcaagacacgatacaaaagcttcaagtagatgcaatatcaagattgtcgtcttttgtaatggaaaaacaagaaagtgatgcttcaaagagagctgttactgaagctcatgaaagaaatgaagatttactgaagagaaatgaggacctcctcaagaggaatgatgatctgattaagaaaattgaagactctagtaaaattgtcactcaacttcaggaagctctacaaaggcttgaaggaaaagcatgcaacttagaggctgagaaccaagttcttcgtcaacaagcaacttcaactccaccaacttcagctaaatctccagcttcacgtgcaaagatctcaaggatccatagaagtccagagaatggccataatttgaatggtgacattaggcaaactgaaatgaagccctccactggcacatcagaagcaataacctcagcagctaatgttcctgacttgggcgaccaaaaagattttgaacatggagaaaaactgcaaagaataccaaaacagaaatatcagccttctcatcaccagcagccccaggacgatcagcagtggctactcgcttgtattccacaacatcttggattttctgggagcaaaccagttgcagctctccttatataccaatgccttctccattggaaatcatttgaagccatgaagacaggtgtcttcgacagcattttgcatgctataaactcagccacagaggctcaaaatgacatgagaacattggcatattggttgtccaacttatctacattaacagttctccttcaacgatcattcaaaactactaggacggcaatctcaactccacaaaggagaagattttcatcggagaggatctttcatggaaatcaaacttcaaatgctgggcttgcttatctcagtggtcaatcagttgttgggtctgctggactgccccaagttgaagcaaaatatcctgctttgctattcaaacagcagctcgtggatctaattgaaaaggtttatggcatgataagtgacagcgtgaagaaggagctaaaccctttgcttgaattgtgtatacaggatccacgaacttctcactcgagtatcgcaaaaggcaatcttaatggcatgggtcaacagaaccaactcacatattggctgggcatagtgaaaattctcactagctacttggatgtactgagggtaaatcacgttccatcaattctggtgcataaactcttcactcagatattctcattgattgatgttcaactatttaaccggttacttttgcggcgtgagtgctgttcttttagtaacggggaatatgtcagagctggactaactgaactaaaacattggtccgacaatgctacaagagagtttgcaggttcagcgtgggaggcattgaggcatattagacaagctgtcgatttcctggtgatttctcttaaaccaatgaggacattaagagagatacacactgatgtgtgccctgccctcagcatacaacagctagagcgaatagttagtatgtactgggatgatgtgaatggaacaaacactatttcagcagagtttacatcaagcttgaaatctgcggtgcgtgatgaatcgaatatggccacaagtttttctatattgctagatgatgattccagtatacctttttcacttgatgatattacaaagacactgccagtcattgaggtggctgatgacgactttgtgccttttgtccatgaaaacccaagctttgcgtttttattgcaaagaggggagtagtccatttttcctcaccatggtgacttcacccacctgtggataagtcaggattcctgcctaggatgtacagtacgcgtgattctttttgtaccaggtagcaaggcattaaagattagatgctaggtgagcttataggattctggttttattgatttgtgtgttgattgtccatttgtattcaggttttccttgccattttttttctgtttgtagttatttttttgggcttgtatactaggggctaagggcagaaggccctgtcctgtaagcaaagtagcacaaggttttgctgtaggtgggaaagctgtacatgtgttgtaggagggggagtagcggttatcctgctggtcagggctaagaacgacagttgttgagaaggcaacggttatgccgtttttcctggatgagcagaatatcttgtcctggactgctggacagcagagcagtgcccacggaggtctctgcgcgctcgatcgcgacgatgcggccactatggtagtagatgcactcattacctgttatactagtaatttgctcgcgcctcgcgcaagtcgttaaccgatgagtttatacaattaaaagagtgttgctttagccatataaatacagaagtagtaatatatgtggatacataaacatagaagtgacaaaattatataaacatacaattgtttgcgttggtagataagttcagtagcatcgtgagcagcctagatgtcaaaattttgaagacaacaaaatactggtcttgaaggccacaaaatgcagagcaacattacaatgcacggatccttttcatgatcgtgctcactttttatgaaattcattgcttgttgtattgaatgtatatgtatacattaaggtacaattattagaattgtctcaatatgtaacgaagtaacatgaatagatagctttgcttagcacagaatgtcatgtgaatgtagcaaaaaataagtcagttttataattattatcgatttttattgtgctatcgtttgtcatgtaatatactttaagtatgatttagatttttttcgcaaaaaaaatgaataagac

SEQ ID NO: 221494 - DNA, 7869 bp, Zea Mays
atggcggaagacggcgcatccgcgacacaggctatggtggcgcagacgcgcccaacggggccgtgcaacggcgagggctgcccaggtggtgctgtccatggtggggaaggggggaggagtcgatttggtaaatttgttgaaatccaatttgacaagagcggtaagatatctggtgctgccattagaacttacttgctcgagagatctcgagtttgccaaattaatagtccagagaggaactaccattgcttttacttcctatgtgcagcaccatcagaggatctcaagaagtataagctcggggacccatcgttgtttcactatctcaaccagtcagcttgtattaaagttgatggaatcaatgatgctgaagaataccttgcaacaagaaaagcaatggatactgttggcattactgatcaagaacaggaagctatattccgggttgttgctgctgtgcttcatcttggaaacataaattttacaaaagggagagaagcagattcatccataataaaggatgacaaatctagattccatcttaatacagcaggagagctcttaatgtgtgattgtgagaagttggagaatgccttgataaagagggaaattaatacaccagaaggagtgattaccacaacagttggtccgaattctgctactattagccgggatggtttagcaaagcagatatactctcgattgtttgactggcttgtaaacagaataaatgcatcgataggacaagacccaaactctaacaaactgattggggtacttgatatatatggttttgaaagttttaaaaccaacagttttgaacaactgtgcatcaattttaccaatgaaaaactccagcaacattttaatcagaatgtcttcaaaatggaacaagaggaatacacaagggagcaaattaattggagttacatagagtttgttgacaatcaagatgtacttgacctgattgaaaggaaaccaggtggcattattgcgcttcttgatgaagcctgcatgtttccaaagtccacacacgagacattgtctcagaagctgtacgaaaagttcaagaaccacaaaagatttaccaaaccaaagctttctcgtactgcatttacaattcaacattatgctggagatgtaacatatcaatctgatcaattcctggacaagaacaaggactatgtggtagcagagcatcaggaattacttaatgcttctaagtgctcttttgtatcagggttatttccacaagcaacagaagagaacacaaaatcatcaaaatcctcaattgcaactcgctttaagatacaacttcatgaactcatggagactttgagctctacagagccacattacataagatgtataaaaccaaatagtgtccttaagcctggcatttttgagaataccaatgttctgcagcagcttcgatgttctggtgttcttgaagccattagaatcagctgtgctggttatcccacaaggaaactatttcatgattttctacatcgttttcgtgttcttgctcctgaaattttgaaagagaaaaatgatgaaaaagtctcctgtcaaaaggttttggacaaaatgggactacagggttatcagataggaagaactaaggtattcctgagggctggtcaaatggctgatctggatgccagaagaacagagatgcgaaacaatgcagcaaaaggcgttcagagtcaattccgtactcatgttgctcgtgagcagttcctagtactacgggacacatctatttatttgcaatctttcgttagagccagattggcatgtaagcaacatgaattcctgagacaacaagcagcagctttgagaattcagaaaaatgcacgatggtattttgcctggaaaacttattaccaactacgattgtcagccattacattgcaggccgggctaaggtccatggcagctcgtaatgagttcacctttagaaagaaaaataaagcttcagtccatatccagtcccagtggcgatgccaccgagattactcaaattatatgaatttgaagagagccgcactaacatatcagtgtgcttggcgaagaagggttgctaggaaggagctgaggaagctcaaactggctgcaagagatacacaggctctaaaggtggccaaagagaaacttgaggaacgtgtggaagagctaacaagtcgcctggaccgcgaaaagaaactaagggctgatttggagaagtctaaagcagatgaagtttccaaattgaaagaagctcttcatgagatggagcagcgagtagaagaagtgaaagcgatgcaggaacaagaatcagcaaaaaaggctgttgaagaagctctagctcaagaaagagaaaagatcagtttattgactactgaaattgagggcctaaaggttctgctagtagctgaacgagaggagaatgataaaatgaagaaagcgcatgctaatgctctggaaacaaatgaagagttaaataaggaagtcagtgatgcagatgaaaagatcaaacaatttagtgatactgtaagaagactagaagggactgtaagcgaacatgagggccttttgctaactgaaaggcaacaaaatgaagcagctaatgctgcacttgctgaatctcaagcgagaaatgaagcactggtaagcaagcttgaagatgctgtgaaacaaaatgatctcctccatgaagctgaccaaagatttcaagaagctacaaaaaatttggaatcttcactgacatttgagaagcaacgacatgaggcaaatttgatagaattagctgaagcacgagaaaagattgaagaacttcaaagagaagttggggacactgatgaaaaattcaccctgcttcagactagtatacaaagcgttgaagaaaggttaagagagaaggatgctctattgacaacagaaagactagaaagtgaagcaactaagaaatcactaaatgaatctgaggatagaaaccaggacttactactgaaaattgaaattgctcagaaagacattgctcacttccaagaaaccgtccgaagacatgaagaaaatatggcagcactggaaacttcgttgagatctgaaaggcagcaaaatgatgcaatcatgaaacaactagctgaatctcagggggaaataggagagctgcaaaggaagcttgaagatgctgatgccagaaatgggcttcttcaagattctttacagagacatgaagaaaatatggcagcactggaaacttcgttgagatctgaaaggcagcaaaatgatgcaatcatgaaacaactagctgaatctcagggggaaataggagagctgcaaaggaagcttgaagatgctgatgccagaaatgggcttcttcaagattctttacagagacatgaagaaaatatggcagcactggaaacttcgttgagatctgaaaggcagcaaaatgatgcaatcatgaaacaactagctgaatctcagggggaaataggagagctgcaaaggaagcttgaagatgctgatgccagaaatgggcttcttcaagattctttacagagacttgaagacgatgctactacaagagaagctttaatggaaactgaaaggaaagaaactgaaatgacaaaaaagacactgactgaagctctggatcaaatcgaggaattagtcaaagaagttgagtgtgctaaccacagtgtgcatcagcttcaagatagtatgcagagaatggagcaaaccgcagttgcaagggaagcaactttactagcagaacatcaggaaaaagatgcgacatcaaaagcattagcagaggcacaagggaggattgaaggtttactgaaggaaatttattctgctaatagaaaaaatgatcaacttcaaagtactatagaaaggttagaagagggtgcaacaacgacagatgctctttacttagcagaaagaaaagggcatgatcaaacgaagaaatcactttctgaagctcaagaaacaaacaaggagttactaaaaaaaattgagaaagctgagaaaaacatagatcagcttctggagaatgtggaaagacttgaaaaagatgcaattacaagagagtctttactgcttacaacaaagcaaagctatggtgacaccgcaaaattgctgcttgaatctcaagagaaaaaccaagagttagtgcacaaagtagaggactcagatagcaaaattgttctgcttgaagattcagtaaaaagactcgaagaaagtactgcagataaagattctttattggctatagaaagacatgaaaacagtgaaaccaagaaagaattagttggttctcagaaaaagattgcggaattgctaactgaagtgcaagatactcgtgcaaatgttgcagaacttgaggacttgattaggagacttgaacaagatgtcactgccaaagaggccttattgcttacagaaaaggaggcacacgacgcaacaaggaagactctgactgaagctcaggaagagagtggagaacttctgaagaaaattcatgataatgataaacatattcttcagcttcagtttactatacaaaggcttgaggaaactacagttgcaaatgagaatttgctgttgagggagagggagcagaatgacataacaacaaaagcgcacaatgaaagtcaagaaaaatatgaagaattactaagcaaatttgttgatgttgacaggaaaatcgaccttcttcaaggtaccatagaaaggcttggagaaaatacaacaaaggattctctgttgctatcagagagacatgaaaaggatgctattaagaaagcacttactgaggctcaagagaaaaatgaagagttactgatgaaagttgaagatgctaatgaaaaaatagaacaacttcaaactacgatagatatgcttgaagataatgtagctgcaaaagatgtttctttagaagctgcaatgaaggaaaatgatgcaattaggagatctcttactgaagctcaagagagaaatgatgaattactcaagaaaattagtgacagtgaatacaggatccatttacttcaagacacgatacaaaagcttcaagtagatgcaatatcaagattgtcgtcttttgtaatggaaaaacaagaaagtgatgcttcaaagagagctgttactgaagctcatgaaagaaatgaagatttactgaagagaaatgaggacctcctcaagaggaatgatgatctgattaagaaaattgaagactctagtaaaattgtcactcaacttcaggaagctctacaaaggcttgaaggaaaagcatgcaacttagaggctgagaaccaagttcttcgtcaacaagcaacttcaactccaccaacttcagctaaatctccagcttcacgtgcaaagatctcaaggatccatagaagtccagagaatggccataatttgaatggtgacattaggcaaactgaaatgaagccctccactggcacatcagaagcaataacctcagcagctaatgttcctgacttgggcgaccaaaaagattttgaacatggagaaaaactgcaaagaataccaaaacagaaatatcagccttctcatcaccagcagccccaggacgatcagcagtggctactcgcttgtattccacaacatcttggattttctgggagcaaaccagttgcagctctccttatataccaatgccttctccattggaaatcatttgaagccatgaagacaggtgtcttcgacagcattttgcatgctataaactcagccacagaggctcaaaatgacatgagaacattggcatattggttgtccaacttatctacattaacagttctccttcaacgatcattcaaaactactaggacggcaatctcaactccacaaaggagaagattttcatcggagaggatctttcatggaaatcaaacttcaaatgctgggcttgcttatctcagtggtcaatcagttgttgggtctgctggactgccccaagttgaagcaaaatatcctgctttgctattcaaacagcagctcgtggatctaattgaaaaggtttatggcatgataagtgacagcgtgaagaaggagctaaaccctttgcttgaattgtgtatacaggatccacgaacttctcactcgagtatcgcaaaaggcaatcttaatggcatgggtcaacagaaccaactcacatattggctgggcatagtgaaaattctcactagctacttggatgtactgagggtaaatcacgttccatcaattctggtgcataaactcttcactcagatattctcattgattgatgttcaactatttaaccggttacttttgcggcgtgagtgctgttcttttagtaacggggaatatgtcagagctggactaactgaactaaaacattggtccgacaatgctacaagagagtttgcaggttcagcgtgggaggcattgaggcatattagacaagctgtcgatttcctggtgatttctcttaaaccaatgaggacattaagagagatacacactgatgtgtgccctgccctcagcatacaacagctagagcgaatagttagtatgtactgggatgatgtgaatggaacaaacactatttcagcagagtttacatcaagcttgaaatctgcggtgcgtgatgaatcgaatatggccacaagtttttctatattgctagatgatgattccagtatacctttttcacttgatgatattacaaagacactgccagtcattgaggtggctgatgacgactttgtgccttttgtccatgaaaacccaagctttgcgtttttattgcaaagaggggagtagtccatttttcctcaccatggtgacttcacccacctgtggataagtcaggattcctgcctaggatgtacagtacgcgtgattctttttgtaccaggtagcaaggcattaaagattagatgctaggtgagcttataggattctggttttattgatttgtgtgttgattgtccatttgtattcaggttttccttgccattttttttctgtttgtagttatttttttgggcttgtatactaggggctaagggcagaaggccctgtcctgtaagcaaagtagcacaaggttttgctgtaggtgggaaagctgtacatgtgttgtaggagggggagtagcggttatcctgctggtcagggctaagaacgacagttgttgagaaggcaacggttatgccgtttttcctggatgagcagaatatcttgtcctggactgctggacagcagagcagtgcccacggaggtctctgcgcgctcgatcgcgacgatgcggccactatggtagtagatgcactcattacctgttatactagtaatttgctcgcgcctcgcgcaagtcgttaaccgatgagtttatacaattaaaagagtgttgctttagccatataaatacagaagtagtaatatatgtggatacataaacatagaagtgacaaaattatataaacatacaattgtttgcgttggtagataagttcagtagcatcgtgagcagcctagatgtcaaaattttgaagacaacaaaatactggtcttgaaggccacaaaatgcagagcaacattacaatgcacggatccttttcatgatcgtgctcactttttatgaaattcattgcttgttgtattgaatgtatatgtatacattaaggtacaattattagaattgtctcaatatgtaacgaagtaacatgaatagatagctttgcttagcacagaatgtcatgtgaatgtagcaaaaaataagtcagttttataattattatcgatttttattgtgctatcgtttgtcatgtaatatactttaagtatgatttagatttttttcgcaaaaaaaatgaataagac

SEQ ID NO: 221495 - DNA, 4008 bp, Zea Mays
atggcgcccacactagcggctggaaggttagaagagggtgcaacaacgacagatgctctttacttagcagaaagaaaagggcatgatcaaacgaagaaatcactttctgaagctcaagaaacaaacaaggagttactaaaaaaaattgagaaagctgagaaaaacatagatcagcttctggagaatgtggaaagacttgaaaaagatgcaattacaagagagtctttactgcttacaacaaagcaaagctatggtgacaccgcaaaattgctgcttgaatctcaagagaaaaaccaagagttagtgcacaaagtagaggactcagatagcaaaattgttctgcttgaagattcagtaaaaagactcgaagaaagtactgcagataaagattctttattggctatagaaagacatgaaaacagtgaaaccaagaaagaattagttggttctcagaaaaagattgcggaattgctaactgaagtgcaagatactcgtgcaaatgttgcagaacttgaggacttgattaggagacttgaacaagatgtcactgccaaagaggccttattgcttacagaaaaggaggcacacgacgcaacaaggaagactctgactgaagctcaggaagagagtggagaacttctgaagaaaattcatgataatgataaacatattcttcagcttcagtttactatacaaaggcttgaggaaactacagttgcaaatgagaatttgctgttgagggagagggagcagaatgacataacaacaaaagcgcacaatgaaagtcaagaaaaatatgaagaattactaagcaaatttgttgatgttgacaggaaaatcgaccttcttcaaggtaccatagaaaggcttggagaaaatacaacaaaggattctctgttgctatcagagagacatgaaaaggatgctattaagaaagcacttactgaggctcaagagaaaaatgaagagttactgatgaaagttgaagatgctaatgaaaaaatagaacaacttcaaactacgatagatatgcttgaagataatgtagctgcaaaagatgtttctttagaagctgcaatgaaggaaaatgatgcaattaggagatctcttactgaagctcaagagagaaatgatgaattactcaagaaaattagtgacagtgaatacaggatccatttacttcaagacacgatacaaaagcttcaagtagatgcaatatcaagattgtcgtcttttgtaatggaaaaacaagaaagtgatgcttcaaagagagctgttactgaagctcatgaaagaaatgaagatttactgaagagaaatgaggacctcctcaagaggaatgatgatctgattaagaaaattgaagactctagtaaaattgtcactcaacttcaggaagctctacaaaggcttgaaggaaaagcatgcaacttagaggctgagaaccaagttcttcgtcaacaagcaacttcaactccaccaacttcagctaaatctccagcttcacgtgcaaagatctcaaggatccatagaagtccagagaatggccataatttgaatggtgacattaggcaaactgaaatgaagccctccactggcacatcagaagcaataacctcagcagctaatgttcctgacttgggcgaccaaaaagattttgaacatggagaaaaactgcaaagaataccaaaacagaaatatcagccttctcatcaccagcagccccaggacgatcagcagtggctactcgcttgtattccacaacatcttggattttctgggagcaaaccagttgcagctctccttatataccaatgccttctccattggaaatcatttgaagccatgaagacaggtgtcttcgacagcattttgcatgctataaactcagccacagaggctcaaaatgacatgagaacattggcatattggttgtccaacttatctacattaacagttctccttcaacgatcattcaaaactactaggacggcaatctcaactccacaaaggagaagattttcatcggagaggatctttcatggaaatcaaacttcaaatgctgggcttgcttatctcagtggtcaatcagttgttgggtctgctggactgccccaagttgaagcaaaatatcctgctttgctattcaaacagcagctcgtggatctaattgaaaaggtttatggcatgataagtgacagcgtgaagaaggagctaaaccctttgcttgaattgtgtatacaggatccacgaacttctcactcgagtatcgcaaaaggcaatcttaatggcatgggtcaacagaaccaactcacatattggctgggcatagtgaaaattctcactagctacttggatgtactgagggtaaatcacgttccatcaattctggtgcataaactcttcactcagatattctcattgattgatgttcaactatttaaccggttacttttgcggcgtgagtgctgttcttttagtaacggggaatatgtcagagctggactaactgaactaaaacattggtccgacaatgctacaagagagtttgcaggttcagcgtgggaggcattgaggcatattagacaagctgtcgatttcctggtgatttctcttaaaccaatgaggacattaagagagatacacactgatgtgtgccctgccctcagcatacaacagctagagcgaatagttagtatgtactgggatgatgtgaatggaacaaacactatttcagcagagtttacatcaagcttgaaatctgcggtgcgtgatgaatcgaatatggccacaagtttttctatattgctagatgatgattccagtatacctttttcacttgatgatattacaaagacactgccagtcattgaggtggctgatgacgactttgtgccttttgtccatgaaaacccaagctttgcgtttttattgcaaagaggggagtagtccatttttcctcaccatggtgacttcacccacctgtggataagtcaggattcctgcctaggatgtacagtacgcgtgattctttttgtaccaggtagcaaggcattaaagattagatgctaggtgagcttataggattctggttttattgatttgtgtgttgattgtccatttgtattcaggttttccttgccattttttttctgtttgtagttatttttttgggcttgtatactaggggctaagggcagaaggccctgtcctgtaagcaaagtagcacaaggttttgctgtaggtgggaaagctgtacatgtgttgtaggagggggagtagcggttatcctgctggtcagggctaagaacgacagttgttgagaaggcaacggttatgccgtttttcctggatgagcagaatatcttgtcctggactgctggacagcagagcagtgcccacggaggtctctgcgcgctcgatcgcgacgatgcggccactatggtagtagatgcactcattacctgttatactagtaatttgctcgcgcctcgcgcaagtcgttaaccgatgagtttatacaattaaaagagtgttgctttagccatataaatacagaagtagtaatatatgtggatacataaacatagaagtgacaaaattatataaacatacaattgtttgcgttggtagataagttcagtagcatcgtgagcagcctagatgtcaaaattttgaagacaacaaaatactggtcttgaaggccacaaaatgcagagcaacattacaatgcacggatccttttcatgatcgtgctcactttttatgaaattcattgcttgttgtattgaatgtatatgtatacattaaggtacaattattagaattgtctcaatatgtaacgaagtaacatgaatagatagctttgcttagcacagaatgtcatgtgaatgtagcaaaaaataagtcagttttataattattatcgatttttattgtgctatcgtttgtcatgtaatatactttaagtatgatttagatttttttcgcaaaaaaaatgaataagac

SEQ ID NO: 221496 - DNA, 4197 bp, Zea Mays
atggcgcccacactagcggctggaaggttagaagagggtgcaacaacgacagatgctctttacttagcagaaagaaaagggcatgatcaaacgaagaaatcactttctgaagctcaagaaacaaacaaggagttactaaaaaaaattgagaaagctgagaaaaacatagatcagcttctggagaatgtggaaagacttgaaaaagatgcaattacaagagagtctttactgcttacaacaaagcaaagctatggtgacaccgcaaaattgctgcttgaatctcaagagaaaaaccaagagttagtgcacaaagtagaggactcagatagcaaaattgttctgcttgaagattcagtaaaaaggtttaaccacttttcttacagactcgaagaaagtactgcagataaagattctttattggctatagaaagacatgaaaacagtgaaaccaagaaagaattagttggttctcagaaaaagattgcggaattgctaactgaagtgcaagatactcgtgcaaatgttgcagaacttgaggacttgattaggagactcgaaggaaaattggcaataactgaagctttattgctaactgaaaaggaacagaatgcttccaccttaaaattacttgcagaagcacaattgagaatcgaagaattaataaaaaaacttgaaggttcagatagaaaatctgatagccttcaggatacaataacaagacttgaacaagatgtcactgccaaagaggccttattgcttacagaaaaggaggcacacgacgcaacaaggaagactctgactgaagctcaggaagagagtggagaacttctgaagaaaattcatgataatgataaacatattcttcagcttcagtttactatacaaaggcttgaggaaactacagttgcaaatgagaatttgctgttgagggagagggagcagaatgacataacaacaaaagcgcacaatgaaagtcaagaaaaatatgaagaattactaagcaaatttgttgatgttgacaggaaaatcgaccttcttcaaggtaccatagaaaggcttggagaaaatacaacaaaggattctctgttgctatcagagagacatgaaaaggatgctattaagaaagcacttactgaggctcaagagaaaaatgaagagttactgatgaaagttgaagatgctaatgaaaaaatagaacaacttcaaactacgatagatatgcttgaagataatgtagctgcaaaagatgtttctttagaagctgcaatgaaggaaaatgatgcaattaggagatctcttactgaagctcaagagagaaatgatgaattactcaagaaaattagtgacagtgaatacaggatccatttacttcaagacacgatacaaaagcttcaagtagatgcaatatcaagattgtcgtcttttgtaatggaaaaacaagaaagtgatgcttcaaagagagctgttactgaagctcatgaaagaaatgaagatttactgaagagaaatgaggacctcctcaagaggaatgatgatctgattaagaaaattgaagactctagtaaaattgtcactcaacttcaggaagctctacaaaggcttgaaggaaaagcatgcaacttagaggctgagaaccaagttcttcgtcaacaagcaacttcaactccaccaacttcagctaaatctccagcttcacgtgcaaagatctcaaggatccatagaagtccagagaatggccataatttgaatggtgacattaggcaaactgaaatgaagccctccactggcacatcagaagcaataacctcagcagctaatgttcctgacttgggcgaccaaaaagattttgaacatggagaaaaactgcaaagaataccaaaacagaaatatcagccttctcatcaccagcagccccaggacgatcagcagtggctactcgcttgtattccacaacatcttggattttctgggagcaaaccagttgcagctctccttatataccaatgccttctccattggaaatcatttgaagccatgaagacaggtgtcttcgacagcattttgcatgctataaactcagccacagaggctcaaaatgacatgagaacattggcatattggttgtccaacttatctacattaacagttctccttcaacgatcattcaaaactactaggacggcaatctcaactccacaaaggagaagattttcatcggagaggatctttcatggaaatcaaacttcaaatgctgggcttgcttatctcagtggtcaatcagttgttgggtctgctggactgccccaagttgaagcaaaatatcctgctttgctattcaaacagcagctcgtggatctaattgaaaaggtttatggcatgataagtgacagcgtgaagaaggagctaaaccctttgcttgaattgtgtatacaggatccacgaacttctcactcgagtatcgcaaaaggcaatcttaatggcatgggtcaacagaaccaactcacatattggctgggcatagtgaaaattctcactagctacttggatgtactgagggtaaatcacgttccatcaattctggtgcataaactcttcactcagatattctcattgattgatgttcaactatttaaccggttacttttgcggcgtgagtgctgttcttttagtaacggggaatatgtcagagctggactaactgaactaaaacattggtccgacaatgctacaagagagtttgcaggttcagcgtgggaggcattgaggcatattagacaagctgtcgatttcctggtgatttctcttaaaccaatgaggacattaagagagatacacactgatgtgtgccctgccctcagcatacaacagctagagcgaatagttagtatgtactgggatgatgtgaatggaacaaacactatttcagcagagtttacatcaagcttgaaatctgcggtgcgtgatgaatcgaatatggccacaagtttttctatattgctagatgatgattccagtatacctttttcacttgatgatattacaaagacactgccagtcattgaggtggctgatgacgactttgtgccttttgtccatgaaaacccaagctttgcgtttttattgcaaagaggggagtagtccatttttcctcaccatggtgacttcacccacctgtggataagtcaggattcctgcctaggatgtacagtacgcgtgattctttttgtaccaggtagcaaggcattaaagattagatgctaggtgagcttataggattctggttttattgatttgtgtgttgattgtccatttgtattcaggttttccttgccattttttttctgtttgtagttatttttttgggcttgtatactaggggctaagggcagaaggccctgtcctgtaagcaaagtagcacaaggttttgctgtaggtgggaaagctgtacatgtgttgtaggagggggagtagcggttatcctgctggtcagggctaagaacgacagttgttgagaaggcaacggttatgccgtttttcctggatgagcagaatatcttgtcctggactgctggacagcagagcagtgcccacggaggtctctgcgcgctcgatcgcgacgatgcggccactatggtagtagatgcactcattacctgttatactagtaatttgctcgcgcctcgcgcaagtcgttaaccgatgagtttatacaattaaaagagtgttgctttagccatataaatacagaagtagtaatatatgtggatacataaacatagaagtgacaaaattatataaacatacaattgtttgcgttggtagataagttcagtagcatcgtgagcagcctagatgtcaaaattttgaagacaacaaaatactggtcttgaaggccacaaaatgcagagcaacattacaatgcacggatccttttcatgatcgtgctcactttttatgaaattcattgcttgttgtattgaatgtatatgtatacattaaggtacaattattagaattgtctcaatatgtaacgaagtaacatgaatagatagctttgcttagcacagaatgtcatgtgaatgtagcaaaaaataagtcagttttataattattatcgatttttattgtgctatcgtttgtcatgtaatatactttaagtatgatttagatttttttcgcaaaaaaaatgaataagac

SEQ ID NO: 221497 - DNA, 4257 bp, Zea Mays
ctcgtgatgcccgtcccgcctccccgctgtggcagccgccttcgcgtccgtcgatccctccgtgcacagatgcgccccaaatcgcgcctcccccaccgcgctccgtgaaatccgccctcctcaacctccccgccacccagaactccctcgcacctcatccttcgcgcgatgctcgccgatgtgccgccttcaaacatcgtcgtcgtcacctcctccccctttcctaggagggcatcctcgccgatgtgtcgccttccaacatcgacaccaccgcgtccccgcaccaccctcccccgtgtgcgtccctggccccctgagctcgcgcaggccggaggaccgcgctcgcccacctgaagattgctccctcccccaaggagctggcggcgacgcggctgcgtcaggagatttgggtccaacttcacatcttattcctcttcagttctcggcagctttggaattgctcagctcagcttttcgacgccgagtctatagctgctgctcaccactgccctcggtgtctgtagtctgtccatggaatgctttcatactgcttgctactcgcagtgtcgtgctgtgcatgcctgccttcgaggcaacaaccaccgtgcatacattgtccgggtcgggctggtatcctttgctgctacttgctgatgctgataagaagaactgcagcttttatcaccccggccgaaaagtcgtctcttgactcgttcgcgctagcttcaaagatagagctaagcaggcgaggcctagaccgtccatgatggcgacaggagctcgacttcgagcgggcctccccagagatgatgctcctccgcagcaggaaatggtagcagcaaacggaacgggccaaccgcagctggtggtggacgaacacaagacgattcttgaagaggtccccagagaagaaaatggcaccctttctgccgccaattatgctgctcaaggtcatgagaatgttgccgctgagtactacaaacaacaggaagaacaggaaaaagttgtcaggagtgaatcattagccatatggctgtctaatatcgcaaatatggttctctttgctgcaaaagtgtatgcttcaacttgttgtcatgatatatcttgtggtttactgccttttcaatgcaaacgccaaatccctatagaaacccaattggaaaagcgtatgcagccactgaaccagggaatgcaagttgggattgcttggctggtcatacgaggtttgatctgttctgggtttcatgtaggaatcaaggaactagctgaggtctccttccctcaagatgacaaacaaacagaaaaaactaccctcaagcgttccgctgattgggcaccgcagacggtctgtggttgtggatgggattatcgttttggcagaaagctggttgaagctcgtgatgaactaatgaaaggaaggtttgccgcttgcatgcgacctgtcccccctttctgttcaaaggcgttcgacaccccaccaggccgaggatgccgtgatctcctgtgcagcgcggacaatgcatgcaaccaacaccgtgggtgtgtgggtgttatagccattggattatcggattgctgctatgccgtgttttggtgtcaaattaaaactgtctttcttgcataaaaacagcttgccggttctaactcaacggggtgaaccacgtatatattctcgtgtaaggagggtgaataaactaattccctatttggatcctcctgtccacgaagccaggcaacaaagtcattaatgtcagcaccactgatcatcatctaactacattagtttacaggggttcgaaaaattttataggggtgagctgaccccaataagaacatgtagctccacccctgctcctagctaactgtttggcagtggctaacaattagtcgacaaatattaagctgacaaacaatttactgggacttgttttaattattgtctaatagacgtataaaattaaagtatagtagatagtttgttttatccctgcaagacaaacaatagtagcatatttttctttctcttctatctgctaatagttttcttttcttcagacactcttcccatatgaactttttgtgaagctctatagcaaggttgagttgcacccttttggtcttcataaccttggtaacaggtaaaagtaagagtaggaaggtcaactggcatgcatacatgtgcttgctcattatggttttatgctattggtctgggcctttgtaagatcttaagtagaagggcaggcatggtgcaatggtgagagttgtctcattgagccaccaggtcgcgggtttgaattagcctctccgcatttcaggaggaaggcttgcctcggtttatctcttccccggaccccactcatgtggttgcctccggcactggatctgccttttgtaagatcttaggtgtatgctcctagaatatgtgtgatttacttccattaaagtatgctttgtgcatattaattagaggatgacgttttggacctagacaaaataaaagtcggacggccactgtcaagcattctccaaattcgttgcttattgtgacgtgtgtgtgcttgagttaacaactaataccatccccaactcatcctcatccatatagaattgcttgaaagcatgtgagtcttcctcaaatcacatgcacccaccatatgtattagtttatgggtgttaaaaagcatgagcctaaagattggattccatagaatggtcacatctggccattcaaataagtccataacttccttttgtgatgtttgcttttgttggagcttcatgtttgaattgatgtatgtatctgactttaggccaatttatgctgggaatgcactttgtactgtgaaatataccgacgaggatccttgcatgatgagtattagatcaacttcattttcccctactgctgatgctatgtctgaaacaaaggttgcacctatcacccagggaaatctacatgggtgaatctgacatcccaagacacaaagcggcatgatcttgcaaatgcatgtgtagtagtcacaggaggcagaggtttaagaagtgctgaaaattttaagttgttggagcagcttgcggagaaatttggtgcagcagcgggcgcgactagggctgctgttgaagcaggttatgttccaaatgaccttcagagttgcaggagaaggctgcagcagcttgaatctcagctaatggaagcgaacagaatcaaagaggaaggcaacactggaagtatccgatggaaggagaacatattagaccaagagaatgaattacagaacataaaacaagagaacgacgacctgcagacaaaggaatcagcggcttctgagaagattaaggaactctcttcccagcttactaatgcaaaatatggcatgataaatagtaacaccaaggagataatgagaaggggggcactgaagaggacgatgaacctgttgtagtagttgccaaaatatgggagaacaacaagtttgttgactatgattcatctaaggagaaggagaatgatggtgactcacaggttgatttggaatcaaacaagggggatgcaggtcttgatagcaacgggttgcactcaactaaggagaacagtggcagggcatcaccaactaaacaacaccagcagtataagaagaagtctctgctgaagagattcggtggtctgctaaaaaagaaaagcgaaaattagcataaaactgtctgatgatattctttgttctatcatttgacatattttttgtaaaccctctcagagatgctgaaagccaacttactattgagagtactatgaaacctctcgcgcagtgtgaaataaatgacagaaatgaagtgtgtgttggtgttggtgctggtgctggagacactaacataaccggtggtattatccaattgtattggagttctattcttgaaaggtgcttggatacaaacgatcaaagcttgaaggaggcttgagtcaattgaatcatctgtaagtaatttagaagaaatattgtttttgttggtgaagcgagtttgttctttcctttgggctctatttatttatgaattgataacccaacaggattgtagtttgtagccatttagatttgaatccgagctatgactgagacgaatacaacatatgcattttgtagccatgtatatctgaatcagagctctgtgattgagatgaatatggttttatgtgccgtcgcaacacactgacattgtactatggtattataagtatcaatatgaagtatttctttg

SEQ ID NO: 221498 - DNA, 3605 bp, Zea Mays
ctcgtgatgcccgtcccgcctccccgctgtggcagccgccttcgcgtccgtcgatccctccgtgcacagatgcgccccaaatcgcgcctcccccaccgcgctccgtgaaatccgccctcctcaacctccccgccacccagaactccctcgcacctcatccttcgcgcgatgctcgccgatgtgccgccttcaaacatcgtcgtcgtcacctcctccccctttcctaggagggcatcctcgccgatgtgtcgccttccaacatcgacaccaccgcgtccccgcaccaccctcccccgtgtgcgtccctggccccctgagctcgcgcaggccggaggaccgcgctcgcccacctgaagattgctccctcccccaaggagctggcggcgacgcggctgcgtcaggagatttgggtccaacttcacatcttattcctcttcagttctcggcagctttggaattgctcagctcagcttttcgacgccgagtctatagctgctgctcaccactgccctcggtgtctgtagtctgtccatggaatgctttcatactgcttgctactcgcagtgtcgtgctgtgcatgcctgccttcgaggcaacaaccaccgtgcatacattgtccgggtcgggctggtatcctttgctgctacttgctgatgctgataagaagaactgcagcttttatcaccccggccgaaaagtcgtctcttgactcgttcgcgctagcttcaaagatagagctaagcaggcgaggcctagaccgtccatgatggcgacaggagctcgacttcgagcgggcctccccagagatggtagccagatccggccattgagccccccctaaccgagcggatccaagatgctcctccgcagcaggaaatggtagcagcaaacggaacgggccaaccgcagctggtggtggacgaacacaagacgattcttgaagaggtccccagagaagaaaatggcaccctttctgccgccaattatgctggctgtcggccccaaattatggtacagcgcatacggaggctaaccttccattggcagcgcacagatcatccggggcggacctataagatgtcaagtgtgtacgccccaacaacccacagatgcggctcgacgctctccatctgcatgtctctttaattatctctatatatatggatagacgacaaccttctatctatgaattatatgtcatgtctctttaattatctctatatcaatgtctacctatgtgatataagataccgtagcaacgcacgtgcacctaattagtgaatttggaagtgtgactttataaaaaaaatgagttatatgttcaagataatgttagtagtcatactatttaaagtccttttactttcttatttggatgagtcttttttcacatatcttccttcttaatgtaccattcatggttctattgatagctcaaggtcatgagaatgttgccgctgagtactacaaacaacaggtggagatgttagagggtttttagtgagatggacgcatttacatatcgtgcttttcctacctgtaatgtccaagtgacgacatcaatagatatctggccactttattgacctgcaggaagaacaggaaaaagttgtcaggagtgaatcattagccatatggctgtctaatatcgcaaatatggttctctttgctgcaaaagtgtatgcttcaaaacccaattggaaaagcgtatgcagccactggaatcaaggaactagctgaggtctccttccctcaagatgacaaacaaacagaaaaaactaccctcaaggtgacctaaacacaaagggagctacataataccctacaagactagaccagcacggtgcaccgccgttctgtatgtcgctggctatgctaattgtgcagccgacccccttccatcctcagtgccctcctaccattggcggcatgggatctcggtgatggaagggcaggggcagcacaggatctactgcattttttacaacgcagtggcagacattggagacgggttcgtgtgggatgccgactcctagctctactgccacgccagacactcttcccatatgaactttttgtgaagctctatagcaaggttgagttgcacccttttggtcttcataaccttggtaacaggccaatttatgctgggaatgcactttgtactgtgaaatataccgacgaggatccttgcatgatgagtattagatcaacttcattttcccctactgctgatgctatgtctgaaacaaaggttgcacctatcacccaggttgatctctctttcctcagtgaagggaaatctacatgggtgaatctgacatcccaagacacaaagcggcatgatcttgcaaatgcatgtgtagtagtcacaggaggcagaggtttaagaagtgctgaaaattttaagttgttggagcagcttgcggagaaatttggtgcagcagcgggcgcgactagggctgctgttgaagcaggttatgttccaaatgaccttcagagttgcaggagaaggctgcagcagcttgaatctcagctaatggaagcgaacagaatcaaagaggaaggcaacactggaagtatccgatggaaggagaacatattagaccaagagaatgaattacagaacataaaacaagagaacgacgacctgcagacaaaggaatcagcggcttctgagaagattaaggaactctcttcccagcttactaatgcaaaatatggcatgataaatagtaacaccaaggagataatgagaaggggggcactgaagaggacgatgaacctgttgtagtagttgccaaaatatgggagaacaacaagtttgttgactatgattcatctaaggagaaggagaatgatggtgactcacaggttgatttggaatcaaacaagggggatgcaggtcttgatagcaacgggttgcactcaactaaggagaacagtggcagggcatcaccaactaaacaacaccagcagtataagaagaagtctctgctgaagagattcggtggtctgctaaaaaagaaaagcgaaaattagcataaaactgtctgatgatattctttgttctatcatttgacatattttttgtaaaccctctcagagatgctgaaagccaacttactattgagagtactatgaaacctctcgcgcagtgtgaaataaatgacagaaatgaagtgtgtgttggtgttggtgctggtgctggagacactaacataaccggtggtattatccaattgtattggagttctattcttgaaaggtgcttggatacaaacgatcaaagcttgaaggaggcttgagtcaattgaatcatctgtaagtaatttagaagaaatattgtttttgttggtgaagcgagtttgttctttcctttgggctctatttatttatgaattgataacccaacaggattgtagtttgtagccatttagatttgaatccgagctatgactgagacgaatacaacatatgcattttgtagccatgtatatctgaatcagagctctgtgattgagatgaatatggttttatgtgccgtcgcaacacactgacattgtactatggtattataagtatcaatatgaagtatttctttg

SEQ ID NO: 221499 - DNA, 3848 bp, Zea Mays
ctcgtgatgcccgtcccgcctccccgctgtggcagccgccttcgcgtccgtcgatccctccgtgcacagatgcgccccaaatcgcgcctcccccaccgcgctccgtgaaatccgccctcctcaacctccccgccacccagaactccctcgcacctcatccttcgcgcgatgctcgccgatgtgccgccttcaaacatcgtcgtcgtcacctcctccccctttcctaggagggcatcctcgccgatgtgtcgccttccaacatcgacaccaccgcgtccccgcaccaccctcccccgtgtgcgtccctggccccctgagctcgcgcaggccggaggaccgcgctcgcccacctgaagattgctccctcccccaaggagctggcggcgacgcggctgcgtcaggagatttgggtccaacttcacatcttattcctcttcagttctcggcagctttggaattgctcagctcagcttttcgacgccgagtctatagctgctgctcaccactgccctcggtgtctgtagtctgtccatggaatgctttcatactgcttgctactcgcagtgtcgtgctgtgcatgcctgccttcgaggcaacaaccaccgtgcatacattgtccgggtcgggctgcttcaaagatagagctaagcaggcgaggcctagaccgtccatgatggcgacaggagctcgacttcgagcgggcctccccagagatggtagccagatccggccattgagccccccctaaccgagcggatccaagatgctcctccgcagcaggaaatggtagcagcaaacggaacgggccaaccgcagctggtggtggacgaacacaagacgattcttgaagaggtccccagagaagaaaatggcaccctttctgccgccaattatgctggctgtcggccccaaattatggtacagcgcatacggaggctaaccttccattggcagcgcacagatcatccggggcggacctataagatgtcaagtgtgtacgccccaacaacccacagatgcggctcgacgctctccatctgcatgtctctttaattatctctatatatatggatagacgacaaccttctatctatgaattatatgtcatgtctctttaattatctctatatcaatgtctacctatgtgatataagataccgtagcaacgcacgtgcacctaattagtgaatttggaagtgtgactttataaaaaaaatgagttatatgttcaagataatgttagtagtcatactatttaaagtccttttactttcttatttggatgagtcttttttcacatatcttccttcttaatgtaccattcatggttctattgatagctcaaggtcatgagaatgttgccgctgagtactacaaacaacaggtggagatgttagagggtttttagtgagatggacgcatttacatatcgtgcttttcctacctgtaatgtccaaggtatgctatatatggactttctgtttgaacattagggaaggtaacttatgtggatgttaataatcaaattttcttcactatattttttcttctttttaatagtgacgacatcaatagatatctggccactttattgacctgcaggaagaacaggaaaaagttgtcaggagtgaatcattagccatatggctgtctaatatcgcaaatatggttctctttgctgcaaaagtgtatgcttcaaaacccaattggaaaagcgtatgcagccactgaaccagggaatgcaagttgggattgcttggctggtcatacgaggaatcaaggaactagctgaggtctccttccctcaagatgacaaacaaacagaaaaaactaccctcaaggtgacctaaacacaaagggagctacataataccctacaagactagaccagccgacccccttccatcctcagtgccctcctaccattggcggcatgggatctcggtgatggaagggcaggggcagcacaggatctactgcattttttacaacgcagtggcagacattggagacgggttcgtgtgggatgccgactcctagctctactgccacgccagacactcttcccatatgaactttttgtgaagctctatagcaaggttgagttgcacccttttggtcttcataaccttggtaacaggccaatttatgctgggaatgcactttgtactgtgaaatataccgacgaggatccttgcatgatgagtattagatcaacttcattttcccctactgctgatgctatgtctgaaacaaaggttgcacctatcacccaggttgatctctctttcctcagtgaaggtttgtttggttccttcaccatgttattttgttaagaatcagcagtgcttcagaactactcttatttgttttgttgctctaataattgcacaaaacttttactaattgaggatcactagatttattttcctattcacaactttctataacttttataatgttgaaacaggctgcaagggaaaaaatacccctcttacttgatttattattttggcacccgtgaatagtaccttttttcaaaccttagggaaatctacatgggtgaatctgacatcccaagacacaaagcggcatgatcttgcaaatgcatgtgtagtagtcacaggaggcagaggtttaagaagtgctgaaaattttaagttgttggagcagcttgcggagaaatttggtgcagcagcgggcgcgactagggctgctgttgaagcaggttatgttccaaatgaccttcaggagaaggctgcagcagcttgaatctcagctaatggaagcgaacagaatcaaagaggaaggcaacactggaagtatccgatggaaggagaacatattagaccaagagaatgaattacagaacataaaacaagagaacgacgacctgcagacaaaggaatcagcggcttctgagaagattaaggaactctcttcccagcttactaatgcaaaatatggcatgataaatagtaacaccaaggagataatgagaaggggggcactgaagaggacgatgaacctgttgtagtagttgccaaaatatgggagaacaacaagtttgttgactatgattcatctaaggagaaggagaatgatggtgactcacaggttgatttggaatcaaacaagggggatgcaggtcttgatagcaacgggttgcactcaactaaggagaacagtggcagggcatcaccaactaaacaacaccagcagtataagaagaagtctctgctgaagagattcggtggtctgctaaaaaagaaaagcgaaaattagcataaaactgtctgatgatattctttgttctatcatttgacatattttttgtaaaccctctcagagatgctgaaagccaacttactattgagagtactatgaaacctctcgcgcagtgtgaaataaatgacagaaatgaagtgtgtgttggtgttggtgctggtgctggagacactaacataaccggtggtattatccaattgtattggagttctattcttgaaaggtgcttggatacaaacgatcaaagcttgaaggaggcttgagtcaattgaatcatctgtaagtaatttagaagaaatattgtttttgttggtgaagcgagtttgttctttcctttgggctctatttatttatgaattgataacccaacaggattgtagtttgtagccatttagatttgaatccgagctatgactgagacgaatacaacatatgcattttgtagccatgtatatctgaatcagagctctgtgattgagatgaatatggttttatgtgccgtcgcaacacactgacattgtactatggtattataagtatcaatatgaagtatttctttg

SEQ ID NO: 221500 - DNA, 4290 bp, Zea Mays
ctcgtgatgcccgtcccgcctccccgctgtggcagccgccttcgcgtccgtcgatccctccgtgcacagatgcgccccaaatcgcgcctcccccaccgcgctccgtgaaatccgccctcctcaacctccccgccacccagaactccctcgcacctcatccttcgcgcgatgctcgccgatgtgccgccttcaaacatcgtcgtcgtcacctcctccccctttcctaggagggcatcctcgccgatgtgtcgccttccaacatcgacaccaccgcgtccccgcaccaccctcccccgtgtgcgtccctggccccctgagctcgcgcaggccggaggaccgcgctcgcccacctgaagattgctccctcccccaaggagctggcggcgacgcggctgcgtcaggagatttgggtccaacttcacatcttattcctcttcagttctcggcagctttggaattgctcagctcagcttttcgacgccgagtctatagctgctgctcaccactgccctcggtgtctgtagtctgtccatggaatgctttcatactgcttgctactcgcagtgtcgtgctgtgcatgcctgccttcgaggcaacaaccaccgtgcatacattgtccgggtcgggctggtatcctttgctgctacttgctgatgctgataagaagaactgcagcttttatcaccccggccgaaaagtcgtctcttgactcgttcgcgctagcttcaaagatagagctaagcaggcgaggcctagaccgtccatgatggcgacaggagctcgacttcgagcgggcctccccagagatggtagccagatccggccattgagccccccctaaccgagcggatccaagatgctcctccgcagcaggaaatggtagcagcaaacggaacgggccaaccgcagctggtggtggacgaacacaagacgattcttgaagaggtccccagagaagaaaatggcaccctttctgccgccaattatgctggctgtcggccccaaattatggtacagcgcatacggaggctaaccttccattggcagcgcacagatcatccggggcggacctataagatgtcaagtgtgtacgccccaacaacccacagatgcggctcgacgctctccatctgcatgtctctttaattatctctatatatatggatagacgacaaccttctatctatgaattatatgtcatgtctctttaattatctctatatcaatgtctacctatgtgatataagataccgtagcaacgcacgtgcacctaattagtgaatttggaagtgtgactttataaaaaaaatgagttatatgttcaagataatgttagtagtcatactatttaaagtccttttactttcttatttggatgagtcttttttcacatatcttccttcttaatgtaccattcatggttctattgatagctcaaggtcatgagaatgttgccgctgagtactacaaacaacaggaagaacaggaaaaagttgtcaggagtgaatcattagccatatggctgtctaatatcgcaaatatggttctctttgctgcaaaagtgtatgcttcaacttgttgtcatgatatatcttgtggtttactgccttttcaatgcaaacgccaaatccctatagaaacccaattggaaaagcgtatgcagccactgaaccagggaatgcaagttgggattgcttggctggtcatacgaggtttgatctgttctgggtttcatgtaggaatcaaggaactagctgaggtctccttccctcaagatgacaaacaaacagaaaaaactaccctcaagcgttccgctgattgggcaccgcagacggtctgtggttgtggatgggattatcgttttggcagaaagctggttgaagctcgtgatgaactaatgaaaggaagcttgccggttctaactcaacggggtgaaccacgtatatattctcgtacactcttcccatatgaactttttgtgaagctctatagcaaggttgagttgcacccttttggtcttcataaccttggtaacaggtaaaagtaagagtaggaaggtcaactggcatgcatacatgtgcttgctcattatggttttatgctattggtctgggcctttgtaagatcttaagtagaagggcaggcatggtgcaatggtgagagttgtctcattgagccaccaggtcgcgggtttgaattagcctctccgcatttcaggaggaaggcttgcctcggtttatctcttccccggaccccactcatgtggttgcctccggcactggatctgccttttgtaagatcttaggtgtatgctcctagaatatgtgtgatttacttccattaaagtatgctttgtgcatattaattagaggatgacgttttggacctagacaaaataaaagtcggacggccactgtcaagcattctccaaattcgttgcttattgtgacgtgtgtgtgcttgagttaacaactaataccatccccaactcatcctcatccatatagaattgcttgaaagcatgtgagtcttcctcaaatcacatgcacccaccatatgtattagtttatgggtgttaaaaagcatgagcctaaagattggattccatagaatggtcacatctggccattcaaataagtccataacttccttttgtgatgtttgcttttgttggagcttcatgtttgaattgatgtatgtatctgactttaggccaatttatgctgggaatgcactttgtactgtgaaatataccgacgaggatccttgcatgatgagtattagatcaacttcattttcccctactgctgatgctatgtctgaaacaaaggttgcacctatcacccaggctgcaagggaaaaaatacccctcttacttgatttattattttggcacccgtgaatagtaccttttttcaaaccttagggaaatctacatgggtgaatctgacatcccaagacacaaagcggcatgatcttgcaaatgcatgtgtagtagtcacaggaggcagaggtttaagaagtgctgaaaattttaagttgttggagcagcttgcggagaaatttggtgcagcagcgggcgcgactagggctgctgttgaagcaggttatgttccaaatgaccttcaggatcctcgccggtatatttttacaccatgcccacttttaagaaaatgaaaacacagagttgcaggagaaggctgcagcagcttgaatctcagctaatggaagcgaacagaatcaaagaggaaggcaacactggaagtatccgatggaaggagaacatattagaccaagagaatgaattacagaacataaaacaagagaacgacgacctgcagacaaaggaatcagcggcttctgagaagattaaggaactctcttcccagcttactaatgcaaaatatggcatgataaatagtaacaccaaggagataatgagaaggggggcactgaagaggacgatgaacctgttgtagtagttgccaaaatatgggagaacaacaagtttgttgactatgattcatctaaggagaaggagaatgatggtgactcacaggttgatttggaatcaaacaagggggatgcaggtcttgatagcaacgggttgcactcaactaaggagaacagtggcagggcatcaccaactaaacaacaccagcagtataagaagaagtctctgctgaagagattcggtggtctgctaaaaaagaaaagcgaaaattagcataaaactgtctgatgatattctttgttctatcatttgacatattttttgtaaaccctctcagagatgctgaaagccaacttactattgagagtactatgaaacctctcgcgcagtgtgaaataaatgacagaaatgaagtgtgtgttggtgttggtgctggtgctggagacactaacataaccggtggtattatccaattgtattggagttctattcttgaaaggtgcttggatacaaacgatcaaagcttgaaggaggcttgagtcaattgaatcatctgtaagtaatttagaagaaatattgtttttgttggtgaagcgagtttgttctttcctttgggctctatttatttatgaattgataacccaacaggattgtagtttgtagccatttagatttgaatccgagctatgactgagacgaatacaacatatgcattttgtagccatgtatatctgaatcagagctctgtgattgagatgaatatggttttatgtgccgtcgcaacacactgacattgtactatggtattataagtatcaatatgaagtatttctttg

SEQ ID NO: 221501 - DNA, 2766 bp, Zea Mays
ggaggctgtcggccccaaattatggtacagcgcatacggaggctaaccttccattggcagcgcacagatcatccggggcggacctataagatgtcaagtgtgtacgccccaacaacccacagatgcggctcgacgctctccatctgcatgtctctttaattatctctatatatatggatagacgacaaccttctatctatgaattatatgtcatgtctctttaattatctctatatcaatgtctacctatgtgatataagataccgtagcaacgcacgtgcacctaattagtgaatttggaagtgtgactttataaaaaaaatgagttatatgttcaagataatgttagtagtcatactatttaaagtccttttactttcttatttggatgagtcttttttcacatatcttccttcttaatgtaccattcatggttctattgatagctcaaggtcatgagaatgttgccgctgagtactacaaacaacaggaagaacaggaaaaagttgtcaggagtgaatcattagccatatggctgtctaatatcgcaaatatggttctctttgctgcaaaagtgtatgcttcaacttgttgtcatgatatatcttgtggtttactgccttttcaatgcaaacgccaaatccctatagaaacccaattggaaaagcgtatgcagccactgaaccagggaatgcaagttgggattgcttggctggtcatacgaggtttgatctgttctgggtttcatgtaggaatcaaggaactagctgaggtctccttccctcaagatgacaaacaaacagaaaaaactaccctcaagcgttccgctgattgggcaccgcagacggtctgtggttgtggatgggattatcgttttggcagaaagctggttgaagctcgtgatgaactaatgaaaggaagcttgccggttctaactcaacggggtgaaccacgtatatattctcgtacactcttcccatatgaactttttgtgaagctctatagcaaggttgagttgcacccttttggtcttcataaccttggtaacaggccaatttatgctgggaatgcactttgtactgtgaaatataccgacgaggatccttgcatgatgagtattagatcaacttcattttcccctactgctgatgctatgtctgaaacaaaggttgcacctatcacccaggttgatctctctttcctcagtgaaggtttgtttggttccttcaccatgttattttgttaagaatcagcagtgcttcagaactactcttatttgttttgttgctctaataattgcacaaaacttttactaattgaggatcactagatttattttcctattcacaactttctataacttttataatgttgaaacaggctgcaagggaaaaaatacccctcttacttgatttattattttggcacccgtgaatagtaccttttttcaaaccttagggaaatctacatgggtgaatctgacatcccaagacacaaagcggcatgatcttgcaaatgcatgtgtagtagtcacaggaggcagaggtttaagaagtgctgaaaattttaagttgttggagcagcttgcggagaaatttggtgcagcagcgggcgcgactagggctgctgttgaagcaggttatgttccaaatgaccttcagagttgcaggagaaggctgcagcagcttgaatctcagctaatggaagcgaacagaatcaaagaggaaggcaacactggaagtatccgatggaaggagaacatattagaccaagagaatgaattacagaacataaaacaagagaacgacgacctgcagacaaaggaatcagcggcttctgagaagattaaggaactctcttcccagcttactaatgcaaaatatggcatgataaatagtaacaccaaggagataatgagaaggggggcactgaagaggacgatgaacctgttgtagtagttgccaaaatatgggagaacaacaagtttgttgactatgattcatctaaggagaaggagaatgatggtgactcacaggttgatttggaatcaaacaagggggatgcaggtcttgatagcaacgggttgcactcaactaaggagaacagtggcagggcatcaccaactaaacaacaccagcagtataagaagaagtctctgctgaagagattcggtggtctgctaaaaaagaaaagcgaaaattagcataaaactgtctgatgatattctttgttctatcatttgacatattttttgtaaaccctctcagagatgctgaaagccaacttactattgagagtactatgaaacctctcgcgcagtgtgaaataaatgacagaaatgaagtgtgtgttggtgttggtgctggtgctggagacactaacataaccggtggtattatccaattgtattggagttctattcttgaaaggtgcttggatacaaacgatcaaagcttgaaggaggcttgagtcaattgaatcatctgtaagtaatttagaagaaatattgtttttgttggtgaagcgagtttgttctttcctttgggctctatttatttatgaattgataacccaacaggattgtagtttgtagccatttagatttgaatccgagctatgactgagacgaatacaacatatgcattttgtagccatgtatatctgaatcagagctctgtgattgagatgaatatggttttatgtgccgtcgcaacacactgacattgtactatggtattataagtatcaatatgaagtatttctttg

SEQ ID NO: 221502 - DNA, 2121 bp, Zea Mays
ggaaggtcaactggcatgcatacatgtgcttgctcattatggttttatgctattggtctgggcctttgtaagatcttaagtagaagggcaggcatggtgcaatggtgagagttgtctcattgagccaccaggtcgcgggtttgaattagcctctccgcatttcaggaggaaggcttgcctcggtttatctcttccccggaccccactcatgtggttgcctccggcactggatctgccttttgtaagatcttaggtgtatgctcctagaatatgtgtgatttacttccattaaagtatgctttgtgcatattaattagaggatgacgttttggacctagacaaaataaaagtcggacggccactgtcaagcattctccaaattcgttgcttattgtgacgtgtgtgtgcttgagttaacaactaataccatccccaactcatcctcatccatatagaattgcttgaaagcatgtgagtcttcctcaaatcacatgcacccaccatatgtattagtttatgggtgttaaaaagcatgagcctaaagattggattccatagaatggtcacatctggccattcaaataagtccataacttccttttgtgatgtttgcttttgttggagcttcatgtttgaattgatgtatgtatctgactttaggccaatttatgctgggaatgcactttgtactgtgaaatataccgacgaggatccttgcatgatgagtattagatcaacttcattttcccctactgctgatgctatgtctgaaacaaaggttgcacctatcacccaggttgatctctctttcctcagtgaagggaaatctacatgggtgaatctgacatcccaagacacaaagcggcatgatcttgcaaatgcatgtgtagtagtcacaggaggcagaggtttaagaagtgctgaaaattttaagttgttggagcagcttgcggagaaatttggtgcagcagcgggcgcgactagggctgctgttgaagcaggttatgttccaaatgaccttcaggagaaggctgcagcagcttgaatctcagctaatggaagcgaacagaatcaaagaggaaggcaacactggaagtatccgatggaaggagaacatattagaccaagagaatgaattacagaacataaaacaagagaacgacgacctgcagacaaaggaatcagcggcttctgagaagattaaggaactctcttcccagcttactaatgcaaaatatggcatgataaatagtaacaccaaggagataatgagaaggggggcactgaagaggacgatgaacctgttgtagtagttgccaaaatatgggagaacaacaagtttgttgactatgattcatctaaggagaaggagaatgatggtgactcacaggttgatttggaatcaaacaagggggatgcaggtcttgatagcaacgggttgcactcaactaaggagaacagtggcagggcatcaccaactaaacaacaccagcagtataagaagaagtctctgctgaagagattcggtggtctgctaaaaaagaaaagcgaaaattagcataaaactgtctgatgatattctttgttctatcatttgacatattttttgtaaaccctctcagagatgctgaaagccaacttactattgagagtactatgaaacctctcgcgcagtgtgaaataaatgacagaaatgaagtgtgtgttggtgttggtgctggtgctggagacactaacataaccggtggtattatccaattgtattggagttctattcttgaaaggtgcttggatacaaacgatcaaagcttgaaggaggcttgagtcaattgaatcatctgtaagtaatttagaagaaatattgtttttgttggtgaagcgagtttgttctttcctttgggctctatttatttatgaattgataacccaacaggattgtagtttgtagccatttagatttgaatccgagctatgactgagacgaatacaacatatgcattttgtagccatgtatatctgaatcagagctctgtgattgagatgaatatggttttatgtgccgtcgcaacacactgacattgtactatggtattataagtatcaatatgaagtatttctttg

SEQ ID NO: 221503 - DNA, 1106 bp, Zea Mays
gacgacgaaaggtagactagctagaactccctaccgggtgcctatatatacatgaacaagctcttgcttgaaacttgcaacggtagctcttctccacacgttcgtccatcgcgctcacagctgcacgtatactactgtattatgattgcttgtctgaccttaacaattaattttcctgctgcatgcatgtgtgttagtgctggcagtttgttgcttatatatgaagaccgtcatcgatccatggtcgggcttgtgcttgagcctgcgtgctagctgccggcgggcaggtgttccttaccggtacgccaggctaagtaatctcatctgcagaacatgctctcgcctctcgctctactgttggttgatcgtctcgcccgttgtgttggagacgtcttctccacgtttagtccatctctctgcaggcagccaagcaaagatctttgggacaggtgaccaccagttgcatgggtgaatcccagacgacgaccacatctgatgagacatacacaacgtcgtcgtctttgtcatcattctacctgacagttgagaagacgacgaccacaactgatcagatgtacacagcgccaccgtctttaccatcattgtaccttacacccaaggagacgctgaacaatggtgtcatttcgataagcaactacaacactgatgaagcaccttcgccgcaacctgtatcgttggtatctgatgagatagacatttctgaatcatcacctccgccatctccgtcgccacatacagtggatgagatggacaactctgaggagtcaccttcacctttgtctcacaccatagaactccaaatgtttgaggtaccaaccacctcaggcaataatgaggaggacgaggaggatgacgattcttttagagaatgggagagtgattaaatgttttcatcagttaacaacacctcaattgtagataggcatcagcgatatgatgtaatataggtggagacatgtttgtcgtatggatttgtttgaaatggtaagacatgtttgatgcgtatacttctagccatactcctcttgattagtaaggtatgctgatggatgaatggaatttgaacaagctcgtttatttggcgg

SEQ ID NO: 221504 - DNA, 1473 bp, Zea Mays
ccttcagcaccttcttcagccagactggtgctgggaagcacgttccccgtgcaatcttcgttgatctagaacccactgtgatcgatgaggtgcgcactggcacgtaccgccagctcttccaccctgagcagctcatcagtggcaaggaggatgccgctaacaatttcgcccgtggccactacacaattggcaaggagattgttgatctgtgccttgaccgtatccgcaagcttgctgacaactgcaccggcctccagggcttcctggtcttcaatgccgttggtggtggcactggctctggccttggttctctcctccttgagcgcctgtctgtggagtacggcaagaaatccaagctgggcttcactgtgtacccatctccccaggtgtcaacctctgttgtggagccttacaacagcgtgctctccactcactcactcctggagcacactgatgtctccatcctgctcgacaacgaggccatctatgacatctgcaggcgctccctcgacattgagaggcccaactactccaacttgaatcgccttgtgtctcaggtgatctcatcgctgactgcttctctgaggttcgatggtgccctcaatgtggatgtgaacgagttccagaccaacctggttccttacccgaggatccacttcatgctctcctcctacgcaccggtgatctcttctgcgaaggccttccacgagcagctgtctgtggcggagatcaccagcagcgcgttcgagccggcttccatgatggtcaagtgcgacccacggcacggcaagtacatggcttgctgcctgatgtaccgcggcgacgtggtgcccaaggacgtgaacgccgcggtggccaccatcaagacgaagcgcaccatccagttcgtggactggtgcccgacggggttcaagtgcggcatcaactaccaggcgccgacagtggtgccgggtgccgacctcgccaaggtgcagcgcgcggtgtgcatgatctccaactccaccagcgtcgtcgaggtgttctcccgcatcaacagcaagttcgacctcatgtacgccaagcgcgcgttcgtgcactggtacgtcggcgagggcatggaggagggggagttctccgaggcacgcgaggacctggccgccctggagaaggactacgaggaggtcgccgcagagggcggcagtgatgacggtgacgaggaggaggaatactgatctgcttgcatgaatctgtttggctgtcgagccaggttgtggtgttgaaaaacctttgtttgtgtcctggcccccctgggtaatgtttgggtgtttccttccatcatcacttgctgaactgctctagtatttgcatttgtaattgaagtctgtcgctttaagcactcttggttctaaagatctctgtgcttttggggggtgtttttgcattgccccagattccaataaactcaccaaattcgggtcgtgcgtagtaatttag

SEQ ID NO: 221505 - DNA, 1659 bp, Zea Mays
cttccgcgccgcgccgcgccatcacgggccggccgcggccgcctctcccacgctgcctataaaagccgccgcgaggctgagcagcattatcgcttcagctcggcgtcttcacaaacgccggcgcaaactctcgcccgagcccgacagatcttcaattccccattccgcccaccgatcgaccttcacgccagtctcggtctcttccgaaggcgtcgcgcgcggttgtttgagaggagaggaggaagatgagggagtgcatctccgtccacatcgggcaggccggcatccaagtcggcaacgcgtgctgggaactttactgcctcgagcacggcatccagcctgatggccaagtgcctggagataagaccgcgggacatcacgatgatgccttcagcaccttcttcagccagactggtgctgggaagcacgttccccgtgcaatcttcgttgatctagaacccactgtgatcgatgaggtgcgcactggcacgtaccgccagctcttccaccctgagcagctcatcagtggcaaggaggatgccgctaacaatttcgcccgtggccactacacaattggcaaggagattgttgatctgtgccttgaccgtatccgcaagcttgctgacaactgcaccggcctccagggcttcctggtcttcaatgccgtgtcaacctctgttgtggagccttacaacagcgtgctctccactcactcactcctggagcacactgatgtctccatcctgctcgacaacgaggccatctatgacatctgcaggcgctccctcgacattgagaggcccaactactccaacttgaatcgccttgtgtctcaggtgatctcatcgctgactgcttctctgaggttcgatggtgccctcaatgtggatgtgaacgagttccagaccaacctggttccttacccgaggatccacttcatgctctcctcctacgcaccggtgatctcttctgcgaaggccttccacgagcagctgtctgtggcggagatcaccagcagcgcgttcgagccggcttccatgatggtcaagtgcgacccacggcacggcaagtacatggcttgctgcctgatgtaccgcggcgacgtggtgcccaaggacgtgaacgccgcggtggccaccatcaagacgaagcgcaccatccagttcgtggactggtgcccgacggggttcaagtgcggcatcaactaccaggcgccgacagtggtgccgggtgccgacctcgccaagcgcgcgttcgtgcactggtacgtcggcgagggcatggaggagggggagttctccgaggcacgcgaggacctggccgccctggagaaggactacgaggaggtcgccgcagagggcggcagtgatgacggtgacgaggaggaggaatactgatctgcttgcatgaatctgtttggctgtcgagccaggttgtggtgttgaaaaacctttgtttgtgtcctggcccccctgggtaatgtttgggtgtttccttccatcatcacttgctgaactgctctagtatttgcatttgtaattgaagtctgtcgctttaagcactcttggttctaaagatctctgtgcttttggggggtgtttttgcattgccccagattccaataaactcaccaaattcgggtcgtgcgtagtaatttag

SEQ ID NO: 221506 - DNA, 1683 bp, Zea Mays
cttccgcgccgcgccgcgccatcacgggccggccgcggccgcctctcccacgctgcctataaaagccgccgcgaggctgagcagcattatcgcttcagctcggcgtcttcacaaacgccggcgcaaactctcgcccgagcccgacagatcttcaattccccattccgcccaccgatcgaccttcacgccagtctcggtctcttccgaaggcgtcgcgcgcggttgtttgagaggagaggaggaagatgagggagtgcatctccgtccacatcgggcaggccggcatccaagtcggcaacgcgtgctgggaactttactgcctcgagcacggcatccagcctgatggccaagtgcctggagataagaccgcgggacatcacgatgatgccttcagcaccttcttcagccagactggtgctgggaagcacgttccccgtgcaatcttcgttgatctagaacccactgtgatcgatgaggtgcgcactggcacgtaccgccagctcttccaccctgagcagctcatcagtggcaaggaggatgccgctaacaatttcgcccgtggccactacacaattggcaaggagattgttgatctgtgccttgaccgtatccgcaagcttgctgacaactgcaccggcctccagggcttcctggtcttcaatgccgtgtcaacctctgttgtggagccttacaacagcgtgctctccactcactcactcctggagcacactgatgtctccatcctgctcgacaacgaggccatctatgacatctgcaggcgctccctcgacattgagaggcccaactactccaacttgaatcgccttgtgtctcagaccaacctggttccttacccgaggatccacttcatgctctcctcctacgcaccggtgatctcttctgcgaaggccttccacgagcagctgtctgtggcggagatcaccagcagcgcgttcgagccggcttccatgatggtcaagtgcgacccacggcacggcaagtacatggcttgctgcctgatgtaccgcggcgacgtggtgcccaaggacgtgaacgccgcggtggccaccatcaagacgaagcgcaccatccagttcgtggactggtgcccgacggggttcaagtgcggcatcaactaccaggcgccgacagtggtgccgggtgccgacctcgccaaggtgcagcgcgcggtgtgcatgatctccaactccaccagcgtcgtcgaggtgttctcccgcatcaacagcaagttcgacctcatgtacgccaagcgcgcgttcgtgcactggtacgtcggcgagggcatggaggagggggagttctccgaggcacgcgaggacctggccgccctggagaaggactacgaggaggtcgccgcagagggcggcagtgatgacggtgacgaggaggaggaatactgatctgcttgcatgaatctgtttggctgtcgagccaggttgtggtgttgaaaaacctttgtttgtgtcctggcccccctgggtaatgtttgggtgtttccttccatcatcacttgctgaactgctctagtatttgcatttgtaattgaagtctgtcgctttaagcactcttggttctaaagatctctgtgcttttggggggtgtttttgcattgccccagattccaataaactcaccaaattcgggtcgtgcgtagtaatttag

SEQ ID NO: 221507 - DNA, 1791 bp, Zea Mays
gtcttccgcgccgcgccgcgccatcacgggccggccgcggccgcctctcccacgctgcctataaaagccgccgcgaggctgagcagcattatcgcttcagctcggcgtcttcacaaacgccggcgcaaactctcgcccgagcccgacagatcttcaattccccattccgcccaccgatcgaccttcacgccagtctcggtctcttccgaaggcgtcgcgcgcggttgtttgagaggagaggaggaagatgagggagtgcatctccgtccacatcgggcaggccggcatccaagtcggcaacgcgtgctgggaactttactgcctcgagcacggcatccagcctgatggccaagtgcctggagataagaccgcgggacatcacgatgatgccttcagcaccttcttcagccagactggtgctgggaagcacgttccccgtgcaatcttcgttgatctagaacccactgtgatcgatgaggtgcgcactggcacgtaccgccagctcttccaccctgagcagctcatcagtggcaaggaggatgccgctaacaatttcgcccgtggccactacacaaggcttcctggtcttcaatgccgttggtggtggcactggctctggccttggttctctcctccttgagcgcctgtctgtggagtacggcaagaaatccaagctgggcttcactgtgtacccatctccccaggtgtcaacctctgttgtggagccttacaacagcgtgctctccactcactcactcctggagcacactgatgtctccatcctgctcgacaacgaggccatctatgacatctgcaggcgctccctcgacattgagaggcccaactactccaacttgaatcgccttgtgtctcaggtgatctcatcgctgactgcttctctgaggttcgatggtgccctcaatgtggatgtgaacgagttccagaccaacctggttccttacccgaggatccacttcatgctctcctcctacgcaccggtgatctcttctgcgaaggccttccacgagcagctgtctgtggcggagatcaccagcagcgcgttcgagccggcttccatgatggtcaagtgcgacccacggcacggcaagtacatggcttgctgcctgatgtaccgcggcgacgtggtgcccaaggacgtgaacgccgcggtggccaccatcaagacgaagcgcaccatccagttcgtggactggtgcccgacggggttcaagtgcggcatcaactaccaggcgccgacagtggtgccgggtgccgacctcgccaaggtgcagcgcgcggtgtgcatgatctccaactccaccagcgtcgtcgaggtgttctcccgcatcaacagcaagttcgacctcatgtacgccaagcgcgcgttcgtgcactggtacgtcggcgagggcatggaggagggggagttctccgaggcacgcgaggacctggccgccctggagaaggactacgaggaggtcgccgcagagggcggcagtgatgacggtgacgaggaggaggaatactgatctgcttgcatgaatctgtttggctgtcgagccaggttgtggtgttgaaaaacctttgtttgtgtcctggcccccctgggtaatgtttgggtgtttccttccatcatcacttgctgaactgctctagtatttgcatttgtaattgaagtctgtcgctttaagcactcttggttctaaagatctctgtgcttttggggggtgtttttgcattgccccagattccaataaactcaccaaattcgggtcgtgcgtagtaatttag

SEQ ID NO: 221508 - DNA, 1151 bp, Zea Mays
ccgcatccactaccgcaggccgcagcccagcaccggccgctctacgccggcacgtcctcgtttctgtccgaggtcatcgcctccgcaacttcgtggccggtgaggtcgcaccaccatggcgtcgctcctagcccggcaggcagcgcaggcgctccgcgcgaggcaaacggcgcagctcgggccggccgcgtcggcgatgcaagggcacctccgtacctacatgaacgcggggattcccaagcggttcaaagaggatgaggagaaagaacagcttgcaaaagatctcgcaaaagattggaatgctgtgtttgaaaggagcatcaatacattgtttttgactgaaatggtccgtggcttgatgctaactctcaagtacttctttgatagaaatgtcacaattaactatccgtttgagaagggtcctctgagcccccgcttccgtggtgagcacgctctcagacgttatgaatctggggaagagcgctgcattgcttgtaaactatgcgaagctgcaattacaattgaggctgaagaacgtgaagatggcagtcgccgaaccacaagatatgatattgacatgaccaaatgcatttactgtgggttctgtcaagaggcttgcccagtcgatgctattgttgaggggcctaactttgagtttgccactgagacacacgaggaactactgtacgacaaggagaaattgcttgagaatggtgatcgctgggagactgagattgctgagaacttgagatctgagagcctctatcgctgaatctgtcttccattatggttgataaactgggttcttccattttccatattttgctcaactagctgatgaataagcaaacgatgtatcataacttaggtacgatgtttttgtaccttggcaccatctgtgtgttttgttcattgccttgctaaaggtggcaccagatgttctttgatgggaaaattccttttgtagcactgagctgttttcagtcaccttattttgtatacaatgaaacagaacgctgtgttcatggcacagtgatttggtgaatgttcacatgcttgtttccgactccgttttaaaacaaaacaaggtttgaactgattagcttgttgtaaatgtcgtttattttgaaaattgaaacaaacggggctgg

SEQ ID NO: 221509 - DNA, 1118 bp, Zea Mays
cgcatccactaccgcaggccgcagcccagcaccggccgctctacgccggcacgtcctcgtttctgtccgaggtcatcgcctccgcaacttcgtggccggtgaggtcgcaccaccatggcgtcgctcctagcccggcaggcagcgcaggcgctccgcgcgaggcaaacggcgcagctcgggccggccgcgtcggcgatgcaagggcacctccgtacctacatgaacgcggggattcccaagcggttcaaagaggatgaggagaaagaacagcttgcaaaagatctcgcaaaagattggaatgctgtgtttgaaaggagcatcaatacattgtttttgactgaaatggtccgtggcttgatgctaactctcaagtacttctttgatagaaatgtcacaattaactatccgtttgagaagggtcctctgagcccccgcttccgtggtgagcacgctctcagacgttatgaatctggggaagagcgctgcattgcttgtaaactatgcgaagctatatgcccagcgcaggcaattacaattgaggctgaagaacgtgaagatggcagtcgccgaaccacaagaggcttgcccagtcgatgctattgttgaggggcctaactttgagtttgccactgagacacacgaggaactactgtacgacaaggagaaattgcttgagaatggtgatcgctgggagactgagattgctgagaacttgagatctgagagcctctatcgctgaatctgtcttccattatggttgataaactgggttcttccattttccatattttgctcaactagctgatgaataagcaaacgatgtatcataacttaggtacgatgtttttgtaccttggcaccatctgtgtgttttgttcattgccttgctaaaggtggcaccagatgttctttgatgggaaaattccttttgtagcactgagctgttttcagtcaccttattttgtatacaatgaaacagaacgctgtgttcatggcacagtgatttggtgaatgttcacatgcttgtttccgactccgttttaaaacaaaacaaggtttgaactgattagcttgttgtaaatgtcgtttattttgaaaattgaaacaaacggggctgg

SEQ ID NO: 221510 - DNA, 937 bp, Zea Mays
cgcaggccgcagcccagcaccggccgctctacgccggcacgtcctcgtttctgtccgaggtcatcgcctccgcaacttcgtggccggtgaggtcgcaccaccatggcgtcgctcctagcccggcaggcagcgcaggcgctccgcgcgaggcaaacggcgcagctcgggccggccgcgtcggcgatgcaagggcacctccgtacctacatgaacgcggggattcccaagcggttcaaagaggatgaggagaaagaacagcttgcaaaagatctcgcaaaagattggaatgctgtgtttgaaaggagcatcaatacattgtttttgactgaaatggtccgtggcttgatgctaactctcaagtacttctttgatagaaatgtcacaattaactatccgtttgagaagggtcctctgagcccccgcttccgtggtgagcacgctctcagacgttatgaatctggggaagagcgctgcattgcttgtaaactatgcgaagctatatgcccagcgcaggcaattacaattgaggctgaagaacgtgaagatggcagtcgccgaaccacaagatatgatattgacatgaccaaatgcatttactgtgggttctgtcaagaggcttgcccagtcgatgctattgttgaggggcctaactttgagtttgccactgagacacacgaggaactactgtacgacaaggagaaattgcttgagaatggtgatcgctgggagactgagattgctgagaacttgagatctgagagcctctatcgctgaatctgtcttccattatggttgataaactgggttcttccattttccatattttgctcaactagctgatgaataagcaaacgatgtatcataacttagttcacctgaagtttgggaagtttttctaaagttttcagctctatcggctctcgtttttagagaccag

SEQ ID NO: 221511 - DNA, 1083 bp, Zea Mays
caggccgcagcccagcaccggccgctctacgccggcacgtcctcgtttctgtccgaggtcatcgcctccgcaacttcgtggccggtgaggtcgcaccaccatggcgtcgctcctagcccggcaggcagcgcaggcgctccgcgcgaggcaaacggcgcagctcgggccggccgcgtcggcgatgcaagggcacctccgtacctacatgaacgcggggattcccaagcggttcaaagaggatgaggagaaagaacagcttgcaaaagatctcgcaaaagattggaatgctgtgtttgaaaggagcatcaatacattgtttttgactgaaatggtccgtggcttgatgctaactctcaagtacttctttgatagaaatgtcacaattaactatccgtttgagaagggtcctctgagcccccgcttccgtgatatgcccagcgcaggcaattacaattgaggctgaagaacgtgaagatggcagtcgccgaaccacaagatatgatattgacatgaccaaatgcatttactgtgggttctgtcaagaggcttgcccagtcgatgctattgttgaggggcctaactttgagtttgccactgagacacacgaggaactactgtacgacaaggagaaattgcttgagaatggtgatcgctgggagactgagattgctgagaacttgagatctgagagcctctatcgctgaatctgtcttccattatggttgataaactgggttcttccattttccatattttgctcaactagctgatgaataagcaaacgatgtatcataacttaggtacgatgtttttgtaccttggcaccatctgtgtgttttgttcattgccttgctaaaggtggcaccagatgttctttgatgggaaaattccttttgtagcactgagctgttttcagtcaccttattttgtatacaatgaaacagaacgctgtgttcatggcacagtgatttggtgaatgttcacatgcttgtttccgactccgttttaaaacaaaacaaggtttgaactgattagcttgttgtaaatgtcgtttattttgaaaattgaaacaaacggggctgg

SEQ ID NO: 221512 - DNA, 967 bp, Zea Mays
ggccgctctacgccggcacgtcctcgtttctgtccgaggtcatcgcctccgcaacttcgtggccggtgaggtcgcaccaccatggcgtcgctcctagcccggcaggcagcgcaggcgctccgcgcgaggcaaacggcgcagctcgggccggccgcgtcggcgatgcaagggcacctccgtacctacatgaacgcggggattcccaagcggttcaaagaggatgaggagaaagaacagcttgcaaaagatctcgcaaaagattggaatgctgtgtttgaaaggagcatcaatacattgtttttgactgaaatgatatgcccagcgcaggcaattacaattgaggctgaagaacgtgaagatggcagtcgccgaaccacaagatatgatattgacatgaccaaatgcatttactgtgggttctgtcaagaggcttgcccagtcgatgctattgttgaggggcctaactttgagtttgccactgagacacacgaggaactactgtacgacaaggagaaattgcttgagaatggtgatcgctgggagactgagattgctgagaacttgagatctgagagcctctatcgctgaatctgtcttccattatggttgataaactgggttcttccattttccatattttgctcaactagctgatgaataagcaaacgatgtatcataacttaggtacgatgtttttgtaccttggcaccatctgtgtgttttgttcattgccttgctaaaggtggcaccagatgttctttgatgggaaaattccttttgtagcactgagctgttttcagtcaccttattttgtatacaatgaaacagaacgctgtgttcatggcacagtgatttggtgaatgttcacatgcttgtttccgactccgttttaaaacaaaacaaggtttgaactgattagcttgttgtaaatgtcgtttattttgaaaattgaaacaaacggggctgg

SEQ ID NO: 221513 - DNA, 1291 bp, Zea Mays
gccagcgccaccgacgccgacgccggcgccgggctcagatcggagttcctgcaggtcctgctcagccgccgccgcgatctcctagtgcctctcacggtggagcaagggagtccggtgaaggacccgatgtaccagaatcctccgtcgaccatggaggcaaatccgatggagtcgtgccccagtaaagaggtggagaacttgagggagaagctggttgaagaaaatttctaccttatcactgagctaggtgaacaaggacgagtacctgtacttctgctgaagcttgacgaccccgtccctagaagaaaaccagctatcgtgttcctgcacagctcttacaagtgcaaagagtggctgcgcccactgcttgaggcatatgcttccaagggctacgtctgtgtggctattgactcgcgctatcacggcgaaagggccagcaatgaaaccacttacatagatatagatttttacgacgcgcgcgacgaggaatctcagccaaattttgtttggacgtcgacttttctgcaggtgtgggacttggtaaagcttggagactacctcggcgagagggaggacgtggatccctgtagggttgggatcaccggcgaatcgctgggagggatgcacgcgtggtttgctgcttttgtggacacacggtacagtgtcgtcgttcctatcatcggtgttcaggtgggccattgacaacaacatgtggctggctagggtgaatagcataaggcctttatttgaagaagcaagaattgacttaggaaagagcgaattagatacagaagttgttgaaagggtttgggaaaagatagcaccaggcctggactcgcaatttgatgccccctattcacttcctttgcttgcaccacggccgttgctacttctaaatggcgctgaagatcctcgttgcccaataagtggtttaggagaagctatttcaaaaactgctaaagcttacgaagaatctggttgcgcggagaagttcatgtattatagtcttaaagaagaatttggagagttgtagcatatcaaatctgggccctttttaaaagccacccaagataagatcatggacttttggagttttctccaagtagagggtctaggcatgcaaattattataatcctcatcactttacaatgcaatgaggaatgtaggttgttattcaaccaaaaatatcatatatttagatatcttcgtactcactctgttcttttttatttatcgtgttttagttcaataatgaactatcgaacgataatattcgagaatgaagttagc

SEQ ID NO: 221514 - DNA, 1176 bp, Zea Mays
ctctaagcagcctcacgagatcgaagagcaacaatataatagtgcactcgatcttactccacatacatgcagactgcattgcatccctctgctgaatacttgggtgcaccttgatagtcggcatcttttttttagctaggtgaacaaggacgagtacctgtacttctgctgaagcttgacgaccccgtccctagaagaaaaccagctatcgtgttcctgcacagctcttacaagtgcaaagagtggctgcgcccactgcttgaggcatatgcttccaagggctacgtctgtgtggctattgactcgcgctatcacggcgaaagggccagcaatgaaaccacttacatagatgcactgaaatcggcttggcggaatggggatacaatgcctttcgtttttgacacggtgtgggacttggtaaagcttggagactacctcggcgagagggaggacgtggatccctgtagggttgggatcaccggcgaatcgctgggagggatgcacgcgtggtttgctgcttttgtggacacacggtacagtgtcgtcgttcctatcatcggtgttcagggattcaggtgggccattgacaacaacatgtggctggctagggtgaatagcataaggcctttatttgaagaagcaagaattgacttaggaaagagcgaattagatacagaagttgttgaaagggtttgggaaaagatagcaccaggcctggactcgcaatttgatgccccctattcacttcctttgcttgcaccacggccgttgctacttctaaatggcgctgaagatcctcgttgcccaataagtggtttaggagaagctatttcaaaaactgctaaagcttacgaagaatctggttgcgcggagaagttcatgtattatagtcttaaagaagaatttggagagttgtagcatatcaaatctgggccctttttaaaagccacccaagataagatcatggacttttggagttttctccaagtagagggtctaggcatgcaaattattataatcctcatcactttacaatgcaatgaggaatgtaggttgttattcaaccaaaaatatcatatatttagatatcttcgtactcactctgttcttttttatttatcgtgttttagttcaataatgaactatcgaacgataatattcgagaatgaagttagc

SEQ ID NO: 221515 - DNA, 1035 bp, Zea Mays
cttcacagacacatacacctgtcgtctcttttgttgccatgccaacatcgcgagaggaaggacaagcagaacccgacgagcaccaccccaccatcctacaccgtggcgggggtggcgacgccgccggcggcagcggcggcaggcccaggcaggtgtgggttcctggccccgtcatcgtgggcgccgggccgtcggggctggccacggcggcgtgcctcaaggcgcgcggcgtgccgtcgctgatgctggagaaggactcgtgcgtggccgcgtcgtggcgccaccgcacgtatgagcggctccggctgcacctgccgcggtgcttctgcgagctcccgctcgcgccgttccctcccggcacgccgccgtaccctacccgggaccagttcatcgcctacctcgacgactacgcccgcgtcttcggcattcagcctcacctcaacgcgcgcgtccacagggctgcctacgacgcggccatcggtttctggagggtgaccgtcaaggaggacagcggcggcgatggtgccacggcggccaacaccgagttcttgtcacggtggctcgtagtggccaccggcgagaatgcggagccggcgtggccggagggcgtggaggggatggacacgtaccgcggcgtggccatgcacacgagcagctacaagaagggggacgaattcaggggcaagaatgtgctcgtggtcggctgtgggcaactccggcatggaggtcagcctcgacctctgcaacaatggcgccaaagcctccatggttgtcagggacaagcttcacgtgttgccgagggagatactaggcgtctccacgttcgggctctccgtgttccttctcaggtggctacccataaagctggtggattctttgcttctcttcttcacgaggctgatcctcggagacactgaaaaagcatggtctcccacgacctaagatcggcccgcttcaaatcaaggcttcaaccggcaaaactcccgtgctggacatcggagctctaccaaagatcagaagcggagaaatcaaggt

SEQ ID NO: 221516 - DNA, 399 bp, Zea Mays
gcaatttacagtggtcgattacttagcagccagggtttcatggcctacgtgcagacggactccgggaagacgacgaccttctacttccccatcaccggcatcatcatgcagcccgctagaatgccacaatagggcgggagcatggggatgagaaccgcgtacccatctgccctcatactcccccccacgagagagctctccatgcaggaaacaacccacaagattggtgtggtgatagccaaatcttcaggcgatttcaaaccatggccgcgtaaaagctcttgttgattctgctagagagcacatacttgagttctgaattggtccaaatgcctgttcgtatatctctcgaggatcacatgtaatattctccttttccttttcctccatacatcgagc

SEQ ID NO: 221517 - DNA, 1304 bp, Zea Mays
caactttgttctgtgcctctcgatccttcagcaatctaccagagtattcggctattcgctcacttcactctcctacggctcggtcacctcctcgcttcactccgtccatggtcgtcgccgctcacggcgccctcctgcaaccccacctcccctcccttcttccttccaccgtagccccaatccatctatcctctgctgcttcgcgtacgatgacgagggagtcggtatacaccagcagggccggtgcctaggcttggctccgctgctggtttaagctgcccagtaggccagtagctcaagcatggagaggactgtctaagcggcactcgcagcaagagctatctacacctctggtccgagagcggcttcgccgcgatcgcacgagacaacggtggacacggaggtggtgctcgctgaagaagagaactgtttcctagtgctgcgagcctgcgactgtacgaggcgctcaacgcctgcgacgcgcgtcgggcacaagaactgctggcaccaaacctcgagtggtggttccatggccctcccacatgccagcacatgacgcacctcctcaccggcgcgagctagcgcgagaagaaccgcgtcggtggctgctttgtcttcaaagtgcgacaaacttctacgtattatgcccttgtacgttctatgtcctcaagctgcttgatggaatgccgaaacgagtctatccgctactttttatcagtgaattgccatccagcgttgttagaacttataacatcctgtcgcacaatgacggtggcctgtggtgccatgcttctgttatgggctaacttgactccactattgcgcgcccaaaggcgcacgccaaccactagtacgagtacatggagaacgggagtcttgagacgtggctcaggaaccgggccgacgccatcgaagcactcggatggccagaccgcctgaagatatgcatcggttctgcccgggggctctcgttcctgcaccatggatttgtgccccatatcatccaccgagacatgaagccgagcaacattctgctggatggaaacttggagccaagggtctctgatttcggcctcgcgaggataatcagcgcgtgcgagacccatgtcagcaccgacattgccgatggcccgtgtgctagccatcgcccgagactgcactgtggacgagccatggaagaggccaactatgctggaggtgatgaagggcctcaagatggccgaaacaatagaatgcggccctgtgagttgcgacagtcaccaagaacatgtaatgcattgctgacggtgtcgctgctgatgtag

SEQ ID NO: 221518 - DNA, 2459 bp, Zea Mays
ccacaaaagggagaatattcatccatcatcatctatgataacagtgacagttcataagggtatagaggacaacataactggctcaaatctgggcgacagtgacatggggtgagagaaaatgcacagcgccagtttcataatgcaaataatgcagcctaaaataccagatagaaccatcgttatttaggagacagatcatgaggggtacttcagtgagggcaggacaacataagcatattcttagaagatcaacaattgatcgttgagagtcgagcaaagcacatagtcttaacaagaaacagatttgccatactaacaagaaacagttttgccatacttctataacccatacatttgagctactaagctaacaaaacctgaagaaaaacctgaggggccaagttctgcagtataattgattggtggccatctcaagtgaagcctacatcatataaaccttggtcctcaacttcttgacatgtcatctgatttctcccccttgatcttcttaccgacgatcaccctttatgctcttcttcctcttctttccctcctcggtagcacgcttgcccttcactctacccttcttgccaacctcctggctatcatcaaccatgatgctcttcgtcttcttctttttctctgtatccacctgaacttcttcctgcatcacaacaccctcctcaatctgctccttcttattcctcttcctcttggaactcacattggcaaatacctctcttccatcggcaccagcattcgccttcttttcgatgacctccccagatccaacaatgtcaggctcaggcacctcgattttcatacccaactccggcacaacctggtaaattggtagggcaactgaatccacagccttcagatgcagcgccctgacattgccccacttctttggcaccttctcgacagcctcctccaccgcggccatcacattgtccacgatatcctcctcctccatgtccagcctacccaccttaatccccgagcaggtccctgaccgcaggtacagaaaagcagagccaagaaccctgcggacctgctccggccatccgatgcgggtgaaatcgactccaatcggagccttcttggtggagtagaacgccttcccgaggacgcgcggcagcagggggaggatggcgcggtcggcgacgaagaggtcgtgggaggctgcgagacggcgccgagactcgtacgggcggtaatccgtgcggagcgtagagagcgggatgacctcggagacggggaaacggtggagcgacatggacgcgtggaggtcggaggcggaaggggaccgcgacttggtgcggtcgtccgagatgacgcagacggaggcgccgtcgtgcccaacaacgggatgtggcatcgggaggaggcgcggcttggtgctgcgcgaggcggggatgcggcgtagcgagagctggaggaccacgatgtcgtcgcgctcgtcggcgaggaggttcgggcgcgcctccgcagcgcgcttcttcatccacgttgtcagggaagcgacagcgctggccaccgtctctcggggcaccgggtgtggtggctgcggcggcgacatggtggcggcggcgcgagagggagatcagaggggtttagggtttggttgatgtggggtgggaaggttgtgtttttatagacttcacagcatttgtccctatggcaagtgggtccaggctccgtcatttgcccatatgtctctctatggtaggtgggtccagactgcggagaggacgctccgcaactagcaaaggcggggtgctgtagcgccggcggcccttcgccgactcgcccaggtgcgcgcgggacaggcaacaacgaccagcaggagtccggcggtgtggggcagcagaagctcatcggtgcggagcattgttcacacaaactgactttattcctgcaggactttattcttgattgttcctgatcgaaacccgaactttttggcaaatgagtgccggtggtgcttttggcggaaataggggggtgaggcctgtacctcctgaaaaaggtgtgttcccattggatcacttacatgagtgcgacttggagaagaaagattatcttggctgcctgaaatctacaggattccagtctgaaaaatgtcggcagttctcaaagaagtatttggagtgtcggatggagagaaacttgatggccaagcaagacatgtcagagcttgggttcagaattgtggatgaagcgggtacatctcctgacaagaacagcaaaccggagagccctcctaatcagccaaaggattaaaaaaatagctgtttggctttgatgtagcttttgtatgtttcttcatcccaaagatctgtcaagatctcaaacaaataagggtataatgaaaggacgatgttagtttacatagtaaccaaatttgaaacttatctgttggctgttttgagttttgacgttcctgaggagcagtt

SEQ ID NO: 221519 - DNA, 333 bp, Zea Mays
gtaaccagctcgccaaccacaagtgctcagctcctacttttgaaacttgatggccaagcaagacatgtcagagcttgggttcagaattgtggatgaagcgggtacatctcctgacaagaacagcaaaccggagagccctcctaatcagccaaaggattaaaaaaatagctgtttggctttgatgtagcttttgtatgtttcttcatcccaaagatctgtcaagatctcaaacaaataagggtataatgaaaggacgatgttagtttacatagtaaccaaatttgaaacttatctgttggctgttttgagttttgacgttcctgaggagcagtt

SEQ ID NO: 221520 - DNA, 607 bp, Zea Mays
gtctatcatgatgtctgatttaaaaagattgaaaaaaattaaatttcgcacacacaaagttatctacaggagatatgctggactgtttttttcaatatgtgtggacataactgataatgaattggcatacttggaatgcattcacttgtttgtcgagatattggaccatttctttagcaatgtttgtgagctcgatttagtgtttaattttcacaaggtttacctgatactagatgaatttattcttgctggggagctgcaagaaacaagcaaaaaggcaataattgagcgaatgggtgaactggagaagctggaatgacgaagaccaggaagatgctgccgcgtgtgttgtattccaatttgtattattcgtttcaggtgttttacatttgctctcctggttcgttccggctgacagcgtgatgcccatgctgtcactcgaaagaatggtagtagtagctagcatgagtacattataaacgtaccttcgaaaacataataatttcccagcaattatttcgttcccctctgcagtgaaaatgaaaaagacaaaacagcgcgttattcgtgcgactatgtttgcagtgccgaccagctgcagctgcag

SEQ ID NO: 221521 - DNA, 3445 bp, Zea Mays
gcccatttagatcttgctggttcttgtggattttatctcttttatgtgtttccccgtttcgtcgtttttcggtgctcctttgcctttgtttccccgtttttttttctttgggggttgagctctgaggttttcatacggggtttcatctctagcctaccccaacgtgcttgggacaaaaaggctttgttgttgttgttgtatagaatatgttcatgcataagttatgtacttgagttcacaaaacaaaatgaaacatatcaagttcacccacataagttacaacttgtatctatgatcagtaaccataaactcttgatgactgaaagtctgaaactagggagggcatcactgtctgaactggaagactgaacctggaactcttgatgattgaaagtatagaactagggagggtggcgcttcactaacctagcagcgctggactgttggaggatggagagggagagaggaaagaggagaggagggaggctgtcggcgctggacgctggcaccggagggagggcggcagacgacgctggagatggatgcaggtgggtggcgacgacgctagagaagagtcgggcggcgacgctggaggagggagtcgggcggcgatgcggcggcgctagcaggacctggaggagaggatggaggcgggcggcggcgctagcaggacctggaggagaggatggaggcgggcggcggcgctagcaatagcacaaaagagagtattgcatgccctatgatctatgtattttttggcctgtgaaaggcccaataacacgtagaacgtcctaaacacgcctagaacgtccgaaaatgagaaaacgacgtttaagcaacgtttaaacgtgataaacgaacgttctacacgtttttgctaaaacgaccggacgttctaaactccaaccatgttttcttgtttaaacgacgtttaagcgacgttttaataacaatgtagcttccaacctccaattgtgcactagaatttcgaaccagctaatgtgctccttgataaaaaagttcttagtgtgtgttgatgaatgtggactggtagaattgatggcaccaagttcagtcactcaagtaagctatgatattgtgttttatgtttttagagtgactaaaaatggggatgatgcaatcatggttctatttacatattttttgtcatgtccagactatttgaattgttcacattactatgactaaactctctcaaaaatagaatatcattgtgcatcttatggtttaattattgagtaaaactaatgatctgtcataatatttgcaaaaggaccaaaatattggcatactatgttttgtaattgaacttttatttgacacactatattttttaattgtacttttattatattaaaaccgggcattattaaatcctagatctgacactatctacaacatgcatggtcttttataacgaacgtggcatggcaatggagcaatccgtcaccaaatggttctgtttacgacgttaaatacccaatttagcttagtgaccaagcatgaattccaatgttttaaaagaaaaatatttatttaatccatattagcatgcatggcccatctatgtggactagtgaccatggtttaaaaggcgacgcctaggcgtccaggcgctagattttgctaggcgtcggcgccgcccaggtaagaacgagcatggcgtccaccttggcgaggtttctgtcaagtgtcaagaactcaagactgtgcagcgagtacccttggtttcaggtttctgtcaagactgcagcgagtagcgacaacataatgtcttctccaaatgaagctccatcttctgtggctggtgagtacgacccgaagagcgatcctacccggaagccacaaaagtctactgatccagggtggaattctgcactcatggagtactatattggccctgagggcagagggactgttgaagaaattagcactaaattgaaggagggttgcccaagttacttcaatgaatcaaactacaaatattacttggcagtggagtgccttgagagagcatctatgattaataaccctgatgagagagatattcttgctagagatgctttcaatcttttgactaaaattccagaatctactgatttgagtgtcatatgcaagagatttgagaacctaaggttagtgacttcctctgataacaaatattgtatttggctagtaaggtgtcgcctaggtgccccgcctaagtcgcctaggcgttcaggcggtggctggacgcctagttccgcctagccgcctttaaaatcatgctagtgactagtctaatttattgtgtgcctccatgtgcgtaagtagcgaaacgacctctagctgagttggttaggtggtctgagtagcactcctcaggtcctgagttcgaatcccagtgagagtgaatttcaagctgaggttaaaaaggtcactagttggttccctggttgtgtgcacgcgagatggactgacctatgggggttggatcctcgtgtaggggctgggagggctcaaagcacgagtaaagatccagcctatagagggctaaccctcatgctgcactggagtcagttttcgtgaactttcttggttggggctccgattgagcttctttttaatataataccatggtgcggtctttcccctaccggtcgagttttgtttttgaacaaacgcaggagagttgcgtgtcatttcattaagtagaagaaacataggagagacaagactaccggtcgagttttttccatgtgtgtaagcaagaactgccccagcccttcctttcatatgagaaatgaactgccattttgcatgtgctaatttttctcggacacacaacatcatgcacccatacatgcagatgaagtaaaataataaatgttgtatgagagagtaacggacgggttatatgcgcctaggagcctagaagcgcataaatgagagctaagacgtgggcacgctatattccaagactggacaaaaaatggttccgccgtgcattctactttaagacagtgggagtaaagtgcaagtaccattagttaatttgtataggaaaaaacaaataagaaaataaactgcagtttacggtaagaaactctcctagtttaaggggtaaaagaataggagatcctagtacagtgtacaaaaaataggaaaaacaaaaaatcagctcaagggcaagaattgagccagcaacttgcagattaggactgaaaatgaataccaccagaccacaaattcttttgttgtccatagcagaaaataattattatataatataattagtgagtggcaaatgaatgttgggctgcaccagttccgttaaaaaaaataaatgtgcctctagtacttatagttattagctgctagtatgataacgataacccttcttgaataatccatgtcccaaatagtaacttgttttggcttttct

SEQ ID NO: 221522 - DNA, 1022 bp, Zea Mays
cccgcatcccgtcatcctcaccaacctcgcggccacccacctactcgccaacgcaatccacgccccacctgacattcgaaggccacgccccgccatcctagcccctgagcccgcaatccccttccattggtggcatcacccatgcgttgcgtccccgccgtcgtcctcgccccattacgagtggaaggaggacgtccacatgaccacaccaggcaaggccatgcccctgcccgacgccaccccccagaccccccctctagaagcctagcgatggcaccgtctatccgtgcgagatctccgtgcttgaggtcgccaaattccatcccatctctcagcgtcgtggtctccccgatatggatgggggaagagacaagctcgaacaaggaggctacgggcattgctttatgtttgtgacgctaaaggatctctatccatcattgtttccatattatcatggtattattgccttcaatattattctctatatcaactacagctaccgtggaggagttgatagtgaagatgcccttaataaccatgcagttcctgagcctgctcagtcatccctgttctctcttgacatacatgaatatcctaatcttaccgttgttcttgttctgtcctggcaaaaatacttgatgcatttgtttatgttttgtaatgggacatcactgctcaagtatccaaaagcttgggaaattgcacatgcactgcacgcgtggcggagcctcttcgagtttccatgcagcacgattcgttttccaacgcgttgccgctgcatgaaacgcaatgaaggcaagccgtcgcctggctacctccacccgctgcaggctacaaacatccgtgacaccgaactcttcggcgtccacgtctatggcaccgacctcgacgtcgagatccttaacgccaagattgctgccacgtgagcgttatcttagcacgtgaatccgagatcctagtgtaaaataaactagcgtcgagatgtattacgaataacttttaaaaaaagactaaaataaaag

SEQ ID NO: 221523 - DNA, 1843 bp, Zea Mays
tctcgccccacctggcatcgatgcccgcatcccgtcatcctcaccaacctcgcggccacccacctactcgccaacgcaatccacgccccacctgacattcgaaggccacgccccgccatcctagcccctgagcccgcaatccccttccattggtggcatcacccatgcgttgcgtccccgccgtcgtcctcgccccattacgagtggaaggaggacgtccacatgaccacaccaggcaaggccatgcccctgcccgacgccaccccccagaccccccctctagaagcctagcgatggcaccgtctatccgtgcgagatctccgtgcttgaggtatctctgtgtcgagggaaagcgagtgctcctctcctagcctaacctcctctgaattcatgtcccaaccttctcttatttgtgtgtttatctcgtctacctgggttgatgttgtttgattccttctcctttttgtttgggaggtcgccaaattccatcccatctctcagcgtcgtggtctccccgatatggatgggggaaggtaatttgttttttctttgttaagaattgctagactctatcctccggcctctggcctcttggaaaatctaaaaacgatgtatttaattatgcattttcgtttgctttgctaaactctgtacctctacgagcttttccatggtaggatagcttgtgagagctactcgatgagctgacctgaaccattatgattgctggaatgaagctgcgctgctggtttccctccttttatttagtttttcatctccataattgttctttttgtaaaaaaatggttcttcttctatacaaccttggatttttttgcatttgtttttaggtttgcactggtgccgttggcaatatttgtcttcctagcctataaatactagaaaacaaggataacaatagatgcattcgagaagttcctgtgaatgtagcaaatgcttgttctgatgagatatgcatacacaaacatcattgctttcattggccatttcagagacaagctcgaacaaggaggctacgggcattgctttatgtttgtgacgctaaaggatctctatccatcattgtttccatattatcatggtattattgccttcaatattattctctatatcaactacagctaccgtggaggagttgatagtgaaggttgtccagttatttgtcgttgtcggtgctcactttcttcttcgctgcttgattcttgagttatttggtctatatgtagcaaatgtgattgaatcttaactgtcagtggacataattagacattttcaataagaagaatatcaattttagttgattcctatatgtaatcgtgtagatgcccttaataaccatgcagttcctgagcctgctcagtcatccctgttctctcttgacatacatgaatatcctaatcttaccgttgttcttgttctgtcctggcaaaaatacttgatgcatttgtttatgttttgtaatgggacatcactgctcaagtatccaaaagcttgggaaattgcacatgcactgcacgcgtggcggagcctcttcgagtttccatgcagcacgattcgttttccaacgcgttgccgctgcatgaaacgcaatgaaggcaagccgtcgcctggctacctccacccgctgcaggctacaaacatccgtgacaccgaactcttcggcgtccacgtctatggcaccgacctcgacgtcgagatccttaacgccaagattgctgccacgtgagcgttatcttagcacgtgaatccgagatcctagtgtaaaataaactagcgtcgagatgtattacgaataacttttaaaaaaagactaaaataaaag

SEQ ID NO: 221524 - DNA, 476 bp, Zea Mays
ccgctcttcgccgcccactcccacctctcctccttctcccagcgagccacgagcagggcaggaggcgtctggtggcggcgcggcgtgccacggtgctgtcgtccggggagctctgcttcgcggcggtgctcggggactcggtggccgggacggtggtggccagcggcatcaataacttcctcaacctttacaacacggtgctcgtcgtcaggctcgtgctcacctggttccccaacacgccgcccgccatcgtcgcgcctctcagcacgatactcgctttcctcgtcctcaacgccttcaccagcacggccgccgcgcttcccgcggagctgccaagctgctcggcaacggcgcagcatcaccagaggactgctgtctcaccctgctcggcgccgcatgaggcgacgctcagccagaggaaatggatgcggagaatgcggtcacagaagccacagggagacgatggtgatcactag

SEQ ID NO: 221525 - DNA, 655 bp, Zea Mays
atggccgcctccagcgccgacccggctcagcaccacgcctcctcgaggccgccactcctcctcgccgtacgccacctgcccttcccgggcgtcccccgaacacgcacgttccccgtccccggccccgacgtcctcgcccctctcgcccgccgcctcgaggagctcgcgtccgcggcggccgcccacccgctcctgaagccgctcttcgccgcccactcccacctctcctccttctcccaggaggcgtctggtggcggcgcggcgtgccacggtgctgtcgtccggggagctctgcttcgcggcggtgctcggggactcggtggccgggacggtggtggccagcggcatcaataacttcctcaacctttacaacacggtgctcgtcgtcaggctcgtgctcacctggttccccaacacgccgcccgccatcgtcgcgcctctcagcacgatactcgctttcctcgtcctcaacgccttcaccagcacggccgccgcgcttcccgcggagctgccaagctgctcggcaacggcgcagcatcaccagaggactgctgtctcaccctgctcggcgccgcatgaggcgacgctcagccagaggaaatggatgcggagaatgcggtcacagaagccacagggagacgatggtgatcactag

SEQ ID NO: 221526 - DNA, 1838 bp, Zea Mays
atatcggtcagtttgccatcagaacaaggagaaaaaaaggttccggtcttcatcccttccatttccaaaggacgacgctctcaccattcacgaacggcgactgcggatcgatcgtgcgtcgtctcctgcgccggcctctcttcaagtcaggttacacacaagcttcaaattatcgcaaaattcctcttacatatctacatctcataccggaccaggtctcataccggaccagtttgcttggacttattacgaaacttcttttactcagctggagcttccatcaaaacatatgttcttggtgtcataactgaaattcatgaactgacacctgtgcatgtccgaagtcaactaacaccaacagtgacaaggaccattatcatagaagatctcagcgacaaaacaatgaagatcactttatgggcagattaggcgataatgttcaatcttcatgacgtgtacgatgcaaatacaaataaaccgattcttgtgctattcgtcgggtgcttaccaaaatttttcaaaggtgtctacctaagtggtggtcctgcctgtagatggtacttcaatccaacaattccagaggcagaaccttatcttaccagccagtctacaaaaagaattgtgttacagcttccccaaaatttacaacatcctccagcgatggaaacgaagccaattgtcgaacataaatccctctatgaacttcttacagttaacccatatgatttcccggaaacaggatttgaatgtactatcacaatagcagaaataccagctgaacacaaatggtggtttccatcttgcacaaaatgcaataaagcaacaatccctcacactacaggttatcactgtgaatcatgcaattgggatggatacaaatttaaatacaagctcaaattcctggcatctgatgaaacagatattgcagaaatgttttgttttgacactgtagcaaggcacatcgttggtaaatcctttgcccaaacgtgttccgcattaattctattgttgctgcacatgggagacaacgttctttaccaatgcaaataggaatttctgatcaacaaggaccatcaacacctcaaaacaaatcaaaaccgatgttattggaagactctccatctacaactttggaaaaattatctactacaactcctacaactgtagtaaggaagcttctatattccgaaactgacaacacgccgaaaacgcactcaatttcttttactcaattatcttttattcattttaagatttagtgagtattgacagttaaaaatacttatatttgttccatgttgacagtgcaaacaagagtaatatcaatagcccagaaaaagatgatggcgataaggaaaccgcacagcttgatacaatacccactaacaaaggaaaaggaccagcagatacaattgaatcgccacctaaaaggttcaaacaagggacgatacgcatcggaaaagaaatggacatcaaatcctccgagaactaaagtttcactcagatcttcgtcgaccttttgagttgcacaatgtctattttgcaacatatgtataattatatatgatgacctactcagctctttgaaaacaatttatgtaaatataacagcctaattctacgtagtggacaaaaatgttgactctgattacagctaaggtaactctatttcatataaacatataacatctgcagtaatcaaattagaaaaaatttctaacgcgcgcagggcacgcgccagtgactagtgtataagtattccctctattctaaatttaagttattttggctctctagatacaaaactcttatcggacatttaggtatacatctaggta

SEQ ID NO: 221527 - DNA, 2210 bp, Zea Mays
atatcggtcagtttgccatcagaacaaggagaaaaaaaggttccggtcttcatcccttccatttccaaaggacgacgctctcaccattcacgaacggcgactgcggatcgatcgtgcgtcgtctcctgcgccggcctctcttcaagtcagccaagggtcgttttcctcgcttcactgagtctctcacaaacactaatcgaaatttgatttattaacacacatggcgtcattttcaagttcccaagcagcccacagattctattgattgtgggtgtctttcagcatctgagggtttctaccagtccaggttacacacaagcttcaaattatcgcaaaattcctcttacatatctacatctcataccggaccaggtctcataccggaccagaaaaatggaatacactttattacctgatttagcaccgcataagatacatgcaaagattcaagtacatgtatctagaaagtggcttttccgaggtgctactgatagtggaccactacaacatgttgatatggttttgtctgatcgagagatgttcttggtgtcataactgaaattcatgaactgacacctgtgcatgtccgaagtcaactaacaccaacagtgacaaggaccattatcatagaagatctcagcgacaaaacaatgaagatcactttatgggcagattaggcgataatgttcaatcttcatgacgtgtacgatgcaaatacaaataaaccgattcttgtgctattcgtcgggtgcttaccaaaatttttcaaaggtgtctacctaagtggtggtcctgcctgtagatggtacttcaatccaacaattccagaggcagaaccttatcttaccagccagtctacaaaaagaattgtgttacagcttccccaaaatttacaacatcctccagcgatggaaacgaagccaattgtcgaacataaatccctctatgaacttcttacagttaacccatatgatttcccggaaacaggatttgaatgtactatcacaatagcagaaataccagctgaacacaaatggtggtttccatcttgcacaaaatgcaataaagcaacaatccctcacactacaggttatcactgtgaatcatgcaattgggatggatacaaatttaaatacaagctcaaattcctggcatctgatgaaacagatattgcagaaatgttttgttttgacactgtagcaaggcacatcgttggtaaatcctgtgagattgttttacgaagtgtcactgaacagtctcctatcccacctgatctagcacaaatcatatctctgaaatttacattcagagtcacaattgacaatcaatctcttttccaacaaaccagttgcccaaacgtgttccgcattaattctattgttgctgcacatgggagacaacgttctttaccaatgcaaataggaatttctgatcaacaaggaccatcaacacctcaaaacaaatcaaaaccgatgttattggaagactctccatctacaactttggaaaaattatctactacaactcctacaactgtagtaaggaagcttctatattccgaaactgacaacacgccgaaaacgcactcaatttcttttactcaattatcttttattcattttaagatttagtgagtattgacagttaaaaatacttatatttgttccatgttgacagtgcaaacaagagtaatatcaatagcccagaaaaagatgatggcgataaggaaaccgcacagcttgatacaatacccactaacaaaggaaaaggaccagcagatacaattgaatcgccacctaaaaggttcaaacaagggacgatacgcatcggaaaagaaatggacatcaaatcctccgagaactaaagtttcactcagatcttcgtcgaccttttgagttgcacaatgtctattttgcaacatatgtataattatatatgatgacctactcagctctttgaaaacaatttatgtaaatataacagcctaattctacgtagtggacaaaaatgttgactctgattacagctaaggtaactctatttcatataaacatataacatctgcagtaatcaaattagaaaaaatttctaacgcgcgcagggcacgcgccagtgactagtgtataagtattccctctattctaaatttaagttattttggctctctagatacaaaactcttatcggacatttaggtatacatctaggta

SEQ ID NO: 221528 - DNA, 2508 bp, Zea Mays
atatcggtcagtttgccatcagaacaaggagaaaaaaaggttccggtcttcatcccttccatttccaaaggacgacgctctcaccattcacgaacggcgactgcggatcgatcgtgcgtcgtctcctgcgccggcctctcttcaagtcagccaagggtcgttttcctcgcttcactgagtctctcacaaacactaatcgaaatttgatttattaacacacatggcgtcattttcaagttcccaagcagcccacagattctattgattgtgggtgtctttcagcatctgagggtttctaccagtccaggtatgctattttgagcaagtaataatgtatgataaaaaagcaatttaatctgatatacggataatattttttactatagttccttaatatatatatatacacacacaaacacagaaaaaaatcaggctgtttattcatagccattacagtttgcgcatagtctatacgtagacaccaatgccactttctaagcacaacaaattttaatttgttcgtttatgaacactacaggttacacacaagcttcaaattatcgcaaaattcctcttacatatctacatctcataccggaccaggtctcataccggaccagtttgcttggacttattacgaaacttcttttactcagctggagcttccatcaaaacataaaaatggaatacactttattacctgatttagcaccgcataagatacatgcaaagattcaagtacatgtatctagaaagtggcttttccgaggtgctactgatagtggaccactacaacatgttgatatggttttgtctgatcgagagggtaatgctatttatgctgaaatccctggaaatttagctgaacaaaaagcaacaaatattgaagaaggaggagtttatgatatcaacagattcagagtgtgcgcagcaaaaactgttttcaaaatagtggatggggacaaaatgatccaattcacatttcataccatagtaaaatgtgccacaagccctccaacaacatttccattatatgtttatcggctaacatcatttgatctaattgagcctcatgttcaaactacaaataactttgttggtgtctacctaagtggtggtcctgcctgtagatggtacttcaatccaacaattccagaggcagaaccttatcttaccagccagtctacaaaaagaattgtgttacagcttccccaaaatttacaacatcctccagcgatggaaacgaagccaattgtcgaacataaatccctctatgaacttcttacagttaacccatatgatttcccggaaacaggatttgaatgtactatcacaatagcagaaataccagctgaacacaaatggtggtttccatcttgcacaaaatgcaataaagcaacaatccctcacactacaggttatcactgtgaatcatgcaattgggatggatacaaatttaaatacaagctcaaattcctggcatctgatgaaacagatattgcagaaatgttttgttttgacactgtagcaaggcacatcgttggtaaatcctgtgagattgttttacgaagtgtcactgaacagtctcctatcccacctgatctagcacaaatcatatctctgaaatttacattcagagtcacaattgacaatcaatctcttttccaacaaaccagttgcccaaacgtgttccgcattaattctattgttgctgcacatgggagacaacgttctttaccaatgcaaataggaatttctgatcaacaaggaccatcaacacctcaaaacaaatcaaaaccgatgttattggaagactctccatctacaactttggaaaaattatctactacaactcctacaactgtagtaaggaagcttctatattccgaaactgacaacacgccgaaaacgcactcaatttcttttactcaattatcttttattcattttaagatttatgcaaacaagagtaatatcaatagcccagaaaaagatgatggcgataaggaaaccgcacagaacttcgatatatgcagcttgatacaatacccactaacaaaggaaaaggaccagcagatacaattgaatcgccacctaaaaggttcaaacaagggacgatacgcatcggaaaagaaatggacatcaaatcctccgagaactaaagtttcactcagatcttcgtcgaccttttgagttgcacaatgtctattttgcaacatatgtataattatatatgatgacctactcagctctttgaaaacaatttatgtaaatataacagcctaattctacgtagtggacaaaaatgttgactctgattacagctaaggtaactctatttcatataaacatataacatctgcagtaatcaaattagaaaaaatttctaacgcgcgcagggcacgcgccagtgactagtgtataagtattccctctattctaaatttaagttattttggctctctagatacaaaactcttatcggacatttaggtatacatctaggta

SEQ ID NO: 221529 - DNA, 2369 bp, Zea Mays
agtcaaccggatacttccaggtccttggactccttgcatatcggtcagtttgccatcagaacaaggagaaaaaaaggttccggtcttcatcccttccatttccaaaggacgacgctctcaccattcacgaacggcgactgcggatcgatcgtgcgtcgtctcctgcgccggcctctcttcaagtcagtaacgactataatctgattgtgaccactctccatgagttgcttcacccaaaacagccaagggtcgttttcctcgcttcactgagtctctcacaaacactaatcgaaatttgatttattaacacacatggcgtcattttcaagttcccaagcagcccacagattctattgattgtgggtgtctttcagcatctgagggtttctaccagtccaggttacacacaagcttcaaattatcgcaaaattcctcttacatatctacatctcataccggaccaggtctcataccggaccagtttgcttggacttattacgaaacttcttttactcagctggagcttccatcaaaacataaaaatggaatacactttattacctgatttagcaccgcataagatacatgcaaagattcaagtacatgtatctagaaagtggcttttccgaggtgctactgatagtggaccactacaacatgttgatatggttttgtctgatcgagagggtaatgctatttatgctgaaatccctggaaatttagctgaacaaaaagcaacaaatattgaagaaggaggagtttatgatatcaacagattcagagtgtgcgcagcaaaaactgttttcaaaatagtggatggggacaaaatgatccaattcacatttcataccatagtaaaatgtgccacaagccctccaacaacatttccattatatgtttatcggctaacatcatttgatctaattgagcctcatgttcaaactacaaataactttgttggtgtctacctaagtggtggtcctgcctgtagatggtacttcaatccaacaattccagaggcagaaccttatcttaccagccagtctacaaaaagaattgtgttacagcttccccaaaatttacaacatcctccagcgatggaaacgaagccaattgtcgaacataaatccctctatgaacttcttacagttaacccatatgatttcccggaaacaggatttgaatgtactatcacaatagcagaaataccagctgaacacaaatggtggtttccatcttgcacaaaatgcaataaagcaacaatccctcacactacaggttatcactgtgaatcatgcaattgggatggatacaaatttaaatacaagctcaaattcctggcatctgatgaaacagatattgcagaaatgttttgttttgacactgtagcaaggcacatcgttggtaaatcctgtgagattgttttacgaagtgtcactgaacagtctcctatcccacctgatctagcacaaatcatatctctgaaatttacattcagagtcacaattgacaatcaatctcttttccaacaaaccagttgcccaaacgtgttccgcattaattctattgttgctgcacatgggagacaacgttctttaccaatgcaaataggaatttctgatcaacaaggaccatcaacacctcaaaacaaatcaaaaccgatgttattggaagactctccatctacaactttggaaaaattatctactacaactcctacaactgtagtaaggaagcttctatattccgaaactgacaacacgccgaaaacgcactcaatttcttttactcaattatcttttattcattttaagatttatgcaaacaagagtaatatcaatagcccagaaaaagatgatggcgataaggaaaccgcacagaacttcgatatatgcagcttgatacaatacccactaacaaaggaaaaggaccagcagatacaattgaatcgccacctaaaaggttcaaacaagggacgatacgcatcggaaaagaaatggacatcaaatcctccgagaactaaagtttcactcagatcttcgtcgaccttttgagttgcacaatgtctattttgcaacatatgtataattatatatgatgacctactcagctctttgaaaacaatttatgtaaatataacagcctaattctacgtagtggacaaaaatgttgactctgattacagctaaggtaactctatttcatataaacatataacatctgcagtaatcaaattagaaaaaatttctaacgcgcgcagggcacgcgccagtgactagtgtataagtattccctctattctaaatttaagttattttggctctctagatacaaaactcttatcggacatttaggtatacatctaggta

SEQ ID NO: 221530 - DNA, 1646 bp, Zea Mays
cctacctcgccagtaatggcgggaactccccagtttcagtccccgcacttcccgcctccctctccccctctcggtcccaccttcgtccctccggcgatgaactcaggcggacgcggcggcaagcggcggggtcccccgcccctcgctccctccggtgcggcggcgaagagggtcaatcccagccccggcacgccgcatgtgcctcctcccgcgtcggcggcggccgccgtggaggaggacatgatggacgaggacgtgttcctggatgagtccatcctggcggaggacgaggcggcgctgctgatgctccagcgcgacgaggcactcgcgtcccgcctcgcgcggtggaagcgccccgcaatacccaccgacctcgccgccggatgctcccgcactgtcgcttttcagcagttggaaatagattatgttattggtgagagccacaaagaattactccccagctcatctggttcagcagccatactcaggatttttggtgtcaccagagaaggccacagcttatgctgtcaggtgcatggatttgagccatatttctatattggctgtccttcagggatgggtcctgatgatatatcacgctttcatcaaacactagaggggaggatgaaggagtcaaatagaagcagcaatgttccaaggttcgtgaagagagttgagcttgtgcagaagcagacaattatgcattaccaaacacaacaatctcaacctttcctcaagatagtagtcgctctgcctaccatggttgctagctgtcgtggtatcctggaaaggggcataacaattgaaggccttggttcaaagagttttctgacatatgaaagcaacattctttttgcccttcgtttcatgattgattgcaatattgttggtggcaactggattgagcttcctgctgggaaatacaggaaagcagcctgtatcatgtcctattgtcagctagagctagattgcttatactcagatctggtaagccatgcggctgaaggagaatattctaagatggccccgtttcgcatattaagttttgatattgaatgtgctggtcgcaaaggtcatttcccagaaccaactcatgatcctgttattcagatagctaatttggttacacatcaaggagaagaccaaccttttgtacggaatgtcatgactcttaaatcctgctctcccattgtgggagtcgaggttatgtcatttgatgcagagagagatattctacttgcatggagggatttcatacgtgaagtggatcctgatatcataattggatacaacatttgcaaatttgacatgccctatcttattgagagggctgaggttctcaagatagcggagtttccaatacttggccgaatcagaaatagtcgtgttcgtgtccgtgatacgaccttttcctcgaggcaatatggtgtgcgtgaaagtaaggatgttactattgaaggaagagtgcaatttgatctcctgcaggctatgcaacgggattacaagttgagttcttattcattaaactctgtatcagcacactttcttggggagcaaggggcagccaaggagagccctttggctccaacaatttcctagcttcttcttttctcatctgcatgctccataatcaggaaggctggggg

SEQ ID NO: 221531 - DNA, 539 bp, Zea Mays
atccacagagcctcctccatcagagtggatttataccatgtagggtcgagcctcacctgcgcttagcctgaggaggggagtggctccgggactgggagggcgacgacgagaaggagcaggagcgcggccgggagcgggacgagatggagccgaaggagatggagtgggacggcgagcaagatgaagatcctgagaaggaacgatgtagggtttacagagtcttactctgacaacagagttctatcattgccgaagctcttgttgatggcatcacaaccccatgcataataacggaagcaattgcaggcgaggaacccaacaaggtaatgacagtaaaaatatttaagtcatgggattttgttgtgttaagtcatgatgaatagtattaggtggtacatatacataatatgatttgtttagagatagagttctcaaagatagagttttgaaacctatacagaatagcattttgatgaatctgccatgtgaggagtgctttgatgccgtaacattcataaaatttacatcaacacattatg

SEQ ID NO: 221532 - DNA, 2635 bp, Zea Mays
ctgatggaagagagaggggagaggatgatacagcatttgagaagcaaagtgcattgtttgctttggccgtttcggacattgtgttgattaatatgtggtgtcatgacattggcagagaacaggctgcaaacaagcctcttttgaagactgttttccaggcaacatttgaggtcatgatgaggttgttcagtcctcgcaaaacaacattgttgtttgttatacgtgacaaatcaaggacacccctagaaaatcttgagccaattctaagggaagacattcagaagatatgggatgctgttccgaaaccccatgcccataaagaaactccaattagtgaatttttcgatgttcaagttgtcgcactgtcgagttatgaagaaaaagaagagttattcaaacagcaggtttctgatttaagagataggtttcagcattcaattgcccctggtggacttgctggggatcgtcgtggtgttgtcccagcttcaggtttctcatttagttcccagcaattttggaaagtcatcaaggagaacaaagatcttgatttgcctgctcataaagttatggtggctactgtacgttgtgaggaaattggtaatgagaaagttaccagctttatagctgatgaggaatggcaacaatttgaggaggctgtccaacatgactttgttactgggtttgggaagaagctcagcagccttctggatagatgtttatcaggtatgacatggaggctatttattttgatgaaggtgtcagaagctcgaaaagacaacaacttgagtctaaactgttacagcttgtcaatcctgcctatcaatctcttctaggtcacttacacactagaactttagaagcatttaaggagtactttggcaaggccctagaaaaggagggatttgctgttgcagcttgcaattgtactgaaactttcttggagaagtttgatagaggatctgaagatgctgctattcaacaagtgaattgggacacctcaaaagtgagggataagcttagacgtgacattgaggctcatgtagcttcagttcgggctgctaaattgtctgaactttgtgcgaaatatgaggcacaacttaccaaagctctggtggaaccagttgaatctcttctagattcagccagtgaagacacgtggccagctattagaaagcttcttcaacgcgagacaaaaactgctgttttaggtcttgaatctgctgtgtcagcttttgaactcgatgaagcaactgagaaagaactgcttgcgaagctggagaagcatggaaggagtgttgttgagtcaaaggcaaaagaagaagctggaagggttttgattcgcatgaaggacaggttctcaacattgttcagccgagatgctgactctatgcccagggtgtggacaggaaaggaggacataaaagctataactaaaaccgctcgctcagcttctgtgaagttgctttctacaatggctgcaattcggttggaggaggatggtgataacattgagaacactctttcccttgctcttgttgacacttcaagacatgggactacagataggagtatccaattgtccgatccactagcctccagctcatgggaaagggttgctgaggagaagactttaattacccctgtgcagtgcaaaaatttgtggaggcaattcaaagctgaaactgaatatacagtcactcaagccatagctgctcaggaagcaaataagaggaacaacaactggctcccacctccatgggcacttgctgcaatggctatccttggattcaacgagtttatgacattactgaggaatccgctttacctgtttgccatatttgtgatttatcttgttggaaaagccctttgggtgcaatcagaaattggcagggaattccaacatggatttcttcctgccatcctttcactgtcgacgaaatttgttcccactgtaatgaacatcctgaagagattagctgacgcgggtcaagaacctgcagcagcccccgagaggcaaagagagatggagctccaaccaaaatccaccaggaacggttccttatacagcaatgtgacatcggcagggtcatctagcgtaaccacttcggagattggacctgaatattcaagcccggttgtgcaatgattttgctgatctttagctttttggctggaaacatactctagcagttgagaaaaacagggtgcctcaagaacgtacgaagattttggtgccttgcagtttttgtaagcttgcccttcccagactgattcaaggtggcactgcccctcgttgttattcaaggaattttggggctggcggggttgtttgtaagagcattgtaaaataacttgtttcattttttggtttctgtaacatgaatacatgacatgtgatagttgtatataagatctgtggactgggggcgtatcagcgcattctacacagctaagggttgcatagttgcgagaactgaagcatgtaaatgtctttaaactgccatctgattgagatgcagtagtactgctgttctggaataagacatgtctgcttttggggaaaatgattcaaaaaatgtttcgtttgaactcagcgtctgctgaaaatgaatttggttcccgacccctgttctgg

SEQ ID NO: 221533 - DNA, 2641 bp, Zea Mays
tggaaggaactgatggaagagagaggggagaggatgatacagcatttgagaagcaaagtgcattgtttgctttggccgtttcggacattgtgttgattaatatgtggtgtcatgacattggcagagaacaggctgcaaacaagcctcttttgaagactgttttccaggcaacatttgaggtcatgatgaggttgttcagtcctcgcaaaacaacattgttgtttgttatacgtgacaaatcaaggacacccctagaaaatcttgagccaattctaagggaagacattcagaagatatgggatgctgttccgaaaccccatgcccataaagaaactccaattagtgaatttttcgatgttcaagttgtcgcactgtcgagttatgaagaaaaagaagagttattcaaacagcaggtttctgatttaagagataggtttcagcattcaattgcccctggtggacttgctggggatcgtcgtggtgttgtcccagcttcaggtttctcatttagttcccagcaattttggaaagtcatcaaggagaacaaagatcttgatttgcctgctcataaagttatggtggctactgtacgttgtgaggaaattggtaatgagaaagttaccagctttatagctgatgaggaatggcaacaatttgaggaggctgtccaacatgactttgttactgggtttgggaagaagctcagcagccttctggatagatgtttatcagagtatgacatggaggctatttattttgatgaaggtgtcagaagctcgaaaagacaacaacttgagtctaaactgttacagcttgtcaatcctgcctatcaatctcttctaggtcacttacacactagaactttagaagcatttaaggagtactttggcaaggccctagaaaaggagggatttgctgttgcagcttgcaattgtactgaaactttcttggagaagtttgatagaggatctgaagatgctgctattcaacaagtgaattgggacacctcaaaagtgagggataagcttagacgtgacattgaggctcatgtagcttcagttcgggctgctaaattgtctgaactttgtgcgaaatatgaggcacaacttaccaaagctctggtggaaccagttgaatctcttctagattcagccagtgaagacacgtggccagctattagaaagcttcttcaacgcgagacaaaaactgctgttttaggtcttgaatctgctgtgtcagcttttgaactcgatgaagcaactgagaaagaactgcttgcgaagctggagaagcatggaaggagtgttgttgagtcaaaggcaaaagaagaagctggaagggttttgattcgcatgaaggacaggttctcaacattgttcagccgagatgctgactctatgcccagggtgtggacaggaaaggaggacataaaagctataactaaaaccgctcgctcagcttctgtgaagttgctttctacaatggctgcaattcggttggaggaggatggtgataacattgagaacactctttcccttgctcttgttgacacttcaagacatgggactacagataggagtatccaattgtccgatccactagcctccagctcatgggaaagggttgctgaggagaagactttaattacccctgtgcagtgcaaaaatttgtggaggcaattcaaagctgaaactgaatatacagtcactcaagccatagctgctcagcaaataagaggaacaacaactggctcccacctccatgggcacttgctgcaatggctatccttggattcaacgagtttatgacattactgaggaatccgctttacctgtttgccatatttgtgatttatcttgttggaaaagccctttgggtgcaatcagaaattggcagggaattccaacatggatttcttcctgccatcctttcactgtcgacgaaatttgttcccactgtaatgaacatcctgaagagattagctgacgcgggtcaagaacctgcagcagcccccgagaggcaaagagagatggagctccaaccaaaatccaccaggaacggttccttatacagcaatgtgacatcggcagggtcatctagcgtaaccacttcggagattggacctgaatattcaagcccggttgtgcaatgattttgctgatctttagctttttggctggaaacatactctagcagttgagaaaaacagggtgcctcaagaacgtacgaagattttggtgccttgcagtttttgtaagcttgcccttcccagactgattcaaggtggcactgcccctcgttgttattcaaggaattttggggctggcggggttgtttgtaagagcattgtaaaataacttgtttcattttttggtttctgtaacatgaatacatgacatgtgatagttgtatataagatctgtggactgggggcgtatcagcgcattctacacagctaagggttgcatagttgcgagaactgaagcatgtaaatgtctttaaactgccatctgattgagatgcagtagtactgctgttctggaataagacatgtctgcttttggggaaaatgattcaaaaaatgtttcgtttgaactcagcgtctgctgaaaatgaatttggttcccgacccctgttctgg

SEQ ID NO: 221534 - DNA, 2615 bp, Zea Mays
ttggaaggaactgatggaagagagaggggagaggatgatacagcatttgagaagcaaagtgcattgtttgctttggccgtttcggacattgtgttgattaatatgtggtgtcatgacattggcagagaacaggctgcaaacaagcctcttttgaagactgttttccaggcaacatttgaggtcatgatgaggttgttcagtcctcgcaaaacaacattgttgtttgttatacgtgacaaatcaaggacacccctagaaaatcttgagccaattctaagggaagacattcagaagatatgggatgctgttccgaaaccccatgcccataaagaaactccaattagtgaatttttcgatgttcaagttgtcgcactgtcgagttatgaagaaaaagaagagttattcaaacagcaggtttctgatttaagagataggtttcagcattcaattgcccctggtggacttgctggggatcgtcgtggtgttgtcccagcttcaggtttctcatttagttcccagcaattttggaaagtcatcaaggagaacaaagatcttgatttgcctgctcataaagttatggtggctactgtacgttgtgaggaaattggtaatgagaaagttaccagctttatagctgatgaggaatggcaacaatttgaggaggctgtccaacatgactttgttactgggtttgggaagaagctcagcagccttctggatagatgtttatcagagtatgacatggaggctatttattttgatgaaggtgtcagaagctcgaaaagacaacaacttgagtctaaactgttacaggtcacttacacactagaactttagaagcatttaaggagtactttggcaaggccctagaaaaggagggatttgctgttgcagcttgcaattgtactgaaactttcttggagaagtttgatagaggatctgaagatgctgctattcaacaagtgaattgggacacctcaaaagtgagggataagcttagacgtgacattgaggctcatgtagcttcagttcgggctgctaaattgtctgaactttgtgcgaaatatgaggcacaacttaccaaagctctggtggaaccagttgaatctcttctagattcagccagtgaagacacgtggccagctattagaaagcttcttcaacgcgagacaaaaactgctgttttaggtcttgaatctgctgtgtcagcttttgaactcgatgaagcaactgagaaagaactgcttgcgaagctggagaagcatggaaggagtgttgttgagtcaaaggcaaaagaagaagctggaagggttttgattcgcatgaaggacaggttctcaacattgttcagccgagatgctgactctatgcccagggtgtggacaggaaaggaggacataaaagctataactaaaaccgctcgctcagcttctgtgaagttgctttctacaatggctgcaattcggttggaggaggatggtgataacattgagaacactctttcccttgctcttgttgacacttcaagacatgggactacagataggagtatccaattgtccgatccactagcctccagctcatgggaaagggttgctgaggagaagactttaattacccctgtgcagtgcaaaaatttgtggaggcaattcaaagctgaaactgaatatacagtcactcaagccatagctgctcaggaagcaaataagaggaacaacaactggctcccacctccatgggcacttgctgcaatggctatccttggattcaacgagtttatgacattactgaggaatccgctttacctgtttgccatatttgtgatttatcttgttggaaaagccctttgggtgcaatcagaaattggcagggaattccaacatggatttcttcctgccatcctttcactgtcgacgaaatttgttcccactgtaatgaacatcctgaagagattagctgacgcgggtcaagaacctgcagcagcccccgagaggcaaagagagatggagctccaaccaaaatccaccaggaacggttccttatacagcaatgtgacatcggcagggtcatctagcgtaaccacttcggagattggacctgaatattcaagcccggttgtgcaatgattttgctgatctttagctttttggctggaaacatactctagcagttgagaaaaacagggtgcctcaagaacgtacgaagattttggtgccttgcagtttttgtaagcttgcccttcccagactgattcaaggtggcactgcccctcgttgttattcaaggaattttggggctggcggggttgtttgtaagagcattgtaaaataacttgtttcattttttggtttctgtaacatgaatacatgacatgtgatagttgtatataagatctgtggactgggggcgtatcagcgcattctacacagctaagggttgcatagttgcgagaactgaagcatgtaaatgtctttaaactgccatctgattgagatgcagtagtactgctgttctggaataagacatgtctgcttttggggaaaatgattcaaaaaatgtttcgtttgaactcagcgtctgctgaaaatgaatttggttcccgacccctgttctgg

SEQ ID NO: 221535 - DNA, 2683 bp, Zea Mays
gtatatggctagcgaaggcccagaatattgaaccgtgcacccttgtaatggatttggaaggaactgatggaagagagaggggagaggatgatacagcatttgagaagcaaagtgcattgtttgctttggccgtttcggacattgtgttgattaatatgtggtgtcatgacattggcagagaacaggctgcaaacaagcctcttttgaagactgttttccaggtcatgatgaggttgttcagtcctcgcaaaacaacattgttgtttgttatacgtgacaaatcaaggacacccctagaaaatcttgagccaattctaagggaagacattcagaagatatgggatgctgttccgaaaccccatgcccataaagaaactccaattagtgaatttttcgatgttcaagttgtcgcactgtcgagttatgaagaaaaagaagagttattcaaacagcaggtttctgatttaagagataggtttcagcattcaattgcccctggtggacttgctggggatcgtcgtggtgttgtcccagcttcaggtttctcatttagttcccagcaattttggaaagtcatcaaggagaacaaagatcttgatttgcctgctcataaagttatggtggctactgtacgttgtgaggaaattggtaatgagaaagttaccagctttatagctgatgaggaatggcaacaatttgaggaggctgtccaacatgactttgttactgggtttgggaagaagctcagcagccttctggatagatgtttatcagagtatgacatggaggctatttattttgatgaaggtgtcagaagctcgaaaagacaacaacttgagtctaaactgttacagcttgtcaatcctgcctatcaatctcttctaggtcacttacacactagaactttagaagcatttaaggagtactttggcaaggccctagaaaaggagggatttgctgttgcagcttgcaattgtactgaaactttcttggagaagtttgatagaggatctgaagatgctgctattcaacaagtgaattgggacacctcaaaagtgagggataagcttagacgtgacattgaggctcatgtagcttcagttcgggctgctaaattgtctgaactttgtgcgaaatatgaggcacaacttaccaaagctctggtggaaccagttgaatctcttctagattcagccagtgaagacacgtggccagctattagaaagcttcttcaacgcgagacaaaaactgctgttttaggtcttgaatctgctgtgtcagcttttgaactcgatgaagcaactgagaaagaactgcttgcgaagctggagaagcatggaaggagtgttgttgagtcaaaggcaaaagaagaagctggaagggttttgattcgcatgaaggacaggttctcaacattgttcagccgagatgctgactctatgcccagggtgtggacaggaaaggaggacataaaagctataactaaaaccgctcgctcagcttctgtgaagttgctttctacaatggctgcaattcggttggaggaggatggtgataacattgagaacactctttcccttgctcttgttgacacttcaagacatgggactacagataggagtatccaattgtccgatccactagcctccagctcatgggaaagggttgctgaggagaagactttaattacccctgtgcagtgcaaaaatttgtggaggcaattcaaagctgaaactgaatatacagtcactcaagccatagctgctcagcaaataagaggaacaacaactggctcccacctccatgggcacttgctgcaatggctatccttggattcaacgagtttatgacattactgaggaatccgctttacctgtttgccatatttgtgatttatcttgttggaaaagccctttgggtgcaatcagaaattggcagggaattccaacatggatttcttcctgccatcctttcactgtcgacgaaatttgttcccactgtaatgaacatcctgaagagattagctgacgcgggtcaagaacctgcagcagcccccgagaggcaaagagagatggagctccaaccaaaatccaccaggaacggttccttatacagcaatgtgacatcggcagggtcatctagcgtaaccacttcggagattggacctgaatattcaagcccggttgtgcaatgattttgctgatctttagctttttggctggaaacatactctagcagttgagaaaaacagggtgcctcaagaacgtacgaagattttggtgccttgcagtttttgtaagcttgcccttcccagactgattcaaggtggcactgcccctcgttgttattcaaggaattttggggctggcggggttgtttgtaagagcattgtaaaataacttgtttcattttttggtttctgtaacatgaatacatgacatgtgatagttgtatataagatctgtggactgggggcgtatcagcgcattctacacagctaagggttgcatagttgcgagaactgaagcatgtaaatgtctttaaactgccatctgattgagatgcagtagtactgctgttctggaataagacatgtctgcttttggggaaaatgattcaaaaaatgtttcgtttgaactcagcgtctgctgaaaatgaatttggttcccgacccctgttctgg

SEQ ID NO: 221536 - DNA, 2942 bp, Zea Mays
gccgacccccacaccggccgacgcgcgagccccggcaccatcttcacacgctaattgatggagatgggatcttcaacgtctccggattggagaacttcatgaaggatgtcagattgggtgaatgcgggctgtcctatgctgttgtatcaataatgggcccgcaaagtagtgggaaaagtacacttttgaatcatctttttggcaccaattttagggagatggatgccttcagaggaaggtcacagactaccaaaggtatatggctagcgaaggcccagaatattgaaccgtgcacccttgtaatggatttggaaggaactgatggaagagagaggggagaggatgatacagcatttgagaagcaaagtgcattgtttgctttggccgtttcggacattgtgttgattaatatgtggtgtcatgacattggcagagaacaggctgcaaacaagcctcttttgaagactgttttccaggtcatgatgaggttgttcagtcctcgcaaaacaacattgttgtttgttatacgtgacaaatcaaggacacccctagaaaatcttgagccaattctaagggaagacattcagaagatatgggatgctgttccgaaaccccatgcccataaagaaactccaattagtgaatttttcgatgttcaagttgtcgcactgtcgagttatgaagaaaaagaagagttattcaaacagcaggtttctgatttaagagataggtttcagcattcaattgcccctggtggacttgctggggatcgtcgtggtgttgtcccagcttcaggtttctcatttagttcccagcaattttggaaagtcatcaaggagaacaaagatcttgatttgcctgctcataaagttatggtggctactgtacgttgtgaggaaattggtaatgagaaagttaccagctttatagctgatgaggaatggcaacaatttgaggaggctgtccaacatgactttgttactgggtttgggaagaagctcagcagccttctggatagatgtttatcagagtatgacatggaggctatttattttgatgaaggtgtcagaagctcgaaaagacaacaacttgagtctaaactgttacagcttgtcaatcctgcctatcaatctcttctaggtcacttacacactagaactttagaagcatttaaggagtactttggcaaggccctagaaaaggagggatttgctgttgcagcttgcaattgtactgaaactttcttggagaagtttgatagaggatctgaagatgctgctattcaacaagtgaattgggacacctcaaaagtgagggataagcttagacgtgacattgaggctcatgtagcttcagttcgggctgctaaattgtctgaactttgtgcgaaatatgaggcacaacttaccaaagctctggtggaaccagttgaatctcttctagattcagccagtgaagacacgtggccagctattagaaagcttcttcaacgcgagacaaaaactgctgttttaggtcttgaatctgctgtgtcagcttttgaactcgatgaagcaactgagaaagaactgcttgcgaagctggagaagcatggaaggagtgttgttgagtcaaaggcaaaagaagaagctggaagggttttgattcgcatgaaggacaggttctcaacattgttcagccgagatgctgactctatgcccagggtgtggacaggaaaggaggacataaaagctataactaaaaccgctcgctcagcttctgtgaagttgctttctacaatggctgcaattcggttggaggaggatggtgataacattgagaacactctttcccttgctcttgttgacacttcaagacatgggactacagataggagtatccaattgtccgatccactagcctccagctcatgggaaagggttgctgaggagaagactttaattacccctgtgcagtgcaaaaatttgtggaggcaattcaaagctgaaactgaatatacagtcactcaagccatagctgctcaggaagcaaataagaggaacaacaactggctcccacctccatgggcacttgctgcaatggctatccttggattcaacgagtttatgacattactgaggaatccgctttacctgtttgccatatttgtgatttatcttgttggaaaagccctttgggtgcaatcagaaattggcagggaattccaacatggatttcttcctgccatcctttcactgtcgacgaaatttgttcccactgtaatgaacatcctgaagagattagctgacgcgggtcaagaacctgcagcagcccccgagaggcaaagagagatggagctccaaccaaaatccaccaggaacggttccttatacagcaatgtgacatcggcagggtcatctagcgtaaccacttcggagattggacctgaatattcaagcccggttgtgcaatgattttgctgatctttagctttttggctggaaacatactctagcagttgagaaaaacagggtgcctcaagaacgtacgaagattttggtgccttgcagtttttgtaagcttgcccttcccagactgattcaaggtggcactgcccctcgttgttattcaaggaattttggggctggcggggttgtttgtaagagcattgtaaaataacttgtttcattttttggtttctgtaacatgaatacatgacatgtgatagttgtatataagatctgtggactgggggcgtatcagcgcattctacacagctaagggttgcatagttgcgagaactgaagcatgtaaatgtctttaaactgccatctgattgagatgcagtagtactgctgttctggaataagacatgtctgcttttggggaaaatgattcaaaaaatgtttcgtttgaactcagcgtctgctgaaaatgaatttggttcccgacccctgttctgg

SEQ ID NO: 221537 - DNA, 2966 bp, Zea Mays
ctttcctctcccttcccccttcccccgcctccgccatcgccgacgccgacccccacaccggccgacgcgcgagccccggcaccatcttcacacgagcataaatgggtgatgcgtgtttctcaacacagctaattgatggagatgggatcttcaacgtctccggattggagaacttcatgaaggatgtcagattgggtgaatgcgggctgtcctatgctgttgtatcaataatgggcccgcaaagtagtgggaaaagtacacttttgaatcatctttttggcaccaattttagggagatggatgccttcagaggaaggtcacagactaccaaaggtatatggctagcgaaggcccagaatattgaaccgtgcacccttgtaatggatttggaaggaactgatggaagagagaggggagaggatgatacagcatttgagaagcaaagtgcattgtttgctttggccgtttcggacattgtgttgattaatatgtggtgtcatgacattggcagagaacaggctgcaaacaagcctcttttgaagactgttttccaggtcatgatgaggttgttcagtcctcgcaaaacaacattgttgtttgttatacgtgacaaatcaaggacacccctagaaaatcttgagccaattctaagggaagacattcagaagatatgggatgctgttccgaaaccccatgcccataaagaaactccaattagtgaatttttcgatgttcaagttgtcgcactgtcgagttatgaagaaaaagaagagttattcaaacagcaggtttctgatttaagagataggtttcagcattcaattgcccctggtggacttgctggggatcgtcgtggtgttgtcccagcttcaggtttctcatttagttcccagcaattttggaaagtcatcaaggagaacaaagatcttgatttgcctgctcataaagttatggtggctactgtacgttgtgaggaaattggtaatgagaaagttaccagctttatagctgatgaggaatggcaacaatttgaggaggctgtccaacatgactttgttactgggtttgggaagaagctcagcagccttctggatagatgtttatcagagtatgacatggaggctatttattttgatgaaggtgtcagaagctcgaaaagacaacaacttgagtctaaactgttacagcttgtcaatcctgcctatcaatctcttctaggtcacttacacactagaactttagaagcatttaaggagtactttggcaaggccctagaaaaggagggatttgctgttgcagcttgcaattgtactgaaactttcttggagaagtttgatagaggatctgaagatgctgctattcaacaagtgaattgggacacctcaaaagtgagggataagcttagacgtgacattgaggctcatgtagcttcagttcgggctgctaaattgtctgaactttgtgcgaaatatgaggcacaacttaccaaagctctggtggaaccagttgaatctcttctagattcagccagtgaagacacgtggccagctattagaaagcttcttcaacgcgagacaaaaactgctgttttaggtcttgaatctgctgtgtcagcttttgaactcgatgaagcaactgagaaagaactgcttgcgaagctggagaagcatggaaggagtgttgttgagtcaaaggcaaaagaagaagctggaagggttttgattcgcatgaaggacaggttctcaacattgttcagccgagatgctgactctatgcccaggtctgtgaagttgctttctacaatggctgcaattcggttggaggaggatggtgataacattgagaacactctttcccttgctcttgttgacacttcaagacatgggactacagataggagtatccaattgtccgatccactagcctccagctcatgggaaagggttgctgaggagaagactttaattacccctgtgcagtgcaaaaatttgtggaggcaattcaaagctgaaactgaatatacagtcactcaagccatagctgctcaggaagcaaataagaggaacaacaactggctcccacctccatgggcacttgctgcaatggctatccttggattcaacgagtttatgacattactgaggaatccgctttacctgtttgccatatttgtgatttatcttgttggaaaagccctttgggtgcaatcagaaattggcagggaattccaacatggatttcttcctgccatcctttcactgtcgacgaaatttgttcccactgtaatgaacatcctgaagagattagctgacgcgggtcaagaacctgcagcagcccccgagaggcaaagagagatggagctccaaccaaaatccaccaggaacggttccttatacagcaatgtgacatcggcagggtcatctagcgtaaccacttcggagattggacctgaatattcaagcccggttgtgcaatgattttgctgatctttagctttttggctggaaacatactctagcagttgagaaaaacagggtgcctcaagaacgtacgaagattttggtgccttgcagtttttgtaagcttgcccttcccagactgattcaaggtggcactgcccctcgttgttattcaaggaattttggggctggcggggttgtttgtaagagcattgtaaaataacttgtttcattttttggtttctgtaacatgaatacatgacatgtgatagttgtatataagatctgtggactgggggcgtatcagcgcattctacacagctaagggttgcatagttgcgagaactgaagcatgtaaatgtctttaaactgccatctgattgagatgcagtagtactgctgttctggaataagacatgtctgcttttggggaaaatgattcaaaaaatgtttcgtttgaactcagcgtctgctgaaaatgaatttggttcccgacccctgttctgg

SEQ ID NO: 221538 - DNA, 2830 bp, Zea Mays
ctccccggtctctccccctttcctctcccttcccccttcccccgcctccgccatcgccgacgccgacccccacaccggccgacgcgcgagccccggcaccatcttcacacgagcataaatgggtgatgcgtgtttctcaacacagctaattgatggagatgggatcttcaacgtctccggattggagaacttcatgaaggatgtcagattgggtgaatgcgggctgtcctatgctgttgtatcaataatgggcccgcaaagtagtggtcacagactaccaaaggatgatacagcatttgagaagcaaagtgcattgtttgctttggccgtttcggacattgtgttgattaatatgtggtgtcatgacattggcagagaacaggctgcaaacaagcctcttttgaagactgttttccaggtcatgatgaggttgttcagtcctcgcaaaacaacattgttgtttgttatacgtgacaaatcaaggacacccctagaaaatcttgagccaattctaagggaagacattcagaagatatgggatgctgttccgaaaccccatgcccataaagaaactccaattagtgaatttttcgatgttcaagttgtcgcactgtcgagttatgaagaaaaagaagagttattcaaacagcaggtttctgatttaagagataggtttcagcattcaattgcccctggtggacttgctggggatcgtcgtggtgttgtcccagcttcaggtttctcatttagttcccagcaattttggaaagtcatcaaggagaacaaagatcttgatttgcctgctcataaagttatggtggctactgtacgttgtgaggaaattggtaatgagaaagttaccagctttatagctgatgaggaatggcaacaatttgaggaggctgtccaacatgactttgttactgggtttgggaagaagctcagcagccttctggatagatgtttatcagagtatgacatggaggctatttattttgatgaaggtgtcagaagctcgaaaagacaacaacttgagtctaaactgttacagcttgtcaatcctgcctatcaatctcttctaggtcacttacacactagaactttagaagcatttaaggagtactttggcaaggccctagaaaaggagggatttgctgttgcagcttgcaattgtactgaaactttcttggagaagtttgatagaggatctgaagatgctgctattcaacaagtgaattgggacacctcaaaagtgagggataagcttagacgtgacattgaggctcatgtagcttcagttcgggctgctaaattgtctgaactttgtgcgaaatatgaggcacaacttaccaaagctctggtggaaccagttgaatctcttctagattcagccagtgaagacacgtggccagctattagaaagcttcttcaacgcgagacaaaaactgctgttttaggtcttgaatctgctgtgtcagcttttgaactcgatgaagcaactgagaaagaactgcttgcgaagctggagaagcatggaaggagtgttgttgagtcaaaggcaaaagaagaagctggaagggttttgattcgcatgaaggacaggttctcaacattgttcagccgagatgctgactctatgcccaggtctgtgaagttgctttctacaatggctgcaattcggttggaggaggatggtgataacattgagaacactctttcccttgctcttgttgacacttcaagacatgggactacagataggagtatccaattgtccgatccactagcctccagctcatgggaaagggttgctgaggagaagactttaattacccctgtgcagtgcaaaaatttgtggaggcaattcaaagctgaaactgaatatacagtcactcaagccatagctgctcaggaagcaaataagaggaacaacaactggctcccacctccatgggcacttgctgcaatggctatccttggattcaacgagtttatgacattactgaggaatccgctttacctgtttgccatatttgtgatttatcttgttggaaaagccctttgggtgcaatcagaaattggcagggaattccaacatggatttcttcctgccatcctttcactgtcgacgaaatttgttcccactgtaatgaacatcctgaagagattagctgacgcgggtcaagaacctgcagcagcccccgagaggcaaagagagatggagctccaaccaaaatccaccaggaacggttccttatacagcaatgtgacatcggcagggtcatctagcgtaaccacttcggagattggacctgaatattcaagcccggttgtgcaatgattttgctgatctttagctttttggctggaaacatactctagcagttgagaaaaacagggtgcctcaagaacgtacgaagattttggtgccttgcagtttttgtaagcttgcccttcccagactgattcaaggtggcactgcccctcgttgttattcaaggaattttggggctggcggggttgtttgtaagagcattgtaaaataacttgtttcattttttggtttctgtaacatgaatacatgacatgtgatagttgtatataagatctgtggactgggggcgtatcagcgcattctacacagctaagggttgcatagttgcgagaactgaagcatgtaaatgtctttaaactgccatctgattgagatgcagtagtactgctgttctggaataagacatgtctgcttttggggaaaatgattcaaaaaatgtttcgtttgaactcagcgtctgctgaaaatgaatttggttcccgacccctgttctgg

SEQ ID NO: 221539 - DNA, 2922 bp, Zea Mays
ctgcttttcgaaaattacaatcacccaccttccaataaaagcgcacacgccttcgtgcacctccccggtctctccccctttcctctcccttcccccttcccccgcctccgccatcgccgacgccgacccccacaccggccgacgcgcgagccccggcaccatcttcacacgctaattgatggagatgggatcttcaacgtctccggattggagaacttcatgaaggatgtcagattgggtgaatgcgggctgtcctatgctgttgtatcaataatgggcccgcaaagtagtggtcacagactaccaaaggatgatacagcatttgagaagcaaagtgcattgtttgctttggccgtttcggacattgtgttgattaatatgtggtgtcatgacattggcagagaacaggctgcaaacaagcctcttttgaagactgttttccaggcaacatttgaggtcatgatgaggttgttcagtcctcgcaaaacaacattgttgtttgttatacgtgacaaatcaaggacacccctagaaaatcttgagccaattctaagggaagacattcagaagatatgggatgctgttccgaaaccccatgcccataaagaaactccaattagtgaatttttcgatgttcaagttgtcgcactgtcgagttatgaagaaaaagaagagttattcaaacagcaggtttctgatttaagagataggtttcagcattcaattgcccctggtggacttgctggggatcgtcgtggtgttgtcccagcttcaggtttctcatttagttcccagcaattttggaaagtcatcaaggagaacaaagatcttgatttgcctgctcataaagttatggtggctactgtacgttgtgaggaaattggtaatgagaaagttaccagctttatagctgatgaggaatggcaacaatttgaggaggctgtccaacatgactttgttactgggtttgggaagaagctcagcagccttctggatagatgtttatcagagtatgacatggaggctatttattttgatgaaggtgtcagaagctcgaaaagacaacaacttgagtctaaactgttacagcttgtcaatcctgcctatcaatctcttctaggtcacttacacactagaactttagaagcatttaaggagtactttggcaaggccctagaaaaggagggatttgctgttgcagcttgcaattgtactgaaactttcttggagaagtttgatagaggatctgaagatgctgctattcaacaagtgaattgggacacctcaaaagtgagggataagcttagacgtgacattgaggctcatgtagcttcagttcgggctgctaaattgtctgaactttgtgcgaaatatgaggcacaacttaccaaagctctggtggaaccagttgaatctcttctagattcagccagtgaagacacgtggccagctattagaaagcttcttcaacgcgagacaaaaactgctgttttaggtcttgaatctgctgtgtcagcttttgaactcgatgaagcaactgagaaagaactgcttgcgaagctggagaagcatggaaggagtgttgttgagtcaaaggcaaaagaagaagctggaagggttttgattcgcatgaaggacaggttctcaacattgttcagccgagatgctgactctatgcccagggtgtggacaggaaaggaggacataaaagctataactaaaaccgctcgctcagcttctgtgaagttgctttctacaatggctgcaattcggttggaggaggatggtgataacattgagaacactctttcccttgctcttgttgacacttcaagacatgggactacagataggagtatccaattgtccgatccactagcctccagctcatgggaaagggttgctgaggagaagactttaattacccctgtgcagtgcaaaaatttgtggaggcaattcaaagctgaaactgaatatacagtcactcaagccatagctgctcaggaagcaaataagaggaacaacaactggctcccacctccatgggcacttgctgcaatggctatccttggattcaacgagtttatgacattactgaggaatccgctttacctgtttgccatatttgtgatttatcttgttggaaaagccctttgggtgcaatcagaaattggcagggaattccaacatggatttcttcctgccatcctttcactgtcgacgaaatttgttcccactgtaatgaacatcctgaagagattagctgacgcgggtcaagaacctgcagcagcccccgagaggcaaagagagatggagctccaaccaaaatccaccaggaacggttccttatacagcaatgtgacatcggcagggtcatctagcgtaaccacttcggagattggacctgaatattcaagcccggttgtgcaatgattttgctgatctttagctttttggctggaaacatactctagcagttgagaaaaacagggtgcctcaagaacgtacgaagattttggtgccttgcagtttttgtaagcttgcccttcccagactgattcaaggtggcactgcccctcgttgttattcaaggaattttggggctggcggggttgtttgtaagagcattgtaaaataacttgtttcattttttggtttctgtaacatgaatacatgacatgtgatagttgtatataagatctgtggactgggggcgtatcagcgcattctacacagctaagggttgcatagttgcgagaactgaagcatgtaaatgtctttaaactgccatctgattgagatgcagtagtactgctgttctggaataagacatgtctgcttttggggaaaatgattcaaaaaatgtttcgtttgaactcagcgtctgctgaaaatgaatttggttcccgacccctgttctgg

SEQ ID NO: 221540 - DNA, 2975 bp, Zea Mays
acccataccccatgctcttctgcttttcgaaaattacaatcacccaccttccaataaaagcgcacacgccttcgtgcacctccccggtctctccccctttcctctcccttcccccttcccccgcctccgccatcgccgacgccgacccccacaccggccgacgcgcgagccccggcaccatcttcacacgagcataaatgggtgatgcgtgtttctcaacacagctaattgatggagatgggatcttcaacgtctccggattggagaacttcatgaaggatgtcagattgggtgaatgcgggctgtcctatgctgttgtatcaataatgggcccgcaaagtagtggtcacagactaccaaaggatgatacagcatttgagaagcaaagtgcattgtttgctttggccgtttcggacattgtgttgattaatatgtggtgtcatgacattggcagagaacaggctgcaaacaagcctcttttgaagactgttttccaggcaacatttgaggtcatgatgaggttgttcagtcctcgcaaaacaacattgttgtttgttatacgtgacaaatcaaggacacccctagaaaatcttgagccaattctaagggaagacattcagaagatatgggatgctgttccgaaaccccatgcccataaagaaactccaattagtgaatttttcgatgttcaagttgtcgcactgtcgagttatgaagaaaaagaagagttattcaaacagcaggtttctgatttaagagataggtttcagcattcaattgcccctggtggacttgctggggatcgtcgtggtgttgtcccagcttcaggtttctcatttagttcccagcaattttggaaagtcatcaaggagaacaaagatcttgatttgcctgctcataaagttatggtggctactgtacgttgtgaggaaattggtaatgagaaagttaccagctttatagctgatgaggaatggcaacaatttgaggaggctgtccaacatgactttgttactgggtttgggaagaagctcagcagccttctggatagatgtttatcagagtatgacatggaggctatttattttgatgaaggtgtcagaagctcgaaaagacaacaacttgagtctaaactgttacagcttgtcaatcctgcctatcaatctcttctaggtcacttacacactagaactttagaagcatttaaggagtactttggcaaggccctagaaaaggagggatttgctgttgcagcttgcaattgtactgaaactttcttggagaagtttgatagaggatctgaagatgctgctattcaacaagtgaattgggacacctcaaaagtgagggataagcttagacgtgacattgaggctcatgtagcttcagttcgggctgctaaattgtctgaactttgtgcgaaatatgaggcacaacttaccaaagctctggtggaaccagttgaatctcttctagattcagccagtgaagacacgtggccagctattagaaagcttcttcaacgcgagacaaaaactgctgttttaggtcttgaatctgctgtgtcagcttttgaactcgatgaagcaactgagaaagaactgcttgcgaagctggagaagcatggaaggagtgttgttgagtcaaaggcaaaagaagaagctggaagggttttgattcgcatgaaggacaggttctcaacattgttcagccgagatgctgactctatgcccagggtgtggacaggaaaggaggacataaaagctataactaaaaccgctcgctcagcttctgtgaagttgctttctacaatggctgcaattcggttggaggaggatggtgataacattgagaacactctttcccttgctcttgttgacacttcaagacatgggactacagataggagtatccaattgtccgatccactagcctccagctcatgggaaagggttgctgaggagaagactttaattacccctgtgcagtgcaaaaatttgtggaggcaattcaaagctgaaactgaatatacagtcactcaagccatagctgctcaggaagcaaataagaggaacaacaactggctcccacctccatgggcacttgctgcaatggctatccttggattcaacgagtttatgacattactgaggaatccgctttacctgtttgccatatttgtgatttatcttgttggaaaagccctttgggtgcaatcagaaattggcagggaattccaacatggatttcttcctgccatcctttcactgtcgacgaaatttgttcccactgtaatgaacatcctgaagagattagctgacgcgggtcaagaacctgcagcagcccccgagaggcaaagagagatggagctccaaccaaaatccaccaggaacggttccttatacagcaatgtgacatcggcagggtcatctagcgtaaccacttcggagattggacctgaatattcaagcccggttgtgcaatgattttgctgatctttagctttttggctggaaacatactctagcagttgagaaaaacagggtgcctcaagaacgtacgaagattttggtgccttgcagtttttgtaagcttgcccttcccagactgattcaaggtggcactgcccctcgttgttattcaaggaattttggggctggcggggttgtttgtaagagcattgtaaaataacttgtttcattttttggtttctgtaacatgaatacatgacatgtgatagttgtatataagatctgtggactgggggcgtatcagcgcattctacacagctaagggttgcatagttgcgagaactgaagcatgtaaatgtctttaaactgccatctgattgagatgcagtagtactgctgttctggaataagacatgtctgcttttggggaaaatgattcaaaaaatgtttcgtttgaactcagcgtctgctgaaaatgaatttggttcccgacccctgttctgg

SEQ ID NO: 221541 - DNA, 6692 bp, Zea Mays
tggcttctccctcgtacaggaggaacagtcctatgaacgcatccgcgggcaccacgaaaagtccaaatccatccgccccagcaccggaacgcagctagtcaatcaaaagcacaaaaagcccaccaccactccgcaagtccgcaaagatcaaacccaagaaatctgagcaccagctacgctgctaattattccatcccatccatctctctccatctatccaaatattccatttaatttcttttcctcgctgctcagcagcagctgccgccgcacaaacacaaaacacactccactctgccacggaagaaaacaaaagaaatacaaagcctgagcgaaaagggaaggcggggtttggtttttattagctgcacacaatggcagcagcgatccaaacccaatccccagcgccgcagcgcgtgggtaataatcgtcccagttcgagcagttgcccttcccgttgctgttcctggcttgcggcttccccaatctctcctccacatccctatccttgccctcttcttcttcgtcgccttttacccacccatccgtcgcggcggtgttcgtggtgttcaagttattgtttgtgtcagtgttcctttcctcctcccggttcggtcatcggtgctggtattcttcgccacggagatccggccacacatcgattcgccttctttttcctcgctccgcgacgcggggtacaatatcgactggactgcgaggcatttggtgcgggcaggcgctacgaggtggggcgacaaaagttgtgaagtttatgcgccttgctttgcagaaggtgctcggatctaggtttccaggccgtcgatcgccgccatggacgccggcagggacggggacggtgccgggaaggcgccgccgaagggccccgccgatgccacgaccgtgcctccggcgccagtggcggcttctgcgcctgggtcgagcgcggggacctcagggtcgggggagaagccggtgaagcgggtgatgaaaaccccctaccagctcgaggttctggagtacacctatgcggtggagcattatccgtccgaagctaagcggctggagctgtcagcgaagatagggctttcggacaggcagctgcaaatgtggttctgccaccgccgcctcaaggaccgcaagccaccatcgaagcggcaacggcgggatgaagagtccgcactagcaccagtgatgcctccaccgccggtgttaccagcacctgtgatgccagtggcaagcagtgaccttatggtgggcgctcctgggccgtatgataagctgctgcagccggttcacttgcgaaggggtgctgggcggtcctcagcagtccctaggatttccatgccggatctcgggaggagctcggggaaccgttgagggaggatggtccagcacttggcattaattttgatccccttcctcctggcgcctttggtgcaccgattgttccagagcaacaaaagcagcctgtgcaatcttatgatacagatatattttctaggcatgatcaaaagctcttaaaggcttcagcatttttacctactatagaatccccatttgttccaaattcgtttaccgggaagagaaaatcaactgttggtaattctcccgtagtccaacctcatgttggatcacgggctgtccatgagtaccagttccttcctgagcaaccaagtgatacatatgagagggcaagtcctcactactatgacactccagtggaagcttcaaattccaggataccttctctcacatcaggatcacaacttctccatggatctgaggaggctgcgcctagttatgcttttcaaggtcacacatctggttctagcctgttgcctccttccagcaggccccaggtgtttccagtagcaccaacagattatgagatgacccagtttaatagcaaccttagttctgttcctgttgaaggccagtttgatacgtctcaggttgctgcatttgaagacccacctgtatcgtctgaaagaagagcttatcatgatgaagatacttctcgagtggaaagaaaacgaaaacataatgaagaagcaaagattgcaaaagaagttgaagctcacgaaagacgaattaggaaggagcttgagaaacaagattttttgaatagaaagagagaggagcaaaggcacaaggaaatggagagacttgagcgtgagagaagaaaagaagaggagagattactgcgtgagaggcagagagaagaagagaggttccaaagagagcaaagacgtgaaaatgagcgcatggagaagtttttgcagaagcaatctagacgagaagagaaacaaagacaaaaggagcaactccgaaaagagaaagaggcagcaaggcaaaaggctgccaatgaaagggctgctgcacgtagaattgcacgggactatatggaactggtggaagatgagcgtttggaattaatggaattagctgcacaaaacaaagggttgccctcaatgctgtatcttgacagcgacacattacagcagcttgattcttttcgaggcatggtaagtcaatttcctcctgcaacagtgaaaatgaagttgccattttctataaagccttggactggatctgaggataacattggaaagcttttgatggtgtggaaattcttaattactttcactgatgttctgggtctttgtccagttacacttgatgagtttgttcagtctcttcatgattatgattcaaggcttttgggagaactgcatgttgctctgttgaaatccattatcaaggatattgaggatgttgctagaactccatcaattgcactaggggtgaatccaggaggtggtcatccacaaattgttgaaggggcatattcctggggattcgatatacgtagctggcaacgtcatcttaatcttcttacatggcctgagatattaagacagtttgctttatctgctggttctggaccccaattaaagaaaaggactgtggaagattctcactatcattatgataatgagggtcatgatggtgagaatgttatattggcacttcgaaatggtacagcagcagtgaatgctgttgctaagatgaaggaaagaggttacaccaatcgccgtagatcccgccaccgtctgactcctggaactgtgaaatttgccgctttccatgtgctctcgcttgaaggaagtaatggtctcacaatattggatgtagcagaaaaaattcagaaatctggattgagagacctcacaacaagcaagacacctgaggcatccatagctgctgctttgtctagggatgcaaaactttttgagagaactgctccttcaacatattgtttgaagtcgccttatagaaaagatccagctgattctgaggccgtgttgtcagcagcgcgtgaaaaaattagggcctttcagaatgtgctttctgactctgaagctgaaaaggaggcagatgaagctgagagggatgatgattctgactgtgatgatgctgatgatgaccctgatggtgatgatgtgaatattgaggtggaagaagacaaggatcctcttcttgccgtcaaggcacaagacgaagtaccgagtacaactacagttattggcataaagaccaagttagatagtgtaggtaatgcattgaactcatcaagtagttttactaaatcagcaaaaggtgctcctctcccttatttaggcaggtccagtgcagcagatacttctaatgattcacctcttggaggcccatcagctaatcatgaagtaacccctggcgattctgaaaatactcaaattgatgaaagcaatcaaattgagccttgggtatgtgcactagcagaaggagactactgcgatcttagtgttgaagaacgccttaacgcactggttgctcttgttggtgttgccactgaagggaactctattcgtggtgtacttgaggaacgtttggaattagcaaatgccttaaagaagcaaatgtgggcagaagtgcaacttgacaagaggcgtttcaaggaagaatttgctagcagagtacaatataactctggcatgagttttaagcctgatatatatcaagaaaacaacatgacagagattacttcaactcgagcctgtgatgcttacaaagaaaacgatggacatgttgggacaatcaacaattgtgagatgcttgatcagcatagtcagggtaatgctggtggtataacttatgatagaaatgtcgtaggccaggaaatccatgcaaccccagatacttcgtatgttcagcagtatgcttatgctgataaaacacgatctcagttgaaatcgtacattggtcaccgggcagagcagctctatgtttacagatccctgcccctaggtcaggatcggaggcgaaacaggtattggcagtttacaacttcagcatcaccaaatgaccctggctcaggaagaatcttttttgaatcggaagatggatgttggagagttatcgactcagaggattcctttgattctttagtggctgcccttgatacacgtggcacccgggaagcacagctgcgttcaatgttgcaaatgatcgagacaacctttaaggaagctattaaaaggagaagtgcaagtatagaattatctgctacagtgtatccaaagaatggagctactgacatgataagggcaaattatcatagagaggttggaagctcaagcagtactccttttaatgatacatctgatagtgtaacagcatattctgattcttttaaagtagagcttgggcgtaatgattttgagaaggcagctatatcaaaaagggcagatatatttttaaaatggatgtggagggaatgctacaatcaggaagagacatgtgccatgagatacggcaagaaaagatgctctgaattgttgcattcttgtaattgctgctatcagatttacctagccgaagaaagacactgttcttcttgccataagactttcaaatccatttacaatttttctgatcatacaacacaatgcgaagagaaatggagaactgacccttactggaagatgcaaatcgctgattattctgttccaataggaatggtattactcaagcttcagttagttttgattgaggcatatataccatcagaagcacttcaaccattttggactgatgtgtatcggaaatcttggagtgtgaagctttatgctaccaaatctattgctgagacattccagcttttgactgttctggaaggtgcaataataccagatcgcctctcttctgattttgaaacaacaagcgaatgtctaaactcacaggttatcgcaccccaaaatcctgtgttaccagctggatttgcttctgtccttccatgggttcctgacactacttctgctgttatgctccgagtgttagaccttgactcagctattttgtatgtgcaaaatcaaaagatggagagggatgatggaggttttatgaaatttccatcaaggtatacagttgttaagagcaaacaagaaacaattccactcgaaccaactggtatggatttgtatgatggaaggtggcttcctggtagtggccgtaggggacgtggccgtggaagtagaggaggtagcaggggaggcaggggccgaagtcgaggtggaaggatcccaagaggtgttagcagctcatcaaggatcgagttcaaggatggcattgctgcttctggtagagcgccaaggaagaatgcacgtcgaggtcgaggtcgaggtcgaggtcgtgggcgtcgaactgtcagacctcggcagccatctgtgggcagaggcagatcaattccaaaggaaaatttgatgggaagctttagcatgcttaccagctcaaaggctgccgacattgaggagtctccacgaagctctggcgcagatgagtggggcttggagaccagaatgacatacactgagcgtgacgagaacagttctggatcacgctatgaagataacgaggaaaacggccagcccatggacgaggattatgaagagcaggttccagattactcaatagactattctagtgggtcgaggcaccatgaaatgatgtccatgatggatcacgagactgacgaggaagatgaagatgctgaaggtgatgagaatgtggaagaagatgatgcagaccacgcagttgacgatgccgatgttgagatggacgaaggtgatgatgaaattggtgatgacggagaggatggcggcgttggcggggagatgactccggatgaggatccagatgctacttcatattcatctgactacagcgaataagaaagcagaaataagtgaccttatcctagagatcctccctcagcgtccctttgtgaaccaaaaggaaaagctaaggagcgatagatgtgcatactgtttttttaggcaccgcaggttctaatagatttcctgacgtatgcctactcattcgatgagtggttgtatcttgctaggtatgtgcatgtcactgtagaattccccgagctatacagtgtctaaggagagatgatatcatatcgcaatttgctaatttggttcccatgcgtcatcccgatcctaatctgatccttaaatagagcccattgtccccttaagtagaagtgatcttttatcatgagttttaccatctcttaaaagtaaatatgaaattggagtctgctttctaaccgagaacatggcaggcgcatcgtaggcatcctcgtt

SEQ ID NO: 221542 - DNA, 6586 bp, Zea Mays
ctcgaaaacgcaggagagctgcgtctcattatattaagaagaagaataagggtctggaacagaccaaatacaaaggactccttacggaggcgggaggccgaaaacaaaggaacctaaaaggactcatctaggatacaaaacaatagaggacctttaccacattacataacagttatggccaaagaccacgcagccctgctgctccagccaaacaccaaagagaagcctcatctctgacttcctggatgatcttggcaatgcttggtggagccttatcaaagacacatgcattccgatgtttccacatcatccaagccacaagtgaaaccagggtgttaaatcctttcctttgtatgggtggcacttgtacctctgccagtttctaccaattttggaatacctttccgtgaagccttgctgcagtcctaccattgatagcggcatataccaaacttctctagaaaaaacacaactgagaagaatgtgctcaattctttcttcctcctgatcacaaaaaaggcagtgttctggatgttccaatccctgccgagccagacggtcagcagtccaacatctgttcaaggctgccagccataaaaagaatctgcatttaggtggaggccaactcttctagatacgagaagtgggttcaaaatctgttgtccccaagcagaaacgctcatatgcagacttggaagtgtagatccccgtagatgatggaagccatctatgttgatcatgagtttttgagcataattgaatctgttgtaattgatcccaaatctgaaaatatttaaagaatgcttgtggagagagctcaccccttatgtcagtaatccaatgcaatgatttcaagtcgagcgacttgctagtcgacacacctgggcgactaggcgactaatcgcgattaggacgacgactaggtcgactaatcgtggctaaggcagcagcagattgaagaggggattcaagagggggggacagatcaagagaaaggtgcagaggggattcaagagggggcacagatcaaaagaaaggtgcagtgattgaagttaccgtcggttgatgtactcatcttggtgctaatggctgctgggccgccgccgctgcagactgctgctgggccgccgccgtcgaggacggtgagatgctgacaccgaggaggaaggtgcagggctgccgccaccgaggaaaagggtgagcaggtgagcacattgaggaacaaggagggggcagagggtacccaccggtgttggacagggagaggtgagccgccgcacaggcacagccacctgaacaggagagaagagcaaaaagccgccggaacaggagaggagaagttccagagcaacaaaagcagcctgtgcaatcttatgatacagatatattttctaggcatgatcaaaagctcttaaaggcttcagcatttttacctactatagaatccccatttgttccaaattcgtttaccgggaagagaaaatcaactgttggtaattctcccgtagtccaacctcatgttggatcacgggctgtccatgagtaccagttccttcctgagcaaccaagtgatacatatgagagggcaagtcctcactactatgacactccagtggaagcttcaaattccaggataccttctctcacatcaggatcacaacttctccatggatctgaggaggctgcgcctagttatgcttttcaaggtcacacatctggttctagcctgttgcctccttccagcaggccccaggtgtttccagtagcaccaacagattatgagatgacccagtttaatagcaaccttagttctgttcctgttgaaggccagtttgatacgtctcaggttgctgcatttgaagacccacctgtatcgtctgaaagaagagcttatcatgatgaagatacttctcgagtggaaagaaaacgaaaacataatgaagaagcaaagattgcaaaagaagttgaagctcacgaaagacgaattaggaaggagcttgagaaacaagattttttgaatagaaagagagaggagcaaaggcacaaggaaatggagagacttgagcgtgagagaagaaaagaagaggagagattactgcgtgagaggcagagagaagaagagaggttccaaagagagcaaagacgtgaaaatgagcgcatggagaagtttttgcagaagcaatctagacgagaagagaaacaaagacaaaaggagcaactccgaaaagagaaagaggcagcaaggcaaaaggctgccaatgaaagggctgctgcacgtagaattgcacgggactatatggaactggtggaagatgagcgtttggaattaatggaattagctgcacaaaacaaagggttgccctcaatgctgtatcttgacagcgacacattacagcagcttgattcttttcgaggcatggtaagtcaatttcctcctgcaacagtgaaaatgaagttgccattttctataaagccttggactggatctgaggataacattggaaagcttttgatggtgtggaaattcttaattactttcactgatgttctgggtctttgtccagttacacttgatgagtttgttcagtctcttcatgattatgattcaaggcttttgggagaactgcatgttgctctgttgaaatccattatcaaggatattgaggatgttgctagaactccatcaattgcactaggggtgaatccaggaggtggtcatccacaaattgttgaaggggcatattcctggggattcgatatacgtagctggcaacgtcatcttaatcttcttacatggcctgagatattaagacagtttgctttatctgctggttctggaccccaattaaagaaaaggactgtggaagattctcactatcattatgataatgagggtcatgatggtgagaatgttatattggcacttcgaaatggtacagcagcagtgaatgctgttgctaagatgaaggaaagaggttacaccaatcgccgtagatcccgccaccgtctgactcctggaactgtgaaatttgccgctttccatgtgctctcgcttgaaggaagtaatggtctcacaatattggatgtagcagaaaaaattcagaaatctggattgagagacctcacaacaagcaagacacctgaggcatccatagctgctgctttgtctagggatgcaaaactttttgagagaactgctccttcaacatattgtttgaagtcgccttatagaaaagatccagctgattctgaggccgtgttgtcagcagcgcgtgaaaaaattagggcctttcagaatgtgctttctgactctgaagctgaaaaggaggcagatgaagctgagagggatgatgattctgactgtgatgatgctgatgatgaccctgatggtgatgatgtgaatattgaggtggaagaagacaaggatcctcttcttgccgtcaaggcacaagacgaagtaccgagtacaactacagttattggcataaagaccaagttagatagtgtaggtaatgcattgaactcatcaagtagttttactaaatcagcaaaaggtgctcctctcccttatttaggcaggtccagtgcagcagatacttctaatgattcacctcttggaggcccatcagctaatcatgaagtaacccctggcgattctgaaaatactcaaattgatgaaagcaatcaaattgagccttgggtatgtgcactagcagaaggagactactgcgatcttagtgttgaagaacgccttaacgcactggttgctcttgttggtgttgccactgaagggaactctattcgtggtgtacttgaggaacgtttggaattagcaaatgccttaaagaagcaaatgtgggcagaagtgcaacttgacaagaggcgtttcaaggaagaatttgctagcagagtacaatataactctggcatgagttttaagcctgatatatatcaagaaaacaacatgacagagattacttcaactcgagcctgtgatgcttacaaagaaaacgatggacatgttgggacaatcaacaattgtgagatgcttgatcagcatagtcagggtaatgctggtggtataacttatgatagaaatgtcgtaggccaggaaatccatgcaaccccagatacttcgtatgttcagcagtatgcttatgctgataaaacacgatctcagttgaaatcgtacattggtcaccgggcagagcagctctatgtttacagatccctgcccctaggtcaggatcggaggcgaaacaggtattggcagtttacaacttcagcatcaccaaatgaccctggctcaggaagaatcttttttgaatcggaagatggatgttggagagttatcgactcagaggattcctttgattctttagtggctgcccttgatacacgtggcacccgggaagcacagctgcgttcaatgttgcaaatgatcgagacaacctttaaggaagctattaaaaggagaagtgcaagtatagaattatctgctacagtgtatccaaagaatggagctactgacatgataagggcaaattatcatagagaggttggaagctcaagcagtactccttttaatgatacatctgatagtgtaacagcatattctgattcttttaaagtagagcttgggcgtaatgattttgagaaggcagctatatcaaaaagggcagatatatttttaaaatggatgtggagggaatgctacaatcaggaagagacatgtgccatgagatacggcaagaaaagatgctctgaattgttgcattcttgtaattgctgctatcagatttacctagccgaagaaagacactgttcttcttgccataagactttcaaatccatttacaatttttctgatcatacaacacaatgcgaagagaaatggagaactgacccttactggaagatgcaaatcgctgattattctgttccaataggaatggtattactcaagcttcagttagttttgattgaggcatatataccatcagaagcacttcaaccattttggactgatgtgtatcggaaatcttggagtgtgaagctttatgctaccaaatctattgctgagacattccagcttttgactgttctggaaggtgcaataataccagatcgcctctcttctgattttgaaacaacaagcgaatgtctaaactcacaggttatcgcaccccaaaatcctgtgttaccagctggatttgcttctgtccttccatgggttcctgacactacttctgctgttatgctccgagtgttagaccttgactcagctattttgtatgtgcaaaatcaaaagatggagagggatgatggaggttttatgaaatttccatcaaggtatacagttgttaagagcaaacaagaaacaattccactcgaaccaactggtatggatttgtatgatggaaggtggcttcctggtagtggccgtaggggacgtggccgtggaagtagaggaggtagcaggggaggcaggggccgaagtcgaggtggaaggatcccaagaggtgttagcagctcatcaaggatcgagttcaaggatggcattgctgcttctggtagagcgccaaggaagaatgcacgtcgaggtcgaggtcgaggtcgaggtcgtgggcgtcgaactgtcagacctcggcagccatctgtgggcagaggcagatcaattccaaaggaaaatttgatgggaagctttagcatgcttaccagctcaaaggctgccgacattgaggagtctccacgaagctctggcgcagatgagtggggcttggagaccagaatgacatacactgagcgtgacgagaacagttctggatcacgctatgaagataacgaggaaaacggccagcccatggacgaggattatgaagagcaggttccagattactcaatagactattctagtgggtcgaggcaccatgaaatgatgtccatgatggatcacgagactgacgaggaagatgaagatgctgaaggtgatgagaatgtggaagaagatgatgcagaccacgcagttgacgatgccgatgttgagatggacgaaggtgatgatgaaattggtgatgacggagaggatggcggcgttggcggggagatgactccggatgaggatccagatgctacttcatattcatctgactacagcgaataagaaagcagaaataagtgaccttatcctagagatcctccctcagcgtccctttgtgaaccaaaaggaaaagctaaggagcgatagatgtgcatactgtttttttaggcaccgcaggttctaatagatttcctgacgtatgcctactcattcgatgagtggttgtatcttgctaggtatgtgcatgtcactgtagaattccccgagctatacagtgtctaaggagagatgatatcatatcgcaatttgctaatttggttcccatgcgtcatcccgatcctaatctgatccttaaatagagcccattgtccccttaagtagaagtgatcttttatcatgagttttaccatctcttaaaagtaaatatgaaattggagtctgctttctaaccgagaacatggcaggcgcatcgtaggcatcctcgtt

SEQ ID NO: 221543 - DNA, 5320 bp, Zea Mays
atggccctcatccaaagcctcctgaaccataccacattagaaactgataccgtcctattcaaacttgttaccgctgttccagagcaacaaaagcagcctgtgcaatcttatgatacagatatattttctaggcatgatcaaaagctcttaaaggcttcagcatttttacctactatagaatccccatttgttccaaattcgtttaccgggaagagaaaatcaactgttggtaattctcccgtagtccaacctcatgttggatcacgggctgtccatgagtaccagttccttcctgagcaaccaagtgatacatatgagagggcaagtcctcactactatgacactccagtggaagcttcaaattccaggataccttctctcacatcaggatcacaacttctccatggatctgaggaggctgcgcctagttatgcttttcaaggtcacacatctggttctagcctgttgcctccttccagcaggccccaggtgtttccagtagcaccaacagattatgagatgacccagtttaatagcaaccttagttctgttcctgttgaaggccagtttgatacgtctcaggttgctgcatttgaagacccacctgtatcgtctgaaagaagagcttatcatgatgaagatacttctcgagtggaaagaaaacgaaaacataatgaagaagcaaagattgcaaaagaagttgaagctcacgaaagacgaattaggaaggagcttgagaaacaagattttttgaatagaaagagagaggagcaaaggcacaaggaaatggagagacttgagcgtgagagaagaaaagaagaggagagattactgcgtgagaggcagagagaagaagagaggttccaaagagagcaaagacgtgaaaatgagcgcatggagaagtttttgcagaagcaatctagacgagaagagaaacaaagacaaaaggagcaactccgaaaagagaaagaggcagcaaggcaaaaggctgccaatgaaagggctgctgcacgtagaattgcacgggactatatggaactggtggaagatgagcgtttggaattaatggaattagctgcacaaaacaaagggttgccctcaatgctgtatcttgacagcgacacattacagcagcttgattcttttcgaggcatggtaagtcaatttcctcctgcaacagtgaaaatgaagttgccattttctataaagccttggactggatctgaggataacattggaaagcttttgatggtggaaattcttaattactttcactgatgttctgggtctttgtccagttacacttgatgagtttgttcagtctcttcatgattatgattcaaggcttttgggagaactgcatgttgctctgttgaaatccattatcaaggatattgaggatgttgctagaactccatcaattgcactaggggtgaatccaggaggtggtcatccacaaattgttgaaggggcatattcctggggattcgatatacgtagctggcaacgtcatcttaatcttcttacatggcctgagatattaagacagtttgctttatctgctggttctggaccccaattaaagaaaaggactgtggaagattctcactatcattatgataatgagggtcatgatggtgagaatgttatattggcacttcgaaatggtacagcagcagtgaatgctgttgctaagatgaaggaaagaggttacaccaatcgccgtagatcccgccaccgtctgactcctggaactgtgaaatttgccgctttccatgtgctctcgcttgaaggaagtaatggtctcacaatattggatgtagcagaaaaaattcagaaatctggattgagagacctcacaacaagcaagacacctgaggcatccatagctgctgctttgtctagggatgcaaaactttttgagagaactgctccttcaacatattgtttgaagtcgccttatagaaaagatccagctgattctgaggccgtgttgtcagcagcgcgtgaaaaaattagggcctttcagaatgtgctttctgactctgaagctgaaaaggaggcagatgaagctgagagggatgatgattctgactgtgatgatgctgatgatgaccctgatggtgatgatgtgaatattgaggtggaagaagacaaggatcctcttcttgccgtcaaggcacaagacgaagtaccgagtacaactacagttattggcataaagaccaagttagatagtgtaggtaatgcattgaactcatcaagtagttttactaaatcagcaaaaggtgctcctctcccttatttaggcaggtccagtgcagcagatacttctaatgattcacctcttggaggcccatcagctaatcatgaagtaacccctggcgattctgaaaatactcaaattgatgaaagcaatcaaattgagccttgggtatgtgcactagcagaaggagactactgcgatcttagtgttgaagaacgccttaacgcactggttgctcttgttggtgttgccactgaagggaactctattcgtggtgtacttgaggaacgtttggaattagcaaatgccttaaagaagcaaatgtgggcagaagtgcaacttgacaagaggcgtttcaaggaagaatttgctagcagagtacaatataactctggcatgagttttaagcctgatatatatcaagaaaacaacatgacagagattacttcaactcgagcctgtgatgcttacaaagaaaacgatggacatgttgggacaatcaacaattgtgagatgcttgatcagcatagtcagggtaatgctggtggtataacttatgatagaaatgtcgtaggccaggaaatccatgcaaccccagatacttcgtatgttcagcagtatgcttatgctgataaaacacgatctcagttgaaatcgtacattggtcaccgggcagagcagctctatgtttacagatccctgcccctaggtcaggatcggaggcgaaacaggtattggcagtttacaacttcagcatcaccaaatgaccctggctcaggaagaatcttttttgaatcggaagatggatgttggagagttatcgactcagaggattcctttgattctttagtggctgcccttgatacacgtggcacccgggaagcacagctgcgttcaatgttgcaaatgatcgagacaacctttaaggaagctattaaaaggagaagtgcaagtatagaattatctgctacagtgtatccaaagaatggagctactgacatgataagggcaaattatcatagagaggttggaagctcaagcagtactccttttaatgatacatctgatagtgtaacagcatattctgattcttttaaagtagagcttgggcgtaatgattttgagaaggcagctatatcaaaaagggcagatatatttttaaaatggatgtggagggaatgctacaatcaggaagagacatgtgccatgagatacggcaagaaaagatgctctgaattgttgcattcttgtaattgctgctatcagatttacctagccgaagaaagacactgttcttcttgccataagactttcaaatccatttacaatttttctgatcatacaacacaatgcgaagagaaatggagaactgacccttactggaagatgcaaatcgctgattattctgttccaataggaatggtattactcaagcttcagttagttttgattgaggcatatataccatcagaagcacttcaaccattttggactgatgtgtatcggaaatcttggagtgtgaagctttatgctaccaaatctattgctgagacattccagcttttgactgttctggaaggtgcaataataccagatcgcctctcttctgattttgaaacaacaagcgaatgtctaaactcacaggttatcgcaccccaaaatcctgtgttaccagctggatttgcttctgtccttccatgggttcctgacactacttctgctgttatgctccgagtgttagaccttgactcagctattttgtatgtgcaaaatcaaaagatggagagggatgatggaggttttatgaaatttccatcaaggtatacagttgttaagagcaaacaagaaacaattccactcgaaccaactggtatggatttgtatgatggaaggtggcttcctggtagtggccgtaggggacgtggccgtggaagtagaggaggtagcaggggaggcaggggccgaagtcgaggtggaaggatcccaagaggtgttagcagctcatcaaggatcgagttcaaggatggcattgctgcttctggtagagcgccaaggaagaatgcacgtcgaggtcgaggtcgaggtcgaggtcgtgggcgtcgaactgtcagacctcggcagccatctgtgggcagaggcagatcaattccaaaggaaaatttgatgggaagctttagcatgcttaccagctcaaaggctgccgacattgaggagtctccacgaagctctggcgcagatgagtggggcttggagaccagaatgacatacactgagcgtgacgagaacagttctggatcacgctatgaagataacgaggaaaacggccagcccatggacgaggattatgaagagcaggttccagattactcaatagactattctagtgggtcgaggcaccatgaaatgatgtccatgatggatcacgagactgacgaggaagatgaagatgctgaaggtgatgagaatgtggaagaagatgatgcagaccacgcagttgacgatgccgatgttgagatggacgaaggtgatgatgaaattggtgatgacggagaggatggcggcgttggcggggagatgactccggatgaggatccagatgctacttcatattcatctgactacagcgaataagaaagcagaaataagtgaccttatcctagagatcctccctcagcgtccctttgtgaaccaaaaggaaaagctaaggagcgatagatgtgcatactgtttttttaggcaccgcaggttctaatagatttcctgacgtatgcctactcattcgatgagtggttgtatcttgctaggtatgtgcatgtcactgtagaattccccgagctatacagtgtctaaggagagatgatatcatatcgcaatttgctaatttggttcccatgcgtcatcccgatcctaatctgatccttaaatagagcccattgtccccttaagtagaagtgatcttttatcatgagttttaccatctcttaaaagtaaatatgaaattggagtctgctttctaaccgagaacatggcaggcgcatcgtaggcatcctcgtt

SEQ ID NO: 221544 - DNA, 3131 bp, Zea Mays
atatctgtaggaaacttttaaatgcttcagcatttttacctactatagaatccccatttgttccaaattcgtttaccgggaagagaaaatcaactgttggtaattctcccgtagtccaacctcatgttggatcacgggctgtccatgagtaccagttccttcctgagcaaccaagtgatacatatgagagggcaagtcctcactactatgacactccagtggaagcttcaaattccaggataccttctctcacatcaggatcacaacttctccatggatctgaggaggctgcgcctagttatgcttttcaaggtcacacatctggttctagcctgttgcctccttccagcaggccccaggtgtttccagtagcaccaacagattatgagatgacccagtttaatagcaaccttagttctgttcctgttgaaggccagtttgatacgtctcaggttgctgcatttgaagacccacctgtatcgtctgaaagaagagcttatcatgatgaagatacttctcgagtggaaagaaaacgaaaacataatgaagaagcaaagattgcaaaagaagttgaagctcacgaaagacgaattaggaaggagcttgagaaacaagattttttgaatagaaagagagaggagcaaaggcacaaggaaatggagagacttgagcgtgagagaagaaaagaagaggagagattactgcgtgagaggcagagagaagaagagaggttccaaagagagcaaagacgtgaaaatgagcgcatggagaagtttttgcagaagcaatctagacgagaagagaaacaaagacaaaaggagcaactccgaaaagagaaagaggcagcaaggcaaaaggctgccaatgaaagggctgctgcacgtagaattgcacgggactatatggaactggtggaagatgagcgtttggaattaatggaattagctgcacaaaacaaagggttgccctcaatgctgtatcttgacagcgacacattacagcagcttgattcttttcgaggcatggtaagtcaatttcctcctgcaacagtgaaaatgaagttgccattttctataaagccttggactggatctgaggataacattggaaagcttttgatggtgtggaaattcttaattactttcactgatgttctgggtctttgtccagttacacttgatgagtttgttcagtctcttcatgattatgattcaaggcttttgggagaactgcatgttgctctgttgaaatccattatcaaggatattgaggatgttgctagaactccatcaattgcactaggggtgaatccaggaggtggtcatccacaaattgttgaaggggcatattcctggggattcgatatacgtagctggcaacgtcatcttaatcttcttacatggcctgagatattaagacagtttgctttatctgctggttctggaccccaattaaagaaaaggactgtggaagattctcactatcattatgataatgagggtcatgatggtgagaatgttatattggcacttcgaaatggtacagcagcagtgaatgctgttgctaagatgaaggaaagaggttacaccaatcgccgtagatcccgccaccgtctgactcctggaactgtgaaatttgccgctttccatgtgctctcgcttgaaggaagtaatggtctcacaatattggatgtagcagaaaaaattcagaaatctggattgagagacctcacaacaagcaagacacctgaggcatccatagctgctgctttgtctagggatgcaaaactttttgagagaactgctccttcaacatattgtttgaagtcgccttatagaaaagatccagctgattctgaggccgtgttgtcagcagcgcgtgaaaaaattagggcctttcagaatgtgctttctgactctgaagctgaaaaggaggcagatgaagctgagagggatgatgattctgactgtgatgatgctgatgatgaccctgatggtgatgatgtgaatattgaggtggaagaagacaaggatcctcttcttgccgtcaaggcacaagacgaagtaccgagtacaactacagttattggcataaagaccaagttagatagtgtaggtaatgcattgaactcatcaagtagttttactaaatcagcaaaaggtgctcctctcccttatttaggcaggtccagtgcagcagatacttctaatgattcacctcttggaggcccatcagctaatcatgaagtaacccctggcgattctgaaaatactcaaattgatgaaagcaatcaaattgagccttgggtatgtgcactagcagaaggagactactgcgatcttagtgttgaagaacgccttaacgcactggttgctcttgttggtgttgccactgaagggaactctattcgtggtgtacttgaggaacgtttggaattagcaaatgccttaaagaagcaaatgtgggcagaagtgcaacttgacaagaggcgtttcaaggaagaatttgctagcagagtacaatataactctggcatgagttttaagcctgatatatatcaagaaaacaacatgacagagattacttcaactcgagcctgtgatgcttacaaagaaaacgatggacatgttgggacaatcaacaattgtgagatgcttgatcagcatagtcagggtaatgctggtggtataacttatgatagaaatgtcgtaggccaggaaatccatgcaaccccagatacttcgtatgttcagcagtatgcttatgctgataaaacacgatctcagttgaaatcgtacattggtcaccgggcagagcagctctatgtttacagatccctgcccctaggtcaggatcggaggcgaaacaggtattggcagtttacaacttcagcatcaccaaatgaccctggctcaggaagaatcttttttgaatcggaagatggatgttggagagttatcgactcagaggatattagggatcccaaggcccccaagattaataggccttgtaaccatgtcctaagaaaccagacagctgccaccattaacctccttcctacccttctcacccccttctaatcttgtcgatagccttaatcacccattcaggcctcctttggtagctgaggc

SEQ ID NO: 221545 - DNA, 4230 bp, Zea Mays
cattattaccaaaggaacagacatgtgacaatatgatagcttgttttggttttacatggcatggtaagtcaatttcctcctgcaacagtgaaaatgaagttgccattttctataaagccttggactggatctgaggataacattggaaagcttttgatggtgtggaaattcttaattactttcactgatgttctgggtctttgtccagttacacttgatgagtttgttcagtctcttcatgattatgattcaaggcttttgggagaactgcatgttgctctgttgaaatccattatcaaggatattgaggatgttgctagaactccatcaattgcactaggggtgaatccaggaggtggtcatccacaaattgttgaaggggcatattcctggggattcgatatacgtagctggcaacgtcatcttaatcttcttacatggcctgagatattaagacagtttgctttatctgctggttctggaccccaattaaagaaaaggactgtggaagattctcactatcattatgataatgagggtcatgatggtgagaatgttatattggcacttcgaaatggtacagcagcagtgaatgctgttgctaagatgaaggaaagaggttacaccaatcgccgtagatcccgccaccgtctgactcctggaactgtgaaatttgccgctttccatgtgctctcgcttgaaggaagtaatggtctcacaatattggatgtagcagaaaaaattcagaaatctggattgagagacctcacaacaagcaagacacctgaggcatccatagctgctgctttgtctagggatgcaaaactttttgagagaactgctccttcaacatattgtttgaagtcgccttatagaaaagatccagctgattctgaggccgtgttgtcagcagcgcgtgaaaaaattagggcctttcagaatgtgctttctgactctgaagctgaaaaggaggcagatgaagctgagagggatgatgattctgactgtgatgatgctgatgatgaccctgatggtgatgatgtgaatattgaggtggaagaagacaaggatcctcttcttgccgtcaaggcacaagacgaagtaccgagtacaactacagttattggcataaagaccaagttagatagtgtaggtaatgcattgaactcatcaagtagttttactaaatcagcaaaaggtgctcctctcccttatttaggcaggtccagtgcagcagatacttctaatgattcacctcttggaggcccatcagctaatcatgaagtaacccctggcgattctgaaaatactcaaattgatgaaagcaatcaaattgagccttgggtatgtgcactagcagaaggagactactgcgatcttagtgttgaagaacgccttaacgcactggttgctcttgttggtgttgccactgaagggaactctattcgtggtgtacttgaggaacgtttggaattagcaaatgccttaaagaagcaaatgtgggcagaagtgcaacttgacaagaggcgtttcaaggaagaatttgctagcagagtacaatataactctggcatgagttttaagcctgatatatatcaagaaaacaacatgacagagattacttcaactcgagcctgtgatgcttacaaagaaaacgatggacatgttgggacaatcaacaattgtgagatgcttgatcagcatagtcagggtaatgctggtggtataacttatgatagaaatgtcgtaggccaggaaatccatgcaaccccagatacttcgtatgttcagcagtatgcttatgctgataaaacacgatctcagttgaaatcgtacattggtcaccgggcagagcagctctatgtttacagatccctgcccctaggtcaggatcggaggcgaaacaggtattggcagtttacaacttcagcatcaccaaatgaccctggctcaggaagaatcttttttgaatcggaagatggatgttggagagttatcgactcagaggattcctttgattctttagtggctgcccttgatacacgtggcacccgggaagcacagctgcgttcaatgttgcaaatgatcgagacaacctttaaggaagctattaaaaggagaagtgcaagtatagaattatctgctacagtgtatccaaagaatggagctactgacatgataagggcaaattatcatagagaggttggaagctcaagcagtactccttttaatgatacatctgatagtgtaacagcatattctgattcttttaaagtagagcttgggcgtaatgattttgagaaggcagctatatcaaaaagggcagatatatttttaaaatggatgtggagggaatgctacaatcaggaagagacatgtgccatgagatacggcaagaaaagatgctctgaattgttgcattcttgtaattgctgctatcagatttacctagccgaagaaagacactgttcttcttgccataagactttcaaatccatttacaatttttctgatcatacaacacaatgcgaagagaaatggagaactgacccttactggaagatgcaaatcgctgattattctgttccaataggaatggtattactcaagcttcagttagttttgattgaggcatatataccatcagaagcacttcaaccattttggactgatgtgtatcggaaatcttggagtgtgaagctttatgctaccaaatctattgctgagacattccagcttttgactgttctggaaggtgcaataataccagatcgcctctcttctgattttgaaacaacaagcgaatgtctaaactcacaggttatcgcaccccaaaatcctgtgttaccagctggatttgcttctgtccttccatgggttcctgacactacttctgctgttatgctccgagtgttagaccttgactcagctattttgtatgtgcaaaatcaaaagatggagagggatgatggaggttttatgaaatttccatcaaggtatacagttgttaagagcaaacaagaaacaattccactcgaaccaactggtatggatttgtatgatggaaggtggcttcctggtagtggccgtaggggacgtggccgtggaagtagaggaggtagcaggggaggcaggggccgaagtcgaggtggaaggatcccaagaggtgttagcagctcatcaaggatcgagttcaaggatggcattgctgcttctggtagagcgccaaggaagaatgcacgtcgaggtcgaggtcgaggtcgaggtcgtgggcgtcgaactgtcagacctcggcagccatctgtgggcagaggcagatcaattccaaaggaaaatttgatgggaagctttagcatgcttaccagctcaaaggctgccgacattgaggagtctccacgaagctctggcgcagatgagtggggcttggagaccagaatgacatacactgagcgtgacgagaacagttctggatcacgctatgaagataacgaggaaaacggccagcccatggacgaggattatgaagagcaggttccagattactcaatagactattctagtgggtcgaggcaccatgaaatgatgtccatgatggatcacgagactgacgaggaagatgaagatgctgaaggtgatgagaatgtggaagaagatgatgcagaccacgcagttgacgatgccgatgttgagatggacgaaggtgatgatgaaattggtgatgacggagaggatggcggcgttggcggggagatgactccggatgaggatccagatgctacttcatattcatctgactacagcgaataagaaagcagaaataagtgaccttatcctagagatcctccctcagcgtccctttgtgaaccaaaaggaaaagctaaggagcgatagatgtgcatactgtttttttaggcaccgcaggttctaatagatttcctgacgtatgcctactcattcgatgagtggttgtatcttgctaggtatgtgcatgtcactgtagaattccccgagctatacagtgtctaaggagagatgatatcatatcgcaatttgctaatttggttcccatgcgtcatcccgatcctaatctgatccttaaatagagcccattgtccccttaagtagaagtgatcttttatcatgagttttaccatctcttaaaagtaaatatgaaattggagtctgctttctaaccgagaacatggcaggcgcatcgtaggcatcctcgtt

SEQ ID NO: 221546 - DNA, 1142 bp, Zea Mays
ttggctcacacagacaagtgacaactgactatagtactatctcaaggacgcggtgctggacggcggcatcccgttcaacaaggcgtacgggatgacggcgttcgagtaccacggcacggactcgcgcttcaaccgcgtgttcaacgagggcatgaagaaccactcggtgatcatcaccaagaagctgctggacttctacacgggcttcgagggcgtgtcgacgctggtggacgtgggcggcggcgtgggcgccacgctgcacgccatcacgtcccgccacccgcacatctccggggtcaacttcgacctgccgcacgtcatctccgaggcgccgccgttccccggcgtgcgccacgtgggcggggacatgttcgcgtccgtgcccgccggcgacgccatcctcatgaagtggatcctccacgactggagcgacgcgcactgcgccacgctgctcaagaactgctacgacgcgctgccggaaaatggcaaggtcatcgtcgtcgagtgcgtgctgccggtcaacacggaggccacccccaaggcgcagggcgtcttccacgtcgacatgatcatgctcgcgcacaaccccggcggcaaggagcggtacgagcgcgagttccgcgagctcgcaaagggcgccggcttctccgggttcaaggccacctacatctacgccaacgcctgggccatcgagttcatcaagtgaaccaccgtcgccgcgatgagatggcatggctgccacatgctttgcttgcttggtcctcgtatcgtacgtcgccgtcgtcgtcttcttctggttattgcgctgctacctcgctgctctcgcgtatgcatgtacttttgcttaattttctttcttcatatcatgcactctggctggcctagactgcccccgatccatggtggccggtacgtcttgtcgagctcttgcatgtcgtggattctaaattcttcttctgcgtcgaattgtctctgccatgtgcgagtaataacaatcaaggttatacttacgatacaattacatggcggtttaattgctctctattaatttggtgaatcgaatcgattctactgaattcttctctgtcgtttaatgaaatttcctttgtcttttggattatataatataacacagacactcg

SEQ ID NO: 221547 - DNA, 1191 bp, Zea Mays
caaccacgagggcggcaaggaaaaccatccgtgctggtctggactttttgccaaactccattcagccattcgccgactgaaggtactatctcaaggacgcggtgctggacggcggcatcccgttcaacaaggcgtacgggatgacggcgttcgagtaccacggcacggactcgcgcttcaaccgcgtgttcaacgagggcatgaagaaccactcggtgatcatcaccaagaagctgctggacttctacacgggcttcgagggcgtgtcgacgctggtggacgtgggcggcggcgtgggcgccacgctgcacgccatcacgtcccgccacccgcacatctccggggtcaacttcgacctgccgcacgtcatctccgaggcgccgccgttccccggcgtgcgccacgtgggcggggacatgttcgcgtccgtgcccgccggcgacgccatcctcatgaagtggatcctccacgactggagcgacgcgcactgcgccacgctgctcaagaactgctacgacgcgctgccggaaaatggcaaggtcatcgtcgtcgagtgcgtgctgccggtcaacacggaggccacccccaaggcgcagggcgtcttccacgtcgacatgatcatgctcgcgcacaaccccggcggcaaggagcggtacgagcgcgagttccgcgagctcgcaaagggcgccggcttctccgggttcaaggccacctacatctacgccaacgcctgggccatcgagttcatcaagtgaaccaccgtcgccgcgatgagatggcatggctgccacatgctttgcttgcttggtcctcgtatcgtacgtcgccgtcgtcgtcttcttctggttattgcgctgctacctcgctgctctcgcgtatgcatgtacttttgcttaattttctttcttcatatcatgcactctggctggcctagactgcccccgatccatggtggccggtacgtcttgtcgagctcttgcatgtcgtggattctaaattcttcttctgcgtcgaattgtctctgccatgtgcgagtaataacaatcaaggttatacttacgatacaattacatggcggtttaattgctctctattaatttggtgaatcgaatcgattctactgaattcttctctgtcgtttaatgaaatttcctttgtcttttggattatataatataacacagacactcg

SEQ ID NO: 221548 - DNA, 2318 bp, Zea Mays
tgcagataagtccctgatccggtccgatgatcccgagtggttcttcttcgcccccaaggaccgcaagtaccccaacggtagcaggtctaacagggccaccgaggcgggatactggaaggctactggcaaggacaggataatcaagtccaagggcgacaagcgcaagcagcataccatcggtatgaagaagaccctcgtcttccaccgcggtcgtgcccccaagggcgagcgcacggggtggattatgcacgagtaccgcaccaccgagcctgagttcgagtccggcgagcagggtggttatgttctttatcgcctcttccgtaagcaagaggagaaaactgagcgctccagcccagaggaagtggatagaagtggctactcacctactccttctcgttcttcacctgacaacctagaggcgaatgaggaagctaatacaccattaaataaggaatctccagaatctgctctgcatgaaagcccgattgagctgccaaaatctgttgaaaccaatggtggttcaatgacaaggtggctggcggacagaaatgataacttgatggttactgcaccagatgtttcccatatacctttccacggacatgctgctggtgtagctaaggttgatccttctgttggtgcttcaggccacttagttaatccccacaatggaaatgatgattataacaaatttgtgtctgatttcactcccattctaccacttgaaaatgcattcttcactgatatacaacaaggagcttttggttttgatggcatcatgaatcctcttgatccccttgatgctttcttgaatcaaacacttgttgatcctgatgaacattcatcaacaacatcaaaagttcagtatgattctgacattccaacagaatttgagaaccattggaatatgaaggttgagcctcaagatgatcaatgctggtgggcaaacataggatttgagccagacgaaccaaatcctctgcttccttgtgacaccactgaccaagacatactttctgttgactctggtgctgattccttcaatgagcttttcaatagtatggaagagactggaattattgttaggcctcaacagttggactccactgtgcaaccaaaccatgtgttcgctagccagggcaatgcagcacggaggctgcggctacaggttgagtctagggagatcataactaaagatgagagtgaagatgaagtatcatgtgttctaactccagactgtttgaacgattctgttgaggagtccactgcagagaaggatgtggcttctgatggggatgaggctgagtcaacagggattgttattagaagccatcaccctgctccaagatcaagctcagagagttcattcactcaacagggaactgctatgcaaaggctgcggctacagtcaggccttaacaaaggccagcgtcctagtactgatgattcatcaagctgcattatagacgaaccaggaagtcagcacaaagcagaaaaagcagagattgaagaggatgcgagtacaaacctcgctggaagtgctgatgatctacctggtaatatccatgatgatgagcaaaagaacatccctgaacatgaagccaaatctgttctgaggttgcggaagacttctgaggaaggcaacaaggatgtcaagcaggagagttgtctcgagccacacgtgagagcaccaatgcagaagggaggcttccaatcatacatcatctggctggttcttccggtggctctgctcctgcttctctgtgttgggacatatggatgggtatgaaatctatcctggtgcggtgcaaggcatgacattttgcgcacatgggttcctggcgtcaacctggtgtgcggtcttctgtacataacctgtggcatcctttcaacagccgtaccctgcagtaagacatcccggcattgccaaggcagctgaaaaataaataaaaaaacaagtggtagaaatgacaaggtggaaaagagcgaggtgtgttattgttggttttagtacatcgtagtcttcttttgctgttgttgtagatgtcttgctaatgttgtcgctgttgtgtagttgcaattcaagcccagggctgccagttttatttcctaatgtaatgtagcaagagcgagaccctgttagacgggtgcgctgaaattctgaacctctgtaatatctgatgttcttgtggatacctgtttcagaattttcggttcctgaacccagttactgatggcttgttgatctgttggcgtgttcgaattcgtttggacatgccacagcatggtctgaggggatacaaggactgaatgcgttg

SEQ ID NO: 221549 - DNA, 2315 bp, Zea Mays
tgcagataagtccctgatccggtccgatgatcccgagtggttcttcttcgcccccaaggaccgcaagtaccccaacggtagcaggtctaacagggccaccgaggcgggatactggaaggctactggcaaggacaggataatcaagtccaagggcgacaagcgcaagcagcataccatcggtatgaagaagaccctcgtcttccaccgcggtcgtgcccccaagggcgagcgcacggggtggattatgcacgagtaccgcaccaccgagcctgagttcgagtccggcgagcagggtggttatgttctttatcgcctcttccgtaagcaagaggagaaaactgagcgctccagcccagaggaagtggatagaagtggctactcacctactccttctcgttcttcacctgacaacctagaggcgaatgaggaagctaatacaccattaaataaggaatctccagaatctgctctgcatgaaagcccgattgagctgccaaaatctgttgaaaccaatggtggttcaatgacaaggtggctggcggacagaaatgataacttgatggttactgcaccagatgtttcccatatacctttccacggacatgctgctggtgtagctaaggttgatccttctgttggtgcttcaggccacttagttaatccccacaatggaaatgatgattataacaaatttgtgtctgatttcactcccattctaccacttgaaaatgcattcttcactgatatacaacaaggagcttttggttttgatggcatcatgaatcctcttgatccccttgatgctttcttgaatcaaacacttgttgatcctgatgaacattcatcaacaacatcaaaagttcagtatgattctgacattccaacagaatttgagaaccattggaatatgaaggttgagcctcaagatgatcaatgctggtgggcaaacataggatttgagccagacgaaccaaatcctctgcttccttgtgacaccactgaccaagacatactttctgttgactctggtgctgattccttcaatgagcttttcaatagtatggaagagactggaattattgttaggcctcaacagttggactccactgtgcaaccaaaccatgtgttcgctagccagggcaatgcagcacggaggctgcggctacaggttgagtctagggagatcataactaaagatgagagtgaagatgaagtatcatgtgttctaactccagactgtttgaacgattctgttgaggagtccactgcagagaaggatgtggcttctgatggggatgaggctgagtcaacagggattgttattagaagccatcaccctgctccaagatcaagctcagagagttcattcactcaacagggaactgctatgcaaaggctgcggctacagtcaggccttaacaaaggccagcgtcctagtactgatgattcatcaagctgcattatagacgaaccaggaagtcagcacaaagcagaaaaagcagagattgaagaggatgcgagtacaaacctcgctggaagtgctgatgatctacctggtaatatccatgatgatgagcaaaagaacatccctgaacatgccaaatctgttctgaggttgcggaagacttctgaggaaggcaacaaggatgtcaagcaggagagttgtctcgagccacacgtgagagcaccaatgcagaagggaggcttccaatcatacatcatctggctggttcttccggtggctctgctcctgcttctctgtgttgggacatatggatgggtatgaaatctatcctggtgcggtgcaaggcatgacattttgcgcacatgggttcctggcgtcaacctggtgtgcggtcttctgtacataacctgtggcatcctttcaacagccgtaccctgcagtaagacatcccggcattgccaaggcagctgaaaaataaataaaaaaacaagtggtagaaatgacaaggtggaaaagagcgaggtgtgttattgttggttttagtacatcgtagtcttcttttgctgttgttgtagatgtcttgctaatgttgtcgctgttgtgtagttgcaattcaagcccagggctgccagttttatttcctaatgtaatgtagcaagagcgagaccctgttagacgggtgcgctgaaattctgaacctctgtaatatctgatgttcttgtggatacctgtttcagaattttcggttcctgaacccagttactgatggcttgttgatctgttggcgtgttcgaattcgtttggacatgccacagcatggtctgaggggatacaaggactgaatgcgttg

SEQ ID NO: 221550 - DNA, 2255 bp, Zea Mays
tgcagataagtccctgatccggtccgatgatcccgagtggttcttcttcgcccccaaggaccgcaagtaccccaacggtagcaggtctaacagggccaccgaggcgggatactggaaggctactggcaaggacaggataatcaagtccaagggcgacaagcgcaagcagcataccatcggtatgaagaagaccctcgtcttccaccgcggtcgtgcccccaagggcgagcgcacggggtggattatgcacgagtaccgcaccaccgagcctgagttcgagtccggcgagcagggtggttatgttctttatcgcctcttccgtaagcaagaggagaaaactgagcgctccagcccagaggaagtggatagaagtggctactcacctactccttctcgttcttcacctgacaacctagaggcgaatgaggaagctaatacaccattaaataaggaatctccagaatctgctctgcatgaaagcccgattgagctgccaaaatctgttgaaaccaatggtggttcaatgacaaggtggctggcggacagaaatgataacttgatggttactgcaccagatgtttcccatatacctttccacggacatgctgctggtgtagctaaggttgatccttctgttggtgcttcaggccacttagttaatccccacaatggaaatgatgattataacaaatttgtgtctgatttcactcccattctaccacttgaaaatgcattcttcactgatatacaacaaggagcttttggttttgatggcatcatgaatcctcttgatccccttgatgctttcttgaatcaaacacttgttgatcctgatgaacattcatcaacaacatcaaaagttcagtatgattctgacattccaacagaatttgagaaccattggaatatgaaggttgagcctcaagatgatcaatgctggtgggcaaacataggatttgagccagacgaaccaaatcctctgcttccttgtgacaccactgaccaagacatactttctgttgactctggtgctgattccttcaatgagcttttcaatagtatggaagagactggaattattgttaggcctcaacagttggactccactgtgcaaccaaaccatgtgttcgctagccagggcaatgcagcacggaggctgcggctacaggttgagtctagggagatcataactaaagatgagagtgaagatgaagtatcatgtgttctaactccagactgtttgaacgattctgttgaggagtccactgcagagaaggatgtggcttctgatggggatgaggctgagtcaacagggattgttattagaagccatcaccctgctccaagatcaagctcagagagttcattcactcaacagggaactgctatgcaaaggctgcggctacagtcaggccttaacaaaggccagcgtcctagtactgatgattcatcaagctgcattatagacgaaccaggaagtcagcacaaagcagaaaaagcagagattgaagaggatgcgagtacaaacctcgctggaagtgctgatgatctacctggtaatatccatgatgatgagcaaaagaacatccctgaacatggtgctgaaatgacttctccagaagccaaatctgttctgaggttgcggaagacttctgaggaaggcaacaaggatgtcaagcaggagagttgtctcgagccacacgtgagagcaccaatgcagaagggaggcttccaatcatacatcatctggctggttcttccggtggctctgctcctgcttctctgtgttgggacatatggatgggtatgaaatctatcctggtgcggtgcaaggcatgacattttgcgcacatgggttcctggcgtcaacctggtgtgcggtcttctgtacataacctgtggcatcctttcaacagccgtaccctgcagtaagacatcccggcattgccaaggcagctgaaaaataaataaaaaaacaagtggtagaaatgacaaggtggaaaagagcgagttgcaattcaagcccagggctgccagttttatttcctaatgtaatgtagcaagagcgagaccctgttagacgggtgcgctgaaattctgaacctctgtaatatctgatgttcttgtggatacctgtttcagaattttcggttcctgaacccagttactgatggcttgttgatctgttggcgtgttcgaattcgtttggacatgccacagcatggtctgaggggatacaaggactgaatgcgttg

SEQ ID NO: 221551 - DNA, 4414 bp, Zea Mays
catagccaagcacccgactgatacccaagggctcaatcgctcacctgataaagaaagacatgagaaatgttcagttctacattcttaacaaacaatggatgaattaacaatcaatgacaaattattgcgcaacacagtttgctatcaactagcaaaatcagatttgaataatgagtgccctactacttggcctagtttctcaaatttccattggggccgctttggaactttggaacgcaggaattttctaggaatatcacaggaatcgattcattttcacaggaaaaaagtaggaaataggaacgtttcctctgttccaaaagagacctaaatgagttcatcttcttggacaacaagtgtaattcctacttgttgtaagacctccattaaacagatagacaacaagtgtaattccttcttgttgtaagacctccattaaacagatattaacccttgtgctatgggccagcttcagctccagatccatgtaggatttggagtttgtagatcaaaatggttcaaccatgtgtttaatccaaaacaaaaacaaaattgattagccataccatcaatgtgctgcagcactagcactttaaatttagatctacaacaaaaaaattatcaaagaaatgagcgcctgcttcaccaaagaacctgtgacatgtcatatgtgaatatgtgagcagtgtttgtcaaaataggcaacaggaatcacatgcagaatgcaatgtagagggccttcaagacccagaggatgggccccaagatccagaagtagtcgacacctaggacgaaattgaacccacctaggttgatgctgaagaagctgatgatgaactcccgatccatatgcatggacacgtgttgcgtgccacgcccttgcagggaagatggtcaccattggccaccataacccgcatgttggtgttatccgccatcaccagctcgatgcagcatgaccctggtattgatgaacttgtgggtcgagccgctgtctaggagggcaaggagctggtgaccatgatgtaggcgtcaatgtgcatggtgtccttggtgcatatgctagtgatggtgtggagggagataattggggcatcaggcccatccttaagggccatctcggtgccctcgtccctgggtgcttcatcgagcaagtagtcagcaaactcaagatagaacaggtgttggcactgggggggggggggggggggggggaggggagcacacgcacgtcgcagttgtaatacaacccttggcaacggcgctcgaccatctcagtcggtgtgaggtgatagaactggcgtgggggagtagacaacaccgctattggatgcggtgcgggcagcacaagtgcgaccacgcccataccagttacgcgcaacgaaacaggtagcgccaacggcaggtgatagggaggccgagcggcccaatgtatagaacttggcatggtggttgcggtggtaacctcataggcccacgtcgggtgcatgtctgtccacatgtcttgtggttcccggagcacgatgtcgtcccaaatgtgctctggaaaacccccgtgaccttagtaaccaggttcccggatcgaggaacgggaacgtggtacacggtgcgctactaaaactaggttttaacactacgggaacgagattgttcccacgttcccggaacggaacgaggaacatggccacgttcccagttactaagcccgtgacaaagacgacgatcttctggactgtcagaagattcggtggagaagccaggcctgctgaagcgaggaatgcccaaactggcggacgtgccaacatcgcctacaatggagggtgtccgctcatatgagaaaagctacccttgcaaaaacgttggcaacggggatggcgagtgaaagttaatcagatggatggaaagaggggcgaacggggcagcagtggctattgcagtgtgcaagagggtagcgagcggcacgacgggcagggtggatgaggggaagttggtctaatagatgcttggtgtggcacagcaggttcaggaaacactctcggtattcctcgacggtggtgcgaaaatggaggcatgccaatgcgcccagaggattgtgttgtaccgcagagtcgaagtgttgtggcacaactccttgaagtgaggccaggagatgggtagctccaaattcagctcgagcatatagtaccaggtctgggcagcgccaaccatgtggtatgacgcaggccaaactttatctccctccaatgtgcgttggctgcggaagaactggtcacatcgattgagccagccgaaggggtcgtctttgccatcgaaggtggggaatgatagtttatggaagcgagtgactccatgtgtatgggatggtgcttccagaaatggccccatgcttgtggagcagtatgggcctggaataggtgaaggtgaatgtgggaaggctatctggtggatgggaacggaaggtgcttgtgtggtggcagaggctggcaatggcagcgtggtgaggatctttgtggcggtggtgatggggacggaggtggttttgatgcactctatgcttggcggtagcgagggtggcgctgcaattgagtttgtgatgagggaagggatgtcgtcgtagccggacattccataataaaactatgacaacagcctattttcgacggcagccatgcgtgagggcaaggatgtcatctgggtggcgaagctggtgagctgacgctggagatccacatcggggtatccattgcctggtgttgggcgacggcgtttgccaccgatgtagcatcatcgccgctatttgaacccggcatctctgataccaaattggtagaactactacttctcaggttgtaggagtgttggacagagggcctaggatggagcttcttgcaccctatggtgattggttggagaagagggatggagactcagggagcacaacaacaggtttgttgccttgcttgccttttcctttatttctcttgtctatatatataggtaatacaataatctggataaccatgttgaatctatcctaatttggtaacaaaccaaatcctaacaactggttatcctaatcctaacagaacgatatcctaacaaattgagcaatcctaacaaactgagcaactcttaacaaatggatacctaaggaaatcttaactgagcaggccttgatctaatcctgctgaactcgcctcctatgatagctaatcccggtcataacatcaatgttttcaaattatctaatcgaccatagtcaccatgggactgactagatggctagtcacgattattcatcgaccatagtcggtcctggtcacccatatattcttgtatatacctggacaaatatactatataaaccaactaaccaagcatcaagacaagttgctgaaatagataaccattatgaggcaccactaaattgagaggttcggttgctggtcagttgctcctttgccacgagaagagaagctttcctcatcctactcgttgtcccctttgtgatcaggcaccgaaacaataaatcactcgctagtcaactgctcctttgcccgtcatttctaattttcactgttgtattcagttggccttcagcgaaagggcttctagcctagtgcttaaggcttctgagtagcacctccaagacctgggttcgattcctctcgagggcgaattttctggcttggttaaaaaaaatccccttgttgtgcatcatccgctctcgggttacgatgtcctgtgtgacaccctccggttgggctgttgcagagtggacaattgacgtcggcccgttagtgatgggaggccagggttcagggattttctcggtcaggaccaatgttttggtctcttcttaatataataccaggagggggcggtcattccctccccaacagagttcgttggccttcaactcctgtcaccgcagcctacatatctttcttctaacggatggtggtcgatggcgagttccagaattgatgggaaggtgaaggaccacagcctacagctcagttcacattctcacgcccagtcatccaacacttgataacgcttcgattaatcatgactaattgtatgaattgattttggtcagtctagtcgagtcgtagtgcctaatcaagggccgaggaccgataatcgtgatcacttgataacactgggagagagtcggttcaatgtcacggcatggataagagctataaggctcaagggccaaggctgttttaaacacttttgatccatttttcacaggttttttaattggcaaatctacttccaactcaaagcatgtcaaaacaggggcaaacatgcaaatctgggaaaaggagggcaaatcagaagttagaattaatgtaggggcagccatacattagtccaataaaagaaatgccagtataaattaaat

SEQ ID NO: 221552 - DNA, 1571 bp, Zea Mays
cgaccccgtctctgctcttctctctcttcttctccgatccgcagcccaatcacgacgaaaagagaagagaagcctccgtccctgcctccccgctctgctcctcctcctcctcctcctccctatttaacccgtctccaccggccattgctctctcccttcccgaagtcgccggagccacacgcattcccctgcctcgcacttccccctcctatttaccgcccgcgtcgccccccgccgcacgccttcccacccccgcgcctgcctctgcctgcctgctccccgacgccggggggccccacaacgatccggccccggccccgcgcggtcacagcaagccgggacatggcgcgcggcggcatcgcccgcctactcgccacgctcctcctcttcctcctgctcgccacgcccctcgcagacggagcttccgaggcagaggcgggcctcgcgcagggcgcgtccgaggcggcggcgccggacgcgggcgcggacgcgcagcagcagcacctcctgccgcggcccctcgtcatcgagctcccgtcgtcgcgggccgaggacgaggacgagcccggcgccgacgccgtgccgccggacgtgcgctgcgccagctggcggctggcggcggaggccaacaacctcgcgccgtggagggcggtgccgccggagtgcgcgccgcacgtgcgggactacgtcaccggcgtcgcctaccgctccgacctcgacctcgtggcgcgggagtccgccgcctacgcgcgcgccgccgcgccgctcggcgccgacgggcgcgacgcctgggtcttcgacgtcgacgagaccctgctctccaacctcccgtactacgccgagcacggctacggggctgagttgttcgaccaccacaagtttgacgagtgggtggagaggggcgaggcggccgccatcccctcgagcttgaagctgtacaatgaggttcgcgagctggggttcaagaccttcctgctcacgggcagaagcgaggggcaccgaggcgtcacggtggacaacctcaacaaacaggggttccatgactgggaaaagctcgtactcaggtgaccgcaagaaaacagcgacagtctacaaatcagaaaagaggaaggagatggaacaagagggttacaggatcctaggcaactctggcgaccaatggagcgacctgctggggtcttccatgggtgcccgctctttcaagctccctaacccaatgtattatatcccgtgacagaaactgggaaacaaggccgggtgaaaggtgctgcgtttattggatgcacaggcccggtcgaaaacagaaatcatttcgcaatggaatttaaaactgtacaaatgcttctttcactaacttggtgtacattactcgactgcatgtgcagttacttcaactatgtaagagtgaaaacgggtccggggatcaatgttcctcgatgcaactgtcaaacttaattactgcagcgcgtatattcttagaatttttttatagaataggttgaaaatcaaactacgttctagctgacgagcatcagcaagcgatcgatagaatggaatcaccttaagtagag

SEQ ID NO: 221553 - DNA, 724 bp, Zea Mays
cggccactcaggtgaagttctattttcctagatctactacctttgtgctcttgattttgatattttgtattttatttatacgatttgaaggtcgttgaggaaccggtgacgtcgttgaggagacggtcaagtatccctccatctccatggatcttgatcaggacgtcgaggcggcggagcgtgagcttgaggatcacaacgagcgtttggatgagttggccttgtttgggattggcactgccactagcagcaatgttgatcccgtagatgttgatgcggcgcctgtgactgcctcctcgagccccactgccactggtggtagcattgcccgtgacaaccggccgaggaagaggctagcgacatctagggtttgggctgacttcgaggaagtaactgggatcgacgacaaagggtgcttgaggagcgacgacgacgacttacaacagatatggttgaggtcttatcttgtattaaggattgggagctggcagataagcatatgcagaatactgtggagaaggagaccaagaaactcgaatcaacctttgagaacatgtaccttgatgttgaagatagttcaaacaagagggagaaagacaaagatggggaaactggtccctcaatttaggagttggttggactcttcttagtttacttctgtctgctatgttttacttttctactgatgtaatgaacttaatgaacacttgaacaattaggagct

SEQ ID NO: 221554 - DNA, 2606 bp, Zea Mays
ctagaaccaagccatgcgacgggacgacgccggcggaggaaccgggttccacgacttgtttgactcggtgcgccgctccatctccttccggcccaccgcccccgccccggaagcccccgcgggcccattcggcgcgggggcaggggggatcggcgtgcggatcagctcttgcctccggaagtcgcgggggatggggctgctaggtctcatcactaaaagcccctcgccgccgcgccgcatgctaccgccgatgcccgatcagtcggacggcggcagcggagggggtggggccaacggcggagtcggagaggagaacccactgatccggtggcgtaagggggagctcatcggggccggtgcgttcgggcaggtctaccttgggatgaacctggactcgggcgagctcctcgctgtcaaacaggttttgatcggcacgagcaacgcgacacgggagaaggctcaagctcatattaaagagctcgaagaagaagtgaagctactcaagaacctgtctcaccccaacattgttaggtaccttgggactgttcgtgaggaagacacactaaacattttgctggaatttgtccctggagggtctattcagtcacttttggggaagcttggttcattcccagagcctgtcattaagaaatacactaagcaaattttgcaaggattggagtatctgcatagcaatgcaataatacatagagatataaagggtgcaaacattcttgtagataataaagggtgcatcaaacttgctgattttggggcatctaagcaagtggcaaagttgccaaaacaatgaaaggcacaccgtattggatggcacctgaagtcattgttgggagtgggcatagcttctctgcggatatatggagtgtagggtgcacagtcattgaaatggccacgggcaaaccaccatggagccagcagtatcaagaggttgctcttctttttcatgttggaaccacaaagtcgcatccacctatacctgaacatctatcgcaagaggccaaagattttcttctgaagtgcctgcagaaggaaccagagctgaggtctactgccccagacttattaaagcatccttttgtcactggagaattagatgatctgcagccacgcaatcatgctgcacacaaggactgttttaatgaaattcatgcacatgatatgccaaatggcttgggtttgaatcattcttccaactggtcgaccatgaactccaatagatcatcaaaaatcaagcccttatgggaggggagctgtgacgatgttgacatgtgtgagtttgcagacaaggatgaatatgcaccagtaggatctagctataatcctatgtcagaaccatttgataactgggaaaacaagtttgacacaagcccagagcaaagttctcatgaaccaatggaatttggtgaattggccaaacatgctgaaagcagcataactgagaatgattttacgtgtcctgttgagggaagttgtgaagatgatgtacttacagagtcaaaaataaaggcatttcttgaggagaaggctcttgacctgaaaaagctacaaacacctttgtatgaggagttctacaacactgtgcacggagggagttgccaaacttccaagggaaaattcccaatcagtccaaaattgccccctcgaggaaagtcacctccaagtaagacgaggggaggtgcatgtgacactttgaataacacagctcccgaaagctgcagcaagcaatttcctagaagcagtgtggtggagagcagccgaattttgagagaaattgcttctcctcaacttaatgagtttgctgataaactccatcttgatgcccaagatagcccaagcatcagcttcaccgaaaggcagaggaagtggaaagaagagttggaccaggaacttgagagggagagagtgatgagattagctggctgtggtaaaactccatctccaaatagaggttccaacgtgaaaaaggagtgtcatgctgaccattgaacagacagcagcattcgtcgtctctttatatcatcccacagaagacacaacaaatgatagtaaagtacacagtgtgccagagattggtggcaacagcagtacagcctgtgccaccttatcatttgcggtgttagccaagctatgatcgcagaaccgtcctgtacaaaatgacagatttacgttgaagtggatcggtacagggggcactcatcacccattcaccctcaaatcaggatcattgtcgctgctgcctagaaggacgtcatgctgacacttccctgattttaaggccgcatttatcattctttttgatgcagtgctatacgtcgggcttcggttatgtatggtttatgttgagaaaacggtcttgccaaaattgtgtttgtaagcccagattggcgtggggcttggttttgtatggagcttgtttgcgaaagtgtgtaataagatagtgatgcgagatacgggtcattctgcatttctgcttgcagaatgaatctgagcttttctgaagctacaactgactgtaattaataatttcaatcaaatcgtgagtcctgtgcctgtatgttacacccggatttaagagataaaaccag

SEQ ID NO: 221555 - DNA, 2512 bp, Zea Mays
ccccattcgatccagcttgacgccgctccccgacgacgtggacgcccgtggagccctagaaccaagccatgcgacgggacgacgccggcggaggaaccgggttccacgacttgtttgactcggtgcgccgctccatctccttccggcccaccgcccccgccccggaagcccccgcgggcccattcggcgcgggggcaggggggatcggcgtgcggatcagctcttgcctccggaagtcgcgggggatggggctgctaggtctcatcactaaaagcccctcgccgccgcgccgcatgctaccgccgatgcccgatcagtcggacggcggcagcggagggggtggggccaacggcggagtcggagaggagaacccactgatccggtggcgtaagggggagctcatcggggccggtgcgttcgggcaggtctaccttgggatgaacctggactcgggcgagctcctcgctgtcaaacaggttttgatcggcacgagcaacgcgacacgggagaaggctcaagctcatattaaagagctcgaagaagaagtgaagctactcaagaacctgtctcaccccaacattgttaggtaccttgggactgttcgtgaggaagacacactaaacattttgctggaatttgtccctggagggtctattcagtcacttttggggaagcttggttcattcccagagcctgtcattaagaaatacactaagcaaattttgcaaggattggagtatctgcatagcaatgcaataatacatagagatataaagggtgcaaacattcttgtagataataaagggtgcatcaaacttgctgattttggggcatctaagcaagtggcaaagttggttgctcttctttttcatgttggaaccacaaagtcgcatccacctatacctgaacatctatcgcaagaggccaaagattttcttctgaagtgcctgcagaaggaaccagagctgaggtctactgccccagacttattaaagcatccttttgtcactggagaattagatgatctgcagccacgcaatcatgctgcacacaaggactgttttaatgaaattcatgcacatgatatgccaaatggcttgggtttgaatcattcttccaactggtcgaccatgaactccaatagatcatcaaaaatcaagcccttatgggaggggagctgtgacgatgttgacatgtgtgagtttgcagacaaggatgaatatgcaccagtaggatctagctataatcctatgtcagaaccatttgataactgggaaaacaagtttgacacaagcccagagcaaagttctcatgaaccaatggaatttggtgaattggccaaacatgctgaaagcagcataactgagaatgattttacgtgtcctgttgagggaagttgtgaagatgatgtacttacagagtcaaaaataaaggcatttcttgaggagaaggctcttgacctgaaaaagctacaaacacctttgtatgaggagttctacaacactgtgcacggagggagttgccaaacttccaagggaaaattcccaatcagtccaaaattgccccctcgaggaaagtcacctccaagtaagacgaggggaggtgcatgtgacactttgaataacacagctcccgaaagctgcagcaagcaatttcctagaagcagtgtggtggagagcagccgaattttgagagaaattgcttctcctcaacttaatgagtttgctgataaactccatcttgatgcccaagatagcccaagcatcagcttcaccgaaaggcagaggaagtggaaagaagagttggaccaggaacttgagagggagagagtgatgagattagctggctgtggtaaaactccatctccaaatagaggttccaacgtgaaaaaggagtgtcatgctgaccattgaacagacagcagcattcgtcgtctctttatatcatcccacagaagacacaacaaatgatagtaaagtacacagtgtgccagagattggtggcaacagcagtacagcctgtgccaccttatcatttgcggtgttagccaagctatgatcgcagaaccgtcctgtacaaaatgacagatttacgttgaagtggatcggtacagggggcactcatcacccattcaccctcaaatcaggatcattgtcgctgctgcctagaaggacgtcatgctgacacttccctgattttaaggccgcatttatcattctttttgatgcagtgctatacgtcgggcttcggttatgtatggtttatgttgagaaaacggtcttgccaaaattgtgtttgtaagcccagattggcgtggggcttggttttgtatggagcttgtttgcgaaagtgtgtaataagatagtgatgcgagatacgggtcattctgcatttctgcttgcagaatgaatctgagcttttctgaagctacaactgactgtaattaataatttcaatcaaatcgtgagtcctgtgcctgtatgttacacccggatttaagagataaaaccag

SEQ ID NO: 221556 - DNA, 2832 bp, Zea Mays
cacggtcttccgcgctaaaagctgaaccactccactttcgaatgcttccatcgctaacggtcgcgactcgcgagggacattcccgtccttctgccgccccgcaaacccccaaaatttcaaagccccgcactcgagagcgggtgtctccaaccattccccattcgatccagcttgacgccgctccccgacgacgtggacgcccgtggagccctagaaccaagccatgcgacgggacgacgccggcggaggaaccgggttccacgacttgtttgactcggtgcgccgctccatctccttccggcccaccgcccccgccccggaagcccccgcgggcccattcggcgcgggggcaggggggatcggcgtgcggatcagctcttgcctccggaagtcgcgggggatggggctgctaggtctcatcactaaaagcccctcgccgccgcgccgcatgctaccgccgatgcccgatcagtcggacggcggcagcggagggggtggggccaacggcggagtcggagaggagaacccactgatccggtggcgtaagggggagctcatcggggccggtgcgttcgggcaggtctaccttgggatgaacctggactcgggcgagctcctcgctgtcaaacaggttttgatcggcacgagcaacgcgacacgggagaaggctcaagctcatattaaagagctcgaagaagaagtgaagctactcaagaacctgtctcaccccaacattgttaggtaccttgggactgttcgtgaggaagacacactaaacattttgctggaatttgtccctggagggtctattcagtcacttttggggaagcttggttcattcccagagcctgtcattaagaaatacactaagcaaattttgcaaggattggagtatctgcatagcaatgcaataatacatagagatataaagggtgcaaacattcttgtagataataaagggtgcatcaaacttgctgattttggggcatctaagcaagtggcaaagttggctactgtgacagcagccaaaacaatgaaaggcacaccgtattggatggcacctgaagtcattgttgggagtgggcatagcttctctgcggatatatggagtgtagggtgcacagtcattgaaatggccacgggcaaaccaccatggagccagcagtatcaagaggttgctcttctttttcatgttggaaccacaaagtcgcatccacctatacctgaacatctatcgcaagaggccaaagattttcttctgaagtgcctgcagaaggaaccagagctgaggtctactgccccagacttattaaagcatccttttgtcactggagaattagatgatctgcagccacgcaatcatgctgcacacaaggactgttttaatgaaattcatgcacatgatatgccaaatggcttgggtttgaatcattcttccaactggtcgaccatgaactccaatagatcatcaaaaatcaagcccttatgggaggggagctgtgacgatgttgacatgtgtgagtttgcagacaaggatgaatatgcaccagtaggatctagctataatcctatgtcagaaccatttgataactgggaaaacaagtttgacacaagcccagagcaaagttctcatgaaccaatggaatttggtgaattggccaaacatgctgaaagcagcataactgagaatgattttacgtgtcctgttgagggaagttgtgaagatgatgtacttacagagtcaaaaataaaggcatttcttgaggagaaggctcttgacctgaaaaagctacaaacacctttgtatgaggagttctacaacactgtgcacggagggagttgccaaacttccaagggaaaattcccaatcagtccaaaattgccccctcgaggaaagtcacctccaagtaagacgaggggaggtgcatgtgacactttgaataacacagctcccgaaagctgcagcaagcaatttcctagaagcagtgtggtggagagcagccgaattttgagagaaattgcttctcctcaacttaatgagtttgctgataaactccatcttgatgcccaagatagcccaagcatcagcttcaccgaaaggcagaggaagtggaaagaagagttggaccaggaacttgagagggagagagtgatgagattagctggctgtggtaaaactccatctccaaatagaggttccaacgtgaaaaaggagtgtcatgctgaccattgaacagacagcagcattcgtcgtctctttatatcatcccacagaagacacaacaaatgatagtaaagtacacagtgtgccagagattggtggcaacagcagtacagcctgtgccaccttatcatttgcggtgttagccaagctatgatcgcagaaccgtcctgtacaaaatgacagatttacgttgaagtggatcggtacagggggcactcatcacccattcaccctcaaatcaggatcattgtcgctgctgcctagaaggacgtcatgctgacacttccctgattttaaggccgcatttatcattctttttgatgcagtgctatacgtcgggcttcggttatgtatggtttatgttgagaaaacggtcttgccaaaattgtgtttgtaagcccagattggcgtggggcttggttttgtatggagcttgtttgcgaaagtgtgtaataagatagtgatgcgagatacgggtcattctgcatttctgcttgcagaatgaatctgagcttttctgaagctacaactgactgtaattaataatttcaatcaaatcgtgagtcctgtgcctgtatgttacacccggatttaagagataaaaccag

SEQ ID NO: 221557 - DNA, 1938 bp, Zea Mays
cgcaggcacggccgaggaaaaccgaaacccgtcccaaatccgttgctctttcccccttgcccccttcccagtctccactctgagcactctcctccgctctgctcctttgctccccacggcaaaccgtaaaccctagcctgaggggcacccctgtcgcagccatgggcgccagccggaagctgcagggcgagatcgaccgcgtcctgaagaaggtctacgacactgagaatgccaaccagaaggagaagttcgaggcggacctcaagaaggagatcaagaagctgcagcggtacagggaccagatcaagacgtggattcagtccagcgagatcaaggacaagaaggctctgatggatgctcgaaagcagattgaacgagagatggaacgatttaaagtatgtgagaaggaaacaaaaactaaggccttctcaaaagaagggttaggtcagcaaccaaaaacagatcccaaagaaaaggccaaagctgaaacaagagactggcttaataatgtggttagcgatttggaaagccagattgataacttcgaagcagagattgaagggctttcaattaaaaagggaaagcaaagaccgcctcgattggtacatttagagacgtctattacgagacataaagctcatataaagaaattggagtcaatcttgcggcttttggataatgatgagttgagtcctgagcaagtcaatgatgttaaagattttcttgatgactatgttgaacgtaatcaggaagactttgatgaattcagtgatgttgaggacctctatagcacattgcccatggagaaggttgaagcacttgaagacatggtttcacttgctccttctagtcttgtgaagggtgttgctcctgtttcgactactgcagttttgagcacaaagagttctgttgcaacttcacctactcagcctacagtatcaacagcttcttcacaaagtacatcacaggatcaaacagaggagacagcttcccaagaaagcaatcctgaacctacgccacaaacaccacctccaaaaggtggaaaccctggaccttcagtaccagctgtgcccattgttgtcagtactggtagtgcggctgtttctgtacctgcagaaacaattagttcccctgtgcgactaactgtacccgccacagcagccacagtgctttcttctgctattccacgaagtgctcctgagaatacacttgctgttacctcaattcctgcaaacttatctaccactttgaaggatgatgaaagcatgagtgttcctccacgacgaccatctcctgctactgaaattggaattggcaggggcataactcgaggaacaactagtcaggcattaggtacagctcccataactattggtccagtttcaggaaatggatcggttagtgcacttcctgcaataaatgacttgtccaaaataaatatattgaacactgacgagaagattaacagtgatggtctttctcagcagttggttatgcctcttggtagtaaagttcaaccccagcaggttcccaggactaatgatgcaatcggctctgattctgctaacacaaatgaaaaccctattcttggtggaagagtattttctcctccagttgtttctggggttcaatggagacctcaagctgctgctgcatttcaaaatcaaattgaaactaatcagtaccgtggaaggcctgagatttctgctgatcacagggagaagtacatacagagactgcagcaagtacagcagcaaggtggcagccttctgaatgtttcccatataactggcataaatcagaagcaatttccaacaccacagccaaatccccttctacaacagtttaagtcttctatatcttaatgttatgggcagccaactgggctccttcagctagtttggcactgtagacccctcctttaaggttagggttcgt

SEQ ID NO: 221558 - DNA, 3096 bp, Zea Mays
aaaaccgaaacccgtcccaaatccgttgctctttcccccttgcccccttcccagtctccactctgagcactctcctccgctctgctcctttgctccccacggcaaaccgtaaaccctagcctgaggggcacccctgtcgcagccatgggcgccagccggaagctgcagggcgagatcgaccgcgtcctgaagaaggtccaggagggcgtcgatgtctttgacagcatctggaataaggtctacgacactgagaatgccaaccagaaggagaagttcgaggcggacctcaagaaggagatcaagaagctgcagcggtacagggaccagatcaagacgtggattcagtccagcgagatcaaggacaagaaggctctgatggatgctcgaaagcagattgaacgagagatggaacgatttaaagtatgtgagaaggaaacaaaaactaaggccttctcaaaagaagggttaggtcagcaaccaaaaacagatcccaaagaaaaggccaaagctgaaacaagagactggcttaataatgtggttagcgatttggaaagccagattgataacttcgaagcagagattgaagggctttcaattaaaaagggaaagcaaagaccgcctcgattggtacatttagagacgtctattacgagacataaagctcatataaagaaattggagtcaatcttgcggcttttggataatgatgagttgagtcctgagcaagtcaatgatgttaaagattttcttgatgactatgttgaacgtaatcaggaagactttgatgaattcagtgatgttgaggacctctatagcacattgcccatggagaaggttgaagcacttgaagacatggtttcacttgctccttctagtcttgtgaagggtgttgctcctgtttcgactactgcagttttgagcacaaagagttctgttgcaacttcacctactcagcctacagtatcaacagcttcttcacaaagtacatcacaggatcaaacagaggagacagcttcccaagaaagcaatcctgaacctacgccacaaacaccacctccaaaaggtggaaaccctggaccttcagtaccagctgtgcccattgttgtcagtactggtagtgcggctgtttctgtacctgcagaaacaattagttcccctgtgcgactaactgtacccgccacagcagccacagtgctttcttctgctattccacgaagtgctcctgagaatacacttgctgttacctcaattcctgcaaacttatctaccactttgaaggatgatgaaagcatgagtgttcctccacgacgaccatctcctgctactgaaattggaattggcaggggcataactcgaggaacaactagtcaggcattaggtacagctcccataactattggtccagtttcaggaaatggatcgtgatggtctttctcagcagttggttatgcctcttggtagtaaagttcaaccccagcaggttcccaggactaatgatgcaatcggctctgattctgctaacacaaatgaaaaccctattcttggtggaagagtattttctcctccagttgtttctggggttcaatggagacctcaagctgctgctgcatttcaaaatcaaattgaaactaatcagtaccgtggaaggcctgagatttctgctgatcacagggagaagtacatacagagactgcagcaagtacagcagcaaggtggcagccttctgaatgtttcccatataactggcataaatcagaagcaatttccaacaccacagccaaatccccttctacaacagtttaattcacagagttcctctatatcttcccaagtgaatcttgggcttggagttcaaggatcagacgcggggcatataaaaagtgaagatcaacaaattttggctgaagatgttggtgtggaatcttccgcaacaacaggagcaaataaacaaacaagtgaagatgacacaaagattccatattcgaatccttcagcacctgcagcagaaaacactcagctgcctagggatactgatctatcacctggacagcctttgcaacctggaatgccatcatctggtgttggtgttatcggccgaagaagtgtatctgatcttggtacaatcggagataaccttactggaacttctggtagttctggtcatgatcagaattattatctgcaaatgcttgaagctgcattccacaagcttccacagcccaaggactctgagcgtgctaaaacttacattccgcggcaccctgcagttacccctgctagctacccccaagttcaggcatcaattgtatcgaatcccaccttttgggaaagaattggtagcgacacattagctaccgacatgctgttctttgcgttctactaccaacagaacacatatcaacaatacttggctgctagagaactgaagaagcaatcatggagatttcaccggaggtacaatacctggttccagcggcatgtggagccacaggtcacgactgatgagtatgagcggggatcatatgtatactttgatttccatgtcactgaggatggctcaggatggtgccaaagaatcaagaatgacttcacatttgagtacaactacctggaggatgagctatcagtacaaacaaactaaagtgccatggcagtaggtctggtcaaacctttatgtccaatttgaattttgtagttctcataagagcttgttcggttgcttctggatcaaagaaggttggaggggattaaattccttctagtcaaaattgaatagaaattgatttaacccccctcaatctcctttatccagacgcaaccgaacaatgcctaaggtgactgactgactgttataatctggacccttgacaaaatctccagctgtaaactaatgtgtgaagttggatgcaccgaacatgctgaaattataatcgtgttatgccagccgaatctgtttgacgcagctgtacattgtcgttattatctggatgcgcctgaaaaatattttggatctttcttggcgcctacctgtttatttttagctaactcctggctggcgctttcgatctttctggttcgtttttttatcaaaaaaaa

SEQ ID NO: 221559 - DNA, 3130 bp, Zea Mays
ccgaaacccgtcccaaatccgttgctctttcccccttgcccccttcccagtctccactctgagcactctcctccgctctgctcctttgctccccacggcaaaccgtaaaccctagcctgaggggcacccctgtcgcagccatgggcgccagccggaagctgcagggcgagatcgaccgcgtcctgaagaaggtctacgacactgagaatgccaaccagaaggagaagttcgaggcggacctcaagaaggagatcaagaagctgcagcggtacagggaccagatcaagacgtggattcagtccagcgagatcaaggacaagaaggttagtgcctcttatgagcaggctctgatggatgctcgaaagcagattgaacgagagatggaacgatttaaagtatgtgagaaggaaacaaaaactaaggccttctcaaaagaagggttaggtcagcaaccaaaaacagatcccaaagaaaaggccaaagctgaaacaagagactggcttaataatgtggttagcgatttggaaagccagattgataacttcgaagcagagattgaagggctttcaattaaaaagggaaagcaaagaccgcctcgattggtacatttagagacgtctattacgagacataaagctcatataaagaaattggagtcaatcttgcggcttttggataatgatgagttgagtcctgagcaagtcaatgatgttaaagattttcttgatgactatgttgaacgtaatcaggaagactttgatgaattcagtgatgttgaggacctctatagcacattgcccatggagaaggttgaagcacttgaagacatggtttcacttgctccttctagtcttgtgaagggtgttgctcctgtttcgactactgcagttttgagcacaaagagttctgttgcaacttcacctactcagcctacagtatcaacagcttcttcacaaagtacatcacaggatcaaacagaggagacagcttcccaagaaagcaatcctgaacctacgccacaaacaccacctccaaaaggtggaaaccctggaccttcagtaccagctgtgcccattgttgtcagtactggtagtgcggctgtttctgtacctgcagaaacaattagttcccctgtgcgactaactgtacccgccacagcagccacagtgctttcttctgctattccacgaagtgctcctgagaatacacttgctgttacctcaattcctgcaaacttatctaccactttgaaggatgatgaaagcatgagtgttcctccacgacgaccatctcctgctactgaaattggaattggcaggggcataactcgaggaacaactagtcaggcattaggtacagctcccataactattggtccagtttcaggaaatggatcggttagtgcacttcctgcaataaatgacttgtccaaaataaatatattgaacactgacgagaagattaacagtgatggtctttctcagcagttggttatgcctcttggtagtaaagttcaaccccagcaggttcccaggactaatgatgcaatcggctctgattctgctaacacaaatgaaaaccctattcttggtggaagagtattttctcctccagttgtttctggggttcaatggagacctcaagctgctgctgcatttcaaaatcaaattgaaactaatcagtaccgtggaaggcctgagatttctgctgatcacagggagaagtacatacagagactgcagcaagtacagcagcaaggtggcagccttctgaatgtttcccatataactggcataaatcagaagcaatttccaacaccacagccaaatccccttctacaacagagttcctctatatcttcccaagtgaatcttgggcttggagttcaaggatcagacgcggggcatataaaaagtgaagatcaacaaattttggctgaagatgttggtgtggaatcttccgcaacaacaggagcaaataaacaaacaagtgaagatgacacaaagattccatattcgaatccttcagcacctgcagcagaaaacactcagctgcctagggatactgatctatcacctggacagcctttgcaacctggaatgccatcatctggtgttggtgttatcggccgaagaagtgtatctgatcttggtacaatcggagataaccttactggaacttctggtagttctggtcatgatcagaattattatctgcaaatgcttgaagctgcattccacaagcttccacagcccaaggactctgagcgtgctaaaacttacattccgcggcaccctgcagttacccctgctagctacccccaagttcaggcatcaattgtatcgaatcccaccttttgggaaagaattggtagcgacacattagctaccgacatgctgttctttgcgttctactaccaacagaacacatatcaacaatacttggctgctagagaactgaagaagcaatcatggagatttcaccggaggtacaatacctggttccagcggcatgtggagccacaggtcacgactgatgagtatgagcggggatcatatgtatactttgatttccatgtcactgaggatggctcaggatggtgccaaagaatcaagaatgacttcacatttgagtacaactacctggaggatgagctatcagtacaaacaaactaaagtgccatggcagtaggtctggtcaaacctttatgtccaatttgaattttgtagttctcataagagcttgttcggttgcttctggatcaaagaaggttggaggggattaaattccttctagtcaaaattgaatagaaattgatttaacccccctcaatctcctttatccagacgcaaccgaacaatgcctaaggtgactgactgactgttataatctggacccttgacaaaatctccagctgtaaactaatgtgtgaagttggatgcaccgaacatgctgaaattataatcgtgttatgccagccgaatctgtttgacgcagctgtacattgtcgttattatctggatgcgcctgaaaaatattttggatctttcttggcgcctacctgtttatttttagctaactcctggctggcgctttcgatctttctggttcgtttttttatcaaaaaaaa

SEQ ID NO: 221560 - DNA, 1864 bp, Zea Mays
gtcccaaatccgttgctctttcccccttgcccccttcccagtctccactctgagcactctcctccgctctgctcctttgctccccacggcaaaccgtaaaccctagcctgaggggcacccctgtcgcagccatgggcgccagccggaagctgcagggcgagatcgaccgcgtcctgaagaaggtccaggagggcgtcgatgtctttgacagcatctggaataaggtctacgacactgagaatgccaaccagaaggagaagttcgaggcggacctcaagaaggagatcaagaagctgcagcggtacagggaccagatcaagacgtggattcagtccagcgagatcaaggacaagaaggctctgatggatgctcgaaagcagattgaacgagagatggaacgatttaaagtatgtgagaaggaaacaaaaactaaggccttctcaaaagaagggttaggtcagcaaccaaaaacagatcccaaagaaaaggccaaagctgaaacaagagactggcttaataatgtggttagcgatttggaaagccagattgataacttcgaagcagagattgaagggctttcaattaaaaagggaaagcaaagaccgcctcgattggtacatttagagacgtctattacgagacataaagctcatataaagaaattggagtcaatcttgcggcttttggataatgatgagttgagtcctgagcaagtcaatgatgttaaagattttcttgatgactatgttgaacgtaatcaggaagactttgatgaattcagtgatgttgaggacctctatagcacattgcccatggagaaggttgaagcacttgaagacatggtttcacttgctccttctagtcttgtgaagggtgttgctcctgtttcgactactgcagttttgagcacaaagagttctgttgcaacttcacctactcagcctacagtatcaacagcttcttcacaaagtacatcacaggatcaaacagaggagacagcttcccaagaaagcaatcctgaacctacgccacaaacaccacctccaaaaggtggaaaccctggaccttcagtaccagctgtgcccattgttgtcagtactggtagtgcggctgtttctgtacctgcagaaacaattagttcccctgtgcgactaactgtacccgccacagcagccacagtgctttcttctgctattccacgaagtgctcctgagaatacacttgctgttacctcaattcctgcaaacttatctaccactttgaaggatgatgaaagcatgagtgttcctccacgacgaccatctcctgctactgaaattggaattggcaggggcataactcgaggaacaactagtcaggcattaggtacagctcccataactattggtccagtttcaggaaatggatcgcagttggttatgcctcttggtagtaaagttcaaccccagcaggttcccaggactaatgatgcaatcggctctgattctgctaacacaaatgaaaaccctattcttggtggaagagtattttctcctccagttgtttctggggttcaatggagacctcaagctgctgctgcatttcaaaatcaaattgaaactaatcagtaccgtggaaggcctgagatttctgctgatcacagggagaagtacatacagagactgcagcaagtacagcagcaaggtggcagccttctgaatgtttcccatataactggcataaatcagaagcaatttccaacaccacagccaaatccccttctacaacagctttaagtcttctatatcttaatgttatgggcagccaactgggctccttcagctagtttggcactgtagacccctcctttaaggttagggttcgt

SEQ ID NO: 221561 - DNA, 1863 bp, Zea Mays
gtcccaaatccgttgctctttcccccttgcccccttcccagtctccactctgagcactctcctccgctctgctcctttgctccccacggcaaaccgtaaaccctagcctgaggggcacccctgtcgcagccatgggcgccagccggaagctgcagggcgagatcgaccgcgtcctgaagaaggtccaggagggcgtcgatgtctttgacagcatctggaataaggtctacgacactgagaatgccaaccagaaggagaagttcgaggcggacctcaagaaggagatcaagaagctgcagcggtacagggaccagatcaagacgtggattcagtccagcgagatcaaggacaagaaggctctgatggatgctcgaaagcagattgaacgagagatggaacgatttaaagtatgtgagaaggaaacaaaaactaaggccttctcaaaagaagggttaggtcagcaaccaaaaacagatcccaaagaaaaggccaaagctgaaacaagagactggcttaataatgtggttagcgatttggaaagccagattgataacttcgaagcagagattgaagggctttcaattaaaaagggaaagcaaagaccgcctcgattggtacatttagagacgtctattacgagacataaagctcatataaagaaattggagtcaatcttgcggcttttggataatgatgagttgagtcctgagcaagtcaatgatgttaaagattttcttgatgactatgttgaacgtaatcaggaagactttgatgaattcagtgatgttgaggacctctatagcacattgcccatggagaaggttgaagcacttgaagacatggtttcacttgctccttctagtcttgtgaagggtgttgctcctgtttcgactactgcagttttgagcacaaagagttctgttgcaacttcacctactcagcctacagtatcaacagcttcttcacaaagtacatcacaggatcaaacagaggagacagcttcccaagaaagcaatcctgaacctacgccacaaacaccacctccaaaaggtggaaaccctggaccttcagtaccagctgtgcccattgttgtcagtactggtagtgcggctgtttctgtacctgcagaaacaattagttcccctgtgcgactaactgtacccgccacagcagccacagtgctttcttctgctattccacgaagtgctcctgagaatacacttgctgttacctcaattcctgcaaacttatctaccactttgaaggatgatgaaagcatgagtgttcctccacgacgaccatctcctgctactgaaattggaattggcaggggcataactcgaggaacaactagtcaggcattaggtacagctcccataactattggtccagtttcaggaaatggatcgcagttggttatgcctcttggtagtaaagttcaaccccagcaggttcccaggactaatgatgcaatcggctctgattctgctaacacaaatgaaaaccctattcttggtggaagagtattttctcctccagttgtttctggggttcaatggagacctcaagctgctgctgcatttcaaaatcaaattgaaactaatcagtaccgtggaaggcctgagatttctgctgatcacagggagaagtacatacagagactgcagcaagtacagcagcaaggtggcagccttctgaatgtttcccatataactggcataaatcagaagcaatttccaacaccacagccaaatccccttctacaacagtttaagtcttctatatcttaatgttatgggcagccaactgggctccttcagctagtttggcactgtagacccctcctttaaggttagggttcgt

SEQ ID NO: 221562 - DNA, 3052 bp, Zea Mays
gtcccaaatccgttgctctttcccccttgcccccttcccagtctccactctgagcactctcctccgctctgctcctttgctccccacggcaaaccgtaaaccctagcctgaggggcacccctgtcgcagccatgggcgccagccggaagctgcagggcgagatcgaccgcgtcctgaagaaggtccaggagggcgtcgatgtctttgacagcatctggaataaggtctacgacactgagaatgccaaccagaaggagaagttcgaggcggacctcaagaaggagatcaagaagctgcagcggtacagggaccagatcaagacgtggattcagtccagcgagatcaaggacaagaaggctctgatggatgctcgaaagcagattgaacgagagatggaacgatttaaagtatgtgagaaggaaacaaaaactaaggccttctcaaaagaagggttaggtcagcaaccaaaaacagatcccaaagaaaaggccaaagctgaaacaagagactggcttaataatgtggttagcgatttggaaagccagattgataacttcgaagcagagattgaagggctttcaattaaaaagggaaagcaaagaccgcctcgattggtacatttagagacgtctattacgagacataaagctcatataaagaaattggagtcaatcttgcggcttttggataatgatgagttgagtcctgagcaagtcaatgatgttaaagattttcttgatgactatgttgaacgtaatcaggaagactttgatgaattcagtgatgttgaggacctctatagcacattgcccatggagaaggttgaagcacttgaagacatggtttcacttgctccttctagtcttgtgaagggtgttgctcctgtttcgactactgcagttttgagcacaaagagttctgttgcaacttcacctactcagcctacagtatcaacagcttcttcacaaagtacatcacaggatcaaacagaggagacagcttcccaagaaagcaatcctgaacctacgccacaaacaccacctccaaaaggtggaaaccctggaccttcagtaccagctgtgcccattgttgtcagtactggtagtgcggctgtttctgtacctgcagaaacaattagttcccctgtgcgactaactgtacccgccacagcagccacagtgctttcttctgctattccacgaagtgctcctgagaatacacttgctgttacctcaattcctgcaaacttatctaccactttgaaggatgatgaaagcatgagtgttcctccacgacgaccatctcctgctactgaaattggaattggcaggggcataactcgaggaacaactagtcaggcattaggtacagctcccataactattggtccagtttcaggaaatggatcgttggttatgcctcttggtagtaaagttcaaccccagcaggttcccaggactaatgatgcaatcggctctgattctgctaacacaaatgaaaaccctattcttggtggaagagtattttctcctccagttgtttctggggttcaatggagacctcaagctgctgctgcatttcaaaatcaaattgaaactaatcagtaccgtggaaggcctgagatttctgctgatcacagggagaagtacatacagagactgcagcaagtacagcagcaaggtggcagccttctgaatgtttcccatataactggcataaatcagaagcaatttccaacaccacagccaaatccccttctacaacagagttcctctatatcttcccaagtgaatcttgggcttggagttcaaggatcagacgcggggcatataaaaagtgaagatcaacaaattttggctgaagatgttggtgtggaatcttccgcaacaacaggagcaaataaacaaacaagtgaagatgacacaaagattccatattcgaatccttcagcacctgcagcagaaaacactcagctgcctagggatactgatctatcacctggacagcctttgcaacctggaatgccatcatctggtgttggtgttatcggccgaagaagtgtatctgatcttggtacaatcggagataaccttactggaacttctggtagttctggtcatgatcagaattattatctgcaaatgcttgaagctgcattccacaagcttccacagcccaaggactctgagcgtgctaaaacttacattccgcggcaccctgcagttacccctgctagctacccccaagttcaggcatcaattgtatcgaatcccaccttttgggaaagaattggtagcgacacattagctaccgacatgctgttctttgcgttctactaccaacagaacacatatcaacaatacttggctgctagagaactgaagaagcaatcatggagatttcaccggaggtacaatacctggttccagcggcatgtggagccacaggtcacgactgatgagtatgagcggggatcatatgtatactttgatttccatgtcactgaggatggctcaggatggtgccaaagaatcaagaatgacttcacatttgagtacaactacctggaggatgagctatcagtacaaacaaactaaagtgccatggcagtaggtctggtcaaacctttatgtccaatttgaattttgtagttctcataagagcttgttcggttgcttctggatcaaagaaggttggaggggattaaattccttctagtcaaaattgaatagaaattgatttaacccccctcaatctcctttatccagacgcaaccgaacaatgcctaaggtgactgactgactgttataatctggacccttgacaaaatctccagctgtaaactaatgtgtgaagttggatgcaccgaacatgctgaaattataatcgtgttatgccagccgaatctgtttgacgcagctgtacattgtcgttattatctggatgcgcctgaaaaatattttggatctttcttggcgcctacctgtttatttttagctaactcctggctggcgctttcgatctttctggttcgtttttttatcaaaaaaaa

SEQ ID NO: 221563 - DNA, 3020 bp, Zea Mays
gtcccaaatccgttgctctttcccccttgcccccttcccagtctccactctgagcactctcctccgctctgctcctttgctccccacggcaaaccgtaaaccctagcctgaggggcacccctgtcgcagccatgggcgccagccggaagctgcagggcgagatcgaccgcgtcctgaagaaggtccaggagggcgtcgatgtctttgacagcatctggaataaggtctacgacactgagaatgccaaccagaaggagaagttcgaggcggacctcaagaaggagatcaagaagctgcagcggtacagggaccagatcaagacgtggattcagtccagcgagatcaaggacaagaaggctctgatggatgctcgaaagcagattgaacgagagatggaacgatttaaagtatgtgagaaggaaacaaaaactaaggccttctcaaaagaagggttaggtcagcaaccaaaaacagatcccaaagaaaaggccaaagctgaaacaagagactggcttaataatgtggttagcgatttggaaagccagattgataacttcgaagcagagattgaagggctttcaattaaaaagggaaagcaaagaccgcctcgattggtacatttagagacgtctattacgagacataaagctcatataaagaaattggagtcaatcttgcggcttttggataatgatgagttgagtcctgagcaagtcaatgatgttaaagattttcttgatgactatgttgaacgtaatcaggaagactttgatgaattcagtgatgttgaggacctctatagcacattgcccatggagaaggttgaagcacttgaagacatggtttcacttgctccttctagtcttgtgaagggtgttgctcctgtttcgactactgcagttttgagcacaaagagttctgttgcaacttcacctactcagcctacagtatcaacagcttcttcacaaagtacatcacaggatcaaacagaggagacagcttcccaagaaagcaatcctgaacctacgccacaaacaccacctccaaaaggtggaaaccctggaccttcagtaccagctgtgcccattgttgtcagtactggtagtgcggctgtttctgtacctgcagaaacaattagttcccctgtgcgactaactgtacccgccacagcagccacagtgctttcttctgctattccacgaagtgctcctgagaatacacttgctgttacctcaattcctgcaaacttatctaccactttgaaggatgatgaaagcatgagtgttcctccacgacgaccatctcctgctactgaaattggaattggcaggggcataactcgaggaacaactagtcaggcattagttggttatgcctcttggtagtaaagttcaaccccagcaggttcccaggactaatgatgcaatcggctctgattctgctaacacaaatgaaaaccctattcttggtggaagagtattttctcctccagttgtttctggggttcaatggagacctcaagctgctgctgcatttcaaaatcaaattgaaactaatcagtaccgtggaaggcctgagatttctgctgatcacagggagaagtacatacagagactgcagcaagtacagcagcaaggtggcagccttctgaatgtttcccatataactggcataaatcagaagcaatttccaacaccacagccaaatccccttctacaacagtttaattcacagagttcctctatatcttcccaagtgaatcttgggcttggagttcaaggatcagacgcggggcatataaaaagtgaagatcaacaaattttggctgaagatgttggtgtggaatcttccgcaacaacaggagcaaataaacaaacaagtgaagatgacacaaagattccatattcgaatccttcagcacctgcagcagaaaacactcagctgcctagggatactgatctatcacctggacagcctttgcaacctggaatgccatcatctggtgttggtgttatcggccgaagaagtgtatctgatcttggtacaatcggagataaccttactggaacttctggtagttctggtcatgatcagaattattatctgcaaatgcttgaagctgcattccacaagcttccacagcccaaggactctgagcgtgctaaaacttacattccgcggcaccctgcagttacccctgctagctacccccaagttcaggcatcaattgtatcgaatcccaccttttgggaaagaattggtagcgacacattagctaccgacatgctgttctttgcgttctactaccaacagaacacatatcaacaatacttggctgctagagaactgaagaagcaatcatggagatttcaccggaggtacaatacctggttccagcggcatgtggagccacaggtcacgactgatgagtatgagcggggatcatatgtatactttgatttccatgtcactgaggatggctcaggatggtgccaaagaatcaagaatgacttcacatttgagtacaactacctggaggatgagctatcagtacaaacaaactaaagtgccatggcagtaggtctggtcaaacctttatgtccaatttgaattttgtagttctcataagagcttgttcggttgcttctggatcaaagaaggttggaggggattaaattccttctagtcaaaattgaatagaaattgatttaacccccctcaatctcctttatccagacgcaaccgaacaatgcctaaggtgactgactgactgttataatctggacccttgacaaaatctccagctgtaaactaatgtgtgaagttggatgcaccgaacatgctgaaattataatcgtgttatgccagccgaatctgtttgacgcagctgtacattgtcgttattatctggatgcgcctgaaaaatattttggatctttcttggcgcctacctgtttatttttagctaactcctggctggcgctttcgatctttctggttcgtttttttatcaaaaaaaa

SEQ ID NO: 221564 - DNA, 1967 bp, Zea Mays
aaatccgttgctctttcccccttgcccccttcccagtctccactctgagcactctcctccgctctgctcctttgctccccacggcaaaccgtaaaccctagcctgaggggcacccctgtcgcagccatgggcgccagccggaagctgcagggcgagatcgaccgcgtcctgaagaaggtccaggagggcgtcgatgtctttgacagcatctggaataaggtctacgacactgagaatgccaaccagaaggagaagttcgaggcggacctcaagaaggagatcaagaagctgcagcggtacagggaccagatcaagacgtggattcagtccagcgagatcaaggacaagaaggttagtgcctcttatgagcaggctctgatggatgctcgaaagcagattgaacgagagatggaacgatttaaagtatgtgagaaggaaacaaaaactaaggccttctcaaaagaagggttaggtcagcaaccaaaaacagatcccaaagaaaaggccaaagctgaaacaagagactggcttaataatgtggttagcgatttggaaagccagattgataacttcgaagcagagattgaagggctttcaattaaaaagggaaagcaaagaccgcctcgattggtacatttagagacgtctattacgagacataaagctcatataaagaaattggagtcaatcttgcggcttttggataatgatgagttgagtcctgagcaagtcaatgatgttaaagattttcttgatgactatgttgaacgtaatcaggaagactttgatgaattcagtgatgttgaggacctctatagcacattgcccatggagaaggttgaagcacttgaagacatggtttcacttgctccttctagtcttgtgaagggtgttgctcctgtttcgactactgcagttttgagcacaaagagttctgttgcaacttcacctactcagcctacagtatcaacagcttcttcacaaagtacatcacaggatcaaacagaggagacagcttcccaagaaagcaatcctgaacctacgccacaaacaccacctccaaaaggtggaaaccctggaccttcagtaccagctgtgcccattgttgtcagtactggtagtgcggctgtttctgtacctgcagaaacaattagttcccctgtgcgactaactgtacccgccacagcagccacagtgctttcttctgctattccacgaagtgctcctgagaatacacttgctgttacctcaattcctgcaaacttatctaccactttgaaggatgatgaaagcatgagtgttcctccacgacgaccatctcctgctactgaaattggaattggcaggggcataactcgaggaacaactagtcaggcattaggtacagctcccataactattggtccagtttcaggaaatggatcggttagtgcacttcctgcaataaatgacttgtccaaaataaatatattgaacactgacgagaagattaacagtgatggtctttctcagcagttggttatgcctcttggtagtaaagttcaaccccagcaggttcccaggactaatgatgcaatcggctctgattctgctaacacaaatgaaaaccctattcttggtggaagagtattttctcctccagttgtttctggggttcaatggagacctcaagctgctgctgcatttcaaaatcaaattgaaactaatcagtaccgtggaaggcctgagatttctgctgatcacagggagaagtacatacagagactgcagcaagtacagcagcaaggtggcagccttctgaatgtttcccatataactggcataaatcagaagcaatttccaacaccacagccaaatccccttctacaacagctttaagtcttctatatcttaatgttatgggcagccaactgggctccttcagctagtttggcactgtagacccctcctttaaggttagggttcgt

SEQ ID NO: 221565 - DNA, 468 bp, Zea Mays
ttcccagtctccactctgagcactctcctccgctctgctcctttgctccccacggcaaaccgtaaaccctagcctgaggggcacccctgtcgcagccatgggcgccagccggaagctgcagggcgagatcgaccgcgtcctgaagaaggtctacgacactgagaatgccaaccagaaggagaagttcgaggcggacctcaagaaggagatcaagaagctgcagcggtacagggaccagatcaagacgtggattcagtccagcgagatcaaggacaagaaggctctgatggatgctcgaaagcagattgaacgagagatggaacgatttaaagtatgtgagaaggaaacaaaaactaaggccttctcaaaagaagggttaggtcagcaaccaaaaacagatcccaaagaaaaggccaaagctgaaacaagagactggcttaataatgtgagaaggagatcgctgatcgg

SEQ ID NO: 221566 - DNA, 3061 bp, Zea Mays
tcccagtctccactctgagcactctcctccgctctgctcctttgctccccacggcaaaccgtaaaccctagcctgaggggcacccctgtcgcagccatgggcgccagccggaagctgcagggcgagatcgaccgcgtcctgaagaaggtctacgacactgagaatgccaaccagaaggagaagttcgaggcggacctcaagaaggagatcaagaagctgcagcggtacagggaccagatcaagacgtggattcagtccagcgagatcaaggacaagaaggctctgatggatgctcgaaagcagattgaacgagagatggaacgatttaaagtatgtgagaaggaaacaaaaactaaggccttctcaaaagaagggttaggtcagcaaccaaaaacagatcccaaagaaaaggccaaagctgaaacaagagactggcttaataatgtggttagcgatttggaaagccagattgataacttcgaagcagagattgaagggctttcaattaaaaagggaaagcaaagaccgcctcgattggtacatttagagacgtctattacgagacataaagctcatataaagaaattggagtcaatcttgcggcttttggataatgatgagttgagtcctgagcaagtcaatgatgttaaagattttcttgatgactatgttgaacgtaatcagactttgatgaattcagtgatgttgaggacctctatagcacattgcccatggagaaggttgaagcacttgaagacatggtttcacttgctccttctagtcttgtgaagggtgttgctcctgtttcgactactgcagttttgagcacaaagagttctgttgcaacttcacctactcagcctacagtatcaacagcttcttcacaaagtacatcacaggatcaaacagaggagacagcttcccaagaaagcaatcctgaacctacgccacaaacaccacctccaaaaggtggaaaccctggaccttcagtaccagctgtgcccattgttgtcagtactggtagtgcggctgtttctgtacctgcagaaacaattagttcccctgtgcgactaactgtacccgccacagcagccacagtgctttcttctgctattccacgaagtgctcctgagaatacacttgctgttacctcaattcctgcaaacttatctaccactttgaaggatgatgaaagcatgagtgttcctccacgacgaccatctcctgctactgaaattggaattggcaggggcataactcgaggaacaactagtcaggcattaggtacagctcccataactattggtccagtttcaggaaatggatcggttagtgcacttcctgcaataaatgacttgtccaaaataaatatattgaacactgacgagaagattaacagtgatggtctttctcagcagttggttatgcctcttggtagtaaagttcaaccccagcaggttcccaggactaatgatgcaatcggctctgattctgctaacacaaatgaaaaccctattcttggtggaagagtattttctcctccagttgtttctggggttcaatggagacctcaagctgctgctgcatttcaaaatcaaattgaaactaatcagtaccgtggaaggcctgagatttctgctgatcacagggagaagtacatacagagactgcagcaagtacagcagcaaggtggcagccttctgaatgtttcccatataactggcataaatcagaagcaatttccaacaccacagccaaatccccttctacaacagagttcctctatatcttcccaagtgaatcttgggcttggagttcaaggatcagacgcggggcatataaaaagtgaagatcaacaaattttggctgaagatgttggtgtggaatcttccgcaacaacaggagcaaataaacaaacaagtgaagatgacacaaagattccatattcgaatccttcagcacctgcagcagaaaacactcagctgcctagggatactgatctatcacctggacagcctttgcaacctggaatgccatcatctggtgttggtgttatcggccgaagaagtgtatctgatcttggtacaatcggagataaccttactggaacttctggtagttctggtcatgatcagaattattatctgcaaatgcttgaagctgcattccacaagcttccacagcccaaggactctgagcgtgctaaaacttacattccgcggcaccctgcagttacccctgctagctacccccaagttcaggcatcaattgtatcgaatcccaccttttgggaaagaattggtagcgacacattagctaccgacatgctgttctttgcgttctactaccaacagaacacatatcaacaatacttggctgctagagaactgaagaagcaatcatggagatttcaccggaggtacaatacctggttccagcggcatgtggagccacaggtcacgactgatgagtatgagcggggatcatatgtatactttgatttccatgtcactgaggatggctcaggatggtgccaaagaatcaagaatgacttcacatttgagtacaactacctggaggatgagctatcagtacaaacaaactaaagtgccatggcagtaggtctggtcaaacctttatgtccaatttgaattttgtagttctcataagagcttgttcggttgcttctggatcaaagaaggttggaggggattaaattccttctagtcaaaattgaatagaaattgatttaacccccctcaatctcctttatccagacgcaaccgaacaatgcctaaggtgactgactgactgttataatctggacccttgacaaaatctccagctgtaaactaatgtgtgaagttggatgcaccgaacatgctgaaattataatcgtgttatgccagccgaatctgtttgacgcagctgtacattgtcgttattatctggatgcgcctgaaaaatattttggatctttcttggcgcctacctgtttatttttagctaactcctggctggcgctttcgatctttctggttcgtttttttatcaaaaaaaa

SEQ ID NO: 221567 - DNA, 3025 bp, Zea Mays
tcccagtctccactctgagcactctcctccgctctgctcctttgctccccacggcaaaccgtaaaccctagcctgaggggcacccctgtcgcagccatgggcgccagccggaagctgcagggcgagatcgaccgcgtcctgaagaaggtccaggagggcgtcgatgtctttgacagcatctggaataaggtctacgacactgagaatgccaaccagaaggagaagttcgaggcggacctcaagaaggagatcaagaagctgcagcggtacagggaccagatcaagacgtggattcagtccagcgagatcaaggacaagaaggctctgatggatgctcgaaagcagattgaacgagagatggaacgatttaaagtatgtgagaaggaaacaaaaactaaggccttctcaaaagaagggttaggtcagcaaccaaaaacagatcccaaagaaaaggccaaagctgaaacaagagactggcttaataatgtggttagcgatttggaaagccagattgataacttcgaagcagagattgaagggctttcaattaaaaagggaaagcaaagaccgcctcgattggtacatttagagacgtctattacgagacataaagctcatataaagaaattggagtcaatcttgcggcttttggataatgatgagttgagtcctgagcaagtcaatgatgttaaagattttcttgatgactatgttgaacgtaatcagactttgatgaattcagtgatgttgaggacctctatagcacattgcccatggagaaggttgaagcacttgaagacatggtttcacttgctccttctagtcttgtgaagggtgttgctcctgtttcgactactgcagttttgagcacaaagagttctgttgcaacttcacctactcagcctacagtatcaacagcttcttcacaaagtacatcacaggatcaaacagaggagacagcttcccaagaaagcaatcctgaacctacgccacaaacaccacctccaaaaggtggaaaccctggaccttcagtaccagctgtgcccattgttgtcagtactggtagtgcggctgtttctgtacctgcagaaacaattagttcccctgtgcgactaactgtacccgccacagcagccacagtgctttcttctgctattccacgaagtgctcctgagaatacacttgctgttacctcaattcctgcaaacttatctaccactttgaaggatgatgaaagcatgagtgttcctccacgacgaccatctcctgctactgaaattggaattggcaggggcataactcgaggaacaactagtcaggcattaggtacagctcccataactattggtccagtttcaggaaatggatcgttggttatgcctcttggtagtaaagttcaaccccagcaggttcccaggactaatgatgcaatcggctctgattctgctaacacaaatgaaaaccctattcttggtggaagagtattttctcctccagttgtttctggggttcaatggagacctcaagctgctgctgcatttcaaaatcaaattgaaactaatcagtaccgtggaaggcctgagatttctgctgatcacagggagaagtacatacagagactgcagcaagtacagcagcaaggtggcagccttctgaatgtttcccatataactggcataaatcagaagcaatttccaacaccacagccaaatccccttctacaacagtttaattcacagagttcctctatatcttcccaagtgaatcttgggcttggagttcaaggatcagacgcggggcatataaaaagtgaagatcaacaaattttggctgaagatgttggtgtggaatcttccgcaacaacaggagcaaataaacaaacaagtgaagatgacacaaagattccatattcgaatccttcagcacctgcagcagaaaacactcagctgcctagggatactgatctatcacctggacagcctttgcaacctggaatgccatcatctggtgttggtgttatcggccgaagaagtgtatctgatcttggtacaatcggagataaccttactggaacttctggtagttctggtcatgatcagaattattatctgcaaatgcttgaagctgcattccacaagcttccacagcccaaggactctgagcgtgctaaaacttacattccgcggcaccctgcagttacccctgctagctacccccaagttcaggcatcaattgtatcgaatcccaccttttgggaaagaattggtagcgacacattagctaccgacatgctgttctttgcgttctactaccaacagaacacatatcaacaatacttggctgctagagaactgaagaagcaatcatggagatttcaccggaggtacaatacctggttccagcggcatgtggagccacaggtcacgactgatgagtatgagcggggatcatatgtatactttgatttccatgtcactgaggatggctcaggatggtgccaaagaatcaagaatgacttcacatttgagtacaactacctggaggatgagctatcagtacaaacaaactaaagtgccatggcagtaggtctggtcaaacctttatgtccaatttgaattttgtagttctcataagagcttgttcggttgcttctggatcaaagaaggttggaggggattaaattccttctagtcaaaattgaatagaaattgatttaacccccctcaatctcctttatccagacgcaaccgaacaatgcctaaggtgactgactgactgttataatctggacccttgacaaaatctccagctgtaaactaatgtgtgaagttggatgcaccgaacatgctgaaattataatcgtgttatgccagccgaatctgtttgacgcagctgtacattgtcgttattatctggatgcgcctgaaaaatattttggatctttcttggcgcctacctgtttatttttagctaactcctggctggcgctttcgatctttctggttcgtttttttatcaaaaaaaa

SEQ ID NO: 221568 - DNA, 2205 bp, Zea Mays
aaagtttccagccaatctctatctcgcctttcctctctccctgataccttcctcacccgtcacgcgcgcacgaacgctcgccgccgccatcaacctcctcggcggtgcgggcatcaccaccatcgtcaacctggcggaggaggccaagctcgcatgcgagggggtcaaggcgcctgctacattgtgaggaagtcgtgtgacagcgtgcctatcggagacaaggctggacaacgaggaagacgttggtggggaagtggagaaccaagctctgtttgttgccttgccttctcttctctggttctccgtttgcacgcacgctcattctcgtggcacaactcggcgagccccgccgcctcctctctacgacatgtgcccagatctaccttcgccagttccttcaccagcgatgagcaccaacccggtatgtgcactcctcttcccttcgcgttgaatctgggtcctgccctccatctctgtccctaggtcaaatcaaatcgaccccatctatctcaattactgccatcgagagagagagagagagagccccaccgtcgagtggcaccgcctccaaaccctagccccttctttgcgcatggctatcgttgtcactgtcgggcccccaagacgcccgcctcctatgcagcacgcgccatgccgctctcctctataggtgagatggtatcgtccttgttcgctagggagtagctggaatgcacttagatttgggtctggaatatggctaccgattcctggatctggcttgtgttacagattgtgagcatgcggtagtaactgactgaacaagaaaaacacatgtattcagttgcagttggtttctcaagccattctctttcaaatggcactcatgtaacaaaacaactatgatgactttgttattgatggctatatctgtttttccttattactaattagggtcattgtccagttacgtagagatgaaagggcacctgaagttttagtgagtttgcaaaatattgactgaactgaaacaggtagtgctacacttttttatactcatgtagaaaaaaatatactcattactcacttgttcatcagaatggaaggattgttctttttgctgtggaagtatatatgttttcagataacaattttgtatcgattcagctggatacaattcaaacagcactatgaagcttgtttctgctcctctacaattgaacgcaaccgaacagagtgttccgggtttgtttccttgttcatgagactgaattatctctgagtgcaaagctgagccaatcattcatggaaatttgtcaccgaagtaagctcattaatcattattttgtagttgaattagtgtaagactataatatataagtggctacatgtgttttataccctatcatacttcggtaaggtagcaaaaacaacgatgaatgacaacttaaaaggtgacaggtcttggatcactgagtttgactaaggtttctgaaggtaaaatacttatagaattagacagtatgttatacttactcggaggtgtgttttcctgattagttattgtctagattgtttatgtccataaagagcaaggtgaacagaattgctgacataattttaagaaacgagtgatggctatattgtcataacatggggggtcgacagagacgtgcccttctccgcgaccaccaaacaggtctttgatgtggctgttgtgctctctaagaacatgcatgggttccagcttcatctcgcccgagcacctcgccatcgcgctcttcaccctcgacgatccaactaccaacatcctcctaaggaggaaaatggagcagttattgtgcaaggatgatgggggcttcggtgcagaaagagactacaatccatcgaaagagaagcagtaaagtaccagcgtgctgtggagggctaatgaaaagcttgagaagcgggtcctctgtttgaagtggaagcggttgaaaaagatgtccgatacagctggcaagctttacttccgatgacatctgtgcttaccaggatgggcacgtcaccatcggtctgccttttgattcaattggaaaatgctgctactgaagaactttagccgttggactgaaactctacttggatgagtacaacacaaaactatctgatttctgtttagcaaaagctggtccttcgggtgataaagctcatgtatctactcgggttgttgccacttatggttga

SEQ ID NO: 221569 - DNA, 1487 bp, Zea Mays
gtcgcccccacccctcggtatatccgcctccgcccggcgcctccctctgcctcctctgctccgccctgccgccgcaaggatccaaaccccgtacgtcgccttctccgccgcctttcttcccgagcttgggttgtgatcgatagcaaaataaatccagaccgcattgagtgttatgctgagaggactgccaaaggtaatgtgctcgaacctcaagggttaattgaaattaagttcaggtcagaggaactccaagactgtatgggcaggcttgacccagagttgataaatctgaaagcaaaacttcaagatgcaaagcatggaaatggaagtctaccagacatagaatcgcttcagaagagtatagaagcgcgtacaaaacagttgttacctttatatacccagattgcagtacgctttgctgaattgcatgatacttccctgagaatggcagctaaaggcgtgattaagaaagttgtagactgggaagaatcacgctctttcttctataaaaggctacggaggaggatctctgaagatcttcttgcaaaagaaataagacgaataattggtgacaacttcacgcaccaatcggcgatggagcttatcaatgaatggtacctggcttctcaggccacaacaggaagcactgctggatgggatgatgatgatgcttttgttgcctggaaggacagtcctgaaaactacaagggatatatccaagagctaagggctcaaaaagtatctcagtcgctctctgatcttgctgactccagttcagatctacaagcattctcgcagggtctttctacactattagataagatggatccttctcagagagtgaagtttgttcaggaagtcaagaaggttcttggatgatgatatgataccaacacatccaacacaatatgcgcatgctacatgttatttttcaagtacatacatagaaggatattgcttggccttgattgatcatgtctgatctaagtcgatcattattttcttgaaacttcctttcggacgtggtgctatggttgatgaatttggatgtgtgcgttctgccaggtgtaagcccaaaggtttatacagaccgagttaaggttaggaagagcacgagtgaacttgttctggttttgcagtggttaaggcagaaagttgtttcactgtagttctgagatgtattaccagcggcgctgtaattttagggtgtataatgcggatgctagtaaacaattgagtggttcattaaattttgaactcgaataatatgtttctgtaggcacatgtgacgtaccactacatgaaataaatgtcgctgaactagggcaccagagttttggtaggactaaggttttgtttggttatgggataaggtgagcatctccagcgttcccaaacttgaatttcccaataaatttctaatgcgacgggctagacaaaaagcttgttgagccggctcggtagctttggttaagaaatgctttgtt

SEQ ID NO: 221570 - DNA, 7785 bp, Zea Mays
gtcgcccccacccctcggtatatccgcctccgcccggcgcctccctctgcctcctctgctccgccctgccgccgcaaggatccaaaccccgtacgtcgccttctccgccgcctttcttcccgaggaattttgctctctttttatggcactgtgcttttgagaaggcctttaattgtgctgtctgggccacggaacggcaatgtcgcagcttggattagctgcaactgcctcgaaggccttgccactactccctaatcgccagagaagtccagctgggactacatttccatcatctgcattgccgaggccctcaaaccgaaggaaaagccatactcgttcacttcgtgatggtggaaatgaggtatcagatgccaaaaagcacagccagtcagttcgtcaaggtcttgctggcattatcgacatcccaagtgacgcagtttcggaagtcgatatttcacatggacctaaggatcctagggggccaacagattcctatcaaatgaatgggattatcaatgaaacacataatggaagacatgcctcagggtccatggttgttgaattttgtgcagcactaggtggcaaaacaccaattcacagtatattagtggccaacaatggaatggcggcaacaaagttcatgaggagtgtccgtacatgggctaatgatacttttggatctgagaaggcaattcatctcatagctatggcaactccggaagacatgaggataaatgcagaacacatcagacttgctgatcaattcgtagaggtgcctggtggaacaaacaataataactatgccaacgttcaactcatagtggagatagcagaaagagtaggtgtttctgctgtttggcctggttggggtcatgcttctgagaatcctgagctgccggatgcattgaccgcaaaaggaatcgtttttcttgggccaccagcaacatcaatgaatgcattgggagataaggttggttcagctctcattgctcaagcagccggggtcccaactcttgcttggagtggatcgcatgttgaagttccattagagtgctgcttagacgcgatacctgaggagatgtatagaaaagcttgtgttactaccacagaggaggcagttgcaagttgtcaagtggttggttatcctgccatgattaaggcatcctggggaggtggtggtaaaggaataagaaaggttcataatgatgatgaggttagagcgctgtttaagcaagtacaaggtgaagtccctggctccccaatatttatcatgaggcttgcatcccagagtcggcatcttgaagttcagttgctttgtgatcaatatggcaatgtagcagcacttcacagtcgtgattgcagtgtacaacggcgacaccagaagattattgaagaaggcccagttactgttgctcctcgtgaaacagttaaagcacttgagcaggcagcaaggaggcttgctaaggctgtgggttatgttggtgcggctactgttgagtatctttacagcatggagactggagaatactattttctggagcttaatccccgactacaggttgagcatccagtcactgagtggatagctgaagtaaatctgcctgcagctcaagttgcagttggaatgggcatacctctttggcagattccagaaatcagacgtttttatggaatggactatggaggagggtatgacatttggaggaaaacagcagctcttgctgcaccatttaattttgatgaagtagattctctatggccaaagggccattgtgtagcagttagaattactagtgaggacccagatgatggtttcaaacctactggcgggaaagtgaaggagataagttttaaaagcaagcctaatgtttgggcctacttctcagtaaagtctggtggaggcattcatgaatttgctgattctcagtttggacatgtttttgcatatggactctctagaccagcagctataacaaacatgtctcttgcattaaaagagattcagattcgtggagaaattcattcaaatgttgattacacagttgacctcttaaacgcttcagacttcagagaaaacaagatccacactggttggctggatacaagaatagctatgcgtgttcaagctgagaggcccccatggtatatctcagtggttggaggtgctttatataaaacagtaaccaccaatgcagccactgtttctgaatatgttagttatctcaccaaaggccagattccaccaaagcatatatcccttgtcaattcaacagttaatttgaatatagaagggagcaaatacacaattgaaactgtcaggactgggcatggtaggtacaagttgcgaatgaatgattcaacagttgaggcgaatgtacaatctttatgtgatggtggcctcttaatgcagttggatggaaacagccatgtgatttatgcagaagaagaagctggcggtacacggcttcagattaatggaaagacatgcttgttgcagaatgaccatgatccatcaaagttattagctgagactccctgcaaacttcttcgctttttggttgctgatggtgctcatgttggtgcggatgtgccatatgcggaagttgaggttatgaagatgtgcatgcctctcttgtcacctgcttctggtgtcattcattgtatgatgtctgagggccaggcgttgcaggctggtgatcttatagcaaggctggatcttgatgacccttctgctgtgaaaagagctgaaccatttgatggaatgtttccactaatggacctccctgttgctgcctctagtcaagtacacaaaagatatgctgcaagtttgaatgctgctcgaatggtccttgcaggatatgagcacaatatcaatgaagtcgttcaagatttggtatgctgcctggacaatcctgagcttccttttctacagtgggatgaactaatgtctgttctagcaacgaggcttccaagaaatctcaagagtgagttagaggataaatacaaggaatacaagttgaatttttaccatgggaaaaacaaggacttcccatccaagttgctaagagacatcgtcgaggaaaatcttgcatatggttcagagaaggaaaaggctacaaatgagcgacttgttgagcctcttatgaacctactgaagtcatatgagggtgggagagaaagccatgcacattttgttgtcaagtctctttttgaggagtatcttaccgtggaagaacttttcagtgatggcattcagtctgacgtgattgaaaccttgcgtcatcagcacagtaaagacctgcagaaggttgtagacatcgtgctgtctcaccagggtgtgaggaacaaagctaagcttgtaacagcacttatggaaaagctggtttatccaaatcctggtgcgtacagggatctgttggttcgcttttcgtccctcaatcataaaagatattataagttggcccttaaagcaagtgaacttcttgaacaaaccaaactaagtgaactctgttccagcattgcaagaagcctttcagatctggggatgcataagggagaaatgactattaaggatagcatggaagatttagtctctgccccattgcctgttgaagatgctcttatttctttgtttgattacagtgatccaactgttcagcagaaagtgattgtgacatacatatcacgattgtaccagcctcatcttgtgaaggatagcatccaaatgaaattcaaagaatctggtgctattgttttttgggaattttctgaagggcatgttgatactagaaatggacaaggggctattcttggtgggaagagatggggtgccatggtcgttctcagatcacttgaatctgcatcaacagccattatggctgcattaaaagattctgtacagtacaacaactctgaggtcaacacaatgcacattgtgttattgaatgctgaaactgaaagtaatataagtgggacaagtgatgaccaagctcaacataggatggaaaagcttaccaagatactgaaggatagtagtgttgcaagtgatctccaagctgctggtttgaaggttataagttgcattgttcaaagagatgcaggtcgcatgccaatgcgccacacattcctctggtttgatgaaaagaactgttatgaagaagagcatattctccggcatgtggagcctcccctctctgcacttcttgaattgggtaagttgaaagtgaaaggatacaacgaaatgaagtatactccatcacgtgatcgtcaatggcatatctacacactaagaaatactgaaaaccccaaaatgttgcatagggtatttttccgaactattgtcaggcaacccaatgcaggcaacaagtttacgtcggcacaggtcagcgacactggattaggatgtcctgaagaatctctgtcatttacatcgaatagcatcttaagatcactgatgactgctatagaagaattagagcttcatgcgattaggacaggtcattctcacatgtttttgtgcatactgaaagaacaaaagcttcttgatctcgtcccattttcagggagtacaattgttgacgttggccaagatgaagctactgcttgttcacttttaagatcaatggctttgaagatacatgaacttgttggtgcaaggatgcatcatctttctgtatgccagtgggaggtgaaactcaagttggactgtgatggacctgcaagtggtacctggagagtcgtaactacaaatgtcactagtcacacctgcaccattgatatctaccgagaagtggaagatacagaatcgcagaagttactataccattcagctacttcgtcagctggtccaatgcatggtgttgcactgaataatccttatcaacctttgagtgtgattgatctaaagcgctgctctgctaggaacaacagaacaacatattgctacgattttccgctggcatttgaaactgcactgcagaagtcatggcaatccaactgttctagtgttcctgaaggcagtgaaaatagtaaatcctacgtgaaatcaactgagctggtgtttgctgaaaaacatgggtcctggggcactcctataattcccatggaacgtcctgctgggctcaatgacattggtatggtcgcttggatcttggaaatgtcaacacctgaatttcccaatggcaggcagattattgttgtagcaaatgatattactttcagagctggatcattcggcccaagggaagatgcattttttgaagctgtcaccaacctggcttgcgaaaggaagcttccccttatatacttggcagcaaactctggtgctaggattggcatagctgatgaagtgaaatcttgcttccgtgttgggtggtctgatgaacgcagccctgaacgagggtttcagtacatctatctgactgaagaagactatgctcgtattagctcttctgttatagcacataagctgcagctagataatggtgaaattaggtggattattgactctgttgtgggcaaggaggatgggcttggtgttgagaacatacatggaagtgctgctattgccagtgcttattctagggcatatgaggagacatttacacttacatttgtgactgggcggactgtaggaataggagcctatcttgctcgacttggtatacggtgcatacagcgccttgaccagcctattattttaacagggttttctgccctgaacaagctccttgggcgagaagtgtacagctcccacatgcagctgggtggtcctaagatcatggcgaccaatggtgttgtccacttgaccgtttcagatgatcttgaaggtgtttccaatatattgaggtggctcagctatgttcctgcaaacattggtggacctcttcctattaccaaacctttggaccctccagatagacctgtcgcatacatccctgagaacacatgcgatccgcgtgcagccatccgtggtgtagatgacagccaagggaaatggttgggtggtatgtttgacaaagacagctttgtggagacatttgaaggatgggcaaaaacagtggttactggcagagcaaagcttggaggaattcctgtgggtgttatagctgtggagacacagaccatgatgcagctcatccctgctgatccaggtcaacttgattcccatgagcgatctgttcctcgggctggacaagtgtggttcccagattctgcaaccaagacagctcaggcattattagacttcaaccgtgaaggattgcctctgttcatcctggctaactggagaggcttttctgggggacagagagatctctttgaaggtattcttcaggctgggtcagcaattgttgagaaccttaggacatataatcagcctgcgtttgtctacattcctatggctggagagcttcgtggaggagcttgggttgtgatcgatagcaaaataaatccagaccgcattgagtgttatgctgagaggactgccaaaggtaatgtgctcgaacctcaagggttaattgaaattaagttcaggtcagaggaactccaagactgtatgggcaggcttgacccagagttgataaatctgaaagcaaaacttcaagatgcaaagcatggaaatggaagtctaccagacatagaatcgcttcagaagagtatagaagcgcgtacaaaacagttgttacctttatatacccagattgcagtacgctttgctgaattgcatgatacttccctgagaatggcagctaaaggcgtgattaagaaagttgtagactgggaagaatcacgctctttcttctataaaaggctacggaggaggatctctgaagatcttcttgcaaaagaaataagacgaataattggtgacaacttcacgcaccaatcggcgatggagcttatcaatgaatggtacctggcttctcaggccacaacaggaagcactgctggatgggatgatgatgatgcttttgttgcctggaaggacagtcctgaaaactacaagggatatatccaagagctaagggctcaaaaagtatctcagtcgctctctgatcttgctgactccagttcagatctacaagcattctcgcagggtctttctacactattagataagatggatccttctcagagagtgaagtttgttcaggaagtcaagaaggttcttggatgatgatatgataccaacacatccaacacaatatgcgcatgctacatgttatttttcaagtacatacatagaaggatattgcttggccttgattgatcatgtctgatctaagtcgatcattattttcttgaaacttcctttcggacgtggtgctatggttgatgaatttggatgtgtgcgttctgccaggtgtaagcccaaaggtttatacagaccgagttaaggttaggaagagcacgagtgaacttgttctggttttgcagtggttaaggcagaaagttgtttcactgtagttctgagatgtattaccagcggcgctgtaattttagggtgtataatgcggatgctagtaaacaattgagtggttcattaaattttgaactcgaataatatgtttctgtaggcacatgtgacgtaccactacatgaaataaatgtcgctgaactagggcaccagagttttggtaggactaaggttttgtttggttatgggataaggtgagcatctccagcgttcccaaacttgaatttcccaataaatttctaatgcgacgggctagacaaaaagcttgttgagccggctcggtagctttggttaagaaatgctttgtt

SEQ ID NO: 221571 - DNA, 7758 bp, Zea Mays
ccggctcgccccacgcgtcccgctatttattccgccggctcgtcgccagcgccgctccctctgtcgcggccgagtggagctcgtcagatccgcgcgccgcacgccgatctgcgccacctccggaattttgctctctttttatggcactgtgcttttgagaaggcctttaattgtgctgtctgggccacggaacggcaatgtcgcagcttggattagctgcaactgcctcgaaggccttgccactactccctaatcgccagagaagtccagctgggactacatttccatcatctgcattgccgaggccctcaaaccgaaggaaaagccatactcgttcacttcgtgatggtggaaatgaggtatcagatgccaaaaagcacagccagtcagttcgtcaaggtcttgctggcattatcgacatcccaagtgacgcagtttcggaagtcgatatttcacatggacctaaggatcctagggggccaacagattcctatcaaatgaatgggattatcaatgaaacacataatggaagacatgcctcagggtccatggttgttgaattttgtgcagcactaggtggcaaaacaccaattcacagtatattagtggccaacaatggaatggcggcaacaaagttcatgaggagtgtccgtacatgggctaatgatacttttggatctgagaaggcaattcatctcatagctatggcaactccggaagacatgaggataaatgcagaacacatcagacttgctgatcaattcgtagaggtgcctggtggaacaaacaataataactatgccaacgttcaactcatagtggagatagcagaaagagtaggtgtttctgctgtttggcctggttggggtcatgcttctgagaatcctgagctgccggatgcattgaccgcaaaaggaatcgtttttcttgggccaccagcaacatcaatgaatgcattgggagataaggttggttcagctctcattgctcaagcagccggggtcccaactcttgcttggagtggatcgcatgttgaagttccattagagtgctgcttagacgcgatacctgaggagatgtatagaaaagcttgtgttactaccacagaggaggcagttgcaagttgtcaagtggttggttatcctgccatgattaaggcatcctggggaggtggtggtaaaggaataagaaaggttcataatgatgatgaggttagagcgctgtttaagcaagtacaaggtgaagtccctggctccccaatatttatcatgaggcttgcatcccagagtcggcatcttgaagttcagttgctttgtgatcaatatggcaatgtagcagcacttcacagtcgtgattgcagtgtacaacggcgacaccagaagattattgaagaaggcccagttactgttgctcctcgtgaaacagttaaagcacttgagcaggcagcaaggaggcttgctaaggctgtgggttatgttggtgcggctactgttgagtatctttacagcatggagactggagaatactattttctggagcttaatccccgactacaggttgagcatccagtcactgagtggatagctgaagtaaatctgcctgcagctcaagttgcagttggaatgggcatacctctttggcagattccagaaatcagacgtttttatggaatggactatggaggagggtatgacatttggaggaaaacagcagctcttgctgcaccatttaattttgatgaagtagattctctatggccaaagggccattgtgtagcagttagaattactagtgaggacccagatgatggtttcaaacctactggcgggaaagtgaaggagataagttttaaaagcaagcctaatgtttgggcctacttctcagtaaagtctggtggaggcattcatgaatttgctgattctcagtttggacatgtttttgcatatggactctctagaccagcagctataacaaacatgtctcttgcattaaaagagattcagattcgtggagaaattcattcaaatgttgattacacagttgacctcttaaacgcttcagacttcagagaaaacaagatccacactggttggctggatacaagaatagctatgcgtgttcaagctgagaggcccccatggtatatctcagtggttggaggtgctttatataaaacagtaaccaccaatgcagccactgtttctgaatatgttagttatctcaccaaaggccagattccaccaaagttaatttgaatatagaagggagcaaatacacaattgaaactgtcaggactgggcatggtaggtacaagttgcgaatgaatgattcaacagttgaggcgaatgtacaatctttatgtgatggtggcctcttaatgcagttggatggaaacagccatgtgatttatgcagaagaagaagctggcggtacacggcttcagattaatggaaagacatgcttgttgcagaatgaccatgatccatcaaagttattagctgagactccctgcaaacttcttcgctttttggttgctgatggtgctcatgttggtgcggatgtgccatatgcggaagttgaggttatgaagatgtgcatgcctctcttgtcacctgcttctggtgtcattcattgtatgatgtctgagggccaggcgttgcaggctggtgatcttatagcaaggctggatcttgatgacccttctgctgtgaaaagagctgaaccatttgatggaatgtttccactaatggacctccctgttgctgcctctagtcaagtacacaaaagatatgctgcaagtttgaatgctgctcgaatggtccttgcaggatatgagcacaatatcaatgaagtcgttcaagatttggtatgctgcctggacaatcctgagcttccttttctacagtgggatgaactaatgtctgttctagcaacgaggcttccaagaaatctcaagagtgagttagaggataaatacaaggaatacaagttgaatttttaccatgggaaaaacaaggacttcccatccaagttgctaagagacatcgtcgaggaaaatcttgcatatggttcagagaaggaaaaggctacaaatgagcgacttgttgagcctcttatgaacctactgaagtcatatgagggtgggagagaaagccatgcacattttgttgtcaagtctctttttgaggagtatcttaccgtggaagaacttttcagtgatggcattcagtctgacgtgattgaaaccttgcgtcatcagcacagtaaagacctgcagaaggttgtagacatcgtgctgtctcaccagggtgtgaggaacaaagctaagcttgtaacagcacttatggaaaagctggtttatccaaatcctggtgcgtacagggatctgttggttcgcttttcgtccctcaatcataaaagatattataagttggcccttaaagcaagtgaacttcttgaacaaaccaaactaagtgaactctgttccagcattgcaagaagcctttcagatctggggatgcataagggagaaatgactattaaggatagcatggaagatttagtctctgccccattgcctgttgaagatgctcttatttctttgtttgattacagtgatccaactgttcagcagaaagtgattgtgacatacatatcacgattgtaccagcctcatcttgtgaaggatagcatccaaatgaaattcaaagaatctggtgctattgttttttgggaattttctgaagggcatgttgatactagaaatggacaaggggctattcttggtgggaagagatggggtgccatggtcgttctcagatcacttgaatctgcatcaacagccattatggctgcattaaaagattctgtacagtacaacaactctgaggtcaacacaatgcacattgtgttattgaatgctgaaactgaaagtaatataagtgggacaagtgatgaccaagctcaacataggatggaaaagcttaccaagatactgaaggatagtagtgttgcaagtgatctccaagctgctggtttgaaggttataagttgcattgttcaaagagatgcaggtcgcatgccaatgcgccacacattcctctggtttgatgaaaagaactgttatgaagaagagcatattctccggcatgtggagcctcccctctctgcacttcttgaattgggtaagttgaaagtgaaaggatacaacgaaatgaagtatactccatcacgtgatcgtcaatggcatatctacacactaagaaatactgaaaaccccaaaatgttgcatagggtatttttccgaactattgtcaggcaacccaatgcaggcaacaagtttacgtcggcacaggtcagcgacactggattaggatgtcctgaagaatctctgtcatttacatcgaatagcatcttaagatcactgatgactgctatagaagaattagagcttcatgcgattaggacaggtcattctcacatgtttttgtgcatactgaaagaacaaaagcttcttgatctcgtcccattttcagggagtacaattgttgacgttggccaagatgaagctactgcttgttcacttttaagatcaatggctttgaagatacatgaacttgttggtgcaaggatgcatcatctttctgtatgccagtgggaggtgaaactcaagttggactgtgatggacctgcaagtggtacctggagagtcgtaactacaaatgtcactagtcacacctgcaccattgatatctaccgagaagtggaagatacagaatcgcagaagttactataccattcagctacttcgtcagctggtccaatgcatggtgttgcactgaataatccttatcaacctttgagtgtgattgatctaaagcgctgctctgctaggaacaacagaacaacatattgctacgattttccgctggcatttgaaactgcactgcagaagtcatggcaatccaactgttctagtgttcctgaaggcagtgaaaatagtaaatcctacgtgaaatcaactgagctggtgtttgctgaaaaacatgggtcctggggcactcctataattcccatggaacgtcctgctgggctcaatgacattggtatggtcgcttggatcttggaaatgtcaacacctgaatttcccaatggcaggcagattattgttgtagcaaatgatattactttcagagctggatcattcggcccaagggaagatgcattttttgaagctgtcaccaacctggcttgcgaaaggaagcttccccttatatacttggcagcaaactctggtgctaggattggcatagctgatgaagtgaaatcttgcttccgtgttgggtggtctgatgaacgcagccctgaacgagggtttcagtacatctatctgactgaagaagactatgctcgtattagctcttctgttatagcacataagctgcagctagataatggtgaaattaggtggattattgactctgttgtgggcaaggaggatgggcttggtgttgagaacatacatggaagtgctgctattgccagtgcttattctagggcatatgaggagacatttacacttacatttgtgactgggcggactgtaggaataggagcctatcttgctcgacttggtatacggtgcatacagcgccttgaccagcctattattttaacagggttttctgccctgaacaagctccttgggcgagaagtgtacagctcccacatgcagctgggtggtcctaagatcatggcgaccaatggtgttgtccacttgaccgtttcagatgatcttgaaggtgtttccaatatattgaggtggctcagctatgttcctgcaaacattggtggacctcttcctattaccaaacctttggaccctccagatagacctgtcgcatacatccctgagaacacatgcgatccgcgtgcagccatccgtggtgtagatgacagccaagggaaatggttgggtggtatgtttgacaaagacagctttgtggagacatttgaaggatgggcaaaaacagtggttactggcagagcaaagcttggaggaattcctgtgggtgttatagctgtggagacacagaccatgatgcagctcatccctgctgatccaggtcaacttgattcccatgagcgatctgttcctcgggctggacaagtgtggttcccagattctgcaaccaagacagctcaggcattattagacttcaaccgtgaaggattgcctctgttcatcctggctaactggagaggcttttctgggggacagagagatctctttgaaggtattcttcaggctgggtcagcaattgttgagaaccttaggacatataatcagcctgcgtttgtctacattcctatggctggagagcttcgtggaggagcttgggttgtgatcgatagcaaaataaatccagaccgcattgagtgttatgctgagaggactgccaaaggtaatgtgctcgaacctcaagggttaattgaaattaagttcaggtcagaggaactccaagactgtatgggcaggcttgacccagagttgataaatctgaaagcaaaacttcaagatgcaaagcatggaaatggaagtctaccagacatagaatcgcttcagaagagtatagaagcgcgtacaaaacagttgttacctttatatacccagattgcagtacgctttgctgaattgcatgatacttccctgagaatggcagctaaaggcgtgattaagaaagttgtagactgggaagaatcacgctctttcttctataaaaggctacggaggaggatctctgaagatcttcttgcaaaagaaataagacgaataattggtgacaacttcacgcaccaatcggcgatggagcttatcaatgaatggtacctggcttctcaggccacaacaggaagcactgctggatgggatgatgatgatgcttttgttgcctggaaggacagtcctgaaaactacaagggatatatccaagagctaagggctcaaaaagtatctcagtcgctctctgatcttgctgactccagttcagatctacaagcattctcgcagggtctttctacactattagataagatggatccttctcagagagtgaagtttgttcaggaagtcaagaaggttcttggatgatgatatgataccaacacatccaacacaatatgcgcatgctacatgttatttttcaagtacatacatagaaggatattgcttggccttgattgatcatgtctgatctaagtcgatcattattttcttgaaacttcctttcggacgtggtgctatggttgatgaatttggatgtgtgcgttctgccaggtgtaagcccaaaggtttatacagaccgagttaaggttaggaagagcacgagtgaacttgttctggttttgcagtggttaaggcagaaagttgtttcactgtagttctgagatgtattaccagcggcgctgtaattttagggtgtataatgcggatgctagtaaacaattgagtggttcattaaattttgaactcgaataatatgtttctgtaggcacatgtgacgtaccactacatgaaataaatgtcgctgaactagggcaccagagttttggtaggactaaggttttgtttggttatgggataaggtgagcatctccagcgttcccaaacttgaatttcccaataaatttctaatgcgacgggctagacaaaaagcttgttgagccggctcggtagctttggttaagaaatgctttgtt

SEQ ID NO: 221572 - DNA, 7788 bp, Zea Mays
gctcgccccacgcgtcccgctatttattccgccggctcgtcgccagcgccgctccctctgtcgcggccgagtggagctcgtcagatccgcgcgccgcacgccgatctgcgccacctccgattttcaggaattttgctctctttttatggcactgtgcttttgagaaggcctttaattgtgctgtctgggccacggaacggcaatgtcgcagcttggattagctgcaactgcctcgaaggccttgccactactccctaatcgccagagaagtccagctgggactacatttccatcatctgcattgccgaggccctcaaaccgaaggaaaagccatactcgttcacttcgtgatggtggaaatgaggtatcagatgccaaaaagcacagccagtcagttcgtcaaggtcttgctggcattatcgacatcccaagtgacgcagtttcggaagtcgatatttcacatggacctaaggatcctagggggccaacagattcctatcaaatgaatgggattatcaatgaaacacataatggaagacatgcctcagggtccatggttgttgaattttgtgcagcactaggtggcaaaacaccaattcacagtatattagtggccaacaatggaatggcggcaacaaagttcatgaggagtgtccgtacatgggctaatgatacttttggatctgagaaggcaattcatctcatagctatggcaactccggaagacatgaggataaatgcagaacacatcagacttgctgatcaattcgtagaggtgcctggtggaacaaacaataataactatgccaacgttcaactcatagtggagatagcagaaagagtaggtgtttctgctgtttggcctggttggggtcatgcttctgagaatcctgagctgccggatgcattgaccgcaaaaggaatcgtttttcttgggccaccagcaacatcaatgaatgcattgggagataaggttggttcagctctcattgctcaagcagccggggtcccaactcttgcttggagtggatcgcatgttgaagttccattagagtgctgcttagacgcgatacctgaggagatgtatagaaaagcttgtgttactaccacagaggaggcagttgcaagttgtcaagtggttggttatcctgccatgattaaggcatcctggggaggtggtggtaaaggaataagaaaggttcataatgatgatgaggttagagcgctgtttaagcaagtacaaggtgaagtccctggctccccaatatttatcatgaggcttgcatcccagagtcggcatcttgaagttcagttgctttgtgatcaatatggcaatgtagcagcacttcacagtcgtgattgcagtgtacaacggcgacaccagaagattattgaagaaggcccagttactgttgctcctcgtgaaacagttaaagcacttgagcaggcagcaaggaggcttgctaaggctgtgggttatgttggtgcggctactgttgagtatctttacagcatggagactggagaatactattttctggagcttaatccccgactacaggttgagcatccagtcactgagtggatagctgaagtaaatctgcctgcagctcaagttgcagttggaatgggcatacctctttggcagattccagaaatcagacgtttttatggaatggactatggaggagggtatgacatttggaggaaaacagcagctcttgctgcaccatttaattttgatgaagtagattctctatggccaaagggccattgtgtagcagttagaattactagtgaggacccagatgatggtttcaaacctactggcgggaaagtgaaggagataagttttaaaagcaagcctaatgtttgggcctacttctcagtaaagtctggtggaggcattcatgaatttgctgattctcagtttggacatgtttttgcatatggactctctagaccagcagctataacaaacatgtctcttgcattaaaagagattcagattcgtggagaaattcattcaaatgttgattacacagttgacctcttaaacgcttcagacttcagagaaaacaagatccacactggttggctggatacaagaatagctatgcgtgttcaagctgagaggcccccatggtatatctcagtggttggaggtgctttatataaaacagtaaccaccaatgcagccactgtttctgaatatgttagttatctcaccaaaggccagattccaccaaagcatatatcccttgtcaattcaacagttaatttgaatatagaagggagcaaatacacaattgaaactgtcaggactgggcatggtaggtacaagttgcgaatgaatgattcaacagttgaggcgaatgtacaatctttatgtgatggtggcctcttaatgcagttggatggaaacagccatgtgatttatgcagaagaagaagctggcggtacacggcttcagattaatggaaagacatgcttgttgcagaatgaccatgatccatcaaagttattagctgagactccctgcaaacttcttcgctttttggttgctgatggtgctcatgttggtgcggatgtgccatatgcggaagttgaggttatgaagatgtgcatgcctctcttgtcacctgcttctggtgtcattcattgtatgatgtctgagggccaggcgttgcaggctggtgatcttatagcaaggctggatcttgatgacccttctgctgtgaaaagagctgaaccatttgatggaatgtttccactaatggacctccctgttgctgcctctagtcaagtacacaaaagatatgctgcaagtttgaatgctgctcgaatggtccttgcaggatatgagcacaatatcaatgaagtcgttcaagatttggtatgctgcctggacaatcctgagcttccttttctacagtgggatgaactaatgtctgttctagcaacgaggcttccaagaaatctcaagagtgagttagaggataaatacaaggaatacaagttgaatttttaccatgggaaaaacaaggacttcccatccaagttgctaagagacatcgtcgaggaaaatcttgcatatggttcagagaaggaaaaggctacaaatgagcgacttgttgagcctcttatgaacctactgaagtcatatgagggtgggagagaaagccatgcacattttgttgtcaagtctctttttgaggagtatcttaccgtggaagaacttttcagtgatggcattcagtctgacgtgattgaaaccttgcgtcatcagcacagtaaagacctgcagaaggttgtagacatcgtgctgtctcaccagggtgtgaggaacaaagctaagcttgtaacagcacttatggaaaagctggtttatccaaatcctggtgcgtacagggatctgttggttcgcttttcgtccctcaatcataaaagatattataagttggcccttaaagcaagtgaacttcttgaacaaaccaaactaagtgaactctgttccagcattgcaagaagcctttcagatctggggatgcataagggagaaatgactattaaggatagcatggaagatttagtctctgccccattgcctgttgaagatgctcttatttctttgtttgattacagtgatccaactgttcagcagaaagtgattgtgacatacatatcacgattgtaccagcctcatcttgtgaaggatagcatccaaatgaaattcaaagaatctggtgctattgttttttgggaattttctgaagggcatgttgatactagaaatggacaaggggctattcttggtgggaagagatggggtgccatggtcgttctcagatcacttgaatctgcatcaacagccattatggctgcattaaaagattctgtacagtacaacaactctgaggtcaacacaatgcacattgtgttattgaatgctgaaactgaaagtaatataagtgggacaagtgatgaccaagctcaacataggatggaaaagcttaccaagatactgaaggatagtagtgttgcaagtgatctccaagctgctggtttgaaggttataagttgcattgttcaaagagatgcaggtcgcatgccaatgcgccacacattcctctggtttgatgaaaagaactgttatgaagaagagcatattctccggcatgtggagcctcccctctctgcacttcttgaattgggtaagttgaaagtgaaaggatacaacgaaatgaagtatactccatcacgtgatcgtcaatggcatatctacacactaagaaatactgaaaaccccaaaatgttgcatagggtatttttccgaactattgtcaggcaacccaatgcaggcaacaagtttacgtcggcacaggtcagcgacactggattaggatgtcctgaagaatctctgtcatttacatcgaatagcatcttaagatcactgatgactgctatagaagaattagagcttcatgcgattaggacaggtcattctcacatgtttttgtgcatactgaaagaacaaaagcttcttgatctcgtcccattttcagggagtacaattgttgacgttggccaagatgaagctactgcttgttcacttttaagatcaatggctttgaagatacatgaacttgttggtgcaaggatgcatcatctttctgtatgccagtgggaggtgaaactcaagttggactgtgatggacctgcaagtggtacctggagagtcgtaactacaaatgtcactagtcacacctgcaccattgatatctaccgagaagtggaagatacagaatcgcagaagttactataccattcagctacttcgtcagctggtccaatgcatggtgttgcactgaataatccttatcaacctttgagtgtgattgatctaaagcgctgctctgctaggaacaacagaacaacatattgctacgattttccgctggcatttgaaactgcactgcagaagtcatggcaatccaactgttctagtgttcctgaaggcagtgaaaatagtaaatcctacgtgaaatcaactgagctggtgtttgctgaaaaacatgggtcctggggcactcctataattcccatggaacgtcctgctgggctcaatgacattggtatggtcgcttggatcttggaaatgtcaacacctgaatttcccaatggcaggcagattattgttgtagcaaatgatattactttcagagctggatcattcggcccaagggaagatgcattttttgaagctgtcaccaacctggcttgcgaaaggaagcttccccttatatacttggcagcaaactctggtgctaggattggcatagctgatgaagtgaaatcttgcttccgtgttgggtggtctgatgaacgcagccctgaacgagggtttcagtacatctatctgactgaagaagactatgctcgtattagctcttctgttatagcacataagctgcagctagataatggtgaaattaggtggattattgactctgttgtgggcaaggaggatgggcttggtgttgagaacatacatggaagtgctgctattgccagtgcttattctagggcatatgaggagacatttacacttacatttgtgactgggcggactgtaggaataggagcctatcttgctcgacttggtatacggtgcatacagcgccttgaccagcctattattttaacagggttttctgccctgaacaagctccttgggcgagaagtgtacagctcccacatgcagctgggtggtcctaagatcatggcgaccaatggtgttgtccacttgaccgtttcagatgatcttgaaggtgtttccaatatattgaggtggctcagctatgttcctgcaaacattggtggacctcttcctattaccaaacctttggaccctccagatagacctgtcgcatacatccctgagaacacatgcgatccgcgtgcagccatccgtggtgtagatgacagccaagggaaatggttgggtggtatgtttgacaaagacagctttgtggagacatttgaaggatgggcaaaaacagtggttactggcagagcaaagcttggaggaattcctgtgggtgttatagctgtggagacacagaccatgatgcagctcatccctgctgatccaggtcaacttgattcccatgagcgatctgttcctcgggctggacaagtgtggttcccagattctgcaaccaagacagctcaggcattattagacttcaaccgtgaaggattgcctctgttcatcctggctaactggagaggcttttctgggggacagagagatctctttgaaggtattcttcaggctgggtcagcaattgttgagaaccttaggacatataatcagcctgcgtttgtctacattcctatggctggagagcttcgtggaggagcttgggttgtgatcgatagcaaaataaatccagaccgcattgagtgttatgctgagaggactgccaaaggtaatgtgctcgaacctcaagggttaattgaaattaagttcaggtcagaggaactccaagactgtatgggcaggcttgacccagagttgataaatctgaaagcaaaacttcaagatgcaaagcatggaaatggaagtctaccagacatagaatcgcttcagaagagtatagaagcgcgtacaaaacagttgttacctttatatacccagattgcagtacgctttgctgaattgcatgatacttccctgagaatggcagctaaaggcgtgattaagaaagttgtagactgggaagaatcacgctctttcttctataaaaggctacggaggaggatctctgaagatcttcttgcaaaagaaataagacgaataattggtgacaacttcacgcaccaatcggcgatggagcttatcaatgaatggtacctggcttctcaggccacaacaggaagcactgctggatgggatgatgatgatgcttttgttgcctggaaggacagtcctgaaaactacaagggatatatccaagagctaagggctcaaaaagtatctcagtcgctctctgatcttgctgactccagttcagatctacaagcattctcgcagggtctttctacactattagataagatggatccttctcagagagtgaagtttgttcaggaagtcaagaaggttcttggatgatgatatgataccaacacatccaacacaatatgcgcatgctacatgttatttttcaagtacatacatagaaggatattgcttggccttgattgatcatgtctgatctaagtcgatcattattttcttgaaacttcctttcggacgtggtgctatggttgatgaatttggatgtgtgcgttctgccaggtgtaagcccaaaggtttatacagaccgagttaaggttaggaagagcacgagtgaacttgttctggttttgcagtggttaaggcagaaagttgtttcactgtagttctgagatgtattaccagcggcgctgtaattttagggtgtataatgcggatgctagtaaacaattgagtggttcattaaattttgaactcgaataatatgtttctgtaggcacatgtgacgtaccactacatgaaataaatgtcgctgaactagggcaccagagttttggtaggactaaggttttgtttggttatgggataaggtgagcatctccagcgttcccaaacttgaatttcccaataaatttctaatgcgacgggctagacaaaaagcttgttgagccggctcggtagctttggttaagaaatgctttgtt

SEQ ID NO: 221573 - DNA, 7804 bp, Zea Mays
ctctgtcgcggccgagtggagctcgtcagatccgcgcgccgcacgccgatctgcgccacctccgggtttaagcttgggatggattgggcagcgccacccgaggttttgcatgcgcccgaccgcagcggaattccgtgaaccctgaattttgctctctttttatggcactgtgcttttgagaaggcctttaattgtgctgtctgggccacggaacggcaatgtcgcagcttggattagctgcaactgcctcgaaggccttgccactactccctaatcgccagagaagtccagctgggactacatttccatcatctgcattgccgaggccctcaaaccgaaggaaaagccatactcgttcacttcgtgatggtggaaatgaggtatcagatgccaaaaagcacagccagtcagttcgtcaaggtcttgctggcattatcgacatcccaagtgacgcagtttcggaagtcgatatttcacatggacctaaggatcctagggggccaacagattcctatcaaatgaatgggattatcaatgaaacacataatggaagacatgcctcagggtccatggttgttgaattttgtgcagcactaggtggcaaaacaccaattcacagtatattagtggccaacaatggaatggcggcaacaaagttcatgaggagtgtccgtacatgggctaatgatacttttggatctgagaaggcaattcatctcatagctatggcaactccggaagacatgaggataaatgcagaacacatcagacttgctgatcaattcgtagaggtgcctggtggaacaaacaataataactatgccaacgttcaactcatagtggagatagcagaaagagtaggtgtttctgctgtttggcctggttggggtcatgcttctgagaatcctgagctgccggatgcattgaccgcaaaaggaatcgtttttcttgggccaccagcaacatcaatgaatgcattgggagataaggttggttcagctctcattgctcaagcagccggggtcccaactcttgcttggagtggatcgcatgttgaagttccattagagtgctgcttagacgcgatacctgaggagatgtatagaaaagcttgtgttactaccacagaggaggcagttgcaagttgtcaagtggttggttatcctgccatgattaaggcatcctggggaggtggtggtaaaggaataagaaaggttcataatgatgatgaggttagagcgctgtttaagcaagtacaaggtgaagtccctggctccccaatatttatcatgaggcttgcatcccagagtcggcatcttgaagttcagttgctttgtgatcaatatggcaatgtagcagcacttcacagtcgtgattgcagtgtacaacggcgacaccagaagattattgaagaaggcccagttactgttgctcctcgtgaaacagttaaagcacttgagcaggcagcaaggaggcttgctaaggctgtgggttatgttggtgcggctactgttgagtatctttacagcatggagactggagaatactattttctggagcttaatccccgactacaggttgagcatccagtcactgagtggatagctgaagtaaatctgcctgcagctcaagttgcagttggaatgggcatacctctttggcagattccagaaatcagacgtttttatggaatggactatggaggagggtatgacatttggaggaaaacagcagctcttgctgcaccatttaattttgatgaagtagattctctatggccaaagggccattgtgtagcagttagaattactagtgaggacccagatgatggtttcaaacctactggcgggaaagtgaaggagataagttttaaaagcaagcctaatgtttgggcctacttctcagtaaagtctggtggaggcattcatgaatttgctgattctcagtttggacatgtttttgcatatggactctctagaccagcagctataacaaacatgtctcttgcattaaaagagattcagattcgtggagaaattcattcaaatgttgattacacagttgacctcttaaacgcttcagacttcagagaaaacaagatccacactggttggctggatacaagaatagctatgcgtgttcaagctgagaggcccccatggtatatctcagtggttggaggtgctttatataaaacagtaaccaccaatgcagccactgtttctgaatatgttagttatctcaccaaaggccagattccaccaaagcatatatcccttgtcaattcaacagttaatttgaatatagaagggagcaaatacacaattgaaactgtcaggactgggcatggtaggtacaagttgcgaatgaatgattcaacagttgaggcgaatgtacaatctttatgtgatggtggcctcttaatgcagttggatggaaacagccatgtgatttatgcagaagaagaagctggcggtacacggcttcagattaatggaaagacatgcttgttgcagaatgaccatgatccatcaaagttattagctgagactccctgcaaacttcttcgctttttggttgctgatggtgctcatgttggtgcggatgtgccatatgcggaagttgaggttatgaagatgtgcatgcctctcttgtcacctgcttctggtgtcattcattgtatgatgtctgagggccaggcgttgcaggctggtgatcttatagcaaggctggatcttgatgacccttctgctgtgaaaagagctgaaccatttgatggaatgtttccactaatggacctccctgttgctgcctctagtcaagtacacaaaagatatgctgcaagtttgaatgctgctcgaatggtccttgcaggatatgagcacaatatcaatgaagtcgttcaagatttggtatgctgcctggacaatcctgagcttccttttctacagtgggatgaactaatgtctgttctagcaacgaggcttccaagaaatctcaagagtgagttagaggataaatacaaggaatacaagttgaatttttaccatgggaaaaacaaggacttcccatccaagttgctaagagacatcgtcgaggaaaatcttgcatatggttcagagaaggaaaaggctacaaatgagcgacttgttgagcctcttatgaacctactgaagtcatatgagggtgggagagaaagccatgcacattttgttgtcaagtctctttttgaggagtatcttaccgtggaagaacttttcagtgatggcattcagtctgacgtgattgaaaccttgcgtcatcagcacagtaaagacctgcagaaggttgtagacatcgtgctgtctcaccagggtgtgaggaacaaagctaagcttgtaacagcacttatggaaaagctggtttatccaaatcctggtgcgtacagggatctgttggttcgcttttcgtccctcaatcataaaagatattataagttggcccttaaagcaagtgaacttcttgaacaaaccaaactaagtgaactctgttccagcattgcaagaagcctttcagatctggggatgcataagggagaaatgactattaaggatagcatggaagatttagtctctgccccattgcctgttgaagatgctcttatttctttgtttgattacagtgatccaactgttcagcagaaagtgattgtgacatacatatcacgattgtaccagcctcatcttgtgaaggatagcatccaaatgaaattcaaagaatctggtgctattgttttttgggaattttctgaagggcatgttgatactagaaatggacaaggggctattcttggtgggaagagatggggtgccatggtcgttctcagatcacttgaatctgcatcaacagccattatggctgcattaaaagattctgtacagtacaacaactctgaggtcaacacaatgcacattgtgttattgaatgctgaaactgaaagtaatataagtgggacaagtgatgaccaagctcaacataggatggaaaagcttaccaagatactgaaggatagtagtgttgcaagtgatctccaagctgctggtttgaaggttataagttgcattgttcaaagagatgcaggtcgcatgccaatgcgccacacattcctctggtttgatgaaaagaactgttatgaagaagagcatattctccggcatgtggagcctcccctctctgcacttcttgaattgggtaagttgaaagtgaaaggatacaacgaaatgaagtatactccatcacgtgatcgtcaatggcatatctacacactaagaaatactgaaaaccccaaaatgttgcatagggtatttttccgaactattgtcaggcaacccaatgcaggcaacaagtttacgtcggcacaggtcagcgacactggattaggatgtcctgaagaatctctgtcatttacatcgaatagcatcttaagatcactgatgactgctatagaagaattagagcttcatgcgattaggacaggtcattctcacatgtttttgtgcatactgaaagaacaaaagcttcttgatctcgtcccattttcagggagtacaattgttgacgttggccaagatgaagctactgcttgttcacttttaagatcaatggctttgaagatacatgaacttgttggtgcaaggatgcatcatctttctgtatgccagtgggaggtgaaactcaagttggactgtgatggacctgcaagtggtacctggagagtcgtaactacaaatgtcactagtcacacctgcaccattgatatctaccgagaagtggaagatacagaatcgcagaagttactataccattcagctacttcgtcagctggtccaatgcatggtgttgcactgaataatccttatcaacctttgagtgtgattgatctaaagcgctgctctgctaggaacaacagaacaacatattgctacgattttccgctggcatttgaaactgcactgcagaagtcatggcaatccaactgttctagtgttcctgaaggcagtgaaaatagtaaatcctacgtgaaatcaactgagctggtgtttgctgaaaaacatgggtcctggggcactcctataattcccatggaacgtcctgctgggctcaatgacattggtatggtcgcttggatcttggaaatgtcaacacctgaatttcccaatggcaggcagattattgttgtagcaaatgatattactttcagagctggatcattcggcccaagggaagatgcattttttgaagctgtcaccaacctggcttgcgaaaggaagcttccccttatatacttggcagcaaactctggtgctaggattggcatagctgatgaagtgaaatcttgcttccgtgttgggtggtctgatgaacgcagccctgaacgagggtttcagtacatctatctgactgaagaagactatgctcgtattagctcttctgttatagcacataagctgcagctagataatggtgaaattaggtggattattgactctgttgtgggcaaggaggatgggcttggtgttgagaacatacatggaagtgctgctattgccagtgcttattctagggcatatgaggagacatttacacttacatttgtgactgggcggactgtaggaataggagcctatcttgctcgacttggtatacggtgcatacagcgccttgaccagcctattattttaacagggttttctgccctgaacaagctccttgggcgagaagtgtacagctcccacatgcagctgggtggtcctaagatcatggcgaccaatggtgttgtccacttgaccgtttcagatgatcttgaaggtgtttccaatatattgaggtggctcagctatgttcctgcaaacattggtggacctcttcctattaccaaacctttggaccctccagatagacctgtcgcatacatccctgagaacacatgcgatccgcgtgcagccatccgtggtgtagatgacagccaagggaaatggttgggtggtatgtttgacaaagacagctttgtggagacatttgaaggatgggcaaaaacagtggttactggcagagcaaagcttggaggaattcctgtgggtgttatagctgtggagacacagaccatgatgcagctcatccctgctgatccaggtcaacttgattcccatgagcgatctgttcctcgggctggacaagtgtggttcccagattctgcaaccaagacagctcaggcattattagacttcaaccgtgaaggattgcctctgttcatcctggctaactggagaggcttttctgggggacagagagatctctttgaaggtattcttcaggctgggtcagcaattgttgagaaccttaggacatataatcagcctgcgtttgtctacattcctatggctggagagcttcgtggaggagcttgggttgtgatcgatagcaaaataaatccagaccgcattgagtgttatgctgagaggactgccaaaggtaatgtgctcgaacctcaagggttaattgaaattaagttcaggtcagaggaactccaagactgtatgggcaggcttgacccagagttgataaatctgaaagcaaaacttcaagatgcaaagcatggaaatggaagtctaccagacatagaatcgcttcagaagagtatagaagcgcgtacaaaacagttgttacctttatatacccagattgcagtacgctttgctgaattgcatgatacttccctgagaatggcagctaaaggcgtgattaagaaagttgtagactgggaagaatcacgctctttcttctataaaaggctacggaggaggatctctgaagatcttcttgcaaaagaaataagacgaataattggtgacaacttcacgcaccaatcggcgatggagcttatcaatgaatggtacctggcttctcaggccacaacaggaagcactgctggatgggatgatgatgatgcttttgttgcctggaaggacagtcctgaaaactacaagggatatatccaagagctaagggctcaaaaagtatctcagtcgctctctgatcttgctgactccagttcagatctacaagcattctcgcagggtctttctacactattagataagatggatccttctcagagagtgaagtttgttcaggaagtcaagaaggttcttggatgatgatatgataccaacacatccaacacaatatgcgcatgctacatgttatttttcaagtacatacatagaaggatattgcttggccttgattgatcatgtctgatctaagtcgatcattattttcttgaaacttcctttcggacgtggtgctatggttgatgaatttggatgtgtgcgttctgccaggtgtaagcccaaaggtttatacagaccgagttaaggttaggaagagcacgagtgaacttgttctggttttgcagtggttaaggcagaaagttgtttcactgtagttctgagatgtattaccagcggcgctgtaattttagggtgtataatgcggatgctagtaaacaattgagtggttcattaaattttgaactcgaataatatgtttctgtaggcacatgtgacgtaccactacatgaaataaatgtcgctgaactagggcaccagagttttggtaggactaaggttttgtttggttatgggataaggtgagcatctccagcgttcccaaacttgaatttcccaataaatttctaatgcgacgggctagacaaaaagcttgttgagccggctcggtagctttggttaagaaatgctttgtt

SEQ ID NO: 221574 - DNA, 1530 bp, Zea Mays
cctgcccctagctcggcgcccaaacataacgtcgtaaccgttccaacgaacttgctctgctctctcggtctctcctcccctcgcaccagcgccaagccgccaataaacccactccctcgccgccgcccgtcgccgccgaagcaccagaagccagccgcaggaccggacgtccgccgccgcgccgcgaacaccagcgccaccacctgcggccgcggcggcgatggagcagttccccgacggggcgcacgtgcggctgcggagccgcgtgcacgcagggtacctccacgccgacgaggacggggtgggggtgtccctgcgccgctggcgccgcaggtcgatgaacgtggcgtggaaggtgcaccgcatcctgcacgacggctccaccagcgtcctcctccacagcgccgcctatggccggtacctcgcggcgtcccacgacccggcgccgccgggccacctcggcctccgcgtcgacctgggcgactacgaccaggacgtggaccccatcctgtggaaggccgtcggctccggggacgccggctacgtcctcctgcgccacgtctccaaccgcctcctccgcgccaacggaaggtaccgcctctggcaccgtggcgtctccgtcgacgacgtcgacaaccagagcacgatgatgcattggaaggtcgagaccatccccaccagccccaggccgccagcacttccagcgccgactcggaggaaccgaggcagcttccgcggcctgttcctcctgcacgaggagcccgtggtgctgcagcggacggtacggttcgtgcgggcggacaactacggcaacttcccggacaactggggcacgctccagttccagggccgctccgtctttgagctgagagcggagatggcgcgtcgcttaaactatgcgctcttcttcttccgcctcctgatgtgcgtccggggcggccgctacgggcgcctgaccccgctactcatcgacctgcctcgcaacgaggagaccctggacatcatcgtcctcttcatcgggacacaagttgctcaggaattgcggtacccggtggtaaacccaagaggtgtatgagggcaggacagacagactcctctgacaaaccccttcacaattcacctctttaaggtgctgctgctccagaaacaccggcatgagaagaattggctctcttttcattcgtgttcaagatagtttcagaaaatccagcagctttgcggttttcgatagttagatcttgtgcctttcttctgacacgaaacagctcgtgctggtctttcagcttcagaacttgcaacttgctgaatgtgatttttgcgaagtgacatcgggtctctagtcacgagcttcatccctatactcaccatgtactgataaggagaatggacgttgctgttttactttgtaccttttgtccgtgataagatcaaatgtaacagtcaatagtcaatgcatgctgatcttaggtttcagtcaggacctgaaaaccattgtaacaacctgtatatgctattctgccgaagcctcca

SEQ ID NO: 221575 - DNA, 588 bp, Zea Mays
actagtacgtagaaatccaacactcgggacgaaattaaaagagacgagacgacgccgcatccagttcaagctctacgcgctcgacgacgaggtgcacctcggcaacaagggataagctcatggaggcgatcgacgggcacgtgctggaagaagccgagctgatcgccgtgttccagggagtcgtcgccaacaactaacacacacactcagagatatctttgttggcgtgctttgtatttgcttgtgtggctaccatgtaattttgatcgaataaaagggaacttcacatgtgcttagcttattgtgtgacgaagagtacgtcatgtgggcagctttacgtgctttacgtacgttaagagtaggggtgggcacatttttacccgaaccgtaccgaaccgtaccgaaccgaaattttggttttttcggtagttcggttcggtttcggtttttgtatctcaaaagttcggttttcggtatcgtaatcggttttcaccgtataccaaaccgaaataaaaaaacgaattacctaactttatcaattttaaattacctaactttatcaattctaaaatttggctattcgattat

SEQ ID NO: 221576 - DNA, 988 bp, Zea Mays
gaacaactgactagaactagtacgtagaaatccaacactcgggacgaaattaaaagagacgagacgacgcatcatccggcatggcggcgcaggagggcggcatgaggctggtgtcgcacccgatcgcggcgcacgacgggcggctgccgcggcagtacacggcggaggggcagggcgccaagaaggacatgtcgccgccgctggaatggtacggcgtgcccgagggcgcgcggtcgctggcgctgctggtgcaggacatcgacgccgaccccatcgtgccgtggacgcactgggtggtggccaacatcccgcccgccaccaggggcctccccgaggggttctccggcgccgcgggggcggggccggggcgcgaccagctcggcggactgcaggagggggtcaacgactggaagcagcccggctggcgcgggcccgtgccgccctcccacggccaccgcatccagttcaagctctacgcgctcgacgacgaggtgcacctcggcaacaagggataagctcatggaggcgatcgacgggcacgtgctggaagaagccgagctgatcgccgtgttccagggagtcgtcgccaacaactaacacacacactcagagatatctttgttggcgtgctttgtatttgcttgtgtggctaccatgtaattttgatcgaataaaagggaacttcacatgtgcttagcttattgtgtgacgaagagtacgtcatgtgggcagctttacgtgctttacgtacgttaagagtaggggtgggcacatttttacccgaaccgtaccgaaccgtaccgaaccgaaattttggttttttcggtagttcggttcggtttcggtttttgtatctcaaaagttcggttttcggtatcgtaatcggttttcaccgtataccaaaccgaaataaaaaaacgaattacctaactttatcaattttaaattacctaactttatcaattctaaaatttggctattcgattat

SEQ ID NO: 221577 - DNA, 1538 bp, Zea Mays
cggcacgcccgcacgggaaccgggcagcacggcttgctaaacacgcagaaaagaaaagccgttctccctccgtttccccaaaccccaaggtccccaaccatggcagccgccgccgattctgcctccgaccaaaaccctaaggacgccgagcggcacgtgctcaccgccgaatccgacgccgatttctccgaggaggactacgacgaggatggggaggaggaatacgaggaggaggaggagctggacgggccggcggcggcggcggcggagcgggagcggatgcagtccgtgttacggaggctgtcatccgaccccgtgggcatccgcgtccacgacgtgatcatcaagggcaacaccaagacgcaggacgagctcatcgaggcggaggtcgccgagctgctccgcgccgcccccaccgtgcaggacctgctccgcgccgccagtgtcgccactgcgcggctgcacgatctcgacatcttcgacgccgtcaagatcacgctcgacgccgggccgcccgagctgcctggcaccaccaacgtcgtcatcgaggtcgtcgaggtggccaaccccctcactggcaccgccggcgtctattcgaagcccgaagcaagatcttggtcgctggaagggtcacttaagttgaagaacttgtttggctatggtgacatctgggatgcatcaggatcctttggttgggaccaaacaacagaggttggtgttggagtctgcctaccgaggtttaaatcaataccaacaccattgatggctcgggcatctttgtcatcacaagattggctgaagttttcatcatacaaggagcgcctacttggcctttcatttggtttgctgtcaacaaggaaccatgacttgtcatacaaccttgcgtggcgtaccttaactgatccatcacgtgtctcatcaaaggccataaggaggcagttagggcataaccttctttctgcattgaagtacacatacaagattgataagagggattcacatcttaggccaacgaaaggatatgcgtttcagtcaacttctcaagttggtggtctatggaatagcaaaggattgagatatttccggcaggagttcgatgtacgtggtgctgtgcctttgggattttatagtgctgctctcaacgttggtgtaggagcgggtgtcattttaccgcttgcagggggattcatgaattcgacttcatcagtgccagagaggttttatcttggagatattcagagacgctggaatccatggccacgcattccttactgctggaaaccttgcgaaactgtcggagggtgagtacaagaacttttcggcttctgaatttcggcaaacgttccggagctctgctggcgttgggattattttgcctaccaaacttttccgggtagaggtgaactattgccgcatcctaaagcaagctgagcatgacagcgcgaagactggaatccagttcagcttttcctcgcccatggcaaaaatatgtatgatttcggtggaatcagaagctatccacaaataagccctggtgt

SEQ ID NO: 221578 - DNA, 2943 bp, Zea Mays
cccaagtccccagtccgcactgaccactgccaccaccaaaaactcatggcctctcgcgcacccatccctcctgctccgccccacctccgcctccacgccgcgtccctcttctcgcagcgcctcccactccctcgcgcgcgtgccccgcgatgccgcggcggacggagccgcctcctctcagcgctgccgtcgccgcccccctcgccagcctcgcgctcgcagggcgtctccaccgctccgatcgagcgcgaaccaccgggactcgcgcccacgcccgcgcctacccccgctcagcagccgcaccaggatccagcgatcgccgcggaggtcgctcgcctctccgccgcccgcgagaggctccgcgcggcgcacacgctccacgagaaactccgcgcgctcgacgctgagccccgcgtcgcggcgttcttcggcgaggagtccagccgcggggtgttgggcgtgctcgagccccgcgaggtgctcctgctgaaatgcctcgtcgcggcaggacaggagcacgtgctcggccatgagctcgattggtacggcggcgacggcggccatcacgagcaccaccaccgcaacggggtcagtggtgggagtgccctgcgggatgcgctgtatagcctggccggtttggtcgggaagtggacctcggagggagtggtggctgccaaggagagaagggaggaaatggaggtgctacctagactgctcaagttcctcgacaacgtcgaggagttctacgactgcattggtggcatcatcggctatcaaattatggtattggagctcctttcagcctctaaggatcgcatgcaccgacctagcaaagacaagtttgttgatttccatgttcccagtggacttaatttattgaaggataaagaatatgcatctcaagcagctctgtggggaattgagggtctgccagaattaggtgaaatttacccaattggtggtgcgggtgatcgtcttggtttagtggactcagatactggtgagtcccttcctgctgcgttgctcccttactgtgggagatccctgttggaagggctgatacgggatctgcaggctagagagtttctccacttcaagatctttggaggtcaatgtataaccccagttgcaatcatgaccagttctgtgaaggataatcatgaacatataattgcgatatgcgaaagacttgattggtttggtagaggccgtgacaatttccggttgtttgaacagcctttggtacctgtagtaaatgccaaagatggtaaatggttaatcagcaaatcacttttccctgttggtaaacctggtggtcatggtgctatttggaaacttgcatatgatagaggtgtactccaatggttacaaaattgtggcaggaaaggtgcaactgtacgccaagtcagcaatgtggttgctgcaactgatttgaccatgatggcattggcaggaataggccttcgatgcaacaagaaattaggttttgcatcttgtgagcgaagacctggggctactgaaggagtgaatgtccttattgagaaacaaaatcttgaggggctatggtcatatggcatcacttgtatcgagtacactgagtttgaaaagtatggcatcccagaacctacactaaccaacagttcgcaggttagctttccagcaaatacgaacattctctatgttgatctacaagcggtacaggaagttggatctcgcaaaaatgctagttgcttaccagggatggtgctgaatttgaaaaaggcagtatcgtaccccaaccatcttggctttgagttgctgctggaggcaggctagagtgcacaatgcaaaacattgcagatgattttatgaacacttttaactacagatgcagcaaaggaatagaaagtgagcttaacactttcattgtatataatgaaaggaaaagagtcacttcatcagctaaaaggaagctgaaatcagaagacagatcattgcaccagactccggagggttcactccttgatattatgcgtaatgctcatgacctcctttccagttgcggcatagatattcccatggttcaagacaacagtgaatatatgcattctggaccgccgtttctcatatttcttcatcctgctttaggcccattttgggatatcatacgacaaaagttcgtaggtggttctgtttctaaaggttcagagttgcaaatagaggtggctgagtttctatggaaagatgttgagctggatggaagctttattattctagctgacaacgtcatgggttcaaccaagaatagcaaaaatggtgaacagatactgcactatggttccaggtgtgggagatgcagactgcaaagtgttaaaattgttaatgaagggatcaattggacttctcccaataatgtctattggaagcatgatgtagagagatcagaatctgtaaagattattcttcatggaaacgcagaatttgaggcaaaagatgtagtcttgaagggtaaccatgtatttgaagttcctgatggtcatagaatgtgcatcattcaggacagagcaggatttgttgttaaattggatcttatacgtgacgaattgatggacagtggaacctggcattggaagtatgcagttgatggtgtccatgtaaagttgaacatggtagaactataaggggtatcaactatagattcttgattcattgatttgtggccagcttaattttattgaggacacacttgacgttggttgactttagtctagattgtaggcgatgacatgttgtaaagataagggagctttgttttcgtacattaggtctgaactgttcccttcattgaagaggtgatgtactagaatatgtatttttcaaatatatggagaatgcttgttctccgaagttatcaaagaacattggtcttgtttgcttccaatgttgtatttgtgttagtttgtg

SEQ ID NO: 221579 - DNA, 2972 bp, Zea Mays
caagtccccagtccgcactgaccactgccaccaccaaaaactcatggcctctcgcgcacccatccctcctgctccgccccacctccgcctccacgccgcgtccctcttctcgcagcgcctcccactccctcgcgcgcgtgccccgcgatgccgcggcggacggagccgcctcctctcagcgctgccgtcgccgcccccctcgccagcctcgcgctcgcagggcgtctccaccgctccgatcgagcgcgaaccaccgggactcgcgcccacgcccgcgcctacccccgctcagcagccgcaccaggatccagcgatcgccgcggaggtcgctcgcctctccgccgcccgcgagaggctccgcgcggcgcacacgctccacgagaaactccgcgcgctcgacgctgagccccgcgtcgcggcgttcttcggcgaggagtccagccgcggggtgttgggcgtgctcgagccccgcgaggtgctcctgctgaaatgcctcgtcgcggcaggacaggagcacgtgctcggccatgagctcgattggtacggcggcgacggcggccatcacgagcaccaccaccgcaacggggtcagtggtgggagtgccctgcgggatgcgctgtatagcctggccggtttggtcgggaagtggacctcggagggagtggtggctgccaaggagagaagggaggaaatggaggtgctacctagactgctcaagttcctcgacaacgtcgaggagttctacgactgcattggtggcatcatcggctatcaaattatggtattggagctcctttcagcctctaaggatcgcatgcaccgacctagcaaagacaagtttgttgatttccatgttcccagtggacttaatttattgaaggataaagaatatgcatctcaagcagctctgtggggaattgagggtctgccagaattaggtgaaatttacccaattggtggtgcgggtgatcgtcttggtttagtggactcagatactggtgagtcccttcctgctgcgttgctcccttactgtgggagatccctgttggaagggctgatacgggatctgcaggctagagagtttctccacttcaagatctttggaggtcaatgtataaccccagttgcaatcatgaccagttctgtgaaggataatcatgaacatataattgcgatatgcgaaagacttgattggtttggtagaggccgtgacaatttccggttgtttgaacagcctttggtacctgtagtaaatgccaaagatggtaaatggttaatcagcaaatcacttttccctgttggtaaacctggtggtcatggtgctatttggaaacttgcatatgatagaggtgtactccaatggttacaaaattgtggcaggaaaggtgcaactgtacgccaagtcagcaatgtggttgctgcaactgatttgaccatgatggcattggcaggaataggccttcgatgcaacaagaaattaggttttgcatcttgtgagcgaagacctggggctactgaaggagtgaatgtccttattgagaaacaaaatcttgaggggctatggtcatatggcatcacttgtatcgagtacactgagtttgaaaagtatggcatcccagaacctacactaaccaacagttcgcaggttagctttccagcaaatacgaacattctctatgttgatctacaagcggtacaggaagttggatctcgcaaaaatgctagttgcttaccagggatggtgctgaatttgaaaaaggcagtatcgtaccccaaccatcttggctttgagtgtagtgctgctggaggcaggctagagtgcacaatgcaaaacattgcagatgattttatgaacacttttaactacagatgcagcaaaggaatagaaagtgagcttaacactttcattgtatataatgaaaggaaaagagtcacttcatcagctaaaaggaagctgaaatcagaagacagatcattgcaccagttactttgtattcctgagttgtgttcgactccggagggttcactccttgatattatgcgtaatgctcatgacctcctttccagttgcggcatagatattcccatggttcaagacaacagtgaatatatgcattctggaccgccgtttctcatatttcttcatcctgctttaggcccattttgggatatcatacgacaaaagttcgtaggtggttctgtttctaaaggttcagagttgcaaatagaggtggctgagtttctatggaaagatgttgagctggatggaagctttattattctagctgacaacgtcatgggttcaaccaagaatagcaaaaatggtgaacagatactgcactatggttccaggtgtgggagatgcagactgcaaagtgttaaaattgttaatgaagggatcaattggacttctcccaataatgtctattggaagcatgatgtagagagatcagaatctgtaaagattattcttcatggaaacgcagaatttgaggcaaaagatgtagtcttgaagggtaaccatgtatttgaagttcctgatggtcatagaatgtgcatcattcaggacagagcaggatttgttgttaaattggatcttatacgtgacgaattgatggacagtggaacctggcattggaagtatgcagttgatggtgtccatgtaaagttgaacatggtagaactataaggggtatcaactatagattcttgattcattgatttgtggccagcttaattttattgaggacacacttgacgttggttgactttagtctagattgtaggcgatgacatgttgtaaagataagggagctttgttttcgtacattaggtctgaactgttcccttcattgaagaggtgatgtactagaatatgtatttttcaaatatatggagaatgcttgttctccgaagttatcaaagaacattggtcttgtttgcttccaatgttgtatttgtgttagtttgtg

SEQ ID NO: 221580 - DNA, 2930 bp, Zea Mays
ccaccaccaaaaactcatggcctctcgcgcacccatccctcctgctccgccccacctccgcctccacgccgcgtccctcttctcgcagcgcctcccactccctcgcgcgcgtgccccgcgatgccgcggcggacggagccgcctcctctcagcgctgccgtcgccgcccccctcgccagcctcgcgctcgcagggcgtctccaccgctccgatcgagcgcgaaccaccgggactcgcgcccacgcccgcgcctacccccgctcagcagccgcaccaggatccagcgatcgccgcggaggtcgctcgcctctccgccgcccgcgagaggctccgcgcggcgcacacgctccacgagaaactccgcgcgctcgacgctgagccccgcgtcgcggcgttcttcggcgaggagtccagccgcggggtgttgggcgtgctcgagccccgcgaggtgctcctgctgaaatgcctcgtcgcggcaggacaggagcacgtgctcggccatgagctcgattggtacggcggcgacggcggccatcacgagcaccaccaccgcaacggggtcagtggtgggagtgccctgcgggatgcgctgtatagcctggccggtttggtcgggaagtggacctcggagggagtggtggctgccaaggagagaagggaggaaatggaggtgctacctagactgctcaagttcctcgacaacgtcgaggagttctacgactgcattggtggcatcatcggtcatacaagaagctatcaaattatggtattggagctcctttcagcctctaaggatcgcatgcaccgacctagcaaagacaagtttgttgatttccatgttcccagtggacttaatttattgaaggataaagaatatgcatctcaagcagctctgtggggaattgagggtctgccagaattaggtgaaatttacccaattggtggtgcgggtgatcgtcttggtttagtggactcagatactggtgagtcccttcctgctgcgttgctcccttactgtgggagatccctgttggaagggctgatacgggatctgcaggctagagagtttctccacttcaagatctttggaggtcaatgtataaccccagttgcaatcatgaccagttctgtgaaggataatcatgaacatataattgcgatatgcgaaagacttgattggtttggtagaggccgtgacaatttccggttgtttgaacagcctttggtacctgtagtaaatgccaaagatggtaaatggttaatcagcaaatcacttttccctgttggtaaacctggtggtcatggtgctatttggaaacttgcatatgatagaggtgtactccaatggttacaaaattgtggcaggaaaggtgcaactgtacgccaagtcagcaatgtggttgctgcaactgatttgaccatgatggcattggcaggaataggccttcgatgcaacaagaaattaggttttgcatcttgtgagcgaagacctggggctactgaaggagtgaatgtccttattgagaaacaaaatcttgaggggctatggtcatatggcatcacttgtatcgagtacactgagtttgaaaagtatggcatcccagaacctacactaaccaacagttcgcaggttagctttccagcaaatacgaacattctctatgttgatctacaagcggtacaggaagttggatctcgcaaaaatgctagttgcttaccagggatggtgctgaatttgaaaaaggcagtatcgtaccccaaccatcttggctttgagtgtagtgctgctggaggcaggctagagtgcacaatgcaaaacattgcagatgattttatgaacacttttaactacagatgcagcaaaggaatagaaagtgagcttaacactttcattgtatataatgaaaggaaaagagtcacttcatcagctaaaaggaagctgaaatcagaagacagatcattgcaccagactccggagggttcactccttgatattatgcgtaatgctcatgacctcctttccagttgcggcatagatattcccatggttcaagacaacagtgaatatatgcattctggaccgccgtttctcatatttcttcatcctgctttaggcccattttgggatatcatacgacaaaagttcgtaggtggttctgtttctaaaggttcagagttgcaaatagaggtggctgagtttctatggaaagatgttgagctggatggaagctttattattctagctgacaacgtcatgggttcaaccaagaatagcaaaaatggtgaacagatactgcactatggttccaggtgtgggagatgcagactgcaaagtgttaaaattgttaatgaagggatcaattggacttctcccaataatgtctattggaagcatgatgtagagagatcagaatctgtaaagattattcttcatggaaacgcagaatttgaggcaaaagatgtagtcttgaagggtaaccatgtatttgaagttcctgatggtcatagaatgtgcatcattcaggacagagcaggatttgttgttaaattggatcttatacgtgacgaattgatggacagtggaacctggcattggaagtatgcagttgatggtgtccatgtaaagttgaacatggtagaactataaggggtatcaactatagattcttgattcattgatttgtggccagcttaattttattgaggacacacttgacgttggttgactttagtctagattgtaggcgatgacatgttgtaaagataagggagctttgttttcgtacattaggtctgaactgttcccttcattgaagaggtgatgtactagaatatgtatttttcaaatatatggagaatgcttgttctccgaagttatcaaagaacattggtcttgtttgcttccaatgttgtatttgtgttagtttgtg

SEQ ID NO: 221581 - DNA, 1455 bp, Zea Mays
atggcaaagttagtgggaacagctaatgtgttgtgtgaatcacttaatacctttgttagtaacactctttttctccttttctttgtttttcttgatcttttacctttttttggagcacagagtgcaattctggctctggatgatactgttctggatgctgaccaggtggagaaccttattaagttcactccaactaaagatgaaattgaacttctaaagggttacaaaggagacaagcaagttcttggagaatgtgagcagttctttatggagcttatgaaattaccacgtgtagaatctaagctgagagttttctcatttaagattcaattccgttcccaggtttctgaccttaagcggaacctgaacattgttaattcttcagcagaagagatacgaggttcagtcaagttgaaaaggattatgcagacaattctttctctcggaaatgcattgaaccaaggcactgctagaggttctgctgttggtttcaggttggatagcttgcttaaacttagtgacacccgtgctcgtaacaataagatgactttaatgcactatttatctaaggtgctttctgagaaacttccagaacttctagatttcccgaaagacttgtctagcttagagctggcagcaaagatacaattgaagtctttagcagaggaaatgcaggctgtcaacaaaggactcgagaaagttgagcaagagcttactacatctgaaaatgatggtcctgtgtcagagatcttccgcaagacactgaaggatttcctcattggtgcagaagctgaagttaggtctttgacttcactttattctaatgtgggccgaaatgcagatgcgttagcgctttattttggagaagatccagcacgatgtccatttgagcaagtagttacaacactccaaaattttgtgagattgttcacgcgttcccatgaagagaactgtaagcaactggatcttgaaaagaagaaagctctgaaggaagcagaagacaatagtaaacaactggaccttgaaaagaagaaaacccagaaggaagcagaaacagagaaaataaagaagaaatctgacagtgagaaagcttgtaagaaagaactggaaaatgataaatcttctaagaaggattcagcaaatgagaaaggcaagcttaacaatcccatcaaagagctagatatatcacttcaatcacctgcacaaactgccagtgccaaatgacgaccgtaccagatgaactaacagtagcttttccgaaagaggaaaactagttttggctgctcccaacagtgcttccttttgacgaatcatgcaggataaggaagccgaaaactgcacttttaatacgttctcaggggattgtcgaagaaattaacctggcgacaagctgtacagatctgacataataatagccttttcttttggggttgacccctgcttggatggtttatt

SEQ ID NO: 221582 - DNA, 1395 bp, Zea Mays
atggcaaagttagtgggaacagctaatgtgttgtgtgaatcacttaatacctttgttagtaacactctttttctccttttctttgtttttcttgatcttttacctttttttggagcacagagtgcaattctggctctggatgatactgttctggatgctgaccaggtggagaaccttattaagttcactccaactaaagatgaaattgaacttctaaagggttacaaaggagacaagcaagttcttggagaatgtgagcagttctttatggagcttatgaaattaccacgtgtagaatctaagctgagagttttctcatttaagattcaattccgttcccaggtttctgaccttaagcggaacctgaacattgttaattcttcagcagaagagatacgaggttcagtcaagttgaaaaggattatgcagacaattctttctctcggaaatgcattgaaccaaggcactgctagaggtgctttctgagaaacttccagaacttctagatttcccgaaagacttgtctagcttagagctggcagcaaagatacaattgaagtctttagcagaggaaatgcaggctgtcaacaaaggactcgagaaagttgagcaagagcttactacatctgaaaatgatggtcctgtgtcagagatcttccgcaagacactgaaggatttcctcattggtgcagaagctgaagttaggtctttgacttcactttattctaatgtgggccgaaatgcagatgcgttagcgctttattttggagaagatccagcacgatgtccatttgagcaagtagttacaacactccaaaattttgtgagattgttcacgcgttcccatgaagagaactgtaagcaactggatcttgaaaagaagaaagctctgaaggaagcagaagacaatagtaaacaactggaccttgaaaagaagaaaacccagaaggaagcagaaacagagaaaataaagaagaaatctgacagtgagaaagcttgtaagaaagaactggaaaatgataaatcttctaagaaggattcagcaaatgagaaaggcaagcttaacaatcccatcaaagagctagatatatcacttcaatcacctgcacaaactgccagtgccaaatgacgaccgtaccagatgaactaacagtagcttttccgaaagaggaaaactagttttggctgctcccaacagtgcttccttttgacgaatcatgcaggataaggaagccgaaaactgcacttttaatacgttctcaggggattgtcgaagaaattaacctggcgacaagctgtacagatctgacataataatagccttttcttttgggtaataatagattattcttacaatttttctgtcttcttgattatatgtagctaatgtctgcc

SEQ ID NO: 221583 - DNA, 4390 bp, Zea Mays
tacatgtgagtagatccagcacattagccctccaaatgttcgattcttgcttcacaactgatgtcttcgatgatgataaataccgggattatattggtgacattgttgcacaacttcagagccacttcgctgatgcttcatttatggtcttcaactttcgggatggagacagtcaaagtttactggcgaatatattatcaagttatgatatggtagttatggactaccccagacaatacgagggatgccctctccttacaatagaaatgattcatcattacttgaggtcaggggagagttggctctctctgggccagcaaaatgtcctaataatgcattgtgagcgtggtggctgggctgtacttgcattcatgttagcaggactgctgttgtatagaaagcagttcattggtgagcagaggacactggaaatgatttacaggcaagctcctcatgaactggttcagttgtggtcaccattgaatcctatgccttctcagataagatacttacattacatatctcggaggaacgtgagttcagagtggccacctcaggaccgggcccttactttagactgtgttatactaagaaacattccaggcttcaatgaagagggaggatgtagaccaatattccgtatttatggacaggatcctttacctgctacaaataacacacctaaggtgctgtttgcaacaccaaaaaggagcaaatatgttaggctttacaagaaggcagactgtgaactgattaagattgacatccattgccatattcaaggtgatgttgtccttgaatgcattagcattgatgttgatcaagaacgagaagagatgatgttccgagtcatgttcaatacagcctttatcagatctaacattctgatgttaaaccgtgatgaaatcgatatattgtgggatgccaaagatcgattcccgaaggaattcagagctgaggttcttctttcagaaatggacactgccaatcagttaggtcccatggaggtggcaggtataggagagaaggggggtttaccagttgaagcatttgcaaaggttcaagagatgttcagcaatgtggactggctagatccaactggggatgctgcagtccagcttttccagcgacttacttcatcagaaaatattcagctgaggcaaggattcttgtccccaagtaagaaagaagcagaatcgttagagcttggttcaatctctccaatagacaagcattttgacaatgttcaacaagaaccaagcaaagttgaacaccccacagtctatgtgaacaaactggaaaatgttggccaagagagattggtcttgttggagcaaaccactaattctgaagttaaaactggaatttctgttgtccaagaaaatcctggctctctagttcacaaggttgacagtaacgcaaaacagtcaatttcactggaaaaggctgttccctctaccatgaaatctattgatccagttcttaaggatcaaaatgctaaacttgatgagcaacatggttcaggccaacactcttttcccactataattatgtcacagcgatttccaatttctagttcatgccctgctctttctggctactccagtcctagattactttcagcttgtccaagatttaatagtgcaccttcagcccttggaattacagctctgttggaagaccatgctggaagtgctgagaatcgttgtggttcaactactttgacctttgacacaacaggtactcctgttgtaacaaagggtatgccactgctacgccctccaccatcgccactagatttgctggtatcagattctactatgatgtcagaagcaaaaggctcatcccaacctaccctcaacaattcaggccttccatctcatccagagagacaattgacatttcagtcacttggaactactactccggccacaaatcatcagaaatcctcaactactgtcacaattgaattgttgccaacttctgctccacccccacccccactgcccccaccatcatcagttttcagttctaggatttatcatctgcctccatctccaacttctttcagatctccagcgccagctgcaccacaacctccacctgtgccacccccacctccacctatgcctaggccttttcctgtaaggtctcatgcaccacaaccgctgaccccccaaccacctgctttgagttcatctcttatactgtcagggacacctcaatccccaccttccccaccgccttctaggtgctctctcagtaaacctcctgcaccaccaccaccaccaccaccacctccactacttgcttctacttcatctaccattagacctgctgcatcacatctgcctctatttgcatctacttcatctcctgttaggcctgctgcaccccctccaccgcctgccccaacatcatcacctattagagcttcagcattgcctccacctccaccacctggaacgagctccagtccacgtccaccccctccaccatgctattcatcaaaacaatcatccagccccatgggcaaatcgatgccatcacctcctgttccgccaccaccctcccatggaggacgcaatggagcttctggtaacattgtacccccgccagcaccccctggcagtaatgctaaactgtttggtcctcaggggcgtggacctgcacctccttcaggtccaatgtcaaagagctttcaatctggccaggctgtgttgagaaggtctaatttgaagccacttcattgggtgaaagtaacaagagcaatgcatggtagtctgtgggcggagtcacagaagcctgacgaaactttaaaagctcctgtgtttgatatgtcagaattagaaaatcttttctcagctgcactgccaagttcagattcaaggcgttcagataagtcaggcagtcgtgcatctgggtcgaaaccagagaaaattcatcttattgatcttcgccgggctaacaattgtggaatcatgcttaccaaagtcaaaatgccactgcctgacctaatgagtgcaattctggctctggatgatactgttctggatgctgaccaggtggagaaccttattaagttcactccaactaaagatgaaattgaacttctaaagggttacaaaggagacaagcaagttcttggagaatgtgagcagttctttatggagcttatgaaattaccacgtgtagaatctaagctgagagttttctcatttaagattcaattccgttcccaggtttctgaccttaagcggaacctgaacattgttaattcttcagcagaagagatacgaggttcagtcaagttgaaaaggattatgcagacaattctttctctcggaaatgcattgaaccaaggcactgctagaggttctgctgttggtttcaggttggatagcttgcttaaacttagtgacacccgtgctcgtaacaataagatgactttaatgcactatttatctaaggtgctttctgagaaacttccagaacttctagatttcccgaaagacttgtctagcttagagctggcagcaaagatacaattgaagtctttagcagaggaaatgcaggctgtcaacaaaggactcgagaaagttgagcaagagcttactacatctgaaaatgatggtcctgtgtcagagatcttccgcaagacactgaaggatttcctcattggtgcagaagctgaagttaggtctttgacttcactttattctaatgtgggccgaaatgcagatgcgttagcgctttattttggagaagatccagcacgatgtccatttgagcaagtagttacaacactccaaaattttgtgagattgttcacgcgttcccatgaagagaactgtaagcaactggatcttgaaaagaagaaagctctgaaggaagcagaagacaatagtaaacaactggaccttgaaaagaagaaaacccagaaggaagcagaaacagagaaaataaagaagaaatctgacagtgagaaagcttgtaagaaagaactggaaaatgataaatcttctaagaaggattcagcaaatgagaaaggcaagcttaacaatcccatcaaagagctagatatatcacttcaatcacctgcacaaactgccagtgccaaatgacgaccgtaccagatgaactaacagtagcttttccgaaagaggaaaactagttttggctgctcccaacagtgcttccttttgacgaatcatgcaggataaggaagccgaaaactgcacttttaatacgttctcaggggattgtcgaagaaattaacctggcgacaagctgtacagatctgacataataatagccttttcttttgggtaataatagattattcttacaatttttctgtcttcttgattatatgtagctaatgtctgcc

SEQ ID NO: 221584 - DNA, 4629 bp, Zea Mays
ccgaaagatcaaacgccccacctaaaacaccattaaagaaacgcgcacagacacaaaaaaaaaactctctccgttcctcttcacaccaaagcacgggaggcgaagaagaggacaaggggcggaaggctgcaaaccctagcgctgggtcgaagcaacgtcgtgcgccagccacaggcgccagacccgcgcgcacctgcattcgcgattcctttaccttcacgccgcggcaactccgcattgtgttgtgccgtgctttgtgccaggacggggatccatggcgttgtcggcgcgacgaggctcgtggtggtagggccgcgcgggtgccggatccgggagacgcggcatggcgctcttccgcaagttcttctaccgcaagccgcccgatgggctccttgagatcaccgaacgcgtctatgtgttcgattcttgcttcacaactgatgtcttcgatgatgataaataccgggattatattggtgacattgttgcacaacttcagagccacttcgctgatgcttcatttatggtcttcaactttcgggatggagacagtcaaagtttactggcgaatatattatcaagttatgatatggtagttatggactaccccagacaatacgagggatgccctctccttacaatagaaatgattcatcattacttgaggtcaggggagagttggctctctctgggccagcaaaatgtcctaataatgcattgtgagcgtggtggctgggctgtacttgcattcatgttagcaggactgctgttgtatagaaagcagttcattggtgagcagaggacactggaaatgatttacaggcaagctcctcatgaactggttcagttgtggtcaccattgaatcctatgccttctcagataagatacttacattacatatctcggaggaacgtgagttcagagtggccacctcaggaccgggcccttactttagactgtgttatactaagaaacattccaggcttcaatgaagagggaggatgtagaccaatattccgtatttatggacaggatcctttacctgctacaaataacacacctaaggtgctgtttgcaacaccaaaaaggagcaaatatgttaggctttacaagaaggtgatgttgtccttgaatgcattagcattgatgttgatcaagaacgagaagagatgatgttccgagtcatgttcaatacagcctttatcagatctaacattctgatgttaaaccgtgatgaaatcgatatattgtgggatgccaaagatcgattcccgaaggaattcagagctgaggttcttctttcagaaatggacactgccaatcagttaggtcccatggaggtggcaggtataggagagaaggggggtttaccagttgaagcatttgcaaaggttcaagagatgttcagcaatgtggactggctagatccaactggggatgctgcagtccagcttttccagcgacttacttcatcagaaaatattcagctgaggcaaggattcttgtccccaagtaagaaagaagcagaatcgttagagcttggttcaatctctccaatagacaagcattttgacaatgttcaacaagaaccaagcaaagttgaacaccccacagtctatgtgaacaaactggaaaatgttggccaagagagattggtcttgttggagcaaaccactaattctgaagttaaaactggaatttctgttgtccaagaaaatcctggctctctagttcacaaggttgacagtaacgcaaaacagtcaatttcactggaaaaggctgttccctctaccatgaaatctattgatccagttcttaaggatcaaaatgctaaacttgatgagcaacatggttcaggccaacactcttttcccactataattatgtcacagcgatttccaatttctagttcatgccctgctctttctggctactccagtcctagattactttcagcttgtccaagatttaatagtgcaccttcagcccttggaattacagctctgttggaagaccatgctggaagtgctgagaatcgttgtggttcaactactttgacctttgacacaacaggtactcctgttgtaacaaagggtatgccactgctacgccctccaccatcgccactagatttgctggtatcagattctactatgatgtcagaagcaaaaggctcatcccaacctaccctcaacaattcaggccttccatctcatccagagagacaattgacatttcagtcacttggaactactactccggccacaaatcatcagaaatcctcaactactgtcacaattgaattgttgccaacttctgctccacccccacccccactgcccccaccatcatcagttttcagttctaggatttatcatctgcctccatctccaacttctttcagatctccagcgccagctgcaccacaacctccacctgtgccacccccacctccacctatgcctaggccttttcctgtaaggtctcatgcaccacaaccgctgaccccccaaccacctgctttgagttcatctcttatactgtcagggacacctcaatccccaccttccccaccgccttctaggtgctctctcagtaaacctcctgcaccaccaccaccaccaccaccacctccactacttgcttctacttcatctaccattagacctgctgcatcacatctgcctctatttgcatctacttcatctcctgttaggcctgctgcaccccctccaccgcctgccccaacatcatcacctattagagcttcagcattgcctccacctccaccacctggaacgagctccagtccacgtccaccccctccaccatgctattcatcaaaacaatcatccagccccatgggcaaatcgatgccatcacctcctgttccgccaccaccctcccatggaggacgcaatggagcttctggtaacattgtacccccgccagcaccccctggcagtaatgctaaactgtttggtcctcaggggcgtggacctgcacctccttcaggtccaatgtcaaagagctttcaatctggccaggctgtgttgagaaggtctaatttgaagccacttcattgggtgaaagtaacaagagcaatgcatggtagtctgtgggcggagtcacagaagcctgacgaaactttaaaagctcctgtgtttgatatgtcagaattagaaaatcttttctcagctgcactgccaagttcagattcaaggcgttcagataagtcaggcagtcgtgcatctgggtcgaaaccagagaaaattcatcttattgatcttcgccgggctaacaattgtggaatcatgcttaccaaagtcaaaatgccactgcctgacctaatgagtgcaattctggctctggatgatactgttctggatgctgaccaggtggagaaccttattaagttcactccaactaaagatgaaattgaacttctaaagggttacaaaggagacaagcaagttcttggagaatgtgagcagttctttatggagcttatgaaattaccacgtgtagaatctaagctgagagttttctcatttaagattcaattccgttcccaggtttctgaccttaagcggaacctgaacattgttaattcttcagcagaagagatacgaggttcagtcaagttgaaaaggattatgcagacaattctttctctcggaaatgcattgaaccaaggcactgctagaggtgctttctgagaaacttccagaacttctagatttcccgaaagacttgtctagcttagagctggcagcaaagatacaattgaagtctttagcagaggaaatgcaggctgtcaacaaaggactcgagaaagttgagcaagagcttactacatctgaaaatgatggtcctgtgtcagagatcttccgcaagacactgaaggatttcctcattggtgcagaagctgaagttaggtctttgacttcactttattctaatgtgggccgaaatgcagatgcgttagcgctttattttggagaagatccagcacgatgtccatttgagcaagtagttacaacactccaaaattttgtgagattgttcacgcgttcccatgaagagaactgtaagcaactggatcttgaaaagaagaaagctctgaaggaagcagaagacaatagtaaacaactggaccttgaaaagaagaaaacccagaaggaagcagaaacagagaaaataaagaagaaatctgacagtgagaaagcttgtaagaaagaactggaaaatgataaatcttctaagaaggattcagcaaatgagaaaggcaagcttaacaatcccatcaaagagctagatatatcacttcaatcacctgcacaaactgccagtgccaaatgacgaccgtaccagatgaactaacagtagcttttccgaaagaggaaaactagttttggctgctcccaacagtgcttccttttgacgaatcatgcaggataaggaagccgaaaactgcacttttaatacgttctcaggggattgtcgaagaaattaacctggcgacaagctgtacagatctgacataataatagccttttcttttgggtaataatagattattcttacaatttttctgtcttcttgattatatgtagctaatgtctgcc

SEQ ID NO: 221585 - DNA, 4902 bp, Zea Mays
ccacgttgcagcacaatagaaaataaaaaagtcgaaaagtagaaacggaaaaaggacagctgcgtcgcttcctctcgagtgcaacagggacacaaggcaacaaacacaatctcgcccaatctagctcactccgaaagatcaaacgccccacctaaaacaccattaaagaaacgcgcacagacacaaaaaaaaaactctctccgttcctcttcacaccaaagcacgggaggcgaagaagaggacaaggggcggaaggctgcaaaccctagcgctgggtcgaagcaacgtcgtgcgccagccacaggcgccagacccgcgcgcacctgcattcgcgattcctttaccttcacgccgcggcaactccgcattgtgttgtgccgtgctttgtgccaggacggggatccatggcgttgtcggcgcgacgaggctcgtggtggtagggccgcgcgggtgccggatccgggagacgcggcatggcgctcttccgcaagttcttctaccgcaagccgcccgatgggctccttgagatcaccgaacgcgtctatgtgttcgattcttgcttcacaactgatgtcttcgatgatgataaataccgggattatattggtgacattgttgcacaacttcagagccacttcgctgatgcttcatttatggtcttcaactttcgggatggagacagtcaaagtttactggcgaatatattatcaagttatgatatggtagttatggactaccccagacaatacgagggatgccctctccttacaatagaaatgattcatcattacttgaggtcaggggagagttggctctctctgggccagcaaaatgtcctaataatgcattgtgagcgtggtggctgggctgtacttgcattcatgttagcaggactgctgttgtatagaaagcagttcattggtgagcagaggacactggaaatgatttacaggcaagctcctcatgaactggttcagttgtggtcaccattgaatcctatgccttctcagataagatacttacattacatatctcggaggaacgtgagttcagagtggccacctcaggaccgggcccttactttagactgtgttatactaagaaacattccaggcttcaatgaagagggaggatgtagaccaatattccgtatttatggacaggatcctttacctgctacaaataacacacctaaggtgctgtttgcaacaccaaaaaggagcaaatatgttaggctttacaagaaggcagactgtgaactgattaagattgacatccattgccatattcaaggtgatgttgtccttgaatgcattagcattgatgttgatcaagaacgagaagagatgatgttccgagtcatgttcaatacagcctttatcagatctaacattctgatgttaaaccgtgatgaaatcgatatattgtgggatgccaaagatcgattcccgaaggaattcagagctgaggttcttctttcagaaatggacactgccaatcagttaggtcccatggaggtggcaggtataggagagaaggggggtttaccagttgaagcatttgcaaaggttcaagagatgttcagcaatgtggactggctagatccaactggggatgctgcagtccagcttttccagcgacttacttcatcagaaaatattcagctgaggcaaggattcttgtccccaagtaagaaagaagcagaatcgttagagcttggttcaatctctccaatagacaagcattttgacaatgttcaacaagaaccaagcaaagttgaacaccccacagtctatgtgaacaaactggaaaatgttggccaagagagattggtcttgttggagcaaaccactaattctgaagttaaaactggaatttctgttgtccaagaaaatcctggctctctagttcacaaggttgacagtaacgcaaaacagtcaatttcactggaaaaggctgttccctctaccatgaaatctattgatccagttcttaaggatcaaaatgctaaacttgatgagcaacatggttcaggccaacactcttttcccactataattatgtcacagcgatttccaatttctagttcatgccctgctctttctggctactccagtcctagattactttcagcttgtccaagatttaatagtgcaccttcagcccttggaattacagctctgttggaagaccatgctggaagtgctgagaatcgttgtggttcaactactttgacctttgacacaacaggtactcctgttgtaacaaagggtatgccactgctacgccctccaccatcgccactagatttgctggtatcagattctactatgatgtcagaagcaaaaggctcatcccaacctaccctcaacaattcaggccttccatctcatccagagagacaattgacatttcagtcacttggaactactactccggccacaaatcatcagaaatcctcaactactgtcacaattgaattgttgccaacttctgctccacccccacccccactgcccccaccatcatcagttttcagttctaggatttatcatctgcctccatctccaacttctttcagatctccagcgccagctgcaccacaacctccacctgtgccacccccacctccacctatgcctaggccttttcctgtaaggtctcatgcaccacaaccgctgaccccccaaccacctgctttgagttcatctcttatactgtcagggacacctcaatccccaccttccccaccgccttctaggtgctctctcagtaaacctcctgcaccaccaccaccaccaccaccacctccactacttgcttctacttcatctaccattagacctgctgcatcacatctgcctctatttgcatctacttcatctcctgttaggcctgctgcaccccctccaccgcctgccccaacatcatcacctattagagcttcagcattgcctccacctccaccacctggaacgagctccagtccacgtccaccccctccaccatgctattcatcaaaacaatcatccagccccatgggcaaatcgatgccatcacctcctgttccgccaccaccctcccatggaggacgcaatggagcttctggtaacattgtacccccgccagcaccccctggcagtaatgctaaactgtttggtcctcaggggcgtggacctgcacctccttcaggtccaatgtcaaagagctttcaatctggccaggctgtgttgagaaggtctaatttgaagccacttcattgggtgaaagtaacaagagcaatgcatggtagtctgtgggcggagtcacagaagcctgacgaaactttaaaagctcctgtgtttgatatgtcagaattagaaaatcttttctcagctgcactgccaagttcagattcaaggcgttcagataagtcaggcagtcgtgcatctgggtcgaaaccagagaaaattcatcttattgatcttcgccgggctaacaattgtggaatcatgcttaccaaagtcaaaatgccactgcctgacctaatgagtgcaattctggctctggatgatactgttctggatgctgaccaggtggagaaccttattaagttcactccaactaaagatgaaattgaacttctaaagggttacaaaggagacaagcaagttcttggagaatgtgagcagttctttatggagcttatgaaattaccacgtgtagaatctaagctgagagttttctcatttaagattcaattccgttcccaggtttctgaccttaagcggaacctgaacattgttaattcttcagcagaagagatacgaggttcagtcaagttgaaaaggattatgcagacaattctttctctcggaaatgcattgaaccaaggcactgctagaggttctgctgttggtttcaggttggatagcttgcttaaacttagtgacacccgtgctcgtaacaataagatgactttaatgcactatttatctaaggtgtgctttctgagaaacttccagaacttctagatttcccgaaagacttgtctagcttagagctggcagcaaagatacaattgaagtctttagcagaggaaatgcaggctgtcaacaaaggactcgagaaagttgagcaagagcttactacatctgaaaatgatggtcctgtgtcagagatcttccgcaagacactgaaggatttcctcattggtgcagaagctgaagttaggtctttgacttcactttattctaatgtgggccgaaatgcagatgcgttagcgctttattttggagaagatccagcacgatgtccatttgagcaagtagttacaacactccaaaattttgtgagattgttcacgcgttcccatgaagagaactgtaagcaactggatcttgaaaagaagaaagctctgaaggaagcagaagacaatagtaaacaactggaccttgaaaagaagaaaacccagaaggaagcagaaacagagaaaataaagaagaaatctgacagtgagaaagcttgtaagaaagaactggaaaatgataaatcttctaagaaggattcagcaaatgagaaaggcaagcttaacaatcccatcaaagagctagatatatcacttcaatcacctgcacaaactgccagtgccaaatgacgaccgtaccagatgaactaacagtagcttttccgaaagaggaaaactagttttggctgctcccaacagtgcttccttttgacgaatcatgcaggataaggaagccgaaaactgcacttttaatacgttctcaggggattgtcgaagaaattaacctggcgacaagctgtacagatctgacataataatagccttttcttttgggtaataatagattattcttacaatttttctgtcttcttgattatatgtagctaatgtctgcc

SEQ ID NO: 221586 - DNA, 4841 bp, Zea Mays
ccacgttgcagcacaatagaaaataaaaaagtcgaaaagtagaaacggaaaaaggacagctgcgtcgcttcctctcgagtgcaacagggacacaaggcaacaaacacaatctcgcccaatctagctcactccgaaagatcaaacgccccacctaaaacaccattaaagaaacgcgcacagacacaaaaaaaaaactctctccgttcctcttcacaccaaagcacgggaggcgaagaagaggacaaggggcggaaggctgcaaaccctagcgctgggtcgaagcaacgtcgtgcgccagccacaggcgccagacccgcgcgcacctgcattcgcgattcctttaccttcacgccgcggcaactccgcattgtgttgtgccgtgctttgtgccaggacggggatccatggcgttgtcggcgcgacgaggctcgtggtggtagggccgcgcgggtgccggatccgggagacgcggcatggcgctcttccgcaagttcttctaccgcaagccgcccgatgggctccttgagatcaccgaacgcgtctatgtgttcgattcttgcttcacaactgatgtcttcgatgatgataaataccgggattatattggtgacattgttgcacaacttcagagccacttcgctgatgcttcatttatggtcttcaactttcgggatggagacagtcaaagtttactggcgaatatattatcaagttatgatatggtagttatggactaccccagacaatacgagggatgccctctccttacaatagaaatgattcatcattacttgaggtcaggggagagttggctctctctgggccagcaaaatgtcctaataatgcattgtgagcgtggtggctgggctgtacttgcattcatgttagcaggactgctgttgtatagaaagcagttcattggtgagcagaggacactggaaatgatttacaggcaagctcctcatgaactggttcagttgtggtcaccattgaatcctatgccttctcagataagatacttacattacatatctcggaggaacgtgagttcagagtggccacctcaggaccgggcccttactttagactgtgttatactaagaaacattccaggcttcaatgaagagggaggatgtagaccaatattccgtatttatggacaggatcctttacctgctacaaataacacacctaaggtgctgtttgcaacaccaaaaaggagcaaatatgttaggctttacaagaaggcagactgtgaactgattaagattgacatccattgccatattcaaggtgatgttgtccttgaatgcattagcattgatgttgatcaagaacgagaagagatgatgttccgagtcatgttcaatacagcctttatcagatctaacattctgatgttaaaccgtgatgaaatcgatatattgtgggatgccaaagatcgattcccgaaggaattcagagctgaggttcttctttcagaaatggacactgccaatcagttaggtcccatggaggtggcaggtataggagagaaggggggtttaccagttgaagcatttgcaaaggttcaagagatgttcagcaatgtggactggctagatccaactggggatgctgcagtccagcttttccagcgacttacttcatcagaaaatattcagctgaggcaaggattcttgtccccaagtaagaaagaagcagaatcgttagagcttggttcaatctctccaatagacaagcattttgacaatgttcaacaagaaccaagcaaagttgaacaccccacagtctatgtgaacaaactggaaaatgttggccaagagagattggtcttgttggagcaaaccactaattctgaagttaaaactggaatttctgttgtccaagaaaatcctggctctctagttcacaaggttgacagtaacgcaaaacagtcaatttcactggaaaaggctgttccctctaccatgaaatctattgatccagttcttaaggatcaaaatgctaaacttgatgagcaacatggttcaggccaacactcttttcccactataattatgtcacagcgatttccaatttctagttcatgccctgctctttctggctactccagtcctagattactttcagcttgtccaagatttaatagtgcaccttcagcccttggaattacagctctgttggaagaccatgctggaagtgctgagaatcgttgtggttcaactactttgacctttgacacaacaggtactcctgttgtaacaaagggtatgccactgctacgccctccaccatcgccactagatttgctggtatcagattctactatgatgtcagaagcaaaaggctcatcccaacctaccctcaacaattcaggccttccatctcatccagagagacaattgacatttcagtcacttggaactactactccggccacaaatcatcagaaatcctcaactactgtcacaattgaattgttgccaacttctgctccacccccacccccactgcccccaccatcatcagttttcagttctaggatttatcatctgcctccatctccaacttctttcagatctccagcgccagctgcaccacaacctccacctgtgccacccccacctccacctatgcctaggccttttcctgtaaggtctcatgcaccacaaccgctgaccccccaaccacctgctttgagttcatctcttatactgtcagggacacctcaatccccaccttccccaccgccttctaggtgctctctcagtaaacctcctgcaccaccaccaccaccaccaccacctccactacttgcttctacttcatctaccattagacctgctgcatcacatctgcctctatttgcatctacttcatctcctgttaggcctgctgcaccccctccaccgcctgccccaacatcatcacctattagagcttcagcattgcctccacctccaccacctggaacgagctccagtccacgtccaccccctccaccatgctattcatcaaaacaatcatccagccccatgggcaaatcgatgccatcacctcctgttccgccaccaccctcccatggaggacgcaatggagcttctggtaacattgtacccccgccagcaccccctggcagtaatgctaaactgtttggtcctcaggggcgtggacctgcacctccttcaggtccaatgtcaaagagctttcaatctggccaggctgtgttgagaaggtctaatttgaagccacttcattgggtgaaagtaacaagagcaatgcatggtagtctgtgggcggagtcacagaagcctgacgaaactttaaaagctcctgtgtttgatatgtcagaattagaaaatcttttctcagctgcactgccaagttcagattcaaggcgttcagataagtcaggcagtcgtgcatctgggtcgaaaccagagaaaattcatcttattgatcttcgccgggctaacaattgtggaatcatgcttaccaaagtcaaaatgccactgcctgacctaatgagtgcaattctggctctggatgatactgttctggatgctgaccaggtggagaaccttattaagttcactccaactaaagatgaaattgaacttctaaagggttacaaaggagacaagcaagttcttggagaatgtgagcagttctttatggagcttatgaaattaccacgtgtagaatctaagctgagagttttctcatttaagattcaattccgttcccaggtttctgaccttaagcggaacctgaacattgttaattcttcagcagaagagatacgaggttcagtcaagttgaaaaggattatgcagacaattctttctctcggaaatgcattgaaccaaggcactgctagaggttctgctgttggtttcaggttggatagcttgcttaaacttagtgacacccgtgctcgtaacaataagatgactttaatgcactatttatctaagacactgaaggatttcctcattggtgcagaagctgaagttaggtctttgacttcactttattctaatgtgggccgaaatgcagatgcgttagcgctttattttggagaagatccagcacgatgtccatttgagcaagtagttacaacactccaaaattttgtgagattgttcacgcgttcccatgaagagaactgtaagcaactggatcttgaaaagaagaaagctctgaaggaagcagaagacaatagtaaacaactggaccttgaaaagaagaaaacccagaaggaagcagaaacagagaaaataaagaagaaatctgacagtgagaaagcttgtaagaaagaactggaaaatgataaatcttctaagaaggattcagcaaatgagaaaggcaagcttaacaatcccatcaaagagctagatatatcacttcaatcacctgcacaaactgccagtgccaaatgacgaccgtaccagatgaactaacagtagcttttccgaaagaggaaaactagttttggctgctcccaacagtgcttccttttgacgaatcatgcaggataaggaagccgaaaactgcacttgtaagcatcatagatttttttttcaatttatagaaaaaacagattagttcttgatcaataaagtatatatttcagtcttagataagtgctattgtatagcccatttcatagtaatgtctatgttctgcagttaatacgttctcaggggattgtcgaagaaattaacctggcgacaagctgtacagatctgacataataatagccttttcttttgggtaataatagattattcttacaatttttctgtcttcttgattatatgtagctaatgtctgcc

SEQ ID NO: 221587 - DNA, 3896 bp, Zea Mays
ccacgttgcagcacaatagaaaataaaaaagtcgaaaagtagaaacggaaaaaggacagctgcgtcgcttcctctcgagtgcaacagggacacaaggcaacaaacacaatctcgcccaatctagctcactccgaaagatcaaacgccccacctaaaacaccattaaagaaacgcgcacagacacaaaaaaaaaactctctccgttcctcttcacaccaaagcacgggaggcgaagaagaggacaaggggcggaaggctgcaaaccctagcgctgggtcgaagcaacgtcgtgcgccagccacaggcgccagacccgcgcgcacctgcattcgcgattcctttaccttcacgccgcggcaactccgcattgtgttgtgccgtgctttgtgccaggacggggatccatggcgttgtcggcgcgacgaggctcgtggtggtagggccgcgcgggtgccggatccgggagacgcggcatggcgctcttccgcaagttcttctaccgcaagccgcccgatgggctccttgagatcaccgaacgcgtctatgtgttcgattcttgcttcacaactgatgtcttcgatgatgataaataccgggattatattggtgacattgttgcacaacttcagagccacttcgctgatgcttcatttatggtcttcaactttcgggatggagacagtcaaagtttactggcgaatatattatcaagttatgatatggtagttatggactaccccagacaatacgagggatgccctctccttacaatagaaatgattcatcattacttgaggtcaggggagagttggctctctctgggccagcaaaatgtcctaataatgcattgtgagcgtggtggctgggctgtacttgcattcatgttagcaggactgctgttgtatagaaagcagttcattggtgagcagaggacactggaaatgatttacaggcaagctcctcatgaactggttcagttgtggtcaccattgaatcctatgccttctcagataagatacttacattacatatctcggaggaacgtgagttcagagtggccacctcaggaccgggcccttactttagactgtgttatactaagaaacattccaggcttcaatgaagagggaggatgtagaccaatattccgtatttatggacaggatcctttacctgctacaaataacacacctaaggtgctgtttgcaacaccaaaaaggagcaaatatgttaggctttacaagaaggcagactgtgaactgattaagattgacatccattgccatattcaaggtgatgttgtccttgaatgcattagcattgatgttgatcaagaacgagaagagatgatgttccgagtcatgttcaatacagcctttatcagatctaacattctgatgttaaaccgtgatgaaatcgatatattgtgggatgccaaagatcgattcccgaaggaattcagagctgaggttcttctttcagaaatggacactgccaatcagttaggtcccatggaggtggcaggtataggagagaaggggggtttaccagttgaagcatttgcaaaggttcaagagatgttcagcaatgtggactggctagatccaactggggatgctgcagtccagcttttccagcgacttacttcatcagaaaatattcagctgaggcaaggattcttgtccccaagtaagaaagaagcagaatcgttagagcttggttcaatctctccaatagacaagcattttgacaatgttcaacaagaaccaagcaaagttgaacaccccacagtctatgtgaacaaactggaaaatgttggccaagagagattggtcttgttggagcaaaccactaattctgaagttaaaactggaatttctgttgtccaagaaaatcctggctctctagttcacaaggttgacagtaacgcaaaacagtcaatttcactggaaaaggctgttccctctaccatgaaatctattgatccagttcttaaggatcaaaatgctaaacttgatgagcaacatggttcaggccaacactcttttcccactataattatgtcacagcgatttccaatttctagttcatgccctgctctttctggctactccagtcctagattactttcagcttgtccaagatttaatagtgcaccttcagcccttggaattacagctctgttggaagaccatgctggaagtgctgagaatcgttgtggttcaactactttgacctttgacacaacaggtactcctgttgtaacaaagggtatgccactgctacgccctccaccatcgccactagatttgctggtatcagattctactatgatgtcagaagcaaaaggctcatcccaacctaccctcaacaattcaggccttccatctcatccagagagacaattgacatttcagtcacttggaactactactccggccacaaatcatcagaaatcctcaactactgtcacaattgaattgttgccaacttctgctccacccccacccccactgcccccaccatcatcagttttcagttctaggatttatcatctgcctccatctccaacttctttcagatctccagcgccagctgcaccacaacctccacctgtgccacccccacctccacctatgcctaggccttttcctgtaaggtctcatgcaccacaaccgctgaccccccaaccacctgctttgagttcatctcttatactgtcagggacacctcaatccccaccttccccaccgccttctaggtgctctctcagtaaacctcctgcaccaccaccaccaccaccaccacctccactacttgcttctacttcatctaccattagacctgctgcatcacatctgcctctatttgcatctacttcatctcctgttaggcctgctgcaccccctccaccgcctgccccaacatcatcacctattagagcttcagcattgcctccacctccaccacctggaacgagctccagtccacgtccaccccctccaccatgctattcatcaaaacaatcatccagccccatgggcaaatcgatgccatcacctcctgttccgccaccaccctcccatggaggacgcaatggagcttctggtaacattgtacccccgccagcaccccctggcagtaatgctaaactgtttggtcctcaggggcgtggacctgcacctccttcaggtccaatgtcaaagagctttcaatctggccaggctgtgttgagaaggtctaatttgaagccacttcattgggtgaaagtaacaagagcaatgcatggtagtctgtgggcggagtcacagaagcctgacgaaactttaaaagctcctgtgtttgatatgtcagaattagaaaatcttttctcagctgcactgccaagttcagattcaaggcgttcagataagtcaggcagtcgtgcatctgggtcgaaaccagagaaaattcatcttattgatcttcgccgggctaacaattgtggaatcatgcttaccaaagtcaaaatgccactgcctgacctaatgagtgcaattctggctctggatgatactgttctggatgctgaccaggtggagaaccttattaagttcactccaactaaagatgaaattgaacttctaaagggttacaaaggagacaagcaagttcttggagaatgtgagcagttctttatggagcttatgaaattaccacgtgtagaatctaagctgagagttttctcatttaagattcaattccgttcccaggtttctgaccttaagcggaacctgaacattgttaattcttcagcagaagagatacgaggttcagtcaagttgaaaaggattatgcagacaattctttctctcggaaatgcattgaaccaaggcactgctagaggagttccataa

SEQ ID NO: 221588 - DNA, 1435 bp, Zea Mays
ttttttttgaaacgaaacatacatgaaagtttgcctcctctcacacgacttgacttttttgccgctatatcttttccgcctaattttattatttttttaatcttccgtacgatatattgtatctatctgtgagctgaggcgtgactcctctcttcttccttcctttcttcctcctgctatttagacggttctcaccggagctatcgcctccctatcatctcaatatgttgtagtgagtttgcctctatcccgcccacctcaccgtcgttgtctccgccaccgccactgctcccaccactgccatgcattaacctcaacccttccgcaaactattcactgtcactttgtcatcggcgctccatcgttcactcaaatgtggtctccgatacctggcaccctcatgaggactagttcactccctgctgtcattgaggcttctggcaatgatgactggaagaaacgaaaggaagcacagagcctgaagaggctcgaggttaagaagaagaggattgagaggaggaactctctcgcctgcaacacttcaaaagaagctgctgggcagagtccaaaagagatgaatgcaaacactgacaaattagtaagttctgatgaaactattgtcagcgctaacgaaagtcatagcagtggcaagcatctggtgaaggggcttccaccaaagtaccaggccacaattacatcagaagacagttcgtcagcaatgcgaaagaagccaaactcggccttcaaagccatcactgaggagcagaactcatcatcgtctgttccttcctccggtgaagctataagtagcgtgacggcaccaagtctgcctctgttgtctttggtccccataacagcaacccttggttccagggaagaccaaagcattttaggcagggctggtgcaagggcaaacggcatgggggacgtggaaaggaggatgatgcaggagatgccgggcgtgttcaccaagggcctgtccaacggcagcagggtcgaaggcttcctgtacaaatacagcaaaggagaagtgaggatcgtatgcatctgccatggaagcttccttactccttcggagtttgtggagcacgccggcgccggcaaggtagataacccgctgcgacacattgtcgtcagcgctaccccgaacctgtgactgtgaggccaggcagacccgtgcacaagctatagtgttctgtagactcaggacctgagcctagcgtcagagcaatgtcaccgttagactgtgtggtgcggtgcttatgcccgattaaattggtgggcattgtggtaacataacctgttgataatgttttgacaatgttttgatccttcctatgcgtgatttagttctgcagcttcttcttctttttttcttttgtgttcctatcgtggtttcatacctgggcaagtagatttgtaggttagtgagggg

SEQ ID NO: 221589 - DNA, 1302 bp, Zea Mays
cgtgactcctctcttcttccttcctttcttcctcctgctatttagacggttctcaccggagctatcgcctccctatcatctcaatatgttgtagtgagtttgcctctatcccgcccacctcaccgtcgttgtctccgccaccgccactgctcccaccactgccatgcattaacctcaacccttccgcaaactattcactgtcactttgtcatcggcgctccatcgttcactcaaatgtggtctccgatacctggcaccctcatgaggactagttcactccctgctgtcattgaggcttctggcaatgatgactggaagaaacgaaaggaagcacagagcctgaagaggctcgaggttaagaagaagaggattgagaggaggaactctctcgcctgcaacacttcaaaagaagctgctgggcagagtccaaaagagatgaatgcaaacactgacaaattagtaagttctgatgaaactattgtcagcgctaacgaaagtcatagcagtggcaagcatctggtgaaggggcttccaccaaagtaccaggccacaattacatcagaagacagttcgtcagcaatgcgaaagaagccaaactcggccttcaaaggaacagccatcactgaggagcagaactcatcatcgtctgttccttcctccggtgaagctataagtagcgtgacggcaccaagtctgcctctgttgtctttggtccccataacagcaacccttggttccagggaagaccaaagcattttaggcagggctggtgcaagggcaaacggcatgggggacgtggaaaggaggatgatgcaggagatgccgggcgtgttcaccaagggcctgtccaacggcagcagggtcgaaggcttcctgtacaaatacagcaaaggagaagtgaggatcgtatgcatctgccatggaagcttccttactccttcggagtttgtggagcacgccggcgccggcaaggtagataacccgctgcgacacattgtcgtcagcgctaccccgaacctgtgactgtgaggccaggcagacccgtgcacaagctatagtgttctgtagactcaggacctgagcctagcgtcagagcaatgtcaccgttagactgtgtggtgcggtgcttatgcccgattaaattggtgggcattgtggtaacataacctgttgataatgttttgacaatgttttgatccttcctatgcgtgatttagttctgcagcttcttcttctttttttcttttgtgttcctatcgtggtttcatacctgggcaagtagatttgtaggttagtgagggg

SEQ ID NO: 221590 - DNA, 1206 bp, Zea Mays
gcgaagccaaccagcacaaaaaggagcacaaagctctctctccctcccccctctctctctctctctcctgttccccgcgagagtcgctcagggccgcgacgaggagaagcggcagcgcgtcacctctccaatggcatccccgtccctcctccgtgcaacctgtgcaccctcatgaggactagttcactccctgctgtcattgaggcttctggcaatgatgactggaagaaacgaaaggaagcacagagcctgaagaggctcgaggttaagaagaagaggattgagaggaggaactctctcgcctgcaacacttcaaaagaagctgctgggcagagtccaaaagagatgaatgcaaacactgacaaattagtaagttctgatgaaactattgtcagcgctaacgaaagtcatagcagtggcaagcatctggtgaaggggcttccaccaaagtaccaggccacaattacatcagaagacagttcgtcagcaatgcgaaagaagccaaactcggccttcaaagccatcactgaggagcagaactcatcatcgtctgttccttcctccggtgaagctataagtagcgtgacggcaccaagtctgcctctgttgtctttggtccccataacagcaacccttggttccagggaagaccaaagcattttaggcagggctggtgcaagggcaaacggcatgggggacgtggaaaggaggatgatgcaggagatgccgggcgtgttcaccaagggcctgtccaacggcagcagggtcgaaggcttcctgtacaaatacagcaaaggagaagtgaggatcgtatgcatctgccatggaagcttccttactccttcggagtttgtggagcacgccggcgccggcaaggtagataacccgctgcgacacattgtcgtcagcgctaccccgaacctgtgactgtgaggccaggcagacccgtgcacaagctatagtgttctgtagactcaggacctgagcctagcgtcagagcaatgtcaccgttagactgtgtggtgcggtgcttatgcccgattaaattggtgggcattgtggtaacataacctgttgataatgttttgacaatgttttgatccttcctatgcgtgatttagttctgcagcttcttcttctttttttcttttgtgttcctatcgtggtttcatacctgggcaagtagatttgtaggttagtgagggg

SEQ ID NO: 221591 - DNA, 1676 bp, Zea Mays
gcgaagccaaccagcacaaaaaggagcacaaagctctctctccctcccccctctctctctctctctcctgttccccgcgagagtcgctcagggccgcgacgaggagaagcggcagcgcgtcacctctccaatggcatccccgtccctcctccgtgcaacctgtgcgcttctcgagtgctgaggctccctgtccctaagacaagcttgcgcgcgcgatggagggtttttcgagggacttgctgtgcgggattggcaagggggacgcgccgccaccggagaagaggccggggcagctgcgggaggagatggaggaggtggagcttagcctcgggctgtctcttggcggccgattcgggctcgacaggaaggggagcaagctcccccggtcgtcgtccgtggcggccatgctgacaacgccggtggaggtgccggcgccgccctccctctcgcgggcgagctcgctgccggtccaggcggaggcgtcggaagttgagaggaagcaggggctggatggatggggttcttgccgtgagggcggcggtctcggcgtgcaacacgcggcgaggctgccggcgagcgggaacccttcctctgcctcttcggtaggtgaaggacagattttgcaaggcaccctcatgaggactagttcactccctgctgtcattgaggcttctggcaatgatgactggaagaaacgaaaggaagcacagagcctgaagaggctcgaggttaagaagaagaggattgagaggaggaactctctcgcctgcaacacttcaaaagaagctgctgggcagagtccaaaagagatgaatgcaaacactgacaaattagtaagttctgatgaaactattgtcagcgctaacgaaagtcatagcagtggcaagcatctggtgaaggggcttccaccaaagtaccaggccacaattacatcagaagacagttcgtcagcaatgcgaaagaagccaaactcggccttcaaaggaacagccatcactgaggagcagaactcatcatcgtctgttccttcctccggtgaagctataagtagcgtgacggcaccaagtctgcctctgttgtctttggtccccataacagcaacccttggttccagggaagaccaaagcattttaggcagggctggtgcaagggcaaacggcatgggggacgtggaaaggaggatgatgcaggagatgccgggcgtgttcaccaagggcctgtccaacggcagcagggtcgaaggcttcctgtacaaatacagcaaaggagaagtgaggatcgtatgcatctgccatggaagcttccttactccttcggagtttgtggagcacgccggcgccggcaaggtagataacccgctgcgacacattgtcgtcagcgctaccccgaacctgtgactgtgaggccaggcagacccgtgcacaagctatagtgttctgtagactcaggacctgagcctagcgtcagagcaatgtcaccgttagactgtgtggtgcggtgcttatgcccgattaaattggtgggcattgtggtaacataacctgttgataatgttttgacaatgttttgatccttcctatgcgtgatttagttctgcagcttcttcttctttttttcttttgtgttcctatcgtggtttcatacctgggcaagtagatttgtaggttagtgagggg

SEQ ID NO: 221592 - DNA, 1669 bp, Zea Mays
cgaagccaaccagcacaaaaaggagcacaaagctctctctccctcccccctctctctctctctctcctgttccccgcgagagtcgctcagggccgcgacgaggagaagcggcagcgcgtcacctctccaatggcatccccgtccctcctccgtgcaacctgtgcgcttctcgagtgctgaggctccctgtccctaagacaagcttgcgcgcgcgatggagggtttttcgagggacttgctgtgcgggattggcaagggggacgcgccgccaccggagaagaggccggggcagctgcgggaggagatggaggaggtggagcttagcctcgggctgtctcttggcggccgattcgggctcgacaggaaggggagcaagctcccccggtcgtcgtccgtggcggccatgctgacaacgccggtggaggtgccggcgccgccctccctctcgcgggcgagctcgctgccggtccaggcggaggcgtcggaagttgagaggaagcaggggctggatggatggggttcttgccgtgagggcggcggtctcggcgtgcaacacgcggcgaggctgccggcgagcgggaacccttcctctgcctcttcggtaggtgaaggacagattttgcaaggcaccctcatgaggactagttcactccctgctgtcattgaggcttctggcaatgatgactggaagaaacgaaaggaagcacagagcctgaagaggctcgaggttaagaagaagaggattgagaggaggaactctctcgcctgcaacacttcaaaagaagctgctgggcagagtccaaaagagatgaatgcaaacactgacaaattagtaagttctgatgaaactattgtcagcgctaacgaaagtcatagcagtggcaagcatctggtgaaggggcttccaccaaagtaccaggccacaattacatcagaagacagttcgtcagcaatgcgaaagaagccaaactcggccttcaaagccatcactgaggagcagaactcatcatcgtctgttccttcctccggtgaagctataagtagcgtgacggcaccaagtctgcctctgttgtctttggtccccataacagcaacccttggttccagggaagaccaaagcattttaggcagggctggtgcaagggcaaacggcatgggggacgtggaaaggaggatgatgcaggagatgccgggcgtgttcaccaagggcctgtccaacggcagcagggtcgaaggcttcctgtacaaatacagcaaaggagaagtgaggatcgtatgcatctgccatggaagcttccttactccttcggagtttgtggagcacgccggcgccggcaaggtagataacccgctgcgacacattgtcgtcagcgctaccccgaacctgtgactgtgaggccaggcagacccgtgcacaagctatagtgttctgtagactcaggacctgagcctagcgtcagagcaatgtcaccgttagactgtgtggtgcggtgcttatgcccgattaaattggtgggcattgtggtaacataacctgttgataatgttttgacaatgttttgatccttcctatgcgtgatttagttctgcagcttcttcttctttttttcttttgtgttcctatcgtggtttcatacctgggcaagtagatttgtaggttagtgagggg

SEQ ID NO: 221593 - DNA, 1195 bp, Zea Mays
aaaaaggagcacaaagctctctctccctcccccctctctctctctctctcctgttccccgcgagagtcgctcagggccgcgacgaggagaagcggcagcgcgtcacctctccaatggcatccccgtccctcctccgtgcaacctgtgcaccctcatgaggactagttcactccctgctgtcattgaggcttctggcaatgatgactggaagaaacgaaaggaagcacagagcctgaagaggctcgaggttaagaagaagaggattgagaggaggaactctctcgcctgcaacacttcaaaagaagctgctgggcagagtccaaaagagatgaatgcaaacactgacaaattagtaagttctgatgaaactattgtcagcgctaacgaaagtcatagcagtggcaagcatctggtgaaggggcttccaccaaagtaccaggccacaattacatcagaagacagttcgtcagcaatgcgaaagaagccaaactcggccttcaaaggaacagccatcactgaggagcagaactcatcatcgtctgttccttcctccggtgaagctataagtagcgtgacggcaccaagtctgcctctgttgtctttggtccccataacagcaacccttggttccagggaagaccaaagcattttaggcagggctggtgcaagggcaaacggcatgggggacgtggaaaggaggatgatgcaggagatgccgggcgtgttcaccaagggcctgtccaacggcagcagggtcgaaggcttcctgtacaaatacagcaaaggagaagtgaggatcgtatgcatctgccatggaagcttccttactccttcggagtttgtggagcacgccggcgccggcaaggtagataacccgctgcgacacattgtcgtcagcgctaccccgaacctgtgactgtgaggccaggcagacccgtgcacaagctatagtgttctgtagactcaggacctgagcctagcgtcagagcaatgtcaccgttagactgtgtggtgcggtgcttatgcccgattaaattggtgggcattgtggtaacataacctgttgataatgttttgacaatgttttgatccttcctatgcgtgatttagttctgcagcttcttcttctttttttcttttgtgttcctatcgtggtttcatacctgggcaagtagatttgtaggttagtgagggg

SEQ ID NO: 221594 - DNA, 1171 bp, Zea Mays
ctctctctccctcccccctctctctctctctctcctgttccccgcgagagtcgctcagggccgcgacgaggagaagcggcagcgcgtcacctctccaatggcatccccgtccctcctccgtgcaacctgcaccctcatgaggactagttcactccctgctgtcattgaggcttctggcaatgatgactggaagaaacgaaaggaagcacagagcctgaagaggctcgaggttaagaagaagaggattgagaggaggaactctctcgcctgcaacacttcaaaagaagctgctgggcagagtccaaaagagatgaatgcaaacactgacaaattagtaagttctgatgaaactattgtcagcgctaacgaaagtcatagcagtggcaagcatctggtgaaggggcttccaccaaagtaccaggccacaattacatcagaagacagttcgtcagcaatgcgaaagaagccaaactcggccttcaaagccatcactgaggagcagaactcatcatcgtctgttccttcctccggtgaagctataagtagcgtgacggcaccaagtctgcctctgttgtctttggtccccataacagcaacccttggttccagggaagaccaaagcattttaggcagggctggtgcaagggcaaacggcatgggggacgtggaaaggaggatgatgcaggagatgccgggcgtgttcaccaagggcctgtccaacggcagcagggtcgaaggcttcctgtacaaatacagcaaaggagaagtgaggatcgtatgcatctgccatggaagcttccttactccttcggagtttgtggagcacgccggcgccggcaaggtagataacccgctgcgacacattgtcgtcagcgctaccccgaacctgtgactgtgaggccaggcagacccgtgcacaagctatagtgttctgtagactcaggacctgagcctagcgtcagagcaatgtcaccgttagactgtgtggtgcggtgcttatgcccgattaaattggtgggcattgtggtaacataacctgttgataatgttttgacaatgttttgatccttcctatgcgtgatttagttctgcagcttcttcttctttttttcttttgtgttcctatcgtggtttcatacctgggcaagtagatttgtaggttagtgagggg

SEQ ID NO: 221595 - DNA, 1556 bp, Zea Mays
ccaaagccatatatactactatattaacattgtaagaggtagcctgcctccctttattctgccttctgttaatctggaccgtccgtccaatggccgtccgtccaatggctgctacccgaaccgtccatcgtatggccactaccccacccacgtgtgtcgccctagatccccctcggtcgtctccccctccagaacacaggcagcgcgacgcgcggtggggacgacttcttgatgccggtgagcatgggcctgacgaggaggtcgagctggccgtagaagttccacggcgatggccccccgcgcgcgctcggccttgtacttcttcttgagcgtgtcgacgcggttcttgcactggatgtcgagacgaaggaacgaacgggtgaatagatgtgggggcggcgatggaggagacgaggcgggggtggtgaatagaagaagggagagggggtggtcggcgaggggggaggagcgtcgggccgtgggccatgatgaccgcgacgcggcacgtggaggagcggtgcagatgcatggttgttgtttggatcctcgtgtcggtcggggcaggtttgaccgggacaccaagccagcgagggattaccggattagcgactccctcgcgcaggcacgtgcctccatcgtccgcgcatgcacagttgcagtcacgccctcagagctaggtgccccaaactgcacacccaacccctaccctttcatcctcaccgtgaatcgacggcggcatgggcgccatgatcgtgcgcacggaggggtgcaaatcctgcttcttctcctaccatggatattgcatgaggttcctatggatatagttacaaggttattggatgttctcaaggttttctctgctttggagtccagtcatactaccatggcaattatgacccaccatgataacaaacaactagccaacaggcgcatgcgtggtccctggccccctccaagcggccacaggctccctcaacgtcgcgcctggcagttggtggaatgggttcttcgccgatgtcgaagccgaggaaacttgccatacatttcccttccagaatcaaacttcacaggcatcaagttcagtcccgggcaacaacattactgctatgacctcattagtctcgtgtgcaattctagaaactggcacagatgatcagcaatgtgctactaatggttggaaagcggaacttgatatactcttttgtaatgtccaaatataccgcttagtctacattatcatgatatactcttttgtaattttatgtaaacacgtgctctgaaaaaaaaacttgacctacgggaacaacttgtttatgtccaagcaacaacaggaagaacaattgctggtgcttgctggtcgattatcaccactccaatagataccaccaagacttggcttcaggttattgacaactatggtaagggtaggccttcagtcatgaaaactaccaggctgttgcttgatgactatggctggaggggcttttatagaggtgtttggaacagagtagggtcaacttcatagaacaatggaggaggcagagcgaaaccctgtg

SEQ ID NO: 221596 - DNA, 543 bp, Zea Mays
ccccaacacgctaattcggggatcaaaatactaatcagcatcaaccatttttttcgatgtgccaaccacttcgcactgttagctactcgaattcgtgggatgggacttgtgttgctgctgccaatgaaaatgaccacactggcatatctggtacattggacagggaagacgattcatgttcacgacattcaatcaataaggaagtcagtttggtgcaaggtgttatgaaaatggaacaatcaatggtacaaagcattcagtttgtcagtttttatctgcaaaatcatctcaggaacttcatgtatatatacctgttccgttctcttttacaacaacaacaacaacaacaacaacaacaacaacaaagccttttgtcccaagcacgttggggtaggctagagatgaaaccccgtatgaaaacctcagagctcaacccccaaagaaaaaaaggggaaacaaaggcaaaggagaaccgaaaacgacgaaacgggggaacacataaaagagataaaacccacaagaatcagcaaggtctaaatgggc

SEQ ID NO: 221597 - DNA, 872 bp, Zea Mays
cacgtcttcctccgccgccgcagcgtcatcagttaaccaagacgcgcagctcccgcctccgtttcaaacccgaaattttccgccgtcccccaaattctttccctcgccttgcatccgctcaaccaacaaaatcgccttccgttttggttgtctcgccaatcccccaaccaaaacaaaccttcctcttccctgaaatcccatgactccgcgcccgcaccaaccggccggccacctactccgtgggcgcgaaaccctaactggcgcccgcatccctctctattccatggcggagcaggatggcgacgcggggcagatgccacccgactccgttccggtggttggtgtaggggatcaaaatactaatcagcatcaaccatttttttcgatgtgccaaccacttcgcactgttagctactcgaattcgtgggatgggacttgtgttgctgctgccaatgaaaatgaccacactggcatatctggtacattggacagggaagacgattcatgttcacgacattcaatcaataaggaagtcagtttggtgcaaggtgttatgaaaatggaacaatcaatggtacaaagcattcagtttgtcagtttttatctgcaaaatcatctcaggaacttcatgtatatatacctgttccgttctcttttacaacaacaacaacaacaacaacaacaacaacaacaaagccttttgtcccaagcacgttggggtaggctagagatgaaaccccgtatgaaaacctcagagctcaacccccaaagaaaaaaaggggaaacaaaggcaaaggagaaccgaaaacgacgaaacgggggaacacataaaagagataaaacccacaagaatcagcaaggtctaaatgggc

SEQ ID NO: 221598 - DNA, 505 bp, Zea Mays
cacgtcttcctccgccgccgcagcgtcatcagttaaccaagacgcgcagctcccgcctccgtttcaaacccgaaattttccgccgtcccccaaattctttccctcgccttgcatccgctcaaccaacaaaatcgccttccgttttggttgtctcgccaatcccccaaccaaaacaaaccttcctcttccctgaaatcccatgactccgcgcccgcaccaaccggccggccacctactccgtgggcgcgaaaccctaactggcgcccgcatccctctctattccatggcggagcaggatggcgacgcggggcagatgccacccgactccgttccggtggttggtgtaggggatcaaaatactaatcagcatcaaccatttttttcgatgtgccaaccacttcgcactgttagctactcgaattcgtgggatgggacttgtgttgctgctgccaatgaaaatgaccacactcttgtaatcgttgggcatacctgttctcagatatag

SEQ ID NO: 221599 - DNA, 1289 bp, Zea Mays
cacacacacttcatcgtggagatatggtggggaacaatactgttgcttccctcttctactattctttgctcatcatctgcgccgctgcttggcacgcggatgcgtcccaagcggatcgactgagagaattcatcaggtctaggaggaacagtcctagtgaggctgctgataagggcacgtttgaggttgccaacatagggcacagcgtagctagcagcctcctgagcacaagcagctactccgacagtgaacagagcgccctgaaggcagctgacaagatcactgcgctgccggggcaaccggacggcggcgtcgacttcgaccagtacgccggggcccggatgctcatcgcttggctacggagcaatgcaagagctcggtccgttccgcgtaaacagcgacaacaaaacgctgagcagaaacaaggcggcttggaataacgtggctaatgtgatcttcttggagtcgccggcgggtgttggattctcctactccaacacatcctccgactacggcctcagcggagaccgaaggacagctgctgatgcgtacttgtttttggctaactggctggagcgctttcctgaatacaaaagccgtccgttctacatctccggggagagctacgccggacactacgtacccgaacttgctgccaccatcttaacccagaattcctacaacagcaggacggccataaacctccggggcatcttggttggaaatccacttctggattcgtatatgaacttgaagggtgcagttgcctactactggagccatgggttgatgtcggacgaggtctttgacaacataaccaggcactgcaagtatgacagttcagatggtgtggcatgcagtggcgctttggaggcggtagatcctggacagattgatccttacaacgtatatgctccgatctgtgttgatgcggccaacggagcatactaccccactggctacctacctggatatgatccatgcagcgattactacacctattcctacctcaatgacccagcagtgcagaatgctttccacgctaggacgacaagttggtcagcgtgcgcgaacttgaactggacggacgcaccgatttccatggtgccaacagtcgcagggctgattgagaagaagctgcctgtttggatttttagtggcgattttgattccgtgtgcccacttcctgctacgaggttttccatccatgatcttaacctgcacgtcaccactccatggcgcccgtggacagtaaacatggagcttggagaacatgacttctgatatgc

SEQ ID NO: 221600 - DNA, 3928 bp, Zea Mays
atggcctcccacggaattcatgggggagcaggatacaccttttttaaaacgacttactgggagaagcacataaaagccagattcatttttgtattacggagaaaaaaggaattaatagagttccaaacctcggttctgcagtttctactaaaaaagcagtcatttatgttatctgtccccgaagcagttgcagtggtgaggttgctaagaatcgagaaggggaaagcatttgtagaccttttgaacgagaaagcaaatgattctggagataaagagataggatatgtgcagaggacactaggtttcagcacacgctatttggaggacagggatataagactggttaccgtcatagttgctggaacagtgcgctggaaacgctaccttgattatctaatcatgtcactatgcagtgaggagaaggttttcagggagatggagccactgcttctacagatattgagaattggctttttcgaaattctcaagcttgatgtacctgcttatgctgccgttgatgagaatgtaaggcttgctaaagtagctttaaggcctggtgctgggaatatggtgaatgcaattctgcgtaaacttgtattgctaaaggagacagactctcttcctcttccaaagatagaaggtgatgatcgtgcccaagctcgtgctctttctataatttattctcatcctgtttggatggtgagacgatggatacggtttcatggaaaagatgaagctctaagattgatgaattggaacaacagtgatcctcatttcagtctaagggtgaacacatcaaaaggctatactagggctgaccttgtaaaacgattggaaagtttacaggttcattatgaagaatcaattatggatgaatttgttcgcattcgggaagggatgcagcaagtcttaaaagctggattactgaaagatggcatttgtgctgtgcaagatgagagtgcagggaagactgcgaactatagacccaaatgggtctgacccttccccagaccccgcacaagcgggagcacatgcaactggcgccccctttttttagatcactgcattataaaacaatactcttagcaaataatagctcatggctgtaaaaaggcacttctcatatcactttggtttagttgggagtgacacattttcagttgaggaagttattgataatctgcgctgagttatgaaagacctatttgtaggtcttgtagtgtctgtggttgatccacaacccggggaaacgattgttgattgctgtgctgcacctggtggaaagactcttttcatggcatcacggttgtcaggagaagggaagatatgggctctggacataaacaaaggtcgtttgagaatactcatggacgcagcaaagttacacggtctagatgatatgatcactgacatccatgctgatcttcgactatatgctaaggaaaccacagttaaatatgacaaagtattgttggacgctccatgctctggtctgggagtgctttccaagagggcggacttacgctggaatagacaatttgaaaatttggaagagttgatgtgtttacaagacgagcttcttgattcggcatcaatgtggtatactaatttacagtacgtgttcgattgaccctgaagaaaatgaagagaggattactgcttttgttcagaggcatccggtacttttttttcgtaacagtcagcactattttctggttcaagtcataaactcagtattcaatttgaatgataaaaatatatgtttgtccttcatatccggggactgttggtactatactattattatgtgttgagttctttttttcacttagcactatcaataatcttcttaattctttttattccttcaagatccttgcccagtaaatggaagttcttcataaccaaccattcccactatattctatccctactattacaggtttaaaaaatgttatagcccttggtgtagtacacacaaaaatgtgtacaattgaactttttgtaccattttttgttcacaattggaattcctgcatcatgattcatgtctacaaccttgacacttcatcatgttcctttttttgcatacagaatgttttgtatttttaacaacaataaagtcttttagtcccaagcaagttggataggctaaagttgaaacctaataggagccgagagtcaagcttttggcacttggattgctatttttcatgcactcctattcattgctaaatctttcggtatatttcatcatttcaagtctcttttaatccttttactgtctcattttatatcaattttggccttcctctgcctcttttctcattactatcgcactttaggatcttacactggtgcttatataggtctccgttagacatctgcaaactatctaaactagtgttggacaagtttttctttaattactgccacccctaggctatcacatatatcatcgtttcagactcaatctcttattatatggccacaaattcagcataacatatacatctctgtagtacttatttgctgaatatattgttttgtaggccaatatttttgcatcatacagcatacaacatagcaagtctaatcacctcccataaaacttatcttttagcttatacggtaccctcttgtaaaacgctaaatgcttgacgtcactttatataccatgctttgattctatggttaacatcttcattaatattaacatctctttgtagcattgatcctaaatatctaaatgtatcctttatgggcactactagatctttcaaactagcatcttcttcctcatatgtagtagtgtcaaaagcacatctcatatatttggctttaattctattgagtataaaagctttggactctagatttttccgtcacaactctagtttcatatttactcttgcctggcttttaacaactagcactatatcatctgcaaaaagcatacatcaagagatatctcctttatgcccattgtgacctcacctcatccatcaccaaataaaaaatgtaatatataatcctattctaataggagaaatctttgtcacatcacttatttgaacattactcatgtacatgtgtccttaacgagtactgcgtactttgttagaactttatgtttatccgaaacccaccacataacattttttttatattttgtcataaactttctctaagtcaataaaaatcatgtgtagtttctttttctggtgcctatattgcttgtcacttgtattttgtattttttaataacccaatgaaaatcttattttgattatatgtttttgacatctgtatattaattaatttatgatatgctgtaggaatttgctcttcagagtgtatgtggatatgttcctagagaatttatcacagatgaaggtttctattcctcaaatccaactaagcactctatggatggggcatttgctgcacgtcttgtccggtcaacgcactaagattataggagttgccacaaggccacaactaggtgtgaagttgaacaaggaatcacatgtattgccctaagtgcacccagtcattgcttcaatatctttatcttatatattcttgaactttgctgcgttttcctcttacgcttcacaaaaaaaaagcatatccaaacccataccatattgcttcttgtacggcacgcagattttttgaagcgttttcgctttgtattaaagtcatctgtttagactgctcagttgtaatatatatagaaaaaacactgtaaaaacagtagaagctatgtcggattaaagccaaatcagctgcctatttcaacgagagaaaccgtgatgagagagaaatcgctgtttcctgaagccttcaaccgttagcagccggtggccggggcgtaaaagacgaactactcgtcttcacggaaaacgacggtgaagaagatggc

SEQ ID NO: 221601 - DNA, 1988 bp, Zea Mays
atggcctcccacggaattcatgggggagcaggatacaccttttttaaaacgacttactgggagaagcacataaaagccagattcatttttgtattacggagaaaaaaggaattaatagagttccaaacctcggttctgcagtttctactaaaaaagcagggatgagtaaggatacatttattaatttggacgtctctcatcacagagcggttgcagtggtgaggttgctaagaatcgagaaggggaaagcatttgtagaccttttgaacgagaaagcaaatgattctggagataaagagataggatatgtgcagaggacactaggtttcagcacacgctatttggaggacagggatataagactgtgaggagaaggttttcagggagatggagccactgcttctacagatattgagaattggctttttcgaaattctcaagcttgatgtacctgcttatgctgccgttgatgagaatgtaaggcttgctaaagtagctttaaggcctggtgctgggaatatggtgaatgcaattctgcgtaaacttgtattgctaaaggagacagactctcttcctcttccaaagatagaaggtgatgatcgtgcccaagctcgtgctctttctataatttattctcatcctgtttggatggtgagacgatggatacggtttcatggaaaagatgaagctctaagattgatgaattggaacaacagtgatcctcatttcagtctaagggtgaacacatcaaaaggctatactagggctgaccttgtaaaacgattggaaagtttacaggttcattatgaagaatcaattatggatgaatttgttcgcattcgggaagggatgcagcaagtcttaaaagctggattactgaaagatggcatttgtgctgtgcaagatgagagtgcaggtcttgtagtgtctgtggttgatccacaacccggggaaacgattgttgattgctgtgctgcacctggtggaaagactcttttcatggcatcacggttgtcaggagaagggaagatatgggctctggacataaacaaaggtcgtttgagaatactcatggacgcagcaaagttacacggtctagatgatatgatcactgacatccatgctgatcttcgactatatgctaaggaaaccacagttaaatatgacaaagtattgttggacgctccatgctctggtctgggagtgctttccaagagggcggacttacgctggaatagacaatttgaaaatttggaagagttgatgtgtttacaagacgagcttcttgattcggcatcaatgttggtaaagccaggtggtatactaatttacagtacgtgttcgattgaccctgaagaaaatgaagagaggattactgcttttgttcagaggcatccggaatttgctcttcagagtgtatgtggatatgttcctagagaatttatcacagatgaaggtttctattcctcaaatccaactaagcactctatggatggggcatttgctgcacgtcttgtccggtcaacgcactaagattataggagttgccacaaggccacaactaggtgtgaagttgaacaaggaatcacatgtattgccctaagtgcacccagtcattgcttcaatatctttatcttatatattcttgaactttgctgcgttttcctcttacgcttcacaaaaaaaaagcatatccaaacccataccatattgcttcttgtacggcacgcagattttttgaagcgttttcgctttgtattaaagtcatctgtttagactgctcagttgtaatatatatagaaaaaacactgtaaaaacagtagaagctatgtcggattaaagccaaatcagctgcctatttcaacgagagaaaccgtgatgagagagaaatcgctgtttcctgaagccttcaaccgttagcagccggtggccggggcgtaaaagacgaactactcgtcttcacggaaaacgacggtgaagaagatggc

SEQ ID NO: 221602 - DNA, 2536 bp, Zea Mays
ctcctcccgagtcccgaactctcgatccactcatccgctgagggcgtcggccttctggcccttctccccccggccgacctcgcccctccggcgctccgtccgcttcctgaactcgtctccctcacggacgttctcctccctccgctcgccgcgccgcaacccggagaggagaccgccgctcggtcgagcaccacctggggcccagcgtcctcgcgaccagctctagcgcggcgtccgccctctgcagccctggtgtccccgcgactggcttcggccggcacacaactccacagttaggtctccgtctgcacagcgcggcgatcttctctctccttcccgccctctgcagtccctctcagtccctctccgtctgcttgattctgctccaacctcagactaccctcgctctgaaaatgtcattacgcacccaatgcgcttgtagctgtatgctgcaaccctactctgcctcgtcttcttccatcaccctaagcatgcgcgcaacccccactcaccaacgacgggcccggccgccgccgccgtcctgcctcgccacccgccaccttcgccggcgacgagcaccagcaggaattaatagagttccaaacctcggttctgcagtttctactaaaaaagcagggatgagtaaggatacatttattaatttggacgtctctcatcacagagcggttgcagtggtgaggttgctaagaatcgagaaggggaaagcatttgtagaccttttgaacgagaaagcaaatgattctggagataaagagataggatatgtgcagaggacactaggtttcagcacacgctatttggaggacagggatataagactggttaccgtcatagttgctggaacagtgcgctggaaacgctaccttgattatctaatcatgtcactatgcagtgaggagaaggttttcagggagatggagccactgcttctacagatattgagaattggctttttcgaaattctcaagcttgatgtacctgcttatgctgccgttgatgagaatgtaaggcttgctaaagtagctttaaggcctggtgctgggaatatggtgaatgcaattctgcgtaaacttgtattgctaaaggagacagactctcttcctcttccaaagatagaaggtgatgatcgtgcccaagctcgtgctctttctataatttattctcatcctgtttggatggtgagacgatggatacggtttcatggaaaagatgaagctctaagattgatgaattggaacaacagtgatcctcatttcagtctaagggtgaacacatcaaaaggctatactagggctgaccttgtaaaacgattggaaagtttacaggttcattatgaagaatcaattatggatgaatttgttcgcattcgggaagggatgcagcaagtcttaaaagctggattactgaaagatggcatttgtgctgtgcaagatgagagtgcaggtcttgtagtgtctgtggttgatccacaacccggggaaacgattgttgattgctgtgctgcacctggtggaaagactcttttcatggcatcacggttgtcaggagaagggaagatatgggctctggacataaacaaaggtcgtttgagaatactcatggacgcagcaaagttacacggtctagatgatatgatcactgacatccatgctgatcttcgactatatgctaaggaaaccacagttaaatatgacaaagtattgttggacgctccatgctctggtctgggagtgctttccaagagggcggacttacgctggaatagacaatttgaaaatttggaagagttgatgtgtttacaagacgagcttcttgattcggcatcaatgttggtaaagccaggtggtatactaatttacagtacgtgttcgattgaccctgaagaaaatgaagagaggattactgcttttgttcagaggcatccggaatttgctcttcagagtgtatgtggatatgttcctagagaatttatcacagatgaaggtttctattcctcaaatccaactaagcactctatggatggggcatttgctgcacgtcttgtccggtcaacgcactaagattataggagttgccacaaggccacaactaggtgtgaagttgaacaaggaatcacatgtattgccctaagtgcacccagtcattgcttcaatatctttatcttatatattcttgaactttgctgcgttttcctcttacgcttcacaaaaaaaaagcatatccaaacccataccatattgcttcttgtacggcacgcagattttttgaagcgttttcgctttgtattaaagtcatctgtttagactgctcagttgtaatatatatagaaaaaacactgtaaaaacagtagaagctatgtcggattaaagccaaatcagctgcctatttcaacgagagaaaccgtgatgagagagaaatcgctgtttcctgaagccttcaaccgttagcagccggtggccggggcgtaaaagacgaactactcgtcttcacggaaaacgacggtgaagaagatggc

SEQ ID NO: 221603 - DNA, 2483 bp, Zea Mays
ctcctcccgagtcccgaactctcgatccactcatccgctgagggcgtcggccttctggcccttctccccccggccgacctcgcccctccggcgctccgtccgcttcctgaactcgtctccctcacggacgttctcctccctccgctcgccgcgccgcaacccggagaggagaccgccgctcggtcgagcaccacctggggcccagcgtcctcgcgaccagctctagcgcggcgtccgccctctgcagccctggtgtccccgcgactggcttcggccggcacacaactccacagttaggtctccgtctgcacagcgcggcgatcttctctctccttcccgccctctgcagtccctctcagtccctctccgtctgcttgattctgctccaacctcagactaccctcgctctgaaaatgtcattacgcacccaatgcgcttgtagctgtatgctgcaaccctactctgcctcgtcttcttccatcaccctaagcatgcgcgcaacccccactcaccaacgacgggcccggccgccgccgccgtcctgcctcgccacccgccaccttcgccggcgacgagcaccagcaggaattaatagagttccaaacctcggttctgcagtttctactaaaaaagcagggatgagtaaggatacatttattaatttggacgtctctcatcacagagcggttgcagtggtgaggttgctaagaatcgagaaggggaaagcatttgtagaccttttgaacgagaaagcaaatgattctggagataaagagataggatatgtgcagaggacactaggtttcagcacacgctatttggaggacagggatataagactggttaccgtcatagttgctggaacagtgcgctggaaacgctaccttgattatctaatcatgtcactatgcagtgaggagaaggttttcagggagatggagccactgcttctacagatattgagaattggctttttcgaaattctcaagcttgatgtacctgcttatgctgccgttgatgagaatgtaaggcttgctaaagtagctttaaggcctggtgctgggaatatggtgaatgcaattctgcgtaaacttgtattgctaaaggagacagactctcttcctcttccaaagatagaagtggatggtgagacgatggatacggtttcatggaaaagatgaagctctaagattgatgaattggaacaacagtgatcctcatttcagtctaagggtgaacacatcaaaaggctatactagggctgaccttgtaaaacgattggaaagtttacaggttcattatgaagaatcaattatggatgaatttgttcgcattcgggaagggatgcagcaagtcttaaaagctggattactgaaagatggcatttgtgctgtgcaagatgagagtgcaggtcttgtagtgtctgtggttgatccacaacccggggaaacgattgttgattgctgtgctgcacctggtggaaagactcttttcatggcatcacggttgtcaggagaagggaagatatgggctctggacataaacaaaggtcgtttgagaatactcatggacgcagcaaagttacacggtctagatgatatgatcactgacatccatgctgatcttcgactatatgctaaggaaaccacagttaaatatgacaaagtattgttggacgctccatgctctggtctgggagtgctttccaagagggcggacttacgctggaatagacaatttgaaaatttggaagagttgatgtgtttacaagacgagcttcttgattcggcatcaatgttggtaaagccaggtggtatactaatttacagtacgtgttcgattgaccctgaagaaaatgaagagaggattactgcttttgttcagaggcatccggaatttgctcttcagagtgtatgtggatatgttcctagagaatttatcacagatgaaggtttctattcctcaaatccaactaagcactctatggatggggcatttgctgcacgtcttgtccggtcaacgcactaagattataggagttgccacaaggccacaactaggtgtgaagttgaacaaggaatcacatgtattgccctaagtgcacccagtcattgcttcaatatctttatcttatatattcttgaactttgctgcgttttcctcttacgcttcacaaaaaaaaagcatatccaaacccataccatattgcttcttgtacggcacgcagattttttgaagcgttttcgctttgtattaaagtcatctgtttagactgctcagttgtaatatatatagaaaaaacactgtaaaaacagtagaagctatgtcggattaaagccaaatcagctgcctatttcaacgagagaaaccgtgatgagagagaaatcgctgtttcctgaagccttcaaccgttagcagccggtggccggggcgtaaaagacgaactactcgtcttcacggaaaacgacggtgaagaagatggc

SEQ ID NO: 221604 - DNA, 2428 bp, Zea Mays
ctcctcccgagtcccgaactctcgatccactcatccgctgagggcgtcggccttctggcccttctccccccggccgacctcgcccctccggcgctccgtccgcttcctgaactcgtctccctcacggacgttctcctccctccgctcgccgcgccgcaacccggagaggagaccgccgctcggtcgagcaccacctggggcccagcgtcctcgcgaccagctctagcgcggcgtccgccctctgcagccctggtgtccccgcgactggcttcggccggcacacaactccacagttaggtctccgtctgcacagcgcggcgatcttctctctccttcccgccctctgcagtccctctcagtccctctccgtctgcttgattctgctccaacctcagactaccctcgctctgaaaatgtcattacgcacccaatgcgcttgtagctgtatgctgcaaccctactctgcctcgtcttcttccatcaccctaagcatgcgcgcaacccccactcaccaacgacgggcccggccgccgccgccgtcctgcctcgccacccgccaccttcgccggcgacgagcaccagcaggttaccgtcatagttgctggaacagtgcgctggaaacgctaccttgattatctaatcatgtcactatgcagtgaggagaaggttttcagggagatggagccactgcttctacagatattgagaattggctttttcgaaattctcaagcttgatgtacctgcttatgctgccgttgatgagaatgtaaggcttgctaaagtagctttaaggcctggtgctgggaatatggtgaatgcaattctgcgtaaacttgtattgctaaaggagacagactctcttcctcttccaaagatagaaggtgatgatcgtgcccaagctcgtgctctttctataatttattctcatcctgtttggatggtgagacgatggatacggtttcatggaaaagatgaagctctaagattgatgaattggaacaacagtgatcctcatttcagtctaagggtgaacacatcaaaaggctatactagggctgaccttgtaaaacgattggaaagtttacaggttcattatgaagaatcaattatggatgaatttgttcgcattcgggaagggatgcagcaagtcttaaaagctggattactgaaagatggcatttgtgctgtgcaagatgagagtgcagggaagactgcgaactatagacccaaatgggtctgacccttccccagaccccgcacaagcgggagcacatgcaactggcgccccctttttttagatcactgcattataaaacaatactcttagcaaataatagctcatggctgtaaaaaggtcttgtagtgtctgtggttgatccacaacccggggaaacgattgttgattgctgtgctgcacctggtggaaagactcttttcatggcatcacggttgtcaggagaagggaagatatgggctctggacataaacaaaggtcgtttgagaatactcatggacgcagcaaagttacacggtctagatgatatgatcactgacatccatgctgatcttcgactatatgctaaggaaaccacagttaaatatgacaaagtattgttggacgctccatgctctggtctgggagtgctttccaagagggcggacttacgctggaatagacaatttgaaaatttggaagagttgatgtgtttacaagacgagcttcttgattcggcatcaatgttggtaaagccaggtggtatactaatttacagtacgtgttcgattgaccctgaagaaaatgaagagaggattactgcttttgttcagaggcatccggaatttgctcttcagagtgtatgtggatatgttcctagagaatttatcacagatgaaggtttctattcctcaaatccaactaagcactctatggatggggcatttgctgcacgtcttgtccggtcaacgcactaagattataggagttgccacaaggccacaactaggtgtgaagttgaacaaggaatcacatgtattgccctaagtgcacccagtcattgcttcaatatctttatcttatatattcttgaactttgctgcgttttcctcttacgcttcacaaaaaaaaagcatatccaaacccataccatattgcttcttgtacggcacgcagattttttgaagcgttttcgctttgtattaaagtcatctgtttagactgctcagttgtaatatatatagaaaaaacactgtaaaaacagtagaagctatgtcggattaaagccaaatcagctgcctatttcaacgagagaaaccgtgatgagagagaaatcgctgtttcctgaagccttcaaccgttagcagccggtggccggggcgtaaaagacgaactactcgtcttcacggaaaacgacggtgaagaagatggc

SEQ ID NO: 221605 - DNA, 1860 bp, Zea Mays
ctctcatcacagagcggtggtgaggttgctaagaatcgagaaggggaaagcatttgtagaccttttgaacgagaaagcaaatgattctggagataaagagataggatatgtgcagaggacactaggtttcagcacacgctatttggaggacagggatataagactggttaccgtcatagttgctggaacagtgcgctggaaacgctaccttgattatctaatcatgtcactatgcagtgaggagaaggttttcagggagatggagccactgcttctacagatattgagaattggctttttcgaaattctcaagcttgatgtacctgcttatgctgccgttgatgagaatgtaaggcttgctaaagtagctttaaggcctggtgctgggaatatggtgaatgcaattctgcgtaaacttgtattgctaaaggagacagactctcttcctcttccaaagatagaaggtgatgatcgtgcccaagctcgtgctctttctataatttattctcatcctgtttggatggtgagacgatggatacggtttcatggaaaagatgaagctctaagattgatgaattggaacaacagtgatcctcatttcagtctaagggtgaacacatcaaaaggctatactagggctgaccttgtaaaacgattggaaagtttacaggttcattatgaagaatcaattatggatgaatttgttcgcattcgggaagggatgcagcaagtcttaaaagctggattactgaaagatggcatttgtgctgtgcaagatgagagtgcaggtcttgtagtgtctgtggttgatccacaacccggggaaacgattgttgattgctgtgctgcacctggtggaaagactcttttcatggcatcacggttgtcaggagaagggaagatatgggctctggacataaacaaaggtcgtttgagaatactcatggacgcagcaaagttacacggtctagatgatatgatcactgacatccatgctgatcttcgactatatgctaaggaaaccacagttaaatatgacaaagtattgttggacgctccatgctctggtctgggagtgctttccaagagggcggacttacgctggaatagacaatttgaaaatttggaagagttgatgtgtttacaagacgagcttcttgattcggcatcaatgttggtaaagccaggtggtatactaatttacagtacgtgttcgattgaccctgaagaaaatgaagagaggattactgcttttgttcagaggcatccggaatttgctcttcagagtgtatgtggatatgttcctagagaatttatcacagatgaaggtttctattcctcaaatccaactaagcactctatggatggggcatttgctgcacgtcttgtccggtcaacgcactaagattataggagttgccacaaggccacaactaggtgtgaagttgaacaaggaatcacatgtattgccctaagtgcacccagtcattgcttcaatatctttatcttatatattcttgaactttgctgcgttttcctcttacgcttcacaaaaaaaaagcatatccaaacccataccatattgcttcttgtacggcacgcagattttttgaagcgttttcgctttgtattaaagtcatctgtttagactgctcagttgtaatatatatagaaaaaacactgtaaaaacagtagaagctatgtcggattaaagccaaatcagctgcctatttcaacgagagaaaccgtgatgagagagaaatcgctgtttcctgaagccttcaaccgttagcagccggtggccggggcgtaaaagacgaactactcgtcttcacggaaaacgacggtgaagaagatggc

SEQ ID NO: 221606 - DNA, 2728 bp, Zea Mays
ccggaacaaaaatatcccacccaaacaactccaccctaccgcaccccaaattcgcaatccctctccacctctcctcccaccgcagcagcaggcaagcgcgaggcggaggcggagagatggagtcggaccagggcaagctcttcatcggcggcatctcctgggaaacaacggaggagaagctgagcgagcacttctccgcctacggagaggttacgcaggccgccgtcatgcgcgacaagacgacgggccgcccccgaggcttcgggtttgtcgtcttcgccgaccccgccgtcgtcgaccgagcgctgcaggacccccacaccctcgacggccgcacggtcgatgtgaagcgggcactctcgcgggaggagcagcaggcctccaaggccgcaaaccctagcggtgggaggaacactggcggaggaaatggcggcggcgatgcaaatggtgctcggacgaagaaaatattcgtgggcgggctgccctctactctgactgaggatgggtttcggcagtatttccagaccttcggcatcgtcactgatgttgttgtcatgtatgaccagaacacgcagcgcccccgtggcttcggattcatcacctttgactcggaggacgcggttgaccacgtgctgcagaagaccttccatgatcttggtgggaagctggttgaggtgaagcgtgcattgccccgtgaggcgaaccctggtggctctggtagtgggcgttctggggtgagtgggggttaccagagcaacaatggccataacaccagctctggtagctatgatggtagaagtgatggtggcaggtacgggcaggcacagcagggtagtggtgtctatcctggctatggtgctggggcagctggatatggatatggtgctaaccctgcaattggatatggaaattatggggctggaggatatggaggtgctcctgctgcttatggtggacattatggaaacccaggtgcagctggttctggttaccaaggtggacccccaggctcaaatagaggaccttggggcagtcaagctccatctgcatatggaactggagggtatggtggcagtgctggctatagtgcttggaacaactcttctggtggtggcaatgctcccactagtcaagcccctggcggacctgcgggctatggaagccagggttttgggtatggtggatatggaggtgatccatcgtatggtagtcatgggggatatggagcttatggagcgcgaagtgatggtgctggcaatcctgctactggtggagcatctggatatggtgcagggtatggaagtgggggtgccaactctggctattcaagtgcttggagtgatccttcacaaggtggtggatttggtggttcagtcaatggaggttctgaagggcaatcaaactatggcactggctatggcagtgtgcagcccagggttgctcagtaaagaaggcattttgagtgtctgaaatgaaccagcacatctgggcagtctatgtattgatttgtcattccagttctgatttgttctcagcattctgaagattgcccatttgctggttaaatcagtatttctccgggttggaatgcttgatcctttagtggcttactactagaacttgtagtcaataagtagctataatgtggagtagcagtatcttgcagaatgcttttattaatttctacatttagctttatctatctgtgtgctttgccatgagtggagtttcaggttccttcatctctagttataagctagagtagcttgactgcttatggacaaaattatctagttgtacctctattctacagatcatacattcgtgtttgatggtagtatttatgctggatattgtacctctattctggaatgttctatatttggtggttgtattgacatatggtattatcaacattcatggtttgaaacagatgcaacccctgaaatatgcagtcatagttggcttgatgctgtagctgcttctaacattatgttcaaactgtagtgcaagtgtttatatagctggaatgctacatccttcaagtatgtcatcaagctatgaattccatccatttggccctagaatttgatattttccaagcagcagtaagcttattagcagcaagattgtagcactaagtttctgaggttgaatgggatgacattccttttcagagatgatacccaagcaaggttatgaaatcaggcatctgaaaaaaaatgtggcagtgattttacatgacgagctggtaaaaagttgcaatattggggtgcagacagaatgcaagataccagcttgagcgtttcattgtctgaagggtcttgtgctgtgctacaagatagtgtggcctctggcgttggaagcgaaggggaccggggcatcttgtggctgggctttaatcgagatggacggcaagcatctaactttggctccagttctgcagtatttctagtctgctaatagaatgtgggttgtgtcccttctctagtatcttgtttccagtaaagcatcaagcaatccgaaatccatggcctgcaaatgacgaaacacatgtaatagctcaaaaggagagatttgatatattactttgttctatataggcaagagaagctaatacctctgaagaagacatgaaccgatccctctgtccacttttgcaccatgtcaagtggttgaattttggataaaaaaagtcttccgtttggattcctagactatactcttg

SEQ ID NO: 221607 - DNA, 2660 bp, Zea Mays
ccggaacaaaaatatcccacccaaacaactccaccctaccgcaccccaaattcgcaatccctctccacctctcctcccaccgcagcagcaggcaagcgcgaggcggaggcggagagatggagtcggaccagggcaagctcttcatcggcggcatctcctgggaaacaacggaggagaagctgagcgagcacttctccgcctacggagaggttacgcaggccgccgtcatgcgcgacaagacgacgggccgcccccgaggcttcgggtttgtcgtcttcgccgaccccgccgtcgtcgaccgagcgctgcaggacccccacaccctcgacggccgcacggtcgatgtgaagcgggcactctcgcgggaggagcagcaggcctccaaggccgcaaaccctagcggtgggaggaacactggcggaggaaatggcggcggcgatgcaaatggtgctcggacgaagaaaatattcgtgggcgggctgccctctactctgactgaggatgggtttcggcagtatttccagaccttcggcatcgtcactgatgttgttgtcatgtatgaccagaacacgcagcgcccccgtggcttcggattcatcacctttgactcggaggacgcggttgaccacgtgctgcagaagaccttccatgatcttggtgggaagctggttgaggtgaagcgtgcattgccccgtgaggcgaaccctggtggctctggtagtgggcgttctggggtgagtgggggttaccagagcaacaatggccataacaccagctctggtagctatgatggtagaagtgatggtggcaggtacgggcaggcacagcagggtagtggtgtctatcctggctatggtgctggggcagctggatatggatatggtgctaaccctgcaattggatatggaaattatggggctggaggatatggaggtgctcctgctgcttatggtggacattatggaaacccaggtgcagctggttctggttaccaaggtggacccccaggctcaaatagaggaccttggggcagtcaagctccatctgcatatggaactggagggtatggtggcagtgctggctatagtgcttggaacaactcttctggtggtggcaatgctcccactagtcaagcccctggcggacctgcgggctatggaagccagggttttgggtatggtggatatggaggtgatccatcgtatggtagtcatgggggatatggagcttatggagcgcgaagtgatggtgctggcaatcctgctactggtggagcatctggatatggtgcagggtatggaagtgggggtgccaactctggctattcaagtgcttggagtgatccttcacaaggtggtggatttggtggttcagtcaatggaggttctgaagggcaatcaaactatggcactggctatggcagtgtgcagcccagggttgctcagtaaagaaggcattttgagtgtctgaaatgaaccagcacatctgggcagtctatgtattgatttgtcattccagttctgatttgttctcagcattctgaagattgcccatttgctggttaaatcagtatttctccgggttgaatgggatgacattccttttcagagatgatacccaagcaaggttatgaaatcaggcatctgaaaaaaaatgtggcagtgattttacatgacgagctggtaaaaagttgcaatattggggtgcagacagaatgcaagataccagcttgagcgtttcattgtctgaagggtcttgtgctgtgctacaagatagtggtgcgagcttactctcccttcccaaagagcatgttttaatggcaaaactcttgtcaacagacgaagtgcaacatgctgactcgagcagtcgagctgctgtagctgggtcttgggaagggtctcggctgtgtgtctgcatactgatgatcggtgatgcttacgatataggaatgccccaatgtataggtgaacttttagtgctatagaggcttccttttgttgtcatgatgtctatgctctttaagtagctgcataacaccatgtatactcagtatagttctacacctgggtatggaagccattcgtgtttttgtttagtatgaatgccatgtaattgtacattaggttgacaattcagttgttgctaaatcacgctccactagtgaattgtgtaaatggaaagaaatgaaatgcatatatataaaactctgatcctttactgctctgatttgacactgatgggttatttgacttgttccttattactctctccggctccagtggcctctggcgttggaagcgaaggggaccggggcatcttgtggctgggctttaatcgagatggacggcaagcatctaactttggctccagttctgcagtatttctagtctgctaatagaatgtgggttgtgtcccttctctagtatcttgtttccagtaaagcatcaagcaatccgaaatccatggcctgcaaatgacgaaacacatgtaatagctcaaaaggagagatttgatatattactttgttctatataggcaagagaagctaatacctctgaagaagacatgaaccgatccctctgtccacttttgcaccatgtcaagtggttgaattttggataaaaaaagtcttccgtttggattcctagactatactcttg

SEQ ID NO: 221608 - DNA, 3201 bp, Zea Mays
aaacaactccaccctaccgcaccccaaattcgcaatccctctccacctctcctcccaccgcagcagcaggcaagcgcgaggcggaggcggagagatggagtcggaccagggcaagctcttcatcggcggcatctcctgggaaacaacggaggagaagctgagcgagcacttctccgcctacggagaggttacgcaggccgccgtcatgcgcgacaagacgacgggccgcccccgaggcttcgggtttgtcgtcttcgccgaccccgccgtcgtcgaccgagcgctgcaggacccccacaccctcgacggccgcacggtcgatgtgaagcgggcactctcgcgggaggagcagcaggcctccaaggccgcaaaccctagcggtgggaggaacactggcggaggaaatggcggcggcgatgcaaatggtgctcggacgaagaaaatattcgtgggcgggctgccctctactctgactgaggatgggtttcggcagtatttccagaccttcggcatcgtcactgatgttgttgtcatgtatgaccagaacacgcagcgcccccgtggcttcggattcatcacctttgactcggaggacgcggttgaccacgtgctgcagaagaccttccatgatcttggtgggaagctggttgaggtgaagcgtgcattgccccgtgaggcgaaccctggtggctctggtagtgggcgttctggggtgagtgggggttaccagagcaacaatggccataacaccagctctggtagctatgatggtagaagtgatggtggcaggtacgggcaggcacagcagggtagtggtgtctatcctggctatggtgctggggcagctggatatggatatggtgctaaccctgcaattggatatggaaattatggggctggaggatatggaggtgctcctgctgcttatggtggacattatggaaacccaggtgcagctggttctggttaccaaggtggacccccaggctcaaatagaggaccttggggcagtcaagctccatctgcatatggaactggagggtatggtggcagtgctggctatagtgcttggaacaactcttctggtggtggcaatgctcccactagtcaagcccctggcggacctgcgggctatggaagccagggttttgggtatggtggatatggaggtgatccatcgtatggtagtcatgggggatatggagcttatggagcgcgaagtgatggtgctggcaatcctgctactggtggagcatctggatatggtgcagggtatggaagtgggggtgccaactctggctattcaagtgcttggagtgatccttcacaaggtggtggatttggtggttcagtcaatggaggttctgaagggcaatcaaactatggcactggctatggcagtgtgcagcccagggttgctcagtaaagaaggcattttgagtgtctgaaatgaaccagcacatctgggcagtctatgtattgatttgtcattccagttctgatttgttctcagcattctgaagattgcccatttgctggttaaatcagtatttctccggtgcaagtgtttatatagctggaatgctacatccttcaagtatgtcatcaagctatgaattccatccatttggccctagaatttgatattttccaagcagcagtaagcttattagcagcaagattgtagcactaagtttctgaggtagtatagataactgggttatctgtgaagctaattgaatgtttaggggtagaattgtattgtagaacagtcaaggctcggcaagtaaagtaattgtccttcctcctacctttcctttatgtacaggttgaatgggatgacattccttttcagagatgatacccaagcaaggttatgaaatcaggcatctgaaaaaaaatgtggcagtgattttacatgacgagctggtaaaaagttgcaatattggggtgcagacagaatgcaagataccagcttgagcgtttcattgtctgaagggtcttgtgctgtgctacaagatagtgtggcctctggcgttggaagcgaaggggaccggggcatcttgtggctggtgtgtatcatcttcctaccatcctaggacatctaattagtttgattagtttcttccccgttctagtggactcggttgctgcttttggctttcaccgaatcctctccaaaggtggcgctggtgctactgttccttatggtgatgattttacttctgaccatgattgttacagcggtaaggcggtcttaggatcttttaacctttaagcatggagacgactttatatacatgtaagtaaggtgaataataacaaaaaaaaaatgcatagctaagtagatagaccatatatatatcatagaacatacaagccttaatgaatagcataatttataaaatagtataattgatagttcataaaactaacaaacagtagttcataaaactaacaagtccaaaatatatagttcataattttgtaaactaacaagtccataaaagaacacaaggcaacattaaatttagattctcaacacttagggcctgtttggtttgtggctaaatgtgtcatactttgtctaatgttagttgttcgaattgaataactaatcttaggcagaaaagttaggcaaaatgtggtaactgaggtagtgaaccaaacatgtctttagatagatctgggccgcctctcttggacagctgcccctctagggctgctgccagcctaccacccatgtgccgcgtcgccgcaacaaagtgcacatatcttctccctcctcttttatgcatccatgacagggacctcacgcgctcgtgtcaaagaggaggccatggccttccgcaagaagatggcatgcttgttacggctcaaggtgcagacaaggaggctgtcaacgcacacactcgcgcccaagtaggatggcaacgcgcaatcccccgtcggggaatacctccccgtccccgcgacgattttttttccgtagggattcccacgaatacttgtggggaacatttcttctctatccctgtttttcgcgggataaatctccaaaagtgatccctatctctgtttaaattataattaaaatatgcgttatttattattaatattaaacattatcacttatacacattatcagatgtaagaaatcattatgcacacatcaaaataaatatatttgtacaattagtg

SEQ ID NO: 221609 - DNA, 3919 bp, Zea Mays
ccggaacaaaaatatcccacccaaacaactccaccctaccgcaccccaaattcgcaatccctctccacctctcctcccaccgcagcagcaggcaagcgcgaggcggaggcggagagatggagtcggaccagggcaagctcttcatcggcggcatctcctgggaaacaacggaggagaagctgagcgagcacttctccgcctacggagaggttacgcaggccgccgtcatgcgcgacaagacgacgggccgcccccgaggcttcgggtttgtcgtcttcgccgaccccgccgtcgtcgaccgagcgctgcaggacccccacaccctcgacggccgcacggtcgatgtgaagcgggcactctcgcgggaggagcagcaggcctccaaggccgcaaaccctagcggtgggaggaacactggcggaggaaatggcggcggcgatgcaaatggtgctcggacgaagaaaatattcgtgggcgggctgccctctactctgactgaggatgggtttcggcagtatttccagaccttcggcatcgtcactgatgttgttgtcatgtatgaccagaacacgcagcgcccccgtggcttcggattcatcacctttgactcggaggacgcggttgaccacgtgctgcagaagaccttccatgatcttggtgggaagctggttgaggtgaagcgtgcattgccccgtgaggcgaaccctggtggctctggtagtgggcgttctggggtgagtgggggttaccagagcaacaatggccataacaccagctctggtagctatgatggtagaagtgatggtggcaggtacgggcaggcacagcagggtagtggtgtctatcctggctatggtgctggggcagctggatatggatatggtgctaaccctgcaattggatatggaaattatggggctggaggatatggaggtgctcctgctgcttatggtggacattatggaaacccaggtgcagctggttctggttaccaaggtggacccccaggctcaaatagaggaccttggggcagtcaagctccatctgcatatggaactggagggtatggtggcagtgctggctatagtgcttggaacaactcttctggtggtggcaatgctcccactagtcaagcccctggcggacctgcgggctatggaagccagggttttgggtatggtggatatggaggtgatccatcgtatggtagtcatgggggatatggagcttatggagcgcgaagtgatggtgctggcaatcctgctactggtggagcatctggatatggtgcagggtatggaagtgggggtgccaactctggctattcaagtgcttggagtgatccttcacaaggtggtggatttggtggttcagtcaatggaggttctgaagggcaatcaaactatggcactggctatggcagtgtgcagcccagggttgctcagtaaagaaggcattttgagtgtctgaaatgaaccagcacatctgggcagtctatgtattgatttgtcattccagttctgatttgttctcagcattctgaagattgcccatttgctggttaaatcagtatttctccgggttggaatgcttgatcctttagtggcttactactagaacttgtagtcaataagtagctataatgtggagtagcagtatcttgcagaatgcttttattaatttctacatttagctttatctatctgtgtgctttgccatgagtggagtttcaggttccttcatctctagttataagctagagtagcttgactgcttatggacaaaattatctagttgtacctctattctacagatcatacattcgtgtttgatggtagtatttatgctggatattgtacctctattctggaatgttctatatttggtggttgtattgacatatggtattatcaacattcatggtttgaaacagatgcaacccctgaaatatgcagtcatagttggcttgatgctgtagctgcttctaacattatgttcaaactgtagtgcaagtgtttatatagctggaatgctacatccttcaagttgaatgggatgacattccttttcagagatgatacccaagcaaggttatgaaatcaggcatctgaaaaaaaatgtggcagtgattttacatgacgagctggtaaaaagttgcaatattggggtgcagacagaatgcaagataccagcttgagcgtttcattgtctgaagggtcttgtgctgtgctacaagatagtggtgcgagcttactctcccttcccaaagagcatgttttaatggcaaaactcttgtcaacagacgaagtgcaacatgctgactcgagcagtcgagctgctgtagctgggtcttgggaagggtctcggctgtgtgtctgcatactgatgatcggtgatgcttacgatataggaatgccccaatgtataggtgaacttttagtgctatagaggcttccttttgttgtcatgatgtctatgctctttaagtagctgcataacaccatgtatactcagtatagttctacacctgggtatggaagccattcgtgtttttgtttagtatgaatgccatgtaattgtacattaggttgacaattcagttgttgctaaatcacgctccactagtgaattgtgtaaatggaaagaaatgaaatgcatatatataaaactctgatcctttactgctctgatttgacactgatgggttatttgacttgttccttattactctctccggctccagtggcctctggcgttggaagcgaaggggaccggggcatcttgtggctggtgtgtatcatcttcctaccatcctaggacatctaattagtttgattagtttcttccccgttctagtggactcggttgctgcttttggctttcaccgaatcctctccaaaggtggcgctggtgctactgttccttatggtgatgattttacttctgaccatgattgttacagcggtaaggcggtcttaggatcttttaacctttaagcatggagacgactttatatacatgtaagtaaggtgaataataacaaaaaaaaaatgcatagctaagtagatagaccatatatatatcatagaacatacaagccttaatgaatagcataatttataaaatagtataattgatagttcataaaactaacaaacagtagttcataaaactaacaagtccaaaatatatagttcataattttgtaaactaacaagtccataaaagaacacaaggcaacattaaatttagattctcaacacttagggcctgtttggtttgtggctaaatgtgtcatactttgtctaatgttagttgttcgaattgaataactaatcttaggcagaaaagttaggcaaaatgtggtaactgaggtagtgaaccaaacatgtctttagatagatctgggccgcctctcttggacagctgcccctctagggctgctgccagcctaccacccatgtgccgcgtcgccgcaacaaagtgcacatatcttctccctcctcttttatgcatccatgacagggacctcacgcgctcgtgtcaaagaggaggccatggccttccgcaagaagatggcatgcttgttacggctcaaggtgcagacaaggaggctgtcaacgcacacactcgcgcccaagtaggatggcaacgcgcaatcccccgtcggggaatacctccccgtccccgcgacgattttttttccgtagggattcccacgaatacttgtggggaacatttcttctctatccctgtttttcgcgggataaatctccaaaagtgatccctatctctgtttaaattataattaaaatatgcgttatttattattaatattaaacattatcacttatacacattatcagatgtaagaaatcattatgcacacatcaaaataaatatatttgtacaattagtg

SEQ ID NO: 221610 - DNA, 2905 bp, Zea Mays
ccggaacaaaaatatcccacccaaacaactccaccctaccgcaccccaaattcgcaatccctctccacctctcctcccaccgcagcagcaggcaagcgcgaggcggaggcggagagatggagtcggaccagggcaagctcttcatcggcggcatctcctgggaaacaacggaggagaagctgagcgagcacttctccgcctacggagaggttacgcaggccgccgtcatgcgcgacaagacgacgggccgcccccgaggcttcgggtttgtcgtcttcgccgaccccgccgtcgtcgaccgagcgctgcaggacccccacaccctcgacggccgcacggtcgatgtgaagcgggcactctcgcgggaggagcagcaggcctccaaggccgcaaaccctagcggtgggaggaacactggcggaggaaatggcggcggcgatgcaaatggtgctcggacgaagaaaatattcgtgggcgggctgccctctactctgactgaggatgggtttcggcagtatttccagaccttcggcatcgtcactgatgttgttgtcatgtatgaccagaacacgcagcgcccccgtggcttcggattcatcacctttgactcggaggacgcggttgaccacgtgctgcagaagaccttccatgatcttggtgggaagctggttgaggtgaagcgtgcattgccccgtgaggcgaaccctggtggctctggtagtgggcgttctggggtgagtgggggttaccagagcaacaatggccataacaccagctctggtagctatgatggtagaagtgatggtggcaggtacgggcaggcacagcagggtagtggtgtctatcctggctatggtgctggggcagctggatatggatatggtgctaaccctgcaattggatatggaaattatggggctggaggatatggaggtgctcctgctgcttatggtggacattatggaaacccaggtgcagctggttctggttaccaaggtggacccccaggctcaaatagaggaccttggggcagtcaagctccatctgcatatggaactggagggtatggtggcagtgctggctatagtgcttggaacaactcttctggtggtggcaatgctcccactagtcaagcccctggcggacctgcgggctatggaagccagggttttgggtatggtggatatggaggtgatccatcgtatggtagtcatgggggatatggagcttatggagcgcgaagtgatggtgctggcaatcctgctactggtggagcatctggatatggtgcagggtatggaagtgggggtgccaactctggctattcaagtgcttggagtgatccttcacaaggtggtggatttggtggttcagtcaatggaggttctgaagggcaatcaaactatggcactggctatggcagtgtgcagcccagggttgctcagtaaagaaggcattttgagtgtctgaaatgaaccagcacatctgggcagtctatgtattgatttgtcattccagttctgatttgttctcagcattctgaagattgcccatttgctggttaaatcagtatttctccgggttgaatgggatgacattccttttcagagatgatacccaagcaaggttatgaaatcaggcatctgaaaaaaaatgtggcagtgattttacatgacgagctggtaaaaagttgcaatattggggtgcagacagaatgcaagataccagcttgagcgtttcattgtctgaagggtcttgtgctgtgctacaagatagtgtggcctctggcgttggaagcgaaggggaccggggcatcttgtggctgtttcttccccgttctagtggactcggttgctgcttttggctttcaccgaatcctctccaaaggtggcgctggtgctactgttccttatggtgatgattttacttctgaccatgattgttacagcggtaaggcggtcttaggatcttttaacctttaagcatggagacgactttatatacatgtaagtaaggtgaataataacaaaaaaaaaatgcatagctaagtagatagaccatatatatatcatagaacatacaagccttaatgaatagcataatttataaaatagtataattgatagttcataaaactaacaaacagtagttcataaaactaacaagtccaaaatatatagttcataattttgtaaactaacaagtccataaaagaacacaaggcaacattaaatttagattctcaacacttagggcctgtttggtttgtggctaaatgtgtcatactttgtctaatgttagttgttcgaattgaataactaatcttaggcagaaaagttaggcaaaatgtggtaactgaggtagtgaaccaaacatgtctttagatagatctgggccgcctctcttggacagctgcccctctagggctgctgccagcctaccacccatgtgccgcgtcgccgcaacaaagtgcacatatcttctccctcctcttttatgcatccatgacagggacctcacgcgctcgtgtcaaagaggaggccatggccttccgcaagaagatggcatgcttgttacggctcaaggtgcagacaaggaggctgtcaacgcacacactcgcgcccaagtaggatggcaacgcgcaatcccccgtcggggaatacctccccgtccccgcgacgattttttttccgtagggattcccacgaatacttgtggggaacatttcttctctatccctgtttttcgcgggataaatctccaaaagtgatccctatctctgtttaaattataattaaaatatgcgttatttattattaatattaaacattatcacttatacacattatcagatgtaagaaatcattatgcacacatcaaaataaatatatttgtacaattagtg

SEQ ID NO: 221611 - DNA, 3418 bp, Zea Mays
ccggaacaaaaatatcccacccaaacaactccaccctaccgcaccccaaattcgcaatccctctccacctctcctcccaccgcagcagcaggcaagcgcgaggcggaggcggagagatggagtcggaccagggcaagctcttcatcggcggcatctcctgggaaacaacggaggagaagctgagcgagcacttctccgcctacggagaggttacgcaggccgccgtcatgcgcgacaagacgacgggccgcccccgaggcttcgggtttgtcgtcttcgccgaccccgccgtcgtcgaccgagcgctgcaggacccccacaccctcgacggccgcacggtcgatgtgaagcgggcactctcgcgggaggagcagcaggcctccaaggccgcaaaccctagcggtgggaggaacactggcggaggaaatggcggcggcgatgcaaatggtgctcggacgaagaaaatattcgtgggcgggctgccctctactctgactgaggatgggtttcggcagtatttccagaccttcggcatcgtcactgatgttgttgtcatgtatgaccagaacacgcagcgcccccgtggcttcggattcatcacctttgactcggaggacgcggttgaccacgtgctgcagaagaccttccatgatcttggtgggaagctggttgaggtgaagcgtgcattgccccgtgaggcgaaccctggtggctctggtagtgggcgttctggggtgagtgggggttaccagagcaacaatggccataacaccagctctggtagctatgatggtagaagtgatggtggcaggtacgggcaggcacagcagggtagtggtgtctatcctggctatggtgctggggcagctggatatggatatggtgctaaccctgcaattggatatggaaattatggggctggaggatatggaggtgctcctgctgcttatggtggacattatggaaacccaggtgcagctggttctggttaccaaggtggacccccaggctcaaatagaggaccttggggcagtcaagctccatctgcatatggaactggagggtatggtggcagtgctggctatagtgcttggaacaactcttctggtggtggcaatgctcccactagtcaagcccctggcggacctgcgggctatggaagccagggttttgggtatggtggatatggaggtgatccatcgtatggtagtcatgggggatatggagcttatggagcgcgaagtgatggtgctggcaatcctgctactggtggagcatctggatatggtgcagggtatggaagtgggggtgccaactctggctattcaagtgcttggagtgatccttcacaaggtggtggatttggtggttcagtcaatggaggttctgaagggcaatcaaactatggcactggctatggcagtgtgcagcccagggttgctcagtaaagaaggcattttgagtgtctgaaatgaaccagcacatctgggcagtctatgtattgatttgtcattccagttctgatttgttctcagcattctgaagattgcccatttgctggttaaatcagtatttctccgggttggaatgcttgatcctttagtggcttactactagaacttgtagtcaataagtagctataatgtggagtagcagtatcttgcagaatgcttttattaatttctacatttagctttatctatctgtgtgctttgccatgagtggagtttcaggttccttcatctctagttataagctagagtagcttgactgcttatggacaaaattatctagttgtacctctattctacagatcatacattcgtgtttgatggtagtatttatgctggatattgtacctctattctggaatgttctatatttggtggttgtattgacatatggtattatcaacattcatggtttgaaacagatgcaacccctgaaatatgcagtcatagttggcttgatgctgtagctgcttctaacattatgttcaaactgtagtgcaagtgtttatatagctggaatgctacatccttcaagttgaatgggatgacattccttttcagagatgatacccaagcaaggttatgaaatcaggcatctgaaaaaaaatgtggcagtgattttacatgacgagctggtaaaaagttgcaatattggggtgcagacagaatgcaagataccagcttgagcgtttcattgtctgaagggtcttgtgctgtgctacaagatagtgtggcctctggcgttggaagcgaaggggaccggggcatcttgtggctggtgtgtatcatcttcctaccatcctaggacatctaattagtttgattagtttcttccccgttctagtggactcggttgctgcttttggctttcaccgaatcctctccaaaggtggcgctggtgctactgttccttatggtgatgattttacttctgaccatgattgttacagcggtaaggcggtcttaggatcttttaacctttaagcatggagacgactttatatacatgtaagtaaggtgaataataacaaaaaaaaaatgcatagctaagtagatagaccatatatatatcatagaacatacaagccttaatgaatagcataatttataaaatagtataattgatagttcataaaactaacaaacagtagttcataaaactaacaagtccaaaatatatagttcataattttgtaaactaacaagtccataaaagaacacaaggcaacattaaatttagattctcaacacttagggcctgtttggtttgtggctaaatgtgtcatactttgtctaatgttagttgttcgaattgaataactaatcttaggcagaaaagttaggcaaaatgtggtaactgaggtagtgaaccaaacatgtctttagatagatctgggccgcctctcttggacagctgcccctctagggctgctgccagcctaccacccatgtgccgcgtcgccgcaacaaagtgcacatatcttctccctcctcttttatgcatccatgacagggacctcacgcgctcgtgtcaaagaggaggccatggccttccgcaagaagatggcatgcttgttacggctcaaggtgcagacaaggaggctgtcaacgcacacactcgcgcccaagtaggatggcaacgcgcaatcccccgtcggggaatacctccccgtccccgcgacgattttttttccgtagggattcccacgaatacttgtggggaacatttcttctctatccctgtttttcgcgggataaatctccaaaagtgatccctatctctgtttaaattataattaaaatatgcgttatttattattaatattaaacattatcacttatacacattatcagatgtaagaaatcattatgcacacatcaaaataaatatatttgtacaattagtg

SEQ ID NO: 221612 - DNA, 3523 bp, Zea Mays
ccggaacaaaaatatcccacccaaacaactccaccctaccgcaccccaaattcgcaatccctctccacctctcctcccaccgcagcagcaggcaagcgcgaggcggaggcggagagatggagtcggaccagggcaagctcttcatcggcggcatctcctgggaaacaacggaggagaagctgagcgagcacttctccgcctacggagaggttacgcaggccgccgtcatgcgcgacaagacgacgggccgcccccgaggcttcgggtttgtcgtcttcgccgaccccgccgtcgtcgaccgagcgctgcaggacccccacaccctcgacggccgcacggtcgatgtgaagcgggcactctcgcgggaggagcagcaggcctccaaggccgcaaaccctagcggtgggaggaacactggcggaggaaatggcggcggcgatgcaaatggtgctcggacgaagaaaatattcgtgggcgggctgccctctactctgactgaggatgggtttcggcagtatttccagaccttcggcatcgtcactgatgttgttgtcatgtatgaccagaacacgcagcgcccccgtggcttcggattcatcacctttgactcggaggacgcggttgaccacgtgctgcagaagaccttccatgatcttggtgggaagctggttgaggtgaagcgtgcattgccccgtgaggcgaaccctggtggctctggtagtgggcgttctggggtgagtgggggttaccagagcaacaatggccataacaccagctctggtagctatgatggtagaagtgatggtggcaggtacgggcaggcacagcagggtagtggtgtctatcctggctatggtgctggggcagctggatatggatatggtgctaaccctgcaattggatatggaaattatggggctggaggatatggaggtgctcctgctgcttatggtggacattatggaaacccaggtgcagctggttctggttaccaaggtggacccccaggctcaaatagaggaccttggggcagtcaagctccatctgcatatggaactggagggtatggtggcagtgctggctatagtgcttggaacaactcttctggtggtggcaatgctcccactagtcaagcccctggcggacctgcgggctatggaagccagggttttgggtatggtggatatggaggtgatccatcgtatggtagtcatgggggatatggagcttatggagcgcgaagtgatggtgctggcaatcctgctactggtggagcatctggatatggtgcagggtatggaagtgggggtgccaactctggctattcaagtgcttggagtgatccttcacaaggtggtggatttggtggttcagtcaatggaggttctgaagggcaatcaaactatggcactggctatggcagtgtgcagcccagggttgctcagtaaagaaggcattttgagtgtctgaaatgaaccagcacatctgggcagtctatgtattgatttgtcattccagttctgatttgttctcagcattctgaagattgcccatttgctggttaaatcagtatttctccgggttggaatgcttgatcctttagtggcttactactagaacttgtagtcaataagtagctataatgtggagtagcagtatcttgcagaatgcttttattaatttctacatttagctttatctatctgtgtgctttgccatgagtggagtttcaggttccttcatctctagttataagctagagtagcttgactgcttatggacaaaattatctagttgtacctctattctacagatcatacattcgtgtttgatggtagtatttatgctggatattgtacctctattctggaatgttctatatttggtggttgtattgacatatggtattatcaacattcatggtttgaaacagatgcaacccctgaaatatgcagtcatagttggcttgatgctgtagctgcttctaacattatgttcaaactgtagtgcaagtgtttatatagctggaatgctacatccttcaagtatgtcatcaagctatgaattccatccatttggccctagaatttgatattttccaagcagcagtaagcttattagcagcaagattgtagcactaagtttctgaggttgaatgggatgacattccttttcagagatgatacccaagcaaggttatgaaatcaggcatctgaaaaaaaatgtggcagtgattttacatgacgagctggtaaaaagttgcaatattggggtgcagacagaatgcaagataccagcttgagcgtttcattgtctgaagggtcttgtgctgtgctacaagatagtgtggcctctggcgttggaagcgaaggggaccggggcatcttgtggctggtgtgtatcatcttcctaccatcctaggacatctaattagtttgattagtttcttccccgttctagtggactcggttgctgcttttggctttcaccgaatcctctccaaaggtggcgctggtgctactgttccttatggtgatgattttacttctgaccatgattgttacagcggtaaggcggtcttaggatcttttaacctttaagcatggagacgactttatatacatgtaagtaaggtgaataataacaaaaaaaaaatgcatagctaagtagatagaccatatatatatcatagaacatacaagccttaatgaatagcataatttataaaatagtataattgatagttcataaaactaacaaacagtagttcataaaactaacaagtccaaaatatatagttcataattttgtaaactaacaagtccataaaagaacacaaggcaacattaaatttagattctcaacacttagggcctgtttggtttgtggctaaatgtgtcatactttgtctaatgttagttgttcgaattgaataactaatcttaggcagaaaagttaggcaaaatgtggtaactgaggtagtgaaccaaacatgtctttagatagatctgggccgcctctcttggacagctgcccctctagggctgctgccagcctaccacccatgtgccgcgtcgccgcaacaaagtgcacatatcttctccctcctcttttatgcatccatgacagggacctcacgcgctcgtgtcaaagaggaggccatggccttccgcaagaagatggcatgcttgttacggctcaaggtgcagacaaggaggctgtcaacgcacacactcgcgcccaagtaggatggcaacgcgcaatcccccgtcggggaatacctccccgtccccgcgacgattttttttccgtagggattcccacgaatacttgtggggaacatttcttctctatccctgtttttcgcgggataaatctccaaaagtgatccctatctctgtttaaattataattaaaatatgcgttatttattattaatattaaacattatcacttatacacattatcagatgtaagaaatcattatgcacacatcaaaataaatatatttgtacaattagtg

SEQ ID NO: 221613 - DNA, 3922 bp, Zea Mays
ccggaacaaaaatatcccacccaaacaactccaccctaccgcaccccaaattcgcaatccctctccacctctcctcccaccgcagcagcaggcaagcgcgaggcggaggcggagagatggagtcggaccagggcaagctcttcatcggcggcatctcctgggaaacaacggaggagaagctgagcgagcacttctccgcctacggagaggttacgcaggccgccgtcatgcgcgacaagacgacgggccgcccccgaggcttcgggtttgtcgtcttcgccgaccccgccgtcgtcgaccgagcgctgcaggacccccacaccctcgacggccgcacggtcgatgtgaagcgggcactctcgcgggaggagcagcaggcctccaaggccgcaaaccctagcggtgggaggaacactggcggaggaaatggcggcggcgatgcaaatggtgctcggacgaagaaaatattcgtgggcgggctgccctctactctgactgaggatgggtttcggcagtatttccagaccttcggcatcgtcactgatgttgttgtcatgtatgaccagaacacgcagcgcccccgtggcttcggattcatcacctttgactcggaggacgcggttgaccacgtgctgcagaagaccttccatgatcttggtgggaagctggttgaggtgaagcgtgcattgccccgtgaggcgaaccctggtggctctggtagtgggcgttctggggtgagtgggggttaccagagcaacaatggccataacaccagctctggtagctatgatggtagaagtgatggtggcaggtacgggcaggcacagcagggtagtggtgtctatcctggctatggtgctggggcagctggatatggatatggtgctaaccctgcaattggatatggaaattatggggctggaggatatggaggtgctcctgctgcttatggtggacattatggaaacccaggtgcagctggttctggttaccaaggtggacccccaggctcaaatagaggaccttggggcagtcaagctccatctgcatatggaactggagggtatggtggcagtgctggctatagtgcttggaacaactcttctggtggtggcaatgctcccactagtcaagcccctggcggacctgcgggctatggaagccagggttttgggtatggtggatatggaggtgatccatcgtatggtagtcatgggggatatggagcttatggagcgcgaagtgatggtgctggcaatcctgctactggtggagcatctggatatggtgcagggtatggaagtgggggtgccaactctggctattcaagtgcttggagtgatccttcacaaggtggtggatttggtggttcagtcaatggaggttctgaagggcaatcaaactatggcactggctatggcagtgtgcagcccagggttgctcagtaaagaaggcattttgagtgtctgaaatgaaccagcacatctgggcagtctatgtattgatttgtcattccagttctgatttgttctcagcattctgaagattgcccatttgctggttaaatcagtatttctccgggttggaatgcttgatcctttagtggcttactactagaacttgtagtcaataagtagctataatgtggagtagcagtatcttgcagaatgcttttattaatttctacatttagctttatctatctgtgtgctttgccatgagtggagtttcaggttccttcatctctagttataagctagagtagcttgactgcttatggacaaaattatctagttgtacctctattctacagatcatacattcgtgtttgatggtagtatttatgctggatattgtacctctattctggaatgttctatatttggtggttgtattgacatatggtattatcaacattcatggtttgaaacagatgcaacccctgaaatatgcagtcatagttggcttgatgctgtagctgcttctaacattatgttcaaactgtagtgcaagtgtttatatagctggaatgctacatccttcaagtatgtcatcaagctatgaattccatccatttggccctagaatttgatattttccaagcagcagttgaatgggatgacattccttttcagagatgatacccaagcaaggttatgaaatcaggcatctgaaaaaaaatgtggcagtgattttacatgacgagctggtaaaaagttgcaatattggggtgcagacagaatgcaagataccagcttgagcgtttcattgtctgaagggtcttgtgctgtgctacaagatagtgacgaagtgcaacatgctgactcgagcagtcgagctgctgtagctgggtcttgggaagggtctcggctgtgtgtctgcatactgatgatcggtgatgcttacgatataggaatgccccaatgtataggtgaacttttagtgctatagaggcttccttttgttgtcatgatgtctatgctctttaagtagctgcataacaccatgtatactcagtatagttctacacctgggtatggaagccattcgtgtttttgtttagtatgaatgccatgtaattgtacattaggttgacaattcagttgttgctaaatcacgctccactagtgaattgtgtaaatggaaagaaatgaaatgcatatatataaaactctgatcctttactgctctgatttgacactgatgggttatttgacttgttccttattactctctccggctccagtggcctctggcgttggaagcgaaggggaccggggcatcttgtggctggtgtgtatcatcttcctaccatcctaggacatctaattagtttgattagtttcttccccgttctagtggactcggttgctgcttttggctttcaccgaatcctctccaaaggtggcgctggtgctactgttccttatggtgatgattttacttctgaccatgattgttacagcggtaaggcggtcttaggatcttttaacctttaagcatggagacgactttatatacatgtaagtaaggtgaataataacaaaaaaaaaatgcatagctaagtagatagaccatatatatatcatagaacatacaagccttaatgaatagcataatttataaaatagtataattgatagttcataaaactaacaaacagtagttcataaaactaacaagtccaaaatatatagttcataattttgtaaactaacaagtccataaaagaacacaaggcaacattaaatttagattctcaacacttagggcctgtttggtttgtggctaaatgtgtcatactttgtctaatgttagttgttcgaattgaataactaatcttaggcagaaaagttaggcaaaatgtggtaactgaggtagtgaaccaaacatgtctttagatagatctgggccgcctctcttggacagctgcccctctagggctgctgccagcctaccacccatgtgccgcgtcgccgcaacaaagtgcacatatcttctccctcctcttttatgcatccatgacagggacctcacgcgctcgtgtcaaagaggaggccatggccttccgcaagaagatggcatgcttgttacggctcaaggtgcagacaaggaggctgtcaacgcacacactcgcgcccaagtaggatggcaacgcgcaatcccccgtcggggaatacctccccgtccccgcgacgattttttttccgtagggattcccacgaatacttgtggggaacatttcttctctatccctgtttttcgcgggataaatctccaaaagtgatccctatctctgtttaaattataattaaaatatgcgttatttattattaatattaaacattatcacttatacacattatcagatgtaagaaatcattatgcacacatcaaaataaatatatttgtacaattagtg

SEQ ID NO: 221614 - DNA, 961 bp, Zea Mays
tgcagggctgtctgtgctgggcgtgggatatggcaagtcacgagtggagacagtcaatatcttgttgatctcaacaatcagaaatgtggatgctataggtgggatgttactggagtgccatgcttacatgccgtggctgctatccacgagttcaaacataagccagaaaattatatgtcattattcttcactagggagaaatatgtagccacatatgagggtatgattatgcctgtgccagacaaaaggcaatggttaagcacagacttgccagatgtggatcctccattgtatcatgcccagcctggaagaccaaagaaaaagcgagttagagcgaaaggagaacctcatgttgaggcaagagcctcaaaaagggctgcagtgaaatgctccaactgccacacttatggtcacaatgttaagggatgtggagtgccacttagagctgattgggagcctaggaagggagctaagtacacgagggcctcaattggtgttcctacttcatctcagccagacccgccgacatttgaaggaggatcaagaattaggccacaaaagttgtcaccgatcaggaaaaggaatgcttgaagtattatgtgtcgtgttgttagctgaattttaggcctcaattggtgttcctatttcatctcactactggaatgcttgctgttttggtggtttcagtaattaggccacaaggtccgatttgtacatgtgaccagttttattggtttggagccgggagcagggtttttggctgggagacccgactagtttttttttcagagccgcccagtctttttggtttggagccgctcaaatcagccaagcccaaagtctctgaattgagccattaattacagattgaggacctccctaatttgtaggggggagtttgacagaataaaagttgtaagtgggtatttgaaaacatcccaaacttgcaagtgggtttttg

SEQ ID NO: 221615 - DNA, 2848 bp, Zea Mays
  misc_feature (1)..(2): n is a, c, g, or t
nntcttgaaacttggagacttcgtacacccaatgaatgggatcatatgactgtttggtatgatctgctccaatggaggaatgagatgtacaattcagtaatagatgcattcaaggactttggtcaaacaaatcctcaacttcatcatcttggctaccgagacaaggcttggaatgtgaataagctcgctcacatagctcgcaagcaaggtcttcctgaagtttgtgtaactatacttgataagatgtatggtcatgctactatggaagttcaggaagcatttgtgaagatatgtgaacaagctaaggcttacttagaaatgaaaggagaactagtcagtggtcttaacttaatcaataataccaatttagaatttttccctgtgaagaacaaagcagaaatatttcgtctgagaggtgattttctgttaaaaatgaacgaatgcgagactgcaaatcagtcttattcaaatgccataactctttttaagcatttgcccaaaggatggattagctggggaaattactgtgatatggtttttaaagaaacaaaagatgaggtttggcttgagtatgcagtcagttgttttttccagggcatcaaatatggagtttcaaactcaaggagccatctagctcgaattctctaccttcttagctttgatggacaaaatgaacctgttggaagagctttggataaatatcttgagcagctgcctcactgggtttggctttcatggatacctcagttgttgttgtcgttacagagaagtgaagcccaacactgtaaattggttttgatgaagatagctcaagtttacccgcaggcattgtattattggcttcgtacatacttgatggaacgccgtgatgttgctactaaaactgaaataggaagaaacatgttggctcagcagcgcatgcagcaagctatgatggcaaacaatgcggccaataacttacctgacggaagtgcaagggcatctaatcatgcaggtagtaacatgacttctgacaaccagtctcatcaagcctcccaatcagttggtgctgcaggttctcatgatggtggtaatgtccaaggacaagatccggaacgatctacccctgaaggtggcacaaataccagccatgatcaaggtcaacagagttctacaggtgctgagggctcacaagttccgcttagacgtaatagcggacatgggtgggtaacttctgcagcaagtgcatttgatgctgcaaaagacataatggaagctcttagaagcaaacatactaatctagccaatgagcttgagcttttactgtcagaaattggatcacggtttgttactctgcctgaggaaagacttctagctgtggttaatgctctgcttcatcgctgctacaaatatccaactgcaaccactggcgaggttccacagtctctcaagaaggaactctctggtgtatgtagagcttgcttctcacaagatgctgttaacaagcatgttgattttgtgaaggagtacaagcaagattttgaacgtgatcttgacccagagagcgctactacttttcctgcaacccttgctgaacttacggagagattgaaacactggaagaacattcttcagagtaatgtagaggatcggttcccagcagtattaaaactggaggaagaaagtaaaacacttcgggattttcatgttgttgatattgaactcccagggcagtacttcacagatcaggaaatcgcaccggaccacactgttaagttggacagagttggacctgacattccaattgtccggaggcatggcagtagctttcgacggttgacactcattggttctgatggttcacagcgccattttattgttcagacatcactgactccgaatgctcggagtgatgaaaggatgctgcagctattccgtgtgctaaataaaatgtttgacaaacacaaagaatctaggcggcggcatctggctatccatactccaataattattcctgtttggtctcaggttcggatggttgaggatgatttaatgtatagcacttttcttgaggtgtatgaaattaattgtgcacggcataatagagaagctgactcgcctattacaattttcaaagagcagcttaatcaagccgtttcagggcagctctctcctgaagcaattgtggagctacgtctgcaagcatacaatgagattacaaaaaatattgttaatgataatattttctcccaatatatgcacaagattctgccaactggcaactacctgtggaccttcaagaaacaatttgcaatccaagtggctctctcctgcttcatgtcgtatatgctgcagattggcggcagggctcctaacaaaattctatttgctaaaaatactgggaagatcttccagactgacttccatccagcttatgatccaaatgggatgattgagttcaacgagcttgttccatttaggctgacacgcaacttgcaagctttcttctcgaattttggtgttgaaggtctcattgtgtctgccatgtgctctgctgcccagtcagtggtttctcctaaaccagcacatttggcatcatttggctatgtttttccgagatgaactgttatcttggtcgtggaggcggcctctgggcattccatcagtccctgtcgctgctggaatgatcaacccatcagatttccaacagaaggtggtaaacaatgtggagcatgtcatcagtcgtatcaagtcaatatcgccacattgtctggctgaggaggaagtgtttcttggtgggattaatattgtatcattatggtgcttctgattttattgtaaaaaatgttttgtgggagtatcagtaagg

SEQ ID NO: 221616 - DNA, 2739 bp, Zea Mays
  misc_feature (1)..(2): n is a, c, g, or t
nntcttgaaacttggagacttcgtacacccaatgaatgggatcatatgactgtttggtatgatctgctccaatggaggaatgagatgtacaattcagtaatagatgcattcaaggactttggtcaaacaaatcctcaacttcatcatcttggctaccgagacaaggcttggaatgtgaataagctcgctcacatagctcgcaagcaaggtcttcctgaagtttgtgtaactatacttgataagatgtatggtcatgctactatggaagttcaggaagcatttgtgaagatatgtgaacaagctaaggcttacttagaaatgaaaggagaactagtcagtggtcttaacttaatcaataataccaatttagaatttttccctgtgaagaacaaagcagaaatatttcgtctgagaggtgattttctgttaaaaatgaacgaatgcgagactgcaaatcagtcttattcaaatgccataactctttttaagcatttgcccaaaggatggattagctggggaaattactgtgatatggtttttaaagaaacaaaagatgaggtttggcttgagtatgcagtcagttgttttttccagggcatcaaatatggagtttcaaactcaaggagccatctagctcgaattctctaccttcttagctttgatggacaaaatgaacctgttggaagagctttggataaatatcttgagcagctgcctcactgggtttggctttcatggatacctcagttgttgttgtcgttacagagaagtgaagcccaacactgtaaattggttttgatgaagatagctcaagtttacccgcaggcattgtattattggcttcgtacatacttgatggaacgccgtgatgttgctactaaaactgaaataggaagaaacatgttggctcagcagcgcatgcagcaagctatgatggcaaacaatgcggccaataacttacctgacggaagtgcaagggcatctaatcatgcaggtagtaacatgacttctgacaaccagtctcatcaagcctcccaatcagttggtgctgcaggttctcatgatggtggtaatgtccaaggacaagatccggaacgatctacccctgaaggtggcacaaataccagccatgatcaaggtcaacagagttctacaggtgctgagggctcacaagttccgcttagacgtaatagcggacatgggtgggtaacttctgcagcaagtgcatttgatgctgcaaaagacataatggaagctcttagaagcaaacatactaatctagccaatgagcttgagcttttactgtcagaaattggatcacggtttgttactctgcctgaggaaagacttctagctgtggttaatgctctgcttcatcgctgctacaaatatccaactgcaaccactggcgaggttccacagtctctcaagaaggaactctctggtgtatgtagagcttgcttctcacaagatgctgttaacaagcatgttgattttgtgaaggagtacaagcaagattttgaacgtgatcttgacccagagagcgctactacttttcctgcaacccttgctgaacttacggagagattgaaacactggaagaacattcttcagagtaatgtagaggatcggttcccagcagtattaaaactggaggaagaaagtaaaacacttcgggattttcatgttgttgatattgaactcccagggcagtacttcacagatcaggaaatcgcaccggaccacactgttaagttggacagagttggacctgacattccaattgtccggaggcatggcagtagctttcgacggttgacactcattggttctgatggttcacagcgccattttattgttcagacatcactgactccgaatgctcggagtgatgaaaggatgctgcagctattccgtgtgctaaataaaatgtttgacaaacacaaagaatctaggcggcggcatctggctatccatactccaataattattcctgtttggtctcagcttaatcaagccgtttcagggcagctctctcctgaagcaattgtggagctacgtctgcaagcatacaatgagattacaaaaaatattgttaatgataatattttctcccaatatatgcacaagattctgccaactggcaactacctgtggaccttcaagaaacaatttgcaatccaagtggctctctcctgcttcatgtcgtatatgctgcagattggcggcagggctcctaacaaaattctatttgctaaaaatactgggaagatcttccagactgacttccatccagcttatgatccaaatgggatgattgagttcaacgagcttgttccatttaggctgacacgcaacttgcaagctttcttctcgaattttggtgttgaaggtctcattgtgtctgccatgtgctctgctgcccagtcagtggtttctcctaaacaaagccagcacatttggcatcatttggctatgtttttccgagatgaactgttatcttggtcgtggaggcggcctctgggcattccatcagtccctgtcgctgctggaatgatcaacccatcagatttccaacagaaggtggtaaacaatgtggagcatgtcatcagtcgtatcaagtcaatatcgccacattgtctggctgaggaggaagtgtttcttggtgggattaatattgtatcattatggtgcttctgattttattgtaaaaaatgttttgtgggagtatcagtaagg

SEQ ID NO: 221617 - DNA, 2804 bp, Zea Mays
  misc_feature (1)..(2): n is a, c, g, or t
nntcttgaaacttggagacttcgtacacccaatgaatgggatcatatgactgtttggtatgatctgctccaatggaggaatgagatgtacaattcagtaatagatgcattcaaggactttggtcaaacaaatcctcaacttcatcatcttggctaccgagacaaggcttggaatgtgaataagctcgctcacatagctcgcaagcaaggtcttcctgaagtttgtgtaactatacttgataagatgtatggtcatgctactatggaagttcaggaagcatttgtgaagatatgtgaacaagctaaggcttacttagaaatgaaaggagaactagtcagtggtcttaacttaatcaataataccaatttagaatttttccctgtgaagaacaaagcagaaatatttcgtctgagaggtgattttctgttaaaaatgaacgaatgcgagactgcaaatcagtcttattcaaatgccataactctttttaagcatttgcccaaaggatggattagctggggaaattactgtgatatggtttttaaagaaacaaaagatgaggtttggcttgagtatgcagtcagttgttttttccagggcatcaaatatggagtttcaaactcaaggagccatctagctcgaattctctaccttcttagctttgatggacaaaatgaacctgttggaagagctttggataaatatcttgagcagctgcctcactgggtttggctttcatggatacctcagttgttgttgtcgttacagagaagtgaagcccaacactgtaaattggttttgatgaagatagctcaagtttacccgcaggcattgtattattggcttcgtacatacttgatggaacgccgtgatgttgctactaaaactgaaataggaagaaacatgttggctcagcagcgcatgcagcaagctatgatggcaaacaatgcggccaataacttacctgacggaagtgcaagggcatctaatcatgcaggtagtaacatgacttctgacaaccagtctcatcaagcctcccaatcagttggtgctgcaggttctcatgatggtggtaatgtccaaggacaagatccggaacgatctacccctgaaggtggcacaaataccagccatgatcaaggtcaacagagttctacaggtgctgagggctcacaagttccgcttagacgtaatagcggacatgggtgggtaacttctgcagcaagtgcatttgatgctgcaaaagacataatggaagctcttagaagcaaacatactaatctagccaatgagcttgagcttttactgtcagaaattggatcacggtttgttactctgcctgaggaaagacttctagctgtggttaatgctctgcttcatcgctgctacaaatatccaactgcaaccactggcgaggttccacagtctctcaagaaggaactctctggtgtatgtagagcttgcttctcacaagatgctgttaacaagcatgttgattttgtgaaggagtacaagcaagattttgaacgtgatcttgacccagagagcgctactacttttcctgcaacccttgctgaacttacggagagattgaaacactggaagaacattcttcagagtaatgtagaggatcggttcccagcagtattaaaactggaggaagaaagtaaaacacttcgggattttcatgttgttgatattgaactcccagggcagtacttcacagatcaggaaatcgcaccggaccacactgttaagttggacagagttggacctgacattccaattgtccggaggcatggcagtagctttcgacggttgacactcattggttctgatggttcacagcgccattttattgttcagacatcactgactccgaatgctcggagtgatgaaaggatgctgcagctattccgtgtgctaaataaaatgtttgacaaacacaaagaatctaggcggcggcatctggctatccatactccaataattattcctgtttggtctcaggttcggatggttgaggatgatttaatgtatagcacttttcttgaggtgtatgaaattaattgtgcacggcataatagagaagctgactcgcctattacaattttcaaagagcagcttaatcaagccgtttcagggcagctctctcctgaagcaattgtggagctacgtctgcaagcatacaatgagattacaaaaaatattgttaatgataatattttctcccaatatatgcacaagattctgccaactggcaactacctgtggaccttcaagaaacaatttgcaatccaagtggctctctcctgcttcatgtcgtatatgctgcagattggcggcagggctcctaacaaaattctatttgctaaaaatactgggaagatcttccagactgacttccatccaggctgacacgcaacttgcaagctttcttctcgaattttggtgttgaaggtctcattgtgtctgccatgtgctctgctgcccagtcagtggtttctcctaaacaaagccagcacatttggcatcatttggctatgtttttccgagatgaactgttatcttggtcgtggaggcggcctctgggcattccatcagtccctgtcgctgctggaatgatcaacccatcagatttccaacagaaggtggtaaacaatgtggagcatgtcatcagtcgtatcaagtcaatatcgccacattgtctggctgaggaggaagtgtttcttggtgggattaatattgtatcattatggtgcttctgattttattgtaaaaaatgttttgtgggagtatcagtaagg

SEQ ID NO: 221618 - DNA, 2701 bp, Zea Mays
cttgaaacttggagacttcgtacacccaatgaatgggatcatatgactgtttggtatgatctgctccaatggaggaatgagatgtacaattcagtaatagatgcattcaaggactttggtcaaacaaatcctcaacttcatcatcttggctaccgagacaaggcttggaatgtgaataagctcgctcacatagctcgcaagcaaggtcttcctgaagtttgtgtaactatacttgataagatgtatggtcatgctactatggaagttcaggaagcatttgtgaagatatgtgaacaagctaaggcttacttagaaatgaaaggagaactagtcagtggtcttaacttaatcaataataccaatttagaatttttccctgtgaagaacaaagcagaaatatttcgtctgagaggtgattttctgttaaaaatgaacgaatgcgagactgcaaatcagtcttattcaaatgccataactctttttaagcatttgcccaaaggatggattagctggggaaattactgtgatatggtttttaaagaaacaaaagatgaggtttggcttgagtatgcagtcagttgttttttccagggcatcaaatatggagtttcaaactcaaggagccatctagctcgaattctctaccttcttagctttgatggacaaaatgaacctgttggaagagctttggataaatatcttgagcagctgcctcactgggtttggctttcatggatacctcagttgttgttgtcgttacagagaagtgaagcccaacactgtaaattggttttgatgaagatagctcaagtttacccgcaggcattgtattattggcttcgtacatacttgatggaacgccgtgatgttgctactaaaactgaaataggaagaaacatgttggctcagcagcgcatgcagcaagctatgatggcaaacaatgcggccaataacttacctgacggaagtgcaagggcatctaatcatgcaggtagtaacatgacttctgacaaccagtctcatcaagcctcccaatcagttggtgctgcaggttctcatgatggtggtaatgtccaaggacaagatccggaacgatctacccctgaaggtggcacaaataccagccatgatcaaggtcaacagagttctacaggtgctgagggctcacaagttccgcttagacgtaatagcggacatgggtgggtaacttctgcagcaagtgcatttgatgctgcaaaagacataatggaagctcttagaagcaaacatactaatctagccaatgagcttgagcttttactgtcagaaattggatcacggtttgttactctgcctgaggaaagacttctagctgtggttaatgctctgcttcatcgctgctacaaatatccaactgcaaccactggcgaggttccacagtctctcaagaaggaactctctggtgtatgtagagcttgcttctcacaagatgctgttaacaagcatgttgattttgtgaaggagtacaagcaagattttgaacgtgatcttgacccagagagcgctactacttttcctgcaacccttgctgaacttacggagagattgaaacactggaagaacattcttcagagtaatgtagaggatcggttcccagcagtattaaaactggaggaagaaagtaaaacacttcgggattttcatgttgttgatattgaactcccagggcagtacttcacagatcaggaaatcgcaccggaccacactgttaagttggacagagttggacctgacattccaattgtccggaggcatggcagtagctttcgacggttgacactcattggttctgatggttcacagcgccattttattgttcagacatcactgactccgaatgctcggagtgatgaaaggatgctgcagctattccgtgtgctaaataaaatgtttgacaaacacaaagaatctaggcggcggcatctggctatccatactccaataattattcctgtttggtctcaggttcggatggttgaggatgatttaatgtatagcacttttcttgaggtgtatgaaattaattgtgcacggcataatagagaagctgactcgcctattacaattttcaaagagcagcttaatcaagccgtttcagggcagctctctcctgaagcaattgtggagctacgtctgcaagcatacaatgagattacaaaaaatattgttaatgataatattttctcccaatatatgcacaagattctgccaactggcaactacctgtggaccttcaagaaacaatttgcaatccaagtggctctctcctgcttcatgtcgtatatgctgcagattggcggcagggctcctaacaaaattctatttgctaaaaatactgggaagatcttccagactgacttccatccagcaaagccagcacatttggcatcatttggctatgtttttccgagatgaactgttatcttggtcgtggaggcggcctctgggcattccatcagtccctgtcgctgctggaatgatcaacccatcagatttccaacagaaggtggtaaacaatgtggagcatgtcatcagtcgtatcaagtcaatatcgccacattgtctggctgaggaggaagtgtttcttggtgggattaatattgtatcattatggtgcttctgattttattgtaaaaaatgttttgtgggagtatcagtaagg

SEQ ID NO: 221619 - DNA, 2790 bp, Zea Mays
cttgaaacttggagacttcgtacacccaatgaatgggatcatatgactgtttggtatgatctgctccaatggaggaatgagatgtacaattcagtaatagatgcattcaaggactttggtcaaacaaatcctcaacttcatcatcttggctaccgagacaaggcttggaatgtgaataagctcgctcacatagctcgcaagcaaggtcttcctgaagtttgtgtaactatacttgataagatgtatggtcatgctactatggaagttcaggaagcatttgtgaagatatgtgaacaagctaaggcttacttagaaatgaaaggagaactagtcagtggtcttaacttaatcaataataccaatttagaatttttccctgtgaagaacaaagcagaaatatttcgtctgagaggtgattttctgttaaaaatgaacgaatgcgagactgcaaatcagtcttattcaaatgccataactctttttaagcatttgcccaaaggatggattagctggggaaattactgtgatatggtttttaaagaaacaaaagatgaggtttggcttgagtatgcagtcagttgttttttccagggcatcaaatatggagtttcaaactcaaggagccatctagctcgaattctctaccttcttagctttgatggacaaaatgaacctgttggaagagctttggataaatatcttgagcagctgcctcactgggtttggctttcatggatacctcagttgttgttgtcgttacagagaagtgaagcccaacactgtaaattggttttgatgaagatagctcaagtttacccgcaggcattgtattattggcttcgtacatacttgatggaacgccgtgatgttgctactaaaactgaaataggaagaaacatgttggctcagcagcgcatgcagcaagctatgatggcaaacaatgcggccaataacttacctgacggaagtgcaagggcatctaatcatgcaggttctcatgatggtggtaatgtccaaggacaagatccggaacgatctacccctgaaggtggcacaaataccagccatgatcaaggtcaacagagttctacaggtgctgagggctcacaagttccgcttagacgtaatagcggacatgggtgggtaacttctgcagcaagtgcatttgatgctgcaaaagacataatggaagctcttagaagcaaacatactaatctagccaatgagcttgagcttttactgtcagaaattggatcacggtttgttactctgcctgaggaaagacttctagctgtggttaatgctctgcttcatcgctgctacaaatatccaactgcaaccactggcgaggttccacagtctctcaagaaggaactctctggtgtatgtagagcttgcttctcacaagatgctgttaacaagcatgttgattttgtgaaggagtacaagcaagattttgaacgtgatcttgacccagagagcgctactacttttcctgcaacccttgctgaacttacggagagattgaaacactggaagaacattcttcagagtaatgtagaggatcggttcccagcagtattaaaactggaggaagaaagtaaaacacttcgggattttcatgttgttgatattgaactcccagggcagtacttcacagatcaggaaatcgcaccggaccacactgttaagttggacagagttggacctgacattccaattgtccggaggcatggcagtagctttcgacggttgacactcattggttctgatggttcacagcgccattttattgttcagacatcactgactccgaatgctcggagtgatgaaaggatgctgcagctattccgtgtgctaaataaaatgtttgacaaacacaaagaatctaggcggcggcatctggctatccatactccaataattattcctgtttggtctcaggttcggatggttgaggatgatttaatgtatagcacttttcttgaggtgtatgaaattaattgtgcacggcataatagagaagctgactcgcctattacaattttcaaagagcagcttaatcaagccgtttcagggcagctctctcctgaagcaattgtggagctacgtctgcaagcatacaatgagattacaaaaaatattgttaatgataatattttctcccaatatatgcacaagattctgccaactggcaactacctgtggaccttcaagaaacaatttgcaatccaagtggctctctcctgcttcatgtcgtatatgctgcagattggcggcagggctcctaacaaaattctatttgctaaaaatactgggaagatcttccagactgacttccatccagcttatgatccaaatgggatgattgagttcaacgagcttgttccatttaggctgacacgcaacttgcaagctttcttctcgaattttggtgttgaaggtctcattgtgtctgccatgtgctctgctgcccagtcagtggtttctcctaaacaaagccagcacatttggcatcatttggctatgtttttccgagatgaactgttatcttggtcgtggaggcggcctctgggcattccatcagtccctgtcgctgctggaatgatcaacccatcagatttccaacagaaggtggtaaacaatgtggagcatgtcatcagtcgtatcaagtcaatatcgccacattgtctggctgaggaggaagtgtttcttggtgggattaatattgtatcattatggtgcttctgattttattgtaaaaaatgttttgtgggagtatcagtaagg

SEQ ID NO: 221620 - DNA, 2800 bp, Zea Mays
tgaaacttggagacttcgtacacccaatgaatgggatcatatgactgtttggtatgatctgctccaatggaggaatgagatgtacaattcagtaatagatgcattcaaggactttggtcaaacaaatcctcaacttcatcatcttggctaccgagacaaggcttggaatgtgaataagctcgctcacatagctcgcaagcaaggtcttcctgaagtttgtgtaactatacttgataagatgtatggtcatgctactatggaagttcaggaagcatttgtgaagatatgtgaacaagctaaggcttacttagaaatgaaaggagaactagtcagtggtcttaacttaatcaataataccaatttagaatttttccctgtgaagaacaaagcagaaatatttcgtctgagaggtgattttctgttaaaaatgaacgaatgcgagactgcaaatcagtcttattcaaatgccataactctttttaagcatttgcccaaaggatggattagctggggaaattactgtgatatggtttttaaagaaacaaaagatgaggtttggcttgagtatgcagtcagttgttttttccagggcatcaaatatggagtttcaaactcaaggagccatctagctcgaattctctaccttcttagctttgatggacaaaatgaacctgttggaagagctttggataaatatcttgagcagctgcctcactgggtttggctttcatggatacctcagttgttgttgtcgttacagagaagtgaagcccaacactgtaaattggttttgatgaagatagctcaagtttacccgcaggcattgtattattggcttcgtacatacttgatggaacgccgtgatgttgctactaaaactgaaataggaagaaacatgttggctcagcagcgcatgcagcaagctatgatggcaaacaatgcggccaataacttacctgacggaagtgcaagggcatctaatcatgcagttggtgctgcaggttctcatgatggtggtaatgtccaaggacaagatccggaacgatctacccctgaaggtggcacaaataccagccatgatcaaggtcaacagagttctacaggtgctgagggctcacaagttccgcttagacgtaatagcggacatgggtgggtaacttctgcagcaagtgcatttgatgctgcaaaagacataatggaagctcttagaagcaaacatactaatctagccaatgagcttgagcttttactgtcagaaattggatcacggtttgttactctgcctgaggaaagacttctagctgtggttaatgctctgcttcatcgctgctacaaatatccaactgcaaccactggcgaggttccacagtctctcaagaaggaactctctggtgtatgtagagcttgcttctcacaagatgctgttaacaagcatgttgattttgtgaaggagtacaagcaagattttgaacgtgatcttgacccagagagcgctactacttttcctgcaacccttgctgaacttacggagagattgaaacactggaagaacattcttcagagtaatgtagaggatcggttcccagcagtattaaaactggaggaagaaagtaaaacacttcgggattttcatgttgttgatattgaactcccagggcagtacttcacagatcaggaaatcgcaccggaccacactgttaagttggacagagttggacctgacattccaattgtccggaggcatggcagtagctttcgacggttgacactcattggttctgatggttcacagcgccattttattgttcagacatcactgactccgaatgctcggagtgatgaaaggatgctgcagctattccgtgtgctaaataaaatgtttgacaaacacaaagaatctaggcggcggcatctggctatccatactccaataattattcctgtttggtctcaggttcggatggttgaggatgatttaatgtatagcacttttcttgaggtgtatgaaattaattgtgcacggcataatagagaagctgactcgcctattacaattttcaaagagcagcttaatcaagccgtttcagggcagctctctcctgaagcaattgtggagctacgtctgcaagcatacaatgagattacaaaaaatattgttaatgataatattttctcccaatatatgcacaagattctgccaactggcaactacctgtggaccttcaagaaacaatttgcaatccaagtggctctctcctgcttcatgtcgtatatgctgcagattggcggcagggctcctaacaaaattctatttgctaaaaatactgggaagatcttccagactgacttccatccagcttatgatccaaatgggatgattgagttcaacgagcttgttccatttaggctgacacgcaacttgcaagctttcttctcgaattttggtgttgaaggtctcattgtgtctgccatgtgctctgctgcccagtcagtggtttctcctaaacaaagccagcacatttggcatcatttggctatgtttttccgagatgaactgttatcttggtcgtggaggcggcctctgggcattccatcagtccctgtcgctgctggaatgatcaacccatcagatttccaacagaaggtggtaaacaatgtggagcatgtcatcagtcgtatcaagtcaatatcgccacattgtctggctgaggaggaagtgtttcttggtgggattaatattgtatcattatggtgcttctgattttattgtaaaaaatgttttgtgggagtatcagtaagg

SEQ ID NO: 221621 - DNA, 1092 bp, Zea Mays
ggcgagtccacgcgcgcagaggagggcgaatctgcgtgaggagaggagggagaaggcgagttggcgcgcgcaagctgttcctcatcggggtgggtcagcgtgcggagaagggagaaggcgagtcggtgcatgcaagctgttcatcatcggattgctccgtcgtggtgccgacgacaacgtgcaggtgatcacgagcgtggggttgctgcagaccacctgccgctttgagtccgaccacctcgacctacagctgaaaggttattaccttaccatgttgttgccgactatgaggctgaagaagatgacaggatccttgatagcgacacaacaggccagatcccttctcgcctgcagcaatgggaccataatattctggtgaagattgctgagttcacgacaacttttgacaagcaagtattggcatataacataatgaccaagaaaagggccatcggtgagttcaggtcggaggagcggctcatgctggagcaagccttattgcaggaggaaaagcaagctatgctgggactgagggcagagatggagtcgagagagaaagctggtcgcgaggctgccgaagtgaagatgcgtttggcaatggagcatgctcgtgctgaggcacaagctcactctgagatgatgaatcatggtcctataagggccagtgctgttgcttcgcaaggggaggatggtccgagtcatgacatggtgcaagaacatggcgaagatgggtggggaaattctcagagggatgatgaagatccatcggaggatttcctcaacgatgagaacgaacctgagaatgggaactcagatgggcaggaggactggcgcagatctggggagtttgatctcaactctaggtaaggcagttggatttccacatgaaggtttctaggtaggctacgacatgctggtattgtatctactattctattgttgtgttcggtgaagatgtctttgtggctgtaaacatggcattcgaacaattcagtttctttgtaatttgactagtaatatttacttgagcactcaatatgtgccatttccaacttggagaaaaaaaattacaataatccacctgcattgcac

SEQ ID NO: 221622 - DNA, 1036 bp, Zea Mays
aaggcgagtcggtgcatgcaagctgttcatcatcggattgctccgtcgtggtgccgacgacaacgtgcaggtgatcacgagcgtggggttgctgcagaccacctgccgctttgagtccgaccacctcgacctacagctgaaaggaagaagcaacttagctagagcattgagatattgtagcaactactgaatttaataaaggttattaccttaccatgttgttgccgactatgaggctgaagaagatgacaggatccttgatagcgacacaacaggccagatcccttctcgcctgcagcaatgggaccataatattctggtgaagattgctgagttcacgacaacttttgacaagcaagtattggcatataacataatgaccaagaaaagggccatcggtgagttcaggtcggaggagcggctcatgctggagcaagccttattgcaggaggaaaagcaagctatgctgggactgagggcagagatggagtcgagagagaaagctggtcgcgaggctgccgaagtgaagatgcgtttggcaatggagcatgctcgtgctgaggcacaagctcactctgagatgatgaatcatggtcctataagggccagtgctgttgcttcgcaaggggaggatggtccgagtcatgacatggtgcaagaacatggcgaagatgggtggggaaattctcagagggatgatgaagatccatcggaggatttcctcaacgatgagaacgaacctgagaatgggaactcagatgggcaggaggactggcgcagatctggggagtttgatctcaactctaggtaaggcagttggatttccacatgaaggtttctaggtaggctacgacatgctggtattgtatctactattctattgttgtgttcggtgaagatgtctttgtggctgtaaacatggcattcgaacaattcagtttctttgtaatttgactagtaatatttacttgagcactcaatatgtgccatttccaacttggagaaaaaaaattacaataatccacctgcattgcac

SEQ ID NO: 221623 - DNA, 2035 bp, Zea Mays
atgggcgaggtggcaccggtgattccagtcacccggaggaggacgatgtctcgcaaggcagcgggggcagtggaggcggaccgacccgccgaagatgtatctgaggagaagacatcaaagattacaatagctttgaatcaggaagctgaggcagtggcggtcgcatcaaaggaggaaaaaggctgcaactttaggtcgacagtagcagcaacattgtatattaagaaatttgatagagtacaacagttttttgagagtatattaaaaaatgaacatagctatgtgtacataaacactagccctcacataacacagacaactccttcagatttgacaaaaaatgtgaacatcttgaaccttgatttgggtcttgggctattatcaaaaccaaagcttgctgacattggttggcctaggaggaggtgccgacaatgtggtgctagacggctattggtcgccaccgacgctgcattctggaggatggtcgtccatggcgatgggagattgaatggcatcagcatcggaacgaggctgacacgagtgaacagaaggagagttgtgaaccatcttgaagtatgcctcgtcaaatgtgcactcttcattaaaatcgtcttcaggatgccattcgtaaatggtaacgactgctaccttgtttatgacaaaaatatgaatatctttataacggtgtactttaaagaatgtgcccctgttatcccggattttctcttgtttaacatagatttgattctaagttgtagaaaaactggttgcactgtacctttacgactttaccatttcttgaacattgtctacaaaacaagagagtatgagttcttgaggcttaccagcctgggtgtgatcggtgctcttgtcaagctatttcagttaccagaactgtttgatgatcaagtgtcttacatggttgttccccagggcatgagaatattgaatcatcaggtggatgatgatcgcatagtgtgcctaagccaccacctcaagaaagtagtgttgaaagaaattctggacaagaattctaggtgtgggccctgctcttcgtgctattgcttcgatgagaagatgcaccggtgttgtcagtttctttgggcggatctcattccttgtcgaacacaacaatcaagcatcatatttcttcatgatagcaaaatgtcgcaggttgcagcagccacaccacagacaacagctatcagagccgatcagaagcgccaagagcgagcgcctcatgtctttatattgctctcacaccctccgtttctcgctcccacccactgccactgtacttgtgttgtgttgtgttgtgtgctgcaagaagaagaggaggaggaagagcatgtgctgagaagcctgccagcgcgctttacgacaagcatatatgggggagatcaccaagcctttgcgaagcagaagcttccgaagatggcctacgactactacgcgtccggcgccgaggatgagtggacgctgcaggagaacatggaggccttctccaggatcttcggttgatgagataagattgccaagaaacgaagtctgaggctggcttcttattcttcacctggcttcttaagtagtagcttcttattcttaagcacttgcaataagaagctactactttagaagattgccaagaagagaagtctgaggctgtcgagtaccaaaagcttcttcccataggctgaaggaatagagaccgccacaatgagagcttggccaagagaagatccaaccgccaaggcttcctctggcacctccgcttaagaatgttcagtgcttttgagatgttttcaagacctatcttgttactgcttaggtaccttatgctgctatagcagtgttgcaattgcccctgtacttgacagatttgcattagatgctcaagctatagagggtaggttcctaattgtgaccatgtactaaattatatatctgttgctaagttatagtacagacaaaataaatttagcctggccaacttgtataaaaatgtgttattgtaactaagaatatctgaattgct

SEQ ID NO: 221624 - DNA, 3118 bp, Zea Mays
ctctagtgccaccccgaactcccagacaccacggctcgtcacagtcgtcttcctcctcaggcgaggccagatccaacctgccgcggccgaccactgccatggctcccaccgtcccttcggcggcgaagtccgcttctccttcccaaccctccgggaagagcgaggtgacggatctgaagcagcagctgcggcagcttgccgggagccgcgctcccgatgcggacgcccagcgtcgtgatgtattcaagagggtgatctcctgcatgacggccggcatcgacgtgtcggccgcgttcggggagatggtcctctgctccgccacctccgacgtcgtaaccaagaagatgtgctatctctatgtaggcgcccacgcgcgcgcgcacccggacctagccctcctcaccattaacttcctccagcgggactgccaagatcaggaccccaccatccgcggcctcgctctccgcagtctctgctccctccgtgtccccaatcttgtcgagtatctcgtcacgccactcacgaccgggctgaaggaccccagcgcctacgtgcggatgattgctgctgttggtgctgccaagttgtatcacatatctgccaccgcctgcattgatgctgaccttcctgcttcgctcaaggcgctcatgctatccgatccagacgcacaggtagttgccaattgcctgcatgcattgcaagagatctgggccctagaagctgctaaatcagaagcagctgcaagagagattgagacattgcatagcaaaccagtggtattttacctgttaaacaagatcaaggagttcagtgaatgggcgcagtgcattgttcttgagttggcatcaaagttccttccatctgataataatgaaatatttgacattatgaatttgctggaggatagacttcagcatgcaaatggagcagttgttttggcaacaattaaagtttttctccatttgacaatgtctatgactgatgttcatcaacaggtgcacatgttactcccagagaggtttatgaacgtattaaagcacccttgcttactctggtgggtgctggcagtcctgaacagtcatactctgtgctatgccatctacatcttctggtgatgcgtgctccaatgttattttcctcagactataaaagcttctactgccaatttagtgatccttcatacgtgaagaagttgaaacttgagatgttgactgctatagcaaatgaaagcaacacatatgagattgtcaccgaactgtgtgaatacgctgggaatgttgatgtaccgattgcaagggagtctatccgcgcagttggaaaaatagcactgcagcagtatgatgttaatgctattgtggacaggcttctacaatttcttgaaatggataaggattatgtgactgctgaaactctagtcttggtaaaagatcttctcagaaaatatcctcaatggagccatgattgtatagctgttgttggaaatatcagcagcaaaaacatccaggagcccaaaggaaaagcagctctcatatggatgttgggagaatattcacaagacatgcatgatgctccatacatccttgaaaatcttgttgaaaactgggatgaagagcactctcctgaggttcgcttgcatctcctgacagcagtgatgaaatgtttctttaaaagacctccagagacacaaaaggcattaggagctacattatcagctggtctatctgacacccagcaggatgttcatgacagagcacttttctactacaggcttttgcaatacaatcctaatgtagcagaacgtgtagtaaaccctcccaaacaagctgtctctgtatttgcagatacacagagcagtgaaaccaaagatcggatatttgatgagttcaacagtctatcagttgtatatcagaagccatcttacatgtttacagatagggagcatcgtgagccatttgaatactcagaggatcttacaagcttgactgttggggcagaggatccagaaaatgtaatttctgcccaaagatatcaagaaaacgataatgatcttttgctaagtacttcagataaagaggacaatggtacaagagccagcaatggttcttctacctctgcatacaatgctccttctgatttgattagcccttcattgataagctcccaaacaccagctgaaacttcactagtaaatactggtgggccgacacattcctcacaatcaaacttcagtctcgatgaccttcttggcattggcgttactgaagctcctgctccaacaccaccagcactgacccttaactcgaagcctgtgctagatcctggtacgttccagaggaaatggggccagctagcattggcgctgtctcaggaatgctctttgagtccacaaggagcagcttcattgatgaatccccaatcactcatccgtcatatgcaaagcaattacatccaatgtattgcttcaggtggtcagcctccgaactacaagttctttttctatgctcagaaagatggggctactgctttcttccttgttgaatgtattgtcaacacagcatcagcgaaggcacagctcaaaattaaggctgatgatgggactgctgctgaggcattctcgactttgtttcagtcagccttgtccaaatttgggctttcttgatcctgagtattttgtctgagcgattcactggtccacaatttttttccggcgttcacagttttgcccccactctgccgcggtgccgcctaagcttgtccagtacttgatcaatttgttggagaatcagcgtagaaggtgcgattagagggcaatatattattatcactaaattcagcaagagagcaatggagttttgcggagtaaaatcttatttgtattaattgggtgaactgtgcatttgtacatgactacatgtcatctagataaatagctaggttatttaggattgtgctagtgtgatgccttgacttcttctgaagggccttctttttcttgaaggatgtagaaacaacacacacctccccctttcatgtatgctgtacttacctttctttcttgcacaggtgaccaataaagatgtttcttccattttgattcacattaagggcctgcttgttt

SEQ ID NO: 221625 - DNA, 1539 bp, Zea Mays
atggtgaggaagaaaagaactggccctggagagagttctggggagtcttctggagcgcctggtcatggctcctcacagcgtcctcaggcaacacaacagggtacccgtggtggagggcaacaccagggccgtggtggatatctgggccctggagtgccgccttcacagcacccaggtggtggcccacctgagtatcatcaaccgcttgactaccagggacgtggtggatatcagggccgtggtggaccaccttcacagcatcctggtggtgggacaccccctgggtctcaaccgcgtggctaccaggggcacggtggataccagggccgtggcgggccaccttcacagtatcctggtggtgggacaccccctgggtctcaaccacgtgactaccacggacgtggtggtccgcgtcccagagggggaatgccacagtcataccgtggcgggcatgtgggaggtagtgttgtaccaagtgttccttcaggtccatctaggccagttcccgagctgcaccaagccccagatgtccaacatcaagcccctgtggtggcaacaccatcttcgccaggagctggctcgtcctcgcagcctgggaaggctgaggtgagcgctggacaagtccagcaacagttccagcagcttgcgattcgtaaccaaagcttagccagccaagctggtcagatggcaccagcgtcaagcaaatctgttaggttcccattgcgccctggcaagggtacgcatgggtccaggtgcattgtgaaggcaaatcatttctttgctgagctgcctaataaagaccttcaccaatacgatgtatcaataacacctgaggttacttcacgcggcgtcaatcgtgctgtcatggcagagctagtaaaactttacagacactcccatttggatgggcgtctgcctgcatatgatggaaggaagagtctttatacagctggagcgttgccatttgcttcgaagacattcgaaattactctgcaagatgaggaagacagtcttggtggaggccaaagagggtatttcgggtgaccatcaaatttgctgctcgcgctgatctccaccatctggctatgtttcttgctgggaggcagccagatgcccctcaagaggctcttcaagtacttgacatcgtgctacgtgaaatgcctactgccaagtattgtcctgttggtagatcattttattctcccaagttagggagacctcagcaacttggtgaagatatgtcctctactgcattttttgaggccctccctgtaattgattttgtttctcagcttcttaatagagatatctcagttagaccattgtctgattctgatcgcgtgaaggtttgatttattaccccacttttcttcttagaaactttggttatgctctgttacttcccatttgcgctcctctgtatatatagattaaaaaagccctacgaggtgtgaaagtggaggtcacacaccgtggaaacatgcgtaggaaatatcggatatctggccttactccacaagcaacaagggagttatcgta

SEQ ID NO: 221626 - DNA, 1972 bp, Zea Mays
ggtatagatcaaccctactgctatgtatacctatcattgcaagtgcagcggataaagaatccaattcatctcagacattgcaacatcttgaattgtttgagatggaatgtcgctgtttctagatggaaagattcagggtaccctttgttctaagttgttgagtgagcagaatgaaggctagaagtagaagctacactggccggtttcaggtcgcgttgtctttttgtatcattcttgtccaaaagcatgggcaaccagtgacatccatctccatgatctatccacaaaacaaacaatggcgaagcagactgagagctacgagctgcacaaactgcggccccaggtggatgacctgttcaaggagttcgacgccctggtcgacagacctctggatgagagggaggacctggctgcaatcttcaaggtcctcgaagagatcagggacaagatcaagatcaaacacggtggcaagaaagtagacgacgacgagctccttccgcggagcaagaggggggacctggccaacctgctccccctcatcaggactgcactggagctacgcagcaagccgccgccgccgcctgtgcagcaggacgccacgggcggtgcccacgacagcaagccgaccggctgcatcccctgcaagccccggccgtcgcagcagcacaaggaagaaaaagaaggcagcaaggaagtcgtgtcactcaagctgctgctccggctgacccagaacgtgctggagccggagcagtactacgagtggacgaccagctacgtggacgaggagaggatctacgggtgggacaaggaggccggcgaggtgatcgacgccctcgtggccgccgccgacggctcgggggcgcggatgttccgggccgcgggcatcgcgggcatccacggcagcggcaagacggcgctggcgcggaaggtgttcgtgcacgacaaggccaaggacaacttcgcgctccgcctgtgggtgtgcgtcggcccgccggactcggaggaccgcttcaacctcctctaccggatgctcgacaacctcggcctcgacaccgacaaggtcgaggaggtcgtcgacaagtccagcgtcgtcagagacgccaggggcagaacggaggcggagctccggaaggccgcagccagacctgccgagcagaagaaggcgagggcagcgtcgtcgtcaccgaggccggcgccggtggagatgccaacaggcaggcaaaggacgaggagctgctcaaggagaaggtagagaacagccgcgccgtcgagaaatccaaaatcggagtgctgctctacatcctcaacatggtcctgtccaagacgtcgtacatgatcgtgttcgacgacatccgggcgtaccgccacgacgacgacgacgcacagggatgctggtacagcaacctcacgctgctgccgccggcggagggcgagtggggggaccgcctcgcctacggcctgcccaagacgaaacacaggggcgccgtgctggtgacctgccgcaaggaagacgacgccaagaccatggcgcgcacgggcctcgtggtccgcccgcccaagctcgaaggtgatgacgcctggaagctcttcagaagagagtacgaccaggccaaggacgacaagcgcaacaaggacggcggcggcaaagaaggcagcaagggggaggaggaggacctgctcctcaagcagctgcaggagatgaagaaggagatcgtgggcaagtgcctcggcctgccggtggccatcatcgaggcggctaggggcttcgccgacctcgagcccttgccggatgatactagtcccctcaaaccggtgaccagcaaggacattgacaaggacaagcagctgtctcaagcaaataagtaacagattagttgaattcgtgctgtgtaatgcttctgcgttgctttggctctcttctaataaaatttaattatgggctataaaagtcaaaaattttaatttgaaatat

SEQ ID NO: 221627 - DNA, 2456 bp, Zea Mays
tccgctttgtctcagcctctctcttccgtactgcttctcctctacctccgtcgccagccagccactacctcgattcgctcccctccggccctcctgtcgcgcgcgctctgcctcactggcgccacggtcgcccgcgccggcaggctcgagtccctcgacgccatcgcctagattgtctactagctggcccccgctcgccgcgaggtggtgcttgcggaggtggcggcgatcgtgcctgcatggtgctcgacaaaaagatatgggacgccaagaacatgatgtgcatcgtggacccgcgccacggttgctacctgacggcgtccgccatgttctgcgacaagatgagcaacagggaggtggacgagcagatgcttaacgtgccaaacaatgactcctacttcgtggactcgatctccaacaacgttcagtccacggatgtgcctcttttgagagtgaattatacttttactcaattaggatattgtgtttctttggatctttgtttgattaatgatttttttggatgagagtgtggctacaggatgaagcaatgcattttttgatggaacacacatgtgcagtatacaaatggaccatcaggttgcgggtaccctttgttctaagttgttgagtgagcagaatgaaggctagaagtagaagctacactggccggtttcaggtcgcgttgtctttttgtatcattcttgtccaaaagctatataaaagaagcatgggcaaccagtgacatccatctccatgatctatccacaaaacaaacaatggcgaagcagactgagagctacgagctgcacaaactgcggccccaggtggatgacctgttcaaggagttcgacgccctggtcgacagacctctggatgagagggaggacctggctgcaatcttcaaggtcctcgaagagatcagggacaagatcaagatcaaacacggtggcaagaaagtagacgacgacgagctccttccgcggagcaagaggggggacctggccaacctgctccccctcatcaggactgcactggagctacgcagcaagccgccgccgccgcctgtgcagcaggacgccacgggcggtgcccacgacagcaagccgaccggctgcatcccctgcaagccccggccgtcgcagcagcacaaggaagaaaaagaaggcagcaaggaagtcgtgtcactcaagctgctgctccggctgacccagaacgtgctggagccggagcagtactacgagtggacgaccagctacgtggacgaggagaggatctacgggtgggacaaggaggccggcgaggtgatcgacgccctcgtggccgccgccgacggctcgggggcgcggatgttccgggccgcgggcatcgcgggcatccacggcagcggcaagacggcgctggcgcggaaggtgttcgtgcacgacaaggccaaggacaacttcgcgctccgcctgtgggtgtgcgtcggcccgccggactcggaggaccgcttcaacctcctctaccggatgctcgacaacctcggcctcgacaccgacaaggtcgaggaggtcgtcgacaagtccagcgtcgtcagagacgccaggggcagaacggaggcggagctccggaaggccgcagccagacctgccgagcagaagaaggcgagggcagcgtcgtcgtcaccgaggccggcgccggtggagatgccaacaggcaggcaaaggacgaggagctgctcaaggagaaggtagagaacagccgcgccgtcgagaaatccaaaatcggagtgctgctctacatcctcaacatggtcctgtccaagacgtcgtacatgatcgtgttcgacgacatccgggcgtaccgccacgacgacgacgacgcacagggatgctggtacagcaacctcacgctgctgccgccggcggagggcgagtggggggaccgcctcgcctacggcctgcccaagacgaaacacaggggcgccgtgctggtgacctgccgcaaggaagacgacgccaagaccatggcgcgcacgggcctcgtggtccgcccgcccaagctcgaaggtgatgacgcctggaagctcttcagaagagagtacgaccaggccaaggacgacaagcgcaacaaggacggcggcggcaaagaaggcagcaagggggaggaggaggacctgctcctcaagcagctgcaggagatgaagaaggagatcgtgggcaagtgcctcggcctgccggtggccatcatcgaggcggctaggggcttcgccgacctcgagcccttgccggatgatactagtcccctcaaaccggtgaccagcaaggacattgacaaggacaagcagctgtctcaagcaaataagtaacagattagttgaattcgtgctgtgtaatgcttctgcgttgctttggctctcttctaataaaatttaattatgggctataaaagtcaaaaattttaatttgaaatat

SEQ ID NO: 221628 - DNA, 2723 bp, Zea Mays
gttgacgttcgattccgctttgtctcagcctctctcttccgtactgcttctcctctacctccgtcgccagccagccactacctcgattcgctcccctccggccctcctgtcgcgcgcgctctgcctcactggcgccacggtcgcccgcgccggcaggctcgagtccctcgacgccatcgcctagattgtctactagctggcccccgctcgccgcgaggtggtgcttgcggaggtggcggcgatcgtgcctgcatggtgctcgacaaaaaggtgctctacgagacgacatctgcttccgcgcgcacaagctcaccatgcgcagcttcggtgacgtttagccacgtcatctccgccaccatgagcggcgtcacctgctgcctttgcttctccggtcagctcaactccgatctccgtaggctagccgtcaacctgatcccgttcccgcgcctgcacttcttcatggtcggcttcgcgccgctcaccttccgggggctcctagaaatatcacgtcctgactgtgccagaactcccaaaatagatatgggacgccaagaacatgatgtgcatcgtggacccgcgccacggttgctacctgacggcgtccgccatgttctgcgacaagatgagcaacagggaggtggacgagcagatgcttaacgtgccaaacaatgactcctacttcgtggactcgatctccaacaacgttcagtccacggatgtgcctcttttgagagtgaattatacttttactcaattaggatattgtgtttctttggatctttgtttgattaatgatttttttggatgagagtgtggctacaggatgaagcaatgcattttttgatggaacacacatgtgcagtatacaaatggaccatcaggttgcgggtaccctttgttctaagttgttgagtgagcagaatgaaggctagaagtagaagctacactggccggtttcaggtcgcgttgtctttttgtatcattcttgtccaaaagcatgggcaaccagtgacatccatctccatgatctatccacaaaacaaacaatggcgaagcagactgagagctacgagctgcacaaactgcggccccaggtggatgacctgttcaaggagttcgacgccctggtcgacagacctctggatgagagggaggacctggctgcaatcttcaaggtcctcgaagagatcagggacaagatcaagatcaaacacggtggcaagaaagtagacgacgacgagctccttccgcggagcaagaggggggacctggccaacctgctccccctcatcaggactgcactggagctacgcagcaagccgccgccgccgcctgtgcagcaggacgccacgggcggtgcccacgacagcaagccgaccggctgcatcccctgcaagccccggccgtcgcagcagcacaaggaagaaaaagaaggcagcaaggaagtcgtgtcactcaagctgctgctccggctgacccagaacgtgctggagccggagcagtactacgagtggacgaccagctacgtggacgaggagaggatctacgggtgggacaaggaggccggcgaggtgatcgacgccctcgtggccgccgccgacggctcgggggcgcggatgttccgggccgcgggcatcgcgggcatccacggcagcggcaagacggcgctggcgcggaaggtgttcgtgcacgacaaggccaaggacaacttcgcgctccgcctgtgggtgtgcgtcggcccgccggactcggaggaccgcttcaacctcctctaccggatgctcgacaacctcggcctcgacaccgacaaggtcgaggaggtcgtcgacaagtccagcgtcgtcagagacgccaggggcagaacggaggcggagctccggaaggccgcagccagacctgccgagcagaagaaggcgagggcagcgtcgtcgtcaccgaggccggcgccggtggagatgccaacaggcaggcaaaggacgaggagctgctcaaggagaaggtagagaacagccgcgccgtcgagaaatccaaaatcggagtgctgctctacatcctcaacatggtcctgtccaagacgtcgtacatgatcgtgttcgacgacatccgggcgtaccgccacgacgacgacgacgcacagggatgctggtacagcaacctcacgctgctgccgccggcggagggcgagtggggggaccgcctcgcctacggcctgcccaagacgaaacacaggggcgccgtgctggtgacctgccgcaaggaagacgacgccaagaccatggcgcgcacgggcctcgtggtccgcccgcccaagctcgaaggtgatgacgcctggaagctcttcagaagagagtacgaccaggccaaggacgacaagcgcaacaaggacggcggcggcaaagaaggcagcaagggggaggaggaggacctgctcctcaagcagctgcaggagatgaagaaggagatcgtgggcaagtgcctcggcctgccggtggccatcatcgaggcggctaggggcttcgccgacctcgagcccttgccggatgatactagtcccctcaaaccggtgaccagcaaggacattgacaaggacaagcagctgtctcaagcaaataagtaacagattagttgaattcgtgctgtgtaatgcttctgcgttgctttggctctcttctaataaaatttaattatgggctataaaagtcaaaaattttaatttgaaatat

SEQ ID NO: 221629 - DNA, 2700 bp, Zea Mays
gttgacgttcgattccgctttgtctcagcctctctcttccgtactgcttctcctctacctccgtcgccagccagccactacctcgattcgctcccctccggccctcctgtcgcgcgcgctctgcctcactggcgccacggtcgcccgcgccggcaggctcgagtccctcgacgccatcgcctagattgtctactagctggcccccgctcgccgcgaggtggtgcttgcggaggtggcggcgatcgtgcctgcatggtgctcgacaaaaaggtgctctacgagacgacatctgcttccgcgcgcacaagctcaccatgcgcagcttcggtgacgtttagccacgtcatctccgccaccatgagcggcgtcacctgctgcctttgcttctccggtcagctcaactccgatctccgtaggctagccgtcaacctgatcccgttcccgcgcctgcacttcttcatggtcggcttcgcgccgctcaccttccgggggctcctagaaatatcacgtcctgactgtgccagaactcccaaaatagatatgggacgccaagaacatgatgtgcatcgtggacccgcgccacggttgctacctgacggcgtccgccatgttctgcgacaagatgagcaacagggaggtggacgagcagatgcttaacgtgccaaacaatgactcctacttcgtggactcgatctccaacaacgttcagtccacggatgtgcctcttttgagagtgaattatacttttactcaattaggatattgtgtttctttggatctttgtttgattaatgatttttttggatgagagtgtggctacaggatgaagcaatgcattttttgatggaacacacatgtgcagtatacaaatggaccatcaggttgcgggtaccctttgttctaagttgttgagtgagcagaatgaaggctagaagtagaagctacactggccggtttcaggtcgcgttgtctttttgtatcattcttgtccaaaagctatataaaagaagcatgggcaaccagtgacatccatctccatgatctatccacaaaacaaacaatggcgaagcagactgagagctacgagctgcacaaactgcggccccaggtggatgacctgttcaaggagttcgacgccctggtcgacagacctctggatgagagggaggacctggctgcaatcttcaaggtcctcgaagagatcagggacaagatcaagatcaaacacggtggcaagaaagtagacgacgacgagctccttccgcggagcaagaggggggacctggccaacctgctccccctcatcaggactgcactggagctacgcagcaagccgccgccgccgcctgtgcagcaggacgccacgggcggtgcccacgacagcaagccgaccggctgcatcccctgcaagccccggccgtcgcagcagcacaaggaagaaaaagaaggcagcaaggaagtcgtgtcactcaagctgctgctccggctgacccagaacgtgctggagccggagcagtactacgagtggacgaccagctacgtggacgaggagaggatctacgggtgggacaaggaggccggcgaggtgatcgacgccctcgtggccgccgccgacggctcgggggcgcggatgttccgggccgcgggcatcgcgggcatccacggcagcggcaagacggcgctggcgcggaaggtgttcgtgcacgacaaggccaaggacaacttcgcgctccgcctgtgggtgtgcgtcggcccgccggactcggaggaccgcttcaacctcctctaccggatgctcgacaacctcggcctcgacaccgacaaggtcgaggaggtcgtcgacaagtccagcgtcgtcagagacgccaggggcagaacggaggcggagctccggaaggccgcagccagacctgccgagcagaagaaggcgagggcagcgtcgtcgtcaccgaggccggcgccggtggagatgccaacaggcaggcaaaggacgaggagctgctcaaggagaaggagtgctgctctacatcctcaacatggtcctgtccaagacgtcgtacatgatcgtgttcgacgacatccgggcgtaccgccacgacgacgacgacgcacagggatgctggtacagcaacctcacgctgctgccgccggcggagggcgagtggggggaccgcctcgcctacggcctgcccaagacgaaacacaggggcgccgtgctggtgacctgccgcaaggaagacgacgccaagaccatggcgcgcacgggcctcgtggtccgcccgcccaagctcgaaggtgatgacgcctggaagctcttcagaagagagtacgaccaggccaaggacgacaagcgcaacaaggacggcggcggcaaagaaggcagcaagggggaggaggaggacctgctcctcaagcagctgcaggagatgaagaaggagatcgtgggcaagtgcctcggcctgccggtggccatcatcgaggcggctaggggcttcgccgacctcgagcccttgccggatgatactagtcccctcaaaccggtgaccagcaaggacattgacaaggacaagcagctgtctcaagcaaataagtaacagattagttgaattcgtgctgtgtaatgcttctgcgttgctttggctctcttctaataaaatttaattatgggctataaaagtcaaaaattttaatttgaaatat

SEQ ID NO: 221630 - DNA, 2661 bp, Zea Mays
gttgacgttcgattccgctttgtctcagcctctctcttccgtactgcttctcctctacctccgtcgccagccagccactacctcgattcgctcccctccggccctcctgtcgcgcgcgctctgcctcactggcgccacggtcgcccgcgccggcaggctcgagtccctcgacgccatcgcctagattgtctactagctggcccccgctcgccgcgaggtggtgcttgcggaggtggcggcgatcgtgcctgcatggtgctcgacaaaaaggtgctctacgagacgacatctgcttccgcgcgcacaagctcaccatgcgcagcttcggtgacgtttagccacgtcatctccgccaccatgagcggcgtcacctgctgcctttgcttctccggtcagctcaactccgatctccgtaggctagccgtcaacctgatcccgttcccgcgcctgcacttcttcatgatatgggacgccaagaacatgatgtgcatcgtggacccgcgccacggttgctacctgacggcgtccgccatgttctgcgacaagatgagcaacagggaggtggacgagcagatgcttaacgtgccaaacaatgactcctacttcgtggactcgatctccaacaacgttcagtccacggatgtgcctcttttgagagtgaattatacttttactcaattaggatattgtgtttctttggatctttgtttgattaatgatttttttggatgagagtgtggctacaggatgaagcaatgcattttttgatggaacacacatgtgcagtatacaaatggaccatcaggttgcgggtaccctttgttctaagttgttgagtgagcagaatgaaggctagaagtagaagctacactggccggtttcaggtcgcgttgtctttttgtatcattcttgtccaaaagctatataaaagaagcatgggcaaccagtgacatccatctccatgatctatccacaaaacaaacaatggcgaagcagactgagagctacgagctgcacaaactgcggccccaggtggatgacctgttcaaggagttcgacgccctggtcgacagacctctggatgagagggaggacctggctgcaatcttcaaggtcctcgaagagatcagggacaagatcaagatcaaacacggtggcaagaaagtagacgacgacgagctccttccgcggagcaagaggggggacctggccaacctgctccccctcatcaggactgcactggagctacgcagcaagccgccgccgccgcctgtgcagcaggacgccacgggcggtgcccacgacagcaagccgaccggctgcatcccctgcaagccccggccgtcgcagcagcacaaggaagaaaaagaaggcagcaaggaagtcgtgtcactcaagctgctgctccggctgacccagaacgtgctggagccggagcagtactacgagtggacgaccagctacgtggacgaggagaggatctacgggtgggacaaggaggccggcgaggtgatcgacgccctcgtggccgccgccgacggctcgggggcgcggatgttccgggccgcgggcatcgcgggcatccacggcagcggcaagacggcgctggcgcggaaggtgttcgtgcacgacaaggccaaggacaacttcgcgctccgcctgtgggtgtgcgtcggcccgccggactcggaggaccgcttcaacctcctctaccggatgctcgacaacctcggcctcgacaccgacaaggtcgaggaggtcgtcgacaagtccagcgtcgtcagagacgccaggggcagaacggaggcggagctccggaaggccgcagccagacctgccgagcagaagaaggcgagggcagcgtcgtcgtcaccgaggccggcgccggtggagatgccaacaggcaggcaaaggacgaggagctgctcaaggagaaggtagagaacagccgcgccgtcgagaaatccaaaatcggagtgctgctctacatcctcaacatggtcctgtccaagacgtcgtacatgatcgtgttcgacgacatccgggcgtaccgccacgacgacgacgacgcacagggatgctggtacagcaacctcacgctgctgccgccggcggagggcgagtggggggaccgcctcgcctacggcctgcccaagacgaaacacaggggcgccgtgctggtgacctgccgcaaggaagacgacgccaagaccatggcgcgcacgggcctcgtggtccgcccgcccaagctcgaaggtgatgacgcctggaagctcttcagaagagagtacgaccaggccaaggacgacaagcgcaacaaggacggcggcggcaaagaaggcagcaagggggaggaggaggacctgctcctcaagcagctgcaggagatgaagaaggagatcgtgggcaagtgcctcggcctgccggtggccatcatcgaggcggctaggggcttcgccgacctcgagcccttgccggatgatactagtcccctcaaaccggtgaccagcaaggacattgacaaggacaagcagctgtctcaagcaaataagtaacagattagttgaattcgtgctgtgtaatgcttctgcgttgctttggctctcttctaataaaatttaattatgggctataaaagtcaaaaattttaatttgaaatat

SEQ ID NO: 221631 - DNA, 2590 bp, Zea Mays
gttgacgttcgattccgctttgtctcagcctctctcttccgtactgcttctcctctacctccgtcgccagccagccactacctcgattcgctcccctccggccctcctgtcgcgcgcgctctgcctcactggcgccacggtcgcccgcgccggcaggctcgagtccctcgacgccatcgcctagattgtctactagctggcccccgctcgccgcgaggtggtgcttgcggaggtggcggcgatcgtgcctgcatggtgctcgacaaaaaggtgctctacgagacgacatctgcttccgcgcgcacaagctcaccatgcgcagcttcggtgacgtttagccacgtcatctccgccaccatgagcggcgtcacctgctgcctttgcttctccgatatgggacgccaagaacatgatgtgcatcgtggacccgcgccacggttgctacctgacggcgtccgccatgttctgcgacaagatgagcaacagggaggtggacgagcagatgcttaacgtgccaaacaatgactcctacttcgtggactcgatctccaacaacgttcagtccacggatgtgcctcttttgagagtgaattatacttttactcaattaggatattgtgtttctttggatctttgtttgattaatgatttttttggatgagagtgtggctacaggatgaagcaatgcattttttgatggaacacacatgtgcagtatacaaatggaccatcaggttgcgggtaccctttgttctaagttgttgagtgagcagaatgaaggctagaagtagaagctacactggccggtttcaggtcgcgttgtctttttgtatcattcttgtccaaaagctatataaaagaagcatgggcaaccagtgacatccatctccatgatctatccacaaaacaaacaatggcgaagcagactgagagctacgagctgcacaaactgcggccccaggtggatgacctgttcaaggagttcgacgccctggtcgacagacctctggatgagagggaggacctggctgcaatcttcaaggtcctcgaagagatcagggacaagatcaagatcaaacacggtggcaagaaagtagacgacgacgagctccttccgcggagcaagaggggggacctggccaacctgctccccctcatcaggactgcactggagctacgcagcaagccgccgccgccgcctgtgcagcaggacgccacgggcggtgcccacgacagcaagccgaccggctgcatcccctgcaagccccggccgtcgcagcagcacaaggaagaaaaagaaggcagcaaggaagtcgtgtcactcaagctgctgctccggctgacccagaacgtgctggagccggagcagtactacgagtggacgaccagctacgtggacgaggagaggatctacgggtgggacaaggaggccggcgaggtgatcgacgccctcgtggccgccgccgacggctcgggggcgcggatgttccgggccgcgggcatcgcgggcatccacggcagcggcaagacggcgctggcgcggaaggtgttcgtgcacgacaaggccaaggacaacttcgcgctccgcctgtgggtgtgcgtcggcccgccggactcggaggaccgcttcaacctcctctaccggatgctcgacaacctcggcctcgacaccgacaaggtcgaggaggtcgtcgacaagtccagcgtcgtcagagacgccaggggcagaacggaggcggagctccggaaggccgcagccagacctgccgagcagaagaaggcgagggcagcgtcgtcgtcaccgaggccggcgccggtggagatgccaacaggcaggcaaaggacgaggagctgctcaaggagaaggtagagaacagccgcgccgtcgagaaatccaaaatcggagtgctgctctacatcctcaacatggtcctgtccaagacgtcgtacatgatcgtgttcgacgacatccgggcgtaccgccacgacgacgacgacgcacagggatgctggtacagcaacctcacgctgctgccgccggcggagggcgagtggggggaccgcctcgcctacggcctgcccaagacgaaacacaggggcgccgtgctggtgacctgccgcaaggaagacgacgccaagaccatggcgcgcacgggcctcgtggtccgcccgcccaagctcgaaggtgatgacgcctggaagctcttcagaagagagtacgaccaggccaaggacgacaagcgcaacaaggacggcggcggcaaagaaggcagcaagggggaggaggaggacctgctcctcaagcagctgcaggagatgaagaaggagatcgtgggcaagtgcctcggcctgccggtggccatcatcgaggcggctaggggcttcgccgacctcgagcccttgccggatgatactagtcccctcaaaccggtgaccagcaaggacattgacaaggacaagcagctgtctcaagcaaataagtaacagattagttgaattcgtgctgtgtaatgcttctgcgttgctttggctctcttctaataaaatttaattatgggctataaaagtcaaaaattttaatttgaaatat

SEQ ID NO: 221632 - DNA, 1965 bp, Zea Mays
cagattcttctccctgtcgcgacctctgacgatgcggtctccaagtccaggatgaagcaatgcattttttgatggaacacacatgtgcagtatacaaatggaccatcaggttgcgggtaccctttgttctaagttgttgagtgagcagaatgaaggctagaagtagaagctacactggccggtttcaggtcgcgttgtctttttgtatcattcttgtccaaaagctatataaaagaagcatgggcaaccagtgacatccatctccatgatctatccacaaaacaaacaatggcgaagcagactgagagctacgagctgcacaaactgcggccccaggtggatgacctgttcaaggagttcgacgccctggtcgacagacctctggatgagagggaggacctggctgcaatcttcaaggtcctcgaagagatcagggacaagatcaagatcaaacacggtggcaagaaagtagacgacgacgagctccttccgcggagcaagaggggggacctggccaacctgctccccctcatcaggactgcactggagctacgcagcaagccgccgccgccgcctgtgcagcaggacgccacgggcggtgcccacgacagcaagccgaccggctgcatcccctgcaagccccggccgtcgcagcagcacaaggaagaaaaagaaggcagcaaggaagtcgtgtcactcaagctgctgctccggctgacccagaacgtgctggagccggagcagtactacgagtggacgaccagctacgtggacgaggagaggatctacgggtgggacaaggaggccggcgaggtgatcgacgccctcgtggccgccgccgacggctcgggggcgcggatgttccgggccgcgggcatcgcgggcatccacggcagcggcaagacggcgctggcgcggaaggtgttcgtgcacgacaaggccaaggacaacttcgcgctccgcctgtgggtgtgcgtcggcccgccggactcggaggaccgcttcaacctcctctaccggatgctcgacaacctcggcctcgacaccgacaaggtcgaggaggtcgtcgacaagtccagcgtcgtcagagacgccaggggcagaacggaggcggagctccggaaggccgcagccagacctgccgagcagaagaaggcgagggcagcgtcgtcgtcaccgaggccggcgccggtggagatgccaacaggcaggcaaaggacgaggagctgctcaaggagaaggtagagaacagccgcgccgtcgagaaatccaaaatcggagtgctgctctacatcctcaacatggtcctgtccaagacgtcgtacatgatcgtgttcgacgacatccgggcgtaccgccacgacgacgacgacgcacagggatgctggtacagcaacctcacgctgctgccgccggcggagggcgagtggggggaccgcctcgcctacggcctgcccaagacgaaacacaggggcgccgtgctggtgacctgccgcaaggaagacgacgccaagaccatggcgcgcacgggcctcgtggtccgcccgcccaagctcgaaggtgatgacgcctggaagctcttcagaagagagtacgaccaggccaaggacgacaagcgcaacaaggacggcggcggcaaagaaggcagcaagggggaggaggaggacctgctcctcaagcagctgcaggagatgaagaaggagatcgtgggcaagtgcctcggcctgccggtggccatcatcgaggcggctaggggcttcgccgacctcgagcccttgccggatgatactagtcccctcaaaccggtgaccagcaaggacattgacaaggacaagcagctgtctcaagcaaataagtaacagattagttgaattcgtgctgtgtaatgcttctgcgttgctttggctctcttctaataaaatttaattatgggctataaaagtcaaaaattttaatttgaaatat

SEQ ID NO: 221633 - DNA, 760 bp, Zea Mays
gaaattactgttctgccattccgtaaataccctcacggccccgcgctccccgttccccttcctcgctccccaccactccgttccatccctcgcctgccttcgcacgggtgcgccgcccgctcgacggccacgccacgccgcgccgcgccgctcagctgccccggcacccgcccttcctcgccgagctcgggatcgacgtctcccgcacctcctcgcgcccgttccgggctccgcatccggcccctccccgtccccaaccccattccgcagctggcgaccagcacaacatcccgaatcccccacctcgcattcggctcgccgtagctcctcctccgcgtcccgccgcccccggcacgcacaagtttactatgtctgggatggcatttgatgattcacctgcccaagtgaatgttgaaggagatgtttcagagaaaaaagtagaagttcaagaccagaatgaagtgggtgggatgccctcacgacaagaggaggaggcagcaattaagaaaaagtatgaaggaatattgcccagaaagactcctgcttatatctaagaactgctaccagcaacatcagtcgtcagcacaagttcagatgtcagtcgtcatcagcgcaacgtccaaggacttgcttggattcacatgtatctatattaatccgcaagccctattgtgctacagtatattggaattaaacttaggggccaacaagattggatcccttcattttgggaaattggaatatatatctctctcacgtg

SEQ ID NO: 221634 - DNA, 748 bp, Zea Mays
gaaattactgttctgccattccgtaaataccctcacggccccgcgctccccgttccccttcctcgctccccaccactccgttccatccctcgcctgccttcgcacgggtgcgccgcccgctcgacggccacgccacgccgcgccgcgccgctcagctgccccggcacccgcccttcctcgccgagctcgggatcgacgtctcccgcacctcctcgcgcccgttccgggctccgcatccggcccctccccgtccccaaccccattccgcagctggcgaccagcacaacatcccgaatcccccacctcgcattcggctcgccgtagctcctcctccgcgtcccgccgcccccggcacgcacaagtttactatgtctgggatggcatttgatgattcacctgcccaagtgaatgttgaaggagatgtttcagagaaaaaagtagaagttcaagaccagaatgaagtgggtgggatgccctcacgacaagaggaggaggcagcaattaagaaaaagtatgaaggaatattgcccagaaagactcctgcttatatctaagcaacatcagtcgtcagcacaagttcagatgtcagtcgtcatcagcgcaacgtccaaggacttgcttggattcacatgtatctatattaatccgcaagccctattgtgctacagtatattggaattaaacttaggggccaacaagattggatcccttcattttgggaaattggaatatatatctctctcacgtg

SEQ ID NO: 221635 - DNA, 2282 bp, Zea Mays
ctctattcgttcagacttgagattaaactcaaatgggccaatgtgtagagcataatgagagaatgcagtggcatgataacaaacacatctggagttaagttagatgcaaggtccttttcgattacataaggttaaaaatgtggattgtggcacagccatggtatctgcctacaaattcagccatttgttaggaaacggtgaaactatagcaatgtctttcatgcatgaaacgagaacaagtcaatttgtggccctccaactcttctcagggttttatggtgggccaattgcatacctcttcgaaccatttttatgaacattccatttgagaagtcataattgcatagttgccaccaaaagcgctggtcactcaccgctggattatcaaactgaagaaatgtcgtcatccagacaaaatccttccttccccatcagcacactgatgggaccacttcatggtgttgcatttcttcagtccatggatcctccttatcgctccatctccatggttaccattgcaacatctggaggtagggttggacgggcaggtagccaggagctgagggcaccagcgagggggacttgcgccagatcaggttaggctatctccagcagcagcatctgaggagctggcaccagaggtggggacacttcgactgtgaggagcaggcaggggtcagcaccatgtaagagaaaggggctggcaatggagaccaacatgcaaagcacagatgatgccaatgagaggctgcaatggcgaaagaaaggaagcatcagaaaggatatgccgaggattaatttggaagagatggcttgactcacaacatgttggaaatgatacattgtcattggaggcgccaggaaatctgcaaagttagatgccgaggcgttccaactgttgatatgaagaatctctgttatcatcttgaggagaagtcaggtggaaaagtcattcaccgagtaggcggcgttgtttttctatatagaggaagacattatgatcctaagacccgtcctcgctatccactaatgctctggaaacctgcaactcctgtatatccaaaactcatcaaagaagctccagatgggtttacaaaagaagaagcggatgaaatgagaagaaaagggcgtgatctgctgccaatctgtaaattagccaaaaatggaatatacatcactcttgtcaaggatgtgcgagatgcttttgaaggaagtgacctggtgaagattgactgtgagggtttgaatccaagtgactacaaaaagattggagcgaaactaagggatcttgttccctgtgttcttttatcatttgatgatgagcagatattgatgcacagaggcaaagaatggaaatccagatactcgaagcctcttactctcattccaaaagttccaaagaataatctggcaatgacatctgtcatgaatagttcagatgaagttagtgatgccaacactcaagttgcgataagagaagtattgagacccaaaatgttcaaattatggaagagtgcggtggactcgtctctggcattgctgctggatgacgccgaagcaaataatctcacacccgattcgctcctgactctggttgaggagttcagcgtgacatctcaggcggtggagcactcatttcctgctctgcttgtgaccaatggtgatgcgagcaccgactctctaagtgcagagtacatgaatgacgagcctgaaacaagcgttgctggaaacgaagagggccagctggagcagtcacctgatctccgtgacgatgaacattttgatgtcgacatgtttgagcgtctggagtcatctgtgccattgggatcgctgcctattgacagcatgatagagcggctgaacagtgagtgaagtacagcgagcagttcgttctgtccactgggataactactgatggtcagattgcaatctcggatcgtgtgatgcattatctacgttcctccggaccctcagtctggtgataatctcaagatccgagaatttcctgcgatttggtagcaaacgtgatgtaaagaaactaactgtagtatgcaagtgcgccatgcatttggcaaacgcaccaacggataacacgtctcgtttgccatcgtcaatgagtgcgcttgcatgtatatgaatatctgcatttatactgtgtttaccaaaaaaaaaagtattgtgccatgctccaaaaagatgcggagctagcagtgtcagaagtctataaactctatagtaatttatacttctgcattttctgaatatttttgaaaataaagaat

SEQ ID NO: 221636 - DNA, 1336 bp, Zea Mays
aagaaaggaagcatcagaaaggatatgccgaggattaatttggaagacattatgatcctaagacccgtcctcgctatccactaatgctctggaaacctgcaactcctgtatatccaaaactcatcaaagaagctccagatgggtttacaaaagaagaagcggatgaaatgagaagaaaagggcgtgatctgctgccaatctgtaaattagccaaaaatggaatatacatcactcttgtcaaggatgtgcgagatgcttttgaaggaagtgacctggtgaagattgactgtgagggtttgaatccaagtgactacaaaaagattggagcgaaactaagggatcttgttccctgtgttcttttatcatttgatgatgagcagatattgatgcacagaggcaaagaatggaaatccagatactcgaagcctcttactctcattccaaaagttccaaagaataatctggcaatgacatctgtcatgaatagttcagatgaagttagtgatgccaacactcaagttgcgataagagaagtattgagacccaaaatgttcaaattatggaagagtgcggtggactcgtctctggcattgctgctggatgacgccgaagcaaataatctcacacccgattcgctcctgactctggttgaggagttcagcgtgacatctcaggcggtggagcactcatttcctgctctgcttgtgaccaatggtgatgcgagcaccgactctctaagtgcagagtacatgaatgacgagcctgaaacaagcgttgctggaaacgaagagggccagctggagcagtcacctgatctccgtgacgatgaacattttgatgtcgacatgtttgagcgtctggagtcatctgtgccattgggatcgctgcctattgacagcatgatagagcggctgaacagtgagtgaagtacagcgagcagttcgttctgtccactgggataactactgatggtcagattgcaatctcggatcgtgtgatgcattatctacgttcctccggaccctcagtctggtgataatctcaagatccgagaatttcctgcgatttggtagcaaacgtgatgtaaagaaactaactgtagtatgcaagtgcgccatgcatttggcaaacgcaccaacggataacacgtctcgtttgccatcgtcaatgagtgcgcttgcatgtatatgaatatctgcatttatactgtgtttaccaaaaaaaaaagtattgtgccatgctccaaaaagatgcggagctagcagtgtcagaagtctataaactctatagtaatttatacttctgcattttctgaatatttttgaaaataaagaat

SEQ ID NO: 221637 - DNA, 1819 bp, Zea Mays
cgaccagcgtcatcagcacatgctttataattaccatcctacgaccccaatctttcccaaaaccaaaccacgcaaatctggcgaggtggccacccaccaaccccaccgatcttctttccctcgtctagagccccctgttcgagccccgaagtgaagcacaccaagcgccgatggaggcgccacagccttgggtgatcctacgtcgcgtcctcgtccgcaaggacccggaggcgaagcaggcagggcacccccccgccatctccactgcactgaggtcgccgccacgggtcaccaacctcgccgtggccgtgggcccaaacgctcaccccggccgccccgtccgtttctacgaggtcccctacctcgtcgccaccggcccctccgctctcctgtattgcttttacttcgacgtgatccccctcgtcaccgacgaactcttgctggcgcggcggttcgtcgcgcccgcggacgcaaagcgccagccaaccacgggctccgccgaccgcgtcccccggcgcaccgggtcgtcctccatgcccgttacctacaacatcaggaacgtcggcctcatccctggtttatctggcggctacgtgatcgccgagctccaggtcaccaagcgcagcaaccgggccaagctctttcgcctgatgtcaggcgatgaccgtcgctccgaggcgggccgcctcttcgagggcgacaggcaacggtggtacgagacggagctacactgccccttgcccaccatggaacgggagtgggctcctcagggcgtggtgtccctcgccaacaagctctggtggttcgacctctcgtgggggctcctcagctgcgaccctaacgacattgttcaccccgtcctgagctaccacaagcttcccccgggctgcgttttccttgagcccatggcgttcatccactacatccggtgcatctgcgtcagcgaaaacatgctgcggtacgtggagatggtccgaggcagcttccgagacggcatgtttgtcggcgaacagaaggtggtcatgtggacgttggtccccgttcccagcggcgacggtgacatcgagtggaagtggcacaaatcgtacgagatggacttcaaggacatctgggacgatgccatctacaaggcggctggtctgcctgcgctggtccctcaaatcgtgctcgtgagccccaggaaccacaatgtggtctacttctttcgagacaataggttgttcggcattgacgttccctcgcatcggctcgtgcacgtcctcgaggattgctacaagctggaagcgcccgttcacagtttgtccgtcttcccttgggacctgccatcttggattgctaacggtctcgtggaggatatgactactattccagaacaaggcggatcagcatcaacatctcaaggggctacttgagggacatgcagcaaggtgccaggtttaacagctaaccttttcgttggtggactgcgggtcctggtgaatgccgggcgtacttagatagggaatagatgatttttcgagtattgatctcagatatataggaactgcaccaagatttagatcattcttaatcttgccttagccttggacataattgctccaagtttagtcagctatatacattctttctttgaggatttaaagtgcaagcaacttggtggttgagattcttcatccttatacaacactttgggggttgcatttacctgccgattcttcttttaatcctcgtgcattccgggaccctattttgttctattgtttcctaccatgtactgcttctggtgttttattaattgtcgttttagagaaggttcgag

SEQ ID NO: 221638 - DNA, 994 bp, Zea Mays
cttcaagaagagaatggtgcgaggctgaaagtaaaggacagttggagaattgtcaaccaccgggatatcattccaacagtgccacgtcttatgggctattgccatgtggaagcaccagtttatcttaaatttggggacgcaaaagatgcaccggtaaataacagcattctagatgatgaagaccaaggtgacgtgataggggagtacacacctgatgttcttgttactgaatttatgaaaggcgagaagcaacttgtggaaaaactactgcaaacagaaataaatttactccgctcaatcagggatggttcggctcttatgcagcacatggaagacttctactatgtcacccttcttgaggtttttgagaactatttctgcttttctcataccaaattgtgtcaaaagctcctcaagaatgtgagatcaagttatcaagtggcagatactgccaatgatgaataccaattgacagcgtgatcctagtaaaactgcacagctgaacatcatggactgtgtttccctgcaaaaacttcatttctgaaggacactgaatggggctatgaaagtgtgcaatccttactcttagtggaaacatgaacaggcagaacagccttggacctcagtcaggatagaggaaatgaaactggtttcactggcggatatacttgtagcaccgtgtcaattggtagatatgttgtttgagctattttccgttgatgtagctagcacactttggaatatattgtatgatgtttgaaattctagaaaagttcatagacacctgggagaataactcaagaaatatccaagtccgttttggccaatattttttttcatggagaaacttgcacaccgtggtaggctaccggctacccaagggctgatagggtgtgttaatcgagtgtacgacctagataaaaatgttcaatgtgatggaactatatatcttgcatggaataaagtagcatcatgtaatttcggcattttttct

SEQ ID NO: 221639 - DNA, 1074 bp, Zea Mays
atcttattgatattttccattggtgaagcctatctattgcaattagtgtaataattgttagaatggatgcactaactaattcaaaccaaaagaaagtaaaggacagttggagaattgtcaaccaccgggatatcattccaacagtgccacgtcttatgggctattgccatgtggaagcaccagtttatcttaaatttggggacgcaaaagatgcaccggtatccatgttttactgtaccagacctccagttgtcaccaaaaacataaaattgcatttgtatgtgatacaggtaaataacagcattctagatgatgaagaccaaggtgacgtgataggggagtacacacctgatgttcttgttactgaatttatgaaaggcgagaagcaacttgtggaaaaactactgcaaacagaaataaatttactccgctcaatcagggatggttcggctcttatgcagcacatggaagacttctactatgtcacccttcttgagaatgtgagatcaagttatcaagtggcagatactgccaatgatgaataccaattgacagcgtgatcctagtaaaactgcacagctgaacatcatggactgtgtttccctgcaaaaacttcatttctgaaggacactgaatggggctatgaaagtgtgcaatccttactcttagtggaaacatgaacaggcagaacagccttggacctcagtcaggatagaggaaatgaaactggtttcactggcggatatacttgtagcaccgtgtcaattggtagatatgttgtttgagctattttccgttgatgtagctagcacactttggaatatattgtatgatgtttgaaattctagaaaagttcatagacacctgggagaataactcaagaaatatccaagtccgttttggccaatattttttttcatggagaaacttgcacaccgtggtaggctaccggctacccaagggctgatagggtgtgttaatcgagtgtacgacctagataaaaatgttcaatgtgatggaactatatatcttgcatggaataaagtagcatcatgtaatttcggcattttttct

SEQ ID NO: 221640 - DNA, 1030 bp, Zea Mays
ctatctattgcaattagtgtaataattgttagaatggatgcactaactaattcaaaccaaaagaaagtaaaggacagttggagaattgtcaaccaccgggatatcattccaacagtgccacgtcttatgggctattgccatgtggaagcaccagtttatcttaaatttggggacgcaaaagatgcaccggtaaataacagcattctagatgatgaagaccaaggtgacgtgataggggagtacacacctgatgttcttgttactgaatttatgaaaggcgagaagcaacttgtggaaaaactactgcaaacagaaataaatttactccgctcaatcagggatggttcggctcttatgcagcacatggaagacttctactatgtcacccttcttgaggtttttgagaactatttctgcttttctcataccaaattgtgtcaaaagctcctcaagaatgtgagatcaagttatcaagtggcagatactgccaatgatgaataccaattgacagcgtgatcctagtaaaactgcacagctgaacatcatggactgtgtttccctgcaaaaacttcatttctgaaggacactgaatggggctatgaaagtgtgcaatccttactcttagtggaaacatgaacaggcagaacagccttggacctcagtcaggatagaggaaatgaaactggtttcactggcggatatacttgtagcaccgtgtcaattggtagatatgttgtttgagctattttccgttgatgtagctagcacactttggaatatattgtatgatgtttgaaattctagaaaagttcatagacacctgggagaataactcaagaaatatccaagtccgttttggccaatattttttttcatggagaaacttgcacaccgtggtaggctaccggctacccaagggctgatagggtgtgttaatcgagtgtacgacctagataaaaatgttcaatgtgatggaactatatatcttgcatggaataaagtagcatcatgtaatttcggcattttttct

SEQ ID NO: 221641 - DNA, 2103 bp, Zea Mays
cgcaaagacaggcacccaccaagaataggcgtttgtcgtgtctcgtgcccgtgcctgtgaacctctcacgtgccgtgccggaatctcgcagccatcgatcgatccagcagatgtgccagccgccgcggccgcgccaagcccaagccgagctgacgatcctgatgcggttgaaaatttccacgaacatatagatcctcatcgtcgaccccatccgtggtgctcccggtgcgccaggctaccagagtccgacgcagacgtagctcccggccacagcagagcccacgccttgagcccttgacgcgctccgtgtgagtggagcgtacgggcgccggccggcggccagagaggaaacggatctaggaggctcagctgagtcgaggagatggaccgcaaagatgtcgggatcctcgccatggacatctacttcccgccctcctgcgtgcagcaggaggcacttgaggcccatgatggggcgagcaaagggaagtacaccattgggcttgggcaagattgcatggccttttgcagcgaggtggaggatgtcatctcaatgagtttgacggttgtcaattctctgctgaaaaaatacaagattgatcccaagttaatcggtcgcttggaggttggaagtgaaacagttatagacaaaagtaaatccatcaaaacttggctgatgcagatctttgaggaaagtggtaacagtgacattgaaggtgttgactccagcaatgcatgttatggcgggacagcagccctactgaattgtgtgaattgggtcgaaagtaattcctgggatggccgttatggtcttgtcgtttgcacggatagcgcggtttatgccgaagggccagctcgtccaacaggaggtgctgctgctatagcaatgctcattggtcctaatgctccaatttccttcgagagcaaatatagagcttctcacatggctcatgtctatgatttctacaaacctgatcttgcaagtgaatatccggttgttgatggtaaactatcccaaacatgctacctaatggctctagactcatgctacagacagttctgcaacaagtatgagaagattgcgggtaaacaattctcaatttgtgatgcagaatattttgtgttccattctccatacaacaagctcgtgcagaagagtttcgctcgactttattacaatgactttttgcgcaactgcagctctgttgatgatgatgctaaagagaagctccagtctttttcaaatttgactggtgaagagagctaccagagtcgcgacttggaaaaggcctcacaacaggtcgcgaagcacctccatgacatcaaagttcagccatcgactctgcttccgaaacaaattggtaacataatgggcaaagaattgtgatgttctcttacggcagtggtttgacatccactatgttttcattgaggctaaacaatggccagcatcccttcagcctatcaaacattgcttcagttcttgatgtcaccgagaagcttcagtcaagacatgagactttgcctgagaaattcgttgagacactgaagctgatggaacaccgatacggcgcaaaggacttcgagacgagcagagacacgagcctactgcagccgggcacattctacctcaccaaggtcgactccatgtaccggaggttctattcccagaagctgtccgaggaaacaggcggcgggaaaaccaagtgctgcaacggcctcgcaaatggccactagtggtcgcccagcactgttgctcatcattctcagtattttgataatgctcatggttagcgtttagtctagcgtgtttctgaaataatataattgttctttgaagctgtcccaccccacctagatcagctagttttttattttaatattttattcttctgaacattgaaattcatcagtctctacattgtttctctttgtttcttcttttagtactctcttcgttccaaattctaaattacgtacataatgtttgctatgtctaatagtaaaaaaaaagtcaacaccttataatttagagttagagtggaaatgtggaatgtggcaaataacaaggccataggcctattgacaaagtgatgcatgtgtggc

SEQ ID NO: 221642 - DNA, 2096 bp, Zea Mays
cgcaaagacaggcacccaccaagaataggcgtttgtcgtgtctcgtgcccgtgcctgtgaacctctcacgtgccgtgccggaatctcgcagccatcgatcgatccagcagatgtgccagccgccgcggccgcgccaagcccaagccgagctgacgatcctgatgcggttgaaaatttccacgaacatatagatcctcatcgtcgaccccatccgtggtgctcccggtgcgccaggctaccagagtccgacgcagacgtagctcccggccacagcagagcccacgccttgagcccttgacgcgctccgtgtgagtggagcgtacgggcgccggccggcggccagagaggaaacggatctaggaggctcagctgagtcgaggagatggaccgcaaagatgtcgggatcctcgccatggacatctacttcccgccctcctgcgtgcagcaggaggcacttgaggcccatgatggggcgagcaaagggaagtacaccattgggcttgggcaagattgcatggccttttgcagcgaggtggaggatgtcatctcaatgagtttgacggttgtcaattctctgctgaaaaaatacaagattgatcccaagttaatcggtcgcttggaggttggaagtgaaacagttatagacaaaagtaaatccatcaaaacttggctgatgcagatctttgaggaaagtggtaacagtgacattgaaggtgttgactccagcaatgcatgttatggcgggacagcagccctactgaattgtgtgaattgggtcgaaagtaattcctgggatggccgttatggtcttgtcgtttgcacggatagcgcggtttatgccgaagggccagctcgtccaacaggaggtgctgctgctatagcaatgctcattggtcctaatgctccaatttccttcgagagcaaatatagagcttctcacatggctcatgtctatgatttctacaaacctgatcttgcaagtgaatatccggttgttgatggtaaactatcccaaacatgctacctaatggctctagactcatgctacagacagttctgcaacaagtatgagaagattgcgggtaaacaattctcaatttgtgatgcagaatattttgtgttccattctccatacaacaagctcgtgcagaagagtttcgctcgactttattacaatgactttttgcgcaactgcagctctgttgatgatgatgctaaagagaagctccagtctttttcaaatttgactggtgaagagagctaccagagtcgcgacttggaaaaggcctcacaacaggtcgcgaagcacctccatgacatcaaagttcagccatcgactctgcttccgaaacaaattgaatgggcaaagaattgtgatgttctcttacggcagtggtttgacatccactatgttttcattgaggctaaacaatggccagcatcccttcagcctatcaaacattgcttcagttcttgatgtcaccgagaagcttcagtcaagacatgagactttgcctgagaaattcgttgagacactgaagctgatggaacaccgatacggcgcaaaggacttcgagacgagcagagacacgagcctactgcagccgggcacattctacctcaccaaggtcgactccatgtaccggaggttctattcccagaagctgtccgaggaaacaggcggcgggaaaaccaagtgctgcaacggcctcgcaaatggccactagtggtcgcccagcactgttgctcatcattctcagtattttgataatgctcatggttagcgtttagtctagcgtgtttctgaaataatataattgttctttgaagctgtcccaccccacctagatcagctagttttttattttaatattttattcttctgaacattgaaattcatcagtctctacattgtttctctttgtttcttcttttagtactctcttcgttccaaattctaaattacgtacataatgtttgctatgtctaatagtaaaaaaaaagtcaacaccttataatttagagttagagtggaaatgtggaatgtggcaaataacaaggccataggcctattgacaaagtgatgcatgtgtggc

SEQ ID NO: 221643 - DNA, 2092 bp, Zea Mays
gtcgtgtctcgtgcccgtgcctgtgaacctctcacgtgccgtgccggaatctcgcagccatcgatcgatccagcagatgtgccagccgccgcggccgcgccaagcccaagccgagctgacgatcctgatgcggttgaaaatttccacgaacatatagatcctcatcgtcgaccccatccgtggtgctcccggtgcgccaggctaccagagtccgacgcagacgtagctcccggccacagcagagcccacgccttgagcccttgacgcgctccgtgtgagtggagcgtacgggcgccggccggcggccagagaggaaacggatctaggaggctcagctgagtcgaggagatggaccgcaaagatgtcgggatcctcgccatggacatctacttcccgccctcctgcgtgcagcaggaggcacttgaggcccatgatggggcgagcaaagggaagtacaccattgggcttgggcaagattgcatggccttttgcagcgaggtggaggatgtcatctcaatgagtttgacggttgtcaattctctgctgaaaaaatacaagattgatcccaagttaatcggtcgcttggaggttggaagtgaaacagttatagacaaaagaaagtggtaacagtgacattgaaggtgttgactccagcaatgcatgttatggcgggacagcagccctactgaattgtgtgaattgggtcgaaagtaattcctgggatggccgttatggtcttgtcgtttgcacggatagcgcggtttatgccgaagggccagctcgtccaacaggaggtgctgctgctatagcaatgctcattggtcctaatgctccaatttccttcgagagcaaatatagagcttctcacatggctcatgtctatgatttctacaaacctgatcttgcaagtgaatatccggttgttgatggtaaactatcccaaacatgctacctaatggctctagactcatgctacagacagttctgcaacaagtatgagaagattgcgggtaaacaattctcaatttgtgatgcagaatattttgtgttccattctccatacaacaagctcgtgcagaagagtttcgctcgactttattacaatgactttttgcgcaactgcagctctgttgatgatgatgctaaagagaagctccagtctttttcaaatttgactggtgaagagagctaccagagtcgcgacttggaaaaggcctcacaacaggtcgcgaagcacctccatgacatcaaagttcagccatcgactctgcttccgaaacaaattggtaacatgtatactgcatccctttatgctgcattagcatctgtgctatataacaagcatgatagtctgaatgggcaaagaattgtgatgttctcttacggcagtggtttgacatccactatgttttcattgaggctaaacaatggccagcatcccttcagcctatcaaacattgcttcagttcttgatgtcaccgagaagcttcagtcaagacatgagactttgcctgagaaattcgttgagacactgaagctgatggaacaccgatacggcgcaaaggacttcgagacgagcagagacacgagcctactgcagccgggcacattctacctcaccaaggtcgactccatgtaccggaggttctattcccagaagctgtccgaggaaacaggcggcgggaaaaccaagtgctgcaacggcctcgcaaatggccactagtggtcgcccagcactgttgctcatcattctcagtattttgataatgctcatggttagcgtttagtctagcgtgtttctgaaataatataattgttctttgaagctgtcccaccccacctagatcagctagttttttattttaatattttattcttctgaacattgaaattcatcagtctctacattgtttctctttgtttcttcttttagtactctcttcgttccaaattctaaattacgtacataatgtttgctatgtctaatagtaaaaaaaaagtcaacaccttataatttagagttagagtggaaatgtggaatgtggcaaataacaaggccataggcctattgacaaagtgatgcatgtgtggc

SEQ ID NO: 221644 - DNA, 1997 bp, Zea Mays
gtcgtgtctcgtgcccgtgcctgtgaacctctcacgtgccgtgccggaatctcgcagccatcgatcgatccagcagatgtgccagccgccgcggccgcgccaagcccaagccgagctgacgatcctgatgcggttgaaaatttccacgaacatatagatcctcatcgtcgaccccatccgtggtgctcccggtgcgccaggctaccagagtccgacgcagacgtagctcccggccacagcagagcccacgccttgagcccttgacgcgctccgtgtgagtggagcgtacgggcgccggccggcggccagagaggaaacggatctaggaggctcagctgagtcgaggagatggaccgcaaagatgtcgggatcctcgccatggacatctacttcccgccctcctgcgtgcagcaggaggcacttgaggcccatgatggggcgagcaaagggaagtacaccattgggcttgggcaagattgcatggccttttgcagcgaggtggaggatgtcatctcaatgagtttgacggttgtcaattctctgctgaaaaaatacaagattgatcccaagttaatcggtcgcttggaggttggaagtgaaacagttatagacaaaagtaaatccatcaaaacttggctgatgcagatctttgaggaaagtggtaacagtgacattgaaggtgttgactccagcaatgcatgttatggcgggacagcagccctactgaattgtgtgaattgggtcgaaagtaattcctgggatggccgttatggtcttgtcgtttgcacggatagcgcggtttatgccgaagggccagctcgtccaacaggaggtgctgctgctatagcaatgctcattggtcctaatgctccaatttccttcgagagcaaatatagagcttctcacatggctcatgtctatgatttctacaaacctgatcttgcaagtgaatatccggttgttgatggtaaactatcccaaacatgctacctaatggctctagactcatgctacagacagttctgcaacaagtatgagaagattgcgggtaaacaattctcaatttgtgatgcagaatattttgtgttccattctccatacaacaagctcgtgcagaagagtttcgctcgactttattacaatgactttttgcgcaactgcagctctgttgatgatgatgctaaagagaagctccagtctttttcaaatttgactggtgaagagagctaccagagtcgcgacttggaaaaggcctcacaacaggtcgcgaagcacctccatgacatcaaagttcagccatcgactctgcttccgaaacaaattggctaaacaatggccagcatcccttcagcctatcaaacattgcttcagttcttgatgtcaccgagaagcttcagtcaagacatgagactttgcctgagaaattcgttgagacactgaagctgatggaacaccgatacggcgcaaaggacttcgagacgagcagagacacgagcctactgcagccgggcacattctacctcaccaaggtcgactccatgtaccggaggttctattcccagaagctgtccgaggaaacaggcggcgggaaaaccaagtgctgcaacggcctcgcaaatggccactagtggtcgcccagcactgttgctcatcattctcagtattttgataatgctcatggttagcgtttagtctagcgtgtttctgaaataatataattgttctttgaagctgtcccaccccacctagatcagctagttttttattttaatattttattcttctgaacattgaaattcatcagtctctacattgtttctctttgtttcttcttttagtactctcttcgttccaaattctaaattacgtacataatgtttgctatgtctaatagtaaaaaaaaagtcaacaccttataatttagagttagagtggaaatgtggaatgtggcaaataacaaggccataggcctattgacaaagtgatgcatgtgtggc

SEQ ID NO: 221645 - DNA, 1992 bp, Zea Mays
gtctcgtgcccgtgcctgtgaacctctcacgtgccgtgccggaatctcgcagccatcgatcgatccagcagatgtgccagccgccgcggccgcgccaagcccaagccgagctgacgatcctgatgcggttgaaaatttccacgaacatatagatcctcatcgtcgaccccatccgtggtgctcccggtgcgccaggctaccagagtccgacgcagacgtagctcccggccacagcagagcccacgccttgagcccttgacgcgctccgtgtgagtggagcgtacgggcgccggccggcggccagagaggaaacggatctaggaggctcagctgagtcgaggagatggaccgcaaagatgtcgggatcctcgccatggacatctacttcccgccctcctgcgtgcagcaggaggcacttgaggcccatgatggggcgagcaaagggaagtacaccattgggcttgggcaagattgcatggccttttgcagcgaggtggaggatgtcatctcaatgaggaaagtggtaacagtgacattgaaggtgttgactccagcaatgcatgttatggcgggacagcagccctactgaattgtgtgaattgggtcgaaagtaattcctgggatggccgttatggtcttgtcgtttgcacggatagcgcggtttatgccgaagggccagctcgtccaacaggaggtgctgctgctatagcaatgctcattggtcctaatgctccaatttccttcgagagcaaatatagagcttctcacatggctcatgtctatgatttctacaaacctgatcttgcaagtgaatatccggttgttgatggtaaactatcccaaacatgctacctaatggctctagactcatgctacagacagttctgcaacaagtatgagaagattgcgggtaaacaattctcaatttgtgatgcagaatattttgtgttccattctccatacaacaagctcgtgcagaagagtttcgctcgactttattacaatgactttttgcgcaactgcagctctgttgatgatgatgctaaagagaagctccagtctttttcaaatttgactggtgaagagagctaccagagtcgcgacttggaaaaggcctcacaacaggtcgcgaagcacctccatgacatcaaagttcagccatcgactctgcttccgaaacaaattggtaacatgtatactgcatccctttatgctgcattagcatctgtgctatataacaagcatgatagtctgaatgggcaaagaattgtgatgttctcttacggcagtggtttgacatccactatgttttcattgaggctaaacaatggccagcatcccttcagcctatcaaacattgcttcagttcttgatgtcaccgagaagcttcagtcaagacatgagactttgcctgagaaattcgttgagacactgaagctgatggaacaccgatacggcgcaaaggacttcgagacgagcagagacacgagcctactgcagccgggcacattctacctcaccaaggtcgactccatgtaccggaggttctattcccagaagctgtccgaggaaacaggcggcgggaaaaccaagtgctgcaacggcctcgcaaatggccactagtggtcgcccagcactgttgctcatcattctcagtattttgataatgctcatggttagcgtttagtctagcgtgtttctgaaataatataattgttctttgaagctgtcccaccccacctagatcagctagttttttattttaatattttattcttctgaacattgaaattcatcagtctctacattgtttctctttgtttcttcttttagtactctcttcgttccaaattctaaattacgtacataatgtttgctatgtctaatagtaaaaaaaaagtcaacaccttataatttagagttagagtggaaatgtggaatgtggcaaataacaaggccataggcctattgacaaagtgatgcatgtgtggc

SEQ ID NO: 221646 - DNA, 2097 bp, Zea Mays
cacgtgccgtgccggaatctcgcagccatcgatcgatccagcagatgtgccagccgccgcggccgcgccaagcccaagccgagctgacgatcctgatgcggttgaaaatttccacgaacatatagatcctcatcgtcgaccccatccgtggtgctcccggtgcgccaggctaccagagtccgacgcagacgtagctcccggccacagcagagcccacgccttgagcccttgacgcgctccgtgtgagtggagcgtacgggcgccggccggcggccagagaggaaacggatctaggaggctcagctgagtcgaggagatggaccgcaaagatgtcgggatcctcgccatggacatctacttcccgccctcctgcgtgcagcaggaggcacttgaggcccatgatggggcgagcaaagggaagtacaccattgggcttgggcaagattgcatggccttttgcagcgaggtggaggatgtcatctcaatgagttgacggttgtcaattctctgctgaaaaaatacaagattgatcccaagttaatcggtcgcttggaggttggaagtgaaacagttatagacaaaagtaaatccatcaaaacttggctgatgcagatctttgaggaaagtggtaacagtgacattgaaggtgttgactccagcaatgcatgttatggcgggacagcagccctactgaattgtgtgaattgggtcgaaagtaattcctgggatggccgttatggtcttgtcgtttgcacggatagcgcggtttatgccgaagggccagctcgtccaacaggaggtgctgctgctatagcaatgctcattggtcctaatgctccaatttccttcgagagcaaatatagagcttctcacatggctcatgtctatgatttctacaaacctgatcttgcaagtgaatatccggttgttgatggtaaactatcccaaacatgctacctaatggctctagactcatgctacagacagttctgcaacaagtatgagaagattgcgggtaaacaattctcaatttgtgatgcagaatattttgtgttccattctccatacaacaagctcgtgcagaagagtttcgctcgactttattacaatgactttttgcgcaactgcagctctgttgatgatgatgctaaagagaagctccagtctttttcaaatttgactggtgaagagagctaccagagtcgcgacttggaaaaggcctcacaacaggtcgcgaagcacctccatgacatcaaagttcagccatcgactctgcttccgaaacaaattggtaacatgtatactgcatccctttatgctgcattagcatctgtgctatataacaagcatgatagtctgaatgggcaaagaattgtgatgttctcttacggcagtggtttgacatccactatgttttcattgaggctaaacaatggccagcatcccttcagcctatcaaacattgcttcagttcttgatgtcaccgagaagcttcagtcaagacatgagactttgcctgagaaattcgttgagacactgaagctgatggaacaccgatacggcgcaaaggacttcgagacgagcagagacacgagcctactgcagccgggcacattctacctcaccaaggtcgactccatgtaccggaggttctattcccagaagctgtccgaggaaacaggcggcgggaaaaccaagtgctgcaacggcctcgcaaatggccactagtggtcgcccagcactgttgctcatcattctcagtattttgataatgctcatggttagcgtttagtctagcgtgtttctgaaataatataattgttctttgaagctgtcccaccccacctagatcagctagttttttattttaatattttattcttctgaacattgaaattcatcagtctctacattgtttctctttgtttcttcttttagtactctcttcgttccaaattctaaattacgtacataatgtttgctatgtctaatagtaaaaaaaaagtcaacaccttataatttagagttagagtggaaatgtggaatgtggcaaataacaaggccataggcctattgacaaagtgatgcatgtgtggc

SEQ ID NO: 221647 - DNA, 1965 bp, Zea Mays
catcgatcgatccagcagatgtgccagccgccgcggccgcgccaagcccaagccgagctgacgatcctgatgcggttgaaaatttccacgaacatatagatcctcatcgtcgaccccatccgtggtgctcccggtgcgccaggctaccagagtccgacgcagacgtagctcccggccacagcagagcccacgccttgagcccttgacgcgctccgtgtgagtggagcgtacgggcgccggccggcggccagagaggaaacggatctaggaggctcagctgagtcgaggagatggaccgcaaagatgtcgggatcctcgccatggacatctacttcccgccctcctgcgtgcagcagtttgacggttgtcaattctctgctgaaaaaatacaagattgatcccaagttaatcggtcgcttggaggttggaagtgaaacagttatagacaaaagtaaatccatcaaaacttggctgatgcagatctttgaggaaagtggtaacagtgacattgaaggtgttgactccagcaatgcatgttatggcgggacagcagccctactgaattgtgtgaattgggtcgaaagtaattcctgggatggccgttatggtcttgtcgtttgcacggatagcgcggtttatgccgaagggccagctcgtccaacaggaggtgctgctgctatagcaatgctcattggtcctaatgctccaatttccttcgagagcaaatatagagcttctcacatggctcatgtctatgatttctacaaacctgatcttgcaagtgaatatccggttgttgatggtaaactatcccaaacatgctacctaatggctctagactcatgctacagacagttctgcaacaagtatgagaagattgcgggtaaacaattctcaatttgtgatgcagaatattttgtgttccattctccatacaacaagctcgtgcagaagagtttcgctcgactttattacaatgactttttgcgcaactgcagctctgttgatgatgatgctaaagagaagctccagtctttttcaaatttgactggtgaagagagctaccagagtcgcgacttggaaaaggcctcacaacaggtcgcgaagcacctccatgacatcaaagttcagccatcgactctgcttccgaaacaaattggtaacatgtatactgcatccctttatgctgcattagcatctgtgctatataacaagcatgatagtctgaatgggcaaagaattgtgatgttctcttacggcagtggtttgacatccactatgttttcattgaggctaaacaatggccagcatcccttcagcctatcaaacattgcttcagttcttgatgtcaccgagaagcttcagtcaagacatgagactttgcctgagaaattcgttgagacactgaagctgatggaacaccgatacggcgcaaaggacttcgagacgagcagagacacgagcctactgcagccgggcacattctacctcaccaaggtcgactccatgtaccggaggttctattcccagaagctgtccgaggaaacaggcggcgggaaaaccaagtgctgcaacggcctcgcaaatggccactagtggtcgcccagcactgttgctcatcattctcagtattttgataatgctcatggttagcgtttagtctagcgtgtttctgaaataatataattgttctttgaagctgtcccaccccacctagatcagctagttttttattttaatattttattcttctgaacattgaaattcatcagtctctacattgtttctctttgtttcttcttttagtactctcttcgttccaaattctaaattacgtacataatgtttgctatgtctaatagtaaaaaaaaagtcaacaccttataatttagagttagagtggaaatgtggaatgtggcaaataacaaggccataggcctattgacaaagtgatgcatgtgtggc

SEQ ID NO: 221648 - DNA, 1987 bp, Zea Mays
gccgcggccgcgccaagcccaagccgagctgacgatcctgatgcggttgaaaatttccacgaacatatagatcctcatcgtcgaccccatccgtggtgctcccggtgcgccaggctaccagagtccgacgcagacgtagctcccggccacagcagagcccacgccttgagcccttgacgcgctccgtgtgagtggagcgtacgggcgccggccggcggccagagaggaaacggatctaggaggctcagctgagtcgaggagatggaccgcaaagatgtcgggatcctcgccatggacatctacttcccgccctcctgcgtgcagcaggaggcacttgaggcccatgatggggcgagcaaagggaagtacaccattgggcttgggcaagattgcatggccttttgcagcgaggtggaggatgtcatctcaatgagtttgacggttgtcaattctctgctgaaaaaatacaagattgatcccaagttaatcggtcgcttggaggttggaagtgaaacagttatagacaaaagtaaatccatcaaaacttggctgatgcagatctttgaggaaagtggtaacagtgacattgaaggtgttgactccagcaatgcatgttatggcgggacagcagccctactgaattgtgtgaattgggtcgaaagtaattcctgggatggccgttatggtcttgtcgtttgcacggatagcgcggtttatgccgaagggccagctcgtccaacaggaggtgctgctgctatagcaatgctcattggtcctaatgctccaatttccttcgagagcaaatatagagcttctcacatggctcatgtctatgatttctacaaacctgatcttgcaagtgaatatccggttgttgatggtaaactatcccaaacatgctacctaatggctctagactcatgctacagacagttctgcaacaagtatgagaagattgcgggtaaacaattctcaatttgtgatgcagaatattttgtgttccattctccatacaacaagctctgttgatgatgatgctaaagagaagctccagtctttttcaaatttgactggtgaagagagctaccagagtcgcgacttggaaaaggcctcacaacaggtcgcgaagcacctccatgacatcaaagttcagccatcgactctgcttccgaaacaaattggtaacatgtatactgcatccctttatgctgcattagcatctgtgctatataacaagcatgatagtctgaatgggcaaagaattgtgatgttctcttacggcagtggtttgacatccactatgttttcattgaggctaaacaatggccagcatcccttcagcctatcaaacattgcttcagttcttgatgtcaccgagaagcttcagtcaagacatgagactttgcctgagaaattcgttgagacactgaagctgatggaacaccgatacggcgcaaaggacttcgagacgagcagagacacgagcctactgcagccgggcacattctacctcaccaaggtcgactccatgtaccggaggttctattcccagaagctgtccgaggaaacaggcggcgggaaaaccaagtgctgcaacggcctcgcaaatggccactagtggtcgcccagcactgttgctcatcattctcagtattttgataatgctcatggttagcgtttagtctagcgtgtttctgaaataatataattgttctttgaagctgtcccaccccacctagatcagctagttttttattttaatattttattcttctgaacattgaaattcatcagtctctacattgtttctctttgtttcttcttttagtactctcttcgttccaaattctaaattacgtacataatgtttgctatgtctaatagtaaaaaaaaagtcaacaccttataatttagagttagagtggaaatgtggaatgtggcaaataacaaggccataggcctattgacaaagtgatgcatgtgtggc

SEQ ID NO: 221649 - DNA, 1916 bp, Zea Mays
cagagtccgacgcagacgtagctcccggccacagcagagcccacgccttgagcccttgacgcgctccgtgtgagtggagcgtacgggcgccggccggcggccagagaggaaacggatctaggaggctcagctgagtcgaggagatggaccgcaaagatgtcgggatcctcgccatggacatctacttcccgccctcctgcgtgcagcaggaggcacttgaggcccatgatggggcgagcaaagggaagtacaccattgggcttgggcaagattgcatggccttttgcagcgaggtggaggatgtcatctcaatgagtttgacggttgtcaattctctgctgaaaaaatacaagattgatcccaagttaatcggtcgcttggaggttggaagtgaaacagttatagacaaaagtaaatccatcaaaacttggctgatgcagatctttgaggaaagtggtaacagtgacattgaaggtgttgactccagcaatgcatgttatggcgggacagcagccctactgaattgtgtgaattgggtcgaaagtaattcctgggatggccgttatggtcttgtcgtttgcacggatagcgcggtttatgccgaagggccagctcgtccaacaggaggtgctgctgctatagcaatgctcattggtcctaatgctccaatttccttcgagagcaaatatagagcttctcacatggctcatgtctatgatttctacaaacctgatcttgcaagtgaatatccggttgttgatggtaaactatcccaaacatgctacctaatggctctagactcatgctacagacagttctgcaacaagtatgagaagattgcgggtaaacaattctcaatttgtgatgcagaatattttgtgttccattctccatacaacaagaagagtttcgctcgactttattacaatgactttttgcgcaactgcagctctgttgatgatgatgctaaagagaagctccagtctttttcaaatttgactggtgaagagagctaccagagtcgcgacttggaaaaggcctcacaacaggtcgcgaagcacctccatgacatcaaagttcagccatcgactctgcttccgaaacaaattggtaacatgtatactgcatccctttatgctgcattagcatctgtgctatataacaagcatgatagtctgaatgggcaaagaattgtgatgttctcttacggcagtggtttgacatccactatgttttcattgaggctaaacaatggccagcatcccttcagcctatcaaacattgcttcagttcttgatgtcaccgagaagcttcagtcaagacatgagactttgcctgagaaattcgttgagacactgaagctgatggaacaccgatacggcgcaaaggacttcgagacgagcagagacacgagcctactgcagccgggcacattctacctcaccaaggtcgactccatgtaccggaggttctattcccagaagctgtccgaggaaacaggcggcgggaaaaccaagtgctgcaacggcctcgcaaatggccactagtggtcgcccagcactgttgctcatcattctcagtattttgataatgctcatggttagcgtttagtctagcgtgtttctgaaataatataattgttctttgaagctgtcccaccccacctagatcagctagttttttattttaatattttattcttctgaacattgaaattcatcagtctctacattgtttctctttgtttcttcttttagtactctcttcgttccaaattctaaattacgtacataatgtttgctatgtctaatagtaaaaaaaaagtcaacaccttataatttagagttagagtggaaatgtggaatgtggcaaataacaaggccataggcctattgacaaagtgatgcatgtgtggc

SEQ ID NO: 221650 - DNA, 1758 bp, Zea Mays
ggctagatgggtctcatgggtggaattgtcgccacttgttgggaggcacttgaggcccatgatggggcgagcaaagggaagtacaccattgggcttgggcaagattgcatggccttttgcagcgaggtggaggatgtcatctcaatgagtttgacggttgtcaattctctgctgaaaaaatacaagattgatcccaagttaatcggtcgcttggaggttggaagtgaaacagttatagacaaaagtaaatccatcaaaacttggctgatgcagatctttgaggaaagtggtaacagtgacattgaaggtgttgactccagcaatgcatgttatggcgggacagcagccctactgaattgtgtgaattgggtcgaaagtaattcctgggatggccgttatggtcttgtcgtttgcacggatagcgcggtttatgccgaagggccagctcgtccaacaggaggtgctgctgctatagcaatgctcattggtcctaatgctccaatttccttcgagagcaaatatagagcttctcacatggctcatgtctatgatttctacaaacctgatcttgcaagtgaatatccggttgttgatggtaaactatcccaaacatgctacctaatggctctagactcatgctacagacagttctgcaacaagtatgagaagattgcgggtaaacaattctcaatttgtgatgcagaatattttgtgttccattctccatacaacaagctcgtgcagaagagtttcgctcgactttattacaatgactttttgcgcaactgcagctctgttgatgatgatgctaaagagaagctccagtctttttcaaatttgactggtgaagagagctaccagagtcgcgacttggaaaaggcctcacaacaggtcgcgaagcacctccatgacatcaaagttcagccatcgactctgcttccgaaacaaattggtaacatgtatactgcatccctttatgctgcattagcatctgtgctatataacaagcatgatagtctgaatgggcaaagaattgtgatgttctcttacggcagtggtttgacatccactatgttttcattgaggctaaacaatggccagcatcccttcagcctatcaaacattgcttcagttcttgatgtcaccgagaagcttcagtcaagacatgagactttgcctgagaaattcgttgagacactgaagctgatggaacaccgatacggcgcaaaggacttcgagacgagcagagacacgagcctactgcagccgggcacattctacctcaccaaggtcgactccatgtaccggaggttctattcccagaagctgtccgaggaaacaggcggcgggaaaaccaagtgctgcaacggcctcgcaaatggccactagtggtcgcccagcactgttgctcatcattctcagtattttgataatgctcatggttagcgtttagtctagcgtgtttctgaaataatataattgttctttgaagctgtcccaccccacctagatcagctagttttttattttaatattttattcttctgaacattgaaattcatcagtctctacattgtttctctttgtttcttcttttagtactctcttcgttccaaattctaaattacgtacataatgtttgctatgtctaatagtaaaaaaaaagtcaacaccttataatttagagttagagtggaaatgtggaatgtggcaaataacaaggccataggcctattgacaaagtgatgcatgtgtggc

SEQ ID NO: 221651 - DNA, 3461 bp, Zea Mays
aacgctttgagcagaggaaggaggaacgaggaagggtttatagtttggattatatgattggatgatcggatggttagtagtttggattggaagattggatcacatcgcgtagtccacctctcctctccagtttccacgagaaaaaaagtggatcctctttcccaccaagtcaaggtttgtgaattcgggagtgctagaatcttgatcttccacaagagaatgtctccagaagcaatggataggcttctagaaaaagataaagtgccaaacccatgctatagagtatagactgagtttcaacattggaaggctcaactaaatataccagttccggatacacactacaggacaaaggtgcacagcacccgatagcgcgctgccttttttagtgtagaactagaaaaccaacgcacaacacaaaccagagagttctccatggacgtcggtggcggcgccaccggcacacgctgccgagaccccaccgctgacccctcgtcccagttcttcgttgacgctggccatccatacgcagtcgctgcagccactgcgctcacctcccaccgcaccaagtccaagtggtcccacctctcttcggtccccgtcccctcccccttcctggcctccgccgccgccggcgtgctcctcctcctccgccaccgaccgcacaccgcgctccgcttccatgccttcgccatccgccgcctccttccctcccgctcccctccccctctcgtcttctctgccgccgcagcccacgtcgcggcggcctcccgccttcggggccctgccctctccatccttgcctctgcctcccgccactgctcaccggcccagatcttcaatgccctcgctgccacctaccgctgctttgcctccgccccattcatcttcgacctcctcctcctcgcctaccttcgctcccgccgcgacgtcctcgctgcggcctccgtcgcccgccgcatcctcgctgccggcgcacggccgctcccctccactgcggcagctcttcttcgttcactcccttccgccaccgcggccctcgacatgtatcatcaaatctacacgcatccaagtccacggagcaatcacctcctcctgccgactgttcacaccttcaattccctcctccttgctttccaccgcgaaggcaagtgtgatgaattcaagattgtgctccaggaaatggacaaatattcctgcaagcacaacgtgtgcacctacagcatcaggatgtctgggtactgcaatggcgggcatgtggataaggcgcgaacactatgggatgagatgattcaggaagggatccagcctgatataactgcgtacaacacaatgattagtgggtattgccattctggggaggtaggggtggcagaggagatgtttaaaaatatgttgatgggtgggattgattcaagtgccacgacgttcgaatggttggtcagagggcattgtatggcacgggatgtcgaggcagcaatgcttgtgcgtgcagacatgaaaaggaaggggtttgggttggcgccagaggttgttgaggaattgctggatggattatgtcaaaatgggagggttgaggatggcttgagtgttttgcgagaggagatgaagagggaagaatttgtgccaacccggaggagttacgaggtgttgattatggggttttgtgatggagggaaggtggaggtggcaatcagactccaagcagagatggctggaaaaggattcactgctggcagcgaggtgtactatgcatttattagtgcttatgagaagtctgaaaattatgagatggtcgagaagttgaggaaggaaatgtcggcgatgggcacttagagcatgtctagcagctcaccaataattcatccctaataaaatggtattggtggtcaccaatagtgctttttttggaatattggggagactctatagtagattaccaataatctttcccaatacatgggacccacatgtcagaatagaggatgtgggaggaagaagatgacgacagttgttgtggtcccaacacctatagagggagatgcaactccccttttatttgaggggagatgggagatttgttttggtgaccaccaaaaaaagggagagctattggggagctgttggagcaatggaattgcctcatctcccccaatatgacagttttatggggatgagggatggtattggagagctactggatgctctatcggatctgatatttggcttggatattgcacagtgatgcatggatatcaacctcacctaattgcagttgagaactatggtaaatcacttatctttacatcactcctcttcctttgattaagttgcttagttttaaaaccagccatttgttctctcttgaatctgtttcttcttgtagtttgttatttgttctgcatggcatgttataaccatttatttcagaaaattttgatgtctagtattgaaacttgaaacttcaaataatccaaaattggtgctaacttgttctctaggtgagaggtgtgtaaagcttgtttgcttcaaaccgatggtaacaactggtatggaaacatcatgttagagcaggcattagttccatattccactcagtcacattcatctaaatgtaagcgtctattgtagttatgtagttggcatgaatatttatacctgtaaattatgattcatagatgatgaacaatcacttaaacaatataagtctggtgccaaatgctatttcagatgatacctaaatgttacagcacatagttttgatacatgcagggtatccttagaaaagcaagtaaattatgtaatagttgaaagataattctcaatatcatatgtcagatgttctttctggttcacttctctatctggttcacaattcattccagagtggtgcaacaaattctgaattggttgaaggagttctctcctagcactatcctggagacggatgttggagaaatatgactgctggatctgcaataggataatgtcttttagtcgatcccttttgtgcttgtttggtgaacttgtgtccccaatctgttgaactctgtaaacatttgctttccataaaagcagagatattctccttaaaaactcagtccagaatggtgatatatgaatgatccctgagagtttataaggtacaaccgtacaagtccaggtgctagagacttctcaatttgctggaaaatgctgtagtattttgtgttgacttgctgtttgatatatgctcagtacctcactgtaaaatgtggttctcttgtttgcctcttaacaaaatcctgagaaatgacatgagaacaaattgagaattagtagatcagtacttaactgcaaaacttttgtagttggaattaatttccagtctctagcaaagtagcaatagctgagagagctaaacttgagctattgtgtaatcgaaaatggaggcaccattgcagccaaacttatgaactaac

SEQ ID NO: 221652 - DNA, 3119 bp, Zea Mays
agcgttccagcggtatgacatgatcccacagaacgctttgagagtagcagaggaaggaggaacgaggaagggtttatagtttggattatatgattggatgatcggatggttagtagtttggattggaagattggatcacatcgcgtagtccacctctcctctccagtttccacgagaaaaaaagtggatcctctttcccaccaagtcaaggtttgtgaattcgggagtgctagaatcttgatcttccacaagagaatgtctccagaagcaatggataggcttctagaaaaagataaagtgccaaacccatgctatagagtatagactgaggtactgattttccttatctgatgaaccatctgcttggtgctgtgacgatctctaggatatgcgacttgttaaaatgattttgattgcttcgttggttacattagttctactattaccatgcattaatggccttcctgactatcatttggttatctcatgtttctgagaataaaagataaccattgctgtaaagtactaacgttgttgtgcgcttaatctgcatttgtatttgtttgccttattacacttgcttgcctttatcttgtgttttctatgtataagtgtgcaattttggcatttttgtttatctgttactgttgttctctacctacccacgttagataaatgattcacacggcactgtacaggattcaacactggcatgattctaattgaactttacctattactagcatcctaagtgatcccttcatttgtttgtttcagtttcaacattggaaggctcaactaaatataccagttccggatacacactacaggacaaaggaaatggacaaatattcctgcaagcacaacgtgtgcacctacagcatcaggatgtctgggtactgcaatggcgggcatgtggataaggcgcgaacactatgggatgagatgattcaggaagggatccagcctgatataactgcgtacaacacaatgattagtgggtattgccattctggggaggtaggggtggcagaggagatgtttaaaaatatgttgatgggtgggattgattcaagtgccacgacgttcgaatggttggtcagagggcattgtatggcacgggatgtcgaggcagcaatgcttgtgcgtgcagacatgaaaaggaaggggtttgggttggcgccagaggttgttgaggaattgctggatggattatgtcaaaatgggagggttgaggatggcttgagtgttttgcgagaggagatgaagagggaagaatttgtgccaacccggaggagttacgaggtgttgattatggggttttgtgatggagggaaggtggaggtggcaatcagactccaagcagagatggctggaaaaggattcactgctggcagcgaggtgtactatgcatttattagtgcttatgagaagtctgaaaattatgagatggtcgagaagttgaggaaggaaatgtcggcgatgggcacttagagcatgtctagcagctcaccaataattcatccctaataaaatggtattggtggtcaccaatagtgctttttttggaatattggggagactctatagtagattaccaataatctttcccaatacatgggacccacatgtcagaatagaggatgtgggaggaagaagatgacgacagttgttgtggtcccaacacctatagagggagatgcaactccccttttatttgaggggagatgggagatttgttttggtgaccaccaaaaaaagggagagctattggggagctgttggagcaatggaattgcctcatctcccccaatatgacagttttatggggatgagggatggtattggagagctactggatgctctatcggatctgatatttggcttggatattgcacagtgatgcatggatatcaacctcacctaattgcagttgagaactatggtaaatcacttatctttacatcactcctcttcctttgattaagttgcttagttttaaaaccagccatttgttctctcttgaatctgtttcttcttgtagtttgttatttgttctgcatggcatgttataaccatttatttcagaaaattttgatgtctagtattgaaacttgaaacttcaaataatccaaaattggtgctaacttgttctctaggtgagaggtgtgtaaagcttgtttgcttcaaaccgatggtaacaactggtatggaaacatcatgttagagcaggcattagttccatattccactcagtcacattcatctaaatgtaagcgtctattgtagttatgtagttggcatgaatatttatacctgtaaattatgattcatagatgatgaacaatcacttaaacaatataagtctggtgccaaatgctatttcagatgatacctaaatgttacagcacatagttttgatacatgcagggtatccttagaaaagcaagtaaattatgtaatagttgaaagataattctcaatatcatatgtcagatgttctttctggttcacttctctatctggttcacaattcattccagagtggtgcaacaaattctgaattggttgaaggagttctctcctagcactatcctggagacggatgttggagaaatatgactgctggatctgcaataggataatgtcttttagtcgatcccttttgtgcttgtttggtgaacttgtgtccccaatctgttgaactctgtaaacatttgctttccataaaagcagagatattctccttaaaaactcagtccagaatggtgatatatgaatgatccctgagagtttataaggtacaaccgtacaagtccaggtgctagagacttctcaatttgctggaaaatgctgtagtattttgtgttgacttgctgtttgatatatgctcagtacctcactgtaaaatgtggttctcttgtttgcctcttaacaaaatcctgagaaatgacatgagaacaaattgagaattagtagatcagtacttaactgcaaaacttttgtagttggaattaatttccagtctctagcaaagtagcaatagctgagagagctaaacttgagctattgtgtaatcgaaaatggaggcaccattgcagccaaacttatgaactaac

SEQ ID NO: 221653 - DNA, 1910 bp, Zea Mays
gttaaaattaaattattgaagttaagttattccaaacaaaagtgtagatttttttttcgcttgttgcacctccagcgtttcgcttcacccgaaaaaattccccaaggatgaagtgacggacaggggaagtagagctcaaatctcaggcaaacgacagggtcactcacaagtcacaactcacaaatactcttctcatttcctctcggttctgctcggtggcaacccagcgcgtagatcttgttcttggacgagaattctcctcaagttctcggatttctgtttttgtgccgcttagcaattcaaccccgaaattgttttgcggcgcagtcttcacccgaatcttgggtcgtagccaagaagatgaacaaggataaggctccgatgccgggagacggcgaccccagcgacggcttgccgccgcagtccacgcgccgtgccggggcgccgccctcgtcgtctaccccgccgcgggagtacgacatcagccgcatgccggactttcctacccggagcaccggccaccggcgtgcgcactccgagatcctgggcctccccgacgacctcgacctcagcgcccctggaggcggcgacggaccgtcgctgtcggacgagaacgacgaggagctcttctctatgttccttgatgtggacaagctgaactcatcgtgcggggcgtcgtcggaggccgaggctgagtcctcgtccgttgcggatggcgtcggtgagggggctgagctgggccacgcgcccaggccaaggcatcagcatagccagtccatggatgagtccatgtcgatcaaggcggaacaactggtgggggcgccggggatggaggggatgtcgtctgcagaggccaagaaagcagtctctgcggcgaaactggctgagcttgctcttgttgacccaaagagggctaaaaggatatgggctaatagacaatctgctgcaagatcaaaggaaaggaagatgcgatatatttctgaacttgagcgcaaggtgcaaaccctgcaaacagaagccacaacattgtcagctcagctaacattgctgcagagagacaccactgggctaacgaccgagaacagtgagctgaagattcgcctgcagaccatggaacagcaagtccacttacaagatgctttgaacgacacactgaaagctgaggtccagcggctgaaggtggcaacagggcaggggccggccaatggtggtggaggcatgatgatgaactttggcgccgtgccacgcgcgtttggaggaggcaaccagcagacgttccacagcagccagagccaagcgatgcaatccatgctggcgacgcaccagctgcagcagctccagctccactcccagcctcagcagcagctgcaggcgcagcatctccagcaggtggcgagagacctcaaaatgaaagggcatctgggcgcccaaggccagtggggcggtgggaagtctgggagcagcggcagctgaggctactactggcactggagttttggtgtatgtggttactggttagctaggagtggagatccccttgttctaggggggggggggggggggggtgctgccgtgcatgtgtagttaccgttagctcgggctatctatctacaggctcagttcagcttcagttttactgttaactcggtggctcagctctcctgcagcgtactgtgtccagaaactcggatggtaacaggtgttttatctgtcggaatctgtctgtatctcttcgctagtttaaagggtaaaaatggttgggatttcagggcttcaaatgaaatctcccgtattgagcaagagtgtgtagttggatgtacaaaaagggatggaaaaaggcaacgtttgatgagagtcacggagtaattttttatggcggcgtgatcctaaaaatcgagggaacagtgttg

SEQ ID NO: 221654 - DNA, 1864 bp, Zea Mays
acggacaggggaagtagagctcaaatctcaggcaaacgacagggtcactcacaagtcacaactcacaaatactcttctcatttcctctcggttctgctcggtggcaacccagcgcgtagatcttgttcttggacgagaattctcctcaagttctcggatttctgtttttgtgccgcttagcaattcaaccccgaaattgttttgcggcgcagtcttcacccgaatcttgggtcgtagccaagaagatgaacaaggataaggctccgatgccgggagacggcgaccccagcgacggcttgccgccgcagtccacgcgccgtgccggggcgccgccctcgtcgtctaccccgccgcgggagtacgacatcagccgcatgccggactttcctacccggagcaccggccaccggcgtgcgcactccgagatcctgggcctccccgacgacctcgacctcagcgcccctggaggcggcgacggaccgtcgctgtcggacgagaacgacgaggagctcttctctatgttccttgatgtggacaagctgaactcatcgtgcggggcgtcgtcggaggccgaggctgagtcctcgtccgttgcggatggcgtcggtgagggggctgagctgggccacgcgcccaggccaaggcatcagcatagccagtccatggatgagtccatgtcgatcaaggcggaacaactggtgggggcgccggggatggaggggatgtcgtctgcagaggccaagaaagcagtctctgcggcgaaactggctgagcttgctcttgttgacccaaagagggctaaaagatttggctagatgtttttggaattggctgcattatttgttcgtcattttcatatcaaatgattgcatcggatatgggctaatagacaatctgctgcaagatcaaaggaaaggaagatgcgatatatttctgaacttgagcgcaaggtgcaaaccctgcaaacagaagccacaacattgtcagctcagctaacattgctgcagagagacaccactgggctaacgaccgagaacagtgagctgaagattcgcctgcagaccatggaacagcaagtccacttacaagatgctttgaacgacacactgaaagctgaggtccagcggctgaaggtggcaacagggcaggggccggccaatggtggtggaggcatgatgatgaactttggcgccgtgccacgcgcgtttggaggaggcaaccagcagacgttccacagcagccagagccaagcgatgcaatccatgctggcgacgcaccagctgcagcagctccagctccactcccagcctcagcagcagctgcaggcgcagcatctccagcaggtggcgagagacctcaaaatgaaagggcatctgggcgcccaaggccagtggggcggtgggaagtctgggagcagcggcagctgaggctactactggcactggagttttggtgtatgtggttactggttagctaggagtggagatccccttgttctaggggggggggggggggggggtgctgccgtgcatgtgtagttaccgttagctcgggctatctatctacaggctcagttcagcttcagttttactgttaactcggtggctcagctctcctgcagcgtactgtgtccagaaactcggatggtaacaggtgttttatctgtcggaatctgtctgtatctcttcgctagtttaaagggtaaaaatggttgggatttcagggcttcaaatgaaatctcccgtattgagcaagagtgtgtagttggatgtacaaaaagggatggaaaaaggcaacgtttgatgagagtcacggagtaattttttatggcggcgtgatcctaaaaatcgagggaacagtgttg

SEQ ID NO: 221655 - DNA, 2070 bp, Zea Mays
ggaagtagagctcaaatctcaggcaaacgacagggtcactcacaagtcacaactcacaaatactcttctcatttcctctcggttctgctcggtggcaacccagcgcgtagatcttgttcttggacgagaattctcctcaagttctcggatttctgtttttgtgccgcttagcaattcaaccccgaaattgttttgcggcgcagtcttcacccgaatcttgggtcgtagccaagaagatgaacaaggataaggctccgatgccgggagacggcgaccccagcgacggcttgccgccgcagtccacgcgccgtgccggggcgccgccctcgtcgtctaccccgccgcgggagtacgacatcagccgcatgccggactttcctacccggagcaccggccaccggcgtgcgcactccgagatcctgggcctccccgacgacctcgacctcagcgcccctggaggcggcgacggaccgtcgctgtcggacgagaacgacgaggagctcttctctatgttccttgatgtggacaagctgaactcatcgtgcggggcgtcgtcggaggccgaggctgagtcctcgtccgttgcggatggcgtcggtgagggggctgagctgggccacgcgcccaggccaaggcatcagcatagccagtccatggatgagtccatgtcgatcaaggcggaacaactggtgggggcgccggggatggaggggatgtcgtctgcagaggccaagaaagcagtctctgcggcgaaactggctgagcttgctcttgttgacccaaagagggctaaaaggatatgggctaatagacaatctgctgcaagatcaaaggaaaggaagatgcgatatatttctgaacttgagcgcaaggtgcaaaccctgcaaacagaagccacaacattgtcagctcagctaacattgctgcaggtaggctggggttcttcctgagatcacggaggtttaggaactgatagacaattaatgtatactgaagaagcaatgaagcatgatttaagaaacaaaactggccaccaagtcgctggaattcagagtctgtgctcgggcttgcagttgagtagtttatgtaaaaagggatagacccagtgctggaggctcccacatgagttaggtctggagaagggaaaaactgaggcaagtcttcccctcgcaaatgcgaagagactgcttcgaactcgtgacctggtgactcaagagacaccactgggctaacgaccgagaacagtgagctgaagattcgcctgcagaccatggaacagcaagtccacttacaagatgctttgaacgacacactgaaagctgaggtccagcggctgaaggtggcaacagggcaggggccggccaatggtggtggaggcatgatgatgaactttggcgccgtgccacgcgcgtttggaggaggcaaccagcagacgttccacagcagccagagccaagcgatgcaatccatgctggcgacgcaccagctgcagcagctccagctccactcccagcctcagcagcagctgcaggcgcagcatctccagcaggtggcgagagacctcaaaatgaaagggcatctgggcgcccaaggccagtggggcggtgggaagtctgggagcagcggcagctgaggctactactggcactggagttttggtgtatgtggttactggttagctaggagtggagatccccttgttctaggggggggggggggggggggtgctgccgtgcatgtgtagttaccgttagctcgggctatctatctacaggctcagttcagcttcagttttactgttaactcggtggctcagctctcctgcagcgtactgtgtccagaaactcggatggtaacaggtgttttatctgtcggaatctgtctgtatctcttcgctagtttaaagggtaaaaatggttgggatttcagggcttcaaatgaaatctcccgtattgagcaagagtgtgtagttggatgtacaaaaagggatggaaaaaggcaacgtttgatgagagtcacggagtaattttttatggcggcgtgatcctaaaaatcgagggaacagtgttg

SEQ ID NO: 221656 - DNA, 1413 bp, Zea Mays
tcttttcactttttttccggtgattccttgggtaacccacacaaaccgaccaccaaatattccatcccagcaccaccgcccgccacaaagcaaatgcgatataaaaatgcaactcgttgcatggccggtggcctgcgctaaggtttctccgttagctacaactctttgcattgcgggcagagaagcccgaaaccaactctaatcgtcagagcttcgataatgactgcaaaatcggagacaccacgaataacggagctgcatgtaagggtggactgcaacggctgcgagaacaagatcaggaaggccctgcgtgccatcgatggtaaataaaacccaattctaacctgaaacctaacagctacatgtgacgagcatgatatgatcttaattacaagttattaatggaataatggacctgcaccgtacgtgcaggtgttagcgaagtgtatatagatcaagcaagccacaagatcactgtggtcgggatggccgacccatggaggatggtcaaggccatcaggaaggccaagagggtccccaccatcttctcccacaccgacccggccgccgcagccgaggctgatcagccgccgcctcccgctgccgaagccgaagaagccgaagccaaaggggaggcccaggcgccagcgccagcgccaccacctcccgccgacccgccagcagccggcgacagagcagaggagaccgcgccagctgatacgtccgcgccggaggagcacaaggaggccaaaccggcagaaaccccggcggctgtggacgccaccgtggtggtgcgcacagtacgtgaccacccgtacgggtacggcgctggcggccatggccaccgcatgtgcagtgaggcgaaccaccccgtagacagcttttacagccaccatcgcccgacgagcccttacgtggccgagtacggcgccggcggcggctatgctggctttccggtgcaagaaggcaggggcaaagaggatgccatcaatatcacttgtatgttcagcgatgagaacccaaacgcatgcagcatagcgtaagatccatgtgtttgcaatctgctcaaggaattcctttctgcatgattgatgccaaagaaggttgcatagctgctggctagtgccgagggggacagatcatcatgtaggctttagcctacgtacagcggctagtgtgtagctgctgtaataaggcttgggttgatgtaattaaaagggtgagaaaggtaacagaatgggaacaataagatgcttaacttgtgcacatagtcactgtgggagacgattttcctggcaatcgccacggttttcactacgcccttcatgcttctctagtcctgtctcagagaatctataaagttgtggtcctttgtgtgtttacaaggaagtggcacaggtgctccggtgtttc

SEQ ID NO: 221657 - DNA, 1157 bp, Zea Mays
gtttctccgttagctacaactctttgcattgcgggcagagaagcccgaaaccaactctaatcgtcagagcttcgataatgactgcaaaatcggagcagacaccacgaataacggagctgcatgtaagggtggactgcaacggctgcgagaacaagatcaggaaggccctgcgtgccatcgatgcgaagtgtatatagatcaagcaagccacaagatcactgtggtcgggatggccgacccatggaggatggtcaaggccatcaggaaggccaagagggtccccaccatcttctcccacaccgacccggccgccgcagccgaggctgatcagccgccgcctcccgctgccgaagccgaagaagccgaagccaaaggggaggcccaggcgccagcgccagcgccaccacctcccgccgacccgccagcagccggcgacagagcagaggagaccgcgccagctgatacgtccgcgccggaggagcacaaggaggccaaaccggcagaaaccccggcggctgtggacgccaccgtggtggtgcgcacagtacgtgaccacccgtacgggtacggcgctggcggccatggccaccgcatgtgcagtgaggcgaaccaccccgtagacagcttttacagccaccatcgcccgacgagcccttacgtggccgagtacggcgccggcggcggctatgctggctttccggtgcaagaaggcaggggcaaagaggatgccatcaatatcacttgtatgttcagcgatgagaacccaaacgcatgcagcatagcgtaagatccatgtgtttgcaatctgctcaaggaattcctttctgcatgattgatgccaaagaaggttgcatagctgctggctagtgccgagggggacagatcatcatgtaggctttagcctacgtacagcggctagtgtgtagctgctgtaataaggcttgggttgatgtaattaaaagggtgagaaaggtaacagaatgggaacaataagatgcttaacttgtgcacatagtcactgtgggagacgattttcctggcaatcgccacggttttcactacgcccttcatgcttctctagtcctgtctcagagaatctataaagttgtggtcctttgtgtgtttacaaggaagtggcacaggtgctccggtgtttc

SEQ ID NO: 221658 - DNA, 228 bp, Zea Mays
ggctggcaagatggaggagaccctcgtgacctgacctccctcctggacctacaggttgacaacaccagcagatacaactgcttcgagcctaggacaatcgtattatggagattatcaacctgatggcgctcaactggcggcccggtcgtattcgattgttaatacattcaataaacagacatctgctactcttacaaatttgtacacttagtttacattttctttttt

SEQ ID NO: 221659 - DNA, 2199 bp, Zea Mays
atgcagaggcaggggagacacctggagcggtccaactcgaagcgagccctcgaccatggcggcggtggtgacgacgacgaccgcccgtctaagcgcccgcgcgtccccgccctcgccagtgtcattgtagaagcactcaaggtagactgtttacaaaagctttgctcatcactggaaccaattctgcgcagaattgtcagtgaagaagtagagcgtgctttagccaaattgggccctgcaggtcctgctaggatccaaggaaggccctgatggtagaagcctccagcttcagtttaggactaggttatcccttccgctctttactggagggaaagtagaaggcgagcagggagcagcaattcatgttgtgctgcttgatgcgaacactggacatgttgttacttcaggacctgagtcatctgtgaaactggatattctggtgcttgagggtgattttaataaagaggaagacgagggctggactgaagaagactttgaaagtcacattgttaaagaacgagaagggaagaggcctattttaactggggacctgcaggtaacccttaaagaaggtgttgggactataggagagcttattttcactgataattccagctggataagaagccgaaaatttagacttgggttgagagtctcgtcagggttttgtcaaggaattcgtgttatggaagcaaaaacagaggcttttactgttaaagatcacagaggcgaattgtataagaagcattatcctcctgcactaaaggatgaggtatggagattagaaaagattggaaaggatggttcattccacaagagattaaactcaagtggaatctatacagttgaacactttcttcaattccttgttagagaccaacagaaattaagaagtattcttggcagtaacatgtcaaataggatgtgggaaagtcttattgagcatgcaaagacatgtgttttgagtggcaaccattatatatattactcaagtgatgcaagaaatgtgggtgcaatattcaacaacatatatgagttcactggtttgattgctgatgatcaatttatttcagctgaaaatctcactgaaaaccagagggtgtttgctgacacgttggttaagcaagcatatgctgattggatcaatgttctagaatatgatggcaaggcgctattaaagttcaaccagaaaaagaaatatgttacaactagaagtgaaacagcgaaagcttcagcaagctaccctgcatcaaacggtttagtgaactcacagaaagaactgcctggaggtcctgtgaatgctgagcaatcttccctgaacaatgctagccaagatagaactagaatcccatccatgtccatggggaaccaggtagcaagagagtatgcaggcaatcctcagcacatgacaccaagtattaccatgcaatgcgacacgaggtcattgatccccggaggccagttcagtggtggttcctccgtgcagactcaaacttcacgaagctccaacatgcttgcgctgcggccaacgcagcagcctcaaaacttggacttctctgggctaggtcagtccacacagccttcagggaccaaccctttcgccgactggtctcggttgcaggagagcagcgtcgatgagtacttgatggatgagataagggcgaggagccacgagctattggagaacgatgagatgcagcatatgctgcggttcctgagcgtgggcggggcgccgaccggcctgaacaacgttgacggctttctttcatacccgtctcctgccccagccttcggatttgatgaggacgaccgcgctcgctcgtccggcaaagctgttgtcgggtggctgaagatcaaggctgcgatgcggtggggtatctttgtcaggaggaaagctgccgagagacgggctcagcttgttgagctggaagactagcagtcgcaggtgcttgggctcggtgttgcacatatttatgcggaagggttactagaactgcaaaatattgtataatacgcttcccttttggctgatctttttaatttgcacaatagccccgttggtattgtatattactgggtacagacgtacagtacatgtacatgggaggacgatcaggatcggggcttttttacgaatgaagtcacgttggttgtatacgtgtctgatacgcttgaccttacttgtgctttgaaatattc

SEQ ID NO: 221660 - DNA, 2044 bp, Zea Mays
atgcagaggcaggggagacacctggagcggtccaactcgaagcgagccctcgaccatggcggcggtggtgacgacgacgaccgcccgtctaagcgcccgcgcgtccccgccctcgccagtgtcattgtagaagcactcaaggtagactgtttacaaaagctttgctcatcactggaaccaattctgcgcagaattgtcagtgaagaagtagagcgtgctttagccaaattgggccctgcaggtcctgctaggatccaaggaaggggctcacccaaacgaattgaaggccctgatggtagaagcctccagcttcagtttaggactaggttatcccttccgctctttactggagggaaagtagaaggcgagcagggagcagcaattcatgttgtgctgcttgatgcgaacactggacatgttgttacttcaggacctgagtcatctgtgaaactggatattctggtgcttgagggtgattttaataaagaggaagacgagggctggactgaagaagactttgaaagtcacattgttaaagaacgagaagggaagaggcctattttaactggggacctgcagtgtataagaagcattatcctcctgcactaaaggatgaggtatggagattagaaaagattggaaaggatggttcattccacaagagattaaactcaagtggaatctatacagttgaacactttcttcaattccttgttagagaccaacagaaattaagaagtattcttggcagtaacatgtcaaataggatgtgggaaagtcttattgagcatgcaaagacatgtgttttgagtggcaaccattatatatattactcaagtgatgcaagaaatgtgggtgcaatattcaacaacatatatgagttcactggtttgattgctgatgatcaatttatttcagctgaaaatctcactgaaaaccagagggtgtttgctgacacgttggttaagcaagcatatgctgattggatcaatgttctagaatatgatggcaaggcgctattaaagttcaaccagaaaaagaaatatgttacaactagaagtgaaacagcgaaagcttcagcaagctaccctgcatcaaacggtttagtgaactcacagaaagaactgcctggaggtcctgtgaatgctgagcaatcttccctgaacaatgctagccaagatagaactagaatcccatccatgtccatggggaaccaggtagcaagagagtatgcaggcaatcctcagcacatgacaccaagtattaccatgcaatgcgacacgaggtcattgatccccggaggccagttcagtggtggttcctccgtgcagactcaaacttcacgaagctccaacatgcttgcgctgcggccaacgcagcagcctcaaaacttggacttctctgggctaggtcagtccacacagccttcagggaccaaccctttcgccgactggtctcggttgcaggagagcagcgtcgatgagtacttgatggatgagataagggcgaggagccacgagctattggagaacgatgagatgcagcatatgctgcggttcctgagcgtgggcggggcgccgaccggcctgaacaacgttgacggctttctttcatacccgtctcctgccccagccttcggatttgatgaggacgaccgcgctcgctcgtccggcaaagctgttgtcgggtggctgaagatcaaggctgcgatgcggtggggtatctttgtcaggaggaaagctgccgagagacgggctcagcttgttgagctggaagactagcagtcgcaggtgcttgggctcggtgttgcacatatttatgcggaagggttactagaactgcaaaatattgtataatacgcttcccttttggctgatctttttaatttgcacaatagccccgttggtattgtatattactgggtacagacgtacagtacatgtacatgggaggacgatcaggatcggggcttttttacgaatgaagtcacgttggttgtatacgtgtctgatacgcttgaccttacttgtgctttgaaatattc

SEQ ID NO: 221661 - DNA, 2319 bp, Zea Mays
cagagcgatgcagaggcaggggagacacctggagcggtccaactcgaagcgagccctcgaccatggcggcggtggtgacgacgacgaccgcccgtctaagcgcccgcgcgtccccgccctcgccagtgtcattgtagaagcactcaaggtagactgtttacaaaagctttgctcatcactggaaccaattctgcgcagaattgtcagtgaagaagtagagcgtgctttagccaaattgggccctgcaggtcctgctaggatccaaggaaggggctcacccaaacgaattgaaggccctgatggtagaagcctccagcttcagtttaggactaggttatcccttccgctctttactggagggaaagtagaaggcgagcagggagcagcaattcatgttgtgctgcttgatgcgaacactggacatgttgttacttcaggacctgagtcatctgtgaaactggatattctggtgcttgagggtgattttaataaagaggaagacgagggctggactgaagaagactttgaaagtcacattgttaaagaacgagaagggaagaggcctattttaactggggacctgcaggtaacccttaaagaaggtgttgggactataggagagcttattttcactgataattccagctggataagaagccgaaaatttagacttgggttgagagtctcgtcagggttttgtcaaggaattcgtgttatggaagcaaaaacagaggcttttactgttaaagatcacagaggcgaattgtataagaagcattatcctcctgcactaaaggatgaggtatggagattagaaaagattggaaaggatggttcattccacaagagattaaactcaagtggaatctatacagttgaacactttcttcaattccttgttagagaccaacagaaattaagaagtattcttggcagtaacatgtcaaataggatgtgggaaagtcttattgagcatgcaaagacatgtgttttgagtggcaaccattatatatattactcaagtgatgcaagaaatgtgggtgcaatattcaacaacatatatgagttcactggtttgattgctgatgatcaatttatttcagctgaaaatctcactgaaaaccagagggttagtgtattttgaatgccttttataatgctagtcgtgggaattcttggaatttcagcactctgtaatctacggtttgaatttattgaggtgtttgctgacacgttggttaagcaagcatatgctgattggatcaatgttctagaatatgatggcaaggcgctattaaagttcaaccagaaaaagaaatatgttacaactagaagtgaaacagcgaaagcttcagcaagctaccctgcatcaaacggtttagtgaactcacagaaagaactgcctggaggtcctgtgaatgctgagcaatcttccctgaacaatgctagccaagatagaactagaatcccatccatgtccatggggaaccaggtagcaagagagtatgcaggcaatcctcagcacatgacaccaagtattaccatgcaatgcgacacgaggtcattgatccccggaggccagttcagtggtggttcctccgtgcagactcaaacttcacgaagctccaacatgcttgcgctgcggccaacgcagcagcctcaaaacttggacttctctgggctaggtcagtccacacagccttcagggaccaaccctttcgccgactggtctcggttgcaggagagcagcgtcgatgagtacttgatggatgagataagggcgaggagccacgagctattggagaacgatgagatgcagcatatgctgcggttcctgagcgtgggcggggcgccgaccggcctgaacaacgttgacggctttctttcatacccgtctcctgccccagccttcggatttgatgaggacgaccgcgctcgctcgtccggcaaagctgttgtcgggtggctgaagatcaaggctgcgatgcggtggggtatctttgtcaggaggaaagctgccgagagacgggctcagcttgttgagctggaagactagcagtcgcaggtgcttgggctcggtgttgcacatatttatgcggaagggttactagaactgcaaaatattgtataatacgcttcccttttggctgatctttttaatttgcacaatagccccgttggtattgtatattactgggtacagacgtacagtacatgtacatgggaggacgatcaggatcggggcttttttacgaatgaagtcacgttggttgtatacgtgtctgatacgcttgaccttacttgtgctttgaaatattc

SEQ ID NO: 221662 - DNA, 2498 bp, Zea Mays
ggccaaaggcgaaagccgggcacgcacacccaccccacagatctccctcctctctctgcccgtgctgttgctgtccccgtcgttcgcgctcgcccaagtcgtcgcccagtcgctgcgccgctcagctccaaagccagcagaaccgcgcaagcgcgcgcgtgtccctcctccgctcctccattccgcgccgctggactggacgcgtcgctgtgcggacttcttgcttgcgccggctgctacgggcacggtccacgggacctgactggcggctccgggccgggggaggcgagcgacagagcgatgcagaggcaggggagacacctggagcggtccaactcgaagcgagccctcgaccatggcggcggtggtgacgacgacgaccgcccgtctaagcgcccgcgcgtccccgccctcgccagtgtcattgtagaagcactcaaggtagactgtttacaaaagctttgctcatcactggaaccaattctgcgcagaattgtcagtgaagaagtagagcgtgctttagccaaattgggccctgcaggtcctgctaggatccaaggaaggggctcacccaaacgaattgaaggccctgatggtagaagcctccagcttcagtttaggactaggttatcccttccgctctttactggagggaaagtagaaggcgagcagggagcagcaattcatgttgtgctgcttgatgcgaacactggacatgttgttacttcaggacctgagtcatctgtgaaactggatattctggtgcttgagggtgattttaataaagaggaagacgagggctggactgaagaagactttgaaagtcacattgttaaagaacgagaagggaagaggcctattttaactggggacctgcaggtaacccttaaagaaggtgttgggactataggagagcttattttcactgataattccagctggataagaagccgaaaatttagacttgggttgagagtctcgtcagggttttgtcaaggaattcgtgttatggaagcaaaaacagaggcttttactgttaaagatcacagaggcgaattgtataagaagcattatcctcctgcactaaaggatgaggtatggagattagaaaagattggaaaggatggttcattccacaagagattaaactcaagtggaatctatacagttgaacactttcttcaattccttgttagagaccaacagaaattaagaagtattcttggcagtaacatgtcaaataggatgtgggaaagtcttattgagcatgcaaagacatgtgttttgagtggcaaccattatatatattactcaagtgatgcaagaaatgtgggtgcaatattcaacaacatatatgagttcactggtttgattgctgatgatcaatttatttcagctgaaaatctcactgaaaaccagaggcaagcatatgctgattggatcaatgttctagaatatgatggcaaggcgctattaaagttcaaccagaaaaagaaatatgttacaactagaagtgaaacagcgaaagcttcagcaagctaccctgcatcaaacggtttagtgaactcacagaaagaactgcctggaggtcctgtgaatgctgagcaatcttccctgaacaatgctagccaagatagaactagaatcccatccatgtccatggggaaccaggtagcaagagagtatgcaggcaatcctcagcacatgacaccaagtattaccatgcaatgcgacacgaggtcattgatccccggaggccagttcagtggtggttcctccgtgcagactcaaacttcacgaagctccaacatgcttgcgctgcggccaacgcagcagcctcaaaacttggacttctctgggctaggtcagtccacacagccttcagggaccaaccctttcgccgactggtctcggttgcaggagagcagcgtcgatgagtacttgatggatgagataagggcgaggagccacgagctattggagaacgatgagatgcagcatatgctgcggttcctgagcgtgggcggggcgccgaccggcctgaacaacgttgacggctttctttcatacccgtctcctgccccagccttcggatttgatgaggacgaccgcgctcgctcgtccggcaaagctgttgtcgggtggctgaagatcaaggctgcgatgcggtggggtatctttgtcaggaggaaagctgccgagagacgggctcagcttgttgagctggaagactagcagtcgcaggtgcttgggctcggtgttgcacatatttatgcggaagggttactagaactgcaaaatattgtataatacgcttcccttttggctgatctttttaatttgcacaatagccccgttggtattgtatattactgggtacagacgtacagtacatgtacatgggaggacgatcaggatcggggcttttttacgaatgaagtcacgttggttgtatacgtgtctgatacgcttgaccttacttgtgctttgaaatattc

SEQ ID NO: 221663 - DNA, 1138 bp, Zea Mays
agtcagcgcagctccgaccatagtccgtcacgatggccttgatgttgtcgatgaccgaaattcgtttttcggttagtagcgaaaacgggaaaaattatcgagattcggtgattccaatgcgggatagtaaacagtggtccaggctgggatgtcaggatccggaggtggagatcatcttcgacagtgtaagcgtcgaagccgtggtgcctgtcggccgacggacaacgcccacgcttcccaacaccatcatcaactgtgggaaggctgtaatggattctgtgctcatgcgccgctccagggaagaaacgtttaaaatcatagatgcagtgagcgggacaataagatcatccaggtgcttttcttgtgtggccagaatgacacttcttcttggagcacccggatcaggaaagacgaccctgttaaaagcactggcaggaaaactagattcttctttgaagatccatggagatgtcaaatacaagtgtaatggggaaacaatgtcatctacatcgcagcacctctgtgcgtacgtcagccagaatgacctccatcatcccgaaatgacagtgagggagactattaatttcgcttcaaacatgcttggggccaacaatgaattcggtatgagtgcctgttggttttggtcaaaatcaaaatattaaattgatatcctcaagcgatagcaacatgcattcatactgatatatacatatacacacacgcgcgctaattatctcctgctggtgataactgctttagagacgctgagagatgcattacaaagaaaaatggaaacatgcaatgaactaaatcaggacctattttccaaggtgctatagccatatttgtttaagataagaaagcatcagtttattttagtagaataacagctaagttgttcccgtacaggcaactaaacctggaaacggaagcaatcttaaaacaaactacatcatcaaggtaaaatcttattttaatcaatgaagttatcattttttactgtcaacagggaggggggacatcctcacttgaatttcattgaaagcaacctcttttttagagaaacgaggcaaagcactatataaaattgtggtagaccatagattacaaacaagtgctagcacaacacagcaaatac

SEQ ID NO: 221664 - DNA, 1156 bp, Zea Mays
gcctagtcgacgccttaagaacagagaatacctccttaccttacatagggcatactaggatttgagtgtcttcaaaactaaaacatgaccatatacttatcttgaaatgtgttattatcatttggtacacaatcaatatattaaaaacatgtgaaatgtgaacacattttttcgtgaacgcgcaggagagctgcgcatcattaaattaagagaagaaacagtcccaaatggacccaagtacaatggcacaaaaggccaaacacacgaccaccaaaccctgaccaaacacaagaccaccaaatctgctacgcacaggaatgcagcttccttttgcgcgtggaaacagcagcacgcaatctgcgcgtggaaacagcagcgcgcaaaaggacagcagcacaagtgcaagcaggccacacacccacacaactgctcttcactaagcccccagtagaacccttaatacaacttttagtcattaagcttgcatatcatttgacaaataattgtttgctcaaaacatacaaagcttgaccttttcaatttagtccagctaccaattgtccaatccttgtgcctctgcaaaaaaagctgctgagtggcaacaatgttctgattcttatatttgctgcaatgttcaatttactatgcttttgtgagcaatttccatgagtatgtgaaaaatgagtgtgaagttatatcttctttttaggtacgcattgtccgccgggacaacggtgcaaaggttgacattccggtgaccaatttggttgaagatgttaaagtgttattggatgagattcaaaaaaatctgttcaaaacagcccaagaaaggagagatgcatgtgttcaggtcgtcagctcttgggatgaattcacaactgctctgaataacaaaaggttgatcttggctccttggtgcgatgaggaggaagttgagaaagatgtgaaagctcggacaaaaggggaactcggagctgcgaaaacattgtgtactccatttgagcagccagaacttccagaaggtatcctgtgctttgcatctggaaagccagcaaagaagtggtcgttttggggccgcagctactgattgcctttgctgggagtccttttggattcagtagtgaaccatttctgatgtcatcacagctgaaaaaag

SEQ ID NO: 221665 - DNA, 1012 bp, Zea Mays
gggacgagagagcggcagcggcgcacaagagcagagcggcgacaggaaggatccgttgatcggaaatgccttcgacccgctgcctctaccaagtggtgttccagtgcctttgtgtttttgcggtgatccgcaaggttcccaagttcgaggaagatgacatgtataggcagaggtattgggcgtgtgacaactatgcttattagctgacgattgctcgacgcgacattaacttgatgaaagacaaggagtggatggagaagctggaagtgcgatgcagaggacaaggaaaggatggagaaaaaaacaagaggagcttgcgacggagcaacaatgggcagaagaggagaaaatgaggcgtgttgacacagggagaaggagaagaagcttaagcatgcatgccgtacgaaggaagcaaaggaggagaaccccgatgcttttaggaaggaaaagtgacctcattgcactcagtagactcgggggttctacattgtttaagtctcaaacaatgttatatactaatgcacttttcattgtcctttaattaatggactcgattttgtggtttcttatagtgcatcttctagtacttcagttttcttgtgtgtgcatattttatgtttcatgcattgatacaaatattggcacttaaaataacatgctgcagaatgaaagcaattgaacatgcagaacaacaaacacatggaacgacatgtgaggacttgtaccaaacaatgtcatcttgcggacgtgatctggttttgctgcaaggatgggataagaagaagaggagaggagaatcatctacatccctaacgataacatctaacggcaggcaaattgggattgagggcggccgggagaggggaaccgctggagaagagtactcgctagagaaagcctcgccgttcttcatggtcacacgttggcaggcgaatcatgccaacgagtacagattagggaaactgagtggagagggtgtgtactgagtactgaccagcctttgaggatgagg

SEQ ID NO: 221666 - DNA, 647 bp, Zea Mays
gcagaaagggaacgtgaatcggagtgctgcttactgtgatggccggtctggctctggcctgttggcaaaatctggaagccgtcaacgccattataaccgttgtatataatgtattatcgaatcgtagtggttcttataacaaaacaaattgaattttaggaaggatccgttgatcggaaatgccttcgacccgctgcctctaccaagtggtgttccagtgcctttgtgtttttgcggtgatccgcaaggttcccaagttcgaggaagatgacatgtataggcagagaatgaaagcaattgaacatgcagaacaacaaacacatggaacgacatgtgaggacttgtaccaaacaatgtcatcttgcggacgtgatctggttttgctgcaaggatgggataaggttcccctaaatttacaggagaatttttatgaatggattcctttggggggataaagactacaacaaaaatcatgcccatcgtttcatgcaatgattttgttccattcttcgtttcatcgctcagtagaccacaagcattaagcgaaagcgcttgttgttatctttcttttctccccaaaattctagctcctagttcttcccaaacgtgagaccatgcaaaaccagaatattatgcacaaaggtgcg

SEQ ID NO: 221667 - DNA, 1147 bp, Zea Mays
ctgtgatggccggtctggctctggcctgttggcaaaatctggaagccgtcaacgccattataaccgttgtatataatgtattatcgaatcgtagtggttcttataacaaaacaaattgaattttaggaaggatccgttgatcggaaatgccttcgacccgctgcctctaccaagtggtgttccagtgcctttgtgtttttgcggtgatccgcaaggttcccaagttcgaggaagatgacatgtataggcagaggtattgggcgtgtgacaactatgcttattagctgacgattgctcgacgcgacattaacttgatgacttctccactgctctttgattttaagcagtggattgacacagagatatcacagaaagacaaggagtggatggagaagctggaagtgcgatgcagaggacaaggaaaggatggagaaaaaaacaagaggagcttgcgacggagcaacaatgggcagaagaggagaaaatgaggcgtgttgacacagggagaaggagaagaagcttaagcatgcatgccgtacgaaggaagcaaaggaggagaaccccgatgcttttaggaaggaaaagtgacctcattgcactcagtagactcgggggttctacattgtttaagtctcaaacaatgttatatactaatgcacttttcattgtcctttaattaatggactcgattttgtggtttcttatagtgcatcttctagtacttcagttttcttgtgtgtgcatattttatgtttcatgcattgatacaaatattggcacttaaaataacatgctgcagaatgaaagcaattgaacatgcagaacaacaaacacatggaacgacatgtgaggacttgtaccaaacaatgtcatcttgcggacgtgatctggttttgctgcaaggatgggataagaagaagaggagaggagaatcatctacatccctaacgataacatctaacggcaggcaaattgggattgagggcggccgggagaggggaaccgctggagaagagtactcgctagagaaagcctcgccgttcttcatggtcacacgttggcaggcgaatcatgccaacgagtacagattagggaaactgagtggagagggtgtgtactgagtactgaccagcctttgaggatgagg

SEQ ID NO: 221668 - DNA, 1144 bp, Zea Mays
atgcatgatttatttggctcataccatttgcatgctctctagacttctccactgctctttgattttaagcagtggattgacacagagatatcacagaaagacaaggagtggatggagaagctggaagtgcgatgcagaggacaaggaaaggatggagaaaaaaacaagaggagcttgcgacggagcaacaatgggcagaagaggagaaaatgaggcgtgttgacacagggagaaggagaagaagcttaagcatgcatgccgtacgaaggaagcaaaggaggagaaccccgatgcttttaggaaggaaaagtgacctcattgcactcagtagactcgggggttctacattgtttaagtctcaaacaatgttatatactaatgcacttttcattgtcctttaattaatggactcgattttgtggtttcttatagtgcatcttctagtacttcagttttcttgtgtgtgcatattttatgtttcatgcattgatacaaatattggcacttaaaataacatgctgcagaatgaaagcaattgaacatgcagaacaacaaacacatggaacgacatgtgaggacttgtaccaaacaatggtaaaaaagtcttcatctaaatcgaacatgccttagtgaattaaagcaaccaacggacacttggatcttcatatgaataacattgtcccttcctagtagtgctagaaaagtaggctacctaataaaataaaagtcttcctttggttggctacacatgatagattacaaactggagtgagtttaggaaaaacaaattggaagggaataaagattgttgtctctgtggggttagtgaaactgctgagtgctgaccatgtcttcttttttttcagtcatcttgcggacgtgatctggttttgctgcaaggatgggataagaagaagaggagaggagaatcatctacatccctaacgataacatctaacggcaggcaaattgggattgagggcggccgggagaggggaaccgctggagaagagtactcgctagagaaagcctcgccgttcttcatggtcacacgttggcaggcgaatcatgccaacgagtacagattagggaaactgagtggagagggtgtgtactgagtactgaccagcctttgaggatgagg

SEQ ID NO: 221669 - DNA, 576 bp, Zea Mays
aagagattaatcgtctcgaagcttccgatacactcagttctcacatgaacgagtgggatggacctccctagaaaccaaacacccctgaatcgcagtcatcatcagagaacgacaatccgtgtgctgttgcgatgtagtagtactactgaagcacagagcgaaccgcacaggctagcccgcacggagcgaaccacacgggaaaagctgatgggaagaaacagaaaagtcaagaaaaggcagttcctgcagcttcaaaatcaagtccggcttccaagaagagcaaggatgacgatgattctgatgaggacgagactgatgattctaacgaggacgagacagacgattctgatgagggattcaagtgatgaagatgataccagtgacgatgaggaggaagacacttcaactcctaagaagcatgaggcaggcaagaagagagctgctgaaagtttcgtgctgaaaactcctctatctgataagaaagcaaaagttgccacgccgtcagctcagaagacagttcaagttgcgttttctacatggccatggggaccatctgccgtcattttctttttgtga

SEQ ID NO: 221670 - DNA, 535 bp, Zea Mays
gtcaagaaaaggcagttccttgaatttttcaaaaagaaagatttttacagatatttttaataatgacctcggtggaccctatgcatttcttgaggctagcccgcacggagcgaaccacacgggaaaagctgatgggaagaaacagaaaagtcaagaaaaggcagttcctgcagcttcaaaatcaagtccggcttccaagaagagcaaggatgacgatgattctgatgaggacgagactgatgattctaacgaggacgagacagacgattctgatgagggtgagggtttgtctcctgaagaaggcgatgatgatgattcaagtgatgaagatgataccagtgacgatgaggaggaagacacttcaactcctaagaagcatgaggcaggcaagaagagagctgctgaaagtttcgtgctgaaaactcctctatctgataagaaagcaaaagttgccacgccgtcagctcagaagacagttcaagttgcgttttctacatggccatggggaccatctgccgtcattttctttttgtga

SEQ ID NO: 221671 - DNA, 1842 bp, Zea Mays
aagctggtgggaagatacagaaaagtcaagaaaaggcagttccttgaatttttcaaaaagaaagatttttacagatatttttaataatgacctcggtggaccctatgcatttcttgagccaccttttgttcaaagaccccttctatataagatacaggcaaggagaaaaaagaggtttggcccttaaacgatttgtcagatattttaaacatttgatctcgctgtgtaccattccatgttcagttcaacagcttgataagtgaggtttaatatcgtgcctatgtctcctatgtttaatgtcatggcatgggcacagccaagagtggtgagcaccagcggtgcactttaccaatttaggattaggactatagtttctttgttagttagttttttagctgtcgccgttgtaagatcatttgaggcttggcttattggagtttctcttccagtttcctttactattctttaggaactatgtacatagaataagtaatataaattgttggtgtcttcttctcatgattctgtttttacttggctacaactccaaaagttgtaggattaatatatcattttggtgtcaaataatggagttggtcatttatttgtttgtgttagaaatctggagtcttttattgctctgaatgcccagcagctaaataagggtatttttctgaatttagtcacaccttttcattaataagaccaaaacattttatttcataaatgtcaatgaggtttggagaagagaagagagagcaataaccaagtaaccaacaatccacacactgttatgcttctatttttttatacattcaagttttcaacttctaatagacgtcttaactagatggcttcatattcttcatgtgcatagtaaataattactgaggtgttatcttttttatgaactacctgcactattcaaacaagaaacttgtttgttgctgttattggtctgtgtttgacagtttatctctaccaatgcaggattcagataactgtatcactttatgcaagtacaaatacacaagcacagaatatctttcccctttatgtacttttagctagacctaccagtaatatttcgcttgagggcattctccgatatatcgagcgggatgatgcttggtggacgtgtacatactaatgtgatgcaccttagccacagcgaggtggacgacaaacctaactctactggattctaatgtccactcgtcttttgtcctcttgcagattaatcgtctcgaagcttccgatacactcagttctcacatgaacgagtgggatggacctccctagaaaccaaacacccctgaatcgcagtcatcatcagagaacgacaatccgtgtgctgttgcgatgtagtagtactactgaagcacagagcgaaccgcacaggctagcccgcacggagcgaaccacacgggaaaagctgatgggaagaaacagaaaagtcaagaaaaggcagttcctgcagcttcaaaatcaagtccggcttccaagaagagcaaggatgacgatgattctgatgaggacgagactgatgattctaacgaggacgagacagacgattctgatgagggtgagggtttgtctcctgaagaaggcgatgatgatgattcaagtgatgaagatgataccagtgacgatgaggaggaagacacttcaactcctaagaagcatgaggcaggcaagaagagagctgctgaaagtttcgtgctgaaaactcctctatctgataagaaagcaaaagttgccacgccgtcagctcagaagacagttcaagttgcgttttctacatggccatggggaccatctgccgtcattttctttttgtga

SEQ ID NO: 221672 - DNA, 2299 bp, Zea Mays
atggccgctggcggcgccggcgcgtgccctccgccggggctgggcttcggcggggagtactactcggtggtggacggcgcgtgcagccgcgacggcagcttcttcggcgggaagccggtgctggcgcaggccgttgggtacgccgtcgtccttggcttcggcgccttcttcgcgctcttcacctcattcctggtgtggctagagaagcggtatgttggatcgcagcacacctcggagtggttcaacacggccggacggagtgtcaagaccggcctcatcgccagcgtcatcgtctcccagtggacatgggcggcaacgatcctgcagagctcgaacgtggcgtggcagtacggcgtgagcgggcctttctggtacgcgagcggcgccaccatccaggtgctcctgttcggagtcatggccatcgagatcaagcggaaggcgcccaaagcgcacaccgtctgcgagatcgttcgcgcccggtggggtcgagcggcgcacgctgtgttcctggcgttctgcctcgccaccaacgtcatcgtcacggccatgcttctgctcggtggctccgccgtggtgaacgcgctcacggccatcaacgtctacgccgccagcttcctcatccctctgggcgtggtcgtgtacacgctcgcgggcgggctcaaggccacgttcctcgcgagctacatccactccgtcgtcgtgcacgtcgtcctcgtcgtcttcgtcttcctcgtctacacctccggcaaccggctcggcagcccccgggtggtgcacgaccacctcactgccgtggccagcgcggtgcggaactgctccgccccgctctcgcaccctgaccaggcatgcggccccgtgcacggcaacttcaagggctcctacctcaccatgctcagctccggaggcctcgtcttcggcatcatcaacatcgtcggcaatttcggcacggtcttcgtcgacaacggctactggatgagcgcgatcgctgcgcgtccgtcgtcgacgcacaaggggtaccttctgggtgggctggtatggttcgcggtgcccttctcgctggccacctcgctgggtctcggcgcgctggctctggacctccccatcacggcagccgaggcggcgaaggggcttgtcccggccgccactgccaccgcgctcatgggcaagtccggctccgtcctcctcctcatcatgctcttcatggctgtgacctcagccggctcggccgagctggtggccgtctcctccctttgcacctacgacatctacaggacctacatcaacccggatgccacaggcgagcagatcctgcgtgtgtccagggccaccgtcctcgtcttcggttgcctcatgggtgtcctggccgtcatcctcaatctggtgggtgtctccctcggatggctgtacctggccatgggcgtcatcattggctccgccgtcatccccatcgcgctgctgctgctgtggagaaaggccaatgccttgggcgccatcctcggcgctgtcagtggctgcgtcctcggcgtcaccgtctggctctcggtcgccaaggtgcagtacgggcgcgtggacctggacagcaccggccggaacgcgccgatgctggcaggaaaacctggtgtccatccctgcctggcgtggccgcagcaatacgactgggagagcagccggcagatcaccacggtggagagcgtccctgccgacagtgacctggcggaggaactcaaggaggagcggctggtgcacgcgaagcggtggatcatcaagtggggtgtggccttcacggctgtgatcgcggtggtgtggcccgtgctgtcgctaccggcggggaggtacagcgccggctacttcaccatgtgggctgtcatcgcgatcgcctggggcacagtcggctcagcggtgatcatcttcctgccgctggtggagagttgggacactatctgcaaggccatcatgggagacatgcccgaggcggaggagcgttaccaggagatgcagaaggagaaggaccttggcaccatggagatggtgcatcctgcatccggtacccgcccatccattgtcgccaatgacgatgaagataatctttcgctagcttaaaattaaatattaaagctattcttccgtactgatgaatccgcagattcagtgtatatatatatcaggctagcagaagctatatatctttgtgtatatcctaccgcatagtatttgtgcactcaataaatctcaaacggaacaaaccgtaaacttgttcgattaggtgtatttcattttagtccataaattactgaataag

SEQ ID NO: 221673 - DNA, 1129 bp, Zea Mays
cagagcgtacatattccgctgcgtctagcgaggtagcagacatcgacgacgacgacaggacaggctatacttttaccacatctgctgggttcttgatcgagctacggcggcctatacggatgaacaagaagaagcggcggcggcggcggcagcagcagggtgggaggcctgtgctggtgacgttctacgtgacacagccaagggaccgcggcggctccacggcgtcgtcgtcgtcgcatcaccaccaccacaacaggcaggagcgtcacgatgaccaccaccgtcgctcgcatggcggtagtggtggtcgtcctggcatgcagcggcggcgacggaacgacggcaaagcccagagcggtgaccggcgggcggacctgctcgagtactcgcggcagctgagggcgttggcgcggcagacggcgtcggcgaccacgcctgtaagctccataccaccgccgccgccgccgcgttgtcgggacacggacacaatcatggccgctgttggtgttcatagcgaagagcagcagggagctccagctgtgaatcatcggctggggcgcgcgatgagccagcagcagcaggtccgcccgcgttgcttcggtggtgacggctggagctggaagaaggtgctcgtgctcgtcctcccttcccacagcgagagcaggcgtccaagaaggagcaaccgtgatgacagcgaaaagaacgtcaagatcaatcagacgggccgggcggctgcgtcgtcgttgctggtcggcaagctgacggtttgcaagggcagacgagaccgtagcgggttactgaagccgctcatgtccttgtttcagaagcggccacgatagattgtcgaagaggtgtactgtggcgagcgcggcgagcgagccttctagacaccatggattcttgagcacaaacatgatatcaacatgagaattaataaggttccaggggcgtcccgtcgttttaggagaccctgtgcaaaacataaaaaaaatatggagtaactttaatttgtgtatatatgtacacatgatataatgaaaattaaatattgtatcgattatgtaatctttatttagaacgcattatttttttggtgttctttaaaataaaatcgtcgatgatattttta

SEQ ID NO: 221674 - DNA, 2955 bp, Zea Mays
ggtcagttaatttttcatcggcgaagccagatttgcttttttccgtcgcgttagcacaagaacggctccagcttccgagtgctgaagccagagcagaacaagctctttgagaagctatgggcgcctatgctaatcgggcctaataatagttctcggcgcgtttcctaccgtctcgcacttgctcctcctgtgacagcgaaggcgacgagatacttcggtcatttcaactcaaagctttaagcaagtaaagcattcttatgctttgaaccttaggaaagaatatattaatcatcttggaataaagaaagcaccttcttgtagaattgcatttgttcagaaccagatcctgtcattctgtaccattaaacatgattgttccgtgttaggtttatatgccctgactgttgaacggaagcttgctaaagaatgttaggcaacaaagaaatgagaacattggatgttccttcgctgttgatagtttgtcaaagtattccttttctttttccaaagattaaaccatgcacttattatgattcatgcatgggaatatctctcttttgaatatatccatggaaagagtagttctttagtatcgtttgttgcgttgatattcagcttatttgttgatggttaggtaagatgttcatcagtgcgctacaactcttgtgtatttgttggaaaagcataattaagcgatgcaaactttccccctgtgcagaattgtgaatttggatcgtcattgtctcaaatcagcaccacattttgatgagtttgcttgagagggcagggcggcgtctcaatgtctcatgcaagtgaaactgggcaccttggcccccatcaccggaaagatattccaatgcctaaacaaacatgcttgcctcattgcttagcacaaaagttggcaaatctcatccatctcatctcccagctcccccatcccatcatcttctactgaaaaaaccaggagaagtggccatcgcatggcatgacacacaactttgtccatcccttttactctggcatccagcctctgtgacctggacgagctaccggcgcgtggagcccagaaagaacggagtgtcattctcttacgccactgtgaccgccctcaaccccccccaaagccaatgaaaggcggtttagtcgcttcctacctcacttgtgtaaaaggcttggctgccagcgaggccggatcccgcggcttgtgtgcacagcagcctccatgccttcagctggtgatccgagcgccgttgcccggaagaggaaccccacaaaataaaactgccccacccatcagcccatcacccaacccaaccacctcaccagctttttatatacccgcgcaccccggcgccagctacccatgtcagacgacgcgccatcgcgcctccaccaccccgaccctgaccccgaactcgccgtcgcaacaggccaagacgcagcagtagaagcaccaccaccaccaccaccggcacacgaccccggcggcagcgagtgccggttctgcgagatgacgcggcagcaccagccgcagtgcgcgcggcggctgccgaagcgcatcatcctggtgcggcacggcgagagccagggcaacctggacatgtcggcctacaccaccacgcccgactaccgcatcccgctgacggcgctgggcgcggagcaggcgcgcgccgcggggcagcgcatccgcgacgtggtggcgggcagcggcaactggaaggtctacttctacgtgtccccctacgcgcgcacccgcgccacgctgcgcgagatcggccgcgccttcccgcgggaccgcgtcatcggcgcccgcgaggagtgccgcgtccgggagcaggacttcggcaacttccaggtggaggagcgcatgcgcgccgtcaaggagacgcgccagcgcttcggccgcttcttcttccgcttcccagagggcgagtccgccgccgacgtcttcgaccgcgtcgccagcttccttgagtcgctgtggcgggacatcgacatggggcggctggaccaggaccccagctgcgagacgaacctggtgatcgtctcccacggcctcacctcgcgggtgttcctgatgaagtggttcaagtggacggtggcccagttcgagcgcctcaacaacttcgacaactgcgagttcagggtcatgcagctgggccccggcggggagtactccctcctcgtccaccacacccaggaggagctccagcagtggggcatgtcgccggagatgatcgccgaccagcagtggcgcgcctccgccaaccgccgctgctgggccgaggagtgctcctccttcatcgacaccttcttcgaggagccctacggctcgtcggagacctcctcctcggacgaagacgaagcagaggacaaggaggaggagaccaagctgctggagcaactataactggtttcatccacatccaatccacccattcgcctcgtcctttgaaattctctccattggattggatcttataccatgtgggaagagcggagcagtgatgctgcattcagtcatcgctgatccctctcttattcgaaaacagtctgtagcatgttcataatagctattagctagaactagaaatgattcgagggcaatttcagaaaatgctaaagaaacatatgctgtatctcaaggttttagctctgacatgattctgtatgttcctagatataagaacgcatacattctctattcaaaataaaatgctcagaggagataaatttgtctcgatcgctactttcctaaactctaatcctgtgggcgtcgctaccactcggtctgtcgtttattggttattggcactgttgatggacagtacaagtaccatttctcacatgctgggcatcagcagacacttgtccatatgtaaaagcagagaatctttccaattccatacagctggcatggtgacagccatattcctcactaggggagtaggagcc

SEQ ID NO: 221675 - DNA, 1308 bp, Zea Mays
gtcagttaatttttcatcggcgaagccagatttgcttttttccgtcgcgttagcacaagaacggctccagcttccgagtgctgaagccagagcagaacaagctctttgagaagctatgggcgcctatgctaatcgggcctaataatagttctcggcgcgtttcctaccgtctcgcacttgctcctcctgtgacagcgaaggcgacgagatacttcggtcatttcaactcaaagctttaagcaagtaaagcattcttatgctttgaaccttaggaaagaatatattaatcatcttggaataaagaaagcaccttcttggcttccttgagtcgctgtggcgggacatcgacatggggcggctggaccaggaccccagctgcgagacgaacctggtgatcgtctcccacggcctcacctcgcgggtgttcctgatgaagtggttcaagtggacggtggcccagttcgagcgcctcaacaacttcgacaactgcgagttcagggtcatgcagctgggccccggcggggagtactccctcctcgtccaccacacccaggaggagctccagcagtggggcatgtcgccggagatgatcgccgaccagcagtggcgcgcctccgccaaccgccgctgctgggccgaggagtgctcctccttcatcgacaccttcttcgaggagccctacggctcgtcggagacctcctcctcggacgaagacgaagcagaggacaaggaggaggagaccaagctgctggagcaactataactggtttcatccacatccaatccacccattcgcctcgtcctttgaaattctctccattggattggatcttataccatgtgggaagagcggagcagtgatgctgcattcagtcatcgctgatccctctcttattcgaaaacagtctgtagcatgttcataatagctattagctagaactagaaatgattcgagggcaatttcagaaaatgctaaagaaacatatgctgtatctcaaggttttagctctgacatgattctgtatgttcctagatataagaacgcatacattctctattcaaaataaaatgctcagaggagataaatttgtctcgatcgctactttcctaaactctaatcctgtgggcgtcgctaccactcggtctgtcgtttattggttattggcactgttgatggacagtacaagtaccatttctcacatgctgggcatcagcagacacttgtccatatgtaaaagcagagaatctttccaattccatacagctggcatggtgacagccatattcctcactaggggagtaggagcc

SEQ ID NO: 221676 - DNA, 695 bp, Zea Mays
ctccctcctccctctgtgcgacggctgggtgggcttccgccgccgccctacgccaagtgccggggccatatagccggtctcttcgccggcgacgagaacgcatcaggctaacttccctgcgcaggcgaggctaacggcaacaccgagccaggccgtccgggtttaattggttcgcggcgatgggccgcccggagccggtcgtgctgttcgctcagacgatcctccactcccagctggacgagtacgtcgacgaggtgctattttctgagccagttgtgatcactgcttgtgagtttcttgagcagaatgcatctccttctacgccaaacatttcccttgttggtgctacatcgccaccttcatttgctttggaaatgtttgttcactgtgatggggagtctcggtttaggcgtctttgccatcctttcttatattcacattcttcatcgaatgtgctagaagttgaggtatgaataaattcatagtttctagtttgtcttccttttaagtgacacttcttatttctttgctatttttatccatatcttgctgaggtaaggattgctgtagtccaggttgggtaaggatcccaatgcatgagagtaggacgcctgtccttggttgactggtcaggagctcatctcctatgcagctcgccaagaatctgggccaggctgaagaaagaggctgacccg

SEQ ID NO: 221677 - DNA, 3006 bp, Zea Mays
ccgagagtgacgagcagcccagcagctgcccgccgctaatctgcgtcgacaaaaccaggcgggctgccactagggttttagtgcttctctcccggcggcgcctccacatctcgtctctcagatcgggaggcgaaaccaaggcatacatatacatatttgtagtggtaccatcataacaagtaaagatggtgaagttcacggctgaagagctccgtgccatcatggacaaaaagaacaacattcgtaatatgtctgttattgctcatgtggaccatggcaagtctacacttacagattcccttgtggcagctgctgggattattgcccaggaagttgctggtgatgttcgcatgactgatactcgtgcagatgaagccgagcgtggcatcacaatcaaatctactggtatctctctttattatgagatgactgatgagtcactgaagaactacaagggtgagagggatggtaaccaatacttgatcaaccttattgactcacccgggcacgtcgatttttcttcggaagtcacagctgctcttcgcatcaccgatggtgctctggttgtggttgattgtattgaaggtgtctgtgtgcaaactgaaactgtgcttcgccaagcccttggtgagaggattaggccagttcttaccgtgaacaagatggacaggtgcttccttgagcttcaggttgagggtgaggaagcttatcagactttctcccgtgttattgagaatgccaatgtcatcatggcaacatatgaagataagctccttggtgatgtccaagtatacccagagaaggggacagttgccttttctgctggtctgcatggatgggcctttacactcactaactttgcgaagatgtatgcatctaagtttggagttgatgaatctaagatgatggagaggctatggggtgagaatttctttgaccctgccacaaagaaatggaccaccaagaacacaggttctcctacctgcaagagaggatttgttcagttctgctacgagccaatcaagcaaatcatcaaaacctgcatgaatgaccaaaaggagaaattgtggcccatgttgcaaaagcttaatgttaccatgaaggctgatgagaaggagttgattggcaaagctttgatgaagcgtgttatgcaaacgtggcttccagccagcactgcacttcttgagatgatgatattccaccttccttccccggcaaaggctcaaaagtatcgtgtggagaacttgtatgagggaccccttgatgatgtttatgcaactgctatcagaaactgtgatccggagggtcctcttatgctgtatgtttcaaagatgattccagcatctgacaagggcaggttctttgcctttggtcgtgtcttctcagggaaggttgctactggtatgaaagttcggatcatgggtcccaactatgtccctggccagaagaaggacctgtatgtcaagagtgttcagcgtactgttatctggatgggaaagaaacaagagtcagttgaggatgttccttgtggtaacactgttgctatggttggtctggatcagttcatcacgaagaacgctacactcactaatgagaaggaggttgatgcatgcccaatcagagcaatgaagttctctgtctcccctgttgtgcgtgttgctgttcagtgcaaggttgcttccgaccttcccaagctagtagaaggtttgaagcgtctggcgaagtccgatcctatggttctgtgtacaatggaagaatctggtgagcatatcattgctggagctggtgagcttcatcttgagatttgcctgaaggatctgcaagaggacttcatgggaggtgctgaaattattgtttctcctcctgttgtgtccttccgtgaaaccgttcttgagaagtcctgccgcactgtcatgagcaagtcacctaacaagcacaaccgtctgtacatggaagcgcgccccctggaggagggtcttgctgaggcaattgatgatggccgcattggcccacgtgatgatcctaaggtgcgctcccagatcctctctcaagagtttgggtgggacaaggatcttgccaagaagatttggtgcttcggacctgagaccaccggcccaaacatggttgttgatatgtgcaagggagtgcagtatctcaatgaaatcaaggattctgttgtggctggtttccagtgggcatcgaaggagggtgcactggctgaagagaacatgcgcgggatttgcttcgaggtctgtgatgtcgttcttcatgccgatgctatccacaggggtggtggccaggtcattccaactgccaggagggtcatttatgcttctcagctcacagccaagccgaggctgctggaaccagtttacctggtggagatccaggccccagaaaatgcacttggtggcatatacggtgttctgaaccagaagagaggacatgtattcgaggagatgcaaaggcctggtaccccgctctacaacatcaaggctttcctccctgtcatcgagtcctttgggttctcaagccagctgagggctgcaacctctggtcaggcgttcccccagtgtgtgtttgaccactgggacatgatgggctcggatcctttggaggctggctcccaggctgcccagctggtgctggatatccgcaagaggaagggtctgaaagaacagatgactcctctttctgagtttgaggacaagctctaatcttttcgtttttgctactgttactggttttaattgtcactcggagtctgggaactatttatatcttgtttccttttagttgtcaagtgcatgtttctgaacatcattggtcatactgtactatccaagtgctgttgagacacttttttctatcaatcgtgatgtaacagttggtatatgctggcttggtggaagtgtttgtagtaaatgcttgtgctatcttgatttaattcttgttcccttacattgcttattagtctttcggttgttacgtaggctaaaccatgct

SEQ ID NO: 221678 - DNA, 2156 bp, Zea Mays
atgggcaactgctgcccgggctccggggatgcggagcccgcccccgctgcctccgccgatccctcctcccacctccactccggcagcttgtccctcaaggccggcgcctcggcaggctcggcgcccactcccacaaagccgcccgcgcctatcggcccggtcctgggacggcctatggaggacgtgcgcagcatctacactgtcggcaaggagctcgggcgtggccagttcggcgtcaccagcctgtgcacgcacaaggctaccggggagcgcttcgcgtgcaagaccattgccaagcggaagctctccaccaaggaggacgtggaggacgtgcggcgcgaggtgcagatcatgtaccaccttgccgggcagcccaacatcgtggagctcaaaggcgcctacgaggacaagcagtcggtgcacctcgtcatggagctctgcgccggcggggagctcttcgaccgaatcatcgccaagggcaagtacacggagcgcgccgccgcgtccctgctccgcaccatcgtggagatcgtgcacacctgccactccctgggcgtcatccaccgcgacctcaagcccgagaacttcctcctcctcaacaaggacgagaaagcgccgctcaaggcaactgacttcggcctgtccgtcttcttcaagcaaggggaggtgttcaaggacatcgtcggcagcgcgtactacatcgcgccggaggtgctcaagaggaactatggccccgaggcggacatctggagcatcggcgtcatcgtctacatcctcctctgcggagttccgcccttctgggccggcaagctcaagcagttcacggcaatgaaccagttcaagaaggccgcgctgagggtcattgccgggtgcctgtcagaggaggagatcaggggcctgaaggagatgttcaagggcatggactccgacaacagcggcaccatcaccgtggacgagctgcggcgagggctggccaagcagggcaccaagctcagcgaggccgaagtggagcagctgatggcggccgcagacgcggacgggaacgggacgatcgactacgaggagttcatcacggcgacgatgcacatgaacaggatggacagggaagaacacctctacaccgcgttccagtacttcgacaaggacggcagcgggtgcatctccaaggaggagctggagcaggcgctcaaggagaaggggctcctggacggcagggacatcaaggacatcatctcggaggtcgacgccgacaacgacgggaggatcgactacagcgagttcgtggcgatgatgaggaaagggaccgccgagccgaaccccaagaagcggcgcgacgtcgtgttgtagcctgtgtaggagcatgcgtagaggtagctgctgatatatggtatggtatatcggatggtaaaatggaacggcgtccagcagttgatgccattgccacgacggtggttgcttgcacgctggtcgagcagcacaaggcgcgcgcggtggtggcagggagatgcgcgcactcggctgcgaatacgtggagatgctggagcatggaggggacagagactctttgacaatgtacgtagctactatgggatgatggaatggaaggatgcacgcatacctgatcgaccgaccgaggacctgtgctggagcctctgaacacacagcagcagcagctgctgctgctgtgtcttggatccgtaggtatgcttactgatggttcgagaattcgtatgcgtaaaacgtgcaatggccatggactgtgtatatatcctcagatgtgtaagtgtaagtaacgtcgtaaagggaagaagaaaaatataatatgatgagacagttttttttttccttccctttgtagcataaccattggttcgcggtgatcacagaggtagagaagtaatgcagtagacatgcatctacacatatacatacatggaaaacagattacattcagccaagagacaagctattctatgcaggactacaaacctgtagcttctctctatgctagtcgacagagaaatcgtgtcaacgtgaaatagcatttctattaaggtgttgtttcagcccaaattagtaaggctctttttggaagttttaagaatctagtttctatctccacttcttaaagactggttaatggtgtttggaaccac

SEQ ID NO: 221679 - DNA, 2479 bp, Zea Mays
tagaattctcatcaggtcgccttcgtctcccctacggcttcacatccccatcaccgtcatcctctccggggggacggacgccgctgcccctccgccgccccgtcgccatgggcaactgctgcccgggctccggggatgcggagcccgcccccgctgcctccgccgatccctcctcccacctccactccggcagcttgtccctcaaggccggcgcctcggcaggctcggcgcccactcccacaaagccgcccgcgcctatcggcccggtcctgggacggcctatggaggacgtgcgcagcatctacactgtcggcaaggagctcgggcgtggccagttcggcgtcaccagcctgtgcacgcacaaggctaccggggagcgcttcgcgtgcaagaccattgccaagcggaagctctccaccaaggaggacgtggaggacgtgcggcgcgaggtgcagatcatgtaccaccttgccgggcagcccaacatcgtggagctcaaaggcgcctacgaggacaagcagtcggtgcacctcgtcatggagctctgcgccggcggggagctcttcgaccgaatcatcgccaagggcaagtacacggagcgcgccgccgcgtccctgctccgcaccatcgtggagatcgtgcacacctgccactccctgggcgtcatccaccgcgacctcaagcccgagaacttcctcctcctcaacaaggacgagaaagcgccgctcaaggcaactgacttcggcctgtccgtcttcttcaagcaaggggaggtgttcaaggacatcgtcggcagcgcgtactacatcgcgccggaggtgctcaagaggaactatggccccgaggcggacatctggagcatcggcgtcatcgtctacatcctcctctgcggagttccgcccttctgggccgaatccgaacacggcatcttcaactccatcctgaggggacaggtcgacttcacaagcgacccgtggccgcgcatttcgccgagcgcaaaggacctcgtcaggaagatgctcacctctgaccccaagaagaggatctctgcctacgacgtcctcaaccatccttggatcaaggaagacggtgaagcgcctgacacgccactggacaacgctgtcatgaacaggctcaagcagttcacggcaatgaaccagttcaagaaggccgcgctgagggtcattgccgggtgcctgtcagaggaggagatcaggggcctgaaggagatgttcaagggcatggactccgacaacagcggcaccatcaccgtggacgagctgcggcgagggctggccaagcagggcaccaagctcagcgaggccgaagtggagcagctgatggcggccgcagacgcggacgggaacgggacgatcgactacgaggagttcatcacggcgacgatgcacatgaacaggatggacagggaagaacacctctacaccgcgttccagtacttcgacaaggacggcagcgggtgcatctccaaggaggagctggagcaggcgctcaaggagaaggggctcctggacggcagggacatcaaggacatcatctcggaggtcgacgccgacaacgacgggaggatcgactacagcgagttcgtggcgatgatgaggaaagggaccgccgagccgaaccccaagaagcggcgcgacgtcgtgttgtagcctgtgtaggagcatgcgtagaggtagctgctgatatatggtatggtatatcggatggtaaaatggaacggcgtccagcagttgatgccattgccacgacggtggttgcttgcacgctggtcgagcagcacaaggcgcgcgcggtggtggcagggagatgcgcgcactcggctgcgaatacgtggagatgctggagcatggaggggacagagactctttgacaatgtacgtagctactatgggatgatggaatggaaggatgcacgcatacctgatcgaccgaccgaggacctgtgctggagcctctgaacacacagcagcagcagctgctgctgctgtgtcttggatccgtaggtatgcttactgatggttcgagaattcgtatgcgtaaaacgtgcaatggccatggactgtgtatatatcctcagatgtgtaagtgtaagtaacgtcgtaaagggaagaagaaaaatataatatgatgagacagttttttttttccttccctttgtagcataaccattggttcgcggtgatcacagaggtagagaagtaatgcagtagacatgcatctacacatatacatacatggaaaacagattacattcagccaagagacaagctattctatgcaggactacaaacctgtagcttctctctatgctagtcgacagagaaatcgtgtcaacgtgaaatagcatttctattaaggtgttgtttcagcccaaattagtaaggctctttttggaagttttaagaatctagtttctatctccacttcttaaagactggttaatggtgtttggaaccac

SEQ ID NO: 221680 - DNA, 1726 bp, Zea Mays
cgaataccgctgctcgcgcgagcgcaggcagcgaagccacaccaccaccaccagtccaccgccaccaggcggtcgccatacgattcaccgcgcacgtaacatgagaacagcgaacacgaagatgcttccccgggcggcagcggacgaggagacgagagagggagagatggggccggacctcctgggacttggcttgctgccgccgccgatggccggcggcggccacggaggtggttcagcggcgcagcgacgaccttatcagaagacgggattcgacgagcccctacgtttcgccgccgacgcccctttgccggtgcgcccgcggccccggccagtggacgtggacgacggcgtcgtccctgcagcagcacctccggcgagcatgccgaagccgcccgcgtcgtcgaccgcggcacggtgggcgccagctgagctagcgtcgtccccgacgaaggtctgtgtcccgggcccttctccgaggaggaaagctgagacccatcttttctgacaaatcttaacgagcctctctcagctcggttctttcagggagatctttcaggttccgtcgacgttttgtagtgatcagctggccgccggcgagggctgcagggcgcatgccgtggccacgtgcgcctcgccgccgctcatgcaatgctgtccctgccccgccgcaggcgtgttgttttttggcagcaggccgccggttaccgcaggactgatctttgaggactccgcctccgcggcagtagcacggagcacccatgacgattccaccgcgccaacgacgataatctacgcgggctctgtgtgtgcctatgacggtgctatgatagaacaggccgagaaggtcctggctatggtagcaaaggaggctcacgctgctggaatcctgtccgtccaacggacagagccgcagttagaactagttgctgcaatcacaggtggtgcagcgcagatgacaatgcatcggagattggctcatcatgtcagcgatagtcttaagagaacggcatccctcgcccgcttcctggataaacgcaagcaaagggcggagagtgcagggacgatgcagcatcaccctcgcagagaggagtggcggttccctgcgcaaacaacggacgctccggctgccacggtttccgcgagaaccagcgcctcgcttggcggcatggaccggcggccacgggcctcccaagaccatcccaagagaatgaaagcgagccatggcgacgaggcagtgagcactgagctgaggatctagctggggcacagcagccatcggagttcaaagagcttctatgactccagacaatccaggccaaatcatggatttttactgttcttgggttcatggatccaaccatcagaacccatttccactttgtctaatcgacgaaaggcccttggtgtcagctagtatttgaactttaagatcagctaacctgttgtgcttgcttgctaataacagtaactattaattgctaattgcacatattctccggccgtaatgcacagtttttttggggctcatttgttcatgctagaaaggatacaacgtagtagttttgattttatgacttgcatgtttttgttcatgctacaaagaatgtagtgctagcaaattctttatccggtgttgtacttgctctactaattgcatatcttttcggtaatgtaacattttgttggtctcatttgttcataacacaaagaatgtaacttccta

SEQ ID NO: 221681 - DNA, 1438 bp, Zea Mays
ctcgcgcgagcgcaggcagcgaagccacaccaccaccaccagtccaccgccaccaggcggtcgccatacgattcaccgcgcacgtaacatgagaacagcgaacacgaagatgcttccccgggcggcagcggacgaggagacgagagagggagagatggggccggacctcctgggacttggcttgctgccgccgccgatggccggcggcggccacggaggtggttcagcggcgcagcgacgaccttatcagaagacgggattcgacgagcccctacgtttcgccgccgacgcccctttgccggtgcgcccgcggccccggccagtggacgtggacgacggcgtcgtccctgcagcagcacctccggcgagcatgccgaagccgcccgcgtcgtcgaccgcggcacgcaggccgccggttaccgcaggactgatctttgaggactccgcctccgcggcagtagcacggagcacccatgacgattccaccgcgccaacgacgataatctacgcgggctctgtgtgtgcctatgacggtgctatgatagaacaggccgagaaggtcctggctatggtagcaaaggaggctcacgctgctggaatcctgtccgtccaacggacagagccgcagttagaactagttgctgcaatcacaggtggtgcagcgcagatgacaatgcatcggagattggctcatcatgtcagcgatagtcttaagagaacggcatccctcgcccgcttcctggataaacgcaagcaaagggcggagagtgcagggacgatgcagcatcaccctcgcagagaggagtggcggttccctgcgcaaacaacggacgctccggctgccacggtttccgcgagaaccagcgcctcgcttggcggcatggaccggcggccacgggcctcccaagaccatcccaagagaatgaaagcgagccatggcgacgaggcagtgagcactgagctgaggatctagctggggcacagcagccatcggagttcaaagagcttctatgactccagacaatccaggccaaatcatggatttttactgttcttgggttcatggatccaaccatcagaacccatttccactttgtctaatcgacgaaaggcccttggtgtcagctagtatttgaactttaagatcagctaacctgttgtgcttgcttgctaataacagtaactattaattgctaattgcacatattctccggccgtaatgcacagtttttttggggctcatttgttcatgctagaaaggatacaacgtagtagttttgattttatgacttgcatgtttttgttcatgctacaaagaatgtagtgctagcaaattctttatccggtgttgtacttgctctactaattgcatatcttttcggtaatgtaacattttgttggtctcatttgttcataacacaaagaatgtaacttccta

SEQ ID NO: 221682 - DNA, 728 bp, Zea Mays
tttctgctggcatgtctgaagcgtcatgggacgggtgcattgtttgtccatcaacagacagcacatttgaccttcgcaccggggagataaaagaatggtatccgaaaaaccctgtcctacgggctcttacgccagccttgaggaaactattcacctaccgcgtgaaaacagacgaagaaaacatatacatcagcttcagcggagccgacggtgcggggtcagcggagattatattcagcgggaaagctcagcctggtgtgactgcatcggatgtcaatgtggaagagagaagtgagaagctcgtttcactgaacttgtgcacccaacttatatcccccttctacgttttcaggtgaggatggtcgtcgacgaggatgtcggaggcttcggcttcaccagtgacaacgagctgatcaacggaaaagccgccataatcggcttcctcctgctgatcgatttcgagcttctaactggcaagggccttctcaaggggacggggttcttggacttcatctacgcagtttcgggagctttcaactgagagtcatatgtgtgtttgttgttcgttccttggtatcaagaatgccatcgaggtgtacttgactacccttagaagcctaggttttgtcagcgtgcgattcagtcagctgtgcttgtatttgaacatcaccatgcttgtctgtgaagtgaggaagggacacgagaaagtcacatttgcggtgcttctt

SEQ ID NO: 221683 - DNA, 1519 bp, Zea Mays
aaactagctctaaaataatgaccgagctcgagtgccgagtggcagcttgcgggaggacaatgatggatggcatgtttcgtcctgctgtgcatttgcagatttcaaaggagttcactggacgggaacctataaatgtgtccgcttctcttccccacgcccggtcttgtcgctttatcgccaacctgtggccatggacgttccagcacgcaccaccaccacggcaccaccaccctgcccccctcctcctgctcaaacccaccccctctcgctcgcctccccgccactcccctcccgtccctatggcggccgttaccacagccactgccgccgcgtcctcctcctccttcctccaccgccgaagccccgcctgcctgcgcgccacgctccgcgccgcgccgcggcactgccgcaactccagctccaggctcgcctgccgcgccgccgaggtgtccggggccgagtcgtcctcggccgcggcggagggcgcgggaggaggcgggggcgcgtcgtgggtgcccgtggtgccgctcgccgcgctgccgcgcggagagcgccgcgtgatcgtgcaggacggggaggagatcctgctgctctggtacaagaaccaggtcttcgccatcgagaaccggtcgccagcggagggcgcctacaccgagggcctcctcaacgccaagctcacgcaggacgggtgcattgtttgtccatcaacagacagcacatttgaccttcgcaccggggagataaaagaatggtatccgaaaaaccctgtcctacgggctcttacgccagccttgaggaaactattcacctaccgcgtgaaaacagacgaagaaaacatatacatcagcttcagcggagccgacggtgcggggtcagcggagattatattcagcgggaaagctcagcctggtgtgactgcatcggatgtcaatgtggaagaggtatcatttttttaaatttttttgctgttcgatacgattcctgcttcacacacacacacacatgttctctctcctctgttccatacgatatacatccctgcagctcttctcattagcttcatactctacatttccagagaagtgagaagctcgtttcactgaacttgtgcacccaacttatatcccccttctacgttttcaggtgaggatggtcgtcgacgaggatgtcggaggcttcggcttcaccagtgacaacgagctgatcaacggaaaagccgccataatcggcttcctcctgctgatcgatttcgagcttctaactggcaagggccttctcaaggggacggggttcttggacttcatctacgcagtttcgggagctttcaactgagagtcatatgtgtgtttgttgttcgttccttggtatcaagaatgccatcgaggtgtacttgactacccttagaagcctaggttttgtcagcgtgcgattcagtcagctgtgcttgtatttgaacatcaccatgcttgtctgtgaagtgaggaagggacacgagaaagtcacatttgcggtgcttctt

SEQ ID NO: 221684 - DNA, 1696 bp, Zea Mays
ctaacagggagggcagacggagaaccaggagcggcgtcgagctaaaagccccggcggcggtcatggccaccgcagaccagagccgtattttcatgaaggacgtcaaacgcgtcatcatcaaggtgggcactgcagttgtcacgaggcatgatgggcgagtatccacaggcaattttggtgttctttgtgaacaggtgaaagagataaatgctctaggatacgaggtgatcattgtgtcctcaggtgctgttggtgtggggaagcagaggctcaattacaggaagcttgtcaatagcagctttgctgatatgcaaaagccacagacggagctggatggaaaggcttgcgctgccgttggacagagtggcctcatggctctctatgatatgctatttactcaacttgatgtatcctcttcccaacttcttgtgacagacagtgattttgagaatccaaacttcagggagaggcttcgtgaaactgttgagtcactattagatcttaaagttgtaccaatatttaatgaaaatgatgccatcagcaccagaaaggctccgtatgaggattcatcgggtatattttgggataatgacagtttagccggtcttttggctatagaacttaaagcagatcttcttgttctactcagtgacgtggatggcctctacagcggtccacctagtgaacctcaatcaaagatgatacatacatacatcaaagataaatatcataacgaaattacttttggggataagtcacgtgtaggtagaggaggaatgacagctaaagtgaaggctgctctcgtggcttcaaacagtggcacacctgttgttataacaagtggatctgcatctgggagcatcattagagttctccaaggagagaagattggtactctctttcataaggacgcgagtttgtgggaaccatccagtgatgttagtgcatgtgagatggctgttactgcaagagaatgttcaaggcgtctgcagaatttgtcgtcggatgagcgcaataaaatattgctagacgtggcggatgctttggagaaaaatgagaatctaattaggaccgagaatgaagccgatgtagctgcagcgcaagatgctggatatgagaaatttttggttgatagattgaccctaaagccaggaaagatatcagccctcgcgaaatccattcgcactcttgcacgtatggaagacccaatcaaccaaatactcaaaagaacagagattgctgaaaatttaattctcgagaaaacatcatgtcctttgggtgtcctattggttatttttgagtccaggcctgatgccttggtccagattgcatctttagcgattcgaagtggcaatggtcttctcttgaaaggtggaaaagaagccatgagatcaaacaaagtattgcataagaggcagcaataagctggtttcacaaatcaagacatcaactaagatccctgttcttggtcatgctgatggtatctgtcatgtatacatcgacaaatcagctaacatgaatatggcaaaacaaatagtgatggatgccaaaattgattacccagcagcctgcaatgctatggtatgtctaatttgttacaatttatagtatttaacatgtctcttttcagcttgcatacttaactactcttggcacgtccttactcaagagaaccaagtgataccttacacactag

SEQ ID NO: 221685 - DNA, 1763 bp, Zea Mays
gcggcgacgagagacgagagagagggaggtgccgaaaaaaaaaacggacaagagagggcgaagttaacactaacagggagggcagacggagaaccaggagcggcgtcgagctaaaagccccggcggcggtcatggccaccgcagaccagagccgtattttcatgaaggacgtcaaacgcgtcatcatcaaggtgggcactgcagttgtcacgaggcatgatgggcgagtatccacaggcaattttggtgttctttgtgaacaggtgaaagagataaatgctctaggatacgaggtgatcattgtgtcctcaggtgctgttggtgtggggaagcagaggctcaattacaggaagcttgtcaatagcagctttgctgatatgcaaaagccacagacggagctggatggaaaggcttgcgctgccgttggacagagtggcctcatggctctctatgatatgctatttactcaaacagtgattttgagaatccaaacttcagggagaggcttcgtgaaactgttgagtcactattagatcttaaagttgtaccaatatttaatgaaaatgatgccatcagcaccagaaaggctccgtatgaggattcatcgggtatattttgggataatgacagtttagccggtcttttggctatagaacttaaagcagatcttcttgttctactcagtgacgtggatggcctctacagcggtccacctagtgaacctcaatcaaagatgatacatacatacatcaaagataaatatcataacgaaattacttttggggataagtcacgtgtaggtagaggaggaatgacagctaaagtgaaggctgctctcgtggcttcaaacagtggcacacctgttgttataacaagtggatctgcatctgggagcatcattagagttctccaaggagagaagattggtactctctttcataaggacgcgagtttgtgggaaccatccagtgatgttagtgcatgtgagatggctgttactgcaagagaatgttcaaggcgtctgcagaatttgtcgtcggatgagcgcaataaaatattgctagacgtggcggatgctttggagaaaaatgagaatctaattaggaccgagaatgaagccgatgtagctgcagcgcaagatgctggatatgagaaatttttggttgatagattgaccctaaagccaggaaagatatcagccctcgcgaaatccattcgcactcttgcacgtatggaagacccaatcaaccaaatactcaaaagaacagagattgctgaaaatttaattctcgagaaaacatcatgtcctttgggtgtcctattggttatttttgagtccaggcctgatgccttggtccagattgcatctttagcgattcgaagtggcaatggtcttctcttgaaaggtggaaaagaagccatgagatcaaacaaagtattgcataagcttcatgatgtaattgatcttgtcattccaagaggcagcaataagctggtttcacaaatcaagacatcaactaagatccctgttcttggtcatgctgatggtatctgtcatgtatacatcgacaaatcagctaacatgaatatggcaaaacaaatagtgatggatgccaaaattgattacccagcagcctgcaatgctatggtatgtctaatttgttacaatttatagtatttaacatgtctcttttcagcttgcatacttaactactcttggcacgtccttactcaagagaaccaagtgataccttacacactag

SEQ ID NO: 221686 - DNA, 1580 bp, Zea Mays
gaaagctataaaatcgcgcttcaaagacctgtcctctctccactccttgcgattgcggcgacgagagacgagagagagggaggtgccgaaaaaaaaaacggacaagagagggcgaagttaacactaacagggagggcagacggagaaccaggagcggcgtcgagctaaaagccccggcggcggtcatggccaccgcagaccagagccgtattttcatgaaggacgtcaaacgcgtcatcatcaaggtgggcactgcagttgtcacgaggcatgatgggcgagtatccacaggcaattttggtgttctttgtgaacaggtgaaagagataaatgctctaggatacgaggtgatcattgtgtcctcaggtgctgttggtgtggggaagcagaggctcaattacaggaagcttgtcaatagcagctttgctgatatgcaaaagccacagacggagctggatggaaaggcttgcgctgccgttggacagagtggcctcatggctctctatgatatgctatttactcaacttgatgtatcctcttcccaacttcttgtgacagacagtgattttgagaatccaaacttcagggagaggcttcgtgaaactgttgagtcactattagatcttaaagttgtaccaatatttaatgaaaatgatgccatcagcaccagaaaggctccgtatgaggattcatcgggtatattttgggataatgacagtttagccggtcttttggctatagaacttaaagcagatcttcttgttctactcagtgacgtggatggcctctacagcggtccacctagtgaacctcaatcaaagatgatacatacatacatcaaagataaatatcataacgaaattacttttggggataagtcacgtgtaggtagaggaggaatgacagctaaagtgaaggctgctctcgtggcttcaaacagtggcacacctgttgttataacaagtggatctgcatctgggagcatcattagagttctccaaggagagaagattggtactctctttcataaggacgcgagtttgtgggaaccatccagtgatgttagtgcatgtgagatggctgttactgcaagagaatgttcaaggcgtctgcagaatttgtcgtcggatgagcgcaataaaatattgctagacgtggcggatgctttggagaaaaatgagaatctaattaggaccgagaatgaagccgatgtagctgcagcgcaagatgctggatatgagaaatttttggttgatagattgaccctaaagccaggaaagatatcagccctcgcgaaatccattcgcactcttgcacgtatggaagacccaatcaaccaaatactcaaaagaacagagattgctgaaaatttaattctcgagaaaacatcatgtcctttgggtgtcctattggttatttttgagtccaggcctgatgccttggtccagattgcatctttagcgattcgaagtggcaatggtcttctcttgaaaggtggaaaagaagccatgagatcaaacaaagtattgcataagcaacgtgggtgaaaaacttattggccttgttacaagtagagacga

SEQ ID NO: 221687 - DNA, 1571 bp, Zea Mays
cgattgcggcgacgagagacgagagagagggaggtgccgaaaaaaaaaacggacaagagagggcgaagttaacactaacagggagggcagacggagaaccaggagcggcgtcgagctaaaagccccggcggcggtcatggccaccgcagaccagagccgtattttcatgaaggacgtcaaacgcgtcatcatcaagctggggaatcctattcctatctatggaattgaacgtgtccgggaaaaagagggaattgaacgggctgaacgggcccgggaaaaagtgggcactgcagttgtcacgaggcatgatgggcgagtatccacaggcaattttggtgttctttgtgaacaggtgaaagagataaatgctctaggatacgaggtgatcattgtgtcctcaggtgctgttggtgtggggaagcagaggctcaattacaggaagcttgtcaatagcagctttgctgatatgcaaaagccacagacggagctggatggaaaggcttgcgctgccgttggacagagtggcctcatggctctctatgatatgctatttactcaacttgatgtatcctcttcccaacttcttgtgacagacagtgattttgagaatccaaacttcagggagaggcttcgtgaaactgttgagtcactattagatcttaaagttgtaccaatatttaatgaaaatgatgccatcagcaccagaaaggctccgtatgaggattcatcgggtatattttgggataatgacagtttagccggtcttttggctatagaacttaaagcagatcttcttgttctactcagtgacgtggatggcctctacagcggtccacctagtgaacctcaatcaaagatgatacatacatacatcaaagataaatatcataacgaaattacttttggggataagtcacgtgtaggtagaggaggaatgacagctaaagtgaaggctgctctcgtggcttcaaacagtggcacacctgttgttataacaagtggatctgcatctgggagcatcattagagttctccaaggagagaagattggtactctctttcataaggacgcgagtttgtgggaaccatccagtgatgttagtgcatgtgagatggctgttactgcaagagaatgttcaaggcgtctgcagaatttgtcgtcggatgagcgcaataaaatattgctagacgtggcggatgctttggagaaaaatgagaatctaattaggaccgagaatgaagccgatgtagctgcagcgcaagatgctggatatgagaaatttttggttgatagattgaccctaaagccaggaaagatatcagccctcgcgaaatccattcgcactcttgcacgtatggaagacccaatcaaccaaatactcaaaagaacagagattgctgaaaatttaattctcgagaaaacatcatgtcctttgggtgtcctattggttatttttgagtccaggcctgatgccttggtccagattgcatctttagcgattcgaagtggcaatggtcttctcttgaaaggtggaaaagaagccatgagatcaaacaaagttataactggtg

SEQ ID NO: 221688 - DNA, 3384 bp, Zea Mays
gcccaatctagcccgtcccccaaccgtccatctccaaacaagcgagtcggttagatatttcctcaagccccagtcagccgcctcctctccctcccacagctcctgccgccgcctctccctccgtcggtatctcccacctcgcaatccactcccacctcccccctcgcccctaaaaccctagctaaacccaagccgaaagaaacaatggctctcctcgcctaagcgagctcgcgcccgccccttgctggccatggcgctccagctccgccgcttcctcccgcacggctacggccagcgacaccgcgctgtcacccacgtgctatcaccgccgccgccactcgcgatgcttcagttcgaggtgtttcagagatattcttccgcaccctggcccttgtcacctttccgcccttgtgaaatgtgtggggttgcattcaggagcaattcaacaaggaaaatgtgctcgagaaatatttttggggttgcatcacagcccaaaagtagcaccttttttactactggactctctggcaaccgtagctctgtatgtttcagagcgagggacagccgtggaattgctttaaagactaataatattgttaattcacgaccattctcaactatatacagtaaaaagctaaggtttcttattaaaaataagacttcatgcaataatctaaatgtgagaagggaagatggaagtgttgcacatagtttgttttgtagatctgagaaacgccaaagcacagttgctacgtgtagcaccattgctgacgaggcttcaacatctactagtaacagcagcaagagtgttactgattctaagactgacactgccaagatgaggcgttcaagaggaagcaaaaaagaagttgatggagttatgaaagataaggaagtacataccaagaaaaagagaatatcttctagaacttgtatagctgcaacaaagacgactgagagttctagtgcgaagcaagaaaacaagaagactgataattgtaaactgaaaaagggtactgatagtcctaaagagaaaaaagtgaataataggtcaaagtcaaaagcaaaggtttctgcttcttctgtatcttctgaagctgagatttgtatgaaatcctctatcgatggttctggtattgagaaaaagccactggtgccattgtatcctccgagagccaaatcagtcgtggttgtggaatcagccacgaaagcaaaagttattcagaattatcttggggacatgtatgaagtgttaccaagctatggtcatgtgagagatttagcaggtagatcaaaatctgtccgccctaatgatgacttcagcatggtctgggaggtgcctgctgctgcctggacacaccttaagagcattaaagttgcactgaaaggagcagaaaatttaattcttgcatctgatcctgatcgtgaaggtgaagcgattgcttggcacatcaaagaaatgcttgaacaacaaggtgcattgggctgtgatgtgactgttgcaagagttgttttccatgaaataactgagaatgcaataaaaaaggctttaatgtccccaaggtatattgatatggacttggtcaatgcttatcttgcacgccgttcccttgattatgtaattgggtttggcatatcaccacttctgtggaggaagttgcctggttgccaatcagctggacgggtccaatctgctgctttggcccttgtgtgcgatcgagaatctgaaatagaacagtttaagccacaggaatactggacagtacgggcagacttcaaaatgcaatttgcagatctgtcaaatggcacatgtattccatttcatataaagcatttgaattcaaaaaagctgggtcaactttccataccctctcaagaagaagcgcaagctatagaaaaaaggattcattcttctaagtttgaagttttaggtgttaaaagaagtaaaattcacaagaatcctccaatgccatatattacatccagccttcagcaggatgcagcaaacaaacttcattttactgcagggtataccatgaagattgcccaaaagctttatgagggtatcaatctttcctcagaagaaacaactgggttaataacatacataagaactgatgggtttcatatttctgatggagccgcagaagacatccgttcattagtcaaagaaagatacggccagaagtacgttttagaggacactaggaagtatttaaagaaggtgaaaaatgctcaagaagcccacgaagcaattaggcccaccagtataaggaggttgccatcatctttggttggaatacttgacgatgattctctaaaactgtacactctaatatggaaaaggacaatggcttgccaaatggaagcttctagaactcagatgattcaagtggatgttggcactcctgaaggagagatgatttttcattcagctgcatcaaagctagacttcaagggataccaatctgtttatgaggacactgagggagattctgtgcatgaggataactttgaggccttgtcaaaattaatggttaaggacttggtgtcccctgttaacgtgcatcttggacagcactttactaagccaccatcacgttattctgagggtgcattgattaaaaagctagaagaacttggaattggaaggccatctacttatgcatctataatgaaagtattacaggataggaagtacgtgacagcaaaaagtcgagttctacaccctgagttccgtggtcgaatggtctcggcattccttttgcaccatttctctgaggttgctgattacagctttacagctaacatggagacagagctagataatgtctctgctgggctaactgaatggaagggtcttctaaaaggctactgggaacgattcagcaaatattgtgcagatgcgagtaatctggatggcagaaaggtagagagaatgctcgaagaaaaatttggtcctatcctcttccctaatgttgacacagacaatagaatttgccctagttgttctgaaggaaccttgagattcaaagttagtaggtatggtgaaggctattttataggctgtgatcgacatccaaaatgcaagtacattgctcgctcattatcacaacaagaagatgaaaccgaacccaccgaagaatgtcaaaaaacttttacacccagattacttggtgtcatgcctgattctgatgaaaaggattggtgttgccaatgaaatctgttaagaatctatggcagaccaataggataggaattggttcacaataacataacaccccgacttcctaacaaaaatgtggccacttagtcactcatcgctcacaatcgcccacgccggggtacacccacggcaaagacctgcgaccgtgtcgggggaca

SEQ ID NO: 221689 - DNA, 4241 bp, Zea Mays
cccaaccgtccatctccaaacaagcgagtcggttagatatttcctcaagccccagtcagccgcctcctctccctcccacagctcctgccgccgcctctccctccgtcggtatctcccacctcgcaatccactcccacctcccccctcgcccctaaaaccctagctaaacccaagccgaaagaaacaatggctctcctcgcctaagcgagctcgcgcccgccccttgctggccatggcgctccagctccgccgcttcctcccgcacggctacggccagcgacaccgcgctgtcacccacgtgctatcaccgccgccgccactcgcgatgcttcagttcgaggtgtttcagagatattcttccgcaccctggcccttgtcacctttccgcccttgtgaaatgtgtggggttgcattcaggagcaattcaacaaggaaaatgtgctcgagaaatatttttggggttgcatcacagcccaaaagtagcaccttttttactactggactctctggcaaccgtagctctgtatgtttcagagcgagggacagccgtggaattgctttaaagactaataatattgttaattcacgaccattctcaactatatacagtaaaaagctaaggtttcttattaaaaataagacttcatgcaataatctaaatgtgagaagggaagatggaagtgttgcacatagtttgttttgtagatctgagaaacgccaaagcacagttgctacgtgtagcaccattgctgacgaggcttcaacatctactagtaacagcagcaagagtgttactgattctaagactgacactgccaagatgaggcgttcaagaggaagcaaaaaagaagttgatggagttatgaaagataaggaagtacataccaagaaaaagagaatatcttctagaacttgtatagctgcaacaaagacgactgagagttctagtgcgaagcaagaaaacaagaagactgataattgtaaactgaaaaagggtactgatagtcctaaagagaaaaaagtgaataataggtcaaagtcaaaagcaaaggtttctgcttcttctgtatcttctgaagctgagatttgtatgaaatcctctatcgatggttctggtattgagaaaaagccactggtgccattgtatcctccgagagccaaatcagtcgtggttgtggaatcagccacgaaagcaaaagttattcagaattatcttggggacatgtatgaagtgttaccaagctatggtcatgtgagagatttagcaggtagatcaaaatctgtccgccctaatgatgacttcagcatggtctgggaggtgcctgctgctgcctggacacaccttaagagcattaaagttgcactgaaaggaaaatttaattcttgcatctgatcctgatcgtgaaggtgaagcgattgcttggcacatcaaagaaatgcttgaacaacaaggtgcattgggctgtgatgtgactgttgcaagagttgttttccatgaaataactgagaatgcaataaaaaaggctttaatgtccccaaggtatattgatatggacttggtcaatgcttatcttgcacgccgttcccttgattatgtaattgggtttggcatatcaccacttctgtggaggaagttgcctggttgccaatcagctggacgggtccaatctgctgctttggcccttgtgtgcgatcgagaatctgaaatagaacagtttaagccacaggaatactggacagtacgggcagacttcaaaatgcaatttgcagatctgtcaaatggcacatgtattccatttcatataaagcatttgaattcaaaaaagctgggtcaactttccataccctctcaagaagaagcgcaagctatagaaaaaaggattcattcttctaagtttgaagttttaggtgttaaaagaagtaaaattcacaagaatcctccaatgccatatattacatccagccttcagcaggatgcagcaaacaaacttcattttactgcagggtataccatgaagattgcccaaaagctttatgagggtatcaatctttcctcagaagaaacaactgggttaataacatacataagaactgatgggtttcatatttctgatggagccgcagaagacatccgttcattagtcaaagaaagatacggccagaagtacgttttagaggacactaggaagtatttaaagaaggtgaaaaatgctcaagaagcccacgaagcaattaggcccaccagtataaggaggttgccatcatctttggttggaatacttgacgatgattctctaaaactgtacactctaatatggaaaaggacaatggcttgccaaatggaagcttctagaactcagatgattcaagtggatgttggcactcctgaaggagagatgatttttcattcagctgcatcaaagctagacttcaagggataccaatctgtttatgaggacactgagggagattctgtgcatgaggataactttgaggccttgtcaaaattaatggttaaggacttggtgtcccctgttaacgtgcatcttggacagcactttactaagccaccatcacgttattctgagggtgcattgattaaaaagctagaagaacttggaattggaaggccatctacttatgcatctataatgaaagtattacaggataggaagtacgtgacagcaaaaagtcgagttctacaccctgagttccgtggtcgaatggtctcggcattccttttgcaccatttctctgaggttgctgattacagctttacagctaacatggagacagagctagataatgtctctgctgggctaactgaatggaagggtcttctaaaaggctactgggaacgattcagcaaatattgtgcagatgcgagtaatctggatggcagaaaggtagagagaatgctcgaagaaaaatttggtcctatcctcttccctaatgttgacacagacaatagaatttgccctagttgttctgaaggaaccttgagattcaaagttagtaggtatggtgaaggctattttataggctgtgatcgacatccaaaatgcaagtacattgctcgctcattatcacaacaagaagatgaaaccgaacccaccgaagaatgtcaaaaaacttttacacccagattacttggtgtcatgcctgattctgatgaaaaggtttttttgaaacaaggcccatatggccactatgttcagattggagaggacaaaaagggactgtttccgaaaagggcttccctttccaaggtcaaagatatagactctgttactctagaagatgcaatcgagcttttgcaatatcccaaaattttgggaaaacatcctgaagatgattatcctgtacttataacacattctaaagttggatacaacatcaagcataggagatctctagctctagtgccaaagagtgttgacccaaagaagatgacacttgagcgtgcgctcaagctactaagcggtaaaagtgtcagacgaattggtcgaccgaaggggaaggttgaaaacaaggaacccatggaatggcattagctgcctgcactcgttacaagatcctaaacgtgtgtggtttgatagtcagtcagccttatatccatgcaaaaaattcagagagaagtcaatattcatagcatccgaggttcagcctttggtgtgcttaactgcttatgatgagagcggagaaggcaatgtgtgacaaagaatctggtcaacaagaacaaggactgtcctccgctaactgataacttatactccctcagtgccaagtgttgttctcgctttcggagtagtcaaatatatacaacgacaacatagtcttttgtcccactgcaagaaaaaggatagaaaaaaacgctgaaaaggtaaatgaaagacggtagagttaatggtaaccctgcctatgagttgtcaggttattctcattctttaacagccatgcggttagagatcactttctcctttctcctactgcttggaaactcagcatggcttcgtgttctattttactgccattggggtccacatttgggactcatgtttgtccggtgaattgagtttctatttttttacacttataaatctcactctatcttgttttttgatactatctaaaataatcgatgaattatgaccccttcatgcgtactataattagttatttttaaacttaggtaagtgctttaccaacatatgtagtgtagtaaaaacatggaatttgac

SEQ ID NO: 221690 - DNA, 2388 bp, Zea Mays
caaccgtccatctccaaacaagcgagtcggttagatatttcctcaagccccagtcagccgcctcctctccctcccacagctcctgccgccgcctctccctccgtcggtatctcccacctcgcaatccactcccacctcccccctcgcccctaaaaccctagctaaacccaagccgaaagaaacaatggctctcctcgcctaagcgagctcgcgcccgccccttgctggccatggcgctccagctccgccgcttcctcccgcacggctacggccagcgacaccgcgctgtcacccacgtgctatcaccgccgccgccactcgcgatgcttcagttcgaggtgtttcagagatattcttccgcaccctggcccttgtcacctttccgcccttgtgaaatgtgtggggttgcattcaggagcaattcaacaaggaaaatgtgctcgagaaatatttttggggttgcatcacagcccaaaagtagcaccttttttactactggactctctggcaaccgtagctctgtatgtttcagagcgagggacagccgtggaattgctttaaagactaataatattgttaattcacgaccattctcaactatatacagtaaaaagctaaggtttcttattaaaaataagacttcatgcaataatctaaatgtgagaagggaagatggaagtgttgcacatagtttgttttgtagatctgagaaacgccaaagcacagttgctacgtgtagcaccattgctgacgaggcttcaacatctactagtaacagcagcaagagtgttactgattctaagactgacactgccaagatgaggcgttcaagaggaagcaaaaaagaagttgatggagttatgaaagataaggaagtacataccaagaaaaagagaatatcttctagaacttgtatagctgcaacaaagacgactgagagttctagtgcgaagcaagaaaacaagaagactgataattgtaaactgaaaaagggtactgatagtcctaaagagaaaaaagtgaataataggtcaaagtcaaaagcaaaggtttctgcttcttctgtatcttctgaagctgagatttgtatgaaatcctctatcgatggttctggtattgagaaaaagccactggtgccattgtatcctccgagagccaaatcagtcgtggttgtggaatcagccacgaaagcaaaagttattcagaattatcttggggacatgtatgaagtgttaccaagctatggtcatgtgagagatttagcaggtagatcaaaatctgtccgccctaatgatgacttcagcatggtctgggaggtgcctgctgctgcctggacacaccttaagagcattaaagttgcactgaaaggagcagaaaatttaattcttgcatctgatcctgatcgtgaaggtgaagcgattgcttggcacatcaaagaaatgcttgaacaacaaggtgcattgggctgtgatgtgactgttgcaagagttgttttccatgaaataactgagaatgcaataaaaaaggctttaatgtccccaaggtatattgatatggacttggtcaatgcttatcttgcacgccgttcccttgattatgtaattgggtttggcatatcaccacttctgtggaggaagttgcctggttgccaatcagctggacgggtccaatctgctgctttggcccttgtgtgcgatcgagaatctgaaatagaacagtttaagccacaggaatactggacagtacgggcagacttcaaaatgcaatttgcagatctgtcaaatggcacatgtattccatttcatataaagcatttgaattcaaaaaagctgggtcaactttccataccctctcaagaagaagcgcaagctatagaaaaaaggattcattcttctaagtttgaagttttaggtgttaaaagaagtaaaattcacaagaatcctccaatgccatatattacatccagccttcagcaggatgcagcaaacaaacttcattttactgcagggtataccatgaagattgcccaaaagctttatgagggtatcaatctttcctcagaagaaacaactgggttaataacatacataagaactgatgggtttcatatttctgatggagccgcagaagacatccgttcattagtcaaagaaagatacggccagaagtacgttttagaggacactaggaagtatttaaagaaggtgaaaaatgctcaagaagcccacgaagcaattaggcccaccagtataaggaggttgccatcatctttggttggaatacttgacgatgattctctaaaactgtacactctaatatggaaaaggacaatggcttgccaaatggaagcttctagaactcagatggcatgctgatggaaaaaggatg

SEQ ID NO: 221691 - DNA, 4239 bp, Zea Mays
caaccgtccatctccaaacaagcgagtcggttagatatttcctcaagccccagtcagccgcctcctctccctcccacagctcctgccgccgcctctccctccgtcggtatctcccacctcgcaatccactcccacctcccccctcgcccctaaaaccctagctaaacccaagccgaaagaaacaatggctctcctcgcctaagcgagctcgcgcccgccccttgctggccatggcgctccagctccgccgcttcctcccgcacggctacggccagcgacaccgcgctgtcacccacgtgctatcaccgccgccgccactcgcgatgcttcagttcgaggtgtttcagagatattcttccgcaccctggcccttgtcacctttccgcccttgtgaaatgtgtggggttgcattcaggagcaattcaacaaggaaaatgtgctcgagaaatatttttggggttgcatcacagcccaaaagtagcaccttttttactactggactctctggcaaccgtagctctgtatgtttcagagcgagggacagccgtggaattgctttaaagactaataatattgttaattcacgaccattctcaactatatacagtaaaaagctaaggtttcttattaaaaataagacttcatgcaataatctaaatgtgagaagggaagatggaagtgttgcacatagtttgttttgtagatctgagaaacgccaaagcacagttgctacgtgtagcaccattgctgacgaggcttcaacatctactagtaacagcagcaagagtgttactgattctaagactgacactgccaagatgaggcgttcaagaggaagcaaaaaagaagttgatggagttatgaaagataaggaagtacataccaagaaaaagagaatatcttctagaacttgtatagctgcaacaaagacgactgagagttctagtgcgaagcaagaaaacaagaagactgataattgtaaactgaaaaagggtactgatagtcctaaagagaaaaaagtgaataataggtcaaagtcaaaagcaaaggtttctgcttcttctgtatcttctgaagctgagatttgtatgaaatcctctatcgatggttctggtattgagaaaaagccactggtgccattgtatcctccgagagccaaatcagtcgtggttgtggaatcagccacgaaagcaaaagttattcagaattatcttggggacatgtatgaagtgttaccaagctatggtcatgtgagagatttagcaggtagatcaaaatctgtccgccctaatgatgacttcagcatggtctgggaggtgcctgctgctgcctggacacaccttaagagcattaaagttgcactgaaaggagcagaaaatttaattcttgcatctgatcctgatcgtgaaggtgaagcgattgcttggcacatcaaagaaatgcttgaacaacaaggtgcattgggctgtgatgtgactgttgcaagagttgttttccatgaaataactgagaatgcaataaaaaaggctttaatgtccccaaggtatattgatatggacttggtcaatgcttatcttgcacgccgttcccttgattatgtaattgggtttggcatatcaccacttctgtggaggaagttgcctggttgccaatcagctggacgggtccaatctgctgctttggcccttgtgtgcgatcgagaatctgaaatagaacagtttaagccacaggaatactggacagtacgggcagacttcaaaatgcaatttgcagatctgtcaaatggcacatgtattccatttcatataaagcatttgaattcaaaaaagctgggtcaactttccataccctctcaagaagaagcgcaagctatagaaaaaaggattcattcttctaagtttgaagttttaggtgttaaaagaagtaaaattcacaagaatcctccaatgccatatattacatccagccttcagcaggatgcagcaaacaaacttcattttactgcagggtataccatgaagattgcccaaaagctttatgagggtatcaatctttcctcagaagaaacaactgggttaataacatacataagaactgatgggtttcatatttctgatggagccgcagaagacatccgttcattagtcaaagaaagatacggccagaagtacgttttagaggacactaggaagtatttaaagaaggtgaaaaatgctcaagaagcccacgaagcaattaggcccaccagtataaggaggttgccatcatctttggttggaatacttgacgatgattctctaaaactgtacactctaatatggaaaaggacaatggcttgccaaatggaagcttctagaactcagatgattcaagtggatgttggcactcctgaaggagagatgatttttcattcagctgcatcaaagctagacttcaagggataccaatctgtttatgaggacactgagggagattctgtgcatgaggataactttgaggccttgtcaaaattaatggttaaggacttggtgtcccctgttaacgtgcatcttggacagcactttactaagccaccatcacgttattctgagggtgcattgattaaaaagctagaagaacttggaattggaaggccatctacttatgcatctataatgaaagtattacaggaagtacgtgacagcaaaaagtcgagttctacaccctgagttccgtggtcgaatggtctcggcattccttttgcaccatttctctgaggttgctgattacagctttacagctaacatggagacagagctagataatgtctctgctgggctaactgaatggaagggtcttctaaaaggctactgggaacgattcagcaaatattgtgcagatgcgagtaatctggatggcagaaaggtagagagaatgctcgaagaaaaatttggtcctatcctcttccctaatgttgacacagacaatagaatttgccctagttgttctgaaggaaccttgagattcaaagttagtaggtatggtgaaggctattttataggctgtgatcgacatccaaaatgcaagtacattgctcgctcattatcacaacaagaagatgaaaccgaacccaccgaagaatgtcaaaaaacttttacacccagattacttggtgtcatgcctgattctgatgaaaaggtttttttgaaacaaggcccatatggccactatgttcagattggagaggacaaaaagggactgtttccgaaaagggcttccctttccaaggtcaaagatatagactctgttactctagaagatgcaatcgagcttttgcaatatcccaaaattttgggaaaacatcctgaagatgattatcctgtacttataacacattctaaagttggatacaacatcaagcataggagatctctagctctagtgccaaagagtgttgacccaaagaagatgacacttgagcgtgcgctcaagctactaagcggtaaaagtgtcagacgaattggtcgaccgaaggggaaggttgaaaacaaggaacccatggaatggcattagctgcctgcactcgttacaagatcctaaacgtgtgtggtttgatagtcagtcagccttatatccatgcaaaaaattcagagagaagtcaatattcatagcatccgaggttcagcctttggtgtgcttaactgcttatgatgagagcggagaaggcaatgtgtgacaaagaatctggtcaacaagaacaaggactgtcctccgctaactgataacttatactccctcagtgccaagtgttgttctcgctttcggagtagtcaaatatatacaacgacaacatagtcttttgtcccactgcaagaaaaaggatagaaaaaaacgctgaaaaggtaaatgaaagacggtagagttaatggtaaccctgcctatgagttgtcaggttattctcattctttaacagccatgcggttagagatcactttctcctttctcctactgcttggaaactcagcatggcttcgtgttctattttactgccattggggtccacatttgggactcatgtttgtccggtgaattgagtttctatttttttacacttataaatctcactctatcttgttttttgatactatctaaaataatcgatgaattatgaccccttcatgcgtactataattagttatttttaaacttaggtaagtgctttaccaacatatgtagtgtagtaaaaacatggaatttgac

SEQ ID NO: 221692 - DNA, 4100 bp, Zea Mays
agatatttcctcaagccccagtcagccgcctcctctccctcccacagctcctgccgccgcctctccctccgtcggtatctcccacctcgcaatccactcccacctcccccctcgcccctaaaaccctagctaaacccaagccgaaagaaacaatggctctcctcgcctaagcgagctcgcgcccgccccttgctggccatggcgctccagctccgccgcttcctcccgcacggctacggccagcgacaccgcgctgtcacccacgtgctatcaccgccgccgccactcgcgatgcttcagttcgaggtgtttcagagatattcttccgcaccctggcccttgtcacctttccgcccttgtgaaatgtgtggggttgcattcaggagcaattcaacaaggaaaatgtgctcgagaaatatttttggggttgcatcacagcccaaaagtagcaccttttttactactggactctctggcaaccgtagctctgtatgtttcagagcgagggacagccgtggaattgctttaaagactaataatattgttaattcacgaccattctcaactatatacagtaaaaagctaaggtttcttattaaaaataagacttcatgcaataatctaaatgtgagaagggaagatggaagtgttgcacatagtttgttttgtagatctgagaaacgccaaagcacagttgctacgtgtagcaccattgctgacgaggcttcaacatctactagtaacagcagcaagagtgttactgattctaagactgacactgccaagatgaggcgttcaagaggaagcaaaaaagaagttgatggagttatgaaagataaggaagtacataccaagaaaaagagaatatcttctagaacttgtatagctgcaacaaagacgactgagagttctagtgcgaagcaagaaaacaagaagactgataattgtaaactgaaaaagggtactgatagtcctaaagagaaaaaagtgaataataggtcaaagtcaaaagcaaaggtttctgcttcttctgtatcttctgaagctgagatttgtatgaaatcctctatcgatggttctggtattgagaaaaagccactggtgccattgtatcctccgagagccaaatcagtcgtggttgtggaatcagccacgaaagcaaaagttattcagaattatcttggggacatgtatgaagtgttaccaagctatggtcatgtgagagatttagcaggtagatcaaaatctgtccgccctaatgatgacttcagcatggtctgggaggtgcctgctgctgcctggacacaccttaagagcattaaagttgcactgaaaggaaaatttaattcttgcatctgatcctgatcgtgaaggtgaagcgattgcttggcacatcaaagaaatgcttgaacaacaaggtgcattgggctgtgatgtgactgttgcaagagttgttttccatgaaataactgagaatgcaataaaaaaggctttaatgtccccaaggtatattgatatggacttggtcaatgcttatcttgcacgccgttcccttgattatgtaattgggtttggcatatcaccacttctgtggaggaagttgcctggttgccaatcagctggacgggtccaatctgctgctttggcccttgtgtgcgatcgagaatctgaaatagaacagtttaagccacaggaatactggacagtacgggcagacttcaaaatgcaatttgcagatctgtcaaatggcacatgtattccatttcatataaagcatttgaattcaaaaaagctgggtcaactttccataccctctcaagaagaagcgcaagctatagaaaaaaggattcattcttctaagtttgaagttttaggtgttaaaagaagtaaaattcacaagaatcctccaatgccatatattacatccagccttcagcaggatgcagcaaacaaacttcattttactgcagggtataccatgaagattgcccaaaagctttatgagggtatcaatctttcctcagaagaaacaactgggttaataacatacataagaactgatgggtttcatatttctgatggagccgcagaagacatccgttcattagtcaaagaaagatacggccagaagtacgttttagaggacactaggaagtatttaaagaaggtgaaaaatgctcaagaagcccacgaagcaattaggcccaccagtataaggaggttgccatcatctttggttggaatacttgacgatgattctctaaaactgtacactctaatatggaaaaggacaatggcttgccaaatggaagcttctagaactcagatgattcaagtggatgttggcactcctgaaggagagatgatttttcattcagctgcatcaaagctagacttcaagggataccaatctgtttatgaggacactgagggagattctgtgcatgaggataactttgaggccttgtcaaaattaatggttaaggacttggtgtcccctgttaacgtgcatcttggacagcactttactaagccaccatcacgttattctgagggtgcattgattaaaaagctagaagaacttggaattggaaggccatctacttatgcatctataatgaaagtattacagctttacagctaacatggagacagagctagataatgtctctgctgggctaactgaatggaagggtcttctaaaaggctactgggaacgattcagcaaatattgtgcagatgcgagtaatctggatggcagaaaggtagagagaatgctcgaagaaaaatttggtcctatcctcttccctaatgttgacacagacaatagaatttgccctagttgttctgaaggaaccttgagattcaaagttagtaggtatggtgaaggctattttataggctgtgatcgacatccaaaatgcaagtacattgctcgctcattatcacaacaagaagatgaaaccgaacccaccgaagaatgtcaaaaaacttttacacccagattacttggtgtcatgcctgattctgatgaaaaggtttttttgaaacaaggcccatatggccactatgttcagattggagaggacaaaaagggactgtttccgaaaagggcttccctttccaaggtcaaagatatagactctgttactctagaagatgcaatcgagcttttgcaatatcccaaaattttgggaaaacatcctgaagatgattatcctgtacttataacacattctaaagttggatacaacatcaagcataggagatctctagctctagtgccaaagagtgttgacccaaagaagatgacacttgagcgtgcgctcaagctactaagcggtaaaagtgtcagacgaattggtcgaccgaaggggaaggttgaaaacaaggaacccatggaatggcattagctgcctgcactcgttacaagatcctaaacgtgtgtggtttgatagtcagtcagccttatatccatgcaaaaaattcagagagaagtcaatattcatagcatccgaggttcagcctttggtgtgcttaactgcttatgatgagagcggagaaggcaatgtgtgacaaagaatctggtcaacaagaacaaggactgtcctccgctaactgataacttatactccctcagtgccaagtgttgttctcgctttcggagtagtcaaatatatacaacgacaacatagtcttttgtcccactgcaagaaaaaggatagaaaaaaacgctgaaaaggtaaatgaaagacggtagagttaatggtaaccctgcctatgagttgtcaggttattctcattctttaacagccatgcggttagagatcactttctcctttctcctactgcttggaaactcagcatggcttcgtgttctattttactgccattggggtccacatttgggactcatgtttgtccggtgaattgagtttctatttttttacacttataaatctcactctatcttgttttttgatactatctaaaataatcgatgaattatgaccccttcatgcgtactataattagttatttttaaacttaggtaagtgctttaccaacatatgtagtgtagtaaaaacatggaatttgac

SEQ ID NO: 221693 - DNA, 1251 bp, Zea Mays
aatggctctcctcgcctaagcgagctcgcgcccgccccttgctggccatggcgctccagctccgccgcttcctcccgcacggctacggccagcgacaccgcgctgtcacccacgtgctatcaccgccgccgccactcgcgatgcttcagttcgaggtgtttcagagatattcttccgcaccctggcccttgtcacctttccgcccttgtgaaatgtgtggggttgcattcaggagcaattcaacaaggaaaatgtgctcgagaaatatttttggggttgcatcacagcccaaaagtagcaccttttttactactggactctctggcaaccgtagctctgtatgtttcagagcgagggacagccgtggaattgctttaaagactaataatattgttaattcacgaccattctcaactatatacagtaaaaagctaaggtttcttattaaaaataagacttcatgcaataatctaaatgtgagaagggaagatggaagtgttgcacatagtttgttttgtagatctgagaaacgccaaagcacagttgctacgtgtagcaccattgctgacgaggcttcaacatctactagtaacagcagcaagagtgttactgattctaagactgacactgccaagatgaggcgttcaagaggaagcaaaaaagaagttgatggagttatgaaagataaggaagtacataccaagaaaaagagaatatcttctagaacttgtatagctgcaacaaagacgactgagagttctagtgcgaagcaagaaaacaagaagactgataattgtaaactgaaaaagggtactgatagtcctaaagagaaaaaagtgaataataggtcaaagtcaaaagcaaaggtttctgcttcttctgtatcttctgaagctgagatttgtatgaaatcctctatcgatggttctggtattgagaaaaagccactggtgccattgtatcctccgagagccaaatcagtcgtggttgtggaatcagccacgaaagcaaaagttattcagaattatcttggggacatgtatgaagtgttaccaagctatggtcatgtgagagatttagcaggtagatcaaaatctgtccgccctaatgatgacttcagcatggtctgggaggtgcctgctgctgcctggacacaccttaagagcattaaagttgcactgaaaggtattactatcatcaattgaagggcaggcctgatgcagtggtgagagctgtttcactgagtcatca

SEQ ID NO: 221694 - DNA, 1626 bp, Zea Mays
ctttgttttgcttcaaaaagttgacatgaccctaaattttttggctacaccaatgtatttgcactaccgagcgctgatattttttgggattggggtgagcaaatgtctcatccaagaactcgcatggccaacagaaggctatgggtgagaacttgcgtgagggagtgtcaagctacagggattgttggggagaatgtcatcagccattgtcagtccaaagagaactacacttctgttggagtctcttggtataaccaggagcaaatttacatccagtggaaggaactgaactgtaggacagactgtcgctatttttgcatgatgcagagagaaggggaacgacagtcacttggtctgagccctgttaaatatcatggaaagtggccattcttacgtgtttctgtgttccaggaacccctttcaactgcactatctgctgtcaacctactgatgcacttcactggctggctttcatttttccttctagtgaattacaaattgcctcttagaccccagaccaagagaacttattatgaatacactagcctgtggcatatctatgcaatcttatcaatgaacgcatggttttggagctcaattttccatactcgagacattgagttgactgagaaactggactattcttcagctgtggccttgcttggctactcgttgatcctttcattgctaagggctttcaatgtcaaggatgaggctagcagggtgatgtttgcagcccctattttggcattcgttacaacgcacatcttgtatcttaacttctacgagcttgactatggatggaacatgaaagtctgcgtggtgatggctgcggttcaacttctgacgtgggctgtttgggctggtgtaagccggcatccatcacggctgaaactctggacggttgtttttggaggagcactggtcatgcttcttgagctctacgacttccctccatacatggggtttgccgatgcccattcactgtggcatgcaagcaccattccactcacctatctctggtggagcttcatcaaggacgatgccaaattccgcacgtcaacactcagcaagaaggcaaagtagttaagcaaagcgcgacattcttagcatagggtcagagaggatcagattccgattccgtggtctgcacgggggacattttgggggcacacgtgttgtcggacatcatggaacctcggtacatttgccctccccaaaaaagacattcatcttcatccactcaggtttttggcccacaaaagtcaacatactctttagggcgcatgttctgcccttacgaattatctctttactgacctgaacgtgcatcctgtgattgaatcggcatcttatcattgtagtgttggtggggtttgggagattttgtcatcgccgaatcagttttgtgaaatcagacagaacaatgaacatcagtggtgtgtttcctattatgtgtggagttttgtaaattcctgaagcccattttgtatgagttttccaacgttacgaaaattcctgaacaatgaacacgtgctatgtttgaaacaagagggcacggtagctaactagctggcaggcagtggtgggctacgggtttaaactttaaaccgaggacagtcgagg

SEQ ID NO: 221695 - DNA, 1638 bp, Zea Mays
atgcctatagtcctatacttacagctgaccaggcgatcaatcacgcacgccgctggtcagcagtcagcagcaagccgcctcgtcgcctcgtcgggagtcgggagtctggtgagcgagctggtgatcaggaccctggccgcgtcggctgtgatgggtcgaagcgccttggcggttcggttggcttcccttcttgcgtttggtttggtgctcgtctccgtcgaggccagcctcggggatgttgatccgcgctacagaacttgcgtgagggagtgtcaagctacagggattgttggggagaatgtcatcagccattactgtcgctatttttgcatgatgcagagagaaggggaacgacagtcacttggtctgagccctgttaaatatcatggaaagtggccattcttacgtgtttctgtgttccaggaacccctttcaactgcactatctgctgtcaacctactgatgcacttcactggctggctttcatttttccttctagtgaattacaaattgcctcttagaccccagaccaagagaacttattatgaatacactagcctgtggcatatctatgcaatcttatcaatgaacgcatggttttggagctcaattttccatactcgagacattgagttgactgagaaactggactattcttcagctgtggccttgcttggctactcgttgatcctttcattgctaagggctttcaatgtcaaggatgaggctagcagggtgatgtttgcagcccctattttggcattcgttacaacgcacatcttgtatcttaacttctacgagcttgactatggatggaacatgaaagtctgcgtggtgatggctgcggttcaacttctgacgtgggctgtttgggctggtgtaagccggcatccatcacggctgaaactctggacggttgtttttggaggagcactggtcatgcttcttgagctctacgacttccctccatacatggggtttgccgatgcccattcactgtggcatgcaagcaccattccactcacctatctctggtggagcttcatcaaggacgatgccaaattccgcacgtcaacactcagcaagaaggcaaagtagttaagcaaagcgcgacattcttagcatagggtcagagaggatcagattccgattccgtggtctgcacgggggacattttgggggcacacgtgttgtcggacatcatggaacctcggtacatttgccctccccaaaaaagacattcatcttcatccactcaggtttttggcccacaaaagtcaacatactctttagggcgcatgttctgcccttacgaattatctctttactgacctgaacgtgcatcctgtgattgaatcggcatcttatcattgtagtgttggtggggtttgggagattttgtcatcgccgaatcagttttgtgaaatcagacagaacaatgaacatcagtggtgtgtttcctattatgtgtggagttttgtaaattcctgaagcccattttgtatgagttttccaacgttacgaaaattcctgaacaatgaacacgtgctatgtttgaaacaagagggcacggtagctaactagctggcaggcagtggtgggctacgggtttaaactttaaaccgaggacagtcgagg

SEQ ID NO: 221696 - DNA, 1853 bp, Zea Mays
atgcctatagtcctatacttacagctgaccaggcgatcaatcacgcacgccgctggtcagcagtcagcagcaagccgcctcgtcgcctcgtcgggagtcgggagtctggtgagcgagctggtgatcaggtaccttggaggcctggcttgcttggacgctccattgcttcgacttcgaggtcgtcgcgggtttggatcctgtgtggagggggtaacaccgtgtagctcaactgtcccctagcgccgccgcgcgaaactccctaccggtccattttgtttgtagccattaagctcttcggaggtggagatctgggctgtcgtttccaggaccctggccgcgtcggctgtgatgggtcgaagcgccttggcggttcggttggcttcccttcttgcgtttggtttggtgctcgtctccgtcgaggccagcctcggggatgttgatccgcgctacagaacttgcgtgagggagtgtcaagctacagggattgttggggagaatgtcatcagccattgtcagtccaaagagaactacacttctgttggagtctcttggtataaccaggagcaaatttacatccagtggaaggaactgaactgtaggacagactgtcgctatttttgcatgatgcagagagaaggggaacgacagtcacttggtctgagccctgttaaatatcatggaaagtggccattcttacgtgtttctgtgttccaggaacccctttcaactgcactatctgctgtcaacctactgatgcacttcactggctggctttcatttttccttctagtgaattacaaattgcctcttagaccccagaccaagagaacttattatgaatacactagcctgtggcatatctatgcaatcttatcaatgaacgcatggttttggagctcaattttccatactcgagacattgagttgactgagaaactggactattcttcagctgtggccttgcttggctactcgttgatcctttcattgctaagggctttcaatgtcaaggatgaggctagcagggatggaacatgaaagtctgcgtggtgatggctgcggttcaacttctgacgtgggctgtttgggctggtgtaagccggcatccatcacggctgaaactctggacggttgtttttggaggagcactggtcatgcttcttgagctctacgacttccctccatacatggggtttgccgatgcccattcactgtggcatgcaagcaccattccactcacctatctctggtggagcttcatcaaggacgatgccaaattccgcacgtcaacactcagcaagaaggcaaagtagttaagcaaagcgcgacattcttagcatagggtcagagaggatcagattccgattccgtggtctgcacgggggacattttgggggcacacgtgttgtcggacatcatggaacctcggtacatttgccctccccaaaaaagacattcatcttcatccactcaggtttttggcccacaaaagtcaacatactctttagggcgcatgttctgcccttacgaattatctctttactgacctgaacgtgcatcctgtgattgaatcggcatcttatcattgtagtgttggtggggtttgggagattttgtcatcgccgaatcagttttgtgaaatcagacagaacaatgaacatcagtggtgtgtttcctattatgtgtggagttttgtaaattcctgaagcccattttgtatgagttttccaacgttacgaaaattcctgaacaatgaacacgtgctatgtttgaaacaagagggcacggtagctaactagctggcaggcagtggtgggctacgggtttaaactttaaaccgaggacagtcgagg

SEQ ID NO: 221697 - DNA, 1729 bp, Zea Mays
atgcctatagtcctatacttacagctgaccaggcgatcaatcacgcacgccgctggtcagcagtcagcagcaagccgcctcgtcgcctcgtcgggagtcgggagtctggtgagcgagctggtgatcaggtaccttggaggcctggcttgcttggacgctccattgcttcgacttcgaggtcgtcgcgggtttggatcctgtgtggagggggtaacaccgtgtagctcaactgtcccctagcgccgccgcgcgaaactccctaccggtccattttgtttgtagccattaagctcttcggaggtggagatctgggctgtcgtttccaggaccctggccgcgtcggctgtgatgggtcgaagcgccttggcggttcggttggcttcccttcttgcgtttggtttggtgctcgtctccgtcgaggccagcctcggggatgttgatccgcgctacagaacttgcgtgagggagtgtcaagctacagggattgttggggagaatgtcatcagccattgtcagtccaaagagaactacacttctgttggagtctcttggtataaccaggagcaaatttacatccagtggaaggaactgaactgtaggacagactgtcgctatttttgcatgatgcagagagaaggggaacgacagtcacttggtctgagccctgttaaatatcatggaaagtggccattcttacgtgtttctgtgttccagagacattgagttgactgagaaactggactattcttcagctgtggccttgcttggctactcgttgatcctttcattgctaagggctttcaatgtcaaggatgaggctagcagggtgatgtttgcagcccctattttggcattcgttacaacgcacatcttgtatcttaacttctacgagcttgactatggatggaacatgaaagtctgcgtggtgatggctgcggttcaacttctgacgtgggctgtttgggctggtgtaagccggcatccatcacggctgaaactctggacggttgtttttggaggagcactggtcatgcttcttgagctctacgacttccctccatacatggggtttgccgatgcccattcactgtggcatgcaagcaccattccactcacctatctctggtggagcttcatcaaggacgatgccaaattccgcacgtcaacactcagcaagaaggcaaagtagttaagcaaagcgcgacattcttagcatagggtcagagaggatcagattccgattccgtggtctgcacgggggacattttgggggcacacgtgttgtcggacatcatggaacctcggtacatttgccctccccaaaaaagacattcatcttcatccactcaggtttttggcccacaaaagtcaacatactctttagggcgcatgttctgcccttacgaattatctctttactgacctgaacgtgcatcctgtgattgaatcggcatcttatcattgtagtgttggtggggtttgggagattttgtcatcgccgaatcagttttgtgaaatcagacagaacaatgaacatcagtggtgtgtttcctattatgtgtggagttttgtaaattcctgaagcccattttgtatgagttttccaacgttacgaaaattcctgaacaatgaacacgtgctatgtttgaaacaagagggcacggtagctaactagctggcaggcagtggtgggctacgggtttaaactttaaaccgaggacagtcgagg

SEQ ID NO: 221698 - DNA, 1857 bp, Zea Mays
cagaatgcctatagtcctatacttacagctgaccaggcgatcaatcacgcacgccgctggtcagcagtcagcagcaagccgcctcgtcgcctcgtcgggagtcgggagtctggtgagcgagctggtgatcaggtaccttggaggcctggcttgcttggacgctccattgcttcgacttcgaggtcgtcgcgggtttggatcctgtgtggagggggtaacaccgtgtagctcaactgtcccctagcgccgccgcgcgaaactccctaccggtccattttgtttgtagccattaagctcttcggaggtggagatctgggctgtcgtttccaggaccctggccgcgtcggctgtgatgggtcgaagcgccttggcggttcggttggcttcccttcttgcgtttggtttggtgctcgtctccgtcgaggccagcctcggggatgttgatccgcgctacagaacttgcgtgagggagtgtcaagctacagggattgttggggagaatgtcatcagccattgtcagtccaaagagaactacacttctgttggagtctcttggtataaccaggagcaaatttacatccagtggaaggaactgaactgtaggacagactgtcgctatttttgcatgatgcagagagaaggggaacgacagtcacttggtctgagccctgttaaatatcatggaaagtggccattcttacgtgtttctgtgttccagtgaattacaaattgcctcttagaccccagaccaagagaacttattatgaatacactagcctgtggcatatctatgcaatcttatcaatgaacgcatggttttggagctcaattttccatactcgagacattgagttgactgagaaactggactattcttcagctgtggccttgcttggctactcgttgatcctttcattgctaagggctttcaatgtcaaggatgaggctagcagggtgatgtttgcagcccctattttggcattcgttacaacgcacatcttgtatcttaacttctacgagcttgactatggatggaacatgaaagtctgcgtggtgatggctgcggttcaacttctgacgtgggctgtttgggctggtgtaagccggcatccatcacggctgaaactctggacggttgtttttggaggagcactggtcatgcttcttgagctctacgacttccctccatacatggggtttgccgatgcccattcactgtggcatgcaagcaccattccactcacctatctctggtggagcttcatcaaggacgatgccaaattccgcacgtcaacactcagcaagaaggcaaagtagttaagcaaagcgcgacattcttagcatagggtcagagaggatcagattccgattccgtggtctgcacgggggacattttgggggcacacgtgttgtcggacatcatggaacctcggtacatttgccctccccaaaaaagacattcatcttcatccactcaggtttttggcccacaaaagtcaacatactctttagggcgcatgttctgcccttacgaattatctctttactgacctgaacgtgcatcctgtgattgaatcggcatcttatcattgtagtgttggtggggtttgggagattttgtcatcgccgaatcagttttgtgaaatcagacagaacaatgaacatcagtggtgtgtttcctattatgtgtggagttttgtaaattcctgaagcccattttgtatgagttttccaacgttacgaaaattcctgaacaatgaacacgtgctatgtttgaaacaagagggcacggtagctaactagctggcaggcagtggtgggctacgggtttaaactttaaaccgaggacagtcgagg

SEQ ID NO: 221699 - DNA, 1474 bp, Zea Mays
cgacagaatgcctatagtcctatacttacagctgaccaggcgatcaatcacgcacgccgctggtcagcagtcagcagcaagccgcctcgtcgcctcgtcgggagtcgggagtctggtgagcgagctggtgatcaggtaccttggaggcctggcttgcttggacgctccattgcttcgacttcgaggtcgtcgcgggtttggatcctgtgtggagggggtaacaccgtgtagctcaactgtcccctagcgccgccgcgcgaaactccctaccggtccattttgtttgtagccattaagctcttcggaggtggagatctgggctgtcgtttccaggaccctggccgcgtcggctgtgatgggtcgaagcgccttggcggttcggttggcttcccttcttgcgtttggtttggtgctcgtctccgtcgaggccagcctcggggatgttgatccgcgctacagagacattgagttgactgagaaactggactattcttcagctgtggccttgcttggctactcgttgatcctttcattgctaagggctttcaatgtcaaggatgaggctagcagggtgatgtttgcagcccctattttggcattcgttacaacgcacatcttgtatcttaacttctacgagcttgactatggatggaacatgaaagtctgcgtggtgatggctgcggttcaacttctgacgtgggctgtttgggctggtgtaagccggcatccatcacggctgaaactctggacggttgtttttggaggagcactggtcatgcttcttgagctctacgacttccctccatacatggggtttgccgatgcccattcactgtggcatgcaagcaccattccactcacctatctctggtggagcttcatcaaggacgatgccaaattccgcacgtcaacactcagcaagaaggcaaagtagttaagcaaagcgcgacattcttagcatagggtcagagaggatcagattccgattccgtggtctgcacgggggacattttgggggcacacgtgttgtcggacatcatggaacctcggtacatttgccctccccaaaaaagacattcatcttcatccactcaggtttttggcccacaaaagtcaacatactctttagggcgcatgttctgcccttacgaattatctctttactgacctgaacgtgcatcctgtgattgaatcggcatcttatcattgtagtgttggtggggtttgggagattttgtcatcgccgaatcagttttgtgaaatcagacagaacaatgaacatcagtggtgtgtttcctattatgtgtggagttttgtaaattcctgaagcccattttgtatgagttttccaacgttacgaaaattcctgaacaatgaacacgtgctatgtttgaaacaagagggcacggtagctaactagctggcaggcagtggtgggctacgggtttaaactttaaaccgaggacagtcgagg

SEQ ID NO: 221700 - DNA, 2040 bp, Zea Mays
atggaatgagtttcatttccaaggaaacaaacgggccctaactgaaattcaaatgaatcaacccaaaatttaaataataccgatcttttcggcttagaccggaccgacagaatgcctatagtcctatacttacagctgaccaggcgatcaatcacgcacgccgctggtcagcagtcagcagcaagccgcctcgtcgcctcgtcgggagtcgggagtctggtgagcgagctggtgatcaggtaccttggaggcctggcttgcttggacgctccattgcttcgacttcgaggtcgtcgcgggtttggatcctgtgtggagggggtaacaccgtgtagctcaactgtcccctagcgccgccgcgcgaaactccctaccggtccattttgtttgtagccattaagctcttcggaggtggagatctgggctgtcgtttccaggaccctggccgcgtcggctgtgatgggtcgaagcgccttggcggttcggttggcttcccttcttgcgtttggtttggtgctcgtctccgtcgaggccagcctcggggatgttgatccgcgctacagaacttgcgtgagggagtgtcaagctacagggattgttggggagaatgtcatcagccattgtcagtccaaagagaactacacttctgttggagtctcttggtataaccaggagcaaatttacatccagtggaaggaactgaactgtaggacagactgtcgctatttttgcatgatgcagagagaaggggaacgacagtcacttggtctgagccctgttaaatatcatggaaagtggccattcttacgtgtttctgtgttccaggaacccctttcaactgcactatctgctgtcaacctactgatgcacttcactggctggctttcatttttccttctagtgaattacaaattgcctcttagaccccagaccaagagaacttattatgaatacactagcctgtggcatatctatgcaatcttatcaatgaacgcatggttttggagctcaattttccatactcgagacattgagttgactgagaaactggactattcttcagctgtggccttgcttggctactcgttgatcctttcattgctaagggctttcaatgtcaaggatgaggctagcagggtgatgtttgcagcccctattttggcattcgttacaacgcacatcttgtatcttaacttctacgagcttgactatggatggaacatgaaagtctgcgtggtgatggctgcggttcaacttctgacgtgggctgtttgggctggtgtaagccggcatccatcacggctgaaactctggacggttgtttttggaggagcactggtcatgcttcttgagctctacgacttccctccatacatggggtttgccgatgcccattcactgtggcatgcaagcaccattccactcacctatctctggtggagcttcatcaaggacgatgccaaattccgcacgtcaacactcagcaagaaggcaaagtagttaagcaaagcgcgacattcttagcatagggtcagagaggatcagattccgattccgtggtctgcacgggggacattttgggggcacacgtgttgtcggacatcatggaacctcggtacatttgccctccccaaaaaagacattcatcttcatccactcaggtttttggcccacaaaagtcaacatactctttagggcgcatgttctgcccttacgaattatctctttactgacctgaacgtgcatcctgtgattgaatcggcatcttatcattgtagtgttggtggggtttgggagattttgtcatcgccgaatcagttttgtgaaatcagacagaacaatgaacatcagtggtgtgtttcctattatgtgtggagttttgtaaattcctgaagcccattttgtatgagttttccaacgttacgaaaattcctgaacaatgaacacgtgctatgtttgaaacaagagggcacggtagctaactagctggcaggcagtggtgggctacgggtttaaactttaaaccgaggacagtcgagg

SEQ ID NO: 221701 - DNA, 1559 bp, Zea Mays
aaactcgggaaaaaaaacccagcaaaaaaacccagctcggtacagagaaatcaggatcatttgcatagatatcaaccttgtggattggcaaagaatcctacctggaaacccaataagcaaactaatgacgcccgcaaagctgagaaacatgcacgcaaaaatatgaagatgagaaccataagctctgttgatcaggagaacaagaacaggacaagagattctaatgatcatgaccaccacaaaccaaagacaggaaagcacaaatcaccaagagatggggttgtccttttggagaaaaggcaggagaagcgttctttggacaagaacaagcccgctgaacatgatattaaaatgcatattgccgtagttcctagtggtatggattgtgttggcgcctttcagcagcagcgctttaaaagcaggtgtgatcctgaagagtcattggaaagcttaagcaaccattcaaactgtgagagtggctcggtatcatcgctggtgtttgagaagccactgcaggcattgccgcccggaaagaatctgctgggttatgaaatatgtcatgcagcgaagccaatcaagacactgcatttgaatcctgccctgtatgatgtggagttgagcgtgttggggagcagcaacacggggcgccgtgtgccccttgtttctctaatgagtaggtggaattgtaaagccgtcgtggggtatcctgtctccgtggaggtcagcgatgatgtgtttggctgtccttctccttcatcagagaaagatatccagcaggctgctacaaacagtgtgaatgggatagtattgaagaaggatgaaactgagggtttggaacgtgttgttgtgccaccatcagcgcagacatcccggccaagatgcaaaagccgcagcaggagggcatcagagaaagcagtggacaagttatggcagccacataccaaatggccagcatcctcgtcgagaaagatgcggaggctttcctcttttggtccaggccagagagatgggaagtcagcggtgaggaaagtgtccggggcaaccgtcgcgtgcatcccgctccgagttgttttcagcaggatcaacgaggcgctgagcttctcagttaatgagaatgccctagctgggtgtgggactgcttcccggctgaggaatacttggtagctaggttttgctgtttgttgttcaccgcttgctttttttgtagccatgccataatagcattggtaaatgtttagtgtggcctatcacttggagcatggtaataggtgatgatgtatcgtcatcttggttgtgagccacatcacacttcactcacagtagaggcagtagaaggaagaactgtgctgatgcacccctctttattaaaaaaaagaacatttgatgggtctgtggagcacatggtctgatggtggaagcaaataaattagcgtaggatgatggttacttgctgggagtctgttttggtattagtgatgcatcgctgctgtaatgtaacttcctgtgttgccatcctaagctaattgtaatcggaagtgtcagcttctgcttgccttttt

SEQ ID NO: 221702 - DNA, 2761 bp, Zea Mays
ctcttctccccttcccctacccccgcctaccccactgctccgcttctcctcacgccaccacagggggagcggagcccgcggcctgtgccctccgcgccgccgcagtccatcctcctggccaggcggggagatcagattggcgaagaggaagaggaggaggaagagcgccagtgccgccacagatggggggtctgcccaaggagggggccccggcggtggatgtctccgtggaggggaccctggtctggttgcgccgccccaacggctcctggtggcccagcatcgtcatctcgccgcaagacgtccccgaaggctgcgccccgccgccgcgctgccccgccacacccatcatgctcctcggccgccgccccgacggaccaacctacgtgtgcaagcgcgtcaagcccttccgctgcggggagctcgacttggaacagcgcattgccaacgccctcaccctcgccgccaccagcgacaggtccacctggagctacaacaagggaaggtacgcccgcatggaggacgccattctccaggccctcgacatagagaaggagctcgctctcggcccggcaaccaaggcctacctccatgcccgcagctgctcgcccaggcccaaagttgaaatgcccaacggacaagtcaaagatactgcagcaaaggatcatgctccaaccatccagccaccgctgccgccgcccaagaggaagcgcaagacgccttatgactccgaggacgatgtgcccgaagtgtcccgtcgcatgagggacctcagggacatcggatccaaggcggtcgtcccaatggacttggccaatgctgctgcagtctctgctcccaagtacgatgatctaactaatgctgggcaggccaaaagaattgtgcactctcaggccaccgcaaagaggaagcatgctggtctgcatcaggaccaaccttgtgggatccccaggaagaaggataggtctcgtccgctctcggagctctgtaatggagacatgtggggtggttccagaccaaatggccagaaggccgatgaacatttgttgggtgtggctacatgttcaagcagctcctctggcacttcaaccttggacactccattggacatgaacaactgtcatcgcagcatggcattcaaaacagatcaagcaaagggcacagaaatatcctgcatgacaaggctactgagtgatgattcccggcatggaaatgattttgtcggaactcctgctgcacaaaatattgtggaaccagatcatttgcatagatatcaaccttgtggattggcaaagaatcctacctggaaacccaataagcaaactaatgacgcccgcaaagctgagaaacatgcacgcaaaaatatgaagatgagaaccataagctctgttgatcaggagaacaagaacaggacaagagattctaatgatcatgaccaccacaaaccaaagacaggaaagcacaaatcaccaagagatggggttgtccttttggagaaaaggcaggagaagcgttctttggacaagaacaagcccgctgaacatgatattaaaatgcatattgccgtagttcctagtggtatggattgtgttggcgcctttcagcagcagcgctttaaaagcaggtgtgatcctgaagagtcattggaaagcttaagcaaccattcaaactgtgagagtggctcggtatcatcgctggtgtttgagaagccactgcaggcattgccgcccggaaagaatctgctgggttatgaaatatgtcatgcagcgaagccaatcaagacactgcatttgaatcctgccctgtatgatgtggagttgagcgtgttggggagcagcaacacggggcgccgtgtgccccttgtttctctaatgagtaggtggaattgtaaagccgtcgtggggtatcctgtctccgtggaggtcagcgatgatgtgtttggctgtccttctccttcatcagagaaagatatccagcaggctgctacaaacagtgtgaatgggatagtattgaagaaggatgaaactgagggtttggaacgtgttgttgtgccaccatcagcgcagacatcccggccaagatgcaaaagccgcagcaggagggcatcagagaaagcagtggacaagttatggcagccacataccaaatggccagcatcctcgtcgagaaagatgcggaggctttcctcttttggtccaggccagagagatgggaagtcagcggtgaggaaagtgtccggggcaaccgtcgcgtgcatcccgctccgagttgttttcagcaggatcaacgaggcgctgagcttctcagttaatgagaatgccctagctgggtgtgggactgcttcccggctgaggaatacttggtagctaggttttgctgtttgttgttcaccgcttgctttttttgtagccatgccataatagcattggtaaatgtttagtgtggcctatcacttggagcatggtaataggtgatgatgtatcgtcatcttggttgtgagccacatcacacttcactcacagtagaggcagtagaaggaagaactgtgctgatgcacccctctttattaaaaaaaagaacatttgatgggtctgtggagcacatggtctgatggtggaagcaaataaattagcgtaggatgatggttacttgctgggagtctgttttggtattagtgatgcatcgctgctgtaatgtaacttcctgtgttgccatcctaagctaattgtaatcggaagtgtcagcttctgcttgccttttt

SEQ ID NO: 221703 - DNA, 1527 bp, Zea Mays
gcaccgtgcccctctcgagttccgactcccgcagtccgcacctctcgcgctcgccttcgctttgtcgccacggcgagccccacgccgccgatcggggcgccgcaagcggcggcgcccgttccgatggacgcggatgtgggggcgggggcgacgaatcaaccgtggccggagcccgacgacgcgcacctctccccgcctccgcctccgcctccgcctcccgcctccgccccgactccagccgccgaggctgccgcgcccaccgcctccgcggccgtatcgccgccagcgccggcggaggcgaacggcaactccgacaggaagaggagttattgcgtgtgctatgcttccgggtcacattgtactgaattatgtggatgcgaaccttgtcataacaagccacctcaaggtgctccatggactgcaccagttttacctctgaaacctgtccaaacattggaggctggtcaagaaatagtggaacaactcataaggtcccctatggatcttattagaagaaaatgcacctgcaagaagtcaggctgccttaagaagtactgtgactgctaccagggaggggcaggatgctctatcaactgtaagtgcgatgattgtagaaacccatttgggagaaaagtcggcgttattttggatggtaaaagcagcggtcttcccgcgcccgtacatgtgcatgaaagaaacgggactgaagctgactcgagcggcgacgacgaggaagacgacgacttgtacatgaaccgacagctctccccgtctccggtgtcaagggagtcgtcgttccagcaggagactctggtcggcgtggaagtccagacgatgaacgggcacctgtacccgaagccgctgacccaggtgcgtcccgagccgtcctcctggcagctctccgccgccaggaggccggccgaggaaccgcgcggagaggtgtggcgcttctcggggaggcccggcgaggacggggcctccgacgccgtggaagcagcgcgtgccgtcgcggtcgctcccccgagggagagcaggagaccggggacccgcggtggggacaggctcaggttcagcatcccgcggtgcgtcgaggcgatgagcgccatggcggagctgtcgcccgtggagaagtcgcttgcgcccgacgtgttcttggacgagagcaaccgcgagatcttcctctcgctgagcgtagatgttaggcccatctggctgaggcgtaagatgaagagccttgtctagctctagttttttttaaatttttaattgtacccagtgctaatttatggtgcatgttatattttcgagtcctgcatatcgttagcagtaataagttggttacgatttcagctagaagaagaggagaaattgtctctgccccttgagtaaacgtgcgacaagacgatgtgtccagtgtccccctgaacagtggcagcaacgtggtgtggcaacaacgaaaacagacagctcaggcgacggggacagcactgcacgggacgggatgccaatccggcatttgcatgtcct

SEQ ID NO: 221704 - DNA, 1721 bp, Zea Mays
atggccgcctcttccattcctccttgccaggttcaggagcaagatgacgaggtggtggacaggaacatcctcccctactgcagcatcgacaggaagcagaagaagacgctgggagagatggagcaggagttcctgcaagccctccaggccttctactatgaccagaaggccatcatgtccaacgaggagtttgacaacctcaaggaggagctcatgtgggaggggagcagcgtcgtcattgctaaacgaagatgagcaaaagcttttggaagcttccatggcctatgcctccggcaacccgatcatgtctgatgctgagttcgacgagttgaaactcaaattaaagacagacgaacagtgtcattgtgaaggagggtcccaggtgcagtctaaggagtcataaggtgtacagtgacttgaatgttgactacataaagatgtttctgctaaatgttccagccaccaccgtagctctgggactgttctttttcattgatgaattgactggttttgagatcaatgtgttccaggtcagtgtccacctgattcaactgccagagcctttcggattcattttcacatggtttgctgctttgcccctaatattgttcttagcacagtcattgactaaggctatagtccaggactttttaatcctcaagattcgtgtctaccctcttgatgtgcttatttctaagaagcacccttccaatgttctatttccagttgcagtgccgagctggagtatgactcaaaatctcgggtgatcacacttccagaagcatcaaatgcataaacatagggccagggtttgaacccgtgacctggtgaaagggactctgctgccttcaccatgggatattaccccatctgcagctgttgctttgtagtcaatccagtaaataggctgtggccaagtacaaatagagttacatgtttatttgttgttcctaaaatgtatgatacataaactgcatttcagttgggacatataacatcaaagcaattacaatgaagtgtctgttatatagatggtgctaaagagcccacctatgttgaaaagaatttctgatccaatgatataaaatcaaaatgtggtcaagcgcatgcaagatgtaccgtgtgcagcctgacgatataaaatctggcattttattttgatttcttttttttttctaggaacagggagctccagcgcttgtggattatatagaataataaaggtggctgtccgcacagtatagcaaactgcgaagcctgcaactactgaagtttggtctgtagcaggctcagttgggaatgtgtagcagagtatggatggtcatgatccatggtgtggatgagttgcagagtactgtgctgtgctgtgtgtgtagtaggaaggaaaagcttaggtaaagctgccgcctgccgattgtgcagtcagtccagtacgttggtatgcgaccatctcaagtctgggctttgatttgaagcaatgatttttggcaatgaatgaacaagctatctactgtatatacagttatacacacaaacgatttgcactgtttttgtacagttatgtttgcaaggcccaagtctattggccggccacggcctggctgactgatgagcccaagcctggcacacggtccacggcccaaggcccgaactcctaactgtttttttttttttgaataactgactgtagggacagtattctcattaatgtggaaaaaata

SEQ ID NO: 221705 - DNA, 1237 bp, Zea Mays
atggccgcctcttccattcctccttgccaggttcaggagcaagatgacgaggtggtggacaggaacatcctcccctactgcagcatcgacaggaagcagaagaagacgctgggagagatggagcaggagttcctgcaagccctccaggccttctactatgaccagaaggccatcatgtccaacgaggagtttgacaacctcaaggaggagctcatgtgggaggggagcagcgtcgtcattgctaaacagacgaacagtgtcattgtgaaggagggtcccaggtgcagtctaaggagtcataaggtgtacagtgacttgaatgttgactacataaagatgtttctgctaaatgttccagccaccaccgtagctctgggactgttctttttcattgatgaattgactggttttgagatcaatgtgttccaggtcagtgtccacctgattcaactgccagagcctttcggattcattttcacatggtttgctgctttgcccctaatattgttcttagcacagtcattgactaaggctatagtccaggactttttaatcctcaagattcgtgtctaccctcttgatgtgcttatttctaagaagcacccttccaatgttctatttccagttgcagtgccgagctggagtatgactcaaaatctcgggtgatcacacttccagaagcatcaaatgcataaacatagggagctccagcgcttgtggattatatagaataataaaggtggctgtccgcacagtatagcaaactgcgaagcctgcaactactgaagtttggtctgtagcaggctcagttgggaatgtgtagcagagtatggatggtcatgatccatggtgtggatgagttgcagagtactgtgctgtgctgtgtgtgtagtaggaaggaaaagcttaggtaaagctgccgcctgccgattgtgcagtcagtccagtacgttggtatgcgaccatctcaagtctgggctttgatttgaagcaatgatttttggcaatgaatgaacaagctatctactgtatatacagttatacacacaaacgatttgcactgtttttgtacagttatgtttgcaaggcccaagtctattggccggccacggcctggctgactgatgagcccaagcctggcacacggtccacggcccaaggcccgaactcctaactgtttttttttttttgaataactgactgtagggacagtattctcattaatgtggaaaaaata

SEQ ID NO: 221706 - DNA, 694 bp, Zea Mays
ctcgcttccgctccaagcctgccactacaaccgcctccttgctctctccctgcccccgcccccgccctgcctgtgttgcgcgtccgccgccgccgccgacttcgtgccaccgagcagcaaggccaggttcaggagcaagatgacgaggtggtggacaggaacatcctcccctactgcagcatcgacaggaagcagaagaagacgctgggagagatggagcaggagttcctgcaagccctccaggccttctactatgaccagaaggccatcatgtccaacgaggagtttgacaacctcaaggaggagctcatgtgggaggggagcagcgtcgtcattgctaaacagacgaacagtgtcattgtgaaggagggtcccaggtgcagtctaaggagtcataaggtgtacagtgacttgaatgttgactacataaagatgtttctgctaaatgttccagccaccaccgtagctctgggactgttctttttcattgatgaattgactggttttgagatcaatgtgttccaggtcagtgtccacctgattcaactgccagagcctttcggattcattttcacatggtttgctgctttgcccctaatattgttcttagcacagtcattgactaaggctatagtccaggactttttaatcctcaaggggccatgtcctaattgtggtactgaaaacctttcct

SEQ ID NO: 221707 - DNA, 571 bp, Zea Mays
ctcaattctcaccacacacacgcacacactatcgccacccaccgcctcagctcgatcgcaacgcgcttggcatggcgtccgaggtgtggctatcgccggcgtctcgcctcccatccctctccaacgcaccacctcgcttccgctccaagcctgccactacaaccgcctccttgctctctccctgcccccgcccccgccctgcctgtgttgcgcgtccgccgccgccgccgacttcgtgccaccgagcagcaaggccaggttcaggagcaagatgacgaggtggtggacaggaacatcctcccctactgcagcatcgacaggaagcagaagaagacgctgggagagatggagcaggagttcctgcaagccctccaggccttctactatgaccagaaggccatcatgtccaacgaggagtttgacaacctcaaggaggagctcatgtgggaggggagcagcgtcgtcattgctaaacgaagatgagcaaaagcttttggaagcttccatggcctatgcctccggcaacccgatcatgtctgatgctgagttcgacgagttgaaactcaaatta

SEQ ID NO: 221708 - DNA, 798 bp, Zea Mays
ctcatctccaaatattgctcgcaattggaaccaattttgtcaaagaaaaattcatagcagtgatctcccaccacatgacaagcgtcgagatagcagcaggagcaggaattgtcaacgggggcgctctcctttcttcttcactcctccacacatccaaaagcctcgtccttcccacttcccacttcccacccatcatatctccatcccgcggttccgcccagctgctccacatctcaattctcaccacacacacgcacacactatcgccacccaccgcctcagctcgatcgcaacgcgcttggcatggcgtccgaggtgtggctatcgccggcgtctcgcctcccatccctctccaacgcaccacctcgcttccgctccaagcctgccactacaaccgcctccttgctctctccctgcccccgcccccgccctgcctgtgttgcgcgtccgccgccgccgccgacttcgtgccaccgagcagcaaggttcaggagcaagatgacgaggtggtggacaggaacatcctcccctactgcagcatcgacaggaagcagaagaagacgctgggagagatggagcaggagttcctgcaagccctccaggccttctactatgaccagaaggccatcatgtccaacgaggagtttgacaacctcaaggaggagctcatgtgggaggggagcagcgtcgtcattgctaaacgaagatgagcaaaagcttttggaagcttccatggcctatgcctccggcaacccgatcatgtctgatgctgagttcgacgagttgaaactcaaatta

SEQ ID NO: 221709 - DNA, 1206 bp, Zea Mays
ctaagctagcgcgttccttccttttttcctccctcgcttcctgttgctcggtccagctgctccgccacatgctcgacaggatgcggccggaggacgtgggcctgagcccggacctgagcttcttcagggctcgagacgccacacgtggcggtggcaccccgaccataacgcacacgacgatatacaaatgcccgaatttctcgatggtcatcctcttcctgccgcgaaacgcggtgatcccgctccacaaccaccctgggatgacggtgttcagcaagctgctcctggggtcgatgcacgtcaagtcgtacgactggctcaacactgctgaccccgatccttcttccgccacgagcaccaccagctcttcgtcctccgatggcccatgcctgaggctggcagaactggtggtggacgacgtcttcacggcgccgtgcgacacctccgtgctgtacccgacggcgggagggaacatgcaccggttcaccgccatggcgccctgcgcgatcctcgacgtcctcgggcccccctactccatagaggaggacagggactgcacgtactacgcggaattaccgtacgcacaccactcgctggtggctgcgggcgaggacgtggagcggggccagggccaaggccatctggcgtggcttgaggagatcgacatgccgagagagctcaagatgtgcagcgtccactatggtggaccgccgatctccgacgagtgacgtcgccggccgtctccctcactggttgtactatgtctaactgatcgcggcagagccgtgccgccgccgttgtgtatagcaggcagcagcaagccataggctgtagttacacgaagtcccgatcgattacaatgtttcttgctggcctgcatcgttgttctctagatgccctttctttcttgttatttttgtttctactactactacaagtagacgatgttttgtcctgatgatgaatgatacagataagtcatatatatccacatatttcatttttgtcgtttgggctattctggtcatagtttgtgcgtgttgcgccattttgtccaaatattttcatattatatctaatgtaggtaattcttatggatttcgtagcaacgtgggcacgcacttattgtggtgactatactcatcagcaaatatagcaagtctaatttatcaaaaacaaggagatatagactttgaaatattgaag

SEQ ID NO: 221710 - DNA, 1219 bp, Zea Mays
ctagttgccttgactgcctgcctcgtcttaccaccaagctaagctagcgcgttccttccttttttcctccctcgcttcctgttgctcgacaggatgcggccggaggacgtgggcctgagcccggacctgagcttcttcagggctcgagacgccacacgtggcggtggcaccccgaccataacgcacacgacgatatacaaatgcccgaatttctcgatggtcatcctcttcctgccgcgaaacgcggtgatcccgctccacaaccaccctgggatgacggtgttcagcaagctgctcctggggtcgatgcacgtcaagtcgtacgactggctcaacactgctgaccccgatccttcttccgccacgagcaccaccagctcttcgtcctccgatggcccatgcctgaggctggcagaactggtggtggacgacgtcttcacggcgccgtgcgacacctccgtgctgtacccgacggcgggagggaacatgcaccggttcaccgccatggcgccctgcgcgatcctcgacgtcctcgggcccccctactccatagaggaggacagggactgcacgtactacgcggaattaccgtacgcacaccactcgctggtggctgcgggcgaggacgtggagcggggccagggccaaggccatctggcgtggcttgaggagatcgacatgccgagagagctcaagatgtgcagcgtccactatggtggaccgccgatctccgacgagtgacgtcgccggccgtctccctcactggttgtactatgtctaactgatcgcggcagagccgtgccgccgccgttgtgtatagcaggcagcagcaagccataggctgtagttacacgaagtcccgatcgattacaatgtttcttgctggcctgcatcgttgttctctagatgccctttctttcttgttatttttgtttctactactactacaagtagacgatgttttgtcctgatgatgaatgatacagataagtcatatatatccacatatttcatttttgtcgtttgggctattctggtcatagtttgtgcgtgttgcgccattttgtccaaatattttcatattatatctaatgtaggtaattcttatggatttcgtagcaacgtgggcacgcacttattgtggtgactatactcatcagcaaatatagcaagtctaatttatcaaaaacaaggagatatagactttgaaatattgaag

SEQ ID NO: 221711 - DNA, 1598 bp, Zea Mays
gtcaccccctcctccgctccgcctcctgtttatagtcgcctgctgtcgcggcccctttttccttccaccacccaccggccaccaccctccgcgcttgcctagttgccttgactgcctgcctcgtcttaccaccaagctaagctagcgcgttccttccttttttcctccctcgcttcctgttgctcggtccatggaggtggcggcggccgcgacggcgggcgcgggggttgtggagctgcagctcgacctactcgaggcggcggcgccgacggagcgagaggccaagaggcgccgggtgcacccggttccagcgggcccaccggccggggcagcagcgccgggacgccgcagctgcagccgcaggcgccgcgccgtgcagcgtctcttccaggcctgccgccacgtcttccggggccccggcaccgtgcccagtcccggcgaggtccagctgctccgccacatgctcgacaggatgcggccggaggacgtgggcctgagcccggacctgagcttcttcagggctcgagacgccacacgtggcggtggcaccccgaccataacgcacacgacgatatacaaatgcccgaatttctcgatggtcatcctcttcctgccgcgaaacgcggtgatcccgctccacaaccaccctgggatgacggtgttcagcaagctgctcctggggtcgatgcacgtcaagtcgtacgactggctcaacactgctgaccccgatccttcttccgccacgagcaccaccagctcttcgtcctccgatggcccatgcctgaggctggcagaactggtggtggacgacgtcttcacggcgccgtgcgacacctccgtgctgtacccgacggcgggagggaacatgcaccggttcaccgccatggcgccctgcgcgatcctcgacgtcctcgggcccccctactccatagaggaggacagggactgcacgtactacgcggaattaccgtacgcacaccactcgctggtggctgcgggcgaggacgtggagcggggccagggccaaggccatctggcgtggcttgaggagatcgacatgccgagagagctcaagatgtgcagcgtccactatggtggaccgccgatctccgacgagtgacgtcgccggccgtctccctcactggttgtactatgtctaactgatcgcggcagagccgtgccgccgccgttgtgtatagcaggcagcagcaagccataggctgtagttacacgaagtcccgatcgattacaatgtttcttgctggcctgcatcgttgttctctagatgccctttctttcttgttatttttgtttctactactactacaagtagacgatgttttgtcctgatgatgaatgatacagataagtcatatatatccacatatttcatttttgtcgtttgggctattctggtcatagtttgtgcgtgttgcgccattttgtccaaatattttcatattatatctaatgtaggtaattcttatggatttcgtagcaacgtgggcacgcacttattgtggtgactatactcatcagcaaatatagcaagtctaatttatcaaaaacaaggagatatagactttgaaatattgaag

SEQ ID NO: 221712 - DNA, 1857 bp, Zea Mays
ccgtcaccccctcctccgctccgcctcctgtttatagtcgcctgctgtcgcggcccctttttccttccaccacccaccggccaccaccctccgcgcttgcctagttgccttgactgcctgcctcgtcttaccaccaagctaagctagcgcgttccttccttttttcctccctcgcttcctgttgctcggtccatggaggtggcggcggccgcgacggcgggcgcgggggttgtggagctgcagctcgacctactcgaggcggcggcgccgacggagcgagaggccaagaggcgccgggtgcacccggttccagcgggcccaccggccggggcagcagcgccgggacgccgcagctgcagccgcaggcgccgcgccgtgcagcgtctcttccaggcctgccgccacgtcttccggggccccggcaccgtgcccagtcccggcgaggtccagctgctccgccacatgctcggtgagccatgcacgacccgactcaaaaaaaactagaacatttcgtaattttcagcgatcgatctggaacgaactggttgtcatggaccggcatggcctccgcgtactctgttcaatttcactagcactagcacttagctgctctgcttatactgaatctgaattcctgtacagaatagtatgcatccatcaatcatgcacctgtttcgtgcatgcgtttactgaaaaacctcaactccttctcctaccaaaatgcagacaggatgcggccggaggacgtgggcctgagcccggacctgagcttcttcagggctcgagacgccacacgtggcggtggcaccccgaccataacgcacacgacgatatacaaatgcccgaatttctcgatggtcatcctcttcctgccgcgaaacgcggtgatcccgctccacaaccaccctgggatgacggtgttcagcaagctgctcctggggtcgatgcacgtcaagtcgtacgactggctcaacactgctgaccccgatccttcttccgccacgagcaccaccagctcttcgtcctccgatggcccatgcctgaggctggcagaactggtggtggacgacgtcttcacggcgccgtgcgacacctccgtgctgtacccgacggcgggagggaacatgcaccggttcaccgccatggcgccctgcgcgatcctcgacgtcctcgggcccccctactccatagaggaggacagggactgcacgtactacgcggaattaccgtacgcacaccactcgctggtggctgcgggcgaggacgtggagcggggccagggccaaggccatctggcgtggcttgaggagatcgacatgccgagagagctcaagatgtgcagcgtccactatggtggaccgccgatctccgacgagtgacgtcgccggccgtctccctcactggttgtactatgtctaactgatcgcggcagagccgtgccgccgccgttgtgtatagcaggcagcagcaagccataggctgtagttacacgaagtcccgatcgattacaatgtttcttgctggcctgcatcgttgttctctagatgccctttctttcttgttatttttgtttctactactactacaagtagacgatgttttgtcctgatgatgaatgatacagataagtcatatatatccacatatttcatttttgtcgtttgggctattctggtcatagtttgtgcgtgttgcgccattttgtccaaatattttcatattatatctaatgtaggtaattcttatggatttcgtagcaacgtgggcacgcacttattgtggtgactatactcatcagcaaatatagcaagtctaatttatcaaaaacaaggagatatagactttgaaatattgaag

SEQ ID NO: 221713 - DNA, 1710 bp, Zea Mays
tcctctgctcggcgtacgtccctggccctgcgcctcctagtgtagacttgtccccacatgacattgctggtcagattatgccaaccatacaatggggaaggcgcacaagaactgtcttggatgttggatgtggtgttgccagctttggtggatacctgcttgacaggaatgccattactatgtcatttgccccaaaagacgagcatgaggctcagatacagtttgccctagagcgtggaattccagcatttctagcagtaattggaacacaaaagcttccgtttcctgataatgtgttcgatgttgtacactgtgcaaggtgcagggtccattggtggaaaaccattgttggagcttaatagagtactgaggcctggaggatatttcatttggtctgcaacccctgtctaccgtcaagagcaaagagaccaagatgactggaatgcaatggttactctgactaaatcaatctgctggagaacagtggtaaagtctcaagatgtcaatggaattggagttgttatatatcaaaagccagcatcgaattcttgctatgctgaaagaaagaccaatgagccccctctatgctccgagagagatggatcacgctttccttggtatgctcctcttgatagttgccttttcacaactgccattaccacttcagatgaaagatataattggcctgttccatggcctgaaagacttgatgttagctatgcaagtgtacctgatgattctgcttctaacaaagagaagtttgaagctgatacaaagtattggaaacagctcatttcagaagtatatttcaatgacttcccacttaattggtcaagcattcgcaatgtaatggacatgaatgctgggtttggagggtttgccgcagcactcattgatcaacctttatgggttatgaatgctgtgccaattggtcaaccagataccttgccacttattttcaacagaggtttgattggggcatatcatgactggtgcgaatctttcagcacctaccctcgtacctatgatcttctccacatgagtaatctcattggaaatcttacaaacaggtgtgacctcatcgacgtggtggttgaaatcgacagaatactgagacctggaagatggtttgtgttgaaagacacgttagagatgataaagaagatacgcccaatcctgaagtctctgcactatgaaattgtcgtcgtgaaacagcaatttcttgtggctacaaagagtttctggcgtcctggcaaaccagcttccacatcagggtgacatatagatcgtactttcaagggagtcttcaacaaccaacgattctattgattctttgagacctgatcaaactaattctttctacaacacagtctatgtagattattacctgtataagtatagaaaatacatatggtaagttgaggtaataccccttttttttgccaaagcataataacaaggatgttatagacttatgcagtagtaggcaagttttgacaaatacatacaaagggaagggatcatgaaacgtgttgtgtatacttgctcgttgataacttttgtaaaaggagtttgaaataaccttgtactcagtactcatcatggttctgcaatgccagtgcattctgacgttcagctcccaggagctatttttatacctctgcacatagtcagaatccgaaacctagtattgagctcctcctgttgacc

SEQ ID NO: 221714 - DNA, 1801 bp, Zea Mays
ggaaaactaataatatccatctgccttatctactcgatcagctcgagccagctgtgcgcgcgtcccccctggccgcacgttcctctgctcggcgtacgtccctggccctgcgcctcctagtgtagacttgtccccacatgacattgctggtcagattatgccaaccatacaatggggaaggcgcacaagaactgtcttggatgttggatgtggtgttgccagctttggtggatacctgcttgacaggaatgccattactatgtcatttgccccaaaagacgagcatgaggctcagatacagtttgccctagagcgtggaattccagcatttctagcagtaattggaacacaaaagcttccgtttcctgataatgtgttcgatgttgtacactgtgcaaggtgcagggtccattggtatgcaaatggtggaaaaccattgttggagcttaatagagtactgaggcctggaggatatttcatttggtctgcaacccctgtctaccgtcaagagcaaagagaccaagatgactggaatgcaatggttactctgactaaatcaatctgctggagaacagtggtaaagtctcaagatgtcaatggaattggagttgttatatatcaaaagccagcatcgaattcttgctatgctgaaagaaagaccaatgagccccctctatgctccgagagagatggatcacgctttccttggtatgctcctcttgatagttgccttttcacaactgccattaccacttcagatgaaagatataattggcctgttccatggcctgaaagacttgatgttagctatgcaagtgtacctgatgattctgcttctaacaaagagaagtttgaagctgatacaaagtattggaaacagctcatttcagaagtatatttcaatgacttcccacttaattggtcaagcattcgcaatgtaatggacatgaatgctgggtttggagggtttgccgcagcactcattgatcaacctttatgggttatgaatgctgtgccaattggtcaaccagataccttgccacttattttcaacagaggtttgattggggcatatcatgactggtgcgaatctttcagcacctaccctcgtacctatgatcttctccacatgagtaatctcattggaaatcttacaaacaggtgtgacctcatcgacgtggtggttgaaatcgacagaatactgagacctggaagatggtttgtgttgaaagacacgttagagatgataaagaagatacgcccaatcctgaagtctctgcactatgaaattgtcgtcgtgaaacagcaatttcttgtggctacaaagagtttctggcgtcctggcaaaccagcttccacatcagggtgacatatagatcgtactttcaagggagtcttcaacaaccaacgattctattgattctttgagacctgatcaaactaattctttctacaacacagtctatgtagattattacctgtataagtatagaaaatacatatggtaagttgaggtaataccccttttttttgccaaagcataataacaaggatgttatagacttatgcagtagtaggcaagttttgacaaatacatacaaagggaagggatcatgaaacgtgttgtgtatacttgctcgttgataacttttgtaaaaggagtttgaaataaccttgtactcagtactcatcatggttctgcaatgccagtgcattctgacgttcagctcccaggagctatttttatacctctgcacatagtcagaatccgaaacctagtattgagctcctcctgttgacc

SEQ ID NO: 221715 - DNA, 1595 bp, Zea Mays
agaagaagctgatcctacaccatcagcgacttgggggcaagccacatttcaaggagtggggaatgttagatttggtacaacaacgtccctcacccaaagctggtggagtataagaaagatcagaactgggttacaagatctggtgattatcttgtttttcctggaggtggaactcaattcaaagatggcgtgggaagatacattcagtttgttgaacaggtggaaaaccattgttggagcttaatagagtactgaggcctggaggatatttcatttggtctgcaacccctgtctaccgtcaagagcaaagagaccaagatgactggaatgcaatggttactctgactaaatcaatctgctggagaacagtggtaaagtctcaagatgtcaatggaattggagttgttatatatcaaaagccagcatcgaattcttgctatgctgaaagaaagaccaatgagccccctctatgctccgagagagatggatcacgctttccttggtatgctcctcttgatagttgccttttcacaactgccattaccacttcagatgaaagatataattggcctgttccatggcctgaaagacttgatgttagctatgcaagtgtacctgatgattctgcttctaacaaagagaagtttgaagctgatacaaagtattggaaacagctcatttcagaagtatatttcaatgacttcccacttaattggtcaagcattcgcaatgtaatggacatgaatgctgggtttggagggtttgccgcagcactcattgatcaacctttatgggttatgaatgctgtgccaattggtcaaccagataccttgccacttattttcaacagaggtttgattggggcatatcatgactggtgcgaatctttcagcacctaccctcgtacctatgatcttctccacatgagtaatctcattggaaatcttacaaacaggtgtgacctcatcgacgtggtggttgaaatcgacagaatactgagacctggaagatggtttgtgttgaaagacacgttagagatgataaagaagatacgcccaatcctgaagtctctgcactatgaaattgtcgtcgtgaaacagcaatttcttgtggctacaaagagtttctggcgtcctggcaaaccagcttccacatcagggtgacatatagatcgtactttcaagggagtcttcaacaaccaacgattctattgattctttgagacctgatcaaactaattctttctacaacacagtctatgtagattattacctgtataagtatagaaaatacatatggtaagttgaggtaataccccttttttttgccaaagcataataacaaggatgttatagacttatgcagtagtaggcaagttttgacaaatacatacaaagggaagggatcatgaaacgtgttgtgtatacttgctcgttgataacttttgtaaaaggagtttgaaataaccttgtactcagtactcatcatggttctgcaatgccagtgcattctgacgttcagctcccaggagctatttttatacctctgcacatagtcagaatccgaaacctagtattgagctcctcctgttgacc

SEQ ID NO: 221716 - DNA, 2522 bp, Zea Mays
aaaattaaataagacgagtcggtctaatttagtctataaagtcaaacgaattaagacgaaggagtactgaggattgttcaaagtttcatactatgccaccatccgaaaaggaccagcaccggctgccaaggtgccaacgcagcaggcgtgatcgcgcgacggtccgcttccattccaaacccacccactcatccacccgcctaaccccaccacccgtcattgctgcggctgcctcatacttccacaatttcaccgctccggcctccggctggttccactccgcaccgcggcgcggaggcgatggccgtcccttcctccgaccgcgcgagacgccccttccccctctcgccctcgctctcgctcttcctcctcatctccgccatcctcgtcctcctcttcctcttcctcgacccctcgcccggatcgctcgcgttcctcccctcccgtctctccgcatcagccccttccctcgcacctcctctaaccccccagcaacaaagccgcgccccgcgaagcagaagcccacctcactcgagaccagacggctcgagcgccaccgagaaagcggaggagggcactactgccaccgcatcgcaacccgtcacaaaagccgatgccaacggtagcgcatcgggaccatccgcaaaggaatccagcggtggcagcggctcaggcggtaacagcggcgccaggggagtcggggcggacggggagacgggtacaagcgtcgtcgccccggtggagaaaggtggggacgacgaggaggaggcgccggtgagcgtgaggtggcagacgtgcagcaggctggggaggggcgtgtcgtcgacggactacatcccgtgcctggacaacgtgcgggcgatcaaggcgctgcggtcgaggcggcacatggagcaccgcgagcggcactgccccctgccgccccggctcaggtgcctggtgccgctgcctgcagggtaccggacgcctgtgccgtggccgcggagccgtgacatgatttggtacaacaacgtccctcacccaaagctggtggagtataagaaagatcagaactgggttacaagatctggtgattatcttgtttttcctggaggtggaactcaattcaaagatggcgtgggaagatacattcagtttgttgaacaggtggaaaaccattgttggagcttaatagagtactgaggcctggaggatatttcatttggtctgcaacccctgtctaccgtcaagagcaaagagaccaagatgactggaatgcaatggttactctgactaaatcaatctgctggagaacagtggtaaagtctcaagatgtcaatggaattggagttgttatatatcaaaagccagcatcgaattcttgctatgctgaaagaaagaccaatgagccccctctatgctccgagagagatggatcacgctttccttggtatgctcctcttgatagttgccttttcacaactgccattaccacttcagatgaaagatataattggcctgttccatggcctgaaagacttgatgttagctatgcaagtgtacctgatgattctgcttctaacaaagagaagtttgaagctgatacaaagtattggaaacagctcatttcagaagtatatttcaatgacttcccacttaattggtcaagcattcgcaatgtaatggacatgaatgctgggtttggagggtttgccgcagcactcattgatcaacctttatgggttatgaatgctgtgccaattggtcaaccagataccttgccacttattttcaacagaggtttgattggggcatatcatgactggtgcgaatctttcagcacctaccctcgtacctatgatcttctccacatgagtaatctcattggaaatcttacaaacaggtgtgacctcatcgacgtggtggttgaaatcgacagaatactgagacctggaagatggtttgtgttgaaagacacgttagagatgataaagaagatacgcccaatcctgaagtctctgcactatgaaattgtcgtcgtgaaacagcaatttcttgtggctacaaagagtttctggcgtcctggcaaaccagcttccacatcagggtgacatatagatcgtactttcaagggagtcttcaacaaccaacgattctattgattctttgagacctgatcaaactaattctttctacaacacagtctatgtagattattacctgtataagtatagaaaatacatatggtaagttgaggtaataccccttttttttgccaaagcataataacaaggatgttatagacttatgcagtagtaggcaagttttgacaaatacatacaaagggaagggatcatgaaacgtgttgtgtatacttgctcgttgataacttttgtaaaaggagtttgaaataaccttgtactcagtactcatcatggttctgcaatgccagtgcattctgacgttcagctcccaggagctatttttatacctctgcacatagtcagaatccgaaacctagtattgagctcctcctgttgacc

SEQ ID NO: 221717 - DNA, 1816 bp, Zea Mays
cgccgcacccgcaagccagcatggccccatctacacgcgccactctttcccttcccgccgcaccgccaatggcttcgcgcctccgcctcgtcgacccgaccccaagcacagacgcggattccgctcagaacccaggcatctccggcaaggcagcgggtgaaggggagcgagtgggagaggcgaagacgccgcagccgcggcagccggatgtgacggaccttggcggcggcagcgaggtggtctacatccctcggttcgtggctcgggagaaggcgtgggagtggttcgactacctcgacaacgccatcccctggacacgccccgaaatccgcgtctttggccgctctgccatccagttcgggtacccgttttcatccctacaccaacaaggtggacaagaaggcgacttcaccgtacttgatcaagaagaaaaatgtaaaggtgatagccatcaaggccaacaagcaagccaacaacaaaggaaaaggggccaaacggatttgggtgcctaaggatatcatctctaacatgaagagcaccaaaaaggtttgggttccaagagggaagtgagaagtccgaaggactttgtgaaatttggagacttagcaaaaatgggatgcatatcatgagatacatcatatcgaatcaagtttattaccaagtgtgttagtgaacactatgaaaccaagttctccacccatgactaagcctagagatgtgtgctatgttgcagatgaagggttgacagatttgagatatagtggccatcagcctcttgcacattcttgggatgaattccccgtgctcaaggacgtcttgaaagtggtccatgaagcccttcccgggagctatttcaacagcttgctcctgaacagatacaagacaggttcagactacgtttcatggcatgcagacgatgagcccctctacgggccgactccagagatagcatctgttacctttgggtgtgaacgtgacttcttacttcggaagaagcctaccaaatcgcaagccacttctggatctggagaagctggtcgaaagcggctcaaggtcgatgcacctcaaaagccacatcattttcttctgaagcatggctcgctgcttgtgatgagaggctacacccagcgggactggcagcactcggttccgaagcgagccaaagtgagctcaccaaggatcaatctgactttcaggcatgtactgcggtgacacactctctttagcatgccattgaaatcacaatgaagctgtcactgaattcgaatctaagcccaacaattttgagtggattgacaagcaaaaaaatagaatgttacgtgtgtgaagcctatccataaggagtagccagataaaaactctcaacttattgcagcacttggatttccatatccaaacaaagtgatctagtggttgcatgtttctgtatggaagacgataaattttctttgagctaaaattgtgtgccccccaccccccaaaatatgtaaatacattgatctcttgaattgttgaggatctgttcagttgcaagcattgcgttgagatcttggaattcctgatacgcttgtgaagacaggggtaaatagaagtgctactccaaagactgatgagatgaacttggagacagatgtttttgttcttggcataagagaagaatatgggataggtttgctgtagcaacttatcattctgcaacaatacattttgcaactcctctgtaaagatcttttagccaaaatgatgtccttccactagaaaggttctctttcattttttgcatgcggcactttgccattagtgtagtgagtgttcc

SEQ ID NO: 221718 - DNA, 1162 bp, Zea Mays
cctgggaacaatgtacttaattgaagaggcgttatccagaagtccaactcgaggcctagagatgtgtgctatgttgcagatgaagggttgacagatttgagatatagtggccatcagcctcttgcacattcttgggatgaattccccgtgctcaaggacgtcttgaaagtggtccatgaagcccttcccgggagctatttcaacagcttgctcctgaacagatacaagacaggttcagactacgtttcatggcatgcagacgatgagcccctctacgggccgactccagagatagcatctgttacctttgggtgtgaacgtgacttcttacttcggaagaagcctaccaaatcgcaagccacttctggatctggagaagctggtcgaaagcggctcaaggtcgatgcacctcaaaagccacatcattttcttctgaagcatggctcgctgcttgtgatgagaggctacacccagcgggactggcagcactcggttccgaagcgagccaaagtgagctcaccaaggatcaatctgactttcaggcatgtactgcggtgacacactctctttagcatgccattgaaatcacaatgaagctgtcactgaattcgaatctaagcccaacaattttgagtggattgacaagcaaaaaaatagaatgttacgtgtgtgaagcctatccataaggagtagccagataaaaactctcaacttattgcagcacttggatttccatatccaaacaaagtgatctagtggttgcatgtttctgtatggaagacgataaattttctttgagctaaaattgtgtgccccccaccccccaaaatatgtaaatacattgatctcttgaattgttgaggatctgttcagttgcaagcattgcgttgagatcttggaattcctgatacgcttgtgaagacaggggtaaatagaagtgctactccaaagactgatgagatgaacttggagacagatgtttttgttcttggcataagagaagaatatgggataggtttgctgtagcaacttatcattctgcaacaatacattttgcaactcctctgtaaagatcttttagccaaaatgatgtccttccactagaaaggttctctttcattttttgcatgcggcactttgccattagtgtagtgagtgttcc

SEQ ID NO: 221719 - DNA, 1135 bp, Zea Mays
tagagaggaggcttgacaccatgatagaggatgttagttgccttttgtgagcaaacagagggtcaaaagttgctggaagatttaccagtgcaggcgatgttggagactctcacaaagagatacgagaaggaattgatacacccaattcaaaacctgttcagtggagaattagcccgtgctatgcttattcagattcaaaagcttaaactggaccttgaatcgaccatggtgctgagggaagaggtaatattgcacgatgtcaacggaggctgcttcttgttgatgtagagagaaggcttatggagtttcaacattacagggataatggaatggaggaagaggcacggtgcaagtttggcttagtactttacacgcttgatagactctgcaaagctgttgagtcacacgcaaaagaaacaggcgaatggttaagcttgagacaagatatttttgatctgtcgaagctcgacatgggaatgccagataagatgattgtcgtttcacggttgaagtggatgtataactgcttgcttccattctcatcgagccgtttgccacgcctctagagcagtgagcaactggacgtcgtgtgttgcattttggataaagattttgacacggatacctggaactctatgtcggaaggatggttctttcatgcccacaagatgttctgtagattttagcagagctggatgaagcatatcggaagggggcagattgggtggatgcagtatccatcgagccctccgttgacaattcttgcattgctaggcatgttgatttggattggctgttgcaccgaatggtttgcgtcgatgggctacatctacatgtgtgcgagcattgtaccctttggccttgttccacttgcaattccaattccaatggttgttccatatcccatactagttcataagtcataacatgacaacagaatgctcttcttttatctattccgcagagatgggtacaatcttatttaactgtttcatttgaaagaacgtgttattattcatgtggccacacgacaccctgggttcctttcacttgccgatgatggcgagcagcgcttccttgtagtggccatgggtgttcttggccacggcgtcggcgagctttgtcccgtactgcc

SEQ ID NO: 221720 - DNA, 1256 bp, Zea Mays
gtggagaaccctaaccctaaatcagggatgttagttgccttttgtgagcaaacagagggtcaaaagttgctggaagatttaccagtgcaggcgatgttggagactctcacaaagagatacgagaaggaattgatacacccaattcaaaacctgttcagtggagaattagcccgtgctatgcttattcagattcaaaagcttaaactggaccttgaatcgggactactggaaatggatcagattctaagggcaaatgctataaactttgctgttcttgcagcgcttcctgcttttggtctttcacttctgttgcttgtgttactgcgagcatgggttcagcgtgaccatggtgctgagggaagaggtaatattgcacgatgtcaacggaggctgcttcttgttgatgtagagagaaggcttatggagtttcaacattacagggataatggaatggaggaagaggcacggtgcaagtttggcttagtactttacacgcttgatagactctgcaaagctgttgagtcacacgcaaaagaaacaggcgaatggttaagcttgagacaagatatttttgatctgtcgaagctcgacatgggaatgccagataagatgattgtcgtttcacggttgaagtggatgtataactgcttgcttccattctcatcgagccgtttgccacgcctctagagcagtgagcaactggacgtcgtgtgttgcattttggataaagattttgacacggatacctggaactctatgtcggaaggatggttctttcatgcccacaagatgttctgtagattttagcagagctggatgaagcatatcggaagggggcagattgggtggatgcagtatccatcgagccctccgttgacaattcttgcattgctaggcatgttgatttggattggctgttgcaccgaatggtttgcgtcgatgggctacatctacatgtgtgcgagcattgtaccctttggccttgttccacttgcaattccaattccaatggttgttccatatcccatactagttcataagtcataacatgacaacagaatgctcttcttttatctattccgcagagatgggtacaatcttatttaactgtttcatttgaaagaacgtgttattattcatgtggccacacgacaccctgggttcctttcacttgccgatgatggcgagcagcgcttccttgtagtggccatgggtgttcttggccacggcgtcggcgagctttgtcccgtactgcc

SEQ ID NO: 221721 - DNA, 1516 bp, Zea Mays
atggcgtcctctcctctggcaccaaccaggacctgctcgcccctagtgcccaagctgccccgccgcccctcgctcccatccccgtgtaggtctccccgtcgcagtgcacggtggccgcgcttggcgtcagtcagagcgactccggacagcagctggaccgcggcagcgacggaggagcagaaggagcggaagaggtgcctgagatgcggcggctcttaccgagacgaggagaaccacccgaccgcctgcgccttccatggccacgtcacaggcgagaaggggctgttctccctgtcgccgccgcaccagggcatcgacggcgagtggagcgacaagagcggggtcatcgtgtaccgctggaacgacgaggggagccggcccaacacaggccgcgctaactggaagaggcgctggagctgctgccaggagcgcgaggaggacgcgccgccgtgccagcgcgggtggcacgtctcctacgacgacggctacaccctcttctaggtctccctctacccgtggccgtggggagcagcaggagatataatataagcttctgccagagaagcactgcgccgatgaagcttgtggagccatggcgggcagtaatggtcctgaaggagtgccagtagtgacttctgctgatgaccctccgacccgtgccgatattccatttctctgcaattcagttgatgaaacatgtgaagccacaggggacgacagtgctcccttggatgctcagatatgtacgggtttctctaagttgatcagcttggaggtgaagaaaggcctccagaagtgcgcgacgttcccaccctcgtctggtcagcctcagcaggaggattgttcatgctcccatgtaggtgatggcctcacgggtgctcctgctttctggcgatctgtgtccttacctgtgagtacctcatgttaaattattttaccatttgtcttaaatgattgctattgtacttaaagttctactgataagtcgtacgctctgtacttgaatgagatcttttggttgcgatcattatgtatgttcaaagtaatagatggactccatcttggttattttagtgttcgctagcagccttaatacctaatcaaatcaggttcatattcgctttccagtttatcatgctcatacaaaattagcaaccaccttttggaatgcaataatactttgaactaattgaaagacatcctggttttgttgtgttgactgagtgttttctggctaaagctgaacacaaactcaccatataagcatttctttctttattgattatcttcaaaaaaacagagctcagttccaattgtttaaagttgcacatgacctgacatccgctgtccaaatgtaattaattgtttgttcttactttggctatattggtaagcttgcatgtgaattgaaagcttgctccaatactgtaattggtaatgaagaaatgtttaacatttcaggtgataaatacatgtgtgagctaaatctattgatctgcttgtttatgtaacggta

SEQ ID NO: 221722 - DNA, 232 bp, Zea Mays
agcaatcgaactcggcacggctgcaaagcttaaagcctgaggaggttgctggtatcataaaggactttgatgaacctggtactcttgcaccaactggtcttttcgttggaggtacaaagtacatggtgatccaaggtgaacctggagttgtcatccgaggaaagaagcggcgtggttgtacgtttgttgtgttgctgtatcactctgcgtctctgcaagtgctaaaccagtc

SEQ ID NO: 221723 - DNA, 722 bp, Zea Mays
gccattcccacggccccaccactttgcaaacttccatccgacccctccatttcctcacgcatccccactgagcactgacccccacgccgccggcgatgagcgcgaagcagctctgcgacgccctggccgccgtggggttcgacgccggcgacgatcctctcgacgcggatagcctcgagtgggcgtttctccagggggaggactcccgccggatgcttgcgtgggtctgtgcccggctccgccctggcaacgtcctctccgccacagacctcgagctgtacgagcagcttgaaatggaaggcaagttattgaagggggaagacttagattttgcttttgatcgtatttcggctttctcagacaatatggagaatcaggaatacatattcttgacggaagaaagtcttgaagacatctgtgagtcaaagcttgctcttagagctgaagtttctgatttggaaaggcagcttgcttctctggagtggaggcttgatatacttacagcacaagctaccaccattaaccagggaaagaagtcccgctcatctgctaatactagagctaatggacaacttactggcttagataagatgtttgctaagagaagtttagaggaccaggaccccgacacttggacgcagtcgggttgctgggcagagaaggtgcggtacagttcacgcgataaacacttaaacagtacccgcgatgaacagtattggtag

SEQ ID NO: 221724 - DNA, 868 bp, Zea Mays
ttcacctgttattctataagctgattacattgttttcaaatggattaggggtcagcaaagaatttgccgccttcatgcacttcgacgttacctccaggaacgtgctttttcccccagaacgaggtgaaacagatacagacacctctgttcatcctcaacgcagcatatgattcatggcaggaagtggcagaactagggaactccgactcgagagggttgttcataaactcatgcttcgtgcactgccagtctgagatacaggagctatggttctcatctgactcccccgtgctcggaaacacaacagtagcaaacgctgttggcgactggttcttcgaccgcagctccttccagaagatagactgcccatacccttgtgactcgacctgtcacaatcggatctacgatgactcatcacaagcatagcaattacagtggcctcacttcgtactgccattcaccatgttattacatttgacgcttccagcattgctaacagtagggcaatgcgttgatagccattgattttttttttctttttacgaataagatcaggtgccggcggctttaactcggttgctaccggaaagtgagcgtgcatcttccgacggtacatggcatggtttatctggatggatgaatcgataatcataaattcttaaaaacacaataaatattctagaatttttatgttgtgcaaccgtgacttattttctctttgtattagtcatctatttatatacatcttgatactaaaaaataaaaagaaataaagaaagacatgcttacgataacttttcaaatcgagttcaatgctatctctattaaacaataggatttaagattacatgtcttactcacatttcat

SEQ ID NO: 221725 - DNA, 824 bp, Zea Mays
cgaggagttccgtaactgtaaggaacattttggtgccaggagtagctgaccctcatggaaaatggcatagctgtaagcatgatatagaccagtgctctgcatcgcagctacgggattcaggggtgattttctgaaggaagtggcagaactagggaactccgactcgagagggttgttcataaactcatgcttcgtgcactgccagtctgagatacaggagctatggttctcatctgactcccccgtgctcggaaacacaacagtagcaaacgctgttggcgactggttcttcgaccgcagctccttccagaagatagactgcccatacccttgtgactcgacctgtcacaatcggatctacgatgactcatcacaagcatagcaattacagtggcctcacttcgtactgccattcaccatgttattacatttgacgcttccagcattgctaacagtagggcaatgcgttgatagccattgattttttttttctttttacgaataagatcaggtgccggcggctttaactcggttgctaccggaaagtgagcgtgcatcttccgacggtacatggcatggtttatctggatggatgaatcgataatcataaattcttaaaaacacaataaatattctagaatttttatgttgtgcaaccgtgacttattttctctttgtattagtcatctatttatatacatcttgatactaaaaaataaaaagaaataaagaaagacatgcttacgataacttttcaaatcgagttcaatgctatctctattaaacaataggatttaagattacatgtcttactcacatttcat

SEQ ID NO: 221726 - DNA, 807 bp, Zea Mays
aatatgggtaaggaacattttggtgccaggagtagctgaccctcatggaaaatggcatagctgtaagcatgatatagaccagtgctctgcatcgcagctacgggggtgattttctgaaggaagtggcagaactagggaactccgactcgagagggttgttcataaactcatgcttcgtgcactgccagtctgagatacaggagctatggttctcatctgactcccccgtgctcggaaacacaacagtagcaaacgctgttggcgactggttcttcgaccgcagctccttccagaagatagactgcccatacccttgtgactcgacctgtcacaatcggatctacgatgactcatcacaagcatagcaattacagtggcctcacttcgtactgccattcaccatgttattacatttgacgcttccagcattgctaacagtagggcaatgcgttgatagccattgattttttttttctttttacgaataagatcaggtgccggcggctttaactcggttgctaccggaaagtgagcgtgcatcttccgacggtacatggcatggtttatctggatggatgaatcgataatcataaattcttaaaaacacaataaatattctagaatttttatgttgtgcaaccgtgacttattttctctttgtattagtcatctatttatatacatcttgatactaaaaaataaaaagaaataaagaaagacatgcttacgataacttttcaaatcgagttcaatgctatctctattaaacaataggatttaagattacatgtcttactcacatttcat

SEQ ID NO: 221727 - DNA, 1128 bp, Zea Mays
aagcagcccaagaagggtttagactttagaggaaggggacaacggaacccgtcgatggcggcggctgctggcggcgtgcggcgagccctcgcggcgctgcgctccggttccccgtctactatctctgcaacgctctcccgccaggcggcagctcgctctctggagctagcggccgcgtccctgccgcgcgcctctcgccggcgcctcgcgatctcgaggcttcgctgatgccgatgcacaacgccaccgcgtcggcgctgctcacctccatgctcgggcttaaacctggctcttggggctggctctccgaaggatttgctacacctctataacaggaaaaaggagtatccgtgataagtgcctgtttttaaacctttgcactagaggattccaaaaacatttttacatgccttgcggagtacacccttggacttctgctgatggaatctgtactaaaatctgcgacaaaaaacttatggtcctatgtcccaattatcttggttctactatatccatcgaattattcgctttccacgctatctccttttccttgtctcgtgtggcattgccatgggattctaatatgacatcagcatggctagtatcaaatatttgttatccgaagcatcaaagcaccagtatgaatgatctatatccatcgaattattcgctttccacgccatcttcttttccttgtctcgtgtggcattgccatgggattctaatatcacatcagcatggctagtatcaaatatttgttatccgaagcatcaaagcaccagtatgaatgatatatttacatgttttgtgttgttaacaagcatcagccaactgaagcagatcgcagattaccagatatgaatatcacatatgtaatgatatataagcatgcaaattctatctggcaagatttcatttgcatgtctaagcataatgttaagaagggcaggtctgataagcataatgttaaggacatttcttgtgtaggggtgagaactctcactgagtcacctgagcgtgggcttgaagcagtctgtcttgtggagagaagtgttcatcggcgtcggcgttgatgaatatgccattccggtggaggaccaagggcgcaactaccaggcgaccccaaat

SEQ ID NO: 221728 - DNA, 345 bp, Zea Mays
tttagactttagaggaaggggacaacggaacccgtcgatggcggcggctgctggcggcgtgcggcgagccctcgcggcgctgcgctccggttccccgtctactatctctgcaacgctctcccgccaggcggcagctcgctctctggagctagcggccgcgtccctgccgcgcgcctctcgccggcgcctcgcgatctcgaggcttcgctgatgccgatgcacaacgccaccgcgtcggcgctgctcacctccatgctcgggcttaaacctggctcttggggctggctctccgaaggcccttttgggatggttattgaggataggctagaaaccaaggacacttaa

SEQ ID NO: 221729 - DNA, 3364 bp, Zea Mays
tcttcttcaagacaaccagcaatgcttacaaatccaaaagctctaagtcagaagcccaattgctgaagcaaataactcaacaaccgaagacccaagatccatgaagtagcaagaaaaagctactacaacaaattggaagtgatggttgtctagtacaacacaacaaccacgccaggggttttaatgccaacagggagggaagtgctttaatgttacttgtaggaccagcataagatcctgaattcagaaacaaaataagaggctagtaagtagcacctggacaaggcacaagggtggtgacaaagcagcacccctgtaggtgaggcacatcacgttggtgaactcccttacacatggtgtttacaaactcatgtgtggactccttacctacactcctagtagtatgagaatgatgctaaagtatccaacggtacaaaacaacaagaagatggatatttctcctttagaaaaaatgagcggggagtggcagtgaactcccttacacatggatcaggacctctatgacaagtacattgacatcaaaggaataccagagctatcagtcatcaacagcagcgttaagggaattgagcttggatcggttgtgtccatctctacaggctacaaccattgaggtgttgtcagatggaaatctggtcttcagaaaaattgccaatcacctaagcaaagtggcttcgccatttgttcggaacacagcaaccataggtggcaacataatcatggcgcagaggttgccattcgagtcagacatagcaactgtgctactggctgcagcgcctcggccatttggcaatgctgcttcatatgtcaatgctgctctcttggcaaggacttcaactgatgcagcttcagggaagaacatcatggaggatatatgcttggtgttcggtgcttatggagctgaccatgccatcagagctagcaaggtagaggattttctaaagggtaaatcactgagctcttctgttatacttaaagcagttcagttgcttaaagagacggtttcaccaccagaaggcacaacacatcctgagtatagggtcagcttggctgtcagcttcttgttcaccttcttatcctccttaaccaacagctgaaggaaaatcttgaggttgacagaaattatttaccaatacactcaagacaagaaatggttttcggtgatgaatacaagccagttggcaagccgatcaagaaagtcagggcagagctccaagcttctggtatttcccctccaatgtactgccttgccaaaaaaaatattttgacagcatcagcttataacctttcttcagcatattctgcaaaatactgtatagtgatgcttctgttcatttttagtacttcctctgttccaaattatagacgttttagtacaaaacaacaagaagatggatatttccccttcagaaaaaatgagcggggagtggcagtgatcatcattgttctaagagttcagagttgagggacagggagaatggtcgcactgagcggaggaggaagaactgacgtctcctctctagtcctgctcaaactccttagcagcggcgaatgaggattccatcagtatcataacaacagaatcagaaatggcaagagaacaaagcagttaggtaatgagaagtattctctagaggtgaaataaaaaaatccagtcgaataacgaggcttaccaattgtgggtcgttcgttggtgactccccctcgactgataaatggagacaaaaaggaacaagctttatgatctctgatgctcgagtaccaagtattgcttgaaaaacacatgcatagtcatagaagatgaaagacatttcaattgatccagaaaagcataagcgttcatacttgagacacacggagtgaaggtaagccattccgcgtgcagtgggtggacgtggggcgtggacatgagctgggcaaggccgaactcggtgacgcaggcgccgagttcctatgagagaaggatgttgcttgacttcatgttcccgtgaatgaacttcccgccgctacccatggagtgaaggtaagccattccgcgtgcagtgcccagagctatcttcaccctggtctcctagtccaatggggttcttccagcagctttgttacctagattttacaatcaacaattagtctgcaaccaactaccatacagtttcattttcatagaaatatgtataatgagcctagtcagactttcagacaataagttagcaaaacaggtgaaataactgaaaataaaagtggaaacatcacagaagcaaaacttgaaatgcacctttcatttgttgacccagtcccaaaatctcagtaaccaattaaatttgtggtatccaagcaaaagagaacatgtccatacagacaaattagatgaaaaagaaatgaaagcaaactcaggtgttctgtcaaaaatatgtcaaaagtcctatagccctcctagtaaaatcacacagtttccagttcatggtgattaagtagatctaccaaatgtgtctaaacctgattaataatatgcaacacaacattaacccatgtagtgctacttgtacccccaactgtccattctagtctccggtgcctgggaactgatgaccgttctagtctccggtgcctgcctggtattattcctcctgttcccgccagcattgcctgcactaacgagcccccaggacgacgtcagttgctacagtgttctatagtactgtacctgtacgtactacatgcaagagtaaccttctaccaaagtgagtgaccgccactatctcttgtccaagcttttctctatactcttctttttagatttctaccgtaacgttcaattttcttccctgccgacagcagcaactgtccatgtcgttcttgaagattaagtaggtaacagaaaagcaaggcagcactatgaaaccaccaattattcttttgcattcacgacaaaggccagaaaatttcagtatctcaaaagcccaaaattctagcaacaagagcaggtcttgttaactgtttctagggaactccagaacagctattggaatcccaaataccaaatgatttgaggaaggtatatgtcaacatcctttgtaaaaaactatattatatccagaagaataaaaactaaggactgaagacagtacatctggagtgtatgtctatgttacaaataataaataccttattcagaattttttttaccttattcagaaaaaaactaaggagtaaggaccaaagattataatttacataacccagaattagagagttctctacaatcaatgtaaagcatccccactttgagaattcaagtatgcggcccccatctggattatactttcaaggtgaagtagcaaat

SEQ ID NO: 221730 - DNA, 1242 bp, Zea Mays
cgcctatatgagcccacccacgtagctgcgtctgcgtgcgagctcctcctctgtacccctacctccaccccctcctcgtgccgtccacgcagcaccggcgcgccgcgctcgccctcgccctggcagccggcgtcccgctggtcctcctcgcgcccggccaaagacggaatgcgaaaaaatacgccttgatgaggaagaaacacgtccctgtcagggcgcagccttcttctccatcctcgtgtgcggggcgctgggctgctgcctgcccgtgctggggcggcgcgtgccggcgctgcgccctgacagggacgtgttcttcctcatcaaggcgttcgcggcgggggtcatcctgggctggccacggggttcatccacatcctccccgacgcgttcgagaagctcacgtccgactgcctctccggcgggccgtggcaggacttccccttcgcggggctcggcgccatggtgggcgccatcggcacgctcgtcgtcgacaccgtcgccacgggctacttcacgcgcgtccacttcaaggacagcgccgccgccgccgtgggcgccgccgccgtcggcgacgaggagcaacagcagcagcaggcggcgtcggcgccgcacgtcgacgacggagcagacggcgacggccacggccacggcgggcacgcgcacatgcacacgcacgcgacgcacgggcactcgcacggcgcctcggtcttggcggctgcatcgttcaggtaatcatcaagaaccccatggtgcagagccggggcaagctgcagctcgccatcaacgccttcatgctcttctgcgcgggccgcatggccacgctggccaagtggacctagtaactagccataatgatgaggatgattctagtgatgagaaagatataaattgggccttaatagagatcaaattgctatggtggatgaattgataaaggttgtcaataaaaaaggagaacatatatgccgtcgtatgtgtgtctgtatattatgaactgtatgtttgaactgtattttaaccagcaactattcatcatcacccgtagtgcacagatgccgccggcgccgaaatgcctcttgctgagctgccgaattcatcaccacagacagtaccactccacttccatctatcaaagggtgtttgggactgctctagaatagatttatttttttaaaaaaattaattgaaacaatggacaaaatgatttatctaaatgtcttgtatgttcacatcacaacc

SEQ ID NO: 221731 - DNA, 3000 bp, Zea Mays
taggaattcaagaggcaaacctgaaaactcgggaccgggccacgccatggataaaggagcagccggtggctaaatttttggttggccccgcgggcgcacgtcgtttccgctcgcccccctgcgatgccgggaccggccgtggaggcagcggccaggagcggcggcgaccaccacggcggctgctgcgggaaggcggccggcaagtgggagaagacgtacctggatgtcctgggcatctgctgcaccgccgaggtggcgctcgtcgagcggctcctgacgcccatccaaggcgtgagggcggtcaccgtcgtcgtcccgtcccggaccgtcatcgtcgaccacgacaccgccgccgtctcccagttccacattgtgaaggttctgaacaaggcgggcctcgaggcctccgtccgagcctatggcagcagcgccggcgccggcgggcggtggcccagcccgttcaccgtcgcctgcggcgccctgctcgccctgtccctgctcgcgccgctgctccccccgctgcggtggctggcggtggcggcggcctgcgtgggctcccagcccatgctgctccgggcgttcgccgcggcgggcaagctgacgctggacatcaacatcctgatgctcatcgcggtcgccggctccgtggcgctcgggagcttcacggaggccggcgccatcgtgttcctcttcaccgtcgccgagtggctggagacgctggcgtgcagcaaggccagcgccgggatgctgtccctcatgtccacggtgcccaagaccgtcgtgctggccgagacggggcaggtcgtcggcatgggcgacgtcgcggtcggcaccgtcgtcgcggtcagggccggcgacgtggtccccgtggacggcgtggtcgtcggcgggcacagcgaggtcgacgagagcagcctcaccggcgagtccttccccgtgccgaagcagccgcagtcggaggtctgggccggcaccatcaacttagacggctacatctccgtgaggacgacggccctcgccgagaactcgacggtggcgaagatggagaggctggtggaggaggcccagaacagccggtctcggacgcagcggctcatcgactcgtgcgccaagcactacacccctgtgtggttgtgtcttttgcatgtgcagccgtggtcgtcctcgcggcgggggtggtcctcgtgcccgccctgctgggagctcgcgacctggagctggagcattggttccggctgtccctggtgctgctggtgagcgcgtgcccgtgcgcgctggtgctgtccacgcccgtcgccaccttctgcgcgctcctgcgggcggccaggatggggctcctcgtcaagggaggcaacgtcctcgagtcgctgggcgaagtcagggtcgccgcgttcgacaagaccggcaccatcaccagaggggagttcagcatcaaggacttccatgtggttggggacaaggttgaaatgaaccagctactctactgggtatctagcatcgagagcaaatcaagccatccaatggccgctgcacttgtcgagtacgctcagtccaaatctgtacagccgaagccggagaacgtgaccgagacctgcatctatcatggcgagggcatctacggggtgatggatgggaaacagatctacattggaaacgaaaggatcatagcaaggtcctcgtgtcgtcatcatcaacatgctggccaccaagaaacagacggtctcaaaggcgtgtccatcggccacgtgatctgcgacggcgatctggtggggaagttctcgctgtccgacacctgcaggacaggggcggccgaggcgatcctgcagctgaggtcgatggggatcaagtcggtgatgctgaccggggacagcgcggcggcggccaagcacgcgcaggagcagctcgggggcgtcctggaggagctccacgcggggctcctgccggaggacaaggtccggctcgtccggggcctgcaggcgcggcacggggcgacgctgatggtgggcgacggcatgaacgacgccccggcgctggccgcggcggacgtgggcgtgtccatgggcctgtccgggtcggccgcggccatcgagacgagccacgccgcgctcatgtccggcgacatcctcagggtgcccaaggccgtccggctcgggcgccgcgcccggcgcaccatcgccgtgaacgtggcctcctccgtcggcgccaaggccgccgtgctggcgctcgccgtcgcgtggcgccccgtgctgtgggtggccgtgctcgccgacgtcggcacgtgcctgctcgtcgtcctccacagcatgctgctgctcagggacggcgccgcccgccgcccgaggtgctgcgctagcgctacggcgtgcaagagcaagcaggcgtccaagccgtgctgcgcgacggtgaagccggtggcgacgacgaggcacaggcacgggcacgggcacgggcacgggcacgcaggcgcggggaagcccgggacgctaggaggcgacaagcagggtaaggactgccatggttgctgccagaaggagagcaagccgcccgaggacgccgtcgtgatcgccattccgggacgggccgtggagcaccggaaggaggccttccctcacgagaacgcgggagccggggggtgctgcgctgcagcgcacggtgccgaagacgaggtatgcattgtcatcagcgccaggtcgccctgctgcagcaccgcgaggagtcggtctggttctcccaaggacgcattgtgctgccacggctccggtggtaaagacggcggcgccatctcagccctcgtgtgctgacctcacctaccagcactaccattcgtggaatacggtcgtcttgtatataaaaaaattactcatatcctatgccgtagacaggaagttgtttctattacgagtactaatattcttgtaatctatgttcccctgagatcattagaaaaaaaattatatataatactctattaaaaatctaatgtgggtaactgatgtctgg

SEQ ID NO: 221732 - DNA, 2883 bp, Zea Mays
cgggcgcacgtcgtttccgctcgcccccctgcgatgccgggaccggccgtggaggcagcggccaggagcggcggcgaccaccacggcggctgctgcgggaaggcggccggcaagtgggagaagacgtacctggatgtcctgggcatctgctgcaccgccgaggtggcgctcgtcgagcggctcctgacgcccatccaaggcgtgagggcggtcaccgtcgtcgtcccgtcccggaccgtcatcgtcgaccacgacaccgccgccgtctcccagttccacattgtgaaggttctgaacaaggcgggcctcgaggcctccgtccgagcctatggcagcagcgccggcgccggcgggcggtggcccagcccgttcaccgtcgcctgcggcgccctgctcgccctgtccctgctcgcgccgctgctccccccgctgcggtggctggcggtggcggcggcctgcgtgggctcccagcccatgctgctccgggcgttcgccgcggcgggcaagctgacgctggacatcaacatcctgatgctcatcgcggtcgccggctccgtggcgctcgggagcttcacggaggccggcgccatcgtgttcctcttcaccgtcgccgagtggctggagacgctggcgtgcagcaaggccagcgccgggatgctgtccctcatgtccacggtgcccaagaccgtcgtgctggccgagacggggcaggtcgtcggcatgggcgacgtcgcggtcggcaccgtcgtcgcggtcagggccggcgacgtggtccccgtggacggcgtggtcgtcggcgggcacagcgaggtcgacgagagcagcctcaccggcgagtccttccccgtgccgaagcagccgcagtcggaggtctgggccggcaccatcaacttagacggctacatctccgtgaggacgacggccctcgccgagaactcgacggtggcgaagatggagaggctggtggaggaggcccagaacagccggtctcggacgcagcggctcatcgactcgtgcgccaagcactacacccctgcgtggtcgtcctcgcggcgggggtggtcctcgtgcccgccctgctgggagctcgcgacctggagctggagcattggttccggctgtccctggtgctgctggtgagcgcgtgcccgtgcgcgctggtgctgtccacgcccgtcgccaccttctgcgcgctcctgcgggcggccaggatggggctcctcgtcaagggaggcaacgtcctcgagtcgctgggcgaagtcagggtcgccgcgttcgacaagaccggcaccatcaccagaggggagttcagcatcaaggacttccatgtggttggggacaaggttgaaatgaaccagctactctactgggtatctagcatcgagagcaaatcaagccatccaatggccgctgcacttgtcgagtacgctcagtccaaatctgtacagccgaagccggagaacgtgaccgagacctgcatctatcatggcgagggcatctacggggtgatggatgggaaacagatctacattggaaacgaaaggatcatagcaaggtcctcgtgtcgtcatcatcaacatgctggccaccaagaaacagacggtctcaaaggcgtgtccatcggccacgtgatctgcgacggcgatctggtggggaagttctcgctgtccgacacctgcaggacaggggcggccgaggcgatcctgcagctgaggtcgatggggatcaagtcggtgatgctgaccggggacagcgcggcggcggccaagcacgcgcaggagcagctcgggggcgtcctggaggagctccacgcggggctcctgccggaggacaaggtccggctcgtccggggcctgcaggcgcggcacggggcgacgctgatggtgggcgacggcatgaacgacgccccggcgctggccgcggcggacgtgggcgtgtccatgggcctgtccgggtcggccgcggccatcgagacgagccacgccgcgctcatgtccggcgacatcctcagggtgcccaaggccgtccggctcgggcgccgcgcccggcgcaccatcgccgtgaacgtggcctcctccgtcggcgccaaggccgccgtgctggcgctcgccgtcgcgtggcgccccgtgctgtgggtggccgtgctcgccgacgtcggcacgtgcctgctcgtcgtcctccacagcatgctgctgctcagggacggcgccgcccgccgcccgaggtgctgcgctagcgctacggcgtgcaagagcaagcaggcgtccaagccgtgctgcgcgacggtgaagccggtggcgacgacgaggcacaggcacgggcacgggcacgggcacgggcacgcaggcgcggggaagcccgggacgctaggaggcgacaagcagggtaaggactgccatggttgctgccagaaggagagcaagccgcccgaggacgccgtcgtgatcgccattccgggacgggccgtggagcaccggaaggaggccttccctcacgagaacgcgggagccggggggtgctgcgctgcagcgcacggtgccgaagacgaggtatgcattgtcatcagcgccaggtcgccctgctgcagcaccgcgaggagtcggtctggttctcccaaggacgcattgtgctgccacggctccggtggtaaagacggcggcgccatctcagccctcgtgtgctgacctcacctaccagcactaccattcgtggaatacggtcgtcttgtatataaaaaaattactcatatcctatgccgtagacaggaagttgtttctattacgagtactaatattcttgtaatctatgttcccctgagatcattagaaaaaaaattatatataatactctattaaaaatctaatgtgggtaactgatgtctgg

SEQ ID NO: 221733 - DNA, 2876 bp, Zea Mays
ggcgcacgtcgtttccgctcgcccccctgcgatgccgggaccggccgtggaggcagcggccaggagcggcggcgaccaccacggcggctgctgcgggaaggcggccggcaagtgggagaagacgtacctggatgtcctgggcatctgctgcaccgccgaggtggcgctcgtcgagcggctcctgacgcccatccaaggcgtgagggcggtcaccgtcgtcgtcccgtcccggaccgtcatcgtcgaccacgacaccgccgccgtctcccagttccacattggttctgaacaaggcgggcctcgaggcctccgtccgagcctatggcagcagcgccggcgccggcgggcggtggcccagcccgttcaccgtcgcctgcggcgccctgctcgccctgtccctgctcgcgccgctgctccccccgctgcggtggctggcggtggcggcggcctgcgtgggctcccagcccatgctgctccgggcgttcgccgcggcgggcaagctgacgctggacatcaacatcctgatgctcatcgcggtcgccggctccgtggcgctcgggagcttcacggaggccggcgccatcgtgttcctcttcaccgtcgccgagtggctggagacgctggcgtgcagcaaggccagcgccgggatgctgtccctcatgtccacggtgcccaagaccgtcgtgctggccgagacggggcaggtcgtcggcatgggcgacgtcgcggtcggcaccgtcgtcgcggtcagggccggcgacgtggtccccgtggacggcgtggtcgtcggcgggcacagcgaggtcgacgagagcagcctcaccggcgagtccttccccgtgccgaagcagccgcagtcggaggtctgggccggcaccatcaacttagacggctacatctccgtgaggacgacggccctcgccgagaactcgacggtggcgaagatggagaggctggtggaggaggcccagaacagccggtctcggacgcagcggctcatcgactcgtgcgccaagcactacacccctgcgtggtcgtcctcgcggcgggggtggtcctcgtgcccgccctgctgggagctcgcgacctggagctggagcattggttccggctgtccctggtgctgctggtgagcgcgtgcccgtgcgcgctggtgctgtccacgcccgtcgccaccttctgcgcgctcctgcgggcggccaggatggggctcctcgtcaagggaggcaacgtcctcgagtcgctgggcgaagtcagggtcgccgcgttcgacaagaccggcaccatcaccagaggggagttcagcatcaaggacttccatgtggttggggacaaggttgaaatgaaccagctactctactgggtatctagcatcgagagcaaatcaagccatccaatggccgctgcacttgtcgagtacgctcagtccaaatctgtacagccgaagccggagaacgtgaccgagacctgcatctatcatggcgagggcatctacggggtgatggatgggaaacagatctacattggaaacgaaaggatcatagcaaggtcctcgtgtcgtcatcatcaacatgctggccaccaagaaacagacggtctcaaaggcgtgtccatcggccacgtgatctgcgacggcgatctggtggggaagttctcgctgtccgacacctgcaggacaggggcggccgaggcgatcctgcagctgaggtcgatggggatcaagtcggtgatgctgaccggggacagcgcggcggcggccaagcacgcgcaggagcagctcgggggcgtcctggaggagctccacgcggggctcctgccggaggacaaggtccggctcgtccggggcctgcaggcgcggcacggggcgacgctgatggtgggcgacggcatgaacgacgccccggcgctggccgcggcggacgtgggcgtgtccatgggcctgtccgggtcggccgcggccatcgagacgagccacgccgcgctcatgtccggcgacatcctcagggtgcccaaggccgtccggctcgggcgccgcgcccggcgcaccatcgccgtgaacgtggcctcctccgtcggcgccaaggccgccgtgctggcgctcgccgtcgcgtggcgccccgtgctgtgggtggccgtgctcgccgacgtcggcacgtgcctgctcgtcgtcctccacagcatgctgctgctcagggacggcgccgcccgccgcccgaggtgctgcgctagcgctacggcgtgcaagagcaagcaggcgtccaagccgtgctgcgcgacggtgaagccggtggcgacgacgaggcacaggcacgggcacgggcacgggcacgggcacgcaggcgcggggaagcccgggacgctaggaggcgacaagcagggtaaggactgccatggttgctgccagaaggagagcaagccgcccgaggacgccgtcgtgatcgccattccgggacgggccgtggagcaccggaaggaggccttccctcacgagaacgcgggagccggggggtgctgcgctgcagcgcacggtgccgaagacgaggtatgcattgtcatcagcgccaggtcgccctgctgcagcaccgcgaggagtcggtctggttctcccaaggacgcattgtgctgccacggctccggtggtaaagacggcggcgccatctcagccctcgtgtgctgacctcacctaccagcactaccattcgtggaatacggtcgtcttgtatataaaaaaattactcatatcctatgccgtagacaggaagttgtttctattacgagtactaatattcttgtaatctatgttcccctgagatcattagaaaaaaaattatatataatactctattaaaaatctaatgtgggtaactgatgtctgg

SEQ ID NO: 221734 - DNA, 2547 bp, Zea Mays
tcgcggcgtaccagtggaatgagagaacagaatgcatgaatggctctctggacactgctgcgcccgcggctgtgtagctcagctcgctggttgttaaagaagggagaggtacagccatggcgcggcgtgggtgccatgccatgcgtccagaccaaaccaggacaggagagacagctggccctaattttggctgccccccagaccggccgttactagctagcgatcgacaagggggtcagggacaggctggtggtggtgtgtgctaagcttcgcggaagttcgcgctgccgtgcgtggccggctggccgcgccgatccatccatataagaggctccggcgcctccctctcttcctcggttcttcccattggtggtaaggacccatcgcccgctcgcgtgtcctttgcgctcgcgaactccgtcgccggacacgagccagggacaccgagtgtggtgaggttgccccttcccttcccccacccccatcgtcgtcttggaccagctctgtacgtaccgtccgtcgatcgtcctttcccgtcccctctagcatcgatcgcagcctcctctgctactgccacgtctctgtgcctgccgagacaagcaagggggtcgtcggtcggggctaggttgttcccttaattcattctaggggcagatcagatcgaaagaaatcaaactaacgtagccatggaagaagctccacgtcattccatgtagttacttcttcagagcgcgcggtggcggccggctagaagctttgttcgttgcatttgaattcatcaccaaaggagaaggcgcctgttggcgttccaccaattccatcccatcgccacaaggtcgtcgatcacgcggatcgtcgcgactgaccggccggcctcctcagccgtccttgttgtgctacaagatcgaggcgacaggatccagccagccacgatgtcggcggccggcgccaccgccgtctgcacgagggacggcggcctcctcccgctgcgtccgcactgcgcgaggtcgtcctcctccttcgccgccgccgccgccgccatcgtgatctacctgacggcgccgggcctggccgtgttgccgatgcgggtgatggcgtccgactccatcgcctcggtgaagctccgcgtgcagacgtcccggggcgtgagggcgcgcaagcagaagctcgtcttcggcgggcgcgagctggcgcgcgacgacgggcgcatcctggactacggcgtggcggacggcaacgtggtgcacctggtcatccgcgtcccggacgtgcgcctcatcaccgtggagaccgtgcagggcggcaagttcaggttccgcgtggagcccgggcgcaccgtcgggtacgtgaagcagcagatcgccaaggaccaccccgcggcggcgcgccccggcgagcagcggctcgtgctcgagggcgaggacctcgacgaccgccacctcatccacgacgtgtgcagggccgacggcgccgtgatacacctgctggtgcggcgctccgtcgtcgcgcgcgacgccgggtccgggcggccgtcgccaccgccacggcgtgacgacgtcaggatcgagcccgtaggcggcgaccataaggcggcggtgcgtggcatggtcgacgcggcgctcgccgggatggagagcgggaacgcgcccatcatgtcgtcggagggcacggggggagcctacttcatgcgggacgcgacggggcagcggcacgtggccgtgttcaagccggcggacgaggagcccatggccgccaacaacccgcgcggcctccccgtgtcgtccaccggcgaaggcctgaagaaagggacgcgcgtcggggagggggcgctgagggaggtcgcggcctacatcctcgaccacccacccaggagcgggaccgcggatgatgggttcgccggtgtgccgccgaccgcgctcgtccggtgcacgcacggagccttcaggcagggcggagccggagccggagcgagggcgccggtgcccaagctggggtccatgcaggccttcgttagtaactgcggcagctgcgaggacatgggacccagcgcgttcccggtgcaggaggtccacaagatctgcgtgctggacatacggctcgccaacgccgatcgccacgccggaaacatactcgtccgcaagcacgacggcggcggaggcggagttcgaggactgcactttcgagtggctctactggcctcagtgccgggagcccttcagcgacgagacggtggagtacgtgcggtccctggacgcggaggaggacgtgactatgctgaggctccacgggtgggaggtgtcgcgcgagtgcgcgcgcacgctgcgcgtcgccaccatgctgctgaagaagggtgtggagaggggcctcaccgccttccacatcgggagcatcatgtgcagagagaccctgaccaaggagtccgccatcgaagagatcgtccgtgaggcggcggaacggggaggaggatgcgagactgtcttcttgcaggctgtctcggagatcatggaccgccgtctcgacgacatcaaagaacatgttagcctctag

SEQ ID NO: 221735 - DNA, 9957 bp, Zea Mays
atgtggctcaagagtgatatcccttatatatcgtcatcaatatcatccattgaagatctttgcaacatgaaattgtgtcttaatagtgaaagactgaagaaagggcctttaactcttatgaatgacaagataatccttgatgttgtagagcgaggtacctgggctctacatatgctcaaatatgtaccctctcttctatttcaaaacacctctcttagagcagtaacttttttggagaagagagtaaaataagacgcggtgaaaggattagaaagaggaagatgtctaaaaactgtgaaccctccaacaaaaagatctgcatacaaagatttttgaactcccataatggaatggttgatttcccatccgagtatatccagcaactgaaagaatcatacactgacagatcataccttggtaaactagaatacaaatgtagacactgcgatgcaattttctggttcaatgaacgcaataaatccatgacgagacacaataatcaggaaccaatatattcgaactgctgcaaaaatggcaaaatcagaataccaaaatataaagaacccccaacttttcttaatgaattaatacaacgaaaaatggacacaagatgtaaacattttctacaaaaaataagacaatataatagcatgtttgcatttacttccatggggggaaatattgataaaaaaataaatgatggtgagggaccatatgtgtttcgtgtcaatggccaaatacatcatcgaataggatcattactacccttaccagacaattgccccaaatttgcagaactatatatttttgatacaaagaatgaaattgaaaatagaattagggctctaacaaatgaagaaccaggtgagcaagacatagatccagaaatagtgagagggctaaaaaaatgctcgacgaatataatccattagtaaaaatattccgccaagctcgtgattttctcgaagaacacaaaggcatagatgtaagcattagaatagtaggcgctgacgaaactgatagaattcaatatgagatgccacatcaggaagaattagctatgctgattgtaggtgatttatcacttgagaactacaaacgggacatcattgttagcacacaccaaaatagccttcaaaggatatctattttccatccagcatatatgcctctacaatacccgctcctatttccatatggcgaacgaggctttcaactaggtattaaataccatggacaacacattagtcaaaacagagatgactccaaaagagatagagtaactttgcatgaatttttgaaatatcatgtgcactatagacctaatcagcctaatccctggttatgttatggccgattatcaaaacaagtagtagtagacggtcgagcaatggaggatgaagacaggcttgattatattgttagaaatcaatcaaaattacgagctgaatatgtacaaggtatttttgatgcagtagaaaaaggaatatatgacgccagtcgaataggaaaaaaggtgttattaccatctagccatgttggatcaaaacggtatatgatacaaaattaccatgatggcattgctatttgttgtgcctatgggccaccagatctttttattacatgcacttgtaaccctaaatggcctaaaataacaacatgtttattaccaggtgagcatccaaatgatagacctgatattattgtccgtgtttttcatatgaaactacaacaacttttggatgacttacaatcaggaaaggtatttggccttgtactagcactactatattctatagaattccaaaaacgaggtctaccacatgtgcacacattaatttggttagacaagaaaggttgtgaaataactacagaaacaatagattcgtggatatctgctgaaataccagatcccgagttagatcctttgggatatgctcttgttgctgaacatatgatgcatggaccgtgcggagataaaaattggaattgtccatgcatgaaaaaaggcaaatgctccaaaatttaccccaaagattttgaagaaaacactacattctctgaaaatggctttacaatatatcgaaggaggaacaatgggattttcatcagaagagaacaacacaacttagacaacaaatgggttgtgccacataatttaaaactattaaaaagataccaagctcatataaatgttgaatatgtaaacaagagtacagtcttgaaatatttatgcaaatatgtaaacaaaggacctgatagagcaaaggttatattcaaaaaaatccaaaaaggagaagaatcacatgtaaacaaagaagcagaaactatagatgagatacaagaatatctagactgcagatatatatgcgagcaagatgctctttggagattattaggatacgagatacattaccattggccacctatagaaagactgccagttcatctaccattgatgaatataattaagatgaaatcaaatgataaattgatagacatagctaaagatctaaagtatagaaagacaatgctaactgaatggtttaatgcaaataagcaatatgaagatgcaaaagaattaacatactatgagtttcccaaacaatggcgttgggatggagaaaaaagacaatggaagaaaagacaacatggtttcaaatttggaaggctctattatgtaaaccctgctgaaggtgaaagattctatttaagaatgcttctaatgattgttaaaggtgctaaaaactatgaagatatacgaacgtataatggtgttttataccaaacctttaaagaggcttgcgcagctagaggattactagacgatgacaatgagtggtatcgcacatatcaagaagcaactaattgggcaacatcatttgaactacgcaatctatttgtcataatgctaacatattgccaaataaaagatgaaaaagaatttttcaacaccacatggcacacaatggtcgatgacattcacaaacatcttatccaaaaataccaccctatcaaatatacaccctctgaattagaactacaacattatttacttgaagaactagaagagctattctctaagaatgggcaggaaataaataactacaatttacccaggcgacaacacacaaaacatattgataacataaacagactaatccaagaagaaatgagttatgatataaattacttagaagaagaagcaaacaaattatatatacaactaaacaaagatcaaaagaatgcttttcataccatagttagttctgtgcttagcaacaatccaaacttctattttgtctcaggacatggaggaactgggaaaacatttctatggaatgccattgtatcataccttagagctataagaaagattgtccttacagttgcatcatcaggagttgcttctttgctacttccaaatggacgtacagctcactcaagatttcgtatacctatagatttggatcaattgtcaatgtgtgatataaaaagaggaacaaatcttgcaaaacttcttattgacacagatcttattatatgggatgaagctctaatgacaaataaacaatgctttgaagcatttgatagatcccttagagatatagtaggagaaacatatgaaaaagctcttgacattccttttggtggtaaagtggttgtgctaggtggcgatccaaaacaaatattacctgttatagaaaatggaacaaaagaacaaataataaatgcttgtatcattgcttcatacctttggaaccatgtcaacattatattcctttctgaaaacatgcgactacgacaaagtaatatatcaaatgaagagtatgaagacttgttatcattcaataattggatccttgccattggaaatggggtatataacaacaacgataatttttcctcggactcaacactcattgaaataccaaaagaatttttaattgaaacaacagaggataaaattcaagcattagttcaatttacttatcctgacctacaaacaaaatataatgatccagattatatcaaaaaaagagctatattagcaacaactaatgatgttgtagatgaaataaatgattatattatctctcttttgccaacagtagagagagaatactatagtgcagatagcatatctaaatgcacagatgctccaaatgatgccaatattttataccctattgagtatctaaacactttaaacgcaaacaatttcccttctcatagactaaaacttaaaattggcactcctgtaatgcttctacgaaatttaaatcaaagtttaggactatgcaatggaaccagaattattataactcaactaggagacacaattatagaaggaacaataataacaggtacacacgttggcgaaaaaatacatataccccgcattaatctgacaactaagggcaataaatggccttttacattatgtcaacgccaatttccaatcaaggtttgctactctatgactataaataaaagtcaaggacaaacactatcaaatgtagggttatatttaaagaaaaaggtgtttacacacggtcaactatatttagctgtgtcacgagttacagaaaagaaagggctcaaaatattgatagaaaatgacgacggttcatgtggaacaataacagaaaatattgtgtataaagaagtactacaatctattgagagccatggcaacataaattgatactatttttaacaaattgtatttgcagatggacattacaccactatcacaagttcgaccaggggtctaccactatatcatttgtgttcggatatcaagagtttgggaatttcatggcaaaaatgatgatgatccaatcaaacatttggatcttgtgattattgatcaacaggtatatgtattcttcttggtccttgtcaaattattactataatttgtaattactatctgtaggcttctttccatcctcctacaagaggatatgtatcgaaattctgtcaagcatagcaggtagtgcagtcctatatagcatctaggatcagctactttagtatagttatcaggggctgctacctacggtattcaggatctaatagccaggatgccacaccttccctagtgttgcacccttctggctatacattgtactcccttcttcatctaatgaagcattctattcagccccatttaacttgtctaacagccctaatatatgcataaaaatgtcttatcgtttagcacaacttaaatctataacaatttaactttataggggactgcgatgtacgctgaagttcctcaagaagctatatatacacttcaaccacgactacaggaaagcaagattttaatcatgagaaaaatttatgttgacaacgcaaagctatccttcaaacctgtgcatggaaagtatatgatcaggctacatccaaagactttgcttgaggaagtaaatgaggatccacaagattttccaaaatatacattccatctaacaccgttcccagaactaccccaacttgaaggaaacaatgagtatttcatcgatgtcattggatgcattacagctctttctgatgcaacaccatttcagactagcagtggaatagttcgcatgaaaaggctgatccaccttgtggatctaaggggaaataaaattgaggtatcactatggggacgaagagcagaggaattcccaggacaacaagtctttaaagccagtgaaatgaatcatgtaattgttatctttgttggaacatcagtcaaatcctatcgtggatcaccaccttttcttagtggcacagctgcatgccgctggtatataaatcttccagagatccatgaaatcaatactttctatgcaaggtaaattatattcctttctataacctccctttcatttttttaaaatataatgttttgtgatttccatttattgtaaattagattgacggcaatataaatatttggatagtacatgtacattttttggcctcctttattgcatttccttacaaagtatttaaaatacaaccctacaatgagttagtttgagatttatttatagaataaatatagcagcagcaacaaaagtgtttgatataatgccatggggaagttgagttgtacatactaaggtttaacacgaagatgaaatctaattatacaacattcaatcactgttaagcttgaatatagtacaatgtaaatttgcaattcatttaataaactgatcaagactaattacaatgctttcatatttatagtatcggtgaacaataccaatcaatccaaaagcttcatattcagacaatgaacgagatgcagaacaagattgagcaaaagacatttttagaaatgaaattagtcgacccatttgatgacatgagcaaacgtttcgaatgcaccatgattgtaacaagaattgctgacaataagccctggttctatcaaggatgcacaaaatgcaatacatcaacaagatatgaaggaaaaacatacatttgtaaacaaggccacatctcctctcagatggtccacaggtataaaatatctctatatgccactgatggcacctatgagctagaattcgtgctctttgatgagagagcgacatcacttattgggaaaaccgtagagaaattactgagacaaagcaacaaatctgaattgccggaagagattaaagcaattgtgggtgagaaattgactgttgtgaccaagttgtttccaggaaaaagtattaaaaagagaggacctaataaggacaacaaagatccaacatttgatattcttagtatcaaaaagaggcatggaaaagacctactcctttccgtgttcaaaaaagaagagcctgttgttctccacagcgcaagctcatctcaacttccaaagctaccacccctagtaccaatagagccaaagacacaagatatacagacctctggttcagaagcagcatcaccacatgaattacagcttatggagattgatcagactagttgctttgacaacctcagtgtatcatacaagagaaatttcaatgcaattgatgactccgacaaggaagaaacacatggtgctgaccaactttcagtctttgcaaaaagaccaaagatgaagaacaattagttaccttctacatagctactcttttgagacgttgcatctattgttcaatagaaatagatcggttgtggttctacttacgagaacaacaaaatttggcttctcgcaaccaaaactcttttgcagtatgtataaacatatgactgtttgcaagcaacgtagcagcagttctgctaagctcatcttttgtagtgacatatctttaaacatgctgcttttgatcaaaataacactcactatcaactctatataatcatatgatattgtctgatattagcattttatttctgtggtttttattgggcaaacttttgatcaaaaattacactcactatcagctctatataaacatataatattgcctgatgttagtattttatttatatggttcttattgggcaattctctttcagttaattttttctatgtagtttaaactattccagtttgttgtcacaattcaagtgacaggtccagaaaaaaatatctacctatttgtaatttattaattgacttttcctcattgtagaaaatatcagctaatctgctcaaattttgatttgcatatacataatggtgattgtgacacgagtcatgctatctaaagtcctttattcattgttttggacaaataactgtcacattttatttagcaagtaaatataaggtacaattcattatattaatgaacttataagcggttgagcatctcataccttagatatgatctttgcagaccaagtgaagtttgaaattcccttgatttatcatttagttaaatgaaaagttgtctaaaagggatgatagaattatgactttccattcgcatcgcagcactccaaaattctagacaatggtgctcgattttaatgtgcacctaacagttagattcttccttcttaacaatacatgcattattttagaaacttttctgtctataataaatttttgctgggcagttcaaactattccagtttgttgtgacaattcaagtgataggtccaaaaaacatatctcaagctatttgttatttgttaaatgaattttcatcacattgtacagaaaatctcacctaaaccattgcaatcttgaaaacacaacctcaattgctctttacacataaaacaatcagatttaccattcagtcaaatgaaaagatgggtaaaagggataacgaagttctaacctcccacttagatcctagcactccaaaattctatacattggtcatctatctgcctgataaccccatccaaatcatccgtaagactagagatggcaacaaataaactatcagagaaaagtgcctctggactatcagagaaaagtgcctctggactatcagagaaaagtgcctatggacatctatatccgtgacttatttccgatatccgaacccgttacccgctatggataaaaaaacagtatccacatccattactcgcaggtaacggatatccactacacatacataatttttaaatccgccaaattcaaatatttgtccagcaaaattgtccaccaaatttaaatatgataaaaacatacaaccatacaaaatttgtccaacaaatcaaatctaacacatgcattaaggcatacagcgagcaatataaaattagacctgttgggcgagctggcaatgtctaacgtagtgctcaacatggtcacgtggagaagaccgatcctcatgcgcagtgcttgacgtggagaggtcgcgagtagctggcggagaatggagatgcacgaggacagtcgatcgccagtggtgtgtgcgaactatgaagtcggcggcggtgcacgaccgcacagatctgagctacgaccagatcacctacagggaacggtagtggcaccgccgcactggtcgtatgcaagctggaacgcatggggagtgaaggaccgccgagcgcaggaccgtggtcgtggtggccgcctggccgggtggcaggtggtcgtcgaggcggtcgagggtagggatggatactatactggggttgtggactcgtggggagaattggggaatagggaggcaagacaggctagacggggttgccagattggggaggctagacagacagccgagatgggccgcaacgggaaattagactatctatggtctgtgaattggttctaaaccctagtgaccccaccttttaggttacttaaatggatattcaagtattcggatatggatactgatttttcataccagttttataaatataaatgttgctatccgtatccccgtacagactcgtacctgaaaccgtgtccaaaagattttttatccgcgggtacaaatataaatcacatccattgccaccggtacataggactaaccagtgtttctagctgtagacataactatatatcgaaaaagaaatccttttatacacttaacaaatagggggaaaactttgccttaattttttttgtaaaggttcaattaagtatacaagaaatcaatctggtttggcgaaaaaagaagcagataaagaaaaaccttaaatctacctcttgtcgaatctgcatgcgctccagcaacttgatcacatccagaccgaccttgtacgcgtacaccttgcactccacaagacctaccatggtggatgcgatggtgatctggttgcccagcttcgcgagttgccgcacaacgaacttgcccatgtaccacgtgtttccttgaagagcgtcgacaagcgagcaacgatggcagcctcaccgctagcgaagatgctgagggtggaattgcaaactcagtcaccggcacaccaccagggataactgagcagtgcgacaacagtggctatcccggtggcggcggtgagggtgggatc

SEQ ID NO: 221736 - DNA, 4901 bp, Zea Mays
aaaaaagtaaaaaaaaaggaaggagaggaatagtcacaaccggatcatcaaagacaaaaagatggacattacaccactatcacaagttcgaccaggggtctaccactatatcatttgtgttcggatatcaagagtttgggaatttcatggcaaaaatgatgatgatccaatcaaacatttggatcttgtgattattgatcaacaggggactgcgatgtacgctgaagttcctcaagaagctatatatacacttcaaccacgactacaggaaagcaagattttaatcatgagaaaaatttatgttgacaacgcaaagctatccttcaaacctgtgcatggaaagtatatgatcaggctacatccaaagactttgcttgaggaagtaaatgaggatccacaagattttccaaaatatacattccatctaacaccgttcccagaactaccccaacttgaaggaaacaatgagtatttcatcgatgtcattggatgcattacagctctttctgatgcaacaccatttcagactagcagtggaatagttcgcatgaaaaggctgatccaccttgtggatctaaggggaaataaaattgaggtatcactatggggacgaagagcagaggaattcccaggacaacaagtctttaaagccagtgaaatgaatcatgtaattgttatctttgttggaacatcagtcaaatcctatcgtggatcaccaccttttcttagtggcacagctgcatgccgctggtatataaatcttccagagatccatgaaatcaatactttctatgcaaggtaaattatattcctttctataacctccctttcatttttttaaaatataatgttttgtgatttccatttattgtaaattagattgacggcaatataaatatttggatagtacatgtacattttttggcctcctttattgcatttccttacaaagtatttaaaatacaaccctacaatgagttagtttgagatttatttatagaataaatatagcagcagcaacaaaagtgtttgatataatgccatggggaagttgagttgtacatactaaggtttaacacgaagatgaaatctaattatacaacattcaatcactgttaagcttgaatatagtacaatgtaaatttgcaattcatttaataaactgatcaagactaattacaatgctttcatatttatagtatcggtgaacaataccaatcaatccaaaagcttcatattcagacaatgaacgagatgcagaacaagattgagcaaaagacatttttagaaatgaaattagtcgacccatttgatgacatgagcaaacgtttcgaatgcaccatgattgtaacaagaattgctgacaataagccctggttctatcaaggatgcacaaaatgcaatacatcaacaagatatgaaggaaaaacatacatttgtaaacaaggccacatctcctctcagatggtccacaggtataaaatatctctatatgccactgatggcacctatgagctagaattcgtgctctttgatgagagagcgacatcacttattgggaaaaccgtagagaaattactgagacaaagcaacaaatctgaattgccggaagagattaaagcaattgtgggtgagaaattgactgttgtgaccaagttgtttccaggaaaaagtattaaaaagagaggacctaataaggacaacaaagatccaacatttgatattcttagtatcaaaaagaggcatggaaaagacctactcctttccgtgttcaaaaaagaagagcctgttgttctccacagcgcaagctcatctcaacttccaaagctaccacccctagtaccaatagagccaaagacacaagatatacagacctctggttcagaagcagcatcaccacatgaattacagcttatggagattgatcagactagttgctttgacaacctcagtgtatcatacaagagaaatttcaatgcaattgatgactccgacaaggaagaaacacatggtgctgaccaactttcagtctttgcaaaaagaccaaagatgaagaacaattagttaccttctacatagctactcttttgagacgttgcatctattgttcaatagaaatagatcggttgtggttctacttacgagaacaacaaaatttggcttctcgcaaccaaaactcttttgcagtatgtataaacatatgactgtttgcaagcaacgtagcagcagttctgctaagctcatcttttgtagtgacatatctttaaacatgctgcttttgatcaaaataacactcactatcaactctatataatcatatgatattgtctgatattagcattttatttctgtggtttttattgggcaaacttttgatcaaaaattacactcactatcagctctatataaacatataatattgcctgatgttagtattttatttatatggttcttattgggcaattctctttcagttaattttttctatgtagtttaaactattccagtttgttgtcacaattcaagtgacaggtccagaaaaaaatatctacctatttgtaatttattaattgacttttcctcattgtagaaaatatcagctaatctgctcaaattttgatttgcatatacataatggtgattgtgacacgagtcatgctatctaaagtcctttattcattgttttggacaaataactgtcacattttatttagcaagtaaatataaggtacaattcattatattaatgaacttataagcggttgagcatctcataccttagatatgatctttgcagaccaagtgaagtttgaaattcccttgatttatcatttagttaaatgaaaagttgtctaaaagggatgatagaattatgactttccattcgcatcgcagcactccaaaattctagacaatggtgctcgattttaatgtgcacctaacagttagattcttccttcttaacaatacatgcattattttagaaacttttctgtctataataaatttttgctgggcagttcaaactattccagtttgttgtgacaattcaagtgataggtccaaaaaacatatctcaagctatttgttatttgttaaatgaattttcatcacattgtacagaaaatctcacctaaaccattgcaatcttgaaaacacaacctcaattgctctttacacataaaacaatcagatttaccattcagtcaaatgaaaagatgggtaaaagggataacgaagttctaacctcccacttagatcctagcactccaaaattctatacattggtcatctatctgcctgataaccccatccaaatcatccgtaagactagagatggcaacaaataaactatcagagaaaagtgcctctggactatcagagaaaagtgcctctggactatcagagaaaagtgcctatggacatctatatccgtgacttatttccgatatccgaacccgttacccgctatggataaaaaaacagtatccacatccattactcgcaggtaacggatatccactacacatacataatttttaaatccgccaaattcaaatatttgtccagcaaaattgtccaccaaatttaaatatgataaaaacatacaaccatacaaaatttgtccaacaaatcaaatctaacacatgcattaaggcatacagcgagcaatataaaattagacctgttgggcgagctggcaatgtctaacgtagtgctcaacatggtcacgtggagaagaccgatcctcatgcgcagtgcttgacgtggagaggtcgcgagtagctggcggagaatggagatgcacgaggacagtcgatcgccagtggtgtgtgcgaactatgaagtcggcggcggtgcacgaccgcacagatctgagctacgaccagatcacctacagggaacggtagtggcaccgccgcactggtcgtatgcaagctggaacgcatggggagtgaaggaccgccgagcgcaggaccgtggtcgtggtggccgcctggccgggtggcaggtggtcgtcgaggcggtcgagggtagggatggatactatactggggttgtggactcgtggggagaattggggaatagggaggcaagacaggctagacggggttgccagattggggaggctagacagacagccgagatgggccgcaacgggaaattagactatctatggtctgtgaattggttctaaaccctagtgaccccaccttttaggttacttaaatggatattcaagtattcggatatggatactgatttttcataccagttttataaatataaatgttgctatccgtatccccgtacagactcgtacctgaaaccgtgtccaaaagattttttatccgcgggtacaaatataaatcacatccattgccaccggtacataggactaaccagtgtttctagctgtagacataactatatatcgaaaaagaaatccttttatacacttaacaaatagggggaaaactttgccttaattttttttgtaaaggttcaattaagtatacaagaaatcaatctggtttggcgaaaaaagaagcagataaagaaaaaccttaaatctacctcttgtcgaatctgcatgcgctccagcaacttgatcacatccagaccgaccttgtacgcgtacaccttgcactccacaagacctaccatggtggatgcgatggtgatctggttgcccagcttcgcgagttgccgcacaacgaacttgcccatgtaccacgtgtttccttgaagagcgtcgacaagcgagcaacgatggcagcctcaccgctagcgaagatgctgagggtggaattgcaaactcagtcaccggcacaccaccagggataactgagcagtgcgacaacagtggctatcccggtggcggcggtgagggtgggatc

SEQ ID NO: 221737 - DNA, 5282 bp, Zea Mays
aaaaaagtaaaaaaaaaggaaggagaggaatagtcacaaccggatcatcaaagacaaaaagatggacattacaccactatcacaagttcgaccaggggtctaccactatatcatttgtgttcggatatcaagagtttgggaatttcatggcaaaaatgatgatgatccaatcaaacatttggatcttgtgattattgatcaacaggtatatgtattcttcttggtccttgtcaaattattactataatttgtaattactatctgtaggcttctttccatcctcctacaagaggatatgtatcgaaattctgtcaagcatagcaggtagtgcagtcctatatagcatctaggatcagctactttagtatagttatcaggggctgctacctacggtattcaggatctaatagccaggatgccacaccttccctagtgttgcacccttctggctatacattgtactcccttcttcatctaatgaagcattctattcagccccatttaacttgtctaacagccctaatatatgcataaaaatgtcttatcgtttagcacaacttaaatctataacaatttaactttataggggactgcgatgtacgctgaagttcctcaagaagctatatatacacttcaaccacgactacaggaaagcaagattttaatcatgagaaaaatttatgttgacaacgcaaagctatccttcaaacctgtgcatggaaagtatatgatcaggctacatccaaagactttgcttgaggaagtaaatgaggatccacaagattttccaaaatatacattccatctaacaccgttcccagaactaccccaacttgaaggaaacaatgagtatttcatcgatgtcattggatgcattacagctctttctgatgcaacaccatttcagactagcagtggaatagttcgcatgaaaaggctgatccaccttgtggatctaaggggaaataaaattgaggtatcactatggggacgaagagcagaggaattcccaggacaacaagtctttaaagccagtgaaatgaatcatgtaattgttatctttgttggaacatcagtcaaatcctatcgtggatcaccaccttttcttagtggcacagctgcatgccgctggtatataaatcttccagagatccatgaaatcaatactttctatgcaaggtaaattatattcctttctataacctccctttcatttttttaaaatataatgttttgtgatttccatttattgtaaattagattgacggcaatataaatatttggatagtacatgtacattttttggcctcctttattgcatttccttacaaagtatttaaaatacaaccctacaatgagttagtttgagatttatttatagaataaatatagcagcagcaacaaaagtgtttgatataatgccatggggaagttgagttgtacatactaaggtttaacacgaagatgaaatctaattatacaacattcaatcactgttaagcttgaatatagtacaatgtaaatttgcaattcatttaataaactgatcaagactaattacaatgctttcatatttatagtatcggtgaacaataccaatcaatccaaaagcttcatattcagacaatgaacgagatgcagaacaagattgagcaaaagacatttttagaaatgaaattagtcgacccatttgatgacatgagcaaacgtttcgaatgcaccatgattgtaacaagaattgctgacaataagccctggttctatcaaggatgcacaaaatgcaatacatcaacaagatatgaaggaaaaacatacatttgtaaacaaggccacatctcctctcagatggtccacaggtataaaatatctctatatgccactgatggcacctatgagctagaattcgtgctctttgatgagagagcgacatcacttattgggaaaaccgtagagaaattactgagacaaagcaacaaatctgaattgccggaagagattaaagcaattgtgggtgagaaattgactgttgtgaccaagttgtttccaggaaaaagtattaaaaagagaggacctaataaggacaacaaagatccaacatttgatattcttagtatcaaaaagaggcatggaaaagacctactcctttccgtgttcaaaaaagaagagcctgttgttctccacagcgcaagctcatctcaacttccaaagctaccacccctagtaccaatagagccaaagacacaagatatacagacctctggttcagaagcagcatcaccacatgaattacagcttatggagattgatcagactagttgctttgacaacctcagtgtatcatacaagagaaatttcaatgcaattgatgactccgacaaggaagaaacacatggtgctgaccaactttcagtctttgcaaaaagaccaaagatgaagaacaattagttaccttctacatagctactcttttgagacgttgcatctattgttcaatagaaatagatcggttgtggttctacttacgagaacaacaaaatttggcttctcgcaaccaaaactcttttgcagtatgtataaacatatgactgtttgcaagcaacgtagcagcagttctgctaagctcatcttttgtagtgacatatctttaaacatgctgcttttgatcaaaataacactcactatcaactctatataatcatatgatattgtctgatattagcattttatttctgtggtttttattgggcaaacttttgatcaaaaattacactcactatcagctctatataaacatataatattgcctgatgttagtattttatttatatggttcttattgggcaattctctttcagttaattttttctatgtagtttaaactattccagtttgttgtcacaattcaagtgacaggtccagaaaaaaatatctacctatttgtaatttattaattgacttttcctcattgtagaaaatatcagctaatctgctcaaattttgatttgcatatacataatggtgattgtgacacgagtcatgctatctaaagtcctttattcattgttttggacaaataactgtcacattttatttagcaagtaaatataaggtacaattcattatattaatgaacttataagcggttgagcatctcataccttagatatgatctttgcagaccaagtgaagtttgaaattcccttgatttatcatttagttaaatgaaaagttgtctaaaagggatgatagaattatgactttccattcgcatcgcagcactccaaaattctagacaatggtgctcgattttaatgtgcacctaacagttagattcttccttcttaacaatacatgcattattttagaaacttttctgtctataataaatttttgctgggcagttcaaactattccagtttgttgtgacaattcaagtgataggtccaaaaaacatatctcaagctatttgttatttgttaaatgaattttcatcacattgtacagaaaatctcacctaaaccattgcaatcttgaaaacacaacctcaattgctctttacacataaaacaatcagatttaccattcagtcaaatgaaaagatgggtaaaagggataacgaagttctaacctcccacttagatcctagcactccaaaattctatacattggtcatctatctgcctgataaccccatccaaatcatccgtaagactagagatggcaacaaataaactatcagagaaaagtgcctctggactatcagagaaaagtgcctctggactatcagagaaaagtgcctatggacatctatatccgtgacttatttccgatatccgaacccgttacccgctatggataaaaaaacagtatccacatccattactcgcaggtaacggatatccactacacatacataatttttaaatccgccaaattcaaatatttgtccagcaaaattgtccaccaaatttaaatatgataaaaacatacaaccatacaaaatttgtccaacaaatcaaatctaacacatgcattaaggcatacagcgagcaatataaaattagacctgttgggcgagctggcaatgtctaacgtagtgctcaacatggtcacgtggagaagaccgatcctcatgcgcagtgcttgacgtggagaggtcgcgagtagctggcggagaatggagatgcacgaggacagtcgatcgccagtggtgtgtgcgaactatgaagtcggcggcggtgcacgaccgcacagatctgagctacgaccagatcacctacagggaacggtagtggcaccgccgcactggtcgtatgcaagctggaacgcatggggagtgaaggaccgccgagcgcaggaccgtggtcgtggtggccgcctggccgggtggcaggtggtcgtcgaggcggtcgagggtagggatggatactatactggggttgtggactcgtggggagaattggggaatagggaggcaagacaggctagacggggttgccagattggggaggctagacagacagccgagatgggccgcaacgggaaattagactatctatggtctgtgaattggttctaaaccctagtgaccccaccttttaggttacttaaatggatattcaagtattcggatatggatactgatttttcataccagttttataaatataaatgttgctatccgtatccccgtacagactcgtacctgaaaccgtgtccaaaagattttttatccgcgggtacaaatataaatcacatccattgccaccggtacataggactaaccagtgtttctagctgtagacataactatatatcgaaaaagaaatccttttatacacttaacaaatagggggaaaactttgccttaattttttttgtaaaggttcaattaagtatacaagaaatcaatctggtttggcgaaaaaagaagcagataaagaaaaaccttaaatctacctcttgtcgaatctgcatgcgctccagcaacttgatcacatccagaccgaccttgtacgcgtacaccttgcactccacaagacctaccatggtggatgcgatggtgatctggttgcccagcttcgcgagttgccgcacaacgaacttgcccatgtaccacgtgtttccttgaagagcgtcgacaagcgagcaacgatggcagcctcaccgctagcgaagatgctgagggtggaattgcaaactcagtcaccggcacaccaccagggataactgagcagtgcgacaacagtggctatcccggtggcggcggtgagggtgggatc

SEQ ID NO: 221738 - DNA, 987 bp, Zea Mays
aggagccattccatgtatagccagaggccagggctccgccagatgtcgtcgagaccgtcgtcaacaaaagaccggccgccaataagccatgcatgcatggccacaagcagcaactgaagaatcacagagaacggactaggtgcgtgctctgcgctgacaagagcagcggcaggcaggtcgtggatcgccttgggtggtgaataattgaagaagaagaggtggagacttgagcgaggcagagcaggtgatgtcttcgctgccaggaggcttcctgtgcgtgcgcgtcctgcgcgggatcgacctcgtcagctgcgacgccaagggcagcgacccctacgtcgtgctcagcctggatggacagaaactgaagacgagcgtgatgaagaagacggtgaacccgttgtggaacgaggacctcaccttggccgtcatggacgcgtcggcgcccatcaagctagaggtcttcgacaaggacacgttcagcaaggacgacatgatgggggacgcggagttcgacgtggaggcgctggcgcagatcgtgcagatggacctggaggacatccgcagcggcaccgtcgtccgcaccgtccgccccggcggcacgggaagctgcctcgccgacgagagccacatcatctgggacaagggccacgtcgtgcaggacctcctcctcaggctccggaacgtcgactccggcgtcatccacctgcagctcagatgggttgccaccccacctgaagactgaactggaggagacgaactgcagtatgtacgtgctcgctccatatcccccaggaaagaacgtacggattcgctcgcgtgacgatgatactatgcgatgcatgcatgctcaagagtcaagatgtcactgtcttctgtgtattttagtacagccacgtacattgtcgccatccaacatcactatgcatggacgtttttttgatataaatatatatatatatatatatgtggaactaactaatttat

SEQ ID NO: 221739 - DNA, 1250 bp, Zea Mays
ccagaggccagggctccgccagatgtcgtcgagaccgtcgtcaacaaaagaccggccgccaataagccatgcatgcatggccacaagcagcaactgaagaatcacagagaacggactaggtgcgtgctctgcgctgacaagagcagcggcaggcaggtcgtggatcgccttgggtggtgaataattgaagaagaagaggtggagacttgagcgaggcagagcaggtgatgtcttcgctgccaggaggcttcctgtgcgtgcgcgtcctgcgcgggatcgacctcgtcagctgcgacgccaagggcagcgacccctacgtcgtgctcagcctggatggacagaaactgaagacgagcgtgatgaagaagacggtgaacccgttgtggaacgaggacctcaccttggccgtcatggacgcgtcggcgcccatcaagctagaggtcttcgacaaggacacgttcagcaaggacgacatgatgggggacgcggagttcgacgtggaggcgctggcgcagatcgtgcagatggacctggaggacatccgcagcggcaccgtcgtccgcaccgtccgccccggcggcacgggaagctgcctcgccgacgagagccacatcatctgggacaagggccacgtcgtgcaggacctcctcctcaggctccggaacgtcgactccggcgtcatccacctgcagctcagatgggttgccaccccacctgaaggattcagcggccatgggcggcggcaacgcccagaagtccaagatggcgcgcgagaggaacgccgagaagaacaagggcggcaaaggcagccagctggaggccaacaagaaggccatgaacatccagtgcaagatctgcatgcagaccttcatctgcaccacctccgaggccaagtgcaaagaacatgcggaggcgaggcatcccaagaacgacctctaccagtgcttcccccacctcaagaactagtaagcagcagaagcatatgctctgctcagctaaaagacaagtactacatatatatatatacgctgtgtgtcaattaatgggttctaggctgctgctgatgcggctgcttcgttcgtgttgccccgtctgattatgtactgtaacccttggctgtcagcctgctgtgctaaaaaccattggttctgtgtggattcatgctgcctgcctgtgctgtgcttgctcaatattttcttctcttttccttgtgttcttcggtgagaatttgggacattgcaaggatgcca

SEQ ID NO: 221740 - DNA, 444 bp, Zea Mays
caaccagctggaggccaacaagaaggccatgaacatccagtgcaagatctgcatgcagaccttcatctgcaccacctccgaggccaagtgcaaagaacatgcggaggcgaggcatcccaagaacgacctctaccagtgcttcccccacctcaagaactagtaagcagcagaagcatatgctctgctcagctaaaagacaagtactacatatatatatatacgctgtgtgtcaattaatgggttctaggctgctgctgatgcggctgcttcgttcgtgttgccccgtctgattatgtactgtaacccttggctgtcagcctgctgtgctaaaaaccattggttctgtgtggattcatgctgcctgcctgtgctgtgcttgctcaatattttcttctcttttccttgtgttcttcggtgagaatttgggacattgcaaggatgcca

SEQ ID NO: 221741 - DNA, 927 bp, Zea Mays
cgcggcgcctatctggcatcggtgaagagcgggcgctagagcagagtgagcgtgcggttcttggtcatggagcgcggtgccgtcgtccttccgctccagggcgccggggttgggcgcgtcctcctccccgtgcaagtgcgggtacggtcgttcttgaggagcaggagggcgacggagcggcggcgccggctcgcgagttccgcggcgccggcgaggtgcagcaagatgtacgttcccggctttggggagggttcaccggagcggaaggcggcgatcaacctccagcacttctttaactacatcgctgtcagcattgtcctagcacagcttgagggaagcgtacttggagctgaaggagttcatcagccgcacctccctgaacgacgccgagattttctgcgaaaagctcatgcgcgagtctccaaggctcaagggactagccttgaggattctggaggtccgatctgcatatgtgaagaacgagttcgagtgggacaatttgaaggaattatccttcaagatggttgatgaggccaacacaaagctcatgagggattacgtcgtcgaggtcagccacattgaagacgaaaactaaaacatcaagtggtttctctttgaactactatattttataggcgaacgataacatcaaatgctttctcttgaaccttgcctacagcattttataagaggcttgcatgtatatatagaagatgtataggttatgaagcgcactagcttgatcctgaaactttgtatgtagcataggtactaaacatagtaagcgcattagcagtgatacaccgtagatgtttagcattacttgaataaaactcggcacgcatacaccgtgttactttcttgatcatcaataggagtgagaacaaaaacggtaaatttcggttaccgagaaccgttttaaaaatt

SEQ ID NO: 221742 - DNA, 961 bp, Zea Mays
cggcatttttgactccatatccgcgcggcgcctatctggcatcggtgaagagcgggcgctagagcagagtgagcgtgcggttcttggtcatggagcgcggtgccgtcgtccttccgctccagggcgccggggttgggcgcgtcctcctccccgtgcaagtgcgggtacggtcgttcttgaggagcaggagggcgacggagcggcggcgccggctcgcgagttccgcggcgccggcgaggtgcagcaagatgtacgttcccggctttggggagggttcaccggagcggaaggcggcgatcaacctccagcacttctttaactacatcgctgtcagcattgtcctagcacagcttgagagttacaatagggaagcgtacttggagctgaaggagttcatcagccgcacctccctgaacgacgccgagattttctgcgaaaagctcatgcgcgagtctccaaggctcaagggactagccttgaggattctggaggtccgatctgcatatgtgaagaacgagttcgagtgggacaatttgaaggaattatccttcaagatggttgatgaggccaacacaaagctcatgagggattacgtcgtcgaggtcagccacattgaagacgaaaactaaaacatcaagtggtttctctttgaactactatattttataggcgaacgataacatcaaatgctttctcttgaaccttgcctacagcattttataagaggcttgcatgtatatatagaagatgtataggttatgaagcgcactagcttgatcctgaaactttgtatgtagcataggtactaaacatagtaagcgcattagcagtgatacaccgtagatgtttagcattacttgaataaaactcggcacgcatacaccgtgttactttcttgatcatcaataggagtgagaacaaaaacggtaaatttcggttaccgagaaccgttttaaaaatt

SEQ ID NO: 221743 - DNA, 559 bp, Zea Mays
cgcagacccgttactctacccgtgtatgaaattactgaggcatgtgtggtttcgtctcttggaaacaaacagccttgaggattctggaggtccgatctgcatatgtgaagaacgagttcgagtgggacaatttgaaggaattatccttcaagatggttgatgaggccaacacaaagctcatgagggattacgtcgtcgaggtcagccacattgaagacgaaaactaaaacatcaagtggtttctctttgaactactatattttataggcgaacgataacatcaaatgctttctcttgaaccttgcctacagcattttataagaggcttgcatgtatatatagaagatgtataggttatgaagcgcactagcttgatcctgaaactttgtatgtagcataggtactaaacatagtaagcgcattagcagtgatacaccgtagatgtttagcattacttgaataaaactcggcacgcatacaccgtgttactttcttgatcatcaataggagtgagaacaaaaacggtaaatttcggttaccgagaaccgttttaaaaatt

SEQ ID NO: 221744 - DNA, 984 bp, Zea Mays
aaaaaagaggtataaagaagacggaggtgggagggaccgagagagtatagcgtctgtttcgcaccaaccgaatagtcacataaaattccgtttgcccaaacctagagctacctccgccgccgccgccggcaatcaagacagctgatggatcctatgcagtcatcggtgagaggccgcaggtcttcgttgcatgctgatgctgtcataactattggaggagtccgacctgcaccacccccacaaacatccacacaacatgtatgtcaagatgaggcaatggtcagcagcggggatccctcttggatgtctggttacagcactgattcctgccggggtggttattacacttctgcactcaacctggagggtgcatcaattagagaactgaagctgaaatatcagaagctgaaatatcggaataaacctaacaattgtaatgcggacgatcatgtcaatgctgaaagatcacccggaagaaaagctgaggagaaaaaagtgctggcgagaaagcatgaagattgtgatgatgaccctttcattgaagaaattaaaaagacgagagaagcacatcaagaaatagagagagatcgaaaggcccgtgatgataagttctatgagctagagaagattaagcttgacttgaagcgagaccgactggatacaatgataatgcaaactgacacgagcgcaatggacagtgaagcaaaacaatactttaagctgatgaaagaagagattttggctcgtcgattcaagagtaggaaagcataggtgtttccatttaatggattttagactgaagttgtttttcgttctttttaatggagttagtatttggtttgtatcttcaataatgctataatacttgtggatgctctgcattagggccagaaaaaaagctcgagctggctcgggctcgtagcagttcggctcgaaccggtttaacgctccgaatgagtctgagtcgaacctctttttatagct

SEQ ID NO: 221745 - DNA, 3471 bp, Zea Mays
caagcaatggatcgacgcagctggccttggaagaagaaatcatctgacaaatcatcaaatgcggatgtgctgcagaattttaatcatgcagaacaggaagataaagctccaaaatttgtgcaaatttcacctgaaacatatgcacatcttaccgagtcagaggaaaaagtaaaaaaattagaagaaaacgtgaaggtcttgaatgaaaaactctctgcagcgcaatctgagatcacaactaaagatgctcttgtgaagcagcatgcaaaagttgctgaagaagctgtatcaggttgggagaaagctgaagcagaggcctccgcgctcaagcttcagctagaaactgttacattatctaagctagccgctgaagaaagagctgcacatctggatggtgcattgaaagaatgcatgaagcaagtaagggctgttaaggaagaaggtgagcagaagctacatgatgtagtctttgcaaaaaccaaacagtgggagaagataaaggccgagttagaagcaaaattacttgaatttgaacaggaactcataagggctggtgctgagaatgatgcactcacaagagcacttcaagaacgggcagaactgttgatgaaaattgatgaggaaaaagctcaagcagaagctgagattgaaatcttaaagagcacaatccaatcaggcgaaagggaaataaattcacttaaatacgaattgcatgttgtctccaaagagcttgaaatccgcaatgaagaaaagaacatgagtgtgcgctcagctgatgtagcaactaaacagcaccaggaagatgtcaagaaaatatcaaaacttgaagctgaatgccaaagattacgtggccttgttcgaaagaagttacctggtcctgcagcactagctcaaatgaaaatggaggtggagagcttgggtagagagtatggagaccacagagtacgacgatctcctgcaaagaattctagtttccatcggcccatgtctcctatgtctcctgttcctgattacgcaatcgagaacatacagtacatgcagagagagaatgagtttctgactgctcgtttattaacaatggaagaagaaaccaagatgcttaaagaggcattgacaaagcgaaacagtgagctgcaatcttcaagaagcatgtatgctaagacagcaggaaagctccgaagctttgaagttcatatgttgactggaaaccaacataagagtccaactatgaacatggatattcattttgatggtgcactgagccaaaatggaagcaacccacctagcatgacttccatgtctgaagatggggttgatgatgaaggaagttgtacagaatcttgggccaacactctggtgtctgagctctctcagttcaaaaaagagaaggctgccaagagcagtgcgacagaaagctccaataggttggaactcatggatgacttcttagagatggagagattagcatgtctgtcttctgatgttaatggcaatggcagcactattgacaaaatgaagatagatgaagttggggctactttgtctgactttactgaaagagatggtgttaaagatttgcagtcagcttcaccaatgacagaaagtccatctaataaacagcgtttgtctgagaaatcttcgctttcgaaattccagtcaagaatatctttattactggattctgaatcagcagagaataatgctgaggtacttgatagtatcagaaacattctaaaggatattgaagatgaggcagattcggtgaacacaaatggaactcatcattcaggcaggaccttaagtttagatagcaaatgtgccatcgatcaagaacttaagaatgccatattgaagattcaagactttgttaagttacttgatcaagaagtctccaagtttcaaggccagtcatctgattataatgggctaagtgagaaaacacaacagttctctgcattggttgacaaagttctgtcaaacgatgatgtcctaaatgatattgtcatggcactgtctgttatcttgtcagaaactagccagattaagttgacactgttgagagacaacaacaatgaagcagaaagtaataacttagattgtgttgataaagtgactctacttgaaaataaggtgcagcctgagccagtaaaagacaatggttctggtctctgcccactgttgcctcattcatcttctgatcctgagtttgaggggcctactgatgctggatttgatgttaaggctgcagtgaaggtatgctcgccggaggaatatgaacaacttaaatctgagaggacaaatttggagggagagttagcaaagtgcaacaaaataatagaagaaacaaaggttagattaagtgatatggagaaaaacctggaaaacctcacatctaagttggctgacagtgagaaatcaaatagcttgagtgagacacagttgaagtgtatggctgaatcctacaagtcacttgaatcaaggaaacttgaattagaaaatgagatagaagtgctaaggtccaaaatagatgctttaacagctgaactctctgatgaaaggcaaagtcatcaggacgacttagttaaatacagagatctcgaggagaagatggaaaggtatgagatggagaggagttcaatgcttgtggatggggacccagacaccaagtcaaagcagagataggggctgcagcagagaaactggcagagtgccaggagaccatattgattcttggccgtcagctgcaagctatgcgtcctccagccgagtcactcggctcttcacctaatcggcaaggcacggagaactttctacaggacgtggtaggaacaaccgcaggagaatattcccagaagccttcaggccaacctgatacagaccaggatatgcttgggacaggaaatgtctctccggtcaatggatacaagacacacatgatcccttctgatgcagacggaagccctttcctttctccgaacagctccaagcgcccgaagcatcgatcgagatcctcttcgtcttcgtcattcaccaaccaccagttgccagacaaacagagccgaggattcagtcggttctttgcgaagaccaaagagtgaaacttctcccgattgggtgggatggtggaggacatgaatttctgtagagcttattgaggcaagccttcgtgtgcgttctctcaggtcaggtgatgctttgggttgctggaataatactcagcttgcagtcgagcgggtcgtgggccagagtgttgcggaatgtatgttatcagtctcttctgctagagcttttctgggttgctgtgtgtttgaaacctcactgtacatgtgcttacatgcatgaaggagcatggttgttggtttgtgtttaatcttcttgtgaattagcatgtgtattttccttgtactggtttcatgtacagttaacctgcgctaatttcaagggcattgatatacgtattatattgtgttg

SEQ ID NO: 221746 - DNA, 4593 bp, Zea Mays
ctcacgttagcagacaacccaacaggtcatatgacttttttgagtaggaaaatgattccgagctactactaccccggtacagtacagtagtgccatcacgcatgattgcatctggcgtgagagttgagttggatggtaatggtattgcacttgagcaaaaaaaatatgactcctgttttttatttcccacaaaacccaaaactagcctcaactagtactattgtagatcatggtagaagaactcgctgatcactgttcttctgtcgctttcatttctgccatctttgaggtgatgtgtaattctctgcttgcatcacgcactaacctgtttctctcagagaacagaggagaggtgcagagtgcagagagctctcttgccaacttttccccacaccccaccatttcttcctttctcctccctcctccctcctatcgctcgcccccgcttttttagcccacctaccggcagcagcgccccgtaaacaaagagcacccgcacggcacctctaccattctccccacctctccctcgttccccttcgaaccaaaacccaaacccaaacaccaccatcaccaccacctccaccactcatacagcggcagagcgagagccgagaggcgagccgcattgccaaaccgggcgagccgcagtgctgcaaccgcccaccgcgcacgcgccggggaggcgccgcccgccaccctacgcgcgagcccagcagcgggaggaggaggcgagattccaaagggaaaaaaaggcggcgggagcaaaaggggaggcgaggtgtggaggggggaaaagcggcagtgggcagctgggagggagtccagagtccagtccagtccagtccaaaccagccggaccacggccgacgcggcagggcagctgtgactggctggaaggcaagtgtgctcggcaagcgacgcacgccacgccaccgacaccggcaccggcacccccgcccgcggtgatcggacccgcgcgccagatccgacaccccggccggaatcgcggcggactccagcgcccgcggccccgccccccggatctgcattccgcgcagccgcgcaggggctcctcctggccgccgcgcgccctcgtctccccagatactctgcaagcaatggatcgacgcagctggccttggaagaagaaatcatctgacaaatcatcaaatgcggatgtgctgcagaattttaatcatgcagaacaggaagataaagctccaaaatttgtgcaaatttcacctgaaacatatgcacatcttaccgagtcagaggaaaaagtaaaaaaattagaagaaaacgtgaaggtcttgaatgaaaaactctctgcagcgcaatctgagatcacaactaaagatgctcttgtgaagcagcatgcaaaagttgctgaagaagctgtatcaggttgggagaaagctgaagcagaggcctccgcgctcaagcttcagctagaaactgttacattatctaagctagccgctgaagaaagagctgcacatctggatggtgcattgaaagaatgcatgaagcaagtaagggctgttaaggaagaaggtgagcagaagctacatgatgtagtctttgcaaaaaccaaacagtgggagaagataaaggccgagttagaagcaaaattacttgaatttgaacaggaactcataagggctggtgctgagaatgatgcactcacaagagcacttcaagaacgggcagaactgttgatgaaaattgatgaggaaaaagctcaagcagaagctgagattgaaatcttaaagagcacaatccaatcaggcgaaagggaaataaattcacttaaatacgaattgcatgttgtctccaaagagcttgaaatccgcaatgaagaaaagaacatgagtgtgcgctcagctgatgtagcaactaaacagcaccaggaagatgtcaagaaaatatcaaaacttgaagctgaatgccaaagattacgtggccttgttcgaaagaagttacctggtcctgcagcactagctcaaatgaaaatggaggtggagagcttgggtagagagtatggagaccacagagtacgacgatctcctgcaaagaattctagtttccatcggcccatgtctcctatgtctcctgttcctgattacgcaatcgagaacatacagtacatgcagagagagaatgagtttctgactgctcgtttattaacaatggaagaagaaaccaagatgcttaaagaggcattgacaaagcgaaacagtgagctgcaatcttcaagaagcatgtatgctaagacagcaggaaagctccgaagctttgaagttcatatgttgactggaaaccaacataagagtccaactatgaacatggatattcattttgatggtgcactgagccaaaatggaagcaacccacctagcatgacttccatgtctgaagatggggttgatgatgaaggaagttgtacagaatcttgggccaacactctggtgtctgagctctctcagttcaaaaaagagaaggctgccaagagcagtgcgacagaaagctccaataggttggaactcatggatgacttcttagagatggagagattagcatgtctgtcttctgatgttaatggcaatggcagcactattgacaaaatgaagatagatgaagttggggctactttgtctgactttactgaaagagatggtgttaaagatttgcagtcagcttcaccaatgacagaaagtccatctaataaacagcgtttgtctgagaaatcttcgctttcgaaattccagtcaagaatatctttattactggattctgaatcagcagagaataatgctgaggtacttgatagtatcagaaacattctaaaggatattgaagatgaggcagattcggtgaacacaaatggaactcatcattcaggcaggaccttaagtttagatagcaaatgtgccatcgatcaagaacttaagaatgccatattgaagattcaagactttgttaagttacttgatcaagaagtctccaagtttcaaggccagtcatctgattataatgggctaagtgagaaaacacaacagttctctgcattggttgacaaagttctgtcaaacgatgatgtcctaaatgatattgtcatggcactgtctgttatcttgtcagaaactagccagattaagttgacactgttgagagacaacaacaatgaagcagaaagtaataacttagattgtgttgataaagtgactctacttgaaaataaggtgcagcctgagccagtaaaagacaatggttctggtctctgcccactgttgcctcattcatcttctgatcctgagtttgaggggcctactgatgctggatttgatgttaaggctgcagtgaaggtatgctcgccggaggaatatgaacaacttaaatctgagaggacaaatttggagggagagttagcaaagtgcaacaaaataatagaagaaacaaaggttagattaagtgatatggagaaaaacctggaaaacctcacatctaagttggctgacagtgagaaatcaaatagcttgagtgagacacagttgaagtgtatggctgaatcctacaagtcacttgaatcaaggaaacttgaattagaaaatgagatagaagtgctaaggtccaaaatagatgctttaacagctgaactctctgatgaaaggcaaagtcatcaggacgacttagttaaatacagagatctcgaggagaagatggaaaggtatgagatggagaggagttcaatgcttgtggatggggacccagacaccaagtcaaagcaggataaagagataggggctgcagcagagaaactggcagagtgccaggagaccatattgattcttggccgtcagctgcaagctatgcgtcctccagccgagtcactcggctcttcacctaatcggcaaggcacggagaactttctacaggacgtggtaggaacaaccgcaggagaatattcccagaagccttcaggccaacctgatacagaccaggatatgcttgggacaggaaatgtctctccggtcaatggatacaagacacacatgatcccttctgatgcagacggaagccctttcctttctccgaacagctccaagcgcccgaagcatcgatcgagatcctcttcgtcttcgtcattcaccaaccaccagttgccagacaaacagagccgaggattcagtcggttctttgcgaagaccaaagagtgaaacttctcccgattgggtgggatggtggaggacatgaatttctgtagagcttattgaggcaagccttcgtgtgcgttctctcaggtcaggtgatgctttgggttgctggaataatactcagcttgcagtcgagcgggtcgtgggccagagtgttgcggaatgtatgttatcagtctcttctgctagagcttttctgggttgctgtgtgtttgaaacctcactgtacatgtgcttacatgcatgaaggagcatggttgttggtttgtgtttaatcttcttgtgaattagcatgtgtattttccttgtactggtttcatgtacagttaacctgcgctaatttcaagggcattgatatacgtattatattgtgttg

SEQ ID NO: 221747 - DNA, 1999 bp, Zea Mays
gggtacacgatggagggagctggaagagatgccaaccctttgggcggttaccgaattggcaaaaccctaggaatcgggtcgttcggtaaagtgaagatcgcggaacatatattgactggccataaggtggcaatcaagatcctcaatcgccgtaagatcagaagcatggaaatggaagagaaagtgaagagagaaatcaagatactgagattatttatgcatcctcatatcatacgcctttatgaggtgatagatacacctgctgatatttatgttgttatggagtatgttaaatctggagagttgtttgattacattgttgagaagggaagactacatgaagaagaagcccggcgcttttttcagcagatcatatctggtgttgaatattgccataggaacatggttgctcaccgtgatttaaagccagagaatcttcttttggattcgaaatgcaacattaagattgctgattttggcttaagtaatgttatgcgtgatggtcactttcttaagacgagttgtggtagcccgaattatgcagcacctgaggtcatatctggtaaactatatgctggtcctgaagttgatgtctggagctgcggcgttattctttatgctcttctttgtggcactcttccatttgacgatgagaatattccaaacctttttaagaaaataaagggtggaatatatacccttcctagtcatttgtcaccttcagcgagggacttgattcctagaatgctggttgttgatccgatgaaaaggattacaatacgtgaaatccgtgaacatatgtggttcaaaattcaacttccgcgctatttggctgtaccgcctccagacactgcccaacaagttaagaagctggacgaggaaacccttaatgatgttattaagatgggttttgacaagaatcagctaattgaatctctgcacaacagattgcagaatgaggcaacagttgcctattatttactcatggacaataggcttcgtacaaccagtggttatcttggatctgagtttcaagaatctatggacccatctttctctcaagtacatgctgaaacaccaacttcagcaactgaacatcggcagcatgtgtttacagaatctccggggtctggtttgaggcagcattttgcatctgaaaggaaatgggcccttggtcttcagtctcgagcacatccacgagaaataataagtgaagtgcttaaagcactgcaagaactgaatgtttactggaaaaagattggacactacaacatgaaatgcagatggagtcctggctgccttgagagtatgatgcataactgtgatggctttagtgcagagtctgctataattgaaactgatgatctcatagcgaaatcaacccgtatagtgaagtttgagattcagctggacgtcagcgaactgaggcctgagaagcacggcaataataatcctgtgcgacggagcgagccgctagctggacgtcagctatggtgtcaccgcgcggaaggggggcatgcaaggggcggggttgacctcggcgtcaggttgttgctgaatgtttctgggggttcctatcattgcttcttctagactagatgagcatggacttgtggtgtggtggcatgggcatgcaacatgcatgcaggatcaggccaggctaccagggtttttttttgatctatctgcacgagctgatatattagtgtacccagtttcttcttctagattgttcaacttgtgcttaccctgccgcgtccgcgtgtctaccaacctgcgacttgtaccggtaatcgatctagaagggcggcgagtgtcatggcgtcgtatgaacccctctggggaatggttcaactcgtgacgcaaagactggctgttctcacttctcagttctcacactaaatatacacatgcatgtgatggaccgactgatgggcagtaactgtaataatctgatgtcatgggagaagctgcaaatggttactagaacgaaagaaaa

SEQ ID NO: 221748 - DNA, 2275 bp, Zea Mays
gttttctacagcccaaggccaaccggggtacacgatggagggagctggaagagatgccaaccctttgggcggttaccgaattggcaaaaccctaggaatcgggtcgttcggtaaagtgaagatcgcggaacatatattgactggccataaggtggcaatcaagatcctcaatcgccgtaagatcagaagcatggaaatggaagagaaagtgaagagagaaatcaagatactgagattatttatgcatcctcatatcatacgcctttatgaggtgatagatacacctgctgatatttatgttgttatggagtatgttaaatctggagagttgtttgattacattgttgagaagggaagactacatgaagaagaagcccggcgcttttttcagcagatcatatctggtgttgaatattgccataggaacatggttgctcaccgtgatttaaagccagagaatcttcttttggattcgaaatgcaacattaagattgctgattttggcttaagtaatgttatgcgtgatggtcactttcttaagacgagttgtggtagcccgaattatgcagcacctgaggtcatatctggtaaactatatgctggtcctgaagttgatgtctggagctgcggcgttattctttatgctcttctttgtggcactcttccatttgacgatgagaatattccaaacctttttaagaaaataaagggtggaatatatacccttcctagtcatttgtcaccttcagcgagggacttgattcctagaatgctggttgttgatccgatgaaaaggattacaatacgtgaaatccgtgaacatatgtggttcaaaattcaacttccgcgctatttggctgtaccgcctccagacactgcccaacaagttaagaagctggacgaggaaacccttaatgatgttattaagatgggttttgacaagaatcagctaattgaatctctgcacaacagattgcagaatgaggcaacagttgcctattatttactcatggacaataggcttcgtacaaccagtggttatcttggatctgagtttcaagaatctatggacccatctttctctcaagtacatgctgaaacaccaacttcagcaactgaacatcggcagcatgtgtttacagaatctccggggtctggtttgaggcagcattttgcatctgaaaggaaatgggcccttggtcttcagtctcgagcacatccacgagaaataataagtgaagtgcttaaagcactgcaagaactgaatgtttactggaaaaagattggacactacaacatgaaatgcagatggagtcctggctgccttgagagtatgatgcataactgtgatggctttagtgcagagtctgctataattgaaactgatgatctcatagcgaaatcaacccgtatagtgaagtttgagattcagctttacaaaacgagggatgagaagtaccttcttgacctgcaaagggtcagtggaccacaactcctctttctggacttgtgttccgcctttctaacgcagctgagagttctttgagcctgatgacatgattggcttcccaagcacaatccttgatgcaccccatggactttcaaattacattcgtgctgtacataatggccatatataatcctccggtagattatattttctggagcatgtggaccgtacagctggacgtcagcgaactgaggcctgagaagcacggcaataataatcctgtgcgacggagcgagccgctagctggacgtcagctatggtgtcaccgcgcggaaggggggcatgcaaggggcggggttgacctcggcgtcaggttgttgctgaatgtttctgggggttcctatcattgcttcttctagactagatgagcatggacttgtggtgtggtggcatgggcatgcaacatgcatgcaggatcaggccaggctaccagggtttttttttgatctatctgcacgagctgatatattagtgtacccagtttcttcttctagattgttcaacttgtgcttaccctgccgcgtccgcgtgtctaccaacctgcgacttgtaccggtaatcgatctagaagggcggcgagtgtcatggcgtcgtatgaacccctctggggaatggttcaactcgtgacgcaaagactggctgttctcacttctcagttctcacactaaatatacacatgcatgtgatggaccgactgatgggcagtaactgtaataatctgatgtcatgggagaagctgcaaatggttactagaacgaaagaaaa

SEQ ID NO: 221749 - DNA, 2077 bp, Zea Mays
gggtacacgatggagggagctggaagagatgccaaccctttgggcggttaccgaattggcaaaaccctaggaatcgggtcgttcggtaaagtgaagatcgcggaacatatattgactggccataaggtggcaatcaagatcctcaatcgccgtaagatcagaagcatggaaatggaagagaaagtgaagagagaaatcaagatactgagattatttatgcatcctcatatcatacgcctttatgaggtgatagatacacctgctgatatttatgttgttatggagtatgttaaatctggagagttgtttgattacattgttgagaagggaagactacatgaagaagaagcccggcgcttttttcagcagatcatatctggtgttgaatattgccataggaacatggttgctcaccgtgatttaaagccagagaatcttcttttggattcgaaatgcaacattaagattgctgattttggcttaagtaatgttatgcgtgatggtcactttcttaagacgagttgtggtagcccgaattatgcagcacctgaggtcatatctggtaaactatatgctggtcctgaagttgatgtctggagctgcggcgttattctttatgctcttctttgtggcactcttccatttgacgatgagaatattccaaacctttttaagaaaataaagggtggaatatatacccttcctagtcatttgtcaccttcagcgagggacttgattcctagaatgctggttgttgatccgatgaaaaggattacaatacgtgaaatccgtgaacatatgtggttcaaaattcaacttccgcgctatttggctgtaccgcctccagacactgcccaacaagttaagaagctggacgaggaaacccttaatgatgttattaagatgggttttgacaagaatcagctaattgaatctctgcacaacagattgcagaatgaggcaacagttgcctattatttactcatggacaataggcttcgtacaaccagtggttatcttggatctgagtttcaagaatctatggacccatctttctctcaagtacatgctgaaacaccaacttcagcaactgaacatcggcagcatgtgtttacagaatctccggggtctggtttgaggcagcattttgcatctgaaaggaaatgggcccttggtcttcagctttacaaaacgagggatgagaagtaccttcttgacctgcaaagggtcagtggaccacaactcctctttctggacttgtgttccgcctttctaacgcagctgagagttctttgagcctgatgacatgattggcttcccaagcacaatccttgatgcaccccatggactttcaaattacattcgtgctgtacataatggccatatataatcctccggtagattatattttctggagcatgtggaccgtacaggtatgtcctggttgccgagatgattgtcacctaaggtcctaaacaagaggccacatgcgagccccaggccttcttcctcaattagattatgcgagttttgttcggcctttctttagtccttggacatgtttttttctttgccttgtttggttgtgtttggatcaaaggagattgagagctggtttgatgaccagggaaatggaggggattaatggggagaaatctccttcctatttgaaattgaatagcaagtggatatctctcccatgcatcctctctatttcccgtatcaccaaattagccctgaggctttgtttggatactctagtatttatctcagtacatatggattgggatagattaaaatgtaaattaaactaacttacacctcaatccatgtgcatagatgtaaatactagattattcaaacaaagcttgagggggattaaatccccttatattcaattttgactagtgagagatttaatcactccaatcccatttgatcccgatgccctaaggtgatcgtgctagcatggtacctaaggctgaaaatgttccattgaaaactgaaaagaaagtttacccgttgatgtaccagtgtcaactctgacataacaggagagacagtaattagatgtcac

SEQ ID NO: 221750 - DNA, 2327 bp, Zea Mays
gttttctacagcccaaggccaaccggggtacacgatggagggagctggaagagatgccaaccctttgggcggttaccgaattggcaaaaccctaggaatcgggtcgttcggtaaagtgaagatcgcggaacatatattgactggccataaggtggcaatcaagatcctcaatcgccgtaagatcagaagcatggaaatggaagagaaagtgaagagagaaatcaagatactgagattatttatgcatcctcatatcatacgcctttatgaggtgatagatacacctgctgatatttatgttgttatggagtatgttaaatctggagagttgtttgattacattgttgagaagggaagactacatgaagaagaagcccggcgcttttttcagcagatcatatctggtgttgaatattgccataggaacatggttgctcaccgtgatttaaagccagagaatcttcttttggattcgaaatgcaacattaagattgctgattttggcttaagtaatgttatgcgtgatggtcactttcttaagacgagttgtggtagcccgaattatgcagcacctgaggtcatatctggtaaactatatgctggtcctgaagttgatgtctggagctgcggcgttattctttatgctcttctttgtggcactcttccatttgacgatgagaatattccaaacctttttaagaaaataaagggtggaatatatacccttcctagtcatttgtcaccttcagcgagggacttgattcctagaatgctggttgttgatccgatgaaaaggattacaatacgtgaaatccgtgaacatatgtggttcaaaattcaacttccgcgctatttggctgtaccgcctccagacactgcccaacaagttaagaagctggacgaggaaacccttaatgatgttattaagatgggttttgacaagaatcagctaattgaatctctgcacaacagattgcagaatgaggcaacagttgcctattatttactcatggacaataggcttcgtacaaccagtggttatcttggatctgagtttcaagaatctatggacccatctttctctcaagtacatgctgaaacaccaacttcagcaactgaacatcggcagcatgtgtttacagaatctccggggtctggtttgaggcagcattttgcatctgaaaggaaatgggcccttggtcttcagtctcgagcacatccacgagaaataataagtgaagtgcttaaagcactgcaagaactgaatgtttactggaaaaagattggacactacaacatgaaatgcagatggagtcctggctgccttgagagtatgatgcataactgtgatggctttagtgcagagtctgctataattgaaactgatgatctcatagcgaaatcaacccgtatagtgaagtttgagattcagctttacaaaacgagggatgagaagtaccttcttgacctgcaaagggtcagtggaccacaactcctctttctggacttgtgttccgcctttctaacgcagctgagagttctttgagcctgatgacatgattggcttcccaagcacaatccttgatgcaccccatggactttcaaattacattcgtgctgtacataatggccatatataatcctccggtagattatattttctggagcatgtggaccgtacaggtatgtcctggttgccgagatgattgtcacctaaggtcctaaacaagaggccacatgcgagccccaggccttcttcctcaattagattatgcgagttttgttcggcctttctttagtccttggacatgtttttttctttgccttgtttggttgtgtttggatcaaaggagattgagagctggtttgatgaccagggaaatggaggggattaatggggagaaatctccttcctatttgaaattgaatagcaagtggatatctctcccatgcatcctctctatttcccgtatcaccaaattagccctgaggctttgtttggatactctagtatttatctcagtacatatggattgggatagattaaaatgtaaattaaactaacttacacctcaatccatgtgcatagatgtaaatactagattattcaaacaaagcttgagggggattaaatccccttatattcaattttgactagtgagagatttaatcactccaatcccatttgatcccgatgccctaaggtgatcgtgctagcatggtacctaaggctgaaaatgttccattgaaaactgaaaagaaagtttacccgttgatgtaccagtgtcaactctgacataacaggagagacagtaattagatgtcac

SEQ ID NO: 221751 - DNA, 4788 bp, Zea Mays
tcgactacagtccacagccatcgcagaagtcggaggagtggacagcagagaggatgagccagctaaaggagaaaatagctgggctattcggagcctgcacgacgacagccgagcaactcaacctagtggacacgctccagcatctaagcatagaccaccatttcagcacccagatcctctccgtcctcactagcgcccacgccgcggaagaactcaacagcggcggcgcctgtctccacgacgtcgcccttcggttccgcctgctgcggcagcaagggttctgggtgtctccagaggtattcgaccggttcagagacgaaaacgggagctttgacgtcggcgtggcagacgacgacgcgagggggctgctgagcctatacaacgcggcttaccttctcacccatggagaggcagagctcgaggaggctgcattgttcgccaggcagcgtcttgagtccatgtccatgagaggtagccttgagtacccgctggcccagcaggtgagccgagcgctccacctgccactgccgcggacggtcagaagagtcgagactctgcattatgtctcggagtacggaggagacccgacgcatgagcatgagcatgacccctccgttctggagttcgcccggctggatttcgagctcttgcaacgtctccacgtgaaggagctcaaggctctttctaggtggtggaaagatctctacaacgaagctggagtgacctactcgcgggaccgcgtggtggagtgctacctgtggtcttacacggcgtactacgaggaagaacacgcgagggcgaggatgatcctcgctaagatgatcgcgctgataatcttgacggacgacacctacgacgtccgcgctactctggaggagtgtcgaaggttcgatgaagctatacagagatgggacgagagcgctgtttctctcctgccggactacctgaagaagttctacctcaagctgatgaacatctttgaggagtttgaggacgagctggaaccacatgagaagtgcagggtcgcttttagcagaaaagcgtttcaaacattatcgagtaattatctccaagaagcggaatggtttcatggccgttacaagccaagattcgaagatcaggtaaaggtatccactgtgtgctcaggcgctccattcgcagctgttgggttactagttggcatgggaggtgatgtagcaacccaggaggcacttgagtgggcaatgggttgcacggatgctgtcaaggctttcgcagaggtcacacgcttcatgaatgaccttgcttcgtataagcgtggaaagaacaaaaacgacgtggacagctcggtcgaatgctacatcagtgagcatggcgtcacagctgaggttgcctttgcacagataagctccctgattgaagatgcatggaaaactataaacggagcacgctttgagaacagcaaactacttccagcagtgcagcgagttgccgacataaccgccagcatgccgttgatgtacggtgacaacaaggacgcgttcacgttcagcgacggtctaaaggggctcatcgaacgcctgtttctcaacaggccataaaacgagtttcgtctttagtctgaatatcgagagatgtgctgaaaagagtagcccccctagtaagctttgtctagtcatcgttagtctggataccatgtgatctcagatgcttatacttctggtccgcatttgtcagttttgccgcctctgtcaaacccctcgcagccaccatcttcagaatatcgacaccctctctcacggctgaatcgatctaggttgtagcaaaagatgcaatcatgataagctctggttgttacagtacatcaaataaagataacttgtttgaatttaaatattcttgtgcaaaactatagattgttgcaatacgatgataataaattctgatatgatgtttgtgacaattgcattagtagaatgagcccatgatcatcacttgtaaaaactcggcagtatgactattagattattatttttttatttcccaacctccaacttcaactaaatctttccatgacatggtagcattaacttgaacggaaaggaaactccaggcccgcagttttcaagaggctggctcaagcccaagcccaattctctaaatgtcaatctccaccttgatcttaactttgacaccaaattcaacgatactacaagtctaaatcgatcttctcaacacacaaatcaaacaagcatcaccatattccatatactgtggttgaaactactcagaaatgtgcagccagattgctggtaacaaatatcacccaccaaattaaaaagttttccagtatcaataaggtgctcctattcgcagaaagcattgtgaaagttaccaaagttttgttgaagtttatgccaaaactaaaggttgcagcatgcttatatatacatacaagtttgctggaatagtggaatcaatattatatggtcatatctgtccgagaaatttcgaatttttctattaatgggactggataaaatattaacaatacaactaatgtggcaatgtgaatcttacctagttcattaatagctacagcagagttcagataatattaaaacaaatagcataacatgaaacaagaactacagaagcacaaattactagtgacatgtttacccgttcacgaccagtcctattgaacttctgaagaacaaaggctttaggatccatctggccagctggccgtccaattcctaaataagtcaggatgaattcttgtccaccaaaattaaacaaattctaaatggcaagagtgtagaaagtaccaatccttaatcggcaaaattctcgattcttacgaaagtggtatataacactcttcaacctgatagactaaaagggtaaatgtttattgtcaagatcagataaatctttctctaccaacatccaatagatgccatatagctaatggtttattttcataccagccaaagataaaattccaaattttggcacgaggcaatatgctgttaacagattaagagtgttgtaaagtaattgataaccttttcagataactaattagaccccccccccccatttatgcaaaatggaaagttcaagcaagaaaaacatagtaaaagtaatacaaaaaatgaaaggaaaaaggagaggaagccagatgtgtgaacaccacaacaataaaaaaggaaaatatctacagaacttcaaaagattctttagtgtcccctaaaggcatgccaacaacccagattaggggactaagacaatgggcaagtttgtgacaataataaagtggttaccattgctgatatatgcatttaaacatagtgaaagatatttttcctttcgaaatataaacttcttttgccaggtggaagatgctcccataaaacagataaaaataaagtcttacccattgtgtcgtccagaacctccttttggctgtagacggagaactccacatggcaagtccatgtcatcaaacgcctgaaactcacatacagagaagtcatattgccttgtaacatggctccagcaaagtttagaaacaaacaccttatagctatgaaggtgcctaaatggattatataaaagcagtagacaaaattagaatagctttctttggaaaggaagaaaagaggttaatgggggaaactgcttagcttcctgagataaggtgacaaggcctctgaaactggaaggtcttggtataccgaacctacagtttaagggatgagccttacaactaaggtggctgtggttgagcaaaatcgaccctaccaggccgtggttcgatcttgacatccctgtacaatcacaggtcagaaatttcttcgcagtttcagtggttacacaggtcggaaatgggaataacactctctatgggaagctctggaggtggtaattccctctccagataatgatctacatattcacttacaaatcatgttatgaggctttcttaaatggttctatcatttttttaaccttggaaggaggttgtggaaatcctgggtgccacctaaatgtaagatgttcttgtggttagcaattcagaacaaatgatggacagccgatagattgcaacagagaggattaaaccatcctgagacctgcccactttgtggtcaagaagatgaaactgtccaacatatattgacctcctgtgtcttagcacaacaattatggtttagtctattggatcctctcggattaggacacctgactccggaggtagaggaggcatcctttgcggaatggtggaggaaagtgatcaagcttgttcagaaggataaataaaaaggcataaacagcagcagcagcatcctaggtgcttggtgcattcagcgcaacagatgtgtgtttgatagggatcaactggcccttgggaaggtgcagcaaagctttcttcaagagttcagctgctgggttttggcaggggttcatcacctgcaaggggttgaggatgatcttaggaggattgggtcgaatttcatatttcatctgtaataggtttatagcaggatgttttagccatgtagcagggttctctgtgtacttgggattggtcctctttctttctctctaatatataaaagatacacagtcctcctgtgtgttcatgaaaaaagaaacaaacacctaccactaggacacgattaagtggcagtttataataggcagcaagtgggccgacctgcaagtgaaaacagagactgatcactagtagtcatcaaacaagaattgtgtaaacgattttgtatgtccagttaaagaaaa

SEQ ID NO: 221752 - DNA, 2896 bp, Zea Mays
atgtaccaatgtgtagggctggtttgttatgggcgccggcgagttggatggacgcgccttgtcggacgcggagcagcagtagcggcgggcaaccaggcgggggatctggatccgaggcaccaccaccgggctcctcacggcggcgacgcaggcggcggcggagaaggaggaggaggcggaggagcgcagcaagaagcagatgagcagcagcggcaccacaacaaccggctgctgcagttccaccagcaagtgcagcagaaccaagacccgccgccggtccccctctttcagctccagcacctgcaggccgcggcggccgtgaggcagcggggcggcttgtcggccgagtatgcccttctcgaccccatgggcgacgccggccagtcccactcccaccgccaccaccacggcttccagccgcagctcctgtccttcggaggagtcggccagcaccacatgcaccagttcacggcgcaggcgcccgcggcgtctcactcctcgcggccgcggataggaggggtgggcgcgggcggcgaggccgcggccgccacgtccgcgtcgcactcgcgcgcgaggggcggcgccggggagatcgtggccgtgcagggagggcacattgtgcgctccacggggcgcaaggaccgccacagcaaggtgtgcacggcgcgcgggccgcgggaccggcgcgtgcgcctctctgcgcacaccgccatccagttctacgacgtgcaggaccggctgggctacgaccgccccagcaaggccgtcgactggctcatcaagaacgccaaggacgccatcgacaagctcgagacgctgcccgcgtggcagcccacggccaatgccgccgcgccgccgtcctcctcgacgcaccccgactccgccgagaactccgacgaccaggcgcaggccatcaccgtcgccgcgcacgctccgttcgacttctccggcgccggtggagcaagcggcggcgccgcgggcttcctcccggcgtcgctcgactcggactccatcgcggacacgatcaagtcgttctttcccatggctggcacgggtggcggcggcgaggcgtcgtcgtccacggcggcggcgcagtcgtcggccatgggcttccaaagctacacgcccgacctcctgtcgcgcaccggcagccacagccaggagctccggctgtcgctgcagtctctcccagaccccatgttccaccagcagcaggaccggtcggaagcccacggcggcaatggctcggcgcagcaggcgctcttctccggcgccgccagctactcgtttggcggcggcgccatgtggggcgagcaggcgcagagccagcgcatggtgccgtggaccgtgcccgacccaggcggcgggagcgctggcggctacctgttcaacgtgtcgcagcaggcggcgcacatgcaggcggcgtttggcggccagagccagttcttcttccagaggggaccccttcagtccagtaaccagccctccgagcgaggatggccggagagcgtcgaagccgacaacccgatgcagcacggcgggctcagccccgctgtgtcggccatcgggttctcgcccggcgtcggcttctccgggatccgcatccccaccaggatgcagggcgacgaggagcacaacggcggcggcaatggcgacaagccgccgccgccgtccgtgtcctcggcttctcaccactgacgacggcagagcagtggagcgcagattactccgcgcgcccaccatgccaccaaccaccatcacgagcatttcagcagcataccatgcatgaattcagcaaacacatatcaccgtcagctagctcctcaacatgcaccgcccaggtagttactttgctgctgcttcctacgacaacggatggctgcagcaaaatggaggagcaaggttgggagcgaagcactctttttgactggctggttggttggccggtcggtcggtcggtcggtttctctaccatctctcgctgctttgtgtacgtcactggtttttgctccaagaactcactcactcactcggagcttctcttgttagaaattaggcctgtgagaacgcagcacattggctagccagcaggttctttcttcactagatctcttgctgcttgtccgtttgctgcgttgttacagtaggtttagttgatgttctagttgctgtagtagttctcaagcttttgcatcttaattttgctgttgttctcgctggcgctctgcacggatcgatgggggttaagctagtgtgcttcctcctggggttcagggagcagctataagcggcagcgcagcgccagccagcggatgatgttgttgttgttgttagcctgataattaagcggatggggacaggagtctttggttctttttaaaataatctctctgatgtgattggcgtttgagacggattgtgcgtgcctgcctgccctgctaagatcttgttcagcattttaaaactgtcatgtgcatgtgcacctagctaggatggtgccattgccaatctccaagctgctagctgctgcctagctataacacgcacagtagtaatactttatcttgtctttgttcttgttgcatgttgaaccattgtttggaattggaagtgagaaatttaaagaccttccccacttaatggcagcgcagagcacaggagtaggggatttagcgcgcgctcttttgtgttacagtacagtagtacggggatggaagaaaaagaaaaggaaaaaaaagaaccgcaaagctttgcgtacaggttcattgcatggcctcatactaatgcagcatgtgattggcttgttctcttgccctgcctgccgctgctgtagcaggacgtcctgctacagcgacagcagcagctttcctgtgccatccatccatctatcactggg

SEQ ID NO: 221753 - DNA, 2893 bp, Zea Mays
atgtaccaatgtgtagggctggtttgttatgggcgccggcgagttggatggacgcgccttgtcggacgcggagcagcagtagcggcgggcaaccaggcgggggatctggatccgaggcaccaccaccgggctcctcacggcggcgacgcaggcggcggcggagaaggaggaggaggcggaggagcgcagcaagaagcagatgagcagcagcggcaccacaacaaccggctgctgcagttccaccagcaagtgcagcagaaccaagacccgccgccggtccccctctttcagctccagcacctgcaggccgcggcggccgtgaggcagcggggcggcttgtcggccgagtatgcccttctcgaccccatgggcgacgccggccagtcccactcccaccgccaccaccacggcttccagccgcagctcctgtccttcggaggagtcggccagcaccacatgcaccagttcacggcgcaggcgcccgcggcgtctcactcctcgcggccgcggataggaggggtgggcgcgggcggcgaggccgcggccgccacgtccgcgtcgcactcgcgcgcgaggggcggcgccggggagatcgtggccgtgcagggagggcacattgtgcgctccacggggcgcaaggaccgccacagcaaggtgtgcacggcgcgcgggccgcgggaccggcgcgtgcgcctctctgcgcacaccgccatccagttctacgacgtgcaggaccggctgggctacgaccgccccagcaaggccgtcgactggctcatcaagaacgccaaggacgccatcgacaagctcgagacgctgcccgcgtggcagcccacggccaatgccgccgcgccgccgtcctcctcgacgcaccccgactccgccgagaactccgacgaccaggcgcaggccatcaccgtcgccgcgcacgctccgttcgacttctccggcgccggtggagcaagcggcggcgccgcgggcttcctcccggcgtcgctcgactcggactccatcgcggacacgatcaagtcgttctttcccatggctggcacgggtggcggcggcgaggcgtcgtcgtccacggcggcggcgcagtcgtcggccatgggcttccaaagctacacgcccgacctcctgtcgcgcaccggcagccacagccaggagctccggctgtcgctgcagtctctcccagaccccatgttccaccagcagcaggaccggtcggaagcccacggcggcaatggctcggcgcagcaggcgctcttctccggcgccgccagctactcgtttggcggcggcgccatgtggggcgagcaggcgcagagccagcgcatggtgccgtggaccgtgcccgacccaggcggcgggagcgctggcggctacctgttcaacgtgtcgcagcaggcggcgcacatgcaggcggcgtttggcggccagagccagttcttcttccagaggggaccccttcagtccagtaaccagccctccgagcgaggatggccggagagcgtcgaagccgacaacccgatgcagcacggcgggctcagccccgctgtgtcggccatcgggttctcgcccggcgtcggcttctccgggatccgcatccccaccaggatgcagggcgacgaggagcacaacggcggcggcaatggcgacaagccgccgccgccgtccgtgtcctcggcttctcaccactgacgacggcagagcagtggagcgcagattactccgcgcgcccaccatgccaccaaccaccatcacgagcatttcagcagcataccatgcatgaattcagcaaacacatatcaccgtcagctagctcctcaacatgcaccgccgtagttactttgctgctgcttcctacgacaacggatggctgcagcaaaatggaggagcaaggttgggagcgaagcactctttttgactggctggttggttggccggtcggtcggtcggtcggtttctctaccatctctcgctgctttgtgtacgtcactggtttttgctccaagaactcactcactcactcggagcttctcttgttagaaattaggcctgtgagaacgcagcacattggctagccagcaggttctttcttcactagatctcttgctgcttgtccgtttgctgcgttgttacagtaggtttagttgatgttctagttgctgtagtagttctcaagcttttgcatcttaattttgctgttgttctcgctggcgctctgcacggatcgatgggggttaagctagtgtgcttcctcctggggttcagggagcagctataagcggcagcgcagcgccagccagcggatgatgttgttgttgttgttagcctgataattaagcggatggggacaggagtctttggttctttttaaaataatctctctgatgtgattggcgtttgagacggattgtgcgtgcctgcctgccctgctaagatcttgttcagcattttaaaactgtcatgtgcatgtgcacctagctaggatggtgccattgccaatctccaagctgctagctgctgcctagctataacacgcacagtagtaatactttatcttgtctttgttcttgttgcatgttgaaccattgtttggaattggaagtgagaaatttaaagaccttccccacttaatggcagcgcagagcacaggagtaggggatttagcgcgcgctcttttgtgttacagtacagtagtacggggatggaagaaaaagaaaaggaaaaaaaagaaccgcaaagctttgcgtacaggttcattgcatggcctcatactaatgcagcatgtgattggcttgttctcttgccctgcctgccgctgctgtagcaggacgtcctgctacagcgacagcagcagctttcctgtgccatccatccatctatcactggg

SEQ ID NO: 221754 - DNA, 3001 bp, Zea Mays
cgagctttgcctcccccgtccccccacccccacccccaagggtaaaatgtgatgttgccatccatccgaatccgagaatccgattgcttctagtttgtctccccaactcctcgcctcgcctctcctcctggttatgggcgccggcgagttggatggacgcgccttgtcggacgcggagcagcagtagcggcgggcaaccaggcgggggatctggatccgaggcaccaccaccgggctcctcacggcggcgacgcaggcggcggcggagaaggaggaggaggcggaggagcgcagcaagaagcagatgagcagcagcggcaccacaacaaccggctgctgcagttccaccagcaagtgcagcagaaccaagacccgccgccggtccccctctttcagctccagcacctgcaggccgcggcggccgtgaggcagcggggcggcttgtcggccgagtatgcccttctcgaccccatgggcgacgccggccagtcccactcccaccgccaccaccacggcttccagccgcagctcctgtccttcggaggagtcggccagcaccacatgcaccagttcacggcgcaggcgcccgcggcgtctcactcctcgcggccgcggataggaggggtgggcgcgggcggcgaggccgcggccgccacgtccgcgtcgcactcgcgcgcgaggggcggcgccggggagatcgtggccgtgcagggagggcacattgtgcgctccacggggcgcaaggaccgccacagcaaggtgtgcacggcgcgcgggccgcgggaccggcgcgtgcgcctctctgcgcacaccgccatccagttctacgacgtgcaggaccggctgggctacgaccgccccagcaaggccgtcgactggctcatcaagaacgccaaggacgccatcgacaagctcgagacgctgcccgcgtggcagcccacggccaatgccgccgcgccgccgtcctcctcgacgcaccccgactccgccgagaactccgacgaccaggcgcaggccatcaccgtcgccgcgcacgctccgttcgacttctccggcgccggtggagcaagcggcggcgccgcgggcttcctcccggcgtcgctcgactcggactccatcgcggacacgatcaagtcgttctttcccatggctggcacgggtggcggcggcgaggcgtcgtcgtccacggcggcggcgcagtcgtcggccatgggcttccaaagctacacgcccgacctcctgtcgcgcaccggcagccacagccaggagctccggctgtcgctgcagtctctcccagaccccatgttccaccagcagcaggaccggtcggaagcccacggcggcaatggctcggcgcagcaggcgctcttctccggcgccgccagctactcgtttggcggcggcgccatgtggggcgagcaggcgcagagccagcgcatggtgccgtggaccgtgcccgacccaggcggcgggagcgctggcggctacctgttcaacgtgtcgcagcaggcggcgcacatgcaggcggcgtttggcggccagagccagttcttcttccagaggggaccccttcagtccagtaaccagccctccgagcgaggatggccggagagcgtcgaagccgacaacccgatgcagcacggcgggctcagccccgctgtgtcggccatcgggttctcgcccggcgtcggcttctccgggatccgcatccccaccaggatgcagggcgacgaggagcacaacggcggcggcaatggcgacaagccgccgccgccgtccgtgtcctcggcttctcaccactgacgacggcagagcagtggagcgcagattactccgcgcgcccaccatgccaccaaccaccatcacgagcatttcagcagcataccatgcatgaattcagcaaacacatatcaccgtcagctagctcctcaacatgcaccgcccaggtagttactttgctgctgcttcctacgacaacggatggctgcagcaaaatggaggagcaaggttgggagcgaagcactctttttgactggctggttggttggccggtcggtcggtcggtcggtttctctaccatctctcgctgctttgtgtacgtcactggtttttgctccaagaactcactcactcactcggagcttctcttgttagaaattaggcctgtgagaacgcagcacattggctagccagcaggttctttcttcactagatctcttgctgcttgtccgtttgctgcgttgttacagtaggtttagttgatgttctagttgctgtagtagttctcaagcttttgcatcttaattttgctgttgttctcgctggcgctctgcacggatcgatgggggttaagctagtgtgcttcctcctggggttcagggagcagctataagcggcagcgcagcgccagccagcggatgatgttgttgttgttgttagcctgataattaagcggatggggacaggagtctttggttctttttaaaataatctctctgatgtgattggcgtttgagacggattgtgcgtgcctgcctgccctgctaagatcttgttcagcattttaaaactgtcatgtgcatgtgcacctagctaggatggtgccattgccaatctccaagctgctagctgctgcctagctataacacgcacagtagtaatactttatcttgtctttgttcttgttgcatgttgaaccattgtttggaattggaagtgagaaatttaaagaccttccccacttaatggcagcgcagagcacaggagtaggggatttagcgcgcgctcttttgtgttacagtacagtagtacggggatggaagaaaaagaaaaggaaaaaaaagaaccgcaaagctttgcgtacaggttcattgcatggcctcatactaatgcagcatgtgattggcttgttctcttgccctgcctgccgctgctgtagcaggacgtcctgctacagcgacagcagcagctttcctgtgccatccatccatctatcactggg

SEQ ID NO: 221755 - DNA, 2266 bp, Zea Mays
gagctagctcttgtttgccgcggaacggtttgtttccggtactagagctgcgtgccttttgtatcccaaaagcggcgatttagatatgagataattggatttttgccactcacaatgttgtcttcttgttataattatctgagtttcacaaaggggctaattagtctagaactgtggctgacgggcatatgacgtgacatgcccacaggcgtgcatagtgaattgctcgtcacgaccgatctatttgtgttactctgtcgtggaattctgtagatcgtgaagtatgcgcagatgtgtgcatgtgattgtgaagtgaagtcgtttcttgtaaaaggttcggaactgaaaaccaggagaaactattgcaacatccaactcttatttctttcttgcttattattgactgcacaatttagatgattggactttattactgaaagttgtcaaggacctccttacagaaagttgtcaaggacatccttacagaaagttgtcaatgaccttcttacagaaagttgtcaatgaccttacagaaagttgttagatactgtcgaaaatttatttaccgtgagaaacattatggtctacctggccttccttcaggatgatgcatcatgtcatggcgaggaaacacagagtctattggaagcaaatctagggtcacagctgaaaagtaaatgctctgattggagagcaccggcactcatcctgggattggaatgcttggagagcatggctttcaatggcattgccacaaacctagttgtgtatctccgttcagttctccatgggggtattgcttccagtgcagcaactgtatctctttggtatgggacaagcttctttgtgccaattcttggagccgccatagcagatacttgcttgggaaattataagaccatcttgatctcccttatcatgtacctatttggaatagtactaattacagttgcaacgttcatgccttctacttcagtcttgtgcgacgtcagttcatgcttgtcatcaaatggaactcaaaccgtgattttctttgctggtttgtatctcactgctgttggatgtggaggagtaagatctgcattgcttccgtttggtgctaaccagttcaacaacgagaacagtctagacataaaaaagagaagaaatttcttcagcttgttctatatatgtgtcatctttggtgtgattacttctgggacaatcatagtttgggttcaggaaaatgttagctgggctattggatatggagtcgccactacatgcataggtcttgctttgataggatttctggtgggaacaccaatattccaagaagatgagccttgtggttctccagtgaagagtattttccaggttattgttgcctcttttaggaacatgagcttggaagtacctgctgatagctgtcttctgtatgaggtcgggagcaaccacatacaaaggacaaaacttgctcactctgatgattttaggttcttagataaggcggcagttatttctgatccaagcctggtgtatggaggctgtcgaagctcatggagcatatgtacagttactgaagttgaggaactgaaagtacttatccgcttgctcccaatatgggtgactggaatattctttggtgctgcgatctcgcaaatgcacaccacttttattcagcagggaactgtgatggacaccaagatcggttccctgtccattccaccagcatccttatactcatttgaagtgatatgtgtcacgctttgggtacttgctgtcaacaaagtgcttgtgccggcaatccgaacgtattttgcaaatggggtagagctcacacagttacagaggattgggatcggtcgtttcctgatgatctttgccatggcaatggcagcacttctagaaaccaagaggctgcatattgttcaggagggggaactgctaagcattgtatggcagcttccacagtacttcgtcattgctggggctgagtgcttcggtatcatcactcagctggagttctttcgtggccaggcgccagactccatgaagagcattttaacggcatttgcattgctcaccactgcccttgggaattacttgagctcagctatcatcaccctcatcgcaggggtgaccagggtatggcatagccctggttggataccagatgatctgaacaaaggacaccttgactactactactgatatatgtttctttttgttaatgaagatggaattagacgtggacagatctagctgagtaaattaggtggcttat

SEQ ID NO: 221756 - DNA, 2035 bp, Zea Mays
gagctagctcttgtttgccgcggaacggtttgtttccggtactagagctgcgtgccttttgtatcccaaaagcggcgatttagatatgagataattggatttttgccactcacaatgttgtcttcttgttataattatctgagtttcacaaaggggctaattagtctagaactgtggctgacgggcatatgacgtgacatgcccacaggcgtgcatagtgaattgctcgtcacgaccgatctatttgtgttactctgtcgtggaattctgtagatcgtgaagtatgcgcagatgtgtgcatgtgattgtgaagtgaagtcgtttcttgtaaaaggttcggaactgaaaaccaggagaaactattgcaacatccaactcttatttctttcttgcttattattgactgcacaatttagatgattggactttattactgaaagttgtcaaggacctccttacagaaagttgtcaaggacatccttacagaaagttgtcaatgaccttcttacagaaagttgtcaatgaccttacagaaagttgttagatactgtcgaaaatttatttaccgtgagaaacattatggtctacctggccttccttcaggatgatgcatcatgtcatggcgaggaaacacagagtctattggaagcaaatctagggtcacagctgaaaagtaaatgctctgattggagagcaccggcactcatcctgggattggaatgcttggagagcatggctttcaatggcattgccacaaacctagttgtgtatctccgttcagttctccatgggggtattgcttccagtgcagcaactgtatctctttggtatgggacaagcttctttgtgccaattcttggagccgccatagcagatacttgcttgggaaattataagaccatcttgatctcccttatcatgtacctatttggaatagtactaattacagttgcaacgttcatgccttctacttcagtcttgtgcgacgtcagttcatgcttgtcatcaaatggaactcaaaccgtgattttctttgctggaacatgagcttggaagtacctgctgatagctgtcttctgtatgaggtcgggagcaaccacatacaaaggacaaaacttgctcactctgatgattttaggttcttagataaggcggcagttatttctgatccaagcctggtgtatggaggctgtcgaagctcatggagcatatgtacagttactgaagttgaggaactgaaagtacttatccgcttgctcccaatatgggtgactggaatattctttggtgctgcgatctcgcaaatgcacaccacttttattcagcagggaactgtgatggacaccaagatcggttccctgtccattccaccagcatccttatactcatttgaagtgatatgtgtcacgctttgggtacttgctgtcaacaaagtgcttgtgccggcaatccgaacgtattttgcaaatggggtagagctcacacagttacagaggattgggatcggtcgtttcctgatgatctttgccatggcaatggcagcacttctagaaaccaagaggctgcatattgttcaggagggggaactgctaagcattgtatggcagcttccacagtacttcgtcattgctggggctgagtgcttcggtatcatcactcagctggagttctttcgtggccaggcgccagactccatgaagagcattttaacggcatttgcattgctcaccactgcccttgggaattacttgagctcagctatcatcaccctcatcgcaggggtgaccagggtatggcatagccctggttggataccagatgatctgaacaaaggacaccttgactactactactggtgtcttactaccctctcattggtgaattttgttgtgtatctgtattttgctagtaaatacaaattgaagaaagttgtttgttaatactaccaaacactaatgaaatatctttacgtgtaacatgaaatataacgtttcaaatgtttatgtttattaatataaggtttcaaatgtttatg

SEQ ID NO: 221757 - DNA, 3810 bp, Zea Mays
cagaagcaaccagagcagtaaaaaggctgagacacactgcaattgtggcccacgcctatctggttcgctactcttttcttcctctcctccggcgggccccggccccaaactagccaacggcggcgagatccagatccaccgcaccggacccggacccgcccaacgactccggccactttttacttactagccagcggcggcgaaatccagatctccatagcaccggacccggacccgcccgccccgctggaacaggatgttcggacttcaggcgagcggcgcggcggcctcgtgggtggtggggcggatgggcaccgacgcgcatctctacgacgaccccgacgacgcctccatccccgagctcctcgactcccgcttcgacgccgacaaggtcgacgccctcaagcgcctcctcgccctcatcgcgcagggcgtcgacgtcgcgcacctcttcccgcaggttgtcaagaatgtggcgtcgcagtcgctcgaggtcaagaagctcgtctacctctacctcctccactacgccgacaagcgccaaaacgaagcccttctttctattaacatcttccagaaggatttatcggatataaacccactggtgagggcttgggccttgcgcactatggctggcattagactacacgttgttgctccgcttgtgttggttgctatcaagaaatgtgccagggatccgtctgcgtatgtaaggaaatgtgctgcctacgcactttgtaagctgtgcgacttgattccagacgaaaatgcggctttggaggagatcgtggacaccttgttcagcgacaattcccctggagtagtaggagctgccgctgttgcatttaagtcggtctgtccaagttgtttaccgttagtatcaaaacatttccggaggctatgtgagaccctccctgatatcgaggaatggactcagatcgtcctcatcgagatcctcttgcgttatgtaatagccagacatgggttggtcaaggattctttactctttgcttcagatttaccgacagagattcatggcgttacagattcagatgctgttgctagcgtgcccacccaatctgattctatcgtcaatggggtttctgatactatatcaagcatcatgctgttccggcactacatcgaacaatgctcaggttcctctgatagagaaggcaataatttagaattatcgtctgtcaccgcaaacaacaacgatgatgtcacaattcttttgaaatgtacatcacctcttctatggagtcgaaatagtggagttgtacttgcagcagcaagtgtgcattggatcatggctcctattggggacatgaagaaaattgttggcccaattttgtttactctacggtcatctcctgatgcagcatatgtgatgcttggcaacatagtagtttttgtcaagacaatgccatcattgtttgccccgttttatgaggacttctttgtaaacacttcagatccgtaccagacgagggctttgaagcttgaaatactgaccactattgccacagagtcatctattccggccatttttgaagaatttcagaatcttttattagtaactcagttcacttagatggagaagatgctgttttggttcaagcaatcttgtcaatcaaagcaatagtgaaaatggatccagtatcccacgaaaaggtaattgtccgcttggttcgtggtttggacaaactcaaggaacctgcagcacgatccttgatcatttggatgtttggagagtatagcttcatgggggatctcactacaaagattgttcctcctgttctcaagtatcttgcgtggtccttcgttgctgaagtggtggaaacaaagcttcaaatcctaaattcttctgccaaggttataatgcgttgtacagaagaagacatggaagaattcaaaagcatagttgcatatgtcattgagttggctacgtgtgacttgaattatgatgttcgtgatcgtgctcgtttactatcaagactcttgccgtgctacatgactcaccaagggtcctcacatcaacctcagaatggtgatatctataaagagctagccaatcatatatttaatgggaagttgcagccaacatctcatccagcaagcaactatcgcatatatcttccaggttcactttcgcaggttgttcttcatgcagcccctggttatgcaccacttccaaagcctcaaagtatggaattaaaccataatgtcacggcagcaattagaggcaaggccaaactttctggaagtgactccgatgctgaatctggatcttcaacatatgagagcagctctgtttatgattcggagagtgaaggtgctggcctatcggacagggatactgttgaatcccatcaggctcaagaagataaccaggatgctccactggtacagatatatgatgctagtatacagcaaggccaggcaggtcaaaatactgaggaaaatttggcagatcttatcagtaccgatttgactgagttgatgtctaagtcagccttggaatcatggcttgatgaggctcctgctgagccagttgttcagaatttgacacagacatcgtctgccagagtttcttttacaaaccgcaactttgagcgaaaacctaaactgcacacattgttagacccatctggcagtaatggattaagcgttctatatgccttctcgcctgaggtttcacccagatcacgtttgctagtatgtgtagacctatattttgagaatgtcactacacagcagctaacagatataaccattgaatctgaagaggcttctagcagtgtggattttatagaccaaacatcagaaggatattcgggtgtccctactatcgttcctgtggaagggatacattcgttggccccacaacaaatggcaaagttggttcttcaggtccattttcatcaccatatcttgcctctaaagctgtctgtgttttgcaatgggaaaagacatccagcaaaacttcatcctgacattgcttatttcgttcgtccactacccatggacctaaatactttcctatgcaaggaaaaccaattgaggggaatgtttgagtatgcgaggaggtgcgctttcaaagatcatcttcagaagctaggtcacgaggacagtgcagagcacatcgataagaaccttcaggtggcccagagtgttgcttcaaaaatactgagcaatgctaatattcaccttgtctcaatggatatgccagtaaccttcagtgtcgatgacgcctctggcttgtgttggagattcagcggtgaaatcctgagcacttcaaaaccttgcctgattaccatcctggcggaagggcgtgcctctggtccgctggaccttgctgtgaaggtgaattctgaagatacggtgttcgccctgaatctcctgaacagagttgtggcgatcatagattgaggtgagcatgaaattgtacattatcaacaaatagaagaggtatttggcaagcgcgtgactatttgtaagaaagtcttgttgaataatagcatctccaatagctctaaaaaaagaattgtgaaatgattgagttttacagcttgatgtgaaaaaagtgagtataatggttgtgtactaagaataccagagaaaatcgaagagatgggtgtagtctttggatcggtggatcgtcgacattggtggcatacataaggaagtttgggttgaatggatttaataacatacgtcttgtatgtggttgatattttgatgcaaaaaagatcagggattacatgtccagataatgtctaagctagcgagcaagagtcagggtgcgtt

SEQ ID NO: 221758 - DNA, 3781 bp, Zea Mays
taaaaaggctgagacacactgcaattgtggcccacgcctatctggttcgctactcttttcttcctctcctccggcgggccccggccccaaactagccaacggcggcgagatccagatccaccgcaccggacccggacccgcccaacgactccggccactttttacttactagccagcggcggcgaaatccagatctccatagcaccggacccggacccgcccgccccgctggaacaggatgttcggacttcaggcgagcggcgcggcggcctcgtgggtggtggggcggatgggcaccgacgcgcatctctacgacgaccccgacgacgcctccatccccgagctcctcgactcccgcttcgacgccgacaaggtcgacgccctcaagcgcctcctcgccctcatcgcgcagggcgtcgacgtcgcgcacctcttcccgcaggttgtcaagaatgtggcgtcgcagtcgctcgaggtcaagaagctcgtctacctctacctcctccactacgccgacaagcgccaaaacgaagcccttctttctattaacatcttccagaaggatttatcggatataaacccactggtgagggcttgggccttgcgcactatggctggcattagactacacgttgttgctccgcttgtgttggttgctatcaagaaatgtgccagggatccgtctgcgtatgtaaggaaatgtgctgcctacgcactttgtaagctgtgcgacttgattccagacgaaaatgcggctttggaggagatcgtggacaccttgttcagcgacaattcccctggagtagtaggagctgccgctgttgcatttaagtcggtctgtccaagttgtttaccgttagtatcaaaacatttccggaggctatgtgagaccctccctgatatcgaggaatggactcagatcgtcctcatcgagatcctcttgcgttatgtaatagccagacatgggttggtcaaggattctttactctttgcttcagatttaccgacagagattcatggcgttacagattcagatgctgttgctagcgtgcccacccaatctgattctatcgtcaatggggtttctgatactatatcaagcatcatgctgttccggcactacatcgaacaatgctcaggttcctctgatagagaaggcaataatttagaattatcgtctgtcaccgcaaacaacaacgatgatgtcacaattcttttgaaatgtacatcacctcttctatggagtcgaaatagtggagttgtacttgcagcagcaagtgtgcattggatcatggctcctattggggacatgaagaaaattgttggcccaattttgtttactctacggtcatctcctgatgcagcatatgtgatgcttggcaacatagtagtttttgtcaagacaatgccatcattgtttgccccgttttatgaggacttctttgtaaacacttcagatccgtaccagacgagggctttgaagcttgaaatactgaccactattgccacagagtcatctattccggccatttttgaagaatttcaggattacattaaagatccagataggaaatttgtagcagataccgttgcggctattgcattgtgtgcccagaaacttccctctattgccacttcttgcctcgagggacttttggcacttgtattttatgaatcttttattagtaactcagttcacttagatggagaagatgctgttttggttcaagcaatcttgtcaatcaaagcaatagtgaaaatggatccagtatcccacgaaaaggtaattgtccgcttggttcgtggtttggacaaactcaaggaacctgcagcacgatccttgatcatttggatgtttggagagtatagcttcatgggggatctcactacaaagattgttcctcctgttctcaagtatcttgcgtggtccttcgttgctgaagtggtggaaacaaagcttcaaatcctaaattcttctgccaaggttataatgcgttgtacagaagaagacatggaagaattcaaaagcatagttgcatatgtcattgagttggctacgtgtgacttgaattatgatgttcgtgatcgtgctcgtttactatcaagactcttgccgtgctacatgactcaccaagggtcctcacatcaacctcagaatggtgatatctataaagagctagccaatcatatatttaatgggaagttgcagccaacatctcatccagcaagcaactatcgcatatatcttccaggttcactttcgcaggttgttcttcatgcagcccctggttatgcaccacttccaaagcctcaaagtatggaattaaaccataatgtcacggcagcaattagaggcaaggccaaactttctggaagtgactccgatgctgaatctggatcttcaacatatgagagcagctctgtttatgattcggagagtgaaggtgctggcctatcggacagggatactgttgaatcccatcaggctcaagaagataaccaggatgctccactggtacagatatatgatgctagtatacagcaaggccaggcaggtcaaaatactgaggaaaatttggcagatcttatcagtaccgatttgactgagttgatgtctaagtcagccttggaatcatggcttgatgaggctcctgctgagccagttgttcagaatttgacacagacatcgtctgccagagtttcttttacaaaccgcaactttgagcgaaaacctaaactgcacacattgttagacccatctggcagtaatggattaagcgttctatatgccttctcgcctgaggtttcacccagatcacgtttgctagtatgtgtagacctatattttgagaatgtcactacacagcagctaacagatataaccattgaatctgaagaggcttctagcagtgtggattttatagaccaaacatcagaaggatattcgggtgtccctactatcgttcctgtggaagggatacattcgttggccccacaacaaatggcaaagttggttcttcaggaaaaccaattgaggggaatgtttgagtatgcgaggaggtgcgctttcaaagatcatcttcagaagctaggtcacgaggacagtgcagagcacatcgataagaaccttcaggtggcccagagtgttgcttcaaaaatactgagcaatgctaatattcaccttgtctcaatggatatgccagtaaccttcagtgtcgatgacgcctctggcttgtgttggagattcagcggtgaaatcctgagcacttcaaaaccttgcctgattaccatcctggcggaagggcgtgcctctggtccgctggaccttgctgtgaaggtgaattctgaagatacggtgttcgccctgaatctcctgaacagagttgtggcgatcatagattgaggtgagcatgaaattgtacattatcaacaaatagaagaggtatttggcaagcgcgtgactatttgtaagaaagtcttgttgaataatagcatctccaatagctctaaaaaaagaattgtgaaatgattgagttttacagcttgatgtgaaaaaagtgagtataatggttgtgtactaagaataccagagaaaatcgaagagatgggtgtagtctttggatcggtggatcgtcgacattggtggcatacataaggaagtttgggttgaatggatttaataacatacgtcttgtatgtggttgatattttgatgcaaaaaagatcagggattacatgtccagataatgtctaagctagcgagcaagagtcagggtgcgtt

SEQ ID NO: 221759 - DNA, 3890 bp, Zea Mays
gagacacactgcaattgtggcccacgcctatctggttcgctactcttttcttcctctcctccggcgggccccggccccaaactagccaacggcggcgagatccagatccaccgcaccggacccggacccgcccaacgactccggccactttttacttactagccagcggcggcgaaatccagatctccatagcaccggacccggacccgcccgccccgctggaacaggatgttcggacttcaggcgagcggcgcggcggcctcgtgggtggtggggcggatgggcaccgacgcgcatctctacgacgaccccgacgacgcctccatccccgagctcctcgactcccgcttcgacgccgacaaggtcgacgccctcaagcgcctcctcgccctcatcgcgcagggcgtcgacgtcgcgcacctcttcccgcaggttgtcaagaatgtggcgtcgcagtcgctcgaggtcaagaagctcgtctacctctacctcctccactacgccgacaagcgccaaaacgaagcccttctttctattaacatcttccagaaggatttatcggatataaacccactggtgagggcttgggccttgcgcactatggctggcattagactacacgttgttgctccgcttgtgttggttgctatcaagaaatgtgccagggatccgtctgcgtatgtaaggaaatgtgctgcctacgcactttgtaagctgtgcgacttgattccagacgaaaatgcggctttggaggagatcgtggacaccttgttcagcgacaattcccctggagtagtaggagctgccgctgttgcatttaagtcggtctgtccaagttgtttaccgttagtatcaaaacatttccggaggctatgtgagaccctccctgatatcgaggaatggactcagatcgtcctcatcgagatcctcttgcgttatgtaatagccagacatgggttggtcaaggattctttactctttgcttcagatttaccgacagagattcatggcgttacagattcagatgctgttgctagcgtgcccacccaatctgattctatcgtcaatggggtttctgatactatatcaagcatcatgctgttccggcactacatcgaacaatgctcaggttcctctgatagagaaggcaataatttagaattatcgtctgtcaccgcaaacaacaacgatgatgtcacaattcttttgaaatgtacatcacctcttctatggagtcgaaatagtggagttgtacttgcagcagcaagtgtgcattggatcatggctcctattggggacatgaagaaaattgttggcccaattttgtttactctacggtcatctcctgatgcagcatatgtgatgcttggcaacatagtagtttttgtcaagacaatgccatcattgtttgccccgttttatgaggacttctttgtaaacacttcagatccgtaccagacgagggctttgaagcttgaaatactgaccactattgccacagagtcatctattccggccatttttgaagaatttcaggattacattaaagatccagataggaaatttgtagcagataccgttgcggctattgcattgtgtgcccagaaacttccctctattgccacttcttgcctcgagggacttttggcacttgtattttatgaatcttttattagtaactcagttcacttagatggagaagatgctgttttggttcaagcaatcttgtcaatcaaagcaatagtgaaaatggatccagtatcccacgaaaaggtaattgtccgcttggttcgtggtttggacaaactcaaggaacctgcagcacgatccttgatcatttggatgtttggagagtatagcttcatgggggatctcactacaaagattgttcctcctgttctcaagtatcttgcgtggtccttcgttgctgaagtggtggaaacaaagcttcaaatcctaaattcttctgccaagaagaagacatggaagaattcaaaagcatagttgcatatgtcattgagttggctacgtgtgacttgaattatgatgttcgtgatcgtgctcgtttactatcaagactcttgccgtgctacatgactcaccaagggtcctcacatcaacctcagaatggtgatatctataaagagctagccaatcatatatttaatgggaagttgcagccaacatctcatccagcaagcaactatcgcatatatcttccaggttcactttcgcaggttgttcttcatgcagcccctggttatgcaccacttccaaagcctcaaagtatggaattaaaccataatgtcacggcagcaattagaggcaaggccaaactttctggaagtgactccgatgctgaatctggatcttcaacatatgagagcagctctgtttatgattcggagagtgaaggtgctggcctatcggacagggatactgttgaatcccatcaggctcaagaagataaccaggatgctccactggtacagatatatgatgctagtatacagcaaggccaggcaggtcaaaatactgaggaaaatttggcagatcttatcagtaccgatttgactgagttgatgtctaagtcagccttggaatcatggcttgatgaggctcctgctgagccagttgttcagaatttgacacagacatcgtctgccagagtttcttttacaaaccgcaactttgagcgaaaacctaaactgcacacattgttagacccatctggcagtaatggattaagcgttctatatgccttctcgcctgaggtttcacccagatcacgtttgctagtatgtgtagacctatattttgagaatgtcactacacagcagctaacagatataaccattgaatctgaagaggcttctagcagtgtggattttatagaccaaacatcagaaggatattcgggtgtccctactatcgttcctgtggaagggatacattcgttggccccacaacaaatggcaaagttggttcttcaggtccattttcatcaccatatcttgcctctaaagctgtctgtgttttgcaatgggaaaagacatccagcaaaacttcatcctgacattgcttatttcgttcgtccactacccatggacctaaatactttcctatgcaaggaaaaccaattgaggggaatgtttgagtatgcgaggaggtgcgctttcaaagatcatcttcagaagctaggtcacgaggacagtgcagagcacatcgataagaaccttcaggtggcccagagtgttgcttcaaaaatactgagcaatgctaatattcaccttgtctcaatggatatgccagtaaccttcagtgtcgatgacgcctctggcttgtgttggagattcagcggtgaaatcctgagcacttcaaaaccttgcctgattaccatcctggcggaagggcgtgcctctggtccgctggaccttgctgtgaaggtgaattctgaagatacggtgttcgccctgaatctcctgaacagagttgtggcgatcatagattgaggtgagcatgaaattgtacattatcaacaaatagaagaggtatttggcaagcgcgtgactatttgtaagaaagtcttgttgaataatagcatctccaatagctctaaaaaaagaattgtgaaatgattgagttttacagcttgatgtgaaaaaagtgagtataatggttgtgtactaagaataccagagaaaatcgaagagatgggtgtagtctttggatcggtggatcgtcgacattggtggcatacataaggaagtttgggttgaatggatttaataacatacgtcttgtatgtggttgatattttgatgcaaaaaagatcagggattacatgtccagataatgtctaagctagcgagcaagagtcagggtgcgtt

SEQ ID NO: 221760 - DNA, 3911 bp, Zea Mays
ctggttcgctactcttttcttcctctcctccggcgggccccggccccaaactagccaacggcggcgagatccagatccaccgcaccggacccggacccgcccaacgactccggccactttttacttactagccagcggcggcgaaatccagatctccatagcaccggacccggacccgcccgccccgctggaacaggatgttcggacttcaggcgagcggcgcggcggcctcgtgggtggtggggcggatgggcaccgacgcgcatctctacgacgaccccgacgacgcctccatccccgagctcctcgactcccgcttcgacgccgacaaggtcgacgccctcaagcgcctcctcgccctcatcgcgcagggcgtcgacgtcgcgcacctcttcccgcaggttgtcaagaatgtggcgtcgcagtcgctcgaggtcaagaagctcgtctacctctacctcctccactacgccgacaagcgccaaaacgaagcccttctttctattaacatcttccagaaggatttatcggatataaacccactggtgagggcttgggccttgcgcactatggctggcattagactacacgttgttgctccgcttgtgttggttgctatcaagaaatgtgccagggatccgtctgcgtatgtaaggaaatgtgctgcctacgcactttgtaagctgtgcgacttgattccagacgaaaatgcggctttggaggagatcgtggacaccttgttcagcgacaattcccctggagtagtaggagctgccgctgttgcatttaagtcggtctgtccaagttgtttaccgttagtatcaaaacatttccggaggctatgtgagaccctccctgatatcgaggaatggactcagatcgtcctcatcgagatcctcttgcgttatgtaatagccagacatgggttggtcaaggattctttactctttgcttcagatttaccgacagagattcatggcgttacagattcagatgctgttgctagcgtgcccacccaatctgattctatcgtcaatggggtttctgatactatatcaagcatcatgctgttccggcactacatcgaacaatgctcaggttcctctgatagagaaggcaataatttagaattatcgtctgtcaccgcaaacaacaacgatgatgtcacaattcttttgaaatgtacatcacctcttctatggagtcgaaatagtggagttgtacttgcagcagcaagtgtgcattggatcatggctcctattggggacatgaagaaaattgttggcccaattttgtttactctacggtcatctcctgatgcagcatatgtgatgcttggcaacatagtagtttttgtcaagacaatgccatcattgtttgccccgttttatgaggacttctttgtaaacacttcagatccgtaccagacgagggctttgaagcttgaaatactgaccactattgccacagagtcatctattccggccatttttgaagaatttcaggattacattaaagatccagataggaaatttgtagcagataccgttgcggctattgcattgtgtgcccagaaacttccctctattgccacttcttgcctcgagggacttttggcacttgtattttatgaatcttttattagtaactcagttcacttagatggagaagatgctgttttggttcaagcaatcttgtcaatcaaagcaatagtgaaaatggatccagtatcccacgaaaaggtatgttgtaatgttcaatcatgcattagagctgtaattgtccgcttggttcgtggtttggacaaactcaaggaacctgcagcacgatccttgatcatttggatgtttggagagtatagcttcatgggggatctcactacaaagattgttcctcctgttctcaagtatcttgcgtggtccttcgttgctgaagtggtggaaacaaagcttcaaatcctaaattcttctgccaaggttataatgcgttgtacagaagaagacatggaagaattcaaaagcatagttgcatatgtcattgagttggctacgtgtgacttgaattatgatgttcgtgatcgtgctcgtttactatcaagactcttgccgtgctacatgactcaccaagggtcctcacatcaacctcagaatggtgatatctataaagagctagccaatcatatatttaatgggaagttgcagccaacatctcatccagcaagcaactatcgcatatatcttccaggttcactttcgcaggttgttcttcatgcagcccctggttatgcaccacttccaaagcctcaaagtatggaattaaaccataatgtcacggcagcaattagaggcaaggccaaactttctggaagtgactccgatgctgaatctggatcttcaacatatgagagcagctctgtttatgattcggagagtgaaggtgctggcctatcggacagggatactgttgaatcccatcaggctcaagaagataaccaggatgctccactggtacagatatatgatgctagtatacagcaaggccaggcaggtcaaaatactgaggaaaatttggcagatcttatcagtaccgatttgactgagttgatgtctaagtcagccttggaatcatggcttgatgaggctcctgctgagccagttgttcagaatttgacacagacatcgtctgccagagtttcttttacaaaccgcaactttgagcgaaaacctaaactgcacacattgttagacccatctggcagtaatggattaagcgttctatatgccttctcgcctgaggtttcacccagatcacgtttgctagtatgtgtagacctatattttgagaatgtcactacacagcagctaacagatataaccattgaatctgaagaggcttctagcagtgtggattttatagaccaaacatcagaaggatattcgggtgtccctactatcgttcctgtggaagggatacattcgttggccccacaacaaatggcaaagttggttcttcaggtccattttcatcaccatatcttgcctctaaagctgtctgtgttttgcaatgggaaaagacatccagcaaaacttcatcctgacattgcttatttcgttcgtccactacccatggacctaaatactttcctatgcaaggaaaaccaattgaggggaatgtttgagtatgcgaggaggtgcgctttcaaagatcatcttcagaagctaggtcacgaggacagtgcagagcacatcgataagaaccttcaggtggcccagagtgttgcttcaaaaatactgagcaatgctaatattcaccttgtctcaatggatatgccagtaaccttcagtgtcgatgacgcctctggcttgtgttggagattcagcggtgaaatcctgagcacttcaaaaccttgcctgattaccatcctggcggaagggcgtgcctctggtccgctggaccttgctgtgaaggtgaattctgaagatacggtgttcgccctgaatctcctgaacagagttgtggcgatcatagattgaggtgagcatgaaattgtacattatcaacaaatagaagaggtatttggcaagcgcgtgactatttgtaagaaagtcttgttgaataatagcatctccaatagctctaaaaaaagaattgtgaaatgattgagttttacagcttgatgtgaaaaaagtgagtataatggttgtgtactaagaataccagagaaaatcgaagagatgggtgtagtctttggatcggtggatcgtcgacattggtggcatacataaggaagtttgggttgaatggatttaataacatacgtcttgtatgtggttgatattttgatgcaaaaaagatcagggattacatgtccagataatgtctaagctagcgagcaagagtcagggtgcgtt

SEQ ID NO: 221761 - DNA, 2887 bp, Zea Mays
ctcttttcttcctctcctccggcgggccccggccccaaactagccaacggcggcgagatccagatccaccgcaccggacccggacccgcccaacgactccggccactttttacttactagccagcggcggcgaaatccagatctccatagcaccggacccggacccgcccgccccgctggaacaggatgttcggacttcaggcgagcggcgcggcggcctcgtgggtggtggggcggatgggcaccgacgcgcatctctacgacgaccccgacgacgcctccatccccgagctcctcgactcccgcttcgacgccgacaaggtcgacgccctcaagcgcctcctcgccctcatcgcgcagggcgtcgacgtcgcgcacctcttcccgcaggttgtcaagaatgtggcgtcgcagtcgctcgaggtcaagaagctcgtctacctctacctcctccactacgccgacaaatgcttggcaacatagtagtttttgtcaagacaatgccatcattgtttgccccgttttatgaggacttctttgtaaacacttcagatccgtaccagacgagggctttgaagcttgaaatactgaccactattgccacagagtcatctattccggccatttttgaagaatttcagaatcttttattagtaactcagttcacttagatggagaagatgctgttttggttcaagcaatcttgtcaatcaaagcaatagtgaaaatggatccagtatcccacgaaaaggtaattgtccgcttggttcgtggtttggacaaactcaaggaacctgcagcacgatccttgatcatttggatgtttggagagtatagcttcatgggggatctcactacaaagattgttcctcctgttctcaagtatcttgcgtggtccttcgttgctgaagtggtggaaacaaagcttcaaatcctaaattcttctgccaaggttataatgcgttgtacagaagaagacatggaagaattcaaaagcatagttgcatatgtcattgagttggctacgtgtgacttgaattatgatgttcgtgatcgtgctcgtttactatcaagactcttgccgtgctacatgactcaccaagggtcctcacatcaacctcagaatggtgatatctataaagagctagccaatcatatatttaatgggaagttgcagccaacatctcatccagcaagcaactatcgcatatatcttccaggttcactttcgcaggttgttcttcatgcagcccctggttatgcaccacttccaaagcctcaaagtatggaattaaaccataatgtcacggcagcaattagaggcaaggccaaactttctggaagtgactccgatgctgaatctggatcttcaacatatgagagcagctctgtttatgattcggagagtgaaggtgctggcctatcggacagggatactgttgaatcccatcaggctcaagaagataaccaggatgctccactggtacagatatatgatgctagtatacagcaaggccaggcaggtcaaaatactgaggaaaatttggcagatcttatcagtaccgatttgactgagttgatgtctaagtcagccttggaatcatggcttgatgaggctcctgctgagccagttgttcagaatttgacacagacatcgtctgccagagtttcttttacaaaccgcaactttgagcgaaaacctaaactgcacacattgttagacccatctggcagtaatggattaagcgttctatatgccttctcgcctgaggtttcacccagatcacgtttgctagtatgtgtagacctatattttgagaatgtcactacacagcagctaacagatataaccattgaatctgaagaggcttctagcagtgtggattttatagaccaaacatcagaaggatattcgggtgtccctactatcgttcctgtggaagggatacattcgttggccccacaacaaatggcaaagttggttcttcaggtccattttcatcaccatatcttgcctctaaagctgtctgtgttttgcaatgggaaaagacatccagcaaaacttcatcctgacattgcttatttcgttcgtccactacccatggacctaaatactttcctatgcaaggaaaaccaattgaggggaatgtttgagtatgcgaggaggtgcgctttcaaagatcatcttcagaagctaggtcacgaggacagtgcagagcacatcgataagaaccttcaggtggcccagagtgttgcttcaaaaatactgagcaatgctaatattcaccttgtctcaatggatatgccagtaaccttcagtgtcgatgacgcctctggcttgtgttggagattcagcggtgaaatcctgagcacttcaaaaccttgcctgattaccatcctggcggaagggcgtgcctctggtccgctggaccttgctgtgaaggtgaattctgaagatacggtgttcgccctgaatctcctgaacagagttgtggcgatcatagattgaggtgagcatgaaattgtacattatcaacaaatagaagaggtatttggcaagcgcgtgactatttgtaagaaagtcttgttgaataatagcatctccaatagctctaaaaaaagaattgtgaaatgattgagttttacagcttgatgtgaaaaaagtgagtataatggttgtgtactaagaataccagagaaaatcgaagagatgggtgtagtctttggatcggtggatcgtcgacattggtggcatacataaggaagtttgggttgaatggatttaataacatacgtcttgtatgtggttgatattttgatgcaaaaaagatcagggattacatgtccagataatgtctaagctagcgagcaagagtcagggtgcgtt

SEQ ID NO: 221762 - DNA, 2050 bp, Zea Mays
cgacgaacacgcacgcgacgcgacgcagccttgtcacgccaggacaaatccagcgctccccaaagcagaaagaccgcgacccaaagcaagctcaagccgctccgctcctccagtctccagtctccaccgcccgccaaccccgagatatacctcccttcctctcgaagcttcgtctgcagacgaagtcgccggctcttccctcggcgctggtgccggtgggttgcctgtggcggtgggtgggtggccgggtggtggtgttgctgggatgcccgccgcgacggcgaccgcagcccgcctccgcgtgccgctgccaaaagccgcccaccactcgccctgctcgagccggcgccaccccgactgccgccgccgctgacgagacgagcggccacacgcttggcgcgcgccatggatgccttgtcccgccctgctgtcgtcatcgacaacggcaccgggtacacgaagatggggttcgcggggaacgtggagccctgcttcatcacccccactgtcgtcgccgtcaacgattccttctccggctccgcccagccggcggtgaggggcacccccgccagggggaactggctcgctcagcacagcgccggcgtcatggctgacctcgacttctacatcggcgacgaagcgctggcccgatcccgcgccagcagctcgcatagtttgagctatcccatccgcaacggccaggtggagaattgggataccatggagaggttctggcaacagtgcatcttcaattacctccggtgcgacccagaagatcattattttcttctaactgagagccctctgactgcccccgagacccgggagtacaccggagagatcatgttcgagacgttcaatgtgcctggcctctatattgcagtccaacctgtccttgcgctggctgctgggtacactacaaccaagtgtgaaatgacaggtgttgtagttgatgtgggtgatggggctacccatatcgttccggttgctgatggttatgtcattgggagcagtatcagatctattccaattacaggcaaggatgttacccagtttattcatcaacttctaaagaggtgagaacattccagcagaagaatcttttgatgtagcaagaaggattaaagaaatgtactgctatacttcttcggacattgtgaaggaattcaataaacatgacaaggagccatcaaagtacattaaacactggacgggcaccaaaccgaagactggtgcaaaatacacatgtgacattggatatgagcgattcctagggcctgagatcttcttcaacccagagatatataacaacgacttcaccactcctttgcaagttgttattgacaagtgcatccaatcatctccaatcgacacaaggagggctctttataagaatattgtcctgtctggaggctcgactatgttcaaagatttccataggaggttacagcgggacctaaagaagatagtggatgcacgggtccgtgcatctaatagccggcttattagtggggatgctaaggcccagcctatagaagtgaacgtggtcagtcatccgatccagagatatgcggtatggtttggtggctctgtgcttgcttcaaccgccgaattctacgaggcttgccacacaaaggcagagtacgaggagtacggtgccagcatctgccgaacgaatcctgtcttcaaagggatgtactgactcagagcggttccctgtggctgacgtcgtggatgatatccactcaaagcttaaatggggagaagtgacagtggtcgtggagacaggactgtcgagagggatcctgatcgtggggaagcatagccgtacgagctgtacaaaagagaagcgcaaatagataggtttatgtttcaccatacaatttagatgctggtaggcctgacaggatgggtttgccacccctgctgaattgggtggcattgtaatttgtagcgtcaacacttctggcggtgcgagattgctccttgtatacatgttgattcggcagcgatgttttctctctctcggtggcttagtagttggtactgg

SEQ ID NO: 221763 - DNA, 1193 bp, Zea Mays
cttttgcataggcatgcctgacactaaaatggatggcaattgcattcagcaggccatgtttcagttgtgaaatgacaggtgttgtagttgatgtgggtgatggggctacccatatcgttccggttgctgatggttatgtcattgggagcagtatcagatctattccaattacaggcaaggatgttacccagtttattcatcaacttctaaaggaaagaggtgagaacattccagcagaagaatcttttgatgtagcaagaaggattaaagaaatgtactgctatacttcttcggacattgtgaaggaattcaataaacatgacaaggagccatcaaagtacattaaacactggacgggcaccaaaccgaagactggtgcaaaatacacatgtgacattggatatgagcgattcctagggcctgagatcttcttcaacccagagatatataacaacgacttcaccactcctttgcaagttgttattgacaagtgcatccaatcatctccaatcgacacaaggagggctctttataagaatattgtcctgtctggaggctcgactatgttcaaagatttccataggaggttacagcgggacctaaagaagatagtggatgcacgggtccgtgcatctaatagccggcttattagtggggatgctaaggcccagcctatagaagtgaacgtggtcagtcatccgatccagagatatgcggtatggtttggtggctctgtgcttgcttcaaccgccgaattctacgaggcttgccacacaaaggcagagtacgaggagtacggtgccagcatctgccgaacgaatcctgtcttcaaagggatgtactgactcagagcggttccctgtggctgacgtcgtggatgatatccactcaaagcttaaatggggagaagtgacagtggtcgtggagacaggactgtcgagagggatcctgatcgtggggaagcatagccgtacgagctgtacaaaagagaagcgcaaatagataggtttatgtttcaccatacaatttagatgctggtaggcctgacaggatgggtttgccacccctgctgaattgggtggcattgtaatttgtagcgtcaacacttctggcggtgcgagattgctccttgtatacatgttgattcggcagcgatgttttctctctctcggtggcttagtagttggtactgg

SEQ ID NO: 221764 - DNA, 2638 bp, Zea Mays
gtcgccttcctactacaaaggacgcatctggccgacgccgaccaggcgactcctggtcagtgggcactgggcaggcactccggcactggctccttccttccctttccctgatccctcgtccagtcgtcctcctctgcccggtacagctgcgaagccggcactggctctgctctgctcgccagcagcaccgacctccactctacgtctccaccagaccaccagcaaggcgagctcctttttcactcccccaaatctctgaataaaaaatcgcgcaagcaacctcgctccaccggcctccgcaagttcgttcagtcaggtcaggtcccagcccacgcagcatttgacagcgcgaggcggttgcccagtcagctggggtggacggctttgatttgcttcgaagggagtgagattggttgaagccttcgaccaaggttgtcgatggattctgggatttgggcatctgtttggagcttcatcaagttcctgcctttcttctttgcgcttctcctcctgggcatcatcaaaggtgctttgtttggcccatgggcatggcttgtcatgacaattggaatttctgcacttattctaggcttatggcctatgcatgtgatttggacatattactgcatcatcagaaccaagatggtaggaccggtcgtaaagttgctgcttcttattgttgcaactgcggttttggttatatggctaataattggcgtcgtgggaagcatccttgctggtttggcctatggctttctcgcaccagtaatggctacatttgatgcgattggggaaggaaaagaaaatccacttgttcactgttttttggatggaacatggagcactatcacaggaagctgtacagttgtcagggacatgaaagacatgttggtacactcatatttttcaatcatggatgaagttcgtcttcatgcaccacccgacggcaagccatatgagataagattgctacaaattcctggtgcaatatttgctgctgcttgtgggcttgtagtggatgcaataatgttcacactgattgccttgtacaagttccccgttatgctattcaaaggatggaagcggttgattgaagatcttattggcagagaaggaccttttcttgagacagcttgcatgccatttgctggtcttgcaattcttctctggccatttgcagttataggagcttttatagcctctgttatttgcagtgttccttttggtgtatatgctgctgtggtggtttatcaggaatcctcacttttcttgggactgtcttatgcaatatcatcagtatccatctttgatgaatatacaaatgacgtacttgacatggcaccaggatcttgctttcctaggtttaaatataggacaaatgaagcttcctcacatggtggctctctctcgagacccgcttcattcaaggacaagcatgatggaaagaaagcccctcagcgtgtaacatcatttaaaagtagctttgatgagttcaatccattcaagttgctagatcaccttttcatagagtgtaagcaccatggcaaggatctggtcgctgaaggagtgataaccccaaaagatatagaaggaacaaaggcaggcaaagccagcactggggtacttaatgttgggttaccagcatatgttatccttaaggcactcctccgatctgctaaagccaattctgatggtctcgttctaagtaatggatctgagataacatccgacaataggcctacgagtaaaatctttgagtggttttttgaccctctgatggtaatcaaagatcaaatcaaagctgaaaacttcacagaagaagaggaagcataccttgagaagcaagtgctcttgattagtgatccaaagcgcatcaaggagaatctcattcggcttccaccattgagtgagagaaaacaagcagaaatagaagcatttgctcgaaggttgcaagggatcacaaagtcgatatcaaggtaccccacatccaagcgtcgcttcgacgcccttgtgaaggctctttcagaagagcttgcaaggacaatgggtggtaatcaatctgccaatgggtctcaggtccggaagataagaagtggtatcgtccgaatgcttagtcagagatcactagggaaaacaacaggcatcccgggcgatgatcatgaggctcagctaacaagcgatggtttcacttcatgatgttctggaggtgttcaactgtaacctcagtttgaaaaggagatactacttttctgtgttattttgctaactggatacaaagaactgacacttctgtatgaagagtttaacctcaaccatctcgaggatgagttgtttgttttcaggactgtatctggacaacactgtagtaatacttcgtaacagaaagcaaaagatatgattcgccctagtgccaccagttacatgccctcgttcgttctagccgagttggatgcctttggattattttttttactccgactgtcttggtgtgcttgtcttcagttatttgtccatacaatatacaaatgatctaacactgctgaaaaacgatagcccaagacaaatggagaagcgagagtattaaattctccataaacaacattatcattaggtttaagtgtggcaaaggaaattccat

SEQ ID NO: 221765 - DNA, 2548 bp, Zea Mays
cgccttcctactacaaaggacgcatctggccgacgccgaccaggcgactcctggtcagtgggcactgggcaggcactccggcactggctccttccttccctttccctgatccctcgtccagtcgtcctcctctgcccggtacagctgcgaagccggcactggctctgctctgctcgccagcagcaccgacctccactctacgtctccaccagaccaccagcaaggcgagctcctttttcactcccccaaatctctgaataaaaaatcgcgcaagcaacctcgctccaccggcctccgcaagttcgttcagtcaggtcaggtcccagcccacgcagcatttgacagcgcgaggcggttgcccagtcagctggggtggacggctttgatttgcttcgaagggagtgagattggttgaagccttcgaccaaggttgtcgatggattctgggatttgggcatctgtttggagcttcatcaagttcctgcctttcttctttgcgcttctcctcctgggcatcatcaaaggtgctttgtttggcccatgggcatggcttgtcatgacaattggaatttctgcacttattctaggcttatggcctatgcatgtgatttggacatattactgcatcatcagaaccaagatggtaggaccggtcgtaaagttgctgcttcttattgttgcaactgcggttttggttatatggctaataattggcgtcgtgggaagcatccttgctggtttggcctatggctttctcgcaccagtaatggctacatttgatgcgattggggaaggaaaagaaaatccacttgttcactgttttttggatggaacatggagcactatcacaggaagctgtacagttgtcagggacatgaaagacatgttggtacactcatatttttcaatcatggatgaagttcgtcttcatgcaccacccgacggcaagccatatgagataagttccccgttatgctattcaaaggatggaagcggttgattgaagatcttattggcagagaaggaccttttcttgagacagcttgcatgccatttgctggtcttgcaattcttctctggccatttgcagttataggagcttttatagcctctgttatttgcagtgttccttttggtgtatatgctgctgtggtggtttatcaggaatcctcacttttcttgggactgtcttatgcaatatcatcagtatccatctttgatgaatatacaaatgacgtacttgacatggcaccaggatcttgctttcctaggtttaaatataggacaaatgaagcttcctcacatggtggctctctctcgagacccgcttcattcaaggacaagcatgatggaaagaaagcccctcagcgtgtaacatcatttaaaagtagctttgatgagttcaatccattcaagttgctagatcaccttttcatagagtgtaagcaccatggcaaggatctggtcgctgaaggagtgataaccccaaaagatatagaaggaacaaaggcaggcaaagccagcactggggtacttaatgttgggttaccagcatatgttatccttaaggcactcctccgatctgctaaagccaattctgatggtctcgttctaagtaatggatctgagataacatccgacaataggcctacgagtaaaatctttgagtggttttttgaccctctgatggtaatcaaagatcaaatcaaagctgaaaacttcacagaagaagaggaagcataccttgagaagcaagtgctcttgattagtgatccaaagcgcatcaaggagaatctcattcggcttccaccattgagtgagagaaaacaagcagaaatagaagcatttgctcgaaggttgcaagggatcacaaagtcgatatcaaggtaccccacatccaagcgtcgcttcgacgcccttgtgaaggctctttcagaagagcttgcaaggacaatgggtggtaatcaatctgccaatgggtctcaggtccggaagataagaagtggtatcgtccgaatgcttagtcagagatcactagggaaaacaacaggcatcccgggcgatgatcatgaggctcagctaacaagcgatggtttcacttcatgatgttctggaggtgttcaactgtaacctcagtttgaaaaggagatactacttttctgtgttattttgctaactggatacaaagaactgacacttctgtatgaagagtttaacctcaaccatctcgaggatgagttgtttgttttcaggactgtatctggacaacactgtagtaatacttcgtaacagaaagcaaaagatatgattcgccctagtgccaccagttacatgccctcgttcgttctagccgagttggatgcctttggattattttttttactccgactgtcttggtgtgcttgtcttcagttatttgtccatacaatatacaaatgatctaacactgctgaaaaacgatagcccaagacaaatggagaagcgagagtattaaattctccataaacaacattatcattaggtttaagtgtggcaaaggaaattccat

SEQ ID NO: 221766 - DNA, 3128 bp, Zea Mays
cgccttcctactacaaaggacgcatctggccgacgccgaccaggcgactcctggtcagtgggcactgggcaggcactccggcactggctccttccttccctttccctgatccctcgtccagtcgtcctcctctgcccggtacagctgcgaagccggcactggctctgctctgctcgccagcagcaccgacctccactctacgtctccaccagaccaccagcaaggcgagctcctttttcactcccccaaatctctgaataaaaaatcgcgcaagcaacctcgctccaccggcctccgcaagttcgttcagtcaggtcaggtcccagcccacgcagcatttgacagcgcgaggcggttgcccagtcagctggggtggacggctttgatttgcttcgaagggagtgagattggttgaagccttcgaccaaggttgtcgatggattctgggatttgggcatctgtttggagcttcatcaagttcctgcctttcttctttgcgcttctcctcctgggcatcatcaaaggtgctttgtttggcccatgggcatggcttgtcatgacaattggaatttctgcacttattctaggcttatggcctatgcatgtgatttggacatattactgcatcatcaggtagagtttgcagtcctgaaaggaaagtcatgcaatgtggtgtatttggatgtgcttatcacctttttatgaaagcagaaccaagatggtaggaccggtcgtaaagttgctgcttcttattgttgcaactgcggttttggttatatggctaataattggcgtcgtgggaagcatccttgctggtttggcctatggctttctcgcaccagtaatggctacatttgatgcgattggggaaggaaaagaaaatccacttgttcactgttttttggatggaacatggagcactatcacaggaagctgtacagttgtcagggacatgaaagacatgttggtacactcatatttttcaatcatggatgaagttcgtcttcatgcaccacccgacggcaagccatatgagataaggtcttagttctactttctatttgttattgttttcggccttttcattcttccttataactatatgtgttaacaagtgagtagcaattgtactaaatgagacattactttcatccggtactctacttaaaatattttgtctgtttgttatcttggttagcttttgttacacatcataaacagttcatgttaacaataaaatacactgtatgtggtcacaagaaagacaagaaatacacaattaattaatacttgagaactcactttaaaaagaaatgatatgggggagtgtcccatgtaaattgaagttcagtattcttttaaattttgatctgattgctaatatttaaaaaccattgtagtgattttcttttaattgaggaattccgtatggcataaaataattaatttccccagattgctacaaattcctggtgcaatatttgctgctgcttgtgggcttgtagtggatgcaataatgttcacactgattgccttgtacaagttccccgttatgctattcaaaggatggaagcggttgattgaagatcttattggcagagaaggaccttttcttgagacagcttgcatgccatttgctggtcttgcaattcttctctggccatttgcagttataggagcttttatagcctctgttatttgcagtgttccttttggtgtatatgctgctgtggtggtttatcaggaatcctcacttttcttgggactgtcttatgcaatatcatcagtatccatctttgatgaatatacaaatgacgtacttgacatggcaccaggatcttgctttcctaggtttaaatataggacaaatgaagcttcctcacatggtggctctctctcgagacccgcttcattcaaggacaagcatgatggaaagaaagcccctcagcgtgtaacatcatttaaaagtagctttgatgagttcaatccattcaagttgctagatcaccttttcatagagtgtaagcaccatggcaaggatctggtcgctgaaggagtgataaccccaaaagatatagaaggaacaaaggcaggcaaagccagcactggggtacttaatgttgggttaccagcatatgttatccttaaggcactcctccgatctgctaaagccaattctgatggtctcgttctaagtaatggatctgagataacatccgacaataggcctacgagtaaaatctttgagtggttttttgaccctctgatggtaatcaaagatcaaatcaaagctgaaaacttcacagaagaagaggaagcataccttgagaagcaagtgctcttgattagtgatccaaagcgcatcaaggagaatctcattcggcttccaccattgagtgagagaaaacaagcagaaatagaagcatttgctcgaaggttgcaagggatcacaaagtcgatatcaaggtaccccacatccaagcgtcgcttcgacgcccttgtgaaggctctttcagaagagcttgcaaggacaatgggtggtaatcaatctgccaatgggtctcaggtccggaagataagaagtggtatcgtccgaatgcttagtcagagatcactagggaaaacaacaggcatcccgggcgatgatcatgaggctcagctaacaagcgatggtttcacttcatgatgttctggaggtgttcaactgtaacctcagtttgaaaaggagatactacttttctgtgttattttgctaactggatacaaagaactgacacttctgtatgaagagtttaacctcaaccatctcgaggatgagttgtttgttttcaggactgtatctggacaacactgtagtaatacttcgtaacagaaagcaaaagatatgattcgccctagtgccaccagttacatgccctcgttcgttctagccgagttggatgcctttggattattttttttactccgactgtcttggtgtgcttgtcttcagttatttgtccatacaatatacaaatgatctaacactgctgaaaaacgatagcccaagacaaatggagaagcgagagtattaaattctccataaacaacattatcattaggtttaagtgtggcaaaggaaattccat

SEQ ID NO: 221767 - DNA, 2164 bp, Zea Mays
ttcctttgattttgtttagttaaatgcccataaccaccggcaatccagtctccacgcccggttattctggggtggacggctttgatttgcttcgaagggagtgagattggttgaagccttcgaccaaggttgtcgatggattctgggatttgggcatctgtttggagcttcatcaagttcctgcctttcttctttgcgcttctcctcctgggcatcatcaaaggtgctttgtttggcccatgggcatggcttgtcatgacaattggaatttctgcacttattctaggcttatggcctatgcatgtgatttggacatattactgcatcatcaggtagagtttgcagtcctgaaaggaaagtcatgcaatgtggtgtatttggatgtgcttatcacctttttatgaaagcagaaccaagatggtaggaccggtcgtaaagttgctgcttcttattgttgcaactgcggttttggttatatggctaataattggcgtcgtgggaagcatccttgctggtttggcctatggctttctcgcaccagtaatggctacatttgatgcgattggggaaggaaaagaaaatccacttgttcactgttttttggatggaacatggagcactatcacaggaagctgtacagttgtcagggacatgaaagacatgttggtacactcatatttttcaatcatggatgaagttcgtcttcatgcaccacccgacggcaagccatatgagataagtgttccttttggtgtatatgctgctgtggtggtttatcaggaatcctcacttttcttgggactgtcttatgcaatatcatcagtatccatctttgatgaatatacaaatgacgtacttgacatggcaccaggatcttgctttcctaggtttaaatataggacaaatgaagcttcctcacatggtggctctctctcgagacccgcttcattcaaggacaagcatgatggaaagaaagcccctcagcgtgtaacatcatttaaaagtagctttgatgagttcaatccattcaagttgctagatcaccttttcatagagtgtaagcaccatggcaaggatctggtcgctgaaggagtgataaccccaaaagatatagaaggaacaaaggcaggcaaagccagcactggggtacttaatgttgggttaccagcatatgttatccttaaggcactcctccgatctgctaaagccaattctgatggtctcgttctaagtaatggatctgagataacatccgacaataggcctacgagtaaaatctttgagtggttttttgaccctctgatggtaatcaaagatcaaatcaaagctgaaaacttcacagaagaagaggaagcataccttgagaagcaagtgctcttgattagtgatccaaagcgcatcaaggagaatctcattcggcttccaccattgagtgagagaaaacaagcagaaatagaagcatttgctcgaaggttgcaagggatcacaaagtcgatatcaaggtaccccacatccaagcgtcgcttcgacgcccttgtgaaggctctttcagaagagcttgcaaggacaatgggtggtaatcaatctgccaatgggtctcaggtccggaagataagaagtggtatcgtccgaatgcttagtcagagatcactagggaaaacaacaggcatcccgggcgatgatcatgaggctcagctaacaagcgatggtttcacttcatgatgttctggaggtgttcaactgtaacctcagtttgaaaaggagatactacttttctgtgttattttgctaactggatacaaagaactgacacttctgtatgaagagtttaacctcaaccatctcgaggatgagttgtttgttttcaggactgtatctggacaacactgtagtaatacttcgtaacagaaagcaaaagatatgattcgccctagtgccaccagttacatgccctcgttcgttctagccgagttggatgcctttggattattttttttactccgactgtcttggtgtgcttgtcttcagttatttgtccatacaatatacaaatgatctaacactgctgaaaaacgatagcccaagacaaatggagaagcgagagtattaaattctccataaacaacattatcattaggtttaagtgtggcaaaggaaattccat

SEQ ID NO: 221768 - DNA, 576 bp, Zea Mays
caaatatgtagaggttgcttcgaacctgtgacctcaatgagacagttctcatcgctgcaccaggtgcccttatacgtggcgacaaagatggcatccatcaggaagtcttccttcatggtcccatctgctgacacctatgctcgtgctgccgttcgtcacattggatacgagcctaggtgcacaccatactggccacactctgtcgtgtggttcttgatctccattcttcccgagtcccttatcgacagcgtgcgcctgggcatgtgcattaagatccgcaagaaggggctggccaaggacgccaagaagaaggcgctgtgattgatgtttcagaatgcatgttcagattcgcacatttcctcatcacctgtagtagacacgtgccttgctgtagtcactttattagctaccattacctcctgagtctgttaagaatcgagaatgtcattgttccatccgcggttatgatgatgaaaaatacgattcttcaattcaaaatgtaacactaatacgagtaatgatgcatgaaattaacttgaagaagttgtgcaactcagttgtttttctgaaccattt

SEQ ID NO: 221769 - DNA, 750 bp, Zea Mays
cttgcgtgttggtcatgccagattctgatgcaatcatagggggagttagttagatatgcattcagatgctagaattagttgggtactgaaattccatcagtctaggattactcgaaatgtctagatctgacgtatgatccttctccttaggggaaagaaaaagataggtatgttgaccaattctcaagatgcctctatgttgagtacaagagcaagggtattgatgtgcaatgccaggtgcccttatacgtggcgacaaagatggcatccatcaggaagtcttccttcatggtcccatctgctgacacctatgctcgtgctgccgttcgtcacattggatacgagcctaggtgcacaccatactggccacactctgtcgtgtggttcttgatctccattcttcccgagtcccttatcgacagcgtgcgcctgggcatgtgcattaagatccgcaagaaggggctggccaaggacgccaagaagaaggcgctgtgattgatgtttcagaatgcatgttcagattcgcacatttcctcatcacctgtagtagacacgtgccttgctgtagtcactttattagctaccattacctcctgagtctgttaagaatcgagaatgtcattgttccatccgcggttatgatgatgaaaaatacgattcttcaattcaaaatgtaacactaatacgagtaatgatgcatgaaattaacttgaagaagttgtgcaactcagttgtttttctgaaccattt

SEQ ID NO: 221770 - DNA, 6884 bp, Zea Mays
ctagagttcaatgggaagtagagtatataatacctgtggagatgatcgataaagtccgatacgacattcagacatgtcgccgatcagatcgcctgcctgatgagacgacaacaaaatgcaacttctctgattgactcgattgatcaaagaagacttcgacctagggctaggaagcagaaactgcagaaggtgccggtgggttcacgtggaccccgatcctcgagcacctcggatggtcgacgcgtggagatccttgtgatggaaggcgcgcgagatggagcacctcccagtctcccaccgtcccgctcggttgctcttgctcggatcgctcgcgcacggcactggctttcccgtcgcagtcatgaatgcggcaccgagcacgtactcggtcaccgacaggtgggccctaggtcgccgagtcgctgacaatagcgcaatggccagcaccaatttgacaaatcaccacccgccaactctcccactgccacctggggcccatgtgtaagctcgctctccacgatcctccgctgcagctgcaggcggaacgcatcctgggcgccgggactggcgtgggcgcgtggcccacaacccatcgtctccaccgaataggagtacaggacacaccggactcgctgctctcccccgcgttaccgcgtagccgatgcccgatggcttgatcagatcccccacccggacccggcccagatctgtcgtcgccgccgcagtcgccatgggtgaccactctgactccgattcctcccccaagtcctcctcgtcctcgtcctccccctccgcccgccgccgttcctcgccgcagcgcagccgggcccacactgacgagaccggcagcagcgacggcgtcctcgtcgagcttcctactcaggaagcgcggagccccggggccgaccctgacagcggcgtcctcgtcaacatgcccgctgacgacgccaccagcggcgagaccttcgacgacgcccccgaagatctcgcggccgccggctcgctctccgcacgctcgctggacgagtccatagccgtcatcgacttccctgaggtttccagcaccagcgccgagctccgcaagtaccaggaagagaaggctgtatttgctcgggaggcagtggcactccggaggttgctacaggagatgttggggcaggaagcttcagttgcgttgcatggagaggacgctgacgagacactgttgcattcaatgctggacgactgctcgaggcttgtgcttgaacttaactcgatggcacgggccagggagcaagagattgagagcctacatgccagggctgcagaggcagaggtatcaagtgaggttgctcatgtatacctgggttcgtggagagaagggtctgagcaagctgttgggcggatgcttgcatcaattgatgctgtggttaggcaagatgatgccagctttgagggtgctgaccaggatgggatttctattctggaaaggaagacttcattgcttgtggagaggtacaggcaggcctcgatgggtattgaacagcttgagcaaattttagctgaggtgaagcctggtttcgcggccacagggcacggtgaccttgctaccactttaagtgttctttcagatgaattggttggtagcaagagaaatgaggtggatttactgcagaagatgaatgcttttgctgaagagaagaaggctattgctgatgaacttgaggaagtgaaagctgctaggaatgcagtgaatgctgaggcaagcaaagcaaaggcagagtttgagcagatggagcaaaagttatcaacgactaaggagaagctcagcatggctgttacgaagggcaagtcactggtgcaacaccgtgattccttgaagcaggccttggctgaaaagacgggtgagcttcagagttgcatgacagaattgcaaaagaagtctgatgccctgcaagcagctgagagcagggttgatgagctacagatttttttagatgaaaagacaagtgagcatgaaaagtgcttggatgagcttcgagacacatatagtgcatgggaagctgctaagaccagcatggagcaattaaatgaatcaaaaagtgccctgcatgcttccctttcactaaaggatggggtttttgaacgcattgaagatatcatgtcagaggcaacatttccagaagatcttctttccttggagatgacagataggttgggatggttagttgagcagaagaaaattgcagatatgatcttctcagagcatcagaaagttaaagaaatcttgagctctgttgacattccacattctgtcttaacctctgaacttgattcccagatcagttggcttgccagctcactgaaccaggccaaagatgatgcggtccggttgcgtgatgagtctgctgaaatgttggctaaaatggctgcacatgaatcaaagctggtgtcaatgcatgaggaaattgaccgtttgacaattattctactggaagagaaacaggaaaaggatattcttttaaatgaacattctgaattgatgtccctatacaaagctgctgttaataagttgtcccttgtctcatcacaaaataatgagttgctaaaggcatttgcggaattttttgatgtcacattggagggtagtcagtctatggatattgccaaattggtacagcagggcctcagaaatatccaacaaagaccaaaatcttctcctattgagagtggcagctttgagaagctacaagcactactgtataccctagaccaggaatcaacactatgtaagatgattcttgaagaagacatgattaacagatctgagaggactggtgaacttcaaagaatggctgaggagattattgttctgaaaaatgagaaggtatcactgcagaaggaggttgaacgggtggaggagagatcagcattgcttagagagaagctgtcaatggctgtaaagaagggcaagggtctggtacatgagcgtgaaggactcaagcaagctctcgacgagaagagatctcaaatagagaatttgaaacaagttttggaagggaagagctctgagatagagaagttaaaacatgctctggatgaaaataagtctgtaacagagaatgtgaagcaagttttggacgggaaaaacactgagattgaaaggcttaaacatgctctgggtgatagttgcgtggaaacagaaaacttaaaacaagcttttgctgagaaaacctctgaagcatataaaataaaacaagaactggatgcaaagaacatggatattgagaatctaagaggtgcgatagagtcaagagaatctgccatgacagatctcagagagcatgttgaacatctattgtcgtcgcaggttgcacgtttggaaaagttgcaagtagatattgttacccttaatgatgaaaaggtgaaattagaaagcatgttggaagaagccagagcttcctgggacactcttgctgattcaatatcaagccttactcttcctattgatcagccttttgaggggcctatggaaaagtttagccagattgcccaatacatccaggaatctcaagttgctaagagttctcttgaaaatgagctacagaaagcaaatgagcaaattaccttacatgctagcaggcattctgatgccctttccacaataaacatgttagaacatgagttgagtaaactaaaagatcatatttcttccatttctgaagaaaaacgtcaaatgcagttaaatacttctgctgtacaggaggagttggagaaaacaaacgaggaactggcaatcaatttcaggaaccttgaaagtgccaacaccaccattaattcactacaagatgcactatcacaggctagatcaaatatttttattcttgctgctgaaaagaatgaagctgaagctaaatatgaaacagaaataaatgctcttaatgctgagctaaccaaatgtttggaggagttggataaaactcatgggcacttacaaagtcattcaacagaatatcatggttaccttgagaagcttggcatgtttatgatggatgatagtctcttgtctctgatagctgaagaatatggaaagacattcaacagcttgagagatatgtgtcttatagtcaagagtatgcatgagcagctttctgtgaagagttttcagaatgattcaattgtggaggattcagaactctcatcacttttatctcttccggactatgagagctttgttagagaaagattggtcaagaacataaatagaaaagggaatattgatgacacttcatccttctctactattgttgaacagttgagcaaccaaactgaatacctttctagttttttaaaagatttgtcaacctacatgaatagcaatattattgtggtgcttcgttctctgcaactagtgagcaacacctttgcccatactctagaagagcatgacatgttgaaggttgaattggggaacaaggatgctcataacagagctcaagaatctgaagtgctttctctacaaaaagatctgagagcaatgtcatcaaaatgtatttattgcgtccaacaaattgaaattgtttttgacgatatggttgatcttggatatgcaatagacttggctacaggcagctcaagcatagggtctgaactagaggtaactgtgtctgatctgaagaatgaggataccagtgattatagtaaggtggctgatactttgcttgctacaattgacacacttaagtccaagtctgaaaaattatctaccattaaggggcttgtgataacttcattggatgacttcaaaatgaagctgaaacaagctgaagcagctgctgaaactgcttcacatgagcatcagttgtctgttgaaagggtatgcatgctggagaaagaactcaaaatattacaggatgagtgcaacaaaatggaactaaatattcaagagtataaggaaagggagggtgcattgaaggcaagggagttagagttgctatcagttgagcacactcaaatttcagcagacagaggtttaactgacaatgcaatttcaaaagatcaaacggaagctcttgttgagaagataagtaagttaaatatgctgtcaggcgagtcaaatgtgcagagggaagaggctacaagtccgcttgacaaactttttgttgtcattgatgaattcagtgcacttcaacacgaggttgagaccttaagatatgaaaatgaagatttacagttaaatattgaatcctatacccgtgaaattgaacagctaagagaggtctccagaaatagtgatctaactaatagggagttggaatccaaaggaagtgagcttcttgaggtagctgttagtatggagcgaatgattcagcggttaggatatcttggaggaaaagatgtactagaagataacaaacctgctagcacacaagctctcttatcgaagctggaaaagctaataatagcttcaagtactgaatctgggaattctaaatccataatacaggagctgggagcaaagctgcagtcaagggaaaaggcagttgatgagctatcaacaaaagtaaagatgctcgaggatttgtgccatgcacaactttctcagccagaacctagtaaagacagatcatttgaagcatcttcctcaacaattgggtcagatatgtctgatattgaagatgcgggaccagtgggcaagacaacatcagtttcatctgtttctacagctgcacatgctagaacaatgcggaaggggtcagcggatcatcttgttgtcaacattggttcagagtcagaacgattgattgctgcacaagattcagatgacaaggggcgtataaaatcgctccatacatctggcttcattccagctcagggaaagcacatcgctgatagggtcgatgccttctgggtctcggggagccaaattctgatgaaccggccacgagcaaggctagggcttatgttgtactggctggctgtgcacctatggttgatgggcagcatcttgtgacaccgcttctcaataccgagacccatctcataattgtacaatagcacgtattagcagtttcttcttccattcatacaatacatggtagatgttagaaataccatttttttcattgtcttcctcctgctgagatttgcacttgagcagtatgtgttgaatttttgcacacaagatgtaacgcgcagaaaaaataacgttgtcattctttggtatagtgaagaggtggtaattgtatttgtagatgtggtggccctgatcacctggtgggccccatcatcgtaaattcgttgtttgaaattgcgtgcgtttgaggtctgacaatgtagaggccttatgggtcgacctttgacgtatgaatagaaacgtatatagttggttacacttttcgctcctccatgaataattttcgattggaggtgactggttatacagtcacaaatctttcctccaaaaaacataaataaaggagtgaatatgtatttgttatcatgaatctgtgtagtttcataagggataaggcataaatcttcatggcatcatttgtgtttttccacacaatttgtaatgcaaaagaatgtagggtgtttcaaccaaacaacaagaaacaaaaaagatttaaatacatccttaacatactaacatttttacggtggggctgctcatttaaactggactggaaacaaaataacaccgtaaaaatgttggcttttgacaaatctgacactgaatacgccaaagaccacagttgttaccaaaagaaatgcagagttccaatctctcactctcacctttcagacaaccacaggaaccagctggtacaacttgacggtccaccttctaaataaccagaatttgctacgtaagttctgtacaacagcaggacacatccctg

SEQ ID NO: 221771 - DNA, 6040 bp, Zea Mays
gcaggcggaacgcatcctgggcgccgggactggcgtgggcgcgtggcccacaacccatcgtctccaccgaataggagtacaggacacaccggactcgctgctctcccccgcgttaccgcgtagccgatgcccgatggcttgatcagatcccccacccggacccggcccagatctgtcgtcgccgccgcagtcgccatgggtgaccactctgactccgattcctcccccaagtcctcctcgtcctcgtcctccccctccgcccgccgccgttcctcgccgcagcgcagccgggcccacactgacgagaccggcagcagcgacggcgtcctcgtcgagcttcctactcaggaagcgcggagccccggggccgaccctgacagcggcgtcctcgtcaacatgcccgctgacgacgccaccagcggcgagaccttcgacgacgcccccgaagatctcgcggccgccggctcgctctccgcacgctcgctggacgagtccatagccgtcatcgacttccctgaggtttccagcaccagcgccgagctccgcaagtaccaggaagagaaggctgtatttgctcgggaggcagtggcactccggaggttgctacaggagatgttggggcaggaagcttcagttgcgttgcatggagaggacgctgacgagacactgttgcattcaatgctggacgactgctcgaggcttgtgcttgaacttaactcgatggcacgggccagggagcaagagattgagagcctacatgccagggctgcagaggcagaggtatcaagtgaggttgctcatgtatacctgggttcgtggagagaagggtctgagcaagctgttgggcggatgcttgcatcaattgatgctgtggttaggcaagatgatgccagctttgagggtgctgaccaggatgggatttctattctggaaaggaagacttcattgcttgtggagaggtacaggcaggcctcgatgggtattgaacagcttgagcaaattttagctgaggtgaagcctggtttcgcggccacagggcacggtgaccttgctaccactttaagtgttctttcagatgaattggttggtagcaagagaaatgaggtggatttactgcagaagatgaatgcttttgctgaagagaagaaggctattgctgatgaacttgaggaagtgaaagctgctaggaatgcagtgaatgctgaggcaagcaaagcaaaggcagagtttgagcagatggagcaaaagttatcaacgactaaggagaagctcagcatggctgttacgaagggcaagtcactggtgcaacaccgtgattccttgaagcaggccttggctgaaaagacgggtgagcttcagagttgcatgacagaattgcaaaagaagtctgatgccctgcaagcagctgagagcagggttgatgagctacagatttttttagatgaaaagacaagtgagcatgaaaagtgcttggatgagcttcgagacacatatagtgcatgggaagctgctaagaccagcatggagcaattaaatgaatcaaaaagtgccctgcatgcttccctttcactaaaggatggggtttttgaacgcattgaagatatcatgtcagaggcaacatttccagaagatcttctttccttggagatgacagataggttgggatggttagttgagcagaagaaaattgcagatatgatcttctcagagcatcagaaagttaaagaaatcttgagctctgttgacattccacattctgtcttaacctctgaacttgattcccagatcagttggcttgccagctcactgaaccaggccaaagatgatgcggtccggttgcgtgatgagtctgctgaaatgttggctaaaatggctgcacatgaatcaaagctggtgtcaatgcatgaggaaattgaccgtttgacaattattctactggaagagaaacaggaaaaggatattcttttaaatgaacattctgaattgatgtccctatacaaagctgctgttaataagttgtcccttgtctcatcacaaaataatgagttgctaaaggcatttgcggaattttttgatgtcacattggagggtagtcagtctatggatattgccaaattggtacagcagggcctcagaaatatccaacaaagaccaaaatcttctcctattgagagtggcagctttgagaagctacaagcactactgtataccctagaccaggaatcaacactatgtaagatgattcttgaagaagacatgattaacagatctgagaggactggtgaacttcaaagaatggctgaggagattattgttctgaaaaatgagaaggtatcactgcagaaggaggttgaacgggtggaggagagatcagcattgcttagagagaagctgtcaatggctgtaaagaagggcaagggtctggtacatgagcgtgaaggactcaagcaagctctcgacgagaagagatctcaaatagagaatttgaaacaagttttggaagggaagagctctgagatagagaagttaaaacatgctctggatgaaaataagtctgtaacagagaatgtgaagcaagttttggacgggaaaaacactgagattgaaaggcttaaacatgctctgggtgatagttgcgtggaaacagaaaacttaaaacaagcttttgctgagaaaacctctgaagcatataaaataaaacaagaactggatgcaaagaacatggatattgagaatctaagaggtgcgatagagtcaagagaatctgccatgacagatctcagagagcatgttgaacatctattgtcgtcgcaggttgcacgtttggaaaagttgcaagtagatattgttacccttaatgatgaaaaggtgaaattagaaagcatgttggaagaagccagagcttcctgggacactcttgctgattcaatatcaagccttactcttcctattgatcagccttttgaggggcctatggaaaagtttagccagattgcccaatacatccaggaatctcaagttgctaagagttctcttgaaaatgagctacagaaagcaaatgagcaaattaccttacatgctagcaggcattctgatgccctttccacaataaacatgttagaacatgagttgagtaaactaaaagatcatatttcttccatttctgaagaaaaacgtcaaatgcagttaaatacttctgctgtacaggaggagttggagaaaacaaacgaggaactggcaatcaatttcaggaaccttgaaagtgccaacaccaccattaattcactacaagatgcactatcacaggctagatcaaatatttttattcttgctgctgaaaagaatgaagctgaagctaaatatgaaacagaaataaatgctcttaatgctgagctaaccaaatgtttggaggagttggataaaactcatgggcacttacaaagtcattcaacagaatatcatggttaccttgagaagcttggcatgtttatgatggatgatagtctcttgtctctgatagctgaagaatatggaaagacattcaacagcttgagagatatgtgtcttatagtcaagagtatgcatgagcagctttctgtgaagagttttcagaatgattcaattgtggaggattcagaactctcatcacttttatctcttccggactatgagagctttgttagagaaagattggtcaagaacataaatagaaaagggaatattgatgacacttcatccttctctactattgttgaacagttgagcaaccaaactgaatacctttctagttttttaaaagatttgtcaacctacatgaatagcaatattattgtggtgcttcgttctctgcaactagtgagcaacacctttgcccatactctagaagagcatgacatgttgaaggttgaattggggaacaaggatgctcataacagagctcaagaatctgaagtgctttctctacaaaaagatctgagagcaatgtcatcaaaatgtatttattgcgtccaacaaattgaaattgtttttgacgatatggttgatcttggatatgcaatagacttggctacaggcagctcaagcatagggtctgaactagaggtaactgtgtctgatctgaagaatgaggataccagtgattatagtaaggtggctgatactttgcttgctacaattgacacacttaagtccaagtctgaaaaattatctaccattaaggggcttgtgataacttcattggatgacttcaaaatgaagctgaaacaagctgaagcagctgctgaaactgcttcacatgagcatcagttgtctgttgaaagggtatgcatgctggagaaagaactcaaaatattacaggatgagtgcaacaaaatggaactaaatattcaagagtataaggaaagggagggtgcattgaaggcaagggagttagagttgctatcagttgagcacactcaaatttcagcagacagaggtttaactgacaatgcaatttcaaaagatcaaacggaagctcttgttgagaagataagtaagttaaatatgctgtcaggcgagtcaaatgtgcagagggaagaggctacaagtccgcttgacaaactttttgttgtcattgatgaattcagtgcacttcaacacgaggagctgggagcaaagctgcagtcaagggaaaaggcagttgatgagctatcaacaaaagtaaagatgctcgaggatttgtgccatgcacaactttctcagccagaacctagtaaagacagatcatttgaagcatcttcctcaacaattgggtcagatatgtctgatattgaagatgcgggaccagtgggcaagacaacatcagtttcatctgtttctacagctgcacatgctagaacaatgcggaaggggtcagcggatcatcttgttgtcaacattggttcagagtcagaacgattgattgctgcacaagattcagatgacaaggggcgtataaaatcgctccatacatctggcttcattccagctcagggaaagcacatcgctgatagggtcgatgccttctgggtctcggggagccaaattctgatgaaccggccacgagcaaggctagggcttatgttgtactggctggctgtgcacctatggttgatgggcagcatcttgtgacaccgcttctcaataccgagacccatctcataattgtacaatagcacgtattagcagtttcttcttccattcatacaatacatggtagatgttagaaataccatttttttcattgtcttcctcctgctgagatttgcacttgagcagtatgtgttgaatttttgcacacaagatgtaacgcgcagaaaaaataacgttgtcattctttggtatagtgaagaggtggtaattgtatttgtagatgtggtggccctgatcacctggtgggccccatcatcgtaaattcgttgtttgaaattgcgtgcgtttgaggtctgacaatgtagaggccttatgggtcgacctttgacgtatgaatagaaacgtatatagttggttacacttttcgctcctccatgaataattttcgattggaggtgactggttatacagtcacaaatctttcctccaaaaaacataaataaaggagtgaatatgtatttgttatcatgaatctgtgtagtttcataagggataaggcataaatcttcatggcatcatttgtgtttttccacacaatttgtaatgcaaaagaatgtagggtgtttcaaccaaacaacaagaaacaaaaaagatttaaatacatccttaacatactaacatttttacggtggggctgctcatttaaactggactggaaacaaaataacaccgtaaaaatgttggcttttgacaaatctgacactgaatacgccaaagaccacagttgttaccaaaagaaatgcagagttccaatctctcactctcacctttcagacaaccacaggaaccagctggtacaacttgacggtccaccttctaaataaccagaatttgctacgtaagttctgtacaacagcaggacacatccctg

SEQ ID NO: 221772 - DNA, 2050 bp, Zea Mays
gcacgttctgcctccggcaacccgccccgcccgcggccgcatccctcccgcatcccgcggccgcaccatcaacggcgcaacagccgcatccagtccctcccgcatcaacagcgtcgcagccagtccctcccgattcgcgcttaatccccgcatccagtccctcccgcatccagtccctcccgcggtgcaatccagacgcaaacaactccattgaccccgattcgcgtacatgctctctcacagcaatccctgctctctcctcgccaacgcctctcgataaactccatggaaggttcacactgatgcgctctgattccttgctccacgctctctcctgctctcgcgctctacatggaaggtgaggccgacgcccaaatcgacggaatccctgctctgcgctctcccctgctcccgcgctctacatggaaggcgaggccggcgcccaaatcgacgggatcactgctcggacaggattgcggcctcgatccgcgctctccagattcgcctagattgacagcgtccgcgccgcgcttgcccagatcgatggaatctaggtctccagatgcaagtccggggctcgctacccgtggaaggcgaggagagacgacgcatcggctctcgatccgtgctctacatggaaggtgaggcagatcggggggagtgtgtagagaaatccaagcgaaaccccgcgagagcgaggcgacggcggacggaggcgagtgggtgagccgcgggcgagagacgaggtagcgggctagcgcgatgccgtcgccggttgtagtggccgcgacgctgctggtggtagcactggcggcattctgcggcacggacccgctccggacggacagcatggtggacttcccggggtttgagtcccacctcgtcgacctccccaatcccgccgagatgccgacgcacgcggatgaatgggagcggctctgtggagccgatgtgcggttctgcggcgaggtgcaggggcccgagagcatcaccttcgaccagcagggccatacacgggcgtcgccgacggccgggtcgtcttctgggacggcgagcggtgggtcccattcgcgatggccttcccgtgctggacgcaggagctccacggagggccgaaggcctcgccgctggagtatctcccagcgagcatatctgcaaccgcccgctcgggctctgtttcgataagactggggacctgtacatcgccgacgcctacttcggcttgctcaaagtccgccgcgaggccgggctggccacgctgctcgcaacggaggccgagggcgtgcgcttcaacttcaccaacgacctcgacctcgacctcgacgacgagggcaacatctacttcactgactctagcattcactaccaaagacgtctgtgatgccatgccctcgctctcttccctctgctttgcgcgcttggttggatgctcacttgattcctactgaccacggggatggtgatcgactgattgttaacatcacttgattcctctgctttatattgattcctactgaagatggacaatataaaaacctaaaatggaccaattctttctttgagggatacaaccctactctggtgtaacttatacttgttctagcacttggccctctgatctggtgaataagttatgcagaagaaaaattatgttttattttatatttaactgtactttgttgtagcttgtaggtactgatcagagggccaggtgctatccacgaatgatagtgtaatgtctaggaacgatagctgatttggaaaacctgcaaagtctattcacaacagcgaggtcatattttcatattgattttctgtacctgggactttggagaggggaacacgttccaaaaccggagcgtttcatcaccagccccagtaactatggtctgttggtatgacctcgctgaggttgttgccctcaccgagagcatcggcaagccgctcgccgaggtgctcaaggagctcgggaagagggttccagactcccttgtgaagacccgcatcgaggatgatggcttcactatcaactcgagaagagggttccaga

SEQ ID NO: 221773 - DNA, 3697 bp, Zea Mays
gcacgttctgcctccggcaacccgccccgcccgcggccgcatccctcccgcatcccgcggccgcaccatcaacggcgcaacagccgcatccagtccctcccgcatcaacagcgtcgcagccagtccctcccgattcgcgcttaatccccgcatccagtccctcccgcatccagtccctcccgcggtgcaatccagacgcaaacaactccattgaccccgattcgcgtacatgctctctcacagcaatccctgctctctcctcgccaacgcctctcgataaactccatggaaggttcacactgatgcgctctgattccttgctccacgctctctcctgctctcgcgctctacatggaaggtgaggccgacgcccaaatcgacggaatccctgctctgcgctctcccctgctcccgcgctctacatggaaggcgaggccggcgcccaaatcgacgggatcactgctcggacaggattgcggcctcgatccgcgctctccagattcgcctagattgacagcgtccgcgccgcgcttgcccagatcgatggaatctaggtctccagatgcaagtccggggctcgctacccgtggaaggcgaggagagacgacgcatcggctctcgatccgtgctctacatggaaggtgaggcagatcggggggagtgtgtagagaaatccaagcgaaaccccgcgagagcgaggcgacggcggacggaggcgagtgggtgagccgcgggcgagagacgaggtagcgggctagcgcgatgccgtcgccggttgtagtggccgcgacgctgctggtggtagcactggcggcattctgcggcacggacccgctccggacggacagcatggtggacttcccggggtttgagtcccacctcgtcgacctccccaatcccgccgagatgccgacgcacgcggatgaatgggagcggctctgtggagccgatgtgcggttctgcggcgaggtgcaggggcccgagagcatcaccttcgaccagcagggccatacacgggcgtcgccgacggccgggtcgtcttctgggacggcgagcggagctccacggagggccgaaggcctcgccgctggagtatctcccagcgagcatatctgcaaccgcccgctcgggctctgtttcgataagactggggacctgtacatcgccgacgcctacttcggcttgctcaaagtccgccgcgaggccgggctggccacgctgctcgcaacggaggccgagggcgtgcgcttcaacttcaccaacgacctcgacctcgacctcgacgacgagggcaacatctacttcactgactctagcattcactaccaaagacgtctgtgatgccatgccctcgctctcttccctctgctttgcgcgcttggttggatgctcacttgattcctactgaccacggggatggtgatcgactgattgttaacatcacttgattcctctgctttatattgattcctactgaagatggacaatataaaaacctaaaatggaccaattctttctttgagggatacaaccctactctggtgtaacttatacttgttctagcacttggccctctgatctggtgaataagttatgcagaagaaaaattatgttttattttatatttaactgtactttgttgtagcttgtaggtactgatcagagggccaggtgctatccacgaatgatagtgtaatgtctaggaacgatagctgatttggaaaacctgcaaagtctattcacaacaggtacactgccttcccaattaaggaaaaactgacactcatatcccattgaatttgctggctatgcatacctgttcagttcacaatgatataaccacttactttatgtaatgtgaatacgtttattaaaatagttatgatcagcatatccttccttaatcgacatatttttttcttctatgtaccttctattcaggttacgaatactgtaaagataatttagaatttctcatacaaatccttaaccactgtaaatatatggggaatttctaaaatgtgtttagattcatacatgtacaagtttgtattatgtttttatgcatatttatgaatctaccttataatcgattttatattgttgtctcacttattcctctttaaaacacacacttgctgttttcaaatttcaagtcactaattgttactgttcttcctcaaaaaaataccactgtaattaagttgccgatgcagtgatatataatggtcacctattatgaagaaatagtgaatgggagaagggttgagttttggagccggtgcatgcaaatcatataccagaggggaacacgttccaaaaccggagcgtttcatcaccagccccagtaactatggtctgttggtatgacctcgctgaggttgttgccctcaccgagagcatcggcaagccgctcgccgaggtgctcaaggagctcgggaagagggttccagactcccttgtgaagacccgcatcgaggatgatggcttcactatcaactcgagaagagggttccagactcccttgtgaagacccacaactagagaaataggatggagagggaaatttactaagagaggacgtgtaacaaataaggccaggaattattagaatgaatggaaaatgtcctcatacacctttggagattttatttcgcttgtgggcaagtgaaatcatatgagagggcaataatctccgtggagcaactgaatgctattcttagacaggcttctaaaaccaaggaaaaggaagatctcaggaagatagataactggcaatatattagttgtgtcaccctatgggttcggtttctgtgttgtcactataaggattacaatctccatcccttattttctcaagttcttcaattgctctttgactgcctagaattaagagaagtttctcagaaagaacaaacacaaagaacaaagatcaacttttcgtctttgttgaaggtgccaaagaacctgctgaaaccaagggattttcaagaggagtgtattctttcagcgattcagattctatcagcacattttgcccagtggagttaccatgtttccttcctagaagtagccaccattcctcttgtcctcttgaagaggctacatgagcagacaacagttgaatcacttcgccatcctattaagtgtttgatagaccaggtgacggagaacaaggattttatagaaaggaaaagagaggttgtatccttttcaccaaatgataaggcgtcagttgatagcttccttcagtcaattgcttcacatttactattcaacatctggcctgctgagtttgctgaaaaacatattactgttgaatgcaggaggagaagtccacacagaatgtcggacagggacgccgtggcccccgcgggcggcggtgaccggaaggcggccaagctcgggagctggagcagcatgagcagcaactacggcaacaagaagcggaagagcagcagcagcagcttcgggaggagatccacatccacctgcgaggaaaggcagggggtcttccgcatgctcatgagctggaaccaggagagccggttcagcaacaagatcaagacgacgacgagcaaagaaagatgaacgaaacgaagtgttcttagcttggtgtgattattcggggggttgcttgctggagggtttttgttcgtttagtgtctagccttagcttacttattacttttgttag

SEQ ID NO: 221774 - DNA, 3648 bp, Zea Mays
gcacgttctgcctccggcaacccgccccgcccgcggccgcatccctcccgcatcccgcggccgcaccatcaacggcgcaacagccgcatccagtccctcccgcatcaacagcgtcgcagccagtccctcccgattcgcgcttaatccccgcatccagtccctcccgcatccagtccctcccgcggtgcaatccagacgcaaacaactccattgaccccgattcgcgtacatgctctctcacagcaatccctgctctctcctcgccaacgcctctcgataaactccatggaaggttcacactgatgcgctctgattccttgctccacgctctctcctgctctcgcgctctacatggaaggtgaggccgacgcccaaatcgacggaatccctgctctgcgctctcccctgctcccgcgctctacatggaaggcgaggccggcgcccaaatcgacgggatcactgctcggacaggattgcggcctcgatccgcgctctccagattcgcctagattgacagcgtccgcgccgcgcttgcccagatcgatggaatctaggtctccagatgcaagtccggggctcgctacccgtggaaggcgaggagagacgacgcatcggctctcgatccgtgctctacatggaaggtgaggcagatcggggggagtgtgtagagaaatccaagcgaaaccccgcgagagcgaggcgacggcggacggaggcgagtgggtgagccgcgggcgagagacgaggtagcgggctagcgcgatgccgtcgccggttgtagtggccgcgacgctgctggtggtagcactggcggcattctgcggcacggacccgctccggacggacagcatggtggacttcccggggtttgagtcccacctcgtcgacctccccaatcccgccgagatgccgacgcacgcggatgaatgggagcggctctgtggagccgatgtgcggttctgcggcgaggtgcaggggcccgagagcatcaccttcgaccagcagggccatacacgggcgtcgccgacggccgggtcgtcttctgggacggcgagcggagctccacggagggccgaaggcctcgccgctggagtatctcccagcgagcatatctgcaaccgcccgctcgggctctgtttcgataagactggggacctgtacatcgccgacgcctacttcggcttgctcaaagtccgccgcgaggccgggctggccacgctgctcgcaacggaggccgagggcgtgcgcttcaacttcaccaacgacctcgacctcgacctcgacgacgagggcaacatctacttcactgactctagcattcactaccaaagacgtctgtgatgccatgccctcgctctcttccctctgctttgcgcgcttggttggatgctcacttgattcctactgaccacggggatggtgatcgactgattgttaacatcacttgattcctctgctttatattgattcctactgaagatggacaatataaaaacctaaaatggaccaattctttctttgagggatacaaccctactctggtgtaacttatacttgttctagcacttggccctctgatctggtgaataagttatgcagaagaaaaattatgttttattttatatttaactgtactttgttgtagcttgtaggtactgatcagagggccaggtgctatccacgaatgatagtgtaatgtctaggaacgatagctgatttggaaaacctgcaaagtctattcacaacaggtacactgccttcccaattaaggaaaaactgacactcatatcccattgaatttgctggctatgcatacctgttcagttcacaatgatataaccacttactttatgtaatgtgaatacgtttattaaaatagttatgatcagcatatccttccttaatcgacatatttttttcttctatgtaccttctattcaggttacgaatactgtaaagataatttagaatttctcatacaaatccttaaccactgtaaatatatggggaatttctaaaatgtgtttagattcatacatgtacaagtttgtattatgtttttatgcatatttatgaatctaccttataatcgattttatattgttgtctcacttattcctctttaaaacacacacttgctgttttcaaatttcaagtcactaattgttactgttcttcctcaaaaaaataccactgtaattaagttgccgatgcagtgatatataatggtcacctattatgaagaaatagtgaatgggagaagggttgagttttggagccggtgcatgcaaatcatataccaggtttatgctataatgttttccttatgaagaattaaatatttgtgtgtttgcacagcgaggtcatattttcatattgattttctgtacctgggactttggagaggggaacacgttccaaaaccggagcgtttcatcaccagccccagtaactatggtctgttggtatgacctcgctgaggttgttgccctcaccgagagcatcggcaagccgctcgccgaggtgctcaaggagctcgggaagagggttccagactcccttgtgaagacccgcatcgaggatgatggcttcactatcaaattttatttcgcttgtgggcaagtgaaatcatatgagagggcaataatctccgtggagcaactgaatgctattcttagacaggcttctaaaaccaaggaaaagatctcaggaagatagataactggcaatatattagttgtgtcaccctatgggttcggtttctgtgttgtcactataaggattacaatctccatcccttattttctcaagttcttcaattgctctttgactgcctagaattaagagaagtttctcagaaagaacaaacacaaagaacaaagatcaacttttcgtctttgttgaaggtgccaaagaacctgctgaaaccaagggattttcaagaggagtgtattctttcagcgattcagattctatcagcacattttgcccagtggagttaccatgtttccttcctagaagtagccaccattcctcttgtcctcttgaagaggctacatgagcagacaacagttgaatcacttcgccatcctattaagtgtttgatagaccaggtgacggagaacaaggattttatagaaaggaaaagagaggttgtatccttttcaccaaatgataaggcgtcagttgatagcttccttcagtcaattgcttcacatttactattcaacatctggcctgctgagtttgctgaaaaacatattactgttgaatgcaggaggagaagtccacacagaatgtcggacagggacgccgtggcccccgcgggcggcggtgaccggaaggcggccaagctcgggagctggagcagcatgagcagcaactacggcaacaagaagcggaagagcagcagcagcagcttcgggaggagatccacatccacctgcgaggaaaggcagggggtcttccgcatgctcatgagctggaaccaggagagccggttcagcaacaagatcaagacgacgacgagcaaagaaagatgaacgaaacgaagtgttcttagcttggtgtgattattcggggggttgcttgctggagggtttttgttcgtttagtgtctagccttagcttacttattacttttgttag

SEQ ID NO: 221775 - DNA, 2273 bp, Zea Mays
ctgcctccggcaacccgccccgcccgcggccgcatccctcccgcatcccgcggccgcaccatcaacggcgcaacagccgcatccagtccctcccgcatcaacagcgtcgcagccagtccctcccgattcgcgcttaatccccgcatccagtccctcccgcatccagtccctcccgcggtgcaatccagacgcaaacaactccattgaccccgattcgcgtacatgctctctcacagcaatccctgctctctcctcgccaacgcctctcgataaactccatggaaggttcacactgatgcgctctgattccttgctccacgctctctcctgctctcgcgctctacatggaaggtactgatcagagggccaggtgctatccacgaatgatagtgtaatgtctaggaacgatagctgatttggaaaacctgcaaagtctattcacaacagtgatatataatggtcacctattatgaagaaatagtgaatgggagaagggttgagttttggagccggtgcatgcaaatcatataccaggtttatgctataatgttttccttatgaagaattaaatatttgtgtgtttgcacagcgaggtcatattttcatattgattttctgtacctgggactttggagaggggaacacgttccaaaaccggagcgtttcatcaccagccccagtaactatggtctgttggtatgacctcgctgaggttgttgccctcaccgagagcatcggcaagccgctcgccgaggtgctcaaggagctcgggaagagggttccagactcccttgtgaagacccgcatcgaggatgatggcttcactatcaagtacattcctaggattacccggactagatttagctcttgtgattttgcattctactacattttacttgttctgctgcattgacagctcgagaagagggttccagactcccttgtgaagacccacaactagagaaataggatggagagggaaatttactaagagaggacgtgtaacaaataaggccaggaattattagaatgaatggaaaatgtcctcatacacctttggagattttatttcgcttgtgggcaagtggtgatcagagtttgtctctatcggcaactgtttggatcactgtttaactaaatcctacaatacataccttgccagtaccaatcttgtgaatgacagaaacacaaagcatatttattttctgatggactgcctgtagagctgtattctcttgatgttcagaaatcatatgagagggcaataatctccgtggagcaactgaatgctattcttagacaggcttctaaaaccaaggaaaaggaagatctcaggaagatagataactggcaatatattagttgtgtcaccctatgggttcggtttctgtgttgtcactataaggattacaatctccatcccttattttctcaagttcttcaattgctctttgactgcctagaattaagagaagtttctcagaaagaacaaacacaaagaacaaagatcaacttttcgtctttgttgaaggtgccaaagaacctgctgaaaccaagggattttcaagaggagtgtattctttcagcgattcagattctatcagcacattttgcccagtggagttaccatgtttccttcctagaagtagccaccattcctcttgtcctcttgaagaggctacatgagcagacaacagttgaatcacttcgccatcctattaagtgtttgatagaccaggtgacggagaacaaggattttatagaaaggaaaagagaggttgtatccttttcaccaaatgataaggcgtcagttgatagcttccttcagtcaattgcttcacatttactattcaacatctggcctgctgagtttgctgaaaaacatattactgttgaatgcaggaggagaagtccacacagaatgtcggacagggacgccgtggcccccgcgggcggcggtgaccggaaggcggccaagctcgggagctggagcagcatgagcagcaactacggcaacaagaagcggaagagcagcagcagcagcttcgggaggagatccacatccacctgcgaggaaaggcagggggtcttccgcatgctcatgagctggaaccaggagagccggttcagcaacaagatcaagacgacgacgagcaaagaaagatgaacgaaacgaagtgttcttagcttggtgtgattattcggggggttgcttgctggagggtttttgttcgtttagtgtctagccttagcttacttattacttttgttag

SEQ ID NO: 221776 - DNA, 2619 bp, Zea Mays
atcccgcggccgcaccatcaacggcgcaacagccgcatccagtccctcccgcatcaacagcgtcgcagccagtccctcccgattcgcgcttaatccccgcatccagtccctcccgcatccagtccctcccgcggtgcaatccagacgcaaacaactccattgaccccgattcgcgtacatgctctctcacagcaatccctgctctctcctcgccaacgcctctcgataaactccatggaaggttcacactgatgcgctctgattccttgctccacgctctctcctgctctcgcgctctacatggaagcttgtaggtactgatcagagggccaggtgctatccacgaatgatagtgtaatgtctaggaacgatagctgatttggaaaacctgcaaagtctattcacaacaggtacactgccttcccaattaaggaaaaactgacactcatatcccattgaatttgctggctatgcatacctgttcagttcacaatgatataaccacttactttatgtaatgtgaatacgtttattaaaatagttatgatcagcatatccttccttaatcgacatatttttttcttctatgtaccttctattcaggttacgaatactgtaaagataatttagaatttctcatacaaatccttaaccactgtaaatatatggggaatttctaaaatgtgtttagattcatacatgtacaagtttgtattatgtttttatgcatatttatgaatctaccttataatcgattttatattgttgtctcacttattcctctttaaaacacacacttgctgttttcaaatttcaagtcactaattgttactgttcttcctcaaaaaaataccactgtaattaagttgccgatgcagtgatatataatggtcacctattatgaagaaatagtgaatgggagaagggttgagttttggagccggtgcatgcaaatcatataccaggtttatgctataatgttttccttatgaagaattaaatatttgtgtgtttgcacagcgaggtcatattttcatattgattttctgtacctgggactttggagaggggaacacgttccaaaaccggagcgtttcatcaccagccccagtaactatggtctgttggtatgacctcgctgaggttgttgccctcaccgagagcatcggcaagccgctcgccgaggtgctcaaggagctcgggaagagggttccagactcccttgtgaagacccgcatcgaggatgatggcttcactatcaactcgagaagagggttccagactcccttgtgaagacccacaactagagaaataggatggagagggaaatttactaagagaggacgtgtaacaaataaggccaggaattattagaatgaatggaaaatgtcctcatacacctttggagattttatttcgcttgtgggcaagtggtgatcagagtttgtctctatcggcaactgtttggatcactgtttaactaaatcctacaatacataccttgccagtaccaatcttgtgaatgacagaaacacaaagcatatttattttctgatggactgcctgtagagctgtattctcttgatgttcagaaatcatatgagagggcaataatctccgtggagcaactgaatgctattcttagacaggcttctaaaaccaaggaaaaggaagatctcaggaagatagataactggcaatatattagttgtgtcaccctatgggttcggtttctgtgttgtcactataaggattacaatctccatcccttattttctcaagttcttcaattgctctttgactgcctagaattaagagaagtttctcagaaagaacaaacacaaagaacaaagatcaacttttcgtctttgttgaaggtgccaaagaacctgctgaaaccaagggattttcaagaggagtgtattctttcagcgattcagattctatcagcacattttgcccagtggagttaccatgtttccttcctagaagtagccaccattcctcttgtcctcttgaagaggctacatgagcagacaacagttgaatcacttcgccatcctattaagtgtttgatagaccaggtgacggagaacaaggattttatagaaaggaaaagagaggttgtatccttttcaccaaatgataaggcgtcagttgatagcttccttcagtcaattgcttcacatttactattcaacatctggcctgctgagtttgctgaaaaacatattactgttgaatgcaggaggagaagtccacacagaatgtcggacagggacgccgtggcccccgcgggcggcggtgaccggaaggcggccaagctcgggagctggagcagcatgagcagcaactacggcaacaagaagcggaagagcagcagcagcagcttcgggaggagatccacatccacctgcgaggaaaggcagggggtcttccgcatgctcatgagctggaaccaggagagccggttcagcaacaagatcaagacgacgacgagcaaagaaagatgaacgaaacgaagtgttcttagcttggtgtgattattcggggggttgcttgctggagggtttttgttcgtttagtgtctagccttagcttacttattacttttgttag

SEQ ID NO: 221777 - DNA, 2533 bp, Zea Mays
gtttatcccttcaccagaccccactcatgtgggagcctgtgacactaggtttgccctttttaaggttatcgcttgatacctataatcccatatactggaattgattcttgctattaatcatagttatctacaagggatgctgcacctatgtggttgttggaaagactatcacctttttttttctccaggtgaaacaccataagagctggagatccaacacacaatgtatttctcttttgtctttatgtgcaaagaacaatgaaggcaaagagttggcccttagtttttctcaaggatcagatttcgttgaaatttcttctgatgttgacaagctgtgttcaatttggagcacagtttctctaagggttgatagttctgaggatgacagtgatgatggaaaaccttacaaggttataccaagaagttcgtaccatcttgtcaacaagaaaaacaactatggcattgcatttgttgatggcttgctagagtttgtgaaaaagccgggaaatccatttaaagtgcaggtttttgatgaatctattttttctgatgcttcaagacttactgttaaccatatgaaatgggacaattatacttacttggatgtggacgatgatgtgcctttttctgtgagggatagattggcaagtggtgcaagttctcaacatgtaatcatcaatgttgacaagattgtttttaccatcactcatgaagtctctgatactgatatttttttcccacttgtccaaacctgcataagtgatatccgtgttgttacgcaaatatttccatctaaaatcaggattctaagttcattcaaagtctcagcgcagtatttcattgcacgaagaaatctgtgggaagaactcatctctcctatcacctcctatacattctttcgatttaagttttttaccccagatccagttactaagtatggaaagacggccatgcgtttcttctttcaattaaagcaggtggatgtatttattaatgagctttcatttgacatccttctatatttggttggaaagttaaacttgatgggtccatatgctgtcaaaagctcggctatctttcctaactcctgcaagatagagaacagctcaaggctggcacttgtgtgtcattttaaagataatggggatgcactaattcctgggcaacagtcaacttcagttttcttgagccacttaacatttgatgataatatttcacatgatcaaatggtttctatttgcttactcaaggaaggtgtattttcaactattccaatcagcatttctctccacgagtctggtatttttgcatggagaacccgtgtgtcaccagtcaaagacctgacaaccttttctggaccatttattgtggtcaaggtgtctcatagttctgaggaaggcttatctctttcagttcaacctttggttaggatccataataagagtgactttcctcttgaactccggtttcagaggccaaacaaagctagtgaagaggctgcatttgtcacagttagaagtggagatatggtcgatgaatctactggagtatttgacgccatggatttgtctggtggaccaaaaagagcattgatgtctctagctcttggcaagtaactatacattatcttggcatgatgttggttcccattttgcatgacacaaaatagatcttattagctgctaagttattgcatgatgatcgattgaaaactattggagaaaagggatagtaaaggttctccataggaccacactgtacataaacttagtttcctttggaaaatggtagtacttagaaatgattttaattgtagtgttaattctgcataccattctttgtatactttgcatttattcaacagactatgtagcttgtgtgagaaagaatttccatgttcaatgctttcatgggttttctagaacatgttcaatagctgtgtgtcgtttcattaagaagaaataagtaaaaaaaaggaaggttaggaattaaatcccatctctgccccaaagacacccacccacctacatcctagggtaaagctaagaacgctcgccagacttggggcctgcttgtcaaaagctgaaacaaacagattacagaccaactgttgaggtgaattttgaggaaataaactacgagaggagatttttctggcttttggtgtgctgagaagctaaaaatctattacaaaagtcaatagaaaaaattattacaaaagtcaatagcaaaaaggcaacgaccagaagctagaagccaaaagcaagaaaactaacttttgagccaaaagctgcagctcaaacaaacagggtatagcgaccaactcacttaacacaactagattgcagtgtaagtgtccttagaagcaaatcctggactgctgccccagccaagcgctgaacgtcgagagtcggggcagccagcccaatccgcatcggaatacgcggtgagggactggcaactcacttaacacaactagattgcagtgtaagtgtccttagaagcaaatcctggactgctgccccagccaaac

SEQ ID NO: 221778 - DNA, 810 bp, Zea Mays
gtgaaacaccataagagctggagatccaacacacaatgtatttctcttttgtctttatgtgcaaagaacaatgaaggcaaagagttggcccttagtttttctcaaggatcagatttcgttgaaatttcttctgatgttgacaagctgtgttcaatttggagcacagtttctctaagggttgatagttctgaggatgacagtgatgatggaaaaccttacaaggttataccaagaagttcgtaccatcttgtcaacaagaaaaacaactatggcattgcatttgttgatggcttgctagagtttgtgaaaaagccgggaaatccatttaaagtgcaggtttttgatgaatctattttttctgatgcttcaagacttactgttaaccatatgaaatgggacaattatacttacttggatgtggacgatgatgtgcctttttctgtgagggatagattggcaagtggtgcaagttctcaacatgtaatcatcaatgttgacaagattgtttttaccatcactcatgaagtctctgatactgatatttttttcccacttgtccaaacctgcataagtgatatccgtgttgttacgcaaatatttccatctaaaatcaggattctaagttcattcaaagtctcagcgcagtatttcattgcacgaagaaatctgtgggaagaactcatctctcctatcacctcctatacattctttcgatttaagttttttaccccagatccagttactaagtatggaaagacggccatgcgtttcttctttcaattaaagcagaaggttcatcttcgttcttgc

SEQ ID NO: 221779 - DNA, 2284 bp, Zea Mays
gtgaaacaccataagagctggagatccaacacacaatgtatttctcttttgtctttatgtgcaaagaacaatgaaggcaaagagttggcccttagtttttctcaaggatcagatttcgttgaaatttcttctgatgttgacaagctgtgttcaatttggagcacagtttctctaagggttgatagttctgaggatgacagtgatgatggaaaaccttacaaggttataccaagaagttcgtaccatcttgtcaacaagaaaaacaactatggcattgcatttgttgatggcttgctagagtttgtgaaaaagccgggaaatccatttaaagtgcaggtttttgatgaatctattttttctgatgcttcaagacttactgttaaccatatgaaatgggacaattatacttacttggatgtggacgatgatgtgcctttttctgtgagggatagattggcaagtggtgcaagttctcaacatgtaatcatcaatgttgacaagattgtttttaccatcactcatgaagtctctgatactgatatttttttcccacttgtccaaacctgcataagtgatatccgtgttgttacgcaaatatttccatctaaaatcaggattctaagttcattcaaagtctcagcgcagtatttcattgcacgaagaaatctgtgggaagaactcatctctcctatcacctcctatacattctttcgatttaagttttttaccccagatccagttactaagtatggaaagacggccatgcgtttcttctttcaattaaagcaggtggatgtatttattaatgagctttcatttgacatccttctatatttggttggaaagttaaacttgatgggtccatatgctgtcaaaagctcggctatctttcctaactcctgcaagatagagaacagctcaaggctggcacttgtgtgtcattttaaagataatggggatgcactaattcctgggcaacagtcaacttcagttttcttgaggaaggtgtattttcaactattccaatcagcatttctctccacgagtctggtatttttgcatggagaacccgtgtgtcaccagtcaaagacctgacaaccttttctggaccatttattgtggtcaaggtgtctcatagttctgaggaaggcttatctctttcagttcaacctttggttaggatccataataagagtgactttcctcttgaactccggtttcagaggccaaacaaagctagtgaagaggctgcatttgtcacagttagaagtggagatatggtcgatgaatctactggagtatttgacgccatggatttgtctggtggaccaaaaagagcattgatgtctctagctcttggcaagtaactatacattatcttggcatgatgttggttcccattttgcatgacacaaaatagatcttattagctgctaagttattgcatgatgatcgattgaaaactattggagaaaagggatagtaaaggttctccataggaccacactgtacataaacttagtttcctttggaaaatggtagtacttagaaatgattttaattgtagtgttaattctgcataccattctttgtatactttgcatttattcaacagactatgtagcttgtgtgagaaagaatttccatgttcaatgctttcatgggttttctagaacatgttcaatagctgtgtgtcgtttcattaagaagaaataagtaaaaaaaaggaaggttaggaattaaatcccatctctgccccaaagacacccacccacctacatcctagggtaaagctaagaacgctcgccagacttggggcctgcttgtcaaaagctgaaacaaacagattacagaccaactgttgaggtgaattttgaggaaataaactacgagaggagatttttctggcttttggtgtgctgagaagctaaaaatctattacaaaagtcaatagaaaaaattattacaaaagtcaatagcaaaaaggcaacgaccagaagctagaagccaaaagcaagaaaactaacttttgagccaaaagctgcagctcaaacaaacagggtatagcgaccaactcacttaacacaactagattgcagtgtaagtgtccttagaagcaaatcctggactgctgccccagccaagcgctgaacgtcgagagtcggggcagccagcccaatccgcatcggaatacgcggtgagggactggcaactcacttaacacaactagattgcagtgtaagtgtccttagaagcaaatcctggactgctgccccagccaaac

SEQ ID NO: 221780 - DNA, 1288 bp, Zea Mays
gtctcgttgttcccctcctcacgttgatgctgcagcggggctacgcctctcccttttgcagtacctcaccactatttcgtttgttgtcggatgttgacaattggaaatccatgtagcaaataaatgattttggaactgggggcaggtcagagtctagagcatgttcattccacacattggaggtggatttccctcaattggagatattgacaaattggaaaaaaaatgtgacttgacctgtgctgcaacaaccttaaactaggaggggattctaattcttcatctctaccaacaatcctctcctgttactttttaaaccaataactttttcatgtttttgtgcagatgcacacatccttgagccaaaatagaaaaaaatcatagaagagttctttggctgtcacgtgattcaagagtattaatgatatacaaaagtttgctttatggcaagttaggtaaccacaaattttgggcaatgacagggacgtgcagtggtggtctcttaaaagaattttgtgtccagtgtagctatttccactgcaaactatcaaatcattacaaactgctgggaacatgctccatcttatcgaagcatgtatcttgagaaagttgatcgatacatctgcttatttatggcctggttatgttgtaccatctgggactttaaaagatacagctttgccccaagaatccccttggttaaactttatgaaagtgtctcgactttcaggaccccttattgatgctctggtcgcatctcctgcttcaaggtgtttcaagctctgcaaggtgaggtctgttcagtttggccagaaaggcatctcctacctgaacacctacgacggccgcacaatccgctaccccgacctgctcatcaaggccaacgacaccatcaagatcgatctagagaccaacaagatcatggacttcttcaagtttgacgtcagcaacgtgttcatggtaaccggcgggaggaacaccaggcgtgtaggagtgatcaagaactgggagaagcacaaggccagcttcgaggtcatcgacgtgctgcttggagctttttgcatgctatgtctagttttctcctatttgttgtacaagaaaacataaaatggaattcaaatttggtggtcgcaaaagtgtggagacttgaattcatataaagttaggcttaacattagtgcaaaaagttgtattttagtttagatttagagtacacttatgtatgccttgtttgacaatacttatttatgatatattgaatggtacctattgtaattgtctattattg

SEQ ID NO: 221781 - DNA, 1149 bp, Zea Mays
cgcctctcccttttgcagtacctcaccactatttcgtttgttgtcggatgttgacaattggaaatccatgtagcaaataaatgattttggaactgggggcagacattggaggtggatttccctcaattggagatattgacaaattggaaaaaaaatgtgacttgacctgtgctgcaacaaccttaaactaggaggggattctaattcttcatctctaccaacaatcctctcctgttactttttaaaccaataactttttcatgtttttgtgcagatgcacacatccttgagccaaaatagaaaaaaatcatagaagagttctttggctgtcacgtgattcaagagtattaatgatatacaaaagtttgctttatggcaagttagtgtagctatttccactgcaaactatcaaatcattacaaactgctgggaacatgctccatcttatcgaagcatgtatcttgagaaagttgatcgatacatctgcttatttatggcctggttatgttgtaccatctgggactttaaaagatacagctttgccccaagaatccccttggttaaactttatgaaagtgtctcgactttcaggaccccttattgatgctctggtcgcatctcctgcttcaaggtgtttcaagctctgcaaggtgaggtctgttcagtttggccagaaaggcatctcctacctgaacacctacgacggccgcacaatccgctaccccgacctgctcatcaaggccaacgacaccatcaagatcgatctagagaccaacaagatcatggacttcttcaagtttgacgtcagcaacgtgttcatggtaaccggcgggaggaacaccaggcgtgtaggagtgatcaagaactgggagaagcacaaggccagcttcgaggtcatcgacgtgctgcttggagctttttgcatgctatgtctagttttctcctatttgttgtacaagaaaacataaaatggaattcaaatttggtggtcgcaaaagtgtggagacttgaattcatataaagttaggcttaacattagtgcaaaaagttgtattttagtttagatttagagtacacttatgtatgccttgtttgacaatacttatttatgatatattgaatggtacctattgtaattgtctattattg

SEQ ID NO: 221782 - DNA, 848 bp, Zea Mays
gtcagagtctagagcatgttcattccacgctgtcacgtgattcaagagtattaatgatatacaaaagtttgctttatggcaagttagtgtagctatttccactgcaaactatcaaatcattacaaactgctgggaacatgctccatcttatcgaagcatgtatcttgagaaagttgatcgatacatctgcttatttatggcctggttatgttgtaccatctgggactttaaaagatacagctttgccccaagaatccccttggttaaactttatgaaagtgtctcgactttcaggaccccttattgatgctctggtcgcatctcctgcttcaagttcaagctctgcaaggtgaggtctgttcagtttggccagaaaggcatctcctacctgaacacctacgacggccgcacaatccgctaccccgacctgctcatcaaggccaacgacaccatcaagatcgatctagagaccaacaagatcatggacttcttcaagtttgacgtcagcaacgtgttcatggtaaccggcgggaggaacaccaggcgtgtaggagtgatcaagaactgggagaagcacaaggccagcttcgaggtcatcgacgtgctgcttggagctttttgcatgctatgtctagttttctcctatttgttgtacaagaaaacataaaatggaattcaaatttggtggtcgcaaaagtgtggagacttgaattcatataaagttaggcttaacattagtgcaaaaagttgtattttagtttagatttagagtacacttatgtatgccttgtttgacaatacttatttatgatatattgaatggtacctattgtaattgtctattattg

SEQ ID NO: 221783 - DNA, 1183 bp, Zea Mays
tgaacagcagctgccgtatatatgcgtgccaaaggagaattgccctgcgattctaggctcagcgatttcggcgtggcggttcgtccagctccagtgcgtagaccccagttgattaagagccaaagccaatgtcagatacatggtatatttacagtttgaggtgggtttgcgatgcgagtgcgactatatgttcaggtatggtggtgttgaagggaaggtcgtggaacaatttttcaatttacaccatgtcatagatactacatttgaaacattcggtgtagcattatttgacatcttagataagtacaattttatccatctatatggtacaaggttattgtatttctagttgttgcttgggtattcattatttctttgagtaactctctttgattgtgaccataacaagtgtgtcatacaagagaagtgaccaatgttcttaaggcggtgagaaagtaaacatgaccatcgccttaaggcctaggcgacgcctaggcgagcaaggcgcctagaattatccgagtgcctggacgcctaggcgacgccttaaaaacactggaagttacacattgattgaaagtcgtcagaacaatatttgagtaaagcttgatgccttgaagcttgaatcgggtagagaaaacatcaacattctaatcttgctacacctagggatgtgagatggagttcacatcacataactcttgtccgatagaagctaatgtgggacttaggtattgaggtgcttgaaatggttgataaggatatgtgtgatccttctctagctaaggggttgcttgagaaaatggagccttttgagtttgttttcattatgaagcttatgtaaaaattgtttgctatcacaaatgagcttttgcatattttgcaaagacaagatataaatatagttcatgctatagaactaacctaagatgtaaaagatcaactagccacattgggggatattgggtgggatcatgtgtttgatgaggctaagcaatattttgagcaaaaaattggtgtcaaatatggtgaatgacatacctgaaaggatcacgatgcccaagagggaggtgaattgggcttttctaaaaatcaacactaattaaaacataaacaagagaccaacttcaccccaacaactagcactaagagaataatattagaaatacaataatgctaagac

SEQ ID NO: 221784 - DNA, 497 bp, Zea Mays
atggcatgtaggttctccatcctgctcgccatcgcgacactggctatgatgttcgcagtcgatcaagagcatagtggcgacgacttctcctttacactcaaggagggcccgactgtcacttggacgctcgacaccaagaccccgctcaagtaccccctctgcatccgcttcgctgtcaagtccggtggctaccgcatcgccgacgacgtcatccccgccaatttcaaggccggcaccacctacaagaccaccctcagcatctgatcatcctcttatgaggaataatattttgaaagagctcatctgatccatgtgccagcgagctaatatttaatttttgttctatggttattttatggcaccacaccacccaagaaataagttatgttacatgtcccttcgtgcaccttgttgtgttgggttaatacggttatataaattgaaatacaatatgtatttaatatttttagagagaaatatgttgatttggtcaagaa

SEQ ID NO: 221785 - DNA, 497 bp, Zea Mays
agaacatcagatattgaagtgcaaccaagatttttagtgctaggggcagttgatgactcgacacctgtggaaaaactttgaggagagaaatgacgacatcggtctggacgaatggcgagctcgacgatctagagtcagatctggtggggaagaagtctggtcggtcattaccgacggcaacgctggctgcagatttgatcgtgccaccagcataagagatcaaggagttttttaccatcgccgaggcggccagtacaagcgcttcgcttccaatgtcttactctttcagcacttggatagtacaagcgtgctgaagatgagcatctcattgggtttaaggtgtgacgacagttcccttgactattgggctcaccttgcccaggaaataactcttgaccatgtgaaggcagttggctttcttggagatgggttttggcgccacactagagatgagcaaatgaaacttgatataggttgttagcaaaattcagtttttt

SEQ ID NO: 221786 - DNA, 628 bp, Zea Mays
caagatttgcccgtgaagacaagaaggggagatgcctgcctctgtcagcccgtcgtctccaggtgcagatacaccatctccatgctcttcgatcccgacgtcgtcctatcagttgtcttcggcaagaatggcgggctcgagcagatcagtattaggaagggctatgtggacatgtgcactgtcgatgccacaactttgaccaagattagtgacgagagaaatgacgacatcggtctggacgaatggcgagctcgacgatctagagtcagatctggtggggaagaagtctggtcggtcattaccgacggcaacgctggctgcagatttgatcgtgccaccagcataagagatcaaggagttttttaccatcgccgaggcggccagtacaagcgcttcgcttccaatgtcttactctttcagcacttggatagtacaagcgtgctgaagatgagcatctcattgggtttaaggtgtgacgacagttcccttgactattgggctcaccttgcccaggaaataactcttgaccatgtgaaggcagttggctttcttggagatgggttttggcgccacactagagatgagcaaatgaaacttgatataggttgttagcaaaattcagtttttt

SEQ ID NO: 221787 - DNA, 1904 bp, Zea Mays
cacgacttcaggatacaagtggagactctagagtgcaccaggccttcccttcagtctaagaattggcaatgccacacacacaaaaagcaacttaaaacattttagcattgccaaatccttgtacgacaatggcatcaactgccactctaatggaatgcttggtttggtgaatcaaaccattttcgattgggtgatgtatcataaacttgtttactattttttctcaaatacgtaggagagctatgtatcattacgtgagctacgtatcattacgttaacaaggaagaagagctaaaactcccaaaggagcctagacgccacaagaaataactggaatgaaaagggaagagcaaaaatgacgacaacaatgacccagctaaacacaagccaccatattatctagtagcggcctctaagtaagctaacccactagcaccagctacacaccagagattagcctcttcagaaatctgcttaagaataagctgcacattgagaacagctacattgaacactcactatggtgagttccacagggaccaggcgaccaaaataattactgaattcagccctattttagttgctaaggcaacaaatctggaatgcccatccaccagactggggggaccttgtcatcagagtggagagtagaaaggctttcatgctttctgccaataagccaattggaggttatgtcgctccaagctacaagttgaggacaactcttcttgtgcaagagaggacacgtgtggagagaatgttgcagcccatgaaggaaactttgagctctaaagaagatagcccaatgtttcttagagcgatcaccactgaaggaatatccaagaccgagcatatttcagagaagatgttagcagtaattgatgatgttggggcacaaaatgttgtgcaagtgatcactgacaacgctgccaattgcagagctgctggcatcaaagttgagcagaagcaccctcattttttggatcccttgtgttgtgcatactttgaatcttgctttaaggaacatatgtgctcctagggaaattgaagatgtgctttatactgaattctagtggattcacgaagtcattggagatgccagcatgattaaaaatttcatcatgaatcactccatgaggttgtctatgttcaatgaggaaaggaaagtgaaattcattgccattgctgacacaaaatttgcctctgctattgtgatgttgaagagatttattgctataaaagatgctctttcagtgatggtagtgagtgaaaagtgcagtgcgccagtgcctataggaaagataatcctcgtcaagctcgatttgtcaaggagaagattgaatgatctgtggtggtataaaaatgagctattttcttagtttcattgagcctatctatgctatgatacgggaagatgatactgacaagccatgcctctatttgatatgagatgtgggacacaatgatagagaaggtgaagagcgtgatctatcgtcatgaaatgaaagaaccacatgaataatctatcttctactcagctgtgcatgacatcttggtgagtcgatggacaaaaagcaacacgcccttgcattgcttggcacactcactaagcctagtggtgtgatgattttagacatcattgaaatttaattctgtatcaggcttagtttctttgttatgctttctccggtaaactggtgatccgagatactgttgctttcttaaaggcagaggttttcctcttttcaaaataaaaaaagaacacatgcctgccagagaggaatcagagatattgatccaaccaaaacaaacaagactgacaaactacaaacagaagaacaagaaactaaagtgtgggataacctgtccggtcctctcaaaatagtcgttgagcgcccactggt

SEQ ID NO: 221788 - DNA, 2427 bp, Zea Mays
agcattgtttatttgggtgccgcgtccctgtccgaccaccgggtggtggttagcctccgggttggccgagccaggaaagctaccgctcctcctcttcttctcctccctccctggctccctccctccctctcgtctcctcgccaagaacgcactgagtccattcctcctcttcccctcctatcgcctctctctgcccctctcctccccggagattcctgctcctcccgactcccaagggttatcctattcactctgcctgctgccaaggccaactaggatatcaactaggaggagttgaggaggaatggctgttggcggaactcaaccggtcctcaggaagtacctaggtgccctcaaggacacaacgactgtgagcctggcaaaagtgaacagtgattataaggaattggatattgcaattgtcaaggccacaaaccatgttgagcgtccatcaaaggagaagtacataagagaaattttccattccatttctgctgctaggccacgggcagatgtagcttattgcattcatgcccttgctagacgtctttcgaagacgcgcaattgggcggttgcgctaaagacattgatcgtcattcatcgtgcccttcgggaagttgatcccacttttcgtgaagagcttcttaattatggcagatctaggtcacatatgttgaacatggcctactttaaggatgactctagtgcagaagcttgggactattctgcatgggtgcgcatttatgctttatatttagaggagagactcgaatgtttccgagtgttgaagtatgatgtagaaacagatcctccgaggactaaggatcttgatactgttgatttgcttgatcatctgccacaattgcagcaactcctttttcgtcttcttgcttgccagccacaaggagcgtcatcttacaatgttataatccagcatgcactctcaatggttgctttagagagtgttaagatctacactgcaattagcgatggaacaatcaatctagttgacaagttcttcgagatgcaaaggaatgatgctgttagggcacttgatgtatacaaaagagcaactaaccaggctgaacgactttcagaatttcatgaagtgtgtaaaactatacacattgggcgtggtgagaaattcctgaaaatcgagcagcctccagcatcattcctgcagactatggaggactatgttagagatgctccaacaggtcaaaaacaaaagactatactagcgatagaatacaaaaaagagccagaggaggaagaaaaaccggcctcccctcctcctgctccagaacaggaaccggaacaagagcctgagccagaacccgaaccagtgaaagaggaagcaccagaagccgagccggacttgctgggtctgaacgaaccgagccctgctgcgaccgcgatagaagagcagaatgctttggcgctagcaattgtcccgatagatgatgttccgggagctgctcctacttttgagaacggagtcacaggctgggaactggccctggtgacagcaccgagttcgaccgagaccgccgttgccccaagcaagaaactggccggtggtctggacttgctgacccttgatagcctgtacgacgaggcgaaccggagagcgagccagccggcgagctacaacccctgggatgcaaccgcgtctgccccgatgatgaccaccatggcgccggcgatgcacgatccgttctacgcctcgaacgggtacgcggcgccgcacggcgtgcagatggcggcgatggctcaccaccagcagcagcagcaggttttcatgctgcagcagcagatgatggcgccggcgccggcggtccaccacccgatgcagatgcagcagaaccccgcgaaccctttcggcaaccccttcgcggccgccggcgcgcatccctacggcgccgccggcatgccgctccacgccgggcccggcaacgtctacacggggctgatctgatctagtaccccacgcggccacgcccggtggccagtttcttggttgcgttagcgctactgttgccccaccattcattctttttgtccaagttttcttggtgccattgtgagaaggaaatttgtagcacagacaggcaggcaggcaggtagaggcggtcacggttggttatttataaatagcagcgtcgggtggtgtcctgtacgtaggaggtgagtgcatgtatattatacaacatagagtttggccacttgttcgtgtgcacatgagagtcgattctcgtggcggcgagactcgtcaggacggcccgtcgagattgagattggattattcttggtgaacatacgctggatacggttgaataatgcaggcattcttttttttagcagctgactttgtgtgatccaatggaaacaagtagatcgacatctcatcatgaagctggaaagtcg

SEQ ID NO: 221789 - DNA, 2394 bp, Zea Mays
gtccctgtccgaccaccgggtggtggttagcctccgggttggccgagccaggaaagctaccgctcctcctcttcttctcctccctccctggctccctccctccctctcgtctcctcgccaagaacgcactgagtccattcctcctcttcccctcctatcgcctctctctgcccctctcctccccggagattcctgctcctcccgactcccaagggttatcctattcactctgcctgctgccaaggccaactaggatatcaactaggaggagttgaggaggaatggctgttggcggaactcaaccggtcctcaggaagtacctaggtgccctcaaggacacaacgactgtgagcctggcaaaagtgaacagtgattataaggaattggatattgcaattgtcaaggccacaaaccatgttgagcgtccatcaaaggagaagtacataagagaaattttccattccatttctgctgctaggccacgggcagatgtagcttattgcattcatgcccttgctagacgtctttcgaagacgcgcaattgggcggttgcgctaaagacattgatcgtcattcatcgtgcccttcgggaagttgatcccacttttcgtgaagagcttcttaattatggcagatctaggtcacatatgttgaacatggcctactttaaggatgactctagtgcagaagcttgggactattctgcatgggtgcgcatttatgctttatatttagaggagagactcgaatgtttccgagtgttgaagtatgatgtagaaacagatcctccgaggactaaggatcttgatactgttgatttgcttgatcatctgccacaattgcagcaactcctttttcgtcttcttgcttgccagccacaaggagcgtcatcttacaatgttataatccagcatgcactctcaatgagagtgttaagatctacactgcaattagcgatggaacaatcaatctagttgacaagttcttcgagatgcaaaggaatgatgctgttagggcacttgatgtatacaaaagagcaactaaccaggctgaacgactttcagaatttcatgaagtgtgtaaaactatacacattgggcgtggtgagaaattcctgaaaatcgagcagcctccagcatcattcctgcagactatggaggactatgttagagatgctccaacaggtcaaaaacaaaagactatactagcgatagaatacaaaaaagagccagaggaggaagaaaaaccggcctcccctcctcctgctccagaacaggaaccggaacaagagcctgagccagaacccgaaccagtgaaagaggaagcaccagaagccgagccggacttgctgggtctgaacgaaccgagccctgctgcgaccgcgatagaagagcagaatgctttggcgctagcaattgtcccgatagatgatgttccgggagctgctcctacttttgagaacggagtcacaggctgggaactggccctggtgacagcaccgagttcgaccgagaccgccgttgccccaagcaagaaactggccggtggtctggacttgctgacccttgatagcctgtacgacgaggcgaaccggagagcgagccagccggcgagctacaacccctgggatgcaaccgcgtctgccccgatgatgaccaccatggcgccggcgatgcacgatccgttctacgcctcgaacgggtacgcggcgccgcacggcgtgcagatggcggcgatggctcaccaccagcagcagcagcaggttttcatgctgcagcagcagatgatggcgccggcgccggcggtccaccacccgatgcagatgcagcagaaccccgcgaaccctttcggcaaccccttcgcggccgccggcgcgcatccctacggcgccgccggcatgccgctccacgccgggcccggcaacgtctacacggggctgatctgatctagtaccccacgcggccacgcccggtggccagtttcttggttgcgttagcgctactgttgccccaccattcattctttttgtccaagttttcttggtgccattgtgagaaggaaatttgtagcacagacaggcaggcaggcaggtagaggcggtcacggttggttatttataaatagcagcgtcgggtggtgtcctgtacgtaggaggtgagtgcatgtatattatacaacatagagtttggccacttgttcgtgtgcacatgagagtcgattctcgtggcggcgagactcgtcaggacggcccgtcgagattgagattggattattcttggtgaacatacgctggatacggttgaataatgcaggcattcttttttttagcagctgactttgtgtgatccaatggaaacaagtagatcgacatctcatcatgaagctggaaagtcg

SEQ ID NO: 221790 - DNA, 2488 bp, Zea Mays
ggtggttagcctccgggttggccgagccaggaaagctaccgctcctcctcttcttctcctccctccctggctccctccctccctctcgtctcctcgccaagaacgcactgagtccattcctcctcttcccctcctatcgcctctctctgcccctctcctccccggagattcctgctcctcccgactcccaagggttatcctattcactctgcctgctgccaaggccaactaggatatcaactaggaggagttgaggaggaatggctgttggcggaactcaaccggtcctcaggaagtacctaggtgccctcaaggacacaacgactgtgagcctggcaaaagtgaacagtgattataaggaattggatattgcaattgtcaaggccacaaaccatgttgagcgtccatcaaaggagaagtacataagagaaattttccattccatttctgctgctaggccacgggcagatgtagcttattgcattcatgcccttgctagacgtctttcgaagacgcgcaattgggcggttgcgctaaagacattgatcgtcattcatcgtgcccttcgggaagttgatcccacttttcgtgaagagcttcttaattatggcagatctaggtcacatatgttgaacatggcctactttaaggatgactctagtgcagaagcttgggactattctgcatgggtgcgcatttatgctttatatttagaggagagactcgaatgtttccgagtgttgaagtatgatgtagaaacagatcctccgaggactaaggatcttgatactgttgatttgcttgatcatctgccacaattgcagcaactcctttttcgtcttcttgcttgccagccacaaggagcgtcatcttacaatgttataatccagcatgcactctcaatggttgctttagagagtgttaagatctacactgcaattagcgatggaacaatcaatctagttgacaagttcttcgagatgcaaaggaatgatgctgttagggcacttgatgtatacaaaagagcaactaaccaggctgaacgactttcagaatttcatgaagtgtgtaaaactatacacattgggcgtggtgagaaattcctgaaaatcgagcagcctccagcatcattcctgcagactatggaggactatgttagagatgctccaacaggtcaaaaacaaaagctattcagattgaagttatcaggaggcccttcaaccatcttgttcatctcgttatacagttctcacccagtcttcttgcctctaagcgtacttcatttgttgcagactatactagcgatagaatacaaaaaagagccagaggaggaagaaaaaccggcctcccctcctcctgctccagaacaggaaccggaacaagagcctgagccagaacccgaaccagtgaaagaggaagcaccagaagccgagccggacttgctgggtctgaacgaaccgagccctgctgcgaccgcgatagaagagcagaatgctttggcgctagcaattgtcccgatagatgatgttccgggagctgctcctacttttgagaacggagtcacaggctgggaactggccctggtgacagcaccgagttcgaccgagaccgccgttgccccaagcaagaaactggccggtggtctggacttgctgacccttgatagcctgtacgacgaggcgaaccggagagcgagccagccggcgagctacaacccctgggatgcaaccgcgtctgccccgatgatgaccaccatggcgccggcgatgcacgatccgttctacgcctcgaacgggtacgcggcgccgcacggcgtgcagatggcggcgatggctcaccaccagcagcagcagcaggttttcatgctgcagcagcagatgatggcgccggcgccggcggtccaccacccgatgcagatgcagcagaaccccgcgaaccctttcggcaaccccttcgcggccgccggcgcgcatccctacggcgccgccggcatgccgctccacgccgggcccggcaacgtctacacggggctgatctgatctagtaccccacgcggccacgcccggtggccagtttcttggttgcgttagcgctactgttgccccaccattcattctttttgtccaagttttcttggtgccattgtgagaaggaaatttgtagcacagacaggcaggcaggcaggtagaggcggtcacggttggttatttataaatagcagcgtcgggtggtgtcctgtacgtaggaggtgagtgcatgtatattatacaacatagagtttggccacttgttcgtgtgcacatgagagtcgattctcgtggcggcgagactcgtcaggacggcccgtcgagattgagattggattattcttggtgaacatacgctggatacggttgaataatgcaggcattcttttttttagcagctgactttgtgtgatccaatggaaacaagtagatcgacatctcatcatgaagctggaaagtcg

SEQ ID NO: 221791 - DNA, 2280 bp, Zea Mays
ttagcctccgggttggccgagccaggaaagctaccgctcctcctcttcttctcctccctccctggctccctccctccctctcgtctcctcgccaagaacgcactgagtccattcctcctcttcccctcctatcgcctctctctgcccctctcctccccggagattcctgctcctcccgactcccaagggttatcctattcactctgcctgctgccaaggccaactaggatatcaactaggaggagttgaggaggaatggctgttggcggaactcaaccggtcctcaggaagtacctaggtgccctcaaggacacaacgactgtgagcctggcaaaagtgaacagtgattataaggaattggatattgcaattgtcaaggccacaaaccatgttgagcgtccatcaaaggagaagtacataagaggttgcgctaaagacattgatcgtcattcatcgtgcccttcgggaagttgatcccacttttcgtgaagagcttcttaattatggcagatctaggtcacatatgttgaacatggcctactttaaggatgactctagtgcagaagcttgggactattctgcatgggtgcgcatttatgctttatatttagaggagagactcgaatgtttccgagtgttgaagtatgatgtagaaacagatcctccgaggactaaggatcttgatactgttgatttgcttgatcatctgccacaattgcagcaactcctttttcgtcttcttgcttgccagccacaaggagcgtcatcttacaatgttataatccagcatgcactctcaatggttgctttagagagtgttaagatctacactgcaattagcgatggaacaatcaatctagttgacaagttcttcgagatgcaaaggaatgatgctgttagggcacttgatgtatacaaaagagcaactaaccaggctgaacgactttcagaatttcatgaagtgtgtaaaactatacacattgggcgtggtgagaaattcctgaaaatcgagcagcctccagcatcattcctgcagactatggaggactatgttagagatgctccaacaggtcaaaaacaaaagactatactagcgatagaatacaaaaaagagccagaggaggaagaaaaaccggcctcccctcctcctgctccagaacaggaaccggaacaagagcctgagccagaacccgaaccagtgaaagaggaagcaccagaagccgagccggacttgctgggtctgaacgaaccgagccctgctgcgaccgcgatagaagagcagaatgctttggcgctagcaattgtcccgatagatgatgttccgggagctgctcctacttttgagaacggagtcacaggctgggaactggccctggtgacagcaccgagttcgaccgagaccgccgttgccccaagcaagaaactggccggtggtctggacttgctgacccttgatagcctgtacgacgaggcgaaccggagagcgagccagccggcgagctacaacccctgggatgcaaccgcgtctgccccgatgatgaccaccatggcgccggcgatgcacgatccgttctacgcctcgaacgggtacgcggcgccgcacggcgtgcagatggcggcgatggctcaccaccagcagcagcagcaggttttcatgctgcagcagcagatgatggcgccggcgccggcggtccaccacccgatgcagatgcagcagaaccccgcgaaccctttcggcaaccccttcgcggccgccggcgcgcatccctacggcgccgccggcatgccgctccacgccgggcccggcaacgtctacacggggctgatctgatctagtaccccacgcggccacgcccggtggccagtttcttggttgcgttagcgctactgttgccccaccattcattctttttgtccaagttttcttggtgccattgtgagaaggaaatttgtagcacagacaggcaggcaggcaggtagaggcggtcacggttggttatttataaatagcagcgtcgggtggtgtcctgtacgtaggaggtgagtgcatgtatattatacaacatagagtttggccacttgttcgtgtgcacatgagagtcgattctcgtggcggcgagactcgtcaggacggcccgtcgagattgagattggattattcttggtgaacatacgctggatacggttgaataatgcaggcattcttttttttagcagctgactttgtgtgatccaatggaaacaagtagatcgacatctcatcatgaagctggaaagtcg

SEQ ID NO: 221792 - DNA, 2192 bp, Zea Mays
gtgagtgcgctgtgcgggctacgctctcttaggccaactaggatatcaactaggaggagttgaggaggaatggctgttggcggaactcaaccggtcctcaggaagtacctaggtgccctcaaggacacaacgactgtgagcctggcaaaagtgaacagtgattataaggaattggatattgcaattgtcaaggccacaaaccatgttgagcgtccatcaaaggagaagtacataagagaaattttccattccatttctgctgctaggccacgggcagatgtagcttattgcattcatgcccttgctagacgtctttcgaagacgcgcaattgggcggttgcgctaaagacattgatcgtcattcatcgtgcccttcgggaagttgatcccacttttcgtgaagagcttcttaattatggcagatctaggtcacatatgttgaacatggcctactttaaggatgactctagtgcagaagcttgggactattctgcatgggtgcgcatttatgctttatatttagaggagagactcgaatgtttccgagtgttgaagtatgatgtagaaacagatcctccgaggactaaggatcttgatactgttgatttgcttgatcatctgccacaattgcagcaactcctttttcgtcttcttgcttgccagccacaaggagcgtcatcttacaatgttataatccagcatgcactctcaatggttgctttagagagtgttaagatctacactgcaattagcgatggaacaatcaatctagttgacaagttcttcgagatgcaaaggaatgatgctgttagggcacttgatgtatacaaaagagcaactaaccaggctgaacgactttcagaatttcatgaagtgtgtaaaactatacacattgggcgtggtgagaaattcctgaaaatcgagcagcctccagcatcattcctgcagactatggaggactatgttagagatgctccaacaggtcaaaaacaaaagactatactagcgatagaatacaaaaaagagccagaggaggaagaaaaaccggcctcccctcctcctgctccagaacaggaaccggaacaagagcctgagccagaacccgaaccagtgaaagaggaagcaccagaagccgagccggacttgctgggtctgaacgaaccgagccctgctgcgaccgcgatagaagagcagaatgctttggcgctagcaattgtcccgatagatgatgttccgggagctgctcctacttttgagaacggagtcacaggctgggaactggccctggtgacagcaccgagttcgaccgagaccgccgttgccccaagcaagaaactggccggtggtctggacttgctgacccttgatagcctgtacgacgaggcgaaccggagagcgagccagccggcgagctacaacccctgggatgcaaccgcgtctgccccgatgatgaccaccatggcgccggcgatgcacgatccgttctacgcctcgaacgggtacgcggcgccgcacggcgtgcagatggcggcgatggctcaccaccagcagcagcagcaggttttcatgctgcagcagcagatgatggcgccggcgccggcggtccaccacccgatgcagatgcagcagaaccccgcgaaccctttcggcaaccccttcgcggccgccggcgcgcatccctacggcgccgccggcatgccgctccacgccgggcccggcaacgtctacacggggctgatctgatctagtaccccacgcggccacgcccggtggccagtttcttggttgcgttagcgctactgttgccccaccattcattctttttgtccaagttttcttggtgccattgtgagaaggaaatttgtagcacagacaggcaggcaggcaggtagaggcggtcacggttggttatttataaatagcagcgtcgggtggtgtcctgtacgtaggaggtgagtgcatgtatattatacaacatagagtttggccacttgttcgtgtgcacatgagagtcgattctcgtggcggcgagactcgtcaggacggcccgtcgagattgagattggattattcttggtgaacatacgctggatacggttgaataatgcaggcattcttttttttagcagctgactttgtgtgatccaatggaaacaagtagatcgacatctcatcatgaagctggaaagtcg

SEQ ID NO: 221793 - DNA, 2233 bp, Zea Mays
tggcctcgtccgccatttctggaatcgtggacgcgtgactggaattggatccagctagcctctcgtggatttggccaactaggatatcaactaggaggagttgaggaggaatggctgttggcggaactcaaccggtcctcaggaagtacctaggtgccctcaaggacacaacgactgtgagcctggcaaaagtgaacagtgattataaggaattggatattgcaattgtcaaggccacaaaccatgttgagcgtccatcaaaggagaagtacataagagaaattttccattccatttctgctgctaggccacgggcagatgtagcttattgcattcatgcccttgctagacgtctttcgaagacgcgcaattgggcggttgcgctaaagacattgatcgtcattcatcgtgcccttcgggaagttgatcccacttttcgtgaagagcttcttaattatggcagatctaggtcacatatgttgaacatggcctactttaaggatgactctagtgcagaagcttgggactattctgcatgggtgcgcatttatgctttatatttagaggagagactcgaatgtttccgagtgttgaagtatgatgtagaaacagatcctccgaggactaaggatcttgatactgttgatttgcttgatcatctgccacaattgcagcaactcctttttcgtcttcttgcttgccagccacaaggagcgtcatcttacaatgttataatccagcatgcactctcaatggttgctttagagagtgttaagatctacactgcaattagcgatggaacaatcaatctagttgacaagttcttcgagatgcaaaggaatgatgctgttagggcacttgatgtatacaaaagagcaactaaccaggctgaacgactttcagaatttcatgaagtgtgtaaaactatacacattgggcgtggtgagaaattcctgaaaatcgagcagcctccagcatcattcctgcagactatggaggactatgttagagatgctccaacaggtcaaaaacaaaagactatactagcgatagaatacaaaaaagagccagaggaggaagaaaaaccggcctcccctcctcctgctccagaacaggaaccggaacaagagcctgagccagaacccgaaccagtgaaagaggaagcaccagaagccgagccggacttgctgggtctgaacgaaccgagccctgctgcgaccgcgatagaagagcagaatgctttggcgctagcaattgtcccgatagatgatgttccgggagctgctcctacttttgagaacggagtcacaggctgggaactggccctggtgacagcaccgagttcgaccgagaccgccgttgccccaagcaagaaactggccggtggtctggacttgctgacccttgatagcctgtacgacgaggcgaaccggagagcgagccagccggcgagctacaacccctgggatgcaaccgcgtctgccccgatgatgaccaccatggcgccggcgatgcacgatccgttctacgcctcgaacgggtacgcggcgccgcacggcgtgcagatggcggcgatggctcaccaccagcagcagcagcaggttttcatgctgcagcagcagatgatggcgccggcgccggcggtccaccacccgatgcagatgcagcagaaccccgcgaaccctttcggcaaccccttcgcggccgccggcgcgcatccctacggcgccgccggcatgccgctccacgccgggcccggcaacgtctacacggggctgatctgatctagtaccccacgcggccacgcccggtggccagtttcttggttgcgttagcgctactgttgccccaccattcattctttttgtccaagttttcttggtgccattgtgagaaggaaatttgtagcacagacaggcaggcaggcaggtagaggcggtcacggttggttatttataaatagcagcgtcgggtggtgtcctgtacgtaggaggtgagtgcatgtatattatacaacatagagtttggccacttgttcgtgtgcacatgagagtcgattctcgtggcggcgagactcgtcaggacggcccgtcgagattgagattggattattcttggtgaacatacgctggatacggttgaataatgcaggcattcttttttttagcagctgactttgtgtgatccaatggaaacaagtagatcgacatctcatcatgaagctggaaagtcg

SEQ ID NO: 221794 - DNA, 418 bp, Zea Mays
ccgtcgctagcctactgctccctcccggcgctcgcctagtagcgcgccgacacggtgccctcgcccccacagtcgtgtcctccggtctgtgggcgtccacctatggcgctctcagacgtcggcaccatgtcggctaagcggggaggtggcggttgcttcttggttccagtccctcgggcactcgctctcttgcccgacaatgactgggcgcccaccaccctacgccatgtctccaactcgttgccaagccttcgtgagggaggaaaagtagggtagccagaatctctgttggtgtcacctgtttcattgtgttcatgatgatcctttcagtaataggcctttttaggtattaaaggaaacgtttgtgctctggtttctgcaagaggtttgcacataaacaatttttattgcagtctag

SEQ ID NO: 221795 - DNA, 2165 bp, Zea Mays
ctcatcgcccgggcgcgacgcggtttggccaccttccctgaggcttccctccgctcaaatccacaatcagcaaccactacgggagcgagacgagacgcaccaccaaccgaagcggcgataacacctccccccttggccctcggcacacgcgtcggcaccttgcacacttgcacttggttggagctcctctaccttttccatcgctctgctctgctccgcgtctccgtccgccccggcaaaagcaaaacacagccatggaggggtacgaccgcgagttctggcagttcagcgaccagctgcgcctgcagacgaccgccttctccggcctctccctcggcgactccatctggtctccggccaccggcgccggcgggcggcgcaacaacaacaccgacctactcgcggcctccgcgtcggcagccgacgccggcaagcacaacggcgtgggcctcagcctgaatgatggagggcccggactcattggctccgggaagctcgccttcggcggcagcaaggccggccgctacaacaacctcccatccgagaaggccgcgcccgtctacaaccacagcggcgccacgatcaacggcggctacgccaggagcgacaacgccggcctggcggcgttcaacaagatggggagctacttccacaacagtaacggcaacggcggcggcggcggggaggtgaagagctacttcaacaagtccgccggacgggcggcgagcaacaacagccacgggcacgccggcggcggcaagaagggcggcggcgggaagcacggcaagaacgagggcaacggcggcgcggtggcggccacggacaagcggttcaagacgctgccggcgtcggaggcgctgccgcggggcgaggccatcggcggctacatcttcgtctgcaacaacgacaccatggacgagaacctcaggagggagctgttcggtacagggactcggtgcgggccatccgcccggggctgcccctcttcctctacaactactccacccaccagctgcacggcatcttcaaggtacggtacagtacattacagtagccagccaattcctgatttgccttttcatcttcatctgcatctatgctctcatggatccggttccgatcaccaggccgccagcttcggcgggaccaacatcgacccgacggcgtgggaggacaagaagtgccccggcgagtcgcgcttccctgcacaggtgcgagtggcaacgcggaagatctacgatccactggaggaggacgccttccgccccatccttcaccactacgacgggcccaagtttcggctcgagctctccgtcgccgagaccctcgccctcctcgacatcttcgctgacaaggatgacgcctgagccttccttgccgccccctcgccgccagtgccaatccattaatgcacagacaataaaatggctggagggacagaccaaactatccacctttgtttgatatgataaagggctatgtatgaggcacgcgtcccattatttttgtttttattataagactagacctcgttccgtaagatacatgtatcaatattatataaaaacaaaccatcagttcttgtgctgcactacagatgttgtgttggattggaattcgtccctcgcgacaatacctcggttataatactgcgtctgaatgctccagattcgacagcatcagctacctgccacttccacaccatgacttgagcttcgaccgattctggttctagaataaaactcaatcaactcgctggtagctgaactgcacgacacgacaaagcatgctgcacaaacggttggcaccagataaatcaaagtcagctgcggcccataaccttccattcacctaaaacatatttgtacaaaactgcggaacgaagctccagaggagcaatattaacaaacagaaccacaacggagaaaaagggtgggggtgggggtggggggaatctcatctctcctcaactcaaatacatccgacaatctatctccggtcaagaaaacattcataccacatcaaattttcttcccaaaggttttctttgctttccttctccagcttcaaccaaacatattgtgcggagcagggtgagccatgagcgagctgtggtgatggaccatataccacctcccattacagagctcgtacacgttcgtcac

SEQ ID NO: 221796 - DNA, 2935 bp, Zea Mays
cgtcttaccgcctcccaacaaacagcgagcggcgcgacctaagccgctctgcgcccaccggccagccggggcggagagggaccgaccgctcctccgttcgaagtgccggtcctgagtcaccggcgtcgcccgcatccgctgctcagctcgcccgccagcctggtggcgatcggcatcctcttttactccagaaaaataaagatcttctcgcaaaagaaaaaaaggaaaaaaaagagaaaatgtcaatgcactgcaatggttgattctgaaacttggatcagatagacactgatactcattctactcatcaaataagcgttgtcagatcacggtgctacacacactggttcagtgaatctgcaggtgctgctcatatggaaacatacactactgatgacgctcttacgctcatggggtttggaaagttccaagcacttgtccttgcatatgcaggaatgggctgggttgcagaagccatggaggtcatgctattgtcattccttggaccagtggtgcgggaagagtggaatgtctctccccaagacgagagtctgctatccagtgttgtgtttgctggcatgctaatcggagcttgtgcttggggctttatttccgacagatacggaagaaagtaaggatctgctccagcaaactctttatgtttcaatttacaggccttggcttcttaaggcaggcaggaataatttcaagtcctttaggattcacaggaaactgatttcatttctcactagtctgaagatattggatctaatcacacctacgtccaaataaccaatacagttttgacagtggtcgtggtactggtattagttttactatgtgacctgtggttggaatcagttcactgagtcaataaaccaatgagtcatttcagttagcgacctcatgtagtgaatcagcacggtaaaaggcaagcaatttgttcttctctttcgtctagtttgcacctctctcttttatcttccctcttgctacctgtaaaataataaaaccagagtgggatgcctcataaacggccagatttgcataaacaatttgataacccccagcactgctaaatagtgattttgccttcacaaagtcaggacgattatggttttcagtatagggtatagtttgtactagttgtcgttttagctcttttttatgtctatattcaaatacatgaagatgaacctagacacatatataaaacacatacatcaagtgttgtatgaacctactaattaattaaaacgaattttaatctgggacagagggagcattggttataccctattttttactatgattcttctctatgtttgatttgtgccaaacatacatgaaataaaccttgtattttttgtcaggactgttttattgctttcgactctgcttactagtggattgggtcttctaagtgctctatctattaactacttgtgcttgctggttcttcggttttttgtcggcataggagtgggcagtgggcatgtattttcatcttggttcttggagttcgttcctgcaggaaatcgtggcacttggatggttattttttcctttttttggactattggcacagtcttggaggcttcacttgcatgggctgtactatcagcattgagttggaggtggttgctggcattgtcttcccttccatgcttcctcttgcttcttttcttcagaatcacacctgagtcaccacgctatctttgcgcacaaaatagaatgactgatgcaaggtttgtcctggagagaatggccattgcaaaccaagcagctcttcctatgggagttctcacataccaccaagaaacaaaaactgaatgcattactcatgtttctgaggatgaacatcttattccagtcagagagaaggaacatacagataggaatgctattagttccaaatctggtgctgttgctgtattgcacaagctattatcacataacttgctcaaatcaactctacttctttggtttgtttactatgccagttccttcgcttattatgggataacattgctgacatcacaactaagtgatgtgaatagaagctgtaaatctgatctggtctttgaagtgcaccaaaataatggcaatctttataaagatacttttatcactagtttagcagagatcccaggcttgattttatccgctttgcttgttgatcggtttggccggaaagctactatgtcgtgcctgatgtttgcatgttgtgctttccttgggccactcgtacttcatcagaatgagttgctgacaactactcttttattcggagctcgtgcttgtggcaccggtgccactacaactttatgtctatatgcccccgaggtgtatccgacatatgttcgctcaacaggggtcgggatcgcaaccgccatcggtaagatcggcggggttatttgccccctcgtcgccgtgggcatgctgcggagctgccatcagatggaagcggtgctggtgtttgagctggtgctgttcctcgctggggtctcctgcatcctcttccctgtggagaccaagggccgagaaatggactgagcacgcacggtggtggtagctcagcacatttgggcatccagatgggcttgtggttcatcttgattctgtataaacacaactctactacatccgcgacaagcttagcggatatgcaaaggggtgtaaacaggagctatagtaattacgagaaagaactggcaatgagcaatatttgtaacaggattattgttatagaacttcctcatcatcagtcaggaggtaaataaatatgtgaagttaaatagtaaccatgtggtggacagtgattataaacgaggatattctcgtggtgctggatatgcccaacgtcaattcgttgcgggcaacacacaacctaacgcgtgcctccaaacagctatcaattaattatcattacttg

SEQ ID NO: 221797 - DNA, 2192 bp, Zea Mays
gtcttaccgcctcccaacaaacagcgagcggcgcgacctaagccgctctgcgcccaccggccagccggggcggagagggaccgaccgctcctccgttcgaagtgccggtcctgagtcaccggcgtcgcccgcatccgctgctcagctcgcccgccagcctggtggcgatcggcatcctcttttactccagaaaaataaagatcttctcgcaaaagaaaaaaaggaaaaaaaagagaaaatgtcaatgcactgcaatggttgattctgaaacttggatcagatagacactgatactcattctactcatcaaataagcgttgtcagatcacggtgctacacacactggttcagtgaatctgcaggtgctgctcatatggaaacatacactactgatgacgctcttacgctcatggggtttggaaagttccaagcacttgtccttgcatatgcaggaatgggctgggttgcagaagccatggaggtcatgctattgtcattccttggaccagtggtgcgggaagagtggaatgtctctccccaagacgagagtctgctatccagtgttgtgtttgctggcatgctaatcggagcttgtgcttggggctttatttccgacagatacggaagaaagactgttttattgctttcgactctgcttactagtggattgggtcttctaagtgctctatctattaactacttgtgcttgctggttcttcggttttttgtcggcataggagtgggcagtgggcatgtattttcatcttggttcttggagttcgttcctgcaggaaatcgtggcacttggatggttattttttcctttttttggactattggcacagtcttggaggcttcacttgcatgggctgtactatcagcattgagttggaggtggttgctggcattgtcttcccttccatgcttcctcttgcttcttttcttcagaatcacacctgagtcaccacgctatctttgcgcacaaaatagaatgactgatgcaaggtttgtcctggagagaatggccattgcaaaccaagcagctcttcctatgggagttctcacataccaccaagaaacaaaaactgaatgcattactcatgtttctgaggatgaacatcttattccagtcagagagaaggaacatacagataggaatgctattagttccaaatctggtgctgttgctgtattgcacaagctattatcacataacttgctcaaatcaactctacttctttggtttgtttactatgccagttccttcgcttattatgggataacattgctgacatcacaactaagtgatgtgaatagaagctgtaaatctgatctggtctttgaagtgcaccaaaataatggcaatctttataaagatacttttatcactagtttagcagagatcccaggcttgattttatccgctttgcttgttgatcggtttggccggaaagctactatgtcgtgcctgatgtttgcatgttgtgctttccttgggccactcgtacttcatcagaatgagttgctgacaactactcttttattcggagctcgtgcttgtggcaccggtgccactacaactttatgtctatatgcccccgaggtgtatccgacatatgttcgctcaacaggggtcgggatcgcaaccgccatcggtaagatcggcggggttatttgccccctcgtcgccgtgggcatgctgcggagctgccatcagatggaagcggtgctggtgtttgagctggtgctgttcctcgctggggtctcctgcatcctcttccctgtggagaccaagggccgagaaatggactgagcacgcacggtggtggtagctcagcacatttgggcatccagatgggcttgtggttcatcttgattctgtataaacacaactctactacatccgcgacaagcttagcggatatgcaaaggggtgtaaacaggagctatagtaattacgagaaagaactggcaatgagcaatatttgtaacaggattattgttatagaacttcctcatcatcagtcaggaggtaaataaatatgtgaagttaaatagtaaccatgtggtggacagtgattataaacgaggatattctcgtggtgctggatatgcccaacgtcaattcgttgcgggcaacacacaacctaacgcgtgcctccaaacagctatcaattaattatcattacttg

SEQ ID NO: 221798 - DNA, 1968 bp, Zea Mays
ccgcctcccaacaaacagcgagcggcgcgacctaagccgctctgcgcccaccggccagccggggcggagagggaccgaccgctcctccgttcgaagtgccggtcctgagtcaccggcgtcgcccgcatccgctgctcagctcgcccgccagcctggtggcgatcggcatcctcttttactccagaaaaataaagatcttctcgcaaaagaaaaaaaggaaaaaaaagagaaaatgtcaatgcactgcaatggttgattctgaaacttggatcagatagacactgatactcattctactcatcaaataagcgttgtcagatcacggtgctacacacactggttcagtgaatctgcaggtgctgctcatatggaaacatacactactgatgacgctcttacgctcatggggtttggaaagttccaagcacttgtccttgcatatgcaggaatgggctgggttgcagaagccatggaggtcatgctattgtcattccttggaccagtggtgcgggaagagtggaatgtctctccccaagacgagagtctgctatccagtgttgtgtttgctggcatgctaatcggagcttgtgcttggggctttatttccgacagatacggaagaaagaaatcgtggcacttggatggctgtactatcagcattgagttggaggtggttgctggcattgtcttcccttccatgcttcctcttgcttcttttcttcagaatcacacctgagtcaccacgctatctttgcgcacaaaatagaatgactgatgcaaggtttgtcctggagagaatggccattgcaaaccaagcagctcttcctatgggagttctcacataccaccaagaaacaaaaactgaatgcattactcatgtttctgaggatgaacatcttattccagtcagagagaaggaacatacagataggaatgctattagttccaaatctggtgctgttgctgtattgcacaagctattatcacataacttgctcaaatcaactctacttctttggtttgtttactatgccagttccttcgcttattatgggataacattgctgacatcacaactaagtgatgtgaatagaagctgtaaatctgatctggtctttgaagtgcaccaaaataatggcaatctttataaagatacttttatcactagtttagcagagatcccaggcttgattttatccgctttgcttgttgatcggtttggccggaaagctactatgtcgtgcctgatgtttgcatgttgtgctttccttgggccactcgtacttcatcagaatgagttgctgacaactactcttttattcggagctcgtgcttgtggcaccggtgccactacaactttatgtctatatgcccccgaggtgtatccgacatatgttcgctcaacaggggtcgggatcgcaaccgccatcggtaagatcggcggggttatttgccccctcgtcgccgtgggcatgctgcggagctgccatcagatggaagcggtgctggtgtttgagctggtgctgttcctcgctggggtctcctgcatcctcttccctgtggagaccaagggccgagaaatggactgagcacgcacggtggtggtagctcagcacatttgggcatccagatgggcttgtggttcatcttgattctgtataaacacaactctactacatccgcgacaagcttagcggatatgcaaaggggtgtaaacaggagctatagtaattacgagaaagaactggcaatgagcaatatttgtaacaggattattgttatagaacttcctcatcatcagtcaggaggtaaataaatatgtgaagttaaatagtaaccatgtggtggacagtgattataaacgaggatattctcgtggtgctggatatgcccaacgtcaattcgttgcgggcaacacacaacctaacgcgtgcctccaaacagctatcaattaattatcattacttg

SEQ ID NO: 221799 - DNA, 2129 bp, Zea Mays
ccgcctcccaacaaacagcgagcggcgcgacctaagccgctctgcgcccaccggccagccggggcggagagggaccgaccgctcctccgttcgaagtgccggtcctgagtcaccggcgtcgcccgcatccgctgctcagctcgcccgccagcctggtggcgatcggcatcctcttttactccagaaaaataaagatcttctcgcaaaagaaaaaaaggaaaaaaaagagaaaatgtcaatgcactgcaatggttgattctgaaacttggatcagatagacactgatactcattctactcatcaaataagcgttgtcagatcacggtgctacacacactggttcagtgaatctgcaggtgctgctcatatggaaacatacactactgatgacgctcttacgctcatggggtttggaaagttccaagcacttgtccttgcatatgcaggaatgggctgggttgcagaagccatggaggtcatgctattgtcattccttggaccagtggtgcgggaagagtggaatgtctctccccaagacgagagtctgctatccagtgttgtgtttgctggcatgctaatcggagcttgtgcttggggctttatttccgacagatacggaagaaagactgttttattgctttcgactctgcttactagtggattgggtcttctaagtgctctatctattaactacttgtgcttgctggttcttcggttttttgtcggcataggagtgggcagtgggcatgtattttcatcttggttcttggagttcgttcctgcaggaaatcgtggcacttggatggctgtactatcagcattgagttggaggtggttgctggcattgtcttcccttccatgcttcctcttgcttcttttcttcagaatcacacctgagtcaccacgctatctttgcgcacaaaatagaatgactgatgcaaggtttgtcctggagagaatggccattgcaaaccaagcagctcttcctatgggagttctcacataccaccaagaaacaaaaactgaatgcattactcatgtttctgaggatgaacatcttattccagtcagagagaaggaacatacagataggaatgctattagttccaaatctggtgctgttgctgtattgcacaagctattatcacataacttgctcaaatcaactctacttctttggtttgtttactatgccagttccttcgcttattatgggataacattgctgacatcacaactaagtgatgtgaatagaagctgtaaatctgatctggtctttgaagtgcaccaaaataatggcaatctttataaagatacttttatcactagtttagcagagatcccaggcttgattttatccgctttgcttgttgatcggtttggccggaaagctactatgtcgtgcctgatgtttgcatgttgtgctttccttgggccactcgtacttcatcagaatgagttgctgacaactactcttttattcggagctcgtgcttgtggcaccggtgccactacaactttatgtctatatgcccccgaggtgtatccgacatatgttcgctcaacaggggtcgggatcgcaaccgccatcggtaagatcggcggggttatttgccccctcgtcgccgtgggcatgctgcggagctgccatcagatggaagcggtgctggtgtttgagctggtgctgttcctcgctggggtctcctgcatcctcttccctgtggagaccaagggccgagaaatggactgagcacgcacggtggtggtagctcagcacatttgggcatccagatgggcttgtggttcatcttgattctgtataaacacaactctactacatccgcgacaagcttagcggatatgcaaaggggtgtaaacaggagctatagtaattacgagaaagaactggcaatgagcaatatttgtaacaggattattgttatagaacttcctcatcatcagtcaggaggtaaataaatatgtgaagttaaatagtaaccatgtggtggacagtgattataaacgaggatattctcgtggtgctggatatgcccaacgtcaattcgttgcgggcaacacacaacctaacgcgtgcctccaaacagctatcaattaattatcattacttg

SEQ ID NO: 221800 - DNA, 2079 bp, Zea Mays
ccgcctcccaacaaacagcgagcggcgcgacctaagccgctctgcgcccaccggccagccggggcggagagggaccgaccgctcctccgttcgaagtgccggtcctgagtcaccggcgtcgcccgcatccgctgctcagctcgcccgccagcctggtggcgatcggcatcctcttttactccagaaaaataaagatcttctcgcaaaagaaaaaaaggaaaaaaaagagaaaatgtcaatgcactgcaatggttgattctgaaacttggatcagatagacactgatactcattctactcatcaaataagcgttgtcagatcacggtgctacacacactggttcagtgaatctgcaggtgctgctcatatggaaacatacactactgatgacgctcttacgctcatggggtttggaaagttccaagcacttgtccttgcatatgcaggaatgggctgggttgcagaagccatggaggtcatgctattgtcattccttggaccagtggtgcgggaagagtggaatgtctctccccaagacgagagtctgctatccagtgttgtgtttgctggcatgctaatcggagcttgtgcttggggctttatttccgacagatacggaagaaagagtgggcagtgggcatgtattttcatcttggttcttggagttcgttcctgcaggaaatcgtggcacttggatggttattttttcctttttttggactattggcacagtcttggaggcttcacttgcatgggctgtactatcagcattgagttggaggtggttgctggcattgtcttcccttccatgcttcctcttgcttcttttcttcagaatcacacctgagtcaccacgctatctttgcgcacaaaatagaatgactgatgcaaggtttgtcctggagagaatggccattgcaaaccaagcagctcttcctatgggagttctcacataccaccaagaaacaaaaactgaatgcattactcatgtttctgaggatgaacatcttattccagtcagagagaaggaacatacagataggaatgctattagttccaaatctggtgctgttgctgtattgcacaagctattatcacataacttgctcaaatcaactctacttctttggtttgtttactatgccagttccttcgcttattatgggataacattgctgacatcacaactaagtgatgtgaatagaagctgtaaatctgatctggtctttgaagtgcaccaaaataatggcaatctttataaagatacttttatcactagtttagcagagatcccaggcttgattttatccgctttgcttgttgatcggtttggccggaaagctactatgtcgtgcctgatgtttgcatgttgtgctttccttgggccactcgtacttcatcagaatgagttgctgacaactactcttttattcggagctcgtgcttgtggcaccggtgccactacaactttatgtctatatgcccccgaggtgtatccgacatatgttcgctcaacaggggtcgggatcgcaaccgccatcggtaagatcggcggggttatttgccccctcgtcgccgtgggcatgctgcggagctgccatcagatggaagcggtgctggtgtttgagctggtgctgttcctcgctggggtctcctgcatcctcttccctgtggagaccaagggccgagaaatggactgagcacgcacggtggtggtagctcagcacatttgggcatccagatgggcttgtggttcatcttgattctgtataaacacaactctactacatccgcgacaagcttagcggatatgcaaaggggtgtaaacaggagctatagtaattacgagaaagaactggcaatgagcaatatttgtaacaggattattgttatagaacttcctcatcatcagtcaggaggtaaataaatatgtgaagttaaatagtaaccatgtggtggacagtgattataaacgaggatattctcgtggtgctggatatgcccaacgtcaattcgttgcgggcaacacacaacctaacgcgtgcctccaaacagctatcaattaattatcattacttg

SEQ ID NO: 221801 - DNA, 813 bp, Zea Mays
gcttgattgtccatcaaacaaaagcgtcgttctctcttcctggtccaagtgatcttgccaagttacgagcagcaagcagagatcagatcatccatcggcaatgtcgaacatcgggcagtccttccaggccggcaaggcggaggcccagggcgagtaccaggcggagcacgcggcgcagtgcgtcaaggacaccgccggagccgcggccgacagcgcgcagctgcagcagcaccgcgccaccggcaccgttgagcaggctgctgagcaggtggcgcagacgggccagggcgtggcggcaggcgtcaaggacacggtggcgggcgcggcggttggcgtcaccaacacggtggcgggcgtggcggcgggcgtcacgaacacggtgaccggcgcggtggcgggcgtcacgaacacggtgaccggcgcggcggcgggtgtcaaggacaccgtgaccggcggccactgatcgacgacccacccaagaatgctgcatgcatggccaagtgttgagggtttgagcccaaagatggcttgaatttccgtccttttttgctttattttttgacattattgttttaacatgtttcattcacccgtctctgattgggattgtgatcacgaccgcctgcaataaaaaaaggccatctttactatgatccacattatgtttcctagtgcaattaaaggatcatcaatactacaccatgtgtaattctttgcgttgaaaaaaaggaacgggaaggcgaatcttacacttgcggatgcgggccgcggggtagccgcaggaggagcaggtactcttctggaggtggaagc

SEQ ID NO: 221802 - DNA, 801 bp, Zea Mays
gcttgattgtccatcaaacaaaagcgtcgttctctcttcctggtccaagtgatcttgccaagttacgagcagcaagcagagatcagatcatccatcggcaatgtcgaacatcgggcagtccttccaggccggcaaggcggaggcccagggcgagtaccaggcggagcacgcggcgcagtgcgtcaaggacaccgccggagccgcggccgacagcgcgcagctgcagcagcaccgcgccaccggcaccgttgagcaggtggcgcagacgggccagggcgtggcggcaggcgtcaaggacacggtggcgggcgcggcggttggcgtcaccaacacggtggcgggcgtggcggcgggcgtcacgaacacggtgaccggcgcggtggcgggcgtcacgaacacggtgaccggcgcggcggcgggtgtcaaggacaccgtgaccggcggccactgatcgacgacccacccaagaatgctgcatgcatggccaagtgttgagggtttgagcccaaagatggcttgaatttccgtccttttttgctttattttttgacattattgttttaacatgtttcattcacccgtctctgattgggattgtgatcacgaccgcctgcaataaaaaaaggccatctttactatgatccacattatgtttcctagtgcaattaaaggatcatcaatactacaccatgtgtaattctttgcgttgaaaaaaaggaacgggaaggcgaatcttacacttgcggatgcgggccgcggggtagccgcaggaggagcaggtactcttctggaggtggaagc

SEQ ID NO: 221803 - DNA, 436 bp, Zea Mays
tcaaaactggcgccatccagcaccctacccgtctctataaataagaagctctcttcctccgtccccctgcaaaaccccacaccacaccacaccagtgacgagaccaccagtgacaccacaccaccacattttcttcagattcctctccccgctgccgccatccggttatcgggcagaacccctttacccctccttcctctcaccatgggtccaggactctactccgacatcggcagaaaggccagggatctcttgacagggggcttcaatacgggccagcagttggtcctcattacccactgctccaatggaacccggatagcagcttcaagcacaaagagtaacgagttcatcattagtgagatccaggcccagctgaagaataagaatgtcacagtggatgtcaaagcaaattcagaggctaatttctgttcag

SEQ ID NO: 221804 - DNA, 1129 bp, Zea Mays
tcaaaactggcgccatccagcaccctacccgtctctataaataagaagctctcttcctccgtccccctgcaaaaccccacaccacaccacaccagtgacgagaccaccagtgacaccacaccaccacattttcttcagattcctctccccgctgccgccatccggttatcgggcagaacccctttacccctccttcctctcaccatgggtccaggactctactccgacatcggcagaaaggccagggtctcttgacagggggcttcaatacgggccagcagttggtcctcattacccactgctccaatggaacccggatagcagcttcaagcacaaagagtaacgagttcatcattagtgagatccaggcccagctgaagaataagaatgtcacagtggatgtcaaagcaaattcagaggctaatctctcaactacagtcactgttgaggaacttggtgtactaggcttgaaaaagataattaccattccttatccacatccagcatttgggaggcttgaaatccagtacttgcatgattatgctggtatcaacgccagttctaccatgaacagaaaacctttggttaacctttctgctgtatttggcaacaaagctattgctgctggtgctgatgttgtgtatgatggtgctactggggatttcactaagtacaatgctgggttgagtttcaccaatgcagatctcaatgctgctgtgaccttgaacaacaaaggggacagcctcactgcgtcctactaccacttggtggacacagagaagaacacagctgttggtgtggaggtggcccgcaacttctcaaccaaggcgaacagagtcacctttgggatgcggcatgctctggaccctaccaccactgtgaaggcgcgctacagcagcaatggaatggccagcgccctcatccagcacgagtggagacccaagtcattctgcaccctatccaccgaggtcgacgtcaacaggtttgatttcttgcagacccccaagtttgggctatcactggtcctcaagccctgatgatgatgccgatcccccctagtcctagcacagtcaagtctccgtatcaatacttgaggtcgagtgaaataattctgaacctcagctctctc

SEQ ID NO: 221805 - DNA, 866 bp, Zea Mays
aacaatatcagtaagcatgtccatataccaaacacacttttgctttatatgttgtcacctgacctctggagaaaaggaaggagatgaactaaaaaggaatgctgatgttcaagaaatccaccgaaggacaatatttaatctagtttcgagagtcaacatgcctaaaacgatatatgaccatgaaaggattgtatggctaggtgatctcaactataggatcaacttaccatatgagaagacacacgaactcatatccaagcaggactggaacaaattgtttgggaaagaccagctgaaagtagagctgaagaaggggcatctgtttgaaggatggactgaaggggtcatcaactttcctccaacgtataagtacaaggttaactcagaaaagtacataagtgatgataacaaatctggaaggagaacacctgcatggtgtgaccgaattctttcccatggtaagggtatgagattactgtcatataagacagttgatctcagactatcagatcaccgccctgtgactgctgtgtacatggcagatgtggaggttttctcttcaaaaaagctgcagagagctctgaccttcaccgatgcagaggctgaggaacagctctccttcgaggaagacaatgcttctggaatatacaaccttggactatatgaaagttcaagtgaagtttacaccccattagtaagagccaaagttttcagcaaggttacctggttgaagccgcagccgttgatgcgggcgctgagccggccccggcggaacggactgcccgccgtgtcccggtcattcccaacgctgcgacttcgacgctagggctagtttgaaagccacaaaagtggagataatgtgaggg

SEQ ID NO: 221806 - DNA, 1902 bp, Zea Mays
gcgctaagtcactgtgcatgaaattttggtcactgaagattcatactggaaaccaattgggggtggttccttgtggccttcgtagaaggcgcaagtcagagacccttcgtgctcagtatattgatgtcagggagctcaggatttgtgctggaacatggaatgttgcaggcagacttccacctaatgacttggatatccaagaatggttggatatggaagagccagctgatatatatgttcttggatttcaagaaattgttccactaaatgctgggaatatatttggcgctgaagacaaccgccctgtagcaatgtgggagcatattattcgtgaaactttgaataagatcagcccagataaacccaaatataaatctcacagtgatcctccttctccgtcaaggttcaagccatctgatgatgcttttgttatggaagatgaacttattagtgagtctgatagtgaaggtgatggggaggtgcacccattgaacgaacaagatttggtcgactctgttgatggcattcatggtaacaaatgtgaacctcaaacaattttacaagatgaagagttcagcaggttgccttcagtgaagacttttgacagatccaataacctaagttttaaagaatctaatttggaagagaagatctgccagaagatattaactaaaacattcagtcactcagagaggcttgggatgatttggcctgaaccaccattggatatgtttgcccagtgtcttccagacagcacaaagccatttgcttcaggaaaggttttaagatcatatttgtctttcaagtcggtaaatggagattctggtccatttgctgaggacaattcagttcctgatttttatatgagctgtgcagcagttaaaagaaaaaggccatactttgtaagaataataagcaagcagatggttggagtgtacctatcaatatgggtacgaagaagcctccgaaagcacattcagagtctgaaagtatcaactgtaggggttggtgctatgggctacattggtaataagggatcaatatcagtaagcatgtccatataccaaacacacttttgctttatatgttgtcacctgacctctggagaaaaggaaggagatgaactaaaaaggaatgctgatgttcaagaaatccaccgaaggacaatatttaatctagtttcgagagtcaacatgcctaaaacgatatatgaccatgaaaggattgtatggctaggtgatctcaactataggatcaacttaccatatgagaagacacacgaactcatatccaagcaggactggaacaaattgtttgggaaagaccagctgaaagtagagctgaagaaggggcatctgtttgaaggatggactgaaggggtcatcaactttcctccaacgtataagtacaaggttaactcagaaaagtacataagtgatgataacaaatctggaaggagaacacctgcatggtgtgaccgaattctttcccatggtaagggtatgagattactgtcatataagacagttgatctcagactatcagatcaccgccctgtgactgctgtgtacatggcagatgtggaggttttctcttcaaaaaagctgcagagagctctgaccttcaccgatgcagaggctgaggaacagctctccttcgaggaagacaatgcttctggaatatacaaccttggactatatgaaagttcaagtgaagtttacaccccattagtaagagccaaagttttcagcaaggttacctggttgaagccgcagccgttgatgcgggcgctgagccggccccggcggaacggactgcccgccgtgtcccggtcattcccaacgctgcgacttcgacgctagggctagtttgaaagccacaaaagtggagataatgtgaggg

SEQ ID NO: 221807 - DNA, 2191 bp, Zea Mays
aaaaagcgggtaactttctgaaaagggaaaacagggagcataatgctgcacttcactttgttggcggtgatttcagagatgtgcgcatgggagcgcaagttgcacgatgaggagaggagcgtccgaggattcggtgctgaggctattgcacactgacaaactaagatgtactgctagcctgtcgtatgatcactaatttcagataagtatctctaaagcccctttggagcatacacgctcatgcattgaagtaaaaatatacacttgctgaatagtgcataaacctttccgtatgcactgatacaatctactaaatatgtaggaaaccaattgggggtggttccttgtggccttcgtagaaggcgcaagtcagagacccttcgtgctcagtatattgatgtcagggagctcaggatttgtgctggaacatggaatgttgcaggcagacttccacctaatgacttggatatccaagaatggttggatatggaagagccagctgatatatatgttcttggatttcaagaaattgttccactaaatgctgggaatatatttggcgctgaagacaaccgccctgtagcaatgtgggagcatattattcgtgaaactttgaataagatcagcccagataaacccaaatataaatctcacagtgatcctccttctccgtcaaggttcaagccatctgatgatgcttttgttatggaagatgaacttattagtgagtctgatagtgaaggtgatggggaggtgcacccattgaacgaacaagatttggtcgactctgttgatggcattcatggtaacaaatgtgaacctcaaacaattttacaagatgaagagttcagcaggttgccttcagtgaagacttttgacagatccaataacctaagttttaaagaatctaatttggaagagaagatctgccagaagatattaactaaaacattcagtcactcagagaggcttgggatgatttggcctgaaccaccattggatatgtttgcccagtgtcttccagacagcacaaagccatttgcttcaggaaaggttttaagatcatatttgtctttcaagtcggtaaatggagattctggtccatttgctgaggacaattcagttcctgatttttatatgagctgtgcagcagttaaaagaaaaaggccatactttgtaagaataataagcaagcagatggttggagtgtacctatcaatatggagtatttatgttttagcaccaattgtcttccagtctttccattctcatatcactggcatttactttccatcaatacaccaacactacatttggaaaaggggatcaatatcagtaagcatgtccatataccaaacacacttttgctttatatgttgtcacctgacctctggagaaaaggaaggagatgaactaaaaaggaatgctgatgttcaagaaatccaccgaaggacaatatttaatctagtttcgagagtcaacatgcctaaaacgatatatgaccatgaaaggattgtatggctaggtgatctcaactataggatcaacttaccatatgagaagacacacgaactcatatccaagcaggactggaacaaattgtttgggaaagaccagctgaaagtagagctgaagaaggggcatctgtttgaaggatggactgaaggggtcatcaactttcctccaacgtataagtacaaggttaactcagaaaagtacataagtgatgataacaaatctggaaggagaacacctgcatggtgtgaccgaattctttcccatggtaagggtatgagattactgtcatataagacagttgatctcagactatcagatcaccgccctgtgactgctgtgtacatggcagatgtggaggttttctcttcaaaaaagctgcagagagctctgaccttcaccgatgcagaggctgaggaacagctctccttcgaggaagacaatgcttctggaatatacaaccttggactatatgaaagttcaagtgaagtttacaccccattagtaagagccaaagttttcagcaaggttacctggttgaagccgcagccgttgatgcgggcgctgagccggccccggcggaacggactgcccgccgtgtcccggtcattcccaacgctgcgacttcgacgctagggctagtttgaaagccacaaaagtggagataatgtgaggg

SEQ ID NO: 221808 - DNA, 2076 bp, Zea Mays
aagatctcccactttatttttatatcctgcattttgtttacgagttgtaaaagaaaaggaaggtccgaatctgattgcacgaaatacagttgcagcacatggtagcttacaaaaaagcgggtaactttctgaaaagggaaaacagggagcataatgctgcacttcactttgttggcggtgatttcaggttttaaaattattggtctactttagccaaagcgacattgcgttagatcgcatctcttttttttggggggaggtttggatcttgtgctgattttgatcggtgtggaagatcaaagtctaacagtctacatgtaatggaccttgagcagagatgtgcgcatgggagcgcaagttgcacgatgaggagaggagcgtccgaggattcggtgctgaggctattggaaaccaattgggggtggttccttgtggccttcgtagaaggcgcaagtcagagacccttcgtgctcagtatattgatgtcagggagctcaggatttgtgctggaacatggaatgttgcaggcagacttccacctaatgacttggatatccaagaatggttggatatggaagagccagctgatatatatgttcttggatttcaagaaattgttccactaaatgctgggaatatatttggcgctgaagacaaccgccctgtagcaatgtgggagcatattattcgtgaaactttgaataagatcagcccagataaacccaaatataaatctcacagtgatcctccttctccgtcaaggttcaagccatctgatgatgcttttgttatggaagatgaacttattagtgagtctgatagtgaaggtgatggggaggtgcacccattgaacgaacaagatttggtcgactctgttgatggcattcatggtaacaaatgtgaacctcaaacaattttacaagatgaagagttcagcaggttgccttcagtgaagacttttgacagatccaataacctaagttttaaagaatctaatttggaagagaagatctgccagaagatattaactaaaacattcagtcactcagagaggcttgggatgatttggcctgaaccaccattggatatgtttgcccagtgtcttccagacagcacaaagccatttgcttcaggaaaggttttaagatcatatttgtctttcaagtcggtaaatggagattctggtccatttgctgaggacaattcagttcctgatttttatatgagctgtgcagcagttaaaagaaaaaggccatactttgtaagaataataagcaagcagatggttggagtgtacctatcaatatgggtacgaagaagcctccgaaagcacattcagagtctgaaagtatcaactgtaggggttggtgctatgggctacattggtaataagaaggattgtatggctaggtgatctcaactataggatcaacttaccatatgagaagacacacgaactcatatccaagcaggactggaacaaattgtttgggaaagaccagctgaaagtagagctgaagaaggggcatctgtttgaaggatggactgaaggggtcatcaactttcctccaacgtataagtacaaggttaactcagaaaagtacataagtgatgataacaaatctggaaggagaacacctgcatggtgtgaccgaattctttcccatggtaagggtatgagattactgtcatataagacagttgatctcagactatcagatcaccgccctgtgactgctgtgtacatggcagatgtggaggttttctcttcaaaaaagctgcagagagctctgaccttcaccgatgcagaggctgaggaacagctctccttcgaggaagacaatgcttctggaatatacaaccttggactatatgaaagttcaagtgaagtttacaccccattagtaagagccaaagttttcagcaaggttacctggttgaagccgcagccgttgatgcgggcgctgagccggccccggcggaacggactgcccgccgtgtcccggtcattcccaacgctgcgacttcgacgctagggctagtttgaaagccacaaaagtggagataatgtgaggg

SEQ ID NO: 221809 - DNA, 2165 bp, Zea Mays
acaaaagatgggcgtctatttcgatgaactaccggagtacaatgttattcctcgtggtttccaaaacgataagatctcccactttatttttatatcctgcattttgtttacgagttgtaaaagaaaaggaaggtccgaatctgattgcacgaaatacagttgcagcacatggtagcttacaaaaaagcgggtaactttctgaaaagggaaaacagggagcataatgctgcacttcactttgttggcggtgatttcaggttttaaaattattggtctactttagccaaagcgacattgcgttagatcgcatctcttttttttggggggagagatgtgcgcatgggagcgcaagttgcacgatgaggagaggagcgtccgaggattcggtgctgaggctattggaaaccaattgggggtggttccttgtggccttcgtagaaggcgcaagtcagagacccttcgtgctcagtatattgatgtcagggagctcaggatttgtgctggaacatggaatgttgcaggcagacttccacctaatgacttggatatccaagaatggttggatatggaagagccagctgatatatatgttcttggatttcaagaaattgttccactaaatgctgggaatatatttggcgctgaagacaaccgccctgtagcaatgttcaagccatctgatgatgcttttgttatggaagatgaacttattagtgagtctgatagtgaaggtgatggggaggtgcacccattgaacgaacaagatttggtcgactctgttgatggcattcatggtaacaaatgtgaacctcaaacaattttacaagatgaagagttcagcaggttgccttcagtgaagacttttgacagatccaataacctaagttttaaagaatctaatttggaagagaagatctgccagaagatattaactaaaacattcagtcactcagagaggcttgggatgatttggcctgaaccaccattggatatgtttgcccagtgtcttccagacagcacaaagccatttgcttcaggaaaggttttaagatcatatttgtctttcaagtcggtaaatggagattctggtccatttgctgaggacaattcagttcctgatttttatatgagctgtgcagcagttaaaagaaaaaggccatactttgtaagaataataagcaagcagatggttggagtgtacctatcaatatgggtacgaagaagcctccgaaagcacattcagagtctgaaagtatcaactgtaggggttggtgctatgggctacattggtaataagggatcaatatcagtaagcatgtccatataccaaacacacttttgctttatatgttgtcacctgacctctggagaaaaggaaggagatgaactaaaaaggaatgctgatgttcaagaaatccaccgaaggacaatatttaatctagtttcgagagtcaacatgcctaaaacgatatatgaccatgaaaggattgtatggctaggtgatctcaactataggatcaacttaccatatgagaagacacacgaactcatatccaagcaggactggaacaaattgtttgggaaagaccagctgaaagtagagctgaagaaggggcatctgtttgaaggatggactgaaggggtcatcaactttcctccaacgtataagtacaaggttaactcagaaaagtacataagtgatgataacaaatctggaaggagaacacctgcatggtgtgaccgaattctttcccatggtaagggtatgagattactgtcatataagacagttgatctcagactatcagatcaccgccctgtgactgctgtgtacatggcagatgtggaggttttctcttcaaaaaagctgcagagagctctgaccttcaccgatgcagaggctgaggaacagctctccttcgaggaagacaatgcttctggaatatacaaccttggactatatgaaagttcaagtgaagtttacaccccattagtaagagccaaagttttcagcaaggttacctggttgaagccgcagccgttgatgcgggcgctgagccggccccggcggaacggactgcccgccgtgtcccggtcattcccaacgctgcgacttcgacgctagggctagtttgaaagccacaaaagtggagataatgtgaggg

SEQ ID NO: 221810 - DNA, 2589 bp, Zea Mays
aagcaagcaaggctacccgcaaccgccaactgaccgctgtagcggagacgatggcagccgccgcgccctcctcgtcctcgtcctcgtccgcgcgggcgcgcgcgcgcgcgccgccccggccattgcatcccctcgcccgcggcggccccgagcgcgaagaaatggaggccgtcgcggcgacccaccccggcgcgccaccgatgcggcgcaaggggaggaagcagaagcagcggtgctcactcgtgccgtccggacctactacgcagctgtggcccaggaccgtgctgcggaagtggctcaacataaggtcgccggagtccgacttcagcgccgacgagggcgacaccaccggcgacgacaccgacagcgaggtcgattacgaaggaatgaaacaaaagatgggcgtctatttcgatgaactaccggagtacaatgttattcctcgtggtttccaaaacgataagatctcccactttatttttatatcctgcattttgtttacgagttgtaaaagaaaaggaaggtccgaatctgattgcacgaaatacagttgcagcacatggtagcttacaaaaaagcgggtaactttctgaaaagggaaaacagggagcataatgctgcacttcactttgttggcggtgatttcagagatgtgcgcatgggagcgcaagttgcacgatgaggagaggagcgtccgaggattcggtgctgaggctattggaaaccaattgggggtggttccttgtggccttcgtagaaggcgcaagtcagagacccttcgtgctcagtatattgatgtcagggagctcaggatttgtgctggaacatggaatgttgcaggcagacttccacctaatgacttggatatccaagaatggttggatatggaagagccagctgatatatatgttcttggatttcaagaaattgttccactaaatgctgggaatatatttggcgctgaagacaaccgccctgtagcaatgtgggagcatattattcgtgaaactttgaataagatcagcccagataaacccaaatataaatctcacagtgatcctccttctccgtcaaggttcaagccatctgatgatgcttttgttatggaagatgaacttattagtgagtctgatagtgaaggtgatggggaggtgcacccattgaacgaacaagatttggtcgactctgttgatggcattcatggtaacaaatgtgaacctcaaacaattttacaagatgaagagttcagcaggttgccttcagtgaagacttttgacagatccaataacctaagttttaaagaatctaatttggaagagaagatctgccagaagatattaactaaaacattcagtcactcagagaggcttgggatgatttggcctgaaccaccattggatatgtttgcccagtgtcttccagacagcacaaagccatttgcttcaggaaaggttttaagatcatatttgtctttcaagtcggtaaatggagattctggtccatttgctgaggacaattcagttcctgatttttatatgagctgtgcagcagttaaaagaaaaaggccatactttgtaagaataataagcaagcagatggttggagtgtacctatcaatatggagtatttatgttttagcaccaattgtcttccagtctttccattctcatatcactggcatttactttccatcaatacaccaacactacatttggaaaaggggatcaatatcagtaagcatgtccatataccaaacacacttttgctttatatgttgtcacctgacctctggagaaaaggaaggagatgaactaaaaaggaatgctgatgttcaagaaatccaccgaaggacaatatttaatctagtttcgagagtcaacatgcctaaaacgatatatgaccatgaaaggattgtatggctaggtgatctcaactataggatcaacttaccatatgagaagacacacgaactcatatccaagcaggactggaacaaattgtttgggaaagaccagctgaaagtagagctgaagaaggggcatctgtttgaaggatggactgaaggggtcatcaactttcctccaacgtataagtacaaggttaactcagaaaagtacataagtgatgataacaaatctggaaggagaacacctgcatggtgtgaccgaattctttcccatggtaagggtatgagattactgtcatataagacagttgatctcagactatcagatcaccgccctgtgactgctgtgtacatggcagatgtggaggttttctcttcaaaaaagctgcagagagctctgaccttcaccgatgcagaggctgaggaacagctctccttcgaggaagacaatgcttctggaatatacaaccttggactatatgaaagttcaagtgaagtttacaccccattagtaagagccaaagttttcagcaaggttacctggttgaagccgcagccgttgatgcgggcgctgagccggccccggcggaacggactgcccgccgtgtcccggtcattcccaacgctgcgacttcgacgctagggctagtttgaaagccacaaaagtggagataatgtgaggg

SEQ ID NO: 221811 - DNA, 3390 bp, Zea Mays
aaacaggagctctcagccaagcgcccacgacagtaaacaacgcggcgccgccaccggtttcttttgccgaaggaaggcggcagggagatatagcacgctacagccgcagcccgcaggcaagcaccgcggtccgtggctaggctacacctacaccagatcttcttagctggggaccaagcaaagcaagcaaggctacccgcaaccgccaactgaccgctgtagcggagacgatggcagccgccgcgccctcctcgtcctcgtcctcgtccgcgcgggcgcgcgcgcgcgcgccgccccggccattgcatcccctcgcccgcggcggccccgagcgcgaagaaatggaggccgtcgcggcgacccaccccggcgcgccaccgatgcggcgcaaggggaggaagcagaagcagctgtggcccaggaccgtgctgcggaagtggctcaacataaggtcgccggagtccgacttcagcgccgacgagggcgacaccaccggcgacgacaccgacagcgaggtcgattacgaagagatgtgcgcatgggagcgcaagttgcacgatgaggagaggagcgtccgaggattcggtgctgaggctattggtaattacttgtggttgttatcatattagctattatatctgacagcaaatgtgcttctttttttagtggtattattcgcaaacaaacaagaggaagcgctaagtcactgtgcatgaaattttggtcactgaagattcatactggtttgattatttcaaggagatataatatgtacatcatgctatttctatgaaacaaatatcataccccttgtgttaggacatgttcggtttgatatcaatccatgtgagggcttgttcggtttattcccattccatatggattggagtggattgaggtgaattttgacttggtatggatttaattcgactcaatctcactcaatccacgtgaattaactacaaaacgaacaagcccagaattaggtgggattgagtgaggttagatcccaagcaaatcaaagttcttaattttttccaatctcatccaatccatgtggaatgagaataacaaaacaaggccttaggaagtttttgcgacggtttagggatgagtataagctttggtgcctatccagagctacaaaacttcatgctctcggattgaacaggataggagcttttggacgagtcttttcgttgttgtttggtcgttaaaagtatttttcgtaatcttgttgtgaagtgtttccaaccttcctagtgtatggtccttgcatgagttctaatgtatatggaccattttttcctctctataataaaaagatatgcagctctcctgcatatttgataaaaagcaaataccatactaagcatattttttatttttaaaaagaaaaaggggtttccttagtttcccccctcctcatagtaagtttttaaccaccatgtgaactgttagatttccaatgcatgcagcacactgacaaactaagatgtactgctagcctgtcgtatgatcactaatttcagataagaaaccaattgggggtggttccttgtggccttcgtagaaggcgcaagtcagagacccttcgtgctcagtatattgatgtcagggagctcaggatttgtgctggaacatggaatgttgcaggcagacttccacctaatgacttggatatccaagaatggttggatatggaagagccagctgatatatatgttcttggatttcaagaaattgttccactaaatgctgggaatatatttggcgctgaagacaaccgccctgtagcaatgtgggagcatattattcgtgaaactttgaataagatcagcccagataaacccaaatataaatctcacagtgatcctccttctccgtcaaggttcaagccatctgatgatgcttttgttatggaagatgaacttattagtgagtctgatagtgaaggtgatggggaggtgcacccattgaacgaacaagatttggtcgactctgttgatggcattcatggtaacaaatgtgaacctcaaacaattttacaagatgaagagttcagcaggttgccttcagtgaagacttttgacagatccaataacctaagttttaaagaatctaatttggaagagaagatctgccagaagatattaactaaaacattcagtcactcagagaggcttgggatgatttggcctgaaccaccattggatatgtttgcccagtgtcttccagacagcacaaagccatttgcttcaggaaaggttttaagatcatatttgtctttcaagtcggtaaatggagattctggtccatttgctgaggacaattcagttcctgatttttatatgagctgtgcagcagttaaaagaaaaaggccatactttgtaagaataataagcaagcagatggttggagtgtacctatcaatatgggtacgaagaagcctccgaaagcacattcagagtctgaaagtatcaactgtaggggttggtgctatgggctacattggtaataagggatcaatatcagtaagcatgtccatataccaaacacacttttgctttatatgttgtcacctgacctctggagaaaaggaaggagatgaactaaaaaggaatgctgatgttcaagaaatccaccgaaggacaatatttaatctagtttcgagagtcaacatgcctaaaacgatatatgaccatgaaaggattgtatggctaggtgatctcaactataggatcaacttaccatatgagaagacacacgaactcatatccaagcaggactggaacaaattgtttgggaaagaccagctgaaagtagagctgaagaaggggcatctgtttgaaggatggactgaaggggtcatcaactttcctccaacgtataagtacaaggttaactcagaaaagtacataagtgatgataacaaatctggaaggagaacacctgcatggtgtgaccgaattctttcccatggtaagggtatgagattactgtcatataagacagttgatctcagactatcagatcaccgccctgtgactgctgtgtacatggcagatgtggaggttttctcttcaaaaaagctgcagagagctctgaccttcaccgatgcagaggctgaggaacagctctccttcgaggaagacaatgcttctggaatatacaaccttggactatatgaaagttcaagtgaagtttacaccccattagtaagagccaaagttttcagcaaggttacctggttgaagccgcagccgttgatgcgggcgctgagccggccccggcggaacggactgcccgccgtgtcccggtcattcccaacgctgcgacttcgacgctagggctagtttgaaagccacaaaagtggagataatgtgaggg

SEQ ID NO: 221812 - DNA, 2959 bp, Zea Mays
ctccagtccacaaacaggagctctcagccaagcgcccacgacagtaaacaacgcggcgccgccaccggtttcttttgccgaaggaaggcggcagggagatatagcacgctacagccgcagcccgcaggcaagcaccgcggtccgtggctaggctacacctacaccagatcttcttagctggggaccaagcaaagcaagcaaggctacccgcaaccgccaactgaccgctgtagcggagacgatggcagccgccgcgccctcctcgtcctcgtcctcgtccgcgcgggcgcgcgcgcgcgcgccgccccggccattgcatcccctcgcccgcggcggccccgagcgcgaagaaatggaggccgtcgcggcgacccaccccggcgcgccaccgatgcggcgcaaggggaggaagcagaagcagcggtgctcactcgtgccgtccggacctactacgcagctgtggcccaggaccgtgctgcggaagtggctcaacataaggtcgccggagtccgacttcagcgccgacgagggcgacaccaccggcgacgacaccgacagcgaggtcgattacgaagagatgtgcgcatgggagcgcaagttgcacgatgaggagaggagcgtccgaggattcggtgctgaggctattggaaaccaattgggggtggttccttgtggccttcgtagaaggcgcaagtcagagacccttcgtgctcagtatattgatgtcagggagctcaggatttgtgctggaacatggaatgttgcaggcagacttccacctaatgacttggatatccaagaatggttggatatggaagagccagctgatatatatgttcttggatttcaagaaattgttccactaaatgctgggaatatatttggcgctgaagacaaccgccctgtagcaatgtgggagcatattattcgtgaaactttgaataagatcagcccagataaacccaaatataaatctcacagtgatcctccttctccgtcaaggttcaagccatctgatgatgcttttgttatggaagatgaacttattagtgagtctgatagtgaaggtgatggggaggtgcacccattgaacgaacaagatttggtcgactctgttgatggcattcatggtaacaaatgtgaacctcaaacaattttacaagatgaagagttcagcaggttgccttcagtgaagacttttgacagatccaataacctaagttttaaagaatctaatttggaagagaagatctgccagaagatattaactaaaacattcagtcactcagagaggcttgggatgatttggcctgaaccaccattggatatgtttgcccagtgtcttccagacagcacaaagccatttgcttcaggaaaggttttaagatcatatttgtctttcaagtcggtaaatggagattctggtccatttgctgaggacaattcagttcctgatttttatatgagctgtgcagcagttaaaagaaaaaggccatactttgtaagaataataagcaagcagatggttggagtgtacctatcaatatgggtacgaagaagcctccgaaagcacattcagagtctgaaagtatcaactgtaggggttggtgctatgggctacattggtaataaggcaagtttcaataagccacaatattctcagatccctttttgttcaattcaagaaactctgctgtttaaaaaaaacatgctgtctgaaacctgagtttcaaatataagtattccctccgtcctaaaacagtatttgttttagcttttagtttttatgtctatattcaaatggatctagatacatatataaaatacatacatcaagtattgtatgaatctattaattttctaaaacgaattttaatttgggaatgagggagtatttgtcagctggcttgcagtcacttacctaaactaccgtaaacaacaactgacatttttgtagagtatttatgttttagcaccaattgtcttccagtctttccattctcatatcactggcatttactttccatcaatacaccaacactacatttggaaaagggtatgctaacctcttcttactttggcatgcttcagggatcaatatcagtaagcatgtccatataccaaacacacttttgctttatatgttgtcacctgacctctggagaaaaggaaggagatgaactaaaaaggaatgctgatgttcaagaaatccaccgaaggacaatatttaatctagtttcgagagtcaacatgcctaaaacgatatatgaccatgaaaggattgtatggctaggtgatctcaactataggatcaacttaccatatgagaagacacacgaactcatatccaagcaggactggaacaaattgtttgggaaagaccagctgaaagtagagctgaagaaggggcatctgtttgaaggatggactgaaggggtcatcaactttcctccaacgtataagtacaaggttaactcagaaaagtacataagtgatgataacaaatctggaaggagaacacctgcatggtgtgaccgaattctttcccatggtaagggtatgagattactgtcatataagacagttgatctcagactatcagatcaccgccctgtgactgctgtgtacatggcagatgtggaggttttctcttcaaaaaagctgcagagagctctgaccttcaccgatgcagaggctgaggaacagctctccttcgaggaagacaatgcttctggaatatacaaccttggactatatgaaagttcaagtgaagtttacaccccattagtaagagccaaagttttcagcaaggttacctggttgaagccgcagccgttgatgcgggcgctgagccggccccggcggaacggactgcccgccgtgtcccggtcattcccaacgctgcgacttcgacgctagggctagtttgaaagccacaaaagtggagataatgtgaggg

SEQ ID NO: 221813 - DNA, 2644 bp, Zea Mays
ccagactccagtccacaaacaggagctctcagccaagcgcccacgacagtaaacaacgcggcgccgccaccggtttcttttgccgaaggaaggcggcagggagatatagcacgctacagccgcagcccgcaggcaagcaccgcggtccgtggctaggctacacctacaccagatcttcttagctggggaccaagcaaagcaagcaaggctacccgcaaccgccaactgaccgctgtagcggagacgatggcagccgccgcgccctcctcgtcctcgtcctcgtccgcgcgggcgcgcgcgcgcgcgccgccccggccattgcatcccctcgcccgcggcggccccgagcgcgaagaaatggaggccgtcgcggcgacccaccccggcgcgccaccgatgcggcgcaaggggaggaagcagaagcagctgtggcccaggaccgtgctgcggaagtggctcaacataaggtcgccggagtccgacttcagcgccgacgagggcgacaccaccggcgacgacaccgacagcgaggtcgattacgaaggaatgaaacaaaagatgggcgtctatttcgatgaactaccggagtacaatgttattcctcgtggtttccaaaacgataagatctcccactttatttttatatcctgcattttgtttacgagttgtaaaagaaaaggaaggtccgaatctgattgcacgaaatacagttgcagcacatggtagcttacaaaaaagcgggtaactttctgaaaagggaaaacagggagcataatgctgcacttcactttgttggcggtgatttcagagatgtgcgcatgggagcgcaagttgcacgatgaggagaggagcgtccgaggattcggtgctgaggctattggaaaccaattgggggtggttccttgtggccttcgtagaaggcgcaagtcagagacccttcgtgctcagtatattgatgtcagggagctcaggatttgtgctggaacatggaatgttgcaggcagacttccacctaatgacttggatatccaagaatggttggatatggaagagccagctgatatatatgttcttggatttcaagaaattgttccactaaatgctgggaatatatttggcgctgaagacaaccgccctgtagcaatgttcaagccatctgatgatgcttttgttatggaagatgaacttattagtgagtctgatagtgaaggtgatggggaggtgcacccattgaacgaacaagatttggtcgactctgttgatggcattcatggtaacaaatgtgaacctcaaacaattttacaagatgaagagttcagcaggttgccttcagtgaagacttttgacagatccaataacctaagttttaaagaatctaatttggaagagaagatctgccagaagatattaactaaaacattcagtcactcagagaggcttgggatgatttggcctgaaccaccattggatatgtttgcccagtgtcttccagacagcacaaagccatttgcttcaggaaaggttttaagatcatatttgtctttcaagtcggtaaatggagattctggtccatttgctgaggacaattcagttcctgatttttatatgagctgtgcagcagttaaaagaaaaaggccatactttgtaagaataataagcaagcagatggttggagtgtacctatcaatatgggtacgaagaagcctccgaaagcacattcagagtctgaaagtatcaactgtaggggttggtgctatgggctacattggtaataagggatcaatatcagtaagcatgtccatataccaaacacacttttgctttatatgttgtcacctgacctctggagaaaaggaaggagatgaactaaaaaggaatgctgatgttcaagaaatccaccgaaggacaatatttaatctagtttcgagagtcaacatgcctaaaacgatatatgaccatgaaaggattgtatggctaggtgatctcaactataggatcaacttaccatatgagaagacacacgaactcatatccaagcaggactggaacaaattgtttgggaaagaccagctgaaagtagagctgaagaaggggcatctgtttgaaggatggactgaaggggtcatcaactttcctccaacgtataagtacaaggttaactcagaaaagtacataagtgatgataacaaatctggaaggagaacacctgcatggtgtgaccgaattctttcccatggtaagggtatgagattactgtcatataagacagttgatctcagactatcagatcaccgccctgtgactgctgtgtacatggcagatgtggaggttttctcttcaaaaaagctgcagagagctctgaccttcaccgatgcagaggctgaggaacagctctccttcgaggaagacaatgcttctggaatatacaaccttggactatatgaaagttcaagtgaagtttacaccccattagtaagagccaaagttttcagcaaggttacctggttgaagccgcagccgttgatgcgggcgctgagccggccccggcggaacggactgcccgccgtgtcccggtcattcccaacgctgcgacttcgacgctagggctagtttgaaagccacaaaagtggagataatgtgaggg

SEQ ID NO: 221814 - DNA, 2112 bp, Zea Mays
gcgagcgcggtccctcgccctctctctctccctcttcccggccttttcgccgagcgagcctctgaggttctggaatttccagtgcgggtgcattaggctgctatgggcaagtcgccggggaagtggatcaaatcggtgcttttggggaagaaatctaccaagtcaggtcctaccaagtcgaatgaatctaaggctgacaacaacagatactcgaccggggaggaccgcacattgtctgagagttctcctgtgatttctgagccggtactagttaacatccacaagaacgtagctatcaatgggaaggctgcagatgccagtgatagggcacggcaacaagatccgcagagccaaagcgttgttgagtccagatcatcggctccagctgctcagctgggagaagatcaagctgcagcgaaggcacaggcagcctttcgtggttacctggcacgaaggtcattccgtgcattaaaaggtatcgtaagactccaggcgctgattcgagggtatcttgtaaggaggcaggctgtatcaacccttcgcgcaacatggttgattgtgaagtttcaggctctagttcgtggaagaaatgttagactctctggcagtcgcatgcagctcaatgtgaagtttggtcagagtaactttgggggtgttagatcgtctgatgcatggaaagagaagctatcttcaaatgcttatgttcggaagcttctgtcttcaccaattgttttagaacctcttcacttccagtatgacaagagggatcccaattcaacctataactggtttgagagatggaccataggttgcatctggaagcctgcttttcaacccaaaagagttgctgatgggaaaccactggtaaagaaggctagttatgcaatggaaactcaatcagccaagttaaaacgcaacattcggaagggttctgctgctatcgctgggagtttccatacatctggtgaatctgataaagtaaaaaggaatccaaagaatttctctagcttccctgctgattcagtaccagatagccagttatctgaacttgaaaaggttaaaaggaacctcaggaaggtaactgattcgatggctgaagcctcaaagatatctagttccagggttgattcctcgaaggtatgtaattctacagctgaggttccaaaggaatctaatcctgtggcagaaatctcaaagatacgtagtctcctgaatgggatctctgaccatcaggatattcaatgtgagaatacacgtgaatcttcatttcctcttggaactcaagaagactctgacaatgatcatctattgcgatattcaaatatggatagcttggacttggtacctggtttgaaaagtgatcaggaaattcagctggattcggtttctataggagaaaatgttgatgatcccactgttgttgctccagcagttgaagaaatgtcaccgcaaaacattgatacggaagacaatgttttatgcaagaaagaggaagcaaggtccaaggaagagcacttgtctaatggaagccttagaactagcaagaggaagtcttcattccccaacaaatcagaatatgtagaaaatgggactcacgctactcctgttcagccaaggcagccaagctatatggctgcaacggagtccgcaaaggcgaaattgcgagcccagaattcacccagtctggattctgattcagcggcagaaaagaatggtttcacccgacgccactctcttccttccagtacaaagagtagagcacttaaagctgaatggaagcgctgaagaggcaacccatcgtccacttgaattgaattgtgcactgctctgaaacttcgctggatgaactcgaccggtcttgtcccatgttcttgctgtattgaacaaccccttgtgaagttgcgattctggttcagtttgtcgtaggttcatgtgcaaccactagtgccttgtgtcgtatattgcatggttcttgtcgaaggaacaatgcctgcgaaagctgatgttaggactgcattaactgaataacatcacccagttgcccaggtctttgtttgtcgtcttaatgagtgatgaaaaagcagtttcgcagaactgctagtgacatgaaat

SEQ ID NO: 221815 - DNA, 2292 bp, Zea Mays
gcgagcgcggtccctcgccctctctctctccctcttcccggccttttcgccgagcgagcctctgaggtagtagagctcactccaccacttgactctcgtctcgtctctgcactggattggaggttggggccgtgaagggtaggtaggtcgcttgatagggacaaggggggagacggcgagaggcgtttcgccgagcagttcgcgtgctcccctccacaggccgacgcggcgacgccgctgtttcaggttctggaatttccagtgcgggtgcattaggctgctatgggcaagtcgccggggaagtggatcaaatcggtgcttttggggaagaaatctaccaagtcaggtcctaccaagtcgaatgaatctaaggctgacaacaacagatactcgaccggggaggaccgcacattgtctgagagttctcctgtgatttctgagccggtactagttaacatccacaagaacgtagctatcaatgggaaggctgcagatgccagtgatagggcacggcaacaagatccgcagagccaaagcgttgttgagtccagatcatcggctccagctgctcagctgggagaagatcaagctgcagcgaaggcacaggcagcctttcgtggttacctggcacgaaggtcattccgtgcattaaaaggtatcgtaagactccaggcgctgattcgagggtatcttgtaaggaggcaggctgtatcaacccttcgcgcaacatggttgattgtgaagtttcaggctctagttcgtggaagaaatgttagactctctggcagtcgcatgcagctcaatgtgaagtttggtcagagtaactttgggggtgttagatcgtctgatgcatggaaagagaagctatcttcaaatgcttatgttcggaagcttctgtcttcaccaattgttttagaacctcttcacttccagtatgacaagagggatcccaattcaacctataactggtttgagagatggaccataggttgcatctggaagcctgcttttcaacccaaaagagttgctgatgggaaaccactggtaaagaaggctagttatgcaatggaaactcaatcagccaagttaaaacgcaacattcggaagggttctgctgctatcgctgggagtttccatacatctggtgaatctgataaagtaaaaaggaatccaaagaatttctctagcttccctgctgattcagtaccagatagccagttatctgaacttgaaaaggttaaaaggaacctcaggaaggtaactgattcgatggctgaagcctcaaagatatctagttccagggttgattcctcgaaggtatgtaattctacagctgaggttccaaaggaatctaatcctgtggcagaaatctcaaagatacgtagtctcctgaatgggatctctgaccatcaggatattcaatgtgagaatacacgtgaatcttcatttcctcttggaactcaagaagactctgacaatgatcatctattgcgatattcaaatatggatagcttggacttggtacctggtttgaaaagtgatcaggaaattcagctggattcggtttctataggagaaaatgttgatgatcccactgttgttgctccagcagttgaagaaatgtcaccgcaaaacattgatacggaagacaatgttttatgcaagaaagaggaagcaaggtccaaggaagagcacttgtctaatggaagccttagaactagcaagaggaagtcttcattccccaacaaatcagaatatgtagaaaatgggactcacgctactcctgttcagccaaggcagccaagctatatggctgcaacggagtccgcaaaggcgaaattgcgagcccagaattcacccagtctggattctgattcagcggcagaaaagaatggtttcacccgacgccactctcttccttccagtacaaagagtagagcacttaaagctgaatggaagcgctgaagaggcaacccatcgtccacttgaattgaattgtgcactgctctgaaacttcgctggatgaactcgaccggtcttgtcccatgttcttgctgtattgaacaaccccttgtgaagttgcgattctggttcagtttgtcgtaggttcatgtgcaaccactagtgccttgtgtcgtatattgcatggttcttgtcgaaggaacaatgcctgcgaaagctgatgttaggactgcattaactgaataacatcacccagttgcccaggtctttgtttgtcgtcttaatgagtgatgaaaaagcagtttcgcagaactgctagtgacatgaaat

SEQ ID NO: 221816 - DNA, 2289 bp, Zea Mays
gcgagcgcggtccctcgccctctctctctccctcttcccggccttttcgccgagcgagcctctgaggtagtagagctcactccaccacttgactctcgtctcgtctctgcactggattggaggttggggccgtgaagggtaggtaggtcgcttgatagggacaaggggggagacggcgagaggcgtttcgccgagcagttcgcgtgctcccctccacaggccgacgcggcgacgccgctgtttcaggttctggaatttccagtgcgggtgcattaggctgctatgggcaagtcgccggggaagtggatcaaatcggtgcttttggggaagaaatctaccaagtcaggtcctaccaagtcgaatgaatctgctgacaacaacagatactcgaccggggaggaccgcacattgtctgagagttctcctgtgatttctgagccggtactagttaacatccacaagaacgtagctatcaatgggaaggctgcagatgccagtgatagggcacggcaacaagatccgcagagccaaagcgttgttgagtccagatcatcggctccagctgctcagctgggagaagatcaagctgcagcgaaggcacaggcagcctttcgtggttacctggcacgaaggtcattccgtgcattaaaaggtatcgtaagactccaggcgctgattcgagggtatcttgtaaggaggcaggctgtatcaacccttcgcgcaacatggttgattgtgaagtttcaggctctagttcgtggaagaaatgttagactctctggcagtcgcatgcagctcaatgtgaagtttggtcagagtaactttgggggtgttagatcgtctgatgcatggaaagagaagctatcttcaaatgcttatgttcggaagcttctgtcttcaccaattgttttagaacctcttcacttccagtatgacaagagggatcccaattcaacctataactggtttgagagatggaccataggttgcatctggaagcctgcttttcaacccaaaagagttgctgatgggaaaccactggtaaagaaggctagttatgcaatggaaactcaatcagccaagttaaaacgcaacattcggaagggttctgctgctatcgctgggagtttccatacatctggtgaatctgataaagtaaaaaggaatccaaagaatttctctagcttccctgctgattcagtaccagatagccagttatctgaacttgaaaaggttaaaaggaacctcaggaaggtaactgattcgatggctgaagcctcaaagatatctagttccagggttgattcctcgaaggtatgtaattctacagctgaggttccaaaggaatctaatcctgtggcagaaatctcaaagatacgtagtctcctgaatgggatctctgaccatcaggatattcaatgtgagaatacacgtgaatcttcatttcctcttggaactcaagaagactctgacaatgatcatctattgcgatattcaaatatggatagcttggacttggtacctggtttgaaaagtgatcaggaaattcagctggattcggtttctataggagaaaatgttgatgatcccactgttgttgctccagcagttgaagaaatgtcaccgcaaaacattgatacggaagacaatgttttatgcaagaaagaggaagcaaggtccaaggaagagcacttgtctaatggaagccttagaactagcaagaggaagtcttcattccccaacaaatcagaatatgtagaaaatgggactcacgctactcctgttcagccaaggcagccaagctatatggctgcaacggagtccgcaaaggcgaaattgcgagcccagaattcacccagtctggattctgattcagcggcagaaaagaatggtttcacccgacgccactctcttccttccagtacaaagagtagagcacttaaagctgaatggaagcgctgaagaggcaacccatcgtccacttgaattgaattgtgcactgctctgaaacttcgctggatgaactcgaccggtcttgtcccatgttcttgctgtattgaacaaccccttgtgaagttgcgattctggttcagtttgtcgtaggttcatgtgcaaccactagtgccttgtgtcgtatattgcatggttcttgtcgaaggaacaatgcctgcgaaagctgatgttaggactgcattaactgaataacatcacccagttgcccaggtctttgtttgtcgtcttaatgagtgatgaaaaagcagtttcgcagaactgctagtgacatgaaat

SEQ ID NO: 221817 - DNA, 1854 bp, Zea Mays
gcgagcgcggtccctcgccctctctctctccctcttcccggccttttcgccgagcgagcctctgaggttctggaatttccagtgcgggtgcattaggctgctatgggcaagtcgccggggaagtggatcaaatcggtgcttttggggaagaaatctaccaagtcaggtcctaccaagtcgaatgaatctgcacgaaggtcattccgtgcattaaaaggtatcgtaagactccaggcgctgattcgagggtatcttgtaaggaggcaggctgtatcaacccttcgcgcaacatggttgattgtgaagtttcaggctctagttcgtggaagaaatgttagactctctggcagtcgcatgcagctcaatgtgaagtttggtcagagtaactttgggggtgttagatcgtctgatgcatggaaagagaagctatcttcaaatgcttatgttcggaagcttctgtcttcaccaattgttttagaacctcttcacttccagtatgacaagagggatcccaattcaacctataactggtttgagagatggaccataggttgcatctggaagcctgcttttcaacccaaaagagttgctgatgggaaaccactggtaaagaaggctagttatgcaatggaaactcaatcagccaagttaaaacgcaacattcggaagggttctgctgctatcgctgggagtttccatacatctggtgaatctgataaagtaaaaaggaatccaaagaatttctctagcttccctgctgattcagtaccagatagccagttatctgaacttgaaaaggttaaaaggaacctcaggaaggtaactgattcgatggctgaagcctcaaagatatctagttccagggttgattcctcgaaggtatgtaattctacagctgaggttccaaaggaatctaatcctgtggcagaaatctcaaagatacgtagtctcctgaatgggatctctgaccatcaggatattcaatgtgagaatacacgtgaatcttcatttcctcttggaactcaagaagactctgacaatgatcatctattgcgatattcaaatatggatagcttggacttggtacctggtttgaaaagtgatcaggaaattcagctggattcggtttctataggagaaaatgttgatgatcccactgttgttgctccagcagttgaagaaatgtcaccgcaaaacattgatacggaagacaatgttttatgcaagaaagaggaagcaaggtccaaggaagagcacttgtctaatggaagccttagaactagcaagaggaagtcttcattccccaacaaatcagaatatgtagaaaatgggactcacgctactcctgttcagccaaggcagccaagctatatggctgcaacggagtccgcaaaggcgaaattgcgagcccagaattcacccagtctggattctgattcagcggcagaaaagaatggtttcacccgacgccactctcttccttccagtacaaagagtagagcacttaaagctgaatggaagcgctgaagaggcaacccatcgtccacttgaattgaattgtgcactgctctgaaacttcgctggatgaactcgaccggtcttgtcccatgttcttgctgtattgaacaaccccttgtgaagttgcgattctggttcagtttgtcgtaggttcatgtgcaaccactagtgccttgtgtcgtatattgcatggttcttgtcgaaggaacaatgcctgcgaaagctgatgttaggactgcattaactgaataacatcacccagttgcccaggtctttgtttgtcgtcttaatgagtgatgaaaaagcagtttcgcagaactgctagtgacatgaaat

SEQ ID NO: 221818 - DNA, 2189 bp, Zea Mays
ccactgaacgcacaagggcattcggtttatattttcagctgcagaggttgagatttcatttactagttactgttccttactgctccaagcgtgcaaactgacgcatgtccttgtagtttctttctctctctctctctctctccttgactcctttatccatattgtataatattttgtttcttccttcctccttcccttgaccgttgaaccatactttttagaaggctgacaacaacagatactcgaccggggaggaccgcacattgtctgagagttctcctgtgatttctgagccggtactagttaacatccacaagaacgtagctatcaatgggaaggctgcagatgccagtgatagggcacggcaacaagatccgcagagccaaagcgttgttgagtccagatcatcggctccagctgctcagctgggagaagatcaagctgcagcgaaggcacaggcagcctttcgtggttacctggcacgaaggtcattccgtgcattaaaaggtatcgtaagactccaggcgctgattcgagggtatcttgtaaggaggcaggctgtatcaacccttcgcgcaacatggttgattgtgaagtttcaggctctagttcgtggaagaaatgttagactctctggcagtcgcatgcagctcaatgtgaagtttggtcagagtaactttgggggtgttagatcgtctgatgcatggaaagagaagctatcttcaaatgcttatgttcggaagacatgggaacctaaggggaaggggttcgggggtttctcgacccgccttctgtcttcaccaattgttttagaacctcttcacttccagtatgacaagagggatcccaattcaacctataactggtttgagagatggaccataggttgcatctggaagcctgcttttcaacccaaaagagttgctgatgggaaaccactggtaaagaaggctagttatgcaatggaaactcaatcagccaagttaaaacgcaacattcggaagggttctgctgctatcgctgggagtttccatacatctggtgaatctgataaagtaaaaaggaatccaaagaatttctctagcttccctgctgattcagtaccagatagccagttatctgaacttgaaaaggttaaaaggaacctcaggaaggtaactgattcgatggctgaagcctcaaagatatctagttccagggttgattcctcgaaggtatgtaattctacagctgaggttccaaaggaatctaatcctgtggcagaaatctcaaagatacgtagtctcctgaatgggatctctgaccatcaggatattcaatgtgagaatacacgtgaatcttcatttcctcttggaactcaagaagactctgacaatgatcatctattgcgatattcaaatatggatagcttggacttggtacctggtttgaaaagtgatcaggaaattcagctggattcggtttctataggagaaaatgttgatgatcccactgttgttgctccagcagttgaagaaatgtcaccgcaaaacattgatacggaagacaatgttttatgcaagaaagaggaagcaaggtccaaggaagagcacttgtctaatggaagccttagaactagcaagaggaagtcttcattccccaacaaatcagaatatgtagaaaatgggactcacgctactcctgttcagccaaggcagccaagctatatggctgcaacggagtccgcaaaggcgaaattgcgagcccagaattcacccagtctggattctgattcagcggcagaaaagaatggtttcacccgacgccactctcttccttccagtacaaagagtagagcacttaaagctgaatggaagcgctgaagaggcaacccatcgtccacttgaattgaattgtgcactgctctgaaacttcgctggatgaactcgaccggtcttgtcccatgttcttgctgtattgaacaaccccttgtgaagttgcgattctggttcagtttgtcgtaggttcatgtgcaaccactagtgccttgtgtcgtatattgcatggttcttgtcgaaggaacaatgcctgcgaaagctgatgttaggactgcattaactgaataacatcacccagttgcccaggtctttgtttgtcgtcttaatgagtgatgaaaaagcagtttcgcagaactgctagtgacatgaaat

SEQ ID NO: 221819 - DNA, 2100 bp, Zea Mays
attcggtttatattttcagctgcagaggttgagatttcatttactagttactgttccttactgctccaagcgtgcaaactgacgcatgtccttgtagtttctttctctctctctctctctctccttgactcctttatccatattgtataatattttgtttcttccttcctccttcccttgaccgttgaaccatactttttagaaggctgacaacaacagatactcgaccggggaggaccgcacattgtctgagagttctcctgtgatttctgagccggtactagttaacatccacaagaacgtagctatcaatgggaaggctgcagatgccagtgatagggcacggcaacaagatccgcagagccaaagcgttgttgagtccagatcatcggctccagctgctcagctgggagaagatcaagctgcagcgaaggcacaggcagcctttcgtggttacctggcacgaaggtcattccgtgcattaaaaggtatcgtaagactccaggcgctgattcgagggtatcttgtaaggaggcaggctgtatcaacccttcgcgcaacatggttgattgtgaagtttcaggctctagttcgtggaagaaatgttagactctctggcagtcgcatgcagctcaatgtgaagtttggtcagagtaactttgggggtgttagatcgtctgatgcatggaaagagaagctatcttcaaatgcttatgttcggaagaacctcttcacttccagtatgacaagagggatcccaattcaacctataactggtttgagagatggaccataggttgcatctggaagcctgcttttcaacccaaaagagttgctgatgggaaaccactggtaaagaaggctagttatgcaatggaaactcaatcagccaagttaaaacgcaacattcggaagggttctgctgctatcgctgggagtttccatacatctggtgaatctgataaagtaaaaaggaatccaaagaatttctctagcttccctgctgattcagtaccagatagccagttatctgaacttgaaaaggttaaaaggaacctcaggaaggtaactgattcgatggctgaagcctcaaagatatctagttccagggttgattcctcgaaggtatgtaattctacagctgaggttccaaaggaatctaatcctgtggcagaaatctcaaagatacgtagtctcctgaatgggatctctgaccatcaggatattcaatgtgagaatacacgtgaatcttcatttcctcttggaactcaagaagactctgacaatgatcatctattgcgatattcaaatatggatagcttggacttggtacctggtttgaaaagtgatcaggaaattcagctggattcggtttctataggagaaaatgttgatgatcccactgttgttgctccagcagttgaagaaatgtcaccgcaaaacattgatacggaagacaatgttttatgcaagaaagaggaagcaaggtccaaggaagagcacttgtctaatggaagccttagaactagcaagaggaagtcttcattccccaacaaatcagaatatgtagaaaatgggactcacgctactcctgttcagccaaggcagccaagctatatggctgcaacggagtccgcaaaggcgaaattgcgagcccagaattcacccagtctggattctgattcagcggcagaaaagaatggtttcacccgacgccactctcttccttccagtacaaagagtagagcacttaaagctgaatggaagcgctgaagaggcaacccatcgtccacttgaattgaattgtgcactgctctgaaacttcgctggatgaactcgaccggtcttgtcccatgttcttgctgtattgaacaaccccttgtgaagttgcgattctggttcagtttgtcgtaggttcatgtgcaaccactagtgccttgtgtcgtatattgcatggttcttgtcgaaggaacaatgcctgcgaaagctgatgttaggactgcattaactgaataacatcacccagttgcccaggtctttgtttgtcgtcttaatgagtgatgaaaaagcagtttcgcagaactgctagtgacatgaaat

SEQ ID NO: 221820 - DNA, 3610 bp, Zea Mays
gccgcccgctcccccggcgtgccgccgctgtaattcttcctcctccacccagagctgcacgtccgcgccttgccaccgatggatcccgcgcccgatcagctctctatctccgcctctgccccgttccccaccatcccggctgcctcaagccccaggccccgcgccgcgaggacgcggcgccatgccgcgcccttccggtcggaccaccccaccgccgggagctggcgctccgggatcgatctcccgcgccgtccttcggcctccgccttttcccagcaggagcgttatccttccgtggcctcctggagcgcctctcgcgacgccaactttgtgttcgggagcggcgtggccggtgcgccggagatgaggaggagcttctcgtctggatccggtgaggcatcgttggctgaactttcgtacgcagttcacaggttcgcgttggacggttctggcaggccaagcgacattgacgctcccggaggagaaggtacgcttccagtgacagactccggtggtcgctttggggcccgtggatgcagttccactttgtatgagggcttctctctggattctattcaccatcagactgagcacctcgatgaagaacgtggagtcccgtctcaaaccatacaatgcgagagtgtggggatgcgatcattagcttcaccaacccgcactgatgagaatgctcccattgaatttgcaaagagaggggacagcttgcccattcaagattctgtggatcaaagtagaaattctggacatgatgctaatgcccaccatgatttctttgtttttggtggacatgctgggtccaatagcttcgctaccaatgcaactcaaactaataccagtaagctaaatacttcagtttctaaagatggaaattgcatcaagttcattttgcaggatgcaaagcatgtgtttggttcaagtgacaatgatcttccaggttcggaaccttgtgaaatttctaccacggtggaaacaccggatactataacctctagctttggatctgaagatgggatcgtgacggtttcttccataaaggtgccttgcaatattgaagtagtaccagcctcagaacttgttgaatgtcagccatttgatgagaaatctttcacctttgacgaccaaaatgtaccatataggaacaaaggaggggttaagggtatgggcatgaacagaggagcttttatgccaaataagtcctcagcaaaccaagcttcttttgaatcagtctcaagaagcgggcattgttctaaaaaagtgtctcctgaagaaaagttaaatttgaaagaagccagtagctctttgcaaacaacagaaagtgggcatgctgaagcagagtttacgtctgcagcaaatacggaacattctggtcaatccgatttcatattttctgcatcaactttccatcaaagcatgttgcacccgcaaagacgacataacaagaaaaaaagtggaggaatgggtaatcatgctagctctattcaaagtctcccttcatccgccattggactcgcatgctcagaagtctcaggaagtcagcaatgtgtggatttagctgccaagtggactgaatacaacaaaatagaacctaacagggttgcaatcagcagaggagccagatgctcaacatcagaaaactttggagaccatgacaattgtgaaacatggcgattaaggggaaaccaagcatatgcagaaggattgttaactaaggctgaagaatgctatacccatgggattgattctttttctccaaatgaagtttcaagaaaagcattaatgctgtgctacagcaatcgagcagctactcggatgtctctgggtaagatgagagatgccctatctgattgtcaagaagccattgatattgattccagttttctcaaggcacacgccagagccgccaactgcctacttgccctgggggatgttgaagaagcacaaaaggcttttgagatgtgtttaaagtctaatcatctatcaagcttggaccataaaattgtagaagaggcttctgatggtctacaaaaagctaagaaaatatctggtttaattagtcattctgaggagtatcttataaagaaagcatttgacaagatacccagtgccttacaaatgatctctgatgctttgtccataagtatttattcagataagttaatggagatgaaagcagaagcactgttactgttgcagcgatatgaagaagtaattcggttttgcgaagaaactctttatgtagcagaaagaaatagtgtgtgtttgtgtcttgacaagcagtcagaaagcaataacatggtcaacaatacttgctttgtgaaattgtggcgttatcatcttattgctaagtcatatttcttccttggaaagcttgaagaggctaaccagttcttaaagaagaatgatcaaataaaagtcatggggtgcaggtgtgggaatcaatctcaggactcaattttatcattctccatggctatctctgaactattgcggcttaaagctgctggcaatgaagcattccaatctggtaaatatttggaggctgtggaacattatactgctgctttgatgagcaatagcgagtccctacgctttttagcagtctgcttttgtaaccgtgcagcagcatatcaagcaatgggtcaaattttagatgcaattgcagattgttcactggctatagcccttgatgcagattatgctaaggctatttccagaaggtctagtttgtatgaacttataagggactatggccaggcagcaaatgatctccgtaggttgattgctcttcttgagaaacaactgcaagaagatatgaccatgccagtagagaggtctgagagtattcgtaacaatctgaatcgagccaatcttcggttttcttctttggagcgggatgccagaaaaggggcttcattaaatatgtatttgatattaggaattgagtcttcttcctctgctgtggatataaagaaggcctaccgcaaagcagcactaagacatcatccagacaaaggatgctgattatttattcaaaataattgggaaggcatatgctatgctttcagaccctacaacgagaagggaatgataacctggaggtggagtgatagaaaagcagtgcacatgtaacatgagcagcgggagcaatgaaaatgatgacaggacctcttagtgagagcatttaatcatgaagttggtaccgcacaaagctaccatactggagaggtcctatgtgaaattttgtgtgctctcaccaacgatatgatgccactggtgttgtccaatacctaatcacaaatgtcagtcggaacatgtcccacttttctgactgagtgctaataccgttacccccggggagcagtggatctttgtgttcatgcctgatcactgtttcgtgttctctgatgttccatttggatatgcagattgcatgagtctgagcacccgtgcaaaaggctagtttttttgtttgtgaagttgatgtcaatatatcaggtgctgtgcatagtagcttggagcagttcgagtggaatcaacaagagtggatagtgtaaatagaggtacacgtttcttgtacaccccctcactccac

SEQ ID NO: 221821 - DNA, 3760 bp, Zea Mays
caatgacccaccggtcagcccagccggagaacgccgcccgctcccccggcgtgccgccgctgtaattcttcctcctccacccagagctgcacgtccgcgccttgccaccgatggatcccgcgcccgatcagctctctatctccgcctctgccccgttccccaccatcccggctgcctcaagccccaggccccgcgccgcgaggacgcggcgccatgccgcgcccttccggtcggaccaccccaccgccgggagctggcgctccgggatcgatctcccgcgccgtccttcggcctccgccttttcccagcaggagcgttatccttccgtggcctcctggagcgcctctcgcgacgccaactttgtgttcgggagcggcgtggccggtgcgccggagatgaggaggagcttctcgtctggatccggtgaggcatcgttggctgaactttcgtacgcagttcacaggttcgcgttggacggttctggcaggccaagcgacattgacgctcccggaggagaaggtacgcttccagtgacagactccggtggtcgctttggggcccgtggatgcagttccactttgtatgagggcttctctctggattctattcaccatcagactgagcacctcgatgaagaacgtggagtcccgtctcaaaccatacaatgcgagagtgtggggatgcgatcattagcttcaccaacccgcactgatgagaatgctcccattgaatttgcaaagagaggggacagcttgcccattcaagattctgtggatcaaagtagaaattctggacatgatgctaatgcccaccatgatttctttgtttttggtggacatgctgggtccaatagcttcgctaccaatgcaactcaaactaataccagtaaggtacattcagctgataaagaaactgtaacatgtaactctgaacagctaaatacttcagtttctaaagatggaaattgcatcaagttcattttgcaggatgcaaagcatgtgtttggttcaagtgacaatgatcttccaggttcggaaccttgtgaaatttctaccacggtggaaacaccggatactataacctctagctttggatctgaagatgggatcgtgacggtttcttccataaaggtgccttgcaatattgaagtagtaccagcctcagaacttgttgaatgtcagccatttgatgagaaatctttcacctttgacgaccaaaatgtaccatataggaacaaaggaggggttaagggtatgggcatgaacagaggagcttttatgccaaataagtcctcagcaaaccaagcttcttttgaatcagtctcaagaagcgggcattgttctaaaaaagtgtctcctgaagaaaagttaaatttgaaagaagccagtagctctttgcaaacaacagaaagtgggcatgctgaagcagagtttacgtctgcagcaaatacggaacattctggtcaatccgatttcatattttctgcatcaactttccatcaaagcatgttgcacccgcaaagacgacataacaagaaaaaaagtggaggaatgggtaatcatgctagctctattcaaagtctcccttcatccgccattggactcgcatgctcagaagtctcaggaagtcagcaatgtgtggatttagctgccaagtggactgaatacaacaaaatagaacctaacagggttgcaatcagcagaggagccagatgctcaacatcagaaaactttggagaccatgacaattgtgaaacatggcgattaaggggaaaccaagcatatgcagaaggattgttaactaaggctgaagaatgctatacccatgggattgattctttttctccaaatgaagtttcaagaaaagcattaatgctgtgctacagcaatcgagcagctactcggatgtctctgggtaagatgagagatgccctatctgattgtcaagaagccattgatattgattccagttttctcaaggcacacgccagagccgccaactgcctacttgccctgggggatgttgaagaagcacaaaaggcttttgagatgtgtttaaagtctaatcatctatcaagcttggaccataaaattgtagaagaggcttctgatggtctacaaaaagctaagaaaatatctggtttaattagtcattctgaggagtatcttataaagaaagcatttgacaagatacccagtgccttacaaatgatctctgatgctttgtccataagtatttattcagataagttaatggagatgaaagcagaagcactgttactttgcagcgatatgaagaagtaattcggttttgcgaagaaactctttatgtagcagaaagaaatagtgtgtgtttgtgtcttgacaagcagtcagaaagcaataacatggtcaacaatacttgctttgtgaaattgtggcgttatcatcttattgctaagtcatatttcttccttggaaagcttgaagaggctaaccagttcttaaagaagaatgatcaaataaaagtcatggggtgcaggtgtgggaatcaatctcaggactcaattttatcattctccatggctatctctgaactattgcggcttaaagctgctggcaatgaagcattccaatctggtaaatatttggaggctgtggaacattatactgctgctttgatgagcaatagcgagtccctacgctttttagcagtctgcttttgtaaccgtgcagcagcatatcaagcaatgggtcaaattttagatgcaattgcagattgttcactggctatagcccttgatgcagattatgctaaggctatttccagaaggtctagtttgtatgaacttataagggactatggccaggcagcaaatgatctccgtaggttgattgctcttcttgagaaacaactgcaagaagatatgaccatgccagtagagaggtctgagagtattcgtaacaatctgaatcgagccaatcttcggttttcttctttggagcgggatgccagaaaaggggcttcattaaatatgtatttgatattaggaattgagtcttcttcctctgctgtggatataaagaaggcctaccgcaaagcagcactaagacatcatccagacaaagccagtaactttcttgtcagaagtgaaaatatcagtgatgctgtatggagagatataacaaatgaaatacgcagggatgctgattatttattcaaaataattgggaaggcatatgctatgctttcagaccctacaacgagaagggaatgataacctggaggtggagtgatagaaaagcagtgcacatgtaacatgagcagcgggagcaatgaaaatgatgacaggacctcttagtgagagcatttaatcatgaagttggtaccgcacaaagctaccatactggagaggtcctatgtgaaattttgtgtgctctcaccaacgatatgatgccactggtgttgtccaatacctaatcacaaatgtcagtcggaacatgtcccacttttctgactgagtgctaataccgttacccccggggagcagtggatctttgtgttcatgcctgatcactgtttcgtgttctctgatgttccatttggatatgcagattgcatgagtctgagcacccgtgcaaaaggctagtttttttgtttgtgaagttgatgtcaatatatcaggtgctgtgcatagtagcttggagcagttcgagtggaatcaacaagagtggatagtgtaaatagaggtacacgtttcttgtacaccccctcactccac

SEQ ID NO: 221822 - DNA, 3744 bp, Zea Mays
ccacccaccgcttctctctctgttcctacaatgacccaccggtcagcccagccggagaacgccgcccgctcccccggcgtgccgccgctgtaattcttcctcctccacccagagctgcacgtccgcgccttgccaccgatggatcccgcgcccgatcagctctctatctccgcctctgccccgttccccaccatcccggctgcctcaagccccaggccccgcgccgcgaggacgcggcgccatgccgcgcccttccggtcggaccaccccaccgccgggagctggcgctccgggatcgatctcccgcgccgtccttcggcctccgccttttcccagcaggagcgttatccttccgtggcctcctggagcgcctctcgcgacgccaactttgtgttcgggagcggcgtggccggtgcgccggagatgaggaggagcttctcgtctggatccggtgaggcatcgttggctgaactttcgtacgcagttcacaggttcgcgttggacggttctggcaggccaagcgacattgacgctcccggaggagaaggtacgcttccagtgacagactccggtggtcgctttggggcccgtggatgcagttccactttgtatgagggcttctctctggattctattcaccatcagactgagcacctcgatgaagaacgtggagtcccgtctcaaaccatacaatgcgagagtgtggggatgcgatcattagcttcaccaacccgcactgatgagaatgctcccattgaatttgcaaagagaggggacagcttgcccattcaagattctgtggatcaaagtagaaattctggacatgatgctaatgcccaccatgatttctttgtttttggtggacatgctgggtccaatagcttcgctaccaatgcaactcaaactaataccagtaagctaaatacttcagtttctaaagatggaaattgcatcaagttcattttgcaggatgcaaagcatgtgtttggttcaagtgacaatgatcttccaggttcggaaccttgtgaaatttctaccacggtggaaacaccggatactataacctctagctttggatctgaagatgggatcgtgacggtttcttccataaaggtgccttgcaatattgaagtagtaccagcctcagaacttgttgaatgtcagccatttgatgagaaatctttcacctttgacgaccaaaatgtaccatataggaacaaaggaggggttaagggtatgggcatgaacagaggagcttttatgccaaataagtcctcagcaaaccaagcttcttttgaatcagtctcaagaagcgggcattgttctaaaaaagtgtctcctgaagaaaagttaaatttgaaagaagccagtagctctttgcaaacaacagaaagtgggcatgctgaagcagagtttacgtctgcagcaaatacggaacattctggtcaatccgatttcatattttctgcatcaactttccatcaaagcatgttgcacccgcaaagacgacataacaagaaaaaaagtggaggaatgggtaatcatgctagctctattcaaagtctcccttcatccgccattggactcgcatgctcagaagtctcaggaagtcagcaatgtgtggatttagctgccaagtggactgaatacaacaaaatagaacctaacagggttgcaatcagcagaggagccagatgctcaacatcagaaaactttggagaccatgacaattgtgaaacatggcgattaaggggaaaccaagcatatgcagaaggattgttaactaaggctgaagaatgctatacccatgggattgattctttttctccaaatgaagtttcaagaaaagcattaatgctgtgctacagcaatcgagcagctactcggatgtctctgggtaagatgagagatgccctatctgattgtcaagaagccattgatattgattccagttttctcaaggcacacgccagagccgccaactgcctacttgccctgggggatgttgaagaagcacaaaaggcttttgagatgtgtttaaagtctaatcatctatcaagcttggaccataaaattgtagaagaggcttctgatggtctacaaaaagctaagaaaatatctggtttaattagtcattctgaggagtatcttataaagaaagcatttgacaagatacccagtgccttacaaatgatctctgatgctttgtccataagtatttattcagataagttaatggagatgaaagcagaagcactgttactgttgcagcgatatgaagaagtaattcggttttgcgaagaaactctttatgtagcagaaagaaatagtgtgtgtttgtgtcttgacaagcagtcagaaagcaataacatggtcaacaatacttgctttgtgaaattgtggcgttatcatcttattgctaagtcatatttcttccttggaaagcttgaagaggctaaccagttcttaaagaagaatgatcaaataaaagtcatggggtgcaggtgtgggaatcaatctcaggactcaattttatcattctccatggctatctctgaactattgcggcttaaagctgctggcaatgaagcattccaatctggtaaatatttggaggctgtggaacattatactgctgctttgatgagcaatagcgagtccctacgctttttagcagtctgcttttgtaaccgtgcagcagcatatcaagcaatgggtcaaattttagatgcaattgcagattgttcactggctatagcccttgatgcagattatgctaaggctatttccagaaggtctagtttgtatgaacttataagggactatggccaggcagcaaatgatctccgtaggttgattgctcttcttgagaaacaactgcaagaagatatgaccatgccagtagagaggtctgagagtattcgtaacaatctgaatcgagccaatcttcggttttcttctttggagcgggatgccagaaaaggggcttcattaaatatgtatttgatattaggaattgagtcttcttcctctgctgtggatataaagaaggcctaccgcaaagcagcactaagacatcatccagacaaagccagtaactttcttgtcagaagtgaaaatatcagtgatgctgtatggagagatataacaaatgaaatacgcagggatgctgattatttattcaaaataattgggaaggcatatgctatgctttcagaccctacaacgagaagggaatgataacctggaggtggagtgatagaaaagcagtgcacatgtaacatgagcagcgggagcaatgaaaatgatgacaggacctcttagtgagagcatttaatcatgaagttggtaccgcacaaagctaccatactggagaggtcctatgtgaaattttgtgtgctctcaccaacgatatgatgccactggtgttgtccaatacctaatcacaaatgtcagtcggaacatgtcccacttttctgactgagtgctaataccgttacccccggggagcagtggatctttgtgttcatgcctgatcactgtttcgtgttctctgatgttccatttggatatgcagattgcatgagtctgagcacccgtgcaaaaggctagtttttttgtttgtgaagttgatgtcaatatatcaggtgctgtgcatagtagcttggagcagttcgagtggaatcaacaagagtggatagtgtaaatagaggtacacgtttcttgtacaccccctcactccac

SEQ ID NO: 221823 - DNA, 4672 bp, Zea Mays
acgagatatagaagacgttgttgaagagaaataaaatatagaacagaaaaaacttttgaaaaaagtctataaaggacatacataaaagaaggatagagagaatatggttggagagatgcccggtcaccaggttggctacaacttgtctggcgaggaatgggacaggaactcggagccgcggcaggatcttgccctactagtccctgtatcaatgatgatgcgatgcccatccatccatccatcgaccttgtctgggattcttaatccgcgaataccggttaattaacccaggtgtctggtggtcagatctgatcaattccattcacgtcacaccccctgattaataattaagaaaaggatggcattcttaattgcctcgcaacgcaagtcgccacacgcacacctaatcccggatccggggacgaaatgaccgggcaacatcagagtagacacaccagaccgagagagcaaccgcagagcacgagtccactccaccccgccatcaaggtgacctgggctgggcattcccacgcgaccaatcgcccgccgggaagggccggccgtgtgccaacgtcgccgacggcgacagcgcgagcgacttgaccacacactacacgcctgtccgccgtctgtcccagatggcacagcgacacttgaactaatgaccaggaaccgcctgccgatggttccctggtctgctgcatgcttgctggttcgtgttccgttgaaacgaaaaggaaaatcgccaggccgacacgacgaggcccgttcatgcattattttcgtcgcttctttaaggatgaagaagcgatgacgcgtgtacatgggggacgaggtgcgcgtgcgtgcggtgaggtgcggtggttagctgaatcgagatccatcttttgacagcgtcggaacgacatgtggtacgtcagaattaagagcggggcgcgaggacacggccgcaacttggcccattttgcggcaccaccggtcgctgctgctcttctttctgaaatcctgtgccgaggatggcgtcatgctttcttcttcttcgtctcgtcgtcgtcgtcgtctcctctccttcagctggtatgtacagtgcttccccgtgactgactcgtagccctcgtcggccgggctcgttccaccgcgactgaggtcaaaccatgtgccagttttcctttcccctcatccgacgaaaagctagcagcagcactgctccatggcaatgatcaccgacaccgagcaaagcaaagctgccacccatcaacactcatcaacaccccacgccgccatgagctccggtgaaaaaaaaaaatctgttctgccgtaaacgaaaccctcgggaagaagaagaagagtcacggattcagtccatcccctccatgtgtcgtggtcacgagaaagctgcggaaacacggccggtgccgccggtcatgcaagtcggccattccaaaaagtttcggcctgtgcgttttcaggcgtagtagagttttcaaaaggtagctaaataaaacaaaagaaaaagagaacgcgcgcgtgtgtgtatacagtatacacacacacgcttagtagctccgtggaaaaaaaagcatcgcattattgtctaacactaggatgaaaacaacaacacttgtcgatttagcgtgtggtcccgtctgtttgtttccttctgatgctgattgagatttcagagagagagagcagagaacggctacgggacagcagtggataatggtacaatgatgcagctcatcgtgcggtgggggggagagaaaaatcatcatcagcgctggcactttggctgcgcaactgaaaaagtctgggggaatctgagcctgctgctcacctgagagagcctgtgggtggggaggcaaagcgctgcagaggctgcagcagagaggagcgagcgagggagggagacgacgagccctgtcgagctgttccgattttgcccccccgaatacgtcgctgcccctgctttggagggatctgaagctgctgctgcctgccaaagcccggagcctttttcttcagcggtaggctctgatcatgatggtggtggtgatggcggctgtccagcggaaaggcttcttctcgtgctagtggaggaggcgtgaaatttcatccataaaggctgtcgcggtgggtggagatcttgcccaattccgctgaaatcgcctccggctacgggttgggtcgggtcgggtagcgtggccgtgggcggtgggagatgattactttcgtggactcggcggccatggagcgggagcgggagagtgacaggtgcctggacccgcagctgtggcacgcctgcgccggcgggatggtccagatgccggcggtgcactccaaggtgtactacttcccgcagggccacgcggagcacgcgcagggccccgtggacctccccgccggccgggtccccgcgctcgtcctctgccgcgtcgccgccgtccgcttcatggccgatccggacaccgacgaggtcttcgccaagatccgcctggccccggtccgtcccaacgagccgggctacgccgacgacgccattggcgccgcggcggcgtcgggcgcgcaggaggacaagcccgcgtccttcgccaagacgctcacgcagtccgacgccaacaacggcgggggcttctccgtgccgcgctactgcgccgagaccatcttcccgcggctcgactactcggccgacccccccgtgcagaccgtgctcgccaaggacgtgcacggcgtggtctggaagttccgccacatctaccgcggcacgccccggcgccacctgctcaccaccggctggagcaccttcgtgaaccagaagaagctcgtcgcgggggactccatcgtgttcatgcggacggagaacggggacctctgcgtcggcatccggcgcgccaagaagggcggcatcggagggccggagttcatgcaccaccaccaccagcagccgcccccgccgcagggcggcgggtacgccgggttctccatgttcctgcgaggggaagaggacggcggcaagatgatggccgcggccgccacgagggggaaggccgccagggtgcgggtgcggccagaggaggtcgtcgaggccgctaacctggccgtgagcgggcagccgttcgaggtggtgtactacccgagggcgagcacgccagagttctgcgtcaaggcgggggcggtgcgcgccgccatgcgcacccagtggtgccccgggatgaggttcaagatggccttcgagacggaggactcgtcccggatcagctggttcatgggcactgtctccgccgtgcacgtcgctgaccccatccgatggcccaattcaccctggaggcttctccaggtcgcctgggatgagccggacctcacagccacgcccttctcgccgcccaggaagaagctgtgcgtcccactgtacccggagcttccgctggagggccagttcccggcgccgatgttccacggaagccccctcctcggccgtggcggcgccggtggcccgatgtgctacttcccggacggcactcctgcaggcatacagggagccaggcatgctcaattcggcatatccttatcagatctccacctgaacaagctgcagccgggcctgtcaccgcacgggctccaccgccagctcgaccacggcgtgcaggtgcaggtgcagcagccgaggatcgccgccgggctcatcgtcggcggccacccggcggcccgagacgacgtctcgtgtctgctcaccatcggcaccccaaagagcaagaagccaccgtcagacgtcaagaaggcgtccacggcggcggcaccgcagctgatgctcttcgggaaagcgatcctcaccgagcagcagatatcgctaggcggcggcaatgtcgtgccggcgctggcgaagaagagcccctccgacgacgacgacgacgtggccgagaggacggtgagcaactcggacgtgtcgagccctgggaggagcaaccaggacggcacgtccagtggcggaggcccggcggcgcgggcgtgctggcaggaggaggagtgcaacaacagggcggcaggttctgaggacgacctcctcgggcactgcaaggtgttcatgcagtcggaggacgtcgggcgcacgctggacctctccgccgtcgcgtcgtacgaggagctctaccagaggctcgccgacatgttcggcgtcgacaaggccgagctgaccagccacgtgttctaccgcgacgacgcttccggagcgctcaagcaccctggcgacgagcctttcagtgagttcaccaagaccgcccggaggctgaccatactgacggacgagagcagcgacagcttagcgaggtagagtccagtctcaaggagacggcggttcggcagtttcggttgggagtgggaggcgccccggaacgggagcgcgtgcgtgcgtctgatccaggaccaaagatttgtcggactagtagctctacagtagtggagtacgtacgtacaccttgatgctgctgcttctgctgtcagttcaagtggccataaccataatgcagctgcctttggtcacagtgactgatcggatgtgttgtgtacatcggaccgttgatttgcgaacgcgattactgaaagattattattatttttttgtatttttgatataactaaggtgctttggttagttggttggtttgtctgggatgct

SEQ ID NO: 221824 - DNA, 618 bp, Zea Mays
tgaaaacaacaacacttgtcgatttagcgtgtggtcccgtctgtttgtttccttctgatgctgattgagatttcagagagagagagcagagaacggctacgggacagcagtggataatggtacaatgatgcagctcatcgtgcggtgggggggagagaaaaatcatcatcagcgctggcactttggctgcgcaactgaaaaagtgagttcaccaagaccgcccggaggctgaccatactgacggacgagagcagcgacagcttagcgaggtagagtccagtctcaaggagacggcggttcggcagtttcggttgggagtgggaggcgccccggaacgggagcgcgtgcgtgcgtctgatccaggaccaaagatttgtcggactagtagctctacagtagtggagtacgtacgtacaccttgatgctgctgcttctgctgtcagttcaagtggccataaccataatgcagctgcctttggtcacagtgactgatcggatgtgttgtgtacatcggaccgttgatttgcgaacgcgattactgaaagattattattatttttttgtatttttgatataactaaggtgctttggttagttggttggtttgtctgggatgct

SEQ ID NO: 221825 - DNA, 3012 bp, Zea Mays
aattttgccacgggaaagcggggaagagctcgaggggacaagcgtgggagaagggaacgccaacgtcgccaagtgcagctgcaaagcgagagcgaaggagagagagagagcgagcccgtgcgaccttgatttgcttgctcgtgaatggtggcttaggattttgccaccttccatctcccgcttctagccaccgtctcggctccagaagatgtcgaaggatggggcggcgttgggcttggtcatgatggcggggggtgacgccagtgggagtgacccggaggtgcacgcgaatatgcagcgtgtcaaagtataccgtttaaccaatgacgggcagtgggatgatcagggaacgggccacataacaattgactatattgaggggtcaagagaaattgctctggctgtcgtggatgaggtggataatgacacactactacttcaccatcttacttcagataatatctacaagagacaagaacaaacacttatctcattgaaggatcctgaaaaagcactagatttactgctgagctttcaagaagctaaaggatgcttacatatatggcagagcttaacttccttacagcaaaagctacagtctggtgaccctggctatgaattgaaggatcttccttctcttgagctgtccacccttccttcacttttaaagactatattggagtgcggaaagaaggatgggacacgcgttgcaaagttaatatctcgaaatcagcatgaatttttccccaagctagtggaccttttcagaatgtgtgagaattcaagaaacatggatcatctccacatgatctttagactagtcaagggaatcatattgttgaacgatgctggcatatttgacaagattttctctgatgattttatccttgacataattggggcccttgagtatgatccagaggttcccagtgtgcagagtcatcgtgaattcgtgaagaatcaaaccctcaatgaggccatacacattgggaatgtttctgtggtctcaaagattcgtcaaacatacatagtaggttatataaaggatgttatattactgaatgcactggatggtcctactttgtcaagccttaactcaatcattgagaggaacaagccttttgttgtttctgtactaaaggatgatgcttcttttatccatgatctgattgcaaggataacatcttcgaatacctctgctgaatcaaaaagcaaactggtcttgtttttgcgtgagctttgcattatcagcaaaagtttggagccgaaagtacgatcacatatgtctaggtatctcattgatgtaggagcgctaaacataatttctgatgtgttacagagtcaggataaagaactcttttcagctggggcaaacatactcgggtattttgttgatctgcatcctgacttagttagaacatttattgccaatcatgaagagaacctggaaggcagttctcttcttgagtttctggttcaagggatggtagttgactccgccaatgaaatgctctatcagtcttgtctaaaggaactgttaggttcttctgatacaactgtgaatcatcatgatgttgttcttcggcttttctttgacaagcatcttcaaaaattgattgacgcaatagcgtcgtcctgcgctccaaagggcattgccagatcaacgtctggtttagctggtgttcgcacaacggttgaacagcattctgctaagcctgaaacattgttgaaaatttgtgaacttttatccttctgcgcacttcatcatacaaaccggatgaagatatttttctcaaccaatgcaatggagaaaattctgacattaactcataggagagagaaggttttggttctggcaggagtccaattcgtgcggattataattggtagaaaggatgactttcttgttgaccgtgttatcaagttcaacctgttaaagccagttattaaggcttttgatgaaaatgaaggtagagacaacatgctacaatctgtggtccttgaactgttggagtatataagaaaggaaaatatcaagcctcttattgaatatgttgctgagtcttgttggggccaacttgtgaagtttgaacgattgcagagtattatggccttcaaacttaagattgaggagagtgccgaaacaaagcaaagtaccagtgtggttgacatgagaatgaagaaagcagacgaaagaggtgctgataaacgacaggaaggttattttgaggacagtgacagagtagattcttctacacctacaatgcattcacaggagcaatctatcccagcaagaaagcctgaaaatgctgatggttgttcgaaagataaggagggccccccctcgccttctagaagcacgaaaaattctgatggcagtggcgaaggggatggaagccgaggctcttagaatcaacaacgtgccccggaaacttcaggtcctgtgccccggaaacttctagaagcacgaaaaaacttctagaagcacgaaagataaggactgcaacgaagctgcaggggatttgtctcccaagatggtccatacttcctagatacaatgaaacctattgacgtagagcctcggtgaggtgatactattgttttttcaagttacacttcaacatgccgttgcttatgatgaaatcgagagtacacatctcaacttggaacccgagaaatgattggatgtgagacagttttggccacagttgtgttcatctcagacatcaattttggctgagttgtgaacatgtacagataaatccccgagaaaagaattggaaaggcgcttcaacattgtttggtgccgacgcgttgctgggctgtggacctgaatattttatcagactagttaggtttctcttcggcatctaacgtggacctacctgtcaatgttgttgacaatgatgctgctctaaagaaggcgggagaacctgagcgagagccaagagtgttccgatgtgtgagcaatctaaattccagagtaatgagttgtgattaggtcatgtaacg

SEQ ID NO: 221826 - DNA, 1958 bp, Zea Mays
gtcaagccttaactcaatcattgagaggaacaagccttttgatgatgcttcttttatccatgatctgattgcaaggataacatcttcgaatacctctgctgaatcaaaaagcaaactggtcttgtttttgcgtgagctttgcattatcagcaaaagtttggagccgaaagtacgatcacatatgtctaggtatctcattgatgtaggagcgctaaacataatttctgatgtgttacagagtcaggataaagaactcttttcagctggggcaaacatactcgggtattttgttgatctgcatcctgacttagttagaacatttattgccaatcatgaagagaacctggaaggcagttctcttcttgagtttctggttcaagggatggtagttgactccgccaatgaaatgctctatcagtcttgtctaaaggaactgttaggttcttctgatacaactgtgaatcatcatgatgttgttcttcggcttttctttgacaagcatcttcaaaaattgattgacgcaatagcgtcgtcctgcgctccaaagggcattgccagatcaacgtctggtttagctggtgttcgcacaacggttgaacagcattctgctaagcctgaaacattgttgaaaatttgtgaacttttatccttctgcgcacttcatcatacaaaccggatgaagatatttttctcaaccaatgcaatggagaaaattctgacattaactcataggagagagaaggttttggttctggcaggagtccaattcgtgcggattataattggtagaaaggatgactttcttgttgaccgtgttatcaagttcaacctgttaaagccagttattaaggcttttgatgaaaatgaaggtagagacaacatgctacaatctgtggtccttgaactgttggagtatataagaaaggaaaatatcaagcctcttattgaatatgttgctgagtcttgttggggccaacttattgaggagagtgccgaaacaaagcaaagtaccagtgtggttgacatgagaatgaagaaagcagacgaaagaggtgctgataaacgacaggaaggttattttgaggacagtgacagagtagattcttctacacctacaatgcattcacaggagcaatctatcccagcaagaaagcctgaaaatgctgatggttgttcgaaagataaggagggccccccctcgccttctagaagcacgaaaaattctgatggcagtggcgaaggggatggaagccgaggctcttagaatcaacaacgtgccccggaaacttcaggtcctgtgccccggaaacttctagaagcacgaaaaaacttctagaagcacgaaagataaggactgcaacgaagctgcaggggatttgtctcccaagatggtccatacttcctagatacaatgaaacctattgacgtagagcctcggtgaggtgatactattgttttttcaagttacacttcaacatgccgttgcttatgatgaaatcgagagtacacatctcaacttggaacccgagaaatgattggatgtgagacagttttggccacagttgtgttcatctcagacatcaattttggctgagttgtgaacatgtacagataaatccccgagaaaagaattggaagttgagtatgaattcctttttgtgcagcattatagtaggaaagctaatcctactttttattgaattagtgtagtaagactaacagaacttagggccgaaaaaatgcatgccccgttctcgaaaatcgaaattgtttcctgtgggaccattggctaagctgttactcttgtagaagtggcaggacaggtcattttggcgtcagtagcattgtaatctcatagaactgtgattcgtggataatgcatgatgcaaaatccaactgaggctttgtttagctagactttgctacagcacaatccacataaatctctcttatttaaa

SEQ ID NO: 221827 - DNA, 944 bp, Zea Mays
gggccttggacgacggcgacgtccaacagatttgatcacgggcccaaacggcctttcccttttcgcccacaatccgcaggggacggggacggagaccgggctgaaggggagctggcggcgttcctgacgggggcgaacctgatcatggagtacgtgttctccaacgccgccgtggcgcgcagcttcacggcgtacctgggcacggcggtgggcgtggacgcgccccgcgagtggcggatcgccgtgcgcggcctgcccgagggcttcaaccaggtggacctcgtcgccgtcgccgtcatcctcctcgtctccgtctgcatctgctacagcaccaaggagagctcggcggtgaacctggcgctgacggcggtgcacgtggcgttcatcctgttcgtgatcgggatggggttccggcacggcgacgcgcgcaacctgacgcggccggcggacccggcgcgcagccccggcgggttcttcccgcacggcgccgcgggcgtgttcaacggcgcggccatggtgtacctcagctacatcgggtacgacgccgtgtccaccatggcggaggaggtgcagcggccggcgcgcgacatccccgccggcgtgtccggctccgtcgtcgtcgtcaccgtgctctactgcctcatggccgcctccatgtccatgctcctcccctacgacgcgattgacccagaggcgccgttctcgggggcgttcaaggggcgggagcggtgcgcgtgggtgtccaacgtggtcggcgccggcgccagcctcggcatcctcacctcgctcatggtggccatgctggggcaggcgcggtacctgtgcgtcatcggccgctccggcgtcatgccggcgtggctcgcccgggtcaacccccgcaccgccacccccgtcaacgcctccgccttcctcggcctcttcacggcggcgctggcgcatgttca

SEQ ID NO: 221828 - DNA, 1053 bp, Zea Mays
atggcggccgttgctgcaggggagctggcggcgttcctgacgggggcgaacctgatcatggagtacgtgttctccaacgccgccgtggcgcgcagcttcacggcgtacctgggcacggcggtgggcgtggacgcgccccgcgagtggcggatcgccgtgcgcggcctgcccgagggcttcaaccaggtggacctcgtcgccgtcgccgtcatcctcctcgtctccgtctgcatctgctacagcaccaaggagagctcggcggtgaacctggcgctgacggcggtgcacgtggcgttcatcctgttcgtgatcgggatggggttccggcacggcgacgcgcgcaacctgacgcggccggcggacccggcgcgcagccccggcgggttcttcccgcacggcgccgcgggcgtgttcaacggcgcggccatggtgtacctcagctacatcgggtacgacgccgtgtccaccatggcggaggaggtgcagcggccggcgcgcgacatccccgccggcgtgtccggctccgtcgtcgtcgtcaccgtgctctactgcctcatggccgcctccatgtccatgctcctcccctacgacgcggtcggtactccttctctctgctctgttatgctctctgaaacttgactttgaagagatgccgagatcctgccgaatagggctgctatatttagagctcatctttggttgcgtaggttgccaccgcagctagctgcatctgattccggcacccgcttctgtttgtccgcctcagcttcttcttcttttctgggattgtatgggatgttgatttgggtggggggatgaaatgaatctgccgtacgtcccgatcccaaactctcctggaccgacggccgcgaatccacttttgtacttactgtcagtaaatattagtcctagcagaagataataagaaagaaaaaggcgatcgtgacatggataacagtgacagttctttctttttcagtatttaattttcaccacctggtctgctctccgatcgttgtctgaacgtttctttcttctggtctggtgatgctg

SEQ ID NO: 221829 - DNA, 1345 bp, Zea Mays
cagctccgacactgcacagcccgcaccacgcaccaggacatcgccaccggcaccgcactacggcgtacaggaaaccggacggacagctatgcccgaccgcctcctttctggttctcctcctccctcctccctcccgcgcagatctccacaagcttccagagagcagcagcagcagcagctcgcctccacgcgacacgaggacggacatggcgaccttcaccaagctcgaggattcccccatgttccgcaaacaggtcaattctttggaacatcttactgatgaactgaaagaacggtgctcaaacctgcataaaggatgtaaaagattcatgggatcacttgatgaggcatatgcaggggatctatcatttgcagattctctgcaagcatttggtgctggtctggatgatcctattagtgttgccattggagggcccgtgatgtccaagtttactactgctttcagggagcttgggacatacaaggaactccttcgttctcagcttgagcacatgcttagtgatcgcctgtcacagttcattaacgtggatttaaatggtgtgaaggtgggcctgctgagggcaggtacttcacacagaggccgctaaggcacgaagtccgacagccgtcgttgtaagttgccaccagccatgctaagtctttcgggcgtccgtggaaagttggccccttcgcaagcgagcctgcatggttgactttgccgccgtcttcagatgttgggccctcgtgccttcggcaacacttcctggccttcgcctttctttagctcgctttaatggttcggagaccagatcgagggggtgttatgtcttcgctgcaacacctatcacgtatatcatcgttccagaatcgattccttattgtttgaccacaaatccaagaaaacatatgcatttccacaacacttatctgctgattatgatgtctttttgtaggccaatattcttcaccatacaacatagtaggtataattgccgtcctataaaacttgccttttagttggtgtggtgtcctctcgttacatagaacgtcagatgcttgacgacattttttccatactgctttgattctatagctaacaactttgtcaacatctccatctctctatagcattgatcttaaatatcgcaagatatcattcctggacactacttgaccttctaaactaacatctcatttctcatgtattccttgcttccgagttcggacaaggaacaaaaaaccttaaatagtcctaagatctgtgccttccatcttgggaaaaaggaacaattgcctttccatatggacaataatgtggaagttagattttaacacattgcttact

SEQ ID NO: 221830 - DNA, 600 bp, Zea Mays
cacgcaccaggacatcgccaccggcaccgcactacggcgtacaggaaaccggacggacagctatgcccgaccgcctcctttctggttctcctcctccctcctccctcccgcgcagatctccacaagcttccagagagcagcagcagcagcagctcgcctccacgcgacacgaggacggacatggcgaccttcaccaagctcgaggattcccccatgttccgcaaacaggtcaattctttggaacatcttactgatgaactgaaagaacggtgctcaaacctgcataaaggatgtaaaagattcatgggatcacttgatgaggcatatgcaggggatctatcatttgcagattctctgcaagcatttggtgctggtctggatgatcctattagtgttgccattggagggagcttgggacatacaaggaactccttcgttctcagcttgagcacatgcttagtgatcgcctgtcacagttcattaacgtggatttaaatggtgtgaaggtaaactctcctctcttctctccacttgaaaccgcacaacatagcatacttgtaactataggttgtaactgaagtaaacaatatagtagttcag

SEQ ID NO: 221831 - DNA, 533 bp, Zea Mays
cacgcaccaggacatcgccaccggcaccgcactacggcgtacaggaaaccggacggacagctatgcccgaccgcctcctttctggttctcctcctccctcctccctcccgcgcagatctccacaagcttccagagagcagcagcagcagcagctcgcctccacgcgacacgaggacggacatggcgaccttcaccaagctcgaggattcccccatgttccgcaaacaggtcaattctttggaacatcttactgatgaactgaaagaacggtgctcaaacctgcataaaggatgtaaaagattcatggcccgtgatgtccaagtttactactgctttcagggagcttgggacatacaaggaactccttcgttctcagcttgagcacatgcttagtgatcgcctgtcacagttcattaacgtggatttaaatggtgtgaaggtaaactctcctctcttctctccacttgaaaccgcacaacatagcatacttgtaactataggttgtaactgaagtaaacaatatagtagttcag

SEQ ID NO: 221832 - DNA, 898 bp, Zea Mays
cacgcaccaggacatcgccaccggcaccgcactacggcgtacaggaaaccggacggacagctatgcccgaccgcctcctttctggttctcctcctccctcctccctcccgcgcagatctccacaagcttccagagagcagcagcagcagcagctcgcctccacgcgacacgaggacggacatggcgaccttcaccaagctcgaggattcccccatgttccgcaaacaggtcaattctttggaacatcttactgatgaactgaaagaacggtgctcaaacctgcataaaggatgtaaaagattcatgtacatttctttgttgtctcctgttccacatttgcaaacatttgagatgttctaactgcacataactggaggcaaatgccataaatgcatactgtcttattgcataagtttctgataaggccctttcataaaaattccttttagttcaagaaatacattcagtattttttctttactttgctgttccaggtttcttgttttagtttttgtaatgttccatgagctagtgctcttttattatgttgctaattaccttagtttcaggggatcacttgatgaggcatatgcaggggatctatcatttgcagattctctgcaagcatttggtgctggtctggatgatcctattagtgttgccattggagggcccgtgatgtccaagtttactactgctttcagggagcttgggacatacaaggaactccttcgttctcagcttgagcacatgcttagtgatcgcctgtcacagttcattaacgtggatttaaatggtgtgaaggtaaactctcctctcttctctccacttgaaaccgcacaacatagcatacttgtaactataggttgtaactgaagtaaacaatatagtagttcag

SEQ ID NO: 221833 - DNA, 608 bp, Zea Mays
cacgcaccaggacatcgccaccggcaccgcactacggcgtacaggaaaccggacggacagctatgcccgaccgcctcctttctggttctcctcctccctcctccctcccgcgcagatctccacaagcttccagagagcagcagcagcagcagctcgcctccacgcgacacgaggacggacatggcgaccttcaccaagctcgaggattcccccatgttccgcaaacaggtcaattctttggaacatcttactgatgaactgaaagaacggtgctcaaacctgcataaaggatgtaaaagattcatgggatctatcatttgcagattctctgcaagcatttggtgctggtctggatgatcctattagtgttgccattggagggcccgtgatgtccaagtttactactgctttcagggagcttgggacatacaaggaactccttcgttctcagcttgagcacatgcttagtgatcgcctgtcacagttcattaacgtggatttaaatggtgtgaaggtaaactctcctctcttctctccacttgaaaccgcacaacatagcatacttgtaactataggttgtaactgaagtaaacaatatagtagttcag

SEQ ID NO: 221834 - DNA, 680 bp, Zea Mays
ccaccggcaccgcactacggcgtacaggaaaccggacggacagctatgcccgaccgcctcctttctggttctcctcctccctcctccctcccgcgcagatctccacaagcttccagagagcagcagcagcagcagctcgcctccacgcgacacgaggacggacatggcgaccttcaccaagctcgaggattcccccatgttccgcaaacaggtggcgtccctcgctcttcgctcctctgcccacgaggcctccctgatccggccccgtcgaggcaatgtttcgtgtttcttgggatctcggtcggtcctacgtcgtcagttggatttgggtgtgtcgaatggaaggattcggggatcacttgatgaggcatatgcaggggatctatcatttgcagattctctgcaagcatttggtgctggtctggatgatcctattagtgttgccattggagggcccgtgatgtccaagtttactactgctttcagggagcttgggacatacaaggaactccttcgttctcagcttgagcacatgcttagtgatcgcctgtcacagttcattaacgtggatttaaatggtgtgaaggtaaactctcctctcttctctccacttgaaaccgcacaacatagcatacttgtaactataggttgtaactgaagtaaacaatatagtagttcag

SEQ ID NO: 221835 - DNA, 3929 bp, Zea Mays
cactccacgcccaattctcagcgagcgagaggccctcgtcgagcccatccatcccatgatgacgcgggcgccgggagcacgcggacgggacggcaaccccagccaaagccaaaacaggcctgcttccttacacctcgcttggtggtctgggcgaccggccgctggcgtcgcgccctcccttataaaccaccacacttcagcacccacagctccctcttgcatcccctcgcccgtcgtctcgccagtcgctacaccccaaaaacctcacgcgcgcgctcgcgacccctcgcgctcgcctcgtcggcacgccggcgagaggggcgcccatccccgtgcctatataaggacgccggattggaggtgcccgtcccttatccgcgcggccagatctacctctgttccacgcctccgtcaccgccgcgtcggggcgatcccaccgaggccacaggtataagctggtaccatggcatccaacacaggagcatcaggatggctcaggggtaaggtgaaggctgtgacatctggagattgtctactaatcatggggagctcaaaagctgagatcccacctgagaagtccatcaccctgtcctaccttatggccccaaggctggctcgccgtggtggagttgacgagccctttgcatgggaaagcagagagtttctaaggaagctttgtatagggaaggaggtcacattcagagtggattatacggctcctaatattggacgagaattcggaactgtttatctaggtgacaagaatgttgcgtactcagtaatttctgctggatgggcaagggtaaaggagcaaggcccaaaggggggcgaacaaaattcgtaccttgccgagctgttgaggttggaggaagttgccaaacaacagggtgttggtcgttggagcaaggaacctggtgctgctgaagagtcaataagagatcttccaccatccgcaattggtgaaggaagtggttttgatgcaaagggttttgcggtttccaataaaggcaagagtttggaggccattgttgaacaagttcgtgatggcagtactgttcgtgtgtatttactccctaatttccagtttgtgcagatatatgttgctggagtacaggctccatcaatgggaagacgtccatcggtacctactgtaattgctgaaactgatgataatgctaatatcgcgaacgctgaagatcctgagggaacacctgcgcaactgactacagcacaaaggctagttgcatctgcagcttctgctgaaattccaccagataggtatggaagagaagccaaacatttcacagagactagagttctcaacagagatgtgcgtattgtggtggaaggcacagacagctttagtaatataattggttctgtgtattaccctgatggagagactgcaaaggacttggcccttgagcttgtcgaaaatgggctggcaaagtatgttgagtggagtgccaatatgcttgatgttgaagtaaaaataaagctgaagaatgcagaacttcaggctaaaaaggatcaattgagaatctggacagggtttaagccaccagcgacaaactcgaagcccattcatgaccagaaatttaatggaaaagtggtagaggttgtaagtggggattgcattattgtggctgatgattctgctccatatggaagtccttcagctgaacgtcgggttaatctgtcaagcattagggctcctaagttgggcaatgctcgtacagatgtgaagcctgaccattttgctcgtgaagctaaggagttcttacgcacgaggttgattggcaaacaagtggctgttgaaatggaatactctcgaaggatcagcactgtagatggacagagtgctgctccaacagcaaacatggctgatacaagagttttagattatgggtcagtttttctgggttcaccatcacagactgatggagatgacacatcttctgctccgagctctgctagccagcctggagttaatgttgctgagcttttgctctcacgaggctttgctaaaacatctaaacacagggattatgaggaaaggtcacactattatgatgctttattagcagctgaatcacgcgctgagaaagcaaagaaaggcgtgcattctcagaaagaatctcctgtgatgcatataacagatttaacaactgtatctgcaaagaaggccaaagattttcttcccttcttgcagcggaacagaaggcattcggccatcgttgaatatgtttttagtggccatcggttcaaactaacaattcccaaggagacttgtagtatcgccttctcattatctggtgtccgttgtcctggtaaaggcgagccatactcagacgaagctattgctttgatgaggagaaggatacttcaacgagatgtggagatagaggttgaagcagttgataggacaggaacgttcataggttctttgtgggagtccaagaccaacatgggctctgtgcttctggaagctggacttgccaagctgagttcatttggcttggataggacctcagatgcttatatcctaacaagagctgaacagtctgcgaagcaacagaagattaagatatgggagaactatgtcgagggtgaaaatgcttccaatggatccacacctgaatctaaacaaaagcaaattctcaaggttgttgtcacggaagttcttggtggtgggaagttttatgttcagacaatgggtgaccagagggtggcttcaattcaacagcagcttgcatctttgaaacttaaagatgcgccggtcattggtgcttttaatcctgtgaagggagagatagtcctcgcacaatttagcgttgacaactcctggaacagagctatgattgttaatggacctcgttctgttgaatctccggacgacaagtttgaagtattctatattgactatggcaaccaagaggtggttacctacagtcgtttacgacctgtagacccatctgtttcctcgtctcctgctcttgctcagctatgcagccttgctttcataaaagtgcccagtcttgaggatgactttggtcaggaagcagcagagtatctaagtgaatgtttgctcagtagctcaaagcaataccgggcaatgatcgaagaacatgatacttctggggggaaatcaaaaggacaaggaaccggaaatgttctcattgttactcttgttgatgcggagacagaaagtagcataaacgctaccatgcttgaggaagggcttgcccggctcgaaagaagcaagagatgggacactagggagaggaagacggctctccagaacctggaacagttccaggacaaggcaaagaaggaaaggctgcggatttggcagtacggagatgttgaatcggacgaggacgagcaggccccgcctgcaaggaagcctggaggtcgtcggtagagactgggcagtgtaaggctgcagtctggcatgctatgaaagttttggacaaccacaaatgttggactctgccgggagttatagatgaggacttactgaggggcgaaacttttgaagctatgcttcgctctgagatagaacatcaatcctttcaagtgctaaacttcacggaggctcgatctcatgaatgaccgaatcactgacctcgacaaactcaaagaggccaagggcttggcggccatgcaagacacgtctgagataaaagttgtgctgttgacgatctagtgctacgcaagatccaaagtatgaaggacaaacataaactgtcacccccttatgagggtcctttcatcatctctgaagtacttcggctcgacgcttattgactccagctagaagatgacacaatcaaccgtttttacgtgtaacttctccattttttgcaataagtccatctcgaacaactccaccgccatgactgagatgttgggggcctaacatcatg

SEQ ID NO: 221836 - DNA, 3796 bp, Zea Mays
ctccacgcccaattctcagcgagcgagaggccctcgtcgagcccatccatcccatgatgacgcgggcgccgggagcacgcggacgggacggcaaccccagccaaagccaaaacaggcctgcttccttacacctcgcttggtggtctgggcgaccggccgctggcgtcgcgccctcccttataaaccaccacacttcagcacccacagctccctcttgcatcccctcgcccgtcgtctcgccagtcgctacaccccaaaaacctcacgcgcgcgctcgcgacccctcgcgctcgcctcgtcggcacgccggcgagaggggcgcccatccccgtgcctatataaggacgccggattggaggtgcccgtcccttatccgcgcggccagatctacctctgttccacgcctccgtcaccgccgcgtcggggcgatcccaccgaggccacaggtataagctggtaccatggcatccaacacaggagcatcaggatggctcaggggtaaggtgaaggctgtgacatctggagattgtctactaatcatggggagctcaaaagctgagatcccacctgagaagtccatcaccctgtcctaccttatggccccaaggctggctcgccgtggtggagttgacgagccctttgcatgggaaagcagagagtttctaaggaagctttgtatagggaaggaggtcacattcagagtggattatacggctcctaatattggacgagaattcggaactgtttatctaggtgacaagaatgttgcgtactcagtaatttctgctggatgggcaagggtaaaggagcaaggcccaaaggggggcgaacaaaattcgtaccttgccgagctgttgaggttggaggaagttgccaaacaacagggtgttggtcgttggagcaaggaacctggtgctgctgaagagtcaataagagatcttccaccatccgcaattggtgaaggaagtggttttgatgcaaagggttttgcggtttccaataaaggcaagagtttggaggccattgttgaacaagttcgtgatggcagtactgttcgtgtgtatttactccctaatttccagtttgtgcagatatatgttgctggagtacaggctccatcaatgggaagacgtccatcggtacctactgtaattgctgaaactgatgataatgctaatatcgcgaacgctgaagatcctgagggaacacctgcgcaactgactacagcacaaaggctagttgcatctgcagcttctgctgaaattccaccagataggtatggaagagaagccaaacatttcacagagactagagttctcaacagagatgtgcgtattgtggtggaaggcacagacagctttagtaatataattggttctgtgtattaccctgatggagagactgcaaaggacttggcccttgagcttgtcgaaaatgggctggcaaagtatgttgagtggagtgccaatatgcttgatgttgaagtaaaaataaagctgaagaatgcagaacttcaggctaaaaaggatcaattgagaatctggacagggtttaagccaccagcgacaaactcgaagcccattcatgaccagaaatttaatggaaaagtggtagaggttgtaagtggggattgcattattgtggctgatgattctgctccatatggaagtccttcagctgaacgtcgggttaatctgtcaagcattagggctcctaagttgggcaatgctcgtacagatgtgaagcctgaccattttgctcgtgaagctaaggagttcttacgcacgaggttgattggcaaacaagtggctgttgaaatggaatactctcgaaggatcagcactgtagatggacagagtgctgctccaacagcaaacatggctgatacaagagttttagattatgggtcagtttttctgggttcaccatcacagactgatggagatgacacatcttctgctccgagctctgctagccagcctggagttaatgttgctgagcttttgctctcacgaggctttgctaaaacatctaaacacagggattatgaggaaaggtcacactattatgatgctttattagcagctgaatcacgcgctgagaaagcaaagaaaggcgtgcattctcagaaagaatctcctgtgatgcatataacagatttaacaactgtatctgcaaagaaggccaaagattttcttcccttcttgcagcggaacagaaggcattcggccatcgttgaatatgtttttagtggccatcggttcaaactaacaattcccaaggagacttgtagtatcgccttctcattatctggtgtccgttgtcctggtaaaggcgagccatactcagacgaagctattgctttgatgaggagaaggatacttcaacgagatgtggagatagaggttgaagcagttgataggacaggaacgttcataggttctttgtgggagtccaagaccaacatgggctctgtgcttctggaagctggacttgccaagctgagttcatttggcttggataggacctcagatgcttatatcctaacaagagctgaacagtctgcgaagcaacagaagattaagatatgggagaactatgtcgagggtgaaaatgcttccaatggatccacacctgaatctaaacaaaagcaaattctcaaggttgttgtcacggaagttcttggtggtgggaagttttatgttcagacaatgggtgaccagagggtggcttcaattcaacagcagcttgcatctttgaaacttaaagatgcgccggtcattggtgcttttaatcctgtgaagggagagatagtcctcgcacaatttagcgttgacaactcctggaacagagctatgattgttaatggacctcgttctgttgaatctccggacgacaagtttgaagtattctatattgactatggcaaccaagaggtggttacctacagtcgtttacgacctgtagacccatctgtttcctcgtctcctgctcttgctcagctatgcagccttgctttcataaaagtgcccagtcttgaggatgactttggtcaggaagcagcagagtatctaagtgaatgtttgctcagtagctcaaagcaataccgggcaatgatcgaagaacatgatacttctggggggaaatcaaaaggacaaggaaccggaaatgttctcattgttactcttgttgatgcggagacagaaagtagcataaacgctaccatgcttgaggaagggcttgcccggctcgaaagaagcaagagatgggacactagggagaggaagacggctctccagaacctggaacagttccaggacaaggcaaagaaggaaaggctgcggatttggcagtacggagatgttgaatcggacgaggacgagcaggccccgcctgcaaggaagcctggaggtcgtcggtagagactgggcagtgtaaggctgcagtctggcatgctatgaaagttttggacaaccacaaatgttggactctgccgggagttatagatgaggacttactgaggggtaccgtatttatattcggttagaagaagggaacttagcgaggcgaaatcacttttgatattccgtttttacaggcgaaactttctctgttttagcacttttgatattccgtttttacatcgcaagttataaggttaaagatgcattgtttctttttctctcaacttaataaggttgtgtctatgcgctgcggttctttgtagtcagaatataatattgagaagtgcagtgaattaagttaaggattgcatttaattattccaaaaaagaaa

SEQ ID NO: 221837 - DNA, 3547 bp, Zea Mays
gccaaagccaaaacaggcctgcttccttacacctcgcttggtggtctgggcgaccggccgctggcgtcgcgccctcccttataaaccaccacacttcagcacccacagctccctcttgcatcccctcgcccgtcgtctcgccagtcgctacaccccaaaaacctcacgcgcgcgctcgcgacccctcgcgctcgcctcgtcggcacgccggcgagaggggcgcccatccccgtgcctatataaggacgccggattggaggtgcccgtcccttatccgcgcggccagatctacctctgttccacgcctccgtcaccgccgcgtcggggcgatcccaccgaggccacaggtataagctggtaccatggcatccaacacaggagcatcaggatggctcaggggtaaggtgaaggctgtgacatctggagattgtctactaatcatggggagctcaaaagctgagatcccacctgagaagtccatcaccctgtcctaccttatggccccaaggctggctcgccgtggtggagttgacgagccctttgcatgggaaagcagagagtttctaaggaagctttgtatagggaaggaggtcacattcagagtggattatacggctcctaatattggacgagaattcggaactgtttatctaggtgacaagaatgttgcgtactcagtaatttctgctggatgggcaagggtaaaggagcaaggcccaaaggggggcgaacaaaattcgtaccttgccgagctgttgaggttggaggaagttgccaaacaacagggtgttggtcgttggagcaaggaacctggtgctgctgaagagtcaataagagatcttccaccatccgcaattggtgaaggaagtggttttgatgcaaagggttttgcggtttccaataaaggcaagagtttggaggccattgttgaacaagttcgtgatggcagtactgttcgtgtgtatttactccctaatttccagtttgtgcagatatatgttgctggagtacagcttctgctgaaattccaccagataggtatggaagagaagccaaacatttcacagagactagagttctcaacagagatgtgcgtattgtggtggaaggcacagacagctttagtaatataattggttctgtgtattaccctgatggagagactgcaaaggacttggcccttgagcttgtcgaaaatgggctggcaaagtatgttgagtggagtgccaatatgcttgatgttgaagtaaaaataaagctgaagaatgcagaacttcaggctaaaaaggatcaattgagaatctggacagggtttaagccaccagcgacaaactcgaagcccattcatgaccagaaatttaatggaaaagtggtagaggttgtaagtggggattgcattattgtggctgatgattctgctccatatggaagtccttcagctgaacgtcgggttaatctgtcaagcattagggctcctaagttgggcaatgctcgtacagatgtgaagcctgaccattttgctcgtgaagctaaggagttcttacgcacgaggttgattggcaaacaagtggctgttgaaatggaatactctcgaaggatcagcactgtagatggacagagtgctgctccaacagcaaacatggctgatacaagagttttagattatgggtcagtttttctgggttcaccatcacagactgatggagatgacacatcttctgctccgagctctgctagccagcctggagttaatgttgctgagcttttgctctcacgaggctttgctaaaacatctaaacacagggattatgaggaaaggtcacactattatgatgctttattagcagctgaatcacgcgctgagaaagcaaagaaaggcgtgcattctcagaaagaatctcctgtgatgcatataacagatttaacaactgtatctgcaaagaaggccaaagattttcttcccttcttgcagcggaacagaaggcattcggccatcgttgaatatgtttttagtggccatcggttcaaactaacaattcccaaggagacttgtagtatcgccttctcattatctggtgtccgttgtcctggtaaaggcgagccatactcagacgaagctattgctttgatgaggagaaggatacttcaacgagatgtggagatagaggttgaagcagttgataggacaggaacgttcataggttctttgtgggagtccaagaccaacatgggctctgtgcttctggaagctggacttgccaagctgagttcatttggcttggataggacctcagatgcttatatcctaacaagagctgaacagtctgcgaagcaacagaagattaagatatgggagaactatgtcgagggtgaaaatgcttccaatggatccacacctgaatctaaacaaaagcaaattctcaaggttgttgtcacggaagttcttggtggtgggaagttttatgttcagacaatgggtgaccagagggtggcttcaattcaacagcagcttgcatctttgaaacttaaagatgcgccggtcattggtgcttttaatcctgtgaagggagagatagtcctcgcacaatttagcgttgacaactcctggaacagagctatgattgttaatggacctcgttctgttgaatctccggacgacaagtttgaagtattctatattgactatggcaaccaagaggtggttacctacagtcgtttacgacctgtagacccatctgtttcctcgtctcctgctcttgctcagctatgcagccttgctttcataaaagtgcccagtcttgaggatgactttggtcaggaagcagcagagtatctaagtgaatgtttgctcagtagctcaaagcaataccgggcaatgatcgaagaacatgatacttctggggggaaatcaaaaggacaaggaaccggaaatgttctcattgttactcttgttgatgcggagacagaaagtagcataaacgctaccatgcttgaggaagggcttgcccggctcgaaagaagcaagagatgggacactagggagaggaagacggctctccagaacctggaacagttccaggacaaggcaaagaaggaaaggctgcggatttggcagtacggagatgttgaatcggacgaggacgagcaggccccgcctgcaaggaagcctggaggtcgtcggtagagactgggcagtgtaaggctgcagtctggcatgctatgaaagttttggacaaccacaaatgttggactctgccgggagttatagatgaggacttactgaggggtaccgtatttatattcggttagaagaagggaacttagcgaggcgaaatcacttttgatattccgtttttacaggcgaaactttctctgttttagcacttttgatattccgtttttacatcgcaagttataaggttaaagatgcattgtttctttttctctcaacttaataaggttgtgtctatgcgctgcggttctttgtagtcagaatataatattgagaagtgcagtgaattaagttaaggattgcatttaattattc

SEQ ID NO: 221838 - DNA, 3627 bp, Zea Mays
cttaagtgtcccatatattttccatttccatcatttctttagctacctatggaaggtaaaatgcaaatattggcaaaatgcgagttgctaaatatgataggaaacaagacataggttacactatctaataaatgacggtctttctttttgattgcaggtataagctggtaccatggcatccaacacaggagcatcaggatggctcaggggtaaggtgaaggctgtgacatctggagattgtctactaatcatggggagctcaaaagctgagatcccacctgagaagtccatcaccctgtcctaccttatggccccaaggctggctcgccgtggtggagttgacgagccctttgcatgggaaagcagagagtttctaaggaagctttgtatagggaaggaggtcacattcagagtggattatacggctcctaatattggacgagaattcggaactgtttatctaggtgacaagaatgttgcgtactcagtaatttctgctggatgggcaagggtaaaggagcaaggcccaaaggggggcgaacaaaattcgtaccttgccgagctgttgaggttggaggaagttgccaaacaacagggtgttggtcgttggagcaaggaacctggtgctgctgaagagtcaataagagatcttccaccatccgcaattggtgaaggaagtggttttgatgcaaagggttttgcggtttccaataaaggcaagagtttggaggccattgttgaacaagttcgtgatggcagtactgttcgtgtgtatttactccctaatttccagtttgtgcagatatatgttgctggagtacaggctccatcaatgggaagacgtccatcggtacctactgtaattgctgaaactgatgataatgctaatatcgcgaacgctgaagatcctgagggaacacctgcgcaactgactacagcacaaaggctagttgcatctgcagcttctgctgaaattccaccagataggtatggaagagaagccaaacatttcacagagactagagttctcaacagagatgtgcgtattgtggtggaaggcacagacagctttagtaatataattggttctgtgtattaccctgatggagagactgcaaaggacttggcccttgagcttgtcgaaaatgggctggcaaagtatgttgagtggagtgccaatatgcttgatgttgaagtaaaaataaagctgaagaatgcagaacttcaggctaaaaaggatcaattgagaatctggacagggtttaagccaccagcgacaaactcgaagcccattcatgaccagaaaggtggtagaggttgtaagtggggattgcattattgtggctgatgattctgctccatatggaagtccttcagctgaacgtcgggttaatctgtcaagcattagggctcctaagttgggcaatgctcgtacagatgtgaagcctgaccattttgctcgtgaagctaaggagttcttacgcacgaggttgattggcaaacaagtggctgttgaaatggaatactctcgaaggatcagcactgtagatggacagagtgctgctccaacagcaaacatggctgatacaagagttttagattatgggtcagtttttctgggttcaccatcacagactgatggagatgacacatcttctgctccgagctctgctagccagcctggagttaatgttgctgagcttttgctctcacgaggctttgctaaaacatctaaacacagggattatgaggaaaggtcacactattatgatgctttattagcagctgaatcacgcgctgagaaagcaaagaaaggcgtgcattctcagaaagaatctcctgtgatgcatataacagatttaacaactgtatctgcaaagaaggccaaagattttcttcccttcttgcagcggaacagaaggcattcggccatcgttgaatatgtttttagtggccatcggttcaaactaacaattcccaaggagacttgtagtatcgccttctcattatctggtgtccgttgtcctggtaaaggcgagccatactcagacgaagctattgctttgatgaggagaaggatacttcaacgagatgtggagatagaggttgaagcagttgataggacaggaacgttcataggttctttgtgggagtccaagaccaacatgggctctgtgcttctggaagctggacttgccaagctgagttcatttggcttggataggacctcagatgcttatatcctaacaagagctgaacagtctgcgaagcaacagaagattaagatatgggagaactatgtcgagggtgaaaatgcttccaatggatccacacctgaatctaaacaaaagcaaattctcaaggttgttgtcacggaagttcttggtggtgggaagttttatgttcagacaatgggtgaccagagggtggcttcaattcaacagcagcttgcatctttgaaacttaaagatgcgccggtcattggtgcttttaatcctgtgaagggagagatagtcctcgcacaatttagcgttgacaactcctggaacagagctatgattgttaatggacctcgttctgttgaatctccggacgacaagtttgaagtattctatattgactatggcaaccaagaggtggttacctacagtcgtttacgacctgtagacccatctgtttcctcgtctcctgctcttgctcagctatgcagccttgctttcataaaagtgcccagtcttgaggatgactttggtcaggaagcagcagagtatctaagtgaatgtttgctcagtagctcaaagcaataccgggcaatgatcgaagaacatgatacttctggggggaaatcaaaaggacaaggaaccggaaatgttctcattgttactcttgttgatgcggagacagaaagtagcataaacgctaccatgcttgaggaagggcttgcccggctcgaaagaagcaagagatgggacactagggagaggaagacggctctccagaacctggaacagttccaggacaaggcaaagaaggaaaggctgcggatttggcagtacggagatgttgaatcggacgaggacgagcaggccccgcctgcaaggaagcctggaggtcgtcggtagagactgggcagtgtaaggctgcagtctggcatgctatgaaagttttggacaaccacaaatgttggactctgccgggagttatagatgaggacttactgaggggcgaaacttttgaagctatgcttcgctctgagatagaacatcaatcctttcaagtgctaaacttcacggaggctcgatctcatgaatgaccgaatcactgacctcgacaaactcaaagaggccaagggcttggcggccatgcaagacacgtctgagataaaagttgtgctgttgacgatctagtgctacgcaagatccaaagtatgaaggacaaacataaactgtcacccccttatgagggtcctttcatcatctctgaagtacttcggctcgacgcttattgactccagctagaagatgacacaatcaaccgtttttacgtgtaacttctccattttttgcaataagtccatctcgaacaactccaccgccatgactgagatgttgggggcctaacatcatg

SEQ ID NO: 221839 - DNA, 3053 bp, Zea Mays
cctaatattggacgagaattcggaactgtttatctaggtgacaagaatgttgcgtactcagtaatttctgctggatgggcaagggtaaaggagcaaggcccaaaggggggcgaacaaaattcgtaccttgccgagctgttgaggttggaggaagttgccaaacaacagggtgttggtcgttggagcaaggaacctggtgctgctgaagagtcaataagagatcttccaccatccgcaattggtgaaggaagtggttttgatgcaaagggttttgcggtttccaataaaggcaagagtttggaggccattgttgaacaagttcgtgatggcagtactgttcgtgtgtatttactccctaatttccagtttgtgcagatatatgttgctggagtacaggctccatcaatgggaagacgtccatcggtacctactgtaattgctgaaactgatgataatgctaatatcgcgaacgctgaagatcctgagggaacacctgcgcaactgactacagcacaaaggctagttgcatctgcagcttctgctgaaattccaccagataggtatggaagagaagccaaacatttcacagagactagagttctcaacagagatgtgcgtattgtggtggaaggcacagacagctttagtaatataattggttctgtgtattaccctgatggagagactgcaaaggacttggcccttgagcttgtcgaaaatgggctggcaaagtatgttgagtggagtgccaatatgcttgatgttgaagtaaaaataaagctgaagaatgcagaacttcaggctaaaaaggatcaattgagaatctggacagggtttaagccaccagcgacaaactcgaagcccattcatgaccagaaatttaatggaaaagtggtagaggttgtaagtggggattgcattattgtggctgatgattctgctccatatggaagtccttcagctgaacgtcgggttaatctgtcaagcattagggctcctaagttgggcaatgctcgtacagatgtgaagcctgaccattttgctcgtgaagctaaggagttcttacgcacgaggttgattggcaaacaagtggctgttgaaatggaatactctcgaaggatcagcactgtagatggacagagtgctgctccaacagcaaacatggctgatacaagagttttagattatgggtcagtttttctgggttcaccatcacagactgatggagatgacacatcttctgctccgagctctgctagccagcctggagttaatgttgctgagcttttgctctcacgaggctttgctaaaacatctaaacacagggattatgaggaaaggtcacactattatgatgctttattagcagctgaatcacgcgctgagaaagcaaagaaaggcgtgcattctcagaaagaatctcctgtgatgcatataacagatttaacaactgtatctgcaaagaaggccaaagattttcttcccttcttgcagcggaacagaaggcattcggccatcgttgaatatgtttttagtggccatcggttcaaactaacaattcccaaggagacttgtagtatcgccttctcattatctggtgtccgttgtcctggtaaaggcgagccatactcagacgaagctattgctttgatgaggagaaggatacttcaacgagatgtggagatagaggttgaagcagttgataggacaggaacgttcataggttctttgtgggagtccaagaccaacatgggctctgtgcttctggaagctggacttgccaagctgagttcatttggcttggataggacctcagatgcttatatcctaacaagagctgaacagtctgcgaagcaacagaagattaagatatgggagaactatgtcgagggtgaaaatgcttccaatggatccacacctgaatctaaacaaaagcaaattctcaagttcttggtggtgggaagttttatgttcagacaatgggtgaccagagggtggcttcaattcaacagcagcttgcatctttgaaacttaaagatgcgccggtcattggtgcttttaatcctgtgaagggagagatagtcctcgcacaatttagcgttgacaactcctggaacagagctatgattgttaatggacctcgttctgttgaatctccggacgacaagtttgaagtattctatattgactatggcaaccaagaggtggttacctacagtcgtttacgacctgtagacccatctgtttcctcgtctcctgctcttgctcagctatgcagccttgctttcataaaagtgcccagtcttgaggatgactttggtcaggaagcagcagagtatctaagtgaatgtttgctcagtagctcaaagcaataccgggcaatgatcgaagaacatgatacttctggggggaaatcaaaaggacaaggaaccggaaatgttctcattgttactcttgttgatgcggagacagaaagtagcataaacgctaccatgcttgaggaagggcttgcccggctcgaaagaagcaagagatgggacactagggagaggaagacggctctccagaacctggaacagttccaggacaaggcaaagaaggaaaggctgcggatttggcagtacggagatgttgaatcggacgaggacgagcaggccccgcctgcaaggaagcctggaggtcgtcggtagagactgggcagtgtaaggctgcagtctggcatgctatgaaagttttggacaaccacaaatgttggactctgccgggagttatagatgaggacttactgaggggtaccgtatttatattcggttagaagaagggaacttagcgaggcgaaatcacttttgatattccgtttttacaggcgaaactttctctgttttagcacttttgatattccgtttttacatcgcaagttataaggttaaagatgcattgtttctttttctctcaacttaataaggttgtgtctatgcgctgcggttctttgtagtcagaatataatattgagaagtgcagtgaattaagttaaggattgcatttaattattc

SEQ ID NO: 221840 - DNA, 346 bp, Zea Mays
gtataataaaggggccacccatcaggagagacaagcaaatttcccaaacgcaaaaccgcatcctctcatcagcttccttccacattcgtctcgagatctcgccccgtcgccatggacgcgatcgacagcgtggtggatcccctccgcgacttcgccaaggacagcgtccgcctcgtcaagcgctgccacaagcccgaccgcaaggagttcaccaaggtggcggcgcggacggcgatcgggttcgtcgtcatgggcttcgtcggcttcttcgttaagctcatcttcatccccatcaacaacatcatcgtcggttccggctaggtgattactgcagtttcatctgttc

SEQ ID NO: 221841 - DNA, 383 bp, Zea Mays
ccaggatccctccttccgccgcgccctagttcaccaaggtggcggcgcggacggcgatcgggttcgtcgtcatgggcttcgtcggcttcttcgttaagctcatcttcatccccatcaacaacatcatcgtcggttccggctaggcttacaggagtacagggcgactagcatgggagtagtgcaatacttttgggagcaatagataacgaggatcctggtctttcgaatagtattgttaatgaaatttttcgttcggttgtgtttctgatgtaatcgttgtactgagtagaccttctggataccggattctgagtagacctttgaatccttgatggatcagccaatctcggaaaggaagtttcgtattttgttgttccgttaag

SEQ ID NO: 221842 - DNA, 1246 bp, Zea Mays
ccccaccccgcaccgcatggagctccattcgcctccaccatggtgccactgcgagcagctccgccccctgcccccccggtcggcggatcccccaccccgccaggtgctctgctaaggcccaccacagtgccagcaactccaccacccccttcctccgctgttggcggttcccccaccccgctaggagcaccgcccaggcggacggcttcaccttcaaagcccatgccacgcagccagcgtcgggatcacccccacctacacccctcgccagaggaccgcccccttgatgccagacagccaacggattcacccccacgccctccacgagcctgataaaggatgctaaaggtcgcggcaagtggctctactgccactccactccgcggcggtgccagcgttgatgaccacctctcggcctactgctacttcttctccagcatgggtctaatccatgtcgcgatacggggtttggacattttgggctaggttgttcagcatgggtctggtgaatgaaggcatcgacatgaaggagggaaacctagagatcggcatagcaattcttttgcatgacgattagtttttttttattaatctgtgttagatcttcaaatacacgcaatccaatcttgaagatctggttaaataagtatgctgcttgtaccataaaccgtgtgcgacgcaaatttcagtaagtgcattttgctgatgtattgtgatagtagaccgaccttccttctgcagagtggaaccaaaggtatttgatgagttctttggcatgccacatagcagatttgaccgggaagcttgcaggtctactatctgtcctgatttttgtatctgtgtgtcttccttcatgttcaaaatggtgattcagtttatatgagagtattgtcttagtgtttgtgtggataacatcaatatggtgtacgacgatgagtttcctgaacttagtactttcaagtgtgtgacaagaaaggaaagtagcaagctggaaagcaagaaccaagataaattgtttgatgcatatatcatgtatggttctgcaatacaatctacaacacaccagattatatgtgaagtgatttgctgaaataatgacgcataactacgcttatatcgagaaggggagaaaggatcaactgtcaccgtctccgtcggcaacatcagccatgttgacagcccgcgctctgtgtgccctcctccccacgcatgtgatggcctatgtttttttcttctccctcacgct

SEQ ID NO: 221843 - DNA, 1505 bp, Zea Mays
cgcaccgcatggagctccattcgcctccaccatggtgccactgcgagcagctccgccccctgcccccccggtcggcggatcccccaccccgccaggtgctctgctaaggcccaccacagtgccagcaactccaccacccccttcctccgctgttggcggttcccccaccccgctaggagcaccgcccaggcggacggcttcaccttcaaagcccatgccacgcagccagcgtcgggatcacccccacctacacccctcgccagaggaccgcccccttgatgccagacagccaacggattcacccccacgccctccacgagcctgataaaggatgctaaaggtcgcggcaagtggctctactgccactccactccgcggcggtgccagcgttgatgaccacctctcggcctactgctacttcttctccagcatgggtctaatccatgtcgcgatacggggttgttcagcatgggtctggtgaatgaaggcatcgacatgaaggagggaaacctagagatcggcatagcaattcttttgcatgacgattagtttttttttattaatctgtgttagatcttcaaatacacgcaatccaatcttgaagatctggttaaataagtatgctgcttgtaccataaaccgtgtgcgacgcaaatttcagtaagtgcattttgctgatgtattgtgatagtagaccgaccttccttctgcagagtggaaccaaaggtatttgatgagttctttggcatgccacatagcagatttgaccgggaagcttgcaggtctactatctgtcctgatttttgtatctgtgtgtcttccttcatgttcaaaatggtgattcagtttatatgagagtattgtcttagtgtttgtgtggataacatcaatatggtgtacgacgatgagtttcctgaacttagtactttcaagtgtgtgacaagaaaggaaagtagcaagctggaaagcaagaaccaagataaattgtttgatgcatatatcatgtatggttctgcaatacaatctacaacacaccagattatatgtgaaggtcagattttatcatctcagatttgttgatttcaatattttatggagtccctatggtttgccaacttcactaacgatggaattgattgaaatcctttttgagaaatgaatagccaataaatttctcatgggaagagggtaagcaatggccaatgttcagggattggatacatagttgcatttacatgtcaatgtcatcttcacatagtagatagaattgtacacaattttcagtaatattggcactgtagatatggtctgtatttaacagtgttgttgacttcttagtgatttgctgaaataatgacgcataactacgcttatatcgagaaggggagaaaggatcaactgtcaccgtctccgtcggcaacatcagccatgttgacagcccgcgctctgtgtgccctcctccccacgcatgtgatggcctatgtttttttcttctccctcacgct

SEQ ID NO: 221844 - DNA, 726 bp, Zea Mays
caaccagcgcaggattatcgccgccgtcatcggggttgttatcgacctccctcttcccccaaccgagatcctaggagataaatcagagtcccggcgacctttttcccatatattaccctctcacaagccctgaccaccaaatcatctaccgtcgggtgctatcaccaccgcgaaatcgagatttagagagcggagatccgtcgttggcgagcttgcaaatcgcggttacctaggtcttggcgtggtgttctggtgcggtggcatggtgcctaggagcctcgactgccatcaattccgccgctggaccgttgaagcttgggcgattgctcgccggacttgggaattgtcgttgtgccgtgctgcgtcggggaccgagctcatctcaatcaaatcaccggtgtctggacaagcagcaacagtttctgtgatgactgactggtgtgccttttatggctgcagattcctcgactggcagttcgcattgatcttcggtccaacagtcattttgcccccaaaagagtcgacatatattttctactcgttgagtcaagaacaggtaccgcaagatgaggcgcatggaggatgctatgacgagttcgtgagaggtctagaccatcgtctcccagtcaacttgggttgctggattgttgtctccttatgatgtaattatttatttattttgtatagaactcttattatatagtaaagatatgacatttatttctg

SEQ ID NO: 221845 - DNA, 2691 bp, Zea Mays
gggagggagccaaatcctagcgcgcgctagaaaatagagattgttgttaggagtgttggtggaggaagagatcctgcaaccataaaagaagaaagcaggcgaacccaaccaaacataccaaagcgaagcaaaagaaaggcactcatccaacacaaggacaccaaactcgtaaagtgatcgtcggcgtcatatatagggagcagccgggccgtcgagaaggacagtggagctaggcacgcagccgcagccgcagcaagcaagcaagagctgcgactgcgagcaggcttattaagctaagcgacgacctccgttccattgcgaacaggctacagatcagagtgaggaagaagaggaagccgaatttcttttcactctcccgactgacctttcgccggtgcgcacgccacctcgggtcgggagcgtcgatcgagtccgtggcggtggcggcgtgggacggtgaccggtaagtttgtacaatataaagcgcggcggccacacagtcacacacacacacaccagctgggagctgcggagatgcagcagcggcgcaagtcggtgttcgcgtccgcgccgttcgcgatgaagcaggcggcgctgggagccggcgtggcggcgcgcaagaacggcgcgccgctgtcgctggccgcggtggtgttcgcgctcttcgtcttcgcgacgttcctctacaacgaggacatcaagtccatcaccgacttccagttcagctccggcgccatccgcgccaagtcccccgacctgcacctcctgcaggaggccgaggccgcggcgcacgccgccgtgaacaccctggccaagcgcggggaggaggtgatcgtgcgcgtcctcgaggtcgaggcgccgcccgtcgtcaacactagcagcgtgctggcggccgccgcgaaggccagcgccaaggccaacgcggtggacgtggggcaggagaaggagcgggacgtgacgctcccgacggtgacggggggccgaggcggggccgacgaggcccagcggcgcgctgacgaggaggtcgctgagaaggccgcgtcggcgaaggcggcggcggccaccgccgcgctgcgcggcgtggtgagcgtgccgcagacgtgcgacctgtaccggggcagctgggtgtacgacgaggtgagcgcgccggtgtacaaggagggcgagtgcgagttcctgacggagcaggtgacctgcatgcgcaacgggcggcgcgacgactcgtaccagaagtggcggtggcagccggcgggctgcgacctgccgcggttcgacgcgcggctgctgctggagcggctgcggaacaagcggctgatgttcgtgggggactcgctgaaccggaaccagtgggagtcgatggtgtgcctggtgcagtcggtgatccccgacagggggcagaagacgctgacaaagttcgtcaacggcgggtccagcaacgtgttctacgcgcacgagtacaacgcgacggtggagttctactgggcgcccttcctggtggagtccaactccgacaaccccaaggtgcacagcgtccccgaccgggtcatccagtggcacgccatcgccaagcacgcgcgcaactggatcggcgtcgactacctcgtcttcaacacgtacatctggtggctcaacacgctcgacatcaaagtcctgggtcgtccttcgatgaccagggctccaccgagtacgtggaggtggaccggcccgtggcgtacaaggaggtgctgacgacgtgggcgaaatgggtggaccgcaacatcgaccccaacaggacgaccgtcttcttcatgggcatgtctcccaaccacatcacgcctgaggcttggggcaacaagggcgggatcaagtgcgccatggagacgctgccgatcgcgagcaaccgcagcgcggcgctggacgtgggcacggactggcgcctctacgcgggggcgcgggaggtgctgcccacgctgcgccgggtgcccgtccacttcgtcgacatcaccgcgctgtcggagctgcgcaaggacgcgcacacctcggtgcacacgctgcgccaggggaagctgctcaccccggagcagcaggccgaccccaagacctacgccgactgcatccactggtgcctcccgggcctgcccgacacctggaaccagttcctctacgcccgcatcgcatccagcccatggcccaacgacgcccaggcccagcagtagggaccctgcacctgctcctccttctatcttcctcattcgccgcgggccggcgcctcacgacacaaaagggaggcctgggctgcaacggcccgcccatcgacgagagctctggcgtttctgcttcaagctagctgatcagccaaaagggggcgaaagacggcgtttctgctcgccgtctttgttttctttccttttttttaaacgatttttctttctcttttcgttgcataaaaggaaactggtccgtgttgttcaccttcgattctttggtccaaacacaagtggatggtctggggtaaatgagggtgtgacgagcttagttgctcgctcatttggtttcttctcctaccaacgatgcctagggggaaagcaagagttgagcatgaagatgtgatgggggagaagcaaagctggggggagtacatgtaaagaagattttttgcgttgtatttttatatgctgctgcagtgcacccaaggttaagagaggtataaag

SEQ ID NO: 221846 - DNA, 690 bp, Zea Mays
atgttcagtatgcaaatctcgtttataaggaggtccttacccccgcacgttctgaagatatggagggacatcacgactccagttcaaggagagctcccacaaccaccaaatgcatttggtgggcaaggtatggttccatctttattcacactccactgtctcaagctagaaaaaaaaattcaatcgtggcttcctgaaaaggttatgtaccgaccagcattccagcaatttatgaactattcgtcaccacatggtggtgatcctaatgcaaacatgaactcaactgcaacacgaatagcagctgatcttgatacacatcaagattttgagccaaagagcagaagttcagacatgcctttgcatgccgctattactcaggatatcaaggagaacccagtcttgatctacatgaagggttttcctgagtctccaatgtgtggcttcagtgcactggctgttaaggtctttcagcaatatggcgtccctacctgtggtagagacattcttggggatctcaagctcaaagagagtgttaaagcccacacacagtaagtggcaacacacttgtgtctcaaaattgaaaatggtccatggtaaggtagattatcgaaattttgcatgatgttacgaggaaggggaatgatattcaagtttgccttcaagagagaagaaccagatttaacaaacaag

SEQ ID NO: 221847 - DNA, 1949 bp, Zea Mays
acggcccaccttccagacgctcccccggaaactccgcccactcgcacaaaccaagacaaagttgcgatgctccatgctccacgtcacgacgccgcatctaaccctccggcgactcatcgccggcgagccggtccgccacgccatagcctcgtcctgaagcgcacttaatcctacgtctcgttcctctctcgcccccggtaccctccataggcatgggaatggggtctgcgagagggggcgcagggggatggctccccggcgagcggtggcggcgggtcatcttcctcgctctggcggccgtctcgttcctcatctcactcatactcctcttcctatccgcgccgcgtctccgcctcccaagtgtcgtcctgccttacaccaccgcttccgcttctgccgtccgccgcgggcccggcgagccgccctgcctggtgtacctgctgaccggcgcgcgcggcgacgggcgccgcctcctcaggctcctcctcgcggtttaccacccgcgcaaccggtacgtgctccacctctccgccgacgcgccagacgacgagcgcctgagcctcgccaccggggtcgtcgccgcggcgcccgccgtgggagcattcgagaacgtggttattattggcaatcccaccgccgggacgcccgtggggtcctccggactcgccggcacgctccgcgctgcggccgtgctgctccggctccacgctgactgggactggttcctcaccctcaatgccgccgactaccccctcgtcacacaggatgacctgattcatgtcctttcttctgtcccaagggatcttaacttcattgaccacaccggtgacgttggatcaaaagaacctgagaaagttcaacaaattatagtcgatgctggaatttacttgtcagggaggaccaacttctttcgaggaacacagaaacgagcagctcctgaggcttttaagttctttacaggttctccatgggtcatattaaaccggcaatttatagagtactgcattcttgcttgggagaatctccctaggattcttctcatgtacttcaacaatgtaatacaacctcaggaaggggaacattatggtcacatggtggatagtggggcacccttcgcaaggccgtttcaggagaatgatcctctgctggaccagatcgacggcaatatactcaagcgttggagccatggaccagttcctggtgcttggtgcacaggaaggaagaggtggttcagtgatccatgttcccagtggggcgatgtgaatgttttgagaccaggtcctcaagcagtgatgttgcaccaatatgtaaatcggaccttagaagaagcaaagtctagcagcaattcatgcaggcggtagcagcattggcgtctagaacctcatgtcccatggttgaaagctttgagctttttccgcttatccactaagggttctccactctgctgaataaatagctgccacatgtctaagctgaaacaagcactcgtcgcacctggaacaaagccatggagggatgttcttttctgatattttcatgatgactatcatagtcacggatcaggagtttcactttggtctgtgattaatctgtgcaatccccatatttggctcatataacacttccaggcgctgataataggctgaagcttatataactactgttgtttatatgttgcggttatttgttggacagcttatattcatgctagtagatcaagttacgaatcccttatgctcccctgttgtgaggactgtagactgtagaacaagggattttgttacttgttagtcttactgaattcatgttgtgctttggacttacataatatgcctagtcctgtattgtacctaaaatgagactccagtcatctcagtttacctttgaggggtgtttggaagcatattattttttgcagtttcaaagcaatactatggtctttaagaata

SEQ ID NO: 221848 - DNA, 2589 bp, Zea Mays
acggcccaccttccagacgctcccccggaaactccgcccactcgcacaaaccaagacaaagttgcgatgctccatgctccacgtcacgacgccgcatctaaccctccggcgactcatcgccggcgagccggtccgccacgccatagcctcgtcctgaagcgcacttaatcctacgtctcgttcctctctcgcccccggtaccctccataggcatgggaatggggtctgcgagagggggcgcagggggatggctccccggcgagcggtggcggcgggtcatcttcctcgctctggcggccgtctcgttcctcatctcactcatactcctcttcctatccgcgccgcgtctccgcctcccaagtgtcgtcctgccttacaccaccgcttccgcttctgccgtccgccgcgggcccggcgagccgccctgcctggtgtacctgctgaccggcgcgcgcggcgacgggcgccgcctcctcaggctcctcctcgcggtttaccacccgcgcaaccggtacgtgctccacctctccgccgacgcgccagacgacgagcgcctgagcctcgccaccggggtcgtcgccgcggcgcccgccgtgggagcattcgagaacgtggttattattggcaatcccaccgccgggacgcccgtggggtcctccggactcgccggcacgctccgcgctgcggccgtgctgctccggctccacgctgactgggactggttcctcaccctcaatgccgccgactaccccctcgtcacacaggatggtagggcaacactggcatctatgcatctctaaggaaaaaaaatctccttggttcaatctagtaggttacaaaagaacgacactcggtagtcttcttcctttattatatggaaattacaagtagtcttctagcgatgacattgaatggaaatgtaagttctctttgtttgtcctgactgatatcaaataacaaatactcataacatggaagagctgcacaaccagtcatgagtcaaccatgcacatttcatacgattccagttgcctattagtcacactgtcagtcttactttgcattgatagttgtactgtcaggaataatagattgaggctccccttatttattgataagtaatgcacatgccaaaacttgtgctgttgctatacttatatctgttaaagtgtgcacccaaacatataggtctgttgtagagcctgtgccaaatgatgttcatgattacaaaatttctgttatacatcactcttgaatgctataatatatcatggttattctggttctccaaataacttttatcttctacagaaatctgcttcggtgcttcattaattattccagcaagtcatcattgtgtgattatcctcattaattgatggagatcattataaatctttatgcttttccctgatgcagacctgattcatgtcctttcttctgtcccaagggatcttaacttcattgaccacaccggtgacgttggatcaaaagaacctgagaaagttcaacaaattatagtcgatgctggaatttacttgtcagggaggaccaacttctttcgaggaacacagaaacgagcagctcctgaggcttttaagttctccatgggtcatattaaaccggcaatttatagagtactgcattcttgcttgggagaatctccctaggattcttctcatgtacttcaacaatgtaatacaacctcaggaaggggaacattatggtcacatggtggatagtggggcacccttcgcaaggccgtttcaggagaatgatcctctgctggaccagatcgacggcaatatactcaagcgttggagccatggaccagttcctggtgcttggtgcacaggaaggaagaggtggttcagtgatccatgttcccagtggggcgatgtgaatgttttgagaccaggtcctcaagcagtgatgttgcaccaatatgtaaatcggaccttagaagaagcaaagtctagcagcaattcatgcaggcggtagcagcattggcgtctagaacctcatgtcccatggttgaaagctttgagctttttccgcttatccactaagggttctccactctgctgaataaatagctgccacatgtctaagctgaaacaagcactcgtcgcacctggaacaaagccatggagggatgttcttttctgatattttcatgatgactatcatagtcacggatcaggagtttcactttggtctgtgattaatctgtgcaatccccatatttggctcatataacacttccaggcgctgataataggctgaagcttatataactactgttgtttatatgttgcggttatttgttggacagcttatattcatgctagtagatcaagttacgaatcccttatgctcccctgttgtgaggactgtagactgtagaacaagggattttgttacttgttagtcttactgaattcatgttgtgctttggacttacataatatgcctagtcctgtattgtacctaaaatgagactccagtcatctcagtttacctttgaggggtgtttggaagcatattattttttgcagtttcaaagcaatactatggtctttaagaata

SEQ ID NO: 221849 - DNA, 1986 bp, Zea Mays
ctctgacccaacccatcaaccacttcgccttagcgtgaagtcgtgaactctgttcatagtccagggccgccgcctcagcgtggtcttgtacaatggcggaggattctggcgccatcctccgccacatctcctccgtcaaggatatggtcgacaaggttaatgaagagattgaacaaaacatacagaagaccagggaaatagaatcagagatagtgcaacattctgaaaccgaaaagcactatctcaacaaggagtctgagttgacaaaagaagtatcagttactgagtttgaactcaatggtcttatccaagtggctgcttctgaatcagatttacttaaagtggcagagggaaatttggagttccagaaagttgctcacgatgtgattcggaaaagagtttctgataagatggaaaaattcatcaatgaatctatggggtttcaagccaatatgctcaaaagttcaaatgaggatttagttctcttactgaatgaaaaaagttcactggaggatgaaagtgcgaaattgaaagtgaagataaacagtatacatagttcatccaaggaatacattgcagagattcttgaggaagtgaatacagaaaattcagttctggagtctgagctacggtacatgatttcggaatataaggatgtccaaaaggatataaacaacctgaagattctgtttagttcaagcaattcataggacaggttcctcgcgtcactgcaggtcggatgattcctgcttctccgatcctatcacatcgcgcactaccttccagcgaatccatcacggaagaaattgttccccacccaccctagactcgccgccgtcgcaactcccacccgatccccaaattctccggcggtgatggccagcctgtggcgcgccgtgatggatagcgtcagcggctcctccccctcggcgctggacgcggccccaggtagcggcgtcgagttctggcacggcgcagagcgcgctgggtggctaaataagcagggcgagtacatcaagacgtggaggcggcggtggttcgtgctgaagcaggggaggcttttctggttcaaggaccctgcggtgacacgggcctcggtgccccgcggcgtcatccccgtcgccacctgcctcacagtcaagggcgccgaggacgtgctcaaccgccagttcgccttcgagctctccacgcctgccgagaccatgtatttcattgcggactccgagaaggacaaggaggagtggattaactccatcggtcgctccatcgtccagcactcccgctccgtcaccgacgcagaggtcgttgactacgacagccgcccccagcccccgccgcagcttatgaccagcgaagagagtgcaccagcagcttaatggcgtggtgattcctgtgaactctctcgatatggatctgacttgtagcatatgtatttccaattccatgtgattgtggccttgtgccgacgttcctcactcttgattatgtagcagtatattaactatcaacgacatggtctggtatggtaataagcgagttaataagctgtgctttcgtttatagtttgttttatatgtatatactatactacgatttgatcttggtataccctaatttacaaggtggttgaagtctggctagtttttattttttttaacagttttgaagttttggccccaatttcagaaattgtaagagattttaatcattcagtatcccattcctctcgccttttgttgtgtttgacttgttctattctaatggaattgtattgagtcgcataggattgcttaactgactccgcatttttgcagaagattccccagttttggctagtttggcaacaacattttctcaagggattaccattttcccaaatgaaaacgaactaatttctcttgggaaaatgaaaatccattggaaaaatgaggttgtcaaactagcatttagatcctagctctgactctagcgctcttatgaagtttc

SEQ ID NO: 221850 - DNA, 803 bp, Zea Mays
gaaaaataggggctaccgctctgacccaacccatcaaccacttcgccttagcgtgaagtcgtgaactctgttcatagtccagggccgccgcctcagcgtggtcttgtacaatggcggaggattctggcgccatcctccgccacatctcctccgtcaaggatatggtcgacaaggttaatgaagagattgaacaaaacatacagaagaccagggaaatagaatcagagatagtgcaacattctgaaaccgaaaagcactatctcaacaaggagtctgagttgacaaaagaagtatcagttactgagtttgaactcaatggtcttatccaagtggctgcttctgaatcagatttacttaaagtggcagagggaaatttggagttccagaaagttgctcacgatgtgattcggaaaagagtttctgataagatggaaaaattcatcaatgaatctatggggtttcaagccaatatgctcaaaagttcaaatgaggatttagttctcttactgaatgaaaaaagttcactggaggatgaaagtgcgaaattgaaagtgaagataaacagtatacatagttcatccaaggaatacattgcagagattcttgaggaagtgaatacagaaaattcagctgcttgtcactcatcgcaagaagtatgaggactcatacatgtcctcagaagagggaagatactggtatgcttcgatggtgaaattggctctggcaagaagctttagtcatggtttcatggagctttcccaatatagtgaaaaatggtaaagctgaagcggaagaaaaatgtg

SEQ ID NO: 221851 - DNA, 4206 bp, Zea Mays
aacaaacgccaccgcctcccacagcacgaaaccttctctcctcttctcgttctccccctctatagtcctccgccgcctccattgccttctcttgggctcctccccgtatcccgggactactagtccaacctcccaattctgcggcactcaccattcgacaagcactgaaccctaccccacccaccagtccccgcagccgcgctccgcaatggcgagcggggcggctagaaagcgccgccgcaagtcgtcgccccctgccgccgccgcggctgcacgggacgggaggaagctcctcgtcggcgaagtcgtcgaggtgctgagttgtgatcaaggactacgtggctcctggcataaggctattgttattggtattctggaaaatgctcgcgcagtcagatatactgatttcattgatgaaaatgggtcacctcttgttgagaatgttcaagtgtcagatgccattgatggtaagtcaagtatgcctgaggaactcattcgtggcaacattaggccaatgtgtccacatcaagcactgcaggtgtctcatgcaagctatggactttgtgttgacgcactcatagaaagttcctactgggaaggtgttattgctgatcatgctgaaggctctatggaaaggaaagtccttttccctgatgaaggtgatgaatgcattatagaagttgatcagctacgtcttactcaagactgggatgaagctacaggggaatggaaaccacgtggaatctggtcatttctgcagatacttttgtcacatgaagagagagatggtttacctgtgtcaatcaggcagatatggtttgacttaagatccaaaccttcttttaagactgatgccaaaatgtggatgtgtggaacagaagatttttgggagagatcacttgcagatgtcattgctgaattgtggtctctatgtgacaagcctaccctagatggatatcaagtggaagcagttcagaaggatacagttgagaccactgtcttggataggctggatccattccaagcattatcagaatacatctcatgctatcggaataataggaaaaatgctcttatcaaaaaagagtgggcaaagcaacaccttaaatcttcaggatggacctttctggatgacagacctaagaacaagttttacatctcacctgatggtaagcggtttccatcttttctaggagcatgccaggcgtgtttggctgcaaaagaagcaaatggttaccaatatgatcatacagaaaatttgcatctagacagtatgagtctggtgcacaagaatgcatgctacaaccagacacacatggatcttgccttggtaaagaacaagtccaatgataaatggatcacgagcccatcaagatcttgggaattggttcaactggatgctgaattttccccacagatagtttcccttcttgctagttatcaagatggcacaactgtccttcagaggacaattgatagaactctgagtgtgaagctgaagaagcatctattggcactgggttggagtattaagttcaaaaaggacgaaattcaagaaaatggccatcataaacacactacaagataccggtacgagtcaccttatgggaagacttatgtttctatcattcaggtaatatgcagtttgatagttggaggcgttaaacaagatgacaggcccagctatcggacagcagcaaaaggtgctcatttgacagtgtcaactggcctggcaaggctcaataaacgtaaacgaagggataaaactgatgctcttgaaaaatacatagactatatgaaaactgataagcaaaattccaggaggaggaaactgttgagatcaaatgctcagaagtttctcaaatctgctgggtggaatttttggttaaagaaaaagtctagaaacaaattggagttgaggtatggtgctccacatggcaagtcttacagctctttagtggcagcatgtaaaggttacttggaaaatggatatcaggaggacagtgatgcagacattaaaatcgccaaccatggttctgctgatggttctatgcgtccatcaaaattgatagcactcagcggtggattaaaggattcaagtaaaatacaggatctttccctgtcggcatcacgtgaagacagttttgtctttgttggtagagaaaaatattgtggtaccaagggataaggttacatataagcgaagtgatggacctggtataaaggaaggttccatcagcagagatggaataaaatgcatgtgttgtaatgaattattcactgtggagaattttgaggttcatgctgggagcagtacaccattaccttcggctcatatgtttttaaaggatggaaggtccctatcacagtgtttagttgaattcatgggtggaaacaagcccagagatccactgcatgtgcgcttgaaggggagtagttctgatctggaaagtgattcgatatgctctgtgtgccatgatggtggggatttattactttgtgacaattgcccatcatcttatcattatgattgtgtcggcttggaggtagaggccattccagaaggaagctggtattgtccatcctgcagatgcggtatttgtaacttgagtgattatgatcctgatatcagccaattcactgagaagaccatagtgtactgtgatcagtgtgaacgggaatatcatgtcggttgcactagaaatagtgaccatcagcttatctgccgaccagaaggttgttggttttgcagcaggggatgctcaaatgtatttcaacatttgcaagaagtcattgggaaacaagttccaactccaatcgaaggcttatcttgcactatcttgaaattttgtagagcgaacggcagtgaccatggcgattatgatgatgagataatggcagagcattatggcaagttgtgcattgcagttgatattcttcatgaatgctttgttactattatcgagcctcgcacacagagtgatatttctgaggatattgtcttcaatagagaatcagaactcagacgactaaattttaggggattctacataatacttctccagaaaggtggtgaactagtatctgtcggcacttttaggatttgcggccagaagtttgctgagctgcctctgatcggtacaagatctctataccgtcgtcaaggaatgtgtcgacttctaattaatgaactggaaaagttgcttttagacttgggggtggaaagacttctattaccggcagttcctgaacttttgcaaacatggacatgctcatttggtttcacagttatgtcaaattctgagaggcttgagttggcagggaatagcattctcagtttccagggaaccaccatgtgtcagaagattttaaatgttgcacacaacatttcacaagatagaagtattccatcaatgtccaattctgagagaatggggttagcagagaacatggtggtgaagaaggcatttattccattgacagtggagccagaccatcatgttgatttgattgtggagcctgagctagtaatgaaaattgagaataacagcagtgaggagggtatttcttcaattgatccgctgactagtatgccagaccctcaagttggtttggcagtggggccagagatggtaccggtaagtcgggaaaacaaagataaagagggtatttgtttcattgatgctccaacttgtccgccagatcctcaagttgatttaacaacgggcattcatgagcaatcatttgtcagatcagtgcaacgagaattgcactttgaatataacacctaacacagcttcaggattggaatacaagttctcaggaaaatgctatgagcgggtaaaaaagggcgctcgcccaaggaatgtctggcttagaatctcgaccaaataataaccaaaggtagatctagtagagctacggatgaaggatgcttaactttcatgcaataagctttcagccatcgccttggcattgtccaagttcaagtcgaaactaacctaacctggttacggaagcgtgtgattgtgtatttcccacggtgtaaattaaggactatccaactgataacatactgtccagctacgaggaaaataagattatgttggagcaatttctggtgatggttttaccctgatgtgtcatattattatcagttctgtcgccatactgttcattggctcctttgttcatggtgaatcttct

SEQ ID NO: 221852 - DNA, 4238 bp, Zea Mays
cccacagcacgaaaccttctctcctcttctcgttctccccctctatagtcctccgccgcctccattgccttctcttgggctcctccccgtatcccgggactactagtccaacctcccaattctgcggcactcaccattcgacaagcactgaaccctaccccacccaccagtccccgcagccgcgctccgcaatggcgagcggggcggctagaaagcgccgccgcaagtcgtcgccccctgccgccgccgcggctgcacgggacgggaggaagctcctcgtcggcgaagtcgtcgaggtgctgagttgtgatcaaggactacgtggctcctggcataaggctattgttattggtattctggaaaatgctcgcgcagtcagatatactgatttcattgatgaaaatgggtcacctcttgttgagaatgttcaagtgtcagatgccattgatggtaagtcaagtatgcctgaggaactcattcgtggcaacattaggccaatgtgtccacatcaagcactgcaggtgtctcatgcaagctatggactttgtgttgacgcactcatagaaagttcctactgggaaggtgttattgctgatcatgctgaaggctctatggaaaggaaagtccttttccctgatgaaggtgatgaatgcattatagaagttgatcagctacgtcttactcaagactgggatgaagctacaggggaatggaaaccacgtggaatctggtcatttctgcagatacttttgtcacatgaagagagagatggtttacctgtgtcaatcaggcagatatggtttgacttaagatccaaaccttcttttaagactgatgccaaaatgtggatgtgtggaacagaagatttttgggagagatcacttgcagatgtcattgctgaattgtggtctctatgtgacaagcctaccctagatggatatcaagtggaagcagttcagaaggatacagttgagaccactgtcttggataggctggatccattccaagcattatcagaatacatctcatgctatcggaataataggaaaaatgctcttatcaaaaaagagtgggcaaagcaacaccttaaatcttcaggatggacctttctggatgacagacctaagaacaagttttacatctcacctgatggtaagcggtttccatcttttctaggagcatgccaggcgtgtttggctgcaaaagaagcaaatggttaccaatatgatcatacagaaaatttgcatctagacagtatgagtctggtgcacaagaatgcatgctacaaccagacacacatggatcttgccttggtaaagaacaagtccaatgataaatggatcacgagcccatcaagatcttgggaattggttcaactggatgctgaattttccccacagatagtttcccttcttgctagttatcaagatggcacaactgtccttcagaggacaattgatagaactctgagtgtgaagctgaagaagcatctattggcactgggttggagtattaagttcaaaaaggacgaaattcaagaaaatggccatcataaacacactacaagataccggtacgagtcaccttatgggaagacttatgtttctatcattcaggtaatatgcagtttgatagttggaggcgttaaacaagatgacaggcccagctatcggacagcagcaaaaggtgctcatttgacagtgtcaactggcctggcaaggctcaataaacgtaaacgaagggataaaactgatgctcttgaaaaatacatagactatatgaaaactgataagcaaaattccaggaggaggaaactgttgagatcaaatgctcagaagtttctcaaatctgctgggtggaatttttggttaaagaaaaagtctagaaacaaattggagttgaggtatggtgctccacatggcaagtcttacagctctttagtggcagcatgtaaaggttacttggaaaatggatatcaggaggacagtgatgcagacattaaaatcgccaaccatggttctgctgatggttctatgcgtccatcaaaattgatagcactcagcggtggattaaaggattcaagtaaaatacagggtatgcctgttgtagacagatgtagcaacatgtttaccttgtctgcacatcatggaaaatgtaggaaaagaaaaccatcttcagtttctttgaacagtgcacgagttctttgttcacatggacagatctttccctgtcggcatcacgtgaagacagttttgtctttgttggtagagaaaaatattgtggtaccaagggataaggttacatataagcgaagtgatggacctggtataaaggaaggttccatcagcagagatggaataaaatgcatgtgttgtaatgaattattcactgtggagaattttgaggttcatgctgggagcagtacaccattaccttcggctcatatgtttttaaaggatggaaggtccctatcacagtgtttagttgaattcatgggtggaaacaagcccagagatccactgcatgtgcgcttgaaggggagtagttctgatctggaaagtgattcgatatgctctgtgtgccatgatggtggggatttattactttgtgacaattgcccatcatcttatcattatgattgtgtcggcttggaggtagaggccattccagaaggaagctggtattgtccatcctgcagatgcggtatttgtaacttgagtgattatgatcctgatatcagccaattcactgagaagaccatagtgtactgtgatcagtgtgaacgggaatatcatgtcggttgcactagaaatagtgaccatcagcttatctgccgaccagaaggttgttggttttgcagcaggggatgctcaaatgtatttcaacatttgcaagaagtcattgggaaacaagttccaactccaatcgaaggcttatcttgcactatcttgaaattttgtagagcgaacggcagtgaccatggcgattatgatgatgagataatggcagagcattatggcaagttgtgcattgcagttgatattcttcatgaatgctttgttactattatcgagcctcgcacacagagtgatatttctgaggatattgtcttcaatagagagatttgcggccagaagtttgctgagctgcctctgatcggtacaagatctctataccgtcgtcaaggaatgtgtcgacttctaattaatgaactggaaaagttgcttttagacttgggggtggaaagacttctattaccggcagttcctgaacttttgcaaacatggacatgctcatttggtttcacagttatgtcaaattctgagaggcttgagttggcagggaatagcattctcagtttccagggaaccaccatgtgtcagaagattttaaatgttgcacacaacatttcacaagatagaagtattccatcaatgtccaattctgagagaatggggttagcagagaacatggtggtgaagaaggcatttattccattgacagtggagccagaccatcatgttgatttgattgtggagcctgagctagtaatgaaaattgagaataacagcagtgaggagggtatttcttcaattgatccgctgactagtatgccagaccctcaagttggtttggcagtggggccagagatggtaccggtaagtcgggaaaacaaagataaagagggtatttgtttcattgatgctccaacttgtccgccagatcctcaagttgatttaacaacgggcattcatgagcaatcatttgtcagtgctggtgcagatcagtgcaacgagaattgcactttgaatataacacctaacacagcttcaggattggaatacaagttctcaggaaaatgctatgagcgggtaaaaaagggcgctcgcccaaggaatgtctggcttagaatctcgaccaaataataaccaaaggtagatctagtagagctacggatgaaggatgcttaactttcatgcaataagctttcagccatcgccttggcattgtccaagttcaagtcgaaactaacctaacctggttacggaagcgtgtgattgtgtatttcccacggtgtaaattaaggactatccaactgataacatactgtccagctacgaggaaaataagattatgttggagcaatttctggtgatggttttaccctgatgtgtcatattattatcagttctgtcgccatactgttcattggctcctttgttcatggtgaatcttct

SEQ ID NO: 221853 - DNA, 4306 bp, Zea Mays
cacagcacgaaaccttctctcctcttctcgttctccccctctatagtcctccgccgcctccattgccttctcttgggctcctccccgtatcccgggactactagtccaacctcccaattctgcggcactcaccattcgacaagcactgaaccctaccccacccaccagtccccgcagccgcgctccgcaatggcgagcggggcggctagaaagcgccgccgcaagtcgtcgccccctgccgccgccgcggctgcacgggacgggaggaagctcctcgtcggcgaagtcgtcgaggtgctgagttgtgatcaaggactacgtggctcctggcataaggctattgttattggtattctggaaaatgctcgcgcagtcagatatactgatttcattgatgaaaatgggtcacctcttgttgagaatgttcaagtgtcagatgccattgatggtaagtcaagtatgcctgaggaactcattcgtggcaacattaggccaatgtgtccacatcaagcactgcaggtgtctcatgcaagctatggactttgtgttgacgcactcatagaaagttcctactgggaaggtgttattgctgatcatgctgaaggctctatggaaaggaaagtccttttccctgatgaaggtgatgaatgcattatagaagttgatcagctacgtcttactcaagactgggatgaagctacaggggaatggaaaccacgtggaatctggtcatttctgcagatacttttgtcacatgaagagagagatggtttacctgtgtcaatcaggcagatatggtttgacttaagatccaaaccttcttttaagactgatgccaaaatgtggatgtgtggaacagaagatttttgggagagatcacttgcagatgtcattgctgaattgtggtctctatgtgacaagcctaccctagatggatatcaagtggaagcagttcagaaggatacagttgagaccactgtcttggataggctggatccattccaagcattatcagaatacatctcatgctatcggaataataggaaaaatgctcttatcaaaaaagagtgggcaaagcaacaccttaaatcttcaggatggacctttctggatgacagacctaagaacaagttttacatctcacctgatggtaagcggtttccatcttttctaggagcatgccaggcgtgtttggctgcaaaagaagcaaatggttaccaatatgatcatacagaaaatttgcatctagacagtatgagtctggtgcacaagaatgcatgctacaaccagacacacatggatcttgccttggtaaagaacaagtccaatgataaatggatcacgagcccatcaagatcttgggaattggttcaactggatgctgaattttccccacagatagtttcccttcttgctagttatcaagatggcacaactgtccttcagaggacaattgatagaactctgagtgtgaagctgaagaagcatctattggcactgggttggagtattaagttcaaaaaggacgaaattcaagaaaatggccatcataaacacactacaagataccggtacgagtcaccttatgggaagacttatgtttctatcattcaggtaatatgcagtttgatagttggaggcgttaaacaagatgacaggcccagctatcggacagcagcaaaaggtgctcatttgacagtgtcaactggcctggcaaggctcaataaacgtaaacgaagggataaaactgatgctcttgaaaaatacatagactatatgaaaactgataagcaaaattccaggaggaggaaactgttgagatcaaatgctcagaagtttctcaaatctgctgggtggaatttttggttaaagaaaaagtctagaaacaaattggagttgaggtatggtgctccacatggcaagtcttacagctctttagtggcagcatgtaaaggttacttggaaaatggatatcaggaggacagtgatgcagacattaaaatcgccaaccatggttctgctgatggttctatgcgtccatcaaaattgatagcactcagcggtggattaaaggattcaagtaaaatacagggtatgcctgttgtagacagatgtagcaacatgtttaccttgtctgcacatcatggaaaatgtaggaaaagaaaaccatcttcagtttctttgaacagtgcacgagttctttgttcacatggacagatctttccctgtcggcatcacgtgaagacagttttgtctttgttggtagagaaaaatattgtggtaccaagggataaggttacatataagcgaagtgatggacctggtataaaggaaggttccatcagcagagatggaataaaatgcatgtgttgtaatgaattattcactgtggagaattttgaggttcatgctgggagcagtacaccattaccttcggctcatatgtttttaaaggatggaaggtccctatcacagtgtttagttgaattcatgggtggaaacaagcccagagatccactgcatgtgcgcttgaaggggagtagttctgatctggaaagtgattcgatatgctctgtgtgccatgatggtggggatttattactttgtgacaattgcccatcatcttatcattatgattgtgtcggcttggaggccattccagaaggaagctggtattgtccatcctgcagatgcggtatttgtaacttgagtgattatgatcctgatatcagccaattcactgagaagaccatagtgtactgtgatcagtgtgaacgggaatatcatgtcggttgcactagaaatagtgaccatcagcttatctgccgaccagaaggttgttggttttgcagcaggggatgctcaaatgtatttcaacatttgcaagaagtcattgggaaacaagttccaactccaatcgaaggcttatcttgcactatcttgaaattttgtagagcgaacggcagtgaccatggcgattatgatgatgagataatggcagagcattatggcaagttgtgcattgcagttgatattcttcatgaatgctttgttactattatcgagcctcgcacacagagtgatatttctgaggatattgtcttcaatagagaatcagaactcagacgactaaattttaggggattctacataatacttctccagaaaggtggtgaactagtatctgtcggcacttttaggatttgcggccagaagtttgctgagctgcctctgatcggtacaagatctctataccgtcgtcaaggaatgtgtcgacttctaattaatgaactggaaaagttgcttttagacttgggggtggaaagacttctattaccggcagttcctgaacttttgcaaacatggacatgctcatttggtttcacagttatgtcaaattctgagaggcttgagttggcagggaatagcattctcagtttccagggaaccaccatgtgtcagaagattttaaatgttgcacacaacatttcacaagatagaagtattccatcaatgtccaattctgagagaatggggttagcagagaacatggtggtgaagaaggcatttattccattgacagtggagccagaccatcatgttgatttgattgtggagcctgagctagtaatgaaaattgagaataacagcagtgaggagggtatttcttcaattgatccgctgactagtatgccagaccctcaagttggtttggcagtggggccagagatggtaccggtaagtcgggaaaacaaagataaagagggtatttgtttcattgatgctccaacttgtccgccagatcctcaagttgatttaacaacgggcattcatgagcaatcatttgtcagatcagtgcaacgagaattgcactttgaatataacacctaacacagcttcaggattggaatacaagttctcaggaaaatgctatgagcgggtaaaaaagggcgctcgcccaaggaatgtctggcttagaatctcgaccaaataataaccaaaggtagatctagtagagctacggatgaaggatgcttaactttcatgcaataagctttcagccatcgccttggcattgtccaagttcaagtcgaaactaacctaacctggttacggaagcgtgtgattgtgtatttcccacggtgtaaattaaggactatccaactgataacatactgtccagctacgaggaaaataagattatgttggagcaatttctggtgatggttttaccctgatgtgtcatattattatcagttctgtcgccatactgttcattggctcctttgttcatggtgaatcttct

SEQ ID NO: 221854 - DNA, 4188 bp, Zea Mays
aaccttctctcctcttctcgttctccccctctatagtcctccgccgcctccattgccttctcttgggctcctccccgtatcccgggactactagtccaacctcccaattctgcggcactcaccattcgacaagcactgaaccctaccccacccaccagtccccgcagccgcgctccgcaatggcgagcggggcggctagaaagcgccgccgcaagtcgtcgccccctgccgccgccgcggctgcacgggacgggaggaagctcctcgtcggcgaagtcgtcgaggtgctgagttgtgatcaaggactacgtggctcctggcataaggctattgttattggtattctggaaaatgctcgcgcagtcagatatactgatttcattgatgaaaatgggtcacctcttgttgagaatgttcaagtgtcagatgccattgatggtaagtcaagtatgcctgaggaactcattcgtggcaacattaggccaatgtgtccacatcaagcactgcaggtgtctcatgcaagctatggactttgtgttgacgcactcatagaaagttcctactgggaaggtgttattgctgatcatgctgaaggctctatggaaaggaaagtccttttccctgatgaaggtgatgaatgcattatagaagttgatcagctacgtcttactcaagactgggatgaagctacaggggaatggaaaccacgtggaatctggtcatttctgcagatacttttgtcacatgaagagagagatggtttacctgtgtcaatcaggcagatatggtttgacttaagatccaaaccttcttttaagactgatgccaaaatgtggatgtgtggaacagaagatttttgggagagatcacttgcagatgtcattgctgaattgtggtctctatgtgacaagcctaccctagatggatatcaagtggaagcagttcagaaggatacagttgagaccactgtcttggataggctggatccattccaagcattatcagaatacatctcatgctatcggaataataggaaaaatgctcttatcaaaaaagagtgggcaaagcaacaccttaaatcttcaggatggacctttctggatgacagacctaagaacaagttttacatctcacctgatggtaagcggtttccatcttttctaggagcatgccaggcgtgtttggctgcaaaagaagcaaatggttaccaatatgatcatacagaaaatttgcatctagacagtatgagtctggtgcacaagaatgcatgctacaaccagacacacatggatcttgccttggtaaagaacaagtccaatgataaatggatcacgagcccatcaagatcttgggaattggttcaactggatgctgaattttccccacagatagtttcccttcttgctagttatcaagatggcacaactgtccttcagaggacaattgatagaactctgagtgtgaagctgaagaagcatctattggcactgggttggagtattaagttcaaaaaggacgaaattcaagaaaatggccatcataaacacactacaagataccggtacgagtcaccttatgggaagacttatgtttctatcattcaggtaatatgcagtttgatagttggaggcgttaaacaagatgacaggcccagctatcggacagcagcaaaaggtgctcatttgacagtgtcaactggcctggcaaggctcaataaacgtaaacgaagggataaaactgatgctcttgaaaaatacatagactatatgaaaactgataagcaaaattccaggaggaggaaactgttgagatcaaatgctcagaagtttctcaaatctgctgggtggaatttttggttaaagaaaaagtctagaaacaaattggagttgaggtatggtgctccacatggcaagtcttacagctctttagtggcagcatgtaaaggttacttggaaaatggatatcaggaggacagtgatgcagacattaaaatcgccaaccatggttctgctgatggttctatgcgtccatcaaaattgatagcactcagcggtggattaaaggattcaagtaaaatacaggatctttccctgtcggcatcacgtgaagacagttttgtctttgttggtagagaaaaatattgtggtaccaagggataaggttacatataagcgaagtgatggacctggtataaaggaaggttccatcagcagagatggaataaaatgcatgtgttgtaatgaattattcactgtggagaattttgaggttcatgctgggagcagtacaccattaccttcggctcatatgtttttaaaggatggaaggtccctatcacagtgtttagttgaattcatgggtggaaacaagcccagagatccactgcatgtgcgcttgaaggggagtagttctgatctggaaagtgattcgatatgctctgtgtgccatgatggtggggatttattactttgtgacaattgcccatcatcttatcattatgattgtgtcggcttggaggtagaggccattccagaaggaagctggtattgtccatcctgcagatgcggtatttgtaacttgagtgattatgatcctgatatcagccaattcactgagaagaccatagtgtactgtgatcagtgtgaacgggaatatcatgtcggttgcactagaaatagtgaccatcagcttatctgccgaccagaaggttgttggttttgcagcaggggatgctcaaatgtatttcaacatttgcaagaagtcattgggaaacaagttccaactccaatcgaaggcttatcttgcactatcttgaaattttgtagagcgaacggcagtgaccatggcgattatgatgatgagataatggcagagcattatggcaagttgtgcattgcagttgatattcttcatgaatgctttgttactattatcgagcctcgcacacagagtgatatttctgaggatattgtcttcaatagagaatcagaactcagacgactaaattttaggggattctacataatacttctccagaaaggtggtgaactagtatctgtcggcacttttaggatttgcggccagaagtttgctgagctgcctctgatcggtacaagatctctataccgtcgtcaaggaatgtgtcgacttctaattaatgaactggaaaagttgcttttagacttgggggtggaaagacttctattaccggcagttcctgaacttttgcaaacatggacatgctcatttggtttcacagttatgtcaaattctgagaggcttgagttggcagggaatagcattctcagtttccagggaaccaccatgtgtcagaagattttaaatgttgcacacaacatttcacaagatagaagtattccatcaatgtccaattctgagagaatggggttagcagagaacatggtggtgaagaaggcatttattccattgacagtggagccagaccatcatgttgatttgattgtggagcctgagctagtaatgaaaattgagaataacagcagtgaggagggtatttcttcaattgatccgctgactagtatgccagaccctcaagttggtttggcagtggggccagagatggtaccggtaagtcgggaaaacaaagataaagagggtatttgtttcattgatgctccaacttgtccgccagatcctcaagttgatttaacaacgggcattcatgagcaatcatttgtcagtgctggtgcagatcagtgcaacgagaattgcactttgaatataacacctaacacagcttcaggattggaatacaagttctcaggaaaatgctatgagcgggtaaaaaagggcgctcgcccaaggaatgtctggcttagaatctcgaccaaataataaccaaaggtagatctagtagagctacggatgaaggatgcttaactttcatgcaataagctttcagccatcgccttggcattgtccaagttcaagtcgaaactaacctaacctggttacggaagcgtgtgattgtgtatttcccacggtgtaaattaaggactatccaactgataacatactgtccagctacgaggaaaataagattatgttggagcaatttctggtgatggttttaccctgatgtgtcatattattatcagttctgtcgccatactgttcattggctcctttgttcatggtgaatcttct

SEQ ID NO: 221855 - DNA, 4380 bp, Zea Mays
cttctctcctcttctcgttctccccctctatagtcctccgccgcctccattgccttctcttgggctcctccccgtatcccgggactactagtccaacctcccaattctgcggcactcaccattcgacaagcactgaaccctaccccacccaccagtccccgcagccgcgctccgcaatggcgagcggggcggctagaaagcgccgccgcaagtcgtcgccccctgccgccgccgcggctgcacgggacgggaggaagctcctcgtcggcgaagtcgtcgaggtgagcgccatccgcgccgtcgtttgcgatgaggtccaccgcattgcggctaagggcgatggtccgcgggtgatgggcagggtgctgagttgtgatcaaggactacgtggctcctggcataaggctattgttattggtattctggaaaatgctcgcgcagtcagatatactgatttcattgatgaaaatgggtcacctcttgttgagaatgttcaagtgtcagatgccattgatggtaagtcaagtatgcctgaggaactcattcgtggcaacattaggccaatgtgtccacatcaagcactgcaggtgtctcatgcaagctatggactttgtgttgacgcactcatagaaagttcctactgggaaggtgttattgctgatcatgctgaaggctctatggaaaggaaagtccttttccctgatgaaggtgatgaatgcattatagaagttgatcagctacgtcttactcaagactgggatgaagctacaggggaatggaaaccacgtggaatctggtcatttctgcagatacttttgtcacatgaagagagagatggtttacctgtgtcaatcaggcagatatggtttgacttaagatccaaaccttcttttaagactgatgccaaaatgtggatgtgtggaacagaagatttttgggagagatcacttgcagatgtcattgctgaattgtggtctctatgtgacaagcctaccctagatggatatcaagtggaagcagttcagaaggatacagttgagaccactgtcttggataggctggatccattccaagcattatcagaatacatctcatgctatcggaataataggaaaaatgctcttatcaaaaaagagtgggcaaagcaacaccttaaatcttcaggatggacctttctggatgacagacctaagaacaagttttacatctcacctgatggtaagcggtttccatcttttctaggagcatgccaggcgtgtttggctgcaaaagaagcaaatggttaccaatatgatcatacagaaaatttgcatctagacagtatgagtctggtgcacaagaatgcatgctacaaccagacacacatggatcttgccttggtaaagaacaagtccaatgataaatggatcacgagcccatcaagatcttgggaattggttcaactggatgctgaattttccccacagatagtttcccttcttgctagttatcaagatggcacaactgtccttcagaggacaattgatagaactctgagtgtgaagctgaagaagcatctattggcactgggttggagtattaagttcaaaaaggacgaaattcaagaaaatggccatcataaacacactacaagataccggtacgagtcaccttatgggaagacttatgtttctatcattcaggtaatatgcagtttgatagttggaggcgttaaacaagatgacaggcccagctatcggacagcagcaaaaggtgctcatttgacagtgtcaactggcctggcaaggctcaataaacgtaaacgaagggataaaactgatgctcttgaaaaatacatagactatatgaaaactgataagcaaaattccaggaggaggaaactgttgagatcaaatgctcagaagtttctcaaatctgctgggtggaatttttggttaaagaaaaagtctagaaacaaattggagttgaggtatggtgctccacatggcaagtcttacagctctttagtggcagcatgtaaaggttacttggaaaatggatatcaggaggacagtgatgcagacattaaaatcgccaaccatggttctgctgatggttctatgcgtccatcaaaattgatagcactcagcggtggattaaaggattcaagtaaaatacagggtatgcctgttgtagacagatgtagcaacatgtttaccttgtctgcacatcatggaaaatgtaggaaaagaaaaccatcttcagtttctttgaacagtgcacgagttctttgttcacatggacagatctttccctgtcggcatcacgtgaagacagttttgtctttgttggtagagaaaaatattgtggtaccaagggataaggttacatataagcgaagtgatggacctggtataaaggaaggttccatcagcagagatggaataaaatgcatgtgttgtaatgaattattcactgtggagaattttgaggttcatgctgggagcagtacaccattaccttcggctcatatgtttttaaaggatggaaggtccctatcacagtgtttagttgaattcatgggtggaaacaagcccagagatccactgcatgtgcgcttgaaggggagtagttctgatctggaaagtgattcgatatgctctgtgtgccatgatggtggggatttattactttgtgacaattgcccatcatcttatcattatgattgtgtcggcttggaggtagaggccattccagaaggaagctggtattgtccatcctgcagatgcggtatttgtaacttgagtgattatgatcctgatatcagccaattcactgagaagaccatagtgtactgtgatcagtgtgaacgggaatatcatgtcggttgcactagaaatagtgaccatcagcttatctgccgaccagaaggttgttggttttgcagcaggggatgctcaaatgtatttcaacatttgcaagaagtcattgggaaacaagttccaactccaatcgaaggcttatcttgcactatcttgaaattttgtagagcgaacggcagtgaccatggcgattatgatgatgagataatggcagagcattatggcaagttgtgcattgcagttgatattcttcatgaatgctttgttactattatcgagcctcgcacacagagtgatatttctgaggatattgtcttcaatagagaatcagaactcagacgactaaattttaggggattctacataatacttctccagaaaggtggtgaactagtatctgtcggcacttttaggatttgcggccagaagtttgctgagctgcctctgatcggtacaagatctctataccgtcgtcaaggaatgtgtcgacttctaattaatgaactggaaaagttgcttttagacttgggggtggaaagacttctattaccggcagttcctgaacttttgcaaacatggacatgctcatttggtttcacagttatgtcaaattctgagaggcttgagttggcagggaatagcattctcagtttccagggaaccaccatgtgtcagaagattttaaatgttgcacacaacatttcacaagatagaagtattccatcaatgtccaattctgagagaatggggttagcagagaacatggtggtgaagaaggcatttattccattgacagtggagccagaccatcatgttgatttgattgtggagcctgagctagtaatgaaaattgagaataacagcagtgaggagggtatttcttcaattgatccgctgactagtatgccagaccctcaagttggtttggcagtggggccagagatggtaccggtaagtcgggaaaacaaagataaagagggtatttgtttcattgatgctccaacttgtccgccagatcctcaagttgatttaacaacgggcattcatgagcaatcatttgtcagatcagtgcaacgagaattgcactttgaatataacacctaacacagcttcaggattggaatacaagttctcaggaaaatgctatgagcgggtaaaaaagggcgctcgcccaaggaatgtctggcttagaatctcgaccaaataataaccaaaggtagatctagtagagctacggatgaaggatgcttaactttcatgcaataagctttcagccatcgccttggcattgtccaagttcaagtcgaaactaacctaacctggttacggaagcgtgtgattgtgtatttcccacggtgtaaattaaggactatccaactgataacatactgtccagctacgaggaaaataagattatgttggagcaatttctggtgatggttttaccctgatgtgtcatattattatcagttctgtcgccatactgttcattggctcctttgttcatggtgaatcttct

SEQ ID NO: 221856 - DNA, 3180 bp, Zea Mays
ctgaacggtcccaaaacccacaccgccacacggccacgcccagttctcccctctctcgctgcgcatcgacgacggcgagggcgccatgatcgtgcgcacgtacaggcgtagatcccgttccatctccgaaggcgggggcggggtctcgtcctcgcaggaggcgttcgacttcgatgccgacgtcgacgtgctgggatcgtcggcctcgcagccgctcccgccatcgcaggaatcctcctcgatgtgggatttcgacgaggacccgcctccgtccccgccgcggcccgggaaggaggggaggcgaagcgggcggggcggagccagaagaggaggagggttggagctcgcggaagctcccgcgatggcgccgacggtgacgctgatggaggcggaggagtacggagagatgatggagagcgtggacgacgtcacgttcgcgctcgacgggctccgccccgccgcgcagaagcggacgcggcgggccagcctgctcgcgctgctcgggatctgcgactccgccgagcgccgccgcgtgcttcggtcccaaggattggtacagcaaattatcgatgctattttggttctggacattgatgatcctccctgcgctattgctgcaggagctcttttatttgttttggcaagtgatgtccaagacaataatttgctgtcttcagaaacttgtgtccatttcctcctcaaattattaaaccctccggtgaatgttgttgatgccaaagcaccatcaataggttccaaacttcttggaatcagtaaatttcagatgcttaacggttccaataaggatgtggactcttgttcagaggacatacttttaaaagttgaagaaatcctcttaagctgcaaagagatcaaaccagcagacagggattataagagaacaacaaggccggaactatgttcaaagtggcttgctttgttgacaatggaaaaggcgtgcttgtctgctgttgcattagaggatacatctgacatggtcttagaactcggaggaaatttcaaagaaacattaaggcagttgggtggccttgatgatatttttaatgtcatggtgaattgccattcagaattggagacccatttgctcagcatgagtcgaaaattgagccctaaatgccgctcactttcttttgttggtgtcattctcaacattgttgagttactatcagctctctctctccttcagaaaccttccactgtttcaagaaaagcagatccaaaaaatactaaagtttgcaacggggcctgctctgacagtagaggtttgagcttattgaatcatcattgcaagtgcaataactcaaagaaaaagagcattttactgaaccgaaggtgccagtattgttcatccaccaaatcagaagcttctcatgttaccctctcttctagtagtgatgtcagtcagtcagaaaggatactcaattgctcatctttttcaagcaatgggacatcaagtggttcatttggagtgaaacatattaatggtgctagtttgaagctcaatgtaagaatggatcgttctaaagcttatccagtcagaggctcaactggttggatttctatgaaagcacaaacttctgattggaactccagagaaatggcaaaaaagcggcgcctatctgaaaatgtacgcactgatttgagtaatggtggtgatgatccatttgcatttgatgatattgatcaagaaccttcaaattgggatctatttggtccaaaaaggaaatcaccacagaagcgagcgaaaagaactaatggagaagtgttggatgattgtggaactgcattaatgggaagtcctaaattatgtcaacctgaagatatttatcagtcagttgcaacttctggttctaaggttgtagatgagtccaatcttttggaggattgccttttggcgtcagttaaggttcttatgaacttggcaaatgacaacccgtctggttgcgaacagatcgcgtcatgtggcggacttaataacatggcctccttgatcattaaacatttcccctcatttgatttctccatgaacagtaacaatcaaatgaatgaaagtgtgtcctctggtgatccgttgtcttcccagaacagcaagtcaccccaaatcaaaactaagcagttgcgggactatgaacttgattttctagttgccatattgggattgcttgtgaaccttgtggagaaggatagccttaatagggtacgacttgcgaatgctcgtgtttctgttaatctatctcaaaatccagatagcaaagaggtacagagggatgtcatacccctgctctgttcaatattcttagcgagtcaaggtaccggggaaactgctgaagctatatcaccggatgatgaagaatctctgttgcaaggagaacgcgaagctgaaatgatgattgtggaggcctatgcagctcttgtgctcgcctttctttcaacggaaagtatgaaggttcgaggagccatttctagttgccttccggacaacaacttgaaagttcttgtaccagtgctagagaaatttgtgtcatttcatctgcagctcaacatgatgacaagggaaacgcattcagctgtgactgaagtcatcgaaagatgtcggctatcatagaagtgggaagaggcgccctgtacagattagctgacctctttgcagccgaagcacacacaggtgttgctcatcacctggccagggcgcaacaaatggatgccagaggctggcctgcagtgggctttgggagctaacagtgattttattctttcttttgtccctagtttcttgttctccgcatcccccgaaatcacatgtttcattgtcgtaggaatagtccgtattatgaatgtacaataacaacataggccgtagggggaatgtagttgtgctgtttcagttcctgggctgtctgcctttcaggttgtatgctcgtgtcacatggaatcagtgaccgcatgcctaaatctgagttaagattgtatatcacataatagccgtgcaattcaactatgtagccctatgtacagaggcgccatatattgaagcatcttctggttgcaaaaaacatgaatgttgtataaatagtgtaactgaaggtatacaaatcttccaggcagttccttggtgctatataatgcacggcttagtggcgtagctaggatttttctcat

SEQ ID NO: 221857 - DNA, 3517 bp, Zea Mays
ctgagcctgcagcccagctgcccgttccaactcctttccaaatccgccgcaacgcgaagcaaacgacgcctgaacggtcccaaaacccacaccgccacacggccacgcccagttctcccctctctcgctgcgcatcgacgacggcgagggcgccatgatcgtgcgcacgtacaggcgtagatcccgttccatctccgaaggcgggggcggggtctcgtcctcgcaggaggcgttcgacttcgatgccgacgtcgacgtgctgggatcgtcggcctcgcagccgctcccgccatcgcaggaatcctcctcgatgtgggatttcgacgaggacccgcctccgtccccgccgcggcccgggaaggaggggaggcgaagcgggcggggcggagccagaagaggaggagggttggagctcgcggaagctcccgcgatggcgccgacggtgacgctgatggaggcggaggagtacggagagatgatggagagcgtggacgacgtcacgttcgcgctcgacgggctccgccccgccgcgcagaagcggacgcggcgggccagcctgctcgcgctgctcgggatctgcgactccgccgagcgccgccgcgtgcttcggtcccaaggattggtacagcaaattatcgatgctattttggttctggacattgatgatcctccctgcgctattgctgcaggagctcttttatttgttttggcaagtgatgtccaagacaataatttgctgtcttcagaaacttgtgtccatttcctcctcaaattattaaaccctccggtgaatgttgttgatgccaaagcaccatcaataggttccaaacttcttggaatcagtaaatttcagatgcttaacggttccaataaggatgtggactcttgttcagaggacatacttttaaaagttgaagaaatcctcttaagctgcaaagagatcaaaccagcagacagggattataagagaacaacaaggccggaactatgttcaaagtggcttgctttgttgacaatggaaaaggcgtgcttgtctgctgttgcattagaggatacatctgacatggtcttagaactcggaggaaatttcaaagaaacattaaggcagttgggtggccttgatgatatttttaatgtcatggtgaattgccattcagaattggagaaacttgtaaaggatgcctccactacggttgtggagggaaaagaaggtgctcctctacaaagcaccacactcctcttgaaatgtttgaaaattttggagaatgccacatttctaagtgacaacaacaagacccatttgctcagcatgagtcgaaaattgagccctaaatgccgctcactttcttttgttggtgtcattctcaacattgttgagttactatcagctctctctctccttcagaaaccttccactgtttcaagaaaagcagatccaaaaaatactaaagtttgcaacggggcctgctctgacagtagaggtttgagcttattgaatcatcattgcaagtgcaataactcaaagaaaaagagcattttactgaaccgaaggtgccagtattgttcatccaccaaatcagaagcttctcatgttaccctctcttctagtagtgatgtcagtcagtcagaaaggatactcaattgctcatctttttcaagcaatgggacatcaagtggttcatttggagtgaaacatattaatggtgctagtttgaagctcaatgtaagaatggatcgttctaaagcttatccagtcagaggctcaactggttggatttctatgaaagcacaaacttctgattggaactccagagaaatggcaaaaaagcggcgcctatctgaaaatgtacgcactgatttgagtaatggtggtgatgatccatttgcatttgatgatattgatcaagaaccttcaaattgggatctatttggtccaaaaaggaaatcaccacagaagcgagcgaaaagaactaatggagaagtgttggatgattgtggaactgcattaatgggaagtcctaaattatgtcaacctgaagatatttatcagtcagttgcaacttctggttctaaggttgtagatgagtccaatcttttggaggattgccttttggcgtcagttaaggattatgcttgagcagtgggtgagctttatgcaaaattaaaactctacaagttttaaacttacttgctacttctactttgctaatcattgtgaaagttttgatcagctagctttaccaaacaaacatcttttgcagcaggttcttatgaacttggcaaatgacaacccgtctggttgcgaacagatcgcgtcatgtggcggacttaataacatggcctccttgatcattaaacatttcccctcatttgatttctccatgaacagtaacaatcaaatgaatgaaagtgtgtcctctggtgatccgttgtcttcccagaacagcaagtcaccccaaatcaaaactaagcagttgcgggactatgaacttgattttctagttgccatattgggattgcttgtgaaccttgtggagaaggatagccttaatagggtacgacttgcgaatgctcgtgtttctgttaatctatctcaaaatccagatagcaaagaggtacagagggatgtcatacccctgctctgttcaatattcttagcgagtcaaggtaccggggaaactgctgaagctatatcaccggatgatgaagaatctctgttgcaaggagaacgcgaagctgaaatgatgattgtggaggcctatgcagctcttgtgctcgcctttctttcaacggaaagtatgaaggttcgaggagccatttctagttgccttccggacaacaacttgaaagttcttgtaccagtgctagagaaatttgtgtcatttcatctgcagctcaacatgatgacaagggaaacgcattcagctgtgactgaagtcatcgaaagatgtcggctatcatagaagtgggaagaggcgccctgtacagattagctgacctctttgcagccgaagcacacacaggtgttgctcatcacctggccagggcgcaacaaatggatgccagaggctggcctgcagtgggctttgggagctaacagtgattttattctttcttttgtccctagtttcttgttctccgcatcccccgaaatcacatgtttcattgtcgtaggaatagtccgtattatgaatgtacaataacaacataggccgtagggggaatgtagttgtgctgtttcagttcctgggctgtctgcctttcaggttgtatgctcgtgtcacatggaatcagtgaccgcatgcctaaatctgagttaagattgtatatcacataatagccgtgcaattcaactatgtagccctatgtacagaggcgccatatattgaagcatcttctggttgcaaaaaacatgaatgttgtataaatagtgtaactgaaggtatacaaatcttccaggcagttccttggtgctatataatgcacggcttagtggcgtagctaggatttttctcat

SEQ ID NO: 221858 - DNA, 2591 bp, Zea Mays
ctcagctgagcctgcagcccagctgcccgttccaactcctttccaaatccgccgcaacgcgaagcaaacgacgcctgaacggtcccaaaacccacaccgccacacggccacgcccagttctcccctctctcgctgcgcatcgacgacggcgagggcgccatgatcgtgcgcacgtacaggcgtagatcccgttccatctccgaaggcgggggcggggtctcgtcctcgcaggaggcgttcgacttcgatgccgacgtcgacgtgctgggatcgtcggcctcgcagccgctcccgccatcgcaggaatcctcctcgatgtgggatttcgacgaggacccgcctccgtccccgccgcggcccgggaaggaggggaggcgaagcgggcggggcggagccagaagaggaggagggttggagctcgcggaagctcccgcgatggcgccgacggtgacgctgatggaggcggaggagtacggagagatgatggagagcgtggacgacgtcacgttcgcgctcgacgggctccgccccgccgcgcagaagcggacgcggcgggccagcctgctcgcgctgctcgggatctgcgactccgccgagcgccgccgcgtgcttcggtcccaaggattggtacagcaaattatcgatgctattttggttctggacattgatgatcctccctgcgctattgctgcaggagctcttttatttgttttggcaagtgatgtccaagacaataatttgctgtcttcagaaacttgtgtccatttcctcctcaaattattaaaccctccggtgaatgttgttgatgccaaagcaccatcaataggttccaaacttcttggaatcagtaaatttcagatgcttaacggttccaataaggatgtggactcttgttcagaggacatacttttaaaagttgaagaaatcctcttaagctgcaaagagatcaaaccagcagacagggattataagagaacaacaaggccggaactatgttcaaagtggcttgctttgttgacaatggaaaaggcgtgcttgtctgctgttgcattagaggatacatctgacatggtcttagaactcggaggaaatttcaaagaaacattaaggcagttgggtggccttgatgatatttttaatgtcatggtgaattgccattcagaattggagaaacttgtaaaggatgcctccactacggttgtggagggaaaagaaggtgctcctctacaaagcaccacactcctcttgaaatgtttgaaaattttggagaatgccacatttctaagtgacaacaacaagacccatttgctcagcatgagtcgaaaattgagccctaaatgccgctcactttcttttgttggtgtcattctcaacattgttgagttactatcagctctctctctccttcagaaaccttccactgtttcaagaaaagcagatccaaaaaatactaaagtttgcaacggggcctgctctgcagacagtagaggtttgagcttattgaatcatcattgcaagtgcaataactcaaagaaaaagagcattttactgaaccgaaggtgccagtattgttcatccaccaaatcagaagcttctcatgttaccctctcttctagtagtgatgtcagtcagtcagaaaggatactcaattgctcatctttttcaagcaatgggacatcaagtggttcatttggagtgaaacatattaatggtgctagtttgaagctcaatgtaagaatggatcgttctaaagcttatccagtcagaggctcaactggttggatttctatgaaagcacaaacttctgattggaactccagagaaatggcaaaaaagcggcgcctatctgaaaatgtacgcactgatttgagtaatggtggtgatgatccatttgcatttgatgatattgatcaagaaccttcaaattgggatctatttggtccaaaaaggaaatcaccacagaagcgagcgaaaagaactaatggagaagtgttggatgattgtggaactgcattaatgggaagtcctaaattatgtcaacctgaagatatttatcagtcagttgcaacttctggttctaaggttgtagatgagtccaatcttttggaggattgccttttggcgtcagttaaggttcttatgaacttggcaaatgacaacccgtctggttgcgaacagatcgcgtcatgtggcggacttaataacatggcctccttgatcattaaacatttcccctcatttgatttctccatgaacagtaacaatcaaatgaatgaaagtgtgtcctctggtgatccgttgtcttcccagaacagcaagtcaccccaaatcaaaactaagcagttgcgggactatgaacttgattttctagttgccatattgggattgcttgtgaaccttgtggagaaggatagccttaatagggtacgacttgcgaatgctcgtgtttctgttaatctatctcaaaatccagatagcaaagaggtacagagggatgtcatacccctgctctgttcaatattcttagcgagtcaaggtaccggggaaactgctgaagctatatcaccggtatgagatcggtccaaagaaat

SEQ ID NO: 221859 - DNA, 2588 bp, Zea Mays
ctcagctgagcctgcagcccagctgcccgttccaactcctttccaaatccgccgcaacgcgaagcaaacgacgcctgaacggtcccaaaacccacaccgccacacggccacgcccagttctcccctctctcgctgcgcatcgacgacggcgagggcgccatgatcgtgcgcacgtacaggcgtagatcccgttccatctccgaaggcgggggcggggtctcgtcctcgcaggaggcgttcgacttcgatgccgacgtcgacgtgctgggatcgtcggcctcgcagccgctcccgccatcgcaggaatcctcctcgatgtgggatttcgacgaggacccgcctccgtccccgccgcggcccgggaaggaggggaggcgaagcgggcggggcggagccagaagaggaggagggttggagctcgcggaagctcccgcgatggcgccgacggtgacgctgatggaggcggaggagtacggagagatgatggagagcgtggacgacgtcacgttcgcgctcgacgggctccgccccgccgcgcagaagcggacgcggcgggccagcctgctcgcgctgctcgggatctgcgactccgccgagcgccgccgcgtgcttcggtcccaaggattggtacagcaaattatcgatgctattttggttctggacattgatgatcctccctgcgctattgctgcaggagctcttttatttgttttggcaagtgatgtccaagacaataatttgctgtcttcagaaacttgtgtccatttcctcctcaaattattaaaccctccggtgaatgttgttgatgccaaagcaccatcaataggttccaaacttcttggaatcagtaaatttcagatgcttaacggttccaataaggatgtggactcttgttcagaggacatacttttaaaagttgaagaaatcctcttaagctgcaaagagatcaaaccagcagacagggattataagagaacaacaaggccggaactatgttcaaagtggcttgctttgttgacaatggaaaaggcgtgcttgtctgctgttgcattagaggatacatctgacatggtcttagaactcggaggaaatttcaaagaaacattaaggcagttgggtggccttgatgatatttttaatgtcatggtgaattgccattcagaattggagaaacttgtaaaggatgcctccactacggttgtggagggaaaagaaggtgctcctctacaaagcaccacactcctcttgaaatgtttgaaaattttggagaatgccacatttctaagtgacaacaacaagacccatttgctcagcatgagtcgaaaattgagccctaaatgccgctcactttcttttgttggtgtcattctcaacattgttgagttactatcagctctctctctccttcagaaaccttccactgtttcaagaaaagcagatccaaaaaatactaaagtttgcaacggggcctgctctgacagtagaggtttgagcttattgaatcatcattgcaagtgcaataactcaaagaaaaagagcattttactgaaccgaaggtgccagtattgttcatccaccaaatcagaagcttctcatgttaccctctcttctagtagtgatgtcagtcagtcagaaaggatactcaattgctcatctttttcaagcaatgggacatcaagtggttcatttggagtgaaacatattaatggtgctagtttgaagctcaatgtaagaatggatcgttctaaagcttatccagtcagaggctcaactggttggatttctatgaaagcacaaacttctgattggaactccagagaaatggcaaaaaagcggcgcctatctgaaaatgtacgcactgatttgagtaatggtggtgatgatccatttgcatttgatgatattgatcaagaaccttcaaattgggatctatttggtccaaaaaggaaatcaccacagaagcgagcgaaaagaactaatggagaagtgttggatgattgtggaactgcattaatgggaagtcctaaattatgtcaacctgaagatatttatcagtcagttgcaacttctggttctaaggttgtagatgagtccaatcttttggaggattgccttttggcgtcagttaaggttcttatgaacttggcaaatgacaacccgtctggttgcgaacagatcgcgtcatgtggcggacttaataacatggcctccttgatcattaaacatttcccctcatttgatttctccatgaacagtaacaatcaaatgaatgaaagtgtgtcctctggtgatccgttgtcttcccagaacagcaagtcaccccaaatcaaaactaagcagttgcgggactatgaacttgattttctagttgccatattgggattgcttgtgaaccttgtggagaaggatagccttaatagggtacgacttgcgaatgctcgtgtttctgttaatctatctcaaaatccagatagcaaagaggtacagagggatgtcatacccctgctctgttcaatattcttagcgagtcaaggtaccggggaaactgctgaagctatatcaccggtatgagatcggtccaaagaaat

SEQ ID NO: 221860 - DNA, 688 bp, Zea Mays
gtatatatagctgattcctacaaccataagataaaaaagttagatcccgtcacaagaaaagttacaactattgctggaacggggagtgcaggatacagggatggtccaggcttgacagctcaactttctgaaccagcaggacttgttgaagttggagatggtttactactgtaaagaagatgaagtttgtctctaccaatcgattgcttttgatgtcaaattccgtgaagaggcggaaccgaacccagcacaaattacgctatcctatactgtttcgccaagagataattcaggtagcacacaactactggctgctagaaagaatgccaaggtgtagtcagactcacggtgatttttttacttgcatcattgtattgattgtcaatttggccccaggcccacaatggcaagtgtttcaagattgacttctcctgtatgttgtatagcgacatgttgcttgtaacccagcttcattgtctcccctcagcacaacagtattaatggagtagtttattgtcagttcattggttgcttggaacaccgtatggagtccatttgttggaaccctgttaaccctaatgattgatgaatcgaacaattttattccaaacaaagagttgtggtgctttgcaaaacactgcctgcttgcctatctgcagcacaaaatctcttgacagtataacctttt

SEQ ID NO: 221861 - DNA, 1086 bp, Zea Mays
ataggtccttgtactgattacagccattatataaaaaagttagatcccgtcacaagaaaagttacaactattgctggaacggggagtgcaggatacagggatggtccaggcttgacagctcaactttctgaaccagcaggacttgttgaagttggagatggaaggcttcttgtagcagatacaaacaacaacacaatcagatatataactcttagtgacaaaggtgctgaggtgaagacactagagttgatcggagtacaaccgccatcaccaaaaccgaaggtgttgaaacgcctaagacggcgattatcggcagatacagatgttattaatgtcgatggtggttcttcaaaggaaggattcttgtctcttgcagttacagtacctgatggttaccatttctccaaggaagcccgcagtaaatttgatgtggaaacagagccgcctaatgcagttgagattgaaccagcgaacggttttctaaactcggaagggctggcatcactgaagttcagaaggatatcatcatccttgtcaatgggaaggataaactgcaaggtttactactgtaaagaagatgaagtttgtctctaccaatcgattgcttttgatgtcaaattccgtgaagaggcggaaccgaacccagcacaaattacgctatcctatactgtttcgccaagagataattcaggtagcacacaactactggctgctagaaagaatgccaaggtgtagtcagactcacggtgatttttttacttgcatcattgtattgattgtcaatttggccccaggcccacaatggcaagtgtttcaagattgacttctcctgtatgttgtatagcgacatgttgcttgtaacccagcttcattgtctcccctcagcacaacagtattaatggagtagtttattgtcagttcattggttgcttggaacaccgtatggagtccatttgttggaaccctgttaaccctaatgattgatgaatcgaacaattttattccaaacaaagagttgtggtgctttgcaaaacactgcctgcttgcctatctgcagcacaaaatctcttgacagtataacctttt

SEQ ID NO: 221862 - DNA, 874 bp, Zea Mays
atggaccgcaagccgccggagcgcttcaggcgtaggctgatcatgaaggatgggaaatttccatacgtggatgtgatccatgcgagcagcatctcggccacgacggctcggtcgccgcgtcaacctcccgcgtccgatcccgtgagaagcacagggaccacaagccgctggagcgcttcaggtgcagggtttggacgcgactggaagaagatcgaggagcatgtcggcaccaagacgacggtccaggtccagaagcttgggctggctgctgggctgccgccgatgtacccgaggcgccacttcgccatgcagcagcagcaacagagctcggtggccggtggtagcagtgcggtcgccatgccgctgctgcacggccggcaacctacttgcgcgccggtcgccatgccaggtctggccaagcccgacgctgtcgcccatcacggttccatcggatggagcagccccagtgtggtcgtccctgcggccaacagcggcggcggcggcaaggatgcaaggcttggacttggagtgggtggcaggcgcttcggttctaggggcaaatatttggttttacacatgcaggtggatgtgttctcttttgggatagttttatggaagatcttgactggtgaggaaccgtatgcaaatatgcattgtggtgctatcatagatcatgtttccttcaacactacaatgaactacgtcgaggagaattgtgctccaacagtttatacaccagaattaagatacgtgtgcattgctggaaggtacattcaaggtgctcctcttctggggaactctacagctgcttctgatgagatcctcgcagttgacactccttcagaaggaggcgatgctgttattgtcagtagca

SEQ ID NO: 221863 - DNA, 1762 bp, Zea Mays
ggcgccctcccccatgcgcgaaacaatcctccgcctccgtcgcctattcgcctctcccactctctgcccccgcctcccctccttctctccctcccccgcatgcctcaactgctcctctccggcgtcgtagccgtccctctcgctcccgtgacatccagatctgacttgggggcgcagctcagagtgccaatgcgccgcaacctccgttgcgcccgcacgtgccctagccagtcgccatggagctcatccccatcaagcccgaggtaggatctctcgtcgagattggataggagctccgaacgcgagccatagacggggagttgatgccaccgggcaatggatggtcgcatcctcaggacctccgcgtgcaacagcagcggtaagaactcgtccccttcctctccggtggcagtctcacgatcttcctctgccgccattgaactttaaaaatgagaaccaaaagcacacggtttctggcctccctattaggggattccacggagggactcctctcaggaaaaaaccaagtggtatgtgccttgcttgcatttcattttgtcccattttcaaaattgaaatgaacaaactgagctttttgtcatctaaaatttgtcttgtcttgtttttttcactaaaatttagacgcggtttggtgctcagctctgaagctttttgtcatcaataatatcttcctcgccctcgcaatatgttctggtctagattgtggccattccttgcagcaaactaagactaattactttttccttctttacacgtgacctttcaagaacacttaaatctgttttggacacttaaatcagttgtgtggttacctaactgctactgttcttactttgattttttggttgctcatggagtcatggtgcatatgctcatgttttcaggctatcatttttctcatcgcctacttcaatagcctacagcattagcagtaccgtgctttttacttcacaagaaaaggttggccgaggtccctgctctagcgcaaggatttctactgcaacgattgcaacacacacaggaacttttttgaaaccttcaagcttcaacgcttgaccctttgcattggtggcatagtgaatattgaactactggagagaatacaaaaacaatttacggatgataggtactacatatggcagatgaggcaactggccatggcatatatgttgcttcgacctgtgcagtttatggatgaagacgaagctgacctgcagatgtaaactttgttttctatggaccaggtcttgtatatccaaattgaacggattgttctaataaatatatcacaaaaagataaagtataatatttgttcttgtgcgttgttgcaatgaattttagtgagaatagagacaagtggtgttgtgtaatggcacttgtaaagagagacagtacacctagggttggtccattgatgatgaacctctgtgcaaactttgtcaaggactttgcaatggaaggcttgcagagtcaacataatattttgaagatctattatgtggtctagcttgtttctaggaatacagattaagaaccagtggtagagccctacggcagttgagtcttctttttgttactcacataagtcaacattttttgttgtttccattgaatagttaggactattttcagttattcaaaatcaaagaaagttgcaagttaattcatatatatgtaataaagtttcttggtaattatctataggcactttcaaatagaacgtgccaagtgctcacaatg

SEQ ID NO: 221864 - DNA, 1635 bp, Zea Mays
ggcgccctcccccatgcgcgaaacaatcctccgcctccgtcgcctattcgcctctcccactctctgcccccgcctcccctccttctctccctcccccgcatgcctcaactgctcctctccggcgtcgtagccgtccctctcgctcccgtgacatccagatctgacttgggggcgcagctcagagtgccaatgcgccgcaacctccgttgcgcccgcacgtgccctagccagtcgccatggagctcatccccatcaagcccgaggtaggatctctcgtcgagattggataggagctccgaacgcgagccatagacggggagttgatgccaccgggcaatggatggtcgcatcctcaggacctccgcgtgcaacagcagcggtaagaactcgtccccttcctctccggtggcagtctcacgatcttcctctgccgccattgaactttaaaaatgagaaccaaaagcacacggtttctggcctccctattaggggattccacggagggactcctctcaggaaaaaaccaagtggtatgtgccttgcttgcatttcattttgtcccattttcaaaattgaaatgaacaaactgagctttttgtcatctaaaatttgtcttgtcttgtttttttcactaaaatttagacgcggtttggtgctcagctctgaagctttttgtcatcaataatatcttcctcgccctcgcaatatgttctggtctagattgtggccattccttgcagcaaactaagactaattactttttccttctttacacgtgacctttcaagaacacttaaatctgttttggacacttaaatcagttgtgtggttacctaactgctactgttcttactttgattttttggttgctcatggagtcatggtgcatatgctcatgttttcaggctatcatttttctcatcgcctacttcaatagcctacagcattagcagtaccgtgctttttacttcacaagaaaaggttggccgaggtccctgctctagcgcaaggatttctactgcaacgattgcaacacacacaggaacttttttgaaaccttcaagcttcaacgcttgaccctttgcattggtggcatagtgaatattgaactactggagagaatacaaaaacaatttacggatgataggtactacatatggcagatgaggcaactggccatggcatatatgttgcttcgacctgtgcagtttatggatgaagacgaagctgacctgcagataatagagacaagtggtgttgtgtaatggcacttgtaaagagagacagtacacctagggttggtccattgatgatgaacctctgtgcaaactttgtcaaggactttgcaatggaaggcttgcagagtcaacataatattttgaagatctattatgtggtctagcttgtttctaggaatacagattaagaaccagtggtagagccctacggcagttgagtcttctttttgttactcacataagtcaacattttttgttgtttccattgaatagttaggactattttcagttattcaaaatcaaagaaagttgcaagttaattcatatatatgtaataaagtttcttggtaattatctataggcactttcaaatagaacgtgccaagtgctcacaatg

SEQ ID NO: 221865 - DNA, 1617 bp, Zea Mays
ggcgccctcccccatgcgcgaaacaatcctccgcctccgtcgcctattcgcctctcccactctctgcccccgcctcccctccttctctccctcccccgcatgcctcaactgctcctctccggcgtcgtagccgtccctctcgctcccgtgacatccagatctgacttgggggcgcagctcagagtgccaatgcgccgcaacctccgttgcgcccgcacgtgccctagccagtcgccatggagctcatccccatcaagcccgagattggataggagctccgaacgcgagccatagacggggagttgatgccaccgggcaatggatggtcgcatcctcaggacctccgcgtgcaacagcagcggtaagaactcgtccccttcctctccggtggcagtctcacgatcttcctctgccgccattgaactttaaaaatgagaaccaaaagcacacggtttctggcctccctattaggggattccacggagggactcctctcaggaaaaaaccaagtggtatgtgccttgcttgcatttcattttgtcccattttcaaaattgaaatgaacaaactgagctttttgtcatctaaaatttgtcttgtcttgtttttttcactaaaatttagacgcggtttggtgctcagctctgaagctttttgtcatcaataatatcttcctcgccctcgcaatatgttctggtctagattgtggccattccttgcagcaaactaagactaattactttttccttctttacacgtgacctttcaagaacacttaaatctgttttggacacttaaatcagttgtgtggttacctaactgctactgttcttactttgattttttggttgctcatggagtcatggtgcatatgctcatgttttcaggctatcatttttctcatcgcctacttcaatagcctacagcattagcagtaccgtgctttttacttcacaagaaaaggttggccgaggtccctgctctagcgcaaggatttctactgcaacgattgcaacacacacaggaacttttttgaaaccttcaagcttcaacgcttgaccctttgcattggtggcatagtgaatattgaactactggagagaatacaaaaacaatttacggatgataggtactacatatggcagatgaggcaactggccatggcatatatgttgcttcgacctgtgcagtttatggatgaagacgaagctgacctgcagataatagagacaagtggtgttgtgtaatggcacttgtaaagagagacagtacacctagggttggtccattgatgatgaacctctgtgcaaactttgtcaaggactttgcaatggaaggcttgcagagtcaacataatattttgaagatctattatgtggtctagcttgtttctaggaatacagattaagaaccagtggtagagccctacggcagttgagtcttctttttgttactcacataagtcaacattttttgttgtttccattgaatagttaggactattttcagttattcaaaatcaaagaaagttgcaagttaattcatatatatgtaataaagtttcttggtaattatctataggcactttcaaatagaacgtgccaagtgctcacaatg

SEQ ID NO: 221866 - DNA, 1642 bp, Zea Mays
ggcgccctcccccatgcgcgaaacaatcctccgcctccgtcgcctattcgcctctcccactctctgcccccgcctcccctccttctctccctcccccgcatgcctcaactgctcctctccggcgtcgtagccgtccctctcgctcccgtgacatccagatctgacttgggggcgcagctcagagtgccaatgcgccgcaacctccgttgcgcccgcacgtgccctagccagtcgccatggagctcatccccatcaagcccgagattggataggagctccgaacgcgagccatagacggggagttgatgccaccgggcaatggatggtcgcatcctcaggacctccgcgtgcaacagcagcggtaagaactcgtccccttcctctccggtggcagtctcacgatcttcctctgccgccattgaactttaaaaatgagaaccaaaagcacacggtttctggcctccctattaggggattccacggagggactcctctcaggaaaaaaccaagtggtatgtgccttgcttgcatttcattttgtcccattttcaaaattgaaatgaacaaactgagctttttgtcatctaaaatttgtcttgtcttgtttttttcactaaaatttagacgcggtttggtgctcagctctgaagctttttgtcatcaataatatcttcctcgccctcgcaatatgttctggtctagattgtggccattccttgcagcaaactaagactaattactttttccttctttacacgtgacctttcaagaacacttaaatctgttttggacacttaaatcagttgtgtggttacctaactgctactgttcttactttgattttttggttgctcatggagtcatggtgcatatgctcatgttttcaggctatcatttttctcatcgcctacttcaatagcctacagcattagcagtaccgtgctttttacttcacaagaaaaggttggccgaggtccctgctctagcgcaaggatttctactgcaacgattgcaacacacacaggaacttttttgaaaccttcaagcttcaacgcttgaccctttgcattggtggcatagtgaatattgaactactggagagaatacaaaaacaatttacggatgataggtactacatatggcagatgaggcaactggccatggcatatatgttgcttcgacctgtgcagtttatggatgaagacgaagctgacctgcagatgtaaactttgttttctatggaccagaatagagacaagtggtgttgtgtaatggcacttgtaaagagagacagtacacctagggttggtccattgatgatgaacctctgtgcaaactttgtcaaggactttgcaatggaaggcttgcagagtcaacataatattttgaagatctattatgtggtctagcttgtttctaggaatacagattaagaaccagtggtagagccctacggcagttgagtcttctttttgttactcacataagtcaacattttttgttgtttccattgaatagttaggactattttcagttattcaaaatcaaagaaagttgcaagttaattcatatatatgtaataaagtttcttggtaattatctataggcactttcaaatagaacgtgccaagtgctcacaatg

SEQ ID NO: 221867 - DNA, 1091 bp, Zea Mays
ggcgccctcccccatgcgcgaaacaatcctccgcctccgtcgcctattcgcctctcccactctctgcccccgcctcccctccttctctccctcccccgcatgcctcaactgctcctctccggcgtcgtagccgtccctctcgctcccgtgacatccagatctgacttgggggcgcagctcagagtgccaatgcgccgcaacctccgttgcgcccgcacgtgccctagccagtcgccatggagctcatccccatcaagcccgagattggataggagctccgaacgcgagccatagacggggagttgatgccaccgggcaatggatggtcgcatcctcaggacctccgcgtgcaacagcagcggctatcatttttctcatcgcctacttcaatagcctacagcattagcagtaccgtgctttttacttcacaagaaaaggttggccgaggtccctgctctagcgcaaggatttctactgcaacgattgcaacacacacaggaacttttttgaaaccttcaagcttcaacgcttgaccctttgcattggtggcatagtgaatattgaactactggagagaatacaaaaacaatttacggatgataggtactacatatggcagatgaggcaactggccatggcatatatgttgcttcgacctgtgcagtttatggatgaagacgaagctgacctgcagataatagagacaagtggtgttgtgtaatggcacttgtaaagagagacagtacacctagggttggtccattgatgatgaacctctgtgcaaactttgtcaaggactttgcaatggaaggcttgcagagtcaacataatattttgaagatctattatgtggtctagcttgtttctaggaatacagattaagaaccagtggtagagccctacggcagttgagtcttctttttgttactcacataagtcaacattttttgttgtttccattgaatagttaggactattttcagttattcaaaatcaaagaaagttgcaagttaattcatatatatgtaataaagtttcttggtaattatctataggcactttcaaatagaacgtgccaagtgctcacaatg

SEQ ID NO: 221868 - DNA, 816 bp, Zea Mays
ggcgccctcccccatgcgcgaaacaatcctccgcctccgtcgcctattcgcctctcccactctctgcccccgcctcccctccttctctccctcccccgcatgcctcaactgctcctctccggcgtcgtagccgtccctctcgctcccgtgacatccagatctgacttgggggcgcagctcagagtgccaatgcgccgcaacctccgttgcgcccgcacgtgccctagccagtcgccatggagctcatccccatcaagcccgagattggataggagctccgaacgcgagccatagacggggagttgatgccaccgggcaatggatggtcgcatcctcaggacctccgcgtgcaacagcagcgtaccgtgctttttacttcacaagaaaaggttggccgaggtccctgctctagcgcaaggatttctactgcaacgattgcaacacacacagatattagcattcttgcaccatagacgcgagcctgtaaacaatattatagaatgggataagatgaccaacaacctttccactgtcatcattaggcatcgagcactcaggaacttttttgaaaccttcaagcttcaacgcttgaccctttgcattggtggcatagtgaatattgaactactggagagaatacaaaaacaatttacggatgataggtactacatatggcagatgaggcaactggccatggcatatatgttgcttcgacctgtgcagtttatggatgaagacgaagctgacctgcagatgtaaactttgttttctatggaccaggcactttcaaatagaacgtgccaagtgctcacaatg

SEQ ID NO: 221869 - DNA, 1304 bp, Zea Mays
ggcgccctcccccatgcgcgaaacaatcctccgcctccgtcgcctattcgcctctcccactctctgcccccgcctcccctccttctctccctcccccgcatgcctcaactgctcctctccggcgtcgtagccgtccctctcgctcccgtgacatccagatctgacttgggggcgcagctcagagtgccaatgcgccgcaacctccgttgcgcccgcacgtgccctagccagtcgccatggagctcatccccatcaagcccgagattggataggagctccgaacgcgagccatagacggggagttgatgccaccgggcaatggatggtcgcatcctcaggacctccgcgtgcaacagcagcggctatcatttttctcatcgcctacttcaatagcctacagcattagcagtaccgtgctttttacttcacaagaaaaggttggccgaggtccctgctctagcgcaaggatttctactgcaacgattgcaacacacacaggaacttttttgaaaccttcaagcttcaacgcttgaccctttgcattggtggcatagtgaatattgaactactggagagaatacaaaaacaatttacggatgataggcagatgaggcaactggccatggcatatatgttgcttcgacctgtgcagtttatggatgaagacgaagctgacctgcagatgtaaactttgttttctatggaccaggtcttgtatatccaaattgaacggattgttctaataaatatatcacaaaaagataaagtataatatttgttcttgtgcgttgttgcaatgaattttagtgaggtaatacgaacttatatccatttttcaaatatattctaggttctaaccaactggtccaaaatgtcacattgattgatatgtggatttttatacttcagaatagagacaagtggtgttgtgtaatggcacttgtaaagagagacagtacacctagggttggtccattgatgatgaacctctgtgcaaactttgtcaaggactttgcaatggaaggcttgcagagtcaacataatattttgaagatctattatgtggtctagcttgtttctaggaatacagattaagaaccagtggtagagccctacggcagttgagtcttctttttgttactcacataagtcaacattttttgttgtttccattgaatagttaggactattttcagttattcaaaatcaaagaaagttgcaagttaattcatatatatgtaataaagtttcttggtaattatctataggcactttcaaatagaacgtgccaagtgctcacaatg

SEQ ID NO: 221870 - DNA, 1744 bp, Zea Mays
ggcgccctcccccatgcgcgaaacaatcctccgcctccgtcgcctattcgcctctcccactctctgcccccgcctcccctccttctctccctcccccgcatgcctcaactgctcctctccggcgtcgtagccgtccctctcgctcccgtgacatccagatctgacttgggggcgcagctcagagtgccaatgcgccgcaacctccgttgcgcccgcacgtgccctagccagtcgccatggagctcatccccatcaagcccgagattggataggagctccgaacgcgagccatagacggggagttgatgccaccgggcaatggatggtcgcatcctcaggacctccgcgtgcaacagcagcggtaagaactcgtccccttcctctccggtggcagtctcacgatcttcctctgccgccattgaactttaaaaatgagaaccaaaagcacacggtttctggcctccctattaggggattccacggagggactcctctcaggaaaaaaccaagtggtatgtgccttgcttgcatttcattttgtcccattttcaaaattgaaatgaacaaactgagctttttgtcatctaaaatttgtcttgtcttgtttttttcactaaaatttagacgcggtttggtgctcagctctgaagctttttgtcatcaataatatcttcctcgccctcgcaatatgttctggtctagattgtggccattccttgcagcaaactaagactaattactttttccttctttacacgtgacctttcaagaacacttaaatctgttttggacacttaaatcagttgtgtggttacctaactgctactgttcttactttgattttttggttgctcatggagtcatggtgcatatgctcatgttttcaggctatcatttttctcatcgcctacttcaatagcctacagcattagcagtaccgtgctttttacttcacaagaaaaggttggccgaggtccctgctctagcgcaaggatttctactgcaacgattgcaacacacacaggaacttttttgaaaccttcaagcttcaacgcttgaccctttgcattggtggcatagtgaatattgaactactggagagaatacaaaaacaatttacggatgataggtactacatatggcagatgaggcaactggccatggcatatatgttgcttcgacctgtgcagtttatggatgaagacgaagctgacctgcagatgtaaactttgttttctatggaccaggtcttgtatatccaaattgaacggattgttctaataaatatatcacaaaaagataaagtataatatttgttcttgtgcgttgttgcaatgaattttagtgagaatagagacaagtggtgttgtgtaatggcacttgtaaagagagacagtacacctagggttggtccattgatgatgaacctctgtgcaaactttgtcaaggactttgcaatggaaggcttgcagagtcaacataatattttgaagatctattatgtggtctagcttgtttctaggaatacagattaagaaccagtggtagagccctacggcagttgagtcttctttttgttactcacataagtcaacattttttgttgtttccattgaatagttaggactattttcagttattcaaaatcaaagaaagttgcaagttaattcatatatatgtaataaagtttcttggtaattatctataggcactttcaaatagaacgtgccaagtgctcacaatg

SEQ ID NO: 221871 - DNA, 1205 bp, Zea Mays
cggcgcacgttctgccgcccgcatcccgcatccgcgtcgcaacccgcaaccgcctgcagccgcggcttccatcttccgccctccttccatcctcctgcaatcgccagcgcgccctccgcgctcctgccatccgaggaaagccttccatccatggcgccgttgctgcaattctccccgcgatccgctctccctccattgccccccgcgatccgcgctccctccattgcccccgcgctcctgccatccatggcgcctccccacggatctctgctgtcaattttacggagaaatcacgcctccctagggtgcccttccatccatggcgtcgttgctgcaagtgccccgcaatcaactccattgccactgtgatccccttccaccgatggcactcaccttccatcgacaaaactgctcttcctccattccaccgatggcactcaccctaaaccctcacctcttagatcccgtgctcatcaccatcctgcccctcgctcgccgccccacctcaccaagagccttagccgtccctagagaagacacggaggtgcagtgcagtgcagtgctttactcaagtgcgccacggattttcggtaccggccagattgggacgaattcgacattcatcggctccaccaaagaacaaggcgatggcccaattgtattaattcccgctcccacaagagaattggctgttcaaatacaggaagaatctacaaaatttggatcatattcaagaactagaagcacatgtgtctatggtggtgcacctaagggtccacaaatacggggccttagaagaggagttgaaattgtcattgcaactcctggccggttgattgatatgctggaagctggtcacacaaacctacgtagagtgacgtaccttgtgttggatgaggcggaccagatgctagatatggggaatctcaagaagcttgcggcccagagccaaacggatgatgaagatgtttggtgggagtaggctgaggagcattttccatggtatttcagatggattcaaaatagaggggtgacatgcttttggaccaatggatatgatgttgtgtctgctttggattcaaacaactacacaatcatctattttgattcaaacagaggggtgacatctgtaaatccattatattaaagccactatgattgattgtttgatcagagtattttacaagagctgcttcctattttac

SEQ ID NO: 221872 - DNA, 3567 bp, Zea Mays
cataaccatatggaggcatggagccgccgaggaccaggagtccagattcccctcccataatgccggggaactctcggaaggggctgttgcgacccccttatttcttgccgtcgtctcattccagaaccactctttcgctctgagacgatccacctgaactgcacgacggagcgagccgcaagagctcctgcatcgtcgtcgcaaacccaagaagacctaggtagcaagcagtgtcagatccaccgccgcgcgaccatggcggcggcctccgcctccgcgtcgctggaagacctcaagaacgagaacgtcgacctcgagagcgttccgatccaggaggtgttcgccgtcctcaagtcctcgccgcacgggctcacctccaccgatggcgccagccggctcgagatcttcggccccaacaagctcgaggagaagaaggggagaccgccggactggcaggacttcgtcgggatcgtcacgctgctcttcatcaactccacaatcagctttatcgaggagaacaatgccggcaacgccgccgccgccctcatggccagcctcgccccgcagaccaaggtgctgagggacggcaagtggtcggagcaggaagcggcgatcctggtgccgggcgacatcatcagcatcaagctcggcgacatcatccccgcggacgcgaggctgctggagggcgacccgctcaagatcgaccagtcagcgctcacgggcgagtcgctccccgttaacaagatgcccggcgacagcatctactccggctccacctgcaagcagggcgagatcgaggccgtcgtgatcgccaccggcgtccacaccttcttcggaaaggccgcccacctcgtcgacagcaccaacaacgtcggccacttccagaaggtgctgacggcgatcgggaacttctgcatctgctccatcgcagtcgggatgctggtcgagatcatcgtcatgtacccgatccagcaccggcagtaccgcgagggcatcgacaacctgctcgtgctgctcatcggcgggatccccatcgccatgcccaccgtgctgtcggtgaccatggccatcgggtcgcacaggctgtcggagcagggcgccatcaccaagcgcatgacggccatcgaggagatggccggcatggacgtgctctgcagcgacaagaccggcacgctcaccctgaacaaactcaccgtcgacaagaacttgatcgagccgtttgtgaaggatctggacaaggacgccgtagtcctgtacgcagctcgagcgtcgagaaccgagaaccaggacgccatcgacgcctccatcgtcgcaatgctcgccgacccgagcgaggcccgtgccggcatccaggaggtgcatttcatgccgttcaatcccgtcgacaagcgcactgccatcacctacatcgactccgacgggtcatggcaccgcatcagcaaaggtgcaccagagcagatcatcgagctgtgccggctccgggaggacctgagccggcgggtgcacgccatcatcgccaagttcgcggaccgtggcctgcgttcgctggccgtggcgcggcagagagtccccgagggcaacaaggacgcgccaggcactccgtggcagttcctggccgtgctcccgctgttcgacccgccgaggcacgacagcgccgagaccatccgccgcgcgctcaacctgggcgtgaacgtcaagatgatcacgggcgaccagctggccatcggcaaggagaccgggcggcgcctcggcatgggcaccaacatgtacccgtccagctccctgctcaaggacggcgacacgggcgggctccccgtggacgagctgatcgagaaggcggacgggttcgcgggcgtgttcccggagcacaagtacgagatcgtgcggcggctgcaggagcggaagcacatctgcgggatgacgggggacggcgtgaacgatgcgccggcgctgaagaaggcggacatcgggatcgccgtggcggacgcgacggacgcggcgcggggcgcgtccgacatcgtgctcacggagcccggcctcagcgtcatcatcagcgccgtgctgacgagccgcgccatcttccagcggatgaagaactacaccatctacgccgtgtccatcaccatccgggtggtgctgggcttcctgctgctggccctcatctggcggttcgacttcgcgcccttcatggtgctcatcatcgccgtgctcaacgacggcaccatcatgaccatctccaaggaccgggtgaagccgtccccggtgccagacgcctggcgcctccaggagatcttcgccaccggcgtcgtcctcggcacctaccaggctctcgccaccgtcctcttcttctgggccgttcgcgacaccgccttcttcacgaatacgttcggggtgcaccacatcggggacagcacggaggagctgatggcggccgtgtaccttcaggtgagcatcatcagccaggcgctcatcttcgtgacccgcgctcggagctggttcttcgtggagcgccctggcctgctgctggtggccgccttcctggccgcgcagctggtggcgacgctgatcgccgtgtacgcgcactggccgttcgccaagatcaagggcatcggctgggggtggggcggcgtcatctggctcttcaccatcgtcaccttcttcccgctggacgtgttcaagttcgccatccgctacttcctgagcggcaagcagtggaacaacgtgttcgacaacaagacggcgttcgccagcgagctggactacggcaggggcaagcgcgaggcgcagtgggcgatcgcgcagcggtccctgcacgggctgcagcagcccgaggcgtcgggcctcttcaacagcgacaacagcaacgatttcatcgagctctccgagatcgccgagcaggccaagcgccgagcggagatcgccaggctaagggagctgcacacactgaaagggcacgtggagtcggtggtgaagctcaaggggctggacatcaacaccatccaacataactacaccgtgtgatcaccatagctactcgttttcatgtcatcggtcgatttggaggaggcgatttggaggaggagcttttttttctctctcgaaaggccggaggaggaagatgaactgtaggattcagttttactcgttttcttttatgttattacatatacagcctaatcgagcagggaaatatctaggtgagataaataacttcttgaagaagctgtagaatctgatgtggagccgaataattcgaagcttactgggaaagccatgcattaggagttttgtcaatatttatttgcttgtttaggcagctgtagtgttttctcttgattagtggcatgcaaatacaatccttttcaacttgaatagcatgcagattcattcctgaaggtttatttcgtgcggaatttccttttcctttttttcgggatgggattaattgtgacgattaccttgaggaagaatgaagtctcgctataaaggaaatcctagatgtatatcagcactgatataaaaaaaaaggaatgtttaattgtgatataaaattgggatggtatacgc

SEQ ID NO: 221873 - DNA, 3505 bp, Zea Mays
ccgccgaggaccaggagtccagattcccctcccataatgccggggaactctcggaaggggctgttgcgacccccttatttcttgccgtcgtctcattccagaaccactctttcgctctgagacgatccacctgaactgcacgacggagcgagccgcaagagctcctgcatcgtcgtcgcaaacccaagaagacctaggtagcaagcagtgtcagatccaccgccgcgcgaccatggcggcggcctccgcctccgcgtcgctggaagacctcaagaacgagaacgtcgacctcgagagcgttccgatccaggaggtgttcgccgtcctcaagtcctcgccgcacgggctcacctccaccgatggcgccagccggctcgagatcttcggccccaacaagctcgaggagaagaaggagagtaaactgctcaagttcctgggattcatgtggaacccgctctcctgggtcatggaggccgccgccatcatggccatcgccctcgccaacggaggggtgctgagggacggcaagtggtcggagcaggaagcggcgatcctggtgccgggcgacatcatcagcatcaagctcggcgacatcatccccgcggacgcgaggctgctggagggcgacccgctcaagatcgaccagtcagcgctcacgggcgagtcgctccccgttaacaagatgcccggcgacagcatctactccggctccacctgcaagcagggcgagatcgaggccgtcgtgatcgccaccggcgtccacaccttcttcggaaaggccgcccacctcgtcgacagcaccaacaacgtcggccacttccagaaggtgctgacggcgatcgggaacttctgcatctgctccatcgcagtcgggatgctggtcgagatcatcgtcatgtacccgatccagcaccggcagtaccgcgagggcatcgacaacctgctcgtgctgctcatcggcgggatccccatcgccatgcccaccgtgctgtcggtgaccatggccatcgggtcgcacaggctgtcggagcagggcgccatcaccaagcgcatgacggccatcgaggagatggccggcatggacgtgctctgcagcgacaagaccggcacgctcaccctgaacaaactcaccgtcgacaagaacttgatcgagccgtttgtgaaggatctggacaaggacgccgtagtcctgtacgcagctcgagcgtcgagaaccgagaaccaggacgccatcgacgcctccatcgtcgcaatgctcgccgacccgagcgaggcccgtgccggcatccaggaggtgcatttcatgccgttcaatcccgtcgacaagcgcactgccatcacctacatcgactccgacgggtcatggcaccgcatcagcaaaggtgcaccagagcagatcatcgagctgtgccggctccgggaggacctgagccggcgggtgcacgccatcatcgccaagttcgcggaccgtggcctgcgttcgctggccgtggcgcggcagagagtccccgagggcaacaaggacgcgccaggcactccgtggcagttcctggccgtgctcccgctgttcgacccgccgaggcacgacagcgccgagaccatccgccgcgcgctcaacctgggcgtgaacgtcaagatgatcacgggcgaccagctggccatcggcaaggagaccgggcggcgcctcggcatgggcaccaacatgtacccgtccagctccctgctcaaggacggcgacacgggcgggctccccgtggacgagctgatcgagaaggcggacgggttcgcgggcgtgttcccggagcacaagtacgagatcgtgcggcggctgcaggagcggaagcacatctgcgggatgacgggggacggcgtgaacgatgcgccggcgctgaagaaggcggacatcgggatcgccgtggcggacgcgacggacgcggcgcggggcgcgtccgacatcgtgctcacggagcccggcctcagcgtcatcatcagcgccgtgctgacgagccgcgccatcttccagcggatgaagaactacaccatctacgccgtgtccatcaccatccgggtggtgctgggcttcctgctgctggccctcatctggcggttcgacttcgcgcccttcatggtgctcatcatcgccgtgctcaacgacggcaccatcatgaccatctccaaggaccgggtgaagccgtccccggtgccagacgcctggcgcctccaggagatcttcgccaccggcgtcgtcctcggcacctaccaggctctcgccaccgtcctcttcttctgggccgttcgcgacaccgccttcttcacgaatacgttcggggtgcaccacatcggggacagcacggaggagctgatggcggccgtgtaccttcaggtgagcatcatcagccaggcgctcatcttcgtgacccgcgctcggagctggttcttcgtggagcgccctggcctgctgctggtggccgccttcctggccgcgcagctggtggcgacgctgatcgccgtgtacgcgcactggccgttcgccaagatcaagggcatcggctgggggtggggcggcgtcatctggctcttcaccatcgtcaccttcttcccgctggacgtgttcaagttcgccatccgctacttcctgagcggcaagcagtggaacaacgtgttcgacaacaagacggcgttcgccagcgagctggactacggcaggggcaagcgcgaggcgcagtgggcgatcgcgcagcggtccctgcacgggctgcagcagcccgaggcgtcgggcctcttcaacagcgacaacagcaacgatttcatcgagctctccgagatcgccgagcaggccaagcgccgagcggagatcgccaggctaagggagctgcacacactgaaagggcacgtggagtcggtggtgaagctcaaggggctggacatcaacaccatccaacataactacaccgtgtgatcaccatagctactcgttttcatgtcatcggtcgatttggaggaggcgatttggaggaggagcttttttttctctctcgaaaggccggaggaggaagatgaactgtaggattcagttttactcgttttcttttatgttattacatatacagcctaatcgagcagggaaatatctaggtgagataaataacttcttgaagaagctgtagaatctgatgtggagccgaataattcgaagcttactgggaaagccatgcattaggagttttgtcaatatttatttgcttgtttaggcagctgtagtgttttctcttgattagtggcatgcaaatacaatccttttcaacttgaatagcatgcagattcattcctgaaggtttatttcgtgcggaatttccttttcctttttttcgggatgggattaattgtgacgattaccttgaggaagaatgaagtctcgctataaaggaaatcctagatgtatatcagcactgatataaaaaaaaaggaatgtttaattgtgatataaaattgggatggtatacgc

SEQ ID NO: 221874 - DNA, 935 bp, Zea Mays
atggcggagcagggaaagggaaacaacactcaagcaaaggttacacaagtgagcagtaaagatgggcctgtagaatcactagtattagaggatgaatcacatgttatcgttgagaaggacttggtttctcagggagaagaggaggacattgaggctcttcttggcaattatgttatggccattggtgaagcagaggctttttccgaaaggatgaagcgcgagcttgtagcgctagaatctgcaaatgtttatgccttgttggaaactgaatctgttgtagaagaggtattgcagggtctcgaaatagccagtatatgtgttgaagatatggatgaatggctagggattttcaatataaagctcaggcatatgagggaggatatacaatctgtatgcttactttcacctttactgatgtatatgggcaaatcatgtttccttagagttgttgtgattaaaattattttctcttttaatgcccgatacatttaaaaccaaactatatggatgtctgatgaggcccaataagagcttaacgaaataatatttgaattgtttgtcacatgcttacaacttatagttatagtgcatcttggctgttgaaatttacacttagtgttgtctctagttctctactgaagacattagggacaatttcctaccatattcatattaattgtttaaaactgaacatatgtataagatggagttgcagaatcattgttaaatactcccgccgttccaatttataattcgtttgacttttttaacctaagtttgaccgacttgtctcatttaaaaacatatttattactaatttttactgtgatattgtttagactataatatactttaagtatgcctttggatttttcattttttcgcaaaaaatttgaataagacgagccggtcaaacttggcacaaaaaagtcaaa

SEQ ID NO: 221875 - DNA, 1008 bp, Zea Mays
ctttgttgcataataaagttgaggatacgttctctgaaaaaagagatgaataagccctgctgcatcatgatcatagctgcaggttcctgcctagaagaacactcaagcaaaggttacacaagtgagcagtaaagatgggcctgtagaatcactagtattagaggatgaatcacatgttatcgttgagaaggacttggtttctcagggagaagaggaggacattgaggctcttcttggcaattatgttatggccattggtgaagcagaggctttttccgaaaggatgaagcgcgagcttgtagcgctagaatctgcaaatgtttatgccttgttggaaactgaatctgttgtagaagaggtattgcagggtctcgaaatagccagtatatgtgttgaagatatggatgaatggctagggattttcaatataaagctcaggcatatgagggaggatatacaatctgtatgcttactttcacctttactgatgtatatgggcaaatcatgtttccttagagttgttgtgattaaaattattttctcttttaatgcccgatacatttaaaaccaaactatatggatgtctgatgaggcccaataagagcttaacgaaataatatttgaattgtttgtcacatgcttacaacttatagttatagtgcatcttggctgttgaaatttacacttagtgttgtctctagttctctactgaagacattagggacaatttcctaccatattcatattaattgtttaaaactgaacatatgtataagatggagttgcagaatcattgttaaatactcccgccgttccaatttataattcgtttgacttttttaacctaagtttgaccgacttgtctcatttaaaaacatatttattactaatttttactgtgatattgtttagactataatatactttaagtatgcctttggatttttcattttttcgcaaaaaatttgaataagacgagccggtcaaacttggcacaaaaaagtcaaa

SEQ ID NO: 221876 - DNA, 209 bp, Zea Mays
ctcatgggcagtaaagaaatgcatgtcctcataaatcatgaatggtggatcaagtgcatcatgccttaggggaagctggttctggtcactggtggaaccaacggcatcgggcagttggttgtagcatcatcgctgagcaggaacatcaagtcaaggttgctcctaagagatctagaaaaggcatcatccttatttggcaagtaggatga

SEQ ID NO: 221877 - DNA, 3923 bp, Zea Mays
gcacccagtccacccaggccccagcactgccgctgccttgcctgccctcgcttcggcgctttctgctttctccagtgagccgcacccgcactaccgctgacgctaattaaccacaagcgaccgtcgccttcccccacctcctcccttcctcaaaaaaaggcggaggcgggagtggtggtggtgctcgtgggcacgcagcggagcaccctgtacagcagcagcgctgcggcagtagagagtgccattggtggagctggtaactagccctcccccctccgttcccgtcccgcgcgcagccgtctgccgagcctgctcagtgcccatcatggtgaggaagaagagaactggccctggtggctctggagaaacttctggagagtcttcaggagcctctggacaaggttcctcacagcagcctgagcgaactcaacaacctgggggaggacgtggctgggtgcctcaacagggtggccatggtggtgggcaacaccagggtcgtgatcgacattatcagggacgtggaggaccagggccacatcaccttggtagtggggcacctgagtatcacccgcgtgaataccagggacgtggtggtgaatatcagggacatggtggtgagtaccagggacggggtggtgactaccagggacgtggtggtggccgctccagaggtggaatgccacagccatactatggtgggcataggggaggtaatgttggacgcaatgttcctccaggtccgtccaggacagttcccgagctgcaccaagccccatatgtccagtatccagccccggtggtttcgccctccccatcgggacctggctcatcctcacagcctatggcagaggtgagctctggacaagtccagcaacagtttcagcaacttgccgatcgtggtcagagttccacgagccaagaaattcaagtggcaccagcatcaagcaaatcggttcgattcccgttacggcccggcaagggcacttatggggacaggtgcattgtgaaggcaaatcatttttttgctgagcttcctgacaaagaccttcaccaatatgatgtatctataacacctgaggttacttcacgtggcgtcaatcgtgctgtcatgggtgagcttgtaacaatatatagacaatcccatttgggtgggcgtctacctgcatacgatggaagaaagagcctgtatactgctggaccattgccatttacttctatggcatttgaaattaccttgcaagatgaggaagatagtcttggcggtcgccaaggtggacataggcgtgagagagtatttagggtggtgatcaaatttgcagcccgtgctgatctccaccatctggctatgtttctagctggaaggcaagcagatgcccctcaggaagctcttcaagtgcttgacattgtactacgtgaattgcctaccgcgaggtattctcctgtcggtaggtcattttactctcccaacttagggagacgtcaaaaacttggtgagggattggaaagttggcgtggtttttaccaaagcataaggccgacacagatgggcctttcactgaatattgatatgtcctctactgcatttatcgagcctctccctgtgatcgattttgttgctcagcttcttaacagagatatctcagttaggccattgtctgattctgatcgcgtgaagattaaaaaagccctaagaggtgtgaaggttgaggtgactcacaggggaaacatgcgcagaaaatatcgcatttctggcctcacctcacaagcaacaagagagctatcattccctgttgatgatcgtggtactgtgaagactgtggtgcaatacttcatggagacttatggttttagtatccagcacaccactttaccatgcttgcaagtgggtaatcaacaaagaccaaattatctgcctatggaggtttgcaagatagttgaaggacagcgttactcaaagcgactcaatgagaaacaaatcactgctctactgaaagtgacctgccagcgccctcaagagcgcgagctggacatcttacagactgtgcatcacaatgcatactatgaagacccctatgcactggaatttggtataagaattgatgaacgtcttgctgcagttgaagctcgtgttctgccaccaccaagacttaaataccatgatagtggccgagagaaggatgttttgcccagagttggccaatggaacatgatgaataagaaaatggttaatggtggcagagtgagcaactgggcatgtattaacttctctcggaatgtgcaagatagtgccgctaggggtttctctcatgagttggcagtcatgtgccaaatatcaggaatggattttgctcttgagcctgtgctgcctccagtgactgcaaggccagaacatgttgagagagcgttaaaggcacgttatcaagatgcaatgaacatactgaggccacagggaagggaacttgatctgctgatcgtaatactgcctgacaacaatggttctctttatggggatctcaaaaggatctgtgagactgaactcggattggtctcccagtgttgtctgactaaacatgtttttaagatgagcaagcagtaccttgcaaatgttgcactcaaaataaatgttaaggttgggggaaggaatactgtacttttagatgctttgtcaaggagaatcccccttgtcagtgacagaccgaccataatatttggtgctgatgttacccatccacatcctggagaagattccagtccttccattgcagccgttgttgcttcgcaagactggcccgaggtcacgaaatacgctggactagtgagtgcgcaagcccatcgccaggagctgatacaggatcttttcaaagtatggcaggacccgcagagaaggacggtaactggcggcatgataaaggaacttctcatttctttcaagagggcaactggacagaagccccagaggatcatattctacagggatggtgtcagtgagggacagttctatcaagtattgctgtacgaacttgatgccattagaaaggcctgtgcgtccctggagcccaactaccagcctccagttacttttgtcgtggtacagaagcgccatcacactaggctgtttgcgaacaaccacagtgatcagcgcacagtcgatagaagcggaaacatactgcctggcaccgtggtcgattcgaagatttgccatcctactgagtttgacttctacctgtgtagccatgctggcattcagggaacgagccgccctgctcactaccatgtcctgtgggacgagaacaagttcacagctgacgagctgcagaccctgacgaacaacctgtgctacacgtacgctaggtgcacccgctccgtgtccatcgtgcccccggcgtactacgctcatctggcagccttccgagctcgcttctacatggagccagacacctctgacagcgggtcactggccagcggtgcccgtggccccccacccggtgcggcacgcagcagcacgagaggggccgggagtgtcgaggtcaggcccctacctgctctcaaggagaacgtgaagcgtgtcatgttttactgctgagacgctggtgggctgccttcgccaaggaaaatgccctggagcattcccatgtacccgcactgtttcggtgatacagtactatctaacgccgattttgcgcgttaagacttccagtgatctgggaaatttcttgtacgactgttgtagtgttgtgtattcgtaatgtgatgacgcggcagttcttctaggagcttagtgccgtgtaaaatatctgttgtaagttgtaacctgtcaccctctagtgttatgtcatgatgaaccaaattatttgttgtcattccatgtacttcgccaagtatttgttgtcacgatgttctaggatgattttttttttttataa

SEQ ID NO: 221878 - DNA, 4306 bp, Zea Mays
gcacccagtccacccaggccccagcactgccgctgccttgcctgccctcgcttcggcgctttctgctttctccagtgagccgcacccgcactaccgctgacgctaattaaccacaagcgaccgtcgccttcccccacctcctcccttcctcaaaaaaaggcggaggcgggagtggtggtggtgctcgtgggcacgcagcggagcaccctgtacagcagcagcgctgcggcagtagagagtgccattggtggagctggtaactagccctcccccctccgttcccgtcccgcgcgcagccgtctgccgagcctgctcaggtgtgcagtgctcgtattcgggtggactgattacttcgttaaagcctcagcatagtgatgtagccttcctccctctgctggctatatgcttgtatggttatttgcctctacgttagggttaaaaaaaagtccattctgtttatgtgtattttctttgctgtcccttggtatccatctgtggttaatttgggttcaggttgctatttttgttgttgtctttgtatctggctgactgacaagcgagggttcttttttttagcgcaccacattgtgatgagtgaaactgaagcctccgctatgatttctgttgtgttctagccatagtttatgcctgatgctcgatgttctcacttggcgtgaactctccaccttgattacaagtgcaagcatagatgcccatcatggtgaggaagaagagaactggccctggtggctctggagaaacttctggagagtcttcaggagcctctggacaaggttcctcacagcagcctgagcgaactcaacaacctgggggaggacgtggctgggtgcctcaacagggtggccatggtggtgggcaacaccagggtcgtgatcgacattatcagggacgtggaggaccagggccacatcaccttggtagtggggcacctgagtatcacccgcgtgaataccagggacgtggtggtgaatatcagggacatggtggtgagtaccagggacggggtggtgactaccagggacgtggtggtggccgctccagaggtggaatgccacagccatactatggtgggcataggggaggtaatgttggacgcaatgttcctccaggtccgtccaggacagttcccgagctgcaccaagccccatatgtccagtatccagccccggtggtttcgccctccccatcgggacctggctcatcctcacagcctatggcagaggtgagctctggacaagtccagcaacagtttcagcaacttgccgatcgtggtcagagttccacgagccaagaaattcaagtggcaccagcatcaagcaaatcggttcgattcccgttacggcccggcaagggcacttatggggacaggtgcattgtgaaggcaaatcatttttttgctgagcttcctgacaaagaccttcaccaatatgatgtatctataacacctgaggttacttcacgtggcgtcaatcgtgctgtcatgggtgagcttgtaacaatatatagacaatcccatttgggtgggcgtctacctgcatacgatggaagaaagagcctgtatactgctggaccattgccatttacttctatggcatttgaaattaccttgcaagatgaggaagatagtcttggcggtcgccaaggtggacataggcgtgagagagtatttagggtggtgatcaaatttgcagcccgtgctgatctccaccatctggctatgtttctagctggaaggcaagcagatgcccctcaggaagctcttcaagtgcttgacattgtactacgtgaattgcctaccgcgaggtattctcctgtcggtaggtcattttactctcccaacttagggagacgtcaaaaacttggtgagggattggaaagttggcgtggtttttaccaaagcataaggccgacacagatgggcctttcactgaatattgatatgtcctctactgcatttatcgagcctctccctgtgatcgattttgttgctcagcttcttaacagagatatctcagttaggccattgtctgattctgatcgcgtgaagattaaaaaagccctaagaggtgtgaaggttgaggtgactcacaggggaaacatgcgcagaaaatatcgcatttctggcctcacctcacaagcaacaagagagctatcgtatgtgtctttcattgctggtatgagactgtggtgcaatacttcatggagacttatggttttagtatccagcacaccactttaccatgcttgcaagtgggtaatcaacaaagaccaaattatctgcctatggaggtttgcaagatagttgaaggacagcgttactcaaagcgactcaatgagaaacaaatcactgctctactgaaagtgacctgccagcgccctcaagagcgcgagctggacatcttacagactgtgcatcacaatgcatactatgaagacccctatgcactggaatttggtataagaattgatgaacgtcttgctgcagttgaagctcgtgttctgccaccaccaagacttaaataccatgatagtggccgagagaaggatgttttgcccagagttggccaatggaacatgatgaataagaaaatggttaatggtggcagagtgagcaactgggcatgtattaacttctctcggaatgtgcaagatagtgccgctaggggtttctctcatgagttggcagtcatgtgccaaatatcaggaatggattttgctcttgagcctgtgctgcctccagtgactgcaaggccagaacatgttgagagagcgttaaaggcacgttatcaagatgcaatgaacatactgaggccacagggaagggaacttgatctgctgatcgtaatactgcctgacaacaatggttctctttatggggatctcaaaaggatctgtgagactgaactcggattggtctcccagtgttgtctgactaaacatgtttttaagatgagcaagcagtaccttgcaaatgttgcactcaaaataaatgttaaggttgggggaaggaatactgtacttttagatgctttgtcaaggagaatcccccttgtcagtgacagaccgaccataatatttggtgctgatgttacccatccacatcctggagaagattccagtccttccattgcagccgttgttgcttcgcaagactggcccgaggtcacgaaatacgctggactagtgagtgcgcaagcccatcgccaggagctgatacaggatcttttcaaagtatggcaggacccgcagagaaggacgggaacttctcatttctttcaagagggcaactggacagaagccccagaggatcatattctacagtttttgagtttcagggatggtgtcagtgagggacagttctatcaagtattgctgtacgaacttgatgccattagaaaggcctgtgcgtccctggagcccaactaccagcctccagttacttttgtcgtggtacagaagcgccatcacactaggctgtttgcgaacaaccacagtgatcagcgcacagtcgatagaagcggaaacatactgcctggcaccgtggtcgattcgaagatttgccatcctactgagtttgacttctacctgtgtagccatgctggcattcagggaacgagccgccctgctcactaccatgtcctgtgggacgagaacaagttcacagctgacgagctgcagaccctgacgaacaacctgtgctacacgtacgctaggtgcacccgctccgtgtccatcgtgcccccggcgtactacgctcatctggcagccttccgagctcgcttctacatggagccagacacctctgacagcgggtcactggccagcggtgcccgtggccccccacccggtgcggcacgcagcagcacgagaggggccgggagtgtcgaggtcaggcccctacctgctctcaaggagaacgtgaagcgtgtcatgttttactgctgagacgctggtgggctgccttcgccaaggaaaatgccctggagcattcccatgtacccgcactgtttcggtgatacagtactatctaacgccgattttgcgcgttaagacttccagtgatctgggaaatttcttgtacgactgttgtagtgttgtgtattcgtaatgtgatgacgcggcagttcttctaggagcttagtgccgtgtaaaatatctgttgtaagttgtaacctgtcaccctctagtgttatgtcatgatgaaccaaattatttgttgtcattccatgtacttcgccaagtatttgttgtcacgatgttctaggatgattttttttttttataa

SEQ ID NO: 221879 - DNA, 3726 bp, Zea Mays
ctgcatcctgcattacccccctcgcgcgtccctctccgatccctcaccccccagattcctcctgcctacgctcgcgggtctctcctgcccgcccgatttcgcctcggacctcgtcgtccatggtgtgctttttcttcgtggcgatttgctgcgcctcgtcgccggcgaccttggcgcttgcaggcggccgactgcagtagggcaggtctgcttccacagacgtcttcgccgtttgagaggtggcgcccacctccaccgtctcgtctgctgcctgctctagtggtgccggacctggggtggagcggagatccacaagggcttggattgctttcgttgtcttgctggctttgaggtggagatgacactaagttgaaatttttatcacacgaggaagcaagaacaggaaaaaaaatcacatttcagtgttgcactctgtggagggttcattgttggtccaccaaactactgcagtgctggagggtttttgttgaagtcctcttcatgttcaccatttctaaattgtcataggctcatagcattgtagctgatcagtcttcaagatcttcctatgagtacatagataaatcatcatcgtatctgtgttaagtatgccaccatggtggggaaaatcttcatccaaagaagtgaaaaagtctgccaaagaaaacctcatcgacacatttcagcgtctcataagttcaaatgagcaaaagggaagcagaaaatcacgaagtagtcgtagacatggtaaagacacagctggtgacaaaggttgctggtccactgcccaatcccgctcaacatccccttcaaaagaggtctctcgatgtcagagctttgcagcagatagaccacatgcacagccacttcctcttcccaaatcacgtgctaaggtgacacgtacttcttctgatattaccaactcaaagtccactttggaaaagcatggcaaaggacaactgcttccactccctccaattcagcctaaaaaaagacctgaagctactgaacctgttactgaagtagctactgcttcggtctccagcaactgttctattgacagtgatgatcctggtgattctcagcttcagagtcctgtgggaaatgaggctgaaaatgcgactagaattactgcaacaagtagttcaagtgttgtgcgcaaagaatgttctagtgctattaccagaaagaacacaaaggaagttgcaaagccaaacagtgcttttctcagtaaccaaatcctgtcaacatctccaagaggtacctttgctgatggttatcaatccaatttacaaagcccccgacagattgccctggagagtgctccgaatagtttgatgtcaagtccttctcgaagcccaagaaatatatgtcctgttcagattccaacttcagctttttgggcaataaaacctcatactgatgtaactttccttgggtctggtcagtgctccagtccaggttctggtcagacatctgggcataattcagtgggaggtgatatgctaggcccaatcttttggcagcctagccgaggtagtccagagtgttcaccaattccaagcccaagaatgacgagtcctggtccaagttctcgggtgcatagtggaagtgtctctcctttgcatccaagagctggtggggtcactcctgaatccccaacaaatcgacatgctgaagggaacaagaagcaaacccacagattgccgcttccgccattaagcattgctaatagttctacctttttgccaaacagctctaacccaactagtcctatatctcgtagtcctggtagaacagagaatccaccgagtcctggttcacggtggaagaagggaaaattgattggccgtgggacatttggccatgtatatgctggttttaacagtgacagaggtgaaatgtgtgcgatgaaggaggttacccttttctcagatgatcctaaatcaaaagaaagtgcaaaacagctctgccaggaaatatcacttctgagccgactgcagcacccaaacattgtgcgatactatggatctgaaactgttgatgataagctttacatatacctggagtatgtttctggtggatctatacataagcttctccaagagtatggacagtttggtgaacaagccatttgcagttatactaagcaaatacttttgggcctagcttatttgcatgcaaagaatacagtacacagagacatcaaaggcgcaaacatattggtagaccctaatggccgcgtgaagctcgctgactttgggatggcaaaacatatcaatgggcagcagtgccctttctcatttaagggtagcccgtactggatggctcctgaggttataaaaaatgctagcggatgtaaccttgcagttgatatatggagtttaggatgcacagtcctagagatggctacttcaaaaccaccatggagccaatatgaagggattgccgcaatgtttaagataggaaacagtaaggagcttccaccaataccggatcacctctcagaagaagggaaagacttcataagacagtgcttgcaacgtgatccatccagccgtccaacagcagtggatcttctgcagcatccattcgtacaaaatgcaccgccacttgaaaaatcatctgcctctcatccactggaacagttgacggctatatcatgcagaacaaattcgaaggtggttgagcatgccagaaatatgtcctcgcttggtttggaaggccaatcaattttgcagagaagagctgccaaattttctttgccaaatagtgatatccatatacggagtaatatatcttgtcctgtatctccatgtggaagtcctcttctaagatcaagatctccacagcatcaaaatggtagaatgtcaccttctccaatttgcagccccaggactacttcgggtgcttcaactcctctgactggtggtagtggagctgttcctttaaaccatgtgaggcaaccagcttacagaaatgagggcttcacggtcacatcaagaggttttgatgaccacatgcctagccggcctgttgatccagtacatggacgttttattcgagtgcagcaattttccgtgggtcggcaggagagggtagtctctgaagttgacattctgagctctcaatatggaaagatgagacatgcaaatgtgtgggatccgcatgataggccattaccttctgagcgttcctctcaacagtgctttgggaatcatgcgaagctaaaaccttcactggacttgagatctggtcctcggcaacctgggcgcaatcatggccattgattctgtagcaaaagttaatggataagctttcagtcgtgtctatgtgatagctagtggtcctaagctggttcactgaaacctttaattgtatcatagtagaagatgttcattaattatttcagatgctgacagttggcagtggataaagattctcaaatgtcaatctcatattcccattactctaaagaagatgagacatgccctatcaggaaggggatgttgtatactcaaggacccaaaacagtgactctgaacctgtatactcttactctcgtatctacaacaatttagttttcgttttcttctatgggtttggaggccattgtacagaagggaactctcaacaagaaatccagattacatggcacaggcgaaagcaaaacaagctttagtcggtgacaccagtgaaagaaaggcaagcagccaaggagtcaag

SEQ ID NO: 221880 - DNA, 3927 bp, Zea Mays
ctgcatcctgcattacccccctcgcgcgtccctctccgatccctcaccccccagattcctcctgcctacgctcgcgggtctctcctgcccgcccgatttcgcctcggacctcgtcgtccatggtgtgctttttcttcgtggcgatttgctgcgcctcgtcgccggcgaccttggcgcttgcaggcggccgactgcagtagggcaggtctgcttccacagacgtcttcgccgtttgagaggtggcgcccacctccaccgtctcgtctgctgcctgctctagtggtgccggacctggggtggagcggagatccacaagggcttggattgctttcgttgtcttgctggctttgaggtggagatgacactaagttgaaatttttatcacacgaggaagcaagaacaggaaaaaaaatcacatttcagtgttgcactctgtggagggttcattgttggtccaccaaactactgcagtgctggagggtttttgttgaagtcctcttcatgttcaccatttctaaattgtcataggctcatagcattgtagctgatcagtcttcaagatcttcctatgagtacatagataaatcatcatcgtatctgtgttaagtatgccaccatggtggggaaaatcttcatccaaagaagtgaaaaagtctgccaaagaaaacctcatcgacacatttcagcgtctcataagttcaaatgagcaaaagggaagcagaaaatcacgaagtagtcgtagacatggtaaagacacagctggtgacaaaggttgctggtccactgcccaatcccgctcaacatccccttcaaaagaggtctctcgatgtcagagctttgcagcagatagaccacatgcacagccacttcctcttcccaaatcacgtgctaaggtgacacgtacttcttctgatattaccaactcaaagtccactttggaaaagcatggcaaaggacaactgcttccactccctccaattcagcctaaaaaaagacctgaagctactgaacctgttactgaagtagctactgcttcggtctccagcaactgttctattgacagtgatgatcctggtgattctcagcttcagagtcctgtgggaaatgaggctgaaaatgcgactagaattactgcaacaagtagttcaagtgttgtgcgcaaagaatgttctagtgctattaccagaaagaacacaaaggaagttgcaaagccaaacagtgcttttctcagtaaccaaatcctgtcaacatctccaagaggtacctttgctgatggttatcaatccaatttacaaagcccccgacagattgccctggagagtgctccgaatagtttgatgtcaagtccttctcgaagcccaagaaatatatgtcctgttcagattccaacttcagctttttgggcaataaaacctcatactgatgtaactttccttgggtctggtcagtgctccagtccaggttctggtcagacatctgggcataattcagtgggaggtgatatgctaggcccaatcttttggcagcctagccgaggtagtccagagtgttcaccaattccaagcccaagaatgacgagtcctggtccaagttctcgggtgcatagtggaagtgtctctcctttgcatccaagagctggtggggtcactcctgaatccccaacaaatcgacatgctgaagggaacaagaagcaaacccacagattgccgcttccgccattaagcattgctaatagttctacctttttgccaaacagctctaacccaactagtcctatatctcgtagtcctggtagaacagagaatccaccgagtcctggttcacggtggaagaagggaaaattgattggccgtgggacatttggccatgtatatgctggttttaacagtgacagaggtgaaatgtgtgcgatgaaggaggttacccttttctcagatgatcctaaatcaaaagaaagtgcaaaacagctctgccaggaaatatcacttctgagccgactgcagcacccaaacattgtgcgatactatggatctgaaactgttgatgataagctttacatatacctggagtatgtttctggtggatctatacataagcttctccaagagtatggacagtttggtgaacaagccatttgcagttatactaagcaaatacttttgggcctagcttatttgcatgcaaagaatacagtacacagagacatcaaaggcgcaaacatattggtagaccctaatggccgcgtgaagctcgctgactttgggatggcaaaacatatcaatgggcagcagtgccctttctcatttaagggtagcccgtactggatggctcctgaggttataaaaaatgctagcggatgtaaccttgcagttgatatatggagtttaggatgcacagtcctagagatggctacttcaaaaccaccatggagccaatatgaagggattgccgcaatgtttaagataggaaacagtaaggagcttccaccaataccggatcacctctcagaagaagggaaagacttcataagacagtgcttgcaacgtgatccatccagccgtccaacagcagtggatcttctgcagcatccattcgtacaaaatgcaccgccacttgaaaaatcatctgcctctcatccactggaacagttgacggctatatcatgcagaacaaattcgaaggtggttgagcatgccagaaatatgtcctcgcttggtttggaaggccaatcaattttgcagagaagagctgccaaattttctttgccaaatagtgatatccatatacggagtaatatatcttgtcctgtatctccatgtggaagtcctcttctaagatcaagatctccacagcatcaaaatggtagaatgtcaccttctccaatttgcagccccaggactacttcgggtgcttcaactcctctgactggtggtagtggagctgttcctttaaaccatgtgaggcaaccagcttacagaaatgagggcttcacggtcacatcaagaggttttgatgaccacatgcctagccggcctgttgatccagtacatggacgttttattcgagtgcagcaattttccgtgggtcggcaggagagggtagtctctgaagttgacattctgagctctcaatatggaaagatgagacatgcaaatgtgtgggatccgcatgataggccattaccttctgagcgttcctctcaacagtgctttgggaatcatgcgaagctaaaaccttcactggacttgagatctggtcctcggcaacctgggcgcaatcatggccattgattctgtagcaaaagttaatggataagctttcagtcgtgtctatgtgatagctagtggtcctaagctggttcactgaaacctttaattgtatcatagtagaagatgttcattaattatttcagatgctgacagttggcagtggataaagattctcaaatgtcaatctcatattcccattactctaaagaagatgagacatgccctatcaggaaggggatgttgtatactcaaggacccaaaacagtgactctgaacctgtatactcttactctcgtatctacaacaatttagttttcgttttcttctatgggtttggaggccattgtacagaagggaactctcaacaagaaatccagattacatggcacaggcgaaagcaaaacggcgcagcagtgagcaccagccctgaagagacgacgaataggaatcgacagagaaactaggcgtgggcagacaagaagacatcacaggaagacgcccgttcttcggactggcatgtctcggcacggccacggcagcttaagacctgctcttgaacgggatggctctgatgatcacctggtggtagatggcagccagagcagcgccaatgaaggggccgacccagaagatccactgcaaaacaatcataggttat

SEQ ID NO: 221881 - DNA, 1328 bp, Zea Mays
cttctcttccgttccagaagggacagcgtccgtgtcttccttgctcactctcctcaccactaccctgacctgacctgctcccaagctccctctgcctgcctttataaatcaccggggcagagcgcctcagtgacacacgccgctgctccaagaaaccaccgccgagcccaaccgcacaagcgcgcgaggcaggagagagagagaggcggggagcaaaacaatggaggggaaagaggaggacgtgcgcctgggcgccaacaagttctcggagcgccagcccatcgggacggcggcgcagggcgccgctgacgacaaggactacaaggagcccccgccggcgccgctgttcgagcccggggagctcaagtcctggtccttctaccgcgcgggcatcgccgagttcgtcgccaccttcctcttcctctacatcaccatcctcaccgtcatgggcgtctccaagtccacctccaagtgcgccaccgtcggcatccagggcatcgcctggtccttcggaggaatgatcttcgcgctcgtctactgcaccgccggcatctccgatccttgccccactgccaattgggttcgcggtgttcctggtccaccttgccaccatccccattactggcactggcatcaacccagctaggagccttggcgctgccatcatctacaacagggatcacgcctggaacgaccattggatcttctgggtcggccccttcattggcgctgctctggctgccatctaccaccaggtgatcatcagagccatcccgttcaagagcaggtcttaagctgccgtggccgtgccgagacatgccagtccgaagaacgggcgtcttcctgtgatgtcttcttgtctgcccacgcctagtttctctgtcgattcctattcgtcgtctcttcagggctggtgctcactgctgcgccgttctgttaaccgaaacaagaactctgtgtattcctgtaccgagctgtgcatgtttttttctttccatcgtggagaatttaagttattatccgtttgctgcaaggtttgccgtctcattttatgcgttgggatgttggcaagaaagggcagatgtcatgtgagaatttaagttaagtgaaatcgattcagggttttcttggtttcagtttcaacagaaatcggcactggctggattcgcattcacatcggatatgcctcctggaaactaatagtaatttgaaacgatcttaaaagcaacatagaacgtagcgtgaccactagtggttcaaaacagctccagtgcttcatttgaatctacagcgatggtggacctggtgtgtgtgggtggccttctggc

SEQ ID NO: 221882 - DNA, 1561 bp, Zea Mays
gacagcgtccgtgtcttccttgctcactctcctcaccactaccctgacctgacctgctcccaagctccctctgcctgcctttataaatcaccggggcagagcgcctcagtgacacacgccgctgctccaagaaaccaccgccgagcccaaccgcacaagcgcgcgaggcaggagagagagagaggcggggagcaaaacaatggaggggaaagaggaggacgtgcgcctgggcgccaacaagttctcggagcgccagcccatcgggacggcggcgcagggcgccgctgacgacaaggactacaaggagcccccgccggcgccgctgttcgagcccggggagctcaagtcctggtccttctaccgcgcgggcatcgccgagttcgtcgccaccttcctcttcctctacatcaccatcctcaccgtcatgggcgtctccaagtccacctccaagtgcgccaccgtcggcatccagggcatcgcctggtccttcggaggaatgatcttcgcgctcgtctactgcaccgccggcatctccgccaggaagctgtccctgactagggccctcttctacatcatcatgcaatgcctgggtgccatctgtggagctggagtggtgaagggcttccagcagggactttacatgggcaacggtggtggcgccaatgttgtcgcacctggctacaccaagggtgatggccttggcgctgagattgttggcaccttcatcctagtctacaccgtcttctcagccaccgatgccaagaggaatgccagggactcccatgttcctatccttgccccactgccaattgggttcgcggtgttcctggtccaccttgccaccatccccattactggcactggcatcaacccagctaggagccttggcgctgccatcatctacaacagggatcacgcctggaacgaccattggatcttctgggtcggccccttcattggcgctgctctggctgccatctaccaccaggtgatcatcagagccatcccgttcaagagcaggtcttaagctgccgtggccgtgccgagacatgccagtccgaagaacgggcgtcttcctgtgatgtcttcttgtctgcccacgcctagtttctctgtcgattcctattcgtcgtctcttcagggctggtgctcactgctgcgccgttctgttaaccgaaacaagaactctgtgtattcctgtaccgagctgtgcatgtttttttctttccatcgtggagaatttaagttattatccgtttgctgcaaggtttgccgtctcattttatgcgttgggatgttggcaagaaagggcagatgtcatgtgagaatttaagttaagtgaaatcgattcagggttttcttggtttcagtttcaacagaaatcggcactggctggattcgcattcacatcggatatgcctcctggaaactaatagtaatttgaaacgatcttaaaagcaacatagaacgtagcgtgaccactagtggttcaaaacagctccagtgcttcatttgaatctacagcgatggtggacctggtgtgtgtgggtggccttctggc

SEQ ID NO: 221883 - DNA, 1440 bp, Zea Mays
ctcactctcctcaccactaccctgacctgacctgctcccaagctccctctgcctgcctttataaatcaccggggcagagcgcctcagtgacacacgccgctgctccaagaaaccaccgccgagcccaaccgcacaagcgcgcgaggcaggagagagagagaggcggggagcaaaacaatggaggggaaagaggaggacgtgcgcctgggcgccaacaagttctcggagcgccagcccatcgggacggcggcgcagggcgccgctgacgacaaggactacaaggagcccccgccggcgccgctgttcgagcccggggagctcaagtcctggtccttctaccgcgcgggcatcgccgagttcgtcgccaccttcctcttcctctacatcaccatcctcaccgtcatgggcgtctccaagtccacctccaagtgcgccaccgtcggcatccagggcatcgcctggtccttcggaggaatgatcttcgcgctcgtctactgcaccgccggcatctccggaggacacatcaacccagctgtgactttcgggctgttcttagccaggaagctgtccctgactagggccctcttctacatcatcatgcaatgcctgggtgccatctgtggagctggagtggtgaagggcttccagcagggactttacatgggcaacggtggtggcgccaatgttgtcgcacctggctacaccaagggtgatggccttggcgctgagattgttggcaccttcatcctagtctacaccgtcttctcagccaccgatgccaagaggaatgccagggactcccatgttccttggatcttctgggtcggccccttcattggcgctgctctggctgccatctaccaccaggtgatcatcagagccatcccgttcaagagcaggtcttaagctgccgtggccgtgccgagacatgccagtccgaagaacgggcgtcttcctgtgatgtcttcttgtctgcccacgcctagtttctctgtcgattcctattcgtcgtctcttcagggctggtgctcactgctgcgccgttctgttaaccgaaacaagaactctgtgtattcctgtaccgagctgtgcatgtttttttctttccatcgtggagaatttaagttattatccgtttgctgcaaggtttgccgtctcattttatgcgttgggatgttggcaagaaagggcagatgtcatgtgagaatttaagttaagtgaaatcgattcagggttttcttggtttcagtttcaacagaaatcggcactggctggattcgcattcacatcggatatgcctcctggaaactaatagtaatttgaaacgatcttaaaagcaacatagaacgtagcgtgaccactagtggttcaaaacagctccagtgcttcatttgaatctacagcgatggtggacctggtgtgtgtgggtggccttctggc

SEQ ID NO: 221884 - DNA, 1443 bp, Zea Mays
ctcactctcctcaccactaccctgacctgacctgctcccaagctccctctgcctgcctttataaatcaccggggcagagcgcctcagtgacacacgccgctgctccaagaaaccaccgccgagcccaaccgcacaagcgcgcgaggcaggagagagagagaggcggggagcaaaacaatggaggggaaagaggaggacgtgcgcctgggcgccaacaagttctcggagcgccagcccatcgggacggcggcgcagggcgccgctgacgacaaggactacaaggagcccccgccggcgccgctgttcgagcccggggagctcaagtcctggtccttctaccgcgcgggcatcgccgagttcgtcgccaccttcctcttcctctacatcaacccagctgtgactttcgggctgttcttagccaggaagctgtccctgactagggccctcttctacatcatcatgcaatgcctgggtgccatctgtggagctggagtggtgaagggcttccagcagggactttacatgggcaacggtggtggcgccaatgttgtcgcacctggctacaccaagggtgatggccttggcgctgagattgttggcaccttcatcctagtctacaccgtcttctcagccaccgatgccaagaggaatgccagggactcccatgttcctatccttgccccactgccaattgggttcgcggtgttcctggtccaccttgccaccatccccattactggcactggcatcaacccagctaggagccttggcgctgccatcatctacaacagggatcacgcctggaacgaccattggatcttctgggtcggccccttcattggcgctgctctggctgccatctaccaccaggtgatcatcagagccatcccgttcaagagcaggtcttaagctgccgtggccgtgccgagacatgccagtccgaagaacgggcgtcttcctgtgatgtcttcttgtctgcccacgcctagtttctctgtcgattcctattcgtcgtctcttcagggctggtgctcactgctgcgccgttctgttaaccgaaacaagaactctgtgtattcctgtaccgagctgtgcatgtttttttctttccatcgtggagaatttaagttattatccgtttgctgcaaggtttgccgtctcattttatgcgttgggatgttggcaagaaagggcagatgtcatgtgagaatttaagttaagtgaaatcgattcagggttttcttggtttcagtttcaacagaaatcggcactggctggattcgcattcacatcggatatgcctcctggaaactaatagtaatttgaaacgatcttaaaagcaacatagaacgtagcgtgaccactagtggttcaaaacagctccagtgcttcatttgaatctacagcgatggtggacctggtgtgtgtgggtggccttctggc

SEQ ID NO: 221885 - DNA, 1092 bp, Zea Mays
cttagctcagtaacaacccttcatggaggacacatcaacccagctgtgactttcgggctgttcttagccaggaagctgtccctgactagggccctcttctacatcatcatgcaatgcctgggtgccatctgtggagctggagtggtgaagggcttccagcagggactttacatgggcaacggtggtggcgccaatgttgtcgcacctggctacaccaagggtgatggccttggcgctgagattgttggcaccttcatcctagtctacaccgtcttctcagccaccgatgccaagaggaatgccagggactcccatgttcctatccttgccccactgccaattgggttcgcggtgttcctggtccaccttgccaccatccccattactggcactggcatcaacccagctaggagccttggcgctgccatcatctacaacagggatcacgcctggaacgaccattggatcttctgggtcggccccttcattggcgctgctctggctgccatctaccaccaggtgatcatcagagccatcccgttcaagagcaggtcttaagctgccgtggccgtgccgagacatgccagtccgaagaacgggcgtcttcctgtgatgtcttcttgtctgcccacgcctagtttctctgtcgattcctattcgtcgtctcttcagggctggtgctcactgctgcgccgttctgttaaccgaaacaagaactctgtgtattcctgtaccgagctgtgcatgtttttttctttccatcgtggagaatttaagttattatccgtttgctgcaaggtttgccgtctcattttatgcgttgggatgttggcaagaaagggcagatgtcatgtgagaatttaagttaagtgaaatcgattcagggttttcttggtttcagtttcaacagaaatcggcactggctggattcgcattcacatcggatatgcctcctggaaactaatagtaatttgaaacgatcttaaaagcaacatagaacgtagcgtgaccactagtggttcaaaacagctccagtgcttcatttgaatctacagcgatggtggacctggtgtgtgtgggtggccttctggc

SEQ ID NO: 221886 - DNA, 836 bp, Zea Mays
cttatgtcttttggggactggaatttagctgattccttaatcttgtgtttcaacaaattgaaaatatccttgccccactgccaattgggttcgcggtgttcctggtccaccttgccaccatccccattactggcactggcatcaacccagctaggagccttggcgctgccatcatctacaacagggatcacgcctggaacgaccattggatcttctgggtcggccccttcattggcgctgctctggctgccatctaccaccaggtgatcatcagagccatcccgttcaagagcaggtcttaagctgccgtggccgtgccgagacatgccagtccgaagaacgggcgtcttcctgtgatgtcttcttgtctgcccacgcctagtttctctgtcgattcctattcgtcgtctcttcagggctggtgctcactgctgcgccgttctgttaaccgaaacaagaactctgtgtattcctgtaccgagctgtgcatgtttttttctttccatcgtggagaatttaagttattatccgtttgctgcaaggtttgccgtctcattttatgcgttgggatgttggcaagaaagggcagatgtcatgtgagaatttaagttaagtgaaatcgattcagggttttcttggtttcagtttcaacagaaatcggcactggctggattcgcattcacatcggatatgcctcctggaaactaatagtaatttgaaacgatcttaaaagcaacatagaacgtagcgtgaccactagtggttcaaaacagctccagtgcttcatttgaatctacagcgatggtggacctggtgtgtgtgggtggccttctggc

SEQ ID NO: 221887 - DNA, 1428 bp, Zea Mays
acaaaacgtgcctttcctcatagcccaagcccaccgtcagcacgcttacactcgctcgtttcccaacgcgcacccaacatggccgctccgaccgccgccgtcgacactgccgccccgcctcctcctccctcggcagaggccgcggctgcacctgtactggatcaaaaggtctctcctgctgctgcccctcagcccgatgcgcccgcgcccgcgcccgcgccgaagaagcggaagctcgaggaagcggggttccacacctccgaatactacaagatccgtgccgtcgtcgccgatctgcgtgttcgcttcgtccaggttcacgaagctactgatttccgcaacacggatgctgcacgtgagattatgagagtccgtttcagagtttcagatctctgggcattataggtcggaggtgaagacttaaaacgcagccatcagagttgtcggaatctatttgcagggtggtcccacagggacttcataaaacttagtgcctacacatggtggtgtcatacacatgacgaggacgaaacattttgtggtgcgagtggcatagatgtcaacagaaataaatgtggtaatggatctatccaagaaaatgaggctcaagcttggtgctacttctgaacctgtgaaaccattggagaagccttcagttggacttgtgaaggatgagcttgtgaaaccatcagagaagccttcatctggacctgtgacgggggaacctgtaaagccaccggagaagccttcagctggacctgtgaaggacgagcctatgaaaccatcggagaagccttctgctgaacctgtgaagaacgaacccagtgagccagctctagctggagaaaacaatcgagctcccagggtaagccagactacaagttctccaaataatgcaggtattgatgcaccagtagtcaagcatgataactcagaggcacggaagtgaagacgatagaggaagcccaaagtaccgatccatcgagatagcatatcacgcaaatctgctggacaaaaatgcagagtgaccggttgattccataggggctcagatttttcttgcccctatcgggggtaaaattattcgctttgggctaatggacgaagagtcgtggacacatcgagatccaaactagattgtcttcagttgttcatatccattcattcagtactatgttgctaatttcccatgaacaattttatcttcaaatagctactctctaactgcatcattctatacatcacattggcctgcagcctgctgtatgaagttaattgccagtcaatttcaagtcgtgcttgagaagaggtgatggaattgcaagcgagttgtaaggctttctggctcacctcacatttcaaacttcattctatgtgcagtccatggtgtaaaacagtattttgcacaaccatataactctactggag

SEQ ID NO: 221888 - DNA, 1339 bp, Zea Mays
cacaaaacgtgcctttcctcatagcccaagcccaccgtcagcacgcttacactcgctcgtttcccaacgcgcacccaacatggccgctccgaccgccgccgtcgacactgccgccccgcctcctcctccctcggcagaggccgcggctgcacctgtactggatcaaaaggtctctcctgctgctgcccctcagcccgatgcgcccgcgcccgcgcccgcgccgaagaagcggaagctcgaggaagcggggttccacacctccgaatactacaagatccgtgccgtcgtcgccgatctgcgtgttcgcttcgtccaggttcacgaagctactgatttccgcaacacggatgctgcacgtgagattatgagagggtggtcccacagggacttcataaaacttagtgcctacacatggtggtgtcatacacatgacgaggacgaaacattttgtggtgcgagtggcatagatgtcaacagaaataaatgtggtaatggatctatccaagaaaatgaggctcaagcttggtgctacttctgaacctgtgaaaccattggagaagccttcagttggacttgtgaaggatgagcttgtgaaaccatcagagaagccttcatctggacctgtgacgggggaacctgtaaagccaccggagaagccttcagctggacctgtgaaggacgagcctatgaaaccatcggagaagccttctgctgaacctgtgaagaacgaacccagtgagccagctctagctggagaaaacaatcgagctcccagggtaagccagactacaagttctccaaataatgcaggtattgatgcaccagtagtcaagcatgataactcagaggcacggaagtgaagacgatagaggaagcccaaagtaccgatccatcgagatagcatatcacgcaaatctgctggacaaaaatgcagagtgaccggttgattccataggggctcagatttttcttgcccctatcgggggtaaaattattcgctttgggctaatggacgaagagtcgtggacacatcgagatccaaactagattgtcttcagttgttcatatccattcattcagtactatgttgctaatttcccatgaacaattttatcttcaaatagctactctctaactgcatcattctatacatcacattggcctgcagcctgctgtatgaagttaattgccagtcaatttcaagtcgtgcttgagaagaggtgatggaattgcaagcgagttgtaaggctttctggctcacctcacatttcaaacttcattctatgtgcagtccatggtgtaaaacagtattttgcacaaccatataactctactggag

SEQ ID NO: 221889 - DNA, 1594 bp, Zea Mays
gttgggcctgcccacctcccggccggtccgccgcgcggttccagtttcgcctctcgtcgccggtcctggcgagccccgcctccttgatctccgaccagcagcttccccactgcccactccccagccccggacgtgcccttcgccggtgctgtcatggcgttcggccgacggagccccggatcctcgcggcaccctcccgcgctcaccatcgtcacggcgctactcctcgcctccctctacttcgccgccgcggcggcggctctatcgcccaccgacgcgatgcacaacaacaactgggccgtgctcgtgtgtacctcccgcttctggtttaattatcgacacatggcgaatacattgtccctatacaggactgttaagagattaggaatacctgatgagcgaatcatacttatgttggcggacgatatggcctgtaacccaaggaacagctatcctgcccaagttttcaataatgagaaccaccagctaaatctctatggtgacaatgttgaggtcgattatcgagggtatgaggtgacagttgaaaatttcttgagagttttgactggccgacatgaaagtgctgtaccaagatcgaagcgtcttcttagtgatgaaggaagtcatatacttttgtacatgactggacatggtggtgatgaatttttgaagttccaagattctgaagagcttcagagccatgacttagcagatgctgtgaagcaaatgaaggagaagcatagatttaaagagctgctgataatggtagatacctgccaagctgctactctcttttcacagcttcagtcacctggtgttttggcgattggtagtagcatgaagggtgaaaactcttattctcaccatcttgattcagatgtaggtgtttctgttgtggataggtttacctattatacacttgctttctttgagaaactgaacatgtatagcaatgcctcactgaacagccttttcacctcatacaatccttccatgctgttgtctactgcatattatcgaatggatctttatgaacgtcccttaaatgaggtttcttggctgcgcatgacaatgaaactccaatgtccacgggagataaccttgatgatcatttcatgttaaagggcagggctatcgcacgaagatcaaccatagaaaaggaggcacaattaacaccgcatggatggactgaagttctggctgaacagctggagggaaagaatactgatactgttgtgatgtatggtctgggagctatgggtatactgttggcactttcaacctggttatcaatgtaggcaccaaaaaagtgtggttcgtagtctcttacgctatccatctctggtccgcgtgcgagagagagaaaagagataatatgtttgggaggtcttttagattttttctcttggtttttaaattcattaacgatgattagagttctttagaaaatgctgtatgtagttctttagggattactgtgttatcgttttatttatttaacatgatcttttgggaaagacttgtgcatatggaagtttggttatcttgatagccatttgagtatcttgtctccgtgcaacttttgatatataac

SEQ ID NO: 221890 - DNA, 1661 bp, Zea Mays
tggagttgggcctgcccacctcccggccggtccgccgcgcggttccagtttcgcctctcgtcgccggtcctggcgagccccgcctccttgatctccgaccagcagcttccccactgcccactccccagccccggacgtgcccttcgccggtgctgtcatggcgttcggccgacggagccccggatcctcgcggcaccctcccgcgctcaccatcgtcacggcgctactcctcgcctccctctacttcgccgccgcggcggcggctctatcgcccaccgacgcgatgcacaacaacaactgggccgtgctcgtgtgtacctcccgcttctggtttaattatcgacacatggcgaatacattgtccctatacaggactgttaagagattaggaatacctgatgagcgaatcatacttatgttggcggacgatatggcctgtaacccaaggaacagctatcctgcccaagttttcaataatgagaaccaccagctaaatctctatggtgacaatgttgaggtcgattatcgagggtatgaggtgacagttgaaaatttcttgagagttttgactggccgacatgaaagtgctgtaccaagatcgaagcgtcttcttagtgatgaaggaagtcatatacttttgtacatgactggacatggtggtgatgaatttttgaagttccaagattctgaagagcttcagagccatgacttagcagatgctgtgaagcaaatgaaggagaagcatagatttaaagagctgctgataatggtagatacctgccaagctgctactctcttttcacacttcagtcacctggtgttttggcgattggtagtagcatgaagggtgaaaactcttattctcaccatcttgattcagatgtaggtgtttctgttgtggataggtttacctattatacacttgctttctttgagaaactgaacatgtatagcaatgcctcactgaacagccttttcacctcatacaatccttccatgctgttgtctactgcatattatcgaatggatctttatgaacgtcccttaaatgaggtgcctgtgacaaatttttttggatcagtcatgaagactctccacactgattcagcctacacaggtttcttggctgcgcatgacaatgaaactccaatgtccacgggagataaccttgatgatcatttcatgttaaagggcagggctatcgcacgaagatcaaccatagaaaaggaggcacaattaacaccgcatggatggactgaagttctggctgaacagctggagggaaagaatactgatactgttgtgatgtatggtctgggagctatgggtatactgttggcactttcaacctggttatcaatgtaggcaccaaaaaagtgtggttcgtagtctcttacgctatccatctctggtccgcgtgcgagagagagaaaagagataatatgtttgggaggtcttttagattttttctcttggtttttaaattcattaacgatgattagagttctttagaaaatgctgtatgtagttctttagggattactgtgttatcgttttatttatttaacatgatcttttgggaaagacttgtgcatatggaagtttggttatcttgatagccatttgagtatcttgtctccgtgcaacttttgatatataac

SEQ ID NO: 221891 - DNA, 1690 bp, Zea Mays
tcgctctccttctaccagcctgctccggtcctcttggagttgggcctgcccacctcccggccggtccgccgcgcggttccagtttcgcctctcgtcgccggtcctggcgagccccgcctccttgatctccgaccagcagcttccccactgcccactccccagccccggacgtgcccttcgccggtgctgtcatggcgttcggccgacggagccccggatcctcgcggcaccctcccgcgctcaccatcgtcacggcgctactcctcgcctccctctacttcgccgccgcggcggcggctctatcgcccaccgacgcgatgcacaacaacaactgggccgtgctcgtgtgtacctcccgcttctggtttaattatcgacacatggcgaatacattgtccctatacaggactgttaagagattaggaatacctgatgagcgaatcatacttatgttggcggacgatatggcctgtaacccaaggaacagctatcctgcccaagttttcaataatgagaaccaccagctaaatctctatggtgacaatgttgaggtcgattatcgagggtatgaggtgacagttgaaaatttcttgagagttttgactggccgacatgaaagtgctgtaccaagatcgaagcgtcttcttagtgatgaaggaagtcatatacttttgtacatgactggacatggtggtgatgaatttttgaagttccaagattctgaagagcttcagagccatgacttagcagatgctgtgaagcaaatgaaggagaagcatagatttaaagagctgctgataatggtagatacctgccaagctgctactctcttttcacagtcacctggtgttttggcgattggtagtagcatgaagggtgaaaactcttattctcaccatcttgattcagatgtaggtgtttctgttgtggataggtttacctattatacacttgctttctttgagaaactgaacatgtatagcaatgcctcactgaacagccttttcacctcatacaatccttccatgctgttgtctactgcatattatcgaatggatctttatgaacgtcccttaaatgaggtgcctgtgacaaatttttttggatcagtcatgaagactctccacactgattcagcctacacaggtttcttggctgcgcatgacaatgaaactccaatgtccacgggagataaccttgatgatcatttcatgttaaagggcagggctatcgcacgaagatcaaccatagaaaaggaggcacaattaacaccgcatggatggactgaagttctggctgaacagctggagggaaagaatactgatactgttgtgatgtatggtctgggagctatgggtatactgttggcactttcaacctggttatcaatgtaggcaccaaaaaagtgtggttcgtagtctcttacgctatccatctctggtccgcgtgcgagagagagaaaagagataatatgtttgggaggtcttttagattttttctcttggtttttaaattcattaacgatgattagagttctttagaaaatgctgtatgtagttctttagggattactgtgttatcgttttatttatttaacatgatcttttgggaaagacttgtgcatatggaagtttggttatcttgatagccatttgagtatcttgtctccgtgcaacttttgatatataac

SEQ ID NO: 221892 - DNA, 1524 bp, Zea Mays
ggaaactttcgtccgactccctgtcgccgatctacacttcaacctcgccgcctcaacgctctggcaatctcttcctccactgttgtctagtgcctagttggagcctcttccctgccgtcgtccagtgccaggcttcaacctccccgtcgctgtcaactctcttcctacacggttgtccagtgcctgaacctgtttctcgctgtcgtgcagtgcctaggacttggtccgtgctgttgtccaggagattcaacctccacccccaccggtaatcaaggcaacttatggcacctcatggatcccaggcagccatcaacaagaggccacaggtctttgttgcatgctgccataggtgccattggaggagtccgacctgcacttcgccaagaatctagaagaagcccaatggattttagtactgctgcaaccccaccaacgtgcacacaacatctatctcaacatgagtcgacggtcggcggtgagaatccctcctggatgtctgattatagcactaccacctcccaggggggttattacacttctgtactcaaccaggaggatgcaaatgttttcagatctgatgttgttgaggaccttgataatgaagtggcagagttgccagggctgaatgaaataaactcgcagccgattaagaggggccgatccaagaatttcagtgaagaggaggacctaatgttggtttctgcttatcttaatgtaagcaaagatcccattactggtagagatcaaaaagaaggcacattttgggagagagtatggaaatattttaacaagaacaggaaattcaagtccgatcgtaattggtcatcattgaaacatcgatggcttgctattcagaaggaagtgaatatttttcaaggttactatgatgccatagaaaggaaaaatcaaagtggcaagacgagtgatgacaagcttgctgaagcaaaggcagaatttcgggaaacacaacatgagagggcattctctgtcttccatgtgtggatgattcttaggcatgagccaaagtggccattcaaagaatcaaagctaaaagacccacaagaaacaaataatgctagtagtgatgctcctatcaacattgatagaccaccagggaggaaagctgagaaggaaaaggcacgggctagaaagcatggtgtctgtgatgttgatggtgatcctttctttgaagaattaaaaaagacgagagaatcacgagaagaaaatgacaaagaccgaaaggcccttgatgagaagttctatgagttggaaaagattaaggttgaagcagagcgagatcgtcaggacaaagagataatgcaaactgacacaagcacaatggatgacgaatcaaaacaataattcaagttgatgaaaaaaaagattttgagtcgtcgtttcgggagtagtcagccataggtgatttagtttttagaattttagttcattattgccataagtctgcatgtaagtacttgaacaatctgagattgacaatgttcaaaactcataaaaataatgaag

SEQ ID NO: 221893 - DNA, 1403 bp, Zea Mays
gttactactatacacttgtgaagtggaacttgatgatatcttcattttttgactttttgtgctttaggctcctcttcttggatcgactgcagcagttagatctgcacatgtatatctttgtttaattatcgtctccgtattgtaagattaatttgagcttccattctacttttgctccacatatgaaacattaaaagatactctaattatgctatttaactccaagggtggaggtggaatgggtgattataaccacctgcaggttgtgtacatatctttagtacatatccattatgctatttaactccgaaaggagacaatatgcatcagtttcaacaactttgttgtttccttttcatgctgtcttataggatggcattttctgctcaatttgtccgttgctgatttcagtcgggtaatgttctttctgcacaatgacttttgcttgcaaagtcgagtttggcattatgctttgtgtagatgtatctgagaattgcatgactgcatacccttaacatgaaatttcatttttagagattagattagattagatatgtcgctgatggaagtccaactaatagcgaactgaagaccgccgaccttgtgtctacacccgcacattctgttgcatctatacctccttctacaccagcacttcatgttgctcctgcacttttgtctacccctgtcagatgctcatctccatttatcacgccaccatattgttcctcaggttccatttagttgttgaattagttctaaaatcatagtggaaccaaaataatgtgtggatatttgcaaacgagtttctcttgaagtcatggtgtgaggaaaaaagctgcacaaattgagctgtaaagctaggcttcccaacaaggagttaaaacaacaattcctcaaatttgtgctagaagcaagaggctgttaaagaagtgctctttagcaaaggtttcgtcattcttgcctaccgctgtccctttgcttcagaatacggtgaaacagaagtccttcattggctcttctcatcttggctcacatgcagtacttgaataccagtttcttcctgagcagccaagtgatgcatatgagaggggaagccagttgcgcttctatgatgctctagcagaagtgttaaactcaaggaaagaagaacaaatgtagagggaaatggagagacatgatcacgagagatgtaatgaagagaggttcatgcgtgaaaggcaaaggaaagaagaaaattccattagcaacagagacgtatacttataactattatggtagataaaaaatgttacaatgtctctcttctatagaacgaaactgggatatcattcattgatatatgttcgattttattcaataattattatataattgtgcaccgtcgcaacgcacgggcatcg

SEQ ID NO: 221894 - DNA, 1065 bp, Zea Mays
tcatatgctcatctccatttatcacgccaccatattgttcctcagttgattgactggcatgagggtggatacttgactgttgatttaccaatgtctcggggagaagttgtcattgggggtccaaatgtttcgtcattcttgcctaccgctgtccctttgcttcagaatacggtgaaacagaagtccttcattggctcttctcatcttggctcacatgcagtacttgaataccagtttcttcctgagcagccaagtgatgcatatgagaggggaagccagttgcgcttctatgatgctctagcagaagtgttaaactcaagggtagattcgttttctataggatcacactttacccatgtagttgagcaggcacctagctatacatttcacagtcaatcatctggttctagctgtttgtcaaatattattgctagcatggctcaaatccaaatattattgctagcatggctcaaatccacggtcaaaaattggcatccctcaagttgtcagatttgaaagctccctcgcatcccctaaaagattgggttatcatgatgaagaacatgtcacgtggacagaaaaacacaagaactatatttatggatatactatttttttcttcttttgtattattatattcatatccttttttacctttatattattattttttatatatgttgtatttgtctaatattacttcatcataatgaggaagctaagattgctagggaggttgaggctcatgaaaagagaattaaaaaggagcttgagagttgagaagcaaggtctactaaatagaaagaaagaagaacaaatgtagagggaaatggagagacatgatcacgagagatgtaatgaagagaggttcatgcgtgaaaggcaaaggaaagaagaaaattccattagcaacagagacgtatacttataactattatggtagataaaaaatgttacaatgtctctcttctatagaacgaaactgggatatcattcattgatatatgttcgattttattcaataattattatataattgtgcaccgtcgcaacgcacgggcatcg

SEQ ID NO: 221895 - DNA, 2105 bp, Zea Mays
tggtgaaagggctcctcttcttggatcgactgcagcagttagatctgcacatgtatatctttgtttaattatcgtctccgtattgtaagattaatttgagcttccattctacttttgctccacatatgaaacattaaaagatactctaattatgctatttaactccaagggtggaggtggaatgggtgattataaccacctgcaggatggcattttctgctcaatttgtccgttgctgatttcagtcggcgaactgaagaccgccgaccttgtgtctacacccgcacattctgttgcatctatacctccttctacaccagcacttcatgttgctcctgcacttttgtctacccctgtcagatgctcatctccatttatcacgccaccatattgttcctcaggtatgcaagcaatttttatttttgatctttctccttgttagcttgattgatctttctccagtatttatttgtgggcttggttaatctaggttccatttagttgttgaattagttctaaaatcatagtggaaccaaaataatgtgtggatatttgcaaacgagtttctcttgaagtcatggtgtgaggaaaaaaggtaatgtccttcacattattctggtttagtataccttgttgattattgacatatgttggtcatgttggtgctccactaccttgttcgtatattaaggcatgctacatttcttaactacgtaccaatgatgtggatacgatttttgcagcaaagctatttttatcctggtgttatcttatctattctcatgacagtgaatttagttttattgttgacctcccacggttcttgacttcctaacatcggccactttatttttagttgattgactggcatgagggtggatacttgactgttgatttaccaatgtctcggggagaagttgtcattgggggtccaaatgtaactaaaggctatttcaaggatgaagctaaaacaaatgatgattgtgagcccatatatggagaacattataatcaatactgatcctttccataattactgtgttgcgcttgtggcagctgcacaaattgagctgtaaagctaggcttcccaacaaggagttaaaacaacaattcctcaaatttgtgctagaagcaagaggctgttaaagaagtgctctttagcaaaggtttcgtcattcttgcctaccgctgtccctttgcttcagaatacggtgaaacagaagtccttcattggctcttctcatcttggctcacatgcagtacttgaataccagtttcttcctgagcagccaagtgatgcatatgagaggggaagccagttgcgcttctatgatgctctagcagaagtgttaaactcaagggtagattcgttttctataggatcacactttacccatgtagttgagcaggcacctagctatacatttcacagtcaatcatctggttctagctgtttgtcaaatattattgctagcatggctcaaatccaaatattattgctagcatggctcaaatccacggtcaaaaattggcatccctcaagttgtcagatttgaaagctccctcgcatcccctaaaagattgggttatcatgatgaagaacatgtcacgtggacagaaaaacacaagaactatatttatggatatactatttttttcttcttttgtattattatattcatatccttttttacctttatattattattttttatatatgttgtatttgtctaatattacttcatcataatgaggaagctaagattgctagggaggttgaggctcatgaaaagagaattaaaaaggagcttgagagttgagaagcaaggtctactaaatagaaagaaagaagaacaaatgtagagggaaatggagagacatgatcacgagagatgtaatgaagagaggttcatgcgtgaaaggcaaaggaaagaagaaaattccattagcaacagagacgtatacttataactattatggtagataaaaaatgttacaatgtctctcttctatagaacgaaactgggatatcattcattgatatatgttcgattttattcaataattattatataattgtgcaccgtcgcaacgcacgggcatcg

SEQ ID NO: 221896 - DNA, 1478 bp, Zea Mays
atggctgcggcggaggcgcggcgccggtcagcggtctgggccctgctgccgctgctgctgcggctgctccacccggtcgcgctcgtgctggccaacaccgaaggtgcgttcgtggccgggcaattctcagggagggcctcggtgtctgtgtttggttatgctactcagagtgatttgaagttggccctaccctgctctttttaaggctgaaatgccctggtcagcctgaagaggaaatctctcagagaaacaaagagtcttcaaaatggtgaaaggtatactgaaataacttacacaggagaaatttgaggctcctcttcttggatcgactgcagcagttagatctgcacatgtatatctttgtttaattatcgtctccgtattgtaagattaatttgagcttccattctacttttgctccacatatgaaacattaaaagatactctaattatgctatttaactccaagggtggaggtggaatgggtgattataaccacctgcaggatggcattttctgctcaatttgtccgttgctgatttcagtcggagattagattagattagatatgtcgctgatggaagtccaactaatagcgaactgaagaccgccgaccttgtgtctacacccgcacattctgttgcatctatacctccttctacaccagcacttcatgttgctcctgcacttttgtctacccctgtcagatgctcatctccatttatcacgccaccatattgttcctcaggtatgcaagcaatttttatttttgatctttctccttgttagcttgattgatctttctccagtatttatttgtgggcttggttaatctaggttccatttagttgttgaattagttctaaaatcatagtggaaccaaaataatgtgtggatatttgcaaacgagtttctcttgaagtcatggtgtgaggaaaaaagttgattgactggcatgagggtggatacttgactgttgatttaccaatgtctcggggagaagttgtcattgggggtccaaatgtttcgtcattcttgcctaccgctgtccctttgcttcagaatacggtgaaacagaagtccttcattggctcttctcatcttggctcacatgcagtacttgaataccagtttcttcctgagcagccaagtgatgcatatgagaggggaagccagttgcgcttctatgatgctctagcagaagtgttaaactcaaggaaagaagaacaaatgtagagggaaatggagagacatgatcacgagagatgtaatgaagagaggttcatgcgtgaaaggcaaaggaaagaagaaaattccattagcaacagagacgtatacttataactattatggtagataaaaaatgttacaatgtctctcttctatagaacgaaactgggatatcattcattgatatatgttcgattttattcaataattattatataattgtgcaccgtcgcaacgcacgggcatcg

SEQ ID NO: 221897 - DNA, 2098 bp, Zea Mays
atggctgcggcggaggcgcggcgccggtcagcggtctgggccctgctgccgctgctgctgcggctgctccacccggtcgcgctcgtgctggccaacaccgaaggtgcgttcgtggccgggcaattctcagggagggcctcggtgtctgtgtttggttatgctactcagagtgatttgaattttaacaatatatttagcattcatggttagtgtacaaagttactactatacacttgtgaagtggaacttgatgatatcttcattttttgactttttgtgctttaggctcctcttcttggatcgactgcagcagttagatctgcacatgtatatctttgtttaattatcgtctccgtattgtaagattaatttgagcttccattctacttttgctccacatatgaaacattaaaagatactctaattatgctatttaactccaagggtggaggtggaatgggtgattataaccacctgcaggttgtgtacatatctttagtacatatccattatgctatttaactccgaaaggagacaatatgcatcagtttcaacaactttgttgtttccttttcatgctgtcttataggatggcattttctgctcaatttgtccgttgctgatttcagtcgggtaatgttctttctgcacaatgacttttgcttgcaaagtcgagtttggcattatgctttgtgtagatgtatctgagaattgcatgactgcatacccttaacatgaaatttcatttttagagattagattagattagatatgtcgctgatggaagtccaactaatagcgaactgaagaccgccgaccttgtgtctacacccgcacattctgttgcatctatacctccttctacaccagcacttcatgttgctcctgcacttttgtctacccctgtcagatgctcatctccatttatcacgccaccatattgttcctcaggtatgcaagcaatttttatttttgatctttctccttgttagcttgattgatctttctccagtatttatttgtgggcttggttaatctaggttccatttagttgttgaattagttctaaaatcatagtggaaccaaaataatgtgtggatatttgcaaacgagtttctcttgaagtcatggtgtgaggaaaaaaggtaatgtccttcacattattctggtttagtataccttgttgattattgacatatgttggtcatgttggtgctccactaccttgttcgtatattaaggcatgctacatttcttaactacgtaccaatgatgtggatacgatttttgcagcaaagctatttttatcctggtgttatcttatctattctcatgacagtgaatttagttttattgttgacctcccacggttcttgacttcctaacatcggccactttatttttagttgattgactggcatgagggtggatacttgactgttgatttaccaatgtctcggggagaagttgtcattgggggtccaaatgtaactaaaggctatttcaaggatgaagctaaaacaaatgatgattctgcacaaattgagctgtaaagctaggcttcccaacaaggagttaaaacaacaattcctcaaatttgtgctagaagcaagaggctgttaaagaagtgctctttagcaaaggtttcgtcattcttgcctaccgctgtccctttgcttcagaatacggtgaaacagaagtccttcattggctcttctcatcttggctcacatgcagtacttgaataccagtttcttcctgagcagccaagtgatgcatatgagaggggaagccagttgcgcttctatgatgctctagcagaagtgttaaactcaaggaaagaagaacaaatgtagagggaaatggagagacatgatcacgagagatgtaatgaagagaggttcatgcgtgaaaggcaaaggaaagaagaaaattccattagcaacagagacgtatacttataactattatggtagataaaaaatgttacaatgtctctcttctatagaacgaaactgggatatcattcattgatatatgttcgattttattcaataattattatataattgtgcaccgtcgcaacgcacgggcatcg

SEQ ID NO: 221898 - DNA, 2231 bp, Zea Mays
gcgcggcatggttggccctaccctgctctttttaaggctgaaatgccctggtcagcctgaagaggaaatctctcagagaaacaaagagtcttcaaaatggtgaaagggctcctcttcttggatcgactgcagcagttagatctgcacatgtatatctttgtttaattatcgtctccgtattgtaagattaatttgagcttccattctacttttgctccacatatgaaacattaaaagatactctaattatgctatttaactccaagggtggaggtggaatgggtgattataaccacctgcaggttgtgtacatatctttagtacatatccattatgctatttaactccgaaaggagacaatatgcatcagtttcaacaactttgttgtttccttttcatgctgtcttataggatggcattttctgctcaatttgtccgttgctgatttcagtcgggtaatgttctttctgcacaatgacttttgcttgcaaagtcgagtttggcattatgctttgtgtagatgtatctgagaattgcatgactgcatacccttaacatgaaatttcatttttagagattagattagattagatatgtcgctgatggaagtccaactaatagcgaactgaagaccgccgaccttgtgtctacacccgcacattctgttgcatctatacctccttctacaccagcacttcatgttgctcctgcacttttgtctacccctgtcagatgctcatctccatttatcacgccaccatattgttcctcaggtatgcaagcaatttttatttttgatctttctccttgttagcttgattgatctttctccagtatttatttgtgggcttggttaatctaggttccatttagttgttgaattagttctaaaatcatagtggaaccaaaataatgtgtggatatttgcaaacgagtttctcttgaagtcatggtgtgaggaaaaaaggtaatgtccttcacattattctggtttagtataccttgttgattattgacatatgttggtcatgttggtgctccactaccttgttcgtatattaaggcatgctacatttcttaactacgtaccaatgatgtggatacgatttttgcagcaaagctatttttatcctggtgttatcttatctattctcatgacagtgaatttagttttattgttgacctcccacggttcttgacttcctaacatcggccactttatttttagttgattgactggcatgagggtggatacttgactgttgatttaccaatgtctcggggagaagttgtcattgggggtccaaatgtttcgtcattcttgcctaccgctgtccctttgcttcagaatacggtgaaacagaagtccttcattggctcttctcatcttggctcacatgcagtacttgaataccagtttcttcctgagcagccaagtgatgcatatgagaggggaagccagttgcgcttctatgatgctctagcagaagtgttaaactcaagggtagattcgttttctataggatcacactttacccatgtagttgagcaggcacctagctatacatttcacagtcaatcatctggttctagctgtttgtcaaatattattgctagcatggctcaaatccaaatattattgctagcatggctcaaatccacggtcaaaaattggcatccctcaagttgtcagatttgaaagctccctcgcatcccctaaaagattgggttatcatgatgaagaacatgtcacgtggacagaaaaacacaagaactatatttatggatatactatttttttcttcttttgtattattatattcatatccttttttacctttatattattattttttatatatgttgtatttgtctaatattacttcatcataatgaggaagctaagattgctagggaggttgaggctcatgaaaagagaattaaaaaggagcttgagagttgagaagcaagaaagaagaacaaatgtagagggaaatggagagacatgatcacgagagatgtaatgaagagaggttcatgcgtgaaaggcaaaggaaagaagaaaattccattagcaacagagacgtatacttataactattatggtagataaaaaatgttacaatgtctctcttctatagaacgaaactgggatatcattcattgatatatgttcgattttattcaataattattatataattgtgcaccgtcgcaacgcacgggcatcg

SEQ ID NO: 221899 - DNA, 1788 bp, Zea Mays
ctgccatcggcatctccatccttggcgcggcatggttggccctaccctgctctttttaaggctgaaatgccctggtcagcctgaagaggaaatctctcagagaaacaaagagtcttcaaaatggtgaaagggctcctcttcttggatcgactgcagcagttagatctgcacatgtatatctttgtttaattatcgtctccgtattgtaagattaatttgagcttccattctacttttgctccacatatgaaacattaaaagatactctaattatgctatttaactccaagggtggaggtggaatgggtgattataaccacctgcaggttgtgtacatatctttagtacatatccattatgctatttaactccgaaaggagacaatatgcatcagtttcaacaactttgttgtttccttttcatgctgtcttataggatggcattttctgctcaatttgtccgttgctgatttcagtcgggtaatgttctttctgcacaatgacttttgcttgcaaagtcgagtttggcattatgctttgtgtagatgtatctgagaattgcatgactgcatacccttaacatgaaatttcatttttagagattagattagattagatatgtcgctgatggaagtccaactaatagcgaactgaagaccgccgaccttgtgtctacacccgcacattctgttgcatctatacctccttctacaccagcacttcatgttgctcctgcacttttgtctacccctgtcagatgctcatctccatttatcacgccaccatattgttcctcaggtatgcaagcaatttttatttttgatctttctccttgttagcttgattgatctttctccagtatttatttgtgggcttggttaatctaggttccatttagttgttgaattagttctaaaatcatagtggaaccaaaataatgtgtggatatttgcaaacgagtttctcttgaagtcatggtgtgaggaaaaaaggtaatgtccttcacattattctggtttagtataccttgttgattattgacatatgttggtcatgttggtgctccactaccttgttcgtatattaaggcatgctacatttcttaactacgtaccaatgatgtggatacgatttttgcagcaaagctatttttatcctggtgttatcttatctattctcatgacagtgaatttagttttattgttgacctcccacggttcttgacttcctaacatcggccactttatttttagttgattgactggcatgagggtggatacttgactgttgatttaccaatgtctcggggagaagttgtcattgggggtccaaatgtttcgtcattcttgcctaccgctgtccctttgcttcagaatacggtgaaacagaagtccttcattggctcttctcatcttggctcacatgcagtacttgaataccagtttcttcctgagcagccaagtgatgcatatgagaggggaagccagttgcgcttctatgatgctctagcagaagtgttaaactcaaggaaagaagaacaaatgtagagggaaatggagagacatgatcacgagagatgtaatgaagagaggttcatgcgtgaaaggcaaaggaaagaagaaaattccattagcaacagagacgtatacttataactattatggtagataaaaaatgttacaatgtctctcttctatagaacgaaactgggatatcattcattgatatatgttcgattttattcaataattattatataattgtgcaccgtcgcaacgcacgggcatcg

SEQ ID NO: 221900 - DNA, 2995 bp, Zea Mays
cttctctgccatcggcatctccatccttggcgcggcatgttcgtggccgggcaattctcagggagggcctcggtgtctgtgtttggttatgctactcagagtgatttgaagttggccctaccctgctctttttaaggctgaaatgccctggtcagcctgaagaggaaatctctcagagaaacaaagagtcttcaaaatggtgaaagggtaatataatgattttaccttcctgctcggttattttagtgcgttgtttgccttatagagtaaaacttcccagttccttgtttctccattatgttttgtttaatttgtcttaattatgcagtatactgaaataacttacacaggagaaatttgaggtaaagtattttagaaccggacaaccttcagtttcagtattcagagttagacaatcacacttttccaaaggtatccaatatacaaatgcattagcctatgtgcgagtaaatgatccagtatatatagtcagacacatgaaaaaagccactttaaaaatcataagatttagccttattataagatagtatggcttatctgcatcttccagtataaaaatcatgtcactttaaatcattgcattgcagttcattataggatacatttcatctagagccttattatggagacatgccactgctgaatgtttagcttcaagttgttctctagagccttatatggagactgactgtttggcctgcaaaacatttctctgcagttttaacaatatatttagcattcatggttagtgtacaaagttactactatacacttgtgaagtggaacttgatgatatcttcattttttgactttttgtgctttaggctcctcttcttggatcgactgcagcagttagatctgcacatgtatatctttgtttaattatcgtctccgtattgtaagattaatttgagcttccattctacttttgctccacatatgaaacattaaaagatactctaattatgctatttaactccaagggtggaggtggaatgggtgattataaccacctgcaggttgtgtacatatctttagtacatatccattatgctatttaactccgaaaggagacaatatgcatcagtttcaacaactttgttgtttccttttcatgctgtcttataggatggcattttctgctcaatttgtccgttgctgatttcagtcggattagatatgtcgctgatggaagtccaactaatagcgaactgaagaccgccgaccttgtgtctacacccgcacattctgttgcatctatacctccttctacaccagcacttcatgttgctcctgcacttttgtctacccctgtcagatgctcatctccatttatcacgccaccatattgttcctcaggttccatttagttgttgaattagttctaaaatcatagtggaaccaaaataatgtgtggatatttgcaaacgagtttctcttgaagtcatggtgtgaggaaaaaaggtaatgtccttcacattattctggtttagtataccttgttgattattgacatatgttggtcatgttggtgctccactaccttgttcgtatattaaggcatgctacatttcttaactacgtaccaatgatgtggatacgatttttgcagcaaagctatttttatcctggtgttatcttatctattctcatgacagtgaatttagttttattgttgacctcccacggttcttgacttcctaacatcggccactttatttttagttgattgactggcatgagggtggatacttgactgttgatttaccaatgtctcggggagaagttgtcattgggggtccaaatgtaactaaaggctatttcaaggatgaagctaaaacaaatgatgattgtgagcccatatatggagaacattataatcaatactgatcctttccataattactgtgttgcgcttgtggcagctgcacaaattgagctgtaaagctaggcttcccaacaaggagttaaaacaacaattcctcaaatttgtgctagaagcaagaggctgttaaagaagtgctctttagcaaaggtttcgtcattcttgcctaccgctgtccctttgcttcagaatacggtgaaacagaagtccttcattggctcttctcatcttggctcacatgcagtacttgaataccagtttcttcctgagcagccaagtgatgcatatgagaggggaagccagttgcgcttctatgatgctctagcagaagtgttaaactcaagggtagattcgttttctataggatcacactttacccatgtagttgagcaggcacctagctatacatttcacagtcaatcatctggttctagctgtttgtcaaatattattgctagcatggctcaaatccaaatattattgctagcatggctcaaatccacggtcaaaaattggcatccctcaagttgtcagatttgaaagctccctcgcatcccctaaaagattgggttatcatgatgaagaacatgtcacgtggacagaaaaacacaagaactatatttatggatatactatttttttcttcttttgtattattatattcatatccttttttacctttatattattattttttatatatgttgtatttgtctaatattacttcatcataatgaggaagctaagattgctagggaggttgaggctcatgaaaagagaattaaaaaggagcttgagagttgagaagcaaggtctactaaatagaaagaaagaagaacaaatgtagagggaaatggagagacatgatcacgagagatgtaatgaagagaggttcatgcgtgaaaggcaaaggaaagaagaaaattccattagcaacagagacgtatacttataactattatggtagataaaaaatgttacaatgtctctcttctatagaacgaaactgggatatcattcattgatatatgttcgattttattcaataattattatataattgtgcaccgtcgcaacgcacgggcatcg

SEQ ID NO: 221901 - DNA, 594 bp, Zea Mays
agaagatgtcgacccgctgacattaaaccttgctatatcagctccagttgttgcgttagcttctccttctgcactgaggtgggtcgagagcattctcgaggcgctcagagtccacaggacagcatcaaaagaggccccaaaacgttgaaaacgggcggatggcggagcttcttcttggcgttggtagccgtccgcagtgtcgaagaaattctttgcttctttgacgacaattgccccccgttgagggaggtggtggtgtcaagccatggctttccactggcccagtttgtaatggattcttgggccgaaaggcccatctctatatgtcttgactcgcaaggcgattgcatcagtccatccatccatttcatggagggttttagcagtgccgtctctgtttcgctaatcggtgatggcagccagccttgttgtactttgtgggtttgttgacgcagccggtcggattcttcttattgccggattggttgcgtaacgctaggtggttctgaatatcggcgacggcgaggctgtggaatctccgccctccaccgaagattccctgtcgtcgtttctgaatttaattaacaacatggc

SEQ ID NO: 221902 - DNA, 680 bp, Zea Mays
tggtgtgatagatctggagataccagcatggcatggctaaatcttatctcaaaatctgataactggaacaactccgtcgcctgcatcggtgagaccactgcgtctgcagcgaagaaactgggcctgaagagcatatattacccaacgacccctggacttgaggggtgggtcgagagcattctcgaggcgctcagagtccacaggacagcatcaaaagaggccccaaaacgttgaaaacgggcggatggcggagcttcttcttggcgttggtagccgtccgcagtgtcgaagaaattctttgcttctttgacgacaattgccccccgttgagggaggtggtggtgtcaagccatggctttccactggcccagtttgtaatggattcttgggccgaaaggcccatctctatatgtcttgactcgcaaggcgattgcatcagtccatccatccatttcatggagggttttagcagtgccgtctctgtttcgctaatcggtgatggcagccagccttgttgtactttgtgggtttgttgacgcagccggtcggattcttcttattgccggattggttgcgtaacgctaggtggttctgaatatcggcgacggcgaggctgtggaatctccgccctccaccgaagattccctgtcgtcgtttctgaatttaattaacaacatggc

SEQ ID NO: 221903 - DNA, 2004 bp, Zea Mays
ggttgccaagcccaccattcactgactgattggacctacaggatcgcccaccggcctctttccgtctcggcatcagctcagatccgcgacgcacttcgccaccggccactccagtccccgctcccactcggccacttccccatccccgatggccggcggccgcgcattccggccgtccgccccgcgccgcgcggcgttcgcggctctgctcacgctcctcctcctcgcgggactctctttcctcctctcttccacgcccacctcgtcggcccgttcctcgtccccgccgtccgcgcgcctcgccgccgtccgccgccacgcggccgaccacgcggccgtccttgccgcgtacgccgcgcacgcacggaagctcaaggaggactccgcagcgcagtcgctctcgttctcgtccctctcctccgacctctccgcgctctccgcccgccttgcctcccacctctcctcctcactccccgaggacgcgctcaggcccctcgaaaaggaggcccgcgagcgcatcaagttcgcgcgcggcctcgccgctgacgccaaggagggcttcgacactcagtccaagatccacaagctctccgacaccgtcttcgccgtcggcgagcagctctctcgcgcgcgccgcgcggggcgcatgtcctcccgcatcgctgcggactccacccccaagtcgctccactgcctcgccatgcgcctcctcgaggcccgcctcgccaaccccaccgcattcgcagacgatcccgacccgtcccccgagttcgatgaccccgcgttgtaccattacgccatcttttccgacaacgtgctcgccatctccgtcgtggtggcctcggctgcacgcgccgcggccgacccctcgcgccacgtcttccatgtggtcaccgcgcccatgtacctgcctgcattccgggtctggttcgcgcggcgcccgccgccgcttggcgtgcacgtccagctccttgctcactccgactttccgttcctcaatgccaccaactcgcccgtggtcaggcagatcgacgccggcaacagggacgtcgagttgctggattacctgaggttctacctcccagatatgttcccgtcgctgcggagggtagtgcttttggaggacgatgtggtggtacagaaggatttggcagcgctttggcaggtcgacttggacgggaaggtgaatggcgccgtggagacgtgcttcggggggtttcggaggtacaggaagtatctcaactttacgcagcccattgtgcgggatcgattcaagcccaatgcctgtgcatgggcatatggcgtaaatgtgttcgaccttgagacatggcggcgggatggttgcacagaattgttccatcagtatatggaaatgatgaggatggcgagctgtgggatcctacatccattctaacagctgggctgatgtccttttacggcaataccaagccactggataagtcatggcatgtaatgggtcttggctataatccaagcatcagccctgaggcaatccgtagtgctgcagtggtacactttgatgggaacatgaagccctggcttgatgtcgctatgaaccaatacaaggccctgtggacaaagtatgtggacaccgaaatggagttcctaacacgctgtaactttggcctttgaatagattctagagagcctctaagaaaaccactggctggtgctactttttcttacgggacaagagagcctcaacgctctgcgcaagtggacttatctgtagcagagttgttactctgtagtgaacatctttgtgcttgggcaacaatgctcttgtagatctggtagcttgtttgtgatagtatttgatctgtcagctaaatttgctggattattgtgcacagagaatgagtcattgggaggaaactgtagatgaacattcttgtattgttgaataacaagtgtatctccaattgtatgtataaggaaaagaaaaggttgctgggatcaggttggaattctattttactggtg

SEQ ID NO: 221904 - DNA, 556 bp, Zea Mays
cttcaaactgtcccgttcataatcattaacgaaggatgtgaacagattgtaaatgtagcggtcagtgcaaatattattataaacgtagcggtcagtgcaaatactatttcgtcaaggaggtggtcaagggcatcgacgagagcgacctccaaggctccaccagacgtggatcaaagtcttcgccacgcacaacgcccacgagcgcatcaccaagcttgagaacatgtatttgcacatctggcacctcacgcgtaagaagcagtgttctctgtttactggatggagatgcatgattaatgaagcgcacactgcacaacgagtacaatatctgataaatattctaaccgttcgttgctttatgtttaagcctgatgatgaagtgatggctttggattgctgtcagctaggggacgaagtcaggaagcaggagctgaagctcgactcaccagtttatggcccaatttacaacggcttcactgtaaatgggaaaacaactcggagaaaagtggtgtctcatagaagaatagaagaaaaagaagaaaaaggattagattag

SEQ ID NO: 221905 - DNA, 6031 bp, Zea Mays
caacaacacaagtgcagccaacaattgtatacatcactcggatcgattctctctctccctcttgtgtaaatctctctagtttgtgtgaaggcaaagttataagcctttagagagtggagaggtgctgcaaagagctagagcaaagtcttgagcgcattgttactccgccggagtgctgtcaagaagattgtaagcagccgcggctttgttgtaacccaactcaacatagtggaaggctctatctgtcatactgacagatctgagcaaacggaggaaggagttgaaatagactccaagcccaggtgtggctaactccaacgaggactaggcaagcatttcaggcttggccgaacctcgggataaattcctgcgtctgtgtgcttcgctctgtattgtgtgctgactctctgtcttactcactttttatatctgcacttcaacacttatctgtggtacaagttatatttgaagtgcagggcattttgagacaggatcttctattccgctgcaacctactcgaaggatctttcattccactgcgatctggtccttgagtagagtaagaactaaagttttaaagtgataattttttattcgcctattcaccccccctctaggcgacatccagatcctgttcccgggcaaagggaactttcactatgtactcaccaaggcacccattacgaggcgtggaacatcgtcgtgcttgttccggtgacgttgtcctgcctctatgagaggaagagggaactcaacaaccaaaaatggacctaccagatcagcctgcaccgtgaggtgctaggcgtgcgttccatcgtcaggagctcctccgtcgagtggggttctgtggccaaaaagcagcccatgacatggcacaaggacacaaggttgatttgttatttatatgttgattgctcctgcaaatcagtggtggatttactgcagcgtgcataatctggagtctttcttttacactgcttcgatgaaatctgatgtattcactacatgcaatttctgattattattcatatttcataaggaccaaaaatacctagcatttattatcccacgctgatggatgaaaaaagcgacgcacaccggccagcgggcagctcttcctctcaggccaagtctactctcacctcccccgtctctcagatccacgctgcctagttgttcggacttcagaccccgccgtgcgctgcccatggccgcgggtcgcggcgacgcggcgagcatggtggcggtgggtctggtgtggggcgccaccaacgcgctgatgcggcggggcgcgctcgtctgggaccgccgcgcccgtgcctgcccctccggcaacgtcctccggcggtgggcggagctgctcctgacgtggcagtactcggcgccgttcgccgccaacctgagcgcgtccgcggccttcttcgcgctcctcggcggcgcgcccatctccgtggccgtccccgtcaccaacgccgtcactttcgccgccacggccgccgccgccgcggcccttggcgagcgcgtccggccagcgcccgcggtccttggtaccacgctcatcgtcctcggcgtctgggtctgcatctcgtaggcttaggctgaagatctgcttggtttagttctggcattacagtcgtcgcatggggggaaaaaaggaagttttgagggcaattctcagattccatttcactcctctgtgctgtgttgccaattgccatatgagtgaattattcccagtttgttgatggcagcggcgtttcattagctagatggtcagaatataatgcagtttcattctggtaattttggttactgaatccatttctgcttaggtgatgaatgaatataacactacggttccattcattacatcctgagggttgacatcccacagcagagcattcttctacccttggagctaatttgagaaccttattttatcaattgatttctaaattctccttggcattgaattggatcaacagagttgtttttccaaattcatttcaagctgaaatggtattggggcacgtttctgtttcatatgttttgatgttcaattccagcaaataccaagctcctcggttccgtattgggggtgtgtggtttgcttctgtactgatatcatggtgaattgagggtcaaattctaaggctcaattccaagacatccaaacacgtggtggtattggagatatacaattccaattctccaaatcctagcttaatgccagcatccaaatggggtgttaggtttttggggggcaatgcatcaccacaagttacctgaatattcagaaacataggtgctgtttggttcgtccggtttgctccaacgcaagacgattacgttactttgtgtttggttctagcatgctgaagattccattcacgtaatcctagccaaacaacaccataatacttgtaacaattgacattacaatgacttgttggtatggctaaaaatcagaaccagttcctggttgttttgtctttagatcatatacggtttggtattcagatcaaccttatccagtttgttcattggcgccacgccatttacactaaaaggaaagtaaatgctattcatccatacagagttacagactaccttgaaaaggagggttatttttcatatacaaacttgaactttattttttttatttctttgagaacacaactacatacgtacaaacagacttgcccatgcatacactatgcgcaatgccataccatacgacacgtagacagatgtaggatttgtctttgtgggtcttaatggtgagttgagagcgagggcgccacgctaggcaacggcgaagagatggctggcttaggtaggacgggagccagaggggaggacgaataaggcgacacggaggtggagcggcggaaggtggcaacctctgcgtcgtcactgacggccggtgggcgaggggaagtggtggtggaagggcgaggcgataatggtgacgacgaaaaggaggagctgcgggaggagaacggggaagaagattctgtgtcgtgatgtgactgtgagagcacactgggcctccaacgatcttcctttctgcttcttgggctgacgatggatcgagcgggagacgtcgccgtcgaggtgggggcaccgccaaatatgatctgcgtttgggggcccatatagacatgagtagggcccggctggccaagcccgttcatcggcggcggagccggagcagaagaagcctcgtggacggtcgcagtacgtggacgcggcggcgtcggcgtccggtatggatccggtttcgccggaggatgcgacgcctgctgcggcacgcctaccgggtaggccatgacgggtgacttattctgagccgcctcgtcgtgctgcggcacgcccaccggtgcataggcgctgaagttggccgccttgtccgggacccgctttaccaccggcgcgacgacggggcccaggcggtaggacacgttcagcacgccgcgcggttcccaccggtgcaccttccggacctggtacgacgccacctgcggcggctggggcccggcgccggtcgcgccggcgaggatgtcggcgagcgggacgacgacctcgcccacgtcgcggtcacccaggagccgctcggcccggagcagcacgtggagggacgcgccggacgccgtcggagggacggcgaaccggaacgtcgcgttccagcacgggttccgcccgccgtatgggtccggctccgtgcactgccgcgtcagcgggtcgccggagatgctcaccacggcgtacacgtgcatgcgcgtcatcaggttcacgctcttcagctcctgcgctgacaggaggctcagctccaactcccggtgatcaggtggtggcttcaacttgaagcataagcaggtcccgatgtgcttacagggggagagggtttgatcaactagagctaacagttaattggctaaaatttgtcagtggaattagctagctaactattaactaatttactaaaaatagctaatagttgaactattagctagagtgtttggatttctccagctaattttaggcattaactattaactttagcgccttcaaacaccccttaaatatgcttaaaggctggtttgcagttttttgctgatggaatctgattagttttatgatgaaaataaatatacttgctacccctttggtaatcaggaggtcacattattttgagtagtgtgcagccagaatgtttgagcttcgagcatcgattcctctttgaattttgagatatatggatcctttggtatggtatatggccatatttgcattagggaagcagttccagaacaatattcagttgctactttttatagttatgttatgaactagaaagatttcagagaccatgtagatatccgaaatggatcttttttgttgcaactgaagggagtaacttttaaggttttagttactttctcaaaaaaattaagactcactcttctgttcatgttcactgcaactacaaattagtaatctggggtgtattgcaagaacaatgtccttctcgaatactcaagaacaatgtccatcatggaatttgctacgtgacgatgtggtccagcttgtttggtacacgatcgaggccatatctttgtgttcgctttatgtatatgttcccttttattcctcggattattcacttctatcttgttgttgcagggttctgagtcctggataagtaccatttgttttaaacagctttagaccatcaccttttgatgtctccttttgtctgttattattttcctatgaatattttttttgggggggaatactattaagtttcccactaatctttgatatcctctaaaccaaacgatttgtgacagatgtttcttgaggttattgaatgaattggtcttgcacggacaagcagccctgaagctcaccaggaagcgacattattttgagcttccagcattgatttctctttgaatttcgtgattcattgatcctttctattagaagaacagtttcggaacagtattcagtcactacttttttacaattatgttatgtactagaaaggtttcggagaccatgaagatgtccaaaaatggatcttttttttttgacgactgaaggaagtatcttttaaggttttgttgttactttttcaaaaattaagattcactcttttgtttactgaaactacaaaatagtgataaataagagctgtcacaatagcttacaaagcacaagaagcaaaactctctggcatgtttggaagagggtagttgctccaaaaaaaatttaagaactttgaggggacagggggctacaatggacagtagacagccttagtgtcatatctccaacagattgtggatgcggaaaatgtgctttaatatgcttaaggactggtttgcagtttttgctggtggaatctgattagttttatgatgaaaataaatatactactccctttggtcaccaggaaaataaatattcagttgctactctttattcctcggtttattcgcgcgcttctctcttgttgctgcagggaacagctttagagcctcacctattgatatatccttttgattgcgatcattttcctaggaattgtttttcctggaatattattaagattcccactaatctttgatatcctcgaaaccaaacgtgttgtgacaggtgtttctcgatgttattgaatgaattgatcttgcatggacaagcagtcctgaagctcaatgcttgatggatcagatcgcttatggaatcttgcttgcttgatcgatcacaaggtgtcttcgtccttggtgtcactttgctcgtggatcagaggtgtcgcttcggggtgcaccaaacggctgggaccattcacggcacggatgttatagtaagcccaggattagtgtttctttcttagcaagtagattagcacacaatcaccttccaggtattgtgatttacttaccatatacaactgcgtgtaatttctttatatagagatagagaacaaacagaaaacgttgtctcattaacagcaccaaac

SEQ ID NO: 221906 - DNA, 2406 bp, Zea Mays
accacgtccacaccacgataaaaacccacgcgctgcctcctcccttcctcaacttcaactatcattgcaaaagcaaagcacgcaatccaatttccctccatttctctagatctcgagttgctctgctacttcttttagattccttctttcgttcgggagagcgattctctagctggtggcaatggcgaagggcgagggtccggcgatcgggatcgatctcggcaccacctactcgtgcgtcggcgtgtggcagcacgaccgggtggagatcatcgccaacgaccagggcaaccgcaccacgccgtcctatgtcgccttcaccgacaccgagcggctcatcggcgacgccgccaagaaccaggtggccatgaaccccaccaacaccgtcttcgatgccaagcggttgatcggcaggaggttctctgacccgtcagtgcagagtgacatgaagctatggccgttcaaggtcatccctggccctggtgacaagcctatgattgtagtctcctacaaggtggtgacagtgccggcctacttcaacgactcgcagaggcaagccaccaaggacgccggtgtcattgcgggcctcaatgtgatgcgtatcatcaacgagcccactgctgctgctattgcctacggtcttgacaagaaggcgagcagctctggcgagaagaacgtgctcatcttcgaccttggtggtggcacgtttgacgtgtcgctcctcaccatcgaggagggcatcttcgaggtgaaggccactgcgggtgacactcaccttggaggcgaggatttcgacaatcgcatggtgaaccacttcgtccaagagttcaagcgcaagcataagaaggacatcagcggcaaccctcgtgcactgcgccggctgcgcacggcgtgcgagcgcgccaagcgcacgctgtcatcgaccgcccagacgaccattgagatcgactccttgttcgagggcatcgacttctactctacaatcaccagggctcgctttgaggagctcaacatggacttgttccgcaagtgcatggaacctgtggagaagtgcctgcgcgacgccaagatggacaagagcagcgtgcacgacgtcgtgctcgtcggtggctccacccgcattcccaaggtgcagcagctgctgcaggatttcttcaacggcaaagaactctgcaagagcatcaaccccgacgaggctgtggcgtacggcgcggctgtacaggccgccatcctcagtggcgagggcaacgagaaggtcttctcgacgtactccgacaatcagccgggcgtcctgatacaggtgtacgagggtgagcgcgcgaggaccaaggacaacaacctcctcggcaagttcgagctctcgggcatccctcctgctccccgcggcgtgccccagatcaccgtcaccttcgacatcgacgccaatggcatcctcaacgtctctgctgaggacaagaccaccggccagaagaacaagatcacgatcactaacgacaagggccggcttagcaaggaggagattgagaagatggtgcaggaggctgagaagtacaaggccgaggacgaggaggtcaagaagaaggtggacgctaagaacacgctcgagaactatgcctataacatgaggaacaccatcaaggatgacaagatcgcctccaagctctcggcagatgacaagaaaaagatcgaggacgccgtcgatagcgccaccagctggctggacagcaaccagctagctgaggtggacgagttcgaagacaagatgaaggagctcgagggcatctgcaaccccatcatcgccaagatgtaccaaggcgctggcgcgggcatgggcgatgcggctggcatggacgaggatgccccgtctggtgggagcggtgctggtcccaagatcgaagaggtcgattaaattggttagcatcgggcggtttgttttggtgtggtctgaagtactcctgaactctgaaggttgtctgtgagatggggtggtgtccacagtctgtgggctgtggtcgaacttcttaataaatataagttttagttcctaatttgttttcagctacataagactttcttatatacaacccatcaagacaggcagaagccacaaaagacctgaccagaaaggccaacaaaagacaaacaactatcccaacaagttttcacggcttcagcatcttttatgtcaaccagaaatccgcctgtcaagaggacaccaccccaaggccctcccgaaagcttcacttgccgtctttcggattaacctgcttcctagcaccaccattctttgcaccttctttttctccatcagagatgatgagccttcgtcgttaatgcgagggagtggtgggcagcggagagatgcaggggcaagtgcgcggggaggaaggcgacgacatgaagggg

SEQ ID NO: 221907 - DNA, 772 bp, Zea Mays
gcaagttgcccaaggaccaaagcagctgcccaaggagaaagtcctggcgcaccgccgcgcggcctccgtactagtgagcgtccgcgtccatggccaaaggcaggttcaagcacaagcccacgggggagcgcagcttctccagccccgaggatatcgcggctggtacttcagcaggccgtccaaagaccttcgccaagcatgatgagaaggatgtctacagtagaaggggggaaccagaagaagaatcagaagattttatgaaaccaaaacacaagggtatagaaggtctgatcgagattgagaatccaaacctggtgaaaacaaagaatgtaaaggccaaggacattgatattgggaagccaactgatatgtccaggcgtgaaagagaggatcttgacaaacagaaatctcatgagcgccatatgaagcttcaagagcaaggaaaaacagaacaggctaggaaagatttagagcgtcttactataatccgtcaacaaagggcagaagctacaaagaagcgagaggaggaaaaggctgccaaagaagagaggaaggctaataaagctctcaagtgacctgcacacgatagcgttttgggagatgtgtagctagtagtggtggtgacgactcatcgatgagcgatggcaagttggcaactgtcagctttgtgcgcggtgtagtagccggagcagtagcaactttgttgaaaaatacattcatgctgtggcgtttttcttattcaatcgtaggtccttatactgctacagtgtaa

SEQ ID NO: 221908 - DNA, 4643 bp, Zea Mays
atggacgtggactcacgcatggcgacggagtccgactccgactccgacgcgcgcggtggcagcgggtccgggagcgagacccccacggcgtcctcgtccccatccgtagttagcttggcgccgacagcttcctcatctccttcttccacgcacccaacgccgaggaggacggcagcaaggtccaggccttcctcgcggagatggagagcgccccgaccaggagatcgaccacttgctcgaggtgaagccctgccctgcccctcactgaatcccgtgctccctcctcccccatcaacgctccctcctcacattccccgcacaccaagagacgaatctgtccatgctagggtttggattcgtgggtggagcccgagatgctcaagaatgatggtttcagtcatgtcattgctgaagaccgaactgaccagcttcatggttctctacaaccgcgacaacgtggagtccatcgggctagacgaagcggccaaatgcctcggcgtggagaggcgccggatctacgacattgtcaacgtgctcgagggcgttgggcatgtggcgcccccgctgcgaatttgcctctatgacaattgccatcctcgcatcccaaaccgtcgatgcccacccctaacacggttcctgacctccctgacagaggacttctctaaaggatataacaagtggtggtcaagaaatccaaatggagtccctctagaatctcttggatataagcaagctgggattccacatcttaagtggtttggggtggaggggcagtacaatgtcatggtgattgatctgcttggtccaagtctgaagggcttatttaactactgcagcagaaagttctcacttaaaacagtactaatgcttgctgatcagatgtgcttgagcaatcaggaacagatagtggagttacttgaacgtgaaaaattggagaagaagctgcaggatccagctgcagaaccaatatgtttgccagtagaatttttgaaagccatcacatgcaatttttcaactgaacgagaacttggcaggtgctttggagttgatatggtcggctgagaagttgaggaagaagtcatttctacctataagctaggggaatcagatacgccacaggctgcgcgatggtgctgtgggtcttcggctacggctccctcatctggaaccccggcttcgacttcgacgacaaaatcctcggcttcatcaagggctacaaccgcacctttaatctcgcttgcattgaccacagaggcacaccggagcatccggcgaggacctgcacgcttgaaaccgacgacgaggccatatgctggggaattgcatattgtgtcaagggtggtccagaaaaagagctaaaagcaatgtagtacttggagagaagagagtgtgagtacgaccagaagatatccattgatttctacaaggaaggagatcccttgaaaccagctgtgacgggcgtcttagtgttcatttccactccagatccaattggcaacaagtactatcttggccctgctcctttgcaggatatggcaaggcaaattgctacagccaatggccctactggctataatagggattacctgttctcaatggagaaggcattagccatcattagccacgaagatgattcgatcctagagcttgcaaacgaggtgaggaaggtgctcaacagaacaaaggagaccaagatcactgggtgcgtgaactcttctactacctcaagggtgagcaggtggactatggcgaggagcacagcaaggcttgtggccacaacaggtttgggagaatatatcacacagggcactatcctgtttgttacgagcacaacccagtgcattttgtggggcactctgttggcacacaggttgtgagggtgctgcatcagatgcttgccgacaagctaattgcacttgatatgggtgcattaattgctggtgccaaatatcatggagagtttgaggacagacccaaggctgttctcaaagaagttacatattctgatgggcagaccattcttttcattgatgagattcacaaattgcaaatgccatggctgcaaaaagcaaagttgctattgcgggagctgaaaactgtgaaggcagatttatcttttgcaaaggaacgctatgctcagcttgaagaagagaataaaatgttgcgtgagagttatgacatgggtgataatccagaagctaatgatcaggttatgttcctcaagtttgagcctcgacaatgcatgcttattctggcatcccgatttcttactgctacatttcgccctcttgcagtcaggttacgagcgcctttgctgcctaaggtgcatacaaacgtgaccaaaggaatcaccttgtgtgctctcagtgggcttgagagtagcatcatccttcaaacatgatgatgggtttccagctgatggtgtctctatagctcactggtatccttcaaaaagaaagtatggtgttgttttataagttctcatatttatgactaaataattctatagctcgctggtacgcaagttgattccttttctaattattatattgttttgttcatttctattcttttatgcatttccttcccatacacatgccaattttctcacaatatcttaagagtgctctgcaccaactgccgaaacaaaaaaggcaaaaaccagatcaactgcttctagacttcgaggaacttatttgttattggcatagtggcatatataatacctctgctcttttctatttagtgttcaaaatttgtaccaaaatacaaggtattctagatcctcactcaaccctctctctcctctgtcttttttctggcagcaaatattgagattccttttaaacttggtgtcacccaaaacagccagccaataacttaggaaaataacatctgaactactccatttgtcctaataagtagggtcaaggtggtatttagccaggctccttattttgtctaaattgcttggataccttgtgtttctgggcatagagtatgtttgcaactctgtatttgcttagatattataggcattgattcattgtaaatgttgcatggtctttcactgtttagggtgacaaacctgtagcagaatgtcatgactcatcatactgcagatagacatgacaaatattctttttatatgtggtggcgcttttgtagacttagaaaagactatttctgaaaggtattccgtatttcatatgtagaataggttattccaaagcaaaaaaagatccgccatgttttatggtcattgtcacaaagaagtgcttgcaaggtatgtcatacatagttagttttatacctatcccttttagtagttcctttattttattttctaaaccacaacatggtcactatttcagttattagtagttgtacgcaaaggtttattttagttcaaacatacttgtggacactacattatttcatccaatcagtgaactttataggtcttagttttatttttgttatattttgttgtgttgatatatgttgcttctcactttgatgcatgtggctgatgtgcttggtaaggtttaatactcatatctattatcgtttgaaacttgaaagcatggcattcatctacttgtgagcttttatgataacagtgaaagttggttttattgcaattggaatgaacatgacaaaagagaggtgtaacagaagaaacaaaattgtatgtaggtaaatacccgtgcgttgcaatagggaaaaaatagtgtaaatgttcctgttcggccaatatttttgggtgcttttatagaaattggtgtaggtgctgctccaccttccgttgcataaggctttaccaatccacatgtcagttgttctgcaaacaattaataagttgcagttttatagaacacaaggtgtgtataaatcatcacaaggcttcactattttgtgaatacttattggaaacttgatcttttaaaataaagttttgttgatttgcaccttttgcaaatgatatttttagttagtgatttataataaaattttgttgatgatataggaaccctgttgagactgagagcaccaaggttgtgagcgtttttggagcttaatggcttaatgagggtaaatctaccaaggacacacatagttaagccttgctcagctgacgactgctaaggaatttctgttaagtgcagtttggggggtcttctcaaccattgcttgacttaaggcaacacattagaggatattcatcagcatcagagatctgcaagctcttttacttttacaagaaagaaccggaatggtttcacttgagattcaagtagtgttgtgaggcatgtaactaacccaaaaaggcacttcaagcgggcaagaaagtccaatgcccttctcaagcacttcgaagcggctctatacgtcctacacgttcttcgatcagaattctttttttcatttgtttttttgtcttgctaatgtgcacgtcacttacaatgatactattgaaaatataggaatcaagtatgtataaacacatgtgtggcagacattttctgactgcctttcggttctttgggcattagtacttggtccttctgaagttaagttgctcggttcctatcattttcactccattcggtgttaaaaaatggagtacatgcacaatagag

SEQ ID NO: 221909 - DNA, 934 bp, Zea Mays
ttgttaccagctcttctctttctgcattgccgttctcggatgcactaaagctcatgtcttacttgaaggagtggtctttggttccttcaaaggttgagcttgtttgtagggtttgcttagtgctccttcagacacatcacaatcaattaactgccacgccagctgcaagatccttgttgacagaactgaaggatattctttactgtagagtaaaggaatgcaaggatactataggcttcaacctcgccgcaatggatcatataaaagaattgttggcgttgagatcagatgcacctttccgtgatgccaaggcgaaactcatggaaatcaagaaggagcagtcgaagcggtcaagtagtaggcttgacggagatgaaaaaaggaaaaagaagagaaagaaagcgtccgctgaaagctgagccaacaaacaaaaacaaaagaatgttgtattgttgttcttaccttctgcaactactacatggacgtgctcgtttccttggttcacgagcacgcagaatttttgttagatgggtgtaatcggaaagtgcgtggacataaagatttctagaggttcgtcttgcgtatctgatgaaagggaatatatcaggtggaacatatacattggtgtagtcgtgtaactaaggtcccgtctggtaggactttagcttgcccaaacacggttttagctctagttttttttttctaaaagcagcttgctgaagccatttcgtaaagaaacggtttatcctagtgctagaattgtttttctatattaaagtgttagcccgcattaaggatggaattattcttcttttatgtagtacaaaaatgttttatgtagtacaaaaatggctcttacttttagatgtttaagctgttttaaaaaatagtatttaggactagtttagaaatctgatttttatttttataaaag

SEQ ID NO: 221910 - DNA, 3752 bp, Zea Mays
gttgcgagtcttatgtttgtaaatatccgcactcgtaagtggtatcctcacctcacataactacataagagaccgaaacatatttccctccagaatccctcaacggaacgctgcagcagtgcaggtcgctttcttccccaaaattttgaaccccgaaccctagctctgctcctcagttccccgtctccatggacatcggcggcagcggcggcatcatattgtcgcccggatcggaggatgataagtttgcgcggaggcgctcccgccgtgtgagcttcgcggacaccaccgcggtgcacgtgttcgaccgcgacgaggacttcgagacgcctcccgaggagcgcgagcccgactccacccccgcacccccttctcccaggaggtcctcggttggccgggaggttgaggacgacacggaggaggatttcaaccgcccccctgtcatcttcctccacgacgtcgactcgtcgtacccagacagcgccgctgaatccatcgcctccgccgatgatgaaaacttttttggacctgtgtcggcaagctttattcaaacaggaagaccatcagattctggaatgtcagaggatgacaaccatgatataactatggattccaggacgttctctttgcattttcgcaatattgctccaccagatgactgtacagcctactcagctgggagtctaatgacacctaatactgcatctgagggacccctgaaggaacttactgcatctaatcctgcaagagcatcaattaatggccgagatacattgactgacatgagtttgttgagtggtaaccccagaacttatggttatgataagttgtcacccacgttgaacagtatgatgaagaagataaaagggagcaagcaaacaaactctcctaaacttggtatttctgatgtaacttctgattgtgtattaaccttgtctacatctgaggaagaaagtagggaagaaaatttatgcattgacaatggtgtatcttctgatgagctggtcatggttaatacaattgcagagcacatttctatgagaaatccagtttcgaccagcacagatctgattcaagatgacaatgaaatgataattgatgtccaggagaattcaaagaactgcaaccatgatcacatggatgatgaccctggtgccaataatactgcagaacctcctgcaaagatttccccagcatataagtcattcatgattaatggtgatgtgcaatcccacctagtcgatcaatcttcgtcaaaagatcgaccatctggatcaaattgcactgcaagtgtttcctccatgtgtaatgttgacatggaaacccatcttttggatcaactacctggtaaggataacacatatgctgcccagtcgtcaagtgaagctactgccattttgctgatggatgctgagcagctgcggcagaaaaatgaggtgatggatacagaaacagttctacacactccaagaactgcaggtctgcagttgcaagttccacgaggatccatatcctccttacgctcaaaaaggcataagcttttcactaatactgtatccaatagtaaagtagcaagacaggagggttgttcttcgggtactgagtttgttcaccatgacaagagactttcttctctgaagcatcaagaattggctgcagcttcccagttacaattggttgagaagaatgaacttggtcatcgagcaagtgacatgttcagcaatactgaagatcatgattctacgttatctgtttcttctcattctgttccaaagctgaagaaaaccaatgaatcttttgtcctaggcactcctcgaagacatgggctaaatgagtctactaaggtcctagatacattatgtcatgcctttactttggatagccaacctagtcgtgaatgcaactctcatgtggatttaaatggtgttggaagaaagagaactgctgaggaaaatggttatgctgtgcaagagtgtcctgaaaaaaccactaagacagcaagaagccctagaaaatctagaaaagagattccttgtgtatctcagccttctatgattgaagaaaaacagaatggtgctcatgataatggaaagtccgtggatattgattggagcaaggtagtatgtactataactaatgccacggagcaagttttgccagcatcaataagcaagtataatctacaacagcttgacatgctaagcgataggttggatgagattcatatggctagaaaatataaaaggctttctactgctgtgaggatcaaagctttctgtggtgataagcaaaagagattagaggaggcaaggtttctccatgacaagcttttctatgaaaaggcgaagctacaaataaataatatgaagctagttaaactccaaaaaaaggctcaactatgtcaagatggaattcaagagtgctgctttctgaaatccaagattttgggcgctggacacatggaggattcttcacttcctgcagctactacagtcagtgctggtgatagacaggaagaacttgatatcatttctgaaaagaggcttgaactcaaaattattcaacggaaggtggagaaattaaggagttcccttgaatgttttcacaatattgaaggtggcattggtagtgatagtgttgtgaggtatgctgaagagcagttgatgatgagaaatcagcatcgcatcatccactggcaagcagggctctgcaagttgaatgacatagttaaaaggggcaacaagtgtgatatcatcctcaactatcacaatttgttgttccaaagtgatacatctagcatatttgtgaacaattcactgaatggaaaccaaattggaaagacatttccaaatttggatgcatctttggcattcaattttgttttcgaagccgaggagaaccaaagagttagtgatttacagtccttgcagaagaagacaatggaaacaagcttgctgcttggaaatcttattgatgttttagaagaaatcaaattatctaagttggagttagtaaatcttacctccgctgcttttgttttggagtcccagacacgtaaacttggcctccacctgtctttcatgagtttcaagagtggcaagaagattgctttcatcatcgacatgacagacttgaaccgctcggtctacccttctgaaccatctgagctcattaaggtttttgaagcacatactacgctagcacagccaagcatagacgagaccatggcttctataaggaacctgcaatctggtcgcacagcaatactaagattgtgccggatggtatcccggctgattcatggttacaatgatgacctgatcactggagtgcaagctgtaggaagtaaacatcatccggatatgtaggtagtaggcattaacagtgttggttttgtttttgtttttgcatgtaggcttaagatgtttgaatgcataaagcagtccttttcaggtggacgtgcaagcgattttggttactgcaaatccttgtaactgcccgtttattacagcaacaatgcataactggtagcttggtgcgttagagtgatggattacagtcttgcagatatgtcggcactgttgtatacgagttagtctaaaaggagccaggctaatgttttctccccgcagctgggactgttgctgaaagattgtgcattttttttacaacgactccaatatatttaattaagcattgttacgcaaacacctctagaaaaggtgaagaaaagatttaataaaaagttcgac

SEQ ID NO: 221911 - DNA, 1353 bp, Zea Mays
agtgcgcgaaggctccgacggcgacggcaagaaggtggatccccgctgccccaacgcgcccaacccgttccacgtctgcaccgaccactgcctcgccaagatatccgaggccggccgctcgtcggagggagccaagtcgccgatctcgctcttctcccgccactcccgccgctcctcctcgtcctccgaagatggcagcgtgaagtccgcggggagcaagaaggtggatccaaggtgcccgaacgctggcaatctgttccatgaatgcggtgagcattgcgccgccaagatgcagcggtcggagcagcagcacaagggggtcaatctcaagtcaccgcgcaggaaagtggggaagaacgctacagcgatcccaaactggaaggttgatccgaggtgccctaacgcgtccaatccgttccacatgtgcgcccagtactgcttcgaccatctgagtgaaacagcgcagacaagtgcagcaaagtcagacaagagacgaggcaagggcgtttctgaagacgagggaagaggagaaaccaaaaccaaccctggttgcgccaacgcgtccaacccctaccacaagtgcggtgaccaatgcaagagaaagggtggtggtgataggtagaccgtagacgaggaaggtaaatttttccgctcataactctcagtttcatcaaacggtcgtcggtcaattggtggcagcttgatggggaaaaaaagaacattctccagtttttcgcgagcatcaagccaaagttaggtggatgtcaatttaagggtagacaaacggtcatctggttaaaactgaggcattgtaatatgcttactacaggctagtgaagttcctctgccaaccgagtcagtcgttcactcatttgttatctttgagtaagagctgctgctatattgttagtggcgaaaaaaattgctattttgcctcttacagttttgttgttatgtcaaccatgtgtctatgatttgtgagacatctgcttcaataatttgtgggtccgatgatacatcgatgaagcctatagatcgtaatggcacagaaagttgacagcttctatgccctttcattccggagatcatcttaaacgatgttcgtatgtgtctcaagaactgccaagctgcatctttctttctttctttcgctgtcttcttaaggggctgtccgttttttcagaatggagacatggaataattcctagccagtttgtttctctaatttatataagttttgattagctgaaatgattcctggtccatttatagacaaaccaataaggcgtaaacgatgttcctgatcgatctttcaactcttgggctcttggccccatccacctcccacccaga

SEQ ID NO: 221912 - DNA, 1491 bp, Zea Mays
agtgcgcgaaggctccgacggcgacggcaagaaggtggatccccgctgccccaacgcgcccaacccgttccacgtctgcaccgaccactgcctcgccaagatatccgaggccggccgctcgtcggagggagccaagtcgccgatctcgctcttctcccgccactcccgccgctcctcctcgtcctccgaagatggcagcgtgaagtccgcggggagcaagaaggtggatccaaggtgcccgaacgctggcaatctgttccatgaatgcggtgagcattgcgccgccaagatgcagcggtcggagcagcagcacaagggggtcaatctcaagtcaccgcgcaggaaagtggggaagaacgctacagcgatcccaaactggaaggttgatccgaggtgccctaacgcgtccaatccgttccacatgtgcgcccagtactgcttcgaccatctgagtgaaacagcgcagacaagtgcagcaaagtcagacaagagacgaggcaagggcgtttctgaagacgagggaagaggagaaaccaaaaccaaccctggttgcgccaacgcgtccaacccctaccacaagtgcggtgaccaatgcaagagaaagggtggtggtgataggtagaccgtagacgaggaaggcaggccggcaagacaggatctgtccggacggacgatcgacggcgggcgatgaagggaagaaagaaaaaacaaagctagttcccatcgaccgtccctgcgggctccgttctgtatgtagagtggtgtgcttccccgttttccattgtaatgcactatgtttctctgacgatgaaggttgcctgtacgagcagaagcctcctggagtgtttggtgtcatctttttttcttttttcttttggttcgctttcacggaaatggagacatgtttttggggttcccatcgctgtcttggcgtttattgttggaggaaaaaacaggagcaaggaggggacaaggaggaggaaggtgtggcagggcagggcggggcggctcatgatgcgcgatgaggtagatggccggccggccggcccttggacaggcgtggctggctgcctttctggttgggagttggagctggaacaaacccaggtggcagtcaggtacctgctgccttccagaagccgtggcgttgcgcagttgcagactttggcaggtcagcaaagcatagacgtcgtcggtcgagacgagaggggtaccagggcagggtgggactgggatgcaggctggcctggcctcaggatctggtggatcttggagtcaggaggacatgcagccggtgcgggtgatgtgatcatgcgtgcggtgcaaggtcagcaggttgggttgggaggggcggagccgaggaggtccacggccgcgcccacggagtgcgcacggcaccgacggccggcagggcagtcagacgtgcaccggcaccccgtgcgctgcgtctctgcaacggcaaccgaccccttcttccttccttttggttaa

SEQ ID NO: 221913 - DNA, 1486 bp, Zea Mays
gtgcgcgaaggctccgacggcgacggcaagaaggtggatccccgctgccccaacgcgcccaacccgttccacgtctgcaccgaccactgcctcgccaagatatccgaggccggccgctcgtcggagggagccaagtcgccgatctcgctcttctcccgccactcccgccgctcctcctcgtcctccgaagatggcagcgtgaagtccgcggggagcaagaaggtggatccaaggtgcccgaacgctggcaatctgttccatgaatgcggtgagcattgcgccgccaagatgcagcggtcggagcagcagcacaagggggtcaatctcaagtcaccgcgcaggaaagtggggaagaacgctacagcgatcccaaactggaaggttgatccgaggtgccctaacgcgtccaatccgttccacatgtgcgcccagtactgcttcgaccatctgagtgaaacagcgcagacaagtgcagcaaagtcagacaagagacgaggcaagggcgtttctgaagacgagggaagaggagaaaccaaaaccaaccctggttgcgccaacgcgtccaacccctaccacaagtgcggtgaccaatgcaagagaaagggtggtggtgataggtagaccgtagacgaggaaggccggcaagacaggatctgtccggacggacgatcgacggcgggcgatgaagggaagaaagaaaaaacaaagctagttcccatcgaccgtccctgcgggctccgttctgtatgtagagtggtgtgcttccccgttttccattgtaatgcactatgtttctctgacgatgaaggttgcctgtacgagcagaagcctcctggagtgtttggtgtcatctttttttcttttttcttttggttcgctttcacggaaatggagacatgtttttggggttcccatcgctgtcttggcgtttattgttggaggaaaaaacaggagcaaggaggggacaaggaggaggaaggtgtggcagggcagggcggggcggctcatgatgcgcgatgaggtagatggccggccggccggcccttggacaggcgtggctggctgcctttctggttgggagttggagctggaacaaacccaggtggcagtcaggtacctgctgccttccagaagccgtggcgttgcgcagttgcagactttggcaggtcagcaaagcatagacgtcgtcggtcgagacgagaggggtaccagggcagggtgggactgggatgcaggctggcctggcctcaggatctggtggatcttggagtcaggaggacatgcagccggtgcgggtgatgtgatcatgcgtgcggtgcaaggtcagcaggttgggttgggaggggcggagccgaggaggtccacggccgcgcccacggagtgcgcacggcaccgacggccggcagggcagtcagacgtgcaccggcaccccgtgcgctgcgtctctgcaacggcaaccgaccccttcttccttccttttggttaa

SEQ ID NO: 221914 - DNA, 476 bp, Zea Mays
agcccatcacctgcgaacgtgtgagccggactgcatgtcgtggaaggggcgagtgcaaaaacacacgagcgagatgtgtatctgtgattctggataggggcgctggcaccgattggctccggatatcgcagcgtggcggtcgctcagttcagtccgccatggaaggtgcagccggccaaatgctcgtcccgatcctcggcatcgttgccgtggccgccgtgaccttctacaccgtcagcttcatggagatgcgagacaaatccttcgaggagctcgacgagaagtactcggacttcgacgagtcaggcgggcggcagcggcggtctcgccgcagggccgagcgcgacaggaagaagtccaaatgattggccacgccgccatttgtgtccctgctggtttgagaggggactgacgggggatgaagacgcagctgctacttacaaatttttgggtttcaagtcatgggcaaaaaaaaa

SEQ ID NO: 221915 - DNA, 1598 bp, Zea Mays
gctagctgtcgtcttctccatcaagtagaaccagtagaggaagcaggagaatacaagctactgcccttagaaaaaaaaaaccctacgctagctagcatcctctttccattagccatcctagccttcgccccctcgacgagaagaaccacctcaaaaccgaacagccgcaaaagaaagctgctagctactctatacatgataactagaacaggaccgtgaagtaatatatatataatgacgaagtcaggggcgctacaacttgctcggagcaccggagggtcgcttagcaaggaccaagtcaaatccgccgttgatcagtatgtgaagtaccacgacctccacggaggcgaacaagaatcaagaaagtcaaattacgctgatttggcaaacaagtactatgatcttgtcactggcttctacgaatatggatggggcgactcattccattttgctggcggatatccgggtgaaacttcccgtgaagccattaagcggcaccagcattttatggcactacaattggggctcaagaagggtatgaaggttctggacgtgggatgtggaattgggggacctttaatagaaattgccagattcagctcaacttcaataactggattgaccaacaatgactaccatgtctcaaggggcaaggagcacatcttttcagcaggtttgagtgagcaatgctgctccttgaagggggacttcatgaatatgccaatagctgataacacctttgatgcggcctatgcaatacaggctacatgttacgcaccagaggcagtatgtctcccatcatacttgtgtccaagtcaaagttaagtattttgcactggatgaatggtgcctgactgaccgatttgatcccaacaacgctaagcatttgaccgccaaggctgagattgagcttggcgatggcctgcctgacatccgtaccactcgccagtgtgtccaagctatgaaagatgcaggattcgaggtcatttttgcaaaggatcttgctcaagattttccttgcccatggtaccagacgatggatcctaactacttttcatgggctaacttccaatgcacacgcccaggacggataatcacccgtgcaattgtcaatacactagagttcctccgtattgccccagcaggcagcgtgggagcctacaacgtcctaacgagtgcctctgatggccttctaaaaggtggtcgggaaggtatcttcacagcgtccttcttcgtcctgggccgcaagcctctcaaggaaagtgaaatagtgaacggcggcaacctttgagctgcaacatgagtatggggtcgtacttataagagctatgaatcatggccaacgtgttacgtgctgaagtgtgtttaccggtttgtcttatggctcttgcgcgtgtggtgggtcatgttcacgcagtagcatactagcatgtatctgcttgttgtgtgttgtactatgaactatctgaataaaaatgctgtttacgcgttgtattaatcgcaccatttcttggcaacacggctttgatcggaccaatgtattgtctggatctatcatacgagaattcatctataaagtattcttcatgttaggactt

SEQ ID NO: 221916 - DNA, 1353 bp, Zea Mays
cacatgctgtcactgttatttcttcgtggaagccattgatgtatgtgaagtaccacgacctccacggaggcgaacaagaatcaagaaagtcaaattacgctgatttggcaaacaagtactatgatcttgtcactggcttctacgaatatggatggggcgactcattccattttgctggcggtcccatactcccatgcttgtatttcagatatccgggtgaaacttcccgtgaagccattaagcggcaccagcattttatggcactacaattggggctcaagaagggtatgaaggttctggacgtgggatgtggaattgggggacctttaatagaaattgccagattcagctcaacttcaataactggattgaccaacaatgactaccatgtctcaaggggcaaggagcacatcttttcagcaggtttgagtgagcaatgctgctccttgaagggggacttcatgaatatgccaatagctgataacacctttgatgcggcctatgcaatacaggctacatgttacgcaccagaggcacaaggtgtctatagtgaggtctaccgtgtgctgaaacctgggcagtattttgcactggatgaatggtgcctgactgaccgatttgatcccaacaacgctaagcatttgaccgccaaggctgagattgagcttggcgatggcctgcctgacatccgtaccactcgccagtgtgtccaagctatgaaagatgcaggattcgaggtcatttttgcaaaggatcttgctcaagattttccttgcccatggtaccagacgatggatcctaactacttttcatgggctaacttccaatgcacacgcccaggacggataatcacccgtgcaattgtcaatacactagagttcctccgtattgccccagcaggcagcgtgggagcctacaacgtcctaacgagtgcctctgatggccttctaaaaggtggtcgggaaggtatcttcacagcgtccttcttcgtcctgggccgcaagcctctcaaggaaagtgaaatagtgaacggcggcaacctttgagctgcaacatgagtatggggtcgtacttataagagctatgaatcatggccaacgtgttacgtgctgaagtgtgtttaccggtttgtcttatggctcttgcgcgtgtggtgggtcatgttcacgcagtagcatactagcatgtatctgcttgttgtgtgttgtactatgaactatctgaataaaaatgctgtttacgcgttgtattaatcgcaccatttcttggcaacacggctttgatcggaccaatgtattgtctggatctatcatacgagaattcatctataaagtattcttcatgttaggactt

SEQ ID NO: 221917 - DNA, 909 bp, Zea Mays
ctccctagtccctcccaacccgcgcgccagcccaactgcccaacgaagctatcctcatgcaatgcatagagggctccatacctgtctcctcgagcacaaggtgaataatgccgggtttgttggccttgagtacatccaagatcgtatagatggcacttcaacgacgagcgaggagttttgtggcatggacatggacaagaggctggagctgctgctgaaatggtgcctccgggagacttgcgatgctgggaaggaatgcatgaggataaactaccacggcacgaagcaagtcacccgagcactcctgccactgctgctggcctccgacagcggaaggatcgtcaatgtctcctcggtgcttgggcagctcaggtttttcggcagcgaggcgctgaagcgggagctggacgacgtggcgagcctgaccgaggagaggctggacgaggtggcgggcgcgttcgtggcggacctggaggccggcgccgtggaggcgcgagggtggtggcccgccgggttctcgccggcttacatggtgtccaaggcggcgctgaacgcctactcgcgcgtcctggcgcggaggcaccccgcgctgcgcgtcaactgcgtgcacccgggcttcgtcaggaccgacatgaccgtcaacttcggcatgctcacgcccgaggaaggcggcagcagggtggtggccgtcgctctgctccccgacggcgggcccaccggcgcctacttccaggagcgccagcaggcgccgttcgtgtgacgcgctctgcctctgctctgcttccttcaccacccgatgcttgatagctatgtatctcttgaagttttcgcttgataatagttgatacacattcaatccccgcgcgtaatctctccgttgcaaaaataatggaatcctaagttttggac

SEQ ID NO: 221918 - DNA, 2608 bp, Zea Mays
cacacactacgcacggacgacatcgaggaaccctagactagagcacattgcacgggcgacggcgcgccaccggtgactggcgtcccctcctcggtcctcactccccagcatggcgacgccctgccgcagcagaaacgatcaaccgatcggaaaacattaatttgtattcgatttgaaagcgcacccggcacctgctccgttcctgcgctgcttggcttccggtctgtgtcaaagcttgcatctcacgcgagtcgcacaaggacgaaccctatacagctccaggaggtcggtgccctagccacctaggccaccttcctggagaccgggcggcgacgacggggacgaacgaccgcgatgggcttcgagcgtgtggagctgcggtgtcccagggagctggacccacggccgagctggacgctcggcgatgtgctcgctgagcttgacgcgctggatgccacccgccgcgctgcgccacccacgcccctgaagcagccgccggattgggctaacggtggtggtgagaaggcctttgtgatgcgggttgatgacgacgacgaagacgacacagaagatgaagacgatggtacaagtggtgggaagtcccgggctctggtggccaaaggagcaaggttctcgtgtaatgatcttgcatcaagtgattcagaggatgaattagatggtcaggttgccccataccacttaatggagaaaagggacctagcgaagagcattcttcttgagctggaacacgagcatcatctaaaagttcaagaagaagttagaagtaagctagcttcattggaggtatgccaccaaaatgaaattcggagaacgatctctgcatttgcccgacttcagaaatatgcagaatcaagaaaggagatagacagaagacttgatgtacacttccagagaagaataagtactcgataaacacttatctatggtccaaagggatcatgaacaaaaatcccagattgttgaacgccgaataagagatgatgcagctcttgaagaagctaaaagaaaagagcaagctgtcaaggaagaaaagttaaggcaggaaagagcccagcaagaagcagaggctagacagaaggaagctgcaaaattagcagctgaagcacgaaaaacagcatttgaggctgctaaaaaggaagcagcagaaaaggaagcagcagaaaaggaggctgctaaattgagagatgcagcagcttctcaacctagtccgaattcccagaataatactgcaggcattaaagtttttggcgataaatacgcactagaagcagagtcacggaggcatgcattagtacagaatcaagtgccagaaaacattcatcacagcaaggaattcagcaaatatgaccgacaaattgccaaatccataagtaaacttatgccaactactgacagtgtcagaacaagggctagtgagcttgttaaagctttaaatggacaggattgtccccgtccaatctcttgttgtctatttgctaacaagattatttccattgtcaagagtagaaatacaaaggacaagacctttggaaatttggcctttgcgtgtggatatgtcatgctattagttacaaatcaggtaccagacgcaatggattatcttttagctgagttcaacagagtttgcatatacacggttccaaagcatatgcatgctttgaatgcacaagcacgaaatagagattattacagactgataggttaccaggaagaaaatggacagctcgagagcactgaaagttatctaacatacgtcgttgcatatgttaaactctacgcagcaatgattcagacggaaatcaaaggtgttcgtcatcctcatggtttagctgagggatggaagtggcttgccatgttcctcaattctctcccagctactacagccactgcatgtgcccttcacgctttcctcaagatggctggttttgcacttcacaagaaatatgggtcacagttcatgaaaatcctggatgtaatatcacggtgctttttaccagctttgaaggaacaaggcaacaagatgcaggctgaggctgtcaacaatctacagaattacctgaacgacaagatctacctggaggaaccagaagggcagtacctcgtccagcaactactatccaaggagttgttcatgtaaagatcaaaacaccagatcggtatgagacatcgtgtgtgatcgtctgaagggcggtacctcgtccaagctaccactatcgcaagaggggcctcatgtagagatgaaagcaccagatcgatatggagctgttcgtgtttcagaaacacgatcgagcctttcaaatctcacgaacattatttatgggacagtcccccagatcatttcccccctctgcacgggatcctgacgatgtatttgtttatgtgacttgtatccggccaaggacaggtatgataggttgaggttttatgtttgttgtagttgtacatgtactactagaatcgtgaccagaacaaaataatactcgaccacttcggcgtgggcccagcggtggccaaagtcaaggtcaacttgacacgcgacactttgtctactctgtttgcaatgaaatctaatgtttgtgcttcaaac

SEQ ID NO: 221919 - DNA, 2500 bp, Zea Mays
gcacggacgacatcgaggaaccctagactagagcacattgcacgggcgacggcgcgccaccggtgactggcgtcccctcctcggtcctcactccccagcatggcgacgccctgccgcagcagaaacgatcaaccgatcggaaaacattaatttgtattcgatttgaaagcgcacccggcacctgctccgttcctgcgctgcttggcttccggtctgtgtcaaagcttgcatctcacgcgagtcgcacaaggacgaaccctatacagctccaggaggtcggtgccctagccacctaggccaccttcctggagaccgggcggcgacgacggggacgaacgaccgcgatgggcttcgagcgtgtggagctgcggtgtcccagggagctggacccacggccgagctggacgctcggcgatgtgctcgctgagcttgacgcgctggatgccacccgccgcgctgcgccacccacgcccctgaagcagccgccggattgggctaacggtggtggtgagaaggcctttgtgatgcgggttgatgacgacgacgaagacgacacagaagatgaagacgatggtacaagtggtgggaagtcccgggctctggtggccaaaggagcaaggttctcgtgtaatgatcttgcatcaagtgattcagaggatgaattagatggtcaggttgccccataccacttaatggagaaaagggacctagcgaagagcattcttcttgagctggaacacgagcatcatctaaaagttcaagaagaagttagaagtaagctagcttcattggaggtatgccaccaaaatgaaattcggagaacgatctctgcatttgcccgacttcagaaatatgcagaatcaagaaaggagatagacagaagacttgatgtacacttccagagaagaataagtactcgataaacacttatctatggtccaaagggatcatgaacaaaaatcccagattgttgaacgccgaataagagatgatgcagctcttgaagaagctaaaagaaaagagcaagctgtcaaggaagaaaagttaaggcaggaaagagcccagcaagaagcagaggctagacagaaggaagctgcaaaattagcagctgaagcacgaaaaacagcatttgaggctgctaaaaaggaagcagcagaaaaggaagcagcagaaaaggaggctgctaaattgagagatgcagcagcttctcaacctagtccgaattcccagaataatactgcaggaattcagcaaatatgaccgacaaattgccaaatccataagtaaacttatgccaactactgacagtgtcagaacaagggctagtgagcttgttaaagctttaaatggacaggattgtccccgtccaatctcttgttgtctatttgctaacaagattatttccattgtcaagagtagaaatacaaaggacaagacctttggaaatttggcctttgcgtgtggatatgtcatgctattagttacaaatcaggtaccagacgcaatggattatcttttagctgagttcaacagagtttgcatatacacggttccaaagcatatgcatgctttgaatgcacaagcacgaaatagagattattacagactgataggttaccaggaagaaaatggacagctcgagagcactgaaagttatctaacatacgtcgttgcatatgttaaactctacgcagcaatgattcagacggaaatcaaaggtgttcgtcatcctcatggtttagctgagggatggaagtggcttgccatgttcctcaattctctcccagctactacagccactgcatgtgcccttcacgctttcctcaagatggctggttttgcacttcacaagaaatatgggtcacagttcatgaaaatcctggatgtaatatcacggtgctttttaccagctttgaaggaacaaggcaacaagatgcaggctgaggctgtcaacaatctacagaattacctgaacgacaagatctacctggaggaaccagaagggcagtacctcgtccagcaactactatccaaggagttgttcatgtaaagatcaaaacaccagatcggtatgagacatcgtgtgtgatcgtctgaagggcggtacctcgtccaagctaccactatcgcaagaggggcctcatgtagagatgaaagcaccagatcgatatggagctgttcgtgtttcagaaacacgatcgagcctttcaaatctcacgaacattatttatgggacagtcccccagatcatttcccccctctgcacgggatcctgacgatgtatttgtttatgtgacttgtatccggccaaggacaggtatgataggttgaggttttatgtttgttgtagttgtacatgtactactagaatcgtgaccagaacaaaataatactcgaccacttcggcgtgggcccagcggtggccaaagtcaaggtcaacttgacacgcgacactttgtctactctgtttgcaatgaaatctaatgtttgtgcttcaaac

SEQ ID NO: 221920 - DNA, 1542 bp, Zea Mays
atggcgacgccctgccgcagcaggggcttcgagcgtgtggagctgcggtgtcccagggagctggacccacggccgagctggacgctcggcgatgtgctcgctgagcttgacgcgctggatgccacccgccgcgctgcgccacccacgcccctgaagcagccgccggattgggctaacggtggtggtgagaaggcctttgtgatgcgggttgatgacgacgacgaagacgacacagaagatgaagacgatggtacaagtggtgggaagtcccgggctctggtggccaaaggagcaaggttctcgtgtaatgatcttgcatcaagtgattcagaggatgaattagatggtcaggttgccccataccacttaatggagaaaagggacctagcgaagagcattcttcttgagctggaacacgagcatcatctaaaagttcaagaagaagttagaagtaagctagcttcattggaggtatgccaccaaaatgaaattcggagaacgatctctgcatttgcccgacttcagaaatatgcagaatcaagaaaggagatagacagaagacttgatgtacacttccagagaagaataagtactcgataaacacttatctatggtccaaagggatcatgaacaaaaatcccagattgttgaacgccgaataagagatgatgcagctcttgaagaagctaaaagaaaagagcaagctgtcaaggaagaaaagttaaggcaggaaagagcccagcaagaagcagaggctagacagaaggaagctgcaaaattagcagctgaagcacgaaaaacagcatttgaggctgctaaaaaggaagcagcagaaaaggaagcagcagaaaaggaggctgctaaattgagagatgcagcagcttctcaacctagtccgaattcccagaataatactgcagaaggcattaaagtttttggcgataaatacgcactagaagcagagtcacggaggcatgcattagtacagaatcaagtgccagaaaacattcatcacagcaaggaattcagcaaatatgaccgacaaattgccaaatccataagtaaacttatgccaactactgacagtgtcagaacaagggctagtgagcttgttaaagctttaaatggacaggattgtccccgtccaatctcttgttgtctatttgctaacaagattatttccattgtcaagagtagaaatacaaaggacaagacctttggaaatttggcctttgcgtgtggatatgtcatgctattagttacaaatcaggtaccagacgcaatggattatcttttagctgagttcaacagagtttgcatatacacggttccaaagcatatgcatgctttgaatgcacaagcacgaaatagagattattacagactgataggttaccaggaagaaaatggacagctcgagagcactgaaagttatctaacatacgtcgttgcatatgttaaactctacgcagcaatgattcagatataaggctatgtccagtagactggccttttgcagtggaacataaaggtgactcccta

SEQ ID NO: 221921 - DNA, 2332 bp, Zea Mays
atggcgacgccctgccgcagcaggggcttcgagcgtgtggagctgcggtgtcccagggagctggacccacggccgagctggacgctcggcgatgtgctcgctgagcttgacgcgctggatgccacccgccgcgctgcgccacccacgcccctgaagcagccgccggattgggctaacggtggtggtgagaaggcctttgtgatgcgggttgatgacgacgacgaagacgacacagaagatgaagacgatggtacaagtggtgggaagtcccgggctctggtggccaaaggagcaaggttctcgtgtaatgatcttgcatcaagaggatgaattagatggtcaggttgccccataccacttaatggagaaaagggacctagcgaagagcattcttcttgagctggaacacgagcatcatctaaaagttcaagaagaagttagaagtaagctagcttcattggaggtatgccaccaaaatgaaattcggagaacgatctctgcatttgcccgacttcagaaatatgcagaatcaagaaaggagatagacagaagacttgatgtacacttccagagaagaattgagcagcatttaaggcatcaagcatttcttatactattccaatatttgtatccaaatgcagaagtactcgataaacacttatctatggtccaaagggatcatgaacaaaaatcccagattgttgaacgccgaataagagatgatgcagctcttgaagaagctaaaagaaaagagcaagctgtcaaggaagaaaagttaaggcaggaaagagcccagcaagaagcagaggctagacagaaggaagctgcaaaattagcagctgaagcacgaaaaacagcatttgaggctgctaaaaaggaagcagcagaaaaggaagcagcagaaaaggaggctgctaaattgagagatgcagcagcttctcaacctagtccgaattcccagaataatactgcagaaggcattaaagtttttggcgataaatacgcactagaagcagagtcacggaggcatgcattagtacagaatcaagtgccagaaaacattcatcacagcaaggaattcagcaaatatgaccgacaaattgccaaatccataagtaaacttatgccaactactgacagtgtcagaacaagggctagtgagcttgttaaagctttaaatggacaggattgtccccgtccaatctcttgttgtctatttgctaacaagattatttccattgtcaagagtagaaatacaaaggacaagacctttggaaatttggcctttgcgtgtggatatgtcatgctattagttacaaatcaggtaccagacgcaatggattatcttttagctgagttcaacagagtttgcatatacacggttccaaagcatatgcatgctttgaatgcacaagcacgaaatagagattattacagactgataggttaccaggaagaaaatggacagctcgagagcactgaaagttatctaacatacgtcgttgcatatgttaaactctacgcagcaatgattcagacggaaatcaaaggtgttcgtcatcctcatggtttagctgagggatggaagtggcttgccatgttcctcaattctctcccagctactacagccactgcatgtgcccttcacgctttcctcaagatggctggttttgcacttcacaagaaatatgggtcacagttcatgaaaatcctggatgtaatatcacggtgctttttaccagctttgaaggaacaaggcaacaagatgcaggctgaggctgtcaacaatctacagaattacctgaacgacaagatctacctggaggaaccagaagggcagtacctcgtccagcaactactatccaaggagttgttcatgtaaagatcaaaacaccagatcggtatgagacatcgtgtgtgatcgtctgaagggcggtacctcgtccaagctaccactatcgcaagaggggcctcatgtagagatgaaagcaccagatcgatatggagctgttcgtgtttcagaaacacgatcgagcctttcaaatctcacgaacattatttatgggacagtcccccagatcatttcccccctctgcacgggatcctgacgatgtatttgtttatgtgacttgtatccggccaaggacaggtatgataggttgaggttttatgtttgttgtagttgtacatgtactactagaatcgtgaccagaacaaaataatactcgaccacttcggcgtgggcccagcggtggccaaagtcaaggtcaacttgacacgcgacactttgtctactctgtttgcaatgaaatctaatgtttgtgcttcaaac

SEQ ID NO: 221922 - DNA, 2198 bp, Zea Mays
atggcgacgccctgccgcagcaggggcttcgagcgtgtggagctgcggtgtcccagggagctggacccacggccgagctggacgctcggcgatgtgctcgctgagcttgacgcgctggatgccacccgccgcgctgcgccacccacgcccctgaagcagccgccggattgggctaacggtggtggtgagaaggcctttgtgatgcgggttgatgacgacgacgaagacgacacagaagatgaagacgatggtacaagtggtgggaagtcccgggctctggtggccaaaggagcaaggttctcgtgtaatgatcttgcatcaagtgattcagaggatgaattagatggtcaggttgccccataccacttaatggagaaaagggacctagcgaagagcattcttcttgagctggaacacgagcatcatctaaaagttcaagaagaagttagaagtaagctagcttcattggaggtatgccaccaaaatgaaattcggagaacgatctctgcatttgcccgacttcagaaatatgcagaatcaagaaaggagatagacagaagacttgatgtacacttccagagaagaattgcagaagtactcgataaacacttatctatggtccaaagggatcatgaacaaaaatcccagattgttgaacgccgaataagagatgatgcagctcttgaagaagctaaaagaaaagagcaagctgtcaaggaagaaaagttaaggcaggaaagagcccagcaagaagcagaggctagacagaaggaagctgcaaaattagcagctgaagcacgaaaaacagcatttgaggctgctaaaaaggaagcagcagaaaaggaagcagcagaaaaggaggctgctaaattgagagatgcagcagcttctcaacctagtccgaattcccagaataatactgcaggcattaaagtttttggcgataaatacgcactagaagcagagtcacggaggcatgcattagtacagaatcaagtgccagaaaacattcatcacagcaaggaattcagcaaatatgaccgacaaattgccaaatccataagtaaacttatgccaactactgacagtgtcagaacaagggctagtgagcttgttaaagctttaaatggacaggattgtccccgtccaatctcttgttgtctatttgctaacaagattatttccattgtcaagagtagaaatacaaaggacaagacctttggaaatttggcctttgcgtgtggatatgtcatgctattagttacaaatcaggtaccagacgcaatggattatcttttagctgagttcaacagagtttgcatatacacggttccaaagcatatgcatgctttgaatgcacaagcacgaaatagagattattacagactgataggttaccaggaagaaaatggacagctcgagagcactgaaagttatctaacatacgtcgttgcatatgttaaactctacgcagcaatgattcagacggaaatcaaaggtgttcgtcatcctcatggtttagctgagggatggaagtggcttgccatgttcctcaattctctcccagctactacagccactgcatgtgcccttcacgctttcctcaagctttgaaggaacaaggcaacaagatgcaggctgaggctgtcaacaatctacagaattacctgaacgacaagatctacctggaggaaccagaagggcagtacctcgtccagcaactactatccaaggagttgttcatgtaaagatcaaaacaccagatcggtatgagacatcgtgtgtgatcgtctgaagggcggtacctcgtccaagctaccactatcgcaagaggggcctcatgtagagatgaaagcaccagatcgatatggagctgttcgtgtttcagaaacacgatcgagcctttcaaatctcacgaacattatttatgggacagtcccccagatcatttcccccctctgcacgggatcctgacgatgtatttgtttatgtgacttgtatccggccaaggacaggtatgataggttgaggttttatgtttgttgtagttgtacatgtactactagaatcgtgaccagaacaaaataatactcgaccacttcggcgtgggcccagcggtggccaaagtcaaggtcaacttgacacgcgacactttgtctactctgtttgcaatgaaatctaatgtttgtgcttcaaac

SEQ ID NO: 221923 - DNA, 2402 bp, Zea Mays
aaacgatcaaccgatcggaaaacattaatttgtattcgatttgaaagcgcacccggcacctgctccgttcctgcgctgcttggcttccggtctgtgtcaaagcttgcatctcacgcgagtcgcacaaggacgaaccctatacagctccaggaggtcggtgccctagccacctaggccaccttcctggagaccgggcggcgacgacggggacgaacgaccgcgatgggcttcgagcgtgtggagctgcggtgtcccagggagctggacccacggccgagctggacgctcggcgatgtgctcgctgagcttgacgcgctggatgccacccgccgcgctgcgccacccacgcccctgaagcagccgccggattgggctaacggtggtggtgagaaggcctttgtgatgcgggttgatgacgacgacgaagacgacacagaagatgaagacgatggtacaagtggtgggaagtcccgggctctggtggccaaaggagcaaggttctcgtgtaatgatcttgcatcaagtgattcagaggatgaattagatggtcaggttgccccataccacttaatggagaaaagggacctagcgaagagcattcttcttgagctggaacacgagcatcatctaaaagttcaagaagaagttagaagtaagctagcttcattggaggtatgccaccaaaatgaaattcggagaacgatctctgcatttgcccgacttcagaaatatgcagaatcaagaaaggagatagacagaagacttgatgtacacttccagagaagaattgcagaagtactcgataaacacttatctatggtccaaagggatcatgaacaaaaatcccagattgttgaacgccgaataagagatgatgcagctcttgaagaagctaaaagaaaagagcaagctgtcaaggaagaaaagttaaggcaggaaagagcccagcaagaagcagaggctagacagaaggaagctgcaaaattagcagctgaagcacgaaaaacagcatttgaggctgctaaaaaggaagcagcagaaaaggaagcagcagaaaaggaggctgctaaattgagagatgcagcagcttctcaacctagtccgaattcccagaataatactgcagaaggcattaaagtttttggcgataaatacgcactagaagcagagtcacggaggcatgcattagtacagaatcaagtgccagaaaacattcatcacagcaaggaattcagcaaatatgaccgacaaattgccaaatccataagtaaacttatgccaactactgacagtgtcagaacaagggctagtgagcttgttaaagctttaaatggacaggattgtccccgtccaatctcttgttgtctatttgctaacaagattatttccattgtcaagagtagaaatacaaaggacaagacctttggaaatttggcctttgcgtgtggatatgtcatgctattagttacaaatcaggtaccagacgcaatggattatcttttagctgagttcaacagagtttgcatatacacggttccaaagcatatgcatgctttgaatgcacaagcacgaaatagagattattacagactgataggttaccaggaagaaaatggacagctcgagagcactgaaagttatctaacatacgtcgttgcatatgttaaactctacgcagcaatgattcagacggaaatcaaaggtgttcgtcatcctcatggtttagctgagggatggaagtggcttgccatgttcctcaattctctcccagctactacagccactgcatgtgcccttcacgctttcctcaagctttgaaggaacaaggcaacaagatgcaggctgaggctgtcaacaatctacagaattacctgaacgacaagatctacctggaggaaccagaagggcagtacctcgtccagcaactactatccaaggagttgttcatgtaaagatcaaaacaccagatcggtatgagacatcgtgtgtgatcgtctgaagggcggtacctcgtccaagctaccactatcgcaagaggggcctcatgtagagatgaaagcaccagatcgatatggagctgttcgtgtttcagaaacacgatcgagcctttcaaatctcacgaacattatttatgggacagtcccccagatcatttcccccctctgcacgggatcctgacgatgtatttgtttatgtgacttgtatccggccaaggacaggtatgataggttgaggttttatgtttgttgtagttgtacatgtactactagaatcgtgaccagaacaaaataatactcgaccacttcggcgtgggcccagcggtggccaaagtcaaggtcaacttgacacgcgacactttgtctactctgtttgcaatgaaatctaatgtttgtgcttcaaac

SEQ ID NO: 221924 - DNA, 1538 bp, Zea Mays
atggaggaggaggcgccgcccatggagttggtccgggagaagaagctctctgagaagatccgcctttgtaagatggaggttctgaagaaatcacatacctctgttgaagacagtgatcacatatttctagagtcctctggcttgcaggatggtttgagttgcaagaaggatctccatagttgcggcaccaaagcttcagatgaggaaatttctgatcggttgcaagagaatcatgacaacacccagccaagtgataaccataactattcggtagatcaaactcaactgccctttcttcaagccctactgagagtacagatgaaacggagaggacaccaaacctacagaagcatgaattaatacaagccctcatgttctccaggttgtaccataccattcatacttgtgcgttcacttttgcattgttgtatgggttataaacaaccacctaccaaccatctggtgttgggtttggatcactatggtgaaacatttacagttaatcggagctaattcgtatagcgactttgaaatcttacaaccacaaactggagaacggatgagactgctgtaacaccttatgataagcacaccttttggttctttgtgactgcaacttttggttctctattgactatatactgtacttctgcccacaatgcttccattccattcactcctgataattttatgaccttcattcattgcatctattgtcatcagagattttggatggttctatccacaatggcatcatgtgtattccttgcagtcatcgtttcttggacaaactgccagtggttcactggcatcttctcacagataagtctatagatcctacgtatttggtagtgatgacagcaacagcagcagtaggagctgcaactctactgcagagagtaattcagatacggaccaagccaactcctcccaacccacgaaggccaagttcagttcaggcgtttcactcttcgacatcctgcgcaggacatcagagcagagcaatcaggaaagctgtagcacagtcagcggtgcatcggttctcggcattcaaattattaaagaggttttctagggtgagctcgaaaaattgacaactcccaggaggttcaagacagatcacagtctcacagatggtgcctgtatggttggagattctgaattctgaccactggcctggaagttcacgacgaaagctgtctagaaaaaggcttcaggcgaggctcgtgaaaaaggagaggcgaggatggctcctggttgccattcatcttcgtgctgttagtgccgtgagggtgtgctgttggagcttttttttttcttcacggctggggacggtggatagggatgaaaacggtcggaaacggtatttattcggtaatcagttttttctttgattatgaataaatagaatatagaatatataatacaaatttgtattcttgtttttaacatccagcttgttaagattcataaaaggtaaacctcaaattcatcctacattttttcaaataatagatataaacttcggtatggattcg

SEQ ID NO: 221925 - DNA, 2124 bp, Zea Mays
tagaaatcacattgtcctgtactactaatagtaatcacattgtcctcgtcgtcgtcctatcttctcttgctcttctcctccggcctcctcggtccttgctcacccgaaccagcaaccctaatccgtggccgcggacccgccgcaagctccatcgcgcgaatagattggggattcagtcgaggctacgcgggaactggtcgcgctcgagatcttagcctccgcacctgaaaccattggctccattgctattgctgtcgtggttcaggtgatgaaatcttggggagcgcgcctcgctcggtcctaagatgctggcgagctacggaggtggtggccgcggtgtccatctctcctcccacaaggacatcctcctcggccgcggcggccggagcttcctcttgggcaacacgtggtttctcctctccacctacccggcgcgcctcctgcacaccacggaccgccgcgcgcccgccgctttcttggccgtgatcaaccggcccccctgcatgcggccgcaccgcgctgggcagggcctgctgcagaggggtggtattgtcatggctgcttgcggctatgctcttgggcgagctgagctgggtgctgccaagcgccagcagccggataaggatccatctgcagggacgcgctcctcgaatgttgcagccacgggatcactgggcagtgcagcacggccagacgtctcttttaggtacagaggggcggattcttgtaagaaggtagctgcaagcttgaagtcgtctgagccatgggggaacagggcattctggacaaacgccgctgggccaggttggaagttgagctttgctgttgagccatggaccaagggctttagcacgtcgtgtgcggcgccatattctgctggagccacagagcatcaattatcgctcgatgagaaggtggataactccaccgttgcatctgattctgatgggaagtcaccagtttctgaaaaattgaagtttctctctggttcatgttacttgcctcaccctgataaggaggctactggtggtgaggatgcacatttcattagcattgatgagcatgtgattggtgtagcagatggtgttggtggttgggcagatgttggtatcgatgctggactatatgccaaggagctaatgagaaattcaatgagtgcaatcaaagatgagccagaagggaccatcgatccaaccagagttttggaaaaggcttatatgagcaccaaagcaaggggatcatccactgcatgtatcatcactcttaaagatcagggtatccatgctgtaaatcttggggacagtggtttcgtagtagtccgagacggtcgaactgttctcaggtcaccctcacagcagcatgatttcaacctcacttatcagcttgagagtggaggtggcagtgatcttcctagttctgcacaagtatttcacttcccggttgcccccggtgatgttattgttgctggcacggacggactttttgacaatctatacaacaatgagataagtggtgttatcgttgaagcgctcagggttggacttgaacctcaagttgcggcacaaaaaattgctgccctggctcgacaaagagccacagacaaaaataggcagtcaccatttgcatcggccgcccaagaagctgggtaccggtactacggtgggaagctcgacgacataacggttgtggtgtcgtatgtgaaaagcgcttgattcgagcctttctttttattagatgtaatgtcaaaatcttagtcccgaatttaatggcacatgtgttctcaaggtgtgaaatcccctgagatactagaagcactcctgctgggtttagccctggaatacgttagcaaaccattacaccattttacttgtttgccactgtgagtaatcttctttttatatataattctctaaaaccagggcggtcgtttcgcccttggagttggagggggaggataatgacctgctggaaccaaattttgttgtaaatattgtcgattgccgaatgataacatgttggactcaatggtggattgttgatgctgtttgaaatgtttctcttgaccccggagaacggcttctcaatatattgtcagtatgagttccatagaattgaaatgcaaga

SEQ ID NO: 221926 - DNA, 2057 bp, Zea Mays
ttctcttgctcttctcctccggcctcctcggtccttgctcacccgaaccagcaaccctaatccgtggccgcggacccgccgcaagctccatcgcgcgaatagattggggattcagtcgaggctacgcgggaactggtcgcgctcgagatcttagcctccgcacctgaaaccattggctccattgctattgctgtcgtggtgatgaaatcttggggagcgcgcctcgctcggtcctaagatgctggcgagctacggaggtggtggccgcggtgtccatctctcctcccacaaggacatcctcctcggccgcggcggccggagcttcctcttgggcaacacgtggtttctcctctccacctacccggcgcgcctcctgcacaccacggaccgccgcgcgcccgccgctttcttggccgtgatcaaccggcccccctgcatgcggccgcaccgcgctgggcagggcctgctgcagaggggtggtattgtcatggctgcttgcggctatgctcttgggcgagctgagctgggtgctgccaagcgccagcagccggataaggatccatctgcagggacgcgctcctcgaatgttgcagccacgggatcactgggcagtgcagcacggccagacgtctcttttaggtacagaggggcggattcttgtaagaaggtagctgcaagcttgaagtcgtctgagccatgggggaacagggcattctggacaaacgccgctgggccaggttggaagttgagctttgctgttgagccatggaccaagggctttagcacgtcgtgtgcggcgccatattctgctggagccacagagcatcaattatcgctcgatgagaaggtggataactccaccgttgcatctgattctgatgggaagtcaccagtttctgaaaaattgaagtttctctctggttcatgttacttgcctcaccctgataaggaggctactggtggtgaggatgcacatttcattagcattgatgagcatgtgattggtgtagcagatggtgttggtggttgggcagatgttggtatcgatgctggactatatgccaaggagctaatgagaaattcaatgagtgcaatcaaagatgagccagaagggaccatcgatccaaccagagttttggaaaaggcttatatgagcaccaaagcaaggggatcatccactgcatgtatcatcactcttaaagatcagggtatccatgctgtaaatcttggggacagtggtttcgtagtagtccgagacggtcgaactgttctcaggtcaccctcacagcagcatgatttcaacctcacttatcagcttgagagtggaggtggcagtgatcttcctagttctgcacaagtatttcacttcccggttgcccccggtgatgttattgttgctggcacggacggactttttgacaatctatacaacaatgagataagtggtgttatcgttgaagcgctcagggttggacttgaacctcaagttgcggcacaaaaaattgctgccctggctcgacaaagagccacagacaaaaataggcagtcaccatttgcatcggccgcccaagaagctgggtaccggtactacggtgggaagctcgacgacataacggttgtggtgtcgtatgtgaaaagcgcttgattcgagcctttctttttattagatgtaatgtcaaaatcttagtcccgaatttaatggcacatgtgttctcaaggtgtgaaatcccctgagatactagaagcactcctgctgggtttagccctggaatacgttagcaaaccattacaccattttacttgtttgccactgtgagtaatcttctttttatatataattctctaaaaccagggcggtcgtttcgcccttggagttggagggggaggataatgacctgctggaaccaaattttgttgtaaatattgtcgattgccgaatgataacatgttggactcaatggtggattgttgatgctgtttgaaatgtttctcttgaccccggagaacggcttctcaatatattgtcagtatgagttccatagaattgaaatgcaaga

SEQ ID NO: 221927 - DNA, 2645 bp, Zea Mays
aaaatgcaaggtaccgagaaagtcaacactcaccagcatctaaagcagcactgacttccttgtaaacagaactcaagtttcagttgaaccaaccggaaccgtgagaaatcaaaacgtgtatgctgcgttttcgatattttcagcagaatatcgcgaacggttggagaaagccaactattctctctctatctttgttttggcgttattcctaaaaaaaaaaaaacagaacaaaaccccactccctcgcgctccctatccgcacatgaatcgtcctccctcccgtctcccgaaacctcgtccgccggttcccgtcgccatggtggtggtagtgtccacctccctatgctccttcctgcccgcgcacccgttcagcctcgcgcgccctcgccgtccccacccaacgaacccgaccgccaaacccctctcccgtaccctctccatccgctgcatcgccacaaccgcggcgggacccccgccgctcccaccgccgaagctggtccgctgcccagctctcgaccgccaggcggcgcgcgcaagccgactccgctttgcgcgcaagctcctcaccctcctcctctccaagccgcgccatttcctcccgctccgcgtgctcaaccgctgccgccgcttcctcggcctcccgcgccgcggccgcccgctcatccccatggtcctccgctacccgaccctcttccgcctcttccaggcccacacctccctcccgctctccccgtccctctccaccctcgcggtcgcgctcactcccgccgccgaggcgctcgccgccgatcttgcggcgctccgcgccaccggcacaggcgcaggcgcgctcgccgccaagatccaccgccttctcctcatgaccccgcgccgaaacattccggtgtccccgttcgagccactggatgagggcgctagtctggagatgttggagcggcgggcgtgtgctgtggtgcgggaggtgctggccatgacggtggagaagcggacgctggtggatcacctcacgcacttcaggaaagaccttggcttgccaaaccggctgcgcgccatgctggtgcgacatccagagctgttttatgtcagtgtgaagggggtgcgtcactcagtgttccttgtggaggcgtttgatgatgatgggaggctcctagtggaggatgagatgctggttgggagggataggctggaggagcttgttcgggagggaaagcggatgaggcgtgctcggaagaaaggtgttctcacgttcgatggtgacagtgatgaggatgaagatgatgatgcagcagaagaggaaggttcattaaaggtggatgatgaatttggggacttgtttgaggatggtgtcattggggaggactgggaggaggtaggcgatggaggtggaagtgatgcatatgaagagtacgatgctgaatcaggtgacatggaggagttttgggtcaagaaggctgtggctcaaggactggttggcaatggtaatgagcaggatgtttggtgagtgcatcagcttgtgggactgctcaggaagttaacgaagattgagaattcctcaagtgtgcttttctcagcaatgcacataaaccagtaagcatcagtacatatccgggtatcttggacctcttggtcccatttgccgcctgtctgttggtacttgcaaggaggcatgctctcttacttcccaagatctcttgcacggaaacacatccaaagatagcacagcttctagaacatcacaaacctaatgtgtcacttcttatgctaaagtgtgcagagtgcgatagcttctctgctacagaaaactttgaaaaagatggcgtttcatctcttaaggaggcagccactgtatccgtgttagagttgaatgtgccctcctgtcagaagcgtttatgtattataggaggtactgctctaaggtgaaagagcaatgctcagcagatatgatacatgctgaggatgcattcaaaagctcttggatttatcatgctgaggtgatgatggctgagttttgtactgtctgcattgaaaagaatttaattgataaaatgattgatctgccctgggattccgaggaagacaaacatcttcacaagttcctcttcaactctgctcgagaagtgcgcatgaaaccaaatgatagtctgcttgttgtctactaccttgggatacaggtctctggatatgctgagaaacctttcatcttaaatggaactggtgtagcccaaaatggccctgctaaaaggtctgtctctggatatgctggctaccagccaaggataacatcttgattctgcacgctggtttgtggcgatatgtttcgtcgtggtcctggttttaatttgggagttcaaaatgtaatatcagtggaatgaaattcgtgcgttttgagtagctcggggtatagaatttgaatctgactacgtttcaaatactagagttagatgactgcagtggctggcttccagcttctttattatttttgtctattattctcctatctgtcaatgtggccggtttacagtcaattagcgctaacagaggctacatcattcagtgacaaaaaaaaatagtgaatggtgaaggtatacaaactgagctgtgtgttgtgataatattcgtcagtattctcaacgggtatctaaacc

SEQ ID NO: 221928 - DNA, 2274 bp, Zea Mays
aatcgtcctccctcccgtctcccgaaacctcgtccgccggttcccgtcgccatggtggtggtagtgtccacctccctatgctccttcctgcccgcgcacccgttcagcctcgcgcgccctcgccgtccccacccaacgaacccgaccgccaaacccctctcccgtaccctctccatccgctgcatcgccacaaccgcggcgggacccccgccgctcccaccgccgaagctggtccgctgcccagctctcgaccgccaggcggcgcgcgcaagccgactccgctttgcgcgcaagctcctcaccctcctcctctccaagccgcgccatttcctcccgctccgcgtgctcaaccgctgccgccgcttcctcggcctcccgcgccgcggccgcccgctcatccccatggtcctccgctacccgaccctcttccgcctcttccaggcccacacctccctcccgctctccccgtccctctccaccctcgcggtcgcgctcactcccgccgccgaggcgctcgccgccgatcttgcggcgctccgcgccaccggcacaggcgcaggcgcgctcgccgccaagatccaccgccttctcctcatgaccccgcgccgaaacattccggtgaacaggctcgtccacctcgcccccgacctcggcttttccatggacttccgcgcgacgctttgcccccgccacccggacctcttcagactcgtgaacacctcccgcggccacgcactccagctcgctgatcccccgccaacgccccctccgccgcccctctctcttcgccccgccgcgccgcccgaccgcctcatggaccggccgcggaggtttccgcacctcccgctccgccgcgggcttaacctccgccgggtgcaccgggactacctcctgcggttccatagccttcccgaggtgtccccgttcgagccactggatgagggcgctagtctggagatgttggagcggcgggcgtgtgctgtggtgcgggaggtgctggccatgacggtggagaagcggacgctggtggatcacctcacgcacttcaggaaagaccttggcttgccaaaccggctgcgcgccatgctggtgcgacatccagagctgttttatgtcagtgtgaagggggtgcgtcactcagtgttccttgtggaggcgtttgatgatgatgggaggctcctagtggaggatgagatgctggttgggagggataggctggaggagcttgttcgggagggaaagcggatgaggcgtgctcggaagaaaggtgttctcacgttcgatggtgacagtgatgaggatgaagatgatgatgcagcagaagaggaaggttcattaaaggtggatgatgaatttggggacttgtttgaggatggtgtcattggggaggactgggaggaggtaggcgatggaggtggaagtgatgcatatgaagagtacgatgctgaatcaggtgacatggaggagttttgggtcaagaaggctgtggctcaaggactggttggcaatggtaatgagcaggatgtttggaggtactgctctaaggtgaaagagcaatgctcagcagatatgatacatgctgaggatgcattcaaaagctcttggatttatcatgctgaggtgatgatggctgagttttgtactgtctgcattgaaaagaatttaattgataaaatgattgatctgccctgggattccgaggaagacaaacatcttcacaagttcctcttcaactctgctcgagaagtgcgcatgaaaccaaatgatagtctgcttgttgtctactaccttgggatacaggtctctggatatgctgagaaacctttcatcttaaatggaactggtgtagcccaaaatggccctgctaaaaggtctgtctctggatatgctggctaccagccaaggataacatcttgattctgcacgctggtttgtggcgatatgtttcgtcgtggtcctggttttaatttgggagttcaaaatgtaatatcagtggaatgaaattcgtgcgttttgagtagctcggggtatagaatttgaatctgactacgtttcaaatactagagttagatgactgcagtggctggcttccagcttctttattatttttgtctattattctcctatctgtcaatgtggccggtttacagtcaattagcgctaacagaggctacatcattcagtgacaaaaaaaaatagtgaatggtgaaggtatacaaactgagctgtgtgttgtgataatattcgtcagtattctcaacgggtatctaaacc

SEQ ID NO: 221929 - DNA, 3107 bp, Zea Mays
cctccctcccgtctcccgaaacctcgtccgccggttcccgtcgccatggtggtggtagtgtccacctccctatgctccttcctgcccgcgcacccgttcagcctcgcgcgccctcgccgtccccacccaacgaacccgaccgccaaacccctctcccgtaccctctccatccgctgcatcgccacaaccgcggcgggacccccgccgctcccaccgccgaagctggtccgctgcccagctctcgaccgccaggcggcgcgcgcaagccgactccgctttgcgcgcaagctcctcaccctcctcctctccaagccgcgccatttcctcccgctccgcgtgctcaaccgctgccgccgcttcctcggcctcccgcgccgcggccgcccgctcatccccatggtcctccgctacccgaccctcttccgcctcttccaggcccacacctccctcccgctctccccgtccctctccaccctcgcggtcgcgctcactcccgccgccgaggcgctcgccgccgatcttgcggcgctccgcgccaccggcacaggcgcaggcgcgctcgccgccaagatccaccgccttctcctcatgaccccgcgccgaaacattccggtgtccccgttcgagccactggatgagggcgctagtctggagatgttggagcggcgggcgtgtgctgtggtgcgggaggtgctggccatgacggtggagaagcggacgctggtggatcacctcacgcacttcaggaaagaccttggcttgccaaaccggctgcgcgccatgctggtgcgacatccagagctgttttatgtcagtgtgaagggggtgcgtcactcagtgttccttgtggaggcgtttgatgatgatgggaggctcctagtggaggatgagatgctggttgggagggataggctggaggagcttgttcgggagggaaagcggatgaggcgtgctcggaagaaaggtgttctcacgttcgatggtgacagtgatgaggatgaagatgatgatgcagcagaagaggaaggttcattaaaggtggatgatgaatttggggacttgtttgaggatggtgtcattggggaggactgggaggaggtaggcgatggaggtggaagtgatgcatatgaagagtacgatgctgaatcaggtgacatggaggagttttgggtcaagaaggctgtggctcaaggactggttggcaatggtaatgagcaggatgtttggtgagtgcatcagcttgtgggactgctcaggaagttaacgaagattgagaattcctcaagtgtgcttttctcagcaatgcacataaaccagtaagcatcagtacatatccgggtatcttggacctcttggtcccatttgccgcctgtctgttggtacttgcaaggtatgaatgtatataccgctcgtttgattctggctatgcacggttatttctacatgcatgataaacatgttgctaatcaataggattagggggatgcaaaggttgaaaagttttgttgcatagcatggtttgtaatcttaggccgctgctttataggagtaggttgaacatggatgtttgatttgctgttaaataacaaatatgacatctaaaaactctcaagtaactttatcatatttatgtgctgccttgtatgcttctcattgagcagagccaaaaggtcttgagttcgacgcaacctctctgggtaaggcttgccaccattattccttcctcagaggctcagaccccactcatgtgggagccgtcagcactgagtttgtcattgtattcttctcattaagcagacaatgattttgatctgccagccacccagcctgcctcgattgcatgggtagacaactcttgtttgtatcaaggctcccgattggcacttcctcatcttcctccagcaataaaataaataataaaaaccacaaatgctgaatcacgtttaatgtaccttaatcttcctaggctctagtcagtggcctaggtcctaacactttttggaactttgtgaagacagacagatgaagcggctccgttatccttttactttgttctggagaggagctatttggacagtcacgatgtccgtcctccagggcactgtttctgctttgatgcttatgaggcatgctctcttacttcccaagatctcttgcacggaaacacatccaaagatagcacagcttctagaacatcacaaacctaatgtgtcacttcttatgctaaagtgtgcagagtgcgatagcttctctgctacagaaaactttgaaaaagatggcgtttcatctcttaaggaggcagccactgtatccgtgttagagttgaatgtgccctcctgtcagaagcgtttatgtattataggaggtactgctctaaggtgaaagagcaatgctcagcagatatgatacatgctgaggatgcattcaaaagctcttggatttatcatgctgaggtgatgatggctgagttttgtactgtctgcattgaaaagaatttaattgataaaatgattgatctgccctgggattccgaggaagacaaacatcttcacaagttcctcttcaactctgctcgagaagtgcgcatgaaaccaaatgatagtctgcttgttgtctactaccttgggatacaggtctctggatatgctgagaaacctttcatcttaaatggaactggtgtagcccaaaatggccctgctaaaaggtctgtctctggatatgctggctaccagccaaggataacatcttgattctgcacgctggtttgtggcgatatgtttcgtcgtggtcctggttttaatttgggagttcaaaatgtaatatcagtggaatgaaattcgtgcgttttgagtagctcggggtatagaatttgaatctgactacgtttcaaatactagagttagatgactgcagtggctggcttccagcttctttattatttttgtctattattctcctatctgtcaatgtggccggtttacagtcaattagcgctaacagaggctacatcattcagtgacaaaaaaaaatagtgaatggtgaaggtatacaaactgagctgtgtgttgtgataatattcgtcagtattctcaacgggtatctaaacc

SEQ ID NO: 221930 - DNA, 3097 bp, Zea Mays
tctcccgaaacctcgtccgccggttcccgtcgccatggtggtggtagtgtccacctccctatgctccttcctgcccgcgcacccgttcagcctcgcgcgccctcgccgtccccacccaacgaacccgaccgccaaacccctctcccgtaccctctccatccgctgcatcgccacaaccgcggcgggacccccgccgctcccaccgccgaagctggtccgctgcccagctctcgaccgccaggcggcgcgcgcaagccgactccgctttgcgcgcaagctcctcaccctcctcctctccaagccgcgccatttcctcccgctccgcgtgctcaaccgctgccgccgcttcctcggcctcccgcgccgcggccgcccgctcatccccatggtcctccgctacccgaccctcttccgcctcttccaggcccacacctccctcccgctctccccgtccctctccaccctcgcggtcgcgctcactcccgccgccgaggcgctcgccgccgatcttgcggcgctccgcgccaccggcacaggcgcaggcgcgctcgccgccaagatccaccgccttctcctcatgaccccgcgccgaaacattccggtgtccccgttcgagccactggatgagggcgctagtctggagatgttggagcggcgggcgtgtgctgtggtgcgggaggtgctggccatgacggtggagaagcggacgctggtggatcacctcacgcacttcaggaaagaccttggcttgccaaaccggctgcgcgccatgctggtgcgacatccagagctgttttatgtcagtgtgaagggggtgcgtcactcagtgttccttgtggaggcgtttgatgatgatgggaggctcctagtggaggatgagatgctggttgggagggataggctggaggagcttgttcgggagggaaagcggatgaggcgtgctcggaagaaaggtgttctcacgttcgatggtgacagtgatgaggatgaagatgatgatgcagcagaagaggaaggttcattaaaggtggatgatgaatttggggacttgtttgaggatggtgtcattggggaggactgggaggaggtaggcgatggaggtggaagtgatgcatatgaagagtacgatgctgaatcaggtgacatggaggagttttgggtcaagaaggctgtggctcaaggactggttggcaatggtaatgagcaggatgtttggtgagtgcatcagcttgtgggactgctcaggaagttaacgaagattgagaattcctcaagtgtgcttttctcagcaatgcacataaaccagtaagcatcagtacatatccgggtatcttggacctcttggtcccatttgccgcctgtctgttggtacttgcaaggtatgaatgtatataccgctcgtttgattctggctatgcacggttatttctacatgcatgataaacatgttgctaatcaataggattagggggatgcaaaggttgaaaagttttgttgcatagcatggtttgtaatcttaggccgctgctttataggagtaggttgaacatggatgtttgatttgctgttaaataacaaatatgacatctaaaaactctcaagtaactttatcatatttatgtgctgccttgtatgcttctcattgagcagagccaaaaggtcttgagttcgacgcaacctctctgggtaaggcttgccaccattattccttcctcagaggctcagaccccactcatgtgggagccgtcagcactgagtttgtcattgtattcttctcattaagcagacaatgattttgatctgccagccacccagcctgcctcgattgcatgggtagacaactcttgtttgtatcaaggctcccgattggcacttcctcatcttcctccagcaataaaataaataataaaaaccacaaatgctgaatcacgtttaatgtaccttaatcttcctaggctctagtcagtggcctaggtcctaacactttttggaactttgtgaagacagacagatgaagcggctccgttatccttttactttgttctggagaggagctatttggacagtcacgatgtccgtcctccagggcactgtttctgctttgatgcttatggaggcatgctctcttacttcccaagatctcttgcacggaaacacatccaaagatagcacagcttctagaacatcacaaacctaatgtgtcacttcttatgctaaagtgtgcagagtgcgatagcttctctgctacagaaaactttgaaaaagatggcgtttcatctcttaaggaggcagccactgtatccgtgttagagttgaatgtgccctcctgtcagaagcgtttatgtattataggaggtactgctctaaggtgaaagagcaatgctcagcagatatgatacatgctgaggatgcattcaaaagctcttggatttatcatgctgaggtgatgatggctgagttttgtactgtctgcattgaaaagaatttaattgataaaatgattgatctgccctgggattccgaggaagacaaacatcttcacaagttcctcttcaactctgctcgagaagtgcgcatgaaaccaaatgatagtctgcttgttgtctactaccttgggatacaggtctctggatatgctgagaaacctttcatcttaaatggaactggtgtagcccaaaatggccctgctaaaaggtctgtctctggatatgctggctaccagccaaggataacatcttgattctgcacgctggtttgtggcgatatgtttcgtcgtggtcctggttttaatttgggagttcaaaatgtaatatcagtggaatgaaattcgtgcgttttgagtagctcggggtatagaatttgaatctgactacgtttcaaatactagagttagatgactgcagtggctggcttccagcttctttattatttttgtctattattctcctatctgtcaatgtggccggtttacagtcaattagcgctaacagaggctacatcattcagtgacaaaaaaaaatagtgaatggtgaaggtatacaaactgagctgtgtgttgtgataatattcgtcagtattctcaacgggtatctaaacc

SEQ ID NO: 221931 - DNA, 2149 bp, Zea Mays
cgccctagctcacacgccaagccccagtacaaacaaagcctacggaatttcccccagctccaattcgcgctgttcgttccctttcagccagaggccgcggcgaccatgggcaactgctgcgccgcgccgtcgacggagggaagcggcaagacccgccccaagaagcagaaggagaacccctacaacgtcgcctacaaccgcggcgcggcggcgccgccgccgcccccggcgcgcccgggcctggtggtgctgcgggacccgacggggcgggacctcggcgcggagtacgagctgggcggcgagctggggcgcggcgagttcggcgtcacgtacctgtgcacggagcccgccacgggggcgcgctacgcgtgcaagtccatatccaagcgcaagctgcgcacgcccgtggacgtggaggacgtgcgccgggaggtggacatcatgcgccacatgccgccgcaccccaacatcgtcagcctccgcgccgcctacgaggaccgagacgccgtgcacctcgtcatggagctctgcgagggaggggagctcttcgacaggatcgtcgcccgcgggcactacaccgagcgcgccgccgccgccgtcatgcgaaccatcgttgaggtcgtccagaagtgccacaggcatggcgtcatgcaccgggatcttaaaccagagaactttttatatgcaagcaaggacagttcccctctaaaagcaattgattttggcctgtctgtgttcttcaggcctggcagtccatactacatggccccagaggttctgaagcgaaactatggccctgaagttgatgtctggagtgctggagtgatactttacatacttctttgtggtgtaccaccattttgggcagaaaccgaacagggagtagcgcaggcaatcatacgatctgtggtagatttcaaaagagaaccatggcccagagtatctgagcctgctaaagatcttgtcaggcgcatgcttgacccaaatccattgacacggtttactgcagcacaagtacttgagcatccatggctacatgactctaaaaacacgccagacgtttctcttggcgatactgtccgagcaagactgcagcaatttgctgcgatgaacaagttaaagaagaaagcactaagggtgattgctgagcatctgtctgcggaggaagtagctgacataaagcaaatgttcgataagatggacgtgaacaagaacggcaagctaacattcgaggaattcaaggccggcctccgtaagctgggaaaccaaatgcatgattcagaccttcagatactgatggatgctgccgacgtcgacagaaacgggaccttagattacgaggaattcgtcacggtgtctgtccacgtgaggaagataggcaacgacgaacacatccagaaggccttcgcatacttcgaccggaataagagtgggtacatagagatcgaggagcttagagaggcactggctgatgaactggatggcagtgatgaagacatcatcggtggcatcatccgggacgtggacacagataaggacgggaagataggctacgacgagttcgcggcgatgatgaaggccggcactgactggaggaaggcctcccggcagtactcgcggcagcggttcagcaacctgagcctgaagctccagaaggacgggtccctcggcgccgacacacggtaggccgccgagtgtagtggtggtgctggtgttcgtccgtctctttgcttgcttgcttgttttgctgtgcggggtttttgttggttggtcagacagtcagtcaggtcattagattccacctccacgttctgtttccattacacggtgaaccctcagctggagctgtgattcttgggcttgtgattgtagaagaaagatgcacgtacaacgtacgtattgtagatgggtgcagcagcgtgtgctgacaaagaatgctggagtagcacaagacacgagtagtcttgctttgcttgtaacttgtaagtagaatttgttttgtgtgcttgcaatgcatgacgatggtgattgccctgcaaaaccgtgtgaatgcctgcacgcaagctgctcgcgtcgcgaccctcgctcttgctggctgtaaagaaggacggtgtggttttagctttatcttactagcattctttgattc

SEQ ID NO: 221932 - DNA, 2247 bp, Zea Mays
cgccctagctcacacgccaagccccagtacaaacaaagcctacggaatttcccccagctccaattcgcgctgttcgttccctttcagccagtcagtcgccgcctccgctgaactgcaagtccaaactagctagctcactgggcaccgatttcccctaaaattttcgctgcttccaggaggccgcggcgaccatgggcaactgctgcgccgcgccgtcgacggagggaagcggcaagacccgccccaagaagcagaaggagaacccctacaacgtcgcctacaaccgcggcgcggcggcgccgccgccgcccccggcgcgcccgggcctggtggtgctgcgggacccgacggggcgggacctcggcgcggagtacgagctgggcggcgagctggggcgcggcgagttcggcgtcacgtacctgtgcacggagcccgccacgggggcgcgctacgcgtgcaagtccatatccaagcgcaagctgcgcacgcccgtggacgtggaggacgtgcgccgggaggtggacatcatgcgccacatgccgccgcaccccaacatcgtcagcctccgcgccgcctacgaggaccgagacgccgtgcacctcgtcatggagctctgcgagggaggggagctcttcgacaggatcgtcgcccgcgggcactacaccgagcgcgccgccgccgccgtcatgcgaaccatcgttgaggtcgtccagaagtgccacaggcatggcgtcatgcaccgggatcttaaaccagagaactttttatatgcaagcaaggacagttcccctctaaaagcaattgattttggcctgtctgtgttcttcaggcctggcagtccatactacatggccccagaggttctgaagcgaaactatggccctgaagttgatgtctggagtgctggagtgatactttacatacttctttgtggtgtaccaccattttgggcagaaaccgaacagggagtagcgcaggcaatcatacgatctgtggtagatttcaaaagagaaccatggcccagagtatctgagcctgctaaagatcttgtcaggcgcatgcttgacccaaatccattgacacggtttactgcagcacaagtacttgttgaatgggcagagcatccatggctacatgactctaaaaacacgccagacgtttctcttggcgatactgtccgagcaagactgcagcaatttgctgcgatgaacaagttaaagaagaaagcactaagggtgattgctgagcatctgtctgcggaggaagtagctgacataaagcaaatgttcgataagatggacgtgaacaagaacggcaagctaacattcgaggaattcaaggccggcctccgtaagctgggaaaccaaatgcatgattcagaccttcagatactgatggatgctgccgacgtcgacagaaacgggaccttagattacgaggaattcgtcacggtgtctgtccacgtgaggaagataggcaacgacgaacacatccagaaggccttcgcatacttcgaccggaataagagtgggtacatagagatcgaggagcttagagaggcactggctgatgaactggatggcagtgatgaagacatcatcggtggcatcatccgggacgtggacacagataaggacgggaagataggctacgacgagttcgcggcgatgatgaaggccggcactgactggaggaaggcctcccggcagtactcgcggcagcggttcagcaacctgagcctgaagctccagaaggacgggtccctcggcgccgacacacggtaggccgccgagtgtagtggtggtgctggtgttcgtccgtctctttgcttgcttgcttgttttgctgtgcggggtttttgttggttggtcagacagtcagtcaggtcattagattccacctccacgttctgtttccattacacggtgaaccctcagctggagctgtgattcttgggcttgtgattgtagaagaaagatgcacgtacaacgtacgtattgtagatgggtgcagcagcgtgtgctgacaaagaatgctggagtagcacaagacacgagtagtcttgctttgcttgtaacttgtaagtagaatttgttttgtgtgcttgcaatgcatgacgatggtgattgccctgcaaaaccgtgtgaatgcctgcacgcaagctgctcgcgtcgcgaccctcgctcttgctggctgtaaagaaggacggtgtggttttagctttatcttactagcattctttgattc

SEQ ID NO: 221933 - DNA, 2260 bp, Zea Mays
cgccctagctcacacgccaagccccagtacaaacaaagcctacggaatttcccccagctccaattcgcgctgttcgttccctttcagccagtcagtcgccgcctccgctgaactgcaagtccaaactagctagctcactgggcaccgatttcccctaaaattttcgctgcttccaggaggccgcggcgaccatgggcaactgctgcgccgcgccgtcgacggagggaagcggcaagacccgccccaagaagcagaaggagaacccctacaacgtcgcctacaaccgcggcgcggcggcgccgccgccgcccccggcgcgcccgggcctggtggtgctgcgggacccgacggggcgggacctcggcgcggagtacgagctgggcggcgagctggggcgcggcgagttcggcgtcacgtacctgtgcacggagcccgccacgggggcgcgctacgcgtgcaagtccatatccaagcgcaagctgcgcacgcccgtggacgtggaggacgtgcgccgggaggtggacatcatgcgccacatgccgccgcaccccaacatcgtcagcctccgcgccgcctacgaggaccgagacgccgtgcacctcgtcatggagctctgcgagggaggggagctcttcgacaggatcgtcgcccgcgggcactacaccgagcgcgccgccgccgccgtcatgcgaaccatcgttgaggtcgtccagaagtgccacaggcatggcgtcatgcaccgggatcttaaaccagagaactttttatatgcaagcaaggacagttcccctctaaaagcaattgattttggcctgtctgtgttcttcaggcctggtgagcgatttacggaaattgtaggcagtccatactacatggccccagaggttctgaagcgaaactatggccctgaagttgatgtctggagtgctggagtgatactttacatacttctttgtggtgtaccaccattttgggcagggagtagcgcaggcaatcatacgatctgtggtagatttcaaaagagaaccatggcccagagtatctgagcctgctaaagatcttgtcaggcgcatgcttgacccaaatccattgacacggtttactgcagcacaagtacttgttgaatgggcagagcatccatggctacatgactctaaaaacacgccagacgtttctcttggcgatactgtccgagcaagactgcagcaatttgctgcgatgaacaagttaaagaagaaagcactaagggtgattgctgagcatctgtctgcggaggaagtagctgacataaagcaaatgttcgataagatggacgtgaacaagaacggcaagctaacattcgaggaattcaaggccggcctccgtaagctgggaaaccaaatgcatgattcagaccttcagatactgatggatgctgccgacgtcgacagaaacgggaccttagattacgaggaattcgtcacggtgtctgtccacgtgaggaagataggcaacgacgaacacatccagaaggccttcgcatacttcgaccggaataagagtgggtacatagagatcgaggagcttagagaggcactggctgatgaactggatggcagtgatgaagacatcatcggtggcatcatccgggacgtggacacagataaggacgggaagataggctacgacgagttcgcggcgatgatgaaggccggcactgactggaggaaggcctcccggcagtactcgcggcagcggttcagcaacctgagcctgaagctccagaaggacgggtccctcggcgccgacacacggtaggccgccgagtgtagtggtggtgctggtgttcgtccgtctctttgcttgcttgcttgttttgctgtgcggggtttttgttggttggtcagacagtcagtcaggtcattagattccacctccacgttctgtttccattacacggtgaaccctcagctggagctgtgattcttgggcttgtgattgtagaagaaagatgcacgtacaacgtacgtattgtagatgggtgcagcagcgtgtgctgacaaagaatgctggagtagcacaagacacgagtagtcttgctttgcttgtaacttgtaagtagaatttgttttgtgtgcttgcaatgcatgacgatggtgattgccctgcaaaaccgtgtgaatgcctgcacgcaagctgctcgcgtcgcgaccctcgctcttgctggctgtaaagaaggacggtgtggttttagctttatcttactagcattctttgattc

SEQ ID NO: 221934 - DNA, 2412 bp, Zea Mays
cgcatttccagctgctccgttcctgggatctatcctatccattccatagtactggttccgctgaaacctccaccatctccaccaagtccccgaaaaaggccggatcttttcgctcaactggcagtcttctccacacaaaaaaaaaaaaccacgagaaagtttgcagctttcctactagtttgcgctggccgctggcttttatagtgcccgcttccagaaccagtggagtcacccgcccccgccctagctcacacgccaagccccagtacaaacaaagcctacggaatttcccccagctccaattcgcgctgttcgttccctttcagccagaggccgcggcgaccatgggcaactgctgcgccgcgccgtcgacggagggaagcggcaagacccgccccaagaagcagaaggagaacccctacaacgtcgcctacaaccgcggcgcggcggcgccgccgccgcccccggcgcgcccgggcctggtggtgctgcgggacccgacggggcgggacctcggcgcggagtacgagctgggcggcgagctggggcgcggcgagttcggcgtcacgtacctgtgcacggagcccgccacgggggcgcgctacgcgtgcaagtccatatccaagcgcaagctgcgcacgcccgtggacgtggaggacgtgcgccgggaggtggacatcatgcgccacatgccgccgcaccccaacatcgtcagcctccgcgccgcctacgaggaccgagacgccgtgcacctcgtcatggagctctgcgagggaggggagctcttcgacaggatcgtcgcccgcgggcactacaccgagcgcgccgccgccgccgtcatgcgaaccatcgttgaggtcgtccagaagtgccacaggcatggcgtcatgcaccgggatcttaaaccagagaactttttatatgcaagcaaggacagttcccctctaaaagcaattgattttggcctgtctgtgttcttcaggcctggtgagcgatttacggaaattgtaggcagtccatactacatggccccagaggttctgaagcgaaactatggccctgaagttgatgtctggagtgctggagtgatactttacatacttctttgtggtgtaccaccattttgggcagaaaccgaacagggagtagcgcaggcaatcatacgatctgtggtagatttcaaaagagaaccatggcccagagtatctgagcctgctaaagatcttgtcaggcgcatgcttgacccaaatccattgacacggtttactgcagcacaagtacttgagcatccatggctacatgactctaaaaacacgccagacgtttctcttggcgatactgtccgagcaagactgcagcaatttgctgcgatgaacaagttaaagaagaaagcactaagggtgattgctgagcatctgtctgcggaggaagtagctgacataaagcaaatgttcgataagatggacgtgaacaagaacggcaagctaacattcgaggaattcaaggccggcctccgtaagctgggaaaccaaatgcatgattcagaccttcagatactgatggatgctgccgacgtcgacagaaacgggaccttagattacgaggaattcgtcacggtgtctgtccacgtgaggaagataggcaacgacgaacacatccagaaggccttcgcatacttcgaccggaataagagtgggtacatagagatcgaggagcttagagaggcactggctgatgaactggatggcagtgatgaagacatcatcggtggcatcatccgggacgtggacacagataaggacgggaagataggctacgacgagttcgcggcgatgatgaaggccggcactgactggaggaaggcctcccggcagtactcgcggcagcggttcagcaacctgagcctgaagctccagaaggacgggtccctcggcgccgacacacggtaggccgccgagtgtagtggtggtgctggtgttcgtccgtctctttgcttgcttgcttgttttgctgtgcggggtttttgttggttggtcagacagtcagtcaggtcattagattccacctccacgttctgtttccattacacggtgaaccctcagctggagctgtgattcttgggcttgtgattgtagaagaaagatgcacgtacaacgtacgtattgtagatgggtgcagcagcgtgtgctgacaaagaatgctggagtagcacaagacacgagtagtcttgctttgcttgtaacttgtaagtagaatttgttttgtgtgcttgcaatgcatgacgatggtgattgccctgcaaaaccgtgtgaatgcctgcacgcaagctgctcgcgtcgcgaccctcgctcttgctggctgtaaagaaggacggtgtggttttagctttatcttactagcattctttgattc

SEQ ID NO: 221935 - DNA, 774 bp, Zea Mays
cagacagccccgcactcctctcttcagtctctctccccttcgcggctcccaccgcgtgccgccgccctacaccaggtgccccccacgtctgcatcgggcccgtctccggcgacgaacgcccagcagggggaggaggatgggcgagttcgacgactactgggcgcgggcgtacaggggcgaccccgcggtcccgcactccgacccgcagcggctcatctccacctggaccggcgcctttgccctcggcgcggccgcctgcgtccaccaccacgcctccgcgcttgcatcccgcctcaagtccctaccggcgacttggcaagacatgacattggcccttgatcaaaagcgatggaagaaagcttttgagaaaaagcggcagcaaccttaagctcattgttctttccaacttcttgggccagttggatgagcactgtttctggtcatcaattgtggcgcatgaagcttcaaagttctctctatatacacatgatggtctgggttcgccaccggttgtaggcttgtagcacttgcgcgcccaagttatatgggagacctccaagactgtcgttcaagaacattgagcatgtcctgttaataaaaaagaatttaattagcggttcattactatgtctacatgattctaaattgcgcttgagtctaagaaatgtataatgtcgaagcatgaatcatttattggcaaagtttatgagcggatgcttgttttacttgtctctgcgtgacgtcagttttaaacctgtgaaccgtgtgagccag

SEQ ID NO: 221936 - DNA, 792 bp, Zea Mays
cttatccagacagccccgcactcctctcttcagtctctctccccttcgcggctcccaccgcgtgccgccgccctacaccaggtgccccccacgtctgcatcgggcccgtctccggcgacgaacgcccagcagggggaggaggatgggcgagttcgacgactactgggcgcgggcgtacaggggcgaccccgcggtcccgcactccgacccgcagcggctcatctccacctggaccggcgcctttgccctcggcgcggccgcctgcgtccaccaccacgcctccgcgcttgcatcccgcctcaagtccctaccggcgacttggcaagacatgacattggcccttgatcaaaagcgatggaagaaagcttttgagaaaaagcggcagcaaccttaagctcattgttctttccaacttcttgggccagttggatgagcactgtttctggtcatcaattgtggcgcatgaagcttcaaagttctctctatatacacatgatgtattgactgagggtctgggttcgccaccggttgtaggcttgtagcacttgcgcgcccaagttatatgggagacctccaagactgtcgttcaagaacattgagcatgtcctgttaataaaaaagaatttaattagcggttcattactatgtctacatgattctaaattgcgcttgagtctaagaaatgtataatgtcgaagcatgaatcatttattggcaaagtttatgagcggatgcttgttttacttgtctctgcgtgacgtcagttttaaacctgtgaaccgtgtgagccag

SEQ ID NO: 221937 - DNA, 610 bp, Zea Mays
ttcgcggctcccaccgcgtgccgccgccctacaccaggtgccccccacgtctgcatcgggcccgtctccggcgacgaacgcccagcaggatgggcgagttcgacgactactgggcgcgggcgtacaggggcgaccccgcggtcccgcactccgacccgcagcggctcatctccacctggaccggcgcctttgccctcggcgcggccgcctgcgtccaccaccacgcctccgcgcttgcatcccgcctcaagtccctaccggcgacttggcaagacatgacattggcccttgatcaaaagcgatggaagaaagcttttgagaaaaagcggcagcaaccttaagctcattgttctttccaacttcttgggccagttggatgagcactgtttctggtcatcaattgtggcgcatgaagcttcaaagttctctctatatacacatgatgtattgactgaggttctacttttggttttcttgtttagcgttacaactttctcagtttatgcatttggtccatctcagatcatcagatgacattcagaatgatttgtctattctcaaaatctctattatctttttaacatgctgctccctccgtggctccgttcca

SEQ ID NO: 221938 - DNA, 433 bp, Zea Mays
ttcgcggctcccaccgcgtgccgccgccctacaccaggtgccccccacgtctgcatcgggcccgtctccggcgacgaacgcccagcagttggcaagacatgacattggcccttgatcaaaagcgatggaagaaagcttttgagaaaaagcggcagcaaccttaagctcattgttctttccaacttcttgggccagttggatgagcactgtttctggtcatcaattgtggcgcatgaagcttcaaagttctctctatatacacatgatgtattgactgaggttctacttttggttttcttgtttagcgttacaactttctcagtttatgcatttggtccatctcagatcatcagatgacattcagaatgatttgtctattctcaaaatctctattatctttttaacatgctgctccctccgtggctccgttcca

SEQ ID NO: 221939 - DNA, 1277 bp, Zea Mays
gtgacaggcagggcagcgcgaaagccagccacggggacggagcggctagcgagcaagcgaaacagcactatacaagtcgtcttcttctccgtcccttgggccacctggtgttcttctataccacgcgtccacgccactgctaagctgctccccgttcgccaggtcggcgaccaggcgaaacgtgctgctgcaagaagaagaataggtacacagacagcatgtccggagttcaggcgatgccggcggccgtgggcgtggcggggctgagagggtcagggttggttagcagcagcagtaccggcttgttcgccggcgactgcaagaggaaggctcgtcgcccggcgtgctcggcctgggccctcaggcagagccggatcggcagcaggagcaggagcaagaggggcctcggcatcgtctgcaacctcgcgggacagtacgaggattccttcgacgacgtccagcgggccgtgaggaccgtgctgacccagctctacgagctgaacccgccgagctaccgctggttctacaacttcgtcgctgtcaacaagcctaccgacggcaagcatttcctccgtgctctcggcaaggagaggcaggagctcgcagagcgagtgatggtcaccaggcttcacctgtacgggaaatggataaagaaatgcgaccatgccaagacgtacgagaagatctccgacgagaacctggcgctgatgcgggagcggctgatggagacggtcatctggccaaccgacgacagcagcacggagaagatcggctgatgcctgatgcctgcggaggcgccgagtcctttcgggttgctgatcaagcttagctccttctattagcatgtagagcagcactctgggtttctctatcagtcagtcagtcagccagccagtcagtgggttgtatataatcggagttgtagtagacagtatacatttctctgggcaggcaatcactgtttgaggtgttaacagtgccgttttgccctcccaattaagcctctacagtcggtctaagtgaagcaaaaatgcttaccttgtagtagctaaatttacatgtgcggggatatacgttgtaatagaatatttctgcgccccgtacgtggctgtttgatgaaagcattctgtacggtagtcaggaaccctcttctacctgaaccagtcgcgagcgttcgatcgggcaaactggccaggatgacgttgctctcagttcttgttgctagttctgcttcttgcgttgatatatagggtcctgccctgcgtcgtcttcgtctc

SEQ ID NO: 221940 - DNA, 762 bp, Zea Mays
cgccgcagccccaaaccctcatcccccatcaatctcaggggcgccccagccaccccacccttcactcacctaaccatggcggagcgcggcggcgagcgtggtggagagcgcggcgggttcggccgtggcttcggtcgcggcgggcgcggtgaccgtggtgggcgtcgcggcggccgccgtggcccgcgccaagaggaagagaagtgggttcccgtcaccaagctcggccgccttgtcaaggagaacaagatcaccaagatcgaggagatctacctgcactcgctccccgtcaaggagcaccagatcgtcgagaccctcgtcccggggctcaaggacgaggtcatgaagatcacgcccgtccagaagcagacccgtgccgggcagcgcacccgcttcaaggccttcgtcgttgtcggcgatggcgacggccacgtcggcctgggagtcaagtgcgccaaggaggtggccaccgccatccgcggcgccatcatcctagccaagctctccgtcgtccccgtcaggagggggtactgggggaacaagatcggacagccccacaccgtgccctgcaaggtcaccggcaagtgtggctccgtcactgtgcgcatggtgcccgcgcccaggggttctggcatcgtcgccgcgcgcgtgcccaagaaggtgctgcagttcgctggcattgaggatgtcttcacctcgtcccgtggctccactaagacccttggcaacttcgtcaagagccatgtccaagtcatttggttt

SEQ ID NO: 221941 - DNA, 991 bp, Zea Mays
gacgaactcttggttctcaagctttcccggccagtctcgcagcaaccctttccctaccccgatcgagcgtgcgtcaaggtcgggatccggcgccgccgcatcccgatccgatgctctccggcgtcgaccacgacgttcccgacggcatcgggatggcgcggctcgcgtggacgcgcctccccaccgccgacggggagggggcgggcccctccacttccgaggccgcggacgacgaactcttatcgggcgctgccatagagagcctcgactacgaggtcatcgagaactacgcgtaccgggaggagcaggcgcagcggagcaagttctgggtgccctactacgtcatgctcaagtggctgttcgctctgctgatcggcgttggtactggattagctgctatattcataaacctggctgttgagaacttctctggatggaaatatactgcgacatttgctataataaagcactcgtattttgtgggattctttgtgtacacagttttcaatttagccctggtcttctcttctgtatatatagtcacaaactttgctccagcagctgctggatctggtattccagagatcaaaggttacttaaatggagtggatacacatggaatcctccttttcaggacattagttgggaagatctttgggagcattggatcagttggaggtggattggctctagggaaagaagggcctcttgttcatactggggcctgcattgcttcgcttcttggacaaggtggatctgcaaagtaccacttgagttctagctggagttgctgctgccttcagagctcctgttggtggggtactatttgccttggaggaagttacttcctggtggagaagtcatcttatgtggagagtattcttcacatctgccgtggtggccgttgtggtgcgttcagccatgaattggtgcaacagtggaaaatgcggtcattttggagctggaggttttataatatgggacatatctg

SEQ ID NO: 221942 - DNA, 5686 bp, Zea Mays
cattctaagagttgtaaactagagtacaacaacttctatttgcatttcagtatgggcgaagtgtgatgtcctgtttccaagagtaatttttttaattgtaagtagaagttcaaattttgcagtaaaaaaacacacttttttttgtcaagcatgcaagagagatgcacatatttgcatgaagaagaaaaaaggcgtaataaccactacaacacaaacccacacactcaagaatcttggaagaacagtggctaagttattcaaaacatcatataatataaaaccacagaaatatcatatacgtaactaaaaatactatgggaaagaacatttcactcaagattaaggaataatggagcagagtaaaatcataaatttgttggtgcccaggggaaccatgagcaaagatacagtttatccaacattttgctatgttccaaaaaaactcaagaaatgataatatttcagacacaatttatccaacacataaggtaatcctgtaaaaatgaattttaacatcatcatccatatcgatattcaaaaaaggaaggaagaatggttcctgtgtatataagttaactttaacaatgattgttggttttggggtaacaacatgatgttaacaagagataggatggcgacccttcctttcccgcctgacccttcctatcccctgaccatctcctctacccccgacgcctcttcacattcctccaccagccccacgccggagaccactccgatcccggcggccaatcacctctcctcttccccggcgtcggcggggccctctgcatgcggtggtcgttccaaggcgcagcggtggtgtgaggacggcgcagcaggcgcggcgggcgtgggtgctgtcccggcgcacgccgcgggtgcaggtgttgtaccggtgggcgcgggtgttgtcccggcgggcgcgggtgttgtcccggcggccgtgggtgtggccccgtctcagaatcgccgctcctacagggatgcgctggtgtcctcacagcgccctgtttctcgggtagcggtggtgagtgctggtggcggctgggagactgtccagagtcgccgcggccgccgcttggctcgtcgccctccccagccagaacccagacccgttccggttgatctgcggggcagatgtttcaactgtttctctgctgatcatcgggcggcgcggtgttcaaacagggttcggtgcttcttctgcaggcggcgggggcaccgtgtgagcgagtgcccgcgcaggcagacgaacctggtcgctcttcagacaaacctggccgctcctgtggccgctcctgtgcgcagactggtgtggcggccaatttccaaggagacatcggcggcggtctctggtgccgatcacgccatggcgggtgctggtggcgaccatgccatggcgggtggctcgacgcttggtggttccgatgtcgcgatcagcgggaagcggcgtacccgtcgtgggcagcgaaagcgcagggccgggactggtggtggtcttggcggtgatcctctgctgctatcttcgggaaacttgtcgcccgcggctcaggatggtcctcgtcctgtgaggtttattgggcggtccagaatgatcgaccgtgctgagttggagcttcgccatgccctgatcgtcagcgttgttgggcaggaaggaactggttgcgccacggaggttagagaggcgctcgcctcaaggtttggccttgatgccgatgcgctccgcctacgtcgtgctgcgccaggttcctttattgtcctcttcccttcggaggagctggctgggcgagtgtttagtggaggaccgtcgctctttgtccctccattgaggttgcatattaagagatggactaggcaggcttttgcttcgggaggcagtgtcttgtcttccctcattgacgtcgaactccgtggtatccctgctcacctttggggactggagacagcggagggactacacccggattctaccagcggggaggacttgtcagtcatcaggttgagtgcatggtgccgctctcccgtggagttgcctgaggtgttggaccttcatgctgtggagccagcggtccccgatgaagacgaagtctggattccacgttcgttggtgttccctgtgtttgtgaagattattgggccggagggtgttcttgtggaggagcagctgcagccacctccatcggatccctctgatgatgagccggagcagagtcgtcgggctaggcgggtgcagaggctgggtgatcaggcctcattgcctcggacttcggtgcactcgcggctgggtcctcgtcttcattcctcgtcgacgcgtgttggaccctctgatgatgtggagcttttggatgcattaatggataacagtgatgatgtggcggcgtctgtctcttcggattcgttggcagaaccagttgatgcccctaccctcccgtgtgctgcggttgagaagctggcggcgcctggtgttctggccttgtgtgatgttgtggttcccgtttattctcctgatggtgcctctgctgatttggctgctgagttgagggaggattcgttgttggcagtgagttgtgttgtcaatacttcttctgctagatggaatttgaagccgcctgtttttaaagtctactctaggaggttgagaccatctattttggatgatcaggatggcccgttggttcagtcgggtcttgataattctatggtgatttcttcgcccttgtgcgagttccaatgtttggtcactaaaccggtggatgccttgctgccaactccacagattccaaagagaaggaagaagcctctacccagtaattttataccaaggcggagcaggagggtggccaaatttcctccagaactcggttctgaggctgctgcccaggatggcagtaattatgcggagctatttgtttctgggctctctagcgtccatattgctgctttggcagcgctgtttggctggacggttctggtagcttttgagcctgactgttttgaaccagcaattgagctaccggtgagtgaagagcagcaagacaaagatgatgatggctacaaaaaaaagagtagaatggatgataatggtgatcaggttataaagaagcaaacaagcgctgttaatagcagttcctcaccatctaatcaagagaatggtggccctgttcctatgcagacaacaagtttttctttgcttgcatctctttcgtcagtgggggtaaccaattcccctcccaggacagaagggcttagtgcaaccttgtctcatcttccactgtccttgatcggctgtcattctgtgcatcttgctggtatcaatccagagcatcaaaagcagggaagtgatatgatacaggagcaagtcggaacaggcgctgggacggttatagccgaaggtgtcaacaacgatgtgtttgcagcggctactaccactatggaaaaacttgaagtctcaaaggctgaccagaggattgaaggtactgtgcagttggtacagcactctgcaaagcgatgaggaggaagacgactctgaacttagatggcgcgaggaatagtacgatgatggcagactctactccaaatatatcacaaccttctcggtagtatccatccacgagtggttgaggtcggcgtccgcgttgacagcagcagcggtattgggaggatcaacacgattgttgcgagatctgaaattttgaccagggatgggacgttgtgagcgcgatggtcggagcgaggcgaggggcccgggagcggcgcgtgcggatctggcatgggggcgtgggcggctgtttcaccagttggcgtgggatgggactgggagcggcgtgcgcagatccggatgggggccgtgggcggcagtttcgccgagagcatcgcacgcgaaggggatgggggccccgctgttggccgcagccacgccggcggagaagtcgagcttgccgatgaggttgtccatggactggctcctgacttggcgagccatgggcgcacggggcggtggggaggtgtgggagggtggggcggtcgtggatggagcgggggaggaaggggcagggggcggcggcggtcgcagtcgcggattgagcaagttaggaaggggcgggggcgacgagctgggtcacgaatggagcgaggggagggggtggtcgcggctggagcaccatggagatgcgaggcgggggcattggccgcgccaggcgcccacgctccgtacttaattagtagtaaggataaggatgtccctcagtgggttattaaatcaattgataaaattcggcgaggatttctttggagaggaagaaaggaagttaatggtggtagctgtcttgttccatgggaagttgtcacgaggcctctgaagcttggtgggcttgggatccctaaccttaagctcaaaagctgggcattgcaggcaaaatggttatggttggaaaagacggatctaagcagaccttggtgtgggctgtcccttccagtgcagcgtcaggttagacagttctttgatttgtcggttgttaccattttagggaatggggctactactctcttctggtcggatagatggattcatgggaataatatccaagacattgcccctgaggtggtgggtatggttggccgcaaggcgtattcttccagaacggtggcacaggctctggataattggcattgggtcagtgatattcatggtgctctttccttgagtgggttgcagcaatatctgttgttatgggatactttgggggaagttaggctttctcatgatgctgacagacatgtttggatgcactcttcttctgggatgttctcctcaaagtcttgctataaggcttttttcatgggttcaatttcgtttgagccatggaaacgtttgtggaaatcctgggctcccccaaaatgcaagttctttctctggctggcgataaggaataagtgttggactgctgatagattaaggaggagagggctgcaacaccccgttgtttgtgttctttgtgaccaagagcaggaaacagtgcaacatcttctgtgtacttgcagttttgccaggcaattttggcatgctattcttgttcccttgtgtcttggggatctcattcctgctgttcatgaaatctcatttgctgattggtggaggaaggtgcttaagaaggtgcccaaaaacagaaagaaaggcttcgacagtctcattatcttggggtcttggtgcctatggctgactaggaacaaagctgtttttgatggtgtaaacccttccctgtgttttgttaaaagcttatttctgaatgagttaagttgttgggagagggctggggctaaacagctagcaagttttggtcttcctgctattatgagtagggtctagattgtggtcaagtgttctgtttgccctacgggcattgtactttggtcctcttggacctttttcctctcttaatataatgacgtgcagtcctcctgcgcgttcgagaaaaaaaacatgatgttaacaaggattaatagcagagttggacaatcctgtcaagacttccaaagtaaaatgctaattttgaacactactagttgtcatgtagtagcatattaaataaaaggaagaatagtaccgtctttatgtccaagataggcgtgtcagcattaacagcctgcacacttatccctttcatcaaatggatgccaaatttca

SEQ ID NO: 221943 - DNA, 662 bp, Zea Mays
atggacttccaatttccaaacgtcgacgcagccacaggagtgttgtgttacacggggcatggagaagctgggttttggctgggaaacccgcgggtttcgagagtcccaaacgagttcgtaatctgtgaaggagcattgcttgcatcgggatcggctgactgtactgtaaagctctgggatgtcgcttctagcacaaaaaccctgaagacagaggataccaaaggcagctcagctaaccgactgagactgcttaaagctctccctacaaaatcaactcctgtttatagcctgcggttttctcggaggaaccttctatttgcctctggtgctctctcgctaagctcgtcgtaagctgtgttttttttttgcagaaaactagaactggtcctgttttgacattgagtagtgaagctggcatttcagagactgcctattgtacagctaatattttcattagcaattccaacgaactcagcatgtactgccgaattgagcaccgcagattcgttgtagcgggttgtgatattgtaacaatattattaggttgtgaccttatgaacgcaactaaatgtacaagtgctgacaggcgatagcgtgaatgcaatggtctatcaggtctggagtttggtttagtgaccaggtaattcgaggggatcatgggg

SEQ ID NO: 221944 - DNA, 622 bp, Zea Mays
atggacttccaatttccaaacgtcgacgcagccacaggagtgttgtgttacacggggcatggagaagctgggttttggctgggaaacccgcgggtttcgagagtcccaaacgagttcgtaatctgtgaaggagcattgcttgcatcgggatcggctgactgtactgtaaagctctgggatgtcgcttctagcacaaaaaccctgaagacagaggataccaaaggcagctcagctaaccgactgagactgcttaaagctctccctacaaaatcaactcctgtttatagcctgcggttttctcggaggaaccttctatttgcctctggtgctctctcgctaagctcgtcgtaagctgtgttttttttttgcagaaaactagaactggtcctgttttgacattgagtagtgaagctggcatttcagagactgcctattgtacagctaatattttcattagcaattccaacgaactcagcatgtactgccgaattgagcaccgcagattcgttgtagcgggttgtgatattgtaacaatattattaggcgatagcgtgaatgcaatggtctatcaggtctggagtttggtttagtgaccaggaacatggtatgaggaaagaagcaa

SEQ ID NO: 221945 - DNA, 775 bp, Zea Mays
cactcgatcacgaataggtttagatacacacggacacaccaggttcgagggttcgagcggtcgagcctggtgacctgatccctgtgctggtcaacgtcaaccgagtccgaaccgcatcgatcggacggtctcacgacgacgaaggtgttgtgaaagacaaacggactatatggcgactgagcataatctcagacttcttctgggccattgtgagctttatcagaatcttctttgacacactgttctcattggacaaaactgacaacttcaagaaagggtatggtgctggtaagaagtgggatggtggacctggtggtggtgggcggggcccatatggcggtggaggaggtggaggattcggcggcggaggtggaggtggttcacggggtcctcgcactctatctgacatccaatccaatgaccacagttctctccctgcttgtggatcctgctgtggctaataagcgtgcaaccgttccgcctgatgactacgtataacaaatgaatacacatgcttctgtatgttctgaagaacatcgtagctattgatatgtattttactgtcagacgattgtatcataatcgatatgtcgtttattaacagcctatttacctgtagcttgactctggcatgattcgcatggtacattcatggttcatctttcgtgtaccgctgcctgattgcataataactagatcagttacaaagtttaataaattgtctggtgtgctgttctgttaatgtcttgtatagcagtaattggtgaatacaaac

SEQ ID NO: 221946 - DNA, 1424 bp, Zea Mays
cctagacaataacaagtagttggagttgatgtgcaaaacaatggacataacaagttgaaggtgactctttcatgatcaatgtttttgagccctttaatctcttctttcatgttgctatccccatcatatccttgaccatggatttgtcttatagtcaaatgatgtctaacaattaaatcttgaattgattacttaaatgttaaagaattagtatcatgtacatgcacaccactaagaaaatgttcacaaggccttcccagtttatcaacataacacaagcaaacaactaatggttttttgtgtgatagttcacttcactcatcagctagaattgcataattgtcatcaccaagttctttaataattttatttttagtttctatggcacaacattgaataatttgcttctgtatatctaggcaaatcgatgtgcaattacctgaagcattattcaaaacaacatgcttatccacatcttgactgtttgatgcaagctattttcaaaagttcaagaaagttttctctattgctatagcgttcacttttatcattatcacggaatgacaaaccttgatgcaaaagaaacttcaaacatctaactgaataagtccatctaatcttacaattcagtgtatggatttggctcagcaagacgaggacaagttggtaaatgtgcttctaggatccaaaaatcatataatgttcctagactgattgatggttttccaaattgtaagatagtaaatatatatgccaatggcgatcacagtgctgcattggacgaatctggtcatctgtatgtctggggaagagcattaattggacaacatgatgatgatcaaccttcggaaattttgccctccttgagtgtttctcaagtggcactaggatggcaccatgctttagttttatctgctggagaattgtacacacttggtgtttaccgccaccagaaatgtgatctccctgggttaggaaatgtattggggcagcaatcggacacaagggcaacaagcagttctcatgattgttcatcctctttgtcagtgttggagacggttccattccttgatggagaacaggtggcgcaaatagcaagtggaactgagcactctgctttggtaacagataaaggaacagtcttcacctggggctggggagagcatggacagcttggtttgggtgacacttcggatcatgtagctcctcagagagtaaacgtaggtgacaatgggcagggcatgtccggttcatttgccgtctactgtgggagtggatttaccgttgctgtgaaatcgccctagtggctgtctagtttgtaatgcatgcaccaaattctccttcccacataacagtgaagaaataaacgacaacattttgttgtgatgccgtgaaggtagtggttggattattattttgcaaat

SEQ ID NO: 221947 - DNA, 746 bp, Zea Mays
gtcgatgcttagagttcagatcttcctagctatcgttcagctcctggtggtgctacgggggtgactgcgggggcgactgcggctggtggctgttgtcctcatcgaccatctcggcgacgtcctactcgagcgagatctcgctgcagtccctcgagatctggaggagattgacaaggagattgaggacaagaagacagagctggagcccaaggtcgtggaggcctacgaagcatctcctcctgaggtcaaggctctgttcaaggataagaagccagtcaaggtcatcaagaagaactcggctgcagtcaccaagttcctcgatgagctggctaagattggccatgttattagtcttgacctgtctaggcatgtaccaatatttcatggcaaatcttatatcccaagttttttatatgctcaacaggccgcacttgaagaaatcttatatcagtttgaggaaaaactccaagctgaaaaagtggaagctgctaggaagcaggaagagttgcaatctgtttgatgccttttctagaacatatctgtggttagaactttgtcagaactacgtgcaatctgtttcaatgcttcaaacctttgtggtggaacctttgtatgtttgaacctctgttgtggaagaactagtgtgctggaattgtgtatgacttgtgatgagaatgttgtgtatgatagcttttctgtgtattatgattctgtgagctatcatgagagctcagtgtgtcgtcact

SEQ ID NO: 221948 - DNA, 2317 bp, Zea Mays
gccagccccctttacttgcacacaatagacaacctcgaacagaaaagaagcagttttgccgtccgagatgagccgccactgtgtgactctccctgtgatcatctttggattactgcagatggctgtggctctctactctaatccaagttcaacgcatccgaactgcacggagagatgtggcaacgtcagtatccaatatcctttcggcatcggatccggctgcttccggcagcccgatttcagcctcacctgcgacgacggcggcggcggcggcggcaaccagccgcccaagatctttctgcatgacggcatcaccgaggtcttgcccgattccggtggcacggtgggtctgtcaaggcttattgatgtagccatttcccacaccatctttatggcacctggtattcctagttacaacttctcgtggaatctcagttctttcactatgtttgacggctcattcaacgtaactgggtgtgacttcgatatatatattcaagaaccgggcacgaatggttccttatggccatgtacaaatcgctgcccccaaagcatcaccaccgagacggtggccagacatgactgcaatggaactggctgctgcattgtttaccttggaattagtgttcgtgatttccagctcaaatttgtgcgccacgataatggcgctagaggtgatcatgatgctctctctaatggaagcgccctgtgggatacaattaacattaccagcaactgggcccaaatatactgggatatagatgatcaaccgacatgcgccagagcgaaggaaaagaatataaactacgcatgtgtcagcaaccacagccaatgctttgacgatgaagtgtttgatgttggttatagatgtgcttgtaacagcggttacgtaggcaatccctttgtagttgatggctgcaagcgtgacgaagcttcgagtcagctagcaaacttttacaacctccgagcaggggtgaagctaggatatagtccaaatcaactgaaggagaactgctcgaggtcctgtggtaatatcagtgttccatatccctttggtttagaggaaggctgctctgcaaggaagctatttaaactcaactgcacaaatgcgacagcgtctatgctccaattcgatgacgaccgtgttgtggcgtttataaatgttacagggagtctcgtgggcatcaggtttacctcacaattcgaagatggtcagcttgggatatatgtatcaggtgaacccgatctctttatgggtcttggggaatcagtggtctcaatgcactgggcagctgccaatcttacatgcgacgaggccctgaaaaataaatcacaatatgcatgttgttcaaacagcaaatgtttaggagtcaattcaaaggatggttatattggatacagatgcaaatgcttagatggtttccaaggaaatccatatagcatcagtgatggttgtgaagatatcgatgaatgtaaaacacaacacatttgcaaagagaacgaggtatgcaacaatgttgcagggagctactactgcaccaaaacaacaaaacagcagggtcttgttttgggtgtgattattgggctttgtgttggctttggcattctagtatcttgcttgggcgggatgcttgtcatccgtagatggaaaagggacattcaaaagcaactacggagaaaatactttagaaaaaaccaaggacttctcctagaacaactaatatcatctgatgagaatgcccgcaacaatacgaagattttttctctggaagagctcaagaaggctacaaatgactttgatacatcacgcatacttggacgtggaggccatggaatggtttacaaaggaatcttgtcggatcagcgtgtggtagcaataaaaatttccaagatcatggagcaaggtgaaatcgacagttttatcaatgaggtcgccattctttctcagataaaccaccgcaacatagtacgactcttcggatgttgtcttgaaactgaggtcccacttcttgtgtatgatttcgtatctaatggttctttgttcgaaattctccatgccgctgaggcaagcaacgatttccagttgtcttgggacgattgcttaaggattgcattagaggctgcaggggcactttattatctccattcttcagcttcagtctcaatcttccaccgtgatgtcaagtcctcgaatatacttttggatggaaactacactgcaaaagtttcagattttggtgcgtcaaggttggttcctattgaccaaacccatgttgttacgaatatttcaaggcacttttggctacttagatcctga

SEQ ID NO: 221949 - DNA, 3032 bp, Zea Mays
ccgacattcaccccgagtgcgcgcgcgctctcttccctcgctcgcccgctcgttcgcgacggcaactaggcgatcaacctcgccgcccgccgccctaatttacgtgcccaggtcttcgtccgtcccctctctaggacttcgccgatcctttctcaggcgacgggagccaaccaggctacttcgagtgaccattggagtttaaccagcagccaatacccgtctggtaaatttcctaaggtctcagtgggtatcatgattccgaaggcaggtagtataccaagagccagaggtggagatgctaccccaactcctacatttgacaggaacttgtctcaaggaactgatggtttatctagaccaaaaggtgataatacttcacttcgtgtttcacaagaagctctgaaccatgatgtatccactgaaggggctcctaaagctgatcctgttacgaaggtctctgtatcacaacctgatgacaatacatgtgagcaaacaggaaccttttcctttggaacaagaagagaacaaggcatcagcgttgaaaaattggagacacctgagtttttaagttcccaaagaaaacggaacacggagtctgcagataaagccaaacccaatagtgagatgctcaggatgaagttgtgggagatccttggtggcacttcacaaaacaagcaggccgctgcttcaccaaaccctgatgacatggagacacctgatcagcctaaaggtcaaactgtcaaaggaccatcttcagggaacaaggaggttttcacttcaccttttcttgataacatcaagacaccagatccactgaagcgtcaaacggtgaacttcacaaagtgtaaactgtcccttgatccaattgaatcagattctgatagtccaaaagttgatgaaagaagacctgttactcgctccttgggacgtaagaaagcactggcatcctccaagaagcagagccgaagttcaaagaaaccattatctacttttcagtctacacccaagaagaaaatgctggacaatgtgtttatctttaatgagaaatgcacacctaaaacagtggatcagggtgaaacaaataaagcgactgagtcacgtggtagcaggtctcctgattctgccaaaaaaagagtaaacaggaaacagccatacctttctccaactgaggatgaagggattaaaagttctgaaacaagttttgcaaaaggatataaatctcacaaatggccttcagatattgatgttcctgataaatctcctgttgagcatatgggtaggaaatcaaatctaaaagaggacagaatgagcaaaagacgcttatcttcagctgctccttttcccactgctggtaaaagtgtttactttcattcattgagtatttgagtccatgttagcagtttttatcttttttgtttcagcaacacaagaaaatactgattctgataaagaacaagaacaatgcccggaaaacttcctaaccagggcttttgatcaagcctccaaggagctgagcaaaagcgcaaagaaaccattttctacttttcactctacacctaagaagaaaatgcagggtaatgtgtttaccttcaatgagaaacgcgcacctaaaacggtggatcaggacaaaatgaatcaaactactgagtcgcctggtagtgagtctcctggttctgcagaagaaagagaaaacagtaaacaaccatctcattcacccctttctccaactgaagatgaagggactcaagggagtaaaagttccgaacaaagctttgcaaaaggatataaatctcaaaaatggattccagatatcaagggcacagataaatctccccttgagtatgttggcaggaaaacaaaactaaaagaggatagaatgaacaaaagatacttatcttcacctactccttttgccacttctggaacacaagaaactatagtttctgacaaagatcaagaacaatgcccagaaaactacctaactagggcttttgatcaattgatagtggttctgggaaggtttcaaactaagatcaagtctgaaacaagcaagaaaagttctgagattcttgcagctactagagagactatatgtcagcaccttgagggggttgaggcgcagatgcaggctgacgtggacaaattggtcaatgcaggcaggtctaaaaggaaacgcctagaatctacatttgaagatcaacaagaaaagttaagaattcttcatgagaagttcaaggaggaggtcaacaagcagcttctgaattgcaggagttctcttgaggattttgaatcctaccatgcagaacttaagggagtagctgacaagcaaaaatcatcccacaagaagctcttagcaaatgccgagaaaacagtaggcgctcagctcaacgatgcagaaaccaaaatcgcagaggtccagaagagagcacgcaagaggatgaatggcctgaaatacgtgctcaaggagcttatcacagagactgttgattgactgatcgaagttgcttcactttgtccaagtacatatcaccggtgcgaagattaggatacgcaggatgcacatgcgaacacgtctagggttccatttgaaaggggtacaggagaatcatgatgcacataggttttgtcagaaatcgagatttgcaaaggctattttacttctagacgtccttagtattattttctgggtcgtaccttccgttagggtttttgctacctggtcgatgtgcacagtgcactgctgcactgcaacacccagacgtctttcagcgatatgcgacctgtaggatgtgtgtactgttcctcttcgttctagccaaaccctgttgctagctggaatactaatgaagaggtgtcttgatatttacgtgatttgacgcttgcttgatgctgtgcactggagtctaatggtgactggtttatgcacagatttacgatgtcgttgttccatctctctctcgctttttaactcgggaccgcaaccatggattggttggacgccaccaatcgtggcgcgttggagcggatcgtcc

SEQ ID NO: 221950 - DNA, 3018 bp, Zea Mays
cgctctcttccctcgctcgcccgctcgttcgcgacggcaactaggcgatcaacctcgccgcccgccgccctaatttacgtgcccaggtcttcgtccgtcccctctctaggacttcgccgatcctttctcaggcgacgggagccaaccaggttcacctgtagttaattttgtaaattattgttatatctgtagctgccccaatggaagttgagctgccaaacatccataaagctacttcgagtgaccattggagtttaaccagcagccaatacccgtctggtaaatttcctaaggtctcagtgggtatcatgattccgaaggcaggtagtataccaagagccagaggtggagatgctaccccaactcctacatttgacaggaacttgtctcaaggaactgatggtttatctagaccaaaaggtgataatacttcacttcgtgtttcacaagaagctctgaaccatgatgtatccactgaaggggctcctaaagctgatcctgttacgaaggtctctgtatcacaacctgatgacaatacatgtgagcaaacaggaaccttttcctttggaacaagaagagaacaaggcatcagcgttgaaaaattggagacacctgagtttttaagttcccaaagaaaacggaacacggagtctgcagataaagccaaacccaatagtgagatgctcaggatgaagttgtgggagatccttggtggcacttcacaaaacaagcaggccgctgcttcaccaaaccctgatgacatggagacacctgatcagcctaaaggtcaaactgtcaaaggaccatcttcagggaacaaggaggttttcacttcaccttttcttgataacatcaagacaccagatccactgaagcgtcaaacggtgaacttcacaaagtgtaaactgtcccttgatccaattgaatcagattctgatagtccaaaagttgatgaaagaagacctgttactcgctccttgggacgtaagaaagcactggcatcctccaagaagcagagccgaagttcaaagaaaccattatctacttttcagtctacacccaagaagaaaatgctggacaatgtgtttatctttaatgagaaatgcacacctaaaacagtggatcagggtgaaacaaataaagcgactgagtcacgtggtagcaggtctcctgattctgccaaaaaaagagtaaacaggaaacagccatacctttctccaactgaggatgaagggattaaaagttctgaaacaagttttgcaaaaggatataaatctcacaaatggccttcagatattgatgttcctgataaatctcctgttgagcatatgggtaggaaatcaaatctaaaagaggacagaatgagcaaaagacgcttatcttcagctgctccttttcccactgctgcaacacaagaaaatactgattctgataaagaacaagaacaatgcccggaaaacttcctaaccagggcttttgatcaagcctccaaggagctgagcaaaagcgcaaagaaaccattttctacttttcactctacacctaagaagaaaatgcagggtaatgtgtttaccttcaatgagaaacgcgcacctaaaacggtggatcaggacaaaatgaatcaaactactgagtcgcctggtagtgagtctcctggttctgcagaagaaagagaaaacagtaaacaaccatctcattcacccctttctccaactgaagatgaagggactcaagggagtaaaagttccgaacaaagctttgcaaaaggatataaatctcaaaaatggattccagatatcaagggcacagataaatctccccttgagtatgttggcaggaaaacaaaactaaaagaggatagaatgaacaaaagatacttatcttcacctactccttttgccacttctggaacacaagaaactatagtttctgacaaagatcaagaacaatgcccagaaaactacctaactagggcttttgatcaattgatagtggttctgggaaggtttcaaactaagatcaagtctgaaacaagcaagaaaagttctgagattcttgcagctactagagagactatatgtcagcaccttgagggggttgaggcgcagatgcaggctgacgtggacaaattggtcaatgcaggcaggtctaaaaggaaacgcctagaatctacatttgaagatcaacaagaaaagttaagaattcttcatgagaagttcaaggaggaggtcaacaagcagcttctgaattgcaggagttctcttgaggattttgaatcctaccatgcagaacttaagggagtagctgacaagcaaaaatcatcccacaagaagctcttagcaaatgccgagaaaacagtaggcgctcagctcaacgatgcagaaaccaaaatcgcagaggtccagaagagagcacgcaagaggatgaatggcctgaaatacgtgctcaaggagcttatcacagagactgttgattgactgatcgaagttgcttcactttgtccaagtacatatcaccggtgcgaagattaggatacgcaggatgcacatgcgaacacgtctagggttccatttgaaaggggtacaggagaatcatgatgcacataggttttgtcagaaatcgagatttgcaaaggctattttacttctagacgtccttagtattattttctgggtcgtaccttccgttagggtttttgctacctggtcgatgtgcacagtgcactgctgcactgcaacacccagacgtctttcagcgatatgcgacctgtaggatgtgtgtactgttcctcttcgttctagccaaaccctgttgctagctggaatactaatgaagaggtgtcttgatatttacgtgatttgacgcttgcttgatgctgtgcactggagtctaatggtgactggtttatgcacagatttacgatgtcgttgttccatctctctctcgctttttaactcgggaccgcaaccatggattggttggacgccaccaatcgtggcgcgttggagcggatcgtcc

SEQ ID NO: 221951 - DNA, 2969 bp, Zea Mays
cttccctcgctcgcccgctcgttcgcgacggcaactaggcgatcaacctcgccgcccgccgccctaatttacgtgcccaggtcttcgtccgtcccctctctaggacttcgccgatcctttctcaggcgacgggagccaaccagctgccccaatggaagttgagctgccaaacatccataaagctacttcgagtgaccattggagtttaaccagcagccaatacccgtctggtaaatttcctaaggtctcagtgggtatcatgattccgaaggcaggtagtataccaagagccagaggtggagatgctaccccaactcctacatttgacaggaacttgtctcaaggaactgatggtttatctagaccaaaaggtgataatacttcacttcgtgtttcacaagaagctctgaaccatgatgtatccactgaaggggctcctaaagctgatcctgttacgaaggtctctgtatcacaacctgatgacaatacatgtgagcaaacaggaaccttttcctttggaacaagaagagaacaaggcatcagcgttgaaaaattggagacacctgagtttttaagttcccaaagaaaacggaacacggagtctgcagataaagccaaacccaatagtgagatgctcaggatgaagttgtgggagatccttggtggcacttcacaaaacaagcaggccgctgcttcaccaaaccctgatgacatggagacacctgatcagcctaaaggtcaaactgtcaaaggaccatcttcagggaacaaggaggttttcacttcaccttttcttgataacatcaagacaccagatccactgaagcgtcaaacggtgaacttcacaaagtgtaaactgtcccttgatccaattgaatcagattctgatagtccaaaagttgatgaaagaagacctgttactcgctccttgggacgtaagaaagcactggcatcctccaagaagcagagccgaagttcaaagaaaccattatctacttttcagtctacacccaagaagaaaatgctggacaatgtgtttatctttaatgagaaatgcacacctaaaacagtggatcagggtgaaacaaataaagcgactgagtcacgtggtagcaggtctcctgattctgccaaaaaaagagtaaacaggaaacagccatacctttctccaactgaggatgaagggattaaaagttctgaaacaagttttgcaaaaggatataaatctcacaaatggccttcagatattgatgttcctgataaatctcctgttgagcatatgggtaggaaatcaaatctaaaagaggacagaatgagcaaaagacgcttatcttcagctgctccttttcccactgctgcaacacaagaaaatactgattctgataaagaacaagaacaatgcccggaaaacttcctaaccagggcttttgatcaagcctccaaggagctgagcaaaagcgcaaagaaaccattttctacttttcactctacacctaagaagaaaatgcagggtaatgtgtttaccttcaatgagaaacgcgcacctaaaacggtggatcaggacaaaatgaatcaaactactgagtcgcctggtagtgagtctcctggttctgcagaagaaagagaaaacagtaaacaaccatctcattcacccctttctccaactgaagatgaagggactcaagggagtaaaagttccgaacaaagctttgcaaaaggatataaatctcaaaaatggattccagatatcaagggcacagataaatctccccttgagtatgttggcaggaaaacaaaactaaaagaggatagaatgaacaaaagatacttatcttcacctactccttttgccacttctggaacacaagaaactatagtttctgacaaagatcaagaacaatgcccagaaaactacctaactagggcttttgatcaattgatagtggttctgggaaggtttcaaactaagatcaagtctgaaacaagcaagaaaagttctgagattcttgcagctactagagagactatatgtcagcaccttgagggggttgaggcgcagatgcaggctgacgtggacaaattggtcaatgcaggcaggtctaaaaggaaacgcctagaatctacatttgaagatcaacaagaaaagttaagaattcttcatgagaagttcaaggaggaggtcaacaagcagcttctgaattgcaggagttctcttgaggattttgaatcctaccatgcagaacttaagggagtagctgacaagcaaaaatcatcccacaagaagctcttagcaaatgccgagaaaacagtaggcgctcagctcaacgatgcagaaaccaaaatcgcagaggtccagaagagagcacgcaagaggatgaatggcctgaaatacgtgctcaaggagcttatcacagagactgttgattgactgatcgaagttgcttcactttgtccaagtacatatcaccggtgcgaagattaggatacgcaggatgcacatgcgaacacgtctagggttccatttgaaaggggtacaggagaatcatgatgcacataggttttgtcagaaatcgagatttgcaaaggctattttacttctagacgtccttagtattattttctgggtcgtaccttccgttagggtttttgctacctggtcgatgtgcacagtgcactgctgcactgcaacacccagacgtctttcagcgatatgcgacctgtaggatgtgtgtactgttcctcttcgttctagccaaaccctgttgctagctggaatactaatgaagaggtgtcttgatatttacgtgatttgacgcttgcttgatgctgtgcactggagtctaatggtgactggtttatgcacagatttacgatgtcgttgttccatctctctctcgctttttaactcgggaccgcaaccatggattggttggacgccaccaatcgtggcgcgttggagcggatcgtcc

SEQ ID NO: 221952 - DNA, 2851 bp, Zea Mays
ctttctcaggcgacgggagccaaccagagctgccccaatggaagttgagctgccaaacatccataaagctacttcgagtgaccattggagtttaaccagcagccaatacccgtctggtaaatttcctaaggtctcagtgggtatcatgattccgaaggcaggtagtataccaagagccagaggtggagatgctaccccaactcctacatttgacaggaacttgtctcaaggaactgatggtttatctagaccaaaaggtgataatacttcacttcgtgtttcacaagaagctctgaaccatgatgtatccactgaaggggctcctaaagctgatcctgttacgaaggtctctgtatcacaacctgatgacaatacatgtgagcaaacaggaaccttttcctttggaacaagaagagaacaaggcatcagcgttgaaaaattggagacacctgagtttttaagttcccaaagaaaacggaacacggagtctgcagataaagccaaacccaatagtgagatgctcaggatgaagttgtgggagatccttggtggcacttcacaaaacaagcaggccgctgcttcaccaaaccctgatgacatggagacacctgatcagcctaaaggtcaaactgtcaaaggaccatcttcagggaacaaggaggttttcacttcaccttttcttgataacatcaagacaccagatccactgaagcgtcaaacggtgaacttcacaaagtgtaaactgtcccttgatccaattgaatcagattctgatagtccaaaagttgatgaaagaagacctgttactcgctccttgggacgtaagaaagcactggcatcctccaagaagcagagccgaagttcaaagaaaccattatctacttttcagtctacacccaagaagaaaatgctggacaatgtgtttatctttaatgagaaatgcacacctaaaacagtggatcagggtgaaacaaataaagcgactgagtcacgtggtagcaggtctcctgattctgccaaaaaaagagtaaacaggaaacagccatacctttctccaactgaggatgaagggattaaaagttctgaaacaagttttgcaaaaggatataaatctcacaaatggccttcagatattgatgttcctgataaatctcctgttgagcatatgggtaggaaatcaaatctaaaagaggacagaatgagcaaaagacgcttatcttcagctgctccttttcccactcaacacaagaaaatactgattctgataaagaacaagaacaatgcccggaaaacttcctaaccagggcttttgatcaagcctccaaggagctgagcaaaagcgcaaagaaaccattttctacttttcactctacacctaagaagaaaatgcagggtaatgtgtttaccttcaatgagaaacgcgcacctaaaacggtggatcaggacaaaatgaatcaaactactgagtcgcctggtagtgagtctcctggttctgcagaagaaagagaaaacagtaaacaaccatctcattcacccctttctccaactgaagatgaagggactcaagggagtaaaagttccgaacaaagctttgcaaaaggatataaatctcaaaaatggattccagatatcaagggcacagataaatctccccttgagtatgttggcaggaaaacaaaactaaaagaggatagaatgaacaaaagatacttatcttcacctactccttttgccacttctggaacacaagaaactatagtttctgacaaagatcaagaacaatgcccagaaaactacctaactagggcttttgatcaattgatagtggttctgggaaggtttcaaactaagatcaagtctgaaacaagcaagaaaagttctgagattcttgcagctactagagagactatatgtcagcaccttgagggggttgaggcgcagatgcaggctgacgtggacaaattggtcaatgcaggcaggtctaaaaggaaacgcctagaatctacatttgaagatcaacaagaaaagttaagaattcttcatgagaagttcaaggaggaggtcaacaagcagcttctgaattgcaggagttctcttgaggattttgaatcctaccatgcagaacttaagggagtagctgacaagcaaaaatcatcccacaagaagctcttagcaaatgccgagaaaacagtaggcgctcagctcaacgatgcagaaaccaaaatcgcagaggtccagaagagagcacgcaagaggatgaatggcctgaaatacgtgctcaaggagcttatcacagagactgttgattgactgatcgaagttgcttcactttgtccaagtacatatcaccggtgcgaagattaggatacgcaggatgcacatgcgaacacgtctagggttccatttgaaaggggtacaggagaatcatgatgcacataggttttgtcagaaatcgagatttgcaaaggctattttacttctagacgtccttagtattattttctgggtcgtaccttccgttagggtttttgctacctggtcgatgtgcacagtgcactgctgcactgcaacacccagacgtctttcagcgatatgcgacctgtaggatgtgtgtactgttcctcttcgttctagccaaaccctgttgctagctggaatactaatgaagaggtgtcttgatatttacgtgatttgacgcttgcttgatgctgtgcactggagtctaatggtgactggtttatgcacagatttacgatgtcgttgttccatctctctctcgctttttaactcgggaccgcaaccatggattggttggacgccaccaatcgtggcgcgttggagcggatcgtcc

SEQ ID NO: 221953 - DNA, 2896 bp, Zea Mays
gctacctcatacagctacgttattgtggttcacctgtagttaattttgtaaattattgttatatctgtagctgccccaatggaagttgagctgccaaacatccataaagctacttcgagtgaccattggagtttaaccagcagccaatacccgtctggtaaatttcctaaggtctcagtgggtatcatgattccgaaggcaggtagtataccaagagccagaggtggagatgctaccccaactcctacatttgacaggaacttgtctcaaggaactgatggtttatctagaccaaaaggtgataatacttcacttcgtgtttcacaagaagctctgaaccatgatgtatccactgaaggggctcctaaagctgatcctgttacgaaggtctctgtatcacaacctgatgacaatacatgtgagcaaacaggaaccttttcctttggaacaagaagagaacaaggcatcagcgttgaaaaattggagacacctgagtttttaagttcccaaagaaaacggaacacggagtctgcagataaagccaaacccaatagtgagatgctcaggatgaagttgtgggagatccttggtggcacttcacaaaacaagcaggccgctgcttcaccaaaccctgatgacatggagacacctgatcagcctaaaggtcaaactgtcaaaggaccatcttcagggaacaaggaggttttcacttcaccttttcttgataacatcaagacaccagatccactgaagcgtcaaacggtgaacttcacaaagtgtaaactgtcccttgatccaattgaatcagattctgatagtccaaaagttgatgaaagaagacctgttactcgctccttgggacgtaagaaagcactggcatcctccaagaagcagagccgaagttcaaagaaaccattatctacttttcagtctacacccaagaagaaaatgctggacaatgtgtttatctttaatgagaaatgcacacctaaaacagtggatcagggtgaaacaaataaagcgactgagtcacgtggtagcaggtctcctgattctgccaaaaaaagagtaaacaggaaacagccatacctttctccaactgaggatgaagggattaaaagttctgaaacaagttttgcaaaaggatataaatctcacaaatggccttcagatattgatgttcctgataaatctcctgttgagcatatgggtaggaaatcaaatctaaaagaggacagaatgagcaaaagacgcttatcttcagctgctccttttcccactgctgcaacacaagaaaatactgattctgataaagaacaagaacaatgcccggaaaacttcctaaccagggcttttgatcaagcctccaaggagctgagcaaaagcgcaaagaaaccattttctacttttcactctacacctaagaagaaaatgcagggtaatgtgtttaccttcaatgagaaacgcgcacctaaaacggtggatcaggacaaaatgaatcaaactactgagtcgcctggtagtgagtctcctggttctgcagaagaaagagaaaacagtaaacaaccatctcattcacccctttctccaactgaagatgaagggactcaagggagtaaaagttccgaacaaagctttgcaaaaggatataaatctcaaaaatggattccagatatcaagggcacagataaatctccccttgagtatgttggcaggaaaacaaaactaaaagaggatagaatgaacaaaagatacttatcttcacctactccttttgccacttctggaacacaagaaactatagtttctgacaaagatcaagaacaatgcccagaaaactacctaactagggcttttgatcaattgatagtggttctgggaaggtttcaaactaagatcaagtctgaaacaagcaagaaaagttctgagattcttgcagctactagagagactatatgtcagcaccttgagggggttgaggcgcagatgcaggctgacgtggacaaattggtcaatgcaggcaggtctaaaaggaaacgcctagaatctacatttgaagatcaacaagaaaagttaagaattcttcatgagaagttcaaggaggaggtcaacaagcagcttctgaattgcaggagttctcttgaggattttgaatcctaccatgcagaacttaagggagtagctgacaagcaaaaatcatcccacaagaagctcttagcaaatgccgagaaaacagtaggcgctcagctcaacgatgcagaaaccaaaatcgcagaggtccagaagagagcacgcaagaggatgaatggcctgaaatacgtgctcaaggagcttatcacagagactgttgattgactgatcgaagttgcttcactttgtccaagtacatatcaccggtgcgaagattaggatacgcaggatgcacatgcgaacacgtctagggttccatttgaaaggggtacaggagaatcatgatgcacataggttttgtcagaaatcgagatttgcaaaggctattttacttctagacgtccttagtattattttctgggtcgtaccttccgttagggtttttgctacctggtcgatgtgcacagtgcactgctgcactgcaacacccagacgtctttcagcgatatgcgacctgtaggatgtgtgtactgttcctcttcgttctagccaaaccctgttgctagctggaatactaatgaagaggtgtcttgatatttacgtgatttgacgcttgcttgatgctgtgcactggagtctaatggtgactggtttatgcacagatttacgatgtcgttgttccatctctctctcgctttttaactcgggaccgcaaccatggattggttggacgccaccaatcgtggcgcgttggagcggatcgtcc

SEQ ID NO: 221954 - DNA, 1029 bp, Zea Mays
gctcggtgcagaaaagcaacgaacacctgcgctgtcgtctccacagcgcgcgagaaacccacccccgtcgccgttcccgccgccgcaggagaagcaccaccacctcgggcgcgctatgaatcgcttccccgacagggggttcgtgcggctgcggaaccgcgcgtacggcacgtacctcttcgccgacgacgacggcgcgggcgtcatgctgaagccgcaccgcgcctccctgcaagcggtgtggcaggtggaccgggtcgtgcgccgcggccgcggctacatcgtcctccgcagcgccgcctacggccggcacctcatctgcgcgaccgggacgtcgtgggtcgaccaaagtcacgaggcttaccacacggtccagggaaactacaataacccggagcaggtcgacatcctctgggcgcctgttcatcgtctggacaacgtccacgtcgtcatgctccaaggcctagattgtcaacgtatcctccgcgcctgcgccccgaacactcccttcttcagatacgtcttcgtcgacgcctttcaacgcagcactaattacggcaccatggcagattggacggtcgagaccattcccgtgagaccagcaccaaccgtcattcccctcccagtcccacccctaactgaaggtgtcactcctctgattgtgttgcggagaatcaaatacgtgcgggcagatgctaacgggttgttcaacccgggtgcctggctaagctggttattcgttggcaactccttgttgcaactgaaacaagacctagagatgctgctcaacgtatcgaatatcacaatgtacgtgcgggctggcccatttgcgcggtggacccctttggtcatcgatctgccttcccaccctgccgacatggagatctttgtcatgaccgccatgacaccagcgatgtcgataatattggctcacccagactttgatgcatagtagaggaataccaaagcaggacttgtaacagcaccacggcaacactgctttcttcccataaacaagcttaaatggag

SEQ ID NO: 221955 - DNA, 1183 bp, Zea Mays
ccttacctcgtatcattgggtgcccgatatccggattcggtgtgaattcgacgtgattggtgatgaatacaagaggcatatgttttccaagccttcatccatgtcgacgtgaagccaagtacaaagtaaggctcccacggaggtccacagaagcagggagttgttggagcagcagccattgccaacctatattttccttcctggacaacccttcttttacatgtgacaccgcagcaagttgccaagttttaaatggttttgtactgtgtctaggaggatacgggatacttgcttgtacatacggaaaagaaggtcgcgtctaaacatcacgtgcagcttataattgtttcagaaatgctgttctttgggctgaacatgaagaaatcccatatgttgtgtgccatcgcgccagtattgctaacctgactatatgttgctgggctccagctttgacttcgagaggaattgctgtgatccccggttcttctaaaattgaagtgcaactaacagttgtgctggaaccctaaattgaaatttgagaagagaggatgcttggtgctttcgttcgtcaacggccttgacagaaattgtgttgcctgaactttcagcggctgcaggctgcagctgccatgttaggcaccggctgattggttcactgtgtccgtggctgcacgaagtaaacagtggtctagacatcaaatatgcactaagttaaagtcaatgtaaacagtgatctaggacaaagagatgctgccaaccaatcatatgggcagagaatgcatagaacgtgaaagccaccaaggccccacgaagtaaacaattgcgtcaaaagatagatatggctacggaagcaagaggatggcaacctgtgaagcaatgacttgccaggctgccacacgaaagatcatctacgctagtagtcgccggtacgggcatcaccgtcattccgtgaagcaactgacatccaaaaggtgccgaatccgtgccggcaagggagatatccgcgagaaatgtcaaccgggcacgggcagacttgtttcgtgtcttcattcgtccagatacgaaaaatcaggcgcattcggcatgtgatgtggagattcaggacaaagaagattatgtagtccatagaatcccaaaagtcgaaacggaacggaacgttttcaaaagctgtagtgatgaagaa

SEQ ID NO: 221956 - DNA, 514 bp, Zea Mays
ataataatgccatatggccatgtgggatgtctttgcagagtaacacgggaaggaaaggaacggaggaaacgttgggcccaacgaagaacatcctctaaaccagataagaaggcgccaaaggaagtagaagatgaagatactaaaaaaagtgaggagcatgaggagacaaatactatgcctggcatgctccccactagtgtaattgaaattctagcagctcgtgagaagcaaaccttcgcatcagattccgaggaagaaaatgtaaagcagaaggtccagaggagaaagaagagaatgaaaactgatggttgttggtcggtcaggcctgaaactattctgctgaaagatgtccgttcaacgcaacacgtgaagaatgcccttgatttcttggagcataggaaaaatcgtgtcccaaggtcaaatgcagttttgaagaatgccagtaaggctttgcgtctcctgtcttcgaaagacatggtcaagagacttaggaccaatgtgttggaatggaatc

SEQ ID NO: 221957 - DNA, 1869 bp, Zea Mays
ggacactgacgctacagacttaatagagtagtatagatatagattatgtcaagttcggggacagaagtgactccaacggctccttgctgcatatgcccgcagtagctccctcgcatcccgtcgcagatctcgcgccctcaccatcccaagcccatccccctcctcggatctaacccctctcctatctccgcgaccgcggtcatggcgggcactgtggggccttcgatgtgtgcgagtgcgacccctttctaatctaaagcgggtggattcgtcacgcataggccaactgcggcaagttcgccgcgctgcagcaatccattcagtgatatctcggtgcgtgcggcccctttctaccctctcctccctcgcatcgggatctcatggcggctgatgttggagttgtgatggtctctgcgtggtccgtgtcgttccagatagctttaaagggggctacggcagagggcacagtcatcacgaaggcgcttgggtcagctgggcgcgtgctcgatgggccgcaggccgagctggtgcctggtgctgcagccacccgcctcgccgtcgagaccaagcacgtcaagctcgtcgaggccgcgctcaactgcctgcacgacgttacgagatctaccagcgcaagaccactccctggccaaaatttcagatcccgcaacaattgtgtcgatcctcccaataccgctgccgctgtcaacgcatacgccgacctcaaccactcgtggatggatactatcgagaaggttgtgcgaaggaaagaagaggcggttggagaggagggcgacatggagaggccgacactgctgtcggaggcgctcaggatgccccaacccactgcttttgtctccgtgcagctgtccgatggtcaacccacgccgagcaacgtctcgaagaagaagatggacggtggcgaggtgctgttcttgtatggcgtcggggaggtcgctgtcaccatcggtcgcaacagcctctctccacagcccctccacccgggaagtagcattgtgattgtagtcattgagtcggaccgcggagatgatgatgggctttctgaggcacttatgcttggcgtaggctgcaagtaagttgcgaagcatggacactatatttgagtttactgctctatttgtaatctaatttttttaatccttgtaatcattttcataatttttgtaatatggcagaatctaggcaaccttttgatggatttcttgtaatttttcgggtaagaaaatatgctcgaacattgtttaataatgagatgggtccaaacaattgtatcagtgtgtctaaagccctaaatttcaatagcgccttctgttccttctattttggaatagctactactgagtatgttacataaaatttgttatcttaatgccaggagcgtatttgatccatccaaggaagtgtaatttatttgaatcgagaaagagggcacatgtaataaaattcaatattactattttacatcatttactccagtcacctaaaaaatgtttttttaacatggattttttggccgttggcgaatgagttgtcaggcttttcaatgcggtaatcacaccaatcttatatcattctctataacttttaaactttgcatgctacttttcttcattgtagtgagttgatctatgtttactccacctattcttacttcagtaatgtttttatgtgtttcatcgattatatgaaagtagatatagtaacattctaagtcttaggacagataaccctctggtttccaagtttgttcaacagatacaggatccggcatggcggatccatggcgcccaccggagacctctcccttaccgcactgaacaagcaccccatgaagcccgcccgagacatcgc

SEQ ID NO: 221958 - DNA, 869 bp, Zea Mays
  misc_feature (868)..(869): n is a, c, g, or t
tccggccccggtggcccagcagcctgagccagcgcgcctgtgcatcttcttccagcgtgccgtcgcctgcatcaagcgcggcgcacgcccactcgtcctctcggctctcgtccagacgcccagtcgccctagccataggcccctagccctagcacagcagcacaacagcgccgccccccgcccccggtggcccggccccccgcccgttcacccgcgcaaccgcgccgcgcgacccgcgtccggcggccgcccatcgccagtgccgtgacacgtcactccgacgccgtcgccaccaaatctcctggcaacgcctcacgtcttctagttctaattccagcctcactgctgccatcacctccgcctgctgtgtgtcttccacctcgcgctgccaaagccgacaaaccctagcccaactctccctaccctcgcccatcccactcctttcgtccgattcgtggaggcgacggaggggctaaggcatgacgaccgatgggcagctcagggagtgggtctccgacaagctcatgagcctcttgggctactccaagagcgtcgtcgttcagtacgtcatcaggcttgcgaaggagtgctcttcacccggtgacctcgtgggcaagcttgttgagtttgggttcagctcgtctgcggagacccgcaccttcgcgtcggatgtctacgccaaggttccccgcagggccagcggcatcagtaattaccagaaacaggagagggaggcggcaaagcttgtccagaaacagagtacttacaagctgttggtcaacgaggatgacaatactgacaaccagacactggcaagtcaaaagacctcaacaaatccatcatctaagagtcggaagcatttcaggann

SEQ ID NO: 221959 - DNA, 1978 bp, Zea Mays
ggtaactagatttctcaacgcaggagattgggttcgttgcttccccagcacagtggtgttttctgcggttggtgtgggatccatggagatttcctgcctctggaaatgaaatacacatgtgtagaatcaaacaacagtagatttttatgaaatttaggattgttcatggagctgaatatggatacatgcaggtggcctttttatagaggaaggaatgagtattaattaagttctaattagttgcgagtagtgttttgtcctatagaactagggagttttgcttcatggtaggtgttcctaggctgcaaattttgtctgatcttgcattgagaatatgatgggtgaagtctgtgacacgtcgcgtcgcgccgtcggtcgaagccagctcaatagtgaggttgaggcctcacaactttctgcaaaactacatgtcaagtgctccaccttgtcagaattttaaagaaacattttgttgtttcaccttgacttcttattgacatggcctattggagagagatctctgtgtgtttctggtttctaattggacatagacatgccagtgaggagcagtttagccggttcttgcattatgaagtggatgcaattagaaaggcgtgtgccagcttggaagagggctaccttcctctagttacattcatagtggtgcaaaagcgccatcacacactgttttgtcctgaagatcatcgttcacacagacaaccagatcgacgtggaaatattttgcaagccactctggcattcaggtgagccgatgatagatgttgcgattctccagaaagaaaacaaattctcgtctcaacacatatggttttaatcattttgcacttttggcaagggacgagccggtcatcacattaccatggtggacatttgagatttgcaaccttgttgtgcatagttttacacactaagcacccattgcaccgaaaaaacttacaggatgaactagatgcaaaacctgaagagctggaaggagaagagttggaatctaagcttctagagcctgttgcagctctttcggtgcatccagtgcatgtcccaggaaacaagcaactagcttgccctacttcacagaaagttatagctaaatacgatgagctggctgcactacaagctgaaatggcattgtgatcaggacactttggagacaatagttcttatggcgcagtcaggctagcaggctgccatctgagtttgaaattaccgattgctgccatccttgtgatccagacaaggaaaatgttcttgctatttaagttatgaggtggagtgatggctcttatcttgaagatcaggatcactggcggttgggttactccttgattcttacatggtattttaatggatttctagcaatgattttttgcatcttttaaaaaacatagaagatccttaggaatcatatctgcttttaatatgacgtcatttaaacttgaattaggcgccccattcctatcagttcacttctagatatgacaggtagttgatatgtattgcttcgatccgaatttatgagttgaagatatggtttaagcattcgatgaaagtgaactcgaatatccaatattccttaccaacgattccattcagttcatctctctgatgagttatgaatcagtggacttctactcttgcaggattaacgcatggaccgaggaagcgcaatgacaagcctaatagcctgcaactgatgaaaggaatggtctctactacatgtattattgtccatcccatctttgtttaatggtcgtagctgctttatacaattattcctacctatgctagactgtgagccattgtatatcaatgtattttatcatattgatttcgtagcaacgtacgagcatatacctagtatatttataaacaatgtgtagcacttgccacatttaaacagctaatcttaaaaagacacgacatgcgaggattgttaatcaatatcgtttgtatactaagc

SEQ ID NO: 221960 - DNA, 1814 bp, Zea Mays
attttgaatggtaactagatttctcaacgcaggagattgggttcgttgcttccccagcacagtggtgttttctgcggttggtgtgggatccatggagatttcctgcctctggaaatgaaatacacatgtgtagaatcaaacaacagtagatttttatgaaatttaggattgttcatggagctgaatatggatacatgcaggtggcctttttatagaggaaggaatgagtattaattaagttctaattagttgcgagtagtgttttgtcctatagaactagggagttttgcttcatggtaggtgttcctaggctgcaaattttgtctgatcttgcattgagaatatgatgggtgaagtctgtgacacgtcgcgtcgcgccgtcggtcgaagccagctcaatagtgaggttgaggcctcacaactttctgcaaaactacatgtcaagtgctccaccttgtcagaattttaaagaaacattttgttgtttcaccttgacttcttattgacatggcctattggagagagatctctgtgtgtttctggtttctaattggacatgtaaaagtttatgattagttgttgcataaatggattggctagaattttcaaagtataggtgcttggtgtcttctcatggtcatagggaaaatatcatagctgatattttcacacaagtgaaggatccacaaaagggatttgttccctatggaatgatcagggaactactcgtgccattctataaggcaaatgggagccgcaaaccaaataggaaaattttctatggagacatgccagtgaggagcagtttagccggttcttgcattatgaagtggatgcaattagaaaggcgtgtgccagcttggaagagggctaccttcctctagttacattcatagtggtgcaaaagcgccatcacacactgttttgtcctgaagatcatcgttcacacagacaaccagatcgacgtggaaatattttgcaagccactctggcattcaggtgagccgatgatagatgttgcgattctccagaaagaaaacaaattctcgtctcaacacatatggttttaatcattttgcacttttggcaagggacgagccggtcatcacattaccatggtggacatttgagatttgcaaccttgttgtgcatagttttacacactaagcacccattgcaccgaaaaaacttacaggatgaactagatgcaaaacctgaagagctggaaggagaagagttggaatctaagcttctagagcctgttgcagctctttcggtgcatccagtgcatgtcccaggaaacaagcaactagcttgccctacttcacagaaagttatagctaaatacgatgagctggctgcactacaagctgaaatggcattgtgatcagacaaggaaaatgttcttgctatttaagttatgaggtggagtgatggctcttatcttgaagatcaggatcactggcggttgggttactccttgattcttacatggattaacgcatggaccgaggaagcgcaatgacaagcctaatagcctgcaactgatgaaaggaatggtctctactacatgtattattgtccatcccatctttgtttaatggtcgtagctgctttatacaattattcctacctatgctagactgtgagccattgtatatcaatgtattttatcatattgatttcgtagcaacgtacgagcatatacctagtatatttataaacaatgtgtagcacttgccacatttaaacagctaatcttaaaaagacacgacatgcgaggattgttaatcaatatcgtttgtatactaagc

SEQ ID NO: 221961 - DNA, 2017 bp, Zea Mays
attttgaatggtaactagatttctcaacgcaggagattgggttcgttgcttccccagcacagtggtgttttctgcggttggtgtgggatccatggagatttcctgcctctggaaatgaaatacacatgtgtagaatcaaacaacagtagatttttatgaaatttaggattgttcatggagctgaatatggatacatgcaggtggcctttttatagaggaaggaatgagtattaattaagttctaattagttgcgagtagtgttttgtcctatagaactagggagttttgcttcatggtaggtgttcctaggctgcaaattttgtctgatcttgcattgagaatatgatgggtgaagtctgtgacacgtcgcgtcgcgccgtcggtcgaagccagctcaatagtgaggttgaggcctcacaactttctgcaaaactacatgtcaagtgctccaccttgtcagaattttaaagaaacattttgttgtttcaccttgacttcttattgacatggcctattggagagagatctctgtgtgtttctggtttctaattggacatgtaaaagtttatgattagttgttgcataaatggattggctagaattttcaaagtataggtgcttggtgtcttctcatggtcatagggaaaatatcatagctgatattttcacacaagtgaaggatccacaaaagggatttgttccctatggaatgatcagggaactactcgtgccattctataaggcaaatgggagccgcaaaccaaataggaaaattttctatggagacatgccagtgaggagcagtttagccggttcttgcattatgaagtggatgcaattagaaaggcgtgtgccagcttggaagagggctaccttcctctagttacattcatagtggtgcaaaagcgccatcacacactgttttgtcctgaagatcatcgttcacacagacaaccagatcgacgtggaaatattttgcaagccactctggcattcaggatgaactagatgcaaaacctgaagagctggaaggagaagagttggaatctaagcttctagagcctgttgcagctctttcggtgcatccagtgcatgtcccaggaaacaagcaactagcttgccctacttcacagaaagttatagctaaatacgatgagctggctgcactacaagctgaaatggcattgtgatcaggacactttggagacaatagttcttatggcgcagtcaggctagcaggctgccatctgagtttgaaattaccgattgctgccatccttgtgatccagacaaggaaaatgttcttgctatttaagttatgaggtggagtgatggctcttatcttgaagatcaggatcactggcggttgggttactccttgattcttacatggtattttaatggatttctagcaatgattttttgcatcttttaaaaaacatagaagatccttaggaatcatatctgcttttaatatgacgtcatttaaacttgaattaggcgccccattcctatcagttcacttctagatatgacaggtagttgatatgtattgcttcgatccgaatttatgagttgaagatatggtttaagcattcgatgaaagtgaactcgaatatccaatattccttaccaacgattccattcagttcatctctctgatgagttatgaatcagtggacttctactcttgcaggattaacgcatggaccgaggaagcgcaatgacaagcctaatagcctgcaactgatgaaaggaatggtctctactacatgtattattgtccatcccatctttgtttaatggtcgtagctgctttatacaattattcctacctatgctagactgtgagccattgtatatcaatgtattttatcatattgatttcgtagcaacgtacgagcatatacctagtatatttataaacaatgtgtagcacttgccacatttaaacagctaatcttaaaaagacacgacatgcgaggattgttaatcaatatcgtttgtatactaagc

SEQ ID NO: 221962 - DNA, 2369 bp, Zea Mays
attttgaatggtaactagatttctcaacgcaggagattgggttcgttgcttccccagcacagtggtgttttctgcggttggtgtgggatccatggagatttcctgcctctggaaatgaaatacacatgtgtagaatcaaacaacagtagatttttatgaaatttaggattgttcatggagctgaatatggatacatgcaggtggcctttttatagaggaaggaatgagtattaattaagttctaattagttgcgagtagtgttttgtcctatagaactagggagttttgcttcatggtaggtgttcctaggctgcaaattttgtctgatcttgcattgagaatatgatgggtgaagtctgtgacacgtcgcgtcgcgccgtcggtcgaagccagctcaatagtgaggttgaggcctcacaactttctgcaaaactacatgtcaagtgctccaccttgtcagaattttaaagaaacattttgttgtttcaccttgacttcttattgacatggcctattggagagagatctctgtgtgtttctggtttctaattggacatgtaaaagtttatgattagttgttgcataaatggattggctagaattttcaaagtataggtgcttggtgtcttctcatggtcatagggaaaatatcatagctgatattttcacacaagtgaaggatccacaaaagggatttgttccctatggaatgatcagggaactactcgtgccattctataaggcaaatgggagccgcaaaccaaataggaaaattttctatggagacatgccagtgaggagcagtttagccggttcttgcattatgaagtggatgcaattagaaaggcgtgtgccagcttggaagagggctaccttcctctagttacattcatagtggtgcaaaagcgccatcacacactgttttgtcctgaagatcatcgttcacacagacaaccagatcgacgtggaaatattttgcaagccactctggcattcaggtgagccgatgatagatgttgcgattctccagaaagaaaacaaattctcgtctcaacacatatggttttaatcattttgcacttttggcaagggacgagccggtcatcacattaccatggtggacatttgagatttgcaaccttgttgtgcatagttttacacactaagcacccattgcaccgaaaaaacttacaggatgaactagatgcaaaacctgaagagctggaaggagaagagttggaatctaagcttctagagcctgttgcagctctttcggtgcatccagtgcatgtcccaggaaacaagcaactagcttgccctacttcacagaaagttatagctaaatacgatgagctggctgcactacaagctgaaatggcattgtgatcaggttaatgttcgctctatttgtacatcttaatgtgtatttgatgttcctttcatgggattaatttgctggtatctatttcaatatttgattcataacttctgtgtgctccccttaaaaggttgttgtctattaagaagtggaatacacgataatatgcaaccacaaattgtttatcgtgcggtatccaaaaagtttacatgtatacatctcttcagcattttagtttccatttagtatcttctactctctatttgaaagaagtgaagttcttccactccccaaacttataaatcatgttttactgttgtgaattgttttgcttagatgtagacaattttgttttttataggaacatagtttttcaaattgcaccccaaaatatgatagcttatatattttggttatgattaggagtgttgggctgctggctgcccgcttttttttcttttttcctttttaggacactttggagacaatagttcttatggcgcagtcaggctagcaggctgccatctgagtttgaaattaccgattgctgccatccttgtgatccagacaaggaaaatgttcttgctatttaagttatgaggtggagtgatggctcttatcttgaagatcaggatcactggcggttgggttactccttgattcttacatggattaacgcatggaccgaggaagcgcaatgacaagcctaatagcctgcaactgatgaaaggaatggtctctactacatgtattattgtccatcccatctttgtttaatggtcgtagctgctttatacaattattcctacctatgctagactgtgagccattgtatatcaatgtattttatcatattgatttcgtagcaacgtacgagcatatacctagtatatttataaacaatgtgtagcacttgccacatttaaacagctaatcttaaaaagacacgacatgcgaggattgttaatcaatatcgtttgtatactaagc

SEQ ID NO: 221963 - DNA, 1697 bp, Zea Mays
attttgaatggtaactagatttctcaacgcaggagattgggttcgttgcttccccagcacagtggtgttttctgcggttggtgtgggatccatggagatttcctgcctctggaaatgaaatacacatgtgtagaatcaaacaacagtagatttttatgaaatttaggattgttcatggagctgaatatggatacatgcaggtggcctttttatagaggaaggaatgagtattaattaagttctaattagttgcgagtagtgttttgtcctatagaactagggagttttgcttcatggtaggtgttcctaggctgcaaattttgtctgatcttgcattgagaatatgatgggtgaagtctgtgacacgtcgcgtcgcgccgtcggtcgaagccagctcaatagtgaggttgaggcctcacaactttctgcaaaactacatgtcaagtgctccaccttgtcagaattttaaagaaacattttgttgtttcaccttgacttcttattgacatggcctattggagagagatctctgtgtgtttctggtttctaattggacatgtaaaagtttatgattagttgttgcataaatggattggctagaattttcaaagtataggtgcttggtgtcttctcatggtcatagggaaaatatcatagctgatattttcacacaagtgaaggatccacaaaagggatttgttccctatggaatgatcagggaactactcgtgccattctataaggcaaatgggagccgcaaaccaaataggaaaattttctatggagacatgccagtgaggagcagtttagccggttcttgcattatgaagtggatgcaattagaaaggcgtgtgccagcttggaagagggctaccttcctctagttacattcatagtggtgcaaaagcgccatcacacactgttttgtcctgaagatcatcgttcacacagacaaccagatcgacgtggaaatattttgcaaggatgaactagatgcaaaacctgaagagctggaaggagaagagttggaatctaagcttctagagcctgttgcagctctttcggtgcatccagtgcatgtcccaggaaacaagcaactagcttgccctacttcacagaaagttatagctaaatacgatgagctggctgcactacaagctgaaatggcattgtgatcaggacactttggagacaatagttcttatggcgcagtcaggctagcaggctgccatctgagtttgaaattaccgattgctgccatccttgtgatccagacaaggaaaatgttcttgctatttaagttatgaggtggagtgatggctcttatcttgaagatcaggatcactggcggttgggttactccttgattcttacatggattaacgcatggaccgaggaagcgcaatgacaagcctaatagcctgcaactgatgaaaggaatggtctctactacatgtattattgtccatcccatctttgtttaatggtcgtagctgctttatacaattattcctacctatgctagactgtgagccattgtatatcaatgtattttatcatattgatttcgtagcaacgtacgagcatatacctagtatatttataaacaatgtgtagcacttgccacatttaaacagctaatcttaaaaagacacgacatgcgaggattgttaatcaatatcgtttgtatactaagc

SEQ ID NO: 221964 - DNA, 2535 bp, Zea Mays
attttgaatggtaactagatttctcaacgcaggagattgggttcgttgcttccccagcacagtggtgttttctgcggttggtgtgggatccatggagatttcctgcctctggaaatgaaatacacatgtgtagaatcaaacaacagtagatttttatgaaatttaggattgttcatggagctgaatatggatacatgcaggtggcctttttatagaggaaggaatgagtattaattaagttctaattagttgcgagtagtgttttgtcctatagaactagggagttttgcttcatggtaggtgttcctaggctgcaaattttgtctgatcttgcattgagaatatgatgggtgaagtctgtgacacgtcgcgtcgcgccgtcggtcgaagccagctcaatagtgaggttgaggcctcacaactttctgcaaaactacatgtcaagtgctccaccttgtcagaattttaaagaaacattttgttgtttcaccttgacttcttattgacatggcctattggagagagatctctgtgtgtttctggtttctaattggacatgtaaaagtttatgattagttgttgcataaatggattggctagaattttcaaagtataggtgcttggtgtcttctcatggtcatagggaaaatatcatagctgatattttcacacaagtgaaggatccacaaaagggatttgttccctatggaatgatcagggaactactcgtgccattctataaggcaaatgggagccgcaaaccaaataggaaaattttctatggagacatgccagtgaggagcagtttagccggttcttgcattatgaagtggatgcaattagaaaggcgtgtgccagcttggaagagggctaccttcctctagttacattcatagtggtgcaaaagcgccatcacacactgttttgtcctgaagatcatcgttcacacagacaaccagatcgacgtggaaatattttgcaagtaactgtggttgacacaaagatatgtcatccaagtgaatttgatttctacctttgtagccactctggcattcaggatgaactagatgcaaaacctgaagagctggaaggagaagagttggaatctaagcttctagagcctgttgcagctctttcggtgcatccagtgcatgtcccaggaaacaagcaactagcttgccctacttcacagaaagttatagctaaatacgatgagctggctgcactacaagctgaaatggcattgtgatcaggttaatgttcgctctatttgtacatcttaatgtgtatttgatgttcctttcatgggattaatttgctggtatctatttcaatatttgattcataacttctgtgtgctccccttaaaaggttgttgtctattaagaagtggaatacacgataatatgcaaccacaaattgtttatcgtgcggtatccaaaaagtttacatgtatacatctcttcagcattttagtttccatttagtatcttctactctctatttgaaagaagtgaagttcttccactccccaaacttataaatcatgttttactgttgtgaattgttttgcttagatgtagacaattttgttttttataggaacatagtttttcaaattgcaccccaaaatatgatagcttatatattttggttatgattaggagtgttgggctgctggctgcccgcttttttttcttttttcctttttaggacactttggagacaatagttcttatggcgcagtcaggctagcaggctgccatctgagtttgaaattaccgattgctgccatccttgtgatccagacaaggaaaatgttcttgctatttaagttatgaggtggagtgatggctcttatcttgaagatcaggatcactggcggttgggttactccttgattcttacatggtattttaatggatttctagcaatgattttttgcatcttttaaaaaacatagaagatccttaggaatcatatctgcttttaatatgacgtcatttaaacttgaattaggcgccccattcctatcagttcacttctagatatgacaggtagttgatatgtattgcttcgatccgaatttatgagttgaagatatggtttaagcattcgatgaaagtgaactcgaatatccaatattccttaccaacgattccattcagttcatctctctgatgagttatgaatcagtggacttctactcttgcaggattaacgcatggaccgaggaagcgcaatgacaagcctaatagcctgcaactgatgaaaggaatggtctctactacatgtattattgtccatcccatctttgtttaatggtcgtagctgctttatacaattattcctacctatgctagactgtgagccattgtatatcaatgtattttatcatattgatttcgtagcaacgtacgagcatatacctagtatatttataaacaatgtgtagcacttgccacatttaaacagctaatcttaaaaagacacgacatgcgaggattgttaatcaatatcgtttgtatactaagc

SEQ ID NO: 221965 - DNA, 1592 bp, Zea Mays
attttgaatggtaactagatttctcaacgcaggagattgggttcgttgcttccccagcacagtggtgttttctgcggttggtgtgggatccatggagatttcctgcctctggaaatgaaatacacatgtgtagaatcaaacaacagtagatttttatgaaatttaggattgttcatggagctgaatatggatacatgcaggtggcctttttatagaggaaggaatgagtattaattaagttctaattagttgcgagtagtgttttgtcctatagaactagggagttttgcttcatggtaggtgttcctaggctgcaaattttgtctgatcttgcattgagaatatgatgggtgaagtctgtgacacgtcgcgtcgcgccgtcggtcgaagccagctcaatagtgaggttgaggcctcacaactttctgcaaaactacatgtcaagtgctccaccttgtcagaattttaaagaaacattttgttgtttcaccttgacttcttattgacatggcctattggagagagatctctgtgtgtttctggtttctaattggacatgtaaaagtttatgattagttgttgcataaatggattggctagaattttcaaagtataggtgcttggtgtcttctcatggtcatagggaaaatatcatagctgatattttcacacaagtgaaggatccacaaaagggatttgttccctatggaatgatcagggaactactcgtgccattctataaggcaaatgggagccgcaaaccaaataggaaaattttctatggagacatgccagtgaggagcagtttagccggttcttgcattatgaagtggatgcaattagaaaggcgtgtgccagcttggaagagggctaccttcctctagttacattcatagtggtgcaaaagcgccatcacacactgttttgtcctgaagatcatcgttcacacagacaaccagatcgacgtggaaatattttgcaagtaactgtggttgacacaaagatatgtcatccaagtgaatttgatttctacctttgtagccactctggcattcaggatgaactagatgcaaaacctgaagagctggaaggagaagagttggaatctaagcttctagagcctgttgcagctctttcggtgcatccagtgcatgtcccaggaaacaagcaactagcttgccctacttcacagaaagttatagctaaatacgatgagctggctgcactacaagctgaaatggcattgtgatcagtggacttctactcttgcaggattaacgcatggaccgaggaagcgcaatgacaagcctaatagcctgcaactgatgaaaggaatggtctctactacatgtattattgtccatcccatctttgtttaatggtcgtagctgctttatacaattattcctacctatgctagactgtgagccattgtatatcaatgtattttatcatattgatttcgtagcaacgtacgagcatatacctagtatatttataaacaatgtgtagcacttgccacatttaaacagctaatcttaaaaagacacgacatgcgaggattgttaatcaatatcgtttgtatactaagc

SEQ ID NO: 221966 - DNA, 1624 bp, Zea Mays
attttgaatggtaactagatttctcaacgcaggagattgggttcgttgcttccccagcacagtggtgttttctgcggttggtgtgggatccatggagatttcctgcctctggaaatgaaatacacatgtgtagaatcaaacaacagtagatttttatgaaatttaggattgttcatggagctgaatatggatacatgcaggtggcctttttatagaggaaggaatgagtattaattaagttctaattagttgcgagtagtgttttgtcctatagaactagggagttttgcttcatggtaggtgttcctaggctgcaaattttgtctgatcttgcattgagaatatgatgggtgaagtctgtgacacgtcgcgtcgcgccgtcggtcgaagccagctcaatagtgaggttgaggcctcacaactttctgcaaaactacatgtcaagtgctccaccttgtcagaattttaaagaaacattttgttgtttcaccttgacttcttattgacatggcctattggagagagatctctgtgtgtttctggtttctaattggacatgtaaaagtttatgattagttgttgcataaatggattggctagaattttcaaagtataggtgcttggtgtcttctcatggtcatagggaaaatatcatagctgatattttcacacaagtgaaggatccacaaaagggatttgttccctatggaatgatcagggaactactcgtgccattctataaggcaaatgggagccgcaaaccaaataggaaaattttctatggagacatgccagtgaggagcagtttagccggttcttgcattatgaagtggatgcaattagaaaggcgtgtgccagcttggaagagggctaccttcctctagttacattcatagtggtgcaaaagcgccatcacacactgttttgtcctgaagatcatcgttcacacagacaaccagatcgacgtggaaatattttgcaagctctttcggtgcatccagtgcatgtcccaggaaacaagcaactagcttgccctacttcacagaaagttatagctaaatacgatgagctggctgcactacaagctgaaatggcattgtgatcaggacactttggagacaatagttcttatggcgcagtcaggctagcaggctgccatctgagtttgaaattaccgattgctgccatccttgtgatccagacaaggaaaatgttcttgctatttaagttatgaggtggagtgatggctcttatcttgaagatcaggatcactggcggttgggttactccttgattcttacatggattaacgcatggaccgaggaagcgcaatgacaagcctaatagcctgcaactgatgaaaggaatggtctctactacatgtattattgtccatcccatctttgtttaatggtcgtagctgctttatacaattattcctacctatgctagactgtgagccattgtatatcaatgtattttatcatattgatttcgtagcaacgtacgagcatatacctagtatatttataaacaatgtgtagcacttgccacatttaaacagctaatcttaaaaagacacgacatgcgaggattgttaatcaatatcgtttgtatactaagc

SEQ ID NO: 221967 - DNA, 1574 bp, Zea Mays
ttcccttcggtgaggtaatcaagggaactactcgtgccattctataaggcaaatgggagccgcaaaccaaataggaaaattttctatgggttcgtaattgtctgtttgaatgaattttgttgttgtctaaacttaaatctcttttccttgcatgtaaagaaaaagacctgccagttttctttatgttagtacatatttcaacagctaaacagctacaccttgtatacttggagaagaatcctggagttactttacttgtttccttgatttgcagagacatgccagtgaggagcagtttagccggttcttgcattatgaagtggatgcaattagaaaggcgtgtgccagcttggaagagggctaccttcctctagttacattcatagtggtgcaaaagcgccatcacacactgttttgtcctgaagatcatcgttcacacagacaaccagatcgacgtggaaatattttgcaagctctttcggtgcatccagtgcatgtcccaggaaacaagcaactagcttgccctacttcacagaaagttatagctaaatacgatgagctggctgcactacaagctgaaatggcattgtgatcaggttaatgttcgctctatttgtacatcttaatgtgtatttgatgttcctttcatgggattaatttgctggtatctatttcaatatttgattcataacttctgtgtgctccccttaaaaggttgttgtctattaagaagtggaatacacgataatatgcaaccacaaattgtttatcgtgcggtatccaaaaagtttacatgtatacatctcttcagcattttagtttccatttagtatcttctactctctatttgaaagaagtgaagttcttccactccccaaacttataaatcatgttttactgttgtgaattgttttgcttagatgtagacaattttgttttttataggaacatagtttttcaaattgcaccccaaaatatgatagcttatatattttggttatgattaggagtgttgggctgctggctgcccgcttttttttcttttttcctttttaggacactttggagacaatagttcttatggcgcagtcaggctagcaggctgccatctgagtttgaaattaccgattgctgccatccttgtgatccagacaaggaaaatgttcttgctatttaagttatgaggtggagtgatggctcttatcttgaagatcaggatcactggcggttgggttactccttgattcttacatggattaacgcatggaccgaggaagcgcaatgacaagcctaatagcctgcaactgatgaaaggaatggtctctactacatgtattattgtccatcccatctttgtttaatggtcgtagctgctttatacaattattcctacctatgctagactgtgagccattgtatatcaatgtattttatcatattgatttcgtagcaacgtacgagcatatacctagtatatttataaacaatgtgtagcacttgccacatttaaacagctaatcttaaaaagacacgacatgcgaggattgttaatcaatatcgtttgtatactaagc

SEQ ID NO: 221968 - DNA, 1840 bp, Zea Mays
ttcccttcggtgaggtaatcaagggaactactcgtgccattctataaggcaaatgggagccgcaaaccaaataggaaaattttctatggagacatgccagtgaggagcagtttagccggttcttgcattatgaagtggatgcaattagaaaggcgtgtgccagcttggaagagggctaccttcctctagttacattcatagtggtgcaaaagcgccatcacacactgttttgtcctgaagatcatcgttcacacagacaaccagatcgacgtggaaatattttgcaagtaactgtggttgacacaaagatatgtcatccaagtgaatttgatttctacctttgtagccactctggcattcaggatgaactagatgcaaaacctgaagagctggaaggagaagagttggaatctaagcttctagagcctgttgcagctctttcggtgcatccagtgcatgtcccaggaaacaagcaactagcttgccctacttcacagaaagttatagctaaatacgatgagctggctgcactacaagctgaaatggcattgtgatcaggttaatgttcgctctatttgtacatcttaatgtgtatttgatgttcctttcatgggattaatttgctggtatctatttcaatatttgattcataacttctgtgtgctccccttaaaaggttgttgtctattaagaagtggaatacacgataatatgcaaccacaaattgtttatcgtgcggtatccaaaaagtttacatgtatacatctcttcagcattttagtttccatttagtatcttctactctctatttgaaagaagtgaagttcttccactccccaaacttataaatcatgttttactgttgtgaattgttttgcttagatgtagacaattttgttttttataggaacatagtttttcaaattgcaccccaaaatatgatagcttatatattttggttatgattaggagtgttgggctgctggctgcccgcttttttttcttttttcctttttaggacactttggagacaatagttcttatggcgcagtcaggctagcaggctgccatctgagtttgaaattaccgattgctgccatccttgtgatccagacaaggaaaatgttcttgctatttaagttatgaggtggagtgatggctcttatcttgaagatcaggatcactggcggttgggttactccttgattcttacatggtattttaatggatttctagcaatgattttttgcatcttttaaaaaacatagaagatccttaggaatcatatctgcttttaatatgacgtcatttaaacttgaattaggcgccccattcctatcagttcacttctagatatgacaggtagttgatatgtattgcttcgatccgaatttatgagttgaagatatggtttaagcattcgatgaaagtgaactcgaatatccaatattccttaccaacgattccattcagttcatctctctgatgagttatgaatcagtggacttctactcttgcaggattaacgcatggaccgaggaagcgcaatgacaagcctaatagcctgcaactgatgaaaggaatggtctctactacatgtattattgtccatcccatctttgtttaatggtcgtagctgctttatacaattattcctacctatgctagactgtgagccattgtatatcaatgtattttatcatattgatttcgtagcaacgtacgagcatatacctagtatatttataaacaatgtgtagcacttgccacatttaaacagctaatcttaaaaagacacgacatgcgaggattgttaatcaatatcgtttgtatactaagc

SEQ ID NO: 221969 - DNA, 1379 bp, Zea Mays
cttttagctcaactttatttttgcagcaccattatttcttacacttctcgtcttcttcccctttcgctttcactcttcctttgcagctcacactcacaagaatcccccgcgtcgcagacatgcggccgcttatccgaaccgctcgctgctggctcctccgcgcgcgtgttcgcggcatggccacgcttccaatggcgctctcccccgccgccatttcccccttcaccaccctccccctctactattcttcgcgtcctcaccgccgcctcctcgcccgcttcttctccgtcgcttcggcaccgggcggagcgaaagggcaccgaccggcggcctccgccgttgaggtgggcggcgtcaagatcgcgcgcgaggatgttgtgaaggaggatgatccgacaaacaacgtgcccgacaatatcttttcgaagatcggcctgcagctgcacaggagggataaccatccccttgggattttgaagaacacaatttatgattactttgacaagaacttcactgggcagtttgacaagtttgatgacctttgccctcttgtttctgtcaagcagaattttgatgatgtcttggtcccttctgaccatgtaagccggagttacaacgacacatattatgttgatggtcaaacagtcttaaggtgtcataccagtgctcatcaagctgagctgctaaggcatggacatacacactttcttgtaactggagatgtttaccgtagggattccattgattcaactcactatcctgtcttccatcagatggaagggttccgtgtcttctctcctgatgaatggtcagggtctcgcatgggtgggacagcatatgcagctgcagaactcaagaaaacactggaaggcttggcaagacatctatttggtgctgtagagatgcgatgggttgacacttacttcccatttaccaacccatcctttgagctcgaaatatactttcaggatgattggttggaggttttggggtgtggagtcaccgagcaggaaattttgaaaagaaatggcaggagggaccatgtggcttgggcctttggattgggcttggagcgccttgcaatggtcctttttgacattccagatattcgactcttctggtcgaatgataaacggttcacgtcccagttctcagaaggcaagcttggtgtcaagttcaagccattttcaaagtttcctccttgttacaaggatatgagtttctggatcaatgatgcatttacagagaacaacttatgtgaggttgtcagaggaattgctggtgatcttgttgaggaggtatgataacagtgcatttgatgcacattggcttagcttagtcatttcaagtttttatgatccttcagctttcatgttgtc

SEQ ID NO: 221970 - DNA, 1278 bp, Zea Mays
ctcacactcacaagaatcccccgcgtcgcagacatgcggccgcttatccgaaccgctcgctgctggctcctccgcgcgcgtgttcgcggcatggccacgcttccaatggcgctctcccccgccgccatttcccccttcaccaccctccccctctactattcttcgcgtcctcaccgccgcctcctcgcccgcttcttctccgtcgcttcggcaccgggcggagcgaaagggcaccgaccggcggcctccgccgttgaggtgggcggcgtcaagatcgcgcgcgaggatgttgtgaaggaggatgatccgacaaacaacgtgcccgacaatatcttttcgaagatcggcctgcagctgcacaggagggataaccatccccttgggattttgaagaacacaatttatgattactttgacaagaacttcactgggcagtttgacaagtttgatgacctttgccctcttgtttctgtcaagcagaattttgatgatgtcttggtcccttctgaccatgtaagccggagttacaacgacacatattatgttgatggtcaaacagtcttaaggtgtcataccagtgctcatcaagctgagctgctaaggcatggacatacacactttcttgtaactggagatgtttaccgtagggattccattgattcaactcactatcctgtcttccatcagatggaagggttccgtgtcttctctcctgatgaatggtcagggtctcgcatgggtgggacagcatatgcagctgcagaactcaagaaaacactggaaggcttggcaagacatctatttggtgctgtagagatgcgatgggttgacacttacttcccatttaccaacccatcctttgagctcgaaatatactttcaggttttggggtgtggagtcaccgagcaggaaattttgaaaagaaatggcaggagggaccatgtggcttgggcctttggattgggcttggagcgccttgcaatggtcctttttgacattccagatattcgactcttctggtcgaatgataaacggttcacgtcccagttctcagaaggcaagcttggtgtcaagttcaagccattttcaaagtttcctccttgttacaaggatatgagtttctggatcaatgatgcatttacagagaacaacttatgtgaggttgtcagaggaattgctggtgatcttgttgaggaggtatgataacagtgcatttgatgcacattggcttagcttagtcatttcaagtttttatgatccttcagctttcatgttgtc

SEQ ID NO: 221971 - DNA, 2401 bp, Zea Mays
agactcctaggttcatgaggggttcaagaatgaatccaggtgaccgtagaacgcggagcacgatgacgatagtaattgtgatgggtttatcatgcttcttttacatactaggtgcttggcagaaaagtgggacaggaaggggtgatagcatagctctgagagttaaccaagaaactgactgtacaatcttgccaaatttgcactttgagacccatcataccataagtggcgctaatccattgatcatgtccaataaaatgattgagccatgccacatccgatacagtgactatactccttgtcaagaccagaaccgagcaatggcctttcctagacaaaacatgacatacagagaaaggcattgtcctgtagagaatgagaaactgcattgtctcatcccagcaccaaaaggatatgtcacccctttctcttggcccaagagccgtgactatgttccatatgcaaatgctccgtataagagtctgacagttgagaaagctgttcagaactggatccaatatcagggagatgtgttcaaatttccaggaggaggaacaatgtttcccaatggagcgaatgcttaccttgatgaacttgcatccatcatcccactcgctgatggcactatcagaactgcacttgatactggatgtggggttgcaagcttcggagcttatctaatggacagaaatgtattaaccatgtcatttgcacccagagattcacatgaagctcaggttcaatttgcgttggagcgaggtgtccctgcagtaattggagtacttggaactataaaggtcccatacccctctagatcttttgatatggctcattgctcacgctgtttaatcccatgggagtcaaatggcggtatgtacatgatggaagtagaccgggttttgaggcctgggggttattggatactttctggacctcccatcaattggaagaaatactaccagtcatggaaaaggtctaaacaagatgcagaggaagatcaacatagaattgaaaatattgcagaaatgctttgctgggataaaatctttgagaaggatgatattgctatttggcagaaacaagggaattcatattcatgtcatcaaaaggatggtcatgctagcaagatgtgcaaagttcaagattcagatgatgtctggtataagaaattggaatcttgtataacacctcctatagaggcagcacagctaaagaagtttccagagagactatctgccattcctcccagaattctggagggtcaggtcccagacataacagaagaagtctatgaggaggataataagttgtggaagaagcatgttaatacttataagagggtgaacaagctgataggttcttcaaggtacaggaatattatggacatgaatgcaggccttggaagttttgctgcaactcttcattcttccagttcctgggtaatgaacgttgtgccctctatatcagaaaggaacactcttggtatcatatatgagcgaggtctgattggtatataccatgattggtgcgaagccttctcaacataccctaggacatacgacctgatacatggcaatgacatcttcagtttatatcagaacaagtgtgatgcagaagacattcttctggagatggataggattttacggccagagggtgcagtcatactgcgggacaatgccgatgtactgaacaaggttagaagtatggtggcaggaatgcggtggaagtccaagttactagatcatgaggatggcccgcacgttcccgagaagattctgatttcagtgaaagaatattgggttggcagcgaggaacagaacagctgataggtacagaaccatgttgatgctggatgccagcctctttccctgatgcgatcccctgatgctgttttgtcggttaatagattttgttcatactgcatacgtacagtactaaagacccttagatgatcgggacatacctggatttttgctgtgcatatatagtaatcagagcgttaagtgaactgttggcgatttgccaaggcatattgtagtgtaggcaaaagttcgtttgaaaaacatgtaggtacgagacaacttagtcgctactttgcccagagattaattatacagatgcacgcaagaagttttttgtgatttcgtatatgaacattatctgttgataatgcatgagattatttctttgagtgtttgtctgattgacctgacaagaggtcacaaggattgaattctgcttcagctgccctgctccgctcgctgttcaatggataagatagggagacagggctggacaaaatatcgtgtatcgtgggtttgttcggctcgttttaatgttgtcacgagccgaggtatttgttaacgagctagctcgttagcttgaacgagtaaccatt

SEQ ID NO: 221972 - DNA, 1830 bp, Zea Mays
ttggaattgaagtgcatgttatcagactgagtggcatccaatcctgaatcaatgaggggctggggtttgctcgtgttatcgctacatgttctttcatgcctggttagtggcgttgcttctggtcgaacaagctcttatgtgcgcacagagtttccatctacagatatacctctagaaagtgaatggtttgctattccaaagggatacaatgctccacagcaggttcatatcactcaaggtgattatgatggaaaggcagttatagtatcttgggttactccagaagaacctgggccaagtgaagtattttatggcaaggagaagctatatgaccagaaagcagaaggaacaacaacaaactatacgttttacgattacaaatctggatacatacaccattgccttgtcgatggccttgagtataacactaaatattattacaagattggaagcggaaattcagctcgagaattctggtttgaaacgcctccagcaattgatccagatgcatcatacacatttggcatcataggtgatctggggcaaacatttaattctctctcaactcttcaacattatgagaaaactggaggtcaaactgttctatttgttggggatttgtcgtatgctgatagatatgaacataatgatggcattcgttgggattcctggggtcgattcgttgagcacagtactgcataccagccatggatttggaatactggaaaccatgaaatagagtacaggcctgatctgggagaaacttctgtattcaagccatatttgcataggtacatgactccatatttagcatcaaagagcagttctcctatgtggtatgctgtcaggcgtgcatctgctcacatcatcgtgttgtctagctactctccatttgtaaaatacactcctcaatggctgtggctgaagaacgaattcaagcgcgtggacagggaaaagacaccctggcttatcgttctcatgcattctcccatgtacaacagcaacgaggcacattacatggagggtgagagtatgagggctgctttcgagaaatggtttgtgaagtacaaggttgacttggtgtttgcagggcacgttcatgcttatgagagatcataccgcatttctaatgtcaactacaacataacgtcgggaaatcggtatccagtgccggacaaatctgctcccgtttacataacggtcggtgatggaggcaaccaggaaggacttgcttcaaggttttataacccccagccggattactcagcgttcagggaggccagctatggtcactcagttttacagctgaaaaacaggacccatgctatctaccagtggaatagaaacgatgatgggaatcctgttccagcagacaccgtaatgttccataaccaatattgcacgcgccgcaggaggctgaagaagaaccatctccatctcgaggaccttgaggatttgatctccctattatagaaaaccgggttcgcaggacgcatgaactgtgtgtgggggaataatcgcaggttagcactgttgctagtgtgcccgcctctcttggaatggaagcagcagagccagctatcagactggcagtgaccaccacctcctcagctacctggttgcatgccacagatctgaaattctgaaatgctgtgactgtgactgtgaggtatgaaaaaacagtgtaaataacgcggttgcctccgtacatgtgtgacattttatacacgtgcaagaaagcatcggtgtccaccgttgtccgtgaaccattttcgcttgtatgcgcttgtgcccagtggaaatcctttccatctcgttggtttgctggtg

SEQ ID NO: 221973 - DNA, 1466 bp, Zea Mays
gtgggccatgcgggcggtggccagcgccgtcgtgtggaccgcggtcgtgcaggtcgcctccatcgccgggctgttccgcccgcgggtcgtcgccgactgcggcgggaaaggcggcggcggcgccgcggccgggctcgccgctctcgccggcgaggacagcgccgccgcgaggctgtcgccgccggcgctcgtgcccaagagaatttacaagagcaacggctatctacgagtgacttgcaatggtggcctcaaccaaatgcgagccgggatatgcgatatggttactatagcacgccatctaaatctaacgcttgtggtccctgaattggacaaaaggtcgttttgggctgacccaagtgattttggagatatttttgacgtggaccacttcattaattccttgagagatgagctgatgatagttaaagagctgcctttgaaactccagttaataagaactaagaagagactgtactccatgtctcctgtcagctggtcgaatgaaacatactacctaaagcggatactacctcttgcaaggaagcacaaagtaatccatttcgataaatcagacgcccgccttgcaaacaacggccttccagttcagctccagatgctgcgttgccgtgtaaacttcgatgctttgagattcaccccacagattgaggcccttggcagacagcttatctccactctccagagaagcgggcaattcgttgtgcttcacctgcgctatgagatggacatgctctccttttcaggctgcacgcatggctgctctactgaagaagctgaggagctcactagaatgagatatgcttatccatggtggaaagaaaaagagattggttctgaagcgaagaggcttcagggactttgcccccctcacgccagaggagattactctagtgcttaaagctctagggttcacaaaggacacgctgatctacattgcttctggtgagatctatggcggcgaaaggcgcttggcagtgctcaaggctgcgtaccctaaactagtaaggaaggagaagattctatctcctgatgaactgcggccgttccagaaccattcgacccagatggcagcgctggattacatggtctctctagcgagcgatattttcattcccagctatgacggaaatatggcaagggttgttgaaggtcaccgcaggtatatgggtttccgcaagaccattgctttggacagaaagaagctcgttgagctcttggaccttttccaaggacgcgctctatcttgggacgagttctcaggcgcagtgaaggaggcgcacaagagccgcacggggcaacctacggatagaaaggccatccctggccagcccaaggaagaggactatttctacgctaaccctcaggaatgccttggctctagtatcctgacagctcgtcctgggaacccgttgccaatgaataatggcgcctcgacgactgtagtatag

SEQ ID NO: 221974 - DNA, 1441 bp, Zea Mays
ctttaatggcgcaccaatcaccccgcccgcggccttccttcaatagcgcaccaatcatcccgcccgcggccactaatcaacgccgcatcccgcccgaggccttccttcaatggcgcgtggaaggtcgtctgttattaattggtgcgaccacggacgacaccatggctccgcccgacgcccctctccccgcaactcgcaagcccgatattgtcggcgttctcgcacccaccgatttggcctgcctcccccaggattgccggcgttctcccccctccccgtcgcgccgcgcgatgccagccgtgattcccgcgtccgcccgccccacatctacaaacttgctctgcagatgtcctcccgcccatcgtcatccatcccctgccgccgccacggacgaccttcctcggccgccacaagggggcttctgtaagcgagcgtgcagggggagctataggcgagcgcgcagggggacccgcacacgacgacgcccgcgaggatgctggaggacgtcatcgccgtcgcgctcaacattagggcctccgacgcgctctttttggcctagaaacggaggaggcgatgcggcgccgtctcgcccgtcagccggtggccgcaccaatgagttccacgccgccacgctgcaccttcctcgtcgtcggtgtcctcctcgaacctgcgatcgttttctgcctgacaaagccattgacttgattgatgaagctggatctcgtgttaggctgaggcatgcgcagctccctgatgaagccaaagagctggacaaagagctgcggcagataagcaagcagaaaaataaggctgtacgtggccaagattttgagaagaatctgtagcaaatggctaacgatgaggacatccatcacttgtttatgacaatagaactgatatgttcaagattccgtagcaacgcacgggcacccaactagttctccacatatgggaataacagggcgaccataattcatgacgagtcgtcaatgtccactgcctcagctaaaagaagtttatcaaagatgaacttattgaaaaactattaaaatcaactatgtggcatgaaagattaaattgtatagctacatgttatatggacaagggtatattgaaaaatgtggatctaaacattgtcctcacatattttgcttcaataaatattcgagtgagttatttattttgagagacattagagctatatgtaacctaaagttgcaattaagaatactctgaatttatggtcccttaatatgattgtaattgtctctgcggtcatacgaggcacaagcggagaggatggagacgtgataggtttgcctcttcatctccaagggttaatcggcccaatgcatcaggtcactctctgtctctacgatgtgttgttcgtctctggttgtcattacaaataatatagttttttaaatagttaaacttttag

SEQ ID NO: 221975 - DNA, 1659 bp, Zea Mays
ctttaatggcgcaccaatcaccccgcccgcggccttccttcaatagcgcaccaatcatcccgcccgcggccactaatcaacgccgcatcccgcccgaggccttccttcaatggcgcgtggaaggtcgtctgttattaattggtgcgaccacggacgacaccatggctccgcccgacgcccctctccccgcaactcgcaagcccgatattgtcggcgttctcgcacccaccgatttggcctgcctcccccaggattgccggcgttctcccccctccccgtcgcgccgcgcgatgccagccgtgattcccgcgtccgcccgccccacatctacaaacttgctctgcagatgtcctcccgcccatcgtcatccatcccctgccgccgccacggacgaccttcctcggccgccacaagggggcttctgtaagcgagcgtgcagggggagctataggcgagcgcgcagggggacccgcacacgacgacgcccgcgaggatgctggaggacgtcatcgccgtcgcgctcaacattagggcctccgacgcgctctttttggcctagaaacggaggaggcgatgcggcgccgtctcgcccgtcagccggtggccgcaccaatgagttccacgccgccacgctgcaccttcctcgtcgtcggtgtcctcctcgaacctgtgcactggtgccacaacactggatgggtataggaagcatatagagaaagatcctgccttggaaagaaggtttcaaccagttaaggttccagagcctactgtggatgaaacaatacagatcttaagaggacttcatgagagatatgaacttcatcacaaactgagatacacagatgatgctttaattgctgctgcacaactgtcttatcagtatatcagcgatcgttttctgcctgacaaagccattgacttgattgatgaagctggatctcgtgttaggctgaggcatgcgcagctccctgatgaagccaaagagctggacaaagagctgcggcagataagcaagcagaaaaataaggctgtacgtggccaagattttgagaagaatctgtagcaaatggctaacgatgaggacatccatcacttgtttatgacaatagaactgatatgttcaagattccgtagcaacgcacgggcacccaactagttctccacatatgggaataacagggcgaccataattcatgacgagtcgtcaatgtccactgcctcagctaaaagaagtttatcaaagatgaacttattgaaaaactattaaaatcaactatgtggcatgaaagattaaattgtatagctacatgttatatggacaagggtatattgaaaaatgtggatctaaacattgtcctcacatattttgcttcaataaatattcgagtgagttatttattttgagagacattagagctatatgtaacctaaagttgcaattaagaatactctgaatttatggtcccttaatatgattgtaattgtctctgcggtcatacgaggcacaagcggagaggatggagacgtgataggtttgcctcttcatctccaagggttaatcggcccaatgcatcaggtcactctctgtctctacgatgtgttgttcgtctctggttgtcattacaaataatatagttttttaaatagttaaacttttag

SEQ ID NO: 221976 - DNA, 2973 bp, Zea Mays
atgacccaaacaactctttcactagcagtagctgaagagataatggatcataattggactcaagcatcggcacctgcaacattcaggtacgagcacagctgtgacatgaacagcagcaaatggtgcacaaccgtgctagttcaaggcagtttgtctctaaaagcacttctggtgcacaatagacgccccgtctcatcatactcgcccttggtgatatgctggttttcagggaaaacgaccttggccaatatcgcaccacccaaccaggccgagtaccttgctaggttctcggacatgtattcaggggggctggaagaaacattgctcaagttagtaatagccagggaagtgaggaggggattgactaggagcagcaatgagggtaccttcacaagtgatggaaagattgctgaagcagacagatttgcttctctctggaacctgtcctcaaagccttgaggaagaaaaaaagtgagataaaccttagtgattaaatgagtctaagcaaaactacaagagtttagattaaatatgcataaagatccacaagttgtatacacaactgtccaagagagccaattgaacatgcaaagctgtaaccatggcatgaaatgtagctgttgcctgttgctattgctacctaattcttacttaaccaacatacttcccacttccagttgtgctattgctacctaattcttacttaaccaacatacttcccacttccagttgtgctattgctacctaattcttacttaaccaacatactttccacctccagttgtgctattgctacccatattcactacaatgtttgactacttatccaaaggacaagtatcaaatgaaacttcaaagttctaacagaacatcaaagctggcactctttattattagggaacataacaacagagaatgtcccggactagtggtgcataggttggcatccatacaatcagttcataccgaaggcagattttcatcttgaatgaagctgcgttcaactagaaaacatatgttaaatccacaaaagtttaaaacaaaatgatattacttaccctatacagctaattgatatgcatttgacctatagctaaaaaaactcggccggtagggaaagaccgccctcccgatattaaattaagaagagaccgaatcatggtttcgactgataaaatccattctgcccactctacaacggcccagcgggagggtggcgcgcaggacataacccaagaacgggtgggacacagcgaggggatttttttaaccaagcccgaagttagggatcgaaccaggacctggagatgctactcggaagccttaaccattacgttagaggccctttcgctatttgacctatgactcacaaggttgaataaagcaaaggtgcacatcaaaaacaaaaggcaactaaccagtcattgatgtggtgccaccacataacatggtattttcaagcagctgacgatggtactctgatgaaacatttgaggcgctagtaactagctggtgaacgataccataatcttccaagcccaatatatgtggttgaaataaagcttcaccaacaatgtacctctctttctcaattgttatgacctggagaaagaagcggaagtgcctttctggttggcaagagctttctatagccttcaaaagccaactgatcttctgtgcaacatgcatactgctctttcagcctctcaacatcagaaacatcaaggtttactgatggattagtttttcagttcgtgtgaaaagaggtttgtcaagtcaactaccccaatctctaatctcttagaagctgtgttgaacagctgcttcacaaactggagcaatatctggtaaaatagaagcaaatgtcactctccaacatcaaccttgcttgctgaccactaattagtgaagtaaaacaagcactggatggccataactgaaccaaaatgtaggcaaagtctactttagttaaagctagccgatcaaaagatttggtatgccacgtgtattttgcaaagtagtcaactatgccacactaaacaaatcacccaaaaatgaggaagaactttgaaatcctaaagaaacaacaatcacaagataaatgcaagtacaaacagttttaaaccacaagcatgcagtcacattcccgtaaatgaaccaataccttaagaaatactatgatgcataccctaggagcaaccggcacctaaaaaactcaacctgtgggggtatgatagcccccaggcatagcatgatagagaagacctcatgcaggtcgaggaaacctctgatcctacaccccactcatacaaattggcactgcagcctatgtaagcaacctgggtcaggtcttagacctatgttttggtatggaagagacaaggagatttttttaaacccaggctaaggaccttgctaataaagccactaagctggcacctagaaaatccaaaaaaaactcgagctacaggaggtaagacagccctggaatttgtattaagatgttattctcgcccaagtcgagaaaacccccgaacccctaccccacccatgcacagtggcaccgtagccaatgtgagaacgaccacaatagggctgggccttaagcccttaagcctgtgctttggcatgggacagacgagaggattttttatcccaacctaaaattcactccaacgggaagtcgaactcaagaccagaggagtgctagaggctctttcgtggcacctaagaaatcaagattttaaaagaagatgtgaagtaggtgtaatcattatgcactatttcttcaggtatattactattatcttttggttattttgttagacgtgaagcttcataatataatgtgctccctttggtaagggaagagtgttgttcctggcatccaattattattcaaatgcaactatggcattttatttatgttatatttatgaaaggatttataatatgaaagtatttttttcaaaa

SEQ ID NO: 221977 - DNA, 1375 bp, Zea Mays
ccccaagcccctcctcgcctcctcggccacgcatggggaacgcgcggcgccccgccgctgactcggcggcggcgtcggaccgggaggtcggatttgcgaagctacatggcgagtgcttcgagtactacatgcagacctactccatcgttctaggtcgccatagccgccgtcgcagcaagggccccgtcgccgccccgccggaggccgacgacggcgtcgacgtggacctcggcgccctcggagcaggcatgaacgtctcccgccgccacgcgcgcattttctacgacttcctgcgccgccgtttcgcgcttgaggtgcttggtaagaacggctgcctcgtcgagggcgtgcaccacgtccccgggtccgcccccgtcaagctcgactcccaggacctcctccagatgggggacaccaagttctacttcctcctcccctcccgctccgtcttcgacgccggcatcacgcgccggtcatccgccgttcagcgcgcgatcccgccgcctccgtctgatgatgacgaggatgaggatgaacatgaagaggccgtggcagcggcgaagcgtcggagggacggttataacggatcaaaatcttacagggaagcagatgatcaactattgcttcagttggaagagaaagatgtcatctcatctgctgctactatcttgtctgatctctgtggacctcaggaatggatttctataaacaagcttcatgaagtgatgtttgataagtacggcggtatgtggcaccacagcagggtgcgaaaatacctgacatccgaagactttgcggaggctgaaactgacggcaggctatggcatggacttgcgttgctgctgagaaagtaccctgagcatttcgtgatcaacattaggaaaggtgggggcttgatcactgagttcgtctctttggtctcgctacagtcttgagaatttctcaaaacacactgcagcaaggcggtggtgttgtatagctccgagtattcttttgctaccttttgtaaaaaaaagagttagggtaaaagggatttgtgcttaagtatttggctattagccaagttataagagtgaggctatacaacagtggtatcttattaatcttgagaagcttttttattaaaaaaaaaagctggattaatccaaccatcaccatactgctactaactgtgagtcatggctacaaacaagcagttttagggcaggatgaactcttcgtcgaatctgtcccccaaatgaacgaatcacgaatatcccttccatcgacaacgaaacgacacgaccagctagacaagcaaaaccatggatccagggcggcgagcgctagctagaggtggcaggtgaggcagttgcaggtgcgcggggtgaaggag

SEQ ID NO: 221978 - DNA, 759 bp, Zea Mays
ccagaatcaaacggtccaaaccccaagcccctcctcgcctcctcggccacgcatggggaacgcgcggcgccccgccgctgactcggcggcggcgtcggaccgggaggtcggatttgcgaagctacatggcgagtgcttcgagtactacatgcagacctactccatcgttctaggtcgccatagccgccgtcgcagcaagggccccgtcgccgccccgccggaggccgacgacggcgtcgacgtggacctcggcgccctcggagcaggcatgaacgtctcccgccgccacgcgcgcattttctacgacttcctgcgccgccgtttcgcgcttgaggtgcttggtaagaacggctgcctcgtcgagggcgtgcaccacgtccccgggtccgcccccgtcaagctcgactcccaggacctcctccagatgggggacaccaagttctacttcctcctcccctcccgctccgtcttcgacgccggcatcacgcgccggtcatccgccgttcagcgcgcgatcccgccgcctccgtctgatgatgacgaggatgaggatgaacatgaagaggccgtggcagcggcgaagcgtcggagggacggttataacggatcaaaatcttacagggaagcagatgatcaactattgcttcagttggaagagaaagatgtcatctcatctgctgctactatcttgtctgatctctgtggacctcaggaatggatttctataaacaagcttcatgaagtgatctttatgttgta

SEQ ID NO: 221979 - DNA, 494 bp, Zea Mays
atgctctacaagtcctccagctacagcttccccatgaagctggacgcccaccaggtggaaccgtcgcagaaggaggacaacgacgactacctgacccacttgctgttcaccgaggacaacgacaaggacgagctggtgaacgtgccggggtctgtcaccgacgtcatgcgcggcgcccctgggatatatatatttgaatgtcgtggccctagtcccatggattcgataagacggaagcatcgcgtcgccgccggtgttgagcaggagagcagcctagtgatcgaggggcggagcgatgatcaccgggaccatagggggttgtgcgtagctttctggagcacagggtcgatcgtgaagccagagatttctcgccgaaggcgagcacagccacatagccatgacttctcgcgggcagaaggggttccacactgcaaaactttagcgaggtcacgtgacatctaaagagcaagttggtacctggaatctcaagtccc

SEQ ID NO: 221980 - DNA, 1605 bp, Zea Mays
gctaataccacgacccatcttatcgaagttattcaattaatctgcaaaattagtttcaaatgctgaaagtgttatccccagaggaagcaaaaagctcaagcagcacgcagcacaataataatgttccaaaagacacatccatgcttaaaataaccaaaagaagttccactggtgctcttttatttgtagctacaaacactttaccgtagagctgttctgttgtcagcatctagtgtgactcgatttcctaagggcgtccccaacacacctagctgtcctgctgccccaatttccatgtcagcacaccaaacggtagtgttgcagggtgtaagaaggacctgcagaagcagcataggcctcaactgacagaaggccgaagcaccagccagggctcgcgtcgtgggaccacgtcaagaagagaacaacagcaaaccaaggagatggtggacatggagcagcaactaacagcaaatcagtctccatccatggcttccggccaacgatgccagcaaatcgtacatgtcggcaacgataaccacaagaatttggaagaaagggctagagcagttcgtcgactcaacaaggtcaatcccagcgaggtgcgcaggtgtcggtggggcagatttgactggaatttggtggggattggtgctgatctaaagcttgcaagagcatgggaagctgcaactgcaatggggaaagcaatatgtatggtgggaccaagaaaaaaggtactggccgggccgtgctcgcgttgtatatggagtcgagagcagcctatctgtccgcgtcgcgagtccagtggtgtcaaacgagtgtcctcatctatctaagtggagaatgaactcaaattgaggctaaaaacgctgttagcttgcattgctcgtgaccaaagctaagaggcacgtctgcaataacataatacacatacaatgattgcatatgggtaggcacatattttaagcaatgtcgttgaaccacctacagggaataataaactagtgccacacaagctttgttcaattattggttaagagagaagtgctgcgcagctaaagaaactggtcgggtcctattgatgtatccacctcaactccctcctgatgggtaggtaagtcactgatagctgcagcaaacaacaaatgatgacctatagaatttcccatctatagtgacacacgcaaggccaattgggcaacggcactgttccaacatgaattccattcgccgtgacaccgacaagagaaaaccttacacacaaaaagcaactcaatatgcggtgtactacacaaattcagaaacagattcagcgaatctctgagcctaatcccgaatccacgacaggtttgggatctgaatccgcgtactgcgagcccagatcacagcgtctaggcagaggcgatgctccaaggccgacacattccgtagacctcgagcaacacattcaggcgaagatcctacccccattcccccgatccacaacagcgagaacccgcgcactgtgccgcagcaccaggcaggccgtcctagttagacacggaactgctggactccgcgcctagaaattcgaaataaatttctaccggatcgcgcgaatggcgcggg

SEQ ID NO: 221981 - DNA, 3994 bp, Zea Mays
agccgccacccccgcccgtatccgccgccaccttcgcgtcctcctcctccgccgtgccttgctgccgtgcctgcgtcccggcgagccgctcagccgcggagcgtcgacctcgccgtatgcagagaccgaggcgctgccggcctgccgcgcctagcccgcgagcagcgagccaccgttcgccgaggcaccgacgtcgaggggagggagctgggagcgcttgcgccgttctcgagccgctgcgccctgaccagctgccgcacaggcgccgccgcagggagactgcggtcaacaagttaggaagctgcagcgctgctcggacgcgtcttcccagcagcaaagataagggacatcaggcagaacggatgggttcggggtcttcaaagtcagagtttgaggactttcatgccaatgcggttgaagaggctgtgaaaaacctagctccttatttggaggacacaagggtgcgaaaccaggccatttactttgatggatgggatggacttggtgcatctgctgtccttaactcgatcgctgaacgccctccgccatctctgaggaacaaatttgatgatattattctacacattgactgttcaaggtggaaaagccggagagcactgcagaggacaattgcacagaaactagggcttcctcaacatgtcatggctgtttttgatagacaagacgaagaggacgatctagttggagtacatgaaggctcaagaactgagataagagacatcgggagagagatatatcgagtcctacaaagacagagcttcttagtggtcttccataacgggagtgataccatggttgacttcaatgactttggcatccctcgagctgctgcagatccttggtcaaacattatccggaaggtattgtggaccttccgtggaaggcttcatgccatcaaagaaacggaggaagtttcaggtcatctcaaacctgataaacgacaaccaaagggaactgagaccgtggacacttcatatctttgctttcgttcgttattttctggaggcccatcagatgtatcttcgtacaggcttcaaatactgtgtgaggaagctgcagcaatagctcaatacacgaataatcctatagtcactcaggaaatagctgaaatatgctgcaggtatttgttatcattgaattccaaggggaatggcaagctagatttcaactggagtgctcatgcctccaactattgggtttgtgatgggattctaaacgaatgccaaccagagcaagcatgggagattgccgcttctctgcacaaagagttacgactggagggctactcatctgctcgtaagttctgtcatcctggtgctgacacaacatcctgggttgtaaccatcaaatctagtgaagatattgtaccaactgtgaagccagagacaacgtctttctttttggcagtcaaaagaaaacatggccattcggttttgccattacccatgaaaatgttccaaagatccgagcaacttcatgttttgaagctctaccactgcagcttcagctttgcttcacctccattcctttgttgcctaaacctaagatttcttggacttgatagctgcacggatcatcaatcaatgaaaccgaaagaaaacaaagaagaggagtcggaggaggcaggggcagagggggaggaggagaatacagcaacaatcgaattctttcaaagcctatgggtgcttgacatatgttgcactgattgggaattgactttatccccaaatacaatagtgaaaatggcaacaaacattagggagataaacataaagaggggaagaatctggcacagcagtatttcatggagatttcttggtaacattcacaagcttcgagtgattgagcctacaagtccttgggagacaagtaataaggatgaatttatggacatggtgaagctggagcttcttgacctgtcagggaataccacaatacaatttttgccaagcttgtcaggtgcaatcagcctcagaacccttattctagatggttgtattgaattgcaacatgttgtgcctgaaacactccctccatggcttgaaacatttagctttgatggaggatataaacaagctaaaatctcatgtatctccttggctggttgtgcaagactggtcaacttcagattgtgtgggtcagtacagaaccttgaggagctggacctctcaaacacatcaatcaaaacacttgacctcagtgataaagtggtgcaggtcccatgcctagagcgcatcatcttgctgggatgtgagcggcttcgtgctgtcctgtggccaaaggatggaatgcccaatctaatggtgctaggcattgacactcggggaggcgcagaagcagctagtgcaaaaacagtacatgataactttgccatcagtaaagaacgagaagaaggttgtcgtgcatttgttgctgttatggaaatgaggttccttcagtcgttggtgctagcaagttccaataaactttgctgggacactgaccgtaagtatgatcttaacatctgcttgtcttcctctaggagtagcagcaaaggtgttggacaacacagctacaaggaggagacgatgggccctctgcagaagtcgatgatcacctccaagacttacctgacctacagcgatgtgaatattgacaaggcaggtagtgtgaggcagtttcagccactgcaccgtcatgtagagattggtgagggaataagcaactctagcatggtaaccgttcgtgaaatcagcgctgcgatccttttgataaatagggtctactcattgctcgtgcatgacaattcatccatcaggactgttatccctgaaaacataatgtctatagacacgaagaaggtctattggtcttgtctcaggtggtgctgtgtcgagagatgccccagtttggacagtgtcttcgccactaactacgatgccgtctgctttaatgctctagagaccttctgggcagctgatctcttggtggcccgatgtatctggagtaaaggaagaacaactaatgtgaaggacaccgaatccttcgctaaactgcaggctatacatctccactcctgtcctaggctggcatttgtcctcccactatcgtggttctacaccctgtccagccttgagacccttcacatcgtctattgtgataaccttggtcaggttttccccgtagaggcagagttcttaaacgaaatatctactggccatccaggaggtttgttggaattcccaaagctgaagcacatctggctacaggagctacccaagctgcagcagatatgtgaagccaagatgtttgctccggagctcaggaccatcaccttaagaggatgctggagccttaagcgcctccccgctaccgccgaccgcccaggtgatcgccctgtcgtggactgcgagaagaatttgtgggcgaagctggagtgggacgggaaggaggctggccaccacccttgtctcttcgagccacgccactccaagtaccacaagaagagagttcttagaaccacgcttctccgatgagccaaactgaccctggtaggtaagaataaatatatagcttcctgttgttttttccgtttcacgttggattgtgtatcatatgcaataccataatccataatctactgtactgccgccatggaacatcttttagctatcctgcatgctgttagagatggaactaagaacaaatacttatacacacattgttagatgtgttgtgatcggcttatggtcttcctgagctgcacaagtttgtattttccttttgtttatctcgttagttaatcatttacattatcaattatgtaagtttaatttggtgctgtgctggattgaaggcgacatatctcccagctgcttcctacggtacagtgccgactgcccgagcactcttcctttgtttttgccaaatctttgctatttttttcttacggataaatttgcgaccaggggtggtaatggatcgtgatccaaat

SEQ ID NO: 221982 - DNA, 802 bp, Zea Mays
ccgcctgccattgccagcgtgctccctctgccccagaaaccgcgtcgcccccagggtgcccttccatccatggcgtcgccgcggccgcccccgcgatcaactcccagatcccgtgctcacctccccgcaatcaaggttgtcacgcccgacgaggatggctgccagtcaccgcacggccggtccgggccccagcgacggctccagcgcaggcgcgaggaagaagctccaactcaccaatgagcagtcgacgctgctcgaggacaccttccgcgcccacaacatactctccaacgcgcagaagcaggagctcgcacggcaggtggatctcagcgccaggcaggaaacaaccacaatcgaattgttgcaagtgcgtcccacgatctgaagacaaaaagatctgttgtccattagcaacaaagtgctacagaggctgtgttctgtgtaccagtacttgataattctgcacccttctgatcagttcagaagagaacatggagaaccatgcacttgtggagttgttcatctggaaagtgacaccattattgaatatgattggtaagaataataaattctacatgattgcactggctctcaagttcagggcttcctgcaacgaataatcttaaagtagtttgctataatctatgttttcatataagatatgtttacagatatatgtttttaaacaatacgaataaattgttatttgctactacagagtttttagaccatgtaaaatttaagctaccagtgcctgtctcagtatatcttttaatgtgaacttacgattgcatgaactgtc

SEQ ID NO: 221983 - DNA, 1007 bp, Zea Mays
ccagcgtgctccctctgccccagaaaccgcgtcgcccccagggtgcccttccatccatggcgtcgccgcggccgcccccgcgatcaactcccagatcccgtgctcacctccccgcaatcaaggttgtcacgcccgacgaggatggctgccagtcaccgcacggccggtccgggccccagcgacggctccagcgcaggcgcgaggaagaagctccaactcaccaatgagcagtcgacgctgctcgaggacaccttccgcgcccacaacatactctccaacgcgcagaagcaggagctcgcacggcaggtggatctcagcgccaggaaacaaccacaatcgaattgttgcaagtgcgtcccacgatctgaagacaaaaagatctgttgtccattagcaacaaagtgctacagaggctgtgttctgtgtaccagtacttgatagtgagtttcagaatgaacctataactatttccaacatcgacaagaaggatggtgaaaattttcatgatatgtataaatgtcttggcaaggctgtttcgtgtcctctgttaccttatgagcatcgtcatctgaatacacagagaacggaatctgcagaaaaattgaaagtctgcatgcttcctgatcatcaaactgcaaataaattgacaaaaaagagtaatgattctgcacccttctgatcagttcagaagagaacatggagaaccatgcacttgtggagttgttcatctggaaagtgacaccattattgaatatgattggtaagaataataaattctacatgattgcactggctctcaagttcagggcttcctgcaacgaataatcttaaagtagtttgctataatctatgttttcatataagatatgtttacagatatatgtttttaaacaatacgaataaattgttatttgctactacagagtttttagaccatgtaaaatttaagctaccagtgcctgtctcagtatatcttttaatgtgaacttacgattgcatgaactgtc

SEQ ID NO: 221984 - DNA, 1439 bp, Zea Mays
ccagcgtgctccctctgccccagaaaccgcgtcgcccccagggtgcccttccatccatggcgtcgccgcggccgcccccgcgatcaactcccagatcccgtgctcacctccccgcaatcaaggttgtcacgcccgacgaggatggctgccagtcaccgcacggccggtccgggccccagcgacggctccagcgcaggcgcgaggaagaagctccaactcaccaatgagcagtcgacgctgctcgaggacaccttccgcgcccacaacatactctccaacgcgcagaagcaggagctcgcacggcaggtggatctcagcgccaggaaacaaccacaatcgaattgttgcaagtgcgtcccacgatctgaagacaaaaagatctgttgtccattagcaacaaagtgctacagaggctgtgttctgtgtaccagtacttgatagtgagtttcagaatgaacctataactatttccaacatcgacaagaaggatggtgaaaattttcatgatatgtataaatgtcttggcaaggctgtttcgtgtcctctgttaccttatgagcatcgtcatctgaatacacagagaacggaatctgcagaaaaattgaaagtctgcatgcttcctgatcatcaaactgcaaataaattgacaaaaaagagtaatggtgagctgctgacatttggaccaaagtcaaaggaaatgtatacaggttcttgtaaccaaagaaggtcttatttctttgaaaagttaatgattccttccaaatcacaaagtgtacatcctaaaaattctgtgtcttcagtaaaatctagcgactttggagtttgtatgtatggcaccaatatcagcagtcagttattcagagcacagaatcaatcttcagctaagactgaaacattgcacagcgattcactagtataaacacgctcttagctggtactctattgtagagatgctagacctcacctgctggtgtcaattttcagttggttgtgaactataagctttgcgtcctgcggtttgtctacattacttccgaggcagtgatgatgatttattaatcactgaggcctggttcgcccttttgttttgcaagattctgcacccttctgatcagttcagaagagaacatggagaaccatgcacttgtggagttgttcatctggaaagtgacaccattattgaatatgattggtaagaataataaattctacatgattgcactggctctcaagttcagggcttcctgcaacgaataatcttaaagtagtttgctataatctatgttttcatataagatatgtttacagatatatgtttttaaacaatacgaataaattgttatttgctactacagagtttttagaccatgtaaaatttaagctaccagtgcctgtctcagtatatcttttaatgtgaacttacgattgcatgaactgtc

SEQ ID NO: 221985 - DNA, 1316 bp, Zea Mays
gtttgttttgctgggagcctaggtctgcctgactgccccctactagtgctgtgcgaatagccgcttgtcgactatcgtcgtcccgactgccgtcgcccttcggccatcgcctagggcccaggcacccagctgcgagccactggccgcccggcgcggcgatgccccgttccggggccccgccgatcgccgtgggcccttggcggcttggcgccctctgctgctccatcgtgtggcttgtgcagcactgtagtagagccacgctggcggttgccgccgtgcagttagcgcctgtcgcggtgtcaccccgtccgccatcaaggtcgaggctcatcccaggaggcagccgtccgccgatttgtgaagttgaagttgagatttgaaaatgaagaggaagatcaatgctaccactgatttgagagcttttttagcaagagctgctgcaaaaaagaaagatagtgctgctccatcttctaatgaaagagagatgcaattggtgatattccaaggacagactgaaactaataatgcaacgcccgcagaacgagagagttgagcctgaacctccaataatagaagatgttgaagacaatgatgattttgaatcagtgcacttgaatgggacaacatcgagtgaggataatgatagtgatgataatgatatttatggcattgagcatgatcctggattcaggactccattctcaagctattttattaataaccaagatgcggttagaagggcttatattgcattggggccatgtcaaccaaatataaagaaggatgattttccccaacatgaatgtggaggcataagtcgcttcctaccaaagtggttttccgagtttaattggcttgagtatagtatggataaagatgttgtattgttttgtttgctatctgttcaaagataacaacaaattctctggtggagatgctttcgttaatgaaggtttagaaattggaatgttaaagctagattgcttaagcatgttggtgttgttgatagtgctcattgtgaagctgaggagaaatataatttatttttgacacctaaagcatcaatttgtgagtcagttgcctcaaatacttcattgtataaggatcaatacctagctcgtttgacaggcaattcttcttgcaagtcaaggatgaggacattatcactcaatttcaaagcttaaaggatcgaaaggttgtcttgcaatatatctaccaaatcccacgaagatgccgcgacgaacaacaaccacgctaattgcaggaactggaccacacacaccaagcgcagttcctcaacggatgttggaacagag

SEQ ID NO: 221986 - DNA, 733 bp, Zea Mays
gtttgttttgctgggagcctaggtctgcctgactgccccctactagtgctgtgcgaatagccgcttgtcgactatcgtcgtcccgactgccgtcgcccttcggccatcgcctagggcccaggcacccagctgcgagccactggccgcccggcgcggcgatgccccgttccggggccccgccgatcgccgtgggcccttggcggcttggcgccctctgctgctccatcgtgtggcttgtgcagcactgtagtagagccacgctggcggttgccgccgtgcagttagcgcctgtcgcggtgtcaccccgtccgccatcaaggtcgaggctcatcccaggaggcagccgtccgccgatttgtgaagttgaagttgagatttgaaaatgaagaggaagatcaatgctaccactgatttgagagcttttttagcaagagctgctgcaaaaaagaaagatagtgctgctccatcttctaatgaaagagagatgcaattggtgatattccaaggacagactgaaactaataatgcaacgcccgcagaacgagagagttgagcctgaacctccaataatagaagatgttgaagacaatgatgattttgaatcagtgcacttgaatgggacaacatcgagcaattcttcttgcaagtcaaggatgaggacattatcactcaatttcaaagcttaaaggatcgaaaggttgtcttgcaatatgtaagcttccttatactattt

SEQ ID NO: 221987 - DNA, 1431 bp, Zea Mays
gatctcccgcgctgcgactgcgtgccgtggagcatggcagaaagcaaaggaagaatgtctcccggccacgcatgtggtttggcgcgcaaggcgacgcgggaataaacaaaacaagcgtgagtggaggcaatggatatgccactcctcaacgcgtacctggattctctaggcacgccaagctttcggaccggcgttaattttgctcaagctggatgttcgatcacaccagcaaagccgacatcagtcagcccattctcatttggtctccagatcaagcagttcttcgccttcaagaacaaagtcactaagctcctgtctgaaggagatatgcacagccgatacattcctcagcaagattacttctcagagggactctacacgttcgatattgggcagaatgaccttgctggtgagttctattcaagaacagaggaccaggtcatcgcatccattccaactattttgctggaatttgagaatggtctcaagaaactgtatgaccaaggtgctaggaagttctggattcacaacacgggccccctcggttgcttgcctcaaaacattgccctcttcggcaaagacccatcccaactggacgagctccactgtgtggcgaagcacaaccgtgccgcaaagcttttcaacttacagctgcacgcactttgcacgaagctgagggcagaattcgatggagccagcatcacttacgtggacatccacacgatcaaatacagcctgatcgccaactactctcgatacgggttcgagcacgccactcaggcgtgctgtggatacggaggcccacccctgaactacgatggtaacgtaccatgtggacacacggtgtctctggatggtaagatggtcaccgcaaaagggtgcagcgacactactgaattcgtcaactgggatgggatacattacacggaagctgcgaatttccatatcgcctcgcagatcctgaccgggaagtattctgatcctccgttcgtggataagatgccgttcgtcataaaacctagattctgattggcatacaattttccctctttactcacccactttacagcaccggttgcagatacgatgtatacttattacttgccaataaccatatatagcttgagtaaaaaaatcatatatacggcttggtttcagttgtccaaaaggttcagcttttttttttctaacggtcttttctaagaatctgattatgtagagaatttggttgtaagtgagtatataggatttagaatctgaaagtaaagtgtggatttctcttattgcggcaactcaattggttgtgggttcacattgattttaaacattttcaccaaatcgatttttatataaaatggctgaaaagttggacgtttgacagcctgtggtagcttatggtggctaaaatcagtaaaaaaaagatgaaacaaa

SEQ ID NO: 221988 - DNA, 1990 bp, Zea Mays
caacaatgtctaaaatcgagattggtttcatacgcctgtactataaaaattgttttttctttcaacttctataacagtttccctacgtacccctgccgatcgatctctgtagttacctccgagccatttaccaacccatactcagaatatcttaacaccataaggtccaaagctcaaaagttaccaacaaaaggaggcacccattttaatcattaatggcctccccctccgacaccccagactcaaatcaaatctgccttgtctctgctgccccagccccaactctgctccaaagcttcaagcatcagcaaccccctccaccacctcttcctcctcggtcctcacctggagttgtagcaagcagcaccacatcatatcacagcagagcagagagtggggtgaagcagggagctgggcaggagagccccaacggcctgtcctgccgcggccatgcgtttctctgcgctgctcctcatcgtggcgctgctctgcctcggcggcggcggtggcggccgcgtgacggcgtccaccgaattcaacttcccggcggtgttcaacttcggggactccaactccgacaccggcgggcgcgtggccgccggcttcgagtccatcttcccgccctacggctccagcttcttcggcgggcccgccggccgcttctgcgacggccgcctcgtcatcgacttcctcatggaggcaatggatatgccactcctcaacgcgtacctggattctctaggcacgccaagctttcggaccggcgttaattttgctcaagctggatgttcgatcacaccagcaaagccgacatcagtcagcccattctcatttggtctccagatcaagcagttcttcgccttcaagaacaaagtcactaagctcctgtctgaaggagatatgcacagccgatacattcctcagcaagattacttctcagagggactctacacgttcgatattgggcagaatgaccttgctgagcttcctatgcctctttccccaaagctgactaattggtgtacagggatcctactctgatgtaaataaactgtatgaccaaggtgctaggaagttctggattcacaacacgggccccctcggttgcttgcctcaaaacattgccctcttcggcaaagacccatcccaactggacgagctccactgtgtggcgaagcacaaccgtgccgcaaagcttttcaacttacagctgcacgcactttgcacgaagctgagggcagaattcgatggagccagcatcacttacgtggacatccacacgatcaaatacagcctgatcgccaactactctcgatacgggttcgagcacgccactcaggcgtgctgtggatacggaggcccacccctgaactacgatggtaacgtaccatgtggacacacggtgtctctggatggtaagatggtcaccgcaaaagggtgcagcgacactactgaattcgtcaactgggatgggatacattacacggaagctgcgaatttccatatcgcctcgcagatcctgaccgggaagtattctgatcctccgttcgtggataagatgccgttcgtcataaaacctagattctgattggcatacaattttccctctttactcacccactttacagcaccggttgcagatacgatgtatacttattacttgccaataaccatatatagcttgagtaaaaaaatcatatatacggcttggtttcagttgtccaaaaggttcagcttttttttttctaacggtcttttctaagaatctgattatgtagagaatttggttgtaagtgagtatataggatttagaatctgaaagtaaagtgtggatttctcttattgcggcaactcaattggttgtgggttcacattgattttaaacattttcaccaaatcgatttttatataaaatggctgaaaagttggacgtttgacagcctgtggtagcttatggtggctaaaatcagtaaaaaaaagatgaaacaaa

SEQ ID NO: 221989 - DNA, 531 bp, Zea Mays
caaagctcaaaagttaccaacaaaaggaggcacccattttaatcattaatggcctccccctccgacaccccagactcaaatcaaatctgccttgtctctgctgccccagccccaactctgctccaaagcttcaagcatcagcaaccccctccaccacctcttcctcctcggtcctcacctggagttgtagcaagcagcaccacatcatatcacagcagagcagagagtggggtgaagcagggagctgggcaggagagccccaacggcctgtcctgccgcggccatgcgtttctctgcgctgctcctcatcgtggcgctgctctgcctcggcggcggcggtggcggccgcgtgacggcgtccaccgaattcaacttcccggcggtgttcaacttcggggactccaactccgacaccggcgggcgcgtggccgccggcttcgagtccatcttcccgccctacggctccagcttcttcggcgggcccgccggccgcttctgcgacggccgcctcgtcatcgacttcctcaggag

SEQ ID NO: 221990 - DNA, 1180 bp, Zea Mays
cctccccctccgacaccccagactcaaatcaaatctgccttgtctctgctgccccagccccaactctgctccaaagcttcaagcatcagcaaccccctccaccacctcttcctcctcggtcctcacctggagttgtagcaagcagcaccacatcatatcacagcagagcagagagtggggtgaagcagggagctgggcaggagagccccaacggcctgtcctgccgcggccatgcgtttctctgcgctgctcctcatcgtggcgctgctctgcctcggcggcggcggtggcggccgcgtgacggcgtccaccgaattcaacttcccggcggtgttcaacttcggggactccaactccgacaccggcgggcgcgtggccgccggcttcgagtccatcttcccgccctacggctccagcttcttcggcgggcccgccggccgcttctgcgacggccgcctcgtcatcgacttcctcatggaggcaatggatatgccactcctcaacgcgtacctggattctctaggcacgccaagctttcggaccggcgttaattttgctcaagctggatgttcgatcacaccagcaaagccgacatcagtcagcccattctcatttggtctccagatcaagcagttcttcgccttcaagaacaaagtcactaagctcctgtctgaaggagatatgcacagccgatacattcctcagcaagattacttctcagagggactctacacgttcgatattgggcagaatgaccttgctggtgagttctattcaagaacagaggaccaggtcatcgcatccattccaactattttgctggaatttgagaatggtctcaagaaactgtatgaccaaggtgctaggaagttctggattcacaacacgggccccctcggttgcttgcctcaaaacattgccctcttcggcaaagacccatcccaactggacgagctccactgtgtggcgaagcacaaccgtgccgcaaagcttttcaacttacagctgcacgcactttgcacgaagctgagggcagaattcgatggagccagcatcacttacgtggacatccacacgatcaaatacagcctgatcgccaactactctcgatacgcgcattataatgaagcagcactatcaatccagaacaagtgcttgcaataataaacatgaaccccca

SEQ ID NO: 221991 - DNA, 1374 bp, Zea Mays
ctgcaattagcgtggttgttgttcgtcgcggcatcttcgtgggatttggtagatctgcaagaaatggaggcaatggatatgccactcctcaacgcgtacctggattctctaggcacgccaagctttcggaccggcgttaattttgctcaagctggatgttcgatcacaccagcaaagccgacatcagtcagcccattctcatttggtctccagatcaagcagttcttcgccttcaagaacaaagtcactaagctcctgtctgaaggagatatgcacagccgatacattcctcagcaagattacttctcagagggactctacacgttcgatattgggcagaatgaccttgctggtgagttctattcaagaacagaggaccaggtcatcgcatccattccaactattttgctggaatttgagaatggtctcaagaaactgtatgaccaaggtgctaggaagttctggattcacaacacgggccccctcggttgcttgcctcaaaacattgccctcttcggcaaagacccatcccaactggacgagctccactgtgtggcgaagcacaaccgtgccgcaaagcttttcaacttacagctgcacgcactttgcacgaagctgagggcagaattcgatggagccagcatcacttacgtggacatccacacgatcaaatacagcctgatcgccaactactctcgatacgggttcgagcacgccactcaggcgtgctgtggatacggaggcccacccctgaactacgatggtaacgtaccatgtggacacacggtgtctctggatggtaagatggtcaccgcaaaagggtgcagcgacactactgaattcgtcaactgggatgggatacattacacggaagctgcgaatttccatatcgcctcgcagatcctgaccgggaagtattctgatcctccgttcgtggataagatgccgttcgtcataaaacctagattctgattggcatacaattttccctctttactcacccactttacagcaccggttgcagatacgatgtatacttattacttgccaataaccatatatagcttgagtaaaaaaatcatatatacggcttggtttcagttgtccaaaaggttcagcttttttttttctaacggtcttttctaagaatctgattatgtagagaatttggttgtaagtgagtatataggatttagaatctgaaagtaaagtgtggatttctcttattgcggcaactcaattggttgtgggttcacattgattttaaacattttcaccaaatcgatttttatataaaatggctgaaaagttggacgtttgacagcctgtggtagcttatggtggctaaaatcagtaaaaaaaagatgaaacaaa

SEQ ID NO: 221992 - DNA, 1446 bp, Zea Mays
gctgcttttcaatggagttctttagcaatcagtgagatttggtttgccataggccgccttcttttcctgggtctactgattgagccctcccagtcccatgtgcttgccattaagcaacttgacaatcaatgaaaagtggaggcaatggatatgccactcctcaacgcgtacctggattctctaggcacgccaagctttcggaccggcgttaattttgctcaagctggatgttcgatcacaccagcaaagccgacatcagtcagcccattctcatttggtctccagatcaagcagttcttcgccttcaagaacaaagtcactaagctcctgtctgaaggagatatgcacagccgatacattcctcagcaagattacttctcagagggactctacacgttcgatattgggcagaatgaccttgctggtgagttctattcaagaacagaggaccaggtcatcgcatccattccaactattttgctggaatttgagaatggtctcaagaaactgtatgaccaaggtgctaggaagttctggattcacaacacgggccccctcggttgcttgcctcaaaacattgccctcttcggcaaagacccatcccaactggacgagctccactgtgtggcgaagcacaaccgtgccgcaaagcttttcaacttacagctgcacgcactttgcacgaagctgagggcagaattcgatggagccagcatcacttacgtggacatccacacgatcaaatacagcctgatcgccaactactctcgatacgggttcgagcacgccactcaggcgtgctgtggatacggaggcccacccctgaactacgatggtaacgtaccatgtggacacacggtgtctctggatggtaagatggtcaccgcaaaagggtgcagcgacactactgaattcgtcaactgggatgggatacattacacggaagctgcgaatttccatatcgcctcgcagatcctgaccgggaagtattctgatcctccgttcgtggataagatgccgttcgtcataaaacctagattctgattggcatacaattttccctctttactcacccactttacagcaccggttgcagatacgatgtatacttattacttgccaataaccatatatagcttgagtaaaaaaatcatatatacggcttggtttcagttgtccaaaaggttcagcttttttttttctaacggtcttttctaagaatctgattatgtagagaatttggttgtaagtgagtatataggatttagaatctgaaagtaaagtgtggatttctcttattgcggcaactcaattggttgtgggttcacattgattttaaacattttcaccaaatcgatttttatataaaatggctgaaaagttggacgtttgacagcctgtggtagcttatggtggctaaaatcagtaaaaaaaagatgaaacaaa

SEQ ID NO: 221993 - DNA, 321 bp, Zea Mays
cttgacaatcaatgaaaagtggaggcaatggatatgccactcctcaacgcgtacctggattctctaggcacgccaagctttcggaccggcgttaattttgctcaagctggatgttcgatcacaccagcaaagccgacatcagtcagcccattctcatttggtctccagatcaagcagttcttcgccttcaagaacaaagtcactaagctcctgtctgaaggagatatgcacagccgatacattcctcagcaagattacttctcagagggactctacacgttcgatattgggcagaatgaccttgctgagcttcctatgcct

SEQ ID NO: 221994 - DNA, 1950 bp, Zea Mays
atggacgatccctcctccgcctccaacaagcacaagcgcaagcgggggcgcaagcccaaggcgtcgccgcccttccccgaccgctcctccccctctccctcggccgcccccgctccggctgggcgtcgtggccgcaagccgcgacgtcacgaggcccccgccgacgcggacgccacgcgtccgccgtccccgccccgccgcggggagccgaagccggtggcaaacggaggcgatgtggtggcagtggcggagtcaggccccgcgagctgggatgaggtggtgagggtagtgccgtgcatggacgctgtggtcaaggtgttctgcgtgcacacggagcccaacttctcgctgccgtggcagcggaagcggcagtacagctccagcagcagcggatttatcatcggcggccgccgtgtcctcaccaatgctcactccgtggagcactatacccaggttaagcttaagaagcgcggctccgacaccaagtaccttgccaccgtcctggccatcggcacagagtgcgacattgatagatgcagctattaattcaggaaattcaggtggcccagcttttaatgataggggaaaatgtgtcggtatagcttttcagtctcttaaacatgaagatgcggagaacataggttatgtgataccgactccagttattacacatttcattgaggactacaaaaaatctggagaatacacaggctttcctatacttggagttgaatggcagaaaatggagaatccagatctccgcaaagcaatgggaatgaaaccagatcaaaagggtgttcgtgttagaagggtggagcccactgctccagaatctggatgcctacgaccatctgatattattcttagtttcgacggtgttgacattgctaatgatggaacagttcctttcaggcatggtgagcgcattggcttcagttatctggtttctcagaaatatactggagagaaagctcttgttaaagttctgcgtgattcaaaagttcatgaatttaaaataaggttagcaactcacaagcggcttgttgcggctcatgtgaagggcaggccaccgtcatattacatagttgctggctttgtttttgcagctatctctgttccatatcttcgatccgagtatggaaaagattatgaatatgatgcacctgtcaagttgttggtgaaacatttacatgcgatggcggaatcacctgatgaacagctagtggtggtatcacaggtgcttgtatcagatatcaatataggttatgaagaaatagtcaatactcaggtacttgctttcaatggccagcctgttaaaaatttaaagaacttggcgaccatggtggaaaattgcaaggatgaatttttgaagtttgatctggagtatgaccaggctgctacccaggacattctgacgacgcactgtataccttctgcaacgtcggatgaccttaaggcctagtgggaggagaagggagcatgacgcagccctgggcctgagccagggccatcaggtgggccaatagtttgggccacaatttcggctgaattgattagcgcagcgtacgatccgtgatgaagaggaaccccaatgtttatctgtttaagttaaatatcttttgaggggttgtggatgtgagagtgctggctggtgtctaaagctccgccattatagaaggtttgagggactgtcactgtcagataacaataaactggagttgttacagacagagtcatcgtgaaaacgatagtgtctagtaagaagctgagtttgttttttctttacatgatttcattacaactacaccaaattattgacggggaaaggaatcataattggtccgtgatttcattacatccttggtgtctcaagcttgttccgcatagtacctgctatttgtcaacgatacttttacttctgcttgtaaagtatttgcatcttgtttctgg

SEQ ID NO: 221995 - DNA, 1932 bp, Zea Mays
atggacgatccctcctccgcctccaacaagcacaagcgcaagcgggggcgcaagcccaaggcgtcgccgcccttccccgaccgctcctccccctctccctcggccgcccccgctccggctgggcgtcgtggccgcaagccgcgacgtcacgaggcccccgccgacgcggacgccacgcgtccgccgtccccgccccgccgcggggagccgaagccggtggcaaacggaggcgatgtggtggcagtggcggagtcaggccccgcgagctgggatgaggtggtgagggtagtgccgtgcatggacgctgtggtcaaggtgttctgcgtgcacacggagcccaacttctcgctgccgtggcagcggaagcggcagtacagctccagcagcagcggatttatcatcggcggccgccgtgtcctcaccaatgctcactccgtggagcactatacccaggttaagcttaagaagcgcggctccgacaccaagtaccttgccaccgtcctggccatcggcacagagtgcgacattgatgcagctattaattcaggaaattcaggtggcccagcttttaatgataggggaaaatgtgtcggtatagcttttcagtctcttaaacatgaagatgcggagaacataggttatgtgataccgactccagttattacacatttcattgaggactacaaaaaatctggagaatacacaggctttcctatacttggagttgaatggcagaaaatggagaatccagatctccgcaaagcaatgggaatgaaaccagatcaaaagggtgttcgtgttagaagggtggagcccactgctccagaatctggatgcctacgaccatctgatattattcttagtttcgacggtgttgacattgctaatgatggaacagttcctttcaggcatggtgagcgcattggcttcagttatctggtttctcagaaatatactggagagaaagctcttgttaaagttctgcgtgattcaaaagttcatgaatttaaaataagctatctctgttccatatcttcgatccgagtatggaaaagattatgaatatgatgcacctgtcaagttgttggtgaaacatttacatgcgatggcggaatcacctgatgaacagctagtggtggtatcacaggtgcttgtatcagatatcaatataggttatgaagaaatagtcaatactcaggtacttgctttcaatggccagcctgttaaaaatttaaagaacttggcgaccatggtggaaaattgcaaggatgaatttttgaagtttgatctggagtatgaccagctaataaaagcatttctcatggacacaaatatctggagtttgattgttgtcctcgagacgaaaactgcaaaggctgctacccaggacattctgacgacgcactgtataccttctgcaacgtcggatgaccttaaggcctagtgggaggagaagggagcatgacgcagccctgggcctgagccagggccatcaggtgggccaatagtttgggccacaatttcggctgaattgattagcgcagcgtacgatccgtgatgaagaggaaccccaatgtttatctgtttaagttaaatatcttttgaggggttgtggatgtgagagtgctggctggtgtctaaagctccgccattatagaaggtttgagggactgtcactgtcagataacaataaactggagttgttacagacagagtcatcgtgaaaacgatagtgtctagtaagaagctgagtttgttttttctttacatgatttcattacaactacaccaaattattgacggggaaaggaatcataattggtccgtgatttcattacatccttggtgtctcaagcttgttccgcatagtacctgctatttgtcaacgatacttttacttctgcttgtaaagtatttgcatcttgtttctgg

SEQ ID NO: 221996 - DNA, 2144 bp, Zea Mays
atggacgatccctcctccgcctccaacaagcacaagcgcaagcgggggcgcaagcccaaggcgtcgccgcccttccccgaccgctcctccccctctccctcggccgcccccgctccggctgggcgtcgtggccgcaagccgcgacgtcacgaggcccccgccgacgcggacgccacgcgtccgccgtccccgccccgccgcggggagccgaagccggtggcaaacggaggcgatgtggtggcagtggcggagtcaggccccgcgagctgggatgaggtggtgagggtagtgccgtgcatggacgctgtggtcaaggtgttctgcgtgcacacggagcccaacttctcgctgccgtggcagcggaagcggcagtacagctccagcagcagcggatttatcatcggcggccgccgtgtcctcaccaatgctcactccgtggagcactatacccaggttaagcttaagaagcgcggctccgacaccaagtaccttgccaccgtcctggccatcggcacagagtgcgacattgcgctcttaactgtcaatgacgatgaattctgggaaggagtttcacctgttgagtttggaacattaccagcccttcaggatgcagttactgttgttggttatccaattggaggagataccatatccgtgacaagtggagtggtctctaggatagaaatactttcatacgttcatggttctacagaacttctaggattgcagatagatgcagctattaattcaggaaattcaggtggcccagcttttaatgataggggaaaatgtgtcggtatagcttttcagtctcttaaacatgaagatgcggagaacataggttatgtgataccgactccagttattacacatttcattgaggactacaaaaaatctggagaatacacaggctttcctatacttggagttgaatggcagaaaatggagaatccagatctccgcaaagcaatgggaatgaaaccagatcaaaagggtgttcgtgttagaagggtggagcccactgctccagaatctggatgcctacgaccatctgatattattcttagtttcgacggtgttgacattgctaatgatggaacagttcctttcaggcatggtgagcgcattggcttcagttatctggtttctcagaaatatactggagagaaagctcttgttaaagttctgcgtgattcaaaagttcatgaatttaaaataagtatggaaaagattatgaatatgatgcacctgtcaagttgttggtgaaacatttacatgcgatggcggaatcacctgatgaacagctagtggtggtatcacaggtgcttgtatcagatatcaatataggttatgaagaaatagtcaatactcaggtacttgctttcaatggccagcctgttaaaaatttaaagaacttggcgaccatggtggaaaattgcaaggatgaatttttgaagtttgatctggagtatgaccaggtatgttcttgaccctttctttatttgacttttgcagctaataaaagcatttctcatggacacaaatatctggagtttgattgttgtcctcgagacgaaaactgcaaaggctgctacccaggacattctgacgacgcactgtataccttctgcaacgtcggatgaccttaaggcctagtgggaggagaagggagcatgacgcagccctgggcctgagccagggccatcaggtgggccaatagtttgggccacaatttcggctgaattgattagcgcagcgtacgatccgtgatgaagaggaaccccaatgtttatctgtttaagttaaatatcttttgaggggttgtggatgtgagagtgctggctggtgtctaaagctccgccattatagaaggtttgagggactgtcactgtcagataacaataaactggagttgttacagacagagtcatcgtgaaaacgatagtgtctagtaagaagctgagtttgttttttctttacatgatttcattacaactacaccaaattattgacggggaaaggaatcataattggtccgtgatttcattacatccttggtgtctcaagcttgttccgcatagtacctgctatttgtcaacgatacttttacttctgcttgtaaagtatttgcatcttgtttctgg

SEQ ID NO: 221997 - DNA, 2511 bp, Zea Mays
ccgccccccatggacgatccctcctccgcctccaacaagcacaagcgcaagcgggggcgcaagcccaaggcgtcgccgcccttccccgaccgctcctccccctctccctcggccgcccccgctccggctgggcgtcgtggccgcaagccgcgacgtcacgaggcccccgccgacgcggacgccacgcgtccgccgtccccgccccgccgcggggagccgaagccggtggcaaacggaggcgatgtggtggcagtggcggagtcaggccccgcgagctgggatgaggtggtgagggtagtgccgtgcatggacgctgtggtcaaggtgttctgcgtgcacacggagcccaacttctcgctgccgtggcagcggaagcggcagtacagctccagcagcagcggatttatcatcggcggccgccgtgtcctcaccaatgctcactccgtggagcactatacccaggttaagcttaagaagcgcggctccgacaccaagtaccttgccaccgtcctggccatcggcacagagtgcgacattgcgctcttaactgtcaatgacgatgaattctgggaaggagtttcacctgttgagtttggaacattaccagcccttcaggatgcagttactgttgttggttatccaattggaggagataccatatccgtgacaagtggagtggtctctaggatagaaatactttcatacgttcatggttctacagaacttctaggattgcagatagatgcagctattaattcaggaaattcaggtggcccagcttttaatgataggggaaaatgtgtcggtatagcttttcagtctcttaaacatgaagatgcggagaacataggttatgtgataccgactccagttattacacatttcattgaggactacaaaaaatctggagaatacacaggctttcctatacttggagttgaatggcagaaaatggagaatccagatctccgcaaagcaatgggaatgaaaccagatcaaaagggtgttcgtgttagaagggtggagcccactgctccagaatctggatgcctacgaccatctgatattattcttagtttcgacggtgttgacattgctaatgatggaacagttcctttcaggcatggtgagcgcattggcttcagttatctggtttctcagaaatatactggagagaaagctcttgttaaagttctgcgtgattcaaaagttcatgaatttaaaataaggttagcaactcacaagcggcttgttgcggctcatgtgaagggcaggccaccgtcatattacatagttgctggctttgtttttgcagctatctctgttccatatcttcgatccgagtatggaaaagattatgaatatgatgcacctgtcaagttgttggtgaaacatttacatgcgatggcggaatcacctgatgaacagctagtggtggtatcacaggtgcttgtatcagatatcaatataggttatgaagaaatagtcaatactcaggtacttgctttcaatggccagcctgttaaaaatttaaagaacttggcgaccatggtggaaaattgcaaggatgaatttttgaagtttgatctggagtatgaccagctaataaaagcatttctcatggacacaaatatctggagtttggtaggaagtttcccccctcaaattacatttgcacccctataagatgtctcatgatttctcaggtctagcaatagcaaatattatttttcttgccaaattggccatggacagctatagcctattgtcttacagtattatatatgagataggattattgaaatgaatcagctatcacttcacatgatgaaaaactgctccaaagtaactgtcaggattctttttgatttgttacttaactacttgaagctagtaactagtagcataatatatgatttgatagattgttgtcctcgagacgaaaactgcaaaggctgctacccaggacattctgacgacgcactgtataccttctgcaacgtcggatgaccttaaggcctagtgggaggagaagggagcatgacgcagccctgggcctgagccagggccatcaggtgggccaatagtttgggccacaatttcggctgaattgattagcgcagcgtacgatccgtgatgaagaggaaccccaatgtttatctgtttaagttaaatatcttttgaggggttgtggatgtgagagtgctggctggtgtctaaagctccgccattatagaaggtttgagggactgtcactgtcagataacaataaactggagttgttacagacagagtcatcgtgaaaacgatagtgtctagtaagaagctgagtttgttttttctttacatgatttcattacaactacaccaaattattgacggggaaaggaatcataattggtccgtgatttcattacatccttggtgtctcaagcttgttccgcatagtacctgctatttgtcaacgatacttttacttctgcttgtaaagtatttgcatcttgtttctgg

SEQ ID NO: 221998 - DNA, 2040 bp, Zea Mays
ccgccccccatggacgatccctcctccgcctccaacaagcacaagcgcaagcgggggcgcaagcccaaggcgtcgccgcccttccccgaccgctcctccccctctccctcggccgcccccgctccggctgggcgtcgtggccgcaagccgcgacgtcacgaggcccccgccgacgcggacgccacgcgtccgccgtccccgccccgccgcggggagccgaagccggtggcaaacggaggcgatgtggtggcagtggcggagtcaggccccgcgagctgggatgaggtggtgagggtagtgccgtgcatggacgctgtggtcaaggtgttctgcgtgcacacggagcccaacttctcgctgccgtggcagcggaagcggcagtacagctccagcagcagcggatttatcatcggcggccgccgtgtcctcaccaatgctcactccgtggagcactatacccaggttaagcttaagaagcgcggctccgacaccaagtaccttgccaccgtcctggccatcggcacagagtgcgacattgcgctcttaactgtcaatgacgatgaattctgggaaggagtttcacctgttgagtttggaacattaccagcccttcaggatgcagttactgttgttggttatccaattggaggagataccatatccgtgacaagtggagtggtctctaggatagaaatactttcatacgttcatggttctacagaacttctaggattgcagatagatgcagctattaattcaggaaattcaggtggcccagcttttaatgataggggaaaatgtgtcggtatagcttttcagtctcttaaacatgaagatgcggagaacataggttatgtgataccgactccagttattacacatttcattgaggactacaaaaaatctggagaatacacaggctttcctatacttggagttgaatggcagaaaatggagaatccagatctccgcaaagcaatgggaatgaaaccagatcaaaagggtgttcgtgttagaagggtggagcccactgctccagaatctggatgcctacgaccatctgatattattcttagtttcgacggtgttgacattgctaatgatggaacagttcctttcaggcatggtgagcgcattggcttcagttatctggtttctcagaaatatactggagagaaagctcttgttaaagttctgcgtgattcaaaagttcatgaatttaaaataagctatctctgttccatatcttcgatccgagtatggaaaagattatgaatatgatgcacctgtcaagttgttggtgaaacatttacatgcgatggcggaatcacctgatgaacagctagtggtggtatcacaggtgcttgtatcagatatcaatataggttatgaagaaatagtcaatactcagctaataaaagcatttctcatggacacaaatatctggagtttgattgttgtcctcgagacgaaaactgcaaaggctgctacccaggacattctgacgacgcactgtataccttctgcaacgtcggatgaccttaaggcctagtgggaggagaagggagcatgacgcagccctgggcctgagccagggccatcaggtgggccaatagtttgggccacaatttcggctgaattgattagcgcagcgtacgatccgtgatgaagaggaaccccaatgtttatctgtttaagttaaatatcttttgaggggttgtggatgtgagagtgctggctggtgtctaaagctccgccattatagaaggtttgagggactgtcactgtcagataacaataaactggagttgttacagacagagtcatcgtgaaaacgatagtgtctagtaagaagctgagtttgttttttctttacatgatttcattacaactacaccaaattattgacggggaaaggaatcataattggtccgtgatttcattacatccttggtgtctcaagcttgttccgcatagtacctgctatttgtcaacgatacttttacttctgcttgtaaagtatttgcatcttgtttctgg

SEQ ID NO: 221999 - DNA, 2147 bp, Zea Mays
ccgccccccatggacgatccctcctccgcctccaacaagcacaagcgcaagcgggggcgcaagcccaaggcgtcgccgcccttccccgaccgctcctccccctctccctcggccgcccccgctccggctgggcgtcgtggccgcaagccgcgacgtcacgaggcccccgccgacgcggacgccacgcgtccgccgtccccgccccgccgcggggagccgaagccggtggcaaacggaggcgatgtggtggcagtggcggagtcaggccccgcgagctgggatgaggtggtgagggtagtgccgtgcatggacgctgtggtcaaggtgttctgcgtgcacacggagcccaacttctcgctgccgtggcagcggaagcggcagtacagctccagcagcagcggatttatcatcggcggccgccgtgtcctcaccaatgctcactccgtggagcactatacccaggttaagcttaagaagcgcggctccgacaccaagtaccttgccaccgtcctggccatcggcacagagtgcgacattgcgctcttaactgtcaatgacgatgaattctgggaaggagtttcacctgttgagtttggaacattaccagcccttcaggatgcagttactgttgttggttatccaattggaggagataccatatccgtgacaagtggagtggtctctaggatagaaatactttcatacgttcatggttctacagaacttctaggattgcagatagatgcagctattaattcaggaaattcaggtggcccagcttttaatgataggggaaaatgtgtcggtatagcttttcagtctcttaaacatgaagatgcggagaacataggttatgtgataccgactccagttattacacatttcattgaggactacaaaaaatctggagaatacacaggctttcctatacttggagttgaatggcagaaaatggagaatccagatctccgcaaagcaatgggaatgaaaccagatcaaaagggtgttcgtgttagaagggtggagcccactgctccagaatctggatgcctacgaccatctgatattattcttagtttcgacggtgttgacattgctaatgatggaacagttcctttcaggcatggtgagcgcattggcttcagttatctggtttctcagaaatatactggagagaaagctcttgttaaagttctgcgtgattcaaaagttcatgaatttaaaataaggttagcaactcacaagcggcttgttgcggctcatgtgaagggcaggccaccgtcatattacatagttgctggctttgtttttgcagctatctctgttccatatcttcgatccgagtatggaaaagattatgaatatgatgcacctgtcaagttgttggtgaaacatttacatgcgatggcggaatcacctgatgaacagctagtggtggtatcacaggtgcttgtatcagatatcaatataggttatgaagaaatagtcaatactcaggtacttgctttcaatggccagcctgttaaaaatttaaagaacttggcgaccatggtggaaaattgcaaggatgaatttttgaagtttgatctggagtatgaccaggacattctgacgacgcactgtataccttctgcaacgtcggatgaccttaaggcctagtgggaggagaagggagcatgacgcagccctgggcctgagccagggccatcaggtgggccaatagtttgggccacaatttcggctgaattgattagcgcagcgtacgatccgtgatgaagaggaaccccaatgtttatctgtttaagttaaatatcttttgaggggttgtggatgtgagagtgctggctggtgtctaaagctccgccattatagaaggtttgagggactgtcactgtcagataacaataaactggagttgttacagacagagtcatcgtgaaaacgatagtgtctagtaagaagctgagtttgttttttctttacatgatttcattacaactacaccaaattattgacggggaaaggaatcataattggtccgtgatttcattacatccttggtgtctcaagcttgttccgcatagtacctgctatttgtcaacgatacttttacttctgcttgtaaagtatttgcatcttgtttctgg

SEQ ID NO: 222000 - DNA, 2191 bp, Zea Mays
gcccgccccccatggacgatccctcctccgcctccaacaagcacaagcgcaagcgggggcgcaagcccaaggcgtcgccgcccttccccgaccgctcctccccctctccctcggccgcccccgctccggctgggcgtcgtggccgcaagccgcgacgtcacgaggcccccgccgacgcggacgccacgcgtccgccgtccccgccccgccgcggggagccgaagccggtggcaaacggaggcgatgtggtggcagtggcggagtcaggccccgcgagctgggatgaggtggtgagggtagtgccgtgcatggacgctgtggtcaaggtgttctgcgtgcacacggagcccaacttctcgctgccgtggcagcggaagcggcagtacagctccagcagcagcggatttatcatcggcggccgccgtgtcctcaccaatgctcactccgtggagcactatacccaggttaagcttaagaagcgcggctccgacaccaagtaccttgccaccgtcctggccatcggcacagagtgcgacattgcgctcttaactgtcaatgacgatgaattctgggaaggagtttcacctgttgagtttggaacattaccagcccttcaggatgcagttactgttgttggttatccaattggaggagataccatatccgtgacaagtggagtggtctctaggatagaaatactttcatacgttcatggttctacagaacttctaggattgcagatagatgcagctattaattcaggaaattcaggtggcccagcttttaatgataggggaaaatgtgtcggtatagcttttcagtctcttaaacatgaagatgcggagaacataggttatgtgataccgactccagttattacacatttcattgaggactacaaaaaatctggagaatacacaggctttcctatacttggagttgaatggcagaaaatggagaatccagatctccgcaaagcaatgggaatgaaaccagatcaaaagggtgttcgtgttagaagggtggagcccactgctccagaatctggatgcctacgaccatctgatattattcttagtttcgacggtgttgacattgctaatgatggaacagttcctttcaggcatggtgagcgcattggcttcagttatctggtttctcagaaatatactggagagaaagctcttgttaaagttctgcgtgattcaaaagttcatgaatttaaaataaggttagcaactcacaagcggcttgttgcggctcatgtgaagggcaggccaccgtcatattacatagttgctggctttgtttttgcagctatctctgttccatatcttcgatccgagtatggaaaagattatgaatatgatgcacctgtcaagttgttggtgaaacatttacatgcgatggcggaatcacctgatgaacagctagtggtggtatcacaggtgcttgtatcagatatcaatataggttatgaagaaatagtcaatactcaggtacttgctttcaatggccagcctgttaaaaatttaaagaacttggcgaccatggtggaaaattgcaaggatgaatttttgaagtttgatctggagtatgaccagattgttgtcctcgagacgaaaactgcaaaggctgctacccaggacattctgacgacgcactgtataccttctgcaacgtcggatgaccttaaggcctagtgggaggagaagggagcatgacgcagccctgggcctgagccagggccatcaggtgggccaatagtttgggccacaatttcggctgaattgattagcgcagcgtacgatccgtgatgaagaggaaccccaatgtttatctgtttaagttaaatatcttttgaggggttgtggatgtgagagtgctggctggtgtctaaagctccgccattatagaaggtttgagggactgtcactgtcagataacaataaactggagttgttacagacagagtcatcgtgaaaacgatagtgtctagtaagaagctgagtttgttttttctttacatgatttcattacaactacaccaaattattgacggggaaaggaatcataattggtccgtgatttcattacatccttggtgtctcaagcttgttccgcatagtacctgctatttgtcaacgatacttttacttctgcttgtaaagtatttgcatcttgtttctgg

SEQ ID NO: 222001 - DNA, 2148 bp, Zea Mays
agcccgccccccatggacgatccctcctccgcctccaacaagcacaagcgcaagcgggggcgcaagcccaaggcgtcgccgcccttccccgaccgctcctccccctctccctcggccgcccccgctccggctgggcgtcgtggccgcaagccgcgacgtcacgaggcccccgccgacgcggacgccacgcgtccgccgtccccgccccgccgcggggagccgaagccggtggcaaacggaggcgatgtggtggcagtggcggagtcaggccccgcgagctgggatgaggtggtgagggtagtgccgtgcatggacgctgtggtcaaggtgttctgcgtgcacacggagcccaacttctcgctgccgtggcagcggaagcggcagtacagctccagcagcagcggatttatcatcggcggccgccgtgtcctcaccaatgctcactccgtggagcactatacccaggttaagcttaagaagcgcggctccgacaccaagtaccttgccaccgtcctggccatcggcacagagtgcgacattgcgctcttaactgtcaatgacgatgaattctgggaaggagtttcacctgttgagtttggaacattaccagcccttcaggatgcagttactgttgttggttatccaattggaggagataccatatccgtgacaagtggagtggtctctaggatagaaatactttcatacgttcatggttctacagaacttctaggattgcagatagatgcagctattaattcaggaaattcaggtggcccagcttttaatgataggggaaaatgtgtcggtatagcttttcagtctcttaaacatgaagatgcggagaacataggttatgtgataccgactccagttattacacatttcattgaggactacaaaaaatctggagaatacacaggctttcctatacttggagttgaatggcagaaaatggagaatccagatctccgcaaagcaatgggaatgaaaccagatcaaaagggtgttcgtgttagaagggtggagcccactgctccagaatctggatgcctacgaccatctgatattattcttagtttcgacggtgttgacattgctaatgatggaacagttcctttcaggcatggtgagcgcattggcttcagttatctggtttctcagaaatatactggagagaaagctcttgttaaagttctgcgtgattcaaaagttcatgaatttaaaataagctatctctgttccatatcttcgatccgagtatggaaaagattatgaatatgatgcacctgtcaagttgttggtgaaacatttacatgcgatggcggaatcacctgatgaacagctagtggtggtatcacaggtgcttgtatcagatatcaatataggttatgaagaaatagtcaatactcaggtacttgctttcaatggccagcctgttaaaaatttaaagaacttggcgaccatggtggaaaattgcaaggatgaatttttgaagtttgatctggagtatgaccagctaataaaagcatttctcatggacacaaatatctggagtttgattgttgtcctcgagacgaaaactgcaaaggctgctacccaggacattctgacgacgcactgtataccttctgcaacgtcggatgaccttaaggcctagtgggaggagaagggagcatgacgcagccctgggcctgagccagggccatcaggtgggccaatagtttgggccacaatttcggctgaattgattagcgcagcgtacgatccgtgatgaagaggaaccccaatgtttatctgtttaagttaaatatcttttgaggggttgtggatgtgagagtgctggctggtgtctaaagctccgccattatagaaggtttgagggactgtcactgtcagataacaataaactggagttgttacagacagagtcatcgtgaaaacgatagtgtctagtaagaagctgagtttgttttttctttacatgatttcattacaactacaccaaattattgacggggaaaggaatcataattggtccgtgatttcattacatccttggtgtctcaagcttgttccgcatagtacctgctatttgtcaacgatacttttacttctgcttgtaaagtatttgcatcttgtttctgg

SEQ ID NO: 222002 - DNA, 1005 bp, Zea Mays
ttactagacatctcagctctctggaccatcacgtgtacaattgcgaccgctatatatcaacaaatatatgccatgagtgtgcaagtgtaagttgtgcacacaatatacagggcggttttgtcttaagccagcagctccccggccgatggcaataagctgcttcaacggcggcgccggctggccggagcccgtggtgcgcgtccaggctgtgtctgacacgtgcggcgacacgatccccgagcggtatgtgaagcccctgtcggagcggccccggctctcaccggcctccgatggcagcggcccgaatatcccagtcgtagacctgtcaatgctagacgtggacgcgacatccagcgccgtggcggcggcgtgccgggagtggggctttttccaggcagtgaaccacggcgtccgcccggagctgctgcgcggcgcgcgcgcggcgtggcgtggcttcttccggcagcccgcggaggtgcgcgagcgttacgcgaactcgccggcgacgtacgagggctacggcagccgcctcggcaccgccaagggcggcccgctggactggggcgactactacttcctccatctgctgccggcttccctcaagagccacgagaagtggccttccctgccttcctccctacggggggcaacggaggagtacggcgaggaagtgttgcagctgtgccggagggtgatgcggctgctctccagcgggctggggctggaagccgggagactgcaggcggcgttcggcggagagggcggcgaaggggcgtgcttgcgggtcaacttctacccgcagtgcccgcagccagagctgacgctgggcgtagcggggcactccgaccccggcggcatgaccatgctgctggtggacgaccacgtcaagggcctgcaggtaaggagccccgacggccagtggatcgtcgtcgaacccgtccccgacgccttcatcgtcaacgtcggcgaccagatccaggaccagcacggcggcatcaagaaaag

SEQ ID NO: 222003 - DNA, 1823 bp, Zea Mays
ccctcgggatccccggtcaccaaatcagccctaaacaatcccgaatccacgcccgcacggccggccgcgctgtcctttgtacaagaggagatgggatggtcgccacggcccccgcccatcacccgcagcaccgcatcactccgcctcgtcccccacttctcgcacttccgcttcagcttccaccgtgcccaagagtcacgaggcggcggcgggtcacgccgacgtactctcaggtgctgcggtgggactgcccctgctgctgccgcgggggcggcggaggggaggatggccgcggcgacggcggcggacatggtgtgggtgagggtgcttgaggatggcgtgttccggttcgacgcgtcggaggcggcgcgcgccgccgcggggcccagcctctcgttcgcggacccgcggcggcgggaggcgccgcatgacggggccgacatgcccgccgttgtcccggtatgcgaggtcgcggcggggggatcccagaaggtcgtgataaagcttcctcctgggacatctttctatggtactggagaagcgagtggcccacttgaacggactgggaaacgagttttcacatggaatacagatgcatggggttttgggccaggaaccacttcgttgtaccagtcacacccttgggttttggctgtcctccctgatggaaaagcattgggtgtccttgctgataccactcggcgttgtgagattgatttgcgacaagaatcaactataaagttctctgccttatctgcctaccctgtcatcacttttgggccatttaatactccagctgatgtcatgacatctttgtcgcatgcaattggtactgtgtccatgccgccaaaatggtcacttggctatcatcaatgtcgttggagctatgattcttctgagaaagtactcaaggttgttaggacatttagggagaaagacattccttgtgatgttgtctggatggatattgactatatggatggttttaggtgcttcacgtttgatagtatccgattccctgatccaatatcaatggtagatgatctccattccattggttgcaaagcaatctggatgcttgacccagggatcaagaaggaggagggttactttgtttatgatagtggctcaaaaagcgatgtttggattcaaaaggcagatggcagtccattcgttggggaggtgtggcctggtgattgtgttttccctgactatacatctgaaaaaacacgagcttggtgggctagtttggtaaaggacttcatctctattggtgttgatggaatatggaatgatatgaatgaacctgctgttttcaaaactaccacgaagacaatgcctgaaagcaatattcataggggagatgctgatattggtggtgttcaaaatcattcatactatcacaatgtctacggaatgctaatggcaagatctacttataaaggaatggaaatgggcaatgcagctaaacgaccatttgttcttacacgagctggttttattggaagtcagcgttatgctgcaacatggactggtgataatctttcaaattgggagcatctgcacatgagtctaccaatggttcttcagttgggtctcagtggtcaaccattgtcaggtcctgatattggtggttttgctggaaatgctactccaaaactttttggaagatggatgggtgtgggtgcattgtttccattttcacgtggccatacagaaactggaagcattgaccacgaaccatggtcctttggtaaagagtgtgaggaagtctgtcgccttgcgctactaagacgatacacaagaccctgaactgaggaaag

SEQ ID NO: 222004 - DNA, 2375 bp, Zea Mays
ccctcgggatccccggtcaccaaatcagccctaaacaatcccgaatccacgcccgcacggccggccgcgctgtcctttgtacaagaggagatgggatggtcgccacggcccccgcccatcacccgcagcaccgcatcactccgcctcgtcccccacttctcgcacttccgcttcagcttccaccgtgcccaagagtcacgaggcggcggcgggtcacgccgacgtactctcaggtgctgcggtgggactgcccctgctgctgccgcgggggcggcggaggggaggatggccgcggcgacggcggcggacatggtgtgggtgagggtgcttgaggatggcgtgttccggttcgacgcgtcggaggcggcgcgcgccgccgcggggcccagcctctcgttcgcggacccgcggcggcgggaggcgccgcatgacggggccgacatgcccgccgttgtcccggtatgcgaggtcgcggcggggggatcccagaaggtcgtgataaagcttcctcctgggacatctttctatggtactggagaagcgagtggcccacttgaacggactgggaaacgagttttcacatggaatacagatgcatggggttttgggccaggaaccacttcgttgtaccagtcacacccttgggttttggctgtcctccctgatggaaaagcattgggtgtccttgctgataccactcggcgttgtgagattgatttgcgacaagaatcaactataaagttctctgccttatctgcctaccctgtcatcacttttgggccatttaatactccagctgatgtcatgacatctttgtcgcatgcaattggtactgtgtccatgccgccaaaatggtcacttggctatcatcaatgtcgttggagctatgattcttctgagaaagtactcaaggttgttaggacatttagggagaaagacattccttgtgatgttgtctggatggatattgactatatggatggttttaggtgcttcacgtttgatagtatccgattccctgatccaatatcaatggtagatgatctccattccattggttgcaaagcaatctggatgcttgacccagggatcaagaaggaggagggttactttgtttatgatagtggctcaaaaagcgatgtttggattcaaaaggcagatggcagtccattcgttggagaatatgcctcacatagtctacattcaggggaggtgtggcctggtgattgtgttttccctgactatacatctgaaaaaacacgagcttggtgggctagtttggtaaaggacttcatctctattggtgttgatggaatatggaatgatatgaatgaacctgctgttttcaaaactaccacgaagacaatgcctgaaagcaatattcataggggagatgctgatattggtggtgttcaaaatcattcatactatcacaatgtctacggaatgctaatggcaagatctacttataaaggaatggaaatgggcaatgcagctaaacgaccatttgttcttacacgagctggttttattggaagtcagcgttatgctgcaacatggactggtgataatctttcaaattgggagcatctgcacatgagtctaccaatggttcttcagttggtaattgaaacatttgttctaatatccaaagttgttccttgaaacttcgagggtgtctagtttttcctactgaaaatatgttccatgtggcccctaaaagaagattgttctagctgttgggttgatggtgcaaatgcttattcatgacattttttgtgactagttattttaacatttaatttattatttgatattcggtttcactgtacgtgctgtcctgtcatcctgtgatgtgaaggcaactaagtttgtcaggacacaaaaatgctaggggtaaggaccaagatcttctgtattagttaaatttggtttctcaattagttgtgctaatttggttcctcatttagttgtgctaatttggttcctcaattagttgtgctctgtcacatttctatcgttcttccagaaagttttaaggaggttgttcttgagatattcatgtttataaactcaaattgttagtggccaaattttattctcagagtggttcatctgacaagatgtgagatttaagcatgcactttcacgtgtctaatgatctaacaatatggttatctgatcagggtctcagtggtcaaccattgtcaggtcctgatattggtggttttgctggaaatgctactccaaaactttttggaagatggatgggtgtgggtgcattgtttccattttcacgtggccatacagaaactggaagcattgaccacgaaccatggtcctttggtaaagaggctagatacgttcataggtag

SEQ ID NO: 222005 - DNA, 1500 bp, Zea Mays
gttcaccttcacccggcggcccgcgtgcgctgtctccccccaggccccccacctctctggctctctctctctctgcgagtctgcgacgacggggctaccgccgcctccgtacgccaggtgccgaggtcttcgttggtcctttcgccggcgacatccaccagaaattatatcatcaattcattaccgggtgtacatttgtacacagtacacccatgtccttcactggatccgcccctgtagtgaggataatatctttggagtttcggagggggcgcgctagaaggatggtttccaaaatgagatttcggaatgctctcggttctagaccatttcagtgttgttcgcgtgagaatcatacatatgtccggaagctgttggaccgagtgtcggagagatcaaagctccttaaaaaggtgtctgttttggtgggttacagtaatccacaagatttagttgagaaacaaagagcccctggggaatcttctgcagagttgattagtgccttgaaagaaatcgatttcccagaaattactgcaaagtttccatgcataaaagttggtgatgcatcacctgttgaactgtatgaggattctactaacatgaagtttaaagaagctgcactttctgaaaagctcacaaatttcatccaaggctcagctcgaaatttggagtcagcttatgaattccataatgactgtcatccattgaatcaaacacccacaactgcaggtgatctttcaatcagtgaagagatccctctcattgaaccaatagttgatacgaagtcccccgagtcattgtcagatgctataacctctgacaatagtatactggataaaagtataaggtgcttgcctggaacaactagtaggcaatatcgccagctagaggatggtggtttccatacggtccgcaaattattgcagcattttcctcggacttatgcagatctgcaaaaccctcaaggccccatagaatatgggcagtatattatgttatctggtactgttatatcttccaggggaatcaaggttaagtccactttaggtcttcttgaggtggttgttggttgttccataatcgagtctgaattgagctcttcagttgagagtagtcactctggagcagagcaaaagagaattcacttgcacctcaacagatttttcagtggcgcacgtttttcttcccaacattttcttaacttaatgtcagcaaagcacaaagaaggggatcttgtttatgttagtgataaaaaaggtgcttgctaatggccattatgagttgaaggagtacacaattgacgctattgaaggagaaggggaacacagcactatgcttgctaggaaaccacaccctatatacccgtcgaaagcgggattaaaacctagtctgcttggcctttcaatctctagggccttgaagatattgagcccagatgttgatccagtgcctcccgatgttctcgttgaattcaacttgcctaatctctttgatcaatag

SEQ ID NO: 222006 - DNA, 1505 bp, Zea Mays
gttcaccttcacccggcggcccgcgtgcgctgtctccccccaggccccccacctctctggctctctctctctctgcgagtctgcgacgacggggctaccgccgcctccgtacgccaggtgccgaggtcttcgttggtcctttcgccggcgacatccaccagaaattatatcatcaattcattaccgggtgtacatttgtacacagtacacccatgtccttcactggatccgcccctgtagtgaggataatatctttggagtttcggagggggcgcgctagaaggatggtttccaaaatgagatttcggaatgctctcggttctagaccatttcagtgttgttcgcgtgagaatcatacatatgtccggaagctgttggaccgagtgtcggagagatcaaagctccttaaaaaggtgtctgttttggtgggttacagtaatccacaagatttagttgagaaacaaagagcccctggggaatcttctgcagagttgattagtgccttgaaagaaatcgatttcccagaaattactgcaaagtttccatgcataaaagttggtgatgcatcacctgttgaactgtatgaggattctactaacatgaagtttaaagaagctgcactttctgaaaagctcacaaatttcatccaaggctcagctcgaaatttggagtcagcttatgaattccataatgactgtcatccattgaatcaaacacccacaactgcaggtgatctttcaatcagtgaagagatccctctcattgaaccaatagttgatacgaagtcccccgagtcattgtcagatgctataacctctgacaatagtatactggataaaagtataaggtgcttgcctggaacaactagtaggcaatatcgccagctagaggatggtggtttccatacggtccgcaaattattgcagcattttcctcggacttatgcagatctgcaaaaccctcaaggccccatagaatatgggcagtatattatgttatctggtactgttatatcttccaggggaatcaaggttaagtccactttaggtcttcttgaggtggttgttggttgttccataatcgagtctgaattgagctcttcagttgagagtagtcactctggagcagagcaaaagagaattcacttgcacctcaacagatttttcagtggcgcacgtttttcttcccaacattttcttaacttaatgtcagcaaagcacaaagaaggggatcttgtttatgttagtggtaagataaaaaaggtgcttgctaatggccattatgagttgaaggagtacacaattgacgctattgaaggagaaggggaacacagcactatgcttgctaggaaaccacaccctatatacccgtcgaaagcgggattaaaacctagtctgcttggcctttcaatctctagggccttgaagatattgagcccagatgttgatccagtgcctcccgatgttctcgttgaattcaacttgcctaatctctttgatcaatag

SEQ ID NO: 222007 - DNA, 1121 bp, Zea Mays
acccaggacccgagaagatttgtccaagggtgtctgttttggtgggttacagtaatccacaagatttagttgagaaacaaagagcccctggggaatcttctgcagagttgattagtgccttgaaagaaatcgatttcccagaaattactgcaaagtttccatgcataaaagttggtgatgcatcacctgttgaactgtatgaggattctactaacatgaagtttaaagaagctgcactttctgaaaagctcacaaatttcatccaaggctcagctcgaaatttggagtcagcttatgaattccataatgactgtcatccattgaatcaaacacccacaactgcaggtgatctttcaatcagtgaagagatccctctcattgaaccaatagttgatacgaagtcccccgagtcattgtcagatgctataacctctgacaatagtatactggataaaagtataaggtgcttgcctggaacaactagtaggcaatatcgccagctagaggatggtggtttccatacggtccgcaaattattgcagcattttcctcggacttatgcagatctgcaaaaccctcaaggccccatagaatatgggcagtatattatgttatctggtactgttatatcttccaggggaatcaaggttaagtccactttaggtcttcttgaggtggttgttggttgttccataatcgagtctgaattgagctcttcagttgagagtagtcactctggagcagagcaaaagagaattcacttgcacctcaacagatttttcagtggcgcacgtttttcttcccaacattttcttaacttaatgtcagcaaagcacaaagaaggggatcttgtttatgttagtggtaagataaaaaaggtgcttgctaatggccattatgagttgaaggagtacacaattgacgctattgaaggagaaggggaacacagcactatgcttgctaggaaaccacaccctatatacccgtcgaaagcgggattaaaacctagtctgcttggcctttcaatctctagggccttgaagatattgagcccagatgttgatccagtgcctcccgatgttctcgttgaattcaacttgcctaatctctttgatcaatag

SEQ ID NO: 222008 - DNA, 4630 bp, Zea Mays
cgccgccgccccttcacggaacccgcggccgactccccctccgccttccccgctcgtccgcttctccgccgtccgctcctccactgcatggcctccacccctccgaccctgcacctcggctcctccacccttcggccccacgcctcggctgctccgctcgtccagccttcggccccacgcgcaccgcggccgccgtatctcccgtcatctgatcacccacaacggtgatgtggacgacgtggtgcgtcttggaggcagttccatttctggcgttacggtgagggaatgccacaacgtggtggacgccactgccgtggcgctcccgttgcaggccggagtctggacgcctaagcttcttgttttgctgggtttggtgcaagtggcccatatgttgcgcagaggagcactggtgaagcctaagaaccctttatgtcgatgggggcggtctcgagggaggtgtcgtcagcatgtgagaggctctgcttcatttgcccatcactgcggacgaggtcccgccatccagtcaagcgctacaagaagttgcttgcagaaatcttccctcggacacaggatgaaggaccaaatgatcgcaagatagggaaactgtgcgaatatatttcaaggaatcctatgcgtgttccaaagattacagtttacttagagcaaaaatgctacaaggaatttagggctgagcgctatggttcagtgaaagttgttatggcaatctatcgaaaggtgatatgttcttgtcaggagcagttgtaagtttttctacttgtaaacatatatgcattttctcttttgcatatgccacacatttatagtttcaaagcgttataatttgctctcttctgacagtttctaattttttcttcaatgattgttatttgtttttgtcaattttgatggaccttgctctatgacaccatttgaatttgtacttggagcaaaaatttagttctttttcgtataacgtgctcttactcatttttattggaactttaataagaattagtttataaacatgaacaattactgtaatgggtgaagccattgatttgcaggccactttttgccaacagcttgctaacaattgtagagacattattggagcaaaatagacaggatgacttgcggaaattagcatgtcaaacactttttgactttataaatagtcaggttgacagtacttacatgttcaatttagaaaaccagattcctaaactatgtcatctggcccaagagatgggtgaaaaggagaagatatgcattcttcatgcagctgggctacaagctctttcatctatggaaaagatatgttgcctcttaggacctgcttgaaagaggaggatttttttttgtcaaacttgaactaaatcctttggatcttaacccttcttcctcttacaaaaagatttggtttatgggtgagcactcccatatgtctgcagagcttgataatgttgtttctgcagttctggaaaattatgagagcccatatgcaaatgctgataatgatgctgctgttgaggatattcgaactcagtgggtggatgaagtgctcaaagccgaaggtcatgaacctcctgctgttaccattttgaccagggttccttcatggaaagttattagagctgttcatggtgaattaagtttgacaatagaagaatcaacaagcccaaatttttggtcagggatttgtctacataaccttgctagaatatccagggaaacaacaacaacgcgacgagttctggaagctatatttcgttattttgataataacaatctatggtcaccttctaaaggatttgcgctgtgtgtcctgctggatatgcagattgtgatggagaaatctgaatgctcatatattgttgtctatgttagtcaagcatcttgaacacaagaatgtattgaaacaaccagatatgaatctagatatcattgaagttacttcacgccttgctgaacactccaaagctcagtcttctatagcactaatgtcttcaataagtgatatggtcaggcatatgggtaaaagcatgcaatccttggccagtgatgcaggtcctggagacaacatggtcaaatggaatagcagatatgggaaagctgtagatgaatgtcttgttcagttgtctagaaaggtcaatttttctaaataaattttaaaggtgtatgtttttttcatctatagctctacagctgcactctatggataatttgttcaactttttttatcctcttcaggtcggtgatgctggacctatccttgatacgttagctgtagtactggaaaatatttcgagttctatgattgttgcacggtctactatctctgcagcatatcgcactgctcaaatagttgcatcattgccaaacttgtcacatcagagcaaagcatttcctgaggcgttgtttcatcaacttcttttagcaatgctctatccagattgtgagacacatttaggagcacatcggattttctctgttgttcttgttccctcttccgttgctccgttttcatttgcagacacttcacagacaaggaagattgatctccgaaggacattatctagaacaacatcagtgttttcatcttctgctgctttgtttgggaaacttaaaagagatatgctttcatttcgtgaaagtgcactccaggataacacaaagctactgcccatcagtgagaatgcaaatgagatcagtgcaaatgatgcaaaattattcaagtcacagactattcaaaggatggttagtacaagagatatttctctcccctcttccacagatacaagtacttcgagtgaaccaacttcatatcaggaaaaggatgctgtcaccctcatgctcagtgttcgtcaggcaaatcttcttctttcctccttatggactcaggcactgtcacctgaaaatgttccacggaattatgaagcaatttctcatacttacagcttgatgctattgttttctagagccaagggctcaggtgctgaagttttggttggtagctttcagcttgctttttcattaagaagtgtttcattacaagcaggctttcttccaccttcacgcaggcgttctctttttactttggcaacttcaatgctcgtgtttttttcgaaagcttttaacgttcttgcgctcattccagttgtgaagcaagtgttgacagaaagtacagttgatccatttctttgtttaatagaagactgtagattgcaggctcttgatagtgctaatgagtcctgcacgaaactctatggttcaaaagaagatgatgagctagctctgaaatcactgtcgaacattgacatgaatgaaaatcagtcaaaagaaacatcagtgcctcttatacttgacagcttggaagatatgtcggagtcagaattgtctgctattaggaaacagttgcttgaggaattttcagcagatgacagctgtctgggatctcattttactgaaacaccttcacagtatccagcacaaaatgggaaactgcaccataagtctatggaggttattccattgggatttgtttttgaagatgatactctcgctgaagcatctgacagctcagtagaacctcacttgcaacatccgccatgtaacaacattcttgatgtcaatcggcttcttgattcagttttggaaacatctcagcatgttggaaggtcgtcagtgtcaacaaaccaggatctgcctttcaaggacgtagccaaccaatgtgaagcacttctgattgggaagcagcaaaagctatctgcgtgcatgagtgtctgtgaaaaagaggctggtgaatcttccgtcgagcagtcatctcggcaggatcctcaagcagatacgtttctctgcacagctgatgaacaatggcaccccaattcctgtaagctgccagcgctgtgtccctacgaccggttccttgcaacgtctgggtgctaagatgatctcttctgcgatgtggatctctataaccaagaacgtgttcagtggacgcctaaaaattggtggttccagagctcatgcatgctaaaatatgtgctgtcgtgtgtgagtgccagatgacatgatttccctgttttgtaaatggttctcgtctaccatgcatgggaaatatagggggtgcatcattgagtttatttcattgcttttgacagaaccattctatctctctctcatgctttgtactaattattagcaaacgacggatgatgaggggcagagaatcaacccattttatttctcaaaatataaacaaaaaagagtgaaaaatgatgaatcgcttcagggcctgcctgcaggtgcgttttcaatcctaaacccggtgtaatgaaggtttcatggaccgaactgaaaaatagtctttacaagcctgaagacctcgttatgtctcaccagggatgaaaacgagtgggagaattttttgcttcgtctggtaccgtattttatttttatcgagacccttttcgtatttacggggaaacaagaatgagatataaacggaaacatgaatgggatataaacgaaatgatatattacgggaacagaaacggaaacggaaacgttgtcgacgacgggactcgcaccggtcggtcgacgtcaatcaatcgctctcactagctttcct

SEQ ID NO: 222009 - DNA, 4416 bp, Zea Mays
cgccgccgccccttcacggaacccgcggccgactccccctccgccttccccgctcgtccgcttctccgccgtccgctcctccactgcatggcctccacccctccgaccctgcacctcggctcctccacccttcggccccacgcctcggctgctccgctcgtccagccttcggccccacgcgcaccgcggccgccgtatctcccgtcatctgatcacccacaacggtgatgtggacgacgtggtgcgtcttggaggcagttccatttctggcgttacggtgagggaatgccacaacgtggtggacgccactgccgtggcgctcccgttgcaggccggagtctggacgcctaagcttcttgttttgctgggtttggtgcaagtggcccatatgttgcgcagaggagcactggtgaagcctaagaaccctttatgtcgatgggggcggtctcgagggaggtgtcgtcagcatgtgagaggctctgcttcatttgcccatcactgcggacgaggtcccgccatccagtcaagcgctacaagaagttgcttgcagaaatcttccctcggacacaggatgaaggaccaaatgatcgcaagatagggaaactgtgcgaatatatttcaaggaatcctatgcgtgttccaaagattacagtttacttagagcaaaaatgctacaaggaatttagggctgagcgctatggttcagtgaaagttgttatggcaatctatcgaaaggtgatatgttcttgtcaggagcagttgtaagtttttctacttgtaaacatatatgcattttctcttttgcatatgccacacatttatagtttcaaagcgttataatttgctctcttctgacagtttctaattttttcttcaatgattgttatttgtttttgtcaattttgatggaccttgctctatgacaccatttgaatttgtacttggagcaaaaatttagttctttttcgtataacgtgctcttactcatttttattggaactttaataagaattagtttataaacatgaacaattactgtaatgggtgaagccattgatttgcaggccactttttgccaacagcttgctaacaattgtagagacattattggagcaaaatagacaggatgacttgcggaaattagcatgtcaaacactttttgactttataaatagtcaggttgacagtacttacatgttcaatttagaaaaccagattcctaaactatgtcatctggcccaagagatgggtgaaaaggagaagatatgcattcttcatgcagctgggctacaagctctttcatctatgatttggtttatgggtgagcactcccatatgtctgcagagcttgataatttctggaaaattatgagagcccatatgcaaatgctgataatgatgctgctgttgaggatattcgaactcagtgggtggatgaagtgctcaaagccgaaggtcatgaacctcctgctgttaccattttgaccagggttccttcatggaaagttattagagctgttcatggtgaattaagtttgacaatagaagaatcaacaagcccaaatttttggtcagggatttgtctacataaccttgctagaatatccagggaaacaacaacaacgcgacgagttctggaagctatatttcgttattttgataataacaatctatggtcaccttctaaaggatttgcgctgtgtgtcctgctggatatgcagattgtgatggagaaatctgaatgctcatatattgttgtctatgttagtcaagcatcttgaacacaagaatgtattgaaacaaccagatatgaatctagatatcattgaagttacttcacgccttgctgaacactccaaagctcagtcttctatagcactaatgtcttcaataagtgatatggtcaggcatatgggtaaaagcatgcaatccttggccagtgatgcaggtcctggagacaacatggtcaaatggaatagcagatatgggaaagctgtagatgaatgtcttgttcagttgtctagaaaggtcaatttttctaaataaattttaaaggtgtatgtttttttcatctatagctctacagctgcactctatggataatttgttcaactttttttatcctcttcaggtcggtgatgctggacctatccttgatacgttagctgtagtactggaaaatatttcgagttctatgattgttgcacggtctactatctctgcagcatatcgcactgctcaaatagttgcatcattgccaaacttgtcacatcagagcaaagcatttcctgaggcgttgtttcatcaacttcttttagcaatgctctatccagattgtgagacacatttaggagcacatcggattttctctgttgttcttgttccctcttccgttgctccgttttcatttgcagacacttcacagacaaggaagattgatctccgaaggacattatctagaacaacatcagtgttttcatcttctgctgctttgtttgggaaacttaaaagagatatgctttcatttcgtgaaagtgcactccaggataacacaaagctactgcccatcagtgagaatgcaaatgagatcagtgcaaatgatgcaaaattattcaagtcacagactattcaaaggatggttagtacaagagatatttctctcccctcttccacagatacaagtacttcgagtgaaccaacttcatatcaggaaaaggatgctgtcaccctcatgctcagtgttcgtcaggcaaatcttcttctttcctccttatggactcaggcactgtcacctgaaaatgttccacggaattatgaagcaatttctcatacttacagcttgatgctattgttttctagagccaaggcgttctctttttactttggcaacttcaatgctcgtgtttttttcgaaagcttttaacgttcttgcgctcattccagttgtgaagcaagtgttgacagaaagtacagttgatccatttctttgtttaatagaagactgtagattgcaggctcttgatagtgctaatgagtcctgcacgaaactctatggttcaaaagaagatgatgagctagctctgaaatcactgtcgaacattgacatgaatgaaaatcagtcaaaagaaacatcagtgcctcttatacttgacagcttggaagatatgtcggagtcagaattgtctgctattaggaaacagttgcttgaggaattttcagcagatgacagctgtctgggatctcattttactgaaacaccttcacagtatccagcacaaaatgggaaactgcaccataagtctatggaggttattccattgggatttgtttttgaagatgatactctcgctgaagcatctgacagctcagtagaacctcacttgcaacatccgccatgtaacaacattcttgatgtcaatcggcttcttgattcagttttggaaacatctcagcatgttggaaggtcgtcagtgtcaacaaaccaggatctgcctttcaaggacgtagccaaccaatgtgaagcacttctgattgggaagcagcaaaagctatctgcgtgcatgagtgtctgtgaaaaagaggctggtgaatcttccgtcgagcagtcatctcggcaggatcctcaagcagatacgtttctctgcacagctgatgaacaatggcaccccaattcctgtaagctgccagcgctgtgtccctacgaccggttccttgcaacgtctgggtgctaagatgatctcttctgcgatgtggatctctataaccaagaacgtgttcagtggacgcctaaaaattggtggttccagagctcatgcatgctaaaatatgtgctgtcgtgtgtgagtgccagatgacatgatttccctgttttgtaaatggttctcgtctaccatgcatgggaaatatagggggtgcatcattgagtttatttcattgcttttgacagaaccattctatctctctctcatgctttgtactaattattagcaaacgacggatgatgaggggcagagaatcaacccattttatttctcaaaatataaacaaaaaagagtgaaaaatgatgaatcgcttcagggcctgcctgcaggtgcgttttcaatcctaaacccggtgtaatgaaggtttcatggaccgaactgaaaaatagtctttacaagcctgaagacctcgttatgtctcaccagggatgaaaacgagtgggagaattttttgcttcgtctggtaccgtattttatttttatcgagacccttttcgtatttacggggaaacaagaatgagatataaacggaaacatgaatgggatataaacgaaatgatatattacgggaacagaaacggaaacggaaacgttgtcgacgacgggactcgcaccggtcggtcgacgtcaatcaatcgctctcactagctttcct

SEQ ID NO: 222010 - DNA, 3541 bp, Zea Mays
tgcagtagatggcatcaatttgggtttggtgcaagtggcccatatgttgcgcagaggagcactggtgaagcctaagaaccctttatgtcgatgggggcggtctcgagggaggtgtcgtcagcatgtgagaggctctgcttcatttgcccatcactgcggacgaggtcccgccatccagtcaagcgctacaagaagttgcttgcagaaatcttccctcggacacaggatgaaggaccaaatgatcgcaagatagggaaactgtgcgaatatatttcaaggaatcctatgcgtgttccaaaggtttatttccttttatgctttgcccgtatagttttaagtgtaacatgagttcaattatgaaaaccatcgtgaagtcccattacagattacagtttacttagagcaaaaatgctacaaggaatttagggctgagcgctatggttcagtgaaagttgttatggcaatctatcgaaaggccactttttgccaacagcttgctaacaattgtagagacattattggagcaaaatagacaggatgacttgcggaaattagcatgtcaaacactttttgactttataaatagtcaggttgacagtacttacatgttcaatttagaaaaccagattcctaaactatgtcatctggcccaagagatgggtgaaaaggagaagatatgcattcttcatgcagctgggctacaagctctttcatctatggaaaagatatgttgcctcttaggacctgcttgaaagaggaggatttttttttgtcaaacttgaactaaatcctttggatcttaacccttcttcctcttacaaaaagatttggtttatgggtgagcactcccatatgtctgcagagcttgataatgttgtttctgcagttctggaaaattatgagagcccatatgcaaatgctgataatgatgctgctgttgaggatattcgaactcagtgggtggatgaagtgctcaaagccgaaggtcatgaacctcctgctgttaccattttgaccagggttccttcatggaaagttattagagctgttcatggtgaattaagtttgacaatagaagaatcaacaagcccaaatttttggtcagggatttgtctacataaccttgctagaatatccagggaaacaacaacaacgcgacgagttctggaagctatatttcgttattttgataataacaatctatggtcaccttctaaaggatttgcgctgtgtgtcctgctggatatgcagattgtgatggagaaatctggacagaatgctcatatattgttgtctatgttagtcaagcatcttgaacacaagaatgtattgaaacaaccagatatgaatctagatatcattgaagttacttcacgccttgctgaacactccaaagctcagtcttctatagcactaatgtcttcaataagtgatatggtcaggcatatgggtaaaagcatgcaatccttggccagtgatgcaggtcctggagacaacatggtcaaatggaatagcagatatgggaaagctgtagatgaatgtcttgttcagttgtctagaaaggtcggtgatgctggacctatccttgatacgttagctgtagtactggaaaatatttcgagttctatgattgttgcacggtctactatctctgcagcatatcgcactgctcaaatagttgcatcattgccaaacttgtcacatcagagcaaagcatttcctgaggcgttgtttcatcaacttcttttagcaatgctctatccagattgtgagacacatttaggagcacatcggattttctctgttgttcttgttccctcttccgttgctccgttttcatttgcagacacttcacagacaaggaagattgatctccgaaggacattatctagaacaacatcagtgttttcatcttctgctgctttgtttgggaaacttaaaagagatatgctttcatttcgtgaaagtgcactccaggataacacaaagctactgcccatcagtgagaatgcaaatgagatcagtgcaaatgatgcaaaattattcaagtcacagactattcaaaggatggttagtacaagagatatttctctcccctcttccacagatacaagtacttcgagtgaaccaacttcatatcaggaaaaggatgctgtcaccctcatgctcagtgttcgtcaggcaaatcttcttctttcctccttatggactcaggcactgtcacctgaaaatgttccacggaattatgaagcaatttctcatacttacagcttgatgctattgttttctagagccaagggctcaggtgctgaagttttggttggtagctttcagcttgctttttcattaagaagtgtttcattacaagcaggctttcttccaccttcacgcaggcgttctctttttactttggcaacttcaatgctcgtgtttttttcgaaagcttttaacgttcttgcgctcattccagttgtgaagcaagtgttgacagaaagtacagttgatccatttctttgtttaatagaagactgtagattgcaggctcttgatagtgctaatgagtcctgcacgaaactctatggttcaaaagaagatgatgagctagctctgaaatcactgtcgaacattgacatgaatgaaaatcagtcaaaagaaacatcagtgcctcttatacttgacagcttggaagatatgtcggagtcagaattgtctgctattaggaaacagttgcttgaggaattttcagcagatgacagctgtctgggatctcattttactgaaacaccttcacagtatccagcacaaaatgggaaactgcaccataagtctatggaggttattccattgggatttgtttttgaagatgatactctcgctgaagcatctgacagctcagtagaacctcacttgcaacatccgccatgtaacaacattcttgatgtcaatcggcttcttgattcagttttggaaacatctcagcatgttggaaggtcgtcagtgtcaacaaaccaggatctgcctttcaaggacgtagccaaccaatgtgaagcacttctgattgggaagcagcaaaagctatctgcgtgcatgagtgtctgtgaaaaagaggctggtgaatcttccgtcgagcagtcatctcggcaggatcctcaagcagatacgtttctctgcacagctgatgaacaatggcaccccaattcctggcctgcctgcaggtgcgttttcaatcctaaacccggtgtaatgaaggtttcatggaccgaactgaaaaatagtctttacaagcctgaagacctcgttatgtctcaccagggatgaaaacgagtgggagaattttttgcttcgtctggtaccgtattttatttttatcgagacccttttcgtatttacggggaaacaagaatgagatataaacggaaacatgaatgggatataaacgaaatgatatattacgggaacagaaacggaaacggaaacgttgtcgacgacgggactcgcaccggtcggtcgacgtcaatcaatcgctctcactagctttcct

SEQ ID NO: 222011 - DNA, 3204 bp, Zea Mays
gcactcccatatgtctgcagagcttgataatgttgtttctgcagttctggaaaattatgagagcccatatgcaaatgctgataatgatgctgctgttgaggatattcgaactcagtgggtggatgaagtgctcaaagccgaaggtcatgaacctcctgctgttaccattttgaccagggttccttcatggaaagttattagagctgttcatggtgaattaagtttgacaatagaagaatcaacaagcccaaatttttggtcagggatttgtctacataaccttgctagaatatccagggaaacaacaacaacgcgacgagttctggaagctatatttcgttattttgataataacaatctatggtcaccttctaaaggatttgcgctgtgtgtcctgctggatatgcagattgtgatggagaaatctggacagaatgctcatatattgttgtctatgttagtcaagcatcttgaacacaagaatgtattgaaacaaccagatatgaatctagatatcattgaagttacttcacgccttgctgaacactccaaagctcagtcttctatagcactaatgtcttcaataagtgatatggtcaggcatatgggtaaaagcatgcaatccttggccagtgatgcaggtcctggagacaacatggtcaaatggaatagcagatatgggaaagctgtagatgaatgtcttgttcagttgtctagaaaggtcaatttttctaaataaattttaaaggtgtatgtttttttcatctatagctctacagctgcactctatggataatttgttcaactttttttatcctcttcaggtcggtgatgctggacctatccttgatacgttagctgtagtactggaaaatatttcgagttctatgattgttgcacggtctactatctctgcagcatatcgcactgctcaaatagttgcatcattgccaaacttgtcacatcagagcaaagcatttcctgaggcgttgtttcatcaacttcttttagcaatgctctatccagattgtgagacacatttaggagcacatcggattttctctgttgttcttgttccctcttccgttgctccgttttcatttgcagacacttcacagacaaggaagattgatctccgaaggacattatctagaacaacatcagtgttttcatcttctgctgctttgtttgggaaacttaaaagagatatgctttcatttcgtgaaagtgcactccaggataacacaaagctactgcccatcagtgagaatgcaaatgagatcagtgcaaatgatgcaaaattattcaagtcacagactattcaaaggatggttagtacaagagatatttctctcccctcttccacagatacaagtacttcgagtgaaccaacttcatatcaggaaaaggatgctgtcaccctcatgctcagtgttcgtcaggcaaatcttcttctttcctccttatggactcaggcactgtcacctgaaaatgttccacggaattatgaagcaatttctcatacttacagcttgatgctattgttttctagagccaagggctcaggtgctgaagttttggttggtagctttcagcttgctttttcattaagaagtgtttcattacaagcaggctttcttccaccttcacgcaggcgttctctttttactttggcaacttcaatgctcgtgtttttttcgaaagcttttaacgttcttgcgctcattccagttgtgaagcaagtgttgacagaaagtacagttgatccatttctttgtttaatagaagactgtagattgcaggctcttgatagtgctaatgagtcctgcacgaaactctatggttcaaaagaagatgatgagctagctctgaaatcactgtcgaacattgacatgaatgaaaatcagtcaaaagaaacatcagtgcctcttatacttgacagcttggaagatatgtcggagtcagaattgtctgctattaggaaacagttgcttgaggaattttcagcagatgacagctgtctgggatctcattttactgaaacaccttcacagtatccagcacaaaatgggaaactgcaccataagtctatggaggttattccattgggatttgtttttgaagatgatactctcgctgaagcatctgacagctcagtagaacctcacttgcaacatccgccatgtaacaacattcttgatgtcaatcggcttcttgattcagttttggaaacatctcagcatgttggaaggtcgtcagtgtcaacaaaccaggatctgcctttcaaggacgtagccaaccaatgtgaagcacttctgattgggaagcagcaaaagctatctgcgtgcatgagtgtctgtgaaaaagaggctggtgaatcttccgtcgagcagtcatctcggcaggatcctcaagcagatacgtttctctgcacagctgatgaacaatggcaccccaattcctgtaagctgccagcgctgtgtccctacgaccggttccttgcaacgtctgggtgctaagatgatctcttctgcgatgtggatctctataaccaagaacgtgttcagtggacgcctaaaaattggtggttccagagctcatgcatgctaaaatatgtgctgtcgtgtgtgagtgccagatgacatgatttccctgttttgtaaatggttctcgtctaccatgcatgggaaatatagggggtgcatcattgagtttatttcattgcttttgacagaaccattctatctctctctcatgctttgtactaattattagcaaacgacggatgatgaggggcagagaatcaacccattttatttctcaaaatataaacaaaaaagagtgaaaaatgatgaatcgcttcagggcctgcctgcaggtgcgttttcaatcctaaacccggtgtaatgaaggtttcatggaccgaactgaaaaatagtctttacaagcctgaagacctcgttatgtctcaccagggatgaaaacgagtgggagaattttttgcttcgtctggtaccgtattttatttttatcgagacccttttcgtatttacggggaaacaagaatgagatataaacggaaacatgaatgggatataaacgaaatgatatattacgggaacagaaacggaaacggaaacgttgtcgacgacgggactcgcaccggtcggtcgacgtcaatcaatcgctctcactagctttcct

SEQ ID NO: 222012 - DNA, 2185 bp, Zea Mays
gaaaatatttcgagttctatgattgttgcacggtctactatctctgcagcatatcgcactgctcaaatagttgcatcattgccaaacttgtcacatcagagcaaagcatttcctgaggcgttgtttcatcaacttcttttagcaatgctctatccagattgtgagacacatttaggagcacatcggattttctctgttgttcttgttccctcttccgttgctccgttttcatttgcagacacttcacagacaaggaagattgatctccgaaggacattatctagaacaacatcagtgttttcatcttctgctgctttgtttgggaaacttaaaagagatatgctttcatttcgtgaaagtgcactccaggataacacaaagctactgcccatcagtgagaatgcaaatgagatcagtgcaaatgatgcaaaattattcaagtcacagactattcaaaggatggttagtacaagagatatttctctcccctcttccacagatacaagtacttcgagtgaaccaacttcatatcaggaaaagggctcaggtgctgaagttttggttggtagctttcagcttgctttttcattaagaagtgtttcattacaagcaggctttcttccaccttcacgcaggcgttctctttttactttggcaacttcaatgctcgtgtttttttcgaaagcttttaacgttcttgcgctcattccagttgtgaagcaagtgttgacagaaagtacagttgatccatttctttgtttaatagaagactgtagattgcaggctcttgatagtgctaatgagtcctgcacgaaactctatggttcaaaagaagatgatgagctagctctgaaatcactgtcgaacattgacatgaatgaaaatcagtcaaaagaaacatcagtgcctcttatacttgacagcttggaagatatgtcggagtcagaattgtctgctattaggaaacagttgcttgaggaattttcagcagatgacagctgtctgggatctcattttactgaaacaccttcacagtatccagcacaaaatgggaaactgcaccataagtctatggaggttattccattgggatttgtttttgaagatgatactctcgctgaagcatctgacagctcagtagaacctcacttgcaacatccgccatgtaacaacattcttgatgtcaatcggcttcttgattcagttttggaaacatctcagcatgttggaaggtcgtcagtgtcaacaaaccaggatctgcctttcaaggacgtagccaaccaatgtgaagcacttctgattgggaagcagcaaaagctatctgcgtgcatgagtgtctgtgaaaaagaggctggtgaatcttccgtcgagcagtcatctcggcaggatcctcaagcagatacgtttctctgcacagctgatgaacaatggcaccccaattcctgtaagctgccagcgctgtgtccctacgaccggttccttgcaacgtctgggtgctaagatgatctcttctgcgatgtggatctctataaccaagaacgtgttcagtggacgcctaaaaattggtggttccagagctcatgcatgctaaaatatgtgctgtcgtgtgtgagtgccagatgacatgatttccctgttttgtaaatggttctcgtctaccatgcatgggaaatatagggggtgcatcattgagtttatttcattgcttttgacagaaccattctatctctctctcatgctttgtactaattattagcaaacgacggatgatgaggggcagagaatcaacccattttatttctcaaaatataaacaaaaaagagtgaaaaatgatgaatcgcttcagggcctgcctgcaggtgcgttttcaatcctaaacccggtgtaatgaaggtttcatggaccgaactgaaaaatagtctttacaagcctgaagacctcgttatgtctcaccagggatgaaaacgagtgggagaattttttgcttcgtctggtaccgtattttatttttatcgagacccttttcgtatttacggggaaacaagaatgagatataaacggaaacatgaatgggatataaacgaaatgatatattacgggaacagaaacggaaacggaaacgttgtcgacgacgggactcgcaccggtcggtcgacgtcaatcaatcgctctcactagctttcct

SEQ ID NO: 222013 - DNA, 1714 bp, Zea Mays
tcattgccaaacttgtcacatcagagcaaaacaaggaagattgatctccgaaggacattatctagaacaacatcagtgttttcatcttctgctgctttgtttgggaaacttaaaagagatatgctttcatttcgtgaaagtgcactccaggataacacaaagctactgcccatcagtgagaatgcaaatgagatcagtgcaaatgatgcaaaattattcaagtcacagactattcaaaggatggttagtacaagagatatttctctcccctcttccacagatacaagtacttcgagtgaaccaacttcatatcaggaaaaggatgctgtcaccctcatgctcagtgttcgtcaggcaaatcttcttctttcctccttatggactcaggcactgtcacctgaaaatgttccacggaattatgaagcaatttctcatacttacagcttgatgctattgttttctagagccaagggctcaggtgctgaagttttggttggtagctttcagcttgctttttcattaagaagtgtttcattacaagcaggctttcttccaccttcacgcaggcgttctctttttactttggcaacttcaatgctcgtgtttttttcgaaagcttttaacgttcttgcgctcattccagttgtgaagcaagtgttgacagaaagtacagttgatccatttctttgtttaatagaagactgtagattgcaggctcttgatagtgctaatgagtcctgcacgaaactctatggttcaaaagaagatgatgagctagctctgaaatcactgtcgaacattgacatgaatgaaaatcagtcaaaagaaacatcagtgcctcttatacttgacagcttggaagatatgtcggagtcagaattgtctgctattaggaaacagttgcttgaggaattttcagcagatgacagctgtctgggatctcattttactgaaacaccttcacagtatccagcacaaaatgggaaactgcaccataagtctatggaggttattccattgggatttgtttttgaagatgatactctcgctgaagcatctgacagctcagtagaacctcacttgcaacatccgccatgtaacaacattcttgatgtcaatcggcttcttgattcagttttggaaacatctcagcatgttggaaggtcgtcagtgtcaacaaaccaggatctgcctttcaaggacgtagccaaccaatgtgaagcacttctgattgggaagcagcaaaagctatctgcgtgcatgagtgtctgtgaaaaagaggctggtgaatcttccgtcgagcagtcatctcggcaggatcctcaagcagatacgtttctctgcacagctgatgaacaatggcaccccaattcctggcctgcctgcaggtgcgttttcaatcctaaacccggtgtaatgaaggtttcatggaccgaactgaaaaatagtctttacaagcctgaagacctcgttatgtctcaccagggatgaaaacgagtgggagaattttttgcttcgtctggtaccgtattttatttttatcgagacccttttcgtatttacggggaaacaagaatgagatataaacggaaacatgaatgggatataaacgaaatgatatattacgggaacagaaacggaaacggaaacgttgtcgacgacgggactcgcaccggtcggtcgacgtcaatcaatcgctctcactagctttcct

SEQ ID NO: 222014 - DNA, 1644 bp, Zea Mays
cttgatgctattgttttctagagccaagctttcagcttgctttttcattaagaagtgtttcattacaagcaggctttcttccaccttcacgcaggcgttctctttttactttggcaacttcaatgctcgtgtttttttcgaaagcttttaacgttcttgcgctcattccagttgtgaagcaagtgttgacagaaagtacagttgatccatttctttgtttaatagaagactgtagattgcaggctcttgatagtgctaatgagtcctgcacgaaactctatggttcaaaagaagatgatgagctagctctgaaatcactgtcgaacattgacatgaatgaaaatcagtcaaaagaaacatcagtgcctcttatacttgacagcttggaagatatgtcggagtcagaattgtctgctattaggaaacagttgcttgaggaattttcagcagatgacagctgtctgggatctcattttactgaaacaccttcacagtatccagcacaaaatgggaaactgcaccataagtctatggaggttattccattgggatttgtttttgaagatgatactctcgctgaagcatctgacagctcagtagaacctcacttgcaacatccgccatgtaacaacattcttgatgtcaatcggcttcttgattcagttttggaaacatctcagcatgttggaaggtcgtcagtgtcaacaaaccaggatctgcctttcaaggacgtagccaaccaatgtgaagcacttctgattgggaagcagcaaaagctatctgcgtgcatgagtgtctgtgaaaaagaggctggtgaatcttccgtcgagcagtcatctcggcaggatcctcaagcagatacgtttctctgcacagctgatgaacaatggcaccccaattcctgtaagctgccagcgctgtgtccctacgaccggttccttgcaacgtctgggtgctaagatgatctcttctgcgatgtggatctctataaccaagaacgtgttcagtggacgcctaaaaattggtggttccagagctcatgcatgctaaaatatgtgctgtcgtgtgtgagtgccagatgacatgatttccctgttttgtaaatggttctcgtctaccatgcatgggaaatatagggggtgcatcattgagtttatttcattgcttttgacagaaccattctatctctctctcatgctttgtactaattattagcaaacgacggatgatgaggggcagagaatcaacccattttatttctcaaaatataaacaaaaaagagtgaaaaatgatgaatcgcttcagggcctgcctgcaggtgcgttttcaatcctaaacccggtgtaatgaaggtttcatggaccgaactgaaaaatagtctttacaagcctgaagacctcgttatgtctcaccagggatgaaaacgagtgggagaattttttgcttcgtctggtaccgtattttatttttatcgagacccttttcgtatttacggggaaacaagaatgagatataaacggaaacatgaatgggatataaacgaaatgatatattacgggaacagaaacggaaacggaaacgttgtcgacgacgggactcgcaccggtcggtcgacgtcaatcaatcgctctcactagctttcct

SEQ ID NO: 222015 - DNA, 721 bp, Zea Mays
taaatgaataattaatatatatatataataaacttgaatttgcatgctggaattttattgtacttttgcatatgaactttaatcttgaattcatgctgtttttttatgctgcaattaaattaaattcaagaaaaagaaaaactagaatacgaatcatgttgaaacgtggaagaaacatgagataatagaaatagaatagaagaaataaaaccaagcatcatttgggacaatcgatcggcttcaacacataatcactcgccatgtggcccctgcttaggatcgacatgcatcttgcatgtatcctttcccaggttctagccatatctgttgcaacagccatgggttgttaccatatacgcccgtatctgcgggtagctagcctcgtcttcggcctcaaacagaacgccatagcgcagctgagagagagaacagaagggaggagagagggcctcgccggcgaccttcgctccggccttgatgtgggtgcccagttcctcgctgggcagtgccgagcgtacaccgagaaggtcgcgctctcgccggtcaagtctggaggacgagctgctcagaatgcgtcgtcagcattgagagaagtcatgggctcctacacaaatgcaatccgccgtcgtctacgtctcgaccaacgcgtgaggttacgagccacctgaagaacaagttggtagctggaatctcaagtcccaggcaagttgtgcccttgatc

SEQ ID NO: 222016 - DNA, 661 bp, Zea Mays
gcattcatcactttcctgactcacctcactcgatcatcctccagtcttgtcgtcgcctgctagcttgaatattacgccagcatctcgccaggaaaatggcgggcactactccgcgccgcttgctcctggtcatcgtccccctcgtcgccgtcgtgccggcgtccgcaaaagactacatggtcggcgactcgtccgggtggaagtccggagtggactacgctgcctgggccaagggcaagccgttcgccatcggcgacacgctctgttccagtacagctcggcgcactcggtgctggaggtgagcgaggcggaccacggcgcgtgctcggcgagcaacccgctgcggtcgcaccagggccagagcaccaccatcccgctcaccaaggccggcacccgctacttcatctgcggcgcccccggccactgcgcctcgggcatgaaggtcgccatcaccgtctccggcggcggcggcggcggcagcagcagcgccgacaacaccgcgactccgtcgggtccctccgtgcgggcgacgaacacgaagccggcgtccggtggcgcgacgacgacggacgagtcggactccagcgcggctggcagcggcgcccgcctcgcgatgggcctgctgttcggggccgcgggcctcgctgcaataatgggctga

SEQ ID NO: 222017 - DNA, 1934 bp, Zea Mays
atccagccgtccggcccataccgcgaatgtccacgaccgctgcaaaagtttcttcttcaggttcttaatcagtaatcacgcacggacgataaatccaagtaaggaaatccccgatgatctcctgcgcgtcgcagcgccagccactcgattagtggagtccaccaaccaagcacgcgtccctccccgtcccagatcccatcccgcggcagccggtcagtccgatccatctccagtacccagcccgtcacccgccttccccgttcgctctcgtcggcgcgcgatggagggtctcatcaaggggttggtccacgtggccatcgacgccgtggaggacgccgtgagggagagggaccacggccgcgccgacgacgacgaggtgccgaggaggagggcggcccaaagctccgatccagatgacgacggggaggaggaacgcgacgaacgatcgcggtcgacgtgggccgaggtcgtctccgagcagaagggcagcgatccggacgagcgccgggaccatcgaagctcggggcgggacaatcgccatgagaggagggatgacgagggttggaaaagggccgatggtcggaaccagcagcagcaccacgcaggccggcagaaccagtgcgagggggaggaaaggtgggatggcagtggcagccggcggcgtcagcaacagcagcaggcacaaggatacgggaatcagcatcaggaagaagaaaggataaacgatggaggctggcagaccgtcggtgagaaaaagcgccatggaagaccacagcagtctgaagcatggaatggatacagaaagccaccatcagaacaaaagtactctgaggatgtcggtcatatccaccaaggactcaatttcgagcccaccagggaggagctgaatagcttatcgaaagcgtgtagccgactttgggagctcgatatgaaccgtattgttcctggtaaggactacataatcgactgtggcaaggggaagaaagtttatcagaagggtgatatggcatctgaaagcttgttcagctggctaggcgacgatgtgctaagaaaacccacctactcacgtttctgcgcacttctggataactacaacccccaccaggggtacaaagaagttgttacccagcaggataagcacgaagaaatagctttcgttgaagagatcgctagaacagcgccaattaagtacttgcaccggtacttagtgcagaagggggctgtgcctcaggactacgaggacttcaagagaatgctgacatccctatggtttgatttgtatggaagaggtggcaactctagctgctcttctgcctttgagcatgtgtttgttggtgagatcaaaggacggggacaaggggagagtgaggtattccgtgactaatttgcagttttacctggaagaagccaagggaaatgtggattaccaaggttatatatttccaaggcgccgtggtgaatcgcctgattcagagatacagctgctgactgttcagtttgagtggcatggcgtgctgaaatcggtatccagcacgttgattggcgtcagtcctgagtttgaggttgcactctacacgttgtgcttttttgttggaggggaagacaaccgcgtcgatattggcccgtatagtgtgaacgtcaagtgctaccgattggggaacaacaaaattggatcagcctttcccattgtagagaactgattatctggtaccatactgttcaatttgttgctgccatctgcaatagtattgctacttgcactgctaaaaagttgacgaccgagactgaagttacttttcatgattttgttgctgtggatgtggaagctttccgatgtatattttctgcctttgtcatgtttatttactgatatgctgtttgttgatgaaaattcagtacggtctgcaaagacaaaggtgagcataagaatgcag

SEQ ID NO: 222018 - DNA, 6629 bp, Zea Mays
caggttgcttgcgccttgcgggctgcgcgccgcctttgccctcccggccttcccttccatcgcgacttgggttgcggactctctttccatcttcttcttcgcttccccccaaaagctcctcctctccatcgattccattccattcgaattagcgatcgcccactacccgcaacctcctaccttaggcagcgccaaaccctaaccttactcgggtacgccaccaatggctgagtcggaggacgccaccgccgccgagcccgggtccgggccgccccacgaggacgaggatgcgctgctcgcccgcgcccacaccgtcatctccaggatcatcgaccgcgagctcgaccccaacccccgcctcctccacaccctcgccaccatgtgcgagctccacgaagccagatatcttgagttacgttcagctgacacaatgttcaatagcacgaacacaaggactgcatttacaattgggaagctggccaatttgctccgggacaatgacgagttttacgagttggtgttttgtaaattcttgtctgacacctcctactctgttgctgtacgagctgccactgctaggttgctcttgagctgtcaccctgcctggacgcctccgtatcctcatgtctttgaagactctatcatagataatattaagaagtgggtaacggaggatcctgaagcgtctaatgaatgcaaatggaagtatctaggaaacaataaacccacagatgctgagatgctgagaacatatgggattggtttgcttgctatggcgttgtgcagcagtgggcaattgatagaggatgtcttgactttgggggtatcagcgaagctcatgcgctatttgcgcataagagtccttggggatgcctcatcttctcagagagatgctaatcatccacaggacaccaagcatccttggggcggagacgacagtaggggtaaatcacgtctgtcccaagatggttctcgattggacggaacaagggttgggtatggaatgttaaccaacccgacagcagagaagaacaacgaaccttgtgttggaatgatgcaagcatatggagcaaggtcattggatgacagttttgcttcattggatgattctgatgtccctgaggctgattggaccaatgatagatcttatagcacacgtgtttgtgacacaaagtcaaaacatggggaaaggaattctgtgacgaggttgcttaaagatgaagaggtcagcgaaaatggtgaactgttgaagagaaagctgaatcgagccccctcccgacttagagtgaagggaaaagcaggtgacagcttgccagaatgtgaaatgacacctttatcgccaacctctggattgagaataggaggtcaggctacaagagacaggaatgtggcgagggttgatgatccaaaggaggcaactgatgtgaacaatagattgtttaacaccatttccaaagaagaatacgaagatcgattcagggattgcattattggcttgaaggatatatctgacatcgttttgaaggcagtgagagccgctgaggctgaggccagatctgcaaatgcacctgatgaagctgtgaaagcagcaggtgacgctgctgccgagcttgtgaaatttgctgctttggaggtttggaaaagcgaaaataacagtgatgcggttgtagtagtggcggagaaagctgcatctgctgttgttgaggctgcattgtcaattagtgtctcacgaagtgcaaatcaagttggtgaagagcgtgcaatggaagaagctgtccaaaccagcgaagaccaggatttggaaaattttgttatcagtgacaaagcacagctattacaacttagagaaaattatagcatccagtgtctacagattttaggagagtatgttgaagctttgggtcctgtactccatgaaaaaggtgttgatgtttgcctcacattattgcaaaggagcatgaaaaaccaggagggatgtgaccactttgctcaactccttgatgtccttaaattggtttgtgcactggctgcccatcgaaaatttgctgcactctttgttgatcgtggtggtattcagaaaatcgtctctatgcctagagttacccagacatatatgggtctttctgcctgcttattcacttttgggtctcttcagtctaccattgaacgtgtttgtgcgctttcctcagacacacttgacagtgttgttgaattagcacttctacttcttgagtgcccacaagatttagctagaaaaaatgtggccatctttttcgctgctgcttttgtgttcaaagctgttctggatctatttgatgcccggaatgggatgcaaaagcttctcgatatcctttgtggatgcgcgtctggaaggtctggtagtaattctggaggagcaggatcctccaatgtaaatcaagggaatgatcggtcgcctgctgaagttttgactgcatcagagaagcaagttgcataccatacatgtgttgctctacggcaatactttagagctcatctccttcagcttgttgattccattcggccaagcaaaagtatccgtagtattgcccggaacacttctagtgcaagagctggctgcaaaccttttgacatcagcaatgaagctatggatgccatcttttgtcagatccaacgggacagaaagttaggccttgctcttgtgagagcttgctggcttgcgttggataaatttgttgcctcaaatggtcacatgactatgctggagttgtgtaagtttcaggcacatggtgatcggtatttgcgtgacttaactcaatatgcaattggagttcttcacatcataacacttatgccacagccacatgtccgcaaatcaatagtgcaggggacattaagcaacaatcgtgctggcatggctgtcttattagacacggtgaaaagtctcgactatattgatcatgaggtgatctgtccagcactgaatgtcctcgtcaatcttgtatgcccacctccttctatcagcaacaaaccattgtcaagttccaatcagcaacctgcagctgcacaagcgcttgcttcagaaagcagagaaaagaactttgaaaaaactatttcagataggaatctacttacaaacctgggtgaatctcgtgaaagatctggtgatggcaaccctgctgaaaagaacaataccttgcatcaaggaactcctagcacacctgttgtgccatctggagtagtcggtgatcgaagaataatgttaggagttggaggtggtggtcctggtcttgctgctcaattggaacaagggtaccgccaagctcgagaagttgtaagagccaataatggcataaagattcttttgcagcttcttggttctcggatggttacacatcctgtggctatagattctattcgagcccttgcctgccgtgttcttcttggcctggctagagacgatacaattgcacatatactgacaaagctccaggtggggaagaaattatcagaactgatccgtgatatcagtgctcagacatctgggggcgatagtggaagatggcaaactgagctgacccaagtggcaattgaactaattggggtattgacgaattctggaaaagaaacaacactagcggcaactgatgctgctgccccagcattgaggcgcattgagcgagctgggatagctgctgctgctcctatctcttaccattcgagggaactgatgcagttgatacatgaacatctccttgggtctggttttgctgccaccgctgctatgctccagaaggaggctggccttgcacctttaccattgacagcagcggtgcttcctgcccatcaagttgctgccctggaagcatcatctgttcagcaacagtggccctctggacatgttcagggatttctctcagataaaataaacacgtcgacatatcaatctgcccagagatcagatcctaagctgccttcatctaagaaaaaggcactggccttctcatccagtttctcacgaagagctcggtctccgcatccaagcaacatccttaaaagtcctgtacctattgcggctgatactggagatgcagaaatgttgaataaagcaccactgtcgctgccacttaagcggaactttgtggatgtgaaggatattagttttgcatcagcatcgaagcgccttgcaataactgatcaaatataccaatcctctgcattccaaactcctgctcctactcgcaaaggtctgtcggtatcagttgattctcctacttcatctcattgcggttggacaaacttcaacaatgcttttactgaaaacttggacaattctcaaggcacaccaggagcattgaccaccacagcacttcctggtgtaaatgaccaacaatcaggaaatttggagcgtatgacacttgactcactggttgtacaatacctgaaacatcaacaccgccaatgtcctgccccagttacaactttgccaccactttctcttttgcaccctcatgtttgccctgagcctagtcgcagccttagtgcaccggcaaacatagctgctcgagtgggaagccgtgagataagtaggcaatttagtgggatccagatacctcgtagggatcgtcattttatatacagtaggttcaagcagtgtcgtgtttgccgtgatgaggcatcactattgacttgcttgacatttcttggagatgcagctcgagttgtggctggtaaccacacaggtgaattaaggatatttgactgcaacacggcaaatctccttgagactcaaacgtgccaccaacatcttgttacaatgatggaatcgacatacactggtggaattgagatgattctcacatccagcctaaatgaggttaagatctgggatgccttctcggtatctgcagggcctttgcacacatttgacgactgcaaatctgctaggtttaaccactatggaacttcatttgctgccctttctactgatacagctcaacgggaggttcagttgtatgatgtacagacgtatactcttgctacacggcttcctgataacactagcagttcaggttcaggccgtggttatgtacaacccattatacatttcagtccttcagatacaatgttgctttggaatggagtcctgtgggatacaaggcaaccaaatcctgttcatcagtttgaccagttcacagattactgtggtggtggattccatccagcaggaaatgaggtgatcctgaattcggaggtgtgggatctgaggaagttcaagcttttgaggagtgtcccttccctggaccagacagtaataaagtttaacggaactggtgatgttatctatgccaccctgaggcgtaatcttgatgacgtgacatcatgcatcaatgctcgtagggtcaggcatcctcttttccctgcattcagcacgattgatgcggtgacttactcggatattgcaaccgtccaaatggaccgctgtgtacttgatcttgccactgagtccaatgattctcttattggggtggttgctatggacgatcaccaggagcttttctcttctgctcgcttgttcgaagttggcaggaagcgaataactgatgatgattccgatccagaggacgcaggtgaaactgatgatgactccgatgacgacgacgacgactccgatgacggtgttcttgcgccggtgctggaagggggtacagattctgaagatatcagtagcagcagcagcgatgacggtgatgaagatggtggtgacgatgatatacccagttcggatggcattgaagatgaccggttcattgatgagagacgacgggagttcatgatggatctttttggtgacggttgggacgacgatgaggcttatatgatgggatcctttagcagtggcgacgaggagggttggatcatatgttcgtggcgtgggcgtggcagaagctgacgccgcaggccgcgcaccagctgctggaacaaattattaaaggatacaccggaaaaaagcacaaaggcctgaagaacgtaccgaaatagataaacacctcatttttcaaaaggactcttccacccctggtaaattttcgagtacactctcccacctcgactaacgtacgtgtgttggtttgcggtttgcacgttcattgtaaaatagcaagcaagatcacaagaggtcaaaaccagacaagaccgttcttttaggacgtatgcaatgcaatacaatagtagtgacgagcgcgagaagatagattaatgaagaatatagctagggcaaagagattcggtccctagtaccgtcgtcaaaaagtatatatgttgcaggaaagtttcagtctatagtagtctacacctggccaaatgagcccggccggtctagcttgtttcgagcagctcccaacaatactcggtcgacatgatcaaatttctctctataaaaaacagtgtagtttcgtatatcccctatttttgacactcatcatactactcatgcatgggcttctatctttcattgttttagattagaaaaaggcttttgttagttgttgtacatatatctattgcttaagagagaaactcctatgtctttgaaaatgcaaatgctagcgcgttctaaagcatgggtcgcctggcaggcaacaacgaac

SEQ ID NO: 222019 - DNA, 1375 bp, Zea Mays
caggagttcggtggttttctcgacctgcgtgagaaggtcttattataatgccgtgggggcggtcataatccccgcaggattctagccctgacaatcctgagggtttatctagggaagagttaggtcgtatggtggcttctcgttggactggggaaagtgtaactgaggttagtaaagatgataagaaggggcatgaagatcagcaagaaataccagaacctgcagaggaagcacttgaagatgaattagaaattccagaacctgccgaagaaaattatggtggttatcattcagaagttgaggatgataggcgtaaatatgaagatgaagagttttatcatgagtcagaagatgaatatgttgacgaccatgatgagcatgttgagtcctacaaatctgatgatgaccaaaaagatttaactgagccaggacatgcatcgtggttggacaaagttcagcagactgtacaaaatgttttccaaaaattcaactcttttaagacccctgtagatttgtcagaggcttctcatgttcgtaaggagtatgatgatgctagctcaaagctttcaaaaattcagtctaagatatccagtctagctgagaagctaaaacatgattttggtaatgacaaggagttctattccttttatgatcagtgttttgagaccaaggaagggaagtatacttacaaggtctgtgcatataagaaagcatcacaggctgaagggcacagttctaccaacctggggcggtgggacaaatttgaagattcgtacagagtgatgcacttttcaagtggagacaaatgctggaatggtcctgaccgaagcctaaaggttaggcttagatgtgggctgagcaatgagcttaatgatgtagatgagcctagcagatgcgagtatgtggctgtattgtcgacccctgcagtttgcgtagaggagaagctgaaggagctgcaaaacaaactggacgccatgtctttgaagcagcccgggcatgacgaactttaaaaactttagaatattccagcgtgaacataaagaagatgtcaccaggaggcatagctctgacagttacatccataacatgataggcatggaagtcaatgaggtatatggacagaaacgggccaagcgcgagaaatgagaatgtagagtttaggtcgcctaccaggctatattagctcgcatagaacattttttttagctgaaatttgatgttgcaattttccagactcatctgatggaatatatagtaagaaacagtacaccttgaatcagcatatactttacccagggtttttacatgaaactatgttcagaacggtcatttggaactgaaggaattcccacttggaacacaaggtgaatcgcct

SEQ ID NO: 222020 - DNA, 2259 bp, Zea Mays
gcctgaagaacagtagaactcagactcgagcgctccaaagcgagccaccgccgatctgctcctccctcttgaccctcctccgtgcgctgcgcaggcatgaggcgcctcctcggcggctccctcgtcctttgtatcgccgcggtggtggagtccaagccgcctctcgactctctgggcataccaccgcaagatgaggcgtactacataggcggcgtgatcaaatgcagggacggatcgggcaggttttccagggaccagctcaacgacgacttctgcgactgccccgacggcaccgacgagcccgggacatctgcatgccctgaggcgaaattctactgcaagaatgcaggccacactccagtcacgatcttctcgtcacgagtgaatgacggcatttgtgattgctgtgatgggagtgatgaatatgacagcaatgtcacctgtaagaacacttgctgggaggctggaaaggtggcaagggagaaattgaagaagaaaattgctacatacgaaaatggtgttgttattcggaaacaggaagttgaaagggcaaaagaggcttttgctaaagatgaagcagatttagcaaaattgaagggcgaagagaaaatgctccaaggacttgttgataaactcaaagagcaaaagaaattaatagagaatgcagaggaagaagagcgtttaagaaaagagaaggaagaaaagagaacaaaagaagaagatgaaaagcaagctgctgttgaaaagggagcgcttgatgcctctcgggatgtagattctaaggaaattcatgatcatctgcaagaagcatgatggacatgcaacaggccatgataatcatgtaacagaaagcagggcatctattgagcagcatggttctgtaagcaaagatggtattagcgttgaaggtggaactgtagatgaattgccgcaggagtctgcagcacctaccatagagaaggattctagccctgacaatcctgagggtttatctagggaagagttaggtcgtatggtggcttctcgttggactggggaaagtgtaactgaggttagtaaagatgataagaaggggcatgaagatcagcaagaaataccagaacctgcagaggaagcacttgaagatgaattagaaattccagaacctgccgaagaaaattatggtggttatcattcagaagttgaggatgataggcgtaaatatgaagatgaagagttttatcatgagtcagaagatgaatatgttgacgaccatgatgagcatgttgagtcctacaaatctgatgatgaccaaaaagatttaactgagccaggacatgcatcgtggttggacaaagttcagcagactgtacaaaatgttttccaaaaattcaactcttttaagacccctgtagatttgtcagaggcttctcatgttcgtaaggagtatgatgatgctagctcaaagctttcaaaaattcagtctaagatatccagtctagctgagaagctaaaacatgattttggtaatgacaaggagttctattccttttatgatcagtgttttgagaccaaggaagggaagtatacttacaaggtctgtgcatataagaaagcatcacaggctgaagggcacagttctaccaacctggggcggtgggacaaatttgaagattcgtacagagtgatgcacttttcaagtggagacaaatgctggaatggtcctgaccgaagcctaaaggttaggcttagatgtgggctgagcaatgagcttaatgatgtagatgagcctagcagatgcgagtatgtggctgtattgtcgacccctgcagtttgcgtagaggagaagctgaaggagctgcaaaacaaactggacgccatgtctttgaagcagcccgggcatgacgaactttaaaaactttagaatattccagcgtgaacataaagaagatgtcaccaggaggcatagctctgacagttacatccataacatgataggcatggaagtcaatgaggtatatggacagaaacgggccaagcgcgagaaatgagaatgtagagtttaggtcgcctaccaggctatattagctcgcatagaacattttttttagctgaaatttgatgttgcaattttccagactcatctgatggaatatatagtaagaaacagtacaccttgaatcagcatatactttacccagggtttttacatgaaactatgttcagaacggtcatttggaactgaaggaattcccacttggaacacaaggtgaatcgcct

SEQ ID NO: 222021 - DNA, 2239 bp, Zea Mays
cctagcctgaagaacagtagaactcagactcgagcgctccaaagcgagccaccgccgatctgctcctccctcttgaccctcctccgtgcgctgcgcaggcatgaggcgcctcctcggcggctccctcgtcctttgtatcgccgcggtggtggagtccaagccgcctctcgactctctgggcataccaccgcaagatgaggcgtactacataggcggcgtgatcaaatgcagggacggatcgggcaggttttccagggaccagctcaacgacgacttctgcgactgccccgacggcaccgacgagcccgggacatctgcatgccctgaggcgaaattctactgcaagaatgcaggccacactccagtcacgatcttctcgtcacgagtgaatgacggcatttgtgattgctgtgatgggagtgatgaatatgacagcaatgtcacctgtaagaacacttgctgggaggctggaaaggtggcaagggagaaattgaagaagaaaattgctacatacgaaaatggtgttgttattcggaaacaggaagttgaaagggcaaaagaggcttttgctaaagatgaagcagatttagcaaaattgaagggcgaagagaaaatgctccaaggacttgttgataaactcaaagagcaaaagaaattaatagagaatgcagaggaagaagagcgtttaagaaaagagaaggaagaaaagagaacaaaagaagaagatgaaaagcaagctgctgttgaaaagggagcgcttgatgcctctcgggatgtagattctaaggaaattcatgatcatctgcaagaaggtgaaaacaagcatgatggacatgcaacaggccatgataatcatgtaacagaaagcagggcatctattgagcagcatggttctgtaagcaaagatggtattagcgttgaaggtggaactgtagatgaattgccgcaggagtctgcagcacctaccatagagaagggaagagttaggtcgtatggtggcttctcgttggactggggaaagtgtaactgaggttagtaaagatgataagaaggggcatgaagatcagcaagaaataccagaacctgcagaggaagcacttgaagatgaattagaaattccagaacctgccgaagaaaattatggtggttatcattcagaagttgaggatgataggcgtaaatatgaagatgaagagttttatcatgagtcagaagatgaatatgttgacgaccatgatgagcatgttgagtcctacaaatctgatgatgaccaaaaagatttaactgagccaggacatgcatcgtggttggacaaagttcagcagactgtacaaaatgttttccaaaaattcaactcttttaagacccctgtagatttgtcagaggcttctcatgttcgtaaggagtatgatgatgctagctcaaagctttcaaaaattcagtctaagatatccagtctagctgagaagctaaaacatgattttggtaatgacaaggagttctattccttttatgatcagtgttttgagaccaaggaagggaagtatacttacaaggtctgtgcatataagaaagcatcacaggctgaagggcacagttctaccaacctggggcggtgggacaaatttgaagattcgtacagagtgatgcacttttcaagtggagacaaatgctggaatggtcctgaccgaagcctaaaggttaggcttagatgtgggctgagcaatgagcttaatgatgtagatgagcctagcagatgcgagtatgtggctgtattgtcgacccctgcagtttgcgtagaggagaagctgaaggagctgcaaaacaaactggacgccatgtctttgaagcagcccgggcatgacgaactttaaaaactttagaatattccagcgtgaacataaagaagatgtcaccaggaggcatagctctgacagttacatccataacatgataggcatggaagtcaatgaggtatatggacagaaacgggccaagcgcgagaaatgagaatgtagagtttaggtcgcctaccaggctatattagctcgcatagaacattttttttagctgaaatttgatgttgcaattttccagactcatctgatggaatatatagtaagaaacagtacaccttgaatcagcatatactttacccagggtttttacatgaaactatgttcagaacggtcatttggaactgaaggaattcccacttggaacacaaggtgaatcgcct

SEQ ID NO: 222022 - DNA, 834 bp, Zea Mays
gtttagcatcaattcatcagctagaagttcgaaatgggggtcaagtttttagtccttctcggtgttgtcctggcctctcttgtcttccaggacgtggcatttgctagagagctcactgaggccaataatgggatgagggaaagaacatgaaacaaggaggaatgactgaattaaaggatgagaaatggggaggtggatataatggaggatatggatatggaggtgggtatggtggtggatatggaaaaccgggctatggtggtggatatggtggaggatacaggcccaaatatggcaggggctacaggtccggatatggatacggtggcgggtatggtggaggatacggtggcggttatggtgggggatatggtggcggtggtggctatggagaaggtggaggctttggaggtgggcatggtggtggtcgctatcctggtggtggagggcaccatggtggtggagggcaccatggtggatggaattaagaagcattgctacataaagtttctctatgtccgataacaataaatggcgacgataaatttgaatgctacatgtagttccgtgatggaaatcttatgtattttgtataaaacatggtacatggactgttacgtatgttgcatgaaatactgtactagaataagatctttgtatgccatgtatggtattagtgtgcatgtgtctggcttttgaaaggtgtacctcgtcatttatggacttatatgtatgtatagataaaaataatatttttatcaaggcttgagtcaaagggcgatgtatggatgaactcatggttcttccatcgttgtgtttttatttcattttcac

SEQ ID NO: 222023 - DNA, 1339 bp, Zea Mays
cccgcggtacgtgccctccttctcgcgctcctaaacaatcgcccgacatcctccccttccattctaggctccgtgtctcgctgtccccactacgtctcctccggctccatctcatcccgctgccgctccttctcatcgtcgtcgtcccagtcccggagtcgctcccctcctctggctaagcgcaggtcaagctacattccgtgctattcaaaggccccaaggatgacggtaagatttgcaactccctgtctgtctgggtctgtgagctaacggacttgtgccaaattgttagtttatatgttcaaagtagatagaagtactactttcctatgagttagtttcagcaacaaggatgtggaagtaaaccaactgctgctctaacggttacatgcagaattgcagaccatgagttcaaccccatcttttcacatggcactcatcagactctttatggaatagttaacattagtgttattaagaacaaaagttagattcataattaagtgagtctataattttgatgtccatataaaggagcactcatgtactagcgttgaatagatatttagctgaaatgcatatttatgtaataaatgtcagcaatggcaatgactatctaccaatggacatcgtggagctatcttccgatcatttgatagagaataaacctttgctgctaaaggatgtcaagttctaaaacgtacacgggcttaccagtgcttatggacctttgtttgttcgggacactacctttgctaatggggaacaggtaagcggtaggctatatatcttgtttctcttttgaaataatgcaaaatactcttacatctttacataagctttaatgttgattgttgcagatttttttggtccagggttaattatattttattttgttaatataattagaaatgatcacaataagggagctacatttgagttatttgagttgtagggtgcgttcaggagactatagggtcgtgggtgtaagatatggtttagagaatgtgtctactggaacatcctttgtaccaattccctgtatacatctatctatcgttaaaacaccttctattggaacatattttcactatacatacacttatgagtaaggtatttagctcaaatttatctatacaatatccttttgtattcctaaatagcctgccgaaagaagaagatagccacaattatgcatgaaagctccgtttctacgattgtataccgtcacaacgtacgggtattggactagtttgtatagaaaagagagaagggaaaatctgaattttcttgcctctacatgtccatctccaacaaagcaacaactacaacccaaaaa

SEQ ID NO: 222024 - DNA, 859 bp, Zea Mays
cccgcggtacgtgccctccttctcgcgctcctaaacaatcgcccgacatcctccccttccattctaggctccgtgtctcgctgtccccactacgtctcctccggctccatctcatcccgctgccgctccttctcatcgtcgtcgtcccagtcccggagtcgctcccctcctctggctaagcgcaggtcaagctacattccgtgctattcaaaggccccaaggatgacggcttaccagtgcttatggacctttgtttgttcgggacactacctttgctaatggggaacaggtaagcggtaggctatatatcttgtttctcttttgaaataatgcaaaatactcttacatctttacataagctttaatgttgattgttgcagatttttttggtccagggttaattatattttattttgttaatataattagaaatgatcacaataagggagctacatttgagttatttgagttgtagggtgcgttcaggagactatagggtcgtgggtgtaagatatggtttagagaatgtgtctactggaacatcctttgtaccaattccctgtatacatctatctatcgttaaaacaccttctattggaacatattttcactatacatacacttatgagtaaggtatttagctcaaatttatctatacaatatccttttgtattcctaaatagcctgccgaaagaagaagatagccacaattatgcatgaaagctccgtttctacgattgtataccgtcacaacgtacgggtattggactagtttgtatagaaaagagagaagggaaaatctgaattttcttgcctctacatgtccatctccaacaaagcaacaactacaacccaaaaa

SEQ ID NO: 222025 - DNA, 1817 bp, Zea Mays
cccgcggtacgtgccctccttctcgcgctcctaaacaatcgcccgacatcctccccttccattctaggctccgtgtctcgctgtccccactacgtctcctccggctccatctcatcccgctgccgctccttctcatcgtcgtcgtcccagtcccggagtcgctcccctcctctggctaagcgcaggtcaagctacattccgtgctattcaaaggccccaaggatgacgcaatggcaatgactatctaccaatggacatcgtggagctatcttccgatcatttgatagagaataaacctttgctgctaaaggatgtcaagttctaaaacgtacacgggcttaccagtgcttatggacctttgtttgttcgggacactacctttgctaatggggaacaggtaagcggtaggctatatatcttgtttctcttttgaaataatgcaaaatactcttacatctttacataagctttaatgttgattgttgcagatttttttggtccagggttaattatattttattttgttaatataattagaaatgatcacaataagggagctacatttgagttatttgagttgtagggtgcgttcaggagactatagggtcgtgggtgtaagatatggtttagagaatgtgtctactggaacatcctttgtaccaattccctgtatacatctatctatcgttaaaacaccttctattggaacatattttcactatacatacacttatgagtaaggtatttagctcaaatttatctatacaatatccttttgtattcctaaatagcctgccgaaagaagaagatagccacaattatgcatgaaagctccgtttctacgattgtataccgtcacaacgtacgggtattggactagtttgtatagaaaagagagaagggaaaatctgaattttcttgcctctacatgtccatctccaacaaagcaacaactacaacccaaaaataatgtattatatatatatatttaaaactgctacttttagctacctctacagatctgctaaaaatgcttgaatgaaggcattattagtctataattttttagatagccaacatctgctaaatcctatgtattcgacattgtgtgtcctaatctccccttataaaaaataactgcatgactgcattctcaatgtaacactttttttttacagataaatttcaattactatacttatagaaaataaacaaggtccaacgttgtttgctttccatttcccttctactttgatattatgtgatttggtttattcatattactgtccatagcatatttgttgtggacacagttataaattcgttttctcgacactgcacaggcaaggggaaaatcttcttatagatctgttccgtcactgtgacaatcatttgggagagaaacaaaaaactccatctggaagtgcacgacagccactacagttgactaacgatgtaaccaagatgatgcaaaagcatcagctagaaacgccacagttccatcagacccgattttccgttttacagaatgtaccgaggagcacagagaaatgtcatttccatccttaagacaaacaagaactacaggctgcttccgtcttcacccaatcagggatgaggatgccaagttcaagctctgcaacaggaggtctgttcagtttgacgtcggcaacatggtcatggtgaccggcgggaggaacactgggcgtgtaggagtgatcaagaactgggagaagcacaagggcatcttcgaggaaaacatagaatggaattcaaatttggtggtcgtaaaagtgtggagacttgaattcaaataa

SEQ ID NO: 222026 - DNA, 811 bp, Zea Mays
ccaccccctaaaaaggcttcaccccctaggtcaagctacattccgtgctattcaaaggccccaaggatgacgcaatggcaatgactatctaccaatggacatcgtggagctatcttccgatcatttgatagagaataaacctttgctgctaaaggatgtcaagttctaaaacgtacacgggcttaccagtgcttatggacctttgtttgttcgggacactacctttgctaatggggaacaggtaagcggtaggctatatatcttgtttctcttttgaaataatgcaaaatactcttacatctttacataagctttaatgttgattgttgcagatttttttggtccagggttaattatattttattttgttaatataattagaaatgatcacaataagggagctacatttgagttatttgagttgtagggtgcgttcaggagactatagggtcgtgggtgtaagatatggtttagagaatgtgtctactggaacatcctttgtaccaattccctgtatacatctatctatcgttaaaacaccttctattggaacatattttcactatacatacacttatgagtaaggtatttagctcaaatttatctatacaatatccttttgtattcctaaatagcctgccgaaagaagaagatagccacaattatgcatgaaagctccgtttctacgattgtataccgtcacaacgtacgggtattggactagtttgtatagaaaagagagaagggaaaatctgaattttcttgcctctacatgtccatctccaacaaagcaacaactacaacccaaaaa

SEQ ID NO: 222027 - DNA, 888 bp, Zea Mays
ccaccccctaaaaaggcttcaccccctaggtttgagggatgccgaggggttgtacctcgccagcgattcgaacaagcggctattgatctacttcccctttatgcaggtcaagctacattccgtgctattcaaaggccccaaggatgacgcaatggcaatgactatctaccaatggacatcgtggagctatcttccgatcatttgatagagaataaacctttgctgctaaaggatgtcaagttctaaaacgtacacgggcttaccagtgcttatggacctttgtttgttcgggacactacctttgctaatggggaacaggtaagcggtaggctatatatcttgtttctcttttgaaataatgcaaaatactcttacatctttacataagctttaatgttgattgttgcagatttttttggtccagggttaattatattttattttgttaatataattagaaatgatcacaataagggagctacatttgagttatttgagttgtagggtgcgttcaggagactatagggtcgtgggtgtaagatatggtttagagaatgtgtctactggaacatcctttgtaccaattccctgtatacatctatctatcgttaaaacaccttctattggaacatattttcactatacatacacttatgagtaaggtatttagctcaaatttatctatacaatatccttttgtattcctaaatagcctgccgaaagaagaagatagccacaattatgcatgaaagctccgtttctacgattgtataccgtcacaacgtacgggtattggactagtttgtatagaaaagagagaagggaaaatctgaattttcttgcctctacatgtccatctccaacaaagcaacaactacaacccaaaaa

SEQ ID NO: 222028 - DNA, 607 bp, Zea Mays
ccaccccctaaaaaggcttcaccccctaggtcaagctacattccgtgctattcaaaggccccaaggatgacggcttaccagtgcttatggacctttgtttgttcgggacactacctttgctaatggggaacaggcaaggggaaaatcttcttatagatctgttccgtcactgtgacaatcatttgggagagaaacaaaaaactccatctggaagtgcacgacagccactacagttgactaacgatgtaaccaagatgatgcaaaagcatcagctagaaacgccacagttccatcagacccgattttccgttttacagaatgtaccgaggagcacagagaaatgtcatttccatccttaagacaaacaagaactacaggctgcttccgtcttcacccaatcagggatgaggatgccaagttcaagctctgcaacaggaggtctgttcagtttgacgtcggcaacatggtcatggtgaccggcgggaggaacactgggcgtgtaggagtgatcaagaactgggagaagcacaagggcatcttcgaggaaaacatagaatggaattcaaatttggtggtcgtaaaagtgtggagacttgaattcaaataa

SEQ ID NO: 222029 - DNA, 1591 bp, Zea Mays
ccaccccctaaaaaggcttcaccccctaggtatataaaagttttcatacaaattgcatatgttactctggctatgtttattgataattatgtatatctataagcgtgttgtttcacttgtaatttgactatcattgttatctcatatatatatgaagtgattttagtttgtcaaataggatattgtatatgggctaatggtacaaaggatctttaaaattctctactatattaaagtaccagttttaacaatttataaaaaaacccttacacttctttaaattctaacccgcggtacgttgcccccttctcgcgctcccaaacaatcgtccagcctcctccccttccattctcctccccacgccgccatccgctccgctccaaccacgcttatagcttatatccctcaccggttgttattcctctccctagataagctttatctcaccaaactaatctcgctataaacaaggacccaatttcatccagtaatcccgctataaacaaggacccgatttcatcctttgcgagtaagaagcaaaaaaccaaggtgggcgaggacgcgaagaagcaagggagaaggacagagcgggaggaggatgctgcctgctgctttccctgctccttgacacgaaggccgccctggatggtggatccgaggggttccatggcctgccccatggcgtcaaggcgacatgctacgccgaggtggaggccgggttgaacgccgtataccggcagtgccggagccttgaccgctccttggggccgctagagatccgcatggtgtccctcgacgccgcgactacaacatcaccatgtccggcgccagcgcgcaagaggagttgtccatgtggcatcatctctggctccgccactctggtttgagggatgccgaggggttgtacctcgccagcgattcgaacaagcggctattgatctacttcccctttatgcaggtcaagctacattccgtgctattcaaaggccccaaggatgacggcttaccagtgcttatggacctttgtttgttcgggacactacctttgctaatggggaacaggcaaggggaaaatcttcttatagatctgttccgtcactgtgacaatcatttgggagagaaacaaaaaactccatctggaagtgcacgacagccactacagttgactaacgatgtaaccaagatgatgcaaaagcatcagctagaaacgccacagttccatcagacccgattttccgttttacagaatgtaccgaggagcacagagaaagatgtctcctttttaattcctcattcttggctgcctgctatgttagatgatcagatgtcatttccatccttaagacaaacaagaactacaggctgcttccgtcttcacccaatcagggatgaggatgccaagttcaagctctgcaacaggaggtctgttcagtttgacgtcggcaacatggtcatggtgaccggcgggaggaacactgggcgtgtaggagtgatcaagaactgggagaagcacaagggcatcttcgaggaaaacatagaatggaattcaaatttggtggtcgtaaaagtgtggagacttgaattcaaataa

SEQ ID NO: 222030 - DNA, 1739 bp, Zea Mays
caccccctaaaaaggcttcaccccctaggtatataaaagttttcatacaaattgcatatgttactctggctatgtttattgataattatgtatatctataagcgtgttgtttcacttgtaatttgactatcattgttatctcatatatatatgaagtgattttagtttgtcaaataggatattgtatatgggctaatggtacaaaggatctttaaaattctctactatattaaagtaccagttttaacaatttataaaaaaacccttacacttctttaaattctaacccgcggtacgttgcccccttctcgcgctcccaaacaatcgtccagcctcctccccttccattctcctccccacgccgccatccgctccgctccaaccacgcttatagcttatatccctcaccggttgttattcctctccctagataagctttatctcaccaaactaatctcgctataaacaaggacccaatttcatccagtaatcccgctataaacaaggacccgatttcatcctttgcgagtaagaagcaaaaaaccaaggtgggcgaggacgcgaagaagcaagggagaaggacagagcgggaggaggatgctgcctgctgctttccctgctccttgacacgaaggccgccctggatggtggatccgaggggttccatggcctgccccatggcgtcaaggcgacatgctacgccgaggtggaggccgggttgaacgccgtataccggcagtgccggagccttgaccgctccttggggccgctagagatccgcatggtgtccctcgacgccgcgactacaacatcaccatgtccggcgccagcgcgcaagaggagttgtccatgtggcatcatctctggctccgccactctggtttgagggatgccgaggggttgtacctcgccagcgattcgaacaagcggctattgatctacttcccctttatgcaggtcaagctacattccgtgctattcaaaggccccaaggatgacgcaatggcaatgactatctaccaatggacatcgtggagctatcttccgatcatttgatagagaataaacctttgctgctaaaggatgtcaagttctaaaacgtacacgggcttaccagtgcttatggacctttgtttgttcgggacactacctttgctaatggggaacaggtaagcggtaggctatatatcttgtttctcttttgaaataatgcaaaatactcttacatctttacataagctttaatgttgattgttgcagatttttttggtccagggttaattatattttattttgttaatataattagaaatgatcacaataagggagctacatttgagttatttgagttgtagggtgcgttcaggagactatagggtcgtgggtgtaagatatggtttagagaatgtgtctactggaacatcctttgtaccaattccctgtatacatctatctatcgttaaaacaccttctattggaacatattttcactatacatacacttatgagtaaggtatttagctcaaatttatctatacaatatccttttgtattcctaaatagcctgccgaaagaagaagatagccacaattatgcatgaaagctccgtttctacgattgtataccgtcacaacgtacgggtattggactagtttgtatagaaaagagagaagggaaaatctgaattttcttgcctctacatgtccatctccaacaaagcaacaactacaacccaaaaa

SEQ ID NO: 222031 - DNA, 1540 bp, Zea Mays
caccccctaaaaaggcttcaccccctaggtatataaaagttttcatacaaattgcatatgttactctggctatgtttattgataattatgtatatctataagcgtgttgtttcacttgtaatttgactatcattgttatctcatatatatatgaagtgattttagtttgtcaaataggatattgtatatgggctaatggtacaaaggatctttaaaattctctactatattaaagtaccagttttaacaatttataaaaaaacccttacacttctttaaattctaacccgcggtacgttgcccccttctcgcgctcccaaacaatcgtccagcctcctccccttccattctcctccccacgccgccatccgctccgctccaaccacgcttatagcttatatccctcaccggttgttattcctctccctagataagctttatctcaccaaactaatctcgctataaacaaggacccaatttcatccagtaatcccgctataaacaaggacccgatttcatcctttgcgagtaagaagcaaaaaaccaaggtgggcgaggacgcgaagaagcaagggagaaggacagagcgggaggaggatgctgcctgctgctttccctgctccttgacacgaaggccgccctggatggtggatccgaggggttccatggcctgccccatggcgtcaaggcgacatgctacgccgaggtggaggccgggttgaacgccgtataccggcagtgccggagccttgaccgctccttggggccgctagagatccgcatggtgtccctcgacgccgcgactacaacatcaccatgtccggcgccagcgcgcaagaggagttgtccatgtggcatcatctctggctccgccactctggtttgagggatgccgaggggttgtacctcgccagcgattcgaacaagcggctattgatctacttcccctttatgcaggtcaagctacattccgtgctattcaaaggccccaaggatgacggcttaccagtgcttatggacctttgtttgttcgggacactacctttgctaatggggaacagatttttttggtccagggttaattatattttattttgttaatataattagaaatgatcacaataagggagctacatttgagttatttgagttgtagggtgcgttcaggagactatagggtcgtgggtgtaagatatggtttagagaatgtgtctactggaacatcctttgtaccaattccctgtatacatctatctatcgttaaaacaccttctattggaacatattttcactatacatacacttatgagtaaggtatttagctcaaatttatctatacaatatccttttgtattcctaaatagcctgccgaaagaagaagatagccacaattatgcatgaaagctccgtttctacgattgtataccgtcacaacgtacgggtattggactagtttgtatagaaaagagagaagggaaaatctgaattttcttgcctctacatgtccatctccaacaaagcaacaactacaacccaaaaa

SEQ ID NO: 222032 - DNA, 1227 bp, Zea Mays
caccccctaaaaaggcttcaccccctaggtatataaaagttttcatacaaattgcatatgttactctggctatgtttattgataattatgtatatctataagcgtgttgtttcacttgtaatttgactatcattgttatctcatatatatatgaagtgattttagtttgtcaaataggatattgtatatgggctaatggtacaaaggatctttaaaattctctactatattaaagtaccagttttaacaatttataaaaaaacccttacacttctttaaattctaacccgcggtacgttgcccccttctcgcgctcccaaacaatcgtccagcctcctccccttccattctcctccccacgccgccatccgctccgctccaaccacgcttatagcttatatccctcaccggttgttattcctctccctagataagctttatctcaccaaactaatctcgctataaacaaggacccaatttcatccagtaatcccgctataaacaaggacccgatttcatcctttgcgagtaagaagcaaaaaaccaaggtgggcgaggacgcgaagaagcaagggagaaggacagagcgggaggaggatgctgcctgctgctttccctgctccttgacacgaaggccgccctggatggtggatccgaggggttccatggcctgccccatggcgtcaaggcgacatgctacgccgaggtggaggccgggttgaacgccgtataccggcagtgccggagccttgaccgctccttggggccgctagagatccgcatggtgtccctcgacgccgcgactacaacatcaccatgtccggcgccagcgcgcaagaggagttgtccatgtggcatcatctctggctccgccactctggtttgagggatgccgaggggttgtacctcgccagcgattcgaacaagcggctattgatctacttcccctttatgcaggtcaagctacattccgtgctattcaaaggccccaaggatgacgcaatggcaatgactatctaccaatggacatcgtggagctatcttccgatcatttgatagagaataaacctttgctgctaaaggatgtcaagttctaaaacgtacacgggcttaccagtgcttatggacctttgtttgttcgggacactacctttgctaatggggaacagcatatttgttgtggacacagttataaattcgttttctcgacactgcacaggcaagggg

SEQ ID NO: 222033 - DNA, 3037 bp, Zea Mays
caccccctaaaaaggcttcaccccctaggtatataaaagttttcatacaaattgcatatgttactctggctatgtttattgataattatgtatatctataagcgtgttgtttcacttgtaatttgactatcattgttatctcatatatatatgaagtgattttagtttgtcaaataggatattgtatatgggctaatggtacaaaggatctttaaaattctctactatattaaagtaccagttttaacaatttataaaaaaacccttacacttctttaaattctaacccgcggtacgttgcccccttctcgcgctcccaaacaatcgtccagcctcctccccttccattctcctccccacgccgccatccgctccgctccaaccacgcttatagcttatatccctcaccggttgttattcctctccctagataagctttatctcaccaaactaatctcgctataaacaaggacccaatttcatccagtaatcccgctataaacaaggacccgatttcatcctttgcgagtaagaagcaaaaaaccaaggtgggcgaggacgcgaagaagcaagggagaaggacagagcgggaggaggatgctgcctgctgctttccctgctccttgacacgaaggccgccctggatggtggatccgaggggttccatggcctgccccatggcgtcaaggcgacatgctacgccgaggtggaggccgggttgaacgccgtataccggcagtgccggagccttgaccgctccttggggccgctagagatccgcatggtgtccctcgacgccgcgactacaacatcaccatgtccggcgccagcgcgcaagaggagttgtccatgtggcatcatctctggctccgccactctggtttgagggatgccgaggggttgtacctcgccagcgattcgaacaagcggctattgatctacttcccctttatgcaggtcaagctacattccgtgctattcaaaggccccaaggatgacggtaagatttgcaactccctgtctgtctgggtctgtgagctaacggacttgtgccaaattgttagtttatatgttcaaagtagatagaagtactactttcctatgagttagtttcagcaacaaggatgtggaagtaaaccaactgctgctctaacggttacatgcagaattgcagaccatgagttcaaccccatcttttcacatggcactcatcagactctttatggaatagttaacattagtgttattaagaacaaaagttagattcataattaagtgagtctataattttgatgtccatataaaggagcactcatgtactagcgttgaatagatatttagctgaaatgcatatttatgtaataaatgtcagcaatggcaatgactatctaccaatggacatcgtggagctatcttccgatcatttgatagagaataaacctttgctgctaaaggatgtcaagttctaaaacgtacacgggcttaccagtgcttatggacctttgtttgttcgggacactacctttgctaatggggaacaggtaagcggtaggctatatatcttgtttctcttttgaaataatgcaaaatactcttacatctttacataagctttaatgttgattgttgcagatttttttggtccagggttaattatattttattttgttaatataattagaaatgatcacaataagggagctacatttgagttatttgagttgtagggtgcgttcaggagactatagggtcgtgggtgtaagatatggtttagagaatgtgtctactggaacatcctttgtaccaattccctgtatacatctatctatcgttaaaacaccttctattggaacatattttcactatacatacacttatgagtaaggtatttagctcaaatttatctatacaatatccttttgtattcctaaatagcctgccgaaagaagaagatagccacaattatgcatgaaagctccgtttctacgattgtataccgtcacaacgtacgggtattggactagtttgtatagaaaagagagaagggaaaatctgaattttcttgcctctacatgtccatctccaacaaagcaacaactacaacccaaaaataatgtattatatatatatatttaaaactgctacttttagctacctctacagatctgctaaaaatgcttgaatgaaggcattattagtctataattttttagatagccaacatctgctaaatcctatgtattcgacattgtgtgtcctaatctccccttataaaaaataactgcatgactgcattctcaatgtaacactttttttttacagataaatttcaattactatacttatagaaaataaacaaggtccaacgttgtttgctttccatttcccttctactttgatattatgtgatttggtttattcatattactgtccatagcatatttgttgtggacacagttataaattcgttttctcgacactgcacaggcaaggggaaaatcttcttatagatctgttccgtcactgtgacaatcatttgggagagaaacaagtaaacaacccttttttccataaaactccatctggaagtgcacgacagccactacagttgactaacgatgtaaccaagatgatgcaaaagcatcagctagaaacgccacagttccatcagacccgattttccgttttacagaatgtaccgaggagcacagagaaagatgtctcctttttaattcctcattcttggctgcctgctatgttagatgatcagatgtcatttccatccttaagacaaacaagaactacaggctgcttccgtcttcacccaatcagggatgaggatgccaagttcaagctctgcaacaggaggtctgttcagtttgacgtcggcaacatggtcatggtgaccggcgggaggaacactgggcgtgtaggagtgatcaagaactgggagaagcacaagggcatcttcgaggaaaacatagaatggaattcaaatttggtggtcgtaaaagtgtggagacttgaattcaaataa

SEQ ID NO: 222034 - DNA, 2982 bp, Zea Mays
caccccctaaaaaggcttcaccccctaggtatataaaagttttcatacaaattgcatatgttactctggctatgtttattgataattatgtatatctataagcgtgttgtttcacttgtaatttgactatcattgttatctcatatatatatgaagtgattttagtttgtcaaataggatattgtatatgggctaatggtacaaaggatctttaaaattctctactatattaaagtaccagttttaacaatttataaaaaaacccttacacttctttaaattctaacccgcggtacgttgcccccttctcgcgctcccaaacaatcgtccagcctcctccccttccattctcctccccacgccgccatccgctccgctccaaccacgcttatagcttatatccctcaccggttgttattcctctccctagataagctttatctcaccaaactaatctcgctataaacaaggacccaatttcatccagtaatcccgctataaacaaggacccgatttcatcctttgcgagtaagaagcaaaaaaccaaggtgggcgaggacgcgaagaagcaagggagaaggacagagcgggaggaggatgctgcctgctgctttccctgctccttgacacgaaggccgccctggatggtggatccgaggggttccatggcctgccccatggcgtcaaggcgacatgctacgccgaggtggaggccgggttgaacgccgtataccggcagtgccggagccttgaccgctccttggggccgctagagatccgcatggtgtccctcgacgccgcgactacaacatcaccatgtccggcgccagcgcgcaagaggagttgtccatgtggcatcatctctggctccgccactctggtttgagggatgccgaggggttgtacctcgccagcgattcgaacaagcggctattgatctacttcccctttatgcaggtcaagctacattccgtgctattcaaaggccccaaggatgacggtaagatttgcaactccctgtctgtctgggtctgtgagctaacggacttgtgccaaattgttagtttatatgttcaaagtagatagaagtactactttcctatgagttagtttcagcaacaaggatgtggaagtaaaccaactgctgctctaacggttacatgcagaattgcagaccatgagttcaaccccatcttttcacatggcactcatcagactctttatggaatagttaacattagtgttattaagaacaaaagttagattcataattaagtgagtctataattttgatgtccatataaaggagcactcatgtactagcgttgaatagatatttagctgaaatgcatatttatgtaataaatgtcagcaatggcaatgactatctaccaatggacatcgtggagctatcttccgatcatttgatagagaataaacctttgctgctaaaggatgtcaagttctaaaacgtacacgggcttaccagtgcttatggacctttgtttgttcgggacactacctttgctaatggggaacaggtaagcggtaggctatatatcttgtttctcttttgaaataatgcaaaatactcttacatctttacataagctttaatgttgattgttgcagatttttttggtccagggttaattatattttattttgttaatataattagaaatgatcacaataagggagctacatttgagttatttgagttgtagggtgcgttcaggagactatagggtcgtgggtgtaagatatggtttagagaatgtgtctactggaacatcctttgtaccaattccctgtatacatctatctatcgttaaaacaccttctattggaacatattttcactatacatacacttatgagtaaggtatttagctcaaatttatctatacaatatccttttgtattcctaaatagcctgccgaaagaagaagatagccacaattatgcatgaaagctccgtttctacgattgtataccgtcacaacgtacgggtattggactagtttgtatagaaaagagagaagggaaaatctgaattttcttgcctctacatgtccatctccaacaaagcaacaactacaacccaaaaataatgtattatatatatatatttaaaactgctacttttagctacctctacagatctgctaaaaatgcttgaatgaaggcattattagtctataattttttagatagccaacatctgctaaatcctatgtattcgacattgtgtgtcctaatctccccttataaaaaataactgcatgactgcattctcaatgtaacactttttttttacagataaatttcaattactatacttatagaaaataaacaaggtccaacgttgtttgctttccatttcccttctactttgatattatgtgatttggtttattcatattactgtccatagcatatttgttgtggacacagttataaattcgttttctcgacactgcacaggcaaggggaaaatcttcttatagatctgttccgtcactgtgacaatcatttgggagagaaacaagtaaacaacccttttttccataaaactccatctggaagtgcacgacagccactacagttgactaacgatgtaaccaagatgatgcaaaagcatcagctagaaacgccacagttccatcagacccgattttccgttttacagaatgtaccgaggagcacagagaaatgtcatttccatccttaagacaaacaagaactacaggctgcttccgtcttcacccaatcagggatgaggatgccaagttcaagctctgcaacaggaggtctgttcagtttgacgtcggcaacatggtcatggtgaccggcgggaggaacactgggcgtgtaggagtgatcaagaactgggagaagcacaagggcatcttcgaggaaaacatagaatggaattcaaatttggtggtcgtaaaagtgtggagacttgaattcaaataa

SEQ ID NO: 222035 - DNA, 1177 bp, Zea Mays
cctaaaaaggcttcaccccctaggtcaagctacattccgtgctattcaaaggccccaaggatgacggtaagatttgcaactccctgtctgtctgggtctgtgagctaacggacttgtgccaaattgttagtttatatgttcaaagtagatagaagtactactttcctatgagttagtttcagcaacaaggatgtggaagtaaaccaactgctgctctaacggttacatgcagaattgcagaccatgagttcaaccccatcttttcacatggcactcatcagactctttatggaatagttaacattagtgttattaagaacaaaagttagattcataattaagtgagtctataattttgatgtccatataaaggagcactcatgtactagcgttgaatagatatttagctgaaatgcatatttatgtaataaatgtcagcaatggcaatgactatctaccaatggacatcgtggagctatcttccgatcatttgatagagaataaacctttgctgctaaaggatgtcaagttctaaaacgtacacgggcttaccagtgcttatggacctttgtttgttcgggacactacctttgctaatggggaacaggtaagcggtaggctatatatcttgtttctcttttgaaataatgcaaaatactcttacatctttacataagctttaatgttgattgttgcagatttttttggtccagggttaattatattttattttgttaatataattagaaatgatcacaataagggagctacatttgagttatttgagttgtagggtgcgttcaggagactatagggtcgtgggtgtaagatatggtttagagaatgtgtctactggaacatcctttgtaccaattccctgtatacatctatctatcgttaaaacaccttctattggaacatattttcactatacatacacttatgagtaaggtatttagctcaaatttatctatacaatatccttttgtattcctaaatagcctgccgaaagaagaagatagccacaattatgcatgaaagctccgtttctacgattgtataccgtcacaacgtacgggtattggactagtttgtatagaaaagagagaagggaaaatctgaattttcttgcctctacatgtccatctccaacaaagcaacaactacaacccaaaaa

SEQ ID NO: 222036 - DNA, 682 bp, Zea Mays
cgtactgaggtcgataataaggccggggctgcgcagatccggggctgctgctcggaggaaaaagtgcacacgcggcggtgagcagcaggtccacagcgaggtcggagaggcagccaacgttgaggaagatcgagccactggcatggatctcggcgtctggtgtggggatgtttcctgccgctgccgtggggaaccatggaaaggaggaacagggggcatgatctcccgttctggcttttcgtcgagcacatggggagcatcgctctgggcttttcttcttcttccatgtaacctccctgggcgcgacgcaaggatcggacagcacgcgaggctgacggggtctccacaacgacggaagagaggttgtggccgtggtgatgacgaggtcgacggagagtatggcgaggacctaggacgtccatggagggaggtgctgctgtttcctacgccatgggagaggtcggctagggcaaccataggaagtagcaagggaaggggtgtgtccagggagatggctcggtcaccagcagagaggggctgggcgagctcctgcagaggggagtacgccgagcagggggagccgccatgggcgaggtcaccatgggaggaggtgagggcgcagctggctgccatctatggagagctagagacgttctgtgcatctaacagcagggagggatga

SEQ ID NO: 222037 - DNA, 2168 bp, Zea Mays
ccaagacactgaattctaaatgagccacaagcaactgtatggaggcacacttacataggtggcacatggaggccctgcataaacaacatgacaaatggtttacctgaatcaaatggctacatatacgttgaggcaaatggcggtttaaatcaacaaaggacatcgatatgcaatgcagtcgccattgctggttttctgaatgctactcttatcattccaaattttcatttccatagcatttggagggatcctagcaaattcagtgatatctatgataaagatcactttgtacaacgtctacaaaatgatgttcgagtagttgacaaaattccagattttataatggagcagtttggtcataatctgagcaatgtgttcaatttcaagataaaggcttgggcacgcattcgatattacaacgatgttgttcttccaaaattagttgaagaaagattcatcaggatttctccttttgccaatcgactctcatttgatgcaccttttgctgttcaacggttgagatgcctggcaaactttgaagccttaaaattttctaaaccaattgtatctttgtctgaaaccttaatttctcgaatgagagagagaagtgttgaaagtgatggaaaatatatctcagtgcatcttcgttttgaggaggatatgattgccttctcatgttgtgtatatgatggtggtgatgaggagaagaaggaaatggatgcagccagagaaataggttggagagggaaatttactaagagaggacgtgtaataaggccaggaattattagaatgaatggaaaatgtcctcttacacctttggaggttgggttaatgcttcgtggaatgggtttcagcaataagactgcaatctttttggcatctggaaagatttacaaagcagagaagaacatggcttctcttcttgaaatgtttcctctcctacagacaaaagagacactggcatcagaagaggaacttgctccatttaagaatttctcctcaaggatggctgctgttgactatagtatttgtgcccaaagtgaagtttttgtgaccacacaaggtggaaatttcccgcattttcttatgggtcacaggagatacttgtatggtgggcattcaaaaacaattaaaccagacaaaagaaggcttgctgtactcttggataatccacgtatagggtggaaggcattgaagcggcacttgcttaatatgagagcacacagtgatgccaaggggatcgaaatgaaaagaccaaacgaatctatatataccttcccgtgtcctgactgcatgtgccgcttgaacagaacagaacactcgaaatccaaacagagtagatagtatctcgtagttgcatttccagactaaccctattctttctgacatccagtttagtttgttcattcttcatatgccgtgcggcttttcatcacttcatctgccagcatacttgccagttctcacagcattgaaagcaatctgttctcccaatgtagcggtttttcccttgtattattgtatagcatatgctgctagaatggaaactccagattcctccgtggagtattagaccaatttgtgatgctaagttgctaactacatcaactgactataatcctcaacaacggatctgactccagtaggatactatccattgtcaatgaagtatcaaatggttttgggtggtattactgttgtacatggttcattagcagactgtcatcatgtacaaattttgaatggaagtcagccattgtaaaaaaaaatctcctcttgcccaaaaatgggcattgtttacaatagcctccctgtattcttttagctaggttgtctgttcacaattctaagaatgaaagctgcccagtagaacatgattcttgcttcatcagtatagaggcattgtatctgcttatttgcaatgatgtgtccaaaagctgcttgttgtagataaaaatgtgatgaaccaaaaccgttgaacgcagaatacagatatataagcaagtatcttccccttccaacttcatcctctctttccctgatggtgtgcagcgacggacggacgtgcgacaaaggtggcgcaggcgcgcgacaggggcacgtcccacggcggcgctcggccggtgcgtgtctccgcagcgccgatggcaacgctggtgcgctcg

SEQ ID NO: 222038 - DNA, 225 bp, Zea Mays
cgacgaacagaagaggaggatgaagaaggtggcatcggcagttctgatgaagagaaagaaatgattagagatcagcaggaaaaggctcagctagaaagaaacatgagagaaagagatgcagctaacacaaggaagttgatggagcgacaattatctaaggaagaacaagaggaacttactaggaaatctcaagcaatggacaacaatgacacatctgatctgagg

SEQ ID NO: 222039 - DNA, 678 bp, Zea Mays
cctgtgtggcccagagtggagagcgtgagttgctgcctggaagataaatagtgtgccgtcgctgtgttcttgtaagaagaatttggtgaacaaactcctacctaaataatattccctgccgcctcctatcttcttctgccttcctcctctctaccccttctccacgcttactgttacatccgccgagaatctcagatccgactccgccaccactccaccttgatgcttgcccagccataaatagatggagcccagaaaccgcccttgccatcccgatccacgctgtcgtcaccaagcgtagccattggggagagcgcagaggggcgccaccatggccatgtgtgaggaggtgccccgactgcacctagatcccacctctgactgcaccatgaagctgcgcggggtcgtcggggagttcctagagaaggccgggtcagggtcgccgcgtttgtttttgccgttgctggagaagaacaggtggttcaagaggagccacacaacgaggagttcgattcgatctagatggcgtctcccaattgactttatggcgccaaggatggactttagttcgatctatatttatcttttattttgtaagactttcgctatgtaataaatactctgattatattgtgacatttatctctatacactctgttattatatgtgttgttttct

SEQ ID NO: 222040 - DNA, 1125 bp, Zea Mays
cgcacaccagtcctgctcatggctccccgaaaccgtcgccccagcctccctcccctccccggctcccccgatttcagctgcccccgaactccgtcccctgttgtccctacctcgattctgccgccgcaaacgccgatgtgagtcgtccgatcccacccgcaaacgccgctccccgcctcgaggctcgccggaacggacgcctggataccgcggccgcaacccaccgccgcgcagggaggttgcgcccgcactaaaatggagcacagggaggctttgccccccacaactcggaggacgtgtgcaggccggagggcatgggggaactcgtgttgaggtctatgcatcaacatcttcttcaaggctataagaatgttggggggttgtacaactccatagcttggtgatcacggtggaggactacaacagctcccgcagaaggcctgccagcttgttcgccatggacctcaaccacaacaagctcgatctcttctactgactgctggtgtgcatcagcaccgtcaaccttcatgcatcccctagttcatgtaccggtactttggccgcggcagagtcgacatctgagatatatgaggccttggaattgaggaatggtggatctgattattttgtcaagggtgttcttaagggaggaggacctcaacgtggtgggcatactttgcagggtgcagagatactgtccaaggaaggaatcagtgctgaggtaattccttttgtaaacgttatagtttcactgatcagtgcacgcacccagttacaagtcggattccacgtgcccacgccgtccgcgcaagtttgcatcaaagcgctggggaggatggaatggcagatttgcattaaaccagcgacaccacttcataaccagcaggcaggcaacacactccttcagatcggtgggatgttcgaaaaagataagcccttgtaacctttgtatgcatagtaggcaatccttgtgtagtagaacccagggatgaacattacaatgcccaacatcatgaagaaaattcctgatacaacataaagggccataagtttaggtaaagggagtgaaaatattcatgcataagcactgcatttcatttgaataagtacttaactaaaactgct

SEQ ID NO: 222041 - DNA, 2462 bp, Zea Mays
ccgacggcctccccctccccacccccacgcgcgatgcccttatggccccacactcgcggcatcgcgatgactattgtatccccgccactaacgcagagccttcttcagggctgtcggatctccacagtggctagggaaggtgtccacaatatgcgctcccccctctcctcggcctcggcaccatgcaacaaccgtaatagtgtcagcttcgtggacgaggacgacgacaggcctgccttcggcttcgacggcaacaagaagaagttatgcctcgtcatgggcctccatgacggatcagccaaggttcaaacaggcatatctctgaacaccttgggctctctaggctatgagatggatcatggatggagacggagatggagaaaatatgatcctacggctcacaatcttgacacctccgccatcagcatagaatagcagtgggtcattctaaactaggtgatcagctaaaaatatcccatgataatcattaacgattatatggtaagtaattagcaattcaacatgtctgcatttattttttcctacaaaactaatcacactttggattagcttgatgaaacgagagatactgtcatatccagccaggttgttaatttaacagagagaggggaaccaacaaaggcactccatggggaatggctgtggccagatttgttaatggtgttgcagctgcaagtgtcgtgtggcatctgtcgcgacctagagggctagaggcatagaccaccgtctaattttcaatttaaaacacaaatcaagaccactcttgagttttgcatgattaacatggttaatattgctatataaaaaattaataagatcaatttgcgggaaatgaaatgtaactctttaattcatttacatgtactacataattatcacatgagtattttgtgccatcttgtgataagtctaagcatcatataagttgtggatctttctaattggttgttgatctgtcccctagtaatcatacacatgatttgtttgccactactttttagatgcacaagatcctatgttgtaattgccaatggttaccttctgctttatgttttcctcttgtacttagataatatatgtgctttctgaagtgtcttttgaaactagacacttttccccaataactactctctagtatttatgtctaaccatgatgcaacttaaaacttgtagagtactattgttttttcttactgtcaacaagcacaaatagttagcttaggttctaaactttgtcatttgcaacctgatatttttgtttcccctttgaccattcaatcatgaaactacatggattttctaatatactaactccaaattgaattctctccgagttcgccatctcctctcaactcgagaactggcaatcaccatggagacgagactcttcctcgccctccagtgttgtgcagtgcgccaccatgcagcagaagaagagcaacaacatgtgggtctgcatggtgtgcaaccagtgttagtctgtgctccatgttcacatcgtgccctccgagatccggtcgacagcggctcaaatggacaacggaagcaattttaacaacattttcgaggagctcaccgctatgaagcaatgaagacaacatcacagtttgcttttttaggagcttaaagtatggtgacagaaggattgctactcagtatttaaagtgtggatgtatagttgaaagacattttgaagatggagacagtgtcctctttaatagatagtgagcctgcttttgtacttgagcacaagcaaggataatgccatggagaacactaagatttgatgagtctccatctaaacccttacaatgctgattttgatggaggtgaaatgaatttgtatgtccctcggatagaggaagctcaccacctagcacaacttcaatagacctctatgtttgttttaaagctattgaaaaaggcccatgaagcctgcattgctcatatcatttccatgcacggaaaagaggatgtgtaagccatcattgccatgtttttgtttatatgagcaattgagcatcatcatgatcagttggagggggtgattcaggctgtaggagggggtgagggacttgaatttctgcaggtatgcacttgttacaaatgttgagctattgaagatggaaacattgtatatttatagatattattgcactggagcaaatctttgtccattggaaaaaggtttgccttattgcggttgacaatcaccagcagcatgtcaccctaatgcttgagcatgggagatgccgtcagagttctaggccactttatcctcatttcctgccgaaaaacctgacctgctttacacctcaacagaagataaactgtatactacgcctcaaaaggaggtgagctgggaggaaatgacaaccatcttttgccttctttcctgcgttggtggtctgaaacaaaggatgcaaacatacttgatgtgt

SEQ ID NO: 222042 - DNA, 2504 bp, Zea Mays
cccccacgcgcgatgcccttatggccccacactcgcggcatcgcgatgactattgtatccccgccactaacgcagagccttcttcagggctgtcggatctccacagtggctagggaaggtgtccacaatatgcgctcccccctctcctcggcctcggcaccatgcaacaaccgtaatagtgtcagcttcgtggacgaggacgacgacaggcctgccttcggcttcgacggcaacaagaagaagttatgcctcgtcatgggcctccatgacggatcagccaaggttcaaacaggcatatctctgaacaccttgggctctctaggctatgagatggatcatggatggagacggagatggagaaaatatgatcctacggctcacaatcttgacacctccgccatcagcatagaatagcagtgggtcattctaaactaggtgatcagctaaaaatatcccatgataatcattaacgattatatggtaagtaattagcaattcaacatgtctgcatttattttttcctacaaaactaatcacactttggattagcttgatgaaacgagagatactgtcatatccagccaggttgttaatttaacagagagaggggaaccaacaaaggcactccatggggaatggctgtggccagatttgttaatggtgttgcagctgcaagtgtcgtgtggcatctgtcgcgacctagagggctagaggcatagaccaccgtctaattttcaatttaaaacacaaatcaagaccactcttgagttttgcatgattaacatggttaatattgctatataaaaaattaataagatcaatttgcgggaaatgaaatgtaactctttaattcatttacatgtactacataattatcacatgagtattttgtgccatcttgtgataagtctaagcatcatataagttgtggatctttctaattggttgttgatctgtcccctagtaatcatacacatgatttgtttgccactactttttagatgcacaagatcctatgttgtaattgccaatggttaccttctgctttatgttttcctcttgtacttagataatatatgtgctttctgaagtgtcttttgaaactagacacttttccccaataactactctctagtatttatgtctaaccatgatgcaacttaaaacttgtagagtactattgttttttcttactgtcaacaagcacaaatagttagcttaggttctaaactttgtcatttgcaacctgatatttttgtttcccctttgaccattcaatcatgaaactacatggattttctaatatactaactccaaattgaattctctccgagttcgccatctcctctcaactcgagaactggcaatcaccatggagacgagactcttcctcgccctccagtgttgtgcagtgcgccaccatgcagaagaagagcaacaacatgtgggtctgcatggtgtgcaaccagtgttagtctgtgctccatgttcacatcgtgccctccgagatccggtcgacagcggctcaaatggacaacggaagcaattttaacaacattttcgaggagctcaccgctatgaaggccagagaaacttattgtgacaaagattgcagtgccacatgtttctatatgatcttctattattgttggtaatagtaaaacaagcaatgaagacaacatcacagtttgcttttttaggagcttaaagtatggtgacagaaggattgctactcagtatttaaagtgtggatgtatagttgaaagacattttgaagatggagacagtgtcctctttaatagatagtgagcctgcttttgtacttgagcacaagcaaggataatgccatggagaacactaagatttgatgagtctccatctaaacccttacaatgctgattttgatggaggtgaaatgaatttgtatgtccctcggatagaggaagctcaccacctagcacaacttcaatagacctctatgtttgttttaaagctattgaaaaaggcccatgaagcctgcattgctcatatcatttccatgcacggaaaagaggatgtgtaagccatcattgccatgtttttgtttatatgagcaattgagcatcatcatgatcagttggagggggtgattcaggctgtaggagggggtgagggacttgaatttctgcaggtatgcacttgttacaaatgttgagctattgaagatggaaacattgtatatttatagatattattgcactggagcaaatctttgtccattggaaaaaggtttgccttattgcggttgacaatcaccagcagcatgtcaccctaatgcttgagcatgggagatgccgtcagagttctaggccactttatcctcatttcctgccgaaaaacctgacctgctttacacctcaacagaagataaactgtatactacgcctcaaaaggaggtgagctgggaggaaatgacaaccatcttttgccttctttcctgcgttggtggtctgaaacaaaggtaa

SEQ ID NO: 222043 - DNA, 665 bp, Zea Mays
agtcttcttcaggcgggtggatctctagcgctccttgagctggagcaggcaggcgtgccggtcttctctaggcatcttctccaggcaggcgtgccggtcttctccaacgcatcttcagcgtctctcgagctggagcaggctctatgctccgatgtactcatccctgctccacaccggctcaactgcatccaggtgggttcgacctttgcttatggtcatggaagaggcgacgatgccaaaactcttgcagagctcggattccaaatcggtgattacttgagcgttgcaatcatgtagacagtgcccgcaccggatgtaattgctgaaatgtcaaaaggtctctggttgcaacagtaaggtgtgattctctgttagcagtagaaactggaaccagaattggtctgtaatactggtagtatcaaatgtcaaaagggctcgggttcctatgaagtcaaacacaggaaagtttgcatcttggagccaaaccaattgggcaaatttttgttcggtacccaattttgtttcgccatttctaaatttagagcattatgcaaaagtgtgaatataggtgcttcacaaacggacacatatctcacgaagtttcatgtcattggactacaactacatggtttgagctacatttcttagttttgtttgttttattc

SEQ ID NO: 222044 - DNA, 626 bp, Zea Mays
agtcttcttcaggcgggtggatctctagcgctccttgagctggagcaggcaggcgtgccggtcttctctaggcatcttctccaggcaggcgtgccggtcttctccaacgcatcttcagcgtctctcgagctggagcaggctctatgctccgatgtgggttcgacctttgcttatggtcatggaagaggcgacgatgccaaaactcttgcagagctcggattccaaatcggtgattacttgagcgttgcaatcatgtagacagtgcccgcaccggatgtaattgctgaaatgtcaaaaggtctctggttgcaacagtaaggtgtgattctctgttagcagtagaaactggaaccagaattggtctgtaatactggtagtatcaaatgtcaaaagggctcgggttcctatgaagtcaaacacaggaaagtttgcatcttggagccaaaccaattgggcaaatttttgttcggtacccaattttgtttcgccatttctaaatttagagcattatgcaaaagtgtgaatataggtgcttcacaaacggacacatatctcacgaagtttcatgtcattggactacaactacatggtttgagctacatttcttagttttgtttgttttattc

SEQ ID NO: 222045 - DNA, 6707 bp, Zea Mays
  misc_feature (6706)..(6707): n is a, c, g, or t
cctgaaccagtcacaaaaatcttctttcagtactccctgctcccgtgacacttatatctcgacgcctaaaacacaaatcagtaccggaataagcttacaggcaaacagcaacaaggcttctaacacaacaaacaaatcaatcgagccgtgtggcctcgctaggcatgtacaactccatttaatacggggtctcttgaggggtctccaagtggtaattgaaaaaaaaatacaagaggcaggctcttcgcgaacagactgtctctacacgactctttatatatattgtatcttaattgtatttatgatctaaaagcttagggatgtagcacgtattatacttggaaaacccgttccaaagtctctgggttgtacatgccctaagtcctagaggaagctcaggccctcacaacaatagttttcatcacttatttcaaagacgtagtaattgaactactgaaggcataagactaaacaaggactgataaccgactcctagataatcttctcccttttatctagctaaaccgactcctagatctactatgtgtcgtctcacccccagtcccccaccctccactccctctccggcctctcagccccacgccggtgtctgctccaagcccggcggccacccaccttccttccctggcgccggggaccactccatccccttctctggctactagtcgatccaaagcccagcgatggagggacgactaccctgcttcctccattgatggttgtcctgtccagcgggatttcttcaaagacgctttgttatctaccaagtctcctgtcttttgccccaacaaaaaagaggatggcgacggttgggtgaaggtggaaagcgaaaaagctcggcggcgacgctctcgtccctcgaagccacctcccagggttgttcctggtgatcttcacggaaggtgtttcaactgcttttctaccaccgtgcggcagcgtgtcgacgacaggtgcgctgcttcatctggtggctgctggggcaccgtgctcacgtgtgcccacgccagcggatggtgtcgccccacccgcggcgtgttttggtgtggcgccttgtcaatccatcactctctgctcccgttcctgcccctgccgtgatgaaggagggtgacaatggagacagtgcactggatatggaggtggcaggagaaggcgcactcgtcgtggtcagaggaggtgaggagctcacgtcgcgacctcaacaacaatgatgatgacaatggtgtgcctcccatggggccaccggctgaaactcccgccatctctatggagcctgatcgaccaaggcgggtcatcagtcgctcgacaaagatcgtgcaagttgaggaggatcttcgacgtgctctgatcatgtctgtcattggacgtgaagcagctggtagcgctgcagaggtttctgatgcgctcgcattgaggtttgccctcgacgctgatgcgctcgacctcaaacgtgctgcgccaaataccttcatcgccttgctcccatctgaagcgctggctggctgtgtttacaatgaacgcagaccgtttgtcgtgccccctctccggttgcacattcaacgttggtctagacaagccatggccaccggcagaagtgatctaccgttccttgtcactgtcaaactctgtggtgtcctggcacacctctggggattgagacggctgcacgcagacacggaagggggcgttaatttgggcgaattcaagctggatgcatggtgcgcaaggccggagcttcttccttcttccatggacctccacgttgtcgagctagcagttgaggggatgttgattcctcgtaccctggtttatccaatccttgtggtggtttcagattcgaagcaatcaacgccgaatcctccatcttgtcctccactgccggccaattccgacgatgacagcgctcgcaagcggaggcgatgacaacgctcccctccctcgacgtccacgcgtgggctggtacacgcgcgcttgggtccacgtgacaacatcaattcgacgtctgatggaccaattgaggtgtgggattcctcatctgcggcacgaactatgcaaaatctagcggctgccccttcgtgcgcctctcggccgccatcggcccgcgcgcccgctccttcgggtcgcgcctccccactggttttcaatgcacagaccccttcattctctgtggtgttggcattaaagagcattactccctcgagctctgccccgctggccgcggttatggcgcctatcccagaagatgtcgcgcggttggagtttctttcggaaaaggttgtctcggcaaatgtttcaatcagcccgcaggcaatggacttcaaccctgggaacgagatctcccttcggatcattgaatctgcacagctggaggggacaacttttgaacttgttaattgtgttcctgcacctgttacattgactaccgctcttccttccattgaagatgatgcctgcattgatcatgttttaaggatttggtcctacactgtaaggattgagggactcatctcaaccgtggttgatggcagtttggtttctttaccacctcctgcgctgataacagatatacagaggaattctaatgtgggatcttctgcatggagaatgatgtttcaagggtgatgactatcatgtctgtaagggctaccagaagcatttcagaggccagtgaaggacaattgaaggtttattctagacggtgtcatggggaaaatcaggatgagtctttgtctaaacacaacgcccctgtatgctcccctttcttcgaagaaggaagtgctctgataaataaaatcatcaggcctgttgatggattgctccagcctccatgtgtaccaaagcaaaaaaaatgagtaaaccccttgtttcttaccaaggcgtagtaggagagtggcgggggcggacccatgtcctcctgggcttgttgcttctgaggcccaaaggagagtgatcaaaagtttgggtttcatgttcccgaggaaagggttgagccatctgtccaagatgcatatagcaaattgttccttgaccccatatcagattctcagcttgcagccttatcggtgttgtttggatggacagtgggtgaggggatggagtacatctccctagaaggcatcttagcagcccccggtttggtggttcttatgcagtttctcttatgaatccatcaactattttgatctggaatgcccgcgggctcaatatgaagggtcggcgggatgttgttcgggaggtaattttctcatctagagcggatattgtgtcttcaagaaaccaagttggctaccatggaccattttttgttttgctcagcttttgggtctgttttcgataagtttgtcttactgccggctgatggcactagaggagggctgatcattgcttggaagacttccatcattcaagctttaggttctcgagtagacattttttcagcctcagttcactttgttgaagaacaaggtcgtaattggaggttcactggtgtatatggcccccaaaatgatggtgataaaatttctttccttcaagaactccgggatgtcagaactatgtgccctggaccttgggtcattgcgggagattttaaccgtatctatcaagctgctgataagagcaatagcaatctgaaccgcgcaatgatgggtcgcttcaggcgtgttctagatgatctggaacttaaagagattcctaaattcacgtggtctaatgagagggaaaatcccactcttgtccggttggaccgtgccttttgcacaacggattgggaagaagttttccctgatgctgttcttcagagtgctactgctggagtgtctgaccactgcccattaattttgggactcaaggttagaaatactggcaaacaaagattacattttgagagtttctggtcgaagttggatggttttcatgaatcagttcagcaaaactgggaagacccagtgtcttcttcttgcctggttgagatcctgtttctcaaactgaagaggcttagtaggggactgcagaaatggagccatcgcaaggttgggaatgtcaagctacaactttctatggcaaaagaagtgctacaccgattggagattgttagggattctcgttctctatcacagggggaggattggttgcgaagaaaactcaagatgcattgtttgggcttgacttctttggaacacaccattgcccgtttgcattctagggtgctgtttttacaggaaggagatgcaaatacaaattttttccatcagcacactcggtttagaaagaagaaaaattttattgctaagctacaggtggaagacagaatctatgttactcaagaggagaaacaagaagtagtggatgatttttatgaacatctgcgaagttctggtgatctgagaaattactccttcaacttggcagacttccacccattattccagcaggacttatctcatttagatgctcctttcactgctgaagaggtatgggcatcagtaaaagatctacctatggacaaggctcccggccctgatggcttcaccgggaggttctacaaaacttgttggggcattattggcagtgacattcttgcagccttgaatgcaatttataaaggacatgtcttcaaacttcagctgctgaattctgcttatgtttccttgctgcttaagaagacagatgctagttcggtgaaagactttcgacctataagtctcatcatagctttgaaaagttggtaaccataatccttgccaaccggctagcacctttaatacccagcctagtttccaacaatcagagtgctttttgtgaggggcagatgcatacatgataatttcttactttgtgcaacatcttgtcagaacacttcacacaagcaaggaaccacacatccttctgaagctggatatctcgaaggcttttttatacaatttcttggccttttctgatagaagtaatgcgttacttggggtttggccagcagtggtgcaaccttatttgtcagatcttgtccactgcaagctctcaagtcctattgaatggaattcctgggagatctatctctcatcttcgtgggcttcggcagggagaccctctctcccccttactgttcatattgattatggatgtccttaattccctaattcaaatggcttccaggaataatttgttgcagcctatgtctgggcagcaacaatggtctcggatttctttatatgctgacaatgtggttatatttttgagacccaacagaaggatctttgtgtggtacgagacctgttaaggtgttttggagaagtttctggtctgaagactaatttgattaaaagttcagccataccaatccaatgctccgatgaagatattgggagaacatcggcaattctttcttgttccattggaagcttaccttgttcatatttgggtattcccctttctattcataaaccttcaaaggctgttctaacacctctgattgacaagattgccaataaattgccaggatggaaagcccccctcctaagcaaggttggcaggttggttgttgtcaaatctgtaatgtcagcaacacccattcaccaaatgctcgtcttgaatctgcccaaatggttctttaaggctgttcataaaaggagaaggggattcctttggaaagggcaagaacaggccaagggaggaaattgtttagtctcatgggccaaggtgcaaagaccttacatgtttggcagtcttggagtacattatctggaaaggatgagttgggcattgtgtatccgctggttatggtttatgaaaactgatccctcaaaactatggtttggtcttcttgttaataatcctaagcaagcccaagcattcttccaaatggccgtaactgtaaatattgggaatgttatttcttccaaattctggacagacaattggttgcaaggaaagagtgtggctgaccttgctccaaatctgatcctagcaatcccaaagagagtaattaagaagcgtacagtgagccaggcattatccaacagaggctgggtggttgatgtcaagggcgctctaacagttcaggttttcatagaattcctcaaagtttgggagcttgttgagggtatagttctacatcctaatgtcccagatcatttttcttggaagttttcatcttcaggtcagtatagcagaaaatctgcatacaatatgatgttcattggctccatcaaattcctagcttggaggaggatctggaaaacttgggaccctgcaaactgcaagttcttcatttggttggccattaataatcaatgttggactcactggtcaaacgtggactaccgcatcaggccgcttgtgccctttgtgatcaagatgtggaaaccatcaaccacattctagtatcctgtgtgtttgctagggaggtatggagcttagttcttaacaggatcatccctggtagtgccgagcctctgcttctttgcctaaggaagagaggaaggggttcaattccttagtggtcctagttgcctcggagctttggaaacataggaatgcctgcgtttttcagggttctaggcctgctgtccaaagtgttgcacaagctgttatggatgaaggtcgtctttggtgtttagctggggctgctgtccttcggggtttggtccttaggactgaaccttctttggtcgtgaatggggccgttaccgtnn

SEQ ID NO: 222046 - DNA, 3180 bp, Zea Mays
aaaagaccaaagaaaaaccgggaaaacacccgtcgcccgcccctcatccctccgtcgccgcgccgccgtcccatcgacgccacctgccgctgccgccgtccagcacacctcctccgcctcacgcgttcctgcagaaagcctctcctagaccacggcccaaggcccttcatatccacgcggcacccgagcagcagaaccctagataaaccctctcgggggctaagcaccggcggcggcgatggtgatggtccctcccggcgagtgggtcccccacgtcgaggcctacgtcgacgtctcccgccccgccgtgcagcattctgctagcgtggatgcacttgctgccctggtgaacaaagacaagttgaccctttttgatttggtgtccaagatggatctttatttgacgacaacagaccacattgtcagatcaagaggaatactgcttcttggggaaacattgtctcgaatttcatttaaatatttagatgttattaccattacaacattgtcagacttctttatatcaagattgactgacatgtttatatttatatctggtattaagttagtaaatgttagaagggcaggtctgtcagattggcaagcaatacgaggagcccttgttggttgcctggctttattgcacaggaaacatggtgttggttgtattgtgattgctgatgtcaaaagactagttgagtctttcttacagaatgttccagtgcagtcacttgcagctgctgaccgcaagctgtgctttgaaattctgagctgcatattggatcggtacccggaagctgtaaaacaaatggatggtgaacagctgtatgggatctgtgaagcaattgatgaagaaaaggatccagagtgcttgatgctttcttttcatgtagtggaagttgtcatgaagctgtttccagatccatctggtttggcagcacagtttgcaggggacgtttttgagattctgagcaagtattttcctgtctacttcacacacggagtgggtaatggtttggacactacacgggaagacctctctagagcattgatgcacgctttttgttcaacccaatattttgagccttttgtcatccctttgcttcttgacaaactttcttcctctcttccattggcaaagatcaattattaatatcagaggctctgaattgtttgaagactgctattatgtatactgattcttctgataaagatcttttcattaatttgatcttgttggatgaggatattgtgaacaagatccactctgtatcaagcgtggaaaagaccatattgagttcattagaggacctggcccaactgcatgcacttggaagtgttatttctatccttgctgaatcgtctacatatttctgtactagagttcttcaagagcactttgcacacttggtagatattgtgggaaccaaagctgactatgaatcctggcagttgaataattgtaatggatcatcttctgctcctgtcaactatggagcactctatttatctgttcaattgctttcatcctgtagagaagtggctttggtatcttatgaagatttttcttctgttaaattagcaaagggttcctggtggcttatcttgcagaaaaagctggagcagttaatccatctccttcgatccatttttgctatagcttctcaatctatgcagccaaatttcagacaagaatatgtctcttgtgctgtgaagggcttgctaacactagcaacattcccggaacaatgctcgcctctgccagcaaatgcttatgaggatattctgcttatgttcacgtcaataattataaataagtttgaaaatttagatctgtggagattgtcattgaaagcattggctagcattggttcatctattgccaagttccatgcttctgaaagggaagtagtttactacagaacggttgttgacaagattgtttctttggctgaatcttatgatacttcaatgcctctcggtctaagacttgaagcaagttatgaagttggaactgctgggttgaactatatgttaagagttgcgaaatcacttgaagtcgctgttgtcaccaatatttctgaatctgaggctaatggaagaatggaatgtgctgaccatgtggcccatttatttgagtgttactctaaccgggtccttccatggttattagcttctggtggtgtcaatgaacttgcattgagctttgcactgcatctattggatgagactgaggatttgactgtgttagatagaatcagctcacagggcctccttgactcactaatgactgggatgaagcttttagttggagtatgtacagaggagcaacaatcacttattgttcagaaagcacatagcacaatatcttcaatgctctcactcccaatggaattgatgacagaccgtcttttgcctgtagatgagttagttcctttacattctgtttcagaaacagctctcatcagcatgttttcgtcgattataataggccttcggcctcaaacacctgtaccagatatgatggtgatgattaaactctttactgtcttcctactaaatgggaaaatgccagctgcttatgcattagcttctattttcaataaatatctacataatccagagttttctcatgagaatcagatggataaaatacttgatgatattcttgagaggtgtttctcaactgtattagccaacagctgctcaaagacatctcaatcttgtgctggcacttcagatgttaatttctcagatgtttcgtctagaaacaagctttctaagattaatatcttgtctagcttggcttggattggcaaaggattacttatgagaggagacgagaaagtgaaggacatttcaatgtttcttcttaagatcctattctcagatgagattttgtctacagttccatcccaccaggaagaaccttatggcggtgattcatcagatacttctcttgcaatatctgcagctagtgcattccatgtgatgatgagtgattcagaaatgtgtctaaataaaaaatttcatgcaagaataaaaccattatacaagcagcgtttcttctcaataatgatgccgatcttcctctccaaaattaaagaaacaactgtggtcacgacaaatcacacaattctcacaagttattctgctccagtgcatcattgctgttccccg

SEQ ID NO: 222047 - DNA, 4555 bp, Zea Mays
aaaagaccaaagaaaaaccgggaaaacacccgtcgcccgcccctcatccctccgtcgccgcgccgccgtcccatcgacgccacctgccgctgccgccgtccagcacacctcctccgcctcacgcgttcctgcagaaagcctctcctagaccacggcccaaggcccttcatatccacgcggcacccgagcagcagaaccctagataaaccctctcgggggctaagcaccggcggcggcgatggtgatggtccctcccggcgagtgggtcccccacgtcgaggcctacgtcgacgtctcccgccccgccgtgcagcattctgctagcgtggatgcacttgctgccctggtgaacaaagacaagttgaccctttttgatttggtgtccaagatggatctttatttgacgacaacagaccacattgtcagatcaagaggaatactgcttcttggggaaacattgtctcgaatttcatttaaatatttagatgttattaccattacaacattgtcagacttctttatatcaagattgtcagattggcaagcaatacgaggagcccttgttggttgcctggctttattgcacaggaaacatggtgttggttgtattgtgattgctgatgtcaaaagactagttgagtctttcttacagaatgttccagtgcagtcacttgcagctgctgaccgcaagctgtgctttgaaattctgagctgcatattggatcggtacccggaagctgtaaaacaaatggtgtggatggtgaacagctgtatgggatctgtgaagcaattgatgaagaaaaggatccagagtgcttgatgctttcttttcatgtagtggaagttgtcatgaagctgtttccagatccatctggtttggcagcacagtttgcaggggacgtttttgagattctgagcaagtattttcctgtctacttcacacacggagtgggtaatggtttggacactacacgggaagacctctctagagcattgatgcacgctttttgttcaacccaatattttgagccttttgtcatccctttgcttcttgacaaactttcttcctctcttccattggcaaagattgattccttaaaatatttggacaaatgcattcgcttctatggagctgatagaatggttagacatgcatcagctgtttggtacaagttgaaagaagtgatttttaacctttcttcagatcaattattaatatcagaggctctgaattgtttgaagactgctattatgtatactgattcttctgataaagatcttttcattaatttgatcttgttggatgaggatattgtgaacaagatccactctgtatcaagcgtggaaaagaccatattgagttcattagaggacctggcccaactgcatgcacttggaagtgttatttctatccttgctgaatcgtctacatatttctgtactagagttcttcaagagcactttgcacacttggtagatattgtgggaaccaaagctgactatgaatcctggcagttgaataattgtaatggatcatcttctgctcctgtcaactatggagcactctatttatctgttcaattgctttcatcctgtagagaagtggctttggtatcttatgaagatttttcttctgttaaattagcaaagggttcctggtggcttatcttgcagaaaaagctggagcagttaatccatctccttcgatccatttttgctatagcttctcaatctatgcagccaaatttcagacaagaatatgtctcttgtgctgtgaagggcttgctaacactagcaacattcccggaacaatgctcgcctctgccagcaaatgcttatgaggatattctgcttatgttcacgtcaataattataaataagtttgaaaatttagatctgtggagattgtcattgaaagcattggctagcattggttcatctattgccaagttccatgcttctgaaagggaagtagtttactacagaacggttgttgacaagattgtttctttggctgaatcttatgatacttcaatgcctctcggtctaagacttgaagcaagttatgaagttggaactgctgggttgaactatatgttaagagttgcgaaatcacttgaagtcgctgttgtcaccaatatttctgaatctgaggctaatggaagaatggaatgtgctgaccatgtggcccatttatttgagtgttactctaaccgggtccttccatggttattagcttctggtggtgtcaatgaacttgcattgagctttgcactgcatctattggatgagactgaggatttgactgtgttagatagaatcagctcacagggcctccttgactcactaatgactgggatgaagcttttagttggagtatgtacagaggagcaacaatcacttattgttcagaaagcacatagcacaatatcttcaatgctctcactcccaatggaattgatgacagaccgtcttttgcctgtagatgagttagttcctttacattctgtttcagaaacagctctcatcagcatgttttcgtcgattataataggccttcggcctcaaacacctgtaccagatatgatggtgatgattaaactctttactgtcttcctactaaatgggaaaatgccagctgcttatgcattagcttctattttcaataaatatctacataatccagagttttctcatgagaatcagatggataaaatacttgatgatattcttgagaggtgtttctcaactgtattagccaacagctgctcaaagacatctcaatcttgtgctggcacttcagatgttaatttctcagatgtttcgtctagaaacaagctttctaagattaatatcttgtctagcttggcttggattggcaaaggattacttatgagaggagacgagaaagtgaaggacatttcaatgtttcttcttaagatcctattctcagatgagattttgtctacagttccatcccaccaggaagaaccttatggcggtgattcatcagatacttctcttgcaatatctgcagctagtgcattccatgtgatgatgagtgattcagaaatgtgtctaaataaaaaatttcatgcaagaataaaaccattatacaagcagcgtttcttctcaataatgatgccgatcttcctctccaaaattaaagaaacaactgtggtcacgacaaaattggcactataccgagcttttgggcatatcatttccaatgctccagtaccagcagttataactgaagcacaccagattttactcgtgatggttgatagcttagctaaattaagtatggatgttggggataaggatctggtgtacagtttgttacttgtcttctctggaatgttgatggatgaaaaaggcaaagagtgcattctggacaacatccaaatcacaatcagcgttcttactgaacttgtttcctatcctcacatgatggttgtgcgggagacagcattacaatgtttagtagccttttcgacgtttcctcactcaaagatttatcctgtgcggcgaaaggttgtgcaggcagcagtcagggctctcgacgataagaaacgggctgttcgtcgagtggctgtccgatgccggcacacatggcagtccttcacttaaggggagtctctttcggtggtgtcaggtagtcgggggaggcaagcacaaaaaactggtcttactgggcgatcctgttgggagtcgatgagtgtacatggatctagagctgtcattgtaaggtgagagatactgggagcggggtctgctgacgagtttatgttcgagacctggtctttggatcagctgctgccaagttccagatgttcgaagttctccgaagagccatggggccatggggaggaatgtccctggaaattggccctcagtctgggttgccagctcttgtgcccttttcttttccttgatcctggacattgccttgtgtgtctgatacagatcagaaaactgatgcaggatcgcttgggagttgggaatgtaacctaaagtcccagtattcttggcctcccgatgttggagaattcaagcatgctggcatgcgtgcgtttgtgccaacagtttttagtttgctttcatgtttcaaccaggctctgccgctcagaacgtgtcgagtatactttccagttggccagatcgtgtcaggttgtgcagtacgtagaaatttgtcatcccatacagatttgtggccttcctggactgcgcagtactgctacgctggaaaacgctgcgatagccgtgccccgcggaatccacatctctcggtcgattgtgtaatgcgaagtatgcaacagagttaggtggcatttcttcatgacaattattctcgcctcttgtgtcgaagagtgggtttgaaaaagaaaagaatagagatagatggtgtttggtcgcgctgacctcgacaagcccatagcgcgtgagcagggatggaaacgagccgggctcggtgcctgagggctcgacattggctcgtgagagtcatattctgatacttattgttgtattatttagtaaattaatattatat

SEQ ID NO: 222048 - DNA, 2543 bp, Zea Mays
agctgaagactgaactcatggttcacaaaatggtatatgtgttacttaactcttacagggtgaactacactggaccagtttgtgccgttcttgataagtatggttttgactagaccagctttggtccagtccctatctcccagaagtatccacataaaaagaaaagctagtaatatctagcctgcatgttgcttttgtttgtttattcactatgccagccctgtattttatctctagagcagtctctaacatatcttctgtccctaaggagatttatgatgatttatctcagaaggatgtggaaagcctgagtgggaggacactatctagtgccaatactacagctattggtcccgcttctgcaggaggcgcaaaagccaactctagttggaagctaaagtctgttgttactcttgcattgacattgctaacaagttctcaggcaatattaattgtgtggtcaaaaagagctggaaaatatgaatatagtgtcacaacagctaatttttcggtggaggctttaaaatgccttctatcactagctgctctttttaggacgtggaactgccatggtgtcactgatgataatagattaaccacatcttttgatgaagttggtgtatatccgattcctgctgttctttacatggtaaagaacttattgcagtactatatctttgtctacgtggatgcaccagcttatcaaatcttgaagaacctaaatatcatcagcacaggtgttttgtaccgcatcattttgaagaaaaagctaagtgaaattcagtgggcagcatttgttcttctatgtgctggttgcacaacagctcaacttaatccttcgtctgaccatgtgcttcaaactcctattcaaggttggatgatggcaattgtgatggctcttttgagtggttttgctggggtgtatacagaagctatcattaaaaaacggccatcaagaaacatcaacgtgcagaacttttggctatacatatttggggtgatcttcaatctagttgcaatttgtgttcaggattatgatgcagtcatgaataaaggctttttccatgggtattcattcatcacagttttgatgattctgaaccacgcactgagtggaattgctgtttcaatggtgatgaaatatgctgataacatagtcaaggcatgtggcactagcatgtaaatttatgcatgagcatgatagatgatgctactgttgattcagttgtatatgtgctgtccactagagcctgactacggtttatatgtggcattgtagccaataaatggctaagcagtaactcgtgagtatggtgactgcgttagttaggattaggttggatatgtttgttagcttccaaattagataatttgttttgtttagttgctgtcattaaggtgttctcttttgaatatttcatgagttagacctagtccctagcacctacacgtgaggtcactgtcatcatttgaattaagcaaatagaaatgtgaaagaagtctagtctaagccccgttttgtttccctcactaaattttagtctctgtcacatcggatgtttgtgttagcatgggctacagtaggcaggacccttgggttttaggtagtgcggctgcacaggcatgttgccttgtgcgctctctcctagtttggttatttggttgtaataggcaaggatcttcctgattggattgtctaggattgtttcctgttgtctaggattgttcccattgtctaggatagtttcctattcctgtgaacatccttgcctatatgtattcgagcctttgctcccattaatcattcaacattttcccaatacagagtctttcgtggtatcaagagtccgggttccacctcagatttttttcatttctgccccactaagcgcgtcggcctctctgccttatagcgccaccacctccttgccatgcagctctcgcgcaccggcctccctcctgtgaggcaccatgtccgctactgcgcctccatcgcccaagggcgccaccgcccaggacaaggtggttgctaccgccgtcgaccttgttgacttgtccgcctcggccaccctcacccgcgttcaacaagatgagctacccgccaagccacggaaacgaccagtgctgtcgccctggaacaccagagggcctacgatgcggatgttgcctgcctcgccgcggccgaggaggaggctcgtgccgcggccgaggagggggtcagtcagtgggcttcgccagggttctatcaccccatggccagcctaccctcttgggtcagtcgttggcctctgcgttcagcacggagacgctgcagcaacccccgtccactgagtggtacttcgacttaggtgctagttcccacatgacgtcttctagcaatctttcacacactttttcgccacggtatcctactccatctattgttgtcggtaatggctccctgcttcctgtggtcagcactggctctactgaattaccccactctttttttctcgaaagcgcaagagaactgcgcgaaatatattaaggagaaaaaggtccag

SEQ ID NO: 222049 - DNA, 2877 bp, Zea Mays
tgaagactgaactcatggttcacaaaatggtatatgtgttacttaactcttacagggtgaactacactggaccagtttgtgccgttcttgataagtatggttttgactagaccagctttggtccagtccctatctcccagaagtatccacataaaaagaaaagctagtaatatctagcctgcatgttgcttttgtttgtttattcactatgccagccctgtattttatctctagagcagtctctaacatatcttctgtccctaaggagatttatgatgatttatctcagaaggatgtggaaagcctgagtgggaggacactatctagtgccaatactacagctattggtcccgcttctgcaggaggcgcaaaagccaactctagttggaagctaaagtctgttgttactcttgcattgacattgctaacaagttctcaggcaatattaattgtgtggtcaaaaagagctggaaaatatgaatatagtgtcacaacagctaatttttcggtggaggctttaaaatgccttctatcactagctgctctttttaggacgtggaactgccatggtgtcactgatgataatagattaaccacatcttttgatgaagttggtgtatatccgattcctgctgttctttacatggtaaagaacttattgcagtactatatctttgtctacgtggatgcaccagcttatcaaatcttgaagaacctaaatatcatcagcacaggtgttttgtaccgcatcattttgaagaaaaagttagtatcttttgagcaattggaaattatctttacagatttactttactctaagagtggaactccaaggatcatggtcacaatttattttgttgattattgtttgacttggatagaagcagaatcggaatttcaagtcttttaggccatgagtctgacagataccagacctgacagaaaaagaactatagctctgtgtgactggccttctagtggaccacaagttttgtttccttcctaggatgtcttacaatctttatttcatcagtacctgttcgctgttctgcagtctttcactctgtgtatgtatattcagtttcccccctgtcccttttaggctaagtgaaattcagtgggcagcatttgttcttctatgtgctggttgcacaacagctcaacttaatccttcgtctgaccatgtgcttcaaactcctattcaaggttggatgatggcaattgtgatggctcttttgagtggttttgctggggtgtatacagaagctatcattaaaaaacggccatcaagaaacatcaacgtgcagaacttttggctatacatatttggggtgatcttcaatctagttgcaatttgtgttcaggattatgatgcagtcatgaataaaggctttttccatgggtattcattcatcacagttttgatgattctgaaccacgcactgagtggaattgctgtttcaatggtgatgaaatatgctgataacatagtcaaggcatgtggcactagcatgtaaatttatgcatgagcatgatagatgatgctactgttgattcagttgtatatgtgctgtccactagagcctgactacggtttatatgtggcattgtagccaataaatggctaagcagtaactcgtgagtatggtgactgcgttagttaggattaggttggatatgtttgttagcttccaaattagataatttgttttgtttagttgctgtcattaaggtgttctcttttgaatatttcatgagttagacctagtccctagcacctacacgtgaggtcactgtcatcatttgaattaagcaaatagaaatgtgaaagaagtctagtctaagccccgttttgtttccctcactaaattttagtctctgtcacatcggatgtttgtgttagcatgggctacagtaggcaggacccttgggttttaggtagtgcggctgcacaggcatgttgccttgtgcgctctctcctagtttggttatttggttgtaataggcaaggatcttcctgattggattgtctaggattgtttcctgttgtctaggattgttcccattgtctaggatagtttcctattcctgtgaacatccttgcctatatgtattcgagcctttgctcccattaatcattcaacattttcccaatacagagtctttcgtggtatcaagagtccgggttccacctcagatttttttcatttctgccccactaagcgcgtcggcctctctgccttatagcgccaccacctccttgccatgcagctctcgcgcaccggcctccctcctgtgaggcaccatgtccgctactgcgcctccatcgcccaagggcgccaccgcccaggacaaggtggttgctaccgccgtcgaccttgttgacttgtccgcctcggccaccctcacccgcgttcaacaagatgagctacccgccaagccacggaaacgaccagtgctgtcgccctggaacaccagagggcctacgatgcggatgttgcctgcctcgccgcggccgaggaggaggctcgtgccgcggccgaggagggggtcagtcagtgggcttcgccagggttctatcaccccatggccagcctaccctcttgggtcagtcgttggcctctgcgttcagcacggagacgctgcagcaacccccgtccactgagtggtacttcgacttaggtgctagttcccacatgacgtcttctagcaatctttcacacactttttcgccacggtatcctactccatctattgttgtcggtaatggctccctgcttcctgtggtcagcactggctctactgaattaccccactctttttttctcgaaagcgcaagagaactgcgcgaaatatattaaggagaaaaaggtccag

SEQ ID NO: 222050 - DNA, 950 bp, Zea Mays
ctgaactcatggttcacaaaatggtatatgtgttacttaactcttacagggtgaactacactggaccagtttgtgccgttcttgataagtatggttttgactagaccagctttggtccagtccctatctcccagaagtatccacataaaaagaaaagctagtaatatctagcctgcatgttgcttttgtttgtttattcactatgccagccctgtattttatctctagagcagtctctaacatatcttctgtccctaaggagatttatgatgatttatctcagaaggatgtggaaagcctgagtgggaggacactatctagtgccaatactattggtcccgcttctgcaggaggcgcaaaagccaactctagttggaagctaaagtctgttgttactcttgcattgacattgctaacaagttctcaggcaatattaattgtgtggtcaaaaagagctggaaaatatgaatatagtgtcacaacagctaatttttcggtggaggctttaaaatgccttctatcactagctgctctttttaggacgtggaactgccatggtgtcactgatgataatagattaaccacatcttttgatgaagttggtgtatatccgattcctgctgttctttacatggtaaagaacttattgcagtactatatctttgtctacgtggatgcaccagcttatcaaatcttgaagaacctaaatatcatcagcacaggtgttttgtaccgcatcattttgaagaaaaagctaagtgaaattcagtgggcagcatttgttcttctatgtgctggttgcacaacagctcaacttaatccttcgtctgaccatgtgcttcaaactcctattcaaggttggatgatggcaattgtgatggctcttttgagtggttttgctggggtgtatacagaattggaatgtttttatttatctttgaacactgcag

SEQ ID NO: 222051 - DNA, 3371 bp, Zea Mays
cttgccttggctgacggctcccccacggaccacggttgtttggctgcgcggcgtgtgcccttgcggtcattcgtcgtccagccagccgtccagtggccttgcccggcggccggagcgggcgagcggcggtccggccttctcggctcctcgccgtccggcgtcctccgtcactctcgctcagccgctgtgtccggccagcaggtagcagctgtgtccgtccgagtgtccgacgtcctccggcgctcagccattgtctccggcgctcagccgccttgtccggccagccggccaggccgacagggccagcgccgagcgccgctccagcctccaggctcaactccaagtcagaattgagaaataagatggaaaatgattggttgaatcatagaatgcacaagcaggcgcatcacttcgccttccatgcgtactagacggtgttggtcgcgctcgaggtttacttacggggctccgttagcgtcgagcccccggatgtgcctctccttcgggacctgttcctaatcgagggcaaggtcagtattcagtacctgtagtctcaattgctgtacttctgttgtttaatcgtattagaagtcattactgctattggtgccaaaattaagctgtggtacatgaccaaagctagccttatctcagctaagcgcatacgtagcatctaacagaaactatttggtgttttaaggtgaatgcattctcatccactgctatgttgcaacaacaaaattatattgtgttctttgtttacattaattttgatcaaatatgttggatctgtgtactgccatttgactgctggggaaggggaaccggacggtcggaagatgacggcgaggaggtgtacttggacagagggagagggagggcgtccaggtctttagtatttttgcctttttcccatgtcatgaatagtgagaacagactattgcaactaagaaatgggagcaaaagagagaaaaccctcagattcaaagagttcgtttatgcagggttaaattttcaaaggcgtgtgaattagatgtcaaatgtagaggtgcacgtattgagggttaaatattaacatttctccctcactagtcactaggtatttattttcatctcatcatgtggatcatacaaccttctgaacaattttagtccaattatcaaatcaattagaaattttatcttcgccgtagttatttctgtgtgtgatattactgggcccattctgtgtctattagggtagatgtaaaatggtttgttttctgcaaggctgcatctcggctgagtaaaacaagtactgaggcagtagactggtatttgcacatcgcacatgcttgaaattggtgattgatagattgtaaaatatgaaccggtagttgatagacaatagtaaattgtgaaatgtgaatcagtagttggtagacagtagagactagagacaaaggtttccatatgccaaaaattggtgattgacagattgtgaaatgcgacatgtttagtgtcctagttctttggaccccggtggctgccacgacacccgacacccgccgcctgctccaccgtcgcggctgctcatgccctcgctgctgacctagcgcatgcaaacctcacatttcgaggcctaaaaccctcagcgtcagtggccggcacgtggcctctctagtgcccatcggtgccatggcagctctcgcgccgtggatcctacggcggcgacccgtccgctctgtcgcttctctggtctccattcgtgattcatggcatcgaaggtgtgggtcctcttcctcatatccttcagcatcgttcaagtgtttgtggggatggtttggaccagaggcacacgggcggaggaggccgtggtttcagcagcccgtgaggtgcgggagcacgacgatcacacttgatacagatggcaagtttgcgaggtttggagtcggcgatatgggtgtcaccaagcagaagtggaggcagcagccgcctccaaagaagaagatgtcgagaaaggccaaggtcaaccagctcaagtggtaccgcctgaaggccaagaagaagatgaagtcacccaaccccgaagttaggatcagatacaagcttgaaaaggctaagaggaaggaggaatggttgattgagaagctgaggaagtatgaggtcccgaggacaccggagccagttcatgaccctgagattcttactgaggaggaaaagttttatctcaagcgaacgggggagaagaagaagaattatgttcctgttgggaggagaggggtatttggtggtgtggttctcaacatgcacctccattggaagaagcatgagaccgtgaaggtggtttgcaagccttgtcggcctggccaagtttacgagtatgctgaggaattgacaaggctcagcaaaggcacagtcattgatattaaacctaataatacgattatgttttatcgcgggaagaactatgtgcaaccaaaggtgatgtcacctcctgaaactctttcgaagcagaaggccttagagaaatatagatatctacaatcccttgagcataccagccagtttattgagaagctggagaaggagcttgaagattacaagaagcatgttgctttattcaagaaccataataagggggttgctattgagaaaatcagcaatgaagataccactgttgatgatcctgcaactacctcagattctaaatgagctaactatttggacatgctggcatgatagatctttcagtcgtcaaatcttgcaagcctacatagctcaatgttcactattcatattaaatatgctggcttcagttgtggtgatatagggagctagcttgaaaactcagattcagatagaagaagtaatagccataggattttaaaggcttgcaagattaaaatcctggttgatggaaagctgtattacttgaaaaatacctcgttcatcaatctatctctataaggaaaggctagtagcatgatactgagtgcagatcagccttttaatatttctgcaatctttcctgtaaacacttttatgataaaataggacattcttttgaattgtggcccccttttatgtaggcttttcacttcttgggccttccttgctacataaaagacaatgaaattgtaattttggagctggaatagttctgcaggaccctctcagaaatgaagacatttactgtgccacacgttcacgtactcagtattcatacaccaatgatggacgtcagaagtgcacaagatttctgtactgggccgttcctgagctgagaagatgggcatgtgcagaagcacaatgatgactttaaggatttggcttgataaaaaggaagcgaaaagacagcttcgtcagagatagagctctagtcctacggg

SEQ ID NO: 222052 - DNA, 4033 bp, Zea Mays
cttgccttggctgacggctcccccacggaccacggttgtttggctgcgcggcgtgtgcccttgcggtcattcgtcgtccagccagccgtccagtggccttgcccggcggccggagcgggcgagcggcggtccggccttctcggctcctcgccgtccggcgtcctccgtcactctcgctcagccgctgtgtccggccagcaggtagcagctgtgtccgtccgagtgtccgacgtcctccggcgctcagccattgtctccggcgctcagccgccttgtccggccagccggccaggccgacagggccagcgccgagcgccgctccagcctccaggctcaactccaagtcagaattgagaaataagatggaaaatgattggttgaatcatagaatggtatgctatatagagcgagatatctttgcaattattcgaagtgatgatattttataccattttcaagaattgaagagtatatgaaaaaacttgccatgcgtatgtttaaattcacgtgctaatgttgatgaagttattagaggcggggaagaaccaaatcttctctaattaggtacttttatatttttttatcaagtttattgtatttttatatgctgaattgagattaatactatcttagtctatgtttgtggtatattttgttttagcggtatatttagccgctcaatatattgggggctgtttaaagtaaacttaaagtattatagagtggcccgggacgttaattttatagagctccgccactgatcacagcagcacaagcaggcgcatcacttcgccttccatgcgtactagacggtgttggtcgcgctcgaggtttacttacggggctccgttagcgtcgagcccccggatgtgcctctccttcgggacctgttcctaatcgagggcaaggtcagtattcagtacctgtagtctcaattgctgtacttctgttgtttaatcgtattagaagtcattactgctattggtgccaaaattaagctgtggtacatgaccaaagctagccttatctcagctaagcgcatacgtagcatctaacagaaactatttggtgttttaaggtgaatgcattctcatccactgctatgttgcaacaacaaaattatattgtgttctttgtttacattaattttgatcaaatatgttggatctgtgtactgccatttgactgctggggaaggggaaccggacggtcggaagatgacggcgaggaggtgtacttggacagagggagagggagggcgtccaggtctttagtatttttgcctttttcccatgtcatgaatagtgagaacagactattgcaactaagaaatgggagcaaaagagagaaaaccctcagattcaaagagttcgtttatgcagggttaaattttcaaaggcgtgtgaattagatgtcaaatgtagaggtgcacgtattgagggttaaatattaacatttctccctcactagtcactaggtatttattttcatctcatcatgtggatcatacaaccttctgaacaattttagtccaattatcaaatcaattagaaattttatcttcgccgtagttatttctgtgtgtgatattactgggcccattctgtgtctattagggtagatgtaaaatggtttgttttctgcaaggctgcatctcggctgagtaaaacaagtactgaggcagtagactggtatttgcacatcgcacatgcttgaaattggtgattgatagattgtaaaatatgaaccggtagttgatagacaatagtaaattgtgaaatgtgaatcagtagttggtagacagtagagactagagacaaaggtttccatatgccaaaaattggtgattgacagattgtgaaatgcgacatgtttagtgtcctagttctttggaccccggtggctgccacgacacccgacacccgccgcctgctccaccgtcgcggctgctcatgccctcgctgctgacctagcgcatgcaaacctcacatttcgaggcctaaaaccctcagcgtcagtggccggcacgtggcctctctagtgcccatcggtgccatggcagctctcgcgccgtggatcctacggcggcgacccgtccgctctgtcgcttctctggtctccattcgtgattcatggcatcgaaggtgtgggtcctcttcctcatatccttcagcatcgttcaagtgtttgtggggatggtttggaccagaggcacacgggcggaggaggccgtggtttcagcagcccgtgaggtgcgggagcacgacgatcacacttgatacagatggcaagtttgcgaggtttggagtcggcgatatgggtgtcaccaagcagaagtggaggcagcagccgcctccaaagaagaagatgtcgagaaaggccaaggtcaaccagctcaagtggtaccgcctgaaggccaagaagaagatgaagtcacccaaccccgaagttaggatcagatacaagcttgaaaaggctaagaggaaggaggaatggttgattgagaagctgaggaagtatgaggtcccgaggacaccggagccagttcatgaccctgagattcttactgaggaggaaaagttttatctcaagcgaacgggggagaagaagaagaattatgttcctgttgggaggagaggggtatttggtggtgtggttctcaacatgcacctccattggaagaagcatgagaccgtgaaggtggtttgcaagccttgtcggcctggccaagtttacgagtatgctgaggaattgacaaggctcagcaaaggcacagtcattgatattaaacctaataatacgattatgttttatcgcgggaagaactatgtgcaaccaaaggtgatgtcacctcctgaaactctttcgaagcagaaggccttagagaaatatagatatctacaatcccttgagcataccagccagtttattgagaagctggagaaggagcttgaagattacaagaagcatgttgctttattcaagaaccataataagggggttgctattgagaaaatcagcaatgaagataccactgttgatgatcctgcaactacctcagattctaaatgagctaactatttggacatgctggcatgatagatctttcagtcgtcaaatcttgcaagcctacatagctcaatgttcactattcatattaaatatgctggcttcagttgtggtgatatagggagctagcttgaaaactcagattcagatagaagaagtaatagccataggattttaaaggcttgcaagattaaaatcctggttgatggaaagctgtattacttgaaaaatacctcgttcatcaatctatctctataaggaaaggctagtagcatgatactgagtgcagatcagccttttaatatttctgcaatctttcctgtaaacacttttatgataaaataggacattcttttgaattgtggcccccttttatgtaggcttttcacttcttgggccttccttgctacataaaagacaatgaaattgtaattttggagctggaatagttctgcaggaccctctcagaaatgaagacatttactgtgccacacgttcacgtactcagtattcatacaccaatgatggacgtcagaagtgcacaagatttctgtgcgtcatttgggcattggtgcatgaactttgaaacaacttgttggtctacatttgtgtgctttttgcaggtactgggccgttcctgagctgagaagatgggcatgtgcagaagcacaatgatgactttaaggatttggcttgataaaaaggaagcgaaaagacagcttcgtcagagatagagctctagtcctacgggagttgcactctgctgcacagcgcgagtcttgcattggcaacaagaaattctggaaagagagaacctaccaagagctgagacgtctattcatggaatcgtgacaaacatcgatggttgcagctttctctttccagaaagacctgatctgaagtctgtagtgcttaaagagcaaccattctctttgcagagggaaacatcgatgaacaaaccatt

SEQ ID NO: 222053 - DNA, 765 bp, Zea Mays
aaaagcttcacctaagcatgaaaagttatctctcttattgatctagacgaggactcatagcagttctgaagtatcaattgcacaactgactctgaaaatcaagcatctgtcagctgttctacacaagaaggataaacattctagaaaggggcttcaggagatggtccaaaagagaaagaaatacatgaaatacttgcgaagaaccgactgggactcgtactgttttgttctatcaaagctggggctacgcgatgtgcccgagtacaaagctcctgattacaagagcaaagcaaccactaaggccaaatctaagaagagcaagagcaagaggagaaagatgaaggcataggagcggtgaacaaacacaccctttttggtcttgaattgcatggctaggaaatgattcgagaagatggatccatccaatcttacagttttttttttgactcgaagctgtttgtaataaccatctctttggaggccacggtttttccttgttctgcttggagcggcaaccttcctgtaagttttgtaacaactgatttattatattatttgcttttgagttctcccgctcgatatgccttattatgagggaagggaggaacagatacgacgatatgataccattacgtcatcatcagtttgtagctttgccagttttttttgtttgacgtaattttccagaattcttgtataagaatgcttgaacaatcttgctagctagcctagcgaaacaatcaagtagaaattcttctattttct

SEQ ID NO: 222054 - DNA, 968 bp, Zea Mays
cattatattctctatgctgccttttctagcttctggatgctgcaagccaccgacgtcatgtgcgttcagctacatgaatgagacgtactggacacaaaaccccagcgtcccgacggtgaccaacgacccagactgcaaaaggtggagcaacgaccagcagacgctgtgcttccagtgcgactcgtgcaaggctggcgtcctcgcgggcatcaagaagagctggcgcaaggtggccgtcctgaacatcgtggtgctgattatccttgtgatcgtctacgtcgcgggctgcgccgcgttccgcaacgcgaagaggatcgagaacggcgaggcggtcggcatggcgcggatgaccaagtcccatccgagcaggttccagttctaggccgctgctccgctgccactgcgggttcgaaagctcttgccttgtacaaatggcctgtggggtgtggtcctaaggcttgggcttcgctatgtcttgctgaattgcggattctactgcatttggtggtggaaatggaaagtccagtgtagtttggggttgtgtttgtttgagtgtttagggtaggcctattatgtggggttggctggggtacaatatgagatctgcaagaaacaagagaagttgaatcatctaggagttgttttgtaaggggagatctttaaattctagggggatagttgtatgatggtgccagccatgatgcagtgttttctgaatttctcagattgtatggcaatactagaggtatgatgatatggctgtactgcagcttccaggactgtaggggtgcttcagctctgtgaagtgtgaactgtgtggtatggggagaattctgatgcctgttgcaatttgtcaatggccaagtcctaggtgattgttgtgggccctcattgcagcctacaaaacccttttctaaatggattttattttaaattctttttaaaaagaaattttagaagtgtggttt

SEQ ID NO: 222055 - DNA, 2559 bp, Zea Mays
gtcggcgctcttctggctcccgcccttcgcgggacagggtggcggcaaggagggctcggatccgggcgatgagtttggagctgctatagcggcaagctttaggctacacaagacagttcctgagctaagtggaaataaatcctagctcgtattggatatctgaggaagttggcattcctaattccacggtggttgtgaataagctacatccattagatggatcaaactggacaaacatcatcttcagcattgtccctttcccagagaacgcaactatatcatcaacatggttgagcattcttagatcaaagttcatgtccttggttgtacagcagtcaacaatccacttgactaagcctctattcgataattcatcatactttgaagtaattaaattcccaggaggaataacaattatccctccacaaactgcttttcttcttcagaagcctcatgcgacatttaattttactctgaactatccgatctacaaattacaagacaggactaatgagttaaaggatcaaatggaggcagcactactactcaatccatatgagatttgttcatttgatctccagctgtttgcgtgtccggctgcattgtcgaggagttacagatggaccagtccatgcagctgtacctcttgcgttcgccgccggaaaaaattgatggcagatcaaattccagaatgcaacaaattccaaatcattcggtggcttacgttcttttcaaattgataacgtggtgatgaaagatcgggtcatgctgacttgtagttcaatatggccagcagctccagcagggtgagaaagatcgtcatcaggttctaaaggatttctcaaagttgcttgatgatcaggagtttaatagtaagtattatcatccaagcaacgctaggatctggttctatggtgatgatgacccaaaagagcacacattctaagtgaataccttgatcaatttgaagatagccctgctcctaaatgttcggcagtggtgtgcatgaaggatttgagctccccgtgctctgctcgcccgccagtcgacatcccagtcttgtgctgcagatcggtgtgcccgtgcctgatagtggctagcagctctattcttaattactttgtttttccttttctgatcgaacgtttagatttagatgaatatggttttcacatcttcaaaatacacattacgggatttggtgtgggcggtctgcagagtacagagagatgtgaaacatgggcatcctaaacacctttcaaaagaattgaagaattgcatgttgaaaaatcttgccaaacttcagtgttataacctcatagggtatagtatatacttgtaaggaggaaaggcttgacaaattgaggttaaatttagacataatgaaatgtggcttaactatattaacaatttagagatcacgtatctaattttgtgccttagtgtgctacactattttaaatttgtttatggatggaatgaacaatctgataaatttaccctgatatagctgattatttgatttaatatgtaggcactgtgatactgtccatactatagtaatgagttgtgttatgtaatgctaatacttaacataactacctcacatgcctgatctattaatatgtccattatatatgtttggtttttctttgctttgtccacgttcagttttttttaaaaaaatctcctgaaatgagacaattagtgtggacataggattgtattttgttggttcttgttctgatctccagatatattcttgaaccatctttcccctcttgttaataatttctatttagaatcattaatctaggacacctatagcattatcaagttactccttgtgctgacgactttctgtattctgatttttgcatgcttaatgatattggtgttactctaatgactacagaaaatggcatcggatttcttgggtacttctagatttgggttgatgcgacttggtttgtctgtacagttttgatctagcaggttgtttttgatgatagagttgtctgacgccaagggtgtgaagcagaatttaaagcctaaaggccatttcaacttgtcagctaagggctcagatgactcgccctgcgagtttgatcttgagttgtttgatgttgtctatttaatacatgttgaattagcgttttagattttgattgtattggccttcctatttgcaggagagcaaagcagttgttgtcctaagaaccatatgctaccagaacaagaaagatgagagcggttggtggccaaggctcctgaaaaaggacctgtgttcttgaaggttgactggacaaatggtaggatgaggatgacgaagatgttggatgttagtatttcacttttggttgattatgttttttcttatgcgcctgacaaatctagatatgcaaccagacatgctttattcttgttcctgttttgttttccttatgtattaattacttcacttgtaatgcacatgatgttttccttatgtattaatttcttaacttgtaatgcacatgatgttttccttatgtattaattccttaacttttaaagcac

SEQ ID NO: 222056 - DNA, 1943 bp, Zea Mays
gtttggagacaggactaatgagttaaaggatcaaatggaggcagcactactactcaatccatatgagctgtttgcgtgtccggctgcattgtcgaggagttacagatggaccagtccatgcagctgtacctcttgcgttcgccgccggaaaaaattgatggcagatcaaattccagaatgctccagcagggtgagaaagatcgtcatcaggttctaaaggatttctcaaagttgcttgatgatcaggagtttaatagtaagtattatcatccaagcaacgctaggatctggttctatggtgatgatgacccaaaagagcacacattctaagtgaataccttgatcaatttgaagatagccctgctcctaaatgttcggcagtggtgtgcatgaaggatttgagctccccgtgctctgctcgcccgccagtcgacatcccagtcttgtgctgcagatcggtgtgcccgtgcctgatagtggctagcagctctattcttaattactttgtttttccttttctgatcgaacgtttagatttagatgaatatggttttcacatcttcaaaatacacattacgggatttggtgtgggcggtctgcagagtacagagagatgtgaaacatgggcatcctaaacacctttcaaaagaattgaagaattgcatgttgaaaaatcttgccaaacttcagtgttataacctcatagggtatagtatatacttgtaaggaggaaaggcttgacaaattgaggttaaatttagacataatgaaatgtggcttaactatattaacaatttagagatcacgtatctaattttgtgccttagtgtgctacactattttaaatttgtttatggatggaatgaacaatctgataaatttaccctgatatagctgattatttgatttaatatgtaggcactgtgatactgtccatactatagtaatgagttgtgttatgtaatgctaatacttaacataactacctcacatgcctgatctattaatatgtccattatatatgtttggtttttctttgctttgtccacgttcagttttttttaaaaaaatctcctgaaatgagacaattagtgtggacataggattgtattttgttggttcttgttctgatctccagatatattcttgaaccatctttcccctcttgttaataatttctatttagaatcattaatctaggacacctatagcattatcaagttactccttgtgctgacgactttctgtattctgatttttgcatgcttaatgatattggtgttactctaatgactacagaaaatggcatcggatttcttgggtacttctagatttgggttgatgcgacttggtttgtctgtacagttttgatctagcaggttgtttttgatgatagagttgtctgacgccaagggtgtgaagcagaatttaaagcctaaaggccatttcaacttgtcagctaagggctcagatgactcgccctgcgagtttgatcttgagttgtttgatgttgtctatttaatacatgttgaattagcgttttagattttgattgtattggccttcctatttgcaggagagcaaagcagttgttgtcctaagaaccatatgctaccagaacaagaaagatgagagcggttggtggccaaggctcctgaaaaaggacctgtgttcttgaaggttgactggacaaatggtaggatgaggatgacgaagatgttggatgttagtatttcacttttggttgattatgttttttcttatgcgcctgacaaatctagatatgcaaccagacatgctttattcttgttcctgttttgttttccttatgtattaattacttcacttgtaatgcacatgatgttttccttatgtattaatttcttaacttgtaatgcacatgatgttttccttatgtattaattccttaacttttaaagcac

SEQ ID NO: 222057 - DNA, 3061 bp, Zea Mays
cgcagcccatcgcactggcacgaacacacttgtcttctcttaaaacgcagtcgcacagagagtttgcattgcacacacaggtcgcaggcgcgcgcatccgcaccacggcgccccatccctcccgtcagcgtcgctgcctgcctgcctgcctgcgtccgctcgcaactgcaacgacagggaggcgcgcggggagggagagggacaaaccgagaaaggcacggcacagctgcctgcctcggccctcggcacgcgctcgcgccctggtgactggtgaacactgaggactggaggcggtgggcgcggcgggtccagccaccgcgcggttcacggcggggcgcggcgcgggcgaatgccggccgtttcaacggcgggcggatcggcctgttcccctggcgctgctggcgccccccctaggcggtgactgcgaggcccgatcctgaggcgggcggcgactccgagagggcggttggctggttttcttgccaagtgccagtcagtctctctcgtctcggcgacgccgcgcgaaggtcggaactcggaatcctcttcccggcgtcgtcatcccacccccgtcggttcccttctaactcctggctcctggggccgccgccgagccgaggagaggcgcacgcgcctcgggaatggagctggcgcctccgctccgcctacgggatccgagcctgggatggcttcctgcaacttgcgcaggactcaagtgtgatgaactgatggggactcttggactataactggtttcctcttattcttccagccaatcctgacaaatgtggcatctcaagctgatagctttaatttatggctctcttttctttatgcacattccatatgctagaggttctgacctaaacaccgataagcaggcccttcttgcatttgctgcatcactgcctcatggcagaaaggtcaactggacctccacaacccaagtctgcacgtcctgggttggcattacatgcacaccggacatgaagcgtgtgcgtgaagtcaggttacctgcaatagggctctttggtcctatcccatcaggcacacttagcaagctcgatgccttggaggtgttgagccttaggtcaaaccgtcttactattaatctccctcctgatgtaccatctattccctcacttcgctctctttatcttcaacacaataacctgtctggaatcataccaagttcactttcttccagtctaacattcttagacctgtcctataactcgttcaatggagaaataccatcgaaggtgcaagacatcactgaactgacagcattgcttctccagaacaactctctttctggacccatccctgaccttcgcctccccaagttgagacatttggatttgagcaacaataacctgagtggacctataccaccctccctgcagaagttcccagctacttcttttctgggaaatgcctttctgtgtggatttccattggaaccatgtccagggacaccacctgcttctccatcgtcgccatcgtcccaaaatgccaaaagaagcttctggaaaaagctcagccttggtatcataattgcaatagttgctggaggaggggttgtattcatattgatcctgatcctcttggtatgtatcttcaaaagaaagaaaaatgcagagtctggcataggatcatcttcatccaaaggaaaggcaattgcaggtaaaaggggagaaaaatccaagggggaatacagcagcagtggtattcaagaagcagagagaaataaactgtttttctttgagggctcttcatataattttgacttggaggatctgttgagggcttcggctgaagtccttggaaaaggaagttatgggactacgtacaaagctgttctggaggatggaacaacagtggtggtcaagagattgaaggaagtggtggcgggaaagagggaatttgaacagcagatggagctaattggcaaggtttgccatcatcagaacactgccccattgcgtgcttactactactccaaggatgagaagctcttggtgtatgactatgtcccactaggtagcctttgtgctgctttgcatggtaacaaagctgctggaagaaccccattggactgggagaccagggtgaagatagctctgggcactgcacgcggaatggcttatcttcactccgtgggtagcggcgggaagttcattcacgggaacatcaagtcaagcaacatccttctctcacaggaactcggcgcctgcgtcaccgagttcggccttgcccagctcatgtccacgccccacgtccacccgcggctcgtcgggtaccggtcgcccgaggtcctcgagaccaggaaaccgacgcagaaatctgacgtctacagcttcggcgtcctcctcctcgagatgctcacaggcaaagcccctctcaggtcccccgggcgcgacgactccatcgaacacctcccgaggtgggtgcagtccgtggtccgggaggagtggacgtcggaggtcttcgacgtcgacctgctgaggcacccgaacctagaggacgagatggtccagatgctccacgtcgcgatggcatgcgtcgcggtcgtccccgacgagcggcctcggatggaggaggtggtcggcaggatcgaggagatccggagctcctactcggacacgaagacgtccccggaggacaatccgagggagggcgctttctaataaatcaccgagtaccacacgtaccggaacggcagtgacttgccgtctacagaaagtaggtcggttggtttgacagctctgtgtccagtgaagctttgcagtcagtcagttgattattcctgatcattctttggtaaaagttgttttctgttcttggttccatgaggtagccccggaacgctggtggtggtttcgtttcattagcgctgctgattactgtagggtgttgtttgtggatcgtgccgcgactcggtttcgtattcgtttgaggcagcccgactctttcaagtttgatttattgaatgcgcataagtttttgccactttcctgtgccttacatacacctaattgttgttgaatcatgattatgc

SEQ ID NO: 222058 - DNA, 1702 bp, Zea Mays
cgcagcccatcgcactggcacgaacacacttgtcttctcttaaaacgcagtcgcacagagagtttgcattgcacacacaggtcgcaggcgcgcgcatccgcaccacggcgccccatccctcccgtcagcgtcgctgcctgcctgcctgcctgcgtccgctcgcaactgcaacgacagggaggcgcgcggggagggagagggacaaaccgagaaaggcacggcacagctgcctgcctcggccctcggcacgcgctcgcgccctggtgactggtgaacactgaggactggaggcggtgggcgcggcgggtccagccaccgcgcggttcacggcggggcgcggcgcgggcgaatgccggccgtttcaacggcgggcggatcggcctgttcccctggcgctgctggcgccccccctaggcggtgactgcgaggcccgatcctgaggcgggcggcgactccgagagggcggttggctggttttcttgccaagtgccagtcagtctctctcgtctcggcgacgccgcgcgaaggtcggaactcggaatcctcttcccggcgtcgtcatcccacccccgtcggttcccttctaactcctggctcctggggccgccgccgagccgaggagaggcgcacgcgcctcgggaatggagctggcgcctccgctccgcctacgggatccgagcctgggatggcttcctgcaacttgcgcaggtaacaaagctgctggaagaaccccattggactgggagaccagggtgaagatagctctgggcactgcacgcggaatggcttatcttcactccgtgggtagcggcgggaagttcattcacgggaacatcaagtcaagcaacatccttctctcacaggaactcggcgcctgcgtcaccgagttcggccttgcccagctcatgtccacgccccacgtccacccgcggctcgtcgggtaccggtcgcccgaggtcctcgagaccaggaaaccgacgcagaaatctgacgtctacagcttcggcgtcctcctcctcgagatgctcacaggcaaagcccctctcaggtcccccgggcgcgacgactccatcgaacacctcccgaggtgggtgcagtccgtggtccgggaggagtggacgtcggaggtcttcgacgtcgacctgctgaggcacccgaacctagaggacgagatggtccagatgctccacgtcgcgatggcatgcgtcgcggtcgtccccgacgagcggcctcggatggaggaggtggtcggcaggatcgaggagatccggagctcctactcggacacgaagacgtccccggaggacaatccgagggagggcgctttctaataaatcaccgagtaccacacgtaccggaacggcagtgacttgccgtctacagaaagtaggtcggttggtttgacagctctgtgtccagtgaagctttgcagtcagtcagttgattattcctgatcattctttggtaaaagttgttttctgttcttggttccatgaggtagccccggaacgctggtggtggtttcgtttcattagcgctgctgattactgtagggtgttgtttgtggatcgtgccgcgactcggtttcgtattcgtttgaggcagcccgactctttcaagtttgatttattgaatgcgcataagtttttgccactttcctgtgccttacatacacctaattgttgttgaatcatgattatgc

SEQ ID NO: 222059 - DNA, 4075 bp, Zea Mays
cgcagcccatcgcactggcacgaacacacttgtcttctcttaaaacgcagtcgcacagagagtttgcattgcacacacaggtcgcaggcgcgcgcatccgcaccacggcgccccatccctcccgtcagcgtcgctgcctgcctgcctgcctgcgtccgctcgcaactgcaacgacagggaggcgcgcggggagggagagggacaaaccgagaaaggcacggcacagctgcctgcctcggccctcggcacgcgctcgcgccctggtgactggtgaacactgaggactggaggcggtgggcgcggcgggtccagccaccgcgcggttcacggcggggcgcggcgcgggcgaatgccggccgtttcaacggcgggcggatcggcctgttcccctggcgctgctggcgccccccctaggcggtgactgcgaggcccgatcctgaggcgggcggcgactccgagagggcggttggctggttttcttgccaagtgccagtcagtctctctcgtctcggcgacgccgcgcgaaggtcggaactcggaatcctcttcccggcgtcgtcatcccacccccgtcggttcccttctaactcctggctcctggggccgccgccgagccgaggagaggcgcacgcgcctcgggaatggagctggcgcctccgctccgcctacgggatccgagcctgggatggcttcctgcaacttgcgcagaaaaaaaggctaaagaatgatacgtagctactagctaaaagatgtgttggcctcttttatatggcacatgatcctagctgtccttttggtaaagagattgagataaaccagcagatctgtttgggttcgggcctttcggttgagcctaaagactaaagagaagacaagatgcgtcattctgctacagagaggagattgctgtgtgcaagttgaaatatcaatgtgggcaccacttttgtcagtctcatgaatttaaatggatcattccaagtatgaccttccaccagccttctctcattgatgaggattaatatgctggaatctcctaaggaagtcatatttatattttactgcatgtgtatgctacttgttgtgtttctgctggagctcatgcaccaacttcgtaaaactatggtgtcaaaccttattggccacacaatacttgccattcttgcaagtgtagttgtggtacgagaaacttcttttaacaggattgtagatgtgatatttaatgaaggaaatgtctggtttgacatttaaacttaagaagtggtaatgcttcttagaattcctcagtttttttggggggtagttactgtgattgtatcttatctagatgatcaaaattatgaaatgagttgctcctccttaccttttgtggtttccggttgctgtttactccctccgtcccaaaatattagcattcgttttaggatgtcaatagattcatataatatttgatgtatgtgttttatattatggacacaaaaacaaagtgttaaaacgaactgtatattgggacggagggagtacttattagttgcagagtatataaatgtccactggaaaacttaaatctgttatgcttgttatccatattcacatccctttcctttctaccttgtttctaactttctatataccaaactgaaaatttcactgttcatatttattcttataaaccatggacctttatcgtgtattgctgacttctattagccttttatgtgtcaggactcaagtgtgatgaactgatggggactcttggactataactggtttcctcttattcttccagccaatcctgacaaatgtggcatctcaagctgatagctttaatttatggctctcttttctttatgcacattccatatgctagaggttctgacctaaacaccgataagcaggcccttcttgcatttgctgcatcactgcctcatggcagaaaggtcaactggacctccacaacccaagtctgcacgtcctgggttggcattacatgcacaccggacatgaagcgtgtgcgtgaagtcaggttacctgcaatagggctctttggtcctatcccatcaggcacacttagcaagctcgatgccttggaggtgttgagccttaggtcaaaccgtcttactattaatctccctcctgatgtaccatctattccctcacttcgctctctttatcttcaacacaataacctgtctggaatcataccaagttcactttcttccagtctaacattcttagacctgtcctataactcgttcaatggagaaataccatcgaaggtgcaagacatcactgaactgacagcattgcttctccagaacaactctctttctggacccatccctgaccttcgcctccccaagttgagacatttggatttgagcaacaataacctgagtggacctataccaccctccctgcagaagttcccagctacttcttttctgggaaatgcctttctgtgtggatttccattggaaccatgtccagggacaccacctgcttctccatcgtcgccatcgtcccaaaatgccaaaagaagcttctggaaaaagctcagccttggtatcataattgcaatagttgctggaggaggggttgtattcatattgatcctgatcctcttggtatgtatcttcaaaagaaagaaaaatgcagagtctggcataggatcatcttcatccaaaggaaaggcaattgcaggtaaaaggggagaaaaatccaagggggaatacagcagcagtggtattcaagaagcagagagaaataaactgtttttctttgagggctcttcatataattttgacttggaggatctgttgagggcttcggctgaagtccttggaaaaggaagttatgggactacgtacaaagctgttctggaggatggaacaacagtggtggtcaagagattgaaggaagtggtggcgggaaagagggaatttgaacagcagatggagctaattggcaaggtttgccatcatcagaacactgccccattgcgtgcttactactactccaaggatgagaagctcttggtgtatgactatgtcccactaggtagcctttgtgctgctttgcatggtaacaaagctgctggaagaaccccattggactgggagaccagggtgaagatagctctgggcactgcacgcggaatggcttatcttcactccgtgggtagcggcgggaagttcattcacgggaacatcaagtcaagcaacatccttctctcacaggaactcggcgcctgcgtcaccgagttcggccttgcccagctcatgtccacgccccacgtccacccgcggctcgtcgggtaccggtcgcccgaggtcctcgagaccaggaaaccgacgcagaaatctgacgtctacagcttcggcgtcctcctcctcgagatgctcacaggcaaagcccctctcaggtcccccgggcgcgacgactccatcgaacacctcccgaggtgggtgcagtccgtggtccgggaggagtggacgtcggaggtcttcgacgtcgacctgctgaggcacccgaacctagaggacgagatggtccagatgctccacgtcgcgatggcatgcgtcgcggtcgtccccgacgagcggcctcggatggaggaggtggtcggcaggatcgaggagatccggagctcctactcggacacgaagacgtccccggaggacaatccgagggagggcgctttctaataaatcaccgagtaccacacgtaccggaacggcagtgacttgccgtctacagaaagtaggtcggttggtttgacagctctgtgtccagtgaagctttgcagtcagtcagttgattattcctgatcattctttggtaaaagttgttttctgttcttggttccatgaggtagccccggaacgctggtggtggtttcgtttcattagcgctgctgattactgtagggtgttgtttgtggatcgtgccgcgactcggtttcgtattcgtttgaggcagcccgactctttcaagtttgatttattgaatgcgcataagtttttgccactttcctgtgccttacatacacctaattgttgttgaatcatgattatgc

SEQ ID NO: 222060 - DNA, 2276 bp, Zea Mays
aaatcccttaccccttctctctccaaaaccctccctcgctcttaatgcagtccggtgtataaaaccgcgcaacctcatctctaaaacccgctcttgtcttcagaagtttcagatcctcgcatcgtccgcaccttatcctctagactttacagtacctgctctcagctcctccctatctcaatggcatccgcgaatgccatctccaccgcctccctcctccggcccctctctcagggcagggcgacgaggtcacagcggttcgtggtgcgtgcgaacgccaaagacattgcctttgaccagaaatccagggcagcgctgcaggccggcgtcgagaagctcgcaaacgccgtcggtgtcaccctcgggccacgagggaggaatgtggtgctcgatgagtacggaaaccctaaagttgtgaatgatggagtcactattgcccgtgctattgagctgtatgatccaatggaaaatgctggtgcagcattgattcgtgaggttgctagcaagaccaatgattcagctggtgatgggactacaactgcgtccgtccttgctcgtgaaatcatcaagctaggccttctgagtgtaacatctggtgcaaatcctgtatcactaaagaaaggaatagacaaaactgtgcagggcctaattcaggagcttgagaataagtctagaccagtcaagggtggtggtgatatcaaagctgttgcatctatctctgctggcaatgatgaatttatcggatccatgattgctgaagcaattgacaaagtggggcctgatggtgttctatcaattgaatcctcctcatcttttgagaccactgttgaagttgaagaaggaatggagattgaccgaggttatatttccccacaatttgtgacaaacctcgagaaatcaattgtggagtttgagaatgctaaggttcttattactgatcagaagatcacaagcataaaggaaattcttccaattttggagaagaccacacagctgagagcccctctgttcattattgctgaggacattactggtgaagctttggcaactcttgttgttaacaagcttcgaggaattctcaatgttgcagcgattaaggctccaagttttggtgagcggcggaaggctgtacttcaggacattgccatcgtcacaggtgctgagttcctagcaaaagatcttggtttgttggttgaaaatgctacagaggaacaacttggcacagcaaggaaagtcacgatacatcagactacaacaaccctcatagcagatgcagccagtaaagatgagatccaggcgaggattgcacaactgaagaaggagcttgctgagactgattcagtttatgatactgagaaattggccgagagaattgctaagcttgccggtggtgttgctgttatcaaggttggagctgcaactgagactgagcttgaggaccggcagctaagaattgaggatgcaaaaaatgccacttttgcagctatagaggagggcattgttccaggaggtggtgcggcatatgtgcacctatctacggttgtccctaagatcaaagaagcaattgaggaccctgatgagcggcttgcgctgatattattcaaaattagatggtatgaactgtatttgccagaggcattggtagcacctgcttcattgattgcacacaatgctggagtagagggtgaagtggttgtcgagaagatcaaggagagcgattgggaggtgggctacaatgcaatgactgacaagtacgagaacctgatggaggctggtgtgatcgaccctgccaaggtgaccaggtgtgcgctccagaatgcggcctcagtagctggaatggtcctaaccacgcaggccattgttgttgagaagccaaagccgaagcctcaagtggcagagccaccggagggagcccttaccgtttaaaacttaacgttcttgaggctgctgtccagacggttcagatctgttgagagggtagaactttggtttgagaattttggttcagatccactgggagttgtagagtaggattgctattttgcagacgaagagtaattttactctggtctgaacttatccgaattgaagacatttgcatcaccattttttaaaaataagctcatggcgatgctggattgtacgagcaagtacagtatgtttttagcctctcaatttttgcgtctgtctcagcttggtttttagtgttgcgtaatctcctttgactgcgtataggatcgttttacgtaagattgtgttaattgaatgattagtgc

SEQ ID NO: 222061 - DNA, 1443 bp, Zea Mays
ctccttttctctttcacatgttgttcattcttcttcttgatgattactcatccatcgacctcttgttatgtacgtgaacacgaattctcgttttctctctctctctctctctctctctgaaagaacactcatcgtgctctagctagttatgtaggtgaaagaatctcaagctaataatagctagtgtgtcatgcacggttaactgtttttccttcagttgttgttttctttcacgtatgaggcaatgatcgtcgtttacattcatcatttcatcagtttgtttatccacacagccattcatgccttgcgtatgttttctctgaaagaacagatgctttcgtaccaatattattcacatatcagtcatgctgtgtgtgtatatctacgtaccattcacctttcagaccattccgatgctgtcaagttatatgcaacacgtacgtgtgtgtcacgcagggggataaagtgtcgataatagcggacgcgtcatcgtacatcaaggaactaaagcagaagatcgcgaagctaagccaagagatggcatcgtcgtctccgcagcacgccactactggtgtctgccaacaacaaccgtcgtcgtcgtcggtgagtgtgggagtcctgctggacaagaagggccgtttcctcgtcagtgtgttcatggacgagagctgcggcccgccgccggccgggctactcgcttccgtcctcgaggccttcgacgacatcggactcacggtgctcgaggctagggctacctgcgctggttcctttcggctagaagctgtaggagaggaagtagtagtagatgggggcctcatcatcgacgcgcacgcggtggagcaagcagtagttcaggcaatcaagaattgccctgcaaattaaactaatcgacctagtcctccaattcgatcgatcgagttgacgatgcgctggtggtggaccacaaagttcatgccaagctagagactccgagctatatatacatactgattcgcatcgtactttttgaagagagcaaagcaattttttctcttttgcctgccgcaacgagtcagtcttgcgagttctgctatttagtaaggggggcacctgtggccatcgtttggcaaatgccaatatatatacctcaattatccagcttgcgtatccaaattctagagtaaaagaattactcgcacggcatcacggagatggcgtagctagctcccatcgatcacccttcttctctctacccctgatgaatgttgtggtcttcctcgaaacatatcctggctgtatgatttctgaaggttttcgtttcatcgtctgtccactgaatctagcgtgttgtttggttcatatatttgtaacgcgactgataacgttaaatcatatttgtttaaatccaacgtaacgggataccacactagcaattgataccggcctattcagacttaccgcttg

SEQ ID NO: 222062 - DNA, 1947 bp, Zea Mays
ctccagcattgcagttcgttcgtgaggaaagcattgctcataacctgttcttggctattttaagggccgctaatgatgaacacaaacagcggtttagagtgaatccgcaactccatactccaaccagcgctccttcctcggcgcgccttcagccatcgcacagctgagcagtactagtaacatccagtttgctggtcaatcaataaaccacttggtgtgctcgtgggaggaagaagatggaatccatagatttgaaggtgcaggtggtagagtcatcatttatagcgccgagcgagccgacgccaagcaagggcctctggctctcttccttggacatcctgctggtcaacataggccacaccccaacgatctacttgtacagctccaacgatgtagccgcggctgattttttcgacgtgggcagactcaaaaaggctatggccaaggctttggtgcccttctaccccctcgccggccgcctcggcaacaacagcgacaatggtaggacggagatcagctgcaacggcgaaggtgcactctttgttgtcgctcacgcggatggtgatctcactatcgatgacatcaagaaattgaagccatcgccagagttgaggaggctgtttattccactcatcgagccatcgtctatcataatggccatacaggtgacttccttgaagtgtggaggggtggtgttaggaacagctatccaccacgccgccgcagacgcttcaagtgcgttccacttttttcagacatggtcggcattctgcaagcatggtgaccgtgctgccgtggcggtggagctcccgtgccacgaccgcaccctactccgcgcacggtccccacccacagtccaccccgacgcgctcttgacattgctgcctcggctcaccctctctgaccccgagggatcccttgccaccgaagtcttcaccatttccagcgatcagctcgcctccctgaagcacctctgcggtggcgcgagcaccttttgcgcggtgagcgctctcctctggcagtgcgcgtgcgttgcgcgccgccttccaccggattctcaagtgcgcatgctgttccctgccgacctccggcgccggatgaggccgcccctcccgagccactacttcggcaacgcagtgttcaggctatgcgcaactggccgggcgggggatattggcacggtggcgttgggatccgtcgctgcccggatcaagggcgccatcgaccggatggatgacgagctggtgcgttccgccattgactactacgagtacgagacggccgaggtgaacaagagacggactccgacaggcaccctgccacagacggacctcaatattaccagctggttgggtaggtcacagtacgacgcggattttgggtggggaacgccgcaattcatgtcccgggcggactccgaccgcggcggattcgtgcacttgatcaacgatgagggtggtggcaccgccaccggcgacgtccgcgtgctcgtgaccgtgggggctgaaaatataaaggagctagggcggcttctttatgcgaaactctagctaggtgctgctagtggcattatccaaacttgaaatatcccaactcgtaactgatgtaccgaaacctgaattctcaaacactatttcagatcctaggtttgaaaaccaaaatttatacacaaattaactgaaattatatgttatttgtaatgtataatatatgctcttggggactggtgactttatgttaactcttcaacgccctaagttgtgatatctaatatattatgtttgcttgtgtggacttctattaggtctacttctagttcaataatttctgtttctactgtactagactgctagttttgttatatagctatgtaccatgcgatgtggcactgctagctagcagtatgaacttaatttgtaatgtgtgaaatgcatgtgaaatgaggta

SEQ ID NO: 222063 - DNA, 1955 bp, Zea Mays
ggctattttaagggccgctaatgatgaacacaaacagcggtttagagtgaatccgcaactccatactccaaccagcgctccttcctcggcgcgccttcagccatcgcacagctgagtactagtaacatccagtttgctggtcaatcaataaaccacttggtgtgctcgtgggaggaagaagatggaatccatagatttgaaggtgcaggtggtagagtcatcatttatagcgccgagcgagccgacgccaagcaagggcctctggctctcttccttggacatcctgctggtcaacataggccacaccccaacgatctacttgtacagctccaacgatgtagccgcggctgattttttcgacgtgggcagactcaaaaaggctatggccaaggctttggtgcccttctaccccctcgccggccgcctcggcaacaacagcgacaatggtaggacggagatcagctgcaacggcgaaggtgcactctttgttgtcgctcacgcggatggtgatctcactatcgatgacatcaagaaattgaagccatcgccagagttgaggaggctgtttattccactcatcgagccatcgtctatcataatggccatacagtctgctaaagtagatatattgggtcctcctgttaatggcgtgcttatgatggctggctggcaggtgacttccttgaagtgtggaggggtggtgttaggaacagctatccaccacgccgccgcagacgcttcaagtgcgttccacttttttcagacatggtcggcattctgcaagcatggtgaccgtgctgccgtggcggtggagctcccgtgccacgaccgcaccctactccgcgcacggtccccacccacagtccaccccgacgcgctcttgacattgctgcctcggctcaccctctctgaccccgagggatcccttgccaccgaagtcttcaccatttccagcgatcagctcgcctccctgaagcacctctgcggtggcgcgagcaccttttgcgcggtgagcgctctcctctggcagtgcgcgtgcgttgcgcgccgccttccaccggattctcaagtgcgcatgctgttccctgccgacctccggcgccggatgaggccgcccctcccgagccactacttcggcaacgcagtgttcaggctatgcgcaactggccgggcgggggatattggcacggtggcgttgggatccgtcgctgcccggatcaagggcgccatcgaccggatggatgacgagctggtgcgttccgccattgactactacgagtacgagacggccgaggtgaacaagagacggactccgacaggcaccctgccacagacggacctcaatattaccagctggttgggtaggtcacagtacgacgcggattttgggtggggaacgccgcaattcatgtcccgggcggactccgaccgcggcggattcgtgcacttgatcaacgatgagggtggtggcaccgccaccggcgacgtccgcgtgctcgtgaccgtgggggctgaaaatataaaggagctagggcggcttctttatgcgaaactctagctaggtgctgctagtggcattatccaaacttgaaatatcccaactcgtaactgatgtaccgaaacctgaattctcaaacactatttcagatcctaggtttgaaaaccaaaatttatacacaaattaactgaaattatatgttatttgtaatgtataatatatgctcttggggactggtgactttatgttaactcttcaacgccctaagttgtgatatctaatatattatgtttgcttgtgtggacttctattaggtctacttctagttcaataatttctgtttctactgtactagactgctagttttgttatatagctatgtaccatgcgatgtggcactgctagctagcagtatgaacttaatttgtaatgtgtgaaatgcatgtgaaatgaggta

SEQ ID NO: 222064 - DNA, 1438 bp, Zea Mays
aggggacaaccacaagcgcctaagatcccgtcctccgcgtcgagatctttgccgaggcggtgaccgtcgagggatcgccatggcgttgagggcgtcccccgtgtcgcatggcaccgcggcagcgccgctgccgcctttcgcgcggaggaggatggcccgtggggtggtggtggccatggcgtccaccatcaacagggtcaaaactgtcaaagaaccctatacccctccacgagaggtacatcgccaaattacccattcactaccacctcaaaagcgggagattttcgattcacttcaaccttgggccaaggataacctactgaacctactgaagccagttgaaaagtcatggcagccacaggacttcctaccagagccttcttctgatgggttttatgatgaagttaaagaactgagggagcgggcaaatgaaatacctgatgaatactttgtttgcttagttggtgatatggttactgaggaagccttacctacataccaaacaatgcttaacactcttgatggagtccgggatgaaactggtgcaagtccaaccacgtgggcggtttggacaagggcatggacagctgaagagaacagacatggtgacctccttaacaagtacatgtaccttactggacgggttgacatgaaacaaattgagaagaccatacaatatctgattggttccggaatggatcctggaactgagaacaacccctacttgggtttcctctacacatcattccaagaaagggcaacatttgtgtcgcatgggaatactgcaaggcatgccaaggagtatggtgatctcaagctggcccagatatgtggcacgatagcagccgatgagaagcgccacgaaacagcctacaccaagatagtcgagaagctcttcgagatggaccctgattacacagtgcttgcgtttgctgacatgatgaggaagaagatcacgatgccagcccatctcatgtacgacggtaaggacgacaacctgttcgagcacttcagcgcggtggcgcagaggcggctggatgatagagctcaagcgagggcgaagcaagcaccggttattcctttcagttgggtttatgaccgcaaggtgcagctttaatcaagaacgctaggcaatgtgggcatttactacgtatatcattttcagtcctggggttctctataagaaacagtctctaggttatctagcagggtagaattcaactactcgtggatctcactcggtgcaaagtagtgcaaagtacgctatctgttgttaccgtgcaagctgcagagtttggattactatgtgggcctggtggtggagaggaattctgtggggtgcctgcagccagttatgagtggcagctccatcgcaactgagttgttgtattgaatatgttacaggacctatagtaaccgaaagtaataatatggagtt

SEQ ID NO: 222065 - DNA, 644 bp, Zea Mays
ggctgaagcacatgtgtcgtttcatggtgatgggttcaaatagattgttgtcatcacaattacttgatgaatcatcatctgatgacgacgaggatttcatactttctgctgcgcaaatcattcatactgtttcacaagttcgtagaaatccaggaggctctgttccaggccgtgcatatatttatcgagatagagaagcgggacacgcgagattgtaccaagattacctggctgacattcctacttatggcccaaacttgtttcggcggagttggctgcaactcaactggtgtttcagatacatcctcacaagtttcaaaagctccattgacaagattggtaaaaaccaaactttcattaccaccacctacatggaggcacaaatgtgcaatccagtggcaattgcaacctcaaagtcctcattacaatccactagtcagttgttttctgaagctttgagcgacaagctaaagagacagtcgatgaaactgagacagtgccatcaaattcgagttttaacgaggcagttcctccaggaaatggtgaagaaaaacataaaaggctttcaagcagtgcaaacgcagatgaccctgaaacatgtacagcaaataaagtaccaaacaatagagtccgtacggtcgtag

SEQ ID NO: 222066 - DNA, 2631 bp, Zea Mays
aaaagttagactagacagccacttgttctcaaatcacttcttcccggactcccagactcctcccaaaaccctcgcatcctctcccacgcatgtcacaatcgccatgaccgacagaaaccccgccgccgcctcaagcaagcgtcactgtgacctctccctcgacgatcccacgccgtcggccaagctccagcggtgctccgagccgtcagaaccaacgccggcggggaaaccgaacggcggcgcggcgacgggagaggagagcgagatgatggccggcgcacggaaccctagggcgcagaggtacctggtcgccgtggagtacattggcacccgcttctccggctcacagaagcagcccaaccagcgcaccgtcactggggtcctcgaggaggcatttcaccgatttattgggcagccagtttcaataatcttttctagccgaacggatgcaggtgttcatgctttatcaaatgtttgtcatgttgatgttgagcggataagtaaaaggaagcctggcgaagttgtctgtacacaaaactcattttttttcttaacactgattaccgaccaggccttgtctacatctcttgacactctaaacttatttctttttttgatctttgcatgataagtatatttgtgacagttgttgttatgcctgatttaaatcttctaggttttccaaaataaaattctacaagcaatagaattaccttttctcctgaccttgcctctaaatcatctattttgtccgttccaaatcataattcactttagctttgccttaagtcatatttaaccaagtttaaataaaaatgcaccaacatctacaacatcaattagtttcattaaatttctatatgaaatgtcttgatagttcacaaaatgttgatgtcgttgaagacctggcggctggcgccactgctgaaacaagtcgctgtagtctgggcgtctggattgatgtattttggtgggagagttgtttggtaggttttgaactgtttgttgtgagtgttgttagtagttgagagtgattgttggtagttaaactatcacaatgttgattgtaagctggtaacatcagcagtggatatttgactattggtaagctttctaataaagctgggtgaatgcttttgatctaaaaaatgtcttgatagtgcacttgattggactttaagattttaatatgtttttattcctaaaaacttgttcagttagaggcatttgacttagaaccaaactaaagtgtcctataatttgtaaaagaggaaataaataaaaatatgttttctagaacagcgcctcttataactcctgctgctgatttgcttttccctttttacagttaacacctcatgagcctggagttgtaaaacgtgctgtgaaccactttctactgaagagtgaaggtgacataatggtgactgatgtctgctgtgttgcaccagattttcatgctagatacaaatctctagagcgcacatatcactatcgcttgcttgctggacctgaatcaacatctgtttttgagaaaaactctgtttggcatatatctgaagatttggatattcagtcaatgaagaaagcatgcagcatacttgttgggcatcatgatttcagttcatttcgagcggctggatgtcaggcaaactctccagtgcgaactctggatgaacttagtgttacagaagtattccctttcatgttttttccttcaagtgtagaaagatcagagttggaattatcaaatgtctctcttgtttattcaaggaaaccagacatggaatcttctgggaaaggatctgatggttcctgtaccagtagtgtgaaatcagattttgagaatggaaaagattttggaaagcggtcaaggcaccgttgctttgttgttactgcaagggcacggtcttttctttaccaccaggtaaggttgatggtcggtcttctaaaatctgttgggactggagatctaacaactgcagatgttgagagaattctggatgcaaagacggttactgctgcacccagtatggcaccttcttgtggtctgtaccttgctaacgttaaatatgatctgaatacctgaagacaagttttatctagtggcttctgttggtgggcctccagattttgtcagctgttggctatcaaaggtatacctgaatccaatctatgaatagtgcacctcagtgagtgcaactttgaagtatctgtaccaggaattatatgctgccacttgccaaagctttcagttgcctgttttgtccactgaatcttgcatggtgattgaaaacctagaattaagtttatctgtcagcacaagagccggcttcattctcttcttgtacacagagctcttctgcatgttcagaaacaaaataggtagcttcattttagttaagttcaactatccactctttaaatttcagctggatccacccgattttgttgggtgtacgtagatttgacctggtaggggcaaaattttatttcttggttttctcatgactgtacttggttcttgatatataattaattagccaaatgcgttgtgtgcatattgaaaatattcttttctgttccttgataaattacatcgagcaagactgcaagagaactttcttcaag

SEQ ID NO: 222067 - DNA, 2117 bp, Zea Mays
gttagactagacagccacttgttctcaaatcacttcttcccggactcccagactcctcccaaaaccctcgcatcctctcccacgcatgtcacaatcgccatgaccgacagaaaccccgccgccgcctcaagcaagcgtcactgtgacctctccctcgacgatcccacgccgtcggccaagctccagcggtgctccgagccgtcagaaccaacgccggcggggaaaccgaacggcggcgcggcgacgggagaggagagcgagatgatggccggcgcacggaaccctagggcgcagaggtacctggtcgccgtggagtacattggcacccgcttctccggctcacagaagcagcccaaccagcgcaccgtcactggggtcctcgaggaggcatttcaccgatttattgggcagccagtttcaataatcttttctagccgaacggatgcaggtgttcatgctttatcaaatgtttgtcatgttgatgttgagcggataagtaaaaggaagcctggcgaagttgtctgtacacaaaactcattttttttcttaacactgattaccgaccaggccttgtctacatctcttgacactctaaacttatttctttttttgatctttgcatgataagtatatttgtgacagttgttgttatgcctgatttaaatcttctaggttttccaaaataaaattctacaagcaatagaattaccttttctcctgaccttgcctctaaatcatctattttgtccgttccaaatcataattcactttagctttgccttaagtcatatttaaccaagtttaaataaaaatgcaccaacatctacaacatcaattagtttcattaaatttctatatgaaatgtcttgatagttcacaaaatgttgatgtcgttgaagacctggcggctggcgccactgctgaaacaagtcgctgtagtctgggcgtctggattgatgtattttggtgggagagttgtttgttaacacctcatgagcctggagttgtaaaacgtgctgtgaaccactttctactgaagagtgaaggtgacataatggtgactgatgtctgctgtgttgcaccagattttcatgctagatacaaatctctagagcgcacatatcactatcgcttgcttgctggacctgaatcaacatctgtttttgagaaaaactctgtttggcatatatctgaagatttggatattcagtcaatgaagaaagcatgcagcatacttgttgggcatcatgatttcagttcatttcgagcggctggatgtcaggcaaactctccagtgcgaactctggatgaacttagtgttacagaagtattccctttcatgttttttccttcaagtgtagaaagatcagagttggaattatcaaatgtctctcttgtttattcaaggaaaccagacatggaatcttctgggaaaggatctgatggttcctgtaccagtagtgtgaaatcagattttgagaatggaaaagattttggaaagcggtcaaggcaccgttgctttgttgttactgcaagggcacggtcttttctttaccaccaggtaaggttgatggtcggtcttctaaaatctgttgggactggagatctaacaactgcagatgttgagagaattctggatgcaaagacggttactgctgcacccagtatggcaccttcttgtgattttgtcagctgttggctatcaaaggaattatatgctgccacttgccaaagctttcagttgcctgttttgtccactgaatcttgcatggtgattgaaaacctagaattaagtttatctgtcagcacaagagccggcttcattctcttcttgtacacagagctcttctgcatgttcagaaacaaaataggtagcttcattttagttaagttcaactatccactctttaaatttcagctggatccacccgattttgttgggtgtacgtagatttgacctggtaggggcaaaattttatttcttggttttctcatgactgtacttggttcttgatatataattaattagccaaatgcgttgtgtgcatattgaaaatattcttttctgttccttgataaattacatcgagcaagactgcaagagaactttcttcaag

SEQ ID NO: 222068 - DNA, 1656 bp, Zea Mays
gttagactagacagccacttgttctcaaatcacttcttcccggactcccagactcctcccaaaaccctcgcatcctctcccacgcatgtcacaatcgccatgaccgacagaaaccccgccgccgcctcaagcaagcgtcactgtgacctctccctcgacgatcccacgccgtcggccaagctccagcggtgctccgagccgtcagaaccaacgccggcggggaaaccgaacggcggcgcggcgacgggagaggagagcgagatgatggccggcgcacggaaccctagggcgcagaggtacctggtcgccgtggagtacattggcacccgcttctccggctcacagaagcagcccaaccagcgcaccgtcactggggtcctcgaggaggcatttcaccgatttattgggcagccagtttcaataatcttttctagccgaacggatgcaggtgttcatgctttatcaaatgtttgtcatgttgatgttgagcggataagtaaaaggaagcctggcgaagttttaacacctcatgagcctggagttgtaaaacgtgctgtgaaccactttctactgaagagtgaaggtgacataatggtgactgatgtctgctgtgttgcaccagattttcatgctagatacaaatctctagagcgcacatatcactatcgcttgcttgctggacctgaatcaacatctgtttttgagaaaaactctgtttggcatatatctgaagatttggatattcagtcaatgaagaaagcatgcagcatacttgttgggcatcatgatttcagttcatttcgagcggctggatgtcaggcaaactctccagtgcgaactctggatgaacttagtgttacagaagaaaccagacatggaatcttctgggaaaggatctgatggttcctgtaccagtagtgtgaaatcagattttgagaatggaaaagattttggaaagcggtcaaggcaccgttgctttgttgttactgcaagggcacggtcttttctttaccaccaggtaaggttgatggtcggtcttctaaaatctgttgggactggagatctaacaactgcagatgttgagagaattctggatgcaaagacggttactgctgcacccagtatggcaccttcttgtggtctgtaccttgctaacgttaaatatgatctgaatacctgaagacaagttttatctagtggcttctgttggtgggcctccagattttgtcagctgttggctatcaaaggaattatatgctgccacttgccaaagctttcagttgcctgttttgtccactgaatcttgcatggtgattgaaaacctagaattaagtttatctgtcagcacaagagccggcttcattctcttcttgtacacagagctcttctgcatgttcagaaacaaaataggtagcttcattttagttaagttcaactatccactctttaaatttcagctggatccacccgattttgttgggtgtacgtagatttgacctggtaggggcaaaattttatttcttggttttctcatgactgtacttggttcttgatatataattaattagccaaatgcgttgtgtgcatattgaaaatattcttttctgttccttgataaattacatcgagcaagactgcaagagaactttcttcaag

SEQ ID NO: 222069 - DNA, 2698 bp, Zea Mays
gccacttgttctcaaatcacttcttcccggactcccagactcctcccaaaaccctcgcatcctctcccacgcatgtcacaatcgccatgaccgacagaaaccccgccgccgcctcaagcaagcgtcactgtgacctctccctcgacgatcccacgccgtcggccaagctccagcggtgctccgagccgtcagaaccaacgccggcggggaaaccgaacggcggcgcggcgacgggagaggagagcgagatgatggccggcgcacggaaccctagggcgcagaggtacctggtcgccgtggagtacattggcacccgcttctccggctcacagaagcagcccaaccagcgcaccgtcactggggtcctcgaggaggcatttcaccgatttattgggcagccagtttcaataatcttttctagccgaacggtgttcatgctttatcaaatgtttgtcatgttgatgttgagcggataagtaaaaggaagcctggcgaagttgtctgtacacaaaactcattttttttcttaacactgattaccgaccaggccttgtctacatctcttgacactctaaacttatttctttttttgatctttgcatgataagtatatttgtgacagttgttgttatgcctgatttaaatcttctaggttttccaaaataaaattctacaagcaatagaattaccttttctcctgaccttgcctctaaatcatctattttgtccgttccaaatcataattcactttagctttgccttaagtcatatttaaccaagtttaaataaaaatgcaccaacatctacaacatcaattagtttcattaaatttctatatgaaatgtcttgatagttcacaaaatgttgatgtcgttgaagacctggcggctggcgccactgctgaaacaagtcgctgtagtctgggcgtctggattgatgtattttggtgggagagttgtttggtaggttttgaactgtttgttgtgagtgttgttagtagttgagagtgattgttggtagttaaactatcacaatgttgattgtaagctggtaacatcagcagtggatatttgactattggtaagctttctaataaagctgggtgaatgcttttgatctaaaaaatgtcttgatagtgcacttgattggactttaagattttaatatgtttttattcctaaaaacttgttcagttagaggcatttgacttagaaccaaactaaagtgtcctataatttgtaaaagaggaaataaataaaaatatgttttctagaacagcgcctcttataactcctgctgctgatttgcttttccctttttacagttaacacctcatgagcctggagttgtaaaacgtgctgtgaaccactttctactgaagagtgaaggtgacataatggtgactgatgtctgctgtgttgcaccagattttcatgctagatacaaatctctagagcgcacatatcactatcgcttgcttgctggacctgaatcaacatctgtttttgagaaaaactctgtttggcatatatctgaagatttggatattcagtcaatgaagaaagcatgcagcatacttgttgggcatcatgatttcagttcatttcgagcggctggatgtcaggcaaactctccagtgcgaactctggatgaacttagtgttacagaagtattccctttcatgttttttccttcaagtgtagaaagatcagagttggaattatcaaatgtctctcttgtttattcaaggaaaccagacatggaatcttctgggaaaggatctgatggttcctgtaccagtagtgtgaaatcagattttgagaatggaaaagattttggaaagcggtcaaggcaccgttgctttgttgttactgcaagggcacggtcttttctttaccaccaggtaaggttgatggtcggtcttctaaaatctgttgggactggagatctaacaactgcagatgttgagagaattctggatgcaaagacggttactgctgcacccagtatggcaccttcttgtggtctgtaccttgctaacgttaaatatgatctgaatacctgaagacaagttttatctagtggcttctgttggtgggcctccagattttgtcagctgttggctatcaaaggtatacctgaatccaatctatgaatagtgcacctcagtgagtgcaactttgaagtatctgtaccaggtcgaataagatattcaaacatgtcctttgcttatcaagaatgatacatcattatacaccttgtcgtaatctgtaatttcactttgatcaggaattatatgctgccacttgccaaagctttcagttgcctgttttgtccactgaatcttgcatggtgattgaaaacctagaattaagtttatctgtcagcacaagagccggcttcattctcttcttgtacacagagctcttctgcatgttcagaaacaaaataggtagcttcattttagttaagttcaactatccactctttaaatttcagctggatccacccgattttgttgggtgtacgtagatttgacctggtaggggcaaaattttatttcttggttttctcatgactgtacttggttcttgatatataattaattagccaaatgcgttgtgtgcatattgaaaatattcttttctgttccttgataaattacatcgagcaagactgcaagagaactttcttcaag

SEQ ID NO: 222070 - DNA, 2472 bp, Zea Mays
gccacttgttctcaaatcacttcttcccggactcccagactcctcccaaaaccctcgcatcctctcccacgcatgtcacaatcgccatgaccgacagaaaccccgccgccgcctcaagcaagcgtcactgtgacctctccctcgacgatcccacgccgtcggccaagctccagcggtgctccgagccgtcagaaccaacgccggcggggaaaccgaacggcggcgcggcgacgggagaggagagcgagatgatggccggcgcacggaaccctagggcgcagaggtacctggtcgccgtggagtacattggcacccgcttctccggctcacagaagcagcccaaccagcgcaccgtcactggggtcctcgaggaggcatttcaccgatttattgggcagccagtttcaataatcttttctagccgaacggatgcaggtgttcatgctttatcaaatgtttgtcatgttgatgttgagcggataagtaaaaggaagcctggcgaagttgtctgtacacaaaactcattttttttcttaacactgattaccgaccaggccttgtctacatctcttgacactctaaacttatttctttttttgatctttgcatgataagtatatttgtgacagttgttgttatgcctgatttaaatcttctaggttttccaaaataaaattctacaagcaatagaattaccttttctcctgaccttgcctctaaatcatctattttgtccgttccaaatcataattcactttagctttgccttaagtcatatttaaccaagtttaaataaaaatgcaccaacatctacaacatcaattagtttcattaaatttctatatgaaatgtcttgatagttcacaaaatgttgatgtcgttgaagacctggcggctggcgccactgctgaaacaagtcgctgtagtctgggcgtctggattgatgtattttggtgggagagttgtttggtaggttttgaactgtttgttgtgagtgttgttagtagttgagagtgattgttggtagttaaactatcacaatgttgattgtaagctggtaacatcagcagtggatatttgactattggtaagctttctaataaagctgggtgaatgcttttgatctaaaaaatgtcttgatagtgcacttgattggactttaagattttaatatgtttttattcctaaaaacttgttcagttagaggcatttgacttagaaccaaactaaagtgtcctataatttgtaaaagaggaaataaataaaaatatgttttctagaacagcgcctcttataactcctgctgctgatttgcttttccctttttacagttaacacctcatgagcctggagttgtaaaacgtgctgtgaaccactttctactgaagagtgaaggtgacataatggtgactgatgtctgctgtgttgcaccagattttcatgctagatacaaatctctagagcgcacgtagatatcactatcgcttgcttgctggacctgaatcaacatctgtttttgagaaaaactctgtttggcatatatctgaagatttggatattcagtcaatgaagaaagcatgcagcatacttgttgggcatcatgatttcagttcatttcgagcggctggatgtcaggcaaactctccagtgcgaactctggatgaacttagtgttacagaagaaaccagacatggaatcttctgggaaaggatctgatggttcctgtaccagtagtgtgaaatcagattttgagaatggaaaagattttggaaagcggtcaaggcaccgttgctttgttgttactgcaagggcacggtcttttctttaccaccaggtaaggttgatggtcggtcttctaaaatctgttgggactggagatctaacaactgcagatgttgagagaattctggatgcaaagacggttactgctgcacccagtatggcaccttcttgtggtctgtaccttgctaacgttaaatatgatctgaatacctgaagacaagttttatctagtggcttctgttggtgggcctccagattttgtcagctgttggctatcaaaggaattatatgctgccacttgccaaagctttcagttgcctgttttgtccactgaatcttgcatggtgattgaaaacctagaattaagtttatctgtcagcacaagagccggcttcattctcttcttgtacacagagctcttctgcatgttcagaaacaaaataggtagcttcattttagttaagttcaactatccactctttaaatttcagctggatccacccgattttgttgggtgtacgtagatttgacctggtaggggcaaaattttatttcttggttttctcatgactgtacttggttcttgatatataattaattagccaaatgcgttgtgtgcatattgaaaatattcttttctgttccttgataaattacatcgagcaagactgcaagagaactttcttcaag

SEQ ID NO: 222071 - DNA, 1788 bp, Zea Mays
ccacttgttctcaaatcacttcttcccggactcccagactcctcccaaaaccctcgcatcctctcccacgcatgtcacaatcgccatgaccgacagaaaccccgccgccgcctcaagcaagcgtcactgtgacctctccctcgacgatcccacgccgtcggccaagctccagcggtgctccgagccgtcagaaccaacgccggcggggaaaccgaacggcggcgcggcgacgggagaggagagcgagatgatggccggcgcacggaaccctagggcgcagaggtacctggtcgccgtggagtacattggcacccgcttctccggctcacagaagcagcccaaccagcgcaccgtcactggggtcctcgaggaggcatttcaccgatttattgggcagccagtttcaataatcttttctagccgaacggatgcaggtgttcatgctttatcaaatgtttgtcatgttgatgttgagcggataagtaaaaggaagcctggcgaagttttaacacctcatgagcctggagttgtaaaacgtgctgtgaaccactttctactgaagagtgaaggtgacataatggtgactgatgtctgctgtgttgcaccagattttcatgctagatacaaatctctagagcgcacatatcactatcgcttgcttgctggacctgaatcaacatctgtttttgagaaaaactctgtttggcatatatctgaagatttggatattcagtcaatgaagaaagcatgcagcatacttgttgggcatcatgatttcagttcatttcgagcggctggatgtcaggcaaactctccagtgcgaactctggatgaacttagtgttacagaagtattccctttcatgttttttccttcaagtgtagaaagatcagagttggaattatcaaatgtctctcttgtttattcaaggaaaccagacatggaatcttctgggaaaggatctgatggttcctgtaccagtagtgtgaaatcagattttgagaatggaaaagattttggaaagcggtcaaggcaccgttgctttgttgttactgcaagggcacggtcttttctttaccaccaggtaaggttgatggtcggtcttctaaaatctgttgggactggagatctaacaactgcagatgttgagagaattctggatgcaaagacggttactgctgcacccagtatggcaccttcttgtggtctgtaccttgctaacgttaaatatgatctgaatacctgaagacaagttttatctagtggcttctgttggtgggcctccagattttgtcagctgttggctatcaaaggtatacctgaatccaatctatgaatagtgcacctcagtgagtgcaactttgaagtatctgtaccaggaattatatgctgccacttgccaaagctttcagttgcctgttttgtccactgaatcttgcatggtgattgaaaacctagaattaagtttatctgtcagcacaagagccggcttcattctcttcttgtacacagagctcttctgcatgttcagaaacaaaataggtagcttcattttagttaagttcaactatccactctttaaatttcagctggatccacccgattttgttgggtgtacgtagatttgacctggtaggggcaaaattttatttcttggttttctcatgactgtacttggttcttgatatataattaattagccaaatgcgttgtgtgcatattgaaaatattcttttctgttccttgataaattacatcgagcaagactgcaagagaactttcttcaag

SEQ ID NO: 222072 - DNA, 2169 bp, Zea Mays
ctcaaatcacttcttcccggactcccagactcctcccaaaaccctcgcatcctctcccacgcatgtcacaatcgccatgaccgacagaaaccccgccgccgcctcaagcaagcgtcactgtgacctctccctcgacgatcccacgccgtcggccaagctccagcggtgctccgagccgtcagaaccaacgccggcggggaaaccgaacggcggcgcggcgacgggagaggagagcgagatgatggccggcgcacggaaccctagggcgcagaggtacctggtcgccgtggagtacattggcacccgcttctccggctcacagaagcagcccaaccagcgcaccgtcactggggtcctcgaggaggcatttcaccgatttattgggcagccagtttcaataatcttttctagccgaacggtgttcatgctttatcaaatgtttgtcatgttgatgttgagcggataagtaaaaggaagcctggcgaagttgtctgtacacaaaactcattttttttcttaacactgattaccgaccaggccttgtctacatctcttgacactctaaacttatttctttttttgatctttgcatgataagtatatttgtgacagttgttgttatgcctgatttaaatcttctaggttttccaaaataaaattctacaagcaatagaattaccttttctcctgaccttgcctctaaatcatctattttgtccgttccaaatcataattcactttagctttgccttaagtcatatttaaccaagtttaaataaaaatgcaccaacatctacaacatcaattagtttcattaaatttctatatgaaatgtcttgatagttcacaaaatgttgatgtcgttgaagacctggcggctggcgccactgctgaaacaagtcgctgtagtctgggcgtctggattgatgtattttggtgggagagttgtttgttaacacctcatgagcctggagttgtaaaacgtgctgtgaaccactttctactgaagagtgaaggtgacataatggtgactgatgtctgctgtgttgcaccagattttcatgctagatacaaatctctagagcgcacatatcactatcgcttgcttgctggacctgaatcaacatctgtttttgagaaaaactctgtttggcatatatctgaagatttggatattcagtcaatgaagaaagcatgcagcatacttgttgggcatcatgatttcagttcatttcgagcggctggatgtcaggcaaactctccagtgcgaactctggatgaacttagtgttacagaagtattccctttcatgttttttccttcaagtgtagaaagatcagagttggaattatcaaatgtctctcttgtttattcaaggaaaccagacatggaatcttctgggaaaggatctgatggttcctgtaccagtagtgtgaaatcagattttgagaatggaaaagattttggaaagcggtcaaggcaccgttgctttgttgttactgcaagggcacggtcttttctttaccaccaggtaaggttgatggtcggtcttctaaaatctgttgggactggagatctaacaactgcagatgttgagagaattctggatgcaaagacggttactgctgcacccagtatggcaccttcttgtggtctgtaccttgctaacgttaaatatgatctgaatacctgaagacaagttttatctagtggcttctgttggtgggcctccagattttgtcagctgttggctatcaaaggaattatatgctgccacttgccaaagctttcagttgcctgttttgtccactgaatcttgcatggtgattgaaaacctagaattaagtttatctgtcagcacaagagccggcttcattctcttcttgtacacagagctcttctgcatgttcagaaacaaaataggtagcttcattttagttaagttcaactatccactctttaaatttcagctggatccacccgattttgttgggtgtacgtagatttgacctggtaggggcaaaattttatttcttggttttctcatgactgtacttggttcttgatatataattaattagccaaatgcgttgtgtgcatattgaaaatattcttttctgttccttgataaattacatcgagcaagactgcaagagaactttcttcaag

SEQ ID NO: 222073 - DNA, 2547 bp, Zea Mays
ctcaaatcacttcttcccggactcccagactcctcccaaaaccctcgcatcctctcccacgcatgtcacaatcgccatgaccgacagaaaccccgccgccgcctcaagcaagcgtcactgtgacctctccctcgacgatcccacgccgtcggccaagctccagcggtgctccgagccgtcagaaccaacgccggcggggaaaccgaacggcggcgcggcgacgggagaggagagcgagatgatggccggcgcacggaaccctagggcgcagaggtacctggtcgccgtggagtacattggcacccgcttctccggctcacagaagcagcccaaccagcgcaccgtcactggggtcctcgaggaggcatttcaccgatttattgggcagccagtttcaataatcttttctagccgaacggatgcaggtgttcatgctttatcaaatgtttgtcatgttgatgttgagcggataagtaaaaggaagcctggcgaagttgtctgtacacaaaactcattttttttcttaacactgattaccgaccaggccttgtctacatctcttgacactctaaacttatttctttttttgatctttgcatgataagtatatttgtgacagttgttgttatgcctgatttaaatcttctaggttttccaaaataaaattctacaagcaatagaattaccttttctcctgaccttgcctctaaatcatctattttgtccgttccaaatcataattcactttagctttgccttaagtcatatttaaccaagtttaaataaaaatgcaccaacatctacaacatcaattagtttcattaaatttctatatgaaatgtcttgatagttcacaaaatgttgatgtcgttgaagacctggcggctggcgccactgctgaaacaagtcgctgtagtctgggcgtctggattgatgtattttggtgggagagttgtttggtaggttttgaactgtttgttgtgagtgttgttagtagttgagagtgattgttggtagttaaactatcacaatgttgattgtaagctggtaacatcagcagtggatatttgactattggtaagctttctaataaagctgggtgaatgcttttgatctaaaaaatgtcttgatagtgcacttgattggactttaagattttaatatgtttttattcctaaaaacttgttcagttagaggcatttgacttagaaccaaactaaagtgtcctataatttgtaaaagaggaaataaataaaaatatgttttctagaacagcgcctcttataactcctgctgctgatttgcttttccctttttacagttaacacctcatgagcctggagttgtaaaacgtgctgtgaaccactttctactgaagagtgaaggtgacataatggtgactgatgtctgctgtgttgcaccagattttcatgctagatacaaatctctagagcgcacatatcactatcgcttgcttgctggacctgaatcaacatctgtttttgagaaaaactctgtttggcatatatctgaagatttggatattcagtcaatgaagaaagcatgcagcatacttgttgggcatcatgatttcagttcatttcgagcggctggatgtcagggatgaagcccattttttgctgtttggctggagccaaaggattatccctaatcacagcaagaggtgttgtttagagtgcctttggatttaggcaaactctccagtgcgaactctggatgaacttagtgttacagaagtattccctttcatgttttttccttcaagtgtagaaagatcagagttggaattatcaaatgtctctcttgtttattcaaggaaaccagacatggaatcttctgggaaaggatctgatggttcctgtaccagtagtgtgaaatcagattttgagaatggaaaagattttggaaagcggtcaaggcaccgttgctttgttgttactgcaagggcacggtcttttctttaccaccaggtaaggttgatggtcggtcttctaaaatctgttgggactggagatctaacaactgcagatgttgagagaattctggatgcaaagacggttactgctgcacccagtatggcaccttcttgtgattttgtcagctgttggctatcaaaggaattatatgctgccacttgccaaagctttcagttgcctgttttgtccactgaatcttgcatggtgattgaaaacctagaattaagtttatctgtcagcacaagagccggcttcattctcttcttgtacacagagctcttctgcatgttcagaaacaaaataggtagcttcattttagttaagttcaactatccactctttaaatttcagctggatccacccgattttgttgggtgtacgtagatttgacctggtaggggcaaaattttatttcttggttttctcatgactgtacttggttcttgatatataattaattagccaaatgcgttgtgtgcatattgaaaatattcttttctgttccttgataaattacatcgagcaagactgcaagagaactttcttcaag

SEQ ID NO: 222074 - DNA, 2661 bp, Zea Mays
ctcaaatcacttcttcccggactcccagactcctcccaaaaccctcgcatcctctcccacgcatgtcacaatcgccatgaccgacagaaaccccgccgccgcctcaagcaagcgtcactgtgacctctccctcgacgatcccacgccgtcggccaagctccagcggtgctccgagccgtcagaaccaacgccggcggggaaaccgaacggcggcgcggcgacgggagaggagagcgagatgatggccggcgcacggaaccctagggcgcagaggtacctggtcgccgtggagtacattggcacccgcttctccggctcacagaagcagcccaaccagcgcaccgtcactggggtcctcgaggaggcatttcaccgatttattgggcagccagtttcaataatcttttctagccgaacggatgcaggtgttcatgctttatcaaatgtttgtcatgttgatgttgagcggataagtaaaaggaagcctggcgaagttgtctgtacacaaaactcattttttttcttaacactgattaccgaccaggccttgtctacatctcttgacactctaaacttatttctttttttgatctttgcatgataagtatatttgtgacagttgttgttatgcctgatttaaatcttctaggttttccaaaataaaattctacaagcaatagaattaccttttctcctgaccttgcctctaaatcatctattttgtccgttccaaatcataattcactttagctttgccttaagtcatatttaaccaagtttaaataaaaatgcaccaacatctacaacatcaattagtttcattaaatttctatatgaaatgtcttgatagttcacaaaatgttgatgtcgttgaagacctggcggctggcgccactgctgaaacaagtcgctgtagtctgggcgtctggattgatgtattttggtgggagagttgtttggtaggttttgaactgtttgttgtgagtgttgttagtagttgagagtgattgttggtagttaaactatcacaatgttgattgtaagctggtaacatcagcagtggatatttgactattggtaagctttctaataaagctgggtgaatgcttttgatctaaaaaatgtcttgatagtgcacttgattggactttaagattttaatatgtttttattcctaaaaacttgttcagttagaggcatttgacttagaaccaaactaaagtgtcctataatttgtaaaagaggaaataaataaaaatatgttttctagaacagcgcctcttataactcctgctgctgatttgcttttccctttttacagttaacacctcatgagcctggagttgtaaaacgtgctgtgaaccactttctactgaagagtgaaggtgacataatggtgactgatgtctgctgtgttgcaccagattttcatgctagatacaaatctctagagcgcacgtagatatcactatcgcttgcttgctggacctgaatcaacatctgtttttgagaaaaactctgtttggcatatatctgaagatttggatattcagtcaatgaagaaagcatgcagcatacttgttgggcatcatgatttcagttcatttcgagcggctggatgtcagcctggtgggacggggcagaatattctgttagtgctgaagcgcgcagggaattaaactccttcattaccttcggcacttggactatctggaagttcaggaatgattgtgtcttcaatgaggcaaactctccagtgcgaactctggatgaacttagtgttacagaagtattccctttcatgttttttccttcaagtgtagaaagatcagagttggaattatcaaatgtctctcttgtttattcaaggaaaccagacatggaatcttctgggaaaggatctgatggttcctgtaccagtagtgtgaaatcagattttgagaatggaaaagattttggaaagcggtcaaggcaccgttgctttgttgttactgcaagggcacggtcttttctttaccaccaggtaaggttgatggtcggtcttctaaaatctgttgggactggagatctaacaactgcagatgttgagagaattctggatgcaaagacggttactgctgcacccagtatggcaccttcttgtggtctgtaccttgctaacgttaaatatgatctgaatacctgaagacaagttttatctagtggcttctgttggtgggcctccagattttgtcagctgttggctatcaaaggaattatatgctgccacttgccaaagctttcagttgcctgttttgtccactgaatcttgcatggtgattgaaaacctagaattaagtttatctgtcagcacaagagccggcttcattctcttcttgtacacagagctcttctgcatgttcagaaacaaaataggtagcttcattttagttaagttcaactatccactctttaaatttcagctggatccacccgattttgttgggtgtacgtagatttgacctggtaggggcaaaattttatttcttggttttctcatgactgtacttggttcttgatatataattaattagccaaatgcgttgtgtgcatattgaaaatattcttttctgttccttgataaattacatcgagcaagactgcaagagaactttcttcaag

SEQ ID NO: 222075 - DNA, 2379 bp, Zea Mays
ctcaaatcacttcttcccggactcccagactcctcccaaaaccctcgcatcctctcccacgcatgtcacaatcgccatgaccgacagaaaccccgccgccgcctcaagcaagcgtcactgtgacctctccctcgacgatcccacgccgtcggccaagctccagcggtgctccgagccgtcagaaccaacgccggcggggaaaccgaacggcggcgcggcgacgggagaggagagcgagatgatggccggcgcacggaaccctagggcgcagaggtacctggtcgccgtggagtacattggcacccgcttctccggctcacagaagcagcccaaccagcgcaccgtcactggggtcctcgaggaggcatttcaccgatttattgggcagccagtttcaataatcttttctagccgaacggatgcaggtgttcatgctttatcaaatgtttgtcatgttgatgttgagcggataagtaaaaggaagcctggcgaagttgtctgtacacaaaactcattttttttcttaacactgattaccgaccaggccttgtctacatctcttgacactctaaacttatttctttttttgatctttgcatgataagtatatttgtgacagttgttgttatgcctgatttaaatcttctaggttttccaaaataaaattctacaagcaatagaattaccttttctcctgaccttgcctctaaatcatctattttgtccgttccaaatcataattcactttagctttgccttaagtcatatttaaccaagtttaaataaaaatgcaccaacatctacaacatcaattagtttcattaaatttctatatgaaatgtcttgatagttcacaaaatgttgatgtcgttgaagacctggcggctggcgccactgctgaaacaagtcgctgtagtctgggcgtctggattgatgtattttggtgggagagttgtttggtaggttttgaactgtttgttgtgagtgttgttagtagttgagagtgattgttggtagttaaactatcacaatgttgattgtaagctggtaacatcagcagtggatatttgactattggtaagctttctaataaagctgggtgaatgcttttgatctaaaaaatgtcttgatagtgcacttgattggactttaagattttaatatgtttttattcctaaaaacttgttcagttagaggcatttgacttagaaccaaactaaagtgtcctataatttgtaaaagaggaaataaataaaaatatgttttctagaacagcgcctcttataactcctgctgctgatttgcttttccctttttacagttaacacctcatgagcctggagttgtaaaacgtgctgtgaaccactttctactgatatcactatcgcttgcttgctggacctgaatcaacatctgtttttgagaaaaactctgtttggcatatatctgaagatttggatattcagtcaatgaagaaagcatgcagcatacttgttgggcatcatgatttcagttcatttcgagcggctggatgtcaggcaaactctccagtgcgaactctggatgaacttagtgttacagaagtattccctttcatgttttttccttcaagtgtagaaagatcagagttggaattatcaaatgtctctcttgtttattcaaggaaaccagacatggaatcttctgggaaaggatctgatggttcctgtaccagtagtgtgaaatcagattttgagaatggaaaagattttggaaagcggtcaaggcaccgttgctttgttgttactgcaagggcacggtcttttctttaccaccaggtaaggttgatggtcggtcttctaaaatctgttgggactggagatctaacaactgcagatgttgagagaattctggatgcaaagacggttactgctgcacccatggcttctgttggtgggcctccagattttgtcagctgttggctatcaaaggaattatatgctgccacttgccaaagctttcagttgcctgttttgtccactgaatcttgcatggtgattgaaaacctagaattaagtttatctgtcagcacaagagccggcttcattctcttcttgtacacagagctcttctgcatgttcagaaacaaaataggtagcttcattttagttaagttcaactatccactctttaaatttcagctggatccacccgattttgttgggtgtacgtagatttgacctggtaggggcaaaattttatttcttggttttctcatgactgtacttggttcttgatatataattaattagccaaatgcgttgtgtgcatattgaaaatattcttttctgttccttgataaattacatcgagcaagactgcaagagaactttcttcaag

SEQ ID NO: 222076 - DNA, 2114 bp, Zea Mays
atcacttcttcccggactcccagactcctcccaaaaccctcgcatcctctcccacgcatgtcacaatcgccatgaccgacagaaaccccgccgccgcctcaagcaagcgtcactgtgacctctccctcgacgatcccacgccgtcggccaagctccagcggtgctccgagccgtcagaaccaacgccggcggggaaaccgaacggcggcgcggcgacgggagaggagagcgagatgatggccggcgcacggaaccctagggcgcagaggtacctggtcgccgtggagtacattggcacccgcttctccggctcacagaagcagcccaaccagcgcaccgtcactggggtcctcgaggatgcaggtgttcatgctttatcaaatgtttgtcatgttgatgttgagcggataagtaaaaggaagcctggcgaagttgtctgtacacaaaactcattttttttcttaacactgattaccgaccaggccttgtctacatctcttgacactctaaacttatttctttttttgatctttgcatgataagtatatttgtgacagttgttgttatgcctgatttaaatcttctaggttttccaaaataaaattctacaagcaatagaattaccttttctcctgaccttgcctctaaatcatctattttgtccgttccaaatcataattcactttagctttgccttaagtcatatttaaccaagtttaaataaaaatgcaccaacatctacaacatcaattagtttcattaaatttctatatgaaatgtcttgatagttcacaaaatgttgatgtcgttgaagacctggcggctggcgccactgctgaaacaagtcgctgtagtctgggcgtctggattgatgtattttggtgggagagttgtttgttaacacctcatgagcctggagttgtaaaacgtgctgtgaaccactttctactgaagagtgaaggtgacataatggtgactgatgtctgctgtgttgcaccagattttcatgctagatacaaatctctagagcgcacatatcactatcgcttgcttgctggacctgaatcaacatctgtttttgagaaaaactctgtttggcatatatctgaagatttggatattcagtcaatgaagaaagcatgcagcatacttgttgggcatcatgatttcagttcatttcgagcggctggatgtcaggcaaactctccagtgcgaactctggatgaacttagtgttacagaagtattccctttcatgttttttccttcaagtgtagaaagatcagagttggaattatcaaatgtctctcttgtttattcaaggaaaccagacatggaatcttctgggaaaggatctgatggttcctgtaccagtagtgtgaaatcagattttgagaatggaaaagattttggaaagcggtcaaggcaccgttgctttgttgttactgcaagggcacggtcttttctttaccaccaggtaaggttgatggtcggtcttctaaaatctgttgggactggagatctaacaactgcagatgttgagagaattctggatgcaaagacggttactgctgcacccagtatggcaccttcttgtggtctgtaccttgctaacgttaaatatgatctgaatacctgaagacaagttttatctagtggcttctgttggtgggcctccagattttgtcagctgttggctatcaaaggaattatatgctgccacttgccaaagctttcagttgcctgttttgtccactgaatcttgcatggtgattgaaaacctagaattaagtttatctgtcagcacaagagccggcttcattctcttcttgtacacagagctcttctgcatgttcagaaacaaaataggtagcttcattttagttaagttcaactatccactctttaaatttcagctggatccacccgattttgttgggtgtacgtagatttgacctggtaggggcaaaattttatttcttggttttctcatgactgtacttggttcttgatatataattaattagccaaatgcgttgtgtgcatattgaaaatattcttttctgttccttgataaattacatcgagcaagactgcaagagaactttcttcaag

SEQ ID NO: 222077 - DNA, 2891 bp, Zea Mays
cttcccggactcccagactcctcccaaaaccctcgcatcctctcccacgcatgtcacaatcgccatgaccgacagaaaccccgccgccgcctcaagcaagcgtcactgtgacctctccctcgacgatcccacgccgtcggccaagctccagcggtgctccgagccgtcagaaccaacgccggcggggaaaccgaacggcggcgcggcgacgggagaggagagcgagatgatggccggcgcacggaaccctagggcgcagaggtacctggtcgccgtggagtacattggcacccgcttctccggctcacagaagcagcccaaccagcgcaccgtcactggggtcctcgaggaggcatttcaccgatttattgggcagccagtttcaataatcttttctagccgaacggatgcaggtgttcatgctttatcaaatgtttgtcatgttgatgttgagcggataagtaaaaggaagcctggcgaagttgtctgtacacaaaactcattttttttcttaacactgattaccgaccaggccttgtctacatctcttgacactctaaacttatttctttttttgatctttgcatgataagtatatttgtgacagttgttgttatgcctgatttaaatcttctaggttttccaaaataaaattctacaagcaatagaattaccttttctcctgaccttgcctctaaatcatctattttgtccgttccaaatcataattcactttagctttgccttaagtcatatttaaccaagtttaaataaaaatgcaccaacatctacaacatcaattagtttcattaaatttctatatgaaatgtcttgatagttcacaaaatgttgatgtcgttgaagacctggcggctggcgccactgctgaaacaagtcgctgtagtctgggcgtctggattgatgtattttggtgggagagttgtttggtaggttttgaactgtttgttgtgagtgttgttagtagttgagagtgattgttggtagttaaactatcacaatgttgattgtaagctggtaacatcagcagtggatatttgactattggtaagctttctaataaagctgggtgaatgcttttgatctaaaaaatgtcttgatagtgcacttgattggactttaagattttaatatgtttttattcctaaaaacttgttcagttagaggcatttgacttagaaccaaactaaagtgtcctataatttgtaaaagaggaaataaataaaaatatgttttctagaacagcgcctcttataactcctgctgctgatttgcttttccctttttacagttaacacctcatgagcctggagttgtaaaacgtgctgtgaaccactttctactgaagagtgaaggtgacataatggtgactgatgtctgctgtgttgcaccagattttcatgctagatacaaatctctagagcgcacgtaggtagcagaatatataatacaatctgggcatgtttaaagttactcttgttcgaatttcaatcttgtgtccagtatttataaatggcttgcagctttaagatatgtactaaaaagttaatagctaagctagctcatagattactctgttcgccttctgaaatgctgaaaatgtttcatactacatgttttactcatttttttgaagatatcactatcgcttgcttgctggacctgaatcaacatctgtttttgagaaaaactctgtttggcatatatctgaagatttggatattcagtcaatgaagaaagcatgcagcatacttgttgggcatcatgatttcagttcatttcgagcggctggatgtcaggcaaactctccagtgcgaactctggatgaacttagtgttacagaagtattccctttcatgttttttccttcaagtgtagaaagatcagagttggaattatcaaatgtctctcttgtttattcaaggaaaccagacatggaatcttctgggaaaggatctgatggttcctgtaccagtagtgtgaaatcagattttgagaatggaaaagattttggaaagcggtcaaggcaccgttgctttgttgttactgcaagggcacggtcttttctttaccaccaggtaaggttgatggtcggtcttctaaaatctgttgggactggagatctaacaactgcagatgttgagagaattctggatgcaaagacggttactgctgcacccagtatggcaccttcttgtggtctgtaccttgctaacgttaaatatgatctgaatacctgaagacaagttttatctagtggcttctgttggtgggcctccagattttgtcagctgttggctatcaaaggtatacctgaatccaatctatgaatagtgcacctcagtgagtgcaactttgaagtatctgtaccaggtcgaataagatattcaaacatgtcctttgcttatcaagaatgatacatcattatacaccttgtcgtaatctgtaatttcactttgatcaggaattatatgctgccacttgccaaagctttcagttgcctgttttgtccactgaatcttgcatggtgattgaaaacctagaattaagtttatctgtcagcacaagagccggcttcattctcttcttgtacacagagctcttctgcatgttcagaaacaaaataggtagcttcattttagttaagttcaactatccactctttaaatttcagctggatccacccgattttgttgggtgtacgtagatttgacctggtaggggcaaaattttatttcttggttttctcatgactgtacttggttcttgatatataattaattagccaaatgcgttgtgtgcatattgaaaatattcttttctgttccttgataaattacatcgagcaagactgcaagagaactttcttcaag

SEQ ID NO: 222078 - DNA, 1698 bp, Zea Mays
cttcccggactcccagactcctcccaaaaccctcgcatcctctcccacgcatgtcacaatcgccatgaccgacagaaaccccgccgccgcctcaagcaagcgtcactgtgacctctccctcgacgatcccacgccgtcggccaagctccagcggtgctccgagccgtcagaaccaacgccggcggggaaaccgaacggcggcgcggcgacgggagaggagagcgagatgatggccggcgcacggaaccctagggcgcagaggtacctggtcgccgtggagtacattggcacccgcttctccggctcacagaagcagcccaaccagcgcaccgtcactggggtcctcgaggaggcatttcaccgatttattgggcagccagtttcaataatcttttctagccgaacggatgcaggtgttcatgctttatcaaatgtttgtcatgttgatgttgagcggataagtaaaaggaagcctggcgaattaacacctcatgagcctggagttgtaaaacgtgctgtgaaccactttctactgaagagtgaaggtgacataatggtgactgatgtctgctgtgttgcaccagattttcatgctagatacaaatctctagagcgcacatatcactatcgcttgcttgctggacctgaatcaacatctgtttttgagaaaaactctgtttggcatatatctgaagatttggatattcagtcaatgaagaaagcatgcagcatacttgttgggcatcatgatttcagttcatttcgagcggctggatgtcaggcaaactctccagtgcgaactctggatgaacttagtgttacagaagtattccctttcatgttttttccttcaagtgtagaaagatcagagttggaattatcaaatgtctctcttgtttattcaaggaaaccagacatggaatcttctgggaaaggatctgatggttcctgtaccagtagtgtgaaatcagattttgagaatggaaaagattttggaaagcggtcaaggcaccgttgctttgttgttactgcaagggcacggtcttttctttaccaccaggtaaggttgatggtcggtcttctaaaatctgttgggactggagatctaacaactgcagatgttgagagaattctggatgcaaagacggttactgctgcacccagtatggcaccttcttgtggtctgtaccttgctaacgttaaatatgatctgaatacctgaagacaagttttatctagtggcttctgttggtgggcctccagattttgtcagctgttggctatcaaaggaattatatgctgccacttgccaaagctttcagttgcctgttttgtccactgaatcttgcatggtgattgaaaacctagaattaagtttatctgtcagcacaagagccggcttcattctcttcttgtacacagagctcttctgcatgttcagaaacaaaataggtagcttcattttagttaagttcaactatccactctttaaatttcagctggatccacccgattttgttgggtgtacgtagatttgacctggtaggggcaaaattttatttcttggttttctcatgactgtacttggttcttgatatataattaattagccaaatgcgttgtgtgcatattgaaaatattcttttctgttccttgataaattacatcgagcaagactgcaagagaactttcttcaag

SEQ ID NO: 222079 - DNA, 1775 bp, Zea Mays
cttcccggactcccagactcctcccaaaaccctcgcatcctctcccacgcatgtcacaatcgccatgaccgacagaaaccccgccgccgcctcaagcaagcgtcactgtgacctctccctcgacgatcccacgccgtcggccaagctccagcggtgctccgagccgtcagaaccaacgccggcggggaaaccgaacggcggcgcggcgacgggagaggagagcgagatgatggccggcgcacggaaccctagggcgcagaggtacctggtcgccgtggagtacattggcacccgcttctccggctcacagaagcagcccaaccagcgcaccgtcactggggtcctcgaggaggcatttcaccgatttattgggcagccagtttcaataatcttttctagccgaacggatgcaggtgttcatgctttatcaaatgtttgtcatgttgatgttgagcggataagtaaaaggaagcctggcgaagttttaacacctcatgagcctggagttgtaaaacgtgctgtgaaccactttctactgatatcactatcgcttgcttgctggacctgaatcaacatctgtttttgagaaaaactctgtttggcatatatctgaagatttggatattcagtcaatgaagaaagcatgcagcatacttgttgggcatcatgatttcagttcatttcgagcggctggatgtcaggcaaactctccagtgcgaactctggatgaacttagtgttacagaagtattccctttcatgttttttccttcaagtgtagaaagatcagagttggaattatcaaatgtctctcttgtttattcaaggaaaccagacatggaatcttctgggaaaggatctgatggttcctgtaccagtagtgtgaaatcagattttgagaatggaaaagattttggaaagcggtcaaggcaccgttgctttgttgttactgcaagggcacggtcttttctttaccaccaggtaaggttgatggtcggtcttctaaaatctgttgggactggagatctaacaactgcagatgttgagagaattctggatgcaaagacggttactgctgcacccagtatggcaccttcttgtggtctgtaccttgctaacgttaaatatgatctgaatacctgaagacaagttttatctagtggcttctgttggtgggcctccagattttgtcagctgttggctatcaaaggtatacctgaatccaatctatgaatagtgcacctcagtgagtgcaactttgaagtatctgtaccaggtcgaataagatattcaaacatgtcctttgcttatcaagaatgatacatcattatacaccttgtcgtaatctgtaatttcactttgatcaggaattatatgctgccacttgccaaagctttcagttgcctgttttgtccactgaatcttgcatggtgattgaaaacctagaattaagtttatctgtcagcacaagagccggcttcattctcttcttgtacacagagctcttctgcatgttcagaaacaaaataggtagcttcattttagttaagttcaactatccactctttaaatttcagctggatccacccgattttgttgggtgtacgtagatttgacctggtaggggcaaaattttatttcttggttttctcatgactgtacttggttcttgatatataattaattagccaaatgcgttgtgtgcatattgaaaatattcttttctgttccttgataaattacatcgagcaagactgcaagagaactttcttcaag

SEQ ID NO: 222080 - DNA, 2414 bp, Zea Mays
cggactcccagactcctcccaaaaccctcgcatcctctcccacgcatgtcacaatcgccatgaccgacagaaaccccgccgccgcctcaagcaagcgtcactgtgacctctccctcgacgatcccacgccgtcggccaagctccagcggtgctccgagccgtcagaaccaacgccggcggggaaaccgaacggcggcgcggcgacgggagaggagagcgagatgatggccggcgcacggaaccctagggcgcagaggtacctggtcgccgtggagtacattggcacccgcttctccggctcacagaagcagcccaaccagcgcaccgtcactggggtcctcgaggaggcatttcaccgatttattgggcagccagtttcaataatcttttctagccgaacggtgttcatgctttatcaaatgtttgtcatgttgatgttgagcggataagtaaaaggaagcctggcgaagttgtctgtacacaaaactcattttttttcttaacactgattaccgaccaggccttgtctacatctcttgacactctaaacttatttctttttttgatctttgcatgataagtatatttgtgacagttgttgttatgcctgatttaaatcttctaggttttccaaaataaaattctacaagcaatagaattaccttttctcctgaccttgcctctaaatcatctattttgtccgttccaaatcataattcactttagctttgccttaagtcatatttaaccaagtttaaataaaaatgcaccaacatctacaacatcaattagtttcattaaatttctatatgaaatgtcttgatagttcacaaaatgttgatgtcgttgaagacctggcggctggcgccactgctgaaacaagtcgctgtagtctgggcgtctggattgatgtattttggtgggagagttgtttggtaggttttgaactgtttgttgtgagtgttgttagtagttgagagtgattgttggtagttaaactatcacaatgttgattgtaagctggtaacatcagcagtggatatttgactattggtaagctttctaataaagctgggtgaatgcttttgatctaaaaaatgtcttgatagtgcacttgattggactttaagattttaatatgtttttattcctaaaaacttgttcagttagaggcatttgacttagaaccaaactaaagtgtcctataatttgtaaaagaggaaataaataaaaatatgttttctagaacagcgcctcttataactcctgctgctgatttgcttttccctttttacagttaacacctcatgagcctggagttgtaaaacgtgctgtgaaccactttctactgaagagtgaaggtgacataatggtgactgatgtctgctgtgttgcaccagattttcatgctagatacaaatctctagagcgcacaaagcatgcagcatacttgttgggcatcatgatttcagttcatttcgagcggctggatgtcaggcaaactctccagtgcgaactctggatgaacttagtgttacagaagtattccctttcatgttttttccttcaagtgtagaaagatcagagttggaattatcaaatgtctctcttgtttattcaaggaaaccagacatggaatcttctgggaaaggatctgatggttcctgtaccagtagtgtgaaatcagattttgagaatggaaaagattttggaaagcggtcaaggcaccgttgctttgttgttactgcaagggcacggtcttttctttaccaccaggtaaggttgatggtcggtcttctaaaatctgttgggactggagatctaacaactgcagatgttgagagaattctggatgcaaagacggttactgctgcacccagtatggcaccttcttgtggtctgtaccttgctaacgttaaatatgatctgaatacctgaagacaagttttatctagtggcttctgttggtgggcctccagattttgtcagctgttggctatcaaaggaattatatgctgccacttgccaaagctttcagttgcctgttttgtccactgaatcttgcatggtgattgaaaacctagaattaagtttatctgtcagcacaagagccggcttcattctcttcttgtacacagagctcttctgcatgttcagaaacaaaataggtagcttcattttagttaagttcaactatccactctttaaatttcagctggatccacccgattttgttgggtgtacgtagatttgacctggtaggggcaaaattttatttcttggttttctcatgactgtacttggttcttgatatataattaattagccaaatgcgttgtgtgcatattgaaaatattcttttctgttccttgataaattacatcgagcaagactgcaagagaactttcttcaag

SEQ ID NO: 222081 - DNA, 740 bp, Zea Mays
ccagactcctcccaaaaccctcgcatcctctcccacgcatgtcacaatcgccatgaccgacagaaaccccgccgccgcctcaagcaagcgtcactgtgacctctccctcgacgatcccacgccgtcggccaagctccagcggtgctccgagccgtcagaaccaacgccggcggggaaaccgaacggcggcgcggcgacgggagaggagagcgagatgatggccggcgcacggaaccctagggcgcagaggtacctggtcgccgtggagtacattggcacccgcttctccggctcacagaagcagcccaaccagcgcaccgtcactggggtcctcgaggatgcaggtgttcatgctttatcaaatgtttgtcatgttgatgttgagcggataagtaaaaggaagcctggcgaagttttaacacctcatgagcctggagttgtaaaacgtgctgtgaaccactttctactgaagagtgaaggtgacataatggtgactgatgtctgctgtgttgcaccagattttcatgctagatacaaatctctagagcgcacatatcactatcgcttgcttgctggacctgaatcaacatctgtttttgagaaaaactctgtttggcatatatctgaagatttggatattcagtcaatgaagaaagcatgcagcatacttgttgggcatcatgatttcagttcatttcgagcggctggatgtcagcctggtgggacggggcagaatattc

SEQ ID NO: 222082 - DNA, 2233 bp, Zea Mays
cattgtgccttctgcctttcacagatctccatgggagactggagaacatacatttgttttccttagtcttctcatgtcagctgtacatcggcctacaaaagaagtgaggcttctgtgtatatacatcacatggaggcatttcaccgatttattgggcagccagtttcaataatcttttctagccgaacggatgcaggtgttcatgctttatcaaatgtttgtcatgttgatgttgagcggataagtaaaaggaagcctggcgaagttgtctgtacacaaaactcattttttttcttaacactgattaccgaccaggccttgtctacatctcttgacactctaaacttatttctttttttgatctttgcatgataagtatatttgtgacagttgttgttatgcctgatttaaatcttctaggttttccaaaataaaattctacaagcaatagaattaccttttctcctgaccttgcctctaaatcatctattttgtccgttccaaatcataattcactttagctttgccttaagtcatatttaaccaagtttaaataaaaatgcaccaacatctacaacatcaattagtttcattaaatttctatatgaaatgtcttgatagttcacaaaatgttgatgtcgttgaagacctggcggctggcgccactgctgaaacaagtcgctgtagtctgggcgtctggattgatgtattttggtgggagagttgtttggtaggttttgaactgtttgttgtgagtgttgttagtagttgagagtgattgttggtagttaaactatcacaatgttgattgtaagctggtaacatcagcagtggatatttgactattggtaagctttctaataaagctgggtgaatgcttttgatctaaaaaatgtcttgatagtgcacttgattggactttaagattttaatatgtttttattcctaaaaacttgttcagttagaggcatttgacttagaaccaaactaaagtgtcctataatttgtaaaagaggaaataaataaaaatatgttttctagaacagcgcctcttataactcctgctgctgatttgcttttccctttttacagttaacacctcatgagcctggagttgtaaaacgtgctgtgaaccactttctactgaagagtgaaggtgacataatggtgactgatgtctgctgtgttgcaccagattttcatgctagatacaaatctctagagcgcacatatcactatcgcttgcttgctggacctgaatcaacatctgtttttgagaaaaactctgtttggcatatatctgaagatttggatattcagtcaatgaagaaagcatgcagcatacttgttgggcatcatgatttcagttcatttcgagcggctggatgtcaggcaaactctccagtgcgaactctggatgaacttagtgttacagaagtattccctttcatgttttttccttcaagtgtagaaagatcagagttggaattatcaaatgtctctcttgtttattcaaggaaaccagacatggaatcttctgggaaaggatctgatggttcctgtaccagtagtgtgaaatcagattttgagaatggaaaagattttggaaagcggtcaaggcaccgttgctttgttgttactgcaagggcacggtcttttctttaccaccaggtaaggttgatggtcggtcttctaaaatctgttgggactggagatctaacaactgcagatgttgagagaattctggatgcaaagacggttactgctgcacccatggcttctgttggtgggcctccagattttgtcagctgttggctatcaaaggaattatatgctgccacttgccaaagctttcagttgcctgttttgtccactgaatcttgcatggtgattgaaaacctagaattaagtttatctgtcagcacaagagccggcttcattctcttcttgtacacagagctcttctgcatgttcagaaacaaaataggtagcttcattttagttaagttcaactatccactctttaaatttcagctggatccacccgattttgttgggtgtacgtagatttgacctggtaggggcaaaattttatttcttggttttctcatgactgtacttggttcttgatatataattaattagccaaatgcgttgtgtgcatattgaaaatattcttttctgttccttgataaattacatcgagcaagactgcaagagaactttcttcaag

SEQ ID NO: 222083 - DNA, 1316 bp, Zea Mays
aataaatttagtgccttctaggatgcaggtgttcatgctttatcaaatgtttgtcatgttgatgttgagcggataagtaaaaggaagcctggcgaagttttaacacctcatgagcctggagttgtaaaacgtgctgtgaaccactttctactgaagagtgaaggtgacataatggtgactgatgtctgctgtgttgcaccagattttcatgctagatacaaatctctagagcgcacatatcactatcgcttgcttgctggacctgaatcaacatctgtttttgagaaaaactctgtttggcatatatctgaagatttggatattcagtcaatgaagaaagcatgcagcatacttgttgggcatcatgatttcagttcatttcgagcggctggatgtcaggcaaactctccagtgcgaactctggatgaacttagtgttacagaagtattccctttcatgttttttccttcaagtgtagaaagatcagagttggaattatcaaatgtctctcttgtttattcaaggaaaccagacatggaatcttctgggaaaggatctgatggttcctgtaccagtagtgtgaaatcagattttgagaatggaaaagattttggaaagcggtcaaggcaccgttgctttgttgttactgcaagggcacggtcttttctttaccaccaggtaaggttgatggtcggtcttctaaaatctgttgggactggagatctaacaactgcagatgttgagagaattctggatgcaaagacggttactgctgcacccagtatggcaccttcttgtggtctgtaccttgctaacgttaaatatgatctgaatacctgaagacaagttttatctagtggcttctgttggtgggcctccagattttgtcagctgttggctatcaaaggaattatatgctgccacttgccaaagctttcagttgcctgttttgtccactgaatcttgcatggtgattgaaaacctagaattaagtttatctgtcagcacaagagccggcttcattctcttcttgtacacagagctcttctgcatgttcagaaacaaaataggtagcttcattttagttaagttcaactatccactctttaaatttcagctggatccacccgattttgttgggtgtacgtagatttgacctggtaggggcaaaattttatttcttggttttctcatgactgtacttggttcttgatatataattaattagccaaatgcgttgtgtgcatattgaaaatattcttttctgttccttgataaattacatcgagcaagactgcaagagaactttcttcaag

SEQ ID NO: 222084 - DNA, 666 bp, Zea Mays
tgctatttgtatttgagtgcctttagaggtaaggttgatggtcggtcttctaaaatctgttgggactggagatctaacaactgcagatgttgagagaattctggatgcaaagacggttactgctgcacccagtatggcaccttcttgtggtctgtaccttgctaacgttaaatatgatctgaatacctgaagacaagttttatctagtggcttctgttggtgggcctccagattttgtcagctgttggctatcaaaggaattatatgctgccacttgccaaagctttcagttgcctgttttgtccactgaatcttgcatggtgattgaaaacctagaattaagtttatctgtcagcacaagagccggcttcattctcttcttgtacacagagctcttctgcatgttcagaaacaaaataggtagcttcattttagttaagttcaactatccactctttaaatttcagctggatccacccgattttgttgggtgtacgtagatttgacctggtaggggcaaaattttatttcttggttttctcatgactgtacttggttcttgatatataattaattagccaaatgcgttgtgtgcatattgaaaatattcttttctgttccttgataaattacatcgagcaagactgcaagagaactttcttcaag

SEQ ID NO: 222085 - DNA, 724 bp, Zea Mays
gtcgcaacaaaaagaaaccaaactcggctcgagagagatcgcatcttgcctgcccacccaagcttccctttcgttcctcctcgccccagcgacgcggcctcccgtagaccgagcaaggcaacccaccactgagaggcacgcagaggagcaggaagccggagaccaagatgtcgtcggtgttcagcggcgatgagacggcccccttcttcggtttcctcggcgccgccgccgccctcgtcttctcatgcatgggcgcagcgtacgggaccgcgaagagcggcgtcggcgtggcgtcgatgggtgtgatgcggccggagctcgtcatgaagtccatcgtgcccgtggtcatggctggtgtgctcggtatctacgggctcatcatcgccgtcatcatcagcactgggatcaaccccaaggccaagccctactacctttttgatggctacgctcacctttcgtccgggcttgcctgtggccttgctgggcttgcagctggcatggccatcggcattgttggtgatgctggagtcagggcgaatgcacaacagccgaagctttttgtgggcatgatcctcatcctcattttcgcagaagcgcttgctctgtacggtctcattgttggaattatcctttcatcccgtgctgcaccctttgatgagagatatgagcaagaggcttcaagaaaacttgtgttttcggaattatatgaagccagtaaacaaac

SEQ ID NO: 222086 - DNA, 1104 bp, Zea Mays
gtcgcaacaaaaagaaaccaaactcggctcgagagagatcgcatcttgcctgcccacccaagcttccctttcgttcctcctcgccccagcgacgcggcctcccgtagaccgagcaaggcaacccaccactgagaggcacgcagaggagcaggaagccggagaccaagatgtcgtcggtgttcagcggcgatgagacggcccccttcttcggtttcctcggcgccgccgccgccctcgtcttctcatgcatgggcgcagcgtacgggaccgcgaagagcggcgtcggcgtggcgtcgatgggtgtgatgcggccggagctcgtcatgaagtccatcgtgcccgtggtcatggctggtgtgctcggtatctacgggctcatcatcgccgtcatcatcagcactgggatcaaccccaaggccaagccctactacctttttgatggctacgctcacctttcgtccgggcttgcctgtggccttgctgggcttgcagctggcatggccatcggcattgttggtgatgctggagtcagggcgaatgcacaacagccgaagctttttgtgggcatgatcctcatcctcattttcgcagaagcgcttgctctgtacggtctcattgttggaattatcctttcatcccgtgctggtcaatcccgagcagattaagtgcactaccattctgcgattaccgtactgtttattatgctattctaagagaattgaaactctatgcccttgtctagtttattcttgttaccatgtattaatgaaacaatttgtagctgaaggaaggtgacacttccagccatgttggttttggcggtgttaagcagaggttatttattgggttaagattggatggatgctcctgggctaagtggatttaatttttatccttggtgaataatgaacacggaggtgtagccaaataataacgtgatatatatatttctttgcccctttactggatgcctggattttcattgtcatctatacttcggcatgttcacagcgatagctgatgttttgtttctgatgtttttgagccaatggttgataggtgtatgaagtacaaactcatcactgggaatgttttgaattcctc

SEQ ID NO: 222087 - DNA, 1505 bp, Zea Mays
ctatagcaatctagcatagagcgcctttgctcctagcttgcctcctctcgtcccagtcgatgatggcggcattcctcgtggagaggagaggtgcggcgcgcggcggtggctgtggtgatacgacgacggggcgcggtggtgtccgatccatggacgccgacatgggcatgagctcgcacgctgcagctaataagccggcgccggggccggcccccttcctcaccaagaccttccagctcgtggaggaccaccgcaccgaccacgtcgtgtcgtggggggaggacggcgccaccttcgtggtgtggcggccgccggagttcgcccgggacctcctccccagctacttcaagcacaacaacttctccagcttcgtcaggcagctcaacacctacatagcctttttcatttgaagccacagcagcattgctgagcctgactgcctgagatcttagcgtgtggctgtgctgtcaagttagctgcatgcatgcagcctgcaagcgtcgtctggcatcggtgggccggggcgagaagggtttcaggaagatcgtggcagacaggtgggagttcgccaacgagttcttcaggaagggcgctaagcacctcctctcggagatccaccggaggaagtcctcgtcgtgctcgcaaccgccgcagaagctgcagccaccgccgctccctcagcaccagcggccttacgacctcagcctcttctttccgccgccgcagccgcctcggcatcctacgtcgggctaccacgtcgtccaggaggaagaccacggccacggcgggaataaggacttcctggcgaccctgtcggaggacaaccgggagctccggcggcgcaactcgctgctgctgtcggagctggcccacatgaggcggctctacaacgacatcatatacttcctgcagaaccacgtggagccggtgccgccgccaccgccggggacgacgacgaccgccgccagctgcaggctggtggagctcggctctgccgacgacgcctcggcggcacagacgtggaggccacgccgcggcgacgacgatgaggcgccggtgaagctgtttggcgtgcgcctgaacgacggcaagaagaggagggcacaacaggtcgtgccgctggaagaaaaaggtggtggtaatgatcaaggtgaaggccttgccgatggtgaccgcaaatggccatggcgttggtgacgagatgatcagcgaggtgagagtgagacgtaggtgattgttgcgtgtagcgcgtagactaattaattttctagatagagaagcagaggtacgtacacgctgcagggagctagctcggtagtctacggtttatgtaataagtttattagaatgcatgattttgatttgttttccccttttacgcattatgtatagtctcgacgatatgtgcatgccatcaccaagcttttctcaaaggaatggtttggagtttacatttgtttaaactgttttcactagtttgacaagttaattcgttgactatatac

SEQ ID NO: 222088 - DNA, 1655 bp, Zea Mays
gtgagtctgtgacccacgcccaccaccacagcaagaatatttgaaggtggcgcgctatgtgcgtgcatgtgtgcgctccagtctgaagctaattagctttagggagagggccggggccttcttctcttctgtcgtctccttcatctctctcgcactatagcaatctagcatagagcgcctttgctcctagcttgcctcctctcgtcccagtcgatgatggcggcattcctcgtggagaggagaggtgcggcgcgcggcggtggctgtggtgatacgacgacggggcgcggtggtgtccgatccatggacgccgacatgggcatgagctcgcacgctgcagctaataagccggcgccggggccggcccccttcctcaccaagaccttccagctcgtggaggaccaccgcaccgaccacgtcgtgtcgtggggggaggacggcgccaccttcgtggtgtggcggccgccggagttcgcccgggacctcctccccagctacttcaagcacaacaacttctccagcttcgtcaggcagctcaacacctaccctttttcatttgaagccacagcagcattgctgagcctgactgcctgagatcttagcgtgtggctgtgctgtcaagttagctgcatgcatgcagcctgcaagcgtcgtctggcatcggtgggccggggcgagaagggtttcaggaagatcgtggcagacaggtgggagttcgccaacgagttcttcaggaagggcgctaagcacctcctctcggagatccaccggaggaagtcctcgtcgtgctcgcaaccgccgcagaagctgcagccaccgccgctccctcagcaccagcggccttacgacctcagcctcttctttccgccgccgcagccgcctcggcatcctacgtcgggctaccacgtcgtccaggaggaagaccacggccacggcgggaataaggacttcctggcgaccctgtcggaggacaaccgggagctccggcggcgcaactcgctgctgctgtcggagctggcccacatgaggcggctctacaacgacatcatatacttcctgcagaaccacgtggagccggtgccgccgccaccgccggggacgacgacgaccgccgccagctgcaggctggtggagctcggctctgccgacgacgcctcggcggcacagacgtggaggccacgccgcggcgacgacgatgaggcgccggtgaagctgtttggcgtgcgcctgaacgacggcaagaagaggagggcacaacaggtcgtgccgctggaagaaaaaggtggtggtaatgatcaaggtgaaggccttgccgatggtgaccgcaaatggccatggcgttggtgacgagatgatcagcgaggtgagagtgagacgtaggtgattgttgcgtgtagcgcgtagactaattaattttctagatagagaagcagaggtacgtacacgctgcagggagctagctcggtagtctacggtttatgtaataagtttattagaatgcatgattttgatttgttttccccttttacgcattatgtatagtctcgacgatatgtgcatgccatcaccaagcttttctcaaaggaatggtttggagtttacatttgtttaaactgttttcactagtttgacaagttaattcgttgactatatac

SEQ ID NO: 222089 - DNA, 780 bp, Zea Mays
cggcgagtccaccatcccattcccatccacccgctccttccaactcccaggcgttgctggctgctgctaccgaaactgctccgcctcccggccaatgcgcagttgcgctcgcgcagacgcgcacggacagcgccacatcggccttgattagcgaagtgttcccttgccctacctctccctcccctgttccgacgcggcggccggtgagcacctgcccggtcgctagcttctgccatggctcacgaagttggcgacaacggcggcgaactcccgccgcccgcgaagaagaagtcgcccgccgaggaggaggccgagaagaggaggaagaagcttacacctgggagcttgatgaagggcatcatacggtctgggagtggtgatgccacccctgcagagggcgatcaggttatacttcattgcactactcggacgatggatggtattattgtcaattctacaagaagggagcacggaggtaaaggaatcccactcagatttgttttagggaagagcaagatgatcctaggctttgctgaaggcttcccaacaatgctgaagggtgaaattgctatgcctaaaattcactacgctgaggttgattgtccagttgcagctccagatggcttcccgaaagatgatgaacttcaatttgagattgaaatgttggatttctttaaagccaaggttgtggcagaggatttgggggtggtaaagaagatagttgaagaaggcaagggatgggaaacacctagagagccatatgaaataacagcacggtaa

SEQ ID NO: 222090 - DNA, 469 bp, Zea Mays
atggcatcggtgtcgctcgcgctcctcccagccacatcggcgcatcgtacaagaagagcaagctggcgagaccacgatagggccctagaacgttgggaggaggccgacgcggtgcgcagttggttatctgccatcgtggagcgtaatcgcgccctgcgacgccgaagaggctccacatccttctgcctcccccgcggtggcttggtcggcaccgctggctccaccaaagagcgtcgtggccgtcgcgaagaagccaacgtgttctgtgcgcttggagtcggagcaaaaatggaggaaccagcggttgatccgggcatcacgttcttctgcctcgccacaaggccaagcaaaagaggtatgtcatgaagaagatcaaccgcttaccaagaggtaacgcatgtgctcataacacaggaagacaagaaggctcttctagagcggtacacagtgatccaatacccttccttcc

SEQ ID NO: 222091 - DNA, 2719 bp, Zea Mays
caccacacctaaccccgacgtgatcatcggttaagcaaatataggtaaaattagcatgctaggggggcactcgcggaaggcctggccggccggagcccggcgatccatcgtcgtcggttaatcggatgagatgggtgacgaagccaaatgctccgtcgatgtcgccgagggcgcctacatcatggccagcatcatggccgtctccggcatcatggtcactgtcctcgtgctctcggccctcttccattttgtgcttcgacgtctcggacagcccagcgttatctcccacatcctggcaggcatcgtggttggcccgacggtgcttggccgtgccatggacctccgccagctggggatgcgcgacgcgggcgacgcgcttgggggcacaatttacttcgtccgcatggtgttcatgttcttcatcggcctggagctggacctgcgctacctgcgccgcaacctacgtcgctcgctagttgtggcctgcggcggctccgggttctgcttcgtcctcgccgtgctgaccgggcccttcacctacggcttcctgcacccgggccagggccacttccagcccagcaacatctacgcctccaccgcgctcttcgcgatcgtgatcaccagcaccgcctcacccgtcctcatccgcatcgtcaccgagctcaagctcagcggttccgagaccggccagatcgccatcggcgccgccttcgccaacgacatggctagcctcaccgctctgagcgtcatcgtcgtcacccacaccctgtatggcacgatgcccaatgagaaggagtcctcgccgccggccaaggtcgcggtggtggcgtggatggcgctgacggtgtggatggccgttaaccttgcggcgtgggtggctcgcatgctcaaccggctcaagcgcgggaggcagtacatcagcaagtacgagctgtgcggtatgctgctcctcatcgtgggcctctcgcttctagagcagatcatgggctacagcgcctccatgacggccttcctcatcgggctcgccatgccacgcgagggcccaaccgcgaggacgctaatggaccgcctcgcctaccctgtgcaccagctcttcatgccactctgcttcgcggccatcggtgctcgcctcgactttgccaagatcggcaagttcacggtggtccagctcgtcgtggccgtcaccttcactacgttgctgagcacggcggggaaggtggccggcaccttgctggcggggcgggcgctgggaatcgcgacccgagaggccgtcgtgctgggtgcgctgctcaacgtcaagggctactctgatatcctcgccatcaactttgggaacaagatcaacgtatggggcgagaccatgcagggcaccagtcgtcgccgtgtacctgttgcaccttgtcgagctcgcgacatcgcgcaagtacgccatcacgcagcagctataccacgcccgggatggtggcgaggatgaggacgagtggggctacgcacgtgagatcgagcatgtggcctccgccgtggccaccttcacctatgacaatgccatcctcgtgcggcagatgacggccatatccagcttgggctctatggacacagacgtgcgcaactgtgtggaggatgcgcgtgcgtcgctggtgatcatgcccttccacaaggagcagcgctacgatgggcgcatggtgtgccggcatgaggggcggcggcaactgaaccagcggatcctgcataggcctccttgcacggtggggatccttgtggagcgttgctttgctcatgaggtcacgggagagcatcatcaggtggtggcgttgttcctgggcggggctgatgacagggaggcagtgtcattcgcgatacggctggcagtggaaccgttagtgattgtgactgtgtgccggctccttcttccaagcggaaggggcttggtgggcaatccggagatgatggaggagaacatggaagacgaggaattcatggcagacctatgcgcaaggtttgtggcaccaggtcaagtatcatacatggagaagtacgtgagcaatggcgcggagaccgtaaacacgcttaggtccatggtgggtacatgctcactcttcgtcgtgggaaagggtgatagggcccatggcaacagaggtgtgatgacaagtgacatggggggctgggatgaagaatgcgaggagctaggccccattggtgagctcctgtcctcggacgacttggtaggttgtggttccgttctagtgctacagcagcataacaagtacaaaatgaagacatgggacaaggacaaccaacaacaatgtcatcacgctagtgtagtcgatggcgatgctgttgttgacatcattggatcctcctccgtcacaagcagcagtactagtcattcacggcgaccaaattgaacttgcatctcattatacaaactatgctacatgcacgcctacatgtatatatctagttagagattatttgtgatgtagccacaagtttgtaagggattttatacactcgaatccagcaatgtgttagaagtcagaagttacatatgataaagataagaaggttacacatagtagaaaaggcttatgtccctgatcttgatcttagcagtgttgctatctgtttagcattgtgtcatctaatttagatagtttcgttatctgccatataaattatcctcatgtacacatatatacacatcaatacagtttcaaga

SEQ ID NO: 222092 - DNA, 2743 bp, Zea Mays
agcaaatataggtaaaattagcatgctaggggggcactcgcggaaggcctggccggccggagcccggcgatccatcgtcgtcggttaatcggatgagatgggtgacgaagccaaatgctccgtcgatgtcgccgagggcgcctacatcatggccagcatcatggccgtctccggcatcatggtcactgtcctcgtgctctcggccctcttccattttgtgcttcgacgtctcggacagcccagcgttatctcccacatcctggcaggcatcgtggttggcccgacggtgcttggccgtgccatggacctccgccagctggggatgcgcgacgcgggcgacgcgcttgggggcacaatttacttcgtccgcatggtgttcatgttcttcatcggcctggagctggacctgcgctacctgcgccgcaacctacgtcgctcgctagttgtggcctgcggcggctccgggttctgcttcgtcctcgccgtgctgaccgggcccttcacctacggcttcctgcacccgggccagggccacttccagcccagcaacatctacgcctccaccgcgctcttcgcgatcgtgatcaccagcaccgcctcacccgtcctcatccgcatcgtcaccgagctcaagctcagcggttccgagaccggccagatcgccatcggcgccgccttcgccaacgacatggctagcctcaccgctctgagcgtcatcgtcgtcacccacaccctgtatggcacgatgcccaatgagaaggagtcctcgccgccggccaaggtcgcggtggtggcgtggatggcgctgacggtgtggatggccgttaaccttgcggcgtgggtggctcgcatgctcaaccggctcaagcgcgggaggcagtacatcagcaagtacgagctgtgcgctcttcatgccactctgcttcgcggccatcggtgctcgcctcgactttgccaagatcggcaagttcacggtggtccagctcgtcgtggccgtcaccttcactacgttgctgagcacggcggggaaggtggccggcaccttgctggcggggcgggcgctgggaatcgcgacccgagaggccgtcgtgctgggtgcgctgctcaacgtcaagggctactctgatatcctcgccatcaactttgggaacaagatcaacgtatggggcgagaccatgcaggtggtgcttctcgtatcatccatcatcaacacgttcatggccgggccggcgtccgccgccatcgtccgccagcagcgtcgtgcctaccactatcgctcacgctgcctcgaggaccttagcctggcccacgagcttcgtatgctcgtatgcacccacggtgccactagcgtctactcgatgctcacgctcagtcacctctccaggggcagggcaccagtcgtcgccgtgtacctgttgcaccttgtcgagctcgcgacatcgcgcaagtacgccatcacgcagcagctataccacgcccgggatggtggcgaggatgaggacgagtggggctacgcacgtgagatcgagcatgtggcctccgccgtggccaccttcacctatgacaatgccatcctcgtgcggcagatgacggccatatccagcttgggctctatggacacagacgtgcgcaactgtgtggaggatgcgcgtgcgtcgctggtgatcatgcccttccacaaggagcagcgctacgatgggcgcatggtgtgccggcatgaggggcggcggcaactgaaccagcggatcctgcataggcctccttgcacggtggggatccttgtggagcgttgctttgctcatgaggtcacgggagagcatcatcaggtggtggcgttgttcctgggcggggctgatgacagggaggcagtgtcattcgcgatacggctggcagtggaaccgttagtgattgtgactgtgtgccggctccttcttccaagcggaaggggcttggtgggcaatccggagatgatggaggagaacatggaagacgaggaattcatggcagacctatgcgcaaggtttgtggcaccaggtcaagtatcatacatggagaagtacgtgagcaatggcgcggagaccgtaaacacgcttaggtccatggtgggtacatgctcactcttcgtcgtgggaaagggtgatagggcccatggcaacagaggtgtgatgacaagtgacatggggggctgggatgaagaatgcgaggagctaggccccattggtgagctcctgtcctcggacgacttggtaggttgtggttccgttctagtgctacagcagcataacaagtacaaaatgaagacatgggacaaggacaaccaacaacaatgtcatcacgctagtgtagtcgatggcgatgctgttgttgacatcattggatcctcctccgtcacaagcagcagtactagtcattcacggcgaccaaattgaacttgcatctcattatacaaactatgctacatgcacgcctacatgtatatatctagttagagattatttgtgatgtagccacaagtttgtaagggattttatacactcgaatccagcaatgtgttagaagtcagaagttacatatgataaagataagaaggttacacatagtagaaaaggcttatgtccctgatcttgatcttagcagtgttgctatctgtttagcattgtgtcatctaatttagatagtttcgttatctgccatataaattatcctcatgtacacatatatacacatcaatacagtttcaaga

SEQ ID NO: 222093 - DNA, 692 bp, Zea Mays
cttggcccatctccccagccgccgtccctgccctatcctccctcaggccaccgccgctctcccctggtagccgtcgcctctccctgctctgctcctctctctcccaagcggctctccctctctctcctcgcttctctcccctcctcttctccagccgctgctaggcaaccggccgccgagcagcgcagccacgctgttgctctcgccaggacgccaggaaccgctgccatggctgcagcaaatctgagcacagttggcttctttgcagtttgcaggctaaagtgtgttcctacttcctcctgtatacacagtttattcctgcattttttggggtgattaattcctttttcaaggaacgtggatgcgggcgataaattgaagctgtgggtactctgttttctgaaagacaaatgatagctattcaaggagctagaggctgctcaacataaagcatcaacagcaacctctggaacagctgaaaatgctctactggaagctaagtcagtgactgatcttaaatctaaagatttggaggagaagaaaagggagctttgttcactgatacaagaagttggagtgcttttgtgaaggcttttgtgaatcacttgaagcgttagtacttttgtgaatgattttgtaaagtgtttgcaaatatgtgcaaaacataataacatgtgtaggttttgtgaatg

SEQ ID NO: 222094 - DNA, 997 bp, Zea Mays
gccgtccctgccctatcctccctcaggccaccgccgctctcccctggtagccgtcgcctctccctgctctgctcctctctctcccaagcggctctccctctctctcctcgcttctctcccctcctcttctccagccgctgctaggcaaccggccgccgagcagcgcagccacgctgttgctctcgccaggacgccaggaaccgctgccatggctgcagcaaatctgagcacagttggcttctttgcaggctaaagtgtgttcctacttcctcctgtatacacagtttattcctgcattttttggggtgattaattcctttttcaaggaacgtggatgcgggcgataaattgaagctgtgggtactctgttttctgaaaggttgaggtctggtttgccaggagtttttaatgtatctgacttcccaatatccagcaagttagtcatatgatgctgcgacttcatcatggtatccatgtttgccgagcatcttgaagaaaaataataatctgtgggtagctgtagtgtcctcgacctatgtatggattagcattgtagaatttgtcaccatgtcaacgtattgattacatgattttgttaattggagtatgtcacacttagtggaggcagggggcctaaaccagatagcatctcatgaatctatagcttttaataatcatctatgtcaaggcaggtagcagttcttgggttagctttgtaatggggaatatatgtatttgcagacatactatgtcttaacactaaattaattgagccatactattttaacatcctccattccaaagtttttttatgtctccaagctaaataggtatgtggcactatttggtgaatttagtcatgtaggtattttttcagacaaatgatagctattcaacatatgcaattgttctgtaaatagaggcacattgagtagttctattcaacctatcaattttttcagacaaatgatagctattcaaggagctagaggctgct

SEQ ID NO: 222095 - DNA, 434 bp, Zea Mays
tggcccatctccccagccgccgtccctgccctatcctccctcaggccaccgccgctctcccctggtagccgtcgcctctccctgctctgctcctctctctcccaagcggctctccctctctctcctcgcttctctcccctcctcttctccagccgctgctaggcaaccggccgccgagcagcgcagccacgctgttgctctcgccaggacgccaggaaccgctgccatggctgcagcaaatctgagcacagttggcttctttgcagatgcgggcgataaattgaagctgtgggtactctgttttctgaaaggttgaggtctggtttgccaggagtttttaatgtatctgacttcccaatatccagcaagttagtcatatgatgctgcgacttcatcatgacaaatgatagctattcaaggagctagaggctgct

SEQ ID NO: 222096 - DNA, 1023 bp, Zea Mays
ttggcccatctccccagccgccgtccctgccctatcctccctcaggccaccgccgctctcccctggtagccgtcgcctctccctgctctgctcctctctctcccaagcggctctccctctctctcctcgcttctctcccctcctcttctccagccgctgctaggcaaccggccgccgagcagcgcagccacgctgttgctctcgccaggacgccaggaaccgctgccatggctgcagcaaatctgagcacagttggcttctttgcagtttgcaggctaaagtgtgttcctacttcctcctgtatacacagtttattcctgcattttttggggtgattaattcctttttcaaggaacgtggatgcgggcgataaattgaagctgtgggtactctgttttctgaaaggttgaggtctggtttgccaggagtttttaatgtatctgacttcccaatatccagcaagttagtcatatgatgctgcgacttcatcatggtatccatgtttgccgagcatcttgaagaaaaataataatctgtgggtagctgtagtgtcctcgacctatgtatggattagcattgtagaatttgtcaccatgtcaacgtattgattacatgattttgttaattggagtatgtcacacttagtggaggcagggggcctaaaccagatagcatctcatgaatctatagcttttaataatcatctatgtcaaggcaggtagcagttcttgggttagctttgtaatggggaatatatgtatttgcagacatactatgtcttaacactaaattaattgagccatactattttaacatcctccattccaaagtttttttatgtctccaagctaaataggtatgtggcactatttggtgaatttagtcatgtaggtattttttcagacaaatgatagctattcaacatatgcaattgttctgtaaatagaggcacattgagtagttctattcaacctatcaattttttcagacaaatgatagctattcaaggagctagaggctgct

SEQ ID NO: 222097 - DNA, 486 bp, Zea Mays
cttggcccatctccccagccgccgtccctgccctatcctccctcaggccaccgccgctctcccctggtagccgtcgcctctccctgctctgctcctctctctcccaagcggctctccctctctctcctcgcttctctcccctcctcttctccagccgctgctaggcaaccggccgccgagcagcgcagccacgctgttgctctcgccaggacgccaggaaccgctgccatggctgcagcaaatctgagcacagttggcttctttgcagtttattcctgcattttttggggtgattaattcctttttcaaggaacgtggatgcgggcgataaattgaagctgtgggtactctgttttctgaaaggttgaggtctggtttgccaggagtttttaatgtatctgacttcccaatatccagcaagttagtcatatgatgctgcgacttcatcatgacaaatgatagctattcaaggagctagaggctgct

SEQ ID NO: 222098 - DNA, 348 bp, Zea Mays
cttggcccatctccccagccgccgtccctgccctatcctccctcaggccaccgccgctctcccctggtagccgtcgcctctccctgctctgctcctctctctcccaagcggctctccctctctctcctcgcttctctcccctcctcttctccagccgctgctaggcaaccggccgccgagcagcgcagccacgctgttgctctcgccaggacgccaggaaccgctgccatggctgcagcaaatctgagcacagttggcttctttgcagatgcgggcgataaattgaagctgtgggtactctgttttctgaaagacaaatgatagctattcaaggagctagaggctgct

SEQ ID NO: 222099 - DNA, 526 bp, Zea Mays
cggcccacttggcccatctccccagccgccgtccctgccctatcctccctcaggccaccgccgctctcccctggtagccgtcgcctctccctgctctgctcctctctctcccaagcggctctccctctctctcctcgcttctctcccctcctcttctccagccgctgctaggcaaccggccgccgagcagcgcagccacgctgttgctctcgccaggacgccaggaaccgctgccatggctgcagcaaatctgagcacagttggcttctttgcaggctaaagtgtgttcctacttcctcctgtatacacagtttattcctgcattttttggggtgattaattcctttttcaaggaacgtggatgcgggcgataaattgaagctgtgggtactctgttttctgaaagacaaatgatagctattcaacatatgcaattgttctgtaaatagaggcacattgagtagttctattcaacctatcaattttttcagacaaatgatagctattcaaggagctagaggctgct

SEQ ID NO: 222100 - DNA, 1051 bp, Zea Mays
attttgggaatttaaaagtgaattagtgaaaagaaaaggagaaggaaagatcatgtcatccttatcatgggtcgccgctcaacaggagatatttttccaatcgttcgtatcctttcggacaaagtgctgtgcaccagttccagatctggaagaattcctgccgcccaccagactccacgttcctcacgtcttcttcctccccagcactctctcattcatgtcacctcttttcctcactatccctctctgttccctcgacggtcaggcctctccttaaccgcggatgccgatctctgccaccagcgcacggtacgctagttgatcacgtgatatggaggactagaaccgagtcgaccacaagatgttgttaagcgcgagtttcttcgtaaggtgatgctgatggataaacttaaggatggatggcctgatcaagtgccaggacaaggaagatcatcaagagatcgtcgtctaaccaacactgacttagtgttattccaggttttactttgtgctgctgttgatggtgttaagtgccggtgggctcggccttcttataagtctaaccgttgaggaaccgggactccgaggtgggtcgatgaccgtctccgacgatgaaactgttgagattgatgacaacgaggagaggcggttgtgtgggttgaccggagattacaatgaggatgaccttcgggaggatgctgcagcgctcttaggccatagcagtgagcatcccatccatgttggtgatgaacaacaaggcggtggtgaggaaggtcaaggtgaaggggacgaacacaacgccaagcattgtcgtccttctacttctccagtctggttagatttcgagaaacttttcaaaattgtgaacgtatatctcagattgccgcagttttctcatgcattcccattcacgtacgagctacagagcgtggcggcacaaagggcacgtgttgcttcgccgcaaccaattcgcaatgcagcggtggtggaactcgtggcggccggggcacggcgtgacgacgacctccacgccgtcctcgtagtcctctag

SEQ ID NO: 222101 - DNA, 1763 bp, Zea Mays
atgaagcatgtagtagttgtttcaaaaaggatagtgacaactttgcaggatgttcagttaaattcagtagtcctcgttgttcacaaaactataaagtaccaagctccagtgtatgttgaacaaccaaggcaacagcaggtgccaccaccacagcgccaaccacgcagaccaccagcacaattccagcagctagagtacgaaggtatggcgattcttatgcacggggtcgaggaagagggcgtgggcgtggaaggggctggggtagaggtggctacggtggctatggtggatatggaaacaaccaaggtggctatcatcagggtggtgggtattatgacaatcaaggtggttataatggctatgataatcaaggtggatatagtggctatgataatcaaagtggatatggtggtggatatggctataaacaaggcagatatgggaactatcaagaaaatggtggatataaccgagacccaggaagtggtatgcgaggaagatgcaattggggttaccaaggagcgcgaaccccttggtggccgcctccagctgcgcgaatgtgaactctccagggggtccttgaacgatgacgatggtcgtatatggttgccatatgatgttgccaattccattcctgaatgcagtagcattccgaattttccagctctatatggtaatcttcgaactgaagtcagaataaatgatctggcagacatgctccaaaggatcggggtgcggaagttgtctgggcatgacattgttaaaaatcacatcatggtgtccttgcgtaacggtttagatgctaatgtggctgatatagtgattagagagtatgtagtgaaagttgaaaaaactttatcccaagttgattctattctagcaggaggactttctctagctgatgtatctacaaaacaatgtacagtgtatgactgggagtcaccagaattatctagaattttatcaatattttcttcaaaaagatgcaaggaaaaatgtgtatatcttctggaagttcttgatagattctgggatgatcattatagggcaaaatctaggatcttcacagatgctacacattgtggtgaaaacagagcagttgaatcatcatttatgaagtgcattcaaagcttcaaatggatagcatcaagaatggatgaggatcttcattatgcaacagatttattctatgattgtgaaaatgtccgctctctttttggtagtgtggctccatatgttgtatcgcaggtatctagcagttcacttaagaaggccattggattcaaaacagaggtatcttactgtgatgcattgatggtcctgaagtcttggataacgtcaaaggttccctttagagcaagtatgagccagatgtggaaattctataccttattgtctgaaggcgtggcagacgcaaagattgacattaaacgggagttcatgtcgtctccctctatatttacaccactacagcgtcctcgggcaatttaaagacatcccatctattggacgctccatcactagctgcaatagacaaaacttagaggcaattacttatctcaatcttacttctacatttatatttccctcttgtgttttaccttttgcttatatcctttgcgtgacataggagccatttccactatttcatctattaaaacaagtaagaaaatagaaaggcttggaagcaatggtgttccacccagaacaagccgactcaaggtacgctagttgatcacgtgatatggaggactagaaccgag

SEQ ID NO: 222102 - DNA, 1330 bp, Zea Mays
cttcgaacttgtatgactgggagtcaccagaattatctagaattttatcaatattttcttcaaaaagatgcaaggaaaaatgtgtatatcttctggaagttcttgatagattctgggatgatcattatagggcaaaatctaggatcttcacagatgctacacattgtggtgaaaacagagcagttgaatcatcatttatgaagtgcattcaaagcttcaaatggatagcatcaagaatggatgaggatcttcattatgcaacagatttattctatgattgtgaaaatgtccgctctctttttggtagtgtggctccatatgttgtatcgcaggtatctagcagttcacttaagaaggccattggattcaaaacagaggtatcttactgtgatgcattgatggtcctgaagtcttggataacgtcaaaggttccctttagagcaagtatgagccagatgtggaaattctataccttattgtctgaaggcgtggcagacgcaaagattgacattaaacgggagttcatgtcgtctccctctatatttacaccactacagcgtcctcgggcaagtggaagagactttgttaaaacgaactaaagtgtttctctgctcatattccagtgtttatttataacatgcctttgttttattattttggttttttaaatgtcatgcttatatcctggtttggatatccagtttaaagacatcccatctattggacgctccatcactagctgcaatagacaaaacttagaggcaattacttatctcaatcttacttctacatttatatttccctcttgtgttttaccttttgcttatatcctttgcgtgacataggagccatttccactatttcatctattaaaacaagtaagaaaatagaaaggcttggaagcaatggtgttccacccagaacaagccgactcaaggtatggcatggtcttgtcggcccctgtggcagcacatggccttcattgctagctgcactgatgtgagtagcgactttttgtctactctttgcaaaacagtgaggcaacgagtcaggaagcgcaccatggtcggatgaacgaagaagaaaaatctgttgcatggaatggatgtatgttattagattaaaataacaaaatttatgtatggatagaatcacaaatgaattctgaaacattttctcataacagtataacgcacacatgtacataagttatcgtgttgttatacggttccgttgcaacgtacgggcactcacctagtcatataatagagaataatctccaccttggatttttaacatattttttatgttatttttatattgtcataaa

SEQ ID NO: 222103 - DNA, 2165 bp, Zea Mays
ggatttttccgtctgttgcaaaatgatccagttataatgtttcaattggagctacacacaagagcgtttcaaataacctcgcttgcgcgaaccccttggtggccgcctccagctgcgcgaatgtgaactctccagggggtccttgaacgatgacgatggtcgtatatggttgccatatgatgttgccaattccattcctgaatgcagtagcattccgaattttccagctctatatggtaatcttcgaactgaagtcagaataaatgatctggcagacatgctccaaaggatcggggtgcggaagttgtctgggcatgacattgttaaaaatcacatcatggtgtccttgcgtaacggtttagatgctaatgtggctgatatagtgattagagagtatgtagtgaaagttgaaaaaactttatcccaagttgattctattctagcaggaggactttctctagctgatgtatctacaaaacaatgtacagtgtatgactgggagtcaccagaattatctagaattttatcaatattttcttcaaaaagatgcaaggaaaaatgtgtatatcttctggaagttcttgatagattctgggatgatcattatagggcaaaatctaggatcttcacagatgctacacattgtggtgaaaacagagcagttgaatcatcatttatgaagtgcattcaaagcttcaaatggatagcatcaagaatggatgaggatcttcattatgcaacagatttattctatgattgtgaaaatgtccgctctctttttggtagtgtggctccatatgttgtatcgcaggtatctagcagttcacttaagaaggccattggattcaaaacagaggtatcttactgtgatgcattgatggtcctgaagtcttggataacgtcaaaggttccctttagagcaagtatgagccagatgtggaaattctataccttattgtctgaaggcgtggcagacgcaaagattgacattaaacgggagttcatgtcgtctccctctatatttacaccactacagcgtcctcgggcaagtgagttcatgtcgtctccctcaatattgccactcaagtttctgtttacaagatcgacagttactcgtcagaatagccagaagtgctagcacttccttttgagtaatgacagtaactccatttatatttggtgaaaatgtttagcgtcacatgatctgtgttcttaggatattgaggtctaaatgactacttcaatctgtaatcagatttaatatgttgctgggttgatgagatgagaaaaaaatgtccactatactgtttagcaatattttcactctttaaatggcatgtaagtctgtgacaaagagctgcatgggaggattaatgtgattttaataatatcctcacccttcaagtgtcctgtgactaatagttgcacattaggattagccagacagtagtatgtgattaatggagacatttgccatgccagtttaattgtgcattactgaatacatgaacacaatagttattattcttgcaacacaatagctagctgttcactgaattgcatcttttgttctatgttgtcttcataggtggaagagactttgttaaaacgaactaaagtgtttctctgctcatattccagtgtttatttataacatgcctttgttttattattttggttttttaaatgtcatgcttatatcctggtttggatatccagtttaaagacatcccatctattggacgctccatcactagctgcaatagacaaaacttagaggagccatttccactatttcatctattaaaacaagtaagaaaatagaaaggcttggaagcaatggtgttccacccagaacaagccgactcaagtgaggcaacgagtcaggaagcgcaccatggtcggatgaacgaagaagaaaaatctgttgcatggaatggatgtatgttattagattaaaataacaaaatttatgtatggatagaatcacaaatgaattctgaaacattttctcataacagtataacgcacacatgtacataagttatcgtgttgttatacggttccgttgcaacgtacgggcactcacctagtcatataatagagaataatctccaccttggatttttaacatattttttatgttatttttatattgtcataaa

SEQ ID NO: 222104 - DNA, 1932 bp, Zea Mays
atgaagcatgtagtagttgtttcaaaaaggatagtgacaactttgcaggatgttcagttaaattcagtagtcctcgttgttcacaaaactataaagtaccaagctccagtgtatgttgaacaaccaaggcaacagcaggtgccaccaccacagcgccaaccacgcagaccaccagcacaattccagcagctagagtacgaaggtatggcgattcttatgcacggggtcgaggaagagggcgtgggcgtggaaggggctggggtagaggtggctacggtggctatggtggatatggaaacaaccaaggtggctatcatcagggtggtgggtattatgacaatcaaggtggttataatggctatgataatcaaggtggatatagtggctatgataatcaaagtggatatggtggtggatatggctataaacaaggcagatatgggaactatcaagaaaatggtggatataaccgagacccaggaagtggtatgcgaggaagatgcaattggggttaccaaggagcgcgaaccccttggtggccgcctccagctgcgcgaatgtgaactctccagggggtccttgaacgatgacgatggtcgtatatggttgccatatgatgttgccaattccattcctgaatgcagtagcattccgaattttccagctctatatggtaatcttcgaactgaagtcagaataaatgatctggcagacatgctccaaaggatcggggtgcggaagttgtctgggcatgacattgttaaaaatcacatcatggtgtccttgcgtaacggtttagatgctaatgtggctgatatagtgattagagagtatgtagtgaaagttgaaaaaactttatcccaagttgattctattctagcaggaggactttctctagctgatgtatctacaaaacaatgtacagtgtatgactgggagtcaccagaattatctagaattttatcaatattttcttcaaaaagatgcaaggaaaaatgtgtatatcttctggaagttcttgatagattctgggatgatcattatagggcaaaatctaggatcttcacagatgctacacattgtggtgaaaacagagcagttgaatcatcatttatgaagtgcattcaaagcttcaaatggatagcatcaagaatggatgaggatcttcattatgcaacagatttattctatgattgtgaaaatgtccgctctctttttggtagtgtggctccatatgttgtatcgcaggtatctagcagttcacttaagaaggccattggattcaaaacagaggtatcttactgtgatgcattgatggtcctgaagtcttggataacgtcaaaggttccctttagagcaagtatgagccagatgtggaaattctataccttattgtctgaaggcgtggcagacgcaaagattgacattaaacgggagttcatgtcgtctccctctatatttacaccactacagcgtcctcgggcaatttaaagacatcccatctattggacgctccatcactagctgcaatagacaaaacttagaggagccatttccactatttcatctattaaaacaagtaagaaaatagaaaggcttggaagcaatggtgttccacccagaacaagccgactcaagtgaggcaacgagtcaggaagcgcaccatggtcggatgaacgaagaagaaaaatctgttgcatggaatggatgtatgttattagattaaaataacaaaatttatgtatggatagaatcacaaatgaattctgaaacattttctcataacagtataacgcacacatgtacataagttatcgtgttgttatacggttccgttgcaacgtacgggcactcacctagtcatataatagagaataatctccaccttggatttttaacatattttttatgttatttttatattgtcataaa

SEQ ID NO: 222105 - DNA, 3412 bp, Zea Mays
atgggttcggtggtgtttgttcttggcgtgcgtgatttgggcgagtccggagctacccgcgagttctgcggacggttgaagaagacgcggtcctgggtggcccacgcgacaatgctgcgcgatgaagagctggcgcggcatggcaatgactggcgtccacacagtagcgggggtgcacggttctgcctgcctcaacgcccgcgctcctcaccaacgccgcaatcatcgcccacgcgcggatcccccacgatcctccccaccaccgccgccacaatcatcgctcacgcgcggatcccccatgatcctccctaccgtcgccgcaatcaacgcccacgcggatcctccccacgatccccaccccgcacacccccacccttccatcgccggccggaatcgatcgatccaaagctccctttagagctcgagctctatccaacccacgaacgggatcccgatgcccatggcggcctcggttcgtctcgccgcaccggctgcctcgcccccgctgacgtggtggaggtgggctcctcttctcgccgcgtcacatccacgggcgaacccgccgcctcccgcaccgcgcctgcgggcgcccgctctcttctccgggcctcccctgttccccgcgattccagcgccggagccatcgtccggaggacaccgtgtgcggcggcggcaataggtggaggtgtggaggcggagtccacggagcgggaggcgcccgatcgggatactctgaagcgggtggcgctgctcgcgcttggctgctgcactgcagccgccgctctcggcgtggcgcgggcagcggcgggggactccatcaaggcgtcaggattcaggctatgggtggcggagtcgctgcggaggctcggatggcccgatgacaccgtcgtgttcgcgctcgcaacgctgccggtgatcgagctgcggggggcgatcccgttgggtattggctgtggggcccatccccactgcccctctgtcgcaaaccccgcgcacgccgcctccactgcacacccccgccttccatcatcgggcctctgccgcaaaccccgcacacgtcgcctccaccgcacacctcgcccttccatcgtcgccaccgcgcactcaccctccacaccatcctcgccccaaatcgctcagcctaagcatagatggaagtccccccgcatccgctcccgcgcatcccgacatcagtggattgcggcagaggcccttcgtgcacgatctgtttccccctccacgcatggcggttccgcctccacctaccgtcgccccatccactcaaggccaattgcatccaaatgtcacgcaggccgcacgtcatcctcatccttgtggcgtcaacaaccatgtgcggcaagcagcggatgcggtagatgattgtttgcgtcccatatagctcaatatatgcctgcccccgatgccatctacatgcctagaggcgacggtcggacgggccaagtaggagccaaaaagaagcaagccccgtcgccgtcatggaaggaggaggccatcccacccacgctgacgaggagccaccaatagcaggtgccaccaccacccaaggagaaagccgcccaaggagacctttcatttcagattggagatgactcggcatgtttccatgatttcaattacactgtcccctagagagctggacaagcacactcctgggtaccaagctccagtgtatgttgaacaaccaaggcaacagcaggtgccaccaccacagcgccaaccacgcagaccaccagcacaattccagcagctagagtacgaagattcttatgcacggggtcgaggaagagggcgtgggcgtggaaggggctggggtagaggtggctacggtggctatggtggatatggaaacaaccaaggtggctatcatcagggtggtgggtattatgacaatcaaggtggttataatggctatgataatcaaggtggatatagtggctatgataatcaaagtggatatggtggtggatatggctataaacaaggcagatatgggaactatcaagaaaatggtggatataaccgagacccaggaagtggtatgcgaggaagatgcaattggggttaccaaggagcgcgaaccccttggtggccgcctccagctgcgcgaatgtgaactctccagggggtccttgaacgatgacgatggtcgtatatggttgccatatgatgttgccaattccattcctgaatgcagtagcattccgaattttccagctctatatggtaatcttcgaactgaagtcagaataaatgatctggcagacatgctccaaaggatcggggtgcggaagttgtctgggcatgacattgttaaaaatcacatcatggtgtccttgcgtaacggtttagatgctaatgtggctgatatagtgattagagagtattgtatgactgggagtcaccagaattatctagaattttatcaatattttcttcaaaaagatgcaaggaaaaatgtgtatatcttctggaagttcttgatagattctgggatgatcattatagggcaaaatctaggatcttcacagatgctacacattgtggtgaaaacagagcagttgaatcatcatttatgaagtgcattcaaagcttcaaatggatagcatcaagaatggatgaggatcttcattatgcaacagatttattctatgattgtgaaaatgtccgctctctttttggtagtgtggctccatatgttgtatcgcaggtatctagcagttcacttaagaaggccattggattcaaaacagaggtatcttactgtgatgcattgatggtcctgaagtcttggataacgtcaaaggttccctttagagcaagtatgagccagatgtggaaattctataccttattgtctgaaggcgtggcagacgcaaagattgacattaaacgggagttcatgtcgtctccctctatatttacaccactacagcgtcctcgggcaatttaaagacatcccatctattggacgctccatcactagctgcaatagacaaaacttagaggagccatttccactatttcatctattaaaacaagtaagaaaatagaaaggcttggaagcaatggtgttccacccagaacaagccgactcaagtgaggcaacgagtcaggaagcgcaccatggtcggatgaacgaagaagaaaaatctgttgcatggaatggatgtatgttattagattaaaataacaaaatttatgtatggatagaatcacaaatgaattctgaaacattttctcataacagtataacgcacacatgtacataagttatcgtgttgttatacggttccgttgcaacgtacgggcactcacctagtcatataatagagaataatctccaccttggatttttaacatattttttatgttatttttatattgtcataaa

SEQ ID NO: 222106 - DNA, 1905 bp, Zea Mays
atgaagcatgtagtagttgtttcaaaaaggatagtgacaactttgcaggatgttcagttaaattcagtagtcctcgttgttcacaaaactataaagtaccaagctccagtgtatgttgaacaaccaaggcaacagcaggtgccaccaccacagcgccaaccacgcagaccaccagcacaattccagcagctagagtacgaaggtatggcgattcttatgcacggggtcgaggaagagggcgtgggcgtggaaggggctggggtagaggtggctacggtggctatggtggatatggaaacaaccaaggtggctatcatcagggtggtgggtattatgacaatcaaggtggttataatggctatgataatcaaggtggatatagtggctatgataatcaaagtggatatggtggtggatatggctataaacaaggcagatatgggaactatcaaggcaatgacacattttgataagttgatccagaaaatggtggatataaccgagacccaggaagtggtatgcgaggaagatgcaattggggttaccaaggagggcagactcagtgctggatgctccctgggtctggtgaagcgcgaaccccttggtggccgcctccagctgcgcgaatgtgaactctccagggggtccttgaacgatgacgatggtcgtatatggttgccatatgatgttgccaattccattcctgaatgcagtagcattccgaattttccagctctatatggtagtgaaagttgaaaaaactttatcccaagttgattctattctagcaggaggactttctctagctgatgtatctacaaaacaatgtacagtgtatgactgggagtcaccagaattatctagaattttatcaatattttcttcaaaaagatgcaaggaaaaatgtgtatatcttctggaagttcttgatagattctgggatgatcattatagggcaaaatctaggatcttcacagatgctacacattgtggtgaaaacagagcagttgaatcatcatttatgaagtgcattcaaagcttcaaatggatagcatcaagaatggatgaggatcttcattatgcaacagatttattctatgattgtgaaaatgtccgctctctttttggtagtgtggctccatatgttgtatcgcaggtatctagcagttcacttaagaaggccattggattcaaaacagaggtatcttactgtgatgcattgatggtcctgaagtcttggataacgtcaaaggttccctttagagcaagtatgagccagatgtggaaattctataccttattgtctgaaggcgtggcagacgcaaagattgacattaaacgggagttcatgtcgtctccctctatatttacaccactacagcgtcctcgggcaagtgagttcatgtcgtctccctcaatattgccactcaagtttctgtttacaagatcgacagttactcgtcagaatagccagaagtgctagcacttccttttgagtaatgacagtaactccatttatatttggtgaaaatgtttagcgtcacatgatctgtgttcttaggatattgaggtctaaatgactacttcaatctgtaatcagatttaatatgttgctgggttgatgagatgagaaaaaaatgtccactatactgtttagcaatattttcactctttaaatggcatgtaagtctgtgacaaagagctgcatgggaggattaatgtgattttaataatatcctcacccttcaagtgtcctgtgactaatagttgcacattaggattagccagacagtagtatgtgattaatggagacatttgccatgccagtttaattgtgcattactgaatacatgaacacaatagttattattcttgcaacacaatagctagctgttcactgaattg

SEQ ID NO: 222107 - DNA, 1996 bp, Zea Mays
gcagcagatgacacggccgcgggcccgcggcagaagagagagcccaaatcatagccacaaaagccacgcacgcggggcgcttgtcttgcgcgcacgaaaacccacatccaccgcggcgccacaccgcgtgcgtcggctgcttgctgccccgtgttccttggctcccgccgacaccgagcgccgacaccgagcgccgccaccgccatggctgccccgccccgcgccaccgcggtcctcgcgggttccggggaggacgggcagcttggcatgggcgggaacgaggagaaggactgggcacactgcgtggaggcactcggttcctacgccgtcaccgccgtcgtagccggtagccgcaactccctcgccatctgcgaagacggccgcctcttcacttgggggtggaaccagcgcggcacgctcgggcacccgccgaagaccaagacggagagctcccctggccccgtccacgccctcgcggggttgaagatcgtccaggcggcgattggtgggtggcattgccttgcagttgacgacaatgggcacgcctacgcctgggggggaaacgagtacgggcagtgcggtgaggagcctgagaggaaggaggacgggacgagggcgctcaggagggacatcccgaccccacagcggtgcgcacccaagctcaaagtccggcaagtagctgctggagggacacattcagtggttttgactcaagaaggtcacgtttggacatggggacagccatggcctcctggtgatatcaagcaaatatcgacaccagtacgcgtgcaaggccttgagaaagtgagggtcattgctgtaggtgcattccataatttggcactcacagaggatggaattttgtgggcatggggtaataatgagtatggtcagctggggactggagatacccaaccaagatcacaccctatacgcgttgaaggactatctgatctctcactggttgacattgctgctggaggctggcattcaactgcactaactatacagggagaggtgtatgcttgggggagaggagaacacgggaggcttggatttggagatgataagagtagtcgcatggtccccctaaaggttgagcttctagctggagaggatattgttcaggtatcatgtggaggaacacattcagttgctctaactcgagatggccggatgttttcttatgggaggggcgaccatggccgtctgggctacggcaggaagctgacgacaggccagcccatgggagtggacattgacctgccgccgcccaagacccgcagcagccgggacgggcagtggcaggcgaagtacgtggcttgtggcgggcggcacaccctggctattgtggtgtgggcagagaccaccgactgatcacggagtgatcaacttcctgaatcctaatctgggtgcaaatctgagtttgacaatcctgctagataattatagtgttagtgaaataagcataagttatgcgacattaggcatcataaatttttatgtatgtgcttaatttggcaaggaacaaaaatagtcgggaagaggactttgtgcagatgggagagcttcagtatttcagcaatatttttcgatggacaattttgtgctgtatcctgtgcttactggctcccgggttgctaccttcactcgctgcacggctacacatctaactgtcaagggtgacaatggatcaagcactagttcaaatcgaatattggagacattcaattagcgacgattaaggagatcatgcttcaactcgcggctgctcaagaacatgcacaaattacctccaaggagcttggcctaaggagacgcctcaaagtgcgcagtgttggcttgaagcacagcaagaatcaggcagcactctcgtctcacgcacatccgttacggggacgcgaacaccaaattcttctaactatgggtgaattatagggcacgccaaattaagggagtatttggttactttgtcatgctactaactaaacttatc

SEQ ID NO: 222108 - DNA, 1836 bp, Zea Mays
gctgcttgctgccccgtgttccttggctcccgccgacaccgagcgccgacaccgagcgccgccaccgccatggctgccccgccccgcgccaccgcggtcctcgcgtggggttccggggaggacgggcagcttggcatgggcgggaacgaggagaaggactgggcacactgcgtggaggcactcggttcctacgccgtcaccgccgtcgtagccggtagccgcaactccctcgccatctgcgaagacggccgcctcttcacttgggggtggaaccagcgcggcacgctcgggcacccgccgaagaccaagacggagagctcccctggccccgtccacgccctcgcggggttgaagatcgtccaggcggcgattggtgggtggcattgccttgcagttgacgacaatgggcacgcctacgcctgggggggaaacgagtacgggcagtgcggtgaggagcctgagaggaaggaggacgggacgagggcgctcaggagggacatcccgaccccacagcggtagctgctggagggacacattcagtggttttgactcaagaaggtcacgtttggacatggggacagccatggcctcctggtgatatcaagcaaatatcgacaccagtacgcgtgcaaggccttgagaaagtgagggtcattgctgtaggtgcattccataatttggcactcacagaggatggaattttgtgggcatggggtaataatgagtatggtcagctggggactggagatacccaaccaagatcacaccctatacgcgttgaaggactatctgatctctcactggttgacattgctgctggaggctggcattcaactgcactaactatacagggagaggtgtatgcttgggggagaggagaacacgggaggcttggatttggagatgataagagtagtcgcatggtccccctaaaggttgagcttctagctggagaggatattgttcaggtatcatgtggaggaacacattcagttgctctaactcgagatggccggatgttttcttatgggaggggcgaccatggccgtctgggctacggcaggaagctgacgacaggccagcccatgggagtggacattgacctgccgccgcccaagacccgcagcagccgggacgggcagtggcaggcgaagtacgtggcttgtggcgggcggcacaccctggctattgtggtgtgggcagagaccaccgactgatcacggagtgatcaacttcctgaatcctaatctgggtgcaaatctgagtttgacaatcctgctagataattatagtgttagtgaaataagcataagttatgcgacattaggcatcataaatttttatgtatgtgcttaatttggcaaggaacaaaaatagtcgggaagaggactttgtgcagatgggagagcttcagtatttcagcaatatttttcgatggacaattttgtgctgtatcctgtgcttactggctcccgggttgctaccttcactcgctgcacggctacacatctaactgtcaagggtgacaatggatcaagcactagttcaaatcgaatattggagacattcaattagcgacgattaaggagatcatgcttcaactcgcggctgctcaagaacatgcacaaattacctccaaggagcttggcctaaggagacgcctcaaagtgcgcagtgttggcttgaagcacagcaagaatcaggcagcactctcgtctcacgcacatccgttacggggacgcgaacaccaaattcttctaactatgggtgaattatagggcacgccaaattaagggagtatttggttactttgtcatgctactaactaaacttatc

SEQ ID NO: 222109 - DNA, 2481 bp, Zea Mays
tgccgtcgtccacacggcccaccccacgttactctccccaaatctgatcctcccgcacgaggtctcacctcttccgacgccacgcgagacgcaccacacgcgagcccaagccggaccccgtctagggttagcgatccacggcggcggccatggacgaggtagcgacagcggccctggcggcggcgaggggacggtggacgcagtgggaggaggtggtggtgtccaacgaccgcggcagtcgtcttgtgcactactacctccgcggcaacggcgaagcgaaggagctagctgtggtggggcgggagcggagcccacgtcacatgtcgtacgctgtgcaggggcggttcctccgcgcgctcgcagctgccgcgggagcggtcgccgtcgcgtcgtcgccgtcacggtcgcccctggcggctgctgtggcggacggcggcgctccgaggaggtggcggtccaggcgggaggtcgtggagtggctgtcctccctcgtttccggttatagttatggttcctcaatggctaacaggtgcaatggggattcatatgatgacagtgttattaactgcagtcaagttaccgtttcgaaggatgtttcttctagggaagcttcgaatgacttcacatggttgggagcttcatggaaatgccaacgaagtttgaagcactacaaatctttctgccgtagaggaattactatctcggtgcatagttttgtatacattatgggtgaagagatgaagagacttattgcttatgtggaagatctctatgaggatacaaattcctgcaacatggtcaaggtacaatggtttggcaaagctgatgaggttggtgttctgttgcccatggattttgatgacagggagattttcttttctctgggtcgtcaagatctcaatgtagtatgtattgatggattggctgcagtcctgagtgcccagcactacgagaagttcaagagtgatactagatacagcttgtggcaaccttatttttgctatcggcagattgataatggtgaagccaagccttttgatgtcacacagctacaaggctactggagccaggaagtacttaggaccatgttcaatgcaacttcctgtctgaaggttttatggtgagaacatcgaacacttgtgtcctggttgccatgtggaagtactatctcaagacagtggcataaagataaaatcaagggtgcgctacctagaacttcaggatgctgatgagactggaaacttggaggagtgggttttgctaacacgaattgcgaaacctgatcaactgggtgtacgtttccttggaaggccaatggttcgtccacagcatgtggaagaaagcaaggcctcgtgctttgatgttggagccattgttgatgcgtggtggcatggtggctggtgggagggaattgtgttgtgccagggaggcagggggcgcctacaagtttattttccaggagaaaagcgaatcactgaatttggtgaagatgaattgaggtattcccttgagtgggttggtaacaaatggaatcctttgaagggaagaaaagatatcgcacacaagctgacctccactgcagatcgtggaagtgaatatttgattgggaaacaagatcatctgaattttgatgtgcttctaaaaccagaacctcaactagagggacttcaatatgacaaacggggtattgagaaatcttcagtcaccaccatctcacgagatcagaaacgtgtcctggccgacctgactaatgatttgaagttagatagcttgaggtggaggccaagaaagaggagtagaagatctggctcaagaaagcagtcggatacaagcagtggaagcagcagcggggacatggacttgtccagccctggccctagtgggttttgtcaacttaatttagtgcccgacgatgagacatgcaagagcagtggagagcagccttttatgggcgtgcctgtgcaggcccctaaatccgactgcctccctcttcatgcccctaaattccgggcgtacgctatccagccgacggatcagccatccatgcgcggtgaaacctctgcgttctctgttgtccgagcgttagcgactgcgtctctcgtggcggagccctcgagccgccgtgcttcgtcgtcgttggcgaccaagttgggagagaagaggtcgtgggtgggcgggtcaggcggtggcccgcttcgagcacttcgaagcgaggaggagggtcgcgtcaagagggcgaccgaggttgccgcagtcgaggcggttcctcggaggagaatcgccattgcgaaatgcctacgttgtccaccgccgtcgttcaaggttgttggcgacaaaaggaagcggagctcgtcgccaccgtcttcatcatcctcgattcgctcctccgcactagatctgagcagagaaaggtacgatcttcgatttcgtttgcggatctgttcgattcaatttgcactctattttgtgcgctttttctag

SEQ ID NO: 222110 - DNA, 1359 bp, Zea Mays
aagtgccttcacggctagtatattaaagtttgttcttttatcgatatggcgagggaggagaatgtctacatggccaagctggctgagcaggccgaaaggtatgaagagatggttgagtatatggagaaggtggctaagactgtagatgtggaagagctcactgttgaggagcgtaacctcttgtcggtcgcatacaagaatgtgattggggctcgccgtgcttcatggcgcattgtctcttctattgaacagaaggaggagtcccgtaagaacgaagagcatgtgaaccttatcaaggaataccgtgcgaagatcgaggctgaactgagcaatatctgtgatggcatcctgaagctgcttgactcccacctagtgccttcttctactgctgctgaatcaaaggtcttctacctcaagatgaagggtgactatcacaggtatcttgcggaatttaagactggtcctgagaggaaggaatctgctgagagcacgatgatggcctacaaggctgctcaggacattgcgctggctgagctggcacctacccatccgataaggcttgggcttgctcttaacttctcagtgttctattatgagattctgaactccccagacaaagcttgcaaccttgcaaagcaggcgtttgatgaagctatctcccagttagacacccttggggaggagtcatacaaagatagcactctgatcatgcagctccttagggacaacttgaccctttggacctctgacctcacggaggatggtgctgatgagggcaaagaagccccgaaaggtgaggctggtgacggacagtaatcttgggagagcgcatattgttcgagcccattgttttagatgctctatgctgtcgaagctgaagctgtgccgtgctattattgtagctgatttcctgttccctcacttctttttttatattagtaggctggtagtgttcgaattagttccccattgctttgtgttgccgctagttggcattaagtccgtgtggactggtattattcactggatttgagaagcatgtcagtggttgctctagcgttttattgagttttgaagtcatctccctcatttcggtttcaatcatttagcagattgtgcatatggttgtgtaaaacacagttttgcacaattgcacaatttacgtagtgtggtttgaaataagagtgagatttgggctggatgtgcggttggctgtttgaatctgctctttagggcctgtttggtagggaggttttgaatactacagtttttagaataccacagttttcaactggaagtgacacaaatactatggttttactttagtctagttaaatcgtgatattaactaaaaccaca

SEQ ID NO: 222111 - DNA, 1136 bp, Zea Mays
cgctgcttcgccatgccccaggcccaccgctagcatccgcagttcccccgcgcccgagacgcaaccccgcgccaggagtaagtttgttcttttatcgatatggcgagggaggagaatgtctacatggccaagctggctgagcaggccgaaagaaggaggagtcccgtaagaacgaagagcatgtgaaccttatcaaggaataccgtgcgaagatcgaggctgaactgagcaatatctgtgatggcatcctgaagctgcttgactcccacctagtgccttcttctactgctgctgaatcaaaggtcttctacctcaagatgaagggtgactatcacaggtatcttgcggaatttaagactggtcctgagaggaaggaatctgctgagagcacgatgatggcctacaaggctgctcaggcgtttgatgaagctatctcccagttagacacccttggggaggagtcatacaaagatagcactctgatcatgcagctccttagggacaacttgaccctttggacctctgacctcacggaggatggtgctgatgagggcaaagaagccccgaaaggtgaggctggtgacggacagtaatcttgggagagcgcatattgttcgagcccattgttttagatgctctatgctgtcgaagctgaagctgtgccgtgctattattgtagctgatttcctgttccctcacttctttttttatattagtaggctggtagtgttcgaattagttccccattgctttgtgttgccgctagttggcattaagtccgtgtggactggtattattcactggatttgagaagcatgtcagtggttgctctagcgttttattgagttttgaagtcatctccctcatttcggtttcaatcatttagcagattgtgcatatggttgtgtaaaacacagttttgcacaattgcacaatttacgtagtgtggtttgaaataagagtgagatttgggctggatgtgcggttggctgtttgaatctgctctttagggcctgtttggtagggaggttttgaatactacagtttttagaataccacagttttcaactggaagtgacacaaatactatggttttactttagtctagttaaatcgtgatattaactaaaaccaca

SEQ ID NO: 222112 - DNA, 1282 bp, Zea Mays
ctcgcatcccgctataaaagctccccacgctgcttcgccatgccccaggcccaccgctagcatccgcagttcccccgcgcccgagacgcaaccccgcgccaggagtttgttcttttatcgatatggcgagggaggagaatgtctacatggccaagctggctgagcaggccgaaagaaggaggagtcccgtaagaacgaagagcatgtgaaccttatcaaggaataccgtgcgaagatcgaggctgaactgagcaatatctgtgatggcatcctgaagctgcttgactcccacctagtgccttcttctactgctgctgaatcaaaggtcttctacctcaagatgaagggtgactatcacaggtatcttgcggaatttaagactggtcctgagaggaaggaatctgctgagagcacgatgatggcctacaaggctgctcaggacattgcgctggctgagctggcacctacccatccgataaggcttgggcttgctcttaacttctcagtgttctattatgagattctgaactccccagacaaagcttgcaaccttgcaaagcaggcgtttgatgaagctatctcccagttagacacccttggggaggagtcatacaaagatagcactctgatcatgcagctccttagggacaacttgaccctttggacctctgacctcacggaggatggtgctgatgagggcaaagaagccccgaaaggtgaggctggtgacggacagtaatcttgggagagcgcatattgttcgagcccattgttttagatgctctatgctgtcgaagctgaagctgtgccgtgctattattgtagctgatttcctgttccctcacttctttttttatattagtaggctggtagtgttcgaattagttccccattgctttgtgttgccgctagttggcattaagtccgtgtggactggtattattcactggatttgagaagcatgtcagtggttgctctagcgttttattgagttttgaagtcatctccctcatttcggtttcaatcatttagcagattgtgcatatggttgtgtaaaacacagttttgcacaattgcacaatttacgtagtgtggtttgaaataagagtgagatttgggctggatgtgcggttggctgtttgaatctgctctttagggcctgtttggtagggaggttttgaatactacagtttttagaataccacagttttcaactggaagtgacacaaatactatggttttactttagtctagttaaatcgtgatattaactaaaaccaca

SEQ ID NO: 222113 - DNA, 1413 bp, Zea Mays
ctacgacaaatgggtcccactagtgtgccgcacccgcaggccaccacggcctgcgcgaggggtgtcggtgtgggctcttggagtcgccgtggcgccgtgacattggctcgctgaccgtagcctgccgctcgcatcccgctataaaagctccccacgctgcttcgccatgccccaggcccaccgctagcatccgcagttcccccgcgcccgagacgcaaccccgcgccaggagtaagtttgttcttttatcgatatggcgagggaggagaatgtctacatggccaagctggctgagcaggccgaaagaaggaggagtcccgtaagaacgaagagcatgtgaaccttatcaaggaataccgtgcgaagatcgaggctgaactgagcaatatctgtgatggcatcctgaagctgcttgactcccacctagtgccttcttctactgctgctgaatcaaaggtcttctacctcaagatgaagggtgactatcacaggtatcttgcggaatttaagactggtcctgagaggaaggaatctgctgagagcacgatgatggcctacaaggctgctcaggacattgcgctggctgagctggcacctacccatccgataaggcttgggcttgctcttaacttctcagtgttctattatgagattctgaactccccagacaaagcttgcaaccttgcaaagcaggcgtttgatgaagctatctcccagttagacacccttggggaggagtcatacaaagatagcactctgatcatgcagctccttagggacaacttgaccctttggacctctgacctcacggaggatggtgctgatgagggcaaagaagccccgaaaggtgaggctggtgacggacagtaatcttgggagagcgcatattgttcgagcccattgttttagatgctctatgctgtcgaagctgaagctgtgccgtgctattattgtagctgatttcctgttccctcacttctttttttatattagtaggctggtagtgttcgaattagttccccattgctttgtgttgccgctagttggcattaagtccgtgtggactggtattattcactggatttgagaagcatgtcagtggttgctctagcgttttattgagttttgaagtcatctccctcatttcggtttcaatcatttagcagattgtgcatatggttgtgtaaaacacagttttgcacaattgcacaatttacgtagtgtggtttgaaataagagtgagatttgggctggatgtgcggttggctgtttgaatctgctctttagggcctgtttggtagggaggttttgaatactacagtttttagaataccacagttttcaactggaagtgacacaaatactatggttttactttagtctagttaaatcgtgatattaactaaaaccaca

SEQ ID NO: 222114 - DNA, 3048 bp, Zea Mays
tcccggtcctcgcccacatagaccaacatcgcaagcgttgcaccaaaacccccaggcatgagatgctccaatctgtgctgcccatatataggccactacagagcaacaagggaagtgcaaacaaaaagcctcaaaagggcagacagccaaatgccccaccacagcgtagcccctcctcactgactcgcctgcaaaaaccacttgcaaaccacacaaaccgaaaacgccagctcccctgcctccatttttagcaacttttcccttctgtcttcccatcacagtcacccttcttgcccccacgcagccgagcgtgcctacccctcctcgacccttctctggggccgccgttggacgctcatggagaggagtcgtccgggcgccgcgccgacaccatcgccagaggaggaggtggcggcggagggccatgcgcatggtgacgatgtgacggggcaggaggaggaggcgacgccagtggtgctcaagaagggcccgtggacggcctcggaggatgccatgctcatggaccacgtccggcaccacggcgaggggaactggaacgcagtgcagaggatgaccggcctgctgcgctgcggcaagagctgccgcctgcgctggaccaaccacctccgccccaacctcaagaagggctccttctcccccgacgaggagctcctcatagcccagctccacgcgcagctcggcaacaagtgggcgcgcatggccgcgcacctgcccgggaggacggacaacgagatcaagaactactggaacacgaggaccaagcgccgccagcgcgccggcctgcccgtgtacccgccggaggtgcagctccaccttgccctctccaagcgctgccactacgacgactacgacttcccgccgctcgcgtcgtccccgcagctgtcggcgacgacgacgaccgatgtccaggcgctgggcgccgggcccgggtacgccagctcgcgcccggcgccgctcgacctggctcgcagccagctcgccgcgacgacgacccagcagacggcgcagttcctctcgccgccgcccttctcggcgccgtcgtccccgtgggccaagccgttcgcgcggaacgcgcagtacttccagctcgcgcactcgtcgcccgtgtccccgtcgacgccgaccgggccggtgcacccggccatgccggacctgtctctcggcggccacggcgcgcgcgccgccgccgctgccgaccagagcaggctcccaccgctctcgccgtcccccggccccagagtggagctcccttcaaaccaatacggccagccggcgccgccgacctcggccgccgccgtcgccgccggacttgcgctgccggatcatcagaacgcggcgagcctcgaacagatgctgcaggagctgcacgacgtcatcaaggtcgaaccgcaggcgctggtcccggccagcggcggcggcgctgcactggagcggcatgattgcggaggtgcgtagtgcatgccgtgtgtgaaccatctctcttcacatcttcgccttttctggatgcgctcggtgtccgatttgttgctttgcgggggaagagaacaaatgctcatgatcacgatgtgaactgggcagattagcgtgaaccttttccgtccgtgcttccaaaatctacatttgttttcacttactatgtgccaccaacctgttcagaggctaaacaactctgatctttatcgcggtgtcaccatctggttaatcaaagtacacttactcgggcattagtggtaggaataaatgtgccttggtgaaagtatttctggtattagtatattattatgctaggattttggacaaaatctgaaccatggacagcacactgtttggaatctttctctctcttttttgtctttcttttgatagttttaaggttggagaagcttctgcaggcactgtctacagagagggctttctttttgtccttgcaagacagtgactacctttatttgatcttgttccaagattacttttccttatcatgccaagtgctttaacaacttttcctcccttcttttccctctgcatgtgcagcttttttttttaatttatctatcttttacctaatcaaacgtaatatggttccagttcatccttcattttcgcaattgtatgattgctcgttagcttgcataacaacacgtcacgtctactgctatatatattctgcatttctgcacaagtttaacataatcaggatgaccgtatgtagagctatatcaaatttctggacattagctagagaggttctcattcttttctttaatataaaaaacagagagacttttgttcccctcatgatcagtgaaaagaatagaatcaaatcaggactgatactaatttattaaacctactgatttattataacttttgcgtcacgcgtttctctgttgttggtttcagtttcagtcccagagagcagaatcagcggcctgcagcgtcggggtgacgacatggacacgctgttcggcctggtgcacccagcgctcggcgcgccggagacggcgccggcggccgccgcctccaaccactccggctcgacctcgcggcacagcaccgccgaccagaacccgtccaccgtcggcaacagctcgccggaccaggactggggcctcgacggcgtctgccagtggagcaacgtgtccaggatctgctgatcgcgtgcaagagctgcaggggggggggggggggggggggggtcggcgtagccatgccgaatcatcgattaggacacccatccgacccgatgattctgagaagggccggagacggaatgccgaccttttcttttttttgcttttgaacatttcagcctgtcagatgccaagcatcacggacaaatctgtctgtgttctgttctccgttcctgaccgactagttgccggctcaatctcgaactcagctgcgatcgaatctgcgtcagcgtctctagctagcatgttgttttccagtttcccgttcaattgacatcatcaatcaattgtagaatttaaaggtagatcccctcgatgtttttctggattttct

SEQ ID NO: 222115 - DNA, 1972 bp, Zea Mays
tattcttccttctaaacatatttccgtgggctggcctgttgggctgctgtattttgtggaaagtttcggacagcccgtaaacttgggcccgttccggttcggcttagctttgctcttcttctccccgttcaccgactaaacaaataacatttttaataataataataataataaaatctcccgtggcctccttcttctccggttctcgctcgtgcccttctctcctggcggcgacggctgggcgagcggcgcggcccgttatcacttcccaggtcttcggcggcgacgagtttccaccaggctgaccggaacgcagtgggtggagaaccggtgagcagctgcagccatgtccgtggcggccggcgtgagcgacgcggccatcgcggtgcgcgacaagctccgtggaaagattggtcagaccaaggtcaaacggtactggccggggaaggcgcctgagtgggccgatgacgtcgatgaggacgtcgacctcaggacggcacgggtctccctcgacaaggcgttccccagggacgaggacggcgatgttcccgccaaggatgaccgccggctccgccggctcgcggagacccgcgcggagaataaggaggagctgagggcggatcaccgccgcatacggcaggcggagatcgtgtcaaccgcggaggaggagaacgagaggcaggaggctgacgccgacgaggaggatgaggaggcccaagaggagaggaggaggagaataagggcaaggcagctgctgagggagcaggaagagctgcttcctcaggaagaggaggaaccggtggaggccgaggagtctgaggaggaatctgagtacgagacagactctgaggatgagcagatgggaatggccatggtgaagcccgttttcataccaaagtcacagagagacaccatcgcggagcgcgaacggctggaggaggaggaacggcagcttgaggagctggtcaagaagaggctggaggctaggaagatcgagactagacagattgtggtcgaagagattagaaaggaggagcacatcgagaaggcactgaacgaagaggccaacatcgaggatgtcgatacagacgacgagttgaacgaagcagaggagtacgagtcgtggaaaaacagagaaatagcaaggattaagagggacagggaggaaagagatgcgaggttgaaggagaaggaggagatcgagaaagtcaggaatatgaccgaggaggagcgtcgcgaatgggagcggaagaatccgaagccgcttcgtcagacgaaacagaagtggaagtttatgcagaagtattaccacaaaggcgccttcttccaggaaggtgctgatgatgttatccagtcagcgggtaaagaggatatctacacccgtgatttctctgagcccactggagaagataagatggataagagcatcctgcccaaggtcatgcaagttaaacatttcgggcgcagcggcaggacgaaatggacgcatcttgttaatgaagacactacagattggaatgcaccatggtcaacaaatgggcctctgcgagcaaagtataatgcaaaaatggcaggcatgaatgcacctattgctaaaccaaagggaagtaagaagctgaaggattgggatgcaaaatgagatgccagggtgatggtagcaaggaaatggcttccgtggggaccaagtgaagataaaggaaaagcgacggcttgggcatatagaaacgaaggacatggttgtggtgaagaagaaagtgcttgcatttagtttttcactattcaagttagaagaagttatattgtgaggaggattaaatcattgttggatcatttgaagaaactgatttcatgccattagattaattcatatggattgaattggatcaaatcacatgatcaagatggctatgctcaagctacaatcaagatgaatatgttggcatcctgtatgatgaagattgaaagttatggc

SEQ ID NO: 222116 - DNA, 1409 bp, Zea Mays
caaattaataatccagcgaacacactatactagtgagcaaataaagccaccgatgtcatcactcctgttgcgagtgctgctcatccagcttgcagcagtggagtgcctctccgccgcgattccaggctgcctaacgcaatgtggaggcgtagagataccctatccattcggcgtcggcaccaactgctcccgcaaagggttccggatcaagtgcatcaacggcagcgcgggcgaggagattccagtgctgctacctactacgcgctaccagaacatccgggtgctgaacctgtccgtgtcgccgttgccggaggctcgagtgcttcttccggtggcatggcagtgcttcaacgccaccgggggcgtcactgggatctactcgggagatgtggacttcaacccagagggcgtataccgcatctccaacacacagaacgagctcttcgtcctcggctgcgacacctatgcgttcaccaaaggcgtgagggtgcacaacgttaacgcacgcttcccttacagatacttcacggggtgtatcaccgtcagtgtagacgacaaggacccgcgcgacggtgcctgcgcgggcctcggctgctgccgcgtcgacatcccgccaggcatcacggacaccagcatgaccttctcgtctacctggacgcgtgccaaccagaccttctgcccctgcgactacgccttcatcgtggagaagggcaactacaccttcaaggcatccgaccttgtgtcgcacacacccgacaaccgtctgcctttggactggtggaccatgccactgcgtctcgactgggccatccgcgacaacaacggcgactccatgacttccatctcctgcgcccaggcacccaacgaacctgactatggctgccgcagcaagcatagcgagtgcactaattcaaccaatggccctggctacttctgcaagtgtgcccatggctacgacggaaacccctatgtccagagtgatggtgaatgcacgaatatcaacgagtgccaagatccaaagtcacataattgttcaagtggcagcaaatgcattgacacagacggaggctattattgtcaatgcaatttcttccgaagagggcagcaatgtgatcccttaattcctatggctgccgttgcactgttaaacggacgacgaattcgagaggctactgcagcctgcaggcggccatcaaaggcagagcccaagaaaacgttcaagggcgacaggaggaaaagaatagattagtgactttttgtgtaatatttgttttaatcgatttagtatatggtatgttcgttttgatattaaatttttttgttatgatgtttttttgtgggaatgatttatttgttatgatataagaacgtcaccccataccaactaataccatcaaacatgaatgtat

SEQ ID NO: 222117 - DNA, 2479 bp, Zea Mays
caaattaataatccagcgaacacactatactagtgagcaaataaagccaccgatgtcatcactcctgttgcgagtgctgctcatccagcttgcagcagtggagtgcctctccgccgcgattccaggctgcctaacgcaatgtggaggcgtagagataccctatccattcggcgtcggcaccaactgctcccgcaaagggttccggatcaagtgcatcaacggcagcgcgggcgaggagattccagtgctgctacctactacgcgctaccagaacatccgggtgctgaacctgtccgtgtcgccgttgccggaggctcgagtgcttcttccggtggcatggcagtgcttcaacgccaccgggggcgtcactgggatctactcgggagatgtggacttcaacccagagggcgtataccgcatctccaacacacagaacgagctcttcgtcctcggctgcgacacctatgcgttcaccaaaggcgtgagggtgcacaacgttaacgcacgcttcccttacagatacttcacggggtgtatcaccgtcagtgtagacgacaaggacccgcgcgacggtgcctgcgcgggcctcggctgctgccgcgtcgacatcccgccaggcatcacggacaccagcatgaccttctcgtctacctggacgcgtgccaaccagaccttctgcccctgcgactacgccttcatcgtggagaagggcaactacaccttcaaggcatccgaccttgtgtcgcacacacccgacaaccgtctgcctttggactggtggaccatgccactgcgtctcgactgggccatccgcgacaacaacggcgactccatgacttccatctcctgcgcccaggcacccaacgaacctgactatggctgccgcagcaagcatagcgagtgcactaattcaaccaatggccctggctacttctgcaagtgtgcccatggctacgacggaaacccctatgtccagagtgatggtgaatgcacgaatatcaacgagtgccaagatccaaagtcacataattgttcaagtggcagcaaatgcattgacacagacggaggctattattgtcaatgcaatttcttccgaagagggcagcaatgtgatcccttaattcctatggctgccgttgcactaaatggaggtaaactactgaatgcccagggcataaccacctacaccaaaagggagctgaagaagataactaatggctacagcaaacgccttggaggagggcactttggcaatgtttacgagggcaccatcgtcgacggcagaaaggtcgccgtcaaatgtcctttgcggacaagggtgtcgtcgcaccgctgccattggaagaatttgattcgacctcgccgtgtaccgctaccgcaacagagggtggaggaagatgggtcgttcatgaacgagatcaggttccagttcgaagtcagtcgtcacaagaacttggtccagctcctgggatgctgcctagagaccgacattccgatcctagtcttcgagtttgtcgccaatggaagcctggaggacatacttcatagtgccaagaaaccatgtaccctctcgctgccggagcggctggacatcgccattggctccgcggaagctatcgcctacatgcactcccttgacaatcaaaagcgtgtccatggagacatcaagccttccaacatcctccttgacgatgacctcaatccaaaagtctctgactttggttcctccaagctcctggcaatccatagctactacgttagggcagtggctgcagatataggctacatggacccattatatatgaagaccgagcacttcacattggagtgcgatgtctacagcttcggcgtggtgcttctggagctcatcacgaggagaagggccagctggtatgaacaagatcaccaagggaacaagatcctccccatcgagttcgtcaagtgcttcaaggaccacggtagcggatgtgcgatgtatgatagcagacttgatttctcagctggcgaggatgctcaatctcgatgcaacaagcgttgcctcgacatgattggcatgttggccgtccgatgcctcaaggaagacaagagggagaggccaaccatggcagaggttgtcgaggagcttaagcgagtgaaggtactactgctgggtacacatatataaaataatggcctgcagcaatcaagcgagttcgaagcacgcagatgaatggaagcgaagcaagcaataagaatggtcggtcagcacatgtgaagcgctgaacatggcggcggtactgatacaagcaataataagggttcctcaactcaaataaatatacatgatttattctcttccaataaaacagcaatgtctatctgtaaacatagtaattcgcatgaattgcttcgctttatacttcttaatttgatgtatgtccatacaaataattgacactatatatcgagcaccaaaagtgacggacactatatatcgagc

SEQ ID NO: 222118 - DNA, 2502 bp, Zea Mays
cacgcatcaaactagtagcaaattaataatccagcgaacacactatactagtgagcaaataaagccaccgatgtcatcactcctgttgcgagtgctgctcatccagcttgcagcagtggagtgcctctccgccgcgattccaggctgcctaacgcaatgtggaggcgtagagataccctatccattcggcgtcggcaccaactgctcccgcaaagggttccggatcaagtgcatcaacggcagcgcgggcgaggagattccagtgctgctacctactacgcgctaccagaacatccgggtgctgaacctgtccgtgtcgccgttgccggaggctcgagtgcttcttccggtggcatggcagtgcttcaacgccaccgggggcgtcactgggatctactcgggagatgtggacttcaacccagagggcgtataccgcatctccaacacacagaacgagctcttcgtcctcggctgcgacacctatgcgttcaccaaaggcgtgagggtgcacaacgttaacgcacgcttcccttacagatacttcacggggtgtatcaccgtcagtgtagacgacaaggacccgcgcgacggtgcctgcgcgggcctcggctgctgccgcgtcgacatcccgccaggcatcacggacaccagcatgaccttctcgtctacctggacgcgtgccaaccagaccttctgcccctgcgactacgccttcatcgtggagaagggcaactacaccttcaaggcatccgaccttgtgtcgcacacacccgacaaccgtctgcctttggactggtggaccatgccactgcgtctcgactgggccatccgcgacaacaacggcgactccatgacttccatctcctgcgcccaggcacccaacgaacctgactatggctgccgcagcaagcatagcgagtgcactaattcaaccaatggccctggctacttctgcaagtgtgcccatggctacgacggaaacccctatgtccagagtgatggtgaatgcacgaatatcaacgagtgccaagatccaaagtcacataattgttcaagtggcagcaaatgcattgacacagacggaggctattattgtcaatgcaatttcttccgaagagggcagcaatgtgatcccttaattcctatggctgccgttgcactgttaaaaatggaggtaaactactgaatgcccagggcataaccacctacaccaaaagggagctgaagaagataactaatggctacagcaaacgccttggaggagggcactttggcaatgtttacgagggcaccatcgtcgacggcagaaaggtcgccgtcaaatgtcctttgcggacaagggtgtcgtcgcaccgctgccattggaagaatttgattcgacctcgccgtgtaccgctaccgcaacagagggtggaggaagatgggtcgttcatgaacgagatcaggttccagttcgaagtcagtcgtcacaagaacttggtccagctcctgggatgctgcctagagaccgacattccgatcctagtcttcgagtttgtcgccaatggaagcctggaggacatacttcatagtgccaagaaaccatgtaccctctcgctgccggagcggctggacatcgccattggctccgcggaagctatcgcctacatgcactcccttgacaatcaaaagcgtgtccatggagacatcaagccttccaacatcctccttgacgatgacctcaatccaaaagtctctgactttggttcctccaagctcctggcaatccatagctactacgttagggcagtggctgcagatataggctacatggacccattatatatgaagaccgagcacttcacattggagtgcgatgtctacagcttcggcgtggtgcttctggagctcatcacgaggagaagggccagctggtatgaacaagatcaccaagggaacaagatcctccccatcgagttcgtcaagtgcttcaaggaccacggtagcggatgtgcgatgtatgatagcagacttgatttctcagctggcgaggatgctcaatctcgatgcaacaagcgttgcctcgacatgattggcatgttggccgtccgatgcctcaaggaagacaagagggagaggccaaccatggcagaggttgtcgaggagcttaagcgagtgaaggtactactgctgggtacacatatataaaataatggcctgcagcaatcaagcgagttcgaagcacgcagatgaatggaagcgaagcaagcaataagaatggtcggtcagcacatgtgaagcgctgaacatggcggcggtactgatacaagcaataataagggttcctcaactcaaataaatatacatgatttattctcttccaataaaacagcaatgtctatctgtaaacatagtaattcgcatgaattgcttcgctttatacttcttaatttgatgtatgtccatacaaataattgacactatatatcgagcaccaaaagtgacggacactatatatcgagc

SEQ ID NO: 222119 - DNA, 1416 bp, Zea Mays
cttgtacacgcctccgccacccgacaaactactcaataaccctagctaaacccccacgccgccgcggcgacctcctccgccggcgggatggacagcctcaggggagtcaagttgccgggcgtgccgaagggcgggagtgcgctcgtgaaggtggcgctgctcggcggcgcggggctctacgccgtcctcaacagcttctacaacgtcgagggcggacaccgcgccatcgtcttcaaccgcctcgaggggatcaaggacaaggtgtaccccgaaggaactcacctgatgatcccgtggatcgaaaggccgatcatctacgacgtccgcgcccgacccaacctcgtcgagagcacgtccggaagccgcgacctccagatggtgagaattggtcttcgtgtccttactcgacccatgccagaccagctacctaaaatctacaggaacctgggggagaacttcaatgagagagttctgccttcaatcattcatgaaacactcaaagctgtggttgctcaatacaatgccagccagctgatcacccagagaggctgtgagcagggagattaggaagattctgactgagagggccaacaacttcaatattgctctggatgatgtgtccatcacaagcctcagctttggaaaagagtttactcatgccattgaagccaagcaggttgctgcacaagaagctgagcgtgccaagttcattgttgagaaggctgagcaggacaagcgcagtgcagttatcagggcacagggtgaggctaagagcgctgagttgattggccaagccattgccaacaaccccgccttcctggctctgagacagattgaagctgccagggagatctcccacaccatggcggcctccagcaacaaggtgttccttgattccagggaccttttgcttggtcttcagcagctgaacgtggggggcaagcaaaagaagtgaagcggtcgtccccaggccatcgcggatgagagtagtttcaggcgatggttttatctgttacagaatgcgcatgcgcgggaatgaacaaagtggcaccatgttgcagtctgtatgtactgacaagtttgtctatcgatctttgattctctgctcttgtaagtcgtgactgatgaatctgttgttgcaattgccttcctggaggcttgctctgatgcgtgtaacagccattccattgctcgtagtcgcagacgtaattcagcgtgtgagttcaatcaggacccgtgtgactggttgtggcatggtggtagcctggcccgacttgtctagtatgtggagccagatttcatatatccaggctaggctcatgctcatatttatgtttggttgtttgcgttcaggtcggataaagatatgtgtttggctgtatgcatcaataccaagatcaaataaagtaaataaat

SEQ ID NO: 222120 - DNA, 2444 bp, Zea Mays
ttacatacatgacatcctgtagaacaattctatgccattctgtgttgattacaggaagttgaatgagatgactataaagaacatatttccaatgcctctggtggatgagattttggatgaattggctggagctcagttcttcataagtctagacatgacaataggctaccaccatattagaatgggggttgaatatgaatacaagactgctttcaaaacacaccatggccattatcagtttagggtgatgccatttggtctcactaatgcaccagccagttttcaatgtgccatgaactcagttttggagagttttctaaggaagttgtgatgttttttctagatgacattctcatatatagtcccaacctagaaacatgtatttaccatatcaagttggttttagctaagctgagggagcatcagttttacttaaagttgaagaagtgttcctttgtgaagcatgagttgaagtatttgggccctgtgatttctagggagggtggcaacagattccagtaaaactgcagtcatgttgtcttggccacaacccagaaatgttacggaactcaggggatttttgggtctaactatatactatagaaagtttgtcaaaggttatggactcttggcaaagcctctcacaaaactgttgcctattcctcaagggatgtgaccatggactttattgaaggattgccaagatctgaagggtttgatactatacttgtggtggtggacagattttctaagtacattcatttttcctctgaagcatccattcactgccgaagtggttgctcaaattttcctggacaatgtgatcaagctgcatggggtgcctaaatctatagtgtctgatcgtgacaaagtcttcaccagcagtttctggaagcatttttccagctcatggaggtgaagctcttactttctattgtgtaccatccacaaactgatggctaaagcgagagggtaaatcagtgtgtggagatgtacctcaggtgtgctgtctacaatcagccccaccaatggaaaaaatggttggccttagttgagtattggtatacctctaacaaccattcggtgttgggtttcactccctccagagcactgtatggctatgaagcaccactcctagtcacccctcgactcattggaattgaggataaggaggctactgactagattactgagaggtcagctttctcagccatgttgaaggagcaattggctcgggcttaacttcgtatgaagcagtatgctaataagggcagaactccaagagagtttcaagtgggagacctagttctactcaaattacaaccttatgcatagaagactgtggtgaaccaaccttgtctgaagctggcgtttaaattctttgggccattcaagggcttggctaggattggaccagtcgcttatagacttgcattgcctgcagatgcccaagttcatcatgtttttcatgtgtctcaactcaagtcgttccttccttgctactcgcctgtgtttacaacattaccaatggtgtctgatctatctcaaggggagattgtgcctgaacaggtgttggatcaaagaatggtgcataagggcaatcattctattacttaggaattggtgaagtggactgggctacctgaggcaactgctacatgggaagattactctattgttaaggcacgttttccaacagcaaacacttggggtcaagtgtcatttgaggtctggggagatgtgaggactgcagaagggaccagtgaggtgtgaaggagtagctggggcgtggtcagataccatggttgagttcgtttctgcttcttttgtattctcagttgtaagggagtctgtattctggtgattgggccgtataaaccaaattagctctgtaatgggccgtactaggggaattagcacatgtaagggtggatataaataatgtaccagacaacttgagagaattatgaatgaaatagaagagaatctaaatagttcaaccacttgcctggtttgttggcgtcctctggcaccgctcacgtcgtggtgatccttcaccgtcggcgaggggttgtcacacattcgcgttagcgaagacgaggaacaaccaatcagggtcgggggcgagacgcgagcgcgtacgattgcccacgagcgtcgaacgaaccgaagggatggcgatgctcgtgcgaggagggggaggcagtgttaggatcaggcttggcggtggcggcgaggatgaggagtctgtccttggcctcgtcgtggttgcggttgtcgtcatcatccgtggagaggttgatgcaggagcagcgctcgagggaggcgaagaaggcagagttagcatgagcaaggtcgaggcgttgtatgagctgttcacgaagatcaataatgttgtgattgatgatgggctgatcaacaagggttgtatttggcttatttaa

SEQ ID NO: 222121 - DNA, 1873 bp, Zea Mays
agccaacaacgttgaaaacgggtgatgccgcgccggggactctggctatagggagtagcgacgaccttagctagcaatagcagccagcaggaactgtagattgctgctgggcaacagactgagagttgcttgcgctgcggcagcggagaagagagatgattgctgttcgatgggcggcgctgctggtcgcgctggtggtggcgtgcggcagcgctgctgcaggtgcagcggcgggggaaggacctaactggctgggcgggctgagccgggcggcgttccccaaggacttcgtgttcgggaccgcgacgtcggcgtaccaggtcgagggcgccgcgtccaccaacggccgaggcccctccacctgggacgcgttcgtgcacaccccaggaaacattgtatacaatcagacggcagatgtcgcagtggatcaatatcatcgctacagggaagatgtcgacctcatgaaaagtttgaattttgatgcctaccggttttcaatctcatggtccaggatcttcccagatggcgagggaagagtcaatccagaaggtgttgcctattacaacaatctgataaactacctgcttcggaaaggcattacaccgtacgccaatctttaccattccgatctccctcttgcgcttcagaacaagtatggagggtggttaaatgccaagatggcgaaactgttcacagactatgccgacttctgttttaagacttttggcgaccgtgtaaagcattggtttacattcaatgagccaaggatagtagcactacttggttatgacgctgggtcgattcctcctcaaaggtgtaccaaatgctctgctggtgggaattcagcaacggaaccttatatcgttgctcataattttctcttgtcacatgctgctgctgtgtcaagataccgtaacaagtatcaggctgctcagaaaggaaaggttggaatagttctggacttcaattggtatgaagctctcacaaactcaaccgaagaccaagcagcggctcaaagagcaagggatttccatgttggttggtttgctgatccattaataaatggacattatccacagataatgcaagatattgtgaaagagaggctgcccaagtttactccggagcaagctaagttggtcaagggctcagcggattacattgggatcaatcaatacaccgctagctacgtgaagggccagaaactgctccagcagaagcctactagctactcagctgattggcagtagaacggaacggcaaaccgatcggaccacaggcgaattcaaagtggctttacatcgtcccagaagggatgtacggttgtgtgaactatctgaagcacaagtatggaaatccaacagttttcataaccgagaacggaatggatcagccaggaaacttgactcgtggccagtacctgcacgacaccacaagggtgcaattctacaaaggctacctcgctgagctgaggaaagccatcgatgacggcgccgacgtggctggctacttcgcttggtctctcctcgacaacttcgagtggcagtcaggttacacgtccaagtttggaatcgtctacgtcgacttcagcacgcccaagctcgaacgacaccccaaggcgtcagcctactggttcagagacatgctccagaaacacttatgagcgtctaacaaccaagcctgaaataggtaccattaaatttcttcagcgttgcctaagctagtggccatattattgtagcaaaagttgtaagctagcacagtgcaagggtatcaaaaattataaacgggcaatgaatttgtatgttccatgctaattgcattttaccatcggtcttgaaaattatctagcgagttgtcatctagatcctcg

SEQ ID NO: 222122 - DNA, 2076 bp, Zea Mays
agattgacctgttgccctgttgagtgtgaaggaggcgcacgcgcttgagctgaagaaactgccgcgctgatctagcccgccgggatgggcgcctcggggcctgcggctccgccggcaacgcatcgccgccgctgcatccagctgctgctgctgctcgccctggccgtcgcgccgcttggcagccgtgggcttcgcgtccgtgccgcgggggcggacacgggagggctgagccgggacgcgttcccgaaggggttcgtcttcgggacggcgacgtccgcgtaccaggtcgagggcgcggcgacgtccggcggccgcgggccctgcatctgggatcccttcgtccacacccccggaaagattgctgaagacgccaacgcagatgttacaacagatgaatatcatcgctacaaggaagatgttgatctcatgaaaagcctaaattttgatgcataccggttttcaatctcctggtccaggatcttcccagatggcgaagggaaaattaatgaagaaggagtacagtattacaacaatcttatagactacatgattaagcaaggccttactccttacgccaaccttaaccactatgatcttccgcttgcgcttcagaagaagtaccaaggctggttaggcccaaaaattgtggacatatttgctgactatgctgatttttgtttcaagacttttggcaatcgagtcaagaactggttcacattaaatgagccaaggatagtagcattccttggttatgataaagggcttaacccccctaaccggtgcacacaatgcactgccggtgggaactcatcgacagaaccttacattgttgttcataacattctcctatctcatgctactgcagttgcaagataccgcaataaataccaggcaactcagaaaggcaaggtcgggatagttcttgacttcaactggtatgaaccttttacaaactcaactgaagatcaaaaagcagcgcaaagggccagggacttccatattggttggtttcttgatccattaataaatgggcaatatccaaagataatgcaagacattgtgaaagaccggctaccaagtttcacacctgaacaggccaagctagtcaagggctcatcagactatttcgggatcaatcaatatactacatactacattgcagatcaacaaactcctccgcagggaccaccgagctactcgtccgactggggcgtccaatattactttcaaaggaatggcgtgcaaattggacagatggtataggcttctccgggcgcactcaatttggctttacatcgtcccatcgggcatgtatggagtcgtgaactacctaaaggaaaagtaccataatccaatcatcatcatatcggaaaacggaatggatcagcctggaaacctcacgcgcgaggagtacgtgcacgacgccgtgaggatcgacttctacaagaactacctgacggagctaaagagagggatcgacggcggcgcgaacgtgatcggctacttcgcgtggtctctcctggacaacttcgagtggctgtcgggctacacgtccaagttcggcatcgtctacgtcgacttcgcgacgctgaagcggtaccccaaggactcggcgtactggttcagagacatgctttcggggacgggctccaaggctgctaccccgcagactggttcaggcggccggccggctggttcggcttcagccacctcgaacggacctgccttgctggtctcccttttggtctccttgggtgttctgcttccatccatcttcatggtttcctcggtctaattagaaatgtattttcatagtacggatttgtagttgtgtggatgacaacatgttccttttaagaatcaggacatgttgcatcgatgcgggacctgttgtaggaatgagaccatgattcagggcttattgttcagagccagttttgttttgttttgtttgcggattttcagatacagatttgaacgtgtattcatggatagcttgcgttttttggtgtatctgggcacctaccggtttagtggaggtgttctcttctctgcaacccgccgccggtgagaaag

SEQ ID NO: 222123 - DNA, 2239 bp, Zea Mays
atcgacttctccaatctcatttcggcaacctttccaaggaactcctctgatgctacagtaataatagaagaaagatggacctgctcagcatcattctagttatagcatctctgctcccattcgcagcatctgatggtcaaggtgatgccttgtacgatatgaagctgaaactaaatgctactggcagtcagctttctgactggaaccaaaatcaagtcaacccatgcacctggaattctgttatttgtgacaacaacaaccatgttgtgcaagtaacattggcttctatggggtttactggagttctgtcaccaagaatcggagatctggagtatttaaatgttctgtccttgcctggtaacaacatctctggtggcataccagaagaatttggcaacctctctcgattgacaagcttagatttggaagacaacctgttggttgggccaataccagcttcacttggcaggctttcaaagctccagcttctgatactaagtcaaaacaatctcaatggctctattcctgatacactagcaagcattttaagcttgacagacattcggctggcttacaataaactcactggtcaaataccttcccagttgtttcaagttgcacgttacaatttttcaggtaataacttgacatgtggagcaaacttcctccatccatgtgcctcaaatatgtcttaccaaggttcttcccgtggttcgacaataggcattgtgcttgggacagttggaggtcttatggggcttctaatcatatgggctgtattcattatctgcaatggaaggaggaaaagccatctacgtgaaatatttgtggatgtatcaggtgaggatgatcgtagaattgcatttggccagttgaaaagatttgcatggcgagaattgcaacttgcaactgataatttcagtgagaaaaatgttcttggacaagggggttttgggaaagtatataaaggagcacttccagatggcactaagattgctgtaaaacggttaactgattacgaaagtccaggtggagaggctgctttcttgcgtgaggttgagctaattagtgttgcagttcaccggaatcttttaagattgattggtttctgtacaacacaaacagagcgcctacttgtttatcctttcatgcaaaatcttagtgtggcctaccgtctacgagaatttaaacctggggagccaatattagactggtccgcaaggaagcgagtggctataggcacagctcgtggactggagtatttgcacgagcactgcaatcctaagattatacatcgtgacgtcaaggctgccaatgtcttgcttgatgaaggttttgaaccggtggttggggatttcggcctggccaagctggtggacgtgcagaagacgtccgtgactacccaggtccgtggaaccatgggtcacatcgcccccgaatacctgtccactgggaagtcctccgagagaaccgatgtttttggctatggcataatgcttcttgagctagtcactggtcagcgtgccatcgacttttcacgtctggaggaagaagatgacgtgttgttacttgaccatgtcaagaagctgcagagggaagggcatctcgacgccatcgttgaccgcaacttgaacagctgttacaacgggcaggaggtggagatgatgatccagatcgcgctgctctgcacgcaggcgtcgcccgaggaccgcccgtccatgtccgaggtggtccggatgctggagggcgagggcctcgccgagaggtgggaggagtggcagcaggtggaggtgacgaggaggcaggactacgagcggatgcagcagcgcttcgactggggcgaggactccatctacaaccaggacgcgatcgaactgtccgccggcaggtgacgacgtcgggtcgtcacacggagcttgtcgtcgtcgacgtcgcagtgccgacatgtaactgtatatgtaaggcattgttgcgaagcttgttagcaaaatataatctgtgacactcacttagtgttgatacgtgcctgtattttattatttgtgtgtataaggaaggatgatttaaacgggttcaggtgtttaccggttgtccggctcccatcctgtaaagctctatataggggggtggggaccggttgaaaccacatcacatgcaagctgcaagaattggcttgacaaatatttaacgaactctattgtcgacataaaaagtaagtgataaacgaactctattgtgg

SEQ ID NO: 222124 - DNA, 2380 bp, Zea Mays
cacccacccaccctgccacccaccagacactgtgttttactggagtgccaaccagacctgactgctacctgccgaatcgcgcgcgcctgccaaaaaggcaatgggctcccgttccggaacagcaccaccagcggtcaatttcgacgcctggagtcaaccggccgagtcgtccacctacgccttcacagttcacacgcgcggcggcggcggcggcggtggagcgggtgatgagggaagtggcgtgaaccaccgaatctcgcggtcgcggagcgggcgtcgcgggcgaacgagccccggtctctctcttctctgcgcgcaacctttccaaggaactcctctgatgctacagtaataatagaagaaagatggacctgctcagcatcattctagttatagcatctctgctcccattcgcagcatctgatggtcaaggtgatgccttgtacgatatgaagctgaaactaaatgctactggcagtcagctttctgactggaaccaaaatcaagtcaacccatgcacctggaattctgttatttgtgacaacaacaaccatgttgtgcaagtaacattggcttctatggggtttactggagttctgtcaccaagaatcggagatctggagtatttaaatgttctgtccttgcctggtaacaacatctctggtggcataccagaagaatttggcaacctctctcgattgacaagcttagatttggaagacaacctgttggttgggccaataccagcttcacttggcaggctttcaaagctccagcttctgatactaagtcaaaacaatctcaatggctctattcctgatacactagcaagcattttaagcttgacagacattcggctggcttacaataaactcactggtcaaataccttcccagttgtttcaagttgcacgttacaatttttcaggtaataacttgacatgtggagcaaacttcctccatccatgtgcctcaaatatgtcttaccaaggttcttcccgtggttcgacaataggcattgtgcttgggacagttggaggtcttatggggcttctaatcatatgggctgtattcattatctgcaatggaaggaggaaaagccatctacgtgaaatatttgtggatgtatcaggtgaggatgatcgtagaattgcatttggccagttgaaaagatttgcatggcgagaattgcaacttgcaactgataatttcagtgagaaaaatgttcttggacaagggggttttgggaaagtatataaaggagcacttccagatggcactaagattgctgtaaaacggttaactgattacgaaagtccaggtggagaggctgctttcttgcgtgaggttgagctaattagtgttgcagttcaccggaatcttttaagattgattggtttctgtacaacacaaacagagcgcctacttgtttatcctttcatgcaaaatcttagtgtggcctaccgtctacgaggttttgaaccggtggttggggatttcggcctggccaagctggtggacgtgcagaagacgtccgtgactacccaggtccgtggaaccatgggtcacatcgcccccgaatacctgtccactgggaagtcctccgagagaaccgatgtttttggctatggcataatgcttcttgagctagtcactggtcagcgtgccatcgacttttcacgtctggaggaagaagatgacgtgttgttacttgaccatgtcaagaagctgcagagggaagggcatctcgacgccatcgttgaccgcaacttgaacagctgttacaacgggcaggaggtggagatgatgatccagatcgcgctgctctgcacgcaggcgtcgcccgaggaccgcccgtccatgtccgaggtggtccggatgctggagggcgagggcctcgccgagaggtgggaggagtggcagcaggtggaggtgacgaggaggcaggactacgagcggatgcagcagcgcttcgactggggcgaggactccatctacaaccaggacgcgatcgaactgtccgccggcaggtgacgacgtcgggtcgtcacacggagcttgtcgtcgtcgacgtcgcagtgccgacatgtaactgtatatgtaaggcattgttgcgaagcttgttagcaaaatataatctgtgacactcacttagtgttgatacgtgcctgtattttattatttgtgtgtataaggaaggatgatttaaacgggttcaggtgtttaccggttgtccggctcccatcctgtaaagctctatataggggggtggggaccggttgaaaccacatcacatgcaagctgcaagaattggcttgacaaatatttaacgaactctattgtcgacataaaaagtaagtgataaacgaactctattgtgg

SEQ ID NO: 222125 - DNA, 2584 bp, Zea Mays
gcaaagtccaattccaccttatccgaagggccagaaagaaaggttcgaaagatccacccacccaccctgccacccaccagacactgtgttttactggagtgccaaccagacctgactgctacctgccgaatcgcgcgcgcctgccaaaaaggcaatgggctcccgttccggaacagcaccaccagcggtcaatttcgacgcctggagtcaaccggccgagtcgtccacctacgccttcacagttcacacgcgcggcggcggcggcggcggtggagcgggtgatgagggaagtggcgtgaaccaccgaatctcgcggtcgcggagcgggcgtcgcgggcgaacgagccccggtctctctcttctctgcgcgcaacctttccaaggaactcctctgatgctacagtaataatagaagaaagatggacctgctcagcatcattctagttatagcatctctgctcccattcgcagcatctgatggtcaaggtgatgccttgtacgatatgaagctgaaactaaatgctactggcagtcagctttctgactggaaccaaaatcaagtcaacccatgcacctggaattctgttatttgtgacaacaacaaccatgttgtgcaagtaacattggcttctatggggtttactggagttctgtcaccaagaatcggagatctggagtatttaaatgttctgtccttgcctggtaacaacatctctggtggcataccagaagaatttggcaacctctctcgattgacaagcttagatttggaagacaacctgttggttgggccaataccagcttcacttggcaggctttcaaagctccagcttctgatactaagtcaaaacaatctcaatggctctattcctgatacactagcaagcattttaagcttgacagacattcggctggcttacaataaactcactggtcaaataccttcccagttgtttcaagttgcacgttacaatttttcaggtaataacttgacatgtggagcaaacttcctccatccatgtgcctcaaatatgtcttaccaaggttcttcccgtggttcgacaataggcattgtgcttgggacagttggaggtcttatggggcttctaatcatatgggctgtattcattatctgcaatggaaggaggaaaagccatctacgtgaaatatttgtggatgtatcaggtgaggatgatcgtagaattgcatttggccagttgaaaagatttgcatggcgagaattgcaacttgcaactgataatttcagtgagaaaaatgttcttggacaagggggttttgggaaagtatataaaggagcacttccagatggcactaagattgctgtaaaacggttaactgattacgaaagtccaggtggagaggctgctttcttgcgtgaggttgagctaattagtgttgcagttcaccggaatcttttaagattgattggtttctgtacaacacaaacagagcgcctacttgtttatcctttcatgcaaaatcttagtgtggcctaccgtctacgagaatttaaacctggggagccaatattagactggtccgcaaggaagcgagtggctataggcacagctcgtggactggagtatttgcacgagcactgcaatcctaagattatacatcgtgacgtcaaggctgccaatgtcttgcttgatgaaggttttgaaccggtggttggggatttcggcctggccaagctggtggacgtgcagaagacgtccgtgactacccaggtccgtggaaccatgggtcacatcgcccccgaatacctgtccactgggaagtcctccgagagaaccgatgtttttggctatggcataatgcttcttgagctagtcactggtcagcgtgccatcgacttttcacgtctggaggaagaagatgacgtgttgttacttgaccatgtcaagaagctgcagagggaagggcatctcgacgccatcgttgaccgcaacttgaacagctgttacaacgggcaggaggtggagatgatgatccagatcgcgctgctctgcacgcaggcgtcgcccgaggaccgcccgtccatgtccgaggtggtccggatgctggagggcgagggcctcgccgagaggtgggaggagtggcagcaggtggaggtgacgaggaggcaggactacgagcggatgcagcagcgcttcgactggggcgaggactccatctacaaccaggacgcgatcgaactgtccgccggcaggtgacgacgtcgggtcgtcacacggagcttgtcgtcgtcgacgtcgcagtgccgacatgtaactgtatatgtaaggcattgttgcgaagcttgttagcaaaatataatctgtgacactcacttagtgttgatacgtgcctgtattttattatttgtgtgtataaggaaggatgatttaaacgggttcaggtgtttaccggttgtccggctcccatcctgtaaagctctatataggggggtggggaccggttgaaaccacatcacatgcaagctgcaagaattggcttgacaaatatttaacgaactctattgtcgacataaaaagtaagtgataaacgaactctattgtgg

SEQ ID NO: 222126 - DNA, 725 bp, Zea Mays
ttaaaaaggatgctaagctcgatgggtgtgtgtgattatataatggacattgtaaatccaggggagcgaaggaaaggcaaaggagaaaatttcgtagcaataaataaataaataaaattaataaaagaaaggtggcgtagaggataggaggagaaccaaggttgcgtctcgaaggttcttgcctcgttgggaagggatggcgtcggaggtggaggacgaggcggcgacgccgctgctcgccaacggtgcagccgacgtccgccggaggagggaccaggcgaaggcaattctgtccacgcaggccgtcaggatcgccaccaaggccgagcagcatgagcgcttcatctttaaggtcacacacttgctgggtgttcttggatttgggggattttgctatctcttgggtgccagaccacaggatgtgccatatgtgtactgcctgttctatgtcatatttgttccgctccgctggatttactaccgctacaagaaatggcattactaccttctggacttctgctactatgccaacacctttctccttgtaatgattctcttctacccagaggatgaaaaactttttatggtttgcttctcgtttgcagagggtccgcttgcttgggcattaattgtgtggcgttgcagcttggttttcagttcatttgacaaacttgttagtgtcctgatacatctcttacctgtttattggcatatttgagtttgac

SEQ ID NO: 222127 - DNA, 1647 bp, Zea Mays
agaaaatttcgtagcaataaataaataaataaaattaataaaagaaaggtggcgtagaggataggaggagaaccaaggttgcgtctcgaaggttcttgcctcgttgggaagggatggcgtcggaggtggaggacgaggcggcgacgccgctgctcgccaacggtgcagccgacgtccgccggaggagggaccaggcgaaggcaattctgtccacgcaggccgtcaggatcgccaccaaggccgagcagcatgagcgcttcatctttaaggtcacacacttgctgggtgttcttggatttgggggattttgctatctcttgggtgccagtaagctactgcagcattgatatatttggaccacaggatgtgccatatgtgtactgcctgttctatgtcatatttgttccgctccgctggatttactaccgctacaagaaatggcattactaccttctggacttctgctactatgccaacacctttctccttgtaatgattctcttctacccagaggatgaaaaactttttatggtttgcttctcgtttgcagagggtccgcttgcttgggcattaattgtgtggcgttgcagcttggttttcagttcatttgacaaacttgttagtgtcctgatacatctcttacctgggattgttctattcactatccggtggtggaatccacaaacatttgctgccatgcacccagaaggaagagatgctagagtcacatggccatatgtggaggacaaatcatatctgtggacatggcttttttttgttccgctagctgcttacaccctgtggcaacttatgtatttcctcatagttaatgtcctgcgtcgacagaggttgttaagggaccctgaagtcatgacatcctacagggagctctcgaagaaagcacagaaagcgaacaacatctggtggaggctgagcggactgctgggtgaccggaaccggcaggtcatgtacatactgctccaggcgctgttcacagtggcaacaatggcactgaccgtacctatattcctgtcctaccggatgcacgtggtgttcctgatactcaaggtgtgcgcgtcgacatggaacggtggcagcttcatcttggaggtgatgcctcggcaagtagtgcagaagcagctgaagaaactggacatgaagcccatggaacaggggagctcgacacaaggtgcgccaggtggtgatggtggcacattgggtaaccaccaccagcacacatccgaggagcatatccaggagtgaggaaattgaagctggatgtaagattagattttgatgttcactgacacaacctttgttgtcatcgagtgcgctttgtgttggagtttttctttagttcttcccagtttgtgagttgtgacatctagtcatctataggtttataggctggacgatatggggtgagagattgtgcgtgcccatcttttgtcgggcttgggcaaagatatgtcgagatgtttactttctctgtagaatttcgtgaagctgttgcattgttcgtttgaagatggcgacgatgttcagatgatgcttcatgttgaaggacatatctttatttgcttcattgtacccagattttatttgcttcatgttgaaggacagactatgatgatgcgtgctgaggtg

SEQ ID NO: 222128 - DNA, 1501 bp, Zea Mays
agaaaatttcgtagcaataaataaataaataaaattaataaaagaaaggtggcgtagaggataggaggagaaccaaggttgcgtctcgaaggttcttgcctcgttgggaagggatggcgtcggaggtggaggacgaggcggcgacgccgctgctcgccaacggtgcagccgacgtccgccggaggagggaccaggcgaaggcaattctgtccacgcaggccgtcaggatcgccaccaaggccgagcagcatgagcgcttcatctttaaggtcacacacttgctgggtgttcttggatttgggggattttgctatctcttgggtgccagaccacaggatgtgccatatgtgtactgcctgttctatgtcatatttgttccgctccgctggatttactaccgctacaagaaatggcattactaccttctggacttctgctactatgccaacacctttctccttgtaatgattctcttctacccagaggatgaaaaactttttatggtttgcttctcgtttgcagagggtccgcttgcttgggcattaattgtgtggcgttgcagcttggttttcagttcatttgacaaacttgttagtgtcctgatacatctcttacctgggattgttctattcactatccggtggtggaatccacaaacatttgctgccatgcacccagaaggaagagatgctagagtcacatggccatatgtggaggacaaatcatatctgtggacatggcttttttttgttccgctagctgcttacaccctgtggcaacttatgtatttcctcatagttaatgtcctgcgtcgacagaggttgttaagggaccctgaagtcatgacatcctacagggagctctcgaagaaagcacagaaagcgaacaacatctggtggaggctgagcggactgctgggtgaccggaaccggcaggtcatgtacatactgctccaggcgctgttcacagtggcaacaatggcactgaccgtacctatattcctgtcctaccggatgcacgtggtgttcctgatactcaaggtgtgcgcgtcgacatggaacggtggcagcttcatcttggaggtgatgcctcggcaagtagtgcagaagcagctgaagaaactggacatgaagcccatggaacaggggagctcgacacaaggtgcgccaggtggtgatggtggcacattgggtaaccaccaccagcacacatccgaggagcatatccaggagtgaggaaattgaagctggatgtttataggctggacgatatggggtgagagattgtgcgtgcccatcttttgtcgggcttgggcaaagatatgtcgagatgtttactttctctgtagaatttcgtgaagctgttgcattgttcgtttgaagatggcgacgatgttcagatgatgcttcatgttgaaggacatatctttatttgcttcattgtacccagattttatttgcttcatgttgaaggacagactatgatgatgcgtgctgaggtg

SEQ ID NO: 222129 - DNA, 1593 bp, Zea Mays
aaataaataaataaaattaataaaagaaaggtggcgtagaggataggaggagaaccaaggttgcgtctcgaaggttcttgcctcgttgggaagggatggcgtcggaggtggaggacgaggcggcgacgccgctgctcgccaacggtgcagccgacgtccgccggaggagggaccaggcgaaggcaattctgtccacgcaggccgtcaggatcgccaccaaggccgagcagcatgagcgcttcatctttaaggtcacacacttgctgggtgttcttggatttgggggattttgctatctcttgggtgccagatgtgccatatgtgtactgcctgttctatgtcatatttgttccgctccgctggatttactaccgctacaagaaatggcattactaccttctggacttctgctactatgccaacacctttctccttgtaatgattctcttctacccagaggatgaaaaactttttatggtttgcttctcgtttgcagagggtccgcttgcttgggcattaattgtgtggcgttgcagcttggttttcagttcatttgacaaacttgttagtgtcctgatacatctcttacctgggattgttctattcactatccggtggtggaatccacaaacatttgctgccatgcacccagaaggaagagatgctagagtcacatggccatatgtggaggacaaatcatatctgtggacatggcttttttttgttccgctagctgcttacaccctgtggcaacttatgtatttcctcatagttaatgtcctgcgtcgacagaggttgttaagggaccctgaagtcatgacatcctacagggagctctcgaagaaagcacagaaagcgaacaacatctggtggaggctgagcggactgctgggtgaccggaaccggcaggtcatgtacatactgctccaggcgctgttcacagtggcaacaatggcactgaccgtacctatattcctgtcctaccggatgcacgtggtgttcctgatactcaaggtgtgcgcgtcgacatggaacggtggcagcttcatcttggaggtgatgcctcggcaagtagtgcagaagcagctgaagaaactggacatgaagcccatggaacaggggagctcgacacaaggtgcgccaggtggtgatggtggcacattgggtaaccaccaccagcacacatccgaggagcatatccaggagtgaggaaattgaagctggatgtaagattagattttgatgttcactgacacaacctttgttgtcatcgagtgcgctttgtgttggagtttttctttagttcttcccagtttgtgagttgtgacatctagtcatctataggtttataggctggacgatatggggtgagagattgtgcgtgcccatcttttgtcgggcttgggcaaagatatgtcgagatgtttactttctctgtagaatttcgtgaagctgttgcattgttcgtttgaagatggcgacgatgttcagatgatgcttcatgttgaaggacatatctttatttgcttcattgtacccagattttatttgcttcatgttgaaggacagactatgatgatgcgtgctgaggtg

SEQ ID NO: 222130 - DNA, 1592 bp, Zea Mays
aaataaataaataaaattaataaaagaaaggtggcgtagaggataggaggagaaccaaggttgcgtctcgaaggttcttgcctcgttgggaagggatggcgtcggaggtggaggacgaggcggcgacgccgctgctcgccaacggtgcagccgacgtccgccggagggcgaaggcaattctgtccacgcaggccgtcaggatcgccaccaaggccgagcagcatgagcgcttcatctttaaggtcacacacttgctgggtgttcttggatttgggggattttgctatctcttgggtgccagaccacaggatgtgccatatgtgtactgcctgttctatgtcatatttgttccgctccgctggatttactaccgctacaagaaatggcattactaccttctggacttctgctactatgccaacacctttctccttgtaatgattctcttctacccagaggatgaaaaactttttatggtttgcttctcgtttgcagagggtccgcttgcttgggcattaattgtgtggcgttgcagcttggttttcagttcatttgacaaacttgttagtgtcctgatacatctcttacctgggattgttctattcactatccggtggtggaatccacaaacatttgctgccatgcacccagaaggaagagatgctagagtcacatggccatatgtggaggacaaatcatatctgtggacatggcttttttttgttccgctagctgcttacaccctgtggcaacttatgtatttcctcatagttaatgtcctgcgtcgacagaggttgttaagggaccctgaagtcatgacatcctacagggagctctcgaagaaagcacagaaagcgaacaacatctggtggaggctgagcggactgctgggtgaccggaaccggcaggtcatgtacatactgctccaggcgctgttcacagtggcaacaatggcactgaccgtacctatattcctgtcctaccggatgcacgtggtgttcctgatactcaaggtgtgcgcgtcgacatggaacggtggcagcttcatcttggaggtgatgcctcggcaagtagtgcagaagcagctgaagaaactggacatgaagcccatggaacaggggagctcgacacaaggtgcgccaggtggtgatggtggcacattgggtaaccaccaccagcacacatccgaggagcatatccaggagtgaggaaattgaagctggatgtaagattagattttgatgttcactgacacaacctttgttgtcatcgagtgcgctttgtgttggagtttttctttagttcttcccagtttgtgagttgtgacatctagtcatctataggtttataggctggacgatatggggtgagagattgtgcgtgcccatcttttgtcgggcttgggcaaagatatgtcgagatgtttactttctctgtagaatttcgtgaagctgttgcattgttcgtttgaagatggcgacgatgttcagatgatgcttcatgttgaaggacatatctttatttgcttcattgtacccagattttatttgcttcatgttgaaggacagactatgatgatgcgtgctgaggtg

SEQ ID NO: 222131 - DNA, 943 bp, Zea Mays
cccaaagataagcccctgaactaccagtggccacacacagattccttcgattcccgctgacagcgaagctgaggagaatcccaagaaacagagctggtgaaattgcattgtcgcaacaggcaagagaagaggagaagaaagaaatggctgcaatacctgcagcgatcccgggctgctgctcttcgtctcgcctgcctcagcttgctggcctccctgcctccacaagcagaaggcgcttcaaggtcacggccatggcgcccaaaaagaaggtgaaccgctacgacgagagctggtcgaagcagtggttcggcgcgggcatcttcgcggagggcagcgaggaggtgtccgtggacgtgttcaagaagctggagcggcgcaaggtgctgagcaccgtggagaaggccggcctgctgtccaaggccgaggagctgggcctgacgctctcctcgctggagaagctgggcctgctctccaaggccgaggacctgggcctgctcagcctcgtcgagaccgcggcggggacgtccccgtccgtcctcgcctccatctcgctgccgctcctcgtggccgccgtcgccgcggtggtcgtcgtgcccgacgactccgtcgcgctcgtcgccctacaggccgtcgtcgcggcggtgctcgcggcgggagccgccgggctgttcgtgggctctgtcgtgctcgctggcctgcaggagtcggattgatgcattgatctgcagctgcgcaaggtagaaccaagctgtgtacgtacgtcgacagtaccgccttgtgtagtaggatcgatcttgttagcagagcagaactcgttactaaaaaaatctatagtgtctgtaatataatataatactttagctttttgataacttgccgtgcaaatgtggtaacatattatgaagaaaattgcgatcaaatggacggttaactcggattcaac

SEQ ID NO: 222132 - DNA, 1646 bp, Zea Mays
atgcagcctcccggcccgcctctggcgacgccgcagccgctgccgccggcggtggcggcggagctcgcgcagcttgagtcgaggctgggccaggtcgccggagagcccgcgcgccacgagctcgcggagctaggcgaagtcgccgcggttcgcgtgctacgtaggatcgcgaggtctcaagagcaggtccggacgctcactggctacatcgtctcggctgcggtgcaggagacgttcgcgctcaatgcgcaggccgtccccaccgccgagagccgcgcctgcaactcctccgctccttccctaagtgatggatctgtacaagggccgcagtgcgccagtgaacttcgaatggaagaagtaactgcgggcctctcaaactatcgcatggcaatatgcgagggtcaaggtcaggaggatcatgcagtgatgatggcaattgacaacccacctgactgcatccccccctggggttgggaccaagattgcattgaagttgataaccttgtgccaggaattgcttctcaggcaaaccagatgcctatgcagtatggcgaccgcgaccgtatccaagaactagtttctattgtaccacatggtgttcgtatgctggctgaaagtcttgaaaatggcagagcatctgagttgcagaactatgtacaaaatggcattcccgaacagtggatggttccagcagatcaaagaatggaatccacctcgagccgcctgcaacatgttttaaaatgtcttcagggagttggaccctttggacaccatctcggtccggaatgtgcaataatgataccaaagcctgagccaaatgttgttgtcgaaaatttgttcagggagatagcaagccctcatatcacagacaacaaattgaggaatacagcgagccctcagatgtgtgcgttggaggatttagagttcagcaagagatttttgatactctcttatctttgtcggaataacctggaagatgaagttgtactgactgtggactatattaaatcgttgaagtttctgtccatggttcattttgagtcccaaatttggaggaaatttggtcagaagaattttcaggcatccaatagagctgcaacagatagggcaaagaatttcgattcagacccaactacaacaaaattataccattgcaatatcgagataagaggggagtccatattctttgttttgaaggtttcatttgatactttccaaaactctaacactggatgttgatttatcgacaattgacgttatactgattgatgatgaaccttgtcgggacgagcatgggaacattgttatgctagatgggaagcgtttgatccatactgatgggactggcttcatatctgaaaatttggctaagaaatgccctagcagaataatcaaaggaaagaagtcaaaagtttatatgcatcaaggtgaaacaacggtccgtcttttttataatggatatgctgtaaagggaactctgctagttgacaaaaggatctatctatctatcaacagagatccttacataatagagatcgatctatctgttaacggagatcctagccatataggcatgctatacagggattctaacaccccctcagtttgagcgtcccatgagacggtgagattggtataaagagaaa

SEQ ID NO: 222133 - DNA, 1766 bp, Zea Mays
gccaaccatcggccatcgccagtgccgctgccgtatccgtcgagtaatgcagcctcccggcccgcctctggcgacgccgcagccgctgccgccggcggtggcggcggagctcgcgcagcttgagtcgaggctgggccaggtcgccggagagcccgcgcgccacgagctcgcggagctaggcgaagtcgccgcggttcgcgtgctacgtaggatcgcgaggtctcaagagcaggtccggacgctcactggctacatcgtctcggctgcggtgcaggagacgttcgcgctcaatgcgcaggccgtccccaccgccgagagccgcgcctgcaactcctccgctccttccctaagtgatggatctgtacaagggccgcagtgcgccagtgaacttcgaatggaagaagtaactgcgggcctctcaaactatcgcatggcaatatgcgagggtcaaggtcaggaggatcatgcagtgatgatggcaattgacaacccacctgactgcatccccccctggggttgggaccaagattgcattgaagttgataaccttgtgccaggaattgcttctcaggcaaaccagatgcctatgcagtatggcgaccgcgaccgtatccaagaactagtttctattgtaccacatggtgttcgtatgctggctgaaagtcttgaaaatggcagagcatctgagttgcagaactatgtacaaaatggcattcccgaacagtggatggttccagcagatcaaagaatggaatccacctcgagccgcctgcaacatgttttaaaatgtcttcagggagttggaccctttggacaccatctcggtccggaatgtgcaataatgataccaaagcctgagccaaatgttgttgtcgaaaatttgttcagggagatagcaagccctcatatcacagacaacaaattgaggaatacagcgagccctcagatgtgtgcgttggaggatttagagttcagcaagagatttttgatactctcttatctttgtcggaataacctggaagatgaagttgtactgactgtggactatattaaatcgttgaagtttctgtccatggttcattttgagtcccaaatttggaggaaatttggtcagaagaattttcaggcatccaatagagctgcaacagatagggcaaagaatttcgattcagacccaactacaacaaaattataccattgcaatatcgagataagaggggagtccatattctttgttttgaagtttacaaggatccaggaaaagagacgaaaaagaaagacagtgaacagggggatatcaagaaatgcacttcgcctgtttcatttgatactttccaaaactctaacactggatgttgatttatcgacaattgacgttatactgattgatgatgaaccttgtcgggacgagcatgggaacattgttatgctagatgggaagcgtttgatccatactgatgggactggcttcatatctgaaaatttggctaagaaatgccctagcagaataatcaaaggaaagaagtcaaaagtttatatgcatcaaggtgaaacaacggtccgtcttttttataatggatatgctgtaaagggaactctgctagttgacaaaaggatctatctatctatcaacagagatccttacataatagagatcgatctatctgttaacggagatcctagccatataggcatgctatacagggattctaacaccccctcagtttgagcgtcccatgagacggtgagattggtataaagagaaa

SEQ ID NO: 222134 - DNA, 2177 bp, Zea Mays
ccacccccaccgccgcggcgccgcttgcgccagtgccccctcctcgctttccgctttcatccgggccccactcgccgcttcggtctgagctcggccaaccatcggccatcgccagtgccgctgccgtatccgtcgagtaatgcagcctcccggcccgcctctggcgacgccgcagccgctgccgccggcggtggcggcggagctcgcgcagcttgagtcgaggctgggccaggtcgccggagagcccgcgcgccacgagctcgcggagctaggcgaagtcgccgcggttcgcgtgctacgtaggatcgcgaggtctcaagagcaggtccggacgctcactggctacatcgtctcggctgcggtgcaggagacgttcgcgctcaatgcgcaggccgtccccaccgccgagagccgcgcctgcaactcctccgctccttccctaagtgatggatctgtacaagggccgcagtgcgccagtgaacttcgaatggaagaagtaactgcgggcctctcaaactatcgcatggcaatatgcgagggtcaaggtcaggaggatcatgcagtgatgatggcaattgacaacccacctgactgcatccccccctggggttgggaccaagattgcattgaagttgataaccttgtgccaggaattgcttctcaggcaaaccagatgcctatgcagtatggcgaccgcgaccgtatccaagaactagtttctattgtaccacatggtgttcgtatgctggctgaaagtcttgaaaatggcagagcatctgagttgcagaactatgtacaaaatggcattcccgaacagtggatggttccagcagatcaaagaatggaatccacctcgagccgcctgcaacatgttttaaaatgtcttcagggagttggaccctttggacaccatctcggtccggaatgtgcaataatgataccaaagcctgagccaaatgttgttgtcgaaaatttgttcagggagatagcaagccctcatatcacagacaacaaattgaggaatacagcgagccctcagatgtgtgcgttggaggatttagagttcagcaagagatttttgatactctcttatctttgtcggaataacctggaagatgaagttgtactgactgtggactatattaaatcgttgaagtttctgtccatggttcattttgagtcccaaatttggaggaaatttggtcagaagaattttcaggcatccaatagagctgcaacagatagggcaaagaatttcgattcagacccaactacaacaaaattataccattgcaatatcgagataagaggggagtccatattctttgttttgaaggggccatatatggagaataagaggacttatctacaaaaagttcttggtgatgataatgttcttctagtaaagtttatggtttcttcagacaagagcactgatttctaccgccaacattaccatagggttgttgaagatggtattgttttgggtctgcgacgatataattttttcgtttacaaggatccaggaaaagagacgaaaaagaaagacagtgaacagggggatatcaagaaatgcacttcgcctgtaagatgctattttatttgcactaagtctgggtggaggggggatgaggcttatattccaattgacaagtgccgcaaactgttcatgcatatccatactgctcccaccattgcaaattatatgaaaaggtttcatttgatactttccaaaactctaacactggatgttgatttatcgacaattgacgttatactgattgatgatgaaccttgtcgggacgagcatgggaacattgttatgctagatgggaagcgtttgatccatactgatgggactggcttcatatctgaaaatttggctaagaaatgccctagcagaataatcaaaggaaagaagtcaaaagtttatatgcatcaaggtgaaacaacgcctcttctcatgcaggtccgtcttttttataatggatatgctgtaaagggaactctgctagttgacaaaaggatctatctatctatcaacagagatccttacataatagagatcgatctatctgttaacggagatcctagccatataggcatgctatacagggattctaacaccccctcagtttgagcgtcccatgagacggtgagattggtataaagagaaa

SEQ ID NO: 222135 - DNA, 2533 bp, Zea Mays
cgctgctccgtctccatctccatctccaattacctatcctctccgtcgaatcagaaaccctaacctcaccgtaccacggcctacgagccggaatgaccacatcagccgccgacgatggcagctctttggcgcctaccatcaccgagggagaaaccacagccgacgccggtgctggggcaggtgttgagtgcgtcgagggcaaagagatgaaggttggggccgcggctccagttgaggagccggataaggaggcggcgcgggaggaggatcctggtgatgatgatgactatgaggaggaggaggaggaggaggaggaggaggaggaggaggaggaggaggaggaggaggaggtggaggaggagacggaaactgcgaatgggaaagaggctgagttgatggagccattggcggcgctgaagcctggggaggaggtcaaacctgaaaagctagagggggagaaggaagagctggatgaggagcccgaggcatcggaagaggaccccgaggaggtggaagagttgaaggaggagggcgacggtattgcggaggaaggcttggtggatgggtcggaggcgaacgatgataaagatgctgatcaattgagcagtgggagtgatagtggtggaagcagaagtcgtggtatgcagaactctgaacttgctggaggtcttgaaatatttgttgatgacttgcctcaagattgtgtcaaggaagacattgctatggccttttctcaatcaggggaggtcaaatctgttaggataattaaaaattcatcaactggaaagaaccaagacattgcatttgtttgttacacaagtattgaagctgcaaagaaggttcttgctgaatttaaggagggaattgaggtaaaaggaaaaatggtcagggtatctgcttgtcaagataataataccctttacctggggaacatttgcaagggttggaccagagatcaggtgttgaacaccctaaaaagtattggaattcaagagtgtgagataagctttcccagttacaagggaggaagccgagggtttgcttttcttaagttcacctcacattactatgctagagcagcacttcgtcgcttaatgaaatccgatgctatttttggtactgatagaagcgctaaagtatccttttatcgaacccccacaaaatcatccaagagacttatacaggcaaaaatagtatacctggaacatgtccctctttcttgggatgaaaataaagttaaggaatactgtgaagaatatggggagatcctgaaagctgatgttttccagatatcaaagaatatggaaaatgaaacaatttcttttgttgaattctcatccaggaagggtgcgttagcttgtgtgacaggaataaacaaagcaaatattgttgatggaagcttcaagttgtgtgcatatcttgcttggccaaaaagtgcttcaaaggtcaatagtgctgcaccttcaaatgctgccaccgcaaccgagaaggacaaaacccacacagagaagattcttgtagacatcgatttgcaacataaattccagaaaggcgacaagagcaaacttacatctcagacaaaggaggcaattatgaagaagaaaaaatcaagtaaattaccaaatgacaatgatacaaaactaacctcacaaggtgctgccgaagtaccacaaacctccaaatcttctgaaggcaagaggaaagttggaaaaaacaaacatgcctctgtataccaaaaaccattgaagaaagcaataaataatcgtaacgttgatgagagccagctaactcatcggagtgctgcagtactgcaaacgtctaacacttccaaagggaaaaggaaagccagtgagaacagaagtttatatttaaacgaaaaggctctcaagaaagcacgtggcaatagtaatttgggtggaagttcaagatctaaatcatatgcctctgatctggaacctcatgctggattcatttcgcctgcgattcgagataatggcagtgatgcatataatcgacagagcgccaccatcagcctactctggttacaaaagccatgctggctatgaggctgcaaatacatatgaatacgcagggaaccgggcgcctacacctccaagtggatcttacatccctcgaagaggacattactaacaaaaaatggagtgctggctctgtgcatccattcgatcgcatggtaacaaggaatcaaggatctccgtatttagatgtttcatacatgttatgtagacgttaaaaagtaacttgtttaaggaaaataagaaccctctgcagctttccctttgactgaagtgcagcccggcacaccggttgcttgttgaagaatgctttttttattattattgtagttaagagtccagacgtcgttattaccacttatcttcgtattggaaaaaaaatgtctttttcttagtccagcaatccactaatagcttctatgtttttttgtgctcagcaatatcttatttgcttttttaagacaaacatgccgtgcgtctcaacaggagaaaaaaat

SEQ ID NO: 222136 - DNA, 2811 bp, Zea Mays
cgagaaggcgcaataacacgctgctccgtctccatctccatctccaattacctatcctctccgtcgaatcagaaaccctaacctcaccgtaccacggcctacgagccggaatgaccacatcagccgccgacgatggcagctctttggcgcctaccatcaccgagggagaaaccacagccgacgccggtgctggggcaggtgttgagtgcgtcgagggcaaagagatgaaggttggggccgcggctccagttgaggagccggataaggaggcggcgcgggaggaggatcctggtgatgatgatgactatgaggaggaggaggaggaggaggaggaggaggaggaggaggaggaggaggaggaggaggaggtggaggaggagacggaaactgcgaatgggaaagaggctgagttgatggagccattggcggcgctgaagcctggggaggaggtcaaacctgaaaagctagagggggagaaggaagagctggatgaggagcccgaggcatcggaagaggaccccgaggaggtggaagagttgaaggaggagggcgacggtattgcggaggaaggcttggtggatgggtcggaggcgaacgatgataaagatgctgatcaattgagcagtgggagtgatagtggtggaagcagaagtcgtggtatgcagaactctgaacttgctggaggtcttgaaatatttgttgatgacttgcctcaagattgtgtcaaggaagacattgctatggccttttctcaatcaggggaggtcaaatctgttaggataattaaaaattcatcaactggaaagaaccaagacattgcatttgtttgttacacaagtattgaagctgcaaagaaggttcttgctgaatttaaggagggaattgaggtaaaaggaaaaatggtcagggtatctgcttgtcaagataataataccctttacctggggaacatttgcaagggttggaccagagatcaggtgttgaacaccctaaaaagtattggaattcaagagtgtgagataagctttcccagttacaagggaggaagccgagggtttgcttttcttaagttcacctcacattactatgctagagcagcacttcgtcgcttaatgaaatccgatgctatttttggtactgatagaagcgctaaagtatccttttatcgaacccccacaaaatcatccaagagacttatacagtctggacctaggccttgtcatttggatgaaaaaattcacccggggagggtaagatcaccctcgcgtagtcacggtattatattaatagaaggtcatgacaagttgacaatggtctcgaccgagcaacccccgaaccctgtcctcccatcatcaatgggccgcttcaagctgtccactctgcaaatgcccatccagggtggtgcacagccgagtcgtaacccgagagtggatgagaaacacgaggagatgtcaatgatatatgcccaggcaaaaatagtatacctggaacatgtccctctttcttgggatgaaaataaagttaaggaatactgtgaagaatatggggagatcctgaaagctgatgttttccagatatcaaagaatatggaaaatgaaacaatttcttttgttgaattctcatccaggaagggtgcgttagcttgtgtgacaggaataaacaaagcaaatattgttgatggaagcttcaagttgtgtgcatatcttgcttggccaaaaagtgcttcaaaggtcaatagtgctgcaccttcaaatgctgccaccgcaaccgagaaggacaaaacccacacagagaagattcttgtagacatcgatttgcaacataaattccagaaaggcgacaagagcaaacttacatctcagacaaaggaggcaattatgaagaagaaaaaatcaagtaaattaccaaatgacaatgatacaaaactaacctcacaaggtgctgccgaagtaccacaaacctccaaatcttctgaaggcaagaggaaagttggaaaaaacaaacatgcctctgtataccaaaaaccattgaagaaagcaataaataatcgtaacgttgatgagagccagctaactcatcggagtgctgcagtactgcaaacgtctaacacttccaaagggaaaaggaaagccagtaatttgggtggaagttcaagatctaaatcatatgcctctgatctggaacctcatgctggattcatttcgcctgcgattcgagataatggcagtgatgcatataatcgacagagaactgcacggtatgatatccatcctatagatgtccatccttatgctagagcgccaccatcagcctactctggttacaaaagccatgctggctatgaggctgcaaatacatatgaatacgcagggaaccgggcgcctacacctccaagtggatcttacatccctcgaagaggacattactaacaaaaaatggagtgctggctctgtgcatccattcgatcgcatggtaacaaggaatcaaggatctccgtatttagatgtttcatacatgttatgtagacgttaaaaagtaacttgtttaaggaaaataagaaccctctgcagctttccctttgactgaagtgcagcccggcacaccggttgcttgttgaagaatgctttttttattattattgtagttaagagtccagacgtcgttattaccacttatcttcgtattggaaaaaaaatgtctttttcttagtccagcaatccactaatagcttctatgtttttttgtgctcagcaatatcttatttgcttttttaagacaaacatgccgtgcgtctcaacaggagaaaaaaat

SEQ ID NO: 222137 - DNA, 2539 bp, Zea Mays
gggactgcaaacattcttgtttgtaggcattttttttcatacgaaagcaagatctcgatggttccgatttaaaaaagagaggcattctagtgaagtcgagaaggcgcaataacacgctgctccgtctccatctccatctccaattacctatcctctccgtcgaatcagaaaccctaacctcaccgtaccacggcctacgagccggaatgaccacatcagccgccgacgatggcagctctttggcgcctaccatcaccgagggagaaaccacagccgacgccggtgctggggcaggtgttgagtgcgtcgagggcaaagagatgaaggttggggccgcggctccagttgaggagccggataaggaggcggcgcgggaggaggatcctggtgatgatgatgactatgaggaggaggaggaggaggaggaggaggaggaggaggaggaggaggaggaggaggaggaggtggaggaggagacggaaactgcgaatgggaaagaggctgagttgatggagccattggcggcgctgaagcctggggaggaggtcaaacctgaaaagctagagggggagaaggaagagctggatgaggagcccgaggcatcggaagaggaccccgaggaggtggaagagttgaaggaggagggcgacggtattgcggaggaaggcttggtggatgggtcggaggcgaacgatgataaagatgctgatcaattgagcagtgggagtgatagtggtggaagcagaagtcgtggtatgcagaactctgaacttgctggaggtcttgaaatatttgttgatgacttgcctcaagattgtgtcaaggaagacattgctatggccttttctcaatcaggggaggtcaaatctgttaggataattaaaaattcatcaactggaaagaaccaagacattgcatttgtttgttacacaagtattgaagctgcaaagaaggttcttgctgaatttaaggagggaattgaggtaaaaggaaaaatggtcagggtatctgcttgtcaagataataataccctttacctggggaacatttgcaagggttggaccagagatcaggtgttgaacaccctaaaaagtattggaattcaagagtgtgagataagctttcccagttacaagggaggaagccgagggtttgcttttcttaagttcacctcacattactatgctagagcagcacttcgtcgcttaatgaaatccgatgctatttttggtactgatagaagcgctaaagtatccttttatcgaacccccacaaaatcatccaagagacttatacaggaagggtgcgttagcttgtgtgacaggaataaacaaagcaaatattgttgatggaagcttcaagttgtgtgcatatcttgcttggccaaaaagtgcttcaaaggtcaatagtgctgcaccttcaaatgctgccaccgcaaccgagaaggacaaaacccacacagagaagattcttgtagacatcgatttgcaacataaattccagaaaggcgacaagagcaaacttacatctcagacaaaggaggcaattatgaagaagaaaaaatcaagtaaattaccaaatgacaatgatacaaaactaacctcacaaggtgctgccgaagtaccacaaacctccaaatcttctgaaggcaagaggaaagttggaaaaaacaaacatgcctctgtataccaaaaaccattgaagaaagcaataaataatcgtaacgttgatgagagccagctaactcatcggagtgctgcagtactgcaaacgtctaacacttccaaagggaaaaggaaagccagtgagaacagaagtttatatttaaacgaaaaggctctcaagaaagcacgtggcaatagtaatttgggtggaagttcaagatctaaatcatatgcctctgatctggaacctcatgctggattcatttcgcctgcgattcgagataatggcagtgatgcatataatcgacagagaactgcacggtatgatatccatcctatagatgtccatccttatgctagagcgccaccatcagcctactctggttacaaaagccatgctggctatgaggctgcaaatacatatgaatacgcagggaaccgggcgcctacacctccaagtggatcttacatccctcgaagaggacattactaacaaaaaatggagtgctggctctgtgcatccattcgatcgcatggtaacaaggaatcaaggatctccgtatttagatgtttcatacatgttatgtagacgttaaaaagtaacttgtttaaggaaaataagaaccctctgcagctttccctttgactgaagtgcagcccggcacaccggttgcttgttgaagaatgctttttttattattattgtagttaagagtccagacgtcgttattaccacttatcttcgtattggaaaaaaaatgtctttttcttagtccagcaatccactaatagcttctatgtttttttgtgctcagcaatatcttatttgcttttttaagacaaacatgccgtgcgtctcaacaggagaaaaaaat

SEQ ID NO: 222138 - DNA, 2651 bp, Zea Mays
cctctttgtgagggactgcaaacattcttgtttgtaggcattttttttcatacgaaagcaagatctcgatggttccgatttaaaaaagagaggcattctagtgaagtcgagaaggcgcaataacacgctgctccgtctccatctccatctccaattacctatcctctccgtcgaatcagaaaccctaacctcaccgtaccacggcctacgagccggaatgaccacatcagccgccgacgatggcagctctttggcgcctaccatcaccgagggagaaaccacagccgacgccggtgctggggcaggtgttgagtgcgtcgagggcaaagagatgaaggttggggccgcggctccagttgaggagccggataaggaggcggcgcgggaggaggatcctggtgatgatgatgactatgaggaggaggaggaggaggaggaggaggaggaggaggaggaggaggaggaggaggaggaggtggaggaggagacggaaactgcgaatgggaaagaggctgagttgatggagccattggcggcgctgaagcctggggaggaggtcaaacctgaaaagctagagggggagaaggaagagctggatgaggagcccgaggcatcggaagaggaccccgaggaggtggaagagttgaaggaggagggcgacggtattgcggaggaaggcttggtggatgggtcggaggcgaacgatgataaagatgctgatcaattgagcagtgggagtgatagtggtggaagcagaagtcgtggtatgcagaactctgaacttgctggaggtcttgaaatatttgttgatgacttgcctcaagattgtgtcaaggaagacattgctatggccttttctcaatcaggggaggtcaaatctgttaggataattaaaaattcatcaactggaaagaaccaagacattgcatttgtttgttacacaagtattgaagctgcaaagaaggttcttgctgaatttaaggagggaattgaggtaaaaggaaaaatggtcagggtatctgcttgtcaagataataataccctttacctggggaacatttgcaagggttggaccagagatcaggtgttgaacaccctaaaaagtattggaattcaagagtgtgagataagctttcccagttacaagggaggaagccgagggtttgcttttcttaagttcacctcacattactatgctagagcagcacttcgtcgcttaatgaaatccgatgctatttttggtactgatagaagcgctaaagtatccttttatcgaacccccacaaaatcatccaagagacttatacaggcaaaaatagtatacctggaacatgtccctctttcttgggatgaaaataaagttaaggaatactgtgaagaatatggggagatcctgaaagctgatgttttccagatatcaaagaatatggaaaatgaaacaatttcttttgttgaattctcatccaggaagggtgcgttagcttgtgtgacaggaataaacaaagcaaatattgttgatggaagcttcaagttgtgtgcatatcttgcttggccaaaaagtgcttcaaaggtcaatagtgctgcaccttcaaatgctgccaccgcaaccgagaaggacaaaacccacacagagaagattcttgtagacatcgatttgcaacataaattccagaaaggcgacaagagcaaacttacatctcagacaaaggaggcaattatgaagaagaaaaaatcaagtaaattaccaaatgacaatgatacaaaactaacctcacaaggtgctgccgaagtaccacaaacctccaaatcttctgaaggcaagaggaaagttggaaaaaacaaacatgcctctgtataccaaaaaccattgaagaaagcaataaataatcgtaacgttgatgagagccagctaactcatcggagtgctgcagtactgcaaacgtctaacacttccaaagggaaaaggaaagccagtaatttgggtggaagttcaagatctaaatcatatgcctctgatctggaacctcatgctggattcatttcgcctgcgattcgagataatggcagtgatgcatataatcgacagagaactgcacggtatgatatccatcctatagatgtccatccttatgctagagcgccaccatcagcctactctggttacaaaagccatgctggctatgaggctgcaaatacatatgaatacgcagggaaccgggcgcctacacctccaagtggatcttacatccctcgaagaggacattactaacaaaaaatggagtgctggctctgtgcatccattcgatcgcatggtaacaaggaatcaaggatctccgtatttagatgtttcatacatgttatgtagacgttaaaaagtaacttgtttaaggaaaataagaaccctctgcagctttccctttgactgaagtgcagcccggcacaccggttgcttgttgaagaatgctttttttattattattgtagttaagagtccagacgtcgttattaccacttatcttcgtattggaaaaaaaatgtctttttcttagtccagcaatccactaatagcttctatgtttttttgtgctcagcaatatcttatttgcttttttaagacaaacatgccgtgcgtctcaacaggagaaaaaaat

SEQ ID NO: 222139 - DNA, 2708 bp, Zea Mays
cctctttgtgagggactgcaaacattcttgtttgtaggcattttttttcatacgaaagcaagatctcgatggttccgatttaaaaaagagaggcattctagtgaagtcgagaaggcgcaataacacgctgctccgtctccatctccatctccaattacctatcctctccgtcgaatcagaaaccctaacctcaccgtaccacggcctacgagccggaatgaccacatcagccgccgacgatggcagctctttggcgcctaccatcaccgagggagaaaccacagccgacgccggtgctggggcaggtgttgagtgcgtcgagggcaaagagatgaaggttggggccgcggctccagttgaggagccggataaggaggcggcgcgggaggaggatcctggtgatgatgatgactatgaggaggaggaggaggaggaggaggaggaggaggaggaggaggaggaggaggaggaggaggtggaggaggagacggaaactgcgaatgggaaagaggctgagttgatggagccattggcggcgctgaagcctggggaggaggtcaaacctgaaaagctagagggggagaaggaagagctggatgaggagcccgaggcatcggaagaggaccccgaggaggtggaagagttgaaggaggagggcgacggtattgcggaggaaggcttggtggatgggtcggaggcgaacgatgataaagatgctgatcaattgagcagtgggagtgatagtggtggaagcagaagtcgtggtatgcagaactctgaacttgctggaggtcttgaaatatttgttgatgacttgcctcaagattgtgtcaaggaagacattgctatggccttttctcaatcaggggaggtcaaatctgttaggataattaaaaattcatcaactggaaagaaccaagacattgcatttgtttgttacacaagtattgaagctgcaaagaaggttcttgctgaatttaaggagggaattgaggtaaaaggaaaaatggtcagggtatctgcttgtcaagataataataccctttacctggggaacatttgcaagggttggaccagagatcaggtgttgaacaccctaaaaagtattggaattcaagagtgtgagataagctttcccagttacaagggaggaagccgagggtttgcttttcttaagttcacctcacattactatgctagagcagcacttcgtcgcttaatgaaatccgatgctatttttggtactgatagaagcgctaaagtatccttttatcgaacccccacaaaatcatccaagagacttatacaggcaaaaatagtatacctggaacatgtccctctttcttgggatgaaaataaagttaaggaatactgtgaagaatatggggagatcctgaaagctgatgttttccagatatcaaagaatatggaaaatgaaacaatttcttttgttgaattctcatccaggaagggtgcgttagcttgtgtgacaggaataaacaaagcaaatattgttgatggaagcttcaagttgtgtgcatatcttgcttggccaaaaagtgcttcaaaggtcaatagtgctgcaccttcaaatgctgccaccgcaaccgagaaggacaaaacccacacagagaagattcttgtagacatcgatttgcaacataaattccagaaaggcgacaagagcaaacttacatctcagacaaaggaggcaattatgaagaagaaaaaatcaagtaaattaccaaatgacaatgatacaaaactaacctcacaaggtgctgccgaagtaccacaaacctccaaatcttctgaaggcaagaggaaagttggaaaaaacaaacatgcctctgtataccaaaaaccattgaagaaagcaataaataatcgtaacgttgatgagagccagctaactcatcggagtgctgcagtactgcaaacgtctaacacttccaaagggaaaaggaaagccagtgagaacagaagtttatatttaaacgaaaaggctctcaagaaagcacgtggcaatagtaatttgggtggaagttcaagatctaaatcatatgcctctgatctggaacctcatgctggattcatttcgcctgcgattcgagataatggcagtgatgcatataatcgacagagaactgcacggtatgatatccatcctatagatgtccatccttatgctagagcgccaccatcagcctactctggttacaaaagccatgctggctatgaggctgcaaatacatatgaatacgcagggaaccgggcgcctacacctccaagtggatcttacatccctcgaagaggacattactaacaaaaaatggagtgctggctctgtgcatccattcgatcgcatggtaacaaggaatcaaggatctccgtatttagatgtttcatacatgttatgtagacgttaaaaagtaacttgtttaaggaaaataagaaccctctgcagctttccctttgactgaagtgcagcccggcacaccggttgcttgttgaagaatgctttttttattattattgtagttaagagtccagacgtcgttattaccacttatcttcgtattggaaaaaaaatgtctttttcttagtccagcaatccactaatagcttctatgtttttttgtgctcagcaatatcttatttgcttttttaagacaaacatgccgtgcgtctcaacaggagaaaaaaat

SEQ ID NO: 222140 - DNA, 2314 bp, Zea Mays
attttttttcatacgaaagcaagatctcgatggttccgatttaaaaaagagaggcattctagtgaagtcgagaaggcgcaataacacgctgctccgtctccatctccatctccaattacctatcctctccgtcgaatcagaaaccctaacctcaccgtaccacggcctacgagccggaatgaccacatcagccgccgacgatggcagctctttggcgcctaccatcaccgagggagaaaccacagccgacgccggtgctggggcaggtgttgagtgcgtcgagggcaaagagatgaaggttggggccgcggctccagttgaggagccggataaggaggcggcgcgggaggaggatcctggtgatgatgatgactatgaggaggaggaggaggaggaggaggaggaggaggaggaggaggaggaggaggaggaggaggtggaggaggagacggaaactgcgaatgggaaagaggctgagttgatggagccattggcggcgctgaagcctggggaggaggtcaaacctgaaaagctagagggggagaaggaagagctggatgaggagcccgaggcatcggaagaggaccccgaggaggtggaagagttgaaggaggagggcgacggtattgcggaggaaggcttggtggatgggtcggaggcgaacgatgataaagatgctgatcaattgagcagtgggagtgatagtggtggaagcagaagtcgtggtatgcagaactctgaacttgctggaggtcttgaaatatttgttgatgacttgcctcaagattgtgtcaaggaagacattgctatggccttttctcaatcaggggaggtcaaatctgttaggataattaaaaattcatcaactggaaagaaccaagacattgcatttgtttgttacacaagtattgaagctgcaaagaaggttcttgctgaatttaaggagggaattgaggtaaaaggaaaaatggtcagggtatctgcttgtcaagataataataccctttacctggggaacatttgcaagggttggaccagagatcaggtgttgaacaccctaaaaagtattggaattcaagagtgtgagataagctttcccagttacaagggaggaagccgagggtttgcttttcttaagttcacctcacattactatgctagagcagcacttcgtcgcttaatgaaatccgatgctatttttggtactgatagaagcgctaaagtatccttttatcgaacccccacaaaatcatccaagagacttatacaggcaaaaatagtatacctggaacatgtccctctttcttgggatgaaaataaagttaaggaatactgtgaagaatatggggagatcctgaaagctgatgttttccagatatcaaagaatatggaaaatgaaacaatttcttttgttgaattctcatccaggaagggtgcgttagcttgtgtgacaggaataaacaaagcaaatattgttgatggaagcttcaagttgtgtgcatatcttgcttggccaaaaagtgcttcaaaggtcaatagtgctgcaccttcaaatgctgccaccgcaaccgagaaggacaaaacccacacagagaagattcttgtagacatcgatttgcaacataaattccagaaaggcgacaagagcaaacttacatctcagacaaaggaggcaattatgaagaagaaaaaatcaagtaaattaccaaatgacaatgatacaaaactaacctcacaaggtgctgccgaagtaccacaaacctccaaatcttctgaaggcaagaggaaagttggaaaaaacaaacatgcctctgtataccaaaaaccattgaagaaagcaataaataatcgtaacgttgatgagagccagctaactcatcggagtgctgcagtactgcaaacgtctaacacttccaaagggaaaaggaaagccagtgagaacagaagtttatatttaaacgaaaaggctctcaagaaagcacgtggcaatagtaatttgggtggaagttcaagatctaaatcatatgcctctgatctggaacctcatgctggattcatttcgcctgcgattcgagataatggcagtgatgcatataatcgacagagaactgcacggtatgatatccatcctatagatgtccatccttatgctagagttgttttagaaattatgtcagggaaagtgggtaaccaaccagtcaactgtaggccataaaatcacaagaaaaggatgatgtaagcgactctgaattcaactacttagggcttgttcggttattttcgttccatgtggattagagtggattgggtgaga

SEQ ID NO: 222141 - DNA, 2285 bp, Zea Mays
gggactgcaaacattcttgtttgtaggcattttttttcatacgaaagcaagatctcgatggttccgatttaaaaaagagaggcattctagtgaagtcgagaaggcgcaataacacgctgctccgtctccatctccatctccaattacctatcctctccgtcgaatcagaaaccctaacctcaccgtaccacggcctacgagccggaatgaccacatcagccgccgacgatggcagctctttggcgcctaccatcaccgagggagaaaccacagccgacgccggtgctggggcaggtgttgagtgcgtcgagggcaaagagatgaaggttggggccgcggctccagttgaggagccggataaggaggcggcgcgggaggaggatcctggtgatgatgatgactatgaggaggaggaggaggaggaggaggaggaggaggaggaggaggaggaggaggaggaggaggtggaggaggagacggaaactgcgaatgggaaagaggctgagttgatggagccattggcggcgctgaagcctggggaggaggtcaaacctgaaaagctagagggggagaaggaagagctggatgaggagcccgaggcatcggaagaggaccccgaggaggtggaagagttgaaggaggagggcgacggtattgcggaggaaggcttggtggatgggtcggaggcgaacgatgataaagatgctgatcaattgagcagtgggagtgatagtggtggaagcagaagtcgtggtatgcagaactctgaacttgctggaggtcttgaaatatttgttgatgacttgcctcaagattgtgtcaaggaagacattgctatggccttttctcaatcaggggaggtcaaatctgttaggataattaaaaattcatcaactggaaagaaccaagacattgcatttgtttgttacacaagtattgaagctgcaaagaaggttcttgctgaatttaaggagggaattgaggtaaaaggaaaaatggtcagggtatctgcttgtcaagataataataccctttacctggggaacatttgcaagggttggaccagagatcaggtgttgaacaccctaaaaagtattggaattcaagagtgtgagataagctttcccagttacaagggaggaagccgagggtttgcttttcttaagttcacctcacattactatgctagagcagcacttcgtcgcttaatgaaatccgatgctatttttggtactgatagaagcgctaaagtatccttttatcgaacccccacaaaatcatccaagagacttatacaggcaaaaatagtatacctggaacatgtccctctttcttgggatgaaaataaagttaaggaatactgtgaagaatatggggagatcctgaaagctgatgttttccagatatcaaagaatatggaaaatgaaacaatttcttttgttgaattctcatccaggaagggtgcgttagcttgtgtgacaggaataaacaaagcaaatattgttgatggaagcttcaagttgtgtgcatatcttgcttggccaaaaagtgcttcaaaggtcaatagtgctgcaccttcaaatgctgccaccgcaaccgagaaggacaaaacccacacagagaagattcttgtagacatcgatttgcaacataaattccagaaaggcgacaagagcaaacttacatctcagacaaaggaggcaattatgaagaagaaaaaatcaagtaaattaccaaatgacaatgatacaaaactaacctcacaaggtgctgccgaagtaccacaaacctccaaatcttctgaaggcaagaggaaagttggaaaaaacaaacatgcctctgtataccaaaaaccattgaagaaagcaataaataatcgtaacgttgatgagagccagctaactcatcggagtgctgcagtactgcaaacgtctaacacttccaaagggaaaaggaaagccagtaatttgggtggaagttcaagatctaaatcatatgcctctgatctggaacctcatgctggattcatttcgcctgcgattcgagataatggcagtgatgcatataatcgacagagaactgcacggtatgatatccatcctatagatgtccatccttatgctagagttgttttagaaattatgtcagggaaagtgggtaaccaaccagtcaactgtaggccataaaatcacaagaaaaggatgatgtaagcgactctgaattcaactacttagggcttgttcggttattttcgttccatgtggattagagtggattgggtgaga

SEQ ID NO: 222142 - DNA, 1865 bp, Zea Mays
acaccactacaccaggaaaacatccgtgagccaatctgctagtccccgaaaaacaagaaccatcgtacgggtgacgtggccaacacttccgtttttgttccggccaggcggctcgtgtccccgcagtcggcaggagcgcggacgcagatccgacggcctaggggcactccggggaggccacgcaacgcgcgcggcggcaggaggaggagataggcacacggcgtgccgcggtgggcgaccttttttgcaccgggagataaatcgacagcaccctgacctcaagtcctcaacccgcaggccgcagctgctcccgcccgccgcgcaagcggccaagcgccgccggttcttctcgagcaattctcataaatcattgtcctcataacttgtaatgggtggaagccagtatgatgatgactgggtgttgcccagtgccgatatcactcttgttctggttgggaaacttggctatggcaagagtgcaactggaaatagcatccttggacgggaagcatttgtatcagaatattcacatgccagtgttactaatacttgtcagttgggaagcactaccctgaaggacggccgcaccatcaatgttattgatacaccagggttatttgatatgagcattacatcggacgaggctggtaaagagattgttaaatgcatgaacatggctaaagatgggatacatgcagttctgatggttttttctgccacatctcggttttctcgagaggacgcaagtacagttgagaccattaaagtcttctttggtgaaaggattgtcgaccacatgattttagtcttcacttatggagatttagttggtgaatctaagttgaagaaaatgttaaataatgcgccagagtatttgcagaatgttgttgagctatgccaaaacagagtggttgtcttcgataacgtgactgaagaccgaaggctccaagcgcagcaacttgacaaattgctcgatgtagtggattcagtttgtgcaaaaaatggaggaaaaccattttcagatcaaatgttcactagcatcaaggaggtgcatgatagagaaaaagaggtgcatacctcgggatattcagatgagcagatatctgaattgaaaaaggagattcatagaactagggatgaacagcttgcgcacataaccaacatggtcgaggaaaagttaaactgcactgtggagaagttgcaacagcagctcatggaagaacagaacgcaaggctggaagctgagaaggtggcgtacgaagctaggctgaaatcagaagcggagatccagaagctcaaggagagcctcaagaaagctcaaatggaaaatgatgagttccggaggatggcgcagagccagggcagtaaatgtgctatcctataggcattagtacttgctagaaattggtggagctatcgtgctgacgcgtctcttgtacgtagtactttctctgttccaaaaatatatagttcaatacaccttagtagagatgactacgagagtatccaaacaagacctcgtcggacatgttagcctgaagcttgcttatggacatattggatatagtttttgggtgagaacttttgaacaacttccttgtttttttctctcatgttctaatgcatcttttctctagctgtatgcgcacaacattggagttgttccccaccaaatagaagcattagggatcatccgacaaagaaaacgagtatcctctttctcactagaattatcatgacgaacagcaaaaggatgaataacaccgtcttcgtcttcattgctgagttctttttgacctgttgatgtgcatggcagtgagctccctcatgatcagcaccttcttcgctatgtgctttgtggctag

SEQ ID NO: 222143 - DNA, 1807 bp, Zea Mays
caatctgctagtccccgaaaaacaagaaccatcgtacgggtgacgtggccaacacttccgtttttgttccggccaggcggctcgtgtccccgcagtcggcaggagcgcggacgcagatccgacggcctaggggcactccggggaggccacgcaacgcgcgcggcggcaggaggaggagataggcacacggcgtgccgcggtgggcgaccttttttgcaccgggagataaatcgacagcaccctgacctcaagtcctcaacccgcaggccgcagctgctcccgcccgccgcgcaagcggccaagcgccgccggttcttctcgagcaagagtacatgacttttgagctaagtgtttttcgtgagttctcataaatcattgtcctcataacttgtaatgggtggaagccagtatgatgatgactgggtgttgcccagtgccgatatcactcttgttctggttgggaaacttggctatggcaagagtgcaactggaaatagcatccttggacgggaagcatttgtatcagaatattcacatgccagtgttactaatacttgtcagttgggaagcactaccctgaaggacggccgcaccatcaatgttattgatacaccagggttatttgatatgagcattacatcggacgaggctggtaaagagattgttaaatgcatgaacatggctaaagatgggatacatgcagttctgatggttttttctgccacatctcggttttctcgagaggacgcaagtacagttgagaccattaaagtcttctttggtgaaaggattgtcgaccacatgattttagtcttcacttatggagatttagttggtgaatctaagttgaagaaaatgttaaataatgcgccagagtatttgcagaatgttgttgagctatgccaaaacagagtggttgtcttcgataacgtgactgaagaccgaaggctccaagcgcagcaacttgacaaattgctcgatgtagtggattcagtttgtgcaaaaaatggaggaaaaccattttcagatcaaatgttcactagcatcaaggaggtgcatgatagagaaaaagaggtgcatacctcgggatattcagatgagcagatatctgaattgaaaaaggagattcatagaactagggatgaacagcttgcgcacataaccaacatggtcgaggaaaagttaaactgcactgtggagaagttgcaacagcagctcatggaagaacagaacgcaaggctggaagctgagaaggtggcgtacgaagctaggctgaaatcagaagcggagatccagaagctcaaggagagcctcaagaaagctcaaatggaaaatgatgagttccggaggatggcgcagagccagggcagtaaatgtgctatcctataggcattagtacttgctagaaattggtggagctatcgtgctgacgcgtctcttgtacgtagtactttctctgttccaaaaatatatagttcaatacaccttagtagagatgactacgagagtatccaaacaagacctcgtcggacatgttagcctgaagcttgcttatggacatattggatatagtttttggctgtatgcgcacaacattggagttgttccccaccaaatagaagcattagggatcatccgacaaagaaaacgagtatcctctttctcactagaattatcatgacgaacagcaaaaggatgaataacaccgtcttcgtcttcattgctgagttctttttgacctgttgatgtgcatggcagtgagctccctcatgatcagcaccttcttcgctatgtgctttgtggctag

SEQ ID NO: 222144 - DNA, 1886 bp, Zea Mays
aaacaagaaccatcgtacgggtgacgtggccaacacttccgtttttgttccggccaggcggctcgtgtccccgcagtcggcaggagcgcggacgcagatccgacggcctaggggcactccggggaggccacgcaacgcgcgcggcggcaggcaagaactccgaagtcggcacggccgcacggccgctacgatacggcgccctcacaattgggccgttataaaacgtcacaggaggaggagataggcacacggcgtgccgcggtgggcgaccttttttgcaccgggagataaatcgacagcaccctgacctcaagtcctcaacccgcaggccgcagctgctcccgcccgccgcgcaagcggccaagcgccgccggttcttctcgagcaagagtacatgacttttgagctaagtgtttttcgtgagtatgatgatgactgggtgttgcccagtgccgatatcactcttgttctggttgggaaacttggctatggcaagagtgcaactggaaatagcatccttggacgggaagcatttgtatcagaatattcacatgccagtgttactaatacttgtcagttgggaagcactaccctgaaggacggccgcaccatcaatgttattgatacaccagggttatttgatatgagcattacatcggacgaggctggtaaagagattgttaaatgcatgaacatggctaaagatgggatacatgcagttctgatggttttttctgccacatctcggttttctcgagaggacgcaagtacagttgagaccattaaagtcttctttggtgaaaggattgtcgaccacatgattttagtcttcacttatggagatttagttggtgaatctaagttgaagaaaatgttaaataatgcgccagagtatttgcagaatgttgttgagctatgccaaaacagagtggttgtcttcgataacgtgactgaagaccgaaggctccaagcgcagcaacttgacaaattgctcgatgtagtggattcagtttgtgcaaaaaatggaggaaaaccattttcagatcaaatgttcactagcatcaaggaggtgcatgatagagaaaaagaggtgcatacctcgggatattcagatgagcagatatctgaattgaaaaaggagattcatagaactagggatgaacagcttgcgcacataaccaacatggtcgaggaaaagttaaactgcactgtggagaagttgcaacagcagctcatggaagaacagaacgcaaggctggaagctgagaaggtggcgtacgaagctaggctgaaatcagaagcggagatccagaagctcaaggagagcctcaagaaagctcaaatggaaaatgatgagttccggaggatggcgcagagccagggcagtaaatgtgctatcctataggcattagtacttgctagaaattggtggagctatcgtgctgacgcgtctcttgtacgtagtactttctctgttccaaaaatatatagttcaatacaccttagtagagatgactacgagagtatccaaacaagacctcgtcggacatgttagcctgaagcttgcttatggacatattggatatagtttttgggtgagaacttttgaacaacttccttgtttttttctctcatgttctaatgcatcttttctctagctgtatgcgcacaacattggagttgttccccaccaaatagaagcattagggatcatccgacaaagaaaacgagtatcctctttctcactagaattatcatgacgaacagcaaaaggatgaataacaccgtcttcgtcttcattgctgagttctttttgacctgttgatgtgcatggcagtgagctccctcatgatcagcaccttcttcgctatgtgctttgtggctag

SEQ ID NO: 222145 - DNA, 1730 bp, Zea Mays
caagaaccatcgtacgggtgacgtggccaacacttccgtttttgttccggccaggcggctcgtgtccccgcagtcggcaggagcgcggacgcagatccgacggcctaggggcactccggggaggccacgcaacgcgcgcggcggcaggcaagaactccgaagtcggcacggccgcacggccgctacgatacggcgccctcacaattgggccgttataaaacgtcacaggaggaggagataggcacacggcgtgccgcggtgggcgaccttttttgcaccgggagataaatcgacagcaccctgacctcaagtcctcaacccgcaggccgcagctgctcccgcccgccgcgcaagcggccaagcgccgccggttcttctcgagcaagagtacatgacttttgagctaagtgtttttcgtgagttgggaagcactaccctgaaggacggccgcaccatcaatgttattgatacaccagggttatttgatatgagcattacatcggacgaggctggtaaagagattgttaaatgcatgaacatggctaaagatgggatacatgcagttctgatggttttttctgccacatctcggttttctcgagaggacgcaagtacagttgagaccattaaagtcttctttggtgaaaggattgtcgaccacatgattttagtcttcacttatggagatttagttggtgaatctaagttgaagaaaatgttaaataatgcgccagagtatttgcagaatgttgttgagctatgccaaaacagagtggttgtcttcgataacgtgactgaagaccgaaggctccaagcgcagcaacttgacaaattgctcgatgtagtggattcagtttgtgcaaaaaatggaggaaaaccattttcagatcaaatgttcactagcatcaaggaggtgcatgatagagaaaaagaggtgcatacctcgggatattcagatgagcagatatctgaattgaaaaaggagattcatagaactagggatgaacagcttgcgcacataaccaacatggtcgaggaaaagttaaactgcactgtggagaagttgcaacagcagctcatggaagaacagaacgcaaggctggaagctgagaaggtggcgtacgaagctaggctgaaatcagaagcggagatccagaagctcaaggagagcctcaagaaagctcaaatggaaaatgatgagttccggaggatggcgcagagccagggcagtaaatgtgctatcctataggcattagtacttgctagaaattggtggagctatcgtgctgacgcgtctcttgtacgtagtactttctctgttccaaaaatatatagttcaatacaccttagtagagatgactacgagagtatccaaacaagacctcgtcggacatgttagcctgaagcttgcttatggacatattggatatagtttttgggtgagaacttttgaacaacttccttgtttttttctctcatgttctaatgcatcttttctctagctgtatgcgcacaacattggagttgttccccaccaaatagaagcattagggatcatccgacaaagaaaacgagtatcctctttctcactagaattatcatgacgaacagcaaaaggatgaataacaccgtcttcgtcttcattgctgagttctttttgacctgttgatgtgcatggcagtgagctccctcatgatcagcaccttcttcgctatgtgctttgtggctag

SEQ ID NO: 222146 - DNA, 1691 bp, Zea Mays
gaaccatcgtacgggtgacgtggccaacacttccgtttttgttccggccaggcggctcgtgtccccgcagtcggcaggagcgcggacgcagatccgacggcctaggggcactccggggaggccacgcaacgcgcgcggcggcaggcaagaactccgaagtcggcacggccgcacggccgctacgatacggcgccctcacaattgggccgttataaaacgtcacaggaggaggagataggcacacggcgtgccgcggtgggcgaccttttttgcaccgggagataaatcgacagcaccctgacctcaagtcctcaacccgcaggccgcagctgctcccgcccgccgcgcaagcggccaagcgccgccggttcttctcgagcaattgggaagcactaccctgaaggacggccgcaccatcaatgttattgatacaccagggttatttgatatgagcattacatcggacgaggctggtaaagagattgttaaatgcatgaacatggctaaagatgggatacatgcagttctgatggttttttctgccacatctcggttttctcgagaggacgcaagtacagttgagaccattaaagtcttctttggtgaaaggattgtcgaccacatgattttagtcttcacttatggagatttagttggtgaatctaagttgaagaaaatgttaaataatgcgccagagtatttgcagaatgttgttgagctatgccaaaacagagtggttgtcttcgataacgtgactgaagaccgaaggctccaagcgcagcaacttgacaaattgctcgatgtagtggattcagtttgtgcaaaaaatggaggaaaaccattttcagatcaaatgttcactagcatcaaggaggtgcatgatagagaaaaagaggtgcatacctcgggatattcagatgagcagatatctgaattgaaaaaggagattcatagaactagggatgaacagcttgcgcacataaccaacatggtcgaggaaaagttaaactgcactgtggagaagttgcaacagcagctcatggaagaacagaacgcaaggctggaagctgagaaggtggcgtacgaagctaggctgaaatcagaagcggagatccagaagctcaaggagagcctcaagaaagctcaaatggaaaatgatgagttccggaggatggcgcagagccagggcagtaaatgtgctatcctataggcattagtacttgctagaaattggtggagctatcgtgctgacgcgtctcttgtacgtagtactttctctgttccaaaaatatatagttcaatacaccttagtagagatgactacgagagtatccaaacaagacctcgtcggacatgttagcctgaagcttgcttatggacatattggatatagtttttgggtgagaacttttgaacaacttccttgtttttttctctcatgttctaatgcatcttttctctagctgtatgcgcacaacattggagttgttccccaccaaatagaagcattagggatcatccgacaaagaaaacgagtatcctctttctcactagaattatcatgacgaacagcaaaaggatgaataacaccgtcttcgtcttcattgctgagttctttttgacctgttgatgtgcatggcagtgagctccctcatgatcagcaccttcttcgctatgtgctttgtggctag

SEQ ID NO: 222147 - DNA, 1579 bp, Zea Mays
acgccgtgctgtcgcacggctgggcacaatgagaggagtacatgacttttgagctaagtgtttttcgtgagttctcataaatcattgtcctcataacttgtaatgggtggaagccagtatgatgatgactgggtgttgcccagtgccgatatcactcttgttctggttgggaaacttggctatggcaagagtgcaactggaaatagcatccttggacgggaagcatttgtatcagaatattcacatgccagtgttactaatacttgtcagttgggaagcactaccctgaaggacggccgcaccatcaatgttattgatacaccagggttatttgatatgagcattacatcggacgaggctggtaaagagattgttaaatgcatgaacatggctaaagatgggatacatgcagttctgatggttttttctgccacatctcggttttctcgagaggacgcaagtacagttgagaccattaaagtcttctttggtgaaaggattgtcgaccacatgattttagtcttcacttatggagatttagttggtgaatctaagttgaagaaaatgttaaataatgcgccagagtatttgcagaatgttgttgagctatgccaaaacagagtggttgtcttcgataacgtgactgaagaccgaaggctccaagcgcagcaacttgacaaattgctcgatgtagtggattcagtttgtgcaaaaaatggaggaaaaccattttcagatcaaatgttcactagcatcaaggaggtgcatgatagagaaaaagaggtgcatacctcgggatattcagatgagcagatatctgaattgaaaaaggagattcatagaactagggatgaacagcttgcgcacataaccaacatggtcgaggaaaagttaaactgcactgtggagaagttgcaacagcagctcatggaagaacagaacgcaaggctggaagctgagaaggtggcgtacgaagctaggctgaaatcagaagcggagatccagaagctcaaggagagcctcaagaaagctcaaatggaaaatgatgagttccggaggatggcgcagagccagggcagtaaatgtgctatcctataggcattagtacttgctagaaattggtggagctatcgtgctgacgcgtctcttgtacgtagtactttctctgttccaaaaatatatagttcaatacaccttagtagagatgactacgagagtatccaaacaagacctcgtcggacatgttagcctgaagcttgcttatggacatattggatatagtttttgggtgagaacttttgaacaacttccttgtttttttctctcatgttctaatgcatcttttctctagctgtatgcgcacaacattggagttgttccccaccaaatagaagcattagggatcatccgacaaagaaaacgagtatcctctttctcactagaattatcatgacgaacagcaaaaggatgaataacaccgtcttcgtcttcattgctgagttctttttgacctgttgatgtgcatggcagtgagctccctcatgatcagcaccttcttcgctatgtgctttgtggctag

SEQ ID NO: 222148 - DNA, 501 bp, Zea Mays
gtcccctccccaccccagccttctctctcgctgcgcggcgcctcctcacgcctccgcacttccgcagtctgtccccaaatctgtgcaagacctctcggcaaatcccctcgcggcgacgagacatggttgggagcgtgggcaacgggctggcggatttggacgcaggggccatctccatgaacggggtggggaaggctctgtatcctgccaaggcggcggcggcggccgccgcggagacgctccctgtggagctggagccgccggaggccgtagtggcgccgacgggggaggaggctgccaacgggaagagggagatagtgatggggaggaacgtgcacacctcctgcttcgccgtgaaggagcccgacgcggacgacgaggaaaccggcgagagggaggcgacgatggccagcatcctcgcgctctaccgccgctcgctcgttgaacgcaccaagcaccaccttgaagtcttgagggaactctcactgccgtcaccatccg

SEQ ID NO: 222149 - DNA, 2102 bp, Zea Mays
cccgtttgtccgttctccccgagcgattatatatatcatatatgcgcccgcaaatcgctccggtcccctccccaccccagccttctctctcgctgcgcggcgcctcctcacgcctccgcacttccgcagtctgtccccaaatctgtgcaagacctctcggcaaatcccctcgcggcgacgagacatggttgggagcgtgggcaacgggctggcggatttggacgcaggggccatctccatgaacggggtggggaaggctctgtatcctgccaaggcggcggcggcggccgccgcggagacgctccctgtggagctggagccgccggaggccgtagtggcgccgacgggggaggaggctgccaacgggaagagggagatagtgatggggaggaacgtgcacacctcctgcttcgccgtgaaggagcccgacgcggacgacgaggaaaccggcgagagggaggcgacgatggccagcatcctcgcgctctaccgccgctcgctcgttgaacgcaccaagcaccaccttggttacccgtacaatctggacttcgattatggtgcactggcccaactgcagcacttctcgattaacaaccttggtgaccccttcatcgagagcaactatggtgtccattccaggcagtttgaggttggagtgctggattggttcgctagcctctgggagttagaaaaagatgagtactggggatatattactaactgtggtacagaaggaaatctgcatgggattcttgttgggagggaggtgttccccaaaggaatattgtatgcttctcgtgagtcccattattcagtattcaaagcagcaagaatgtacaggatggattgcgtcaaagtcgacactcttatgtctggggaaatagattgtgctgatttccagagaaagttattgcagaaccgagacaaacctgccatcattaatgttaacattggaacaactgtgaagggggcagttgatgatctagatttggttatcaaaaccctcgaggagaacggctttaaaggtcggttttatattcattgtgatggtgccctctttggattgatgataccatttgttaagaaggcgcctcaagtgacatttaaaaagcctattgggagtgtcagtgtctctgggcacaagtttgttggatgccccatgccatgtggtgtccagataacaagattggagtacataaatgccctgtctagcaacgtggagtatctggcgtcaagggatgcaacaatcatgggaagcaggaacggccatgctcccatcttcctctggtacaccctcaacaggaagggctacagaggctttcagaaagaagtccagaagtgcttgagaaacgcacactacctaaaagatcgcctcaaggaagcaggaatcggagcgatgcttaacgagctcagtagcacagttgtgtttgaaaggccaaaggatgaagtatttgtccgaaggtggcagctcgcttgtgaagggaatatatgccacgttgtggtgatgcccagtgtcaacattgacaagctagactatttcctgaacgaattagtggagaaacgggcgacttggtaccaggatggaataagtcaacccccctgcattgccagagtcgtaggctttgagaactgtctctgtggccgtcataagtagtgtgagccttttgcaaggggggtcattgatgagggagccattggcaattttgtcattatcatttgtgggcttcgccagtatgccatcggacccacaaatcatagacacagacggtcccaccagtcatagcaaatttctcttcatgaggtgcatgttgtactgtatccatgcgttctgtatgtgtgttctgcggtgtaggcgtgtagcttatttgttgtcatgagaataaagttccttctatcaaatttgatggatgcaagttgcatcaaggttggctcgtctgtgcggtgctaagaagattctctttgctttacctctctgccatgcttctgttacctgtagaacaggggcaactgtgccatgcttctgttatctgttgaacaagggacaactgtgccatgcttctgttatctgttgaacaaggggctacgctacgggaaagagtatc

SEQ ID NO: 222150 - DNA, 1870 bp, Zea Mays
cccgtttgtccgttctccccgagcgattatatatatcatatatgcgcccgcaaatcgctccggtcccctccccaccccagccttctctctcgctgcgcggcgcctcctcacgcctccgcacttccgcagtctgtccccaaatctgtgcaagacctctcggcaaatcccctcgcggcgacgagacatggttgggagcgtgggcaacgggctggcggatttggacgcaggggccatctccatgaacggggtggggaaggctctgtatcctgccaaggcggcggcggcggccgccgcggagacgctccctgtggagctggagccgccggaggccgtagtggcgccgacgggggaggaggctgccaacgggaagagggagatagtgatggggaggaacgtgcacacctcctgcttcgccgtgaaggagcccgacgcggacgacgaggaaaccggcgagagggaggcgacgatggccagcatcctcgcgctctaccgccgctcgctcgttgaacgcaccaagcaccaccttggagggaggtgttccccaaaggaatattgtatgcttctcgtgagtcccattattcagtattcaaagcagcaagaatgtacaggatggattgcgtcaaagtcgacactcttatgtctggggaaatagattgtgctgatttccagagaaagttattgcagaaccgagacaaacctgccatcattaatgttaacattggaacaactgtgaagggggcagttgatgatctagatttggttatcaaaaccctcgaggagaacggctttaaaggtcggttttatattcattgtgatggtgccctctttggattgatgataccatttgttaagaaggcgcctcaagtgacatttaaaaagcctattgggagtgtcagtgtctctgggcacaagtttgttggatgccccatgccatgtggtgtccagataacaagattggagtacataaatgccctgtctagcaacgtggagtatctggcgtcaagggatgcaacaatcatgggaagcaggaacggccatgctcccatcttcctctggtacaccctcaacaggaagggctacagaggctttcagaaagaagtccagaagtgcttgagaaacgcacactacctaaaagatcgcctcaaggaagcaggaatcggagcgatgcttaacgagctcagtagcacagttgtgtttgaaaggccaaaggatgaagtatttgtccgaaggtggcagctcgcttgtgaagggaatatatgccacgttgtggtgatgcccagtgtcaacattgacaagctagactatttcctgaacgaattagtggagaaacgggcgacttggtaccaggatggaataagtcaacccccctgcattgccagagtcgtaggctttgagaactgtctctgtggccgtcataagtagtgtgagccttttgcaaggggggtcattgatgagggagccattggcaattttgtcattatcatttgtgggcttcgccagtatgccatcggacccacaaatcatagacacagacggtcccaccagtcatagcaaatttctcttcatgaggtgcatgttgtactgtatccatgcgttctgtatgtgtgttctgcggtgtaggcgtgtagcttatttgttgtcatgagaataaagttccttctatcaaatttgatggatgcaagttgcatcaaggttggctcgtctgtgcggtgctaagaagattctctttgctttacctctctgccatgcttctgttacctgtagaacaggggcaactgtgccatgcttctgttatctgttgaacaagggacaactgtgccatgcttctgttatctgttgaacaaggggctacgctacgggaaagagtatc

SEQ ID NO: 222151 - DNA, 1978 bp, Zea Mays
gtcccctccccaccccagccttctctctcgctgcgcggcgcctcctcacgcctccgcacttccgcagtctgtccccaaatctgtgcaagacctctcggcaaatcccctcgcggcgacgagacatggttgggagcgtgggcaacgggctggcggatttggacgcaggggccatctccatgaacggggtggggaaggctctgtatcctgccaaggcggcggcggcggccgccgcggagacgctccctgtggagctggagccgccggaggccgtagtggcgccgacgggggaggaggctgccaacgggaagagggagatagtgatggggaggaacgtgcacacctcctgcttcgccgtgaaggagcccgacgcggacgacgaggaaaccggcgagagggaggcgacgatggccagcatcctcgcgctctaccgccgctcgctcgttgaacgcaccaagcaccaccttggttacccgtacaatctggacttcgattatggtgcactggcccaactgcagcacttctcgattaacaaccttggtgaccccttcatcgagagcaactatggtgtccattccaggcagtttgaggttggagtgctggattggttcgctagcctctgggagttagaaaaagatgagtactggggatatattactaactgtggtacagaaggaaatctgcatgggattcttgttgggagggaggtgttccccaaaggaatattgtatgcttctcgtgagtcccattattcagtattcaaagcagcaagaatgtacaggatggattgcgtcaaagtcgacactcttatgtctggggaaatagattgtgctgatttccagagaaagttattgcagaaccgagacaaacctgccatcattaatgttaacattggaacaactgtgaagggggcagttgatgatctagatttggttatcaaaaccctcgaggagaacggctttaaaggcgcctcaagtgacatttaaaaagcctattgggagtgtcagtgtctctgggcacaagtttgttggatgccccatgccatgtggtgtccagataacaagattggagtacataaatgccctgtctagcaacgtggagtatctggcgtcaagggatgcaacaatcatgggaagcaggaacggccatgctcccatcttcctctggtacaccctcaacaggaagggctacagaggctttcagaaagaagtccagaagtgcttgagaaacgcacactacctaaaagatcgcctcaaggaagcaggaatcggagcgatgcttaacgagctcagtagcacagttgtgtttgaaaggccaaaggatgaagtatttgtccgaaggtggcagctcgcttgtgaagggaatatatgccacgttgtggtgatgcccagtgtcaacattgacaagctagactatttcctgaacgaattagtggagaaacgggcgacttggtaccaggatggaataagtcaacccccctgcattgccagagtcgtaggctttgagaactgtctctgtggccgtcataagtagtgtgagccttttgcaaggggggtcattgatgagggagccattggcaattttgtcattatcatttgtgggcttcgccagtatgccatcggacccacaaatcatagacacagacggtcccaccagtcatagcaaatttctcttcatgaggtgcatgttgtactgtatccatgcgttctgtatgtgtgttctgcggtgtaggcgtgtagcttatttgttgtcatgagaataaagttccttctatcaaatttgatggatgcaagttgcatcaaggttggctcgtctgtgcggtgctaagaagattctctttgctttacctctctgccatgcttctgttacctgtagaacaggggcaactgtgccatgcttctgttatctgttgaacaagggacaactgtgccatgcttctgttatctgttgaacaaggggctacgctacgggaaagagtatc

SEQ ID NO: 222152 - DNA, 1746 bp, Zea Mays
gtcccctccccaccccagccttctctctcgctgcgcggcgcctcctcacgcctccgcacttccgcagtctgtccccaaatctgtgcaagacctctcggcaaatcccctcgcggcgacgagacatggttgggagcgtgggcaacgggctggcggatttggacgcaggggccatctccatgaacggggtggggaaggctctgtatcctgccaaggcggcggcggcggccgccgcggagacgctccctgtggagctggagccgccggaggccgtagtggcgccgacgggggaggaggctgccaacgggaagagggagatagtgatggggaggaacgtgcacacctcctgcttcgccgtgaaggagcccgacgcggacgacgaggaaaccggcgagagggaggcgacgatggccagcatcctcgcgctctaccgccgctcgctcgttgaacgcaccaagcaccaccttggagggaggtgttccccaaaggaatattgtatgcttctcgtgagtcccattattcagtattcaaagcagcaagaatgtacaggatggattgcgtcaaagtcgacactcttatgtctggggaaatagattgtgctgatttccagagaaagttattgcagaaccgagacaaacctgccatcattaatgttaacattggaacaactgtgaagggggcagttgatgatctagatttggttatcaaaaccctcgaggagaacggctttaaaggcgcctcaagtgacatttaaaaagcctattgggagtgtcagtgtctctgggcacaagtttgttggatgccccatgccatgtggtgtccagataacaagattggagtacataaatgccctgtctagcaacgtggagtatctggcgtcaagggatgcaacaatcatgggaagcaggaacggccatgctcccatcttcctctggtacaccctcaacaggaagggctacagaggctttcagaaagaagtccagaagtgcttgagaaacgcacactacctaaaagatcgcctcaaggaagcaggaatcggagcgatgcttaacgagctcagtagcacagttgtgtttgaaaggccaaaggatgaagtatttgtccgaaggtggcagctcgcttgtgaagggaatatatgccacgttgtggtgatgcccagtgtcaacattgacaagctagactatttcctgaacgaattagtggagaaacgggcgacttggtaccaggatggaataagtcaacccccctgcattgccagagtcgtaggctttgagaactgtctctgtggccgtcataagtagtgtgagccttttgcaaggggggtcattgatgagggagccattggcaattttgtcattatcatttgtgggcttcgccagtatgccatcggacccacaaatcatagacacagacggtcccaccagtcatagcaaatttctcttcatgaggtgcatgttgtactgtatccatgcgttctgtatgtgtgttctgcggtgtaggcgtgtagcttatttgttgtcatgagaataaagttccttctatcaaatttgatggatgcaagttgcatcaaggttggctcgtctgtgcggtgctaagaagattctctttgctttacctctctgccatgcttctgttacctgtagaacaggggcaactgtgccatgcttctgttatctgttgaacaagggacaactgtgccatgcttctgttatctgttgaacaaggggctacgctacgggaaagagtatc

SEQ ID NO: 222153 - DNA, 1289 bp, Zea Mays
gctcctcccagcagtgcacgcgtgaagctcggcggcggccggcacggtgcatcctccgctcttgcctcacctcccggtccatcctcgctgctcacgcgtgcctcacctcgacagcagccttccctcgcgacagggataaggacttaaggaggcgtcgctcggtgcaaagaatccatggcatggggaggtctgttcttgtgcatgggccgccccacgcaggagcaacagaagtcctgccttgcagccgctggtggcttcaactacgacacagctctccaaggcgccacacgcccaaagtcagtgtctaccttgacctctgacgaagctggtggcgaaataggtgacaaggatcttaccgagcgtggattctttgtgaaccgatcgcgtgttctggtcggctcaggttctgacgcctttgtccatgccaaatctgccctcctctcatggaggaactggtggttttcaggcacttggctttagggtgggcgaacgtggaaccggacaccccggtgaaggtaggtacaaggttctgcatctgctacaaggagttgatcccctgggtgacgctgccgcttcagatagcgtatgtgaccgacgtcgattcagacacgtccaaagggtgctcccggtccaagatgtttgccttcggcagcggcactctacagggccatctgctggccggagaggagcggttctcggtacaggtggacgaggaggagagggtgtggtacgaggtgctttctttctcgaagccggcgcacgtcctggcgacgctgtgctacccgtatgtgcagctgaggcagaagcatttcgcgcagcagtcgggacaggcgctcgtcaggcatgtgtccacctgctcttccaagcagaagcagtagtagagctttgtggagatgcactgcacagagaatgctgtatgtattccccctttgaattctattccgacatggcctggtttggcggcgctggggcctgggtgggatgatatatgttcgggcattccgagtggagtttgcccatcccatattttaatttcttcatgatggtggtggatctgttgcagctgaatgaattaagacaggaagatatataaaattcatgcgcacacagaatgaacacgagatgagaatcgagaaggtgcagtgaatgatttatccattatttatgaagtgattaatttagtaattaatttaatcttcaaagtgcgtagttatctaacaaattattagaaaacatgggtctttccgatacttatcaaaaatatgtataacgagatttttaaatcgttt

SEQ ID NO: 222154 - DNA, 1053 bp, Zea Mays
cccagcagtgcacgcgtgaagctcggcggcggccggcacggtgcatcctccgctcttgcctcacctcccggtccatcctcgctgctcacgcgtgcctcacctcgacagcagccttccctcgcgacagggataaggacttaaggaggcgtcgctcggtgcaaagaatccatggcatggggaggtctgttcttgtgcatgggccgccccacgcaggagcaacagaagtcctgccttgcagccgctggtggcttcaactacgacacagctctccaaggcgccacacgcccaaagttctgcatctgctacaaggagttgatcccctgggtgacgctgccgcttcagatagcgtatgtgaccgacgtcgattcagacacgtccaaagggtgctcccggtccaagatgtttgccttcggcagcggcactctacagggccatctgctggccggagaggagcggttctcggtacaggtggacgaggaggagagggtgtggtacgaggtgctttctttctcgaagccggcgcacgtcctggcgacgctgtgctacccgtatgtgcagctgaggcagaagcatttcgcgcagcagtcgggacaggcgctcgtcaggcatgtgtccacctgctcttccaagcagaagcagtagtagagctttgtggagatgcactgcacagagaatgctgtatgtattccccctttgaattctattccgacatggcctggtttggcggcgctggggcctgggtgggatgatatatgttcgggcattccgagtggagtttgcccatcccatattttaatttcttcatgatggtggtggatctgttgcagctgaatgaattaagacaggaagatatataaaattcatgcgcacacagaatgaacacgagatgagaatcgagaaggtgcagtgaatgatttatccattatttatgaagtgattaatttagtaattaatttaatcttcaaagtgcgtagttatctaacaaattattagaaaacatgggtctttccgatacttatcaaaaatatgtataacgagatttttaaatcgttt

SEQ ID NO: 222155 - DNA, 1237 bp, Zea Mays
cccagcagtgcacgcgtgaagctcggcggcggccggcacggtgcatcctccgctcttgcctcacctcccggtccatcctcgctgctcacgcgtgcctcacctcgacagcagccttccctcgcgacagggataaggacttaaggaggcgtcgctcggtgcaaagaatccatggcatggggaggtctgttcttgtgcatgggccgccccacgcaggagcaacagaagtcctgccttgcagccgctggtggcttcaactacgacacagctctccaaggcgccacacgcccaaagtcagtgtctaccttgacctctgacgaagctggtggcgaaataggtgacaaggatcttaccgagcgtggattctttgtgaaccgatcgcgtgttctggtcggctcaggaactggtggttttcaggcacttggctttagggtgggcgaacgtggaaccggacaccccggtgaaggtaggtacaaggttctgcatctgctacaaggagttgatcccctgggtgacgctgccgcttcagatagcgtatgtgaccgacgtcgattcagacacgtccaaagggtgctcccggtccaagatgtttgccttcggcagcggcactctacagggccatctgctggccggagaggagcggttctcggtacaggtggacgaggaggagagggtgtggtacgaggtgctttctttctcgaagccggcgcacgtcctggcgacgctgtgctacccgtatgtgcagctgaggcagaagcatttcgcgcagcagtcgggacaggcgctcgtcaggcatgtgtccacctgctcttccaagcagaagcagtagtagagctttgtggagatgcactgcacagagaatgctgtatgtattccccctttgaattctattccgacatggcctggtttggcggcgctggggcctgggtgggatgatatatgttcgggcattccgagtggagtttgcccatcccatattttaatttcttcatgatggtggtggatctgttgcagctgaatgaattaagacaggaagatatataaaattcatgcgcacacagaatgaacacgagatgagaatcgagaaggtgcagtgaatgatttatccattatttatgaagtgattaatttagtaattaatttaatcttcaaagtgcgtagttatctaacaaattattagaaaacatgggtctttccgatacttatcaaaaatatgtataacgagatttttaaatcgttt

SEQ ID NO: 222156 - DNA, 1269 bp, Zea Mays
cccagcagtgcacgcgtgaagctcggcggcggccggcacggtgcatcctccgctcttgcctcacctcccggtccatcctcgctgctcacgcgtgcctcacctcgacagcagccttccctcgcgacaggcaggataaggacttaaggaggcgtcgctcggtgcaaagaatccatggcatggggaggtctgttcttgtgcatgggccgccccacgcaggagcaacagaagtcctgccttgcagccgctggtggcttcaactacgacacagctctccaaggcgccacacgcccaaagtcagtgtctaccttgacctctgacgaagctggtggcgaaataggtgacaaggatcttaccgagcgtggattctttgtgaaccgatcgcgtgttctggtcggctcaggttctgacgcctttgtccatgccaaatctgccctcctctcatggaggcacttggctttagggtgggcgaacgtggaaccggacaccccggtgaaggtaggtacaaggttctgcatctgctacaaggagttgatcccctgggtgacgctgccgcttcagatagcgtatgtgaccgacgtcgattcagacacgtccaaagggtgctcccggtccaagatgtttgccttcggcagcggcactctacagggccatctgctggccggagaggagcggttctcggtacaggtggacgaggaggagagggtgtggtacgaggtgctttctttctcgaagccggcgcacgtcctggcgacgctgtgctacccgtatgtgcagctgaggcagaagcatttcgcgcagcagtcgggacaggcgctcgtcaggcatgtgtccacctgctcttccaagcagaagcagtagtagagctttgtggagatgcactgcacagagaatgctgtatgtattccccctttgaattctattccgacatggcctggtttggcggcgctggggcctgggtgggatgatatatgttcgggcattccgagtggagtttgcccatcccatattttaatttcttcatgatggtggtggatctgttgcagctgaatgaattaagacaggaagatatataaaattcatgcgcacacagaatgaacacgagatgagaatcgagaaggtgcagtgaatgatttatccattatttatgaagtgattaatttagtaattaatttaatcttcaaagtgcgtagttatctaacaaattattagaaaacatgggtctttccgatacttatcaaaaatatgtataacgagatttttaaatcgttt

SEQ ID NO: 222157 - DNA, 1280 bp, Zea Mays
gctgcgtgccttcgtgagagggggtgcgaacggccagatggggatctaatcagacaagcgaacgaggacgggaacgggcacgggggtgccgcgccccgcgatatccgtcgtccccggcgaggcggcgacactgctgctgtaggataaggacttaaggaggcgtcgctcggtgcaaagaatccatggcatggggaggtctgttcttgtgcatgggccgccccacgcaggagcaacagaagtcctgccttgcagccgctggtggcttcaactacgacacagctctccaaggcgccacacgcccaaagtcagtgtctaccttgacctctgacgaagctggtggcgaaataggtgacaaggatcttaccgagcgtggattctttgtgaaccgatcgcgtgttctggtcggctcaggttctgacgcctttgtccatgccaaatctgccctcctctcatggaggcacttggctttagggtgggcgaacgtggaaccggacaccccggtgaaggtaggtacaaggttctgcatctgctacaaggagttgatcccctgggtgacgctgccgcttcagatagcgtatgtgaccgacgtcgattcagacacgtccaaagggtgctcccggtccaagatgtttgccttcggcagcggcactctacagggccatctgctggccggagaggagcggttctcggtacaggtggacgaggaggagagggtgtggtacgaggtgctttctttctcgaagccggcgcacgtcctggcgacgctgtgctacccgtatgtgcagctgaggcagaagcatttcgcgcagcagtcgggacaggcgctcgtcaggcatgtgtccacctgctcttccaagcagaagcagtagtagagctttgtggagatgcactgcacagagaatgctgtatgtattccccctttgaattctattccgacatggcctggtttggcggcgctggggcctgggtgggatgatatatgttcgggcattccgagtggagtttgcccatcccatattttaatttcttcatgatggtggtggatctgttgcagctgaatgaattaagacaggaagatatataaaattcatgcgcacacagaatgaacacgagatgagaatcgagaaggtgcagtgaatgatttatccattatttatgaagtgattaatttagtaattaatttaatcttcaaagtgcgtagttatctaacaaattattagaaaacatgggtctttccgatacttatcaaaaatatgtataacgagatttttaaatcgttt

SEQ ID NO: 222158 - DNA, 1192 bp, Zea Mays
gacaattgacctttgtgcgatcttgcagttgcacaggtacagaacatagaaatggataaggacttaaggaggcgtcgctcggtgcaaagaatccatggcatggggaggtctgttcttgtgcatgggccgccccacgcaggagcaacagaagtcctgccttgcagccgctggtggcttcaactacgacacagctctccaaggcgccacacgcccaaagtcagtgtctaccttgacctctgacgaagctggtggcgaaataggtgacaaggatcttaccgagcgtggattctttgtgaaccgatcgcgtgttctggtcggctcaggttctgacgcctttgtccatgccaaatctgccctcctctcatggaggcacttggctttagggtgggcgaacgtggaaccggacaccccggtgaaggtaggtacaaggttctgcatctgctacaaggagttgatcccctgggtgacgctgccgcttcagatagcgtatgtgaccgacgtcgattcagacacgtccaaagggtgctcccggtccaagatgtttgccttcggcagcggcactctacagggccatctgctggccggagaggagcggttctcggtacaggtggacgaggaggagagggtgtggtacgaggtgctttctttctcgaagccggcgcacgtcctggcgacgctgtgctacccgtatgtgcagctgaggcagaagcatttcgcgcagcagtcgggacaggcgctcgtcaggcatgtgtccacctgctcttccaagcagaagcagtagtagagctttgtggagatgcactgcacagagaatgctgtatgtattccccctttgaattctattccgacatggcctggtttggcggcgctggggcctgggtgggatgatatatgttcgggcattccgagtggagtttgcccatcccatattttaatttcttcatgatggtggtggatctgttgcagctgaatgaattaagacaggaagatatataaaattcatgcgcacacagaatgaacacgagatgagaatcgagaaggtgcagtgaatgatttatccattatttatgaagtgattaatttagtaattaatttaatcttcaaagtgcgtagttatctaacaaattattagaaaacatgggtctttccgatacttatcaaaaatatgtataacgagatttttaaatcgttt

SEQ ID NO: 222159 - DNA, 847 bp, Zea Mays
cctgaaccagagagagctctcatggcacttggctttagggtgggcgaacgtggaaccggacaccccggtgaaggtaggtacaaggttctgcatctgctacaaggagttgatcccctgggtgacgctgccgcttcagatagcgtatgtgaccgacgtcgattcagacacgtccaaagggtgctcccggtccaagatgtttgccttcggcagcggcactctacagggccatctgctggccggagaggagcggttctcggtacaggtggacgaggaggagagggtgtggtacgaggtgctttctttctcgaagccggcgcacgtcctggcgacgctgtgctacccgtatgtgcagctgaggcagaagcatttcgcgcagcagtcgggacaggcgctcgtcaggcatgtgtccacctgctcttccaagcagaagcagtagtagagctttgtggagatgcactgcacagagaatgctgtatgtattccccctttgaattctattccgacatggcctggtttggcggcgctggggcctgggtgggatgatatatgttcgggcattccgagtggagtttgcccatcccatattttaatttcttcatgatggtggtggatctgttgcagctgaatgaattaagacaggaagatatataaaattcatgcgcacacagaatgaacacgagatgagaatcgagaaggtgcagtgaatgatttatccattatttatgaagtgattaatttagtaattaatttaatcttcaaagtgcgtagttatctaacaaattattagaaaacatgggtctttccgatacttatcaaaaatatgtataacgagatttttaaatcgttt

SEQ ID NO: 222160 - DNA, 2263 bp, Zea Mays
attcattcgccattttttctttggttcctcgcgttcatttcgcccttcccattcctctccactgcgctgccatcgtctcgcgccggccccccgtggggaactagaactgactccctcgatcccagcggcagcggcggaagcgaacggtgaccgcgacctcccctgaggctgcatatactcggatcgggtttcacatctccggttttggattggttggttgcccgcggcgatgggaggagagctgtggtggtatccataggggatcctcggttgcgtccttgtgcgatggcttcgacctccgttcctgagttaaccgcggacaagaaatgcgacaaagccatcgcggatacggcggcaccacttacttctcagggacactccgaagaaccgactgggaaagtcagcacactagtgcctgctttgccggttgtaattgcagcaggcgatggggctgcatccagtggggtgatagaaaacagaaatggcatggacaattctgctgatggttctttgaagcgggatgacagtgaaggtgctgagaagagctcgctgcgggggagcgtcaaggatagctcggtgtcggctaaatgcagtgacagggcgagcagcctgtcgaaagccagtgggagcgccaagatcagcggtcaacctgctgacatgatcgagagtggcaagagtagtctctatcgggccagtggtggaagtgatctgagtgatgagagcacctgcagtagcatatgcagcagtgtcagcaagcctcacaagtcaaacgactcaaagtgggaagcgattcaggttgtccgaaccaaagaaggttctgtaggtctaggtcatttcaggctgctcaagaggctcggttgtggtgatattggcagtgtgtacttatcagaacttagtggcactaaatgctattttgccatgaagatcatggacaaggcgtcattagcaacccgcaaaaagctgcttagagcgcagactgaaagggagatattgcaatgcctggatcatccttttcttccaacattgtacactcactttgagacggataagttctcatgcttggtgatggagttctgccctggaggtgacctacataccctaaggcaaaagcagcctggcaagtatttccctgaacaagctgccaagttttatgtagcagaggtgcttcttgctctggaatacctgcacatgcttggtatcatataccgtgacttaaagccagagaatgttcttgtgagggaagatggacatatcatgctgtcggatttcgatttatccctccgatgtgctgtgagccctactcttctcagatcttctaaccccagtggggataaccaaaagggcaacccagcttactgtgtgcagcctgtgtgcattgagcctgcctgtatgcagccttcttgtgtcacgacaaccacatgcttctctcctcgctttttctcttccaaatccaaggagaaaaaagataaaaaggcaaaggcagacttggcaaatcaggtcagaccacttcctgagcttgttgcagagccgacagatgcaaggtctatgtcttttgttggcacccatgagtacttggcacctgaaattataaagggcgaggggcatggaagtgctgtagactggtggacatttggcatattcttgtatgagcttctcttcggcaagacaccattcaaaggttctgggaatagggcgacattgttcaacgtagttggacaacccttaaggttcccagaatcacctgtagtgagttttgctgcaagggatcttattaggggattgctcatcaaggaacctcagcatcgattagcgtataagcgtggagccacagaaataaaacagcacccgttctttgaaggtgttaattgggcattaatcaggtgtgccactccacctgatatccccaagccagttgagatccctcgttctgtagcttcatcaagccagaaggctacatcagccgctgagaaaggctcagattatcttgaattggagtttttttagtggtcacgcatgatctcccatgtgcaagttgtaaagctctaccttttccacttagacttcttttttttatgggttttaataactttatatgtagatgcatattgtcgtacgtagtgctgttctcttcagttgatttctcagttcattcctttagatgggatcctcaatctggtggagtctgtaatcctttattggctgccgttcactagattctctcaataacatggaaacattttcgttcaatcggttttgcaatttg

SEQ ID NO: 222161 - DNA, 1709 bp, Zea Mays
cgcatctcagttggatagattacttcgggatgaaaatgatgcctctccaggccctacatacacagctgcaattcctgaataccgggttgaattcatcaaacctgaggaggcagctcatttggagagaaacttcagccttgcaaatggccatgcagtccatgatgcccagcatccttgccaggctaatgtggtcgtgcggcaggaactccacacccctgcttctgatcgttcatgcactcatttggagttcgacattgctgcaactggtctcacgtatgaaactggcgaccatgttggtgtatacaccgagaactgccctgaggttgtagaggaggcagagaggttgttgggctactcgccagacacatttttcaccatccatgcagacaaagaggatgacacttcactaagtggcagttctcttgctcctccgttcccctccccaatcacagtgaggaatgcacttgctagatatgccgaccttctaaattcaccgaagaaggcttctctggttgcattagcttcttatgcttcagatcctgctgaggctgatcgtctgaggttcttggcctctgctgctggcaaggatgagtatgcccaatgggttgtggcaagtcagagaagcctgttggaagtcatggcagagttcccttcggcaaagcctccactaggagtcttctttgcagctgttgcccctcgacttcaaccaagatattattctatttcatcttcacctagtatggcaccaaccaggattcatgtcacatgtgcgctcgtgcgcgaaacaacacccgctggaagggtacataagggagtttgctcaacttggattaagaatgctgttccttcggaggagagcaaggaatgcagctgggctccgatatttgtgaggcaatcaaacttcaaactacccgctgatccttcagtaccgattatcatgattggccctgggaccggtcttgcacccttccgtggcttcttgcaggaaagacttgctcaaaaagaatctggagctgagcttggtcgatctgtgttcttctttggatgcagaaacagcaagatggacttcatctatgagggcgagctgaacaatttcgttgagcaaggagcactgtctgagctggttcttgccttctcgcgccagggccttgctaaggaatatgtgcagcacaaaatggcacagaaagcatctgaaatctgggacatgatctcccaaggtgcttacatctatgtctgtggtgacgccaaaggcatggccagagacgtacatagagttctccataccattgttcaggagcagggctccctcgacagttctaaggccgagagcttcgtgaagaatctccaaatggagggcagatatctgagggatgtgtggtaaagagcgattggatgaacattcgttcgtattacacacgtgtacaactactaccggaagagcactgacaatggactagatctgatatttttattgcttctatatttatttttattttcttttgcttcgttctcttcaagagctctttgctttctttgcggttctcccaagagttctttgtacctatgtattacaaattctttatatgtataagatgaggacaattttggcaataagcctgtcacgatgttattagtattgccaaataggctttcgtgtgattatgcataatgtataaatgaatccacaaagagtttaggatttggtctaa

SEQ ID NO: 222162 - DNA, 2565 bp, Zea Mays
gggaacgcttgccccgaactcccgatacccacacccgtcttgactctggccgtctctattctccaagtcccaatccaccgacgaattccaaaccctgcctaggacctcggcgccactcgccgcacgtcgtccacgtccgcctccaccccaatccgatggggtatgaagagagcaaaaaacatctcctcagtctcagctaccctgagctgcaatgtttgtgcaaaaggtataaccttcctgctaagaagacccactctcagttagcaagttcgctcgcctcgctgcttgaggcatctccatctcctgctcctcctcctgtccaattagcaaatatgaaagaagcatccacatgcaatcatgctaacaacaaaagaggcccatacaatggcagggatgatggtaaaccacttgtgcatgcgaaacatcaaaaaggagatcagacacctgttgatgaaacatctaaaaaggggattgacactggtacgagtatacctccagtttctatgaaccatggaagaccagaatatcatggccatctatcttctgacctgagaactgctcataatttacagtcccaatgtgacgtgggaattgcaactaatacaacaaatctagaatttgttggcaaacatgattgttcacctgctaacgtaattgatcaaatctgtccccctattattcaaaaatatccttctaatggtaatggtcaggcttccactaagttcggccgtatgaatgataacacagaaaagggttgtcggctgtctgataagatatcagcaaatgctgctgctgttcaattttctgtaatgtcagatgagggcattgatcttcttgttgatctgaactccagttcagcaacatgggccaagaacttcatggcagaaatgcacattacccctccgtctgaacatgggaatttctctagcttcattagcagtttgtcaactaaggatgatcatagcactgcgtcaccatctggaaatatcattgttgacattcagaacaagggagctgagaacattgttccttccactgattcatcacttgcttcagatgttggtgagagctcccgttcagtgctctatccagttgatacgactactgtgaactcagtgtcatccacgtctacagtggctggtaccccagttgaactttctgggtatcaggagggtgctccagtggtatgttcttcatgtttaacagctgatgttcagaacaatgtgacatctgatatgccaggtgcttcggataacgaggtgcttcctccagaacctgctgatgtctttttgcagtctgaaagaatcactgcaccagctgtatgtggttcagtgcaaccaattggcaataaatgcacaatgagttctggggatgaggttagaagtggctccaatgaagactcctgtccaaaatcttcaggaaaacaaactggagatgaaaccctaatggaaaatgaacctgtgaaggcagtagcagtggaagaaaatataggtcgtgatgacagtttgtccatttcttatcaactagcctgtaagacagtagcagaactgcctgttacagatgcccagtcgcctgctagttcttctggtcattttattgctggaaattttgacaacacacatccaacatcttccgccacttcggacaatgctattaattctctgacttcaaagttcggtgcagagctagcacaaagtcatgattctacggacaaaaagggacagaatgatgctgaggaggttgaggagttagagagtatgacaccagcagcctatagtgaacctcccagaaatatacaacttagcttacgaagtgcttccgctaaggtcaagccttctacactaccaagacgatcagcgaggcttcttcctaagtaaccgccgtaaatgatacagatgagatccagtgtgagaatagcctcactaccggcttagtcagattccatgaggatgaagggatagaaaacagttaacaagcttagattctaattttgtatgttcttgttaattcttttttgttccagcaactgagtagaacttggtttctgaagcttaggctgcgtgactttttatctcctcgtgtccatcaacatctgttacagttacagtcgtactgtcgagctttcatacactattgtacaaacgactcctacttttacagcatctgtttcctctggtctgcgacttgttggatgatgtcttctgtgttttatatcaatgcaatataactattggtgcaggagcaatgatatttccgattccacaagttaaccggaaatcttcatgggtgatagctgtgtcagattctttcgcgcatagtgatagctgtgtcagtttacccccattttcttgggcatcacttgtctcaaatgaagttcattggaggttcgcaatttatgttccgtggcatcacaccggcacctacctatttgctggttatctaattttacatacggaggacctggattgccacctgctaattgctatcgcggccttgaccaaaaaggtaagagcatcccttctcaatcagagccgtggaaccatagccaaatttgccaagtgttaa

SEQ ID NO: 222163 - DNA, 1610 bp, Zea Mays
ctattctccaagtcccaatccaccgacgaattccaaaccctgcctaggacctcggcgccactcgccgcacgtcgtccacgtccgcctccaccccaatccgatggggtatgaagagagcaaaaaacatctcctcagtctcagctaccctgagctgcaatgtttgtgcaaaaggtataaccttcctgctaagaagacccactctcagttagcaagttcgctcgcctcgctgcttgaggcatctccatctcctgctcctcctcctgtccaattagcaaatatgaaagaagcatccacatgcaatcatgctaacaacaaaagaggcccatacaatggcagggatgatggtaaaccacttgtgcatgcgaaacatcaaaaaggagatcagacacctgttgatgaaacatctaaaaaggggattgacactggtacgagtatacctccagtttctatgaaccatggaagaccagaatatcatggccatctatcttctgacctgagaactgctcataatttacagtcccaatgtgacgtgggaattgcaactaatacaacaaatctagaatttgttggcaaacatgattgttcacctgctaacgtaattgatcaaatctgtccccctattattcaaaaatatccttctaatggtaatggtcaggcttccactaagttcggccgtatgaatgataacacagaaaagggttgtcggctgtctgataagatatcagcaaatgctgctgctgttcaattttctgtaatgtcagatgagggcattgatcttcttgttgatctgaactccagttcagcaacatgggccaagaacttcatggcagaaatgcacattacccctccgtctgaacatgggaatttctctagcttcattagcagtttgtcaactaaggatgatcatagcactgcgtcaccatctggaaatatcattgttgacattcagaacaagggagctgagaacattgttccttccactgattcatcacttgcttcagatgttggtgagagctcccgttcagtgctctatccagttgatacgactactgtgaactcagtgtcatccacgtctacagtggctggtaccccagttgaactttctgggtatcaggagggtgctccagtggtatgttcttcatgtttaacagctgatgttcagaacaatgtgacatctgatatgccaggtgcttcggataacgaggtgcttcctccagaacctgctgatgtctttttgcagtctgaaagaatcactgcaccagctgtatgtggttcagtgcaaccaattggcaataaatgcacaatgagttctggggatgaggttagaagtggctccaatgaagactcctgtccaaaatcttcaggaaaacaaactggagatgaaaccctaatggaaaatgaacctgtgaaggcagtagcagtggaagaaaatataggtcgtgatgacagtttgtccatttcttatcaactagcctgtaagacagtagcagaactgcctgttacagatgcccagtcgcctgctagttcttctggtcattttattgctggaaattttgacaacacacatccaacatcttccgccacttcgtttcttctgacagccatcaagt

SEQ ID NO: 222164 - DNA, 2115 bp, Zea Mays
ctattctccaagtcccaatccaccgacgaattccaaaccctgcctaggacctcggcgccactcgccgcacgtcgtccacgtccgcctccaccccaatccgatggggtatgaagagagcaaaaaacatctcctcagtctcagctaccctgagctgcaatgtttgtgcaaaaggtataaccttcctgctaagaagacccactctcagttagcaagttcgctcgcctcgctgcttgaggcatctccatctcctgctcctcctcctgtccaattagcaaatatgaaagaagcatccacatgcaatcatgctaacaacaaaagaggcccatacaatggcagggatgatggtaaaccacttgtgcatgcgaaacatcaaaaaggagatcagacacctgttgatgaaacatctaaaaaggggattgacactggtacgagtatacctccagtttctatgaaccatggaagaccagaatatcatggccatctatcttctgacctgagaactgctcataatttacagtcccaatgtgacgtgggaattgcaactaatacaacaaatctagaatttgttggcaaacatgattgttcacctgctaacgtaattgatcaaatctgtccccctattattcaaaaatatccttctaatggtaatggtcaggcttccactaagttcggccgtatgaatgataacacagaaaagggttgtcggctgtctgataagatatcagcaaatgctgctgctgttcaattttctgtaatgtcagatgagggcattgatcttcttgttgatctgaactccagttcagcaacatgggccaagaacttcatggcagaaatgcacattacccctccgtctgaacatgggaatttctctagcttcattagcagtttgtcaactaaggatgatcatagcactgcgtcaccatctggaaatatcattgttgacattcagaacaagggagctgagaacattgttccttccactgattcatcacttgcttcagatgttggtgagagctcccgttcagtgctctatccagttgatacgactactgtgaactcagtgtcatccacgtctacagtggctggtaccccagttgaactttctgggtatcaggagggtgctccagtggtatgttcttcatgtttaacagctgatgttcagaacaatgtgacatctgatatgccaggtgcttcggataacgaggggatgaggttagaagtggctccaatgaagactcctgtccaaaatcttcaggaaaacaaactggagatgaaaccctaatggaaaatgaacctgtgaaggcagtagcagtggaagaaaatataggtcgtgatgacagtttgtccatttcttatcaactagcctgtaagacagtagcagaactgcctgttacagatgcccagtcgcctgctagttcttctggtcattttattgctggaaattttgacaacacacatccaacatcttccgccacttcggacaatgctattaattctctgacttcaaagttcggtgcagagctagcacaaagtcatgattctacggacaaaaagggacagaatgatgctgaggaggttgaggagttagagagtatgacaccagcagcctatagtgaacctcccagaaatatacaacttagcttacgaagtgcttccgctaaggtcaagccttctacactaccaagacgatcagcgaggcttcttcctaagcatctgtttcctctggtctgcgacttgttggatgatgtcttctgtgttttatatcaatgcaatataactattggtgcaggagcaatgatatttccgattccacaagttaaccggaaatcttcatgggtgatagctgtgtcagattctttcgcgcatagtgatagctgtgtcagtttacccccattttcttgggcatcacttgtctcaaatgaagttcattggaggttcgcaatttatgttccgtggcatcacaccggcacctacctatttgctggttatctaattttacatacggaggacctggattgccacctgctaattgctatcgcggccttgaccaaaaaggtaagagcatcccttctcaatcagagccgtggaaccatagccaaatttgccaagtgttaa

SEQ ID NO: 222165 - DNA, 1592 bp, Zea Mays
atggggtatgaagagagcaaaaaacatctcctcagtctcagctaccctgagctgcaatgtttgtgcaaaaggtataaccttcctgctaagaagacccactctcagttagcaagttcgctcgcctcgctgcttgaggcatctccatctcctgctcctcctcctgtccaattagcaaatatgaaagaagcatccacatgcaatcatgctaacaacaaaagaggcccatacaatggcagggatgatggtaaaccacttgtgcatgcgaaacatcaaaaaggagatcagacacctgttgatgaaacatctaaaaaggggattgacactggtacgagtatacctccagtttctatgaaccatggaagaccagaatatcatggccatctatcttctgacctgagaactgctcataatttacagtcccaatgtgacgtgggaattgcaactaatacaacaaatctagaatttgttggcaaacatgattgttcacctgctaacgtaattgatcaaatctgtccccctattattcaaaaatatccttctaatggtaatggtcaggcttccactaagttcggccgtatgaatgataacacagaaaagggttgtcggctgtctgataagatatcagcaaatgctgctgctgttcaattttctgtaatgtcagatgagggcattgatcttcttgttgatctgaactccagttcagcaacatgggccaagaacttcatggcagaaatgcacattacccctccgtctgaacatgggaatttctctagcttcattagcagtttgtcaactaaggatgatcatagcactgcgtcaccatctggaaatatcattgttgacattcagaacaagggagctgagaacattgttccttccactgattcatcacttgcttcagatgttggtgagagctcccgttcagtgctctatccagttgatacgactactgtgaactcagtgtcatccacgtctacagtggctggtaccccagttgaactttctgggtatcaggagggtgctccagtggtatgttcttcatgtttaacagctgatgttcagaacaatgtgacatctgatatgccaggtgcttcggataacgaggtgcttcctccagaacctgctgatgtctttttgcagtctgaaagaatcactgcaccagctgtatgtggttcagtgcaaccaattggcaataaatgcacaatgagttctggggatgaggttagaagtggctccaatgaagactcctgtccaaaatcttcaggaaaacaaactggagatgaaaccctaatggaaaatgaacctgtgaaggcagtagcagtggaagaaaatataggtcgtgatgacagtttgtccatttcttatcaactagcctgtaagacagtagcagaactgcctgttacagatgcccagtcgcctgctagttcttctggtcattttattgctggaaattttgacaacacacatccaacatcttccgccacttcggtctcatgattctattctagtacatatttcagttcaggttccctgctgtaatgtttgaagatgttttggagtttggacaaatagctatgggccattgtttgtta

SEQ ID NO: 222166 - DNA, 2372 bp, Zea Mays
cgtgtcctcgtggcttggcagtgtcgatcgctgatcccaccggctgatagagttggcggccgggagagtgagtcagggatggcgtcggagccggtggcgcgggcggtggcggaggaggtgggccgctggggcagcatgaagcagacgggggtgaccctgcggtacatgatggagttcggctcccgccccacccagcgcaacctgctcctctccgcgcagttcctgcacaaggagctccccatccgcttcgcgcgccgcgcgctcgagctcgactcgctgcccttcggcctctccaacaagcccgccatcctcaaggtgcgggactggtacttggactcattccgggacatcagatacttccctgaagtgaggagccggaacgacgagctcgctttcacgcagatgatcaatatggtcaaggtgcggcataacaatgtggttccaaccatggccttgggagtgcagcagctgaagaaggagctgggccgctcaaggaaggttccattcgagttcgatgagatcgacgagttccttgaccggttctacatgtcaaggattggcatccgcatgctgatagggcagcatgtggctttgcatgaccctaaaccggagcctggtgttataggcctcatcaatacaagattatccccaatccaggtggctcaagctgcttgtgaagatgcccgttctgtctgtttaagggaatatggatcagctcctgatattaacatttatggcgatccaaattttacgtttccatacgtcacattacacctacacctgatgttatttgaattggtgaagaactctctccgcgcggtgcaagaacggtatatgaactctgataaagatgttcccccggttagaattatagttgctgatggagaagaggatgttactatcaaggttagcgatgaaggtggcgggataccaagaagcggcctcccgagaattttcacgtatctgtacagcaccgcaaagaatcctcctgagctagatagacctaatactgaaggggtaactatggctgggtatggtttcgggctcccgatcagccgactctacgctcggtattttggcggcgacctgcaaatcatctcgatggaaggatacggtaccgatgcttacctccacttgtcgcggctgggagattcagaggagcccttgccttgacgacatatttttgtggacctccagtaccactcttctcctgtaactatgtggctcgatcttcttgtaatccagtgctggcctcgacctatatatatatagctatagttggcctcgaccttatttcactgcctgctctgctgcattgtgaacacagcactgctacgtcctgcttacttccgccatgtactatgatctctctgccggccttcaacaggaaaaaagaaaggacgagggaaatcatggggagcagctaggcggatgagcgcattctcggggaagaagccaccaggattgtcacggacagtctgagtgatcgtgcggcggctgggattgcttcacggcatgagagtcgcttgggatgggacaccagaagacctgagactgtcaaggccttcaacgctccgtgggcgcaacgcaagactggcagagcttcgtcctgcttaatgatgcatccattgatggtcctccttcggaaagcatcggtgtcaggcaatatgcaagctgttagttagttcatcgaggggcagatgacagtcacgccaagttcagctcgcttccagacggttcgcggacaaacagccgctccttggtgcggtggcggcatgaatcgcgacttgcaaggcggaccctgcttgctgacgctggcagggagaagctgaccccgtcccggccatccctgtccatatttccatcacctgttggctgttgcatcgatccccagatgggaggtcagtgagatcgacaggaagcgaagcgtcggcaattcctgagaggtcacttgcgcactgatatgtcggacaagaaccgtgacggagaagcgtctctgttcagtagttcagtgccatccaatccactttatatatacgtcaattcaggtgtcccagccgcagccaatcaagcaaaataagcagtagccaaattcaggcagtgtcacgggctcaggctgcatttcattttacagcaggcaagggcaaggcagccaagcagcttcggttgctgacaacatctcagctcatccactgcctgtacacgagttttgtcggtcactgccacgtgacgctcacgtgctggggctggatgtagagtagtagaatagaaccttctattctcctggctcctatgctgccgtttgagattttgtgccatcctagagaaatgacgcaccaacggttcagtcgtgccattgtaagctccatccg

SEQ ID NO: 222167 - DNA, 807 bp, Zea Mays
ccgctgctcatactcttaagaccgatccgacccaaagccaaacccgattgccctcgtagtcgtttgtcatcgcgcgaccgattaccccgccgccgccgcgtcggcagcggcgatggcgtcgtcgttgtcgcgggcgctgctccgccgcgtcgcagaactggctagaggacgcctccgcgccaaccaccgcatgctctcatccgcgtcgtccaccgccgccatcgagagggcttcgcagttgccggcggaggcccaggccgtgcgcatgacggagggttgcgtgcggatgctgcgcttaagcgttgaagctggtggatgttctgggttccaatattctttcgctcttgatgacaagaaaaatgcagatgacaggttttttgagactgatggtgttagattggtcgtggatgacatctcatataatttcgtaaaaggtgccactgtggattacgaggaggaacttatacgttcaacatttgtggtttcaacaaatcccagtgctgttggaggctgcagttgcaagagttctttcatggtgaaatagcttcaatgttaccttgaagagatcaataaccggagttctgtagcgaaacatacgctttagatctgagtgtacaattggtattttttggtagctcttgagatgtttctttttgagttttattaccttaaagagaacaataaccagaaatatcaatcacaaactgtctggttcaatttgtatctctaacatgtgaaatgatgacaaatttatgtacatgtaatcttatggctattaacatttgactctatgtcgcttttacaaca

SEQ ID NO: 222168 - DNA, 994 bp, Zea Mays
caacacatgatcaagacgtctttgtttctctcctgacgagaaaccttgcaatggatttgaagaagcttttggacaatgcagggaacttgatcaacaccctttgcaccgatgtgaagcaaagtggtggacaataccacgtcctgttgataattgcagatgggaaggacgccatggcagccttgccctgctcccccaacagcgcccacctgcccctttccttgcgcgacgcgagatggatcggcgaatccatggcagcttggtaagtctgcctctcgtcctccctggttctccgttgcacgatacccgcccccagcccctgctccgatgtggtgaggtgccccctccccgccccgatgcaccgaagatgtggagcaaatccacctcaatgatgcacgccgacagcgggctcgttggcacgtctaggtggagcacgacgttctttttgaaaatggtttggtcatacacaaacttgtggggtgaaatttcggctttggcctccttccgcgaggtggatttggatagcgcggcgcagaaaaaatggcggcttcagctctccacctctgccgcctccccaagccacggcgggtgtgaagcttcagcagaggcagttgcgcccgatgagccatgtgggaccttttactgtgcccttcttcttctactcccttctcgttgcattcctgttcgtttcgcttgtgcgaatggcagagctacgtctactggggtgctgccctgtgtgccccacccaggacacagtatgctgctcaccatggcgctgcgctgtgattcagcagagtggcaagatgcaaggcttgccgagctgcctagccattataatgcttgatccttgaattgaagtcaattgatttccgatttaataaggcacagtttgtttgagcttctgctgtcgtcttcacatattttaattttaatgcatgtggggattactaaaattgttgtgcagacatgtgttttgagattgtgtgctatttgtgcc

SEQ ID NO: 222169 - DNA, 304 bp, Zea Mays
caacacatgatcaagacgtctttgtttctctcctgacgagaaaccttgcaatggatttgaagaagcttttggacaatgcagggaacttgatcaacaccctttgcaccgatgtgaagcaaagtggtggacaataccacgtcctgttgataattgcagatgggaaggacgccatggcagccttgccctgctcccccaacagcgcccacctgcccctttccttgcgcgacgcgagatggatcggcgaatccatggcagcttggcagggtggtctatctcaaagattttcgaaagttgtttcttatta

SEQ ID NO: 222170 - DNA, 256 bp, Zea Mays
caacacatgatcaagacgtctttgtttctctcctgacgagaaaccttgcaatggatttgaagaagcttttggacaatgatcaacaccctttgcaccgatgtgaagcaaagtggtggacaataccacgtcctgttgataattgcagatgggaaggacgccatggcagccttgccctgctcccccaacagcgcccacctgcccctttccttgcgcgacgcgagatggatcggcgaatccatggcagcttggatgctct

SEQ ID NO: 222171 - DNA, 5792 bp, Zea Mays
gcgaaccaacagccccgtctctctcagcctcctccggtcctcccccaccactgtgcgtctgtgcctagggttcgtacggggacgacaggacagcggcctccgccgtccctccgccgccgtaggtgccctgttcgtgccgcacgggcgctgccaaagcgccctccatatctggcatgcctctgagccgccgcagccgcgtcaccagagggttcgcagacaaggtccaggtggtgtattagacatgtctttcaggaagcgccaaccttccagtaacggagcttccattaatttagctcccctgggttttccaagtcaggaacttgagaaggttaatcctgtaaattcagtgatgtcaaccgattttgaatccatggatggtgttgatattgatatgagggaagtttactttctcattatgcattttttatctcatggtccattcaaacggacctttggagaattgtgcaatgaactcctagaacatcaactgctacctagaagataccatgcttggtattcacgtggtggtttccatagtggcgaagaaaatgatgatggcatatcactccctttggattatgtaaagctagctgagaggtacccccacattggtaaagaccacttggtgaagctattaaagcaactgatggctagttcttatcacccacacaacttgattggaagagtttctccaaatgctgctgatgtcccaacacttcttggctccaactccttttcacttcttccatctgacaggcaagataagggaactcccaggctgccaagttatcttcgttggcctcacattcagactgatcaagttcatggtctaagtttgagagagataggtggtttcactaagcattgtcgagctccctctgtacgtgcatcttgctatgccatcgcgaagccatccacccttgttgaaaagatgcaaatcataaagagattgagggggcatcaaaatgctgtgtattgtgctacctttgatcgcacagggcgttatgttattactggttctgatgaccgccttgttaaaatatgggcgatggaaacagcgttctgcctggctagctgccggggccatgaaggtgatattaccgatcttgcagtgagttccaataattctgtggtagcatcttcatctaatgatttcattattagagtgtggcgtatgcctgatggaatgccagtctcagtgctcaaggggcatacaggggcagttactgctattgcatttagtccaaggccaggtgctgctttccagctgttgtcgtcatcagatgatgggacatgcaggatttgggatgccagatactctcaacaacctccaagactgtatacaccaaagcccccagatgttgcccctggtaagagtggtgatgcatcttccagcgccgctcaagttcagccaacaaatcaccagatcttatgttgtgcatttaatgctaatggaaccgtgtttgtcactggcagctcggacacttatgcaagggtctggaatgcttgcaagagttcttctgatgaacatgagcaaccgattcatgagatggatctattatgtgggcatgaaaatgatgtaaactatgtgcagtttagtggatgtgcagttgcatcaagatctttttcatctgattccagtcatacctctaaggaagaaaatagcctgaagttaagaaattcttggttcacgcataatattgttacctgctcccgtgatggcagtgcaattatatgggttccacgatctcggaggtcacatggaaagattggacgttggacgcgtgcttaccatcttaaagttcccccacctccaatggctcctcaaccacctcgaggtggtcctcgtcaaagataccagccaactcctcgtggtgtcaatatgatagtttggagtctggacaaccgctttgtgcttgctgctatcatggattgcagaatttgcgtatggaatgcttctgatgggagcttggtgcattcactgattggccataaggaatcaacgtttgtgctagatgtgcatccgttcaatcctcgtatagcaatgagtgctggatatgatgggaagacgatcatctgggatatatgggaagggaaacctgttcagatctatgaaacaggacaatttaaactagttgatgggaagttctctccggatggtacatcacttattttatcagatgaagttgggcgagtattcattattggaactgggcaaggagagtcccagaaagatgcaaaatatgatcagttcttccttggagactatcggcctctcattcgtgataccaatggaagtgtcattgatcaggaaacacagcttgcaccatacaggagaaatatgcaagaccttttgtgcgacgctggtatgataccatatccagagcccttccagagtatgtaccagaaacgccggttgggtacccttggtctcgagtggcggcctccctctgtaaattttgctgttggccccacttacaatgcaacaactggtgaataccaaactatcccaattattgatccggataggtgggaaccgcttccagagataacagatttcattgagcttgaacctgaaaatgaagttatctctgacgatactgattctgagtacaatggcatggatgagtattcaagtgaaggagaacaggatattatgagtggtgattcttcaggtacttcatattcgagtggagaaattgatgcagataaccctgatagtgctcatctccgccgatcaagaagaaagaagaaaaaatctgaggctgatcttgttacttcatctggtcggcgagtcattaggaaaagatttttggatgatcctggtgtagccacagtgtcaaggccacatagaggaaggaaatctaggaatggatgttctagtaaaaagaaaagatcccctaaatccaggggtttgcgacctcggagacgtgctgctgaaaccgcattaattactttcccaaagaaaggagtttcaacagaagaggatgaagatgactccgagagtttctcagatagtgaattgaacacggatagcactgaagctgaacagttagaatggagtggtcagttaagaactagaagagagattaactccccatttgacatcgatgatgttacagatccttctcagtttactgataataaggaaaattctggaactggtaagaaactagttctcagaataccacgacgtgatttaagaactcaatttcctttaggaagcggaaaagcagaatgctccatacaggataaagcagtgaagtctctttctctagctaatcatgaaccagttgagcacgaactgactattgaaccaggacattcccctgcctccaaggctgaattaacaattgatggtgatctgcatgatagttctgctgtttgcagtaataactcaattaggtggggtgaggttaagatgcgatcctcaaagcgttgcaagtacagtgagccagctggaggtttgtggtcctcttcaaataacgttgctttgcaggatatcgagggatcgagcagtcagcagatacctcatgaatatggcgatggcatccagccaagtgttgtgcaaaacgtacaagaagtgcaacatggaacaattctagataacattccggaaaacaacagtactgatgaacacactagagaaaattttggggatttagaaaagatagctaacaatattaatgctcatgcagacggagtgaatgacactgtacaagttcccaatacttctcagcctcaactaaaagttaagtttaagtcaagaggctctgcagatgcagtaggaaatatcatgaactccaagcatgtcaaagattcagtgcagtgtggcgatgattcttccatcaatcaaccaagaaatgctgacttctatattgtgcccaaaagttctcaggaatgcctagataaaagcactagtttgcatgattcaaaaaaaccgtacttggatgcttcaaagaagtacactgcagtgtacaaaaggtcaaagcgaaagaacaagaaaaaaatggattcagatgaatgtccgaacgaggatagcacttctatctccaatgacgatggtggataccaacctgcagaatacagtcctgttgcagctgcaagcagtagattgagaagaagtgctaggaagtcatttgcatacaatatcaatggtacaacacaggatgatatctcggaagtgaaagtttcttacggttcccatgaagcatcaactagtggaagacgagttgtcacagatgtgcgtgaagggatgtggcgacaaaactcaagaagtgttggtttaaggtctgctaggaacaaaagagaaagtaacagcttccttgatacacatccattgggtagaaggcaccaggtttcttttaagtattcatggttaatgttgcttgagcatgaagatagctaccgttatattcctcaactcgatgatgaggttatgtacttggggcagggccatgaggaatatcttaaacaagtgcaatcatctgaattttgcccttggaaccggataaaaggacttaaagctgtagaactttgcaaaatacagggtcttgattatgccacctacagaggatctggtgaaagctgctgtaaattaaccattgaatttgttgattgcacgtccagtggatttggcaaaacatttatgatcacgttgcgtgagctggtcaactttccagattttcttgtggagagaacaaggtacgaagctgctatggagcggaactggacccacagagacaagtgcaaagtctggtggagggacgaagaaggacaggtaggaggaacttggtgggagggacgggtgatggcagtaacacctaaatcacctgattttcctgagagtccatgggaaaaatatgtcatacagtataaggaggatggttctgatcacgctcatagcccctgggaacttcatgagacaggcagtttatgggatccatggaaacatccacatatggatctcacggttcgagataaattgttatcagaaatggaaaatttacaggaaatgtcacacagggatcaggatcattatggtgtttttaaactggacaaggttgcagaaaagtcagatttcatcaacaggtttcctgttcaattttctattgaggtgatcaaggcaagattagcgaacaaatattacagaactctgggggctgtcagacatgataccactgtgatgctttcaaatgcagaatcttacttttcaaagagcagtgaaatgaccaaaaagatccgcaagctctctgagttgctcgaccagatcttttcatcactgtagggaacattgcttgatgcctgattgacaatttcccttttcgtttctgcaaaaaaaatttggccttaggcatcgagatgatttttactggtcctactgaggcattagagaattagccaaagtagttctcaggacagaaagggtttccggtgtagctccaaccagttaaactagttgctgatacaaagtgctcgttgctaacacatttgaccgtttgatctgttgtcaagatacaatggttcatcctattggacatgaaatattggggttttgttagagaagatgccaaggtgtaaatctggtggaggaaatgcattaactgataatttcattttgtacagacaccctcagcaataaaaggaaaaaaagaaatgtgcaacgttgtctattacattttggggtgacacatggtaactataatataggaaattagtggcacttttttcagcgtgcccaggcacgtattttatgttttttttatgacatcttttttggtcgcaagctatat

SEQ ID NO: 222172 - DNA, 5514 bp, Zea Mays
ctcagcctcctccggtcctcccccaccactgtgcgtctgtgcctagggttcgtacggggacgacaggacagcggcctccgccgtccctccgccgccgtaggtgccctgttcgtgccgcacgggcgctgccaaagcgccctccatatctggcatgcctctgagccgccgcagccgcgtcaccagagggttcgcagacaaggtccaggtggtgtattagacatgtctttcaggaagcgccaaccttccagtaacggagcttccattaatttagctcccctgggttttccaagtcaggaacttgagaaggttaatcctgtaaattcagtgatgtcaaccgattttgaatccatggatggtgttgatattgatatgagggaagtttactttctcattatgcattttttatctcatggtccattcaaacggacctttggagaattgtgcaatgaactcctagaacatcaactgctacctagaagataccatgcttggtattcacgtggtggtttccatagtggcgaagaaaatgatgatggcatatcactccctttggattatgtaaagctagctgagaggtacccccacattggtaaagaccacttggtgaagctattaaagcaactgatggctagttcttatcacccacacaacttgattggaagagtttctccaaatgctgctgatgtcccaacacttcttggctccaactccttttcacttcttccatctacctttgatcgcacagggcgttatgttattactggttctgatgaccgccttgttaaaatatgggcgatggaaacagcgttctgcctggctagctgccggggccatgaaggtgatattaccgatcttgcagtgagttccaataattctgtggtagcatcttcatctaatgatttcattattagagtgtctcagtgctcaaggggcatacaggggcagttactgctattgcatttagtccaaggccaggtgctgctttccagctgttgtcgtcatcagatgatgggacatgcaggatttgggatgccagatactctcaacaacctccaagactgtatacaccaaagcccccagatgttgcccctggtaagagtggtgatgcatcttccagcgccgctcaagttcagccaacaaatcaccagatcttatgttgtgcatttaatgctaatggaaccgtgtttgtcactggcagctcggacacttatgcaagggtctggaatgcttgcaagagttcttctgatgaacatgagcaaccgattcatgagatggatctattatgtgggcatgaaaatgatgtaaactatgtgcagtttagtggatgtgcagttgcatcaagatctttttcatctgattccagtcatacctctaaggaagaaaatagcctgaagttaagaaattcttggttcacgcataatattgttacctgctcccgtgatggcagtgcaattatatgggttccacgatctcggaggtcacatggaaagattggacgttggacgcgtgcttaccatcttaaagttcccccacctccaatggctcctcaaccacctcgaggtggtcctcgtcaaagataccagccaactcctcgtggtgtcaatatgatagtttggagtctggacaaccgctttgtgcttgctgctatcatggattgcagaatttgcgtatggaatgcttctgatgggagcttggtgcattcactgattggccataaggaatcaacgtttgtgctagatgtgcatccgttcaatcctcgtatagcaatgagtgctggatatgatgggaagacgatcatctgggatatatgggaagggaaacctgttcagatctatgaaacaggacaatttaaactagttgatgggaagttctctccggatggtacatcacttattttatcagatgaagttgggcgagtattcattattggaactgggcaaggagagtcccagaaagatgcaaaatatgatcagttcttccttggagactatcggcctctcattcgtgataccaatggaagtgtcattgatcaggaaacacagcttgcaccatacaggagaaatatgcaagaccttttgtgcgacgctggtatgataccatatccagagcccttccagagtatgtaccagaaacgccggttgggtacccttggtctcgagtggcggcctccctctgtaaattttgctgttggccccacttacaatgcaacaactggtgaataccaaactatcccaattattgatccggataggtgggaaccgcttccagagataacagatttcattgagcttgaacctgaaaatgaagttatctctgacgatactgattctgagtacaatggcatggatgagtattcaagtgaaggagaacaggatattatgagtggtgattcttcaggtacttcatattcgagtggagaaattgatgcagataaccctgatagtgctcatctccgccgatcaagaagaaagaagaaaaaatctgaggctgatcttgttacttcatctggtcggcgagtcattaggaaaagatttttggatgatcctggtgtagccacagtgtcaaggccacatagaggaaggaaatctaggaatggatgttctagtaaaaagaaaagatcccctaaatccaggggtttgcgacctcggagacgtgctgctgaaaccgcattaattactttcccaaagaaaggagtttcaacagaagaggatgaagatgactccgagagtttctcagatagtgaattgaacacggatagcactgaagctgaacagttagaatggagtggtcagttaagaactagaagagagattaactccccatttgacatcgatgatgttacagatccttctcagtttactgataataaggaaaattctggaactggtaagaaactagttctcagaataccacgacgtgatttaagaactcaatttcctttaggaagcggaaaagcagaatgctccatacaggataaagcagtgaagtctctttctctagctaatcatgaaccagttgagcacgaactgactattgaaccaggacattcccctgcctccaaggctgaattaacaattgatggtgatctgcatgatagttctgctgtttgcagtaataactcaattaggtggggtgaggttaagatgcgatcctcaaagcgttgcaagtacagtgagccagctggaggtttgtggtcctcttcaaataacgttgctttgcaggatatcgagggatcgagcagtcagcagatacctcatgaatatggcgatggcatccagccaagtgttgtgcaaaacgtacaagaagtgcaacatggaacaattctagataacattccggaaaacaacagtactgatgaacacactagagaaaattttggggatttagaaaagatagctaacaatattaatgctcatgcagacggagtgaatgacactgtacaagttcccaatacttctcagcctcaactaaaagttaagtttaagtcaagaggctctgcagatgcagtaggaaatatcatgaactccaagcatgtcaaagattcagtgcagtgtggcgatgattcttccatcaatcaaccaagaaatgctgacttctatattgtgcccaaaagttctcaggaatgcctagataaaagcactagtttgcatgattcaaaaaaaccgtacttggatgcttcaaagaagtacactgcagtgtacaaaaggtcaaagcgaaagaacaagaaaaaaatggattcagatgaatgtccgaacgaggatagcacttctatctccaatgacgatggtggataccaacctgcagaatacagtcctgttgcagctgcaagcagtagattgagaagaagtgctaggaagtcatttgcatacaatatcaatggtacaacacaggatgatatctcggaagtgaaagtttcttacggttcccatgaagcatcaactagtggaagacgagttgtcacagatgtgcgtgaagggatgtggcgacaaaactcaagaagtgttggtttaaggtctgctaggaacaaaagagaaagtaacagcttccttgatacacatccattgggtagaaggcaccaggtttcttttaagtattcatggttaatgttgcttgagcatgaagatagctaccgttatattcctcaactcgatgatgaggttatgtacttggggcagggccatgaggaatatcttaaacaagtgcaatcatctgaattttgcccttggaaccggataaaaggacttaaagctgtagaactttgcaaaatacagggtcttgattatgccacctacagaggatctggtgaaagctgctgtaaattaaccattgaatttgttgattgcacgtccagtggatttggcaaaacatttatgatcacgttgcgtgagctggtcaactttccagattttcttgtggagagaacaaggtacgaagctgctatggagcggaactggacccacagagacaagtgcaaagtctggtggagggacgaagaaggacaggtaggaggaacttggtgggagggacgggtgatggcagtaacacctaaatcacctgattttcctgagagtccatgggaaaaatatgtcatacagtataaggaggatggttctgatcacgctcatagcccctgggaacttcatgagacaggcagtttatgggatccatggaaacatccacatatggatctcacggttcgagataaattgttatcagaaatggaaaatttacaggaaatgtcacacagggatcaggatcattatggtgtttttaaactggacaaggttgcagaaaagtcagatttcatcaacaggtttcctgttcaattttctattgaggtgatcaaggcaagattagcgaacaaatattacagaactctgggggctgtcagacatgataccactgtgatgctttcaaatgcagaatcttacttttcaaagagcagtgaaatgaccaaaaagatccgcaagctctctgagttgctcgaccagatcttttcatcactgtagggaacattgcttgatgcctgattgacaatttcccttttcgtttctgcaaaaaaaatttggccttaggcatcgagatgatttttactggtcctactgaggcattagagaattagccaaagtagttctcaggacagaaagggtttccggtgtagctccaaccagttaaactagttgctgatacaaagtgctcgttgctaacacatttgaccgtttgatctgttgtcaagatacaatggttcatcctattggacatgaaatattggggttttgttagagaagatgccaaggtgtaaatctggtggaggaaatgcattaactgataatttcattttgtacagacaccctcagcaataaaaggaaaaaaagaaatgtgcaacgttgtctattacattttggggtgacacatggtaactataatataggaaattagtggcacttttttcagcgtgcccaggcacgtattttatgttttttttatgacatcttttttggtcgcaagctatat

SEQ ID NO: 222173 - DNA, 5743 bp, Zea Mays
cagcctcctccggtcctcccccaccactgtgcgtctgtgcctagggttcgtacggggacgacaggacagcggcctccgccgtccctccgccgccgtaggtgccctgttcgtgccgcacgggcgctgccaaagcgccctccatatctggcatgcctctgagccgccgcagccgcgtcaccagagggttcgcagacaaggtccaggtggtgtattagacatgtctttcaggaagcgccaaccttccagtaacggagcttccattaatttagctcccctgggttttccaagtcaggaacttgagaaggttaatcctgtaaattcagtgatgtcaaccgattttgaatccatggatggtgttgatattgatatgagggaagtttactttctcattatgcattttttatctcatggtccattcaaacggacctttggagaattgtgcaatgaactcctagaacatcaactgctacctagaagataccatgcttggtattcacgtggtggtttccatagtggcgaagaaaatgatgatggcatatcactccctttggattatgtaaagctagctgagaggtacccccacattggtaaagaccacttggtgaagctattaaagcaactgatggctagttcttatcacccacacaacttgattggaagagtttctccaaatgctgctgatgtcccaacacttcttggctccaactccttttcacttcttccatctgacaggcaagataagggaactcccaggctgccaagttatcttcgttggcctcacattcagactgatcaagttcatggtctaagtttgagagagataggtggtttcactaagcattgtcgagctccctctgtacgtgcatcttgctatgccatcgcgaagccatccacccttgttgaaaagatgcaaatcataaagagattgagggggcatcaaaatgctgtgtattgtgctacctttgatcgcacagggcgttatgttattactggttctgatgaccgccttgttaaaatatgggcgatggaaacagcgttctgcctggctagctgccggggccatgaaggtgatattaccgatcttgcagtgagttccaataattctgtggtagcatcttcatctaatgatttcattattagagtgtctcagtgctcaaggggcatacaggggcagttactgctattgcatttagtccaaggccaggtgctgctttccagctgttgtcgtcatcagatgatgggacatgcaggatttgggatgccagatactctcaacaacctccaagactgtatacaccaaagcccccagatgttgcccctggtaagagtggtgatgcatcttccagcgccgctcaagttcagccaacaaatcaccagatcttatgttgtgcatttaatgctaatggaaccgtgtttgtcactggcagctcggacacttatgcaagggtctggaatgcttgcaagagttcttctgatgaacatgagcaaccgattcatgagatggatctattatgtgggcatgaaaatgatgtaaactatgtgcagtttagtggatgtgcagttgcatcaagatctttttcatctgattccagtcatacctctaaggaagaaaatagcctgaagttaagaaattcttggttcacgcataatattgttacctgctcccgtgatggcagtgcaattatatgggttccacgatctcggaggtcacatggaaagattggacgttggacgcgtgcttaccatcttaaagttcccccacctccaatggctcctcaaccacctcgaggtggtcctcgtcaaagataccagccaactcctcgtggtgtcaatatgatagtttggagtctggacaaccgctttgtgcttgctgctatcatggattgcagaatttgcgtatggaatgcttctgatgggagcttggtgcattcactgattggccataaggaatcaacgtttgtgctagatgtgcatccgttcaatcctcgtatagcaatgagtgctggatatgatgggaagacgatcatctgggatatatgggaagggaaacctgttcagatctatgaaacaggacaatttaaactagttgatgggaagttctctccggatggtacatcacttattttatcagatgaagttgggcgagtattcattattggaactgggcaaggagagtcccagaaagatgcaaaatatgatcagttcttccttggagactatcggcctctcattcgtgataccaatggaagtgtcattgatcaggaaacacagcttgcaccatacaggagaaatatgcaagaccttttgtgcgacgctggtatgataccatatccagagcccttccagagtatgtaccagaaacgccggttgggtacccttggtctcgagtggcggcctccctctgtaaattttgctgttggccccacttacaatgcaacaactggtgaataccaaactatcccaattattgatccggataggtgggaaccgcttccagagataacagatttcattgagcttgaacctgaaaatgaagttatctctgacgatactgattctgagtacaatggcatggatgagtattcaagtgaaggagaacaggatattatgagtggtgattcttcaggtacttcatattcgagtggagaaattgatgcagataaccctgatagtgctcatctccgccgatcaagaagaaagaagaaaaaatctgaggctgatcttgttacttcatctggtcggcgagtcattaggaaaagatttttggatgatcctggtgtagccacagtgtcaaggccacatagaggaaggaaatctaggaatggatgttctagtaaaaagaaaagatcccctaaatccaggggtttgcgacctcggagacgtgctgctgaaaccgcattaattactttcccaaagaaaggagtttcaacagaagaggatgaagatgactccgagagtttctcagatagtgaattgaacacggatagcactgaagctgaacagttagaatggagtggtcagttaagaactagaagagagattaactccccatttgacatcgatgatgttacagatccttctcagtttactgataataaggaaaattctggaactggtaagaaactagttctcagaataccacgacgtgatttaagaactcaatttcctttaggaagcggaaaagcagaatgctccatacaggataaagcagtgaagtctctttctctagctaatcatgaaccagttgagcacgaactgactattgaaccaggacattcccctgcctccaaggctgaattaacaattgatggtgatctgcatgatagttctgctgtttgcagtaataactcaattaggtggggtgaggttaagatgcgatcctcaaagcgttgcaagtacagtgagccagctggaggtttgtggtcctcttcaaataacgttgctttgcaggatatcgagggatcgagcagtcagcagatacctcatgaatatggcgatggcatccagccaagtgttgtgcaaaacgtacaagaagtgcaacatggaacaattctagataacattccggaaaacaacagtactgatgaacacactagagaaaattttggggatttagaaaagatagctaacaatattaatgctcatgcagacggagtgaatgacactgtacaagttcccaatacttctcagcctcaactaaaagttaagtttaagtcaagaggctctgcagatgcagtaggaaatatcatgaactccaagcatgtcaaagattcagtgcagtgtggcgatgattcttccatcaatcaaccaagaaatgctgacttctatattgtgcccaaaagttctcaggaatgcctagataaaagcactagtttgcatgattcaaaaaaaccgtacttggatgcttcaaagaagtacactgcagtgtacaaaaggtcaaagcgaaagaacaagaaaaaaatggattcagatgaatgtccgaacgaggatagcacttctatctccaatgacgatggtggataccaacctgcagaatacagtcctgttgcagctgcaagcagtagattgagaagaagtgctaggaagtcatttgcatacaatatcaatggtacaacacaggatgatatctcggaagtgaaagtttcttacggttcccatgaagcatcaactagtggaagacgagttgtcacagatgtgcgtgaagggatgtggcgacaaaactcaagaagtgttggtttaaggtctgctaggaacaaaagagaaagtaacagcttccttgatacacatccattgggtagaaggcaccaggtttcttttaagtattcatggttaatgttgcttgagcatgaagatagctaccgttatattcctcaactcgatgatgaggttatgtacttggggcagggccatgaggaatatcttaaacaagtgcaatcatctgaattttgcccttggaaccggataaaaggacttaaagctgtagaactttgcaaaatacagggtcttgattatgccacctacagaggatctggtgaaagctgctgtaaattaaccattgaatttgttgattgcacgtccagtggatttggcaaaacatttatgatcacgttgcgtgagctggtcaactttccagattttcttgtggagagaacaaggtacgaagctgctatggagcggaactggacccacagagacaagtgcaaagtctggtggagggacgaagaaggacaggtaggaggaacttggtgggagggacgggtgatggcagtaacacctaaatcacctgattttcctgagagtccatgggaaaaatatgtcatacagtataaggaggatggttctgatcacgctcatagcccctgggaacttcatgagacaggcagtttatgggatccatggaaacatccacatatggatctcacggttcgagataaattgttatcagaaatggaaaatttacaggaaatgtcacacagggatcaggatcattatggtgtttttaaactggacaaggttgcagaaaagtcagatttcatcaacaggtttcctgttcaattttctattgaggtgatcaaggcaagattagcgaacaaatattacagaactctgggggctgtcagacatgataccactgtgatgctttcaaatgcagaatcttacttttcaaagagcagtgaaatgaccaaaaagatccgcaagctctctgagttgctcgaccagatcttttcatcactgtagggaacattgcttgatgcctgattgacaatttcccttttcgtttctgcaaaaaaaatttggccttaggcatcgagatgatttttactggtcctactgaggcattagagaattagccaaagtagttctcaggacagaaagggtttccggtgtagctccaaccagttaaactagttgctgatacaaagtgctcgttgctaacacatttgaccgtttgatctgttgtcaagatacaatggttcatcctattggacatgaaatattggggttttgttagagaagatgccaaggtgtaaatctggtggaggaaatgcattaactgataatttcattttgtacagacaccctcagcaataaaaggaaaaaaagaaatgtgcaacgttgtctattacattttggggtgacacatggtaactataatataggaaattagtggcacttttttcagcgtgcccaggcacgtattttatgttttttttatgacatcttttttggtcgcaagctatat

SEQ ID NO: 222174 - DNA, 5724 bp, Zea Mays
ccccaccactgtgcgtctgtgcctagggttcgtacggggacgacaggacagcggcctccgccgtccctccgccgccgtaggtgccctgttcgtgccgcacgggcgctgccaaagcgccctccatatctggcatgcctctgagccgccgcagccgcgtcaccagagggttcgcagacaaggtccaggtggtgtattagacatgtctttcaggaagcgccaaccttccagtaacggagcttccattaatttagctcccctgggttttccaagtcaggaacttgagaaggttaatcctgtaaattcagtgatgtcaaccgattttgaatccatggatggtgttgatattgatatgagggaagtttactttctcattatgcattttttatctcatggtccattcaaacggacctttggagaattgtgcaatgaactcctagaacatcaactgctacctagaagataccatgcttggtattcacgtggtggtttccatagtggcgaagaaaatgatgatggcatatcactccctttggattatgtaaagctagctgagaggtacccccacattggtaaagaccacttggtgaagctattaaagcaactgatggctagttcttatcacccacacaacttgattggaagagtttctccaaatgctgctgatgtcccaacacttcttggctccaactccttttcacttcttccatctgacaggcaagataagggaactcccaggctgccaagttatcttcgttggcctcacattcagactgatcaagttcatggtctaagtttgagagagataggtggtttcactaagcattgtcgagctccctctgtacgtgcatcttgctatgccatcgcgaagccatccacccttgttgaaaagatgcaaatcataaagagattgagggggcatcaaaatgctgtgtattgtgctacctttgatcgcacagggcgttatgttattactggttctgatgaccgccttgttaaaatatgggcgatggaaacagcgttctgcctggctagctgccggggccatgaaggtgatattaccgatcttgcagtgagttccaataattctgtggtagcatcttcatctaatgatttcattattagagtgtggcgtatgcctgatggaatgccagtctcagtgctcaaggggcatacaggggcagttactgctattgcatttagtccaaggccaggtgctgctttccagctgttgtcgtcatcagatgatgggacatgcaggatttgggatgccagatactctcaacaacctccaagactgtatacaccaaagcccccagatgttgcccctggtaagagtggtgatgcatcttccagcgccgctcaagttcagccaacaaatcaccagatcttatgttgtgcatttaatgctaatggaaccgtgtttgtcactggcagctcggacacttatgcaagggtctggaatgcttgcaagagttcttctgatgaacatgagcaaccgattcatgagatggatctattatgtgggcatgaaaatgatgtaaactatgtgcagtttagtggatgtgcagttgcatcaagatctttttcatctgattccagtcatacctctaaggaagaaaatagcctgaagttaagaaattcttggttcacgcataatattgttacctgctcccgtgatggcagtgcaattatatgggttccacgatctcggaggtcacatggaaagattggacgttggacgcgtgcttaccatcttaaagttcccccacctccaatggctcctcaaccacctcgaggtggtcctcgtcaaagataccagccaactcctcgtggtgtcaatatgatagtttggagtctggacaaccgctttgtgcttgctgctatcatggattgcagaatttgcgtatggaatgcttctgatgggagcttggtgcattcactgattggccataaggaatcaacgtttgtgctagatgtgcatccgttcaatcctcgtatagcaatgagtgctggatatgatgggaagacgatcatctgggatatatgggaagggaaacctgttcagatctatgaaacaggacaatttaaactagttgatgggaagttctctccatgaagttgggcgagtattcattattggaactgggcaaggagagtcccagaaagatgcaaaatatgatcagttcttccttggagactatcggcctctcattcgtgataccaatggaagtgtcattgatcaggaaacacagcttgcaccatacaggagaaatatgcaagaccttttgtgcgacgctggtatgataccatatccagagcccttccagagtatgtaccagaaacgccggttgggtacccttggtctcgagtggcggcctccctctgtaaattttgctgttggccccacttacaatgcaacaactggtgaataccaaactatcccaattattgatccggataggtgggaaccgcttccagagataacagatttcattgagcttgaacctgaaaatgaagttatctctgacgatactgattctgagtacaatggcatggatgagtattcaagtgaaggagaacaggatattatgagtggtgattcttcaggtacttcatattcgagtggagaaattgatgcagataaccctgatagtgctcatctccgccgatcaagaagaaagaagaaaaaatctgaggctgatcttgttacttcatctggtcggcgagtcattaggaaaagatttttggatgatcctggtgtagccacagtgtcaaggccacatagaggaaggaaatctaggaatggatgttctagtaaaaagaaaagatcccctaaatccaggggtttgcgacctcggagacgtgctgctgaaaccgcattaattactttcccaaagaaaggagtttcaacagaagaggatgaagatgactccgagagtttctcagatagtgaattgaacacggatagcactgaagctgaacagttagaatggagtggtcagttaagaactagaagagagattaactccccatttgacatcgatgatgttacagatccttctcagtttactgataataaggaaaattctggaactggtaagaaactagttctcagaataccacgacgtgatttaagaactcaatttcctttaggaagcggaaaagcagaatgctccatacaggataaagcagtgaagtctctttctctagctaatcatgaaccagttgagcacgaactgactattgaaccaggacattcccctgcctccaaggctgaattaacaattgatggtgatctgcatgatagttctgctgtttgcagtaataactcaattaggtggggtgaggttaagatgcgatcctcaaagcgttgcaagtacagtgagccagctggaggtttgtggtcctcttcaaataacgttgctttgcaggatatcgagggatcgagcagtcagcagatacctcatgaatatggcgatggcatccagccaagtgttgtgcaaaacgtacaagaagtgcaacatggaacaattctagataacattccggaaaacaacagtactgatgaacacactagagaaaattttggggatttagaaaagatagctaacaatattaatgctcatgcagacggagtgaatgacactgtacaagttcccaatacttctcagcctcaactaaaagttaagtttaagtcaagaggctctgcagatgcagtaggaaatatcatgaactccaagcatgtcaaagattcagtgcagtgtggcgatgattcttccatcaatcaaccaagaaatgctgacttctatattgtgcccaaaagttctcaggaatgcctagataaaagcactagtttgcatgattcaaaaaaaccgtacttggatgcttcaaagaagtacactgcagtgtacaaaaggtcaaagcgaaagaacaagaaaaaaatggattcagatgaatgtccgaacgaggatagcacttctatctccaatgacgatggtggataccaacctgcagaatacagtcctgttgcagctgcaagcagtagattgagaagaagtgctaggaagtcatttgcatacaatatcaatggtacaacacaggatgatatctcggaagtgaaagtttcttacggttcccatgaagcatcaactagtggaagacgagttgtcacagatgtgcgtgaagggatgtggcgacaaaactcaagaagtgttggtttaaggtctgctaggaacaaaagagaaagtaacagcttccttgatacacatccattgggtagaaggcaccaggtttcttttaagtattcatggttaatgttgcttgagcatgaagatagctaccgttatattcctcaactcgatgatgaggttatgtacttggggcagggccatgaggaatatcttaaacaagtgcaatcatctgaattttgcccttggaaccggataaaaggacttaaagctgtagaactttgcaaaatacagggtcttgattatgccacctacagaggatctggtgaaagctgctgtaaattaaccattgaatttgttgattgcacgtccagtggatttggcaaaacatttatgatcacgttgcgtgagctggtcaactttccagattttcttgtggagagaacaaggtacgaagctgctatggagcggaactggacccacagagacaagtgcaaagtctggtggagggacgaagaaggacaggtaggaggaacttggtgggagggacgggtgatggcagtaacacctaaatcacctgattttcctgagagtccatgggaaaaatatgtcatacagtataaggaggatggttctgatcacgctcatagcccctgggaacttcatgagacaggcagtttatgggatccatggaaacatccacatatggatctcacggttcgagataaattgttatcagaaatggaaaatttacaggaaatgtcacacagggatcaggatcattatggtgtttttaaactggacaaggttgcagaaaagtcagatttcatcaacaggtttcctgttcaattttctattgaggtgatcaaggcaagattagcgaacaaatattacagaactctgggggctgtcagacatgataccactgtgatgctttcaaatgcagaatcttacttttcaaagagcagtgaaatgaccaaaaagatccgcaagctctctgagttgctcgaccagatcttttcatcactgtagggaacattgcttgatgcctgattgacaatttcccttttcgtttctgcaaaaaaaatttggccttaggcatcgagatgatttttactggtcctactgaggcattagagaattagccaaagtagttctcaggacagaaagggtttccggtgtagctccaaccagttaaactagttgctgatacaaagtgctcgttgctaacacatttgaccgtttgatctgttgtcaagatacaatggttcatcctattggacatgaaatattggggttttgttagagaagatgccaaggtgtaaatctggtggaggaaatgcattaactgataatttcattttgtacagacaccctcagcaataaaaggaaaaaaagaaatgtgcaacgttgtctattacattttggggtgacacatggtaactataatataggaaattagtggcacttttttcagcgtgcccaggcacgtattttatgttttttttatgacatcttttttggtcgcaagctatat

SEQ ID NO: 222175 - DNA, 5735 bp, Zea Mays
ccccaccactgtgcgtctgtgcctagggttcgtacggggacgacaggacagcggcctccgccgtccctccgccgccgtaggtgccctgttcgtgccgcacgggcgctgccaaagcgccctccatatctggcatgcctctgagccgccgcagccgcgtcaccagagggttcgcagacaaggtccaggtggtgtattagacatgtctttcaggaagcgccaaccttccagtaacggagcttccattaatttagctcccctgggttttccaagtcaggaacttgagaaggttaatcctgtaaattcagtgatgtcaaccgattttgaatccatggatggtgttgatattgatatgagggaagtttactttctcattatgcattttttatctcatggtccattcaaacggacctttggagaattgtgcaatgaactcctagaacatcaactgctacctagaagataccatgcttggtattcacgtggtggtttccatagtggcgaagaaaatgatgatggcatatcactccctttggattatgtaaagctagctgagaggtacccccacattggtaaagaccacttggtgaagctattaaagcaactgatggctagttcttatcacccacacaacttgattggaagagtttctccaaatgctgctgatgtcccaacacttcttggctccaactccttttcacttcttccatctgacaggcaagataagggaactcccaggctgccaagttatcttcgttggcctcacattcagactgatcaagttcatggtctaagtttgagagagataggtggtttcactaagcattgtcgagctccctctgtacgtgcatcttgctatgccatcgcgaagccatccacccttgttgaaaagatgcaaatcataaagagattgagggggcatcaaaatgctgtgtattgtgctacctttgatcgcacagggcgttatgttattactggttctgatgaccgccttgttaaaatatgggcgatggaaacagcgttctgcctggctagctgccggggccatgaaggtgatattaccgatcttgcagtgagttccaataattctgtggtagcatcttcatctaatgatttcattattagagtgtggcgtatgcctgatggaatgccagtctcagtgctcaaggggcatacaggggcagttactgctattgcatttagtccaaggccaggtgctgctttccagctgttgtcgtcatcagatgatgggacatgcaggatttgggatgccagatactctcaacaacctccaagactgtatacaccaaagcccccagatgttgcccctggtaagagtggtgatgcatcttccagcgccgctcaagttcagccaacaaatcaccagatcttatgttgtgcatttaatgctaatggaaccgtgtttgtcactggcagctcggacacttatgcaagggtctggaatgcttgcaagagttcttctgatgaacatgagcaaccgattcatgagatggatctattatgtgggcatgaaaatgatgtaaactatgtgcagtttagtggatgtgcagttgcatcaagatctttttcatctgattccagtcatacctctaaggaagaaaatagcctgaagttcacgcataatattgttacctgctcccgtgatggcagtgcaattatatgggttccacgatctcggaggtcacatggaaagattggacgttggacgcgtgcttaccatcttaaagttcccccacctccaatggctcctcaaccacctcgaggtggtcctcgtcaaagataccagccaactcctcgtggtgtcaatatgatagtttggagtctggacaaccgctttgtgcttgctgctatcatggattgcagaatttgcgtatggaatgcttctgatgggagcttggtgcattcactgattggccataaggaatcaacgtttgtgctagatgtgcatccgttcaatcctcgtatagcaatgagtgctggatatgatgggaagacgatcatctgggatatatgggaagggaaacctgttcagatctatgaaacaggacaatttaaactagttgatgggaagttctctccggatggtacatcacttattttatcagatgaagttgggcgagtattcattattggaactgggcaaggagagtcccagaaagatgcaaaatatgatcagttcttccttggagactatcggcctctcattcgtgataccaatggaagtgtcattgatcaggaaacacagcttgcaccatacaggagaaatatgcaagaccttttgtgcgacgctggtatgataccatatccagagcccttccagagtatgtaccagaaacgccggttgggtacccttggtctcgagtggcggcctccctctgtaaattttgctgttggccccacttacaatgcaacaactggtgaataccaaactatcccaattattgatccggataggtgggaaccgcttccagagataacagatttcattgagcttgaacctgaaaatgaagttatctctgacgatactgattctgagtacaatggcatggatgagtattcaagtgaaggagaacaggatattatgagtggtgattcttcaggtacttcatattcgagtggagaaattgatgcagataaccctgatagtgctcatctccgccgatcaagaagaaagaagaaaaaatctgaggctgatcttgttacttcatctggtcggcgagtcattaggaaaagatttttggatgatcctggtgtagccacagtgtcaaggccacatagaggaaggaaatctaggaatggatgttctagtaaaaagaaaagatcccctaaatccaggggtttgcgacctcggagacgtgctgctgaaaccgcattaattactttcccaaagaaaggagtttcaacagaagaggatgaagatgactccgagagtttctcagatagtgaattgaacacggatagcactgaagctgaacagttagaatggagtggtcagttaagaactagaagagagattaactccccatttgacatcgatgatgttacagatccttctcagtttactgataataaggaaaattctggaactggtaagaaactagttctcagaataccacgacgtgatttaagaactcaatttcctttaggaagcggaaaagcagaatgctccatacaggataaagcagtgaagtctctttctctagctaatcatgaaccagttgagcacgaactgactattgaaccaggacattcccctgcctccaaggctgaattaacaattgatggtgatctgcatgatagttctgctgtttgcagtaataactcaattaggtggggtgaggttaagatgcgatcctcaaagcgttgcaagtacagtgagccagctggaggtttgtggtcctcttcaaataacgttgctttgcaggatatcgagggatcgagcagtcagcagatacctcatgaatatggcgatggcatccagccaagtgttgtgcaaaacgtacaagaagtgcaacatggaacaattctagataacattccggaaaacaacagtactgatgaacacactagagaaaattttggggatttagaaaagatagctaacaatattaatgctcatgcagacggagtgaatgacactgtacaagttcccaatacttctcagcctcaactaaaagttaagtttaagtcaagaggctctgcagatgcagtaggaaatatcatgaactccaagcatgtcaaagattcagtgcagtgtggcgatgattcttccatcaatcaaccaagaaatgctgacttctatattgtgcccaaaagttctcaggaatgcctagataaaagcactagtttgcatgattcaaaaaaaccgtacttggatgcttcaaagaagtacactgcagtgtacaaaaggtcaaagcgaaagaacaagaaaaaaatggattcagatgaatgtccgaacgaggatagcacttctatctccaatgacgatggtggataccaacctgcagaatacagtcctgttgcagctgcaagcagtagattgagaagaagtgctaggaagtcatttgcatacaatatcaatggtacaacacaggatgatatctcggaagtgaaagtttcttacggttcccatgaagcatcaactagtggaagacgagttgtcacagatgtgcgtgaagggatgtggcgacaaaactcaagaagtgttggtttaaggtctgctaggaacaaaagagaaagtaacagcttccttgatacacatccattgggtagaaggcaccaggtttcttttaagtattcatggttaatgttgcttgagcatgaagatagctaccgttatattcctcaactcgatgatgaggttatgtacttggggcagggccatgaggaatatcttaaacaagtgcaatcatctgaattttgcccttggaaccggataaaaggacttaaagctgtagaactttgcaaaatacagggtcttgattatgccacctacagaggatctggtgaaagctgctgtaaattaaccattgaatttgttgattgcacgtccagtggatttggcaaaacatttatgatcacgttgcgtgagctggtcaactttccagattttcttgtggagagaacaaggtacgaagctgctatggagcggaactggacccacagagacaagtgcaaagtctggtggagggacgaagaaggacaggtaggaggaacttggtgggagggacgggtgatggcagtaacacctaaatcacctgattttcctgagagtccatgggaaaaatatgtcatacagtataaggaggatggttctgatcacgctcatagcccctgggaacttcatgagacaggcagtttatgggatccatggaaacatccacatatggatctcacggttcgagataaattgttatcagaaatggaaaatttacaggaaatgtcacacagggatcaggatcattatggtgtttttaaactggacaaggttgcagaaaagtcagatttcatcaacaggtttcctgttcaattttctattgaggtgatcaaggcaagattagcgaacaaatattacagaactctgggggctgtcagacatgataccactgtgatgctttcaaatgcagaatcttacttttcaaagagcagtgaaatgaccaaaaagatccgcaagctctctgagttgctcgaccagatcttttcatcactgtagggaacattgcttgatgcctgattgacaatttcccttttcgtttctgcaaaaaaaatttggccttaggcatcgagatgatttttactggtcctactgaggcattagagaattagccaaagtagttctcaggacagaaagggtttccggtgtagctccaaccagttaaactagttgctgatacaaagtgctcgttgctaacacatttgaccgtttgatctgttgtcaagatacaatggttcatcctattggacatgaaatattggggttttgttagagaagatgccaaggtgtaaatctggtggaggaaatgcattaactgataatttcattttgtacagacaccctcagcaataaaaggaaaaaaagaaatgtgcaacgttgtctattacattttggggtgacacatggtaactataatataggaaattagtggcacttttttcagcgtgcccaggcacgtattttatgttttttttatgacatcttttttggtcgcaagctatat

SEQ ID NO: 222176 - DNA, 6061 bp, Zea Mays
ccaccactgtgcgtctgtgcctagggttcgtacggggacgacaggacagcggcctccgccgtccctccgccgccgtaggtgccctgttcgtgccgcacgggcgctgccaaagcgccctccatatctggcatgcctctgagccgccgcagccgcgtcaccagagggttcgcagacaaggtccaggtggtgtattagacatgtctttcaggaagcgccaaccttccagtaacggagcttccattaatttagctcccctgggttttccaagtcaggaacttgagaaggttaatcctgtaaattcagtgatgtcaaccgattttgaatccatggatggtgttgatattgatatgagggaagtttactttctcattatgcattttttatctcatggtccattcaaacggacctttggagaattgtgcaatgaactcctagaacatcaactgctacctagaagataccatgcttggtattcacgtggtggtttccatagtggcgaagaaaatgatgatggcatatcactccctttggattatgtaaagctagctgagaggtacccccacattggtaaagaccacttggtgaagctattaaagcaactgatggctagttcttatcacccacacaacttgattggaagagtttctccaaatgctgctgatgtcccaacacttcttggctccaactccttttcacttcttccatctgacaggcaagataagggaactcccaggctgccaagttatcttcgttggcctcacattcagactgatcaagttcatggtctaagtttgagagagataggtggtttcactaagcattgtcgagctccctctgtacgtgcatcttgctatgccatcgcgaagccatccacccttgttgaaaagatgcaaatcataaagagattgagggggcatcaaaatgctgtgtattgtgctacctttgatcgcacagggcgttatgttattactggttctgatgaccgccttgttaaaatatgggcgatggaaacagcgttctgcctggctagctgccggggccatgaaggtgatattaccgatcttgcagtgagttccaataattctgtggtagcatcttcatctaatgatttcattattagagtgtggcgtatgcctgatggaatgccagtctcagtgctcaaggggcatacaggggcagttactgctattgcatttagtccaaggccaggtgctgctttccagctgttgtcgtcatcagatgatgggacatgcaggatttgggatgccagatactctcaacaacctccaagactgtatacaccaaagcccccagatgttgcccctggtaagagtggtgatgcatcttccagcgccgctcaagttcagccaacaaatcaccagatcttatgttgtgcatttaatgctaatggaaccgtgtttgtcactggcagctcggacacttatgcaagggtctggaatgcttgcaagagttcttctgatgaacatgagcaaccgattcatgagatggatctattatgtgggcatgaaaatgatgtaaactatgtgcagtttagtggatgtgcagttgcatcaagatctttttcatctgattccagtcatacctctaaggaagaaaatagcctgaagttaagaaattcttggtcagtattttgtttgtatatactgtttttttttcttttcttcttctaatgaaatgatacgcagctctcctgcgtgttcgagaaaataagtattttgtttgtccttatgttttgttttctccttctaaatgttcttatttatttccattaggcattagcggcatcagttcttatttgttgacccaagggtttcctttttattcagtcagttcttagttgttcaccttaatcaccttcaccagcgtcaaatggtgtcattttttgtttcaacaatcctccatcagttgagttggtcactatttttttttgctaggttcacgcataatattgttacctgctcccgtgatggcagtgcaattatatgggttccacgatctcggaggtcacatggaaagattggacgttggacgcgtgcttaccatcttaaagttcccccacctccaatggctcctcaaccacctcgaggtggtcctcgtcaaagataccagccaactcctcgtggtgtcaatatgatagtttggagtctggacaaccgctttgtgcttgctgctatcatggattgcagaatttgcgtatggaatgcttctgatgggagcttggtgcattcactgattggccataaggaatcaacgtttgtgctagatgtgcatccgttcaatcctcgtatagcaatgagtgctggatatgatgggaagacgatcatctgggatatatgggaagggaaacctgttcagatctatgaaacaggacaatttaaactagttgatgggaagttctctccggatggtacatcacttattttatcagatgaagttgggcgagtattcattattggaactgggcaaggagagtcccagaaagatgcaaaatatgatcagttcttccttggagactatcggcctctcattcgtgataccaatggaagtgtcattgatcaggaaacacagcttgcaccatacaggagaaatatgcaagaccttttgtgcgacgctggtatgataccatatccagagcccttccagagtatgtaccagaaacgccggttgggtacccttggtctcgagtggcggcctccctctgtaaattttgctgttggccccacttacaatgcaacaactggtgaataccaaactatcccaattattgatccggataggtgggaaccgcttccagagataacagatttcattgagcttgaacctgaaaatgaagttatctctgacgatactgattctgagtacaatggcatggatgagtattcaagtgaaggagaacaggatattatgagtggtgattcttcaggtacttcatattcgagtggagaaattgatgcagataaccctgatagtgctcatctccgccgatcaagaagaaagaagaaaaaatctgaggctgatcttgttacttcatctggtcggcgagtcattaggaaaagatttttggatgatcctggtgtagccacagtgtcaaggccacatagaggaaggaaatctaggaatggatgttctagtaaaaagaaaagatcccctaaatccaggggtttgcgacctcggagacgtgctgctgaaaccgcattaattactttcccaaagaaaggagtttcaacagaagaggatgaagatgactccgagagtttctcagatagtgaattgaacacggatagcactgaagctgaacagttagaatggagtggtcagttaagaactagaagagagattaactccccatttgacatcgatgatgttacagatccttctcagtttactgataataaggaaaattctggaactggtaagaaactagttctcagaataccacgacgtgatttaagaactcaatttcctttaggaagcggaaaagcagaatgctccatacaggataaagcagtgaagtctctttctctagctaatcatgaaccagttgagcacgaactgactattgaaccaggacattcccctgcctccaaggctgaattaacaattgatggtgatctgcatgatagttctgctgtttgcagtaataactcaattaggtggggtgaggttaagatgcgatcctcaaagcgttgcaagtacagtgagccagctggaggtttgtggtcctcttcaaataacgttgctttgcaggatatcgagggatcgagcagtcagcagatacctcatgaatatggcgatggcatccagccaagtgttgtgcaaaacgtacaagaagtgcaacatggaacaattctagataacattccggaaaacaacagtactgatgaacacactagagaaaattttggggatttagaaaagatagctaacaatattaatgctcatgcagacggagtgaatgacactgtacaagttcccaatacttctcagcctcaactaaaagttaagtttaagtcaagaggctctgcagatgcagtaggaaatatcatgaactccaagcatgtcaaagattcagtgcagtgtggcgatgattcttccatcaatcaaccaagaaatgctgacttctatattgtgcccaaaagttctcaggaatgcctagataaaagcactagtttgcatgattcaaaaaaaccgtacttggatgcttcaaagaagtacactgcagtgtacaaaaggtcaaagcgaaagaacaagaaaaaaatggattcagatgaatgtccgaacgaggatagcacttctatctccaatgacgatggtggataccaacctgcagaatacagtcctgttgcagctgcaagcagtagattgagaagaagtgctaggaagtcatttgcatacaatatcaatggtacaacacaggatgatatctcggaagtgaaagtttcttacggttcccatgaagcatcaactagtggaagacgagttgtcacagatgtgcgtgaagggatgtggcgacaaaactcaagaagtgttggtttaaggtctgctaggaacaaaagagaaagtaacagcttccttgatacacatccattgggtagaaggcaccaggtttcttttaagtattcatggttaatgttgcttgagcatgaagatagctaccgttatattcctcaactcgatgatgaggttatgtacttggggcagggccatgaggaatatcttaaacaagtgcaatcatctgaattttgcccttggaaccggataaaaggacttaaagctgtagaactttgcaaaatacagggtcttgattatgccacctacagaggatctggtgaaagctgctgtaaattaaccattgaatttgttgattgcacgtccagtggatttggcaaaacatttatgatcacgttgcgtgagctggtcaactttccagattttcttgtggagagaacaaggtacgaagctgctatggagcggaactggacccacagagacaagtgcaaagtctggtggagggacgaagaaggacaggtaggaggaacttggtgggagggacgggtgatggcagtaacacctaaatcacctgattttcctgagagtccatgggaaaaatatgtcatacagtataaggaggatggttctgatcacgctcatagcccctgggaacttcatgagacaggcagtttatgggatccatggaaacatccacatatggatctcacggttcgagataaattgttatcagaaatggaaaatttacaggaaatgtcacacagggatcaggatcattatggtgtttttaaactggacaaggttgcagaaaagtcagatttcatcaacaggtttcctgttcaattttctattgaggtgatcaaggcaagattagcgaacaaatattacagaactctgggggctgtcagacatgataccactgtgatgctttcaaatgcagaatcttacttttcaaagagcagtgaaatgaccaaaaagatccgcaagctctctgagttgctcgaccagatcttttcatcactgtagggaacattgcttgatgcctgattgacaatttcccttttcgtttctgcaaaaaaaatttggccttaggcatcgagatgatttttactggtcctactgaggcattagagaattagccaaagtagttctcaggacagaaagggtttccggtgtagctccaaccagttaaactagttgctgatacaaagtgctcgttgctaacacatttgaccgtttgatctgttgtcaagatacaatggttcatcctattggacatgaaatattggggttttgttagagaagatgccaaggtgtaaatctggtggaggaaatgcattaactgataatttcattttgtacagacaccctcagcaataaaaggaaaaaaagaaatgtgcaacgttgtctattacattttggggtgacacatggtaactataatataggaaattagtggcacttttttcagcgtgcccaggcacgtattttatgttttttttatgacatcttttttggtcgcaagctatat

SEQ ID NO: 222177 - DNA, 5591 bp, Zea Mays
tgggagcctccgtcactactcactgggtggtgtattagacatgtctttcaggaagcgccaaccttccagtaacggagcttccattaatttagctcccctgggttttccaagtcaggaacttgagaaggttaatcctgtaaattcagtgatgtcaaccgattttgaatccatggatggtgttgatattgatatgagggaagtttactttctcattatgcattttttatctcatggtccattcaaacggacctttggagaattgtgcaatgaactcctagaacatcaactgctacctagaagataccatgcttggtattcacgtggtggtttccatagtggcgaagaaaatgatgatggcatatcactccctttggattatgtaaagctagctgagaggtacccccacattggtaaagaccacttggtgaagctattaaagcaactgatggctagttcttatcacccacacaacttgattggaagagtttctccaaatgctgctgatgtcccaacacttcttggctccaactccttttcacttcttccatctgacaggcaagataagggaactcccaggctgccaagttatcttcgttggcctcacattcagactgatcaagttcatggtctaagtttgagagagataggtggtttcactaagcattgtcgagctccctctgtacgtgcatcttgctatgccatcgcgaagccatccacccttgttgaaaagatgcaaatcataaagagattgagggggcatcaaaatgctgtgtattgtgctacctttgatcgcacagggcgttatgttattactggttctgatgaccgccttgttaaaatatgggcgatggaaacagcgttctgcctggctagctgccggggccatgaaggtgatattaccgatcttgcagtgagttccaataattctgtggtagcatcttcatctaatgatttcattattagagtgtggcgtatgcctgatggaatgccagtctcagtgctcaaggggcatacaggggcagttactgctattgcatttagtccaaggccaggtgctgctttccagctgttgtcgtcatcagatgatgggacatgcaggatttgggatgccagatactctcaacaacctccaagactgtatacaccaaagcccccagatgttgcccctggtaagagtggtgatgcatcttccagcgccgctcaagttcagccaacaaatcaccagatcttatgttgtgcatttaatgctaatggaaccgtgtttgtcactggcagctcggacacttatgcaagggtctggaatgcttgcaagagttcttctgatgaacatgagcaaccgattcatgagatggatctattatgtgggcatgaaaatgatgtaaactatgtgcagtttagtggatgtgcagttgcatcaagatctttttcatctgattccagtcatacctctaaggaagaaaatagcctgaagttaagaaattcttggttcacgcataatattgttacctgctcccgtgatggcagtgcaattatatgggttccacgatctcggaggtcacatggaaagattggacgttggacgcgtgcttaccatcttaaagttcccccacctccaatggctcctcaaccacctcgaggtggtcctcgtcaaagataccagccaactcctcgtggtgtcaatatgatagtttggagtctggacaaccgctttgtgcttgctgctatcatggattgcagaatttgcgtatggaatgcttctgatgggagcttggtgcattcactgattggccataaggaatcaacgtttgtgctagatgtgcatccgttcaatcctcgtatagcaatgagtgctggatatgatgggaagacgatcatctgggatatatgggaagggaaacctgttcagatctatgaaacaggacaatttaaactagttgatgggaagttctctccggatggtacatcacttattttatcagatgaagttgggcgagtattcattattggaactgggcaaggagagtcccagaaagatgcaaaatatgatcagttcttccttggagactatcggcctctcattcgtgataccaatggaagtgtcattgatcaggaaacacagcttgcaccatacaggagaaatatgcaagaccttttgtgcgacgctggtatgataccatatccagagcccttccagagtatgtaccagaaacgccggttgggtacccttggtctcgagtggcggcctccctctgtaaattttgctgttggccccacttacaatgcaacaactggtgaataccaaactatcccaattattgatccggataggtgggaaccgcttccagagataacagatttcattgagcttgaacctgaaaatgaagttatctctgacgatactgattctgagtacaatggcatggatgagtattcaagtgaaggagaacaggatattatgagtggtgattcttcaggtacttcatattcgagtggagaaattgatgcagataaccctgatagtgctcatctccgccgatcaagaagaaagaagaaaaaatctgaggctgatcttgttacttcatctggtcggcgagtcattaggaaaagatttttggatgatcctggtgtagccacagtgtcaaggccacatagaggaaggaaatctaggaatggatgttctagtaaaaagaaaagatcccctaaatccaggggtttgcgacctcggagacgtgctgctgaaaccgcattaattactttcccaaagaaaggagtttcaacagaagaggatgaagatgactccgagagtttctcagatagtgaattgaacacggatagcactgaagctgaacagttagaatggagtggtcagttaagaactagaagagagattaactccccatttgacatcgatgatgttacagatccttctcagtttactgataataaggaaaattctggaactggtaagaaactagttctcagaataccacgacgtgatttaagaactcaatttcctttaggaagcggaaaagcagaatgctccatacaggataaagcagtgaagtctctttctctagctaatcatgaaccagttgagcacgaactgactattgaaccaggacattcccctgcctccaaggctgaattaacaattgatggtgatctgcatgatagttctgctgtttgcagtaataactcaattaggtggggtgaggttaagatgcgatcctcaaagcgttgcaagtacagtgagccagctggaggtttgtggtcctcttcaaataacgttgctttgcaggatatcgagggatcgagcagtcagcagatacctcatgaatatggcgatggcatccagccaagtgttgtgcaaaacgtacaagaagtgcaacatggaacaattctagataacattccggaaaacaacagtactgatgaacacactagagaaaattttggggatttagaaaagatagctaacaatattaatgctcatgcagacggagtgaatgacactgtacaagttcccaatacttctcagcctcaactaaaagttaagtttaagtcaagaggctctgcagatgcagtaggaaatatcatgaactccaagcatgtcaaagattcagtgcagtgtggcgatgattcttccatcaatcaaccaagaaatgctgacttctatattgtgcccaaaagttctcaggaatgcctagataaaagcactagtttgcatgattcaaaaaaaccgtacttggatgcttcaaagaagtacactgcagtgtacaaaaggtcaaagcgaaagaacaagaaaaaaatggattcagatgaatgtccgaacgaggatagcacttctatctccaatgacgatggtggataccaacctgcagaatacagtcctgttgcagctgcaagcagtagattgagaagaagtgctaggaagtcatttgcatacaatatcaatggtacaacacaggatgatatctcggaagtgaaagtttcttacggttcccatgaagcatcaactagtggaagacgagttgtcacagatgtgcgtgaagggatgtggcgacaaaactcaagaagtgttggtttaaggtctgctaggaacaaaagagaaagtaacagcttccttgatacacatccattgggtagaaggcaccaggtttcttttaagtattcatggttaatgttgcttgagcatgaagatagctaccgttatattcctcaactcgatgatgaggttatgtacttggggcagggccatgaggaatatcttaaacaagtgcaatcatctgaattttgcccttggaaccggataaaaggacttaaagctgtagaactttgcaaaatacagggtcttgattatgccacctacagaggatctggtgaaagctgctgtaaattaaccattgaatttgttgattgcacgtccagtggatttggcaaaacatttatgatcacgttgcgtgagctggtcaactttccagattttcttgtggagagaacaaggtacgaagctgctatggagcggaactggacccacagagacaagtgcaaagtctggtggagggacgaagaaggacaggtaggaggaacttggtgggagggacgggtgatggcagtaacacctaaatcacctgattttcctgagagtccatgggaaaaatatgtcatacagtataaggaggatggttctgatcacgctcatagcccctgggaacttcatgagacaggcagtttatgggatccatggaaacatccacatatggatctcacggttcgagataaattgttatcagaaatggaaaatttacaggaaatgtcacacagggatcaggatcattatggtgtttttaaactggacaaggttgcagaaaagtcagatttcatcaacaggtttcctgttcaattttctattgaggtgatcaaggcaagattagcgaacaaatattacagaactctgggggctgtcagacatgataccactgtgatgctttcaaatgcagaatcttacttttcaaagagcagtgaaatgaccaaaaagatccgcaagctctctgagttgctcgaccagatcttttcatcactgtagggaacattgcttgatgcctgattgacaatttcccttttcgtttctgcaaaaaaaatttggccttaggcatcgagatgatttttactggtcctactgaggcattagagaattagccaaagtagttctcaggacagaaagggtttccggtgtagctccaaccagttaaactagttgctgatacaaagtgctcgttgctaacacatttgaccgtttgatctgttgtcaagatacaatggttcatcctattggacatgaaatattggggttttgttagagaagatgccaaggtgtaaatctggtggaggaaatgcattaactgataatttcattttgtacagacaccctcagcaataaaaggaaaaaaagaaatgtgcaacgttgtctattacattttggggtgacacatggtaactataatataggaaattagtggcacttttttcagcgtgcccaggcacgtattttatgttttttttatgacatcttttttggtcgcaagctatat

SEQ ID NO: 222178 - DNA, 2982 bp, Zea Mays
tccagctgcagattctctcacgagtctaatcataggccaggggtaaaagcgcaaatgtttctgcgctctcttttctcccctcaccctttctctttctccctcgaccgccccggatctatctcgccgcgccggcgcgcagctgagccgccgaagcgaggaggcaatcgaggcggacgaagcgccgcaccaaattcgacgggggatcgagcaccagaggcgtagcgcaaaatgttcaagttcctcaaggaggtggtcgcgggatccggatcgggactcaaggacttcccctacaccatcggcgagccctacgcatcggcttggggctcatggaaacaccaccgcggtacctccaaggatgatgggtcgcctgtgtcaattttttctctgtcagggagcaaccctcaggacagacacatggttgctggtcgcaacggtgttaagagattacgaacagtgcggcatccaaatatcttatcctttttacacagtactgaagcagaagctgcggatggacctgccatgaaatacacaatttatattgtaacagagcctgttatgccactttctgaaaagctcaaggaactgaatcttggtggtacacagagagatgagtactttgcatgggggcttcatcagatatccaaagctgtgagctttctcaataatgactgcaaactttgttgttgttacacaaaccctggattggaagcttcatgcttttgatgttctgtcagaatttgatgctaataatgaagcctctggtagccccatgttgcaatttgaatggttagttggaacacagtacaagccaatggagctgtcaaagtcagattgggcttcaattagaaaatcacccccatgggccattgattcttggggactagggtgtttaatttatgaactattttctggtgcaaagctggctagaacagaggaccttcgaaatactgcttcaatcccaaagtctctacttccagattaccagaggctcttgaattccacaccttctcgtagactaaatccttcaaaacttattgacaacagcgagtttttccagaacaagttagtagagaccatccagttcatggaaattcttaatttgaaagacacctttgagaaagacagtttttttcgtaaactccccaatatagctgaacagcttcctcgtgaaatagttctgaaaaagctgctccctgtattggcttcttctcttgaatttggttcagctgccgctccagccttaactgttttgttaaagatgggttcctggcttcctgctgaccaatttaatatcaaggtcttgccaactattgtcaagctttttgcctccaatgaccgagctatccgagcatgtcttttgcatcacataaatcagtttggggaatcaatgtcagctcaaattgttgacgaacaagtttttcctcatgtagccactggcttctctgatactgatggtactattcgtgaactgacattgaagtcgatgctcgtattagcaccaaaattatctcagcgtacaatctcaggatctctcttaaaatatctctctaagctacaggtggacgaagaacctggtatcaggacaaacacaacaattcttcttggcaatattgcaggctacatgaacgatgggacaaggaagagagtactgatcaatgcattcacagttcgtgcattacgtgataccttccctccggccagagcagctggaatcatggcactgagtgtcactagttcatactatgaaatgacagagattgcaactcgcatcctgcctaacattgttgtgctcacatttgacccaaatagtgatgtccgaacgaaggcttttcaggctaccgatcagttcttgcaaatagcaaaacaacaccatgaaaagattcaagggttctggtacttttcatggtttagatcacagcttaatacaggagacaacagtgtggctgaaagtactggtgttaagttaaagcctggaaatgcaggtttacttgggtgggccatgagttctgttacacaaaagggtaaaccttttgaccatgccccaatatctactgcaaatgccaataattctcaagcatcaacaacctcgactgccactccagacactcaggcttccacactagcgtatgcaccatccacatccacctcgcttgatcaagctgcatcagcatcagcaaggtcgtcagtagatgggtggggtgagcttgaggatggtaatatccatgaggagaatagtagcgataaagatggatgggatgatgtagacccatttgaggacaagccatccccatctcttctatccaacatacaggctgctcaaaaacgtccagtggtgcaaccaaagcaaccggttgcaaactcatctaaaccaaacccactgaaagcgccaaagtcagaagacgatcctttgtggggtcctatagctgctgcaccacctaaaagtgcagtaaaatctgcagacatcaagccatcaacatcacataatgatgaggatgacctctggggttcaatagcagcacctccaaaatcatctgggaagcctttgaagccagctgtagcgaatagtgacgacttatggggtgccatcgcagcacctccaccagcaaccaaagccagacccttagcctcgtcaggtaggggccgaggaacaaagccagcgcaaccaaaacttggtgctcaaagaataggaagaacatcttcaactggaatgtgacgtcttatgatatcaagtgttgtacaagaatgcaaagttttcctttttttttcccctgccttgcgttgagtctgtccaggatgacattctttgtaaactagtaaaaagatttatgtatatgagcacagttttgaccaatgtattagtattattttaccattgtgtattaaaatagatccagaagatttttgcacatcacagctgcaatcatcttaagtccatattattaatatattgctatgtcttattttggcgtgataagagcaact

SEQ ID NO: 222179 - DNA, 3073 bp, Zea Mays
ctctcacgagtctaatcataggccaggggtaaaagcgcaaatgtttctgcgctctcttttctcccctcaccctttctctttctccctcgaccgccccggatctatctcgccgcgccggcgcgcagctgagccgccgaagcgaggaggcaatcgaggcggacgaagcgccgcaccaaattcgacgggggatcgagcaccagaggcgtagcgcaaaatgttcaagttcctcaaggaggtggtcgcgggatccggatcgggactcaaggacttcccctacaccatcggcgagccctacgcatcggcttggggctcatggaaacaccaccgcggtacctccaagggagcaaccctcaggacagacacatggttgctggtcgcaacggtgttaagagattacgaacagtgcggcatccaaatatcttatcctttttacacagtactgaagcagaagctgcggatggacctgccatgaaatacacaatttatattgtaacagagcctgttatgccactttctgaaaagctcaaggaactgaatcttggtggtacacagagagatgagtactttgcatgggggcttcatcagatatccaaagctgtgagctttctcaataatgactgcaaacttgttcatggtaatgtatgcttggccagtgttgttgttacacaaaccctggattggaagcttcatgcttttgatgttctgtcagaatttgatgctaataatgaagcctctggtagccccatgttgcaatttgaatggttagttggaacacagtacaagccaatggagctgtcaaagtcagattgggcttcaattagaaaatcacccccatgggccattgattcttggggactagggtgtttaatttatgaactattttctggtgcaaagctggctagaacagaggaccttcgaaatactgcttcaatcccaaagtctctacttccagattaccagaggctcttgaattccacaccttctcgtagactaaatccttcaaaacttattgacaacagcgagtttttccagaacaagttagtagagaccatccagttcatggaaattcttaatttgaaagacacctttgagaaagacagtttttttcgtaaactccccaatatagctgaacagcttcctcgtgaaatagttctgaaaaagctgctccctgtattggcttcttctcttgaatttggttcagctgccgctccagccttaactgttttgttaaagatgggttcctggcttcctgctgaccaatttaatatcaaggtcttgccaactattgtcaagctttttgcctccaatgaccgagctatccgagcatgtcttttgcatcacataaatcagtttggggaatcaatgtcagctcaaattgttgacgaacaagtttttcctcatgtagccactggcttctctgatactgatggtactattcgtgaactgacattgaagtcgatgctcgtattagcaccaaaaatgcaggagcgtgcacatacgcacaacaatttgccatggcatgctttgatggaatatttctgggattttagatcctcaatccctcatgcactgatttctatttcctgccaaaagctatacttgcagatgactgattgtctggtccgttattgcagttatctcagcgtacaatctcaggatctctcttaaaatatctctctaagctacaggtggacgaagaacctggtatcaggacaaacacaacaattcttcttggcaatattgcaggctacatgaacgatgggacaaggaagagagtactgatcaatgcattcacagttcgtgcattacgtgataccttccctccggccagagcagctggaatcatggcactgagtgtcactagttcatactatgaaatgacagagattgcaactcgcatcctgcctaacattgttgtgctcacatttgacccaaatagtgatgtccgaacgaaggcttttcaggctaccgatcagttcttgcaaatagcaaaacaacaccatgaaaagcttaatacaggagacaacagtgtggctgaaagtactggtgttaagttaaagcctggaaatgcaggtttacttgggtgggccatgagttctgttacacaaaagggtaaaccttttgaccatgccccaatatctactgcaaatgccaataattctcaagcatcaacaacctcgactgccactccagacactcaggcttccacactagcgtatgcaccatccacatccacctcgcttgatcaagctgcatcagcatcagcaaggtcgtcagtagatgggtggggtgagcttgaggatggtaatatccatgaggagaatagtagcgataaagatggatgggatgatgtagacccatttgaggacaagccatccccatctcttctatccaacatacaggctgctcaaaaacgtccagtggtgcaaccaaagcaaccggttgcaaactcatctaaaccaaacccactgaaagcgccaaagtcagaagacgatcctttgtggggtcctatagctgctgcaccacctaaaagtgcagtaaaatctgcagacatcaagccatcaacatcacataatgatgaggatgacctctggggttcaatagcagcacctccaaaatcatctgggaagcctttgaagccagctgtagcgaatagtgacgacttatggggtgccatcgcagcacctccaccagcaaccaaagccagacccttagcctcgtcaggtaggggccgaggaacaaagccagcgcaaccaaaacttggtgctcaaagaataggaagaacatcttcaactggaatgtgacgtcttatgatatcaagtgttgtacaagaatgcaaagttttcctttttttttcccctgccttgcgttgagtctgtccaggatgacattctttgtaaactagtaaaaagatttatgtatatgagcacagttttgaccaatgtattagtattattttaccattgtgtattaaaatagatccagaagatttttgcacatcacagctgcaatcatcttaagtccatattattaatatattgctatgtcttattttggcgtgataagagcaact

SEQ ID NO: 222180 - DNA, 3006 bp, Zea Mays
ctctcacgagtctaatcataggccaggggtaaaagcgcaaatgtttctgcgctctcttttctcccctcaccctttctctttctccctcgaccgccccggatctatctcgccgcgccggcgcgcagctgagccgccgaagcgaggaggcaatcgaggcggacgaagcgccgcaccaaattcgacgggggatcgagcaccagaggcgtagcgcaaaatgttcaagttcctcaaggaggtggtcgcgggatccggatcgggactcaaggacttcccctacaccatcggcgagccctacgcatcggcttggggctcatggaaacaccaccgcggtacctccaaggatgatgggtcgcctgtgtcaattttttctctgtcagggagcaaccctcaggacagacacatggttgctggtcgcaacggtgttaagagattacgaacagtgcggcatccaaatatcttatcctttttacacagtactgaagcagaagctgcggatggacctgccatgaaatacacaatttatattgtaacagagcctgttatgccactttctgaaaagctcaaggaactgaatcttggtggtacacagagagatgagtactttgcatgggggcttcatcagatatccaaagctgtgagctttctcaataatgactgcaaacttgttcatggtaatgtatgcttggccagtgttgttgttacacaaaccctggattggaagcttcatgcttttgatgttctgtcagaatttgatgctaataatgaagcctctggtagccccatgttgcaatttgaatggttagttggaacacagtacaagccaatggagctgtcaaagtcagattgggcttcaattagaaaatcacccccatgggccattgattcttggggactagggtgtttaatttatgaactattttctggtgcaaagctggctagaacagaggaccttcgaaatactgcttcaatcccaaagtctctacttccagattaccagaggctcttgaattccacaccttctcgtagactaaatccttcaaaacttattgacaacagcgagtttttccagaacaagttagtagagaccatccagttcatggaaattcttaatttgaaagacacctttgagaaagacagtttttttcgtaaactccccaatatagctgaacagcttcctcgtgaaatagttctgaaaaagctgctccctgtattggcttcttctcttgaatttggttcagctgccgctccagccttaactgttttgttaaagatgggttcctggcttcctgctgaccaatttaatatcaaggtcttgccaactattgtcaagctttttgcctccaatgaccgagctatccgagcatgtcttttgcatcacataaatcagtttggggaatcaatgtcagctcaaattgttgacgaacaagtttttcctcatgtagccactggcttctctgatactgatggtactattcgtgaactgacattgaagtcgatgctcgtattagcaccaaaattatctcagcgtacaatctcaggatctctcttaaaatatctctctaagctacaggtggacgaagaacctggtatcaggacaaacacaacaattcttcttggcaatattgcaggctacatgaacgatgggacaaggaagagagtactgatcaatgcattcacagttcgtgcattacgtgataccttccctccggccagagcagctggaatcatggcactgagtgtcactagttcatactatgaaatgacagagattgcaactcgcatcctgcctaacattgttgtgctcacatttgacccaaatagtgatgtccgaacgaaggcttttcaggctaccgatcagttcttgcaaatagcaaaacaacaccatgaaaagcttaatacaggagacaacagtgtggctgaaagtactggtgttaagttaaagcctggaaatgcaggtttacttgggtgggccatgagttctgttacacaaaagggtaaaccttttgaccatgccccaatatctactgcaaatgccaataattctcaagcatcaacaacctcgactgccactccagttctgttcactttaaaagatctgcaattgagtatatcaattcgattgccagacactcaggcttccacactagcgtatgcaccatccacatccacctcgcttgatcaagctgcatcagcatcagcaaggtcgtcagtagatgggtggggtgagcttgaggatggtaatatccatgaggagaatagtagcgataaagatggatgggatgatgtagacccatttgaggacaagccatccccatctcttctatccaacatacaggctgctcaaaaacgtccagtggtgcaaccaaagcaaccggttgcaaactcatctaaaccaaacccactgaaagcgccaaagtcagaagacgatcctttgtggggtcctatagctgctgcaccacctaaaagtgcagtaaaatctgcagacatcaagccatcaacatcacataatgatgaggatgacctctggggttcaatagcagcacctccaaaatcatctgggaagcctttgaagccagctgtagcgaatagtgacgacttatggggtgccatcgcagcacctccaccagcaaccaaagccagacccttagcctcgtcaggtaggggccgaggaacaaagccagcgcaaccaaaacttggtgctcaaagaataggaagaacatcttcaactggaatgtgacgtcttatgatatcaagtgttgtacaagaatgcaaagttttcctttttttttcccctgccttgcgttgagtctgtccaggatgacattctttgtaaactagtaaaaagatttatgtatatgagcacagttttgaccaatgtattagtattattttaccattgtgtattaaaatagatccagaagatttttgcacatcacagctgcaatcatcttaagtccatattattaatatattgctatgtcttattttggcgtgataagagcaact

SEQ ID NO: 222181 - DNA, 3103 bp, Zea Mays
tctcacgagtctaatcataggccaggggtaaaagcgcaaatgtttctgcgctctcttttctcccctcaccctttctctttctccctcgaccgccccggatctatctcgccgcgccggcgcgcagctgagccgccgaagcgaggaggcaatcgaggcggacgaagcgccgcaccaaattcgacgggggatcgagcaccagaggcgtagcgcaaaatgttcaagttcctcaaggaggtggtcgcgggatccggatcgggactcaaggacttcccctacaccatcggcgagccctacgcatcggcttggggctcatggaaacaccaccgcggtacctccaaggatgatgggtcgcctgtgtcaattttttctctgtcagggagcaaccctcaggacagacacatggttgctggtcgcaacggtgttaagagattacgaacagtgcggcatccaaatatcttatcctttttacacagtactgaagcagaagctgcggatggacctgccatgaaatacacaatttatattgtaacagagcctgttatgccactttctgaaaagctcaaggaactgaatcttggtggtacacagagagatgagtactttgcatgggggcttcatcagatatccaaagctgtgagctttctcaataatgactgcaaacttgttcatggtaatgtatgcttggccagtgttgttgttacacaaaccctggattggaagcttcatgcttttgatgttctgtcagaatttgatgctaataatgaagcctctggtagccccatgttgcaatttgaatggttagttggaacacagtacaagccaatggagctgtcaaagtcagattgggcttcaattagaaaatcacccccatgggccattgattcttggggactagggtgtttaatttatgaactattttctggtgcaaagctggctagaacagaggaccttcgaaatactgcttcaatcccaaagtctctacttccagattaccagaggctcttgaattccacaccttctcgtagactaaatccttcaaaacttattgacaacagcgagtttttccagaacaagttagtagagaccatccagttcatggaaattcttaatttgaaagacacctttgagaaagacagtttttttcgtaaactccccaatatagctgaacagcttcctcgtgaaatagttctgaaaaagctgctccctgtattggcttcttctcttgaatttggttcagctgccgctccagccttaactgttttgttaaagatgggttcctggcttcctgctgaccaatttaatatcaaggtcttgccaactattgtcaagctttttgcctccaatgaccgagctatccgagcatgtcttttgcatcacataaatcagtttggggaatcaatgtcagctcaaattgttgacgaacaagtttttcctcatgtagccactggcttctctgatactgatggtactattcgtgaactgacattgaagtcgatgctcgtattagcaccaaaagagcgtgcacatacgcacaacaatttgccatggcatgctttgatggaatatttctgggattttagatcctcaatccctcatgcactgatttctatttcctgccaaaagctatacttgcagatgactgattgtctggtccgttattgcagttatctcagcgtacaatctcaggatctctcttaaaatatctctctaagctacaggtggacgaagaacctggtatcaggacaaacacaacaattcttcttggcaatattgcaggctacatgaacgatgggacaaggaagagagtactgatcaatgcattcacagttcgtgcattacgtgataccttccctccggccagagcagctggaatcatggcactgagtgtcactagttcatactatgaaatgacagagattgcaactcgcatcctgcctaacattgttgtgctcacatttgacccaaatagtgatgtccgaacgaaggcttttcaggctaccgatcagttcttgcaaatagcaaaacaacaccatgaaaagcttaatacaggagacaacagtgtggctgaaagtactggtgttaagttaaagcctggaaatgcaggtttacttgggtgggccatgagttctgttacacaaaagggtaaaccttttgaccatgccccaatatctactgcaaatgccaataattctcaagcatcaacaacctcgactgccactccagacactcaggcttccacactagcgtatgcaccatccacatccacctcgcttgatcaagctgcatcagcatcagcaaggtcgtcagtagatgggtggggtgagcttgaggatggtaatatccatgaggagaatagtagcgataaagatggatgggatgatgtagacccatttgaggacaagccatccccatctcttctatccaacatacaggctgctcaaaaacgtccagtggtgcaaccaaagcaaccggttgcaaactcatctaaaccaaacccactgaaagcgccaaagtcagaagacgatcctttgtggggtcctatagctgctgcaccacctaaaagtgcagtaaaatctgcagacatcaagccatcaacatcacataatgatgaggatgacctctggggttcaatagcagcacctccaaaatcatctgggaagcctttgaagccagctgtagcgaatagtgacgacttatggggtgccatcgcagcacctccaccagcaaccaaagccagacccttagcctcgtcaggtaggggccgaggaacaaagccagcgcaaccaaaacttggtgctcaaagaataggaagaacatcttcaactggaatgtgacgtcttatgatatcaagtgttgtacaagaatgcaaagttttcctttttttttcccctgccttgcgttgagtctgtccaggatgacattctttgtaaactagtaaaaagatttatgtatatgagcacagttttgaccaatgtattagtattattttaccattgtgtattaaaatagatccagaagatttttgcacatcacagctgcaatcatcttaagtccatattattaatatattgctatgtcttattttggcgtgataagagcaact

SEQ ID NO: 222182 - DNA, 2933 bp, Zea Mays
ctcccctcaccctttctctttctccctcgaccgccccggatctatctcgccgcgccggcgcgcagctgagccgccgaagcgaggaggcaatcgaggcggacgaagcgccgcaccaaattcgacgggggatcgagcaccagaggcgtagcgcaaaatgttcaagttcctcaaggaggtggtcgcgggatccggatcgggactcaaggacttcccctacaccatcggcgagccctacgcatcggcttggggctcatggaaacaccaccgcggtacctccaaggatgatgggtcgcctgtgtcaattttttctctgtcagggagcaaccctcaggacagacacatggttgctggtcgcaacggtgttaagagattacgaacatgcggcatccaaatatcttatcctttttacacagtactgaagcagaagctgcggatggacctgccatgaaatacacaatttatattgtaacagagcctgttatgccactttctgaaaagctcaaggaactgaatcttggtggtacacagagagatgagtactttgcatgggggcttcatcagatatccaaagctgtgagctttctcaataatgactgcaaacttgttcatggtaatgtatgcttggccagtgttgttgttacacaaaccctggattggaagcttcatgcttttgatgttctgtcagaatttgatgctaataatgaagcctctggtagccccatgttgcaatttgaatggttagttggaacacagtacaagccaatggagctgtcaaagtcagattgggcttcaattagaaaatcacccccatgggccattgattcttggggactagggtgtttaatttatgaactattttctggtgcaaagctggctagaacagaggaccttcgaaatactgcttcaatcccaaagtctctacttccagattaccagaggctcttgaattccacaccttctcgtagactaaatccttcaaaacttattgacaacagcgagtttttccagaacaagttagtagagaccatccagttcatggaaattcttaatttgaaagacacctttgagaaagacagtttttttcgtaaactccccaatatagctgaacagcttcctcgtgaaatagttctgaaaaagctgctccctgtattggcttcttctcttgaatttggttcagctgccgctccagccttaactgttttgttaaagatgggttcctggcttcctgctgaccaatttaatatcaaggtcttgccaactattgtcaagctttttgcctccaatgaccgagctatccgagcatgtcttttgcatcacataaatcagtttggggaatcaatgtcagctcaaattgttgacgaacaagtttttcctcatgtagccactggcttctctgatactgatggtactattcgtgaactgacattgaagtcgatgctcgtattagcaccaaaattatctcagcgtacaatctcaggatctctcttaaaatatctctctaagctacaggtggacgaagaacctggtatcaggacaaacacaacaattcttcttggcaatattgcaggctacatgaacgatgggacaaggaagagagtactgatcaatgcattcacagttcgtgcattacgtgataccttccctccggccagagcagctggaatcatggcactgagtgtcactagttcatactatgaaatgacagagattgcaactcgcatcctgcctaacattgttgtgctcacatttgacccaaatagtgatgtccgaacgaaggcttttcaggctaccgatcagttcttgcaaatagcaaaacaacaccatgaaaagattcaagggttctggtacttttcatggtttagatcacagcttaatacaggagacaacagtgtggctgaaagtactggtgttaagttaaagcctggaaatgcaggtttacttgggtgggccatgagttctgttacacaaaagggtaaaccttttgaccatgccccaatatctactgcaaatgccaataattctcaagcatcaacaacctcgactgccactccagacactcaggcttccacactagcgtatgcaccatccacatccacctcgcttgatcaagctgcatcagcatcagcaaggtcgtcagtagatgggtggggtgagcttgaggatggtaatatccatgaggagaatagtagcgataaagatggatgggatgatgtagacccatttgaggacaagccatccccatctcttctatccaacatacaggctgctcaaaaacgtccagtggtgcaaccaaagcaaccggttgcaaactcatctaaaccaaacccactgaaagcgccaaagtcagaagacgatcctttgtggggtcctatagctgctgcaccacctaaaagtgcagtaaaatctgcagacatcaagccatcaacatcacataatgatgaggatgacctctggggttcaatagcagcacctccaaaatcatctgggaagcctttgaagccagctgtagcgaatagtgacgacttatggggtgccatcgcagcacctccaccagcaaccaaagccagacccttagcctcgtcaggtaggggccgaggaacaaagccagcgcaaccaaaacttggtgctcaaagaataggaagaacatcttcaactggaatgtgacgtcttatgatatcaagtgttgtacaagaatgcaaagttttcctttttttttcccctgccttgcgttgagtctgtccaggatgacattctttgtaaactagtaaaaagatttatgtatatgagcacagttttgaccaatgtattagtattattttaccattgtgtattaaaatagatccagaagatttttgcacatcacagctgcaatcatcttaagtccatattattaatatattgctatgtcttattttggcgtgataagagcaact

SEQ ID NO: 222183 - DNA, 2865 bp, Zea Mays
tctctttctccctcgaccgccccggatctatctcgccgcgccggcgcgcagctgagccgccgaagcgaggaggcaatcgaggcggacgaagcgccgcaccaaattcgacgggggatcgagcaccagaggcgtagcgcaaaatgttcaagttcctcaaggaggtggtcgcgggatccggatcgggactcaaggacttcccctacaccatcggcgagccctacgcatcggcttggggctcatggaaacaccaccgcggtacctccaaggatgatgggtcgcctgtgtcaattttttctctgtcagggagcaaccctcaggacagacacatggttgctggtcgcaacggtgttaagagattacgaacagtgcggcatccaaatatcttatcctttttacacagtactgaagcagaagctgcggatggacctgccatgaaatacacaatttatattgtaacagagcctgttatgccactttctgaaaagctcaaggaactgaatcttggtggtacacagagagatgagtactttgcatgggggcttcatcagatatccaaagctgtgagctttctcaataatgactgcaaacttgttcatggtaatgtatgcttggccagtgttgttgttacacaaaccctggattggaagcttcatgcttttgatgttctgtcagaatttgatgctaataatgaagcctctggtagccccatgttgcaatttgaatggttagttggaacacagtacaagccaatggagctgtcaaagtcagattgggcttcaattagaaaatcacccccatgggccattgattcttggggactagggtgtttaatttatgaactattttctggtgcaaagctggctagaacagaggaccttcgaaatactgcttcaatcccaaagtctctacttccagattaccagaggctcttgaattccacaccttctcgtagactaaatccttcaaaacttattgacaacagcgagtttttccagaacaagttagtagagaccatccagttcatggaaattcttaatttgaaagacacctttgagaaagacagtttttttcgtaaactccccaatatagctgaacagcttcctcgtgaaatagttctgaaaaagctgctccctgtattggcttcttctcttgaatttggttcagctgccgctccagccttaactgttttgttaaagatgggttcctggcttcctgctgaccaatttaatatcaaggtcttgccaactattgtcaagctttttgcctccaatgaccgagctatccgagcatgtcttttgcatcacataaatcagtttggggaatcaatgtcagctcaaattgttgacgaacaaccactggcttctctgatactgatggtactattcgtgaactgacattgaagtcgatgctcgtattagcaccaaaattatctcagcgtacaatctcaggatctctcttaaaatatctctctaagctacaggtggacgaagaacctggtatcaggacaaacacaacaattcttcttggcaatattgcaggctacatgaacgatgggacaaggaagagagtactgatcaatgcattcacagttcgtgcattacgtgataccttccctccggccagagcagctggaatcatggcactgagtgtcactagttcatactatgaaatgacagagattgcaactcgcatcctgcctaacattgttgtgctcacatttgacccaaatagtgatgtccgaacgaaggcttttcaggctaccgatcagttcttgcaaatagcaaaacaacaccatgaaaagcttaatacaggagacaacagtgtggctgaaagtactggtgttaagttaaagcctggaaatgcaggtttacttgggtgggccatgagttctgttacacaaaagggtaaaccttttgaccatgccccaatatctactgcaaatgccaataattctcaagcatcaacaacctcgactgccactccagacactcaggcttccacactagcgtatgcaccatccacatccacctcgcttgatcaagctgcatcagcatcagcaaggtcgtcagtagatgggtggggtgagcttgaggatggtaatatccatgaggagaatagtagcgataaagatggatgggatgatgtagacccatttgaggacaagccatccccatctcttctatccaacatacaggctgctcaaaaacgtccagtggtgcaaccaaagcaaccggttgcaaactcatctaaaccaaacccactgaaagcgccaaagtcagaagacgatcctttgtggggtcctatagctgctgcaccacctaaaagtgcagtaaaatctgcagacatcaagccatcaacatcacataatgatgaggatgacctctggggttcaatagcagcacctccaaaatcatctgggaagcctttgaagccagctgtagcgaatagtgacgacttatggggtgccatcgcagcacctccaccagcaaccaaagccagacccttagcctcgtcaggtaggggccgaggaacaaagccagcgcaaccaaaacttggtgctcaaagaataggaagaacatcttcaactggaatgtgacgtcttatgatatcaagtgttgtacaagaatgcaaagttttcctttttttttcccctgccttgcgttgagtctgtccaggatgacattctttgtaaactagtaaaaagatttatgtatatgagcacagttttgaccaatgtattagtattattttaccattgtgtattaaaatagatccagaagatttttgcacatcacagctgcaatcatcttaagtccatattattaatatattgctatgtcttattttggcgtgataagagcaact

SEQ ID NO: 222184 - DNA, 2887 bp, Zea Mays
cccggatctatctcgccgcgccggcgcgcagctgagccgccgaagcgaggaggcaatcgaggcggacgaagcgccgcaccaaattcgacgggggatcgagcaccagaggcgtagcgcaaaatgttcaagttcctcaaggaggtggtcgcgggatccggatcgggactcaaggacttcccctacaccatcggcgagccctacgcatcggcttggggctcatggaaacaccaccgcggtacctccaaggatgatgggtcgcctgtgtcaattttttctctgtcagggagcaaccctcaggacagacacatggttgctggtcgcaacggtgttaagagattacgaacagtgcggcatccaaatatcttatcctttttacacagtactgaagcagaagctgcggatggacctgccatgaaatacacaatttatattgtaacagagcctgttatgccactttctgaaaagctcaaggaactgaatcttggtggtacacagagagatgagtactttgcatgggggcttcatcagatatccaaagctgtgagctttctcaataatgactgcaaacttgttcatggtaatgtatgcttggccagtgttgttgttacacaaaccctggattggaagcttcatgcttttgatgttctgtcagaatttgatgctaataatgaagcctctggtagccccatgttgcaatttgaatggttagttggaacacagtacaagccaatggagctgtcaaagtcagattgggcttcaattagaaaatcacccccatgggccattgattcttggggactagggtgtttaatttatgaactattttctggtgcaaagctggctagaacagaggaccttcgaaatactgcttcaatcccaaagattaccagaggctcttgaattccacaccttctcgtagactaaatccttcaaaacttattgacaacagcgagtttttccagaacaagttagtagagaccatccagttcatggaaattcttaatttgaaagacacctttgagaaagacagtttttttcgtaaactccccaatatagctgaacagcttcctcgtgaaatagttctgaaaaagctgctccctgtattggcttcttctcttgaatttggttcagctgccgctccagccttaactgttttgttaaagatgggttcctggcttcctgctgaccaatttaatatcaaggtcttgccaactattgtcaagctttttgcctccaatgaccgagctatccgagcatgtcttttgcatcacataaatcagtttggggaatcaatgtcagctcaaattgttgacgaacaagtttttcctcatgtagccactggcttctctgatactgatggtactattcgtgaactgacattgaagtcgatgctcgtattagcaccaaaattatctcagcgtacaatctcaggatctctcttaaaatatctctctaagctacaggtggacgaagaacctggtatcaggacaaacacaacaattcttcttggcaatattgcaggctacatgaacgatgggacaaggaagagagtactgatcaatgcattcacagttcgtgcattacgtgataccttccctccggccagagcagctggaatcatggcactgagtgtcactagttcatactatgaaatgacagagattgcaactcgcatcctgcctaacattgttgtgctcacatttgacccaaatagtgatgtccgaacgaaggcttttcaggctaccgatcagttcttgcaaatagcaaaacaacaccatgaaaagattcaagggttctggtacttttcatggtttagatcacagcttaatacaggagacaacagtgtggctgaaagtactggtgttaagttaaagcctggaaatgcaggtttacttgggtgggccatgagttctgttacacaaaagggtaaaccttttgaccatgccccaatatctactgcaaatgccaataattctcaagcatcaacaacctcgactgccactccagacactcaggcttccacactagcgtatgcaccatccacatccacctcgcttgatcaagctgcatcagcatcagcaaggtcgtcagtagatgggtggggtgagcttgaggatggtaatatccatgaggagaatagtagcgataaagatggatgggatgatgtagacccatttgaggacaagccatccccatctcttctatccaacatacaggctgctcaaaaacgtccagtggtgcaaccaaagcaaccggttgcaaactcatctaaaccaaacccactgaaagcgccaaagtcagaagacgatcctttgtggggtcctatagctgctgcaccacctaaaagtgcagtaaaatctgcagacatcaagccatcaacatcacataatgatgaggatgacctctggggttcaatagcagcacctccaaaatcatctgggaagcctttgaagccagctgtagcgaatagtgacgacttatggggtgccatcgcagcacctccaccagcaaccaaagccagacccttagcctcgtcaggtaggggccgaggaacaaagccagcgcaaccaaaacttggtgctcaaagaataggaagaacatcttcaactggaatgtgacgtcttatgatatcaagtgttgtacaagaatgcaaagttttcctttttttttcccctgccttgcgttgagtctgtccaggatgacattctttgtaaactagtaaaaagatttatgtatatgagcacagttttgaccaatgtattagtattattttaccattgtgtattaaaatagatccagaagatttttgcacatcacagctgcaatcatcttaagtccatattattaatatattgctatgtcttattttggcgtgataagagcaact

SEQ ID NO: 222185 - DNA, 1165 bp, Zea Mays
caaacaactcgtcctcgatttggatctctggtgatgtccgaacgaaggcttttcaggctaccgatcagttcttgcaaatagcaaaacaacaccatgaaaagcttaatacaggagacaacagtgtggctgaaagtactggtgttaagttaaagcctggaaatgcaggtttacttgggtgggccatgagttctgttacacaaaagggtaaaccttttgaccatgccccaatatctactgcaaatgccaataattctcaagcatcaacaacctcgactgccactccagacactcaggcttccacactagcgtatgcaccatccacatccacctcgcttgatcaagctgcatcagcatcagcaaggtcgtcagtagatgggtggggtgagcttgaggatggtaatatccatgaggagaatagtagcgataaagatggatgggatgatgtagacccatttgaggacaagccatccccatctcttctatccaacatacaggctgctcaaaaacgtccagtggtgcaaccaaagcaaccggttgcaaactcatctaaaccaaacccactgaaagcgccaaagtcagaagacgatcctttgtggggtcctatagctgctgcaccacctaaaagtgcagtaaaatctgcagacatcaagccatcaacatcacataatgatgaggatgacctctggggttcaatagcagcacctccaaaatcatctgggaagcctttgaagccagctgtagcgaatagtgacgacttatggggtgccatcgcagcacctccaccagcaaccaaagccagacccttagcctcgtcaggtaggggccgaggaacaaagccagcgcaaccaaaacttggtgctcaaagaataggaagaacatcttcaactggaatgtgacgtcttatgatatcaagtgttgtacaagaatgcaaagttttcctttttttttcccctgccttgcgttgagtctgtccaggatgacattctttgtaaactagtaaaaagatttatgtatatgagcacagttttgaccaatgtattagtattattttaccattgtgtattaaaatagatccagaagatttttgcacatcacagctgcaatcatcttaagtccatattattaatatattgctatgtcttattttggcgtgataagagcaact

SEQ ID NO: 222186 - DNA, 1516 bp, Zea Mays
ctcccggcacctgacctcacctccgcgtccaccatccttgtcaaaacggacctgagcagggcagagcagctcatgctcttggaactcccgtccttgttgagatcagtggatgaagagataagcctgctgcctgcctgccacaccatccatgcaggccgaggacgtgaggtcgcggttcgggcggtgcccttactgccgcgccatgatctaccaggacctcagcgccgtcatcttctactgcaccaggtgccgcacgcccatccgaggcaggaacccacaacccgccgacgagaccgagtacgcgctcgcgcagctcgagatcctctccgccgacaccgcgtccgtgttctccgacgtcgacgccgaaccgcccaacccgaggtcggcttgggccgtcgaggatgacgacggagaacagagcaggtcagctaccgctacccggagaagctccgcgtcgtcgccctcgtacagagagggagagtttggttcggtcagggcaggtccaacaagcagcggcagcgctctcaactctggcctcaaccgggaccaccgatcggaggccgcgagaagcgcgtcgccgctgcacagtcgcgtgacccagctccggccgtcgtcgcggaggaccaggcgatcgagcagcggcgacgtagatgtgcgcagcgacgcgggatcgaacaccgagtcgtactccgccgcgactgatacatcttacacgcgccggtcgtcgccgctgagctcgcaagaactccaagcgccgacggccttgtcagcagcagcaggattcgagtcagccgaccttacgaggacgccgctcggtgatccggcgttccagaaggacctcctgcaggcgctggacaacctccggaagctcatcgctgtcgtcgatcatccgccgcggagcgtcgacgtcgacgacgggcaccttcaaggcgcgacgcctcggctgagcgcgtcctgcaacaacgggagcagcggcggcaagcgtacgaccacaaggcgcagctcccgactcatgctccgcctggagtcgcagtcgcagctcacgcgggcgttgcccgccgagcgaccgcgccgccgagacgcgaacacgagcacttcgtcctcctcctcggcgtcgagcagccgccggcgcggtggcgccagggcgcgggccccgcagtgccgcccggtgctgggcggcacgccgttcgttgtctgcggcgagtgctcggagatactgcagctgccgcccgccctacccgccggccgagtatgcaggctgcagtgcggcggctgcggcgaagcgttcgagatgacgctgccggcggtcggctcgacgggcctgcccaagaagatcttttccgcgccgcagcctgctgtcagcggcggagaggatgccgaggagtatccgctcgcgagaagcaacctgagcctgagcctgagccgcgagcagccacggccgacgatggagccgctgcaccgcgtgctggggtacagctccgttagctcggtgctacgcagcctgcggtacagctga

SEQ ID NO: 222187 - DNA, 1380 bp, Zea Mays
gcaggcggcatcacactccagtacagctctcactgcgccctgcccgcatcggctccaccacgctccacgccccacgcccccctacacacacacacaccccgacaccccggacagagggggcgcaggcacgagaacagctcagtcgcggcgagctcccgggtctccagcgaaagtgccggaggagagagtggtggcggctggcgcgggctccctccgaggctctacgcggcgcctcagcgtaatgctggccttccccggggacagatcggcctgagtcgccgttgccgctctcgaatcggcgtcttcctcgcatggttccggccagagcttggatctcgcggcggaagacgcgaggcggaaaagtggggagggtgtcgttccttggttttcttctcgccaaagggaataaagctgctggaagagctccattgaactgggagacaagagtcaagatatctctggacgtggcccatggaatcgcccaccttcataccgagggaggagggaagttcatccacggcaacatcaaagcatcgaacgtcctcctatcgcagaacctcgacggctgcgtctccgagttcggcctggcacagatcatgaccaccccacagaccccgccgcggcccgtcgggtaccgggcgcccgaagtcctcgagaacaagaaatcgacccagcagtccgacgtctacagcttcggcgtcctgctcctcgaaatgctcacgggaaaagcccccctcaggtctcccgggcgcgaggacccctccgtcgagcaccttccgaggtgggtgcagtccgtggtccgtgaggagtggaccgccgaggtcttcgacgtggacttgctacggcaccccaacgtcgaggacgagatggtccagatgctccaggtcgcgatggcgtgcgtggccgctcaccccgaggagcggcccaagatggaggaagtgatcaggagggtcacggaggtccggaattcttactcttctgggacgaggacgcccctggaggacaagccatcggagactgcacgagcgccatgagggggtacagcgtagtttagcaggagacggtagctaggttgcatagtggattccttatagagcttcagcaaagttgatagccacctgcatagcgcagtttccctcgcgattcccgatcgtttccagtaaatctgttgtgttgtttcctctctttttttccccctgattctagcggtctggttgtcgatccatgccattgtattgttgttcagttaaatcagcagctcttctggttagtgttgcactgtaatttgacataatctttgcagcgtgattaatgaatttcatttgccttctgtttctgccagatgccagtcagatttcgtggtgcttgatttggtctcct

SEQ ID NO: 222188 - DNA, 2723 bp, Zea Mays
gcaggcggcatcacactccagtacagctctcactgcgccctgcccgcatcggctccaccacgctccacgccccacgcccccctacacacacacacaccccgacaccccggacagagggggcgcaggcacgagaacagctcagtcgcggcgagctcccgggtctccagcgaaagtgccggaggagagagtggtggcggctggcgcgggctccctccgaggctctacgcggcgcctcagcgtaatgctggccttccccggggacagatcggcctgagtcgccgttgccgctctcgaatcggcgtcttcctcgcatggttccggccagagcttggatctcgcggcggaagacgcgaggcggaaaagtggggagggtgtcgttccttggttttcttctcgccaaagttatgatggaaaagcttgtatagtagcgctaaatctaattctcttgaagcaagtctcaaccatgcagcgtcttacagcgatagtcttcgtggctacttctttccttattgcaagtgttccacatgccaaaagtgctgatctgaactctgataagcaggctcttctcgcatttgctgcatcactgcctcatggcaggaagctcaactggagctccaccacacctgtctgcacttcttgggtgggggtgacatgcacaccagataagagtcgtgtacatacactgcgcctacctgctgtaggacttttcggtccaataccatcagacactcttgggaagcttgatgcactggaggtattgagccttaggtcaaatcgccttactgttgacctcccacctgatgtaggatctattcctgccctccattccctctaccttcagcataataacctgtctggaatcataccaacttccctctcttccagtttaacattcttagacctgtcatacaacactttcgatggagaaatcccattgaaagtgcaaaatcttactcaacttactgcattgcttctccagaataactcactttctggacccattcctgacctccaacttcccaaattgagacacttgaatttgagcaacaataacctcagtgggccaataccaccttccttgcagaggtttccatcgagttccttcttagggaattcttttttgtgtgggtttcctttggaaccatgttttggaactgcaccttctccttctccagtatcaccaccatcccccagtaagaccaagaagagcttatggaaaaagatcagaactggtgtgataattggaattgctgttgttggaggggtattgttgcttattttgattctcgtgctcttgatatgtattttcaagagaaagggacacactgaacctaccacagcttcgtccaaaggaaaggctattgcaggtggcagggcagaaaaccctaaggaagactacagcagtggtgttcaggaagcagagaggaataaattggttttcttcgagggcagttcatttaattttgacttggaggatttgttgagagcttctgctgaagtccttggcaaaggaagttatggaactacctacaaagctgttcttgaggatgcaaccatagttgttgtcaagagattgaaggaagtggtggttagcaagaaggattttgaacagcagatggagataattggtagggttggccagcatcaaaatgtaattccattgcgggcttactattactccaaggatgagaagttgttggtgtttgattatgtcccatctggtagccttgctgctgttttgcatgggaataaagctgctggaagagctccattgaactgggagacaagagtcaagatatctctggacgtggcccatggaatcgcccaccttcataccgagggaggagggaagttcatccacggcaacatcaaagcatcgaacgtcctcctatcgcagaacctcgacggctgcgtctccgagttcggcctggcacagatcatgaccaccccacagaccccgccgcggcccgtcgggtaccgggcgcccgaagtcctcgagaacaagaaatcgacccagcagtccgacgtctacagcttcggcgtcctgctcctcgaaatgctcacgggaaaagcccccctcaggtctcccgggcgcgaggacccctccgtcgagcaccttccgaggtgggtgcagtccgtggtccgtgaggagtggaccgccgaggtcttcgacgtggacttgctacggcaccccaacgtcgaggacgagatggtccagatgctccaggtcgcgatggcgtgcgtggccgctcaccccgaggagcggcccaagatggaggaagtgatcaggagggtcacggaggtccggaattcttactcttctgggacgaggacgcccctggaggacaagccatcggagactgcacgagcgccatgagggggtacagcgtagtttagcaggagacggtagctaggttgcatagtggattccttatagagcttcagcaaagttgatagccacctgcatagcgcagtttccctcgcgattcccgatcgtttccagtaaatctgttgtgttgtttcctctctttttttccccctgattctagcggtctggttgtcgatccatgccattgtattgttgttcagttaaatcagcagctcttctggttagtgttgcactgtaatttgacataatctttgcagcgtgattaatgaatttcatttgccttctgtttctgccagatgccagtcagatttcgtggtgcttgatttggtctcct

SEQ ID NO: 222189 - DNA, 985 bp, Zea Mays
tatcgcccctataaaccctacgaagaaggtaaaaaggagggcagccagcggaagaaacacccggaggaagcgcccgattttgacatctcgtatgcgcgattgctggaatcctcctcccctgattttaccgcacagcagaaaagaagataaaacacgacaaaaatctaaggaaaacgcaatcacatcttccttcgtccgctgccgtcgcctctcttcattggtagcagcttaatccaaccccagtccaacccgccgccatgcaggcgctgatggccacggacaaatgcttctctccggctagggcgatgtccccgatgccgattgtgaggccccctgcatcacccgacattgccattcagtatctggatgacttgttgcaggagcaacagaagctcgggcccttcgtgcaggtgctcccaatctgcggcatgctgttgaatcaagagatacggagaatatcaaacctgctttctaactttggactcagaggaaatgagaggtcgccaccaattgcaagtccaaaccatatgcatccattgccccgggtgcctaatttctgtggaaacagttttggtccttggaatgagatgcatcctgagagaaatggtttacctaggggagccatgggctggcaaggtgctgtacagaaccattcctcctacattgtcaagaagattgtgcgattggaagttccaacagatgcttaccccaattttaacttcattggccgtctgcttgggccaaggggacactcgctaaagagagttgaagctactacaggttgccgtgttttcatcagagggaagggctccgtaaaagatcctgtgaagaggaacagctcaagggaaggcctggctatgaacacttgggcgatccaacacatatcttgatcgaggctgaattacctgctgatgttattgatgccagactggcacaagcacaggagatactggaggagttgctgaaaccagtggtatacatatga

SEQ ID NO: 222190 - DNA, 6496 bp, Zea Mays
cagccgtccatccctttccagctctccagagcctccgccggcgcatccggcgactgatttgcagggcgtatgtgttggaaatgctcagctgctagtttttcctggtagatcatcaagtcttgagagcagttaaaacaaaccaatttttcctgcaagagctctacgtgctatggagacagcaaatacattttcctttggttcacttcaattttgacgtacataatcttttattttcattgccaacattgttttcttgattttctgcctttatatcttcttgattaaaactttttgatcgataattctagttctagacaaaatatgaagctagttattttcctatgaactgaatgtttattctgatacccaaagacctcccttcaaacatagtctgtcttaaactattccactttattcatgcatgttgcttgtgctcagacagtactattgccatgaagcaaagtctgtcttaaattattccactttattcatgcatgttgcttgtgctcagacagtactattggtatagtgactagccgtctagcactatattaatttattcttttctgaagacaatctaagcacacgggtgccctacccggtgctacattcggtacatggcatccggtgtacaccgtagtatccactatccagtgctatctgctgtgatgtttttccttacaatatcaaggatatcatttctattattttgttttcattcagctctctaatgagacaaaaatagttcaggggcagatatgtcattttacatgccaagacagagaatccatttaaaaaatcaggattgccaaacattcagcttttctagacaacaaattctctggaaagcgtcttctcaggaaatcaggcttttcagataagcgtttctcagaaaagtggatccaaacagggcctaaattagtgtatctacatgcagctcaatcaaaaactggatcttggatttaaaatccattattcacttctcaaaattagcaaatttaactaagttttactatagatggttcagtgacagtaagctaattgatgcaaataagtgagtctagatgtatgtgcggacccatgttcaaaccgcgcacctgcaactaaacatcacattcccacaatgtgctgttgaatggaatcccagaagaagccacatttcataggtgtgacctttggcagggtgatcccttatcacctatgttatttattctgattatagacgctttggtttatttggttaaaaaggctgaagaggatgggctgcttcagcccctgtcttcaaaggttcttcaacaccagatttctctatatgcagatgatgttgttatcttcctcaagccggctactagtgatatgctttcatcatggatgtgcttcacttgtttgggggaggcttctggtcttaaaaacaatgtgcaaaaaactagtgattttcctataaggtgtgaagattaatacttgatggtcattcaaggccttctgccatgcaacatcttgagcttgataggattgccaattagctacagaggtggaaggctaacttaataacaagggctagcaggagggtttgagtttagtttgtgctcataggaatgttgatctactttgctatgactactgacattcctccttgggttttcaaagcaattgataaaatcagacaaagatttctatggaggagaaggaaggatgccaaaggcgggcactgcctcgtggcgtggggaaaggtttgtcacccccttgagcttggcggccttggtatttcaagtcttctagagctatcttgggcactccgcatgagatggctttggctccaaaaaactgagtcaaataaaccatgggctgatttacctatccaagtcctagccaaagcctaggtgcttttttctattgctctgatttctaaggttggggacggcacatccaccctattctggactaatcgttggttgatggggcaaaatatcatggaagtggcaccaaggttgtttgctgcttgttcctaagagaattacaagaaggagaattgttcttgaagccctcactaatcatcactggattttggatgttcaagttgctttaacaattcaagtaattgtggattatatctagattcgggactgtctcagtcaggtggagttacagcagggggtggctgattctcacatccagttctcgcgtaatggaagatattcagccaaaatggcatatgcgggtttttttgttggctcggttccttttgaaccttatgagaagatttgatgttcatggccccttcctaaatataaatgttttctgtggttggtgacgcacaacagatactggatggcaggcaggctggcttgtagaggcctcccggtgcctgctgtgtgactaggaagatgaaacagtcagccatgtgcttctttcttgtatgtttgcgtgagaattttggttcaaaatcctaaggccttatggcctgcagacccttgcaccataatctgaaggtaggagtttctttctctggtggacgcaggctgaagagagaactaaggggttgacaagaaaaggtttcaactccctcgtcatcctgggagcttgaactctgtggaagatacgaaatggatgtctttgaaggcctctccccatcatatgatttcagcttctgctcactttggtgaagaaatagatttatggatgatggctcacgccaaaggattggtgttcctttcagccgtggctgaggattagtggtagttggtctgctataatctatgcctatgaataatcctttcttgtataagaggttttggccaccatgagctagccatttgagttttgtaaggcctttatacgtttcttcttagtataatgatacgtagttctcctgcgtctttgagaaaaaaagttctaacgaaattcactagaatttatttgatgtggcacattttgatatcaggtacttcttgaagattatatatagctcatttaaatgtgtgatccatgtcaaaaggtggacctgattaactgattttgaaaacattatattcacaccttaaattattaaatttgtttcaaggccaagtagcaatgtatatacacccaaatgcgtctctaccaaatttgaaatgtcttatcataaaattcaagctctaggtccatatagatctcattctctaaaaattgatccatatagatctatccctacatgtaaacaaaacctagtcatgcatacctatgatttattccaacaaggcgcccacaaaaataaatgatcaaatattttatcagaatttacatatcatttcttttttctagtcattgtaatctgtactattcaatagacacatgtttgtgaaaattatagagatgcaaggcaggttatccgtaaacccgtaaatagactaaatttttacgagttacccacaaatttgcaaaagattagcctatttgtgggtttatggacaacccgacttgcatccctcaaatattacataaaaaaactgagggtggttgaaaacatacagggagtgcttgaagatggctttgttgccgtcaagaagttatactcgtatattgcaattgaagacgaaccatttcatcgtgaggttgattgtctaatgaatattaggcaccacaacatagtcttgtttgttggttactgtgctgaaacacaggaagtggttgtgcgtcaagaagggaaacatatttttgcggaaaaacgagaaagattactttgcttcgagtatttgcataatggaagccttcacaagcatctgacagccgaaccatgtgggcttccatggcacatttgttaccaaataataaaagggatttgcctgggcttgcactacctacatgacaagaacataattcatctagatctgaaaccggacaatatattgcttgatgatgacatggtgcccaaaatcacggacttcggtttgtcaagactcttgggtaatggaaaaagccacaccattacacaaacaagaataggaacatggggttacatggcacccgagtacttggatgatggagtgatcacaatgaagacagacatctatagcttgggtgtgataatcagacacatggtgaagggacgtaactcggcagacaccactgatgaagaagtactggcaaactggttgattaggctggaaaaggatccatcacagatgatgaggcagcagacgacccgattattatttgaaacagagtacaaagagcaaataaaagcgtgcatggatatatcatggaggtgcacgctgcgtaaaccaatggacaggccaacgacgcagcacatcctacttacactggaggaaacagaagcaaagatcaaatcggtcgttgggcctactccaccaaatgccgggcagattgccaaatttgggccgtggggtggagatggagggaagacgcgagacataagaatgacgccttgccatttgcatagcgtaacaattagcagtggaactattatcgattctatcgggttttcattcactgatcactatggtcagcaccacacaacagggccttggggcggtaaggagggtacgaataagattgaactaggcccttcggagtttcttacaggagtatctggaacaagcggcccattcaaaaatctaacaaatgttgtaacgtcacttacgtttgtcaccaatactcgtagttacggaccctttggaaaagggcgaggaacaccgttccacatccaaacgcagaacaacggcaggatcgttggcttctttggccgttctggccagtatctctatgcgattggggtctacacgaaccaagatgctagggtcgcaaggatcgggcgacctttgggtggagatgaaggggttcttcatggcatcacagacctcagtgggcagcagcgcagcagaggtggaggtccatcgggagaatgtggagacagcgacgacgagcccaacggtgatttcgccaaattcggcccgtggggcggcgacggaggacagccgcaggacatcggaacactaccctgccgtctagacaggatcaagatcagcagtgggcttatcatcgactcgatcgagttctcgtacgctggccctgacagccagtaccgcaccgcaggcccttggggtggtcatggaggagacaacagctcttttcagctagctggttcagagttccttacaggtgtgtctgggtcaatcggcacattcaacggccatgcaaacgtcataacgtctctgacgttcgtcaccaacgctcgtagctacgggccgtttggaagagggcgaggcacatccttccacatcccagtgcagggcaatggctgcatcgtcggtttctttgggcgctccggacggtacctcaacgcgatcggtgtctacacggcgccgaaacccgaaccaaaagcagttgggaaacaagatggtggtgatgaggccgtcgtcgccaggattgggccttggggcggggttggaaatgctctccatgacatcgcagagaggccgcatcgcctgcacagagtgacgatcttcagcgggacgatcgtaaactcgctggagtatctgtacagcgatggcgacgggcagcagcacaccaccggtccgtggggcggctgcggaggaactggtcgaaagattcatcttgcccctgaagagttcatagtggaagttactgggacattccatccatgcgcgtgggacagaacaatacccagtgtcgtgtcctctctgacgctcgtgaccagcacgggcaaaacacacgggcctttcggaacgcagctgggagccgcgttccaggttccggtgcagagcgacagcaggatcgttggcttcttcgcccacggagacaattacatcgaagcaattggcgcctacgtgaagaaattgacagaatccagcaaccgttaactcttggaacaacttgcagctgttcacactgtttcttgggccattgctccttaaatttagtccagatggccaaggagcaaccaaacagaaatcgctatggcagggaagatggactaaactggactgtggcacctccagcatagcctgctcttagattagtgaccagacatcatcgagatatttcgatattataataaatgaggaacccatctcagatgtttatgttagctcctcagtttttgcttctgaatgattaatttagatcttccttatttttgcaataaatgaggattcttttctgtctcttctgaatggatacgaatcatgcatcacgtatcagtgcacctattgcagtgaggagatgaggacaaggtgctgacgaacttattgtcctgagctcccacttgagtttctgattgctgctttacaactttggtctatacgtgttgttccatcactagcctagtgaagcctgaaaacgtgtctgcatgctttagaaaaagactgcttccatccttacaatttccaggatatatccttacaaattcccaaactgggtgacgtcgaaaaggtgatctatagcatgacgttttgcagtgcctgtcagaggcaaaaaa

SEQ ID NO: 222191 - DNA, 3442 bp, Zea Mays
ccctttccagctctccagagcctccgccggcgcatccggcgactgatttgcagggagtgcttgaagatggctttgttgccgtcaagaagttatactcgtatattgcaattgaagacgaaccatttcatcgtgaggttgattgtctaatgaatattaggcaccacaacatagtcttgtttgttggttactgtgctgaaacacaggaagtggttgtgcgtcaagaagggaaacatatttttgcggaaaaacgagaaagattactttgcttcgagtatttgcataatggaagccttcacaagcatctgacagccgaaccatgtgggcttccatggcacatttgttaccaaataataaaagggatttgcctgggcttgcactacctacatgacaagaacataattcatctagatctgaaaccggacaatatattgcttgatgatgacatggtgcccaaaatcacggacttcggtttgtcaagactcttgggtaatggaaaaagccacaccattacacaaacaagaataggaacatggggttacatggcacccgagtacttggatgatggagtgatcacaatgaagacagacatctatagcttgggtgtgataatcagacacatggtgaagggacgtaactcggcagacaccactgatgaagaagtactggcaaactggttgattaggctggaaaaggatccatcacagatgatgaggcagcagacgacccgattattatttgaaacagagtacaaagagcaaataaaagcgtgcatggatatatcatggaggtgcacgctgcgtaaaccaatggacaggccaacgacgcagcacatcctacttacactggaggaaacagaagcaaagatcaaatcggtcgttgggcctactccaccaaatgccgggcagcttcagattgccaaatttgggccgtggggtggagatggagggaagacgcgagacataagaatgacgccttgccatttgcatagcgtaacaattagcagtggaactattatcgattctatcgggttttcattcactgatcactatggtcagcaccacacaacagggccttggggcggtaaggagggtacgaataagcttgggggactacatccaaatacattccagcatagcatgcacatccaaatacgggtagccagcatgatggtatgtgactagctccaaattactaagaaagaataacataccatgatagtactactacaatggtatatcattccctattttataaagcatgtcatctttggagaacttgctatggaataatggtggtaacaattggactcatatatatatatatatatacaattatatataaaagaataagtaaacaaggggttcttgaagacattcctaagttacaatttgaagtactaaaatttggtactcgagatgccgattttcacatgcttcttatgctttagtaacggtaattaaatcttgatttctctccaaggcggtagggctcaaagtcactaccgtctgactgctcatgactgtctttacaggaggatatttgtatgtgaaatagaaatactgtttctctttctctttctctttctcttgcagattgaactaggcccttcggagtttcttacaggagtatctggaacaagcggcccattcaaaaatctaacaaatgttgtaacgtcacttacgtttgtcaccaatactcgtagttacggaccctttggaaaagggcgaggaacaccgttccacatccaaacgcagaacaacggcaggatcgttggcttctttggccgttctggccagtatctctatgcgattggggacctcagtgggcagcagcgcagcagaggtggaggtccatcgggagaatgtggagacagcgacgacgagcccaacggtgatttcgccaaattcggcccgtggggcggcgacggaggacagccgcaggacatcggaacactaccctgccgtctagacaggatcaagatcagcagtgggcttatcatcgactcgatcgagttctcgtacgctggccctgacagccagtaccgcaccgcaggcccttggggtggtcatggaggagacaacagctcttttcagctagctggttcagagttccttacaggtgtgtctgggtcaatcggcacattcaacggccatgcaaacgtcataacgtctctgacgttcgtcaccaacgctcgtagctacgggccgtttggaagagggcgaggcacatccttccacatcccagtgcagggcaatggctgcatcgtcggtttctttgggcgctccggacggtacctcaacgcgatcggtgtctacacggcgccgaaacccgaaccaaaagcaggtggtgatgaggccgtcgtcgccaggattgggccttggggcggggttggaaatgctctccatgacatcgcagagaggccgcatcgcctgcacagagtgacgatcttcagcgggacgatcgtaaactcgctggagtatctgtacagcgatggcgacgggcagcagcacaccaccggtccgtggggcggctgcggaggaactggtcgaaagattcatcttgcccctgaagagttcatagtggaagttactgggacattccatccatgcgcgtgggacagaacaatacccagtgtcgtgtcctctctgacgctcgtgaccagcacgggcaaaacacacgggcctttcggaacgcagctgggagccgcgttccaggttccggtgcagagcgacagcaggatcgttggcttcttcgcccacggagacaattacatcgaagcaattggcgcctacgtgaagaaattgacagaatccagcaaccgttaactcttggaacaacttgcagctgttcacactgtttcttgggccattgctccttaaatttagtccagatggccaaggagcaaccaaacagaaatcgctatggcagggaagatggactaaactggactgtggcacctccagcatagcctgctcttagattagtgaccagacatcatcgagatatttcgatattataataaatgaggaacccatctcagatgtttatgttagctcctcagtttttgcttctgaatgattaatttagatcttccttatttttgcaataaatgaggattcttttctgtctcttctgaatggatacgaatcatgcatcacgtatcagtgcacctattgcagtgaggagatgaggacaaggtgctgacgaacttattgtcctgagctcccacttgagtttctgattgctgctttacaactttggtctatacgtgttgttccatcactagcctagtgaagcctgaaaacgtgtctgcatgctttagaaaaagactgcttccatccttacaatttccaggatatatccttacaaattcccaaactgggtgacgtcgaaaaggtgatctatagcatgacgttttgcagtgcctgtcagaggcaaaaaa

SEQ ID NO: 222192 - DNA, 3340 bp, Zea Mays
ctttccagctctccagagcctccgccggcgcatccggcgactgatttgcagggagtgcttgaagatggctttgttgccgtcaagaagttatactcgtatattgcaattgaagacgaaccatttcatcgtgaggttgattgtctaatgaatattaggcaccacaacatagtcttgtttgttggttactgtgctgaaacacaggaagtggttgtgcgtcaagaagggaaacatatttttgcggaaaaacgagaaagattactttgcttcgagtatttgcataatggaagccttcacaagcatctgacaggggttacatggcacccgagtacttggatgatggagtgatcacaatgaagacagacatctatagcttgggtgtgataatcagacacatggtgaagggacgtaactcggcagacaccactgatgaagaagtactggcaaactggttgattaggctggaaaaggatccatcacagatgatgaggcagcagacgacccgattattatttgaaacagagtacaaagagcaaataaaagcgtgcatggatatatcatggaggtgcacgctgcgtaaaccaatggacaggccaacgacgcagcacatcctacttacactggaggaaacagaagcaaagatcaaatcggtcgttgggcctactccaccaaatgccgggcagcttcagattgccaaatttgggccgtggggtggagatggagggaagacgcgagacataagaatgacgccttgccatttgcatagcgtaacaattagcagtggaactattatcgattctatcgggttttcattcactgatcactatggtcagcaccacacaacagggccttggggcggtaaggagggtacgaataaggtgagcatcaaagaataacactttctgtactttaaatataaataatgttatttagacgtgtgcaacacaaacttaaatttgcatttgtgaatgttatcattgtttaagcttgggggactacatccaaatacattccagcatagcatgcacatccaaatacgggtagccagcatgatggtatgtgactagctccaaattactaagaaagaataacataccatgatagtactactacaatggtatatcattccctattttataaagcatgtcatctttggagaacttgctatggaataatggtggtaacaattggactcatatatatatatatatatacaattatatataaaagaataagtaaacaaggggttcttgaagacattcctaagttacaatttgaagtactaaaatttggtactcgagatgccgattttcacatgcttcttatgctttagtaacggtaattaaatcttgatttctctccaaggcggtagggctcaaagtcactaccgtctgactgctcatgactgtctttacaggaggatatttgtatgtgaaatagaaatactgtttctctttctctttctctttctcttgcagattgaactaggcccttcggagtttcttacaggagtatctggaacaagcggcccattcaaaaatctaacaaatgttgtaacgtcacttacgtttgtcaccaatactcgtagttacggaccctttggaaaagggcgaggaacaccgttccacatccaaacgcagaacaacggcaggatcgttggcttctttggccgttctggccagtatctctatgcgattggggacctcagtgggcagcagcgcagcagaggtggaggtccatcgggagaatgtggagacagcgacgacgagcccaacggtgatttcgccaaattcggcccgtggggcggcgacggaggacagccgcaggacatcggaacactaccctgccgtctagacaggatcaagatcagcagtgggcttatcatcgactcgatcgagttctcgtacgctggccctgacagccagtaccgcaccgcaggcccttggggtggtcatggaggagacaacagctcttttcagctagctggttcagagttccttacaggtgtgtctgggtcaatcggcacattcaacggccatgcaaacgtcataacgtctctgacgttcgtcaccaacgctcgtagctacgggccgtttggaagagggcgaggcacatccttccacatcccagtgcagggcaatggctgcatcgtcggtttctttgggcgctccggacggtacctcaacgcgatcggtgtctacacggcgccgaaacccgaaccaaaagcagttgggaaacaagatggtggtgatgaggccgtcgtcgccaggattgggccttggggcggggttggaaatgctctccatgacatcgcagagaggccgcatcgcctgcacagagtgacgatcttcagcgggacgatcgtaaactcgctggagtatctgtacagcgatggcgacgggcagcagcacaccaccggtccgtggggcggctgcggaggaactggtcgaaagattcatcttgcccctgaagagttcatagtggaagttactgggacattccatccatgcgcgtgggacagaacaatacccagtgtcgtgtcctctctgacgctcgtgaccagcacgggcaaaacacacgggcctttcggaacgcagctgggagccgcgttccaggttccggtgcagagcgacagcaggatcgttggcttcttcgcccacggagacaattacatcgaagcaattggcgcctacgtgaagaaattgacagaatccagcaaccgttaactcttggaacaacttgcagctgttcacactgtttcttgggccattgctccttaaatttagtccagatggccaaggagcaaccaaacagaaatcgctatggcagggaagatggactaaactggactgtggcacctccagcatagcctgctcttagattagtgaccagacatcatcgagatatttcgatattataataaatgaggaacccatctcagatgtttatgttagctcctcagtttttgcttctgaatgattaatttagatcttccttatttttgcaataaatgaggattcttttctgtctcttctgaatggatacgaatcatgcatcacgtatcagtgcacctattgcagtgaggagatgaggacaaggtgctgacgaacttattgtcctgagctcccacttgagtttctgattgctgctttacaactttggtctatacgtgttgttccatcactagcctagtgaagcctgaaaacgtgtctgcatgctttagaaaaagactgcttccatccttacaatttccaggatatatccttacaaattcccaaactgggtgacgtcgaaaaggtgatctatagcatgacgttttgcagtgcctgtcagaggcaaaaaa

SEQ ID NO: 222193 - DNA, 3175 bp, Zea Mays
cagctctccagagcctccgccggcgcatccggcgactgatttgcagggcgtatgtgttggaaatgctcagctgctagtttttcctggtagatcatcaagtcttgagagcagttaaaacaaaccaatttttcctgcaagagctctacgtgctatggagacagcaaatacattttcctttggttcacttcaattttgacggagtgcttgaagatggctttgttgccgtcaagaagttatactcgtatattgcaattgaagacgaaccatttcatcgtgaggttgattgtctaatgaatattaggcaccacaacatagtcttgtttgttggttactgtgctgaaacacaggaagtggttgtgcgtcaagaagggaaacatatttttgcggaaaaacgagaaagattactttgcttcgagtatttgcataatggaagccttcacaagcatctgacagccgaaccatgtgggcttccatggcacatttgttaccaaataataaaagggatttgcctgggcttgcactacctacatgacaagaacataattcatctagatctgaaaccggacaatatattgcttgatgatgacatggtgcccaaaatcacggacttcggtttgtcaagactcttgggtaatggaaaaagccacaccattacacaaacaagaataggaacatggggttacatggcacccgagtacttggatgatggagtgatcacaatgaagacagacatctatagcttgggtgtgataatcagacacatggtgaagggacgtaactcggcagacaccactgatgaagaagtactggcaaactggttgattaggctggaaaaggatccatcacagatgatgaggcagcagacgacccgattattatttgaaacagagtacaaagagcaaataaaagcgtgcatggatatatcatggaggtgcacgctgcgtaaaccaatggacaggccaacgacgcagcacatcctacttacactggaggaaacagaagcaaagatcaaatcggtcgttgggcctactccaccaaatgccgggcagcttcagattgccaaatttgggccgtggggtggagatggagggaagacgcgagacataagaatgacgccttgccatttgcatagcgtaacaattagcagtggaactattatcgattctatcgggttttcattcactgatcactatggtcagcaccacacaacagggccttggggcggtaaggagggtacgaataagattgaactaggcccttcggagtttcttacaggagtatctggaacaagcggcccattcaaaaatctaacaaatgttgtaacgtcacttacgtttgtcaccaatactcgtagttacggaccctttggaaaagggcgaggaacaccgttccacatccaaacgcagaacaacggcaggatcgttggcttctttggccgttctggccagtatctctatgcgattggggtctacacgaaccaagatgctagggtcgcaaggatcgggcgacctttgggtggagatgaaggggttcttcatggcatcacagacctcagtgggcagcagcgcagcagaggtggaggtccatcgggagaatgtggagacagcgacgacgagcccaacggtgatttcgccaaattcggcccgtggggcggcgacggaggacagccgcaggacatcggaacactaccctgccgtctagacaggatcaagatcagcagtgggcttatcatcgactcgatcgagttctcgtacgctggccctgacagccagtaccgcaccgcaggcccttggggtggtcatggaggagacaacagctcttttcagctagctggttcagagttccttacaggtgtgtctgggtcaatcggcacattcaacggccatgcaaacgtcataacgtctctgacgttcgtcaccaacgctcgtagctacgggccgtttggaagagggcgaggcacatccttccacatcccagtgcagggcaatggctgcatcgtcggtttctttgggcgctccggacggtacctcaacgcgatcggtgtctacacggcgccgaaacccgaaccaaaagcaggtggtgatgaggccgtcgtcgccaggattgggccttggggcggggttggaaatgctctccatgacatcgcagagaggccgcatcgcctgcacagagtgacgatcttcagcgggacgatcgtaaactcgctggagtatctgtacagcgatggcgacgggcagcagcacaccaccggtccgtggggcggctgcggaggaactggtcgaaagattcatcttgcccctgaagagttcatagtggaagttactgggacattccatccatgcgcgtgggacagaacaatacccagtgtcgtgtcctctctgacgctcgtgaccagcacgggcaaaacacacgggcctttcggaacgcagctgggagccgcgttccaggttccggtgcagagcgacagcaggatcgttggcttcttcgcccacggagacaattacatcgaagcaattggcgcctacgtgaagaaattgacagaatccagcaaccgttaactcttggaacaacttgcagctgttcacactgtttcttgggccattgctccttaaatttagtccagatggccaaggagcaaccaaacagaaatcgctatggcagggaagatggactaaactggactgtggcacctccagcatagcctgctcttagattagtgaccagacatcatcgagatatttcgatattataataaatgaggaacccatctcagatgtttatgttagctcctcagtttttgcttctgaatgattaatttagatcttccttatttttgcaataaatgaggattcttttctgtctcttctgaatggatacgaatcatgcatcacgtatcagtgcacctattgcagtgaggagatgaggacaaggtgctgacgaacttattgtcctgagctcccacttgagtttctgattgctgctttacaactttggtctatacgtgttgttccatcactagcctagtgaagcctgaaaacgtgtctgcatgctttagaaaaagactgcttccatccttacaatttccaggatatatccttacaaattcccaaactgggtgacgtcgaaaaggtgatctatagcatgacgttttgcagtgcctgtcagaggcaaaaaa

SEQ ID NO: 222194 - DNA, 3259 bp, Zea Mays
cagctctccagagcctccgccggcgcatccggcgactgatttgcagggcgtatgtgttggaaatgctcagctgctagtttttcctggtagatcatcaagtcttgagagcagttaaaacaaaccaatttttcctgcaagagctctacgtgctatggagacagcaaatacattttcctttggttcacttcaattttgacggagtgcttgaagatggctttgttgccgtcaagaagttatactcgtatattgcaattgaagacgaaccatttcatcgtgaggttgattgtctaatgaatattaggcaccacaacatagtcttgtttgttggttactgtgctgaaacacaggaagtggttgtgcgtcaagaagggaaacatatttttgcggaaaaacgagaaagattactttgcttcgagtatttgcataatggaagccttcacaagcatctgacagccgaaccatgtgggcttccatggcacatttgttaccaaataataaaagggatttgcctgggcttgcactacctacatgacaagaacataattcatctagatctgaaaccggacaatatattgcttgatgatgacatggtgcccaaaatcacggacttcggtttgtcaagactcttgggtaatggaaaaagccacaccattacacaaacaagaataggaacatggggttacatggcacccgagtacttggatgatggagtgatcacaatgaagacagacatctatagcttgggtgtgataatcagacacatggtgaagggacgtaactcggcagacaccactgatgaagaagtactggcaaactggttgattaggctggaaaaggatccatcacagatgatgaggcagcagacgacccgattattatttgaaacagagtacaaagagcaaataaaagcgtgcatggatatatcatggaggtgcacgctgcgtaaaccaatggacaggccaacgacgcagcacatcctacttacactggaggaaacagaagcaaagatcaaatcggtcgttgggcctactccaccaaatgccgggcagcttcagattgccaaatttgggccgtggggtggagatggagggaagacgcgagacataagaatgacgccttgccatttgcatagcgtaacaattagcagtggaactattatcgattctatcgggttttcattcactgatcactatggtcagcaccacacaacagggccttggggcggtaaggagggtacgaataagcttgggggactacatccaaatacattccagcatagcatgcacatccaaatacgggtagccagcatgatgattgaactaggcccttcggagtttcttacaggagtatctggaacaagcggcccattcaaaaatctaacaaatgttgtaacgtcacttacgtttgtcaccaatactcgtagttacggaccctttggaaaagggcgaggaacaccgttccacatccaaacgcagaacaacggcaggatcgttggcttctttggccgttctggccagtatctctatgcgattggggtctacacgaaccaagatgctagggtcgcaaggatcgggcgacctttgggtggagatgaaggggttcttcatggcatcacagacctcagtgggcagcagcgcagcagaggtggaggtccatcgggagaatgtggagacagcgacgacgagcccaacggtgatttcgccaaattcggcccgtggggcggcgacggaggacagccgcaggacatcggaacactaccctgccgtctagacaggatcaagatcagcagtgggcttatcatcgactcgatcgagttctcgtacgctggccctgacagccagtaccgcaccgcaggcccttggggtggtcatggaggagacaacagctcttttcagctagctggttcagagttccttacaggtgtgtctgggtcaatcggcacattcaacggccatgcaaacgtcataacgtctctgacgttcgtcaccaacgctcgtagctacgggccgtttggaagagggcgaggcacatccttccacatcccagtgcagggcaatggctgcatcgtcggtttctttgggcgctccggacggtacctcaacgcgatcggtgtctacacggcgccgaaacccgaaccaaaagcagttgggaaacaagatggtggtgatgaggccgtcgtcgccaggattgggccttggggcggggttggaaatgctctccatgacatcgcagagaggccgcatcgcctgcacagagtgacgatcttcagcgggacgatcgtaaactcgctggagtatctgtacagcgatggcgacgggcagcagcacaccaccggtccgtggggcggctgcggaggaactggtcgaaagattcatcttgcccctgaagagttcatagtggaagttactgggacattccatccatgcgcgtgggacagaacaatacccagtgtcgtgtcctctctgacgctcgtgaccagcacgggcaaaacacacgggcctttcggaacgcagctgggagccgcgttccaggttccggtgcagagcgacagcaggatcgttggcttcttcgcccacggagacaattacatcgaagcaattggcgcctacgtgaagaaattgacagaatccagcaaccgttaactcttggaacaacttgcagctgttcacactgtttcttgggccattgctccttaaatttagtccagatggccaaggagcaaccaaacagaaatcgctatggcagggaagatggactaaactggactgtggcacctccagcatagcctgctcttagattagtgaccagacatcatcgagatatttcgatattataataaatgaggaacccatctcagatgtttatgttagctcctcagtttttgcttctgaatgattaatttagatcttccttatttttgcaataaatgaggattcttttctgtctcttctgaatggatacgaatcatgcatcacgtatcagtgcacctattgcagtgaggagatgaggacaaggtgctgacgaacttattgtcctgagctcccacttgagtttctgattgctgctttacaactttggtctatacgtgttgttccatcactagcctagtgaagcctgaaaacgtgtctgcatgctttagaaaaagactgcttccatccttacaatttccaggatatatccttacaaattcccaaactgggtgacgtcgaaaaggtgatctatagcatgacgttttgcagtgcctgtcagaggcaaaaaa

SEQ ID NO: 222195 - DNA, 605 bp, Zea Mays
ctgcactatcccgagcagcagggaccggtcgagcgagacatggctgccactgccagcaagacgaggagggcgatcctggcgctcttcatctgggccatggccatcctcctcttcatggcggcgctccaccccaacgcgttggccgccgccgacgagatctactgcatgtgctgcgcggcaaagacagagtgcacgttcgacccgacctgctgcacggacggctgctgccgcatgagaccttgacgtacaaatacgcccaccgcccgatcgagcttaattatcctcctacggccggccgggccctgctgctgcatgcatatgcgcatgcacgccgccggtcgccggccgccggttgctgctgcttgtcaccgggaatacatatatggatatatatatatatatatatatgaatgaatgaaataaaaagccagcagcgagcggccctgaatgtgtttatgttgcatgttagctttattcattcagagcacgcgcgcagaagcccgaggggggatcggaggttctcagggaaccattggaaccggccttagagcttcacagagaagttgcaagctgaaagagcccgagcctgatttttttttttgcag

SEQ ID NO: 222196 - DNA, 736 bp, Zea Mays
ctctgcccccgctctgtcatctttgactgcccctgtccggtctcctcccctccatcccactccacgccacccccacaccccaccggccaagcaaacacgctgcacatttcagttcagacagtccaagaacagcaccaagaaagactccttgccgctcttcttgcttggctactgactaggagagctccctgccgctggttgatcaacagagaggcaggcggacggcatggtcagctccctgccgctgtcctcgttgctgctgctgctgctgctgctctccgcagccagcttcggcggcggcgtaaggctcggcgatggtggctacgaggactggaggctcggcaccgccacctacgtcaaggagttccagtcacaccctctcaatgacggcggtggcgcctgcgggtacggcgacctggacatcttcaggtacgggcgctacacggcggggctgagcgcggcgctgttcgggcgcggcggcgcctgcggcggctgctacgagctgcggtgcgtcaaccacatccagtggtgcctccggggcagccccacggtggtggtgacggcgacggacttctgcccggccaacatgggcctcgccgacgacgacgccggcggctggtgcaacttcccgcgggagcacctcgagctgtcggaggccgcgttcctccgcgtcgccaaggccaaggccggcatcgtgccggtgcagttccggagttggcatatggatatggtggtg

SEQ ID NO: 222197 - DNA, 2065 bp, Zea Mays
atgcatgctacccggcggcggcccaagcttcatcgatcgccgatcatcttctagctagcagctagcttgttattagctcatcggcgatggactacgtggtcgcccggatgcaattgcaacaagcagcagtgccgccgcctgttcactccatcgccgaccaccgtcctccgcctgtgtcgcagaggacgcggggcagcgcgacgatgcaacgacagcggcgtgaggcactcgaacaggaggtggcagagctgaagcagcagctatccaacgagcagacggtgcaccagatcctggagcgcgccctgcagcccagcagctccatggccctcgccaacatccccgccttcatccccaccaaggccaaggagctgctcgcggagctgctgctggtggaggaagagatcgccaggctggaggaccagataaaaaggatgaagaagtccgccgccacgcagcagcagcagcagcagcagacggagcactgcaagtccatgttcttcatcagccaggccatggacggcgaggcgtacctcagcacggtggtgaacaacaagaggcattccctggcgtcgtcgtcagatgggcatgcggtgttggagaagaagatcgcccagcacgagctgcccatcaccaagaagagccccacggtgatagcaaagaggagggcgagagaccagcagcagccgcccaacaagctgtcggagaggatcctcaagtgcctggtgtgcatcttcatgcggctgctccggtcgtcccgggcgtccgagtccgccgcgggcaacctcggcggcttcaggatggacatggggctcgtcaacgtggctgcagctgcggcggccaaggagaaggagaggggccagcaggatcactacggcatcttcggcatccaggactccatggtgagggacatcgggccctacaagaacctcgtcaggttcaccacctcggctggctccggctccggctccggctccggctccctggacctccacctcctcagcagagggttctcggcgtcgcccctggtaagcaaactgagggagatgctggaggcgctgcagcaggtggatgtgcgctccttgaatcaccaccagaggctggcgttctggctcaacatctacaacacatgcatcatgcacggcattctgcagcatggtttgccctcaaactcggacaagttactcgcactcaagaacaaggcaacaatcaacgtgtcagggcaaactttcaatgcgttggtgattgagaattttatcttgaggcagccgtcaagtgtgaaacaggagttgtggcaatgcgacgtggatgtggaagaagaacaggcggtgagggaggtttatgggctcaagacttcagaacccaacattctctttgcactctgctgcggcatcagatcatcgccagcaatcgtgttcttgtggatctggacaaggcaaagcttgagtacctgcaggcatcgctggtggtgacatccaccaggaggctcatgatcccaagcctcctccactccaacatgcatgactttgcaaaggacacggagtcgctgcttcgatggatctgcgagcagctgcccacgtcctggtccatcaggaaatccatggtggattgcctcgccgccattaccaacaacaacaacaagctggaggaggtggtcgtggatgtcattcccttggactacgacttccaatacctgctgcccatgtgatcaactcatcatgcatcataaatattattaattgcccattccattaattccatgcatggattattattctgtaagttaactgatacagatggagttattgtgtagtcttgtctatctcattagctactaggatggactccaacaaggaaactattcaaatgttgcttgctggtgatcattatattgtagatttctagtgattacaaagtttcataactcttcaatacctacaactttcatgttggtggttttttttctttcaaggtcattttcaaaattcaaattttaattatttttaaattcagacgtagttttcgttgacaagatgacttgaaatgaaaattttgccaactacaaaat

SEQ ID NO: 222198 - DNA, 2176 bp, Zea Mays
accgcccgcatccgacagcaccaccaacatcgccgacagctcccccacagcagccagccatccatatgtatgtaccattcatcctccactgcatgcatgctacccggcggcggcccaagcttcatcgatcgccgatcatcttctagctagcagctagcttgttattagctcatcggcgatggactacgtggtcgcccggatgcaattgcaacaagcagcagtgccgccgcctgttcactccatcgccgaccaccgtcctccgcctgtgtcgcagaggacgcggggcagcgcgacgatgcaacgacagcggcgtgaggcactcgaacaggaggtggcagagctgaagcagcagctatccaacgagcagacggtgcaccagatcctggagcgcgccctgcagcccagcagctccatggccctcgccaacatccccgccttcatccccaccaaggccaaggagctgctcgcggagctgctgctggtggaggaagagatcgccaggctggaggaccagataaaaaggatgaagaagtccgccgccacgcagcagcagcagcagcagcagacggagcactgcaagtccatgttcttcatcagccaggccatggacggcgaggcgtacctcagcacggtggtgaacaacaagaggcattccctggcgtcgtcgtcagatgggcatgcggtgttggagaagaagatcgcccagcacgagctgcccatcaccaagaagagccccacggtgatagcaaagaggagggcgagagaccagcagcagccgcccaacaagctgtcggagaggatcctcaagtgcctggtgtgcatcttcatgcggctgctccggtcgtcccgggcgtccgagtccgccgcgggcaacctcggcggcttcaggatggacatggggctcgtcaacgtggctgcagctgcggcggccaaggagaaggagaggggccagcaggatcactacggcatcttcggcatccaggactccatggtgagggacatcgggccctacaagaacctcgtcaggttcaccacctcggctggctccggctccggctccggctccggctccctggacctccacctcctcagcagagggttctcggcgtcgcccctggtaagcaaactgagggagatgctggaggcgctgcagcaggtggatgtgcgctccttgaatcaccaccagaggctggcgttctggctcaacatctacaacacatgcatcatgcacggcattctgcagcatggtttgccctcaaactcggacaagttactcgcactcaagaacaaggcaacaatcaacgtgtcagggcaaactttcaatgcgttggtgattgagaattttatcttgaggcagccgtcaagtgtgaaacaggagttgtggcaatgcgacgtggatgtggaagaagaacaggcggtgagggaggtttatgggctcaagacttcagaacccaacattctctttgcactctgctgcggcatcagatcatcgccagcacttcgcatctacaaagcagatcgtgttcttgtggatctggacaaggcaaagcttgagtacctgcaggcatcgctggtggtgacatccaccaggaggctcatgatcccaagcctcctccactccaacatgcatgactttgcaaaggacacggagtcgctgcttcgatggatctgcgagcagctgcccacgtcctggtccatcaggaaatccatggtggattgcctcgccgccattaccaacaacaacaacaagctggaggaggtggtcgtggatgtcattcccttggactacgacttccaatacctgctgcccatgtgatcaactcatcatgcatcataaatattattaattgcccattccattaattccatgcatggattattattctgtaagttaactgatacagatggagttattgtgtagtcttgtctatctcattagctactaggatggactccaacaaggaaactattcaaatgttgcttgctggtgatcattatattgtagatttctagtgattacaaagtttcataactcttcaatacctacaactttcatgttggtggttttttttctttcaaggtcattttcaaaattcaaattttaattatttttaaattcagacgtagttttcgttgacaagatgacttgaaatgaaaattttgccaactacaaaat

SEQ ID NO: 222199 - DNA, 2179 bp, Zea Mays
accgcccgcatccgacagcaccaccaacatcgccgacagctcccccacagcagccagccatccatatgtatgtaccattcatcctccactgcatgcatgctacccggcggcggcccaagcttcatcgatcgccgatcatcttctagctagcagctagcttgttattagctcatcggcgatggactacgtggtcgcccggatgcaattgcaacaagcagcagtgccgccgcctgttcactccatcgccgaccaccgtcctccgcctgtgtcgcagaggacgcggggcagcgcgacgatgcaacgacagcggcgtgaggcactcgaacaggaggtggcagagctgaagcagcagctatccaacgagcagacggtgcaccagatcctggagcgcgccctgcagcccagcagctccatggccctcgccaacatccccgccttcatccccaccaaggccaaggagctgctcgcggagctgctgctggtggaggaagagatcgccaggctggaggaccagataaaaaggatgaagaagtccgccgccacgcagcagcagcagcagcagcagacggagcactgcaagtccatgttcttcatcagccaggccatggacggcgaggcgtacctcagcacggtggtgaacaacaagaggcattccctggcgtcgtcgtcagatgggcatgcggtgttggagaagaagatcgcccagcacgagctgcccatcaccaagaagagccccacggtgatagcaaagaggagggcgagagaccagcagcagccgcccaacaagctgtcggagaggatcctcaagtgcctggtgtgcatcttcatgcggctgctccggtcgtcccgggcgtccgagtccgccgcgggcaacctcggcggcttcaggatggacatggggctcgtcaacgtggctgcagctgcggcggccaaggagaaggagaggggccagcaggatcactacggcatcttcggcatccaggactccatggtgagggacatcgggccctacaagaacctcgtcaggttcaccacctcggctggctccggctccggctccggctccggctccctggacctccacctcctcagcagagggttctcggcgtcgcccctggtaagcaaactgagggagatgctggaggcgctgcagcaggtggatgtgcgctccttgaatcaccaccagaggctggcgttctggctcaacatctacaacacatgcatcatgcacggcattctgcagcatggtttgccctcaaactcggacaagttactcgcactcaagaacaaggcaacaatcaacgtgtcagggcaaactttcaatgcgttggtgattgagaattttatcttgaggcagccgtcaagtgtgaaacagcaggagttgtggcaatgcgacgtggatgtggaagaagaacaggcggtgagggaggtttatgggctcaagacttcagaacccaacattctctttgcactctgctgcggcatcagatcatcgccagcacttcgcatctacaaagcagatcgtgttcttgtggatctggacaaggcaaagcttgagtacctgcaggcatcgctggtggtgacatccaccaggaggctcatgatcccaagcctcctccactccaacatgcatgactttgcaaaggacacggagtcgctgcttcgatggatctgcgagcagctgcccacgtcctggtccatcaggaaatccatggtggattgcctcgccgccattaccaacaacaacaacaagctggaggaggtggtcgtggatgtcattcccttggactacgacttccaatacctgctgcccatgtgatcaactcatcatgcatcataaatattattaattgcccattccattaattccatgcatggattattattctgtaagttaactgatacagatggagttattgtgtagtcttgtctatctcattagctactaggatggactccaacaaggaaactattcaaatgttgcttgctggtgatcattatattgtagatttctagtgattacaaagtttcataactcttcaatacctacaactttcatgttggtggttttttttctttcaaggtcattttcaaaattcaaattttaattatttttaaattcagacgtagttttcgttgacaagatgacttgaaatgaaaattttgccaactacaaaat

SEQ ID NO: 222200 - DNA, 2851 bp, Zea Mays
agtgagtttgccacgtcacttcttctcagtcgttggataccaaacggagtacacaaaattgtccacgtcgccttttaatagagtccattggatgccttttaaacggtgtgtactctgccttcttttttttcctctcacatcctcccgtaagttccagagaatgctggacattggacactccggccaataagaaaatgggcaaaagaaagaaaaaagaaggaaagcaacgggagaggcacgccctcgctcctggcagccgagaacgcgtctgccgctcctgacgactaggtttccatcctcctctcctcagtctctcgatcttgcacttctcaggtcctgtgacaacaaatctccctatctgcagctttcgcttctttgtgacagtaatcttcatatttttgtctgtcatccatgtcagcgaggtcctactttcatttacaaacaatgtggagtacaactgtttgattgtttcttcatgccagttctgttttatagccatcaattcatgaagaccaatgtcatgacatgctttctcaacatctggcattccaggaatttatctgatcttttcccaattgatccatttattgtcagcacattgcttctcgctatatatatatatattgttatatagattcatatgctcgttcgaccaaaaacggtcatcgattgcagttctatcttgtagatacaaatttacgcatttaaccgatgacttcttcctttttaattttttgtagctcacaggcatcacagctacagcctcagctagttggggcaaaccatcccgacgctttacaatgtacttaatgaggaccgcatgaagaagaaagctgataatggaaaaatgtcagaaatatttaagagcaaaattgtttcttcaaaacaatcaaaacaaaagatgcaagacttgtgttttgcactctctataagtctagttggttggaaaatcagaaattccacatcttagttattgatgaggcagcatacttaaaagaatgtgaatcattaatcccttttgcaactagtgggataaaacatgtggtgcttgttgggatgacaagcaactacaatcagtggtaaagagcacggtgtgtattcattataacttataagaccatttgaatgtatccttgattccttgtgttaccaataattatttatagactgctaatactttctctttactgataagattgctaaagagaacaggtttgggcgaagcctctttgagagattaagtggacttgatttcccaaagcacatgctaaatattcaatatagaatgcacccttccatcagcaagtttccaaatcaaaagttttatgaaggaaaaattatagatggtctcaacgttaaggactataacaatatttatctcgatggtcatatgtatggtccttattcattcatccatgttgaagttggtttcgaagaaaacaataaacagggcttaaaaatattgttgaagctgctgtggtagcaaatattgttggcagacttgctgaaggtaagtctaacatttgagctgataaagaacatgtaagtttcattaaagttgatatgtttaagtgacatccatgtttttttggtctataaccactacagcatgcgccgagcagaagaagaaaaccagcgttggtatagtatctccatatgcagcccaattagacaaaataatggtgggaatatatactttcttgattgtgttatgagaactaatgtggctttgacaagagcaaagtaggttaacttttgttcctttttgttggtttaattaaattttgtttttttgttggcaaaggatcagcctttggatacttagttaattcaagatcccagtacatactcatctaaataattatttcttccacaggcactccatgtggatccttggacatgaaacgactcaccttgacagtaattcaacatggtctgattatgtcaaagacgcgaaggatcgtgaatgtttccttaaaactcgcgatgatgattttcttgctagaacaatggatcagtttagacttatgcaaaactcacaggtgacagacaatgtttcacgatggaacattgaatgccagtgtgctccagatgcacaactcacaggtgacaaccgtgccacaataccagacaaggcacaggttgtagagcctgcacatgcagagcaggtgcctgtgcagtcagaaagggctgtagagaagacatggcaggtgcgtcttgatcagctctcgctcagtccttcttttgctccaggtgaacaactaacagatgaaaaggttgtagagcctgcacatgcagagcaagtgcatcttgctcggctctcgcccagtccatcaagggagagggcccgtctcagtcagtttgctccaggtgctcaactcacagatgaagaagcggctacactagaggaagaagaccgtcctcaaattgaccttctagatggtttgccccaactagctgaggctgtagccaggacgcctgtcagatctgcaagcgatgggcgtttttggtccaacgagcatatggatctatacaacagtatttatagcaagaagaaatgtgctgacaacaaatggatcgattggaaaaatatcaaacgtttaccgaagatgccatatgttgagaaagcaagtcgtgacattagtcttcatgaattgatggctataaaacagaactggtatgaagagccgatcaaacagttctactccacattgtccataaatcaaagtaggacctcactgacttggatgacaggcataaataagaagattactgtcacaaagagattttgtcaaaaggttctccatgttccgtccgagcacaatattaagattaagcgccaattgatgga

SEQ ID NO: 222201 - DNA, 3213 bp, Zea Mays
agaggcacgccctcgctcctggcagccgagaacgcgtctgccgctcctgacgactaggtttccatcctcctctcctcagtctctcgatcttgcacttctcaggtcctgtgacaacaaatctccctatctgcagctttcgcttctttgtgacagtaatcttcatatttttgtctgtcatccatgtcagcgaggtcctactttcatttacaaacaatgtggagtacaactgtttgattgtttcttcatgccagttctgttttatagccatcaattcatgaagaccaatgtcatgacatgctttctcaacatctggcattccaggaatttatctgatcttttcccaattgatccatttattgtcagcacattgcttctcgctatatatatatatattgttatatagattcatatgctcgttcgaccaaaaacggtcatcgattgcagttctatcttgtagatacaaatttacgcatttaaccgatgacttcttcctttttaattttttgtagctcacaggcatcacagctacagcctcagctagttggggcaaaccatcccgacgctttacaatgtacttaatgaggaccgcatgaagaagaaagctgataatggaaaaatgtcagaaatatttaagagcaaaattgtttcttcaaaacaatcaaaacaaaagatgcaagacttgtgttttgcactctctataagtctagttggttggaaaatcagaaattccacatcttagttattgatgaggcagcatacttaaaagaatgtgaatcattaatcccttttgcaactagtgggataaaacatgtggtgcttgttgggatgacaagcaactacaatcagtggtaaagagcacggtgtgtattcattataacttataagaccatttgaatgtatccttgattccttgtgttaccaataattatttatagactgctaatactttctctttactgataagattgctaaagagaacaggtttgggcgaagcctctttgagagattaagtggacttgatttcccaaagcacatgctaaatattcaatatagaatgcacccttccatcagcaagtttccaaatcaaaagttttatgaaggaaaaattatagatggtctcaacgttaaggactataacaatatttatctcgatggtcatatgtatggtccttattcattcatccatgttgaagttggtttcgaagaaaacaataaacagggcttaaaaatattgttgaagctgctgtggtagcaaatattgttggcagacttgctgaagtgacatccatgtttttttggtctataaccactacagcatgcgccgagcagaagaagaaaaccagcgttggtatagtatctccatatgcagcccaagtaatttctttgcaagaaagaattcagagttatgaaaagtatgactttctttctgttgaagtatgcactgttgattcatgtcaaggtgctgagaaggacattaatcctttcaacagttagacaaaataatggtgggaatatatactttcttgattgtgttatgagaactaatgtggctttgacaagagcaaagtaggttaacttttgttcctttttgttggtttaattaaattttgtttttttgttggcaaaggatcagcctttggatacttagttaattcaagatcccagtacatactcatctaaataattatttcttccacaggcactccatgtggatccttggacatgaaacgactcaccttgacagtaattcaacatggtctgattatgtcaaagacgcgaaggatcgtgaatgtttccttaaaactcgcgatgatgattttcttgctagaacaatggatcagtttagacttatgcaaaactcacaggtgacagacaatgtttcacgatggaacattgaatgccagtgtgctccagatgcacaactcacaggtgacaaccgtgccacaataccagacaaggcacaggttgtagagcctgcacatgcagagcaggtgcctgtgcagtcagaaagggctgtagagaagacatggcaggtgcgtcttgatcagctctcgctcagtccttcttttgctccaggtgaacaactaacagatgaaaaggttgtagagcctgcacatgcagagcaagtgcatcttgctcggctctcgcccagtccatcaagggagagggcccgtctcagtcagtttgctccaggtgctcaactcacagatgaagaagcggctacactagaggaagaagaccgtcctcaaattgaccttctagatggtttgccccaactagctgaggctgtagccaggacgcctgtcagatctgcaagcgatgggcgtttttggtccaacgagcatatggatctatacaacagtatttatagcaagaagaaatgtgctgacaacaaatggatcgattggaaaaatatcaaacgtttaccgaagatgccatatgttgagaaagcaagtcgtgacattagtcttcatgaattgatggctataaaacagaactggtatgaagagccgatcaaacagttctactccacattgtccataaatcaaagtaggacctcactgacttggatgacaggcataaataagaagattactgtcacaaagagattttgtcaaaaggttctccatgttccgtccgagcacaatattaagattaagcgccaattgactgatgcacaagaaaaagagctcatgagtgcagatggtaaccaagtttattcattaaaccggattattacaaagactatcaatcctttgattggagataaaagtaaggttcacgaatcaagtagggtcctactgtatcatattttgttcgggaagccttttgacatagtagacatgttggaggagatggaaaacaatcacatgcacacatctaagagaatgtcatatgccccatacatcatgttactaattaacagtgcgactaaggaaaaatttgtacccgggagtggagaaaataaatgtgtagagcacgaaaagtaaaaaatggagtcaaattcgaataaaaaaacgaaagaatcgaagaacttcaaagtccgaatcgcctgtaccattgaaaaagtccaaatcaatgtgtgtaccattgatgaagccatgatcacttcatctcgtttgttgcaagtgctcaggtgttaataaacgtaagttttgtaggtcaaaaatgatttcagctgtagtgtttgctcacacgcttgtttcaacatgg

SEQ ID NO: 222202 - DNA, 328 bp, Zea Mays
caaatacggactaaaccaggtccatttataccgcgaattaaccctaaccgccagccgcgccttttcctctcctcccggtgccagccgccgtgcgcgctctcttcgccctacggaaggtgcggaggtgccgagatcttgctcgatctcttcggcggcgaagagcgccaaccagatccgccctgtttgttggtgtggcgccggagcaggagtaggtcgcggccacagaaccctaggagcgaccatggcgactttcgcgaagcctgagaacgcgctcaagagagccgaaggcacttgcgaattacgataatgtgatgatgtttttgttacc

SEQ ID NO: 222203 - DNA, 164 bp, Zea Mays
gaaaccgaatccgccctgtttgttggtgtggcgccggagcaggagtaggtcgcggccacagaaccctaggagcgaccatggcgactttcgcgaagcctgagaacgcgctcaagagagccgaaggcacttgcgaattacgataatgtgatgatgtttttgttacc

SEQ ID NO: 222204 - DNA, 2239 bp, Zea Mays
ttgttctctgcgtggtggggctattgcaaatcttgcgtaaaatatttaaataaatgaaggcaaatatgggcacaaaagctcgtccaccatctgctgatgcagaaaaaggggagattggcgaaatagatacaagggctccaattcaatctgttaaagctgcagtgagtttatttggtgaggtccgcttttcatctgacaaatcagctgaaagaaagcccaaggctcctcaaacagagagggttttagccaaggagacagagttgcacatggcccagaaagagttgaataaatacaaggaacagctcagtaatgctgagacaacgagagtacaggctctctctgagctagagaaagctaaaaaaactgttgaggagctaacagccaagctggatctgattaacaagtccaaacagttggccatccaggcaacagaggatgcaaagactcaaatcaagcagcttgaaggtggcagcacaagtgaaggtctaggaacagatggtgctctgaagcaggaactggaaagtgcaagggagcagtatgctgttgctttggcagaccttgatgcagcaaaacaagagcttagaaagctcaagaaggattttgaaacatctttggatatgaggttgtctgctgcccagcaggaagaggaatcactgcatacaactgaagccaacatagaaaaagctaaccaacttcgtagtgagattgccgaaattcaagaatcccttatgcatgttaaggcagctaccgtgcaagcacacgaagaagaggcacaaatccttgctgagaaggatgttgctaggaccacgtataaacaagctttggaagaaacacagaagaaacttttgtctttgaggaatgattttgaccctgctgcctacgatagtctgaaacaaaaactagaacaaaccaattctgagatcgcatctatgcaaaaaaaaatagaagaggctcgggctcgggatttagagtctgttgccgttgtcagcacagagttggatgatgctaaggaaatgttgcaaaaagtagcagaggagaaaagttctcttcgaagtttggtggaatcactgaaagtggaattggaagctgtaaaacaggagcacaatcagctcaaagagaaggatacagaaaccgaatctattgtcggagatttacatgtcaagcttcagaaatgtaaatctgagctggaggctgctgtggctgctgaatcaaaagctatgtcagcttctgatgacctaatgctggcccttcagcaactgtcctcggagtcaaagaatgctttgcaagaagctgaaatgatggagaagagtgcagcagagctaagagaggaaggcgaaaaagctcgggttgaactagcagaagccgaacaaaagatgcaattggctttaaaggaagcagaagaggctaaagcagctgaagcaagagcccttgatcagatcaagcaactctcggatagagcaagtgctgctagatcctcaacatccgagtctggagcaattatcacaatttctaaagaggagtttgtatctctcagccgaaaggttgaggagtcagagaagttgagtgatatgaaagttgctgctgctatggctcaagtggaagccatcagagccagtgagaatgaggcaatcaagaaactagaaactgcccgcaaggaaatggaggacatggaattggcaacagaagaggccctaaagagggcagagatggctgaggcagccaaaaaggctgtagaaggtgagctcaagagatggcgcgagaaggagaagaaaaccgcagaggctcagccgtcggcaggggcagaagaacttggaagtggatcgcctcctgtacctcagacttcagctgggaaagcttctgagaagaacgacgggcataggaacagcagaacgctactgaggaggagcttcatgctgccaaacatcacgagcatgttccataagaagaaaaaccaacctggcagcagttctccctcctaccttcctggggaaaaatctgtgtaatctataggaagctcttgtctgtgaattgaaatttccaaacttgaacgcatgcttttacattataatctgtataaaaccgtgtgcttccttgcgccttgcagtaaatttctgacataattttaaatttccctgtatccctatttttcgtcacttcctggacttccggatgagtgcatgaacactaaaatggcagctgacaagtcagacggtccaaacatgtggcctgaataggggtg

SEQ ID NO: 222205 - DNA, 2493 bp, Zea Mays
atttggttagagtaaacctaaaccaactgtgttcatcgggtcctcccccgctcgtgagttgtgaaccggacccatcccaattccttgtcgagctcctcgaaactaccaccgccccctcgtttttttcacagcttcacccgacgaacacggcaccacgagccccgcacggccgcaacccacccagatttagactctcccaccgcggctgcatatctctcccccacccgcactccggtcgtcccattaccctctggcattggttgtcgatttcttcgttcgtgcttgcttgcgtaaaatatttaaataaatgaaggcaaatatgggcacaaaagctcgtccaccatctgctgatgcagaaaaaggggagattggcgaaatagatacaagggctccaattcaatctgttaaagctgcagtgagtttatttggtgaggtccgcttttcatctgacaaatcagctgaaagaaagcccaaggctcctcaaacagagagggttttagccaaggagacagagttgcacatggcccagaaagagttgaataaatacaaggaacagctcagtaatgctgagacaacgagagtacaggctctctctgagctagagaaagctaaaaaaactgttgaggagctaacagccaagctggatctgattaacaagtccaaacagttggccatccaggcaacagaggatgcaaagactcaaatcaagcagcttgaaggtggcagcacaagtgaaggtctaggaacagatggtgctctgaagcaggaactggaaagtgcaagggagcagtatgctgttgctttggcagaccttgatgcagcaaaacaagagcttagaaagctcaagaaggattttgaaacatctttggatatgaggttgtctgctgcccagcaggaagaggaatcactgcatacaactgaagccaacatagaaaaagctaaccaacttcgtagtgagattgccgaaattcaagaatcccttatgcatgttaaggcagctaccgtgcaagcacacgaagaagaggcacaaatccttgctgagaaggatgttgctaggaccacgtataaacaagctttggaagaaacacagaagaaacttttgtctttgaggaatgattttgaccctgctgcctacgatagtctgaaacaaaaactagaacaaaccaattctgagatcgcatctatgcaaaaaaaaatagaagaggctcgggctcgggatttagagtctgttgccgttgtcagcacagagttggatgatgctaaggaaatgttgcaaaaagtagcagaggagaaaagttctcttcgaagtttggtggaatcactgaaagtggaattggaagctgtaaaacaggagcacaatcagctcaaagagaaggatacagaaaccgaatctattgtcggagatttacatgtcaagcttcagaaatgtaaatctgagctggaggctgctgtggctgctgaatcaaaagctatgtcagcttctgatgacctaatgctggcccttcagcaactgtcctcggagtcaaagaatgctttgcaagaagctgaaatgatggagaagagtgcagcagagctaagagaggaaggcgaaaaagctcgggttgaactagcagaagccgaacaaaagatgcaattggctttaaaggaagcagaagaggctaaagcagctgaagcaagagcccttgatcagatcaagcaactctcggatagagcaagtgctgctagatcctcaacatccgagtctggagcaattatcacaatttctaaagaggagtttgtatctctcagccgaaaggttgaggagtcagagaagttgagtgatatgaaagttgctgctgctatggctcaagtggaagccatcagagccagtgagaatgaggcaatcaagaaactagaaactgcccgcaaggaaatggaggacatggaattggcaacagaagaggccctaaagagggcagagatggctgaggcagccaaaaaggctgtagaaggtgagctcaagagatggcgcgagaaggagaagaaaaccgcagaggctcagccgtcggcaggggcagaagaacttggaagtggatcgcctcctgtacctcagacttcagctgggaaagcttctgagaagaacgacgggcataggaacagcagaacgctactgaggaggagcttcatgctgccaaacatcacgagcatgttccataagaagaaaaaccaacctggcagcagttctccctcctaccttcctggggaaaaatctgtgtaatctataggaagctcttgtctgtgaattgaaatttccaaacttgaacgcatgcttttacattataatctgtataaaaccgtgtgcttccttgcgccttgcagtaaatttctgacataattttaaatttccctgtatccctatttttcgtcacttcctggacttccggatgagtgcatgaacactaaaatggcagctgacaagtcagacggtccaaacatgtggcctgaataggggtg

SEQ ID NO: 222206 - DNA, 1271 bp, Zea Mays
ctccttttcccagttcccaccttgcttcctctcctcgctttgcttcctctctggctctctctcacatgcctgcctactactccctcaagcaagcaagcaagcaagctgcaagaggtcaggaggagccgtgactgtgagtgagcggcgtctggtgtgaactgtgaagtgaggacttgttggaggaggacggagcgcggagggtcatggcatggtgatggacctgctgctccccctcactttgcccctaggatgttgcttcaaaaataatgacattctcacagcaaggccctcgcacagtctgcatcctctcggcgaatggcgcgattagcaacgttacgcttcggcagccagccacatctggtggactagttacttatgaggggcgtttcgagataatctcgctgtccggttctttcctgctcgcggaggatggtgacactcgcagcaggactggtggcttgagcgtcgcgctcgcgggatctgacggccgagttcttggagggtgtgtcgctggaatgcttatggctgcaactcctgtccaggtcgtggtggctagttttatcgcagaggggaagaaatctaagccagccgaagcgcggaaggtcgaaccgatggctgctcccccgccgccgccgccacagatggctgccttcgtgccggctccggtggccaccagccctccgtcggaggggacgtccagcgcgtcgtctgatgactccggcagcccgatcaaccacggtgcgatgccgttcagccactccagtcagcaccagcaccctcaccagcaccagcagcacatgccgcctgcctacgcgtccgggggctggtccctctcggtgcaccagcagaacaggcatgattctgacatgaagatgatgtcgaactaacaggcgccccattcgttggtgtttgggctggagaggaaggaaaggaacctgctgatggttaggttggtactgctgctatgaaacggtcctcttgcgcgtcgtctgtgctctggtcagtgacgacgtgtcgatctgctacttaagctaagctagctaggagagttagggttcatggtctcaccccccgctgttgtgcccctgagtaagattaatttaatttgaattagtcgctctcataatgctgcgagttgtgatggtttcctgatcagatcttcaccttctaggctagttaaaatatcatttctctagtactatggatcatggatttacttggatacttgggtttaattcaggaatttgatcgtattctgtgttgttttgctc

SEQ ID NO: 222207 - DNA, 2125 bp, Zea Mays
ctccttttcccagttcccaccttgcttcctctcctcgctttgcttcctctctggctctctctcacatgcctgcctactactccctcaagcaagcaagcaagcaagctgcaagaggtcaggaggagccgtgactgtgagtgagcggcgtctggtgtgaactgtgaagtgaggacttgttggaggaggacggagcgcggagggtcatggcatggtgatggacctgctgctccccctcactttgcccctaggcagccttagctagcctcgcagtcctgggaggaggagaaggacaaggtctctgatcagctccagcttgtctggtcaaagctgaggagcctgcttgggctgcctgtgagtccaagctcgacaggaccactgccactgtgaagcacagcggcagcggcgacgagacgaggacgcggaagctgccaagcggatagatctacgcaaaatggagaccaaggacgtgtcgccgcttgccgccgccgccgcggcgcccgtgcttgcaccggcctctcagcagcagcagcagcagccgccccagccgcagcagcaccaccaccagccaccgcagccgcagcatcagcaccagcaccagccgccgccgccgccgttcccgcagcaggcggccccggcggcggcctcgtcgcccgccgcgtccatgcccggcggcatgcgcctctcgttcgaccatatgcccgggaaggcgcccggggagcagcaccaccaccaccaccacgcggcgccgcccatgctgtacgcggcgccaccgcagggcgcgggtgcgccggggggcagtgtgctcggcatgggcgaactgatgcgcaagaagcgcgggcggccgcgcaagtacgcgcccgacgggagcatggctctggcgctggcccccatctcttccgcctcggccggcggcggcggcggcgccgcagcccccgggcagcagcagcagcacggcgggttctccatcggtagccccccgtccgaccccagcgccaagcgccgcggccggccccccggctccggcaagaagaagcagttcgaggccctgggttcttggggcatcgctttcacccctcacatcctcgccgtcaaggcaggcgaggatgttgcttcaaaaataatgacattctcacagcaaggccctcgcacagtctgcatcctctcggcgaatggcgcgattagcaacgttacgcttcggcagccagccacatctggtggactagttacttatgaggggcgtttcgagataatctcgctgtccggttctttcctgctcgcggaggatggtgacactcgcagcaggactggtggcttgagcgtcgcgctcgcgggatctgacggccgagttcttggagggtgtgtcgctggaatgcttatggctgcaactcctgtccaggtcgtggtggctagttttatcgcagaggggaagaaatctaagccagccgaagcgcggaaggtcgaaccgatggctgctcccccgccgccgccgccacagatggctgccttcgtgccggctccggtggccaccagccctccgtcggaggggacgtccagcgcgtcgtctgatgactccggcagcccgatcaaccacggtgcgatgccgttcagccactccagtcagcaccagcaccctcaccagcaccagcagcacatgccgcctgcctacgcgtccgggggctggtccctctcggtgcaccagcagaacaggcatgattctgacatgaagatgatgtcgaactaacaggcgccccattcgttggtgtttgggctggagaggaaggaaaggaacctgctgatggttaggttggtactgctgctatgaaacggtcctcttgcgcgtcgtctgtgctctggtcagtgacgacgtgtcgatctgctacttaagctaagctagctaggagagttagggttcatggtctcaccccccgctgttgtgcccctgagtaagattaatttaatttgaattagtcgctctcataatgctgcgagttgtgatggtttcctgatcagatcttcaccttctaggctagttaaaatatcatttctctagtactatggatcatggatttacttggatacttgggtttaattcaggaatttgatcgtattctgtgttgttttgctc

SEQ ID NO: 222208 - DNA, 2133 bp, Zea Mays
ctccttttcccagttcccaccttgcttcctctcctcgctttgcttcctctctggctctctctcacatgcctgcctactactccctcaagcaagcaagcaagcaagctgcaagaggtcaggaggagccgtgactgtgagtgagcggcgtctggtgtgaactgtgaagtgaggacttgttggaggaggacggagcgcggagggtcatggcatggtgatggacctgctgctccccctcactttgcccctagtgctctaggcagccttagctagcctcgcagtcctgggaggaggagaaggacaaggtctctgatcagctccagcttgtctggtcaaagctgaggagcctgcttgggctgcctgtgagtccaagctcgacaggaccactgccactgtgaagcacagcggcagcggcgacgagacgaggacgcggaagctgccaagcggatagatctacgcaaaatggagaccaaggacgtgtcgccgcttgccgccgccgccgcggcgcccgtgcttgcaccggcctctcagcagcagcagcagcagccgccccagccgcagcagcaccaccaccagccaccgcagccgcagcatcagcaccagcaccagccgccgccgccgccgttcccgcagcaggcggccccggcggcggcctcgtcgcccgccgcgtccatgcccggcggcatgcgcctctcgttcgaccatatgcccgggaaggcgcccggggagcagcaccaccaccaccaccacgcggcgccgcccatgctgtacgcggcgccaccgcagggcgcgggtgcgccggggggcagtgtgctcggcatgggcgaactgatgcgcaagaagcgcgggcggccgcgcaagtacgcgcccgacgggagcatggctctggcgctggcccccatctcttccgcctcggccggcggcggcggcggcgccgcagcccccgggcagcagcagcagcacggcgggttctccatcggtagccccccgtccgaccccagcgccaagcgccgcggccggccccccggctccggcaagaagaagcagttcgaggccctgggttcttggggcatcgctttcacccctcacatcctcgccgtcaaggcaggcgaggatgttgcttcaaaaataatgacattctcacagcaaggccctcgcacagtctgcatcctctcggcgaatggcgcgattagcaacgttacgcttcggcagccagccacatctggtggactagttacttatgaggggcgtttcgagataatctcgctgtccggttctttcctgctcgcggaggatggtgacactcgcagcaggactggtggcttgagcgtcgcgctcgcgggatctgacggccgagttcttggagggtgtgtcgctggaatgcttatggctgcaactcctgtccaggtcgtggtggctagttttatcgcagaggggaagaaatctaagccagccgaagcgcggaaggtcgaaccgatggctgctcccccgccgccgccgccacagatggctgccttcgtgccggctccggtggccaccagccctccgtcggaggggacgtccagcgcgtcgtctgatgactccggcagcccgatcaaccacggtgcgatgccgttcagccactccagtcagcaccagcaccctcaccagcaccagcagcacatgccgcctgcctacgcgtccgggggctggtccctctcggtgcaccagcagaacaggcatgattctgacatgaagatgatgtcgaactaacaggcgccccattcgttggtgtttgggctggagaggaaggaaaggaacctgctgatggttaggttggtactgctgctatgaaacggtcctcttgcgcgtcgtctgtgctctggtcagtgacgacgtgtcgatctgctacttaagctaagctagctaggagagttagggttcatggtctcaccccccgctgttgtgcccctgagtaagattaatttaatttgaattagtcgctctcataatgctgcgagttgtgatggtttcctgatcagatcttcaccttctaggctagttaaaatatcatttctctagtactatggatcatggatttacttggatacttgggtttaattcaggaatttgatcgtattctgtgttgttttgctc

SEQ ID NO: 222209 - DNA, 2586 bp, Zea Mays
aaaaagcgtaaccgcacaaattccaccgatccccctcgccccggtcaaatcctctagcctccctgtgcccggcggcgagccccatggatccttccgtcgcccggcggcaggaggcggagcggtttatgaacatcgccgagaagctcctgatggcgcgggacctcgagggctgcaagcagttcgtcgcccaagccctttccttcgacccccgcaccccgggcgccgacgacctcctcgccgccgccgatgccctcctcgcggcccagcgtcggcgcctcccgtccgggcccctcgacccctacgccgtccttggcctcgactccgccgtcccggcctcccgcgaccccgacgtcgtgcattcccattaccgccgcctctccctcttgctcaaccgctcccaccccgaccgtccctgctccctcgccttcgccgaagccgcccgcctcgtcgccgacgcttgggccttcctgtcagatcccctccgcaaagcctccctcgactccgacctcgacgccgccgccgctgcaactaacgcagcggcagccgccgccgccgccgccgccgctcgtgtacccatcgatccccatccagagaagcagaatcagctgcagtcacagcctcctccgccgccgccacttgctccgcagccaatgcagactgtgtcaggcacgccgccaccaaagcgcgggcggccgccgcgggctgccaaaacgccggcgacgccgcctgctccgcagaccgtttcgggcacgtcgccaacaaagcgcggccggccgccgcgggctgccaaacaatcgcctgaggttgaacggaaccaggagggggaagctcaacaggcgccagtcttctggacagcttgtccctcctgctgccatttacaccagtacgaccactcctacgagtcgcaaacgctgctttgccctagctgccgccggccgtttgttgccactgcaatgtccacgcagccgcccatcgtgccaggcacagacatgtattactgctcctgggggttcttcccaatgggtttccctggtggtcctgcattcgctgaaccactcaattccccgcagcagcaggcacctgctgctctaggattttatccaatggggccatacttgccattaccaagcctaagtggcattgtggaaggggaaggcaataaggcagttgatgctggcactggcattcctgtcatcccaacagtggcagcaccagcatcagcatcatcgccagcgccgacagcggcaacaccagtggagttcttacatgtgaaggttggggcaaagaagcgagggcggcccaaaggcagcaagaacaaaaaagctgtggttgaggtaaattagggctatggaatgacacatgtgaaggttggggcaaagaagcgaggatgccctgactgcctgaaggcagcaagaacaagaaagtggtgattgagatcgattagggctatggcatgctgatcgctgcatcattcgacatctgcatcagttgtaaactacattgtgtatgtgtatgtgtatggttcttttcttgcttgcagatgacttgggcactgtaagatggtcgagggttagagcttcacctcgatagttggtcaagaatcagagcttcaccattcatgaattttggtgactaggtttttctccttacttccatagcgaagtttaccatagtagtcagttcaggtgagatctgttttttgtttgtatcatcccattagatgggtgagatgtttcatattgtagggtggcagctgctcaagtgcccattatgctgtctgcaacttgtaaagattaggagatggataataagctatgtgaatgcacattaattataaacactcagtgtgaaactgttgaaattgccaactttgcttcggcaatttggaatagtttgtcacacctcttgacttgtcgcctcaacgcgggcacaggcacagctgttgcttatctgcctaatgtgccggagtcattgccatggcacatggtactgtgatgggcagagcaagtggtgggtgcatgcacgaggagctggtgatggcagaggggatcttatgcaccatggatgaatctaacgtttcatgtgccaatcatgtctgcttctcccaaaacttacttcagagctgatttcaacttgcccccccctggtttagtttatttctaatttcctccttttagctcttttttatatgggcaaaggaagagcattttctgctggaggtgatgttgctgcagttgtctgatgtatacataaagttgcactggatgcctccgaggttggaacaagtgcatgacgaagctgttgtagaatatttctccagaattgatgacccacagtgggaagatttggacctacctgccagacgttcccatggaagaaccatcgagtccaagctctgattgaaggtcacgggagaagggtggaacactggaacggagcctcggtagtggtcagtcagaataacacattacacacatcatctcgagtttgaagagtctgcagactgtttgatagaataaacatgaatgtttcatataggtcaaacttttatcacagaagaaactctttcctgtttatacgtgggag

SEQ ID NO: 222210 - DNA, 2714 bp, Zea Mays
cgtaaccgcacaaattccaccgatccccctcgccccggtcaaatcctctagcctccctgtgcccggcggcgagccccatggatccttccgtcgcccggcggcaggaggcggagcggtttatgaacatcgccgagaagctcctgatggcgcgggacctcgagggctgcaagcagttcgtcgcccaagccctttccttcgacccccgcaccccgggcgccgacgacctcctcgccgccgccgatgccctcctcgcggcccagcgtcggcgcctcccgtccgggcccctcgacccctacgccgtccttggcctcgactccgccgtcccggcctcccgcgaccccgacgtcgtgcattcccattaccgccgcctctccctcttgctcaaccgctcccaccccgaccgtccctgctccctcgccttcgccgaagccgcccgcctcgtcgccgacgcttgggccttcctgtcagatcccctccgcaaagcctccctcgactccgacctcgacgccgccgccgctgcaactaacgcagcggcagccgccgccgccgccgccgccgctcgtgtacccatcgatccccatccagagaagcagaatcagctgcagtcacagcctcctccgccgccgccacttgctccgcagccaatgcagactgtgtcaggcacgccgccaccaaagcgcgggcggccgccgcgggctgccaaaacgccggcgacgccgcctgctccgcagaccgtttcgggcacgtcgccaacaaagcgcggccggccgccgcgggctgccaaacaatcgcctgaggttgaacggaaccaggagggggaagctcaacaggcgccagtcttctggacagcttgtccctcctgctgccatttacaccagtacgaccactcctacgagtcgcaaacgctgctttgccctagctgccgccggccgtttgttgccactgcaatgtccacgcagccgcccatcgtgccaggcacagacatgtattactgctcctgggggttcttcccaatgggtttccctggtggtcctgcattcgctgaaccactcaattccccgcagcagcaggcacctgctgctctaggattttatccaatggggccatacttgccattaccaagcctaagtggcattgtggaaggggaaggcaataaggcagttgatgctggcactggcattcctgtcatcccaacagtggcagcaccagcatcagcatcatcgccagcgccgacagcggcaacaccagtggagttcttacatgtgaaggttggggcaaagaagcgagggcggcccaaaggcagcaagaacaaaaaagctgtggttgaggtaaattagggctatggaatgacacatgtgaaggttggggcaaagaagcgaggatgccctgactgcctgaaggcagcaagaacaagaaagtggtgattgagatcgattagggctatggcatgctgatcgctgcatcattcgacatctgcatcagttgtaaactacattgtgtatgtgtatgtgtatggttcttttcttgcttgcagatgacttgggcactgtaagatggtcgagggttagagcttcacctcgatagttggtcaagaatcagagcttcaccattcatgaattttggtgactaggtttttctccttacttccatagcgaagtttaccatagtagtcagttcaggtgagatctgttttttgtttgtatcatcccattagatgggtgagatgtttcatattgtagggtggcagctgctcaagtgcccattatgctgtctgcaacttgtaaagattaggagatggataataagctatgtgaatgcacattaattataaacactcagtgtgaaactgttgaaattgccaactttgcttcggcaatttggaatagtttgtcacacctcttgacttgtcgcctcaacgcgggcacaggcacagctgttgcttatctgcctaatgtgccggagtcattgccatggcacatggtactgtgatgggcagagcaagtggtgggtgcatgcacgaggagctggtgatggcagaggggatcttatgcaccatggatgaatctaacgtttcatgtgccaatcatgtctgcttctcccaaaacttacttcagagctgatttcaacttgcccccccctggtttagtttatttctaatttcctccttttagctcttttttatatggtaatcactattgtgtcattgccttgatgccttctatagatcttattgtttttcattgtatttaatcatcacctgttttcagggcaaaggaagagcattttctgctggaggtgatgttgctgcagttgtctgatgtatacataaaggatgcaatttattacccttccatgctattgccagtagcaaagaaaaccaaagttgcactggatgcctccgaggttggaacaagtgcatgacgaagctgttgtagaatatttctccagaattgatgacccacagtgggaagatttggacctacctgccagacgttcccatggaagaaccatcgagtccaagctctgattgaaggtcacgggagaagggtggaacactggaacggagcctcggtagtggtcagtcagaataacacattacacacatcatctcgagtttgaagagtctgcagactgtttgatagaataaacatgaatgtttcatataggtcaaacttttatcacagaagaaactctttcctgtttatacgtgggag

SEQ ID NO: 222211 - DNA, 1106 bp, Zea Mays
cccttattgtttttttggcatcctcaggctgttgttgatctgttttgtttgtgcttgtcttgccttgcactgtggattctttagccaacaaacactggcatgacctcagggcctgtcagagttcagcgtatgcaacataggcaagaagactctctgcggtccatgacacagggcaccatgttgtgcctgcccatctcttgcttgctctatcatttgggaatcatgccgctactactgtaccatcttggtttaaaaggaaggctaaagaatttttgactgggcacacagactgacaggcatgagtttctagcaacatcagtaattcagcatgcatgtatgtttgatcagtaggggttacctgtgatttagatgtggttcctgtttaatcgttgtcctacatgaacttggctttgaagaattgtttagacttgatcctaatgtggaatgtttgtacgttagattttttgtgtaaatataagttattgaagcattaagattgaactgttaggcatttaaatgaagaccctcttgatgtcttatgtatggttatgtttttctgattcattatcagtaagattaacataatttggtgatgagggctaaaagcttcgttttttgattttttttttcagaatctaacgtttcatgtgccaatcatgtctgcttctcccaaaacttacttcagagctgatttcaacttgcccccccctgggcaaaggaagagcattttctgctggaggtgatgttgctgcagttgtctgatgtatacataaagttgcactggatgcctccgaggttggaacaagtgcatgacgaagctgttgtagaatatttctccagaattgatgacccacagtgggaagatttggacctacctgccagacgttcccatggaagaaccatcgagtccaagctctgattgaaggtcacgggagaagggtggaacactggaacggagcctcggtagtggtcagtcagaataacacattacacacatcatctcgagtttgaagagtctgcagactgtttgatagaataaacatgaatgtttcatataggtcaaacttttatcacagaagaaactctttcctgtttatacgtgggag

SEQ ID NO: 222212 - DNA, 1353 bp, Zea Mays
tcctccgaggaatcaagcttgaattcgttcggagagcagacagaactcattcctattgaccacggaaggagggcggaatgcctagaagacccctacttcgagtggatccactggccgcagtcgtctgttcccttctccgtcgaggagctcgaatacattgcaaaacttgaccctataaaggacgcagagatgctacgcgtggagctacctatgatacgggaggcgtgtctcagggtgctggtgctgtcgacagtgtttctcaaggaagctgcagcgttcggcctctgcctgtctgagataggagacatgatgagcaggcagttcacagcaaaggaagaggaaccaagccagctcgagcttctctgcatggagacgaggaagtgggtcgaggaaagagagttatttcttcccgacgaagccggagttgaagacggcgatgatgacttcacccagttccctctcgacagcgacgccttcgaaccgccagctttctgcaagtttggcagcgtgaagacaagttccaggaatccactatccaagctggacgagtgtgacgaggaagacggagacttgtcggaagaggagggcgagcacggtgacgtcctgaccagtggtgcattgccccagaaggttcctcccatctccaagctgtcgtcgtccatgaaggggcttggcttcatcgggaaatcgaaaccctaccgtacaggtggcgtccccaagggtaaggtgacaggtagaactaactacagtggcaaagccagcgagcatcagtccgggagccggagcgccaacgagctgctcccgcccagcgcgagtttcgtgaagctgtcggacatgagccgcaaggagtggagcgcgttcctcgagaagttccaggagctgctcccgagcgccctccgcacccggaagcacagcgccggcgtcggccagcgcccgatgccgaggctgggcacgtgcagcagtcagcaggtattattataacaaaaaagcttgtaggtgtatggagccagtagaagaggttgtctgagaataagatcgtcgatggcacagatgagatgagcttggattgcaggagagtggtgtgtttgtgcatagtgttttgacatatgagatgcgttgttcttttctttttttttctttttcttttttgtatatagtgagtactcctgccgcctcgcaacaccgggctcgatctcggccgttacctgatggttggtggtgagtgtgcttggcatcgcctgtgttctgtctttgccgctgtaccattttggagacgcttaccataatatgaacagctgtgatatgatatcgctacagatatatgcataaataacacctgatagtctgcttcag

SEQ ID NO: 222213 - DNA, 1677 bp, Zea Mays
agggatctgaaaccaagaagaaaggtcatcacactactatatggtccaactgtttatatcagaaaaaaaactatagagtgaatggccacatgtagcactcattcaggaaacaggtaaaaccacaggaacataaaatacagaaaagggggcagacccaatgctggatgctcccacacaagtggggtctaggaaagggataaaccaaggcaagcctccccctccgcccacaaatgtgcatgatttcagactattacatactatatatactatgcaagaacacattaaaaatatgattccagactattacatactatgtatgtagcacggatacacaataaggccctcgtatcctgtattgaatacgtatatgatacaaacatgtgcatgatgtagcccgataagtatccatggagtatcggggataaaaataaatattatgaatatcagatgctcgggcttatgcttatacatatcaccacatctattcctctgttgaatatggtccagcccagttaacagattggtatttgaagacaatcactgctcgctcaggtcattccctgctctggtcgccacagcgaaaacacgtgggtgtgcagctgcagtgctgcactacctccctgttgccccaactccaggagtggtgacccctggtaaccagcgacagtgaggtgagttcctttcctctccgctaactctacattccactgtttccccttctgatttctaccctctaagaactacagtcgcacagctatggatccacctcaaggcccacagcgacaaccgcagtgagctagtgacacacgctaccaacaagcctgcccgcgtgcaaccacgcaacatgcgctcccgtagtggcacatcagatcagcagcgactcagcggtcagtatcaccaaaaagcaaatcctgtgtggtccattaaaacaaatagtcaaatagatgtactagcattgtaagagaacggcaatactgccttcattcaatcgctaaccagtagatcttagcttcccttgactgtctgccagaaacagaacgagataacattggcactccttacaatggaatcgctagaacactgaggcaatagccattcccgctgagctactacaataagtatcggtatttttgtccaacagtctaaacacaggcgcataaaacaaaaatgatgcacatccgctgctccattttcacttatgctatcaacagaggaatagtagggtttgtggtggtaaatggctcaacaacacacgcggttaactaaacctctaatttccttagcagcaacacgagcggaacatgttcgaggtttgatagccgcataaaagaaaagggcttagcaagtccgtacgaggcggccgtagatggcgatggggaactcgcagcgggagcagatgtggacgcgctccccgagcgggcgacgggagcgacggccgatggcgcgcgtggcggcggcagcggaggtcgtgacggcgccgaggctcttcgcgacggggaggtccgcgatcacgaggtggtcggggcatgccacggtgaccgattccaggatgctgccaccgagcgccgcagccgccccaaccgcggcgggggcgccggcgccagctgccgtgctagcggcggcaccgccggagtccgacgagccaatcttgctcaggcggatctgcagcatcgctag

SEQ ID NO: 222214 - DNA, 3618 bp, Zea Mays
atggtaaatgatccacaacccgacctttataacatgatcggatgtttgaagcagaacatgtccatgtacaacgttggcataaagaaatggcgtggactggagatccgtccgcacccgcgactgattccatttgctgatggattctcttgaaatcaagagaaaagaagattatcagatggagcccattgaaatcaaggatgatgaagagcatccgatagagatgcttgttgatcagcctcgttttctagaacctttatgtccagaggaggtcaatgaagacacacgggtataccctcgtgtaggagatgagtaccaggtgaaagttccagatctactaaccgtagaggaacagatgaaactaaggtcatcaacagtttatggcagcatggcgtttggcttcgagtaccctgtgggagtaggattagctattccagtcacatggacccaaaatagaagcagtcatataaaagaagagcggatgggatttccaggacacagttcatttccttcacaaggtgaaggttccaaccacaagagcgggaatgttctggacattttgtatcagcatggtgtttgttcagagtgtgtaaactgtaaagttgaatccgctgaacaaggtgagaaattaccaggatttgttggacaagacatgcactgcttacagaaaaggaagcttttaggttgttcttgtgtaaataggaaacttactgattcttttccattgcctgggatgacaagatactcctggactgatgaagaggcacagatttttcttcttggtctctacagttttgggaaaaatcttgtccaggtgacaagatttactgaaactaagacgatgggagaagttttgtcatactactatggagaatttttcaggtctgatgcatacagacgatgggctgtatgtagaaaagcaagaagcaggaggtgtatttttgggctgcgtatattttctggtccaaggcagcaggaattgttgtcccgtttgcttgctggtgtagctagagaagttgaagctcctttgttggaggtctttaagatattaaatgagggaacatctacttttgagcagtttattttgaccttaagatccacagttggtgctcaggttcttgtacaagcaattggaattggcaaaggaaaatatgacctgacaggatttgcattagatcctagtagaaatcatggtatctcagcacgcccagaaatccctgttggcaaggcttgctcagcactttcatctggagatatcataaagtttttgactggtgatttcagaatgagcaaggcaagatcgaatgatctattctgggaggctgtttggcctcgcttgctttcaagaggctggcattcagagcagcctaaggattcttcaccaattggaaaacatgctttagtctttctgattccaggtgtaaagaaattctctagaaaaaagcttgtcaagggaaatcattattttgattctgttagtgatgtcttgagcaaaattgcatctgaaccaaggctgcttgaatttggagttgagcgtggtaatgatgaaagtgtcattaagcatgaaaatggatggagccatgattctgaacctgacagaaacatacttcctaacaagaaaccttcatgctataaccgtcccactgagcctggctgttctccagagctaatgaaatttactgtggtggataccagtcttgttcaaggggaagaaccttccaaggtgaggtcactaagaaacctaccaacagattctagccatggttacatgtcttcaccacattgtggaggctctggaagtgacagttcagaggaacactcagattctgaggacagctctcggtcttgtgaacatataatcactgatgatcgaagcacaaccaatgcaaagtatgctagtgatgagagaaaaagtaagcccccaacagctgataaggtggattctagtgtaattcagaagtctgcttcctcaggcacattagtgtcgattaatggtcatatttcaactgatcaaggtttcagcacaatgaataatgtatcctcttcaaatgcaactattcttcctgttgatgttcaaatggtccatgctcctactacttccactgaaataagctttcagtttgatcaaaggcttaatgctgagtcccaaattttcttagcgcctttttcaaagaggaggaggttggtttcatccaagactgaaagaactggtcgcaagaataccaccaccattgaaaaccattactggaagcaagttgacgagccagtgcatcatgatgcatctggagaaaatgaagcaagcggacccaaagcttttgtatggggtgcaactcctagctcatcaactaacatttcctttgaagtgaataacaagaaaccgtactgcagacagcttgacaatgtgctccctaacgctgaaacaatggtttacaaggaaacatgccaaaataggcatgtcattgatcttaatatcccacaaatgccttctgattttgagtcaactgtgagctacatcgtccctccatctgacaaaaatgcagaaaccacaatcagacctatacgtacttctggagctgaggaggtgactgaccgtgttccagacatagaggcctctagtgatgtgctctatgatgagttttctttcaactcaagaagacatagtagcagaagccgcccaccaacagctcgagctttggaagctcttgcctgtggctttcttggaaccaaacagaagggcagggagacaagtttcccatcttcaagcaggagcagcagacctgttcggcgaccacgaagatcacctgatgttgcacggccatttccttctgaaggcaaagaatgcacttctcgtttccctgatccacccatggatgtcaatgcatggcagatgaataattctccataccaaatgattcatagcagctcctccgataaatccacagaaaaaggtagccctgacttgtttggagcagacaagtctaccgataaaggagttcatgaattgtatggcataccttagatcacatgtaaggtcgatcatatcctgctatatcttttgattaatcaacctttattgaatggattggctgctggttaagagagtgaagtgatggtatggtcaagatgcagcctgcagttaagtcatgggtactgcttgttcaaactttagtttgttgttgagaaacaaatggaagaagcttatacagctgaggtttctgtttcatctatagttttgtgcatgtacattgcctaaatattccagcatcgatacttaacaagaatagatgacaccaacgaactacaaagatgtgatcgacgattgctttcgcatcggcgcttcagcttccagtagcttgtcaaactttatgtgatagaatcatgtgcttcttgtcggaagcctgtgatgaatctttgaccttttcctttgagattttatggttaagctttactgagagttatactcttgctctttattacatgtactgtgtggcggtagctgaacaagtgtaatagcgcaccgtataagaaccatacctgaactagacctgagttgagactgtttctctgtcgacaagccagaagacctaatattataagcttacttgtgaaaatgtatatgtt

SEQ ID NO: 222215 - DNA, 525 bp, Zea Mays
tctgctacagatgtaagaaatttggagaattctattgggccctggaactgtgaactttgtgaagatcaagacatttcatcagaagctgcaaccgttagcgataaatcacattgtaatggcaagaaattaccctttgcacagtgtggcatgtgccatggcacatcaggtgcatttagaaagactgtagatgggaagtgggttcatgctttctgtgctgagtggttgttggacaccaagtatgtaaggggacaagataaacctgtagaaggaacggaagcccttgtagagggaaaggacacttgttgtgtctgcctccacaatgttggcgtgtgcttaaggtgtagcagtggggattgcaacattacttttcatcctacttgcgctagaagttgtggtttttacatgaacacaaaagggtttggtactacaccacagcacaaagcatactgtggcaaacacagcgtacaacagaaagaggctgatgcacagcaatatggacctgaggagcacacgagcatgaaatga

SEQ ID NO: 222216 - DNA, 1415 bp, Zea Mays
cgaacgcaacgacaaccaccagtccgtcgccttgcatcgacatcgatcgataacctacgcacggaaccagctgctaggagtgttttcctttcctatatatagtgatgtttgattgtcagctccacaaatcgataggctaaggaagctccatcgatcctgcgttattttgccggtaattgattgatagatggcgtcggagaagagcaagatcctggtggtcggcggcacggggtacctgggcaggcacgtcgtggcggcgagcgcgcggctgggccaccccacctcggcgctcgtcagggacacggcgccgtccgacccggccaaagcggcgctgctcaagaccttccaggacgccggtgtgacgctcctcaagggcgacctgtacgaccaggctagcctggtgagcgcggtgaagggcgcggacgtggtcatctccgtgctcggatcgatgcagatcgccgaccagagccggctcgtcgacgccatcaaggaggccggcaacgtcaagaggttcttcccgtcggagttcggcctggacgtggaccgcacgggcatcgtggagccggccaagtccatcctaggcgccaaggtgggcatccgccgcgccaccgaggccgcgggcataccctacacctacgccgtggccggcttcttcgcgggcttcgcgctccccaacatcgggcagctcctcgcccccggcccgcccgcggacaaggcggtcgtcctcggcgacggcgacaccaaggcggtgttcgtggaggagggcgacatcgccacgtacacggtgctggcggccgacgacccgcgcgcggagaacaaggtgctgtacatcaagccgccggccaacacgctgtcgcacaacgagctgctgtcgctgtgggagaagaagaccggcaagacgttccggcgggagtacgtgccggaggaagccgtgctcaagcagatccaagctgtaagctgtgtcgtatgcatgcagagtcgccgttccctctgaacatcatcctggcgatcgggcacgcggcgttcgtgcgtggggagcagacgggcttcgagatcgacccggccaagggggtggacgccagcgaactgtacccggatgtcaagtacaccaccgtcgacgagtacctcaaccgcttcctctgagcctgaggtctcaacaaacaggacgtcacgtacggccgcgccggggccatgatgtgtggacgtcctcatcgtcagctgcttacctaaacatcactagcagcataccgtagtgtacgctacggtagaaatggaaagacaatatgttttctaaataataagatagattaaggttcatgtcaaaagggatttatgatgagttatatcacattgttgagctaacaaaaaatatgcttaaaagagtaacattatcatagctacaatatcttttgaag

SEQ ID NO: 222217 - DNA, 3820 bp, Zea Mays
tttgctcagtttttgtggagtgactgttgctgagaagagaccaatgatgcaatctcgtgatgttgataaatatttgaacaaagctgacaacattaaccatgtgctcatgaactctggcgacatttctaaaattggtggtcactgcctgcatggtacacatggtttggggactcggctagattctgatgctcagagctcatcccctggagaaaatatgaacaacaaaatcagaaggcccatcgaaatatgtacctttgatgctcaaggtcggtgcaagaaaggaaagagttgcatctctcttcatgaaagggagggatttggttctgcaaagactggtctgctcgcaccagctggttctggaaatcatagaggtatgagcttcctaactagggcaatctgtgagcaacaacttgctataacagagccaacttcttattgctccctgctgtgcataggttctgaaggaggttctcaagtacaacatatatctgacttgaaagtgcatcagttcaaggattcagagggtttgtcaaaagatgaaatgtgtcggaatcttatttatgcatttggcaaagataatcagatgtcggtacatcttgctggtaaacacagctctcccattcctggggtttcacaaaggatgcccgtcagcattggtcattcattggctcagaatccattagttcatgagaagaacaacaaacgtttcatgggacaccatattgatgtggctgctgaaaactatttggatgctggaggtacctatccaagattagatggaggtatttttcagtttgacatagacaaggaaagcagtgttagtgattcccatgtctcaagaacttacctttcagattatccatataaatcatttggcttgtctatttcatctgatcctctccagctcagtgagaagctgtcagcatatggtggagtgacaaatactattcctaacatacatcagaaagaacatcactcatgccatgcttcatacagctcacatagcttaacaggatccagaaatccttgctttgctacctctgaacatactttcggtagcccatctcttctagcaacttctcatctgggaatacagtcccatcatctgttcacatctgatattgagaaggctgatctccatagatgccttgatgttggaaagggctatggtacttctagttctggacccgcattgcttgtgagcagtaaacctgaaccttctatgacgccagttgggccccactctccaattaagaatgaggtctgggaaacatcagtgccttttgtaccttcttttagttttcctgatagcacaacagcttcagaaagtcaatatgatccatttgttgactatgttgaacctcctaaagttgggaatacaaataatctcaagccctccactatatcctgcaacattacaagtcagcatacagatcagtacgcagttactgataaatccttgaattgcaatgacaaattgaccaggaatataactgccaaaggatcaaatgaacctgcttactttattgctcctgatagaggatgcagctctagcctggatgatactatcaaggtgaaagcttgtgacagaaaaaaggatgcagttgattacaatgagaaaacaagggatttccgttttcatttggcagaacatataaaggagttggtcaaaccaatatggaaaaaaggtaatctgagtaaagatgctcataaactggtagtgagaaaatctgtcgagaaggttgtggactccattgagccaaatcaagtaccaactactgaagagttgattacgaagtacatagccacatgtggaccaaagatagaaaaacttgtgaaggcatatgttgataggcacagtacatgtcatccaaccatcaaatacagcagctctgagatgggagcttgagcttaatggtgatgacagcttgaaccttctgtcctaccaatctggttaaccttcatttgtaggcccaacaagttaatattgttcatacaaacatgtatgtccatgacttcttgaggcaagtagtcagcgaagttccagatattggtgcatctgatgttattgctgatgataagcttggcaaaggacgtatatctatcctgtagttgataaggttcttacatgtcaaaataatcttctacgaagtgttaataaatgctgaattgtcatcaggaaagctggagatggaagcgaggaggaattaaagaggacaataaacaaagcagaaaaccatacaggcaatgacaggttgtgcgaggggttgtgtacttgtgtgagaggctgccgcggacgtgtggaacttagcgggtgttgtcatagttcataaacaattcgtggagaaccaatctagcaagctagtagcctaaaagtggagatagccgatgaggtcttaagatgcaactgaagcaaaagaggctactacatcaaggagcagttcaaccactcatttgatggcatagtccatttgatgaggtcttagatgcaactgaacccactccaaggggtttgctcaggaacattgacttgaatttagatccaactgatgaagaagatgagattacagtgccaccccaagcccagtcgatccagcgactagttccgttgcagccactgcgggaccatctgttgcactttctgggtgcttgggaactgcctgacatgaacaatatggagatgggccctgtccagtttgctttgtaaaaaaaatacagattggagagaatgggtattatgacaatcaagactagctctgcccttatagctttcagagtggataagtaggatagcaggacagttgtaggttcatcttaactctttagagattctcatgtatcatgtgtatcatagccgccaaagctgcagatgcagcttataatgtgccagaggtttaaggttggctggctagttgactgtaacgttccgaagctagattcgctcaacacgtagtgctttggcatgtagtaccagttgtacttgtacactcctgtctccagttgctctccagtttaatgttaattatatgcttatgcttcattggatagttgaggaagatcttgctggatgcatgtatggcaaataaaaagcaagaaagagtttcagattacttatcacagctcattccatgacaggagtcaatattttcatatatgatagacctgcgaaaagattgcgagccttcagggataacgcgtcatcatactgggagatgatacctttatttcctgaaacatggttatccaagcacaaggaaaaagttccagcagtgattgcgactcgccagctcaaggtgactgcggaatccaagatgggatcgatgcttctacagctgcttgaagttgttccacaccgcccccaccttggccttgcacagcttctttccgctgccggcatccacctcgacagtaaaatgcatggtcctggcatcacgttctgcacatatattatacatgggatgcatcagtggtggctccaacgatatcaactaggtttatgcagagtgacatgtctttcggtcttgctgttgtgctccgtgaccgtgactgaagcacgcgagctcaatggcctcgaggtcgctctcacacccagtgggtgcgttttggacgtcgtccaccatcccacaggccgttctcgtctcggccatggctgctggagcctgtggagagggagaaaagctgtgcagagggagaaagaggaagctgcggcgagacgagacagacgacgacagacactcctgagtcctgcttgtagtagtagagcaccaacaacgggctattgcataccatcaatgggcaggtctcctaatctagaagtgaa

SEQ ID NO: 222218 - DNA, 3846 bp, Zea Mays
atggagcagaggttgggggcaacgtatcagtggtggtcatggagtcacagtaagagctgtgaatcggtggagcggaaggggcgggagtggctggatgaggcaggacttgcctctggattacagcttgtattggatatgttggtgactgtgggagaacctgagcttggttcaagccgcggacctgtgtcatggggcgtggcaggtttttgtggagtgactgttgctgagaagagaccaatgatgcaatctcgtgatgttgataaatatttgaacaaagctgacaacattaaccatgtgctcatgaactctggcgacatttctaaaattggtggtcactgcctgcatggtacacatggtttggggactcggctagattctgatgctcagagctcatcccctggagaaaatatgaacaacaaaatcagaaggcccatcgaaatatgtacctttgatgctcaaggtcggtgcaagaaaggaaagagttgcatctctcttcatgaaagggagggatttggttctgcaaagactggtctgctcgcaccagctggttctggaaatcatagaggttctgaaggaggttctcaagtacaacatatatctgacttgaaagtgcatcagttcaaggattcagagggtttgtcaaaagatgaaatgtgtcggaatcttatttatgcatttggcaaagataatcagatgtcggtacatcttgctggtaaacacagctctcccattcctggggtttcacaaaggatgcccgtcagcattggtcattcattggctcagaatccattagttcatgagaagaacaacaaacgtttcatgggacaccatattgatgtggctgctgaaaactatttggatgctggaggtacctatccaagattagatggaggtatttttcagtttgacatagacaaggaaagcagtgttagtgattcccatgtctcaagaacttacctttcagattatccatataaatcatttggcttgtctatttcatctgatcctctccagctcagtgagaagctgtcagcatatggtggagtgacaaatactattcctaacatacatcagaaagaacatcactcatgccatgcttcatacagctcacatagcttaacaggatccagaaatccttgctttgctacctctgaacatactttcggtagcccatctcttctagcaacttctcatctgggaatacagtcccatcatctgttcacatctgatattgagaaggctgatctccatagatgccttgatgttggaaagggctatggtacttctagttctggacccgcattgcttgtgagcagtaaacctgaaccttctatgacgccagttgggccccactctccaattaagaatgaggtctgggaaacatcagtgccttttgtaccttcttttagttttcctgatagcacaacagcttcagaaagtcaatatgatccatttgttgactatgttgaacctcctaaagttgggaatacaaataatctcaagccctccactatatcctgcaacattacaagtcagcatacagatcagtacgcagttactgataaatccttgaattgcaatgacaaattgaccaggaatataactgccaaaggatcaaatgaacctgcttactttattgctcctgatagaggatgcagctctagcctggatgatactatcaaggtgaaagcttgtgacagaaaaaaggatgcagttgattacaatgagaaaacaagggatttccgttttcatttggcagaacatataaaggagttggtcaaaccaatatggaaaaaaggtaatctgagtaaagatgctcataaactggtagtgagaaaatctgtcgagaaggttgtggactccattgagccaaatcaagtaccaactactgaagagttgattacgaagtacatagccacatgtggaccaaagatagaaaaacttgtgaaggcatatgttgataggcacagtacatgtcatccaaccatcaaatacagcagctctgagatgggagcttgagcttaatggtgatgacagcttgaaccttctgtcctaccaatctggttaaccttcatttgtaggcccaacaagttaatattgttcatacaaacatgtatgtccatgacttcttgaggcaagtagtcagcgaagttccagatattggtgcatctgatgttattgctgatgataagcttggcaaaggacgaaagctggagatggaagcgaggaggaattaaagaggacaataaacaaagcagaaaaccatacaggcaatgacaggttgtgcgaggggttgtgtacttgtgtgagaggctgccgcggacgtgtggaacttagcgggtgttgtcatagttcataaacaattcgtggagaaccaatctagcaagctagtagcctaaaagtggagatagccgatgaggtcttaagatgcaactgaagcaaaagaggctactacatcaaggagcagttcaaccactcatttgatggcatagtccatttgatgaggtcttagatgcaactgaacccactccaaggggtttgctcaggaacattgacttgaatttagatccaactgatgaagaagatgagattacagtgccaccccaagcccagtcgatccagcgactagttccgttgcagccactgcgggaccatctgttgcactttctgggtgcttgggaactgcctgacatgaacaatatggagatgggccctgtccagtttgctttgtaaaaaaaatacagattggagagaatgggtattatgacaatcaagactagctctgcccttatagctttcagagtggataagtaggatagcaggacagttgtaggttcatcttaactctttagagattctcatgtatcatgtgtatcatagccgccaaagctgcagatgcagcttataatgtgccagaggtttaaggttggctggctagttgactgtaacgttccgaagctagattcgctcaacacgtagtgctttggcatgtagtaccagttgtacttgtacactcctgtctccagttgctctccagtttaatgttaattatatgcttatgcttcattggatagttgaggaagatcttgctggatgcatgtatggcaaataaaaagcaagaaagagtttcagattacttatcacagctcattccatgacaggagtcaatattttcatatatgatagacctgcgaaaagattgcgagccttcagggataacgcgtcatcatactgggagatgatacctttatttcctgaaacatggttatccaagcacaaggaaaaagttccagcagtgattgcgactcgccagctcaaggtgactgcggaatccaagatgggatcgatgcttctacagctgcttgaagttgttccacaccgcccccaccttggccttgcacagcttctttccgctgccggcatccacctcgacagtaaaatgcatggtcctggcatcacgttctgcacatatattatacatgggatgcatcagtggtggctccaacgatatcaactaggtttatgcagagtgacatgtctttcggtcttgctgttgtgctccgtgaccgtgactgaagcacgcgagctcaatggcctcgaggtcgctctcacacccagtgggtgcgttttggacgtcgtccaccatcccacaggccgttctcgtctcggccatggctgctggagcctgtggagagggagaaaagctgtgcagagggagaaagaggaagctgcggcgagacgagacagacgacgacagacactcctgagtcctgcttgtagtagtagagcaccaacaacgggctattgcataccatcaatgggcaggtctcctaatctagaagtgaa

SEQ ID NO: 222219 - DNA, 2219 bp, Zea Mays
atggagcagaggttgggggcaacgtatcagtggtggtcatggagtcacagtaagagctgtgaatcggtggagcggaaggggcgggagtggctggatgaggcaggacttgcctctggattacagcttgtattggatatgttggtgactgtgggagaacctgagcttggttcaagccgcggacctgtgtcatggggcgtggcaggtttttgtggagtgactgttgctgagaagagaccaatgatgcaatctcgtgatgttgataaatatttgaacaaagctgacaacattaaccatgtgctcatgaactctggcgacatttctaaaattggtggtcactgcctgcatggtacacatggtttggggactcggctagattctgatgctcagagttcatacaaacatgtatgtccatgacttcttgaggcaagtagtcagcgaagttccagatattggtgcatctgatgttattgctgatgataagcttggcaaaggacgtatatctatcctgtagttgataaggttcttacatgtcaaaataatcttctacgaagtgttaataaatgctgaattgtcatcaggaaagctggagatggaagcgaggaggaattaaagaggacaataaacaaagcagaaaaccatacaggcaatgacaggttgtgcgaggggttgtgtacttgtgtgagaggctgccgcggacgtgtggaacttagcgggtgttgtcatagttcataaacaattcgtggagaaccaatctagcaagctagtagcctaaaagtggagatagccgatgaggtcttaagatgcaactgaagcaaaagaggctactacatcaaggagcagttcaaccactcatttgatggcatagtccatttgatgaggtcttagatgcaactgaacccactccaaggggtttgctcaggaacattgacttgaatttagatccaactgatgaagaagatgagattacagtgccaccccaagcccagtcgatccagcgactagttccgttgcagccactgcgggaccatctgttgcactttctgggtgcttgggaactgcctgacatgaacaatatggagatgggccctgtccagtttgctttgtaaaaaaaatacagattggagagaatgggtattatgacaatcaagactagctctgcccttatagctttcagagtggataagtaggatagcaggacagttgtaggttcatcttaactctttagagattctcatgtatcatgtgtatcatagccgccaaagctgcagatgcagcttataatgtgccagaggtttaaggttggctggctagttgactgtaacgttccgaagctagattcgctcaacacgtagtgctttggcatgtagtaccagttgtacttgtacactcctgtctccagttgctctccagtttaatgttaattatatgcttatgcttcattggatagttgaggaagatcttgctggatgcatgtatggcaaataaaaagcaagaaagagtttcagattacttatcacagctcattccatgacaggagtcaatattttcatatatgatagacctgcgaaaagattgcgagccttcagggataacgcgtcatcatactgggagatgatacctttatttcctgaaacatggttatccaagcacaaggaaaaagttccagcagtgattgcgactcgccagctcaaggtgactgcggaatccaagatgggatcgatgcttctacagctgcttgaagttgttccacaccgcccccaccttggccttgcacagcttctttccgctgccggcatccacctcgacagtaaaatgcatggtcctggcatcacgttctgcacatatattatacatgggatgcatcagtggtggctccaacgatatcaactaggtttatgcagagtgacatgtctttcggtcttgctgttgtgctccgtgaccgtgactgaagcacgcgagctcaatggcctcgaggtcgctctcacacccagtgggtgcgttttggacgtcgtccaccatcccacaggccgttctcgtctcggccatggctgctggagcctgtggagagggagaaaagctgtgcagagggagaaagaggaagctgcggcgagacgagacagacgacgacagacactcctgagtcctgcttgtagtagtagagcaccaacaacgggctattgcataccatcaatgggcaggtctcctaatctagaagtgaa

SEQ ID NO: 222220 - DNA, 4165 bp, Zea Mays
atggagcagaggttgggggcaacgtatcagtggtggtcatggagtcacagtaagagctgtgaatcggtggagcggaaggggcgggagtggctggatgaggcaggacttgcctctggattacagcttgtattggatatgttggtgactgtgggagaacctgagcttggttcaagccgcggacctgtgtcatggggcgtggcaggtttttgtggagtgactgttgctgagaagagaccaatgatgcaatctcgtgatgttgataaatatttgaacaaagctgacaacattaaccatgtgctcatgaactctggcgacatttctaaaattggtggtcactgcctgcatggtacacatggtttggggactcggctagattctgatgctcagagctcatcccctggagaaaatatgaacaacaaaatcagaaggcccatcgaaatatgtacctttgatgctcaaggtcggtgcaagaaaggaaagagttgcatctctcttcatgaaagggagggatttggttctgcaaagactggtctgctcgcaccagctggttctggaaatcatagaggtatgagcttcctaactagggcaatctgtgagcaacaacttgctataacagagccaacttcttattgctccctgctgtgcataggttctgaaggaggttctcaagtacaacatatatctgacttgaaagtgcatcagttcaaggattcagagggtttgtcaaaagatgaaatgtgtcggaatcttatttatgcatttggcaaagataatcagatgtcggtacatcttgctggtaaacacagctctcccattcctggggtttcacaaaggatgcccgtcagcattggtcattcattggctcagaatccattagttcatgagaagaacaacaaacgtttcatgggacaccatattgatgtggctgctgaaaactatttggatgctggaggtacctatccaagattagatggaggtatttttcagtttgacatagacaaggaaagcagtgttagtgattcccatgtctcaagaacttacctttcagattatccatataaatcatttggcttgtctatttcatctgatcctctccagctcagtgagaagctgtcagcatatggtggagtgacaaatactattcctaacatacatcagaaagaacatcactcatgccatgcttcatacagctcacatagcttaacaggatccagaaatccttgctttgctacctctgaacatactttcggtagcccatctcttctagcaacttctcatctgggaatacagtcccatcatctgttcacatctgatattgagaaggctgatctccatagatgccttgatgttggaaagggctatggtacttctagttctggacccgcattgcttgtgagcagtaaacctgaaccttctatgacgccagttgggccccactctccaattaagaatgaggtctgggaaacatcagtgccttttgtaccttcttttagttttcctgatagcacaacagcttcagaaagtcaatatgatccatttgttgactatgttgaacctcctaaagttgggaatacaaataatctcaagccctccactatatcctgcaacattacaagtcagcatacagatcagtacgcagttactgataaatccttgaattgcaatgacaaattgaccaggaatataactgccaaaggatcaaatgaacctgcttactttattgctcctgatagaggatgcagctctagcctggatgatactatcaaggtgaaagcttgtgacagaaaaaaggatgcagttgattacaatgagaaaacaagggatttccgttttcatttggcagaacatataaaggagttggtcaaaccaatatggaaaaaaggtaatctgagtaaagatgctcataaactggtagtgagaaaatctgtcgagaaggttgtggactccattgagccaaatcaagtaccaactactgaagagttgattacgaagtacatagccacatgtggaccaaagatagaaaaacttgtgaaggcatatgttgataggcacagtacatgtcatccaaccatcaaatacagcagctctgagatgggagcttgagcttaatggtgatgacagcttgaaccttctgtcctaccaatctggttaaccttcatttgtaggcccaacaagttaatattgttcatacaaacatgtatgtccatgacttcttgaggcaagtagtcagcgaagttccagatattggtgcatctgatgttattgctgatgataagcttggcaaaggacgtatatctatcctgtagttgataaggttcttacatgtcaaaataatcttctacgaagtgttaataaatgctgaattgtcatcaggaaagctggagatggaagcgaggaggaattaaagaggacaataaactggcaggcctgatgcagcggtagagcctaccgtctgtaaccggaaggtcccgggttcgagccccagcctctgcatattatgcgggtaacgcttggcgcttaaagatacccttccccagaccccgcacagtgcgggaagcctacgacactggaaagcagaaaaccatacaggcaatgacaggttgtgcgaggggttgtgtacttgtgtgagaggctgccgcggacgtgtggaacttagcgggtgttgtcatagttcataaacaattcgtggagaaccaatctagcaagctagtagcctaaaagtggagatagccgatgaggtcttaagatgcaactgaagcaaaagaggctactacatcaaggagcagttcaaccactcatttgatggcatagtccatttgatgaggtcttagatgcaactgaacccactccaaggggtttgctcaggaacattgacttgaatttagatccaactgatgaagaagatgagattacagtgccaccccaagcccagtcgatccagcgactagttccgttgcagccactgcgggaccatctgttgcactttctgggtgcttgggaactgcctgacatgaacaatatggagatgggccctgtccagtttgctttgtaaaaaaaatacagattggagagaatgggtattatgacaatcaagactagctctgcccttatagctttcagagtggataagtaggatagcaggacagttgtaggttcatcttaactctttagagattctcatgtatcatgtgtatcatagccgccaaagctgcagatgcagcttataatgtgccagaggtttaaggttggctggctagttgactgtaacgttccgaagctagattcgctcaacacgtagtgctttggcatgtagtaccagttgtacttgtacactcctgtctccagttgctctccagtttaatgttaattatatgcttatgcttcattggatagttgaggaagatcttgctggatgcatgtatggcaaataaaaagcaagaaagagtttcagattacttatcacagctcattccatgacaggagtcaatattttcatatatgatagacctgcgaaaagattgcgagccttcagggataacgcgtcatcatactgggagatgatacctttatttcctgaaacatggttatccaagcacaaggaaaaagttccagcagtgattgcgactcgccagctcaaggtgactgcggaatccaagatgggatcgatgcttctacagctgcttgaagttgttccacaccgcccccaccttggccttgcacagcttctttccgctgccggcatccacctcgacagtaaaatgcatggtcctggcatcacgttctgcacatatattatacatgggatgcatcagtggtggctccaacgatatcaactaggtttatgcagagtgacatgtctttcggtcttgctgttgtgctccgtgaccgtgactgaagcacgcgagctcaatggcctcgaggtcgctctcacacccagtgggtgcgttttggacgtcgtccaccatcccacaggccgttctcgtctcggccatggctgctggagcctgtggagagggagaaaagctgtgcagagggagaaagaggaagctgcggcgagacgagacagacgacgacagacactcctgagtcctgcttgtagtagtagagcaccaacaacgggctattgcataccatcaatgggcaggtctcctaatctagaagtgaa

SEQ ID NO: 222221 - DNA, 3775 bp, Zea Mays
ggattggtgggtggaggttggacatcagaggctgatggagcagaggttgggggcaacgtatcagtggtggtcatggagtcacagtaagagctgtgaatcggtggagcggaaggggcgggagtggctggatgaggcaggacttgcctctggattacagcttgtattggatatgttggtgactgtgggagaacctgagcttggttcaagccgcggacctgtgtcatggggcgtggcaggtttttgtggagtgactgttgctgagaagagaccaatgatgcaatctcgtgatgttgataaatatttgaacaaagctgacaacattaaccatgtgctcatgaactctggcgacatttctaaaattggtggtcactgcctgcatggtacacatggtttggggactcggctagattctgatgctcagagctcatcccctggagaaaatatgaacaacaaaatcagaaggcccatcgaaatatgtacctttgatgctcaaggtcggtgcaagaaaggaaagagttgcatctctcttcatgaaagggagggatttggttctgcaaagactggtctgctcgcaccagctggttctggaaatcatagaggttctgaaggaggttctcaagtacaacatatatctgacttgaaagtgcatcagttcaaggattcagagggtttgtcaaaagatgaaatgtgtcggaatcttatttatgcatttggcaaagataatcagatgtcggtacatcttgctggtaaacacagctctcccattcctggggtttcacaaaggatgcccgtcagcattggtcattcattggctcagaatccattagttcatgagaagaacaacaaacgtttcatgggacaccatattgatgtggctgctgaaaactatttggatgctggaggtacctatccaagattagatggaggtatttttcagtttgacatagacaaggaaagcagtgttagtgattcccatgtctcaagaacttacctttcagattatccatataaatcatttggcttgtctatttcatctgatcctctccagctcagtgagaagctgtcagcatatggtggagtgacaaatactattcctaacatacatcagaaagaacatcactcatgccatgcttcatacagctcacatagcttaacaggatccagaaatccttgctttgctacctctgaacatactttcggtagcccatctcttctagcaacttctcatctgggaatacagtcccatcatctgttcacatctgatattgagaaggctgatctccatagatgccttgatgttggaaagggctatggtacttctagttctggacccgcattgcttgtgagcagtaaacctgaaccttctatgacgccagttgggccccactctccaattaagaatgaggtctgggaaacatcagtgccttttgtaccttcttttagttttcctgatagcacaacagcttcagaaagtcaatatgatccatttgttgactatgttgaacctcctaaagttgggaatacaaataatctcaagccctccactatatcctgcaacattacaagtcagcatacagatcagtacgcagttactgataaatccttgaattgcaatgacaaattgaccaggaatataactgccaaaggatcaaatgaacctgcttactttattgctcctgatagaggatgcagctctagcctggatgatactatcaaggtgaaagcttgtgacagaaaaaaggatgcagttgattacaatgagaaaacaagggatttccgttttcatttggcagaacatataaaggagttggtcaaaccaatatggaaaaaaggtaatctgagtaaagatgctcataaactggtagtgagaaaatctgtcgagaaggttgtggactccattgagccaaatcaagtaccaactactgaagagttgattacgaagtacatagccacatgtggaccaaagatagaaaaacttgtgaaggcatatgttgataggcacagtacatgtcatccaaccatcaaatacagcagctctgagatgggagcttgagcttaatggtgatgacagcttgaaccttctgtcctaccaatctggttaaccttcatttgtaggcccaacaagttaatattggaaagctggagatggaagcgaggaggaattaaagaggacaataaacaaagcagaaaaccatacaggcaatgacaggttgtgcgaggggttgtgtacttgtgtgagaggctgccgcggacgtgtggaacttagcgggtgttgtcatagttcataaacaattcgtggagaaccaatctagcaagctagtagcctaaaagtggagatagccgatgaggtcttaagatgcaactgaagcaaaagaggctactacatcaaggagcagttcaaccactcatttgatggcatagtccatttgatgaggtcttagatgcaactgaacccactccaaggggtttgctcaggaacattgacttgaatttagatccaactgatgaagaagatgagattacagtgccaccccaagcccagtcgatccagcgactagttccgttgcagccactgcgggaccatctgttgcactttctgggtgcttgggaactgcctgacatgaacaatatggagatgggccctgtccagtttgctttgtaaaaaaaatacagattggagagaatgggtattatgacaatcaagactagctctgcccttatagctttcagagtggataagtaggatagcaggacagttgtaggttcatcttaactctttagagattctcatgtatcatgtgtatcatagccgccaaagctgcagatgcagcttataatgtgccagaggtttaaggttggctggctagttgactgtaacgttccgaagctagattcgctcaacacgtagtgctttggcatgtagtaccagttgtacttgtacactcctgtctccagttgctctccagtttaatgttaattatatgcttatgcttcattggatagttgaggaagatcttgctggatgcatgtatggcaaataaaaagcaagaaagagtttcagattacttatcacagctcattccatgacaggagtcaatattttcatatatgatagacctgcgaaaagattgcgagccttcagggataacgcgtcatcatactgggagatgatacctttatttcctgaaacatggttatccaagcacaaggaaaaagttccagcagtgattgcgactcgccagctcaaggtgactgcggaatccaagatgggatcgatgcttctacagctgcttgaagttgttccacaccgcccccaccttggccttgcacagcttctttccgctgccggcatccacctcgacagtaaaatgcatggtcctggcatcacgttctgcacatatattatacatgggatgcatcagtggtggctccaacgatatcaactaggtttatgcagagtgacatgtctttcggtcttgctgttgtgctccgtgaccgtgactgaagcacgcgagctcaatggcctcgaggtcgctctcacacccagtgggtgcgttttggacgtcgtccaccatcccacaggccgttctcgtctcggccatggctgctggagcctgtggagagggagaaaagctgtgcagagggagaaagaggaagctgcggcgagacgagacagacgacgacagacactcctgagtcctgcttgtagtagtagagcaccaacaacgggctattgcataccatcaatgggcaggtctcctaatctagaagtgaa

SEQ ID NO: 222222 - DNA, 4232 bp, Zea Mays
gctacagacagggtatcgagcagaggaaggacacactaagacactaagtccatgtagaagtggaagcagtcattaatcgacgaggtagaccaatagaggtcagaggttcggattggtgggtggaggttggacatcagaggctgatggagcagaggttgggggcaacgtatcagtggtggtcatggagtcacagtaagagctgtgaatcggtggagcggaaggggcgggagtggctggatgaggcaggacttgcctctggattacagcttgtattggatatgttggtgactgtgggagaacctgagcttggttcaagccgcggacctgtgtcatggggcgtggcaggtttttgtggagtgactgttgctgagaagagaccaatgatgcaatctcgtgatgttgataaatatttgaacaaagctgacaacattaaccatgtgctcatgaactctggcgacatttctaaaattggtggtcactgcctgcatggtacacatggtttggggactcggctagattctgatgctcagagctcatcccctggagaaaatatgaacaacaaaatcagaaggcccatcgaaatatgtacctttgatgctcaaggtcggtgcaagaaaggaaagagttgcatctctcttcatgaaagggagggatttggttctgcaaagactggtctgctcgcaccagctggttctggaaatcatagaggttctgaaggaggttctcaagtacaacatatatctgacttgaaagtgcatcagttcaaggattcagagggtttgtcaaaagatgaaatgtgtcggaatcttatttatgcatttggcaaagataatcagatgtcggtacatcttgctggtaaacacagctctcccattcctggggtttcacaaaggatgcccgtcagcattggtcattcattggctcagaatccattagttcatgagaagaacaacaaacgtttcatgggacaccatattgatgtggctgctgaaaactatttggatgctggaggtacctatccaagattagatggaggtatttttcagtttgacatagacaaggaaagcagtgttagtgattcccatgtctcaagaacttacctttcagattatccatataaatcatttggcttgtctatttcatctgatcctctccagctcagtgagaagctgtcagcatatggtggagtgacaaatactattcctaacatacatcagaaagaacatcactcatgccatgcttcatacagctcacatagcttaacaggatccagaaatccttgctttgctacctctgaacatactttcggtagcccatctcttctagcaacttctcatctgggaatacagtcccatcatctgttcacatctgatattgagaaggctgatctccatagatgccttgatgttggaaagggctatggtacttctagttctggacccgcattgcttgtgagcagtaaacctgaaccttctatgacgccagttgggccccactctccaattaagaatgaggtctgggaaacatcagtgccttttgtaccttcttttagttttcctgatagcacaacagcttcagaaagtcaatatgatccatttgttgactatgttgaacctcctaaagttgggaatacaaataatctcaagccctccactatatcctgcaacattacaagtcagcatacagatcagtacgcagttactgataaatccttgaattgcaatgacaaattgaccaggaatataactgccaaaggatcaaatgaacctgcttactttattgctcctgatagaggatgcagctctagcctggatgatactatcaaggtgaaagcttgtgacagaaaaaaggatgcagttgattacaatgagaaaacaagggatttccgttttcatttggcagaacatataaaggagttggtcaaaccaatatggaaaaaaggtaatctgagtaaagatgctcataaactggtagtgagaaaatctgtcgagaaggttgtggactccattgagccaaatcaagtaccaactactgaagagttgattacgaagtacatagccacatgtggaccaaagatagaaaaacttgtgaaggcatatgttgataggcacagtacatgtcatccaaccatcaaatacagcagctctgagatgggagcttgagcttaatggtgatgacagcttgaaccttctgtcctaccaatctggttaaccttcatttgtaggcccaacaagttaatattgttcatacaaacatgtatgtccatgacttcttgaggcaagtagtcagcgaagttccagatattggtgcatctgatgttattgctgatgataagcttggcaaaggacgtatatctatcctgtagttgataaggttcttacatgtcaaaataatcttctacgaagtgttaataaatgctgaattgtcatcaggaaagctggagatggaagcgaggaggaattaaagaggacaataaacgcctgatgcagcggtagagcctaccgtctgtaaccggaaggtcccgggttcgagccccagcctctgcatattatgcgggtaacgcttggcgcttaaagatacccttccccagaccccgcacagtgcgggaagcctacgacactggtttcttgtgtgcagaaagcagaaaaccatacaggcaatgacaggttgtgcgaggggttgtgtacttgtgtgagaggctgccgcggacgtgtggaacttagcgggtgttgtcatagttcataaacaattcgtggagaaccaatctagcaagctagtagcctaaaagtggagatagccgatgaggtcttaagatgcaactgaagcaaaagaggctactacatcaaggagcagttcaaccactcatttgatggcatagtccatttgatgaggtcttagatgcaactgaacccactccaaggggtttgctcaggaacattgacttgaatttagatccaactgatgaagaagatgagattacagtgccaccccaagcccagtcgatccagcgactagttccgttgcagccactgcgggaccatctgttgcactttctgggtgcttgggaactgcctgacatgaacaatatggagatgggccctgtccagtttgctttgtaaaaaaaatacagattggagagaatgggtattatgacaatcaagactagctctgcccttatagctttcagagtggataagtaggatagcaggacagttgtaggttcatcttaactctttagagattctcatgtatcatgtgtatcatagccgccaaagctgcagatgcagcttataatgtgccagaggtttaaggttggctggctagttgactgtaacgttccgaagctagattcgctcaacacgtagtgctttggcatgtagtaccagttgtacttgtacactcctgtctccagttgctctccagtttaatgttaattatatgcttatgcttcattggatagttgaggaagatcttgctggatgcatgtatggcaaataaaaagcaagaaagagtttcagattacttatcacagctcattccatgacaggagtcaatattttcatatatgatagacctgcgaaaagattgcgagccttcagggataacgcgtcatcatactgggagatgatacctttatttcctgaaacatggttatccaagcacaaggaaaaagttccagcagtgattgcgactcgccagctcaaggtgactgcggaatccaagatgggatcgatgcttctacagctgcttgaagttgttccacaccgcccccaccttggccttgcacagcttctttccgctgccggcatccacctcgacagtaaaatgcatggtcctggcatcacgttctgcacatatattatacatgggatgcatcagtggtggctccaacgatatcaactaggtttatgcagagtgacatgtctttcggtcttgctgttgtgctccgtgaccgtgactgaagcacgcgagctcaatggcctcgaggtcgctctcacacccagtgggtgcgttttggacgtcgtccaccatcccacaggccgttctcgtctcggccatggctgctggagcctgtggagagggagaaaagctgtgcagagggagaaagaggaagctgcggcgagacgagacagacgacgacagacactcctgagtcctgcttgtagtagtagagcaccaacaacgggctattgcataccatcaatgggcaggtctcctaatctagaagtgaa

SEQ ID NO: 222223 - DNA, 4211 bp, Zea Mays
gctacagacagggtatcgagcagaggaaggacacactaagacactaagtccatgtagaagtggaagcagtcattaatcgacgaggtagaccaatagaggtcagaggttcggattggtgggtggaggttggacatcagaggctgatggagcagaggttgggggcaacgtatcagtggtggtcatggagtcacagtaagagctgtgaatcggtggagcggaaggggcgggagtggctggatgaggcaggacttgcctctggattacagcttgtattggatatgttggtgactgtgggagaacctgagcttggttcaagccgcggacctgtgtcatggggcgtggcaggtttttgtggagtgactgttgctgagaagagaccaatgatgcaatctcgtgatgttgataaatatttgaacaaagctgacaacattaaccatgtgctcatgaactctggcgacatttctaaaattggtggtcactgcctgcatggtacacatggtttggggactcggctagattctgatgctcagagctcatcccctggagaaaatatgaacaacaaaatcagaaggcccatcgaaatatgtacctttgatgctcaaggtcggtgcaagaaaggaaagagttgcatctctcttcatgaaagggagggatttggttctgcaaagactggtctgctcgcaccagctggttctggaaatcatagaggttctgaaggaggttctcaagtacaacatatatctgacttgaaagtgcatcagttcaaggattcagagggtttgtcaaaagatgaaatgtgtcggaatcttatttatgcatttggcaaagataatcagatgtcggtacatcttgctggtaaacacagctctcccattcctggggtttcacaaaggatgcccgtcagcattggtcattcattggctcagaatccattagttcatgagaagaacaacaaacgtttcatgggacaccatattgatgtggctgctgaaaactatttggatgctggaggtacctatccaagattagatggaggtatttttcagtttgacatagacaaggaaagcagtgttagtgattcccatgtctcaagaacttacctttcagattatccatataaatcatttggcttgtctatttcatctgatcctctccagctcagtgagaagctgtcagcatatggtggagtgacaaatactattcctaacatacatcagaaagaacatcactcatgccatgcttcatacagctcacatagcttaacaggatccagaaatccttgctttgctacctctgaacatactttcggtagcccatctcttctagcaacttctcatctgggaatacagtcccatcatctgttcacatctgatattgagaaggctgatctccatagatgccttgatgttggaaagggctatggtacttctagttctggacccgcattgcttgtgagcagtaaacctgaaccttctatgacgccagttgggccccactctccaattaagaatgaggtctgggaaacatcagtgccttttgtaccttcttttagttttcctgatagcacaacagcttcagaaagtcaatatgatccatttgttgactatgttgaacctcctaaagttgggaatacaaataatctcaagccctccactatatcctgcaacattacaagtcagcatacagatcagtacgcagttactgataaatccttgaattgcaatgacaaattgaccaggaatataactgccaaaggatcaaatgaacctgcttactttattgctcctgatagaggatgcagctctagcctggatgatactatcaaggtgaaagcttgtgacagaaaaaaggatgcagttgattacaatgagaaaacaagggatttccgttttcatttggcagaacatataaaggagttggtcaaaccaatatggaaaaaaggtaatctgagtaaagatgctcataaactggtagtgagaaaatctgtcgagaaggttgtggactccattgagccaaatcaagtaccaactactgaagagttgattacgaagtacatagccacatgtggaccaaagatagaaaaacttgtgaaggcatatgttgataggcacagtacatgtcatccaaccatcaaatacagcagctctgagatgggagcttgagcttaatggtgatgacagcttgaaccttctgtcctaccaatctggttaaccttcatttgtaggcccaacaagttaatattgttcatacaaacatgtatgtccatgacttcttgaggcaagtagtcagcgaagttccagatattggtgcatctgatgttattgctgatgataagcttggcaaaggacgtatatctatcctgtagttgataaggttcttacatgtcaaaataatcttctacgaagtgttaataaatgctgaattgtcatcaggaaagctggagatggaagcgaggaggaattaaagaggacaataaacgcctgatgcagcggtagagcctaccgtctgtaaccggaaggtcccgggttcgagccccagcctctgcatattatgcgggtaacgcttggcgcttaaagatacccttccccagaccccgcacagtgcgggaagcctacgacactggaaaaccatacaggcaatgacaggttgtgcgaggggttgtgtacttgtgtgagaggctgccgcggacgtgtggaacttagcgggtgttgtcatagttcataaacaattcgtggagaaccaatctagcaagctagtagcctaaaagtggagatagccgatgaggtcttaagatgcaactgaagcaaaagaggctactacatcaaggagcagttcaaccactcatttgatggcatagtccatttgatgaggtcttagatgcaactgaacccactccaaggggtttgctcaggaacattgacttgaatttagatccaactgatgaagaagatgagattacagtgccaccccaagcccagtcgatccagcgactagttccgttgcagccactgcgggaccatctgttgcactttctgggtgcttgggaactgcctgacatgaacaatatggagatgggccctgtccagtttgctttgtaaaaaaaatacagattggagagaatgggtattatgacaatcaagactagctctgcccttatagctttcagagtggataagtaggatagcaggacagttgtaggttcatcttaactctttagagattctcatgtatcatgtgtatcatagccgccaaagctgcagatgcagcttataatgtgccagaggtttaaggttggctggctagttgactgtaacgttccgaagctagattcgctcaacacgtagtgctttggcatgtagtaccagttgtacttgtacactcctgtctccagttgctctccagtttaatgttaattatatgcttatgcttcattggatagttgaggaagatcttgctggatgcatgtatggcaaataaaaagcaagaaagagtttcagattacttatcacagctcattccatgacaggagtcaatattttcatatatgatagacctgcgaaaagattgcgagccttcagggataacgcgtcatcatactgggagatgatacctttatttcctgaaacatggttatccaagcacaaggaaaaagttccagcagtgattgcgactcgccagctcaaggtgactgcggaatccaagatgggatcgatgcttctacagctgcttgaagttgttccacaccgcccccaccttggccttgcacagcttctttccgctgccggcatccacctcgacagtaaaatgcatggtcctggcatcacgttctgcacatatattatacatgggatgcatcagtggtggctccaacgatatcaactaggtttatgcagagtgacatgtctttcggtcttgctgttgtgctccgtgaccgtgactgaagcacgcgagctcaatggcctcgaggtcgctctcacacccagtgggtgcgttttggacgtcgtccaccatcccacaggccgttctcgtctcggccatggctgctggagcctgtggagagggagaaaagctgtgcagagggagaaagaggaagctgcggcgagacgagacagacgacgacagacactcctgagtcctgcttgtagtagtagagcaccaacaacgggctattgcataccatcaatgggcaggtctcctaatctagaagtgaa

SEQ ID NO: 222224 - DNA, 2441 bp, Zea Mays
atggagcagaggttgggggcaacgtatcagtggtggtcatggagtcacagtaagagctgtgaatcggtggagcggaaggggcgggagtggctggatgaggcaggacttgcctctggattacagcttgtattggatatgttggtgactgtgggagaacctgagcttggttcaagccgcggacctgtgtcatggggcgtggcaggtttttgtggagtgactgttgctgagaagagaccaatgatgcaatctcgtgatgttgataaatatttgaacaaagctgacaacattaaccatgtgctcatgaactctggcgacatttctaaaattggtggtcactgcctgcatggtacacatggtttggggactcggctagattctgatgctcagagctcatcccctggagaaaatatgaacaacaaaatcagaaggcccatcgaaatatgtacctttgatgctcaaggtcggtgcaagaaaggaaagagttgcatctctcttcatgaaagggagggatttggttctgcaaagactggtctgctcgcaccagctggttctggaaatcatagaggtatgagcttcctaactagggcaatctgtgagcaacaacttgctataacagagccaacttcttattgctccctgctgtgcataggttctgaaggaggttctcaagtacaacatatatctgacttgaaagtgcatcagttcaaggattcagagggtttgtcaaaagatgaaatgtgtcggaatcttatttatgcatttggcaaagataatcagatgtcggtacatcttgctggtaaacacagctctcccattcctggggtttcacaaaggatgcccgtcagcattggtcattcattggctcagaatccattagttcatgagaagaacaacaaacgtttcatgggacaccatattgatgtggctgctgaaaactatttggatgctggaggtacctatccaagattagatggaggtatttttcagtttgacatagacaaggaaagcagtgttagtgattcccatgtctcaagaacttacctttcagattatccatataaatcatttggcttgtctatttcatctgatcctctccagctcagtgagaagctgtcagcatatggtggagtgacaaatactattcctaacatacatcagaaagaacatcactcatgccatgcttcatacagctcacatagcttaacaggatccagaaatccttgctttgctacctctgaacatactttcggtagcccatctcttctagcaacttctcatctgggaatacagtcccatcatctgttcacatctgatattgagaaggctgatctccatagatgccttgatgttggaaagggctatggtacttctagttctggacccgcattgcttgtgagcagtaaacctgaaccttctatgacgccagttgggccccactctccaattaagaatgaggtctgggaaacatcagtgccttttgtaccttcttttagttttcctgatagcacaacagcttcagaaagtcaatatgatccatttgttgactatgttgaacctcctaaagttgggaatacaaataatctcaagccctccactatatcctgcaacattacaagtcagcatacagatcagtacgcagttactgataaatccttgaattgcaatgacaaattgaccaggaatataactgccaaaggatcaaatgaacctgcttactttattgctcctgatagaggatgcagctctagcctggatgatactatcaaggtgaaagcttgtgacagaaaaaaggatgcagttgattacaatgagaaaacaagggatttccgttttcatttggcagaacatataaaggagttggtcaaaccaatatggaaaaaaggtaatctgagtaaagatgctcataaactggtagtgagaaaatctgtcgagaaggttgtggactccattgagccaaatcaagtaccaactactgaagagttgattacgaagtacatagccacatgtggaccaaagatagaaaaacttgtgaaggcatatgttgataggcacagtacatgtcatccaaccatcaaatacagcagctctgagatgggagcttgagcttaatggtgatgacagcttgaaccttctgtcctaccaatctggttaaccttcatttgtaggcccaacaagttaatattgttcatacaaacatgtatgtccatgacttcttgaggcaagtagtcagcgaagttccagatattggtgcatctgatgttattgctgatgataagcttggcaaaggacgtatatctatcctgtagttgataaggttcttacatgtcaaaataatcttctacgaagtgttaataaatgctgaattgtcatcaggaaagctggagatggaagcgaggaggaattaaagaggacaataaaccgttgtactcaacgttatcctg

SEQ ID NO: 222225 - DNA, 1140 bp, Zea Mays
atgtcgaacagagctgtgggacattgggcgagcaaattctcggtgtggcaaggtggctcagagccaggggaagagtgggtagcagtgcgcaggacgagagcaccatcggagaacggggccgtggggcttggggcgcgtggattctcggcgctggcatgcgactcagtgccgaggccgcggggaatgggggcgggggggggggagcaggagtggcagtcgtggcgggacgagcgggcggaagcacatccaaagagtgcgttaattagtactagtattactcatacggcgagccaaggatgtcgaggaccaaagtcggcatcagcgggggccgggaagggcgcgaatggtcagtcggtggtgcagcggctgcaatcggagctgttggcgctgttgatgggcgacgacccaggcgtgtcggcgttccctggggcgacaacatgctccactagttcgcaagtcaggtatgttgtgcactgcgcaagatcatgggtgtcgagcggttcgcgcgtgcaccggctggacgtgctctagcaccgccagagtgagaagctgcgacagctcgtggatcgaacaaggcctagaaggtgatcgccaccttaagcactatctgacgatgagatgcagaaaaaacagtgagaagtccatagaggaagaggattcgatggagggatcaagaaaaattaaacgcgaaccttcatcgccgctgcaaggtagctttatacaagcagaaggagaagggttctttggcggaggctatacatgccacggtttggaatttgtcaatggtcatacagagaatccattgatgagaagcctaaatcattgggccggagacagcagtgcgatgagggccaatcccttacaataattgctggtcgactaccaagcaagtcaagcacgcgtaggttgcagtgcagctcatacgtaagagagatttacatggtcgttggagttattttgaagtactatggagtggacagttcagagatgtatatatataaaaatttgtttccctaccgtaggatatgccaaatcacctcagctggcggttttcgctataaaatgttgcaacaagttggtactctaaccaccagttcaaagaataatctcgagcaagttaatcatgcatatggcgtgtga

SEQ ID NO: 222226 - DNA, 4741 bp, Zea Mays
ccaacaggggacacgagaacggctttcgaggctaggcatgtggtttggaggaataatctcacgtggtaccacgctttggaggggcacacgagatgcggtcgtgcgtgcagatgggtttcacatggcagcggtttcctggtctgggccagctcgatcaccgagttaagaagctgactgaagccacaagccactgaggcaccaaagaatacgcaaagctctctgcagacctgcagtctgagctacactcattcaaagtttcggctaacaaaaacatttggaggttgcacagaacaacacatcatttggtcagatcccaaggtttctactatcatgaaagctagaacagatgcgttttcttttttgcttttgtcatgcttatcaatttcttccttggcatctggaggctggaaactagtctgtacaagaacgaagcagttaatctattcttctctgataccagcgcttggggtacgagcaaggaagggacttcaagaaatacgggtgggatggaagttgccttggtatcaactgtattgaaggttttggggacgaagttagctcctcttgcactcaaagagttgagctctaaagcaggtgtggccaaagatcttcaggaactccaggacctagttgaggagatcaacaattggttgcaaacagttggtgataaagaccgatcatctaaatggctcaaaaaattgaaagaagttgcttatgatgctgaagatttagtccatgagttccacatcgaggctgaaaaacaagacagagaaattactggtggcaagaataccttggtcaaatacttcatcacaaaacctaaagcaactgtgactgaatttaagatagctcacaagatcaagaaaataaaaaacagatttgatgcaattgtgaaaggaaggagtgactatagcacaatagcaaatagcatgccagtggattatcctgttgagcatacaagaaagacaattggagaggtgccattgtatactattgtggatgagacatcaatatttggcagggatcaagcaaagaatcagataatatctaagctgatagagactgatagccaacaaagaataaagatagtttcagtaattgggctaggtggctctggtaaaactactctcgcgaaacaagtatttaatgatggtaacattataaagcattttgaagttatattgtgggttcatgtgtcaagagaatttgctgttgaaaagcttgtggcgaagttgtttgaagccattgctggtgacatgtctgaccacctcctattgcagcatgtgagcagaactatctcagacaagttagttggaaagaggttcctagctgtcttggatgacgtttggacagaggatcgtgttgagtgggagcgattcatggtacatttaaagtgcggtgcacctggaagtagtattttactcactactcgtagtagaaaagttgcagaagcagtggattctagttatgcatacgacctaccactcttgtctatggaagatagctggaaagtgttccaacaatgttttggaattgccatgaaagctctagaccctgaattcctacagtccgggatagagattgtggagaaatgcggaggtgtgccccttgcaattaaagttattgcaggcatcctccatggaatgaaaggaattgaagaatggcagtccatatgcaatagtaatttattagatgtccaggatgacgaacatagagtatttgcatgcttgtggttgagttttgttcatttaccggaccatctaaagccttgttttctacactgctctatatttccaagaggctatgtaatcaacaggtgtcatttgatttctcaatggatagctcatggcttcgtcccgacaaaccaagctcgacaagcagaagatgttggaattggctactttgattcccttcttaaagtggggttccttcaagaccatgatcgagaccaaatttggtccacaaggggtgaagtaacatgcaaaatgcatgacctggttcatgatctcgctagacaaattctacgggatgaatttgagtctgagatagaaacaaacaagcaaataaagagatgcagatacctatctttgacttcatgcactgggaagcttgataacaaattatgtggcaaggtccgtgcactctatgtttgtggccgtgcactcgaatttgacaagacaatgagcaagcagtgttgtgtccgtaccattatattgaagtatataactgctgactcattgcctctgtttgtgtcaaaatttgaatacctggggtatcttgaaatatccgatgttaactgtgaagcactaccagaagctctctcgcgttgttggaacttgcaggcccttcatatattaaattgctcaagacttgcagttgtacctgaaagtatcggcaagcttaagaagcttagaactctggaactgaatggtgtttctagtatcaagagtttaccacagtctattggcgattgtgataatcttcgaagattatacctagaaggttgtcatagattcgaagatataccaaattccttgggaaaattggaaaatttaaggatacttagtattgttcattgctttagttttgaaaaactttcgccatcagcatcatttgggaagcttttgaacttacaaactatcacctttaactgttgcttcaatctccgaaacctacctcagtgcatgacttctttgagtcatctagagatggtggatcttggatattgttacgagcttgttgaattgcctgaaggcatagggaatttaagaaaccttaaagttttgaatctgaagcaatgcacacaattgcgtggactaccagctggttgtgggcagctaactcgtttacaacagttgagcttgtttgttattggagacagtgccaaacacgcaaggatctctgagcttggtaatcttgataagttggatggtgagctgcagattaaaaacattagatatgtgaaagatccaagtgacacagacaaagttcgtttgaagaaaaagattggcatccggaaattgtcgttggattggtattcaagattggaggttcagcctgatgatgtggaagaagagttatcattaaatatggagaaggaattgcatttgctcgacagtcttgaaccaccatcaaaaattgagaagctgagaattcgtggctaccggggttcacaattgccacgttggatggcaaagcaaagtgactcttgtggtccagcggatgatacacacatagtaatgcaaagaaatccatctgaattctcccatctgactgaattagtactggacaacttaccaaacttggagcaccttggggaacttgtggaactgccactggtaaagatccttaagctcaaaagactgccaaagttggtagagctgcttacgaccacaacgggggaggaaggagtggaagtgctatgtcgtttccatcacgtttccactctagtaataattgattgccggaaacttgttgtgaagccgtactttcctccgtccttgcagagattgacactagaaggaaacaatatgcagttggtttcttcaggatgcttcttccatccacgtcatcatcatgcatctcatgctcatggtgacgagtcttcatcttcctcctattttgcggatgagacgggtactcacctcgagagacttgaacttcgtcggttgacaggatcatcatctggttgggaggtgctgcagcatctcactgggcttcataccctagaaatatacatgtgcacagaccttacacatttacctgagagcatccactgccccaccactctctgtagactgatgataagaagttgtgataatcttcgtgtgctgcctgactggcttgtggaactgaaatctctacagagtctggacatagactcatgtgatgctctccagcagcttcctgaacaaataggagaactctgctcactccagcacctccaaataatttctatgcctttcctgacttgccttcccgagagcatgcagcacctcacctcgcttcgaattctcaacttgtgtgaatgtaacgcgctgacccatcttccggagtggctaggcgaactctctgcgcttaaaaaactcttgatccagagctgccgtggccttacatctttgccccgctccatacaatgccttactgctctcgaggaattatatataagcggcaaccccaaactgcttcagatcagtgcatcatattctaaggaagacaaggatggccaggctccgacgacattcagatcacatggcttgacaggtcgacatacaaatccccgttccatgtagtatttctgcagggacaagagtcttctctcttgaactctacagctgcaaccgttccgatgttgcaggcctgacgaccagcattgcagtgaggcccaagagttcgatctggtccggaacatgctcatcgtcgcagtagaagaacgctacaaggatgctggtaaacgtctaagaaaacaccatgtaaatatggaggccttttttttgctgaagcgcatgaagcttcggcaaacatctaaagaacaccatgcaaatggctgtggtgtcctgcgattggtctacgcgatgtacatgtgcgcaagctgctttgaagagaatttaaccaccttgaattttaggtacccatacagttcgctcatgtattgatctggcgcaagcttcgatgaacattttttggtttcatgtggttgatatgttgcttgagccttgtcagcttgacgattttttggttt

SEQ ID NO: 222227 - DNA, 4725 bp, Zea Mays
ccaacaggggacacgagaacggctttcgaggctaggcatgtggtttggaggaataatctcacgtggtaccacgctttggaggggcacacgagatgcggtcgtgcgtgcagatgggtttcacatggcagcggtttcctggtctgggccagctcgatcaccgagttaagaagctgactgaagccacaagccactgaggcaccaaagaatacgcaaagctctctgcagacctgcagtctgagctacactcattcaaagtttcggctaacaaaaacatttggaggttgcacagaacaacacatcatttggtcagatcccaaggggaactctatttacaggaggctggaaactagtctgtacaagaacgaagcagttaatctattcttctctgataccagcgcttggaaacaagaataacataaagggtgttgtcccagggtacgagcaaggaagggacttcaagaaatacgggtgggatggaagttgccttggtatcaactgtattgaaggttttggggacgaagttagctcctcttgcactcaaagagttgagctctaaagcaggtgtggccaaagatcttcaggaactccaggacctagttgaggagatcaacaattggttgcaaacagttggtgataaagaccgatcatctaaatggctcaaaaaattgaaagaagttgcttatgatgctgaagatttagtccatgagttccacatcgaggctgaaaaacaagacagagaaattactggtggcaagaataccttggtcaaatacttcatcacaaaacctaaagcaactgtgactgaatttaagatagctcacaagatcaagaaaataaaaaacagatttgatgcaattgtgaaaggaaggagtgactatagcacaatagcaaatagcatgccagtggattatcctgttgagcatacaagaaagacaattggagaggtgccattgtatactattgtggatgagacatcaatatttggcagggatcaagcaaagaatcagataatatctaagctgatagagactgatagccaacaaagaataaagatagtttcagtaattgggctaggtggctctggtaaaactactctcgcgaaacaagtatttaatgatggtaacattataaagcattttgaagttatattgtgggttcatgtgtcaagagaatttgctgttgaaaagcttgtggcgaagttgtttgaagccattgctggtgacatgtctgaccacctcctattgcagcatgtgagcagaactatctcagacaagttagttggaaagaggttcctagctgtcttggatgacgtttggacagaggatcgtgttgagtgggagcgattcatggtacatttaaagtgcggtgcacctggaagtagtattttactcactactcgtagtagaaaagttgcagaagcagtggattctagttatgcatacgacctaccactcttgtctatggaagatagctggaaagtgttccaacaatgttttggaattgccatgaaagctctagaccctgaattcctacagtccgggatagagattgtggagaaatgcggaggtgtgccccttgcaattaaagttattgcaggcatcctccatggaatgaaaggaattgaagaatggcagtccatatgcaatagtaatttattagatgtccaggatgacgaacatagagtatttgcatgcttgtggttgagttttgttcatttaccggaccatctaaagccttgttttctacactgctctatatttccaagaggctatgtaatcaacaggtgtcatttgatttctcaatggatagctcatggcttcgtcccgacaaaccaagctcgacaagcagaagatgttggaattggctactttgattcccttcttaaagtggggttccttcaagaccatgatcgagaccaaatttggtccacaaggggtgaagtaacatgcaaaatgcatgacctggttcatgatctcgctagacaaattctacgggatgaatttgagtctgagatagaaacaaacaagcaaataaagagatgcagatacctatctttgacttcatgcactgggaagcttgataacaaattatgtggcaaggtccgtgcactctatgtttgtggccgtgcactcgaatttgacaagacaatgagcaagcagtgttgtgtccgtaccattatattgaagtatataactgctgactcattgcctctgtttgtgtcaaaatttgaatacctggggtatcttgaaatatccgatgttaactgtgaagcactaccagaagctctctcgcgttgttggaacttgcaggcccttcatatattaaattgctcaagacttgcagttgtacctgaaagtatcggcaagcttaagaagcttagaactctggaactgaatggtgtttctagtatcaagagtttaccacagtctattggcgattgtgataatcttcgaagattatacctagaaggttgtcatagattcgaagatataccaaattccttgggaaaattggaaaatttaaggatacttagtattgttcattgctttagttttgaaaaactttcgccatcagcatcatttgggaagcttttgaacttacaaactatcacctttaactgttgcttcaatctccgaaacctacctcagtgcatgacttctttgagtcatctagagatggtggatcttggatattgttacgagcttgttgaattgcctgaaggcatagggaatttaagaaaccttaaagttttgaatctgaagcaatgcacacaattgcgtggactaccagctggttgtgggcagctaactcgtttacaacagttgagcttgtttgttattggagacagtgccaaacacgcaaggatctctgagcttggtaatcttgataagttggatggtgagctgcagattaaaaacattagatatgtgaaagatccaagtgacacagacaaagttcgtttgaagaaaaagattggcatccggaaattgtcgttggattggtattcaagattggaggttcagcctgatgatgtggaagaagagttatcattaaatatggagaaggaattgcatttgctcgacagtcttgaaccaccatcaaaaattgagaagctgagaattcgtggctaccggggttcacaattgccacgttggatggcaaagcaaagtgactcttgtggtccagcggatgatacacacatagtaatgcaaagaaatccatctgaattctcccatctgactgaattagtactggacaacttaccaaacttggagcaccttggggaacttgtggaactgccactggtaaagatccttaagctcaaaagactgccaaagttggtagagctgcttacgaccacaacgggggaggaaggagtggaagtgctatgtcgtttccatcacgtttccactctagtaataattgattgccggaaacttgttgtgaagccgtactttcctccgtccttgcagagattgacactagaaggaaacaatatgcagttggtttcttcaggatgcttcttccatccacgtcatcatcatgcatctcatgctcatggtgacgagtcttcatcttcctcctattttgcggatgagacgggtactcacctcgagagacttgaacttcgtcggttgacaggatcatcatctggttgggaggtgctgcagcatctcactgggcttcataccctagaaatatacatgtgcacagaccttacacatttacctgagagcatccactgccccaccactctctgtagactgatgataagaagttgtgataatcttcgtgtgctgcctgactggcttgtggaactgaaatctctacagagtctggacatagactcatgtgatgctctccagcagcttcctgaacaaataggagaactctgctcactccagcacctccaaataatttctatgcctttcctgacttgccttcccgagagcatgcagcacctcacctcgcttcgaattctcaacttgtgtgaatgtaacgcgctgacccatcttccggagtggctaggcgaactctctgcgcttaaaaaactcttgatccagagctgccgtggccttacatctttgccccgctccatacaatgccttactgctctcgaggaattatatataagcggcaaccccaaactgcttcagatcagtgcatcatattctaaggaagacaaggatggccaggctccgacgacattcagatcacatggcttgacaggcctgacgaccagcattgcagtgaggcccaagagttcgatctggtccggaacatgctcatcgtcgcagtagaagaacgctacaaggatgctgctcaatacagaggccaacattccatgttgcggtcaaagaaaaagaacgcgatatagcaggcccaggccgttattatgtacatccacatgtgtgccaagttcaacttgttaggtaaacgtctaagaaaacaccatgtaaatatggaggccttttttttgctgaagcgcatgaagcttcggcaaacatctaaagaacaccatgcaaatggctgtggtgtcctgcgattggtctacgcgatgtacatgtgcgcaagctgctttgaagagaatttaaccaccttgaattttaggtacccatacagttcgctcatgtattgatctggcgcaagcttcgatgaacattttttggtttcatgtggttgatatgttgcttgagccttgtcagcttgacgattttttggttt

SEQ ID NO: 222228 - DNA, 4914 bp, Zea Mays
ccaacaggggacacgagaacggctttcgaggctaggcatgtggtttggaggaataatctcacgtggtaccacgctttggaggggcacacgagatgcggtcgtgcgtgcagatgggtttcacatggcagcggtttcctggtctgggccagctcgatcaccgagttaagaagctgactgaagccacaagccactgaggcaccaaagaatacgcaaagctctctgcagacctgcagtctgagctacactcattcaaagtttcggctaacaaaaacatttggaggttgcacagaacaacacatcatttggtcagatcccaaggtttctactatcatgaaagctagaacagatgcgttttcttttttgcttttgtcatgcttatcaatttcttccttggcatctggtattttctttgctggataaatttactttccctgcctcttcttaggggaactctatttacaggaggctggaaactagtctgtacaagaacgaagcagttaatctattcttctctgataccagcgcttggggtacgagcaaggaagggacttcaagaaatacgggtgggatggaagttgccttggtatcaactgtattgaaggttttggggacgaagttagctcctcttgcactcaaagagttgagctctaaagcaggtgtggccaaagatcttcaggaactccaggacctagttgaggagatcaacaattggttgcaaacagttggtgataaagaccgatcatctaaatggctcaaaaaattgaaagaagttgcttatgatgctgaagatttagtccatgagttccacatcgaggctgaaaaacaagacagagaaattactggtggcaagaataccttggtcaaatacttcatcacaaaacctaaagcaactgtgactgaatttaagatagctcacaagatcaagaaaataaaaaacagatttgatgcaattgtgaaaggaaggagtgactatagcacaatagcaaatagcatgccagtggattatcctgttgagcatacaagaaagacaattggagaggtgccattgtatactattgtggatgagacatcaatatttggcagggatcaagcaaagaatcagataatatctaagctgatagagactgatagccaacaaagaataaagatagtttcagtaattgggctaggtggctctggtaaaactactctcgcgaaacaagtatttaatgatggtaacattataaagcattttgaagttatattgtgggttcatgtgtcaagagaatttgctgttgaaaagcttgtggcgaagttgtttgaagccattgctggtgacatgtctgaccacctcctattgcagcatgtgagcagaactatctcagacaagttagttggaaagaggttcctagctgtcttggatgacgtttggacagaggatcgtgttgagtgggagcgattcatggtacatttaaagtgcggtgcacctggaagtagtattttactcactactcgtagtagaaaagttgcagaagcagtggattctagttatgcatacgacctaccactcttgtctatggaagatagctggaaagtgttccaacaatgttttggaattgccatgaaagctctagaccctgaattcctacagtccgggatagagattgtggagaaatgcggaggtgtgccccttgcaattaaagttattgcaggcatcctccatggaatgaaaggaattgaagaatggcagtccatatgcaatagtaatttattagatgtccaggatgacgaacatagagtatttgcatgcttgtggttgagttttgttcatttaccggaccatctaaagccttgttttctacactgctctatatttccaagaggctatgtaatcaacaggtgtcatttgatttctcaatggatagctcatggcttcgtcccgacaaaccaagctcgacaagcagaagatgttggaattggctactttgattcccttcttaaagtggggttccttcaagaccatgatcgagaccaaatttggtccacaaggggtgaagtaacatgcaaaatgcatgacctggttcatgatctcgctagacaaattctacgggatgaatttgagtctgagatagaaacaaacaagcaaataaagagatgcagatacctatctttgacttcatgcactgggaagcttgataacaaattatgtggcaaggtccgtgcactctatgtttgtggccgtgcactcgaatttgacaagacaatgagcaagcagtgttgtgtccgtaccattatattgaagtatataactgctgactcattgcctctgtttgtgtcaaaatttgaatacctggggtatcttgaaatatccgatgttaactgtgaagcactaccagaagctctctcgcgttgttggaacttgcaggcccttcatatattaaattgctcaagacttgcagttgtacctgaaagtatcggcaagcttaagaagcttagaactctggaactgaatggtgtttctagtatcaagagtttaccacagtctattggcgattgtgataatcttcgaagattatacctagaaggttgtcatagattcgaagatataccaaattccttgggaaaattggaaaatttaaggatacttagtattgttcattgctttagttttgaaaaactttcgccatcagcatcatttgggaagcttttgaacttacaaactatcacctttaactgttgcttcaatctccgaaacctacctcagtgcatgacttctttgagtcatctagagatggtggatcttggatattgttacgagcttgttgaattgcctgaaggcatagggaatttaagaaaccttaaagttttgaatctgaagcaatgcacacaattgcgtggactaccagctggttgtgggcagctaactcgtttacaacagttgagcttgtttgttattggagacagtgccaaacacgcaaggatctctgagcttggtaatcttgataagttggatggtgagctgcagattaaaaacattagatatgtgaaagatccaagtgacacagacaaagttcgtttgaagaaaaagattggcatccggaaattgtcgttggattggtattcaagattggaggttcagcctgatgatgtggaagaagagttatcattaaatatggagaaggaattgcatttgctcgacagtcttgaaccaccatcaaaaattgagaagctgagaattcgtggctaccggggttcacaattgccacgttggatggcaaagcaaagtgactcttgtggtccagcggatgatacacacatagtaatgcaaagaaatccatctgaattctcccatctgactgaattagtactggacaacttaccaaacttggagcaccttggggaacttgtggaactgccactggtaaagatccttaagctcaaaagactgccaaagttggtagagctgcttacgaccacaacgggggaggaaggagtggaagtgctatgtcgtttccatcacgtttccactctagtaataattgattgccggaaacttgttgtgaagccgtactttcctccgtccttgcagagattgacactagaaggaaacaatatgcagttggtttcttcaggatgcttcttccatccacgtcatcatcatgcatctcatgctcatggtgacgagtcttcatcttcctcctattttgcggatgagacgggtactcacctcgagagacttgaacttcgtcggttgacaggatcatcatctggttgggaggtgctgcagcatctcactgggcttcataccctagaaatatacatgtgcacagaccttacacatttacctgagagcatccactgccccaccactctctgtagactgatgataagaagttgtgataatcttcgtgtgctgcctgactggcttgtggaactgaaatctctacagagtctggacatagactcatgtgatgctctccagcagcttcctgaacaaataggagaactctgctcactccagcacctccaaataatttctatgcctttcctgacttgccttcccgagagcatgcagcacctcacctcgcttcgaattctcaacttgtgtgaatgtaacgcgctgacccatcttccggagtggctaggcgaactctctgcgcttaaaaaactcttgatccagagctgccgtggccttacatctttgccccgctccatacaatgccttactgctctcgaggaattatatataagcggcaaccccaaactgcttcagatcagtgcatcatattctaaggaagacaaggatggccaggctccgacgacattcagatcacatggcttgacaggtcgacatacaaatccccgttccatgtagtatttctgcagggacaagagtcttctctcttgaactctacagctgcaaccgttccgatgttgcaggcctgacgaccagcattgcagtgaggcccaagagttcgatctggtccggaacatgctcatcgtcgcagtagaagaacgctacaaggatgctgctcaatacagaggccaacattccatgttgcggtcaaagaaaaagaacgcgatatagcaggcccaggccgttattatgtacatccacatgtgtgccaagttcaacttgttaggtaaacgtctaagaaaacaccatgtaaatatggaggccttttttttgctgaagcgcatgaagcttcggcaaacatctaaagaacaccatgcaaatggctgtggtgtcctgcgattggtctacgcgatgtacatgtgcgcaagctgctttgaagagaatttaaccaccttgaattttaggtacccatacagttcgctcatgtattgatctggcgcaagcttcgatgaacattttttggtttcatgtggttgatatgttgcttgagccttgtcagcttgacgattttttggttt

SEQ ID NO: 222229 - DNA, 4820 bp, Zea Mays
ccttcctaggcaccactcgccggagcgcatcccttcccagccactgatggccctgacccgccagcgcgcttccctccccaccgttgacggccccgacccgccggtggactgcgctcctcatcgaccagcgtggccatattttgcatttgttcctgtttcagcttgtgagcaactgatactactgtcccggcccatcgttactggaccaagaactttgagatgtgaatcaatcatttttggctctttcatgcaccacatatttcagcagcacagaaagtttatgggtgaaaatggtcatttggggaactctatttacaggaggctggaaactagtctgtacaagaacgaagcatataataccctgtgtttcctctcactcatgctaatttcctggtgatgttagaaacaagaataacataaagggtgttgtcccagggtacgagcaaggaagggacttcaagaaatacgggtgggatggaagttgccttggtatcaactgtattgaaggttttggggacgaagttagctcctcttgcactcaaagagttgagctctaaagcaggtgtggccaaagatcttcaggaactccaggacctagttgaggagatcaacaattggttgcaaacagttggtgataaagaccgatcatctaaatggctcaaaaaattgaaagaagttgcttatgatgctgaagatttagtccatgagttccacatcgaggctgaaaaacaagacagagaaattactggtggcaagaataccttggtcaaatacttcatcacaaaacctaaagcaactgtgactgaatttaagatagctcacaagatcaagaaaataaaaaacagatttgatgcaattgtgaaaggaaggagtgactatagcacaatagcaaatagcatgccagtggattatcctgttgagcatacaagaaagacaattggagaggtgccattgtatactattgtggatgagacatcaatatttggcagggatcaagcaaagaatcagataatatctaagctgatagagactgatagccaacaaagaataaagatagtttcagtaattgggctaggtggctctggtaaaactactctcgcgaaacaagtatttaatgatggtaacattataaagcattttgaagttatattgtgggttcatgtgtcaagagaatttgctgttgaaaagcttgtggcgaagttgtttgaagccattgctggtgacatgtctgaccacctcctattgcagcatgtgagcagaactatctcagacaagttagttggaaagaggttcctagctgtcttggatgacgtttggacagaggatcgtgttgagtgggagcgattcatggtacatttaaagtgcggtgcacctggaagtagtattttactcactactcgtagtagaaaagttgcagaagcagtggattctagttatgcatacgacctaccactcttgtctatggaagatagctggaaagtgttccaacaatgttttggaattgccatgaaagctctagaccctgaattcctacagtccgggatagagattgtggagaaatgcggaggtgtgccccttgcaattaaagttattgcaggcatcctccatggaatgaaaggaattgaagaatggcagtccatatgcaatagtaatttattagatgtccaggatgacgaacatagagtatttgcatgcttgtggttgagttttgttcatttaccggaccatctaaagccttgttttctacactgctctatatttccaagaggctatgtaatcaacaggtgtcatttgatttctcaatggatagctcatggcttcgtcccgacaaaccaagctcgacaagcagaagatgttggaattggctactttgattcccttcttaaagtggggttccttcaagaccatgatcgagaccaaatttggtccacaaggggtgaagtaacatgcaaaatgcatgacctggttcatgatctcgctagacaaattctacgggatgaatttgagtctgagatagaaacaaacaagcaaataaagagatgcagatacctatctttgacttcatgcactgggaagcttgataacaaattatgtggcaaggtccgtgcactctatgtttgtggccgtgcactcgaatttgacaagacaatgagcaagcagtgttgtgtccgtaccattatattgaagtatataactgctgactcattgcctctgtttgtgtcaaaatttgaatacctggggtatcttgaaatatccgatgttaactgtgaagcactaccagaagctctctcgcgttgttggaacttgcaggcccttcatatattaaattgctcaagacttgcagttgtacctgaaagtatcggcaagcttaagaagcttagaactctggaactgaatggtgtttctagtatcaagagtttaccacagtctattggcgattgtgataatcttcgaagattatacctagaaggttgtcatagattcgaagatataccaaattccttgggaaaattggaaaatttaaggatacttagtattgttcattgctttagttttgaaaaactttcgccatcagcatcatttgggaagcttttgaacttacaaactatcacctttaactgttgcttcaatctccgaaacctacctcagtgcatgacttctttgagtcatctagagatggtggatcttggatattgttacgagcttgttgaattgcctgaaggcatagggaatttaagaaaccttaaagttttgaatctgaagcaatgcacacaattgcgtggactaccagctggttgtgggcagctaactcgtttacaacagttgagcttgtttgttattggagacagtgccaaacacgcaaggatctctgagcttggtaatcttgataagttggatggtgagctgcagattaaaaacattagatatgtgaaagatccaagtgacacagacaaagttcgtttgaagaaaaagattggcatccggaaattgtcgttggattggtattcaagattggaggttcagcctgatgatgtggaagaagagttatcattaaatatggagaaggaattgcatttgctcgacagtcttgaaccaccatcaaaaattgagaagctgagaattcgtggctaccggggttcacaattgccacgttggatggcaaagcaaagtgactcttgtggtccagcggatgatacacacatagtaatgcaaagaaatccatctgaattctcccatctgactgaattagtactggacaacttaccaaacttggagcaccttggggaacttgtggaactgccactggtaaagatccttaagctcaaaagactgccaaagttggtagagctgcttacgaccacaacgggggaggaaggagtggaagtgctatgtcgtttccatcacgtttccactctagtaataattgattgccggaaacttgttgtgaagccgtactttcctccgtccttgcagagattgacactagaaggaaacaatatgcagttggtttcttcaggatgcttcttccatccacgtcatcatcatgcatctcatgctcatggtgacgagtcttcatcttcctcctattttgcggatgagacgggtactcacctcgagagacttgaacttcgtcggttgacaggatcatcatctggttgggaggtgctgcagcatctcactgggcttcataccctagaaatatacatgtgcacagaccttacacatttacctgagagcatccactgccccaccactctctgtagactgatgataagaagttgtgataatcttcgtgtgctgcctgactggcttgtggaactgaaatctctacagagtctggacatagactcatgtgatgctctccagcagcttcctgaacaaataggagaactctgctcactccagcacctccaaataatttctatgcctttcctgacttgccttcccgagagcatgcagcacctcacctcgcttcgaattctcaacttgtgtgaatgtaacgcgctgacccatcttccggagtggctaggcgaactctctgcgcttaaaaaactcttgatccagagctgccgtggccttacatctttgccccgctccatacaatgccttactgctctcgaggaattatatataagcggcaaccccaaactgcttcagatcagtgcatcatattctaaggaagacaaggatggccaggctccgacgacattcagatcacatggcttgacaggtcgacatacaaatccccgttccatgtagtatttctgcagggacaagagtcttctctcttgaactctacagctgcaaccgttccgatgttgcaggcctgacgaccagcattgcagtgaggcccaagagttcgatctggtccggaacatgctcatcgtcgcagtagaagaacgctacaaggatgctgctcaatacagaggccaacattccatgttgcggtcaaagaaaaagaacgcgatatagcaggcccaggccgttattatgtacatccacatgtgtgccaagttcaacttgttaggtaaacgtctaagaaaacaccatgtaaatatggaggccttttttttgctgaagcgcatgaagcttcggcaaacatctaaagaacaccatgcaaatggctgtggtgtcctgcgattggtctacgcgatgtacatgtgcgcaagctgctttgaagagaatttaaccaccttgaattttaggtacccatacagttcgctcatgtattgatctggcgcaagcttcgatgaacattttttggtttcatgtggttgatatgttgcttgagccttgtcagcttgacgattttttggttt

SEQ ID NO: 222230 - DNA, 4665 bp, Zea Mays
tttcagcttgcgtttctcctgctccctatccgacgtagtgaatcccttcccaggcaccactcgccgacggaacgcctcccttcctaggcaccactcgccggagcgcatcccttcccagccactgatggccctgacccgccagcgcgcttccctccccaccgttgacggccccgacccgccggtggactgcgctcctcatcgaccagcgtggccatattttgcatttgttcctgtttcagcttgtgagcaactgatactactgtcccggcccatcgttactggaccaagaactttgagatgtgtataataccctgtgtttcctctcactcatgctaatttcctggtgatgttagaaacaagaataacataaagggtgttgtcccagggtacgagcaaggaagggacttcaagaaatacgggtgggatggaagttgccttggtatcaactgtattgaaggttttggggacgaagttagctcctcttgcactcaaagagttgagctctaaagcaggtgtggccaaagatcttcaggaactccaggacctagttgaggagatcaacaattggttgcaaacagttggtgataaagaccgatcatctaaatggctcaaaaaattgaaagaagttgcttatgatgctgaagatttagtccatgagttccacatcgaggctgaaaaacaagacagagaaattactggtggcaagaataccttggtcaaatacttcatcacaaaacctaaagcaactgtgactgaatttaagatagctcacaagatcaagaaaataaaaaacagatttgatgcaattgtgaaaggaaggagtgactatagcacaatagcaaatagcatgccagtggattatcctgttgagcatacaagaaagacaattggagaggtgccattgtatactattgtggatgagacatcaatatttggcagggatcaagcaaagaatcagataatatctaagctgatagagactgatagccaacaaagaataaagatagtttcagtaattgggctaggtggctctggtaaaactactctcgcgaaacaagtatttaatgatggtaacattataaagcattttgaagttatattgtgggttcatgtgtcaagagaatttgctgttgaaaagcttgtggcgaagttgtttgaagccattgctggtgacatgtctgaccacctcctattgcagcatgtgagcagaactatctcagacaagttagttggaaagaggttcctagctgtcttggatgacgtttggacagaggatcgtgttgagtgggagcgattcatggtacatttaaagtgcggtgcacctggaagtagtattttactcactactcgtagtagaaaagttgcagaagcagtggattctagttatgcatacgacctaccactcttgtctatggaagatagctggaaagtgttccaacaatgttttggaattgccatgaaagctctagaccctgaattcctacagtccgggatagagattgtggagaaatgcggaggtgtgccccttgcaattaaagttattgcaggcatcctccatggaatgaaaggaattgaagaatggcagtccatatgcaatagtaatttattagatgtccaggatgacgaacatagagtatttgcatgcttgtggttgagttttgttcatttaccggaccatctaaagccttgttttctacactgctctatatttccaagaggctatgtaatcaacaggtgtcatttgatttctcaatggatagctcatggcttcgtcccgacaaaccaagctcgacaagcagaagatgttggaattggctactttgattcccttcttaaagtggggttccttcaagaccatgatcgagaccaaatttggtccacaaggggtgaagtaacatgcaaaatgcatgacctggttcatgatctcgctagacaaattctacgggatgaatttgagtctgagatagaaacaaacaagcaaataaagagatgcagatacctatctttgacttcatgcactgggaagcttgataacaaattatgtggcaaggtccgtgcactctatgtttgtggccgtgcactcgaatttgacaagacaatgagcaagcagtgttgtgtccgtaccattatattgaagtatataactgctgactcattgcctctgtttgtgtcaaaatttgaatacctggggtatcttgaaatatccgatgttaactgtgaagcactaccagaagctctctcgcgttgttggaacttgcaggcccttcatatattaaattgctcaagacttgcagttgtacctgaaagtatcggcaagcttaagaagcttagaactctggaactgaatggtgtttctagtatcaagagtttaccacagtctattggcgattgtgataatcttcgaagattatacctagaaggttgtcatagattcgaagatataccaaattccttgggaaaattggaaaatttaaggatacttagtattgttcattgctttagttttgaaaaactttcgccatcagcatcatttgggaagcttttgaacttacaaactatcacctttaactgttgcttcaatctccgaaacctacctcagtgcatgacttctttgagtcatctagagatggtggatcttggatattgttacgagcttgttgaattgcctgaaggcatagggaatttaagaaaccttaaagttttgaatctgaagcaatgcacacaattgcgtggactaccagctggttgtgggcagctaactcgtttacaacagttgagcttgtttgttattggagacagtgccaaacacgcaaggatctctgagcttggtaatcttgataagttggatggtgagctgcagattaaaaacattagatatgtgaaagatccaagtgacacagacaaagttcgtttgaagaaaaagattggcatccggaaattgtcgttggattggtattcaagattggaggttcagcctgatgatgtggaagaagagttatcattaaatatggagaaggaattgcatttgctcgacagtcttgaaccaccatcaaaaattgagaagctgagaattcgtggctaccggggttcacaattgccacgttggatggcaaagcaaagtgactcttgtggtccagcggatgatacacacatagtaatgcaaagaaatccatctgaattctcccatctgactgaattagtactggacaacttaccaaacttggagcaccttggggaacttgtggaactgccactggtaaagatccttaagctcaaaagactgccaaagttggtagagctgcttacgaccacaacgggggaggaaggagtggaagtgctatgtcgtttccatcacgtttccactctagtaataattgattgccggaaacttgttgtgaagccgtactttcctccgtccttgcagagattgacactagaaggaaacaatatgcagttggtttcttcaggatgcttcttccatccacgtcatcatcatgcatctcatgctcatggtgacgagtcttcatcttcctcctattttgcggatgagacgggtactcacctcgagagacttgaacttcgtcggttgacaggatcatcatctggttgggaggtgctgcagcatctcactgggcttcataccctagaaatatacatgtgcacagaccttacacatttacctgagagcatccactgccccaccactctctgtagactgatgataagaagttgtgataatcttcgtgtgctgcctgactggcttgtggaactgaaatctctacagagtctggacatagactcatgtgatgctctccagcagcttcctgaacaaataggagaactctgctcactccagcacctccaaataatttctatgcctttcctgacttgccttcccgagagcatgcagcacctcacctcgcttcgaattctcaacttgtgtgaatgtaacgcgctgacccatcttccggagtggctaggcgaactctctgcgcttaaaaaactcttgatccagagctgccgtggccttacatctttgccccgctccatacaatgccttactgctctcgaggaattatatataagcggcaaccccaaactgcttcagatcagtgcatcatattctaaggaagacaaggatggccagctgcaaccgttccgatgttgcaggcctgacgaccagcattgcagtgaggcccaagagttcgatctggtccggaacatgctcatcgtcgcagtagaagaacgctacaaggatgctgctcaatacagaggccaacattccatgttgcggtcaaagaaaaagaacgcgatatagcaggcccaggccgttattatgtacatccacatgtgtgccaagttcaacttgttaggtaaacgtctaagaaaacaccatgtaaatatggaggccttttttttgctgaagcgcatgaagcttcggcaaacatctaaagaacaccatgcaaatggctgtggtgtcctgcgattggtctacgcgatgtacatgtgcgcaagctgctttgaagagaatttaaccaccttgaattttaggtacccatacagttcgctcatgtattgatctggcgcaagcttcgatgaacattttttggtttcatgtggttgatatgttgcttgagccttgtcagcttgacgattttttggttt

SEQ ID NO: 222231 - DNA, 4758 bp, Zea Mays
gatttttcagcttgcgtttctcctgctccctatccgacgtagtgaatcccttcccaggcaccactcgccgacggaacgcctcccttcctaggcaccactcgccggagcgcatcccttcccagccactgatggccctgacccgccagcgcgcttccctccccaccgttgacggccccgacccgccggtggactgcgctcctcatcgaccagcgtggccatattttgcatttgttcctgtttcagcttgtgagcaactgatactactgtcccggcccatcgttactggaccaagaactttgagatgtgaatcaatcatttttggctctttcatgcaccacatatttcagcagcacagaaagtttatgggtgaaaatggtcatttggggaactctatttacaggaggctggaaactagtctgtacaagaacgaagcagttaatctattcttctctgataccagcgcttggggtacgagcaaggaagggacttcaagaaatacgggtgggatggaagttgccttggtatcaactgtattgaaggttttggggacgaagttagctcctcttgcactcaaagagttgagctctaaagcaggtgtggccaaagatcttcaggaactccaggacctagttgaggagatcaacaattggttgcaaacagttggtgataaagaccgatcatctaaatggctcaaaaaattgaaagaagttgcttatgatgctgaagatttagtccatgagttccacatcgaggctgaaaaacaagacagagaaattactggtggcaagaataccttggtcaaatacttcatcacaaaacctaaagcaactgtgactgaatttaagatagctcacaagatcaagaaaataaaaaacagatttgatgcaattgtgaaaggaaggagtgactatagcacaatagcaaatagcatgccagtggattatcctgttgagcatacaagaaagacaattggagaggtgccattgtatactattgtggatgagacatcaatatttggcagggatcaagcaaagaatcagataatatctaagctgatagagactgatagccaacaaagaataaagatagtttcagtaattgggctaggtggctctggtaaaactactctcgcgaaacaagtatttaatgatggtaacattataaagcattttgaagttatattgtgggttcatgtgtcaagagaatttgctgttgaaaagcttgtggcgaagttgtttgaagccattgctggtgacatgtctgaccacctcctattgcagcatgtgagcagaactatctcagacaagttagttggaaagaggttcctagctgtcttggatgacgtttggacagaggatcgtgttgagtgggagcgattcatggtacatttaaagtgcggtgcacctggaagtagtattttactcactactcgtagtagaaaagttgcagaagcagtggattctagttatgcatacgacctaccactcttgtctatggaagatagctggaaagtgttccaacaatgttttggaattgccatgaaagctctagaccctgaattcctacagtccgggatagagattgtggagaaatgcggaggtgtgccccttgcaattaaagttattgcaggcatcctccatggaatgaaaggaattgaagaatggcagtccatatgcaatagtaatttattagatgtccaggatgacgaacatagagtatttgcatgcttgtggttgagttttgttcatttaccggaccatctaaagccttgttttctacactgctctatatttccaagaggctatgtaatcaacaggtgtcatttgatttctcaatggatagctcatggcttcgtcccgacaaaccaagctcgacaagcagaagatgttggaattggctactttgattcccttcttaaagtggggttccttcaagaccatgatcgagaccaaatttggtccacaaggggtgaagtaacatgcaaaatgcatgacctggttcatgatctcgctagacaaattctacgggatgaatttgagtctgagatagaaacaaacaagcaaataaagagatgcagatacctatctttgacttcatgcactgggaagcttgataacaaattatgtggcaaggtccgtgcactctatgtttgtggccgtgcactcgaatttgacaagacaatgagcaagcagtgttgtgtccgtaccattatattgaagtatataactgctgactcattgcctctgtttgtgtcaaaatttgaatacctggggtatcttgaaatatccgatgttaactgtgaagcactaccagaagctctctcgcgttgttggaacttgcaggcccttcatatattaaattgctcaagacttgcagttgtacctgaaagtatcggcaagcttaagaagcttagaactctggaactgaatggtgtttctagtatcaagagtttaccacagtctattggcgattgtgataatcttcgaagattatacctagaaggttgtcatagattcgaagatataccaaattccttgggaaaattggaaaatttaaggatacttagtattgttcattgctttagttttgaaaaactttcgccatcagcatcatttgggaagcttttgaacttacaaactatcacctttaactgttgcttcaatctccgaaacctacctcagtgcatgacttctttgagtcatctagagatggtggatcttggatattgttacgagcttgttgaattgcctgaaggcatagggaatttaagaaaccttaaagttttgaatctgaagcaatgcacacaattgcgtggactaccagctggttgtgggcagctaactcgtttacaacagttgagcttgtttgttattggagacagtgccaaacacgcaaggatctctgagcttggtaatcttgataagttggatggtgagctgcagattaaaaacattagatatgtgaaagatccaagtgacacagacaaagttcgtttgaagaaaaagattggcatccggaaattgtcgttggattggtattcaagattggaggttcagcctgatgatgtggaagaagagttatcattaaatatggagaaggaattgcatttgctcgacagtcttgaaccaccatcaaaaattgagaagctgagaattcgtggctaccggggttcacaattgccacgttggatggcaaagcaaagtgactcttgtggtccagcggatgatacacacatagtaatgcaaagaaatccatctgaattctcccatctgactgaattagtactggacaacttaccaaacttggagcaccttggggaacttgtggaactgccactggtaaagatccttaagctcaaaagactgccaaagttggtagagctgcttacgaccacaacgggggaggaaggagtggaagtgctatgtcgtttccatcacgtttccactctagtaataattgattgccggaaacttgttgtgaagccgtactttcctccgtccttgcagagattgacactagaaggaaacaatatgcagttggtttcttcaggatgcttcttccatccacgtcatcatcatgcatctcatgctcatggtgacgagtcttcatcttcctcctattttgcggatgagacgggtactcacctcgagagacttgaacttcgtcggttgacaggatcatcatctggttgggaggtgctgcagcatctcactgggcttcataccctagaaatatacatgtgcacagaccttacacatttacctgagagcatccactgccccaccactctctgtagactgatgataagaagttgtgataatcttcgtgtgctgcctgactggcttgtggaactgaaatctctacagagtctggacatagactcatgtgatgctctccagcagcttcctgaacaaataggagaactctgctcactccagcacctccaaataatttctatgcctttcctgacttgccttcccgagagcatgcagcacctcacctcgcttcgaattctcaacttgtgtgaatgtaacgcgctgacccatcttccggagtggctaggcgaactctctgcgcttaaaaaactcttgatccagagctgccgtggccttacatctttgccccgctccatacaatgccttactgctctcgaggaattatatataagcggcaaccccaaactgcttcagatcagtgcatcatattctaaggaagacaaggatggccaggctccgacgacattcagatcacatggcttgacaggcctgacgaccagcattgcagtgaggcccaagagttcgatctggtccggaacatgctcatcgtcgcagtagaagaacgctacaaggatgctgctcaatacagaggccaacattccatgttgcggtcaaagaaaaagaacgcgatatagcaggcccaggccgttattatgtacatccacatgtgtgccaagttcaacttgttaggtaaacgtctaagaaaacaccatgtaaatatggaggccttttttttgctgaagcgcatgaagcttcggcaaacatctaaagaacaccatgcaaatggctgtggtgtcctgcgattggtctacgcgatgtacatgtgcgcaagctgctttgaagagaatttaaccaccttgaattttaggtacccatacagttcgctcatgtattgatctggcgcaagcttcgatgaacattttttggtttcatgtggttgatatgttgcttgagccttgtcagcttgacgattttttggttt

SEQ ID NO: 222232 - DNA, 1662 bp, Zea Mays
ctggccgctgtccgtcagctctcgcgctaccggctgcgggataaggcaagcttgtcgctcgccttggtggtgtgcttccagttccagccaccagcgctagcttcctctgcgttgcacgtcggaaatggattcctctagcagaggcatccgcttcctcgtccaccgccgcgcgctgctgctgctgctgctcgtcgcgtcgtcgtccctcgtcggcacatcgcgtggcagggaggcgcagccgctgcccgcggcggcggccacggccctcggcagcaggcggtcgccggagcggcacggcctggcgctggacttctacgccaggacgtgccccgctgtcgaccagatcgtcgccaacgtcaccgccgcccagtacagggacttccccgccgccggacccgccgtgctccgcctcttccaccacgactgcttcgtggaagggtgtgacgcgtccattttgatcgcgccgacggccgacgcggccgcgcccgcgcgcccgccgccacccagggtggagcgcgacatggaggagaacaggaacctgccgcaggaggcgttcgacacggtggagctcgccaaggctgccgtggagagcaagtgccccgggatcgtctcctgcgccgacgtcctcgccctcgccgcccgagactacgtccagctggtacgtgggtgggccgtactacgcggtgaagaagggccggaaggacagcaaggtgtccctggcggggaaggtccgcggcagcctgccgcgggccaactcgacggtggacgagctcctgcgcgtgttcgcgggcaagggcctgggcgcggcggacctggtggcgctctccggcgcgcacaccgtcgggttcgcgcactgcgtccacgtgctgggccgcatctacgacttccgcggcacgcggcggccggacccggtcatggacgcccgcctcgtgaaggcgctccgcatgtcgtgcccgtcgtcgggcggcagcgcccgcgtcgtggtgcccttcgacgtcagcacgcccttccagttcgaccacgcctactacgccaacctgcaggccaggctgggcctgctggcctccgaccaggcgctgttcctggacgcgcgcaccaggccgctcgtgcaggacctcgccgccaacaagacccgcttcttccaggcgttcgtggccagcatggaccggatgggctccatccggatcaagaaggggaggaaaggagaggtcaggaaagtctgtagccagcacctgttttcagcctgatctgcgtctgcattcagcagcatgcgtccgtacgtcgtcgtcggtgtcagctcatcagcgtgccagcaccagcatacacacgggactagctcgttcgtggttactacgtttggggcctcgcgttgcgtgattagagctatctttgatgcatgtgacggcagtttagtttagagaggagtagcttggccattggttttagggtcgcgtgtgtttgtgcaagaaaatgtgtaattgtgtatgcatgcaactatgcaagtacagtgttctgttgtgtgttttttatttaggcgtgcctaggaatttatacgagcatgccggctatgctagtttgtctgtgtgacattccatctgtttgattatattgaaaaactgcatgatgcagagcacaataggcacgtagcggcctaggctatcc

SEQ ID NO: 222233 - DNA, 2118 bp, Zea Mays
ggagtggacagtgacgggtgacgactgtgcctctgaatggatcctatcctacacaagtcatgggggccgccgccagctcacacacactgccgacgctgccgtgccactgccatcctcgagcacaagggaccgaccagacccgatccacagctcatcacacacacacacagtggcgagctcgtcaattgcaggcaagacagcaagcgcatttacacagcacgctgaaagccgggacgcagagcagcttttgcgccttgtcccctcctgctcgtcgcttccctcactctcacagccacgccacgccacgagagaagaatgccgccgacgctgggcctgctcctcgcggcggcggcggcggtcctgctgctgctgctgccgccgccaccatcggcgggggcgcaggagacgtgctggtcggggccggcgccgcggcgcggggcgtggatgtccgtggccagcttcggggcgcgcggggacgggcagacgctcaacacgggcgcgttcgcgcgcgccgtggcgcgcatcgcgcgtcgccggggcgcgcggggcggcacgctgctgtacgtgccgcccggggtgtggctcacgggccccttcaacctcacctcccacatgacgctcttcctcgcccgcggcgccatcgtccgcgccacccaggacacgtcgagctggccgctcatcgacccgctgccgtcgtacgggagagggcgcgagctgcctggcgggagatacatgagcttgatccacggccacggtctgcaggacgtcttcatcacaggtgagaacggcaccatcgacggccaaggcggcgtgtggtgggacatgtggaagaagcgcacgctgcccttcacgaggccgcacctgctggagctcatgtactccaccgacgtcgtcgtctccaacctcgtcttccaggactcgccgttctggaacatccacccggtttactgcagcaacgtagtgatagcaaacctgactgtgttggcgccgcacgactcccccaacaccgacgggatcgatctagattcaagcagcaacgtgtgcgtcgaggactgctacatctccgccggcgacgacctgatctccatcaagagcgggtgggacgagtacggcgtggccttcggccgcccaagctccggcatcacggtccggaggataaccgggtcgggcccgttcgccggcttcgcggtcgggagcgagacctcgggcggcgtggaggacgtcgtggccgagcacctgagcttctccggcgtgggcgtcggggttcacgtgaagacaaactcgggcaggggcggcttcatccggaacgtcaccgtctcccaggtgaccctggacggcgcccgctacggcctgaggatcgccggcgacgttgggggccaccccggcgcgtcctacaacgcgagcctgctccccgtcatcgacggcgtggcggtcaggaacgtctggggccggaacgtccggcaggccgggctcatacggggcatcagggactcggtcttcagtaacatttgcctctccaacgtgaagctctatggcattggcagcgactccatcgggccgtggagatgccgagccgtcagtggcagcgcactcgacgtgcaaccgtcgccatgtgcggagctggctagtacgtccgggacaggtttctgtacctgaatcagtttttccgcctcctatagcagcaataaagacgtcagcatttctccattttgttcatcacctacagggccctttgtttctttggcaaactcttctgcgattcagctgtcactgttgaattctgctgttggcagaggataatctatttttaccagcagccattgcaagagaattatttttacgtccgtgaaatggtgagaccgatcagcattgcacatcctggtgttggtgtaaccagatcccccactgccgtgtgggcgcgggacactgccggccccacacgcagtgaccggcactcacgggtaccatggacttgtttggaagcaaagagaataaaaaagatgagttgtatagtgtttaatgttccagaagaagagaaagagaagcttcttgtaacacccaaagtcttattttggaagactagtaaaattctcccaatatttttaagttaaaatatat

SEQ ID NO: 222234 - DNA, 2083 bp, Zea Mays
ctcacacacactgccgacgctgccgtgccactgccatcctcgagcacaagggaccgaccagacccgatccacagctcatcacacacacacacagtggcgagctcgtcaattgcaggcaagacagcaagcgcatttacacagcacgctgaaagccgggacgcagagcagcttttgcgccttgtcccctcctgctcgtcgcttccctcactctcacagccacgccacgccacgagagaagaatgccgccgacgctgggcctgctcctcgcggcggcggcggcggtcctgctgctgctgctgccgccgccaccatcggcgggggcgcaggagacgtgctggtcggggccggcgccgcggcgcggggcgtggatgtccgtggccagcttcggggcgcgcggggacgggcagacgctcaacacgggcgcgttcgcgcgcgccgtggcgcgcatcgcgcgtcgccggggcgcgcggggcggcacgctgctgtacgtgccgcccggggtgtggctcacgggccccttcaacctcacctcccacatgacgctcttcctcgcccgcggcgccatcgtccgcgccacccagccatgccttgctaccatcgaactaataagtgagcaggacacgtcgagctggccgctcatcgacccgctgccgtcgtacgggagagggcgcgagctgcctggcgggagatacatgagcttgatccacggccacggtctgcaggacgtcttcatcacaggtgagaacggcaccatcgacggccaaggcggcgtgtggtgggacatgtggaagaagcgcacgctgcccttcacgaggccgcacctgctggagctcatgtactccaccgacgtcgtcgtctccaacctcgtcttccaggactcgccgttctggaacatccacccggtttactgcagcaacgtagtgatagcaaacctgactgtgttggcgccgcacgactcccccaacaccgacgggatcgatctaggtaagattcaagcagcaacgtgtgcgtcgaggactgctacatctccgccggcgacgacctgatctccatcaagagcgggtgggacgagtacggcgtggccttcggccgcccaagctccggcatcacggtccggaggataaccgggtcgggcccgttcgccggcttcgcggtcgggagcgagacctcgggcggcgtggaggacgtcgtggccgagcacctgagcttctccggcgtgggcgtcggggttcacgtgaagacaaactcgggcaggggcggcttcatccggaacgtcaccgtctcccaggtgaccctggacggcgcccgctacggcctgaggatcgccggcgacgttgggggccaccccggcgcgtcctacaacgcgagcctgctccccgtcatcgacggcgtggcggtcaggaacgtctggggccggaacgtccggcaggccgggctcatacggggcatcagggactcggtcttcagtaacatttgcctctccaacgtgaagctctatggcattggcagcgactccatcgggccgtggagatgccgagccgtcagtggcagcgcactcgacgtgcaaccgtcgccatgtgcggagctggctagtacgtccgggacaggtttctgtacctgaatcagtttttccgcctcctatagcagcaataaagacgtcagcatttctccattttgttcatcacctacagggccctttgtttctttggcaaactcttctgcgattcagctgtcactgttgaattctgctgttggcagaggataatctatttttaccagcagccattgcaagagaattatttttacgtccgtgaaatggtgagaccgatcagcattgcacatcctggtgttggtgtaaccagatcccccactgccgtgtgggcgcgggacactgccggccccacacgcagtgaccggcactcacgggtaccatggacttgtttggaagcaaagagaataaaaaagatgagttgtatagtgtttaatgttccagaagaagagaaagagaagcttcttgtaacacccaaagtcttattttggaagactagtaaaattctcccaatatttttaagttaaaatatat

SEQ ID NO: 222235 - DNA, 1849 bp, Zea Mays
atgccgccgacgctgggcctgctcctcgcggcggcggcggcggtcctgctgctgctgctgccgccgccaccatcggcgggggcgcaggagacgtgctggtcggggccggcgccgcggcgcggggcgtggatgtccgtggccagcttcggggcgcgcggggacgggcagacgctcaacacgggcgcgttcgcgcgcgccgtggcgcgcatcgcgcgtcgccggggcgcgcggggcggcacgctgctgtacgtgccgcccggggtgtggctcacgggccccttcaacctcacctcccacatgacgctcttcctcgcccgcggcgccatcgtccgcgccacccagccatgccttgctaccatcgaactaataagtgagcaggacacgtcgagctggccgctcatcgacccgctgccgtcgtacgggagagggcgcgagctgcctggcgggagatacatgagcttgatccacggccacggtctgcaggacgtcttcatcacaggtgagaacggcaccatcgacggccaaggcggcgtgtggtgggacatgtggaagaagcgcacgctgcccttcacgaggccgcacctgctggagctcatgtactccaccgacgtcgtcgtctccaacctcgtcttccaggactcgccgttctggaacatccacccggtttactgcagcaacgtagtgatagcaaacctgactgtgttggcgccgcacgactcccccaacaccgacgggatcgatctaggtaaggtaagattcaagcagcaacgtgtgcgtcgaggactgctacatctccgccggcgacgacctgatctccatcaagagcgggtgggacgagtacggcgtggccttcggccgcccaagctccggcatcacggtccggaggataaccgggtcgggcccgttcgccggcttcgcggtcgggagcgagacctcgggcggcgtggaggacgtcgtggccgagcacctgagcttctccggcgtgggcgtcggggttcacgtgaagacaaactcgggcaggggcggcttcatccggaacgtcaccgtctcccaggtgaccctggacggcgcccgctacggcctgaggatcgccggcgacgttgggggccaccccggcgcgtcctacaacgcgagcctgctccccgtcatcgacggcgtggcggtcaggaacgtctggggccggaacgtccggcaggccgggctcatacggggcatcagggactcggtcttcagtaacatttgcctctccaacgtgaagctctatggcattggcagcgactccatcgggccgtggagatgccgagccgtcagtggcagcgcactcgacgtgcaaccgtcgccatgtgcggagctggctagtacgtccgggacaggtttctgtacctgaatcagtttttccgcctcctatagcagcaataaagacgtcagcatttctccattttgttcatcacctacagggccctttgtttctttggcaaactcttctgcgattcagctgtcactgttgaattctgctgttggcagaggataatctatttttaccagcagccattgcaagagaattatttttacgtccgtgaaatggtgagaccgatcagcattgcacatcctggtgttggtgtaaccagatcccccactgccgtgtgggcgcgggacactgccggccccacacgcagtgaccggcactcacgggtaccatggacttgtttggaagcaaagagaataaaaaagatgagttgtatagtgtttaatgttccagaagaagagaaagagaagcttcttgtaacacccaaagtcttattttggaagactagtaaaattctcccaatatttttaagttaaaatatat

SEQ ID NO: 222236 - DNA, 1573 bp, Zea Mays
cccatcccatcccatgcgtgccaggacgaatgaaaatactagcctactgcaagagctacctggccaactcgctgttcgtgttcggcgagttcgggggcaacgactacaacgccatgctgttcggcaactacaacgcggaccaggccagcacgtacacgccgcagatcgtgagcgccatcgcggccggcgtggagaagctgctggccatgggcgccacggacgtggtggtgccgggggtgctccccatcggctgcttccccatctacctcaccgtctacggcacctccaacagcgccgactacgacgcgctcggctgcctcaagaagttcaacgacctctccaccaaccacaacgcccagttgcaggcccagatctccgccctccaggccaagtacaagtcggcgcgcatcatgtacgccgacttctactccgccgtctacgacatggtcaagaaccccggcagctacgggttcagctcggtgttccaggcgtgctgcggctcggggggcggcaagtacaactaccagaacagcgcgcggtgcggcatgtcgggcgcgtccgcgtgctccagcccggcgtcgcacctcagctgggacggcatccacctcaccgaggccgcctacaagcagatcaccgacggctggctcaacgggccctactgccgccccgccatcctccacagctaagctaagcgaggggagggcgattaattttttattgttgccatgttatttatacctgtgtttacgttgccgggaaaaaagtgtcccggcagctgcatgcatgtgttgcctcttgtaacttgttatactggtggtcttcatttacaaatcaaatggtatagatttttcatggaaccaaggcatgtggtcggggctttatagagaacttttgcagcaatcactctccaaggtagcctgtctgctgcgacttattcggaaacggcttctactttttctaccgtattctgtctttataaattgcaattaaattgcaactgcaactgagcgctagtccaaatatctgaacaaagcgctatccgtatcgcccgtcaggagggcccgtgatagggtctttgcgcttggctccaagcctccaacgcaccatcaccaagtccttgcagaagatatatcataagagccctccaagcatctgtttctttgcatccatatcgccgctacaccatcacaacaaacctttcggtgtccggacagcgaaggctggttgaccggtgaacatgagcactgtttcaaacagatgaaattaaatgcagcagagcaaaataacgaccaagttgctggttccaagtagaatggtgagaaagcggctgctagagtgatcaccctcaaggctcagctttgctcacttagctatggatggatcaggcgaagcagacggctcagattttactccaaaaaagagaacctcagggaatatccctaattccagccgatcacagctaggtgtatgcattgtctatcaatcgccgatgcatccattccttctagtttctatacaacaaaattccttttttgctacggtacaggatgaacgttccaaacgtcgatcgcgg

SEQ ID NO: 222237 - DNA, 2205 bp, Zea Mays
cgctaggcagacgggcgcgacgcaaaaagctttgttctcagcggaagggcctcagcctcacgggggcgaggccgcgaggcgaggctataaaacgctgccccacccaagccaaccgcctcgtcgttccatccagctctcccagcgcgctgctcgactcgactcgacttcctctgcaacgcgtgtccggtgtaggctgagagagtgagtgagaggcgagatgaggagcgggcggctggcggtggcggtggcggtggctctggcgtgggcgttcgcggcgtcggcggcggcggcggcgcagaagtacaatgccatcttcaacttcggcgactccatcaccgacaccgggaacctctgcaccaacgggaggccgtcgcagatcaccttcacgcagccgccctacggcgagacctacttcggcacgccgacgtgccgctgcagcgacggccgcgtcatcccggacttcctctgctccaggttcggcctgccgttcctgccgccgtccaagtccacgacggccgacttcaagaagggcgctaacatggccatcaccggcgccacggccatggacgcgcccttcttccgctcgctcggcctctccgacaagatctggaacaacgggcccatcagcttccagctgcagtggttccagcaggtcacctccgccgtgtgcgggcaggactgcaagagctacctggccaactcgctgttcgtgttcggcgagttcgggggcaacgactacaacgccatgctgttcggcaactacaacgcggaccaggccagcacgtacacgccgcagatcgtgagcgccatcgcggccggcgtggagaagctgctggccatgggcgccacggacgtggtggtgccgggggtgctccccatcggctgcttccccatctacctcaccgtctacggcacctccaacagcgccgactacgacgcgctcggctgcctcaagaagttcaacgacctctccaccaaccacaacgcccagttgcaggcccagatctccgccctccaggccaagtacaagtcggcgcgcatcatgtacgccgacttctactccgccgtctacgacatggtcaagaaccccggcagctacgggttcagctcggtgttccaggcgtgctgcggctcggggggcggcaagtacaactaccagaacagcgcgcggtgcggcatgtcgggcgcgtccgcgtgctccagcccggcgtcgcacctcagctgggacggcatccacctcaccgaggccgcctacaagcagatcaccgacggctggctcaacgggccctactgccgccccgccatcctccacagctaagctaagcgaggggagggcgattaattttttattgttgccatgttatttatacctgtgtttacgttgccgggaaaaaagtgtcccggcagctgcatgcatgtgttgcctcttgtaacttgttatactggtggtcttcatttacaaatcaaatggtatagatttttcatggaaccaaggcatgtggtcggggctttatagagaacttttgcagcaatcactctccaaggtagcctgtctgctgcgacttattcggaaacggcttctactttttctaccgtattctgtctttataaattgcaattaaattgcaactgcaactgagcgctagtccaaatatctgaacaaagcgctatccgtatcgcccgtcaggagggcccgtgatagggtctttgcgcttggctccaagcctccaacgcaccatcaccaagtccttgcagaagatatatcataagagccctccaagcatctgtttctttgcatccatatcgccgctacaccatcacaacaaacctttcggtgtccggacagcgaaggctggttgaccggtgaacatgagcactgtttcaaacagatgaaattaaatgcagcagagcaaaataacgaccaagttgctggttccaagtagaatggtgagaaagcggctgctagagtgatcaccctcaaggctcagctttgctcacttagctatggatggatcaggcgaagcagacggctcagattttactccaaaaaagagaacctcagggaatatccctaattccagccgatcacagctaggtgtatgcattgtctatcaatcgccgatgcatccattccttctagtttctatacaacaaaattccttttttgctacggtacaggatgaacgttccaaacgtcgatcgcgg

SEQ ID NO: 222238 - DNA, 2108 bp, Zea Mays
agagaagagggcgggcatcggccagtgggggctctgaggccgagggaggcgaggaaagcggcgggtgccgggccgcccgcgccggtgccgagccgcccgcgccggtgccgaggccctcaccagtcaccaccccctcccctcttccgtctgtcccccgcttgccgccaccgccgctgcccgctcgcgatccttcccctttttaacgctcccgcggccccgcgtcgtgctcccttttgtcgccgctgccttcgtgcccgtactcgcgggttctcctcgctcctcaatctccgcgcctgggcgcggcgttcgccgccggatctgggcgcgggacggtgccccggacggtcgatggcgcgggcggcgctccggttgggcgaccgcgcgctcgcgctcctcgtcctcgtgtcagtggctctgcttccacttgtcagttccgacgatggacacaaacactgcgagggtgttgtcaggggctgggcggattcctccacggggcgcgtgaaggacggggacaaactgagcctcaaggatttgctcttcttcctccacattcctaggactggaggccgcacctactttcactgcttcctaaaaaagctgtatacaaatgcgcaggaatgcccgcgttcttatgacaaactacggttcgacccaagccatcctgattgcaagctggttgttagtcatgatgactatagcttaacttccaagctgccaagggagagaacatctgttgtaacaatactaaggaacccagttgaccgtgtatttagcacatatgagttttcagttgaagttgcagctagattccttgttcacccaaacttaacttctgcaaagttaatgactacccgtgtgttaaaaaagtctcgtgctgtcagtactttggacatctggccttggaagtacttggttccttggatgagagaagatctgttttccaggagagatgccaggggtatcgacaaagttcatagtagtaagaaggttaatgcatatgatgtggaggatatggttatgccgttacatcagtacatcaatgatccagttgcccatgagatcattcataatggggctacctttcagattactgggttaacgaacaattcatactttgatggagcacatgaggttcgacattgtgccagaaagcatccagatcttggtcgtattgtgcttgaagttgctaagaataggctggaccagatgctgtatgtaggacttacagaggatcatgaagagtcagcgaggttgtttgctcatatggtaggagcacaggtgcttttacaatctgggacattgagtttggatctcaaggaagatctgcacagtgagactgactcacacccatccatggtggagcccggggatgaagaagcaagcgaacatctgaataacacacatggttggcaaaataatgaagccctgaactctaccagcgacgaacaaggaaaaggaaatatgactgtgggtaaactgatggaagcttatgaaacttgcatcgctaaactgcggaagtcccaatctagccgtcgtaaaatatcactaaagaaagtggaggaagcaaacttctcaaaagaggcacggaagctggtccccgaggcaattttgaaacaaattatctcgctgaacagccttgacatggaactttatgaccatgctaagaaaatctttacccaggaacatctgatgctgaaagctcagcaatccatggcggggcagcacagacagttggcggaacaagaggagggctggatcggcacgatgtgcagcgacgggacttgctctccctgggtggtggtcttgctgggtctagggatcaccacgatcctagttttggccacattagctgtaacgacgagaaaaagaacgtctaaacttaaggtttaaccagaacttttcatgagacaggtctctagattttggtgtacagtctgatgaatgccccttagcaatctttcggggcagaggtgctagcgtgcgcagaatcatcatgtactaactcgtgcggtcgtactggtatcttcacacaatttgagatgccgcggtggtagtgtggacgtgtagtctaaattgccactccataagaaaaaagcagcgacgttgtg

SEQ ID NO: 222239 - DNA, 2126 bp, Zea Mays
agaagagggcgggcatcggccagtgggggctctgaggccgagggaggcgaggaaagcggcgggtgccgggccgcccgcgccggtgccgagccgcccgcgccggtgccgaggccctcaccagtcaccaccccctcccctcttccgtctgtcccccgcttgccgccaccgccgctgcccgctcgcgatccttcccctttttaacgctcccgcggccccgcgtcgtgctcccttttgtcgccgctgccttcgtgcccgtactcgcgggttctcctcgctcctcaatctccgcgcctgggcgcggcgttcgccgccggatctgggcgcgggacggtgccccggacggtcgatggcgcgggcggcgctccggttgggcgaccgcgcgctcgcgctcctcgtcctcgtgtcagtggctctgcttccacttgtcagttccgacgatggacacaaacactgcgagggtgttgtcaggggctgggcggattcctccacggggcgcgtgaaggacggggacaaactgagcctcaaggatttgctcttcttcctccacattcctaggactggaggccgcacctactttcactggaatgcccgcgttcttatgacaaactacggttcgacccaagccatcctgattgcaagctggttgttagtcatgatgactatagcttaacttccaagctgccaagggagagaacatctgttgtaacaatactaaggaacccagttgaccgtgtatttagcacatatgagttttcagttgaagttgcagctagattccttgttcacccaaacttaacttctgcaaagttaatgactacccgtgtgttaaaaaagtctcgtgctgtcagtactttggacatctggccttggaagtacttggttccttggatgagagaagatctgttttccaggagagatgccaggggtatcgacaaagttcatagtagtaagaaggttaatgcatatgatgtggaggatatggttatgccgttacatcagtacatcaatgatccagttgcccatgagatcattcataatggggctacctttcagattactgggttaacgaacaattcatactttgatggagcacatgaggttcgacattgtgccagaaagcatccagatcttggtcgtattgtgcttgaagttgctaagaataggctggaccagatgctgtatgtaggacttacagaggatcatgaagagtcagcgaggttgtttgctcatatggtaggagcacaggtgcttttacaatctgggacattgagtttggatctcaaggaagatctgcacagtgagactggatttgatttatttggtgatggagtatgtgcactccctgatcaaaatgaatactcacacccatccatggtggagcccggggatgaagaagcaagcgaacatctgaataacacacatggttggcaaaataatgaagccctgaactctaccagcgacgaacaaggaaaaggaaatatgactgtgggtaaactgatggaagcttatgaaacttgcatcgctaaactgcggaagtcccaatctagccgtcgtaaaatatcactaaagaaagtggaggaagcaaacttctcaaaagaggcacggaagctggtccccgaggcaattttgaaacaaattatctcgctgaacagccttgacatggaactttatgaccatgctaagaaaatctttacccaggaacatctgatgctgaaagctcagcaatccatggcggggcagcacagacagttggcggaacaagaggagggctggatcggcacgatgtgcagcgacgggacttgctctccctgggtggtggtcttgctgggtctagggatcaccacgatcctagttttggccacattagctgtaacgacgagaaaaagaacgtctaaacttaaggtttaaccagaacttttcatgagacaggtctctagattttggtgtacagtctgatgaatgccccttagcaatctttcggggcagaggtgctagcgtgcgcagaatcatcatgtactaactcgtgcggtcgtactggtatcttcacacaatttgagatgccgcggtggtagtgtggacgtgtagtctaaattgccactccataagaaaaaagcagcgacgttgtg

SEQ ID NO: 222240 - DNA, 2107 bp, Zea Mays
ggaaagcggcgggtgccgggccgcccgcgccggtgccgagccgcccgcgccggtgccgaggccctcaccagtcaccaccccctcccctcttccgtctgtcccccgcttgccgccaccgccgctgcccgctcgcgatccttcccctttttaacgctcccgcggccccgcgtcgtgctcccttttgtcgccgctgccttcgtgcccgtactcgcgggttctcctcgctcctcaatctccgcgcctgggcgcggcgttcgccgccggatctgggcgcgggacggtgccccggacggtcgatggcgcgggcggcgctccggttgggcgaccgcgcgctcgcgctcctcgtcctcgtgtcagtggctctgcttccacttgtcagttccgacgatggacacaaacactgcgagggtgttgtcaggggctgggcggattcctccacggggcgcgtgaaggacggggacaaactgagcctcaaggatttgctcttcttcctccacattcctaggactggaggccgcacctactttcactgcttcctaaaaaagctgtatacaaatgcgcaggaatgcccgcgttcttatgacaaactacggttcgacccaagccatcctgattgcaagctggttgttagtcatgatgactatagcttaacttccaagctgccaagggagagaacatctgttgtaacaatactaaggaacccagttgaccgtgtatttagcacatatgagttttcagttgaagttgcagctagattccttgttcacccaaacttaacttctgcaaagttaatgactacccgtgtgttaaaaaagtctcgtgctgtcagtactttggacatctggccttggaagtacttggttccttggatgagagaagatctgttttccaggagagatgccaggggtatcgacaaagttcatagtagtaagaaggttaatgcatatgatgtggaggatatggttatgccgttacatcagtacatcaatgatccagttgcccatgagatcattcataatggggctacctttcagattactgggttaacgaacaattcatactttgatggagcacatgaggttcgacattgtgccagaaagcatccagatcttggtcgtattgtgcttgaagttgctaagaataggctggaccagatgctgtatgtaggacttacagaggatcatgaagagtcagcgaggttgtttgctcatatggtaggagcacaggtgcttttacaatctgggacattgagtttggatctcaaggaagatctgcacagtgagactggatttgatttatttggtgatggagtatgtgcactccctgatcaaaatgaatactcacacccatccatggtggagcccggggatgaagaagcaagcgaacatctgaataacacacatggttggcaaaataatgaagccctgaactctaccagcgacgaacaaggaaaaggaaatatgactgtgggtaaactgatggaagcttatgaaacttgcatcgctaaactgcggaagtcccaatctagccgtcgtaaaatatcactaaagaaagtggaggaagcaaacttctcaaaagaggcacggaagctggtccccgaggcaattttgaaacaaattatctcgctgaacagccttgacatggaactttatgaccatgctaagaaaatctttacccaggaacatctgatgctgaaagctcagcaatccatggcggggcagcacagacagttggcggaacaagaggagggctggatcggcacgatgtgcagcgacgggacttgctctccctgggtggtggtcttgctgggtctagggatcaccacgatcctagttttggccacattagctgtaacgacgagaaaaagaacgtctaaacttaaggtttaaccagaacttttcatgagacaggtctctagattttggtgtacagtctgatgaatgccccttagcaatctttcggggcagaggtgctagcgtgcgcagaatcatcatgtactaactcgtgcggtcgtactggtatcttcacacaatttgagatgccgcggtggtagtgtggacgtgtagtctaaattgccactccataagaaaaaagcagcgacgttgtg

SEQ ID NO: 222241 - DNA, 2784 bp, Zea Mays
ccgatccgccgcatcacgtcggcccgacatgtaccagtggcgcaagttcgagttctttgaggagaagtctgccggccgcggcggcggcgggggttcagccgccgccgtgccggccgagatcgcgggccgagtcacctgctgctcgggcggccggggccgcgtcgcggtggggtgcgacgacggcaccgtgggccttctcgaccgcgggttccgcctctcctatggcttccaggcctacgcctcctcggtcctcttcctccagcagctcaagcaaagaaatgttcttgtcacggttggagacgatgaccagtcatcttctcaggcatcagcaatctgtctaaaggtttttgacctcgataaagtacaagaagaaggatcaagcacaacaactcctttctgtgttcaaattttgcggatcttcactgatcaatttcctcaagcaaagattacatcatttatggttctagaagaagcaccacccatactgatgattgccattggactggacaatggtttcatttattgcatcaaagcttgcatattcaaccaccaaggaggcaaacacttgatcagattggttgtcagacgaatgctgtagcaatgagtgaccgtatggacttaattattggtagacctgaagctgtatatttctacgaagttgatggtagaggcccttgctgggcatttgatggtgagaaaaagtttgtaggttggtttcgaggctatttactctgcattattgaagatcagagaacacataaaagcacacttaatgtttatgatcttaagaatcggttgattgcacatagcatgcctgtgggggatgtttcacacttagtatgtgagtggggttatattattctcataatgtcagacaaaaagattctgtgcattggagagaaagacatggaaagtaagcttgatatgttgttcaagaaaaatctttatacagttgcaatcaatcttgtacaaagtcagcaggctgatcctgcttccactgctgaggtgctgcggaagtatggtgaccatctgtatggaaaacaggaatatgatgaggctatgtcccagtatatccacactattggtcatcttgaaccatcgtatgttatacagaagttccttgatgcaaagcgcatctacaacttgacaaattatttagagaagttacatgatcgagggttagcatctaaagaccacaccacccttctgttgaactgctataccaaattgaaagatgtggagaaacttaaccattttatcaaggatgaagatggggttggtgagatcaagtttgatgtggaaactgccataagagtatgccgagcagctggatatcatgaacatgctatgtttgtggcaaaaaaggctgggaggcatgagttgtacttgaagattttacttgaggatcttggtagatatgacgaggcactgcaatatatatctggcctcgaggcaaaccaggcaggtcttactgtaaaagaatatgggaaaattcttgtggaacataggcctgctgaaacagttgaaatactgttaaggctctgtacagatgttggagatcctacgtcgagaagaggttcaaacagtatgcacttgcttatgataccatccccaatggactttgtgaatatatttgtgcacagcccgcaatatctgatgggatttctggaaaattatatcaaaacagtaacggactcacctgcgcaaacagaaattcataacacccttctggagctctatatttcaaatgatttgagcttcccgtctatctctcaagaaaatgaatatgagaatcactatatcaaagaaataaaaggtaaagaaactgctaatgtctataggtcaggaataaaggaaaaaactggtcttggaaaagaagatcctaaagtagcaaagaatattgttgataggagaaggaaagggcttgcgttactcaaatctgcttggacatctgagatggaagatcctttgtatgatgttgatcttgctctcattctttgtaacactaatgcattcaaagatggtttgctatttctatatgagaaactaaaactttacaaagaggttattagttgttacaagcaagcacatgatcatcaaggtttaattgcatgttgcaagaagttgggggactcatctcaaggaggggatccttctctctggggggatctattgaagtattttggggatcttggggaagattgctctaaagaagttaaagaggtcttgacctacattgagaaagaggatgttgtacctcccatcgttgtgctacagacactatcaaaaaacccatgcttgacactctcagtcgtcaaagattacattgctcgcaagcttgaacaagaatcaaagctaattgaagatgatagaaaatccattgataagtatcaggcagagacagagttgatgaaaagggaaatacaagatctcaagacgaacgcgaaggttttccaactgagcaagtgtagcgcgtgcactttcacccttgatctacctgctgtccatttcctgtgcatgcactcgttccaccttcgctgccttggtgacaacgaaaaagaatgcccagaatgcgcgcctgaatacagatccgtcatggaggcaaagcagaagctagagcaaaacgccagggaccatgatctctttttcaggcagttgaggggttccaaggacggcttctctgtcattgcagactattttagcaagggcatattttggaaactttggtctcagccaaagtttttctctgcaaagagagcgccagctgggtcccgctctggctga

SEQ ID NO: 222242 - DNA, 3129 bp, Zea Mays
atgtaccagtggcgcaagttcgagttctttgaggagaagtctgccggccgcggcggcggcgggggttcagccgccgccgtgccggccgagatcgcgggccgagtcacctgctgctcgggcggccggggccgcgtcgcggtggggtgcgacgacggcaccgtgggccttctcgaccgcgggttccgcctctcctatggcttccaggcctacgcctcctcggtcctcttcctccagcagctcaagcaaagaaatgttcttgtcacggttggagacgatgaccagtcatcttctcaggcatcagcaatctgtctaaaggtttttgacctcgataaagtacaagaagaaggatcaagcacaacaactcctttctgtgttcaaattttgcggatcttcactgatcaatttcctcaagcaaagattacatcatttatggttctagaagaagcaccacccatactgatgattgccattggactggacaatggtttcatttattgcatcaaaggtgacattgcacgtgagcgtattacacgtttcaagttgcaagttgaggctgcttcagatggcagcactagtttgcctattactggtcttggttttcgagttgaggggcaagcacaccagctcttttctgtaactcctggttctgtaaccttgttcagcttgcatattcaaccaccaaggaggcaaacacttgatcagattggttgtcagacgaatgctgtagcaatgagtgaccgtatggacttaattattggtagacctgaagctgtatatttctacgaagttgatggtagaggcccttgctgggcatttgatggtgagaaaaagtttgtaggttggtttcgaggctatttactctgcattattgaagatcagagaacacataaaagcacacttaatgtttatgatcttaagaatcggttgattgcacatagcatgcctgtgggggatgtttcacacttagtatgtgagtggggttatattattctcataatgtcagacaaaaagattctgtgcattggagagaaagacatggaaagtaagcttgatatgttgttcaagaaaaatctttatacagttgcaatcaatcttgtacaaagtcagcaggctgatcctgcttccactgctgaggtgctgcggaagtatggtgaccatctgtatggaaaacaggaatatgatgaggctatgtcccagtatatccacactattggtcatcttgaaccatcgtatgttatacagaagttccttgatgcaaagcgcatctacaacttgacaaattatttagagaagttacatgatcgagggttagcatctaaagaccacaccacccttctgttgaactgctataccaaattgaaagatgtggagaaacttaaccattttatcaaggatgaagatggggttggtgagatcaagtttgatgtggaaactgccataagagtatgccgagcagctggatatcatgaacatgctatgtttgtggcaaaaaaggctgggaggcatgagttgtacttgaagattttacttgaggatcttggtagatatgacgaggcactgcaatatatatctggcctcgaggcaaaccaggcaggtcttactgtaaaagaatatgggaaaattcttgtggaacataggcctgctgaaacagttgaaatactgttaaggctctgtacagatgttggagatcctacgtcgagaagaggttcaaacagtatgcacttgcttatgataccatccccaatggactttgtgaatatatttgtgcacagcccgcaatatctgatgggatttctggaaaattatatcaaaacagtaacggactcacctgcgcaaacagaaattcataacacccttctggagctctatatttcaaatgatttgagcttcccgtctatctctcaagaaaatgaatatgagaatcactatatcaaagaaataaaaggtaaagaaactgctaatgtctataggtcaggaataaaggaaaaaactggtcttggaaaagaagatcctaaagtagcaaagaatattgttgataggagaaggaaagggcttgcgttactcaaatctgcttggacatctgagatggaagatcctttgtatgatgttgatcttgctctcattctttgtaacactaatgcattcaaagatggtttgctatttctatatgagaaactaaaactttacaaagaggttattagttgttacaagcaagcacatgatcatcaaggtttaattgcatgttgcaagaagttgggggactcatctcaaggaggggatccttctctctggggggatctattgaagtattttggggatcttggggaagattgctctaaagaagttaaagaggtcttgacctacattgagaaagaggatgttgtacctcccatcgttgtgctacagacactatcaaaaaacccatgcttgacactctcagtcgtcaaagattacattgctcgcaagcttgaacaagaatcaaagctaattgaagatgatagaaaatccattgataagtatcagagacagagttgatgaaaagggaaatacaagatctcaagacgaacgcgaaggttttccaactgagcaagtgtagcgcgtgcactttcacccttgatctacctgctgtccatttcctgtgcatgcactcgttccaccttcgctgccttggtgacaacgaaaaagaatgcccagaatgcgcgcctgaatacagatccgtcatggaggcaaagcagaagctagagcaaaacgccagggaccatgatctctttttcaggcagttgaggggttccaaggacggcttctctgtcattgcagactattttagcaagggcatagtgagcaagacaaccttacctcctgagaatggacggtagtgaaggaccactggtactccgttgccttgtacgacattatatggtgttatttccctttcatgcaccgggttatgcaatctggcctgtttcagccatgcagtgagggtttttttttctttttctttttggtttgacattgtagatactcattttccggcagtttctttctgaacccaagtgcatttgctttgacattgctgtgcagttttccagcattgggtttcgatgtttggctcgtgccctcctacttttg

SEQ ID NO: 222243 - DNA, 3209 bp, Zea Mays
tcgccgagcccgatcgagttcccgtctaagccgcacgccgttccggccccgatccgccgcatcacgtcggcccgacatgtaccagtggcgcaagttcgagttctttgaggagaagtctgccggccgcggcggcggcgggggttcagccgccgccgtgccggccgagatcgcgggccgagtcacctgctgctcgggcggccggggccgcgtcgcggtggggtgcgacgacggcaccgtgggccttctcgaccgcgggttccgcctctcctatggcttccaggcctacgcctcctcggtcctcttcctccagcagctcaagcaaagaaatgttcttgtcacggttggagacgatgaccagtcatcttctcaggcatcagcaatctgtctaaaggtttttgacctcgataaagtacaagaagaaggatcaagcacaacaactcctttctgtgttcaaattttgcggatcttcactgatcaatttcctcaagcaaagattacatcatttatggttctagaagaagcaccacccatactgatgattgccattggactggacaatggtttcatttattgcatcaaaggtgacattgcacgtgagcgtattacacgtttcaagttgcaagttgaggctgcttcagatggcagcactagtttgcctattactggtcttggttttcgagttgaggggcaagcacaccagctcttttctgtaactcctggttctgtaaccttgttcagcttgcatattcaaccaccaaggaggcaaacacttgatcagattggttgtcagacgaatgctgtagcaatgagtgaccgtatggacttaattattggtagacctgaagctgtatatttctacgaagttgatggtagaggcccttgctgggcatttgatggtgagaaaaagtttgtaggttggtttcgaggctatttactctgcattattgaagatcagagaacacataaaagcacacttaatgtttatgatcttaagaatcggttgattgcacatagcatgcctgtgggggatgtttcacacttagtatgtgagtggggttatattattctcataatgtcagacaaaaagattctgtgcattggagagaaagacatggaaagtaagcttgatatgttgttcaagaaaaatctttatacagttgcaatcaatcttgtacaaagtcagcaggctgatcctgcttccactgctgaggtgctgcggaagtatggtgaccatctgtatggaaaacaggaatatgatgaggctatgtcccagtatatccacactattggtcatcttgaaccatcgtatgttatacagaagttccttgatgcaaagcgcatctacaacttgacaaattatttagagaagttacatgatcgagggttagcatctaaagaccacaccacccttctgttgaactgctataccaaattgaaagatgtggagaaacttaaccattttatcaaggatgaagatggggttggtgagatcaagtttgatgtggaaactgccataagagtatgccgagcagctggatatcatgaacatgctatgtttgtggcaaaaaaggctgggaggcatgagttgtacttgaagattttacttgaggatcttggtagatatgacgaggcactgcaatatatatctggcctcgaggcaaaccaggcaggtcttactgtaaaagaatatgggaaaattcttgtggaacataggcctgctgaaacagttgaaatactgttaaggctctgtacagatgttggagatcctacgtcgagaagaggttcaaacagtatgcacttgcttatgataccatccccaatggactttgtgaatatatttgtgcacagcccgcaatatctgatgggatttctggaaaattatatcaaaacagtaacggactcacctgcgcaaacagaaattcataacacccttctggagctctatatttcaaatgatttgagcttcccgtctatctctcaagaaaatgaatatgagaatcactatatcaaagaaataaaaggtaaagaaactgctaatgtctataggtcaggaataaaggaaaaaactggtcttggaaaagaagatcctaaagtagcaaagaatattgttgataggagaaggaaagggcttgcgttactcaaatctgcttggacatctgagatggaagatcctttgtatgatgttgatcttgctctcattctttgtaacactaatgcattcaaagatggtttgctatttctatatgagaaactaaaactttacaaagaggttattagttgttacaagcaagcacatgatcatcaaggtttaattgcatgttgcaagaagttgggggactcatctcaaggaggggatccttctctctggggggatctattgaagtattttggggatcttggggaagattgctctaaagaagttaaagaggtcttgacctacattgagaaagaggatgttgtacctcccatcgttgtgctacagacactatcaaaaaacccatgcttgacactctcagtcgtcaaagattacattgctcgcaagcttgaacaagaatcaaagctaattgaagatgatagaaaatccattgataagtatcaggcagagacagagttgatgaaaagggaaatacaagatctcaagacgaacgcgaaggttttccaactgagcaagtgtagcgcgtgcactttcacccttgatctacctgctgtccatttcctgtgcatgcactcgttccaccttcgctgccttggtgacaacgaaaaagaatgcccagaatgcgcgcctgaatacagatccgtcatggaggcaaagcagaagctagagcaaaacgccagggaccatgatctctttttcaggcagttgaggggttccaaggacggcttctctgtcattgcagactattttagcaagggcatagtgagcaagacaaccttacctcctgagaatggacggtagtgaaggaccactggtactccgttgccttgtacgacattatatggtgttatttccctttcatgcaccgggttatgcaatctggcctgtttcagccatgcagtgagggtttttttttctttttctttttggtttgacattgtagatactcattttccggcagtttctttctgaacccaagtgcatttgctttgacattgctgtgcagttttccagcattgggtttcgatgtttggctcgtgccctcctacttttg

SEQ ID NO: 222244 - DNA, 2787 bp, Zea Mays
atggtgcaaggcgaggagagttcctggaggatggagagggcagcgctgcctctcaaccaggcgctcgcgtatggagtccaagcccacggcgccggcggcgccgccgctgcgccgccgacctgcttcctggacttccaccagcctgcggccgcggccgctgcctacttcgggttcggggagctggaggaggccctcatccatggcggcggcggcggcgtcgatcccggcgtgatcaccaagaacgacgtcgcgcaggcaaagtcggcggcggcggcggcaggatatctcgcgggtgctgctgccaggccgcccacgctggagatcttcccttcgttgccaatgaggcatcaacagcagctgcacagtaggaagcatggatccacaggaaaagatggcaagctggtagatgccaagacggaacggcggctggcgcagaacagagaggctgcgaggaagagcaggctgaggaagaaggcttacgtgcagcagctcgagactaccaggatcaggcttcagcacgtcgagcacgagttccagagagcacggtcacactcacagggcgtgggcgttggggggtgcggcgccgccggggacatgagctgtggcgccgccatgttcgacatggagtacgcgcggtggctggacgacgacagcaagcggctggcggagctccgaggcgggctgcaggcgcacctgctgctggacgccaacctgggcctcatcgtggaggagtgcatgcagcaccacgacgagctgttccagctcaaggcggcgctcgcgcgctccgacgtcttccacctcctcaccggctcctggaccacccccgccgagcgctgcttcttctggatgggaggcttccgcccgtctgagctgctcaaggtcctgataccgcagctggacccgctgacggagcagcagctgctggggatctgcagcctgcagcagtcgtcggagcaggcggaggaggcgctcgcccagggcctgcaccagctgcaccaggccctggccgacacagtcgccgccggcacgctcaacgagggctccgccgcccccaactgcatgaacatcatggccgtcgcacttgacaagattgccagcctcgaaaacttctatcaacaggccgacaatctaaggcagcagacgttgcatcagatgcgccgcatcctgaccactcggcaggctgcgcggtgcttcctctctattggggagtactacagccgccttagagctctcagcaacctctgggcttcccgtcccggcgagtatgtttcacaagcttgatcacctgcaaaaacttgactctccattagtgtcatgttgatcaactgcactgtggctgttcccaaccatgtctgaatcacatgtattccttcatttttttttaaagatagggtcacctgttttcggaattcattatatgaaaaaagtcagaaatggacgtggctgacaatgacatgtatttctcgtgtaacagcaccttcatcaggtcagagagcctcagccccacagcaacggaactgcaagccctgcaccaccagcggcagaatcagttcagcggattttgaggccttacctggtggtgcggtggtgtcggagggtgtaaactttggcggcgaaggtgatgttacaaagattagaggttttgagagagagatgcattgtaatgttctatcattaaagtactaagaaagcaatatcactaggcgaaaagggcggggggaaaggaattgctgtggtgcgatgttgggtggctgacctgttcatatggctcttgaactgattgaagggttagccccgcagaattttttgcgggtagcagcagaaaacaaagcagtggcagaagattctggctgctcacttgccagagagcactaattgcagttagagtgacagagtaaccattaaatgcctttttcaaatcaagtattttggcgaacacattttcgtgggcagacaataatctgtcacctgtagttcaacaaatgaaaatgaaacaactaacagtgggagccaatctcccattctagattctgctaagcactgatggaaaagaacgaaactgtgacggtaaagaagcgccgatagtgaaacaactagaaaatattatgcaccctcctaaattatatataagtcgttttgacttttctagatacataaacgaattataatttagaatgaaacatggggagtgcatagcaagaaatatcaatattgtgcaacacatgtaaaaacagcaataggaatcttacataaactgacaagtaaattgtaagatgcaagaccagagcgatcgatggacaaatgaaggaaaggagaagcaattttcacattatttgagatcaacttatcacttatcagtaggctcaaaattccaaaatcaactctgcttccaatatcatctgccatggacagctgaattaggcggttgctgcacaatgcacagaacttcccatcagatgacatgacaaacaacactcatgaaactgtggaaatcttcactccttttactgcaaaatttctgatacagaaagaccagggaaaaaggataaaaagccacaagagcatacagagcagaaaataagcgaggcagaagacttcacaaatcacaaaacaaggttgaaatagatgaaatgaagacaacgaaatacagtttggattgtggaaattgctgaacactaactaccgaatcaagtgaacacaacatagcagcacttttaaatgcaggttggatataagaaacatatcacatatagctataaatgagaacccagcaggaatgcaagaatg

SEQ ID NO: 222245 - DNA, 571 bp, Zea Mays
gccccctgctcctcccgactacgaccctcgccgctcatcaggaggcactgaggaaggagatcgagaggctgaggcaaatctaccaccagcagagcctgaagagcggcagggagcccgacgcggccccgtcggtccgcgacgacaaggacatgatcggcagcgaggggaccgccgcgcccggcccgccctcgtgatgaggaggaggtggtggggcgacacgtccagacatccgagtcggtcgctgtagtcggggatggccctgtcgcccgccctgcagcccatcacagcgaggttgccgctgccgctgctaggattggtgtgtgtgtgccgtgtgcgtgtccgtgtgtgcattctttgggggtgtgtaacgtgatgtgatgtaaagagaagaggaactgcatcggtttggtttggtttgtttatccttgcatgcatatgcatctgcatcctctcctgctgccttccaccacctcccctgatttgtaatttttgttcgagcattttgggccaaggctgtaggtaaaaaaggaccaaaagcaattcagagtgaaatatgcactcgtgttacttt

SEQ ID NO: 222246 - DNA, 1503 bp, Zea Mays
aaaattccaaatttgttgttgtacacacggcacaccctaaccaaaacatcctgccgtttcccgttcacccagcgtgcgctccatcttggcgaggccgcgagggcgaccgctacagcagcagccgccgccgccgccagatccccaggccttcgttgaacccttcgccgtaacgagatcagatggctgggtatatgtcaagagggccccaaaatggttctgtgtatgtctgcaatctacctcctggaactgatgaaaatatgttggctgaatattttggcaccataggcttgctaaagaaggacaaaaggactgggcgtccaaaaatttggatatacagggacaaagttactaatgaaccaaagggtgatgcaacagtcacctatgaggatccacatgctgcttcagctgctgtggaatggttcgataacaaggatttccatgggagcactattcaggttcacatagctgagtcaaaaagcaaagatgcattcgataaccccacaagtttgaacatcattggtggtgttggtgaacaagatgaactggataatggagcaggcagaggcagagggcgtggtgatggtccaggcaaggcttggcagcaagatggggattggatgtgtccaaatacaaggtctgttatgattgttgtggcaatgtaaattttgccttccgtggtgtttgtaatcgctgtggagctgcacgccctgctggtgctggtggaactgctgctggtggtggcggtaggggtagaggccgtggtagctctgatgcaagaggaagcagccatgctggtgctgctgttggtggtccacctggattgtttggcccgaatgattggccatgtccaatgtgtggcaacatcaactgggctaagcggaccaaatgtaatatatgtaacacctccaagcctggtaccaatgaaggtggtgtgaggggtggccgtggtggtgggtacaaagagcttgatgaagaagaactagaggaagttaaaaaacgtcggaaagaggctgaggaggatgatggagagatctatgacgaatttggcaacctgaaaaagaaatttcgctctaaagctctgcatactgaaggtgcacaggcacttcctgggtctggacgtgctggatgggaagttgagcatcgtggtcctagtgaaagggaaggcagggagaggagcagggatcgtgttagggatgactactatgaaaaggaaaccaggggcagagatagaggtgatcttggaagggaccagcgccggagcaggagtcgaagcagagaccgtgaaagggaaaggagggagaggagaagagaacatgattatgagagaagggagcgtgaccgggatcgggaccgccgccatagctttgagctggtggacgtcatggagctaaccctgagccactacatggcttcgggaggaaggtcgagcagttcgagtaattcaagggccagttgtgggctcgcttggagttagaggggcatgtggtggcccaagcgacgaca

SEQ ID NO: 222247 - DNA, 1607 bp, Zea Mays
aaaattccaaatttgttgttgtacacacggcacaccctaaccaaaacatcctgccgtttcccgttcacccagcgtgcgctccatcttggcgaggccgcgagggcgaccgctacagcagcagccgccgccgccgccagatccccaggccttcgttgaacccttcgccgtaacgagatcagatggctgggtatatgtcaagagggccccaaaatggttctgtgtatgtctgcaatctacctcctggaactgatgaaaatatgttggctgaatattttggcaccataggcttgctaaagaaggacaaaaggactgggcgtccaaaaatttggatatacagggacaaagttactaatgaaccaaagggtgatgcaacagtcacctatgaggatccacatgctgcttcagctgctgtggaatggttcgataacaaggatttccatgggagcactattcaggttcacatagctgagtcaaaaagcaaagatgcattcgataaccccacaagtttgaacatcattggtggtgttggtgaacaagatgaactggataatggagcaggcagaggcagagggcgtggtgatggtccaggcaaggcttggcagcaagatggggattggatgtgtccaaatacaaggttgtggcaatgtaaattttgccttccgtggtgtttgtaatcgctgtggagctgcacgccctgctggtgctggtggaactgctgctggtggtggcggtaggggtagaggccgtggtagctctgatgcaagaggaagcagccatgctggtgctgctgttggtggtccacctggattgtttggcccgaatgattggccatgtccaatgtgtggcaacatcaactgggctaagcggaccaaatgtaatatatgtaacacctccaagcctggtaccaatgaaggtggtgtgaggggtggccgtggtggtgggtacaaagagcttgatgaagaagaactagaggaagttaaaaaacgtcggaaagaggctgaggaggatgatggagagatctatgacgaatttggcaacctgaaaaagaaatttcgctctaaagctctgcatactgaaggtgcacaggcacttcctgggtctggacgtgctggatgggaagttgagcatcgtggtcctagtgaaagggaaggcagggagaggagcagggatcgtgttagggatgactactatgaaaaggaaaccaggggcagagatagaggtgatcttggaagggaccagcgccggagcaggagtcgaagcagagaccgtgaaagggaaaggagggagaggagaagagaacatgattatgagagaagggagcgtgaccgggatcgggaccgccgccataggtgaagatagaaataacaaggctttctgttcgtacactgcatttgccaatttttgtagccatgcgacccgtggtcttgtgttagtaactgggggcgtgcgttgttgctctgaatctgatttttgctttgaatgattcgctgcactggcattttattcagatattctgtttcttctgtgattacttttatgtttgtggaacacatatgacactcacggatccactgtcatgcccatcttgagctagaagagtcattgat

SEQ ID NO: 222248 - DNA, 1620 bp, Zea Mays
aaaattccaaatttgttgttgtacacacggcacaccctaaccaaaacatcctgccgtttcccgttcacccagcgtgcgctccatcttggcgaggccgcgagggcgaccgctacagcagcagccgccgccgccgccagatccccaggccttcgttgaacccttcgccgtaacgagatcagatggctgggtatatgtcaagagggccccaaaatggttctgtgtatgtctgcaatctacctcctggaactgatgaaaatatgttggctgaatattttggcaccataggcttgctaaagaaggacaaaaggactgggcgtccaaaaatttggatatacagggacaaagttactaatgaaccaaagggtgatgcaacagtcacctatgaggatccacatgctgcttcagctgctgtggaatggttcgataacaaggatttccatgggagcactattcaggttcacatagctgagtcaaaaagcaaagatgcattcgataaccccacaagtttgaacatcattggtggtgttggtgaacaagatgaactggataatggagcaggcagaggcagagggcgtggtgatggtccaggcaaggcttggcagcaagatggggattggatgtgtccaaatacaaggtctgttatgattgttgtggcaatgtaaattttgccttccgtggtgtttgtaatcgctgtggagctgcacgccctgctggtgctggtggaactgctgctggtggtggcggtaggggtagaggccgtggtagctctgatgcaagaggaagcagccatgctggtgctgctgttggtggtccacctggattgtttggcccgaatgattggccatgtccaatgtgtggcaacatcaactgggctaagcggaccaaatgtaatatatgtaacacctccaagcctggtaccaatgaaggtggtgtgaggggtggccgtggtggtgggtacaaagagcttgatgaagaagaactagaggaagttaaaaaacgtcggaaagaggctgaggaggatgatggagagatctatgacgaatttggcaacctgaaaaagaaatttcgctctaaagctctgcatactgaaggtgcacaggcacttcctgggtctggacgtgctggatgggaagttgagcatcgtggtcctagtgaaagggaaggcagggagaggagcagggatcgtgttagggatgactactatgaaaaggaaaccaggggcagagatagaggtgatcttggaagggaccagcgccggagcaggagtcgaagcagagaccgtgaaagggaaaggagggagaggagaagagaacatgattatgagagaagggagcgtgaccgggatcgggaccgccgccataggtgaagatagaaataacaaggctttctgttcgtacactgcatttgccaatttttgtagccatgcgacccgtggtcttgtgttagtaactgggggcgtgcgttgttgctctgaatctgatttttgctttgaatgattcgctgcactggcattttattcagatattctgtttcttctgtgattacttttatgtttgtggaacacatatgacactcacggatccactgtcatgcccatcttgagctagaagagtcattgat

SEQ ID NO: 222249 - DNA, 1606 bp, Zea Mays
aaaattccaaatttgttgttgtacacacggcacaccctaaccaaaacatcctgccgtttcccgttcacccagcgtgcgctccatcttggcgaggccgcgagggcgaccgctacagcagcagccgccgccgccgccagatccccaggccttcgttgaacccttcgccgtaacgagatcagatggctgggtatatgtcaagagggccccaaaatggttctgtgtatgtctgcaatctacctcctggaactgatgaaaatatgttggctgaatattttggcaccataggcttgctaaagaaggacaaaaggactgggcgtccaaaaatttggatatacagggacaaagttactaatgaaccaaagggtgatgcaacagtcacctatgaggatccacatgctgcttcagctgctgtggaatggttcgataacaaggatttccatgggagcactattcaggttcacatagctgagtcaaaaagcaaagatgcattcgataaccccacaagtttgaacatcattggtggtgttggtgaacaagatgaactggataatggagcaggcagaggcagagggcgtggtgatggtccaggcaaggcttggcagcaagatggggattggatgtgtccaaatacaagttgtggcaatgtaaattttgccttccgtggtgtttgtaatcgctgtggagctgcacgccctgctggtgctggtggaactgctgctggtggtggcggtaggggtagaggccgtggtagctctgatgcaagaggaagcagccatgctggtgctgctgttggtggtccacctggattgtttggcccgaatgattggccatgtccaatgtgtggcaacatcaactgggctaagcggaccaaatgtaatatatgtaacacctccaagcctggtaccaatgaaggtggtgtgaggggtggccgtggtggtgggtacaaagagcttgatgaagaagaactagaggaagttaaaaaacgtcggaaagaggctgaggaggatgatggagagatctatgacgaatttggcaacctgaaaaagaaatttcgctctaaagctctgcatactgaaggtgcacaggcacttcctgggtctggacgtgctggatgggaagttgagcatcgtggtcctagtgaaagggaaggcagggagaggagcagggatcgtgttagggatgactactatgaaaaggaaaccaggggcagagatagaggtgatcttggaagggaccagcgccggagcaggagtcgaagcagagaccgtgaaagggaaaggagggagaggagaagagaacatgattatgagagaagggagcgtgaccgggatcgggaccgccgccataggtgaagatagaaataacaaggctttctgttcgtacactgcatttgccaatttttgtagccatgcgacccgtggtcttgtgttagtaactgggggcgtgcgttgttgctctgaatctgatttttgctttgaatgattcgctgcactggcattttattcagatattctgtttcttctgtgattacttttatgtttgtggaacacatatgacactcacggatccactgtcatgcccatcttgagctagaagagtcattgat

SEQ ID NO: 222250 - DNA, 1292 bp, Zea Mays
ctgttctgcgcctccacaaggctttggcctctgttgtaagatggatgcgaccactcccaagtattccaaggcccgttacgatgagattgtgaaggaagtttcatcctacctcaagaagggtccaaccctgcttgaggctcttgaccagatcaccgagcccaagaggccttcagacaagcccctgcgtctgcccctccaggatgtgtacaagattggtggtattggaactgttccggttggtcgtgtggagactggtgtcatcaagcctggaatggttgtcaccttcggtccaactggcctgaccactgaggtgaagtctgttgagatgcaccacgaggctctccaggaggcccttcctggtgacaacgttggcttcaatgtgaagaacgttgctgtgaaggatctcaaacgtgggtacgtggcctccaactctaaggatgaccctgccaaggaggctgctagcttcacctcccaagtcatcatcatgaaccaccctgggcagattggcaatggctatgccccagtgctggactgccacacctcccacattgctgtcaagtttgctgagctcataaccaagatcgataggcggtctggcaaggagcttgagaaggagcccaagttcctgaagaatggtgatgccggtatggtgaagatgattcccactaagcccatggtggttgagaccttctctcagtatcctcctctgggtcgttttgctgtccgtgacatgaggcagacggttgctgttggagtcatcaagagcgtggagaagaaggacccaactggtgccaaggtgaccaaggctgcaataaagaagaaatgatgcgtcctcccatgtgccctcgtttattttgtacttgtgcccgtatacttcgatctgttaaaatctattggttgtgtgccctgtgtctgttgtttgggtatctatactgttattttgagacatgttgacttgcatggtcatctggattgggttcgcatttctgagtcatttgtcttgacatgaaaatcttgctttttttcttgatcttaaaatctaggttgtctttgttgcggggttgattctaatattaaaggggacatttgggattttgcccatgacatcgttccctcgctaaaaatttaatttgtgggttcgtctatgcctatgaatcgagggtctgggcaaaattctgaagctcagtgtctttgaaggaatatgtgctcttgaattgcaagttctgtatatgacatgataaatctgattgttttcttgtagcgaaaacagcaattctgccagtggattagca

SEQ ID NO: 222251 - DNA, 1884 bp, Zea Mays
gtctgctccgggctgctgttctgcgcctccacaaggctttggcctctgttgtaagatctgctttatttccaccctactaatgtgtaccaggccttttctaagctggtcacagtggttgcaacttcagatcgatatctaagctgatcactttttaagcttcacctccagccatgggtaaggagaagtcccacatcaacattgtggttattggccatgtcgactctggcaagtcaaccaccaccggccacctgatctacaagcttggaggcattgacaagcgtgtgattgagaggttcgagaaggaagccgctgaaatgaacaaacggtccttcaagtacgcttgggtgcttgacaagctcaaggctgagcgtgagagaggtatcaccattgatatcgctctgtggaagtttgagaccaccaagtactactgcactgtcattgatgcccctggacatcgcgacttcatcaagaacatgatcacgggtacctcccaggctgactgtgctgtcctgatcattgactccaccactggtggttttgaggccggtatctctaaggatggccagacccgtgagcatgctctccttgctttcacccttggggtcaagcagatgatttgctgctgcaacaagatggatgcgaccactcccaagtattccaaggcccgttacgatgagattgtgaaggaagtttcatcctacctcaagaagggtccaaccctgcttgaggctcttgaccagatcaccgagcccaagaggccttcagacaagcccctgcgtctgcccctccaggatgtgtacaagattggtggtattggaactgttccggttggtcgtgtggagactggtgtcatcaagcctggaatggttgtcaccttcggtccaactggcctgaccactgaggtgaagtctgttgagatgcaccacgaggctctccaggaggcccttcctggtgacaacgttggcttcaatgtgaagaacgttgctgtgaaggatctcaaacgtgggtacgtggcctccaactctaaggatgaccctgccaaggaggctgctagcttcacctcccaagtcatcatcatgaaccaccctgggcagattggcaatggctatgccccagtgctggactgccacacctcccacattgctgtcaagtttgctgagctcataaccaagatcgataggcggtctggcaaggagcttgagaaggagcccaagttcctgaagaatggtgatgccggtatggtgaagatgattcccactaagcccatggtggttgagaccttctctcagtatcctcctctgggtcgttttgctgtccgtgacatgaggcagacggttgctgttggagtcatcaagagcgtggagaagaaggacccaactggtgccaaggtgaccaaggctgcaataaagaagaaatgatgcgtcctcccatgtgccctcgtttattttgtacttgtgcccgtatacttcgatctgttaaaatctattggttgtgtgccctgtgtctgttgtttgggtatctatactgttattttgagacatgttgacttgcatggtcatctggattgggttcgcatttctgagtcatttgtcttgacatgaaaatcttgctttttttcttgatcttaaaatctaggttgtctttgttgcggggttgattctaatattaaaggggacatttgggattttgcccatgacatcgttccctcgctaaaaatttaatttgtgggttcgtctatgcctatgaatcgagggtctgggcaaaattctgaagctcagtgtctttgaaggaatatgtgctcttgaattgcaagttctgtatatgacatgataaatctgattgttttcttgtagcgaaaacagcaattctgccagtggattagca

SEQ ID NO: 222252 - DNA, 1880 bp, Zea Mays
ccgagtcgccgtcgtctgctccgggctgctgttctgcgcctccacaaggctttggcctctgttgtaagccatgggtaaggagaagtcccacatcaacattgtggttattggccatgtcgactctggcaagtcaaccaccaccggccacctgatctacaagcttggaggcattgacaagcgtgtgattgagaggttcgagaaggaagccgctgaaatgaacaaacggtccttcaagtacgcttgggtgcttgacaagctcaaggctgagcgtgagagaggtatcaccattgatatcgctctgtggaagtttgagaccaccaagtactactgcactgtcattgatgcccctggacatcgcgacttcatcaagaacatgatcacgggtacctcccaggctgactgtgctgtcctgatcattgactccaccactggtggttttgaggccggtatctctaaggatggccagacccgtgagcatgctctccttgctttcacccttggggtcaagcagatgatttgctgctgcaacaagatggatgcgaccactcccaagtattccaaggcccgttacgatgagattgtgaaggaagtttcatcctacctcaagaaggttggatacaaccctgacaagattgcctttgtccctatctctggttttgagggtgacaacatgattgagaggtccaccaaccttgactggtacaagggtccaaccctgcttgaggctcttgaccagatcaccgagcccaagaggccttcagacaagcccctgcgtctgcccctccaggatgtgtacaagattggtggtattggaactgttccggttggtcgtgtggagactggtgtcatcaagcctggaatggttgtcaccttcggtccaactggcctgaccactgaggtgaagtctgttgagatgcaccacgaggctctccaggaggcccttcctggtgacaacgttggcttcaatgtgaagaacgttgctgtgaaggatctcaaacgtgggtacgtggcctccaactctaaggatgaccctgccaaggaggctgctagcttcacctcccaagtcatcatcatgaaccaccctgggcagattggcaatggctatgccccagtgctggactgccacacctcccacattgctgtcaagtttgctgagctcataaccaagatcgataggcggtctggcaaggagcttgagaaggagcccaagttcctgaagaatggtgatgccggtatggtgaagatgattcccactaagcccatggtggttgagaccttctctcagtatcctcctctgggtcgttttgctgtccgtgacatgaggcagacggttgctgttggagtcatcaagagcgtggagaagaaggacccaactggtgccaaggtgaccaaggctgcaataaagaagaaatgatgcgtcctcccatgtgccctcgtttattttgtacttgtgcccgtatacttcgatctgttaaaatctattggttgtgtgccctgtgtctgttgtttgggtatctatactgttattttgagacatgttgacttgcatggtcatctggattgggttcgcatttctgagtcatttgtcttgacatgaaaatcttgctttttttcttgatcttaaaatctaggttgtctttgttgcggggttgattctaatattaaaggggacatttgggattttgcccatgacatcgttccctcgctaaaaatttaatttgtgggttcgtctatgcctatgaatcgagggtctgggcaaaattctgaagctcagtgtctttgaaggaatatgtgctcttgaattgcaagttctgtatatgacatgataaatctgattgttttcttgtagcgaaaacagcaattctgccagtggattagca

SEQ ID NO: 222253 - DNA, 2569 bp, Zea Mays
aaaaatctcccaaaagccaaaccacacccggtctccgcctccgtctctgcctcctttcccctcgcttcctcgccggctgggatcttgcggcagctacgctcgctagctctcctccaacccgccgtcggctccctccgattccagtcccgtcctgtctcgccgcttcctggccccccgcttctcacgcggagaccggtcggatttcccacctcaaacatcgccggttttatccactcccgcagacctcttcctcagggacgggattggattggtggtggatcttctcctcaggggaggcacaagatccgttcatcatcctcgtcgcctaaacttggccgctcccgctcccacgctgctgctccaccctcgccgctactagaccagaccacggaggaggagacgaagcgccatgaggcggggagccaccaaggacgacgccgcgcccgacaaggtcatgggccctctcttcccccgcctccacgtcaacgacaccctaaagggcggacctcgcgcgccacccaggaacaagatggcgctctacgagcagttcagcgtcccctcccaccgctacagcgccgccgtaccgcccgcgccttccccagcgcctccatggggcgcgcaacgacccgcctccgcggtcccgtccacgtccgccagccgttggcggcggcgatagacctatcttcccattatttcgtgtgccttcaactgaacctgttcgttcatcagatcagacgaatgccaactccaatggccagggtgccaatggtacaatagctgaatctgggaggcagaggcagtccacacatcttaagagcaaggatactaatgctgcaggaccacctgccgagggtaataattccgttgggaagaaattggctaatgatgatgattttacagttccctctgtcttgtattctggaatgcctccgcattccagccaagaaaagctcactctcttccctaccacaagcccatgtaagagtgtgcctgcaaaatattctagcactgacaagagacgcttagaaggaatggatgcttctgatgtgaaatcgaagggtccctcaggtatcaaggagaaagagccagtacaagtgaggatagacttggaagacaaagagacaactccgtcatttcaagtgctaaacgacaaaacatggagtccagacccaaagttatcttcgcacatggacaggctgaagaagcaacatgctgaagctgagagttatcagataaggaccaggaatgagaatgctgtcgagacccaaagccctccaaaaaatggagtgtcgttgttgtctaagccatatgttgataggagggaacagaatggtgattctgatctattggggcatggcctaagagagacaggtgtgaagaggaaaagatcacatcatgacgtggagcaaaacgatgatctgtctgattcctctgttgaatctttgcctggaatggagatttctccagatgatgttgtcagtgctattggtcccaagcatttttggaaagcgagaagagctattgtcaatcagcagagggtatttgctgttcaagtattcgagctgcataggttgatcaaagtgcagaagttgatcgctgcatctccacatgtacttattgagggggatccttgccttggcaaatccttggcggtgagcaagaaaaggctggctggagatgtggaaacacagcttgaatcagctaaaaacgatgatggcgtgcgaccaacgcagctagagcactcgaaagagaagactgaagcgaaccaaccttcaccatctcaagacgaacaggccgcaactaatggtgacgttgctgcctcgatgcataccccttccgacaacaaacagaagagctggtgcattcctgcacctccaagtcagtggctgattcctgttatgtccccgtctgaaggacttgtctacaaaccttataccgggcactgccctccggtgggaagtcttttggcgcccccattttttgccagctaccccacctcctcctcctccacagctgggggggatttcatgagttcggcatgtggagccaggctgatgagtgcccctgtgtacttcccgtctttcagcatgcctgcagtgtcagggtctgcagttgagcaagtgagccatgttgcagcgtcgcagcataaacggaactcgtgtagtgaagcggtgttggcatcaagggacagcgaggtgcaaggcagtagtgctagcagtccggcatcttctgaaacagcagctcaacccagggtcattagggttgttccccacacggcacgcacggcttcagagtcggcagcaaggattttccgctcaatacagatggagaggaaacaaaacgacccgtgactggcagataaaaatgaaagaacggagggagtagactaattttttgaccgataattataatgatcgccgtaaattggctggcccgcccgccttatgttttttgttcagtgtaaatatgctgtgtctgtcagaatgatatggcatctgtagctattttggttctgtcagaatcatgttgattggaattcgtcggtcggttgagtaggatgaaaattggg

SEQ ID NO: 222254 - DNA, 2501 bp, Zea Mays
aaaaatctcccaaaagccaaaccacacccggtctccgcctccgtctctgcctcctttcccctcgcttcctcgccggctgggatcttgcggcagctacgctcgctagctctcctccaacccgccgtcggctccctccgattccagtcccgtcctgtctcgccgcttcctggccccccgcttctcacgcggagaccggtcggatttcccacctcaaacatcgccggttttatccactcccgcagacctcttcctcagggacgggattggattggtggtggatcttctcctcaggggaggcacaagatccgttcatcatcctcgtcgcctaaacttggccgctcccgctcccacgctgctgctccaccctcgccgctactagaccagaccacggaggaggagacgaagcgccatgaggcggggagccaccaaggacgacgccgcgcccgacaaggtcatgggccctctcttcccccgcctccacgtcaacgacaccctaaagggcggacctcgcgcgccacccaggaacaagatggcgctctacgagcagttcagcgtcccctcccaccgctacagcgccgccgtaccgcccgcgccttccccagcgcctccatggggcgcgcaacgacccgcctccgcggtcccgtccacgtccgccagccagatcagacgaatgccaactccaatggccagggtgccaatggtacaatagctgaatctgggaggcagaggcagtccacacatcttaagagcaaggatactaatgctgcaggaccacctgccgagggtaataattccgttgggaagaaattggctaatgatgatgattttacagttccctctgtcttgtattctggaatgcctccgcattccagccaagaaaagctcactctcttccctaccacaagcccatgtaagagtgtgcctgcaaaatattctagcactgacaagagacgcttagaaggaatggatgcttctgatgtgaaatcgaagggtccctcaggtatcaaggagaaagagccagtacaagtgaggatagacttggaagacaaagagacaactccgtcatttcaagtgctaaacgacaaaacatggagtccagacccaaagttatcttcgcacatggacaggctgaagaagcaacatgctgaagctgagagttatcagataaggaccaggaatgagaatgctgtcgagacccaaagccctccaaaaaatggagtgtcgttgttgtctaagccatatgttgataggagggaacagaatggtgattctgatctattggggcatggcctaagagagacaggtgtgaagaggaaaagatcacatcatgacgtggagcaaaacgatgatctgtctgattcctctgttgaatctttgcctggaatggagatttctccagatgatgttgtcagtgctattggtcccaagcatttttggaaagcgagaagagctattgtcaatcagcagagggtatttgctgttcaagtattcgagctgcataggttgatcaaagtgcagaagttgatcgctgcatctccacatgtacttattgagggggatccttgccttggcaaatccttggcggtgagcaagaaaaggctggctggagatgtggaaacacagcttgaatcagctaaaaacgatgatggcgtgcgaccaacgcagctagagcactcgaaagagaagactgaagcgaaccaaccttcaccatctcaagacgaacaggccgcaactaatggtgacgttgctgcctcgatgcataccccttccgacaacaaacagaagagctggtgcattcctgcacctccaagtcagtggctgattcctgttatgtccccgtctgaaggacttgtctacaaaccttataccgggcactgccctccggtgggaagtcttttggcgcccccattttttgccagctaccccacctcctcctcctccacagctgggggggatttcatgagttcggcatgtggagccaggctgatgagtgcccctgtgtacttcccgtctttcagcatgcctgcagtgtcagggtctgcagttgagcaagtgagccatgttgcagcgtcgcagcataaacggaactcgtgtagtgaagcggtgttggcatcaagggacagcgaggtgcaaggcagtagtgctagcagtccggcatcttctgaaacagcagctcaacccagggtcattagggttgttccccacacggcacgcacggcttcagagtcggcagcaaggattttccgctcaatacagatggagaggaaacaaaacgacccgtgactggcagataaaaatgaaagaacggagggagtagactaattttttgaccgataattataatgatcgccgtaaattggctggcccgcccgccttatgttttttgttcagtgtaaatatgctgtgtctgtcagaatgatatggcatctgtagctattttggttctgtcagaatcatgttgattggaattcgtcggtcggttgagtaggatgaaaattggg

SEQ ID NO: 222255 - DNA, 2565 bp, Zea Mays
aaaaatctcccaaaagccaaaccacacccggtctccgcctccgtctctgcctcctttcccctcgcttcctcgccggctgggatcttgcggcagctacgctcgctagctctcctccaacccgccgtcggctccctccgattccagtcccgtcctgtctcgccgcttcctggccccccgcttctcacgcggagaccggtcggatttcccacctcaaacatcgccggttttatccactcccgcagacctcttcctcagggacgggattggattggtggtggatcttctcctcaggggaggcacaagatccgttcatcatcctcgtcgcctaaacttggccgctcccgctcccacgctgctgctccaccctcgccgctactagaccagaccacggaggaggagacgaagcgccatgaggcggggagccaccaaggacgacgccgcgcccgacaaggtcatgggccctctcttcccccgcctccacgtcaacgacaccctaaagggcggacctcgcgcgccacccaggaacaagatggcgctctacgagcagttcagcgtcccctcccaccgctacagcgccgccgtaccgcccgcgccttccccagcgcctccatggggcgcgcaacgacccgcctccgcggtcccgtccacgtccgccagccaggttggcggcggcgatagacctatcttcccattatttcgtgtgccttcaactgaacctgttcgttcatcagatcagacgaatgccaactccaatggccagggtgccaatggtacaatagctgaatctgggaggcagaggcagtccacacatcttaagagcaaggatactaatgctgcaggaccacctgccgagggtaataattccgttgggaagaaattggctaatgatgatgattttacagttccctctgtcttgtattctggaatgcctccgcattccagccaagaaaagctcactctcttccctaccacaagcccatgtaagagtgtgcctgcaaaatattctagcactgacaagagacgcttagaaggaatggatgcttctgatgtgaaatcgaagggtccctcaggtatcaaggagaaagagccagtacaagtgaggatagacttggaagacaaagagacaactccgtcatttcaagtgctaaacgacaaaacatggagtccagacccaaagttatcttcgcacatggacaggctgaagaagcaacatgctgaagctgagagttatcagataaggaccaggaatgagaatgctgtcgagacccaaagccctccaaaaaatggagtgtcgttgttgtctaagccatatgttgataggagggaacagaatggtgattctgatctattggggcatggcctaagagagacaggtgtgaagaggaaaagatcacatcatgacgtggagcaaaacgatgatctgtctgattcctctgttgaatctttgcctggaatggagatttctccagatgatgttgtcagtgctattggtcccaagcatttttggaaagcgagaagagctattgtcaatcagcagagggtatttgctgttcaagtattcgagctgcataggttgatcaaaaagttgatcgctgcatctccacatgtacttattgagggggatccttgccttggcaaatccttggcggtgagcaagaaaaggctggctggagatgtggaaacacagcttgaatcagctaaaaacgatgatggcgtgcgaccaacgcagctagagcactcgaaagagaagactgaagcgaaccaaccttcaccatctcaagacgaacaggccgcaactaatggtgacgttgctgcctcgatgcataccccttccgacaacaaacagaagagctggtgcattcctgcacctccaagtcagtggctgattcctgttatgtccccgtctgaaggacttgtctacaaaccttataccgggcactgccctccggtgggaagtcttttggcgcccccattttttgccagctaccccacctcctcctcctccacagctgggggggatttcatgagttcggcatgtggagccaggctgatgagtgcccctgtgtacttcccgtctttcagcatgcctgcagtgtcagggtctgcagttgagcaagtgagccatgttgcagcgtcgcagcataaacggaactcgtgtagtgaagcggtgttggcatcaagggacagcgaggtgcaaggcagtagtgctagcagtccggcatcttctgaaacagcagctcaacccagggtcattagggttgttccccacacggcacgcacggcttcagagtcggcagcaaggattttccgctcaatacagatggagaggaaacaaaacgacccgtgactggcagataaaaatgaaagaacggagggagtagactaattttttgaccgataattataatgatcgccgtaaattggctggcccgcccgccttatgttttttgttcagtgtaaatatgctgtgtctgtcagaatgatatggcatctgtagctattttggttctgtcagaatcatgttgattggaattcgtcggtcggttgagtaggatgaaaattggg

SEQ ID NO: 222256 - DNA, 2570 bp, Zea Mays
aaaaatctcccaaaagccaaaccacacccggtctccgcctccgtctctgcctcctttcccctcgcttcctcgccggctgggatcttgcggcagctacgctcgctagctctcctccaacccgccgtcggctccctccgattccagtcccgtcctgtctcgccgcttcctggccccccgcttctcacgcggagaccggtcggatttcccacctcaaacatcgccggttttatccactcccgcagacctcttcctcagggacgggattggattggtggtggatcttctcctcaggggaggcacaagatccgttcatcatcctcgtcgcctaaacttggccgctcccgctcccacgctgctgctccaccctcgccgctactagaccagaccacggaggaggagacgaagcgccatgaggcggggagccaccaaggacgacgccgcgcccgacaaggtcatgggccctctcttcccccgcctccacgtcaacgacaccctaaagggcggacctcgcgcgccacccaggaacaagatggcgctctacgagcagttcagcgtcccctcccaccgctacagcgccgccgtaccgcccgcgccttccccagcgcctccatggggcgcgcaacgacccgcctccgcggtcccgtccacgtccgccagccaggttggcggcggcgatagacctatcttcccattatttcgtgtgccttcaactgaacctgttcgttcatcagatcagacgaatgccaactccaatggccagggtgccaatggtacaatagctgaatctgggaggcagaggcagtccacacatcttaagagcaaggatactaatgctgcaggaccacctgccgagggtaataattccgttgggaagaaattggctaatgatgatgattttacagttccctctgtcttgtattctggaatgcctccgcattccagccaagaaaagctcactctcttccctaccacaagcccatgtaagagtgtgcctgcaaaatattctagcactgacaagagacgcttagaaggaatggatgcttctgatgtgaaatcgaagggtccctcaggtatcaaggagaaagagccagtacaagtgaggatagacttggaagacaaagagacaactccgtcatttcaagtgctaaacgacaaaacatggagtccagacccaaagttatcttcgcacatggacaggctgaagaagcaacatgctgaagctgagagttatcagataaggaccaggaatgagaatgctgtcgagacccaaagccctccaaaaaatggagtgtcgttgttgtctaagccatatgttgataggagggaacagaatggtgattctgatctattggggcatggcctaagagagacaggtgtgaagaggaaaagatcacatcatgacgtggagcaaaacgatgatctgtctgattcctctgttgaatctttgcctggaatggagatttctccagatgatgttgtcagtgctattggtcccaagcatttttggaaagcgagaagagctattgtcaatcagcagagggtatttgctgttcaagtattcgagctgcataggttgatcaagtgcagaagttgatcgctgcatctccacatgtacttattgagggggatccttgccttggcaaatccttggcggtgagcaagaaaaggctggctggagatgtggaaacacagcttgaatcagctaaaaacgatgatggcgtgcgaccaacgcagctagagcactcgaaagagaagactgaagcgaaccaaccttcaccatctcaagacgaacaggccgcaactaatggtgacgttgctgcctcgatgcataccccttccgacaacaaacagaagagctggtgcattcctgcacctccaagtcagtggctgattcctgttatgtccccgtctgaaggacttgtctacaaaccttataccgggcactgccctccggtgggaagtcttttggcgcccccattttttgccagctaccccacctcctcctcctccacagctgggggggatttcatgagttcggcatgtggagccaggctgatgagtgcccctgtgtacttcccgtctttcagcatgcctgcagtgtcagggtctgcagttgagcaagtgagccatgttgcagcgtcgcagcataaacggaactcgtgtagtgaagcggtgttggcatcaagggacagcgaggtgcaaggcagtagtgctagcagtccggcatcttctgaaacagcagctcaacccagggtcattagggttgttccccacacggcacgcacggcttcagagtcggcagcaaggattttccgctcaatacagatggagaggaaacaaaacgacccgtgactggcagataaaaatgaaagaacggagggagtagactaattttttgaccgataattataatgatcgccgtaaattggctggcccgcccgccttatgttttttgttcagtgtaaatatgctgtgtctgtcagaatgatatggcatctgtagctattttggttctgtcagaatcatgttgattggaattcgtcggtcggttgagtaggatgaaaattggg

SEQ ID NO: 222257 - DNA, 2519 bp, Zea Mays
aaaaatctcccaaaagccaaaccacacccggtctccgcctccgtctctgcctcctttcccctcgcttcctcgccggctgggatcttgcggcagctacgctcgctagctctcctccaacccgccgtcggctccctccgattccagtcccgtcctgtctcgccgcttcctggccccccgcttctcacgcggagaccggtcggatttcccacctcaaacatcgccggttttatccactcccgcagacctcttcctcagggacgggattggattggtggtggatcttctcctcaggggaggcacaagatccgttcatcatcctcgtcgcctaaacttggccgctcccgctcccacgctgctgctccaccctcgccgctactagaccagaccacggaggaggagacgaagcgccatgaggcggggagccaccaaggacgacgccgcgcccgacaaggtcatgggccctctcttcccccgcctccacgtcaacgacaccctaaagggcggacctcgcgcgccacccaggaacaagatggcgctctacgagcagttcagcgtcccctcccaccgctacagcgccgccgtaccgcccgcgccttccccagcgcctccatggggcgcgcaacgacccgcctccgcggtcccgtccacgtccgccagccaggttggcggcggcgatagacctatcttcccattatttcgtgtgccttcaactgaacctgttcgttcatcagatcagacgaatgccaactccaatggccagggtgccaatggtacaatagctgaatctgggaggcagaggcagtccacacatcttaagagcaaggatactaatgctgcaggaccacctgccgagggtaataattccgttgggaagaaattggctaatgatgatgattttacagttccctctgtcttgtattctggaatgcctccgcattccagccaagaaaagctcactctcttccctaccacaagcccatgtaagagtgtgcctgcaaaatattctagcactgacaagagacgcttagaaggaatggatgcttctgatgtgaaatcgaagggtccctcaggtatcaaggagaaagagccagtacaagtgaggatagacttggaagacaaagagacaactccgtcatttcaagtgctaaacgacaaaacatggagtccagacccaaagttatcttcgcacatggacaggctgaagaagcaacatgctgaagctgagagttatcagataaggaccaggaatgagaatgctgtcgagacccaaagccctccaaaaaatggagtgtcgttgttgtctaagccatatgttgataggagggaacagaatggtgattctgatctattggggcatggcctaagagagacaggtgtgaagaggaaaagatcacatcatgacgtggagcaaaacgatgatctgtctgattcctctgttgaatctttgcctggaatggagatttctccagatgatgttgtcagtgctattggtcccaagcatttttggaaagcgagaagagctattgtcaagtgcagaagttgatcgctgcatctccacatgtacttattgagggggatccttgccttggcaaatccttggcggtgagcaagaaaaggctggctggagatgtggaaacacagcttgaatcagctaaaaacgatgatggcgtgcgaccaacgcagctagagcactcgaaagagaagactgaagcgaaccaaccttcaccatctcaagacgaacaggccgcaactaatggtgacgttgctgcctcgatgcataccccttccgacaacaaacagaagagctggtgcattcctgcacctccaagtcagtggctgattcctgttatgtccccgtctgaaggacttgtctacaaaccttataccgggcactgccctccggtgggaagtcttttggcgcccccattttttgccagctaccccacctcctcctcctccacagctgggggggatttcatgagttcggcatgtggagccaggctgatgagtgcccctgtgtacttcccgtctttcagcatgcctgcagtgtcagggtctgcagttgagcaagtgagccatgttgcagcgtcgcagcataaacggaactcgtgtagtgaagcggtgttggcatcaagggacagcgaggtgcaaggcagtagtgctagcagtccggcatcttctgaaacagcagctcaacccagggtcattagggttgttccccacacggcacgcacggcttcagagtcggcagcaaggattttccgctcaatacagatggagaggaaacaaaacgacccgtgactggcagataaaaatgaaagaacggagggagtagactaattttttgaccgataattataatgatcgccgtaaattggctggcccgcccgccttatgttttttgttcagtgtaaatatgctgtgtctgtcagaatgatatggcatctgtagctattttggttctgtcagaatcatgttgattggaattcgtcggtcggttgagtaggatgaaaattggg

SEQ ID NO: 222258 - DNA, 1737 bp, Zea Mays
gctagacgtcgacgtcctggtgtctagacgtgaggatcagctcaacaaagataaccttgcgcatcctcctaagaagatcaagactacccagccaggttctacagaccctcaaaaccttaatcgttagatcatcgccgttctcatgaagggcttatattttacggtgagcacattcttttgctgatggagaccactgaacctctacaggatatcatgtgtgagtttcgtgctggtaagatgtctcatgagggaacacgagtggttccagacacgcgcaagggtcttgtccgcgttggtaggggtgaagagggattagtccattttcagtggcttgaccgtggacagaacatagttgaagatgatcaaatcatctttcctgatgaggcggtctttgagaaggtgacagaatctcctggagggtttacatcttgaagtttaagcaagacagcagaaaattcttcttctggatgcaggaaccaaatgctgatggggactcccagacttgcatgcaagttaatgcctacataaatcgatcattagatgctgaggctgatcttcgagtacctattgaagcagaaatgtctgaagatacggctgatgatgatatctcttccagagctgggaatctagttgagagcatgaccgctgatttggctggtgaagtgacgtctgctgctggacctgtacgcttggaggatctgcagagaattctgagtgcaatacagtcatcaggtgctgcagctgaccctgatgctggagtaggactaggagacatcttgaagcctgatctggtcttgccattaattgaggacttgcccattgaacaattggcatcacatcttccggagggtggctcatggagtcctggtgatatcgttgagcttctccaaagtcctcctttgcgccaacaattagatgcattcacccacgttctgcggactgggcagatagatcttgctcaatttggagttgaccctgacaaatataagttcacggtggtgtcgttcctggaggcattggaagactcggttggaagaggtgcttctgaagctggagacaaggatgcagaggtcgagcgaggcagtggaaatgatgccatggacgagagttgatatccgtgtactaggtgtctgaattcatacgtgacaagtcttgtgttgttgttttgggtagaacgctagctcatagtattttgggcttctggcacacagaaagcaagtttctggacaagttttggacattattgctgctgtgagatgtagtgctaggcaacagatggtctggttggtggatcatggattccatggcattgagaagcttgcaaggctagattgattgtgttctgcgggggtaaatcttgcgtggcgttttgaacgtggattggtaaacagaatagcatcttttgaacgtcggttgttccatgtccacagctgatggtggtggcctcgaatgtcgtactgtacgtccatgtcgatgattccgtcgcaggagcctactactactatatccctgttctatgtaagatatgtgtactccagtacaaacagtatatggacagctcaggatttttttatattgttctacacatacatctttagatgatttttatggatatgatgagtcaaatcttgaggttagaacattatcgaattcataacttacctccaatgacgattgtatggcccctagaatccatttatctcattgagattattgaaatctttactgctttaaaac

SEQ ID NO: 222259 - DNA, 980 bp, Zea Mays
tgctggactaggagacatcttgaagcctgatctggtcttgccattaattgaggacttgcccattgaacaattggcatcacatcttccggagggtggctcatggagtcctggtgatatcgttgagcttctccaaagtcctcctttgcgccaacaattagatgcattcacccacgttctgcggactgggcagatagatcttgctcaatttggagttgaccctgacaaatataagttcacggtggtgtcgttcctggaggcattggaagactcggttggaagaggtgcttctgaagctggagacaaggatgcagaggtcgagcgaggcagtggaaatgatgccatggacgagagttgatatccgtgtactaggtgtctgaattcatacgtgacaagtcttgtgttgttgttttgggtagaacgctagctcatagtattttgggcttctggcacacagaaagcaagtttctggacaagttttggacattattgctgctgtgagatgtagtgctaggcaacagatggtctggttggtggatcatggattccatggcattgagaagcttgcaaggctagattgattgtgttctgcgggggtaaatcttgcgtggcgttttgaacgtggattggtaaacagaatagcatcttttgaacgtcggttgttccatgtccacagctgatggtggtggcctcgaatgtcgtactgtacgtccatgtcgatgattccgtcgcaggagcctactactactatatccctgttctatgtaagatatgtgtactccagtacaaacagtatatggacagctcaggatttttttatattgttctacacatacatctttagatgatttttatggatatgatgagtcaaatcttgaggttagaacattatcgaattcataacttacctccaatgacgattgtatggcccctagaatccatttatctcattgagattattgaaatctttactgctttaaaac

SEQ ID NO: 222260 - DNA, 3652 bp, Zea Mays
atggtaaatgatccacaacccgacctttataacatgatcggatgtttgaagcagaacatgtccatgtacaacgttggcataaagaaatggcgtggactggagatccgtccgcacccgcgactgattccatttgctgatggattctcttgaaatcaagagaaaagaagattatcagatggagcccattgaaatcaaggatgatgaagagcatccgatagagatgcttgttgatcagcctcgttttctagaacctttatgtccagaggaggtcaatgaagacacacgggtataccctcgtgtaggagatgagtaccaggtgaaagttccagatctactaaccgtagaggaacagatgaaactaaggtcatcaacagtttatggcagcatggcgtttggcttcgagtaccctgtgggagtaggattagctattccagtcacatggacccaaaatagaagcagtcatataaaagaagagcggatgggatttccaggacacagttcatttccttcacaaggtgaaggttccaaccacaagagcgggaatgttctggacattttgtatcagcatggtgtttgttcagagtgtgtaaactgtaaagttgaatccgctgaacaaggtgagaaattaccaggatttgttggacaagacatgcactgcttacagaaaaggaagcttttaggttgttcttgtgtaaataggaaacttactgattcttttccattgcctgggatgacaagatactcctggactgatgaagaggcacagatttttcttcttggtctctacagttttgggaaaaatcttgtccaggtgacaagatttactgaaactaagacgatgggagaagttttgtcatactactatggagaatttttcaggtctgatgcatacagacgatgggctgtatgtagaaaagcaagaagcaggaggtgtatttttgggctgcgtatattttctggtccaaggcagcaggaattgttgtcccgtttgcttgctggtgtagctagagaagttgaagctcctttgttggagaatgtattcaccttttcctctaagaagctcctgaatttttatctagcagctcattgcatcaattttattttgaccttaagatccacagttggtgctcaggttcttgtacaagcaattggaattggcaaaggaaaatatgacctgacaggatttgcattagatcctagtagaaatcatggtatctcagcacgcccagaaatccctgttggcaaggcttgctcagcactttcatctggagatatcataaagtttttgactggtgatttcagaatgagcaaggcaagatcgaatgatctattctgggaggctgtttggcctcgcttgctttcaagaggctggcattcagagcagcctaaggattcttcaccaattggaaaacatgctttagtctttctgattccaggtgtaaagaaattctctagaaaaaagcttgtcaagggaaatcattattttgattctgttagtgatgtcttgagcaaaattgcatctgaaccaaggctgcttgaatttggagttgagcgtggtaatgatgaaagtgtcattaagcatgaaaatggatggagccatgattctgaacctgacagaaacatacttcctaacaagaaaccttcatgctataaccgtcccactgagcctggctgttctccagagctaatgaaatttactgtggtggataccagtcttgttcaaggggaagaaccttccaaggtgaggtcactaagaaacctaccaacagattctagccatggttacatgtcttcaccacattgtggaggctctggaagtgacagttcagaggaacactcagattctgaggacagctctcggtcttgtgaacatataatcactgatgatcgaagcacaaccaatgcaaagtatgctagtgatgagagaaaaagtaagcccccaacagctgataaggtggattctagtgtaattcagaagtctgcttcctcaggcacattagtgtcgattaatggtcatatttcaactgatcaaggtttcagcacaatgaataatgtatcctcttcaaatgcaactattcttcctgttgatgttcaaatggtccatgctcctactacttccactgaaataagctttcagtttgatcaaaggcttaatgctgagtcccaaattttcttagcgcctttttcaaagaggaggaggttggtttcatccaagactgaaagaactggtcgcaagaataccaccaccattgaaaaccattactggaagcaagttgacgagccagtgcatcatgatgcatctggagaaaatgaagcaagcggacccaaagcttttgtatggggtgcaactcctagctcatcaactaacatttcctttgaagtgaataacaagaaaccgtactgcagacagcttgacaatgtgctccctaacgctgaaacaatggtttacaaggaaacatgccaaaataggcatgtcattgatcttaatatcccacaaatgccttctgattttgagtcaactgtgagctacatcgtccctccatctgacaaaaatgcagaaaccacaatcagacctatacgtacttctggagctgaggaggtgactgaccgtgttccagacatagaggcctctagtgatgtgctctatgatgagttttctttcaactcaagaagacatagtagcagaagccgcccaccaacagctcgagctttggaagctcttgcctgtggctttcttggaaccaaacagaagggcagggagacaagtttcccatcttcaagcaggagcagcagacctgttcggcgaccacgaagatcacctgatgttgcacggccatttccttctgaaggcaaagaatgcacttctcgtttccctgatccacccatggatgtcaatgcatggcagatgaataattctccataccaaatgattcatagcagctcctccgataaatccacagaaaaaggtagccctgacttgtttggagcagacaagtctaccgataaaggagttcatgaattgtatggcataccttagatcacatgtaaggtcgatcatatcctgctatatcttttgattaatcaacctttattgaatggattggctgctggttaagagagtgaagtgatggtatggtcaagatgcagcctgcagttaagtcatgggtactgcttgttcaaactttagtttgttgttgagaaacaaatggaagaagcttatacagctgaggtttctgtttcatctatagttttgtgcatgtacattgcctaaatattccagcatcgatacttaacaagaatagatgacaccaacgaactacaaagatgtgatcgacgattgctttcgcatcggcgcttcagcttccagtagcttgtcaaactttatgtgatagaatcatgtgcttcttgtcggaagcctgtgatgaatctttgaccttttcctttgagattttatggttaagctttactgagagttatactcttgctctttattacatgtactgtgtggcggtagctgaacaagtgtaatagcgcaccgtataagaaccatacctgaactagacctgagttgagactgtttctctgtcgacaagccagaagacctaatattataagcttacttgtgaaaatgtatatgttctttgcttaccag

SEQ ID NO: 222261 - DNA, 1224 bp, Zea Mays
cctaaaaccctagtcgggcttcatacgccgccaccgcgccgcttcctccctcgccatggccctctttgctgccgcacgccgcgccgcggcctcctccgtgcccgttctcctccgtgcctccgcctcctcggggtcccaccgcagcgccgtcctgctccggcccctcgctgccgccgtggcgccgccgaagccccgcgcgatgccgttctcctcggcgcccgcgacgagacccagctccgacgccgagctactcagcgtcatcgactccgagatcaagtacgccgaggactgcgatgaccacgacagggttgaggagattccagaaaatttccctttcaaaatcagcgacgagaaggggacgaatgcagttacccttaaaagaacatatcagggtgagcagattgaggttgtggttcacatgcccagccttgtcactggagatgagcctgatcatgaccgtgatggtgaggatgaggacacggcgggagatgacaatgacgaagatgaaggccagaagcctgaacagtcaagcattcctctcacagtcactatatccaagggtgacggtcctgttcttgaattcacctgcactgcctatcctgacgaggtcatcatcgactccatgtctgtgacacaacaatcaggggatgatgaacgtgacatgattgcatatgagggtcctgatttcaatgaccttgatgagaacctgcagagggaattccacaggtacctggatctgcgtggcatttcacccaggaccacaaatttcttgcacctgtacatgatcaacaaggacagccgtgagtacctgctctggctgagaaagctgaaggatttcttcaagcagtaggtgtgaagacctgaagatcagctttatctctcttttgttcctgctagggccttctcggttattccaattccatgtggattgaagtgtattaaaatggattttgacttgttatggatttaaatcaacttaataccactcaatccacatggattattggtgaaacaaacaagccctagtcgaaattcttgttaagttggtagtttgtcagacccgaaatagagttttttggagcaaaaaaaaaaaaaaaaaaaagaagaggaagaaggtgaaagtcaatgattttataggttttattttcgtttgcaacaaatgcgtttgctgggatgtatgcgtcgactttacttcgtgtccaaaatctttttttaacatgccag

SEQ ID NO: 222262 - DNA, 1056 bp, Zea Mays
ggcaactgaatcatattgacaccgttaatgaagctgtggttagtggatggctctttttccgttatttggtcattggagcttatgttggtcttgctactatagcgggttttgtttggtggttcgtttattctgataatggccctaaattaccatattctgaattggtcaactttgattcatgttctacaaggcagacttcatattcttgcagtatatttgaggatcgtcatccatcaactgtttcaatgactgtgcttgttgtcgttgagatgtttaatgccttgaataacctaagtgaaaaccaatctctgcttgtcattcatccatggagtaacctgtggcttgttgggtctattattctgaccatgcttcttcatgtagcagtcctgtacattgaaccactatcagcccttttctctgtctctccattgtcgtgggttgagtggaaaattgttctttatctatccttccctgtaattttgattgatgaggttttgaaattcttctcaaggagaagcccacgaggtcgaagattccctttaaggttgtggagacgtgagatacttccaaaagagtcgagagacaattgattttaggcttcagcatatcagatgcatacaatgcaaagcgaaaagcttgtcttctgttagtattgagcctaattttggcaaatgttcatggatgaagatgacattgtacaaatctttatgtggctgatatctagggccgagcatcttcgagaatagagttcgcgactacacaattcattggggggggggggggggggggttctcagaatgctagttttgctcagaaaacatagagaagcttcgaaagccttctcactagttatagacggtgctacacttgtatcagaatgtcagatgcttacaaaaggatgagttcatgcaacacccctttctcccaaccaatgaaatcactgtacgcatcaggttctgtcaaattttcagggtgacagacgccgttctggtatttctgccattttatacatcgcaaaagttttgcaccttgatattgttggaaacaatggcatgt

SEQ ID NO: 222263 - DNA, 3019 bp, Zea Mays
gttgaagtaggagttccggctgacatgagaatggttgaaatgttaagccaccaattgcgtgttgatcaagcaattcttacaggagaaagctgttcagtggcaaaagaggttgaatcaactccagcaatgaatgctgtctaccaggacaaaacaaacattcttttttcgggcactgttgttgtagctggtagagcaagagcaatcgttattgggattggttctaatactgcaatgggaagtatacgtgatgctatgctaagaacagaggatgaagcaacgccgttgaagaaaaagcttgacgagtttggtacttttttggcaaaggtgatagcaggaatctgcatacttgtttgggttgtaaatatcggacatttccgagatccttctcatggtggctttgttaggggtgccatccactattttaaggtggctgttgctcttgccgttgcggctattccagaaggtctcccagctgtggtaacaacgtgcttagctcttggtaccaagagaatggctcgcttgaacgccattgtcaggtcacttccctctgtcgagacattaggatgcacaacagtcatttgcagtgacaaaactggtacccttacaacaaacatgatgtctgtgtcaaaggtgtgtgttgtgcggtctgtgcaccagagaccaatgactgatgagtactccattagtgggacaacatttgctcctgatggttttatttatgatgctgatgggttgcagttagagtttccccctcaatcaccatgtctcctccatcttgctatgtgttcagctctttgcaacgagtccactctacaatacaatcctgataaaaaatcttatgaaaaaattggagagtccactgaagttgctctgcgtgtgctggtggagaaggttggtcttcctggttttgactcaatgccttcatccctcaacatgctaactaagcacgagcgtgcatcatactgcaaccattattgggaaaaccagtttagaaagatatctgttttagagttctcccgagaccgcaaaatgatgagtgtcctctgcagtagaaaacaccaagaaattatgttttcaaaaggtgcccctgaaagtataatggccagatgcacacatatattgtgcaatgacgatggttcttcagtaccattgactatggacattcgtaacgagttggaagctagatttcaaagttttgcagggaaagacacgctaaggtgcttagcattagcattaaaacggatgccagctggtcaacaaagtatttgttatggtgatgaggccaacctcacatttataggattggttgggatgcttgatccaccaagagaagaagtttgggatgctatccactcttgtatgtctgcagggatccgtgttatagttgttacgggggataacaagtctacagcagaatcgctgtgtcggcaaattggtgcttttgagcacttgaatgacttttcagggtattcctatacagcatcagaatttgaaggattgcctcctttggaaaggacaaacgcattacaaaggatggttctgttttcaagagtggaaccttcccataagaagatgcttgttgaagccttgcaagcacataatgaagtggttgctatgactggagatggtgtcaatgatgcacctgctctaaagaaagcggatataggaatagcaatgggatcaggaactgcagttgctaagagtgcttcagacatggttttggcggatgacaactttgccacgattgttgcagctgttgcggagggaagggccatatataataacaccaagcagtttatccgatacatgatctcatcaaatattggggaggtggtttgtatttttgtggcggcagtgcttgggatgcctgacacacttatacctgtccagctactctgggtgaaccttgttactgatggattacctgcaactgcaattggtttcaataagcctgatggcaacatcatgtcagtcaagcctcgaaaggttaatgaagctgtggttagtggatggctctttttccgttatttggtcattggagcttatgttggtcttgctactatagcgggttttgtttggtggttcgtttattctgataatggccctaaattaccatattctgaattggtcaactttgattcatgttctacaaggcagacttcatattcttgcagtatatttgaggatcgtcatccatcaactgtttcaatgactgtgcttgttgtcgttgagatgtttaatgccttgaataacctaagtgaaaaccaatctctgcttgtcattcatccatggagtaacctgtggcttgttgggtctattattctgaccatgcttcttcatgtagcagtcctgtacattgaaccactatcagcccttttctctgtctctccattgtcgtgggttgagtggaaaattgttctttatctatccttccctgtaattttgattgatgaggttttgaaattcttctcaaggagaagcccacgaggtcgaagattccctttaaggttgtggagacgtgagatacttccaaaagagtcgagagacaattgattttaggcttcagcatatcagatgcatacaatgcaaagcgaaaagcttgtcttctgttagtattgagcctaattttggcaaatgttcatggatgaagatgacattgtacaaatctttatgtggctgatatctagggccgagcatcttcgagaatagagttcgcgactacacaattcattggggggggggggggggggggttctcagaatgctagttttgctcagaaaacatagagaagcttcgaaagccttctcactagttatagacggtgctacacttgtatcagaatgtcagatgcttacaaaaggatgagttcatgcaacacccctttctcccaaccaatgaaatcactgtacgcatcaggttctgtcaaattttcagggtgacagacgccgttctggtatttctgccattttatacatcgcaaaagttttgcaccttgatattgttggaaacaatggcatgt

SEQ ID NO: 222264 - DNA, 3071 bp, Zea Mays
gttgcttttctatacttccagcaacagaacttgtcccaggagatatagttgaagtaggagttggttgcaaagttccggctgacatgagaatggttgaaatgttaagccaccaattgcgtgttgatcaagcaattcttacaggagaaagctgttcagtggcaaaagaggttgaatcaactccagcaatgaatgctgtctaccaggacaaaacaaacattcttttttcgggcactgttgttgtagctggtagagcaagagcaatcgttattgggattggttctaatactgcaatgggaagtatacgtgatgctatgctaagaacagaggatgaagcaacgccgttgaagaaaaagcttgacgagtttggtacttttttggcaaaggtgatagcaggaatctgcatacttgtttgggttgtaaatatcggacatttccgagatccttctcatggtggctttgttaggggtgccatccactattttaaggtggctgttgctcttgccgttgcggctattccagaaggtctcccagctgtggtaacaacgtgcttagctcttggtaccaagagaatggctcgcttgaacgccattgtcaggtcacttccctctgtcgagacattaggatgcacaacagtcatttgcagtgacaaaactggtacccttacaacaaacatgatgtctgtgtcaaaggtgtgtgttgtgcggtctgtgcaccagagaccaatgactgatgagtactccattagtgggacaacatttgctcctgatggttttatttatgatgctgatgggttgcagttagagtttccccctcaatcaccatgtctcctccatcttgctatgtgttcagctctttgcaacgagtccactctacaatacaatcctgataaaaaatcttatgaaaaaattggagagtccactgaagttgctctgcgtgtgctggtggagaaggttggtcttcctggttttgactcaatgccttcatccctcaacatgctaactaagcacgagcgtgcatcatactgcaaccattattgggaaaaccagtttagaaagatatctgttttagagttctcccgagaccgcaaaatgatgagtgtcctctgcagtagaaaacaccaagaaattatgttttcaaaaggtgcccctgaaagtataatggccagatgcacacatatattgtgcaatgacgatggttcttcagtaccattgactatggacattcgtaacgagttggaagctagatttcaaagttttgcagggaaagacacgctaaggtgcttagcattagcattaaaacggatgccagctggtcaacaaagtatttgttatggtgatgaggccaacctcacatttataggattggttgggatgcttgatccaccaagagaagaagtttgggatgctatccactcttgtatgtctgcagggatccgtgttatagttgttacgggggataacaagcagaatcgctgtgtcggcaaattggtgcttttgagcacttgaatgacttttcagggtattcctatacagcatcagaatttgaaggattgcctcctttggaaaggacaaacgcattacaaaggatggttctgttttcaagagtggaaccttcccataagaagatgcttgttgaagccttgcaagcacataatgaagtggttgctatgactggagatggtgtcaatgatgcacctgctctaaagaaagcggatataggaatagcaatgggatcaggaactgcagttgctaagagtgcttcagacatggttttggcggatgacaactttgccacgattgttgcagctgttgcggagggaagggccatatataataacaccaagcagtttatccgatacatgatctcatcaaatattggggaggtggtttgtatttttgtggcggcagtgcttgggatgcctgacacacttatacctgtccagctactctgggtgaaccttgttactgatggattacctgcaactgcaattggtttcaataagcctgatggcaacatcatgtcagtcaagcctcgaaaggttaatgaagctgtggttagtggatggctctttttccgttatttggtcattggagcttatgttggtcttgctactatagcgggttttgtttggtggttcgtttattctgataatggccctaaattaccatattctgaattggtcaactttgattcatgttctacaaggcagacttcatattcttgcagtatatttgaggatcgtcatccatcaactgtttcaatgactgtgcttgttgtcgttgagatgtttaatgccttgaataacctaagtgaaaaccaatctctgcttgtcattcatccatggagtaacctgtggcttgttgggtctattattctgaccatgcttcttcatgtagcagtcctgtacattgaaccactatcagcccttttctctgtctctccattgtcgtgggttgagtggaaaattgttctttatctatccttccctgtaattttgattgatgaggttttgaaattcttctcaaggagaagcccacgaggtcgaagattccctttaaggttgtggagacgtgagatacttccaaaagagtcgagagacaattgattttaggcttcagcatatcagatgcatacaatgcaaagcgaaaagcttgtcttctgttagtattgagcctaattttggcaaatgttcatggatgaagatgacattgtacaaatctttatgtggctgatatctagggccgagcatcttcgagaatagagttcgcgactacacaattcattggggggggggggggggggggttctcagaatgctagttttgctcagaaaacatagagaagcttcgaaagccttctcactagttatagacggtgctacacttgtatcagaatgtcagatgcttacaaaaggatgagttcatgcaacacccctttctcccaaccaatgaaatcactgtacgcatcaggttctgtcaaattttcagggtgacagacgccgttctggtatttctgccattttatacatcgcaaaagttttgcaccttgatattgttggaaacaatggcatgt

SEQ ID NO: 222265 - DNA, 3348 bp, Zea Mays
cccttttggaagttagttctgaagcagtttgatgatttactcgtcaaaatattgatagcagctgctgtgatctcgttccttttggcccggatgaatggtgaaactggattatcagcatttttggaaccttcggttatctttatgatactggcagcaaatgcagctgtgggtgtgattacagaaacgaatgctgaaaaagctcttgaggttgcttttctatacttccagcaacagaacttgtcccaggagatatagttgaagtaggagttggttgcaaagttccggctgacatgagaatggttgaaatgttaagccaccaattgcgtgttgatcaagcaattcttacaggagaaagctgttcagtggcaaaagaggttgaatcaactccagcaatgaatgctgtctaccaggacaaaacaaacattcttttttcgggcactgttgttgtagctggtagagcaagagcaatcgttattgggattggttctaatactgcaatgggaagtatacgtgatgctatgctaagaacagaggatcctcacccctcgatttatatggtgattattctgctcacagttaaaaatctcacaatattacaggaagcaacgccgttgaagaaaaagcttgacgagtttggtacttttttggcaaaggtgatagcaggaatctgcatacttgtttgggttgtaaatatcggacatttccgagatccttctcatggtggctttgttaggggtgccatccactattttaaggtggctgttgctcttgccgttgcggctattccagaaggtctcccagctgtggtaacaacgtgcttagctcttggtaccaagagaatggctcgcttgaacgccattgtcaggtcacttccctctgtcgagacattaggatgcacaacagtcatttgcagtgacaaaactggtacccttacaacaaacatgatgtctgtgtcaaaggtgtgtgttgtgcggtctgtgcaccagagaccaatgactgatgagtactccattagtgggacaacatttgctcctgatggttttatttatgatgctgatgggttgcagttagagtttccccctcaatcaccatgtctcctccatcttgctatgtgttcagctctttgcaacgagtccactctacaatacaatcctgataaaaaatcttatgaaaaaattggagagtccactgaagttgctctgcgtgtgctggtggagaaggttggtcttcctggttttgactcaatgccttcatccctcaacatgctaactaagcacgagcgtgcatcatactgcaaccattattgggaaaaccagtttagaaagatatctgttttagagttctcccgagaccgcaaaatgatgagtgtcctctgcagtagaaaacaccaagaaattatgttttcaaaaggtgcccctgaaagtataatggccagatgcacacatatattgtgcaatgacgatggttcttcagtaccattgactatggacattcgtaacgagttggaagctagatttcaaagttttgcagggaaagacacgctaaggtgcttagcattagcattaaaacggatgccagctggtcaacaaagtatttgttatggtgatgaggccaacctcacatttataggattggttgggatgcttgatccaccaagagaagaagtttgggatgctatccactcttgtatgtctgcagggatccgtgttatagttgttacgggggataacaagtctacagcagaatcgctgtgtcggcaaattggtgcttttgagcacttgaatgacttttcagggtattcctatacagcatcagaatttgaaggattgcctcctttggaaaggacaaacgcattacaaaggatggttctgttttcaagagtggaaccttcccataagaagatgcttgttgaagccttgcaagcacataatgaagtggttgctatgactggagatggtgtcaatgatgcacctgctctaaagaaagcggatataggaatagcaatgggatcaggaactgcagttgctaagagtgcttcagacatggttttggcggatgacaactttgccacgattgttgcagctgttgcggagggaagggccatatataataacaccaagcagtttatccgatacatgatctcatcaaatattggggaggtggtttgtatttttgtggcggcagtgcttgggatgcctgacacacttatacctgtccagctactctgggtgaaccttgttactgatggattacctgcaactgcaattggtttcaataagcctgatggcaacatcatgtcagtcaagcctcgaaaggttaatgaagctgtggttagtggatggctctttttccgttatttggtcattggagcttatgttggtcttgctactatagcgggttttgtttggtggttcgtttattctgataatggccctaaattaccatattctgaattggtcaactttgattcatgttctacaaggcagacttcatattcttgcagtatatttgaggatcgtcatccatcaactgtttcaatgactgtgcttgttgtcgttgagatgtttaatgccttgaataacctaagtgaaaaccaatctctgcttgtcattcatccatggagtaacctgtggcttgttgggtctattattctgaccatgcttcttcatgtagcagtcctgtacattgaaccactatcagcccttttctctgtctctccattgtcgtgggttgagtggaaaattgttctttatctatccttccctgtaattttgattgatgaggttttgaaattcttctcaaggagaagcccacgaggtcgaagattccctttaaggttgtggagacgtgagatacttccaaaagagtcgagagacaattgattttaggcttcagcatatcagatgcatacaatgcaaagcgaaaagcttgtcttctgttagtattgagcctaattttggcaaatgttcatggatgaagatgacattgtacaaatctttatgtggctgatatctagggccgagcatcttcgagaatagagttcgcgactacacaattcattggggggggggggggggggggttctcagaatgctagttttgctcagaaaacatagagaagcttcgaaagccttctcactagttatagacggtgctacacttgtatcagaatgtcagatgcttacaaaaggatgagttcatgcaacacccctttctcccaaccaatgaaatcactgtacgcatcaggttctgtcaaattttcagggtgacagacgccgttctggtatttctgccattttatacatcgcaaaagttttgcaccttgatattgttggaaacaatggcatgt

SEQ ID NO: 222266 - DNA, 1133 bp, Zea Mays
ccgacacgcacggcacgagcacgacagatcgggcgactggagtcatcgccgccgggccggtcgcggtcggatccccccgctccgcctcctctccttcgattcgttgcttcccgcttcaaatccaagccaccaccctttccttcccatggcttccgacgccccggcggagcaaccggcgacgcagcagaagcccaccagggtctcgctgtcctatgaggagatctccaagctcttctccctccccatcgctgaggcggcctccatcctcggagtctgcaccagtgtcttgaagaggatctgccgcacccacgggattgttaggtggccatatcgtaagcttgtttctgggaaagctggggatgacacaaaaggtcctgatagcgacaaagccaacgaactccttgaggtatcaaaaatcgcgaaacaaaaggctcccagtgcatcaggcccatcagtagtgtcatcaagcacttcccaaggagcggcaaagtctcaacagggcaattctaaggcaggacagttttcagtttcgccaccaacagcgacacagactatgtgcctaccaaagatggaagccatgaaccccatgaatcaacaacacatgagccatcaaagggcatgactgatgatgacgagttggactggggagcagatgaagcggaagctgaagctgatggcactgttacggcagaggcatcggcacagctgtgctcgctgagaaggaaagcagtagatgacgggcgcaaactattgaatggtcacaaccgcaggggccaagaattctctaggctgaacaaaaggcagaagacagcgctagcccaggtatttggggcttcactgccagaatgttgtattactcgtgtctagtgagtgaagaacaactgtagctgtgttttccctccttctccagaccctcatgtaatctgacccgttattagcgagaagtgtgaaatcttctcactgaattgaagaatggcaggagcttgttttgtcttccttatcaacaagttgttgctgccgcttttgtctacgtattttctctcatctcccatgtgtgtacgaggagagcaccttatgttatatctgtgaatgcagtcaaaactgttaaacacttgcacaaaaaactagcaaag

SEQ ID NO: 222267 - DNA, 5225 bp, Zea Mays
aaagaaacaaaagtatgcctagtttccattaaagggtctttcatgtctacaacataaaaactcgacctgcagggataagacaaccctcgagtattgtattaagaaaaatactttctcacacctcccccgaacctctacccttcccatacatagcggcatcgaagcccatgtgagaacgaccgcaaccgatgccgggccttaggcctgtgctttagcgtgggacagacgaccacctaaccaacttaagaaaaaagccttatgtacaacactaaaaaacttgacttctcatgttaaggtagggaagtacatacagcttttgacaaccttcgtcggtggctttatcatcggattcattagaggctggatgctggcccttgttatgctcgcgtgcatacctccaagcattttatcctttgcaacagtctcccggttgcgagctcaaatatctcgaaagaggcaagaatcatatgaagatgcagggaatattgtcgagcaaaccattggagcaataagaacagttgtatctttcaatggagagaagaaagcaattgcaatgtacaacaatcacataaaaaaggcatacaaggctacaatcatggaagggatcatcactggtcttggagtaggctccatattttttgttgtcttcagcagttactctctagctttctggtatggtgccaagttaatcatcagcaaaggatatactggagggcaggtcatcaatatcgtatttgcaatcttagttggctcaatgtgagttttgtaactgtgaactacatatgaaataaatggtagtagaaaagtactcttagactctttgattgaaactgaatcggtattcgataatttttttctcgaacacgcaggagagctgcataaaattatattaagagaggaaaggtccaaaatggaccgaaatacaattattcgataaaaattaacctaaccatttttagattttgacattaaggtttgattatttgggaacagggctataggtactgcatcaccatctatttctgcaattgcagaagggcagtctgcagcacaaagattgtttgagattatcaacagaaaaccaaatattgacattaacgacacttccggaatagtattagaagatatcgagggagatgttgagctcaaggatgtgttctttaggtaccctgcaaggcctgagcagttgatacttgatggcctgtgcctgcaagtacctagtggtactacaatggctatagttggggagagcggaagtggtaaatccacagtgattagtatggtggagagattttatgacccacaggctggtgaagtgttggtagatggagtcaacatcaaaagtctgcaactccaatggttaagaggaaagataagtcttgtcagccaagaaccattgctttttatgacctccatcaaggataacataacctatggtaaagcggatgctacaattgaagagatcaagagagcagctgagcttgcaaatgcagcaaccttcattgaaaagctgcctgacgcatatgagacaacggtaggtcagcatggttctcagctttctggggggcaaaagcaaaggattgccatcgcaagagcaatcctcaaaaatcccaaaattcttcttttggacgaagccacaagtgctttagatgtagagtctgaaagggtagttcaagaagcactaaataggataatggtagggagaactacactcattgttgctcaccgcttgagcaccatcaggagcgcagactgcatagcagtagttcatcaagggaaagtagttgaacgaggtgtccatgacaagctaattaaggaccctgatggagcttattctcagcttattaggttacaacaggcacatgctacagaaaggcatgaggttccagatactgacgtgtcaggttcaatctataaaagtagaagtttacctttggaacaatcaacaggcagagattctcccaggaacaaaggacatcattccttcacaaaaaccactgggctgtctaaagaattgaacaggcaagattttacagacagacaggaagaccaggaacatggtaatagcaaggctcctaagaaagcaccaattggacgactattcaaacttaataagccagaagcaccagttctcctattagctgctatagttgcctttgtgcatggtcttctgttcccctcgttcagtataatgatgtctggtggtataagaactttctactatccaccacaccaacttcgaaaagattctcggttttgggcactgacgtgccttctgtttgcagtcattgccctgatttcaatccaactggaatactttctgtttggggttgctggtgggaaacttatacaacgtgtccgctctttgtctttccagagcatagtacatcaagaagttgcttggtttgatgagccttcaaattctagtggggcccttggcgcgagactctatattgatgctttgaacatccgacgccttgtcggagataacttggccatactagtgcagtgtatagtaacaatagcggctggtttttccatagcatttgcttctgactggaaactcacgctgatcgtcatatgtgtgattcccgtaatgggctcacaaaattatattcaagtgaaattcttgaaagggttcagtgaagatgctaaggtgatgtatgaagatgcaagtcaagtcgtaaccgaggcaattggtagtattcaaacagtagcatctttctgtgcagagaagagggtaattacatcatacatccaaaaatgccaagcttcaatgaaacatggcattagaagtggaatggttggaggccttggtttcagtttatcaaacttaattatgtatctcacatatgctctttgtttctatgttggtgcactgttcgtacacgaaggaaaaacaacttttaaagacgtttttagggtaagagatacgcatttgggatcatttaaacaatgacattttgttcagcaactgactaaatttaggcaactggcaggtctattttgctctgattttcacagcttttggagtttcccaaacaagtgcaacggcaacagattcaacaaaagcccaggaatccacaatttcaatactaactattatagacaggagatctaaaatcaactcgactagtgatgaaggcgtgattatagaaaaagttgatggcaacatagatttcaggcatgtaagcttcaaatacccatcccgcccagacgtccaagtgctcagcaactttactttggccattccagcaagaaaggtactgcttgcttgatgcttgtcatcgttaattcataagttgtttgactggaggtggagggggtagttagttattcattgatcattgggagaaacaggggatgggaacttgggtggttgatcttgctaggttagtaccaagttagaccatgctagacacttcacaaaagcgttatggcaattcttgggcagcttaaataatagaaaattatcagatattggctacaaatacagtaactgtttgctacttttctcaggtaatcagtgctcattgctcaattcatcttaccttaacataagtttcagaaaagttgtgtacaggtggtacgaaattcattcagccttctgcaaaattttaagttcaaactccattttcagaaggagtagaaaaggcagacaatatgagatgaaagtaacaaaaaaaagatttactatgaattaagggtttttcccatgctatttttatctctttagaaagctcaattgcccgcaatacctgctttatactctaattgaaagtaagagctcatgtcatttgtgttcaaaaaggctggatagggtcaatcaaaatgagcctgaaaaagaatcaaaattagttcttgttttcacattttcctttatgttttgtactgatgaacttaaaactaaatttcatatgcagactgttgcacttgttggagagagtggtagtggtaagtcaacaataatttctttgctcgagagattctacgatccagattctggtacaatctcactggatggaacagaacttaaaaaactaaagctgagttggttaagagaccaaacgggcttagtgagccaagaacctgtacttttcaacaacacaattcgcacaaacatagcatatggaaaacaaggagaagtaagagaggatgagatcgttgctgcggccaaggcagcaaatgctcatgagttcatatctagcttgcctcagggatatagcactattgtcggcgagaggggaacacagctctctggaggacaaaaacaacgggttgctattgcaagggccatcttgaaggacccaaaaatacttctactcgacgaggcaacaagtgctctggatgctgaaggagagcacattgttcaagatgcactggaccaagtgatggttagcaggaccaccattgttgtggcgcaccgactgtccacaattaaaggggcagatatgatcgtagtcatgaaagatggtgaagttgctgagaaggggaagcatgaataccttgtgggaaagggtggagtttatgcatcgctggtagaactacactccaagtcagcataaggatatatgggaacttcgatggattatttggtattacaaggagagcatttgcagtaggaggtagtcatgcaacgaaaacaaatccatgtgaaacttgtcaattcatacttctggtttgttattatagggcagtgagtcttatcctaaactccatgccgacaaagatagcattggcatcaccgtatttcatatgctgcagtgcacttgattatcaataaattaatggtaaaaaggagaacaaatcaacctaatcactgagctgttattatttagtcgacgagcagaagcatttctgcgattccagagcacaagactacatgacaaatacactacaactttgcacgcattggaaagggcgagttcggatcaaatgcagctacccgtcagcgaattggttcaaaccaaaaagttcaggcgtatccagaacttaaaccggcgtacctttcgtgcgccgaggtcccctttggtcgtcatgatccaaccgacgctagcctagacttgacgttacgacggtaacggtgcccactggcgcggccaccatatctggctgctcgcttcctttccgctccccaccagcgaagacacgccgccgccgttccatagctacgccgccgcgccgcgtgcttttcccattctaccgtccgaaaacaaaatcaacgc

SEQ ID NO: 222268 - DNA, 5841 bp, Zea Mays
aagcaccagtagtgcaaacaaacagctaggatccagccatagagagagaagggattcatggctgggggagcgagacacggtagcgaggacgatgccgagacgacgacgacgaacgagggacgccgcagcagcgaccacgcagccggggccacgaccaactattcggagcacaagcagctggtgccgttccttgacatgctcaagtatgccgaccgcacggacgccgcgcttatggcggtcggcacggtggccgcggtggccaacggcatgacggagccgctcatgaccgtcgtcttcgcggccgtcatcgagtgcttcggcgccggagacgacgccaccatcctccaccgggtcagcaaggtgaaggcttgcgggcactcgcgcttgaagaactccgaaacttggagcctttgtatatacaatccagacatgctaataattcttccggtgaagttatcatgtactacatctacctgggaattggaactgcagtttcttcctttctccgtgtcatgctggacggtggctggagaaaggcagtcaacacggttgcggtcattataccttgaagctgtgctgaggcaagacattgcattctttgacgtggagatgacaactgcagaagcagcctcaagaatgtctgcggacactgtactcatccaagacgccctcggtgagaaggtagggaagtacatacagcttttgacaaccttcgtcggtggctttatcatcggattcattagaggctggatgctggcccttgttatgctcgcgtgcatacctccaagcattttatcctttgcaacagtctcccggttgcgagctcaaatatctcgaaagaggcaagaatcatatgaagatgcagggaatattgtcgagcaaaccattggagcaataagaacagttgtatctttcaatggagagaagaaagcaattgcaatgtacaacaatcacataaaaaaggcatacaaggctacaatcatggaagggatcatcactggtcttggagtaggctccatattttttgttgtcttcagcagttactctctagctttctggtatggtgccaagttaatcatcagcaaaggatatactggagggcaggtcatcaatatcgtatttgcaatcttagttggctcaatgtgagttttgtaactgtgaactacatatgaaataaatggtagtagaaaagtactcttagactctttgattgaaactgaatcggtattcgataatttttttctcgaacacgcaggagagctgcataaaattatattaagagaggaaaggtccaaaatggaccgaaatacaattattcgataaaaattaacctaaccatttttagattttgacattaaggtttgattatttgggaacagggctataggtactgcatcaccatctatttctgcaattgcagaagggcagtctgcagcacaaagattgtttgagattatcaacagaaaaccaaatattgacattaacgacacttccggaatagtattagaagatatcgagggagatgttgagctcaaggatgtgttctttaggtaccctgcaaggcctgagcagttgatacttgatggcctgtgcctgcaagtacctagtggtactacaatggctatagttggggagagcggaagtggtaaatccacagtgattagtatggtggagagattttatgacccacaggctggtgaagtgttggtagatggagtcaacatcaaaagtctgcaactccaatggttaagaggaaagataagtcttgtcagccaagaaccattgctttttatgacctccatcaaggataacataacctatggtaaagcggatgctacaattgaagagatcaagagagcagctgagcttgcaaatgcagcaaccttcattgaaaagctgcctgacgcatatgagacaacggtaggtcagcatggttctcagctttctggggggcaaaagcaaaggattgccatcgcaagagcaatcctcaaaaatcccaaaattcttcttttggacgaagccacaagtgctttagatgtagagtctgaaagggtagttcaagaagcactaaataggataatggtagggagaactacactcattgttgctcaccgcttgagcaccatcaggagcgcagactgcatagcagtagttcatcaagggaaagtagttgaacgaggtgtccatgacaagctaattaaggaccctgatggagcttattctcagcttattaggttacaacaggcacatgctacagaaaggcatgaggttccagatactgacgtgtcaggttcaatctataaaagtagaagtttacctttggaacaatcaacaggcagagattctcccaggaacaaaggacatcattccttcacaaaaaccactgggctgtctaaagaattgaacaggcaagattttacagacagacaggaagaccaggaacatggtaatagcaaggctcctaagaaagcaccaattggacgactattcaaacttaataagccagaagcaccagttctcctattagctgctatagttgcctttgtgcatggtcttctgttcccctcgttcagtataatgatgtctggtggtataagaactttctactatccaccacaccaacttcgaaaagattctcggttttgggcactgacgtgccttctgtttgcagtcattgccctgatttcaatccaactggaatactttctgtttggggttgctggtgggaaacttatacaacgtgtccgctctttgtctttccagagcatagtacatcaagaagttgcttggtttgatgagccttcaaattctagtggggcccttggcgcgagactctatattgatgctttgaacatccgacgccttgtcggagataacttggccatactagtgcagtgtatagtaacaatagcggctggtttttccatagcatttgcttctgactggaaactcacgctgatcgtcatatgtgtgattcccgtaatgggctcacaaaattatattcaagtgaaattcttgaaagggttcagtgaagatgctaaggtgaaaatattgaatttcctgcagtgaatgtaatcgtatttatgtttaaaaaagcaaaacatacctgatacttttcaaaacagatgaatatgtgcaatctttttagacaatatgcagtttttcatataatattaataactgtagatatattttgaagtttacaatcaacaaaaaaattagtaagatttaatgtcttatcaaaggtttcacctaacaactaaatgcaacaggtgatgtatgaagatgcaagtcaagtcgtaaccgaggcaattggtagtattcaaacagtagcatctttctgtgcagagaagagggtaattacatcatacatccaaaaatgccaagcttcaatgaaacatggcattagaagtggaatggttggaggccttggtttcagtttatcaaacttaattatgtatctcacatatgctctttgtttctatgttggtgcactgttcgtacacgaaggaaaaacaacttttaaagacgtttttagggtaagagatacgcatttgggatcatttaaacaatgacattttgttcagcaactgactaaatttaggcaactggcaggtctattttgctctgattttcacagcttttggagtttcccaaacaagtgcaacggcaacagattcaacaaaagcccaggaatccacaatttcaatactaactattatagacaggagatctaaaatcaactcgactagtgatgaaggcgtgattatagaaaaagttgatggcaacatagatttcaggcatgtaagcttcaaatacccatcccgcccagacgtccaagtgctcagcaactttactttggccattccagcaagaaaggtactgcttgcttgatgcttgtcatcgttaattcataagttgtttgactggaggtggagggggtagttagttattcattgatcattgggagaaacaggggatgggaacttgggtggttgatcttgctaggttagtaccaagttagaccatgctagacacttcacaaaagcgttatggcaattcttgggcagcttaaataatagaaaattatcagatattggctacaaatacagtaactgtttgctacttttctcaggtaatcagtgctcattgctcaattcatcttaccttaacataagtttcagaaaagttgtgtacaggtggtacgaaattcattcagccttctgcaaaattttaagttcaaactccattttcagaaggagtagaaaaggcagacaatatgagatgaaagtaacaaaaaaaagatttactatgaattaagggtttttcccatgctatttttatctctttagaaagctcaattgcccgcaatacctgctttatactctaattgaaagtaagagctcatgtcatttgtgttcaaaaaggctggatagggtcaatcaaaatgagcctgaaaaagaatcaaaattagttcttgttttcacattttcctttatgttttgtactgatgaacttaaaactaaatttcatatgcagactgttgcacttgttggagagagtggtagtggtaagtcaacaataatttctttgctcgagagattctacgatccagattctggtacaatctcactggatggaacagaacttaaaaaactaaagctgagttggttaagagaccaaacgggcttagtgagccaagaacctgtacttttcaacaacacaattcgcacaaacatagcatatggaaaacaaggagaagtaagagaggatgagatcgttgctgcggccaaggcagcaaatgctcatgagttcatatctagcttgcctcagggatatagcactattgtcggcgagaggggaacacagctctctggaggacaaaaacaacgggttgctattgcaagggccatcttgaaggacccaaaaatacttctactcgacgaggcaacaagtgctctggatgctgaaggagagcacattgttcaagatgcactggaccaagtgatggttagcaggaccaccattgttgtggcgcaccgactgtccacaattaaaggggcagatatgatcgtagtcatgaaagatggtgaagttgctgagaaggggaagcatgaataccttgtgggaaagggtggagtttatgcatcgctggtagaactacactccaagtcagcataaggatatatgggaacttcgatggattatttggtattacaaggagagcatttgcagtaggaggtagtcatgcaacgaaaacaaatccatgtgaaacttgtcaattcatacttctggtttgttattatagggcagtgagtcttatcctaaactccatgccgacaaagatagcattggcatcaccgtatttcatatgctgcagtgcacttgattatcaataaattaatggtaaaaaggagaacaaatcaacctaatcactgagctgttattatttagtcgacgagcagaagcatttctgcgattccagagcacaagactacatgacaaatacactacaactttgcacgcattggaaagggcgagttcggatcaaatgcagctacccgtcagcgaattggttcaaaccaaaaagttcaggcgtatccagaacttaaaccggcgtacctttcgtgcgccgaggtcccctttggtcgtcatgatccaaccgacgctagcctagacttgacgttacgacggtaacggtgcccactggcgcggccaccatatctggctgctcgcttcctttccgctccccaccagcgaagacacgccgccgccgttccatagctacgccgccgcgccgcgtgcttttcccattctaccgtccgaaaacaaaatcaacgc

SEQ ID NO: 222269 - DNA, 2634 bp, Zea Mays
gttaattgaaaataagttaggttatataatatggatagattataatcctaaacaaacattctctaactatatattcatgcactatctcaagttacaaaacactaacatatgctaatatatgtaggacatatttcgagattaatggaagcatttgcacaaaagttatacaacgggcagtattatggctgaagggctatagtcggattgataaatccttttagctggtagaattgttgatgtgcagtgatccttgtttaaccctgtgaaatggaatgtaaagttttgttaatgtgaccgatcatctggtaatagagtatggacatgcgttctgtgattaacttgtggacagaaagttaatcatttggaagttcacctttttggaggagactgaagaggaggcacaacctttttttactttacaatgtgcttaaccagtgggtctgctacgacgacggtcataaccaacaatgtgcaatttggacgtagtagtttatatgcatcaaccatttttaggtttttcggccactattctagttgaccatcagctaagcctaaagtgcatctatactcccttcactggcagttagggcctgtatgctttatcgccaggcaagatggttttactttaatatgtaggtctaatatatagctagattttcttgacagtgatagcgccggtcatgatgacattatactgatgcgttataagggagagtggacggggtcggtctcaggctctggcgttcttcgagggggcgtgatgtcctcatactcatcctcgtcgtcttcgatgtcgtcgcccctgccgcgcagcctcatcttgctgcgtgtgggggtgcaaggggcgaacgggagggcgttgaggagaaagcaaggggcgaaggggagggcggctgtgatggaggcagtggcagatccaggattaatctaagagggggctactaaattaagactaacataaaaaaaatttaaaccaaacaaaaaatataattgatatttaatatgacacaagaaacaagttataatttaaacattgaagaaatatgtagcccaaaaattcatgagtcgatacaaattctagaaatacaataatcttgcacataccgttcatgaagatttaatcatacggtattatttactttatgtagtccaaatatatgcagtgacgtagacgagatgatgcgatcaaccaatcagacggataatatatagcatgaagattgatagtaatttgaaattcaggtcggattgccgcttgaatatcgtcctcgctcgttagatctgaggttcctcgattgcaccacagtttaatttgtgcctttaaataatgctcctgtgtatcatatgttcgtctatttgcttctcaagacaaatgtgtagatataccttggataaaatcaaaagatccttcttttggcaaggtggagggccgtacaaaaagtaaataataccgtatgattaaatggaccaagatatgtaaaagtaagaagaagaaaaagaggagtaggtatgtaggatatcaggaagacgaacatgagtctcctctcgtttgtaaatggaggtggaagttggaaagaagtaagccttttgtcaagaaattataaaatccgaataaccgagcgaggggatggatccatttgtactatgaaacacagataagcaggcttgatgccagtgaaaaccaaggcgatgcaacatccactacctcagattcatctgagcatggcatcagtgaggctatccatattgaaactagattggaacatggaagtgcaacaacatcatctgttattggatctggtgatgacagggataactcatctgatagatcctctgcaggaaaaaaatacggtgactctatctggtgatgataagggcaaggaaacaggtacaaccactgaagcgtcatattccaaagaagagaaatctgagaacaacagtgtctcaactgaagcagagaactcccgaggagattcttccagtggagtgaatggttcttcagaaacgtctaccaatggtggtgagcaggtggatcccaagactgaaactagcacatccaccagtaacgagcacaatgaatctcaaggggctgatggcagttctggatcaaataactgtaacggccctgaacaaaccattgatactgctgaagtacaattgtgcatatcgcaagatcgattgtctgctatgcttattgcttatgccatgatttctcgtcaagttgtatcagaacgagtcattatagctgtacggttaatgatgcaggcccataacacaggaaaatctggaaggggcaaagttctaggaaaaaatgaggaaaggcaccgtaccccagctttcctgcagcagtccacaggcacaggcacagaccggcacgctgagtcgctgacgctggtatgatgcacatgttctccctgcagatcctaacgaggcgtgtgggcgcttgagccaccaactttcctgccgaggttttacgggccggcggcgggcgtgccgcgtgcggcagccaagccagcaggcagcagcggccagcggtcgggcctggcgctggcggcctgggcggtcgcgcctggcggcctgggcgccggtggaagacctcgctgtgaggacgcgggtgagccagggaggaacgac

SEQ ID NO: 222270 - DNA, 1207 bp, Zea Mays
cgtcagcatcctcgaggaccgtacccacctttacacagatgaagtgttgccggacatgtctgaacatgaactgggtggcctctatgccgacgagatgttatctaaggaggatgtggaaacaatgaacaacctccacaatgatgatgaagaactgccagagtcgcctactgctggaaatgatgacggggaggaagcaagcgaggctgacggtgctgacagtgtaagtggcagtggcagtgatagggtatacaccattgacaaggtgcatcaaggtgcagcaatgcctattgcaagggtcgtggataagtaccaaggggaggcagtggagccggacattaagaagctttacatgaggctggaggcactggaggccgatagggagtcgatgaggcaggcccttgtggcaatgcgcacagagaaggcacaacttgtgcttcttcgtgagattgcgcagcagcttgccaaagatggagttccagttgggccgggagctggggcggggccaggtgtacaccatttgcctagaaaacacgcagttgggattgtagaaaggagattcacagaggacaagaaggcgatacttgtgaagacattttccatggctgccttgttcaagtggatcctcgctttattgggcaagaaaaagaagctatctcaaagcaggtatacttttggcttaacaaataataatgttggtttgctcatactcttggataagtgcccacggatccagaaaaccctcacaagaacaaagttaaaccttgccgaaagaagcagcagcagctgtacaatgtaaaatagatagctttcagttgggaagattgcatttcttttgttaatgtttggtggagcgaaagttcttttgattctttagttgatgattttccgatttcccatcttttggtgatgaggattttatgcgttggtcttgcaattgttaagtcacaaaatcgctttcgcatttttctcaccaggaagaactacaatgcatgtatagtgcgcttgtaaatacactggtttagtttgcttgctgccttgcttccaggttgatgagtgaatatttatgaatgttagcttacaggtgcaaactctaaacttttgtgaaaaaatgtccttgtattcaaactaagtctgtttatgcttgtatgctcagtttttttggactggtaatcagaaatttgtgtaaaattcctgatatgaatagctg

SEQ ID NO: 222271 - DNA, 3990 bp, Zea Mays
gacataagaagcctgccatatgtggatcctctatgtctctatatgtatcggcctctcgtcacctcagtcggccgtctttggcagtggtgacttggtgttggtgagccaatgaacctctattttcccatcctgagttgagtgagttcctactcagtattgtttaattgcttatttgcacatcaggacacgtaaaatatataaaaaagcaacccaaacaattgatgattgatcattaagtcgaagatataacattttctgaattagttaactacttgtttaagtcaattttaccttaaattgtaattattatgttcaaatgttgtttatatgtgccattagttatgcatttgcacggtttaattttttttagctgatacaaatctttttagtgttatatctgttggccctactcttagagagatcctggctccgccactgctcaaggatatagatgatgcaggagtgttttgcatttttaatataaatttagaatcggataggaaaaagtcataggaagcaaatccgaatatagtgtgacattaaaacgaatattcatatgggatctttgggagtcttttttaacatcgggatccatatatccctagtgcaaatgcattgaacaaggctcataaatttggcgtcccggcagaatagaagtgcatgcttgaactaatgttttaacgagattgttttttagggctagtttagaaacttaaatcctctctaggaagttatcggaaatcttaaagaggaattaataatatatttggtttgatatcaaagtaggatgagacgggaggcgacatcgtcccctcgattttttaaaagcacgctgtcacaaaaaaattgttcggtgtttacctcgaccctgcgtgactctcatccaaacattatataaactgcagccgtcccgttttatcactccttatgcatgcaaccaaacacaccctaaatttctaaaccagcctttaataggattatagtaaatttctaaaccagcctttaataggattatagtatatcaatgtgataagctacatttgaggtgtacctaaaatcaagcaaaaagaggtagattgataagtcatgtggcgtctcgattgctagccgtagcctagttgcgtagtagcaggggggcggcatgcatgcgtacagcaaaaaccatgacctcacctttttcctttcggcgtggttctttttaataaaaaatggtgcgcagaatggcttctagtacatgccagtgccacaggtgctaaaggaggtgttttttaaaatcaaagaaatcctttgggcgccgctcatcgcatttataatctatatatattgagaagtcagagggtggggatctgtttcagagacgtcgtaccactactccgtacagatcatagatgagtcatcgatcgtatataggtgcagtcatgccgtgcgtttgtgcggcggccgctgaaaggcaacaagaccaagatgcgttctacctcgtccgaccgaccagcagctgcagacatgtgtacacaggtcaaaagagatcgatctgtgttgttcttcgcctgcatgcatatgcacaatctcaccgtacgtacgtgttgcggccttgcatgccctgccactgcacaaggacaaggacaatcgtcctcgtcgacaggagacgccacagacctgaatcagaagacaggtcgcagccagctcaaacgacccggcatgcgtgcatgcctaggcatggctgccttcgagtttgcgcagttgggcacatgaacagggcaagagcaaccacccacgcggcgtggtggcgagaaacaagcaaggcagcagcagcaagcggaactgcgacacgaaagagagctctaggctctcgcaccgaccgatcgacgtcgtcgcgagccaagattccgcacaaaaaggccggcggccacggcacacgcacacgcttttggctgccgtgttgcggtgccccgttatcccgaagccgctgccggccggttgatctcctcctcccctccgcagctccgcttatataagccctccgtgcccgcgcctcaatggagacatgcaccacgcacgcgcggcaccacatctagtagagcctgcctaccgccccactgtcgtcgtcattaattcaccaggctagagctagctagctggctctaccgccgttccccgatcgagcgtccgtcatggagattgatgagatggagagcggtgtcgtcaatggaagcggcggcggcgggtcgttccggcgggcgaggtgctgggagctgctgtgctcggcggcgggcatgctctggggcaaggtcgtcgggttcgcccgcaagctgggcaggatcgcgagggacgacccccggcgggtggcgcactccatcaaggtcggcctggcgctcacgctcgtgtccgtgctctactacgtcaggccgctcttcaacaactggggggtgtccaccatgtgggccgtgctcaccgtcgtcgtcgtcatggagtacaccgtcggtggcacgctgagcaaaggcctgaacagagcgtgcgggacgctggccgccggcttcatcgccgtcggggctcacaaggtggcctacctgtgcggcgacaaggccgagcccgtgctgctcgccgtcttcgtcttcttgctctcgtcggcggcgacgttctcgcggttcatcccggaggtgaaggcgcggtacgactacggcgtgaccatcttcatcctcaccttcagcctggtggccgtgtccagctaccgcgtcgacgagctcatccgcctcgcccaccagcgcttctccaccatcgtcgtcggcgtcggcacatgcctctgcaccaccgtcttcgtcttcccggtctgggccggggaggacctccacaggctcgccatcggaaacctcaacaagctggccgagttctttgaaggactcgagtctgaatgcttcagagagaacgccacgttcgagaatttggaagcaaaacccttcctccaagtgtacaagagcgtcctcaattccaaggccaccgaagactctttgtgcaattttgccaagtgggagccctgccatggcaagttcaagttccggcacccatggagccagtaccagaagctcggcgctctctctcgccagtgcgcttcctcaatggaggctctcgcttcctacgtcatcaccctcacaagaaccgagtaccctgaagcgcggcccgagctacgctcggaggttcgaacagcgtgccgccagatgagcctgcactcggccaaggcgctccgcgagctctcggcggcgatgcggacgatggccgtgccgccgtccccggccaacgctcacatgtccgcggcagccaaagcggccaaggacctcagggacgagctagaggacgcggacctggcgcaggcgatgcacgtcgctgttgtcgcgtctctgctctcggacctggtgaccaaggcgaagcagatcacggaatctgtcggtacccttgcgcgacttgcccgcttcgtcaagaacaacgaccatgagaacaacgctgacgacaaggatattgcggctatcgatgctgtgagctgagaaagctagcagacggtcctgtggcggcaaaaatatatcctaattaaccgtgcatccagacgttcatagctatctaattcgcacatatcgaagatcggatggctctgaacgtctagatgcatggctgcacaagttaatatggatgcacaatatatatgcgttgccggcgatcttttcggtgggacttgactagtgatgttctatatttggcgtggtggggaatacatgtatcagaagcatttggtaaatgggataaaagtaagtcgatatcaattagtacaatgctagatgcgcatgcacagcaagtgactaattcttcgatttgtacaagtcgttaattacgatgctggtggtaaaacttcactgtcttccaccaattaacctctctcggcaggccaaaaaaaaaaattgatattcttcgagatacaaggaagaaaaacaaattacatctcaa

SEQ ID NO: 222272 - DNA, 1629 bp, Zea Mays
caaaaagctactaatatgcttgtttatttggtacttgtaggttttttttctcactgacacatgtgctgttccaggtttttacagctagaagaagttggctccggtggctggagctatcctagtgattcgaccaaggatctggtgctcctactgagacattctctgcggctgcaggctgtgcatcagaaagacaggagaggggaaccagcttggcttctgccctgccgtgtagccatggagccagaaagaggcctgatcgcatatgaagggccgcctccagactcgacggacctgctgtcgagcgcgtggtgcagctcggctatccaagttcttgacacaggaggacacaaggagtgctcgatggccctggtggagcatccggtcatggcgcttggcaacgacaggaacgacgtgttggcaaagagcgaccgtagcttggtggttgacaacagcagcttcagcacggcccagtggaaatatgacgatctgaagtcgtggatatggctgcagaaggcaattcatcccgaactggactatgatctctgcctcaagaagaaatggctcccgcgcaagatgacggcgtggaacgggatctcgctcaagaagtgggtcaaggagcggaagcagaagcgcaaggaggaggcgcgcctgcagcgggccgaggtccacgccgccgtgtccgtggccggcgtggcggccgcgctcgccgccatcgccgccgagaacgccgcgccgcgccgcgcgcccgggatgagggagacggcgctggcgtccgcggccgccctggtcgcggcgcagtgcgccagggtggccgaggccgcgggcgcctcgcgcgaccaggtcgcggcggccgtcgacgccgccagggcctccacggacgacagcagcgtcatcacgctcaccgcggccgccgccacctcactgcgtggcgctgcgacgctgagaggacggcgcagcggcagcggcgggcacggccagaacgagagggcggagcacgcggggccggctctgtctcaggacgacctcgacttcgacttcaaccacgcgaggtccagggcggcgctggccaagggcgacgagatgttcgtcgcgatgccggacgggaagtggaagctccacacggtgtcggcggcgtcgaacaagcgcggcgagatcgtgctgcggatcaagaagacgaacctcgtcatggccttctcccacgcaaaagaaagcgtgatccacgacgtgcagccgtgctccccggagaagccgagcccccacgagggcgcgacatacccagtggaggtctccacgaacaagggcaaggtggagctccgcacggacgactacggcgtctacaagcggtgggttgcgacgctgagccacatgctcgtgatgtccaccgccgtctccgtctccaccaggcacgagccggcgcgccgggactgacccaccggtgcggctcttccctcgaagcaatggaccgaccccacccatcacgacgtaaacgaaaacgttgatctgtgtcgatcccatgtgtatttagtactactactgcccatgaactgtatgagtagcagtatcagcactgcaagctgcaaccaaagattcagatactgtttaaaattctgtaaattcgcatcgttttcc

SEQ ID NO: 222273 - DNA, 617 bp, Zea Mays
tgagagtactatctacgccgtatcatcgtcggaggcggcggtggtgcccgacgcggtggctggcgcggcgcccgaggtggcagtggtctgcaggggcctggagcgggaggcgcggctgatgcggtaccgggagaagcgcaagagcaggcggttcgacaagacgattcggtacgcgtcccgcaaggcctacgctgagacgcggccgcgcatcaagggccggttcgccaagcgcacgcccggggctggggcggacggcgaggagccgctggaggagcacgaggagatctactcctcggccgcggccgccgtggctgcgctcatggcccccgggggagccgacgcggactacggtgtcgtgcccactcattgatctatgcacttgcaaagccgacatgtacactagctagttagcctcgagatttggggctgtaatttttgctgcatgctctgcatgcaaaactctcgtataccattgattacctgtatgattagacatgagcggggagggggaattcattaaacagcactgatctatcacagtgttcaaacaattgctagcacaaaaaatccatgtctccataaaacagcaccagtttcaccaaatagatttagaaaat

SEQ ID NO: 222274 - DNA, 2672 bp, Zea Mays
gaatagattgacgagccagatagctagtccgttgaagcgtaagatcgtaatatatcataccagacatacttgctcgtgtatgatccacatcttttttaggatccacattgaccttatggctcctggtgcgtgtcccaagctagcgggattctagctacacgcaccaagagcacaaacaatcaaagctagcggaaggcaaatcctaggtgatcgtaatagcacgtcatttggccacacagattccgacggttatacgtacgcacaaaaccaaacccacctcgtgccgcgcttcccaatcctctcctcgggccgcttccccatctgctgggctccgcccgccattaattcctgccgttcccatccatatcaagcttccccttcaaccccaagctcgctcacaggccatatcacatggtcccgctcgagccccgccgctgacgctgacggatgtccctcgcgggtgcgggtgcggccgcgttgcggaagcccgccacgtggcggcgcccgggcggccgcggggtggcgcggaggcgcgtcgcggtcgccgccctgctcctcgcgctcgcctacgccggggggctgctcatgttcctgctcgacgagaggctatccggcggctccgtgggcggggctgcggcgggaggcctgggtccgatggtgacggtggcttcctccgtccgccgccgccgccccctccctagccccgcggacgcgccccctcatgctcagcccgggtcggtgtaccgcagccacctcgtgttcgagcgtctcttgccggccatgcgcgacgacgccacgctcgcctcctccctctccgcctcggcctcgtggcgccgcaccatgctaatgacatcacattaccaaaattctggggacccatggatgccttgtgtcaacggtaggctgactcgatcagagttgccaccctcaaatggctatctcatgatagaagcaaatggcggtctaaatcaacaacggctttctgtctgtgatgctgttgctgtggccagcttgcttaatgcaactcttgtgatcccaacatttcatctgaacagtgtctggcgtgatcctagatcatttcattgagacactcaaagaacatgtaagagttgtgaagaaacttcctgaagatgttttgctgcgcttcaatcataatatcagtagcataccaaatatgagaactaaagcctactcatctccaaaccactatgtgcaaaatgttcttccaaaactgcttgagttaggggctgtacgcatagccccattctcaaacagattagcccagtcagttccattgaacatccaggccttgaggtgtttggtaaactaccatgcattaagatttgctgaaccaataagaattctatctgatgaattggttggtcgaatgacaaaaaagagtttgttgactggtgggaagtatgtctcggtgcatcttcgcttcgaagaggtttcaagtctcttatgcattcacaattatgtcatttttccatcctacttataccgtgtatgtttcaggatatggtagccttttcatgctgtacatatgatggtggctggagggaaaaaactgaaatggacaatgctcgtgaaaggagctggagaggtaagtttcgtcggcatggtcgagtgataaaccctgaggcaaacagaagggacgggaagtgccctcttactcctttagaggttggcatgatgctaaggggcatgggattcgataatacaacctccctatatgttgcttcgggtaaaatatacaactctgaaaaatatatggctcctcttcgccagatgttccctcttttaacgacaaaggattctcttgctttgcctgaagaacttgctcaattcaaggggcattcgtctcagctagcagcgttagattacactgtctgcgtgcacagtgaagtgtttgtgacaactcaaggggggaacttccctcactttctgatggggcacaggcgctatatgtttgggggtaatgcaaagacaataaaaccagacaaacggaagctggtcttatcttttgatgatccaaatatcagatgggatcagttcaagcagaacatgcaggaaatactgcagcatagtgacatgaggagcattgcattgagaaaaccaaacgattcagtatatacattcccaatgcctgattgcatgtgtaagcaagatgggatgatataaccctgagagcatacatatgacaaatcctttttgtgtttttggttttgaaacataggtaggtttaggcaggtaggtatattgtacatttgtaacctgtaggtagtctcaccatatccatatgctagcaagagatttgttgattcatgttggttctacactttattctaatgtggtctgtatagaggtctagaggagatacatccaacacttgagagggcttctaacaaagtgagaggctgtaccttactccttgcttgtacgtgtaaaggcgtagcctaactacagaggcgaaagcaaaactttatcttgttcttggaatcttggcagttcactgttttgtttctgcagatgctgtgtgctctaggacatgcgcattaaggccattctcaatgtatagtttcatgcactgtttttaaggctattatatcaaatctgactaggaaacattgtattcagagttccatccttatgaaactctcttatatctc

SEQ ID NO: 222275 - DNA, 1892 bp, Zea Mays
gctgtatactttgttaaacaaggaacctaatgcttgcagtttaagcctctttgttccaaacaagacaggcttcgaaatcggataccatcacctggaagtcaatcactaatgacatcacattaccaaaattctggggacccatggatgccttgtgtcaacggtaggctgactcgatcagagttgccaccctcaaatggctatctcatgatagaagcaaatggcggtctaaatcaacaacggctttctgtctgtgatgctgttgctgtggccagcttgcttaatgcaactcttgtgatcccaacatttcatctgaacagtgtctggcgtgatcctagcaaatttggtgatatatttgacgaagatcatttcattgagacactcaaagaacatgtaagagttgtgaagaaacttcctgaagatgttttgctgcgcttcaatcataatatcagtagcataccaaatatgagaactaaagcctactcatctccaaaccactatgtgcaaaatgttcttccaaaactgcttgagttaggggctgtacgcatagccccattctcaaacagattagcccagtcagttccattgaacatccaggccttgaggtgtttggtaaactaccatgcattaagatttgctgaaccaataagaattctatctgatgaattggttggtcgaatgacaaaaaagagtttgttgactggtgggaagtatgtctcggtgcatcttcgcttcgaagaggatatggtagccttttcatgctgtacatatgatggtggctggagggaaaaaactgaaatggacaatgctcgtgaaaggagctggagaggtaagtttcgtcggcatggtcgagtgataaaccctgaggcaaacagaagggacgggaagtgccctcttactcctttagaggttggcatgatgctaaggggcatgggattcgataatacaacctccctatatgttgcttcgggtaaaatatacaactctgaaaaatatatggctcctcttcgccagatgttccctcttttaacgacaaaggattctcttgctttgcctgaagaacttgctcaattcaaggggcattcgtctcagctagcagcgttagattacactgtctgcgtgcacagtgaagtgtttgtgacaactcaaggggggaacttccctcactttctgatggggcacaggcgctatatgtttgggggtaatgcaaagacaataaaaccagacaaacggaagctggtcttatcttttgatgatccaaatatcagatgggatcagttcaagcagaacatgcaggaaatactgcagcatagtgacatgaggagcattgcattgagaaaaccaaacgattcagtatatacattcccaatgcctgattgcatgtgtaagcaagatgggatgatataaccctgagagcatacatatgacaaatcctttttgtgtttttggttttgaaacataggtaggtttaggcaggtaggtatattgtacatttgtaacctgtaggtagtctcaccatatccatatgctagcaagagatttgttgattcatgttggttctacactttattctaatgtggtctgtatagaggtctagaggagatacatccaacacttgagagggcttctaacaaagtgagaggctgtaccttactccttgcttgtacgtgtaaaggcgtagcctaactacagaggcgaaagcaaaactttatcttgttcttggaatcttggcagttcactgttttgtttctgcagatgctgtgtgctctaggacatgcgcattaaggccattctcaatgtatagtttcatgcactgtttttaaggctattatatcaaatctgactaggaaacattgtattcagagttccatccttatgaaactctcttatatctc

SEQ ID NO: 222276 - DNA, 2149 bp, Zea Mays
gcgggcttttgcccttttgtggcccaccacgacaagaggcaggcgagggacccccaggccccagcccgcgtccatccaccgcccgtgggaaggcagagcagtgagcgtcgcaggcatcggctccagctccggctccgcccgccgccgcaccggcccaccctcctcccccgatccgatcgccgatcaccggccctcgcttagcctcgccacgcctcgcgacaatatttggaacccctgttaccgatcgcctcatgccgtaccactgaacgatcccaccccaacaccgtacccccgccgcctcctccgccgtgcccacagtcgcctccgcctttcgcctgctaccccgtagaggctctatatcccgatcggactagggtgcggacgatggctagcaacgccgaccagcatgctgccgttgtctcggctgccccgtccgatagcccggttggggcgaagaaggctggggcggcggccgccgtctggaaactccccgcggccgcggcggttcccgtcgcggaggtggttgaaaaccccatcatggacgcacactcctggccggcgctgcccgggctgtcgtctccgccgccgccgccgccgccgcatgcggggccaacagccaaagcgtcaccgaaggccgcttctccagctcccactggggcggcgacgtcgcccgtctctttgggcaatcctggcgcgccggatgctagccatggtaacgatgctcgggtgcgcaatcctgtggcccggcgtgccctggtgatgcctgcggcggatgggctggagaagagtgcccctgcaccggaaccgtcccctgtttatgtgcctaatgcccggagcaatggtgcagatcctcatcagaatggacgtcctggctcgcatcaccatggccgaggtggtggctatggtgggggaaacaggaggggtaatggtggaggtggggggcgtcgcgggagtgagcaccacggtggttttgatgggcaacggcgcggaggtggccgcagagatggccatggaccggttcatcagctgcgtggccatcagccaacatacattaaggctcctgttgtagcaggagcacctccaccgcctccaccatttgttagccccgctactcctcagacaccaccttatggaccacctatgggcttccatgacatgtcagcgcatgtttactatttcccggcacccacctcggaaggcattcaaggcctgccttttgtgcctcttccagcaagcccccaagctgttctaattgacccttctcgaaagaaccttctggagcagatagaatactatttcagcgatgacaatttgtgcaaggacctttacttgcggcaacacatggatgggcaaggttgggtgccattatccctgatcgctggctttcgccaagtccagaaaattactaataatattcagtttatcttggaaacagtcatgctatctaacattgtggaagtgcagggagacaagctacggaggcgtggagcatgggagaattgtttcgttctgttggacttgagggggcaacgtaccatccaagcatgcctgggatgtctggtgaagctctcctgacaagatcagcaacttcagttagtctaggttaccatgcatcaaccttcggtgggctacagagcaatgggagtgaacctctctttgggccgaagtctgcaagaaatctactcaggagcgataccttttgaggctatatattcaagagaagttaagtacaatggcaggccgagttttcacagtaacggcatgcacaccttatctcaggtgagatgtaaaaacagctgttaaataaaaccaaaaaaggcaaaagcataatacaaaaaaaaagcatacacaaagacaaaaaaatacaaaatgcaaaaacaaaaataaaaagagcataggcagcttttgtgctagtactcctgtcctttgtgttatgtggtatattacctagtaggtttgttttctaatgctaggagtttgatggctcttctgtgtgaaccgagttatttaagtgttatggatggtaccattgggaaactgttgagtggacgacgttatataaaagtacatgaaaacattgttaattatgctgctctctgctgatttgtgccgcatttcttgttttggaaggtaatatcttttattaaat

SEQ ID NO: 222277 - DNA, 3814 bp, Zea Mays
cccaggccccagcccgcgtccatccaccgcccgtgggaaggcagagcagtgagcgtcgcaggcatcggctccagctccggctccgcccgccgccgcaccggcccaccctcctcccccgatccgatcgccgatcaccggccctcgcttagcctcgccacgcctcgcgacaatatttggaacccctgttaccgatcgcctcatgccgtaccactgaacgatcccaccccaacaccgtacccccgccgcctcctccgccgtgcccacagtcgcctccgcctttcgcctgctaccccgtagaggctctatatcccgatcggactagggtgcggacgatggctagcaacgccgaccagcatgctgccgttgtctcggctgccccgtccgatagcccggttggggcgaagaaggctggggcggcggccgccgtctggaaactccccgcggccgcggcggttcccgtcgcggaggtggttgaaaaccccatcatggacgcacactcctggccggcgctgcccgggctgtcgtctccgccgccgccgccgccgccgcatgcggggccaacagccaaagcgtcaccgaaggccgcttctccagctcccactggggcggcgacgtcgcccgtctctttgggcaatcctggcgcgccggatgctagccatggtaacgatgctcgggtgcgcaatcctgtggcccggcgtgccctggtgatgcctgcggcggatgggctggagaagagtgcccctgcaccggaaccgtcccctgtttatgtgcctaatgcccggagcaatggtgcagatcctcatcagaatggacgtcctggctcgcatcaccatggccgaggtggtggctatggtgggggaaacaggaggggtaatggtggaggtggggggcgtcgcgggagtgagcaccacggtggttttgatgggcaacggcgcggaggtggccgcagagatggccatggaccggttcatcagctgcgtggccatcagccaacatacattaaggctcctgttgtagcaggagcacctccaccgcctccaccatttgttagccccgctactcctcagacaccaccttatggaccacctatgggcttccatgacatgtcagcgcatgtttactatttcccggcacccacctcggaaggcattcaaggcctgccttttgtgcctcttccagcaagcccccaagctgttctaattgacccttctcgaaagaaccttctggagcagatagaatactatttcagcgatgacaatttgtgcaaggacctttacttgcggcaacacatggatgggcaaggttgggtgccattatccctgatcgctggctttcgccaagtccagaaaattactaataatattcagtttatcttggaaacagtcatgctatctaacattgtggaagtgcaggtaagcgtagtttgttaagcagatatgcttactggttagacaatggcatagatattaggcgatgtttgattcaacaaatggcaatgacaatgcaaagggaatgaataccagtggtagtgggaagggaagctttgattgtttgttttgtttgattgagtatcggatgcctaaatcattccattgatctgttacacctcaaaattgagcgcaacctggtttctgaagcatgtggacacattgccctggcaccaagatacgtcgggcattaaacaaacacaagtggttgacagtggaatctgatcacgccaataaatggccgaaccaaacagcaccttagcttcttgttatagacctagagctcatttttatctgatatgatacctataaaccaacagagtctatatcattttattgcttgtgaaaacatactcttttcctagtatgaccatggaaaatttagtacgaaactgattcaacaaggatctactgagcttacaggtttttgttgttccttgagtgtatatattctttcagttttaggtaggcagcaggtgtgaccgccccacaaaatcatctttgtggctcatgtggactagctgcaatatttttgcgggtccgaccaccaagcccagtggagtccacctcggtcctccagataactctatccatctgtgcgtgagccacaaagaaatccgttttgccatctccatgacgaactgcaggcagtggcatgccgatcctgatgccaggcttcacatctgtggcacccgcaacttgtgatctcctttctcgaaagtgataccccagatcatgacattcaggcaggcaatctacttgatcatgacatttaggcaggcaatctactactacacggtgttctggaacttggaaatacgatctatttgttctaatcctcatcttacctgtgaagcaaatgattcaatttataaatttattgttgtggtctgccctatatttcttgttggttttgatgaatctgatttgccgaagggtacaagtttgtgcggacagcactctgtttctgcttgccatgctagttataggtaaatcttccaaatgcttgaaaccaacctatttctcaatcaatatattaggccattggaccagcatccaacaatctcaaccctctagtgactgtgtgtttattcagtctccattacagcaagtctcttgattaattcatgtggttgaaagagtttttgggtggaagtcttaccagtaattactattcccattagttgttgattcaccgcagaccatttaaaaaaaaaaaagatgagtaccaaaatgggaaaacggcccttgcatttttcatgtacagttagcaatcggagaacaaaagctgagtcttatccttaatgatcaaaagcccctagcaggtgttagcattattaggttaccacatataaatgtggcgacttatcaaacaagttagctttagcaagtgcaaaatgttcacctgatgcttcgcttggtcacacattttagataatctattttgtttgcctcgtaataatatacttatgcatagcctaaaatgaggaactactgtatgtattcactaagccccttctcacttaaagcactctttcctttatgcttgaatagggagacaagctacggaggcgtggagcatgggagaattggttgcttccaaaactgaactattctgctgggagttcttctggttcgatgacccctgtgacatctaacattgatgctcttgcatctcagtttcgttctgttggacttgagggggcaacgtaccatccaagcatgcctgggatgtctggtgaagctctcctgacaagatcagcaacttcagttagtctaggttaccatgcatcaaccttcggtgggctacagagcaatgggagtgaacctctctttgggccgaagtctgcaagaaatctactcaggagcgataccttttgaggctatatattcaagagaagttaagtacaatggcaggccgagttttcacagtaacggcatgcacaccttatctcaggtgagatgtaaaaacagctgttaaataaaaccaaaaaaggcaaaagcataatacaaaaaaaaagcatacacaaagacaaaaaaatacaaaatgcaaaaacaaaaataaaaagagcataggcagcttttgtgctagtactcctgtcctttgtgttatgtggtatattacctagtaggtttgttttctaatgctaggagtttgatggctcttctgtgtgaaccgagttatttaagtgttatggatggtaccattgggaaactgttgagtggacgacgttatataaaagtacatgaaaacattgttaattatgctgctctctgctgatttgtgccgcatttcttgttttggaaggtaatatcttttattaaat

SEQ ID NO: 222278 - DNA, 2918 bp, Zea Mays
cccaggccccagcccgcgtccatccaccgcccgtgggaaggcagagcagtgagcgtcgcaggcatcggctccagctccggctccgcccgccgccgcaccggcccaccctcctcccccgatccgatcgccgatcaccggccctcgcttagcctcgccacgcctcgcgacaatatttggaacccctgttaccgatcgcctcatgccgtaccactgaacgatcccaccccaacaccgtacccccgccgcctcctccgccgtgcccacagtcgcctccgcctttcgcctgctaccccgtagaggctctatatcccgatcggactagggtgcggacgatggctagcaacgccgaccagcatgctgccgttgtctcggctgccccgtccgatagcccggttggggcgaagaaggctggggcggcggccgccgtctggaaactccccgcggccgcggcggttcccgtcgcggaggtggttgaaaaccccatcatggacgcacactcctggccggcgctgcccgggctgtcgtctccgccgccgccgccgccgccgcatgcggggccaacagccaaagcgtcaccgaaggccgcttctccagctcccactggggcggcgacgtcgcccgtctctttgggcaatcctggcgcgccggatgctagccatggtaacgatgctcgggtgcgcaatcctgtggcccggcgtgccctggtgatgcctgcggcggatgggctggagaagagtgcccctgcaccggaaccgtcccctgtttatgtgcctaatgcccggagcaatggtgcagatcctcatcagaatggacgtcctggctcgcatcaccatggccgaggtggtggctatggtgggggaaacaggaggggtaatggtggaggtggggggcgtcgcgggagtgagcaccacggtggttttgatgggcaacggcgcggaggtggccgcagagatggccatggaccggttcatcagctgcgtggccatcagccaacatacattaaggctcctgttgtagcaggagcacctccaccgcctccaccatttgttagccccgctactcctcagacaccaccttatggaccacctatgggcttccatgacatgtcagcgcatgtttactatttcccggcacccacctcggaaggcattcaaggcctgccttttgtgcctcttccagcaagcccccaagctgttctaattgacccttctcgaaagaaccttctggagcagatagaatactatttcagcgatgacaatttgtgcaaggacctttacttgcggcaacacatggatgggcaaggttgggtgccattatccctgatcgctggctttcgccaagtccagaaaattactaataatattcagtttatcttggaaacagtcatgctatctaacattgtggaagtgcaggtaagcgtagtttgttaagcagatatgcttactggttagacaatggcatagatattaggcgatgtttgattcaacaaatggcaatgacaatgcaaagggaatgaataccagtggtagtgggaagggaagctttgattgtttgttttgtttgattgagtatcggatgcctaaatcattccattgatctgttacacctcaaaattgagcgcaacctggtttctgaagcatgtggacacattgccctggcaccaagatacgtcgggcattaaacaaacacaagtggttgacagtggaatctgatcacgccaataaatggccgaaccaaacagcaccttagcttcttgttatagacctagagctcatttttatctgatatgatacctataaaccaacagagtctatatcattttattgcttgtgaaaacatactcttttcctagtatgaccatggaaaatttagtacgaaactgattcaacaaggatctactgagcttacaggtttttgttgttccttgagtgtatatattctttcagttttaggtaggcagcaggtgtgaccgccccacaaaatcatctttgtggctcatgtggactagctgcaatatttttgcgggtccgaccaccaagcccagtggagtccacctcggtcctccagataactctatccatctgtgcgtgagccacaaagaaatccgttttgccatctccatgacgaactgcaggcagtggcatgccgatcctgatgccaggcttcacatctgtggcacccgcaacttgtgatctcctttctcgaaagtgataccccagatcatgacattcagggagacaagctacggaggcgtggagcatgggagaattgtttcgttctgttggacttgagggggcaacgtaccatccaagcatgcctgggatgtctggtgaagctctcctgacaagatcagcaacttcagttagtctaggttaccatgcatcaaccttcggtgggctacagagcaatgggagtgaacctctctttgggccgaagtctgcaagaaatctactcaggagcgataccttttgaggctatatattcaagagaagttaagtacaatggcaggccgagttttcacagtaacggcatgcacaccttatctcaggtgagatgtaaaaacagctgttaaataaaaccaaaaaaggcaaaagcataatacaaaaaaaaagcatacacaaagacaaaaaaatacaaaatgcaaaaacaaaaataaaaagagcataggcagcttttgtgctagtactcctgtcctttgtgttatgtggtatattacctagtaggtttgttttctaatgctaggagtttgatggctcttctgtgtgaaccgagttatttaagtgttatggatggtaccattgggaaactgttgagtggacgacgttatataaaagtacatgaaaacattgttaattatgctgctctctgctgatttgtgccgcatttcttgttttggaaggtaatatcttttattaaat

SEQ ID NO: 222279 - DNA, 2131 bp, Zea Mays
ccaggccccagcccgcgtccatccaccgcccgtgggaaggcagagcagtgagcgtcgcaggcatcggctccagctccggctccgcccgccgccgcaccggcccaccctcctcccccgatccgatcgccgatcaccggccctcgcttagcctcgccacgcctcgcgacaatatttggaacccctgttaccgatcgcctcatgccgtaccactgaacgatcccaccccaacaccgtacccccgccgcctcctccgccgtgcccacagtcgcctccgcctttcgcctgctaccccgtagaggctctatatcccgatcggactagggtgcggacgatggctagcaacgccgaccagcatgctgccgttgtctcggctgccccgtccgatagcccggttggggcgaagaaggctggggcggcggccgccgtctggaaactccccgcggccgcggcggttcccgtcgcggaggtggttgaaaaccccatcatggacgcacactcctggccggcgctgcccgggctgtcgtctccgccgccgccgccgccgccgcatgcggggccaacagccaaagcgtcaccgaaggccgcttctccagctcccactccatggtaacgatgctcgggtgcgcaatcctgtggcccggcgtgccctggtgatgcctgcggcggatgggctggagaagagtgcccctgcaccggaaccgtcccctgtttatgtgcctaatgcccggagcaatggtgcagatcctcatcagaatggacgtcctggctcgcatcaccatggccgaggtggtggctatggtgggggaaacaggaggggtaatggtggaggtggggggcgtcgcgggagtgagcaccacggtggttttgatgggcaacggcgcggaggtggccgcagagatggccatggaccggttcatcagctgcgtggccatcagccaacatacattaaggctcctgttgtagcaggagcacctccaccgcctccaccatttgttagccccgctactcctcagacaccaccttatggaccacctatgggcttccatgacatgtcagcgcatgtttactatttcccggcacccacctcggaaggcattcaaggcctgccttttgtgcctcttccagcaagcccccaagctgttctaattgacccttctcgaaagaaccttctggagcagatagaatactatttcagcgatgacaatttgtgcaaggacctttacttgcggcaacacatggatgggcaaggttgggtgccattatccctgatcgctggctttcgccaagtccagaaaattactaataatattcagtttatcttggaaacagtcatgctatctaacattgtggaagtgcagggagacaagctacggaggcgtggagcatgggagaattggttgcttccaaaactgaactattctgctgggagttcttctggttcgatgacccctgtgacatctaacattgatgctcttgcatctcagtttcgttctgttggacttgagggggcaacgtaccatccaagcatgcctgggatgtctggtgaagctctcctgacaagatcagcaacttcagttagtctaggttaccatgcatcaaccttcggtgggctacagagcaatgggagtgaacctctctttgggccgaagtctgcaagaaatctactcaggagcgataccttttgaggctatatattcaagagaagttaagtacaatggcaggccgagttttcacagtaacggcatgcacaccttatctcaggtgagatgtaaaaacagctgttaaataaaaccaaaaaaggcaaaagcataatacaaaaaaaaagcatacacaaagacaaaaaaatacaaaatgcaaaaacaaaaataaaaagagcataggcagcttttgtgctagtactcctgtcctttgtgttatgtggtatattacctagtaggtttgttttctaatgctaggagtttgatggctcttctgtgtgaaccgagttatttaagtgttatggatggtaccattgggaaactgttgagtggacgacgttatataaaagtacatgaaaacattgttaattatgctgctctctgctgatttgtgccgcatttcttgttttggaaggtaatatcttttattaaat

SEQ ID NO: 222280 - DNA, 3679 bp, Zea Mays
atggctagcaacgccgaccagcatgctgccgttgtctcggctgccccgtccgatagcccggttggggcgaagaaggctggggcggcggccgccgtctggaaactccccgcggccgcggcggttcccgtcgcggaggtggttgaaaaccccatcatggacgcacactcctggccggcgctgcccgggctgtcgtctccgccgccgccgccgccgccgcatgcggggccaacagccaaagcgtcaccgaaggccgcttctccagctcccactggggcggcgacgtcgcccgtctctttgggcaatcctggcgcgccggatgctagccatggtaacgatgctcgggtgcgcaatcctgtggcccggcgtgccctggtgatgcctgcggcggatgggctggagaagagtgcccctgcaccggaaccgtcccctgtttatgtgcctaatgcccggagcaatggtgcagatcctcatcagaatggacgtcctggctcgcatcaccatggccgaggtggtggctatggtgggggaaacaggaggggtaatggtggaggtggggggcgtcgcgggagtgagcaccacggtggttttgatgggcaacggcgcggaggtggccgcagagatggccatggaccggttcatcagctgcgtggccatcagccaacatacattaaggctcctgttgtagcaggagcacctccaccgcctccaccatttgttagccccgctactcctcagacaccaccttatggaccacctatgggcttccatgcagacatgtcagcgcatgtttactatttcccggcacccacctcggaaggcattcaaggcctgccttttgtgcctcttccagcaagcccccaagctgttctaattgacccttctcgaaagaaccttctggagcagatagaatactatttcagcgatgacaatttgtgcaaggacctttacttgcggcaacacatggatgggcaaggttgggtgccattatccctgatcgctggctttcgccaagtccagaaaattactaataatattcagtttatcttggaaacagtcatgctatctaacattgtggaagtgcaggtaatgttttctttgtacaattattgttatatgatttctaatatgattccgtttggccaaaaaacatataggttattcactaaccatatatgtttccattaacattgcatattatttgtagaaaaatcatggttcagaccattctcattatcatctgttagtgtgagttcaccaattatttattattgattcaggtaagcgtagtttgttaagcagatatgcttactggttagacaatggcatagatattaggcgatgtttgattcaacaaatggcaatgacaatgcaaagggaatgaataccagtggtagtgggaagggaagctttgattgtttgttttgtttgattgagtatcggatgcctaaatcattccattgatctgttacacctcaaaattgagcgcaacctggtttctgaagcatgtggacacattgccctggcaccaagatacgtcgggcattaaacaaacacaagtggttgacagtggaatctgatcacgccaataaatggccgaaccaaacagcaccttagcttcttgttatagacctagagctcatttttatctgatatgatacctataaaccaacagagtctatatcattttattgcttgtgaaaacatactcttttcctagtatgaccatggaaaatttagtacgaaactgattcaacaaggatctactgagcttacaggtttttgttgttccttgagtgtatatattctttcagttttaggtaggcagcaggtgtgaccgccccacaaaatcatctttgtggctcatgtggactagctgcaatatttttgcgggtccgaccaccaagcccagtggagtccacctcggtcctccagataactctatccatctgtgcgtgagccacaaagaaatccgttttgccatctccatgacgaactgcaggcagtggcatgccgatcctgatgccaggcttcacatctgtggcacccgcaacttgtgatctcctttctcgaaagtgataccccagatcatgacattcaggcaggcaatctacttgatcatgacatttaggcaggcaatctactactacacggtgttctggaacttggaaatacgatctatttgttctaatcctcatcttacctgtgaagcaaatgattcaatttataaatttattgttgtggtctgccctatatttcttgttggttttgatgaatctgatttgccgaagggtacaagtttgtgcggacagcactctgtttctgcttgccatgctagttataggtaaatcttccaaatgcttgaaaccaacctatttctcaatcaatatattaggccattggaccagcatccaacaatctcaaccctctagtgactgtgtgtttattcagtctccattacagcaagtctcttgattaattcatgtggttgaaagagtttttgggtggaagtcttaccagtaattactattcccattagttgttgattcaccgcagaccatttaaaaaaaaaaaagatgagtaccaaaatgggaaaacggcccttgcatttttcatgtacagttagcaatcggagaacaaaagctgagtcttatccttaatgatcaaaagcccctagcaggtgttagcattattaggttaccacatataaatgtggcgacttatcaaacaagttagctttagcaagtgcaaaatgttcacctgatgcttcgcttggtcacacattttagataatctattttgtttgcctcgtaataatatacttatgcatagcctaaaatgaggaactactgtatgtattcactaagccccttctcacttaaagcactctttcctttatgcttgaatagggagacaagctacggaggcgtggagcatgggagaattggttgcttccaaaactgaactattctgctgggagttcttctggttcgatgacccctgtgacatctaacattgatgctcttgcatctcagtttcgttctgttggacttgagggggcaacgtaccatccaagcatgcctgggatgtctggtgaagctctcctgacaagatcagcaacttcagttagtctaggttaccatgcatcaaccttcggtgggctacagagcaatgggagtgaacctctctttgggccgaagtctgcaagaaatctactcaggagcgataccttttgaggctatatattcaagagaagttaagtacaatggcaggccgagttttcacagtaacggcatgcacaccttatctcaggtgagatgtaaaaacagctgttaaataaaaccaaaaaaggcaaaagcataatacaaaaaaaaagcatacacaaagacaaaaaaatacaaaatgcaaaaacaaaaataaaaagagcataggcagcttttgtgctagtactcctgtcctttgtgttatgtggtatattacctagtaggtttgttttctaatgctaggagtttgatggctcttctgtgtgaaccgagttatttaagtgttatggatggtaccattgggaaactgttgagtggacgacgttatataaaagtacatgaaaacattgttaattatgctgctctctgctgatttgtgccgcatttcttgttttggaaggtaatatcttttattaaat

SEQ ID NO: 222281 - DNA, 926 bp, Zea Mays
atttctccccttctatccgcgatcacctctcctcgctgccgcggcatcttcttctgggtcctggcccgtcctcgtcgcaccattccatggccgattcagccgcgctctccacctccctcccccgctctctggcgtccaggaggcccctctcgtcgcctctccacgccagagcccgggcccgctcccagcgccgctgccggctcggatcgcgctcgctccaccggttgcgtgctcgggcgggaaaggacgacccggaggacctctacgggccctacccctgggaccagcccttggatctcaccgctgggtccgacattcaatgggtgcctgaagacagagtcacgctattcacttctgatgggctgatccagattgggggttccttggttcctcgtcgagtttctgcttctgagaagaggcaacggaaactgaagagtggacaaaagttgcgccggtttcaggagagctcttacatggatccaaatcaaagtctttgccttggagcactatttaacatagcagcaacaaataagattatgcatctttggcttttgccgttctattgaaatgttaagcgatgtagtggaagatacggtattggagcatggcggtgaggttgtcactgcagagaaggcaagcagtaacggcctccaggagaagctaaccatgtctgttgcagtaccattgctgtggggcgttcctccagcatcagagaccctccatgtcgcggtgcggagcggtggaggtattgtcgataagatctattggcagtgggacttattctagatgtccagcattaacaaaattggttccaagatgtatatgtctctctaattttctgcacgcgttgtgcagcaactgtaaacttagtctctacctgtacagacccggtcacccttgtgcatatatataaaagaactttggga

SEQ ID NO: 222282 - DNA, 936 bp, Zea Mays
atttctccccttctatccgcgatcacctctcctcgctgccgcggcatcttcttctgggtcctggcccgtcctcgtcgcaccattccatggccgattcagccgcgctctccacctccctcccccgctctctggcgtccaggaggcccctctcgtcgcctctccacgccagagcccgggcccgctcccagcgccgctgccggctcggatcgcgctcgctccaccggttgcgtgctcgggcgggaaaggacgacccggaggacctctacgggccctacccctgggaccagcccttggatctcaccgctgggtccgacattcaatgggtgcctgaagacagagtcacgctattcacttctgatgggctgatccagattgggggttccttggttcctcgtcgagtttctgcttctgagaagaggcaacggaaactgaagagtggacaaaagttgcgccggtttcaggagagctcttacatggatccaaatcaaagtctttgccttggagcactatttaacatagcagcaacaaatacatgggcagaagattatgcatctttggcttttgccgttctattgaaatgttaagcgatgtagtggaagatacggtattggagcatggcggtgaggttgtcactgcagagaaggcaagcagtaacggcctccaggagaagctaaccatgtctgttgcagtaccattgctgtggggcgttcctccagcatcagagaccctccatgtcgcggtgcggagcggtggaggtattgtcgataagatctattggcagtgggacttattctagatgtccagcattaacaaaattggttccaagatgtatatgtctctctaattttctgcacgcgttgtgcagcaactgtaaacttagtctctacctgtacagacccggtcacccttgtgcatatatataaaagaactttggga

SEQ ID NO: 222283 - DNA, 1125 bp, Zea Mays
cttgccagctcatcgtgccacaaggcgacaaagaaatctagcccgttggtctcatcaacgagcaaccagccaacgtccgagatccaaacagtggccagcaggcaccggccaaaacgaagaagtccaccgcttggctcgcgggaatccacgacaaccacaggaaaaaggagacgaccgcgccggcgccgcccattaatttctccccttctatccgcgatcacctctcctcgctgccgcggcatcttcttctgggtcctggcccgtcctcgtcgcaccattccatggccgattcagccgcgctctccacctccctcccccgctctctggcgtccaggaggcccctctcgtcgcctctccacgccagagcccgggcccgctcccagcgccgctgccggctcggatcgcgctcgctccaccggttgcgtgctcgggcgggaaaggacgacccggaggacctctacgggccctacccctgggaccagcccttggatctcaccgctgggtccgacattcaatgggtgcctgaagacagagtcacgctattcacttctgatgggctgatccagattgggggttccttggttcctcgtcgagtttctgcttctgagaagaggcaacggaaactgaagagtggacaaaagttgcgccggtttcaggagagctcttacatggatccaaatcaaagtctttgccttggagcactatttaacatagcagcaacaaatggcctagacatgggcagaagattatgcatctttggcttttgccgttctattgaaatgttaagcgatgtagtggaagatacggtattggagcatggcggtgagagaaggcaagcagtaacggcctccaggagaagctaaccatgtctgttgcagtaccattgctgtggggcgttcctccagcatcagagaccctccatgtcgcggtgcggagcggtggaggtattgtcgataagatctattggcagtgggacttattctagatgtccagcattaacaaaattggttccaagatgtatatgtctctctaattttctgcacgcgttgtgcagcaactgtaaacttagtctctacctgtacagacccggtcacccttgtgcatatatataaaagaactttggga

SEQ ID NO: 222284 - DNA, 1374 bp, Zea Mays
aagtgagacaaggccacaagggggatggggcggcacgcgccccccggccccgccccgcgctacgtggtccatttccagtccagtctccaacaacgccggagcgcaggcgaggcgagcacgccgatcgattccgattcgcatacgcccgcccgccgcgaatggacgatgcggagtccgcctcgagggcggggaggaggcgggcggccgccgccgcggggatgaggttgttctcgccggagtactacgcgctgtgcgccggcggcgggatgctcgcggcgggcgccacccacctcgccatcaccccgctcgatgtgctcaaggtcaatatgcaggtgaatcccatgaagtataacagtatattttcaggactaaatgttcttgtgaaagaagagggaccttcgtcactttggagaggctggggagggaaattttttggctatggtgttcagggtggctgcaggtttggcctctatgagtatttcaagaagagtccgtgttcagactcagcccatgttcgctaaaggtttggttgatggctttccaagggtgtatgcaactgaaggcctatctggcttttacagggggcttttacctctttggggacggaaccttccattttctatgcttatgttttcgactttttgagcataccgtggacttcctatatcagaaagttattcaaaagaaaaaggaggactgctcaacgatccagcaacttggtgctacttgtctggctggttatatatctggtgccgtcggtactgttgtttcgaatcctgcagacaatatcgtctcatccctgtataacaaaaaggctgaaaatatcatacatgctgtgaaaagtattggatttcgcaatttgctcacaagaagcctgcccatccgaatcgctcttgtcggacccgtcataaccatgcaatggttcttctacgatacaatcaagatattaactggattgccaacgactggaggacttccgcgcgaactagaagaggctaacatataatctgaccagtttgagataggcttctcgacgcactttttggtatcgtatggacaagtatttgtctatggttctgacttactaggggaagagtatagttggtagttttcagggaagagccaattgacctgaatacatcatgcgtaaggtttctgctgctggatatggaagactgcctcgtgtcgtatgtttttccacgtcttaaacaaccttgagcttcagcacccctccaggtacagcattgtggccaggtggtgctttagtaagtgtgtttcgtaagattttgatgtatgagaaaaatgcacttgtgatgtatacacgcgaccttgaaagtaaataatccctctgaaggaccgagatttgaagtgaaa

SEQ ID NO: 222285 - DNA, 1400 bp, Zea Mays
aagtgagacaaggccacaagggggatggggcggcacgcgccccccggccccgccccgcgctacgtggtccatttccagtccagtctccaacaacgccggagcgcaggcgaggcgagcacgccgatcgattccgattcgcatacgcccgcccgccgcgaatggacgatgcggagtccgcctcgagggcggggaggaggcgggcggccgccgccgcggggatgaggttgttctcgccggagtactacgcgctgtgcgccggcggcgggatgctcgcggcgggcgccacccacctcgccatcaccccgctcgatgtgctcaaggtcaatatgcaggtgaatcccatgaagtataacagtatattttcaggactaaatgttcttgtgaaagaagagggaccttcgtcactttggagaggctggggagggaaattttttggctatggtgttcagggtggctgcagtgcctctgctcaaatcatagctgatgttggcctgtgtccgtttgaatcggtgaaagtccgtgttcagactcagcccatgttcgctaaaggtttggttgatggctttccaagggtgtatgcaactgaaggcctatctggcttttacagggggcttttacctctttggggacggaaccttccattttctatgcttatgttttcgactttttgagcataccgtggacttcctatatcagaaagttattcaaaagaaaaaggaggactgctcaacgatccagcaacttggtgctacttgtctggctggttatatatctggtgccgtcggtactgttgtttcgaatcctgcagacaatatcgtctcatccctgtataacaaaaaggctgaaaatatcatacatgctgtgaaaagtattggatttcgcaatttgctcacaagaagcctgcccatccgaatcgctcttgtcggacccgtcataaccatgcaatggttcttctacgatacaatcaagatattaactggattgccaacgactggaggacttccgcgcgaactagaagaggctaacatataatctgaccagtttgagataggcttctcgacgcactttttggtatcgtatggacaagtatttgtctatggttctgacttactaggggaagagtatagttggtagttttcagggaagagccaattgacctgaatacatcatgcgtaaggtttctgctgctggatatggaagactgcctcgtgtcgtatgtttttccacgtcttaaacaaccttgagcttcagcacccctccaggtacagcattgtggccaggtggtgctttagtaagtgtgtttcgtaagattttgatgtatgagaaaaatgcacttgtgatgtatacacgcgaccttgaaagtaaataatccctctgaaggaccgagatttgaagtgaaa

SEQ ID NO: 222286 - DNA, 1391 bp, Zea Mays
aagtgagacaaggccacaagggggatggggcggcacgcgccccccggccccgccccgcgctacgtggtccatttccagtccagtctccaacaacgccggagcgcaggcgaggcgagcacgccgatcgattccgattcgcatacgcccgcccgccgcgaatggacgatgcggagtccgcctcgagggcggggaggaggcgggcggccgccgccgcggggatgaggttgttctcgccggagtactacgcgctgtgcgccggcggcgggatgctcgcggcgggcgccacccacctcgccatcaccccgctcgatgtgctcaaggtgaatcccatgaagtataacagtatattttcaggactaaatgttcttgtgaaagaagagggaccttcgtcactttggagaggctggggagggaaattttttggctatggtgttcagggtggctgcagcagtgcctctgctcaaatcatagctgatgttggcctgtgtccgtttgaatcggtgaaagtccgtgttcagactcagcccatgttcgctaaaggtttggttgatggctttccaagggtgtatgcaactgaaggcctatctggcttttacagggggcttttacctctttggggacggaaccttccattttctatgcttatgttttcgactttttgagcataccgtggacttcctatatcagaaagttattcaaaagaaaaaggaggactgctcaacgatccagcaacttggtgctacttgtctggctggttatatatctggtgccgtcggtactgttgtttcgaatcctgcagacaatatcgtctcatccctgtataacaaaaaggctgaaaatatcatacatgctgtgaaaagtattggatttcgcaatttgctcacaagaagcctgcccatccgaatcgctcttgtcggacccgtcataaccatgcaatggttcttctacgatacaatcaagatattaactggattgccaacgactggaggacttccgcgcgaactagaagaggctaacatataatctgaccagtttgagataggcttctcgacgcactttttggtatcgtatggacaagtatttgtctatggttctgacttactaggggaagagtatagttggtagttttcagggaagagccaattgacctgaatacatcatgcgtaaggtttctgctgctggatatggaagactgcctcgtgtcgtatgtttttccacgtcttaaacaaccttgagcttcagcacccctccaggtacagcattgtggccaggtggtgctttagtaagtgtgtttcgtaagattttgatgtatgagaaaaatgcacttgtgatgtatacacgcgaccttgaaagtaaataatccctctgaaggaccgagatttgaagtgaaa

SEQ ID NO: 222287 - DNA, 3099 bp, Zea Mays
ctcctgcagtcctcctcctcgtctagtcatctctcctccccctctcatcagacatcagagcccttcttcctccgcctccccttcacccccatctcgccatacgcttatcgcccatcccctgatcaccagccgccgccgccaccgcctcgatcccgtccgatccaatccggttttttccttgataatgcgcgtggcaaccttgtcagttcaatccgtccgtgaagaacttatccttattttcgtttgcatcgcatcgcttctgcgtttgggggaaaaagggccgcgtccttgatgtctactatcgcgaccccgccgccgccatcggcggcgcaagagaaggccgccagccggaataagcgaaagtaccgtgccgagacaccatccacggagttgggcccattcgggctggagtacccactgacgacggactgcgtgggattcgagtttatgtcgcccgagaaggttgccatggcagccgcggtagccgccgctgagggtgtcagccttgacctcctccagaactcgtgcgaaaactgcaaggatctccaccctactgcggaggacttgttggagtgccagcgatatgtgaattggggtgacccaaatgagatgcagctggaggagatccttctcaagagtctggacaccacctttgacaatagtgtgagtctgatcaccacaatgggctactctgaggcggccgcacgtgctgctattatgcggacagctgcgcaatacgactggagggagagccttgctgggtttggagaggcggcggttgaggttctcaagacggaaggggacatgttgccaagggagggtgcctctgttgaagacatgaggaagattgaggaggctgtgcttggcagtatggttacgttggtaactgaggctcagccattcaacaccccaggcgatgtaatgtattgcttgcttatgtcggatatgaatgtggcaaatgcatgtgccatggactataacagtttctccctcccagctgtgtctgctcaagttattgcccaaccagtcgcgggaaactacgaacccggttcaggttcaaatttgtcagtttctattaccaacccgcagactggcgttactttccgtggaaaacttaccccagtgccacctggctcgtatggtgctataaaagctgattcatcaacggcacaagcaagcccgaatgtatcaaataccgaaccctcggtatcggacaagactcagtgtgtcatcccgaatattgagccaaaaaaacaccatgttcctatatgtgatcattcagaggaccaaccatttgttgctgctgcgacacaatctgtgaaaaatgacaagtcgtccccaagcaagagggggggctctaagagggactcctttcatcggcagaagttgacgaactatgataaaagttcccgagcattgggttccaaaggctctcttaggtctggcaagcaaagctcttcagccagtgcagtattggagaggaagtgcaggtcattttccgattctactactagcaacttgaagggctcatcaagagttgctaaagggtttgctgcaagcatatctggatcagaagtatcagttgacctttcctttactggtaccctttccccttctccatcatttgatgccaaggtagttagtaactcaaactcagcacctgctgctagcacagatctttcattggcattgtcctcaagtgatagtttaacaccatctttgagtcatgattccaatactgaggtagtggactctagtagcaaaattaatttttcatatgatgaagaacagaaggtctggatcccacaagataaaaaggatgaaattgtcttgattcttgtccagaggcagaaagaactgcaagcacatacacgtgactggacagactgggctcaacagaaagtgatgcaggtcgcacaccgacttgcaaaggagaaggatgaacttcagtcactcaggaaagagaaggaagaggcagaccgtctgcaagaagagaggcatcatttggaagagagtactcggaaaaagcttctagagatggagtctgcaatttctagggcaaatgctcagttggagaaggcagaagcttctgctcgcagacgtgaggttgagaatgcacaacttacgttacagatggaagctgcaaagcgacatgcagcagagtcagcaacaaacatttcagagcttgtaaagaaggatgagaacagtcgcaaaaggtctcagcgttggcaatctgacagagccctgttacaagaggatcttgcagcacaaaagagcaggttatctcgggtccaagaacaccttcagcatgctaaagagctaaaggatcaagtgcaggcaagatggaaacaagaggaagctggaaagattgaggtaattgcccttgtaacctcaaagaagaaagagagggagcaaattgagacctccatgaggtcagaagagaatttactgcatcttaaagcagcgaatgacacagaaagatacaagagtgagatccgtgctcttgagcagcgtattgcacagatgaaggtttctttggactcttcaaaggttgctgcccccaagtggggtgctgacaataaaacatatgcattgcatctttctgaagggagaaagaacagcagtgcccaaattttgtccaacatagcagtaccccaagatcccagttttgatgatatacagcgtgaccgggagtgcgtcatgtgcttgagtgaggagatgtccgtggtgttcctcccttgcgcccaccaggtggtctgtgccaaatgcagcgacctccatgagaagcaagggatgaaggaatgcccttcatgccggacccccatccagcgcagggtgcgcgcccgccccgcaggttgctagatttcacatataccatttggattttatcctgttttttttgttttaccttgattgctcagcttgagttgatggaagattggagagaataatgggggggatgtgagtggtgaaacttggacaataatacatcgttaaacatcaaacaagccccagcggacagtgggtactggttgggtttgttatatggatataccggccgcttctgaatgctttggttttgttgcactctgcttctta

SEQ ID NO: 222288 - DNA, 2429 bp, Zea Mays
ctcctgcagtcctcctcctcgtctagtcatctctcctccccctctcatcagacatcagagcccttcttcctccgcctccccttcacccccatctcgccatacgcttatcgcccatcccctgatcaccagccgccgccgccaccgcctcgatcccgtccgatccaatccggttttttccttgataatgcgcgtggcaaccttgtcagttcaatccgtccgtgaagaacttatccttattttcgtttgcatcgcatcgcttctgcgtttgggggaaaaagggccgcgtccttgatgtctactatcgcgaccccgccgccgccatcggcggcgcaagagaaggccgccagccggaataagcgaaagtaccgtgccgagacaccatccacggagttgggcccattcgggctggagtacccactgacgacggactgcgtgggattcgagtttatgtcgcccgagaaggttgccatggcagccgcggtagccgccgctgagggtgtcagccttgacctcctccagaactcgtgcgaaaactgcaaggatctccaccctactgcggaggacttgttggagtgccagcgatatgtgaattggggtgacccaaatgagatgcagctggaggagatccttctcaagagtctggacaccacctttgacaatagtgtgagtctgatcaccacaatgggctactctgaggcggccgcacgtgctgctattatgcggacagctgcgcaatacgactggagggagagccttgctgggtttggagaggcggcggttgaggttctcaagacggaaggggacatgttgccaagggagggtgcctctgttgaagacatgaggaagattgaggaggctgtgcttggcagtatggttacgttggtaactgaggctcagccattcaacaccccaggcgatgtaatgtattgcttgcttatgtcggatatgaatgtggcaaatgcatgtgccatggactataacagtttctccctcccagctgtgtctgctcaagttattgcccaaccagtcgcgggaaactacgaacccggttcaggttcaaatttgtcagtttctattaccaacccgcagactggcgttactttccgtggaaaacttaccccagtgccacctggctcgtatggtgctataaaagctgattcatcaacggcacaagcaagcccgaatgtatcaaataccgaaccctcggtatcggacaagactcagtgtgtcatcccgaatattgagccaaaaaaacaccatgttcctatatgtgatcattcagaggaccaaccatttgttgctgctgcgacacaatctgtgaaaaatgacaagtcgtccccaagcaagagggggggctctaagagggactcctttcatcggcagaagttgacgaactatgataaaagttcccgagcattgggttccaaaggctctcttaggtctggcaagcaaagctcttcagccagtgcagtattggagaggaagtgcaggtcattttccgattctactactagcaacttgaagggctcatcaagagttgctaaagggtttgctgcaagcatatctggatcagaagtatcagttgacctttcctttactggtaccctttccccttctccatcatttgatgccaaggtagttagtaactcaaactcagcacctgctgctagcacagatctttcattggcattgtcctcaagtgatagtttaacaccatctttgagtcatgattccaatactgaggtagtggactctagtagcaaaattaatttttcatatgatgaagaacagaaggtctggatcccacaagataaaaaggatgaaattgtcttgattcttgtccagaggcagaaagaactgcaagcacatacacgtgactggacagactgggctcaacagaaagtgatgcaggtcgcacaccgacttgcaaaggagaaggatgaacttcagtcactcaggaaagagaaggaagaggcagaccgtctgcaagaagagaggcatcatttggaagagagtactcggaaaaagcttctagagatggagtctgcaatttctagggcaaatgctcagttggagaaggcagaagcttctgctcgcagacgtgaggttgagaatgcacaacttacgttacagatggaagctgcaaagcgacatgcagcagagtcagcaacaaacatttcagagcttgtaaagaaggatgagaacagtcgcaaaaggtctcagcgttggcaatctgacagagccctgttacaagaggatcttgcagcacaaaagagcaggttatctcgggtccaagaacaccttcagcatgctaaagagctaaaggatcaagtgcagatgttgggatggaaattacgtagacacaagaatcacttgatacttctttagattagcaagtcaagacactgaataatagtacagaagctggc

SEQ ID NO: 222289 - DNA, 2376 bp, Zea Mays
ctcctgcagtcctcctcctcgtctagtcatctctcctccccctctcatcagacatcagagcccttcttcctccgcctccccttcacccccatctcgccatacgcttatcgcccatcccctgatcaccagccgccgccgccaccgcctcgatcccgtccgatccaatccggttttttccttgataatgcgcgtggcaaccttgtcagttcaatccgtccgtgaagaacttatccttattttcgtttgcatcgcatcgcttctgcgtttgggggaaaaagggccgcgtccttgatgtctactatcgcgaccccgccgccgccatcggcggcgcaagagaaggccgccagccggaataagcgaaagtaccgtgccgagacaccatccacggagttgggcccattcgggctggagtacccactgacgacggactgcgtgggattcgagtttatgtcgcccgagaaggttgccatggcagccgcggtagccgccgctgagggtgtcagccttgacctcctccagaactcgtgcgaaaactgcaaggatctccaccctactgcggaggacttgttggagtgccagcgatatgtgaattggggtgacccaaatgagatgcagctggaggagatccttctcaagagtctggacaccacctttgacaatagtgtgagtctgatcaccacaatgggctactctgaggcggccgcacgtgctgctattatgcggacagctgcgcaatacgactggagggagagccttgctgggtttggagaggcggcggttgaggttctcaagacggaaggggacatgttgccaagggagggtgcctctgttgaagacatgaggaagattgaggaggctgtgcttggcagtatggttacgttggtaactgaggctcagccattcaacaccccaggcgatgtaatgtattgcttgcttatgtcggatatgaatgtggcaaatgcatgtgccatggactataacagtttctccctcccagctgtgtctgctcaagttattgcccaaccagtcgcgggaaactacgaacccggttcaggttcaaatttgtcagtttctattaccaacccgcagactggcgttactttccgtggaaaacttaccccagtgccacctggctcgtatggtgctataaaagctgattcatcaacggcacaagcaagcccgaatgtatcaaataccgaaccctcggtatcggacaagactcagtgtgtcatcccgaatattgagccaaaaaaacaccatgttcctatatgtgatcattcagaggaccaaccatttgttgctgctgcgacacaatctgtgaaaaatgacaagtcgtccccaagcaagagggggggctctaagagggactcctttcatcggcagaagttgacgaactatgataaaagttcccgagcattgggttccaaaggctctcttaggtctggcaagcaaagctcttcagccagtgcagtattggagaggaagtgcaggtcattttccgattctactactagcaacttgaagggctcatcaagagttgctaaagggtttgctgcaagcatatctggatcagaagtatcagttgacctttcctttactggtaccctttccccttctccatcatttgatgccaaggtagttagtaactcaaactcagcacctgctgctagcacagatctttcattggcattgtcctcaagtgatagtttaacaccatctttgagtcatgattccaatactgaggtagtggactctagtagcaaaattaatttttcatatgatgaagaacagaaggtctggatcccacaagataaaaaggatgaaattgtcttgattcttgtccagaggcagaaagaactgcaagcacatacacgtgactggacagactgggctcaacagaaagtgatgcaggtcgcacaccgacttgcaaaggagaaggatgaacttcagtcactcaggaaagagaaggaagaggcagaccgtctgcaagaagagaggcatcatttggaagagagtactcggaaaaagcttctagagatggagtctgcaatttctagggcaaatgctcagttggagaaggcagaagcttctgctcgcagacgtgaggttgagaatgcacaacttacgttacagatggaagctgcaaagcgacatgcagcagagtcagcaacaaacatttcagagcttgtaaagaaggatgagaacagtcgcaaaaggtctcagcgttggcaatctgacagagccctgttacaagaggatcttgcagcacaaaagagcaggttatctcgggtccaagaacaccttcagcatgctaaagagctaaaggatcaagtgcaggccattgtctccattccatagcacctttatggtttctct

SEQ ID NO: 222290 - DNA, 2410 bp, Zea Mays
agtgactcgtgtgactcggcgaggcctacatagcgaggcacgcctcctgcagtcctcctcctcgtctagtcatctctcctccccctctcatcagacatcagagcccttcttcctccgcctccccttcacccccatctcgccatacgcttatcgcccatcccctgatcaccagccgccgccgccaccgcctcgatcccgtccgatccaatccggttttttccttgataatgcgcgtggcaaccttgtcagttcaatccgtccgtgaagaacttatccttattttcgtttgcatcgcatcgcttctgcgtttgggggaaaaagggccgcgtccttgatgtctactatcgcgaccccgccgccgccatcggcggcgcaagagaaggccgccagccggaataagcgaaagtaccgtgccgagacaccatccacggagttgggcccattcgggctggagtacccactgacgacggactgcgtgggattcgagtttatgtcgcccgagaaggttgccatggcagccgcggtagccgccgctgagggtgtcagccttgacctcctccagaactcgtgcgaaaactgcaaggatctccaccctactgcggaggacttgttggagtgccagcgatatgtgaattggggtgacccaaatgagatgcagctggaggagatccttctcaagagtctggacaccacctttgacaatagtgtgagtctgatcaccacaatgggctactctgaggcggccgcacgtgctgctattatgcggacagctgcgcaatacgactggagggagagccttgctgggtttggagaggcggcggttgaggttctcaagacggaaggggacatgttgccaagggagggtgcctctgttgaagacatgaggaagattgaggaggctgtgcttggcagtatggttacgttggtaactgaggctcagccattcaacaccccaggcgatgtaatgtattgcttgcttatgtcggatatgaatgtggcaaatgcatgtgccatggactataacagtttctccctcccagctgtgtctgctcaagttattgcccaaccagtcgcgggaaactacgaacccggttcaggttcaaatttgtcagtttctattaccaacccgcagactggcgttactttccgtggaaaacttaccccagtgccacctggctcgtatggtgctataaaagctgattcatcaacggcacaagcaagcccgaatgtatcaaataccgaaccctcggtatcggacaagactcagtgtgtcatcccgaatattgagccaaaaaaacaccatgttcctatatgtgatcattcagaggaccaaccatttgttgctgctgcgacacaatctgtgaaaaatgacaagtcgtccccaagcaagagggggggctctaagagggactcctttcatcggcagaagttgacgaactatgataaaagttcccgagcattgggttccaaaggctctcttaggtctggcaagcaaagctcttcagccagtgcagtattggagaggaagtgcaggtcattttccgattctactactagcaacttgaagggctcatcaagagttgctaaagggtttgctgcaagcatatctggatcagaagtatcagttgacctttcctttactggtaccctttccccttctccatcatttgatgccaaggtagttagtaactcaaactcagcacctgctgctagcacagatctttcattggcattgtcctcaagtgatagtttaacaccatctttgagtcatgattccaatactgaggtagtggactctagtagcaaaattaatttttcatatgatgaagaacagaaggtctggatcccacaagataaaaaggatgaaattgtcttgattcttgtccagaggcagaaagaactgcaagcacatacacgtgactggacagactgggctcaacagaaagtgatgcaggtcgcacaccgacttgcaaaggagaaggatgaacttcagtcactcaggaaagagaaggaagaggcagaccgtctgcaagaagagaggcatcatttggaagagagtactcggaaaaagcttctagagatggagtctgcaatttctagggcaaatgctcagttggagaaggcagaagcttctgctcgcagacgtgaggttgagaatgcacaacttacgttacagatggaagctgcaaagcgacatgcagcagagtcagcaacaaacatttcagagcttgtaaagaaggatgagaacagtcgcaaaaggtctcagcgttggcaatctgacagagccctgttacaagaggatcttgcagcacaaaagagcaggttatctcgggtccaagaacaccttcagcatgctaaagagctaaaggatcaagtgcagagccttcaaaattcccgggctggttctgtc

SEQ ID NO: 222291 - DNA, 2399 bp, Zea Mays
ctcctgcagtcctcctcctcgtctagtcatctctcctccccctctcatcagacatcagagcccttcttcctccgcctccccttcacccccatctcgccatacgcttatcgcccatcccctgatcaccagccgccgccgccaccgcctcgatcccgtccgatccaatccggttttttccttgataatgcgcgtggcaaccttgtcagttcaatccgtccgtgaagaacttatccttattttcgtttgcatcgcatcgcttctgcgtttgggggaaaaagggccgcgtccttgatgtctactatcgcgaccccgccgccgccatcggcggcgcaagagaaggccgccagccggaataagcgaaagtaccgtgccgagacaccatccacggagttgggcccattcgggctggagtacccactgacgacggactgcgtgggattcgagtttatgtcgcccgagaaggttgccatggcagccgcggtagccgccgctgagggtgtcagccttgacctcctccagaactcgtgcgaaaactgcaaggatctccaccctactgcggaggacttgttggagtgccagcgatatgtgaattggggtgacccaaatgagatgcagctggaggagatccttctcaagagtctggacaccacctttgacaatagtgtgagtctgatcaccacaatgggctactctgaggcggccgcacgtgctgctattatgcggacagctgcgcaatacgactggagggagagccttgctgggtttggagaggcggcggttgaggttctcaagacggaaggggacatgttgccaagggagggtgcctctgttgaagacatgaggaagattgaggaggctgtgcttggcagtatggttacgttggtaactgaggctcagccattcaacaccccaggcgatgtaatgtattgcttgcttatgtcggatatgaatgtggcaaatgcatgtgccatggactataacagtttctccctcccagctgtgtctgctcaagttattgcccaaccagtcgcgggaaactacgaacccggttcaggttcaaatttgtcagtttctattaccaacccgcagactggcgttactttccgtggaaaacttaccccagtgccacctggctcgtatggtgctataaaagctgattcatcaacggcacaagcaagcccgaatgtatcaaataccgaaccctcggtatcggacaagactcagtgtgtcatcccgaatattgagccaaaaaaacaccatgttcctatatgtgatcattcagaggaccaaccatttgttgctgctgcgacacaatctgtgaaaaatgacaagtcgtccccaagcaagagggggggctctaagagggactcctttcatcggcagaagttgacgaactatgataaaagttcccgagcattgggttccaaaggctctcttaggtctggcaagcaaagctcttcagccagtgcagtattggagaggaagtgcaggtcattttccgattctactactagcaacttgaagggctcatcaagagttgctaaagggtttgctgcaagcatatctggatcagaagtatcagttgacctttcctttactggtaccctttccccttctccatcatttgatgccaaggtagttagtaactcaaactcagcacctgctgctagcacagatctttcattggcattgtcctcaagtgatagtttaacaccatctttgagtcatgattccaatactgaggtagtggactctagtagcaaaattaatttttcatatgatgaagaacagaaggtctggatcccacaagataaaaaggatgaaattgtcttgattcttgtccagaggcagaaagaactgcaagcacatacacgtgactggacagactgggctcaacagaaagtgatgcaggtcgcacaccgacttgcaaaggagaaggatgaacttcagtcactcaggaaagagaaggaagaggcagaccgtctgcaagaagagaggcatcatttggaagagagtactcggaaaaagcttctagagatggagtctgcaatttctagggcaaatgctcagttggagaaggcagaagcttctgctcgcagacgtgaggttgagaatgcacaacttacgttacagatggaagctgcaaagcgacatgcagcagagtcagcaacaaacatttcagagcttgtaaagaaggatgagaacagtcgcaaaaggtctcagcgttggcaatctgacagagccctgttacaagaggatcttgcagcacaaaagagcaggttatctcgggtccaagaacaccttcagcatgctaaagagctaaaggatcaagtgcagttcatggaaatttctttactgttattgtatttgactctattaggctgcgtgctgaatagaat

SEQ ID NO: 222292 - DNA, 1413 bp, Zea Mays
  misc_feature (1)..(2): n is a, c, g, or t
nnatcgttgagaagtattccaactccaacattgaaattcatactttcaatcaggtttgtggcctgtttttgttatatctcaattacacagttcaattatatagcattttggagtggcaaacaatgttagctgataaatttgcattgtcttgtacagagccagtatcctcgcattgttaccgaggacttcttgccacttccaagcaaagggaaatctgggaaggatggctggtatcctccaggccatggtgatgtgttcccctctttgaataacagtggaaaactcgacatcttattggctcagggcaaggagtatgtcttcgttgctaactcagacaacttgggtgctatagtcgacatcaagatcctgaaccatctgatcaataaccagaatgaatactgcatggaggttactccaaaaacattggctgatgttaaaggcggtactctcatctcttacgaaggaagagttcagcttttggagattgcccaagtacctgatgagcatttcttgcccaacaggtgggtgaaccttaaagctgtcaagagactagtagaggctgaggcacttaagatggaaattattccaaaccccaaggaagttgatggtgtgaaagtccttcaacttgaaactgcagctggtgcagctattcgtttctttgacaaagcgattggaattaatgttccccgctcaagatttctcccggtgaaggctacatctgatttattgcttgtgcagtctgatctttacaccttggttgatggctttgtcatccgcaatccatccagagcgaatccagctaacccttcgattgagcttggacctgagttcaagaaggttgccaatttccttgctcggttcaagtccatccccagcatcgtcgagcttgacagcttgaaggtttctggtgatgtctggtttggttctggaattacgctcaagggcaaggtgacaatcaccgccaagtctggagtgaagttggaggttccagatggagctgtatttgaaaacaaggatgtcaatggccctgaggatctttaagctatgcttgccgtcaccagtttttcccaaggatttgtcaataggagcagccaacccaaatcactcccactgagctctaccttttgtaattctcgtgccattccgctcccgctgtgagggtcctgtgagcccgctagagaatatgactgtaatcttctttggtgcgtctgcccttctgtttttgtgcgccagggacgtatattttgctgaaatgatactaccatagctttgcgtgccggaggtgctatgtggtgtttctgtgcgtttggttgcaatgataggacgggatgagatgagaccctcaaattaggttgtttggttctgggtcaaagattgagacaagaatatcctagtattgtttcatgttgtcct

SEQ ID NO: 222293 - DNA, 1347 bp, Zea Mays
  misc_feature (1)..(2): n is a, c, g, or t
nnatcgttgagaagtattccaactccaacattgaaattcatactttcaatcagccagtatcctcgcattgttaccgaggacttcttgccacttccaagcaaagggaaatctgggaaggatggctggtatcctccaggccatggtgatgtgttcccctctttgaataacagtggaaaactcgacatcttattggctcagggcaaggagtatgtcttcgttgctaactcagacaacttgggtgctatagtcgacatcaagatcctgaaccatctgatcaataaccagaatgaatactgcatggaggttactccaaaaacattggctgatgttaaaggcggtactctcatctcttacgaaggaagagttcagcttttggagattgcccaagtacctgatgagcatgtgaatgagtttaaatcaatcgagaagtttaagatattcaacactaacaacttgtgggtgaaccttaaagctgtcaagagactagtagaggctgaggcacttaagatggaaattattccaaaccccaaggaagttgatggtgtgaaagtccttcaacttgaaactgcagctggtgcagctattcgtttctttgacaaagcgattggaattaatgttccccgctcaagatttctcccggtgaaggctacatctgatttattgcttgtgcagtctgatctttacaccttggttgatggctttgtcatccgcaatccatccagagcgaatccagctaacccttcgattgagcttggacctgagttcaagaaggttgccaatttccttgctcggttcaagtccatccccagcatcgtcgagcttgacagcttgaaggtttctggtgatgtctggtttggttctggaattacgctcaagggcaaggtgacaatcaccgccaagtctggagtgaagttggaggttccagatggagctgtatttgaaaacaaggatgtcaatggccctgaggatctttaagctatgcttgccgtcaccagtttttcccaaggatttgtcaataggagcagccaacccaaatcactcccactgagctctaccttttgtaattctcgtgccattccgctcccgctgtgagggtcctgtgagcccgctagagaatatgactgtaatcttctttggtgcgtctgcccttctgtttttgtgcgccagggacgtatattttgctgaaatgatactaccatagctttgcgtgccggaggtgctatgtggtgtttctgtgcgtttggttgcaatgataggacgggatgagatgagaccctcaaattaggttgtttggttctgggtcaaagattgagacaagaatatcctagtattgtttcatgttgtcct

SEQ ID NO: 222294 - DNA, 1343 bp, Zea Mays
  misc_feature (1)..(2): n is a, c, g, or t
nnatcgttgagaagtattccaactccaacattgaaattcatactttcaatcagtatcctcgcattgttaccgaggacttcttgccacttccaagcaaagggaaatctgggaaggatggctggtatcctccaggccatggtgatgtgttcccctctttgaataacagtggaaaactcgacatcttattggctcagggcaaggagtatgtcttcgttgctaactcagacaacttgggtgctatagtcgacatcaagatcctgaaccatctgatcaataaccagaatgaatactgcatggaggttactccaaaaacattggctgatgttaaaggcggtactctcatctcttacgaaggaagagttcagcttttggagattgcccaagtacctgatgagcatgtgaatgagtttaaatcaatcgagaagtttaagatattcaacactaacaacttgtgggtgaaccttaaagctgtcaagagactagtagaggctgaggcacttaagatggaaattattccaaaccccaaggaagttgatggtgtgaaagtccttcaacttgaaactgcagctggtgcagctattcgtttctttgacaaagcgattggaattaatgttccccgctcaagatttctcccggtgaaggctacatctgatttattgcttgtgcagtctgatctttacaccttggttgatggctttgtcatccgcaatccatccagagcgaatccagctaacccttcgattgagcttggacctgagttcaagaaggttgccaatttccttgctcggttcaagtccatccccagcatcgtcgagcttgacagcttgaaggtttctggtgatgtctggtttggttctggaattacgctcaagggcaaggtgacaatcaccgccaagtctggagtgaagttggaggttccagatggagctgtatttgaaaacaaggatgtcaatggccctgaggatctttaagctatgcttgccgtcaccagtttttcccaaggatttgtcaataggagcagccaacccaaatcactcccactgagctctaccttttgtaattctcgtgccattccgctcccgctgtgagggtcctgtgagcccgctagagaatatgactgtaatcttctttggtgcgtctgcccttctgtttttgtgcgccagggacgtatattttgctgaaatgatactaccatagctttgcgtgccggaggtgctatgtggtgtttctgtgcgtttggttgcaatgataggacgggatgagatgagaccctcaaattaggttgtttggttctgggtcaaagattgagacaagaatatcctagtattgtttcatgttgtcct

SEQ ID NO: 222295 - DNA, 1046 bp, Zea Mays
  misc_feature (1)..(2): n is a, c, g, or t
nnatcgttgagaagtattccaactccaacattgaaattcatactttcaatcagtatcctcgcattgttaccgaggacttcttgccacttccaagcaaagggaaatctgggaaggatggctggtatcctccaggccatggtgatgtgttcccctctttgaataacagtggaaaactcgacatcttattggctcagggcaaggacacagagatcctgaaccatctgatcaataaccagaatgaatactgcatggaggttactccaaaaacattggctgatgttaaaggcggtactctcatctcttacgaaggaagagttcagcttttggagattgcccaagtacctgatgagcatttcttgcccaacaggtgggtgaaccttaaagctgtcaagagactagtagaggctgaggcacttaagatggaaattattccaaaccccaaggaagttgatggtgtgaaagtccttcaacttgaaactgcagctggtgcagctattcgtttctttgacaaagcgattggaattaatgttccccgctcaagatttctcccggtgaaggctacatctgatttattgcttgtgcagtctgatctttacaccttggttgatggctttgtcatccgcaatccatccagagcgaatccagctaacccttcgattgagcttggacctgagttcaagaaggttgccaatttccttgctcggttcaagtccatccccagcatcgtcgagcttgacagcttgaaggtttctggtgatgtctggtttggttctggaattacgctcaagggcaaggtgacaatcaccgccaagtctggagtgaagttggaggttccagatggagctgtatttgaaaacaagggacgagagaggacaccatgggacatttctgtcctaactgtcccgcaactaaacgcacccgcaactaaacgcactatctcaccgggtggtatgctatatgataagggggatctctccacccaggttgccacatccacatgcctggtgctcgagaatattgttgtggaaggccatattccaaggtga

SEQ ID NO: 222296 - DNA, 1285 bp, Zea Mays
agccagtatcctcgcattgttaccgaggacttcttgccacttccaagcaaagggaaatctgggaaggatggctggccatggtgatgtgttcccctctttgaataacagtggaaaactcgacatcttattggctcagggcaaggagtatgtcttcgttgctaactcagacaacttgggtgctatagtcgacatcaagatcctgaaccatctgatcaataaccagaatgaatactgcatggaggttactccaaaaacattggctgatgttaaaggcggtactctcatctcttacgaaggaagagttcagcttttggagattgcccaagtacctgatgagcatgtgaatgagtttaaatcaatcgagaagtttaagatattcaacactaacaacttgtgggtgaaccttaaagctgtcaagagactagtagaggctgaggcacttaagatggaaattattccaaaccccaaggaagttgatggtgtgaaagtccttcaacttgaaactgcagctggtgcagctattcgtttctttgacaaagcgattggaattaatgttccccgctcaagatttctcccggtgaaggctacatctgatttattgcttgtgcagtctgatctttacaccttggttgatggctttgtcatccgcaatccatccagagcgaatccagctaacccttcgattgagcttggacctgagttcaagaaggttgccaatttccttgctcggttcaagtccatccccagcatcgtcgagcttgacagcttgaaggtttctggtgatgtctggtttggttctggaattacgctcaagggcaaggtgacaatcaccgccaagtctggagtgaagttggaggttccagatggagctgtatttgaaaacaaggatgtcaatggccctgaggatctttaagctatgcttgccgtcaccagtttttcccaaggatttgtcaataggagcagccaacccaaatcactcccactgagctctaccttttgtaattctcgtgccattccgctcccgctgtgagggtcctgtgagcccgctagagaatatgactgtaatcttctttggtgcgtctgcccttctgtttttgtgcgccagggacgtatattttgctgaaatgatactaccatagctttgcgtgccggaggtgctatgtggtgtttctgtgcgtttggttgcaatgataggacgggatgagatgagaccctcaaattaggttgtttggttctgggtcaaagattgagacaagaatatcctagtattgtttcatgttgtcct

SEQ ID NO: 222297 - DNA, 1251 bp, Zea Mays
agccagtatcctcgcattgttaccgaggacttcttgccacttccaagcaaagggaaatctgggaaggatggctggtatcctccaggccatggtgatgtgttcccctctttgaataacagtggaaaactcgacatcttattggctcagggcaaggacacagagatcctgaaccatctgatcaataaccagaatgaatactgcatggaggttactccaaaaacattggctgatgttaaaggcggtactctcatctcttacgaaggaagagttcagcttttggagattgcccaagtacctgatgagcatgtgaatgagtttaaatcaatcgagaagtttaagatattcaacactaacaacttgtgggtgaaccttaaagctgtcaagagactagtagaggctgaggcacttaagatggaaattattccaaaccccaaggaagttgatggtgtgaaagtccttcaacttgaaactgcagctggtgcagctattcgtttctttgacaaagcgattggaattaatgttccccgctcaagatttctcccggtgaaggctacatctgatttattgcttgtgcagtctgatctttacaccttggttgatggctttgtcatccgcaatccatccagagcgaatccagctaacccttcgattgagcttggacctgagttcaagaaggttgccaatttccttgctcggttcaagtccatccccagcatcgtcgagcttgacagcttgaaggtttctggtgatgtctggtttggttctggaattacgctcaagggcaaggtgacaatcaccgccaagtctggagtgaagttggaggttccagatggagctgtatttgaaaacaaggatgtcaatggccctgaggatctttaagctatgcttgccgtcaccagtttttcccaaggatttgtcaataggagcagccaacccaaatcactcccactgagctctaccttttgtaattctcgtgccattccgctcccgctgtgagggtcctgtgagcccgctagagaatatgactgtaatcttctttggtgcgtctgcccttctgtttttgtgcgccagggacgtatattttgctgaaatgatactaccatagctttgcgtgccggaggtgctatgtggtgtttctgtgcgtttggttgcaatgataggacgggatgagatgagaccctcaaattaggttgtttggttctgggtcaaagattgagacaagaatatcctagtattgtttcatgttgtcct

SEQ ID NO: 222298 - DNA, 1243 bp, Zea Mays
agccagtatcctcgcattgttaccgaggacttcttgccacttccaagcaaagggaaatctgggaaggatggctggtatcctccaggccatggtgatgtgttcccctctttgaataacagtggaaaactcgacatcttattggctcagggcaaggagtatgtcttcgttgctaactcagacaacttgggtgctatagtcgacatcaagatcctgaaccatctgatcaataaccagaatgaatactgcatggaggttactccaaaaacattggctgatgttaaaggcggtactctcatctcttacgaaggaagagttcagcttttggagattgcccaagtacctgatgagcatgtgggtgaaccttaaagctgtcaagagactagtagaggctgaggcacttaagatggaaattattccaaaccccaaggaagttgatggtgtgaaagtccttcaacttgaaactgcagctggtgcagctattcgtttctttgacaaagcgattggaattaatgttccccgctcaagatttctcccggtgaaggctacatctgatttattgcttgtgcagtctgatctttacaccttggttgatggctttgtcatccgcaatccatccagagcgaatccagctaacccttcgattgagcttggacctgagttcaagaaggttgccaatttccttgctcggttcaagtccatccccagcatcgtcgagcttgacagcttgaaggtttctggtgatgtctggtttggttctggaattacgctcaagggcaaggtgacaatcaccgccaagtctggagtgaagttggaggttccagatggagctgtatttgaaaacaaggatgtcaatggccctgaggatctttaagctatgcttgccgtcaccagtttttcccaaggatttgtcaataggagcagccaacccaaatcactcccactgagctctaccttttgtaattctcgtgccattccgctcccgctgtgagggtcctgtgagcccgctagagaatatgactgtaatcttctttggtgcgtctgcccttctgtttttgtgcgccagggacgtatattttgctgaaatgatactaccatagctttgcgtgccggaggtgctatgtggtgtttctgtgcgtttggttgcaatgataggacgggatgagatgagaccctcaaattaggttgtttggttctgggtcaaagattgagacaagaatatcctagtattgtttcatgttgtcct

SEQ ID NO: 222299 - DNA, 1083 bp, Zea Mays
agccagtatcctcgcattgttaccgaggacttcttgccacttccaagcaaagggaaatctgggaaggatggctggtatcctccaggccatggtgatgtgttcccctctttgaataacagtggaaaactcgacatcttattggctcagggcaaggagtatgtcttcgttgctaactcagacaacttgggtgctatagtcgacatcaagatcctgaaccatctgatcaataaccagaatgaatactgcatggaggttactccaaaaacattggctgatgttaaaggcggtactctcatctcttacgaaggaagagttcagcttttggagattgcccaagtacctgatgagcatgtgaatgagtttaaatcaatcgagaagtttaagatattcaacactaacaacttgtgggtgaaccttaaagctgtcaagagactagtagaggctgaggcacttaagatggaaattattccaaaccccaaggaagttgatggtgtgaaagtccttcaacttgaaactgcagctggtgcagctattcgtttctttgacaaagcgattggaattaatgttccccgctcaagatttctcccggtgaaggctacatctgatttattgcttgtgcagtctgatctttacaccttggttgatggctttgtcatccgcaatccatccagagcgaatccagctaacccttcgattgagcttggacctgagttcaagaaggttgccaatttccttgctcggttcaagtccatccccagcatcgtcgagcttgacagcttgaaggtttctggtgatgtctggtttggttctggaattacgctcaagggcaaggtgacaatcaccgccaagtctggagtgaagttggaggttccagatggagctgtatttgaaaacaagggacgagagaggacaccatgggacatttctgtcctaactgtcccgcaactaaacgcacccgcaactaaacgcactatctcaccgggtggtatgctatatgataagggggatctctccacccaggttgccacatccacatgcctggtgctcgagaatattgttgtggaaggccatattccaaggtga

SEQ ID NO: 222300 - DNA, 1038 bp, Zea Mays
agccagtatcctcgcattgttaccgaggacttcttgccacttccaagcaaagggaaatctgggaaggatggctggtatcctccaggccatggtgatgtgttcccctctttgaataacagtggaaaactcgacatcttattggctcagggcaaggacacagagatcctgaaccatctgatcaataaccagaatgaatactgcatggaggttactccaaaaacattggctgatgttaaaggcggtactctcatctcttacgaaggaagagttcagcttttggagattgcccaagtacctgatgagcatgtgaatgagtttaaatcaatcgagaagtttaagatattcaacactaacaacttgtgggtgaaccttaaagctgtcaagagactagtagaggctgaggcacttaagatggaaattattccaaaccccaaggaagttgatggtgtgaaagtccttcaacttgaaactgcagctggtgcagctattcgtttctttgacaaagcgattggaattaatgttccccgctcaagatttctcccggtgaaggctacatctgatttattgcttgtgcagtctgatctttacaccttggttgatggctttgtcatccgcaatccatccagagcgaatccagctaacccttcgattgagcttggacctgagttcaagaaggttgccaatttccttgctcggttcaagtccatccccagcatcgtcgagcttgacagcttgaaggtttctggtgatgtctggtttggttctggaattacgctcaagggcaaggtgacaatcaccgccaagtctggagtgaagttggaggttccagatggagctgtatttgaaaacaagggacgagagaggacaccatgggacatttctgtcctaactgtcccgcaactaaacgcacccgcaactaaacgcactatctcaccgggtggtatgctatatgataagggggatctctccacccaggttgccacatccacatgcctggtgctcgagaatattgttgtggaaggccatattccaaggtga

SEQ ID NO: 222301 - DNA, 837 bp, Zea Mays
tgttctgttacccggtcgaatgctctgttactgagaatatgatgccatgcctatgaccacttggctttgatgatggaaactcttgggaagatgcctcggaagattgctagctcaggaactcgttccaaggattactttgatcggtatggagatttgaaaagggtcaggagactgaagttctggcccctagaccgtgtgctcgtagaaaggtacagtttcagcgaacccgacgccaaagggttcgctgactttcttcggccaatgttagatttcgctccggaggacaggccatctgccgcgcagtgcttgaaacactcttggcttaattgatccaacgcgacacgaaagtctgaccaatagatgtttacatacatcctacgtgcaaattcgctgccgaagactctttgtgactgtgattgcagatatccacggactttgatttgatgtaaccaaggctgagaatcaggagccactttttaggcgcagcctgatgagaacgggacatgagattcagctcggatgtagcaagcgtttcgctggtgtgtttgggggtgcagactgcagagctaatgtgatgttaacctgcatgtgtgttagtagggccaaaatattgatgtattattattttttggtaatgtgatctggccaacaaccttttcctttagctgagaagatgaactgctacagcactgcagtgtagtggttcagctagttatccaatggattgtgtgctgtaacctgtaacatttgtttgaaattgaccttatggatatcggaaaccaaccacttggtggtgcaaatgggacaaaaccaggggcggtaataggctctaaattt

SEQ ID NO: 222302 - DNA, 2066 bp, Zea Mays
ggaacggtcacttctccggtctgcagcctgcccgaccgaatgagcgcgtgcaaattgctaaaggcaccccacgtttataaagcggaggcccagcctgtcttctgcccgcacgaattcgaatccgccggaggcggaggagacagcagccgggtgattgggttgggtacgcctctcgtctcggccgatggcgtcgctgttcggcaacggcggctacatctactcctcggggtcggagggggaggacgaggacgagggcacggaggggtaccggaaaggcgggtaccacgccgctcgccccggggatcgcttcgccggtgggcggttcgtcgcgcagcggaagatcggctggggcaacttctccaccgtctggctagcctacgacaccctccacagcagatttgtcgccctgaagatccagaagagcgcaagggattacgcgcacgcggctctccacgaaatcgagctactgtcggctgtggccaaaggagacccgacgaattcaaagtgcgtgcttcggttgttggaccatttcaagcacgctggccccaacgggcagcacgtttgcctggtcaccgagttcctcggtgatagcctgctccggctgatacggtacaatcggaacaagggcattgggctgagcagagtgaaggaaatctgccgatcagtcatggtcggccttgattacctgcacagcgagctcggcatcatccacacggatttgaaaccagagaacgttcttctggaatcaacaattaacccggccaaggacccagtgcgctctgggttcacaccgatcctcgaccggcctgtggggaaccagtacggtggcacagtgatcagtttcagtgagaagatgctcaagatgagagcaaggcgtgcagtggctaagatttcgcagagacgggtttcccttggtggggttggggcagaactggagaaagagaggtgcctggatgggatcagtttgaagtgtaagattgtcgattttgggaatgcctgctgggccgatcagcagcacgctggtgaaatacagacaaggcagtacagagctcctgaggttatcattggttctgggtactcatattccgctgacatctggtcgtttgcttgcattgcctttgagcttgccaccggtgacttgttgtttgctcccatgaatcgccagggatgcagcgaagatgagacagcacgatatttggtgtattcatccactaaactttcaaacactcccttgcaattattcggacatttaaaaattgcactgacacaaatatatatatcaggaccacttggctttgatgatggaaactcttgggaagatgcctcggaagattgctagctcaggaactcgttccaaggattactttgatcggtatggagatttgaaaagggtcaggagactgaagttctggcccctagaccgtgtgctcgtagaaaggtacagtttcagcgaacccgacgccaaagggttcgctgactttcttcggccaatgttagatttcgctccggaggacaggccatctgccgcgcagtgcttgaaacactcttggcttaattgatccaacgcgacacgaaagtctgaccaatagatgtttacatacatcctacgtgcaaattcgctgccgaagactctttgtgactgtgattgcagatatccacggactttgatttgatgtaaccaaggctgagaatcaggagccactttttaggcgcagcctgatgagaacgggacatgagattcagctcggatgtagcaagcgtttcgctggtgtgtttgggggtgcagactgcagagctaatgtgatgttaacctgcatgtgtgttagtagggccaaaatattgatgtattattattttttggtaatgtgatctggccaacaaccttttcctttagctgagaagatgaactgctacagcactgcagtgtagtggttcagctagttatccaatggattgtgtgctgtaacctgtaacatttgtttgaaattgaccttatggatatcggaaaccaaccacttggtggtgcaaatgggacaaaaccaggggcggtaataggctctaaattt

SEQ ID NO: 222303 - DNA, 1178 bp, Zea Mays
accgaatgagcgcgtgcaaattgctaaaggcaccccacgtttataaagcggaggcccagcctgtcttctgcccgcacgaattcgaatccgccggaggcggaggagacagcagccgggtgattgggttgggtacgcctctcgtctcggccgatggcgtcgctgttcggcaacggcggctacatctactcctcggggtcggagggggaggacgaggacgagggcacggaggggtaccggaaaggcgggtaccacgccgctcgccccggggatcgcttcgccggtgggcggttcgtcgcgcagcggaagatcggctggggcaacttctccaccgtctggctagcctacgacaccctccacagcagatttgtcgccctgaagatccagaagagcgcaagggattacgcgcacgcggctctccacgaaatcgagctactgtcggctgtggccaaaggagacccgacgaattcaaagtgcgtgcttcggttgttggaccatttcaagcacgctggccccaacgggcagcacgtttgcctggtcaccgagttcctcggtgatagcctgctccggctgatacggtacaatcggaacaagggcattgggctgagcagagtgaaggaaatctgccgatcagtcatggtcggccttgattacctgcacagcgagctcggcatcatccacacggatttgaaaccagagaacgttcttctggaatcaacaattaacccggccaaggacccagtgcgctctgggttcacaccgatcctcgaccggcctgtggggaaccagtacggtggcacagtgatcagtttcagtgagaagatgctcaagatgagagcaaggcgtgcagtggctaagatttcgcagagacgggtttcccttggtggggttggggcagaactggagaaagagaggtgcctggatgggatcagtttgaagtgtaagattgtcgattttgggaatgcctgctgggccgatcagcagcacgctggtgaaatacagacaaggcagtacagagctcctgaggttatcattggttctgggtactcatattccgctgacatctggtcgtttgcttgcattgcctttgagcttgccaccggtgacttgttgtttgctcccatgaatcgccagggatgcagcgaagatgagtgacattttctttctagaaaagcaagatc

SEQ ID NO: 222304 - DNA, 1475 bp, Zea Mays
cgaaaacccagcagccgccgccgctgccgccgccgccgccgccacatccagtcctgccccggggccctgaaccctagccatggcgtcctccatactctccgactgctcctcggcccgcctcctccctctccgccgctcgctcctcccgccgcgggcgccccgcctccgctcctgccccgctctagctacccccaggcgcctactcgtcgccgccaggccccagctgcttccgcgcccgcgccacatggactcggtccccgcagccaccgcctcttccgccgactcagccgatgcgcctgccaaactgattgacgggaagctcgtggcgaagcaagtgagagaagaaatagctgtccaagtcaccaggatgaaggatgtgatcggcattgtgcccggcctggctgtcatccttgttgggtcgaggaaggattctcagacttacgtgcggaacaagaagaaggcgtgcgaagcggtcggtataaagtcgtacgaggtcaacttgcctgaggacagctctgaggaggaggttatcaagcacatagcgagtttcaacagtgacccgtccgtgcatggcatcttggttcagttgcccttaccaaggcatatgaatgatgagaacattctgaatgcggtcagtattgaaaaggatgttgatggctttcatccgctgaacatcggacggcttgcaatgcaaggccgagatccgttctttgtaccttgcaccccgaaaggatgcatggagttgctacaccgacacggagttgaaattaaagggaagagagctgttgtgatcggacgaagcaatattgttggaacgcctgctgcattgttgttgcaaaaagcaaatgcaactgtcagcattgttcattcacaaaccaagaaccctgagcaaataacgagacaggcagatatagtcatcgcagctgttggagtcgccaacttggtcagaggggattggataaagcctggagctactattattgatgttggcatcaatccagttgatgacccagagagcccccgcgggtacaggctcgtcggggacgtctgctacgaggaagcctccaaggtcgccggagccatcacgccggtcccaggcggcgtcgggccgatgacgatcgcgatgcttctgtcgaacacgctcgagtcggctagacggatccacggattcaagtagccgccgcacccaccgtccgtccagcagagagaagcgaaggcgttggccctgccagccaagccagactagtgcaggggtcgtagggaaaaaataaataaataattaaataaattttgacgcagatgagatgggaaatcccagcttgacactttgttagggtattgtgcttgataaaaatatggcaccaggtgaatctgaggtgccagtaaatcttggatgaattctgccgcacgcatccgaccggatcagcagaaacttgtctccatgccatgatcagggtacctgtgttgtgagtgac

SEQ ID NO: 222305 - DNA, 502 bp, Zea Mays
cctgcgctgcaaatcctcggtggttttgcagcttccagagcttgagattgagaccagcgcggcagttctttcttggtcgtcgatggcgctgaggaggatcatcaaggagctcaaggacctgcagagggatccacccacgtcctgcagcgcagggcctgtgtccgacgacatgttccactggcaagcgacgatcatggggcccagcgacagcccctactcggggggcgtgttcctggtcgccatccacttccctccggactacccgttcaagcctcccaaggtggcgttcaagacgaaggtgttccaccccaacatcaacagcaacggcagcatctgcctggacatcctcaaggagcagtggagccccgcgctgacggtctccaaggtgctgctctccgtctgctccctgctcaccgaccccaacccggacgacccgctcgtcccggagatcgcccacatgtgcaagaccgaccgcctcaggagaaaggaagttgcgcgatga

SEQ ID NO: 222306 - DNA, 736 bp, Zea Mays
cgctcgggaatccagccacaagcctaacctgccttttgtccaagctatgaccattagggttggaggcggcgcggcggcgccaggctaccagccgccggagttcgccacgcacgttgcctgacccgatggagatctaggtcgtcgacgtgtggagatctaggccctcgctcctactgcctaggacgctggagatccaggccaccgccccttccgtccgaaacaccaaagctcccaagccccttccgtccactactacgccacctcttcgtctccgatcttccagtgtgcaagattggtggtggaagaaggcaaacataataaagacaacaacatcttgtgagtttatggtcctggcaagaacacaagagacacctgactcttccataaaagatgttatgcaattggtgaaggcatgtggtgctatagctggcagcaaagatcacttcattgcaactcaagtctttaccaaaaatagtgaaagagaaatgttcttgacttcggatacacccgaggagcgctttcagtggttatcaatgaagtatgaatggatgacaatgaacaagaagggctagttagagctactttgttatgcatttatcatgtcgtttgttgtttttaccttaccaatcttatctgttatttcctcatttgtattaactgatcagaccattgctatgggctgctagtatttgtttatgaaaattatggtacttgtgatgctattttataatattgg

SEQ ID NO: 222307 - DNA, 502 bp, Zea Mays
ctcgggaatccagccacaagcctaacctgccttttgtccaagctatgaccattagggttggaggcggcgcggcggcgccaggctaccagccgccggagttcgccacgcacgttgcctgacccgatggagatctaggtcgtcgacgtgtggagatctaggccctcgctcctactgcctaggacgctggagatccaggccaccgccccttccgtccgaaacaccaaagctcccaagccccttccgtccactactacgccacctcttcgtctccgatcttccagtgtgcaagattggtggtggaagaaggcaaacatagcattagcaagtttaaagacaagtcactccaaaatgcaaaagaattgagtgtcatgtttgaagatcttcggaacaccggtgatgatcattgggcccaaccagtggtgagctaccctaagacactgaagcacaaatacaagatgccatcaacattgaagatgaaaatgctagtgattgtggggaagac

SEQ ID NO: 222308 - DNA, 1917 bp, Zea Mays
tcgacttggtgggatgtgattctccaccacctccgagcttgccagaggactccacctctttcttctcgcatgcttccttttctttccaaacacaaatgcgcagcaaagaaagtgcaaatcataaagaaaagagcagaattcaaagcagccggaaagctgactagctagaaggagtgaagagagagaagtatatctcagcaacgcctccatggtcttcccttcaccttcagtgcaggtctacctagatccacatccacctaattggaataaccagcaaggtcagcagccgagggcgaatgggggagctgatgcaccgttgctgcccctgggtccggcggcagctacatcggcggctccggagcaaggtgggttgcctagaagctcatcaatggctaatgccgccgtggctgcgcacgcgaggcccaactcaatggcggagcgcgcgcggctggcgcggatgccgcatccggagccagcgctcaagtgcccgcgttgcgaatccaccaacaccaagttctgctactacaacaactactccctctcccagccccgccacttctgcaagacgtgccgccgctactggacgcgcggcggatcccttcgcaacgtccccgtaggtggaggctgccgtcgcaacaagcgttcgtccaagtcctcatcctcctctgctgggtcttcctcctcaaagatgtctccctcaggaaggctactgggtggtccatcagctacaccgtccaccaccccaggcactaccggtgcgatcattactccgggtctcagctctttctctcaccacttgccgttcttgggctccatgcacccgtcagggcccaacctaggtctagctttctccgccggactgccgctagtcggcatgcagcacctggacacggtggatcagtttccggtggcaagcggcggcggcaccaccataggtgcatctctagagcagtggagagtgcgacagcagcagcagcagttcccattcatgactgggggaatactggatctgtcgcagccgccgacgtaccaattcggtttggaagctaaccgaggaggcagcggctcagctgcggtggcgttcaattcaggacagaccacgacgaccagtgctaccacgggaaggcaggaagggtcatcaaagaagatgggggatagtaaaggagaagatatgagcttacagaagcagtacatggtacctctacgccacggatcaggatcacacggtgtctgggatgggagtgctggtggaactggcagcaacggtggtggtactggcaatggcggttcaagttggccaatgaacatgattcctggattccattcttcgtccactagcggttgcaatgacagtggcttgtcgtagtactctctagctaggggctggggcaatgtcctatcaagaaaaatattttggagatgcatggttgagtctgagcaaatgctagctatagctaggacgatggaggaacaggcgatgaccaatccacaggcatgttcatcatctgctattcttcatcggaattgtagaagcacactgctacctcatgatggtcacaggtaggagtttaaagtaaagctgctctttgtttaaacctttttctgtcatttggttttgaacttaaaggtgttctctgcattgtgtccatagcggccgccacttttctacttttcacactattgttcacagggattaattaatcaaatttggtgcctggtatactatgtgataaggtatatttgacatggacgaaaccgattagttgtttcatcactactacttgtgtggaagattgcatgaaattaatgtgtatattggtttgttgccaagttacttccatatatatgtttttcttctatatattctatcctgtattcagggagtttgattaaagacaacatataactaaacttcaa

SEQ ID NO: 222309 - DNA, 909 bp, Zea Mays
tctgcattttcattcctgacaatcttctctaccacttctatgtacgctacattggcagtatctcctgggcagtcctcattaatctctgatgatgctgatgttgttgctctgattgggacaagtaaggacttggcaaaacaaataaatcagaaggaagtacattgggggttgcttgaagattctgttgaagagcaaatggagaaggcactagcagaatctgataaaatagaagctgaaagcaacgatgctgatgcagaagataacaaggcaaggaaaaaaggaatacagaaggtggaaagcaaaatacttctcttgtgtggggacacttgctttcaggagcattgcttgcatcggggtcggctgactgtactgttaagctctgggatgtcgctttcagcacaaaagccctgaagacagaggacaccaaaggcagctcatcagctaaccgactgagactgcttaaatctctgcctacaaaatcagctcctgtctatagcctgcggttttctcggaggaaccttctgtttgcctccggtgctctcgcgtaagctgcgtgtttcgtagaatacagctagaactgttccggttttgacatggagtagtgaagttggcatttcgcagactccgctgtggatcctattgtagagctaatattttcgttagcaatctcaacggcccagcatgtatgcacagcggaattgagcaccgcagatgctttgtagcgtgcttgcaacattgtgacattgttattaggtaaatacgtcgtgtaattttttttaggttgtgatcttatgatttataaacgccactaaatgtacatatgcctgataggagatagcttgtaagggatgaccggatgatttggtgacaaaacaatgcattttatctacttctcaaacatgtaaaata

SEQ ID NO: 222310 - DNA, 640 bp, Zea Mays
tctgcattttcattcctgacaatcttctctaccacttctatgtacgctacattggcagtatctcctgggcagtcctcattaatctctgatgatgctgatgttgttgctctgattgggacaagtaaggacttggcaaaacaaataaatcagaaggaagtacattgggggttgcttgaagattctgttgaagagcaaatggagaaggcactagcagaatctgataaaatagaagctgaaagcaacgatgctgatgcagaagataacaaggcaaggaaaaaaggaatacagaaggtggaaagcaaaatacttctcttgtgtggggacacttgctttcagctgcgaaggagcattgcttgcatcggggtcggctgactgtactgttaagctctgggatgtcgctttcagcacaaaagccctgaagacagaggacaccaaaggcagctcatcagctaaccgactgagactgcttaaatctctgcctacaaaatcagctcctgtctatagcctgcgggttgtgatcttatgatttataaacgccactaaatgtacatatgcctgataggagatagcttgtaagggatgaccggatgatttggtgacaaaacaatgcattttatctacttctcaaacatgtaaaata

SEQ ID NO: 222311 - DNA, 2216 bp, Zea Mays
ctcggcctttcgggtctttcgctccccggctcttcgtctccctctcttgccgaatccaagccctaaaccatagggcttgcctggtgcccgggtgggctccccatggcggcaatagaggacgaggagatggagaagaaggtgcagcagtacctgcaccgcaaggggttccgcctcaccgagctcgcgctccacgaggagcgcagtcgcctctccacctccgacgtcgcgcttacccggttgtttccacatgtatcggatatctgttctttggagaggaagaaatgagctacatgttgcttagatgttaacactatatcgtgaagggaagggacaggtaacagcaaattcaatgtttttctgcctgaaatttttgtgatcatttggaaaacagtgttttctggatgcttgcatgtgatgattggtgaagcaatcggctttgttggttcagtggtgctttattgatattataataatcgaagttcagttgttttgtcattgtctttcactctcccttcgaaatgccataatatacacagattctgaagtggctatattttcacttacaatcttaccatacacatccgttgattgattatattcttcaataacaggtctgacaataatccagcaagataccatgagggatacagcagattaatagcatgggcgtatagttctcttgatcaatataagtgcactgcttgtagataaattgtacttaatattcagccaaagcatatcacgccttcaaactatttctaactgttaccttcaagtgatgcattttatgaatcctctgtgttctatggcacaaatttacttggcagacctcctctccttttatgaatcccatatctgtcatataagcatgattttgcacttgacaacttatgtaattctagtttttcaaaagggcgtttggttgtggcaggcaaactattttatgttgtgatctgattttttaacttacagtcttacgctccattctgttcttaaacttggcaatataattcatatttcttaattcagatattttttgtagcatgaattacttcgcgtcctttacccagtttttatccattgcttcatggatctagtggcagagggacatatgcacaatgctcggtcatttttccatacatttcgggaagctcataaggtgatgcattcaagggatcttcagaagctggaaggcatcctctctccttcacacttggaggaaacggaactggctcgatcttttaggaaaaaataaatttaaaattaaattatgcgagtattcgtatgaattgcttctccagtatctccagaaaacacaagcttttgtggtgcttggagtaatcaatgagcacataacttttgaagtatctcctgggcagtcctcattaatctctgatgatgctgatgttgttgctctgattgggacaagtaaggacttggcaaaacaaataaatcagaaggaagtacattgggggttgcttgaagattctgttgaagagcaaatggagaaggcactagcagaatctgataaaatagaagctgaaagcaacgatgctgatgcagaagataacaagaaaaggaatacagaaggtggaaagcaaaatacttctcttgtgtggggacacttgctttcagctgcgaaggagcattgcttgcatcggggtcggctgactgtactgttaagctctgggatgtcgctttcagcacaaaagccctgaagacagaggacaccaaaggcagctcatcagctaaccgactgagactgcttaaatctctgcctacaaaatcagctcctgtctatagcctgcggttttctcggaggaaccttctgtttgcctccggtgctctcgcgtaagctgcgtgtttcgtagaatacagctagaactgttccggttttgacatggagtagtgaagttggcatttcgcagactccgctgtggatcctattgtagagctaatattttcgttagcaatctcaacggcccagcatgtatgcacagcggaattgagcaccgcagatgctttgtagcgtgcttgcaacattgtgacattgttattaggtaaatacgtcgtgtaattttttttaggttgtgatcttatgatttataaacgccactaaatgtacatatgcctgataggagatagcttgtaagggatgaccggatgatttggtgacaaaacaatgcattttatctacttctcaaacatgtaaaata

SEQ ID NO: 222312 - DNA, 1410 bp, Zea Mays
ctcggcctttcgggtctttcgctccccggctcttcgtctccctctcttgccgaatccaagccctaaaccatagggcttgcctggtgcccgggtgggctccccatggcggcaatagaggacgaggagatggagaagaaggtgcagcagtacctgcaccgcaaggggttccgcctcaccgagctcgcgctccacgaggagcgcagtcgcctctccacctccgacgtcgcgcttacccgcatgaattacttcgcgtcctttacccagtttttatccattgcttcatggatctagtggcagagggacatatgcacaatgctcggtcatttttccatacatttcgggaagctcataaggtgatgcattcaagggatcttcagaagctggaaggcatcctctctccttcacacttggaggaaacggaactggctcgatcttttaggaaaaaataaatttaaaattaaattatgcgagtattcgtatgaattgcttctccagtatctccagaaaacacaagcttttgtggtgcttggagtaatcaatgagcacataacttttgaagtatctcctgggcagtcctcattaatctctgatgatgctgatgttgttgctctgattgggacaagtaaggacttggcaaaacaaataaatcagaaggaagtacattgggggttgcttgaagattctgttgaagagcaaatggagaaggcactagcagaatctgataaaatagaagctgaaagcaacgatgctgatgcagaagataacaagaaaaggaatacagaaggtggaaagcaaaatacttctcttgtgtggggacacttgctttcagctgcgaaggagcattgcttgcatcggggtcggctgactgtactgttaagctctgggatgtcgctttcagcacaaaagccctgaagacagaggacaccaaaggcagctcatcagctaaccgactgagactgcttaaatctctgcctacaaaatcagctcctgtctatagcctgcggttttctcggaggaaccttctgtttgcctccggtgctctcgcgtaagctgcgtgtttcgtagaatacagctagaactgttccggttttgacatggagtagtgaagttggcatttcgcagactccgctgtggatcctattgtagagctaatattttcgttagcaatctcaacggcccagcatgtatgcacagcggaattgagcaccgcagatgctttgtagcgtgcttgcaacattgtgacattgttattaggtaaatacgtcgtgtaattttttttaggttgtgatcttatgatttataaacgccactaaatgtacatatgcctgataggagatagcttgtaagggatgaccggatgatttggtgacaaaacaatgcattttatctacttctcaaacatgtaaaata

SEQ ID NO: 222313 - DNA, 2807 bp, Zea Mays
ctcggcctttcgggtctttcgctccccggctcttcgtctccctctcttgccgaatccaagccctaaaccatagggcttgcctggtgcccgggtgggctccccatggcggcaatagaggacgaggagatggagaagaaggtgcagcagtacctgcaccgcaaggggttccgcctcaccgagctcgcgctccacgaggagcgcagtcgcctctccacctccgacgtcgcgcttacccggtaggtttgcccgtcccgcttccctggcctacattgggctgcagctctcgccctggccagtgacggtagcttctctggtaccaggaaatctagtggcctcgtgtgaagtcgaactggtgcgttttatttggctgctcggtgtctgaacctctgtctgcgtgctctcgccttggctgtcgattttactaatttggttgcttggatgtggaccgttggcttagatagtcaattaggtactcatgttgcggattgaagggtataaagttatgccaattcagttttcatgaagatccatgttttacattgctgccagctgccagttacatgccattgttcaggcccgttacggtagcaaccctgattaaaattgtattactatttgaatattgcaataagtttgttctgaaaaaatgaataactttagctacacagttattttgaggaagagtgtgtgggctgtgttgccatcgtaccattttattctatctcctgaatcctgatacaatgccatgtagttctcctgcgtgtttgaggcaaaaaagatactgctaattttcctttagcagtaagtgccatagtttgctgtcttaggttgtttccacatgtatcggatatctgttctttggagaggaagaaatgagctacatgttgcttagatgttaacactatatcgtgaagggaagggacaggtaacagcaaattcaatgtttttctgcctgaaatttttgtgatcatttggaaaacagtgttttctggatgcttgcatgtgatgattggtgaagcaatcggctttgttggttcagtggtgctttattgatattataataatcgaagttcagttgttttgtcattgtctttcactctcccttcgaaatgccataatatacacagattctgaagtggctatattttcacttacaatcttaccatacacatccgttgattgattatattcttcaataacaggtctgacaataatccagcaagataccatgagggatacagcagattaatagcatgggcgtatagttctcttgatcaatataagtgcactgcttgtagataaattgtacttaatattcagccaaagcatatcacgccttcaaactatttctaactgttaccttcaagtgatgcattttatgaatcctctgtgttctatggcacaaatttacttggcagacctcctctccttttatgaatcccatatctgtcatataagcatgattttgcacttgacaacttatgtaattctagtttttcaaaagggcgtttggttgtggcaggcaaactattttatgttgtgatctgattttttaacttacagtcttacgctccattctgttcttaaacttggcaatataattcatatttcttaattcagatattttttgtagcatgaattacttcgcgtcctttacccagtttttatccattgcttcatggatctagtggcagagggacatatgcacaatgctcggtcatttttccatacatttcgggaagctcataaggtgatgcattcaagggatcttcagaagctggaaggcatcctctctccttcacacttggaggaaacggaactggctcgatcttttaggaaaaaataaatttaaaattaaattatgcgagtattcgtatgaattgcttctccagtatctccagaaaacacaagcttttgtggtgcttggagtaatcaatgagcacataacttttgaagtatctcctgggcagtcctcattaatctctgatgatgctgatgttgttgctctgattgggacaagtaaggacttggcaaaacaaataaatcagaaggaagtacattgggggttgcttgaagattctgttgaagagcaaatggagaaggcactagcagaatctgataaaatagaagctgaaagcaacgatgctgatgcagaagataacaagaaaaggaatacagaaggtggaaagcaaaatacttctcttgtgtggggacacttgctttcagctgcgaaggagcattgcttgcatcggggtcggctgactgtactgttaagctctgggatgtcgctttcagcacaaaagccctgaagacagaggacaccaaaggcagctcatcagctaaccgactgagactgcttaaatctctgcctacaaaatcagctcctgtctatagcctgcggttttctcggaggaaccttctgtttgcctccggtgctctcgcgtaagctgcgtgtttcgtagaatacagctagaactgttccggttttgacatggagtagtgaagttggcatttcgcagactccgctgtggatcctattgtagagctaatattttcgttagcaatctcaacggcccagcatgtatgcacagcggaattgagcaccgcagatgctttgtagcgtgcttgcaacattgtgacattgttattaggtaaatacgtcgtgtaattttttttaggttgtgatcttatgatttataaacgccactaaatgtacatatgcctgataggagatagcttgtaagggatgaccggatgatttggtgacaaaacaatgcattttatctacttctcaaacatgtaaaata

SEQ ID NO: 222314 - DNA, 1860 bp, Zea Mays
ctccgttccgttccgtcgtctcggcctttcgggtctttcgctccccggctcttcgtctccctctcttgccgaatccaagccctaaaccatagggcttgcctggtgcccgggtgggctccccatggcggcaatagaggacgaggagatggagaagaaggtgcagcagtacctgcaccgcaaggggttccgcctcaccgagctcgcgctccacgaggagcgcagtcgcctctccacctccgacgtcgcgcttacccggtctgacaataatccagcaagataccatgagggatacagcagattaatagcatgggcgtatagttctcttgatcaatataagtgcactgcttgtagataaattgtacttaatattcagccaaagcatatcacgccttcaaactatttctaactgttaccttcaagtgatgcattttatgaatcctctgtgttctatggcacaaatttacttggcagacctcctctccttttatgaatcccatatctgtcatataagcatgattttgcacttgacaacttatgtaattctagtttttcaaaagggcgtttggttgtggcaggcaaactattttatgttgtgatctgattttttaacttacagtcttacgctccattctgttcttaaacttggcaatataattcatatttcttaattcagatattttttgtagcatgaattacttcgcgtcctttacccagtttttatccattgcttcatggatctagtggcagagggacatatgcacaatgctcggtcatttttccatacatttcgggaagctcataaggtgatgcattcaagggatcttcagaagctggaaggcatcctctctccttcacacttggaggaaacggaactggctcgatcttttaggaaaaaataaatttaaaattaaattatgcgagtattcgtatgaattgcttctccagtatctccagaaaacacaagcttttgtggtgcttggagtaatcaatgagcacataacttttgaagtatctcctgggcagtcctcattaatctctgatgatgctgatgttgttgctctgattgggacaagtaaggacttggcaaaacaaataaatcagaaggaagtacattgggggttgcttgaagattctgttgaagagcaaatggagaaggcactagcagaatctgataaaatagaagctgaaagcaacgatgctgatgcagaagataacaagaaaaggaatacagaaggtggaaagcaaaatacttctcttgtgtggggacacttgctttcagctgcgaaggagcattgcttgcatcggggtcggctgactgtactgttaagctctgggatgtcgctttcagcacaaaagccctgaagacagaggacaccaaaggcagctcatcagctaaccgactgagactgcttaaatctctgcctacaaaatcagctcctgtctatagcctgcggttttctcggaggaaccttctgtttgcctccggtgctctcgcgtaagctgcgtgtttcgtagaatacagctagaactgttccggttttgacatggagtagtgaagttggcatttcgcagactccgctgtggatcctattgtagagctaatattttcgttagcaatctcaacggcccagcatgtatgcacagcggaattgagcaccgcagatgctttgtagcgtgcttgcaacattgtgacattgttattaggtaaatacgtcgtgtaattttttttaggttgtgatcttatgatttataaacgccactaaatgtacatatgcctgataggagatagcttgtaagggatgaccggatgatttggtgacaaaacaatgcattttatctacttctcaaacatgtaaaata

SEQ ID NO: 222315 - DNA, 1096 bp, Zea Mays
atgccgcagcggcattcgaaaaacaacaacgacctcgccttcttcacgtacgaggagaagcggaagctcgggtacggcacgcagcgggagcgcctgggaaaggactccatcaagcccttcgacgcctgctgcctctgcctcaagccgctcatcggcccgctctgctgccccaagggccacacattctgtaaggagtgcatcctcgagtgcctcctctcccagaagaaggacatcaagcgcaagctagcagcacatgaggcccagaaaaagcaggagaaagaagaggaggaagagaagctaattctgcagaaggctaaggagttggatgcctttgatcagcagaatcatggagctgttccccagtaccatgatcgcagtggttcccaatacaagaatgggtttcatggagcaaatagtgtgaaggtcacttcttttgaagaggaagcccttcgcaatatgaaggcattctggctcccttcagctactcctgaagctacggtcaagaggaaactgctgatcagaagagcagcaaggcaggaaactcctgtagctacatgtgccctagttgcaagtccactctcacaaataccatgtcccttgtggcggtgagcacctgtggccatgtcttctgcaagaaatgttccgacaagtttctagtgaaggataaagcttgcttggagtgcagcaaaccattcagggagaggaatctggttccattggagaaaggaggaactgggtttgctgcacatgatgaacgcctggaggcaagagatttcaagtatttgggtagtggctctgggttagggctagtgaagcctgcaccaaaaacttactaaccttgaataattatagctgatgttgtgtattgtttaccatggtgtcatgaaattatgtaacctggagaattttgttttatggcatcaaaatcgttgtattcagaacagttcatcttcagtcttttaggggctgtttggtattacgcctaaactgccacctcccgccacacttttgctgccgcagctgtggcggccgattcggccgccgcggcttaggcgcggcgccgcgcgtcaggaaccaaactggcccttaatctatc

SEQ ID NO: 222316 - DNA, 1430 bp, Zea Mays
cacaaatagtgaaatttctcacaccttgaagatgctctggtagtctggtactgtacagtcgcagcggcgaaaggggaatcgcgcgaaatggagctctcatcggcggggaggtggactgacctccccgaggacatcgccctagccgtcgcctcccgcctccaggaggctgatgtgtgcgcgctcggcggctgctcgcgcacctggcgcagagcctgcgacgccgactgcatctgggagcgcctctttcgctgccgctggccagctgccgtggcggaggcgtcggcgtcgtcgtcccgtatgcaggctagcagaaccaaagtttcttgaccggcgaaggaaggacatctcccacgatattgtttggaagaagaaaccacagtgcaccctattctatgagttatcagggagggaggctttttaaccagcactgaaaccccacaggagttgaacccaggcgctggaggtggtactccggagtcacaaccactaggctatgaacccttttgctagtggaaccaaatccattggaccagaactggacctgtctgcctactgcaaatctatggttaatctttagggaacattttttttgcattttttgaaggattgctttgttctttccagagagtgagatatacaagttaaaaagggctggaaagctctctacatcagccaacacagaagaatggctgctgcaatatctaatgtggttgaatttgtgggaggcagcttaaataatgggtcacttgaatccgaatactatctgaaagctattgctgatttggccatgatacttgatataggatttctcgatgtccagtttttcttgttttcaaggaaccatagtgcgataataaacctaattggactgcactactcgatcgcatctttgcatgtgctgccagctgaagtcagtaaagcactccaagctcaccgtgtatcagaaaggatggtttgtgtgaacttgctcaagcttggtaggtggttctatggtttccggttgcctgatgagtacgagtcccgcaaaatctcgctaggtgagctcaccacggctgagggagcagagattcttgccattcttaaccgtggagctgtccacgaggtgtttcgtctccgcatcggtttggtgaacgtagataagtgatctggagtacaaaaaaagtacacacacaatatgtacttggcttgttttgcccattgtaaatatgtgtagtctttctgtgttgtaagtcatctgctgctctctgggttcttctttgttgtaagtgcaactgtggggatggatcgaagtatggacccatttaaacttttgtggcatcatagtcttctataaacaaataataaaggcttgccatgtgtaattagtgctacacattttcaccgtttctgtgataatttctgttgattttttttccatattttatttttct

SEQ ID NO: 222317 - DNA, 1825 bp, Zea Mays
gtggccgacccccatctgggcgggcgccatggatagtcctgccgtttccgggttctttgcaaatcatcggaatggcaagtgcactggagacgctatgcggccaggcctacggtgcgaagcagtaccataagctaggcctagacacctacagagcggtcgtcaccctcctggtggtctgcgtccccctctcgctcctctgggtgttcatggacaagatcctggtcctcataggccaggaccctctcatctcgcaaggcgccgggaggtacatggtctggctgatcccggggctcttcgccaacgcggtgatccagccgctcaccaagttcctgcagacgcagagcctcatctacccgctgctgctgtcgtccgcggcgacggcggcggtccacgtccccctgtgctacgtgatggtgttcaagaccgggctcgggtacacgggcgccgccctgaccataagcatatcgtactggctgaacgtggccatgctcgtcggatacatcgccttctccagctcttgcaaggagacgcgcgcgcgcccgacggtcgaggtcttcaggggagtcgacgcgttcctgcgtctcgccctgccttctgcgctcatgatgtgtcttgaatggtggtcgtttgagctccttactctcatgtcagggcttctacccaacccagagctgcagacctcagtgctttcgatctgtctcacgagtgtaacattactcttcactataccttttggccttggagctgctggaagcacgcgagtggcaaatgagctgggcgctgggaaccctgacggagctcgatcagcagtccgcgtggtgctgtccatggcggggatcgacgcggtcgtcgtgagcggaagccttctggcggcccggcgcctcgtgggcatcgcgtacagcagcgaggaggaggtcatatctgcggtcgccgccatggttcctctggtctgcatcaccgccataactgactgcctacaaggaatcctctcaggcgtcgcccgcgggtgcgggtggcagcacctgggcgcgtacgtgaacctcggctcgttctacctgctggggatcccgatggcgatcctcctcggctttgtgctgcgcatggggtcgagggggctctggatgggcatcgtctgcggctccctgtcgcagaccacgctcatgtccgccatcacgttcttcaccgactggaacaagatggctgagaaggctagagagagggtgttcagcgacaagcagccacaagagccggggccatgatttgtacgccgactagcggcagctgcacatttttccagaccggttttgcaggggatcggaaggcgtttgcttgtcattccgtcgcattcacgaggagggagggggtcatgcctccctcctgcaaagtttctcacaaggcaaatgggttcttgctttgaacttcgccttcctacgtttgatttttgtatcatgtaaagtggagaggaacatggaacgaacaaattggacctcatatatgactaacaaggcgaaaatcatctcactaaactctatgtactatgtatcgttgatgtacatcggggctccaccccgtctgttttccatccaggtagagccatgaaaaaatttaggacgggttgaattaaaccgctatagtgacatgatcacactaaactactcaaaataaacagatataatagtttaaagtagttttatattgaaataggatcggagactcagagctaacattttagagatttggggccaactcaaatattggggccttttctatataaatataattttacttacgtacttttttatcagtagaaattaacatggtatta

SEQ ID NO: 222318 - DNA, 2719 bp, Zea Mays
ctcgccggtgctgctgcaattaacgccgcccccggccaaccacccgaaacctacctccgccgccgttgtcgccaccgtcaacatggcgagccaaggggagccctcggcctctgcttccgatccgaaggagaagaaggacttctcgacggcgatcctggagaggaaaaagtcaccgaaccgccttgtcgtcgacgaggccaccaacgacgataactccgtcgtcgcgctgcaccctgacaccatggagaggctgcagctcttccgcggcgacaccgtgctcctcaagaggaaagacactatttgcattgtccttgcggacgaaacctgtgaggagccaaaggttcggatgaacaaggttgtccgccagaacctaagggtgaggcttggtgatgtggtttctgtccaccagtgccaggatgtgaaatatgggaagcgtgtccacattcttccaattgatgatacagttgaaggcattacagggaacctgtttgatgccttcttgaaaccatatttcctagaagcatacaggccgttgaggaaaggagaccttttccttgtcagaggaggaatgagaagtgtggaattcaaagtgatagagactgatcctgctgaatattgtatcgttgcgccagatactgaaatattttgtgatggggagcctattaagagggaggatgaggagcgtcttgatgaagttggttatgatgatgttggtggagttagaaagcaaatggcccaaatcagagagcttgttgagcttccactacgccatcctcaacttttcaaatctattggtgtgaagccaccaaagggcatattgctgtacgggccacctggttccggaaagactcttattgctcgtgctgttgcaaatgagactggagcctttttcttcctgatcaatggtccagagattatgtcaaagctggcaggggagagtgaaagcaatctcagaaaggcatttgaagaagcagagaagaatgctccatctatcattttcattgatgaaattgattccattgcacccaagagagagaagaccaatggagaagtagagcgtcgtattgtttcacagctactgactcttatggatggactgaaatctcgttcccatgttattgttatgggtgctacaaaccgaccaaacagcattgatcctgctcttcgaagatttggaaggtttgatcgggaaattgacattggagttcctgatgaagttggccgtctcgaggttctccgcattcacactaagaacatgaaactagctgaagatgttaatttggaactcatttcaaaagatacccatggatatgttggtgctgatcttgctgccctttgcactgaggctgctcttcagtgcattcgtgagaagatggacatcatagatcttgaggatgagacaatcgatgcagagatattgaactcaatggctgttacaaatgaccatttcaagactgcgcttggaacaagcaacccatctgctcttcgtgaaactgttgtcgaagtcccaaatgtctcttgggaggatattggtgggctggagaatgtcaagagggagctccaggagactgttcaatatcctgtggagcatccggagaagttcgagaagtttggcatgtctccatccaaaggagttttgttctatggtcctcctggttgtggtaagaccttgttggcaaaggcaattgccaacgagtgccaggctaacttcatcagtgtcaagggtcctgagttgcttaccatgtggtttggtgagagtgaagccaacgtccgtgaaatttttgacaaggctcgtcaatctgctccttgtgtcctcttctttgatgagcttgactcaattgctactcagagaggaagcagtgtgggtgatgctggaggtgcggctgatagagtgcttaatcagctactgacagaaatggatggcatgaatgccaagaaaactgtgtttattattggagctacaaacaggcctgacatcattgaccctgctctgctgaggccagggcgtcttgaccagctgatctacattccactgcctgatgagcagtctaggctccagatcttcaaggcctgccttaggaagtcccctgtggcgaaggatgtggacttgaatgctcttgctaagtacactcaagggttcagtggagcagatatcacagaaatttgccagcgtgcgtgcaaatatgcaatcagagagaacattgagaaggatattgagagggaaaggcggagaaaggacaaccctgaggcgatggaggaagacgaagtggatgagatcgctgagatcagggcccctcacttcgaggagtcgatgaagtatgctcggcgtagtgtcagtgatgctgatatccgcaagtatcaggcgtttgcccagacattgcagcagtcccgggggttcggcagtgagttccgcttctcggatcagccggcgacagctggtgctgctgctgcagctgatccgtttgcttctgcgggtgctgcggctgatgatgacgatctatacagctagttgggttgttcaatatcagtcccgtcactcatctgtttaaaactgatcatactaaacacgcttgtcatgcaatgatatttatttgccgtacatttggacgtcgctgagatgatgcactctcggccttcggttaacttttcatgccatattctccatgtcattgtctgggccatgacattttattaattattgtgaaatctatcatctctc

SEQ ID NO: 222319 - DNA, 1909 bp, Zea Mays
gtcgagtgctccgcatctcgcattctcgccggtgctgctgcaattaacgccgcccccggccaaccacccgaaacctacctccgccgccgttgtcgccaccgtcaacatggcgagccaaggggagccctcggcctctgcttccgatccgaaggagaagaaggacttctcgacggcgatcctggagaggaaaaagtcaccgaaccgccttgtcgtcgacgaggccaccaacgacgataactccgtcgtcgcgctgcaccctgacaccatggagaggctgcagctcttccgcggcgacaccgtgctcctcaagggtaagaagaggaaagacactatttgcattgtccttgcggacgaaacctgtgaggagccaaaggttcggatgaacaaggttgtccgccagaacctaagggtgaggcttggtgatgtggtttctgtccaccagtgccaggatgtgaaatatgggaagcgtgtccacattcttccaattgatgatacagttgaaggcattacagggaacctgtttgatgccttcttgaaaccatatttcctagaagcatacaggccgttgaggaaaggagaccttttccttgtcagaggaggaatgagaagtgtggaattcaaagtgatagagactgatcctgctgaatattgtatcgttgcgccagatactgaaatattttgtgatggggagcctattaagagggaggatgaggagcgtcttgatgaagttggttatgatgatgttggtggagttagaaagcaaatggcccaaatcagagagcttgttgagcttccactacgccatcctcaacttttcaaatctattggtgtgaagccaccaaagggcatattgctgtacgggccacctggttccggaaagactcttattgctcgtgctgttgcaaatgagactggagcctttttcttcctgatcaatggtccagagattatgtcaaagctggcaggggagagtgaaagcaatctcagaaaggcatttgaagaagcagagaagaatgctccatctatcattttcattgatgaaattgattccattgcacccaagagagagaagaccaatggagaagtagagcgtcgtattgtttcacagctactgactcttatggatggactgaaatctcgttcccatgttattgttatgggtgctacaaaccgaccaaacagcattgatcctgctcttcgaagatttggaaggtttgatcgggaaattgacattggagttcctgatgaagttggccgtctcgaggttctccgcattcacactaagaacatgaaactagctgaagatgttaatttggaactcatttcaaaagatacccatggatatgttgaaatttgccagcgtgcgtgcaaatatgcaatcagagagaacattgagaaggatattgagagggaaaggcggagaaaggacaaccctgaggcgatggaggaagacgaagtggatgagatcgctgagatcagggcccctcacttcgaggagtcgatgaagtatgctcggcgtagtgtcagtgatgctgatatccgcaagtatcaggcgtttgcccagacattgcagcagtcccgggggttcggcagtgagttccgcttctcggatcagccggcgacagctggtgctgctgctgcagctgatccgtttgcttctgcgggtgctgcggctgatgatgacgatctatacagctagttgggttgttcaatatcagtcccgtcactcatctgtttaaaactgatcatactaaacacgcttgtcatgcaatgatatttatttgccgtacatttggacgtcgctgagatgatgcactctcggccttcggttaacttttcatgccatattctccatgtcattgtctgggccatgacattttattaattattgtgaaatctatcatctctc

SEQ ID NO: 222320 - DNA, 2774 bp, Zea Mays
ataaggaaagctaatccccctcgtcgagtgctccgcatctcgcattctcgccggtgctgctgcaattaacgccgcccccggccaaccacccgaaacctacctccgccgccgttgtcgccaccgtcaacatggcgagccaaggggagccctcggcctctgcttccgatccgaaggagaagaaggacttctcgacggcgatcctggagaggaaaaagtcaccgaaccgccttgtcgtcgacgaggccaccaacgacgataactccgtcgtcgcgctgcaccctgacaccatggagaggctgcagctcttccgcggcgacaccgtgctcctcaagggtaagaagaggaaagacactatttgcattgtccttgcggacgaaacctgtgaggagccaaaggttcggatgaacaaggttgtccgccagaacctaagggtgaggcttggtgatgtggtttctgtccaccagtgccaggatgtgaaatatgggaagcgtgtccacattcttccaattgatgatacagttgaaggcattacagggaacctgtttgatgccttcttgaaaccatatttcctagaagcatacaggccgttgaggaaaggagaccttttccttgtcagaggaggaatgagaagtgtggaattcaaagtgatagagactgatcctgctgaatattgtatcgttgcgccagatactgaaatattttgtgatggggagcctattaagagggaggatgaggagcgtcttgatgaagttggttatgatgatgttggtggagttagaaagcaaatggcccaaatcagagagcttgttgagcttccactacgccatcctcaacttttcaaatctattggtgtgaagccaccaaagggcatattgctgtacgggccacctggttccggaaagactcttattgctcgtgctgttgcaaatgagactggagcctttttcttcctgatcaatggtccagagattatgtcaaagctggcaggggagagtgaaagcaatctcagaaaggcatttgaagaagcagagaagaatgctccatctatcattttcattgatgaaattgattccattgcacccaagagagagaagaccaatggagaagtagagcgtcgtattgtttcacagctactgactcttatggatggactgaaatctcgttcccatgttattgttatgggtgctacaaaccgaccaaacagcattgatcctgctcttcgaagatttggaaggtttgatcgggaaattgacattggagttcctgatgaagttggccgtctcgaggttctccgcattcacactaagaacatgaaactagctgaagatgttaatttggaactcatttcaaaagatacccatggatatgttggtgctgatcttgctgccctttgcactgaggctgctcttcagtgcattcgtgagaagatggacatcatagatcttgaggatgagacaatcgatgcagagatattgaactcaatggctgttacaaatgaccatttcaagactgcgcttggaacaagcaacccatctgctcttcgtgaaactgttgtcgaagtcccaaatgtctcttgggaggatattggtgggctggagaatgtcaagagggagctccaggagactgttcaatatcctgtggagcatccggagaagttcgagaagtttggcatgtctccatccaaaggagttttgttctatggtcctcctggttgtggtaagaccttgttggcaaaggcaattgccaacgagtgccaggctaacttcatcagtgtcaagggtcctgagttgcttaccatgtggtttggtgagagtgaagccaacgtccgtgaaatttttgacaaggctcgtcaatctgctccttgtgtcctcttctttgatgagcttgactcaattgctactcagagaggaagcagtgtgggtgatgctggaggtgcggctgatagagtgcttaatcagctactgacagaaatggatggcatgaatgccaagaaaactgtgtttattattggagctacaaacaggcctgacatcattgaccctgctctgctgaggccagggcgtcttgaccagctgatctacattccactgcctgatgagcagtctaggctccagatcttcaaggcctgccttaggaagtcccctgtggcgaaggatgtggacttgaatgctcttgctaagtacactcaagggttcagtggagcagatatcacagaaatttgccagcgtgcgtgcaaatatgcaatcagagagaacattgagaaggatattgagagggaaaggcggagaaaggacaaccctgaggcgatggaggaagacgaagtggatgagatcgctgagatcagggcccctcacttcgaggagtcgatgaagtatgctcggcgtagtgtcagtgatgctgatatccgcaagtatcaggcgtttgcccagacattgcagcagtcccgggggttcggcagtgagttccgcttctcggatcagccggcgacagctggtgctgctgctgcagctgatccgtttgcttctgcgggtgctgcggctgatgatgacgatctatacagctagttgggttgttcaatatcagtcccgtcactcatctgtttaaaactgatcatactaaacacgcttgtcatgcaatgatatttatttgccgtacatttggacgtcgctgagatgatgcactctcggccttcggttaacttttcatgccatattctccatgtcattgtctgggccatgacattttattaattattgtgaaatctatcatctctc

SEQ ID NO: 222321 - DNA, 1484 bp, Zea Mays
cgcagcccgcaggagtgcaggacccggctgccgcaaccgccccgtcgcagcgccaaacatcgatcaggaggctgtcagagatctggcaccgcaacgtcgtgacgttgatcggcttctgccaagaaggcggtctacagatgctggtgttcgaatacctgcccaacgccagtgtcagcggccacttgtacgacaccggcaaggagacgatgaccaggctggagttcaagcagaggctgtcaatagccattggagcagctaaaggtctgagtcacctccacagcctggcgccgccgctgatccacagggacttcaagacgagcaacgtgctggtcgacgagaacttcatcgccaaggtgtccgacgccgggatccacaggctgctgcgagggcctgatggtggcgccgtcgccgctctggcgagtcgcggtgtcttccaagacccggaggtacattcatcggcgcaggcgcagctctctgagactgagagcagcgacgtgtacagcttcggggtgttccttctcgagctggtcacaggcagggaggctgcggggctgatgccgccggggtccagcaaggactctctcgctcaatggatggaggcgcgtttcgcctcgaacgagctggtcgacccgagactgggagggagcttcacctcggagggtatggcggaggtggtgggcctggcgtccagctgcctgagcccgtcggcgaggcggcggcccaggatgcggctggtggcggcggagctggaccggatcctggagaaggagatggccctgaccaccgtcatgggcgacggcggcaccgccatcgtcacgctcggcagccagctcttcacgtcctgactgaccgggatccgatggctggcatcgtcggcccaaggaggaagcatggtcgccgacgaagagacccccgcgttgcttccttcgtgtcctgggccgggagctgaacgacgcaacgcgatgcaagcagttcgtggccgccggtgattctccagctcactgctcacctcaggaaatttcaagagacggcgacaggcgcgcgaacctgtgtcctgcattttcttcagtcttccatgttcagagttccgttggatttcatccagcagctcagccaaaatatgtgtatgtgtaaaaattcacatctggaattggaagatggaatttatactagtactagaggcatattttgggctgtggaacctcatcacccagggtcacttatttccatttgtttattctttctctgaaacaacatgcgatgcgatgcgacactgcagctctcccaaaccgaactgtacccaaccgaagcgtgtcagtccagttcaattttaccactagatcgagctgctcctactactagaactacaactgaaacagaaagcattgtgcatgaattatctgcccaactagtgaagagtgacgaataacagaggtaaataaacggcattctcatgaacaggttgaagctctagtgaatttaat

SEQ ID NO: 222322 - DNA, 2169 bp, Zea Mays
ctgggccagcgtcgtcgtcttgtcttgctccgctccgctcctctcctctcctctcctctatcatatttaccaccaacggcatgccgctgtcgctgcctttaaatagccggcggggggcaaacagctcgtcagtcaggctcgcggccgagccaccgaggagcaaagcaaagctctcgttggtcgtggcggcagcggcggcggtggcggtgtcgagctgcggtgctgaaggcaagagagccgcgcgccgtgaagagtcgtcgtcgatccggccgagctccgtcgcttcattgatgaatgccgaagctatagcggtccttgctcgttccaaggttcgatgccccggtcgccgcccggatgacactgccaaccccggtggtagccggcgttgcggctggcgccgccgcgctgctactggccgccgccctcgccgtggcgtggtggtggctcgtgatcgtgaggcggcgccggcgccgtgaccggagctccgacaccggatcctcgtcggaggctcctcctcccacgctggcggagtggggccggtgcggccgcacctcgtcggcgcccgagttccacggcgccaggcagttctcgctggaggagctggcgcacgccaccaacggcttcgccgaggccaacctggtcggcgcgggggcctttggcctggtgtacaagggcctgctgctagacggcaccgtcgtcgccatcaagcgccgcgcgggcgcgccgcgccaggacttcgcaaacgagatcaggaggctgtcagagatctggcaccgcaacgtcgtgacgttgatcggcttctgccaagaaggcggtctacagatgctggtgttcgaatacctgcccaacgccagtgtcagcggccacttgtacgacaccggcaaggagacgatgaccaggctggagttcaagcagaggctgtcaatagccattggagcagctaaaggtctgagtcacctccacagcctggcgccgccgctgatccacagggacttcaagacgagcaacgtgctggtcgacgagaacttcatcgccaaggtgtccgacgccgggatccacaggctgctgcgagggcctgatggtggcgccgtcgccgctctggcgagtcgcggtgtcttccaagacccggaggtacattcatcggcgcaggcgcagctctctgagactgagagcagcgacgtgtacagcttcggggtgttccttctcgagctggtcacaggcagggaggctgcggggctgatgccgccggggtccagcaaggactctctcgctcaatggatggaggcgcgtttcgcctcgaacgagctggtcgacccgagactgggagggagcttcacctcggagggtatggcggaggtggtgggcctggcgtccagctgcctgagcccgtcggcgaggcggcggcccaggatgcggctggtggcggcggagctggaccggatcctggagaaggagatggccctgaccaccgtcatgggcgacggcggcaccgccatcgtcacgctcggcagccagctcttcacgtcctgactgaccgggatccgatggctggcatcgtcggcccaaggaggaagcatggtcgccgacgaagagacccccgcgttgcttccttcgtgtcctgggccgggagctgaacgacgcaacgcgatgcaagcagttcgtggccgccggtgattctccagctcactgctcacctcaggaaatttcaagagacggcgacaggcgcgcgaacctgtgtcctgcattttcttcagtcttccatgttcagagttccgttggatttcatccagcagctcagccaaaatatgtgtatgtgtaaaaattcacatctggaattggaagatggaatttatactagtactagaggcatattttgggctgtggaacctcatcacccagggtcacttatttccatttgtttattctttctctgaaacaacatgcgatgcgatgcgacactgcagctctcccaaaccgaactgtacccaaccgaagcgtgtcagtccagttcaattttaccactagatcgagctgctcctactactagaactacaactgaaacagaaagcattgtgcatgaattatctgcccaactagtgaagagtgacgaataacagaggtaaataaacggcattctcatgaacaggttgaagctctagtgaatttaat

SEQ ID NO: 222323 - DNA, 2828 bp, Zea Mays
ctcaatccatcgtactagtggtaccaccacacacagccccctgtgccctcctgccgtccgtgacgtgacgcagccgagccgcgcgcgcgctccgggccggacgcctccgctcgaatcgatggacgccgaggccggcgtcgccggcgccgaccagcttccgcggaggcagtactacctgaatctactgcttttagcttaccagagctttggtgttgtttacggggacctgagcacatcgcctctctacgtgtataaaagtacgttctctggaaagctcagacactaccaagacgaggagacagtgttcggcgtactttcgctcatcttttggaccttcactctgattcctttgcttaagtatgtcatcatcgtcttgagtgctgatgataacggcgaaggtggaccattcgctctctattcgctcctttgcaggcatgcaaaactcagcttgctgccaaatcaacaagcagctgatgaggagctatcttcatactatagaaatgggttcgcgcctcgcaatggatcttcaccttggtcaagaaggtttctggagaagcacaaaaaaatgaggactctgtttcttctcatagttctctgtggcgctagcatggtgattggtgatggtgtccttaccccagcaatctcagtactctcgtctatgtctggattacacgttcgagctactggtctacatcatagttctgtagttctcctttcatgcattgtgttggttggtctatttgcattgcaacaccgaggtactcagaaggttgcattcatgtttgcaccaattgtcatcatctggctgctttccattggaggaattggtttatacaacattcttcattggaacccaaatgtatatcaagctctctctccatattatatggttaagttctttagaaagacaggtaaagatggatggattgctttaggagggatccttctttctatgacaggcagtgaggcaatgtttgctgaccttggtcactttacgagtgcatctgtcagggtggcttttattaccgtcatatacccatgccttatgctacaatatatgggtcatgctgcatttctgtcgaagaacacatttcacatgccgacaggtttttatgatactatcccagaaccagtgttttggcctgtctttgtggtggccacacttgctgctgttgttggtagccaagctgttatttcagcaacattctccattgtgaaacaatgccatgctttgggatgtttcccgcgagtgaaggttgtccacacatcgaggtggatctatgggcagatatatattccagaaataaattggattcttatggttctttgcgtcgctgtcactattgcatttcgtgatactactcttattggcaatgcctacggtattgcatgcatgactgttatgcttgttactacattcttgatggcattaatagtcatctttgtttggcaaaggaacataatattttccctagttttcctggttttctttggatccattgaagctgtatatctttcgtcatctctcatgaaggttcctcagggaggatgggtgcctcttgtgcttgcattcatattcatgtcagtcatgtacatctggcactatgggtcaaggaggaagtaccagtttgacctacagaacaaagtatcaatgagatccatcctatctctcggtccaagccttggcatagttcgggttcctggtgttggattgatttacacagagctggtcactggtgtaccctccatcttctcccattttgtcacgaatctccctgccttccatgaagttctagtctttctctgtgtgaagtcagtgccagtgccatatgtttcaccagatgagcgataccttgtgggtaggattggacctaaagaatatcggatgtaccgttgcattgttagatatggttacaaagatgtgcagagagatgatgacaattttgagaacatgttagttatgagcatcgcaaagtttattatgatggaagcagaagatgcttcttcagcaagttatgatatcgctaacgaaggaaggatggcggtcataacaaccactgatgcctctggcagcccattggccatgagggatttcgacggcctagctgactccatgtctacgaggagcagtaaatcagaaagccttcgaagtttgcaatcctcctacgagcaagaatccccgagtgtaaaccggcgccgccgtgtccgctttgaggtcccagaggaggatggcatgggtcagcaagtgaaagaagaactcacggcactagttgaagcgaaacatgctgggatcgcatacatcatgggggcattcttatatcaaagccaggaggaactcaaatttcctgaagaagtttgctattgatgttggttactctttcctccggaagaactgcagaggcccatcagtcacgctgcacattccacacattagtctgatagaagtcggcatgatctactatgtttagcttaaggcccattgccgaagctcacatgtggatacccggtcggggcaatgcttgtgctgtctgcggattgtggtgtggaaggagttcaggcttgttcgttctgggccaagtttcagcttgtagagaagaaggcagacttctttgttaatattatttttagcctaaataaaccagcacaatgttagacggcaatgatattcactaaactttctgtagaaaatcatctggcctgttcgacgattattgcaaaaaatatggacatcaatatttgctttgcttcatcgtatcatttccaaagcaacgagcaggctgtggacgaacgcagaaattctctgggcccttaagatcgagacaaataat

SEQ ID NO: 222324 - DNA, 2895 bp, Zea Mays
ctagtggtaccaccacacacagccccctgtgccctcctgccgtccgtgacgtgacgcagccgagccgcgcgcgcgctccgggccggacgcctccgctcgaatcgatggacgccgaggccggcgtcgccggcgccgaccagcttccgcggaggcagtactacctgaatctactgcttttagcttaccagagctttggtgttgtttacggggacctgagcacatcgcctctctacgtgtataaaagtacgttctctggaaagctcagacactaccaagacgaggagacagtgttcggcgtactttcgctcatcttttggaccttcactctgattcctttgcttaagtatgtcatcatcgtcttgagtgctgatgataacggcgaaggtggaccattcgctctctattcgctcctttgcaggcatgcaaaactcagcttgctgccaaatcaacaagcagctgatgaggagctatcttcatactatagaaatgggttcgcgcctcgcaatggatcttcaccttggtcaagaaggtttctggagaagcacaaaaaaatgaggactctgtttcttctcatagttctctgtggcgctagcatggtgattggtgatggtgtccttaccccagcaatctcagtactctcgtctatgtctggattacacgttcgagctactggtctacatcatagttctgtagttctcctttcatgcattgtgttggttggtctatttgcattgcaacaccgaggtactcagaaggttgcattcatgtttgcaccaattgtcatcatctggctgctttccattggaggaattggtttatacaacattcttcattggaacccaaatgtatatcaagctctctctccatattatatggttaagttctttagaaagacaggcagtgaggcaatgtttgctgaccttggtcactttacgagtgcatctgtcagggtggcttttattaccgtcatatacccatgccttatgctacaatatatgggtcatgctgcatttctgtcgaagaacacatttcacatgccgacaggtttttatgatactatcccagaaccagtgttttggcctgtctttgtggtggccacacttgctgctgttgttggtagccaagctgttatttcagcaacattctccattgtgaaacaatgccatgctttgggatgtttcccgcgagtgaaggttgtccacacatcgaggtggatctatgggcagatatatattccagaaataaattggattcttatggttctttgcgtcgctgtcactattgcatttcgtgatactactcttattggcaatgcctacggttcctcagggaggatgggtgcctcttgtgcttgcattcatattcatgtcagtcatgtacatctggcactatgggtcaaggaggaagtaccagtttgacctacagaacaaagtatcaatgagatccatcctatctctcggtccaagccttggcatagttcgggttcctggtgttggattgatttacacagagctggtcactggtgtaccctccatcttctcccattttgtcacgaatctccctgccttccatgaagttctagtctttctctgtgtgaagtcagtgccagtgccatatgtttcaccagatgagcgataccttgtgggtaggattggacctaaagaatatcggatgtaccgttgcattgttagatatggttacaaagatgtgcagagagatgatgacaattttgagaacatgttagttatgagcatcgcaaagtttattatgatggaagcagaagatgcttcttcagcaagttatgatatcgctaacgaaggaaggatggcggtcataacaaccactgatgcctctggcagcccattggccatgagggatttcgacggcctagctgactccatgtctacgaggagcagtaaatcagaaagccttcgaagtttgcaatcctcctacgagcaagaatccccgagtgtaaaccggcgccgccgtgtccgctttgaggtcccagaggaggatggcatgggtcagcaagtgaaagaagaactcacggcactagttgaagcgaaacatgctgggatcgcatacatcatgggggcattcttatatcaaagccaggaggaactcaaatttcctgaagaagtttgctattgatgttggttactctttcctccggaagaactgcagaggcccatcagtcacgctgcacattccacacattagtctgatagaagtcggcatgatctactatgtttagcttaaggcccattgccgaagctcacatgtggatacccggtcggggcaatgcttgtgctgtctgcggattgtggtgtggaaggagttcaggcttgttcgttctgggccaagtttcagcttgtagagaagaaggcagacttctttgttaatattatttttagcctaaataaaccagcacaatgttagacgctcgcacgcatgaattggggacgatgtggaggacaagcctacaagtaagggaggtgaaagagtggcgttgcagccttgcaggtcttctgcacctaccccatcctagcttgtgtctgctccaccgtcgtcttctaccgtggacacaaggtacgggagctgctgctcgacgagctgctcgtcgcggtacgcacggctatggccaccaaaatcggctcgtagtctttccatgagacaatgtacttgatagcggacgcacagtagcaccccatgtttacggtgagcgctggcggttcgctactttaccgagttctttagaggaccttgctttgctggagaccgaaaacaaggctgcacacgctaaatttagcatacatgagcatttacagtcctgtgttggggacagtcttaatttactccatccttcattgtaaacatgtgtacagttgaaatttg

SEQ ID NO: 222325 - DNA, 1892 bp, Zea Mays
gagggatccttctttctatgacagtgaggcaatgtttgctgaccttggtcactttacgagtgcatctgtcagggtggcttttattaccgtcatatacccatgccttatgctacaatatatgggtcatgctgcatttctgtcgaagaacacatttcacatgccgacaggtttttatgatactatcccagaaccagtgttttggcctgtctttgtggtggccacacttgctgctgttgttggtagccaagctgttatttcagcaacattctccattgtgaaacaatgccatgctttgggatgtttcccgcgagtgaaggttgtccacacatcgaggtggatctatgggcagatatatattccagaaataaattggattcttatggttctttgcgtcgctgtcactattgcatttcgtgatactactcttattggcaatgcctacggtattgcatgcatgactgttatgcttgttactacattcttgatggcattaatagtcatctttgtttggcaaaggaacataatattttccctagttttcctggttttctttggatccattgaagctgtatatctttcgtcatctctcatgaaggttcctcagggaggatgggtgcctcttgtgcttgcattcatattcatgtcagtcatgtacatctggcactatgggtcaaggaggaagtaccagtttgacctacagaacaaagtatcaatgagatccatcctatctctcggtccaagccttggcatagttcgggttcctggtgttggattgatttacacagagctggtcactggtgtaccctccatcttctcccattttgtcacgaatctccctgccttccatgaagttctagtctttctctgtgtgaagtcagtgccagtgccatatgtttcaccagatgagcgataccttgtgggtaggattggacctaaagaatatcggatgtaccgttgcattgttagatatggttacaaagatgtgcagagagatgatgacaattttgagaacatgttagttatgagcatcgcaaagtttattatgatggaagcagaagatgcttcttcagcaagttatgatatcgctaacgaaggaaggatggcggtcataacaaccactgatgcctctggcagcccattggccatgagggatttcgacggcctagctgactccatgtctacgaggagcagtaaatcagaaagccttcgaagtttgcaatcctcctacgagcaagaatccccgagtgtaaaccggcgccgccgtgtccgctttgaggtcccagaggaggatggcatgggtcagcaagtgaaagaagaactcacggcactagttgaagcgaaacatgctgggatcgcatacatcatgggggcattcttatatcaaagccaggaggaactcaaatttcctgaagaagtttgctattgatgttggttactctttcctccggaagaactgcagaggcccatcagtcacgctgcacattccacacattagtctgatagaagtcggcatgatctactatgtttagcttaaggcccattgccgaagctcacatgtggatacccggtcggggcaatgcttgtgctgtctgcggattgtggtgtggaaggagttcaggcttgttcgttctgggccaagtttcagcttgtagagaagaaggcagacttctttgttaatattatttttagcctaaataaaccagcacaatgttagacggtgatgtttctcatttggcatatttgcatgcatgctctgtaattttttctgcgagctatgtgatggaaatatatgcatcatctttataaactggtcagggttctactccttccgtttcaaaataatagttgttttacctcttgatttttatgtctatattcaaacgaatgagaat

SEQ ID NO: 222326 - DNA, 2659 bp, Zea Mays
atggacgccgaggccggcgtcgccggcgccgaccagcttccgcggaggcagtactacctgaatctactgcttttagcttaccagagctttggtgttgtttacggggacctgagcacatcgcctctctacgtgtataaaagtacgttctctggaaagctcagacactaccaagacgaggagacagtgttcggcgtactttcgctcatcttttggaccttcactctgattcctttgcttaagtatgtcatcatcgtcttgagtgctgatgataacggcgaaggtggaccattcgctctctattcgctcctttgcaggcatgcaaaactcagcttgctgccaaatcaacaagcagctgatgaggagctatcttcatactatagaaatgggttcgcgcctcgcaatggatcttcaccttggtcaagaaggtttctggagaagcacaaaaaaatgaggactctgtttcttctcatagttctctgtggcgctagcatggtgattggtgatggtgtccttaccccagcaatctcagtactctcgtctatgtctggattacacgttcgagctactggtctacatcatagttctgtagttctcctttcatgcattgtgttggttggtctatttgcattgcaacaccgaggtactcagaaggttgcattcatgtttgcaccaattgtcatcatctggctgctttccattggaggaattggtttatacaacattcttcattggaacccaaatgtatatcaagctctctctccatattatatggttaagttctttagaaagacaggcagtgaggcaatgtttgctgaccttggtcactttacgagtgcatctgtcagggtggcttttattaccgtcatatacccatgccttatgctacaatatatgggtcatgctgcatttctgtcgaagaacacatttcacatgccgacaggtttttatgatactatcccagtgttttggcctgtctttgtggtggccacacttgctgctgttgttggtagccaagctgttatttcagcaacattctccattgtgaaacaatgccatgctttgggatgtttcccgcgagtgaaggttgtccacacatcgaggtggatctatgggcagatatatattccagaaataaattggattcttatggttctttgcgtcgctgtcactattgcatttcgtgatactactcttattggcaatgcctacggtattgcatgcatgactgttatgcttgttactacattcttgatggcattaatagtcatctttgtttggcaaaggaacataatattttccctagttttcctggttttctttggatccattgaagctgtatatctttcgtcatctctcatgaaggttcctcagggaggatgggtgcctcttgtgcttgcattcatattcatgtcagtcatgtacatctggcactatgggtcaaggaggaagtaccagtttgacctacagaacaaagtatcaatgagatccatcctatctctcggtccaagccttggcatagttcgggttcctggtgttggattgatttacacagagctggtcactggtgtaccctccatcttctcccattttgtcacgaatctccctgccttccatgaagttctagtctttctctgtgtgaagtcagtgccagtgccatatgtttcaccagatgagcgataccttgtgggtaggattggacctaaagaatatcggatgtaccgttgcattgttagatatggttacaaagatgtgcagagagatgatgacaattttgagaacatgttagttatgagcatcgcaaagtttattatgatggaagcagaagatgcttcttcagcaagttatgatatcgctaacgaaggaaggatggcggtcataacaaccactgatgcctctggcagcccattggccatgagggatttcgacggcctagctgactccatgtctacgaggagcagtaaatcagaaagccttcgaagtttgcaatcctcctacgagcaagaatccccgagtgtaaaccggcgccgccgtgtccgctttgaggtcccagaggaggatggcatgggtcagcaagtgaaagaagaactcacggcactagttgaagcgaaacatgctgggatcgcatacatcatgggggcattcttatatcaaagccaggaggaactcaaatttcctgaagaagtttgctattgatgttggttactctttcctccggaagaactgcagaggcccatcagtcacgctgcacattccacacattagtctgatagaagtcggcatgatctactatgtttagcttaaggcccattgccgaagctcacatgtggatacccggtcggggcaatgcttgtgctgtctgcggattgtggtgtggaaggagttcaggcttgttcgttctgggccaagtttcagcttgtagagaagaaggcagacttctttgttaatattatttttagcctaaataaaccagcacaatgttagacggtgatgtttctcatttggcatatttgcatgcatgctctgtaattttttctgcgagctatgtgatggaaatatatgcatcatctttataaactggtcagggttctactccttccgtttcaaaataatagttgttttacctcttgatttttatgtctatattcaaacgaatgagaat

SEQ ID NO: 222327 - DNA, 2784 bp, Zea Mays
tctcaatccatcgtactagtggtaccaccacacacagccccctgtgccctcctgccgtccgtgacgtgacgcagccgagccgcgcgcgcgctccgggccggacgcctccgctcgaatcgatggacgccgaggccggcgtcgccggcgccgaccagcttccgcggaggcagtactacctgaatctactgcttttagcttaccagagctttggtgttgtttacggggacctgagcacatcgcctctctacgtgtataaaagtacgttctctggaaagctcagacactaccaagacgaggagacagtgttcggcgtactttcgctcatcttttggaccttcactctgattcctttgcttaagtatgtcatcatcgtcttgagtgctgatgataacggcgaaggtggaccattcgctctctattcgctcctttgcaggcatgcaaaactcagcttgctgccaaatcaacaagcagctgatgaggagctatcttcatactatagaaatgggttcgcgcctcgcaatggatcttcaccttggtcaagaaggtttctggagaagcacaaaaaaatgaggactctgtttcttctcatagttctctgtggcgctagcatggtgattggtgatggtgtccttaccccagcaatctcagtactctcgtctatgtctggattacacgttcgagctactggtctacatcatagttctgtagttctcctttcatgcattgtgttggttggtctatttgcattgcaacaccgaggtactcagaaggttgcattcatgtttgcaccaattgtcatcatctggctgctttccattggaggaattggtttatacaacattcttcattggaacccaaatgtatatcaagctctctctccatattatatggttaagttctttagaaagacaggcagtgaggcaatgtttgctgaccttggtcactttacgagtgcatctgtcagggtggcttttattaccgtcatatacccatgccttatgctacaatatatgggtcatgctgcatttctgtcgaagaacacatttcacatgccgacaggtttttatgatactatcccagaaccagtgttttggcctgtctttgtggtggccacacttgctgctgttgttggtagccaagctgttatttcagcaacattctccattgtgaaacaatgccatgctttgggatgtttcccgcgagtgaaggttgtccacacatcgaggtggatctatgggcagatatatattccagaaataaattggattcttatggttctttgcgtcgctgtcactattgcatttcgtgatactactcttattggcaatgcctacggtattgcatgcatgactgttatgcttgttactacattcttgatggcattaatagtcatctttgtttggcaaaggaacataatattttccctagttttcctggttttctttggatccattgaagctgtatatctttcgtcatctctcatgaaggttcctcagggaggatgggtgcctcttgtgcttgcattcatattcatgtcagtcatgtacatctggcactatgggtcaaggaggaagtaccagtttgacctacagaacaaagtatcaatgagatccatcctatctctcggtccaagccttggcatagttcgggttcctggtgttggattgatttacacagagctggtcactggtgtaccctccatcttctcccattttgtcacgaatctccctgccttccatgaagttctagtctttctctgtgtgaagtcagtgccagtgccatatgtttcaccagatgagcgataccttgtgggtaggattggacctaaagaatatcggatgtaccgttgcattgttagatatggttacaaagatgtgcagagagatgatgacaattttgagaacatgttagttatgagcatcgcaaagtttattatgatggaagcagaagatgcttcttcagcaagttatgatatcgctaacgaaggaaggatggcggtcataacaaccactgatgcctctggcagcccattggccatgagggatttcgacggcctagctgactccatgtctacgaggagcagtaaatcagaaagccttcgaagtttgcaatcctcctacgagcaagaatccccgagtgtaaaccggcgccgccgtgtccgctttgaggtcccagaggaggatggcatgggtcagcaagtgaaagaagaactcacggcactagttgaagcgaaacatgctgggatcgcatacatcatgggggcattcttatatcaaagccaggaggaactcaaatttcctgaagaagtttgctattgatgttggttactctttcctccggaagaactgcagaggcccatcagtcacgctgcacattccacacattagtctgatagaagtcggcatgatctactatgtttagcttaaggcccattgccgaagctcacatgtggatacccggtcggggcaatgcttgtgctgtctgcggattgtggtgtggaaggagttcaggcttgttcgttctgggccaagtttcagcttgtagagaagaaggcagacttctttgttaatattatttttagcctaaataaaccagcacaatgttagacggtgatgtttctcatttggcatatttgcatgcatgctctgtaattttttctgcgagctatgtgatggaaatatatgcatcatctttataaactggtcagggttctactccttccgtttcaaaataatagttgttttacctcttgatttttatgtctatattcaaacgaatgagaat

SEQ ID NO: 222328 - DNA, 1648 bp, Zea Mays
aagctgcgcgccctaggctggaaaggccgcggcaatttaccggaccacatcgtactcgtacgatatgccatgccatcgatcgcccagaaccgcgctagtactgacaaatccccaagattccgttccaaagccgcgcccggtgctgctggtctggccaaaaccactccctacctaaactgctcgttttgtttcattttggtcaaacaaaccaaggaagccctctgctctgcctcgcactcgcacacaccgtgcaccaccggccggccgggtcgtctcgtctcgtctccactgtccagcctccgccccctgcacctcgccatgtgctgccgccgccaacgcggccccgacgggacgcccgtcgacggcggccgccgccgccgcaggggctgcggggccgtgctcgccgtgctggccctggcggccgccgcggtggtcgcgttcctggagagcacggccggcggggtctcgtacacgggggacggctggctgcacgagtgcgccaagtgggacgccgagggcggccggttcctggcgtccaccttcttcggcggcggcgtggcggaggtgcgcgccggcgagggcgaggagcgggtggtcgtggcggaccccgacgcggccggccgggtcgcgctggggctcgcggtcgacgcgcccaggcgccgcctgctcctggtgtactgcgatcgcccaccgcgcttcggatacgccgcgctcgccgcctacgacctcggatcgtggcgccgcctcttcctcacacgcctcgacgtgccaggcgagtcaacgttccccgacgacgtcgccgccgacgaggaaggcaacgcctacgtgaccgacgccagtggaaacaagatctggaaggtcagcccgagcggcgtgctgctgggcgtcatcaagaactccacgttcgtgcagcgaccagggctgcggcacaacctcgtcggcctcaacggcatcgtgtaccacccgaacggctacctcctcgtcgtccacaccttcggcggcgacctcttcaaggtcgacccgaagacggaggccgtgcacgccgtcaaggtgcaggggtcgctgggccgaggggacgggatggagctgctctccccgacgaggctggtcgtcgccggcacgccgagtagccggctggtggagagctccgacgactgggagaccgcgcgcgtcaccgggcagtacgtcgggccggtccaccgggtcgggtcgtcggcgacggtgaaggacggggacgtgtacatcaaccacattgtcgggtttgggctcggcaagaagaagacgcatgtccttgcgagggcggtgttctcgccgttggccgcagagagttgacggcggccggccggaccctccgtcgcgggatcaccaatcgctttttgcttaaacggcagttcatagttccactcaactccatgagagttacaggctatatatacgtatttcggtgtgattctgtgatatatagatgcttatgcttttgtattgacacgttgctcgaagctgcacgcttcttctgtttgatgcaagcaaaacatgtactacatggtttcgatcaattttcagttcgtattccacaactgccgttttagccactacatcaaccacggcagcttttgcagctaaacaaagcttcagggccaaggaattt

SEQ ID NO: 222329 - DNA, 2680 bp, Zea Mays
gcactttggtcattgtcaatacttatactagtctgtgttctgttgagcttggtagttgaagcacaaaatagcaagattcatatttttaggagtagggcgcaaaaaaagacgcaaggcagtttgttgggtccttagtaagcaaaaaggcttcctgtctcatccaatgtgctaataaaaccccacacggaaaagatagagagaaacagattgcctagcttaaaccttgagtgttctcttcctctcaaacaatcaaaccaactaagccagctgcaatcttctctgtctaatcaacttcatcgttgtttcatacaggtaaccagtgccaaaatgattgctgggggaggctattttgatggttctcatgaccatattctcatggaaggatcaatgatccatgattcttcacaatcttccatctatgacaatacagatgttgaacagcagaacttcagatttgcgccctttatcatagaagatcactccaatccagccaaccttacctctgaggctgcaagggtgatagaccaaattcaacaccagctggggattgacatcgagcaggaccatagtgatcacatgatgcaagaagttcctccagcagaaactgaaaatttggttcctgctgtctatggtgttcaagatcatatccttagccaccagatagaaggtccgcataacataactgtggaacaacaggtcctgggctatgaccctgcatcatatcgaaatggcacttatgcagctgcacatgatcttctaaattctctacatatccaaaggtgcagtttgattcctgaatttccttccacagaacatatctttagtgatccagcacagaacatggtcaacaggttggacattacaaatgatcttccaggagtagcaaatcatgaaagtggaatgatgttcagcgattcaactgtaccgttaggctatcatgcaactcaatctcatatgttgaaggatctctatcattcactaccacaaaactatgggttatttaccagtgatgatgagagagatggaatggtcggggtaccaggggtctcaggaaatattttccaggagatagatgggaggcagttcgacagcccaatactggggagtagaaagcagaaaggtggatttggcaaaggcaaaggaaaagctaactttgcaactgaaagagagaggagggagcagtttaatgtgaagtatggggctttaaggtcactgttcccaaaccctactaagaatgacagggcctctatagttggagatgccattgaatacatcaatgagcttaatagaacagtgaaagaactgaagatcctacttgaaaagaagaggaacagcgctgacaggaggaagatactgaagttggatgaggaggcagctgatgatggggaaagttcttcaatgcagccagtgagtgatgatcaaaacaatcagatgaatgggactataaggagctcctgggttcaaaggaggtccaaggagtgtgacgttgatgtccgcatagtcgatgatgaaataaatatcaaattcacagagaagaagagagccaactctttgctttgtgctgcaaaggttctagaggagtttcatcttgagctcatccatgttgttgggggaatcattggagatcaccatatattcatgttcaatacaaagatacctaagggctcttctgtgtacgcatgcgcggtggccaagaagctcctcgaagctgtggagataaagaagcaggcttataatatcttcaactagacataccaatcataatgtttatccagacaacttagcatgctggtctgctctttagcatctaataaggctcaggtatagtgaaggtgtttgtttagcagggaatgctacatctcgattctataaaagctggtatatatccaataatatgatccgtgtgaaatttgtattggagttatgacacagaattgtggtagaaactattactgcatgtggctgggaatctgggatgagatccttactgtgctatacacaggatgatcgtggtgggtttctcactttctcctacaatcacacactcacaatgcggatgacgtctggagatctacgaggtaccttaagtcctgggggaatcaatttggccagccacacccgtattagtcaagatcgccgtgattgcagaggctgatgaactggagcaggactgcaggcgtagtagctgatccgaacacaaataatcattccactccactcttgtacctgatcccgcagatctccagtgcagtgtggagactcaattcactgccctagtcatctggaatgctgtatggtctttaatgtggcggagttgctgaatccacacgtgtagtgccaatgtttaaactattcacatcagtcacatacttagcgcccctttggaatgaaggattcaatccaattttaaggctagtttggcaaccctattttccctttcccaaagaaaatgagaattctttgggaaaaattaggtgccaaactagccctaacaggaaaaaaaaaacacaggatttagggattttcccacgttccaaagggaccttatagataataataaaagtaaagcataaaattcataatttagatgatatttgatattcacgttaaattgtataacaatcttgataaaaacataaaaatgattagaaaattacctaattgatggcgatgtgccaat

SEQ ID NO: 222330 - DNA, 2520 bp, Zea Mays
ttggacttgtagtgcatttgtttagagatttcaggaaggtaaagggcactttggtcattgtcaatacttatactagtctgtgttctgttgagcttggtagttgaagcacaaaatagcaagattcatatttttaggagtagggcgcaaaaaaagacgcaaggcagtttgttgggtccttagtaagcaaaaaggcttcctgtctcatccaatgtgctaataaaaccccacacggaaaagatagagagaaacagattgcctagcttaaaccttgagtgttctcttcctctcaaacaatcaaaccaactaagccagctgcaatcttctctgtctaatcaacttcatcgttgtttcatacaggtaaccagtgccaaaatgattgctgggggaggctattttgatggttctcatgaccatattctcatggaaggatcaatgatccatgattcttcacaatcttccatctatgacaatacagatgttgaacagcagaacttcagatttgcgccctttatcatagaagatcactccaatccagccaaccttacctctgaggctgcaagggtgatagaccaaattcaacaccagctggggattgacatcgagcaggaccatagtgatcacatgatgcaagaagttcctccagcagaaactgaaaatttggttcctgctgtctatggtgttcaagatcatatccttagccaccagatagaaggtccgcataacataactgtggaacaacaggtcctgggctatgaccctgcatcatatcgaaatggcacttatgcagctgcacatgatcttctaaattctctacatatccaaaggttggacattacaaatgatcttccaggagtagcaaatcatgaaagtggaatgatgttcagcgattcaactgtaccgttaggctatcatgcaactcaatctcatatgttgaaggatctctatcattcactaccacaaaactatgggttatttaccagtgatgatgagagagatggaatggtcggggtaccaggggtctcaggaaatattttccaggagatagatgggaggcagttcgacagcccaatactggggagtagaaagcagaaaggtggatttggcaaaggcaaaggaaaagctaactttgcaactgaaagagagaggagggagcagtttaatgtgaagtatggggctttaaggtcactgttcccaaaccctactaagaagaactcactttccacagttacaaagatttctagaacatttactattttccagaatgacagggcctctatagttggagatgccattgaatacatcaatgagcttaatagaacagtgaaagaactgaagatcctacttgaaaagaagaggaacagcgctgacaggaggaagatactgaagttggatgaggaggcagctgatgatggggaaagttcttcaatgcagccagtgagtgatgatcaaaacaatcagatgaatgggactataaggagctcctgggttcaaaggaggtccaaggagtgtgacgttgatgtccgcatagtcgatgatgaaataaatatcaaattcacagagaagaagagagccaactctttgctttgtgctgcaaaggttctagaggagtttcatcttgagctcatccatgttgttgggggaatcattggagatcaccatatattcatgttcaatacaaagatacctaagggctcttctgtgtacgcatgcgcggtggccaagaagctcctcgaagctgtggagataaagaagcaggcttataatatcttcaactagacataccaatcataatgtttatccagacaacttagcatgctggtctgctctttagcatctaataaggatgatcgtggtgggtttctcactttctcctacaatcacacactcacaatgcggatgacgtctggagatctacgaggtaccttaagtcctgggggaatcaatttggccagccacacccgtattagtcaagatcgccgtgattgcagaggctgatgaactggagcaggactgcaggcgtagtagctgatccgaacacaaataatcattccactccactcttgtacctgatcccgcagatctccagtgcagtgtggagactcaattcactgccctagtcatctggaatgctgtatggtctttaatgtggcggagttgctgaatccacacgtgtagtgccaatgtttaaactattcacatcagtcacatacttagcgcccctttggaatgaaggattcaatccaattttaaggctagtttggcaaccctattttccctttcccaaagaaaatgagaattctttgggaaaaattaggtgccaaactagccctaacaggaaaaaaaaaacacaggatttagggattttcccacgttccaaagggaccttatagataataataaaagtaaagcataaaattcataatttagatgatatttgatattcacgttaaattgtataacaatcttgataaaaacataaaaatgattagaaaattacctaattgatggcgatgtgccaat

SEQ ID NO: 222331 - DNA, 2946 bp, Zea Mays
tgaattactgtctttgagatttaaacatactacctttctcaactattggacttgtagtgcatttgtttagagatttcaggaaggtaaagggcactttggtcattgtcaatacttatactagtctgtgttctgttgagcttggtagttgaagcacaaaatagcaagattcatatttttaggagtagggcgcaaaaaaagacgcaaggcagtttgttgggtccttagtaagcaaaaaggcttcctgtctcatccaatgtgctaataaaaccccacacggaaaagatagagagaaacagattgcctagcttaaaccttgagtgttctcttcctctcaaacaatcaaaccaactaagccagctgcaatcttctctgtctaatcaacttcatcgttgtttcatacaggtaaccagtgccaaaatgattgctgggggaggctattttgatggttctcatgaccatattctcatggaaggatcaatgatccatgattcttcacaatcttccatctatgacaatacagatgttgaacagcagaacttcagatttgcgccctttatcatagaagatcactccaatccagccaaccttacctctgaggctgcaagggtgatagaccaaattcaacaccagctggggattgacatcgagcaggaccatagtgatcacatgatgcaagaagttcctccagcagaaactgaaaatttggttcctgctgtctatggtgttcaagatcatatccttagccaccagatagaaggtccgcataacataactgtggaacaacaggtcctgggctatgaccctgcatcatatcgaaatggcacttatgcagctgcacatgatcttctaaattctctacatatccaaaggtgcagtttgattcctgaatttccttccacagaacatatctttagtgatccagcacagaacatggtcaacaggttggacattacaaatgatcttccaggagtagcaaatcatgaaagtggaatgatgttcagcgattcaactgtaccgttaggctatcatgcaactcaatctcatatgttgaaggatctctatcattcactaccacaaaactatgggttatttaccagtgatgatgagagagatggaatggtcggggtaccaggggtctcaggaaatattttccaggagatagatgggaggcagttcgacagcccaatactggggagtagaaagcagaaaggtggatttggcaaaggcaaaggaaaagctaactttgcaactgaaagagagaggagggagcagtttaatgtgaagtatggggctttaaggtcactgttcccaaaccctactaagaagaactcactttccacagttacaaagatttctagaacatttactattttccagaatgacagggcctctatagttggagatgccattgaatacatcaatgagcttaatagaacagtgaaagaactgaagatcctacttgaaaagaagaggaacagcgctgacaggaggaagatactgaagttggatgaggaggcagctgatgatggggaaagttcttcaatgcagccagtgagtgatgatcaaaacaatcagatgaatgggactataaggagctcctgggttcaaaggaggtccaaggagtgtgacgttgatgtccgcatagtcgatgatgaaataaatatcaaattcacagagaagaagagagccaactctttgctttgtgctgcaaaggttctagaggagtttcatcttgagctcatccatgttgttgggggaatcattggagatcaccatatattcatgttcaatacaaagatacctaagggctcttctgtgtacgcatgcgcggtggccaagaagctcctcgaagctgtggagataaagaagcaggcttataatatcttcaactagacataccaatcataatgtttatccagacaacttagcatgctggtctgctctttagcatctaataaggtgcttgcttatcacttatcagagactgaccacattgataagacttctttgatgaatgctgcaaactttcttgatagcttcttcatgctgaacttcttgtcttcttttttgtacactttaacagtcatgttggaatatgtggtgcttctgatttgctggcattgccactcaaaactttattatgtttaaaaccttttctaaacttatatagcagatcgattccaatacccaacttgcatatatcaggctcaggtatagtgaaggtgtttgtttagcagggaatgctacatctcgattctataaaagctggatgatcgtggtgggtttctcactttctcctacaatcacacactcacaatgcggatgacgtctggagatctacgaggtaccttaagtcctgggggaatcaatttggccagccacacccgtattagtcaagatcgccgtgattgcagaggctgatgaactggagcaggactgcaggcgtagtagctgatccgaacacaaataatcattccactccactcttgtacctgatcccgcagatctccagtgcagtgtggagactcaattcactgccctagtcatctggaatgctgtatggtctttaatgtggcggagttgctgaatccacacgtgtagtgccaatgtttaaactattcacatcagtcacatacttagcgcccctttggaatgaaggattcaatccaattttaaggctagtttggcaaccctattttccctttcccaaagaaaatgagaattctttgggaaaaattaggtgccaaactagccctaacaggaaaaaaaaaacacaggatttagggattttcccacgttccaaagggaccttatagataataataaaagtaaagcataaaattcataatttagatgatatttgatattcacgttaaattgtataacaatcttgataaaaacataaaaatgattagaaaattacctaattgatggcgatgtgccaat

SEQ ID NO: 222332 - DNA, 2206 bp, Zea Mays
agcgtcaaataaaaaaacagagggagtaaccagtgccaaaatgattgctgggggaggctattttgatggttctcatgaccatattctcatggaaggatcaatgatccatgattcttcacaatcttccatctatgacaatacagatgttgaacagcagaacttcagatttgcgccctttatcatagaagatcactccaatccagccaaccttacctctgaggctgcaagggtgatagaccaaattcaacaccagctggggattgacatcgagcaggaccatagtgatcacatgatgcaagaagttcctccagcagaaactgaaaatttggttcctgctgtctatggtgttcaagatcatatccttagccaccagatagaaggtccgcataacataactgtggaacaacaggtcctgggctatgaccctgcatcatatcgaaatggcacttatgcagctgcacatgatcttctaaattctctacatatccaaaggtgcagtttgattcctgaatttccttccacagaacatatctttagtgatccagcacagaacatggtcaacaggttggacattacaaatgatcttccaggagtagcaaatcatgaaagtggaatgatgttcagcgattcaactgtaccgttaggctatcatgcaactcaatctcatatgttgaaggatctctatcattcactaccacaaaactatgggttatttaccagtgatgatgagagagatggaatggtcggggtaccaggggtctcaggaaatattttccaggagatagatgggaggcagttcgacagcccaatactggggagtagaaagcagaaaggtggatttggcaaaggcaaaggaaaagctaactttgcaactgaaagagagaggagggagcagtttaatgtgaagtatggggctttaaggtcactgttcccaaaccctactaagaatgacagggcctctatagttggagatgccattgaatacatcaatgagcttaatagaacagtgaaagaactgaagatcctacttgaaaagaagaggaacagcgctgacaggaggaagatactgaagttggatgaggaggcagctgatgatggggaaagttcttcaatgcagccagtgagtgatgatcaaaacaatcagatgaatgggactataaggagctcctgggttcaaaggaggtccaaggagtgtgacgttgatgtccgcatagtcgatgatgaaataaatatcaaattcacagagaagaagagagccaactctttgctttgtgctgcaaaggttctagaggagtttcatcttgagctcatccatgttgttgggggaatcattggagatcaccatatattcatgttcaatacaaagatacctaagggctcttctgtgtacgcatgcgcggtggccaagaagctcctcgaagctgtggagataaagaagcaggcttataatatcttcaactagacataccaatcataatgtttatccagacaacttagcatgctggtctgctctttagcatctaataaggatgatcgtggtgggtttctcactttctcctacaatcacacactcacaatgcggatgacgtctggagatctacgaggtaccttaagtcctgggggaatcaatttggccagccacacccgtattagtcaagatcgccgtgattgcagaggctgatgaactggagcaggactgcaggcgtagtagctgatccgaacacaaataatcattccactccactcttgtacctgatcccgcagatctccagtgcagtgtggagactcaattcactgccctagtcatctggaatgctgtatggtctttaatgtggcggagttgctgaatccacacgtgtagtgccaatgtttaaactattcacatcagtcacatacttagcgcccctttggaatgaaggattcaatccaattttaaggctagtttggcaaccctattttccctttcccaaagaaaatgagaattctttgggaaaaattaggtgccaaactagccctaacaggaaaaaaaaaacacaggatttagggattttcccacgttccaaagggaccttatagataataataaaagtaaagcataaaattcataatttagatgatatttgatattcacgttaaattgtataacaatcttgataaaaacataaaaatgattagaaaattacctaattgatggcgatgtgccaat

SEQ ID NO: 222333 - DNA, 2752 bp, Zea Mays
ctgcccacatgccaattacattttgcctttttaccatatatattactagcagcacactcagactacttcgcaaggatggttttcagcaactagtttctgaacagcgtgtccgctgtctggtctgtcaaaataatcttggtaaccagtgccaaaatgattgctgggggaggctattttgatggttctcatgaccatattctcatggaaggatcaatgatccatgattcttcacaatcttccatctatgacaatacagatgttgaacagcagaacttcagatttgcgccctttatcatagaagatcactccaatccagccaaccttacctctgaggctgcaagggtgatagaccaaattcaacaccagctggggattgacatcgagcaggaccatagtgatcacatgatgcaagaagttcctccagcagaaactgaaaatttggttcctgctgtctatggtgttcaagatcatatccttagccaccagatagaaggtccgcataacataactgtggaacaacaggtcctgggctatgaccctgcatcatatcgaaatggcacttatgcagctgcacatgatcttctaaattctctacatatccaaaggtgcagtttgattcctgaatttccttccacagaacatatctttagtgatccagcacagaacatggtcaacaggttggacattacaaatgatcttccaggagtagcaaatcatgaaagtggaatgatgttcagcgattcaactgtaccgttaggctatcatgcaactcaatctcatatgttgaaggatctctatcattcactaccacaaaactatgggttatttaccagtgatgatgagagagatggaatggtcggggtaccaggggtctcaggaaatattttccaggagatagatgggaggcagttcgacagcccaatactggggagtagaaagcagaaaggtggatttggcaaaggcaaaggaaaagctaactttgcaactgaaagagagaggagggagcagtttaatgtgaagtatggggctttaaggtcactgttcccaaaccctactaagaatgacagggcctctatagttggagatgccattgaatacatcaatgagcttaatagaacagtgaaagaactgaagatcctacttgaaaagaagaggaacagcgctgacaggaggaagatactgaagttggatgaggaggcagctgatgatggggaaagttcttcaatgcagccagtgagtgatgatcaaaacaatcagatgaatgggactataaggagctcctgggttcaaaggaggtccaaggagtgtgacgttgatgtccgcatagtcgatgatgaaataaatatcaaattcacagagaagaagagagccaactctttgctttgtgctgcaaaggttctagaggagtttcatcttgagctcatccatgttgttgggggaatcattggagatcaccatatattcatgttcaatacaaagatacctaagggctcttctgtgtacgcatgcgcggtggccaagaagctcctcgaagctgtggagataaagaagcaggcttataatatcttcaactagacataccaatcataatgtttatccagacaacttagcatgctggtctgctctttagcatctaataaggtgcttgcttatcacttatcagagactgaccacattgataagacttctttgatgaatgctgcaaactttcttgatagcttcttcatgctgaacttcttgtcttcttttttgtacactttaacagtcatgttggaatatgtggtgcttctgatttgctggcattgccactcaaaactttattatgtttaaaaccttttctaaacttatatagcagatcgattccaatacccaacttgcatatatcaggctcaggtatagtgaaggtgtttgtttagcagggaatgctacatctcgattctataaaagctggtatatatccaataatatgatccgtgtgaaatttgtattggagttatgacacagaattgtggtagaaactattactgcatgtggctgggaatctgggatgagatccttactgtgctatacacaggatgatcgtggtgggtttctcactttctcctacaatcacacactcacaatgcggatgacgtctggagatctacgaggtaccttaagtcctgggggaatcaatttggccagccacacccgtattagtcaagatcgccgtgattgcagaggctgatgaactggagcaggactgcaggcgtagtagctgatccgaacacaaataatcattccactccactcttgtacctgatcccgcagatctccagtgcagtgtggagactcaattcactgccctagtcatctggaatgctgtatggtctttaatgtggcggagttgctgaatccacacgtgtagtgccaatgtttaaactattcacatcagtcacatacttagcgcccctttggaatgaaggattcaatccaattttaaggctagtttggcaaccctattttccctttcccaaagaaaatgagaattctttgggaaaaattaggtgccaaactagccctaacaggaaaaaaaaaacacaggatttagggattttcccacgttccaaagggaccttatagataataataaaagtaaagcataaaattcataatttagatgatatttgatattcacgttaaattgtataacaatcttgataaaaacataaaaatgattagaaaattacctaattgatggcgatgtgccaat

SEQ ID NO: 222334 - DNA, 3098 bp, Zea Mays
aaacatattctgttatctgatcatcaaatttacgtggcaaccaaattttcgtactattgcggtactgcccacatgccaattacattttgcctttttaccatatatattactagcagcacactcagactacttcgcaaggatggttttcagcaactagtttctgaacagcgtgtccgctgtctggtctgtcaaaataatcttggtactgttctcttctcattactttcagtttttagtattattggcaggatgcagatgctagattgaaactgccggcttgtatataccaacctgaagaagaagaaaaatactacctccatttttaaatagttgacgccaggtagttcatttttgaactaaaaagcgtcaaataaaaaaacagagggagtatgtatctaaataatgaagttttgcttacattatgaattactgtctttgagatttaaacatactacctttctcaactattggacttgtagtgcatttgtttagagatttcaggaaggtaaagggcactttggtcattgtcaatacttatactagtctgtgttctgttgagcttggtagttgaagcacaaaatagcaagattcatatttttaggagtagggcgcaaaaaaagacgcaaggcagtttgttgggtccttagtaagcaaaaaggcttcctgtctcatccaatgtgctaataaaaccccacacggaaaagatagagagaaacagattgcctagcttaaaccttgagtgttctcttcctctcaaacaatcaaaccaactaagccagctgcaatcttctctgtctaatcaacttcatcgttgtttcatacaggttgagtcatcttttcccttaattcatgggcaccagctaatagttttgtctatttcagatcctctagcaggctacttctatgtttcttaataagtaaccagtgccaaaatgattgctgggggaggctattttgatggttctcatgaccatattctcatggaaggatcaatgatccatgattcttcacaatcttccatctatgacaatacagatgttgaacagcagaacttcagatttgcgccctttatcatagaagatcactccaatccagccaaccttacctctgaggctgcaagggtgatagaccaaattcaacaccagctggggattgacatcgagcaggaccatagtgatcacatgatgcaagaagttcctccagcagaaactgaaaatttggttcctgctgtctatggtgttcaagatcatatccttagccaccagatagaaggtccgcataacataactgtggaacaacaggtcctgggctatgaccctgcatcatatcgaaatggcacttatgcagctgcacatgatcttctaaattctctacatatccaaaggtgcagtttgattcctgaatttccttccacagaacatatctttagtgatccagcacagaacatggtcaacaggttggacattacaaatgatcttccaggagtagcaaatcatgaaagtggaatgatgttcagcgattcaactgtaccgttaggctatcatgcaactcaatctcatatgttgaaggatctctatcattcactaccacaaaactatgggttatttaccagtgatgatgagagagatggaatggtcggggtaccaggggtctcaggaaatattttccaggagatagatgggaggcagttcgacagcccaatactggggagtagaaagcagaaaggtggatttggcaaaggcaaaggaaaagctaactttgcaactgaaagagagaggagggagcagtttaatgtgaagtatggggctttaaggtcactgttcccaaaccctactaagaatgacagggcctctatagttggagatgccattgaatacatcaatgagcttaatagaacagtgaaagaactgaagatcctacttgaaaagaagaggaacagcgctgacaggaggaagatactgaagttggatgaggaggcagctgatgatggggaaagttcttcaatgcagccagtgagtgatgatcaaaacaatcagatgaatgggactataaggagctcctgggttcaaaggaggtccaaggagtgtgacgttgatgtccgcatagtcgatgatgaaataaatatcaaattcacagagaagaagagagccaactctttgctttgtgctgcaaaggttctagaggagtttcatcttgagctcatccatgttgttgggggaatcattggagatcaccatatattcatgttcaatacaaagatacctaagggctcttctgtgtacgcatgcgcggtggccaagaagctcctcgaagctgtggagataaagaagcaggcttataatatcttcaactagacataccaatcataatgtttatccagacaacttagcatgctggtctgctctttagcatctaataaggatgatcgtggtgggtttctcactttctcctacaatcacacactcacaatgcggatgacgtctggagatctacgaggtaccttaagtcctgggggaatcaatttggccagccacacccgtattagtcaagatcgccgtgattgcagaggctgatgaactggagcaggactgcaggcgtagtagctgatccgaacacaaataatcattccactccactcttgtacctgatcccgcagatctccagtgcagtgtggagactcaattcactgccctagtcatctggaatgctgtatggtctttaatgtggcggagttgctgaatccacacgtgtagtgccaatgtttaaactattcacatcagtcacatacttagcgcccctttggaatgaaggattcaatccaattttaaggctagtttggcaaccctattttccctttcccaaagaaaatgagaattctttgggaaaaattaggtgccaaactagccctaacaggaaaaaaaaaacacaggatttagggattttcccacgttccaaagggaccttatagataataataaaagtaaagcataaaattcataatttagatgatatttgatattcacgttaaattgtataacaatcttgataaaaacataaaaatgattagaaaattacctaattgatggcgatgtgccaat

SEQ ID NO: 222335 - DNA, 936 bp, Zea Mays
cccacctggaatgccctatccccacacgcgaatcctccaatctgtccttgccgccgccgcccgatccaggtctgcagactgctcacttctccccacccaacgcggcggcactccttctccctccccgagtgcctgctgtgcgcctgtacttcacaccggcgtcgccccctcctccagaactccccaccggagccaccctcacccgtcacgcactcctccgctgagtgcagcaagtgctgatcagcacactctcttacaaatccagagacacttcttcacagtgggtggacgggagatggtgctgaggcgggcggcaaccgaatgccccaagaaggttgcggggctgaaggatctggtgaacctgccaacccagctgcgagagttcgccggaggccggtcccaaatgtcacatatctccttcttcctcagtgtctggtcgtacatcaaggacaacaaacttcaggacccaacgaataagaacattgtgaagtgtgatgagaagctgaagaccgtattattgggcaggtccaaagtgcaactgtctgaactcccaatgattgttaagctccatttcccaaaattgccaaagtagtgacaacatagtattgtatattgaagttctgtgggaccccctacagtaacttttacttcaaaaaaaaaagttctgtgggaacatgataggatagatagaacactatatgtattgttttgctgaaatttccatttactgtctgtatgtactggagcgatctatacatcgagcataccgattagattgcttgtcattttgatagcatgtttgatttatcagtaactttgctcatgtttaactgaagagacaagatgtgcaggataaatttcttttgttgtgaattagtacaactgacttcagctaagcagaacttcaatggcgcacctgattttaggacgatagag

SEQ ID NO: 222336 - DNA, 959 bp, Zea Mays
gccaggacaaatatcccacctggaatgccctatccccacacgcgaatcctccaatctgtccttgccgccgccgcccgatccaggtctgcagactgctcacttctccccacccaacgcggcggcactccttctccctccccgagtgcctgctgtgcgcctgtacttcacaccggcgtcgccccctcctccagaactccccaccggagccaccctcacccgtcacgcactcctccgctgagtgcagcaagtgctgatcagttcggttagcacactctcttacaaatccagagacacttcttcacagtgggtggacgggagatggtgctgaggcgggcggcaaccgaatgccccaagaaggttgcggggctgaaggatctggtgaacctgccaacccagctgcgagagttcgccggaggccggtcccaaatgtcacatatctccttcttcctcagtgtctggtcgtacatcaaggacaacaaacttcaggacccaacgaataagaacattgtgaagtgtgatgagaagctgaagaccgtattattgggcaggtccaaagtgcaactgtctgaactcccaatgattgttaagctccatttcccaaaattgccaaagtagtgacaacatagtattgtatattgaagttctgtgggaccccctacagtaacttttacttcaaaaaaaaaagttctgtgggaacatgataggatagatagaacactatatgtattgttttgctgaaatttccatttactgtctgtatgtactggagcgatctatacatcgagcataccgattagattgcttgtcattttgatagcatgtttgatttatcagtaactttgctcatgtttaactgaagagacaagatgtgcaggataaatttcttttgttgtgaattagtacaactgacttcagctaagcagaacttcaatggcgcacctgattttaggacgatagag

SEQ ID NO: 222337 - DNA, 2258 bp, Zea Mays
ccaagcccagtcattcttttctgctacagtaccgtgcctggcgattccgcgtccacgcacctctcagttagggtttcggactcgaggccaagttcatctccggacgagcataccgtgagccccaacgctccaggtggtcagcttcacttccgagcgcccctctcccgacagccgtctcctcctcaccgctgcttcatcacctagccgtcgccacccatcgcctacagcgacagccgtcttccgtcacagcggagcgcccctcagatccaagggacgctgcacgagcgcaagagcaggttgttgagaaggggaatataatcatggatatcatgcagactagtgactcttcacatcatggaattgtagaaaatagcccgtacagaattccatatgacagacatgcagaaggtggtcaacttggtgcttcatggtattttagtagaaaagaaatagaggagaattccctttcgaggagagacggcattgatctgaagaaagagtcttatcttcgcaagtcatattgcacatttctgcaggatttggggatgagacttaaagtacctcaagtgacaattgctactgctatagtgttctgtcatcggttctttcttcgtcaatcgcatgccaaaaatgacagacggacaattgcaacagtatgcatgttcttggcgggaaaagttgaagaaacacccagacctctgaaggatgtcatacttctttcatatgagatcatccacaaaaaggatcctgctgcagttcaacgaataaaacagaaggaagtatatgaacaacaaaaggaacttattttactcggggaacgtgttgtgcttgtgacacttggttttgatttgaatgtgaaccatccttacaagcccttggttgaagcaataaaaatattcaaggttgctcaaaatgcacttgctcaagttgcctggaattttgtcaatgatgggctccgcacttcactttgcctgcaatttaaaccgcaccatattgcggctggtgcaatcttcctcgctgcgaagtttctcaaagtcaagcttccatcagatggcgagaaggtctggtggcaagagtttgatgtaactccgtggcagctggaagaggttagcaaccagatgttggaactgtatgagcaaaaccgtgttcaaccaccaccatcacaaggcaatgatactgaaggcagttctgcaagtgttgcgaatcaacgtgttcctggtaaagttccaggagtagctgatgaacctcctgcccatgaccataaccaagcacccagaccatcgagccagcagaacatgttagaccaccgtggttatgaccaccctcacccagataagcaaaactataggatacctccaaatgatgcaagggatggcactgctaatagcaacgaaggtcccaatgtgtcgtcttcaatgatggatgcgatgaagaaggtaaacaaggataaggtgaaagcggcactggagaagcgtaggaaatcgaaaggtgatttttcaagaaaggtcgatgtgatggatgacgatgacctcattgagagggagctggaacatggcgtggagttggctgccgaggatgagaaggtcaagcaggagagaaagcagagctggcctcatcttgcacaccaccagagcaccaaccgtgagaataccgaagagggtgagctgtccatggacagtcaagaataccgttctccggagcatgacaatcggaagagaaaggatgtgcgtgagtaccggaactacgatcgtgacgaaagggaccttaaaaggctaagatcatgagagttgcacttttgtcggagtctcatgttgttcgtgccataacatgatgtggaacctctatctttctgtcacaggtgtacttgatgcttatttggtatgctgggggatttgaactgttacatatataagtttataagatggtttccccacggtcatgtatgtgtttagccatgttggcaattgagatggcgctgtgccttgagtattccacaggtttatgctggaaacaacatttaaggaagctgcgtcctacgggtatctgaaatgtatgtattttgattccaaggtttcctcaactctaatggtagcctgcgtttttttatccgtctatctgggaacacgggtactggggatgaggtcgtgcacataatgttgttgattttgataccatgtaatgtgcatgttctctccttcctaagttatggtttttgtttttgggttttagatatatagttttattacagcacttccaag

SEQ ID NO: 222338 - DNA, 2105 bp, Zea Mays
caagcccagtcattcttttctgctacagtaccgtgcctggcgattccgcgtccacgcacctctcagttagggtttcggactcgaggccaagttcatctccggacgagcataccgtgagccccaacgctccaggtggtcagcttcacttccgagcgcccctctcccgacagccgtctcctcctcaccgctgcttcatcacctagccgtcgccacccatcgcctacagcgacagccgtcttccgtcacagcggagcgcccctcagatccaagggacgctgcacgagcgcaagagcaggttgttgagaaggggaatataatcatggatatcatgcagactagtgactcttcacatcatggaattgtagaaaatagcccgtacagaattccatatgacagacatgcagaaggtggtcaacttggtgcttcatggtattttagtagaaaagaaatagaggagaattccctttcgaggagagacggcattgatctgaagaaagagtcttatcttcgcaagtcatattgcacatttctgcaggatttggggatgagacttaaagtacctcaagtgacaattgctactgctatagtgttctgtcatcggttctttcttcgtcaatcgcatgccaaaaatgacagacggacaattgcaacagtatgcatgttcttggcgggaaaagttgaagaaacacccagacctctgaaggatgtcatacttctttcatatgagatcatccacaaaaaggatcctgctgcagttcaacgaataaaacagaaggaagtatatgaacaacaaaaggaacttattttactcggggaacgtgttgtgcttgtgacacttggttttgatttgaatgtgaaccatccttacaagcccttggttgaagcaataaaaatattcaaggttgctcaaaatgcacttgctcaagttgcctggaattttgtcaatgatggaggttagcaaccagatgttggaactgtatgagcaaaaccgtgttcaaccaccaccatcacaaggcaatgatactgaaggcagttctgcaagtgttgcgaatcaacgtgttcctggtaaagttccaggagtagctgatgaacctcctgcccatgaccataaccaagcacccagaccatcgagccagcagaacatgttagaccaccgtggttatgaccaccctcacccagataagcaaaactataggatacctccaaatgatgcaagggatggcactgctaatagcaacgaaggtcccaatgtgtcgtcttcaatgatggatgcgatgaagaaggtaaacaaggataaggtgaaagcggcactggagaagcgtaggaaatcgaaaggtgatttttcaagaaaggtcgatgtgatggatgacgatgacctcattgagagggagctggaacatggcgtggagttggctgccgaggatgagaaggtcaagcaggagagaaagcagagctggcctcatcttgcacaccaccagagcaccaaccgtgagaataccgaagagggtgagctgtccatggacagtcaagaataccgttctccggagcatgacaatcggaagagaaaggatgtgcgtgagtaccggaactacgatcgtgacgaaagggaccttaaaaggctaagatcatgagagttgcacttttgtcggagtctcatgttgttcgtgccataacatgatgtggaacctctatctttctgtcacaggtgtacttgatgcttatttggtatgctgggggatttgaactgttacatatataagtttataagatggtttccccacggtcatgtatgtgtttagccatgttggcaattgagatggcgctgtgccttgagtattccacaggtttatgctggaaacaacatttaaggaagctgcgtcctacgggtatctgaaatgtatgtattttgattccaaggtttcctcaactctaatggtagcctgcgtttttttatccgtctatctgggaacacgggtactggggatgaggtcgtgcacataatgttgttgattttgataccatgtaatgtgcatgttctctccttcctaagttatggtttttgtttttgggttttagatatatagttttattacagcacttccaag

SEQ ID NO: 222339 - DNA, 1923 bp, Zea Mays
cagtcattcttttctgctacagtaccgtgcctggcgattccgcgtccacgcacctctcagttagggtttcggactcgaggccaagttcatctccggacgagcataccgtgagccccaacgctccaggtggtcagcttcacttccgagcgcccctctcccgacagccgtctcctcctcaccgctgcttcatcacctagccgtcgccacccatcgcctacagcgacagccgtcttccgtcacagcggagcgcccctcagatccaagggacgctgcacgagcgcaagagcaggttgttgagaaggggaatataatcatggatatcatgcagactagtgactcttcacatcatggaattgtagaaaatagcccgtacagaattccatatgacagacatgcagaaggtggtcaacttggtgcttcatggtattttagtagaaaagaaatagaggagaattccctttcgaggagagacggcattgatctgaagaaagagtcttatcttcgcaagtcatattgcacatttctgcaggatttggggatgagacttaaagtacctcaagtgacaattgctactgctatagtgttctgtcatcggttctttcttcgtcaatcgcatgccaaaaatgacagacggacaattgcaacagtatgcatgttcttggcgggaaaagttgaagaaacacccagacctctgaaggatgtcatacttctttcatatgagatcatccacaaaaaggatcctgctgcagttcaacgaataaaacagaagaggttagcaaccagatgttggaactgtatgagcaaaaccgtgttcaaccaccaccatcacaaggcaatgatactgaaggcagttctgcaagtgttgcgaatcaacgtgttcctggtaaagttccaggagtagctgatgaacctcctgcccatgaccataaccaagcacccagaccatcgagccagcagaacatgttagaccaccgtggttatgaccaccctcacccagataagcaaaactataggatacctccaaatgatgcaagggatggcactgctaatagcaacgaaggtcccaatgtgtcgtcttcaatgatggatgcgatgaagaaggtaaacaaggataaggtgaaagcggcactggagaagcgtaggaaatcgaaaggtgatttttcaagaaaggtcgatgtgatggatgacgatgacctcattgagagggagctggaacatggcgtggagttggctgccgaggatgagaaggtcaagcaggagagaaagcagagctggcctcatcttgcacaccaccagagcaccaaccgtgagaataccgaagagggtgagctgtccatggacagtcaagaataccgttctccggagcatgacaatcggaagagaaaggatgtgcgtgagtaccggaactacgatcgtgacgaaagggaccttaaaaggctaagatcatgagagttgcacttttgtcggagtctcatgttgttcgtgccataacatgatgtggaacctctatctttctgtcacaggtgtacttgatgcttatttggtatgctgggggatttgaactgttacatatataagtttataagatggtttccccacggtcatgtatgtgtttagccatgttggcaattgagatggcgctgtgccttgagtattccacaggtttatgctggaaacaacatttaaggaagctgcgtcctacgggtatctgaaatgtatgtattttgattccaaggtttcctcaactctaatggtagcctgcgtttttttatccgtctatctgggaacacgggtactggggatgaggtcgtgcacataatgttgttgattttgataccatgtaatgtgcatgttctctccttcctaagttatggtttttgtttttgggttttagatatatagttttattacagcacttccaag

SEQ ID NO: 222340 - DNA, 2216 bp, Zea Mays
ctcagttagggtttcggactcgaggccaagttcatctccggacgagcataccgtgagccccaacgctccaggtggtcagcttcacttccgagcgcccctctcccgacagccgtctcctcctcaccgctgcttcatcacctagccgtcgccacccatcgcctacagcgacagccgtcttccgtcacagcggagcgcccctcagatccaagggacgctgcacgagcgcaagagcaggccacacttttttgcttcaggttgttgagaaggggaatataatcatggatatcatgcagactagtgactcttcacatcatggaattgtagaaaatagcccgtacagaattccatatgacagacatgcagaaggtggtcaacttggtgcttcatggtattttagtagaaaagaaatagaggagaattccctttcgaggagagacggcattgatctgaagaaagagtcttatcttcgcaagtcatattgcacatttctgcaggatttggggatgagacttaaagtacctcaagtgacaattgctactgctatagtgttctgtcatcggttctttcttcgtcaatcgcatgccaaaaatgacagacggacaattgcaacagtatgcatgttcttggcgggaaaagttgaagaaacacccagacctctgaaggatgtcatacttctttcatatgagatcatccacaaaaaggatcctgctgcagttcaacgaataaaacagaaggaagtatatgaacaacaaaaggaacttattttactcggggaacgtgttgtgcttgtgacacttggttttgatttgaatgtgaaccatccttacaagcccttggttgaagcaataaaaatattcaaggttgctcaaaatgcacttgctcaagttgcctggaattttgtcaatgatgggctccgcacttcactttgcctgcaatttaaaccgcaccatattgcggctggtgcaatcttcctcgctgcgaagtttctcaaagtcaagcttccatcagatggcgagaaggtctggtggcaagagtttgatgtaactccgtggcagctggaagaggttagcaaccagatgttggaactgtatgagcaaaaccgtgttcaaccaccaccatcacaaggcaatgatactgaaggcagttctgcaagtgttgcgaatcaacgtgttcctggtaaagttccaggagtagctgatgaacctcctgcccatgaccataaccaagcacccagaccatcgagccagcagaacatgttagaccaccgtggttatgaccaccctcacccagataagcaaaactataggatacctccaaatgatgcaagggatggcactgctaatagcaacgaaggtcccaatgtgtcgtcttcaatgatggatgcgatgaagaaggtaaacaaggataaggtgaaagcggcactggagaagcgtaggaaatcgaaaggtgatttttcaagaaaggtcgatgtgatggatgacgatgacctcattgagagggagctggaacatggcgtggagttggctgccgaggatgagaaggtcaagcaggagagaaagcagagctggcctcatcttgcacaccaccagagcaccaaccgtgagaataccgaagagggtgagctgtccatggacagtcaagaataccgttctccggagcatgacaatcggaagagaaaggatgtgcgtgagtaccggaactacgatcgtgacgaaagggaccttaaaaggctaagatcatgagagttgcacttttgtcggagtctcatgttgttcgtgccataacatgatgtggaacctctatctttctgtcacaggtgtacttgatgcttatttggtatgctgggggatttgaactgttacatatataagtttataagatggtttccccacggtcatgtatgtgtttagccatgttggcaattgagatggcgctgtgccttgagtattccacaggtttatgctggaaacaacatttaaggaagctgcgtcctacgggtatctgaaatgtatgtattttgattccaaggtttcctcaactctaatggtagcctgcgtttttttatccgtctatctgggaacacgggtactggggatgaggtcgtgcacataatgttgttgattttgataccatgtaatgtgcatgttctctccttcctaagttatggtttttgtttttgggttttagatatatagttttattacagcacttccaag

SEQ ID NO: 222341 - DNA, 235 bp, Zea Mays
ctcaaccgaaggaggcaaagacgcaacgcgaggtctcatgggcgaccgggccattcgtcgtctccgttgtctttgttgcagatcggtgctcctctcaccaccaggccgccacagctcgccggctttcccctccctgccatcgagcaccacctgagcaaacagagcaaggaaatagtttaagaatggctgcgcggagcagttctatggttgccgaggatgactacgagtgagtgat

SEQ ID NO: 222342 - DNA, 850 bp, Zea Mays
ctcaaccgaaggaggcaaagacgcaacgcgaggtctcatgggcgaccgggccattcgtcgtctccgttgtctttgttgcagatcggtgctcctctcaccaccaggccgccacagctcgccggctttcccctccctgccatcgagcaccacctggtacgctctccgcttgatctccccttcctgctgcggagccgtgcgagcaaaccttaacgtagtccgtagagcaaacagagcaaggaaatagtttaagaatggctgcgcggagcagttctatggttgccgaggatgactacgagacggatcagaagaagcaagctgctgcagatgttctttttcactattcacaatttgttatggtttgcattggtgaggatgttcgccctactgatctcaggttacatcttatgaaggaagtttcaggaatgtccacttctctgaaggagcctcaacaggctgctgcctcaccggcttccagtggggaaccgtcttcctctggaacgatgaaaggtgacaagaatgaaatctcctaagcttcataaattattatccaactcaggacttcttctgttccttacgcactgagaagattgtaatgttcagaacttcggatgatgaggcttacttgcaatataggaatgtaaatatgttaggaacattgttcatagctgtctgctgttctgctgctttagcttctttcgtgacagcctgcttcatgtatgaaactttgaatccatttttattcagggggcagtaacgtaaatgctgctgtatttttttttaaatggcaggtgaatattgtattctgaataagtcatgtttactagaatcgttgctgtggctttgattggat

SEQ ID NO: 222343 - DNA, 707 bp, Zea Mays
ctcaaccgaaggaggcaaagacgcaacgcgaggtctcatgggcgaccgggccattcgtcgtctccgttgtctttgttgcagatcggtgctcctctcaccaccaggccgccacagctcgccggctttcccctccctgccatcgagcaccacctgacggatcagaagaagcaagctgctgcagatgttctttttcactattcacaatttgttatggtttgcattggtgaggatgttcgccctactgatctcaggttacatcttatgaaggaagtttcaggaatgtccacttctctgaaggagcctcaacaggctgctgcctcaccggcttccagtggggaaccgtcttcctctggaacgatgaaaggtgacaagaatgaaatctcctaagcttcataaattattatccaactcaggacttcttctgttccttacgcactgagaagattgtaatgttcagaacttcggatgatgaggcttacttgcaatataggaatgtaaatatgttaggaacattgttcatagctgtctgctgttctgctgctttagcttctttcgtgacagcctgcttcatgtatgaaactttgaatccatttttattcagggggcagtaacgtaaatgctgctgtatttttttttaaatggcaggtgaatattgtattctgaataagtcatgtttactagaatcgttgctgtggctttgattggat

SEQ ID NO: 222344 - DNA, 777 bp, Zea Mays
ctcaaccgaaggaggcaaagacgcaacgcgaggtctcatgggcgaccgggccattcgtcgtctccgttgtctttgttgcagatcggtgctcctctcaccaccaggccgccacagctcgccggctttcccctccctgccatcgagcaccacctgagcaaacagagcaaggaaatagtttaagaatggctgcgcggagcagttctatggttgccgaggatgactacgagacggatcagaagaagcaagctgctgcagatgttctttttcactattcacaatttgttatggtttgcattggtgaggatgttcgccctactgatctcaggttacatcttatgaagtttcaggaatgtccacttctctgaaggagcctcaacaggctgctgcctcaccggcttccagtggggaaccgtcttcctctggaacgatgaaaggtgacaagaatgaaatctcctaagcttcataaattattatccaactcaggacttcttctgttccttacgcactgagaagattgtaatgttcagaacttcggatgatgaggcttacttgcaatataggaatgtaaatatgttaggaacattgttcatagctgtctgctgttctgctgctttagcttctttcgtgacagcctgcttcatgtatgaaactttgaatccatttttattcagggggcagtaacgtaaatgctgctgtatttttttttaaatggcaggtgaatattgtattctgaataagtcatgtttactagaatcgttgctgtggctttgattggat

SEQ ID NO: 222345 - DNA, 772 bp, Zea Mays
ctcaaccgaaggaggcaaagacgcaacgcgaggtctcatgggcgaccgggccattcgtcgtctccgttgtctttgttgcagatcggtgctcctctcaccaccaggccgccacagctcgccggctttcccctccctgccatcgagcaccacctgagcaaggaaatagtttaagaatggctgcgcggagcagttctatggttgccgaggatgactacgagacggatcagaagaagcaagctgctgcagatgttctttttcactattcacaatttgttatggtttgcattggtgaggatgttcgccctactgatctcaggttacatcttatgaaggaagtttcaggaatgtccacttctctgaaggagcctcaacaggctgctgcctcaccggcttccagtggggaaccgtcttcctctggaacgatgaaaggtgacaagaatgaaatctcctaagcttcataaattattatccaactcaggacttcttctgttccttacgcactgagaagattgtaatgttcagaacttcggatgatgaggcttacttgcaatataggaatgtaaatatgttaggaacattgttcatagctgtctgctgttctgctgctttagcttctttcgtgacagcctgcttcatgtatgaaactttgaatccatttttattcagggggcagtaacgtaaatgctgctgtatttttttttaaatggcaggtgaatattgtattctgaataagtcatgtttactagaatcgttgctgtggctttgattggat

SEQ ID NO: 222346 - DNA, 768 bp, Zea Mays
ctcaaccgaaggaggcaaagacgcaacgcgaggtctcatgggcgaccgggccattcgtcgtctccgttgtctttgttgcagatcggtgctcctctcaccaccaggccgccacagctcgccggctttcccctccctgccatcgagcaccacctgagcaaggaaatagtttaagaatggctgcgcggagcagttctatggttgccgaggatgactacgagacggatcagaagaagcaagctgctgcagatgttctttttcactattcacaatttgttatggtttgcattggtgaggatgttcgccctactgatctcaggttacatcttatgaagtttcaggaatgtccacttctctgaaggagcctcaacaggctgctgcctcaccggcttccagtggggaaccgtcttcctctggaacgatgaaaggtgacaagaatgaaatctcctaagcttcataaattattatccaactcaggacttcttctgttccttacgcactgagaagattgtaatgttcagaacttcggatgatgaggcttacttgcaatataggaatgtaaatatgttaggaacattgttcatagctgtctgctgttctgctgctttagcttctttcgtgacagcctgcttcatgtatgaaactttgaatccatttttattcagggggcagtaacgtaaatgctgctgtatttttttttaaatggcaggtgaatattgtattctgaataagtcatgtttactagaatcgttgctgtggctttgattggat

SEQ ID NO: 222347 - DNA, 2716 bp, Zea Mays
cccacccgcagccctaacaaaccggtccccttcgacctcctcctccgccgccggcgtcgaccgcgaccgccacctctcctcgtacgctacagtaggggcaggggcggcgattggtggctcttcctcctcctatgctgtgactcgaggagtatggcggatggggctattgtggtagccatttgccagtacggcggagagttcacttctggccccagtggtaatctgatatacagaggtggagaagcacatgccgttgatgttactcatgattcatcgctggagagcttcaaggatgagctgtccaaggtgttccatgttgatgtcactgacatgtcactcaagtactttcttcccaataatatgaaaacactcatcacaatatcatgtgaccgggatttgcaaaggatggttggttttactgcaaatgctgcgcatgtggatgtttttctgataagtagacaggagaacaggagtactataacacattctggagctacatctggctctgttgctagtggcgacaaaaggaaaagaccaacacccaaaaacaaggtaatcagaagcagcaaaccagctaccagtgctgcttgcaatgcacttcaagctatcacagataatgtgagacaaccaatttcagttattactgaaaatgaagacaacagggtttttcagttggaatttgggaatgacatcacatttaccaccacagctggaggtgcttccttcacatcagatattctcgatcagcaaaagcttgttcttgttgataatatccccaaggaagcagttagtttgtttgatgatgcattcaatccatatgttagttctgagatcatgcatgagccgcctcaggaacctaacaatcctattgtgttgtgggatgacattatcaaaggagttggtcaagaatttgataacgtgaaagatttccgtgctcagttgtgcaagtatgctattgggaaaggatttgtgtaccggttcataaaaaatgaaactactcgtgtcactgtaaaatgtggtgcagaaggaggctgcacctggcggttgcatgcatctgaatcatctcgtaacaagaaatttattatcaagagattgacagatgaacatacttgtggtggaggaagtggagagggtcagcgtcgagcaacacgacagtggttgactactatcattaaggagaagctgcatgataacccaaagttcaagccaaaggaacttgtaaaggaattatttgaagaatacggagttacactaacatattcacaggtctggcgaggcaaagaagtagcagagaaagagctgtatcatgctgtcagagagactcgcgatcagttaccttggtattgtcagaggctcgaggagacgaacccaggaagtataagtgtgctgtctccagtgttggatatgaaaacccgtcgtttttttgttgcattgcatgcttgtttgcatggctttataaatgggtgcaggcccctcttatttttggacaaggtcccactaaaagcaacgaatgagtacaagttgcttgtggccgctgctgttgatgcagatgatggtgtctttccgttggcatttaatgtggttgaagatgaaaattatgatagctggggttggttcttaatgcatctgaaaatagctctccaaactcacaactacccttgcaatggcatgacattcttgtccaacggacaaatgggtctggatgctgctgtttctcacgtgtttgaggatggcgaacatgccttctgtttgcatcatatcattgaggaattcaaaggagagctgaggaagggaccatggtcacaacaaattagggaggggatggttgaagatttcactcgtgcagcccaagcatgcagcatcgaggattttaatgcatccatcgagagcataaggaatatatccagtgaagctgctgactggatcatagcgagcaagccagagcattggtcagatgccattttccgaggcttccggtatgatcatttctccttgaacattgttgatgctttcgataactggataccagccaagaaggagagttccatagtgctgatggtagactcgctgagaattaagattaaggaagtaatagaatcaaggcttgaagcttgcaaggtgtggcaagggcctttaacacctaccatggaatacaaagtgcaggatgagatgctgaaggctggtaaaatgactgtgctgtgttcctccgatactgtatttgaagtgaggggcaacgcagttttcgtggttaatattggaaactgggaatgcacgtgccggcggtggcagctctccggcctcccctgcatgcatgccattgctgtgttcaacaggcttgggcgctgtttctatgactactgcccgaagttctttagaatagaaagctaccatctgacatactcgggaataatcttcccaatacctgacttggatagcgttgatttcagtgctggggcaaatctactcccactgcctcccaagcggcgcacgtcagataaaccgaggaggaagcggtctaaccccaacaagataagcactctcacacgactctgtagcaggtgcaaacaaacaggacacaacaaggcaacatgtgaagttcagttctagtggaaggcaacctcagaattaattcagcgtcaaaggtctcaagtttaggatcttggtgaccactggtagaagccacggtacaaaccaccttgtcacattttatgtttga

SEQ ID NO: 222348 - DNA, 2696 bp, Zea Mays
tcgaggagtatggcggatggggctattgtggtagccatttgccagtacggcggagagttcacttctggccccagtggtaatctgatatacagaggtggagaagcacatgccgttgatgttactcatgattcatcgctggagagcttcaaggatgagctgtccaaggtgttccatgttgatgtcactgacatgtcactcaagtactttcttcccaataatatgaaaacactcatcacaatatcatgtgaccgggatttgcaaaggatggttggttttactgcaaatgctgcgcatgtggatgtttttctgataagtagacaggagaacaggagtactataacacattctggagctacatctggctctgttgctagtggcgacaaaaggaaaagaccaacacccaaaaacaaggtaatcagaagcagcaaaccagctaccagtgctgcttgcaatgcacttcaagctatcacagataatgtgagacaaccaatttcagttattactgaaaatgaagacaacagctggaggtgcttccttcacatcagatattctcgatcagcaaaagcttgttcttgttgataatatccccaaggaagcagttagtttgtttgatgatgcattcaatccatatgttagttctgagatcatgcatgagccgcctcaggaacctaacaatcctattgtgttgtgggatgacattatcaaaggagttggtcaagaatttgataacgtgaaagatttccgtgctcagttgtgcaagtatgctattgggaaaggatttgtgtaccggttcataaaaaatgaaactactcgtgtcactgtaaaatgtggtgcagaaggaggctgcacctggcggttgcatgcatctgaatcatctcgtaacaagaaatttattatcaagagattgacagatgaacatacttgtggtggaggaagtggagagggtcagcgtcgagcaacacgacagtggttgactactatcattaaggagaagctgcatgataacccaaagttcaagccaaaggaacttgtaaaggaattatttgaagaatacggagttacactaacatattcacaggtctggcgaggcaaagaagtagcagagaaagagctgtatcatgctgtcagagagactcgcgatcagttaccttggtattgtcagaggctcgaggagacgaacccaggaagtataagtgtgctgtctccagtgttggatatgaaaacccgtcgtttttttgttgcattgcatgcttgtttgcatggctttataaatgggtgcaggcccctcttatttttggacaaggtcccactaaaagcaacgaatgagtacaagttgcttgtggccgctgctgttgatgcagatgatggtgtctttccgttggcatttaatgtggttgaagatgaaaattatgatagctggggttggttcttaatgcatctgaaaatagctctccaaactcacaactacccttgcaatggcatgacattcttgtccaacggacaaatgggtctggatgctgctgtttctcacgtgtttgaggatggcgaacatgccttctgtttgcatcatatcattgaggaattcaaaggagagctgaggaagggaccatggtcacaacaaattagggaggggatggttgaagatttcactcgtgcagcccaagcatgcagcatcgaggattttaatgcatccatcgagagcataaggaatatatccagtgaagctgctgactggatcatagcgagcaagccagagcattggtcagatgccattttccgaggcttccggtatgatcatttctccttgaacattgttgatgctttcgataactggataccagccaagaaggagagttccatagtgctgatggtagactcgctgagaattaagattaaggaagtaatagaatcaaggcttgaagcttgcaaggtgtggcaagggcctttaacacctaccatggaatacaaagtgcaggatgagatgctgaaggctggtaaaatgactgtgctgtgttcctccgatactgtatttgaagtgaggggcaacgcagttttcgtggttaatattggaaactgggaatgcacgtgccggcggtggcagctctccggcctcccctgcatgcatgccattgctgtgttcaacaggcttgggcgctgtttctatgactactgcccgaagttctttagaatagaaagctaccatctgacatactcgggaataatcttcccaatacctgacttggatagcgttgatttcagtgctggggcaaatctactcccactgcctcccaagcggcgcacgtcagataaaccgaggaggaagcggtctaaccccaacaagataagcactctcacacgactctgtagcaggtgcaaacaaacaggacacaacaaggcaacatgtgaagttcagttctagtggaaggcaacctcagaattaattcagcgtcaaaggtctcaagtttaggtatattgcagagaacatggtttcttttctcagagaacaagatctcaagttttttttaggctagtcagtttgactttttgatccatgcatcacacgaagatacgactaatgaattaaggatagttagaaggtttattcactcctgatgaatgctgtacttgtccataggatcttggtgaccactggtagaagccacggtacaaaccaccttgtcacattttatgtttga

SEQ ID NO: 222349 - DNA, 2726 bp, Zea Mays
atggcggatggggctattgtggtagccatttgccagtacggcggagagttcacttctggccccagtggtaatctgatatacagaggtggagaagcacatgccgttgatgttactcatgattcatcgctggagagcttcaaggatgagctgtccaaggtgttccatgttgatgtcactgacatgtcactcaagtactttcttcccaataatatgaaaacactcatcacaatatcatgtgaccgggatttgcaaaggatggttggttttactgcaaatgctgcgcatgtggatgtttttctgataagtagacaggagaacaggagtactataacacattctggagctacatctggctctgttgctagtggcgacaaaaggaaaagaccaacacccaaaaacaaggtaatcagaagcagcaaaccagctaccagtgctgcttgcaatgcacttcaagctatcacagataatgtgagacaaccaatttcagttattactgaaaatgaagacaacagggtttttcagttggaatttgggaatgacatcacatttaccaccacagctggaggtgcttccttcacatcagatattctcgatcagcaaaagcttgttcttgttgataatatccccaattagtttgtttgatgatgcattcaatccatatgttagttctgagatcatgcatgagccgcctcaggaacctaacaatcctattgtgttgtgggatgacattatcaaaggagttggtcaagaatttgataacgtgaaagatttccgtgctcagttgtgcaagtatgctattgggaaaggatttgtgtaccggttcataaaaaatgaaactactcgtgtcactgtaaaatgtggtgcagaaggaggctgcacctggcggttgcatgcatctgaatcatctcgtaacaagaaatttattatcaagagattgacagatgaacatacttgtggtggaggaagtggagagggtcagcgtcgagcaacacgacagtggttgactactatcattaaggagaagctgcatgataacccaaagttcaagccaaaggaacttgtaaaggaattatttgaagaatacggagttacactaacatattcacaggtctggcgaggcaaagaagtagcagagaaagagctgtatcatgctgtcagagagactcgcgatcagttaccttggtattgtcagaggctcgaggagacgaacccaggaagtataagtgtgctgtctccagtgttggatatgaaaacccgtcgtttttttgttgcattgcatgcttgtttgcatggctttataaatgggtgcaggcccctcttatttttggacaaggtcccactaaaagcaacgaatgagtacaagttgcttgtggccgctgctgttgatgcagatgatggtgtctttccgttggcatttaatgtggttgaagatgaaaattatgatagctggggttggttcttaatgcatctgaaaatagctctccaaactcacaactacccttgcaatggcatgacattcttgtccaacggacaaatgggtctggatgctgctgtttctcacgtgtttgaggatggcgaacatgccttctgtttgcatcatatcattgaggaattcaaaggagagctgaggaagggaccatggtcacaacaaattagggaggggatggttgaagatttcactcgtgcagcccaagcatgcagcatcgaggattttaatgcatccatcgagagcataaggaatatatccagtgaagctgctgactggatcatagcgagcaagccagagcattggtcagatgccattttccgaggcttccggtatgatcatttctccttgaacattgttgatgctttcgataactggataccagccaagaaggagagttccatagtgctgatggtagactcgctgagaattaagattaaggaagtaatagaatcaaggcttgaagcttgcaaggtgtggcaagggcctttaacacctaccatggaatacaaagtgcaggatgagatgctgaaggctggtaaaatgactgtgctgtgttcctccgatactgtatttgaagtgaggggcaacgcagttttcgtggttaatattggaaactgggaatgcacgtgccggcggtggcagctctccggcctcccctgcatgcatgccattgctgtgttcaacaggcttgggcgctgtttctatgactactgcccgaagttctttagaatagaaagctaccatctgacatactcgggaataatcttcccaatacctgacttggatagcgttgatttcagtgctggggcaaatctactcccactgcctcccaagcggcgcacgtcagataaaccgaggaggaagcggtctaaccccaacaagataagcactctcacacgactctgtagcaggtgcaaacaaacaggacacaacaaggcaacatgtgaagttcagttctagtggaaggcaacctcagaattaattcagcgtcaaaggtctcaagtttaggtatattgcagagaacatggtttcttttctcagagaacaagatctcaagttttttttaggctagtcagtttgactttttgatccatgcatcacacgaagatacgactaatgaattaaggatagttagaaggtttattcactcctgatgaatgctgtacttgtccataggatcttggtgaccactggtagaagccacggtacaaaccaccttgtcacattttatgtttga

SEQ ID NO: 222350 - DNA, 3064 bp, Zea Mays
tggattccccgccacaaatccacgcacgcacctgcactgctggtcactgtcgtcccggacgggcgtccccttcccgtgctgctgctttttcttcgtcgtaatccccgtccagcgagctgcagcgcaccacagtccacaaactgctgatcgatcctagctgctaggctggctggagcaggaattgaagcaggcagctagctagctagcattgcgtgatgaagaagaacaactccagcattgagagcacgggcggcggcggcggcacggtgtcgggatccggctccggctccggctccttcaacctccggaacctgtccaaggtcatcctcccgccgctcggcgggccgtccggcggccaaagccagtcgcatggcgggtcggacaagtgggtcgtctcgccgctcgactccagatacaggtggtgggatacgttcatggtggtcctggtggcgtactcggcgtgggtgtacccgttcgaggtggccttcatgaacgcgtcccccaagggcgggctggaggtggcggacatcgtcgtggacctcttcttcgccgtcgacatagtgctcaccttcttcgttgcctacatcgacggcaggacccagctcctcgtccgtgacaggaagaagataacactcaggtacctatcgacgttcttcatcatggacgtggcatcgacgatcccgttccagggccttgcctacctcatcaccggcgaggtcagggaaaacgccgtgtacagtatgctgggcgtcctacgcctttggcgtctgcgaagggtcaagcagttcttcaccaggctcgagaaggacatccgcttcagctacttctggatccgcagcgcgcgtctcgtcgcggtgaccttgttcctggtccactgcgccgggtgcctgtactacctgatcgccgaccggtacccggaccggcagaagacgtggatcggcgcggtgatccccaacttccggcaggccagcctgcggatccgctacatctcttccatctactggtccatcaccaccatgaccaccgtcggctacggcgacctgcacgcccagaacaacgtcgagatgatcttcaacattttctacatgctcttcaacctcgggctcaccgcctacctcatcggcaacatgaccaacctcgtcgtcgagggcacccgccgcaccatggagtttaggaacagcatcagggcggcgtcgagcttcgtgggccggaaccacctgcctccgcggctgaagcagcagatcctggcctacatgtgcctcaagttcagggcggagagcctgaaccagcagcagctcatggaccagctgcccaagtccatctgcaagagcatctgcgagcacctcttcgtgccggtcgtcaaggacgtctacctcttcaggggggtctcaagagaaatgctcctgtccctggtcaccaagatgaaaccggagtacatcccgcccaaggaggacgtgatagtgcagaacgaggccccggacgacgtgtacgtcgtcgtctccggcgaggtggaggtcatactgttcgacggcatctacgagcaggtgcaggccacgctgggggcgcgggacatcttcggcgaggtgagcgcgctgagcgaccgggcgcaggccttcacgttccggacgaggactctcagccagctgctgcggctgaagcaggctacgctcaaggaggccatgcagagcaggcccgaagacagcgtcgtcgtcatcaagaacttcctcaagcatcaggtcgagatgcatggcatgaaggtcgaggacttgctgggagacaacaccggcgagcacgacgacgacgcgaatgtgctgacggtcgccgcgatgggaaacagcggcttactcgaggacctcctcagggcaggcaaggacgccgacgtcggtgacgccaagggcagaacagcattgcacatcgcggcgtccaaggggtacgaggactgcgtgctggtgctactcaagcacgcgtgcaatgtgaacatcagggacgcgcagggcaacacggcgatgtggaacgccatcgcggcggggcaccacaagaccttcaacctcctgtaccaattcgggcgcgcgtcgaacccgcgcgccggcggagacgtgatgtgcctcgcggcgcgccgcggccacctcggcgcgctccaggagctcctcaagctcggcctggacgtggactcggaggaccacgacggcgccaccgcgctgcgcgtcgcgatggccgagggccacgcggatgcggccaggttcctgatattgaacggggccagcgtggacaaggcgagcctcgacgacgacggctcaggttcaggctccggctctggcgccgcgcggctagcaatgtcgcccaccgagctgcgcgagctgctgcagaagcgggagctcggccactcgataacgatccacgactcgccagcggtggtcccgaacggcggctcgtcggggcacagccgtccaggaagattacagagcacaagttcggacagccagcgctggcctcgggtgagcgtatacaagggccaccctttcctcagaaaccgcacctctgaagctggcaagctgatcaacctaccaggcaccatggaagaattcagagccatcgtcggtgagaaactgaaagttgacgcggagaaggcgttgatcgtgagcgacgaaggagcggagatcgactcgatcgacgtgatccgggacaacgacaagctgttcatggtcaccgaagaagatctgaggcggctggcatcaatggactggctgtcgtgcgagtgatttggttcctcccaagataattggaggctaaatatagaatacagtacaagagtattgtgcttctacgatgtctaggattgatagattgatggcaactactgagtggcatgagctctatcgagcgactaatttgcaggcaatgtgtaccatgagttcggaccactgtccgttattaatgcaaggtcattcttcttgtaatttctataaggggtttcattttgaatcctattgggtacacactgacgggttcaaagatgtagttcaacaagcttggacggccacaattaactcctctgatgtcattc

SEQ ID NO: 222351 - DNA, 2967 bp, Zea Mays
ccacaaatccacgcacgcacctgcactgctggtcactgtcgtcccggacgggcgtccccttcccgtggctggctggagcaggaattgaagcaggcagctagctagctagcattgcgtgatgaagaagaacaactccagcattgagagcacgggcggcggcggcggcacggtgtcgggatccggctccggctccggctccttcaacctccggaacctgtccaaggtcatcctcccgccgctcggcgggccgtccggcggccaaagccagtcgcatggcgggtcggacaagtgggtcgtctcgccgctcgactccagatacaggtggtgggatacgttcatggtggtcctggtggcgtactcggcgtgggtgtacccgttcgaggtggccttcatgaacgcgtcccccaagggcgggctggaggtggcggacatcgtcgtggacctcttcttcgccgtcgacatagtgctcaccttcttcgttgcctacatcgacggcaggacccagctcctcgtccgtgacaggaagaagataacactcaggtacctatcgacgttcttcatcatggacgtggcatcgacgatcccgttccagggccttgcctacctcatcaccggcgaggtcagggaaaacgccgtgtacagtatgctgggcgtcctacgcctttggcgtctgcgaagggtcaagcagttcttcaccaggctcgagaaggacatccgcttcagctacttctggatccgcagcgcgcgtctcgtcgcggtgaccttgttcctggtccactgcgccgggtgcctgtactacctgatcgccgaccggtacccggaccggcagaagacgtggatcggcgcggtgatccccaacttccggcaggccagcctgcggatccgctacatctcttccatctactggtccatcaccaccatgaccaccgtcggctacggcgacctgcacgcccagaacaacgtcgagatgatcttcaacattttctacatgctcttcaacctcgggctcaccgcctacctcatcggcaacatgaccaacctcgtcgtcgagggcacccgccgcaccatggagtttaggaacagcatcagggcggcgtcgagcttcgtgggccggaaccacctgcctccgcggctgaagcagcagatcctggcctacatgtgcctcaagttcagggcggagagcctgaaccagcagcagctcatggaccagctgcccaagtccatctgcaagagcatctgcgagcacctcttcgtgccggtcgtcaaggacgtctacctcttcaggggggtctcaagagaaatgctcctgtccctggtcaccaagatgaaaccggagtacatcccgcccaaggaggacgtgatagtgcagaacgaggccccggacgacgtgtacgtcgtcgtctccggcgaggtggaggtcatactgttcgacggcatctacgagcaggtgcaggccacgctgggggcgcgggacatcttcggcgaggtgagcgcgctgagcgaccgggcgcaggccttcacgttccggacgaggactctcagccagctgctgcggctgaagcaggctacgctcaaggaggccatgcagagcaggcccgaagacagcgtcgtcgtcatcaagaacttcctcaagcatcaggtcgagatgcatggcatgaaggtcgaggacttgctgggagacaacaccggcgagcacgacgacgacgcgaatgtgctgacggtcgccgcgatgggaaacagcggcttactcgaggacctcctcagggcaggcaaggacgccgacgtcggtgacgccaagggcagaacagcattgcacatcgcggcgtccaaggggtacgaggactgcgtgctggtgctactcaagcacgcgtgcaatgtgaacatcagggacgcgcagggcaacacggcgatgtggaacgccatcgcggcggggcaccacaagaccttcaacctcctgtaccaattcgggcgcgcgtcgaacccgcgcgccggcggagacgtgatgtgcctcgcggcgcgccgcggccacctcggcgcgctccaggagctcctcaagctcggcctggacgtggactcggaggaccacgacggcgccaccgcgctgcgcgtcgcgatggccgagggccacgcggatgcggccaggttcctgatattgaacggggccagcgtggacaaggcgagcctcgacgacgacggctcaggttcaggctccggctctggcgccgcgcggctagcaatgtcgcccaccgagctgcgcgagctgctgcagaagcgggagctcggccactcgataacgatccacgactcgccagcggtggtcccgaacggcggctcgtcggggcacagccgtccaggaagattacagagcacaagttcggacagccagcgctggcctcgggtgagcgtatacaagggccaccctttcctcagaaaccgcacctctgaagctggcaagctgatcaacctaccaggcaccatggaagaattcagagccatcgtcggtgagaaactgaaagttgacgcggagaaggcgttgatcgtgagcgacgaaggagcggagatcgactcgatcgacgtgatccgggacaacgacaagctgttcatggtcaccgaagaagatctgaggcggctggcatcaatggactggctgtcgtgcgagtgatttggttcctcccaagataattggaggctaaatatagaatacagtacaagagtattgtgcttctacgatgtctaggattgatagattgatggcaactactgagtggcatgagctctatcgagcgactaatttgcaggcaatgtgtaccatgagttcggaccactgtccgttattaatgcaaggtcattcttcttgtaatttctataaggggtttcattttgaatcctattgggtacacactgacgggttcaaagatgtagttcaacaagcttggacggccacaattaactcctctgatgtcattc

SEQ ID NO: 222352 - DNA, 2451 bp, Zea Mays
caagattcacgaagataatcaagggtacctatcgacgttcttcatcatggacgtggcatcgacgatcccgttccagggccttgcctacctcatcaccggcgaggtcagggaaaacgccgtgtacagtatgctgggcgtcctacgcctttggcgtctgcgaagggtcaagcagttcttcaccaggctcgagaaggacatccgcttcagctacttctggatccgcagcgcgcgtctcgtcgcggtgaccttgttcctggtccactgcgccgggtgcctgtactacctgatcgccgaccggtacccggaccggcagaagacgtggatcggcgcggtgatccccaacttccggcaggccagcctgcggatccgctacatctcttccatctactggtccatcaccaccatgaccaccgtcggctacggcgacctgcacgcccagaacaacgtcgagatgatcttcaacattttctacatgctcttcaacctcgggctcaccgcctacctcatcggcaacatgaccaacctcgtcgtcgagggcacccgccgcaccatggagtttaggaacagcatcagggcggcgtcgagcttcgtgggccggaaccacctgcctccgcggctgaagcagcagatcctggcctacatgtgcctcaagttcagggcggagagcctgaaccagcagcagctcatggaccagctgcccaagtccatctgcaagagcatctgcgagcacctcttcgtgccggtcgtcaaggacgtctacctcttcaggggggtctcaagagaaatgctcctgtccctggtcaccaagatgaaaccggagtacatcccgcccaaggaggacgtgatagtgcagaacgaggccccggacgacgtgtacgtcgtcgtctccggcgaggtggaggtcatactgttcgacggcatctacgagcaggtgcaggccacgctgggggcgcgggacatcttcggcgaggtgagcgcgctgagcgaccgggcgcaggccttcacgttccggacgaggactctcagccagctgctgcggctgaagcaggctacgctcaaggaggccatgcagagcaggcccgaagacagcgtcgtcgtcatcaagaacttcctcaagcatcaggtcgagatgcatggcatgaaggtcgaggacttgctgggagacaacaccggcgagcacgacgacgacgcgaatgtgctgacggtcgccgcgatgggaaacagcggcttactcgaggacctcctcagggcaggcaaggacgccgacgtcggtgacgccaagggcagaacagcattgcacatcgcggcgtccaaggggtacgaggactgcgtgctggtgctactcaagcacgcgtgcaatgtgaacatcagggacgcgcagggcaacacggcgatgtggaacgccatcgcggcggggcaccacaagaccttcaacctcctgtaccaattcgggcgcgcgtcgaacccgcgcgccggcggagacgtgatgtgcctcgcggcgcgccgcggccacctcggcgcgctccaggagctcctcaagctcggcctggacgtggactcggaggaccacgacggcgccaccgcgctgcgcgtcgcgatggccgagggccacgcggatgcggccaggttcctgatattgaacggggccagcgtggacaaggcgagcctcgacgacgacggctcaggttcaggctccggctctggcgccgcgcggctagcaatgtcgcccaccgagctgcgcgagctgctgcagaagcgggagctcggccactcgataacgatccacgactcgccagcggtggtcccgaacggcggctcgtcggggcacagccgtccaggaagattacagagcacaagttcggacagccagcgctggcctcgggtgagcgtatacaagggccaccctttcctcagaaaccgcacctctgaagctggcaagctgatcaacctaccaggcaccatggaagaattcagagccatcgtcggtgagaaactgaaagttgacgcggagaaggcgttgatcgtgagcgacgaaggagcggagatcgactcgatcgacgtgatccgggacaacgacaagctgttcatggtcaccgaagaagatctgaggcggctggcatcaatggactggctgtcgtgcgagtgatttggttcctcccaagataattggaggctaaatatagaatacagtacaagagtattgtgcttctacgatgtctaggattgatagattgatggcaactactgagtggcatgagctctatcgagcgactaatttgcaggcaatgtgtaccatgagttcggaccactgtccgttattaatgcaaggtcattcttcttgtaatttctataaggggtttcattttgaatcctattgggtacacactgacgggttcaaagatgtagttcaacaagcttggacggccacaattaactcctctgatgtcattc

SEQ ID NO: 222353 - DNA, 2547 bp, Zea Mays
ggaagatccactgttgtagaggtggactctttggctcaaagaagatccaagtcttacagagaagcaacaacatcgaaagagtcggcttcaccagcactagaatctagcctaatcgataaggtacctatcgacgttcttcatcatggacgtggcatcgacgatcccgttccagggccttgcctacctcatcaccggcgaggtcagggaaaacgccgtgtacagtatgctgggcgtcctacgcctttggcgtctgcgaagggtcaagcagttcttcaccaggctcgagaaggacatccgcttcagctacttctggatccgcagcgcgcgtctcgtcgcggtgaccttgttcctggtccactgcgccgggtgcctgtactacctgatcgccgaccggtacccggaccggcagaagacgtggatcggcgcggtgatccccaacttccggcaggccagcctgcggatccgctacatctcttccatctactggtccatcaccaccatgaccaccgtcggctacggcgacctgcacgcccagaacaacgtcgagatgatcttcaacattttctacatgctcttcaacctcgggctcaccgcctacctcatcggcaacatgaccaacctcgtcgtcgagggcacccgccgcaccatggagtttaggaacagcatcagggcggcgtcgagcttcgtgggccggaaccacctgcctccgcggctgaagcagcagatcctggcctacatgtgcctcaagttcagggcggagagcctgaaccagcagcagctcatggaccagctgcccaagtccatctgcaagagcatctgcgagcacctcttcgtgccggtcgtcaaggacgtctacctcttcaggggggtctcaagagaaatgctcctgtccctggtcaccaagatgaaaccggagtacatcccgcccaaggaggacgtgatagtgcagaacgaggccccggacgacgtgtacgtcgtcgtctccggcgaggtggaggtcatactgttcgacggcatctacgagcaggtgcaggccacgctgggggcgcgggacatcttcggcgaggtgagcgcgctgagcgaccgggcgcaggccttcacgttccggacgaggactctcagccagctgctgcggctgaagcaggctacgctcaaggaggccatgcagagcaggcccgaagacagcgtcgtcgtcatcaagaacttcctcaagcatcaggtcgagatgcatggcatgaaggtcgaggacttgctgggagacaacaccggcgagcacgacgacgacgcgaatgtgctgacggtcgccgcgatgggaaacagcggcttactcgaggacctcctcagggcaggcaaggacgccgacgtcggtgacgccaagggcagaacagcattgcacatcgcggcgtccaaggggtacgaggactgcgtgctggtgctactcaagcacgcgtgcaatgtgaacatcagggacgcgcagggcaacacggcgatgtggaacgccatcgcggcggggcaccacaagaccttcaacctcctgtaccaattcgggcgcgcgtcgaacccgcgcgccggcggagacgtgatgtgcctcgcggcgcgccgcggccacctcggcgcgctccaggagctcctcaagctcggcctggacgtggactcggaggaccacgacggcgccaccgcgctgcgcgtcgcgatggccgagggccacgcggatgcggccaggttcctgatattgaacggggccagcgtggacaaggcgagcctcgacgacgacggctcaggttcaggctccggctctggcgccgcgcggctagcaatgtcgcccaccgagctgcgcgagctgctgcagaagcgggagctcggccactcgataacgatccacgactcgccagcggtggtcccgaacggcggctcgtcggggcacagccgtccaggaagattacagagcacaagttcggacagccagcgctggcctcgggtgagcgtatacaagggccaccctttcctcagaaaccgcacctctgaagctggcaagctgatcaacctaccaggcaccatggaagaattcagagccatcgtcggtgagaaactgaaagttgacgcggagaaggcgttgatcgtgagcgacgaaggagcggagatcgactcgatcgacgtgatccgggacaacgacaagctgttcatggtcaccgaagaagatctgaggcggctggcatcaatggactggctgtcgtgcgagtgatttggttcctcccaagataattggaggctaaatatagaatacagtacaagagtattgtgcttctacgatgtctaggattgatagattgatggcaactactgagtggcatgagctctatcgagcgactaatttgcaggcaatgtgtaccatgagttcggaccactgtccgttattaatgcaaggtcattcttcttgtaatttctataaggggtttcattttgaatcctattgggtacacactgacgggttcaaagatgtagttcaacaagcttggacggccacaattaactcctctgatgtcattc

SEQ ID NO: 222354 - DNA, 3400 bp, Zea Mays
acactcggcaaagcttttgccgagtgtaaaatagcctttgccgagtgtcttagacactcggcagcaaagaacacgattccggtagtgcgagcaagctcgatatccacttctacccgtgaaacattagtttatccatgctcgtgccgcgagttatataatgtggcatagcaaggcagcaggagatatgtgcgggcacaccggccggcccctgccagtctgccaccgatacttggcaaacgtggccgtttctgctgcctcctcaggtgtataagtagcagaggaacacaatgcaagctaggagcgactgcaaggaactaactggtccgggaggtgcaggcaggagaggcgagctgaccgatcgatcaccaggggataccgtaccgtggcgtggtgggggagagagagagcgagatggccgcggcggagatagtcgtcgtcgccgtcgtgaccttgcttctcgggctaacgtcgtgcatggcagagagttcggtatggagggaggaggaccggcgcgtccgaggagaggtgacgtacgagcagagggccctggtgctggacggcgccaggaggatgctgttcgccggggagatgcactacccaaggagcacgccggagatgtggccaaaactcattgctaaagcaaaggagggcgggcttgacgtgatacagacctacgtattctggaacgttcatgagcctatccagggccagtacaacttcgagggaagatatgatcttgtcaggttcatcaaggaaattcaagctcagggtctctacgtaagcctcaggatcggtcccttcatagagtctgaatggaaatatggaggatttccattttggctacatgatgtcccaaacattaccttccgaagtgataacgaaccctttaagcaacacatgcaaagatttgttacagatatagtaaatatgatgaaacatgaaggactttactacccacaaggaggtcccattataacttctcagattgagaacgaataccaaatggttgagcctgcatttggctcaagtgggcaacgttacgtcagttgggcagctgcaatggctgtagaccttcaaacaggtgttccctggacgatgtgcaagcaaaacgatgctccagatccagttgtcgatcaatacgtgcaacgggcttatttgtggagaaacgtttgttggaccaaactcagctaacaagcctgcattatggactgaaaattggacctcgcgctatcttatatacggcaacgatacaaaattgaggtctccacaagatatcacctttgcagttgcattatttatagcaaggaaaaatggaagctatgtgagctactacatgtatcacggaggaacaaactttgggaggtttgcttcttcatatgtaacaacaagctactacgatggagctcctcttgatgaatatggtttgatatggcaaccaacatggggtcatctcagagaactgcatgctgcagtaaaacagtcatcagaaccactactatttgggacatactccaatctttctataggtcaagaacaagaggcacatatcttcgaaacagaaactcaatgtgtggctttcctagtcaactttgatcagcatcatatatcagaagtagtatttcgtaatatatcactggaactggccccaaaatcaatcagcattctcttagattgtaagcaggtagtttttgaaacagctaaggtaaatgctcagcatggatcaagaacagctgaagaagtgcagtcttttagtgacattagtacttggaaggcattcaaggaaccaattcctcaagatgtgagtaaatctgcatacagtggaaaccgactctttgaacatctatcaactactaaagatgctaccgattatctatggtacattgttggctatgaatatacaccgagtgatgatggccaacttgtgttgattaatgttgagtcacgagcacatatattgcatgcctttgtcaacaatgcatatgtgggtagaatacatggaagccatggtggacctgccaatataattttcagcacaaatatttctctacaggaaggaccaaacaccatatcattgctaagtgctatggttggatcaccggattcgggtgctcatatggaaaggagagtatttggaattaggaaagtgagcatacaacagggacaagagccagaaaatctgctcaacaatgagctatgggggtaccaagttggcttattcggggaaaggaataacatctacacacaagattcaaaaattactgaatggacaactatcgacaatttgacatatagcccacttacttggtacaagactacattttccacaccagtgggaaatgacgcagtgacactgaaccttactggtatgggtaagggtgaagtatgggtcaatggagagagtatcggacgatattgggtctctttcaaggctcctagtggcaatccttcgcaatcactgtatcacataccacgagaatttctaaaccctcaagacaataccctagtcctttttgaggaaatgggaggcaacccacagctaataacagtgaacacaatgtcggtatcaagagtgtgtggcaatgtgaatgagctctcagctccatcacttcaatataaggataaggaaccagcagtagatctctggtgtccagaaggcaaacatatatcagcaattgagtttgcaagctacggaggtcctacgggtgactgcaaaaaatttggtttcggaagatgccatgcaggatcatcagaatctgttgtaaaacaggcttgcttgggtaaaagtggatgctctgttcccgtaacacctatcaaatttggaggcgatccatgtcctggaatccaaaaatctcttctagttgtggcgaactacaggtgacactagacagtcacacaagtatacatcatagaaaagaagttggacgagtataaaaaataaaaagatgagttacaaaatcaacgagcaatagagtggagggaaagtataagtcaaaacatatagtaattgttattaggtaggcaattgatcacttgaggcttagttggtagaccccatgtaccgattgttttgacctggcatagatatgtgttatctgtatatcgatttcacatgaatggcaactcattgttttatggtttatggtgatttagaaatatgtgatatcattcatttgtagtgcctcccatcttcagctcattgtctatgatttagaaatatgatatatcattcatttctagcgcctcccatctaatcgcatccccttgcgcacgacagaattgccatcggaaactaaaaccctttgcgtcaccgcatgggtggaacaaatgtgcatcaacatcaatgattaactaaggggaagaacatttacatactattccatactaaattggtaggtagaat

SEQ ID NO: 222355 - DNA, 1545 bp, Zea Mays
gtacattgttgggaaaactctctcaattgcagctatgaatatacaccgagtgatgatggccaacttgtgttgattaatgttgagtcacgagcacatatattgcatgcctttgtcaacaatgcatatgtgggtagaatacatggaagccatggtggacctgccaatataattttcagcacaaatatttctctacaggaaggaccaaacaccatatcattgctaagtgctatggttggatcaccggattcgggtgctcatatggaaaggagagtatttggaattaggaaagtgagcatacaacagggacaagagccagaaaatctgctcaacaatgagctatgggggtaccaagttggcttattcggggaaaggaataacatctacacacaagattcaaaaattactgaatggacaactatcgacaatttgacatatagcccacttacttggtacaagactacattttccacaccagtgggaaatgacgcagtgacactgaaccttactggtatgggtaagggtgaagtatgggtcaatggagagagtatcggacgatattgggtctctttcaaggctcctagtggcaatccttcgcaatcactgtatcacataccacgagaatttctaaaccctcaagacaataccctagtcctttttgaggaaatgggaggcaacccacagctaataacagtgaacacaatgtcggtatcaagagtgtgtggcaatgtgaatgagctctcagctccatcacttcaatataaggataaggaaccagcagtagatctctggtgtccagaaggcaaacatatatcagcaattgagtttgcaagctacggaggtcctacgggtgactgcaaaaaatttggtttcggaagatgccatgcaggatcatcagaatctgttgtaaaacaggcttgcttgggtaaaagtggatgctctgttcccgtaacacctatcaaatttggaggcgatccatgtcctggaatccaaaaatctcttctagttgtggcgaactacaggtgacactagacagtcacacaagtatacatcatagaaaagaagttggacgagtataaaaaataaaaagatgagttacaaaatcaacgagcaatagagtggagggaaagtataagtcaaaacatatagtaattgttattaggtaggcaattgatcacttgaggcttagttggtagaccccatgtaccgattgttttgacctggcatagatatgtgttatctgtatatcgatttcacatgaatggcaactcattgttttatggtttatggtgatttagaaatatgtgatatcattcatttgtagtgcctcccatcttcagctcattgtctatgatttagaaatatgatatatcattcatttctagcgcctcccatctaatcgcatccccttgcgcacgacagaattgccatcggaaactaaaaccctttgcgtcaccgcatgggtggaacaaatgtgcatcaacatcaatgattaactaaggggaagaacatttacatactattccatactaaattggtaggtagaat

SEQ ID NO: 222356 - DNA, 884 bp, Zea Mays
ttatcttatatgagagtatgttggtcttgctggtgccagattggatggtggggaaatgcttgcatgtggtctggcaactcattttgtccagtcaaattgtgtggtatcatcgatcaatttgctcaacaaccatcactgaaagaaagcagctctttgaataggttggaaatcatcaacaaatgcttttccaaaaggacagtcgaagaaattatatccgctcttgaagtagaggcctcaaattcggcagatgaatgggttgctacaacaatccagtccttgaagaaggcttctcctaccagtctgaaaatctctctgagatcgataagagaagggaggacacaaactgttggggagtgcttgcagcgggaatatagaatggtctgccatgtcatgcgtggtgacttcagcagagacttctttgagggatgcagggctatattgctggataaagaccgaaacccaaagtggatgcctccaaggttggaacaagtgcatgacgaggctgttgaacagtatttctccagaattgatgatccacagtgggaagacttgaacctacctgctagacgctcccacggaagaaatatcgagtccaagctttgatcgaaggtcatgggagaaaggtggaactctggaacggagccttggtagtggtcagaataacacattattgcacatcatctcaagtttgaagagtctgcagactattgataaaataaacatgaatgtgccatataggtcaacttatatcacagaaagaaactctttgctgtttatacgtggagactggagtcatatgcatttttaaataattataagtaataaaatcgaaaaagaaatcgttggaaagacttttcttggagtcagaccctacttgatggtga

SEQ ID NO: 222357 - DNA, 1700 bp, Zea Mays
atggtggtgaccgctccctatgatgcccatgacagggtgctcgtcggagtcgtggtggcagtatccatgcctcgaggagaggtcgacatggagggagaagggatagaggaactcgaagtcgtggcgacaatatccagcagctccgggagagaactcggtagggaagggacaaactggcaacgagaggacatggcctcgttggttatcagagatcaaagatgcttccttgtccggcggaagcggatgacctcgatgtctcccccaagcgctgcgggcgacgactctgaccaggtcctttttctatacattttggtagaagtgaatggctttacaaggacactgattttgaataggccaaagcagttaaatgcactctcctcgaccatgattatgggactcttgaggtgtttcactgcttatgagaaagacgatggagttaaattgttgattatgaagggtaaaggaagagcattttgtgctggaggtgatgttgctgcagttgttcgatctatacataaagacagctggaaatatggtgctgatttcttccgaaatgaatttttgttgaattacataattgcaacttataccaaacctcaggtttctcttcttagtggaatcgtcatgggtggaggtgctggcgtttctttacatggaaggtttagagttgccactgataacacggtttttgcaatgccagaaacagctctgggtctctttccagatataggggcctcatattttctgtctcggcttcctggattctatggagagtatgttggtcttgctggtgccagattggatggtggggaaatgcttgcatgtggtctggcaactcattttgtccagtcaaatagtctgctatcgctggaagaatcacttaaaaaggtggatacttccaatgcttttgcagtgtgtggtatcatcgatcaatttgctcaacaaccatcactgaaagaaagcagctctttgaataggttggaaatcatcaacaaatgcttttccaaaaggacagtcgaagaaattatatccgctcttgaagtagaggcctcaaattcggcagatgaatgggttgctacaacaatccagtccttgaagaaggcttctcctaccagtctgaaaatctctctgagatcgataagagaagggaggacacaaactgttggggagtgcttgcagcgggaatatagaatggtctgccatgtcatgcgtggtgacttcagcagagacttctttgagggatgcagggctatattgctggataaagaccgaaacccaaagtggatgcctccaaggttggaacaagtgcatgacgaggctgttgaacagtatttctccagaattgatgatccacagtgggaagacttgaacctacctgctagacgctcccacggaagaaatatcgagtccaagctttgatcgaaggtcatgggagaaaggtggaactctggaacggagccttggtagtggtcagaataacacattattgcacatcatctcaagtttgaagagtctgcagactattgataaaataaacatgaatgtgccatataggtcaacttatatcacagaaagaaactctttgctgtttatacgtggagactggagtcatatgcatttttaaataattataagtaataaaatcgaaaaagaaatcgttggaaagacttttcttggagtcagaccctacttgatggtga

SEQ ID NO: 222358 - DNA, 1317 bp, Zea Mays
cggatttcacgttggatgaaagattttggtagaagtgaatggctttacaaggacactgattttgaataggccaaagcagttaaatgcactctcctcgaccatgattatgggactcttgaggtgtttcactgcttatgagaaagacgatggagttaaattgttgattatgaagggtaaaggaagagcattttgtgctggaggtgatgttgctgcagttgttcgatctatacataaagacagctggaaatatggtgctgatttcttccgaaatgaatttttgttgaattacataattgcaacttataccaaacctcaggtttctcttcttagtggaatcgtcatgggtggaggtgctggcgtttctttacatggaaggtttagagttgccactgataacacggtttttgcaatgccagaaacagctctgggtctctttccagatataggggcctcatattttctgtctcggcttcctggattctatggagagtatgttggtcttgctggtgccagattggatggtggggaaatgcttgcatgtggtctggcaactcattttgtccagtcaaatagtctgctatcgctggaagaatcacttaaaaaggtggatacttccaatgcttttgcagtgtgtggtatcatcgatcaatttgctcaacaaccatcactgaaagaaagcagctctttgaataggttggaaatcatcaacaaatgcttttccaaaaggacagtcgaagaaattatatccgctcttataagagaagggaggacacaaactgttggggagtgcttgcagcgggaatatagaatggtctgccatgtcatgcgtggtgacttcagcagagacttctttgagggatgcagggctatattgctggataaagaccgaaacccaaagtggatgcctccaaggttggaacaagtgcatgacgaggctgttgaacagtatttctccagaattgatgatccacagtgggaagacttgaacctacctgctagacgctcccacggaagaaatatcgagtccaagctttgatcgaaggtcatgggagaaaggtggaactctggaacggagccttggtagtggtcagaataacacattattgcacatcatctcaagtttgaagagtctgcagactattgataaaataaacatgaatgtgccatataggtcaacttatatcacagaaagaaactctttgctgtttatacgtggagactggagtcatatgcatttttaaataattataagtaataaaatcgaaaaagaaatcgttggaaagacttttcttggagtcagaccctacttgatggtga

SEQ ID NO: 222359 - DNA, 1996 bp, Zea Mays
aacaaagtgtccaaaacgagcactagtgtattttttattcctactcccagtcgccgcctgcatttgtctctcggtcaggaacatggaggggagacggctttcacggcggcagttacgctcgctaccggacgccgcgtccttctcgccggaagtcgcggccagcccggggctcgtcggctccggccagttgggtctcggtctctcggcggcgttcgagactctgccgccgattttggtagaagtgaatggctttacaaggacactgattttgaataggccaaagcagttaaatgcactctcctcgaccatgattatgggactcttgaggtgtttcactgcttatgagaaagacgatggagttaaattgttgattatgaagggtaaaggaagagcattttgtgctggaggtgatgttgctgcagttgttcgatctatacataaagacagctggaaatatggtgctgatttcttccgaaatgaatttttgttgaattacataattgcaacttataccaaacctcaggtttctcttcttagtggaatcgtcatgggtggaggtgctggcgtttctttacatggaaggtttagagttgccactgataacacggtttttgcaatgccagaaacagctctgggtctctttccagatataggggcctcatattttctgtctcggcttcctggattctatggttatcttatatgtctcttctttttctttatattcagtcgaattacatgttgcgatgtcatttccatctatacagtattgttggatattattcagtcctgaaatatcacgcatcttcaaattttcctttgaagttttccaaataccgtctacttgattgaattttagcaatagtgcttcatgcacaatagtgattgtggagataaatcatataggttgtggagatataatcatatatagaaatgagagtgaccaaatgtaggttcacttatgacttatattagttgtaatgcgtgaaggcagcttcttagttgatggcaaaggtatcttaggagatactgttcactaaactgttttcatgttcttttctccaggagagtatgttggtcttgctggtgccagattggatggtggggaaatgcttgcatgtggtctggcaactcattttgtccagtcaaatagtctgctatcgctggaagaatcacttaaaaaggtggatacttccaatgcttttgcagtgtgtggtatcatcgatcaatttgctcaacaaccatcactgaaagaaagcagctctttgaataggttggaaatcatcaacaaatgcttttccaaaaggacagtcgaagaaattatatccgctcttgaagtagaggcctcaaattcggcagatgaatgggttgctacaacaatccagtccttgaagaaggcttctcctaccagtctgaaaatctctctgagatcgataagagaagggaggacacaaactgttggggagtgcttgcagcgggaatatagaatggtctgccatgtcatgcgtggtgacttcagcagagacttctttgagggatgcagggctatattgctggataaagaccgaaacccaaagtggatgcctccaaggttggaacaagtgcatgacgaggctgttgaacagtatttctccagaattgatgatccacagtgggaagacttgaacctacctgctagacgctcccacggaagaaatatcgagtccaagctttgatcgaaggtcatgggagaaaggtggaactctggaacggagccttggtagtggtcagaataacacattattgcacatcatctcaagtttgaagagtctgcagactattgataaaataaacatgaatgtgccatataggtcaacttatatcacagaaagaaactctttgctgtttatacgtggagactggagtcatatgcatttttaaataattataagtaataaaatcgaaaaagaaatcgttggaaagacttttcttggagtcagaccctacttgatggtga

SEQ ID NO: 222360 - DNA, 1534 bp, Zea Mays
aacaaagtgtccaaaacgagcactagtgtattttttattcctactcccagtcgccgcctgcatttgtctctcggtcaggaacatggaggggagacggctttcacggcggcagttacgctcgctaccggacgccgcgtccttctcgccggaagtcgcggccagcccggggctcgtcggctccggccagttgggtctcggtctctcggcggcgttcgagactctgccgccgattttggtagaagtgaatggctttacaaggacactgattttgaataggccaaagcagttaaatgcactctcctcgaccatgattatgggactcttgaggtgtttcactgcttatgagaaagacgatggagttaaattgttgattatgaagggtaaaggaagagcattttgtgctggaggtgatgttgctgcagttgttcgatctatacataaagacagctggaaatatggtgctgatttcttccgaaatgaatttttgttgaattacataattgcaacttataccaaacctcaggtttctcttcttagtggaatcgtcatgggtggaggtgctggcgtttctttacatggaaggtttagagttgccactgataacacggtttttgcaatgccagaaacagctctgggtctctttccagatataggggcctcatattttctgtctcggcttcctggattctatggagagtatgttggtcttgctggtgccagattggatggtggggaaatgcttgcatgtggtctggcaactcattttgtccagtcaaatagtctgctatcgctggaagaatcacttaaaaaggttggaaatcatcaacaaatgcttttccaaaaggacagtcgaagaaattatatccgctcttgaagtagaggcctcaaattcggcagatgaatgggttgctacaacaatccagtccttgaagaaggcttctcctaccagtctgaaaatctctctgagatcgataagagaagggaggacacaaactgttggggagtgcttgcagcgggaatatagaatggtctgccatgtcatgcgtggtgacttcagcagagacttctttgagggatgcagggctatattgctggataaagaccgaaacccaaagtggatgcctccaaggttggaacaagtgcatgacgaggctgttgaacagtatttctccagaattgatgatccacagtgggaagacttgaacctacctgctagacgctcccacggaagaaatatcgagtccaagctttgatcgaaggtcatgggagaaaggtggaactctggaacggagccttggtagtggtcagaataacacattattgcacatcatctcaagtttgaagagtctgcagactattgataaaataaacatgaatgtgccatataggtcaacttatatcacagaaagaaactctttgctgtttatacgtggagactggagtcatatgcatttttaaataattataagtaataaaatcgaaaaagaaatcgttggaaagacttttcttggagtcagaccctacttgatggtga

SEQ ID NO: 222361 - DNA, 1616 bp, Zea Mays
aacaaagtgtccaaaacgagcactagtgtattttttattcctactcccagtcgccgcctgcatttgtctctcggtcaggaacatggaggggagacggctttcacggcggcagttacgctcgctaccggacgccgcgtccttctcgccggaagtcgcggccagcccggggctcgtcggctccggccagttgggtctcggtctctcggcggcgttcgagactctgccgccgattttggtagaagtgaatggctttacaaggacactgattttgaataggccaaagcagttaaatgcactctcctcgaccatgattatgggactcttgaggtgtttcactgcttatgagaaagacgatggagttaaattgttgattatgaagggtaaaggaagagcattttgtgctggaggtgatgttgctgcagttgttcgatctatacataaagacagctggaaatatggtgctgatttcttccgaaatgaatttttgttgaattacataattgcaacttataccaaacctcaggtttctcttcttagtggaatcgtcatgggtggaggtgctggcgtttctttacatggaaggtttagagttgccactgataacacggtttttgcaatgccagaaacagctctgggtctctttccagatataggggcctcatattttctgtctcggcttcctggattctatggagagtatgttggtcttgctggtgccagattggatggtggggaaatgcttgcatgtggtctggcaactcattttgtccagtcaaatagtctgctatcgctggaagaatcacttaaaaaggtggatacttccaatgcttttgcagtgtgtggtatcatcgatcaatttgctcaacaaccatcactgaaagaaagcagctctttgaataggttggaaatcatcaacaaatgcttttccaaaaggacagtcgaagaaattatatccgctcttaggcctcaaattcggcagatgaatgggttgctacaacaatccagtccttgaagaaggcttctcctaccagtctgaaaatctctctgagatcgataagagaagggaggacacaaactgttggggagtgcttgcagcgggaatatagaatggtctgccatgtcatgcgtggtgacttcagcagagacttctttgagggatgcagggctatattgctggataaagaccgaaacccaaagtggatgcctccaaggttggaacaagtgcatgacgaggctgttgaacagtatttctccagaattgatgatccacagtgggaagacttgaacctacctgctagacgctcccacggaagaaatatcgagtccaagctttgatcgaaggtcatgggagaaaggtggaactctggaacggagccttggtagtggtcagaataacacattattgcacatcatctcaagtttgaagagtctgcagactattgataaaataaacatgaatgtgccatataggtcaacttatatcacagaaagaaactctttgctgtttatacgtggagactggagtcatatgcatttttaaataattataagtaataaaatcgaaaaagaaatcgttggaaagacttttcttggagtcagaccctacttgatggtga

SEQ ID NO: 222362 - DNA, 1565 bp, Zea Mays
aacaaagtgtccaaaacgagcactagtgtattttttattcctactcccagtcgccgcctgcatttgtctctcggtcaggaacatggaggggagacggctttcacggcggcagttacgctcgctaccggacgccgcgtccttctcgccggaagtcgcggccagcccggggctcgtcggctccggccagttgggtctcggtctctcggcggcgttcgagactctgccgccgattttggtagaagtgaatggctttacaaggacactgattttgaataggccaaagcagttaaatgcactctcctcgaccatgattatgggactcttgaggtgtttcactgcttatgagaaagacgatggagttaaattgttgattatgaagggtaaaggaagagcattttgtgctggaggtgatgttgctgcagttgttcgatctatacataaagacagctggaaatatggtgctgatttcttccgaaatgaatttttgttgaattacataattgcaacttataccaaacctcaggtttctcttcttagtggaatcgtcatgggtggaggtgctggcgtttctttacatggaaggtttagagttgccactgataacacggtttttgcaatgccagaaacagctctgggtctctttccagatataggggcctcatattttctgtctcggcttcctggattctatggagagtatgttggtcttgctggtgccagattggatggtggggaaatgcttgcatgtggtctggcaactcattttgtccagtcaaattgtgtggtatcatcgatcaatttgctcaacaaccatcactgaaagaaagcagctctttgaataggttggaaatcatcaacaaatgcttttccaaaaggacagtcgaagaaattatatccgctcttgaagtagaggcctcaaattcggcagatgaatgggttgctacaacaatccagtccttgaagaaggcttctcctaccagtctgaaaatctctctgagatcgataagagaagggaggacacaaactgttggggagtgcttgcagcgggaatatagaatggtctgccatgtcatgcgtggtgacttcagcagagacttctttgagggatgcagggctatattgctggataaagaccgaaacccaaagtggatgcctccaaggttggaacaagtgcatgacgaggctgttgaacagtatttctccagaattgatgatccacagtgggaagacttgaacctacctgctagacgctcccacggaagaaatatcgagtccaagctttgatcgaaggtcatgggagaaaggtggaactctggaacggagccttggtagtggtcagaataacacattattgcacatcatctcaagtttgaagagtctgcagactattgataaaataaacatgaatgtgccatataggtcaacttatatcacagaaagaaactctttgctgtttatacgtggagactggagtcatatgcatttttaaataattataagtaataaaatcgaaaaagaaatcgttggaaagacttttcttggagtcagaccctacttgatggtga

SEQ ID NO: 222363 - DNA, 1524 bp, Zea Mays
aacaaagtgtccaaaacgagcactagtgtattttttattcctactcccagtcgccgcctgcatttgtctctcggtcaggaacatggaggggagacggctttcacggcggcagttacgctcgctaccggacgccgcgtccttctcgccggaagtcgcggccagcccggggctcgtcggctccggccagttgggtctcggtctctcggcggcgttcgagactctgccgccgattttggtagaagtgaatggctttacaaggacactgattttgaataggccaaagcagttaaatgcactctcctcgaccatgattatgggactcttgaggtgtttcactgcttatgagaaagacgatggagttaaattgttgattatgaagggtaaaggaagagcattttgtgctggaggtgatgttgctgcagttgttcgatctatacataaagacagctggaaatatggtgctgatttcttccgaaatgaatttttgttgaattacataattgcaacttataccaaacctcaggtttctcttcttagtggaatcgtcatgggtggaggtgctggcgtttctttacatggaaggtttagagttgccactgataacacggtttttgcaatgccagaaacagctctgggtctctttccagatataggggcctcatattttctgtctcggcttcctggattctatggagagtatgttggtcttgctggtgccagattggatggtggggaaatgcttgcatgtggtctggcaactcattttgtccagtcaaatagtctgctatcgctggaagaatcacttaaaaaggtggatacttccaatgcttttgcagtgtgtggtatcatcgatcaatttgctcaacaaccatcactgaaagaaagcagctctttgaataggttggaaatcatcaacaaatgcttttccaaaaggacagtcgaagaaattatatccgctcttataagagaagggaggacacaaactgttggggagtgcttgcagcgggaatatagaatggtctgccatgtcatgcgtggtgacttcagcagagacttctttgagggatgcagggctatattgctggataaagaccgaaacccaaagtggatgcctccaaggttggaacaagtgcatgacgaggctgttgaacagtatttctccagaattgatgatccacagtgggaagacttgaacctacctgctagacgctcccacggaagaaatatcgagtccaagctttgatcgaaggtcatgggagaaaggtggaactctggaacggagccttggtagtggtcagaataacacattattgcacatcatctcaagtttgaagagtctgcagactattgataaaataaacatgaatgtgccatataggtcaacttatatcacagaaagaaactctttgctgtttatacgtggagactggagtcatatgcatttttaaataattataagtaataaaatcgaaaaagaaatcgttggaaagacttttcttggagtcagaccctacttgatggtga

SEQ ID NO: 222364 - DNA, 1619 bp, Zea Mays
aacaaagtgtccaaaacgagcactagtgtattttttattcctactcccagtcgccgcctgcatttgtctctcggtcaggaacatggaggggagacggctttcacggcggcagttacgctcgctaccggacgccgcgtccttctcgccggaagtcgcggccagcccggggctcgtcggctccggccagttgggtctcggtctctcggcggcgttcgagactctgccgccgattttggtagaagtgaatggctttacaaggacactgattttgaataggccaaagcagttaaatgcactctcctcgaccatgattatgggactcttgaggtgtttcactgcttatgagaaagacgatggagttaaattgttgattatgaagggtaaaggaagagcattttgtgctggaggtgatgttgctgcagttgttcgatctatacataaagctggaaatatggtgctgatttcttccgaaatgaatttttgttgaattacataattgcaacttataccaaacctcaggtttctcttcttagtggaatcgtcatgggtggaggtgctggcgtttctttacatggaaggtttagagttgccactgataacacggtttttgcaatgccagaaacagctctgggtctctttccagatataggggcctcatattttctgtctcggcttcctggattctatggagagtatgttggtcttgctggtgccagattggatggtggggaaatgcttgcatgtggtctggcaactcattttgtccagtcaaatagtctgctatcgctggaagaatcacttaaaaaggtggatacttccaatgcttttgcagtgtgtggtatcatcgatcaatttgctcaacaaccatcactgaaagaaagcagctctttgaataggttggaaatcatcaacaaatgcttttccaaaaggacagtcgaagaaattatatccgctcttgaagtagaggcctcaaattcggcagatgaatgggttgctacaacaatccagtccttgaagaaggcttctcctaccagtctgaaaatctctctgagatcgataagagaagggaggacacaaactgttggggagtgcttgcagcgggaatatagaatggtctgccatgtcatgcgtggtgacttcagcagagacttctttgagggatgcagggctatattgctggataaagaccgaaacccaaagtggatgcctccaaggttggaacaagtgcatgacgaggctgttgaacagtatttctccagaattgatgatccacagtgggaagacttgaacctacctgctagacgctcccacggaagaaatatcgagtccaagctttgatcgaaggtcatgggagaaaggtggaactctggaacggagccttggtagtggtcagaataacacattattgcacatcatctcaagtttgaagagtctgcagactattgataaaataaacatgaatgtgccatataggtcaacttatatcacagaaagaaactctttgctgtttatacgtggagactggagtcatatgcatttttaaataattataagtaataaaatcgaaaaagaaatcgttggaaagacttttcttggagtcagaccctacttgatggtga

SEQ ID NO: 222365 - DNA, 1700 bp, Zea Mays
attccttgttagccagcgagtcacgtacaggctgtgacgatgagctgggttatgtcagcattatgcctacgtcgctgaacaaagtgtccaaaacgagcactagtgtattttttattcctactcccagtcgccgcctgcatttgtctctcggtcaggaacatggaggggagacggctttcacggcggcagttacgctcgctaccggacgccgcgtccttctcgccggaagtcgcggccagcccggggctcgtcggctccggccagttgggtctcggtctctcggcggcgttcgagactctgccgccgattttggtagaagtgaatggctttacaaggacactgattttgaataggccaaagcagttaaatgcactctcctcgaccatgattatgggactcttgaggtgtttcactgcttatgagaaagacgatggagttaaattgttgattatgaagggtaaaggaagagcattttgtgctggaggtgatgttgctgcagttgttcgatctatacataaagacagctggaaatatggtgctgatttcttccgaaatgaatttttgttgaattacataattgcaacttataccaaacctcaggtttctcttcttagtggaatcgtcatgggtggaggtgctggcgtttctttacatggaaggtttagagttgccactgataacacggtttttgcaatgccagaaacagctctgggtctctttccagatataggggcctcatattttctgtctcggcttcctggattctatggagagtatgttggtcttgctggtgccagattggatggtggggaaatgcttgcatgtggtctggcaactcattttgtccagtcaaatagtctgctatcgctggaagaatcacttaaaaaggtggatacttccaatgcttttgcagtgtgtggtatcatcgatcaatttgctcaacaaccatcactgaaagaaagcagctctttgaataggttggaaatcatcaacaaatgcttttccaaaaggacagtcgaagaaattatatccgctcttgaagtagaggcctcaaattcggcagatgaatgggttgctacaacaatccagtccttgaagaaggcttctcctaccagtctgaaaatctctctgagatcgataagagaagggaggacacaaactgttggggagtgcttgcagcgggaatatagaatggtctgccatgtcatgcgtggtgacttcagcagagacttctttgagggatgcagggctatattgctggataaagaccgaaacccaaagtggatgcctccaaggttggaacaagtgcatgacgaggctgttgaacagtatttctccagaattgatgatccacagtgggaagacttgaacctacctgctagacgctcccacggaagaaatatcgagtccaagctttgatcgaaggtcatgggagaaaggtggaactctggaacggagccttggtagtggtcagaataacacattattgcacatcatctcaagtttgaagagtctgcagactattgataaaataaacatgaatgtgccatataggtcaacttatatcacagaaagaaactctttgctgtttatacgtggagactggagtcatatgcatttttaaataattataagtaataaaatcgaaaaagaaatcgttggaaagacttttcttggagtcagaccctacttgatggtga

SEQ ID NO: 222366 - DNA, 1415 bp, Zea Mays
ctgctctctcgctcgagaagcctcctccgctccgccgtccgcccctcgcctcaccagtccgcattccggcgcacacgcccattaaaataccgcgtccaatctccgccctgcgctcgtccctcatgcccgcctcgcggctcacagtgcgcgtgtgccaccatgctcggcgcggcgctccgcctccgcgtccgcgtgctccgccgccgccgctcccaccgcgggcgccgtcgaggcaggcggtctctcggtcgggtcggggatgacgacgacgacgagggaggccgggagccggtgctgctagtgtccgggatgggcggctccgtgctgcacgcgcgccgccggtccaactccaagttcgacctccgggtctgggtgcgcatcctcttcgccaacctcgacttcaagaagtacctctggtcgctctacaacgccgataccgggtatgtggagccgctggacgacgatgtggagattgtcgtgccggaggacgaccacggcctgtttgccatcgacattcttgatccttcctggtttgtagaacttctccatctgtctatggtgtatcacttccatggtatgattgatatgctcataaactgtggatatgagaaagggaccacactatttggatatggttatgattttcgccaaagcaacaggatagacaaagcgatggctggtttgagagcaaaacttgagacagcttataagacctctggagggaaaaaagttaatttaatctcacattctatgggtggattgctagtacgctgcttcatgtctatgaatcatgatgtattcactaagtatgtcaacaaatggatttgcattgcttgtccattccaaggtgcccccggatgcatcaatgattctctacttactggattgcaatttgtttatggttttgagagcttctttttcgtatctagatgggcaatgcaccaattgcttgtcgaatgcccatcaatctatgaaatgttaccgaatccagaattcaagtggaaggaaaaaccaattattcaggtttggcgtaagaaccctgaaaaggatggaactgtggagcttgttcaatatgaagcaactgattgtgtgtccttgttcgaagaagctttaaggaataatgagctcacgtataacggaaagaaagtagcactaccattcaatatgtcagtcttcaaatgggccaccaagactcgccaaatcctagacaatgctgaattaccagatactgtgagcttttacaatatatacgggacatcttatgaaactccatacgatgtatgctatggctcagaaagctctccgattggagatttgtcagaagtgtgtcacacagtgccgtcatacacttatgtggatggagattgcacggttcccatagaatcggcacggcgatcactggtcagtcacagaag

SEQ ID NO: 222367 - DNA, 1259 bp, Zea Mays
gcacatttaagcaactgatggaatcgtttgtagaacttctccatctgtctatggtgtatcacttccatggtatgattgatatgctcataaactgtggatatgagaaagggaccacactatttggatatggttatgattttcgccaaagcaacaggatagacaaagcgatggctggtttgagagcaaaacttgagacagcttataagacctctggagggaaaaaagttaatttaatctcacattctatgggtggattgctagtattcactaagtatgtcaacaaatggatttgcattgcttgtccattccaaggtgcccccggatgcatcaatgattctctacttactggattgcaatttgtttatggttttgagagcttctttttcgtatctagatgggcaatgcaccaattgcttgtcgaatgcccatcaatctatgaaatgttaccgaatccagaattcaagtggaaggaaaaaccaattattcaggtttggcgtaagaaccctgaaaaggatggaactgtggagcttgttcaatatgaagcaactgattgtgtgtccttgttcgaagaagctttaaggaataatgagctcacgtataacggaaagaaagtagcactaccattcaatatgtcagtcttcaaatgggccaccaagactcgccaaatcctagacaatgctgaattaccagatactgtgagcttttacaatatatacgggacatcttatgaaactccatacgatgtatggcttataggttgtcaatgtataaagttcaaggctgatgggttctctgcgaaagaaagagttggcgtcaaggccgaccaccgtggcctgctgtccgatgagaacgtattcaagcttctcaagaaatggctcggtgtgagcgagaagaagtcagagtggcgttgcgtgtctaaatcctactccaaagtgggtaattgggttgccctgtagttcttcaggaagactgttattttggcctttcctcctgaagagaagatgaaacaaaattctggtgattgtattgtatgtctgcacgatgtaaatccctgcgagctgcacggaacaagggattagtgccccttgtacgatgtatcattgccagacatttcttttgaagcctagggtcatatattcattgccccttccaactttggagcatagtaaatgaataatatgaaatcgatcataatttcagaagtgttctgtatttggattagaatgttaatttgcccataacggtgggacgcatctttt

SEQ ID NO: 222368 - DNA, 1767 bp, Zea Mays
gccacacacacttcatgacttcaacagttttaaatcagtagaatacacctagaaaagtaaggtgctataatacatacaagtcacaggttgaaattcaaagtgcaaattttgattttgattattttgattccaaaattactaaagctaccatcttctcttagtagacttaaagattgttcttttgatgtttgttccaagatgctagattctatgttttcccatataaaaaccacctcatgaggcactccttatcaacctgagaaggccaaaagggtatcaaaagacttaaggtcagacaagagggtgtttgagtttgtcaacaggaagcattccaacacaagttcaggctttgggaacagagtaaagaggccactggaaaacacaggccacaaagcagcagatgtatcaccaacatcagggtccgagtgagctcttcaccacgaggacatcctttccaatggagcagcatccgtttttgcgtggaggaaatgcccaaggagattctgggctggttctctcaactgacgctaaaccaaggctgaaatggacacctgagttacatcagcgatttgtagatgcagtcaatcaattaggtggagaagagaaagctactccaaaaacagtcatgaggctcatgggaattccaggactcaccttgtaccatttgaaaagccatctccagaaatacaggctcagcaagaacctccaagctcaagcaaatgccagtacatcgaagaatgccataggatgtacgcccgttgctgataggattcccggaacaaccgcagcaacaatgagcagtacaaatgttcttcctcaggcagagaagactattcaaattggtgaagcactgcagatgcaaatccaggttcaaagacagttaaatgaacaacttgaggtgcaaaggcatctacaactacgaattgaagcccaagggaaatatcttcaggcagttttggagcaggcacaagagacacttggaaaacagaatttgggccctgcaaacctggaagatgcaaaaataaaaatatcagagttagtttcacaagtatcaaatgaatgcttcagtaatgcaattacagatgtaaaagaaagttcaagtgtgcatagattagagcccatacaaattgagtttgttgaaagttcaacaaatagttatttgtctgttgctgaaggattcatcaaggagcacaaactacagcaccatggagtactaaaagcatatgatgatagttcattattttgcagaaaaagatctcatgaacatgagacacagtttgccctcaacagaagcctaagcgaacataggatggctcatttgcagaatgaggaaggataccataaagcagagtttgggtatgaaagtgacacagagatggcgcatgagtatactgcacctcaaaagaatggtagatgtagtaccaccagttcggcatccggaagcaaagtagatgcagagaagctatatctggaagaacaaaagtgtgcaagacaggcagttgaataccccagagaaagcaagctagtagattttgagcatccgtgttcagtgaacaaacttgatctgaacacccacaatgtcgatgacacaaatcaagcttacagacattttgacctgaatggcttcagctggggctgataatatgtaagatgatagaagtgaagaaatgaagttacaaataatttcttccaacattgatttcaccattgaagtatggatacatgatcaaatgtacgtcaagagggatacacaacgtcgatggggag

SEQ ID NO: 222369 - DNA, 978 bp, Zea Mays
ccgcgacgctccctatccatagcgcccgctcgcccatcagcccacgcggccacgccgaagtatggcgctctccgtctcctccctcgccgccgccctctcccacctctccctcccatcgacctccacccccaagcctcacccggccccgctcctgcgcctgcgctccacctaccgccgcgctgttagcctcgcgctccgcgcctccgcagccgaagccgccgaatcgttcgaggcggacctgcccgccgaggaggtgatggctgtcgaggaggaggcggaggaggatgcgctgtcgggaatcgcgctgcgaaagtatgtgaagcagcggctgccgggcgggttcgcggcgcagcggatcaccgccacgggccgtcgcaagacggccatcgcccgcgtcgtgctccaggagggcaccggcaaggagtatctgcagggaaatccaatgtggatggagtactgcaaggtacccttgatgactctagggtttgagaagaactatgacgtctttgtgaaagtacacgggggtggtctctcaggccaggcccaggcaatttgccttggtgttgcccgtgcgctggtgaaaatcagcaatgccaacagggttcctctgaagtcggaaggtttgctgacaagggacacccgtatcgttgaaaggaagaaggctggtctcaagaaggcacgcaagcggccccagttctcaaagcgttgaggacgttcacttgttgcattgccacttccagaggccctttttttttctgtcaactgctgtgcaaaatctgtaatggacacgatatatctgtagtgttattttcctgaagcaaatttcatgaggtggctatctgattctgctggtcaagtgtattctgcattggacgaacttatggccctatggccctgtttagcacaacttatttcacaactttttaaaagatttaaacggaagttgtataatgtttctgtaattacttatcagttcag

SEQ ID NO: 222370 - DNA, 5914 bp, Zea Mays
gttctcatggtcatgaccctgacctgcaaggacaagtcgagacgagacatcatctcttctctctccccatctctcgacccgacctcgctcgccgtctctgttgtgccctgcccctgtcccttttctctctccgcctccgccccacctcggatcgagtccaagccgccgagcccactccgctgacccagagcctggaaacccccaatcgagcccgaccggagcccgtcgattccgccggattcgagctcccgccgggtgaggcggtccgcccgaatcggccgattggactcgaattcgggtggtccggatgcgcgcagagcggaggctcgcggatctagggtttcggagggcctagggttagtgccggtgatctggtgatggtggtgcgacgcggcgccggagctcggcgaggaggagggttcggcggcgacgttggggaagatgcagcgagccggatatgcatgggtggcgcggcgctgaggggtgtgacgtcaggaggcggcgtctcgttcggctcatgtggccagcggcacgcgtagaggcagaagctccaccaccaccggcacaaggaccagctacttctccttctggttcatctgttcccccgtctcggacgacttctcttccgcccgaatcggcggcgcagcaggagtgcatcgatcttcctcgcccagtgtcacccggttcctttgtaaaggacggtcgtgaaattagagtaggggattgtgctctttttcgggctgtcggtgctcctccgttcattggattgatacgttggattgagaaaaaggaagaagcacatcccaaattacgtgttagttggctttatagacctaccgacgtgaagcttaacaaggatatacaactcagcgctgccccaaacgagatcttctactctttccaccaggacgaagcatctgctgtttctctactgcatccttgcaaagttgcctttttacgtaaaggtgttgaactaccagctggaatttcatcatttgtatgttggcgcgtgtacgatatagacaacaagtgcttatggtggcttactgacaaggactatattaatgaagaagtaaatcgacttctacacagaacaaggctagaaatgcgtgccgcattgcaatcaggtggacgctctccaaagcgtttaaatggtccatcagcttcccaacaactgaagactgcttcagttggtacgcaaaatggtggtttgtctaaaggaaagaagagagatagaagtgaacagggagttgatccagctaagcgggatcgggatcatctacttaaggttgacgagagtgagcctggaaactttaacttggatgatattaagtctgaaatatcaaagataacagaaaaaggtgggcttccaaatgcagaagcagttgaaaagcttgtacatcttatgcaacttgatcgaactgagcagaagatagaccttagtggtcgggttatacttgctgatgttattgcggctacagagagtcctgattgcctcggcagatttgtgcaatcaaggggccttcccgtgttggacagttggcttcaagaggcccacaaagggaagtctggtgatgggactagtcctaaagaagcagataagcctattgacgaacttctctcggccctgcttcgtgcattagctaaattgcctattaatctcagtgcattgcaaagttgtagcattgggaaatctgtcaatcatcttcgtagccataaaaatctggagattcagaagaaagctaagtgtcttgttgagaactggaagaagcgtgttgatgctgagatgaagtcaaatgatgtgaaacctttagtttcaggtcaatctgtttcctggtcaggaaaagcaggtttccaagaaatttcaaatgctggtaccaaacgaggtggttcaagtgagaacagtccaaaaaatccagtgcccactctttcatcatcaaaaattttgactgataagcctgggggcacagatgctgaagcgaagttgaaccctggggtatctgccttgtcaaattcacaacacgtgcaaccgacaaatgttactaccaatttgaaggatcagccctgcaaatcaactggtggaactggtcctgagctgcctactgtaaaagaggagaaaagcagcagttcaagccaatcaccgaacaacagccagtcaatatctagtgagccatcgaaggatgcaagaagttcaactgctgcttctggtggtgctagcaaaacttctgaaagttcttcacgaagccatcgaaaggcaaacaatggtcttgtttcagggaacctgaaggaagcttctgtaggaagatctgtctcccttgatcgatcattgctacaggacaagtcatctcaaactggaacagcttctgaaaaaggagttgatatgccacctgatcatggaaataatcatagattgattgttcgctttccaaatcctggtcgtagtcctgctaatagtgcaagtgctggatcttttgatggcccatctgtaactggggatagagcttcatctcctgtggttgcagataggcatgatcagactgagcgctgggtgaaagggaagactgaaaattctcggcctcatttagcatctgatgctaacacagagtcttggcacagcaacgacggagctgctggttcagaggaaggtgataaatcgccgtgtgctatattagatgatgacaacagcaggacacccgacgattctgttaaggatgcacatgcatcacgagttgcatgctcgtcacatatgaatgaaaaagatgtcagtgaaactaaggtgggaactctgttcagcccaatgaatgctcttattgaaatcaagtactctgaagctagtcattcacggcaagctggagatgacgcagctatgaatcttcttgctagtgtggcaggggaaatatctaaatctgaattggtttccccagtttcttcacccagaagttcttctgcaaagaaattggcccgtgagagtgacaacattggaaaggttaaagtagaaagtgacatgggcccatcacatccagggcaagcagatgctaagaaaggtgccatggggaaggaagtaaaaaatgatgcttgtttggtttcaatggatgaacaacgccaaactacgccatctcctgagctaccatattcaaaagcagttgtatcttcagctaagattgaaacccatgaagttgaagccaagattgcaaacaaatgcaactctcagcatgcttcaattgattccaaaggtgaaagtcaggatgcctgtactgcccatgggaatgttgaagatggcagtacagacaaggatggtgccatggaatctgcattgggcagccagtgtagcttggttgtttccagtagaaattcaagattggttcatgctggggaatctgcattgtctgctgctgacaaacaggcacagggtttgttaaaatcaactaatcataagcagcttctgagtgtatcggacaacccaggagcctttgatagacgtgacagtatggctggcaaattagatttgatggctgcagaggtgagaaaaactgatgtcctgggcaatagtagcatagtgcagaacgaggctgaaaagaaggaacatgcttcttcctttttgcctgatgttcccaaactagttgtagcagcagcatctccagttggtgtggcaaatgtgaataaggagattaaagaatcaaaagacagttcaagtgaatccaatagccatgtaaaatctgaaggtgtcaattctcatcaaagcgagcaaagtgcaaagcagagttcaaagaaatccagtgatggtgtgagtggaaaagaggacgaaaaagaagaccatgtcttatcagacgaaggttcttctctagccgctaacaccaagtcaaatgctacagccaagcttgatttcgacttgaatgaaggaatacctggagatgatgggcatcagtctgagccaactatctcgcctgttgtatgttcttcagcaatccatttaactgggattttgccattcacttcgcctattacaactgggttgcagccagcttcagttacagtagctgcaccagctaaaggaccctttgttcctccagaaaacctgctaagagcaaagccggagattgggtggaaaggttcagcagctacaagtgcatttcgtcctgccgaaccaaggaagattttggagatgcctgttgctgcacgcgacatttcagtttctcatgctgctggtaagcagtctcgtcccacgcttggttttgatttgaatgttgccgatgatcaagctcttgaggaagatatcccacagagttctgcacaaactacctgttctgaatctggaaatacgagaagtcgagatggctcttcacgaagcgctggtattgaatttgatctgaacagagctgatgaagttgcagataatggccaatttgtgccaagtgcttcgcacagagttgaagtgccattgttgtcaacaagatcgttacatggagttttctctaatgctggcctgaatagctcgagggactttgatcttaatagtggaccaggtcttgatgatgttggcactgaagctgcaccaaagagcctaccttctaaaaatacaagcagtattcaattcctaccacaagttcctgttaggatgaatagtgctgccatgagtaatatatcaccatggcttgcctctgccagcccttgtggtccagtagctatacaatcttttttaccaactagagaacagccatacccaattgaggcagcagctggggcccaaaggatcattgcgcctacagctgatgctggccaattcggaggtgatccctgcaggcctccagttgtttcaacgtctccagcgatggtttatcatccgcctgcatatcagtatccaggattcccttttcctcccagtgttcaccttcaaacaccggcattttcaattggatcagcaacatttaataattctgcatctccaggagttccatactttccaactgtctccccttcttttgttgggccagctggagcgttaactccccaacatttaaggcagtttgctataaaccttgctgagggtagcagcagcagtggacgagacagtaatcgtaaatgggaaagtcagggccttgatcttaactcaggccctggaagtatagatttagaaggaaaggatgaacgggtacctttaccagtcagacaaaatttgatcccacccccacacggctttgtggaggatcaaggaagaatctaccagatgccagttgtaggaacaaagagaaaggaacctgatggcagctgggactcagaaaggtctacatacaagcaattatcatggcaatgatggctctgaagatcattctgcaccggactggtctgcgacgagcatgtacctgcatgtagaacttgggcggtgtgttcttcagtcactgcactatacttgggggattggggattcagcccatgacgatgatgtgggatcgaggaaacgaaaacttgctgtaattgttgtagattttttccctagctgttaggcttttggttctaatttactcaggagggggtatggctgcggaggaggaatctttgtgattctgagctctggggctattgtaattagaccgtccgctctgtgtttgttggtgatatactattgatcacatgctgcagctttacattacataagaatttagatgtgaccttgttccttgctggggaagcgttacgtcagctgaccatatgaacactggtgcaacgaacagctcgagttgctacgccatgtatctttggattgcagtgcagctgtatgtataagaattctagcagatcagcaagctatatttttttgctgtttttttttgtccatctgcatctgatttagtcttgactcttgatgctctttctttaaactatttgtcggaagtgatgaccagcaggtacgaacagg

SEQ ID NO: 222371 - DNA, 5923 bp, Zea Mays
gttctcatggtcatgaccctgacctgcaaggacaagtcgagacgagacatcatctcttctctctccccatctctcgacccgacctcgctcgccgtctctgttgtgccctgcccctgtcccttttctctctccgcctccgccccacctcggatcgagtccaagccgccgagcccactccgctgacccagagcctggaaacccccaatcgagcccgaccggagcccgtcgattccgccggattcgagctcccgccgggtgaggcggtccgcccgaatcggccgattggactcgaattcgggtggtccggatgcgcgcagagcggaggctcgcggatctagggtttcggagggcctagggttagtgccggtgatctggtgatggtggtgcgacgcggcgccggagctcggcgaggaggagggttcggcggcgacgttggggaagatgcagcgagccggatatgcatgggtggcgcggcgctgaggggtgtgacgtcaggaggcggcgtctcgttcggctcatgtggccagcggcacgcgtagaggcagaagctccaccaccaccggcacaaggaccagctacttctccttctggttcatctgttcccccgtctcggacgacttctcttccgcccgaatcggcggcgcagcaggagtgcatcgatcttcctcgcccagtgtcacccggttcctttgtaaaggacggtcgtgaaattagagtaggggattgtgctctttttcgggctgtcggtgctcctccgttcattggattgatacgttggattgagaaaaaggaagaagcacatcccaaattacgtgttagttggctttatagacctaccgacgtgaagcttaacaaggatatacaactcagcgctgccccaaacgagatcttctactctttccaccaggacgaagcatctgctgtttctctactgcatccttgcaaagttgcctttttacgtaaaggtgttgaactaccagctggaatttcatcatttgtatgttggcgcgtgtacgatatagacaacaagtgcttatggtggcttactgacaaggactatattaataaacggcaggaagaagtaaatcgacttctacacagaacaaggctagaaatgcgtgccgcattgcaatcaggtggacgctctccaaagcgtttaaatggtccatcagcttcccaacaactgaagactgcttcagttggtacgcaaaatggtggtttgtctaaaggaaagaagagagatagaagtgaacagggagttgatccagctaagcgggatcgggatcatctacttaaggttgacgagagtgagcctggaaactttaacttggatgatattaagtctgaaatatcaaagataacagaaaaaggtgggcttccaaatgcagaagcagttgaaaagcttgtacatcttatgcaacttgatcgaactgagcagaagatagaccttagtggtcgggttatacttgctgatgttattgcggctacagagagtcctgattgcctcggcagatttgtgcaatcaaggggccttcccgtgttggacagttggcttcaagaggcccacaaagggaagtctggtgatgggactagtcctaaagaagcagataagcctattgacgaacttctctcggccctgcttcgtgcattagctaaattgcctattaatctcagtgcattgcaaagttgtagcattgggaaatctgtcaatcatcttcgtagccataaaaatctggagattcagaagaaagctaagtgtcttgttgagaactggaagaagcgtgttgatgctgagatgaagtcaaatgatgtgaaacctttagtttcaggtcaatctgtttcctggtcaggaaaagcaggtttccaagaaatttcaaatgctggtaccaaacgaggtggttcaagtgagaacagtccaaaaaatccagtgcccactctttcatcatcaaaaattttgactgataagcctgggggcacagatgctgaagcgaagttgaaccctggggtatctgccttgtcaaattcacaacacgtgcaaccgacaaatgttactaccaatttgaaggatcagccctgcaaatcaactggtggaactggtcctgagctgcctactgtaaaagaggagaaaagcagcagttcaagccaatcaccgaacaacagccagtcaatatctagtgagccatcgaaggatgcaagaagttcaactgctgcttctggtggtgctagcaaaacttctgaaagttcttcacgaagccatcgaaaggcaaacaatggtcttgtttcagggaacctgaaggaagcttctgtaggaagatctgtctcccttgatcgatcattgctacaggacaagtcatctcaaactggaacagcttctgaaaaaggagttgatatgccacctgatcatggaaataatcatagattgattgttcgctttccaaatcctggtcgtagtcctgctaatagtgcaagtgctggatcttttgatggcccatctgtaactggggatagagcttcatctcctgtggttgcagataggcatgatcagactgagcgctgggtgaaagggaagactgaaaattctcggcctcatttagcatctgatgctaacacagagtcttggcacagcaacgacggagctgctggttcagaggaaggtgataaatcgccgtgtgctatattagatgatgacaacagcaggacacccgacgattctgttaaggatgcacatgcatcacgagttgcatgctcgtcacatatgaatgaaaaagatgtcagtgaaactaaggtgggaactctgttcagcccaatgaatgctcttattgaaatcaagtactctgaagctagtcattcacggcaagctggagatgacgcagctatgaatcttcttgctagtgtggcaggggaaatatctaaatctgaattggtttccccagtttcttcacccagaagttcttctgcaaagaaattggcccgtgagagtgacaacattggaaaggttaaagtagaaagtgacatgggcccatcacatccagggcaagcagatgctaagaaaggtgccatggggaaggaagtaaaaaatgatgcttgtttggtttcaatggatgaacaacgccaaactacgccatctcctgagctaccatattcaaaagcagttgtatcttcagctaagattgaaacccatgaagttgaagccaagattgcaaacaaatgcaactctcagcatgcttcaattgattccaaaggtgaaagtcaggatgcctgtactgcccatgggaatgttgaagatggcagtacagacaaggatggtgccatggaatctgcattgggcagccagtgtagcttggttgtttccagtagaaattcaagattggttcatgctggggaatctgcattgtctgctgctgacaaacaggcacagggtttgttaaaatcaactaatcataagcagcttctgagtgtatcggacaacccaggagcctttgatagacgtgacagtatggctggcaaattagatttgatggctgcagaggtgagaaaaactgatgtcctgggcaatagtagcatagtgcagaacgaggctgaaaagaaggaacatgcttcttcctttttgcctgatgttcccaaactagttgtagcagcagcatctccagttggtgtggcaaatgtgaataaggagattaaagaatcaaaagacagttcaagtgaatccaatagccatgtaaaatctgaaggtgtcaattctcatcaaagcgagcaaagtgcaaagcagagttcaaagaaatccagtgatggtgtgagtggaaaagaggacgaaaaagaagaccatgtcttatcagacgaaggttcttctctagccgctaacaccaagtcaaatgctacagccaagcttgatttcgacttgaatgaaggaatacctggagatgatgggcatcagtctgagccaactatctcgcctgttgtatgttcttcagcaatccatttaactgggattttgccattcacttcgcctattacaactgggttgcagccagcttcagttacagtagctgcaccagctaaaggaccctttgttcctccagaaaacctgctaagagcaaagccggagattgggtggaaaggttcagcagctacaagtgcatttcgtcctgccgaaccaaggaagattttggagatgcctgttgctgcacgcgacatttcagtttctcatgctgctggtaagcagtctcgtcccacgcttggttttgatttgaatgttgccgatgatcaagctcttgaggaagatatcccacagagttctgcacaaactacctgttctgaatctggaaatacgagaagtcgagatggctcttcacgaagcgctggtattgaatttgatctgaacagagctgatgaagttgcagataatggccaatttgtgccaagtgcttcgcacagagttgaagtgccattgttgtcaacaagatcgttacatggagttttctctaatgctggcctgaatagctcgagggactttgatcttaatagtggaccaggtcttgatgatgttggcactgaagctgcaccaaagagcctaccttctaaaaatacaagcagtattcaattcctaccacaagttcctgttaggatgaatagtgctgccatgagtaatatatcaccatggcttgcctctgccagcccttgtggtccagtagctatacaatcttttttaccaactagagaacagccatacccaattgaggcagcagctggggcccaaaggatcattgcgcctacagctgatgctggccaattcggaggtgatccctgcaggcctccagttgtttcaacgtctccagcgatggtttatcatccgcctgcatatcagtatccaggattcccttttcctcccagtgttcaccttcaaacaccggcattttcaattggatcagcaacatttaataattctgcatctccaggagttccatactttccaactgtctccccttcttttgttgggccagctggagcgttaactccccaacatttaaggcagtttgctataaaccttgctgagggtagcagcagcagtggacgagacagtaatcgtaaatgggaaagtcagggccttgatcttaactcaggccctggaagtatagatttagaaggaaaggatgaacgggtacctttaccagtcagacaaaatttgatcccacccccacacggctttgtggaggatcaaggaagaatctaccagatgccagttgtaggaacaaagagaaaggaacctgatggcagctgggactcagaaaggtctacatacaagcaattatcatggcaatgatggctctgaagatcattctgcaccggactggtctgcgacgagcaggtacctgcatgtagaacttgggcggtgtgttcttcagtcactgcactatacttgggggattggggattcagcccatgacgatgatgtgggatcgaggaaacgaaaacttgctgtaattgttgtagattttttccctagctgttaggcttttggttctaatttactcaggagggggtatggctgcggaggaggaatctttgtgattctgagctctggggctattgtaattagaccgtccgctctgtgtttgttggtgatatactattgatcacatgctgcagctttacattacataagaatttagatgtgaccttgttccttgctggggaagcgttacgtcagctgaccatatgaacactggtgcaacgaacagctcgagttgctacgccatgtatctttggattgcagtgcagctgtatgtataagaattctagcagatcagcaagctatatttttttgctgtttttttttgtccatctgcatctgatttagtcttgactcttgatgctctttctttaaactatttgtcggaagtgatgaccagcaggtacgaacagg

SEQ ID NO: 222372 - DNA, 5816 bp, Zea Mays
gttctcatggtcatgaccctgacctgcaaggacaagtcgagacgagacatcatctcttctctctccccatctctcgacccgacctcgctcgccgtctctgttgtgccctgcccctgtcccttttctctctccgcctccgccccacctcggatcgagtccaagccgccgagcccactccgctgacccagagcctggaaacccccaatcgagcccgaccggagcccgtcgattccgccggattcgagctcccgccgggtgaggcggtccgcccgaatcggccgattggactcgaattcgggtggtccggatgcgcgcagagcggaggctcgcggatctagggtttcggagggcctagggttagtgccggtgatctggtgatggtggtgcgacgcggcgccggagctcggcgaggaggagggttcggcggcgacgttggggaagatgcagcgagccggatatgcatgggtggcgcggcgctgagggctgtatttttactttctgcaaatgatgcaaggcagaccttgcttgtgccggtgttcatttcaataacacagttgcccgctgcttgtttgattgctaacataacgagcactgtgactgacggtcgtgaaattagagtaggggattgtgctctttttcgggctgtcggtgctcctccgttcattggattgatacgttggattgagaaaaaggaagaagcacatcccaaattacgtgttagttggctttatagacctaccgacgtgaagcttaacaaggatatacaactcagcgctgccccaaacgagatcttctactctttccaccaggacgaagcatctgctgtttctctactgcatccttgcaaagttgcctttttacgtaaaggtgttgaactaccagctggaatttcatcatttgtatgttggcgcgtgtacgatatagacaacaagtgcttatggtggcttactgacaaggactatattaatgaagaagtaaatcgacttctacacagaacaaggctagaaatgcgtgccgcattgcaatcaggtggacgctctccaaagcgtttaaatggtccatcagcttcccaacaactgaagactgcttcagttggtacgcaaaatggtggtttgtctaaaggaaagaagagagatagaagtgaacagggagttgatccagctaagcgggatcgggatcatctacttaaggttgacgagagtgagcctggaaactttaacttggatgatattaagtctgaaatatcaaagataacagaaaaaggtgggcttccaaatgcagaagcagttgaaaagcttgtacatcttatgcaacttgatcgaactgagcagaagatagaccttagtggtcgggttatacttgctgatgttattgcggctacagagagtcctgattgcctcggcagatttgtgcaatcaaggggccttcccgtgttggacagttggcttcaagaggcccacaaagggaagtctggtgatgggactagtcctaaagaagcagataagcctattgacgaacttctctcggccctgcttcgtgcattagctaaattgcctattaatctcagtgcattgcaaagttgtagcattgggaaatctgtcaatcatcttcgtagccataaaaatctggagattcagaagaaagctaagtgtcttgttgagaactggaagaagcgtgttgatgctgagatgaagtcaaatgatgtgaaacctttagtttcaggtcaatctgtttcctggtcaggaaaagcaggtttccaagaaatttcaaatgctggtaccaaacgaggtggttcaagtgagaacagtccaaaaaatccagtgcccactctttcatcatcaaaaattttgactgataagcctgggggcacagatgctgaagcgaagttgaaccctggggtatctgccttgtcaaattcacaacacgtgcaaccgacaaatgttactaccaatttgaaggatcagccctgcaaatcaactggtggaactggtcctgagctgcctactgtaaaagaggagaaaagcagcagttcaagccaatcaccgaacaacagccagtcaatatctagtgagccatcgaaggatgcaagaagttcaactgctgcttctggtggtgctagcaaaacttctgaaagttcttcacgaagccatcgaaaggcaaacaatggtcttgtttcagggaacctgaaggaagcttctgtaggaagatctgtctcccttgatcgatcattgctacaggacaagtcatctcaaactggaacagcttctgaaaaaggagttgatatgccacctgatcatggaaataatcatagattgattgttcgctttccaaatcctggtcgtagtcctgctaatagtgcaagtgctggatcttttgatggcccatctgtaactggggatagagcttcatctcctgtggttgcagataggcatgatcagactgagcgctgggtgaaagggaagactgaaaattctcggcctcatttagcatctgatgctaacacagagtcttggcacagcaacgacggagctgctggttcagaggaaggtgataaatcgccgtgtgctatattagatgatgacaacagcaggacacccgacgattctgttaaggatgcacatgcatcacgagttgcatgctcgtcacatatgaatgaaaaagatgtcagtgaaactaaggtgggaactctgttcagcccaatgaatgctcttattgaaatcaagtactctgaagctagtcattcacggcaagctggagatgacgcagctatgaatcttcttgctagtgtggcaggggaaatatctaaatctgaattggtttccccagtttcttcacccagaagttcttctgcaaagaaattggcccgtgagagtgacaacattggaaaggttaaagtagaaagtgacatgggcccatcacatccagggcaagcagatgctaagaaaggtgccatggggaaggaagtaaaaaatgatgcttgtttggtttcaatggatgaacaacgccaaactacgccatctcctgagctaccatattcaaaagcagttgtatcttcagctaagattgaaacccatgaagttgaagccaagattgcaaacaaatgcaactctcagcatgcttcaattgattccaaaggtgaaagtcaggatgcctgtactgcccatgggaatgttgaagatggcagtacagacaaggatggtgccatggaatctgcattgggcagccagtgtagcttggttgtttccagtagaaattcaagattggttcatgctggggaatctgcattgtctgctgctgacaaacaggcacagggtttgttaaaatcaactaatcataagcagcttctgagtgtatcggacaacccaggagcctttgatagacgtgacagtatggctggcaaattagatttgatggctgcagaggtgagaaaaactgatgtcctgggcaatagtagcatagtgcagaacgaggctgaaaagaaggaacatgcttcttcctttttgcctgatgttcccaaactagttgtagcagcagcatctccagttggtgtggcaaatgtgaataaggagattaaagaatcaaaagacagttcaagtgaatccaatagccatgtaaaatctgaaggtgtcaattctcatcaaagcgagcaaagtgcaaagcagagttcaaagaaatccagtgatggtgtgagtggaaaagaggacgaaaaagaagaccatgtcttatcagacgaaggttcttctctagccgctaacaccaagtcaaatgctacagccaagcttgatttcgacttgaatgaaggaatacctggagatgatgggcatcagtctgagccaactatctcgcctgttgtatgttcttcagcaatccatttaactgggattttgccattcacttcgcctattacaactgggttgcagccagcttcagttacagtagctgcaccagctaaaggaccctttgttcctccagaaaacctgctaagagcaaagccggagattgggtggaaaggttcagcagctacaagtgcatttcgtcctgccgaaccaaggaagattttggagatgcctgttgctgcacgcgacatttcagtttctcatgctgctggtaagcagtctcgtcccacgcttggttttgatttgaatgttgccgatgatcaagctcttgaggaagatatcccacagagttctgcacaaactacctgttctgaatctggaaatacgagaagtcgagatggctcttcacgaagcgctggtattgaatttgatctgaacagagctgatgaagttgcagataatggccaatttgtgccaagtgcttcgcacagagttgaagtgccattgttgtcaacaagatcgttacatggagttttctctaatgctggcctgaatagctcgagggactttgatcttaatagtggaccaggtcttgatgatgttggcactgaagctgcaccaaagagcctaccttctaaaaatacaagcagtattcaattcctaccacaagttcctgttaggatgaatagtgctgccatgagtaatatatcaccatggcttgcctctgccagcccttgtggtccagtagctatacaatcttttttaccaactagagaacagccatacccaattgaggcagcagctggggcccaaaggatcattgcgcctacagctgatgctggccaattcggaggtgatccctgcaggcctccagttgtttcaacgtctccagcgatggtttatcatccgcctgcatatcagtatccaggattcccttttcctcccagtgttcaccttcaaacaccggcattttcaattggatcagcaacatttaataattctgcatctccaggagttccatactttccaactgtctccccttcttttgttgggccagctggagcgttaactccccaacatttaaggcagtttgctataaaccttgctgagggtagcagcagcagtggacgagacagtaatcgtaaatgggaaagtcagggccttgatcttaactcaggccctggaagtatagatttagaaggaaaggatgaacgggtacctttaccagtcagacaaaatttgatcccacccccacacggctttgtggaggatcaaggaagaatctaccagatgccagttgtaggaacaaagagaaaggaacctgatggcagctgggactcagaaaggtctacatacaagcaattatcatggcaatgatggctctgaagatcattctgcaccggactggtctgcgacgagcatgtacctgcatgtagaacttgggcggtgtgttcttcagtcactgcactatacttgggggattggggattcagcccatgacgatgatgtgggatcgaggaaacgaaaacttgctgtaattgttgtagattttttccctagctgttaggcttttggttctaatttactcaggagggggtatggctgcggaggaggaatctttgtgattctgagctctggggctattgtaattagaccgtccgctctgtgtttgttggtgatatactattgatcacatgctgcagctttacattacataagaatttagatgtgaccttgttccttgctggggaagcgttacgtcagctgaccatatgaacactggtgcaacgaacagctcgagttgctacgccatgtatctttggattgcagtgcagctgtatgtataagaattctagcagatcagcaagctatatttttttgctgtttttttttgtccatctgcatctgatttagtcttgactcttgatgctctttctttaaactatttgtcggaagtgatgaccagcaggtacgaacagg

SEQ ID NO: 222373 - DNA, 5908 bp, Zea Mays
gttctcatggtcatgaccctgacctgcaaggacaagtcgagacgagacatcatctcttctctctccccatctctcgacccgacctcgctcgccgtctctgttgtgccctgcccctgtcccttttctctctccgcctccgccccacctcggatcgagtccaagccgccgagcccactccgctgacccagagcctggaaacccccaatcgagcccgaccggagcccgtcgattccgccggattcgagctcccgccgggtgaggcggtccgcccgaatcggccgattggactcgaattcgggtggtccggatgcgcgcagagcggaggctcgcggatctagggtttcggagggcctagggttagtgccggtgatctggtgatggtggtgcgacgcggcgccggagctcggcgaggaggagggttcggcggcgacgttggggaagatgcagcgagccggatatgcatgggtggcgcggcgctgaggggtgtgacgtcaggaggcggcgtctcgttcggctcatgtggccagcggcacgcgtagaggcagaagctccaccaccaccggcacaaggaccagctacttctccttctggttcatctgttcccccgtctcggacgacttctcttccgcccgaatcggcggcgcagcaggagtgcatcgatcttcctcgcccagtgtcacccggttcctttgtaaaggacggtcgtgaaattagagtaggggattgtgctctttttcgggctgtcggtgctcctccgttcattggattgatacgttggattgagaaaaaggaagaagcacatcccaaattacgtgttagttggctttatagacctaccgacgtgaagcttaacaaggatatacaactcagcgctgccccaaacgagatcttctactctttccaccaggacgaagcatctgctgtttctctactgcatccttgcaaagttgcctttttacgtaaaggtgttgaactaccagctggaatttcatcatttgtatgttggcgcgtgtacgatatagacaacaagtgcttatggtggcttactgacaaggactatattaataaacggcaggaagaagtaaatcgacttctacacagaacaaggctagaaatgcgtgccgcattgcaatcaggtggacgctctccaaagcgtttaaatggtccatcagcttcccaacaactgaagactgcttcagttggtacgcaaaatggtggtttgtctaaaggaaagaagagagatagaagtgaacagggagttgatccagctaagcgggatcgggatcatctacttaaggttgacgagagtgagcctggaaactttaacttggatgatattaagtctgaaatatcaaagataacagaaaaaggtgggcttccaaatgcagaagcagttgaaaagcttgtacatcttatgcaacttgatcgaactgagcagaagatagaccttagtggtcgggttatacttgctgatgttattgcggctacagagagtcctgattgcctcggcagatttgtgcaatcaaggggccttcccgtgttggacagttggcttcaagaggcccacaaagggaagtctggtgatgggactagtcctaaagaagcagataagcctattgacgaacttctctcggccctgcttcgtgcattagctaaattgcctattaatctcagtgcattgcaaagttgtagcattgggaaatctgtcaatcatcttcgtagccataaaaatctggagattcagaagaaagctaagtgtcttgttgagaactggaagaagcgtgttgatgctgagatgaagtcaaatgatgtgaaacctttagtttcaggtcaatctgtttcctggtcaggaaaagcaggtttccaagaaatttcaaatgctggtaccaaacgaggtggttcaagtgagaacagtccaaaaaatccagtgcccactctttcatcatcaaaaattttgactgataagcctgggggcacagatgctgaagcgaagttgaaccctggggtatctgccttgtcaaattcacaacacgtgcaaccgacaaatgttactaccaatttgaaggatcagccctgcaaatcaactggtggaactggtcctgagctgcctactgtaaaagaggagaaaagcagcagttcaagccaatcaccgaacaacagccagtcaatatctagtgagccatcgaaggatgcaagaagttcaactgctgcttctggtggtgctagcaaaacttctgaaagttcttcacgaagccatcgaaaggcaaacaatggtcttgtttcagggaacctgaaggaagcttctgtaggaagatctgtctcccttgatcgatcattgctacaggacaagtcatctcaaactggaacagcttctgaaaaaggagttgatatgccacctgatcatggaaataatcatagattgattgttcgctttccaaatcctggtcgtagtcctgctaatagtgcaagtgctggatcttttgatggcccatctgtaactggggatagagcttcatctcctgtggttgcagataggcatgatcagactgagcgctgggtgaaagggaagactgaaaattctcggcctcatttagcatctgatgctaacacagagtcttggcacagcaacgacggagctgctggttcagaggaaggtgataaatcgccgtgtgctatattagatgatgacaacagcaggacacccgacgattctgttaaggatgcacatgcatcacgagttgcatgctcgtcacatatgaatgaaaaagatgtcagtgaaactaaggtgggaactctgttcagcccaatgaatgctcttattgaaatcaagtactctgaagctagtcattcacggcaagctggagatgacgcagctatgaatcttcttgctagtgtggcaggggaaatatctaaatctgaattggtttccccagtttcttcacccagaagttcttctgcaaagaaattggcccgtgagagtgacaacattggaaaggttaaagtagaaagtgacatgggcccatcacatccagggcaagcagatgctaagaaaggtgccatggggaaggaagtaaaaaatgatgcttgtttggtttcaatggatgaacaacgccaaactacgccatctcctgagctaccatattcaaaagcagttgtatcttcagctaagattgaaacccatgaagttgaagccaagattgcaaacaaatgcaactctcagcatgcttcaattgattccaaaggtgaaagtcaggatgcctgtactgcccatgggaatgttgaagatggcagtacagacaaggatggtgccatggaatctgcattgggcagccagtgtagcttggttgtttccagtagaaattcaagattggttcatgctggggaatctgcattgtctgctgctgacaaacaggcacagggtttgttaaaatcaactaatcataagcagcttctgagtgtatcggacaacccaggagcctttgatagacgtgacagtatggctggcaaattagatttgatggctgcagaggtgagaaaaactgatgtcctgggcaatagtagcatagtgcagaacgaggctgaaaagaaggaacatgcttcttcctttttgcctgatgttcccaaactagttgtagcagcagcatctccagttggtgtggcaaatgtgaataaggagattaaagaatcaaaagacagttcaagtgaatccaatagccatgtaaaatctgaaggtgtcaattctcatcaaagcgagcaaagtgcaaagcagagttcaaagaaatccagtgatggtgtgagtggaaaagaggacgaaaaagaagaccatgtcttatcagacgaaggttcttctctagccgctaacaccaagtcaaatgctacagccaagcttgatttcgacttgaatgaaggaatacctggagatgatgggcatcagtctgagccaactatctcgcctgttgtatgttcttcagcaatccatttaactgggattttgccattcacttcgcctattacaactgggttgcagccagcttcagttacagtagctgcaccagctaaaggaccctttgttcctccagaaaacctgctaagagcaaagccggagattgggtggaaaggttcagcagctacaagtgcatttcgtcctgccgaaccaaggaagattttggagatgcctgttgctgcacgcgacatttcagtttctcatgctgctggtaagcagtctcgtcccacgcttggttttgatttgaatgttgccgatgatcaagctcttgaggaagatatcccacagagttctgcacaaactacctgttctgaatctggaaatacgagaagtcgagatggctcttcacgaagcgctggtattgaatttgatctgaacagagctgatgaagttgcagataatggccaatttgtgccaagtgcttcgcacagagttgaagtgccattgttgtcaacaagatcgttacatggagttttctctaatgctggcctgaatagctcgagggactttgatcttaatagtggaccaggtcttgatgatgttggcactgaagctgcaccaaagagcctaccttctaaaaatacaagcagtattcaattcctaccacaagttcctgttaggatgaatagtgctgccatgagtaatatatcaccatggcttgcctctgccagcccttgtggtccagtagctatacaatcttttttaccaactagagaacagccatacccaattgaggcagcagctggggcccaaaggatcattgcgcctacagctgatgctggccaattcggaggtgatccctgcaggcctccagttgtttcaacgtctccagcgatggtttatcatccgcctgcatatcagtatccaggattcccttttcctcccagtgttcaccttcaaacaccggcattttcaattggatcagcaacatttaataattctgcatctccaggagttccatactttccaactgtctccccttcttttgttgggccagctggagcgttaactccccaacatttaaggcagtttgctataaaccttgctgagggtagcagcagcagtggacgagacagtaatcgtaaatgggaaagtcagggccttgatcttaactcaggccctggaagtatagatttagaaggaaaggatgaacgggtacctttaccagtcagacaaaatttgatcccacccccacacggctttgtggaggatcaaggaagaatctaccagatgccagttgtaggaacaaagagaaaggaacctgatggcagctgggactcagaaaggtctacatacaagcaattatcatggcaatgatggctctgaagatcattctgcaccggactggtacctgcatgtagaacttgggcggtgtgttcttcagtcactgcactatacttgggggattggggattcagcccatgacgatgatgtgggatcgaggaaacgaaaacttgctgtaattgttgtagattttttccctagctgttaggcttttggttctaatttactcaggagggggtatggctgcggaggaggaatctttgtgattctgagctctggggctattgtaattagaccgtccgctctgtgtttgttggtgatatactattgatcacatgctgcagctttacattacataagaatttagatgtgaccttgttccttgctggggaagcgttacgtcagctgaccatatgaacactggtgcaacgaacagctcgagttgctacgccatgtatctttggattgcagtgcagctgtatgtataagaattctagcagatcagcaagctatatttttttgctgtttttttttgtccatctgcatctgatttagtcttgactcttgatgctctttctttaaactatttgtcggaagtgatgaccagcaggtacgaacagg

SEQ ID NO: 222374 - DNA, 5930 bp, Zea Mays
ctgcattgttctcatggtcatgaccctgacctgcaaggacaagtcgagacgagacatcatctcttctctctccccatctctcgacccgacctcgctcgccgtctctgttgtgccctgcccctgtcccttttctctctccgcctccgccccacctcggatcgagtccaagccgccgagcccactccgctgacccagagcctggaaacccccaatcgagcccgaccggagcccgtcgattccgccggattcgagctcccgccgggtgaggcggtccgcccgaatcggccgattggactcgaattcgggtggtccggatgcgcgcagagcggaggctcgcggatctagggtttcggagggcctagggttagtgccggtgatctggtgatggtggtgcgacgcggcgccggagctcggcgaggaggagggttcggcggcgacgttggggaagatgcagcgagccggatatgcatgggtggcgcggcgctgaggggtgtgacgtcaggaggcggcgtctcgttcggctcatgtggccagcggcacgcgtagaggcagaagctccaccaccaccggcacaaggaccagctacttctccttctggttcatctgttcccccgtctcggacgacttctcttccgcccgaatcggcggcgcagcaggagtgcatcgatcttcctcgcccagtgtcacccggttcctttgtaaaggacggtcgtgaaattagagtaggggattgtgctctttttcgggctgtcggtgctcctccgttcattggattgatacgttggattgagaaaaaggaagaagcacatcccaaattacgtgttagttggctttatagacctaccgacgtgaagcttaacaaggatatacaactcagcgctgccccaaacgagatcttctactctttccaccaggacgaagcatctgctgtttctctactgcatccttgcaaagttgcctttttacgtaaaggtgttgaactaccagctggaatttcatcatttgtatgttggcgcgtgtacgatatagacaacaagtgcttatggtggcttactgacaaggactatattaataaacggcaggaagaagtaaatcgacttctacacagaacaaggctagaaatgcgtgccgcattgcaatcaggtggacgctctccaaagcgtttaaatggtccatcagcttcccaacaactgaagactgcttcagttggtacgcaaaatggtggtttgtctaaaggaaagaagagagatagaagtgaacagggagttgatccagctaagcgggatcgggatcatctacttaaggttgacgagagtgagcctggaaactttaacttggatgatattaagtctgaaatatcaaagataacagaaaaaggtgggcttccaaatgcagaagcagttgaaaagcttgtacatcttatgcaacttgatcgaactgagcagaagatagaccttagtggtcgggttatacttgctgatgttattgcggctacagagagtcctgattgcctcggcagatttgtgcaatcaaggggccttcccgtgttggacagttggcttcaagaggcccacaaagggaagtctggtgatgggactagtcctaaagaagcagataagcctattgacgaacttctctcggccctgcttcgtgcattagctaaattgcctattaatctcagtgcattgcaaagttgtagcattgggaaatctgtcaatcatcttcgtagccataaaaatctggagattcagaagaaagctaagtgtcttgttgagaactggaagaagcgtgttgatgctgagatgaagtcaaatgatgtgaaacctttagtttcaggtcaatctgtttcctggtcaggaaaagcaggtttccaagaaatttcaaatgctggtaccaaacgaggtggttcaagtgagaacagtccaaaaaatccagtgcccactctttcatcatcaaaaattttgactgataagcctgggggcacagatgctgaagcgaagttgaaccctggggtatctgccttgtcaaattcacaacacgtgcaaccgacaaatgttactaccaatttgaaggatcagccctgcaaatcaactggtggaactggtcctgagctgcctactgtaaaagaggagaaaagcagcagttcaagccaatcaccgaacaacagccagtcaatatctagtgagccatcgaaggatgcaagaagttcaactgctgcttctggtggtgctagcaaaacttctgaaagttcttcacgaagccatcgaaaggcaaacaatggtcttgtttcagggaacctgaaggaagcttctgtaggaagatctgtctcccttgatcgatcattgctacaggacaagtcatctcaaactggaacagcttctgaaaaaggagttgatatgccacctgatcatggaaataatcatagattgattgttcgctttccaaatcctggtcgtagtcctgctaatagtgcaagtgctggatcttttgatggcccatctgtaactggggatagagcttcatctcctgtggttgcagataggcatgatcagactgagcgctgggtgaaagggaagactgaaaattctcggcctcatttagcatctgatgctaacacagagtcttggcacagcaacgacggagctgctggttcagaggaaggtgataaatcgccgtgtgctatattagatgatgacaacagcaggacacccgacgattctgttaaggatgcacatgcatcacgagttgcatgctcgtcacatatgaatgaaaaagatgtcagtgaaactaaggtgggaactctgttcagcccaatgaatgctcttattgaaatcaagtactctgaagctagtcattcacggcaagctggagatgacgcagctatgaatcttcttgctagtgtggcaggggaaatatctaaatctgaattggtttccccagtttcttcacccagaagttcttctgcaaagaaattggcccgtgagagtgacaacattggaaaggttaaagtagaaagtgacatgggcccatcacatccagggcaagcagatgctaagaaaggtgccatggggaaggaagtaaaaaatgatgcttgtttggtttcaatggatgaacaacgccaaactacgccatctcctgagctaccatattcaaaagcagttgtatcttcagctaagattgaaacccatgaagttgaagccaagattgcaaacaaatgcaactctcagcatgcttcaattgattccaaaggtgaaagtcaggatgcctgtactgcccatgggaatgttgaagatggcagtacagacaaggatggtgccatggaatctgcattgggcagccagtgtagcttggttgtttccagtagaaattcaagattggttcatgctggggaatctgcattgtctgctgctgacaaacaggcacagggtttgttaaaatcaactaatcataagcagcttctgagtgtatcggacaacccaggagcctttgatagacgtgacagtatggctggcaaattagatttgatggctgcagaggtgagaaaaactgatgtcctgggcaatagtagcatagtgcagaacgaggctgaaaagaaggaacatgcttcttcctttttgcctgatgttcccaaactagttgtagcagcagcatctccagttggtgtggcaaatgtgaataaggagattaaagaatcaaaagacagttcaagtgaatccaatagccatgtaaaatctgaaggtgtcaattctcatcaaagcgagcaaagtgcaaagcagagttcaaagaaatccagtgatggtgtgagtggaaaagaggacgaaaaagaagaccatgtcttatcagacgaaggttcttctctagccgctaacaccaagtcaaatgctacagccaagcttgatttcgacttgaatgaaggaatacctggagatgatgggcatcagtctgagccaactatctcgcctgttgtatgttcttcagcaatccatttaactgggattttgccattcacttcgcctattacaactgggttgcagccagcttcagttacagtagctgcaccagctaaaggaccctttgttcctccagaaaacctgctaagagcaaagccggagattgggtggaaaggttcagcagctacaagtgcatttcgtcctgccgaaccaaggaagattttggagatgcctgttgctgcacgcgacatttcagtttctcatgctgctggtaagcagtctcgtcccacgcttggttttgatttgaatgttgccgatgatcaagctcttgaggaagatatcccacagagttctgcacaaactacctgttctgaatctggaaatacgagaagtcgagatggctcttcacgaagcgctggtattgaatttgatctgaacagagctgatgaagttgcagataatggccaatttgtgccaagtgcttcgcacagagttgaagtgccattgttgtcaacaagatcgttacatggagttttctctaatgctggcctgaatagctcgagggactttgatcttaatagtggaccaggtcttgatgatgttggcactgaagctgcaccaaagagcctaccttctaaaaatacaagcagtattcaattcctaccacaagttcctgttaggatgaatagtgctgccatgagtaatatatcaccatggcttgcctctgccagcccttgtggtccagtagctatacaatcttttttaccaactagagaacagccatacccaattgaggcagcagctggggcccaaaggatcattgcgcctacagctgatgctggccaattcggaggtgatccctgcaggcctccagttgtttcaacgtctccagcgatggtttatcatccgcctgcatatcagtatccaggattcccttttcctcccagtgttcaccttcaaacaccggcattttcaattggatcagcaacatttaataattctgcatctccaggagttccatactttccaactgtctccccttcttttgttgggccagctggagcgttaactccccaacatttaaggcagtttgctataaaccttgctgagggtagcagcagcagtggacgagacagtaatcgtaaatgggaaagtcagggccttgatcttaactcaggccctggaagtatagatttagaaggaaaggatgaacgggtacctttaccagtcagacaaaatttgatcccacccccacacggctttgtggaggatcaaggaagaatctaccagatgccagttgtaggaacaaagagaaaggaacctgatggcagctgggactcagaaaggtctacatacaagcaattatcatggcaatgatggctctgaagatcattctgcaccggactggtctgcgacgagcatgtacctgcatgtagaacttgggcggtgtgttcttcagtcactgcactatacttgggggattggggattcagcccatgacgatgatgtgggatcgaggaaacgaaaacttgctgtaattgttgtagattttttccctagctgttaggcttttggttctaatttactcaggagggggtatggctgcggaggaggaatctttgtgattctgagctctggggctattgtaattagaccgtccgctctgtgtttgttggtgatatactattgatcacatgctgcagctttacattacataagaatttagatgtgaccttgttccttgctggggaagcgttacgtcagctgaccatatgaacactggtgcaacgaacagctcgagttgctacgccatgtatctttggattgcagtgcagctgtatgtataagaattctagcagatcagcaagctatatttttttgctgtttttttttgtccatctgcatctgatttagtcttgactcttgatgctctttctttaaactatttgtcggaagtgatgaccagcaggtacgaacagg

SEQ ID NO: 222375 - DNA, 5944 bp, Zea Mays
cttgactttcgcatcgtgtggagtgcactggcttcacatgaacggcgtcgccgcgcaggcacagaaggtcccctgcggctgcggtcactgtgcatggtcgaatttgcccatcctgcattgttctcatggtcatgaccctgacctgcaaggacaagtcgagacgagacatcatctcttctctctccccatctctcgacccgacctcgctcgccgtctctgttgtgccctgcccctgtcccttttctctctccgcctccgccccacctcggatcgagtccaagccgccgagcccactccgctgacccagagcctggaaacccccaatcgagcccgaccggagcccgtcgattccgccggattcgagctcccgccgggtgaggcggtccgcccgaatcggccgattggactcgaattcgggtggtccggatgcgcgcagagcggaggctcgcggatctagggtttcggagggcctagggttagtgccggtgatctggtgatggtggtgcgacgcggcgccggagctcggcgaggaggagggttcggcggcgacgttggggaagatgcagcgagccggatatgcatgggtggcgcggcgctgagggctgtatttttactttctgcaaatgatgcaaggcagaccttgcttgtgccggtgttcatttcaataacacagttgcccgctgcttgtttgattgctaacataacgagcactgtgactgacggtcgtgaaattagagtaggggattgtgctctttttcgggctgtcggtgctcctccgttcattggattgatacgttggattgagaaaaaggaagaagcacatcccaaattacgtgttagttggctttatagacctaccgacgtgaagcttaacaaggatatacaactcagcgctgccccaaacgagatcttctactctttccaccaggacgaagcatctgctgtttctctactgcatccttgcaaagttgcctttttacgtaaaggtgttgaactaccagctggaatttcatcatttgtatgttggcgcgtgtacgatatagacaacaagtgcttatggtggcttactgacaaggactatattaataaacggcaggaagaagtaaatcgacttctacacagaacaaggctagaaatgcgtgccgcattgcaatcaggtggacgctctccaaagcgtttaaatggtccatcagcttcccaacaactgaagactgcttcagttggtacgcaaaatggtggtttgtctaaaggaaagaagagagatagaagtgaacagggagttgatccagctaagcgggatcgggatcatctacttaaggttgacgagagtgagcctggaaactttaacttggatgatattaagtctgaaatatcaaagataacagaaaaaggtgggcttccaaatgcagaagcagttgaaaagcttgtacatcttatgcaacttgatcgaactgagcagaagatagaccttagtggtcgggttatacttgctgatgttattgcggctacagagagtcctgattgcctcggcagatttgtgcaatcaaggggccttcccgtgttggacagttggcttcaagaggcccacaaagggaagtctggtgatgggactagtcctaaagaagcagataagcctattgacgaacttctctcggccctgcttcgtgcattagctaaattgcctattaatctcagtgcattgcaaagttgtagcattgggaaatctgtcaatcatcttcgtagccataaaaatctggagattcagaagaaagctaagtgtcttgttgagaactggaagaagcgtgttgatgctgagatgaagtcaaatgatgtgaaacctttagtttcaggtcaatctgtttcctggtcaggaaaagcaggtttccaagaaatttcaaatgctggtaccaaacgaggtggttcaagtgagaacagtccaaaaaatccagtgcccactctttcatcatcaaaaattttgactgataagcctgggggcacagatgctgaagcgaagttgaaccctggggtatctgccttgtcaaattcacaacacgtgcaaccgacaaatgttactaccaatttgaaggatcagccctgcaaatcaactggtggaactggtcctgagctgcctactgtaaaagaggagaaaagcagcagttcaagccaatcaccgaacaacagccagtcaatatctagtgagccatcgaaggatgcaagaagttcaactgctgcttctggtggtgctagcaaaacttctgaaagttcttcacgaagccatcgaaaggcaaacaatggtcttgtttcagggaacctgaaggaagcttctgtaggaagatctgtctcccttgatcgatcattgctacaggacaagtcatctcaaactggaacagcttctgaaaaaggagttgatatgccacctgatcatggaaataatcatagattgattgttcgctttccaaatcctggtcgtagtcctgctaatagtgcaagtgctggatcttttgatggcccatctgtaactggggatagagcttcatctcctgtggttgcagataggcatgatcagactgagcgctgggtgaaagggaagactgaaaattctcggcctcatttagcatctgatgctaacacagagtcttggcacagcaacgacggagctgctggttcagaggaaggtgataaatcgccgtgtgctatattagatgatgacaacagcaggacacccgacgattctgttaaggatgcacatgcatcacgagttgcatgctcgtcacatatgaatgaaaaagatgtcagtgaaactaaggtgggaactctgttcagcccaatgaatgctcttattgaaatcaagtactctgaagctagtcattcacggcaagctggagatgacgcagctatgaatcttcttgctagtgtggcaggggaaatatctaaatctgaattggtttccccagtttcttcacccagaagttcttctgcaaagaaattggcccgtgagagtgacaacattggaaaggttaaagtagaaagtgacatgggcccatcacatccagggcaagcagatgctaagaaaggtgccatggggaaggaagtaaaaaatgatgcttgtttggtttcaatggatgaacaacgccaaactacgccatctcctgagctaccatattcaaaagcagttgtatcttcagctaagattgaaacccatgaagttgaagccaagattgcaaacaaatgcaactctcagcatgcttcaattgattccaaaggtgaaagtcaggatgcctgtactgcccatgggaatgttgaagatggcagtacagacaaggatggtgccatggaatctgcattgggcagccagtgtagcttggttgtttccagtagaaattcaagattggttcatgctggggaatctgcattgtctgctgctgacaaacaggcacagggtttgttaaaatcaactaatcataagcagcttctgagtgtatcggacaacccaggagcctttgatagacgtgacagtatggctggcaaattagatttgatggctgcagaggtgagaaaaactgatgtcctgggcaatagtagcatagtgcagaacgaggctgaaaagaaggaacatgcttcttcctttttgcctgatgttcccaaactagttgtagcagcagcatctccagttggtgtggcaaatgtgaataaggagattaaagaatcaaaagacagttcaagtgaatccaatagccatgtaaaatctgaaggtgtcaattctcatcaaagcgagcaaagtgcaaagcagagttcaaagaaatccagtgatggtgtgagtggaaaagaggacgaaaaagaagaccatgtcttatcagacgaaggttcttctctagccgctaacaccaagtcaaatgctacagccaagcttgatttcgacttgaatgaaggaatacctggagatgatgggcatcagtctgagccaactatctcgcctgttgtatgttcttcagcaatccatttaactgggattttgccattcacttcgcctattacaactgggttgcagccagcttcagttacagtagctgcaccagctaaaggaccctttgttcctccagaaaacctgctaagagcaaagccggagattgggtggaaaggttcagcagctacaagtgcatttcgtcctgccgaaccaaggaagattttggagatgcctgttgctgcacgcgacatttcagtttctcatgctgctggtaagcagtctcgtcccacgcttggttttgatttgaatgttgccgatgatcaagctcttgaggaagatatcccacagagttctgcacaaactacctgttctgaatctggaaatacgagaagtcgagatggctcttcacgaagcgctggtattgaatttgatctgaacagagctgatgaagttgcagataatggccaatttgtgccaagtgcttcgcacagagttgaagtgccattgttgtcaacaagatcgttacatggagttttctctaatgctggcctgaatagctcgagggactttgatcttaatagtggaccaggtcttgatgatgttggcactgaagctgcaccaaagagcctaccttctaaaaatacaagcagtattcaattcctaccacaagttcctgttaggatgaatagtgctgccatgagtaatatatcaccatggcttgcctctgccagcccttgtggtccagtagctatacaatcttttttaccaactagagaacagccatacccaattgaggcagcagctggggcccaaaggatcattgcgcctacagctgatgctggccaattcggaggtgatccctgcaggcctccagttgtttcaacgtctccagcgatggtttatcatccgcctgcatatcagtatccaggattcccttttcctcccagtgttcaccttcaaacaccggcattttcaattggatcagcaacatttaataattctgcatctccaggagttccatactttccaactgtctccccttcttttgttgggccagctggagcgttaactccccaacatttaaggcagtttgctataaaccttgctgagggtagcagcagcagtggacgagacagtaatcgtaaatgggaaagtcagggccttgatcttaactcaggccctggaagtatagatttagaaggaaaggatgaacgggtacctttaccagtcagacaaaatttgatcccacccccacacggctttgtggaggatcaaggaagaatctaccagatgccagttgtaggaacaaagagaaaggaacctgatggcagctgggactcagaaaggtctacatacaagcaattatcatggcaatgatggctctgaagatcattctgcaccggactggtctgcgacgagcatgtacctgcatgtagaacttgggcggtgtgttcttcagtcactgcactatacttgggggattggggattcagcccatgacgatgatgtgggatcgaggaaacgaaaacttgctgtaattgttgtagattttttccctagctgttaggcttttggttctaatttactcaggagggggtatggctgcggaggaggaatctttgtgattctgagctctggggctattgtaattagaccgtccgctctgtgtttgttggtgatatactattgatcacatgctgcagctttacattacataagaatttagatgtgaccttgttccttgctggggaagcgttacgtcagctgaccatatgaacactggtgcaacgaacagctcgagttgctacgccatgtatctttggattgcagtgcagctgtatgtataagaattctagcagatcagcaagctatatttttttgctgtttttttttgtccatctgcatctgatttagtcttgactcttgatgctctttctttaaactatttgtcggaagtgatgaccagcaggtacgaacagg

SEQ ID NO: 222376 - DNA, 3002 bp, Zea Mays
agaagatgaatcactttattcctcgaaccaaacacacccttaatgttttactctagagcccatgctaaacacgccatgagtcttggtctatttaacacactttaaatagttaataggtctgtataaacttattaaacaatatatatggatctaaataacacactccaaatagtggtactgatgcactttactctctcaacagcaaccacaaaagaaaagggtgcgtagcccctaacccatatgtgtgtaatattgactcgatactgtgtgcctaccacgatttcggagagaccgagacagcggacttccgtaccgcgcgccgccgccaccgccatctatcctggaagcctgctgctctccacgcaaccacgccggcccccgtcaaccggtcgccatctctcctggactcctgctctccacgcaacgccgggcagccccgcctcagctcctcaccctcctcgacaactctccctccggccggtcgccccccacgactccccggggcccgtcgtccgcacgggcacgggctgcacggtggtgggagcagaaccagagcagccgaggaggcacatctactccgggctccggacctccctcggcctcaacccctctggagtctggattctgccatttcataccatctccgcttcgccactgccagcgcgctggccctggagcggaggcaagaggggtgactacaaggagcttttcgtcatggcactgcctaaggacggctgcctcgatggtgccaagatcacagaggtaggaggggtcggctacaaggagcttcttgtcatggcgctgcctaaggacgacagcatcgatggcgccaaggtcgcagaggccatcggcgtcaagctgccagacgtcgggggggccataagggtttttgacgcgatgattcgtcacagagtttcagattcttatgttttgtcacaagggcaagtctttttgctgcttaagtgctagtatgcaaactgtgtatgtttgatcatcaagtgatgattttctaccgtttttgcaagtaatgacttgctgtgaaaccgacatttgggctataagatgtggtattttgtggggccctacagaagcacatagttgaatgtacattacttacctcaataacttgtaatttacactataatgtatagatacggcgtcttcaataaatactgaaatgccttttgtttatatgatggaattagataatgtggttgctaattcgttacacacttacgctattaaatgtactttgtaacttgaactatcttactctctaatcttcggtacattgacaaccatacaatgccaaagaacttgcagttgcaggtaggctttgcctagagaagtcgcttcaatttcaatcctcatagatgccttatatatgaatttaaactttgaagtaacgatgaatttttgactgatcgtttgaggccttccttttatccaattcaccacagactattttgaatagcagagaggccagagaatttgccagtggggcactagctggtgctatgtcaaaggctattcttgcacctctagagactatcaggacaagaatgattgtaggagtaggacctaggcacatttttggtagtttggtggatatcatccaacaaaacgggtggcaagggctttgggcagggaatacaatcaacatgctccgcatcattccaacccaagcagtcgaactcggaacatttgaatgcgtcaagaggagcatggcagaagcacaagagaaatggaaagaggacggatgcccaaagatacagcttggtaatatgaaaatcgagcttccacttcacctcttatctccagttgctattgccggtgctgctgctggaatagctgccacactggcgtgccatcctctcgaagttatcaaggatcgcttgactatcaaccgagaggtttatccaagcattggccttgccttccgcaggatctataagacggatggtataggtggtttctatgctggcctgtgtccaacgctgattggcatgattccttacacaacatgttacttctttatgtatgacacgatcaagacctcttactgccgcttgcataagaagtcgtctctgagccgccctgagcttctacttatcggcgctctttcaggtcttactgcaagcacaatcagcttccctctggaagtagcaaggaagcggttgatggccggcgccctgcaggggaagtgcccgcctaacatgattgccgccttgtcggaggtgatccaggaggagggcgtcatggggctttaccgcgggtggggggcgagctgcctgaaggtgatgccgaattctggcatcacctgggtgttgtacgaggcatggaaggatgttcttctggctgacaggaacaagccacgctctttagcgaactaaacaggccgtccttgagcaatggaggcgttgctgggattcctgatctattttcagttttggaatcccggctgcggcgagtggggtacatagggcgcgtttctctcttttttgattgactgatgagtggtaagcgttttgttgtgtcatcggcacacagacaaacatcattaatgtgtcaaaaaactaagcgaaaagacaaacccttctgtatttcctgagtggaaagatggggaacctaaccctacctggagcctctgcaggaaccttttccttcatctaccaatcagatacagggagcttcaggttgacagatcgcaccaactgaaggacgaacctgttctgcgacaacaagcaggataagctgaggaacctgttttgcaagctaagttgagatgtaatttttgtcttgggctgggtggttatagtgttttctttcggcttttcttttctttctgcctcaagtctgaagcgaagtttataaattatttttcctcggctaatataatttgggtggcaaagcttttgccgcttccttaaaaaaagagtggtaagcattttgttgtgtcatcaattctgaattcttgtgctgttataagaaaaaaggatttg

SEQ ID NO: 222377 - DNA, 2470 bp, Zea Mays
cctcgaaccaaacacacccttaatgttttactctagagcccatgctaaacacgccatgagtcttggtctatttaacacactttaaatagttaataggtctgtataaacttattaaacaatatatatggatctaaataacacactccaaatagtggtactgatgcactttactctctcaacagcaaccacaaaagaaaagggtgcgtagcccctaacccatatgtgtgtaatattgactcgatactgtgtgcctaccacgatttcggagagaccgagacagcggacttccgtaccgcgcgccgccgccaccgccatctatcctggaagcctgctgctctccacgcaaccacgccggcccccgtcaaccggtcgccatctctcctggactcctgctctccacgcaacgccgggcagccccgcctcagctcctcaccctcctcgacaactctccctccggccggtcgccccccacgactccccggggcccgtcgtccgcacgggcacgggctgcacggtggtgggagcagaaccagagcagccgaggaggcacatctactccgggctccggacctccctcggcctcaacccctctggagtctggattctgccatttcataccatctccgcttcgccactgccagcgcgctggccctggagcggaggcaagaggggtgactacaaggagcttttcgtcatggcactgcctaaggacggctgcctcgatggtgccaagatcacagaggtaggaggggtcggctacaaggagcttcttgtcatggcgctgcctaaggacgacagcatcgatggcgccaaggtcgcagaggccatcggcgtcaagctgccagacgtcgggggggccataaggactattttgaatagcagagaggccagagaatttgccagtggggcactagctggtgctatgtcaaaggctattcttgcacctctagagactatcaggacaagaatgattgtaggagtaggacctaggcacatttttggtagtttggtggatatcatccaacaaaacgggtggcaagggctttgggcagggaatacaatcaacatgctccgcatcattccaacccaagcagtcgaactcggaacatttgaatgcgtcaagaggagcatggcagaagcacaagagaaatggaaagaggacggatgcccaaagatacagcttggtaatatgaaaatcgagcttccacttcacctcttatctccagttgctattgccggtgctgctgctggaatagctgccacactggcgtgccatcctctcgaagttatcaaggatcgcttgactatcaaccgagaggtttatccaagcattggccttgccttccgcaggatctataagacggatggtataggtggtttctatgctggcctgtgtccaacgctgattggcatgattccttacacaacatgttacttctttatgtatgacacgatcaagacctcttactgccgcttgcataagaagtcgtctctgagccgccctgagcttctacttatcggcgctctttcaggtcttactgcaagcacaatcagcttccctctggaagtagcaaggaagcggttgatggccggcgccctgcaggggaagtgcccgcctaacatgattgccgccttgtcggaggtgatccaggaggagggcgtcatggggctttaccgcgggtggggggcgagctgcctgaaggtgatgccgaattctggcatcacctgggtgttgtacgaggcatggaaggatgttcttctggctgacaggaacaagccacgctctttagcgaactaaacaggccgtccttgagcaatggaggcgttgctgggattcctgatctattttcagttttggaatcccggctgcggcgagtggggtacatagggcgcgtttctctcttttttgattgactgatgagtggaaccttttccttcatctaccaatcagatacagggagcttcaggttgacagatcgcaccaactgaaggacgaacctgttctgcgacaacaagcaggataagctgaggaacctgttttgcaagctaagttgagatgtaatttttgtcttgggctgggtggttatagtgttttctttcggcttttcttttctttctgcctcaagtctgaagcgaagtttataaattatttttcctcggctaatataatttgggtggcaaagcttttgccgcttccttaaaaaaagagtggtaagcattttgttgtgtcatcaattctgaattcttgtgctgttataagaaaaaaggatttgggtaaaaagaagagcaacaacgtctcgctgcaagaaaatagctttgatcagattcagttattacaaataatataggcaaagtgaaccgcatgtcaatatgtaaatctagcacattaaggttgtctcagaagcttaaccatcctatctcttatttcaaatttcactctttcaaaaatgcaaaacagtgttttgcacga

SEQ ID NO: 222378 - DNA, 1961 bp, Zea Mays
cagcaccacacaccgaacctagaggacgactggccgctgctaaacctggggcccttgttggctgtctcggccggccggccaagagggagccatgctgctcgagcctgcaaggaagaccgcaatacagagggctttggctgatacggagccacaccaaacatgtctttaatagtcgcgccctgtctatttggctctagcttcgccactgccagcgcgctggccctggagcggaggcaagaggggtgactacaaggagcttttcgtcatggcactgcctaaggacggctgcctcgatggtgccaagatcacagaggtaggaggggtcggctacaaggagcttcttgtcatggcgctgcctaaggacgacagcatcgatggcgccaaggtcgcagaggccatcggcgtcaagctgccagacgtcgggggggccataaggagaggccagagaatttgccagtggggcactagctggtgctatgtcaaaggctattcttgcacctctagagactatcaggacaagaatgattgtaggagtaggacctaggcacatttttggtagtttggtggatatcatccaacaaaacgggtggcaagggctttgggcagggaatacaatcaacatgctccgcatcattccaacccaagcagtcgaactcggaacatttgaatgcgtcaagaggagcatggcagaagcacaagagaaatggaaagaggacggatgcccaaagatacagcttggtaatatgaaaatcgagcttccacttcacctcttatctccagttgctattgccggtgctgctgctggaatagctgccacactggcgtgccatcctctcgaagttatcaaggatcgcttgactatcaaccgagaggtttatccaagcattggccttgccttccgcaggatctataagacggatggtataggtggtttctatgctggcctgtgtccaacgctgattggcatgattccttacacaacatgttacttctttatgtatgacacgatcaagacctcttactgccgcttgcataagaagtcgtctctgagccgccctgagcttctacttatcggcgctctttcaggtcttactgcaagcacaatcagcttccctctggaagtagcaaggaagcggttgatggccggcgccctgcaggggaagtgcccgcctaacatgattgccgccttgtcggaggtgatccaggaggagggcgtcatggggctttaccgcgggtggggggcgagctgcctgaaggtgatgccgaattctggcatcacctgggtgttgtacgaggcatggaaggatgttcttctggctgacaggaacaagccacgctctttagcgaactaaacaggccgtccttgagcaatggaggcgttgctgggattcctgatctattttcagttttggaatcccggctgcggcgagtggggtacatagggcgcgtttctctcttttttgattgactgatgagtggtaagcgttttgttgtgtcatcggcacacagacaaacatcattaatgtgtcaaaaaactaagcgaaaagacaaacccttctgtatttcctgagtggaaagatggggaacctaaccctacctggagcctctgcaggaaccttttccttcatctaccaatcagatacagggagcttcaggttgacagatcgcaccaactgaaggacgaacctgttctgcgacaacaagcaggataagctgaggaacctgttttgcaagctaagttgagatgtaatttttgtcttgggctgggtggttatagtgttttctttcggcttttcttttctttctgcctcaagtctgaagcgaagtttataaattatttttcctcggctaatataatttgggtggcaaagcttttgccgcttccttaaaaaaagagtggtaagcattttgttgtgtcatcaattctgaattcttgtgctgttataagaaaaaaggatttg

SEQ ID NO: 222379 - DNA, 1887 bp, Zea Mays
ggacgactggccgctgctaaacctggggcccttgttggctgtctcggccggccggccaagagggagccatgctgctcgagcctgcaaggaagaccgcaatacagagcttcgccactgccagcgcgctggccctggagcggaggcaagaggggtgactacaaggagcttttcgtcatggcactgcctaaggacggctgcctcgatggtgccaagatcacagaggtaggaggggtcggctacaaggagcttcttgtcatggcgctgcctaaggacgacagcatcgatggcgccaaggtcgcagaggccatcggcgtcaagctgccagacgtcgggggggccataaggactattttgaatagcagagaggccagagaatttgccagtggggcactagctggtgctatgtcaaaggctattcttgcacctctagagactatcaggacaagaatgattgtaggagtaggacctaggcacatttttggtagtttggtggatatcatccaacaaaacgggtggcaagggctttgggcagggaatacaatcaacatgctccgcatcattccaacccaagcagtcgaactcggaacatttgaatgcgtcaagaggagcatggcagaagcacaagagaaatggaaagaggacggatgcccaaagatacagcttggtaatatgaaaatcgagcttccacttcacctcttatctccagttgctattgccggtgctgctgctggaatagctgccacactggcgtgccatcctctcgaagttatcaaggatcgcttgactatcaaccgagaggtttatccaagcattggccttgccttccgcaggatctataagacggatggtataggtggtttctatgctggcctgtgtccaacgctgattggcatgattccttacacaacatgttacttctttatgtatgacacgatcaagacctcttactgccgcttgcataagaagtcgtctctgagccgccctgagcttctacttatcggcgctctttcaggtcttactgcaagcacaatcagcttccctctggaagtagcaaggaagcggttgatggccggcgccctgcaggggaagtgcccgcctaacatgattgccgccttgtcggaggtgatccaggaggagggcgtcatggggctttaccgcgggtggggggcgagctgcctgaaggtgatgccgaattctggcatcacctgggtgttgtacgaggcatggaaggatgttcttctggctgacaggaacaagccacgctctttagcgaactaaacaggccgtccttgagcaatggaggcgttgctgggattcctgatctattttcagttttggaatcccggctgcggcgagtggggtacatagggcgcgtttctctcttttttgattgactgatgagtggtaagcgttttgttgtgtcatcggcacacagacaaacatcattaatgtgtcaaaaaactaagcgaaaagacaaacccttctgtatttcctgagtggaaagatggggaacctaaccctacctggagcctctgcaggaaccttttccttcatctaccaatcagatacagggagcttcaggttgacagatcgcaccaactgaaggacgaacctgttctgcgacaacaagcaggataagctgaggaacctgttttgcaagctaagttgagatgtaatttttgtcttgggctgggtggttatagtgttttctttcggcttttcttttctttctgcctcaagtctgaagcgaagtttataaattatttttcctcggctaatataatttgggtggcaaagcttttgccgcttccttaaaaaaagagtggtaagcattttgttgtgtcatcaattctgaattcttgtgctgttataagaaaaaaggatttg

SEQ ID NO: 222380 - DNA, 1951 bp, Zea Mays
caaactgcaggtggtcagttgaggcttgatttcctatccccggctttctggattagtccatctggttttatatctgggactgtgcaagtgtgctacactgatacttgcatcttcgccactgccagcgcgctggccctggagcggaggcaagaggggtgactacaaggagcttttcgtcatggcactgcctaaggacggctgcctcgatggtgccaagatcacagaggtaggaggggtcggctacaaggagcttcttgtcatggcgctgcctaaggacgacagcatcgatggcgccaaggtcgcagaggccatcggcgtcaagctgccagacgtcgggggggccataaggactattttgaatagcagagaggccagagaatttgccagtggggcactagctggtgctatgtcaaaggctattcttgcacctctagagactatcagatattgtgcttaccgtattttgagcttagtggttgggttgacaggaggcattaatggcaggacaagaatgattgtaggagtaggacctaggcacatttttggtagtttggtggatatcatccaacaaaacgggtggcaagggctttgggcagggaatacaatcaacatgctccgcatcattccaacccaagcagtcgaactcggaacatttgaatgcgtcaagaggagcatggcagaagcacaagagaaatggaaagaggacggatgcccaaagatacagcttggtaatatgaaaatcgagcttccacttcacctcttatctccagttgctattgccggtgctgctgctggaatagctgccacactggcgtgccatcctctcgaagttatcaaggatcgcttgactatcaaccgagaggtttatccaagcattggccttgccttccgcaggatctataagacggatggtataggtggtttctatgctggcctgtgtccaacgctgattggcatgattccttacacaacatgttacttctttatgtatgacacgatcaagacctcttactgccgcttgcataagaagtcgtctctgagccgccctgagcttctacttatcggcgctctttcaggtcttactgcaagcacaatcagcttccctctggaagtagcaaggaagcggttgatggccggcgccctgcaggggaagtgcccgcctaacatgattgccgccttgtcggaggtgatccaggaggagggcgtcatggggctttaccgcgggtggggggcgagctgcctgaaggtgatgccgaattctggcatcacctgggtgttgtacgaggcatggaaggatgttcttctggctgacaggaacaagccacgctctttagcgaactaaacaggccgtccttgagcaatggaggcgttgctgggattcctgatctattttcagttttggaatcccggctgcggcgagtggggtacatagggcgcgtttctctcttttttgattgactgatgagtggtaagcgttttgttgtgtcatcggcacacagacaaacatcattaatgtgtcaaaaaactaagcgaaaagacaaacccttctgtatttcctgagtggaaagatggggaacctaaccctacctggagcctctgcaggaaccttttccttcatctaccaatcagatacagggagcttcaggttgacagatcgcaccaactgaaggacgaacctgttctgcgacaacaagcaggataagctgaggaacctgttttgcaagctaagttgagatgtaatttttgtcttgggctgggtggttatagtgttttctttcggcttttcttttctttctgcctcaagtctgaagcgaagtttataaattatttttcctcggctaatataatttgggtggcaaagcttttgccgcttccttaaaaaaagagtggtaagcattttgttgtgtcatcaattctgaattcttgtgctgttataagaaaaaaggatttg

SEQ ID NO: 222381 - DNA, 1863 bp, Zea Mays
atttcctatccccggctttctggattagtccatctggttttatatctgggactgtgcaagtgtgctacactgatacttgcatcttcgccactgccagcgcgctggccctggagcggaggcaagaggggtgactacaaggagcttttcgtcatggcactgcctaaggacggctgcctcgatggtgccaagatcacagaggtaggaggggtcggctacaaggagcttcttgtcatggcgctgcctaaggacgacagcatcgatggcgccaaggtcgcagaggccatcggcgtcaagctgccagacgtcgggggggccataaggactattttgaatagcagagaggccagagaatttgccagtggggcactagctggtgctatgtcaaaggctattcttgcacctctagagactatcaggacaagaatgattgtaggagtaggacctaggcacatttttggtagtttggtggatatcatccaacaaaacgggtggcaagggctttgggcagggaatacaatcaacatgctccgcatcattccaacccaagcagtcgaactcggaacatttgaatgcgtcaagaggagcatggcagaagcacaagagaaatggaaagaggacggatgcccaaagatacagcttggtaatatgaaaatcgagcttccacttcacctcttatctccagttgctattgccggtgctgctgctggaatagctgccacactggcgtgccatcctctcgaagttatcaaggatcgcttgactatcaaccgagaggtttatccaagcattggccttgccttccgcaggatctataagacggatggtataggtggtttctatgctggcctgtgtccaacgctgattggcatgattccttacacaacatgttacttctttatgtatgacacgatcaagacctcttactgccgcttgcataagaagtcgtctctgagccgccctgagcttctacttatcggcgctctttcaggtcttactgcaagcacaatcagcttccctctggaagtagcaaggaagcggttgatggccggcgccctgcaggggaagtgcccgcctaacatgattgccgccttgtcggaggtgatccaggaggagggcgtcatggggctttaccgcgggtggggggcgagctgcctgaaggtgatgccgaattctggcatcacctgggtgttgtacgaggcatggaaggatgttcttctggctgacaggaacaagccacgctctttagcgaactaaacaggccgtccttgagcaatggaggcgttgctgggattcctgatctattttcagttttggaatcccggctgcggcgagtggggtacatagggcgcgtttctctcttttttgattgactgatgagtggtaagcgttttgttgtgtcatcggcacacagacaaacatcattaatgtgtcaaaaaactaagcgaaaagacaaacccttctgtatttcctgagtggaaagatggggaacctaaccctacctggagcctctgcaggaaccttttccttcatctaccaatcagatacagggagcttcaggttgacagatcgcaccaactgaaggacgaacctgttctgcgacaacaagcaggataagctgaggaacctgttttgcaagctaagttgagatgtaatttttgtcttgggctgggtggttatagtgttttctttcggcttttcttttctttctgcctcaagtctgaagcgaagtttataaattatttttcctcggctaatataatttgggtggcaaagcttttgccgcttccttaaaaaaagagtggtaagcattttgttgtgtcatcaattctgaattcttgtgctgttataagaaaaaaggatttg

SEQ ID NO: 222382 - DNA, 1919 bp, Zea Mays
cgtctccttatctctggccaccgccacagaactggccgcgcgcgtcgcaaggctctctcgctcacttcttcccagcggagtgcgcagtcgtcatggctaacgctagccgtggtcgtgtcggcggcggcgggcgaagttccgtgctcgcgctgcttctcctgctttccgccggaggagcccgagcgtcctacgacggcgagggcgaggcagcacgggcaggggcagaggagaaggagaaggctgcggcgtggacgggcgggctgagccggcggagctttcccaaggggttcgtgttcgggacggcggcgtcggcctaccaggtggagggcatggcgcacaaggacggccgcgggccgagcatttgggacgccttcatcaagatccccggcgagatcgcaaacaacgccaccgcggacgtgactgttgacgagtaccatcgctacaaggaggacgtgaatatcatgaagaatatggggttcgacgcttaccggttttcgatctcttggtcaagaatattcccaaatggaaccggagaagtgaactggaaaggagtggcgtactacaacaggctgataaactacatggtgaagaaaggcatcacaccctacgcaaacctgtaccactacgacctaccggaggcgctggaggtccggtacggagggctgttgagcagagaagtggtatcgttcgcagactacgccgacttctgcttcggggcgttcggcgacagggtgaagaactggctgacgttcaacgagccgcgggtggtggccgccctagggtacgacgacggcaggttcgcgccggggaggtgcacggggtgcgaggccgggggggactcgggcaccgagccctacgtcgtggcgcaccacctcatcctctcccacgccgccgccgtccagaggtaccgccgcaggcaccagccgacgcagaggggcagggtcgggatcctgctggatttcgtgtggtacgagcccctcacggcggactcagccgccgaccgggccgccgctcaaaggtccagagacttccacgtcggatggttcctgcaccccatcgtctacggcgagtaccccaagtcggtccggagaagcgtcaagggcaggctccccaagttcacggctgaggaggccggtctagtccgaggctccatcgactacgtcggagtcaaccagtacactgcctactacgtgcgtgatcgacggccaaacgctacggcggcgccgcccagctactcgtccgactggcacgctgagttcgtctctagcttgacacctatccacgccacgctgcatgcagatgaacgcgacggtgtgccgattggaccaagggcgaactcagactggctctacatcgtgccttggggactgtacaaagccgtcacctacgtcaaggagaagtacggcaaccccacgatgctcctgtcagagaacggtatggacgacccgggcaacgtcacggtgggccagggcgtgcgcgacgcggccagggtggcctactaccggagctacgtcgccgagctgaaggcggcgatcgacggcggcgccaactgcgtgggatacttcgcctggtcgttgctcgacaacttcgagtggaagctggggtacacgtcccggttcggcctcgtctacgtcgacttcaggacgctccggcgctaccccaagagctcggcgtactggttcagggatgtcatcgccggcaccaactgagatcacgtacagtggcctcagtcgatctgatggcttgtttacgttagttcatcagcttcgtccccatgccatgcatcaagtaaaacatcatatatatcacggtgtgcatgaagtcaaaaaaataataataacgtgatgtcacgtatgggttctgagacgaatgctgcctctctctctctctctctctctttatatatatatatatatata

SEQ ID NO: 222383 - DNA, 691 bp, Zea Mays
tcgcttctttgatgagctcgaaaagaggctcggccgcaccgagctggagccgactcgccatcgtcgagtttttttttcggccctacttctgtctccacggctgccgacgagccgcgcaaccgaactcactgcaggaggactcgcacagatcggtgagcgagcaagcgagagatggctgggaggctaaccgcggcagggtcccgcatcctgggcggcggcggcgcacgcgccgcggcttccgccctccgacaccgcgccggcatgggcctccccgtcggccgccacatcgtccccgacaagcccctccccgtgaacgacgagttggtatgggataacggcacgcccttcccggaaccctgcatcgaccgccttgccccgcacatcggcaagtacgaggcgttggcgtggctgtgcggagggctagggttcttcgctgccctcggtatggctgctgttgtgaacgacaaggcctccaatataccatatgggctgaccggcggcgtacctggagagcggccaactgcgtctggcggccgacgacgtctgctcagtctgggcgcgacttcgtctggcgcgatggagtttgctcagtctggcggccgacggctctgcgcgatggcggctgggaactggcgtctgaggagcgcgatggatgagccggctgggtaaaggcccattatggcccactaac

SEQ ID NO: 222384 - DNA, 1911 bp, Zea Mays
tgcattgcattgcattgttaacttgtggtgctgggttccgccgctcgccgctgcctggcttccactgccgtcgccgccgcgcgggctctgctgcagaggatgagcaccgcgcagcgattcgacatcctcccctacggcttctccaagcgggcgagcaaccgcggcgatggctccggcgccgcgccgcgcgtcgcggcgcccgacgccaggagcggtggcggcggcggcacctgctccttccgcgcccacccggcgccgccagtcacgcaggccgtttcctggggcgccaagccggagcccggcggcaatggcgctgcgtgggagaggagcagggccgttaagcgggcccatgaggaagacgcaggcgaggagtacggcggccccgtcgttcgcgccaagcggacgaggatgggcggggacggggataaggtatggttccatcgatccattgcagggacagtgcaagcggccgggtccggcgacggacacgaagccgaggaagagaaggccttcctggtgccgagcgccgcggcgttcccccacggcatgtccgccgccgccgcgggcccgtcgctggccgtggccaagaaagaggagttcagcaagtcgccgtccaactcgccggcctcgtcgggcggcacggacggcggctcgtcggctgtcccgtggccggagcagctccacgcgcagaacggcgccgcggcgcgggtggaggccatggagctcgtcgtcgcgctcaccgcctgcgccgactccgtcgccgcctgcaaccacgacgccgccaactactacctggcgcggctgggcgagatggcctcccccgcggggcccacgccgatgcaccgcgtggccgcctacttcgcggaggcgctcacgctgcgcgtggtgcgcatgtggccccaggtgttcgacgttagcccgccgcgcgagctcaccgacggcgccgtcgccgccgacgacgacgcgacggcgctgcgggtgctcaacgccgtcaccccgatcccgcgcttcctgcacttcaccctcaacgagcgggtgctccgcgcgttcgacggccacgaccgcgtccacgtcattgacttcgacatcaagcaggggctgcagtggccgggcctcctccagagcctcgccacgcgcgtggctcccccggcgcacgtgcggatcaccggcgtcggcgagtcaagacaggagctgcaggagaccggcgcgcggctggggcgcgtggccgccgcgctcgggctcgcgttcgagttccacgccgtggtggaccgcctcgaggacgtccgcctgtggatgctccacgtgaagcgcggcgagtgcgtcgccgtgaactgcgtcctcgcggcgcaccgcctgctccgcgacgagaccggcgccgcggtggccgacttcctcgggctcacgcgcagcacgggcgccgccatcctcctcctgggcgagcacgaggacgccctcaactccgggcggtgggaggcgcggttcgcgcgcgcgctgcggtactacgccgcggcgttcgacgccgtggaggcggctgggctggcggacgccagccccgcgagggccaaggcggaggagatgttcgcgcgggagatccgcaacgcggtggcgttcgaggccgcggaccgcttcgagcggcacgagaccttcaccgggtggcggcagcgcatgcaggaaggcgggttccagaacgccggcatcggcgaccgggaggcgttgcaggggcgcatgatcgcgaggatgttcgcgccgggcaactacagcgtgcaggtgcagggcgacggcgaggggctcacgctccggtggatggaccaggccatgtacaccgtgtccgcgtggacgccggtcagcgacgggggcagcacggtgtctgcgtctgtctccaccacagcatcccattctcagcatagctga

SEQ ID NO: 222385 - DNA, 1697 bp, Zea Mays
ctttgtggtaccactaccacataacaaaaatgattcactgttatttgcaacaattaaattcgaatgctgtgtcagaaatgcaacccatgttttttcccaaggaaattatgtgatctactgctgtacttcatttccttgagaactaaggatcttgatactgttgctttgcttgatcatctaccatcattgcagcaactccttttccgtcttcttgcttgccagccacaaggagcgtcgtcttacaatgttataatccagcatgcactctcaatggttgctttagagagtattaagatctacactgcgattagtgatggaacaatcaatctagttgacaagttcttcgagatgcaaagaaatgatgctgttagggcacttgatgtatacaaaagagcaactaaccaggctgaacgactttcagagttttatgaagtgtgcaaaactatacacattgggcgtggtgagaaattcctgaaaatcgagcagcctccagcatcattcctgaataccatggaggagtatgttagagatgctccaacaggtcaaaaagagaaggctatactagcgatagaatacaaaaaagagccagaggaggaagaaaaaccgtcctcacctcctgcggctccagaaccagaaccggaacaagtgcctgagccagaacccgagccagtgaaagaggaagcaccagaagctgaaccagatttgctgggtctgaacgaacccaaccctgctgcaactgcgatagaagagcagaatgctttggcgctagccattgttccgatagatgatgctccgaaagctgctcccacttttggaaatggagtcactggctgggaactggcccttgtgacagcaccaagttcaaatgagaccgccgttgccccaagcaagaaactggccggtggtctggacttgctgacccttgacagcctgtacgacgaggcgaaccggagagcgagccagccagcaagctacaacccctgggaggcgacccccgccgcgcctgccccgatgatgaccatggcgccggtgatgcacgacccgttctacgcctcgaacgggtacgctgcgccgcacggcgtgcagatggcggcgatggcgcagcagcagcaggccttcatgctgcagcagcagcagatgatgacgatggccccggcgcagccggtggtccaccacccgatgcagatgcagcagaaccccgcgaacccgttcggcaaccccttcgcggccgccggcatgccgctccacgccgggcccggcaacgtgtacacggggctgatctgatccggtccggcggtccatttcttggtctgcattagcgctgctgttaccacatcattcattcttttttgcccgagttttcttgttgccattgtgagaaggaaatttgtagcacagacacagacacaggtagagtgtattatagcgtcggtcggagtgtatagcaagcagggggtcgtcatcagtggtatcccgtacgtagaaggtgattgcatgtatattatacacacagagtttggtcacctgttcatgtgcagttgagagtccattcttgcggcgaggagacgcggcacggcgccacgtcgagattgagattggattattcttaacattggatacggttgaataatgcagcagccattctttttagcacatgacactgttcgatggaatggaacaggacggttgagatcgac

SEQ ID NO: 222386 - DNA, 2514 bp, Zea Mays
ggcggtagttcgcctccgggttggccgcgagccgggaaagcgaccgcccctcctcttctcctccctttctctcgtctcgtcggctcctagctcctcctcctcgctcgccaagggagacgcacccggtccattcgtcctctcctcctatcgcctccccctctcctccccggagatccccgctaccgaaggattatcccgtgcagaggtgaaacgcttatctactactgtctgccccgtgccccgccgacgctgaggcccgacctcagttccaaaatccgtactcggctcggcgtgcctgtccttcggaggattggagtccactgtgctggcggctggcctcgtgcgtcgcttcctggttcgtggctgcgtgtgattgggactggatccaggcagcgagcctctcgtggatttggcccactagtatatcagcttggagttgaggagaatggctgttggtgggactcaaccagtccttaggaagtacctaggcgccctcaaggacacgacgactgtgagcttggcaaaagtgaacagtgattataaggaattggacattgcaatcgtcaaggccacaaaccatgttgagcgcccatcgaaggagaagtacataagagaaattttccattccatttctgctgctaggccacgggcagatgtagcctattgcattcatgcccttgctagacgtctttcgaagacgcgcaactgggcggttgcgctcaagacattgattgtcattcatcgcgcccttcgggaagttgatcccacttttcgtgaagagcttattagttatggcagatctaggtcccatatgttgaacatggcctactttaaggatgactctagtgcagaagcttgggattattctgcatgggtgcgcatttatgctttatatttagaggagaggctcgaatgtttccgagtgttgaagtatgatgtagaaacagatcctccgagaactaaggatcttgatactgttgctttgcttgatcatctaccatcattgcagcaactccttttccgtcttcttgcttgccagccacaaggagcgtcgtcttacaatgttataatccagcatgcactctcaatggttgctttagagagtattaagatctacactgcgattagtgatggaacaatcaatctagttgacaagttcttcgagatgcaaagaaatgatgctgttagggcacttgatgtatacaaaagagcaactaaccaggctgaacgactttcagagttttatgaagtgtgcaaaactatacacattgggcgtggtgagaaattcctgaaaatcgagcagcctccagcatcattcctgaataccatggaggagtatgttagagatgctccaacaggtcaaaaagagaaggctatactagcgatagaatacaaaaaagagccagaggaggaagaaaaaccgtcctcacctcctgcggctccagaaccagaaccggaacaagtgcctgagccagaacccgagccagtgaaagaggaagcaccagaagctgaaccagatttgctgggtctgaacgaacccaaccctgctgcaactgcgatagaagagcagaatgctttggcgctagccattgttccgatagatgatgctccgaaagctgctcccacttttggaaatggagtcactggctgggaactggcccttgtgacagcaccaagttcaaatgagaccgccgttgccccaagcaagaaactggccggtggtctggacttgctgacccttgacagcctgtacgacgaggcgaaccggagagcgagccagccagcaagctacaacccctgggaggcgacccccgccgcgcctgccccgatgatgaccatggcgccggtgatgcacgacccgttctacgcctcgaacgggtacgctgcgccgcacggcgtgcagatggcggcgatggcgcagcagcagcaggccttcatgctgcagcagcagcagatgatgacgatggccccggcgcagccggtggtccaccacccgatgcagatgcagcagaaccccgcgaacccgttcggcaaccccttcgcggccgccggcatgccgctccacgccgggcccggcaacgtgtacacggggctgatctgatccggtccggcggtccatttcttggtctgcattagcgctgctgttaccacatcattcattcttttttgcccgagttttcttgttgccattgtgagaaggaaatttgtagcacagacacagacacaggtagagtgtattatagcgtcggtcggagtgtatagcaagcagggggtcgtcatcagtggtatcccgtacgtagaaggtgattgcatgtatattatacacacagagtttggtcacctgttcatgtgcagttgagagtccattcttgcggcgaggagacgcggcacggcgccacgtcgagattgagattggattattcttaacattggatacggttgaataatgcagcagccattctttttagcacatgacactgttcgatggaatggaacaggacggttgagatcgac

SEQ ID NO: 222387 - DNA, 2209 bp, Zea Mays
ggcggtagttcgcctccgggttggccgcgagccgggaaagcgaccgcccctcctcttctcctccctttctctcgtctcgtcggctcctagctcctcctcctcgctcgccaagggagacgcacccggtccattcgtcctctcctcctatcgcctccccctctcctccccggagatccccgctaccgaaggattatcccgtgcagaggcccactagtatatcagcttggagttgaggagaatggctgttggtgggactcaaccagtccttaggaagtacctaggcgccctcaaggacacgacgactgtgagcttggcaaaagtgaacagtgattataaggaattggacattgcaatcgtcaaggccacaaaccatgttgagcgcccatcgaaggagaagtacataagaggttgcgctcaagacattgattgtcattcatcgcgcccttcgggaagttgatcccacttttcgtgaagagcttattagttatggcagatctaggtcccatatgttgaacatggcctactttaaggatgactctagtgcagaagcttgggattattctgcatgggtgcgcatttatgctttatatttagaggagaggctcgaatgtttccgagtgttgaagtatgatgtagaaacagatcctccgagaactaaggatcttgatactgttgctttgcttgatcatctaccatcattgcagcaactccttttccgtcttcttgcttgccagccacaaggagcgtcgtcttacaatgttataatccagcatgcactctcaatggttgctttagagagtattaagatctacactgcgattagtgatggaacaatcaatctagttgacaagttcttcgagatgcaaagaaatgatgctgttagggcacttgatgtatacaaaagagcaactaaccaggctgaacgactttcagagttttatgaagtgtgcaaaactatacacattgggcgtggtgagaaattcctgaaaatcgagcagcctccagcatcattcctgaataccatggaggagtatgttagagatgctccaacaggtcaaaaagagaaggctatactagcgatagaatacaaaaaagagccagaggaggaagaaaaaccgtcctcacctcctgcggctccagaaccagaaccggaacaagtgcctgagccagaacccgagccagtgaaagaggaagcaccagaagctgaaccagatttgctgggtctgaacgaacccaaccctgctgcaactgcgatagaagagcagaatgctttggcgctagccattgttccgatagatgatgctccgaaagctgctcccacttttggaaatggagtcactggctgggaactggcccttgtgacagcaccaagttcaaatgagaccgccgttgccccaagcaagaaactggccggtggtctggacttgctgacccttgacagcctgtacgacgaggcgaaccggagagcgagccagccagcaagctacaacccctgggaggcgacccccgccgcgcctgccccgatgatgaccatggcgccggtgatgcacgacccgttctacgcctcgaacgggtacgctgcgccgcacggcgtgcagatggcggcgatggcgcagcagcagcaggccttcatgctgcagcagcagcagatgatgacgatggccccggcgcagccggtggtccaccacccgatgcagatgcagcagaaccccgcgaacccgttcggcaaccccttcgcggccgccggcatgccgctccacgccgggcccggcaacgtgtacacggggctgatctgatccggtccggcggtccatttcttggtctgcattagcgctgctgttaccacatcattcattcttttttgcccgagttttcttgttgccattgtgagaaggaaatttgtagcacagacacagacacaggtagagtgtattatagcgtcggtcggagtgtatagcaagcagggggtcgtcatcagtggtatcccgtacgtagaaggtgattgcatgtatattatacacacagagtttggtcacctgttcatgtgcagttgagagtccattcttgcggcgaggagacgcggcacggcgccacgtcgagattgagattggattattcttaacattggatacggttgaataatgcagcagccattctttttagcacatgacactgttcgatggaatggaacaggacggttgagatcgac

SEQ ID NO: 222388 - DNA, 2243 bp, Zea Mays
ggcggtagttcgcctccgggttggccgcgagccgggaaagcgaccgcccctcctcttctcctccctttctctcgtctcgtcggctcctagctcctcctcctcgctcgccaagggagacgcacccggtccattcgtcctctcctcctatcgcctccccctctcctccccggagatccccgctaccgaaggattatcccgtgcagaggcccactagtatatcagcttggagttgaggagaatggctgttggtgggactcaaccagtccttaggaagtacctaggcgccctcaaggacacgacgactgtgagcttggcaaaagtgaacagtgattataaggaattggacattgcaatcgtcaaggccacaaaccatgttgagcgcccatcgaaggagaagtacataagagaaattttccattccatttctgctgctaggccacgggcagatgtagcctattgcattcatgcccttgctagacgtctttcgaagacgcgcaactgggcggttgcgctcaagacattgattgtcattcatcgcgcccttcgggaagttgatcccacttttcgtgaagagcttattagttatggcagatctaggtcccatatgttgaacatggcctactttaaggatgactctagtgcagaagcttgggattattctgcatgggtgcgcatttatgctttatatttagaggagaggctcgaatgtttccgagtgttgaagtatgatgtagaaacagatcctccgcaactccttttccgtcttcttgcttgccagccacaaggagcgtcgtcttacaatgttataatccagcatgcactctcaatgagagtattaagatctacactgcgattagtgatggaacaatcaatctagttgacaagttcttcgagatgcaaagaaatgatgctgttagggcacttgatgtatacaaaagagcaactaaccaggctgaacgactttcagagttttatgaagtgtgcaaaactatacacattgggcgtggtgagaaattcctgaaaatcgagcagcctccagcatcattcctgaataccatggaggagtatgttagagatgctccaacaggtcaaaaagagaaggctatactagcgatagaatacaaaaaagagccagaggaggaagaaaaaccgtcctcacctcctgcggctccagaaccagaaccggaacaagtgcctgagccagaacccgagccagtgaaagaggaagcaccagaagctgaaccagatttgctgggtctgaacgaacccaaccctgctgcaactgcgatagaagagcagaatgctttggcgctagccattgttccgatagatgatgctccgaaagctgctcccacttttggaaatggagtcactggctgggaactggcccttgtgacagcaccaagttcaaatgagaccgccgttgccccaagcaagaaactggccggtggtctggacttgctgacccttgacagcctgtacgacgaggcgaaccggagagcgagccagccagcaagctacaacccctgggaggcgacccccgccgcgcctgccccgatgatgaccatggcgccggtgatgcacgacccgttctacgcctcgaacgggtacgctgcgccgcacggcgtgcagatggcggcgatggcgcagcagcagcaggccttcatgctgcagcagcagcagatgatgacgatggccccggcgcagccggtggtccaccacccgatgcagatgcagcagaaccccgcgaacccgttcggcaaccccttcgcggccgccggcatgccgctccacgccgggcccggcaacgtgtacacggggctgatctgatccggtccggcggtccatttcttggtctgcattagcgctgctgttaccacatcattcattcttttttgcccgagttttcttgttgccattgtgagaaggaaatttgtagcacagacacagacacaggtagagtgtattatagcgtcggtcggagtgtatagcaagcagggggtcgtcatcagtggtatcccgtacgtagaaggtgattgcatgtatattatacacacagagtttggtcacctgttcatgtgcagttgagagtccattcttgcggcgaggagacgcggcacggcgccacgtcgagattgagattggattattcttaacattggatacggttgaataatgcagcagccattctttttagcacatgacactgttcgatggaatggaacaggacggttgagatcgac

SEQ ID NO: 222389 - DNA, 2463 bp, Zea Mays
cgccaataattcattaacctacgtggacgccactggctactgattactgctactaatctaccagtagtatactagtaactagctaaagcaagctgttcgtgcagtgcagcgttgtttgattgggtactgctgccgcgtcgctgtccgctgccaccgggcggtagttcgcctccgggttggccgcgagccgggaaagcgaccgcccctcctcttctcctccctttctctcgtctcgtcggctcctagctcctcctcctcgctcgccaagggagacgcacccggtccattcgtcctctcctcctatcgcctccccctctcctccccggagatccccgctaccgaaggattatcccgtgcagaggcccactagtatatcagcttggagttgaggagaatggctgttggtgggactcaaccagtccttaggaagtacctaggcgccctcaaggacacgacgactgtgagcttggcaaaagtgaacagtgattataaggaattggacattgcaatcgtcaaggccacaaaccatgttgagcgcccatcgaaggagaagtacataagagaaattttccattccatttctgctgctaggccacgggcagatgtagcctattgcattcatgcccttgctagacgtctttcgaagacgcgcaactgggcggttgcgctcaagacattgattgtcattcatcgcgcccttcgggaagttgatcccacttttcgtgaagagcttattagttatggcagatctaggtcccatatgttgaacatggcctactttaaggatgactctagtgcagaagcttgggattattctgcatgggtgcgcatttatgctttatatttagaggagaggctcgaatgtttccgagtgttgaagtatgatgtagaaacagatcctccgagaactaaggatcttgatactgttgctttgcttgatcatctaccatcattgcagcaactccttttccgtcttcttgcttgccagccacaaggagcgtcgtcttacaatgttataatccagcatgcactctcaatggttgctttagagagtattaagatctacactgcgattagtgatggaacaatcaatctagttgacaagttcttcgagatgcaaagaaatgatgctgttagggcacttgatgtatacaaaagagcaactaaccaggctgaacgactttcagagttttatgaagtgtgcaaaactatacacattgggcgtggtgagaaattcctgaaaatcgagcagcctccagcatcattcctgaataccatggaggagtatgttagagatgctccaacaggtcaaaaagagaaggctatactagcgatagaatacaaaaaagagccagaggaggaagaaaaaccgtcctcacctcctgcggctccagaaccagaaccggaacaagtgcctgagccagaacccgagccagtgaaagaggaagcaccagaagctgaaccagatttgctgggtctgaacgaacccaaccctgctgcaactgcgatagaagagcagaatgctttggcgctagccattgttccgatagatgatgctccgaaagctgctcccacttttggaaatggagtcactggctgggaactggcccttgtgacagcaccaagttcaaatgagaccgccgttgccccaagcaagaaactggccggtggtctggacttgctgacccttgacagcctgtacgacgaggcgaaccggagagcgagccagccagcaagctacaacccctgggaggcgacccccgccgcgcctgccccgatgatgaccatggcgccggtgatgcacgacccgttctacgcctcgaacgggtacgctgcgccgcacggcgtgcagatggcggcgatggcgcagcagcagcaggccttcatgctgcagcagcagcagatgatgacgatggccccggcgcagccggtggtccaccacccgatgcagatgcagcagaaccccgcgaacccgttcggcaaccccttcgcggccgccggcatgccgctccacgccgggcccggcaacgtgtacacggggctgatctgatccggtccggcggtccatttcttggtctgcattagcgctgctgttaccacatcattcattcttttttgcccgagttttcttgttgccattgtgagaaggaaatttgtagcacagacacagacacaggtagagtgtattatagcgtcggtcggagtgtatagcaagcagggggtcgtcatcagtggtatcccgtacgtagaaggtgattgcatgtatattatacacacagagtttggtcacctgttcatgtgcagttgagagtccattcttgcggcgaggagacgcggcacggcgccacgtcgagattgagattggattattcttaacattggatacggttgaataatgcagcagccattctttttagcacatgacactgttcgatggaatggaacaggacggttgagatcgac

SEQ ID NO: 222390 - DNA, 1681 bp, Zea Mays
caacaatgctacttcagtttgtgtctcgctaatgtgctaaagtttgggtccttataagataagagccaagtctgcctgcataccacgaaattttaacttgttgcttctctccctcttctgttctgtctcgtccccttcacgaatcacgacagtattgaagcaattcctgattgctgatcctccacaatttctcccgtggattggagcgatctgaattggagccgtttactgctgacatggcgggaactgatcgcctctaccctgaaattgggacgtatgacctggagcccccgcaggtcccagcctccgccgggggcagcggcgaggaggaggccggggtttgcgacgcactggtgatgtgggacgacgaatccgacgcgtgtccctcccatgaagcggcccccatcatatttgagaagggcactagggatcctcctcctaaagttttcaaggaagaaaggcttgatgttgtccattattcagagttcagcgatgagatggcgactgagaaggaattcggagaaaacaactatgacagtttcccttcttgtgaacaaacaggcatcatatgggtgcctccctctgttccacctatgccaaaacatgatcacgatgagtggcaaaagggctttggttacaatagtccgtgcttcccagaggaagaatataagtgggatattgacgaagaaaatttggagatgacaatgtgggatgtgctctctgagatggttgttgcaggaaaggataaaatattatccattgcatcatttgatttaggaatgtatggcacgtctatgatttcagatttttgccttgaagagactttgaaggataaggcccaaacacttaaagatgtcagtgctggttctgaacatgctctccttgagacagaactaacaaagtggttgcctgatagtgcttcaacttcctgtatgctttgtggagcacgttttcatccaataatttgtgctcgccatcattgccgattttgtggtgggatattttgtggtggctgttcaaagggtagaagcttgatgcccccaaagttcatgaactcagatcctcaaagggtctgtgatgtttgtggagtgcgtcttgagtgtatacaaccttatttgatgaatcgattcagtcgtgcttgtcaacttccaactcaagacttgactgacctaagcaccttgaggtcatggataaacaccccatgggcagtcagaatggagtatgagatctacaaagcggcaaattccatacatggctattgtaaggtgggagagctgaaacctgagaagtcgatccctgattcaattctcagacaagcaaaagggcttgcaatcatcactgaggtaaaggttggagtgatgcttacatacaaaatcggtactggattggttgttgctcggagaggtgatggttcttggtcccctccttcagccatctctacttgtggtcttggatatggagttcaggctggaggtgagttggctgactacatcattgttcttaggaacaaagatgccatcaaaacttttagtggaaatgcacatatgtcaattggggctggtgttagtgcttctgctggtcattttggacgagtggcagaggctgatttccgtgctggtgatggtggttatgctgcctgttacacatacagttgtagcaaagctatgtcctcctggatccc

SEQ ID NO: 222391 - DNA, 2989 bp, Zea Mays
ctgatcaccatttagcgttggagggctgtttattacagcaacccgctattttgagagcaatataaaaagataaacaataatgtttatgtgcaaaatctgccttcttcatctgcaagccatgtttaattttgaaatggacctgaacaactattttacatgtttacatgttctagaattgctactgttcattgctgctataattacatatgatatttatctgagttatatgtttgttttattcggaattagaatatttaaatatgaaggaagcatgtcactcatttctctaattttacaacacaattaagctaaatatatttgtatgcgaaatatatttgtacactattgttgactatgtgagactatgtgagcgtggttgcagaaacaatagcacggggatctatagaattaattttcatctcccatcctatgaatttaagataggatcatatctaaactttgaaaagttgtagaatgtcacatttcaactaaataacctaattcattaagtagattccaattcctccaaaataaaaggatccaaacggctccttagaggaaactgtgattattcttcaaataaacagtacaaattaagttctgccacctgttaataagttgtatatatatatgttatgttgtgtgatctcaggtgagcaatggagcccgtggggttcctcagcagcagaataggttgctctcagtgcttgtggcacccaagattgcaggaatgagcaatgttgtggccctcaagctgatggatggtgcccttattggtagacgctatgaatcgagtgcagcagcagttgattctacggaccagctagctgagaagcacgagtaccaggctgaggtcaacaggctcatggatttgattgtgcacagcttgtatagtaacaaggaagttttccttcgagaactggtcagcaatgctagtgatgcacttgataagttgcgttatctgagtgtcacggaccctgagcttctgaaggatggtccccaacttgacattcgcattcaatcagacaaggataatggagtaataacaattactgattctgggattggtatgacgaaacaagagcttattgattctcttgggactattgcaagcagtggaactgccaagttccttaaagcattgaaggagagtcaagaagcgggcatggacaacaacttgattggccaatttggtgttggtttctattccacatttcttgtttcagagaaggttgttgtgtcaacaaagagcccaaaatctgacaaacaatatgtttgggaaggacaagcagattctggttcttataccattagagaggaaaaagacccagagaagctaattcctaggggaactcgccttactctctatcttaagcatgatgataagggctttgctcaccctgagaggattcaaaaacttttaaagaattattctcagtttgtttcctttcccatttacacatggcaagagaaaggcttcacaaaagaggtcgaggttgatgaggatccagcggaagccaaaaaaggggatgatgatatcaaaactgagcctaagaaaaagaccaaaaccgttgttgagaagtattgggattgggagctttcaaatgagacacaacctatttggcttcgaaaccctaaagaggtttcaactgaggagtacaatgaattttacaagaaaaccttcaatgagtacttgaatcctttggcctcctcacacttcactacagagggtgaggtagaatttaggtcaattctttatgttcctgctacaaggaaggatgatataactgataataggaagaccaagaatatcagactgtatgttaaacgtgtattcatatcggatgactttgatggagaattgttcccaagatatttgagctttgtgaagggtgttgttgactcaaatgaccttccgttgaatgtttctcgtgagattcttcaagaaagtcgaattgttcgtataatgagaaagaggctagtgcggaaagccttcgatatggtacttggcatttcttgcagtgaaaacagagatgattacgaaaggttctgggagaactatggaaaaattttaaagctgggtgccatggaagacaaagaaaatcacaagagaattgctcctttgttgcgcttcttctcttctcaaagcaacgatgaattaatcagcttggacgaatatgtggaaaacatgaaacctgagcagaaggatatttacttcattgctgcagacagcctgagcagtgccaaaaatacccctttcttagagagactaacagaaaaagagtatgaggttctacttttcgttgaccctatggatgaaatggctatccagaatctgagctcctacaaggataagaaatttgtggacattagcagggaagatttggacttaggtgatagcaatgaggaaagagaggagataaagcagcagttcagccaaacctgtgattggataaagaatcgcttgggtgacaaggttgcacgtgttgacatatctaatcgtctgaggtcatcgccatgtgttcttgttgcagcgaagtttggttggtcagccaatatggaaaggctaatgagagcacagactatgggtgatacaaccactttggatttcatgcggtcaaggaaggtttttgaaataaatccagaacatgagataatcaaggccttgaatgcggcatgcaggaataaccccgatgatcctgaagccctaaaggctctggatgttctctttgaaactgctatgatttcaagtggcttgtcgcctgacaaccccgccgagctcagcgggaagatctacgagatgataaccactgccatcgcaggcaagtggtcctcacagtcgcaggcgcaacctgacaacacaactctgcagcacgcggcacctgggaggtcggatgagccgcttgaaggtgaagtggtggagccagagcccgttgaggctgatcagcataaggatgacatatcggcacgaattgtcctcataacttaa

SEQ ID NO: 222392 - DNA, 1478 bp, Zea Mays
aaagaggctagtgcggaaagccttcgatatggattacgaaaggttctgggagaactatggaaaaattttaaagctgggtgccatggaagacaaagaaaatcacaagagaattgctcctttgttgcgcttcttctcttctcaaagcaacgatgaattaatcagcttggacgaatatgtggaaaacatgaaacctgagcagaaggatatttacttcattgctgcagacagcctgagcagtgccaaaaatacccctttcttagagagactaacagaaaaagagtatgaggttctacttttcgttgaccctatggatgaaatggctatccagaatctgagctcctacaaggataagaaatttgtggacattagcagggaagatttggacttaggtgatagcaatgaggaaagagaggagataaagcagcagttcagccaaacctgtgattggataaagaatcgcttgggtgacaaggttgcacgtgttgacatatctaatcgtctgaggtcatcgccatgtgttcttgttgcagcgaagtttggttggtcagccaatatggaaaggctaatgagagcacagactatgggtgatacaaccactttggatttcatgcggtcaaggaaggtttttgaaataaatccagaacatgagataatcaaggccttgaatgcggcatgcaggaataaccccgatgatcctgaagccctaaaggctctggatgttctctttgaaactgctatgatttcaagtggcttgtcgcctgacaaccccgccgagctcagcgggaagatctacgagatgataaccactgccatcgcaggcaagtggtcctcacagtcgcaggcgcaacctgacaacacaactctgcagcacgcggcacctgggaggtcggatgagccgcttgaaggtgaagtggtggagccagagcccgttgaggctgatcagcataagtaaggggaaccccctttcgctttctcgtgctagctttgaaccgttgtgcacgtggcggagaattttgagtatttgttttgacggcctttagctttatcatgagctgtgacggacctaatgtttagaatttagaagattagggataagtggcggttgaactacttgaactggttatgtgatcctaggatcgtctctggactcattgtagattaattataacagttagaagcgcaggtgaggtgtctatcacggacacccaaacgcatcagagttgctaaatttggagctgaggcctgcggtgaatgagatcgtctcttttgtctcgacttccacgactttctttgggctgaggtctgcggtgaatttggagctgaggtctgcggtgaatgctattttcagcggtcttacttatttcatctcttactaggtgagtgtccgtgcgttgcaacggaaccgtataataacataataacttatgtatatatgtgtgttatattgttatagttatattcccgtgcgttgcgacgga

SEQ ID NO: 222393 - DNA, 3482 bp, Zea Mays
ctgatcaccatttagcgttggagggctgtttattacagcaacccgctattttgagagcaatataaaaagataaacaataatgtttatgtgcaaaatctgccttcttcatctgcaagccatgtttaattttgaaatggacctgaacaactattttacatgtttacatgttctagaattgctactgttcattgctgctataattacatatgatatttatctgagttatatgtttgttttattcggaattagaatatttaaatatgaaggaagcatgtcactcatttctctaattttacaacacaattaagctaaatatatttgtatgcgaaatatatttgtacactattgttgactatgtgagactatgtgagcgtggttgcagaaacaatagcacggggatctatagaattaattttcatctcccatcctatgaatttaagataggatcatatctaaactttgaaaagttgtagaatgtcacatttcaactaaataacctaattcattaagtagattccaattcctccaaaataaaaggatccaaacggctccttagaggaaactgtgattattcttcaaataaacagtacaaattaagttctgccacctgttaataagttgtatatatatatgttatgttgtgtgatctcaggtgagcaatggagcccgtggggttcctcagcagcagaataggttgctctcagtgcttgtggcacccaagattgcaggaatgagcaatgttgtggccctcaagctgatggatggtgcccttattggtagacgctatgaatcgagtgcagcagcagttgattctacggaccagctagctgagaagcacgagtaccaggctgaggtcaacaggctcatggatttgattgtgcacagcttgtatagtaacaaggaagttttccttcgagaactggtcagcaatgctagtgatgcacttgataagttgcgttatctgagtgtcacggaccctgagcttctgaaggatggtccccaacttgacattcgcattcaatcagacaaggataatggagtaataacaattactgattctgggattggtatgacgaaacaagagcttattgattctcttgggactattgcaagcagtggaactgccaagttccttaaagcattgaaggagagtcaagaagcgggcatggacaacaacttgattggccaatttggtgttggtttctattccacatttcttgtttcagagaaggttgttgtgtcaacaaagagcccaaaatctgacaaacaatatgtttgggaaggacaagcagattctggttcttataccattagagaggaaaaagacccagagaagctaattcctaggggaactcgccttactctctatcttaagcatgatgataagggctttgctcaccctgagaggattcaaaaacttttaaagaattattctcagtttgtttcctttcccatttacacatggcaagagaaaggcttcacaaaagaggtcgaggttgatgaggatccagcggaagccaaaaaaggggatgatgatatcaaaactgagcctaagaaaaagaccaaaaccgttgttgagaagtattgggattgggagctttcaaatgagacacaacctatttggcttcgaaaccctaaagaggtttcaactgaggagtacaatgaattttacaagaaaaccttcaatgagtacttgaatcctttggcctcctcacacttcactacagagggtgaggtagaatttaggtcaattctttatgttcctgctacaaggaaggatgatataactgataataggaagaccaagaatatcagactgtatgttaaacgtgtattcatatcggatgactttgatggagaattgttcccaagatatttgagctttgtgaagggtgttgttgactcaaatgaccttccgttgaatgtttctcgtgagattcttcaagaaagtcgaattgttcgtataatgagaaagaggctagtgcggaaagccttcgatatggtacttggcatttcttgcagtgaaaacagagatgattacgaaaggttctgggagaactatggaaaaattttaaagctgggtgccatggaagacaaagaaaatcacaagagaattgctcctttgttgcgcttcttctcttctcaaagcaacgatgaattaatcagcttggacgaatatgtggaaaacatgaaacctgagcagaaggatatttacttcattgctgcagacagcctgagcagtgccaaaaatacccctttcttagagagactaacagaaaaagagtatgaggttctacttttcgttgaccctatggatgaaatggctatccagaatctgagctcctacaaggataagaaatttgtggacattagcagggaagatttggacttaggtgatagcaatgaggaaagagaggagataaagcagcagttcagccaaacctgtgattggataaagaatcgcttgggtgacaaggttgcacgtgttgacatatctaatcgtctgaggtcatcgccatgtgttcttgttgcagcgaagtttggttggtcagccaatatggaaaggctaatgagagcacagactatgggtgatacaaccactttggatttcatgcggtcaaggaaggtttttgaaataaatccagaacatgagataatcaaggccttgaatgcggcatgcaggaataaccccgatgatcctgaagccctaaaggctctggatgttctctttgaaactgctatgatttcaagtggcttgtcgcctgacaaccccgccgagctcagcgggaagatctacgagatgataaccactgccatcgcaggcaagtggtcctcacagtcgcaggcgcaacctgacaacacaactctgcagcacgcggcacctgggaggtcggatgagccgcttgaaggtgaagtggtggagccagagcccgttgaggctgatcagcataagtaaggggaaccccctttcgctttctcgtgctagctttgaaccgttgtgcacgtggcggagaattttgagtatttgttttgacggcctttagctttatcatgagctgtgacggacctaatgtttagaatttagaagattagggataagtggcggttgaactacttgaactggttatgtgatcctaggatcgtctctggactcattgtagattaattataacagttagaagcgcaggtgaggtgtctatcacggacacccaaacgcatcagagttgctaaatttggagctgaggcctgcggtgaatgagatcgtctcttttgtctcgacttccacgactttctttgggctgaggtctgcggtgaatttggagctgaggtctgcggtgaatgctattttcagcggtcttacttatttcatctcttactaggtgagtgtccgtgcgttgcaacggaaccgtataataacataataacttatgtatatatgtgtgttatattgttatagttatattcccgtgcgttgcgacgga

SEQ ID NO: 222394 - DNA, 2140 bp, Zea Mays
aaaagttgtggcttatgcctcaccttgacattttacgagctaggaatattcgggggtttttcttttgcaccaagtctgttattgacaaggaacgtagaggagattacctaggaaaaactgttcaggtcgtgccacacatcacagatgaaatacaagattggattcaacgtgtggcaatgaatccagttgatgacaccgaagagccagctgatgtttgtgtcatagaacttggtgggactataggggacattgaatcaatgcctttcatagaagcactaggccaattttcataccgtgtagggcctggaaacttttgcttggtgcatgttagtcttgtaccagttctaaatgtagttggtgagcagaaaacaaagcccacccaacatagtgttcgcggacttcgaggacttggactcatgcctgatattttggcatgtcgcagtacacagccacttgaagaacacgtgaaagtgaagctcgcacaattttgtcatgtcccgataccaaatatcattaatctccatgatgtcaccaacatttggcacattcctttgttgctcagagatcagaaggcccatgaagctattttgaaggtgttagaccttcagtgcgcgagtaaagttgctcgagaaccccaattgtctgaatggactgaaagagtcagcagatgtgacagattgaaatctccggttaggattgcaatggttggaaagtatactggcctgtcagactcctacctatctgttataaaggctcttttgcatgcgtcggttgctttggacaggaaacttgtggtggactgggttccttcctgtgatcttgaagattctacagcaaaagagactcctgacgcctatgaaaaggcatgggagtcgttgaagggtgcagatggtgtgttggtgccaggaggttttggagacagaggagtccaagggaaaattctggctgcaaaatacgcgcgagaaaacaacgttccatatcttggcatttgcttgggcatgcaaattgcagtgattgagtttgcacgctctgtcatgaagttgcacggtgctaacagcacagagtttgatccaaccacaaaaacaccatgtgttgttttcatgccagaggggtccaaaactcatatgggagcaacaatgcgccttggttcaaggaggacctttttccaggccactaactgcaaatctgctaaactgtacggcaatgcttgctacgttgacgaaagacaccgccacagatacgaggtgaatcctgacatggtcccagaatttgagaaggcagggctttctttcgttggcagggatgagagtggcgaacgcatggagattatcgaactaccaactcataggtttttcgtcggagcacagtttcaccctgaattcaagtcaaggcccggcaagccatctccgcttttcttaggattggtagcagcgtcatcaggccagcttgaccacttgctccaacgtggccttaccagttcagcaggcagagacatctgcggcaaagggggagcgcagaaaccaaaagcttgccagaacgggcatgtcatgaagccactgaatggcctggtgcacgggcactattcagcgactcgctgcaatggcgtcattcccatctagcaggctgttttcgcttgttctttttctttccgttctacctacctgcagggcaaccaggaagagaagggctgtttgctctagcgacacggcagccgtttccgatgttttaacgaggaagcaattggcatgcaaagctgtcgcgcgcattaagaggcaaatctagcagcttattagctagggttcgattagtagtagtagtaatccgatgttgctggtttatttgttagtttgtttgctaagaaagattacaagggttagtgatgtgcagctagctccagtgtagcctgccgtctcgccccatttgtacattgtaaaaccactgctactctccatgattgactgaatggatgagtataaacgtattggaccaacatgctcggtgttataaaaatctaagttgcaatccaactgtagttgtctcggggatgttcggtaaagttgcgtgagctggtggcacgagctatgggtttggtaaaggcttagcagactcatatgtacatttgcacctaagatttgtttgc

SEQ ID NO: 222395 - DNA, 2388 bp, Zea Mays
atctcctgtcccatgtttcgttttttgccccctttgagccgccatcgcgtactccgtactcgtcgctgctttgttgaagtgggcatctgatcctgtgtcaacgtcactgtctgggttccttggagcacatgaacttctcaggggcagaaatacagatccatacctcaacaccgatgccggaaccatgtccccattcgagcacggcgaagtgtttgttttggacgatggtggtgaggtggacttggaccttggaaactatgagagatttctggacatcaagttgactcgtgacaacaacataaccacggggaagatataccagtctgttattgacaaggaacgtagaggagattacctaggaaaaactgttcaggtcgtgccacacatcacagatgaaatacaagattggattcaacgtgtggcaatgaatccagttgatgacaccgaagagccagctgatgtttgtgtcatagaacttggtgggactataggggacattgaatcaatgcctttcatagaagcactaggccaattttcataccgtgtagggcctggaaacttttgcttggtgcatgttagtcttgtaccagttctaaatgtagttggtgagcagaaaacaaagcccacccaacatagtgttcgcggacttcgaggacttggactcatgcctgatattttggcatgtcgcagtacacagccacttgaagaacacgtgaaagtgaagctcgcacaattttgtcatgtcccgataccaaatatcattaatctccatgatgtcaccaacatttggcacattcctttgttgctcagagatcagaaggcccatgaagctattttgaaggtgttagaccttcagtgcgcgagtaaagttgctcgagaaccccaattgtctgaatggactgaaagagtcagcagatgtgacagattgaaatctccggttaggattgcaatggttggaaagtatactggcctgtcagactcctacctatctgttataaaggctcttttgcatgcgtcggttgctttggacaggaaacttgtggtggactgggttccttcctgtgatcttgaagattctacagcaaaagagactcctgacgcctatgaaaaggcatgggagtcgttgaagggtgcagatggtgtgttggtgccaggaggttttggagacagaggagtccaagggaaaattctggctgcaaaatacgcgcgagaaaacaacgttccatatcttggcatttgcttgggcatgcaaattgcagtgattgagtttgcacgctctgtcatgaagttgcacggtgctaacagcacagagtttgatccaaccacaaaaacaccatgtgttgttttcatgccagaggggtccaaaactcatatgggagcaacaatgcgccttggttcaaggaggacctttttccaggccactaactgcaaatctgctaaactgtacggcaatgcttgctacgttgacgaaagacaccgccacagatacgaggtgaatcctgacatggtcccagaatttgagaaggcagggctttctttcgttggcagggatgagagtggcgaacgcatggagattatcgaactaccaactcataggtttttcgtcggagcacagtttcaccctgaattcaagtcaaggcccggcaagccatctccgcttttcttaggattggtagcagcgtcatcaggccagcttgaccacttgctccaacgtggccttaccagttcagcaggcagagacatctgcggcaaagggggagcgcagaaaccaaaagcttgccagaacgggcatgtcatgaagccactgaatggcctggtgcacgggcactattcagcgactcgctgcaatggcgtcattcccatctagcaggctgttttcgcttgttctttttctttccgttctacctacctgcagggcaaccaggaagagaagggctgtttgctctagcgacacggcagccgtttccgatgttttaacgaggaagcaattggcatgcaaagctgtcgcgcgcattaagaggcaaatctagcagcttattagctagggttcgattagtagtagtagtaatccgatgttgctggtttatttgttagtttgtttgctaagaaagattacaagggttagtgatgtgcagctagctccagtgtagcctgccgtctcgccccatttgtacattgtaaaaccactgctactctccatgattgactgaatggatgagtataaacgtattggaccaacatgctcggtgttataaaaatctaagttgcaatccaactgtagttgtctcggggatgttcggtaaagttgcgtgagctggtggcacgagctatgggtttggtaaaggcttagcagactcatatgtacatttgcacctaagatttgtttgc

SEQ ID NO: 222396 - DNA, 2238 bp, Zea Mays
ccccaacccaacaacagcagcaggaacaggaaaaagaaaaaactctctcccattcccatctcgcctcccacctcctccgcctcgccgccgcggcaggcaccgccaccaatcttctcttccgccccctcgttcgttcgctcgctcgctcgccaggagatcgactcgaggcgaggccatgaagtacgtgctggtgaccggcggcgtggtgagcgggctcgggaagggcgtgacggccagcagcatcggcgtcgtgctcaaggcctgcggcctccgcgtcacgtctatcaagatcgatccatacctcaacaccgatgccggaaccatgtccccattcgagcacggcgaagtgtttgttttggacgatggtggtgaggtggacttggaccttggaaactatgagagatttctggacatcaagttgactcgtgacaacaacataaccacggggaagatataccagtctgttattgacaaggaacgtagaggagattacctaggaaaaactgttcaggtcgtgccacacatcacagatgaaatacaagattggattcaacgtgtggcaatgaatccagttgatgacaccgaagagccagctgatgtttgtgtcatagaacttggtgggactataggggacattgaatcaatgcctttcatagaagcactaggccaattttcataccgtgtagggcctggaaacttttgcttggtgcatgttagtcttgtaccagttctaaatgtagttggtgagcagaaaacaaagcccacccaacatagtgttcgcggacttcgaggacttggactcatgcctgatattttggcatgtcgcagtacacagccacttgaagaacacgtgaaagtgaagctcgcacaattttgtcatgtcccgataccaaatatcattaatctccatgatgtcaccaacatttggcacattcctttgttgctcagagatcagaaggcccatgaagctattttgaagggtgcagatggtgtgttggtgccaggaggttttggagacagaggagtccaagggaaaattctggctgcaaaatacgcgcgagaaaacaacgttccatatcttggcatttgcttgggcatgcaaattgcagtgattgagtttgcacgctctgtcatgaagttgcacggtgctaacagcacagagtttgatccaaccacaaaaacaccatgtgttgttttcatgccagaggggtccaaaactcatatgggagcaacaatgcgccttggttcaaggaggacctttttccaggccactaactgcaaatctgctaaactgtacggcaatgcttgctacgttgacgaaagacaccgccacagatacgaggtgaatcctgacatggtcccagaatttgagaaggcagggctttctttcgttggcagggatgagagtggcgaacgcatggagattatcgaactaccaactcataggtttttcgtcggagcacagtttcaccctgaattcaagtcaaggcccggcaagccatctccgcttttcttaggattggtagcagcgtcatcaggccagcttgaccacttgctccaacgtggccttaccagttcagcaggcagagacatctgcggcaaagggggagcgcagaaaccaaaagcttgccagaacgggcatgtcatgaagccactgaatggcctggtgcacgggcactattcagcgactcgctgcaatggcgtcattcccatctagcaggctgttttcgcttgttctttttctttccgttctacctacctgcagggcaaccaggaagagaagggctgtttgctctagcgacacggcagccgtttccgatgttttaacgaggaagcaattggcatgcaaagctgtcgcgcgcattaagaggcaaatctagcagcttattagctagggttcgattagtagtagtagtaatccgatgttgctggtttatttgttagtttgtttgctaagaaagattacaagggttagtgatgtgcagctagctccagtgtagcctgccgtctcgccccatttgtacattgtaaaaccactgctactctccatgattgactgaatggatgagtataaacgtattggaccaacatgctcggtgttataaaaatctaagttgcaatccaactgtagttgtctcggggatgttcggtaaagttgcgtgagctggtggcacgagctatgggtttggtaaaggcttagcagactcatatgtacatttgcacctaagatttgtttgc

SEQ ID NO: 222397 - DNA, 2479 bp, Zea Mays
cttggctggactggacccccaacccaacaacagcagcaggaacaggaaaaagaaaaaactctctcccattcccatctcgcctcccacctcctccgcctcgccgccgcggcaggcaccgccaccaatcttctcttccgccccctcgttcgttcgctcgctcgctcgccaggagatcgactcgaggcgaggccatgaagtacgtgctggtgaccggcggcgtggtgagcgggctcgggaagggcgtgacggccagcagcatcggcgtcgtgctcaaggcctgcggcctccgcgtcacgtctatcaagatcgatccatacctcaacaccgatgccggaaccatgtccccattcgagcacggcgaagtgtttgttttggacgatggtggtgaggtggacttggaccttggaaactatgagagatttctggacatcaagttgactcgtgacaacaacataaccacggggaagatataccagtctgttattgacaaggaacgtagaggagattacctaggaaaaactgttcaggtcgtgccacacatcacagatgaaatacaagattggattcaacgtgtggcaatgaatccagttgatgacaccgaagagccagctgatgtttgtgtcatagaacttggtgggactataggggacattgaatcaatgcctttcatagaagcactaggccaattttcataccgtgtagggcctggaaacttttgcttggtgcatgttagtcttgtaccagttctaaatgtagttggtgagcagaaaacaaagcccacccaacatagtgttcgcggacttcgaggacttggactcatgcctgatattttggcatgtcgcagtacacagccacttgaagaacacgtgaaagtgaagctcgcacaattttgtcatgtcccggatcagaaggcccatgaagctattttgaaggtgttagaccttcagtgcgcgagtaaagttgctcgagaaccccaattgtctgaatggactgaaagagtcagcagatgtgacagattgaaatctccggttaggattgcaatggttggaaagtatactggcctgtcagactcctacctatctgttataaaggctcttttgcatgcgtcggttgctttggacaggaaacttgtggtggactgggttccttcctgtgatcttgaagattctacagcaaaagagactcctgacgcctatgaaaaggcatgggagtcgttgaagggtgcagatggtgtgttggtgccaggaggttttggagacagaggagtccaagggaaaattctggctgcaaaatacgcgcgagaaaacaacgttccatatcttggcatttgcttgggcatgcaaattgcagtgattgagtttgcacgctctgtcatgaagttgcacggtgctaacagcacagagtttgatccaaccacaaaaacaccatgtgttgttttcatgccagaggggtccaaaactcatatgggagcaacaatgcgccttggttcaaggaggacctttttccaggccactaactgcaaatctgctaaactgtacggcaatgcttgctacgttgacgaaagacaccgccacagatacgaggtgaatcctgacatggtcccagaatttgagaaggcagggctttctttcgttggcagggatgagagtggcgaacgcatggagattatcgaactaccaactcataggtttttcgtcggagcacagtttcaccctgaattcaagtcaaggcccggcaagccatctccgcttttcttaggattggtagcagcgtcatcaggccagcttgaccacttgctccaacgtggccttaccagttcagcaggcagagacatctgcggcaaagggggagcgcagaaaccaaaagcttgccagaacgggcatgtcatgaagccactgaatggcctggtgcacgggcactattcagcgactcgctgcaatggcgtcattcccatctagcaggctgttttcgcttgttctttttctttccgttctacctacctgcagggcaaccaggaagagaagggctgtttgctctagcgacacggcagccgtttccgatgttttaacgaggaagcaattggcatgcaaagctgtcgcgcgcattaagaggcaaatctagcagcttattagctagggttcgattagtagtagtagtaatccgatgttgctggtttatttgttagtttgtttgctaagaaagattacaagggttagtgatgtgcagctagctccagtgtagcctgccgtctcgccccatttgtacattgtaaaaccactgctactctccatgattgactgaatggatgagtataaacgtattggaccaacatgctcggtgttataaaaatctaagttgcaatccaactgtagttgtctcggggatgttcggtaaagttgcgtgagctggtggcacgagctatgggtttggtaaaggcttagcagactcatatgtacatttgcacctaagatttgtttgc

SEQ ID NO: 222398 - DNA, 2545 bp, Zea Mays
ctccttggctggactggacccccaacccaacaacagcagcaggaacaggaaaaagaaaaaactctctcccattcccatctcgcctcccacctcctccgcctcgccgccgcggcaggcaccgccaccaatcttctcttccgccccctcgttcgttcgctcgctcgctcgccaggagatcgactcgaggcgaggccatgaagtacgtgctggtgaccggcggcgtggtgagcgggctcgggaagggcgtgacggccagcagcatcggcgtcgtgctcaaggcctgcggcctccgcgtcacgtctatcaagatcgatccatacctcaacaccgatgccggaaccatgtccccattcgagcacggcgaagtgtttgttttggacgatggtggtgaggtggacttggaccttggaaactatgagagatttctggacatcaagttgactcgtgacaacaacataaccacggggaagatataccagtctgttattgacaaggaacgtagaggagattacctaggaaaaactgttcaggtcgtgccacacatcacagatgaaatacaagattggattcaacgtgtggcaatgaatccagttgatgacaccgaagagccagctgatgtttgtgtcatagaacttggtgggactataggggacattgaatcaatgcctttcatagaagcactaggccaattttcataccgtgtagggcctggaaacttttgcttggtgcatgttagtcttgtaccagttctaaatgtagttggtgagcagaaaacaaagcccacccaacatagtgttcgcggacttcgaggacttggactcatgcctgatattttggcatgtcgcagtacacagccacttgaagaacacgtgaaagtgaagctcgcacaattttgtcatgtcccgataccaaatatcattaatctccatgatgtcaccaacatttggcacattcctttgttgctcagagatcagaaggcccatgaagctattttgaaggtgttagaccttcagtgcgcgagtaaagttgctcgagaaccccaattgtctgaatggactgaaagagtcagcagatgtgacagattgaaatctccggttaggattgcaatggttggaaagtatactggcctgtcagactcctacctatctgttataaaggctcttttgcatgcgtcggttgctttggacaggaaacttgtggtggactgggttccttcctgtgatcttgaagattctacagcaaaagagactcctgacgcctatgaaaaggcatgggagtcgttgaagggtgcagatggtgtgttggtgccaggaggttttggagacagaggagtccaagggaaaattctggctgcaaaatacgcgcgagaaaacaacgttccatatcttggcatttgcttgggcatgcaaattgcagtgattgagtttgcacgctctgtcatgaagttgcacggtgctaacagcacagagtttgatccaaccacaaaaacaccatgtgttgttttcatgccagaggggtccaaaactcatatgggagcaacaatgcgccttggttcaaggaggacctttttccaggccactaactgcaaatctgctaaactgtacggcaatgcttgctacgttgacgaaagacaccgccacagatacgaggtgaatcctgacatggtcccagaatttgagaaggcagggctttctttcgttggcagggatgagagtggcgaacgcatggagattatcgaactaccaactcataggtttttcgtcggagcacagtttcaccctgaattcaagtcaaggcccggcaagccatctccgcttttcttaggattggtagcagcgtcatcaggccagcttgaccacttgctccaacgtggccttaccagttcagcaggcagagacatctgcggcaaagggggagcgcagaaaccaaaagcttgccagaacgggcatgtcatgaagccactgaatggcctggtgcacgggcactattcagcgactcgctgcaatggcgtcattcccatctagcaggctgttttcgcttgttctttttctttccgttctacctacctgcagggcaaccaggaagagaagggctgtttgctctagcgacacggcagccgtttccgatgttttaacgaggaagcaattggcatgcaaagctgtcgcgcgcattaagaggcaaatctagcagcttattagctagggttcgattagtagtagtagtaatccgatgttgctggtttatttgttagtttgtttgctaagaaagattacaagggttagtgatgtgcagctagctccagtgtagcctgccgtctcgccccatttgtacattgtaaaaccactgctactctccatgattgactgaatggatgagtataaacgtattggaccaacatgctcggtgttataaaaatctaagttgcaatccaactgtagttgtctcggggatgttcggtaaagttgcgtgagctggtggcacgagctatgggtttggtaaaggcttagcagactcatatgtacatttgcacctaagatttgtttgc

SEQ ID NO: 222399 - DNA, 2465 bp, Zea Mays
ctccttggctggactggacccccaacccaacaacagcagcaggaacaggaaaaagaaaaaactctctcccattcccatctcgcctcccacctcctccgcctcgccgccgcggcaggcaccgccaccaatcttctcttccgccccctcgttcgttcgctcgctcgctcgccaggagatcgactcgaggcgaggccatgaagtacgtgctggtgaccggcggcgtggtgagcgggctcgggaagggcgtgacggccagcagcatcggcgtcgtgctcaaggcctgcggcctccgcgtcacgtctatcaagatcggtggacttggaccttggaaactatgagagatttctggacatcaagttgactcgtgacaacaacataaccacggggaagatataccagtctgttattgacaaggaacgtagaggagattacctaggaaaaactgttcaggtcgtgccacacatcacagatgaaatacaagattggattcaacgtgtggcaatgaatccagttgatgacaccgaagagccagctgatgtttgtgtcatagaacttggtgggactataggggacattgaatcaatgcctttcatagaagcactaggccaattttcataccgtgtagggcctggaaacttttgcttggtgcatgttagtcttgtaccagttctaaatgtagttggtgagcagaaaacaaagcccacccaacatagtgttcgcggacttcgaggacttggactcatgcctgatattttggcatgtcgcagtacacagccacttgaagaacacgtgaaagtgaagctcgcacaattttgtcatgtcccgataccaaatatcattaatctccatgatgtcaccaacatttggcacattcctttgttgctcagagatcagaaggcccatgaagctattttgaaggtgttagaccttcagtgcgcgagtaaagttgctcgagaaccccaattgtctgaatggactgaaagagtcagcagatgtgacagattgaaatctccggttaggattgcaatggttggaaagtatactggcctgtcagactcctacctatctgttataaaggctcttttgcatgcgtcggttgctttggacaggaaacttgtggtggactgggttccttcctgtgatcttgaagattctacagcaaaagagactcctgacgcctatgaaaaggcatgggagtcgttgaagggtgcagatggtgtgttggtgccaggaggttttggagacagaggagtccaagggaaaattctggctgcaaaatacgcgcgagaaaacaacgttccatatcttggcatttgcttgggcatgcaaattgcagtgattgagtttgcacgctctgtcatgaagttgcacggtgctaacagcacagagtttgatccaaccacaaaaacaccatgtgttgttttcatgccagaggggtccaaaactcatatgggagcaacaatgcgccttggttcaaggaggacctttttccaggccactaactgcaaatctgctaaactgtacggcaatgcttgctacgttgacgaaagacaccgccacagatacgaggtgaatcctgacatggtcccagaatttgagaaggcagggctttctttcgttggcagggatgagagtggcgaacgcatggagattatcgaactaccaactcataggtttttcgtcggagcacagtttcaccctgaattcaagtcaaggcccggcaagccatctccgcttttcttaggattggtagcagcgtcatcaggccagcttgaccacttgctccaacgtggccttaccagttcagcaggcagagacatctgcggcaaagggggagcgcagaaaccaaaagcttgccagaacgggcatgtcatgaagccactgaatggcctggtgcacgggcactattcagcgactcgctgcaatggcgtcattcccatctagcaggctgttttcgcttgttctttttctttccgttctacctacctgcagggcaaccaggaagagaagggctgtttgctctagcgacacggcagccgtttccgatgttttaacgaggaagcaattggcatgcaaagctgtcgcgcgcattaagaggcaaatctagcagcttattagctagggttcgattagtagtagtagtaatccgatgttgctggtttatttgttagtttgtttgctaagaaagattacaagggttagtgatgtgcagctagctccagtgtagcctgccgtctcgccccatttgtacattgtaaaaccactgctactctccatgattgactgaatggatgagtataaacgtattggaccaacatgctcggtgttataaaaatctaagttgcaatccaactgtagttgtctcggggatgttcggtaaagttgcgtgagctggtggcacgagctatgggtttggtaaaggcttagcagactcatatgtacatttgcacctaagatttgtttgc

SEQ ID NO: 222400 - DNA, 673 bp, Zea Mays
cttggctggactggacccccaacccaacaacagcagcaggaacaggaaaaagaaaaaactctctcccattcccatctcgcctcccacctcctccgcctcgccgccgcggcaggcaccgccaccaatcttctcttccgccccctcgttcgttcgctcgctcgctcgccaggagatcgactcgaggcgaggccatgaagtacgtgctggtgaccggcggcgtggtgagcgggctcgggaagggcgtgacggccagcagcatcggcgtcgtgctcaaggcctgcggcctccgcgtcacgtctatcaagatcgatccatacctcaacaccgatgccggaaccatgtccccattcgagcacggcgaagtgtttgttttggacgatggtggtgaggtggacttggaccttggaaactatgagagatttctggacatcaagttgactcgtgacaacaacataaccacggggaagatataccagtctgttattgacaaggaacgtagaggagattacctaggaaaaactgttcaggtcgtgccacacatcacagatgaaatacaagattggattcaacgtgtggcaatgaatccagttgatgacaccgaagagccagctgatgtttgtgtcatagaacttggtgggactataggagacaatatttttgctgcataacgaca

SEQ ID NO: 222401 - DNA, 1030 bp, Zea Mays
atgcggcgaggcgctgcgctgctcctggtggccgtcttcgccgtggtcgccgtagcgaagggtcgtgctgataccccaccagctgaaacaaatagtgatagctctactgcacagccaggccttgggaaattggagcagcatgagcaggcaaatcctaataaggagcatgtgacccaccaggaaggaggagtcagcaatgatattggtgacaacaacaagaaggataactcaacagaagtaaccaacatcagaagagatggctccatacagcagccaaagcataaacccactagatgttagcatcatggctccagattatgtcactttagctgaagattccatccatgttgaagcaaatggtcacaatgagacacaagtgagagtttctgtcaatgatgatgcaaatagcacgacaatagtcatcaaagttgcagaaaaatcctgcaacatcagcattcacagtgcaatcacaagggagacggctggcagtggcagagtcataaggatgccacttacgccaacatacacgctactgccagtcttccttctcctcgttgcggtggcagtgtgcatcgtggtccggaggtggcgcaaccaggacggcgaccctgcgtatcagaagctagacatgtcagacttgccggtttcggttggaggcaagaaagaacatgacgatcggtctgacaagtgggacgacaactggggagatgactgggacgacgaggaagctccggtgacgccatccaagcctctgcccaacccttcgtccaaaggtctcgccccgaggcgatcggcgaaagatggttggaaagattagttagccacatgacgccacttaaaaggagcattgcggaaatagttccagtgcatgcagtatatttttaccttcatctttgttgttaaatatttctggaggatgctaatgtcagagagtgcaatacattgataccaagcagaaaattttgtgatcttcctctgccaaactgagtaactggcagctattgaatatagttattggacttccgacccg

SEQ ID NO: 222402 - DNA, 3196 bp, Zea Mays
agaagggacatatattcagttaggcataacattggagttgttggataaagagtggaacttaattatgttccaagcagaacggaatcttgatctatttgaaccttttctggcatttaggcgtgccctccttaagattttaggttgtgaagaacatcttgtaaaacatttatttcaatctgcttctgcgctccggaagggattaaggttttctttggcagcggcagctttatatgaactcaaagaactttgttttcacagagatgagagcactatgacaaatacctatttgcttgcacggcttgaagacgctaaattgctcagagctcaagggcagcatgatatggctattagtcttggaaaatacatactacagaagctttctgacaagaaaaacctgtcagatgtctatcgattagttggcaagtggctggctgaaacaagatcaagcaactcaagaactatcattgaggactatttaagaccttctatagatctctctgaatttgagaagagtacagataaaaggtacatgtccaggcagtgtcgaacacatttccatctagcacattatacatatagtttgttcagaagctatgaggaaagactctcatctaacgaatggcaagcagctctgcgattaaggaaatacaagactagggagttggagatactgattaaaagactgagaagttcatctaagggtgtgaagactgattactcagtaaaaatccaagagttacagaaacaacttgcacttgacagagaagaagcagagaaaatacaggatgatcacgataatttcttaaatctagcacttcaaggctaccaacgttccattgttgttggtggcaaatatgacctacaagtggtttttcggttggtctcgttgtggtttagtcttttctcaagggatcaagttgtgaaagcaatgttgaaaaccacaaaagaggtccaaacctacaagttcataccactggtttatcaaattgcttcgagacttgggagcaccaaagatgctcaggggtcatttaactttcagattgcgttagcttctcttttgaagaaaatggctgttgatcacccatatcatacaatattccagcttttggctctagcaaatggtgatcgtgtcaaagacaagcaaagaagtagaagttcttttgttgtagatatggagaagaagcttgctgctgaaaatttgttaaaggagctatcttcctgtcatggacctctgatttgtcagatgaaacaaatggttgagatctacattaagttagcagaactggagaccaagaaggaggacactaacaaaaaaattccgctgcccagggaggcccgcagcattggtcagcttgaactagttccagttgtgactgctaccgttcctattgatcctagctgtcgttatgaggaaggctcctttccacatttcactgggttggctgactccattatgatcatgaatggaattaatgctcccaaagttatagaatgttttggctcggatggtaacaaataccgtcaacttgcaaaatctggaaatgatgacctgcgacaggatgctgtgatggagcaattttttagtttggtaaatacattcttgcaaaatcaccgagatacttctaaaaggagattgaaaatccgtacatataaggttgttcctttcaccccaagtgctggtgttgttgaatgggtaaacggtactgttccactaggcgattatctaattgggagtactagaagtggtggagcacatggacgatatggaattggggactggacatatcttcaatgcagagagtacctgatgagtgaaaaggacaaaaggagggcatttcttaaaatctgcagcaactttaggcctgtgatgcaccacttctttcttgaaagattcttgctgcctgctgattggttccaaagtagacttgcttacacaaggagtgtagcagcaagctcgatggtaggatatatagtcggtcttggggatcgccattccatgaatattctcatcgaccaagacacagctgaggttgtacacattgatcttggtgttgcatttgaacagggtctcatgcttaaaacacctgaacgggttccatttcggttgacaagggatattatagatggcatgggtgttactggtgttgaaggtgtgttcagaagatgttgtgagaaaactctctgtgtcatgagggcgaataaagaagcattgctcactattattgaagtcttcgttcatgatcctctatataaatgggcactctcaccactgaaagccttacagcgtcaaaaggaaacagttgatactgattcatgtttggatgactcccaagaaccttacgatggcaacaaggatgcagctcgagctatacttcgtgttaaacagaagttggatggatatgaagatggcgagatgagaagtgtgcagggccaggtccaacaactcatacaggacgcggtggatgttgatcggttgtgccaaatgtttccaggttggggaccttggttgtaagctccattgaaagggatgtaaattttgatcgaaggcaagagcaacttttttcactgcttatgaggttttattctttggtgtgtttttttccctcaccaccctgtcaacattcctacaaagtacagcaaacggcttttggtaccctgtaaattgatgggaaggcaaggacgacatttgagtgcaggtgggttgtaccactcctgttttagagcatgtccagactagaggatgggtgattgcatagtgaggccacagttttctttttttgttgagcttcattaataccccctctgtctaaaagtcctcatcgtttaagcgtcccgcaccaagaccaaggatgcccctccgcattgcagccgctgtgaagttaattatctggcgccgttttgtattttcaaaacacgcatatgtaatgtcgcaaaaattcagctgcttcgatggttggccggccataggggcggtatccatacatcacaccatcgtgcagcgtacattcagctgcttcgacggttgcataccgtagtttttgttcaggatttactttgtaaagaagtgaggctgttttgtcatgtatgtaaagggcttgtttcgatgtagcatgaaatacgaagaattatgatgcatttgaatataccgtgctcccctgagcaaaaaacaaatcaacagaagctaccacctggccgc

SEQ ID NO: 222403 - DNA, 4082 bp, Zea Mays
cttttgtgacgatttttatggaaagctcagcatctgcagtctgcaagcgatgttcatgtgactttgccatactaatgtatgttgagctttggtgtgaggaacaattcaataggctggtattaggacctccagagttttccaatgaagagttgttgccacctcatgttgatctgttggttgctgcatttactcgtataaatgaaccagacagcatttatgggctcacactatctaatgagatagcgtctcagcttattaggtatgagcatgaaggtgattggagtagcgcacttgaatactatgatttacttgtaaggtcaatgccaaaggaacaccttggcactttaactgggtcggtgttgactggaccatctaccgtgtcttctagagcagaagatacaatgttgaactggaaaatgcacaaaggtcttatgagatccttgcagaaaactggatgtagtcatgtgcttgatgtctactgtgaaggtttatctcaccaaaaggggtgtcttcaacaagacgcggagtttattgatatccaatatgaagctgcttggagggcaggaaattgggatttctcctttttcgttccatattcttcttggtcttcaacccgctctcgaagtagctgtcttttcaatgaaaatttacatagttgcttaagagctctgcagaacggtgattctgaggagttccatgcaaaactttgtcaaactaagatggatcttgtcttggctttgtcaaacactagcaaggagagcacgaaatacatccactctaccatccttaaattacagattctagatcatgctactatggtttgggacctgcgttggaaccttaatcccaatcaaacttcaaaatctcctgtaaccaaggaattttctcacatatctactgtccctaaagggatacagttggagttgttggataaagagtggaacttaattatgttccaagcagaacggaatcttgatctatttgaaccttttctggcatttaggcgtgccctccttaagattttaggttgtgaagaacatcttgtaaaacatttatttcaatctgcttctgcgctccggaagggattaaggttttctttggcagcggcagctttatatgaactcaaagaactttgttttcacagagatgagagcactatgacaaatacctatttgcttgcacggcttgaagacgctaaattgctcagagctcaagggcagcatgatatggctattagtcttggaaaatacatactacagaagctttctgacaagaaaaacctgtcagatgtctatcgattagttggcaagtggctggctgaaacaagatcaagcaactcaagaactatcattgaggactatttaagaccttctatagatctctctgaatttgagaagagtacagataaaaggtacatgtccaggcagtgtcgaacacatttccatctagcacattatacatatagtttgttcagaagctatgaggaaagactctcatctaacgaatggcaagcagctctgcgattaaggaaatacaagactagggagttggagatactgattaaaagactgagaagttcatctaagggtgtgaagactgattactcagtaaaaatccaagagttacagaaacaacttgcacttgacagagaagaagcagagaaaatacaggatgatcacgataatttcttaaatctagcacttcaaggctaccaacgttccattgttgttggtggcaaatatgacctacaagtggtttttcggttggtctcgttgtggtttagtcttttctcaagggatcaagttgtgaaagcaatgttgaaaaccacaaaagaggtccaaacctacaagttcataccactggtttatcaaattgcttcgagacttgggagcaccaaagatgctcaggggtcatttaactttcagattgcgttagcttctcttttgaagaaaatggctgttgatcacccatatcatacaatattccagcttttggctctagcaaatggtgatcgtgtcaaagacaagcaaagaagtagaagttcttttgttgtagatatggagaagaagcttgctgctgaaaatttgttaaaggagctatcttcctgtcatggacctctgatttgtcagatgaaacaaatggttgagatctacattaagttagcagaactggagaccaagaaggaggacactaacaaaaaaattccgctgcccagggaggcccgcagcattggtcagcttgaactagttccagttgtgactgctaccgttcctattgatcctagctgtcgttatgaggaaggctcctttccacatttcactgggttggctgactccattatgatcatgaatggaattaatgctcccaaagttatagaatgttttggctcggatggtaacaaataccgtcaacttgcaaaatctggaaatgatgacctgcgacaggatgctgtgatggagcaattttttagtttggtaaatacattcttgcaaaatcaccgagatacttctaaaaggagattgaaaatccgtacatataaggttgttcctttcaccccaagtgctggtgttgttgaatgggtaaacggtactgttccactaggcgattatctaattgggagtactagaagtggtggagcacatggacgatatggaattggggactggacatatcttcaatgcagagagtacctgatgagtgaaaaggacaaaaggagggcatttcttaaaatctgcagcaactttaggcctgtgatgcaccacttctttcttgaaagattcttgctgcctgctgattggttccaaagtagacttgcttacacaaggagtgtagcagcaagctcgatggtaggatatatagtcggtcttggggatcgccattccatgaatattctcatcgaccaagacacagctgaggttgtacacattgatcttggtgttgcatttgaacagggtctcatgcttaaaacacctgaacgggttccatttcggttgacaagggatattatagatggcatgggtgttactggtgttgaaggtgtgttcagaagatgttgtgagaaaactctctgtgtcatgagggcgaataaagaagcattgctcactattattgaagtcttcgttcatgatcctctatataaatgggcactctcaccactgaaagccttacagcgtcaaaaggaaacagttgatactgattcatgtttggatgactcccaagaaccttacgatggcaacaaggatgcagctcgagctatacttcgtgttaaacagaagttggatggatatgaagatggcgagatgagaagtgtgcagggccaggtccaacaactcatacaggacgcggtggatgttgatcggttgtgccaaatgtttccaggttggggaccttggttgtaagctccattgaaagggatgtaaattttgatcgaaggcaagagcaacttttttcactgcttatgaggttttattctttggtgtgtttttttccctcaccaccctgtcaacattcctacaaagtacagcaaacggcttttggtaccctgtaaattgatgggaaggcaaggacgacatttgagtgcaggtgggttgtaccactcctgttttagagcatgtccagactagaggatgggtgattgcatagtgaggccacagttttctttttttgttgagcttcattaataccccctctgtctaaaagtcctcatcgtttaagcgtcccgcaccaagaccaaggatgcccctccgcattgcagccgctgtgaagttaattatctggcgccgttttgtattttcaaaacacgcatatgtaatgtcgcaaaaattcagctgcttcgatggttggccggccataggggcggtatccatacatcacaccatcgtgcagcgtacattcagctgcttcgacggttgcataccgtagtttttgttcaggatttactttgtaaagaagtgaggctgttttgtcatgtatgtaaagggcttgtttcgatgtagcatgaaatacgaagaattatgatgcatttgaatataccgtgctcccctgagcaaaaaacaaatcaacagaagctaccacctggccgc

SEQ ID NO: 222404 - DNA, 8163 bp, Zea Mays
atacaacaatgctgcttatagtttaggtattgggagccagaagtagttgatttgtgagtatgtttccaactaccaaatcctggtgacacccttacacacatgtgggtcaatgtagtgctaaagaatgttcccttgtatgtatttagttttctgattattggcattcctggattggaattctctcttttgaatgaacaaaatgttgttatcattcctgaagctattttctcgctgtgtgctggcttttcatcaccagtaattaattcatcggatatattgcaactgtttggtcattgtaaaattcattccaagatgtctcttgaggatgataactgggttcttaaagatgaactaccctactctgtggaagctttgtcagaaatcactctggatacttgtaccaaggttatgtctcataaatgccaccttatacatcttccggggactatccagcaaccaatgctcctagagctcatggaattcatgaaaggatttgtggcttcaaatgagcagtttgagaaagtggacttgaataatcttgttcttgtttgttctcttctctgcaatctgattcattgtgcattgttgtcaaggaccatggaagaaaaatcttcacttttgcaagaaacagtagattatgtcaccaatattttaaaacatattgtgtcatttgttgtgaagaagaatgatgaactttctcatggtcttactaacataagttcagcattggatacaatgggctctgctttctcctcaatcaagagcttactgtcttctccaatatttaatctgtcaagagttgataatggagtttgttctgttgttatcaaaagcattactgaattacttgatgaactcttggtggcaatttctcagctgttttgtcagatctctagtttagtgagcaattttgatgcagagagtactggtaaaatgctaccaacatctagtatcaatttagaggacctaaatcctgttttggactgtaaaagtagtgttgctgatatggatcttgatgtgatggactctagtgaagtagattctgtcacagctagtgcgagtggaagtatgggtagcttcttacgacctttggaatggaagctagatctagtttgcattatttcaacttttttctcagtttcatcacttcatacatgggaaattttgtacagcttggtggataaagaaggtgacgtgaaggttcgccaggccatcttgcttaacctttgcagaaacatctccgcgtcatctaaaactgtatctttagtggtccattttatagttgatatgagggacagaggtgcaagttcattacttggacctgcagagtgcttaactcacatacatgctttattaaaagcgttgatagctatccatggtggacagaatgctgatggaaagcaaccaggacgcgaagtatttttcagtgagaaccaggatatcttatttgacttgttaaatagggctacagacataagttctgtagattggttttctcgcatcaagttcattgattgtgtctcctcctttgtttgcctgttccctgatgttgcccaggatttgatcggatgtttgcttgacatgctgcatgatgctgattaccgtgtcaggttgtatttggctaggcaaatcgtcgtgttattccaaacatgggaagggcacaatgaattatttaatgatgtttgctcaagcattggtgccaagatggtgaagttctcaaatatttctccagttacagctagagaagtcttagctgttggtccacaatctgttctcgtaattgaaactgctctcattacactagctcatttggctgtgcatagcgaggatgttgaagttgagtgtttgttcatgatttctgctgcggctgctatagagccttctcagcgagaattagcttttgcgttatttgattccatttcaaggaggcttggttatgcttcaagaagcaagtatctggaccaagtgatgggcccgattctttttcgatgggttgcttgtgagatgaatctaatttcacttgttgaggtgcaagaaatgtttggttatggatctgctgagccaaacaactttgttgaacattgtagttcatggcttctccctttcctcattctcaggggtgatggtgctgatatgaattggatatcgaagattttatctcaacctttgtcaatcattatcaagagatacttcgttccaatctttggaatgtgcattgctgtcagatgtggcacagggccagagaaggacttagctgaaactgtcttatgtgaatcagttttgcagcttggtgaaatttctgaacttgagcgtgatgatctcattaaaaaacacatggttgcgatcgttgcctttttgctctctgtttcttcatctgctcatgggccacaaattccatatttttccaagaagaatgttgcactttcagtcagaatggttgttgatggatttgtggacacaatggatgataacttggctgatacagttgttagtgataaagttaatatatttcgtgctgacagagtttttaagttcctgttgtcgatacatcagcaagttgcagatgccagccattccaggcacatgggtcatcgtctttgtgcaattgaggttttaatagatgtacttgggcacagagtggttcttgagagcacttgcttctatattatttctatagtggggaactatattcagcaaaaaccactgcaaggccagtgctgtaatattttgtctaaattgttggctgcttttgatggaaacacctctgctgaaaccctgcaagtgcttggcagacagcttcaggtagtagttccaaaattaattttttcctgcctaattaatgagaaagaagaaagaagtggtactgaagattcatcaagagttctttctttactccatcaattgacagtggagattgatcctctgctttatgattacataagagagttagaaccacttcctgatcttgattgcttgaaagatgtacaggagtttcatgcttcactttctgcctcacattcttcaaggaatcagttcttaaagtttgttaataaggctccttatttaccaccagaactatttttgttgagtcttcgtgcgtatcacaaaaagttatttttgggagaaatcattcgtagaagtgacctatctgcggctgatacaaacatggttagctgctggcatagtgacccagatgtcatttctgctgtatgggctcttgttgacatttgtagctcatcatctgtagcaaatgaagcttcttgggtgcttgctgattttatctctagggctggtatatctgatgcacatcaagtaatattccgtctgccaactaccaccgaaaattattctttacaactacatactggttctgcttccaaggaggataaattatccacaaactatggtatttctgatgatgttctggttgggcttttgaaactcttgaagacttatttatctgatgaatctgttgaaataatagatgctgcttcacaaacactgaggggtattctgtcaacagcacgggggctcaatgctctgcagtttcttgattctcccgataggtctttactcatggttcattcgagaggggtaaacattcagatagttgaacagactatatcacaaatggaacagtgtgctggtgtttcacttgatgatgcagatgtgtgggacactgatggtcgaacttgcaagcaatggctgtgcacccttgtcagctcacttatttgccactgtgaagataccatcttgagactctgtaggagtattgtttttgtcaaagttaaggctgctgagcttttgctttctagtactctagtgaacattgctggcaatgttgattctaatactgccatctgcaaattaatttcaacaaaggttgagaaaataattttttccgactccaatcattcattgaagtcaatccatctgtttctggatgcactgaatgtcattagatctttttatgttgctgaaaaagccagaactttcccttctaatactctcaaggatggtagatctgctagatcaaaaagtcgatcaccagtgacaaccccatcatcatcatggaagaaggtatactggctttctgttgattatcttgttgctgccagagctgctagtcgatgttcatgtgactttgccatactaatgtatgttgagctttggtgtgaggaacaattcaataggctggtattaggacctccagagttttccaatgaagagttgttgccacctcatgttgatctgttggttgctgcatttactcgtataaatgaaccagacagcatttatgggctcacactatctaatgagatagcgtctcagcttattaggtatgagcatgaaggtgattggagtagcgcacttgaatactatgatttacttgtaaggtcaatgccaaaggaacaccttggcactttaactgggtcggtgttgactggaccatctaccgtgtcttctagagcagaagatacaatgttgaactggaaaatgcacaaaggtcttatgagatccttgcagaaaactggatgtagtcatgtgcttgatgtctactgtgaaggtttatctcaccaaaaggggtgtcttcaacaagacgcggagtttattgatatccaatatgaagctgcttggagggcaggaaattgggatttctcctttttcgttccatattcttcttggtcttcaacccgctctcgaagtagctgtcttttcaatgaaaatttacatagttgcttaagagctctgcagaacggtgattctgaggagttccatgcaaaactttgtcaaactaagatggatcttgtcttggctttgtcaaacactagcaaggagagcacgaaatacatccactctaccatccttaaattacagattctagatcatgctactatggtttgggacctgcgttggaaccttaatcccaatcaaacttcaaaatctcctgtaaccaaggaattttctcacatatctactgtccctaaagggatacagttggagttgttggataaagagtggaacttaattatgttccaagcagaacggaatcttgatctatttgaaccttttctggcatttaggcgtgccctccttaagattttaggttgtgaagaacatcttgtaaaacatttatttcaatctgcttctgcgctccggaagggattaaggttttctttggcagcggcagctttatatgaactcaaagaactttgttttcacagagatgagagcactatgacaaatacctatttgcttgcacggcttgaagacgctaaattgctcagagctcaagggcagcatgatatggctattagtcttggaaaatacatactacagaagctttctgacaagaaaaacctgtcagatgtctatcgattagttggcaagtggctggctgaaacaagatcaagcaactcaagaactatcattgaggactatttaagaccttctatagatctctctgaatttgagaagagtacagataaaaggtacatgtccaggcagtgtcgaacacatttccatctagcacattatacatatagtttgttcagaagctatgaggaaagactctcatctaacgaatggcaagcagctctgcgattaaggaaatacaagactagggagttggagatactgattaaaagactgagaagttcatctaagggtgtgaagactgattactcagtaaaaatccaagagttacagaaacaacttgcacttgacagagaagaagcagagaaaatacaggatgatcacgataatttcttaaatctagcacttcaaggctaccaacgttccattgttgttggtggcaaatatgacctacaagtggtttttcggttggtctcgttgtggtttagtcttttctcaagggatcaagttgtgaaagcaatgttgaaaaccacaaaagaggtccaaacctacaagttcataccactggtttatcaaattgcttcgagacttgggagcaccaaagatgctcaggggtcatttaactttcagattgcgttagcttctcttttgaagaaaatggctgttgatcacccatatcatacaatattccagcttttggctctagcaaatggtgatcgtgtcaaagacaagcaaagaagtagaagttcttttgttgtagatatggagaagaagcttgctgctgaaaatttgttaaaggagctatcttcctgtcatggacctctgatttgtcagatgaaacaaatggttgagatctacattaagttagcagaactggagaccaagaaggaggacactaacaaaaaaattccgctgcccagggaggcccgcagcattggtcagcttgaactagttccagttgtgactgctaccgttcctattgatcctagctgtcgttatgaggaaggctcctttccacatttcactgggttggctgactccattatgatcatgaatggaattaatgctcccaaagttatagaatgttttggctcggatggtaacaaataccgtcaacttgcaaaatctggaaatgatgacctgcgacaggatgctgtgatggagcaattttttagtttggtaaatacattcttgcaaaatcaccgagatacttctaaaaggagattgaaaatccgtacatataaggttgttcctttcaccccaagtgctggtgttgttgaatgggtaaacggtactgttccactaggcgattatctaattgggagtactagaagtggtggagcacatggacgatatggaattggggactggacatatcttcaatgcagagagtacctgatgagtgaaaaggacaaaaggagggcatttcttaaaatctgcagcaactttaggcctgtgatgcaccacttctttcttgaaagattcttgctgcctgctgattggttccaaagtagacttgcttacacaaggagtgtagcagcaagctcgatggtaggatatatagtcggtcttggggatcgccattccatgaatattctcatcgaccaagacacagctgaggttgtacacattgatcttggtgttgcatttgaacagggtctcatgcttaaaacacctgaacgggttccatttcggttgacaagggatattatagatggcatgggtgttactggtgttgaaggtgtgttcagaagatgttgtgagaaaactctctgtgtcatgagggcgaataaagaagcattgctcactattattgaagtcttcgttcatgatcctctatataaatgggcactctcaccactgaaagccttacagcgtcaaaaggaaacagttgatactgattcatgtttggatgactcccaagaaccttacgatggcaacaaggatgcagctcgagctatacttcgtgttaaacagaagttggatggatatgaagatggcgagatgagaagtgtgcagggccaggtccaacaactcatacaggacgcggtggatgttgatcggttgtgccaaatgtttccaggttggggaccttggttgtaagctccattgaaagggatgtaaattttgatcgaaggcaagagcaacttttttcactgcttatgaggttttattctttggtgtgtttttttccctcaccaccctgtcaacattcctacaaagtacagcaaacggcttttggtaccctgtaaattgatgggaaggcaaggacgacatttgagtgcaggtgggttgtaccactcctgttttagagcatgtccagactagaggatgggtgattgcatagtgaggccacagttttctttttttgttgagcttcattaataccccctctgtctaaaagtcctcatcgtttaagcgtcccgcaccaagaccaaggatgcccctccgcattgcagccgctgtgaagttaattatctggcgccgttttgtattttcaaaacacgcatatgtaatgtcgcaaaaattcagctgcttcgatggttggccggccataggggcggtatccatacatcacaccatcgtgcagcgtacattcagctgcttcgacggttgcataccgtagtttttgttcaggatttactttgtaaagaagtgaggctgttttgtcatgtatgtaaagggcttgtttcgatgtagcatgaaatacgaagaattatgatgcatttgaatataccgtgctcccctgagcaaaaaacaaatcaacagaagctaccacctggccgc

SEQ ID NO: 222405 - DNA, 9641 bp, Zea Mays
gcggcttccctgatgcgctcgccccccgccgcggcctcccagccgaaaccctagctccgattcccataccgatggcggccgtggccactgcgcgcgacgtggaggaggtcgtccagaagcttcagtctgatcgggccagagtccgcgacgagggggtgaagctgctggggacatggctgcagggtgaccgcgctgcgtccttctgccgcctcctcggccgcaacaccgtcaggttcaagcccggccacgggaaccttaccggagggcattcactacatttgctctcagttgctaagcaactttttgttcatatttgggaggtcataaaagatggccctagccttcagttagagtacagcataatccttagacagcttctaaatgtgaaggagtaccgctatcagatgaaacctcgaacatatagcaattttgtatcactctacatgaagaaggttgctagtgcttttgatgcaaaattcagcaatcaggcgagctccaaggatgaatccttccgctgtacattgacacttcatgttctacttgaaaacccaccaagtgattaccctgatattatgcgggaggaggttcttaatggatttagtgcaatcttcttacatattagggaggagggaaagctgactcgcaaacttatggaatgcattaacacctttttactgaaggatgggccaaatctgggatacaaatctgtgaagatccataatgcagttcaagagtttatattccgttgttggatgacaactcatgatcaggccttgaagagtttgttcataacctacgtgaaagttcagctgaagattgccaggaatattccagagattttggaaaaacttattgatgtcatcattaaggaactagacaaaaatgttaacactggacctggacttctatggtgtgaggcaccaagagatgagaaagctgtgtccttaaggtgtttccaagaggaatggatggatctctctgctactgttttttatctggcctgcaaatgcacaacaaagacagcaaacagggagaaaaggatgaagaaagaacacattatgaaccttatcgttgatggcctttttagaggatctttgttttggagtggttctgtttgttttctgattcacaagtatggatatcatctagagaaatctttgctaattagttggtttgaagcaagttgcaaagctttgagaagtatcttgatccatgcaaatgccatacgttttcaggattcactactctggcttctcaggacattcaaggagttctccacagtgctcatgcttgacactagggataaagtgcaattttgtttaacaaaaggcgagatgtcaattgttgaagattgttggcaagccatatggaattcccttgttcacgcatttccgttgttaagcagcatagatctagttgctgattcagctctgattttgctgggtggaatgatcatgcgggaccaagttcatacatcatttctatcagaagatacatggaacctgcaaatatttaaaaaatttccatcgccgtctgctctgtattttgttgcctgttacttctcgaggataggctttcagggtgacttatccaattctatctttgttcggaagactctgctaaggtcaactttggagttaattcattcaaaggaattctctcttttgaatgaacaaaatgttgttatcattcctgaagctattttctcgctgtgtgctggcttttcatcaccagtaattaattcatcggatatattgcaactgtttggtcattgtaaaattcattccaagatgtctcttgaggatgataactgggttcttaaagatgaactaccctactctgtggaagctttgtcagaaatcactctggatacttgtaccaaggttatgtctcataaatgccaccttatacatcttccggggactatccagcaaccaatgctcctagagctcatggaattcatgaaaggatttgtggcttcaaatgagcagtttgagaaagtggacttgaataatcttgttcttgtttgttctcttctctgcaatctgattcattgtgcattgttgtcaaggaccatggaagaaaaatcttcacttttgcaagaaacagtagattatgtcaccaatattttaaaacatattgtgtcatttgttgtgaagaagaatgatgaactttctcatggtcttactaacataagttcagcattggatacaatgggctctgctttctcctcaatcaagagcttactgtcttctccaatatttaatctgtcaagagttgataatggagtttgttctgttgttatcaaaagcattactgaattacttgatgaactcttggtggcaatttctcagctgttttgtcagatctctagtttagtgagcaattttgatgcagagagtactggtaaaatgctaccaacatctagtatcaatttagaggacctaaatcctgttttggactgtaaaagtagtgttgctgatatggatcttgatgtgatggactctagtgaagtagattctgtcacagctagtgcgagtggaagtatgggtagcttcttacgacctttggaatggaagctagatctagtttgcattatttcaacttttttctcagtttcatcacttcatacatgggaaattttgtacagcttggtggataaagaaggtgacgtgaaggttcgccaggccatcttgcttaacctttgcagaaacatctccgcgtcatctaaaactgtatctttagtggtccattttatagttgatatgagggacagaggtgcaagttcattacttggacctgcagagtgcttaactcacatacatgctttattaaaagcgttgatagctatccatggtggacagaatgctgatggaaagcaaccaggacgcgaagtatttttcagtgagaaccaggatatcttatttgacttgttaaatagggctacagacataagttctgtagattggttttctcgcatcaagttcattgattgtgtctcctcctttgtttgcctgttccctgatgttgcccaggatttgatcggatgtttgcttgacatgctgcatgatgctgattaccgtgtcaggttgtatttggctaggcaaatcgtcgtgttattccaaacatgggaagggcacaatgaattatttaatgatgtttgctcaagcattggtgccaagatggtgaagttctcaaatatttctccagttacagctagagaagtcttagctgttggtccacaatctgttctcgtaattgaaactgctctcattacactagctcatttggctgtgcatagcgaggatgttgaagttgagtgtttgttcatgatttctgctgcggctgctatagagccttctcagcgagaattagcttttgcgttatttgattccatttcaaggaggcttggttatgcttcaagaagcaagtatctggaccaagtgatgggcccgattctttttcgatgggttgcttgtgagatgaatctaatttcacttgttgaggtgcaagaaatgtttggttatggatctgctgagccaaacaactttgttgaacattgtagttcatggcttctccctttcctcattctcaggggtgatggtgctgatatgaattggatatcgaagattttatctcaacctttgtcaatcattatcaagagatacttcgttccaatctttggaatgtgcattgctgtcagatgtggcacagggccagagaaggacttagctgaaactgtcttatgtgaatcagttttgcagcttggtgaaatttctgaacttgagcgtgatgatctcattaaaaaacacatggttgcgatcgttgcctttttgctctctgtttcttcatctgctcatgggccacaaattccatatttttccaagaagaatgttgcactttcagtcagaatggttgttgatggatttgtggacacaatggatgataacttggctgatacagttgttagtgataaagttaatatatttcgtgctgacagagtttttaagttcctgttgtcgatacatcagcaagttgcagatgccagccattccaggcacatgggtcatcgtctttgtgcaattgaggttttaatagatgtacttgggcacagagtggttcttgagagcacttgcttctatattatttctatagtggggaactatattcagcaaaaaccactgcaaggccagtgctgtaatattttgtctaaattgttggctgcttttgatggaaacacctctgctgaaaccctgcaagtgcttggcagacagcttcaggtagtagttccaaaattaattttttcctgcctaattaatgagaaagaagaaagaagtggtactgaagattcatcaagagttctttctttactccatcaattgacagtggagattgatcctctgctttatgattacataagagagttagaaccacttcctgatcttgattgcttgaaagatgtacaggagtttcatgcttcactttctgcctcacattcttcaaggaatcagttcttaaagtttgttaataaggctccttatttaccaccagaactatttttgttgagtcttcgtgcgtatcacaaaaagttatttttgggagaaatcattcgtagaagtgacctatctgcggctgatacaaacatggttagctgctggcatagtgacccagatgtcatttctgctgtatgggctcttgttgacatttgtagctcatcatctgtagcaaatgaagcttcttgggtgcttgctgattttatctctagggctggtatatctgatgcacatcaagtaatattccgtctgccaactaccaccgaaaattattctttacaactacatactggttctgcttccaaggaggataaattatccacaaactatggtatttctgatgatgttctggttgggcttttgaaactcttgaagacttatttatctgatgaatctgttgaaataatagatgctgcttcacaaacactgaggggtattctgtcaacagcacgggggctcaatgctctgcagtttcttgattctcccgataggtctttactcatggttcattcgagaggggtaaacattcagatagttgaacagactatatcacaaatggaacagtgtgctggtgtttcacttgatgatgcagatgtgtgggacactgatggtcgaacttgcaagcaatggctgtgcacccttgtcagctcacttatttgccactgtgaagataccatcttgagactctgtaggagtattgtttttgtcaaagttaaggctgctgagcttttgctttctagtactctagtgaacattgctggcaatgttgattctaatactgccatctgcaaattaatttcaacaaaggttgagaaaataattttttccgactccaatcattcattgaagtcaatccatctgtttctggatgcactgaatgtcattagatctttttatgttgctgaaaaagccagaactttcccttctaatactctcaaggatggtagatctgctagatcaaaaagtcgatcaccagtgacaaccccatcatcatcatggaagaaggtatactggctttctgttgattatcttgttgctgccagagctgctagtcgatgttcatgtgactttgccatactaatgtatgttgagctttggtgtgaggaacaattcaataggctggtattaggacctccagagttttccaatgaagagttgttgccacctcatgttgatctgttggttgctgcatttactcgtataaatgaaccagacagcatttatgggctcacactatctaatgagatagcgtctcagcttattaggtatgagcatgaaggtgattggagtagcgcacttgaatactatgatttacttgtaaggtcaatgccaaaggaacaccttggcactttaactgggtcggtgttgactggaccatctaccgtgtcttctagagcagaagatacaatgttgaactggaaaatgcacaaaggtcttatgagatccttgcagaaaactggatgtagtcatgtgcttgatgtctactgtgaaggtttatctcaccaaaaggggtgtcttcaacaagacgcggagtttattgatatccaatatgaagctgcttggagggcaggaaattgggatttctcctttttcgttccatattcttcttggtcttcaacccgctctcgaagtagctgtcttttcaatgaaaatttacatagttgcttaagagctctgcagaacggtgattctgaggagttccatgcaaaactttgtcaaactaagatggatcttgtcttggctttgtcaaacactagcaaggagagcacgaaatacatccactctaccatccttaaattacagattctagatcatgctactatggtttgggacctgcgttggaaccttaatcccaatcaaacttcaaaatctcctgtaaccaaggaattttctcacatatctactgtccctaaagggatacagttggagttgttggataaagagtggaacttaattatgttccaagcagaacggaatcttgatctatttgaaccttttctggcatttaggcgtgccctccttaagattttaggttgtgaagaacatcttgtaaaacatttatttcaatctgcttctgcgctccggaagggattaaggttttctttggcagcggcagctttatatgaactcaaagaactttgttttcacagagatgagagcactatgacaaatacctatttgcttgcacggcttgaagacgctaaattgctcagagctcaagggcagcatgatatggctattagtcttggaaaatacatactacagaagctttctgacaagaaaaacctgtcagatgtctatcgattagttggcaagtggctggctgaaacaagatcaagcaactcaagaactatcattgaggactatttaagaccttctatagatctctctgaatttgagaagagtacagataaaaggtacatgtccaggcagtgtcgaacacatttccatctagcacattatacatatagtttgttcagaagctatgaggaaagactctcatctaacgaatggcaagcagctctgcgattaaggaaatacaagactagggagttggagatactgattaaaagactgagaagttcatctaagggtgtgaagactgattactcagtaaaaatccaagagttacagaaacaacttgcacttgacagagaagaagcagagaaaatacaggatgatcacgataatttcttaaatctagcacttcaaggctaccaacgttccattgttgttggtggcaaatatgacctacaagtggtttttcggttggtctcgttgtggtttagtcttttctcaagggatcaagttgtgaaagcaatgttgaaaaccacaaaagaggtccaaacctacaagttcataccactggtttatcaaattgcttcgagacttgggagcaccaaagatgctcaggggtcatttaactttcagattgcgttagcttctcttttgaagaaaatggctgttgatcacccatatcatacaatattccagcttttggctctagcaaatggtgatcgtgtcaaagacaagcaaagaagtagaagttcttttgttgtagatatggagaagaagcttgctgctgaaaatttgttaaaggagctatcttcctgtcatggacctctgatttgtcagatgaaacaaatggttgagatctacattaagttagcagaactggagaccaagaaggaggacactaacaaaaaaattccgctgcccagggaggcccgcagcattggtcagcttgaactagttccagttgtgactgctaccgttcctattgatcctagctgtcgttatgaggaaggctcctttccacatttcactgggttggctgactccattatgatcatgaatggaattaatgctcccaaagttatagaatgttttggctcggatggtaacaaataccgtcaacttgcaaaatctggaaatgatgacctgcgacaggatgctgtgatggagcaattttttagtttggtaaatacattcttgcaaaatcaccgagatacttctaaaaggagattgaaaatccgtacatataaggttgttcctttcaccccaagtgctggtgttgttgaatgggtaaacggtactgttccactaggcgattatctaattgggagtactagaagtggtggagcacatggacgatatggaattggggactggacatatcttcaatgcagagagtacctgatgagtgaaaaggacaaaaggagggcatttcttaaaatctgcagcaactttaggcctgtgatgcaccacttctttcttgaaagattcttgctgcctgctgattggttccaaagtagacttgcttacacaaggagtgtagcagcaagctcgatggtaggatatatagtcggtcttggggatcgccattccatgaatattctcatcgaccaagacacagctgaggttgtacacattgatcttggtgttgcatttgaacagggtctcatgcttaaaacacctgaacgggttccatttcggttgacaagggatattatagatggcatgggtgttactggtgttgaaggtgtgttcagaagatgttgtgagaaaactctctgtgtcatgagggcgaataaagaagcattgctcactattattgaagtcttcgttcatgatcctctatataaatgggcactctcaccactgaaagccttacagcgtcaaaaggaaacagttgatactgattcatgtttggatgactcccaagaaccttacgatggcaacaaggatgcagctcgagctatacttcgtgttaaacagaagttggatggatatgaagatggcgagatgagaagtgtgcagggccaggtccaacaactcatacaggacgcggtggatgttgatcggttgtgccaaatgtttccaggttggggaccttggttgtaagctccattgaaagggatgtaaattttgatcgaaggcaagagcaacttttttcactgcttatgaggttttattctttggtgtgtttttttccctcaccaccctgtcaacattcctacaaagtacagcaaacggcttttggtaccctgtaaattgatgggaaggcaaggacgacatttgagtgcaggtgggttgtaccactcctgttttagagcatgtccagactagaggatgggtgattgcatagtgaggccacagttttctttttttgttgagcttcattaataccccctctgtctaaaagtcctcatcgtttaagcgtcccgcaccaagaccaaggatgcccctccgcattgcagccgctgtgaagttaattatctggcgccgttttgtattttcaaaacacgcatatgtaatgtcgcaaaaattcagctgcttcgatggttggccggccataggggcggtatccatacatcacaccatcgtgcagcgtacattcagctgcttcgacggttgcataccgtagtttttgttcaggatttactttgtaaagaagtgaggctgttttgtcatgtatgtaaagggcttgtttcgatgtagcatgaaatacgaagaattatgatgcatttgaatataccgtgctcccctgagcaaaaaacaaatcaacagaagctaccacctggccgc

SEQ ID NO: 222406 - DNA, 10480 bp, Zea Mays
atggctggggctatctctcaccacgcgctagcattttcgcaatcccactggtgcagtgcgaagaactctagattcggaaagaggacgggcaatgctcgcctggtttatctaaaaggaagatgtggttcaggcagcaaaaaactgggtttgatgtgggcctcgagctcgcagtcttctgtcatggagccgaggcacctaccatccgatggcaacagcggccacaccccaaagaaatcaagtgaaagcgctcttatattgattcggcatggtgaatccctgtggaacgagaaaaatctgtttactggctgcgccgatgtacccctgacaccgaagggtgttgaggaggccattgaggcaggtaaaaggatatgcaatatcccaatcgatgtgatatatatttcatcactgattcgtgctcagatgactgcaatgcttgccatgatgcagcatctgcgcaagaaggtttgtgtctttcctttgaaattccagtatggtgagctacaaggccttaataagcaagaaactgcagatcgatttggcaaagaacaagttcatgagtggcgcaacagttatgatattcctccgccaaatggagaaagtctagagaagtgtgctgagagagctgttgcttatttcaaagatcagattgttccacaacttgtggctggaaaacatgtgatggttgctgcacatgggaattcacttcgttcaattataatgcatctggacaaattaacttctcaggaggagggggtgaagctgctggggacatggctgcagggtgaccgcgctgcgtccttctgccgcctcctcggccgcaacaccgtcaggttcaagcccggccacgggaaccttaccggagggcattcactacatttgctctcagttgctaagcaactttttgttcatatttgggaggtcataaaagatggccctagccttcagttagagtacagcataatccttagacagcttctaaatgtgaaggagtaccgctatcagatgaaacctcgaacatatagcaattttgtatcactctacatgaagaaggttgctagtgcttttgatgcaaaattcagcaatcaggcgagctccaaggatgaatccttccgctgtacattgacacttcatgttctacttgaaaacccaccaagtgattaccctgatattatgcgggaggagagtttgttcataacctacgtgaaagttcagctgaagattgccaggaatattccagagattttggaaaaacttattgatgtcatcattaaggaactagacaaaaatgttaacactggacctggacttctatggtgtgaggcaccaagagatgagaaagctgtgtccttaaggtgtttccaagaggaatggatggatctctctgctactgttttttatctggcctgcaaatgcacaacaaagacagcaaacagggagaaaaggatgaagaaagaacacattatgaaccttatcgttgatggcctttttagaggatctttgttttggagtggttctgtttgttttctgattcacaagtatggatatcatctagagaaatctttgctaattagttggtttgaagcaagttgcaaagctttgagaagtatcttgatccatgcaaatgccatacgttttcaggattcactactctggcttctcaggacattcaaggagttctccacagtgctcatgcttgacactagggataaagtgcaattttgtttaacaaaaggcgagatgtcaattgttgaagattgttggcaagccatatggaattcccttgttcacgcatttccgttgttaagcagcatagatctagttgctgattcagctctgattttgctgggtggaatgatcatgcgggaccaagttcatacatcatttctatcagaagatacatggaacctgcaaatatttaaaaaatttccatcgccgtctgctctgtattttgttgcctgttacttctcgaggataggctttcagggtgacttatccaattctatctttgttcggaagactctgctaaggtcaactttggagttaattcattcaaaggaattctctcttttgaatgaacaaaatgttgttatcattcctgaagctattttctcgctgtgtgctggcttttcatcaccagtaattaattcatcggatatattgcaactgtttggtcattgtaaaattcattccaagatgtctcttgaggatgataactgggttcttaaagatgaactaccctactctgtggaagctttgtcagaaatcactctggatacttgtaccaaggttatgtctcataaatgccaccttatacatcttccggggactatccagcaaccaatgctcctagagctcatggaattcatgaaaggatttgtggcttcaaatgagcagtttgagaaagtggacttgaataatcttgttcttgtttgttctcttctctgcaatctgattcattgtgcattgttgtcaaggaccatggaagaaaaatcttcacttttgcaagaaacagtagattatgtcaccaatattttaaaacatattgtgtcatttgttgtgaagaagaatgatgaactttctcatggtcttactaacataagttcagcattggatacaatgggctctgctttctcctcaatcaagagcttactgtcttctccaatatttaatctgtcaagagttgataatggagtttgttctgttgttatcaaaagcattactgaattacttgatgaactcttggtggcaatttctcagctgttttgtcagatctctagtttagtgagcaattttgatgcagagagtactggtaaaatgctaccaacatctagtatcaatttagaggacctaaatcctgttttggactgtaaaagtagtgttgctgatatggatcttgatgtgatggactctagtgaagtagattctgtcacagctagtgcgagtggaagtatgggtagcttcttacgacctttggaatggaagctagatctagtttgcattatttcaacttttttctcagtttcatcacttcatacatgggaaattttgtacagcttggtggataaagaaggtgacgtgaaggttcgccaggccatcttgcttaacctttgcagaaacatctccgcgtcatctaaaactgtatctttagtggtccattttatagttgatatgagggacagaggtgcaagttcattacttggacctgcagagtgcttaactcacatacatgctttattaaaagcgttgatagctatccatggtggacagaatgctgatggaaagcaaccaggacgcgaagtatttttcagtgagaaccaggatatcttatttgacttgttaaatagggctacagacataagttctgtagattggttttctcgcatcaagttcattgattgtgtctcctcctttgtttgcctgttccctgatgttgcccaggatttgatcggatgtttgcttgacatgctgcatgatgctgattaccgtgtcaggttgtatttggctaggcaaatcgtcgtgttattccaaacatgggaagggcacaatgaattatttaatgatgtttgctcaagcattggtgccaagatggtgaagttctcaaatatttctccagttacagctagagaagtcttagctgttggtccacaatctgttctcgtaattgaaactgctctcattacactagctcatttggctgtgcatagcgaggatgttgaagttgagtgtttgttcatgatttctgctgcggctgctatagagccttctcagcgagaattagcttttgcgttatttgattccatttcaaggaggcttggttatgcttcaagaagcaagtatctggaccaagtgatgggcccgattctttttcgatgggttgcttgtgagatgaatctaatttcacttgttgaggtgcaagaaatgtttggttatggatctgctgagccaaacaactttgttgaacattgtagttcatggcttctccctttcctcattctcaggggtgatggtgctgatatgaattggatatcgaagattttatctcaacctttgtcaatcattatcaagagatacttcgttccaatctttggaatgtgcattgctgtcagatgtggcacagggccagagaaggacttagctgaaactgtcttatgtgaatcagttttgcagcttggtgaaatttctgaacttgagcgtgatgatctcattaaaaaacacatggttgcgatcgttgcctttttgctctctgtttcttcatctgctcatgggccacaaattccatatttttccaagaagaatgttgcactttcagtcagaatggttgttgatggatttgtggacacaatgtatatcctcttcgtttcgccctatgtgttctaatggttaaattataattcgcgaaagggcctctagctgagttggttaggtggtctgagtagtactattaggtcttgagttcgaatcccagtgggagcgaattttaggttgaggttaaaaaaaaggtcactagctggttccctggtgtgcacatgagatggactgacctatgtggggcgggtcctcgtgtaggggctcggagggctcaaagcacgggtaaagatctggcctatagggggtggaccttcatgctgcatggagatgagctttcatggcctttctcggtcggggctccgattgagcttcttaatataataccgtggtggcggtctttcccctaccggcccagttacattataattcaatcattattccagtatcaggactgacttttcacatttcagggatgataacttggctgatacagttgttagtgataaagttaatatatttcgtgctgacagagtttttaagttcctgttgtcgatacatcagcaagttgcagatgccagccattccaggcacatgggtcatcgtctttgtgcaattgaggttttaatagatgtacttgggcacagagtggttcttgagagcacttgcttctatattatttctatagtggggaactatattcagcaaaaaccactgcaaggccagtgctgtaatattttgtctaaattgttggctgcttttgatggaaacacctctgctgaaaccctgcaagtgcttggcagacagcttcaggtagtagttccaaaattaattttttcctgcctaattaatgagaaagaagaaagaagtggtactgaagattcatcaagagttctttctttactccatcaattgacagtggagattgatcctctgctttatgattacataagagagttagaaccacttcctgatcttgattgcttgaaagatgtacaggagtttcatgcttcactttctgcctcacattcttcaaggaatcagttcttaaagtttgttaataaggctccttatttaccaccagaactatttttgttgagtcttcgtgcgtatcacaaaaagttatttttgggagaaatcattcgtagaagtgacctatctgcggctgatacaaacatggttagctgctggcatagtgacccagatgtcatttctgctgtatgggctcttgttgacatttgtagctcatcatctgtagcaaatgaagcttcttgggtgcttgctgattttatctctagggctggtatatctgatgcacatcaagtaatattccgtctgccaactaccaccgaaaattattctttacaactacatactggttctgcttccaaggaggataaattatccacaaactatggtatttctgatgatgttctggttgggcttttgaaactcttgaagacttatttatctgatgaatctgttgaaataatagatgctgcttcacaaacactgaggggtattctgtcaacagcacgggggctcaatgctctgcagtttcttgattctcccgataggtctttactcatggttcattcgagaggggtaaacattcagatagttgaacagactatatcacaaatggaacagtgtgctggtgtttcacttgatgatgcagatgtgtgggacactgatggtcgaacttgcaagcaatggctgtgcacccttgtcagctcacttatttgccactgtgaagataccatcttgagactctgtaggagtattgtttttgtcaaagttaaggctgctgagcttttgctttctagtactctagtgaacattgctggcaatgttgattctaatactgccatctgcaaattaatttcaacaaaggttgagaaaataattttttccgactccaatcattcattgaagtcaatccatctgtttctggatgcactgaatgtcattagatctttttatgttgctgaaaaagccagaactttcccttctaatactctcaaggatggtagatctgctagatcaaaaagtcgatcaccagtgacaaccccatcatcatcatggaagaaggtatactggctttctgttgattatcttgttgctgccagagctgctagtcgatgttcatgtgactttgccatactaatgtatgttgagctttggtgtgaggaacaattcaataggctggtattaggacctccagagttttccaatgaagagttgttgccacctcatgttgatctgttggttgctgcatttactcgtataaatgaaccagacagcatttatgggctcacactatctaatgagatagcgtctcagcttattaggtatgagcatgaaggtgattggagtagcgcacttgaatactatgatttacttgtaaggtcaatgccaaaggaacaccttggcactttaactgggtcggtgttgactggaccatctaccgtgtcttctagagcagaagatacaatgttgaactggaaaatgcacaaaggtcttatgagatccttgcagaaaactggatgtagtcatgtgcttgatgtctactgtgaaggtttatctcaccaaaaggggtgtcttcaacaagacgcggagtttattgatatccaatatgaagctgcttggagggcaggaaattgggatttctcctttttcgttccatattcttcttggtcttcaacccgctctcgaagtagctgtcttttcaatgaaaatttacataggttgcttaagagctctgcagaacggtgattctgaggagttccatgcaaaactttgtcaaactaagatggatcttgtcttggctttgtcaaacactagcaaggagagcacgaaatacatccactctaccatccttaaattacagattctagatcatgctactatggtttgggacctgcgttggaaccttaatcccaatcaaacttcaaaatctcctgtaaccaaggaattttctcacatatctactgtccctaaagggatacagttggagttgttggataaagagtggaacttaattatgttccaagcagaacggaatcttgatctatttgaaccttttctggcatttaggcgtgccctccttaagattttaggttgtgaagaacatcttgtaaaacatttatttcaatctgcttctgcgctccggaagggattaaggttttctttggcagcggcagctttatatgaactcaaagaactttgttttcacagagatgagagcactatgacaaatacctatttgcttgcacggcttgaagacgctaaattgctcagagctcaagggcagcatgatatggctattagtcttggaaaatacatactacagaagctttctgacaagaaaaacctgtcagatgtctatcgattagttggcaagtggctggctgaaacaagatcaagcaactcaagaactatcattgaggactatttaagaccttctatagatctctctgaatttgagaagagtacagataaaaggtacatgtccaggcagtgtcgaacacatttccatctagcacattatacatatagtttgttcagaagctatgaggaaagactctcatctaacgaatggcaagcagctctgcgattaaggaaatacaagactagggagttggagatactgattaaaagactgagaagttcatctaagggtgtgaagactgattactcagtaaaaatccaagagttacagaaacaacttgcacttgacagagaagaagcagagaaaatacaggatgatcacgataatttcttaaatctagcacttcaaggctaccaacgttccattgttgttggtggcaaatatgacctacaagtggtttttcggttggtctcgttgtggtttagtcttttctcaagggatcaagttgtgaaagcaatgttgaaaaccacaaaagaggtccaaacctacaagttcataccactggtttatcaaattgcttcgagacttgggagcaccaaagatgctcaggggtcatttaactttcagattgcgttagcttctcttttgaagaaaatggctgttgatcacccatatcatacaatattccagcttttggctctagcaaatggtgatcgtgtcaaagacaagcaaagaagtagaagttcttttgttgtagatatggagaagaagcttgctgctgaaaatttgttaaaggagctatcttcctgtcatggacctctgatttgtcagatgaaacaaatggttgagatctacattaagttagcagaactggagaccaagaaggaggacactaacaaaaaaattccgctgcccagggaggcccgcagcattggtcagcttgaactagttccagttgtgactgctaccgttcctattgatcctagctgtcgttatgaggaaggctcctttccacatttcactgggttggctgactccattatgatcatgaatggaattaatgctcccaaagttatagaatgttttggctcggatggtaacaaataccgtcaacttgcaaaatctggaaatgatgacctgcgacaggatgctgtgatggagcaattttttagtttggtaaatacattcttgcaaaatcaccgagatacttctaaaaggagattgaaaatccgtacatataaggttgttcctttcaccccaagtgctggtgttgttgaatgggtaaacggtactgttccactaggcgattatctaattgggagtactagaagtggtggagcacatggacgatatggaattggggactggacatatcttcaatgcagagagtacctgatgagtgaaaaggacaaaaggagggcatttcttaaaatctgcagcaactttaggcctgtgatgcaccacttctttcttgaaagattcttgctgcctgctgattggttccaaagtagacttgcttacacaaggagtgtagcagcaagctcgatggtaggatatatagtcggtcttggggatcgccattccatgaatattctcatcgaccaagacacagctgaggttgtacacattgatcttggtgttgcatttgaacagggtctcatgcttaaaacacctgaacgggttccatttcggttgacaagggatattatagatggcatgggtgttactggtgttgaaggtgtgttcagaagatgttgtgagaaaactctctgtgtcatgagggcgaataaagaagcattgctcactattattgaagtcttcgttcatgatcctctatataaatgggcactctcaccactgaaagccttacagcgtcaaaaggaaacagttgatactgattcatgtttggatgactcccaagaaccttacgatggcaacaaggatgcagctcgagctatacttcgtgttaaacagaagttggatggatatgaagatggcgagatgagaagtgtgcagggccaggtccaacaactcatacaggacgcggtggatgttgatcggttgtgccaaatgtttccaggttggggaccttggttgtaagctccattgaaagggatgtaaattttgatcgaaggcaagagcaacttttttcactgcttatgaggttttattctttggtgtgtttttttccctcaccaccctgtcaacattcctacaaagtacagcaaacggcttttggtaccctgtaaattgatgggaaggcaaggacgacatttgagtgcaggtgggttgtaccactcctgttttagagcatgtccagactagaggatgggtgattgcatagtgaggccacagttttctttttttgttgagcttcattaataccccctctgtctaaaagtcctcatcgtttaagcgtcccgcaccaagaccaaggatgcccctccgcattgcagccgctgtgaagttaattatctggcgccgttttgtattttcaaaacacgcatatgtaatgtcgcaaaaattcagctgcttcgatggttggccggccataggggcggtatccatacatcacaccatcgtgcagcgtacattcagctgcttcgacggttgcataccgtagtttttgttcaggatttactttgtaaagaagtgaggctgttttgtcatgtatgtaaagggcttgtttcgatgtagcatgaaatacgaagaattatgatgcatttgaatataccgtgctcccctgagcaaaaaacaaatcaacagaagctaccacctggccgc

SEQ ID NO: 222407 - DNA, 1581 bp, Zea Mays
tgactacttaaaaccaaaactacatgcattcggctttataggaatggcgttgtcttatggtctgtccctgaacaattcctttgttttctctatccaaaaccagtgccagctatcaaaccagataatctctgtggaaagggtgaaccagtacatggacataccaagtgaagcagcagaggtcattgaagaaaatcgaccatcaccaaactggccccaagttggtagggtggagcttagagatctgaagatcagatacagggaagatgctccccttgtactgcatggaatcacatgcacttttgaaggcggagataagattggtatagtcggccggacaggaagtggaaagacgactttaatcggtgcattgtttcgtcttgttgagccaactggggggaaaataattattgactctgtagatatcaccacaattggcttacatgaccttcgttcacgtttgggtatcattccacaagatccgacactctttcagggaaccataagatataatctagatcctcttgagcaattttcggatcaacagatatgggaggttcttgacaaatgtcagcttcttgaagctgtccaggagaaggaacagggattggactcacttgttgtggaggatggctcgaactggagcatgggtcagaggcagctcttctgtttgggacgtgcactgctaagaagatgccgtgtcttagtcctcgacgaggccactgcatctatagacaatgctaccgatgcgatccttcagaaaacaatcaggacagagttcagagactgcactgtcatcactgtcgctcaccgtatacccactgtcatggactgcagtatggtacttgcactgagcgacgggaaactggtggagtatgacaagcctacgaagctcatggaaaccgaagggtctctcttccgtgacctcgtcaaagagtactggtcgtacgcatcgaatgggaatatctagaagccacctccaaactacgaccgtttgcatgtttccactcgctgcatcctcttgaaaggagatacaagaatctgggcttgcacatccgaagaactattgtatctgaaatcttgagaaaaggcgtcaggcattgtcatgaaatgcttgttgtcaagttttcaccactcgtttttcagcaactttttggtagtttctgttttgggtcattgcttcccttccaggcgctgaataaaagaaaacatgtctccatccccccccccccttcttctcccctccaaaaaaaagtagaggaaatcctcaacatttctttgctcacagtgatactttatgctcataacaaaaattcttaggcttggtgctcaacactattccattcagaatttgtggtgtatgcttacattcgtacaaagctgtagtagggtatatgatgtctgtttttttggggtgcaatcatggcttttcagcaccctcttgttcatgtttgatgtatattcatcggtgtctggagccaagcaatttggtggtaactctgttttttcactgcatgtgcatgctggatgattgtagatccttgcggcttatgtaggtcacaaattggaatggatgaactgaat

SEQ ID NO: 222408 - DNA, 5032 bp, Zea Mays
atggcgggcgtgtgcgggagcccgttctgctccagggaagcttcagctccagctccagcgtcatgtggacgatgggacgaactactcaactcctccacctgcgcgaacaacatcctggcgaccggcgccgctgcgctgctcgccgtcgtcctcgcgctgcagctgctcgtcagggtcgcaaggaacggactacgacacgcgcccgtcgtcgcgctcagctcgccgctgcagcgggccgccgtggcggccaacgcctgcctgggcctggcctacctgggcctcgcggcgtggatgctggggacggacctgacccagcgcgcctccgtctacctcccacaccggtggctggtgagcctggcccaggggctctgcctgctcctcgccggcttcgccttcagcgtcagggcgcagctgctcggagcggcgttcctccgggtctgggcggctctgctggccgcgtacgccgcgttcgtttgctgcacctcggtcgtgcacatggtcgcagacaaggtgctggccgtgaagacgtgcttggatgttctgtccctgcctggtgcgctgctgctccttgtgtacggcattcggcacgccagggaagaagaagaaggagatggtaacggaggaaccgaaagttctttgtataagcctctgaacgccgaggctcacgacgacggtgcggccgactcgcgtgtcaccccgtttgctaaagccggggttttcagcatcatgacgttctggtggctgaaccccatgatgaagaagggttacgagaagcctctcgaggagaaagacatgccgctcctaggcccctcggaccgagcgtacagccagtacctgatgttcttggacaacctgaacaggaagaagcagctgcaggcacacggcaacccgtcggtcttctggaccatcgtctcttctcacaagagcgcgatcttggtctcgggtctcttcgcgttgctcaaagtgctcacgctgtctgcaggcccagtgcttctgaaagccttcatcaatgtctcgcttgggaaaggttccttcaagtacgagggctttgttctggccgcggcaatgttcgctatcaagtgctgtgagtctctgtcccagaggcagtggtactttcgcacccggaggctagggctccaggtgaggtcgctcctgtcggccgccatctacaagaagcagcagaagctgtcgggctcttcgaagctgaagcattcctctggagagatcataaactacgtcaccgtcgacgcctaccggatcggcgagttcccgtactggttccaccagacgtggacgacaagcgtccagctctgcatcgctctggggatcctgtacaatgcggttggtcttgccatgattgcatcgctggtcgtcatcgttctcactgtgatctgcaacgctcctctgtccaagctgcagcacaagtttcagactaggcttatggaagcacagggcgtgaggctgaaggcgatgtcggagtccttgatccacatgaaggtcttaaaactctatgcgtgggagacgcatttcaagaaggtcattgaggggttgagggagattgagatcaagtggctgtcggcgttcaaccttaggaaatccttcaatggtttcgtgttctggacatcaccggttctggtctcggctgcaaccttcctcacatgctatcttctgaaaatccctcttgatgcaagcaatgttttcacgtttgtggccactctgcgccttgttcaagacccaattaggcagatgccggatgtgattggagtcgttatacaggctaaagttgctttcactaggataacgaagtttcttgatgcgcctgagctgagtggacaggccaggaagaaatactgtgtgggagatgaatatcgtatagtgatgaactcttgcagtttttcatgggatgagaacccgtcaaaaccaactctgaagaatataaacttggtggtcaaggctggggagaaggttgcaatatgtggcgaggtaggatcaggaaagtcaacactattggctgcagttcttggagaggttcctaaaacagaaggcatgatccaaatttgtgggaaaacagcatatgtttctcaaaatgcatggatccaaacaggaacggtgcaagacaatattctctttggatcttcaatggacaggcaaaggtaccaagaaacgcttgagaggtgttctttagtaaaagaccttgaaatgcttccatatggagaccatactcaaatcggggagaggggcgtaaatcttagcggtggccagaagcagcgtgttcagcttgctcgtgcattataccaaaatgcagacatttatcttctcgatgaccctttcagcgctgttgatgcccacacagcaactagtctttttaacataagactgtccttttggtgacccatcaagtcgattttttgcctgtatttgattctgttctgttaatgtcagatggtgaaattattcgtgctgcaccttatcaagatttattggcacattgtcaagaatttcagaacctcgtaaatgcccataaagacactattggtgtttcagatcttaacagagtcagatcccatagaacaaatgaaaacaagggatcgattgatattcatggaagcttatacaaagagtctttgaagccatcaccagcagatcagctgatcaagacagaggaaagagaaatgggtgacactggtctcaagccttatatcctttacttgcgccagaataaaggcttcttcaatggctctatgggtattctttgccatgtgattttcgtatgtggccaaatagcacagaattcatggatggctgctaatgtccagaatcctgatgttggtacacttaagttgatttctgtgtacattgcaattggattcatcacagtgttcttcttgctgtttagatcgatagcacttgttgttcttgggatccaaacatcaagatctttattttcccagttactcaactcattgttccgtgcgccaatgtccttttttgattctacccctcttggaaggatacttagccgggtatcttcagatttgagcattgttgatcttgatgttccatttggattgatgcttgctcttggtgccagcataaatgcatatagcaatctgggggtgttggctgttgttacatggcaagttctgttcgtctctgtgccgatgatggttttggcactcaggttgcagaagtactatttagcctcagctaaggaactgatgaggatcaatggcactaccaaatcagctctggctaatcacttgggagagtcggttgcagggtctataacaataagggctttcgaggaagaagatcgtttctttgagaaaaattcggaacttgttgacaagaatgctgcttcatatttctataattttgcagcgactgaatggctgattcaacgcctggaaacaatgagtgctgcagttctttctttttctgccttcatcatggctctcctccctgcaggaacttttagctctggctttataggaatggcgttgtcttatggtctgtccctgaacaattcctttgttttctctatccaaaaccagtgccagctatcaaaccagataatctctgtggaaagggtgaaccagtacatggacataccaagtgaagcagcagaggtcattgaagaaaatcgaccatcaccaaactggccccaagttggtagggtggagcttagagatctgaagatcagatacagggaagatgctccccttgtactgcatggaatcacatgcacttttgaaggcggagataagattggtatagtcggccggacaggaagtggaaagacgactttaatcggtgcattgtttcgtcttgttgagccaactggggggaaaataattattgactctgtagatatcaccacaattggcttacatgaccttcgttcacgtttgggtatcattccacaagatccgacactctttcagggaaccataagatataatctagatcctcttgagcaattttcggatcaacagatatgggaggttcttgacaaatgtcagcttcttgaagctgtccaggagaaggaacagggattggactcacttgttgtggaggatggctcgaactggagcatgggtcagaggcagctcttctgtttgggacgtgcactgctaagaagatgccgtgtcttagtcctcgacgaggccactgcatctatagacaatgctaccgatgcgatccttcagaaaacaatcaggacagagttcagagactgcactgtcatcactgtcgctcaccgtatacccactgtcatggactgcagtatggtacttgcactgagcgacgggaaactggtggagtatgacaagcctacgaagctcatggaaaccgaagggtctctcttccgtgacctcgtcaaagagtactggtcgtacgcatcgaatgggaatatctagaagccacctccaaactacgaccgtttgcatgtttccactcgctgcatcctcttgaaaggagatacaagaatctgggcttgcacatccgaagaactattgtatctgaaatcttgagaaaaggcgtcaggcattgtcatgaaatgcttgttgtcaagttttcaccactcgtttttcagcaactttttggtagtttctgttttgggtcattgcttcccttccaggcgctgaataaaagaaaacatgtctccatccccccccccccttcttctcccctccaaaaaaaagtagaggaaatcctcaacatttctttgctcacagtgatactttatgctcataacaaaaattcttaggcttggtgctcaacactattccattcagaatttgtggtgtatgcttacattcgtacaaagctgtagtagggtatatgatgtctgtttttttggggtgcaatcatggcttttcagcaccctcttgttcatgtttgatgtatattcatcggtgtctggagccaagcaatttggtggtaactctgttttttcactgcatgtgcatgctggatgattgtagatccttgcggcttatgtaggtcacaaattggaatggatgaactgaat

SEQ ID NO: 222409 - DNA, 5324 bp, Zea Mays
ctcgactctatagccactagtcactcagtcaatcatccacctgcgctgccgctggaatttaattaaaaaaaaagagcccgatcgatccagcaaagtgcatcacgccgttcacggcttcaggacatagggagctcccaagttctcctcctcctcctcctccacctcctcctcgtcgtcgtcttctctctcaggtctcagccatcgtatcgtccggacccaccgtatccccagtccgccggcggccgtcgattcattatcccggccgcccgggctgcccgtaagtcaagcggcggcggcggcggcggctaaggtatagccaaggctggagcgaggccggtgcggccgaccatccctgtgtgtgcaccctgcagaaccaacctcacccccgatcaaggtagcaatgactgacggttcttggatggcgggcgtgtgcgggagcccgttctgctccagggaagcttcagctccagctccagcgtcatgtggacgatgggacgaactactcaactcctccacctgcgcgaacaacatcctggcgaccggcgccgctgcgctgctcgccgtcgtcctcgcgctgcagctgctcgtcagggtcgcaaggaacggactacgacacgcgcccgtcgtcgcgctcagctcgccgctgcagcgggccgccgtggcggccaacgcctgcctgggcctggcctacctgggcctcgcggcgtggatgctggggacggacctgacccagcgcgcctccgtctacctcccacaccggtggctggtgagcctggcccaggggctctgcctgctcctcgccggcttcgccttcagcgtcagggcgcagctgctcggagcggcgttcctccgggtctgggcggctctgctggccgcgtacgccgcgttcgtttgctgcacctcggtcgtgcacatggtcgcagacaaggtgctggccgtgaagacgtgcttggatgttctgtccctgcctggtgcgctgctgctccttgtgtacggcattcggcacgccagggaagaagaagaaggagatggtaacggaggaaccgaaagttctttgtataagcctctgaacgccgaggctcacgacgacggtgcggccgactcgcgtgtcaccccgtttgctaaagccggggttttcagcatcatgacgttctggtggctgaaccccatgatgaagaagggttacgagaagcctctcgaggagaaagacatgccgctcctaggcccctcggaccgagcgtacagccagtacctgatgttcttggacaacctgaacaggaagaagcagctgcaggcacacggcaacccgtcggtcttctggaccatcgtctcttctcacaagagcgcgatcttggtctcgggtctcttcgcgttgctcaaagtgctcacgctgtctgcaggcccagtgcttctgaaagccttcatcaatgtctcgcttgggaaaggttccttcaagtacgagggctttgttctggccgcggcaatgttcgctatcaagtgctgtgagtctctgtcccagaggcagtggtactttcgcacccggaggctagggctccaggtgaggtcgctcctgtcggccgccatctacaagaagcagcagaagctgtcgggctcttcgaagctgaagcattcctctggagagatcataaactacgtcaccgtcgacgcctaccggatcggcgagttcccgtactggttccaccagacgtggacgacaagcgtccagctctgcatcgctctggggatcctgtacaatgcggttggtcttgccatgattgcatcgctggtcgtcatcgttctcactgtgatctgcaacgctcctctgtccaagctgcagcacaagtttcagactaggcttatggaagcacagggcgtgaggctgaaggcgatgtcggagtccttgatccacatgaaggtcttaaaactctatgcgtgggagacgcatttcaagaaggtcattgaggggttgagggagattgagatcaagtggctgtcggcgttcaaccttaggaaatccttcaatggtttcgtgttctggacatcaccggttctggtctcggctgcaaccttcctcacatgctatcttctgaaaatccctcttgatgcaagcaatgttttcacgtttgtggccactctgcgccttgttcaagacccaattaggcagatgccggatgtgattggagtcgttatacaggctaaagttgctttcactaggataacgaagtttcttgatgcgcctgagctgagtggacaggccaggaagaaatactgtgtgggagatgaatatcgtatagtgatgaactcttgcagtttttcatgggatgagaacccgtcaaaaccaactctgaagaatataaacttggtggtcaaggctggggagaaggttgcaatatgtggcgaggtaggatcaggaaagtcaacactattggctgcagttcttggagaggttcctaaaacagaaggcatgatccaaatttgtgggaaaacagcatatgtttctcaaaatgcatggatccaaacaggaacggtgcaagacaatattctctttggatcttcaatggacaggcaaaggtaccaagaaacgcttgagaggtgttctttagtaaaagaccttgaaatgcttccatatggagaccatactcaaatcggggagaggggcgtaaatcttagcggtggccagaagcagcgtgttcagcttgctcgtgcattataccaaaatgcagacatttatcttctcgatgaccctttcagcgctgttgatgcccacacagcaactagtctttttaacgaatatgtcatgggagctctgtcagataagactgtccttttggtgacccatcaagtcgattttttgcctgtatttgattctgttctgttaatgtcagatggtgaaattattcgtgctgcaccttatcaagatttattggcacattgtcaagaatttcagaacctcgtaaatgcccataaagacactattggtgtttcagatcttaacagagtcagatcccatagaacaaatgaaaacaagggatcgattgatattcatggaagcttatacaaagagtctttgaagccatcaccagcagatcagctgatcaagacagaggaaagagaaatgggtgacactggtctcaagccttatatcctttacttgcgccagaataaaggcttcttcaatggctctatggatcgatagcacttgttgttcttgggatccaaacatcaagatctttattttcccagttactcaactcattgttccgtgcgccaatgtccttttttgattctacccctcttggaaggatacttagccgggtatcttcagatttgagcattgttgatcttgatgttccatttggattgatgcttgctcttggtgccagcataaatgcatatagcaatctgggggtgttggctgttgttacatggcaagttctgttcgtctctgtgccgatgatggttttggcactcaggttgcagaagtactatttagcctcagctaaggaactgatgaggatcaatggcactaccaaatcagctctggctaatcacttgggagagtcggttgcagggtctataacaataagggctttcgaggaagaagatcgtttctttgagaaaaattcggaacttgttgacaagaatgctgcttcatatttctataattttgcagcgactgaatggctgattcaacgcctggaaacaatgagtgctgcagttctttctttttctgccttcatcatggctctcctccctgcaggaacttttagctctggctttataggaatggcgttgtcttatggtctgtccctgaacaattcctttgttttctctatccaaaaccagtgccagctatcaaaccagataatctctgtggaaagggtgaaccagtacatggacataccaagtgaagcagcagaggtcattgaagaaaatcgaccatcaccaaactggccccaagttggtagggtggagcttagagatctgaagatcagatacagggaagatgctccccttgtactgcatggaatcacatgcacttttgaaggcggagataagattggtatagtcggccggacaggaagtggaaagacgactttaatcggtgcattgtttcgtcttgttgagccaactggggggaaaataattattgactctgtagatatcaccacaattggcttacatgaccttcgttcacgtttgggtatcattccacaagatccgacactctttcagggaaccataagatataatctagatcctcttgagcaattttcggatcaacagatatgggaggttcttgacaaatgtcagcttcttgaagctgtccaggagaaggaacagggattggactcacttgttgtggaggatggctcgaactggagcatgggtcagaggcagctcttctgtttgggacgtgcactgctaagaagatgccgtgtcttagtcctcgacgaggccactgcatctatagacaatgctaccgatgcgatccttcagaaaacaatcaggacagagttcagagactgcactgtcatcactgtcgctcaccgtatacccactgtcatggactgcagtatggtacttgcactgagcgacgggaaactggtggagtatgacaagcctacgaagctcatggaaaccgaagggtctctcttccgtgacctcgtcaaagagtactggtcgtacgcatcgaatgggaatatctagaagccacctccaaactacgaccgtttgcatgtttccactcgctgcatcctcttgaaaggagatacaagaatctgggcttgcacatccgaagaactattgtatctgaaatcttgagaaaaggcgtcaggcattgtcatgaaatgcttgttgtcaagttttcaccactcgtttttcagcaactttttggtagtttctgttttgggtcattgcttcccttccaggcgctgaataaaagaaaacatgtctccatccccccccccccttcttctcccctccaaaaaaaagtagaggaaatcctcaacatttctttgctcacagtgatactttatgctcataacaaaaattcttaggcttggtgctcaacactattccattcagaatttgtggtgtatgcttacattcgtacaaagctgtagtagggtatatgatgtctgtttttttggggtgcaatcatggcttttcagcaccctcttgttcatgtttgatgtatattcatcggtgtctggagccaagcaatttggtggtaactctgttttttcactgcatgtgcatgctggatgattgtagatccttgcggcttatgtaggtcacaaattggaatggatgaactgaat

SEQ ID NO: 222410 - DNA, 802 bp, Zea Mays
cacaaattccgcctcctccaagcattttcaaattctctttcttctttctcctcccaataaacacacccacccggtcgctccgctccaccgttccgccctcgaccgcgcgcggagcctcctcaacccttcagacctccgcctcccaccgcttccgtagcctcgcctcgcctcgcctcgcctcgtccttctcctccgtcccaaccatgagggagatcctgcacatccagggcgggcagtgcgggaaccagatcggtgccaagttctgggaggtgatctgcgacgagcacggcatcgaccacacgggcaagtacgccggcgactccgacctccagctcgagcgcatcaacgtctactacaatgaggccggcgggggccggttcgtcccgcgcgccgtgctcatggacctcgagcccggcaccatggactccgtgcgctccggcccctacggccagatcttccgccccgacaacttcgtcttcggccagtccggcgccggcaacaactgggccaagggccactacaccgagggcgccgagctcatcgactccgtgcttgacgtcgtccgcaaggaggccgagaactgcgactgcctccaaggagggagatgaggtggctgcctgatccaccggcacattgtggggttgtgcacattgtggggttgtgttattattgttgctcttcatctggtgtttaaaatgttactgtgatgctgctgcgaaactgacgtaagttttaactgtggaattgattacttctagatcgtggatttgtcgatctgatattagatgtattctatatcttg

SEQ ID NO: 222411 - DNA, 1786 bp, Zea Mays
cttttctccacctcccacgcgccaaatgacccttctgccctcccgggatctccatcttctccccccttccccttccggtataaacccaccgacgacgcgacgggactcccccctccctccctccctccgcccgttcgttccccaacagcacagcacgaagacactagacagcagccgccgccgccgccgccttcgcccgcgtaaccgggacagcgtacgcgcacggtggatcgcacggtgtgccggcgatgatggcggggaacgaggaccagctgcgggcggtggcggcgcgggccgtcaccgactcgctgcgcgcggccgcgtcccgctgctcggccgccgaccgcgccgcgcgcttccgggactgcgtccgcagcctcgaggccgagaaggccaagatggaggtcttccgccgggagctccccatcagcgtccacctcgtcgccgacgtgatcgactggctcaaggaggagctcgcgcagcaccgccgccgcccgtcggacctcttcgcgccaccagcgccgccgccgccggcaaaggacggagccgtcttggcggacgcggacgccaacgacaagcgcagctggatgagctccgtgcagctctggagctgcggtagccacgacgacagcaccgccaacaccaacggcgccgccgccgccgcccacaaggtgtccagcgcgttcgtggcactggccgccagcccgccggcgccgacgctggcgaggccatccggcgacgcggcgggtaagcccggagccagcgccagcgccatgccggtcgcggacctgtccctctcgtccccggcggccgccgcctctccgagcgccgccagcagcgccgtcacggacgcggccggggcgcaccgccggcaacatgcgcagcagaggaaggcgaggaggtgctggtcgcccgggctgcaccgccgcttcgtcgccgccctgcagcggctcggcggcgcgcaagtcgccacgccgaagcagatcagagagctgatgaaggtggacgggctcaccaacgacgaggtcaagagccacctgcaggctgcacacgcggcgcgcgtcgtcggacggcggcgaccagcacgcgggcgggctgtggtcgtcggcgccggagcagcagtacacgacgtcgcagcacagcacgtcgcagtcgcagtcgcagtccgggtcgccgcaggggccgctgcagctggcggtgtcgagcagggccatgtcggccaccgccggggacagctgcgacgccggcgacgaggcccagggcggccggtcggagagctacggctgggagatgccgcagcacgggacgaaggcgtcgtcgtcttgatgatccttgtccttggacgggatcacaattcacaacagtatagaagacggtgcggcgtggggcatggtactgaggacaactgcggaagaggcggcattttttgtacaggcgttgagatgatttcatttttcccccttccttttttttctggtagagggaggaggatgtgatggtgaagatgaactgatctggtgttgttgatcgagagtgaggcatatgagatgagatgttattttttacatcccattgtacaatctggaggctggatcgcgttgttttaacggggatggatcggttttcgcatctacgaaaggagggtgaggattgctagcgttgctgcctgacatgggaatacacgtctgccatctctgctgttcttgcaatctgatgcagattgatccatcctggattcctgtcactgttcatattgctcatgtggttctcttcctgccttctggat

SEQ ID NO: 222412 - DNA, 1687 bp, Zea Mays
cttttctccacctcccacgcgccaaatgacccttctgccctcccgggatctccatcttctccccccttccccttccggtataaacccaccgacgacgcgacgggactcccccctccctccctccctccgcccgttcgttccccaacagcacagcacgaagacactagacagcagccgccgccgccgccgccttcgcccgcgtaaccgggacagcgtacgcgcacggtggatcgcacggtgtgccggcgatgatggcggggaacgaggaccagctgcgggcggtggcggcgcgggccgtcaccgactcgctgcgcgcggccgcgtcccgctgctcggccgccgaccgcgccgcgcgcttccgggactgcgtccgcagcctcgaggccgagaaggccaagatggaggtcttccgccgggagctccccatcagcgtccacctcgtcgccgacgtgatcgactggctcaaggaggagctcgcgcagcaccgccgccgcccgtcggacctcttcgcgccaccagcgccgccgccgccggcaaaggacggagccgtcttggcggacgcggacgccaacgacaagcgcagctggatgagctccgtgcagctctggagctgcggtagccacgacgacagcaccgccaacaccaacggcgccgccgccgccgcccacaaggtgtccagcgcgttcgtggcactggccgccagcccgccggcgccgacgctggcgaggccatccggcgacgcggcgggtaagcccggagccagcgccagcgccatgccggtcgcggacctgtccctctcgtccccggcggccgccgcctctccgagcgccgccagcagcgccgtcacggacgcggccggggcgcaccgccggcaacatgcgcagcagaggaaggcgaggaggtgctggtcgcccgggctgcaccgccgcttcgtcgccgccctgcagcggctcggcggcgcgcaagtcgccacgccgaagcagatcagagagctgatgaaggtggacgggctcaccaacgacgaggtcaagagccacctgcagcacgtcgcagtcgcagtcgcagtccgggtcgccgcaggggccgctgcagctggcggtgtcgagcagggccatgtcggccaccgccggggacagctgcgacgccggcgacgaggcccagggcggccggtcggagagctacggctgggagatgccgcagcacgggacgaaggcgtcgtcgtcttgatgatccttgtccttggacgggatcacaattcacaacagtatagaagacggtgcggcgtggggcatggtactgaggacaactgcggaagaggcggcattttttgtacaggcgttgagatgatttcatttttcccccttccttttttttctggtagagggaggaggatgtgatggtgaagatgaactgatctggtgttgttgatcgagagtgaggcatatgagatgagatgttattttttacatcccattgtacaatctggaggctggatcgcgttgttttaacggggatggatcggttttcgcatctacgaaaggagggtgaggattgctagcgttgctgcctgacatgggaatacacgtctgccatctctgctgttcttgcaatctgatgcagattgatccatcctggattcctgtcactgttcatattgctcatgtggttctcttcctgccttctggat

SEQ ID NO: 222413 - DNA, 2713 bp, Zea Mays
aaaaaacctcatgctcagtcactccccgtctcacaaaacgccgcccttggatgagccaatcttcctctcgcacggcccactccttacccccgtctcacaaaacgccgccgccgccgtcgacagccaactccccgcgcccccaccgcctccgcgcaccgccccacacctgattgcgcgtccagaggtattcagagctctctgctgtgggagcaacgagggcagggatgagggaggtggtgacggtgcaggtcggcggtttcgcgaacttcgtcggctcccacttttggaacttccaggatgagctgctcgggctcgccgacgaccccggcgccgacccggtattcaggaccgccgcgctcgacatggacgtcctgtaccgcgccggcgagacacaccagagcgtcgccagctactgccctcgcttggtatcagtcggttctcgagggtctcttggctcgttaagttcctctggcactctaggttcgagcagtgcagctgcagatgagcccaacatcttcacatggtctggaaaggtaacaaaatcagtagcaaaacctcatgagcgaaacttgttcctacaaagtttatctgaagaagaacagaacccaagctctagcgatggccaaaacaatgctagtgttgaagataaggacctggtcgcaaatctggagaatggagtcaaattttggactgattattcaaaagttcagtatcaccctcagagcttatatgagttgtatggatcatggacagactttgacaggtttgataactatggaactgcaaaggaggtggtttcagaatggtcccaaatggaggaaatgaatgagaggctaaggttctttgttgaagaatgtgaccatatccagggtatccagtttcttgtggatgattctggaggctttgccagtgtagctgcacagtttttggagagtattgttgatgattacacaaatacccctgtaatgctgtattgtgtgcggaatccagactcctatgggtcttccagaaatcagtgtgaaaccatcataagatctttgcatgatgctgtatcgttgtcgaaactttcatactactgcaatctgatggtaccaataggactgccttctttaagttacttgtcacctttgctttctataaaagatgagaagcacttccactccagtgccatttgtgcagcagcaatgcattcattatctattccattcaggctacaacacgtgggcccggcctcagattcagcgcattcatctggtaagcttgatattggtgagcttgtgcacatattatctgatcaagggaggcagaacatgatcactgcgctggatgtagcaatgcctgccccttctttgacagatagaacagatttgaggaacatacagaggagcttgcattctctgacacctgaaatcagcgacgaggatgaagatccttacgctgttgaatccatggtggttcatggagtcctagatgcaggcgggaaaagggcttccatatctcaggtgaaggaatccatctgttcagcactggaaggcagggcgacgaaacccaagttctcccacctctcggtatcgcggtgccccctcccaatcccgctcccgttcccgtcaatcttcagcagcagtgttggccagcagggcgagatcctcggcaccagccacgcaggagcccggccaaagggtccgcttgccgtcggctcggtgccgatggcagcgcgcctgaggtcgagcagcgccatagcgccattcatcgagaggaggtcggcgagcctccagaggctcggtgtcgccaggggcacgctgggctcgcaggtcctccacgactggggcttcgggagggaggaggtcgaggacatggctgagcacctggcgaagatgttgcgcccgttttacccggaaatggacctgacgtcggattctgatgattaggtttcactgtcattgtgtctcgtattaccggatggtaagcagctgggttttagtctgtgggaactagaaattgtgatgcagatgcagctggcgtgagacgccgtgctgcgatgcattcctctggtctgtgttgaagggatgcagagtactggaaacgagatctgagagagcctgggcgtgtgaccgtgtcattcagcgctccgcatgtgatgcacatgcatttgggcgacgacgcggacgtccgccgccatgggcagttgttgttgtggtaacattgtgcaatgatccagccctgatgcagatgtccagatctgtgctgtacttacctgcaaaccacacagctaatgaaactaaagaacagtctttctggtctgagatgttttctttgttcgttttaacttcgcgagcaccagaactgtaaacctggcattttttctagtatgaaaaaatagcattatttggctcgacaaaccgcattgttcagttggatcttcatatcatcacagccagaacaagagggcaaatgcagcattcttgcatgtgttggggttccctgaaattttgtatggtagtgtcaccgtaattgatctctggaatatgtaatgtaaccccctctgttgtcgtgtgcatgaatttcttcagtctgtgcatcgctcgcacgcatgcacatggtcgcaactcgcaacattctgcgatctgatgttccagacaagctcaagatccagatcagatacccaaccaggccaccttttccaatttatttcctggggacaaaaagagaaaag

SEQ ID NO: 222414 - DNA, 3039 bp, Zea Mays
aaaacctcatgctcagtcactccccgtctcacaaaacgccgcccttggatgagccaatcttcctctcgcacggcccactccttacccccgtctcacaaaacgccgccgccgccgtcgacagccaactccccgcgcccccaccgcctccgcgcaccgccccacacctgattgcgcgtccagaggtattcagagctctctgctgtgggagcaacgagggcagggatgagggaggtggtgacggtgcaggtcggcggtttcgcgaacttcgtcggctcccacttttggaacttccaggatgagctgctcgggctcgccgacgaccccggcgccgacccggtattcaggaccgccgcgctcgacatggacgtcctgtaccgcgccggcgagacacaccagagcgtcgccagctactgccctcgcttggtatcagtcggttctcgagggtctcttggctcgttaagttcctctggcactctaggttcgagcagtgcagctgcagatgagcccaacatcttcacatggtctggaaaggtaacaaaatcagtagcaaaacctcatgagcgaaacttgttcctacaaagtttatctgaagaagaacagaacccaagctctagcgatggccaaaacaatgctagtgttgaagataaggacctggtcgcaaatctggagaatggagtcaaattttggactgattattcaaaagttcagtatcaccctcagagcttatatgagttgtatggatcatggacagactttgacaggtttgataactatggaactgcaaaggaggtggtttcagaatggtcccaaatggaggaaatgaatgagaggctaaggttctttgttgaagaatgtgaccatatccagggtatccagtttcttgtggatgattctggaggctttgccagtgtagctgcacagtttttggagagtattgttgatgattacacaaatacccctgtaatgctgtattgtgtgcggaatccagactcctatgggtcttccagaaatcagtgtgaaaccatcataagatctttgcatgatgctgtatcgttgtcgaaactttcatactactgcaatctgatggtaccaataggactgccttctttaagtatgcttctgattgcttataatcttttacgtagactgccatataacatgtgattctcttatccattctccattgtagcatgttcgtatgtgcagatccttataattctactgaatgtacagtaaactcataattggacttgtgattctttttagtaatttgaggcttcttatagcagtgcttggaccttagttttgcaaatgtttcatttcctgatctttgatcataagctaaataaacattcagatgttgcattcttcacctcaaataactcacacacctactgttggcgaatgcaatgctcattctattataacccagccctatggttacttgtcacctttgctttctataaaagatgagaagcacttccactccagtgccatttgtgcagcagcaatgcattcattatctattccattcaggctacaacacgtgggcccggcctcagattcagcgcattcatctggtaagcttgatattggtgagcttgtgcacatattatctgatcaagggaggcagaacatgatcactgcgctggatgtagcaatgcctgccccttctttgacagatagaacagatttgaggaacatacagaggagcttgcattctctgacacctgaaatcagcgacgaggatgaagatccttacgctgttgaatccatggtggttcatggagtcctagatgcaggcgggaaaagggcttccatatctcaggtgaaggaatccatctgttcagcactggaaggcagggcgacgaaacccaagttctcccacctctcggtatcgcggtgccccctcccaatcccgctcccgttcccgtcaatcttcagcagcagtgttggccagcagggcgagatcctcggcaccagccacgcaggagcccggccaaagggtccgcttgccgtcggctcggtgccgatggcagcgcgcctgaggtcgagcagcgccatagcgccattcatcgagaggaggtcggcgagcctccagaggctcggtgtcgccaggggcacgctgggctcgcaggtcctccacgactggggcttcgggagggaggaggtcgaggacatggctgagcacctggcgaagatgttgcgcccgttttacccggaaatggacctgacgtcggattctgatgattaggtttcactgtcattgtgtctcgtattaccggatggtaagcagctgggttttagtctgtgggaactagaaattgtgatgcagatgcagctggcgtgagacgccgtgctgcgatgcattcctctggtctgtgttgaagggatgcagagtactggaaacgagatctgagagagcctgggcgtgtgaccgtgtcattcagcgctccgcatgtgatgcacatgcatttgggcgacgacgcggacgtccgccgccatgggcagttgttgttgtggtaacattgtgcaatgatccagccctgatgcagatgtccagatctgtgctgtacttacctgcaaaccacacagctaatgaaactaaagaacagtctttctggtctgagatgttttctttgttcgttttaacttcgcgagcaccagaactgtaaacctggcattttttctagtatgaaaaaatagcattatttggctcgacaaaccgcattgttcagttggatcttcatatcatcacagccagaacaagagggcaaatgcagcattcttgcatgtgttggggttccctgaaattttgtatggtagtgtcaccgtaattgatctctggaatatgtaatgtaaccccctctgttgtcgtgtgcatgaatttcttcagtctgtgcatcgctcgcacgcatgcacatggtcgcaactcgcaacattctgcgatctgatgttccagacaagctcaagatccagatcagatacccaaccaggccaccttttccaatttatttcctggggacaaaaagagaaaag

SEQ ID NO: 222415 - DNA, 2696 bp, Zea Mays
ctccccgtctcacaaaacgccgcccttggatgagccaatcttcctctcgcacggcccactccttacccccgtctcacaaaacgccgccgccgccgtcgacagccaactccccgcgcccccaccgcctccgcgcaccgccccacacctgattgcgcgtccagaggtattcagagctctctgctgtgggagcaacgagggcagggatgagggaggtggtgacggtgcaggtcggcggtttcgcgaacttcgtcggctcccacttttggaacttccaggatgagctgctcgggctcgccgacgaccccggcgccgacccggtattcaggaccgccgcgctcgacatggacgtcctgtaccgcgccggcgagacacaccagagcgtcgccagctactgccctcgcttggtatcagtcggttctcgagggtctcttggctcgttaagttcctctggcactctaggttcgagcagtgcagctgcagatgagcccaacatcttcacatggcaagtctggaaaggtaacaaaatcagtagcaaaacctcatgagcgaaacttgttcctacaaagtttatctgaagaagaacagaacccaagctctagcgatggccaaaacaatgctagtgttgaagataaggacctggtcgcaaatctggagaatggagtcaaattttggactgattattcaaaagttcagtatcaccctcagagcttatatgagttgtatggatcatggacagactttgacaggtttgataactatggaactgcaaaggaggtggtttcagaatggtcccaaatggaggaaatgaatgagaggctaaggttctttgttgaagaatgtgaccatatccagggtatccagtttcttgtggatgattctggaggctttgccagtgtagctgcacagtttttggagagtattgttgatgattacacaaatacccctgtaatgctgtattgtgtgcggaatccagactcctatgggtcttccagaaatcagtgtgaaaccatcataagatctttgcatgatgctgtatcgttgtcgaaactttcatactactgcaatctgatggtaccaataggactgccttctttaagttacttgtcacctttgctttctataaaagatgagaagcacttccactccagtgccatttgtgcagcagcaatgcattcattatctattccattcaggctacaacacgtgggcccggcctcagattcagcgcattcatctggtaagcttgatattggtgagcttgtgcacatattatctgatcaagggaggcagaacatgatcactgcgctggatgtagcaatgcctgccccttctttgacagatagaacagatttgaggaacatacagaggagcttgcattctctgacacctgaaatcagcgacgaggatgaagatccttacgctgttgaatccatggtggttcatggagtcctagatgcaggcgggaaaagggcttccatatctcaggtgaaggaatccatctgttcagcactggaaggcagggcgacgaaacccaagttctcccacctctcggtatcgcggtgccccctcccaatcccgctcccgttcccgtcaatcttcagcagcagtgttggccagcagggcgagatcctcggcaccagccacgcaggagcccggccaaagggtccgcttgccgtcggctcggtgccgatggcagcgcgcctgaggtcgagcagcgccatagcgccattcatcgagaggaggtcggcgagcctccagaggctcggtgtcgccaggggcacgctgggctcgcaggtcctccacgactggggcttcgggagggaggaggtcgaggacatggctgagcacctggcgaagatgttgcgcccgttttacccggaaatggacctgacgtcggattctgatgattaggtttcactgtcattgtgtctcgtattaccggatggtaagcagctgggttttagtctgtgggaactagaaattgtgatgcagatgcagctggcgtgagacgccgtgctgcgatgcattcctctggtctgtgttgaagggatgcagagtactggaaacgagatctgagagagcctgggcgtgtgaccgtgtcattcagcgctccgcatgtgatgcacatgcatttgggcgacgacgcggacgtccgccgccatgggcagttgttgttgtggtaacattgtgcaatgatccagccctgatgcagatgtccagatctgtgctgtacttacctgcaaaccacacagctaatgaaactaaagaacagtctttctggtctgagatgttttctttgttcgttttaacttcgcgagcaccagaactgtaaacctggcattttttctagtatgaaaaaatagcattatttggctcgacaaaccgcattgttcagttggatcttcatatcatcacagccagaacaagagggcaaatgcagcattcttgcatgtgttggggttccctgaaattttgtatggtagtgtcaccgtaattgatctctggaatatgtaatgtaaccccctctgttgtcgtgtgcatgaatttcttcagtctgtgcatcgctcgcacgcatgcacatggtcgcaactcgcaacattctgcgatctgatgttccagacaagctcaagatccagatcagatacccaaccaggccaccttttccaatttatttcctggggacaaaaagagaaaag

SEQ ID NO: 222416 - DNA, 2688 bp, Zea Mays
cgtctcacaaaacgccgcccttggatgagccaatcttcctctcgcacggcccactccttacccccgtctcacaaaacgccgccgccgccgtcgacagccaactccccgcgcccccaccgcctccgcgcaccgccccacacctgattgcgcgtccagaggtattcagagctctctgctgtgggagcaacgagggcagggatgagggaggtggtgacggtgcaggtcggcggtttcgcgaacttcgtcggctcccacttttggaacttccaggatgagctgctcgggctcgccgacgaccccggcgccgacccggtattcaggaccgccgcgctcgacatggacgtcctgtaccgcgccggcgagacacaccaggagcgtcgccagctactgccctcgcttggtatcagtcggttctcgagggtctcttggctcgttaagttcctctggcactctaggttcgagcagtgcagctgcagatgagcccaacatcttcacatggtctggaaaggtaacaaaatcagtagcaaaacctcatgagcgaaacttgttcctacaaagtttatctgaagaagaacagaacccaagctctagcgatggccaaaacaatgctagtgttgaagataaggacctggtcgcaaatctggagaatggagtcaaattttggactgattattcaaaagttcagtatcaccctcagagcttatatgagttgtatggatcatggacagactttgacaggtttgataactatggaactgcaaaggaggtggtttcagaatggtcccaaatggaggaaatgaatgagaggctaaggttctttgttgaagaatgtgaccatatccagggtatccagtttcttgtggatgattctggaggctttgccagtgtagctgcacagtttttggagagtattgttgatgattacacaaatacccctgtaatgctgtattgtgtgcggaatccagactcctatgggtcttccagaaatcagtgtgaaaccatcataagatctttgcatgatgctgtatcgttgtcgaaactttcatactactgcaatctgatggtaccaataggactgccttctttaagttacttgtcacctttgctttctataaaagatgagaagcacttccactccagtgccatttgtgcagcagcaatgcattcattatctattccattcaggctacaacacgtgggcccggcctcagattcagcgcattcatctggtaagcttgatattggtgagcttgtgcacatattatctgatcaagggaggcagaacatgatcactgcgctggatgtagcaatgcctgccccttctttgacagatagaacagatttgaggaacatacagaggagcttgcattctctgacacctgaaatcagcgacgaggatgaagatccttacgctgttgaatccatggtggttcatggagtcctagatgcaggcgggaaaagggcttccatatctcaggtgaaggaatccatctgttcagcactggaaggcagggcgacgaaacccaagttctcccacctctcggtatcgcggtgccccctcccaatcccgctcccgttcccgtcaatcttcagcagcagtgttggccagcagggcgagatcctcggcaccagccacgcaggagcccggccaaagggtccgcttgccgtcggctcggtgccgatggcagcgcgcctgaggtcgagcagcgccatagcgccattcatcgagaggaggtcggcgagcctccagaggctcggtgtcgccaggggcacgctgggctcgcaggtcctccacgactggggcttcgggagggaggaggtcgaggacatggctgagcacctggcgaagatgttgcgcccgttttacccggaaatggacctgacgtcggattctgatgattaggtttcactgtcattgtgtctcgtattaccggatggtaagcagctgggttttagtctgtgggaactagaaattgtgatgcagatgcagctggcgtgagacgccgtgctgcgatgcattcctctggtctgtgttgaagggatgcagagtactggaaacgagatctgagagagcctgggcgtgtgaccgtgtcattcagcgctccgcatgtgatgcacatgcatttgggcgacgacgcggacgtccgccgccatgggcagttgttgttgtggtaacattgtgcaatgatccagccctgatgcagatgtccagatctgtgctgtacttacctgcaaaccacacagctaatgaaactaaagaacagtctttctggtctgagatgttttctttgttcgttttaacttcgcgagcaccagaactgtaaacctggcattttttctagtatgaaaaaatagcattatttggctcgacaaaccgcattgttcagttggatcttcatatcatcacagccagaacaagagggcaaatgcagcattcttgcatgtgttggggttccctgaaattttgtatggtagtgtcaccgtaattgatctctggaatatgtaatgtaaccccctctgttgtcgtgtgcatgaatttcttcagtctgtgcatcgctcgcacgcatgcacatggtcgcaactcgcaacattctgcgatctgatgttccagacaagctcaagatccagatcagatacccaaccaggccaccttttccaatttatttcctggggacaaaaagagaaaag

SEQ ID NO: 222417 - DNA, 2828 bp, Zea Mays
agggcagggatgagggaggtggtgacggtgcaggtcggcggtttcgcgaacttcgtcggctcccacttttggaacttccaggatgagctgctcgggctcgccgacgaccccggcgccgacccggtattcaggaccgccgcgctcgacatggacgtcctgtaccgcgccggcgagacacaccagagcgtcgccagctactgccctcgcttggtatcagtcggttctcgagagggtctcttggctcgttaagttcctctggcactctaggttcgagcagtgcagctgcagatgagcccaacatcttcacatggtctggaaaggtaacaaaatcagtagcaaaacctcatgagcgaaacttgttcctacaaagtttatctgaagaagaacagaacccaagctctagcgatggccaaaacaatgctagtgttgaagataaggacctggtcgcaaatctggagaatggagtcaaattttggactgattattcaaaagttcagtatcaccctcagagcttatatgagttgtatggatcatggacagactttgacaggtttgataactatggaactgcaaaggaggtggtttcagaatggtcccaaatggaggaaatgaatgagaggctaaggttctttgttgaagaatgtgaccatatccagggtatccagtttcttgtggatgattctggaggctttgccagtgtagctgcacagtttttggagagtattgttgatgattacacaaatacccctgtaatgctgtattgtgtgcggaatccagactcctatgggtcttccagaaatcagtgtgaaaccatcataagatctttgcatgatgctgtatcgttgtcgaaactttcatactactgcaatctgatggtaccaataggactgccttctttaagtatgcttctgattgcttataatcttttacgtagactgccatataacatgtgattctcttatccattctccattgtagcatgttcgtatgtgcagatccttataattctactgaatgtacagtaaactcataattggacttgtgattctttttagtaatttgaggcttcttatagcagtgcttggaccttagttttgcaaatgtttcatttcctgatctttgatcataagctaaataaacattcagatgttgcattcttcacctcaaataactcacacacctactgttggcgaatgcaatgctcattctattataacccagccctatggttacttgtcacctttgctttctataaaagatgagaagcacttccactccagtgccatttgtgcagcagcaatgcattcattatctattccattcaggctacaacacgtgggcccggcctcagattcagcgcattcatctggtaagcttgatattggtgagcttgtgcacatattatctgatcaagggaggcagaacatgatcactgcgctggatgtagcaatgcctgccccttctttgacagatagaacagatttgaggaacatacagaggagcttgcattctctgacacctgaaatcagcgacgaggatgaagatccttacgctgttgaatccatggtggttcatggagtcctagatgcaggcgggaaaagggcttccatatctcaggtgaaggaatccatctgttcagcactggaaggcagggcgacgaaacccaagttctcccacctctcggtatcgcggtgccccctcccaatcccgctcccgttcccgtcaatcttcagcagcagtgttggccagcagggcgagatcctcggcaccagccacgcaggagcccggccaaagggtccgcttgccgtcggctcggtgccgatggcagcgcgcctgaggtcgagcagcgccatagcgccattcatcgagaggaggtcggcgagcctccagaggctcggtgtcgccaggggcacgctgggctcgcaggtcctccacgactggggcttcgggagggaggaggtcgaggacatggctgagcacctggcgaagatgttgcgcccgttttacccggaaatggacctgacgtcggattctgatgattaggtttcactgtcattgtgtctcgtattaccggatggtaagcagctgggttttagtctgtgggaactagaaattgtgatgcagatgcagctggcgtgagacgccgtgctgcgatgcattcctctggtctgtgttgaagggatgcagagtactggaaacgagatctgagagagcctgggcgtgtgaccgtgtcattcagcgctccgcatgtgatgcacatgcatttgggcgacgacgcggacgtccgccgccatgggcagttgttgttgtggtaacattgtgcaatgatccagccctgatgcagatgtccagatctgtgctgtacttacctgcaaaccacacagctaatgaaactaaagaacagtctttctggtctgagatgttttctttgttcgttttaacttcgcgagcaccagaactgtaaacctggcattttttctagtatgaaaaaatagcattatttggctcgacaaaccgcattgttcagttggatcttcatatcatcacagccagaacaagagggcaaatgcagcattcttgcatgtgttggggttccctgaaattttgtatggtagtgtcaccgtaattgatctctggaatatgtaatgtaaccccctctgttgtcgtgtgcatgaatttcttcagtctgtgcatcgctcgcacgcatgcacatggtcgcaactcgcaacattctgcgatctgatgttccagacaagctcaagatccagatcagatacccaaccaggccaccttttccaatttatttcctggggacaaaaagagaaaag

SEQ ID NO: 222418 - DNA, 2283 bp, Zea Mays
cagctactgccctcgcttggtatcagtcggttctcgaggggtctcttggctcgttaagttcctctggcactctaggttcgagcagtgcagctgcagatgagcccaacatcttcacatggtctggaaaggtaacaaaatcagtagcaaaacctcatgagcgaaacttgttcctacaaagtttatctgaagaagaacagaacccaagctctagcgatggccaaaacaatgctagtgttgaagataaggacctggtcgcaaatctggagaatggagtcaaattttggactgattattcaaaagttcagtatcaccctcagagcttatatgagttgtatggatcatggacagactttgacaggtttgataactatggaactgcaaaggaggtggtttcagaatggtcccaaatggaggaaatgaatgagaggctaaggttctttgttgaagaatgtgaccatatccagggtatccagtttcttgtggatgattctggaggctttgccagtgtagctgcacagtttttggagagtattgttgatgattacacaaatacccctgtaatgctgtattgtgtgcggaatccagactcctatgggtcttccagaaatcagtgtgaaaccatcataagatctttgcatgatgctgtatcgttgtcgaaactttcatactactgcaatctgatggttacttgtcacctttgctttctataaaagatgagaagcacttccactccagtgccatttgtgcagcagcaatgcattcattatctattccattcaggctacaacacgtgggcccggcctcagattcagcgcattcatctggtaagcttgatattggtgagcttgtgcacatattatctgatcaagggaggcagaacatgatcactgcgctggatgtagcaatgcctgccccttctttgacagatagaacagatttgaggaacatacagaggagcttgcattctctgacacctgaaatcagcgacgaggatgaagatccttacgctgttgaatccatggtggttcatggagtcctagatgcaggcgggaaaagggcttccatatctcaggtgaaggaatccatctgttcagcactggaaggcagggcgacgaaacccaagttctcccacctctcggtatcgcggtgccccctcccaatcccgctcccgttcccgtcaatcttcagcagcagtgttggccagcagggcgagatcctcggcaccagccacgcaggagcccggccaaagggtccgcttgccgtcggctcggtgccgatggcagcgcgcctgaggtcgagcagcgccatagcgccattcatcgagaggaggtcggcgagcctccagaggctcggtgtcgccaggggcacgctgggctcgcaggtcctccacgactggggcttcgggagggaggaggtcgaggacatggctgagcacctggcgaagatgttgcgcccgttttacccggaaatggacctgacgtcggattctgatgattaggtttcactgtcattgtgtctcgtattaccggatggtaagcagctgggttttagtctgtgggaactagaaattgtgatgcagatgcagctggcgtgagacgccgtgctgcgatgcattcctctggtctgtgttgaagggatgcagagtactggaaacgagatctgagagagcctgggcgtgtgaccgtgtcattcagcgctccgcatgtgatgcacatgcatttgggcgacgacgcggacgtccgccgccatgggcagttgttgttgtggtaacattgtgcaatgatccagccctgatgcagatgtccagatctgtgctgtacttacctgcaaaccacacagctaatgaaactaaagaacagtctttctggtctgagatgttttctttgttcgttttaacttcgcgagcaccagaactgtaaacctggcattttttctagtatgaaaaaatagcattatttggctcgacaaaccgcattgttcagttggatcttcatatcatcacagccagaacaagagggcaaatgcagcattcttgcatgtgttggggttccctgaaattttgtatggtagtgtcaccgtaattgatctctggaatatgtaatgtaaccccctctgttgtcgtgtgcatgaatttcttcagtctgtgcatcgctcgcacgcatgcacatggtcgcaactcgcaacattctgcgatctgatgttccagacaagctcaagatccagatcagatacccaaccaggccaccttttccaatttatttcctggggacaaaaagagaaaag

SEQ ID NO: 222419 - DNA, 2469 bp, Zea Mays
ctgccctcgcttggtatcagtcggttctcgaggggtctcttggctcgttaagttcctctggcactctaggttcgagcagtgcagctgcagatgagcccaacatcttcacatggtctggaaaggtaacaaaatcagtagcaaaacctcatgagcgaaacttgttcctacaaagtttatctgaagaagaacagaacccaagctctagcgatggccaaaacaatgctagtgttgaagataaggacctggtcgcaaatctggagaatggagtcaaattttggactgattattcaaaagttcagtatcaccctcagagcttatatgagttgtatggatcatggacagactttgacaggtttgataactatggaactgcaaaggaggtggtttcagaatggtcccaaatggaggaaatgaatgagaggctaaggttctttgttgaagaatgtgaccatatccagggtatccagtttcttgtggatgattctggaggctttgccagtgtagctgcacagtttttggagagtattgttgatgattacacaaatacccctgtaatgctgtattgtgtgcggaatccagactcctatgggtcttccagaaatcagtgtgaaaccatcataagatctttgcatgatgctgtatcgttgtcgaaactttcatactactgcaatctgatgatgttgcattcttcacctcaaataactcacacacctactgttggcgaatgcaatgctcattctattataacccagccctatggtcagcatgcctatcactgtcacattgtttataccgaattttgtgtaggttttgtgaaagcttgttgatgtgtgttcctctaacattgtttttttactttgactgttcaggttacttgtcacctttgctttctataaaagatgagaagcacttccactccagtgccatttgtgcagcagcaatgcattcattatctattccattcaggctacaacacgtgggcccggcctcagattcagcgcattcatctggtaagcttgatattggtgagcttgtgcacatattatctgatcaagggaggcagaacatgatcactgcgctggatgtagcaatgcctgccccttctttgacagatagaacagatttgaggaacatacagaggagcttgcattctctgacacctgaaatcagcgacgaggatgaagatccttacgctgttgaatccatggtggttcatggagtcctagatgcaggcgggaaaagggcttccatatctcaggtgaaggaatccatctgttcagcactggaaggcagggcgacgaaacccaagttctcccacctctcggtatcgcggtgccccctcccaatcccgctcccgttcccgtcaatcttcagcagcagtgttggccagcagggcgagatcctcggcaccagccacgcaggagcccggccaaagggtccgcttgccgtcggctcggtgccgatggcagcgcgcctgaggtcgagcagcgccatagcgccattcatcgagaggaggtcggcgagcctccagaggctcggtgtcgccaggggcacgctgggctcgcaggtcctccacgactggggcttcgggagggaggaggtcgaggacatggctgagcacctggcgaagatgttgcgcccgttttacccggaaatggacctgacgtcggattctgatgattaggtttcactgtcattgtgtctcgtattaccggatggtaagcagctgggttttagtctgtgggaactagaaattgtgatgcagatgcagctggcgtgagacgccgtgctgcgatgcattcctctggtctgtgttgaagggatgcagagtactggaaacgagatctgagagagcctgggcgtgtgaccgtgtcattcagcgctccgcatgtgatgcacatgcatttgggcgacgacgcggacgtccgccgccatgggcagttgttgttgtggtaacattgtgcaatgatccagccctgatgcagatgtccagatctgtgctgtacttacctgcaaaccacacagctaatgaaactaaagaacagtctttctggtctgagatgttttctttgttcgttttaacttcgcgagcaccagaactgtaaacctggcattttttctagtatgaaaaaatagcattatttggctcgacaaaccgcattgttcagttggatcttcatatcatcacagccagaacaagagggcaaatgcagcattcttgcatgtgttggggttccctgaaattttgtatggtagtgtcaccgtaattgatctctggaatatgtaatgtaaccccctctgttgtcgtgtgcatgaatttcttcagtctgtgcatcgctcgcacgcatgcacatggtcgcaactcgcaacattctgcgatctgatgttccagacaagctcaagatccagatcagatacccaaccaggccaccttttccaatttatttcctggggacaaaaagagaaaag

SEQ ID NO: 222420 - DNA, 894 bp, Zea Mays
atggcctgcgtggtgacagtgaggtatgaggcggagctgacgttgatgcaaaattcatgtgatcaacttgctattgggaaggaaacaacacgtcgtttgggaatgggtactaaatgtaaggatgagtcacttgcttcattgccaattgatgaattgaccgagaaggctgatggctttgctagagtctttccagatctatgttgaatcaattaccatctgtattgtgcttggttttatgcttcttgcgctgatatggaagtttgacttcccaacatttaccgtccagatcattgccatcctcaatgacgaatgccactctgattgttgtatatgccaactgggcatttgctgctattaagggcattggatggggctgggccggtgtcaaatggctctacatcattgtcttctacttcctgctgcgcatcatcaatttcctcatcctgctatacgctgagtaggagggcatggaacctcgtccttatgtatatactaggtgtgtgcccgtacgttgcaacgggagtatgttaggatgagcatcgacacatatttgatcggatattatattttttgggatctggagaaagtttgctcggaagccaaacatgttaagacctgagcatgtgtatgatatgcaaaggctggggctcgaacgcgcttgtatgagtcttgttaatttgcatgtctcgtgcatagtctctcaccatctattcactataatatacaaaatctgtgtctatctatatttattttaagcttctaacggccttccatgattccatcaggttcttgccacttttgttacagccatgttcttggacagagcgagcaaggggtgttaattgtttgttacaaccatcggctgaacgaagtatttgagaagaaactattaat

SEQ ID NO: 222421 - DNA, 1251 bp, Zea Mays
ctcccccacccgccatcgcccaaaaggagcagcgatccatccatcctatcccctgtgccaaaccctagccggctatggagcatcccgccgccacctcctcacctgatccgacgccgtagcacctctccctgtccctgtccccatctccctccgtctccctggccaagcactccacctggaagcaccctgccccgaactgcaccgcagtcgtcgacgctaagcgctggcccacgctctccaaggttgcaagggtgatcaacttgctattgggaaggaaacaacacgtcgtttgggaatgggtactaaatgtaaggatgagtcacttgcttcattgccaattgatgaattgaccgagaaggctgatggctttgctagagtctttccagcttggttttatgcttcttgcgctgatatggaagtttgacttcccaacatttaccgtccagatcattgccatcctcaatgacgccttgagaaaatttcccagggtgattttcatacgctttcctctgccatgtaccttcaagtcagcacaatcaatcagggcccttaacttacacggtctcgcacgctcgcaactgctgctgagtcatccgactctagttccataccttactgttgtatgtggtctttccgcgtctccttacattttatggtgtttgcagaatgccactctgattgttgtatatgccaactgggcatttgctgctattaagggcattggatggggctgggccggtgtcaaatggctctacatcattgtcttctacttcctgctgcgcatcatcaatttcctcatcctgctatacgctgagtaggagggcatggaacctcgtccttatgtatatactaggtgtgtgcccgtacgttgcaacgggagtatgttaggatgagcatcgacacatatttgatcggatattatattttttgggatctggagaaagtttgctcggaagccaaacatgttaagacctgagcatgtgtatgatatgcaaaggctggggctcgaacgcgcttgtatgagtcttgttaatttgcatgtctcgtgcatagtctctcaccatctattcactataatatacaaaatctgtgtctatctatatttattttaagcttctaacggccttccatgattccatcaggttcttgccacttttgttacagccatgttcttggacagagcgagcaaggggtgttaattgtttgttacaaccatcggctgaacgaagtatttgagaagaaactattaat

SEQ ID NO: 222422 - DNA, 1249 bp, Zea Mays
ggggacgtccctcccggcctcccccacccgccatcgcccaaaaggagcagcgatccatccatcctatcccctgtgccaaaccctagccggctatggagcatcccgccgccacctcctcacctgatccgacgccgtagcacctctccctgtccctgtccccatctccctccgtctccctggccaagcactccacctggaagcaccctgccccgaactgcaccgcagtcgtcgacgctaagcgctggcccacgctctccaaggttgcaagggtgatcaacttgctattgggaaggaaacaacacgtcgtttgggaatgggtactaaatgtaaggatgagtcacttgcttcattgccaattgatgaattgaccgagaaggctgatggctttgctagagtctttccagcttggttttatgcttcttgcgctgatatggaagtttgacttcccaacatttaccgtccagatcattgccatcctcaatgacgtacaagcagcatattaggtaaactaacaacatcaacctggcgacatgaataagtaccattgtggctatctcgaaggacatagtaaaaccacctgcacaacctgacagttggaagttatttggtcgtgatgactgtcattttttcttctgggctacgtacaagactgacttcttctcgaatgccactctgattgttgtatatgccaactgggcatttgctgctattaagggcattggatggggctgggccggtgtcaaatggctctacatcattgtcttctacttcctgctgcgcatcatcaatttcctcatcctgctatacgctgagtaggagggcatggaacctcgtccttatgtatatactaggtgtgtgcccgtacgttgcaacgggagtatgttaggatgagcatcgacacatatttgatcggatattatattttttgggatctggagaaagtttgctcggaagccaaacatgttaagacctgagcatgtgtatgatatgcaaaggctggggctcgaacgcgcttgtatgagtcttgttaatttgcatgtctcgtgcatagtctctcaccatctattcactataatatacaaaatctgtgtctatctatatttattttaagcttctaacggccttccatgattccatcaggttcttgccacttttgttacagccatgttcttggacagagcgagcaaggggtgttaattgtttgttacaaccatcggctgaacgaagtatttgagaagaaactattaat

SEQ ID NO: 222423 - DNA, 1282 bp, Zea Mays
ggggacgtccctcccggcctcccccacccgccatcgcccaaaaggagcagcgatccatccatcctatcccctgtgccaaaccctagccggctatggagcatcccgccgccacctcctcacctgatccgacgccgtagcacctctccctgtccctgtccccatctccctccgtctccctggccaagcactccacctggaagcaccctgccccgaactgcaccgcagtcgtcgacgctaagcgctggcccacgctctccaaggttgcaagggtgatcaacttgctattgggaaggaaacaacacgtcgtttgggaatgggtactaaatgtaaggatgagtcacttgcttcattgccaattgatgaattgaccgagaaggctgatggctttgctagagtctttccagatctatgttgaatcaattaccatctgtattgtgcttggttttatgcttcttgcgctgatatggaagtttgacttcccaacatttaccgtccagatcattgccatcctcaatgacgtacaagcagcatattaggtaaactaacaacatcaacctggcgacatgaataagtaccattgtggctatctcgaaggacatagtaaaaccacctgcacaacctgacagttggaagttatttggtcgtgatgactgtcattttttcttctgggctacgtacaagactgacttcttctcgaatgccactctgattgttgtatatgccaactgggcatttgctgctattaagggcattggatggggctgggccggtgtcaaatggctctacatcattgtcttctacttcctgctgcgcatcatcaatttcctcatcctgctatacgctgagtaggagggcatggaacctcgtccttatgtatatactaggtgtgtgcccgtacgttgcaacgggagtatgttaggatgagcatcgacacatatttgatcggatattatattttttgggatctggagaaagtttgctcggaagccaaacatgttaagacctgagcatgtgtatgatatgcaaaggctggggctcgaacgcgcttgtatgagtcttgttaatttgcatgtctcgtgcatagtctctcaccatctattcactataatatacaaaatctgtgtctatctatatttattttaagcttctaacggccttccatgattccatcaggttcttgccacttttgttacagccatgttcttggacagagcgagcaaggggtgttaattgtttgttacaaccatcggctgaacgaagtatttgagaagaaactattaat

SEQ ID NO: 222424 - DNA, 1074 bp, Zea Mays
atggggacgtccctcccggcctcccccacccgccatcgcccaaaaggagcagcgatccatccatcctatcccctgtgccaaaccctagccggctatggagcatcccgccgccacctcctcacctgatccgacgccgtagcacctctccctgtccctgtccccatctccctccgtctccctggccaagcactccacctggaagcaccctgccccgaactgcaccgcagtcgtcgacgctaagcgctggcccacgctctccaaggttgcaagggtgatcaacttgctattgggaaggaaacaacacgtcgtttgggaatgggtactaaatgtaaggatgagtcacttgcttcattgccaattgatgaattgaccgagaaggctgatggctttgctagagtctttccagcttggttttatgcttcttgcgctgatatggaagtttgacttcccaacatttaccgtccagatcattgccatcctcaatgacgaatgccactctgattgttgtatatgccaactgggcatttgctgctattaagggcattggatggggctgggccggtgtcaaatggctctacatcattgtcttctacttcctgctgcgcatcatcaatttcctcatcctgctatacgctgagtaggagggcatggaacctcgtccttatgtatatactaggtgtgtgcccgtacgttgcaacgggagtatgttaggatgagcatcgacacatatttgatcggatattatattttttgggatctggagaaagtttgctcggaagccaaacatgttaagacctgagcatgtgtatgatatgcaaaggctggggctcgaacgcgcttgtatgagtcttgttaatttgcatgtctcgtgcatagtctctcaccatctattcactataatatacaaaatctgtgtctatctatatttattttaagcttctaacggccttccatgattccatcaggttcttgccacttttgttacagccatgttcttggacagagcgagcaaggggtgttaattgtttgttacaaccatcggctgaacgaagtatttgagaagaaactattaat

SEQ ID NO: 222425 - DNA, 1590 bp, Zea Mays
catggggacgtccctcccggcctcccccacccgccatcgcccaaaaggagcagcgatccatccatcctatcccctgtgccaaaccctagccggctatggagcatcccgccgccacctcctcacctgatccgacgccgtagcacctctccctgtccctgtccccatctccctccgtctccctggccaagcactccacctggaagcaccctgccccgaactgcaccgcagtcgtcgacgctaagcgctggcccacgctctccaaggttgcaagggtgatcaacttgctattgggaaggaaacaacacgtcgtttgggaatgggtactaaatgtaaggatgagtcacttgcttcattgccaattgatgaattgaccgagaaggctgatggctttgctagagtctttccagatctatgttgaatcaattaccatctgtattgtgcttggttttatgcttcttgcgctgatatggaagtttgacttcccaacatttaccgtccagatcattgccatcctcaatgacgtacaagcagcatattaggtaaactaacaacatcaacctggcgacatgaataagtaccattgtggctatctcgaaggacatagtaaaaccacctgcacaacctgacagttggaagttatttggtcgtgatgactgtcattttttcttctgggctacgtacaagactgacttcttctcggtatgggccagtggctggtttagcattatttaaagttttgagaaatcatcgtagtgtgcccatccttttcatggttgctaatatacagaaattgttccatgtcgaaagccttgagaaaatttcccagggtgattttcatacgctttcctctgccatgtaccttcaagtcagcacaatcaatcagggcccttaacttacacggtctcgcacgctcgcaactgctgctgagtcatccgactctagttccataccttactgttgtatgtggtctttccgcgtctccttacattttatggtgtttgcagaatgccactctgattgttgtatatgccaactgggcatttgctgctattaagggcattggatggggctgggccggtgtcaaatggctctacatcattgtcttctacttcctgctgcgcatcatcaatttcctcatcctgctatacgctgagtaggagggcatggaacctcgtccttatgtatatactaggtgtgtgcccgtacgttgcaacgggagtatgttaggatgagcatcgacacatatttgatcggatattatattttttgggatctggagaaagtttgctcggaagccaaacatgttaagacctgagcatgtgtatgatatgcaaaggctggggctcgaacgcgcttgtatgagtcttgttaatttgcatgtctcgtgcatagtctctcaccatctattcactataatatacaaaatctgtgtctatctatatttattttaagcttctaacggccttccatgattccatcaggttcttgccacttttgttacagccatgttcttggacagagcgagcaaggggtgttaattgtttgttacaaccatcggctgaacgaagtatttgagaagaaactattaat

SEQ ID NO: 222426 - DNA, 1199 bp, Zea Mays
gaggaggaagcttcagtgaggccctgcactgcagcgggatggcgtcgccgccgccaccacgcgtatgcgtaaccggtggcggcgggtacgtcgcctcatggctcgtcaagctcctgctctcccgcggctacgccgtgcacgccactgtccgcgacccaagtgatcccaagaacgcccacctgcaacagctggacggggcccgggagaggttgcgcctgttcaaggccgacgtgctcgaccgcgacgccctggcgaccgcggtcgtcgcgtgcgagggcgtcttccacgtcgcctcccctgtgcccgcggacaaatccgaggtgctgtctcctgctgtcaagggcactctgaacgtcctccaggcctgctcggcaaacaacgttcagaaagttgtcgtggtttcgtccacggctgccgtttactttaacccgagctggccccaaggtagaaccaaagacgagagttgctggtcagacagagatttatgcattaagaacgagaactggtactgtgctgccaagacgattgctgaagaaactgcagtggagtatggagagaagaacgggctgattgttgtcacggtctgcccttgtatcgttttaggcccactcctgcagccgctgatcaatgccagcagcgaactcctcgtctacattataaaaggaggtcctagggtgctgaaaaacctcccctggaacatagtcgacgtccgtgacgtagctgatgctttgctcctagtatacgagaaagtggaatcatccgggagatacatctgtgcgcctaatcggatcagcacaaacaacatggtgaacttgtttaagaagtcctaccctaactacaattatgtgaactgcgacaacaaggactatgaatctgaaatctcaccagttacatcggagaaacttaagagtctaggctggaacccaaggacaatggagaaaactttgttggacaacattgagtatttcgagaaggcagggtttttgcgtgatggagagggttatccttgtcgtctacctcatatttttcatttcgcttctgactaatgaaatatattctgtaaaacaattacgacaactactataactgtcttcggacaatttatttctcttctctgtcgtgtttgtttttagatgttctgcacacgcttttacagattgaaccggataacaacaagccttcattataacaaaagtggt

SEQ ID NO: 222427 - DNA, 4138 bp, Zea Mays
gtgtgttgccgtcgctactcgcacatcgaggggcgtcgcttgctcgccggccttggaagtgtcgccgcctcggggccccggggacgccaccgcttgcccgcacaagggcactgccgtcgctcgccctctggatcggggagccgccgccgccgacctgggaaccgccgcctctactctggatcgaagaatcgctgccaccgcacgtcgaggtcggggagccactgcacgtcgaggtcggggagccgcggccaccgcagccactggctgatgctccaccaccgcgcaagctatcgggcaaccgccgtcgtcgcacgcgccgtcgctaatgaatcgggatggggcgtaaaaaactgaaccctagcactccggattttcttttatagacgtgtggacctggtccggctcgaccgaattgcactgtctggcctgggcttcctctagttattggaagctcagggctcctaatatacaatctatatatatacttcttaagagaggaccgtaggcgtccacacacctgacgttctgcctcccacagtcccacccgacatcctcgcccagaacgcgtcgctaatctcgcgatcgcgcctcggccgttccgcgcctgcctgccgccgcccgcgattgtagctcaccccgacaccgtgccccctctcccctggcgtgatgcccgcctcccacccccttctccgcaccgcacggatctagcgcgggaactgctcagccacggctccgcacaccctcccttcccatgatacggagctgtcctatcctgctcgcgaggcaacgaaagggtacgtgatcctctgtctacatggaaggtgaggcagatcggggggagagtggctcgtggcagtcgcctcgatggcgtccttcgcgccgtccggcgaggtgtcgtccaagcacggcgtcgtcggctacgggatcgtgggtgggcccaacggcaacgccgtcgcgcccgctgccaagtccaccgtcgtcgagaccaccatcgagagggttatcttcgatttttggttcctggcgctcctccccgccgctcgggaaccactccaccgctgagaccgtcgtaacgatcggctccgttgtggcccgcctgtgaccccgtatccgcttgcgctcagctagggttcagatctaaaaatggctgatgacggtgcgaggaggggaatgcccgctgaaggctgaagctgcccccacgggctacagtaggtgccatcgctcgccacaccgaacaccccactgccctccagaccgtgctccagggccctacggcgataggaggccactgaggatggatcagtgcggtactgctgccttccggaggacgccgagcgccggagagggggctcttctattggacttggagcaagcccacggcaacaacgccggaagcaaaatggcctcttctctagaaggacatgagttcgatccaccgtaaggaggcgtgcccgccaggctccatcttcggatctgatcgcccaccaagtgggttgagttcggatgacgagagtttgcctgcaactgatctaaaggttagagcgagcggcatgtgatgcggataaatgaagtcagcaaggaatacttcttaaaaactgcacaacgaagccctcagacaaacccaagcaactattctttatcaggtcaagtttctggtcagcagactgctcccagtggttctgtgacaggagatgaacagaagggatatccatgggcgcacaccatccctatgagacaagctattgccagcactcgaccacctcaatttcggccttcctcgtctggccaaatgcggagtaatacggcatcacgtgcagcgaccacaaacatcttcaccagtgtttggggcaaatagtattcatgcacgtccatttctgcggccagttggaggtccagctgcaccatttagaccacaaatggcagattccaatccaagagcacacttgattcagggagctgtgaccacaatatctaggagtgtgccaaaacgatccatagtgtctggaaatgcgccagtcaatcaagccttgggatcttcaaaagtcagtgctggcatggaaagccagtcacaacaattgagtgcgcctaagcctttagctgcaacaagcttaagtcagactcaatctcatggcattcaagaagagcctaaaattcaggtatgtattaatttgctattgtgttgctatgttttcttgtacttttagttgcacataaaaatcatttcggacactactgcctgaagttttaatttgtttgataatttgcattatctttcttattaagttatatgaaaccctgaaatttgtttaatggccaatttgatgctgccctatttgaccaccctcaggggaagaaacaactattattcgagagtttgcctgcaaccgatctaaaggttagagcgagcggcatgtgatgcgggtatgtacatagttgttccaaaattcatgtgtttgatgctggattgcctgtagctagctgttcatagtagggattaacgctgaaaaaattgggggaaagcaaagtacactggtgacctcaagttccatcgaatcaatatggcacagcagttagactatttgcttatcttagacctcaaattccatacgttcgacatctatgaatagaaaattttgacactatatctttgaacaattgatctctcaggaatatatgaggtcttggagttgagggatggaggatctgattattttggcaagggtgtttatcttagacctcaaagctcaatctagcatgctcttcgctctgttttactttccatgattcgttgagtatctatgcagtttctgcacgattactatgagtacgtgctttcatatattgtttactcgatgacttgaatagtttacaacgtatgattattgcttaggaccctgcactactaaatcaggggactggcttgagtcagaaaaacttaggaaccaagtttgctctctaagttactgacttcattttctactgtttatagattacgaactgaacttaaatcaaatacttcagtattggtctctagagaggaagctctgccaaccattattaataactgagaagatgttcgcgtacagggagacggtgttggaggaggcacatcagggcatggagctacatgagcactgccgccatatagttgacaacgatgaccaacactgtagattccattctctgtgtgtacaccaaggtatcggtgtctcgtctcggaccatgccctttcccttcccttccttctccgcacacgcagaaccggctgattctctttcttttgctttcctcctcttggcctacgttgatctagcgatgcgcttttcacggttactgcgaccgtgatgggcatctaggtgctcaaaccatcagttgggctgaggaacactgagcagcaacaacaatatcgtaaggagagtgcatatgttggacaaatggtatgccatatcttcagttctcttatgatgcttcagcgctgcatcttcagttttctcggctaaaaagagatcatagtcaatagtatacctatgtgtgaaatactgtcaaacttggtatatggacctcagaaagtataggaaagcgctatgctatttgcatgtttgctgggagaaagaaaagatagatgaaggatgtggacgatgacggagccgagagaggtcattcgaaggcaatgccggaggtgacgacaagggtcataaatagagaagaggtaattgtggatgggttgagggataatgtgttcgccttctcagagaatgttccaggcaccacaaccaagggcatcatggacacagtcctggtcacccagtactttggcaccatgagattggggcctcctcgaagtcatctcgttcatcccccatggtcctggagctgtcaaggatgtctcggcatagataagagatggcttcctgcatgctaatctttagtgagaaaacaaaggattgatatggcccatataggtgagggcattggtactatcatgctatgaaattgttaattatagtcaatatatgatatataaagctagacttgattggtctgtaaaagcatagttcgattgagctataagtgcacttgtgagtgagcctaggtatccaaacctgtcagctcttcatggaaatcctttgggtcagac

SEQ ID NO: 222428 - DNA, 3953 bp, Zea Mays
gtgtgttgccgtcgctactcgcacatcgaggggcgtcgcttgctcgccggccttggaagtgtcgccgcctcggggccccggggacgccaccgcttgcccgcacaagggcactgccgtcgctcgccctctggatcggggagccgccgccgccgacctgggaaccgccgcctctactctggatcgaagaatcgctgccaccgcacgtcgaggtcggggagccactgcacgtcgaggtcggggagccgcggccaccgcagccactggctgatgctccaccaccgcgcaagctatcgggcaaccgccgtcgtcgcacgcgccgtcgctaatgaatcgggatggggcgtaaaaaactgaaccctagcactccggattttcttttatagacgtgtggacctggtccggctcgaccgaattgcactgtctggcctgggcttcctctagttattggaagctcagggctcctaatatacaatctatatatatacttcttaagagaggaccgtaggcgtccacacacctgacgttctgcctcccacagtcccacccgacatcctcgcccagaacgcgtcgctaatctcgcgatcgcgcctcggccgttccgcgcctgcctgccgccgcccgcgattgtagctcaccccgacaccgtgccccctctcccctggcgtgatgcccgcctcccacccccttctccgcaccgcacggatctagcgcgggaactgctcagccacggctccgcacaccctcccttcccatgatacggagctgtcctatcctgctcgcgaggcaacgaaagggtacgtgatcctctgtctacatggaaggtgaggcagatcggggggagagtggctcgtggcagtcgcctcgatggcgtccttcgcgccgtccggcgaggtgtcgtccaagcacggcgtcgtcggctacgggatcgtgggtgggcccaacggcaacgccgtcgcgcccgctgccaagtccaccgtcgtcgagaccaccatcgagaggtttgcatatgcttctagtgtgccacgattgctacttctgcagataaatgaagtcagcaaggaatacttcttaaaaactgtaagtaatattgttggtgataaattgcttaagcaagctgcttcacaatatcaaatgcaggcacaacgaagccctcagacaaacccaagcaactattctttatcaggtcaagtttctggtcagcagactgctcccagtggttctgtgacaggagatgaacagaagggatatccatgggcgcacaccatccctatgagacaagctattgccagcactcgaccacctcaatttcggccttcctcgtctggccaaatgcggagtaatacggtacaaacaatgcagcatcacgtgcagcgaccacaaacatcttcaccagtgtttggggcaaatagtattcatgcacgtccatttctgcggccagttggaggtccagctgcaccatttagaccacaaatggcagattccaatccaagagcacacttgattcagggagctgtgaccacaatatctaggagtgtgccaaaacgatccatagtgtctggaaatgcgccagtcaatcaagccttgggatcttcaaaagtcagtgctggcatggaaagccagtcacaacaattgagtgcgcctaagcctttagctgcaacaagcttaagtcagactcaatctcatggcattcaagaagagcctaaaattcaggggaagaaacaactattattcgagagtttgcctgcaaccgatctaaagtattggtctctagagaggaagctctgccaaccattattaataactgagaagatgttcgcgtacagggagacggtgttggaggaggcacatcagggcatggagctacatgagcactgccgccatatagttgacaacgatgaccaacactgtagattccattctctgtgtgtacaccaagttgggctgaggaacactgagcagcaacaacaatatcgtaaggagagtgcatatgttggacaaatggaggcgacccaacccttggtagcgcccccgttccaacagtggccacccacgggggctgtgctgcccctgcccgggtccacggcctcggtcaccaacccaccgtctccccccatccccggcgcgtctgacattgttgccgcggacgaggtctgcaccatcttcatggatctgcctatagatgtcaaggaaacggagatgcacaacctgttgtgctggctcttaggattcgaggcgtttgagatgaacttcaagggcaaccagcccatgggcttcgcgctcttctccactgtgcaccaggccatcactgcaaaggctatgttccaggtttgtttcaatgcttgttgcggggatgagatgtgaccccaactggcactcgtcatctgcaggatacggtgtttgatactgagactaaggtggtgttgcaaactgatatggccaagaagaacctcttcgtcaagagatgtgagatttgtccacttgtctttcacatgttctctctactatcgctctaacagaatgttagtaccatgagcaagctaacctggattgatggagatgagatagtttgacttaggatgattctagaaattgaattgttttgggattgacggaatacatgcaacaagttcagatcgacgacgacgtcttcacactgcatgttttcttgcttcgccatcaccttcttacagcaccatccatttagctttctctcctcttgcatgaacgactaactgttgaaactggtgcttctaatggatgaggtggattaatctattatatgattattgaggtgtttatggttccatgtcttaataaagtgtcacactcacgttttgtctcattttcttgtgtatatctgttttcatgttcatgttgtccctgcacatatgtttagaataatcatcagcattactaaatctcacttcaagcttggtcttacaggtatgttcccatcatataatcctgcatgatttcactatttgccttggtgtattataaattaattatgttaatattatgacatctacccttgtgatagtactggtctaaattttctaattgcaccaaaactgtatgaagcgaatcagttggatttagtcaaaggtggatttattgcaaatgtgcagtgtgaagaagtatggatttaccctgcttgaattcctcatcctccccttcctatgcctcttgatttggtgtcttcaatccatcttcgcagttcgttcttgcaacaatctcataacccatggtcacaaatccactgacaccaatttgccgtgatgcgcctttatttgctagccaaagattgtttatcccatgcgtttgtggagtgggtggcccgcctcccgttgacgccgctaacaacatagacacaacgacactgcattgtgccctgtgctttttcactctcaccgagcttgctcaacaactggtggctggtgcaggatgtggacgatgacggagccgagagaggtcattcgaaggcaatgccggaggtgacgacaagggtcataaatagagaagaggtaattgtggatgggttgagggataatgtgttcgccttctcagagaatgttccaggcaccacaaccaagggcatcatggacacagtcctggtcacccagtactttggcaccatgagattggggcctcctcgaagtcatctcgttcatcccccatggtcctggagctgtcaaggatgtctcggcatagataagagatggcttcctgcatgctaatctttagtgagaaaacaaaggattgatatggcccatataggtgagggcattggtactatcatgctatgaaattgttaattatagtcaatatatgatatataaagctagacttgattggtctgtaaaagcatagttcgattgagctataagtgcacttgtgagtgagcctaggtatccaaacctgtcagctcttcatggaaatcctttgggtcagac

SEQ ID NO: 222429 - DNA, 4584 bp, Zea Mays
gtgtgttgccgtcgctactcgcacatcgaggggcgtcgcttgctcgccggccttggaagtgtcgccgcctcggggccccggggacgccaccgcttgcccgcacaagggcactgccgtcgctcgccctctggatcggggagccgccgccgccgacctgggaaccgccgcctctactctggatcgaagaatcgctgccaccgcacgtcgaggtcggggagccactgcacgtcgaggtcggggagccgcggccaccgcagccactggctgatgctccaccaccgcgcaagctatcgggcaaccgccgtcgtcgcacgcgccgtcgctaatgaatcgggatggggcgtaaaaaactgaaccctagcactccggattttcttttatagacgtgtggacctggtccggctcgaccgaattgcactgtctggcctgggcttcctctagttattggaagctcagggctcctaatatacaatctatatatatacttcttaagagaggaccgtaggcgtccacacacctgacgttctgcctcccacagtcccacccgacatcctcgcccagaacgcgtcgctaatctcgcgatcgcgcctcggccgttccgcgcctgcctgccgccgcccgcgattgtagctcaccccgacaccgtgccccctctcccctggcgtgatgcccgcctcccacccccttctccgcaccgcacggatctagcgcgggaactgctcagccacggctccgcacaccctcccttcccatgatacggagctgtcctatcctgctcgcgaggcaacgaaagggtacgtgatcctctgtctacatggaaggtgaggcagatcggggggagagtggctcgtggcagtcgcctcgatggcgtccttcgcgccgtccggcgaggtgtcgtccaagcacggcgtcgtcggctacgggatcgtgggtgggcccaacggcaacgccgtcgcgcccgctgccaagtccaccgtcgtcgagaccaccatcgagagggttatcttcgatttttggttcctggcgctcctccccgccgctcgggaaccactccaccgctgagaccgtcgtaacgatcggctccgttgtggcccgcctgtgaccccgtatccgcttgcgctcagctagggttcagatctaaaaatggctgatgacggtgcgaggaggggaatgcccgctgaaggctgaagctgcccccacgggctacagtaggtgccatcgctcgccacaccgaacaccccactgccctccagaccgtgctccagggccctacggcgataggaggccactgaggatggatcagtgcggtactgctgccttccggaggacgccgagcgccggagagggggctcttctattggacttggagcaagcccacggcaacaacgccggaagcaaaatggcctcttctctagaaggacatgagttcgatccaccgtaaggaggcgtgcccgccaggctccatcttcggatctgatcgcccaccaagtgggttgagttcggatgacgagagtttgcctgcaactgatctaaaggttagagcgagcggcatgtgatgcggataaatgaagtcagcaaggaatacttcttaaaaactgtaagtaatattgttggtgataaattgcttaagcaagctgcttcacaatatcaaatgcaggcacaacgaagccctcagacaaacccaagcaactattctttatcaggtcaagtttctggtcagcagactgctcccagtggttctgtgacaggagatgaacagaagggatatccatgggcgcacaccatccctatgagacaagctattgccagcactcgaccacctcaatttcggccttcctcgtctggccaaatgcggagtaatacgggtaatccaccttcacaaaccaatttgcataaggctaataaaatgggaaacatgtcagatgggaaaggggtccatatgttacaaactcatccacccaataactccataccagtacaaacaatgcagcatcacgtgcagcgaccacaaacatcttcaccagtgtttggggcaaatagtattcatgcacgtccatttctgcggccagttggaggtccagctgcaccatttagaccacaaatggcagattccaatccaagagcacacttgattcagggagctgtgaccacaatatctaggagtgtgccaaaacgatccatagtgtctggaaatgcgccagtcaatcaagccttgggatcttcaaaagtcagtgctggcatggaaagccagtcacaacaattgagtgcgcctaagcctttagctgcaacaagcttaagtcagactcaatctcatggcattcaagaagagcctaaaattcaggggaagaaacaactattattcgagagtttgcctgcaaccgatctaaagtattggtctctagagaggaagctctgccaaccattattaataactgagaagatgttcgcgtacagggagacggtgttggaggaggcacatcagggcatggagctacatgagcactgccgccatatagttgacaacgatgaccaacactgtagattccattctctgtgtgtacaccaagttgggctgaggaacactgagcagcaacaacaatatcgtaaggagagtgcatatgttggacaaatggaggcgacccaacccttggtagcgcccccgttccaacagtggccacccacgggggctgtgctgcccctgcccgggtccacggcctcggtcaccaacccaccgtctccccccatccccggcgcgtctgacattgttgccgcggacgaggtctgcaccatcttcatggatctgcctatagatgtcaaggaaacggagatgcacaacctgttgtgctggctcttaggattcgaggcgtttgagatgaacttcaagggcaaccagcccatgggcttcgcgctcttctccactgtgcaccaggccatcactgcaaaggctatgttccaggtttgtttcaatgcttgttgcggggatgagatgtgaccccaactggcactcgtcatctgcaggatacggtgtttgatactgagactaaggtggtgttgcaaactgatatggccaagaagaacctcttcgtcaagagatgtgagatttgtccacttgtctttcacatgttctctctactatcgctctaacagaatgttagtaccatgagcaagctaacctggattgatggagatgagatagtttgacttaggatgattctagaaattgaattgttttgggattgacggaatacatgcaacaagttcagatcgacgacgacgtcttcacactgcatgttttcttgcttcgccatcaccttcttacagcaccatccatttagctttctctcctcttgcatgaacgactaactgttgaaactggtgcttctaatggatgaggtggattaatctattatatgattattgaggtgtttatggttccatgtcttaataaagtgtcacactcacgttttgtctcattttcttgtgtatatctgttttcatgttcatgttgtccctgcacatatgtttagaataatcatcagcattactaaatctcacttcaagcttggtcttacaggtatgttcccatcatataatcctgcatgatttcactatttgccttggtgtattataaattaattatgttaatattatgacatctacccttgtgatagtactggtctaaattttctaattgcaccaaaactgtatgaagcgaatcagttggatttagtcaaaggtggatttattgcaaatgtgcagtgtgaagaagtatggatttaccctgcttgaattcctcatcctccccttcctatgcctcttgatttggtgtcttcaatccatcttcgcagttcgttcttgcaacaatctcataacccatggtcacaaatccactgacaccaatttgccgtgatgcgcctttatttgctagccaaagattgtttatcccatgcgtttgtggagtgggtggcccgcctcccgttgacgccgctaacaacatagacacaacgacactgcattgtgccctgtgctttttcactctcaccgagcttgctcaacaactggtggctggtgcaggatgtggacgatgacggagccgagagaggtcattcgaaggcaatgccggaggtgacgacaagggtcataaatagagaagaggtaattgtggatgggttgagggataatgtgttcgccttctcagagaatgttccaggcaccacaaccaagggcatcatggacacagtcctggtcacccagtactttggcaccatgagattggggcctcctcgaagtcatctcgttcatcccccatggtcctggagctgtcaaggatgtctcggcatagataagagatggcttcctgcatgctaatctttagtgagaaaacaaaggattgatatggcccatataggtgagggcattggtactatcatgctatgaaattgttaattatagtcaatatatgatatataaagctagacttgattggtctgtaaaagcatagttcgattgagctataagtgcacttgtgagtgagcctaggtatccaaacctgtcagctcttcatggaaatcctttgggtcagac

SEQ ID NO: 222430 - DNA, 3369 bp, Zea Mays
gtgtgttgccgtcgctactcgcacatcgaggggcgtcgcttgctcgccggccttggaagtgtcgccgcctcggggccccggggacgccaccgcttgcccgcacaagggcactgccgtcgctcgccctctggatcggggagccgccgccgccgacctgggaaccgccgcctctactctggatcgaagaatcgctgccaccgcacgtcgaggtcggggagccactgcacgtcgaggtcggggagccgcggccaccgcagccactggctgatgctccaccaccgcgcaagctatcgggcaaccgccgtcgtcgcacgcgccgtcgctaatgaatcgggatggggcgtaaaaaactgaaccctagcactccggattttcttttatagacgtgtggacctggtccggctcgaccgaattgcactgtctggcctgggcttcctctagttattggaagctcagggctcctaatatacaatctatatatatacttcttaagagaggaccgtaggcgtccacacacctgacgttctgcctcccacagtcccacccgacatcctcgcccagaacgcgtcgctaatctcgcgatcgcgcctcggccgttccgcgcctgcctgccgccgcccgcgattgtagctcaccccgacaccgtgccccctctcccctggcgtgatgcccgcctcccacccccttctccgcaccgcacggatctagcgcgggaactgctcagccacggctccgcacaccctcccttcccatgatacggagctgtcctatcctgctcgcgaggcaacgaaagggtacgtgatcctctgtctacatggaaggtgaggcagatcggggggagagtggctcgtggcagtcgcctcgatggcgtccttcgcgccgtccggcgaggtgtcgtccaagcacggcgtcgtcggctacgggatcgtgggtgggcccaacggcaacgccgtcgcgcccgctgccaagtccaccgtcgtcgagaccaccatcgagagggttatcttcgatttttggttcctggcgctcctccccgccgctcgggaaccactccaccgctgagaccgtcgtaacgatcggctccgttgtggcccgcctgtgaccccgtatccgcttgcgctcagctagggttcagatctaaaaatggctgatgacggtgcgaggaggggaatgcccgctgaaggctgaagctgcccccacgggctacagtaggtgccatcgctcgccacaccgaacaccccactgccctccagaccgtgctccagggccctacggcgataggaggccactgaggatggatcagtgcggtactgctgccttccggaggacgccgagcgccggagagggggctcttctattggacttggagcaagcccacggcaacaacgccggaagcaaaatggcctcttctctagaaggacatgagttcgatccaccgtaaggaggcgtgcccgccaggctccatcttcggatctgatcgcccaccaagtgggttgagttcgataaatgaagtcagcaaggaatacttcttaaaaactgtaagtaatattgttggtgataaattgcttaagcaagctgcttcacaatatcaaatgcaggcacaacgaagccctcagacaaacccaagcaactattctttatcaggtcaagtttctggtcagcagactgctcccagtggttctgtgacaggagatgaacagaagggatatccatgggcgcacaccatccctatgagacaagctattgccagcactcgaccacctcaatttcggccttcctcgtctggccaaatgcggagtaatacggtacaaacaatgcagcatcacgtgcagcgaccacaaacatcttcaccagtgtttggggcaaatagtattcatgcacgtccatttctgcggccagttggaggtccagctgcaccatttagaccacaaatggcagattccaatccaagagcacacttgattcagggagctgtgaccacaatatctaggagtgtgccaaaacgatccatagtgtctggaaatgcgccagtcaatcaagccttgggatcttcaaaagtcagtgctggcatggaaagccagtcacaacaattgagtgcgcctaagcctttagctgcaacaagcttaagtcagactcaatctcatggcattcaagaagagcctaaaattcaggggaagaaacaactattattcgagagtttgcctgcaaccgatctaaaggttagagcgagcggcatgtgatgcgggtatgtacatagttgttccaaaattcatgtgtttgatgctggattgcctgtagctagctgttcatagtagggattaacgctgaaaaaattgggggaaagcaaagtacactggtgacctcaagttccatcgaatcaatatggcacagcagttagactatttgcttatcttagacctcaaattccatacgttcgacatctatgaatagaaaattttgacactatatctttgaacaattgatctctcaggaatatatgaggtcttggagttgagggatggaggatctgattattttggcaaggattacgaactgaacttaaatcaaatacttcagtattggtctctagagaggaagctctgccaaccattattaataactgagaagatgttcgcgtacagggagacggtgttggaggaggcacatcagggcatggagctacatgagcactgccgccatatagttgacaacgatgaccaacactgtagattccattctctgtgtgtacaccaagcgatgcgcttttcacggttactgcgaccgtgatgggcatctaggtgctcaaaccatcagttgggctgaggaacactgagcagcaacaacaatatcgtaaggagagtgcatatgttggacaaatggtatgccatatcttcagttctcttatgatgcttcagcgctgcatcttcagttttctcggctaaaaagagatcatagtcaatagtatacctatgtgtgaaatactgtcaaacttggtatatggacctcagaaagtataggaaagcgctatgctatttgcatgtttgctgggagaaagaaaagatagatgaaggatgtggacgatgacggagccgagagaggtcattcgaaggcaatgccggaggtgacgacaagggtcataaatagagaagaggttttgctgcaaggaacaagccgcctgttgagggacgtacacaatttgtttgactgaatgacgcaaaatgtgacattgctctgatgttctcggcttctaggtgctcgaagttgaaggatgagagtggcaacctgtgagaaagttgaggctgagaagatacactagatcaagagagccaaaggagtggtagaatccaagtacctgactggcatcggtat

SEQ ID NO: 222431 - DNA, 2847 bp, Zea Mays
gtgtgttgccgtcgctactcgcacatcgaggggcgtcgcttgctcgccggccttggaagtgtcgccgcctcggggccccggggacgccaccgcttgcccgcacaagggcactgccgtcgctcgccctctggatcggggagccgccgccgccgacctgggaaccgccgcctctactctggatcgaagaatcgctgccaccgcacgtcgaggtcggggagccactgcacgtcgaggtcggggagccgcggccaccgcagccactggctgatgctccaccaccgcgcaagctatcgggcaaccgccgtcgtcgcacgcgccgtcgctaatgaatcgggatggggcgtaaaaaactgaaccctagcactccggattttcttttatagacgtgtggacctggtccggctcgaccgaattgcactgtctggcctgggcttcctctagttattggaagctcagggctcctaatatacaatctatatatatacttcttaagagaggaccgtaggcgtccacacacctgacgttctgcctcccacagtcccacccgacatcctcgcccagaacgcgtcgctaatctcgcgatcgcgcctcggccgttccgcgcctgcctgccgccgcccgcgattgtagctcaccccgacaccgtgccccctctcccctggcgtgatgcccgcctcccacccccttctccgcaccgcacggatctagcgcgggaactgctcagccacggctccgcacaccctcccttcccatgatacggagctgtcctatcctgctcgcgaggcaacgaaagggtacgtgatcctctgtctacatggaaggtgaggcagatcggggggagagtggctcgtggcagtcgcctcgatggcgtccttcgcgccgtccggcgaggtgtcgtccaagcacggcgtcgtcggctacgggatcgtgggtgggcccaacggcaacgccgtcgcgcccgctgccaagtccaccgtcgtcgagaccaccatcgagagggttatcttcgatttttggttcctggcgctcctccccgccgctcgggaaccactccaccgctgagaccgtcgtaacgatcggctccgttgtggcccgcctgtgaccccgtatccgcttgcgctcagctagggttcagatctaaaaatggctgatgacggtgcgaggaggggaatgcccgctgaaggctgaagctgcccccacgggctacagtaggtgccatcgctcgccacaccgaacaccccactgccctccagaccgtgctccagggccctacggcgataggaggccactgaggatggatcagtgcggtactgctgccttccggaggacgccgagcgccggagagggggctcttctattggacttggagcaagcccacggcaacaacgccggaagcaaaatggcctcttctctagaaggacatgagttcgatccaccgtaaggaggcgtgcccgccaggctccatcttcggatctgatcgcccaccaagtgggttgagttcgataaatgaagtcagcaaggaatacttcttaaaaactgtaagtaatattgttggtgataaattgcttaagcaagctgcttcacaatatcaaatgcaggcacaacgaagccctcagacaaacccaagcaactattctttatcaggtcaagtttctggtcagcagactgctcccagtggttctgtgacaggagatgaacagaagggatatccatgggcgcacaccatccctatgagacaagctattgccagcactcgaccacctcaatttcggccttcctcgtctggccaaatgcggagtaatacggtacaaacaatgcagcatcacgtgcagcgaccacaaacatcttcaccagtgtttggggcaaatagtattcatgcacgtccatttctgcggccagttggaggtccagctgcaccatttagaccacaaatggcagattccaatccaagagcacacttgattcagggagctgtgaccacaatatctaggagtgtgccaaaacgatccatagtgtctggaaatgcgccagtcaatcaagccttgggatcttcaaaagtcagtgctggcatggaaagccagtcacaacaattgagtgcgcctaagcctttagctgcaacaagcttaagtcagactcaatctcatggcattcaagaagagcctaaaattcaggggaagaaacaactattattcgagagtttgcctgcaaccgatctaaagtattggtctctagagaggaagctctgccaaccattattaataactgagaagatgttcgcgtacagggagacggtgttggaggaggcacatcagggcatggagctacatgagcactgccgccatatagttgacaacgatgaccaacactgtagattccattctctgtgtgtacaccaagcgatgcgcttttcacggttactgcgaccgtgatgggcatctaggtgctcaaaccatcagttgggctgaggaacactgagcagcaacaacaatatcgtaaggagagtgcatatgttggacaaatggtatgccatatcttcagttctcttatgatgcttcagcgctgcatcttcagttttctcggctaaaaagagatcatagtcaatagtatacctatgtgtgaaatactgtcaaacttggtatatggacctcagaaagtataggaaagcgctatgctatttgcatgtttgctgggagaaagaaaagatagatgaaggatgtggacgatgacggagccgagagaggtcattcgaaggcaatgccggaggtgacgacaagggtcataaatagagaagaggttttgctgcaaggaacaagccgcctgttgagggacgtacacaatttgtttgac

SEQ ID NO: 222432 - DNA, 3398 bp, Zea Mays
gtgtgttgccgtcgctactcgcacatcgaggggcgtcgcttgctcgccggccttggaagtgtcgccgcctcggggccccggggacgccaccgcttgcccgcacaagggcactgccgtcgctcgccctctggatcggggagccgccgccgccgacctgggaaccgccgcctctactctggatcgaagaatcgctgccaccgcacgtcgaggtcggggagccactgcacgtcgaggtcggggagccgcggccaccgcagccactggctgatgctccaccaccgcgcaagctatcgggcaaccgccgtcgtcgcacgcgccgtcgctaatgaatcgggatggggcgtaaaaaactgaaccctagcactccggattttcttttatagacgtgtggacctggtccggctcgaccgaattgcactgtctggcctgggcttcctctagttattggaagctcagggctcctaatatacaatctatatatatacttcttaagagaggaccgtaggcgtccacacacctgacgttctgcctcccacagtcccacccgacatcctcgcccagaacgcgtcgctaatctcgcgatcgcgcctcggccgttccgcgcctgcctgccgccgcccgcgattgtagctcaccccgacaccgtgccccctctcccctggcgtgatgcccgcctcccacccccttctccgcaccgcacggatctagcgcgggaactgctcagccacggctccgcacaccctcccttcccatgatacggagctgtcctatcctgctcgcgaggcaacgaaagggtacgtgatcctctgtctacatggaaggtgaggcagatcggggggagagtggctcgtggcagtcgcctcgatggcgtccttcgcgccgtccggcgaggtgtcgtccaagcacggcgtcgtcggctacgggatcgtgggtgggcccaacggcaacgccgtcgcgcccgctgccaagtccaccgtcgtcgagaccaccatcgagagggttatcttcgatttttggttcctggcgctcctccccgccgctcgggaaccactccaccgctgagaccgtcgtaacgatcggctccgttgtggcccgcctgtgaccccgtatccgcttgcgctcagctagggttcagatctaaaaatggctgatgacggtgcgaggaggggaatgcccgctgaaggctgaagctgcccccacgggctacagtaggtgccatcgctcgccacaccgaacaccccactgccctccagaccgtgctccagggccctacggcgataggaggccactgaggatggatcagtgcggtactgctgccttccggaggacgccgagcgccggagagggggctcttctattggacttggagcaagcccacggcaacaacgccggaagcaaaatggcctcttctctagaaggacatgagttcgatccaccgtaaggaggcgtgcccgccaggctccatcttcggatctgatcgcccaccaagtgggttgagttcgataaatgaagtcagcaaggaatacttcttaaaaactgtaagtaatattgttggtgataaattgcttaagcaagctgcttcacaatatcaaatgcaggcacaacgaagccctcagacaaacccaagcaactattctttatcaggtcaagtttctggtcagcagactgctcccagtggttctgtgacaggagatgaacagaagggatatccatgggcgcacaccatccctatgagacaagctattgccagcactcgaccacctcaatttcggccttcctcgtctggccaaatgcggagtaatacggcatcacgtgcagcgaccacaaacatcttcaccagtgtttggggcaaatagtattcatgcacgtccatttctgcggccagttggaggtccagctgcaccatttagaccacaaatggcagattccaatccaagagcacacttgattcagggagctgtgaccacaatatctaggagtgtgccaaaacgatccatagtgtctggaaatgcgccagtcaatcaagccttgggatcttcaaaagtcagtgctggcatggaaagccagtcacaacaattgagtgcgcctaagcctttagctgcaacaagcttaagtcagactcaatctcatggcattcaagaagagcctaaaattcaggggaagaaacaactattattcgagagtttgcctgcaaccgatctaaagtattggtctctagagaggaagctctgccaaccattattaataactgagaagatgttcgcgtacagggagacggtgttggaggaggcacatcagggcatggagctacatgagcactgccgccatatagttgacaacgatgaccaacactgtagattccattctctgtgtgtacaccaagcgatgcgcttttcacggttactgcgaccgtgatgggcatctaggtgctcaaaccatcagttgggctgaggaacactgagcagcaacaacaatatcgtaaggagagtgcatatgttggacaaatggtatgccatatcttcagttctcttatgatgcttcagcgctgcatcttcagttttctcggctaaaaagagatcatagtcaatagtatacctatgtgtgaaatactgtcaaacttggtatatggacctcagaaagtataggaaagcgctatgctatttgcatgtttgctgggagaaagaaaagatagatgaagttttgtgaacaaccctaacttatgtggtcctggcaccacaaaaccttgtcctgatgctcctcccttttctccacctcctccatacaaccctacaaccccgatgcaatcaccaggtgatttattcagattgtccagtgaaatccttgagttcaataggacctttccttccttactctttcatctaaatgacatcctaattgggaaaatgtatacttccaaaacaagcataatgctgtcaaggctggagagcggtaaggaagaactgcacgttttcctgaaaattaagttgaaaataatttgtaatcaggagctagagcgttacatggtactatgattctgtgctgctattagtctgtggcttagcggtatgtgtgttgtactgctgttaatttgctatactggaatactggaatacaataggaagctactatctgtacctcgtgggattcaggaatgcagaacaagtcaataactaccttgtccttttggttttccctaccctacattagtacgagagtgattaagggtatggaacatatggctttgccgttgacatcttttattttggcggagtggctgctggcgcagccttgctatttgctgttcctgctatcagttttgcctattggcagcacaggaaaccacaagagcattttctcaatgtatctgacttcaaagttagtctttgattattatcttt

SEQ ID NO: 222433 - DNA, 1180 bp, Zea Mays
ggcatgtgatgcggataaatgaagtcagcaaggaatacttcttaaaaactgtaagtaatattgttggtgataaattgcttaagcaagctgcttcacaatatcaaatgcaggcacaacgaagccctcagacaaacccaagcaactattctttatcaggtcaagtttctggtcagcagactgctcccagtggttctgtgacaggagatgaacagaagggatatccatgggcgcacaccatccctatgagacaagctattgccagcactcgaccacctcaatttcggccttcctcgtctggccaaatgcggagtaatacggtacaaacaatgcagcatcacgtgcagcgaccacaaacatcttcaccagtgtttggggcaaatagtattcatgcacgtccatttctgcggccagttggaggtccagctgcaccatttagaccacaaatggcagattccaatccaagagcacacttgattcagggagctgtgaccacaatatctaggagtgtgccaaaacgatccatagtgtctggaaatgcgccagtcaatcaagccttgggatcttcaaaagtcagtgctggcatggaaagccagtcacaacaattgagtgcgcctaagcctttagctgcaacaagcttaagtcagactcaatctcatggcattcaagaagagcctaaaattcaggggaagaaacaactattattcgagagtttgcctgcaaccgatctaaagtattggtctctagagaggaagctctgccaaccattattaataactgagaagatgttcgcgtacagggagacggtgttggaggaggcacatcagggcatggagctacatgagcactgccgccatatagttgacaacgatgaccaacactgtagattccattctctgtgtgtacaccaagttgggctgaggaacactgagcagcaacaacaatatcgtaaggagagtgcatatgttggacaaatggtatgccatatcttcagttctcttatgatgcttcagcgctgcatcttcagttttctcggctaaaaagagatcatagtcaatagtatacctatgtgtgaaatactgtcaaacttggtatatggacctcagaaagtataggaaagcgctatgctatttgcatgtttgctgggagaaagaaaagatagatgaaggtaattatacaattt

SEQ ID NO: 222434 - DNA, 2819 bp, Zea Mays
gtgtgttgccgtcgctactcgcacatcgaggggcgtcgcttgctcgccggccttggaagtgtcgccgcctcggggccccggggacgccaccgcttgcccgcacaagggcactgccgtcgctcgccctctggatcggggagccgccgccgccgacctgggaaccgccgcctctactctggatcgaagaatcgctgccaccgcacgtcgaggtcggggagccactgcacgtcgaggtcggggagccgcggccaccgcagccactggctgatgctccaccaccgcgcaagctatcgggcaaccgccgtcgtcgcacgcgccgtcgctaatgaatcgggatggggcgtaaaaaactgaaccctagcactccggattttcttttatagacgtgtggacctggtccggctcgaccgaattgcactgtctggcctgggcttcctctagttattggaagctcagggctcctaatatacaatctatatatatacttcttaagagaggaccgtaggcgtccacacacctgacgttctgcctcccacagtcccacccgacatcctcgcccagaacgcgtcgctaatctcgcgatcgcgcctcggccgttccgcgcctgcctgccgccgcccgcgattgtagctcaccccgacaccgtgccccctctcccctggcgtgatgcccgcctcccacccccttctccgcaccgcacggatctagcgcgggaactgctcagccacggctccgcacaccctcccttcccatgatacggagctgtcctatcctgctcgcgaggcaacgaaagggtacgtgatcctctgtctacatggaaggtgaggcagatcggggggagagtggctcgtggcagtcgcctcgatggcgtccttcgcgccgtccggcgaggtgtcgtccaagcacggcgtcgtcggctacgggatcgtgggtgggcccaacggcaacgccgtcgcgcccgctgccaagtccaccgtcgtcgagaccaccatcgagagggttatcttcgatttttggttcctggcgctcctccccgccgctcgggaaccactccaccgctgagaccgtcgtaacgatcggctccgttgtggcccgcctgtgaccccgtatccgcttgcgctcagctagggttcagatctaaaaatggctgatgacggtgcgaggaggggaatgcccgctgaaggctgaagctgcccccacgggctacagtaggtgccatcgctcgccacaccgaacaccccactgccctccagaccgtgctccagggccctacggcgataggaggccactgaggatggatcagtgcggtactgctgccttccggaggacgccgagcgccggagagggggctcttctattggacttggagcaagcccacggcaacaacgccggaagcaaaatggcctcttctctagaaggacatgagttcgatccaccgtaaggaggcgtgcccgccaggctccatcttcggatctgatcgcccaccaagtgggttgagttcgataaatgaagtcagcaaggaatacttcttaaaaactgtaagtaatattgttggtgataaattgcttaagcaagctgcttcacaatatcaaatgcaggtaaataatatttccacttcattgtgttatatgtaaacataacgtgtcttgccaccatagctttatatttttggtgtgatgcaatcttattagtcattcttaccagcactttttgttttgttttgtgggttatttactcatgtttgctcaggcacaacgaagccctcagacaaacccaagcaactattctttatcaggtcaagtttctggtcagcagactgctcccagtggttctgtgacaggagatgaacagaagggatatccatgggcgcacaccatccctatgagacaagctattgccagcactcgaccacctcaatttcggccttcctcgtctggccaaatgcggagtaatacggtacaaacaatgcagcatcacgtgcagcgaccacaaacatcttcaccagtgtttggggcaaatagtattcatgcacgtccatttctgcggccagttggaggtccagctgcaccatttagaccacaaatggcagattccaatccaagagcacacttgattcagggagctgtgaccacaatatctaggagtgtgccaaaacgatccatagtgtctggaaatgcgccagtcaatcaagccttgggatcttcaaaagtcagtgctggcatggaaagccagtcacaacaattgagtgcgcctaagcctttagctgcaacaagcttaagtcagactcaatctcatggcattcaagaagagcctaaaattcaggggaagaaacaactattattcgagagtttgcctgcaaccgatctaaagtattggtctctagagaggaagctctgccaaccattattaataactgagaagatgttcgcgtacagggagacggtgttggaggaggcacatcagggcatggagctacatgagcactgccgccatatagttgacaacgatgaccaacactgtagattccattctctgtgtgtacaccaagttgggctgaggaacactgagcagcaacaacaatatcgtaaggagagtgcatatgttggacaaatggtatgccatatcttcagttctcttatgatgcttcagcgctgcatcttcagttttctcggctaaaaagagatcatagtcaatagtatacctatgtgtgaaatactgtcaaacttggtatatggacctcagaaagtataggaaagcgctatgctatttgcatgtttgctgggagaaagaaaagatagatgaaggtaattatacaattt

SEQ ID NO: 222435 - DNA, 834 bp, Zea Mays
ggcatgtgatgcggataaatgaagtcagcaaggaatacttcttaaaaactgtaagtaatattgttggtgataaattgcttaagcaagctgcttcacaatatcaaatgcaggtaaataatatttccacttcattgtgttatatgtaaacataacgtgtcttgccaccatagctttatatttttggtgtgatgcaatcttattagtcattcttaccagcactttttgttttgttttgtgggttatttactcatgtttgctcaggcacaacgaagccctcagacaaacccaagcaactattctttatcaggtcaagtttctggtcagcagactgctcccagtggttctgtgacaggagatgaacagaagggatatccatgggcgcacaccatccctatgagacaagctattgccagcactcgaccacctcaatttcggccttcctcgtctggccaaatgcggagtaatacggcatcacgtgcagcgaccacaaacatcttcaccagtgtttggggcaaatagtattcatgcacgtccatttctgcggccagttggaggtccagctgcaccatttagaccacaaatggcagattccaatccaagagcacacttgattcagggagctgtgaccacaatatctaggagtgtgccaaaacgatccatagtgtctggaaatgcgccagtcaatcaagccttgggatcttcaaaagtcagtgctggcatggaaagccagtcacaacaattgagtgcgcctaagcctttagctgcaacaagcttaagtcagactcaatctcatggcattcaagaagagcctaaaattcagattacgaactgaac

SEQ ID NO: 222436 - DNA, 824 bp, Zea Mays
cggatggacccgtcccaccctacttctcctccaccctccgcccagaacccacaacgccgccgcgttcgtctgccactgcctgcccgagccgccgctccccttcctcggtctctcctcgcttcccagtcccagtcctagcccagcgcgccgcggcgctaactggccagctggtagtgatggcaaccgagccgccgccggcagcggagaagaagaaggcgccgctccccaaggtggtcacgctcaataaagccctcaagctggcccagacatgggtggacaaaatgagtgcatcggagccggatgaacccaacgataaggatttcgagggccggccaccaagctcggtcttggtgctaaagcggcacctggtgtgaagcgtgtggttcccactgacccagttgagaggaggttgcttgggaaggtgaatgcgcagaagaggaaggccttggaggatgatgatagaaatgctcaggtggcgaatgaggctagcgacgacgatgagcctgaaagcaggaccagtgcctttaacaagaagaggccagtgccttcagttacttctacacctttagggaagaaggctaagtgacaagctatatgcatagactacctgagtgatctgcttgttttgatcacgtttcgtactaactcccagactgatgctattttcataaggcatagtataccttctcatactccagtttgtgattcctgaatttaaagggatagctgtgcttgatattgttaaggctcattgccgattcagaaattcacatactctctgtttaaagctaaatacactgtgatattcatttgattattttttc

SEQ ID NO: 222437 - DNA, 680 bp, Zea Mays
atggggcacaaattttctgaaggattcagggccaaacagatggccgaggatgttccatcgaatagtggtagaggaatgaatgctgctagcttgcatgatggcttggatgatagtggagaggatgatgagctgaacagggcaaatggtgaggtgcctgctgaggaaatgctctccgatgactattatgagcaggacggagaggagcagattgaatcgttgcatcgtggcgggacgaagcaatcaagctgttccacttctgaagacgaccccgctgatgtggattttgagccagacagcgaaacggacaaagctactgataagatgatgatgatgactttgttgagaaccggaggcaacctaaacgacttaagattgtagcaactaaaacttccaagggaaggaagttgcccatgccagctcaacgaaaacgaggggtgtctcacagcgatgaagaatattcttcaggaaaagattcagatcttcccagtgatgctgatttcaaacacagatcgaaaagacctgacaggttgcatcagaaatctgtgggccgcagtgatgttgccccaatcaattctcataatgagcttcgaacttctggaaggaggacagtgaaaaagatctcatatgttgaaagcgaagaaagtgatgatagcgaggagaagtcaactaaacaacaaaag

SEQ ID NO: 222438 - DNA, 3901 bp, Zea Mays
gcgaggctgcgtctctcgaagtccaaaacgccccgccctggaaccctaaccctacctttcctctcccgccaccgcccgccccaatggcgaagccgatgaagtacgacgatgaggaggagatctcgtcctccgccgaggaggaggaccagtccgacgccgccggctccgtatctggcgaggaaggggatgacgacgacgaggatgctgcggcgccgcccgcggaggaagctgagggcgaggggcagcaggaggaggaggtcgacgaggaagagatcgaagccgtcactaccggcgctggagctgaggacgaggaggacgccggtgccgttaccgccgctgaaggcgacgacgagtcccagtccaccgaggacgacgagcccgtcgcgagggacaaggacgatgacgacgagactgatgcagtggttgggaagcgagagaaagcaaggctaaaagaactccagaagatgaagaaacataaaatccaagaaatattagatactcaaaatgccgccattgatgctgacatgaacaataaagggaagggacggttgaagtaccttcttcagcagacagaaatatttgctcactttgcaaaaggaagtcagtccaacgagaaaaagccacgcgggaggggacgccatgcatcaaagatgactgaagaagaggaagatgaagaatacctcaaagaggaagaagatgcccttgctggtgcagggggaacacgtttagtttcacagccttcatgcatcaagggaaagatgcgtgattatcaattagctggacttaattggcttatacgattgtatgagaatggtatcaatgggatattagctgatgagatgggacttgggaaaacacttcaaactatttcattgctgggctatctgcatgagttcagaggtataactggtcctcacatggtggttgcgccgaagtccacccttggcaactggatgaaggaaatccaacgtttttgccctatcctacgtgctgtgaagttcttgggcaatccagaagagcggaaccatataagggacgatttgctacagcctggaaaatttgatgtgtgcgtgactagttttgaaatggcaatcaaagaaaaatctgcgttgaggcgcttcagttggcgctacataattattgatgaagctcaccggataaaaaatgagaattctcttctatcgaagactatgaggatttacaacactaattatcgtctcctcatcacaggcactccactccagaataatctccatgagctctgggctctcctcaatttcttgctccctgaaatatttagctctgcggaaacctttgatgaatggtttcaaatttctggggaaaatgatcaacaggaggtggtccagcagcttcataaggttcttcgcccatttcttcttaggaggctcaagtctgatgtagaaaagggtctacctccgaagaaggaaaccatacttaaagttggaatgtctcagatgcaaaagcagtactatcgcgctctgcttcagaaggatttggaggttattaatgccggtggtgaacgcaagcgattgcttaacattgccatgcagctgcgcaagtgctgcaaccatccatatttgttccaaggagctgaacctggcccaccctacacaactggtgaacatctagttgagaatgcaggaaaaatggttctactagataaattgctgcccaagctaaaggagcgtgattccagagtcctaattttttcacagatgaccaggcttttggatatcttggaagattatcttatgtatagaggttatcagtattgtcgaattgacggaaatacaggtggagaagatcgtgatgcatccattgaagccttcaataagccaggaagtgaaaagtttgttttcttactttcaactagggcaggtggccttggtatcaacttggccactgctgatgttgtggttctttatgacagcgattggaatccacaagctgatctgcaagctcaggaccgtgcacataggataggtcaaaagaaagaagttcaagtgttccgcttttgcactgagataatgcaaacgaaattacagtacactatcgaggaaaaggtgattgagagagcatataagaagctagcattggatgctttagttattcagcaaggacgattggcagagcagaaaactgtcaataaggatgaccttctgcaaatggtgcggtttggtgctgaaatggttttcagttctaaggacagcacaataactgatgaggacattgaccgtattatagctaaaggagaggagacaacagctgaacttgatgcaaaaatgaaaaagttcacagaggacgccattaaatttaagatggatgataatgccgaactgtatgattttgatgatgagaaggatgaaaacaaggttgatttcaagaaacttgttagtgataactggatcgagccacctagaagagaaaggaagagaaactactctgagtctgattactttaagcaagcgcttcgccaaggtgcaccagcgaagcctagggagccaaggattccaagaatgccgcacttgcatgatttccagtttttcaataaccaaaggctaaatgaattgtacgaaaaggaagtgcggtacctcatgcaagcaaaccagaagaaagataccattgatggtgaagacgaagatcaattggagcctttaacagcagaggagcaggaagagaaggagcagttattagaagagggttttgcatcatggacaaggagagacttcaacacatttattcgtgcatgtgagaaatatggtcgcaatgatattaaaagtatatcctctgaaatggagggtaagacagaagaggaagttcaacgctatgctaaagttttcaaggagagatacaaggagctgactgattatgatagaattataaaaaatattgaaaggggggaagcaagaatatcccgcaaggatgagattatgaaggctattgggaagaagttagaccgctacaagaacccatggttagagttgaaaattcaatatggccaaaataaagggaagttctataatgaggaatgtgaccgctttatgctttgcatggtgcacaaacttggatatgggaactgggatgaactgaaagctgccttccgtatgtctcccttattccgatttgattggtttgtgaagtccagaactacccaagagttggctaggcggtgtgatactcttatcagactggttgaaaaggaaaatcaagaatatgatgagcaagagaggcaggcaaggaaggagaaaaggcttgctaagaatacgactccaacaaagagagcagcactaaggaattcagagggtgagagtgctccgttgagctcattcaagaggcgacggcagtctcttatggacgattatgtgggctcgggaaggcgaaagagagggtgatgtgatgtttgacatcctgcctttggagctctcagcgagatgcagtctctgcaatgctttaagcccgtacgtgctgtgcttagtttcttgtgcacgtgagttgaatgcctcaagggctggtgactttgtagtgtaagttatgcaacgatgacatagattagttattataaatcctaaatgaggtatgtatgcgcatgctgtattgtagtgctgtagattcggacttcgcaattgcaactgttgctacacttttggtcagtgatgatgcctttcgctgcaacagttgaggctccagttcaatatttgaagataaatccggtcccttctgtctagggatggccatgggtacctgatacccgttcggtaaaaaccgtattagagcacatgtgatcatttgttatacccctcggctatggtagtcatgggtatgttctttcttgccatatatatgttctttcttgccatatatctgctactagatagaaaac

SEQ ID NO: 222439 - DNA, 3685 bp, Zea Mays
gcgaggctgcgtctctcgaagtccaaaacgccccgccctggaaccctaaccctacctttcctctcccgccaccgcccgccccaatggcgaagccgatgaagtacgacgatgaggaggagatctcgtcctccgccgaggaggaggaccagtccgacgccgccggctccgtatctggcgaggaaggggatgacgacgacgaggatgctgcggcgccgcccgcggaggaagctgagggcgaggggcagcaggaggaggaggtcgacgaggaagagatcgaagccgtcactaccggcgctggagctgaggacgaggaggacgccggtgccgttaccgccgctgaaggcgacgacgagtcccagtccaccgaggacgacgagcccgtcgcgagggacaaggacgatgacgacgagactgatgcagtggttgggaagcgagagaaagcaaggctaaaagaactccagaagatgaagaaacataaaatccaagaaatattagatactcaaaatgccgccattgatgctgacatgaacaataaagggaagggacggttgaagtaccttcttcagcagacagaaatatttgctcactttgcaaaaggaagtcagtccaacgagaaaaagccacgcgggaggggacgccatgcatcaaagatgactgaagaagaggaagatgaagaatacctcaaagaggaagaagatgcccttgctggtgcagggggaacacgtttagtttcacagccttcatgcatcaagggaaagatgcgtgattatcaattagctggacttaattggcttatacgattgtatgagaatggtatcaatgggatattagctgatgagatgggacttgggaaaacacttcaaactatttcattgctgggctatctgcatgagttcagaggtataactggtcctcacatggtggttgcgccgaagtccacccttggcaactggatgaaggaaatccaacgtttttgccctatcctacgtgctgtgaagttcttgggcaatccagaagagcggaaccatataagggacgatttgctacagcctggaaaatttgatgtgtgcgtgactagttttgaaatggcaatcaaagaaaaatctgcgttgaggcgcttcagttggcgctacataattattgatgaagctcaccggataaaaaatgagaattctcttctatcgaagactatgaggatttacaacactaattatcgtctcctcatcacaggcactccactccagaataatctccatgagctctgggctctcctcaatttcttgctccctgaaatatttagctctgcggaaacctttgatgaatggtttcaaatttctggggaaaatgatcaacaggaggtggtccagcagcttcataaggttcttcgcccatttcttcttaggaggctcaagtctgatgtagaaaagggtctacctccgaagaaggaaaccatacttaaagttggaatgtctcagatgcaaaagcagtactatcgcgctctgcttcagaaggatttggaggttattaatgccggtggtgaacgcaagcgattgcttaacattgccatgcagctgcgcaagtgctgcaaccatccatatttgttccaaggagctgaacctggcccaccctacacaactggtgaacatctagttgagaatgcaggaaaaatggttctactagataaattgctgcccaagctaaaggagcgtgattccagagtcctaattttttcacagatgaccaggcttttggatatcttggaagattatcttatgtatagaggttatcagtattgtcgaattgacggaaatacaggtggagaagatcgtgatgcatccattgaagccttcaataagccaggaagtgaaaagtttgttttcttactttcaactagggcaggtggccttggtatcaacttggccactgctgatgttgtggttctttatgacagcgattggaatccacaagctgatctgcaagctcaggaccgtgcacataggataggtcaaaagaaagaagttcaagtgttccgcttttgcactgagataatgcaaacgaaattacagtacactatcgaggaaaaggtgattgagagagcatataagaagctagcattggatgctttagttattcagcaaggacgattggcagagcagaaaactgtcaataaggatgaccttctgcaaatggtgcggtttggtgctgaaatggttttcagttctaaggacagcacaataactgatgaggacattgaccgtattatagctaaaggagaggagacaacagctgaacttgatgcaaaaatgaaaaagttcacagaggacgccattaaatttaagatggatgataatgccgaactgtatgattttgatgatgagaaggatgaaaacaaggttgatttcaagaaacttgttagtgataactggatcgagccacctagaagagaaaggaagagaaactactctgagtctgattactttaagcaagcgcttcgccaaggtgcaccagcgaagcctagggagccaaggattccaagaatgccgcacttgcatgatttccagtttttcaataaccaaaggctaaatgaattgtacgaaaaggaagtgcggtacctcatgcaagcaaaccagaagaaagataccattgatggtgaagacgaagatcaattggagcctttaacagcagaggagcaggaagagaaggagcagttattagaagagggttttgcatcatggacaaggagagacttcaacacatttattcgtgcatgtgagaaatatggtcgcaatgatattaaaagtatatcctctgaaatggagggtaagacagaagaggaagttcaacgctatgctaaagttttcaaggagagatacaaggagctgactgattatgatagaattataaaaaatattgaaaggggggaagcaagaatatcccgcaaggatgagattatgaaggctattgggaagaagttagaccgctacaagaacccatggttagagttgaaaattcaatatggccaaaataaagggaagttctataatgaggaatgtgaccgctttatgaatacgactccaacaaagagagcagcactaaggaattcagagggtgagagtgctccgttgagctcattcaagaggcgacggcagtctcttatggacgattatgtgggctcgggaaggcgaaagagagggtgatgtgatgtttgacatcctgcctttggagctctcagcgagatgcagtctctgcaatgctttaagcccgtacgtgctgtgcttagtttcttgtgcacgtgagttgaatgcctcaagggctggtgactttgtagtgtaagttatgcaacgatgacatagattagttattataaatcctaaatgaggtatgtatgcgcatgctgtattgtagtgctgtagattcggacttcgcaattgcaactgttgctacacttttggtcagtgatgatgcctttcgctgcaacagttgaggctccagttcaatatttgaagataaatccggtcccttctgtctagggatggccatgggtacctgatacccgttcggtaaaaaccgtattagagcacatgtgatcatttgttatacccctcggctatggtagtcatgggtatgttctttcttgccatatatatgttctttcttgccatatatctgctactagatagaaaac

SEQ ID NO: 222440 - DNA, 3880 bp, Zea Mays
gcgaggctgcgtctctcgaagtccaaaacgccccgccctggaaccctaaccctacctttcctctcccgccaccgcccgccccaatggcgaagccgatgaagtacgacgatgaggaggagatctcgtcctccgccgaggaggaggaccagtccgacgccgccggctccgtatctggcgaggaaggggatgacgacgacgaggatgctgcggcgccgcccgcggaggaagctgagggcgaggggcagcaggaggaggaggtcgacgaggaagagatcgaagccgtcactaccggcgctggagctgaggacgaggaggacgccggtgccgttaccgccgctgaaggcgacgacgagtcccagtccaccgaggacgacgagcccgtcgcgagggacaaggacgatgacgacgagactgatgcagtggttgggaagcgagagaaagcaaggctaaaagaactccagaagatgaagaaacataaaatccaagaaatattagatactcaaaatgccgccattgatgctgacatgaacaataaagggaagggacggttgaagtaccttcttcagcagacagaaatatttgctcactttgcaaaaggaagtcagtccaacgagaaaaagccacgcgggaggggacgccatgcatcaaagatgactgaagaagaggaagatgaagaatacctcaaagaggaagaagatgcccttgctggtgcagggggaacacgtttagtttcacagccttcatgcatcaagggaaagatgcgtgattatcaattagctggacttaattggcttatacgattgtatgagaatggtatcaatgggatattagctgatgagatgggacttgggaaaacacttcaaactatttcattgctgggctatctgcatgagttcagaggtataactggtcctcacatggtggttgcgccgaagtccacccttggcaactggatgaaggaaatccaacgtttttgccctatcctacgtgctgtgaagttcttgggcaatccagaagagcggaaccatataagggacgatttgctacagcctggaaaatttgatgtgtgcgtgactagttttgaaatggcaatcaaagaaaaatctgcgttgaggcgcttcagttggcgctacataattattgatgaagctcaccggataaaaaatgagaattctcttctatcgaagactatgaggatttacaacactaattatcgtctcctcatcacaggcactccactccagaataatctccatgagctctgggctctcctcaatttcttgctccctgaaatatttagctctgcggaaacctttgatgaatggtttcaaatttctggggaaaatgatcaacaggaggtggtccagcagcttcataaggttcttcgcccatttcttcttaggaggctcaagtctgatgtagaaaagggtctacctccgaagaaggaaaccatacttaaagttggaatgtctcagatgcaaaagcagtactatcgcgctctgcttcagaaggatttggaggttattaatgccggtggtgaacgcaagcgattgcttaacattgccatgcagctgcgcaagtgctgcaaccatccatatttgttccaaggagctgaacctggcccaccctacacaactggtgaacatctagttgagaatgcaggaaaaatggttctactagataaattgctgcccaagctaaaggagcgtgattccagagtcctaattttttcacagatgaccaggcttttggatatcttggaagattatcttatgtatagaggttatcagtattgtcgaattgacggaaatacaggtggagaagatcgtgatgcatccattgaagccttcaataagccaggaagtgaaaagtttgttttcttactttcaactagggcaggtggccttggtatcaacttggccactgctgatgttgtggttctttatgacagcgattggaatccacaagctgatctgcaagctcaggaccgtgcacataggataggtcaaaagaaagaagttcaagtgttccgcttttgcactgagtacactatcgaggaaaaggtgattgagagagcatataagaagctagcattggatgctttagttattcagcaaggacgattggcagagcagaaaactgtcaataaggatgaccttctgcaaatggtgcggtttggtgctgaaatggttttcagttctaaggacagcacaataactgatgaggacattgaccgtattatagctaaaggagaggagacaacagctgaacttgatgcaaaaatgaaaaagttcacagaggacgccattaaatttaagatggatgataatgccgaactgtatgattttgatgatgagaaggatgaaaacaaggttgatttcaagaaacttgttagtgataactggatcgagccacctagaagagaaaggaagagaaactactctgagtctgattactttaagcaagcgcttcgccaaggtgcaccagcgaagcctagggagccaaggattccaagaatgccgcacttgcatgatttccagtttttcaataaccaaaggctaaatgaattgtacgaaaaggaagtgcggtacctcatgcaagcaaaccagaagaaagataccattgatggtgaagacgaagatcaattggagcctttaacagcagaggagcaggaagagaaggagcagttattagaagagggttttgcatcatggacaaggagagacttcaacacatttattcgtgcatgtgagaaatatggtcgcaatgatattaaaagtatatcctctgaaatggagggtaagacagaagaggaagttcaacgctatgctaaagttttcaaggagagatacaaggagctgactgattatgatagaattataaaaaatattgaaaggggggaagcaagaatatcccgcaaggatgagattatgaaggctattgggaagaagttagaccgctacaagaacccatggttagagttgaaaattcaatatggccaaaataaagggaagttctataatgaggaatgtgaccgctttatgctttgcatggtgcacaaacttggatatgggaactgggatgaactgaaagctgccttccgtatgtctcccttattccgatttgattggtttgtgaagtccagaactacccaagagttggctaggcggtgtgatactcttatcagactggttgaaaaggaaaatcaagaatatgatgagcaagagaggcaggcaaggaaggagaaaaggcttgctaagaatacgactccaacaaagagagcagcactaaggaattcagagggtgagagtgctccgttgagctcattcaagaggcgacggcagtctcttatggacgattatgtgggctcgggaaggcgaaagagagggtgatgtgatgtttgacatcctgcctttggagctctcagcgagatgcagtctctgcaatgctttaagcccgtacgtgctgtgcttagtttcttgtgcacgtgagttgaatgcctcaagggctggtgactttgtagtgtaagttatgcaacgatgacatagattagttattataaatcctaaatgaggtatgtatgcgcatgctgtattgtagtgctgtagattcggacttcgcaattgcaactgttgctacacttttggtcagtgatgatgcctttcgctgcaacagttgaggctccagttcaatatttgaagataaatccggtcccttctgtctagggatggccatgggtacctgatacccgttcggtaaaaaccgtattagagcacatgtgatcatttgttatacccctcggctatggtagtcatgggtatgttctttcttgccatatatatgttctttcttgccatatatctgctactagatagaaaac

SEQ ID NO: 222441 - DNA, 3635 bp, Zea Mays
cgaggctgcgtctctcgaagtccaaaacgccccgccctggaaccctaaccctacctttcctctcccgccaccgcccgccccaatggcgaagccgatgaagtacgacgatgaggaggagatctcgtcctccgccgaggaggaggaccagtccgacgccgccggctccgtatctggcgaggaaggggatgacgacgacgaggatgctgcggcgccgcccgcggaggaagctgagggcgaggggcagcaggaggaggaggtcgacgaggaagagatcgaagccgtcactaccggcgctggagctgaggacgaggaggacgccggtgccgttaccgccgctgaaggcgacgacgagtcccagtccaccgaggacgacgagcccgtcgcgagggacaaggacgatgacgacgagactgatgcagtggttgggaagcgagagaaagcaaggctaaaagaactccagaagatgaagaaacataaaatccaagaaatattagatactcaaaatgccgccattgatgctgacatgaacaataaagggaagggacggttgaagtaccttcttcagcagacagaaatatttgctcactttgcaaaaggaagtcagtccaacgagaaaaagccacgcgggaggggacgccatgcatcaaagatgactgaagaagaggaagatgaagaatacctcaaagaggaagaagatgcccttgctggtgcagggggaacacgtttagtttcacagccttcatgcatcaagggaaagatgcgtgattatcaattagctggacttaattggcttatacgattgtatgagaatggtatcaatgggatattagctgatgagatgggacttgggaaaacacttcaaactatttcattgctgggctatctgcatgagttcagaggtataactggtcctcacatggtggttgcgccgaagtccacccttggcaactggatgaaggaaatccaacgtttttgccctatcctacgtgctgtgaagttcttgggcaatccagaagagcggaaccatataagggacgatttgctacagcctggaaaatttgatgtgtgcgtgactagttttgaaatggcaatcaaagaaaaatctgcgttgaggcgcttcagttggcgctacataattattgatgaagctcaccggataaaaaatgagaattctcttctatcgaagactatgaggatttacaacactaattatcgtctcctcatcacaggcactccactccagaataatctccatgagctctgggctctcctcaatttcttgctccctgaaatatttagctctgcggaaacctttgatgaatggtttcaaatttctggggaaaatgatcaacaggaggtggtccagcagcttcataaggttcttcgcccatttcttcttaggaggctcaagtctgatgtagaaaagggtctacctccgaagaaggaaaccatacttaaagttggaatgtctcagatgcaaaagcagtactatcgcgctctgcttcagaaggatttggaggttattaatgccggtggtgaacgcaagcgattgcttaacattgccatgcagctgcgcaagtgctgcaaccatccatatttgttccaaggagctgaacctggcccaccctacacaactggtgaacatctagttgagaatgcaggaaaaatggttctactagataaattgctgcccaagctaaaggagcgtgattccagagtcctaattttttcacagatgaccaggcttttggatatcttggaagattatcttatgtatagaggttatcagtattgtcgaattgacggaaatacaggtggagaagatcgtgatgcatccattgaagccttcaataagccaggaagtgaaaagtttgttttcttactttcaactagggcaggtggccttggtatcaacttggccactgctgatgttgtggttctttatgacagcgattggaatccacaagctgatctgcaagctcaggaccgtgcacataggataggtcaaaagaaagaagttcaagtgttccgcttttgcactgagataatgcaaacgaaattacagtacactatcgaggaaaaggtgattgagagagcatataagaagctagcattggatgctttagttattcagcaaggacgattggcagagcagaaaactgtcaataaggatgaccttctgcaaatggtgcggtttggtgctgaaatggttttcagttctaaggacagcacaataactgatgaggacattgaccgtattatagctaaaggagaggagacaacagctgaacttgatgcaaaaatgaaaaagttcacagaggacgccattaaatttaagatggatgataatgccgaactgtatgattttgatgatgagaaggatgaaaacaaggttgatttcaagaaacttgttagtgataactggatcgagccacctagaagagaaaggaagagaaactactctgagtctgattactttaagcaagcgcttcgccaaggtgcaccagcgaagcctagggagccaaggattccaagaatgccgcacttgcatgatttccagtttttcaataaccaaaggctaaatgaattgtacgaaaaggaagtgcggtacctcatgcaagcaaaccagaagaaagataccattgatggtgaagacgaagatcaattggagcctttaacagcagaggagcaggaagagaaggagcagttattagaagagggttttgcatcatggacaaggagagacttcaacacatttattcgtgcatgtgagaaatatggtcgcaatgatattaaaagtatatcctctgaaatggagggtaagacagaagaggaagttcaacgctatgctaaagttttcaaggagagatacaaggagctgactgattatgatagaattataaaaaatattgaaaggggggaagcaagaatatcccgcaaggatgagattatgaaggctattgggaagaagttagaccgctacaagaacccatggttagagttgaaaattcaatatggccaaaataaagggaagttctataatgaggaatgtgaccgctttatgaatacgactccaacaaagagagcagcactaaggaattcagagggtgagagtgctccgttgagctcattcaagaggcgacggcagtctcttatggacgattatgtgggctcgctctcagcgagatgcagtctctgcaatgctttaagcccgtacgtgctgtgcttagtttcttgtgcacgtgagttgaatgcctcaagggctggtgactttgtagtgtaagttatgcaacgatgacatagattagttattataaatcctaaatgaggtatgtatgcgcatgctgtattgtagtgctgtagattcggacttcgcaattgcaactgttgctacacttttggtcagtgatgatgcctttcgctgcaacagttgaggctccagttcaatatttgaagataaatccggtcccttctgtctagggatggccatgggtacctgatacccgttcggtaaaaaccgtattagagcacatgtgatcatttgttatacccctcggctatggtagtcatgggtatgttctttcttgccatatatatgttctttcttgccatatatctgctactagatagaaaac

SEQ ID NO: 222442 - DNA, 3801 bp, Zea Mays
ggctgcgtctctcgaagtccaaaacgccccgccctggaaccctaaccctacctttcctctcccgccaccgcccgccccaatggcgaagccgatgaagtacgacgatgaggaggagatctcgtcctccgccgaggaggaggaccagtccgacgccgccggctccgtatctggcgaggaaggggatgacgacgacgaggatgctgcggcgccgcccgcggaggaagctgagggcgaggggcagcaggaggaggaggtcgacgaggaagagatcgaagccgtcactaccggcgctggagctgaggacgaggaggacgccggtgccgttaccgccgctgaaggcgacgacgagtcccagtccaccgaggacgacgagcccgtcgcgagggacaaggacgatgacgacgagactgatgcagtggttgggaagcgagagaaagcaaggctaaaagaactccagaagatgaagaaacataaaatccaagaaatattagatactcaaaatgccgccattgatgctgacatgaacaataaagggaagggacggttgaagtaccttcttcagcagacagaaatatttgctcactttgcaaaaggaagtcagtccaacgagaaaaagccacgcgggaggggacgccatgcatcaaagatgactgaagaagaggaagatgaagaatacctcaaagaggaagaagatgcccttgctggtgcagggggaacacgtttagtttcacagccttcatgcatcaagggaaagatgcgtgattatcaattagctggacttaattggcttatacgattgtatgagaatggtatcaatgggatattagctgatgagatgggacttgggaaaacacttcaaactatttcattgctgggctatctgcatgagttcagaggtataactggtcctcacatggtggttgcgccgaagtccacccttggcaactggatgaaggaaatccaacgtttttgccctatcctacgtgctgtgaagttcttgggcaatccagaagagcggaaccatataagggacgatttgctacagcctggaaaatttgatgtgtgcgtgactagttttgaaatggcaatcaaagaaaaatctgcgttgaggcgcttcagttggcgctacataattattgatgaagctcaccggataaaaaatgagaattctcttctatcgaagactatgaggatttacaacactaattatcgtctcctcatcacaggcactccactccagaataatctccatgagctctgggctctcctcaatttcttgctccctgaaatatttagctctgcggaaacctttgatgaatggtttcaaatttctggggaaaatgatcaacaggaggtggtccagcagcttcataaggttcttcgcccatttcttcttaggaggctcaagtctgatgtagaaaagggtctacctccgaagaaggaaaccatacttaaagttggaatgtctcagatgcaaaagcagtactatcgcgctctgcttcagaaggatttggaggttattaatgccggtggtgaacgcaagcgattgcttaacattgccatgcagctgcgcaagtgctgcaaccatccatatttgttccaaggagctgaacctggcccaccctacacaactggtgaacatctagttgagaatgcaggaaaaatggttctactagataaattgctgcccaagctaaaggagcgtgattccagagtcctaattttttcacagatgaccaggcttttggatatcttggaagattatcttatgtatagaggttatcagtattgtcgaattgacggaaatacaggtggagaagatcgtgatgcatccattgaagccttcaataagccaggaagtgaaaagtttgttttcttactttcaactagggcaggtggccttggtatcaacttggccactgctgatgttgtggttctttatgacagcgattggaatccacaagctgatctgcaagctcaggaccgtgcacataggataggtcaaaagaaagaagttcaagtgttccgcttttgcactgagataatgcaaacgaaattacagtacactatcgaggaaaaggtgattgagagagcatataagaagctagcattggatgctttagttattcagcaaggacgattggcagagcagaaaactgtcaataaggatgaccttctgcaaatggtgcggtttggtgctgaaatggttttcagttctaaggacagcacaataactgatgaggacattgaccgtattatagctaaaggagaggagacaacagctgaacttgatgcaaaaatgaaaaagttcacagaggacgccattaaatttaagatggatgataatgccgaactgtatgattttgatgatgagaaggatgaaaacaaggttgatttcaagaaacttgttagtgataactggatcgagccacctagaagagaaaggaagagaaactactctgagtctgattactttaagcaagcgcttcgccaaggtgcaccagcgaagcctagggagccaaggattccaagaatgccgcacttgcatgatttccagtttttcaataaccaaaggctaaatgaattgtacgaaaaggaagtgcggtacctcatgcaagcaaaccagaagaaagataccattgatggtgaagacgaagatcaattggagcctttaacagcagaggagcaggaagagaaggagcagttattagaagagggttttgcatcatggacaaggagagacttcaacacatttattcgtgcatgtgagaaatatggtcgcaatgatattaaaagtatatcctctgaaatggagggtaagacagaagaggaagttcaacgctatgctaaagttttcaaggagagatacaaggagctgactgattatgatagaattataaaaaatattgaaaggggggaagcaagaatatcccgcaaggatgagattatgaaggctattgggaagaagttagaccgctacaagaacccatggttagagttgaaaattcaatatggccaaaataaagggaagttctataatgaggaatgtgaccgctttatgtccagaactacccaagagttggctaggcggtgtgatactcttatcagactggttgaaaaggaaaatcaagaatatgatgagcaagagaggcaggcaaggaaggagaaaaggcttgctaagaatacgactccaacaaagagagcagcactaaggaattcagagggtgagagtgctccgttgagctcattcaagaggcgacggcagtctcttatggacgattatgtgggctcgggaaggcgaaagagagggtgatgtgatgtttgacatcctgcctttggagctctcagcgagatgcagtctctgcaatgctttaagcccgtacgtgctgtgcttagtttcttgtgcacgtgagttgaatgcctcaagggctggtgactttgtagtgtaagttatgcaacgatgacatagattagttattataaatcctaaatgaggtatgtatgcgcatgctgtattgtagtgctgtagattcggacttcgcaattgcaactgttgctacacttttggtcagtgatgatgcctttcgctgcaacagttgaggctccagttcaatatttgaagataaatccggtcccttctgtctagggatggccatgggtacctgatacccgttcggtaaaaaccgtattagagcacatgtgatcatttgttatacccctcggctatggtagtcatgggtatgttctttcttgccatatatatgttctttcttgccatatatctgctactagatagaaaac

SEQ ID NO: 222443 - DNA, 3781 bp, Zea Mays
ctgcgtctctcgaagtccaaaacgccccgccctggaaccctaaccctacctttcctctcccgccaccgcccgccccaatggcgaagccgatgaagtacgacgatgaggaggagatctcgtcctccgccgaggaggaggaccagtccgacgccgccggctccgtatctggcgaggaaggggatgacgacgacgaggatgctgcggcgccgcccgcggaggaagctgagggcgaggggcagcaggaggaggaggtcgacgaggaagagatcgaagccgtcactaccggcgctggagctgaggacgaggaggacgccggtgccgttaccgccgctgaaggcgacgacgagtcccagtccaccgaggacgacgagcccgtcgcgagggacaaggacgatgacgacgagactgatgcagtggttgggaagcgagagaaagcaaggctaaaagaactccagaagatgaagaaacataaaatccaagaaatattagatactcaaaatgccgccattgatgctgacatgaacaataaagggaagggacggttgaagtaccttcttcagcagacagaaatatttgctcactttgcaaaaggaagtcagtccaacgagaaaaagccacgcgggagtactgctcactgttttgtatgcagaaccataagacatagctcaatgaaattcgaggggacgccatgcatcaaagatgactgaagaagaggaagatgaagaatacctcaaagaggaagaagatgcccttgctggtgcagggggaacacgtttagtttcacagccttcatgcatcaagggaaagatgcgtgattatcaattagctggacttaattggcttatacgattgtatgagaatggtatcaatgggatattagctgatgagatgggacttgggaaaacacttcaaactatttcattgctgggctatctgcatgagttcagaggtataactggtcctcacatggtggttgcgccgaagtccacccttggcaactggatgaaggaaatccaacgtttttgccctatcctacgtgctgtgaagttcttgggcaatccagaagagcggaaccatataagggacgatttgctacagcctggaaaatttgatgtgtgcgtgactagttttgaaatggcaatcaaagaaaaatctgcgttgaggcgcttcagttggcgctacataattattgatgaagctcaccggataaaaaatgagaattctcttctatcgaagactatgaggatttacaacactaattatcgtctcctcatcacaggcactccactccagaataatctccatgagctctgggctctcctcaatttcttgctccctgaaatatttagctctgcggaaacctttgatgaatggtttcaaatttctggggaaaatgatcaacaggaggtggtccagcagcttcataaggttcttcgcccatttcttcttaggaggctcaagtctgatgtagaaaagggtctacctccgaagaaggaaaccatacttaaagttggaatgtctcagatgcaaaagcagtactatcgcgctctgcttcagaaggatttggaggttattaatgccggtggtgaacgcaagcgattgcttaacattgccatgcagctgcgcaagtgctgcaaccatccatatttgttccaaggagctgaacctggcccaccctacacaactggtgaacatctagttgagaatgcaggaaaaatggttctactagataaattgctgcccaagctaaaggagcgtgattccagagtcctaattttttcacagatgaccaggcttttggatatcttggaagattatcttatgtatagaggttatcagtattgtcgaattgacggaaatacaggtggagaagatcgtgatgcatccattgaagccttcaataagccaggaagtgaaaagtttgttttcttactttcaactagggcaggtggccttggtatcaacttggccactgctgatgttgtggttctttatgacagcgattggaatccacaagctgatctgcaagctcaggaccgtgcacataggataggtcaaaagaaagaagttcaagtgttccgcttttgcactgagataatgcaaacgaaattacagtacactatcgaggaaaaggtgattgagagagcatataagaagctagcattggatgctttagttattcagcaaggacgattggcagagcagaaaactgtcaataaggatgaccttctgcaaatggtgcggtttggtgctgaaatggttttcagttctaaggacagcacaataactgatgaggacattgaccgtattatagctaaaggagaggagacaacagctgaacttgatgcaaaaatgaaaaagttcacagaggacgccattaaatttaagatggatgataatgccgaactgtatgattttgatgatgagaaggatgaaaacaaggttgatttcaagaaacttgttagtgataactggatcgagccacctagaagagaaaggaagagaaactactctgagtctgattactttaagcaagcgcttcgccaaggtgcaccagcgaagcctagggagccaaggattccaagaatgccgcacttgcatgatttccagtttttcaataaccaaaggctaaatgaattgtacgaaaaggaagtgcggtacctcatgcaagcaaaccagaagaaagataccattgatggtgaagacgaagatcaattggagcctttaacagcagaggagcaggaagagaaggagcagttattagaagagggttttgcatcatggacaaggagagacttcaacacatttattcgtgcatgtgagaaatatggtcgcaatgatattaaaagtatatcctctgaaatggagggtaagacagaagaggaagttcaacgctatgctaaagttttcaaggagagatacaaggagctgactgattatgatagaattataaaaaatattgaaaggggggaagcaagaatatcccgcaaggatgagattatgaaggctattgggaagaagttagaccgctacaagaacccatggttagagttgaaaattcaatatggccaaaataaagggaagttctataatgaggaatgtgaccgctttatgctttgcatggtgcacaaacttggatatgggaactgggatgaactgaaagctgccttccgtatgtctcccttattccgatttgattggtttgtgaagtccagaactacccaagagttggctaggcggtgtgatactcttatcagactggttgaaaaggaaaatcaagaatatgatgagcaagagaggcaggcaaggaaggagaaaaggcttgctaagaatacgactccaacaaagagagcagcactaaggaattcagagggtgagagtgctccgttgagctcattcaagaggcgacggcagtctcttatggacgattatgtgggctcgggaaggcgaaagagagggtgatgtgatgtttgacatcctgcctttggagctctcagcgagatgcagtctctgcaatgctttaagcccgtacgtgctgtgcttagtttcttgtgcacgtgagttgaatgcctcaagggctggtgactttgtagttgctgtagattcggacttcgcaattgcaactgttgctacacttttgattcactttttcatcgtggccctaacactcattccaaattataagattagagattttaacttaacactagagttcgatcaaatttatgcaataaaataataattatccctcctaatatataaggcgtaagcacctttggtt

SEQ ID NO: 222444 - DNA, 711 bp, Zea Mays
gggaactgggatgaactgaaagctgccttccgtatgtctcccttattccgatttgattggtttgtgaagtccagaactacccaagagttggctaggcggtgtgatactcttatcagactggttgaaaaggaaaatcaagaatatgatgagcaagagaggcaggcaaggaaggagaaaaggcttgctaagaatacgactccaacaaagagagcagcactaaggaattcagagggtgagagtgctccgttgagctcattcaagaggcgacggcagtctcttatggacgattatgtgggctcggcgaaagagagggtgatgtgatgtttgacatcctgcctttggagctctcagcgagatgcagtctctgcaatgctttaagcccgtacgtgctgtgcttagtttcttgtgcacgtgagttgaatgcctcaagggctggtgactttgtagtgtaagttatgcaacgatgacatagattagttattataaatcctaaatgaggtatgtatgcgcatgctgtattgtagtgctgtagattcggacttcgcaattgcaactgttgctacacttttgattcactttttcatcgtggccctaacactcattccaaattataagattagagattttaacttaacactagagttcgatcaaatttatgcaataaaataataattatccctcctaatatataaggcgtaagcacctttggtt

SEQ ID NO: 222445 - DNA, 3419 bp, Zea Mays
ccgctcgctgcgccgcagcccggagaggaaaccgcgctctgtcgaccaccgcctggggcccagcgtcctcgcgacctgctccggcgtggcgtccgctctctgcagccccagcgtccccgcgaccggccccgcgcggccgccacacagctccgctgctaggtctccgtccccacatgactcagatccaaacaccatggtctccgttccccatgagcccatgaaccaaacacatagtcagttccttctcttcttaaggctgtggatcacgcggatcgaggcgtttcttcgattctagctggggtttgggggaggtgttcgtgaactggattcaaggcccaggcagtgaagatttctaatctggatgtacttaactgcaggctaaggcaatgaagatttctaatctggatgcacacttaatcttgtccagttcttgatcttgggctttgctgcttcctctcaagttagtttgttggccaatcgagtccagaggcgcagatgagtgaggagtacaatatggatgtggccctaaaagccaaaaatgttgctgagaccaagttccatgcccgagacatcaggggtgctcggaagtatgcactcaaggcccagaatctctgcccaacacttgaaggcatattgcagatggtctcaacgcttgaagttcatcttgcagctgagtccaagattgatggagagagtgactggtataggatattgtgtctaggtgcctttgcagatgaagaggaggtgaggaagcaatataggaagctagctctgctgctgcacccagacaagaacaagtctgttggtgctgaggaggccttcaaactgatctctgaggcgtggagtgtgttgtcagatactagcaggaaggtagtttatgatgagaagcgaagaaatcattctgttgtcaatgtaaccaatggcatttatacctatgataagaaggcaaacaagagggctcgaaagaatgctgctgctgcagctgctgccgctgctgctgccgctgcagctgaggctactactcgtcctgttgggattgatacattttggacatcttgcaaccgctgccggatgcagtatgagtacttaaggatttatcttaatcataacctgttgtgcccaaattgccataatgcattcttggcagtggagactgggttcccttgcaatggaagcagctcatcattctcatggtcaaccaagcagcagccgcagcagaaccacaattcaaccaagcattcatatggctcaacaagcaggacttctagcatccctggtacagggaatggggggtaccagcaagataatacttatgattcttacaacaatcaaggcttccagtggaatcagtactccaagacaacaactgcagctgttactaatgcttatagtacacaggccttggagaaacagagaaggaagcatgacgagagctacagctacaactattctgaaagcggcaacacatatgttcatgagaaagctgcttcaaggcgcggtcgcttctcaaagcggagaaggcataactatgatgcttataccactgtggattatggtggcgataacaaagaaacagttgctgcaactgcaagcacagaaccaactgctgtttttactgatgtgggacgggtcaatggtacttcagtggaaaggtttaaatctgcagtgagtggaagaagagcaaatattctgggtgagattacccagattgatacacgaaatttacttcttgagaaagccaaggcaactgtctgtgaaaaattgcatgaattaaacatcacaccatcttcacgagctgcagatagaagaggatctgaaggaaagctgtatccttgtgacaacaacataaaggtcaacggtgtcctctctgacaaacctggcaagggagtcaagctatgcaactcaagaagcatggaaatccaagtgcctgctaccgatgacaaaaatccagagcaacgccgtgtgcctgtgtccatcgatgtcccagaccctgacttccatgatttcgataaagaccgaacggagaaggcttttgatactgatcaagtatgggctacctatgactgcgaggacggcatgccccgcctatatgtaatggttcagaaagttctttcaacgaggcccttccggatccgcatgagctttctcaactcgaagtcaaatatcgaactggcgcctataaactgggtcgcctctggtttccaaaagacatgtggtgacttcagggttgggagatatcaggtgagcgaaacggtgaacatattttcacatagagtgaggtggactaaaggtccccgtggcatcatcaggatcgttccccagaaaggggacacgtgggccttgtaccgtaactggtcccccgactggaacgagctgacgcctgatgacgtgatatacaagtacgagatagtggaagtcgctgatgatttcactgaggagcgagggctgactgtcatcccgttgctgaaggttgccggattcaaagccgtcttccacagacacgtggatcccgaggaggtgaggaggataccaaaggaagagctgttccggttctcgcaccgggttccttctcgtctcctgacgggcgaagagggcagcaatgccccgaaaggctgccatgagctggaccctgctgccactccagtggaccttctcaaggttatcacggagcacaaggaagacgcggtggcgcagagtcctaaataggagtgagcgactccgataacagcgaagataaggtagctggatgtctgagtgaccagatccccacttggttaatgacagcgtgccagcacatgatggtgtctaaagctctactacgccatcttattttcggctgatggcttggacaacacttccagggcaagcagcctgtgtgtgtgtgtgacggacttctgaccttgttaattcttaggcattcctaacatttgattctatcactacacaagccaaccgccacgtagattaaatggccattgggaggaggccggccgcgcacggcaccgagatgagatgaggaggttagtcacggaggtagggagggtgaagatgttacttgtttgtgttgctcactctgtaatgtaggaggcaggctcgagccgagggaaagagctgcttggctttgcttgcccatgtaccccgcatttctgtacctgtttttttacttatgatgatgatgatgtatttccttcttgttttatagtagtaagtaattcacggccagtaattgtagactctggtaaccgtttcggaaaatctagtgctttatctggtggatgattctgtctgaccctgtgctgtttggctgtgcaccgagctacttggatggattggctgattcgaggatgaattctttgtgctgacgcatgatgtacccaagaatgtactcctggtcctggcatcatgtggattgtaccgct

SEQ ID NO: 222446 - DNA, 3112 bp, Zea Mays
gttttttcgagcttgctcctgccccgaaataaaattcggggccccaaaaattcgcaattctgggggctggccccccgaattagcgcgcctcccggagatccggcgccggcccaggcagtgaagatttctaatctggatgtacttaactgcaggctaagtttgttggccaatcgagtccagaggcgcagatgagtgaggagtacaatatggatgtggccctaaaagccaaaaatgttgctgagaccaagttccatgcccgagacatcaggggtgctcggaagtatgcactcaaggcccagaatctctgcccaacacttgaaggcatattgcagatggtctcaacgcttgaagttcatcttgcagctgagtccaagattgatggagagagtgactggtataggatattgtgtctaggtgcctttgcagatgaagaggaggtgaggaagcaatataggaagctagctctgctgctgcacccagacaagaacaagtctgttggtgctgaggaggccttcaaactgatctctgaggcgtggagtgtgttgtcagatactagcaggaaggtagtttatgatgagaagcgaagaaatcattctgttgtcaatgtaaccaatggcatttatacctatgataagaaggcaaacaagagggctcgaaagaatgctgctgctgcagctgctgccgctgctgctgccgctgcagctgaggctactactcgtcctgttgggattgatacattttggacatcttgcaaccgctgccggatgcagtatgagtacttaaggatttatcttaatcataacctgttgtgcccaaattgccataatgcattcttggcagtggagactgggttcccttgcaatggaagcagctcatcattctcatggtcaaccaagcagcagccgcagcagaaccacaattcaaccaagcattcatatggctcaacaagcaggacttctagcatccctggtacagggaatggggggtaccagcaagataatacttatgattcttacaacaatcaaggcttccagtggaatcagtactccaagacaacaactgcagctgttactaatgcttatagtacacaggccttggagaaacagagaaggaagcatgacgagagctacagctacaactattctgaaagcggcaacacatatgttcatgagaaagctgcttcaaggcgcggtcgcttctcaaagcggagaaggcataactatgatgcttataccactgtggattatggtggcgataacaaagaaacagttgctgcaactgcaagcacagaaccaactgctgtttttactgatgtgggacgggtcaatggtacttcagtggaaaggtttaaatctgcagtgagtggaagaagagcaaatattctgggtgagattacccagattgatacacgaaatttacttcttgagaaagccaaggcaactgtctgtgaaaaattgcatgaattaaacatcacaccatcttcacgagctgcagatagaagaggatctgaaggaaagctgtatccttgtgacaacaacataaaggtcaacggtgtcctctctgacaaacctggcaagggagtcaagctatgcaactcaagaagcatggaaatccaagtgcctgctaccgatgacaaaaatccagagcaacgccgtgtgcctgtgtccatcgatgtcccagaccctgacttccatgatttcgataaagaccgaacggagaaggcttttgatactgatcaagtatgggctacctatgactgcgaggacggcatgccccgcctatatgtaatggttcagaaagttctttcaacgaggcccttccggatccgcatgagctttctcaactcgaagtcaaatatcgaactggcgcctataaactgggtcgcctctggtttccaaaagacatgtggtgacttcagggttgggagatatcaggtgagcgaaacggtgaacatattttcacatagagtgaggtggactaaaggtccccgtggcatcatcaggatcgttccccagaaaggggacacgtgggccttgtaccgtaactggtcccccgactggaacgagctgacgcctgatgacgtgatatacaagtacgagatagtggaagtcgctgatgatttcactgaggagcgagggctgactgtcatcccgttgctgaaggttgccggattcaaagccgtcttccacagacacgtggatcccgaggaggtgaggaggataccaaaggaagagctgttccggttctcgcaccgggttccttctcgtctcctgacgggcgaagagggcagcaatgccccgaaaggctgccatgagctggaccctgctgccactccagtggaccttctcaaggttatcacggagcacaaggaagacgcggtggcgcagagtcctaaataggagtgagcgactccgataacagcgaagataaggtagctggatgtctgagtgaccagatccccacttggttaatgacagcgtgccagcacatgatggtgtctaaagctctactacgccatcttattttcggctgatggcttggacaacacttccagggcaagcagcctgtgtgtgtgtgtgacggacttctgaccttgttaattcttaggcattcctaacatttgattctatcactacacaagccaaccgccacgtagattaaatggccattgggaggaggccggccgcgcacggcaccgagatgagatgaggaggttagtcacggaggtagggagggtgaagatgttacttgtttgtgttgctcactctgtaatgtaggaggcaggctcgagccgagggaaagagctgcttggctttgcttgcccatgtaccccgcatttctgtacctgtttttttacttatgatgatgatgatgtatttccttcttgttttatagtagtaagtaattcacggccagtaattgtagactctggtaaccgtttcggaaaatctagtgctttatctggtggatgattctgtctgaccctgtgctgtttggctgtgcaccgagctacttggatggattggctgattcgaggatgaattctttgtgctgacgcatgatgtacccaagaatgtactcctggtcctggcatcatgtggattgtaccgct

SEQ ID NO: 222447 - DNA, 2975 bp, Zea Mays
cacattgccgtcgtgtattgcaaaatttcggaggctttgactaaaaaagcttcgttttttcgagcttgctcctgccccgaaataaaattcggggccccaaaaattcgcaattctgggggctggccccccgaattagcgcgcctcccggagatccggcgccggctaaggcaatgaagatttctaatctggatgcacacttaatcttgtccagttcttgatcttgggctttgctgcttcctctcaagttagtttgttggccaatcgagtccagaggcgcagatgagtgaggagtacaatatggatgtggccctaaaagccaaaaatgttgctgagaccaagttccatgcccgagacatcaggggtgctcggaagtatgcactcaaggcccagaatctctgcccaacacttgaaggcatattgcagatggtctcaacgcttgaagttcatcttgcagctgagtccaagattgatggagagagtgactggtataggatattgtgtctaggtgcctttgcagatgaagaggaggtgaggaagcaatataggaagctagctctgctgctgcacccagacaagaacaagtctgttggtgctgaggaggccttcaaactgatctctgaggcgtggagtgtgttgtcagatactagcaggaaggtagtttatgatgagaagcgaagaaatcattctgttgtcaatgtaaccaatggcatttatacctatgataagaaggcaaacaagagggctcgaaagaatgctgctgctgcagctgctgccgctgctgctgccgctgcagctgaggctactactcgtcctgttgggattgatacattttggacatcttgcaaccgctgccggatgcagtatgagtacttaaggatttatcttaatcataacctgttgtgcccaaattgccataatgcattcttggcagtggagactgggttcccttgcaatggaagcagctcatcattctcatggtcaaccaagcagcagccgcagcagaaccacaattcaaccaagcattcatatggctcaacaagcaggacttctagcatccctggtacagggaatggggggtaccagcaagataatacttatgattcttacaacaatcaaggcttccagtggaatcagtactccaagacaacaactgcagctgttactaatgcttatagtacacaggccttggagaaacagagaaggaagcatgacgagagctacagctacaactattctgaaagcggcaacacatatgttcatgagaaagctgcttcaaggcgcggtcgcttctcaaagcggagaaggcataactatgatgcttataccactgtggattatggtggcgataacaaagaaacagttgctgcaactgcaagcacagaaccaactgctgtttttactgatgtgggacgggtcaatggtacttcagtggaaaggtttaaatctgcagtgagtggaagaagagcaaatattctgggtgagattacccagattgatacacgaaatttacttcttgagaaagccaaggcaactgtctgtgaaaaattgcatgaattaaacatcacaccatcttcacgagctgcagatagaagaggatctgaaggaaagctgtatccttgtgacaacaacataaaggtcaacggtgtcctctctgacaaacctggcaagggagtcaagctatgcaactcaagaagcatggaaatccaagtgcctgctaccgatgacaaaaatccagagcaacgccgtgtgcctgtgtccatcgatgtcccagaccctgacttccatgatttcgataaagaccgaacggagaaggcttttgatactgatcaagtatgggctacctatgactgcgaggacggcatgccccgcctatatgtaatggttcagaaagttctttcaacgaggcccttccggatccgcatgagctttctcaactcgaagtcaaatatcgaactggcgcctataaactgggtcgcctctggtttccaaaagacatgtggtgacttcagggttgggagatatcaggttgccggattcaaagccgtcttccacagacacgtggatcccgaggaggtgaggaggataccaaaggaagagctgttccggttctcgcaccgggttccttctcgtctcctgacgggcgaagagggcagcaatgccccgaaaggctgccatgagctggaccctgctgccactccagtggaccttctcaaggttatcacggagcacaaggaagacgcggtggcgcagagtcctaaataggagtgagcgactccgataacagcgaagataaggtagctggatgtctgagtgaccagatccccacttggttaatgacagcgtgccagcacatgatggtgtctaaagctctactacgccatcttattttcggctgatggcttggacaacacttccagggcaagcagcctgtgtgtgtgtgtgacggacttctgaccttgttaattcttaggcattcctaacatttgattctatcactacacaagccaaccgccacgtagattaaatggccattgggaggaggccggccgcgcacggcaccgagatgagatgaggaggttagtcacggaggtagggagggtgaagatgttacttgtttgtgttgctcactctgtaatgtaggaggcaggctcgagccgagggaaagagctgcttggctttgcttgcccatgtaccccgcatttctgtacctgtttttttacttatgatgatgatgatgtatttccttcttgttttatagtagtaagtaattcacggccagtaattgtagactctggtaaccgtttcggaaaatctagtgctttatctggtggatgattctgtctgaccctgtgctgtttggctgtgcaccgagctacttggatggattggctgattcgaggatgaattctttgtgctgacgcatgatgtacccaagaatgtactcctggtcctggcatcatgtggattgtaccgct

SEQ ID NO: 222448 - DNA, 3205 bp, Zea Mays
agcacattgccgtcgtgtattgcaaaatttcggaggctttgactaaaaaagcttcgttttttcgagcttgctcctgccccgaaataaaattcggggccccaaaaattcgcaattctgggggctggccccccgaattagcgcgcctcccggagatccggcgccggctaaggcaatgaagatttctaatctggatgcacacttaatcttgtccagttcttgatcttgggctttgctgcttcctctcaagttagtttgttggccaatcgagtccagaggcgcagatgagtgaggagtacaatatggatgtggccctaaaagccaaaaatgttgctgagaccaagttccatgcccgagacatcaggggtgctcggaagtatgcactcaaggcccagaatctctgcccaacacttgaaggcatattgcagatggtctcaacgcttgaagttcatcttgcagctgagtccaagattgatggagagagtgactggtataggatattgtgtctaggtgcctttgcagatgaagaggaggtgaggaagcaatataggaagctagctctgctgctgcacccagacaagaacaagtctgttggtgctgaggaggccttcaaactgatctctgaggcgtggagtgtgttgtcagatactagcaggaaggtagtttatgatgagaagcgaagaaatcattctgttgtcaatgtaaccaatggcatttatacctatgataagaaggcaaacaagagggctcgaaagaatgctgctgctgcagctgctgccgctgctgctgccgctgcagctgaggctactactcgtcctgttgggattgatacattttggacatcttgcaaccgctgccggatgcagtatgagtacttaaggatttatcttaatcataacctgttgtgcccaaattgccataatgcattcttggcagtggagactgggttcccttgcaatggaagcagctcatcattctcatggtcaaccaagcagcagccgcagcagaaccacaattcaaccaagcattcatatggctcaacaagcaggacttctagcatccctggtacagggaatggggggtaccagcaagataatacttatgattcttacaacaatcaaggcttccagtggaatcagtactccaagacaacaactgcagctgttactaatgcttatagtacacaggccttggagaaacagagaaggaagcatgacgagagctacagctacaactattctgaaagcggcaacacatatgttcatgagaaagctgcttcaaggcgcggtcgcttctcaaagcggagaaggcataactatgatgcttataccactgtggattatggtggcgataacaaagaaacagttgctgcaactgcaagcacagaaccaactgctgtttttactgatgtgggacgggtcaatggtacttcagtggaaaggtttaaatctgcagtgagtggaagaagagcaaatattctgggtgagattacccagattgatacacgaaatttacttcttgagaaagccaaggcaactgtctgtgaaaaattgcatgaattaaacatcacaccatcttcacgagctgcagatagaagaggatctgaaggaaagctgtatccttgtgacaacaacataaaggtcaacggtgtcctctctgacaaacctggcaagggagtcaagctatgcaactcaagaagcatggaaatccaagtgcctgctaccgatgacaaaaatccagagcaacgccgtgtgcctgtgtccatcgatgtcccagaccctgacttccatgatttcgataaagaccgaacggagaaggcttttgatactgatcaagtatgggctacctatgactgcgaggacggcatgccccgcctatatgtaatggttcagaaagttctttcaacgaggcccttccggatccgcatgagctttctcaactcgaagtcaaatatcgaactggcgcctataaactgggtcgcctctggtttccaaaagacatgtggtgacttcagggttgggagatatcaggtgagcgaaacggtgaacatattttcacatagagtgaggtggactaaaggtccccgtggcatcatcaggatcgttccccagaaaggggacacgtgggccttgtaccgtaactggtcccccgactggaacgagctgacgcctgatgacgtgatatacaagtacgagatagtggaagtcgctgatgatttcactgaggagcgagggctgactgtcatcccgttgctgaaggttgccggattcaaagccgtcttccacagacacgtggatcccgaggaggtgaggaggataccaaaggaagagctgttccggttctcgcaccgggttccttctcgtctcctgacgggcgaagagggcagcaatgccccgaaaggctgccatgagctggaccctgctgccactccagtggaccttctcaaggttatcacggagcacaaggaagacgcggtggcgcagagtcctaaataggagtgagcgactccgataacagcgaagataaggtagctggatgtctgagtgaccagatccccacttggttaatgacagcgtgccagcacatgatggtgtctaaagctctactacgccatcttattttcggctgatggcttggacaacacttccagggcaagcagcctgtgtgtgtgtgtgacggacttctgaccttgttaattcttaggcattcctaacatttgattctatcactacacaagccaaccgccacgtagattaaatggccattgggaggaggccggccgcgcacggcaccgagatgagatgaggaggttagtcacggaggtagggagggtgaagatgttacttgtttgtgttgctcactctgtaatgtaggaggcaggctcgagccgagggaaagagctgcttggctttgcttgcccatgtaccccgcatttctgtacctgtttttttacttatgatgatgatgatgtatttccttcttgttttatagtagtaagtaattcacggccagtaattgtagactctggtaaccgtttcggaaaatctagtgctttatctggtggatgattctgtctgaccctgtgctgtttggctgtgcaccgagctacttggatggattggctgattcgaggatgaattctttgtgctgacgcatgatgtacccaagaatgtactcctggtcctggcatcatgtggattgtaccgct

SEQ ID NO: 222449 - DNA, 3034 bp, Zea Mays
catgacccttctcagcacattgccgtcgtgtattgcaaaatttcggaggctttgactaaaaaagcttcgttttttcgagcttgctcctgccccgaaataaaattcggggccccaaaaattcgcaattctgggggctggccccccgaattagcgcgcctcccggagatccggcgccggcccaggcagtgaagatttctaatctggatgtacttaactgcaggctaaggcaatgaagatttctaatctggatgcacacttaatcttgtccagttcttgatcttgggctttgctgcttcctctcaagttagtttgttggccaatcgagtccagaggcgcagatgagtgaggagtacaatatggatgtggccctaaaagccaaaaatgttgctgagaccaagttccatgcccgagacatcaggggtgctcggaagtatgcactcaaggcccagaatctctgcccaacacttgaaggcatattgcagatggtctcaacgcttgaagttcatcttgcagctgagtccaagattgatggagagagtgactggtataggatattgtgtctaggtgcctttgcagatgaagaggaggtgaggaagcaatataggaagctagctctgctgctgcacccagacaagaacaagtctgttggtgctgaggaggccttcaaactgatctctgaggcgtggagtgtgttgtcagatactagcaggaaggtagtttatgatgagaagcgaagaaatcattctgttgtcaatgtaaccaatggcatttatacctatgataagaaggcaaacaagagggctcgaaagaatgctgctgctgcagctgctgccgctgctgctgccgctgcagctgaggctactactcgtcctgttgggattgatacattttggacatcttgcaaccgctgccggatgcagtatgagtacttaaggatttatcttaatcataacctgttgtgcccaaattgccataatgcattcttggcagtggagactgggttcccttgcaatggaagcagctcatcattctcatggtcaaccaagcagcagccgcagcagaaccacaattcaaccaagcattcatatggctcaacaagcaggacttctagcatccctggtacagggaatggggggtaccagcaagataatacttatgattcttacaacaatcaaggcttccagtggaatcagtactccaagacaacaactgcagctgttactaatgcttatagtacacaggccttggagaaacagagaaggaagcatgacgagagctacagctacaactattctgaaagcggcaacacatatgttcatgagaaagctgcttcaaggcgcggtcgcttctcaaagcggagaaggcataactatgatgcttataccactgtggattatggtggcgataacaaagaaacagttgctgcaactgcaagcacagaaccaactgctgtttttactgatgtgggacgggtcaatggtacttcagtggaaaggtttaaatctgcagtgagtggaagaagagcaaatattctgggtgagattacccagattgatacacgaaatttacttcttgagaaagccaaggcaactgtctgtgaaaaattgcatgaattaaacatcacaccatcttcacgagctgcagatagaagaggatctgaaggaaagctgtatccttgtgacaacaacataaaggtcaacggtgtcctctctgacaaacctggcaagggagtcaagctatgcaactcaagaagcatggaaatccaagtgcctgctaccgatgacaaaaatccagagcaacgccgtgtgcctgtgtccatcgatgtcccagaccctgacttccatgatttcgataaagaccgaacggagaaggcttttgatactgatcaagtatgggctacctatgactgcgaggacggcatgccccgcctatatgtaatggttcagaaagttctttcaacgaggcccttccggatccgcatgagctttctcaactcgaagtcaaatatcgaactggcgcctataaactgggtcgcctctggtttccaaaagacatgtggtgacttcagggttgggagatatcaggttgccggattcaaagccgtcttccacagacacgtggatcccgaggaggtgaggaggataccaaaggaagagctgttccggttctcgcaccgggttccttctcgtctcctgacgggcgaagagggcagcaatgccccgaaaggctgccatgagctggaccctgctgccactccagtggaccttctcaaggttatcacggagcacaaggaagacgcggtggcgcagagtcctaaataggagtgagcgactccgataacagcgaagataaggtagctggatgtctgagtgaccagatccccacttggttaatgacagcgtgccagcacatgatggtgtctaaagctctactacgccatcttattttcggctgatggcttggacaacacttccagggcaagcagcctgtgtgtgtgtgtgacggacttctgaccttgttaattcttaggcattcctaacatttgattctatcactacacaagccaaccgccacgtagattaaatggccattgggaggaggccggccgcgcacggcaccgagatgagatgaggaggttagtcacggaggtagggagggtgaagatgttacttgtttgtgttgctcactctgtaatgtaggaggcaggctcgagccgagggaaagagctgcttggctttgcttgcccatgtaccccgcatttctgtacctgtttttttacttatgatgatgatgatgtatttccttcttgttttatagtagtaagtaattcacggccagtaattgtagactctggtaaccgtttcggaaaatctagtgctttatctggtggatgattctgtctgaccctgtgctgtttggctgtgcaccgagctacttggatggattggctgattcgaggatgaattctttgtgctgacgcatgatgtacccaagaatgtactcctggtcctggcatcatgtggattgtaccgct

SEQ ID NO: 222450 - DNA, 1981 bp, Zea Mays
cacccaccttctcagtgactcacgaactcacgactccagatctcccaccgctcgccatggacctcctcgacgcgaggcaccgccacacgccggattcgagctcctccccacatgccgcctccgacatgggtctcccgctcgccggggctgcctaccagccctacgtctctgagctcctctccttctccatcgagcgcctccacaaggagccggagcttctgagggtcgacgcggagcgagtgcgacggcagatgcaggaggtggcggtggagaactacggcgccttcatcgccgcctccgaggcgctctccttcgtccgcgcgcagctcgagagcttcgatggccacctcgaggccatggtgtatacggaatgggaactatgatgaagcacttgatctagaagcttttgtgagcaaaatatcgaagttgcacccagatttacctgttgtccaaggattagctgctgaagtaaagaagacagtacaatcattaatttcccagcttctccagaaactccgatcaaatattcagttacctgagtgcctccgtattgtagcacatctgcgtcgaattggagttttcagtgagtcagaattgcgcttacagttcctgaggtgcagggaagcttggctttctggaattcttgaagatctggaccaaaggaatgtttatgattacctcaaaggcatggtgacttgccacagggtacatctattcgatgttgttaatcaatatcgagcaatattcaacaatgataaatctggaaatgatgagaactccgaaggtgggctgcttttcagctgggcaatgcaacaagttagtaatcacctcgctactcttcaagttatgttaccaagcataacagaaggtgggtctctgtccaacattcttgaacaatgcatgtattgtgcaatgggccttggcttagttggattggatttccgtggcctccttccgccaatctttgaggacgcggttctaaatttattctcaaagaatatgagtatggcggttgaaaattttcaggttgttttggattcgcaccgctgggttccgatgccatctgttggctttgtagcaaatggtgttgtcgatgacacttctgatgatgtgactccaccttctgttttaatggagcatccacctcttgcagtgtttgttaacggtgtttcagcagcaatgaatgagctaagaccgtgcacaccattgagcttgaaagtcatccttgctcaggaggtggtcaagggactacatgcagtctctgactccctagtaagatacaaagctatgcggatgcttcgtggaaatgagtccgctcttttcctgtcactctgccaggcatttatcgaggttgtacatccttattgtgccgcatgttttggtcgatgctacccgaatggggcaacattgatctcagagtgtcaaggcacactggacgctgtccgtcagctattgaccatacctgcaagatctaacagttccagtatcgaaagaaagcagtcaggagccattgaaagaaagcaatctgttgagagccctgggacagcagtcacgaataacgagctgtcagccgatggacctgggctagagatcaacgatgctgctacaaccaccaccccaccggtagaggacgacgtgagtacccatccaccagcaagtaagtagcttggacctccgtttgaatttgttaaagctctttatcaaggcctggtttagtcaaccagagaagaaattgctgcaaacattatattcatcgataataattcatagttttgctccagttctacagtgtacacaatacctcactggatatttgtatcttattttttttatcactcattaaatttttagctgttcattgttatagtcaatacctagatgttgtagagtgtgtccaacctgaacattcagtaatatgatgagtacaaacggtgttcatcgtgttgactgcacacttctgaaataaaagatctgattcatg

SEQ ID NO: 222451 - DNA, 2114 bp, Zea Mays
cccaccttctcagtgactcacgaactcacgactccagatctcccaccgctcgccatggacctcctcgacgcgaggcaccgccacacgccggattcgagctcctccccacatgccgcctccgacatgggtctcccgctcgccggggctgcctaccagccctacgtctctgagctcctctccttctccatcgagcgcctccacaaggagccggagcttctgagggtcgacgcggagcgagtgcgacggcagatgcaggaggtggcggtggagaactacggcgccttcatcgccgcctccgaggcgctctccttcgtccgcgcgcagctcgagagcttcgatggccacctcgaggccatgatagaggagataccaaacttaacatctggctgcactgagtttgttgagtctgcacaacaaattctggaggagaggaagcttaaccaaacattactagccaaccacactacattgcttgacttgcttgaaatcccaccattgatggacacgtgtatacggaatgggaactatgatgaagcacttgatctagaagcttttgtgagcaaaatatcgaagttgcacccagatttacctgttgtccaaggattagctgctgaagtaaagaagacagtacaatcattaatttcccagcttctccagaaactccgatcaaatattcagttacctgagtgcctccgtattgtagcacatctgcgtcgaattggagttttcagtgagtcagaattgcgcttacagggaagcttggctttctggaattcttgaagatctggaccaaaggaatgtttatgattacctcaaaggcatggtgacttgccacagggtacatctattcgatgttgttaatcaatatcgagcaatattcaacaatgataaatctggaaatgatgagaactccgaaggtgggctgcttttcagctgggcaatgcaacaagttagtaatcacctcgctactcttcaagttatgttaccaagcataacagaaggtgggtctctgtccaacattcttgaacaatgcatgtattgtgcaatgggccttggcttagttggattggatttccgtggcctccttccgccaatctttgaggacgcggttctaaatttattctcaaagaatatgagtatggcggttgaaaattttcaggttgttttggattcgcaccgctgggttccgatgccatctgttggctttgtagcaaatggtgttgtcgatgacacttctgatgatgtgactccaccttctgttttaatggagcatccacctcttgcagtgtttgttaacggtgtttcagcagcaatgaatgagctaagaccgtgcacaccattgagcttgaaagtcatccttgctcaggaggtggtcaagggactacatgcagtctctgactccctagtaagatacaaagctatgcggatgcttcgtggaaatgagtccgctcttttcctgtcactctgccaggcatttatcgaggttgtacatccttattgtgccgcatgttttggtcgatgctacccgaatggggcaacattgatctcagagtgtcaaggcacactggacgctgtccgtcagctattgaccatacctgcaagatctaacagttccagtatcgaaagaaagcagtcaggagccattgaaagaaagcaatctgttgagagccctgggacagcagtcacgaataacgagctgtcagccgatggacctgggctagagatcaacgatgctgctacaaccaccaccccaccggtagaggacgacgtgagtacccatccaccagcaagtaagtagcttggacctccgtttgaatttgttaaagctctttatcaaggcctggtttagtcaaccagagaagaaattgctgcaaacattatattcatcgataataattcatagttttgctccagttctacagtgtacacaatacctcactggatatttgtatcttattttttttatcactcattaaatttttagctgttcattgttatagtcaatacctagatgttgtagagtgtgtccaacctgaacattcagtaatatgatgagtacaaacggtgttcatcgtgttgactgcacacttctgaaataaaagatctgattcatg

SEQ ID NO: 222452 - DNA, 1970 bp, Zea Mays
accttctcagtgactcacgaactcacgactccagatctcccaccgctcgccatggacctcctcgacgcgaggcaccgccacacgccggattcgagctcctccccacatgccgcctccgacatgggtctcccgctcgccggggctgcctaccagccctacgtctctgagctcctctccttctccatcgagcgcctccacaaggagccggagcttctgagggtcgacgcggagcgagtgcgacggcagatgcaggaggtggcggtggagaactacggcgccttcatcgccgcctccgaggcgctctccttcgtccgcgcgcagctcgagagcttcgatggccacctcgaggccatgatagaggagataccaaacttaacatctggctgcactgagtttgttgagtctgcacaacaaattctggaggagaggaagcttaaccaaacattactagccaaccacactacattgcttgacttgcttgaaatcccaccattgatggacacgtgtatacggaatgggaactatgatgaagcacttgatctagaagcttttgtgagcaaaatatcgaagttgcacccagatttacctgttgtccaaggattagctgctgaagtaaagaagacagtacaatcattaatttcccagcttctccagaaactccgatcaaatattcagttacctgagtgcctccgtattgtagcacatctgcgtcgaattggagttttcagtgagtcagaattgcgcttacagttcctgaggtgcagggaagcttggctttctggaattcttgaagatctggaccaaaggaatgtttatgattacctcaaaggcatggtgacttgccacagggtacatctattcgatgttgttaatcaatatcgagcaatattcaacaatgataaatctggaaatgatgagaactccgaaggtgggctgcttttcagctgggcaatgcaacaacgcggttctaaatttattctcaaagaatatgagtatggcggttgaaaattttcaggttgttttggattcgcaccgctgggttccgatgccatctgttggctttgtagcaaatggtgttgtcgatgacacttctgatgatgtgactccaccttctgttttaatggagcatccacctcttgcagtgtttgttaacggtgtttcagcagcaatgaatgagctaagaccgtgcacaccattgagcttgaaagtcatccttgctcaggaggtggtcaagggactacatgcagtctctgactccctagtaagatacaaagctatgcggatgcttcgtggaaatgagtccgctcttttcctgtcactctgccaggcatttatcgaggttgtacatccttattgtgccgcatgttttggtcgatgctacccgaatggggcaacattgatctcagagtgtcaaggcacactggacgctgtccgtcagctattgaccatacctgcaagatctaacagttccagtatcgaaagaaagcagtcaggagccattgaaagaaagcaatctgttgagagccctgggacagcagtcacgaataacgagctgtcagccgatggacctgggctagagatcaacgatgctgctacaaccaccaccccaccggtagaggacgacgtgagtacccatccaccagcaagtaagtagcttggacctccgtttgaatttgttaaagctctttatcaaggcctggtttagtcaaccagagaagaaattgctgcaaacattatattcatcgataataattcatagttttgctccagttctacagtgtacacaatacctcactggatatttgtatcttattttttttatcactcattaaatttttagctgttcattgttatagtcaatacctagatgttgtagagtgtgtccaacctgaacattcagtaatatgatgagtacaaacggtgttcatcgtgttgactgcacacttctgaaataaaagatctgattcatg

SEQ ID NO: 222453 - DNA, 1698 bp, Zea Mays
atggacctcctcgacgcgaggcaccgccacacgccggattcgagctcctccccacatgccgcctccgacatgggtctcccgctcgccggggctgcctaccagccctacgtctctgagctcctctccttctccatcgagcgcctccacaaggagccggagcttctgagggtcgacgcggagcgagtgcgacggcagatgcaggaggtggcggtggagaactacggcgccttcatcgccgcctccgaggcgctctccttcgtccgcgcgcagctcgagagcttcgatggccacctcgaggccatgttacctgagtgcctccgtattgtagcacatctgcgtcgaattggagttttcagtgagtcagaattgcgcttacagttcctgaggtgcagggaagcttggctttctggaattcttgaagatctggaccaaaggaatgtttatgattacctcaaaggcatggtgacttgccacagggtacatctattcgatgttgttaatcaatatcgagcaatattcaacaatgataaatctggaaatgatgagaactccgaaggtgggctgcttttcagctgggcaatgcaacaagttagtaatcacctcgctactcttcaagttatgttaccaagcataacagaaggtgggtctctgtccaacattcttgaacaatgcatgtattgtgcaatgggccttggcttagttggattggatttccgtggcctccttccgccaatctttgaggagttgttttggattcgcaccgctgggttccgatgccatctgttggctttgtagcaaatggtgttgtcgatgacacttctgatgatgtgactccaccttctgttttaatggagcatccacctcttgcagtgtttgttaacggtgtttcagcagcaatgaatgagctaagaccgtgcacaccattgagcttgaaagtcatccttgctcaggaggtggtcaagggactacatgcagtctctgactccctagtaagatacaaagctatgcggatgcttcgtggaaatgagtccgctcttttcctgtcactctgccaggcatttatcgaggttgtacatccttattgtgccgcatgttttggtcgatgctacccgaatggggcaacattgatctcagagtgtcaaggcacactggacgctgtccgtcagctattgaccatacctgcaagatctaacagttccagtatcgaaagaaagcagtcaggagccattgaaagaaagcaatctgttgagagccctgggacagcagtcacgaataacgagctgtcagccgatggacctgggctagagatcaacgatgctgctacaaccaccaccccaccggtagaggacgacgtgagtacccatccaccagcaagtaagtagcttggacctccgtttgaatttgttaaagctctttatcaaggcctggtttagtcaaccagagaagaaattgctgcaaacattatattcatcgataataattcatagttttgctccagttctacagtgtacacaatacctcactggatatttgtatcttattttttttatcactcattaaatttttagctgttcattgttatagtcaatacctagatgttgtagagtgtgtccaacctgaacattcagtaatatgatgagtacaaacggtgttcatcgtgttgactgcacacttctgaaataaaagatctgattcatg

SEQ ID NO: 222454 - DNA, 3091 bp, Zea Mays
aactcgctgcctccagcgacgaccgcgagggggggccgaaataggcaggcaggcagcggcaggccacccaaaaagcgaccaccctgcgcgcaccacctcggctgccattgccattggccattgccatagccatggccacgccatgacgccccgcccagctgcacgcgctcacacccccaccgctccactccgctccgcctaactctcaccctcacccgccaccgctcgcctccccatgcttccgcgctgctgccgccgccgctcgggtgcctcctgcctcgccgtgctcctcctcctgctgctgcacgcgggcgcggcgtccgcgcagggcgcgcttgcgcggcaggacgtcgcggcgctccacggcctgcgcgcgtcgcttggcgtgcgcgccagcgactggcccgacagggccgacccctgcaccttctggtcgggcgtcgtctgccgcgccggccgcgtcgcggagctccgcctctccgggctccgccgcacccgcgcgggcgcccggagcgcggccttcgccgtcgaccaactcccgcggctcgcagcgctccaggcgttcaacgcctccgggttcccgctccccggccggatcccgtcctggttcggccgcggcctgccgccgtcgctcgccgtcgttgacctccgctccgcacgcgtcaatggcgagctcccggtcgatctcggcatgtccgggaacctcaccacccttgttctctccgtggtggagctggagtcttgttcaacgcctctggtaatgccttgtacggcgccgtcggcgatgccactggctccctcaggaagaggttctgggttgttgatgtctctgacaattacttcgatcaggtgcttggaactgggtttcagaatggaaccgatggtgtagtggatctcaggatgaactgtttgtctggtgcagcaagccagcgtacccgcggggattgtgaggctttctacacgaggaacggggtgaggcttgcgttggaccccaagccaccatcgccattgccagagccacagccaccacaggtgctgatgccgtcaacgaaaaagagagggggcaaatggaagtttgtattgaccggggtccttggtggtgctgcaattctggtaacacttggccttagcgttctggtattttgcttgttgagaagaaaaggaaggaaaccgagagggagaggagtggagcagactgaagagggcattcggtctgggcggagaagtagtagtgtgaatcccgtcacaatgtcacccatggcatcccccagagccagtggttcaccaaagggcgttcctattatcacagatgaattcacctatgagcagttgcaccatgctgcagggggctttggggatgataacctcgtcaagcatgggcactccggtgacatgtactatggtgtcctggagagtggctttcaagttgtcataaaaaagattgatctgaagaccaggaagaagtgccagggcgaattgagcttccttacaaagcatacccatgggaggatcgttccattgctgggccatttggctaaggatgaagaggaattgcttgtctataagtacatggcaaaaggtgacctcacaaccgcactgcacaagaagtcagtggaagttgaacaggggttgcgctcattggattggataacgaggctcaagattgcaataggtgtggctgaggccttgtgcttccttcatgacgaatgcaatcctccgttggtccacagagatatccaagccagcagtgtgcttcttgaggacaaatttgaagtgtgccttgggagtctgagtgaaatatgcactcaacaaagtgcaggaagccaaagtttcttctctcggattctaagatcatcgaagtcccttgacaagaacataccaggtccaccagctagctgctcatacgacatttactgtttcgggaaggttctactagagctaatcactggaaacttcggtgcgagtggctcaaccaacgcagattcagaagagtggttagcaagaacattagattacatcaacgcaaatgacaaggagggtgtctcaggtattgtggatcccacccttgttgtggatgatgaccatctagaggaagtgtgggcagtgtccatcgtcgcgaagacatgcctgaatccaaagccctctaggcgtccactcgctcgatacatcctgaaagcactggagaacccactaagggtggtgcgggagcaggaagagttccaatccagtccatctcacctcagaagtaccccatcccagggctcttggcgtttcgctttccatggaaacaagtaccacagctgggaggccatgccaacgtcggggcaagcacttgctcggaaaaatacagcgaagtctcaggggaccgaggggagtgacgaggacgaagagaactcgttctcgttcaagagggcttctcgggacgattttccggatcccatagagtttgaaggaggtgttgttgtgaaggagtacccgcagactagctagcgatacttgatgtgcatctctttgatgtctctaggtgaaaagctgtgtatacagaatagataaatttttcccctcttttctctttacttgtttatctcagtcgattgaaatggaataaatggcgcactgggtgtgccatccttgaaatgcaagccagtaaagttctcagatagagccatttgccattcaaaaactgttatgaaattttagtggttgatccaaagtgaattgtagtggagagcagtttaagccttacccgggaggtggttctggtcgttggattgaatgggatcatacttctgcagctgaaaacttttgagcatggccactggtgcgtactgagtgtgatagagcattcatctgcagctgcagtttcatccggtgagcttgaacaccgaagacgaaatggagggcacctccatggtctgttgtagcttctgttgagtttgaaaaaacggacaaaagaagcaatctgaacattatggagatcggtgataccagactagtgccatggacggatggcacgcagttatggagatcggcgacagcactgcccgccccctccgcgaggcagcaccagttacgggaggttgacttcaat

SEQ ID NO: 222455 - DNA, 2670 bp, Zea Mays
cctggcccctgtgctccccttgccaccgaacgagagccaaaagcctcccgccccacgacgcgcccgccccggcggcgacgccccggaggacgtttcccgcagcgaccggcgaccaagccttgattgcctccgccccatggctacccgggcgcgggcgtagccgccgcctcggccgcagcaggctcggtccgcccccctcggcgatttctgttccagtcgcatcgcgcgacagctcgtcgtccgattcggatccccgccaccgcggcggaacgaggcgtctccggtccccgagggtattcggggaatttgagactgataagtcgggatcctgtcgataatgcggggctacgtgtacgagaccaatgaagtggaagatgagtacggagatgagtactatgatcaagatgagtatgaggaggaaggttcgggtgctggggatgggtatgctgaggaggaagagcctacagagggacaaaaggagatccttgaattgagagaaagattaaaagagcagattaggcgaaaggcaaaggctgctgctgcctgcacagctggtcgatcatcttcttcacaaatacctcaagccagggacaaatttggctctttttttgggccatccaagccggtgatttctcgtcgagtgatagaagaaagaaaatcattgaaagaactgcatagcacggttgcaagggagccaaggccttctggagtacataaggatattccatcgtcctctaaagtgcaaagtagagtaaatggacatcagcataaacaaaagattgttaatcaggtaaagaagaaggctgaggcacttaaggataaccgggattattcatttctactctcggatgatgctgacctgtcatcctctccaaaggagaaacctgctgctagatcttccttgactcaaagggctgatcgtgaggtgacacaatcaacagtaaagaggaaggcaccaacaagtcaacctgcacgcttgtcaaatggatatggacctaagaacacaatgtcaactcaaaggcatgctgaaggtaaggtaaattccatgagaagggaggatttctcgaatacagaaagggttgtttcacgtgacaatgagaggatgtatgaaagggttgtttcacgtgacaatgagaggatgcatagtattgcaagaaatggatccaaccaggcaagtactagcaaaaccacaatccaaaagcatccaagcaggggtcccattgctaataagcaaccgtccaaggattcgaatgatgcaactctgaggaagagcagtgtagcctcaaagcaccatcccttagagattgacagaccaaaatcctcgcaaagtcagaggatgcagtcagctggtcagagaccacagcattcttcccatggtcagacgccacatcaatccatgcagcataggacgcagcagtcattgcagagtcggaggccacaacaaatgacacagggtcagaagccacaacagtctttgcagagtcaaaggactcaacagtccttgcagaatcgaaggccacagcagtcctcacatattcagaaatcgcaatcctcacaagcacacagaccacagtcattaagtaacaggtctcaggctttacaaggacaaaggcctctttcttcacagggtcaatatccggagcaaagaagagtacatgcaagtgacagagtcaaacaagctgaaaggcagattcggcctccttccaagtccatgccatcacggccagtctcttccaatggaattcgtgatgatcatgcaaaaaggaagcaagtggcaaaaagaagatttgatgaagatgatgaagaccccttagcaatgatcagaaatatgtttgggtatgatcctagtagatatgcaggcagagatgaagatgtcagtgacatggaagccgattttgctactatagaaatggaagagaaaaggagcgcgaggattgctaggcaggaggatgaagaacaacttcgcttgattgaggaagaagagagacgcgagcaggagagaaagaggcgaaagatggcacgaggccgatagtcgaatacactcctatttggatgttataatatactaccttcgttctcgaatatttgtcgtccgctggttcatttttgaactaaaccgtgacaaataaaaaagaacgcaggagtatctggcaggcctgattgcctgaatacgaagccccatggcggatcagacaggcacttctcttgcagtcctgtttacccttaccacgatgattatctggaggcaaatcaagggaaaacgacaggtgaccaacactgggcacgtgtaacagcagactgtagttgtagtggtttagttctcgaagctgacatggactatatttaagttctcgtcagattgtttggatagcagaaggtttccattgttgcagcgcctcaccagattgtttcttcatatgatatactgattctttcagtcaagcctatataaggatgcgtaatacaagtgcccctcttgtatatctttttcgggtgtaatagtgttgtaataaacgatgttcgaattttcggatatgattttgagctttgtcaggcgatcactgcaccacggtccacagagatgcgcttctggccgggagccaatcgaaggaagcgggaaaggggatgctgcacctttcgtagacaacattattattttgcaggttttgg

SEQ ID NO: 222456 - DNA, 2746 bp, Zea Mays
cctggcccctgtgctccccttgccaccgaacgagagccaaaagcctcccgccccacgacgcgcccgccccggcggcgacgccccggaggacgtttcccgcagcgaccggcgaccaagccttgattgcctccgccccatggctacccgggcgcgggcgtagccgccgcctcggccgcagcaggctcggtccgcccccctcggcgatttctgttccagtcgcatcgcgcgacagctcgtcgtccgattcggatccccgccaccgcggcggaacgaggcgtctccggtccccgagggtattcggggaatttgagactgataagtcgggatcctgtcgataatgcggggctacgtgtacgagaccaatgttgctgtggacagaccgcagaagggaagggagcctgcgctagttgctaatgacggagagcgagggttaccaccaggaagtggaagatgagtacggagatgagtactatgatcaagatgagtatgaggaggaaggttcgggtgctggggatgggtatgctgaggaggaagagcctacagagggacaaaaggagatccttgaattgagagaaagattaaaagagcagattaggcgaaaggcaaaggctgctgctgcctgcacagctggtcgatcatcttcttcacaaatacctcaagccagggacaaatttggctctttttttgggccatccaagccggtgatttctcgtcgagtgatagaagaaagaaaatcattgaaagaactgcatagcacggttgcaagggagccaaggccttctggagtacataaggatattccatcgtcctctaaagtgcaaagtagagtaaatggacatcagcataaacaaaagattgttaatcaggtaaagaagaaggctgaggcacttaaggataaccgggattattcatttctactctcggatgatgctgacctgtcatcctctccaaaggagaaacctgctgctagatcttccttgactcaaagggctgatcgtgaggtgacacaatcaacagtaaagaggaaggcaccaacaagtcaacctgcacgcttgtcaaatggatatggacctaagaacacaatgtcaactcaaaggcatgctgaaggtaaggtaaattccatgagaagggaggatttctcgaatacagaaagggttgtttcacgtgacaatgagaggatgtatgaaagggttgtttcacgtgacaatgagaggatgcatagtattgcaagaaatggatccaaccaggcaagtactagcaaaaccacaatccaaaagcatccaagcaggggtcccattgctaataagcaaccgtccaaggattcgaatgatgcaactctgaggaagagcagtgtagcctcaaagcaccatcccttagagattgacagaccaaaatcctcgcaaagtcagaggatgcagtcagctggtcagagaccacagcattcttcccatggtcagacgccacatcaatccatgcagcataggacgcagcagtcattgcagagtcggaggccacaacaaatgacacagggtcagaagccacaacagtctttgcagagtcaaaggactcaacagtccttgcagaatcgaaggccacagcagtcctcacatattcagaaatcgcaatcctcacaagcacacagaccacagtcattaagtaacaggtctcaggctttacaaggacaaaggcctctttcttcacagggtcaatatccggagcaaagaagagtacatgcaagtgacagagtcaaacaagctgaaaggcagattcggcctccttccaagtccatgccatcacggccagtctcttccaatggaattcgtgatgatcatgcaaaaaggaagcaagtggcaaaaagaagatttgatgaagatgatgaagaccccttagcaatgatcagaaatatgtttgggtatgatcctagtagatatgcaggcagagatgaagatgtcagtgacatggaagccgattttgctactatagaaatggaagagaaaaggagcgcgaggattgctaggcaggaggatgaagaacaacttcgcttgattgaggaagaagagagacgcgagcaggagagaaagaggcgaaagatggcacgaggccgatagtcgaatacactcctatttggatgttataatatactaccttcgttctcgaatatttgtcgtccgctggttcatttttgaactaaaccgtgacaaataaaaaagaacgcaggagtatctggcaggcctgattgcctgaatacgaagccccatggcggatcagacaggcacttctcttgcagtcctgtttacccttaccacgatgattatctggaggcaaatcaagggaaaacgacaggtgaccaacactgggcacgtgtaacagcagactgtagttgtagtggtttagttctcgaagctgacatggactatatttaagttctcgtcagattgtttggatagcagaaggtttccattgttgcagcgcctcaccagattgtttcttcatatgatatactgattctttcagtcaagcctatataaggatgcgtaatacaagtgcccctcttgtatatctttttcgggtgtaatagtgttgtaataaacgatgttcgaattttcggatatgattttgagctttgtcaggcgatcactgcaccacggtccacagagatgcgcttctggccgggagccaatcgaaggaagcgggaaaggggatgctgcacctttcgtagacaacattattattttgcaggttttgg

SEQ ID NO: 222457 - DNA, 2654 bp, Zea Mays
cctggcccctgtgctccccttgccaccgaacgagagccaaaagcctcccgccccacgacgcgcccgccccggcggcgacgccccggaggacgtttcccgcagcgaccggcgaccaagccttgattgcctccgccccatggctacccgggcgcgggcgtagccgccgcctcggccgcagcaggctcggtccgcccccctcggcgatttctgttccagtcgcatcgcgcgacagctcgtcgtccgattcggatccccgccaccgcggcggaacgaggcgtctccggtccccgagggtattcggggaatttgagactgataagtcgggatcctgtcgataatgcggggctacgtgtacgagaccaatggttaccaccaggaagtggaagatgagtacggagatgagtactatgatcaagatgagtatgaggaggaaggttcgggtgctggggatgggtatgctgaggaggaagagcctacagagggacaaaaggagatccttgaattgagagaaagattaaaagagcagattaggcgaaaggcaaaggctgctgctgcctgcacagctggtcgatcatcttcttcacaaatacctcaagccagggacaaccggtgatttctcgtcgagtgatagaagaaagaaaatcattgaaagaactgcatagcacggttgcaagggagccaaggccttctggagtacataaggatattccatcgtcctctaaagtgcaaagtagagtaaatggacatcagcataaacaaaagattgttaatcaggtaaagaagaaggctgaggcacttaaggataaccgggattattcatttctactctcggatgatgctgacctgtcatcctctccaaaggagaaacctgctgctagatcttccttgactcaaagggctgatcgtgaggtgacacaatcaacagtaaagaggaaggcaccaacaagtcaacctgcacgcttgtcaaatggatatggacctaagaacacaatgtcaactcaaaggcatgctgaaggtaaggtaaattccatgagaagggaggatttctcgaatacagaaagggttgtttcacgtgacaatgagaggatgtatgaaagggttgtttcacgtgacaatgagaggatgcatagtattgcaagaaatggatccaaccaggcaagtactagcaaaaccacaatccaaaagcatccaagcaggggtcccattgctaataagcaaccgtccaaggattcgaatgatgcaactctgaggaagagcagtgtagcctcaaagcaccatcccttagagattgacagaccaaaatcctcgcaaagtcagaggatgcagtcagctggtcagagaccacagcattcttcccatggtcagacgccacatcaatccatgcagcataggacgcagcagtcattgcagagtcggaggccacaacaaatgacacagggtcagaagccacaacagtctttgcagagtcaaaggactcaacagtccttgcagaatcgaaggccacagcagtcctcacatattcagaaatcgcaatcctcacaagcacacagaccacagtcattaagtaacaggtctcaggctttacaaggacaaaggcctctttcttcacagggtcaatatccggagcaaagaagagtacatgcaagtgacagagtcaaacaagctgaaaggcagattcggcctccttccaagtccatgccatcacggccagtctcttccaatggaattcgtgatgatcatgcaaaaaggaagcaagtggcaaaaagaagatttgatgaagatgatgaagaccccttagcaatgatcagaaatatgtttgggtatgatcctagtagatatgcaggcagagatgaagatgtcagtgacatggaagccgattttgctactatagaaatggaagagaaaaggagcgcgaggattgctaggcaggaggatgaagaacaacttcgcttgattgaggaagaagagagacgcgagcaggagagaaagaggcgaaagatggcacgaggccgatagtcgaatacactcctatttggatgttataatatactaccttcgttctcgaatatttgtcgtccgctggttcatttttgaactaaaccgtgacaaataaaaaagaacgcaggagtatctggcaggcctgattgcctgaatacgaagccccatggcggatcagacaggcacttctcttgcagtcctgtttacccttaccacgatgattatctggaggcaaatcaagggaaaacgacaggtgaccaacactgggcacgtgtaacagcagactgtagttgtagtggtttagttctcgaagctgacatggactatatttaagttctcgtcagattgtttggatagcagaaggtttccattgttgcagcgcctcaccagattgtttcttcatatgatatactgattctttcagtcaagcctatataaggatgcgtaatacaagtgcccctcttgtatatctttttcgggtgtaatagtgttgtaataaacgatgttcgaattttcggatatgattttgagctttgtcaggcgatcactgcaccacggtccacagagatgcgcttctggccgggagccaatcgaaggaagcgggaaaggggatgctgcacctttcgtagacaacattattattttgcaggttttgg

SEQ ID NO: 222458 - DNA, 3157 bp, Zea Mays
cctggcccctgtgctccccttgccaccgaacgagagccaaaagcctcccgccccacgacgcgcccgccccggcggcgacgccccggaggacgtttcccgcagcgaccggcgaccaagccttgattgcctccgccccatggctacccgggcgcgggcgtagccgccgcctcggccgcagcaggctcggtccgcccccctcggcgatttctgttccagtcgcatcgcgcgacagctcgtcgtccgattcggatccccgccaccgcggcggaacgaggcgtctccggtccccgagggtattcggggaatttgagactgataagtcgggatcctgtcgataatgcggggctacgtgtacgagaccaataccgcagaagggaagggagcctgcgctagttgctaatgacggagagcgaggtagagagcttgatcttggtctcgggcgcgaaggagctcctggtgatggtgcagctgctggtgcgctgtcgaccccttgcttgctcccttgtcaagccccagatgtccaggaaggtggactccctcgtgctccccatggcgcggacccatgtgcagggttgggggatggcgtggtcgtggctgacgggaagcgtggcctctacaaccacgagcgttggccagcatgctttgtcactgtgcgccagtttggaagaagggaaaggtcctctacgtgggcctccagttgctccttgtgtgctaggttggtgaggcccccgagcatggtggacatggcggggtcctgcatcattgccctgcccagccgcttcgccatggccacgagctatggattctgcatcggatatgtacctaagtggttcaactggggttaccaccaggaagtggaagatgagtacggagatgagtactatgatcaagatgagtatgaggaggaaggttcgggtgctggggatgggtatgctgaggaggaagagcctacagagggacaaaaggagatccttgaattgagagaaagattaaaagagcagattaggcgaaaggcaaaggctgctgctgcctgcacagctggtcgatcatcttcttcacaaatacctcaagccagggacaaatttggctctttttttgggccatccaagccggtgatttctcgtcgagtgatagaagaaagaaaatcattgaaagaactgcatagcacggttgcaagggagccaaggccttctggagtacataaggatattccatcgtcctctaaagtgcaaagtagagtaaatggacatcagcataaacaaaagattgttaatcaggtaaagaagaaggctgaggcacttaaggataaccgggattattcatttctactctcggatgatgctgacctgtcatcctctccaaaggagaaacctgctgctagatcttccttgactcaaagggctgatcgtgaggtgacacaatcaacagtaaagaggaaggcaccaacaagtcaacctgcacgcttgtcaaatggatatggacctaagaacacaatgtcaactcaaaggcatgctgaaggtaaggtaaattccatgagaagggaggatttctcgaatacagaaagggttgtttcacgtgacaatgagaggatgtatgaaagggttgtttcacgtgacaatgagaggatgcatagtattgcaagaaatggatccaaccaggcaagtactagcaaaaccacaatccaaaagcatccaagcaggggtcccattgctaataagcaaccgtccaaggattcgaatgatgcaactctgaggaagagcagtgtagcctcaaagcaccatcccttagagattgacagaccaaaatcctcgcaaagtcagaggatgcagtcagctggtcagagaccacagcattcttcccatggtcagacgccacatcaatccatgcagcataggacgcagcagtcattgcagagtcggaggccacaacaaatgacacagggtcagaagccacaacagtctttgcagagtcaaaggactcaacagtccttgcagaatcgaaggccacagcagtcctcacatattcagaaatcgcaatcctcacaagcacacagaccacagtcattaagtaacaggtctcaggctttacaaggacaaaggcctctttcttcacagggtcaatatccggagcaaagaagagtacatgcaagtgacagagtcaaacaagctgaaaggcagattcggcctccttccaagtccatgccatcacggccagtctcttccaatggaattcgtgatgatcatgcaaaaaggaagcaagtggcaaaaagaagatttgatgaagatgatgaagaccccttagcaatgatcagaaatatgtttgggtatgatcctagtagatatgcaggcagagatgaagatgtcagtgacatggaagccgattttgctactatagaaatggaagagaaaaggagcgcgaggattgctaggcaggaggatgaagaacaacttcgcttgattgaggaagaagagagacgcgagcaggagagaaagaggcgaaagatggcacgaggccgatagtcgaatacactcctatttggatgttataatatactaccttcgttctcgaatatttgtcgtccgctggttcatttttgaactaaaccgtgacaaataaaaaagaacgcaggagtatctggcaggcctgattgcctgaatacgaagccccatggcggatcagacaggcacttctcttgcagtcctgtttacccttaccacgatgattatctggaggcaaatcaagggaaaacgacaggtgaccaacactgggcacgtgtaacagcagactgtagttgtagtggtttagttctcgaagctgacatggactatatttaagttctcgtcagattgtttggatagcagaaggtttccattgttgcagcgcctcaccagattgtttcttcatatgatatactgattctttcagtcaagcctatataaggatgcgtaatacaagtgcccctcttgtatatctttttcgggtgtaatagtgttgtaataaacgatgttcgaattttcggatatgattttgagctttgtcaggcgatcactgcaccacggtccacagagatgcgcttctggccgggagccaatcgaaggaagcgggaaaggggatgctgcacctttcgtagacaacattattattttgcaggttttgg

SEQ ID NO: 222459 - DNA, 2696 bp, Zea Mays
ctggcccctgtgctccccttgccaccgaacgagagccaaaagcctcccgccccacgacgcgcccgccccggcggcgacgccccggaggacgtttcccgcagcgaccggcgaccaagccttgattgcctccgccccatggctacccgggcgcgggcgtagccgccgcctcggccgcagcaggctcggtccgcccccctcggcgatttctgttccagtcgcatcgcgcgacagctcgtcgtccgattcggatccccgccaccgcggcggaacgaggcgtctccggtccccgagagggtattcggggaatttgagactgataagtcgggatcctgtcgataatgcggggctacgtgtacgagaccaatggttaccaccaggaagtggaagatgagtacggagatgagtactatgatcaagatgagtatgaggaggaaggttcgggtgctggggatgggtatgctgaggaggaagagcctacagagggacaaaaggagatccttgaattgagagaaagattaaaagagcagattaggcgaaaggcaaaggctgctgctgcctgcacagctggtcgatcatcttcttcacaaatacctcaagccagggacaaatttggctctttttttgggccatccaagccggtgatttctcgtcgagtgatagaagaaagaaaatcattgaaagaactgcatagcacggttgcaagggagccaaggccttctggagtacataaggatattccatcgtcctctaaagtgcaaagtagagtaaatggacatcagcataaacaaaagattgttaatcagttgcaattttcaggtaaagaagaaggctgaggcacttaaggataaccgggattattcatttctactctcggatgatgctgacctgtcatcctctccaaaggagaaacctgctgctagatcttccttgactcaaagggctgatcgtgaggtgacacaatcaacagtaaagaggaaggcaccaacaagtcaacctgcacgcttgtcaaatggatatggacctaagaacacaatgtcaactcaaaggcatgctgaaggtaaggtaaattccatgagaagggaggatttctcgaatacagaaagggttgtttcacgtgacaatgagaggatgtatgaaagggttgtttcacgtgacaatgagaggatgcatagtattgcaagaaatggatccaaccaggcaagtactagcaaaaccacaatccaaaagcatccaagcaggggtcccattgctaataagcaaccgtccaaggattcgaatgatgcaactctgaggaagagcagtgtagcctcaaagcaccatcccttagagattgacagaccaaaatcctcgcaaagtcagaggatgcagtcagctggtcagagaccacagcattcttcccatggtcagacgccacatcaatccatgcagcataggacgcagcagtcattgcagagtcggaggccacaacaaatgacacagggtcagaagccacaacagtctttgcagagtcaaaggactcaacagtccttgcagaatcgaaggccacagcagtcctcacatattcagaaatcgcaatcctcacaagcacacagaccacagtcattaagtaacaggtctcaggctttacaaggacaaaggcctctttcttcacagggtcaatatccggagcaaagaagagtacatgcaagtgacagagtcaaacaagctgaaaggcagattcggcctccttccaagtccatgccatcacggccagtctcttccaatggaattcgtgatgatcatgcaaaaaggaagcaagtggcaaaaagaagatttgatgaagatgatgaagaccccttagcaatgatcagaaatatgtttgggtatgatcctagtagatatgcaggcagagatgaagatgtcagtgacatggaagccgattttgctactatagaaatggaagagaaaaggagcgcgaggattgctaggcaggaggatgaagaacaacttcgcttgattgaggaagaagagagacgcgagcaggagagaaagaggcgaaagatggcacgaggccgatagtcgaatacactcctatttggatgttataatatactaccttcgttctcgaatatttgtcgtccgctggttcatttttgaactaaaccgtgacaaataaaaaagaacgcaggagtatctggcaggcctgattgcctgaatacgaagccccatggcggatcagacaggcacttctcttgcagtcctgtttacccttaccacgatgattatctggaggcaaatcaagggaaaacgacaggtgaccaacactgggcacgtgtaacagcagactgtagttgtagtggtttagttctcgaagctgacatggactatatttaagttctcgtcagattgtttggatagcagaaggtttccattgttgcagcgcctcaccagattgtttcttcatatgatatactgattctttcagtcaagcctatataaggatgcgtaatacaagtgcccctcttgtatatctttttcgggtgtaatagtgttgtaataaacgatgttcgaattttcggatatgattttgagctttgtcaggcgatcactgcaccacggtccacagagatgcgcttctggccgggagccaatcgaaggaagcgggaaaggggatgctgcacctttcgtagacaacattattattttgcaggttttgg

SEQ ID NO: 222460 - DNA, 2801 bp, Zea Mays
gttcgcctctttctctcctataaaaatccaccgccccccgccgcctccgcagaattccccaatcccaccgccaggctccgcacgcgcctcggaacctagcccagtcgactccttcagatccggcgggatcgccggctcctaccctcgtcgccacgttccggcatctcggctccccggcgtcctctacccgacttctacacctgccatcttccccaggcggcgtcccgacgaatcgcttggtcgacaggctacatcaccaccaagtcagcatcgacgactcgaaggattcgtgtcgtcgtcgatcgccgatagccggtcgccggtcgccggtcgcctcttcgtagatcgaattggttctgtgattattctggttgcagttcgctgtatttcatctgagatctgaaaaaagttcgggcctatctcgtgatagagaggcctttatatatacgtgaaaaaggagacatactcgccatccgtcatgggtgttgtgtattaccaatataagagtgaaaaggaaatctgttctatgcctgtgctccatgcttttatctctgtgtctgaactcaagcagcttatactgacaagtggtaagcacggccatgggcgaacccacggccgtgccagggaggatattatcatcttcaatgcccacagcggcgaagaatatgcagatgaaagagcatccatacctcagaacacaactgtgctggtccgcagaatttccattgccgggcaactgtcagagaagatcgttttgtcccccacgcggaaagtcacagaagaattttctgtgccttgcaagtcagtggttactgactcaagctcaaagtcatgttcttccacggtagtgcaagatgaagatgctgcaattgctgcagtgattgatgccgctgaactcaaatcggaacaactcccgtctaaaaaaggacaaggcagtggaaggtttacgtcaggacgtaactatgggtcattggaaggggaggcacctccaccaggctatgtctgtcgctcttgcggtgttccaggccatttcattcaacactgctcacaggaaaacaagatacctccacctggatacatttgctacagatgccgaattccagggcattttatccatcgttgcccaagcattggtgatcccaagtgcgacaacaataaaatgctttgttctcttgtcccagtagttacacctgtcaatggcattttggattcacttgtcccggcttcccccgttagtgctgttgatgacttgccagcagagctccactgcaggctatgtaaaaaagtgatgagagatgcagtattgacaagcaaatgctgttttgatagtttttgtgatagatgcattcgggattatattattacagagtcgaagtgcatttgtggagtcaagacactagcagatgacctcattcccaatcaaacacttcggagcacaatcagcaatatgttgggaacacagactatcagtggtggaagtggtacaacaagacacagaagttcgtcaggcagcaaccctgaccccaaaatacagagccacactgcctcgacaagggaggtgaagcaatctagagaccaccagctaccagcagcatctgcacttgatgatgtgctccaggttgccacagaaggtgctctagtgaaccagcctcgggagaaattggtacccagtgctaaaatccttggtaaagatggaggcaattttgcacaagtgtcagcagagaagactgtagcaaatgctgaagccctcaaagtaaaggatggaactgaatcgacttcaaaggccaccactgtttcaggggcccgagaacacaatgtcacaaggacagatcaaccgaagaagtggaagaaggcagtcttaaccaagaactttcaacctaacaatgttggatatggttacaatgttccatttgaccctgcatattgcaatcccttcatcaatggatatccttgggcaactgaaccttacatgtatagctcaatgggggtgccgtaccctggttatccgatggatccatattgtgtaaattcctttacctgcataccgtcgcaggctcttgcaatgcaaggctatgcaacaagctaccaaagggcctgaaactgagcccatgcatcgtgggggcactgcagctgcaccttcaaagcgccctgagaggagtgacaggcccaaggacactcgtcatcagccccaatcacgagagcacgagcgacaattgggctcttctcatgtctcagaatcgagaacgaggaacagaacaaggtcaagctccgagggaagggaccgtgggcattccgacagggcctctgttgaccaccatgaggaccactctactaggaagcggacgcgcgattcctctccgaagtacggtgatagacagagcgaccggaggtcgagtcacggttccaggagtatgatgactcctgaggaggatgcaagcgacgatgaatgtaatttcaagaggagatggggtcgcagatcatcaggaggcgtggacacaaggcactgaacggaagaatgtggactacggcggaccgaccaagtgcagcaatacattgctggtcaccagtgctcacctatccattttcttttactcgtaattgtatgtattcccctgcaaacaaaggggaacttccggttccctggcgaaatgtaatggtattaccatgcgatctctccaaatataaatggaagtttgctaagctcacgagttcttttttacttcttttaccctaacgccccgttttggaatcgaattccactctaataatatataatagtaatttatgaagctaatatggtt

SEQ ID NO: 222461 - DNA, 2744 bp, Zea Mays
gttcgcctctttctctcctataaaaatccaccgccccccgccgcctccgcagaattccccaatcccaccgccaggctccgcacgcgcctcggaacctagcccagtcgactccttcagatccggcgggatcgccggctcctaccctcgtcgccacgttccggcatctcggctccccggcgtcctctacccgacttctacacctgccatcttccccaggcggcgtcccgacgaatcgcttggtcgacaggctacatcaccaccaagtcagcatcgacgactcgaaggattcgtgtcgtcgtcgatcgccgatagccggtcgccggtcgccggtcgcctcttcgtagatcgaattggttctgtgattattctggttgcagttcgctgtatttcatctgagatctgaaaaaagttcgggcctatctcgtgatagagaggcctttatatatacgtgaaaaaggagacatactcgccatccgtcatgggtgttgtgtattaccaatataagagtgaaaaggaaatctgttctatgcctgtgctccatgcttttatctctgtgtctgaactcaagcagcttatactgacaagtggtaagcacggccatgggcgaacccacggccgtgccagggaggatattatcatcttcaatgcccacagcggcgaagaatatgcagatgaaagagcatccatacctcagaacacaactgtgctggcggaaagtcacagaagaattttctgtgccttgcaagtcagtggttactgactcaagctcaaagtcatgttcttccacggtagtgcaagatgaagatgctgcaattgctgcagtgattgatgccgctgaactcaaatcggaacaactcccgtctaaaaaaggacaaggcagtggaaggtttacgtcaggacgtaactatgggtcattggaaggggaggcacctccaccaggctatgtctgtcgctcttgcggtgttccaggccatttcattcaacactgctcacaggaaaacaagatacctccacctggatacatttgctacagatgccgaattccagggcattttatccatcgttgcccaagcattggtgatcccaagtgcgacaacaataaaatgctttgttctcttgtcccagtagttacacctgtcaatggcattttggattcacttgtcccggcttcccccgttagtgctgttgatgacttgccagcagagctccactgcaggctatgtaaaaaagtgatgagagatgcagtattgacaagcaaatgctgttttgatagtttttgtgatagatgcattcgggattatattattacagagtcgaagtgcatttgtggagtcaagacactagcagatgacctcattcccaatcaaacacttcggagcacaatcagcaatatgttgggaacacagactatcagtggtggaagtggtacaacaagacacagaagttcgtcaggcagcaaccctgaccccaaaatacagagccacactgcctcgacaagggaggtgaagcaatctagagaccaccagctaccagcagcatctgcacttgatgatgtgctccaggttgccacagaaggtgctctagtgaaccagcctcgggagaaattggtacccagtgctaaaatccttggtaaagatggaggcaattttgcacaagtgtcagcagagaagactgtagcaaatgctgaagccctcaaagtaaaggatggaactgaatcgacttcaaaggccaccactgtttcaggggcccgagaacacaatgtcacaaggacagatcaaccgaagaagtggaagaaggcagtcttaaccaagaactttcaacctaacaatgttggatatggttacaatgttccatttgaccctgcatattgcaatcccttcatcaatggatatccttgggcaactgaaccttacatgtatagctcaatgggggtgccgtaccctggttatccgatggatccatattgtgtaaattcctttacctgcataccgtcgcaggctcttgcaatgcaaggctatgcaacaagctaccaaaggcctgaaactgagcccatgcatcgtgggggcactgcagctgcaccttcaaagcgccctgagaggagtgacaggcccaaggacactcgtcatcagccccaatcacgagagcacgagcgacaattgggctcttctcatgtctcagaatcgagaacgaggaacagaacaaggtcaagctccgagggaagggaccgtgggcattccgacagggcctctgttgaccaccatgaggaccactctactaggaagcggacgcgcgattcctctccgaagtacggtgatagacagagcgaccggaggtcgagtcacggttccaggagtatgatgactcctgaggaggatgcaagcgacgatgaatgtaatttcaagaggagatggggtcgcagatcatcaggaggcgtggacacaaggcactgaacggaagaatgtggactacggcggaccgaccaagtgcagcaatacattgctggtcaccagtgctcacctatccattttcttttactcgtaattgtatgtattcccctgcaaacaaaggggaacttccggttccctggcgaaatgtaatggtattaccatgcgatctctccaaatataaatggaagtttgctaagctcacgagttcttttttacttcttttaccctaacgccccgttttggaatcgaattccactctaataatatataatagtaatttatgaagctaatatggtt

SEQ ID NO: 222462 - DNA, 2696 bp, Zea Mays
atggctgtcctcgtcgcggaattcatcctcagattcacagtaatgctaatggacttggaggtaatcactggaattctaaaaaataagcttcttagacatgccattatcctaataccaaattggatttacgatgaaagcaacaatgacaaaagatttgacaaatattcagggaaggttgcctctgaaaagcaagggagctccaatgatagagccctaagggaagaactcgccatcttttcaaaagaagtaatacgatttggcaacctctgcaaagatcctatatggcataacttggggcgatattttgacaagtatgcctctgaaaagtatgcttttcatctgagttatcgctgcctacaatcacattagcacatcatgttctctgaattactttgatatgcaggttagcgacagataatacacctcaggatcattcaaaggggagtatggaagctattgtccagcaattgattaatttggcacaaaacacttctatcattcagttttttcctatcaggttcatgcttcaaagcaactttattgtcattcttatcggattaaccaatagtatcctacaagctgacgaagagcttctttctgatcttgggactgatgttaaagacgaatgcaccaagtttgatctcgtggataatgtcaaggtgaactatgcaggtgcttttgtgatgatgataaattgcaacctttgcttatccatcggtgtgatttgcttaatggatgcatttttcataaacaccatggggatatcctacacatccaatgaggccttggggacgcccccatggccaacacagccactaccatcaccagcgatggagagggtgctcaaggatgacgccgtcgaggagaagggcgagcgcgccaggatggcatcgtttgttggggccatggcaatctcggatttggtgaagaccacattgggcccaaaaggaatggacaagatcctgcaatcaactggcagaggacgtaatgttactgttacaaatgatggggctaccattttgaagtcacttcacattgacaatcctgctgcaaaggtccttgttgctggagaacttttgaaggaggctgagaagttaattaacatgaaaattcatccgatgactattattgcaggttacagaatggctctcgagtgtgccagagattctttgctaaaaaagaccatggacaacaaagaaaatacagataaattcagatctgatctcatgaatattgctatgactactcttagttcaaaaatactttcccaagacaaggagtacttcgctgaacttgcggttgatgctgtcttgaggcttaagggtagcaccaacttggaatctattcaaattctgaagaaacctggaggatctcttaaggattcctttttggacgaagggttcattcttgacaagaaaattggcattgggcagcccaagcgcattgagaatgccaaaattttggttgcaaacactgctatggacacagataaagttaagatatatggagcacgggtccgggtggattcaatgtctaaggttgcagatattgaagctgctgagaagcagaaaatgagagagaaagtccaaaagatcatagcacacgggatcaactgttttgtcaacaggcagttaatctataacttccctgaggaactctttgctgacgctggcatacttgcaattgagcatgctgactttgagggcattgaacggttagctcttgttactggtggtgagatcgcatcaacttttgataatccagagtctgttaagcttgggcaatgcaaggtcattgaagagattatgattggggaggacaggctaatccatttctctggggttgcgatggggcaggcttgcaccattgtcctaaggggggctagtgagcatgtgctcgatgaggctgagaggtccttgcatgatgccttgtgcgtgttgtcccagacggtaaatgatacccgtgtcttgtttggaggcggatggcctgagatggtgatggccaaagaagtggatgaacttgcaaggaagacccctgggaagaaatcccatgctatcgatgctttctcacatgctctgcaagccatcccaacaatcatagctgacaatgctggtttggatagcgctgatttgatctctcagctacgagctgagcaccacaaagagaactccactgctggaattgatgtcatcacaggcactgttggggacatgcaaaagctagggattcaagagtcgttcaaggtgaagcaggccattcttctgtctgcaacagaggctgccgagatgatcctcagggtcgatgagatcataacctgtgccccgcgcagaagagaggataggatgtgatattacacgctgtttctcgatgtagcgggatgctcatcaccctagttttgaggggtattatggtttaggggcgctcaagttggtcagatttcgagtgtttttggcccctaagcgaccggtacttattatttggttgaaacaatcagccttaggtttgtgttctatattctcatgctgtaccgtttggtagcgagttacgtcgtacgatatgcttgttccatcatgtttttctattccttttaacgtaagaatgggcttgtctttgtttccggacgtggttgctacatgtgttgttggttttgagcgtcaggctagggtggcaattgaccttcattggtcatgtgatcg

SEQ ID NO: 222463 - DNA, 2697 bp, Zea Mays
atggctgtcctcgtcgcggaattcatcctcagattcacagtaatgctaatggacttggaggtaatcactggaattctaaaaaataagcttcttagacatgccattatcctaataccaaattggatttacgatgaaagcaacaatgacaaaagatttgacaaatattcagggaaggttgcctctgaaaagcaagggagctccaatgatagagccctaagggaagaactcgccatcttttcaaaagaagtaatacgatttggcaacctctgcaaagatcctatatggcataacttggggcgatattttgacaagttagcgacagataatacacctcaggatcattcaaaggggagtatggaagctattgtccagcaattgattaatttggcacaaaacacttctatcattcagttttttcctatcaggttcatgcttcaaagcaactttattgtcattcttatcggattaaccaatagtatcctacaagctgacgaagagcttctttctgatcttgggactgatgttaaagacgaatgcaccaagtttgatctcgtggataatgtcaaggtgaactatgcaggtgcttttgtgatgatgataaattgcaacctttgcttatccatcggtgtgatttgcttaatggatgcatttttcataaacaccatggggatatcctacacatccaatgaggccttggggacgcccccatggccaacacagccactaccatcaccagcgatggagagggtgctcaaggatgacgccgtcgaggagaagggcgagcgcgccaggatgtgcttcactacttttccagcttgcgcgcttaatttcagcgggtgttttaaaatgggcatggttccgtgcttgggtgttccatcccatgtgctggcatcgtttgttggggccatggcaatctcggatttggtgaagaccacattgggcccaaaaggaatggacaagatcctgcaatcaactggcagaggacgtaatgttactgttacaaatgatggggctaccattttgaagtcacttcacattgacaatcctgctgcaaaggtccttgttgctggagaacttttgaaggaggctgagaagttaattaacatgaaaattcatccgatgactattattgcaggttacagaatggctctcgagtgtgccagagattctttgctaaaaaagaccatggacaacaaagaaaatacagataaattcagatctgatctcatgaatattgctatgactactcttagttcaaaaatactttcccaagacaaggagtacttcgctgaacttgcggttgatgctgtcttgaggcttaagggtagcaccaacttggaatctattcaaattctgaagaaacctggaggatctcttaaggattcctttttggacgaagggttcattcttgacaagaaaattggcattgggcagcccaagcgcattgagaatgccaaaattttggttgcaaacactgctatggacacagataaagttaagatatatggagcacgggtccgggtggattcaatgtctaaggttgcagatattgaagctgctgagaagcagaaaatgagagagaaagtccaaaagatcatagcacacgggatcaactgttttgtcaacaggcagttaatctataacttccctgaggaactctttgctgacgctggcatacttgcaattgagcatgctgactttgagggcattgaacggttagctcttgttactggtggtgagatcgcatcaacttttgataatccagagtctgttaagcttgggcaatgcaaggtcattgaagagattatgattggggaggacaggctaatccatttctctggggttgcgatggggcaggcttgcaccattgtcctaaggggggctagtgagcatgtgctcgatgaggctgagaggtccttgcatgatgccttgtgcgtgttgtcccagacggtaaatgatacccgtgtcttgtttggaggcggatggcctgagatggtgatggccaaagaagtggatgaacttgcaaggaagacccctgggaagaaatcccatgctatcgatgctttctcacatgctctgcaagccatcccaacaatcatagctgacaatgctggtttggatagcgctgatttgatctctcagctacgagctgagcaccacaaagagaactccactgctggaattgatgtcatcacaggcactgttggggacatgcaaaagctagggattcaagagtcgttcaaggtgaagcaggccattcttctgtctgcaacagaggctgccgagatgatcctcagggtcgatgagatcataacctgtgccccgcgcagaagagaggataggatgtgatattacacgctgtttctcgatgtagcgggatgctcatcaccctagttttgaggggtattatggtttaggggcgctcaagttggtcagatttcgagtgtttttggcccctaagcgaccggtacttattatttggttgaaacaatcagccttaggtttgtgttctatattctcatgctgtaccgtttggtagcgagttacgtcgtacgatatgcttgttccatcatgtttttctattccttttaacgtaagaatgggcttgtctttgtttccggacgtggttgctacatgtgttgttggttttgagcgtcaggctagggtggcaattgaccttcattggtcatgtgatcg

SEQ ID NO: 222464 - DNA, 1810 bp, Zea Mays
ccctagcctaggtccctatccctatccggctcctcgcccaccaatctgtacacactccgacgccgacgcgaaatcggaaggaccaccaagctcaaaaaagcgccgcccggcgccgatgttgctgcggcggatgcgatggatgtcggagggggacggccggtgggagctggatgcggagaccccggtgacgatggagggcacggcgcgccccgtcccgggggaccccctgccgctggggctctcacggggctaccgcatcacccgtcccaagcagctagacttcttccaccggttcatggcgtcccctctggtacccaccttctccgccatgcgcgacggcctctctgttaaccacgcccacattttctacatgacagacaactggtcttctaccatcttggagaaaatcaatgttaagaagcttgtgtctgtcgtgaaagagaaattagcaaatcggcaggaagaggcctcttggaccaaagatttaaagaaccacttgcatgatgttatgtctttaggtgtaggcacggagatcttgatcacaccagacaccactttgctgctggagttatttgatatcaagaaaggcaatcgaggaaaagcaatatttcaccacgaggcaaaaaatctggatgctcttaacctatttgcttcctcatcataatattacattccaagcatcttggcctggattatttgttgataagaagggaacatattgggatgtgccattatcattatcggctgaccttgcttcagttggctccagttctggattgagttatcatctattattgcagcagaatagtggggaaccaaaatgttttgggggtgatgaaacagatgatgttcctactgctctgttacctggcctatgtgctaaagtggctatttccatgaagaaaagcattgatgcttggaggaaaaaagaagataagctaaaaaaagttcagccatatgatgtatttctctcggattcacatgtttctttaactggtattgttggtggagtagccagtggatatttgggagactgttcaaggagagtggctatacgagatgaaacacacaagagtaatgcttttataatgtttgacgagaggaataaacgtgctgcctttgcagacctctttgcttctgttactttcactgctcaatacgggaattttcagaggctttttctggatttgactaaggcaagtgcccgatttgatatcacctctggttcattgttcttatgtggtgcttctcgccttgcacaagatttcttcttctctagaagacctgatgtagagacattctgcgatatttgtcctgatgtgacagtttcctttcaacaacagatagttgggcccttcagttttcgtgttgaatcctctgtagccattgaccccagaagccaggaccattttgttcgagtggatgatccgatcttcgcaattgattgggctctcaaagtcctgggttcagcaaaggccacagcgtggtattcacccaagcatcaggaggccatgatggagctccggttctacgaaacctgaagctgttcatcgtgaacgttgtataaaataatgcctggacttcatgattgctatggtcgctgatttcactaggatcagatggtgatgtagcttgtgctgttctcggcgttaacagaggaagttaatactgtttgagtctttagtgaacttgctaggtgaaccagtctgagtttctgattgccttttgtcagtgtacaaaaaccatgcccccaccatttttatttctttaaatatatgaattttagggtgagcttattaaataattaatc

SEQ ID NO: 222465 - DNA, 1931 bp, Zea Mays
ccctagcctaggtccctatccctatccggctcctcgcccaccaatctgtacacactccgacgccgacgcgaaatcggaaggaccaccaagctcaaaaaagcgccgcccggcgccgatgttgctgcggcggatgcgatggatgtcggagggggacggccggtgggagctggatgcggagaccccggtgacgatggagggcacggcgcgccccgtcccgggggaccccctgccgctggggctctcacggggctaccgcatcacccgtcccaagcagctagacttcttccaccggttcatggcgtcccctctggtacccaccttctccgccatgcgcgacggcctctctgttaaccacgcccacattttctacatgacagacaactggtcttctaccatcttggagaaaatcaatgttaagaagcttgtgtctgtcgtgaaagagaaattagcaaatcggcaggaagaggcctcttggaccaaagatttaaagaaccacttgcatgatgttatgtctttaggtgtaggcacggagatcttgatcacaccagacaccactttgctgctggagttatttgatatcaagaaaggcaatcgaggaaaagcaatatttcaccacgaggcaaaaaatctggatgctcttaacctatttggtatacagttagttatttcttcctcatcataatattacattccaagcatcttggcctggattatttgttgataagaagggaacatattgggatgtgccattatcattatcggctgaccttgcttcagttggctccagttctggattgagttatcatctattattgcagcagaatagtggggaaccaaaatgttttgggggtgatgaaacagatgatgttcctactgctctgttacctggcctatgtgctaaagtggctatttccatgaagaaaagcattgatgcttggaggaaaaaagaagataagctaaaaaaagttcagccatatgatgtatttctctcggattcacatgtttctttaactggtattgttggtggagtagccagtggatatttgggagactgttcaaggagagtggctatacgagatgaaacacacaagagtaatgcttttataatgtttgacgagaggaataaacgtgctgcctttgcagacctctttgcttctgttactttcactgctcaatacgggaattttcagaggctttttctggatttgactaaggcaagtgcccgatttgatatcacctctggttcattgttcttatgtggtgcttctcgccttgcacaagatttcttcttctctagaagacctgatgtagagacattctgcgatatttgtcctgatgtgacagtttcctttcaacaacagatagttgggcccttcagttttcgtgttgaatcctctgtagccattgaccccagaagccaggaccattttgttcgagtggatgatccgatcttcgcaattgattgggctctcaaagtcctgggttcagcaaaggccacagcgtggtattcacccaagcatcaggaggccatgatggagctccggttctacgaaacctgaagctgttcatcgtgaacgttgtataaaataatgcctggacttcatgattgctatggtcgctgatttcactaggatcagatggtatgaatggctgacgccgtgatggtcaaatgaatcaacccccgtgtaatatctattcatatcctgctttaccggtttgagtcatcagttttttttgcttcaggtgatgtagcttgtgctgttctcggcgttaacagaggaagttaatactgtttgagtctttagtgaacttgctaggtgaaccagtctgagtttctgattgccttttgtcagtgtacaaaaaccatgcccccaccatttttatttctttaaatatatgaattttagggtgagcttattaaataattaatc

SEQ ID NO: 222466 - DNA, 1779 bp, Zea Mays
ccctagcctaggtccctatccctatccggctcctcgcccaccaatctgtacacactccgacgccgacgcgaaatcggaaggaccaccaagctcaaaaaagcgccgcccggcgccgatgttgctgcggcggatgcgatggatgtcggagggggacggccggtgggagctggatgcggagaccccggtgacgatggagggcacggcgcgccccgtcccgggggaccccctgccgctggggctctcacggggctaccgcatcacccgtcccaagcagctagacttcttccaccggttcatggcgtcccctctggtacccaccttctccgccatgcgcgacggcctctctgttaaccacgcccacattttctacatgacagacaactggtcttctaccatcttggagaaaatcaatgttaagaagcttgtgtctgtcgtgaaagagaaattagcaaatcggcaggaagaggcctcttggaccaaagatttaaagaaccacttgcatgatgttatgtctttaggtgtaggcacggagatcttgatcacaccagacaccactttgctgctggagttatttgatatcaagaaaggcaatcgaggaaaagcaatatttcaccacgagcttcctcatcataatattacattccaagcatcttggcctggattatttgttgataagaagggaacatattgggatgtgccattatcattatcggctgaccttgcttcagttggctccagttctggattgagttatcatctattattgcagcagaatagtggggaaccaaaatgttttgggggtgatgaaacagatgatgttcctactgctctgttacctggcctatgtgctaaagtggctatttccatgaagaaaagcattgatgcttggaggaaaaaagaagataagctaaaaaaagttcagccatatgatgtatttctctcggattcacatgtttctttaactggtattgttggtggagtagccagtggatatttgggagactgttcaaggagagtggctatacgagatgaaacacacaagagtaatgcttttataatgtttgacgagaggaataaacgtgctgcctttgcagacctctttgcttctgttactttcactgctcaatacgggaattttcagaggctttttctggatttgactaaggcaagtgcccgatttgatatcacctctggttcattgttcttatgtggtgcttctcgccttgcacaagatttcttcttctctagaagacctgatgtagagacattctgcgatatttgtcctgatgtgacagtttcctttcaacaacagatagttgggcccttcagttttcgtgttgaatcctctgtagccattgaccccagaagccaggaccattttgttcgagtggatgatccgatcttcgcaattgattgggctctcaaagtcctgggttcagcaaaggccacagcgtggtattcacccaagcatcaggaggccatgatggagctccggttctacgaaacctgaagctgttcatcgtgaacgttgtataaaataatgcctggacttcatgattgctatggtcgctgatttcactaggatcagatggtgatgtagcttgtgctgttctcggcgttaacagaggaagttaatactgtttgagtctttagtgaacttgctaggtgaaccagtctgagtttctgattgccttttgtcagtgtacaaaaaccatgcccccaccatttttatttctttaaatatatgaattttagggtgagcttattaaataattaatc

SEQ ID NO: 222467 - DNA, 916 bp, Zea Mays
agttatttgtggagtagccagtggatatttgggagactgttcaaggagagtggctatacgagatgaaacacacaagagtaatgcttttataatgtttgacgagaggaataaacgtgctgcctttgcagacctctttgcttctgttactttcactgctcaatacgggaattttcagaggctttttctggatttgactaaggcaagtgcccgatttgatatcacctctggttcattgttcttatgtggtgcttctcgccttgcacaagatttcttcttctctagaagacctgatgtagagacattctgcgatatttgtcctgatgtgacagtttcctttcaacaacagatagttgggcccttcagttttcgtgttgaatcctctgtagccattgaccccagaagccaggaccattttgttcgagtggatgatccgatcttcgcaattgattgggctctcaaagtcctgggttcagcaaaggccacagcgtggtattcacccaagcatcaggaggccatgatggagctccggttctacgaaacctgaagctgttcatcgtgaacgttgtataaaataatgcctggacttcatgattgctatggtcgctgatttcactaggatcagatggtatgaatggctgacgccgtgatggtcaaatgaatcaacccccgtgtaatatctattcatatcctgctttaccggtttgagtcatcagttttttttgcttcaggtgatgtagcttgtgctgttctcggcgttaacagaggaagttaatactgtttgagtctttagtgaacttgctaggtgaaccagtctgagtttctgattgccttttgtcagtgtacaaaaaccatgcccccaccatttttatttctttaaatatatgaattttagggtgagcttattaaataattaatc

SEQ ID NO: 222468 - DNA, 2256 bp, Zea Mays
gcatagtggacaataggttgactgggagcatagcatgcacaatggatgacaccatggtgttgcagggccgagcttgcagtctaaccaagtgatttgcttctgcattagtgggtccatagcctggtgctatggggtcagattcagctagcgtaaaagtacctgaacttgagttggaactttcatgtggaacgttgggtggtatggtcacaactgttgaaggtttaattgtgaaaatatgcgagggtagggctgcttcactttattgacccattctctttttatgatgaaaatgctctggagagaatacatggatttcaattaggcgatagtacactggaatggaaaaagaagaaatgggatgacttcaaggagagactatccaagcttctgagtttacaagaagcctggactctaataattgatgatggattggcggcttcatttgtggcccccgctactgattcgttagaagatgacagccaactaaccagaacttatatttcctctaacgataaacatggagcgggtatttttatcggttacgctgttgaagatgctcttagaataccggtggttaatcaggtgtacaacaatggtgctgttttcaattctctttctaggtctttcaagttcctgagatggtctagacttgcccatgctgaggtggtggcctttccatcccctgttcttgtggagttcaaaggggttcgaattcatgcttgggatttggctactgctcagaatttgttgagggatcactgcactgatgtggagctccatcctgatacggtgaatcgacacgacttctcttccttcaaggtttttggatggtgccgacgtccacacctcattccaaatttgttggagctctttgttccagaacctttgatgatgacgcctggctctacctcacttgagagaagattgcttgcttaccaagtgactacccatgcgtctctgatctctccgctggtgcatagcgctgctgcacctccgccgccggcgtttgatgatgatcaggacaccgggcctcgtcggcgtaggctgaacagttcagttcagatggggcatgctgagtccggggaagcacttgcagcacgaaggcccgtccgtgaaatacttggtgttgccccggtctctgttcgacatgtggaggctggattgtatggcggtggcgtttcttctcctaaaggagcgccttccattgccttggttactggggacacacatgcaaacgctgtggagccggtgattggctgcattgatgctgggttgtgtctgcccctggagaatgttcatgggcctgacactgtgactttgggtgtggcggtttctagcctgtttccttctagttctaggagcccagtgggtcttatgccatcatcagagattccaggtgctcacgatggcccgggtggagaggtcttcttgtccatagtcgatgttgacgttgactcttctgttccggcggtggagactttgagtgcatcttcatccctcccgggtggtcctgccatcgctacccgagtggggaatgtgttgaagccatccatgaaggctgttggggcagggctcaggatgtggccttgtccccccatcaaatatttcagaaggaagcccagaggggctgctgctcaacaatcccctctctcggctgctcagtcagcgaccaccgctgatttcatcgccagaatgtccaggccggccgctcgggtcctgtgtgtgtcgcagaagcggcaacgtcgccccagggcacctcatgagggatctcttcctcggcggagcaggcgcttggctagagcagatgttgaaaaggtaatggccccagcacgagtttcgaaaggaaaatggaggattgctaatgagctcggccttcttggtggggatccatctgaatcgctgtccctggaggttctcgataattatgccaaggttttcggtgagcggttgactaatttgcaagttaaagctcttgcggctctcttcaactggactgtcccagaagacttgcagggtgcggtggtgcaggcctgatcgcctctgtgtgtattgatggtcgttttttcaatggttttccaaatggatccgtcaaaaattgtgtgctggaacgtgcggggtcttaatggctcggcccgtcaggatgttgtacgttgtttggtggactcagtcaaagatgatgttgtttgcctccaggaaacaaaaatgtcagttttttctcgcttgtttgtgttccgtttgcttgggtctgagtttcag

SEQ ID NO: 222469 - protein, 314 aa, Zea Mays
MMLLLLLHACTTSEWLRRSSSNSRDKSQSAACPQCRTTVQSVGRNHFLHNIEEAILQAFSSLQRSDEEIALLESYASVLGQQKNQSRKRRFSRSSDDTDNSDLPCPQCRNEFGGFRCSPGSVHLQCSGCGGMMPARSNISIPQKCLGCDKAFCGAYWYSQGVSSSHCNLICNQDTLKSIYQRHISALPDTIHGGNPYEKDITERCIQQSGKTLQVVISEWISKFDNMEIDRSRLQLNNVDAITSRTYICNHCYSKFVDFLLYWFRVSLPQNLLPRDAAERESCWYGFMCRTQHHRPDHAKKLNHVCRPTRGNQP

SEQ ID NO: 222470 - protein, 88 aa, Zea Mays
MEIDRSRLQLNNVDAITSRTYICNHCYSKFVDFLLYWFRVSLPQNLLPRDAAERESCWYGFMCRTQHHRPDHAKKLNHVCRPTRGNQP

SEQ ID NO: 222471 - protein, 488 aa, Zea Mays
MIFHRCKYGTSKVGFTFSPIMLVWFALIASTGLYNIIKHYPPILKAISPHYIYLFFARNKRVGWEQFGTVVLCITGVEAMFADLGHFNKKSIQMAYSCLVYPSLILAYAGQAAFLIKNPSKLSTTFYSSVPEPLFWPMFVVATLAAIVASQALISASFSIVRQSVALGCFPRVTMKHTSKKYEGRVYSPEINYFLMIACVLITVGFKGGPEIGQAYGVAVIWVMLITTHLITVVMVIIWQVHYAIAGTFYAIFAAIEGLMTISLLYKIAQGGWVPFAITAFFLIITLSWTYGRSKKHEYEVSNLMDRQDFIKIVNMSNRVPGICIFCTDLMNGIPPIVRHYVQHMGCLRELMVFVTVRHLPVTSVLPEERFLFDRLEPFGVYRCIVQYGYMDTQNMEDHEYVVSIIASLKEIAQSGDEILMMDSALANGTTFVLGRVILNMSPERGNCFKRFVINNLYRFLQKNFRSNISNLKIAPSKTLQVGMQYEI

SEQ ID NO: 222472 - protein, 69 aa, Zea Mays
MPALLLTGLCTYRPFDHACTVSVMVKESRISSCDVWCRKHGLQCYTRWHMVCVFYLLGTCEKHLVEVEC

SEQ ID NO: 222473 - protein, 67 aa, Zea Mays
MLNLSSALRMYDYEWPGSFSMEGPCMKQCLPLQKLLHAGLRCTSFIYLSQFSSKMNSQEVFMPLYCC

SEQ ID NO: 222474 - protein, 294 aa, Zea Mays
MALLVSFQLGFMLLALIWKFDFPPFMVLIIAILNDGTIMTISKDRVKPSPQPDSWKLAEIFATGVVLGGYLAMMTVIFFWAAYKTDFFPRLFHVESLEKTAQDDFQKFASAVYLQVSTVSQALIFVTRSRSWSFVERPGFLLVFAFLVAKLIATLIAVYANWAFTAIKGIGWGWAGVIWLYNIVFYFPLDIIKFLIRYALSGRAWNLVLEQRIAFTSKKNFGTEERERKWAHAQRTLHGLQPPEASIFENKTTFNELNQLAEEARRRAEMARLREVSTLKGRMESVVKQKGLDI

SEQ ID NO: 222475 - protein, 81 aa, Zea Mays
MEEQEDAWNCDAKESEAQEHGDTVGRQICSGCRRLRTISRSGLTCLSRDKGCKLNQSLQVCSSYTNVAYECALSQYSSVPN

SEQ ID NO: 222476 - protein, 186 aa, Zea Mays
MRGQMGLSEEQQKQALELRSMTNGGKESLEETETDGASCNPAATGGCCQGNGGFTRALEQQKQALELRSMTNGGKESLEETETDGASCNPAATGGCCQGNGSFTCCHPDLPKEKRDKSIAIEQNPKSCEENGKEGGGAGSKKGNSKTCPMPTWFETWERADTYAALAVVAAAAAVFISFRIYKNLN

SEQ ID NO: 222477 - protein, 492 aa, Zea Mays
MSIVPCDVCVCEFSMDRDPWAKFRRPNSEHPAQSEETRTHQHPGVAGARRPNAMPSPSPAPPPVLPISEHEDEIVAAVDANPVVVVIGETGSGKSTQLSQILHRRGYTRRGAIAVTQPRRVAAVSVSRRVAQELGVPLGDEVGYAIRFEDRTSERTCIKYLTDGILLRESLSNPELKQYSVIILDEAHERSLNTDILLGLMKRLIKDRASDLKVLITSATLDGLKVSKFFSGCPVLNIPGTLFPVEKFYSTDRPTNYIESSLRTAIDIHAKEPPGDVLIFMTGKDDIDKMVSKLEERIRNLEEGSCIDALVLPLHGSLPPELQVRVFAPAPPNCRRFIVATNVAETSLTVDGVVFVIDCGYVKQRQYNPSSGMYSLDVVQISRVQADQRAGRAGRTRPGKCYRLYPISIYQNEFLEATVPEIQRSSLAGSVLYLKSLNLPDINILKFDFLDPPSRESLEDALRQLYLIDAIDENGQITDVGRVMAGICYKFL

SEQ ID NO: 222478 - protein, 481 aa, Zea Mays
MGGGGGGNSRELDQTPTWAVASVCGVIVLISILLEKGLHHVGEFFSHRKKKAMVEALEKVKAELMVLGFISLLLVFGQNYIVKVCISNHAANTMLPCKLKEAAVPGKKKAAAAAEHLGGVLDWPPPYYAHNGRMLAEASMATKCPEGKVSLISINALHQLHIFIFFLAVFHVSYSAITMALGRAKEWEKEAAGQDYEFSNDPTRFRFTHETSFVRQHMNVLNKFPASFYISNFFRQFFRSVRRADYCALRHSFVNVHLAPGTKFDFQKYIKRSLEDDFKVIVGISPPLWASALIFLFLNVNGWHTMLWISIMPVVIILSVGTKLQGIICRMAIDITERHAVIQGIPLVQVSDSYFWFARPTFVLFLIHFTLFQNGFQIIYFLWILYEYGMDSCFNDSEEFVFARLCLGVVVQVLCSYVTLPLYALVSQMGSTMKQSIFDEQTSKALKNWRAGAKKKAPTGSKHGGGSPTAAGSPTKADGDA

SEQ ID NO: 222479 - protein, 450 aa, Zea Mays
MKPRHERSRSTTSTFVSQGQDGGDANGSATDQEVMAQPENGVRPPLLRTDMEEPPRVSDGSATKERVRLLEREVASAKQREMKMLESLVQQTKELEQAKIALEEASLEVATLRQQQQQQGEGGAAAEPAVQAQQWSVMDLMFGGVDEEINGLRAKLRAAQQAEERSRKAADELAAALSAVTVEAKQVKAWLSGAQAEVEASNAEADRLRGLLQGAEAELWSATEQVGALTSNWKDAAAGWRAREKALVARARAAEEDAAAARRDNAGLRRALEQAVEEANAAAEALEAAGADNAGLQEAVAEKERALEALRRDNEGLRASEAAARARAEELQGQLAAKEREIPLVEKWRREDAQGKLVSSGMFLGSGRLVPGRKDRMFASLSNIAELKSAAAAAAAMDDYGYEFDHLDVGQPCDDATEHKIKRRSILRKVGDLFRRRRSPNLAPVLHDHY

SEQ ID NO: 222480 - protein, 192 aa, Zea Mays
METLASAMRRENRRSKAPPSSSASSALASGRVPLVMAFLSCLAWLYVAGRLWQDAQTRAILSGLLEKSSTSVPKVLSVEDKLRNLGCKAIGRKIVEAEMDLTKAKSEGYLWGNRTAAVDSDKKQQLLAVIGVYTGFGSRLKRNVFRGSWMPRGDALKKLEEKGVAIRFVIVQIEVIAWTVILMMKIGRQRTS

SEQ ID NO: 222481 - protein, 300 aa, Zea Mays
MCRTDDSSPVYSLYAVVVHRNVRNATVSGHYVCYVKDSQGKWHEMDDNKVKPVSVQKVLSRCAYMLLYARCSPRAPTSARAKKPKQMARSGSFPSGGGRYRSRHQGGQLSKDDAVHNLTYTLGTSDTSSYPVAPCFSGSNSSSLFSSSDAGSSCTFSSDSTDSAGKSSMEYDRIFGTSGYMCPVVSSAVVPEGDNQSYLRQGSSWNPSSSGHDMDEAGKFARQYQGGYQAGGGAPVGGWETPSFSYADQGKYQGSSSRRNRSFGSSCKLTQQRRSTGRAFFYIRSIRERIQGGLGSGLGS

SEQ ID NO: 222482 - protein, 169 aa, Zea Mays
MKQVDAIMRSGGDGPHILAGGLNALDGTDYSADRWADIVKYYEEIGKPTPKVEVMQYLKAKQYVDAKDFAGECEAVVVVAKGQDVQGTCKYGTRVDYIMASPNCPYKFVPGSYTVVSSKGTSDHHVVRVDVAVPHAREPDDAEATANGQRSRVVKMTKKSSRKGIWGAK

SEQ ID NO: 222483 - protein, 160 aa, Zea Mays
MKSNTSAYQNRCVLRLILYHVCVNLPVMIFSYPAFKFMGLRSSLPLPHWSVVVSQVLFYFVLEDFIFYWGHRALHTKWLYKHVHSVHHEYATPFGLTSEYAHPAEILFLGFATVVGPALTGPHLFTLWLWMVLRVLETVEAHSGYHFPWSPSNFLPLYGG

SEQ ID NO: 222484 - protein, 459 aa, Zea Mays
MTGILRDFLESSGVVVGSTDDILLYTLSEEELFELFQIVSSQLSFIWNEFLKFHRTHKDKVMGYLHDMWDINRKAEWSIWIIHSKIEIPHRYLRSMNDDSPRHLIRISSSRKPIQNSMSQAELHRKSIAQMKHVMVIPQHCSSKDFLTDASEPARTIVPPPLLQGQSLGEETCGFKSGRILRAVIFVHGFQGHHLDLRLVKNQWLLLDPGAECLLSQINEDRTSGDFKEMGRRLANEVVAFLKRKVDKYSRNGGCKEIKLSFVGHSIGNIILRSALTEPKLQPFLKNLYTYMSISGPHLGYWYSPNSLFNSGLWLMKRLKGMQCMHQLTFSDDHDPQNTFFYKLCKLKTLENFKNIILVSSPQDGYVPYHSARIDLCHASSSDNSKRGQVFTEMLNNCLDQIRAPTSETRVFMRCDVIFDQSAQGRNLNTMIGRAAHIEFLENDIYARFIMWSFPELFR

SEQ ID NO: 222485 - protein, 1330 aa, Zea Mays
MASPGQMTASNLLRTEGFPGNMVKICGLNPARSLGSRRLRMTQHSFHQQHLCCPRLQRVMTHNIRLLSSPGAVASKGFDSPLVEKPDTASDVKIIHLYRIPFLQESETMELLRKVKAKVSANIVDILTEQCFNIQLDNSLTPEKLTMLHWLLAETYEPEKLQTRSFLEDEVSRNSCTVIVEVGPRMTFSTAFSTNAVSICKSLSLVEVTRLERSRRYLLCLEPGSDPLDEVIERGEEALKEINVKMGLAFDKQDIDYYTHLFRDDIKRNPTTVELFDIAQSNSEHSRHWFFNGKLVIDGETMPTTLFQLVKSPLKANLNNSVIGFKDNSSAIKGFPVNQLRPTIPGFTSPLSIIMRELDILFTAETHNFPCAVAPYPGAETGAGGRIRDTHATGKGSFVVASTAGYCVGNLRIDNSNAPWEDPSFSYPVNLASPLQILVDASDGASDYGNKFGEPLIQGYTRTFGMRLLNGERREWLKPIMFSGAIGQIDHAHISKGDPEIGMLVVKIGGPAYRIGMGGGAASSMVSGQNDAELDFNAVQRGDAEMAQKLYRVVRACAEMGESNPIISIHDQGAGGNCNVVKEIIYPKGAEIDIRSIVVGDHTLSVLEIWGAEYQEQDALLVKLESRSLLESLCERERVSMAVIGKIDGSGKIVLIDSAAVEYSKLNDLPPPTPVEELELEKVLGDMPQKTFEFRRVSQVTEPLDIAPGVTLLDALKRVLRLPSVCSKRFLTTKVDRCVTGLVAQQQTVGPLQLPLADVAVIAQTYTDLTGGACSIGEQPIKGLLNPKAMARLAVGEALTNLVWAKVTSLADVKASGNWMYAAKLDGEGADMYDAAVALADCMIELGIAIDGGKDSLSMAAQCDGEVIKAPGNLVISTYVTCPDITLTVTPDLKLGEDGILLHIDLAKGNRRLGGSALAQAFDQIGNDCPDIDDVLYLKKVFEAIQELLSQRLISAGHDISDGGLIVCVLEMAFAGNCGFKLDIDLEDRSLIEGLFAEELGLIIEVHSKYLNIVKQKLEIAGISANVIGEVTNSPEIEVFIDGNLHLKEKTSDLRDLWEETSFQLEELQRLKSCVKLEKEGLKCRTSPSWSLSFTPKFTDGKLLTASLKPKVAIIREEGSNGDREMAAAFHAAGFEPWDITMSDLLAGKSSLKEFRGIAFVGGFSYADVLDSAKGWAASIRFNQPLIQQFQDFYHRPDTFSLGVCNGCQLMALLGWVPGSGVGGSLGTGGDMSQPRFIHNESGRFECRFTSVSIGDSPAIMFKGMEGSTLGVWSAHALCSPDGRHLAMMPHPERCFMMWQYPWYPKEWQVEKSGPSPWLRMFQNAREWCS

SEQ ID NO: 222486 - protein, 274 aa, Zea Mays
MAAMANTSRLPTPCSLPTISIGAKSRRLAVAAVRCGPGGSRSHRRSLGVLLCRSSSTAGAQGSTRMEDYNTAMKRMMRNPYEYHHDLGMNYAVISESLIVGSQPQKPEDIDRLKNEERVAYILCLQQDKDIEYWGIDFQSIVNRCKELGIQHIRRPAVDFDPDSLRSQLPKAVSALEWATSQRKGRVYVHCTAGLGRAPAVAIAYMFWFENMDKLTSIRPCGPSKRAIRAATYDLAKNDPSKEPFENLPEHAFEGVADWERKLIHDRVRALHEA

SEQ ID NO: 222487 - protein, 197 aa, Zea Mays
MEDLSDLGGHGHPGAAAWRPAAPSLASSSKVSVQVYTVPSSAATGREARGQGVAPMMHASSVAGHGGRAADLDPVKAKIVSHPSYHRLLAAFLDCHKVGCPPEAAEEIAAVAREREAWQRAAAGDVAHTRPDPELDQFMESYCELLVTWKEELTRPLREAEEFLTTVEAQLNSITNTGPTMGAFISSAAAAVRMVPI

SEQ ID NO: 222488 - protein, 381 aa, Zea Mays
MCIANYEASGSQVQITLERGIPAMIGSFATKQLPYPYLSFDMVHCAKCNIEWYKNDGIFLVEVNRLLRPDGYFVWTSNLNTHRALRDKENQKKWTAIRDFAEGLCWEMLSQQDETIVWKKTNKRDCYNSRKSGPELCGHDPESPYYQPLNPCISGTRSQRWIPIEYRTTWPSQARQNSTELDIHGVHPEVFADDTSSWDSMVRNYWSLLSPLIFSDHPKRPGDEDPQPPFNMLRNVLDMNAHFGGFNAALLKAGKSVWVMNVVPTDAPNYLPLIFDRGFIGVQHDWCDAFPTYPRTYDMVHADGFLSLQKNHKHRCSTLDIFLEVDRILRPEGWVIIRDAAPLIEAARSVVTQLRWDARVLDLDIASDEKLLVCQKPFLRK

SEQ ID NO: 222489 - protein, 80 aa, Zea Mays
MQLVKQCWSRPHRRAAREGNSSTLMQSGPTIAILGLHLHLHLPNIRTLLLARCIPCDTGKNPFLDYSMLNRFNTLSMYVS

SEQ ID NO: 222490 - protein, 83 aa, Zea Mays
MGYIRDKVNQGQVLLDNVDIKTLQLKRLRDQIGLVNQEPTLFATTILENILFGKPEATKAEVGSTTTSAGAEPRWWQGWKQGC

SEQ ID NO: 222491 - protein, 116 aa, Zea Mays
MLGLFLRIWAWKGVRNLKVSCVGRGLMGYIRDKVNQGQVLLDNVDIKTLQLKRLRDQIGLVNQEPTLFATTILENILFGKPEATKAEVGSTTTSAGSLLFFLVATTLMRVLLLFIF

SEQ ID NO: 222492 - protein, 240 aa, Zea Mays
MVIYLMILIWIVVNFVTYHEHRAGVDAPLTQSFLAYLLLTLVYVPIVLRRRQKLQIAWYWYLALAFFDVQGNYLVVKAYQYSYITSVTLLDCWTVVWVVMLTWYALGTRYSLWQFVGAGTCVAGLALVLLSDAKSQDEQDPKKIPLLGDALVIAGTVGFAFSNVGEEYCVKKKDRVEVVAMLGLFGLLISTAQMYPQKFIISYITCIANWHDLLVITYIALFRKVKLLPQFSWNKKVVTV

SEQ ID NO: 222493 - protein, 417 aa, Zea Mays
MMSHRRRSRAAGSPPGDASTGTPPTPEKSGRVRPWAATASNRKVLVFALAFRAANALLVRTYFNPDEHWQCLEVAHRVAFGYGHLTWEWKRGLRSYLHPLLFAALYKTLALLHMDTPWVMVMAPRLVQSLFAAFGDLYLYKLSKLIFNGQVAKWTLFSQLVNWFMFFCITRTLSNSLETVLTVAGLYYWFAAIESSKATSIVSKQHAACEQSIPSRKVALLIAALSCAIRPTSAVTWLYVGLLDFIQMKSKCRFILLDVIPVGAIVLAVTTLLDWWMYGSWVIVPLNFLKFNLLSSGGDYYGTHVFHWYFTQGFPSMIWTFLPFALCGIVKSQEWRLSGLIAWVLGVYSILGHKEFRFVLPVLPLALMFSGYCLASMSQSKGKNQHRKGSLSRLQLSVILLVITNVPMALYMSLFHQ

SEQ ID NO: 222494 - protein, 303 aa, Zea Mays
MKSKCRFILLDVIPVGAIVLAVTTLLDWWMYGSWVIVPLNFLKFNLLSSGGDYYGTHVFHWYFTQGFPSMIWTFLPFALCGIVKSQEWRLSGLIAWVLGVYSILGHKEFRFVLPVLPLALMFSGYCLASMSQSKGKNQHRKGSLSRLQLSVILLVITNVPMALYMSLFHQRGTEDVMYYLSKEAYDGRVRSVLFLMPCHSTPYYSTLHYNLPMRFLDCTPSDSKGTLDESDRFLTSPSEFVGDVFGNLSAFSHIVLFESEERHVLQLLLHNSFLEMRRFFHSHFKIDRDLQSAVVVYSWRDVL

SEQ ID NO: 222495 - protein, 121 aa, Zea Mays
MVALASLSSLCPCGIARRRAAAASSPAAVSISCCAVATPSSSGKGPQESRTPRRRLRKTEGASKSLEDSVKRKMEQFYEGSDGPPLRVLPIGGLGEIGMNCMLVGNYDRYILIDAGVMFPE

SEQ ID NO: 222496 - protein, 292 aa, Zea Mays
MGRTPCCDSKGIKKGPWAPEEDKLLVDYVQANGPGNWRILPKLAGLNRCGKSCRLRWTNYLRPDIKRGPFTPEEHNSILQLHAVVGNKWSMIAAQMPGRTDNEIKNYWNTHMKKPPAPPPATRPSGRPPGSRPRRASPCSRPRPPRRSPPPPPPPRRPPSPPSMRRHPTSSCASGTPRSGILSAAQPRSRGTVRRRARRALACRRCCLSSAVAVTIPRPRRPTRLRPRRTTATRRSWTWRWRSSRCCTAGSARSRRSRRPTCSLRRTAAFSLRLRSSFARSHCQSSDIRVVD

SEQ ID NO: 222497 - protein, 545 aa, Zea Mays
MADSSGRSGGRPTSASPSTATHTSPASFDGGLLLRLLQNPPSAHPREEILAPSPVAPGAHHFFSDPAVAAVGPLFAASAQTQGGDFGWSSTSTTHVQQQPRFSDPRFAPGDPFAALGGRGFGSGDAVRAERPRSGAPPPGFGKPSHPLPAARDARSASGVVLRKEQYNPRPVDFVPALADVRDPVGRMPHGHGEQFYREQQQDRFLSRTPPEINANGQFGRMPIGEQHTLPILGGRRLHVDQYMPPVQEGRAPHGGHGKHESRLTNPLQREQRWQGLREDKGYASRKLPNVNAHYTSGKALVKEVHHLTIPAGSSVPVEITENQASGLEGGRIGKVVLEDGIDEEGVVEASKFEVSYEKSKIRFAGHDEQDDGGDREDAIIEQMAQNLLIDGNGDAKGVVLEKPILRSKDFRSDFSRGHHVSSQRIRFQRRNRPCRYDIDRFTPNFLSIFESLVPSEEEIANQKQLLTSLSRLINTEWPNSKLYLYGSCANSFGFSNSDIDLCLSIDNKEMSKVDIILKLADIFQAGNLQNIQVSSGIIPCVVTC

SEQ ID NO: 222498 - protein, 162 aa, Zea Mays
MGCATSKQFSRSAPAHADPAVLATQTSFTVNEVEALYELYKKLSCSIVKDGLIHKEEFQLALFRNSRRANLFADRVFDLFDLKRNGVIDFEEFVRSLSVFHPKADTSEKTAFAFKLYDLRGTGYIEKEEIMDQNSAFASFEGKVKFTQLKTNPTTHKNMIKL

SEQ ID NO: 222499 - protein, 248 aa, Zea Mays
MTVALLCALIPVVMSRYAAMFPDKVFSFKVRERLSDFILAAFQRSPNIIAVLKKPITDRLGEAHDNLAKTELALHLCWAIGEHGAGGVGHKDVARELFENLELLLYENLATSRLGLSQEPGSDSMGASSRKSSQARLLCFVVTAIAKLATCHSELLPRARVSLGKVARSRTSDRRVWQRACDYLGLMNEPAICLSVLGPSTAQGNGPGIVNWSEGGTKMVAHVPFYLLAQQKGPPSHNFSFADLLPTE

SEQ ID NO: 222500 - protein, 302 aa, Zea Mays
MPQLPPLTRCEVGSKLLFKKKEKPQNLQVRVSQNGAANGNDPLGLPQLCVRLNTLQYIRGELENIEKKIKTSLRNVESAQADVTDGLDIKFELCQAACLEGIQQICETTAYKVMFYDLGHVLWDTLYVGDTASNRVEVLLRELDPVLETISGMVHNKVRNRAITALMKATFDGFLLVLLAGGPLRAFTRQDSQIIEDDFRALRDLYLADGDGLPEELVDKASSQVKNVLPLFRADSESLIERFRRMMVESNRSASKNRLPLPPTTGHWSPNEPNTVLRVLCYRSDETATKFLKKTYNLPKKI

SEQ ID NO: 222501 - protein, 65 aa, Zea Mays
MAAPPTQQLARRPVPQNLASTRPAEEPIPEDDQLEPADQEPDVEEEYVSEGKSHRPLTLMVFAPK

SEQ ID NO: 222502 - protein, 536 aa, Zea Mays
MEGTVIRIASESKRGNEQTDSLTEVPRAIGTLVTHNREVENLIVLEDDTELTPYEGMEFESEDAARDFYSTYARSAGFRIRISRYTRSRRDNSVISRRIVCSKEGFHETRACDGLHPEQKQQERAGTRVGCKAMILIKKFSPGKWVVTKFIKNHNHGPVPPRKLDSRLVDQDCDPMEKPHSIEVDPVEEPFEGMEFESEEAAKLFYVNYARLNGFRARISRYCRSRRDNSIISRQIVCSKEGFREVRTKKVLTDEGKTKRPRMITRVGCKAMIVVKKMNSGKWMVSKFEKEHNHSLSYSKMVPSTSNITSGEIVDLAAKGAHPSEVKNEGYSAGTQCNPADSLTILYNNLCQEAIKFAKEGSVTEEIYHVAVSALKEAAEKVAEVKRSRPTLSHCGFVRESKHDVLQEKSMSALQCSNQVELTRTSPGSRPLQDSASNLLLIPTDILTDSRLYSGVDTAPLTGGFPTNGKYAMRVKVHMHQKVLLCILRTQRKPLQKNLRTLVLINSSMERSKVSMDLLKIPWLLFLRYLLHCACL

SEQ ID NO: 222503 - protein, 118 aa, Zea Mays
MTGQLTQKSDVYSFGVVLLELLTGRKPVDHTMPRGQQSLVTWATPRLSEDKVKQCVDPRLKGEYPPKGVAKLAAVAALCAQYEAEFRPNMSIVVKALSPLLQQRPAPTTEEPAPQPGS

SEQ ID NO: 222504 - protein, 61 aa, Zea Mays
MAERLEAAASDEYTQDGTVDLHGNPVLRSRRGGWRACGFVVGIWSNCEKNCEKNLGGMRIT

SEQ ID NO: 222505 - protein, 491 aa, Zea Mays
MILLTLAVSLPALRPPKCGAGTADPDCVHKATSEQLGVFFLALYILAVGTGGTKPNISTIGADQFDDAHPRERAHKLSFFNWWMFSIFFGTLFANTVLVYIQDTVGWAVGYALPTLGLAVSIAVFTAGTPFYRHKPTSAESPFAKMARVIVAAARKLDVPVPVDPRDLHELDAEHYAKRNVAPLPHTPNLSVLSKAAVKTGAATSRWSLSTVTQVEETKQMLKMLPVLAITFVPSAMMAQINTLFVKQGTTLDRHVGRHFEIPPASLQGFVTISMLLAVVLYDRAFMPFARRVTANPRGISLLQRMSVGLVIHILIMAIASLTERHRLAVARDHGLYDSKGTTVPLTIFVLLPQFVLMGVADAFLEVAKIEFFYDQAPEGMKSLGTSYAMTSLGIGNFLSSALLSAVSHITRRHGRTGWILNNLNASRLDKYYAFFAILNCANLVAFFFVCRFYVYNAEVSHVVDAGSSKQKREVPMAMQPPAVGAVDATL

SEQ ID NO: 222506 - protein, 119 aa, Zea Mays
MAERLEAAASDEYTQDGTVDLHGNPVLRSRRGGWRACGFVVVYEVFERMAYYGISSNLVLYLTKKMHQGVVPSANNVTNWVGTIWMTPIIGAYVADAHLGRYRTFMVASVIYLSAVNIV

SEQ ID NO: 222507 - protein, 255 aa, Zea Mays
MMMSYQFNVFILFNRLLFPTASWSISYNEVLLKEQLDRFPHIDWCHLIFSDLCEAAQKWHNRSTNNVSVMVYGCSIVVLFRRSSETCYVTKSAFIGQFESTLSPESSEADPNEHGGLRNIYIQLPLIQDLMSTKIQQLLVHQRSKFQAKLFAYDSEVGKIVSTITQCLNQLADTFGELIDEVLRAEIYSSDIENHMTQPCNVSVPEPATHSSDQFVSEPLMTPTQMESQMSHSQVEELVHRQQEVRQAFDSCPDE

SEQ ID NO: 222508 - protein, 255 aa, Zea Mays; identical to SEQ ID NO: 222507

SEQ ID NO: 222509 - protein, 140 aa, Zea Mays
MKNILMIPTISDVSTVEEWRVVAKDIVGRKGELGYRVTIVDWPGLGYSDRPSLNYNADVMESFLVELMNSPNSPVANADDELIIVGGGHAATIAVRAAGKDLIKPSAVAAVAPTWAGPLPIVFGRGSDMETRYIWCSILI

SEQ ID NO: 222510 - protein, 543 aa, Zea Mays
MRRQSLATVLLLLVAAAALAAPAAGHFESSCPFYDHGGHGEPHERHDHGHSCGGGADHEHHHHHHHGHGHGEIQRLLPEEMAEEADLELESFGYEDHDHGHHHHHHHHHSHGDMETSPMGVWLSAMGCSLLVSMASLVCLVLLPVIFFKGKPSKAIVDSLAVFGAGAMLGDSFLHQLPHAFGGGHSHSHDHEGHDHAHAHEHAHAHSLQDLSVGLSVLFGIVLFFIVEKIVRYVEDNSQNGAHSMGHGHHHHNHKRHDSSDKAKLNYQKSDTDGKDIDHAEEEPSVNDTTGKISDGHESEATIRKRSSSKATDGEATNSGRDPAPEKAPSISNSNLVFGYLNLFSDGVHNFTDGMALGSAFLLHGSVGGWSRTLFLLAHELPQEVGDFGILVRSGFTVSKALFFNFLSALVALAGTALALSLGKDPGHSSLIEGFTAGGFIYIAVAGVLPQMNDQKTTIKSSVAQLISLAMGMLVALGISLDQQHIVESLFPSRGEALLAATPACPGPVHGAPVGMHATTTSVKICPCFGLELWLCRTPDVHS

SEQ ID NO: 222511 - protein, 172 aa, Zea Mays
MREIKVQKLVLNISVGESGDRLTRAAKVLEQLSGQSPVFSKARYTVRSFGIRRNEKIACYVTVRGEKAMQLLESGLKVKEYELLRRNFSDTGCFGFGIQEHIDLGIKYDPSTGIYGMDFYVVLERAGYRVARRRRCKSRVGIQHRVTKEDAMKWFQVKYEGVILNKAQGNTS

SEQ ID NO: 222512 - protein, 367 aa, Zea Mays
MSFTIASARSLLQIDPNSGLVQDKVKVGQILEEDTQNIVNMTMNVSSGWSIVKEELILPARGAPFNSCHASTIVQIEEDNFLVAYFGGSREGAPDVKIWLQRYSDGHWHPPVVADEQDGVPMWNPVLFQLPSRELLLFYKIGQEVQKWSGAMKRSLDGGVTWSPREQLPPGILGPIKNKPFLLEDGRLLCGSSVESWNSWGAWLEVTKDAGWTWRKYGPICIKGQPLGVIQPVPYRTDDGTIRVLLRSFETIGHVCMADSIDEGVTWSYVRETELPNPNSGIDGVKMKDGRVLLAYNTFSRGTLKLAVSLNDGDSWDEVMTLEDTKGMEFSYPAVIQSMDELIHVTYTYNRTQVKHVVLRPSSMVKL

SEQ ID NO: 222513 - protein, 395 aa, Zea Mays
MRLQYAWNAIPFILLFCAISTNKIFSNNKPFSFTIASARSLLQIDPNSGLVQDKVKVGQILEEDTQNIVNMTMNVSSGWSIVKEELILPARGAPFNSCHASTIVQIEEDNFLVAYFGGSREGAPDVKIWLQRYSDGHWHPPVVADEQDGVPMWNPVLFQLPSRELLLFYKIGQEVQKWSGAMKRSLDGGVTWSPREQLPPGILGPIKNKPFLLEDGRLLCGSSVESWNSWGAWLEVTKDAGWTWRKYGPICIKGQPLGVIQPVPYRTDDGTIRVLLRSFETIGHVCMADSIDEGVTWSYVRETELPNPNSGIDGVKMKDGRVLLAYNTFSRGTLKLAVSLNDGDSWDEVMTLEDTKGMEFSYPAVIQSMDELIHVTYTYNRTQHVVLRPSSMVKL

SEQ ID NO: 222514 - protein, 402 aa, Zea Mays
MEHTWMRLQYAWNAIPFILLFCAISTNKIFSNNKPFSFTIASARSLLQIDPNSGLVQDKVKVGQILEEDTQNIVNMTMNVSSGWSIVKEELILPARGAPFNSCHASTIVQIEEDNFLVAYFGGSREGAPDVKIWLQRYSDGHWHPPVVADEQDGVPMWNPVLFQLPSRELLLFYKIGQEVQKWSGAMKRSLDGGVTWSPREQLPPGILGPIKNKPFLLEDGRLLCGSSVESWNSWGAWLEVTKDAGWTWRKYGPICIKGQPLGVIQPVPYRTDDGTIRVLLRSFETIGHVCMADSIDEGVTWSYVRETELPNPNSGIDGVKMKDGRVLLAYNTFSRGTLKLAVSLNDGDSWDEVMTLEDTKGMEFSYPAVIQSMDELIHVTYTYNRTQVKHVVLRPSSMVKL

SEQ ID NO: 222515 - protein, 111 aa, Zea Mays
MADSIDEGVTWSYVRETELPNPNSGIDGVKMKDGRVLLAYNTFSRGTLKLAVSLNDGDSWDEVMTLEDTKGMEFSYPAVIQSMDELIHVTYTYNRTQVKHVVLRPSSMVKL

SEQ ID NO: 222516 - protein, 148 aa, Zea Mays
MDANIRLSEEVVRKTQSFDKLKQEAEKCLQQSERFNNEKAEFEQAAFSKFVAVLNSKKAKLRQLRDKVVELEPAVKPPKEEAGQEQEEEEENSTDRTELFEGENDKEASAKDEHSGETGSGNVPSSPGESAATSRGRGRGRGRKKARR

SEQ ID NO: 222517 - protein, 240 aa, Zea Mays
MLHKVVHWCWCMLGRLDIFQKSHCVKVNPDTPQKQVRFLTLSGDKKLLTPQPRLRTGFFSVMDSQMIPVGCIPEACTSVGAAKYGRPIGLDESLKVDLIVIGSVAVDPSSGARLGKGEGFAELEYGMLRYMGAIDDSTMIVTTVHDKQLVDDIPVEKLLVHDVPVDIICTPTQVIFTKTTIPKPQGIYWEKLSPEKLGQIRILRELKQRIEQETGTMLPCGPSEKLPPTAQRKQRWQRRR

SEQ ID NO: 222518 - protein, 149 aa, Zea Mays
MEAALEAARAKDTKERLARVERLHEALNAAACRGLTAAEGGLQALSVAAIVGGNHFKIHLNALVPAAVERLGDGKQPVHDAARQLLITLMEITYIRIVVSHNILEYHLPFRNRPEDNKYTEEELLLLKNKDMGYILQSIQSEKKENSLF

SEQ ID NO: 222519 - protein, 230 aa, Zea Mays
MDLSVVPSLSLSPRRALPLPARRAARRPAFVCRCSCSLDASPVATRRLFASLLATAAAVGVGVAGGGGEAGAVSTSRRALRASKIPESEFTTLPNGLKYYDIKVGSGAEAVKGSRVAVHYVAKWKGITFMTSRQGLGVGGGTPYGFDVGNSERGNVLKGLDLGVEGMKVGGQRLIIVPPELAYGKKGVQEIPPNATIEFWFSPSIFLLFPFFNSWMSSFYQSNRVHSGLL

SEQ ID NO: 222520 - protein, 427 aa, Zea Mays
MALFFILACTLIFVAIASYAQYARWQKGKGRLGGHEKASSSSSKLPPGSMGWPYLGDTLQLYSQDPNVFFASKQKRYGEIFKTHLLGCPCVMLASPEAARFVLVTQAHLFKPTYPRSKERMIGPSALFFHQGDYHLRLRKLVQGALGPDALRALVPEVESAVRSTLAAWDGQVRSTFDAMKTVSKHAWAWPMVSVMMSTQYISDDAENIIACRLDLLLRLFQLSFDVGILAIFGGGGLDERRKAELRKNYSIVEKGYNSFPNSIPGTLYYKAMQVILESLRMASIISFTFREAVADVEYKGFLIPKGWKVMPLFRNIHHSPDYFQDPHKFDPSRFQVAPRPNTFLPFGSGVHACPGNELAKLEMLVLIHHLVTAYRWETVGSSDEVEYRPFPVPKQGLPVRLWRESSAAVDRNGRHETDDDVEDIIV

SEQ ID NO: 222521 - protein, 611 aa, Zea Mays
MENKDLGADNGLIGQFGVGFYSAFLVAEKVVVSTKSPKSDKQYVWEAVADSSSYVIKEETDPEKMLTRGTQITLFLRPDDKYEFADPSRIQGLVKNYSQFVSFPIYTWQEKSRTVEVEEDEEPKEVEEATKAYFDIQGEKKKKTITEKYWDWELANETKPIWMRNPKEIENTEYNEFYKKTFNEFLDPLAHTHFTTEGEVEFRSVLYVPGMAPLSNEEIMNPKTKNIRLYVKRVFISDDFDGELFPRYLSFVKGVVDSNDLPLNVSREILQESRIVRIMRKRLVRKTFDMIEEIAEKEDKEDYKKFWESFGKFIKLGCIEDTGNHKRLAPLLRFHSSKNEGDLISLDQYVESMPESQKAIYYIATDSLQSAKTAPFLEKLVQKDIEVLYLIEPIDEVAIQNLQTYKEKKFVDISKEDLELGDEEEETKETKQEFTLLCDWVKQQLGDKVAKVQISKRLSSSPCVLVSGKFGWSANMERLMKAQTLGDTSSLEFMRGRRIFEINPDHPIIKDLSAACKNEPESTEARRAVELLYEAALISSGYTPESPAELGGKIYEMMAIALGGRWGRSDMEEAEASTGEASAEADSSEGTVAEVIEPSEVRPESDPWRDQ

SEQ ID NO: 222522 - protein, 450 aa, Zea Mays
MMRNPKEIENTEYNEFYKKTFNEFLDPLAHTHFTTEGEVEFRSVLYVPGMAPLSNEEIMNPKTKNIRLYVKRVFISDDFDGELFPRYLSFVKGVVDSNDLPLNVSREILQESRIVRIMRKRLVRKTFDMIEEIAEKEDKEDYKKFWESFGKFIKLGCIEDTGNHKRLAPLLRFHSSKNEGDLISLDQYVESMPESQKAIYYIATDSLQSAKTAPFLEKLVQKDIEVLYLIEPIDEVAIQNLQTYKEKKFVDISKEDLELGDEEEETKETKQEFTLLCDWVKQQLGDKVAKVQISKRLSSSPCVLVSGKFGWSANMERLMKAQTLGDTSSLEFMRGRRIFEINPDHPIIKDLSAACKNEPESTEARRAVELLYEAALISSGYTPESPAELGGKIYEMMAIALGGRWGRSDMEEAEASTGEASAEADSSEGTVAEVIEPSEVRPESDPWRDQ

SEQ ID NO: 222523 - protein, 376 aa, Zea Mays
MNGAEEEEPPHVSSMPKTQDGVTKPSLGKEPIPGSELWTDGLICAFELVKSHRKPVQHKSWLATEQIQEKGPTMCTRKHSRRNGHQITEPKVDESIVLENPQQTDFSNDPSVLKDRPLYAGEILDHKWVPIGWNRIAELVLRVQSDSSWENELMEMSDSEDDYTVADLAAPYWQRPVGPTWWCHVTAGHPSIDAWLNSAHWMHPAIRIALRDESKLISDRMKYLLYEVPVRVAGGLLFELLGQSIGDPNHEEEDIPIVLRSWQAQNFLVTTMHVKGPSSNINVLGVTEVQELLLAGGSQTPRSVHEVIAHLVSRLSRWDDRLFRKYVFGEADEIELKFVNRRNHEDLNLVSIILNQEIRRLATQDCIWSTRALLII

SEQ ID NO: 222524 - protein, 208 aa, Zea Mays
MSNEMYSTIARVTDGIYEGIAIGGDVFPGSTLSDHILRFNNIPQVKMMVVLGELGGKDEYSLVEALKQGKVQKPVVAWVSGTCARLFKSEVQFGHAGAKSGGELESAQAKNQALKEAGAIVPTSYEALESAIKETFDKLFEEGKISPVTEITPPLIPEDLKTAIKSGKVRAPTHIISTISDDRGDEPCYAGVPMSTIIEQGYGVEFKL

SEQ ID NO: 222525 - protein, 398 aa, Zea Mays
MSNEMYSTIARVTDGIYEGIAIGGDVFPGSTLSDHILRFNNIPQVKMMVVLGELGGKDEYSLVEALKQGKVQKPVVAWVSGTCARLFKSEVQFGHAGAKSGGELESAQAKNQALKEAGAIVPTSYEALESAIKETFDKLFEEGKISPVTEITPPLIPEDLKTAIKSGKGYGVGDVISLLWFKRSLPRYCTQFIEICVMLCADHGPCVSGAHNSIVTARAGKDLVSSLVSGLLTIGPRFGGAIDDAARYFKDACDRSLTPYEFVEGMKKKGIRVPGIGHRIKSRDNRDKRVQLLQKYAHTHFPSVKYMEYAVQVETYTLSKANNLVMNVDGAIGSLFLDLLSGSGMFTKQEIDEIVEIGYLNGLFVLARSIGLIGHTFDQKRLKQPLYRHPWEDVLYTK

SEQ ID NO: 222526 - protein, 211 aa, Zea Mays
MSNEMYSTIARVTDGIYEGIAIGGDVFPGSTLSDHILRFNNIPQVKMMVVLGELGGKDEYSLVEALKQGKVQKPVVAWVSGTCARLFKSEVQFGHAGAKSGGELESAQAKNQALKEAGAIVPTSYEALESAIKETFDKLFEEGKISPVTEITPPLIPEDLKTAIKSGKGYGVGDVISLLWFKRSLPRYCTQFIELLLGPERTLFPAWCLDY

SEQ ID NO: 222527 - protein, 237 aa, Zea Mays
MSTIIEQGYGVGDVISLLWFKRSLPRYCTQFIEICVMLCADHGPCVSGAHNSIVTARAGKDLVSSLVSGLLTIGPRFGGAIDDAARYFKDACDRSLTPYEFVEGMKKKGIRVPGIGHRIKSRDNRDKRVQLLQKYAHTHFPSVKYMEYAVQVETYTLSKANNLVMNVDGAIGSLFLDLLSGSGMFTKQEIDEIVEIGYLNGLFVLARSIGLIGHTFDQKRLKQPLYRHPWEDVLYTK

SEQ ID NO: 222528 - protein, 317 aa, Zea Mays
MASAARLLAPISRRGVVSVALAGVERRRPEAASLLGAPVLATVEACASIKVIPLSNQLARYSTTAFQRFGFSTSAPQQDDKETNKHTDDGVNRSVGASTGASSEANNVPGTEKAQEADSEDLDLSKEDLVKLLLEKDESLKSKDEEFKDMKDKVLRSYAEMENVLARTKRESENTKKYAIQSFSKSLLDVADNLSRASSVVKASFSKIDSSNDSDEAVTLLKTLLEGVEMTEKQLGEVFKKFGVEKFDPLNEKFDPNRHYAIFQIPDPSKPSGTVAAVVKLVSLKVVQLKKSQRSNLDQTEVAGCTYIYDYCPLLVG

SEQ ID NO: 222529 - protein, 564 aa, Zea Mays
MSSRNRSAAASSAAPALRTPRRLKRRPVKASAPGPGSGRRSGPATPLLKWDVGGGGGRGEGRKAGADEAGDAARARETKAKATEVSVRRLAAGVWRLRPPEAVAGGGSGVRVGVEHIPRHLQVQLLKQNTSGHHQSSKNEVSSPISVLERKSGELHKGQLHATSAMLPVATMEKATKWEPGDIKGMESHDAYLIASQLNLLDEHRDTAYVADLQMELQQARDRISAMETERRSAKKRLDHLFKKLAEEKAAWRNREHEKVRAILEDMKADLDHEKKNRRRLEMINMKLVNELKEAKMSAKQLLQEYETERKARELTEEVCNELAREVDEDKAEIEALKRDSQRLREEVDEERKMLQMAEVWREERVQMKLVDAKLTLDAKYTQLSKLQQDVEAFIAACSTANGDVTVVEQAESIIQAIKSVRAQDAEFRYEPPAASEDIFSIFEELRPSEEPVIKEIEPCYKNSSAKCEPEIQEVSPMTDIFLEKKAKANSNKSPKDESDTEDGSSWETISHEDVQGSSGSPDGSEPSVSNKVCDGSIPWKSRNGFERMESAPWRPCRLRPSCP

SEQ ID NO: 222530 - protein, 152 aa, Zea Mays
MELGGGGRGGGDRVRRQLQSVGRLAAYLGGGFLLLSATSSVAVRALRAISDANQEVREAVRCLRGEGQLLVQALQGQRHHRVVSDARPGVRESVPLPYLRWDSGAALLELPGKWLRLKKRCQFSLSMIDGCWGVDFLQVVQASIRRRCARIV

SEQ ID NO: 222531 - protein, 339 aa, Zea Mays
MAGEAGKDPQAWLAANETASAFLSRSLSSRPPITLPPPLHRAPLRPGNVVEIAGPSNSGKSHLLLMAAVQCILPKEWEGIYFGGLGRAVMYLDLDCRFDVLRLAQILRNRIAEGCRLAHLRNGDPENDVTKDEFQCSLQNTLFSDCMQRFLYARCCKSPEFIDALKTVQSQSRREVSGAGIYFVMIDSIGAFYWIDRGSQASRENKGKTLQSIFESVVHELRKILQLEPALVLVTKASVYGEGTTTANDFNRDSSKYMLEDPSGLGYSRREEERTLSNREYMPSIWQSFVTHRINLQEAEVPSVLESEVLPLHTSEWVQPCLKMKEKFSIMDDGVNLIH

SEQ ID NO: 222532 - protein, 139 aa, Zea Mays
MAWLGLQLRVLVVRDPCAVCRADARLSSQHFHHCNVPKHRSHIIHDHLWLRRCHQHKGVQRAGSPEHRQRQEGAHCVAGAVPDAGGGVPAAPGPRPRPLGAPLHHQRGRGQRLRLHDAAAHRLRRAGLHAGVLCGVARG

SEQ ID NO: 222533 - protein, 258 aa, Zea Mays
MMQVARCVTMNKAIGIFGFNLEDHIGKVSFPPVQAVPSFPSSFPHLFAGKDQLRCLIPCAIDQADLVMEAPTWTGERDKQGGPFPCKCGDDVSNPRPGDSDPYFRMTRDVAPRIGYQKPSLIESRFFPALQGENTKMSASDANSAIYVTDSAKEIKTKVNKYAFSGGQDSIELHRKLGANLDVDVPIKYLNFFLEDDDELAHIKKEYKEGRMLTGEVKQRLIAVLSEIVARHQRARAQVTEEMVDAFMAVRPLPNMFG

SEQ ID NO: 222534 - protein, 63 aa, Zea Mays
MIPFLAIHAKGGESMSPKQKGPHHNQFQKLSVFQEYLSIGILLCSKGGESSISKMIYQNPLEH

SEQ ID NO: 222535 - protein, 190 aa, Zea Mays
MADHKEEQSVMDKISEKFHGGDSSSSSDSDDEKKKGSSSASATEAMKAKIYRLFGRERPVHSVLGGGKPADLVLWRNKKISGGVLAGATAIWLLFEVMEYHLLTLVCHCLIVSLAILFLWSNASSFINKSPPNIPEVKIPEDVSVNVALTLRYEINRGFATLREIGHGHDLKKFLIVSGSFQFLGAVATS

SEQ ID NO: 222536 - protein, 115 aa, Zea Mays
MGQSMEMGTIHAGDFLRRFCSTLGMTNQAVNAAKEAVQRSEELDIRRSPISIAAAVIYMITQLSEDKKPLKDISLATGVAEGTIRNSYKDLYPYASRLIPNTYAKEEDLKNLCTP

SEQ ID NO: 222537 - protein, 316 aa, Zea Mays
MLAAKDGEPWWDSPWGPGRPGWHIECSAMSAHYLGHSFDIHGGGEDLIFPHHENEIAQSRAACCDSTINYWIHNGFVNVNSQKMSKSLGNFVTIRKVIEMYHPLALRMFLLGTHYRSPINYTIEQLNVTSDRLYYTYQTLLDCEEICQQQQSNTGNSLPANTLNYIQKLHEEFETSMSDDLHTSVALAAISEPLKVMNDLLHTRKGKKQDKRLESLSALEEKIRVVLSVLGLLPSSYHEALQQLRDKALRRASITEELVVQKIEERTAARKAKQYEKSDEIRKELAAIGIALMDGPDGTTWRPSLPILEEAVVAKT

SEQ ID NO: 222538 - protein, 341 aa, Zea Mays
MEAIRKQASKFREQVARQQQAVMKQFGGGYGADGVFANEAEAQQHSKLEKLYISTRAAKHFQRDIVRGVEGYIVTGSKQVEIGNKLCEDGKKYGTENTCSSGSTLSKAALSFAKARSMMEKERGNLLKALGTQVAEPLRAMVMGAPLEDARHLAQRYDRMRQEAEAQAIEVSKRQMKLREASGNSDMVSRLEAAESKLQELKSNMGVLGKEAVAAMTAVEAQQQRLTLQRLIALVESERNYHQKVLQILDQLEREMVSERQRIEGAPPVVESSMPPPPAYEEVNGIFMRNTVAELVETVEYFLAEAIQSYQAESDTELNLSTGDYIEKRERVLASKVAQVF

SEQ ID NO: 222539 - protein, 291 aa, Zea Mays
MAAGLGARPSATFVAGRFRPLAAPLRPVRSGKFVVPKRCFIVSSRLAWVEDELMEIQKSQEQSSVKSKKRPPLRRGKVSPQLPVPGHIPRPSYVGAKGLPELCKGQLHDAQGITGMRAACKLAARVLDFAGTLVKPSITTNEIDAAVHNMIIEAGAYPSPLGYHGFPKSICTSVNECVCHGVPDSTQLQNGDIINIDVNVFLNGYHGGTSRTFACGQVDDSIKHFLNAAEECLEKGISICRDGVNYRKIGKKISKLAYFYGYYVVERFVGHGIGTMYHSEPLILHHGGYHF

SEQ ID NO: 222540 - protein, 182 aa, Zea Mays
MNMENDQPLLPAPPVNLESAILEQNANMVALKEGCSVGSELPPGLQGNFGGNKANTCTSALHSIDEGEEITCGFIKHERSYDLQNLTMDKSIQVSNETKYKFLAHKPRVGCETAIQNCELASALPDTEFHGPVATISTTGQSEGSDTEINVPNYSDLEALILDLDLIPWDQESDFIQPEGRI

SEQ ID NO: 222541 - protein, 90 aa, Zea Mays
MAKAISIKSVSFSGLRKDNVAFRLQPVPQRFAVCCPAKKETVDRVCDIVKKQLALPEGTEVCGSSKFQDLGADSLDTGITSRISALVLYS

SEQ ID NO: 222542 - protein, 407 aa, Zea Mays
MGSLGGSAGAGDGGKVGLPALDVTLAFPQATPASLFPPAVSDYYQFDDLLTDEEKALRKKVRGIMEKEIAPIMTEGYGCPGLSLTASAISIAEVARVDASCSTFILVHSSLAMSTIALCGSEAQKQKYLPSLTQFKTIGCWALTEPDYGSDASSLRTAATKVPGGWHLDGQKRWIGNSTFADVLIILARNADTNQLNGFIVKKGAPGLKATKIENKIGLRMVQNGDIILNKVFVPEEDRLTGINSFQDINKVLAMSRIMVAWQPIGISMGVYDICHRYLKERKQFGAPLAAFQLNQEKLVRMLGNIQAMLLVGWRLCKLYESGKMTPGRSSLGKAWTSKKAREVVSLGRELLGGNGILVDFLVAKAFCDVEPIFSYEGTYDINSLVAGREITGIASFKPAVSAKSRL

SEQ ID NO: 222543 - protein, 799 aa, Zea Mays
MLGSSASRRESKTSNLFWAAAMAFRDAANKTTAIEPAKAVPNNMLDATKPAEPTTTVSNAAAVRHEGWMVRYGRRKIGTSFFHTRYFLLHSKLLAYYKKKPKDNMVPLKSLLIDGNCRVEDRGLTTYHGQMIYVLCIYNKKEKEHQITMGAYDIEDAMTWKKKIELIIDLQQDSITAKNRRAFASVDFDRELGGQFLFSDHDNTAEDDDERSTLTHRPTIGNGPPDSIHDWTKESDIGVTNQNDPIQFCSKKNWRLLRCQNGLRIFEELLEVDYLARSCSRAMKAVGVAEATCEAIFGLVMSMDVTRYEWDCSFRHGSLVEEVDGHTAILYHRLQLHWCPMLVWPRDLCYARYWRRNDDGSYVVLFRSIEHPNCGRQRGFVRAFIESGGFKISPLKCHNGRPRTQVQHLMQIDLKGWFLNYTLSFQYHSLLQILNCVAGLREYFSQTDEIHIIPRIHVMETMFDVDSKPKFHKLQEVETKENKNMGIIDEESDDDDDYQVPEANIETLTKTNIQEDPNTSDNDNKHTDEPPEKIDLSCFSSILHRDPEEKSRNCWTVPDSKNFKVRSKNFPQDKSKIPAASYLMELAAIDWFKDTKRMDNVARQKGCVAQVAAEKGMHTFIVNIQIPGSTQYSLVMYFVTNTLKKGSLLQRFFDGDDEFCNSRLKLIPSVPKGSWLVRQSVGSTPCLLGKAVDCSYVRGPAYLEVDVDIGSSAVANGVLGLVFGVVTTLVVDMAFLIQANTYEELPEQVIGAARLAHVEPATAVVPDLSNTSNDSSNSNDDNSNNNIGSSEDDVSKKTN

SEQ ID NO: 222544 - protein, 446 aa, Zea Mays
MAAGRLALPSSTRATSCFIASCSRTTRRSQRTTWVEDRGLTTYHGQMIYVLCIYNKKEKEHQITMGAYDIEDAMTWKKKIELIIDLQQDSITAKNRRAFASVDFDRELGGQFLFSDHDNTAEDDDERSTLTHRPTIGNGPPDSIHDWTKESDIGVTNQNDPIQFCSKKNWRLLRCQNGLRIFEELLEVDYLARSCSRAMKAVGVAEATCEAIFGLVMSMDVTRYEWDCSFRHGSLVEEVDGHTAILYHRLQLHWCPMLVWPRDLCYARYWRRNDDGSYVVLFRSIEHPNCGRQRGFVRAFIESGGFKISPLKCHNGRPRTQVQHLMQIDLKGWFLNYTLSFQYHSLLQILNCVAGLREYFSQTDEIHIIPRIHVMETMFDVDSKPKFHKLQEVETKENKNMGIIDEESDDDDDYQVPEANIETLTKTNIQEDPNTSDNDNKHTGCC

SEQ ID NO: 222545 - protein, 387 aa, Zea Mays
MLGSSASRRESKTSNLFWAAAMAFRDAANKTTAIEPAKAVPNNMLDATKPAEPTTTVSNAAAVRHEGWMVRYGRRKIGTSFFHTRYFLLHSKLLAYYKKKPKDNMVPLKSLLIDGNCRVEDRGLTTYHGQMIYVLCIYNKKEKEHQITMGAYDIEDAMTWKKKIELIIDLQQDSITAKNRRAFASVDFDRELGGQFLFSDHDNTAEDDDERSTLTHRPTIGNGPPDSIHDWTKESDIGVTNQNDPIQFCSKKNWRLLRCQNGLRIFEELLEVDYLARSCSRAMKAVGVAEATCEAIFGLVMSMDVTRYEWDCSFRHGSLVEEVDGHTAILYHRLQLHWCPMLVWPRDLCYARYWRRNDDGSYVVLFRSIEHPNCGRQRGFVRAFIEN

SEQ ID NO: 222546 - protein, 455 aa, Zea Mays
MLTVPSSPLSPATGGSVKIVQMTPVTSAMTTAKWLREVISSLPDKPSSKLQQFLSSCDRDLTNAVTERVSIVLEAIFPTKSSANRGVSLGLNCANAFDIPWAEARKVEASKLYYRVLEAICRAELQNSNVNNLTPLLSNERFHRCLIACSADLVLATHKTVIMMFPAVLESTGLTAFDLSKIIENFVRHEETLPRELKRHLNSLEEQLLESMAWEKGSSLYNSLIVARPSVASEINRLGLLAEPMPSLDDLVSRQNVRIEGLPATPSKKRAAGPDDNADPRSPKRSCNESRNTVVERNLQTPPPKQSHMVSTSLKAKCHPLQSTFASPTVCNPVGGNEKCADVTIHIFFSKILKLAAIRIRNLCERVQCVEQTERVYNVFKQILEQQTTLFFNRHIDQLILCCLYGVAKVCQLELTFREILNNYKREAQCKPEVFSSIYIGSTNRNGQRSLSWCH

SEQ ID NO: 222547 - protein, 333 aa, Zea Mays
MGNCCVTRPFSGKRRGGSRGGAGGNRCGRLGGANVRSCSTLSSISDAARTAATQAWSPLTVLGKGLAAEASAEELLRRYQLGEELGRGEFGVTRRCTDTSTGEVLACKSISKRKLRSSVDIEDVRREVAIMRSLPEHPNVVRLREAFEDADTVHLVMEVCEGGELFDRIVSRGHYTERAAACVMRTIMEVVLHCHKHGVIHRDLKPENFLYANTSENSALKVIDFGLSVCFKPGDRFSEIVGSPYYMAPEVLKRNYGQEIDIWSAGVILYILLCGVPPFWAETDEGIAQAIIRSNIDFRREPWSKVSENAKDLVRKMLDPSPYCRLTAQQVLG

SEQ ID NO: 222548 - protein, 310 aa, Zea Mays
MGNCCVTRPFSGKRRGGSRGGAGGNRCGRLGGANVRSCSTLSSISDAARTAATQAWSPLTVLGKGLAAEASAEELLRRYQLGEELGRGEFGVTRRCTDTSTGEVLACKSISKRKLRSSVDIEDVRREVAIMRSLPEHPNVVRLREAFEDADTVHLVMEVCEGGELFDRIVSRGHYTERAAACVMRTIMEVVLHCHKHGVIHRDLKPENFLYANTSENSALKVIDFGLSVCFKPGDRFSEIVGSPYYMAPEVLKRNYGQEIDIWSAGVILYILLCGVPPFWAGYHPVQHRLPQRALVKGVGKCKRSCEEDA

SEQ ID NO: 222549 - protein, 233 aa, Zea Mays
MRNSSNFLNDEAVSHDPQILLMKAHAATSSIGSATVIIAMLEKTGTLKIASVGDCGLKVIRKGQVMFSISPQEHYFDCPYQISSEAEGQTYKDALVCSVNLMEGDIIVSGSDGLFDNIFDQEIVSIISESPSVDEAAKALAELARKHSVDVRFDSPYSMEARSRGFDVPWWKKLLGGKLIGGKMDDITVVVAQVKTVVVPEDEVQGGDTEEQKGNEQGAAAVVAYKMNDEEVA

SEQ ID NO: 222550 - protein, 327 aa, Zea Mays
MATATASRLAVLAPRPSRPAPGRRRHAPATGRGPPLPRSLYAAPRGRVLCLAAPAPAAASTTDAGQDRLQKVPISNIRNFCIIAHIDHGKSTLADKLLELTGTVQKREMKEQFLDNMDLERERGITIKLQAARMRYVMNNEPYCLNLIDTPGHVDFSYEVSRSLAACEGALLVVDASQGVEAQTLANVYLALENNLEIIPVLNKIDLPGAEPDRVAQEIEEIIGLDCRDAIRCSAKEGIGITEILDALVTKIPPPKDTSKDPLRALIFDSYYDPYRGVIVYFRVIDGSMKKGDKICFMANGKEYVAEEIGVLSPNQMQVSELYAGEV

SEQ ID NO: 222551 - protein, 77 aa, Zea Mays
MFRVPIQACIGTKVIASEALSAIRKDVLSKCYGGDISRKKKLLKKQAEGKKRMKAIGRVDVPQEAFMAVLRLEKEVL

SEQ ID NO: 222552 - protein, 192 aa, Zea Mays
MTAEPGDEERQEREHGRGAVDEAEEDERERGQRVVGAEVGEVAARPRAGLPAAVRARERRRVQHLTPRARPARRGPGERSRAGEEGDPGLRRRCRRRGGGGRRIAARGRDVLRLELRRRGGGGEGAVARPRRGGGGHGGPLANPSRRALDRASGCGIGAVACAAVPGWPLVGLAWPLRSRGSERRRRERERK

SEQ ID NO: 222553 - protein, 162 aa, Zea Mays
MAYAIAEKDAEKAPKPSEGEDAYVKKLFLKGTTYYLYVHSYLHYGLLAARAEVLKAGNGNGYSNCMLEGFQGKYKYGDDSFEASGPPSGASYSKCKDDAVKALKVDEACTHMKCSFGGIWNGVPSRLHLRSRKETQFSKVTSDGILVMKFCVESPHSSTSSS

SEQ ID NO: 222554 - protein, 134 aa, Zea Mays
MAVDEVNSVYVGSLPYEANEEMLRDAFGYYGTIVSVKVSQIKDKISAKGQHIADLQKKAQKLEDELAAARKVSSERQLAVTDLYKHFLQLQDYNDRVKTAEHRLQSLVDAAMAELDMAEDATTRDGSMYENGVV

SEQ ID NO: 222555 - protein, 780 aa, Zea Mays
MEGEAAAAEAVARIRLVRCPKCDKFLPELPAYSVYVCGGCGATLQAKKKNSAQSSDDADNGNVKYLEVLECIPQASARKHGASTTDKSETSKIADVHSKPVYGNHDRIQTGPSPSNLNTSIRDDGKEAKYRHIRYCENGEMGQSLRVRDMSPKSPINHISDNNRSEYHLKQRYSYSTKECPGERNLDGPSKVRGLEKDRAEILRMLDELRDQVQQSCNATNGASGIAPSTAAADSNSSHGTSDRLSQLRQVAPQLHQNGSHHSPSLNVGSPSVSRVYAPLPAQQDCVRYAEPISHARASSYPASLYPWRNFDNYFFGQHDPDPLLSCRHDGFYHQAACSCLHCCHQEFLPIQGNHIGFHDQRAPYLLNNYGAYPVDSPLLGQQRYSARVTNTTLQQNHMRVNVSKKAAQTCEPVAGGAPFTICCNCYEVLQIPRKQSLSGNEYKLRCGSCSHAIIVKLDGNRLNVSEFALCTRLSDGQENDMGTDGQTQDNRSIPAYHLSVGSPASQERDLHSNLSESENNHTPLGTDSEGTSLSRDLPAEDSAVSHVPNLPHHSHSGSSPTEHFGVGSRSTHSEPEKVILLTESSKQTSVRGICVTNKMQSPNNEFDVPEYTDDTLNDQQDTDHPRTTKASDSFLTNLIKRSFKINNGLRNRRARVYVNGFPISDHVVRKAEKLAGSICPGNYWYDYHAGFWGVMGHPCLGMIPPYIPEFNFPMPKNCAGGNTSIFVNGRELHQKDLDLLVTRGLSDSPGRSYVVENSGKVSDEVSGEELYGLGKLAPT

SEQ ID NO: 222556 - protein, 110 aa, Zea Mays
MMEQVEELRRTERHLGEMNRQLKHKLEAEGCSNYTTLQHAACWPAPGGTIVEHDGATYQVHPPAHSVAMDCEPTLQIGYPHHQFPPPEAANNIPRSAATGENNFMLGWVL

SEQ ID NO: 222557 - protein, 110 aa, Zea Mays; identical to SEQ ID NO: 222556

SEQ ID NO: 222558 - protein, 429 aa, Zea Mays
MAQIPNLDNAPLNLAALREQSQKDLFGILKNIRGKKCLVIDPKLAGTLSLVVQTSLLKEYGAEVRILSPEPLQTECPKIVYLVRSQLRFMKFIASQIKNDEPKGLQREYFLYFVPRRTVACEKILEEEKVHQKLTFGEYPLYLVPLDDDVLSLELDHSLQECLIEGDTSSIWHVAKAIHKLEFAFGVIPNVRAKGVASTKAAELLNSMQLEDPVNMDDMGIPEINTVILLDREVDMVTPMCSQLTYEGLLDEMLQINNGSVEVDASIIGAQQDGKKVKVPLNSSDKLYKEIRDLNFEVVVQVLRQKATSIQQDYAEVKSTNTQSVSELKDFVRRLHSLPEIARHVHLAQHLQSFTGKPSFHARLDIEQTILEVQNFEICFEYIEEMIHKQEVIENVLRLLVLLSLTNAGLPKKNFDYMSCTACGTVATT

SEQ ID NO: 222559 - protein, 264 aa, Zea Mays
MTDMHCCWVSKEAVAFAAKNTKRKRRSSPNESKDLLLVVSEEAASGSGGSAGTSLETNGEDVATDDEVSGAPRSAVLQACALTSGLLLAGGLLLREASHLASINGWPIADPTDVSFSFETWHLELVAGLVIVISSARYILLQTWPDFRDSSESANRQILASLEPLDYIVVACLPGISEELLFRGAMMPTLGLNWISALIIGTVFGVLHLGNGRKYSFAIWATFVGFAYGMGTIASSSIVVPIASHSINNIIGGLLWRLTKNSQK

SEQ ID NO: 222560 - protein, 243 aa, Zea Mays
MTLAMSALACHRPLPFKIFRPFACCMRGLVNRDVQPAHCCPLMKCRGWKRKLRTSVATWKHMRPDRRNEAVAFAAKNTKRKRRSSPNESKDLLLVVSEEAASGSGGSAGTSLETNGEDVATDDEVSGAPRSAVLQACALTSGLLLAGGLLLREASHLASINGWPIADPTDVSFSFETWHLELVAGLVIVISSARYILLQTWPDFRDSSESANRQVCRFQCILCRIIFPVVSFCWSYRFHSLTC

SEQ ID NO: 222561 - protein, 64 aa, Zea Mays
MASSGYEGILLGMGNPLLDISAVVDEGFLANGVMRTPASPIHPLCCIQRQLGEHHQFTSLLYPT

SEQ ID NO: 222562 - protein, 216 aa, Zea Mays
MEYAATITVNPLTALRMLQDFVKLNPGDAIVQNGATSIVGQCVIQLAKVHGIHTINIIRDRPGSEEAKNKLKQLGADEVFTETQLDMKNVKSLLGALPEPALGFNCVGGNAASLILKLLKQGGTMVTYGGMSKRPVTVPTSYFIFKDLSLRGFWLQKWLNSDKTEDCRRMIDYLLGLVHEGKLKYEMESISFGEFSLALEKALGKHGSQPKQVIKF

SEQ ID NO: 222563 - protein, 85 aa, Zea Mays
MPHVTSAKAQSKTKPSNMGLGNKEAMAIQPNVTAGQSTLEGGHERLQATVRKILEMVDAQEQEEAMPPRPSPGLLELSERATALS

SEQ ID NO: 222564 - protein, 175 aa, Zea Mays
MCEICLQQFRPGYTSPQQLFHYGSIPMNFRGNWEIARQDLNDSQIITMMPTERDFMDNYDDYFPIRTRSSTLCCRTIAIIFMSLLVLRHTLPLVIGDNGEYSLALFSLLVLRTAGILFPILVMVRALASFHHRRRQQESQEAYISSSESEEEEEEYTVANSAQTNYSQPRFIPVY

SEQ ID NO: 222565 - protein, 183 aa, Zea Mays
MSGVLPLVAKALQPPAGMKLKCPPAVVAVRAALARTALVKSLRPQPLPSKMVAIALLGMAANIPLGVWREHTKKFSPQWFAAVHAAVPFIAMLRKSVVMPRTAMAFTIAASIVGQTIGSRAERIRLRNQAANGTGDSSTHTAMYPNKNGHCSDTEGKAWDPLATKITGSTARGSPAPTPSVCF

SEQ ID NO: 222566 - protein, 222 aa, Zea Mays
MPLATTAPTPAPPCPPPSPAAAPVRTQLLSSVAKLALTAALVCGSGGPAAVVVVPAAAQAVPFVRPPPPPLQGRPFASSTPYAQSQKLQLGLDKLGPCPSTNPGCVSTNPLGSSGSFASPLLIPESSAGEKTVASLRQAIEKTQRNVEFKVDEDTPYGHYIEAEMDGGVGRDVMEFLVKKDAGVVAYRCMATKVTFVYPFTTAVGDSKGQKQRIAAISQELG

SEQ ID NO: 222567 - protein, 204 aa, Zea Mays
MGTERRSMFISDESRKLTAYHESGHAIVALNTQGAHPIHKATILPRGSALGMVTQLPSQDETSISKKQLLARLDVCMGGRVAEELIFGEDNVTTGARNDLHTATELAQYMVSNCGMSDAIGPVHVKERPSIEMQSRIDAEVVKLLREAYGRVKRLLRKHEKQLHALANALLERETLTADEINKVVHPYQEEPHLSFQDEEFALA

SEQ ID NO: 222568 - protein, 316 aa, Zea Mays
MDGFEQNEGIIVMAATNLPDILDPALTRPGRFDRHIVVPSPDVRGRQEILELYLQDKPVANDVDINAIARSTPGFNGADLANLVNIAAIKAAVEGADKLNAVQLEFAKDRIIMGTERRSMFISDESRKLTAYHESGHAIVALNTQGAHPIHKATILPRGSALGMVTQLPSQDETSISKKQLLARLDVCMGGRVAEELIFGEDNVTTGARNDLHTATELAQYMVSNCGMSDAIGPVHVKERPSIEMQSRIDAEVVKLLREAYGRVKRLLRKHEKQLHALANALLERETLTADEINKVVHPYQEEPHLSFQDEEFALA

SEQ ID NO: 222569 - protein, 490 aa, Zea Mays
MWVMGAAALQKYIGSLGGIGASGAGSSSSYSPKEMNKDMMPEKNVKTFKDVKGCDDAKKELEEVVEYLKNPSKFTRLGGKLPKGILLTGAPGTGKTLLAKAIAGEAGVPFFYRAGSEFEEMFVGVGARRVRSLFQAAKKKAPCIVFIDEIDAVGSTRKQWEGHTKKTLHQLLVEMDGFEQNEGIIVMAATNLPDILDPALTRPGRFDRHIVVPSPDVRGRQEILELYLQDKPVANDVDINAIARSTPGFNGADLANLVNIAAIKAAVEGADKLNAVQLEFAKDRIIMGTERRSMFISDESRKLTAYHESGHAIVALNTQGAHPIHKATILPRGSALGMVTQLPSQDETSISKKQLLARLDVCMGGRVAEELIFGEDNVTTGARNDLHTATELAQYMVSNCGMSDAIGPVHVKERPSIEMQSRIDAEVVKLLREAYGRVKRLLRKHEKQLHALANALLERETLTADEINKVVHPYQEEPHLSFQDEEFALA

SEQ ID NO: 222570 - protein, 127 aa, Zea Mays
MCEAPRLGNRAGGSPRIPLSWCGEDEDDDMEEHAVQVLVLAHAYQVPWLKRACEGAIGARLTADSVVDVLQLAGLCDAPRLHLRCARLLAKEFAAVERTEAWRFLQENDPWQELHVLQRLHEADMEV

SEQ ID NO: 222571 - protein, 224 aa, Zea Mays
MLPMLSTIYLREVASSPSTPLLLCDQYEFDSIQRIKIKHGHPYYLVKWKRATRGMNSIMSSNKPVMEGETSSEVVLLDEDDDLDAVVCESPELLDEPDVPQVLIDDGCCFVLTDEDIQLVGAAFPKETARFQEEQRLKEARSRSRKSKSSLADSACKTPEGPRPSGVQLSITEFYRSKKAQNVESGKKPAGEGHAARGGSRKSSDRDLDKSLPKSVRRRLLFDC

SEQ ID NO: 222572 - protein, 184 aa, Zea Mays
MGTFGYMAPEYAQSGKLTDRSDVFSFGVVLLELITGRKPVDASQPLGEESLVEWARLLLVDALETDDFREVADPALECRFSKTEMRRMVEAAAACVRHSAAKRPRMVQVWRSLDVDECSSDLTNGVKLGQSMAYDSTRYSADIELFRRMAFANDLSTAELGVVDEDDHRYHNSSKASSSSRRYK

SEQ ID NO: 222573 - protein, 414 aa, Zea Mays
MASTEQLASSPAGGPPGPKARAAPPPESSSSPPPPPKASSSSPPPPTPPPPPSKQSSPPPPAHNSTTSPNTPATPPEKSPAASPPPPASPPPPSRSSPPPSPSSPPPSPPPQSSPPPPAASTSQQSPPAPEPTKPPTPPSSEKPGAAAGTTASSPPPNAGQPPPRETPSTPPDTAGHQPPPPAPTQMLPPPMALTVIMPGGVSGGPPAGGMWRSPPGPPAGGGGSGSNSNMKNEAVVIGISVAGLVLALASLLIIACATGKQGNRGRKRERHASRRHSIVVPERQCGAAAGVVSADVYQPSNGPAPSPSPSGTSSSYDLSGANKSWFTYDELAGITGGFSAANVIGEGGFGKVYMGALGDGRRVAVKQLKLGSGQGEKEFRAEVDIISRIHHRHLVTLVGYCVTENHRLLRRVG

SEQ ID NO: 222574 - protein, 502 aa, Zea Mays
MDEVPATAAVLDFRPGSSVPRVSAVPRRAVQCPPDTGGAEAATGGRPGIGNTAAVSAKLTGSSSAGPDIQSVDCDTSGGLAGGDAGDVGVLCLENAAETESVEPGVSDVRLGAPVEERHGRTLDSTGLGSGKAGETNEISLVEVSQSGATSSLDATASIGGGYSLVEGSLPEASGARRCKPEVHEVPTGTPATVGFPIEDGGYGFGIGPNDDVDGRNDPAGGEWEPPTDGNDAEDVTDMGGILCDERVERMETNSVEREASNGSTVSSEEGVDRMGTSLDDSEASDGSTTQDSDTDVETESSVSSIEEQEAGYGAHIPQPDPAVCKVAKENNTAGVKISDRMTSVSELTLVLASGASMLPHPSKVRTGGEDAYFIACDGWFGVADGVGQWSFEGINAGLYARELMDGCKKIVEETQGAPGMRTEEVLAKAADEARSPGSSTVLVAHFDGKVLHASNIGDSGFLVIRNGEVHKKSNPMTYGFNFPLQIEKGDDPLKLVQATSL

SEQ ID NO: 222575 - protein, 270 aa, Zea Mays
MTSASELFTARRAARGARLSDLDLDPHADALRDQHGLGARHRRRGCRPRRQLDAAGDVRQHLHTGAPPPRRRGSYTILSYIDNNNLGVGDSAARRNRLDRLMFRTNERLPGAVLQAQARVLERLRGISLGSSVSRPSISLDEFSASDVFRIIDFRNREARHEENRHHSSSFHPSSESDEERPTVGSTHSNRSTGLTKAAFLRLQVEIFEASKDDSREASPECSICLDGFYDGDELIRLRCGHRFHSTCLEPWARKCADCPYCRTNIRSRS

SEQ ID NO: 222576 - protein, 251 aa, Zea Mays
MTSASELFTARRAARGARLSDLDLDPHADALRDQHGLGARHRRRGCRPRRQLDAAGDVRQHLHTGAPPPRRRGSYTDQILSYIDNNNLGVGDSAARRNRLDRLMFRTNERLPGAVLQAQARVLERLRGISLGSSVSRPSISLDEFSASDVFRIIDFRNREARHEENRHHSSSFHPSSESDEERPTVGSTHSNRSTGLTKAAFLRLQVEIFEASKDDSREVPLDMLGAMGAEMCRLPILSNEHTVTILTTNP

SEQ ID NO: 222577 - protein, 317 aa, Zea Mays
MHCASPARTKDDPPPRSRRMESVGDPREGPSTERAFEVKPIPPWPEQVTGRALAASLALGAALSGVMMNLVFTSGVIPSLNISAALLGFFLLKAWTGLLGQMGVPHRPFTRQENAVVQTCVVACASMTYSGGFGSYLLGMDRETAEKTSTANSPGANISEPTLGRTMAFFFLVSFAGLLVIVPMRKTMIIRHRLTFPSGSATAHLINSFHSPHGFMQAKRQVSLIVRSCLGSLLWSVFQWFYTGGPNCGFTAFPTFGLTAYKHGFYINMNGTYVGVGMISPYLINISMLVGSIISWGIMWPYLLTKKGICVTGNQEN

SEQ ID NO: 222578 - protein, 82 aa, Zea Mays
MGIETPIPISVKLRDLNNIFCRIVHAAQQPHLSIPETETGKARRQYRQLLNRSLMVVSVGAAVAVVGLAAYRVYAARKNSSS

SEQ ID NO: 222579 - protein, 264 aa, Zea Mays
MTLLDPTNSYANLAYVGYPGEFSSAFTVTRRRRVDRKKQHTQRNIFQCYVFGARGSGKTSLLQSFIGRQPSDTLPSNSERFATNSVEMADGTRKTLILREIPEGDVRSLLSDRESLAPCDVAVFVYDSCDEYSWQRARDLLVQVATHGENTGYEVPCLIVAAKDDLDQSSQALQESTRVSQDMGIETPIPISVKLRDLNNIFCRIVHAAQQPHLSIPETETGKARRQYRQLLNRSLMVVSVGAAVAVVGLAAYRVYAARKNSSS

SEQ ID NO: 222580 - protein, 269 aa, Zea Mays
MQWALMTLLDPTNSYANLAYVGYPGEFSSAFTVTRRRRVDRKKQHTQRNIFQCYVFGARGSGKTSLLQSFIGRQPSDTLPSNSERFATNSVEMADGTRKTLILREIPEGDVRSLLSDRESLAPCDVAVFVYDSCDEYSWQRARDLLVQVATHGENTGYEVPCLIVAAKDDLDQSSQALQESTRVSQDMGIETPIPISVKLRDLNNIFCRIVHAAQQPHLSIPETETGKARRQYRQLLNRSLMVVSVGAAVAVVGLAAYRVYAARKNSSS

SEQ ID NO: 222581 - protein, 227 aa, Zea Mays
MPTLHMLVILCYVFGARGSGKTSLLQSFIGRQPSDTLPSNSERFATNSVEMADGTRKTLILREIPEGDVRSLLSDRESLAPCDVAVFVYDSCDEYSWQRARDLLVQVATHGENTGYEVPCLIVAAKDDLDQSSQALQESTRVSQDMGIETPIPISVKLRDLNNIFCRIVHAAQQPHLSIPETETGKARRQYRQLLNRSLMVVSVGAAVAVVGLAAYRVYAARKNSSS

SEQ ID NO: 222582 - protein, 387 aa, Zea Mays
MAGATSLAAAANLAGKSSVRVVVIGDPGTGKSSLIVALATEQFPENVPRVMPPTRLPADYFPDRVPITIIDTSSSPEQKPKLIAECQAADAVVLTYACDRPATLERLSSFWLPELRRLQLKAPVIVVGCKLDLRDEQQVSLEQVMAPIMQSFREIETCIECSALRQIQVPEVFYYAQKAVLHPTAPLFDQELQALKPRCVRALKRIFIICDNDKDGALSDVELNEFQVRCFNAPLQPTEISGVKRVVQEKMPEGVNESGLTLTGFLFLHALFIEKGRLETTWTVLRKFGYDNDIKLRDDLIAMPIKRAPDQTLEMTSEVVDFLRGIFNMFDIDNDGALLPTELEDLFSTAPENPWISDPYKDCAEKNVLGGLSLEGFLSKEILMVAP

SEQ ID NO: 222583 - protein, 566 aa, Zea Mays
MSFPSLLIYLSHLSYPVIQTAPQGTAIQKQGPWPQRTWMAGLEELKKKLQPLLFDDLDRVGASTRVPLPEDTCDSYAVSDGGTVNLLSRSLGEYKINEHGFHKRSAGPDELDSDEKAYRCASHEMHIFGPIGNGASSVVERAIFIPVHRILALKKINIFEKEKRQQILNEMRTLCEACCYPGLVEFQGAFYMPDSGQISIALEYMDGGSLADVIRVKKSIPEPVLSHMLQKVLLGLRYLHEVRHLVHRDIKPANLLVNLKGEAKITDFGVSAGLDNTMAMCATFVGTVTYMSPERIRNENYSYAADIWSLGLTILECATGKFPYDVNEGPANLMLQILDDPSPTPPVDTCSLEFCSFINDCLQKDADARPTCEQVKIIRLLSHPFIKRYAGTEVDLAAYVKSVVDPTERLKQIAEMLAIHYYLLFNGPDGIWHHMKTFYMEQSTFSFSENVYVGQNEIFDILSNIRKKLKGDRPREKIVHVVEKLHCRANGETGVAIRVSGSFIVGNQFLVCGEGIKAEGMPSLDELSIDIPSKRVGQFREQFIMQPGNLMSCYYISKQDLYIIQS

SEQ ID NO: 222584 - protein, 81 aa, Zea Mays
MGQLVSGIAEVGSALGLYSQERARHLKAHGSAVLLLIQVKVGWLVARLAVYQFGVFSQMSASLIWTVMLLFKIYCLTRIIF

SEQ ID NO: 222585 - protein, 438 aa, Zea Mays
MLDTVGPELQVVNKSETPISLEENGTVVLTPHQGQEASSTLLPINFDGLAKALTPGATIFVGQYLFTGSETTSVWLEVSEVKGDDVVCIIKNTATLAGSLFTLHCSQIHIDLPTLSDEDKDVIKKWGAPNKIDFLSLSYTRHAEDVRQAREFLSKLGDLSQTQIFAKIENVEGLNHFDEILAEADGIILSRGNLGIDLPPEKVFLFQKSALHKCNMAGKPAVVTRVVDSMTDNLRPTRAEATDVANAVLDGSDAILLGAETLRGLYPVETISTVGRICAEAEKVFNQDLYYKRTVKYVGEPMTHLESIASSAVRAALKVKASVIICFTSSGRAARLIAKYRPSMPVLSVVIPRLKTNQLRWSFTGVFEARQSLIVRGLFPMLADPRHPAESTSATNESVLKVALDHGKASGVIKSHDRVVVCQKVGDSSVVKIIELDD

SEQ ID NO: 222586 - protein, 158 aa, Zea Mays
MNFGRGDDADKLLEDLLKQHGEVVYSSGGPPDPTVEADDDAECLSFAVSLAKAASEIKATDIRVLCVRRLVYWTRFFIILTAFSNAQIDAISSKMRDIGEKQFSKVASGDTKPNSWTLLDFGDVVVHIFLPQQRAFYNLEEFYGNATPIELPFDTQRQ

SEQ ID NO: 222587 - protein, 253 aa, Zea Mays
MKPRTYSNFVSLYMKKVASAFDAKFSNQASSKDESFRCTLTLHVLLENPPSDYPDIMREEVLNGFSAIFLHIREEGKLTRKLMECINTFLLKDGPNLGYKSVKIHNAVQEFIFRCWMTTHDQALKSLFITYVKVQLKIARNIPEILEKLIDVIIKELDKNVNTGPGLLWCEAPRDEKAVSLRCFQEEWMDLSATVFYLACKCTTKTANREKRMKKEHIMNLIVDGLFRGSLFWFEILFRGMTDKYIAPRVTCY

SEQ ID NO: 222588 - protein, 299 aa, Zea Mays
MAAVATARDVEEVVQKLQSDRARVRDEGVKLLGTWLQGDRAASFCRLLGRNTVRFKPGHGNLTGGHSLHLLSVAKQLFVHIWEVIKDGPSLQLEYSIILRQLLNVKEYRYQMKPRTYSNFVSLYMKKVASAFDAKFSNQASSKDESFRCTLTLHVLLENPPSDYPDIMREESLFITYVKVQLKIARNIPEILEKLIDVIIKELDKNVNTGPGLLWCEAPRDEKAVSLRCFQEEWMDLSATVFYLACKCTTKTANREKRMKKEHIMNLIVDGLFRGSLFWFEILFRGMTDKYIAPRVTCY

SEQ ID NO: 222589 - protein, 171 aa, Zea Mays
MEESEQKTEARLISLEMDYGQIEGWKPEVEKRLKNLMLELKRANKIMERGILENDGPQHGLLRPEGSTAARTSVGIHTVDGPNGYRGDHDHRDRGFGHVTFQTHGPVKGFNRGGVFSKVQLFLHFHMHHDMVTMASIFQGRGMRILIVREAKGMLEMWRGVTLIRCQHLRL

SEQ ID NO: 222590 - protein, 171 aa, Zea Mays; identical to SEQ ID NO: 222589

SEQ ID NO: 222591 - protein, 464 aa, Zea Mays
MEQYEGTQASLVGSHAVLGKGNQNTVDTAASGKNNFGGELCCSSSDPIHVPSPGSKSAGTFGAIKREVGVVGARQRPADSAAIYTSTSNGLVKVVSAPKVSPHLEWKPKSVSPSTAAPPGAPSPVDDGSKTEVSALSKKLSHANVSHEHVIIPEHIRIPDSERTHFIFGSFESEIYPKASLAAYYDAVAKEDLNDHSPSSVAALGFTSTDGTLNDRMDNVGSCSPLPQSEPAVSVSEHEQSLTECVDVRSPGVVGGTNETISSKVTHSQPRLQHQEAAQNFKAYEPDSGYGMSFITKVDGEAAQGIAYSSEAMVLHSVNGYQLPASTATQQPVPQMFSQQFQAPQYPNFLPYRHVFSPQFGSLMVVPNYSSNHAFPQLPHASSYLVMPNGASQLAANGMKYGSNHQYKQVFQGAPAGYGYGNHNGYPNGVIGGTGAIEDMNMSKYKDNCLYAPNPQPFIFRDCQ

SEQ ID NO: 222592 - protein, 663 aa, Zea Mays
MASDPPGDGTSGEETAPGPAPAVEAPPAPAVPARSRWAAEIKVYTRKHPRKNPKPPPESAADPVSVPSPAPNPLSETLSSIRRSIHRTEAVDAAALSDPAAPASVPTRAPSGERGAASGDPSSGLNRVGGGIPNGHGDDRAAAAAVKAEKARKRRLRSELRRCLAGELDQVRVLSRRLKEAAEALAQQEASEPVPLPLMVLPTQQQVVDAGYVQHQFLAGDMAVPMPTQIAAAVTPARSLLHRRPLTVSVVHNEAFEKEKRTPKANQLYQNSEFLLAKDRIPPSDSHVRKKPKHHKKKHRSLESRGADFDAERRLYSHAFKKSSSLLSRLMKHKFGWVFNKPVDPVTLGLHDYFTIIKHPMDLGTIRGRLSRGQYRNPKEFAEDVRLTFHNAMTYNPKGQDVHFMAEQLLGIFEAQWPEIEAEVNYLASCPPLPKKFPPPPIDLRFLERSDSMRHHVALDTNSRPISHTPTYTRTPSMKKPRAKDPNKRDMTIDEKRKLSENLQNLPPVKLDAVVQVIKNKNLSVKQHDDEIEVEIDSMDAETLWELDRFVSNYKKNLSKQKRKAERAMLARQDAELRAQHPIQQPQPTPVPQEPFGEKSPKQVVKDSLEGEQLPASAPEQNGENRQNASSSSNSSSSSSGSGSSSSDSDSSSSDGSDAGNSS

SEQ ID NO: 222593 - protein, 800 aa, Zea Mays
MSSPENGAAPEASGKKKKKAEEEEAITFINHLPDRYETQVGERGIQLSGGQKQRIAISRAILKNPSILLLDEATSALDAESEKSVQEALDRVMVGRTTVVIAHRLSTIRNADTIAVVDGGRIVETGTHEQLMANPYSAYSSLIQLQEAAQLQHKPSLSDSASITRPLSFKYSRELSGRTSMGASFRSDKDSISRYGGAGEAHDEVRKGKPVSMKKLYSMVRPDWFFGLSGTISAFVAGSQMPLFALGVTQALVSYYMGWETTKLEVRKIAVLFCCGAVLTVVFHVIEHLSFGIMGERLTLRVREKMFSAILRNEIGWFDDTSNTSAMLSSRLEADATLVRTIVVDRSTILLQNVGMIVTSLIIAFILNWRITLVVLATYPLMVSGHISEKMFMKGYGGNLGKSYLKANMLAAEAVSNIRTVAAFCSEEKVIKLYADELREPSKRSFRRGQGAGLFYGVSQFFLFSSYALALWYGSVLMSKELASFKSVMKSFMVLIVTALAMGETLAMAPDIIKGNQMASSVFEILDRKTDVRIDTGEDIKRVEGLIELRGIEFRYPSRPDVTVFKGLDLLMKAGKSMALVGMSGSGKSTVLSLILRFYDPIAGRVLIDGKDVKKLKLKCLRKHIGLVQQEPALFATTIYDNILYGKDGATEAEVVEAAKLANAHSFISSLPEGYKTKVGERGVQLSGGQKQRIAIARAIVKDPAILLLDEATSALDVESERVVQQALNRVMRNRTTVMVAHRLSTVKNADVISVLQDGKIIEQGAHQHLIEDKNGAYHKLVSLQQQQQMQTQQSSSEDI

SEQ ID NO: 222594 - protein, 277 aa, Zea Mays
MGKQSHCFHKWYFAMTTPISRRQSATHFMVRYEEHDFLEKSGVYAVEFSDVFHIYNDLALDISLHRSWMLAFGAYVDKKGRHNNNFGRTVIWKHFQGRVGFATCPLLLDEIANVREWLLDFFMNEVGTSFERADEVIFEEEEDDGQTTRTRPEDPSPITSGMESGRESSSLYRRTGGKCLSVECTDKVGEIAKSHGLKLHIDGARIFNASVALGVPVDRLVKAADSVSVCLSKGLGAPVGSVIVGSKAFIDKNSPEDPRRWNETGGSSLCCCSCCRS

SEQ ID NO: 222595 - protein, 56 aa, Zea Mays
MVGVRNGRPCGSHVMEKKPNHEFWKAQEPLLKEIRRIRSRSTIVMRNYRKEEEYCR

SEQ ID NO: 222596 - protein, 558 aa, Zea Mays
MASHIILPPDDADENHNHQAAAAAEEEEEERDELGRDDDDDEHGVPPALPPKAALPFSATCVRISRDSYPNLRALRNASSVSLADAAYVKISEADFGYVLDDVPHFTDYLPDIPTYPNPLQDHPAYSTVKQYFVNEDDTVPQKVVVQKNSRRGVHFRRAGPRQRVYFGTDEVKACIVTCGGLCPGLNTVIRELNGYKGFYSSNYLPLTPKSVNDIHKRGGTVLGTSRGGHDTKKIVDNIQDRGINQVYIIGGDGTQKGAYEIFKEIRKRGLKVSVAGVPKTIDNDIAIIDKSFGFDTAVEEAQRAIDSAHVEACSAENGIGLVKLMGRYSGFIAMYATLASRDVDCCLIPESPFYLDGEGGLLQYVEKRLKENKHMVIVVAEGAGQDLIAKSLATSDQQDASGNKLLLDIGLWLTHKIKDYFKSKKMEMTIKYIDPTYMVRAIPSNASDNVYCTLLAHSAIHGAMAGYSFTVGMVNGRHTYIPFYRVTSTRNKVKVTDRMWARLLSSTNQPSFLSQKDIDEASEADRLANRPPLPTGASSRVVRSFDQSSSCSSNGEI

SEQ ID NO: 222597 - protein, 583 aa, Zea Mays
MASHIILPPDDADENHNHQAAAAAEEEEEERDELGRDDDDDEHGVPPALPPKAALPFSATCVRISRDSYPNLRALRNASSVSLADAAYVKISEADFGYVLDDVPHFTDYLPDIPTYPNPLQDHPAYSTVKQYFVNEDDTVPQKVVVQKNSRRGVHFRRAGPRQRVYFGTDEVKACIVTCGGLCPGLNTVIRELVCGLSHMYNVSSIFGIQNGYKGFYSSNYLPLTPKSVNDIHKRGGTVLGTSRGGHDTKKIVDNIQDRGINQVYIIGGDGTQKGAYEIFKEIRKRGLKVSVAGVPKTIDNDIAIIDKSFGFDTAVEEAQRAIDSAHVEACSAENGIGLVKLMGRYSGFIAMYATLASRDVDCCLIPESPFYLDGEGGLLQYVEKRLKENKHMVIVVAEGAGQDLIAKSLATSDQQDASGNKLLLDIGLWLTHKIKDYFKSKKMEMTIKYIDPTYMVRAIPSNASDNVYCTLLAHSAIHGAMAGYSFTVGMVNGRHTYIPFYRVTSTRNKVKVTDRMWARLLSSTNQPSFLSQKDIDEASEADRLANRPPLPTGASSRVLLCNRLVFYLSSPICTTVHFPLAP

SEQ ID NO: 222598 - protein, 376 aa, Zea Mays
MYNVSSIFGIQNGYKGFYSSNYLPLTPKSVNDIHKRGGTVLGTSRGGHDTKKIVDNIQDRGINQVYIIGGDGTQKGAYEIFKEIRKRGLKVSVAGVPKTIDNDIAIIDKSFGFDTAVEEAQRAIDSAHVEACSAENGIGLVKLMGRYSGFIAMYATLASRDVDCCLIPESPFYLDGEGGLLQYVEKRLKENKHMVIVVAEGAGQDLIAKSLATSDQQDASGNKLLLDIGLWLTHKIKDYFKSKKMEMTIKYIDPTYMVRAIPSNASDNVYCTLLAHSAIHGAMAGYSFTVGMVNGRHTYIPFYRVTSTRNKVKVTDRMWARLLSSTNQPSFLSQKDIDEASEADRLANRPPLPTGASSRVVRSFDQSSSCSSNGEI

SEQ ID NO: 222599 - protein, 189 aa, Zea Mays
MGHECSREEKKRHNEKVEVKKQSSCVVHLINKSNDYVAFKVKTTSPKRYCVRPNTGVILPRKTCEFTVTMQALRTAPPDMQLKDKFLVQTTIVPYGTSDEELVPAFVTEDVQNLKSKLNNLESKLEEAGKMIIRLKEESRSTTQERDKLQQEMVFLRKKGTPRSQVGFPLLFVVYVALLGTLLGYLLRL

SEQ ID NO: 222600 - protein, 704 aa, Zea Mays
MRLVVRVIEARGLPPTDADGTRDPYAKAQLGKQRAKTKVMRKTLCPAWDEEFAFRVGDLRDNLLVSVFHEDRYFAADVLGQVKLPLTAVLDADNRTLGTQWYQLQPKSKKSKLKDCGEIRLNVSLAQNYSEEETTAPAHWASDDLASNSDKSTELVKGSSLLNVPIEVSTAVPEIYEIEAAEEDKSNAAPSFVNKLYQMFNSKPKDTEASAPLPSKLNDPSDIAEETLSTSSEAPEKQDHDVSATMTFDELLKAFGSQHEGKEMPENLSGGVVLDQVYAVAPSDLNTLLFSPSSDFLQSLAEIQGTTGLEIQQWRLENDGEILRRVVSYTKAPTKLVKAVKATEDMTYLKADGEMFAVFADVSTPEVPFGNTFRVEVLTCIMPGPELRGDEKSSRLMVSWHINFVQSTMMKSMIENGAKQGLKDNYVQFSELLAKHCRPVDTKDTTSSNEVLSSVQPEQESDWKLAFRIFGNFALLSSVFAFFYVSAHIILASPSIIQGLEFPGLDLPDSAGEVVVCGVLVLQGQRVLNMIARFIQAKRQRGDHGVKAQGDGWLLTVALMEGTNLAATKSSGYSDPYVVFTCNGKTKTSSINFHTLDPQWNEIFEFDAMEDPPSVMKIHVYDFDGPFDEVASLGHAEVNFLKYNNISELADIWIPLKGKLAQACQSKLHLRIFLNNTRGTEVVKDYLDKVEKEVGKKNSFYRLL

SEQ ID NO: 222601 - protein, 185 aa, Zea Mays
MSIAKRAIPEATSIEEANQIVRGNWLNVIEEHHLKYSGNCQGLDLSPYFLAVAAQKEEKLSRPKPIRWVHANGEATGLSSDSFDLVSLAYVCHECPARAITGLVKEAFRVLRPGGTIALTDNSPKSKVLQELSPVLFTLMKSTEPFLDEYYMLDLEETMRKVGFVNVCSVLTDPRHRTVTATVPY

SEQ ID NO: 222602 - protein, 787 aa, Zea Mays
MAPSSPSSARPTRASGRKRSAMAEEIHQNQEEEEEVVAASTAKRRRKAASSGKKPKPTPKQAKPAVAGMKKKGETEKTEPVVDDVCAEEPDEEELAMGEEEAEAEEQAMQEVVAAVAAGSPGKKRVGRRSAAASGDHVPEFIGSPVAAAEAHSNWPKRYERSTAANKPEEDDELKARCHYRSAKVDNIVYCLGDDVYVKAGENEADYIGRITEFFEGTDRCHYFTCRWFFRAEDTVINSLVSINVDGHKHDPRRVFLSEEKNDNVLDCIISKVKIVHVDPNMDPKAKAQLIEHCDLYYDMSYSVAYSTFANISSENGQSGSETASGISSDDAGLETSSNMPERTATLLDLYSGCGGMSTGLCLGAALSGLKLETRWAVDLNSFACQSLKYNHPQTEVRNEKADEFLALLKEWAVLCEKYVHQDVDSNLAGSEDQEDADTLDKDEFVVQKLIGIRYDGTGRKKGVYFKVQWEGYGPEEDTWEPIDNLSDCPLKIREFVQEGRKRKILPLPGDVDVICGGPPCQGISGFNRFRNRDEPLKDEKNKQMVTFMDIVAYLKPKYVLMENVVDILKFADGYLGKYALSCLVAMKYQARLGMMVAGCYGLPQFRMRVFLWGALSSMVLPKYPLPTYDVVVRGGAPNAFSQCMVAYDETQRPSLKKALLLGDAFSDLPKVENHQPNDVMEYGGSPKTEFQRYIRLGRKDMLDWSFGEEAGPDEGKLLDHQPLRLNNDDYERVKQIPVKKGANFRDLKGVKVGANNVVEWDPEVERVYLSSGKPLMRWCKYCEIHG

SEQ ID NO: 222603 - protein, 867 aa, Zea Mays
MAPSSPSSARPTRASGRKRSAMAEEIHQNQEEEEEVVAASTAKRRRKAASSGKKPKPTPKQAKPAVAGMKKKGETEKTEPVVDDVCAEEPDEEELAMGEEEAEAEEQAMQEVVAAVAAGSPGKKRVGRRSAAASGDHVPEFIGSPVAAAEAHSNWPKRYERSTAANKPEEDDELKARCHYRSAKVDNIVYCLGDDVYVKAGENEADYIGRITEFFEGTDRCHYFTCRWFFRAEDTVINSLVSINVDGHKHDPRRVFLSEEKNDNVLDCIISKVKIVHVDPNMDPKAKAQLIEHCDLYYDMSYSVAYSTFANISSENGQSGSETASGISSDDAGLETSSNMPERTATLLDLYSGCGGMSTGLCLGAALSGLKLETRWAVDLNSFACQSLKYNHPQTEVRNEKADEFLALLKEWAVLCEKYVHQDVDSNLAGSEDQEDADTLDKDEFVVQKLIGIRYDGTGRKKGVYFKVQWEGYGPEEDTWEPIDNLSDCPLKIREFVQEGRKRKILPLPGDVDVICGGPPCQGISGFNRFRNRDEPLKDEKNKQMVTFMDIVAYLKPKYVLMENVVDILKFADGYLGKYALSCLVAMKYQARLGMMVAGCYGLPQFRMRVFLWGALSSMVLPKYPLPTYDVVVRGGAPNAFSQCMVAYDETQRPSLKKALLLGDAFSDLPKVENHQPNDVMEYGGSPKTEFQRYIRLGRKDMLDWSFGEEAGPDEGKLLDHQPLRLNNDDYERVKQIPVKKGANFRDLKGVKVGANNVVEWDPEVERVYLSSGKPLVPDYAMSFIKGKSLKPFGRLWWDETVPTVVTRAEPHNQVILHPTQARVLTIRENARLQGFPDYYRLFGPIKENGSPCCTGTGLLSGSSLPG

SEQ ID NO: 222604 - protein, 211 aa, Zea Mays
MALAAIYNLFIINKSGGLIYYKDYGSAGRMDTNDSLRLASLWHSMHAISQQLSPTTGCTGIDLLQAHNFDLHCFQSLTGTKFFVVCETGAPNMEMLLKAIYELYTDFVLKNPFYEMEMPIRCELFDHNLAQMQIFVKTLAGKSITLEVESSDTVENVKAKIQDKEGIPPDQQRLIFAGKQLDDGRILADYNIQKESTLHLVLRLRGGGGGQ

SEQ ID NO: 222605 - protein, 319 aa, Zea Mays
MEPPPLSSLQEEGEEGPTVEDSSVFSAAVVPPRPATHHSLHKYAPLDWSAYFDEERRVAIPDTDNVFNAYTTGSEGPVVFCLHGGGYSGLSFALAASQMKDKARVVAMDLRGHGKSTTNDDLDLSIETLTNDVIAVIRTMYGDLPPAIILVGHSMGGSVAIHVAARKEIRNLHGLVVVDVVEGTAMASLVHMQKILANRAQHFPSIEKAIEWSVKGGPLRNIESARVSIPSTLKYDESRECYTYRTPLEQTEKYWKGWYEGLSDKFLSCPVQKILLLAGTDRLDRALTIGQMQGKFQMVVIRHTGHAIQMYLKNLHRTY

SEQ ID NO: 222606 - protein, 157 aa, Zea Mays
MHRQKANDHVLLSSLESSIDKSPYVNLMEDGMVAAVTKDGPSNDGSPLNHAADEQLSNEAGGGQQNVVSALNHNENSIGVGNDSPAEPVKQQGDDIHSNKLHEIIAPVKRSMSQLTRYQGRSVWLLAYIAFVTSWPLLGSLAFITFRKKSRNPLRAK

SEQ ID NO: 222607 - protein, 238 aa, Zea Mays
MKGCSERLLLLLLLASSLLLSVVVAAQQTCPADLDSKCDGGAPDDWEGEFFPGVPKIKYEGPTSKNPLAYKWYNKEEVILGKKMKDWMRFSVAFWHTFRGTGADPFGAPTKVWPWEDGTNSLAMAKRRMRAHFEFMEKLGVDKWCFHDRDIAPDGKTLEETNANLDEIVELAKQLQGETNIKPLWGTAQLFMHPRYMHGAATSPEVKVYAYAAAQVKKALEVVKTMCFGVEERVTKLF

SEQ ID NO: 222608 - protein, 155 aa, Zea Mays
MSHVTPVMAIATMILSLLLDPWSEFQKNSYFDSPWHVMRSCLLMLIGGSLAFFMVLTEYILISATSAITVTIAGVVKEAVTILVAVFYFHDEFTWLKGFGLFTIMVGVSLFNWYKYERFKRGQINEDDVSSPFTGDVKYIIIDDLEYQNEFEEDT

SEQ ID NO: 222609 - protein, 545 aa, Zea Mays
MMQMLGLRGSASKDRGRGGDASPSSAVAGATGTPRSPWTPASASSPRSPFAAEAGGEGGGGRPLRLVYCDERGRFRMDPEAVAALQLVKGPVGVVSVCGRARQGKSFILNQLLGRSSGFQVASTHRPCTKGLWMWSAPIKRTAFDGTEYSLLLLDSEGIDAYDQTGTYSIQIFSLAVLLSSMFIYNQMGGIDEAALDRLSLVTEMTKHIRVRANGGRSTASELAQFSPIFIWLLRDFYLDLVENGRKITPRDYLEIALRPLEGRGKDISSKNEIRESIRALFPDRECFTLVRPLNNENELQRLDQIPLEKLRPEFQAGLDELTRFIFERTRPKQVAGTIMTGPVLAGITQSFLDAINNGAVPTISSSWQSVEEAECRRAYDSAAEVYMSSFSHIKLAEEDALRDEYEAALRKALDAYNTTAVGTGTSRAHYEKVLNNFCRKAFQDYKKNAFLEADKQCSNAKHNMEKKIRAACTAPGVKVSAVIQVLETALAEYETSCTGPAKWRMLAAFLRQWLVLQAIKISCSFLLIFLFGRTYIGPLLEVNK

SEQ ID NO: 222610 - protein, 1016 aa, Zea Mays
MMQMLGLRGSASKDRGRGGDASPSSAVAGATGTPRSPWTPASASSPRSPFAAEAGGEGGGGRPLRLVYCDERGRFRMDPEAVAALQLVKGPVGVVSVCGRARQGKSFILNQLLGRSSGFQVASTHRPCTKGLWMWSAPIKRTAFDGTEYSLLLLDSEGIDAYDQTGTYSIQIFSLAVLLSSMFIYNQMGGIDEAALDRLSLVTEMTKHIRVRANGGRSTASELAQFSPIFIWLLRDFYLDLVENGRKITPRDYLEIALRPLEGRGKDISSKNEIRESIRALFPDRECFTLVRPLNNENELQRLDQIPLEKLRPEFQAGLDELTRFIFERTRPKQVAGTIMTGPVLAGITQSFLDAINNGAVPTISSSWQDYKKNAFLEADKQCSNAKHNMEKKIRAACTAPGVKVSAVIQVLETALAEYETSCTGPAKWRMLAAFLRQCLEGPILDLCLKLINEVESEKTSFTLRCRSNEDQLELLKKQLEANESHKSEYLKRYKAAINEKQKASVDLSSNLANLRTKCSTLEERCVSISKELDHVRHECTDWRVKYEQSVSQHKAEQDRFVAQLASLESRHSSAEGKLGAAREHAASAQDEAAEWKKKYEMAAVQAKTALERLASVQEQINKIAQERESSIRAEFASHLEGKEEEIRKLVAKIREAESEESVLTERLLVVESKTQGHNKETTGLRDEIKELTSKLEYLRDRAVSYEKQARMLEQEKNHLQEKFLSECKKYDEAEQRYKSAERDAKKAVELADAARTEAIAYQKEKDKAQQLSIEKVAVIERVQRQVDRLEQEKVNLLGEVQRMHNSESDAWSKVTLLESRVAEREKEMDDLLSRSNEQRSSTVRVLESLLATERAARAEANKRAEALSLQLQSAQGKLDILHQELTSIRLVETALDSKLRTTTYGKRLRDNEVRLYSIQDMDIDPPERSRKRTKSNTSPLKPVQTEDGGSVHMREDSVTVSTDVKDDNPDGYKKFTIAKLKEELTKHGFGTQLLELKNPNKKDILALYKKHVLCE

SEQ ID NO: 222611 - protein, 250 aa, Zea Mays
MVSPTPGGKDAREGGGKAEWMIYAFVARGTAVLAEYTEFTGNFPAIAAQCLQRLPAGSSSAGTGPDGRGDAPARFSYACDRHTFNFLLYRGYAYCVVAEESVPKNVSVAFLERLKDDFMKRYGGGKADTALAKCLNKEYGQVIKQHIQYVLDHSEELDKMLKVQAQVSEVKNIMLDSIEKTLGRGEKLSELQDKTSELHIQFKKQGVKIRRKTWLQNMKIKLVILGILLLLVIIVWVSICQGFDCTKHET

SEQ ID NO: 222612 - protein, 89 aa, Zea Mays
MAIKRKIEQAATSDFQARSLPAKLRIEPSDPEDVKAAKRKKIHAFKSKSRFEQLEFAQNKRQNAWQQFQTKGKAKKVASWPPRNFFLLS

SEQ ID NO: 222613 - protein, 256 aa, Zea Mays
MEKELQEVITLTEEILATAKQTESAQNVAGLSPPSYSAGVQSEGLDDLSHSHKFAVGTRVQAVWSEDGEWYNATVEALTPNGYYVAYDGWGNSEEVDPDNVRLLEEEAADALGQAEKEAEATKMAIKRKIEQAATSDFQARSLPAKLRIEPSDPEDVKAAKRKKIHAFKSKSRFEQLEFAQNKRQNAWQQFQTKGKAKKVGFFSGRKKESIFKSPDDHRGKVGVTGSGKGLTDFQRREKHLHLKGGSGDAADDDEE

SEQ ID NO: 222614 - protein, 89 aa, Zea Mays; identical to SEQ ID NO: 222612

SEQ ID NO: 222615 - protein, 184 aa, Zea Mays
MSQIPHATRCCACLPPIPAPGIIDRQLHALASFLRHHAALSLLPSAFFFPSLRHRLHHIARRAQPWLLVPLLHRASEGIWIRIRGGALKCLASAGRSSKALSLSLPYMGARPDGAPGAVECCGRRRVPEQREEDPQGARPDSQQACREDDDRAAPERLASRRPAGGGGGGGNRSYHCRCSSSCT

SEQ ID NO: 222616 - protein, 700 aa, Zea Mays
MGFQFNHVGGGTKTRRPVALHLRFNPRCDEPQCRLLSATGDAEEHDEAGVAARPMPLADIQAYIEAENLRLENDPCQFSEKEIIIKVEYKHSPNLTIIDTPGLILPAPGRKNRVLQSQASAVESLVRAKIQHKETIILCLEDCSDWSNATTRRVVMQVDPDLARTVLVSTKLDTKIPQFARPSDVEVFLHPPNCVLDVSLLGDSPFFTSVPSGRVGSCHEAVFRSNGEFKKAILSRELEDIASIEDKLGRSLTTMEKDRIGVGNLRLYLEELLQKRYIKSVPLIIPLLEKQHRNTTSKLREISHELSDLDETKLKEKAQLFHDTFLTKLSLLLKGMVVAPPDKFGETLVNERINGGTFTGSENFQLPNKMMPNGGMRLYGGAQYHRAMAEFRLVVGSTRCPPITRDEIVNACGVEDIHDGTNYSRTACVIAVAKARDTFEPFLDQLGFRLLYILKRLIPISVYLLEKDGEHFSSHEVLIRRVQEAFKRFVESTEQSCRQRCMEDLESTTRYVTWSLHNKNRAGLRHFLDSFVAPEQLSVNTLNERFSGLNDNKQDKAKGDSKSNHSPDTNSSTAMPETRLVDLLDSTLWNRRLVPSSERLVYALVHQIFHGIKEHFLVTTELKFNCFLLMPIVDKLPALLRQDLESAFEEELDSIFDVTQLRQSLGQKKRELEIELKRIKRLKEKFGEINKKLNSLQVRQ

SEQ ID NO: 222617 - protein, 282 aa, Zea Mays
MSRLLPPVLSPLPAFSLPPPLLPRIHIRTSAVRGGAAENAMASGTTARERRLVKVREERRRREYDREHTYPGWAKVLENACRDDEELRAILGDSIGNPELMKQRIQERVRKKGRAQFNKSKTGSIVAFKVSFRDFNPLNSFIWFELFGEPTDRDVDLLGGVVQAWYVMGRLGAYNSSNLQFQCQLANSMMDYDPSYDSEEASTVMPSSFHDISDVEFQDNWARVWVDLGTSDYLGLDVLLNCLTQLSSEHLGIKQVVFGGKKMGDWEEGMTSSDYGYKHFKI

SEQ ID NO: 222618 - protein, 739 aa, Zea Mays
MNMELKAEPDTDEVYAQLTLLPDKKQDENTSARVENEEAEEEVVPHVPPATSEGLRIHSFCKTLTASDTSTHGGFSVLRRHADECLPPLDMSQHPPNQELVAKDLHGVEWRFRHIFRGQPRRHLLQSGWSVFVSAKRLVAGDAFIFLRGENGELRVGVRRALRHQTTIPSSVISSHSMHLGVLATAWHAVNTGSMFTVYYKPRTSPAEFVVSRARYCESLKRNYSIGMRFRMRFEGEEAAEQRFTGTIVGICVSDPSGWADSKWRSLKVRWDEASSVPRPERVSPWQIEPAVSPSPVNPLPVRFKRSRSSVNASPSDVSTVNREVASKVMVESQQNNLPRALHNQGRTQLTGRYRDSTDVKTAQDLTMWSSGTEQQRNNIAAQTKRCLEGWTQSRTPEGYNQLFSAFQPLKDAHNPLRPFPNKISGTRSSTWVTADARYPAQQANHNMLHGTLSFMPHSSGFRMIQQNNLVTPEAANFTGKSAFTSLQGHVTDQCSTGWFGSIESNSHTDHASSSLIRSQPLVIGNDVQKTKGTSFKLFGIPLGSPEKSEPLVSPPSVAYDGKLQTSPTDNNEPCSEATQNIQNKVQSSSTRSCKKVHKQGSALGRSIDLTKFACYDELIAELDQMFDFDGELKSPCRNWLVVYTDNEGDMMLVGDDPWNEFCDMVHKIFIYTREEVERMNPGALNARLEDCLSDSLGRGLASKEPRSGPSTSAVDSENRANLSTLLKVVKQTKGHVSE

SEQ ID NO: 222619 - protein, 713 aa, Zea Mays
MGRKKNPIVFLDVSVGDEPDERMIFELFADVAPLTTENFRALCTGELGIGQKTKKPLCYKGTLFHRVIKGFMAQGGDIAKENGSGGENIYSGKFTDETCVLLHDDRGLLTTADTGFKPSGSQFCITFKPNSHLDRKHTVFGKLVVGSDVLKRIEQVDVQSPDSTPVIPVTIVNCGELIERKDIGSMSIEIDKKRAAKSKLTRDITSDEESNEGQHKRRRNKSSKRRRKKRRYSYSESDSSSESETESSDYESDSDTYSSDSSDVSSSSDDRRRRRKRHSKKNKRKHSRRKRDHRRERRRRKRGRKSKQKSKRIVKGDSEAESTGDSSSEDARSKRHRRGRKFKASSQVSEENLAGVAALKDATSPQQKSGIQRSPAQDVSSLQNGEVHTNGVNDSKIERNAAVMPVLTGNRSKSRSQSMSVNHSMSKSMSISPRRSPMKRSSTSPKRSLSRSPVDNNHSRSPIRTPKRSVSRSPARRQIMSRSPARSPPRNSSRSLHISRSPVKAHRRSISRSSARSMQQRSPSRSLERTHVRKSISPSPPLEKGRSITRTSVVSPLRSVSRSPARISRSPHRPSRRSPMRSPRWNIRRSLSRSPARIPRRSVSRSPVRGGRPRRNISRSPSPHRRVVTPPNNGRSPSRSGSPDGSPKRIRRGRGFTQRYSYARQYRSPSADRSHRYGGRNDRDRYMGYRGSRHRSPPRRYRSPPRGRVSSPR

SEQ ID NO: 222620 - protein, 546 aa, Zea Mays
MGRKKNPIVFLDVSVGDEPDERMIFELFADVAPLTTENFRALCTGELGIGQKTKKPLCYKGTLFHRVIKGFMAQDATSPQQKSGIQRSPAQDVSSLQNGEVHTNGVNDSKIERNAAVMPVLTGNRSKSRSQSMSVNHSMSKSMSISPRRSPMKRSSTSPKRSLSRSPVDNNHSRSPIRTPKRSVSRSPARRQIMSRSPARSPPRNSSRSLHISRSPVKAHRRSISRSSARSMQQRSPSRSLERTHVRKSISPSPPLEKGRSITRTSVVSPLRSVSRSPARISRSPHRPSRRSPMRSPRWNIRRSLSRSPARIPRRSVSRSPVRGGRPRRNISRSPSPHRRVVTPPNNGRSPSRSGSPDGSPKRIRRGRGFTQRYSYARQYRSPSADRSHRYGGRNDRDRYMGYRGSRHRSPPRRYRSPPRGRVSSPRRGRYRRRSRSASRSPVYRERGRGGGYSKSPIRSSSPPARKPRSHGDRARSVSRSHLSGSVSRSPPVHHPSPPDSPSVKHASDEKSQSASPALSLSGSPNRGGKKGLVSYGDGSPDSAGK

SEQ ID NO: 222621 - protein, 510 aa, Zea Mays
MILDNLPLVVPVTRQDKNSIAYQGGYHVGAKGLYSGTKDEKYFIHNHLSFTVKYHKDDNLEHSRIVGFEVNPHSVKHQVDDKWNGVDTRLSTCDPHASKFVINSDSPQEVEVGKEIIFTYDVRFEESEIKWASRWDTYLLMTDDQIHWFSIVNSLMIVLFLSGMVAMIMLRTLYRDISRYNQLETQEEAQEETGWKLVHGDVFRPPTYSDLLCVYVGTGVQFFGMLVVTMIFAVLGFLSPSNRGGLMTAMLLVWVLMGLLAGYSSSRLYKMFKGSEWKKITLQTAFLFPGVAFVIFFILNALIWGEKSSGAVPFTTMFALVLLWFGISVPLVFVGSYLGFKKPAMEPPVKTNKIPRQIPEQAWYMNPLFTILIGGVLPFGAVFIELFFILTSIWLHQFYYIFGFLFLVFVILIITCAEITIVLCYFQLCSEDYMWWWRSYLTSGSSALYLFLYAGFYFFTKLQITKLVSGILYFGYMLLASYAFFVLTGTIGFCACFWFTRLIYSSVKID

SEQ ID NO: 222622 - protein, 486 aa, Zea Mays
MKPGGGGGGGNGVTATTTAIPPDDLRSRRRLAALLAPLLLFLAAALSFPSTLHLAAVPLPTPPMTTVPRRTTPPRVAVCLVGGARRFELTGPSIARHVLRGGAFAVPADRRDAGQAAATTSVDVDVFLHAPLDADAYKLPLLLAPAAGAGGGSGTTSRNSNNVVSLAAVRVFRPVYLDETTPAARAQVLTADNSPNGIQYFRLVEGCLDMIRDRESRGNFTYAAVLRTRLDGFWTAPFRLDDDDQLLSGSAYVVPEGSRFGGLNDRLGYGGRRATEAALARLSALPRLAAAGHAGLNSEAAFAAQLELSGVAARERRLPFCVLSDRAYAFPPAPGYGVPVAALGSAGPLSGAKCRPCRPACAGACAQRSVARLEPAWSWTGGALELCDASGPWEPGWEALFDAAAGRDAARARRAVARMGAGECVARMEAFRALADRWDAPSPAEMCRIGLRSRSSASSAPPATVSSSDSSAHWHVPSLPRQSRQP

SEQ ID NO: 222623 - protein, 203 aa, Zea Mays
MSFSQKGPRSVCILSANGSISNVTLRQPDASGSTFTYEGRFEILQLMGSFTMAEEGRRRTGGLSVSLAGPDGRVVGGVVAGMLRAASPIQVIVGSFLPNSLKQHQRRRMSMQQPSPVPALPAPVAPPPPVLTAATPISQAGPGNGFHAPPPPHSAAPPQPHANAMNLNATTTGFTMVGWPASSPQPMAYRASPDINVSLTPQE

SEQ ID NO: 222624 - protein, 547 aa, Zea Mays
MVDKNDGSEGIKFNTSNLIQTTEEVARAFIAAASAATAQSARTSVVYSSKDESGSPMQKLQQHFSKIMKGFSSAPDLSGTYNPEVLTTQKRQWSRYQMKSLGDRCIREPSHLFESIVIVGLPPHADIQELENIALGRNDEDGKRSKNLFGNSHHQVHAITNLEPQVLFAYPPEKPLPLKYKDTLSFCLPGGVQVHAVERTPSFSELNEILLGQEQLKESNQSFVFRLQVADNSALYGCCVLVEEIVQRPSKLVSMLMNEKPVFPRRSRYVITTPRCYCILSRLPFFELHFGVLQSILMEERLEWLTDGVSMLTSLSLEESCENDICEGTAVTAQKHYLDSNTTDVDKSSESSNGVSSTELSDTDSSSGCRENQLDFVSKEQQQNSSCEEQSNFKREIVTCSDASEVSDHFVPEDTSSDQSGVKHHELHSAPSIPDESGARNCDDSPKENVDDEELDLFIIDTILPLMRSRLCEDCESSPSSQGSPSEGRNFDTQESDSEEPSSIGDGDLVKHNNMGSGIHLWMPQVGTCNDTFCCRTPGETDCYCLF

SEQ ID NO: 222625 - protein, 77 aa, Zea Mays
MWIIHLRAQTKNHLGSKFLFLWVIHLTQIPVFWSKKTWNKNDNLLELPNVYPHSPLLSYRQWSATWLCVPFCGLNID

SEQ ID NO: 222626 - protein, 136 aa, Zea Mays
MKGYMHMHRNTGDSKGVCGINMMASFPTKTSPNPPPSPGPGPTKCSLLTYCPEGSTCCCSWRVLGFCLSWSCCELDNAVCCKDNRYCCPHDYPVCDTGRGQCLKASGNFSAIEGIRRKQSFSKAPSWTGWLELMDQ

SEQ ID NO: 222627 - protein, 634 aa, Zea Mays
MLDASISATRLLSTHGRVTSDAPLHRFHFETFRIPQPPKGRKPQRLQKFPARAPRTLVPSPTGDASPAAGEMHIKEVTLEGFKSYAGRTVVPGFDPLFNAITGLNGSGKSNILDSICFVLGITDLRQVRAASLQELVYKQGQAGVTKATVSIVFDNSDRSRSPLGYEDSPEITVTRQIVVGGRNKYLINGHLAQPSRVQTLFHSVQLNVNNPHFLIMQGRITKVLNMKPPEILSMLEEAAGTRMYEMKKESALKTLEKKQNKVDEINKLLDVEILPALEKLRKERCQYMKWANGNAELDRLKRFCIAYDFVQAERVRDGALNDVKQIKTKIVELDETTENIKAAIQEMDNNISTLAAEKEAKVGGEMKVLSDKVDKLSHVLIKETSVMNNQEETLKSEEKGAEKILTNIEDIKRSILERDAAVKNVENEASDMKRRAEDLTKELDEKEKEYQGVLAGKSSANEKKCLEDQLRDAKAAVGDAESGLKQLATKIKHSEKELKEKKTLLVSKRDEAIAAENELKTRTKDLEGIKASMGSINYDEGQMEALQKDRSAELEIIQKLKDRVRNLSGELANVHFSYRDPERNFDRSKVKGVVARLIRIKDSSTATALECRLLQVGGYSMWLLTLKKLESNF

SEQ ID NO: 222628 - protein, 338 aa, Zea Mays
MAMEGPVLCRPAMQAKSPAAALVNNSLTRFGQLGTISKYRNVSRFISPISQPSTKNIGPCCSFSSSSDGNGYMAGNFSDSDEDYVNSTVLEAVEVRSGSEGYVIKMRDGKNLRCVHNNSQGRNIPESAPQPAIVLRIEDGSETLLPIIVLEMPSVLLMAAIRNVHIARPTIYQVVKEMIDKMGYEVKLVRVNKRIQEAYCAELCLTKIDDSTDSITFDLRPSDAINIAVRCKVPVQVHRSLAYSDGIRPVEPARMAVAAGLSDGLLFTELDRPDGQASVEAQEFGLVKNMLIAAVEERYKDAGNDPFFLWIHSIHLGLQIEHLAMTPPSVVLPKPSEC

SEQ ID NO: 222629 - protein, 433 aa, Zea Mays
MSSSLPILPNPLKGSFSRPHNPQHIPMLRQLPDDSMPLCIDTHQSASLHPRAGVIGVPYSGYTASPLDSVSNLDSQTMAAPFISQSSNFEALQSLSNNTPETHTKAAWFTSSMDVSPLNTDNIAASDVNQIQSIRPAMTSDESATQNDWWADIMNDDWKDILDATATDSHSKAMIQISNSATSLPAVNQSASSHSREICPVASPPNSSNASVAKQRMRWTPELHECFVDAVNQLGGSEKATPKGVLKLMKVDGLTIYHVKSHLQKYRTARYKPDLSEGTSEKRTATEELVLDLKTSMDLTEALRLQMEVQKRLHEQLEIQRKLQLRIEEQGKYLQMMFEKQSQSSTEKVQDPSSRDTTAKPSSNQSQSTNKDCGATMDPNGTGGIVRTAELGERSSELGVKQKLVEIEESGTEVATGDRSKISQEKRRKLQDS

SEQ ID NO: 222630 - protein, 433 aa, Zea Mays; identical to SEQ ID NO: 222629

SEQ ID NO: 222631 - protein, 155 aa, Zea Mays
MFFDFFEPPNLAEKIHVEEWIPSIQQVVTMASDLAKALQYLQILGVVHRDIKPANILLDKDLHPYLADFGLAMFQKDIKRVSVENWKSSGKPTGGFHKKNMVGTLIYMAPEILRKDIHTEKSDVYSFAISINELLTGVVPYTDLRAEAQLVEQIS

SEQ ID NO: 222632 - protein, 182 aa, Zea Mays
MARRSTPLLRRLLAPSPSLPTPLADAVSRRTVTYMPRPGDGAPRGVTLIPGDGIGPLVTGAVRQVMEAMHAPVYFETYEVHGDMPTVPAEVIESIRRNKVCLKGGLATPVGGGVSSLNVQLRKELDLYAALVNCFNLPGLPTRHDNVDIVVIRENSEGEYSGLEHEVVPGVVESLKCIKPIS

SEQ ID NO: 222633 - protein, 532 aa, Zea Mays
MQYGNSLDSGESNCLITRLLDIVLYLCERGHVEGGMVFQLLEDLTEMSTIKDCKDIFGYIESQQDVLGKQELFGRGKLVMLRTCNQLLRRLSKANDVVFCGRIIMFLAHFFPLSERSALNIKGVFNTSNVTKYEKDAMDGISVDFNFYKTLWSLQEHFSNPALTSTNPAKWQKFSSNLAVVLNTFEAQPLSDDDGKLNNLNEEEDAAFNIKYLTSSKLMGLELKDPSFRRHILVQCLIFFDYLKAPGKNDKEGPTGSMIEEIKSCEEHVKKLLEIIPPKGKEFLKSIEHILEREKNWVWWKRDGCLAFEKPPFEKKPGQAGARKRKPRWRLGSKELSQLWKWAEQNPNVLTDPDRVRMPSITEYWKPLAEDMDPSAGIEEEYHHKSNRVYCWKGLRFSARQDLDGFARFSDYGIEGVVPSELLPPEVNAKFSSKPAEKVKRTRKEDSKSVSAHQPREHQVAATPETDGGVDPEEGEGAAPMDSDNGAVGDSQKRSPGEVSGPESGQCEPEADADDNVRTETTSRDARAGEMK

SEQ ID NO: 222634 - protein, 541 aa, Zea Mays
MDQLALLATELGDSSDFEVEGIQNLTENDVSDEEIEPEDLARRMWKDRGKPVSGASDNIRAWWKEKVKFDKNGPAAIEKYESDNLVSATAQSGGTKSQHSLMDLQDATLGSLLSSLMQHCDPPQRKYPLEKGASPPWWPSGKEEWWTALGLPSGQVPPYKKPHDLKKVWKAGVLTGVIKHMSPNFDKIRNHVRKSKCLQDKMTAKESLIWLGVLQREESLVHRIDNGVSEITQRSMPEERIADTNSSSNEYDVYGFEDAPVSTSSKDDEQDLSPVAQSAVEHVPKRGRERAYNKRPNQIVPGKAKEPPKRKRTRHSSTVTEPDAHRVVDAPENSRNLIPDMNRLDQVEIPGTSNQIVTFDHGGTTTEALQHRGDAQVQVHPPGAEVNSFYSAPTANPTPISIYMGDQPIPYQNNDSTRPRSENSFPVDAHTGLNNLPSSYQNLPPKQSLPLPMMDHHVVPMGIRAPTDSIPYGDHILGGGNSTSVPGDMQQLIDFPFYAEQDKFVGSSFEGLPLDYISISSPIPDIDDLLHDDDLMEYLGT

SEQ ID NO: 222635 - protein, 330 aa, Zea Mays
MVTCHRVHLFDVVNQYRAIFNNDKSGNDENYDGGLLFSWAMQQVSNHLTTLQVMLPNITEGGSLSNILEQCMYCAMGLGLVGLDFRGLLPPIFENAVLNLFSKNMSTAVENFQVILDSHCWVPMPSVGFVANGVVDETSDDVTPPSVLMEHPPLAVFVNGVSAAMNELRPCAPLSLKVVLAQEVVKGLHAVSDSLVRYKAMRMLRGNESALFLSLCQAFIEVAYPYCAACFGRCYPNGATLISERQGTFDAVRQLLTVPARSNSSSIERRQSGGIERRQSGAIERKQSVESTGIAVTDNGLSADGPGLETNSSAATTTSPVDDGPPATLD

SEQ ID NO: 222636 - protein, 609 aa, Zea Mays
MFIMPGLIFALYVTGSLNVVISPEHRHEICRYIYNHQNEDGGWGTLILGSSTMFGTCSNYITLRLLGEEPYANNSVLAKGRAWILSHGGATLIPQWGKIWLSVLGLFDWSGNNPIFPELWSIPQFLPFHPGKFWCFARMVYLPMAYLYGKKFVGPITPTILALREEIYDTPYGKIDWSDARSKCAKEDLICPRTLLQNVIWTSLYRCVEPVLSSWPINKLRERALGNIMEHIHYEDENTQYLCICPVNKALNMVCCWVEDPNSDAFKRHLARIPDFLWISEDGMKAQRAYEFMKNSQVMRNHPGDQRYWHRHRSKGSWTLSSADNGWAVSDTTGEALKAVLLLSKISNKNNLVGDPIERERLHDAIDCLLSFANKDGTFSTYECKRTYSWLEILSPCETFPNIVVDYPYPECTSSVLQALILFKDLYPGYRTEEIEALVRSAATFIETKQQEDGSWLGNWGICFTYGAFFSIKGLVASGRTYKNSPCIRKACHFILSKQLSTGGWGESHIAIETQVYVNLKGDRAHAVNTAWAMLALIYAGQFERDPTPLHRAAKELINMQLETGEFPQQEHVGCFNCSLYFNYPSYRNLFPIWALGEYHRGLRAKKDN

SEQ ID NO: 222637 - protein, 76 aa, Zea Mays
MLALIYAGQFERDPTPLHRAAKELINMQLETGEFPQQEHVGCFNCSLYFNYPSYRNLFPIWALGEYHRGLRAKKDN

SEQ ID NO: 222638 - protein, 595 aa, Zea Mays
MESSSGEELEEEFPGHEWITPQSSINAAYQSQTEKGIRKICSDLLELKDAIENLSANRQSKFLAFLRISEEVVEAEQELIELQKHVSSQGILVQDLMSGVCRELDIWHKSSKEEDATKKDSETELDEILSDDTQDPRTIFLDKLDVLLAEHKMEEAVLALEAEEKKYLVADESGKESNADNTAFKTALVKRKTILEDQLVRYCGQPSLSMNELRKCLSGLIKIGKSSLAHQVLLKAYGSRLQKSVEAFLPNCSIYTETYSATLSQLVFSAIAKAAKETNTLLGDSPMNTNRIIQWAEYEIETFARLVKENSPLPESVSALRSACICIETSLFHCSCLESQGLKFSKLLMVLLRPYIEEVLDLNFRRVRRKIVDGARNDDILLLTPQEGSPLSGAVSPNVMLTSSGKKFMSIVNDVLDQILPMTIVHFGGAILNKFIQLFDRYVETLIKVLPGPSEDDNLLESKEPIELKAESDAQQLTLIGTAYTVADELLPAAVSKFFDIQAEKKGAGGSSEGLGPGSIYAMEYKEWKRNLQHSLDKLRDHFCRQYVLSFIYLEGKSRLDAKMYLGRKDDDLLFDPDPLPSLPFQVIAFFRNHA

SEQ ID NO: 222639 - protein, 293 aa, Zea Mays
MQRLPTATAAGAGMTSLLVVLLLVSVLPGASGADSGPLDGRKMVFAGETAGVLARYSFNKDANVETASPPPPALAGSAAQFRGQAQLPRFAAPRRYDLRLRPDLVTCTFSGTAAVTVAVSAPTRFLVLNSADLSIDSASIRFRDLAPKEVVFFADDEILVLGFSKDLVLGEGVLSMKFNGTLNDQMRGFYRSKYQYKGKMKNMAVTQFESVDARRCFPCWDEPAFKAKFKLTLEVNVGMVALSNMPIANQTVAGPIRTVHYVESPLMSTYLVAIVIGLFEYIEGVTPEGLQSV

SEQ ID NO: 222640 - protein, 171 aa, Zea Mays
MGVKQVLVRPRYGDEDVVDQSPPPPMSSSPCGRYVHHRVCRFDTLAGVAIKYGVEVADVKRANGLTTDLQMFAHKTLRVPLHGRHAPSPPSSSPSHAAREWTKNAASLDPLLKLKPPRSTVSPSMSLLLQGCHGLTPAPKGDLNLTDECAQGKPEAYRAPCCRGEPGKGWP

SEQ ID NO: 222641 - protein, 333 aa, Zea Mays
MLVAELQELKANPHRNAKGTVIEACLDKAKGPLATLVVQNGTLNKADIIVCGEAYGKIRALYDDCGKLVDKAGPSNAVQVIGLNNVPLAGDEFEVVDNLDVARERANGRAEALRIERISAKAGEGKVTLSAIAASVSSAKQVGIDTHELNVILKVDFQGSIEAIRQAIQTLPQENVSLRFLLQGPGDVSVNDVDLAVALEGIIFGFNVRAPGSVKNYAKKKGVEIRMYKVIYDLIDDLRKAMEGLLEPAEEEVPIGSAKVRAVFSSGSGKVAGCMITTRKVVQDCNVRVLRKGKEVYVCSLDSLRRVKETVKEVGAGLECGIGVDDFDEWEEG

SEQ ID NO: 222642 - protein, 607 aa, Zea Mays
MLIEDLAYELAIGESEILRFLSVRGVMLDNVQTLDKDLVKMVCMEYDVEVLESGPVKVEEMAKKKEFLDDEDLDKLEVRPPIVTIMGHVDHGKTTLLDYIRKSKLVASEAGGITQGIGAYQVLLPVDGNHQACVFLDTPGHEAFGAMRARGARVTDICIVVVAADDGVRPQTSEAIAHARAAGVPIIIAINKIDKEGANAERVMQELSQIGIMPEMWGGDTPMVEISALTGDNVDELLETVMLVAELQELKANPHRNAKGTVIEACLDKAKGPLATLVVQNGTLNKADIIVCGEAYGKIRALYDDCGKLVDKAGPSNAVQVIGLNNVPLAGDEFEVVDNLDVARERANGRAEALRIERISAKAGEGKVTLSAIAASVSSAKQVGIDTHELNVILKVDFQGSIEAIRQAIQTLPQENVSLRFLLQGPGDVSVSDVDLAVASEGIIFGFNVRAPGSVKNYAKKKGVEIRMYKVIYDLIDDLRKAMEGLLEPAEEEVPIGSAKVRAVFSSGSGKVAGCMITTGKVVQDCNVRVLRKGKEVYVGSLDSLRRVKETVKEVGAGLECGIGVDDFDEWEEGDIIEAFNTVNKARTLEEASATVTAALKDAGVQL

SEQ ID NO: 222643 - protein, 354 aa, Zea Mays
MDEEAGVVTAAAQVTRKVEEKDAEMAAWKAPAAMLLVQLSNTGMVLLSKVAIDGGMFVLALLTYRSLFGAAIILPVALLQERGKWKEMDWHAAGWIFLNAFVGYAVPMSMYYYGLQDTTASYAIIFLNLIPLTTFILSFAFRMEALRIMSTSGSLKIAGVLVSVGGTMIISLYRGKVLHLWSNHILHHHNEEHDVAVDAASHHRLRGTILLAGSSFMLACWYLIQAKVLNVYPYKYWSSMATCLVGGFQTALAGVILRRDKNAWKIGWDINLVTIVYSGAFATALKYSLNSWAVSRKGPSYPAMFSPLSVVFTVVLGSIFIGDNITIGSLVGTVMVIVGTYTFLWAKANELHQE

SEQ ID NO: 222644 - protein, 753 aa, Zea Mays
MEPRVPCGDGGPEPRAARTHRREGERNHVLDARILEPQRQRSNPIRNIFHLLTQREVSPRLKHHAKRMWNESPKYDPDSIELRSADAKLDIFSWAESQSLHSWSAKYCPLLPPPRSTIAAAFSPDGKTLASTHGDHTVKIIDCQTGKCLKVLTGHRRTPWVVRYHPLHSDILASGSLDHEVRLWDANTSDCIGSQDFHRPIASIAFHGSGEILAVASGHKLYIWNYNKRDGTSVPAIILKTRRSLRAVHFHPRGAPYLLTAEVNNIESADSPLTLARSSGYLNYPSALLVTNTNSRFCTLPESNVVSPCLLWPAYLRDGGILHVLGNDSSSTIVQQRSSLVQPSTSDTANVQLEQFATPMDVCPGEPTSSNDIPDAVTVPTSNGNEMHGAGGQSNSRLQGSSSTSNLERFSARDDLQVSSLSRTDPIPLTAGPSGSDLHRAMPLNMLLTGGLDVQMFLRNVGSGQQDHSLFGDSRNWEVPFLQGFLMAPNHAGASSSIPLTTGSSRGPNRRYASRSVPGVGNLLLGPQIDEAEAHAVSLGAGSEITASMLAPGTELPCTVKLRIWRHGTNEPCVPLEPEACCLTISHAVLCSEMGAHFSPCGRFLVACVACLLPQTEDDRGSQLPVSYEGAGSSPTRHPLPSHRVIYELRVYSLEAETFGDILASRAIRAAHCLTSIQVYRVSDMELVRVLPSAEDEVNVACFHPSPGGGLVYGTKEGKLRILQHNGADMTNMGVGCFIEENMVEIQRYALEC

SEQ ID NO: 222645 - protein, 727 aa, Zea Mays
MEPRVPCGDGGPEPRAARTHRREGERNHVLDARILEPQRQRSNPIRNIFHLLTQREVSPRLKHHAKRMWNESPKYDPDSIELRSADAKLDIFSWAESQSLHSWSAKYCPLLPPPRSTIAAAFSPDGKTLASTHGDHTVKIIDCQTGKCLKVLTGHRRTPWVVRYHPLHSDILASGSLDHEVRLWDANTSDCIGSQDFHRPIASIAFHGSGEILAVASGHKLYIWNYNKRDGTSVPAIILKTRRSLRAVHFHPRGAPYLLTAEVNNIESADSPLTLARSSGYLNYPSALLVTNTNSRFCTLPESNVVSPCLLWPAYLRDGGILHVLGNDSSSTIVQQRSSLVQPSTSDTANVQLEQFATPMDVCPGEPTSSNDIPDAVTVPTSNGNEMHGAGGQSNSRLQGSSSTSNLERFSARDDLQVSSLSRTDPIPLTAGPSGSDLHRAMPLNMLLTGGLDVQMFLRNVGSGQQDHSLFGDSRNWEVPFLQGFLMAPNHAGASSSIPLTTGSSRGPNRRYASRSVPGVGNLLLGPQIDEAEAHAVSLGAGSEITASMLAPGTELPCTVKLRIWRHGTNEPCVPLEPEACCLTISHAVLCSEMGAHFSPCGRFLVACVACLLPQTEDDRGSQLPVSYEGAGSSPTRHPLPSHRVIYELRVYSLEAETFGDILASRAIRAAHCLTSIQFSPTSEHILLAYGRRHSSLLRSIVVEGENGVPVYTILESFRYGACESAS

SEQ ID NO: 222646 - protein, 276 aa, Zea Mays
MKRVSSHVSLASEAEINLDLSRLIIDKPRFTLERKRSFDEQSWSELSHRQNDGFDSVLQSPAFPSGVFDSPFSVGTHFGGPHPLVNEAWEALRKSVVYFREQPVGTIAAVDHASEEVLNYDQVFVRDFVPSALAFLMNNETDIVKNFLLKTLHLQSSEKMVDRFKLGAGAMPASFKVDRNKNRNTETLVADFGESAIGRVAPVDSGFWWIILLRAYTKYTGDVSLSESPECQKCMRLILNLCLSEGFDTFPTLLCTDGCSMIDRRMATFLATSALL

SEQ ID NO: 222647 - protein, 517 aa, Zea Mays
MKRVSSHVSLASEAEINLDLSRLIIDKPRFTLERKRSFDEQSWSELSHRQNDGFDSVLQSPAFPSGVFDSPFSVGTHFGGPHPLVNEAWEALRKSVVYFREQPVGTIAAVDHASEEVLNYDQSSEKMVDRFKLGAGAMPASFKVDRNKNRNTETLVADFGESAIGRVAPVDSGFWWIILLRAYTKYTGDVSLSESPECQKCMRLILNLCLSEGFDTFPTLLCTDGCSMIDRRMGIYGYPIEIQALFYMALRCALQMLKPEGEGKDFIEKIGQRLHALTYHMRNYFWLDFHQLNNIYRYKTEEYSHTAVNKFNVIPDSIPDWVFGFMPCRGGYFLGNVSPAMMDFRWFALGNCIAIVSSLATPEQSVAIMDLIEEKWDELVGEMPLKICYPALENHEWRIITGCDPKNTRWSYHNGGSWPVLLWLLTAACIKTGRPQMAKRAIELAESRLLKDGWPEYYDGKLGRFVGKQARKFQTWSIAGYLVARMMLEDPSTLMMISMEEDRPVKPTMRRSASWNA

SEQ ID NO: 222648 - protein, 390 aa, Zea Mays
MPPPRPTHPPLPSPLPPGPPPLSARRLPLPPNRPAPTSLLLAPPSSPARALALLFPDSSAHLFPSLPSVSPFATSYPAHTPVPSPLAAAASFALLLPSSHLIFLSAHPSPSNSSVHLRAYSLAPAPAFPRFAPASLSFKRHASAAGLPLQDLPFGIGVRLAGGVNAVSLLSLSTGQIWVLSPKLAADGRTVELHKCAVVELEPARPVYAMEVAMGRLLLGEVGGLRVFPLRGLMKGGKERDVKKEVAVVVGRKGCHKKNGMLNGLVVPVNRVSYGGNGEGKLTTLRVKQSSGSYCSFSLAFQNDDQKSEGSMELLNSVKAISIHPLSNNKFLVLDSSGVLHVFIFSTTQMVSRGAIKQCSENIHTYRLHYPMKVQLSAVFSVTSISEFLF

SEQ ID NO: 222649 - protein, 396 aa, Zea Mays
MPPPRPTHPPLPSPLPPGPPPLSARRLPLPPNRPAPTSLLLAPPSSPARALALLFPDSSAHLFPSLPSVSPFATSYPAHTPVPSPLAAAASFALLLPSSHLIFLSAHPSPSNSSVHLRAYSLAPAPAFPRFAPASLSFKRHASAAGLPLQDLPFGIGVRLAGGVNAVSLLSLSTGQIWVLSPKLAADGRTVELHKCAVVELEPARPVYAMEVAMGRLLLGEVGGLRVFPLRGLMKGGKERDVKKEVAVVVGRKGCHKKNGMLNGLVVPVNRVSYGGNGEGDFVSTCKLTTLRVKQSSGSYCSFSLAFQNDDQKSEGSMELLNSVKAISIHPLSNNKFLVLDSSGVLHVFIFSTTQMVSRGAIKQCSENIHTYRLHYPMKVQLSAVFSVTSISEFLF

SEQ ID NO: 222650 - protein, 298 aa, Zea Mays
MFFDHGVPSEYTGSRKADVLVENLKKLVAPDVSVLESDSSINGFVQAAGINFPLFIGFGMDESLIVEYGAKYKKKAWFSTAKDFSEDVMVVYDFDKVPALVSVNPKYNEQSVFYGPFEGTFLEDFIRQSLLPATVPINRETVKLLKDDGRKVVLTILEDESDESSLQLIKVLRSAANANHDLVFGYVGVKQWEEFTETFDVKVSQLPKIVVWDTKEEYEVVEGSESFIEGDYGSQVSRFLEGYREGRTTKKKVGRGSPTLLGLNAVYILVLLVAVLVVLMYFSAQGEEDHQPRRAHED

SEQ ID NO: 222651 - protein, 176 aa, Zea Mays
MVQCLDGVRQLLAVLLKCCDVELKQPPGLEDPQVLARETVFSVSEVEALYELFKKISSAVIDDGLINKEEFQLALFKTSKKESLFADRVFDLFDTKHNGILGFEEFARALSVFHPNAPLDEKIDFSFRLYDLKQQGYIERQEVKQMVVATLAESGMNLSDEIVESIIDKSHLRQES

SEQ ID NO: 222652 - protein, 138 aa, Zea Mays
MVQCLDGVRQLLAVLLKCCDVELKQPPGLEDPQVLARETVFSVSEVEALYELFKKISSAVIDDGLINKEEFQLALFKTSKKESLFADRVFDLFDTKHNGILGFEEFARALSVFHPNAPLDEKIDCELSCFVDCFIPAV

SEQ ID NO: 222653 - protein, 184 aa, Zea Mays
MVQCLDGVRQLLAVLLKCCDVELKQPPGLEDPQVLARETVFSVSEVEALYELFKKISSAVIDDGLINKEEFQLALFKTSKKESLFADRVFDLFDTKHNGILGFEEFARALSVFHPNAPLDEKIDFSFRLYDLKQQGYIERQEVKQMVVATLAESGMNLSDEIVESIIDKGHHHNISKLCLSLPS

SEQ ID NO: 222654 - protein, 274 aa, Zea Mays
MKRWGSSGQAADSFYQVRPDCSQNVPNTKFKIKAGKTLSVRKWHAAFTRDGCLDIASVLSRIQRGGVHPTIRGEVWEFLLGCFDPGSTFDERDQIRERRRMQYARWKEECKEMDSHVGSGKIITAPIITEDGFPIKDPLVLLEATSDTQGTSIATGNSGNGIENRVLDKQIIDWKLTLHQIGLDVLRTDRTMVFYENKDNISKLWDILAVYAWIDKEVGYCQGMSDLCSPMIVLLHNEADAFWCFERLMRRLMHTTVCWGGKPASASCFYHSGA

SEQ ID NO: 222655 - protein, 1345 aa, Zea Mays
MELHREPPEAILNAIKFDLMTSTDMEKLSSMSIIEVSDVTSPKLGLPNGSLQCETCGSQRGRDCDGHFGVTKLAATVHNPYFIDDVVHFLNRICPGCLSPREGIDTKRLEREKVQATCKYCSKDGSKLYPSIVFKTLSSPRVLLFKSKLHRNASVMERISIVAEAADRMPNRSKGKGSLEGLPLDFWDFVPSENKQVQSNMTKIILSPYQVFYMLKKSDPELIKQFVSRRELLFLSCLPVTPNCHRVVEIGYGLPDGRLTFDDRTKAYKRMVDVSRRIDDYRQHPHFSVLASSLVSSRVSECLKSSKLYSKKADGETSTDTYGMKWLKDVVLSKRSDNVFRSIMVGDPKIKLWEIGIPEDLSSSLVVSEHVSSYNFQSTNLKCNLHLLAKQELFIRRNGKLMFLRKADQLEIGDIAYRPLQDGDIILINRPPSVHQHSLIALSAKILPIHSVVSINPLCCTPFAGDFDGDCLHGYIPQSIRSRVELEELVSLHNQLLNMQDGRNLVSLTHDSLAAAHLLTSTDVFLKKSELQQLQMLCLSVSTPAPAVIKSMNFQGSLWTGKQLFSMLLPSGMNFSCDTELHIMDSEVLTCSLGSSWLQNNTSGLFSVMFKQYGCKALDFLSSAQEVLCEFLTMRGLSVSLSDLYMFSDHYSRRKLAEGVKLALYEAEEAFRVKKILLDPINIPVLKCHDETEDVTYRQSDCIQSNPSVIRSSIMAFKDVFRDLLKMVQQHVSNDNSMMVMINAGSKGSMLKYAQQTACIGLQLPASKFPFRIPSQLSCISWNGQKSLNYEAESTSERVGGQNLYAVIKNSFIEGLNPLECLLHAISGRANFFSENADVPGTLTRKLMYHLRDIHVAYDGTVRSSYGQQIVQFSYDSVDDLVDKLGAPVGCRAACSISEAAYGALEHPVNGLEDSPLMNLQEVFKCHKATNSGDHIGLLFLSRHLKKYRYGLEYASLEVKNHLERVNFSDLVETIMIIYDGHDKIRNEGMWTTHFHINKAMMKKKRLGLRFVVDELAKEYDTTRDQLNNAIPSIRISRRKCLVGDEGVKSSSCCIAVVAHAERNSISQLDTIKTRVIPSILDTLLKGFLEFKDVEIQCPHDGELLVKVCMSEHCKGGRFWPTLQNACIPVMELIDWELSQPSNVSDIFCSYGIDSAWKYFVESLKSATTDTGRNIRREHLLVIADSLSVTGQFHALSSQGLKQQRTRLSISSPFSEACFSRPAQSFINAAKQCSVDNLCGSLDAVAWGKEPFNGTSGPFEIMHSGKPHEPEQNESIYDFLCSSKVRNFEKNHLDTRRQSTENASICRLACKSSKGSTTVNGVAITIDQDFLHAKVPVKWICGGAR

SEQ ID NO: 222656 - protein, 335 aa, Zea Mays
MSEHCKGGRFWPTLQNACIPVMELIDWELSQPSNVSDIFCSYGIDSAWKYFVESLKSATTDTGRNIRREHLLVIADSLSVTGQFHALSSQGLKQQRTRLSISSPFSEACFSRPAQSFINAAKQCSVDNLCGSLDAVAWGKEPFNGTSGPFEIMHSGKPHEPEQNESIYDFLCSSKVRNFEKNHLDTRRQSTENASICRLACKSSKGSTTVNGVAITIDQDFLHAKVSIWDNIIDMRTSLQNMLREYPLNGYVAEPDKSQLIEALKFHSRGAEKIGVGVREIKIGLNPSHPGTRCFILLRNDDTTEDFSYHKCVQGAADSISPQLGSYLKKLYYRA

SEQ ID NO: 222657 - protein, 99 aa, Zea Mays
MPPLRGSPAPWSPNHPLQSSPWDKGNTEARAPSFSLDSIFELLDALNFSLLFQAPYAMSYILFSYKVICVSRAKTEASMVFSSSRLQFSIPVNVVQTEW

SEQ ID NO: 222658 - protein, 305 aa, Zea Mays
MVGEESGCGVEGGTGGGEVPAASAPNGDRSGNSRLAVPSSSADDRGFHRSSTMPGVIKNDEITNESTGPSNLERSRTERRRQNNPTIDPAKQLLDERIPIKKKLKMLNRIATVKDDGTVVVDVPSGLEPTIVGGTEDIYTEAVEEALDGTEILYRPPMQIVILIVGTRGDVQPFVAIGKCLQDYGHRVRLATHANFKEFVLTAGLEFFPLGGDPKILAEYMVKNKGFLPSGPSEIPIQRKQMKEIIFSLLPACKEPDPDTGIPFNVDAIIANPPAYGNHISIVRGKTSYLFHIHQSRLILLRPEG

SEQ ID NO: 222659 - protein, 325 aa, Zea Mays
MVGEESGCGVEGGTGGGEVPAASAPNGDRSGNSRLAVPSSSADDRGFHRSSTMPGVIKNDEITNESTGPSNLERSRTERRRQNNPTIDPAKQLLDERIPIKKKLKMLNRIATVKDDGTVVVDVPSGLEPTIVGGTEDIYTEAVEEALDGTEILYRPPMQIVILIVGTRGDVQPFVAIGKCLQDYGHRVRLATHANFKEFVLTAGLEFFPLGGDPKILAEYMVKNKGFLPSGPSEIPIQRKQMKEIIFSLLPACKEPDPDTGIPFNVDAIIANPPAYGHTHVAEALKVPIHIFFTMPWTPTNEFPHPLSRVKQPAGYRSCCARSPE

SEQ ID NO: 222660 - protein, 529 aa, Zea Mays
MLSLLVVAPQLEVLTIIHTSVLEKVLEYTIGGSAVARGISPNLALFFGGQDSVPWILARHQLPWFDIIVDPCAAALVFVVTVLLCVGIKESSFAQGVVTVLNACVMIFVIVAGSYIGFQIGWVGYKVSDGYFPHGVNGMLAGSATVFFAYIGFDTVASTAEEVKNPQRDLPLGIGVALAICCALYMAVSVVIVGLVPYFAMDPDTPISSAFARHGMQWAMYVVTSGAVLALCSTLMGSLLPQPRILMAMARDGLLPSFFSDVNKQTQVPVKSTIVTGICAAALAFAMDVSQLAGMVSVGTLLAFTIVAVSILILRYVPPDEVPLPPSMQESFCLNQECDEERDRGLLGVGNCNLSQTKDVIVVVESVKDPLIDKRLHKGKMDETKRRKIASLSIGSVCVGVLILASSASATWLPFLPICIGCTIGVVLLLAGLSLLSWIDQDAGRHSFGHSGGFTCPFVPVLPVLCILINTYLLINLSGDTWMRVGIWLLLGVLVYAFYGRTHSSLIDVVYVPAAQADEIYRSSSGYVS

SEQ ID NO: 222661 - protein, 58 aa, Zea Mays
MSAVVWAASRFRAMRECHSEFIARMQGSNKITVVTCIVSQAFDPSKFISTEHILRSYF

SEQ ID NO: 222662 - protein, 337 aa, Zea Mays
MARYEASAAAPGVDFHLPDEILAVIPTDPYEQLDVARKITSMAITSRVSRLEADSGRLRRDLADRDHAEAELRARLADSDARLAAALDENAKLAKERDSLAATTKKLTRNLAKLEAFKKQLMKSLSEDNLLQLSETSQDHNGEDILTARVPYWKDEVCSSNTSSDTSIRSTITESIHGGGYQFSIKTYVPPKLTPGSTPMISSSSGSPRAYSTGPPSPNFFSGPTSPTKARSEGQLTFSSWQGSSSHQYSAPTSPQRHSFTGRPRIDGKEFFRQARTRLSYEQFGAFLANIKEFNAQKQSREKRFLEQNTKTCTFLSRICLVATSHEKYVRSGIFCL

SEQ ID NO: 222663 - protein, 81 aa, Zea Mays
MAPSPGVVSPRRRRSMTSSTMALTTWWSRSTRWTSISRSSSSAPNSSRRRSRSTRCISLGPRPRRLVKLRQSDAGGGRPHP

SEQ ID NO: 222664 - protein, 72 aa, Zea Mays
MNVMLSRNKELLSAPNRLKWKCLTHCLIRGEAEGGLIRDDVSESQFNQVLNIELQQIIDGDCHRSQKTTVSI

SEQ ID NO: 222665 - protein, 233 aa, Zea Mays
MDETSSCDIDKPSDEQNVRDVGKIAGLEPINFITSATPHLGSRLNKQLPFLFGVPLLEKTAAGTAHFIVGRTGKHLFLTDNDDGKPPLLLRMVEDCDDGKFMSALRCFKRRVAYANVTYDHIVGWRTSSLRRQHELPKLKLTANDEKYPHIINVDKGNLEDHRQEGSVEDSLADSYEEVMIRGLTQVAWERVDVCFHKSWLRYNAHNNIQVRIHPINSDGEDVIYHMIDNFVV

SEQ ID NO: 222666 - protein, 117 aa, Zea Mays
MIQYWEFRREHDTEKPAWTTNNKEHFSHYVELNPDPNAEHNRENGWFCGEDMPDGGWVHDDEDMVDGKYCAFVLHFCADVIVALICLTLQAPMHLDIFISNYGKKTRLFTDTTWFAY

SEQ ID NO: 222667 - protein, 94 aa, Zea Mays
MPSTIERMVGFVAKICLMVAGFMMMRTWLMWEINSIVLHAWTNNASSLHRSNYTHKRVGAMRCAARASNRSIEAAMAEEEGRSGCEYVTEEEVL

SEQ ID NO: 222668 - protein, 534 aa, Zea Mays
MNDAGEAEAQELAPPGASAAAGLQGRAEVDTSTPFKSVREAVDRFGGSAAWSSDLIKRMFALPPSPKKQEGGDELADLEEQTAQLEKELGVKERETLDVLKELESTKKVVADLKLKIQNEGAGAFCIPEESVRGQAELPTAAEEVAEVQPENAETDVVMGALHVQLHQSPGTSVLKGLEQAKANLNRTTSDLAAIRASVESLRNDIAKERILVERSREKKLQTLRDLQRRRDDQSDIFIEIKKMTSELEQLRNAASAAKSEAAMLSAEIEQMRASIGTAEVRCRAARKIEEAARAAEALALAEIKILLRNEASVEDLQGMEDVSLSLEEYSELAAKAQEADERSRKKIDAAMVQVDEANRTESDSLRKLEEARLQVEECKKALQDAQKRVDAANRGKSAVEEALRRCRSTTGHRRRSVHDPPRFKHPAPRSRDSQNMDIVGVSKGPLKPTLSIGQILSMKLMGPDGYDKSVWDDASEASTMSLGHILNRRHAVVYSSDATAQKKFPGKRKKFAFTGLSIFLARQAKRKKEKGSH

SEQ ID NO: 222669 - protein, 925 aa, Zea Mays
MTRRPCGLWLYTLSMVDESSARILSTAALKRRADASGAHTQSHSHQQTASAPPTNPNYSIPHRRPHLAVQCSPSGSRQAPSSSIAGCSKASESETELTSLTPSLLHLPHALMRRKKHLDRGGGGRGGGTELFICFTSRSSKLLSPGRGSASASGAETVPAPPLHPSLSRRLRNSGSLKGGQSPMFPSGSTGGGRRSRGGFEPAEPSSPKVTCIGQVRVKGGKRKPKHTSAATLHSCSRRGGVGSAEVSFRRAGDDRDGPQSKNQGWVYQIPVNICEALKTFGSCGGRSLCSPSRHGGAGERGALPTDANCGKKRRQGAPAGGSWLCGAAVARCLLAIQEEDDDEVGNGKGAAVVPAEEMRTSEVGLVMEGWDVEEEKAVMMGDVEVEKKDEILVVGKEEEGRVSVCIPPRNALLLMRCRSDPVRMAALATRFWGSPAAATVEQVDNEVAGCLNDNEEEEEKEEEAEAEPLECKDGARCSAVSVKDLKCEECGSDENDGAEAGEINQEKAEAEESSKCGDLVEEKEGASCRVGVEEAQIVRKDAELEVPLGEVTEMENQGPDMVELVVSEEEVPGHEKVDEEMMGRRSINSYSPSATLKEDRTKLRRLSSRMCVSTSSRASSSSDRVGRRHSFSAEMEARRSSFSSLKDSRRASFSIDRDGRRWSFSIEQEHLVAQPKVLMASRKGKKTSSEAESEKDCDVVAPNSAEEGQESYDDGKEEDTTENVAEEGKTKSAEANQEVEKVETRAEECEGGTVPVIHRRKKSGELPDCLLLMMYEPKLSMEVSKETWVCSTDFVHWKSYQGKNNRNHWQQKASAAGTVETKEKENAEGTTIANDVQESKDPSTVNSAVPMPCPVVQKTPPLKPATTEQKLKLELPPVTNAAAYAPFVLKRCKSEPMRSSARLAPDACFWKDRHRPLNAAGVGF

SEQ ID NO: 222670 - protein, 281 aa, Zea Mays
MWHDSTLLRLFLLSNPSINITTSTDKNGHMKLSDFGLCKPIDCSKLSTLNEDEPMSDDNLRESMDIDSSLSDTANGRRWRSQHEQLQHWQMNRRKLAFSTVGTPDYIAPEVLLKKGYGMECDWWSLGAIMYEMLVGYPPFYADDPITTCRKGSLLSYHQNKAKSAQKAALSLFLADIIVHWRNHLKFPEDAKLSNEARDLISRLLCDVDHRIGSAGADQIKAHPWFRGVAWDKLYEMEAAFKPQVNDELDTQNFMKFEELENPPAKTGSGPSRKKYKAVEH

SEQ ID NO: 222671 - protein, 362 aa, Zea Mays
MKKLKKSDMVVRGQVEHVRAERNLLAEVASHHCIVKLYYSFQDTEYLYLIMEYLPGGDIMTLLMREDTLTEHVARFYVAETILAIESIHKHNYIHRDIKPDNLLLDKNGHMKLSDFGLCKPIDCSKLSTLNEDEPMSDDNLRESMDIDSSLSDTANGRRWRSQHEQLQHWQMNRRKLAFSTVGTPDYIAPEVLLKKGYGMECDWWSLGAIMYEMLVGYPPFYADDPITTCRKGSLLSYHQNKAKSAQKAALSLFLADIIVHWRNHLKFPEDAKLSNEARDLISRLLCDVDHRIGSAGADQIKAHPWFRGVAWDKLYEMEAAFKPQVNDELDTQNFMKFEELENPPAKTGSGPSRKKYKAVEH

SEQ ID NO: 222672 - protein, 252 aa, Zea Mays
MMVNGYGINSLSDFFTDFGYLPREELRFPAKKLRALWFSPPTNDGYSGTGTYGPLPRIFISELLVDELTTQSQEIIHKYIKTSGNGNNHAAIASTSGELTWEKPIYSDFQILSRESEYAAWTLVNGYALNHATIATHRLESDIRSINKFNKFVEDNGFKLNSEGGILKVSPDGLLQQSSTVADSSLFTFADGITESIPRSYIEFAERLLLPQFKDLQDEEVKEYHRRDGFEVGNADKIFESTSKDQLTRRSA

SEQ ID NO: 222673 - protein, 128 aa, Zea Mays
MSSFGFIDYHDRRYAALAILSLNGRQLYGQPIKVNWAYTSTPREGTSGHFNIFVGDLCPEVTDATLFAFFSGYSTCSDASVMWDQKTGRSRGFGFVSFRNQQSSFGFIDYHDRRYAALAILSLNGRQL

SEQ ID NO: 222674 - protein, 164 aa, Zea Mays
MSSIGTGYDLSVTTFSPDGRVFQVEYATKAVDNSGTVVGIKCKDGIVLGVEKLVTSKMMLEGSNRRIHSVHRHSGLAVAGLAADGRQIVSRTKSEAASYEKVYGEPIPVKELADRVASYVHLCTLYWWLRPFGCGVILGGYDRDGPQLYMIEPSGVSYNTLVLH

SEQ ID NO: 222675 - protein, 124 aa, Zea Mays
MGVKGGDKPKPNYRKGLWSLEEDQKLRDYILLHGHGCWSALPMKAGTNVKIAAIPSSVVVLTSETFDSIVLDEFYAPWCGHCKHLAPIYEKLASVFKQDDSVVIANLDADKHTDLAKKSDSLVV

SEQ ID NO: 222676 - protein, 1167 aa, Zea Mays
MATLAPPAVEVEPEADAMALASEAAAPELPSSHSQLDFFKTRVQLLCESNTRDFDAWVSLINAAEGTSADDIEVMSLVYHNFLLEFPLCYGYWIKYAAHKARLCTTRYVMDVYEQAVHAVPHSVDIWVNYCEFGICAFEEPAHVRSLFERALSLVGKDYLCYHLWDKYIEFESSQKQLIHLATIFINTLKFPTKKLHMYYESFRKFVTLLEQEVTSCVAEILSEKVHASEMVGTEGSELDISTIIADLFDQKGGHLSPEALKHYLSAGEKLYKMSSKIYKEICYFEASIKRPFFNVKTLDDDQLENWHQYLDFVEKNGDFDWAVKLYERCLIPCANYSEFWIRYSEYVDAKGGREIANHALGRASSCFAKEVPAFCMYYALFKEQIGDALVARSVFTKTRSYFTSGFYANINRLANMEKRMGNTKAASEIYETAIEDAMQKNNIELLPDLYSNFAQFIYVASHSIIQAKQVFVDGINRAPCKPLIKGFIQFMSTHGGPKDIPLLDSVISNAVTPGSDVSTALSREDREDISLLFLEFVDLYGGIKELRKAWARHSILFPHSTGNISRHYSTMGNSLQETKKRRNTEPLMIARDHSLEDTMKLKQTLKTDDFSLIVDKESEPQVDKDIVDSGKRHGDAGAQKALDLVNSHKETITTAQECTDMVYSEHILDKNRIEKQMNSHAKEDINQDLILHEQNDEKTNSHEAETPVAESGDCDSPSKAIASSENINFQGKVIEVSASSHLETVCSKYDSPSGPNMHKEGSSSGPARISPELEERHHVEVQVKVDTEHHFSVSNANLEISFDGPNPTECDKEISAIGHGSQDYIQSSQSHQLSACAKPWSLDSAKTKSDTVSIQAQLRNQLENAQTYQSNNLSQNMQQQELTMPHNVQTSAQIQDQLLAQPNHRNQQYLQMMQGYATQMGEYYQQQLYYLQAQHNQQMQSLQQQQLPTEHLQQTFMQQVQQLNQQLVLWQQQVQQQPQVVLQQALPVQQLPDEKQGQCPSGDSKHGQNKQQQQAPQMDQQSQQLQQQQLLYLQQQQQMYLIQQQQMYQQQQAQQQQLLQQQLMQQQQYVLQMPQHQQDSVRQQQQQLFEQQQQQMMLLQRQQQHIMQQQIQPYVQQQQNQQGPKDQTYKSNHQTCEVQGHHNKQQSCAYGPSGWKEQANGAWTTV

SEQ ID NO: 222677 - protein, 58 aa, Zea Mays
MMAASRASILSPAQLPPSSSSSSCTTRVLLLHEVPSYLSLQEDGEDEWMMPLTIPLYI

SEQ ID NO: 222678 - protein, 195 aa, Zea Mays
MGLLGRRTLLRLLALASAAVAVAVTVEAYEGDADPLYSDTIWTEKLYFSSDAAFLGYSLILAILRTLNLRDEASRVMVAAPILAFVTTHILYLNFYELDKGLNMKVCTVIIIAQCLLWALWAVMTRHPSRLKIIFVAIGGAAAVLLEASDIPPRWGYVDGRAICLAVAIPLSYLWWSFAKEDAEMRTSAILKKAR

SEQ ID NO: 222679 - protein, 473 aa, Zea Mays
MQNRYEDDEILGHRLYREIRRVEQVKKEPGKRSRGKGGSSAISVVSYQWETVASTFDEFDDVAEKLFSSRNRTEVSLGKKLKIEYLPEIEKIHKKKERLLKKQQREALLLDSYLTSDGLTTGRSLRDRKPVTYTFDDYDRSINEAIKITKKREENSAEPVATTANRRVLPPRAEAASNGKLNNGPSPTTNDSDDGNSSKSDDDRDSDGEQENEALDRSNRRRKRSQRYTQDFVEAVSDIDPNFDSDDDIMGEAVYDEEYLRSRKQNKTSSASEEDEEFRLEEDGEDDDEEEEYSLSTSEDLEEPQRHKKLETRGRRGTKLRSVDEIQTGLRRSKRSSRPRINYHQYDFSDSDTGPGKAKKSDASDSEAGSDAENDMELSTSSQEGEEEEDDSHDEENGNNVNDKMDEDHTVAENKVEPEEEEQKEQPPIEKMDAPSTESRRVGRTFLDLNELAPGGGFDESPSLTVKDDIDNI

SEQ ID NO: 222680 - protein, 58 aa, Zea Mays
MYVGAVSVAVFVILATTIATVVAITIATGWVAFFWFVWFTARECLSLTTKRRTGTTSP

SEQ ID NO: 222681 - protein, 332 aa, Zea Mays
MHPDRQSEQNKAYGVPNNKTTTQSYTNICFCLYVVVMNFQHLVYEYARHGACVALVARTEVALRAVAKAARDLGAPDVLVVPADVTKVDDAKRAVEETVAHFGKLNHLVANAGIWSSCFFEEITNITAFHNVIDLNFWGAVYPTYFALPYLKASRGNIVVTASVAGRVPTARMSFYNASKGAVIRFYETLRAELGSHVHVTILTPGYVVSNLTKGKGLQKDGHVGIDEEARDINVGPMPVGKTESLAEVVVASVRRRDYYVTWPGWYWPFHMVMCAAPELVDWFSRTFYVSKSGDQDGGGGALSKKILEAVGGKKFLYPQTIRSQTAMAPNN

SEQ ID NO: 222682 - protein, 407 aa, Zea Mays
MGKLDGFGAFSIPLSTDLHGADCVAQLHSAAGNPCPGQEPSRIVPQSSKGNFVVVPGKTDYPSKECASATLCGSIKKHLLDHFHKKPVPPKPKPEPKPELEPKPEPKPEPENHPPTPTYGSSTPIYHPPSRQLFDKKHMFDNFHKHHDYHHFFDHFHKKPVPPKPKPEPKPEPKPKPQPEYHSPTPTYGSPTPIYHPPARHLFDKKPLLDHFHKDHDYHHFLDHFHKKPVPQKPKLEPKPQPKPEYHPPTPTYVSPTPIYHPPAETEMKYDKKHFDHFHKDHDYHHFFDHFHKKPVPPKPKPEPEPKPKPQPKPEYKPPMPTYGSPTPIYHPPAKKEVAFDKKHFLDHFHKDHDYHHFFDHFHKKPVPPKPKPEPKPEPKPQPEPEYHPPTPTYGSPTPIYHPPAKH

SEQ ID NO: 222683 - protein, 51 aa, Zea Mays
MCATRSIPSYYQSIFPFPWTTLEARHSCFSSSGIKGALKYTLYCHCPSWAA

SEQ ID NO: 222684 - protein, 55 aa, Zea Mays
MVWWLTYQKRHSYATKSNQTRVVKTPGGKLVYQYTKKRASGPKCPVTGKKIQGWL

SEQ ID NO: 222685 - protein, 318 aa, Zea Mays
MNSSSAHSFRDNHQKSVEERKEEYNKARARIFNNGVSNATDGRSAEEVTSLTTLHRSTSLELNSNNRMGQGAEITLERTLTTTSASSMSNRSKSDKEPAVNRNRQNNRVAIFRDRESERRDPDYDRSYDRYMQRFDPGFGFSGGSYTIRPLYAPAVNYNTEFPQLGSAHQSPVAVEQQPRPIAQHMPVTWSAAQATNAIGYGPDGVMGPYSPGHIRAPVRSSVFMHASQQYAIPSRPGVPFVHPQESMGPFAQVEMLKEHILPYLNGLCCRRTDDDDEKLGFAVSGRSGRRAKIGVVQYVNRRQGCGPIVHRMVAGLN

SEQ ID NO: 222686 - protein, 301 aa, Zea Mays
MAVAPMDCGAGSISLGHKVLCRFGVPNSSRLRWVGYDRKQRTDQLIARAVSVDRTQLDFSNPDWKTQFQEDFDKRFSLPHLTDVIDVEPRPTTFSLKSRAPLENANGTMQGSWNGYVNDDDRALLKVIKFASPTSAGADCIDPDCSWVEQWVHRAGPRKQIYFEPQYVKAGIVSCGGLCPGLNDVIRQIVLTLEKYGVKNIVGIQHGFRGFFEDHLSEVPLSRHVVQNINLAGGSFLGVSRGGANISDIVDSIQARRLDMLFVLGGNGTHAGANAIHDEAARENCKYRLYVSPKLLTMTYY

SEQ ID NO: 222687 - protein, 463 aa, Zea Mays
MAVAPMDCGAGSISLGHKVLCRFGVPNSSRLRWVGYDRKQRTDQLIARAVSVDRTQLDFSNPDWKTQFQEDFDKRFSLPHLTDVIDVEPRPTTFSLKSRAPLENANGTMQGSWNGYVNDDDRALLKIVLTLEKYGVKNIVGIQHGFRGFFEDHLSEVPLSRHVVQNINLAGGSFLGVSRGGANISDIVDSIQARRLDMLFVLGGNGTHAGANAIHDECRKRKLQVSIVCVPKTIDNDILLMDKTFGFDTAVEAAQRAINSAYIEAHSAFHGIGLVKLMGRSSGFITMHASLSSGQVDICLIPEVPFTVDGPNGVLRHLEHLIETKGFALVCVAEGAGQEYFQKSNATDASGNMVLSDIGVHLQQKIKSHFKDIGVHSDVKYIDPTYMLRAVRANASDAILCTVLGQNAVHGAFAGFSGITTGVCNTHNVYLPIPEVIKSTRFIDPNSRMWHRCLTSTGQPDFH

SEQ ID NO: 222688 - protein, 886 aa, Zea Mays
MDVDSRMATESDSDSDARGGGSGSGSETPTASASASASPSTSAPAPGTPTAAAASPGLVAGPRPAPGYTVVDAAMDKKEDGPGCRCGHTLTAVPAVGEEGSPGYVGPRLILFGGATALEGNSATPPSPAGSAGIRLAGATADVHCYDVLSNKWTRLTPLGEPPSPRAAHVATAVGTMVVIQGGIGPAGLSAEDLHVLDLTQQRPRWHRVVVQGPGPGPRYGHVMALVGQRFLLTIGGNDGKRPLADVWALDTAAKPYEWRKLEPEGEGPPPCMYATASARSDGLLLLCGGRDANSVPLSSAYGLAKHRDGRWEWAMAPGVSPSPRYQHAAVFVNARLHVSGGALGGGRMVEDSSSVAVLDTAAGVWCDTKSVVTTPRTGRYSADAAGGDASVELTRRCRHAAAAVGDLIFVYGGLRGGVLLDDLLVAEDLAAAETTSAANHAAAAAASTNGQREPGRYAYNDEQSGQTVTVSSPDGAVVLGTPVAPPVNGDMYTDISPENAIIQGQRKMSKGVDYLVEASAAEAEAISATLAAVKARQVNGEMEHSPDREQSPDAAPSTKQNSSLIKPDVALVNNSTAPPGVRLHHRAVVVAAETGGALGGMVRQLSIDQFENEGRRVIYGTPENATAARKLLDRQMSINSVPKKVIASLLKPRGWKPPVRRQFFLDCNEIADLCDSAERIFSSEPSVLQLKAPIKIFGDLHGQFGDLMRLFDEYGAPSTAGDIAYIDYLFLGDYVDRGQHSLETISLLLALKVEYPHNVHLIRGNHEAADINALFGFRIECIERMGERDGIWTWHRVNRLFNWLPLAALIEKKIICMHGGIGRSINHIEQIENLQRPITMEAGSVVLMDLLWSDPTENDSVEGLRPNARGPGLVTFGSYGVLQQQ

SEQ ID NO: 222689 - protein, 126 aa, Zea Mays
MLLELSIPLSFFCSIRNTLTKLLPNLTVTRFSSYLGFAHCIVFKQENNENKPVTNSRDTQEICLEQGLHILKIFEDYHVSKTSILNDLASAMGNTPNPYEQAMSTCVNDQAMMLSHMVWHESTISL

SEQ ID NO: 222690 - protein, 404 aa, Zea Mays
MENSQDVTFHHKDVLDLQWSHDSTFLVSASVDNTCIIWEASKGTVQQKLEGHLHYVQGVAWDPLGQYIASLSSDRTCKIYAKKPQGKSKNAERLNFVCQHTLVKVEYQNHDESKPPTKSHLFHDETLPSFFRRLAWSPDGSFLVLPAGLSKHSSEVINTAYVMSRRDLSRPSIQLPGASKAIVAVRFCPVLFKPRGSNSDGFFKLPYRVVFAVATLNSLYVYDTESVPPILVHAGLHYAAITDIAWSSDAKYLAVSSRDGYCTIIEFENEELGQPHILPGSKEVANGNLTPETKKPVCADSMKVDNSANKLKMEASPVAVGVRAPLLPTENIKRTGELAEGNVTCENKEPVTIDSMEVDADDTKGKEATIPVAAEVTPPPAVPAAKNSASSKPAKRRITPIAID

SEQ ID NO: 222691 - protein, 271 aa, Zea Mays
MHALVRPWDTLPVLLLSRLCMVLLDALRAGWLGSVDEDEEDFSYRRNAGNGPARWGLIRREWATCNVGLLQSPIGLSDTLAGLADRSGRLGRSYRPAAASLVNRGHSIMVRFNSNPGGVVIDGVAYRLRQMHWHAPSEHAINGRRYALELQMVHQSDTNRYAVVSQLYRISRRRPDRTIHRLERYIRRIARRKNHEELIDEEVDPRRPVSRSTAYYKYTGSFTTPPCTEGVTWVVAHQGTRSNRRPLQEANGRAITFYYTSPAHGRGANGD

SEQ ID NO: 222692 - protein, 62 aa, Zea Mays
MYNGALENACSELGARMSAMDSSSRNAGDMLDRLTLTYNRTRQASITTELTEIISGASALEG

SEQ ID NO: 222693 - protein, 302 aa, Zea Mays
MRILLEMKLGGGSSGFSARSTNDELALIPLEPSTSSFSIAGGPTFSNGFSSGIGSSFSQDNSFSPLLRDGEDGYNSLSNGTKDDTHGLSGLHNLGNTCFMNSAIQSLVHTPPLVQYFLEDYTCEINKENPLGLQGELAIAFGELLRKLWSSGRTSIAPRAFKSKLSRFAPQFSGYNQHDSQELLAFLLDGLHEDLNRVKEKPYIEAKDADGRPDDEFAEECWNYHKARNDSIIVDKFQGQYKSTLVCPVCNKISVTFDPFMYLSLPLPSTVYSDDYCNCIQWYGRCSSNALHCDCTEKWKLP

SEQ ID NO: 222694 - protein, 252 aa, Zea Mays
MASAAASAAAALARHVLLPPRYHASPPSAARRARAAPALTSASPRCVLRRVGRTPRYGTTGKKRTRRFGAPRAGMDMDLASGAVEVINDLGFDTLTFLGVTVLVVPAFRVVKASPILGFFCAGVVLNQFGLIRNLTDVKLLSEWGILFLLFEMGLELSLSRLKALARYAFGMGLPQVLLSTLAFTAFELPPNDAIGTKILQFLFDSRPDLVNIRSIDEAIVIGAALSLSSSAFVLQVCTLFSNYISNHSLKY

SEQ ID NO: 222695 - protein, 145 aa, Zea Mays
MFQDHLALMMELLGMMPRKIALGGRYSRDFFNRYGDLRHIRRLRFWPLNKVLMEKYEFTEINAHGMADFLVPILDFVPEKRPTAAQLLQHPWLDVGPLRQQPKTLPDSAQNSDDGVSEKQKKESEEREAMALELGNIAIDGAGGK

SEQ ID NO: 222696 - protein, 524 aa, Zea Mays
MSLRPSEREQMRKGNYKQTVDAEESRRRREGQMVDIRKAKREESLQKKRRDGFPAAGAVPPMGHSTALQQKLDGLPAMVQAVHSNDPTVQLEATTQFRKLLSIERSPPIEEVISTGVVPRFIEFLTREDHPQLQFEAAWALTNIASGTSENTKVVVESGAVPIFVKLLNSNSEDAVWALGNVAGDSPKCRDLVLGHGGLFPLLQQLNEHAKLSMLRNATWTLSNFCRGKPQPNFDQVKPALPALQQLIHSQDEEVLTDACWALSYLSDGTNDKIQAVIESGVFPRLVELLMHPSASVLIPALRTVGNIVTGDDMQTQCVIDNQALPCLLNLLTTNHKKSIKKEACWTISNITAGNREQIQAVINANIIAPLVQLLQTAEFDIKKEAAWAISNATSGGTHDQIKYLVAQGCIKPLCDLLVCPDPRIVTVCLEGLENILKVGEAEKNLGAGDVNVYAQMIDDAEGLDKIENLQSHDNTEIYEKAVKMLESYWLEEEDDAMPSGDNPQNGFNFGNQPSVPSGGFNFG

SEQ ID NO: 222697 - protein, 188 aa, Zea Mays
MERRGQQPGDAQQPGKDGAGDSPPPPPPFLEVSCRSSGKVRRFAAGTTARYALHAINRKLGPGAPPALHVEAVRDGEEPVSFGPSAALADYGRGWRLQTVTAHDAPGIHHAPHADTAGDRQPSKEDADGTETVRGTCIYVAKIVLAFAFLFLLGGSLTYLLEVIPDMLQTASALELTDFFYDPLTENV

SEQ ID NO: 222698 - protein, 96 aa, Zea Mays
MTWSVAADERREVSRAAAGGVSSRSLGGAVEHQIVSLTYFSGSKGRRTCPLHVSSTCHYMCILFHSLIQWVIVTNSYIRSSKMLNNLIHTHTHEYK

SEQ ID NO: 222699 - protein, 203 aa, Zea Mays
MSPTRMRKAQAEVDSVLSNGAITVESLKKLEYIKLIILEALRLYPQPPLLIRRSLRPDKLPGGCNGAKEGYEIPAGTDIFVSVYNLHRSPYFWDRPNEFEPERFSVPKKDESIEGWSGFDPDRSPGAMYPNEIIADFAFLPFGGGPRKCVGDQFALLESTVALALLLRKFDVELRGSPDEVEMVTGATIHTKNGLWCRLRRRT

SEQ ID NO: 222700 - protein, 278 aa, Zea Mays
MTSTDHITSNLDKLAVQNKGTNWTSQPAGQVLGVLAGLTCVFRTLASCHLVLRMELDIQNFMQNPQLQEFEFQNFPTSYLRCAAHRVAQHYGLETIVADSLVEGSVSRIVARKTAESRYPAIFLSEVPSNQARNDHETAEKLKFVIYQRPKAFQNGSADSRNKSGVPKTVDERIEEYNKARARIFNGSISADSDAASIMGTLSTGKDEPVNVDPSVDETKVSTMNSRSRVAVFKDTEKDRSDPDYDRNYKSLCSMTLVMCNLLACPQTSILCTLASLI

SEQ ID NO: 222701 - protein, 231 aa, Zea Mays
MQRVLRMELDIQNFMQNPQLQEFEFQNFPTSYLRCAAHRVAQHYGLETIVADSLVEGSVSRIVARKTAESRYPAIFLSEVPSNQARNDHETAEKLKFVIYQRPKAFQNGSADSRNKSGVPKTVDERIEEYNKARARIFNGSISADSDAASIMGTLSTGKDEPVNVDPSVDETKVSTMNSRSRVAVFKDTEKDRSDPDYDRNYKSLCSMTLVMCNLLACPQTSILCTLASLI

SEQ ID NO: 222702 - protein, 499 aa, Zea Mays
MELVMLFQASISWEKAEELKKEHCYIAPDYMAELQIFKNNKEEADEKMRYWQLPWVPPPKEEPPSEEELARKAALKEKAGQRLRDMAAAKRSQKIVELEKQLSYLEELMEQLDEAEEEEATAILGSSGYLSQQEIRSAILKASQSLRKAKGESNGNDEKTDASAVDKYPLVSVPDETLTPEQLKEKKKQILLKTTTEGKLRAKQKRAEEEALREKQEEKRRAENPELYLEELRARYSELSDKFEQRKRQKVNGSQTNGNHSSSAGVGRGERLNAAQKERMRLLASAAFDRGKGEDTFGMRDEDWLVYNKMSKDNDDDSNDDDESELVRISSKLQEIDPTFVSKSEAVQLTPEPPKVRPLTAEDYRIAIGIERFRCPEVLFQPGMIGIDQAGIDEMVSISLRRLMEDESVKERLCQSILVTGGSSLFPGMIPRLESGIRQYRPYLAPLKLVGAADPILDAWRGAAAFAASSKFGKQTFSLADYGEHGENLFHRYNIVYSL

SEQ ID NO: 222703 - protein, 434 aa, Zea Mays
MTSQRRPAGRVSIVIRCVSSPPAVDTSFKTNVPRNANMAKLQAGYLFPEIARRRAAHLLKFPDAKIISLGIGDTTEPIPNVITNAMAERAHALSTIDGYSGYGAEQGEKKLRAAIAATYYADLGIEDSDIFVSDGAKCDISRLQVLFGSNVTIAVQDPSYPAYVDSSVIMGQTDLYQQDVQKYGNIEYMRCGPENGFFPDLSTVPRTDIIFFCSPNNPTGAAASRDQLTKLVKFAKDNGSIIVYDSAYAMYISDDSPKSIFEIPGAKEVAIETASFSKYAGFTGVRLGWTVVPKELLFSDGHPVAKDFNRIVCTCFNGASNIAQAGGLACLSPDGLKAMQDVVGFYKENTEIIVETFTSLGFNVYGAKNAPYVWVHFPGRNSWDVFAEILEKANVVTTPGTGFGPGGEGFVRVSAFGHRENIIEAARRLKQLYK

SEQ ID NO: 222704 - protein, 557 aa, Zea Mays
MSGPLNSNISGGPSNLRDSTGRPFTSSFSGQSGSLPGFHHSGIPSAGVQQPSGGISSGRFPPNNLQASLSQIPHGHSGISNRGASPVLGNLGPRIASSGNILGGSNIGRSISSGGLSMPGIASRMNLSGNSGSGAINIQGSNRIGMLQQASPQFMNLLGSSYPTPGGSLSQNQVQSGSGSLGSSGMLYEGSSGDNAPFDINDFPQLTGRPNSAGGGQGQYGSLRKHGVSVNAIVQQNQEFSIQNEDFPALPGNKGSSSDYPMDIHHKDHLQENINIMQAQHYPMARPSGFSLGSSYPPRQHQQSANSVQNAGLETIGLRPANSPSLSTNSGVYEQFMQKYHQPQTQNSLRLQAASGPQQYKDQSQKSVQGTQAVPDPYSLLGLLSLIRMKEPGPTTLALGIDLTSLGLNLNSQDNLYKTFGSPWSSEPAVGEPDYQIPACFSAEPPPALQPFHFQKFHPLTLFYIFYSMPKDAAQLYAANELYNKGWFYHKDYRVWLTRAPNSAPLVKTPLHERGSYICFDPSIWDTVHKDNFVLHYEAVEKRPVLPSAGQNIRREL

SEQ ID NO: 222705 - protein, 296 aa, Zea Mays
MDIHHKDHLQENINIMQAQHYPMARPSGFSLGSSYPPRQHQQSANSVQNAGLETIGLRPANSPSLSTNSGVYEQFMQKYHQPQTQNSLRLQAASGPQQYKDQSQKSVQGTQAVPDPYSLLGLLSLIRMKEPGPTTLALGIDLTSLGLNLNSQDNLYKTFGSPWSSEPAVGEPDYQIPACFSAEPPPALQPFHFQKFHPLTLFYIFYSMPKDAAQLYAANELYNKGWFYHKDYRVWLTRAPNSAPLVKTPLHERGSYICFDPSIWDTVHKDNFVLHYEAVEKRPVLPSAGQNIRREL

SEQ ID NO: 222706 - protein, 552 aa, Zea Mays
MSGPLNSNISGGPSNLRDSTGRPFTSSFSGQSGSLPGFHHSGVQQPSGGISSGRFPPNNLQASLSQIPHGHSGISNRGASPVLGNLGPRIASSGNILGGSNIGRSISSGGLSMPGIASRMNLSGNSGSGAINIQGSNRIGMLQQASPQFMNLLGSSYPTPGGSLSQNQVQSGSGSLGSSGMLYEGSSGDNAPFDINDFPQLTGRPNSAGGGQGQYGSLRKHGVSVNAIVQQNQEFSIQNEDFPALPGNKGSSSDYPMDIHHKDHLQENINIMQAQHYPMARPSGFSLGSSYPPRQHQQSANSVQNAGLETIGLRPANSPSLSTNSGVYEQFMQKYHQPQTQNSLRLQAASGPQQYKDQSQKSVQGTQAVPDPYSLLGLLSLIRMKEPGPTTLALGIDLTSLGLNLNSQDNLYKTFGSPWSSEPAVGEPDYQIPACFSAEPPPALQPFHFQKFHPLTLFYIFYSMPKDAAQLYAANELYNKGWFYHKDYRVWLTRAPNSAPLVKTPLHERGSYICFDPSIWDTVHKDNFVLHYEAVEKRPVLPSAGQNIRREL

SEQ ID NO: 222707 - protein, 583 aa, Zea Mays
MSGPLNSNISGGPSNLRDSTGRPFTSSFSGQSGSLPGFHHSGSHNIHGNLNLANISGSLAPRNNSMAGIPSAGVQQPSGGISSGRFPPNNLQASLSQIPHGHSGISNRGASPVLGNLGPRIASSGNILGGSNIGRSISSGGLSMPGIASRMNLSGNSGSGAINIQGSNRIGMLQQASPQFMNLLGSSYPTPGGSLSQNQVQSGSGSLGSSGMLYEGSSGDNAPFDINDFPQLTGRPNSAGGGQGQYGSLRKHGVSVNAIVQQNQEFSIQNEDFPALPGNKGSSSDYPMDIHHKDHLQENINIMQAQHYPMARPSGFSLGSSYPPRQHQQSANSVQNAGLETIGLRPANSPSLSTNSGVYEQFMQKYHQPQTQNSLRLQAASGPQQYKDQSQKSVQGTQAVPDPYSLLGLLSLIRMKEPGPTTLALGIDLTSLGLNLNSQDNLYKTFGSPWSSEPAVGEPDYQIPACFSAEPPPALQPFHFQKFHPLTLFYIFYSMPKDAAQLYAANELYNKGWFYHKDYRVWLTRAPNSAPLVKTPLHERGSYICFDPSIWDTVHKDNFVLHYEAVEKRPVLPSAGQNIRREL

SEQ ID NO: 222708 - protein, 593 aa, Zea Mays
MSGPLNSNISGGPSNLRDSTGRPFTSSFSGQSGSLPGFHHSGIPSAGVQQPSGGISSGRFPPNNLQASLSQIPHGHSGISNRGGMNVGGNPGFGSSMNAIGGSIQGLSSNLANVGNRNSAPGLAASPVLGNLGPRIASSGNILGGSNIGRSISSGGLSMPGIASRMNLSGNSGSGAINIQGSNRIGMLQQASPQFMNLLGSSYPTPGGSLSQNQVQSGSGSLGSSGMLYEGSSGDNAPFDINDFPQLTGRPNSAGGGQGQYGSLRKHGVSVNAIVQQNQEFSIQNEDFPALPGNKGSSSDYPMDIHHKDHLQENINIMQAQHYPMARPSGFSLGSSYPPRQHQQSANSVQNAGLETIGLRPANSPSLSTNSGVYEQFMQKYHQPQTQNSLRLQAASGPQQYKDQSQKSVQGTQAVPDPYSLLGLLSLIRMKEPGPTTLALGIDLTSLGLNLNSQDNLYKTFGSPWSSEPAVGEPDYQIPACFSAEPPPALQKFHPLTLFYIFYSMPKDAAQLYAANELYNKGWFYHKDYRVWLTRAPNSAPLVKTPLHERGSYICFDPSIWDTVHKDNFVLHYEAVEKRPVLPSAGQNIRREL

SEQ ID NO: 222709 - protein, 95 aa, Zea Mays
MAKGKELEKQFRCTKRPQISRNEDASSQGSALIDDEIEARDQKETLDDPKQLDDVEIHVSDNKAQRKPLADRIRAPVAYDDLFEEGEIHDGEPRS

SEQ ID NO: 222710 - protein, 95 aa, Zea Mays; identical to SEQ ID NO: 222709

SEQ ID NO: 222711 - protein, 327 aa, Zea Mays
MGCAPLGHVLFDEFLRFNPKNPAWFDRDRFVLSAGHGCMIQYALLHLAGYNGVKMDDLKTFRQWRSRTPGHPENFETPGVEVTTGPLGQGFANAVGLALAEKHLASRFNKTDMKVVDHYTYVILGDGCQMEGVSNEAASLAGHWGLGKLIAFYDDNHISIDGNTDIAFTEDVLARYEALGWHTIWVKNGNTGYDDIRTAINEAKGVKDKPTLIKVTTTIGFGSPNKANTYSVHGNALGSKEVEATRSNLGWFHEPFHVPDEVKRHWSRHIDEGASLEAEWNARFVEYEKKYNQEAAELKSIISGELASGTTLLKCLLMLLGTYLSSA

SEQ ID NO: 222712 - protein, 1211 aa, Zea Mays
MLDLECDDLITNMFQTFLGVVSDSHEENIVKSMQAIMILIIDESEDVQESLLRVLLSALGQKKTGAAMSARKLARSVIEHSATKLEPYIKKFLTSSWAGNGSSSNDQIDHQGVVFDLYQCAPKVLKAIVPYITGELLADEVDNRSKSVELLGEIFSLPGASIVECFKTLFTEFLKRLTDRVVEIRISVVEYLKRCLISNPSRAEAPEIIKALCDRLLDYEENVRKGVVAALCDVATHSPYAIPIDTIKVVAERVRDKSQAVKCYTMERLADIYKLYCQRDSDSSTNSDDFEWIPGKILRCLYDKEFRPESIDSILSGSLFSPEYQMKGRVKHWITAATYFDKVEMKALEQILLHKQRLQQEMLKYISLREPSQEDAPDLQKRIFGCFRNISRLFSDSAKCEENLNMLHQLKDADFWKIFTSLLNCSTTFEKAWSLRAELLKILGENHVLYNFVGTLTMRCSYLLVNKEYAKEILAEASAQKTSGNTKLISSCMNLLTAISSFFPSLLAGLEEDIVELLKEDNEVLKEGIAHVLSKAGVNIREQLASTSSLDLLLERLCLEGTRRQAKYSVHALAAITKDDGLMSLSVLYKRLVDLLEEKKVNIPSILQSLGCIAQIAMPIFETRKEEILSFIIKKILDCNDDMVQNSSNKSEWGDSTHNCLLKIYGIKTLVKSYIPCKDAHAQPGIEKLIDILKNILTYGDISPNMVSSAADKAHLRLAAAKAVLRLSKQWDHKVPVDVFYLTLRISQDDFPQVRKLFLCKVLQYIKERALDAKYACAFMFGVNDYHGPQLEEFKYNLTEVVQICQQVKMRQLSVQADMNLLTAYPEYIISFLVHALAHDPSSPDIEEHENVKAFGPTYWRLYLILSILLGEEGLQHSVPGMKKDSFTTIISIFKSIKSSQDVVDGNKNKTLWAICDLGTLIAKRLCQDQTSLSEAQTVPLPPQLYAPLQDNQNENSVESYGQIWPGCEKVLAHFEAVMTANMDKVESPKHKMLIDMTDEFGNEVPLGKIVKLLKLRGEKKAEKKQKAPSSSSVNAENDDDVLGLVREINLSNQEDLEELQKGKPKKRQTDTKNSNKKPLDFSSPKRKRSISKSRPHSAKGSKNSDDRLIHTPNTERTSISLETKLKEKNRDDSIDTELLVSPSIRTPVSKGNKGAKRSHIDILSSVPKKSADAESTKRTVEPRSLNGSLKSQKSKPISGAQHRTQAVPTW

SEQ ID NO: 222713 - protein, 1833 aa, Zea Mays
MAAAEQLKELGEKLQAVAPAPADELAKLLEKAVECLRGIEQSPGSSVMEAIQPSLKAVTREELLKHEDDNVKVLLATCFCEITRITAPDAPYNDDILRDIFYLIVGTFGGLSDVNSQSFGRRVAILETVARYRACVVMLDLECDDLITNMFQTFLGVVSHEENIVKSMQAIMILIIDESEDVQESLLRVLLSALGQKKTGAAMSARKLARSVIEHSATKLEPYIKKFLTSSWAGNGSSSNDQIDHQGVVFDLYQCAPKVLKAIVPYITGELLADEVDNRSKSVELLGEIFSLPGASIVECFKTLFTEFLKRLTDRVVEIRISVVEYLKRCLISNPSRAEAPEIIKALCDRLLDYEENVRKGVVAALCDVATHSPYAIPIDTIKVVAERVRDKSQAVKCYTMERLADIYKLYCQRDSDSSTNSDDFEWIPGKILRCLYDKEFRPESIDSILSGSLFSPEYQMKGRVKHWITAATYFDKVEMKALEQILLHKQRLQQEMLKYISLREPSQEDAPDLQKRIFGCFRNISRLFSDSAKCEENLNMLHQLKDADFWKIFTSLLNCSTTFEKAWSLRAELLKILGENHVLYNFVGTLTMRCSYLLVNKEYAKEILAEASAQKTSGNTKLISSCMNLLTAISSFFPSLLAGLEEDIVELLKEDNEVLKEGIAHVLSKAGVNIREQLASTSSLDLLLERLCLEGTRRQAKYSVHALAAITKDDGLMSLSVLYKRLVDLLEEKKVNIPSILQSLGCIAQIAMPIFETRKEEILSFIIKKILDCNDDMVQNSSNKSEWGDSTHNCLLKIYGIKTLVKSYIPCKDAHAQPGIEKLIDILKNILTYGDISPNMVSSAADKAHLRLAAAKAVLRLSKQWDHKVPVDVFYLTLRISQDDFPQVRKLFLCKVLQYIKERALDAKYACAFMFGVNDYHGPQLEEFKYNLTEVVQICQQVKMRQLSVQADMNLLTAYPEYIISFLVHALAHDPSSPDIEEHENVKAFGPTYWRLYLILSILLGEEGLQHSVPGMKKDSFTTIISIFKSIKSSQDVVDGNKNKTLWAICDLGTLIAKRLCQDQTSLSEAQTVPLPPQLYAPLQDNQNENSVESYGQIWPGCEKVLAHFEAVMTANMDKVESPKHKMLIDMTDEFGNEVPLGKIVKLLKLRGEKKAEKKQKAPSSSSVNAENDDDVLGLVREINLSNQEDLEELQKGKPKKRQTDTKNSNKKPLDFSSPKRKRSISKSRPHSAKGSKNSDDRLIHTPNTERTSISLETKLKEKNRDDSIDTELLVSPSIRTPVSKGNKGAKRSHIDILSSVPKKSADAESTKRTVEPRSLNGSLKSQKSKPISGLVQCSTQDSSGTDLVGHRIKVWWPLDKRFYEGTVQSYDSSKKKHTVLYDDGDVEVLILAKEKWILIESNDSSVKKQKKDLGTNQGRAWEGTSSNKSPPSQPKSKKRSLPPKKKGQPNDKRRKTAERNNSVEEEGIGAGDNDSDSSSPLAHSDVDKDVNSVGHMEEVIVSLAEKEKTRKDSKGMEMKEKGGKDSKDVKIKEKAGKESKDVEMKEKIGKESKDVKIKEKAGKESKDAEVKEKTGKDSKDVETKDKAEKDSKDVEMEEEAGKHSKDVNMKEKAGKESKDVEMKEKTGKESKYAKMKEKAGKESKDLEVKEKAGKDSKDVELKHEAGKDSKDVKMKEKAGKESKDSEMKEKIGKESKDVKMKDKSVKESKDVEMKEKPGKDSKDVKTKEKAGKESKDLEVKGEAGKESKHGEAKKPGKDSKDVKTKENAAGKESKDAEVKEKAVKDPKDVEMEGMAGKEPKDVEKLDGHTLSNEESDNDTLSVWKKRTAKAT

SEQ ID NO: 222714 - protein, 316 aa, Zea Mays
MLPTDMQVDQGSLDRRGVFSLDAPSPSVCLLIQLEKAATEEGGVTPSVYSRKEPVHLAEKEKQKLQVWSRIMPYKESFAWAMIPLFESNRAGGLSDAASPSSPLAPSLSGSSSQDSIVDPISKLALDGKVNHYSSGSSVIVEISNLNKVKESYIEDSLQDPKRKVHKPVKGVLRLEVEKLHDDHNDVDNASEGGSMANDLNDAGDINNGRSNRSSFDGIHSSVNSIAIAKKDAHHNGHTSNAENVDNFQAFDFRVLTRSEPFSQLFHCLYVYPLTVSLSRKRNLFVRVELRKDDSDIRKPPLEAVHPRERNTMLQK

SEQ ID NO: 222715 - protein, 249 aa, Zea Mays
MAVMGLVSPAMLYYTHTEANLGESALALSRFSSCVMLFAYAAFVFFELSNSRRRDESTEGGGGGGGGGDQADDDCEYAFPEITKWEAIAWLAIFTAWISVFSDFLVGAIEVYISVMRRMGAAKAWKIPVAFISTVLLPIVGNAAEHASAVMFAMKDKLDLSLGVAIGSSTQISMFVIPFSVVAGWMMGQPMDLNFHLFETASLLITVLVVALLLQDGTSNCFKGLMLILCYLIVAASFYVYADPNIDGV

SEQ ID NO: 222716 - protein, 167 aa, Zea Mays
MASSTLPAYPFRMSLPGLRAPDPAKVKHVSVRAPARRLPVAASAAPSGAAAAAARERRRFLESYGLNPNDFEEDAEENPREERKDRRRRRQSGRGEQTAEAAVTPAKVEEPRETHKMLQVLGGKVRRRKLLSPKDRNVRPMMEVVRGAAFDILQLVVLLLHSDRVGG

SEQ ID NO: 222717 - protein, 530 aa, Zea Mays
MHAVPVSSTAPVLPISQPPRRHADLAEKHPPEMAMALRRLAGVSGSPSASSAAATVLLRSALTRPISTGFREERDTFGPIQVPNDKLWGAQTQRSLQNFDIGGERERMPVPIIRAFGVLKKCAAKVNMDYGLDPTIGKAIIQAAEEVAEGKLDDHFPLVIWQTGSGTQSNMNANEVIANRASEILGHKRGEKFVHPNDHVNRSQSSNDTFPTVMHIATAVEIHSRFIPSLQQLHDSLHSKTIEFKDIIKIGRTHTQDATPLTLGQEFSGYTTQVKYGIDRINCTLPRMYQLAQGGTAVGTGLNTKKGFDAKIAAAVAEETNLPFVTAENKFEALAAHDAFVESSGAVNTISASLMKIANDIRLLGSGPRCGLGELILPENEPGSSIMPGKVNPTQCEALTMVCAQVMGNHVGVTIGGANGHFELNVFKPMIAAGLLRSLRLLGDASVSFEKNCVRGIQANHKRISQLLHESLMLVTSLNPKIGYDNAAAVAKKAHKEGTTLKEAALDLGVLTEQEFHELVVPEKMIGPSD

SEQ ID NO: 222718 - protein, 331 aa, Zea Mays
MAMALRRLAGVSGSPSASSAAATVLLRSALTRPISTGFREERDTFGPIQVPNDKLWGAQTQRSLQNFDIGGERERMPVPIIRAFGVLKKCAAKVNMDYGLDPTIGKAIIQAAEEVAEGKLDDHFPLVIWQTGSGTQSNMNANEVIANRASEILGHKRGEKFVHPNDHVNRSQSSNDTFPTVMHIATAVEIHSRFIPSLQQLHDSLHSKTIEFKDIIKIGRTHTQDATPLTLGQEFSGYTTQVKYGIDRINCTLPRMYQLAQGGTAVGTGLNTKKGFDAKIAAAVAEETNLPFVTAENKFEALWCRKYNFCISYEDSKRHTFARKWSSVWSW

SEQ ID NO: 222719 - protein, 365 aa, Zea Mays
MNAAAAAAGSDQKGECAGSRAARRRRMEIRRLRVVAEEASAKRRRDMEDAVTARPEFINGHHFFGVFDGHGCSHVATSCGERMHQIVAEEATAAAGSSVSDETARWRGVMEKSYARMDAEAVVSRETAGPAPTCRCEMQLPKCDHVGSTAVVAVVGPRHLVVANCGDSRAVLSSGGATIPLSADHKPDRPDELERIHAAGGRVIFWDGARVFGMLAMSRAIGDSYLKPFVISDPEVLVVERKDGEDEFLILASDGLWDVVSNEVACKVVRTCLRNRAPRGGRERSSPTSNLSPRQSSASGGSSSSGDEEAGGPSGDGAGSESDGESAEDRACAEAAILLTKLALARQSADNVSVVVINLRRRPRS

SEQ ID NO: 222720 - protein, 822 aa, Zea Mays
MATSKKGLMAMVYIRSAFILIFLSSPCQSNDQLTQTKPLLLEDTLISEGGDFALGFFSPTNSSKKLYIGIWYHRVTERTVVWVANRDNPITTPSAMLAITDNLELVLSDSQGHTLWMATGNTSGDAGGAASAVLLNSGNFVLRLPNGTEVWHSFDHPTDTILPTMRILLSFKTQPATRLIAWKGPDNPSTGDISSGMDSTNLQMFIWKGALPYYRFPVVNDMAVAGAMYQQSNGNAAIMYETRVNAGDALYYTYTVSSGSPYTRFSLDYTGKGRLLSWNSTTSSWTVIIEHPHSCDLYASCGPFSYCDQMGPLPTTCQCPDGFELLNSLNFSRGCRRKEELKCGVGNYFMAMSSMKLPDKFLHIKNRTFDQCADECTRNCSCMAYAYANLSSIGAVGDTSRCLVWSGDLIDMEKNSFSEVLYIRLGGSVRRKSSLLKILLPIILCVLLLMLGALVWTCKSRGKRQKKRVQKRRMLEYLSSTDDAGDKNINFPFISFENIVTATDNFSESNLLGKGGFGKVYKGMLEGTKEVAVKRLSTGSGQGKEEFKNEVVLIAKLQHKNLVKLLGCCIHEDEKLLVYEYLPNKSLDYFLFASARKSMLQWPTRFKIIQGVARGIMYLHHDSRLTVIHRDLKASNILLDKEMNPKISDFGMARIFSGDQLQANTNRVVGTYGYMSPEYAMKGAFSVKSDTYSFGVLILEIVSGLKISSPYLIMDFSNLITFAWNMWKDGKPEDFLDSSVTESCSLDEVSRCIHIGLLCAQDNPSCRPLMSTVVSMLENKATPLPTPKQPKDFALRDYNPGNEGVHRELSVNDTSLTMVEGR

SEQ ID NO: 222721 - protein, 83 aa, Zea Mays
MYYTGRLEVFNENFLVADQKLTYALMHCNPQSESNLRRILKFLIPVKLSIGVLPKRTLLERYSLLEMLSLHLREEISGFSGKL

SEQ ID NO: 222722 - protein, 859 aa, Zea Mays
MEKPCSLLVHFDKGSAAMANEIKADLEGSDGPAKADAMRRAISLLLNGETLPQLFITIVRYVLPSEDHTVQKLLLLYLEIIDRRDPAGRALPEMILICQNLRNNLQSPNEYIRGVTLRFLCRLSEPEVLEPLVPSVLANLEHRHHFIRRHAVSSVSAIYRLPHGDQLIPDAPELVERFLASEQDASARRNAFLMLCACAQDRAVAYLLSNADRVAEWPDLLQMAVVDLIRKVCRSQNRANKGRYITIITSLLSTPSTAVVYECAGALVSLSSAPTAVRAAANTYCQLLSSQSDNNVKLILLDRLNELHTLHRDVMVGVVMDVLRALASPNLDVKRKVLDLVLDLLTPRNVEEVVLYLKKEVVKTQAGDLEKGGEYRQMLVQAIHACAVEYSEVAGSVVHLLMDFLGDTNVAAAVDVVLFVREIIETNPKLRVSMIQRLIDTFYQIRASRVCSCALWILGEYSLSLSEVESAIATIKQCLGDLPFYTVSDEGEATDSAKPAKAVVNSVTVSSRRPVVLADGTYATQSAATETILTPSVAPGSLASTLNLRSLILSGDFFLAAVVACTLAKLVLRLEEVQPSKVESNKACTGALLIMTSILQLGQSSYLPHPIDNDSYDRIVLCVRLLCNTGDDVRKIWLQSCRQSFAKMLAEKQFRETEEMKAKAQISHAQPDDLIDFYHLKSRKGMSQLELEDEVHDDLKAATGGFTKDADDANKLNRILQLTGFSDPVYAEAFVTVHHYDIVLDVTVINRTKETLQNLCLELATMGDLKLVDRPQNYTLAPESSKQIRANIKVSSTETGVIFGNIVYETSNVMERSVVVLNDIHIDIMDYISPATCADVTFRNMWAEFEWENKGYCAK

SEQ ID NO: 222723 - protein, 131 aa, Zea Mays
MSTVEEAEKAVEMFHRYDVNGRLLTVNKAAPRGSRVDRPPRQSGPSLRIYVGNLPWQVDDSRLVELFSEHGKVVDARVVYDRETGRSRGFGFVTMASQDELDDAIAALDGQSLDGRALRVNVAEERPRRGF

SEQ ID NO: 222724 - protein, 863 aa, Zea Mays
MGASRLEQTDALFRKNLVIQRRACKTNCCLILFPLALCSVIGGLQIAINHASSQGGGGGGGGGGATPAIRLDCSCSNVSVDENALGGIQCPDECPLPRAPKWPPVVRTPSPEYRAVQDGLFPFADLPDASCRAEGSCPATFLVTGDNHSFVGSVIDNILPTHSSSVNLSADVSALSDFVLADDGEFHQSFLQNKCSPNLTLSYPVQYGNNVVSQVYDFLSSDQSNFNLIISYNSTNDYGVYDESEQSIPVINQAGPVQKPNLVQVPRLANMASNAYLHLKGNGLKMPFEFVKEMPRAAIPIHDGQFDLAPYIGQLPFVWTMELLFPVILTNLVYERQNKLRIMMKMHGLGDLPYWTISYCYFLLLSLLYVLSFVLFGSALGLTFFRQNNYGMQFIFYFAYMNLQISFAFLMTTYFSSVRTATVTGYLYIFVSGLLSQFMFRPYVEDSNISSVLTIMAVEWLLFLLFAFYLDHFRSYKDGIRKAAALVRSRIHGNHSEAAQQQNVQLQEFRASIQLERTDVLKEREIVELISKESDRSYSVICDNLGKVYRGKDGNADKIAVRGISISMSRGQCFGVLGPNGAGKTTLINMLTGFCKPTSGTAYVQGMDIRFDMDRIYTGIGVCPQDDLLWESLTGREHLLFYGRLKKLKAAALFEAIEQSLRSMHLLAGGVADKLVGKYSGGMKRRLSVAISLIGDPKVVYMDEPSSGLDPASRKNLWKAVKSAKQDRTIVLTTHSMEEADVLCDRIGIIANGSLQCIGSSKELKDRYGGSCLLTVTTPAGGQEEEEVERLVQSISPAANRVYRVSGTQKFEMPKRGMKISAVFQAMEQAKSSLDIVAWGLADTTLEDVFVRVAKQTDMSTVT

SEQ ID NO: 222725 - protein, 511 aa, Zea Mays
MASNAYLHLKGNGLKMPFEFVKEMPRAAIPIHDGQFDLAPYIGQLPFVWTMELLFPVILTNLVYERQNKLRIMMKMHGLGDLPYWTISYCYFLLLSLLYVLSFVLFGSALGLTFFRQNNYGMQFIFYFAYMNLQISFAFLMTTYFSSVRTATVTGYLYIFVSGLLSQFMFRPYVEDSNISRIWITLMELLPAFSLYRIVYEFSRFAQAQPENYMASSGIQWADMTNPESGLAGVLTIMAVEWLLFLLFAFYLDHFRSYKDGIRKAAALVRSRIHGNHSEAAQQQNVQLQEFRASIQLERTDVLKEREIVELISKESDRSYSVICDNLGKVYRGKDGNADKIAVRGISISMSRGQCFGVLGPNGAGKTTLINMLTGFCKPTSGTALLWESLTGREHLLFYGRLKKLKAAALFELGPTRHIPKSPIEQQREIHRKNPCAAALGSRRRWWSPSPWRRAALPLPWPQTPSATRLLLARSPVDIAAAGGRRGGARRCPCRGSRRSRPRGCSSLGAR

SEQ ID NO: 222726 - protein, 422 aa, Zea Mays
MKAAVSSAGESAGELLLRAAALVPWTRYFLAALALAAVLLYRFLELHLLGDLLRGLRGGRVSLTFHPESQVYHRVASKCRSLHGRYLTTPWLASPHLQTLFLSISGRPPSFTYRRQLYTVRDGGTIALDWLLASDLEDGDIGTSDGTISKDDSTPLLVVIPGLTSDSSAAYVKHLVFSMAIKGWNVVVSNHRGLGGISITSDCFYNAGWTADMREVVSFLHQEYPKAPLFTVGTSIGANIVVKYLGEEGENTPVAGAASICSPWDLLVTSKFISRKLVQRCYDRALAIGLKGYAKLHQSVLARLANWEAITSSHSIREFDRHATCVVAKYETVDTFYRKCSSANYIGNVSVPLLCISALDDPLCTREAIPWDECRANKNIVLATTPNGGHLAFFEGLTAGKLWHKGTICTHRWNHQLTRAHM

SEQ ID NO: 222727 - protein, 452 aa, Zea Mays
MEPSPAQAGASDRDRSPPPPPPPPSQSSTAATISSPLAVVCSFWKDFDLEKERSGLDEQGLKIAENQETSQKNRRKLAENTRDFKKASSDEKLSLLNSLLKSYQEEVDNLTKRAKFGENAFLNIYQKLYEAPDPYPALASMTDQDQKLSELETENRKMKLELEEYRAEAAHLKNQQATIRRLEERNRQLEQQMEEKVREMVEMKQRSMAEDSQKTLEALKDRERSLQDQLRQATESVKNMQKLHESAQSQLFELRTQSEEDRAAKEVEVSLLMDEVERAQARLVSLEREKGDLRSQLQTTNEDASKSSDYLESSDILESSLNAKEKIISELNAELRNIESTLSSEREMHVNELKKLTTLLTEQESALMELKKELQERPTQKLVDDLKKKVQILQAVGYNSIEAEDWELATNGEEMSKLEALLLDKNRKMEHELTQLKRKQVFLRKLKKGLLN

SEQ ID NO: 222728 - protein, 218 aa, Zea Mays
MGLLIPARPEQCTLSRIVSLITVGVVIVVCTYVTSSPAGGDAGKEEFFSIWHRRSSDMDVMWLRNPFPKLDRGEGEDLLISADKFNGMPHDYAGNELNTGFFFVVSNDRTVALFDEWHAARQVSAGMKEQDVLNRMKRRGAFRRLRVGARVLDTARFSGFCQDSRDAAQVATVHANCCRTKRAKVADLKAVLRAAEGLNRTRMEIKWPAHSECVKSWL

SEQ ID NO: 222729 - protein, 505 aa, Zea Mays
MASPQESNSLCLKRKLVDDCLSKDCKSRRVKSENEPSSDSFAKRCNCCCTRPNLANDCVNFLKSGAPNRVMYYKKGSWHNFPEQIMNSLIDEFKGNKSSVVSVMDDEPILVDFLSMTLVNLKTRKQRSVAWFDDTGKRFFPSLFFDEESDEMPKQDSGNVNNTAQGIMLDKVTSSPPEVVKQVVLESSPPVPQKPSTVDVLRKKITSVERGSEGFLFVQDLFLSGMNPFATPNNILHVHRYSPNDITAQCRFEAFERQMKSTKEARGDANVKYGWLGSRKSDIVRILINGLGTTANPVEKAGLSAGVYLSPENRAFTSVGLCDVDEKGVQYMLLCRMILGNVEAVEPGSQESFPSSEIYDSGVDDCSNPKCYVMWPSHLSTHIRLEYLVSFKLAPKVRNYLLDLKGLWFNPSLKELGTDICTLQPVMCETGEGPTSPWISFRVLFAVIQDNISSVARELIFHHYEELKESIITREEMVKKMIIVVGEKVLLEALKKLHYCCLVIL

SEQ ID NO: 222730 - protein, 147 aa, Zea Mays
MPLFGSNSALDWANFNAQAFSDESLSFDEECSRTSSVDCGLHESPITNTASSISKITLPQSVPHVLGVGQLLESALHVAGQVAGASVSTSPLPYGTMTSQCEALGLGTRKKLSSWLVNGHESTPDNPMPSLPTAHHSIIPKVRRRHI

SEQ ID NO: 222731 - protein, 1093 aa, Zea Mays
MPLPLSSPRDSQVTHAPLHSVHYFHLIATTTSTWNLEERETMACRPPCPCGCFCFYMVFFLGLLLVEAVHGTGRSEVAAAAPTPSLVPAEASVLRRIAARLGVSSWDFTAGAGPCDHGDSGVHCDCSFSNGTVCHVTEIFLKGQNFSGELPPDFADLPYLLQLDLSRSLFHGGVPHQWARMKLQGLSLMANRLSGPFPMVLTKITTLTNLSIEGNEFYGPIPPEIGYLIRMEKLILSTNEFTGPLPAALSLFSNLTDLRISSTNFSGRIPDFWGNLKRLDKLQIEGSFLEGPIPSSLSELKNLSDLRISDLRGSGSSFPDLSGMTYMNKLVLRNCSISGSIPPYIGTWTSLKHLDLSFNKLSGEIPPSFASMGAVDYIYLSGNSLTGNIPGWLLRRNKIADISFNNFTMGSSGPSQCLQGSVNLVESYSAEVNRLNSIHPCLKRNFPCVASNGQYHSSLHINCGDKEATINGTKYEADTTPKGASLLYVSPGLNWAFSSTGNFMDDNINDDNYIATSASKLAVPNSDLYNKARLSPLSLTYYGLCMLSGSYTVNLHFAEIVFTNDSTYYSLGKRRFNVFIQGRMVLEDFDIEQSSGAAAKPVTKTFQTYVTNHTLEIQFYWAGRGTTGIPYRGSYGPLISAISVTPNFQIPLAVDPPKAGSREKRSSRASIALGIGIPIVAIFTALILGIYCIKKQRKSSMHEELRALDLQIGSFTLRQIKAATRNFDAANKIGEGGFGSVYKGLLSDGTIIAVKQLSSRSKQGNREFVNEIGMISALQHPNLVKLYGCCTEGNQLSLVYEYMENNCLARALFVEQYRLRMDWGTRHKICLGIAKGLAYLHEESAIRIVHRDIKASNILLDKDLNAKISDFGLAKLNEDDHTHISTKVAGTIGYMAPEYAMRGYLTDKADVYSFGVVVLEIVSGKSNTNYRPKEDFVYLLDWACVLHERGTLLELVDPDLGSNYSTEEALLMLNVALLCTTAAPTLRPKMSKVVSLLEGSAPLQPLLSDLSLAANSLSSSGVRRNFWQNPVKDQFQLGDEPVPIRYSITRLTSIILPNIKAPSQKYRCPLQQMFWNTTYKVEEFEDISSASPC

SEQ ID NO: 222732 - protein, 566 aa, Zea Mays
MACRPPCPCGCFCFYMVFFLGLLLVEAVHGTGRSEVAAAAPTPSLVPAEASVLRRIAARLGVSSWDFTAGAGPCDHGDSGVHCDCSFSNGTVCHVTEIFLKGQNFSGELPPDFADLPYLLQLDLSRSLFHGGVPHQWARMKLQGLSLMANRLSGPFPMVLTKITTLTNLSIEGNEFYGPIPPEIGYLIRMEKLILSTNEFTGPLPAALSLFSNLTDLRISSTNFSGRIPDFWGNLKRLDKLQIEGSFLEGPIPSSLSELKNLSDLRISDLRGSGSSFPDLSGMTYMNKLVLRNCSISGSIPPYIGTWTSLKHLDLSFNKLSGEIPPSFASMGAVDYIYLSGNSLTGNIPGWLLRRNKIADISFNNFTMGSSGPSQCLQGSVNLVESYSAEVNRLNSIHPCLKRNFPCVASNGQYHSSLHINCGDKEATINGTKYEADTTPKGASLLYVSPGLNWAFSSTGNFMDDNINDDNYIATSASKLAVPNSDLYNKARLSPLSLTYYGLCMLSGSYTVNLHFAEIVFTNDSTYYSLGKRRFNVFIQISKFHWLLTLPKLEVGKKGVQGHLLL

SEQ ID NO: 222733 - protein, 253 aa, Zea Mays
MGDHEGHGVDFEKKADQKLSGWGLFGNKYEEAADLLDRAGSFFKLAKNWSRAAAVYKKIADCHLQGDNKHDAASAYVEAANCYKKFSLQDAAQALNSAVNLFQEISRLNMAARYSKDIGEIYLQEQDLENAAVYLNRAADLFDSEGQSSQANSMTQKIAEIYAQLEKYQKATELFEEIARKSINNNLLKYGVRGTLLNAGICQLCRGDVVAINNSLERYQDIDPTFSGTREYKLLAVPYNTHIPFVHCVHHDT

SEQ ID NO: 222734 - protein, 362 aa, Zea Mays
MPTRVAAGGLLLRVPVPDRHRAGRRQAVRAGFRGGPVRRGAPGGARLPRVPIQLVVLLHGHRHLRVSLRGGLHPGVRRVGARLRRPLRHRALRLPRLPVGHPDVPPVRTHAGSQVPVPPPGTRPGRQRQQNRRPLRLAFGGGGSGSRRAGRTLDRHIGDGLELPPAALQTLGPASILLFVPVYDRAVVPALRWATGNPSGLSMLQRVGAGMAVSLAGVAVAALVEARRLAMAREHGLVDDPSATVPMSWAWIVPQYAMMGVADVLAVVGLQELFYDQMPDGLRSLGLALYLSVMGIGGFISSLLISLIDGVTGSGGGDSWFADNLNRAHVDYFYWLLAGLSAVELALFLYFARSYVYKHKPN

SEQ ID NO: 222735 - protein, 486 aa, Zea Mays
MTLVRMPCRLCCFLLVVAASAVSGRGRVVTTLPGYEGRLPFHLETGYVEVDEDAGAELFYYFVRAESGADDSDTPFVLRIPGGQRCSAFSGLAYEIGPIMFVVEPYNGSLPRLRYNPNSWTKVAHILFVDSPVGAGFSFSRDAKGYNAGAVSTTLHLAKFLNKWFNDHPEYHANPFYIDGESYAGKIVPFLAQMISEGIGAGMKSAPRLKGYLVGNPSTEERIDVSARVPCAHGFGIISHQLYEMILGHCHGEDYSNPAKELCGQALKTFNDLTSEVAQGHVLQEKCVAASSSPVLNANSRVAGGSSSWASDGRKILREEEMVGRRGVLGKLFHPPALPPFSCRVYRYYLSYFWANDRRTRDALGIKEGTVDEWVRCHNDDQELPYESELKSVVKYHRNLTSRGYRAMVYSGDHDLLVPHLGTQAWVRSLNFPVVDDWRAWHLGGQSAGAPGIQHLSTSRRGVSPCSAVGSSTGHSNPSVNEEIRV

SEQ ID NO: 222736 - protein, 120 aa, Zea Mays
MIPPATPSPCSRSTLPRPAILCPVILAPARRSCACRPHHPCMSALGLPPSRVAMYTIASPFSTGRNSSLFLSLPQEGWIRRHIARRDSWINLVLNRCPVGWFLPQAPMAGCPGARGSAQC

SEQ ID NO: 222737 - protein, 150 aa, Zea Mays
MVPVHNAVPSDLSVKDERELKREKRKQSNRESARRSRLRKQAETEELATQVESLAAENTSLRSEIGQLTESSEKLRLENSALMVKLKDTAEPSPIKASASPSSPRASAENFLSMIDSANAPSVSRHTEHGGPRLRQLLDSSPATDVAAVS

SEQ ID NO: 222738 - protein, 1022 aa, Zea Mays
MPMDPSAFQIIECAEAPNTGVVSSKFALNVACDSPMDLNLTNVGTSDNILYTSEFAVPGRTEDRSMQVDFHDAKAALHKPNLPLEVVDTDTHDLQSSRNTESTILPSFGDDPMKDSSGALNNGLGRSTSSQVTELTHLHRSHPPADYNPFSLHSHDSPSVSGNSEHSVPTALTLGNNIYFSSAESEGQPEENHNLLDVNLGFDVTTTEFGNVVKRKGESGNDLMNAGSQNWLTLPLTVSCLDNASAVSNGRIGLEQIVDEGVPVICQDHDIMLDIDQRGSIDVLSGQDHNLKLCGISIPQAVLLATEERNKDVDDEIVRPGSSINSVNVLDKYSYCTVGKPIDNLSRPILLSSQSADVPGRDLASQISVDSDHTYHGSTEDPVGMSSTTPDSVSSWIEAIVPEANKEHQSCKSSLLPICSSEKVSAPKEDSKKALSDSVVNSVVKSPPRINIASSTVLKVPTKQVALPGSLLEPPRLNQNARNRTWRRDNASSSNSSLHVSQTSGLPPKLPLKKNSKSQNSYIRKGNALIRNPANGNHLHSSSSLDSQNKLSKPVMRRSMNFVRNVDSKDAAHSHISVERPKTPPLPLHTKSISCAVNVLEPLSQNLQQQVLETEKEDSSGQVNSGADNLSIISLHKSEALDAGKAIYVRPKLNQLVAQGRHLGESSNISLDKVTLLQPSATSDLYFKKRKNQIILGPSTSDAPSSKDTFQAENIKSGESKVLMSSSSNNNITVAKDRLHKALQTTNTVRSFSHVWTLNGQNPRKKSYVGASHMKVLPRILPWKRKIFCQNFRGSYSSLLNTSSIGIMRKLLQTRKRSTIYTVSTDGFSLRKSGVLSIGGSSLKWSRSLEKHSRKVNEEATQAVAEVERKKREKRKRQSLRSKGRNDRYSASVAANQLTNRSRASSDSRVSSTCNEYVRVNKGNQLVRNPKKVIRMLASEKVRWSLHTVRTRLAKKRQYCQFFTRFGECKKSGGKCPYIHDRAKVVICTKFLKGLCSSTSCKLTHKVLPERMPDCSYFLQGM

SEQ ID NO: 222739 - protein, 304 aa, Zea Mays
MALKSIRVCGPRYWPQVIKLAPEDKPWWRSGDKTNPFNGGVLYIKRKVGSCSYSDDPIGCQSLISRAMHEVCDAPSASCSNQPNSTNGSYFRVDQLVSTFSANPSLIAFAKLCSVSWKSRCNSNFQEFCSQVLYECMSKDRPSLLQAYISFYTTIELMWEHLKTGNFPFYNSLFLPNLKVALAYNEALVDSRITNGGIIHSTFLESLMKRVGDIFAELPNLKDNLHRYLSTGTWPDTQNDVVVLSWYLQWYNIPPAHVVASAVEKVRPRVPAGVSMLPLLRLLLPTTHLVGLMEIEKVQIVMEC

SEQ ID NO: 222740 - protein, 567 aa, Zea Mays
MGNTCIGPSAPSDRHSFFNTVSLAVLWRPPAAADRAEPSPTAEPSSSTPCSPPSRAPNPVTISDSEHPPHSTSTALGPAAPPNPNGKPKPKPKVKRVQSAGLLAGSVLKRDSERLKDVYTLGKKLGQGQFGTTYQCVEKATGKHFACKSIAKRKLVTDEDVEDVRREIQIMHHLAGHPNVVSIVGAYEDAVAVHLVMELCAGGELFDRIIQRGHYSEKAAAQLARVIIGVVEACHSLGVMHRDLKPENFLFVNQKEDAPLKAIDFGLSIFFKPGEIFSDVVGSPYYVAPEVLKKRYGCEVDVWSAGVIIYILLSGVPPFWAESEQGIFKQVLKGGLDFSSDPWPSISESAKDLVRKMLNRDPRKRLTAHDALCHPWVCVDGVAPDKPLDSAVLTRLKQFSAMNKLKKMALRVIAENLSEDEIAGLKEMFKMLDTDNSGQITLEELKIGLKRVGANLKDSEITTLMEAADIDNSGSIDYGEFLAATLHLNKVEREDNLFAAFSYFDKDGSGYITHDELQKACEEFGIEDAHLEDIIHDVDQDNKGNNPLGKKGHCQMSFGLREALKLG

SEQ ID NO: 222741 - protein, 154 aa, Zea Mays
MFKMLDTDNSGQITLEELKIGLKRVGANLKDSEITTLMEAADIDNSGSIDYGEFLAATLHLNKVEREDNLFAAFSYFDKDGSGYITHDELQKACEEFGIEDAHLEDIIHDVDQDNDGRIDYNEFVTMMQKGNNPLGKKGHCQMSFGLREALKLG

SEQ ID NO: 222742 - protein, 250 aa, Zea Mays
MAKIADSMMKHILVPAISNIHVSVLVECGPEHTVSVLSVVHSEENKDNRDGSNLYSRIVDVIKFVCKFICMENSKWVQFFAKLTWPRISDLVITHFLSKAVPNEASKLIEFQDVVQSTTEFENKLRSMMFLLPDRKDGKLTQFVDDVEVHFAVRKRSEILVKARNILVQYDYDSPLESGDQGDSVVDLLFQPEKCFTSKSALLVMKLVHGALKDASLSSARVAKEFCFAARDVLLLYRAIVPVQRSNLIA

SEQ ID NO: 222743 - protein, 104 aa, Zea Mays
MFICSSYNYSWFRCEGFSTYPRTYDLIHSNGIFSLYQNKCQFEDILLEMDRILRPEGAVIIRDKVDVLVKVEKIANAMRWKTRLADHEVTEMQKTCQKDQLALH

SEQ ID NO: 222744 - protein, 224 aa, Zea Mays
MAAMMMATSESKSPARALRRLAGAAVAAVLLRRTFSASKCKTEARMATARMKLLRNRREAQVRQMRRDIAALLRDKQEDTARIRVEHVIREQNFMAANEIIELFCELIVTRLPIIAKQKECPADLKEGICSLIFAAPRCSELPELGRIRDIFEKKYGKDFVSAAVDLRPDAAVNNLLIEKLSIKKPSGQIKLKVLKDIAKEHQIDWDTAESEQELLKPPEELIL

SEQ ID NO: 222745 - protein, 423 aa, Zea Mays
MKGRPLFKSPLPRSYLSETSSVASAAVATHRVYQVWRGKNRFLCGGRLIFGPDASSIVLTVALIMTPLALFVAFVSFRLAELIGKPLGTAVPATAMAVGIFDVVVLILTSGRDPGIIPRNARPPEPDAAATESFSGSPAAMGASASWSLPPTRDVYVNGVVVKVKYCHTCMLYRPPRCSHCSVCNNCVERFDHHCPWVGQCIGRRNYRFFFMFISSTTFLCLYVFGFCWVNLLLISRRYGVSFGSAVAESPVSGCLIVYTFVTAWFVGGLTAFHSYLVCTNQTTYENFRYRNDFRAKVSPADPDAAALYYLGPLSSESRISFYTRASLSFDMAKASFDLNYSAKRTSVASSDFSDIYGGGHGALDRVSTAHQQPRHSIFGGPGRESKKAEDEADAVTAELGATMHMRYGAAAGRTRGREFEAV

SEQ ID NO: 222746 - protein, 93 aa, Zea Mays
MSTYPRTYDLIHADSVFTLYRNREKILLVVKTYWTTHEAMTKISSRTVNTCSDRKFNMWGKEGSINDMKEHCFWSQIMERKGPTVEMAEWCQE

SEQ ID NO: 222747 - protein, 296 aa, Zea Mays
MAGLSLRCGDCGAQLRSVEEAQAHAESTNHANFVESTEAVLNLVCSNCGKPCRSHTEVDLHTKRTGHTEFADKTAEAAKPIDLEAPLKPASDDATDVDASASATEETQETVVPEVNKEVLTDLEGMGFSTARATRALHFSGNSTIECAINWLSEHQEDADIDEMPLVPANSKTEVNKPSLTPEEMKIKAQELRERARKKKEEEERRMEREREKERVRIGKELLEAKRIEEQNERKRMIELRRLEKEEEKRAREKIRQKLEEDKAERRRKLGLPPEDPAAAKPSAPPPVEEKKVKTR

SEQ ID NO: 222748 - protein, 298 aa, Zea Mays
MAGLSLRCGDCGAQLRSVEEAQAHAESTNHANFVESTEAVLNLVCSNCGKPCRSHTEVDLHTKRTGHTEFADKTAEAAKPIDLEAPLKPASDDATDVDASASATEETQETVVPEVNKEVLTDLEGMGFSTARATRALHFSGNSTIECAINWLSEHQEDADIDEMPLVPANSKTEVNKPSLTPEEMKIKAQELRERARKKKEEEERRMEREREKERVRIGKELLEAKRIEEQNERKRMIELRRLEKEEEKRAREKIRQKLEEDKAERRRKLGLPPEDPAAAKPSAPPPVEEKKCEVTSH

SEQ ID NO: 222749 - protein, 440 aa, Zea Mays
MPHAFSDPLLKNLNDLPASNLSLPAGSYITQSFSQKICHTNELERTISRTGPAFECVKPPDIARADESNYLVSNHIDQRYNQGIIGPASSQPPVYYQDESLSSNVTQKCHDGYHVVQQQDKFFHQDKSAGPIIAPWNNFVQTGLIYNAHGAKLPSDNLDALESSVPKPMHATDHSLSYLLNVSQGDNSESGSHVEKLNSGPVTKDYGTTGYVHGTDKVAPNPQDLLHIKSSEAFITQRSMGNGESGVYQNDNLHKSSVLHTGLIDTDPSVNLHDNGGLSVSSSQNPVVDCVSRREDPLRDWGNIACSEGIIGCDHTTTDNEHIKLAHRLHDNVQMNVPVIVEDVTDNVPSGIPSSRPVVPQVVMAAEEHQEVILSSQKDDDSRTNRPELANEDHDGVADGSISDAVVAELEASMYGLQIIKNGDLEELRELGSGTFGTVY

SEQ ID NO: 222750 - protein, 600 aa, Zea Mays
MEGSNHGQTYCQDNVIFMQDGRYHRRRGFIVDIFMSDMSGKNSLYKKAYVFFSSPVQRELVAHIKKDSTVLTRISALSEMNLEYFAIDSQGFITDHDKALEELFSEDAEGSHKYNACLNTMATRIATVFASLREFPRVHYRVARTIDASTLTTLRDLVPTKLAASLWNSLVRFKSTIPEFPQTETCELLIVDRSIDQIAPIIHEWTYDAMCHDLLCMDGNKYVQEVPSKNGSANEKKEVLLEDHDPVWLELRHAHIAHVNETLHEKMTSFVSKNKAAQLQQARSGGELSTKQLQKMVQALPQYSDQIDKLTLHVEIAGKLNNIIKEHHLKDVGQLEQDLVFGDAGTKELISFLRTRMDVSREHKLRLLMIYASINPEKFFESEKGAKLMQLAGLSADDMIVVNNMRCLRGADSKKSSVGAFTLKFDLQKKKPGIRKERTGEESTWMLSRFYPILEDLIEKLSKGELPKDEYHCMNDPSPSFRGIPGSTSARTSPAHQPAQSMRSRRIGGTWARPRNSDDGYSSDSVLKHASSDFRKLGQRLFIFVIGGATRSELRVAHKLSGKLKREIILGSSSLDDPPQFITKLKMLSTEELSLDDLQI

SEQ ID NO: 222751 - protein, 824 aa, Zea Mays
MVTEMAARGGEAAAFGAEADRGDFEVFRSGSAPPTVEGALGAAAAAADLLVDDDLRADPAYQSYYYSNAHLNPRLPPPLLSKEDWRSSHHRLRSAAFGGIGDGRRQQQPAAQGTVGLPGIDLARQRSFSTVFQEDSYQRDMDRQTASHNSSESLCSSGIQYGLNRGPGTIGGLHSSNSLRSLDEIPNNDLPSNTFASLLGSSLSRSASPDPELVRRAPSPSLPPIGVKVGNTDKMNGGSSSFRRSSSAIGGSDDLVAALSGMNLSSRAMSGQTMDQSQLYQDVDNVQKFLFDRQGDQPNGNQQHYMRRPEHGQSKLSDGYSANLANSSTMRNQINSGSFTSFDSLSLGSGFPSPRIGSRSPGGTVSSRQNLAGMSNMLNYNGIGSPTASPSLQTSIDPAYIQYLAQIAATWDDPLMDRSHLGSSYMDLLGSPLRHGDRNMRFPPGMRNFGNSFGSWNSGMSGKMDANLMPSLLEEFKSNKSKSYELSEIAGHVVEFSADQYGSRFIQQKLETASTEEKDMVFSEIMPQALTLMTDVFGNYVVQKFFEHGSTAQIKELAGQLIGRVLALSLQMYGCRVIQKAIEVVDLDLQTKMVAELEGHVMRCVRDQNGNHVIQKCIECIPQHAIEFIVSTFYGQVVMLSTHPYGCRVIQRVLEHCDDPKTQQIMMDEILQSVCLLAQDQYGNYVVQHVLEHGKPHERSAIIEKLIGQVVQMSQQKFASNVIEKCLAFGNPVERQVLIGEMLGSTSESEPLEVMMKDQFANYVVQKVLETCDDQQREMILTRIKTHLNTLKKYTYGKHIVARVEKLVAAGEKRLGLQPACTAA

SEQ ID NO: 222752 - protein, 735 aa, Zea Mays
MVTEMAARGGEAAAFGAEADRGDFEVFRSGSAPPTVEGALGAAAAAADLLVDDDLRADPAYQSYYYSNAHLNPRLPPPLLSKEDWRSSHHRLRSAAFGGIGDGRRQQQPAAQGTVGLPGIDLARQRSFSTVFQEDSYQRDMDRQTASHNSSESLCSSGIQYGLNRGPGTIGGLHSSNSLRSLDEIPNNDLPSNTFASLLGSSLSRSASPDPELVRRAPSPSLPPIGVKVGNTDKMNGGSSSFRRSSSAIGGSDDLVAALSGMNLSSRAMSGQTMDQSQLYQDVDNVQKFLFDRQGDQPNGNQQHYMRRPEHGQSKLSDGYSANLANSSTMRNQINSGSFTSFDSLSLGSGFPSPRIGSRSPGGTVSSRQNLAGMSNMLNYNGIGSPTASPSLQTSIDPAYIQYLAQIAATWDDPLMDRSHLGSSYMDLLGTQKANLGPLLQSQKQYGYCGNLGFNLGGYAGSPLTSPVLPSSPIAPGSPLRHGDRNMRFPPGMRNFGNSFGSWNSGMSGKMDANLMPSLLEEFKSNKSKSYELSEIAGHVVEFSADQYGSRFIQQKLETASTEEKDMVFSEIMPQALTLMTDVFGNYVVQKFFEHGSTAQIKELAGQLIGRVLALSLQMYGCRVIQKAIEVVDLDLQTKMVAELEGHVMRCVRDQNGNHVIQKCIECIPQHAIEFIVSTFYGQVVMLSTHPYGCRVIQRVLEHCDDPKTQQIMMDEILQSVCLLAQDQYGNYVVQ

SEQ ID NO: 222753 - protein, 402 aa, Zea Mays
MGLSGATISAPLGCCVLRCGAVGGGKALKADAERWRRAGWSRRVGGPKVRCVATEKHDETAAVGAAVGVDFADEEDYRKGGGGELLYVQMQSTKPMESQSKIASKLSPISDENTVLDLVIIGCGPAGLSLASESAKKGLTVGLIGPDLPFTNNYGVWEDEFKDLGLESCIEHVWKDTIVYLDNNKPILIGRSYGRVHRDLLHEELLKRCYEAGVTYLNSKVDKIIESPDGHRVVCCDKGREIICRLAIVASGAASGRLLEYEVGGPRVCVQTAYGVEVEVENNPYDPSLMVFMDYRDCFKEEFSHTEQENPTFLYAMPMSPTRVFFEETCLASKDAMSFDLLKKRLMYRLNAMGIRILKVYEEEWSYIPVGGSLPNTDQKNLAFGAAASMVHPATVVRSLSE

SEQ ID NO: 222754 - protein, 228 aa, Zea Mays
MLIHRTIATSDSILDKAIDSEDAQHHDFLRLDHVEGYHELSAKTKIFFSTALGIWDADFYVKVDDDVHVNLGMLATTLARHKLKPRTYIGCMKSGPVLADKNVKYHEPEYWKFGEEGNKYFRHATGQIYAISKDLATYISINQPILHKYANEDVSLGSWFIGLEVNHIDERNMCCGTPPDCEWKGQAGNVCVASFDWSCSGICKSVERIKDVHARCGEGDSAVWSALF

SEQ ID NO: 222755 - protein, 677 aa, Zea Mays
MSDLIGSFMAYPKKDGPIEKSLRRQTSSTDLRTRGSDGSSSTPSLKKNASVSSDMSDLASQGSGNPVRRTGSWCFDEKVLIQSLYKVMVSVSENGPIILYIRDVDHFLWKSQRIHSMFQKMLAKLSGQVLILGSRLLNPDADNRDADERISTLFPYHVDIKAPEEETHLDCWKSQIEEDKRKIQMQDNRNHIIEVLSANDLDCDDLSSICEADTMVLSNYIEEIIVSAVSYHLIHNKDPEYRNGKLMLSSKSLSHGLSIFQGSHGGKDTLKLEETKDGLKGALGSKKTETLPVGEGPVPLPKPEVPDNEFEKRIRPEVIPASEIGVTFDDIGALADIKESLQELVMLPLRRPDLFKGGLLKPCRGILLFGPPGTGKTMLAKAIANDAGASFINVSMSTITSKWFGEDEKNVRALFSLAAKVAPTIIFVDEVDSMLGQRARYGEHEAMRKIKNEFMSHWDGLLSKTGEKILVLAATNRPFDLDEAIIRRFERRIMVGLPTTESRELILRTLLSKEKVDEDIDFKELAAMTEGYSGSDLKNLCVTAAYRPVRELLKIERERELERREKESKDKAAAAENSEAPESEKKESSETKEARKSTQSPEGGGKGDEGPDSKAEGEKEAAVVDLRPLTMEDLRQAKNQVAASFAAEGAVMNELRQWNDLYGEGGSRKKQQLTYFL

SEQ ID NO: 222756 - protein, 590 aa, Zea Mays
MVSVSENGPIILYIRDVDHFLWKSQRIHSMFQKMLAKLSGQVLILGSRLLNPDADNRDADERISTLFPYHVDIKAPEEETHLDCWKSQIEEDKRKIQMQDNRNHIIEVLSANDLDCDDLSSICEADTMVLSNYIEEIIVSAVSYHLIHNKDPEYRNGKLMLSSKSLSHGLSIFQGSHGGKDTLKLEETKDGLKGALGSKKTETLPVGEGPVPLPKPEVPDNEFEKRIRPEVIPASEIGVTFDDIGALADIKESLQELVMLPLRRPDLFKGGLLKPCRGILLFGPPGTGKTMLAKAIANDAGASFINVSMSTITSKWFGEDEKNVRALFSLAAKVAPTIIFVDEVDSMLGQRARYGEHEAMRKIKNEFMSHWDGLLSKTGEKILVLAATNRPFDLDEAIIRRFERRIMVGLPTTESRELILRTLLSKEKVDEDIDFKELAAMTEGYSGSDLKNLCVTAAYRPVRELLKIERERELERREKESKDKAAAAENSEAPESEKKESSETKEARKSTQSPEGGGKGDEGPDSKAEGEKEAAVVDLRPLTMEDLRQAKNQVAASFAAEGAVMNELRQWNDLYGEGGSRKKQQLTYFL

SEQ ID NO: 222757 - protein, 1233 aa, Zea Mays
MSIHICKNGYMPGYEVWVHHGWVTRRSRSTGVGLLMAVRGSTYMIRQYIKEPGFNVANEMASINQEIRQIGRMMVISGNILEPPEWILQAQDLACDVQDFTDIYTWLQSKSRRRALAHIGYIAQLKDRISSLREWQQRGGSSSSSSQQERAAALSFSRRSCGPCAPEDVLVGIDQPRKELSDLIFEREDVVHIVQQKPRVVSVVGYSGIGKTALARAVYYDRSVRSAFDDVAWVVASECSHGCDLVSKICQQVKDEQAGNGAVVVPDCYRLKEIMRDKRFLIVIDDLHGAGMWNDIKGVFSETHSGSRIIVTTSIQSVAAACTPEPRYIYRMPSLGNLDSEKLLWMRVGRHASRTPALEHALGNDTLKKCGGLPLALISVANHLCLGKALFEEMDRVLAKCYDSLPDNAHRMCLLSLSTFPQGHVMKRKRLIRRWIAEGLAVVGDCELSAEQVAGNIFDVLIDRNVTEPVLTAGHGSRSKVKACLVLGVIKDFINKTAVSNETVAIIQNDELLLPNRMLVAHRPVRRLLVHGGTTKKSEAVAKAIGLDQVRSLTICNAVPFDFQGCWLLRVLDLEACQGIDKSILGSICKLVFLKYLSLRGTDVYGIPKKVKKLQCLETLDLRDTRVEELPIQVLMLPRLAHLFGKFELPPQLKHGHRTARRRRSRLQAFFSQRSRLQTLSGFVMVDDSNSFEHMMITIKSLRKVKVWCKNSISSHQERHLASSLQQRLVAGNSNPLESLSIDFGNESINFLNDVGAISALIGSMKLQGRLTSLPSFMTSYDTTLSQLQLSSTGLGIEALSLLQILRRLVSLKLAQDGDGFWGDCFAVKKDGFPSLLRLCIQARELPQLHIHEGGMSSLTSLELLCPMFASRGQSDSDSDSDSDNLSPVAFRYAYAETYSEKRSKQVLSVEKPKAVDPGISFKEPSSETRSEGTEIQEIDSPKTSKEAGPSIGFKEPSSETRSEGTEIQEIDSPKTSKEAGPSIGFKDIILPENTFRRNFSKQVKSRFDLKQHFKGMEYLQCLNELVLHRSVSDEVLDAWTKRASSHINRPKVTRQCTRAALSIGRGPGTAKHEKEGQHRSQLMKNRGSETAIHEEVAEQHSSVETSREEAGLFQEQTSDTSHKEEEEEEGEGEEEEEEEEEEEEEECTSEVGAGKHSSVGTSREEAGLFQEQTSGHKEEEEEYMSEDWALSQPCDMLIGNRMTVRCLGWPDSWRLRSGMISSPMLICRPLGP

SEQ ID NO: 222758 - protein, 1177 aa, Zea Mays
MSIHICKNGYMPGYEVWVHHGWVTRRSRSTGVGLLMAVRGSTYMIRQYIKEPGFNVANEMASINQEIRQIGRMMVISGNILEPPEWILQAQDLACDVQDFTDIYTWLQSKSRRRALAHIGYIAQLKDRISSLREWQQRGGSSSSSSQQERAAALSFSRRSCGPCAPEDVLVGIDQPRKELSDLIFEREDVVHIVQQKPRVVSVVGYSGIGKTALARAVYYDRSVRSAFDDVAWVVASECSHGCDLVSKICQQVKDEQAGNGAVVVPDCYRLKEIMRDKRFLIVIDDLHGAGMWNDIKGVFSETHSGSRIIVTTSIQSVAAACTPEPRYIYRMPSLGNLDSEKLLWMRVGRHASRTPALEHALGNDTLKKCGGLPLALISVANHLCLGKALFEEMDRVLAKCYDSLPDNAHRMCLLSLSTFPQGHVMKRKRLIRRWIAEGLAVVGDCELSAEQVAGNIFDVLIDRNVTEPVLTAGHGSRSKVKACLVLGVIKDFINKTAVSNETVAIIQNDELLLPNRMLVAHRPVRRLLVHGGTTKKSEAVAKAIGLDQVRSLTICNAVPFDFQGCWLLRVLDLEACQGIDKSILGSICKLVFLKYLSLRGTDVYGIPKKVKKLQCLETLDLRDTRVEELPIQVLMLPRLAHLFGKFELPPQLKHGHRTARRRRSRLQAFFSQRSRLQTLSGFVMVDDSNSFEHMMITIKSLRKVKVWCKNSISSHQERHLASSLQQRLVAGNSNPLESLSIDFGNESINFLNDVGAISALIGSMKLQGRLTSLPSFMTSYDTTLSQLQLSSTGLGIEALSLLQILRRLVSLKLAQDGDGFWGDCFAVKKDGFPSLLRLCIQARELPQLHIHEGGMSSLTSLELLCPMFASRGQSDSDSDSDSDNLSPVAFRYAYAETYSEKRSKQVLSVEKPKAVDPGISFKEPSSETRSEGTEIQEIDSPKTSKEAGPSIGFKEPSSETRSEGTEIQEIDSPKTSKEAGPSIGFKDIILPENTFRRNFSKQVKSRFDLKQHFKGMEYLQCLNELVLHRSVSDEVLDAWTKRASSHINRPKVTRQCTRAALSIGRGPGTAKHEKEGQHRSQLMKNRGSETAIHEEVAEQHSSVETSREEAGLFQEQTSGHKEEEEEYMSEDWALSQPCDMLIGNRMTVRCLGWPDSWRLRSGMISSPMLICRPLGP

SEQ ID NO: 222759 - protein, 455 aa, Zea Mays
MGRSSRACSLLGSAQLLLLLLLSLGSAAAQKGSTWKTLSGKAPVIVAKGGFSGLFPDSSDFAYRILGTISSPDTVMWCDVRLTKDGDGICLPSINMDNCTMIDNVFPEGKKTYNVNGVSTVGWFSVDYTSTDLLPNVTLKQSVLSRTPVYDGSMLINSVENVFTSFNASAVWLNVQQDSFYSQFKLSMRNYILSLSKQFITDYISSPEVNFLTSISGRVSKKTKLVFRFLDEGSIEPSTNQTYGSMLKNLTFVKTFASGILVPKSYIWPVTPDNYLLPYTSVVDDAHKAGLEIYAADFANDFTISYNYSFDPLAEYLSFIGNSAFSVDGVLTDFPITPSEAVGCFSNLNNSKIDHAKPLVISHNGASGDYPDCTDQAYEKAVADGADVIDCPVQVTKDGILICMSSVDLMDVTTVGKSSFTSQVTTINDLKAGPGVFTFNLTWDDISKNLQRKLI

SEQ ID NO: 222760 - protein, 319 aa, Zea Mays
MSSVDLMDVTTVGKSSFTSQVTTINDLKAGPGVFTFNLTWDDISKNLQPMISNPMSTYKLYRNPRNKNAGNFMRLSDFLTFAKGKDLSGIMITVEHAAFMAEKLGFGVVDAVVKALDDSGYSKQTAQNVMIQSTNSSVLKKFKQETKYSLVYMIEEGVRDAAPSSLADIKKFANAVSVSTTSVLPQTHYYLTNQTNKLVTSLQSAGLQVYVYVLMNEFASQPNDFFADATSQINAYVQGAKVDGIITDFPGTAHRYKLNSCTSMGNSAPLFMQPPQPEPALPPVSNTTTAASPSHAALRMRTDVSILIALLMLCASLLI

SEQ ID NO: 222761 - protein, 291 aa, Zea Mays
MCNFYCTGHTFASKLTILLAAMISNPMSTYKLYRNPRNKNAGNFMRLSDFLTFAKGKDLSGIMITVEHAAFMAEKLGFGVVDAVVKALDDSGYSKQTAQNVMIQSTNSSVLKKFKQETKYSLVYMIEEGVRDAAPSSLADIKKFANAVSVSTTSVLPQTHYYLTNQTNKLVTSLQSAGLQVYVYVLMNEFASQPNDFFADATSQINAYVQGAKVDGIITDFPGTAHRYKLNSCTSMGNSAPLFMQPPQPEPALPPVSNTTTAASPSHAALRMRTDVSILIALLMLCASLLI

SEQ ID NO: 222762 - protein, 291 aa, Zea Mays; identical to SEQ ID NO: 222761

SEQ ID NO: 222763 - protein, 70 aa, Zea Mays
MSRYTGTIDAIIKMVRYEGLHGFYKGMGTKIVQSVFAASVLFMVKEELVKLAVLLVASSRTMLITTSKKQ

SEQ ID NO: 222764 - protein, 266 aa, Zea Mays
MSSAAVNGLSGAGGGIIAQIITYPLQTVNTRQQTERSTKKRKARSGASATPASTMYQMLQLIQTEGWSGLYSGLKPSLIGTAASQGIYYYFYQILKNKVEDIAVARSKKGLGDGTVGMLSWLGIAAVAGSINVLLTNPIWVLVTRMQTHTQAKRKILESKRELLLKEMSRANSLEVAVLKDRLVKLESEKARPYGTLQAIQEVYHESGVRGFWKGLIPTLIMVCNPSIQFMIYETLAKRLQSKRSGKQLPKRHLTAMEFQDTSAGG

SEQ ID NO: 222765 - protein, 169 aa, Zea Mays
MRSVEVSFEAVAGAGASQVYTRLALRAMSRHFRCLRDALVAQVRALRKAMGERDGGPAGAAAGATKGDTPRLKVLDQCLRQQRAFQHPGTIDNYPWRPQRGLPERAVAVLRAWLFEHFLHPYPNDVDKHILARQTGLSRSQGEAVEADDRGDVHGRSEPETGRRHKPKP

SEQ ID NO: 222766 - protein, 490 aa, Zea Mays
MKGGRLHRPEPPQTHLAMAAAAAAPPIPAPNPTDDWVDGSWTVDCSCGVTFDDGEEMVSCDECSVWVHTRCARYVRGVHTSFSCHKCRRSKRVPSSADEAEVAELLAELPTHRPPPLYRRWAEVPLPARVHVHGLPGGGDGALFRGAPAFSAALWRCTGYVPKRFGFRYCEFPSWADDNDGADALFALAREKPREMTDDVLISTEPKKEKHYVRSLSCRGKKIDSNQQAMTPLTKAKKREPDSWKNECQQSEGCGIQDSICDDGHAETNMVSSDLLTAKTKKKMEESLEPSGENNNCEQVEISSKDGKKVPMKLEVSSGVQTTSSIVEQEVHSGFVGVEVTMYKQQPEEDHIVCSRPDITSSGPIKVQDIQGLPKQPNQASNLQVVAGVPDLLIGQPKPQTIKTEPSSQENKAAHCVDLVSDDHESNKQGLGDAAVLSIVQKDSSNLKYGSVSHEHLKSEAQNPRHTVAENPNSTLGSAKANRGKQLIVT

SEQ ID NO: 222767 - protein, 782 aa, Zea Mays
MKGGRLHRPEPPQTHLAMAAAAAAPPIPAPNPTDDWVDGSWTVDCSCGVTFDDGEEMVSCDECSVWVHTRCARYVRGVHTSFSCHKCRRSKRVPSSADEAEVAELLAELPTHRPPPLYRRWAEVPLPARVHVHGLPGGGDGALFRGAPAFSAALWRCTGYVPKRFGFRYCEFPSWADDNDGADALFALAREKPREMTDDVLISTEPKKEKHYVRSLSCRGKKIDSNQQAMTPLTKAKKREPDSWKNECQQSEGCGIQDSICDDGHAETNMVSSDLLTAKTKKKMEESLEPSGENNNCEQVEISSKDGKKVPMKLEVSSGVQTTSSIVEQEVHSGFVGVEVTMYKQQPEEDHIVCSRPDITSSGPIKVQDIQGLPKQPNQASNLQVVAGVPDLLIGQPKPQTIKTEPSSQENKAAHCVDLVSDDHESNKQGLGDAAVLSIVQKDSSNLKYGSVSHEHLKSEAQNPRHTVAENPNSTLGSAKVCTSFSGSVSTPPELSHSLASKEPSSGNSDCSKKEELLSPTVSKHDPVKFSEDSSQEVTRYSEKVQLKDSQPSAPKSSQASRIHLSTVKHRLPVSKEQSQKIALTGGTSARSFHGEVPSLQSRNKAAACSSSQKKDKIYQRIINVTQDSSNNSAPTELRASDSAAPLSDEQLALLLHQQLNSSPRVPRVPRCHQAAGAQMLHSTGSSVFSKRYSSHGGRDHAAVIKKRNREDSLKDSEDTKRTEKRHRVSSTEHAPVKNSCRSAENIASEQKIRGICPTGANAGLSKDDLMDTIVSHNLPAF

SEQ ID NO: 222768 - protein, 710 aa, Zea Mays
MRVGHAEYSRNTIHHQSSTMPLARSCLHLLLLFSSIAAAASAATERIPNSTTWPSSCPSYRCGHAVDIRYPFWIDDASNASSSSSSSSSSDCGYPSLRLECRRETPVLPLPSGDYAVTRVMYGDRTVSLFDLGVFSLSNTCPLVGRNLSLPAGSPLSLTPRDANLTFFVHCSFAGVPARHLVACLEGDGRHHSYVFCDGDELAPYAYAGLCQSVIAMPVLRRSLLGTGSTTRSPLDAIVPALNMGFELSWRPEADGECGQCESAGGLCGRRRLAGQHGAWTFACFRAAAAANPALISPKTPGPKGRTSKVVGIVCGVVAVSLLAACFFFVWHKRKRRKQARAPNGFMHSESSLQSYSKDLELGGSPQIFTYEELEEATDGFSDSRELGDGGFGTVYKGKLQDGRVVAVKRLYKNNYKRVEQFKNEVDILSRLLHQNLVILYGCTSRSSRDLMLVYEFVPNGTVADHLHGSRASERDLTWPLRVNIAIETAEALAYLHAVEIIHRDVKTNNILLDNSFHVKVADFGLSRLCPPEVTHVSTVPQGTPGYVDPVYHQCYKLTEKSDVYSFGVVLVELISSKPAVDMSRTHSDINLANMALNRIQNHEVDRLVDPELGYETDDGTKKSIDLVMELAFQCLQLERDSRPSMKEVVVALNCIKNGDSPENKMDRSSSSPKEDAHLLTNSIQYSPDSVIHRFHSQSTTHSAASNASG

SEQ ID NO: 222769 - protein, 683 aa, Zea Mays
MHGCRVPAAGLLLLCPAAMLLLALLLLASLPTTAAAVNTSTLPCEPAQCGNLSIYYPFWLTGTHQRHCGYKAFQVTCEERKVYLKNSYWAYQVLDISYENSSFVVTNVNLPEDGGSFCDLSLIGNASSDLSAAPFKISGRNRELFFLSDCQGQGQARQPSPPSSWAQMNCSDYGDGSAAAKSFAWLAGKYRPDDTLKPPLPLNCTVSSLMPVLGYQGAGPADYDRLMNLGFLLEHNFTAEDCAACASTGDRCSVDPDDDQLVCNCSDGQYWFFCGPKGRTSKVVGIVCGVVAVSLLAACFFFVWHKRKRRKQARAPNGFMHSESSLQSYSKDLELGGSPQIFTYEELEEATDGFSDSRELGDGGFGTVYKGKLQDGRVVAVKRLYKNNYKRVEQFKNEVDILSRLLHQNLVILYGCTSRSSRDLMLVYEFVPNGTVADHLHGSRASERDLTWPLRVNIAIETAEALAYLHAVEIIHRDVKTNNILLDNSFHVKVADFGLSRLCPPEVTHVSTVPQGTPGYVDPVYHQCYKLTEKSDVYSFGVVLVELISSKPAVDMSRTHSDINLANMALNRIQNHEVDRLVDPELGYETDDGTKKSIDLVMELAFQCLQLERDSRPSMKEVVVALNCIKNGDSPENKMDRSSSSPKEDAHLLTNSIQYSPDSVIHRFHSQSTTHSAASNASG

SEQ ID NO: 222770 - protein, 63 aa, Zea Mays
MKGKADTSKKDEGRLRAGGAAGKRKKAAASGKPKRPPSAFFVFMSEFRQEYQALHPGNKSVAT

SEQ ID NO: 222771 - protein, 178 aa, Zea Mays
MVGPNGIGKSTILKLISGDLQPTSGTVFRSPKVRMAVFNQHHVDGLDLTVNPLLYMMKCYPGVPEQKLRAHLGSFGVSGSLALQSMYTLSGGQKSRVAFAKITFKKPHIILLDEPSNHLDLDAVEALIQGLLIFQGGVLMVSHDEHLITGSVDELWVVSEGRVTPFSGTFKDYKKMLK

SEQ ID NO: 222772 - protein, 742 aa, Zea Mays
MVMSESDDDDDEPQLNAVESYYFVDSTNDNEPVCFSTLPFLFGDTDDLPDCKKRLVLRGTGGDPGVKVYSEVVAWSLGLEGKQPQFAVLTAEGRRWVRLVRPLNSYEEMIRTVLITAHMLHFLMRKPHEPERTLWNHLCKVFNKFDVRPSEDDFRNHISLMKQFVAKDPILAKSEGSLPHEWGLTKGKTKAQFLLSYVMPRAVLCKVVNIVLKTILRVFVEGKSGKIFTEAGADHIDVKQPFITDDEDIDEMIVEDADNESDEEEDGDLFDSICAICDDGGDILCCDGPCMRSFHAKEGSGEDSYCDTLGYTEAEVEAMKLFLCKNCEYKQHQCFICGVLEPSNGAAAKVFLCNNATCGHFYHPKCVAQQLHPNNIDEASELEKKITDGFSFTCPIHWCFHCKGLEDRTQGPLQFAVCRRCPKSYHRKCLPREISFDEIEEKGVIIRAWELSKMILIYCLNHEIDSELETPVRDHIKFPRIEKPLQFVKKGANLLPKKKKRTYSESILEQPPKDTVKMKSKVRMQESEQNKHDTREVSVKSFTQNVVDTPVKKKGKLKENKQLPYVAKDHFVSSPKSVKEQEQELVPLPLSGIRKSSFPKVDSEIEKRVISILGNEISSLTIKDVTRNCSLPSTHVYSGRPTDKMPLGKIERSVQAVEAALKKLKNGGSVNDAKAVCEPDVLRQLARWHTKLRVYISPFIHGTRYSSFGRHFTKVEKLVEIVDRLHWYVESGDMMALGLVFC

SEQ ID NO: 222773 - protein, 477 aa, Zea Mays
MERTINSLMYKGSIPDAINQSRREKKLFVVYISGEDEASSSLEQSSLIDENVVEVIGRCCILLHLKQGNVDASQFSAIYPQKSVPSISVIGLNGVLLWNHDGYINSENLKESIEKAWAALHLQETAATLLTASLATRNSEPVNSATTVLPAQGGSSTLENPSDLSSQSPDVSGASEVAHSTDLVSQIPNSTALYEPLEINEKEGSKSNSDDKTVEKLGSTSTEFDCDLLDSSRKSNTVSSADSKGEDITPSAKRKNKDDGSHTSIPLEDTPSTLTNKGVSSQSRVEQDKATSFVSVKSDDIQLSIRMPSGNRLEIKLTKQDVLRKVKNFVDENQGNGLGSYDLSLVYPKRVFFEQGADDVGGNSGAGGYFGYLRTVLSYVNPLSYLRGNTNSSNTELQSNEGLRQLRHGSGPWSEPRPLGNRGHEVTDADSANTLRRRPRPFGANIHTLGSEDHGPSDERNVFWNGNSTEFGGDDRK

SEQ ID NO: 222774 - protein, 496 aa, Zea Mays
MERTINSLMYKGSIPDAINQSRREKKLFVVYISGEDEASSSLEQSSLIDENVVEVIGRCCILLHLKQGNVDASQFSAIYPQKSVPSISVIGLNGVLLWNHDGYINSENLKESIEKAWAALHLQETAATLLTASLATRNSEPVNSATTVLPAQGGSSTLENPSDLSSQSPDVSGASEVAHSTDLVSQIPNSTALYEPLEINEKEGSKSNSDDKTVEKLDSKGEDITPSAKRKNKDDGSHTSIPLEDTPSTLTNKGVSSQSRVEQDKATSFVSVKSDDIQLSIRMPSGNRLEIKLTKQDVLRKVKNFVDENQGNGLGSYDLSLVYPKRVFFEQDMEATLSELGIQNRHAMIVVPHRQSGQVSRRHSSASYDMGVNSGADDVGGNSGAGGYFGYLRTVLSYVNPLSYLRGNTNSSNTELQSNEGLRQLRHGSGPWSEPRPLGNRGHEVTDADSANTLRRRPRPFGANIHTLGSEDHGPSDERNVFWNGNSTEFGGDDRK

SEQ ID NO: 222775 - protein, 119 aa, Zea Mays
MSSLTTKVFGVPQPGWYRVYYIINNIQELVTALTQEHPVVLMFWADWNQPSKATYWDLAIAKKDEAVFCQLDFDKFKDVVEKFRVKALPTFLLIKEGEEQRRVVGAKHLCSPPSGARKG

SEQ ID NO: 222776 - protein, 1249 aa, Zea Mays
MDATASRAGGGDLNGKENEEDKKGAAPAKKVSLLGMFRYADRLDLLLIAVGTVGALTNGVADPLMTVLFGNAIDSFGDSTSQDIVRSVRKVVMNFVYLGIGTAVVSFLQVSCWTTAGERQSARIRSLYLNAVLRQDIAYFDTELTTGQAVSRMSSDTLVIQDALGEKAGKLIQLSSTFFSGFIIAFTRGWLLTLVMLTSLPLIAVAGIVSSHFLTNISSKKLASYGDAGDTVEQTIGAIRTVVSFNGENKAIAAYKSLIKKAYRTDVLEGLINGFGMGSVFCILFSSYGLAFWYGGKLVVDKGYTGGKIITVLFAVLTGAMSLGGATPSVSSIAQGQSAAYRLFETIGRKPEIDSGDTSGVVLEDIKGDVELKDVRFRYPARPEQLILDGLTLRVGSGTTMAMVGESGSGKSTVISLVERFYDPHGGEVLIDGVNIKNLRLSWIREKISLVSQEPLLFMTSIKDNIMYGKGDATVEEVRRAAELANAANFIDKLPDGYDTMVGQRGTQLSGGQKQRIAIARAILKDPKILLLDEATSALDVESERVVQEALNRIMVERTTLVVAHRLSTVRNVDCITVLRQGKIVEQGPHDVLVKDPNGAYSQLIRLQETRADERRKTADSGSGVPDHSRSKSTSLSQSLARRSLLNKDSFGSSSSNRYSFKNPLGLAVDLHEDRSTIGGEKTEELSDVVVVPKKAPIGRLLKLSVPEAPVLLLGSVAASVHGVVFPLFGLLMSGIIKSFFEPPDKLREDSSFWALIAVALGVTCLVVVPAQYFLFAVAGGKLIERIRALSFQSIVRQEISWFDNASNSSGALGTRLSVDALNVRRLAGDNLALIMQSIATLGYAQVKFLKGFSEDAKEMYEDASQVATDAVGSIRTVASFCAEKRVVAAYSDKCEALRKQGIRSGVVGGLGYGFSFLMLFFTYGLCFYVGAQFVRQGKTTFPDVFKVFFALVLAAIGVSQASALASDATKARDSAISIFSVLDRESKIDSSSGDGMTLEVVSGNIDFSNVSFKYPLRPDVQIFSDFTLRIPSGKTVALVGESGSGKSTIIALLERFYDPDSGRISLDGVEIKSLRVSWLRDQMGLVGQEPVLFNDTIRANITYGKHGGATEEEVVAVAKAANAHEFISGLPQGYDTMVGEKGIQLSGGQKQRVAIARAIVKDPRILLLDEATSALDAESERVVQDALDRVMVSRTTLVVAHRLSTIKGADVIAVLREGKIVERGRHEALMRISGGAYASLVELRSKTE

SEQ ID NO: 222777 - protein, 60 aa, Zea Mays
MKMLILGVARNNLVIVISYFKAFFGLNAWMGECRMLLHILFLGPSNLLDSNASFAQMWQK

SEQ ID NO: 222778 - protein, 58 aa, Zea Mays
MPCSPDSPSAASTSWAAGSTLAVQLGNIFDRGGDELRLLHPLRLLAPSAEARVSAFLP

SEQ ID NO: 222779 - protein, 421 aa, Zea Mays
MYSNNSDTIRDALCFFLDEETGHRIAFVQYPQNYNNLTKNNIYGNSLNVINQVELSGLDAWGGPLYIGTGCFHRRETLCGRRFTEDYKEDWDRGTKEQQQHRHRVDGETEAKAKSLATCAYEHDDDTRWGDEVGLKYGCSVEDVITGLAIHCRGWESVYSNPARAAFVGVAPTTLAQTILQHKRWSEGNFGIFVSRYCPFVFGRRGKTRLPHQMGYSIYGLWAPNSLPTLYYAVVPSLCLLKGTPLFPELTSPWIAPFVYVAVAKNVYSAWEALWCGDTLRGWWNGQRMWLVRRTTSYLYGFVDTVRDSLGLSKMGFVVSSKVSDEDEAKRYEQEMMEFGTASPEYVIVAAVALLNLVCLAGMAAALDVFFVQVALCGVLVLLNVPVYEAMFVRKDRGRMPFPITLASVGFVTLALIVPFF

SEQ ID NO: 222780 - protein, 534 aa, Zea Mays
MAADADAAEVERLYELGERLSSAKDKSELAADYEAIIAAVKGQSVKAKQLAAQLIPRFFRSFPALATRAMSAMFDLVDMEELAIRIQAIRGFPLLGKDTEFVSKIADVLGQLLTSEENVERDAVHKALMSLIREDVKNSLQPLFKHVEQGSEIREKIICFLRDKVFPLKAELLKPQAEMERFITDLSVQDVTGSEFELFMGFLRSLSIFGDSAPRESFQELIEIIQAQADLNSQFNVSDIDHIERWISCMYMALPIFMRGASASKFLNYFVKQIVPAFEKIPEEKKLDLLKTIASSSPYATAQDSRQLLPSVVQLLNKYMPGKKVDDINHNYVECLLYTYHHLAHKTPNTTNSLCGYKIVTGQPSDRLGEDFTEHYKDFTERLTGTEETVRAASKRLTQGMADFSKAISSAKTEEEKTKIKGDQQTSTRTMRSYNNILAMAQPLHSKSPLFIGDKKIALSWMEHPKKPTATTAGGKRSQPATTNGNGPANKKGRGGMHNQLVNRAFEGLSRGGRGTGRGRGRGGRGRRGWGGYR

SEQ ID NO: 222781 - protein, 412 aa, Zea Mays
MSHAGASIGGGGGAARGRSRSLGSSSRAGNGNGAGAFVRAGADGNEMYVRADKIDLKTLDVQLEKTRSQVWLDHQRSAASPRPETPLLGWEIDLLGKLDIQNQIAHGTFGVVYRGTYDGHDVAVKVLDWGHDGQDTAAKHREAFEKEVAVWQKLDHPNVTKFVGASMGTSQLKIPRKQGSTSTSSSSSSCGGRTAPNECCVVVVEFQHGGTLKTLLYNHRDKKLSYRKVVRLALDLARGLNYLHSKKIMHRDVKAENMLLDRKRTLKIADFGVARVEAQSCEVTGQTGTLGYMAPEVLQGKPYDHKCDVYSFGILLWETYCCAMAYPNYSLADISYHVVKLGIRPDIPRCCPRPMADIMTRCWDGNPDNRPEMSEVVALLEKIDTGSGKGGMTPVDDVSQGCTCFGFNRSVA

SEQ ID NO: 222782 - protein, 50 aa, Zea Mays
MKMKTTSCMHVAKLGMAWTMDGWTSTTAKRRLLATTTGLFCCFLFAPTYA

SEQ ID NO: 222783 - protein, 946 aa, Zea Mays
MDPRRLPILLSLLLAFFSAVVASDEIHGCGGVVEASSGLAKSRKASDSKLDYSDITVELCTVDGLVKESTQCAPNGYYFIPVYDKGSFMVRVKGPKGWSWKPETVPVIIDHNGCNGNADINFQFTGFMISGKVVGAVGGKSCSKRGGPAGVKIELMTDSDELIASALTSSSGEYSFTNIIPGRYILRASHPDYEIELRGSPEIDLRFGNAVADDVFFVSGYDIYGTVVAQGNPIVGVHLYLYSNDVTKVPCPQGFSDAPKEGALCHAISGADGKFTFRSLPCGSYELLPYYKGENTVFDISPSSLSVSVEHSHLTIPQKFQVTGFSVGGRVIDGYGAGVESANVIVDGQLRAITDSLGYYRLDQVTSKKYTITAEKDHYKFNRLEDFMILPNLASIDDIRSVRYDVCGIVRTVTLNSKAMVTLTHGPENVKPQRKLVGENGHFCFEVPAGEYQLSALPVDSERSSSLMFSPGSISVNVNSPLLDLEFSQSQVNVHGKVSCKQQCSQNILVSLVRLAGGVEQEKKTTTLEQDNVNFVFKKVFPGKYRVEVKNSLPEGLAKDDWCWDQSILNIDVGTDDVRDIVFVQKGYWIELVSTHDTNAYIQQPDSSRLDLLIKKGSQRICVETSGQHEIHLTNPCISFGTSSVLFDTANLMPIHINAKKYLVKGEIHVDMSSIQENIDSKDIVVDILKSDGSFIEKISTSLVLGKDNQNDFTAFEYSIWADLGEDFIFVPHDSSIGRNKVLFYPARQQYSVSMNGCQDTVPLITARTGLYLEGSVLPATSDVDIKILAAGKSNYAHLNKGDVATEAKTDSEGSFFAGPLYDDIVYKVEASKDGYHLKQTGPYTFSCQKLGQILVRIYGENSELLPSVLLSLSGEKGYRNNSISSSGGTFTFDNLFPGSFYLRPLLKEYKFNPSAVAIDLNSGESREAEFRATRVAYRSQQLAFL

SEQ ID NO: 222784 - protein, 1185 aa, Zea Mays
MDPRRLPILLSLLLAFFSAVVASDEIHGCGGVVEASSGLAKSRKASDSKLDYSDITVELCTVDGLVKESTQCAPNGYYFIPVYDKGSFMVRVKGPKGWSWKPETVPVIIDHNGCNGNADINFQFTGFMISGKVVGAVGGKSCSKRGGPAGVKIELMTDSDELIASALTSSSGEYSFTNIIPGRYILRASHPDYEIELRGSPEIDLRFGNAVADDVFFVSGYDIYGTVVAQGNPIVGVHLYLYSNDVTKVPCPQGFSDAPKEGALCHAISGADGKFTFRSLPCGSYELLPYYKGENTVFDISPSSLSVSVEHSHLTIPQKFQVTGFSVGGRVIDGYGAGVESANVIVDGQLRAITDSLGYYRLDQVTSKKYTITAEKDHYKFNRLEDFMILPNLASIDDIRSVRYDVCGIVRTVTLNSKAMVTLTHGPENVKPQRKLVGENGHFCFEVPAGEYQLSALPVDSERSSSLMFSPGSISVNVNSPLLDLEFSQSQVNVHGKVSCKQQCSQNILVSLVRLAGGVEQEKKTTTLEQDNVNFVFKKVFPGKYRVEVKNSLPEGLAKDDWCWDQSILNIDVGTDDVRDIVFVQKGYWIELVSTHDTNAYIQQPDSSRLDLLIKKGSQRICVETSGQHEIHLTNPCISFGTSSVLFDTANLMPIHINAKKYLVKGEIHVDMSSIQENIDSKDIVVDILKSDGSFIEKISTSLVLGKDNQNDFTAFEYSIWADLGEDFIFVPHDSSIGRNKVLFYPARQQYSVSMNGCQDTVPLITARTGLYLEGSVLPATSDVDIKILAAGKSNYAHLNKGDVATEAKTDSEGSFFAGPLYDDIDGYHLKQTGPYTFSCQKLGQILVRIYGENSELLPSVLLSLSGEKGYRNNSISSSGGTFTFDNLFPGSFYLRPLLKEYKFNPSAVAIDLNSGESREAEFRATRVAYSAMGSVTLLTGQPKEGVFVEARSESTGFYEEATTDSFGRFRLRGLVPGSTYSIRVAAKDNLQFAAVERASPEYLSVNVGHEDMTGIDFVVFERPEVTILSGHVEGDGIDTLHPHLSVEIRSATDSSRVEAVLPLPLSYYFEVRDLPKGKHLVQLRSGLPSHTHRFESELVEVDLEKDPQIHVGPLKYKTEERHQKQELTPAPVFPLIVGVSVVALVISMPRLNDLYQSAVGMTSLGSGMAPTKKEPRKNILRKRV

SEQ ID NO: 222785 - protein, 752 aa, Zea Mays
MDPRRLPILLSLLLAFFSAVVASDEIHGCGGVVEASSGLAKSRKASDSKLDYSDITVELCTVDGLVKESTQCAPNGYYFIPVYDKGSFMVRVKGPKGWSWKPETVPVIIDHNGCNGNADINFQFTGFMISGKVVGAVGGKSCSKRGGPAGVKIELMTDSDELIASALTSSSGEYSFTNIIPGRYILRASHPDYEIELRGSPEIDLRFGNAVADDVFFVSGYDIYGTVVAQGNPIVGVHLYLYSNDVTKVPCPQGFSDAPKEGALCHAISGADGKFTFRSLPCGSYELLPYYKGENTVFDISPSSLSVSVEHSHLTIPQKFQVTGFSVGGRVIDGYGAGVESANVIVDGQLRAITDSLGYYRLDQVTSKKYTITAEKDHYKFNRLEDFMILPNLASIDDIRSVRYDVCGIVRTVTLNSKAMVTLTHGPENVKPQRKLVGENGHFCFEVPAGEYQLSALPVDSERSSSLMFSPGSISVNVNSPLLDLEFSQSQVNVHGKVSCKQQCSQNILVSLVRLAGGVEQEKKTTTLEQDNVNFVFKKVFPGKYRVEVKNSLPEGLAKDDWCWDQSILNIDVGTDDVRDIVFVQKGYWIELVSTHDTNAYIQQPDSSRLDLLIKKGSQRICVETSGQHEIHLTNPCISFGTSSVLFDTANLMPIHINAKKYLVKGEIHVDMSSIQENIDSKDIVVDILKSDGSFIEKISTSLVLGKDNQNDFTAFEYSIWADLGEDFIFVPHDSSIGRNKVLFYPARQQFL

SEQ ID NO: 222786 - protein, 838 aa, Zea Mays
MTMMTPPPLEQQQEDDEMLVPHQELPVAGPEAAPQPMEVVAQTEPATTAESQPPEDPQTTRFTWTIESFSRLNTKKHYSDVFVVGGYKWRVLIFPKGNNVDHFSMYLDVADSGNLPYGWSRYAQFSLAVVNQIHPKYTIRKDTQHQFNARESDWGFTSFMPLSDLYDPSRGYLVNDTIIVEAEVAVRRMVDYWTYDSKKETGFVGLKNQGATCYMNSLLQTLYHTPYFRKAVYHMPTTENDMPSGSIPLALQSLFYKLQYSDNSVATKELTKSFGWDTYDSFMQHDVQELNRVLCEKLEDKMKGTVVEGTIEQLFEGHHINYIECINVDYKSNRKESFYDLQLDVKGCRDVYASFDKYVEVESLEGDNKYHAERYGLQDARKGVLFLDFPPVLQLQLKRFEYDYMRDTMVKINDRYEFPLQLDLDRDNGKYLSPDADRSIRNLYTLHSVLVHSGGVHGGHYYAFIRPTLSDQWYKFDDERVTKEDTKKALEEQYGGEEELPQINPGFNNTPFKFTKYSNAYMLVYIRENDKDKIMCNVDEKDIAEHLRIRLKKEQEEKEHKKKEKSEAHLYTIIKIARDKDLKEQIGKNIYFDLVDHEKVCSFRIQKQLPFTAFQEEVAKEFGIPVQFQRFWLWAKRQNHTYRPNRPLTPHEEAQSVGQLREVSNKAHNAELKLFLEVELGPELCPIRPPEKSKEDILLFFKLYNAEKEELCFVGRLFVKALGKPSEILTKLNEMAGFSPNEEIELYEEIKFEPNVMCEHIDKKLTFRSSQLEDGDIICFQKAPVPDGDPQVRYPDVPSFLEYVHNRQVVHFRSLDKPKDDDFSLEFNLNHNLLDIGE

SEQ ID NO: 222787 - protein, 213 aa, Zea Mays
MAPLVAAATNHTAHRSHIVGPNNENFPRHQPCSSQNRNKRLRLRSRAQRISSQLLASRKLMPWQIPKRDWFPPSFIFGAATAAYQIEGAWNEDGKGPSNWDHFCHNYPDWILDGSNGDTGANSYHMYPADVRLLKEIGMDAYRFSISWSRILPKGTLEGGINQAGIKYYKKLINLLIENGIEPFVTIFHWDVPQALEDKYGGFLGDRIVNRGR

SEQ ID NO: 222788 - protein, 221 aa, Zea Mays
MAPLVAAATNHTAHRSHIVGPNNENFPRHQPCSSQNRNKRLRLRSRAQRISSQLLASRKLMPWQIPKRDWFPPSFIFGAATAAYQIEGAWNEDGKGPSNWDHFCHNYPDWILDGSNGDTGANSYHMYPADVRLLKEIGMDAYRFSISWSRILPKGTLEGGINQAGIKYYKKLINLLIENGIEPFVTIFHWDVPQALEDKYGGFLGDRIVWEIHGSTCTLKA

SEQ ID NO: 222789 - protein, 144 aa, Zea Mays
MTHPLKTIKKKTRKNTEIRAFLGVRTARARTHAPIRLPTHPPTDATPHTCRRPASPPPAPPPPQPAAATTEPRRSTRYWAKARGRRRWARWRTGGRGPSGARRRASRACCGGTRRPRSSGAASCSSWPSSTPSPWSSRTRRRST

SEQ ID NO: 222790 - protein, 1092 aa, Zea Mays
MSENIDLVLEFLRKNRFAKAEAALRGELTGRADSNDMATQRRVAELKEGEEQQEGLVGSNVGPKGAAAARSADSSREFIVKEIDVGALPNGSDGKKGSGIGQPQDNVGDLYPWTFSIANSTAEQLAELLVSEEVPRHRRGAVLAEKRDRGVGTEQPGPVLEQKVSFGRGKGKVDAAGRTENSEQCHFRDKSLVPEKEEMLNGCTVKTVLPFPTENPSSSYNSTHHENERKEVKRSSNADGVGKGAKGHLDEGNRQYYFEKSLDTDLVSDRCFDLQLVGDSQREELPKLPPVRLKSEDKLVNMNWEEKINHHGSGAKQSSADHAFMIGSYLDVPIGQEITSSGGRRTIGSSWLSVSQGIAEDTSDLVSGFATLADDSLEYPIGEYWDSDEYDDDDDVGYTRQPIEDETWFLAHEIDYPSDNEKATGHTRGNDRHDRPTKDEDDDQSFVEEDSYISGEQYFHGKNIAQIGTSEGPMVHGIPDNDMIAQYDGQLLDSEELNLMHSEPAWQGFVSQNSELGMLGNGKFLNDSERPHPDDLFVEDDQHGSVRSIGVGISSDAADIGSEVRESLIGGSSEGDIEYFNESSLSVSGKRHPHQDTEKKRVGAKGVKHDQIIYAADIQKGNLPPGAADVGFSFPPPLHSGKNHESDAKSLWSKKDEMYCINDPDDCQNGMVSDDMLATWRKKNSESSLRSSRDEMTSDVVRSRNSSASYDETEDTSNARHHKLDDAQEEDTGTNLDDEEAAALQEQVRQIKAQEEEFETFNLKIVHRKNRTGFEEDKNFHVVLNSVIAGRYHVSEYLGSAAFSKAIQAHDLHTGMDVCVKIIKNNKDFFDQSLDEIKLLKYVNKHDPADKYHLLRLYDYFYYRANLYEFQKFNRESGGEVYFTMPRLQSIAIQCLEALQFLHGLGLIHCDLKPENILVKSYSRCEIKVIDLGSSCFETDHLCSYVQSRSYRAPEVILGLPYDKKIDVWSLGCILAELCTGNVLFQNDSPATLLARVMGIIGSIEQAMLAQGRDTYKYFTKNHMLYERNQESNRLEYLIPKKTSLRHRLPMADQGFIEFVAYLLEVNPKKRPSASEALKHPWLSFPYEPISS

SEQ ID NO: 222791 - protein, 321 aa, Zea Mays
MRDKCMLWPLRTSYSLWYCLTENSDNPCATQGKMTTLRKLLLTGNPMRTLRSSLVSGPTTTLLKYLRSRLSSDEEGSRSTPTKDDQIAAARRLSLSSKELDLSGLGVTSVPAAAWETSDVVKLDLSKNSIEDLPNELSLCSSLQSLVLSNNKIKRWPHTVVSSLPCLSSLKLDNNPLVEISSTDLVPLSKLEVLDLSGNASALPEPSAVSALPQLQELYLRRMKLHEFPNGLLGLKLLRILDLSQNHLTTVPEGIKNFTALIELDLSDNNITALPAELGLLEANLQVLKLDGNPLRSIRRTLLERGTKAVLKYLKEKLPSE

SEQ ID NO: 222792 - protein, 205 aa, Zea Mays
MEAEVGPPNPPRPEPAGSEPDDARLSPPPPAPAPPPPPPPPPAAEAAAAPTASAAFSLQAPAPAPAEANGSSDRKRRRKAEDGDGCKTCSCKKSRCLKLYCVCFASGLHCTESCGCEPCHNKPQLQGTLRMATVLPLKPVQTFEAGQDIVEQVIRSPMDLIRRKCTCKKSGCLKKYCDCYQGGAGCSINCKCDDCRNPFGRKGKT

SEQ ID NO: 222793 - protein, 443 aa, Zea Mays
MRRWWSPALAAVEPRSVQLLLLGVALVAASFYAGTLFGSSASPALVLPPSRPRSPDSFRAKVTDVPVFTNRVSRTYRAKSVTVPDHGVDVCPLEYNEYVPCHDGAYISSLKSLDTSRHVDLESICPPWEKRLFCLVPPPNDYKIPIRWPTSRDYVWRSNVNHSHLAEVKGGQNWVHEKGKLWWFPGGGTHFKHGASEYIERLGNMMTNSTGDLRSAGVVQVLDVGCGVASFSAYLLPLDIRTMSFAPKDGHENQIQFALERGIGAMISVLATKQLPYPENSFEMVHCSRCRVDWHENDGILLKEVDRLLRPNGYFVYSAPPAYRKDKDFPVIWEKLVNITTTMCWKLIAKHVQTAIWVKPEDESCRQKNVDMNLLSICESNDNISPSWKIPLMNCVKLNKDKSNIQKLPSRSDRLSFYSKSLEIIGVAPERFEKNNQFWKNQH

SEQ ID NO: 222794 - protein, 601 aa, Zea Mays
MLQLNFLVHYNFLEEDKGCITTQNAAQTPREASGLGESHDAVKKLANPFSFSKHKKPKAPLIGGSNLIICPMTLISQWKAEIEAHTKPGTANIYVHYGQNRPKDASIIGQSDIVLTTYGVVSSEFSIDGSTENGALYSVHWFRVVLDEAHMIKSSKSLISLAAAALTADRRWCLTGTPIQNNLEDLYSLFRFLKVEPWRNWALWNKLVQKPYEEGDERGLKLLQSILKPIMLRRTKNCTDKEGRPILNLPPANIEVKYCVLSEAEKDFYEALFRRSKVKFDQFVEQGRVLHNYASILELLLRLRQCCDHPFLIMSRGDTKEYADLNKLAKRFLRGGNGAVNGDSCIPSRAYIKQVVQELQKDEGECPICLEAFEDAVLTPCAHRLCRECLLSSWRSATAGLCPVCRMSMSKQDLITAPTDNRFQIDVEKNWVESSKISALLQELEALRSSGAKSIVFSQWTAFLDLLQIPLSRNNFSFARLDGTLNLQQREKVIKEFSEDKGILVLLMSLKAGGVGINLTAASNAFVMDPWWNPAVEEQAVMRIHRIGQTKTVSIRRFIVKGTVEERMEAVQARKQRMISGALTDQEVRTARIEELKMLFS

SEQ ID NO: 222795 - protein, 607 aa, Zea Mays
MVKEREEQVAIVRMVLGEGTPEMDIIRALHMAGDDPTKAINILLDLNKAAPPLPPSPSPFPCPSPSPSPGKPAKALVDSTPPCKAPTRPMPTAEKPKSTTSNGGSEEHWWLVGSAEMVGLSTCKGRRITSGDVVTFSFPNATTAVGKSRPSRPALASCSSEIMRFSTPSHGEVGRIPNEWARCLLPLLKENKLKVKGSCKSAPEVLTIMDTVLLSVSIYINSSMFHDQKQSSPKAARFAPYDSTFHPLPALFKLIGLAPFIKAAFTPEDLYSRKRPTETKSSIGSPAAKLTSGRLRLSSDGNEDDHGEETVSDSDLDDIIGISDSCALEERAPPDSLMCDLRSYQKQALHWMLQLEKGSSSQDAATTLHPCWEAYKLEDKRELVLYLNVFSGDATTEFPSTLQLSRGGILADAMGLGKTIMTIALLLSDSSKGCITTQNAAQTPREASGLGESHDAVKKLANPFSFSKHKKPKAPLIGGSNLIICPMTLISQWKAEIEAHTKPGTANIYVHYGQNRPKDASIIGQSDIVLTTYGVVSSEFSIDGSTENGALYSVHWFRVVLDEAHMIKSSKSLISLAAAALTADRRWCLTGTPIQTIWRIYTAFSGF

SEQ ID NO: 222796 - protein, 281 aa, Zea Mays
MCDLRSYQKQALHWMLQLEKGSSSQDAATTLHPCWEAYKLEDKRELVLYLNVFSGDATTEFPSTLQLSRGGILADAMGLGKTIMTIALLLSDSSKGCITTQNAAQTPREASGLGESHDAVKKLANPFSFSKHKKPKAPLIGGSNLIICPMTLISQWKAEIEAHTKPGTANIYVHYGQNRPKDASIIGQSDIVLTTYGVVSSEFSIDGSTENGALYSVHWFRVVLDEAHMIKSSKSLISLAAAALTADRRWCLTGTPIQNNLEDLYSLFRFLKVEPWRNWAL

SEQ ID NO: 222797 - protein, 120 aa, Zea Mays
MDQLFRLTSFQASATRALKKGTTLDSVIEMLKGVTPELSCPIVLFTYYNPILKRGVGNFMSFIKQAGIHGLVVPDLPLEETALLRSEAIMHNIELVHTHSHLCMHHLHKVCCVLVLLSGC

SEQ ID NO: 222798 - protein, 151 aa, Zea Mays
MDQLFRLTSFQASATRALKKGTTLDSVIEMLKGVTPELSCPIVLFTYYNPILKRGVGNFMSFIKQAGIHGLVVPDLPLEETALLRSEAIMHNIELVLLTTPTTPTDRMKGIAQASEGFLYLVSAVGVTGARSNVNLRVEHLLREIKKVSKL

SEQ ID NO: 222799 - protein, 121 aa, Zea Mays
MSRTFKSTTGLSRRFLNLIAANHSPGVKSLHRIGLGRIFNSTPAPIPNGDRLESAAGQEDYMVRPRALDIIRLPTPSGRGFLFDANSCGVSTVAHLHTPKRCRRLLIFTWRTMQPRRYTSI

SEQ ID NO: 222800 - protein, 207 aa, Zea Mays
MKAAASALFGLPDSLYARPNTFGELMRAIISPSSKVQEAVDWALKGVNPDIVLHMRMMANRPVRARKAAVLCIKKALQFSHIKGTALVALVSDTPAFVKEIKSDISEFAEVLNFDYKLFAKTSSLEIVGNDKPLDFRSRDWGSAPRWVAFVDFFIAAQARYAVVTGAHRRVGTTYAQLITALAAANRHGDCILLRSTFLIPTSHSLF

SEQ ID NO: 222801 - protein, 183 aa, Zea Mays
MIPVAANDVAFSLHAVALTAFTVFQVFIYERGTQKVSKVCISISAIVWIAALVCLIIAWPKSDWLWLIDVFNSIQVGMTAIKYIPQAIMNFRRKSTIGWSVGNILLDLTGGVLNFCQMGVQSIDQHTLVNFYGNIGKTLLSLETVFFDVLFIIQHYVLYPVKKDENGHTRMRIICSKGIAGAS

SEQ ID NO: 222802 - protein, 127 aa, Zea Mays
MPGPTPSSTPPAAAANPSHNSRRKRKPRPKTAPPSALNPNWALLQSKLPHRPAATHLGKRKHDGATPAPAEPSPPPTAQEVRLEPTSDDTSLTKVVAIDCEMVGVGFDGGKSALGRVTLRALGIWSD

SEQ ID NO: 222803 - protein, 361 aa, Zea Mays
MLAASLRPGPSLAAFPGTAQRSPVPFLPFPARLHHRPVLLSATAEGTGAPAGQGDASAAPLDEFAADWESARACKDQGRIFSLPVLRANSGGLIVRFNSLQGFVPNPLLSPAHWCKDPKRPIQDVTKDLVGTSISVKVAEVNEEEKKLVFSEKDASWSTYSSRIKIGDIYDGIVGSVFHYGAFVHLRFPDGLYHLTGLVHISEVSWDLVQDVKDFLNEGDAVKVIVVNIDMTKSRIALSIRQLEEDPLLETLDKVIPLEADQSPNRMMSPSEVELLPGLDGICNELLQEDGITDVQFGRQALEKRVVSQDLELWISNVQAKDNRFTLLARAGRQVQEVYLTTSLDQEGIKKAVQRVLGRVP

SEQ ID NO: 222804 - protein, 575 aa, Zea Mays
MAVHVGSPKPSSPPPPLPPTPRRAALPHPLGPPRRPPTPGLSPPPVLLAPRGRGCRRAQGPRPEGARRPFRPRRVPRRRRGGPPRAPPRARPARRPPCRRRRVPSTPRRGASGFSSAARYLKSLSTGDVHLYCKNCSSRLTKQPLRKIMEMPSVDWVDVADNWVGGCCTSFGGAGEKLVSQFIRAYGRLEGTSLLDATSITVETDNLETDLVSQVACSALSRHFVAIKEDIFNVSVEKDHTTGKIKLKNSEEQANITATHAQPPIILEEGPSVSCSETNGVTQTNQPGISQTEADTDAYFEKSENDCCVEKVGKSKKEVDLLLVDPCRCCCVNGYSEKAEDNPSQLSLVNEKKQNMLEIKRDYKLTKTISLGSSFIVKASNLLNDFEWVELLCGQCSSPLGSYPSQCSLGPADGRLRLFKCYTSTEIPVTGPHDVFRGHTLERVFVNLLLEVAEDEISFRTLVRDLKTKRPMLQLVLLSSKAWLSSGCCYENDIDGSHGTTDLQPSVKLLYSDYSNASEADLRIVEAWASKYRAEELYMMKRQIDELTECLSSGRNNFPVSCSSLEGMRLSSLRR

SEQ ID NO: 222805 - protein, 206 aa, Zea Mays
MACFLLQAYDFTRILSSFYFKGYTLLTKIQRIEWNNRGPITFRYSIISTSALGVSVGYFITDLAMIFWLYPSLGGMEYVLHHTVSLVAIAYTMLSGEGQFYTYMVLISETTTPEINLRWFLDTAGLKKSSAYLVNGILMFVAWLVARIFLFMYVFYHIYLHYGQIMQMHAFGYYLTFVVPSVLFVMNTMWFMKILKGVMKTLAKWP

SEQ ID NO: 222806 - protein, 297 aa, Zea Mays
MSHFGRSGPPDIRDTFSLLVLNISFRTTADDLFPLFERYGKVVDVFIPRDRRTGDSRGFAFVRYKYADEAQKAIDRLDGRDVDGRNIMVQFAKYGPNAEPIRKGRVKEGVEKSQDRSRSRSPRPRHRDRDHRSQSRSRSRERHVRDRDRGYRRRSRSRSRSLSSSPDNRSHHRARDDDKRKSMSKSRSRSRSTSRSRSYYRCLNTNMQFHHLVTLYMFRNSNLISSNSASPARHSASPRKSPPPQRSPTPAKHANGKVAPLSRCVSPLPKRATSRSPGSDGKPSHGVTGLQNLEKVD

SEQ ID NO: 222807 - protein, 195 aa, Zea Mays
MHLYRIFEKKEEFHSDFSSTFYAEKTFLGRRYMRGFYNDVARLQCFFPQEVAKSITTPMFILNPAYDVWQVEHVLSPEGSDRENLWQNCRMDISRCSSKQLEVLQGFRKALLDAINEFKKRRDWGMFIDSCFIHCQSMKALAWHSPSAARVNNKTAAEAVGDWFFERREVKEIDCEYPCNPTCYNVVLDQPYKED

SEQ ID NO: 222808 - protein, 57 aa, Zea Mays
MDGGGSGNASGGSGGASTCCYYALLGIRKNASATDIRAAYRRLAMTCSHVPIYCRGR

SEQ ID NO: 222809 - protein, 753 aa, Zea Mays
MSVVGFDVGNDTLVAAAARQRGIDVLLNAESKRESPAAVAFSHNARLIGCHAASASSAHAPFSSVKRLSWAPRGGTRTPPSSATSPASLSPSPTPPVAAPSSTLTTSGRRIALSPTHLLSMLLAYLKQLAEADLGGAPVADCVISVPCYFTQAQRRAYLDAAAVAGLRPLRLMHDLAAAALGYGLYRSDLGGAGGPTCVAFVDVGQCDTQVAVVSFDMSGMKVLSHGFDADLGGRDFDEVLFEHFAEEFRDRYRIDVVRNVKASMRLRAACEKAKKVLSANAEAVVNIECLMEEKDVRGVIRREDFEKLCARLLERVVEPCKRAVEDSGIGLERLHSVELVGSGSRVPAITKVLAGFFRREPSRTLNASECVARGCALQCAMLSPTFRVREYEVQDAIPASIGFNTSDGPVSTLSSDALFRRGLHFPSVKIITLEKNDSFSFDAYYVDANELPPGTSTDIGSFQIGPFQAHTEASKVKVKIRLNLHGLVSVESAVLINDYQRNGSSTDHMEVDSSGDDMQGHKSRSERSIQRQELPITEYIYGAMSKHELLEAQEQEQQLAYQDKLVEWTKDRKNALESYVYDTRNKLSERYRSFATDSEREQISVNLQQTEDWLYEEGDDETEAVYSSKLEELKKLVDPIENRCKDDEVRAEAMRDLLKCIVDHRNAAKSLSTPERDAVDNECNKAEQWLREGSQLQESLPKNVDPVLWSCEIKRKEEELDTFCRNITRHKGSPARTDGSRGSDYMPTPDRD

SEQ ID NO: 222810 - protein, 752 aa, Zea Mays
MSVVGFDVGNDTLVAAAARQRGIDVLLNAESKRESPAAVAFSHNARLIGCHAASASSAHAPFSSVKRLSWAPRGGTRTPPSSATSPASLSPSPTPPVAAPSSTLTTSGRRIALSPTHLLSMLLAYLKQLAEADLGGAPVADCVISVPCYFTQAQRRAYLDAAAVAGLRPLRLMHDLAAAALGYGLYRSDLGGAGGPTCVAFVDVGQCDTQVAVVSFDMSGMKVLSHGFDADLGGRDFDEVLFEHFAEEFRDRYRIDVVRNVKASMRLRAACEKAKKVLSANAEAVVNIECLMEEKDVRGVIRREDFEKLCARLLERVVEPCKRAVEDSGIGLERLHSVELVGSGSRVPAITKVLAGFFRREPSRTLNASECVARGCALQCAMLSPTFRVREYEVQDAIPASIGFNTSDGPVSTLSSDALFRRGLHFPSVKIITLEKNDSFSFDAYYVDANELPPGTSTDIGSFQIGPFQAHTEASKVKVKIRLNLHGLVSVESAVLINDYQRNGSSTDHMEVDSSGDDMGHKSRSERSIQRQELPITEYIYGAMSKHELLEAQEQEQQLAYQDKLVEWTKDRKNALESYVYDTRNKLSERYRSFATDSEREQISVNLQQTEDWLYEEGDDETEAVYSSKLEELKKLVDPIENRCKDDEVRAEAMRDLLKCIVDHRNAAKSLSTPERDAVDNECNKAEQWLREGSQLQESLPKNVDPVLWSCEIKRKEEELDTFCRNITRHKGSPARTDGSRGSDYMPTPDRD

SEQ ID NO: 222811 - protein, 754 aa, Zea Mays
MSVVGFDVGNDTLVAAAARQRGIDVLLNAESKRESPAAVAFSHNARLIGCHAASASSAHAPFSSVKRLSWAPRGGTRTPPSSATSPASLSPSPTPPVAAPSSTLTTSGRRIALSPTHLLSMLLAYLKQLAEADLGGAPVADCVISVPCYFTQAQRRAYLDAAAVAGLRPLRLMHDLAAAALGYGLYRSDLGGAGGPTCVAFVDVGQCDTQVAVVSFDMSGMKVLSHGFDADLGGRDFDEVLFEHFAEEFRDRYRIDVVRNVKASMRLRAACEKAKKVLSANAEAVVNIECLMEEKDVRGVIRREDFEKLCARLLERVVEPCKRAVEDSGIGLERLHSVELVGSGSRVPAITKVLAGFFRREPSRTLNASECVARGCALQCAMLSPTFRVREYEVQDAIPASIGFNTSDGPVSTLSSDALFRRGLHFPSVKIITLEKNDSFSFDAYYVDANELPPGTSTDIGSFQQIGPFQAHTEASKVKVKIRLNLHGLVSVESAVLINDYQRNGSSTDHMEVDSSGDDMQGHKSRSERSIQRQELPITEYIYGAMSKHELLEAQEQEQQLAYQDKLVEWTKDRKNALESYVYDTRNKLSERYRSFATDSEREQISVNLQQTEDWLYEEGDDETEAVYSSKLEELKKLVDPIENRCKDDEVRAEAMRDLLKCIVDHRNAAKSLSTPERDAVDNECNKAEQWLREGSQLQESLPKNVDPVLWSCEIKRKEEELDTFCRNITRHKGSPARTDGSRGSDYMPTPDRD

SEQ ID NO: 222812 - protein, 378 aa, Zea Mays
MVLVFLYNSLTDLNVDPVTGDYYPTVFFNEFWLLKDKLIALNETVEELPLNLEVGPISMTKWQLFLQIEQSFQVHRSYGSMLEGEADELKRVFLEGNPYLLGLTMVVSLLHSLFDFLAFKNDIQFWNKNKSMEGLSAKSVVLNFVCQLVVFLYLLDNDTSWMILASSGVGVCIEFWKIGKAMHIEVDRSGKIPMLRFRDRESYAQNKTKEYDAIAMKYLTYVLFLLVVGFSIYSLKYEKHKSWYSWILSSMTSCVYMFGFIMMCPQLFINYKLKSVAHMPWRQMTYKFLNTIIDDLFAFVIKMPMLHRLSVFRDDVIFLIYLYQRWKYPVDKKRVNEFGFGGEDEPAAQEAVEGSDSAAAPQLTEAGSETSTEDKKTK

SEQ ID NO: 222813 - protein, 277 aa, Zea Mays
MEIRAPPTSLRLAPPPAAASFRRTPLRTSFLRGSVSLKVVQVRQSNVNRFKCNSIRSNLFDRLTRVVRSYANAVLSSFEDPEKILDQAVLEMNDDLTKMRQATAQVLASQKRLENKYKAAEQASADWYRRAQLALQKGDEDLAREALKRRKSYADNASSLRSQLDQQKGVVENLISNTRLLESKIAEAKQKKDTLKARAQSAKTATKVSEMLGNVNTSSALSAFEKMEEKVMAMESQAEALGQLATDDLEGKFALLETSSVDDDLSQLKKELSGSSL

SEQ ID NO: 222814 - protein, 106 aa, Zea Mays
MGSDHIQEKAELLYALINGRQLCTLPKLTQPTLIIWGEQDRVFPMELAHRLNGHLEGNSRLVVIKNAGHAVNIEKPKEVCRSIIEFFKEPVAGAANADDKVGTFHL

SEQ ID NO: 222815 - protein, 150 aa, Zea Mays
MCTLTHHKKSVRAMALHPKEKAFASASADNVKKFNLPKGEFLHNMLSQQKTIINSMAVNEDGVLATGGDNGSLWFWDWKSGHNFQQDQTIVQPGSLESEACIYALSYDVSGSRLVSCEADKTIKMWKEDLTATPETHPINFKPPKDIRRY

SEQ ID NO: 222816 - protein, 523 aa, Zea Mays
MVVSVAATGPGTDAEPVSSTFFASRYVRDPLPRSVSCCAGCGTSLMIRVLANNEELWYRMPERSIPREAAQQIISDELMLDGNPRLNLASFVTTWMEPECDKLIMDSINKNYVDMDEYPVTTELQNRCVNMIAHLFNAPIKEDETAIGVGTVGSSEAIMLAGLAFKRKWQNKRKEQGKPCDRPNIVTGANVQVCWEKFARYFEVELKEVKLSEGYYVMDPVKAVEMVDENTICVAAILGSTLTGEFEDVKQLNDLLTEKNKETGWDVPIHVDAASGGFIAPFLYPELEWDFRLPLVKSINVSGHKYGLVYPGVGWVIWRSKDDLPEELIFHINYLGTDQPTFTLNFSKGSCQIIAQYYQLIRLGFEGYRNIMENCQENAAILREGIAATGRFDVLSKDAGVPLVAFSLRDSSRFSVFDVSENLRRFGWIVPAYTMPADAEHVAVLRVVVREDFSRSLAERLVSDVRKILRELDARATHAVRVATATAEQSGDGVVAKKSVLEIEREVAARWMNAVNKKKTGVC

SEQ ID NO: 222817 - protein, 488 aa, Zea Mays
MPERSIPREAAQQIISDELMLDGNPRLNLASFVTTWMEPECDKLIMDSINKNYVDMDEYPVTTELQNRCVNMIAHLFNAPIKEDETAIGVGTVGSSEAIMLAGLAFKRKWQNKRKEQGKPCDRPNIVTGANVQVCWEKFARYFEVELKEVKLSEGYYVMDPVKAVEMVDENTICVAAILGSTLTGEFEDVKQLNDLLTEKNKETGWDVPIHVDAASGGFIAPFLYPELEWDFRLPLVKSINVSGHKYGLVYPGVGWVIWRSKDDLPEELIFHINYLGTDQPTFTLNFSKGSCQIIAQYYQLIRLGFEVLLFFDRFFLLLIEHSEYICAGEQKGVLSDTFLEGESFLFLFSLCAAVTASQSGRVFFFWCRFYLVCRGTETSWRTARRTRRYCGRASRRRAGSTSCPRTPGCRWWPSRSGTAAGSACSTSPRTCGGSAGSCRRTRCRPTRSTWRCSESSSGRTSAAASPNGWSRTSARSCASWTRARPTP

SEQ ID NO: 222818 - protein, 3996 aa, Zea Mays
MATEDEEREAADGTEVPVEAVVLGTFHLHAHPEGKLSSLMDIKSMGETIDSTEGTLKIPEDQVLVEAPSDVQLPPEHNLNGEASSLNGHTDKEEKVSVEQPHDNDQEEAELDQNNRINKEDAADGLSHGESTTEDSCLLKHKKDEESKGDEQQDLGVTVDDDLVQEDTLKTDNAIEQTDDGQQDQDQEPEKANENTEPASIANNDDVEIVAETPTGLQAPVESRMNDSDGIPETIDEETETDEPAQADGVVHPEDVAKVEDQQSQQDDTVDADVAPEEVKCEETDQQEEKPKSEAHEPTIDTREALNQEPAEETDDSMNKKIEETAHQRNMAAPKETTLEHEATMSATPVNTQVQDQEPLEEIEDTEKGIQPSSGSGDAIPEDQSNLSVTIDNDTVNEDTVIGIEQQDDGQQDEDLEPEKATEDTQPASMTNIPQVEVVTEASSGVQTPGDLNLNNSDAVPDTIDANTETDEPSKAHSVVHPEKKERFLEDATTEEPTEEVVKVEAQQSQQADVMDANMVQEEVPKSEHADEPATDAFEVLNQESVDEPAIQAPVTIQVQNQEPLEEIELAEAVDTEATVQQSSAAFEESVPEHQCNLGATHNTEQEDTLEASGQSKGGQEYQDLGPENATENTQQASMTNILDVEVITETPSGIQTPMEINLVISDAIPDATDGNTETDEPAKAHTFVHPEKNEVFPENTFTTKPTAEVVKVEDQQNQQDDAMDAEVVLEEVPKSERADEPATDALEVLESVEETDDPMNEKTEETTQQSNIPASEETTAEYDATREPPANNQVQNKEPVDERESTVEEREVAEAVDTEAPVQQSSVAFDEAVPEEHHNLGVANNTVQEDTMEATGQTQEGQQYQDLGPENAAENTQPASTENIPDVEVITKAPSEIQSPVEINLDISDAIPDTNDGNTETDEPAKANTVARPDTEESFAEDTSTGPTEEVVTLEDQQSQQVDAKDADVVQEEVPTSEHTDEPATDAVEALNQESDEETDGPVYENTEETTHQSNMPASEETLPENDVTTREPSVTIQAQNQESLEEREVHEAVDTEATVQPSSASFEESVPEHQHNLGATNDTVQQDTLEATKQTKGGQQYQDLGPENATENTQPASMANIPDVDVITKASSGIQTPVEINRDISDAIPDATDGSTETTEPAKAHSIIHPEKKESFQEDTSTAEPTEEVIKVEDRQSQQAEAMDADVVQEDVPKSEHADEPTADALEVLNQESIEETNSPVNEETEEATNQSNMPASEETIPKYDAATRDQPVNIQAQNQEPVDEGEATVEEREVAEAVHTEAPVQQSSVAFEEAVPEDQHNLGVANNTVQEDMMEATGQTKEGQRYQDLGPENAIENTQPASTANIPEVEVITEAPSGFQTPVEINLDISDAIADTTDGNTGTDELVKAEGVIHPENKESFLEDTSTTEPLEEVANVEDQHSQQADAMDADVVQEEVPKSKADEPATDTLEVLNQEYAEETSGPANEKIEETANQSNMLTSEETVPEYDTATRDPPVNIQAQNQESLEEREATVAENEVAEAVDTEAPVQQSSVALEDAVPEDQHNLGATNNTAQEDTQDAIGQTKEGQQFHDLGPENATENTQPASMANIADVDVTTEAPSGIQTPVEINLDISDAIPDTTDGNTETDKLVKTEGVIHPEKKESFPEDTSTAEPTEEVANVEDQQSQRADAMDADVVDEEVPKSEHADEPATDALEVLNQDYAEETNDPVNEKTEETGNQSNMPPSEETTPEYDTTTREPPVNIQAQNQESLEEREPPVNIQEQSRESVGDAEAVNTEAEMQQNSVAFEETTPENHVATSEPCSEIQHAHHVEPEEINGPEDGKDDEITNMSSREYLVRDNVLQSGPIIDIQPVQELEQIKTDEASNQTHAVIFNDLAQEDATATSEPQVTETELKDIEATEAEEITKLDHVTHSKELAVENDSTADEPHKGEIHQTLEQDLVEVKDTGTYHEKTISTSEDTVQDNLTEDEPSFGSQEVDDAESTEETKQNIAENIAEVSDVAIVDDAIEQNVLQTEDIVEMHKQELEREETERIEPVESEEASDQRNDAPFDYSAREDNTKESEIQQTESATETNEIEPTEIEAVPRESNTCVSEEPSQEDHIKESETSFDNQEVNITESSEVNDSHKDIISGGISDPSNTASAGDSSEGSNVPEGEPPEQAVQELGSEEIKNTQIDEVNETSLEMNATVFQIPSQEENPDTTKLHESTEVSNIEATEMHGNPHQSDLAAQSEEQTTEGISSGLKPESIEGNDTEAKKCQSTSQEKTISASESVPEDATTEPDVDHQQLQDQESAKLKETEADKFQEIVSSNTLSSEEFTSTEPSSDTEADNSQLAEETEDTEIVKSNTALAEAAAPETDATADTSSFHETDLEENKDTGTIETEDGMVSSDYTSEKMDTETMETEAVPHDSSDANIKEHTEDDTSTPNAPHAGTEPVHELESVEVSADTTEHPGETHDSASDELTPTEENTAVTEPSFSTQEVQNLTSQEIKDSEDDKTDEFSDINSFPIPGEADQVPRSETTPDVQEVEELGLTEETRDIEAIEPGDQQEDIVSTLEKPEIDGEPSADNQQVHEDKLPEVEDNKAIEAEASKQSNIATPDNAAEERNELESDPDPYAQPAEQVELSKDNENSQLVKTEETSDQSNFVVLRRTTEDSVAREIDPPVAIKQEQPVEEIKGVDATEAEEDFRTTQAVAIEKLASVNKIATVEPTYDIQRMDDLEATEEKKHAEAINEGDQSNIAVSEEQTPTYNGETPEDHHVESNEGTMGNETDNIILAHGIKDEIQKSAELKDGPCDLSETVLTTRRSENMIDEDNVQTYGNDTVEASNSIHQVKEEPDAGTEHNSSQMISECSGENETHVQDRDVDMWILTEGVIAEASQALLENDPQAAQDTIEKDDTTKSSEPISDHDSRQHCDVEALQQQSCETEALSILEQDEALQKIDSDQKQKEVEEIESQNDELQVDEQKHEDKRDDLAKEPLVEYQNFENRASNNTKDNDAFKVEQTEAANSEILKNKALHISKESTPSIMAMKVENIKETSEGTEEDDAAKNDNKDEQENAENVDIVSKTSTNEQGQTTDEIRKEEDPVHIIQASEKEIADEIEESKEIHEDNAICHDKLQTNSEKEESPQPHSNEPYNVDAKIDDTTSLCEEIIHDNTSINPREIEEIGENKGPDFTSEPSVESSIQNNVEDSSSHHKVEDEKLSMSEKNDVDTEAMQEINDESGADINQTEQCQEEITADDVLQLETEGNSFDKIEETASNEETETSTAATEAVTFNEDITDKVSGADGAPSNGSLKTFTDTGRDIDVPLVITTSKEESVNDTMENLNLDLPGHQAQDGNTAEKVLSLEEREREMPSSEKLLQTEPGENQIPNEQDEKDIRDENQTLKEKDEDDMQDTEFGEAKKEVQQELPVSHFLMNLILGKESSDANEDSESEAARKQGEATEDDSCTFISEQEESLGSLPTENKVDDNPTFVEQEKHEVKCSEETQEMVEEQSDDQLHTERSIEIDEDIKKNTRALEIPAYQDNPQDGISGELQTEEAAGVSTKMVTRDIDISSVVLDNRTVGTVCQEKMEVSTKNENGSLRSSLNDSTNTMAPQDDTLGEGQSRLVLEPLPEDKSVDVVSEQAPLLTESGMTDANDLSSDTTSAQNPVSTKPTESARVEATYSTDIQLENEEVDKKEEDQHANTTKDEVSKEIVESSHINLQKITRPEEKSNELETQITEPVCDSQAILAHEKEISEENFPTAVEIQADGPNMQINQDKQDEAADIETEMKPEKLGESNFQEHQDNGTEQKSPKETDEGDQQLVAKKEILTQEMDVHETVERPQQAVESPQQTVSITSNEDQELFDSKVQERDLNVVSPREASEAEENFVDVTKPEFSTDEEQSPKADAEEKIYDEKIKDIEGTKNLTDEAAIKTEAPGAAQKTRKKYSLLSGVGSKVKHQLAKVKKAIVGKPGHTKPVSPTA

SEQ ID NO: 222819 - protein, 392 aa, Zea Mays
METWRQHVTGGKLREITEEAKAFSIGNKALAALFVHTPAGELQRQIRAWLAENFEFLSVTGADAAGGAAGQLELLSTAIMDGWMAGLGTAQPPTTDALGQLLSEYTKRVYTSQLQHLKDIAGTLATEEADDPAHVSKLRSALESVDHKRRKIMQQMRTDTALLTKEEGGSPIRNPLTAAEDARLASLISLDNILKQVKEVIRQSSTGPMRKSKRKALLELLDDLLTQMPSLLDIDHPCAQKQIMEARKVVESLQEDPDDPAPQSNALGEGEVSQWNVLQFNTGTTAPFIIKCGANSSGELVIKADLRVQEPKGGEVIRVVPRPTVLADLSFEEIKGVFEQLPEAVSLLALARTADGTRARYSRLYRTLASKVTALKETVAEMERGGVFKDVR

SEQ ID NO: 222820 - protein, 451 aa, Zea Mays
MEPKKVMDTMLVSRVKILYIRSLLAKSPELQSIKVSPVERFLEKSNTGRSRSSSRGSSPGRSPVHHHGHGSRTALVDEHVHGFKVNIKQEKKSKFSSIVLKLRGIEEETWRQHVTGGKLREITEEAKAFSIGNKALAALFVHTPAGELQRQIRAWLAENFEFLSVTGADAAGGAAGQLELLSTAIMDGWMAGLGTAQPPTTDALGQLLSEYTKRVYTSQLQHLKDIAGTLATEEADDPAHVSKLRSALESVDHKRRKEVIRQSSTGPMRKSKRKALLELLDDLLTQMPSLLDIDHPCAQKQIMEARKVVESLQEDPDDPAPQSNALGEGEVSQWNVLQFNTGTTAPFIIKCGANSSGELVIKADLRVQEPKGGEVIRVVPRPTVLADLSFEEIKGVFEQLPEAVSLLALARTADGTRARYSRLYRTLASKVTALKETVAEMERGGVFKDVR

SEQ ID NO: 222821 - protein, 50 aa, Zea Mays
MKRVNNKKETCAVTPHLFIHDTSNFKDQNKALTLKHGRTRVSLENSVVKL

SEQ ID NO: 222822 - protein, 172 aa, Zea Mays
MNEQGLGGLGGGRGAVQGHGREAMALLQHQQLQQQRRQLEEEDEVRRQMFGGVAAFPAALGHGQQVDYGEDAGGLGDSDAGGSEPEPPPERTRGGSGGGGGKRSRAAEVHNLSEKRRRSKINEKMKALQSLIPNSNKTDKASMLDEAIEYLKQLQLQVQLVGATLQRQALGQ

SEQ ID NO: 222823 - protein, 302 aa, Zea Mays
MGTPSPEAISRIRNEKARRYLSNMRRKKPIPFTQKFPNADPLALGLLERMLAFEPKDRPSAEENIANVDREPSAQAVTKLEFEFERRRVTKDDIRELIYREILEYHPKMLKEFIEGTESSGFMYPSAVDNFKKQFAYLEEHYAKGSTGTPPERQHNSLPRPSVVYSDNQSQSTANITEDLSKCIIRENAQKSQQYNASVANKFPSHVPQGAAARPGKAVGSVLQYNLSQASAAEQYEQRRVARHPAVAPNNIPSGSSYPRRNQTCKSETGDTERMDVNQAGQPKSYAANKLPATVDGRGGHW

SEQ ID NO: 222824 - protein, 264 aa, Zea Mays
MDTPTAKAAWNANYGVVGSGDRRLAFSRQLSSNATTPRLARYKRLEVLAAFTNALFLLFLSFSLAVEALHAFMQDESEHKHYLIVSAVTNLLVNLLGVWFFRNYARVNIVYRNAEDMNYHSVCLHVLADSIRSAGLILASWFLSLGIENAEVLCLGIVSVAVFMLVLPLFKATGNILLQIAPSNVPPSAFTKCSRQIAACEDVSEVWQGRFWELVPGQAVGSLSIRVKSGADDRAVLEYTHGLYQDLGIQDLTVQTDEFVGPVS

SEQ ID NO: 222825 - protein, 138 aa, Zea Mays
MEWPPPSTSPSPSLVVRSPRQTVSLIRNRRPHRDWAPSSRSPSFAARDHGPKPSEVYGFVGSITTVIATAVYLAWAYTPEPVLRSLGITYYPSFSFVQVLGTGGAIVRGCDRGAVHGHLHGPQLRCHSSSDFLQHYLR

SEQ ID NO: 222826 - protein, 848 aa, Zea Mays
MDLAINPFSSGTRLRDMIRAIRACKTAAEERAVVRRECAAIRAAISEGDQDYRHRNMAKLMFIHMLGYPTHFGQMECLKLIAAAGFPEKRIGYLGLMLLLDERQEVLMLVTNSLKQDLNHSNQFIVGLALCALGNICSAEMARDLAPEVERLLQNRDPNTKKKAALCSIRIVRKVPDLAENFMSAAASLLKEKHHGVLISAVQLCMELCKASHEALEYLRKNCLEGLVRILRDVSNSSYAPEYDIGGITDPFLHIRVLKLMRILGQGDADCSEYINDILAQVSTKTESNKNAGNAILYECVETIMGIEATSGLRVLAINILGRFLSNRDNNIRYVALNMLMKAIAVDTQAVQRHRATILECVKDADVSIRKRALELVYLLVNDTNVKPLTKELVDYLEVSDQDFKEDLTAKICSIVEKFSLDKLWYLDQMFRVLSLAGNYVKDDVWHALIVLMSNASELQGYSIRSLYKALQASGEQESLVRVAIWCIGEYGEMLVNNLSMLDMEEPITVTESDAVDAVEIALQRYSADVTTRAMCLVSLLKLSSRFPPTSERIKEIVAQNKGNTVLELQQRSIEFSSIIQRHQSIKSSLLERMPALDEANYLVKRAASTQAAVSSVNSAPAVTSGGPLKLPNGVAKPPPAPLADLLDLGSDDAPVTTSAPTTSPNDFLQDLLGIGLTDSSPIGGAPSTSTDILMDLLSIGSSPVQNGPPTSNFSLPGIETKPPPVTPQVVDLLDGLSSSTSLPDENAAYPTITAFQSATLRITFSFKKQPGKPQETTINASFTNLATTALTDFVFQAAVPKFIQLRLDPASSSTLPASGNVSVTQSLSVTNNQHGQYYKDRVRLSLA

SEQ ID NO: 222827 - protein, 368 aa, Zea Mays
MALAKASLVDDLQNKNQELMKQIEICQEENKILDRMHRQKVAEVEKLTQTVRELEESVLAGGAAANAVRDYQRKVQEMNEEMKTLDRELARAKVSANRVAVVVANEWKDGDDKVMPVKRWLEERRILQGEMQQLRDKLAIAERAARSEAQLKEKFQLRLKVLEEGLRMSTSRTNVSGTRRQSIGGADGLSKANGFLSKRPSFQMRSPVSTTTTLVNHAKGASKSFDGGCRSLERYKGHVNGNGVLYDMLQKEVISLRKACHEKDQSLKDKDDAVEMLAKKVDTLTKAMESDAKKSRRELAAMEKELAAVRLEKEQDNRARRFGSSSGSASSSQLPPGRTGDWEGTSHCPGEDGISGRASSAYISWSQG

SEQ ID NO: 222828 - protein, 1293 aa, Zea Mays
MASRQHNAQFHKSKTLDNKYMLGDEIGKGAYGRVYKGLDLENGDFVAIKQVSLENIPQEDLNIIMQEIDLLKNLNHKNIVKYLGSLKTKSHLHIILEYVENGSLANIIKPNKFGPFPESLVAVYIAQVLEGLVYLHEQGVIHRDIKGANILTTKEGLVKLADFGVATKLTEADINTHSVVGTPYWMAPEDVHPPIPEGLSPEITDFLRQCFQKDAMQRPDAKTLLMHPWLQNSRRALPASLRQPTPLRNIDGDDESSRGDNNSGFCDTPGDTRATIASNVDQVNGRNGPNMDSAAQSKSEELHDGNLELTEGISSNNVALVKDNVVLNKDPTLVLHEKLPVESSFGDADLNGKVMAHELLQGGLPSKIELENKESSTVEDGDVFSFQAGRQNIDFQMVVEPSVVEGPKQLSRFSDKPEDASLEDLFPPIDKRGDNGAEPSTSTTVQELQYNGVHNGFVKGLNARVEKQKENDSESMNGGKLIEFAMQLENIDASGFGEHIPGESLFPLQSVEYSKIVAQLKPGESEDVILLACQKLLSIFSHRPEQKQIYMAQNGFLPLMELLEIPKNRILCSVLQLINNIVKDSTGFLENACLVGLIPVVMNFAEPNRPKDVRVQASLFLQQLCQASTLTLQMFIACQGIPVLVSFMEPDYAKYRDMVHLAIDGIWQVFKLQHSTPRNDFCRIAAKNGMLPRLVNTLYSLNEATRFASVSGSGASVTQNGSTPRRRSGQLDPSVLESCKARLDHHHSSGSLQSLQADADKHHILMDSSSSPRFSDKTSSNLERNENDLVIRPQRLSVSAGRTSTDRSPKHIELVSNGHNNSQNDQVRPLLSLLEKEPPSRHVSGQLDYVRHISGLERHETILPLLHTSTERKTNGELDLMMDFAEVSRHGRENGHLDSSIKASNRVHSMKYAPSASASNEGASTSGAASQTASGVLSGSGVLNLRPGSTTSSGPLAQMFSSMSADVAREYLEKVADLLLEFAQADTVVKSLMASQSLLTRVFQMFNKIEPPILLKILRCINHLSGDPNCLETLQRTDAIKHLIPILELRDGPLVYQIHSEVLNALFNLCKINKRRQEQAAENGIIPHLMKFVMSDSPLRQYALPLLCDMAHASRNSREQLRVHGGLDVYLNLLEDDAWACTALDSIAVCLAHDNDHRKVEQALLKKEAIQKLVKFFQDCPEQYFGHILDAFLKIITKSSRLNTAMATNGLTTLLIARLDHREAIARLTLLKLIKVVYEHHPRPKQLIVENDLPQKLQNLIEERRDGQRGGQQVLVKQMATSLLKALHINTVL

SEQ ID NO: 222829 - protein, 245 aa, Zea Mays
MGKAKSKGPKFAAVKKIITKKTINKYKEDVLNHKKKDADKEKLGRNVPQVSSALFFSYNTALGPPYRVIVDTNFINFSIQNKLDLEKGMMDCLYAKCTPCITDCVMAELEKLGQKYRVALSITFIYLHNLIYLPHRIAKDPRFQILACTHKGTYADDCIVERVTQVEGQPGAVVRAVSLSHHDVGSKGSKQTCICVHKCYIVATCDRDLKRRIRKVPGVPIMYITRHRYSIERLPEATIGGAPRI

SEQ ID NO: 222830 - protein, 148 aa, Zea Mays
MRWTSQNRRRNESQGETNMRERRRARIMNDMKISGSGDDAKSSNGKAARGGSNGGEKQGDESNGGGILSVVASRIGVVVSGANGDRSGSAEDGAKTSAGDPGHGSKGEEKGRGVNGGRIVEQIISNLPSDDQAPDADEASLLIAIIED

SEQ ID NO: 222831 - protein, 70 aa, Zea Mays
MAKRPVVAVTVERSRGMNPTVAGYLALWLPGLAWSCPAPTGTAAAALRMVPRRALATLVTVARARRRGVV

SEQ ID NO: 222832 - protein, 70 aa, Zea Mays; identical to SEQ ID NO: 222831

SEQ ID NO: 222833 - protein, 223 aa, Zea Mays
MFSANCYVRDQVRRYVYHDVVRLGDLEKLIDCSCVQTYTINSAKVIFLKPRPQSRPFKGSGNICLTCDRILQEPFHFCSLSCKVDHVMTQGGDLSNILQHYGAGGGGGGGTADPDRLAFPRFENLRVVDGSDLDDDVQVVTPDSTLEDPTNNAGGGSSDNGTDDARRQVVVHGGGEAAKRKKGGGFLPQIVLSLGGGGGGGNRRKGAPHRRRRPHSSLPARCR

SEQ ID NO: 222834 - protein, 330 aa, Zea Mays
MKAQPLLLPALKRRRGPRVAVLALVLCSLLVPLAFLFDRAPSGYVTTEERHRQEVVLPLLDHVAEKRRPSGSGADTRQDALEKKVPGSSAGVIHQQTPDKNISKVIRQQTPEKTISKGSAGVVHQYKQIGSHSTSDGAKPKVSPAPKVEPSDAVSDSTKVARDTSQEGEKADEVEKSKSCQLEFGSYCLWSIEHKEVMKDYTVKRLKDQLFVARSYYPSIAKLQGQEALTQEMKQNIQDHEKILSVSTVDADLPSSINRRMKQMEQTIVRAKSCTVDCRSVDRKLRQILYMTEDEAHFHMQQSAFLYNLGSVVQNTGTSLYYQGTFLRLL

SEQ ID NO: 222835 - protein, 478 aa, Zea Mays
MDLSYQGSKECNIRTTDNSLGAIKLWSKRVFAQQETTRITRSKKNIAQPDATLTPRHNIDYHTQANGHAHLDENTNMTNEGHVAPFDGKNPTGNEDNVDVLADNNMTIGGQVDDTNQMSNGDLELGQNDRWERGINMGHGLHRINRGLRGKLQVVIPEGKIRPMAPLVAAKFATECNIVVRNHVPVFKHWKDYKNHSGLFNLFTGKLSAKFDINTSDAPVQKACSQMMKSAVRQQRYRLKKKYFDPFPLHLVAKKSPIRSMTDEEWNELVEYWKSPKKWYETSQKNKENRSKVKFHQTTGSRSYMVHVENLGDKYIDQEPDALDLFKECHYSKIKKCYSSSVQQVITEIENKWSTPTEGEQEMFVTEVVADVLAQNTKKNLFLQNVGIQSAYPRSSVRNIEAQLEVEKRANSALRSVVNTQREELEVLSKQMHEAEESRIKEQEELKKRQVEMEAEMKKRQAAMDAKLQLLFSKFQPR

SEQ ID NO: 222836 - protein, 296 aa, Zea Mays
MQALVRAQARVRARRVRVSLESQGTQKKPPEENVHEDHVRDIEEDWCGSIGSVEEMKAKTLKRQEAAAKRERAMAYALTHQWQASSRKQKAASLQGQGLAGDENQWGRNWLERWMAARPWENRLLDSNARDSVTAGDDDDKPAEEGKAKAPDLSKPKGKAPVLASQSNGSRQEKAADHEKSHSDVSGCGSSSGRSADVQPTVSLESSKVEVKVKAPQEVADEASSGPSNPASRSASNPKERPARTDAPARKRLSLPNNATAASRGVGKRPTNSSRSRTNVASRPKNGRGASSPGLE

SEQ ID NO: 222837 - protein, 1074 aa, Zea Mays
MVNAEPCSMGGIMDYGVGVGTKSSPRSMAIEKAQEELRQESDVRDEWRRELEFLEKGGNPLDFNFAHLETVGVHSASLTNQVEAQTVISDAKGSFSASPLGDSVESTDKPGGSMCRETNTADNLMLLGGGKNDIAEEKVVKRGTKRLNAAQPKHSLPSDGHKNTKKPAASGLSHLGVKSQAYVRRNRSKPSRESGNVTSIRSSMIPAKVYEPNDEKVTAQKNNADDHGVLSVSSIKQSGPNRDIAPKSIASDDHAAMELDGIQTILESECVVNDKVNKAGNNNKAKQLSSNDTNHDRFLVGCGEIAAEVSSAETPDANLKVVIKPCYSSASTYDEKESCAVHEKADDGHLDECMAHIREGELGHSRTLPCVVEASTSHNDVVGPSCEGTVNIVDEHADGDINTVAGKIDSHEDLDSSRHSNMILKVSGTSIDFSRPASLKESSDLVRPEASNISHVKDEIEVCNSAIVAQKDTECLSSGRSMNIEESPVSVRKNSYVGNSNSAHPISVGIDLSDALSPPKNDESNVESEIKKYENLNKMEKKAYEDSILKNARVIEANIKKAGQRSPCNIALEKRRKSHWDFVLEEMTWMANDFMQERLWKSVAAAQVCHWIASDAHAKFEKASILKKQKAVIKIIAKGIMSFWRSAEALQTADRTAKVMPHNSTMLEEIDPSGVKAGKEQGHNSLEAKESSQQRSQIHDYAVRFLEYNRTADLHVLPEAPPTPDRLNDFGVLKVSDHLSEESLFYTVAAPGAVLAYRDSLESLFMYHKEDGNAELNDDYEASACDSVAVCSDLPQENAYEEDEGETCTFLSPKAYVGGSISNMVHKKKHVMPQRISLARPYEIGTYVPYQPCMESKSRNQPLLSNGKRPTSFLAIPPKRTRTAARQQVVSPFHAGASVPPQDFSSGNTNSYQDDQSSLHSESLPWRNMDFESTVDSDRQLPYDAGEMCTKVNNKKKLKNSGYKIAQNAANLYVPTSAKVHFSSFIGAPLLLLEYLKKRTDVHQYGSNGNKVAYGGQHASKKLKMGKQGIDISQETSVASQMSNMAHPARFIKIIANRDRGRKCKALKITRILG

SEQ ID NO: 222838 - protein, 421 aa, Zea Mays
MREELEVVLVDTRKQHEDLIKNKERAVSVLDSSTRRSAILDAHAEKIKLQIDEFSAELEVIQSSIETLRQKKLKMQRLESKHIDLDKGCTYSHATLSNCASNAFGDDLYGFREFTVLDMQSATCKFSESFRMWSQGRGCVYKGEIMNRTVMIYKLHCHSIESVRQFQQEVYILSNVRHPHLVTLVGACPEALCLVYEYLPNGSLHDRLFSRRSSRHLPWRIRARIVAEISDALLFLHSCKPQTIVHGNLKLENILLDTECHCKIADFGISRLFTGDVKDYPSGGSEPPEGSFPYADPEYMRSKVLTPKSDVYCFGTVILQLLTGRQEPARRLAGEVRCAMACGKLSSILDPAAGHWPMEVAGRLAELGLRCSEDRSRDRPDLTAETVRELEQLHLTREEEQAPSSFLCPIMQASTIVLHHC

SEQ ID NO: 222839 - protein, 303 aa, Zea Mays
MSKGPVPFANIGKRAKDLLYKDYNFDQKFSLSTCSNSGLNLTATGVKINEDFIGDIRTQHKSGRTTVDVIIDSDSKVSTTVTVDEALTGLKTSFAFKVPDHKSGKLDLQYAHNRFSMNSTIGLTSTPLVELAATVGTSELAIGAEFGFDSTSAAVTKYNSGVGYNKSDFSVSLLLADKGETLKASYVHLFNPTNGATVAAEVTHKLKTKENYFTLGSSHALDPSTLLKTRFSNSGKTHDNLFDKNMFTLLELESFFMQWKEIHASFSYYLVIICIDYNFTMIILTQEVPAVNQGRVNILRLFV

SEQ ID NO: 222840 - protein, 256 aa, Zea Mays
MSKGPVPFANIGKRAKDLLYKDYNFDQKFSLSTCSNSGLNLTATGVKINEDFIGDIRTQHKSGRTTVDVIIDSDSKVSTTVTVDEALTGLKTSFAFKVPDHKSGKLDLQYAHNRFSMNSTIGLTSTPLVELAATVGTSELAIGAEFGFDSTSAAVTKYNSGVGYNKSDFSVSLLLADKGETLKASYVHLFNPTNGATVAAEVTHKLKTKENYFTLGSSHALDPSTLLKTRFSNSGKVGLLCQHEWRPKSLEDAKHS

SEQ ID NO: 222841 - protein, 375 aa, Zea Mays
MSKGPVPFANIGKRAKDLLYKDYNFDQKFSLSTCSNSGLNLTATGVKINEDFIGDIRTQHKSGRTTVDVIIDSDSKVSTTVTVDEALTGLKTSFAFKVPDHKSGKLDLQYAHNRFSMNSTIGLTSTPLVELAATVGTSELAIGAEFGFDSTSAAVTKYNSGVGYNKSDFSVSLLLADKGETLKASYVHLFNPTNGATVAAEVTHKLKTKENYFTLGSSHALDPSTPLVELAATVGTSELAIGAEFGFDSTSAAVTKYNSGVGYNKSDFSASLLLADKGETLKASYVHLFNPTNGATVAAEVTHKLKTKENYFTLGSSHALDPSTLLKTRFSNSGKVGLLCQHEWRPKSLVTLSAEYDPKVVSAPSRIGVAISLKP

SEQ ID NO: 222842 - protein, 106 aa, Zea Mays
MSKGPVPFANIGKRAKDLLYKDYNFDQKFSLSTCSNSGLNLTATGVKINEDFIGDIRTQHKSGRTTVDVIIDSDSKVSTTVTVDEALTGLKTSFAFKVPDHKSGKC

SEQ ID NO: 222843 - protein, 227 aa, Zea Mays
MYFICYDLLYKDYNFDQKFSLSTCSNSGLNLTATGVKINEDFIGDIRTQHKSGRTTVDVIIDSDSKVSTTVTVDEALTGLKTSFAFKVPDHKSGKLDLQYAHNRFSMNSTIGLTSTPLVELAATVGTSELAIGAEFGFDSTSAAVTKYNSGVGYNKSDFSVSLLLADKGETLKASYVHLFNPTNGATVAAEVTHKLKTKENYFTLGSSHALDPSTLLKTRFSNSGKC

SEQ ID NO: 222844 - protein, 957 aa, Zea Mays
MYLDVADSGVLPYGWTRYAQFSLSVVNQIHNKFTIRKETQHQFSARESDWGFTSFMPLGELYNHSRGYLVNDTCIVEAEVAVCKVVDYWSYDSKKETGYVGLKNQGATCYMNSLLQTLYHIPYFRKAVYHMPTTENDMPSGSIPLALQSLFYKLQYNDSSVSTKELTKSFGWDMHDSFMQHDVQELNRVLSEKLEDKMKGTVVEGTIQQLFEGHHMNYIECINVDFKSTRKESFYDLQLDVKGCQDVYASFDKYVEVEQLEGDNKYHADKHGLQDAKKGVLFIDFPPVLQLQLKRFEYDFMRDTMVKINDRYEFPLQLDLDRDDGKYLSPDADRNVRNLYTLHSVLVHSGGVHGGHYYAFIRPTLSDQWFKFDDERVTKEDAKRALEEQYGGEEETNPGLNNTPFKFTKYSNAYMLVYIRESDKDKIICNVDEKDIAEHLRIRLEKDREEKERRKKEKAEAHLYTIIKVARDDDLKTQIGKDIYFDLVDHDKVPSFRIQKQMAFAQFKEEVAKEFGIPTQFQRFWLWAKRQNHTYRPNRPLCPQDEAHTVGQLKELVNKAHNAELKLFLEVELGLDLKPLPLPDKTREDIFLLFKLYEPEKEQLRYVGRLFVKASGRPQDILPKLKMLAGFSQDDDIELYEEIKFEPNVMCEYIDNRLLFRSCQLEDGDIICFQKSSKADSADRYRFPDVPSFLTYIRNRQVVHFRSLEKPKEDDFFLEMSKIFTYDQVVEKVAEKLGVDDPSKIRLTSHNCYSQQPKPQPIKYRGVERLLDMLIHYNQTSDILYYEVLDIPLPELQALKTLKVTYHHATKDEVSVHSIRLPKNSTVGDVLNDIKTKVELSHPNAELRLLEVFYHKIYKVFAPNEKIENINDQYWTLRAEEVPDEEKNLGPFDRLIHVYHFTKDTQNQTQVQNFGEPFFMVIREDETLSSIKERIQRKLKVPDEDFSKVPDFQMFCS

SEQ ID NO: 222845 - protein, 90 aa, Zea Mays
MQGCNIGEGGICLAEAVHGSAPDIAGKNLANPTALMLSAVMMLRHLQFNDKADRIHNAILQTIAGGKYRTADLGGKASTSEFTNAVCDHI

SEQ ID NO: 222846 - protein, 351 aa, Zea Mays
MFSVGTKDGFKIFDARNGRLCYEKSLGGFNIVEMLFGTNLLAIVGTGEQPAMSPRRLCLFNTKTGASKRDLNFKTSILAVRLSRKRLVVVLQDRTFVYDLNSTTILDEIETVPNTKGLCAFAPNSEECYLALPASTSKGSALVYKASKPELICQIDAHLAPLAAMVFSLNGMYLATASEKGTMIRVHLVAQATKSHSFRRGTYPSTIYSLAFSPSVDLPDVLVATSSSGSLHMFFLDASRNARRQANTLFSSVIPGSVTDALDPANHHVIHNVVTADIKSCLAVHSVENSQNSSKFPSLKTVIYIVTHNGYFREYLIGTTKSNESSWLLEREFNLLDAYSGSPKQNELHID

SEQ ID NO: 222847 - protein, 141 aa, Zea Mays
MASEKKQSNPMREIKVQKLVLNISVGESGDRLTRAAKRGTRCARSASGVTRRSPATSRSGATRPCSCLRAASRSRSTSCSGGTSATPAASGSASRSTSTLVSSMIHQQASMGWTSTSCLSVLAIASRAAGGASPVLGFSIG

SEQ ID NO: 222848 - protein, 240 aa, Zea Mays
MYVIEYDGKGLLNPKPKKKSASTGQVETHAPAGGPTSYQQYLSSMSMPGPSPSGGTDSAGYGVDQSATHPSQLQSSSANVQAPYDDTFSFLPPNMLTGSANDAMGLELGQLQQVTSQGQTIQPANVGYGDWPRNRDSQYPDDFTEDIRVKSHQLLEGEDMQQLLRVFSMGGASGSLPDDTFNFQSYMPSPLPNLGFETERSHSSGKAVVGWLKIKAAMRWGIFVRKKAAERRAQLVELED

SEQ ID NO: 222849 - protein, 1758 aa, Zea Mays
MDPAAGGGRGRDRAGFERACRLPNTVHSEVLPSLPLPTLPRELGFDALRDDEPLAAPDRPDTIMQAANIARVLADTDVSHLGFTAADNVDVDPIRCSWLWREVLKHNPDAFKVKAPSPSSQGPFGGPGYQNQEHEKHFEHFTPNTSKARNESAFPQDEIDSHREHFYNELTSDSIASKKPKIRKRENNNSVSSSAPSIPNTQDVITTFCEVVEDFCGKTEIPDDGDGGDWLSIPLGDVKVLVNEITSVRSKRILHEVPMDTVTRLLDVIDRQIRYSQGLSIDVKENSDVVDAEPLVFSALEASHAALAIMTHHDMPKQLYREELIERIIDFSRHQITDCMAASNPTFRALYKPAENVANDGDDDEDDLENGQVSKRRRTATNLSMRKSSNKLSASVYSAVQKLCLILGFLKELLTTVRLSDGCILQLAKTCFTTFLVDNMQLLQLKAIGVICTVFSSYTQHRSYLVDEILHLLRKLQFSKNAVRTYHLADEDQKQIQMITALLVHLVQFSAIVPNSLKGTVDWTTIVDASGDADYYPIKCHEAATEACCRFWTDVLQRFTAAKSQDMSETKGIIDNLVQDFLMILNLPEYPAAASILEVLCVLLLQNAGLKSKDTNVRCFAIDLLGGIASRLKHDSVICSEEKLWILQDLTDAGSDGSKILKNKCCVCLGGRDCMGAASQDNLERDSVCPLCFCKQQLNVLQTYCQSQIKENGKKTAASTSKKSAKPAEVPAVDIIQQILLSYLQESGPQDDGNLFTRWFYLCIWNKENQHSQEEIIYYLARLKSKEILRDSGNGLAISRDSAKKICLALGQKNSFCRGFDKILALLLASLRENSPVIRAKALRAVSSIVEADPEVLGDKRVQSAVEGRFCDSAISVREAALELVGRHIASHPDVGLKYIEKVAERIKDTGVSVRKRAIKIIRDLCASNPNTDTTHAFVEIISRVNDEESSVQDLVCKTFYELWFEEPTGSHKHLVADGSSVPMEIAKKTEQIVDMLRKMTNHQPLITIIKRNLTLDFLPQSTKAAGINSYMVASIQKRCELICKRLLERILQVEEGAAKEMEIHMLPYIVALQAFCIVDPTLCIPVTDPSKFVVTLQPYLNIQVDSKSAAQLLESIIFVIDAVLPLIRKPTQNVVEELEKDLKHMIVRHSYLTVVHACIKCLCALSESAGRGPGLVENLVNIFYKHLSGANSDSQLLGRSLFCLGLLLRYGYQLMQTSENQLDFPKIINLLQRKYLLRDDFSLKVRALQTLGYILIAKPEFMLQKDMLKLIETALSSEIQGLQNLYEYLRDAESQLTAESTVKPPVRCEINGRSKVPVAAGAGDTNICGGIIQLYWSSILERCLDTNDQVRQSALKIVEVVLRQGLVHPITCVPHLIALEMDPLEGNSKLAHHLLMNMNEKYPLFFESRLGDGLQMSFKFFESIVSNHKMAANIKSNPIAFVKPGISRIYRLIRSNRNSRNKFVHSIVRKFESDSRSRSTVSFLVYCAEVLASLPFTCSDEPLYLIYDINRIIHLKAGGVESNLKRWTSMSQSQNTVDMPTLPGERHVVMQEPGGYYDNVGYAHERVNANPCSTSDVDMAKVQVDVDMAKVQGDCLDAIALQLLLKLKRHLKVVYSLDDARCQSFSLKEPPKSGETFSRQNIPFNVSSTNISLPSCLQDVASVYQDFKTVLHEDSMDFAVFIPSVQIRKRPTPRNTTNPTPRSTTRVRRTAASSVTKARGGARGDDSDDSDDDDWTGGPRVLDFSGGGRVTRQRVQV

SEQ ID NO: 222850 - protein, 205 aa, Zea Mays
MLVDGLERAAGLCLQMFNIDFSLGNIIVNFSSGKPQIDNKWTSSAVMVYREAVSAGLLPSSDVLSQVLGCLRLPHGSSLKSTFIENMGVSCDIPQYPNINSLFEGFGEYDIRAFSILEEAASLGAVASISIKETRIVIDARKLKIFTAEVSLLRTLRSLKHRLAAGSRLPNVTILLPTEKKQVDIDEKEKTLKLAGRVKFTSSSQ

SEQ ID NO: 222851 - protein, 171 aa, Zea Mays
MDVQRHPISVCTAILGSTCLRSATRTSTAALPISSTASGARRCPGDRPSRKSNVQKRKVSRLFQSTSMHPKPVPQKEPLSAALSALTLVVQFNGWLSFFLLLYYKLPLRPETHKTYYEYTGLWHIYGLLAMNSWFWSAIYHSCDTIWTEKAIFFIRCCLSRINHSGTCTNN

SEQ ID NO: 222852 - protein, 171 aa, Zea Mays; identical to SEQ ID NO: 222851

SEQ ID NO: 222853 - protein, 563 aa, Zea Mays
MEPAGARKEWRAVPGSSLRSNGAEDAAEHGKLGQSEDRAIYEEGAGGLEDFCAITIDGSGGLSEDILQQRLQSVVRQREQLQQVEMELRAQAIAHPQIIQAQQSFQATSKEHAAAVAKIKQEQLHEREQYILELEMKLNDKDRELNALKIDHQTVWANQDLIREQTKELATVRRERDNSEAERAQHLTQIHELQEHLREKESQFIALEEQHRAAQDNILYKDEQLREAHAWVSQVREMDALQSQSLQVELRERMEQFNQYWISSQQQYAEMQRSLLHTIQQLQQELTEAREQSGAQKDGPQVSREGSAESSLVQSMGNSVASNGSATADGNQQLLKNNGSVDVSVQANSASAVPVPSSLLGIGGPAAHIAAMHAFMIHPQGIPQPLVASPNSGVPQFGSFQSQSTIQPNSQWPNQQEVQNVSQPQDETNYQTSQSDRTVLQQGAINTDELSSKPSQDSQPDHLNAHVKQQQSPVVEANVAEHVSCDEQQKILNEQDSLSNMNNHIGIVEHLEQNTESKVSMVLRFLYSSSFHECLTFTSLFKTRMKELHLISNLNLYLGSINI

SEQ ID NO: 222854 - protein, 190 aa, Zea Mays
MALMSLGAAGYTTATAPPRPRRCTLPFRAAASPAALDRRRRPHNVAGDFFVDHRCIDCQTCRWMAPEVFKRVDGKAAVAAQPSSEEERTKALQALLSCPTSSIHTEKPPKDILKVQNMFPLPIDDKLLPGVYLCGYNSEDSYGATSYLVIHPQGNILIDSPRYTPKLANNIEKLGGARYMFLTHMLFSDV

SEQ ID NO: 222855 - protein, 343 aa, Zea Mays
MGPIRCSRCKAYINPFMKFVDQGRHFVCNLCGFRNDTPREYMCNLGPDGRRRDADDRPELSRGTVEFVATKEFLVRDPMPAVYFFLIDVSMNAIQTGATAAACSAISQSISDLPEGPRTMVGIATFDSAIHFYSLKRAQQQPLMLIVPDVQDVYTPLQTDLILPVSECRENLEQLLESIPNMFENNRVADSAFGAAMKAGFLAMKSTGGKLLVFQSVLPSLGIGSLSAREAEGRANITTGDKEAHKLLQPVDNTLQTMALEFAEYQVCVDVFLTTQSYVDIASISVVPQTTGGRVYYYYPFSALSDPAKLFNDLRWNISRPQGFEAVMRVRCSQVGLISGHFY

SEQ ID NO: 222856 - protein, 1104 aa, Zea Mays
MASSPQQPPPFATQNPTAQGPGQGPPVSGTGALPGAFSNLQISRGAAPPPGAPRGLTPQQAPPAFAALSGPPPAAARPFFPGSPPAPPFVRAPTAAASVSPPFGGQPGVVSQQPPPFGGPPGAASQPPPPFGVAPGVVSQAPPPFGGPPTAASQAPPPFGGPPAMASQVPSPFVGHSVAASQAAPFGVPPVAGSHPPPFGGPPGAGPHPAPPLRQTFPGQSGPMASAAAWTQPTPPSFGAPQQSPPPFSSRPVGQPPFATQSAPVAQQLPFMGPPRANAPAFGPPSWQTQGAGSGAMQPPMRMPGIPGSMQPNTLGPPGTPTMTYSPHAGTQVSTPSKIDPNQIPRPMPESSVIIYETRQGGQATIPPAASSEFIVKDTGNCSPRLMRCTVNQIPCTGDLLMTSGMPLALMVQPFSLPHPSEEPIQLVDFGEMGPIRCSRCKAYINPFMKFVDQGRHFVCNLCGFRNDTPREYMCNLGPDGRRRDADDRPELSRGTVEFVATKEFLVRDPMPAVYFFLIDVSMNAIQTGATAAACSAISQSISDLPEGPRTMVGIATFDSAIHFYSLKRAQQQPLMLIVPDVQDVYTPLQTDLILPVSECRENLEQLLESIPNMFENNRVADSAFGAAMKAGFLAMKSTGGKLLVFQSVLPSLGIGSLSAREAEGRANITTGDKEAHKLLQPVDNTLQTMALEFAEYQVCVDVFLTTQSYVDIASISVVPQTTGGRVYYYYPFSALSDPAKLFNDLRWNISRPQGFEAVMRVRCSQGLQVQDYFGNFCKRVPTDIDLPAIDSDKTVMVTFKHDDKLPENVECGFQCALLYTTVYGQRRIRVINLSLSCTNLLANLFRYADLETQFACFLKQAANGIPTSSLPRIRDEATNTCINILQSYRKHCASVTSSGQLILPEALKLLPLYTLALVKSVGLRTDGRLDDRSYWISLVSSVSVVLAVPLVFPRLIPIHDLTSRDDDDSLVPSPLMLKSENVQEDGVYLLENGEDGLVYVGNMVNPATLEQIFGVSSLAALPAQAPEVLILEVETMQKGRTIWRFFPVISNRGQGTWRLLLRGVSRACPQADPKQDDLRGPDPVCSISVSRWIVGTKTSSISA

SEQ ID NO: 222857 - protein, 236 aa, Zea Mays
MSALLDLLMGIFRQQTLGGAALELAALAAPLSLAALVGLLIGWAWRPRWAGVVTVDNAQQMAQLPAAAPPPDRATATAVVSRNEAAAVVPRTVVAHAAAEDEQQQLAVNTGDLLHLWRLVDEKDGGPSWIHMMDRTLPTMRYQAWRRDPPSGPPQYRSSTIFEDASPEVVRDFFWDDEFRMKNSWDDMLLQHETLEECTETGTMVVRWVRKAAYINRRCVVLACSSRSSAATGSTS

SEQ ID NO: 222858 - protein, 456 aa, Zea Mays
MEVVASAPGKVLIAGGYLVLERPNAGLVLSTTARFYAVVRPLRDSLPADAWAWAWTDVKVTSPQLSREATYKLSLTKSTLQLTSARESTNPFVEQAIQFSVAAAKATIIDKERKDVVDKLLLQGLNITILGCNDFYSYRKQIEARGLPLTPEALLSLPPFSSITFNSEVANGTMTGEKCKPEVAKTGLGSSAAMTTSVVAALLHYLGVVSLSCPGQSSGDNTTTRELDLVHSIAQSAHCIAQGKIGSGFDVSAAVYGSQRYVRFSPEILSSQATGGTFLPDVVSDIVTQRWDHENKQFSLPPLMTLLLGEPGTGGSSTPSMVGSVKRWQKSDSEKCKDTWSKLAFANSALENQLRILKGLSENHREAYESVVLSCSHLTYEKWTEVATNQHQELIIKSLLAARDACLEIRLHMREMGIAAGVPGRTDALLSGCLLEVAAHNAAGWMDGSMDRSPGP

SEQ ID NO: 222859 - protein, 187 aa, Zea Mays
MSFVPSSTASKNSMETIPEHNLDVEYPTLTPVGKACSGRKGLFSRGKHSLGRIISKAGLGNLRQKQTHSIDGEIIGQTESVAPRFEVKGSKESTLHDKLPAMSEPSLLLTEMMRAVLYTSLPVLVQGRNWMLVYSTWRHGISLSTLYRRSRLCAGYSLLIVGDRRGAVFGGLVEAPLQPIVKRKYQV

SEQ ID NO: 222860 - protein, 164 aa, Zea Mays
MLQMSTGARDVDKEDDMFVLIAPQNAVGNCIIDDMRAMTDAAGDRPVILVNPRLKDMPASSGVMQTMGRDIRLKYAASFETCYSFRLLYYAGSFYPIMGALRMAYPNKYEIYRRVDTLNGKENYILIAEFTNKPTPDEITSAFKGQKREEKASSGFWGFLSGLF

SEQ ID NO: 222861 - protein, 75 aa, Zea Mays
MRRKHTKSIKSKFNDLMSTHPPLNEAYSDVCVFSTHAAFSLRSSICYIDLSNLPAELKKLKHKKCLVQSPQLLHG

SEQ ID NO: 222862 - protein, 586 aa, Zea Mays
MNCSSCCAAATPSSPALLARPRGGLAASCSTTTANQKVLFLGSKQFPRITYSRASSRLSRREVIAFAGQQPWDIGRFVKTLYFFNGPPNLLKIVESIISSFTGPASSEVPKKMETSDVVLVTGATGGVGRRVVDVLQKKGVPVRVLARNVDKARSMLGPDVPLIIGDVTKEDTLDPKLFKGIKKVVNAVSVIVGPKEGDTPDRQKYKQGIKFFEPEIKGPSPEMVEYIGMQNLINAIKSSVGLSEGKLLFGFKGNLSGEIVWGALDDVVMGGVSESTFQILPTGSESSGPTGLFKGTVSTSNNGGFTSIRTKNFTVPEDLSAYDGIELRVNGDGRRYKLIIRTSYEWDTVGYTASFNTTKGGWQSVKVPFSSLKPVFRARTVTDAPPFDASNITSLQLMFSKFEYDGILNPTFTEGPFELPFSSIRAYINEPITPRFVHVSSAGVTRPERPGLDLSKQPPAVRLNKELGSILTFKLKGEDLIRESGIPYTIVRPCALTEEPAGADLMFDQGDNITGKISREEVARICVAALASPDAVGKTFEVKSTVPFSEPYVIDPANPPPEKDYEVYFKELKEGITGRNIMEGV

SEQ ID NO: 222863 - protein, 70 aa, Zea Mays
MQGTGSLVQNKLVGAPGGGSSPHVVQNADIPVKQTTSSSSREQSDDDDMEGDAETTGNGNPVQHRLQRRH

SEQ ID NO: 222864 - protein, 575 aa, Zea Mays
MVWLQDQLEMHKFHWYSRAPTPSEFWIPLAAWFTVGLVGLWTFFHFFSVWRRKISLSWMKIIARSKRKNFERNHEVPTAEHVWNTESLIRAKGMMCCVCLESISPAQPLGQMMTSENMVHRCNVCGAAAHIICSSNSQKDCKCISMFGFKHVVHQWTVLWTDIADQSEEGQYCSYCEELCSESFLGGPPIYCCMWCQRLVHADCQSAMATETGEICDLGPFKRLILSPLFVRAISKPGSILSSITHGANEFATTVRGRLNRTKKEKHQNRFSSDSNDDSSSDTTLNSNQRAGELKTIGDSAQRSPENEHDSSESDGRELISESRRLGNDETGEVKLKYALSELPADSRPLLIFINKKSGAQRGDLLKHKLHFLLNPVQVFELSSSQGPETGLFLFRKVPHFRILVCGGDGTVGWVLDAIDKQNYESPPPIAILPAGTGNDLSRVLSWGGGLGAVEKQGGLCTILHDIEHAAVTILDRWKVTVEDKKSKNVLLVKYMNNYLGIGCDAKVALDIHNLREGNPEKFYSQAFMLRRAVEEPLGHAAAMITDVLEHAESSHVITASQKKALLREMALRLS

SEQ ID NO: 222865 - protein, 852 aa, Zea Mays
MDSDNDCGSDAGAEWVWVRRPSEVEAAAAAAGWLADEEARPLKVVFGSPAKYFTDAAPIGNGRLGAMVWGCVESERLQLNRGPGNYTNPNAPAVLSKVRSLVENGKYPEATSAAYDLSGDQTQVFQPLGDIDLVFGEDIKYTNYRRELDLHTATVTVTYTVGDIVYTREHFSSNPHQVIVTKISANKPGNVSFTVSLTSPLDHKIRVTHANEIIMEGSCPGQRPEEIKTAADQPIGIKFSAILYLQINGANSTVEVLNDNMLKLDCADSVVLLLAATTSFQSAFIKPSESKLDPTVSAFTTLSIARRTSYSQLKAYHIDDYQTLFQRVSLQLSQGSNYDLRRSRLVQSAETSSQGANVSDYGFQISGCTRLTSLNSFVKPTVERIVTFKDNEDPSLVELLFQFGRYLLISCSRPGTQISNLQGIWSNDTSPPWDAAPHPNINLQMNYWPALPCNLSECQEPLFDFIGSLSINGAKTAKVNYEASGWVSHQVTDLWAKTSPDAGDPVWALWPMGGPWLATHLWEHYCFTLDKHFLEKTAYPLLEGSARFLLDWLIEGHRGYLETNPSTSPEHYFIAPDGKEACVSYSTTMDISIIREVFSALILSADILGKSDTNVVQRIKKALPNLPPMKVARDGTIMEWAQDFQDPEIHHRHVSHLFGLYPGHTMSLEETPDLCRAVANSLYKRGDEGPGWSTSWKMVLWARLHNSDHAYKMILQLITLVDPEHEVSREGGLYSNLFTAHPPFQIDANFGFPAALSEMLVQSTGTDLYLLPALPRNKWPQGYVKGLKARGGVTVNISWKEGSLHEALLWSSGGQNTLSRLHYGDQIATVSLSSGQVYRFSMDLKCLKTWPL

SEQ ID NO: 222866 - protein, 160 aa, Zea Mays
MSLAPSIPSIKVKVGAVSVAPPHRACRSFAVIRSSKAEGPIRRPAAPPLSPPPPMPPKTPALSTPPTLSQPPTPVKPAAPPTSSQPMPPSPEPKPVDATAQMRKPVAGAMTLEYQRKVAKDLQEYFKKKKLEEADQGPFFGFLPKNEISNGRDISLQIDL

SEQ ID NO: 222867 - protein, 315 aa, Zea Mays
MTSAGVNVPGDDGVGNPAAASGSASAPECRTMQRRRRRLEPQGSGDAAAGPSWVRRLRPAASRFSPSPSQGSADRPNDEEQEEDDPDVQEMELVPLPPAGPQELQPADVPAQVWPVAFGSLSMAGRMRMMEDTISLHPDLCTWADGSPVHFFAVFDGHGGSHVSALCRDRMHEFVAEELGKEGAAFLRRRQEWLAWGDGAGAETSAAAFVRGPRGAWPEREEEERAWRSALRRSFRRADAMAALACACGRVARPSCRCPLSSVVSGIVGSTAVVALLVRGRLVVANCGDSRAVLCRGPAGTPPVPLSSDHKGTGC

SEQ ID NO: 222868 - protein, 169 aa, Zea Mays
MELWHLTWSMHAGWKSTTNMLKGVAARSDVFHVLSGMWKTPAERCFMWLGGFRSSEVLKQSSQQAEDALSQGMEALQQSLAETLASGSLGPAGPSGNVANYMGQMAMAMGKLGTLENFLRQADNLRLQTLQQMQRIFNHPTIRTSPTCNKRLLLSAACFEFSLACPSRE

SEQ ID NO: 222869 - protein, 461 aa, Zea Mays
MNRGYALLEFSTRPEAMDAFRTLQKRDVVFGVDRSAKVSFADSYPQVDDEIMAQVRTVFLDGLPPSWDEDRVKKYLKKYGAIEKVELARNMPAAKRKDFGFVTFDTHDNAVACTEGMSNSEIGEGEHKAKVRARLSRPLQRPPRMKHGLRGNFRVGHGAPRGGRLPYSRAPPPRRPPPRLIRPAVSRLPSIRSHPLKRPIDIRDRRPAMSMPDRARRFPPERSYDRRPPAPVYLKRSPRREYGRRDELPPPRSRATTDYITRVPVDRRPSLRDDYSPRGSGYSDLGPRSAPRLSDRRAYADDSYGEKFDRPLVAYREGRGRDYDTISGSKRPYADMDDVPRYQEIGVRQSKARLDYDIGGSSARYGDTYSERSGRPHAGYSSSRSIPVHDSAYGSSRHGMSYGGSASSADAGGMYPPSYSGSYGSRGSDVGGSSYSSLYSGRNLGTSSGGYYGGSGSSSYY

SEQ ID NO: 222870 - protein, 271 aa, Zea Mays
MRTARRLGVATVAVYSDADRGALHVRAADEAVRIGPPPARESYLNARAIIEAALRTGAQAIHPGYGFLSESADFAQLCEAEGLKFIGPPASAIRDMGDKSASKRIMGAAGVPLVPGYHGADQDVELLKLEADKIGYPVLIKPTHGGGGKGMRIVERPDEFVDSVLSAQREAAASFGVNTLLIEKYITQPRHVEVQVFGDQHGNAIYLYERDCSLQRRHQKIIEEAPAPNVPAEFRSHIGGAAVSAAKLVTTMLEQWSLLWTLFLESSTSWR

SEQ ID NO: 222871 - protein, 283 aa, Zea Mays
MHYDPMIAKLVVWGESRTAALVKLKKCLSTFQIAGLPTNVDFLQELASHSAFEKGLVDTHFIERYKDDLLSISTKSSKESHGVAELGAILAAACICKKEHITSKESLRANKSLSVWYNNPPFRMHHFARHPLDLELEENDGFSEKLLKLFITHKFDGSYFIETEDGTSGLDVKVDHKGDHDFRVDVSGLQTDVTLASYSKGNSKHIHVWHGNHHHHYRQTVRAEHAVEDSSQPSHASEGKSHPKGSVLAPMAGLVVKVLLEDGAQVDAGQPVMVMEAMKMEML

SEQ ID NO: 222872 - protein, 271 aa, Zea Mays; identical to SEQ ID NO: 222870

SEQ ID NO: 222873 - protein, 467 aa, Zea Mays
MNTVCEVCGDIGYRQLLLRCRDCKHYAVHQYCLDKVVFNASSIEWFCYECLHRRGDDVTCARSPEQVSSEGPSSHAHCGSPEHQLTTTKSVESIIRDVGPYCSPNSDGCADSFSSPPGVESIPSVRGTSADPIDVSSTSSSRHDTSIEASASSERSTGCQTASSCRRVKTVEMATVSSSSDEESGEDIVSENVVLGYVLAYRCYLSKAQKKRVMGLVQEIQPQFTAFVSIMRRGNVQPPGPNLGITKEYATAHFPDRSTHITLGTPGKSKKWHPRFYRRDVSRNYMVTGEWLDFVRDNHVQEGDICLLLPTRDDVMRRTFTVYVLHETSHYSAGGPGASSVAKMASEIRTEEEPAAAAGESVSSGTSGAQEFPHGSAVESGGDSGDSFEPPYFVPCKSPLSESQKRIVEERVRAIRSEIPICVAVMKNNNVGFAQRWMLVRDTVRCISQPKGKPYCSVARGRRGRPR

SEQ ID NO: 222874 - protein, 127 aa, Zea Mays
MDRAELTTEQVLKRDIPWEHYMSTKLISGTCLQLLRRYDHKPESQRAPLLEEDGPAYIRVFLNILRSISKEETVEYVLALIDEMLATNPKRAALFYDQSLSGEDIYEPFLSCYGKATGLYKKKVVRY

SEQ ID NO: 222875 - protein, 429 aa, Zea Mays
MLKYIARNKDLRHIPIIMMSNRDEVSVVVKCLRLGAAEYLVKPLRTNELLNLWTHVWRRRRMLGLPEKNFFNDNFELVLSEPSDANTNSTTLLSDETDDRPKGNTNQETGTSKQLEYESNPSVAEPDQREKMEGVPGSALDASKKSSPRRAFSRPIKTNLRVAESSAFLAYVKPSTPATSSFDSELQRGGSRLDSLDNQGNCSSATDRSDTGTDVNIRSKEAFEMPAQYPMVWFSSSNMHMERSSEGHNDTSGTPPAYHFPFYYPGMVEHNMALSSAQDFQANINNAQAHTPPAMLPQYNVYPQCHGLPVIPSFQFNPSGMSTHSSHLPTQNVWSSASSTPPVPEETCSRSERRAAALAKFRLKRKERCFDKKVRYVNRKKLAETRPRVRGQFVRQPTNTDVISIGDDISEDEDDDPSSREVDMVSSPE

SEQ ID NO: 222876 - protein, 869 aa, Zea Mays
MGQTSSQPRALELMERHVVAVVGPQSSGIAHVVSHVANQLRVPLLSFAATDPALASSQYPYFVRATHDDRFQMAAVADVVAHHGWREVTAVYVDNDYGRGGVVALGDALEALRARVSYRAAFPPGADRAALADLLVRANMMESRVFVVHASPDSGLDVFAAARSLDMMATGYVWIATDWLAAAIDAAGAGAAAAAGNIQGVLMLRQYTPDSDAKASLVSRFAAKQYINAYGLFAYDSVWMAARAIDQFLDDNASGGNVSFSADRNIRDANGSALGLSALRVFDQGEQLLRKVMLANFTGVTGSVRFQLDADGSGGATLINPAYEILNVGGTGVRRVAYWSNYTRLSVEAPRLLADGGPPPNSNNTTTQQQQQMYSVIWPGDTTAKPRGWVFPNNGKPLRIGVPYRTTYKQFVSKDRSSPDGVSGYCVDVFNAAVALLPYPVPASFVLFGDGVKNPSYNDLVQRVADGFFDAAVGDISIVTNRTRVVDFTQPYVESGLVIVSTVKAKNSNEWAFLKPFTPGMWAIIGAFFLFVGAVVWILEHRFNPEFRGSPRRQMVTIFWFSFSTMFFAHRENTVSTLGRFVLIIWLFVVLIINSSYTASLTSILTVQQLSTGIQGLDSLLSSNDPIGYQVGSFARSYMMDELGVPASRLRELAIDGYAGSLQRGPSNGGVAAIVDELPYVELFLSTNCQFRTVGQEFTKSGWGFAFQRDSPLAVDLSTAILTLSENGDLQRIHDKWLSPGTCASQSTDGVGADRLNLGSFWGLFLICGVACFVALLIYFARILCQFCKYHGHGTTDGAGPFPVPERSLRRPARLTSIRDLMSFVDMKEAEVKRAIRSRSDRRLDGSMGGRSYTSEGPSLSRPSSMSPV

SEQ ID NO: 222877 - protein, 193 aa, Zea Mays
MGTLVKEEFGRPNRENTMGMRHGSYDKLDDDGLAPPGTRVSGEDVIIGKTSPIPQDDAQGQASRYSKRDHSTSLRHSESGMVDQVLLTTNADGLRFVKVRMRSVRIPQIGDKFSSRHGQKGTVGMTYTQEDMPWTIEGITPDIIVNPHAIPSRMTIGQLIECIMGKVAAQMGKEGDATPFTDVTGLCCAKHAM

SEQ ID NO: 222878 - protein, 364 aa, Zea Mays
MLAARFLRMTEAVAKGNLVAKLETFFDSCVLQGWKDSVAALQAAWRISGWNESRIVQPCIDSIVEKILLPPSKVTWSYTYTRPGYNSTRKPHQSVPKDWWTEDISDLDIEVFRSVISTVRASRLLPPPLIGEALHVYACKHLVDPLHVASDAGLTANGVLHQPPQSSDDGEEKLVAMQRRVLESIVTMVPGEPGSVTGRFLLRLLRVANYVSASSSTRAQLIRQAGSQLDEARAADLLIPLPSDPHAYDVGTAEAVLEHFLAQFQRPAPTDERRRMSAAMEKVARIFDEYLRTIALDRSFPVGKFVDLVECLPDIARSDHDGLYYAIDIYLKVRKLQDRNICHGFELMDILRWRAGAPGAEQGG

SEQ ID NO: 222879 - protein, 454 aa, Zea Mays
MNAVLIESILAGRPAEGAGQSASAEPEVPATDGAEVVNPENGEVNEPPVTEDGVKNVEKGDGDALEVVQPARKPAEGELHLYAVPVRTQSGEKLELQLSPGDSVIDVKQFLLDAPETCFYTCYNLILHTEDGSAHQLEDYNEISEIADITSSGCSLEMVAAIYDERSIRSHLRRVRELLSLSSLYVSLSTSLALHQESAQGKSAGPEKGPIQELDGLNFMEDSAGALTNLLASAPAEIKCVGSIVFSSFNPPPSYRRLHGDLIYIDVTTLEGNKYCITGSSKFFYVNSSKGSIFDSKPTKQGLEASTLIGLLQKISTKFKKGFRELLDRRASAHPFENVQSLLPVTSWLGAFPVPEHRRDEARAEDSVVLSYGTELIGMQRDWNEELQSCQEFPHGNPQERILRGRARYKVTCDFVDAAVKGAVGVINRCIPPINPTDPECFHIVNNVNRFYVA

SEQ ID NO: 222880 - protein, 289 aa, Zea Mays
MDFSTIREKLLNDSYSKLEQFEDDVFLLTSNAMSYNSADTIYFRQARSIEALAKKDFENLRQPSDEEEPKPPARRGRPPKNPKTEGDVSPDLSNVKANKPEDNVDTFRKRSTGDRTRNTNTPMKDLSSFHDTFGSFSAKRTDKIGDYSGSSKWGKKPVSLDDDRRSTYDQHYSRNSSLFAALDDERKLLVPVGVQQPHAYARSLARFASKLGPVGWDVAANRIRRALPPGTSFGPGWVVDGEPPQNSQWAPAASTNPSSEPTAPPNMPSKNDVLDHKSGPSSNGDVTVK

SEQ ID NO: 222881 - protein, 223 aa, Zea Mays
MMIPWGGVGCCLSAAALYLLGRSSGSDAEVLRSVARAGSMKDLAAILDTASKVLPLVVAISGRVGSDTPLICQQSGMRGVIVEETAEQHFLKHNDAGSWIQDSAVMLSVSKEVPWYLDDGTGRVYVVGARSAAGLILTVASEVFEESGRTLVRGTLDYLQGLKMLGVKRTERVLPTGTSLTVVGEAIKDDVGTIRIQRPHKGPFYASSKSIDQLIVNLGKWAK

SEQ ID NO: 222882 - protein, 79 aa, Zea Mays
MGRPEGAKCLCDCIPMRGRPSLLPSFVCSLLKHGMQEVSIKLVSFLTGMFGQSGMERRLQLRDEGFPSWQRHARYEDTT

SEQ ID NO: 222883 - protein, 788 aa, Zea Mays
MVVMEDDPVISYKVNRKHVMRGDEAQKYKRVATTKHDSFLDSFLPVGSYKKLYSYTHLINGFALHAESEKTVRILSGAKGVRLIQEDIKMAKMTTHTPSYIGATGVWPLLGGAENSGNGVVIGMIDTGIDPKNPSFATSNTSSQAEPPPASFKGICRTGNRFPPDSCGGKIVGARWFARAAQATGEFNATIHYESPYDPDGHGSHTASIAAGNFHTPLISRGYNFGYASGMAPGARLAIYKAAYPFGGYMSDVIAAVDQAVEDGVNVISLSMAPSSVSSGPASFLNLLEAQLLLATKAGVSVVQAVGNAGPDANTVVSFSPWILSVAASMTDRTYRKSIVIGNGKVFSCGVLSAPTPGETMYPLAWADDVVNENSTDGSVNCQDPRVFIRPLVQGKVIICMFDSSNYYEDDPNLAGVIHTIERIGAAGVVVTDRSSGDIDIDYEPTFPTTVPSAIVLRGSDMRALLRYYNNNTVRDERGNVVSFGATIRITEGRRASYSGEAPVVADYSSRGPDVENAQMQPAEVLKPNVMAPGNLVWGAWSPTSNALPEIQGEEYALLSGTSMAAPHVAGVAALIKQRHPTWSPAMVMSAIMTTADVTDRSGRPLMARSDSGSVDPATPFDMGAGAVNAARALDPGLVFDAGYSDYLRFLCAVPGVDEAALLRAVGAPCPAPAPPRAGAPRWCSDLNAASVTVANLLGSRRVDRRVTSVGSQNETYMAYVRAPGGVAVRVAPSQFAIAPGATRALRIVLNTTAPGNAFSFGEVVLKGDKKHRVRIPLAVYPAAALSP

SEQ ID NO: 222884 - protein, 389 aa, Zea Mays
MAFLKPSLVFCSILTFLSLNWGPSHVFAKVYMVVMEDDPVISYKVNRKHVMRGDEAQKYKRVATTKHDSFLDSFLPVGSYKKLYSYTHLINGFALHAESEKTVRILSGAKGVRLIQEDIKMAKMTTHTPSYIGATGVWPLLGGAENSGNGVVIGMIDTGIDPKNPSFATSNTSSQAEPPPASFKGICRTGNRFPPDSCGGKIVGARWFARAAQATGEFNATIHYESPYDPDGHGSHTASIAAGNFHTPLISRGYNFGYASGMAPGARLAIYKAAYPFGGYMSDVIAAVDQAVEDGVNVISLSMAPSSVSSGPASFLNLLEAQLLLATKAGVSVVQAVGNAGPDANTVVSFSPWILSVAASMTDRTYRKSIVIGNGKVFSCGVLSVPVLP

SEQ ID NO: 222885 - protein, 579 aa, Zea Mays
MHRGTHKVAFLFAPIIVLWLLSIGIIGLYNIIRWNPRIFVALSPHYIVKFFKKTGKDGWISLGGVLLAITGTEAMFADLGHFSAASIRLAFVSVIYPCLVLQYMGQAAFLSKNIPAVYNSFYLSIPSPLFWPVFVIATLAAILGSQAIISATFSIVKQCLALGCFPRVKVVHTSRWIRGQIYIPEINWILMVLCLAVTLGFRDITVIGNAYGLACITVMFVTTCLMSLVIIFVWQKNLLISLLFFVFFGALEGAYLSAAVMKVPQGGWAPIALSAVFMFIMYVWHYGTRRKYLFDLQNKVSMRWILNLGPSLGIVRVPGIGLIYTELVTGVPAIFSHFVTNLPAFHQVLVFVCVKSVPVPYVPMDERYLIGRIGPREYRMYRCIVRYGYKDVQKDDENFENNLVMSIARFIQMEAEESASSGTGRSYESSTEGRMAVVHTTGTTGTGLVMMASAEDAEGTSLSRSSKSETLRSLQSIYEQESAGTVSRRRRRVRFQIDEEERIEPQVRDELSDLLEAKEAGAAYIIGHSYVKARKNSNFLKTFAINYAYSFLRKNCRGPSVTLHIPHISLIEVGMIYYV

SEQ ID NO: 222886 - protein, 72 aa, Zea Mays
MLSQENRFAFTMEVAEEANAYLEKNRHEYGLKKPILHVLSDRMNESGFSRPEGYLYPYPIKPGPYFIKEEGN

SEQ ID NO: 222887 - protein, 265 aa, Zea Mays
MFSSKAKGIEWSMDHDASNAAVLVASEAHTITLALEGLLGVVFTIATLTDEALDVGELESPKCESNSMECSGQLALLCMALVNSTWLTILDSLSFILTRSQGEAIILEILKGYQAFTQALRTLFNVAHRLHNVLGPSWVLVLETLSALDRAIHSPHASTQEVSASVSKLSRDTSGQYSDFHILSSLNSQLFESSALMNIAAVKSLLSALHQLSSQHISGSSQLSVQQIGSISFSVERMTTILANNLHRVEPIWDQIAAHHLEDGY

SEQ ID NO: 222888 - protein, 524 aa, Zea Mays
MTSLRTNVELEGEAGEPSYRRLVLRLVSHVIRLYSSSLVTESEVFLNMLVKVTRQDLPLWHQILVLEILRGFCVEACTLRLLFQTFDLNPVNTNVVENIVRALALVVASIQVASDSSEETLAAVGGMFSSKAKGIEWSMDHDASNAAVLVASEAHTITLALEGLLGVVFTIATLTDEALDVGELESPKCESNSMECSGQLALLCMALVNSTWLTILDSLSFILTRSQGEAIILEILKGYQAFTQALRTLFNVAHRLHNVLGPSWVLVLETLSALDRAIHSPHASTQEVSASVSKLSRDTSGQYSDFHILSSLNSQLFESSALMNIAAVKSLLSALHQLSSQHISGSSQLSVQQIGSISFSVERMTTILANNLHRVEPIWDQIAAHHLELANCSNPQLCNMALNSLDQSICLVAGSEKFQGISAAPHQFPESHLVKESETVSFEYAVLSPLMILYSSNKNVDVQMGALKILLHVLERHGEKLSYSWPSILHMLRMVTDASEKDLISLGFQHDMISLWEFSPGIAP

SEQ ID NO: 222889 - protein, 886 aa, Zea Mays
MHDQVDSSKPVSNGNTHGGSTFRQSQQRENVCNSLMAVPPCHVVAKKYSRSVATALSLGSDSDILHNGDKLPKRNSRKRGKQCKRTIRKRLNLASETIFEESTYGASPAEVVPTNLLVDKLSETTSSASSLVKTDGRYKEDHVECGIMLNLATLGTDEMDGSGCAGSSYNDAGGRLSSSCVSYLNDKSNTTDSSEFDGSTFTEHGLGEESNSYQKLTCPYVYNPSYATMDSIFSRWNSDNSGNYSVDVEARLTVKDENRHDHSKLGASTGRSNVRMECQLIGSCFSATHAEDTNDPLGIRSYSSKDVTDSCSHTEMVQCSSKSFHFKSGRRNIKSSKTPSYVDLTASNRVRGSNRHKNNGKDSSAVWQKVERNDKMVSKAGHPSDTPVHDKGANEVGKKGVQEDPTRIRAKHNPNKKVCKQKPSNGAVELEPAKGEDALNSCHTFSGPFYTKQAPFLRQQRNSFSKQGSQSLKNYCAPRNGIPKVAKDYLQQEELPMLVLVHAKNTSDKSSSYSSSADEVGLTGVSNNYPTEGNESSQPDIEVAASVSCNLVPDLAPQAASDDFHISDPHSLRPENKGASNSRSSNNLCTDPFAAEAKEARCVKLLTENNSQEPSDNAAETDYSKMKEVISYVYTAQQRVEDIQLCIGRPIADFENFVYSASPVVHCSSCSVGCKSCLQECVKDGLCLHQTPDITLRTVWQWYEEPSCYGLDVKAQDLWRSKALWNSHCQFTTYFVPYLSAVQLFSQPKRTSGGSIDKESIHRDVTCETSPQLNLPPIFAKLFPKQSVPVNKPSTLRTEDDQQSADGELVFEFFEYEQPYSRRQLFDKVNELIAGAKPSNCQISGDPKNLEASLHDLHPASWYALFSWNVHLYLVLCCMVSHIPDT

SEQ ID NO: 222890 - protein, 1086 aa, Zea Mays
MPCALEVIDARLQSTSHIQCSRSFDQNIGRRFSKGHLIQKPVAICPENSDTSSTILLFRHDPDWKQAPFLSDTQEVNKVISLSSGALDTDCLELLSEQPRILFCLDQPNEKNMHDQVDSSKPVSNGNTHGGSTFRQSQQRENVCNSLMAVPPCHVVAKKYSRSVATALSLGSDSDILHNGDKLPKRNSRKRGKQCKRTIRKRLNLASETIFEESTYGASPAEVVPTNLLVDKLSETTSSASSLVKTDGRYKEDHVECGIMLNLATLGTDEMDGSGCAGSSYNDAGGRLSSSCVSYLNDKSNTTDSSEFDGSTFTEHGLGEESNSYQKLTCPYVYNPSYATMDSIFSRWNSDNSGNYSVDVEARLTVKDENRHDHSKLGASTGRSNVRMECQLIGSCFSATHAEDTNDPLGIRSYSSKDVTDSCSHTEMVQCSSKSFHFKSGRRNIKSSKTPSYVDLTASNRVRGSNRHKNNGKDSSAVWQKVERNDKMVSKAGHPSDTPVHDKGANEVGKKGVQEDPTRIRAKHNPNKKVCKQKPSNGAVELEPAKGEDALNSCHTFSGPFYTKQAPFLRQQRNSFSKQGSQSLKNYCAPRNGIPKVAKDYLQQEELPMLVLVHAKNTSDKSSSYSSSADEVGLTGVSNNYPTEGNESSQPDIEVAASVSCNLVPDLAPQAASDDFHISDPHSLRPENKGASNSRSSNNLCTDPFAAEAKEARCVKLLTENNSQEPCKWYSAAGHLSQKWVPVGKKETCNGICLDVSANGDDSNLPSERTYKLNLSEHAAADNAAETDYSKMKEVISYVYTAQQRVEDIQLCIGRPIADFENFVYSASPVVHCSSCSVGCKSCLQECVKDGLCLHQTPDITLRTVWQWYEEPSCYGLDVKAQDLWRSKALWNSHCQFTTYFVPYLSAVQLFSQPKRTSGGSIDKESIHRDVTCETSPQLNLPPIFAKLFPKQSVPVNKPSTLRTEDDQQSADGELVFEFFEYEQPYSRRQLFDKVNELIAGAKPSNCQISGDPKNLEASLHDLHPASWYCVAWYPIYRIPDGKFQATFLTYHSLGHWIRRSSSAGGAAVLPVMGLQSYNAKSGGLR

SEQ ID NO: 222891 - protein, 395 aa, Zea Mays
MALWNGIGQVASIAQLAGVDAYGLISMIVEAAKTVKRNRETCQLLARRARMIGDLLHQLERTQLMQHMETRNPVEHLEETLRHAYVLITSCRNSSYLYNCCMGGKQADRLREVQNEITFYLQLFPLVSFVDNTRTWERLLSRACPLCTTENMDELHAAAHHVEHEDGIRSEAIKATKFENLGSHPTLKPDIDQMEGQVMRMGGLVNLIGGTKGAELSCFTFSHILAATDNFSEKNLVGKGGFGYVYKGNLINGLNVAIKRFDACSSYQGPHEFRTEIDAIPNLRHKNIIGLLGYCVQGEESILVYEYMSNKCLASVIADETKRGLLNWSKRLQIIKGIADGLAFLHGHSQMCIVHRDIKPSNILLDHEMNAKITDFGLALMLAPKSTAEVPVLGT

SEQ ID NO: 222892 - protein, 510 aa, Zea Mays
MALWNGIGQVASIAQLAGVDAYGLISMIVEAAKTVKRNRETCQLLARRARMIGDLLHQLERTQLMQHMETRNPVEHLEETLRHAYVLITSCRNSSYLYNCCMGGKQADRLREVQNEITFYLQLFPLVSFVDNTRTWERLLSRACPLCTTENMDELHAAAHHVEHEDGIRSEAIKATKFENLGSHPTLKPDIDQMEGQVMRMGGLVNLIGGTKGAELSCFTFSHILAATDNFSEKNLVGKGGFGYVYKGNLINGLNVAIKRFDACSSYQGPHEFRTEIDAIPNLRHKNIIGLLGYCVQGEESILVYEYMSNKCLASVIADETKRGLLNWSKRLQIIKGIADGLAFLHGHSQMCIVHRDIKPSNILLDHEMNAKITDFGLALMLAPKSTAEVPVLGTYGYADPEYIVTGKISEKADIYGFGIVLFEIISGRSIHSYMKAEGTRELPYPAYAHKYNPKTLHKLVDPLLRVDEHERAQIMECVRVAQLCVDHRAKHRPVMSEVVTMLGMAASKG

SEQ ID NO: 222893 - protein, 509 aa, Zea Mays
MALWNGIGQVASIAQLAGVDAYGLISMIVEAAKTVKRNRETCQLLARRARMIGDLLHQLERTQLMQHMETRNPVEHLEETLRHAYVLITSCRNSSYLYNCCMGGKQADRLREVQNEITFYLQLFPLVSFVDNTRTWERLLSRACPLCTTENMDELHAAAHHVEHEDGIRSEAIKATKFENLGSHPTLKPDIDQMEGQVMRMGGLVNLIGGTKGAELSCFTFSHILAATDNFSEKNLVGKGGFGYVYKGNLINGLNVAIKRFDACSSYQGPHEFRTEIDAIPNLRHKNIIGLLGYCVQGEESILVYEYMSNKCLASVIAGKFLGLLNWSKRLQIIKGIADGLAFLHGHSQMCIVHRDIKPSNILLDHEMNAKITDFGLALMLAPKSTAEVPVLGTYGYADPEYIVTGKISEKADIYGFGIVLFEIISGRSIHSYMKAEGTRELPYPAYAHKYNPKTLHKLVDPLLRVDEHERAQIMECVRVAQLCVDHRAKHRPVMSEVVTMLGMAASKG

SEQ ID NO: 222894 - protein, 320 aa, Zea Mays
MAVKGTNPEVVQALVNADPAIVMLPDRNGNLALHVATRKKRSEIVNVLLLLPDMNVNALTRDRKTAFDIAEGLPLSEESQEIKECLSRAGAVRANELNQPRDELRKTVTEIKKDVHTQLEQARKTNKNVYGIAKELRKLHREGINNATNSVTVVAVLFATVAFAAIFTVPGGNTDDGVAVAVHATSFKVFFIFNAVALFTSLAVVVVQITVVRGETKAERRVVGVINKLMWLASVCTTVAFISSSYIVVGRHFKWAALLVTLIGGVIMAGVLGTMTYYVVKSKRVRKIRKKVKSTRRSGSNSWHHNSELSDSEVDRIYAI

SEQ ID NO: 222895 - protein, 275 aa, Zea Mays
MLLTVLMIAYRKNLTMDDVHDIHGLRLVVETEEDCYRALDIVHKLWPRVTGRFKDYICHPKLNGYRSLHTVIMCEGVHPFEIQIRTKEMHLQAEYGFAAHWRYKEGGCRHSFVLQMVEWARWVLTWQCETLSKERPSSLSSSVGIRPPCPFPLHSEDCSYSYSRQCNYEGPIFVIMLEHDKMSVQELPANSTVVDLMERVGANSPRWSPCSFPLKEELRPRVNHKPISDPNRKLSMGDVVELTPALPDKSLSEYREEIQRMYERGGFALATTPRS

SEQ ID NO: 222896 - protein, 221 aa, Zea Mays
MAARRLGSPASRWLRPSALLLLVASALLSAPSPARALRFDLESGHTKCVSDEIKVNAMAVGKYHIVGPDPNSPDAQLPESHRISLRVTSPYGNSMHYAENVQSGHFAFTAAEAGDYLACFWAPDHKPPVTIGFEFDWRSGVSAKDYPSVAKKGKVDMMELELKKLEETIKNIHEEMLYLRERGNAGREQANELKDGLARVPLPWRLLISGRFAAVAPEDLL

SEQ ID NO: 222897 - protein, 84 aa, Zea Mays
MKKDTLERAREPGFDLKGYLMNAYIHPVFKGDGDDDKFSVADEPEAEQVLVATKRQSRRNTPVPSKYNGSESPSLPEIVNDQRL

SEQ ID NO: 222898 - protein, 662 aa, Zea Mays
MAAPLHSSSGHNAAAGGGAKTIEEMYQKKTQLEHILLRPDTYIGSVEKHTQALWIYEDGAMVNRSVTYVPGLYKIFDEILVNAADNKQRDPKMDALRVEIDVDSCCISVYNNGDGIPVEVHQEEGVYVPEMILGHLLTSSNYNDNEKKTTGGRNGYGAKLTNIFSTEFVIETADGRRQKKYKQVFYENMGKKSEPQITKCKQGENWTRVTFKPDLAKFNMTHLEDDVVALMRKRVVDMAGTLGKTVKVELDGQRVPIKSFCDYVDLYMKSANCDRPDNFKRIYEQVNDRWEVCVSQSEGQFQQVSFVNRIATIRGGSHVDYVTNQIANHVVAIVNKKNKNANMKLHNVKSHLWVFVNALIDNPAFDSQTKETLTTRQGSFGSKCELSSDFLKKVEKSGVIENVLSWADFKLSKELKKTDGSKKSRISGIPKLEDANEAGGKDSDKCTLILTEGDSAKALAMSGIAVVGRDYYGVFPLRGKLLNVREANHKQIMDNAEIQHIKQILGLQHGKQYESTKGLRYGHLMIMTDQDHDGSHIKGLLINFIHSFWPSLLKVPSFLVEFITPIIKATRGQTTKSFYTMPEYEEWRKNLGASASSWTIKYYKGLGTSTAKEGRKYFEDIIDHKKDFVWVDDQDGNHIELAFSKKRIADRKQWLTNFQDQH

SEQ ID NO: 222899 - protein, 70 aa, Zea Mays
MSLSKDKRPTSRIESSKQNTKEFDKHSEQDLFLWVALIAYRSDAGATNIQATLMELLATYKILTTILYVG

SEQ ID NO: 222900 - protein, 157 aa, Zea Mays
MTAASEVRRGINLVYGGGSIGLMGVIARTVRHGGCHVLGVIPKALMPIEISGESVGEVRVVDDMHQRKAEMARQSQAFIALPGGYGTMEELLEMITWCQLGIHDKPVGLLNVDGYYDPLLALFEKGAAEGFISTDCSQIFVSAPTASELLTKMEVAS

SEQ ID NO: 222901 - protein, 103 aa, Zea Mays
MSWSAPDDILLSTSLAGFLDKKLIVLLRDGRKLLGTLCSFDQFANVVLQGACERVIVGEQYCDVPLGLYVIRGENVVLIGELDHEKDELPAHMTCVLEAEIRK

SEQ ID NO: 222902 - protein, 1280 aa, Zea Mays
MRDISLRTNSFSNKQRDAQPQNCYTRTRVPSLRKSRSSLSLESRKAQGSDNVWLHSGEGTSNQPVTLGASNGNRMLNTPAEVDSTSNREASENGTTETELKSNGTSDLPMNTAVNFKRKRKSDRKPGPHYRDCTTPNKDDQLCAEYSEILPDSPNSKNEVSKSDGDEHLPLVKRARVRMGRSQLEDSPVDEIDVSNKKPELATALDQCDRNGKPASPANDYSADQVSAVVSSAPNLSCKLDTTILSKEGHLPWKNKEYHPKILALDVEAALPPSKRLHRALEAMSANVAENTKNIPEVTGPNEMTLNGSLLTASSLSNKSADAVVTVSNRPVIVQSPEPSLDTQFVHNPSGKCTSESILQNNSIPDSASVPSKENDHIVLKGDICEETLMDTKTANGSWDCSELNNDSCGKTSALCMKLNRPALNVTQATSVPDRLSSSLEKASENVAASGVKETKTFGSAVCDVDRSAEPIDRSNNNVTSNTMRHSETIVADSVNNVGDTASNSSLATKSSSIQSDADTRTSELHTFSSLALKELNHRKIKDRSTSPDSMPMKELIAVAQARRFSRSTSFPDNFLNAKYIPETSINIPSKEGPHRQLSPSNRIIRSTSGNDNVNSRSPFDNIQQKKLAAHGANAARRSFKDFLSTLTRTKESISRATRLAMECAKFGIAGEAIDIIVEHLEKESNLYKRVDLFFLVDSITQCSRNQKGGAGDVYPSLIQAVLPRILYAAAPPGNSAWENRKQCLKVLKLWLERKTLSEYIIRHHIREIETINEASFGSSRRPSRTERALNDPLRDNEGMLVDEYGSNAGFQLPNLICTKVLEEEEENSSEGRSLSFEAVTPEQDAPYNDDNEESQMPVEKHHHILEEVDGELEMEDVAPPSDIGATTKCQPEQSDTNRAPSDQRPSDAGPPLPVDRPPSPPPLPSSPPPVPVPQSAQMQPKLQMASDPMAPHPQRATYSVQSQQQHSIAEHPVQDMEGNKIRYHLPHQWHHSILLVPMAVSLLPQHLTMGTTIIGLQPHPCLTRDIISNHHPLHRLQINSLLCHQNTNIGHITGVITVHRIPRDIGTMDMIEVITDMIEGIMDMTDNTIMMIEDTTTMIEDITMMIEAITLMIEDIILTIEDITLMRELLGGQCTMMPLTREDILFLQVLLGFLTILKLHQPQCTMGDHQILRQGLVQAGLGRLGYLITILPRDILWSLQFHIQLEVMVDGDLDNLFRYRSGALMLSLVCGGLTCGRVCLVSLLQVEGTHGGGALQESGSWYLPPCTDVSHGFYGGRAA

SEQ ID NO: 222903 - protein, 1414 aa, Zea Mays
MAPAKRKRAAAAAAAAAAAKWKVGDLVLAKMKGFPAWPAMISEPEQWKMPSTKKKPLVYFYGTKQIAFCNYADLEAFTEEKKRSLLAKRHGKGADFLRAVDEIIEVYDSLKDIGSNKVDLPAEEVKPGVEKFAENNSRMDTEDLVSSSYMHNDRKIEDHYVTTRSHDMVNSDRPSVDERCVVNSAPDEPIENVSILDEMRDISLRTNSFSNKQRDAQPQNCYTRTRVPSLRKSRSSLSLESRKAQDNVWLHSGEGTSNQPVTLGASNGNRMLNTPAEVDSTSNREASENGTTETELKSNGTSDLPMNTAVNFKRKRKSDRKPGPHYRDCTTPNKDDQLCAEYSEILPDSPNSKNEVSKSDGDEHLPLVKRARVRMGRSQLEDSPVDEIDVSNKKPELATALDQCDRNGKPASPANDYSADQVSAVVSSAPNLSCKLDTTILSKEGHLPWKNKEYHPKILALDVEAALPPSKRLHRALEAMSANVAENTKNIPEVTGPNEMTLNGSLLTASSLSNKSADAVVTVSNRPVIVQSPEPSLDTQFVHNPSGKCTSESILQNNSIPDSASVPSKENDHIVLKGDICEETLMDTKTANGSWDCSELNNDSCGKTSALCMKLNRPALNVTQATSVPDRLSSSLEKASENVAASGVKETKTFGSAVCDVDRSAEPIDRSNNNVTSNTMRHSETIVADSVNNVGDTASNSSLATKSSSIQSDADTRTSELHTFSSLALKELNHRKIKDRSTSPDSMPMKELIAVAQARRFSRSTSFPDNFLNAKYIPETSINIPSKEGPHRQLSPSNRIIRSTSGNDNVNSRSPFDNIQQKKLAAHGANAARRSFKDFLSTLTRTKESISRATRLAMECAKFGIAGEAIDIIVEHLEKESNLYKRVDLFFLVDSITQCSRNQKGGAGDVYPSLIQAVLPRILYAAAPPGNSAWENRKQCLKVLKLWLERKTLSEYIIRHHIREIETINEASFGSSRRPSRTERALNDPLRDNEGMLVDEYGSNAGFQLPNLICTKVLEEEEENSSEGRSLSFEAVTPEQDAPYNDDNEESQMPVEKHHHILEEVDGELEMEDVAPPSDIGATTKCQPEQSDTNRAPSDQRPSDAGPPLPVDRPPSPPPLPSSPPPVPVPQSAQMQPKLQMASDPMAPHPQRATYSVQSQQQHSIAEHPVQDMEGNKIRYHLPHQWHHSILLVPMAVSLLPQHLTMGTTIIGLQPHPCLTRDIISNHHPLHRLQINSLLCHQNTNIGHITGVITVHRIPRDIGTMDMIEVITDMIEGIMDMTDNTIMMIEDTTTMIEDITMMIEAITLMIEDIILTIEDITLMRELLGGQCTMMPLTREDILFLQPCAGPPRIPDHFEAPPAPMHYGRPSDPPPRPCAGWSRPPRISDNYSPSRHSVEPPVSHTAGGHGGWRPR

SEQ ID NO: 222904 - protein, 681 aa, Zea Mays
MPMKELIAVAQARRFSRSTSFPDNFLNAKYIPETSINIPSKEGPHRQLSPSNRIIRSTSGNDNVNSRSPFDNIQQKKLAAHGANAARRSFKDFLSTLTRTKESISRATRLAMECAKFGIAGEAIDIIVEHLEKESNLYKRVDLFFLVDSITQCSRNQKGGAGDVYPSLIQAVLPRILYAAAPPGNSAWENRKQCLKVLKLWLERKTLSEYIIRHHIREIETINEASFGSSRRPSRTERALNDPLRDNEGMLVDEYGSNAGFQLPNLICTKVLEEEEENSSEGRSLSFEAVTPEQDAPYNDDNEESQMPVEKHHHILEEVDGELEMEDVAPPSDIGATTKCQPEQSDTNRAPSDQRPSDAGPPLPVDRPPSPPPLPSSPPPVPVPQSAQMQPKLQMASDPMAPHPQRATYSVQSQQQHSIAEHPGNMNSSVAPLPPPPFNSSGYGGQQNQIPPPPPMAPLNPPGPHGSFPAPPAPYHGNNYHRPPTTSMPNEGYHQQPPPPPPPPNQFPSVPPEHQHRPHHWGNNCPPYPERYRYNGHDRGNHRHDRRHHGHDRQHHYDDRGYHYDDRGYHYDDRGHYFDDRRHHFDDRGHHFDERAIRGPMHNDAADQGRYSFPPGPPRIPDHFEAPPAPMHYGRPSDPPPRPCAGWSRPPRISDNYSPSRHSVEPPVSHTAGGHGGWRPR

SEQ ID NO: 222905 - protein, 104 aa, Zea Mays
MTYEELLDLGEAVGTQSRGLSQERISSLPVTKYKCGFFSRKKTRRERCVICQMEYRRGNLQMTLPCKHVYHASCVTRWLGINKVCPVCFAEVPGEDPEAMSQQL

SEQ ID NO: 222906 - protein, 750 aa, Zea Mays
MAPAAGTATGSASGGSAVHDDAEAVELGHNNLIRRRHPGADVEDEADDRNVGASAAAGKELAPSSVEQAFADQPVPSWREQLTVRAFVVGALLSVVFNVILMKIDLTTGINPSLNVCASLLSYFLLRTWTRAIGCMGLLRQPFTRQENTMIQTCVVSAYGITFTGGFSSYLFGMSAKIANKTEVNDPQDIKDPHLGWMMGFMFLVSFLGLFALVPLRKVMIVDYKLTYPSGAATAYLINGFHAPEGSERAKKQVRTLGKYFSLSFLWAFFQWFYTAGNHCGFGSFPTLGLEAYKNRFFFDFSPTYIGVGMICPYIVNVSLLLGGIMSWGIMWPLISTKKGSWYPETLPDSSLHGLHGYRVFLTISVILGDGLYNILKVLYSTIEAFVSRYRNRKANTLPVSNDGTPADATTETESFDDKRRLELFTKDQIPKTVALGGYVVLAAITIGCLPLIIPQLKWYHILVAYIVSPALAFCNAYGCGLTNWSFASAYGKLAIFSFGAWAGASHSGVIVALAACGVMMSIVGTAADLMQDFKTGYLTLASPRSMFISQVIGTAMGCVIAPCVFWLFYKSFDVGATNGAYPAPYTFMYRNMAIMGVDGLSLPKHCLTLSYIFFAAAFAVNMVKDLVPKKVAKFIPIPMAVAIPFYVGAYFTIDMFLGCTILFIWEMRNKAEADSFGPAVASGCMCGDGLWALPEAILSLANVKPPICMKFLSRVWSRSVVRGGRMSKSSQHLRAKLHLKKRWRVVSSS

SEQ ID NO: 222907 - protein, 259 aa, Zea Mays
MGNCVASGGATTVTAAGEDGRRRGRRWKAPREEQLGSVPGRIFSNDGRSRTAAVFTQQGRKGVNQDGHGPHGHLVARRVRDALPLKLMAAVRESKPGLDMAAAAWRKAFARAYKAMDKDLRSHATLDCFCSGSTAVTVLKLGSDLYMANIGDSRAVLGSRDGGGMVAVQLTVDLKPDVPSEAERIKKCRGRVFALQDEPEVPRVWLPFDDAPGLAMARAFGDFCLKDYGVISVPEFFHWSLTEKDQFVILASDGWRLQR

SEQ ID NO: 222908 - protein, 244 aa, Zea Mays
MLWIFYALIKSNETFLITINAAGCVIETIYIVMYFVYAPKKAKLFTAKIMALLNGGVFGVILLLTLLLFKGSKRVVLLGWICVGFSVSVFVAPLSIMRRVIQTKSVEYMPFSLSLSLTLSAVVWFLYGLLIKDKYVALPNVLGFIFGVVQMVLYVFYMNKTPVAAAVGKDAGKLPSAADEHVLVNIAKLNPALPERTSGMHPVTQMAAVPARSCAAEAIAPAMLPNRDVVDVFVSRHSPAVHVV

SEQ ID NO: 222909 - protein, 716 aa, Zea Mays
MSLEVEKPPETTKQLKRQDSLYGDAEKVSGFKHHGSEGGWPRLLQLAFQSIGIIYGDVGTSPLYAISSTFPDGIKDQDDLLGVLSLILYTLILIPMVKYVFIVLYADDNGDGGTFALYSLISRHSKVRLIPNQQAEDAMVSNYGIEAPSPELRVAQWLKQKLESSKAAKISLFIITILGTSMVMGDGTLTPSISVLSAVSGIREKVPSLTETQVVWISVPILFALFSVQRYGTDKVGYSFAPIITLWFFLIAGIGMYNLIVHEIGVLRAFNPMYIVDYFRRNGKDGWVSLGGVILCVTGTEGMYADLSHFNIKAIQISFSTVLLPSVALCYIGQTAYLRKFPESVADTFFRSIPELMFWPTFIIAILSAIIASQAMLSGAFAILSKALSLGCFPSVQVIHTSKSYEGQVYIPEVNFLMGLASIIVTITFRTTTEIGNAYGICVVTVFSITTHLTTIVMLLVWRKNFIIVLLFYVVFSSIELVYLSSILTKFIQGGYLPFCFSLVLMALMITWHYVHVMKYWYELDHVVPANEVTTLLEKHERIPSVHAVFLFMSIKHLPIPHVAPVERFLFRQVGPREHRMFRCVARYGYCDKLEESGLFKGFLMESLKTFIQDEAAFKTNSTAGDTKELTDPKVSGHDLARWVEKEKQMIDKEMERGVVYLMGEANVIAGPESSAAKKIVVDYVYAFLRKNLTEGEKVLSIPKDQLLKVGITYEI

SEQ ID NO: 222910 - protein, 830 aa, Zea Mays
MAPPLPSVSRGSRALVQASNPSSVRRGATTGPISTERSCPPLAFLPLRPRCLPPPRRRGLRTLSPTCAPLSSPALTAAGVICDERAQMSLEVEKPPETTKQLKRQDSLYGDAEKVSGFKHHGSEGGWPRLLQLAFQSIGIIYGDVGTSPLYAISSTFPDGIKDQDDLLGVLSLILYTLILIPMVKYVFIVLYADDNGDGGTFALYSLISRHSKVRLIPNQQAEDAMVSNYGIEAPSPELRVAQWLKQKLESSKAAKISLFIITILGTSMVMGDGTLTPSISVLSAVSGIREKVPSLTETQVVWISVPILFALFSVQRYGTDKVGYSFAPIITLWFFLIAGIGMYNLIVHEIGVLRAFNPMYIVDYFRRNGKDGWVSLGGVILCVTGTEGMYADLSHFNIKAIQISFSTVLLPSVALCYIGQTAYLRKFPESVADTFFRSIPELMFWPTFIIAILSAIIASQAMLSGAFAILSKALSLGCFPSVQVIHTSKSYEGQVYIPEVNFLMGLASIIVTITFRTTTEIGNAYGICVVTVFSITTHLTTIVMLLVWRKNFIIVLLFYVVFSSIELVYLSSILTKFIQGGYLPFCFSLVLMALMITWHYVHVMKYWYELDHVVPANEVTTLLEKHEVRRIPGVGLLYSDLVQGITPVFPRLVQRIPSVHAVFLFMSIKHLPIPHVAPVERFLFRQVGPREHRMFRCVARYGYCDKLEESGLFKGFLMESLKTFIQDEAAFKTNSTAGDTKELTDPKVSGHDLARWVEKEKQMIDKEMERGVVYLMGEANVIAGPESSAAKKIVVDYVYAFLRKNLTEGEKVLSIPKDQLLKVGITYEI

SEQ ID NO: 222911 - protein, 716 aa, Zea Mays; identical to SEQ ID NO: 222909

SEQ ID NO: 222912 - protein, 65 aa, Zea Mays
MGIEQLQYIRGEFRLSDHRPVCSVFVIEADVDNGSKIRKGYSTLDARIHCDSPAIPKRHSFYDDF

SEQ ID NO: 222913 - protein, 280 aa, Zea Mays
MPGLGPLQKVCAAMRILAYGLPSDAVDEYVQIGESTARESLHHFCRAIIAYFSAWYLRTPNEADITCIMHSSESRGFPGMLSSIDCMHWEWQNCPISWHGQFCGRNGRASMILEVVATYDLWIWHAFFGMPGTNNDVNVLHRSPVFDPLTTGRMPPVNYTVNGHAYNFRYYLADGIYPNWPTFVKAIRHPYEEKKVYFTQMQESCRKDIERAFGVLQARWAVLRGPAYGWDRNRLTEIITACIIMHNMIVEDEGPFAANTDFGDNTSGIDASQIIGEGRA

SEQ ID NO: 222914 - protein, 213 aa, Zea Mays
MNDNRFIRYYKGHLDRVVCIALCSGKENFLSCSLDRTILLWDHRAEKPQGLLRAQRRPTVSYDAQGMGPFATFSVGTDDSEAHVVQFSGDGRRILLTTKAGRVHVLDSFEGNSIASFRAKPILTNSTLEASFCPEGNHIVSGSGDGSVYAWNVESGKVACWESTDVKPPRVRWSPGSLMFVTGTSELSCWVPDLSKLESFTISHTNTRSSSSL

SEQ ID NO: 222915 - protein, 220 aa, Zea Mays
MPASPSLSLFHPLLTPPQRHCSFGLVEERYIHPGLDWLVLVLLLNGRICSMDFHSKATNYLVTASDDESIRLYDTQDAVCLNTINSKKYGVGLVCFTDNPSIVLYSSNNGWDESLRLLSMNDNRFIRYYKGHLDRVVCIALCSGKENFLSCSLDRTILLWDHRAEKPQGLLRAQRRPTVSYDAQGMVFAVAYGGRIKMFDIRKFGMPMSYSSAVMAGGFC

SEQ ID NO: 222916 - protein, 170 aa, Zea Mays
MALPPGAGAVAPATPFAANPCRLRRASGPPAAALRLGPLFWPWEKVKIGPLSVSPMGFGTWAWGNQLLWGYQESMDNELQDCFNLALRNGINLFDTADSYGTGRLNGQSERLLGKFILEFEGRIKSPDDVVIATKFAAYPWRLTSGQFVSACKYSPDLFVSCSVLVTEHG

SEQ ID NO: 222917 - protein, 67 aa, Zea Mays
MLSALGLEHICFLQFVINHPALTQMVCYQIAADAANSLAPCYCFNKSCLESLNQFCKHTNVHETWGF

SEQ ID NO: 222918 - protein, 315 aa, Zea Mays
MPLPPQPVRRSCPILLAVNDTCGVTRMTSTCAARVPSLRWAPQRGWVGSWVSVRPAKCRTSGGHAVVCAAVSFRPCIDIHKGKVKQIVGSTLRDLANDSMELVTNFESDKSPAEFAKFYKADELLGGHVIMLGANPSSQAAALEALRAYPGGLQVGGGINLENAMSYLNEGASHVIVTSYVFSDGKMNTERLRKLVELVGKQRLVLDLSCRKKDGRYTIVTDRWQKFSDVFVDEPTLEYLAAFADEFLVHGVDVEGKRLGIDEELVELLGHYSPIPVTYAGGVSTMDDLERIKKAGKSREAKYGWSSVKKHKGWR

SEQ ID NO: 222919 - protein, 179 aa, Zea Mays
MPLPPQPVRRSCPILLAVNDTCGVTRMTSTCAARVPSLRWAPQRGWVGSWVSVRPAKCRTSGGHAVVCAAVSFRPCIDIHKGKVKQIVGSTLRDLANDSMELVTNFESDKSPAEFAKFYKADELLGGHVIMLGANPSSQAAALEALRAYPGGLQVGGGINLENAMSYLNEGASHVIVTS

SEQ ID NO: 222920 - protein, 289 aa, Zea Mays
MDGQGTKHRILMVSDFFFPNFGGVESHIYYLSQCLLKLGHKVVVMTHAYGNRSGVRYVTNGLKVYYVPWRPFLMQNTLPTLSLTFPIVRTIIIREKISVVHGHQAFSTLCHEALMHARTMGYKVVFTDHSLYGFADAGSIHMNKVLQFTLADIDQAICVSHTSKENTVLRSGISPEKVFMVPNAVDTAMFTPSPKRLNCDEIVIVVVSRLVYRKGADLLVEVIPEVCRLFPKVHFIVGGDGPKRVRLEEMREKFSLQDRVEMLGAVPHAQVRSVLISGHIFLNSHSRSS

SEQ ID NO: 222921 - protein, 158 aa, Zea Mays
MNEVGIQELMTRHKSTAAEFFSKNYDWFFAEFNSKLILSASNYFIRRKAIQLLRDILLERSNAAVMVRYVSSKEHLMIQMNLLRDESIAIQVEAFHVFKLFVANKEQAPEITGILLANRSKLLRFLKDFTTVEKDDKKFEADKATVISEILALNGAEK

SEQ ID NO: 222922 - protein, 369 aa, Zea Mays
MTGCLWPCVGAAVAGHGAGHRKAGLFRSKPRTPAEVVQHARDLVTYILDNKDGCGAGKRDAKHEHRMVELSKEVKEMKGILYGNGEEDPCEEACKQLTKEFFKKDTDTFRQLIVCLQYVDLETQKDITQVIANLQRQKVDSRLVASDYLETNLDLLDILMSGYGNLDIAIHYSTLLRDCIRHQVAARYVLESPHFRTFFDHIQFPDFNVQSDVFKTFKELMTRHKSTAAEFFSKNYDWFFAEFNSKLILSASNYFIRRKAIQLLRDILLERSNAAVMVRYVSSKEHLMIQMNLLRDESIAIQVEAFHVFKLFVANKEQAPEITGILLANRSKLLRFLKDFTTVEKDDKKFEADKATVISEILALNGAEK

SEQ ID NO: 222923 - protein, 372 aa, Zea Mays
MSVPQLQQNGGSAKPMVMFGSDGTGSLTSPANPLDDVDRLLEDGSLDDNVESFLSQDDMDPRDNLGRCMDASKGFGFSEVAKARASAAKVVCCHFSADGKLLATGGHDKKVTLWCTDSLKPKSFLEEHSFLITDVRFSPSMSRLATSSFDKTVRVWDADNTDYSLRTFTGHSASVMSLDFHPNKEDMICSCDGDGEVRSWSINNGSCLTCVKVFKAGATQMRFQPRKGKYLAAASEKAIYILDGETQHACRSPLQGHNKNIQSLCWDSAGEYLASVSEDSVRIWSFSSGRDGEFVHELNRSGNQFHSCVFHPTYQSLLVIGCYESLELWDIREKNTMTFNNAHDGLVAALAASSATGKVASVSHDRTLKLWK

SEQ ID NO: 222924 - protein, 437 aa, Zea Mays
MPVDGGIPNSFGGAEQTAKKRKKPGSSSGRANSSGTANTAGPSPSSAPSTPSTHTPGDAMSVPQLQQNGGSAKPMVMFGSDGTGSLTSPANPLNPFSFQDDVDRLLEDGSLDDNVESFLSQDDMDPRDNLGRCMDASKGFGFSEVAKARASAAKVVCCHFSADGKLLATGGHDKKVTLWCTDSLKPKSFLEEHSFLITDVRFSPSMSRLATSSFDKTVRVWDADNTDYSLRTFTGHSASVMSLDFHPNKEDMICSCDGDGEVRSWSINNGSCLTCVKVFKAGATQMRFQPRKGKYLAAASEKAIYILDGETQHACRSPLQGHNKNIQSLCWDSAGEYLASVSEDSVRIWSFSSGRDGEFVHELNRSGNQFHSCVFHPTYQSLLVIGCYESLELWDIREKNTMTFNNAHDGLVAALAASSATGKVASVSHDRTLKLWK

SEQ ID NO: 222925 - protein, 74 aa, Zea Mays
MSLCLSRGFYQKVVANCVHALQQIWALEAANLVAERLRHCIANHWIKEFSEWPQCMFLSCNQSSFHIIITKYLT

SEQ ID NO: 222926 - protein, 228 aa, Zea Mays
MLLHHRLLPRLLLVPSTHTSTLLCPSRLPRRLSLSPRFYALPHLAAPQTVDHSDDEGAPQGEGQIKLPLDHLFVPPGATMDAGDQEAVSARVLKGSNIVLGPYARGDAQVVNADFVKSSVRPDDCPRDGLPEFALVGRSNVGKSSLLNSLVRRKRLALTSKKPGKTQCINHFKVNDSWYLVDLPGYGPARPFLGEIEGESRALLLQILLEWIWQQSPTHGLSKKLVRM

SEQ ID NO: 222927 - protein, 569 aa, Zea Mays
MEAQNGYSPLLAGDDHEAIHATGAGDEGDDVKLRLLGYKQQLKRDLSVVANFSVSFSIVSVVTGVTTLFGTGLQFGGPATMVYGWPIAGAFTAAVGLAMAEICSAYPTSGGLYFWSARLCTHRRWGPFAAWLTGWFNVVGQCVPLYAVGGDHQRGLLPGAADPGDHPARHRRQERRRLPGVQVHGDRLPRRHPAQPRRHQQPPHHLPLLFRPVRRGLEHARCVCPDGCRADRCHREGQRRVRVHPLQHRQRRRHPQQLVHLCPGPAHEPVHAHRIRRLGAYDRRDEERGQERPHRHHQRHRHLHPRGLGLHPRRHLRGQGHTLPAEPRQRRRRLRHRRGVLPRLQEPLRQRRRRDRLPGGRRRRRLLLRHELRHQQLQDGLRLLQGRRHALLLRLAQGQQAGGAHQRRLALGSRRALHGAAVSGKPGGVPGHGFHRDDRAVHLVRAADPVPGDAGAQVLRAGAIQPGPLRRPGRLGRRALGGHHHRALLAAGHVPGHQGHAQLHPRRRRRPPLPRPRVLAAQRQALVQGPRHQSGRMNMYNWTCIVERLAETEELLPTTCCNYFVPKIN

SEQ ID NO: 222928 - protein, 207 aa, Zea Mays
MEDLQKEADTYHDFLFIDADEATKPPQTMLAFFKAAYHMFNAEFYVKASDDIYLRPDRLAALLAKERPQHKTYIGCMKKGPVVNDPNLKWYESSWELLGNEYFMHASGSLYALSSEVVEALATAKSDSLRMFDYEDVTIGAWMLAMNVKHEDNRAMCDSVCTPTSIAVWDSKKCSGTCNVADKIKQLHNTTVCSKSPTLPPEVEEEE

SEQ ID NO: 222929 - protein, 155 aa, Zea Mays
MAIALLPSVRLLPQSLSRRPPPTSSPLSVRRPRPRALPLPRVHCRAGRTPDPLTAAREAAAFWAGKLAGAVPWKAAVSGVVALAVSFTCLVGLANARTGVNKPELLPKEFTTVIDVAGFLSSGQENRLRQEIEDLEKDTGYKLRVLAQNYPDTPG

SEQ ID NO: 222930 - protein, 671 aa, Zea Mays
MIYYPSSAGGGMKELFRKVGNRSSEFHPDVRRVRREGSYIYEEFMPTGGTDVKVYTVGPGYAHAEARKSPVVDGVVMRNPDGKEVRYPVLLTPTEKQMARDVCNAFRQMVCGFDLLRCDGRSYVCDVNGWSFVKNSYKYYDDAACILRKIFLDAKAPHLSSTIPPTLPWKSEPVQPTEGLTRQGSGIIGTFGQSEELRCVIVVIRHGDRTPKQKVKLKVTEEKLLNLMLKYNGGKPRVETKLKSAVQLQDLLDATRQLVPPTRSGRESDSDADDIEHIEKLRQVKAVLEEGGHFSGIYRKVQLKPLKWIKVPKRNGDGEEERPIEALMILKYGGVLTHAGRKQAEELGRFFRNNIYPGEGTGLLRLHSTYRHDLKIYSSDEGRVQMSAAAFAKGLLDLEGQLTPILVSLVSKDSSMLDGLEDASTEMDEAKARLHEIIISSEKAKNTEGPVEFPWMVDGAGLPANASQLLPKMAKLTKEVTSQVKLLAEGEDERLALTSTFSKYDQAKALGKTTIDVARIAAGLPCGSESFLLMFARWRKLERDLYNERKDRFDITQIPDVYDSCKYDLLHNAHLNLKGLEELFKVAQILADGVIPNEYGINPKQKLKIGSKLSVLPNQNLLKTKLYSYQQKKQSTSRRFMLEMRMEEDLALRVRSHWTKKMKMIEKLNTD

SEQ ID NO: 222931 - protein, 71 aa, Zea Mays
MNKLLMEENDRLQKQVSRLVYENGYMRQQLHNPSAATTDTSCESVVTSGQHHQQQNPAAPRPQRDANNPAG

SEQ ID NO: 222932 - protein, 140 aa, Zea Mays
MELSTPVGSSLARTATMALVSPSFKITNQMCARGMPLECQFPHRLPSVACSMLLNTQPSQRTNHKDCGLLQVQCTENLMQSPVSFSDFSVSVCAQEDGLIKLQVNVSGTMTDSIFEKVFTKNVAAAQPLPGFRRMKGGKT

SEQ ID NO: 222933 - protein, 66 aa, Zea Mays
MLGVLFIVHSVCTVVFLLSLLFGETACTYVCMDHEDYWYCIKSLSINKYTLACEKKYTSSQSCELL

SEQ ID NO: 222934 - protein, 89 aa, Zea Mays
MEREKKERNELEKKLEEERKKAEEALRKEAMEQQQKELERYQELERLQKEREEAMKRKKMEEEQQRQNQMKLLGKNKSRPKLSFAFGMK

SEQ ID NO: 222935 - protein, 726 aa, Zea Mays
MSLQVANINAKEETPVGHGEVICFSIYSANSDVQAADFGNGKTCIWVDVLDGGRGVLMEFAPFFEDSSIKKVWHNYSFDSHVIENYGIKIAGFHADTMHLARLWDSSRKIDGGYSLEGLTNDRRVMDTVPEDLPKPGKTSMKTIFGRKNIRKDGSEGKVVSVEPVKKLQREDRELWICYSSLDSMSTLRLYDSLKSKLTTRRWILDGCPRGTMYDFYEQYWRPFGALLVKMETEGMLVDRGYLSEIEKAAIAERKLAADKFRKWASKYCPDAKYMNVNSDIQIRQLLFGGIENRHKSGETWPHSKTFKVLNEESVATEGKKTSKYRTIKLCSIVEDLKIDMFTPSGWPTVSGDALRSLAGKIPTEYIYTIDDIQDDDEYTSGSENPDGNSSYGTAYEAFGGGKNGKEACHAIAALCEICSIDSLISNFILPLQGDHISCAEGRIHCSLNINTETGRLSARTPNLQNQPALEKDRYRIRQAFVAAPGNSLIVADYGQAGGDFHSRTAMNMYQHIRDAVQEKKVLLEWHPQPGQEKPPVPLLKDAFGAERRKAKMLNFSIAYGKTAVGLSRDWKVSVKEARDTLKLWYRDRKEVLAWQKSQKKLASEKGEVYTLLGRSRHFPYLTQYGPGQRGHIERAAINAPVQGSAADVAMCAMLEIERNVRLKELGWRLLLQVHDEVILEGPSESAEVAKAIVVECMSKPFYGTNILNVDLAVDAKCAKSWYAAK

SEQ ID NO: 222936 - protein, 167 aa, Zea Mays
MAVDRVDGEEAFEEVDPTGRFGRYADVLGLGSVKKVYRGFDQEEGIEVAWNRVRLRSLADRDPGMVERLHAEVRLLRSLSHDHIIGFHKVWLDRDAGVLNFITEVCTSGSLREYRHRHRHVSVKALKKWARQILEGLNHLHTHDPCIIHRDLNCSNVFINGNNGQVN

SEQ ID NO: 222937 - protein, 76 aa, Zea Mays
MAVVGVLALQGSYNEHMAVPCTSRVRRRWKACLGNLCWAHLSCKQSSRAKNRGAGTCWRIRLYSPPKLFWESASKL

SEQ ID NO: 222938 - protein, 270 aa, Zea Mays
MALALPLARLVPACQCQPWPHLRFRKRHVSFAAHASSRAAFAACAAAPALQVQAPEAEAEAETVEQVGPKTRLVAQNIPWDCTADEMRALFESHGSVVGVELSMYSANKNRGLAFVTMGSEEEALAALTHLNSTILNDRKIKVDFARPRKKQPKQPAVVSDDTEKYVVFVGNLTWRVRNRHLRELFASAPGVVSAEVIFHTTTPRRSAGYAFVSFSSKESAGAAISAFNGKILMGRPINVMFKDENGEKNEPSSVPKKAEEHSSWTGHAV

SEQ ID NO: 222939 - protein, 928 aa, Zea Mays
MKSVDKNNNHNDSSQGLLATMRDHFGSVNCVRWARHGRYLASGSDDQVILIHERKAGSGTSEFGSGEPPDVENWKVIMTLRGHTADVVDLNWSPDDSTLASGSLDNTVHIWNITNGMCTAVLRGHSSLVKGVTWDPIGSFIASQSDDKTVIIWRTSDWSLAHKTEGHWEKSLGSTFFRRLAWSPCGHFITTTHGFQKPRHSAPVLERGEWSATFDFLGHNAPIVVVKFNNSMFRKSFSNGQDTKAAPAGWANGTSKISSKEQQPYNVIAIGSQDRTITVWTTASARPLFVAKHFFSQSVVDLSWSPDGYSLFACSLDGSVANFHFEAKELGYKLSDSDLDELKRSRYGDVRGRQSNLAESPAQLLLEEASAKQSASKKGTPIVQQFQAPQKLSADVLNPAPVVQNQKAPEALPEDEKKSSDPAADGMNKVTRLSSPVKQREYRRPDGRKRIIPEAVGFPSNQDNIPSRSQNHVIDFSSLDQRMNGIRPSYCSSSNCNNSGVKDCSGVTARANITESLVIQKASTNASSDGRLTVERTGSVVPGSLNCPALSIHVLDKKDNEDSLPVCLEANPVEHAAGDMNGVGGAFSTKGTEIRCTRGTETLWLDRISAKVTALAGNTNFWAVGCEDGYLQVYTKCGRRAMPAMMMGSAAVFIDCDDCWKLLLVTRRGLMYIWDLHNRTCILQDSLAALVASPDESSANHAGAVKVISAKFSRCGFPLVVLASRHAFLFDMSMKCWLRIADDCFPASNFASSFIFPQAGELGKLQIDVGKFMARKPIWSRVTDDGLQTRAHLETQLAASLALKSPQEYRQCLLSYIRFLAREADESRLREVCESFLGPPMGMLGSESSTDPKSPAWDSDVLGMKKHQLLREDILPSMASNRKVQRLLNEFMDLLSEYEAAKSKVDPMDITPALPQQAPEANANVVTS

SEQ ID NO: 222940 - protein, 323 aa, Zea Mays
MFGSALTYVILRLLGEGPDSGDGAMEKGRNWILDHGGATYITSWGKFWLSVLGVFEWSGNNPVPPEVWLLPYLLPFHPGRMWCHCRMVYLPMCYIYGKRFVGRITPLLLELRKELFKDPYSKIDWDKARNLCAKEDLYYPHPFVQDVLWATLHKFVEPVMMHWPGSKLREKALETVMQHVHYEDENTRYICIGPVNKVLNMLACWIEDPNSEAFKLHIPRVYDYLWLAEDGMKMQGYNGSQLWDTAFTVQAIVATNLIEEFGPTLKLAHNYIKNSQVLDDCPGDLNDWYRHTSKGAWPFSTADHGWPISDCTAEGLKHSEEER

SEQ ID NO: 222941 - protein, 96 aa, Zea Mays
MKDGTSSGGGAFAAGSDPRQPSTAKPYAPPKLSPQDLPIDYAGFLAVAFGVLGVMLRYKVCSWIAIIFCAQSLANMKNFENDLKQLSMAFISSKPW

SEQ ID NO: 222942 - protein, 185 aa, Zea Mays
MKGLLKGLRYISQIFDAKEPEMQIGKPTDVKHVAHIGWDNASVTAPSWMDEFKASPGTARGSDPEPSQPGGSEGCGEEQAGGGEDGGGKAERPRRARGNKGSGGNEPAKRRDCAAEGLRRDRRVAKAADAAEGAEGQGDAAAAAPKQRRRKPRAASGGRSKSSSGGAAASDSAGAPPDEDDRCGC

SEQ ID NO: 222943 - protein, 491 aa, Zea Mays
MVHIIPLASDGDGNHISVNGALQVGSTSNIDEIKLKLNKALQSEDISNGLVQSIHDAARSIELALIEHSKLPKSSWFPKTWLGVENNAWIKSLSYQAAVDSLLKAVIDVSSRGNDRDRDINVFVQRSLSRLLTPLESVIKNELSKREPALYEWYSSDQNPLVVRQFVNIFENDPMFYSATAICLEGEPMNTSESDLSLLMLGLICLAAITKFGSAKVSCQQFSSMVPDIIGRFMDMLLEFAPLSKAYNLAKDIGLRREFLYNFGPRAAVPKLGNDHGLEISFWIELVQKQLLWALDREKIWSRLTTSESIEVLEKDLAIFGFFVALGRSTQGYLSFKGLTDLDDSLNGIVRYLIGGSVLYYPQLSSISSYQLYVEVVCEELEWLPFYNDDVLSAKTDTEGREEVPKGEVISRVLNVCSYWMTSFTKYSSWLENPSNVKAAKFLSKGHVMLSDCMKELDISRNMSNDSGFLEPEEELDTGTELASFDKFALW

SEQ ID NO: 222944 - protein, 376 aa, Zea Mays
MIIVDDAGSFIPAMNHSPWDGVTVADFVMPFFLFIVGVALALAYKRVPDKLDATKKAVLRALKLFCLGLVLQGGFFHGVRSLTFGVDLQEIRLMGILQRIAIAYLLTALCEIWLKGDEDVDYGYDLLKRYRYQLFVGAIVGITYMSLLYGTYVRDWEYQTSGPGSIEKSFFVKCGVRGDTSPGCNAVGMIDRRILGIQHLYGRPVYARSKQCSIDSPQNGPLPPDAPSWCQAPFDPEGLLSSVMAIVTCLIGLQYGHVIVHFQKHRERIMNWLIPSFSMLVLAFAMDFLGLRMNKPLYTLSYTLATAGAAGLLFCGIYTLVDIYGYRRPTVAMEWMGMHALMIYVLIACNILPIFIHGFYWKEPQNNLLKFIGIGP

SEQ ID NO: 222945 - protein, 254 aa, Zea Mays
MPAYLVLFDSHICNVNGNRLNHVCLSPTVIRYYTKNRYRPTLRTDTVLFKHVTAGNRVCFNWWLVGSIRLSFTYDILYCFVGLSFAYQLLYLLDATAFYSPALHVLGIHVCRATGQELMDSSSRISRIRSRELERLRGPPWFKAVQRVFLSCVYTTLDYAQTGLIAAVFFFKMMEWWYQSAEERMSAPTVYPPPPPPPTPKVAKDGIPLPPDRTLCPLCCQKRANPSVLSVSGFVFCYSCIFKSVSQVGSSTDL

SEQ ID NO: 222946 - protein, 388 aa, Zea Mays
MNEAVQEAKLLRQVNALIVAHLRSQNLGQAAAAVAAATMTPISAAESVPANHLLRLVAKGLAAEHGGGDAASAFDSAGFGVAVQPPGSSAVDFSIQDVKGSSKSFPKHEVKHVSDHKNAARCVKFSPDGKYFATGSADTSIKFFEVAKIKQTMVGDSKDGPARPVVRTFYDHTQAINDLDFHPESPILISAAKDSTIRFFDFSKTNARKAFRVIQDTHNVRSDSSSPINQVRYSCTGSLYVTASKDGSLRIWDGVSAECVRPIIGAHGSSEAISAIFTKDERYVLSCGKDSRVKLWEVGTGRLVKQYAGAIRRQFRCQAVFNETEEFVLSVDEQNNEVVVWDALTAEKVTRLPSGSTGAPRWLDHSPVEPVFVSCGNDRSIKFWKQTV

SEQ ID NO: 222947 - protein, 350 aa, Zea Mays
MNEAVQEAKLLRQVNALIVAHLRSQNLGQAAAAVAAATMTPISAAESVPANHLLRLVAKGLAAEHGGGDAASAFDSAGFGVAVQPPGSSAVDFSIQDVKGSSKSFPKHEVKHVSDHKNAARCVKFSPDGKYFATGSADTSIKFFEVAKIKQTMVGDSKDGPARPVVRTFYDHTQAINDLDFHPESPILISAAKDSTIRFFDFSKTNARKAFRVIQDTHNVRSVCFHPCGDYLLAGTDHPVAHLYDINTFTCYLSANAQDSSSPINQVRYSCTGSLYVTASKDGSLRIWDGVSAECVRPIIGAHGSSEAISAIFTKDERFSCQVMGSWHWTTCEAICRSNSQTISLSGCLQ

SEQ ID NO: 222948 - protein, 635 aa, Zea Mays
MQSLTLCAMKELRLYENSEKALLSSTSANGTAILRVVQALSSLVSTLQDRKDPEQPAEKDHSDAVSQISEINTALDALWLELSNCISKIESSSEYASNLTPASASAATLTAGVAPPLPAGTQNRRTQGLLGRSGIRRRGAAGFGIGDGAEVARANLPEVTGAAGFAGGAQRDLAAATQSCASSPIYGDGAFASTVYPSPKRWAADLPNHQELKSKFLSRTSARRPANLMALVDAKAAGASTSTVAAAPTVEHLLFLVVLDGVETPIHEGTLYGSAGGTVTVTGPGQLSADGLESVLVRGGGTGAGAVRFTLCADAAAEGVGAACFERCGAARVEGAREVSVSSCRAVEVERAGRVTLDRCRDARLRGGGALRATRCRRADVESFGGVRLARCKAARADWCGTVEVELCRAVDVRRCGAVTGERCRVVNAAGCGSVEVARAVINMVEEEQPYPAAHPQQHCLVVSHIGVGITVGIVPITMPPLPAADDLLILEFIASNRRIPHAVFNSFIASQSPPSAFSRTSQRLRKALVLRALDAALYTVGASCSSSLLLHKARKVLADPDAAACFPHQIPFTENEENDEARAAVADLKRLLDLEWANLPPSTLELVAGDGSHQTGAAADHTMRTKLRLGVSEA

SEQ ID NO: 222949 - protein, 61 aa, Zea Mays
MNLSSGVTIYVIYNLCLCVITHNHFMVNICECEKASIIFLKEMMCHYSSNPFVATVKESVK

SEQ ID NO: 222950 - protein, 61 aa, Zea Mays; identical to SEQ ID NO: 222949

SEQ ID NO: 222951 - protein, 2846 aa, Zea Mays
MGEEDTGEMPDASPPAPWEHGVDERFADESLGLFDDEAYTVEEEDVSDTEMTAGSPAAPSEPSPPLRRRLAPVVPSDVPEQVVRAVDAVIMGGGVERLRDMVSEENGEVSHFIVDVLMVTMGGVDGLDEGAGEGIGAATGLPPSIMSSSRAAAIAAELVPYLPFGVEPSPRTRMTRGLLATLSACTRNRTMCAASGLLAVLLEVAEKLFVGMGRGSKWDGTPLVQCIQVLGGHSVSVRDLHTWLLLIKKALGTQWATQLTIALENAVASNEAKGPAVTFEFDGESSGLLAPGDNRWPFSNGLGFATWIYVESFSGSLNTATATAAVAAAAASASGKSSPSAAAAAACTLAGEGTKHMPRIFSFLTSENHGIEAYFNDQFLVVESAAGKGKKASLHFTYEFKPRCWYFVGLEHSSKQALLGKSESELRLYVDGDLHESCPFEPPRIVKPLVFCCIGTNPSPTIAGLQRRRRQCPLFAEMGPIYIFTEPIGPEKMSRLASRGGDALPSFGNGAGFPWKATSNHIRETAEDGYTLDIEIGGSLHLLYHPSLLNGRFCSDASPSGSTGTHRRPAEVLGMVHISNRVRPAESLWALAYGGPMALLPLIVSNVEMDNLEPILGDLSSSLATASLSVPIFRIISVAVQHPGNKEELCRTHGPELLSQVLHYVLDTLSRLESGKKEILSDEELVTAIVSLCQSQRNDHSQKVQLFSTLLLDLKMWSSCNYILQKKLLSSLADMVFAESTCMRDANALQMLLDGCRRCYWVVHEADSIDTFTLTGNERPLGNVNALVDELLVVIELLIGAAPSTLASDDVRCLVGFIVDCPQPNQVARVLLLIYRLIVHPNTSRANTFAQSFISRGVVEALLVLLQREAKSGDSNILHSCNVSHDSASWNESSKLTNKDSKFKNASGETNCQDHQIQSVQHYEPNSHETGVGLGSTSKWSLLKGQFLKNLGGMDVPNISDNVQNIDNGDGVLVGIVRVLGALVASGHLTSTSPTVRPKLPSGFLTTSNGEGNTMFEDRVSLLLFALQKAFQAAPRRLMTRNVYTALISSVINVSSKDNLKNLQDSGYHFKHIPLLVVLLRSLPYASRSFQARVIQDLLYLVCSHPKNRSTMTSINEWPECILEVLISNHEMGDNKDSDGISICEVEDVVHNLLLVVLQHSMRKKDGWKDVEATIHCAEWLSMVGGTSTGDQRIRREEALPIFKRRLLGSLLNFSAQELQVQQTEGIAAAAAGVAAEGLVPKETKVHAEKVANLSVMLAENAVVLLMLVEDHLRSRSQQFFMACLADSAASPASMASSAVSRSNSLSRTGSEHLEAGDSRQSLSSDAGGLPVDVLASTVDTNGQLSAEVMERVTAAAAAEPYGSVRHAFVSYGSCISDLSEGWKYRTRLWYGVCIPPKSNVFGGGGSGWVSWKSVLEKDSDGNWIELPLVKKSVAMLQALLLDSGLGGCLDSGVGFGPGMGVMGAFNQLLDSDQPFFCMLRLILVSMREDDSGEDDIFMRNISMKNVISEVLGCQTGSMLGLGGNSSASMRKRPAALLWRVLGPVLNMPVSESKRQRVLVASSILYSELWHAVSSDRKPVRKKYVGLIMPPFVAVLKRYRSVLAGIHELTCPDVQNPLLIDDWASTADTSPVEVGVAMISPAWAAAFASPPVAMALAMIAAGASGTETIAPPTNKLRRRDTSLLERRAAKLHTFSSFQMPIDTTPSLPTSAPKDKAAAKAAALAAARDLERSAKIGSRRGLSAVAMATSGQRRSAGDIERAQRWNISEAMGAAWMECLQSADSKSVSGRDFSALSYKYVALLVSSFALARNLQRVEMERRTQVEILNRSCMSIGLRAWQHLLHCLIETSRLYGPFGELLCSPDSIFWKLDLTESSLRMRRFMKRNYNWLNHLGASANYVEQKFLCDGADACHSEDGDSLLSVLPASSLITVDEVHEQIVQRQSDNICSSVDDQLTDSSTTDQIFTGSIDSRSSDFSGVRNLIRSTVVTPGYKTNNERIIIELPSMMIRPLKVVRGTFQVTSKRINFIVDEHMSDSYMDDIASTSGQYDQQDRDRSWFLSSLHQIFSRRYLLRQSALELFMVDRSNFLFDFEDIGSRTHAYRALVHTKPPYLNTVSVATQRPEQIFKQTQLMERWAKWEISNFEYLMELNTLAGRTYNDITQYPVFPWVIADYKSKTLDLESPSTYRDLSKPIGALNPARLKKFQDHYSSFKDPIIPKFHYGSHYSNPGTVLYYLARIEPFSILYAQLQGAKFDHDDCAFSDVARTWNSVLEGMNDVKELVPEMFYLPEVFTNVNPSGRLGSVALPPWAKNAVDFIHMHRKALESDHVSTRLHEWIDLIFGYKQRGKGAEVANNIFPHVTYDGMVDIDKITDPVQRRSVQNQICYFGQTPSQLLTVPHIRRRSLTQILQLQTIFRNPSEVRSYVLPSPEHCNVPASTMLVSNDCLVVIDSNVPTAHVALHHWQPNTPDGLGAPFLFHHGKNAINSSGGAIFRIFKGSSGSAEDYQFPRAVAFAASAVQSSSAVVVTCDKEVITGRHADNSVKMISPDGARTIETAFGHLAPVTCLALSADSSYLVTGSRDTTVILWRIRQVGSAHKKNAPEPPPSTPTTPTSPLATGSSSDSSPSKTLETYRRRRIEGPMHVLRGHLGEVTCCSVSSDLGLVGSSSSVSGVLLHSLRTGRLIKKLDVPEAHSICFSSQGIVLVWNEVENRLSTFTVNGIPIATAVVSPFSARVSCIEISTDGQFAAMGTCSSSNDNHDCSTALEDNSELDKPGSDEDVQGSNETRLSVDAPSICFLDLYKLEVIHKLKLEEGQDVTALALDQENTTLLVSTADKQLIVYTGPAPSTP

SEQ ID NO: 222952 - protein, 88 aa, Zea Mays
MKTRSQTSPKPLKTVAMAPRPSSTKRKPRPKPAGKGDPRAPKKPPTAFFYFMEDFRKIYKQEKPSVKSMQEIGKACGEKWNTMTFEES

SEQ ID NO: 222953 - protein, 279 aa, Zea Mays
MPPLLFSLRPSPCSGFPLRRLLFRCSASSASTFSSLASYHASFARRMALAGIHPHHRIAVGVSGGPDSMALCVLATAWKKAAGRKAGDEEDPVASAFVDGLLGVVVDHGLRPESADEARLVRDRVRGMGVECEIANCEWPYGPPKQGKVQEAAREVRYQKLLDICIKQQIGILLIAHHSDDQAELFVLRLSRQSGVLGLAGTAFVSQLFASNVKYDGERFRRYGILLVRPMLEFSKDDMYKICQGSNQPWVEDPTNTSMKYARNRIRASLRKLSTEGTF

SEQ ID NO: 222954 - protein, 75 aa, Zea Mays
MPAAAAAQRLLAASTKIIGVGRNYIAHSKELGNPVPKEPVLFLKPTSSFLHAGVATAAVEIPEPLESLHHETKEE

SEQ ID NO: 222955 - protein, 221 aa, Zea Mays
MSLPAATAPSSSGATQPTEQQGGSRERRVESLGWLTESAVMPKKHKAIEGVGAASILDLKAQLYRTQEEARNPTAPGAAASGGEFRRAKIRSAPTDPLGAKNSGVESRAHKDKLELKAVKDGSASYAALEKKAELYEKLYRGELPDEEDKEKYCVDFFQKSSDRIYEPQMPEISHRATDAAEPVNDHEDSMPNAKPLGLGRAGTTIDRDEHKRFVSCWGLA

SEQ ID NO: 222956 - protein, 74 aa, Zea Mays
MNVHMMSKQIMVTETEDHIRLHDNGPSTEFSLKLPNLITTIQLNSSHIQYNSDTYKPWNALNMWQIPKTLATTW

SEQ ID NO: 222957 - protein, 203 aa, Zea Mays
MGSPKAAKSMVKQRIWRHRLVAPFAAVLITAVVVFSGLFAQDPSATSEFTAVNAGNTLPVRDKSESTGAAARGSPNKEDLATAAFEQELDVGNSEPNQAFQGTVPAAGERGTATAVPVQRERSSGGSEPEEKQSPPQDQEGEETSAKSGASFCARTVVHKLEEEYVLCALLEPRLSTNSSLGCSPRAFYLKEMFSWVEVVFLF

SEQ ID NO: 222958 - protein, 998 aa, Zea Mays
MYELGHLIRKPSREVCVFLAPTIPLVRQQAMVIADSTNFKVQRYYGSGKHSRDHQAWEKEMGEYEVLVMTPQILLHNLRHCFIRMDLIALLIFDECHHAQAQKRHPYAQIMKEFYNNADKHPRVFGMTASPIIGKGGSNKLTYTKCINSLEELLNAKVCSVDNVELESVIASPKVEVYFYGPVGHSNLTTAYIKELGGYKFQSECMLRESVCNFNESLKKLKSLWRLHENLIFCLQEVGLFGALQAARTFLSSSSVSLDGKGADINDYANKAMSLLSRDILEGPDADSFDLETIEEPFFSKKFAVLINVLSRYRLEENMKCIVFVKRIIVARVVVQILQNLKCLDFWRCEFLVGCHSGLRNMSRDKMSSIIEKFSSGEVNLLVATSVGEEGLDIQTCCLVVRFDLPETVNSFIQSRGRARMSKSKYVFLLERGNHSQEKLLDDYITGEIIMDKEINLRTSNDMFNCLEENIYRVNDTGASISTACSVSLLHRYCDNLPRDIFFVPSPSFFFVDDVDGIVCKLILPPNAAFRQVNGQPCPSKDEAKRDACLKACIKLHELGALTDFLLPGQGSRKIKVSTTNNSESNKDDDESFREELYEMLIPAVLRPSRCKLDSSFKLHFYYIEFIPIPADRRYQMFGLFVINRLPEESEKLDVELHLARARIVKAGIKYLGKIEFNKEEMILAHNFQEMFLKVLLDRSEFTPSYILLGNDGALDMDSTFYLLLPIKQKFYGDNMIDWPAVKRCLSSPAFQDPMGLSLHDSYLPNESLKLLGGTYNKADVIGSLVYTPHTDLFFFVDAILDGTNAKSELNGATYAEHFKQRLHIKLSHPEQPLLKAKQLFCLRNLLHNRQLESTESEARELMEHFVELPPELCSLKIIGFSKDMGSSLSLLPSLMYRLENLLVAIELKDVMSSYFPEASQISASGILESLTTERCLERISLERLEVLGDAFLKYVVGRHNFISYEGLDEGQLTRRRSDIVSNSNLYELSIRRNLQVS

SEQ ID NO: 222959 - protein, 1039 aa, Zea Mays
MSEDEAESSSSGAAASEPKDPRTIARKYQLDLCKRAVDENIIVYLGTGCGKTHIAVLLMYELGHLIRKPSREVCVFLAPTIPLVRQQAMVIADSTNFKVQRYYGSGKHSRDHQAWEKEMGEYEVLVMTPQILLHNLRHCFIRMDLIALLIFDECHHAQAQKRHPYAQIMKEFYNNADKHPRVFGMTASPIIGKGGSNKLTYTKCINSLEELLNAKVEVYFYGPVGHSNLTTAYIKELGGYKFQSECMLRESVCNFNESLKKLKSLWRLHENLIFCLQEVGLFGALQAARTFLSSSSVSLDGKGADINDYANKAMSLLSRDILEGPDADSFDLETIEEPFFSKKFAVLINVLSRYRLEENMKCIVFVKRIIVARVVVQILQNLKCLDFWRCEFLVGCHSGLRNMSRDKMSSIIEKFSSGEVNLLVATSVGEEGLDIQTCCLVVRFDLPETVNSFIQSRGRARMSKSKYVFLLERGNHSQEKLLDDYITGEIIMDKEINLRTSNDMFNCLEENIYRVNDTGASISTACSVSLLHRYCDNLPRDIFFVPSPSFFFVDDVDGIVCKLILPPNAAFRQVNGQPCPSKDEAKRDACLKACIKLHELGALTDFLLPGQGSRKIKVSTTNNSESNKDDDESFREELYEMLIPAVLRPSRCKLDSSFKLHFYYIEFIPIPADRRYQMFGLFVINRLPEESEKLDVELHLARARIVKAGIKYLGKIEFNKEEMILAHNFQEMFLKVLLDRSEFTPSYILLGNDGALDMDSTFYLLLPIKQKFYGDNMIDWPAVKRCLSSPAFQDPMGLSLHDSYLPNESLKLLGGTYNKADVIGSLVYTPHTDLFFFVDAILDGTNAKSELNGATYAEHFKQRLHIKLSHPEQPLLKAKQLFCLRNLLHNRQLESTESEARELMEHFVELPPELCSLKIIGFSKDMGSSLSLLPSLMYRLENLLVAIELKDVMSSYFPEASQISASGILESLTTERCLERISLERLEVLGDAFLKYVVGRHNFISYEGLDEGQLTRRRSDIVSNSNLYELSIRRNLQVS

SEQ ID NO: 222960 - protein, 583 aa, Zea Mays
MSEDEAESSSSGAAASEPKDPRTIARKYQLDLCKRAVDENIIVYLGTGCGKTHIAVLLMYELGHLIRKPSREVCVFLAPTIPLVRQQAMVIADSTNFKVQRYYGSGKHSRDHQAWEKEMGEYEVLVMTPQILLHNLRHCFIRMDLIALLIFDECHHAQAQKRHPYAQIMKEFYNNADKHPRVFGMTASPIIGKGGSNKLTYTKCINSLEELLNAKVCSVDNVELESVIASPKVEVYFYGPVGHSNLTTAYIKELGGYKFQLLMCFEQSECMLRESVCNFNESLKKLKSLWRLHENLIFCLQEVGLFGALQAARTFLSSSSVSLDGKGADINDYANKAMSLLSRDILEGPDADSFDLETIEEPFFSKKFAVLINVLSRYRLEENMKCIVFVKRIIVARVVVQILQNLKCLDFWRCEFLVGCHSGLRNMSRDKMSSIIEKFSSGEVNLLVATSVGEEGLDIQTCCLVVRFDLPETVNSFIQSRGRARMSKSKYVFLLERGNHSQEKLLDDYITGEIIMDKEINLRTSNDMFNCLEENIYRVNDTGASISTACSVSLLHRYCDNLPRDMYAKDHLLFYPFCVMGIS

SEQ ID NO: 222961 - protein, 1080 aa, Zea Mays
MSEDEAESSSSGAAASEPKDPRTIARKYQLDLCKRAVDENIIVYLGTGCGKTHIAVLLMYELGHLIRKPSREVCVFLAPTIPLVRQQAMVIADSTNFKVQRYYGSGKHSRDHQAWEKEMGEYEVLVMTPQILLHNLRHCFIRMDLIALLIFDECHHAQAQKRHPYAQIMKEFYNNADKHPRVFGMTASPIIGKGGSNKLTYTKCINSLEELLNAKVCSVDNVELESVIASPKVEVYFYGPVGHSNLTTAYIKELGGYKFQSECMLRESVCNFNESLKKLKSLWRLHENLIFCLQEVGLFGALQAARTFLSSSSVSLDGKGADINDYANKAMSLLSRDILEGPDADSFDLETIEEPFFSKKFAVLINVLSRYRLEENMKCIVFVKRIIVARVVVQILQNLKCLDFWRCEFLVGCHSGLRNMSRDKMSSIIEKFSSGEVNLLVATSVGEEGLDIQTCCLVVRFDLPETVNSFIQSRGRARMSKSKYVFLLERGNHSQEKLLDDYITGEIIMDKEINLRTSNDMFNCLEENIYRVNDTGASISTACSVSLLHRYCDNLPRDIFFVPSPSFFFVDDVDGIVCKLILPPNAAFRQVNGQPCPSKDEAKRDACLKACIKLHELGALTDFLLPGQGSRKIKVSTTNNSESNKDDDESFREELYEMLIPAVLRPSRCKLDSSFKLHFYYIEFIPIPADRRYQMFGLFVINRLPEESEKLDVELHLARARIVKAGIKYLGKIEFNKEEMILAHNFQEMFLKVLLDRSEFTPSYILLGNDGALDMDSTFYLLLPIKQKFYGDNMIDWPAVKRCLSSPAFQDPMGLSLHDSYLPNESLKLLGGTYNKADVIGSLVYTPHTDLFFFVDAILDGTNAKSELNGATYAEHFKQRLHIKLSHPEQPLLKAKQLFCLRNLLHNRQLESTESEARELMEHFVELPPELCSLKIIGFSKDMGSSLSLLPSLMYRLENLLVAIELKDVMSSYFPEASQISASGILESLTTERCLERISLERLEVLGDAFLKYVVGRHNFISYEGLDEGQLTRRRSDIVSNSNLYELSIRRNLQTSNVLVLVLLTWLVERLNLKHKMAKV

SEQ ID NO: 222962 - protein, 887 aa, Zea Mays
MSEDEAESSSSGAAASEPKDPRTIARKYQLDLCKRAVDENIIVYLGTGCGKTHIAVLLMYELGHLIRKPSREVCVFLAPTIPLVRQQAMVIADSTNFKVQRYYGSGKHSRDHQAWEKEMGEYEVLVMTPQILLHNLRHCFIRMDLIALLIFDECHHAQAQKRHPYAQIMKEFYNNADKHPRVFGMTASPIIGKGGSNKLTYTKCINSLEELLNAKVCSVDNVELESVIASPKVEVYFYGPVGHSNLTTAYIKELGGYKFQSECMLRESVCNFNESLKKLKSLWRLHENLIFCLQEVGLFGALQAARTFLSSSSVSLDGKGADINDYANKAMSLLSRDILEGPDADSFDLETIEEPFFSKKFAVLINVLSRYRLEENMKCIVFVKRIIVARVVVQILQNLKCLDFWRCEFLVGCHSGLRNMSRDKMSSIIEKFSSGEVNLLVATSVGEEGLDIQTCCLVVRFDLPETVNSFIQSRGRARMSKSKYVFLLERGNHSQEKLLDDYITGEIIMDKEINLRTSNDMFNCLEENIYRVNDTGASISTACSVSLLHRYCDNLPRDIFFVPSPSFFFVDDVDGIVCKLILPPNAAFRQVNGQPCPSKDEAKRDACLKACIKLHELGALTDFLLPGQGSRKIKVSTTNNSESNKDDDESFREELYEMLIPAVLRPSRCKLDSSFKLHFYYIEFIPIPADRRYQMFGLFVINRLPEESEKLDVELHLARARIVKAGIKYLGKIEFNKEEMILAHNFQEMFLKVLLDRSEFTPSYILLGNDGALDMDSTFYLLLPIKQKFYGDNMIDWPAVKRCLSSPAFQDPMGLSLHDSYLPNESLKLLGGTYNKADVIGSLVYTPHTDLFFFVDAILDGTNAKSELNGATYAEHFKQRHGVRTFF

SEQ ID NO: 222963 - protein, 291 aa, Zea Mays
MSAKCEGLSGPLRLQQGPLKRPLNYRGCARDPNCGGRPPCAIRATDPPAAARKLPPPPTARWRLHLPGPSPQSGVLRRRHRGRWETRGLARADAEHGGGADRRGVHGHRRTRSIVEEQIEEASMATAAATPFQLQFDKPIPFQGNGWFTDGQARPLPHLKFYDLHRIREGVRKEGAQKSGQKYLSESDLQNADGHPEIDLAFVLLLPRRSLVSSLPRPSLLKLSSSTQEPREYDSGEGRGEKGYSVAVAVLRIWPWVMAAPAHCSLTYQPPETRDWNWMDKAQANRMPLIF

SEQ ID NO: 222964 - protein, 288 aa, Zea Mays
MEIRAPPTSLSLAPPPASASFRRTPLRTFFLNGSVSLKVVQVRQSNVNRFKCNSIQSNLFDRLTRVARSYANAVLSSFEDPEKILEQAVLEMNDDLTKMRQATAQVLASQKRLENKYKAAEQASADWYRRAQLALQKGDEDLAREALKRRKSYADNASSLRSQLDQQKGVVENLISNTRVLESKIAEAKQKKDTLKARAQSAKTATKVSEMLGNVNTSSALSAFEKMEEKVMAMESQAEALGQLATDDLEGKFALLENSSVDDDLSQLKKELSGSSLYVDLFTRWKGV

SEQ ID NO: 222965 - protein, 2676 aa, Zea Mays
MDHRGGGGGGGNKNRTDLLAAGRKKLQQFRKKKGKRGPGNKADADADAEAGEGAPKAAEESVPEPKSPVGLKLLAGEGGGGSTPFEEAERSQAEQCNGEGPGTAESSSVESSNAVQEQETVQEQETDDVSDAHHVGPSEQGISEHPESQTAGGRDLSLQATSGDSIGDDNVGRAQLGDVDSMELNASSEGNGADGDCNQLGEHQQVEMDAVERPTSSSFEEFTELPIHSQGIEADNIHGEGAQEMVMDVSGRPLDGDIQHDIEPTASAEIDAETALEESTVAASIVIPESTARGTEYERDTGYETDGVDKEALLEDPSMVHVSDEAVTIDDLSVQAKPTASADMPLCEQKGDPALSRSAVLQGIMPLHFEDIQNHMFSATLSRDFLQLQLDEAAGLYSDFTQQSSDNTTQLRVLLKETEESKLAVDRELHQCRHELSKVNIEKGQLELTMASLKEEINTSNTRCTYLESELHSSKESTEQIHSELANSRLLLEALQKENMELTASLAFEKEAKKEVEEQRDHLSSDNRKLLSELSGLELSLASVKEEMDASSSRCNVFECELRSSNENMNHTLTELANCQALLETLQKDNLELSANSASEREAKMKLQEDNLYLCNEKGKLSSNLRELNDKLEVSYAKHKQLESHVKDTETYFGQLTEQLIEENLYTSISIDIYQSTTKDLDTKYNIVLGQFQNIMRQELHLDSSEVTTENAERAIMTPRHDSHGNNQCLLNLVNANDSCNSTALLSLKGHLEVAKSDLHNLEKLLERISSRSDGRVLVSKLIKSFESKGSDDDTGLSEGEHDNLQKSTREMLSCLGEKFIAMSSDITKTEEYLAELCNKIELYVKSTVQHDRDRQCTVVLEAKMDELAGKLSNYKETIDNLHNQVAIVQQDANSNAGKLIDQAELLQKDAVERISILENERMSLSDLLSEVTNKLTSLGDAVFPSGSSEIEGLNFCTLSCVDLVARSFQSLQEKLEAAQIDNAQLNSSLVELRKAIGVAQERSEHADGIVKKLYDSLQELLCDSLGSSNEFGARYSVEEPIESQYGRLIAHLKNLLHDHHSALSTNAELELSLLSKCEEVEELNMRCSSLLKKLDEVCILNEELKSASSSKNVTLDKLHSRCLTVAEMLASCSANHSSTVQLISDIGEGSSKEDHILTTLLPCIEADVASCIEKFENAAEEIRLSKICLQEISIFDQISFEKWSYPLPTLIKEEVLPKICDLQDRFDQLNALNIQLETEVAVLKDGMKELDEDLGTSRSELQKKVSELEQLDQKFSSVKEKLSIAVAKGKGLIVQRDSLKQSLLEKSGEIEKLTQELQLKETLLKELEAKLKSYTEADRIEALESELSYIRNSATALRDSFLLKDSVLQRIEEVLEELDLPEQFHSRDIVEKIELLSKMAIGTPFTLPDGDKGSSVDGHSESGVAMNVIDDEQNSNSNSVSDEVKSKYEELNRRFCELAEQNNMLEQSLVERNSLIQKWEEVLGQISIPPQFRMLEAEDKLAWLGNRFLEVEQERDSLQLKIEHLEDSSEMLIADLEESHKRISELSAEVVAIKAEKDFFSQSLEKLRFEFLGLSEKVVQDEFVRDKLRMDLSELRDKFAEKTEESRHYHEMDTEVHKLLNLVQNTLQDSTNSEISSGGISAVLCLGKMLKKLLDDYGTLLYKSTEGNFAERDIQLEDIKPSKDASKSDTGAYEKEMELNSLNNELDHAHNNLALAQQECDEAVEKAQSLMMEIETLHAQISKLQESDAEQMQKKEMELNSLNNELDHARNNLALVEQERDEAVEKAQSLMMEIETLHAQISKLQESDAEQMQKYQSLVLELESVGKQRDNLQERLNQEEQKCASLREKLNVAVRKGKGLVQHRDSLKQTMEEMNVVIEKLKSERKQHIESLETEKSSLMDRLAENEKSLHETNQYLSGLLNALNRVDVAREFDMDPITKVEKMAKFFLDLQSTVASSQNEVMKSKRATELLLAELNEAHERADNLQEELVKAEAALSESSKQYIVTESARADAVRQLELIMHAQSQTRRRQADHLLELNSTSSQLREVCFELSHCLVNTFSKDVDLICYVVNFMRSSGKLMDDTNTMDIPIASKHVLSNRTNNKKAHIPNAPLEIKTDDTDDSQFLHHLAIACHALSDCVKDCNDLKRNIDEHDFSVEQKATELFDVMSTLKNRFTSQHNELESLRAKFVELQSEMEERDKEIIFAQRNMSLLYEACASSVAEIEGISDIYPGKHSYAVEHSADECIKSIVEQLVMAVKTSQNSNEGSTKELKAIVLELQQELQAKDVQISTISSDLSYQLRVAESSAKQFSVDLEDARMELQNLEKQVDVLQNQKKDLETQLNELKNMESMASEQHGRIEKLTDELSRKDQEIEGLVQALDEEEKELEILENKSLQLEQMLQEKEFALKTSEVSRTKALAKLATTVDKFDELHSLSENLLAEVENLQLQLQERDSEISFLRKEVTKSTNELLTTEESNKNYSSQLNGFMKWLERELLQFGFHSESANDYDYTQFPVYMDMLDKKIGSLIAESDDLRVTVQSKDSLLQVERAKIEELMRKSDGLEASLSQKDSQIGLLRRDRASNQQSRSINLPGTSEIEQMNDKVSPAAVVTQIRGARKVINDQVAIDVEMEKDKPFDDEDDDKAHGFKSLTMSRFVPKFTRPVSDRIDGMWR

SEQ ID NO: 222966 - protein, 2705 aa, Zea Mays
MDHRGGGGGGGNKNRTDLLAAGRKKQFRKKKGKRGPGNKADADADAEAGEGAPKAAEESVPEPKSPVGLKLLAGEGGGGSTPFEEAERSQAEQCNGEGPGTAESSSVESSNAVQEQETVQEQETDDVSDAHHVGPSEQGISEHPESQTAGGRDLSLQATSGDSIGDDNVGRAQLGDVDSMELNASSEGNGADGDCNQLGEHQQVEMDAVERPTSSSFEEFTELPIHSQGIEADNIHGEGAQEMVMDVSGRPLDGDIQHDIEPTASAEIDAETALEESTVAASIVIPESTARGTEYERDTGYETDGVDKEALLEDPSMVHVSDEAVTIDDLSVQAKPTASADMPLCEQKGDPALSRSAVLQGIMPLHFEDIQNHMFSATLSRDFLQLQLDEAAGLYSDFTQQSSDNTTQLRVLLKETEESKLAVDRELHQCRHELSKVNIEKGQLELTMASLKEEINTSNTRCTYLESELHSSKESTEQIHSELANSRLLLEALQKENMELTASLAFEKEAKKEVEEQRDHLSSDNRKLLSELSGLELSLASVKEEMDASSSRCNVFECELRSSNENMNHTLTELANCQALLETLQKDNLELSANSASEREAKMKLQEDNLYLCNEKGKLSSNLRELNDKLEVSYAKHKQLESHVKDTETYFGQLTEQLIEENLYTSISIDIYQSTTKDLDTKYNIVLGQFQNIMRQELHLDSSEVTTENAERAIMTPRHDSHGNNQCLLNLVNANDSCNSTALLSLKGHLEVAKSDLHNLEKLLERISSRSDGRVLVSKLIKSFESKGSDDDTGLSEGEHDNLQKSTREMLSCLGEKFIAMSSDITKTEEYLAELCNKIELYVKSTVQHDRDRQCTVVLEAKMDELAGKLSNYKETIDNLHNQVAIVQQDANSNAGKLIDQAELLQKDAVERISILENERMSLSDLLSEVTNKLTSLGDAVFPSGSSEIEGLNFCTLSCVDLVARSFQSLQEKLEAAQIDNAQLNSSLVELRKAIGVAQERSEHADGIVKKLYDSLQELLCDSLGSSNEFGARYSVEEPIESQYGRLIAHLKNLLHDHHSALSTNAELELSLLSKCEEVEELNMRCSSLLKKLDEVCILNEELKSASSSKNVTLDKLHSRCLTVAEMLASCSANHSSTVQLISDIGEGSSKEDHILTTLLPCIEADVASCIEKFENAAEEIRLSKICLQEISIFDQISFEKWSYPLPTLIKEEVLPKICDLQDRFDQLNALNIQLETEVAVLKDGMKELDEDLGTSRSELQKKVSELEQLDQKFSSVKEKLSIAVAKGKGLIVQRDSLKQSLLEKSGEIEKLTQELQLKETLLKELEAKLKSYTEADRIEALESELSYIRNSATALRDSFLLKDSVLQRIEEVLEELDLPEQFHSRDIVEKIELLSKMAIGTPFTLPDGDKGSSVDGHSESGVAMNVIDDEQNSNSNSVSDEVKSKYEELNRRFCELAEQNNMLEQSLVERNSLIQKWEEVLGQISIPPQFRMLEAEDKLAWLGNRFLEVEQERDSLQLKIEHLEDSSEMLIADLEESHKRISELSAEVVAIKAEKDFFSQSLEKLRFEFLGLSEKVVQDEFVRDKLRMDLSELRDKFAEKTEESRHYHEMDTEVHKLLNLVQNTLQDSTNSEISSGGISAVLCLGKMLKKLLDDYGTLLYKSTEGNFAERDIQLEDIKPSKDASKSDTGAYEKEMELNSLNNELDHAHNNLALAQQECDEAVEKAQSLMMEIETLHAQISKLQESDAEQMQKKEMELNSLNNELDHARNNLALVEQERDEAVEKAQSLMMEIETLHAQISKLQESDAEQMQKYQSLVLELESVGKQRDNLQERLNQEEQKCASLREKLNVAVRKGKGLVQHRDSLKQTMEEMNVVIEKLKSERKQHIESLETEKSSLMDRLAENEKSLHETNQYLSGLLNALNRVDVAREFDMDPITKVEKMAKFFLDLQSTVASSQNEVMKSKRATELLLAELNEAHERADNLQEELVKAEAALSESSKQYIVTESARADAVRQLELIMHAQSQTRRRQADHLLELNSTSSQLREVCFELSHCLVNTFSKDVDLICYVVNFMRSSGKLMDDTNTMDIPIASKHVLSNRTNNKKAHIPNAPLEIKTDDTDDSQFLHHLAIACHALSDCVKDCNDLKRNIDEHDFSVEQKATELFDVMSTLKNRFTSQHNELESLRAKFVELQSEMEERDKEIIFAQRNMSLLYEACASSVAEIEGISDIYPGKHSYAVEHSADECIKSIVEQLVMAVKTSQNSNEGSTKELKAIVLELQQELQAKDVQISTISSDLSYQLRVAESSAKQFSVDLEDARMELQNLEKQVDVLQNQKKDLETQLNELKNMESMASEQHGRIEKLTDELSRKDQEIEGLVQALDEEEKELEILENKSLQLEQMLQEKEFALKTSEVSRTKALAKLATTVDKFDELHSLSENLLAEVENLQLQLQERDSEISFLRKEVTKSTNELLTTEESNKNYSSQLNGFMKWLERELLQFGFHSESANDYDYTQFPVYMDMLDKKIGSLIAESDDLRVTVQSKDSLLQVERAKIEELMRKSDGLEASLSQKDSQIGLLRRDRASNQQSRSINLPGTSEIEQMNDKVSPAAVVTQIRGARKVINDQVAIDVEMEKDKPFDDEDDDKAHGFKSLTMSRFVPKFTRPVSDRIDGMWVSGDRLLMRQPTLRLGVLIYWIALHALLASFI

SEQ ID NO: 222967 - protein, 99 aa, Zea Mays
MTVMLIGNKCDLSHRRAVSYEEGEQFAKEHGLVFMEASAKTAQNVEEAFIKTAGTIYKKIQDGIFDVSNESNGIKVGYAVPNSSGGGAGSSSQAGGCCS

SEQ ID NO: 222968 - protein, 184 aa, Zea Mays
MSYAYLFKYIIIGDTGVGKSCLLLQFTDKRFQPVHDLTIGVEFGARMITIENKPIKLQIWDTAGQESFRSITRSYYRGAAGALLVYDITRRETFNHLASWLEDARQHANANMTVMLIGNKCDLSHRRAVSYEEGEQFAKEHGLVFMEASAKTAQNVEEAFIKTAGTIYKKIQDGIFDVSNEMMG

SEQ ID NO: 222969 - protein, 345 aa, Zea Mays
MSWAPCMDLFNLVGCFLEPATLPTQMYMALLYTITTLILTVQTIYYSHIYHRLEAKKSRAASKAQKHQRADASLRERLLGAKDGVLSRNNGSDATVLIPSSPIPVNVKLVDQYHGSSPNTDYYYMSARSLSRSPVPTAGTWLGSNRQSLMTPPQTNDQRGSLIGEIAPAHSAPSTVTKNALSVAPWMGLLLGTCLLHILIGNTHREMPSGTVIPVGRRLLVFVEGHGNSSLSHGNGSEIGRYLGWAMAIIYMGGRLPQILLNMQRGHAEGLNPLMFTFALLGNSTYVGSILVNSLDWSKVGPNLPWLVDAGGCVLLDSFIILQFLYFHYRKQRELSDEHDKADKA

SEQ ID NO: 222970 - protein, 238 aa, Zea Mays
MMRQAGRYMAEYQALAKRHPSFRERSENTDLIVEITLQPWRAFAPDGVILFSDILTPLPAIGVPFDISDSKGPVIQSPVRSKEQVRELVPIDLDMLQFVGESLKILRNEIDGKAALLGFVGAPWTIATYIVEGGMTNTYTNIKSMCHTAPDVLKGLLSHLAQAISDYIIYQVNSGAQCIQIFDSWGGQLPPHVWEQWSKPYIKQVTLPYFSCFHVLPTSWCCYVSALSYGITLMTSTE

SEQ ID NO: 222971 - protein, 278 aa, Zea Mays
MMLPTATATAVFLTAAPSSFSTRRRRSRAIFASLSPSFSSSEEPLLVRAARGEDGLPRPPAWMMRQAGRYMAEYQALAKRHPSFRERSENTDLIVEITLQPWRAFAPDGVILFSDILTPLPAIGVPFDISDSKGPVIQSPVRSKEQVRELVPIDLDMLQFVGESLKILRNEIDGKAALLGFVGAPWTIATYIVEGGMTNTYTNIKSMCHTAPDVLKGLLSHLAQAISDYIIYQVNSGAQCIQIFDSWGGQLPPHVWEQWSKPYIKQGCESSWSKRSYT

SEQ ID NO: 222972 - protein, 163 aa, Zea Mays
MHIKAAVDARKESGSDIVIVARTDSRQAISHDEALWRVKAFADAGADVLFIDALASVEEMKAFCAVAPEVPKMANMLEGGGKTPILSPAELEEIGFRLVVYPLSLVGVSMRAMQDALVAIKDGGVPPPSVLPSFQEIKDTLGFNRYYKEEKQYQVEVLTMQGG

SEQ ID NO: 222973 - protein, 82 aa, Zea Mays
MTNTYTNIKSMCHTAPDVLKGLLSHLAQAISDYIIYQVNSGAQCIQIFDSWGGQLPPHVWEQWSKPYIKQGCESSWSKRSYT

SEQ ID NO: 222974 - protein, 95 aa, Zea Mays
MGWTASTSCVGAVVKTIYQTGVDVIGLDWTVDMTDGRRRLGNGISVQGNVDPAFLFSPLPVLTDEIHRYGALGKTLIEASNTCTRFSKTRYSKMM

SEQ ID NO: 222975 - protein, 427 aa, Zea Mays
MAHRGHLDGLTAQAPALMRHGSFAAGSLSSHSPLESSSTLEMLENKLAMQTAEVEKLIMENQRLASSHVVLRQDIVDTEKEMQIIRTHLGEVQTETDLHIRDLLERIRLMEADIHSGDAVKKELHQVHMEAKRLITERQMLTLETEDVNKELQKLSASGDSKSLPELLAELDGLRKEHLNLRSQFEFEKNTNIKQVEQMRTMEMNLMTMTKQAEKLRGDVANAERRAQAAVAKATGHAAGAQVTASQPGTAQATAVPAAATDPYAGAYASYPPAYQQGAQAGAYQQGAQAGAYQQGAQAGAYQQGAQAGAYQQGAQAGTYQQGNQAGAYPYAYDAATAYTYAGYSGYPVAGYAQSAVPNYSYAAPPQPISSGAATDAASLYGAVGSAGYPTAQVQPSSGPANAAPPPPPPPAAPYPSTYDQTRGAQR

SEQ ID NO: 222976 - protein, 598 aa, Zea Mays
MKVDHRILKAIAVEHRKDVDSAVVTVLDEVMPSMTGSAGTLFTHKEVLPSMDDSVGNLFANRSTHEVGSSSCAGHEIHIDEIDVSVHPAQHTSSGEAKTGKQENINNECVGRLASVEGVSEQLNLHSDPIPNGSQHDLIPNLDVLSSNTNPEKMLANIYNEVGYSGLSSECFSQQLTGKHGGDIIAPQSHDQDPNKMLPVGDYFSQNSSMEFFSGYEDMHFDGDLLPPGSNDKVSSGILGTEKDSSVPVLDVPGRNKEESPAGTSGFIEQKDTSNVTNMLPDLNLYHLASTASTHSSHSVSIESLEDSVADARSNKNDLLPSLELVTKMIEDVELLEEKAKVAKRESSVAGTGILTKVEELREMLTHAKEANDMHAGEVFGEKAILTTEARELQSRLQRLSDERNKYLVIIEEIRQTLDQRLVAAQQEIAAAEKEKLEKEVAAQTLLNEQENMMNSIVEESRKLQKEAEENLKLKEFLVERSQIVDMLQGEMTGICEDVSLLKRVVDERLSLSKLQPSAMSSLSSSLHSSHHKSWTSSDRTTEANGSLDKHTLAEPASPARKDLNGDECTVQVSDGNDTGKGVLKRVDSKDGDGWELC

SEQ ID NO: 222977 - protein, 103 aa, Zea Mays
MLREEGLASFYGGLGPSLVAIAPYIAVNFCVFDLMKKSVPEKYKNRPETSLATALLSATFATLMCYPLDTVRRQMQMKGTPYNTVFDAIPVVDYAFQRATQRQ

SEQ ID NO: 222978 - protein, 122 aa, Zea Mays
MCTHERKASIREFYAVIFPSLMQLHERINEVEDRKQKAICLERYRRRDEDPKTVVSEIDDNIEEECGICMEINVKVVLPTCSHAMCIKCYREWYESALPFLKVLIILAIMLFRQLCTPACSR

SEQ ID NO: 222979 - protein, 103 aa, Zea Mays
MSRFGRSGPPPPIRDTYSLLVLNITFRTTADDLFPLFDKYGEIVDIYIPRDRRTGDSRGFAFVRYKYEDEAQKAVERLDGRLVDGREIMVQFAKYGPNAERIF

SEQ ID NO: 222980 - protein, 130 aa, Zea Mays
MSRFGRSGPPPPIRDTYSLLVLNITFRTTADDLFPLFDKYGEIVDIYIPRDRRTGDSRGFAFVRYKYEDEAQKAVERLDGRLVDGREIMVQFAKYGPNAERINKGRIVEPVPRPGGRSRSHSPRRRGCGQ

SEQ ID NO: 222981 - protein, 279 aa, Zea Mays
MPKKGTKSKKEKVDDVPNEQENKLPDYLELQRTRVVCNADAPIHTQGFQYSGAFAAMGIDNSVSVDKFCKNFKIEINRLTEDYMEFDMIGIDASIANAFRRILISEVPTMAIEKVFMADNNSVIADEVLSHRLGLIPLDADPRLFEYISENDVPNERNTIVYKLHVSCPKNSQRITVKSSELEWLPEGSQLSMSAPAQSGDKQKTFTSFSQSQKEILEKPLGVKYKDITIARLGPGQAIELEAHAVKGTGNVHAKWSPVATAWYRMLPEKLKALRQRSW

SEQ ID NO: 222982 - protein, 278 aa, Zea Mays
MPKKGTKSKKEKVDDVPNEQENKLPDYLELQRTRVVCNADAPIHTQGFQYSGAFAAMGIDNSVSVDKFCKNFKIEINRLTEDYMEFDMIGIDASIANAFRRILISEVPTMAIEKVFMADNNSVIADEVLSHRLGLIPLDADPRLFEYISENDVPNERNTIVYKLHVSCPKNSQRITVKSSELEWLPEGSQLSMSAPAQSGDKQKTFTSFSQSQKEILEKPLGVKYKDITIARLGPGQAIELEAHAVKGTGNVHAKWSPVATAWLLFLKKLKALRQRSW

SEQ ID NO: 222983 - protein, 500 aa, Zea Mays
MPKNAHAHFMLGLMYQRLGQAQKAIASYEKSTEILLQDEEEVRRPDLLSSVRIHHAQCILQASMGDSFDEELETGELDDILSKLKSSVELDHRQAAVWNILGLVLLRGGQIQSAISVLSSLTAVAPDYLDSLANLGVAYIQSGKLELSAKCFQELLLKDQNHPAALVNYAVLLLCRYGSLSAGAGGNVSTGPYVHQKEALVVAKECLLAAVKADPRAASVWVNLANAYYMDGEHKNSKRCLEQAAKLEPNHMPARYAIAVHRIRDAVRSQCSDDQLLWAANEMATVLKEGDPSAVDAPIAWAGLAMAHRAQHEIAAIYDTENINLNDAEERAQYTLKQAIQEDPDDAVQWHQLGLYNICMTRFSRSVNFLKAALARSPDCSYAWSNLGIALQLSDDPSSETVYKRALVLSSTQQLHAIFSNLGILYRQHRNYEFARKMLLRSLELCPGFAPASNNLGLVFVAEGRWEDAKSWFEKALQSDPLLDAAKSNLLKVLTLSTKQ

SEQ ID NO: 222984 - protein, 390 aa, Zea Mays
MDKQEPVANGEQTIGLAEKPKELPVASKDEKATVPPILVDSNAFNLPSEGQTQAGTSNMDGGHNGAHNFYASQAQPFYYQGSGSENPTQAWDTYPPYMSVEGLEVGPPVVYNEDPSLMFHGGYGYDPYYSPIATPVPNAVSGGGQLYSPQQFFSAPYYQQSVPPDMQYLSSPTPISQGDTIMPIDPTQGAFIADTLSPNSFLFGPRPEWFRSSEGTGSFPSPAASPQPSRGVPGSYDQNNFPMASRMASNYGGSVTSFGLNGRSLISTEKGRRRGRGNALICSCNGPLDFLNEQSRGPRATKPKKQPEVDSKDEVPTTGVGRELYNKPDFVMEYTNARFFIIKSYSEDNVHKSVKYGVWASTTNGNKKLDSAYREAKEKGEHCPIFLLFS

SEQ ID NO: 222985 - protein, 411 aa, Zea Mays
MFVIEDKGGAIALMLASLLFLGTWPAVLTLLERRGRLPQHTYLDYSITNLLAAVLIALTFGQLGDSRRGMPNFFTQLGQDNWPSVLFAMAGGVVLSVGNLSTQYAWAYVGLSVTEVISSSMVVVIGTTLNYFLDNRINRAEILFPGVACFLVAVILGSAVHSSNAADNEQKLGASTNAYKLGTSGNVEPSKQAVDRDAPKDLEESGASGIRQPDKAEAGTAEYLIELEERRSIKVFGSNTFIGLGIVFFAGVCFSLFSPAFNLATNDQWHTLRDGVPHLVVYTAFFYFSISCFVVGVGLNVLFLYRPMAGVPRSSLGAYLRDWDGRQWALLAGLLCGFGNGFQFMGGQAAGYAAADAVQALPLVSTFWGVLLFGEYRKSSRKTYVLLGFMLFMFVAAVAVLMASSGHRSTE

SEQ ID NO: 222986 - protein, 913 aa, Zea Mays
MAPSSPSPAAPTRVSGRKRAAKAEEIHQNKEEEEEEEEVVAASSAKRSRKAASSGKKPKSPPKQAKPGRKKKGDAEMKEPVEDDVCAEEPDEEELAMGEEEAEEQAMREEVVAVAAGSPGKKRVGRRNAAAAAGDHEPEFIGSPVAADEARSNWPKRYGRSTAAKKPDEEEELKARCHYRSAKVDNVVYCLGDDVYVKAGENEADYIGRITEFFEGTDQCHYFTCRWFFRAEDTVINSLVSISVDGHKHDPRRVFLSEEKNDNVLDCIISKVKIVHVDPNMDPKAKAQLIESCDLYYDMSYSVAYSTFANISSENGQSDSDTASGISSDDVDLETSSSMPTRTATLLDLYSGCGGMSTGLCLGAALSGLKLETRWAVDFNSFACQSLKYNHPQTEVRNEKADEFLALLKEWAVLCKKYVQDVDSNLASSEDQADEDSPLDKDEFVVEKLVGICYGGSDRENGIYFKWEGYGPEEDTWEPIDNLSDCPQKIRDFVQEGHKRKILPLPGDVDVICGGPPCQGISGFNRYRNRDEPLKDEKNKQMVTFMDIVAYLKPKYVLMENVVDILKFADGYLGKYALSCLVAMKYQARLGMMVAGCYGLPQFRMRVFLWGALSSMVLPKYPLPTYDVVVRGGAPNAFSQCMVAYDETQKPSLKKALLLGDAISDLPKVQNHQPNDVMEYGGSPKTEFQRYIRLSRKDMLDWSFGEGAGPDEGKLLDHQPLRLNNDDYERVQQIPVKKGANFRDLKGVRVGANNIVEWDPEIERVKLSSGKPLVPDYAMSFIKGKSLKPFGRLWWDETVPTVVTRAEPHNQVIIHPTQARVLTIRENARLQGFPDYYRLFGPIKEKYIQVGNAVAVPVARALGYCLGQAYLGESEGSDPLYQLPPSFTSVGGRTAGQARASPVGTPAGEVVEQ

SEQ ID NO: 222987 - protein, 330 aa, Zea Mays
MLSLQQQHGGAVAAGGDARHHAPQPSVLGGGADWLVFGGRADLEEPARNAPSPALFLLPPAGLDDRAAQPEPNPKPAQLAGAVDEERHLALAHQNYRSGKYREALEHGNVVYEKNPRRTDNLLLLGAIYYQIRNYDMCIAKNEEALAIDPHFAECYGNMANAWKEKGDIDLAIRYYLTAIQLRPNFCDAWSNLASAYTRKGRLNEAAQCCRQALAINPRLVDAHSNLGNLMKAQGFIQEAYSCYIEALRIDPHFAIAWSNLAGLFMEAGDLDKALMYYKEAVKLKPSFADAYLNQGNVYKALGMPQDAIMCYQRALQARPDYAMAYGEHF

SEQ ID NO: 222988 - protein, 308 aa, Zea Mays
MLSLQQQHGGAVAAGGDARHHAPQPSVLGGGADWLVFGGRADLEEPARNAPSPALFLLPPAGLDDRAAQPEPNPKPAQLAGAVDEERHLALAHQNYRSGKYREALEHGNVVYEKNPRRTDNLLLLGAIYYQIRNYDMCIAKNEEALAIDPHFAECYGNMANAWKEKGDIDLAIRYYLTAIQLRPNFCDAWSNLASAYTRKGRLNEAAQCCRQALAINPRLVDAHSNLGNLMKAQGFIQEAYSCYIEALRIDPHFAIAWSNLAGLFMEAGDLDKALMYYKEAVKLKPSFADAYLNQGNVYKGNWILYIF

SEQ ID NO: 222989 - protein, 431 aa, Zea Mays
MALVTTFITTPTVMAIYKPARAAGRRRLHQRKLQGPDPSAPSSPSASAGAGAAMELRVLACIHGGQDVPAVINLIETIRGHTQPRRLVKLYILRMVELTERTSSILMARAARRNGLPFLRPRRAGEPHDQVDVAFDTYAQLGHVHVRAMAAVSALHTMHDDVTAVAEDKRVSLVVLPFHKRHTGGGDDVENLGPEWRAVNRRILREAPCSVAVLVDRGFGGGEQVSSEQVAHGVCVVFFGGPDDREALELAGRMAEHPGVQVTVVRFVDGKAGSEEQSEVTLRPSHTKNADRSYTFSTAVVDAGKEKELDEAAVAEFRQRMGSLVRFEERVVVGNVIEEVVSIGKSREYGLVVVGKGRLPSAMVAQLAVVPAEHPELGPIGDALASSGHGVTSSVLVVQQHDMSNADEVPVSVVVDGRPQDGEFAKDMAEP

SEQ ID NO: 222990 - protein, 301 aa, Zea Mays
MLIPLRAMFANLVDRTSLCSQRELFDLVGPEDPRTPDLPQPPPPKSEKQLIEEWRRAGPRPRPLPPPPARPFYAHEKEGWYGWIGENDTEPDASLIEFRRQAHQLLWDALDYFVSVEADAFFPGFHNDGSGWPDYSSLVMGHRLYQTPSGITYRPDRKIIAALFEDVNDHRYHPPRNWTIAAREHLNRSANVEGVVSSAMLSRPVSFLAHPLPECSCSTSKSPAVEPVKDSNGRFLFGGEEECAGWMARSPAMASARNNEPQIEDYEDNLPEEGSSSDMQESDRSDSNKSSEQDEEMDLDD

SEQ ID NO: 222991 - protein, 245 aa, Zea Mays
MDTTYWRLQEDSGGQVGVRQRVLQEGRQAPPRRDPPEEVVAAAADAAAAAPALPPPPPPSPPPPQPVLPAAAGTAGAVVPPPPLSKKSPSPPPPRRTAVLKPPPPAATMKAAAPAPGGDFLAALSEDNRQLRRRNSLLLSELAHMKKLYNDIIYFLQNHVAPVTSPSSAAHASLPSAGGGGAAASSCRLMELDPADSPSPPRRPEADDGTDTVKLFGVALQGKKKKRAHQEDGDDGNHEQGSSDV

SEQ ID NO: 222992 - protein, 103 aa, Zea Mays
MHKLGRGSRDKVQQFMAITGASEKAALQALKASDWHLEGAFDVFYSQPQIAVANTRHLEELYNRYKEPDADMIMVEGISQICNDLQARTSFILVGYLVFIYVS

SEQ ID NO: 222993 - protein, 1028 aa, Zea Mays
MGSLISLENDSLTEDLLPSRNAFLVRQSRSGRRHGNILLRGSVFRTFSINFFTYGFPVLLLALSFWSFNFTSICAFGLLAYVGYILYAFPSLFQMHRLNWSLLVFILLWAASTYVFNVAFTFFNKRFQKDMMIWETVGLWHYSIPGLFLLAQFCLGVFVALCNLVNNSVFLYLTSEGGPSTSDDHLIDGLSNNATAKDFMEIGSIVCFCAVHSHGFKMLFSLSAVLRHTPCPPVGFTILKAGLNKSVLLSVYSSQNSRDGEDHRNLHEKKIASYLSKIGQKFLLVYRSYGTYVAFLTILLTLYLVTPNYISFGYLFFLLFWIIGRQLVEKTKRRLWFPLKVYATVVFIFTYSLSVSPIFAESVSKFLKLYPDLGFDPEASLLENVWQSLAILVVMQLYSYERRQNSDKNFGVSDASESGLLGFLRRFLIWHSDKILSVCVFYACLSSISLSGLIYLLGLIVFSTLPKVSRIPSKVYLVYTGLLAASEYLFQMVCKPAQMCPHQHFYGLSVFLGLKYYDSGFWGIEYRLRGKVLVIVACTIQYNVFHWLDLMPTSLVHKGKWEEPCQLFISSNPPYSPVRSNEESHSSNRFTSLFSKVQGLIGSSSSSSSSVGPGSIHQKLEYVDNAIEGSDEDKRHSFAKIWGLSKESHKWDKKRVIFLRRERFETQKTTFKCYMKFWIENLFKLRGLEINMIVLLLASFTLLNVVSIFYIMCLVLCILMNRDLIQKLWPLFVFLFASVLILEYVALWNDEITWYHGTNDIEVHCRECWKNSRIFFDYCSKCWLGIIADDPRMLISYYVVFIFSSFKLRSDHFSSFSDSDTYRQMMSQRKNAVVWRDLSLETKSFWTFLDYVRLYAYCHLLDIVLALIAITGTLEYDVLHLGYLGFALVFFRMRLEILKKKNRIFKFLRMYNFGLIVLSLAYQSPYVGQFSSGKCDQIDYLYEIIGLYKYDYGFKITSRSAFVEIVIFLLVSVQSYIFSSSEFDYVSRYLEAEQIGAMVREQEKKALKKTEQLHHLRRSEEHKRQRNM

SEQ ID NO: 222994 - protein, 1017 aa, Zea Mays
MMIWETVGLWHYSIPGLFLLAQFCLGVFVALCNLVNNSVFLYLTSEGGPSTSDDHLIDEKEDTMVLIVATIAWGLRKLSRAITLTLLFLLVMKRGFIHAVYMCFFLVFLVNHSIDKRLRQILVLFCEVHFSILYILQLDLVSSALERSGSLTMEVLSQLGLSNNATAKDFMEIGSIVCFCAVHSHGFKMLFSLSAVLRHTPCPPVGFTILKAGLNKSVLLSVYSSQNSRDGEDHRNLHEKKIASYLSKIGQKFLLVYRSYGTYVAFLTILLTLYLVTPNYISFGYLFFLLFWIIGRQLVEKTKRRLWFPLKVYATVVFIFTYSLSVSPIFAESVSKFLKLYPDLGFDPEASLLENVWQSLAILVVMQLYSYERRQNSDKNFGVSDASESGLLGFLRRFLIWHSDKILSVCVFYACLSSISLSGLIYLLGLIVFSTLPKVSRIPSKVYLVYTGLLAASEYLFQMVCKPAQMCPHQHFYGLSVFLGLKYYDSGFWGIEYRLRGKVLVIVACTIQYNVFHWLDLMPTSLVHKGKWEEPCQLFISSNPPYSPVRSNEESHSSNRFTSLFSKVQGLIGSSSSSSSSVGPGSIHQKLEYVDNAIEGSDEDKRHSFAKIWGLSKESHKWDKKRVIFLRRERFETQKTTFKCYMKFWIENLFKLRGLEINMIVLLLASFTLLNVVSIFYIMCLVLCILMNRDLIQKLWPLFVFLFASVLILEYVALWNDEITWYHGTNDIEVHCRECWKNSRIFFDYCSKCWLVRYIRIFIYQLFLHEHDPGIIADDPRMLISYYVVFIFSSFKLRSDHFSSFSDSDTYRQMMSQRKNAVVWRDLSLETKSFWTFLDYVRLYAYCHLLDIVLALIAITGTLEYDVLHLGYLGFALVFFRMRLEILKKKNRIFKFLRMYNFGLIVLSLAYQSPYVGQFSSGKCDQIDYLYEIIGLYKYDYGFKITSRSAFVEIVIFLLVSVQSYIFSSSEFDYVSRYLEAEQIGAMVREQEKKALKKTEQLHHLRRSEEHKRQRNM

SEQ ID NO: 222995 - protein, 150 aa, Zea Mays
METLLSPSTLFTLPLRGSSRRPSLAASVSSRPTVSCSSALKRPQAGAVAASSHGDGVGRNWMSFLHHGLAAAALSLAIGLTPAPAPAVASEFDVLNDGAPVDSYVVDDAGVLSRVTKSDVKRLARDLEARKNIRLNFITVRKLTSVAEQG

SEQ ID NO: 222996 - protein, 610 aa, Zea Mays
MWKLNPFGESLDLVMKEIQVMNLLKGHPNVVTLVAHDVFDMGRTKEALLVMEFCEKSLVSAMESRGSGYYEEKKVLLIFRDVCNAVFAMHGQSPPIAHRDLKAENVLLGCDGVWKICDFGSTSTNHKCFNKPEEMGIEEDVIRKHTTPAYRPPEMWDLYRREVISEKVDIWALGCLLYRICYFKSAFDGESKLQILNGNYRIPEQPKYSTAVTGLIKDMLEASPNSRPDITQVWFRVNELLPLELQKSLPDGPSPAVSLSLQDEGAHKRAHVMPRRNPPPPPREQSNSSLSHGSSKAGDAPLGAFWATQHAQGAQAADNRNPLFDEEPSKVSLSSKQNQSRVDTSISIPGDRHGHSGQTSRISKTPNNSLSNDGFRGVSDTEIHNSVKTKVQQPQPKPKCDKDPFNIFVADFDTHNLNIAVGKASELELEVSSLKEQLKKTTLEKAEMTAKYEKLSAICRSQRQEIQELKRTLAEATPPSNKVSSRTQDSGSQRKEKIQGTLWELEQGMLASNTSSASSDVKTWQAFPDTQTQARPKVDHGTNGSQNITKNTTSGASPDAWGFGTDSFRTSSAPVKAATQINRAAQGSSSQRFNSGVAKKVEQPSGWAGF

SEQ ID NO: 222997 - protein, 301 aa, Zea Mays
MWRRAATAALSLGAGAGAVSIATSEDPAATFKVCAHLPPRLLRDSVTAATIAFDYKWSLWGLEPGTPVWQSAKHHAHLRSANRLQELCFRNGGIYIKLGQHIAQLEYVVPEEYVQTMRESMLKRCPVSSYEQVRGVFTKDLGESPETVFAEFDPAPFASASLAQVHVARTHDGQKVAVKVQHDHLTNTGVVDIATVDLLVNALHYIFPTFDYRWLVDEVRESAPKELDFLNEAKNSERCLNNFRKLSPQIAGSIYAPKVYWNLSTSRILTMEFMDAKEDGKGHSWFFLTTASTKSLIIILG

SEQ ID NO: 222998 - protein, 369 aa, Zea Mays
MLPERTMGKKLLLRLHNIVVQHDHLTNTGVVDIATVDLLVNALHYIFPTFDYRWLVDEVRESAPKELDFLNEAKNSERCLNNFRKLSPQIAGSIYAPKVYWNLSTSRILTMEFMDAKEVTDVSGIKSIGVHPVDVSNLVSKAFAEMIFKHGFVHCDPHAANMMVRPMPQDSRKLFGWKRPQLVLLDHGLYKELDYNTRISYASLWKALVFADAKAIKENSAKLGAGEDLHALFAGVLTMRPWKRVIDPSPDHLVLGKNTDYSELQNYASLYFTEISELLRRLPRVILLMLKTNDCLRAVSHALVGGSSLESFMIIGRVSSEAVLDAKRMNRRSFLDGLKIWLEEALLEARFFTLKLMLCVMQLRKLLPG

SEQ ID NO: 222999 - protein, 983 aa, Zea Mays
MTMEHGEDCCVKVAVHARPLIGDEKLQGCKDCVAVVPGKPQTGSGKTYTMGTACKEGSHIGIIPRAMAALFDKIENLKTQVEFQLRVSFIEILKEEVRDLLDPTAGTVGKAENGNGHAKLSVPGKPPVQIREASNGVITLAGSTEVHVTTQKEMAACLEQGSLSRATGSTNMNNQSSRSHAIFTITLEQMRKIDPIMTADGMPIEEMNEDYLCAKLHLVDLAGSERAKRTGSDGLRFKEGVHINRGLLALGNVISALGDEKKRKEGAHVPYRDSKLTRLLQDSLGGNSKTVMIACISPADINAEETLNTLKYANRARNIQNKPIVNRNPIADEMKRMRQQIEYLQAELVSARGGATSDDVQGLRERISWLEQTNEDLCRELYDSRNRSQNDPCEPEIQRTLNGFTKSEGLKRSLQSTDPFDVPMADSVRGNPKDIEDEVAKEWEHTMLQDSMGKELNELNRQLERKESEMKMYGCDTVALKQHFGKKLMELEEEKKAVQQERDRLLAEVESLSADGQTHKLRDAQLQKLKSLEAQILDLKKKHENQIQILKEKQKSDEAAKKLQEEIHFIKAQKVQLQHKIKQEAEQFRQWKATREKELLQLRKEGRRNEYERHKLQALNQRQKLVLQRKTEEAAMATKRLKEILEARKSSARDSSAGSNGTSQGYNMGERSLQKWFDQELEVMVHVHEVRNEYEKQSQLRAALGEELAILKQEDIRAGGSSPQRGKNGNSRTNTLSPNARQARIASLESMVTISSNTLVAMASQLSEAEERERAFSGRSRWNQLRSMGEAKSLLQYVFNVAADARCQVKEKEVEIKEMKEQMTELVGILRHSESRRREMEKQLKQREQTTPMATTPPKSGNGTTKHSADDPNTPLSPVAVPAQKQLKYSAGIVNSPSKGVAAIKKEQLKMVPIAQLSAGKRVSIAGHSGKLWRWKRSHHQWLMQFKWKWQKPWKLSEVIRHSDETITRIRPRPPLLPHKPHN

SEQ ID NO: 223000 - protein, 606 aa, Zea Mays
MLPSSGSGWGRGRGRHLLLSRALALAALLALASASESDHKYKTEEPVKLWVNKVGPYNNPQETYNYYSLPFCQPSENPTHKWGGLGEVLGGNELIDSQLEIKFLKNVEKGFICTLELDAKKVQQFADAIESSYWFEFFIDDLPLWGFVGESDKNSENKHYLYTHKNILVKYNDNRIIHVNLTQESPKLLEDGKKLEMTYSVKWVATDVSFARRFEVYLDYPFFEHQIHWFSIFNSFMMVIFLTGLVSMILMRTLRNDYAKYAREDDDLESLERDVNEESGWKLVHGDVFRPPRSLMFLSALVGIGTQLAALILLVIVLAIVGMLYIGRGAIITTFIVCYALTSFISGYVSGGLYSRSGGKNWIKAMVLTASLFPFLCFSIGFALNTIAIFYRSLAAIPFGTMVVMFVLWAFISFPLVLLGTVVGRNWSGAPNNPCRVKTIPRPIPEKKWYLTPSVISLMGGLLPFGSIFIEMYFVFTSFWNYKVYYVYGFMLLVFVILLIVTICVTIVGTYFLLNAENYHWQWTSFSSAASTALYVYLYSIYYYHVKTKMSGFFQTSFYFGYTLMFCLGLGILCGAIGYLGSTLFVRRIYRNIKCFVEVSGTIGML

SEQ ID NO: 223001 - protein, 165 aa, Zea Mays
MALALEQHRQGNRVRGRMWSSSQTSTRGVVEMGRVEARRGGGGDEDASGHHAAATDARSGGAATRGGHRKCQEHECEWCMSAREVATMKIALESARIQTTINDMILNLFDKRNDIIRALNMYKREIEQEPMMIFQHHMIIALESLPCHIEVSENGHKHWRSQKLP

SEQ ID NO: 223002 - protein, 226 aa, Zea Mays
MRRRPGIAGLQNAAATRDQFRLVGENVAKVRTDVMKEQLATFRSQLEEFARKHKSDIRKNPVFRQQFHEMCAKVGVDPLASNKGVWAELLGIGDFYYELGVQIVDICIATRSHNGGLIDLLDLRKLLGQKRKATLESLSEDDCLRAISKLKVLGSGFEVISVGRRKLVRSVPTELNKDHSGILGLAQADGYVTVEQVEKEFSWSTGRAIDALETLLKIHNCIHACL

SEQ ID NO: 223003 - protein, 369 aa, Zea Mays
MLPAIEVLSTLPHQRGQLRPPINLLVMCPTRELANQVAVEARKLLRYHRTLGVQVVIGGTRLTQEQRSMQANPCQILVATPGRLKDHLENTPGFSTRLKGVKVLVLDEADRLLDMGFRRDIEKIIASIPRERQTLLFSATVPEEVRQISHVAMKKDYRFINTVKEGDEETHAQVSQMYMVAPLDLHFSILYDVLKKHVAEDADYKVIIFCTTAMVTKLVAEVLSQLKLNIREIHSRKSQSARTKVSDEFRKSKGLILVSSDVSARGVDYPDVTLVIQVGVPADREQYIHRLGRTGRKGKEGQGLLLLAPWEKYFLGAVKDLSIAESAVPPVDSSVETEKCGQKSRDEEQRMCLSSMVRVLQLEQDHWSR

SEQ ID NO: 223004 - protein, 672 aa, Zea Mays
MDQLRPEPAAGAHEIEKTAAPDVESEPAAAVPEPERVPPWREQVTARGMVAALLIGFVYTVIVMKLSLTTGLTPTMNVSAALLAFLALRGWTRALGRLGIACRPFTRQENTVVQTCVVACYTIGFGGGFGSFLLGLDKKTYELSGVSTPGNVPGSYREPAIGWMTGFLLAVSFVGLLTLLPLRKVLVIDYKLTYPSGTATAVLINGFHTPQGDKNAKIQVRGFLKYFGISFLWSFFQWFYTAGDHCGFAQFPTFGLQAFNQTFSFDFSLTYVGAGMICSHLVNLSLLFGAVVSWGVMWPLIGKQKGNWYPADASQNSMTGIYGYKAFLCIALLVGDGLYNFVKVIAITVKNIRERSRRKNLNRVADADTMALDDMQRDEVFNRDNIPTWLSYAGYAALSLIAVIAIPIMFREVRWYYVVVAYALAPALGFCNAYGTGLTDMNMGYNYGKVALFVLAAWAGKDSGVVAGLVGCGLVKQLVLVSADLMHDFKTGHLTLTSPRSMLGVRRGRAGRVLEGPLRAHLPQHGHPRRGGLLGAAQALPAAVRGVLRVRGAGEPGAGPAAAPARAARAAAHGHGRAVPRGRQLRRRHVRGEPRGVRVAQARRQEGRAAGAGRRLGAHLRRRDLDVPVVSARAGQGQAAHLHEVHARELEGALTMRTEQRASFVVCGVESV

SEQ ID NO: 223005 - protein, 832 aa, Zea Mays
MWTNVPMSILILAFLRYLSFKVEFRWREHPVRKQTHLSQASKRQLSANDHRLSTVPPVSRWRRKVGSPSVEAAFESFIEKILRDFVLDLWYSDITPDREAPELIRGLVLHALGELSGRVKEMNLVDMLTRDMVDLIGNHLDIFRKNEILIGVDVMRTLSSEEIDERLKQHLIVSQELHPALLSSEHEYKVLQEIVGGIMALVLRPQDAQSPLVRCFSRELMTCLILQPVMNFASPVYINELVVYLLNAKDTGSAGGTNMANTGTVTLVPYKGGSQGCQMESRNLTVETSGLVPPNNSGMRSLVTSECGKSKVSEDDNDGTIQPRQPDWAAVLDAATKRRSEVLAPENLENMWAIGRNYQKKMVKLDHSSRQKGSEGSDNSTSAGAVGKELSSNFNDRIASVDDKYMVNLMQSKNRNAQSTFVTGSHPLALQNMNEVKPKEGSQVNFTSKEKPHETSNRVKAQLKRCNSTPDIEKRYLAKSNQPMVSSERLNVRINQDERGVGPASHVEVLMHVPKIRCRVVGAYFEKQGSKSFAVYSIVVTDADNKSWFVKRRYRNFERLHRQLKEIPNYSLHLPPKSFLSSSVDDYLVHQRCILLDKYLQDLLSIANIAEQHEVLDFLSASSKTYSAGKSSSVMKTLAVNVDDAMDDIVRQFKGVSDGLKRAVGTSPSSATAQFADNRMSLSWNQEEKDNHNLHQRNLERAHSLSDGDSNYEDHISSVNSGCHSDNEVNNRGHTSNDVEHIETCSSLDKQASDQIGKPAKEYSDSSNMSSLNAFEDPTGIPPEWMPTNVSVPLLNLVDKVFQLKRRGWIRFFGYQNKFCSWSWKMQLMNGS

SEQ ID NO: 223006 - protein, 262 aa, Zea Mays
MMRSLKKSSCRYDLILVIGAVVAGYIFSGFQHGFGFSGSEKVEAPENEQHESSTIGKPPLVVESLKEEPGAGWPSLGTLIADLLKLAIEGVGKLLLSVVPQRMQHGKRKTDLTPLRDRLVMPEDREETAAAAQKLSSTPMRPETAHAPNPVTETAAPKAPKSTKPSKLRDSSTLSSKHRSSKRQEYADFYGTSEPAPVGAAAKVPKDRLRHRHHHREKSGEVAYGAAHHDLKPAEAKPADYSDPSYDPYVRSKYAAESGYRY

SEQ ID NO: 223007 - protein, 564 aa, Zea Mays
MPPGADASSLAAAVLDAGTPPAAAAATSRVLDYLSRHADDQPRAFFADAFPSLLYRLFVSAPSSPSFIDLAAADPALGDLILSLIYPTGPLLAAAAAADRLTLIRYVFPSERLPDWLRLALASPPSTDLASPLLSRRVASELHLSVFEYYLFWFAYYPVSSASSAAPAASASNPRLTSRARLETWVSTLATTAIRKSGQKPENSLYLRLLYAYLREFVPTRTPPVNMSGGGTLLHRAPSHGVDAIDSFARAEFFLHTLVHFWLVGDDFSPLPKQTCHALGLRLPSRAHADLSERPPSPGLGDAVKLLVMYLNCCDGRALADACVPSPQGLSVSNGLCDTQVGFWNPLIQRPLYRFVLRTFLFCPIGTAIKNASQVFSVWLAYMEPWKVTQQELDRYGKQQGGDEKEPQTTKMVYNSSWRTYVLSNYLFYNSMVVHFLGFAHKFIHSDVASVLLMVHKVLEVLSSSPELLGLLHKVDAACHSRLVASSPASDHVLKTGRMVCQKVMQMGHCCMSIGTLILGFSVTMRMGLIIFFSYFWSEQSQRYCAFQVRRNKHSRRWILSSHR

SEQ ID NO: 223008 - protein, 191 aa, Zea Mays
MALAAPSSLRLLPTTPSQAPSPPCASRPRHLRELRLCQRLATAAAAAAAAAAAATAPLASSPTTSADTERRKHELLRAVQETRRGFAAGPDQRAAIEEAVVAVEERGAGKGTPIDLAALDGTWRLCYTSASDVLVLFEAAERLPLLQVGQIYQKFECKDRSDGGTVRNVVRWSIENLLEHNCWYLNAWTLE

SEQ ID NO: 223009 - protein, 243 aa, Zea Mays
MKAFHVRASARVDKFSKSDIIVSPSILSANFAKLGDQVKAVEVAGCDWIHVDVMDGRFVPNITIGPLVVDALRPVTDLPLDVHLMIVEPEQRVPDFIKAGADIVSVHCEQTSTIHLHRTVNQIKSLGAKAGVVLNPATPLTAIDYVLDVVDLVLIMSVNPGFGGQSFIESQVKKIAELRRLCAEKGVNPWIEVDGGVGPKNAYKVIEAGANAIVAGSAVFGAPDYAEAIKGIKTSQRPLAVAA

SEQ ID NO: 223010 - protein, 88 aa, Zea Mays
MSVNPGFGGQSFIESQVKKIAELRRLCAEKGVNPWIEVDGGVGPKNAYKVIEAGANAIVAGSAVFGAPDYAEAIKGIKTSQRPLAVAA

SEQ ID NO: 223011 - protein, 979 aa, Zea Mays
MEIPQSPPEKHRGNPHTDLTPNHSPSATAMTAGAGEPRRIVLLLDLDTFLPTSSSSTPAAASYLAEVLPAATSLLAACRSPASLSAGRLFFSSLSPILSSSLLPRPLPAAPTPLSFDLHPATLASLAPLRCLALRATPAHPRAPASSSVAKSLLQLEHDYSWDHDPPRRRRCRGFDPPPNLVALFTPVTEFDLFGDDASFVEKFRKVFGPVRDRLSAIGLQVCWVVVPSASVSASAAASEGIRRAVTELGWWFTTADAVALGSAVAPPALVWGGVGLGGGEGGRRGEVVLEIADVEGKPLVCKGCEVEVVGSSRLQQASGNAVSRIHVRSVCEAGNWERLMDGDVAVVRGFQREGSKADGEEAVDKEYFPHRILELVLGDEKDRLGVAKPIWQLILVFLSRRNYCAVVSVSDGDGNSVDGVLMPFSMNCALLHLEKNVMSAKASETPSCGASDETKVQSDKKRRSRLVGKLLEVTTWSTFCDMLRKRADGSMPVVDLEDLYFSRYGTTSKKLRFLKCWMKQVKQSRLSTLSSIHTEGEQRLPSKDDSEARVLVSEEDASASLVNFSLDEADCQKVDALVDVAGCSEVGIPVDEADCSKVDISVGEESSMFSSMEELEAFLGAVPHKIEQSLCSEDADLGSLAERLVDLSVHAMLVKHGKIAVRYFEHNEAEDGSSAKIACELSNILLRKPKELVSKYRESNSASAASEQTAKHSTCYKIREHELQILLRMEMIKSELGSAIEEGSKQKMIKDICSLLQFIDINLQGDSFQSDGILEYAEKTIKSRYINSMEDVIKKIYREMEFDLFDDDDGVDYSDSLPSSSNQDDGRCRSQRGSDSASASALHLLQRDARSSRQREDDDRHDKLTARARERRDRQRRLSSFTSWVPDLRRVWALKHPGKEPCAWVPRSRSRSCAKRRRAACTDVVLETPVTSGKRHMSGSESDDARQVAARRSAALGAVSKTLFDDEVVETDVSSSST

SEQ ID NO: 223012 - protein, 338 aa, Zea Mays
MWESVALTLAGTAGNNIGKVLQKKGTLILPPLSLKLKVVKAYASNQLWISGFLMDMCGAALMLTALSQAPPIAGCGLAILCVFSHFYLKEVMNGLDWIAITLAGLGTIGVGVGGEEQKVDQIPLLNIPWLVLSIVILFVLLNTWLHMYKKQRREQELTGPEVIEEIIYGLESGILFGISSVISKMGFVMSEMGFPKIVVPAAISCSVCCSAVGFVYQTRGLKHGRAIVVSTCTSVASIVSGVVAGMIALDEHLPKAPTARFFLLLGWFFIITGVILLVSSTRLIARLPRPVQKFLKSNIERTHSIRRPGSARGKDPIPTTTIHTSSLHLLASPTKEKA

SEQ ID NO: 223013 - protein, 554 aa, Zea Mays
MWDEIGEAEEDRRGMLQALEEECLNVYRAKLEKVRQHRAQLKREIADSVAEVAAICATIGEPPSTVHTACSSLQGTGSLKEELGLIAPELAEMRRRRDERRRQFADVAQRVNKIQQEMDLQLGGGGGQGQPHAHVAVDGSDLTTTKLDELRAYLRRLQQEKESRTKKVAELMATLHSSSLVLGMDPRETNSVVHGGVQTQASGISDSAISGLAGGIERLREIKRSRMEKLQDLLGSMLELWNLMDTPAEEQRRFQGVACNIAASEDEITEPGALSMAFIRNVEAEVMRLENLKECRMRELVVKKHEELKEIRRRARLPEDDTTVMVFDAMDSDAERAMILERLELQISKAKDLEFSRKDVLEKMDRWQAALEEESWLEEYSRNENRYNTGKGTHLVLKRAEKARSLVCKMPAMAEALVAKVVAWEKERGARFEYDGEVLLDLLEDYGNARKEKEQERKRQRDQRRLVQGAAAADRDVSSPVARPPPKAIKNVTRSLSIGRNAAAAAAAGGGGSPRKAAPASSRPGTPSFLKSPLSARRGGGDEGAQMLSPDSFE

SEQ ID NO: 223014 - protein, 363 aa, Zea Mays
MNPEDEAEEDGANIDLDSQRKGKCVVLKTSTRQTIFLPVIGLVDPDKLKPGDLVGVNKDSYLILDTLPSEYDSRVKAMEVDEKPTEDYNDIGGLEKQIQELVEAIVLPMTHKDRFQKLGIRPPKGVLLYGPPGTGKTLMARACAAQTNATFLKLAGPQLVQMFIGDGAKLVRDAFQLAKEKAPCIIFIDEIDAIGTKRFDSEVSGDREVQRTMLELLNQLDGFSSDERIKVIAATNRADILDPALMRSGRLDRKIEFPHPSEEARARILQIHSRKMNVNPDVNFEELARSTDDFNGAQLKAVCVEAGMLALRRDATEVTHEDFNEGIIQVQAKKKSSLNYYAGERPVLGDHSVVCDTAIVWAG

SEQ ID NO: 223015 - protein, 358 aa, Zea Mays
MALDAPVERRDEVQIAMGNGNGVAPSQPSRPAGRPTAAAAAAPYADRRLRLNPNADHKPEDYSDVRGEYAPAVYSALERHLPPSLIDADRDVKLHFMRDILARYWPQGERNKVQRHREYRQRILHLYKPLHEELYNMHPSVFFLPTFLEAVRSNTEECFRSIMTEPIPGVYSFAMLQPTFCEMLLEEVENFEKWVHAMKFKIMRPNTMNKYGAVLDDFGLEAMLNQFMEQFIAPISKVLYPEVGGGTLDSHHAFIVEYGKDRDVELGFHVDDSEVTLNVCLGKQFFGGELYFRGIRCENHVNSETQHEEMYDYTHIPGWAVLHHGRHRHGARATSSGLRINLLLWCRSGNMLTLMQAS

SEQ ID NO: 223016 - protein, 313 aa, Zea Mays
MTTTTTAAAAAVNVAAVAQLCAGPRRRKPAAGARVDLRWARLLRLAVVTRVLGVVRDQLLACSSCGGGGGGAARRRYLRLGPPAGANAGPVLSPVDRDDDCAADAEAAAPRDAADDVDNVVSLKVSLLGDCQIGKTSFMVKYVGDDGEDQNGLQMTGLNLMDKMMAVRGAKIAYSIWDVAGDHQSVDHIPIACKDAVAILYMFDLTSRCTLNNIVDWYERARKWNKTAIPILIGTKFDDFAQLPLEMQWTIVNQSIRKSDEGDPLLLERDAQHQREQDLQVHHGQALRPAVDGGAQPHHRRAHHRLLTTSSAS

SEQ ID NO: 223017 - protein, 90 aa, Zea Mays
MHGFYPLRGKHYHEMINPFRVLTDVSYIHVFQVKKLIKEKKNDAGISEYIDINKELQEVLTIGRRLPIHPLPSVVPTVKGDNTIPSVYGP

SEQ ID NO: 223018 - protein, 76 aa, Zea Mays
MHGFYPLRGKHYHEMINPFRVLTDVSYIHVFQVKKLIKEKKNDAGISEYIDINKELQEDATYGLWFCGFCSSICIR

SEQ ID NO: 223019 - protein, 635 aa, Zea Mays
MRKRRRPPHLGFCLSLDKPTSPAADRRRSTDRPDERPTSPQNRRLRHTFLSPLRCRRKASQPAPPSPSPRFLWASEPRRQERSSISYPVPRTSARISVPSIGHIMSSEDKAMANRVTSHSPKAMVSEPDPNRMMMFRSNMEYSQTNGQTNAVLGPVAIFWDIENCPVPCDVRPEDVAGNVRMALRMHPVVRGAVTMLSAYGDFNAFPRRLREGCQRTGVKLVDVPNGRKDAADKAILVDMFLFALDNHPPSSIMLISGDVDFAPALHILGQRGYTIVIAIPSSVTVSSALSSAGSFVWDWPSLARGEGVVIPRSLVRRLADYPCYVNSGNMGQFPDNQNEEEAIVYTGTSRNEYGGRPPVNQMYCYNTSQTTREPSKALYTVEDVNCGTSSRPHNLSCRQSESPETDQGLTDEQSWWVRPGDLQGLKGQLIRLFELSGGCVPLVRIPSEYLKLFGRHLYVSEYGAVKLVHLFEKLADSFVVVGKGHKKMICLCNSGDRNLKNYPSTPIILTKKNRGNSALEESTIGACQQLGSSSDELSEDEPIINPDINVACVFNEHLDSFRREIQELLVCYSCPVPLGNFESLYEQRYKKIIDYESLGVTGLEELVEKVKDVVDLHEDQTSKSKFLIANYTTG

SEQ ID NO: 223020 - protein, 116 aa, Zea Mays
MDEGCAGAEDIAIYQRHASSLPNGVPAYKVDVMNQCLGDPGGGDCAIAGIHVRCGWFSSVNLVDPLKFRRLRHDDCLLNDGRPLLGGDTISFEYANSFPYELSVRVATCVDPTTAP

SEQ ID NO: 223021 - protein, 465 aa, Zea Mays
MPRYQVGSTKGDSSSRRHSEEWRQPSTDDVRMSKPGSRYFTAFGVDLSPDNMAVAIVYFVQGVLGLARLAVSFYLKDDLHLDPAETAVVSGFSSLPWLIKPLYGFISDSIPLFGYRRRSYLFLSGLLGALSWSLMATVVSSKYSAAFSILLGSLSVAFSDVVVDSMVVERARGESQSTSGSLQSLCWGSSAFGGIVSAYFSGSLVDTYGVRFVFGVTAFLPLMTSAVAVLVNEHGIPSGEHNTFLSGSGFVESSKQHVRQLWASVKQPNILLPTLFIFLWQATPQSDSAMFFFITNKLGFTPEFLGRVKLVTSFASLLGVGLYNYFLKEVALRKIFLVTTIIGSALGMTQLGISDEWFSIGDSLIITVLGQASFMPVLVLAAKLCPPGMEATLFATLMSISNAGSVTGGLVGAGLTRIFGVTRDTFGNLPLLIVVCNLSSLLPLPLLGLLPEGSGDTDNGETKNN

SEQ ID NO: 223022 - protein, 112 aa, Zea Mays
MHARHGTREGHTHPTAGVCLCGDPQARPEMGNVSGRAEDLVDADIDDGNNMRRASSSSAGYVRGGGSSSSPPASPPRPHSPRMFVPQSPVTPLQRATEMPPPVFNQILMNQQ

SEQ ID NO: 223023 - protein, 167 aa, Zea Mays
MSGVFSSTKPFDVTTLMGIFEGGPLECRVMEKVGCMDYSVTAWEPVRADIYQRQVHYKFDKKSVRHGGEAMSTQQKSPLPNKNGWLVEEVMTLEGIPVGECFNLHIRYQLENNVSKQKTCTIQVSIGIVWLKNCKNRKKITHDIATNASSRLKKIFSQFEKEPIPAK

SEQ ID NO: 223024 - protein, 185 aa, Zea Mays
MTETNPYMGFVYTSFQERATFISHGNTARHARRYGDTKLAQICGTIAADEKRHESAYERIVEKLFEVDPDYTVRAFADTMRKKVAMPAHLMYDGQDDGLFARFSAVAQRIGVYTARDYVDILEFLVRRWGVQELTGLSGEGRRAQEFVCELGPRFRRLEERAHDNKAKDPEFAPFSWIHGRQVQL

SEQ ID NO: 223025 - protein, 185 aa, Zea Mays
MLTMLGCVGSIAWLFSVPVYEERKRYGLLMAAALLEGASVGPLIKLAVEFDPSILVTAFVGTAIAFACFSCAAVVAKRREYLYLGGLLSSGLSILLWLQFAASIFGQSTSSFMFEVYFGLLIFLGYMVYDTQEVIERAHHGDMDYIKHALTLFTDFVAVLVRILVIMLKNAADKSEDKRRKRRRW

SEQ ID NO: 223026 - protein, 260 aa, Zea Mays
MPNTLVLFHVINATVAGIKLLNSKFFHINIDNSESITVKDVNITAPADVENTDGVHVGGSSKISILNSTIGTGDDCVSIGPGCNGVLVDSITCGPGQGISVGCLGRYKDEKDVSDITVRNCVLKNTTNGVRIKSYVDAESVLTASHLTFENIRMEEVANPIVIDQYFCPQKVCPGKRSNSSHVSVKDVTFRNITGTSSTPEAISLLCSETQPCSGVSLIDVNVEYAGKNNKTMAVCSNAKGTAKGSIEALACLEIALCVP

SEQ ID NO: 223027 - protein, 208 aa, Zea Mays
MHALFHIPGKSIGISSILLGLVLVGRAAFVFPLSFLSNLTKKSPLEKITFRQQIVIWWAGLMRGAVSIALAYNKFTRSGHTELHGNAIMITSTITVVLFSTMVFGMMTKPLIRLLLPACSNTATSEPSSPKSLHSPLLTSMQGSDIETGSAQIVRPSSLRMLLSKPTHTVHYYWRKFDDALMRPMFGGRGFVPFSPGSPTEQSVHDGR

SEQ ID NO: 223028 - protein, 448 aa, Zea Mays
MFDEGGAKGLLLYNLGVYGSCRVLFDSFEAPDKCILSDMQTEQAETIDLSFAKEQIEEMVTQMRLCNDISPTLRDIVAQFDEENQRPSHRLSPGQMPVMEDQMDDGNEADDNDSMLPDSGTWDFGDCHDHEDTYDQNCNPMDSISTNFQEEFNEYTVEIPQGTIVNDRVDKIASLVLLGMASSKANAWAGPEHWKYRKAKDLEAAPTSSGDSEITNKIKKRTKDKPDIGFTKALDNELPNIFAAPKNPKTLLFPANRAICSNKLPEDCHYRPESLVKLFLLPDVLCLAKRRKSLDAPVDNNDDFIPSEPWEDDNFCNDHIDEGHVCSDVEEPVNLINKPRQVNKIDIQYDKVSKQVDVHALKEVLWNHIHASAETGQEREEPGPPLRLSQVLHDLPSSSPDAVATDISPHLYFICLLHLANEHNLKLCDRPMLDEIDIYMPPTSPLVK

SEQ ID NO: 223029 - protein, 815 aa, Zea Mays
MAAEQTAEQFRGQARLPHFASPRRYDLRLTPDLPACVFTGSVAVSIGVAAPTRFLVLNAAELDVATGGVSFAPQGSDQVLQPLEVTNVPEDEILIIRFNEVLSIGEGTLTIAFKGTLNDKMHGFYRSVYELNGEKKNMAVTQFEPADARRCFPCWDEPAFKAVFKITLEVPSETIALSNMPVIEEKVLGYFAVPYPLPKMDMVAIPDFAAGAMENYGLVTYRETALLFDEMHSAAANKQRVAVVVAHELAHQWFGNLVTMEWWTHLWLNEGFATWVSYLAADQFFPEWNVWTQFLEESTVGFKLDALAGSHPIEVDINHVDEIDEIFDAISYRKGASVIRMLQNYLGAEVFQNSLAAYIKRFAYSNAKTEDLWAALEEGSGEPVRTLMHSWTKQQGYPVINVKLKDGKFQLEQTQFLSSGSTGVGQWVVPITLCCCSYSRQAKFLFHGKQEDFDLSASGFTDCQKKDGFWIKLNVNQTSFYRVSYDEELAARLRYAIETNKLGAADRYGVLDDAYALCMAGKQKLVSLLHLISVYKDETEYTVLAHIITTSLHIAEMMVIAAPEELVHLKKFLIDFLEPFALKLGWDAKSDEGHLNALLRGTLLTALAELGHEATINEAVRRFNVFLEDRETPLLPPDVRKAAYVALMQTVSKSNKTGYESLLRIYRETDLSQEKVRVLGSLASSPDHDVVREVLNFILSPEVRNQDAIFLLRGVSSGAHEVAWQWLKFQENWDYILGAYSGTLLTYFVNITVSPLATDEHGDEAEEFFKSRTKANIARTVRQSIERVRINAQWVKNIKAEADLGNVLKKLAYKH

SEQ ID NO: 223030 - protein, 847 aa, Zea Mays
MAAEQTAEQFRGQARLPHFASPRRYDLRLTPDLPACVFTGSVAVSIGVAAPTRFLVLNAAELDVATGGVSFAPQGSDQVLALASLPPVGVRGCRGVFDLIVCTRFDTYRCIWYLQVLQPLEVTNVPEDEILIIRFNEVLSIGEGTLTIAFKGTLNDKMHGFYRSVYELNGEKKNMAVTQFEPADARRCFPCWDEPAFKAVFKITLEVPSETIALSNMPVIEEKVLGYFAVPYPLPKMDMVAIPDFAAGAMENYGLVTYRETALLFDEMHSAAANKQRVAVVVAHELAHQWFGNLVTMEWWTHLWLNEGFATWVSYLAADQFFPEWNVWTQFLEESTVGFKLDALAGSHPIEVDINHVDEIDEIFDAISYRKGASVIRMLQNYLGAEVFQNSLAAYIKRFAYSNAKTEDLWAALEEGSGEPVRTLMHSWTKQQGYPVINVKLKDGKFQLEQTQFLSSGSTGVGQWVVPITLCCCSYSRQAKFLFHGKQEDFDLSASGFTDCQKKDGFWIKLNVNQTSFYRVSYDEELAARLRYAIETNKLGAADRYGVLDDAYALCMAGKQKLVSLLHLISVYKDETEYTVLAHIITTSLHIAEMMVIAAPEELVHLKKFLIDFLEPFALKLGWDAKSDEGHLNALLRGTLLTALAELGHEATINEAVRRFNVFLEDRETPLLPPDVRKAAYVALMQTVSKSNKTGYESLLRIYRETDLSQEKVRSLASSPDHDVVREVLNFILSPEVRNQDAIFLLRGVSSGAHEVAWQWLKENWDYILGAYSGTLLTYFVNITVSPLATDEHGDEAEEFFKSRTKANIARTVRQSIERVRINAQWVKNIKAEADLGNVLKKLAYKH

SEQ ID NO: 223031 - protein, 550 aa, Zea Mays
MDQQRRSSIRLYGSNASSRSGSFDFEHDQDKERADQPSDGDRREVVVKIDAEPHSPVSLHAAGGMSGHSSAVSTPRAGGAVSMLAASASGSSASTSSAGGDAPRSGESFSFKNRTPQSSAGGGESSEDPPSRLIGSFLRKQAAAGGELSIDPDFEVDEMRRPPRAPTSVNASRELRVSFQDPRKRFSPSTSSASSSSYDASHNRNQSTIDLDTAEVLRCTSTSTGSSLLARSKTRSRLMDPPPPSTSSAPASEVDPRKSFVSKGLPPKSGQLRSGLIGKSGLIGKSGPIGKSGAFEDEDDDPFMDEGMTSDFKRDTMDCLLIMEWVSLVVIVGALICSVTIPSLSIKKLSGLHLWKWELLVFVLICGRLVSGWVIRIAVFFVERNFLLRKKVLYFVYGVRRAVRNVLWLGVALVSWHLLFDKAAKRETHTLVLPYVTKVLCCLLVATVIRLIKTLLLKVLASSFHVSTYFDRIQEALFNQYVIETLSGPPLVDESRMMAEVQRLQSAGASIPSELEATAMPGKSGPTAQEWAPHDGHVQAGRRRGQQAAA

SEQ ID NO: 223032 - protein, 411 aa, Zea Mays
MAPEGSQFDAKHYDSKMQELLSTGETEEFFTSYDEVFESFDDMGLQENLLRGIYAYGFEKPSAIQQRGIVPFCKGLDVIQQAQSGTGKTATFCSGILQQLDYGLVECQALVLAPTRELAQQIEKVMRALGDYLGVKVHACVGGTSVREDQRILASGVHVVVGTPGRVFDMLRRQSLRPDNIKMFVLDEADEMLSRGFKDQIYDIFQLLPSKIQVGVFSATMPPEALEITRKFMNKPVRILVKRDELTLEGIKQFYVNVDKEDWKLDTLCDLYETLAITQSVIFVNTRRKVDWLTDKMRSRDHTVSATHGDMDQNTRDIIMREFRSGSSRVLITTDLLARGIDVQQVSLVINYDLPTQPENYLHRIGRSGRFGRKGVAINFVTRDDERMLFDIQKFYNVLIEELPANVADLL

SEQ ID NO: 223033 - protein, 521 aa, Zea Mays
MPRSPCGRCRRTCTASSRADSSDRVEPNQDFHGLVCEGANLLPSKFLEDAFCVRHGKIINIRHLDQVIKSVNGWYQERGLTGLVSYAEILSGGILRLEVSEAEVNNISIRFLDRKTGEPTLGKTQPETILRQLTTRKGQAYNRAQVKRDVETILTMGIMEDVTIIPQPVGDSSKVDLVMNLVERPSGGFSAGGGISSGITNGPLSGLIGSFAYSHRNVFGRNKKLNLSLERGQIDSIFRLNFTDPWIDGDNKRTSRTVMVQNSRTPGTLVHGGDHPDHGPITIGRVTAGLEYSRPFRPKWSGTLGLIFQHAGARDDKGNPAIRDFYNSQLTASGHDYDDTLLAKFESIYTDSGDHSSAMFVFSVEQGLPVLPEWLSFNRVTTRLRQGYEIGPARLLLSASGGHVEGNFPPHEAFAIGGTNSVRGYEEGAVGSGRSYAVGSGEVSCRMFGPLEGVVFGDYGSDLGSGPKVPGDPAGARGKPGSGYGYGVGVRVDSPLGPLRLEYAFNDRQARRFHFGVGYRN

SEQ ID NO: 223034 - protein, 294 aa, Zea Mays
MHLLYEICPFFKFGYMSANGAIAEAVKGEDIIHIIDFQIAQGSQWMTMIQALASRPGRRPYLRITGIDDSNSAHARGGGLDMVGQRLHRMAQSCGLPFEFNAVPAASHEVVFEDLCLRSGEAIVVNFAYQLHHTPDESVGIENHRDRILRMVKSLSPKVVTLVEQEANTNTAPFFLRYMETLDYYTAMFEAIDVACPRDDKKRISTEQHCVARDIVNLIACEGAERIERHEPFGKWRARLVMAGFRPYPLSPVVNRTIKTLLDSYHSHYRLEERDGILYLGWKNRKLVVSSAWC

SEQ ID NO: 223035 - protein, 475 aa, Zea Mays
MMSQDQMDSPVDNDVSSSRRSPRRGVGAPLKKGPWTDAEDAILIDYVKKHGVGNWNAVRKNTELLRCGKSCRLRWANHLRPNLKKEAFTPEEERLIIQLHAKLGNKWSRMAIHLPGRTDNEIKNYWNTRKKRCERASLPIYPAGVRNQSSNEDQQLSGDLNGGENMSNDLLSGNSLCLPDFNNDSFRAKLKALPPQLPAVSISNLLGQSFASKGCSFMDQVDQAGMLKQSGSALPTLSDAIDDVISSVDQFSNDSEKLMQTLGFGYLNEANATSKSIAPFGVALTGSHAPLNGIFSASRLTNGPSKMEPPSVQNSRLKYTVDPAMQPTELVDPYMQSLSATPSVKSECASPRNSGLFEELLHEPHALRSGKSQQPSVRSSSSSAGTPYGTMVSSEFDMGQEYWEEQPGSLLSEYAHFSGNYLAECAPPVSAASTDIFPLPKISPAESPSMGSGEQALEPKHESAASRTSSWKLEA

SEQ ID NO: 223036 - protein, 312 aa, Zea Mays
MSAPSDAAAASAAPAPAPTTAAASSSGGFTFKLHPLVIVNVSDHHTRVKAQAACSADSSSPSSGPGAGQPPRVFGCVIGVQRGRTVEIFNSFELVLDPVSGTLDRAFLEKKQELYKKVFPDFYVLGWYSTGSDVHDTDMQIHKALMDVNESPVYLLLNPTINLSQKDLPVTIYESELHVIDGCPQLIFVRSNYTIETVEAERISVDHVAHLKPSDGGSAATQLAAHLTGIHSAIKMLNSRVRVIHQYLVAMQKGDIPMDNSLLRQVSSLVRRLPATESQKFQDDFLMEYNDTLLMTYLAMFTNCSSARSCVT

SEQ ID NO: 223037 - protein, 64 aa, Zea Mays
MFWRKEDPKDLEQQNLRFQHCRHTRVQHAPTLLQIAQRKARQLANPRSGKKQHRIISQLQGVNH

SEQ ID NO: 223038 - protein, 305 aa, Zea Mays
MLIPKEQLLPEPSPDVNPLDMPLMMQVTEFSCGGFVVGLISVHTIADGLGAGQFINTVAAYARGATSATPKPVWARDVIPDPPKMPAPPPRLDLLDLRYFTADLSPDHIGKVKARYLESTGQRCSAFDVCVARTWQARVRALRLPDPAAPVHVCFFANTRHLLPAAATAGFYGNCFYTVKATRASGEVAAADVVDVVRAIRDAKARLGADFARWAAGGFDRDPYELTFTYDSLFVSDWTRLGFLEADYGWGTPTHVLPFSYHPFMAVAVIGAPPKPKPGARIMTMCVQEQHLPEFQEQMMSQQAA

SEQ ID NO: 223039 - protein, 495 aa, Zea Mays
MDACSLVHCHLPRPLQLPLLAPPTPSRHRPRVASALVCCCCPAAAADHHQERPWEWYDRAIQSHAGSDLARSLGLLADMQASGGRPSGSAYARLIRALSRAGRALEAEALLLEMRRLGPRPEAAHYNALLEGLLAAAHLRLADLLLLQMADDGVARNRRTYTLLLGAYARAGRLEDSWWVLGEMRRWGIRLDTAGYSMLVRLYRDNGMWKKATDLVMEMQEVGVELDVKIYSGLIDTFGKYGQLADARRMFDKMRAEGVRPDISTWNALIQWHCRVGNMKRALRFFTSMQEEGMYPDPKIFVMIISRLGEQGKWDEIKKLFDGMNNRGFKESGAVYAILVDIYGQYGHFRDAQDCIAALRAENTQLLPRVFCVIANAYAQQGLCEQTVNVLQLMEEEGFEPNLVMLNSLINAFGTAGRHLEALAVFQHIKDSGMSPDVVTYTTLMKTFMRAKKFEKVSIEFGIIAVVIGPLSMHVTSGSPPPFCLHMHDAEQTQD

SEQ ID NO: 223040 - protein, 236 aa, Zea Mays
MRRLAGPIRLALAHPGGGGGGVRRGRDQVPRPQRGHQLRHHAVRRGQDHGEQHAAPGRAGPAQEGRRRRRGLGGRRRAGAGRQLHDGHLEDPGGAAGCRAGRRARRRPAAASGLAVERGLLAAPRHRVRRRRCWYRDRGHVERVLVAGPQREQLPGAEPGPGRRQPRHALRQARRGAQAGLPAAAGVLGVAVRGVRQAARRVNRAPAGVRRVDRRMNKHPCHYQGTVLLVCLERAF

SEQ ID NO: 223041 - protein, 602 aa, Zea Mays
MGLEPLDRQFPCLLQAQAKQHRTAAPPLPFLFLRILLPFRRPSLFSLVATKTTDADADALRQVPGSVGSFAGEEHPPGDPVLFWCGFIAEVLLWDFPVAKMIRLPMYAAFSLLATASAAYYAFSSREQFYPAMVYLSTSKICFVLLLNTGLVAMCVAWQLARRLFLGSLREAEVERLNEQSWREVIEILFAVTIFRQDFSVSFLAMVAALLLVKALHWLAQKRVEYIETTPSVPLLSHIRIVSFMVFLLTVDCLFLSNSLRSLIQKREASVAIFFSFEYTILATSTLSTFVKYIFYVSDMLMEGQWERKAVYTFYLELISDLVHLSLYMLFFIAIFLNYGVPLHLIRELYETFRSFRIRIADYIRYRKITSNMNERFPEATSEELDASDATCIICREEMTTAKKLLCGHLFHVHCLRSWLERQHTCPTCRAPIVPADNGRAASSRQHGAQAGVQPGTATPSSEGAPGENMSRRQAKLEAAAAAASLYGRSFVYPPANTLNRSGSPQPTSSAPQSEASSSNHQSQKDQETQLQNSSDGLVPLPFSADGVVGSGTSTRDLENSLQKAQENFIKSQIEMLQIQLQMVQRGAAGLSSSENTEHTED

SEQ ID NO: 223042 - protein, 446 aa, Zea Mays
MFGVRKLWDVKDNQAWVHDRFEEMNLHDDFYEDQRMSRGRGGRGKARGGGRGFSRGGKQRNYHEDSNNTQNRTPKVVRGRGPRRYEAAARNNREVVGSQRKQAARFRESAPNAVAARDSGQVSHAQPEAAPPKRNVMSSSLNSASPPFYPSSASTQDFPVAAQTRDIQAGGSNKIPPSSMKMDDNSKLQSGSMVRGRIAMDYGGRDKLLADGPIRSSQGRAPTASLNSGFTSSSVNPGQSPIARASGGNSNIGISSNNQPQSHGSVMHQKLGQVQNQSATRIPTQQLSHRTSNLSPVAQHLPGKSGESGENGSYPTLNDSKTASAVVKVNSQETGMSSFMYGGTQVIGAAGLSQGDQNFPGTPALLPVMQFGSQHPGGLGVPTVGMALPGYVAQQQMGMGNNEMTWLPLLAGAAGAFGGSYPPYIALDPSFYSRSSGQTSSSVPSR

SEQ ID NO: 223043 - protein, 503 aa, Zea Mays
MLTFEALSETSEFAKKWAPFCKRYNIEPRAPEWYFQQKIDYLKDKVAANFVRERRAMKREYEEFKVRINALVAKAQKVPEEGWTMQDGTPWPGNNVRDHPGMIQVFLGQSGGLDCEGNELPRLVYVSREKRPGYNHHKKAGAMNALVRVSAVLSNAPYLLNLDCDHYINNSKAIKEAMCFMMDPLLGKKVCYVQFPQRFDGIDRHDRYANRNVVFFDINMKGLDGIQGPIYVGTGCVFRRQALYGYDAPKTKKPPSRTCNCWPKWCFCCCCCGNRKHKKKTTKPKTEKKKLLFFKKEENQSPAYALGEIDEAAPGAENEKAGIVNQQKLEKKFGQSSVFATSTLLENGGTLKSASPASLLKEAIHVISCGYEDKTDWGKEIGWIYGSVTEDILTGFKMHCHGWRSIYCIPKRPAFKGSAPLNLSDRLHQVLRWALGSIEIFFSNHCPLWYGYGGGLKFLERFSYINSIVYPWTSIPLLAYCTLPAICLLTGKFITPEVKLNQL

SEQ ID NO: 223044 - protein, 911 aa, Zea Mays
MGGGGKRIHPLPYADPSLPVQPRSMDPSKDLAAYGYGSVAWKERVENWKQRQERMHQTRNDGGGDDGDDADLPLMDESRQPLSRKIPLPSSQINPYRMIIIIRLVVLGFFFHYRVMHPVNDAFALWLISVICEIWFAMSWILDQFPKWFPIERETYLDRLSLRFDKEGQPSQLAPIDFFVSTVDPLKEPPLVTANTVLSILSVDYPVDKVSCYVSDDGAAMLTFEALSETSEFAKKWAPFCKRYNIEPRAPEWYFQQKIDYLKDKVAANFVRERRAMKREYEEFKVRINALVAKAQKVPEEGWTMQDGTPWPGNNVRDHPGMIQVFLGQSGGLDCEGNELPRLVYVSREKRPGYNHHKKAGAMNALVRVSAVLSNAPYLLNLDCDHYINNSKAIKEAMCFMMDPLLGKKVCYVQFPQRFDGIDRHDRYANRNVVFFDINMKGLDGIQGPIYVGTGCVFRRQALYGYDAPKTKKPPSRTCNCWPKWCFCCCCCGNRKHKKKTTKPKTEKKKLLFFKKEENQSPAYALGEIDEAAPGAENEKAGIVNQQKLEKKFGQSSVFATSTLLENGGTLKSASPASLLKEAIHVISCGYEDKTDWGKEIGWIYGSVTEDILTGFKMHCHGWRSIYCIPKRPAFKGSAPLNLSDRLHQVLRWALGSIEIFFSNHCPLWYGYGGGLKFLERFSYINSIVYPWTSIPLLAYCTLPAICLLTGKFITPELNNVASLWFMSLFICIFATSILEMRWSGVGIDDWWRNEQFWVIGGVSSHLFAVFQGLLKVIAGVDTSFTVTSKGGDDDEFSELYTFKWTTLLIPPTTLLLLNFIGVVAGVSNAINNGYESWGPLFGKLFFAFWVIVHLYPFLKGLVGRQNRTPTIVIVWSILLASIFSLLWVRIDPFLAKDDGPLLEECGLDCN

SEQ ID NO: 223045 - protein, 164 aa, Zea Mays
MAKETGTNEIVALKKIRMDNEREGFLITAIREIKILKKLHHQNVIKLKEIVTSPGPERDEQGRSIDDNKYKGSIYMVFEYMDHDLTGLADRPGMRFIVPQIKCYMKQLLTGLHYCHVNQVLHRDIKGSNLLIDNEGNLKLADFGLARSFSSDHNGNLTNRVITL

SEQ ID NO: 223046 - protein, 129 aa, Zea Mays
MWSVGCIFAELLNGKPILPGKNEPEQLTKIFELCGTPDDTIWPGVTKMPWYNNFKPHRPLKIRVKDFFKHFDRHALDLLEKMLTLDPSQRISAKDALDAEYFWTSRAMSAAVNTMRIRAPRWRRLCRRP

SEQ ID NO: 223047 - protein, 146 aa, Zea Mays
MTLSLLTVAVVFYIKGNISHDSDLGNTLSMVSLIGVLACVTAYSFGMGAIPWIIMAEILPVSINSVAGSFATLANWLTSFGITMTANLLLSWSAAGTFALYMMVSAFTVVFVILWVPETKGKTLEEIQWFFHWAVRRAEGSLAGLK

SEQ ID NO: 223048 - protein, 132 aa, Zea Mays
MTLSLLTVAVVFYIKGNISHDSDLGNTLSMVSLIGVLACVTAYSFGMGAIPWIIMAEILPVSINSVAGSFATLANWLTSFGITMTANLLLSWSAAGTFALYMMVSAFTVVFVILWVPETKGKTLEEIQWFFQ

SEQ ID NO: 223049 - protein, 206 aa, Zea Mays
MAADRLGCWTRVPTGAAAALPWPPRHASCRCCRLHGRDGHGQLVAVAMLLVVGHDNGGGGGRGAGGDDAGARDTPSLPDLRRRRRRRQPAPAAAAARSPSPGRRDHPRRRRQQQQLLAVLGCRCRVHNCRRHFFRCDPAATPAAGAVQLLQQQHPAGRHRQPRRIGFSGRPGAEPQLMVLPLPCCREHVRATRATTGTCVAVIVLG

SEQ ID NO: 223050 - protein, 544 aa, Zea Mays
MAIVVVVFHNPIGRPAARTHPPPAAPATARRGFKILKMAPPARPPRAGEDLEEGTGESSPPPRSPRASNPDCHEVQRKICERLRQTGRHDRTLADPTFNARFARHLERLPRRYLLDLDLDDKLEDVLLHWGILDECADPNKRPVFRARFIKYKTVPREDDGIGHDQDHEEPCQKLLEDLSLERRKIADRNDSLSISSRGDLKTVLLHEIIFSSIDKPKLLSRLTALLSEVGLNIQEAHVYSTKDGFCLDVFVVDGWKTEETDELIAAIKETLTQKNASPSNSTNSSTPEKIVDLQQQVGDYEIDLSMLTRGDKIASGSSADFGVNHENILQFYGACTKHPNYCIVTEYMPGGNIYDFLHKQNNFLDLHKILRFAIDISKGMDYLHQNNIIHRDLKSANLLLGHDQVVKIADFGVARHGSQQGQMTAETGTYRWMAPEIINHKPYDHKADVFSFAIVLWELATSMVPYDNMTPLQAALGVRQGLRLDIPGSVHPRLTKLIRQCWNEDPDARLTFAEITKELQDSLHHIEAPKGASRRSRAKMQKK

SEQ ID NO: 223051 - protein, 1053 aa, Zea Mays
MAYLRNKSMEFLKRFEVPAKNPSEDAQRRWREAVGTLVKNRRRRFRMVPDLDKRSQVQAQRRNIQEKLRVALYVQKAALQFIDAARKTEHPLPEMARQRGFSVSAEELAAVARNHDAKSLRHHRGVDGIAAKLNVSLADGVRSDEAGVRAEVYGANQYTEKPPRTFWMFLWDASQDMTLLLLAFCAFISVAIGLATEGWPSGMYDGLGIVLTIFLVVMITAASDYKQSLQFRDLDREKKKIDIQVTRDGYRQKVSIYDIVVGDIVHLSIGDQVPADGLYIDGYSLVVDESSMSGESEPVHPSTAKPFLLGGTKVQDGSARMLVTAVGMRTEWGNLMETLSQGGEDETPLQVKLNGVATIIGKIGLVFAVLTFTVLMARFLVDKAHAPGGLLQWRGADALSILNFFAVAVTIIVVAVPEGLPLAVTLSLAFAMKKLMQERALVRHLSACETMGSASCICTDKTGTLTTNHMVVEKVWASGAAQTVSTAKGFDELRSSVSENFTRVLLEGVFHCSGSEVVTGKDGRTSVMGTPTETAILEFGLEVEKYMGVEHAGAKKLKVEPFNSVKKTMAVVIASPNSAGHPRAFLKGASEVVLSRCSSVIDGTGSVEKLTEAKAKRVGSAIDAFACEALRTLCLAYQDVGGAGDVPGDGYTLIAVFGIKDPLRPGVREAVRTCHDAGINVRMVTGDNINTAKAIARECGILTDDGVAIEGPEFRAKRPNEMRELIPKIQARSWSNVMARSLPLDKHTLVTNLRGMFNEVVAVTGDGTNDAPALHEADIGLAMGIAGTEVAKENADVIIMDDNFSTIINVAKWGRSVYINIQKFVQFQLTVNVVALMVNFVSASFTGSAPLTIVQLLWVNLIMDTLGALALATEPPNDAMMRRPPVGRGDNFITKVMWRNIVGQSIYQLVVLGVLIFKGKSLLRLNGGGDLSDAQLNTFLFNTFVFCQVFNEVNSREMEKINVFSGIFSSWIFSAVAGATAAFQVIIVELLGTFASTVHLSGRLWLASVLIGSVSLLIGAVLKLIPVGSGSDDSSSADRHDGYQPIPTGPNAV

SEQ ID NO: 223052 - protein, 189 aa, Zea Mays
MRTGKLLGCYFGKCSGSIRSIVRHPDLPLIASCGLDSYLRIWDTNTRQLLSAVFLKQHLTTVVLDSHFSVEEPGEMKSKQLESSVETETEVRKEKKKKSKAITEDETEAQIRKEKKSRTIEEEEQAGLVDHSDINDEVYARKEKKKKKSRGIEGGKERDSDGEICSPKRRKSGERSKCLKKRSKKQLVA

SEQ ID NO: 223053 - protein, 424 aa, Zea Mays
MDMGFDFTMKALYTGVWIASVSLFMELLGFNTQKWITAGGFGTVLLTLAGREIFTNFLSSVMINATRPFVVNEWIDAKIDGVDVSGIVEHVGLWSPTLIRGVDREAIYIPNHKFTVSILRNNTQRTHWRIKTYLAISHMDAGKIGTIVADMRKVLAKNPHIEQQKLHRRVFFEKIDPKNQALMIFISCFVKTSHFEEYLNVQEAVMLDLLRIVGHHKARLATQIRTVQKSYGNADFDNIPFGEDMYSRVRGRPLLIDTSARISDDKPRPRPVSSREEQKVKTNGSVDIKSSSPENASSSNSEKQEPKKMVPEDTRVKNIKGDNVMPVTPSLDPATSTSKAGKGKTREPEPTERQGDGSVSVANPKKESRPVFEDNIVLGVALEGSRRTLPIEEGNPHLSLSETEVDTEEAASSPKDKIGQSPKL

SEQ ID NO: 223054 - protein, 613 aa, Zea Mays
MAVGLTSQLFQRVTATDIFCQRNKFRSSEMRSSLPLPSTSFPSVADRRDCWGRNVLESSCMPMLYTPRRYRSLGFRSFALPIPLKEIPLVKNTSLALTRSCDALLANPATSLVVPAIGIIVFALWGFLPLMRDIRNRFDHGGNWKKSPTYLISSSYLQPLLLWTGATLICSLIQQVQKFLMDMRNPNDTRNMGFDFTMKALYTGVWIASVSLFMELLGFNTQKWITAGGFGTVLLTLAGREIFTNFLSSVMINATRPFVVNEWIDAKIDGVDVSGIVEHVGLWSPTLIRGVDREAIYIPNHKFTVSILRNNTQRTHWRIKTYLAISHMDAGKIGTIVADMRKVLAKNPHIEQQKLHRRVFFEKIDPKNQALMIFISCFVKTSHFEEYLNVQEAVMLDLLRIVGHHKARLATQIRTVQKSYGNADFDNIPFGEDMYSRVRGRPLLIDTSARISDDKPRPRPVSSREEQKVKTNGSVDIKSSSPENASSSNSEKQEPKKMVPEDTRVKNIKGDNVMPVTPSLDPATSTSKAGKGKTREPEPTERQGDGSVSVANPKKESRPVFEDNIVLGVALEGSRRTLPIEEGNPHLSLSETEVDTEEAASSPKDKIGQSPKL

SEQ ID NO: 223055 - protein, 361 aa, Zea Mays
MHPELTPTGVLYTGQVGYVISGMRSTKEARIGDTLHQAKSTVEPLPGFKPVKHMVFSGLYPADGSDFEALSHAIEKLTCNDASVSVTKETSNALGMGFRCGFLGLLHMDVFHQRLEQEYGAQVISTIPTVPYIFEYGDGSKVQVENPAALASNPGKRVAACWEPTVIATIIIPSEYVGPVIMLCSERRGEQLEYTFIDAQRALLKYRLPLKEIIVDFYNELKGITSGYATFDYEDSEYQQADLVKMDILLNGQPVDAMATIVHNQKAQRVGKDLVEKLKKFIERQMFEITIQAAIGSKVIARETLSAMRKNVLAKCYGGDITRKKKLLEKQKEGKKRMKRVGSVDIPQEAFHELLKVSNSK

SEQ ID NO: 223056 - protein, 344 aa, Zea Mays
MSCRLRREPTLSKYGSDDGLPELREALFEKLRRENKLTKSSVMVTAGANQAFVNLVLTLCDAGDSVVMFAPYYFNAYMSFQMTGVTDILVGGSDPKTLHPDVDWLEKVLKENDPIPKLVTVVNPGNPSGAFIPRPMLERISDLCKNAGAWLVVDNTYEYFMYDGMKHYCLEGTHIVNLFSFSKAYGMMGWRVGYIAFPNEVDGFHDQLLKVQDNIPICASIIGQRLALYSLEAGPEWIKERVRDLVKNRALLVDALSPLGDDNVRGGQGAIYLWAKLPDTCSDDFEVVRWLANRHGVAVIPGSASGGPGHIRISFGGLKEEDTRLAAERLRRGLQELVADGTVQ

SEQ ID NO: 223057 - protein, 832 aa, Zea Mays
MAMQQQPPPPPGNPWPPHHGAGQHPPPTYPPPPPGQAWTNHSWAQNHGYQGHDNEEDWATKAKAWVAAKSVMGNHQIQQHAISTSRTEGHHNGYHDQYQQPAGLPTEVTEALHPPVPQSSIDHVPFPMTGQQRETNHLLDRGPMVSPAKNFGSFSSTYEQEVSYNYSSAPGTGNNMLQYPNSQAQPFPTTAAVQGGFSQGCLSMPVPLTEQPLFGHERQPIDPSDQPLEFNSRKAPDLAVHINVNSNIPAPQTLAPNHDVAATSTHSWTPSATVGYLPRAPVPPQTAQMDPSVHAAPLFGAASSSSYVSPAAFGVGNVTEVFPTDPNTPFSVADKSKKPPVPNWLREELLKKKSEPLSASAQNSENLNPMEANEAVQTIGRPDQSDSRSNDSAKSTEDDDDDEDEIEAARMAAINKEIKRVLTEVLLKVTDELFDEIATKVLNEDDSAESNEATGVFGSKETGLGRSRAKASAKVVLPAKSTNSSDHKDSTGLSSPKGALLGLASYDSDDDDDADTDSKDKMPISNLSSKDNAGAVNTEGDKSTLGKRNGNHNEQNSSLGSSPSGEDLKSNNQNFQRNANAEPEQMHIRDTENGEFRFKAKTRTEPKGAFDRMDEKAHTYAEVDIQNRKTSFGNNAEKHNDLESSHRHSEKSSKEDFVNELKADHTKELEYSRAEKYNNDDKYSMYGNIDKRGSCKEGKGSDSAAKHESDTREPHYRGNSKLDGAKGDWKDLPKDRERNRDDRRGKGKDEKDDRLRQMTSHNSRSSRSRSPRGRSRTRKENSHVRGSVSSDEPSDSVKKRKHYSHKTSMSPSPPKSRNRYFGCDMSMQVSSA

SEQ ID NO: 223058 - protein, 842 aa, Zea Mays
MAMQQQPPPPPGNPWPPHHGAGQHPPPTYPPPPPGQAWTNHSWAQNHGYQGHDNEEDWATKAKAWVAAKSVMGNHQIQQHAISTSRTEGHHNGYHDQYQQPAGLPTEVTEALHPPVPQSSIDHVPFPMTGQQRETNHLLDRGPMVSPAKNFGSFSSTYEQEVSYNYSSAPGTGNNMLQYPNSQAQPFPTTAAVQGGFSQGCLSMPVPLTEQPLFGHERQPIDPSDQPLEFNSRKAPDLAVHINVNSNIPAPQTLAPNHDVAATSTHSWTPSATVGYLPRAPVPPQTAQMDPSVHAAPLFGAASSSSYVSPAAFGVGNVTEVFPTDPNTPFSVADKSKKPPVPNWLREELLKKKSEPLSASAQNSENLNPMEANEAVQTIGRPDQSDSRSNDSAKSTEDDDDDEDEIEAARMAAINKEIKRVLTEVLLKVTDELFDEIATKVLNEDDSAESNEATGVFGSKETGLGRSRAKASAKVVLPAKSTNSSDHKDSTGLSSPKGALLGLASYDSDDDDDADTDSKDKMPISNLSSKDNAGAVNTEGDKSTLGKRNGNHNEQNSSLGSSPSGEDLKSNNQNFQRNANAEPEQMHIRDTENGEFRFKAKTRTEPKGAFDRMDEKAHTYAEVDIQNRKTSFGNNAEKHNDLESSHRHSEKSSKEDFVNELKADHTKELEYSRAEKYNNDDKYSMYGNIDKRGSCKEGKGSDSAAKHESDTREPHYRGNSKLDGAKGDWKDLPKDRERNRDDRRGKGKDEKDDRLRQMTSHNSRSSRSRSPRGRSRTRKENSHVRGSVSSDEPSDSVKKRKHYSHKTSMSPSPPKSRNRRISRSPHSKHSHRRHSPYSSAGR

SEQ ID NO: 223059 - protein, 660 aa, Zea Mays
MLQYPNSQAQPFPTTAAVQGGFSQGCLSMPVPLTEQPLFGHERQPIDPSDQPLEFNSRKAPDLAVHINVNSNIPAPQTLAPNHDVAATSTHSWTPSATVGYLPRAPVPPQTAQMDPSVHAAPLFGAASSSSYVSPAAFGVGNVTEVFPTDPNTPFSVADKSKKPPVPNWLREELLKKKSEPLSASAQNSENLNPMEANEAVQTIGRPDQSDSRSNDSAKSTEDDDDDEDEIEAARMAAINKEIKRVLTEVLLKVTDELFDEIATKVLNEDDSAESNEATGVFGSKETGLGRSRAKASAKVVLPAKSTNSSDHKDSTGLSSPKGALLGLASYDSDDDDDADTDSKDKMPISNLSSKDNAGAVNTEGDKSTLGKRNGNHNEQNSSLGSSPSGEDLKSNNQNFQRNANAEPEQMHIRDTENGEFRFKAKTRTEPKGAFDRMDEKAHTYAEVDIQNRKTSFGNNAEKHNDLESSHRHSEKSSKEDFVNELKADHTKELEYSRAEKYNNDDKYSMYGNIDKRGSCKEGKGSDSAAKHESDTREPHYRGNSKLDGAKGDWKDLPKDRERNRDDRRGKGKDEKDDRLRQMTSHNSRSSRSRSPRGRSRTRKENSHVRGSVSSDEPSDSVKKRKHYSHKTSMSPSPPKSRNRYFGCDMSMQTNFAVST

SEQ ID NO: 223060 - protein, 597 aa, Zea Mays
MRAAATSGSSGSASSSATWSSSGSGCRCWCRSRGSAGETSPSLLPPTSSATGGNWSTTYAPSPFYMTSKMRSLYLEGYEYSIFDLTRPDRVQIQIYGNSVQGRILDGDSPTELLTSYTESTGRPPVLPRWITSGAVVGMQGGTDAVRRVWGQLKDYDVPVSAFWLQDWVGQRKTAIGSQLWWNWELDDAHYNGWNDLVDDLRSHGIRTMAYCNPCLVPMDEKPSAKRHLFEEARKLGILVRDDAGEPYMMPNTAFDVAMLDLTNPAAHAWFKSTVLRGMVDRGVSGWMADFGEGLPLDARLHSGEDSVAAHNRYPELWARVNREIADEWRASRRRAAAESDDIVDDDDGLVFFVRSGFRESSRWAMLFWEGDQMVSWQANDGIKSSVVGLLSGGLSGFPLNHSDAGGYCTVDLPPFLRYRRSEELLMRWMEVNAFTVVLRTHEGNRPGSNCQFYSSGRTLAHFARCAKMYKAWEFYRARLVGEAARTGLPVARHLFLHYPADERVQALTYQQFLVGTEMLVVPVLDKGRTAVTAYFPAGAGAWRHVWSGNEYGTGAGVQGGFEAQVEARIGYPAVFVRAGSSVGERFVSNLRNLTVL

SEQ ID NO: 223061 - protein, 70 aa, Zea Mays
MGTKMKKGILKPFRYISTIMDGKEAEMQIGFPTDVKHVAHIGWDGPGSTNNNNNNNSNNNSGGAPSWVGF

SEQ ID NO: 223062 - protein, 70 aa, Zea Mays; identical to SEQ ID NO: 223061

SEQ ID NO: 223063 - protein, 77 aa, Zea Mays
MWAWGCVRDREAPSCPRSRSPPRRSCSRSPAVIVAPTSPVVTAASTSTPMGSGCGPQISFQTAKLEGDSPTRADLPW

SEQ ID NO: 223064 - protein, 181 aa, Zea Mays
MDDEDMPNARKYQSKSFPLLDSLELLFDGPIPEGAQKSPSSIPQNVGGNVGDGGNNISTAPDLSERPSGTINTSVNEAWNNISLLKQTALGPQGIDNLDTLQNRDEEVLERLQHGSDRRPQRADEQAQSSSCVELQRDRRKKRKAPDIQQIMETYMNFRMKQPRVKQRRAKDADQFTISRY

SEQ ID NO: 223065 - protein, 955 aa, Zea Mays
MSGSSLRTTSRCRLTRAGAIRLPSYSRSTRCRQPNSSRHPLTRSGSSSSAIHLCTSSRPYRLPVFYKHRDLLFYPAWVFTVPNVILRIPFSIIESIVWVLVTYYTIGFAPDADRFFKHLLLVFLIQQMAGGLFRATAGLCRSMIIAQTGGALFLLIFFVLGGFVLPKVFIPNWWIWGYWISPLMYGYNALAVNEFYAPRWMNKFVLDQNGVPKRLGIAMLEGANIFVDKNWYWIGAAGLLGFTIFFNVLFTLSLMYLNPLGKPQAVISEETAKEAEGNGHSKGAIRNGSTKPKDGSHNSLVISEEMKEMRLSARLSNCSSNGVSRLMSIGSNEAAPTRGMVLPFNPLAMSFDNVNYYVDMPAEMKHQGVQDDRLQLLREVTGSFRPGVLTALMGVSGAGKTTLMDVLAGRKTGGYIEGDIRIAGYPKNQATFARISGYCEQNDIHSPQVTVRESLIYSAFLRLPGKIGDQEITDDIKMQFVDEVMELVELDNLRDALVGLPGITGLSTEQRKRLTIAVELVANPSIIFMDEPTSGLDARAAAIVMRTVRNTVDTGRTVVCTIHQPSIDIFESFDELLLLKRGGQVIYSGKLGRNSQKMVEYFEAIPGVPKIKDKYNPATWMLEVSSVATEVRLKMDFAKYYETSDLYKQNKVLVNQLSQPEPGTSDLYFPTEYSQSTIGQFKACLWKQWLTYWRSPDYNLVRYSFTLLVALLLGSIFWRIGTNMEDATTLGMVIGAMYTAVMFIGINNCSTVQPVVSIERTVFYRERAAGMYSAMPYAIAQVVIEIPYVFVQTTYYTLIVYAMMSFQWTAVKFFWFFFISYFSFLYFTYYGMMAVSISPNHEVASIFAAAFFSLFNLFSGFFIPRPRIPGWWIWYYWICPLAWTVYGLIVTQYGDLEDLISVPGESEQTISYYVTHHFGYHRDFLPVIAPVLVLFAVFFAFLYAVCIKKLNFQQR

SEQ ID NO: 223066 - protein, 650 aa, Zea Mays
MKEMRLSARLSNCSSNGVSRLMSIGSNEAAPTRGMVLPFNPLAMSFDNVNYYVDMPAEMKHQGVQDDRLQLLREVTGSFRPGVLTALMGVSGAGKTTLMDVLAGRKTGGYIEGDIRIAGYPKNQATFARISGYCEQNDIHSPQVTVRESLIYSAFLRLPGKIGDQEITDDIKMQFVDEVMELVELDNLRDALVGLPGITGLSTEQRKRLTIAVELVANPSIIFMDEPTSGLDARAAAIVMRTVRNTVDTGRTVVCTIHQPSIDIFESFDELLLLKRGGQVIYSGKLGRNSQKMVEYFEAIPGVPKIKDKYNPATWMLEVSSVATEVRLKMDFAKYYETSDLYKQNKVLVNQLSQPEPGTSDLYFPTEYSQSTIGQFKACLWKQWLTYWRSPDYNLVRYSFTLLVALLLGSIFWRIGTNMEDATTLGMVIGAMYTAVMFIGINNCSTVQPVVSIERTVFYRERAAGMYSAMPYAIAQVVIEIPYVFVQTTYYTLIVYAMMSFQWTAVKFFWFFFISYFSFLYFTYYGMMAVSISPNHEVASIFAAAFFSLFNLFSGFFIPRPRIPGWWIWYYWICPLAWTVYGLIVTQYGDLEDLISVPGESEQTISYYVTHHFGYHRDFLPVIAPVLVLFAVFFAFLYAVCIKKLNFQQR

SEQ ID NO: 223067 - protein, 1135 aa, Zea Mays
MIVGPTKVLFMDEISTGLDSSTTFQIVKCLQQIVHLGEATILMSLLQPAPETFDLFDDIILLSEGQIVYQGPREYVLEFFDSCGFCCPERKGTADFLQEVTSRKDQEQYWADKQMPYRYVSVPEFAQRFKRFHVGLQLENHLSLPFDKSRCHQAALVFSKHSVSTTELLKASFDKEWLLIKRNSFVYIFKTIQLIIVALIASTVFLRTHMHTTNLDDGFVYIGALLFTLIVNMFNGFAELSLTITRLPVFYKHRDLLFYPAWVFTVPNVILRIPFSIIESIVWVLVTYYTIGFAPDADRFFKHLLLVFLIQQMAGGLFRATAGLCRSMIIAQTGGALFLLIFFVLGGFVLPKVFIPNWWIWGYWISPLMYGYNALAVNEFYAPRWMNKFVLDQNGVPKRLGIAMLEGANIFVDKNWYWIGAAGLLGFTIFFNVLFTLSLMYLNPLGKPQAVISEETAKEAEGNGHSKGAIRNGSTKPKDGSHNKEMKEMRLSARLSNCSSNGVSRLMSIGSNEAAPTRGMVLPFNPLAMSFDNVNYYVDMPAEMKHQGVQDDRLQLLREVTGSFRPGVLTALMGVSGAGKTTLMDVLAGRKTGGYIEGDIRIAGYPKNQATFARISGYCEQNDIHSPQVTVRESLIYSAFLRLPGKIGDQEITDDIKMQFVDEVMELVELDNLRDALVGLPGITGLSTEQRKRLTIAVELVANPSIIFMDEPTSGLDARAAAIVMRTVRNTVDTGRTVVCTIHQPSIDIFESFDELLLLKRGGQVIYSGKLGRNSQKMVEYFEAIPGVPKIKDKYNPATWMLEVSSVATEVRLKMDFAKYYETSDLYKQNKVLVNQLSQPEPGTSDLYFPTEYSQSTIGQFKACLWKQWLTYWRSPDYNLVRYSFTLLVALLLGSIFWRIGTNMEDATTLGMVIGAMYTAVMFIGINNCSTVQPVVSIERTVFYRERAAGMYSAMPYAIAQVVIEIPYVFVQTTYYTLIVYAMMSFQWTAVKFFWFFFISYFSFLYFTYYGMMAVSISPNHEVASIFAAAFFSLFNLFSGFFIPRPRIPGWWIWYYWICPLAWTVYGLIVTQYGDLEDLISVPGESEQTISYYVTHHFGYHRDFLPVIAPVLVLFAVFFAFLYAVCIKKLNFQQR

SEQ ID NO: 223068 - protein, 214 aa, Zea Mays
MTGSLDKKLKLWDSKTRNVSPSGTITLNSDVASISICGIYILAAVERNVYLYDMRNLTRPVDEKDCPLDYQIRCLHTSLEWNAYVAGSVDGVVALKYLDRGTDRDLGYAFRCHPNSRNGKWNLVPVNCISVHPCNRTFVTGDDKGCTIVWDAQLKKKLIELPMYLGSVASVAYNHNGQLLAVASNYFLEVDKEEQHHQVFIETVENFKGKSRVG

SEQ ID NO: 223069 - protein, 342 aa, Zea Mays
MTHAYGNRSGVRYVTNGLKVYYVPWRPFLMQNTLPTLFLTFPIFTLADIDQAICVSHTSKENTVLRSGISPEKVFMVPNAVDTAMFTPSPKRLNCDEIVIVVVSRLVYRKGADLLVEVIPEVCRLFPKVRFIVGGDGPKRVRLEEMREKFSLQDRVEMLGAVPHAQVRSVLISGHIFLNSSLTEAFCIAILEAASCGLLTVSTRVGGVPEVLPDDMIVLAEPAPGDMVRAVKKAIDMLPGIDPQIMHLRMKELYSWDDVAKRTEIVYDRAMESPTTNLLDRLPRYLTCGSWAGKLFCLVMIINYLLWRLLEFLQPAVGIEEVPDIGPLHAHLGSRNDEAQEK

SEQ ID NO: 223070 - protein, 72 aa, Zea Mays
MGMPYMATGIPEIPCTAIRSSQRLETPSPNEVGESGVPGGQFVAGHPPRRPTQVSSAFHIIPCSPFNFIWEH

SEQ ID NO: 223071 - protein, 384 aa, Zea Mays
MHGRAWRHIQEHIGTKTAVQIRSHAQKFFTKVVRESSSGSNASAGAAPAIQVPPPRPKRKPAHPYPRKVDGAAKKPAPELKLMEKLPPRDRDEGSPTSVLASARTASRAEVLLGSAFANSSSASRSRGLSASGSDERGDGGGSLVSSVAGEHGCASPRTRAPYTKVLVEANEVSDLGPEAPVLKLFGKKVVVKDLKTDYSPAAASVAKASRDRNPIGAAGASSWSPWPGSVQVQQLMYFVPQHDGLAAQPVAPWFGYSGSVPCAVFYPQAVASAQEHQQASEPLDHKRAQTERSLTGSNMASSAASAAQNSDTAQSHHGPGQENTGDGCAALRAAIPRLAKCASSASCSGRGFVPYKRCAAESEAPRPVAPGEEDDGELTRLCL

SEQ ID NO: 223072 - protein, 126 aa, Zea Mays
MDFIPHVLIVCHFFCLWNFHGQIASSKQLVAIGLFRFVLHETCSSPSSSLPPSKLCSTTYGKELDKVTGQKRWKGSQISAATSGMAELSKQALGSTEDCLLESLMGCLASPSSLGAGGRGPHIQGT

SEQ ID NO: 223073 - protein, 94 aa, Zea Mays
MDFIPHVLIVCHFFCLWNFHGQIASSKQLVAIGLFRFVLHETCSSPSSSLPPSKLCSTTYGKELDKVTGQKRWKGSQISAATSAGGRGPHIQGT

SEQ ID NO: 223074 - protein, 377 aa, Zea Mays
MKMANKTAATKKAAIRASKLFILGVILQGGYIHGRHKLTYGVDLDHIRWLGVLQRIAIGYFVAAMSEIWLVNNNLVDSPVPFVKKYFIEWFMAIAITVLYVALVFGLYVANWEFEIQTSNSTLSIPSNSIETKMIQCGVRGSLGPPCNAVGLVDRVLLGENHLYKNPVYKRTKECSINSPDYGPLPPNAPDWCLAPFDPEGLLSTLMAVVTCFVGLFFGHVLIHCKNHSQRMLIWLLASVVLTISAYLVLLLGMPFSKPLYTVNYMLLTGGVSGFLLLLLYYIVDVIHIKKPFVLFQWMGMNALIVYVLAACELFPTLIQGFYWRSPENNLVDVTESLLQAIFQSKRWGTLVFVLLEIVFWCLAAGFLHMKGVYLKL

SEQ ID NO: 223075 - protein, 1335 aa, Zea Mays
MSTVDKMLIKGIRSFDPDNKNVITFFKPLTLIVGPNGAGKTTIIECLKLSCTGELPPNSRSGHTFVHDPKVAGETETKGQIKLRFKTAAGKDVVCIRSFQLTQKASKMEFKAIESVLQTINPHTGEKVCLSYRCADMDREIPALMGVSKAVLENVIFVHQDESNWPLQDPSTLKKKFDDIFSATRYTKALEVIKKLHKDQMQEIKTFRLKLENLQTVKDQAHKLRENIAQDQEKSDASKSQMEQLKEKICGTEREILQMETSLDELRRLQGQIDIKATERSTLLTQQHEKLAALSEENEDTDEELMEWQTKFEERIALLETKISKLVRDMDDEASYSSVLSKQNSELTHEIGKLQAEADAHLTMKHERDSDIKNICTKHNLGPVPEHPFTNDVAMNLTNRIKARLSSLENDLLDKKKSNEDQLDVLWKHYLKINARYSEVDGQIQSKIESMSGILRRRKDKEKERDAAEVELSKFNLSRIDERERHMQIEVERKTLALGERDYDSIISQKRTEVYSLEQKIKVLLREKDIINRNADERVKLGLKKDALESSKDKLNEIVNEHKDKIKKVLRGRNPFEKDMKKEINQAFWPVDKEYNELRSKSQEAEQELKFTHSKVTDAREQLTKLRRDMDAKRRFLDSKLQSILQISANVDMFPKVLQDAMNKRDEQKRLENFANGMREMLAPFEHLARKNHVCPCCERAFTPDEEDEFVKKQRMQNSSTAERSKALAMESSNAEALFQQLDKLRTIYDAYVKLVEETIPLAEKNLNQHLADESQKAQAFDDLLGVLAHVQMDRDAVEALLQPTDTIDRHVHEIQQLVKEVEDLEYALDSSGRGVKSLEEIQLELNFLQRTRDTLIVEVDDLRDQHRMLNEDMSSAQVRWHNAREEKVKASSILERFQKSEEELVLLAEEKEQLIVEKKLLEESLDPLSKEKESLLQEYNALKQKLDEEYHQLAERKREFQQELDALGRLSMKIKGYLDSKKNEKLKELQGRHVLCHSQLQSCMAKQQRISAELNKSKELLQGQGQLKRNIDDNLKYRKTKADVEQLTRDIESLEERLLSIGSLSAIEADLKRHSQEKERLNSEFNRWQGTLSVYQSNISKHKQELKLSQYKDIEKRYTNQFLQLKTTEMANKDLDRYYTALDKALMRFHSMKMEEINKIIKELWQQTYRGQDIDYISINSDSEGAGTRSYSYRVVMQTGDAELEMRGRCSAGQKVLASLIIRLALAETFCLNCGILALDEPTTNLDGPNAESLAAALLRIMEARKGQENFQLIVITHDERFAHLIGQRQLAEKYYRVSKDEKYLRVRWNTTACFCVVGAVGFASTFVRLSLNV

SEQ ID NO: 223076 - protein, 510 aa, Zea Mays
MRDTKTKGIWVWGSPVEVDIGGSKVSVLYLDTEGFESVGKSNVYDDRIFALATVLSSVLIYNLPETIREADISRLSFAVEIAEEFYGRVKGQDVAFEPAKLLWLIQRDFLQGKSVQQMVDEALQRVPNNNGDTNIDELNQIRDSLAVMGDNSTAFSLPQPHLQRTKLCDMEDQELDPLYVKKRDQLKEVVASMIKPKIVQGRTLNGTEFVSFLGQIVDALNKGEIPSAGSLVEIFNKAILERCLKVYSEIMGRAGLPVSVDELREFHDLAKDEARRLFNKQHFGKHHAARSILKLDEEIKKVYRNLGQANEYQSSKLCEARFSECEDKMERLQVLKLPSMAKFDAGFLLCNRSFETDCVGPAKESYRHRMSKMLARSRALFIKEYNNKLFNWLAIFSLAMVVVGRFLVKFFLLEVAAWVMFAFLETYTRLFWSSESLYYNPAWHAIVSSWETVVYSPVLDLDRWAFPICAVLLFLAFYWRCLGGRRGIARSLLPLYNGAYYRSSSRTRTD

SEQ ID NO: 223077 - protein, 873 aa, Zea Mays
MDLAINPFSSGTRLRAFILHRDMIRAIRACKTAAEERAVVRRECAAIRAAISEGDQDYRHRNMAKLMFIHMLGYPTHFGQMECLKLIAAAGFPEKRIGYLGLMLLLDERQEVLMLVTNSLKQDLNHSNQFIVGLALCALGNICSAEMARDLAPEVERLLQNRDPNTKKKAALCSVRIVRKVPDLAEIFMSAATSLLKEKHHGVLISAVQLCMELCNASNEALEYLRKNCLEGLVRILRDVSNSSYAPEYDIGGITDPFLHIRVLKLMRILGQGDADCSEYINDILAQVSTKTESNKNAGNAILYECVETIMSIEATSGLRVLAINILGRFLSNRDNNIRYVALNMLMKAIAVDTQAVQRHRATILECVKDADVSIRKRALELVYLLVNDTNVKPLTKELVDYLEVSDQDFKEDLTAKICSIVEKFSLDRLWYLDQMFRVLSLAGNHVKDDVWHALIVLVSNASELQGYSVRSLYKALQASSEQESLVRVAVWCIGEYGEMLVNNLSMLDMEEPITVTEYDAVDAVEAALQRYSADVTTRAMCLVSLLKLSSRFPPTSERIKEIVAQNKGNTVLELQQRSIEFSSIIQRHQSMKSSLLERMPVLDEANYLVKRAASIQAAVPSVNSAPAVTSGGPFKLPNGVGKPAAPLADLLDLSSDDAPVTTSAPTTAPNDFLQDLLGIGLTDSSPIGGAPSTSTDILMDLLSIGSSSVQNGPPTANFSLPGIETKSVAVTPQVVDLLDGLSSGTSLPDENATYPTITAFQSATLRITFSFKKQPGKPQETTISASFTNLATTTFTDFVFQAAVPKFIQLRLDPASSSTLPASGNGSVTQSLSVTNNQHGQKPLAMRIRMSYKVNGEDRLEQGQISNFPAGL

SEQ ID NO: 223078 - protein, 458 aa, Zea Mays
MDEAEEMQVERLHEEADAGGADTDKLSYEIFSILESKFLFGYTDPHQLWLPKPAAELPAQASAAAPGKAAQRGKVCVLCVDGGGGGLRALLPGRALAHLEAALRRASGDPDARVADYFDLAAGTGAGGVFAAMLFSTHSRGAPLFHADDTWRLVADHAPRMFRRPAASSSTSLFCRGKKRPLAAPTAALEAAMKAAFGQELTLRDTIKPVLISCYDLKTSAPLVFSRADALENGSYDFRLCEVGRAAWSEAGRFEPAEVASVDGATSCAAVDGGPTMGSPAAAAITHVLHNKHEFPFVRGVEDLLVLSIGGCSGGGSGAAGEAELRRMRRWGPKEWARPIARIAADGAADLVDHAVARAFGQCRASNYLRIQRESMPPCGPDGEYDPTPGNVRALLAAADEMLKQRNVESVLFEGRRVGEQTNAEKLDWFAAELVAEHRSRASRIAPTVAFKQAPQKP

SEQ ID NO: 223079 - protein, 509 aa, Zea Mays
MSSWLRSAVSRAVEAGGRSGVARAVKGYADTVAHHAGQAVADILHDRMNYKSFKKTVARLEEAAVSCRGGERVELLKRWLGALQDVDAENGSSDLKVSEANDPSGEMDTLKAQTVLFYDADIDGAPMNFCDVFLYSQALEGITLSMILEPPSEEEVSLLLEIFSICLTGGKEVNKEIMSNVQDLAKAFSEYKDEVLVKREELLEYAQSIISGLKRNADIVRIDAETLELQRKLDEKQKSRGQSPEYQDKTSDKIAAANLEVFKEALGELRLCSRVEELLLKKKSITLGDSLEIHSQKVDKLKVLADSLACSSSKAEQRILEHRRQKEDALNFRVKKENEVSVSEKELLDEITELEKQRDELEAQLKKVNISLNAAAGRLKQTREERDQFDEANNQIIFSLKKKEDDLSKSIALCNVESNVVKIWIGFLEDSWKLQSSYNEQKDNKTCDELEKCVSDFLKLTKHHLSAFKEVLSQLIENIETYVGNLAVLTSRYFSSFPKVMYFVVQFVW

SEQ ID NO: 223080 - protein, 345 aa, Zea Mays
MYSCTAKHLKVLHCPCICLTGGKEVNKEIMSNVQDLAKAFSEYKDEVLVKREELLEYAQSIISGLKRNADIVRIDAETLELQRKLDEKQKSRGQSPEYQDKTSDKIAAANLEVFKEALGELRLCSRVEELLLKKKSITLGDSLEIHSQKVDKLKVLADSLACSSSKAEQRILEHRRQKEDALNFRVKKENEVSVSEKELLDEITELEKQRDELEAQLKKVNISLNAAAGRLKQTREERDQFDEANNQIIFSLKKKEDDLSKSIALCNVESNVVKIWIGFLEDSWKLQSSYNEQKDNKTCDELEKCVSDFLKLTKHHLSAFKEVLSQLIENIETYVGNLAVLTSRL

SEQ ID NO: 223081 - protein, 225 aa, Zea Mays
MVTRRLFARLYRHCAGAAAASSAAGRHRGALAAAAVEQFAGSSLPVGVPNILNHHFRYSTSIFQKIGFSSVSPQQSDDEVNELKDHERALDGSSEDCPSGSIEGLDLSRDDLVKLVREKDELLKSKDGEIKDMKDKVLRSYAEMENIIARTKRESENSKKYAVQNFSKSLLDVADNLARASSVVKESFSKIDTSKDSAGAVPLLKTLLEGVDMTEKQLAEVPSNL

SEQ ID NO: 223082 - protein, 197 aa, Zea Mays
MCGGGDSSMTFSVPTCSDGAPARVDTVDLRAAYREKVLIEAEKQFQDDFNFLKEKVLVDFGQLVDVQRIDSICQVMCDKFKGCCSVCKTMCIEAIVDSVKIMVEAMSIKHQEILNSMNPLVKTMAVKQMRNTPILISMYNQLLLSRMRKSLLQTLLSHLMGKGLGVGTSNPLVTVPIHLNTSTHQSFIGRMQILQLL

SEQ ID NO: 223083 - protein, 806 aa, Zea Mays
MLPVTYPQSHNYQQDDFHKAVARTLSQGSAPMSMDFHPLQQTLLLVGTNVGDIGLWDVGTKERLVVRNFKVWDLGKCTMTLQAALVKDPAVSVNRIIWSPDGTLFGVAYSRHIVQIYSYNGGDDIRQHLEIDAHVGGVNDIAFAHPNKQLCIITCGDDKTIKVWEATSGAKQFTFEGHEAPVYSVCPHYKENIQFIFSTALDGKIKAWLYDNLGSRVDYDAPGHWCTTMAYSADGSRLFSCGTSKDGESHLVEWNESEGAVKRTYQGFRKRSMGVVQFDTTRNRFLAAGDEFMIKIWDMDSTGLLTTIDADGGLTASPRIRFNKEGTLLAVSTADNGIKILANADGLRLLRTLENRSFDASRNASEAVTKPLINPLTAAANAAAASSSGAGAPSAITAMNGDSRSLVDVKPRIADESLDKSKVWKLMEITESSQCRSIKLADNMRTSKISRLIYTNSGLAILALTSSAVHLLWKWPRSDRNSGKATASVSPTLWQPPSGILMTNDTTDNNPEEAVHCFALSKNDSYVMSASGGKISLFNMMTFKTMTTFMPAPPAATFLAFHPQDNNIIAIGMDDSTIQIYNVRIDEVKSKLRGHSKRITGLAFSNVLNVLVSSGADAQLCVWNTDGWEKQKNRFLQIPSGRQSNILDTRVQFHQDQMHFLVVHETQIAIYETTKLEPVKQWPVRENSPPITHATFSCDSQLIYASFMDATVGIFNGSSLRLQCRILPASYLPPNISPSVHPVVVAAHPSEASQFALGLTDGGVFVLEPLESERKWGNPPPVENGSASNLSTPPPNGASSSDQPER

SEQ ID NO: 223084 - protein, 292 aa, Zea Mays
MIKTPPWVPLNNGGSLVIEQTEALVSVDVNGGHSMFGQGTSQEKAILEVNLEAAKQIARELRLRDIGGIIIVDFIDMSDDLSLMPHFLPANKKLVYEEMKKAVEKDRSTVGVSELSKLGLMEITRKRLGHGHVYRNILCGGFGDQVRPSVTFMISEPCTCCHGTGRVEALDTSFSKIEREICRRLAASRRKSDPEKPKSWPRFLLRVDHEMCTYLTSGKKTKLGLLSSSLKVWILLKIARGFSRGAFELLPYSEKENYSMEKETSELPQKESRPKLSVFPIKKWMSRAKRAK

SEQ ID NO: 223085 - protein, 538 aa, Zea Mays
MTFSMDMDLNASPVPDDDEQQPYNEPVEAEYAQEEHVESAVATLRREREERRKRLKREQQDDGSRLHSQQIRVDYAPQPKRHSRIKEAPQGWLDCPAFGEPIDKIIPSKVPLDETFNESVPPGKRYSSKQLVNKQRKAGREIGLVIDLTNTTRYYSPAEWTKQGTKYAKIACKGRDAVPDNESVNKFVYEAMIFLDRQKHSKNPKYILVHCTHGHNRTGFMIIHYLMRTHVSCVAEAINMFAQRRPPGIYKRDYIEALYSFYHEVPENMMIACPPTPEWKRPDDLDLNGEAKQDDDDDNGDPEPPRNESEDKIITNDDVLGDEVPYDQQEALRVLCYKLLEMPLIRGHSQFPGSHPVSLNSENLQLLRQRYYYATWKADGTRYMMLIMRDGCFLIDRNFCFRRVQMRFPHKSLEGLHDMTLIDGEMIIDTVPDSGLKRRYLAYDLMALGAVSKTKLPFSERWKMLEDEIIRPRYYEKNKFESGSKSNPLYKYDMELFSVRRKDFWLLSTVKKVLKVFIPSLCHDADGLIFQACYRKKR

SEQ ID NO: 223086 - protein, 650 aa, Zea Mays
MTFSMDMDLNASPVPDDDEQQPYNEPVEAEYAQEEHVESAVATLRREREERRKRLKREQQDDGSRLHSQQIRVDYAPQPKRHSRIKEAPQGWLDCPAFGEPIDKIIPSKVPLDETFNESVPPGKRYSSKQLVNKQRKAGREIGLVIDLTNTTRYYSPAEWTKQGTKYAKIACKGRDAVPDNESVNKFVYEAMIFLDRQKHSKNPKYILVHCTHGHNRTGFMIIHYLMRTHVSCVAEAINMFAQRRPPGIYKRDYIEALYSFYHEVPENMMIACPPTPEWKRPDDLDLNGEAKQDDDDDNGDPEPPRNESEDKIITNDDVLGDEVPYDQQEALRVLCYKLLEMPLIRGHSQFPGSHPVSLNSENLQLLRQRYYYATWKADGTRYMMLIMRDGCFLIDRNFCFRRVQMRFPHKSLEGLHDMTLIDGEMIIDTVPDSGLKRRYLAYDLMALGAVSKTKLPFSERWKMLEDEIIRPRYYEKNKFESGSKSNPLYKYDMELFSGWDDPYVTRTHEGLLKWKYPEMNSVDFLFELTNDNRQLVFLYERGKKKLMDGARIAFTDDVDPSSIAGRIVECSWNKEEQCWSCMRIRSDKSTPNDINTYRKVMRSITDNITEEKLLEEIDEISLLPMYADRMQQAHTKMAQQQRRRLPPQC

SEQ ID NO: 223087 - protein, 452 aa, Zea Mays
MTFSMDMDLNASPVPDDDEQQPYNEPVEAEYAQEEHVESAVATLRREREERRKRLKREQQDDGSRLHSQQIRVDYAPQPKRHSRIKEAPQGWLDCPAFGEPIDKIIPSKVPLDETFNESVPPGKRYSSKQLVNKQRKAGREIGLVIDLTNTTRYYSPAEWTKQGTKYAKIACKGRDAVPDNESVNKFVYEAMIFLDRQKHSKNPKYILVHCTHGHNRTGFMIIHYLMRTHVSCVAEAINMFAQRRPPGIYKRDYIEALYSFYHEVPENMMIACPPTPEWKRPDDLDLNGEAKQDDDDDNGDPEPPRNESEDKIITNDDVLGDEVPYDQQEALRVLCYKLLEMPLIRGHSQFPGSHPVSLNSENLQLLRQRYYYATWKADGTRYMMLIMRDGCFLIDRNFCFRRVQMRFPHKSLEGLHDMTLIDGEMIIDTVPDSGLKRSCRFLKGGKCWKMK

SEQ ID NO: 223088 - protein, 531 aa, Zea Mays
MLEEVLPAVFAAAESGNDEDVDSGSVLEFLSGYVSIMKAPSEKQLAHLGRILDLVRVQMSFDPVYRGHLDVLDKIGKEEEDLMAEQRKDLIVLFRSICRVAPAAAQLFIRGLIMTALSSAEASVEDVEVALTLFFRLGEAVGEEEIRSGAGLLGELVPMLLSARFLCHTHRLVALVYLETVTRYMKFVQEHVQYVPHLLGVFLDNRGIHHQNAHVSRRAGYLFMRAVKSLKANLVPYLDTILQSLQDVLSQFTSMDWANKDTKFPSSEDGSQIFEAVGLLIGIEEVSPEKQAQCLTALLNPLCHQIESLVMDAKARGLEESLPRAISLQQIIVALNMVSKGFNERLVMVNRPAIGVMFKKTLDVVLQVLVSFPSVRPLRSKVISFLHRMIEILGISVLPCIPIALRQLLLDNEAKDMVEFLVLVNQIICKFKSSASAILEEVFPTIASHLSVILSQDAFSAGLASNTEEMRELQELQRTLYIFLHAMATHDLSTVLLTSSSRQYLETIMQLLLFTSCKHKDILLRKVRIFV

SEQ ID NO: 223089 - protein, 80 aa, Zea Mays
MDVYRIGTLMELVRELSLSFADDGKRVKVCVQGSMGQGAFAGIPLQLAGTRKILEFMDWGDYGAKGTFINIGAVGVYVLP

SEQ ID NO: 223090 - protein, 284 aa, Zea Mays
MSVSSPAMASPPLAAPGTHRGPCFSTLCRLPSPSCYPPLSASSSPAISTVSAFAVLKHKPRGLGLRCQAAEEAPPPARGKTSLKVMISGAPASGKGTQCRMIVEKYGLVHISTGDLLRAEVSSGTEIGKKAKEYMDNGKLVPDQVVTDMVVSRLSQPDIQERGWLLDGYPRSFSQAQHLENLKIRPNIFIVLEVPDDVLIDRCVGRRLDPVTGKIYHLKNYPPENEEISARLITRSDDTFEKVKSRLDTYKQNSEAILPTYSDLLNKQEYRLMETAQPKLFFRR

SEQ ID NO: 223091 - protein, 142 aa, Zea Mays
MSVSSPAMASPPLAAPGTHRGPCFSTLCRLPSPSCYPPLSASSSPAISTVSAFAVLKHKPRGLGLRCQAAEEAPPPARGKTSLKVMISGAPASGKGTQCRMIVEKFTYQLVIFCELKYLLAQKLARKQKNTWTMESLCRTKL

SEQ ID NO: 223092 - protein, 329 aa, Zea Mays
MPHDRREEIGKKAKEYMDNGKLVPDQVVTDMVVSRLSQPDIQERGWLLDGYPRSFSQAQHLENLKIRPNIFIVLEVPDDVLIDRCVGRRLDPVTGKIYHLKNYPPENEEISARLITRSDDTFEKVKSRLDTYKQNSEAILPTYSDLLNKIDGNCPAEVVFQAIDFLLQKICENTSASKLTKTNGKRPDSADTGSKNEWRGIPTRLNNIPHSREIREYFYNDVLKATKLAIEDKKTRLQIDINIPELNPEMDVYRIGTLMELVRELSLSFADDGKRVKVCVQGSMGQGAFAGIPLQLAGTRKILEFMDWGDYGAKGTFINIGAVGVYVLP

SEQ ID NO: 223093 - protein, 417 aa, Zea Mays
MGNCCRSPAAAAREDVKSSHFPASAGGKKKPHQQARNGGPGSGEKKRLSVLGEEGCDVGAGGIEEKYALDRELGRGEFGENSPLKAIDFGLSIFFKPGEKFSEIVGSPYYMAPEVLKRNYGPEIDIWSAGVILYILLCGVPPFWAETEQGVAQAILRGNIDFKREPWPNVSDNAKDLVRQMLQPDPKLRLTAKQVLEHPWLQNAKKAPNVPLGDIVKSRLKQFSRMNRFKRKALRVIADHLSAEEVEDIKDMFKVMDTDNDGIVSYEELKSGIAKFGSHLAESEVQMLIEAVDTNGRGALDYGEFLAVSLHLQRMANDEHLRRAFLFFDKDGNGFIEPEELQEALMEDGGADTMDVVNDILQEVDTDKDGKISYEEFVAMMKTGTDWRKASRHYSRGRFNSLSIKLIKDGSVKLGSE

SEQ ID NO: 223094 - protein, 414 aa, Zea Mays
MKLMYFLMDRDEQREKRLELEFEVSELETVLEKEQQLGRVLQCSLQGRVVCHCCLSALVPTNVRGLLAELAVVEDEIFYLEKKVDDLRLRLRREQKWTDHCILHHQQQQQQHNRQQRHSVSVSRRELQLQQAGAQQLPRLPCPGPGSDEAPERESKASVGSASAKGDETEHVVGRRSSHCHSSSSSSENPYRPTPPERKTYCMASSPNRLSEELVRLTVTIFHKLNKTATATAADAGELDLELEPSGGGASSSKLNISCIGPRSLVPRVSASVNGAAAAMSPLKSRRAAAKGGGAETGSAAGCQRRFVEFTRGSVDVSRISLCLVDIKNLRGLMQKLCAVDPSLMTNKQKLAFWINVYNFCVMHAFLQHGLPPSPEKLLALLNQASVNVGGTVLNVVSIEHLILRHSPDAKQVC

SEQ ID NO: 223095 - protein, 502 aa, Zea Mays
MVRGLLAELAVVEDEIFYLEKKVDDLRLRLRREQKWTDHCILHHQQQQQQHNRQQRHSVSVSRRELQLQQAGAQQLPRLPCPGPGSDEAPERESKASVGSASAKGDETEHVVGRRSSHCHSSSSSSENPYRPTPPERKTYCMASSPNRLSEELVRLTVTIFHKLNKTATATAADAGELDLELEPSGGGASSSKLNISCIGPRSLVPRVSASVNGAAAAMSPLKSRRAAAKGGGAETGSAAGCQRRFVEFTRGSVDVSRISLCLVDIKNLRGLMQKLCAVDPSLMTNKQKLAFWINVYNFCVMHAFLQHGLPPSPEKLLALLNQASVNVGGTVLNVVSIEHLILRHSPDAKQGIMGDDGQTDLLHSYGLGYPEPNVVFALCRGSRSSPALRVYTAEDVSNELERAKVEYLESSVRVAGRKQRAVVVPKLLHWHMRDFADDAASLLEWVHSQLPRASGPLRRAIREVLGANMGSGSRAPTPAPAAKMLEVEPYDADFCYLLPVW

SEQ ID NO: 223096 - protein, 68 aa, Zea Mays
MDAQQQLDLVMRHQSMATVCESEDALGSSESDPARPARPRGKRSRAAEVHNLSEKVGAGGGGAGSTRR

SEQ ID NO: 223097 - protein, 391 aa, Zea Mays
MARRLAYTTALTTLFSYGLLFAFGQLRDLFRHLLGCFRPNKDDDVKQGYAPICVGLEDFFVRRLYLRVQDCFGRPIASAPDSWFDVVERTSDDNNKTLQRTSKTTRCLNLTSYNYLGFAAADEYCVPRVVDSLKKYSASTCSARVDGGTTKLHTELEELVARFVGKPAAVVFGMGYVTNSATIPCLIGKGGLIISDSLNHNSIVNGARGSDATVRVFRHNCPAHLEKVLREQVAGGQPRTHRAWKKIVVVVEGIYSMEGELCKLPEIIAVCKKYKAYTYLDEAHSIGAVGRSGRGVCELLGVDPADVDVMMGTFTKSFGSCGGYIAASEEIVQHLKHTCPGHLYATSMSPPAVQQVPRNWRASVRTATSSGQSSRRWALRFLVTTTLLSCP

SEQ ID NO: 223098 - protein, 347 aa, Zea Mays
MEIHATSLISRLEATEAKSKSHESDSLALREEIRLLTDNLESIRSEALSREKEVGILEQEKNHLEEKYLSQCKKFDETDIRCKEAEREAKRATELADVARVEASAAQKDKGEAQRLAMERFALIERMERQVEALERDKAKLVEEIERLHQSEKDAVSKVALLERNVGEREKEIDEMLKQNNQQRSSTVQVLESLLATEREARAEANKRAEELSLMLQATQGKLDMLQQETTLDSKLKTSARRLRGDATESVHDMDIDGDNGRRRKRSKSTTSPFKNNHTEDGGSVFIGEDTYNGSQQGTESEDYTKFTVLKLKQELTKHGFGAQLLQLKNPNKKDIVALYEKHVIGK

SEQ ID NO: 223099 - protein, 52 aa, Zea Mays
MLLQQERSRRSSGLGLALFLTFRRYRLSTAIYLMNLFQLTRKTPIYVLTSVL

SEQ ID NO: 223100 - protein, 56 aa, Zea Mays
MSRGRLQSRRRTCGSRGATMRSSIRSRWRLLIDFMAPRMDFSLIYIYILFCKSSAM

SEQ ID NO: 223101 - protein, 104 aa, Zea Mays
MIHRSAQLPRHRLPASGSPAPLLAASGLSGVGSARRRRCRSDHRPSAFHHPLLRSQGFVRWFAKASNVHRLLVLDPSGLYSVLLYDQLTIHYLRLMALINNSKN

SEQ ID NO: 223102 - protein, 228 aa, Zea Mays
MTWCNGFNDVRAAVESSLSPAAAAVGKTAAASLAVLVKMCPSCGHRAQYEQKSTTIQDLPGLPAGVKFDPTDQELLEHLEGKARPDTRKLHPLVDEFIPTIDGENGICYTHPERLPGTYAPCEQGRACSALLPPAVQGVHDGDEEAAEGAQRRRRRRDAVAQDGQDQAGAVQRQAPRVQEDPGALHKLRQAAQAREDQLGDAPVPPRLRRGGARRRARRLQGLLPDAS

SEQ ID NO: 223103 - protein, 214 aa, Zea Mays
MVDAGRLPPLGPAAMFMQGTKRMPGTAVTKSVVATEPGGKKREEIFVDIIERISVTFSSSGYILTSEIDGTIQMKSYLTGNPEIRLALNEDLSIGRTGSSSYDYRSSSGGGTVILDDCNFHESVHLDSFDIDRTLTLIVGGSEHTLRAKLTFSQESHGNITKEAGPVNMNFTIPMYNASKLQVRYLQIAKKSKAYNPYRWVRYVTQANSYVARL

SEQ ID NO: 223104 - protein, 433 aa, Zea Mays
MAVSSMLNGKHPLAALNRMTNNMTSFLKHSNILDKIPEDTLKWKMKLIKRAASYANYRLQSVQADVLLLVSCADRLLPSKDEADRLQRLLPKCKIYFFEKHGHSLLLEYGVHVASIIKCTDLYRHSRQHHRVFDYIPPSATELNEVDKATCDLRFRTCPAMYSTLEDGTVVRGLAGVPQDGPVLLVGNHMLLGIELISLAAEFLRLKRVVVRGIAHPLLFPNKKRAWSEGHDFFDFLNLWGGVPMRYKSIYDLLRAGEFVLLYPGGHREALHCKGEEHRLFWPTQTEFVRLAAQFNATIVPFGVVGEDDLLELLCTFDDIRNAPFGKEMIQAYSNHLKLRDVDHEVIFPGMYLKMPGRFYYQFGKPIPTRGRQDVLTDKHAAHHLYMHVKSEVERIISYLLEKRVEDRYRNLIPRMLYQAARGPTCEVPAFDP

SEQ ID NO: 223105 - protein, 583 aa, Zea Mays
MPVAALRPPPVAVGAGRRSARLQARFALRASSLEASAAVTVTVNGSAEAAVERKEKVQEDKDNEGLPVKEEQERGLEVLYDDGFGSVTVKDYFAAAKVLCRDDGGPPRWFSPVECGHPAVDQAPLLLFLPGMDGVGTGLILHHKSLGKVFEVRCLHIPVNDRTPFEGLVQIVENLIKHEHDLSPDRPIYLVGDSFGGSLALAVAARNPQIDLVLILVNPATSFAKTPLQPVLPLLESVPSEFHATVPYLLSFVMGDPLKMAAVSIENNLSPPETLQKLSDSLTSMLPLLSELSDIIPRDTLLWKLKLLKAGAAYANSRLHAVQAEVLLLASGKDNLLPSGEEADRLFKALKNCRVRYFKDNGHTLLLEDGVNLLTVIKGANMYRRGRQRDSVTDYLPPTLSEFRQTFDVDHRLFHLALSPVMMSTLKDGKIVRGLAGVPDKGPVLFVGYHALMGIELSPLYEEFLREKRTVVRGMAHPFLFGKKFESSRQETSRFDTVSMYGGLPVTPINMYRLFQRNQFVLLYPGGVREALHRKGEEYKLFWPDQPEFVRMAARFGVTIIPFGCVGEDDVLEVHVLLIRLFN

SEQ ID NO: 223106 - protein, 509 aa, Zea Mays
MAGRARARRFVLAGALMIAWLLCLLPRATAAAVRRSDFPPSFLFGTATSSYQIEGAYLEGNKSLSNWDVFSHVPGRIEDGSTGDVADDHYHRYEDDIELMHSLGTNAYRFSISWARILPRGRFGEVNPAGIAFYNRLIDSLLLKEPFVTLSHYDIPQELEDRYGAWLGGAEARRDFGHLADVCFAAFGDRVRHWATFNEPNVAVTRGYMLGTYPPGRCSRSCARGNSDAEPYVAAHNVVLAHAAAVQIYKTKYQSKQKGLIGIVMSTVWFVPLTDAPADRLATERALAFDVPWFLDPIIYGDYPPEMRRLLGSRLPTFSPEERRTLGYGLDFIGINHYTTLYARDCMISPGYCPSGQEFHQSLAAYTGERDGIPIGPPTAMPTFYVVPDGIEKMVTYIMNRYSNLPMFITENGYAQGGDGYTTRAEDWLDDQGRIQYLEGYLAKLAKVISDGADVRGYFIWSLIDNFEWLYGYTLRFGLHYVDYQTQERKPKSSALWYKRFLQSSLEAQ

SEQ ID NO: 223107 - protein, 522 aa, Zea Mays
MAGRARARRFVLAGALMIAWLLCLLPRATAAAVRRSDFPPSFLFGTATSSYQIEGAYLEGNKSLSNWDVFSHVPGRIEDGSTGDVADDHYHRYEDDIELMHSLGTNAYRFSISWARILPRGRFGEVNPAGIAFYNRLIDSLLLKGIEPFVTLSHYDIPQELEDRYGAWLGGAEARRDFGHLADVCFAAFGDRVRHWATFNEPNVAVTRGYMLGTYPPGRCSRSCARGNSDAEPYVAAHNVVLAHAAAVQIYKTKYQSKQKGLIGIVMSTVWFVPLTDAPADRLATERALAFDVPWFLDPIIYGDYPPEMRRLLGSRLPTFSPEERRTLGYGLDFIGINHYTTLYARDCMISPGYCPSGQEFHQSLAAYTGERDGIPIGPPTAMPTFYVVPDGIEKMVTYIMNRYSNLPMFITENGYAQGGDGYTTRAEDWLDDQGRIQYLEGYLAKLAKVIRCIHLVSNFTVTAPMSVATSSGLSLTISSGYMGTPSASAFTTLTTKRRRESRSRRRCGTNGSSRVHLKLNR

SEQ ID NO: 223108 - protein, 61 aa, Zea Mays
MALLLRLAAPSVPPRRSSGLRALPRVVLPEVVSKQSFLRLLVDSTARIMASMHLVYMDMIS

SEQ ID NO: 223109 - protein, 520 aa, Zea Mays
MIPQARGTTSRGPNLQFHAETCHLLLRYEPVGSQVRFTLGSLARSLARTDNLGGRLAATAHLCCGLPPLFAPAPVVGEPRPSTLSPMASAAARGAAVRSPLLVHHRVPLVHPSGGGSLRVGWPGIGPGREGRRRGAPVGARVFARYSQAQDFSTRLQDRAGELPKLVEDLIQTSISTGPRGAFRMAQGIQAVLGVGGEWLNDLSKTANTSAGIPSQMQLGLLSPLYLRRLFERMGATYIKLGQVGIVKDIKESMLEEVDFRKEAANIQAFQGYIDAMGFDRQAKAPFVYQHCSTKRVLTMERLYGVPLTDLDSIRSLVPDPELTLVTALNVWFGSLISCESFHADVHAGNLWLLRDGRIGFIDFGIVGRISPRTWAAMEVFLASFATEDYDAMASALSEMGATGNDINTNEFAKDLRKIFSSIQDLDTEIIVATARTPDATAVSANVVLDERQMNALFLDLVRVSESYGLKFPREFALLMKQLLYFDRYTRLLAPSMNMLRDERINISTNRQPRRTDRFQ

SEQ ID NO: 223110 - protein, 360 aa, Zea Mays
MIPQARGTTSRGPNLQFHAETCHLLLRYEPVGSQVRFTLGSLARSLARTDNLGGRLAATAHLCCGLPPLFAPAPVVGEPRPSTLSPMASAAARGAAVRSPLLVHHRVPLVHPSGGGSLRVGWPGIGPGREGRRRGAPVGARVFARYSQAQDFSTRLQDRAGELPKLVEDLIQTSISTGPRGAFRMAQGIQAVLGVGGEWLNDLSKTANTSAGIPSQMQLGLLSPLYLRRLFERMGATYIKLGQFVASAPTLFPAEYVEEFQKCFDQAPAVPYDVIESILREELQRPLDSVYEYIDPVPIASASIAQVHGARLKSSQKDVVIKVLKPGIEDTLVADLNFIYVVARVLEFLNPELQRTSLAL

SEQ ID NO: 223111 - protein, 835 aa, Zea Mays
MAAFSFICHYMFTFYSKNRDTYVKDMVGESSNDRNDRAIRVAARWYQSHLGESVKVLLITNDRDNKRKAIEEGLNAETVESYVRSLAQPGLLDLVVVPTSGDVSMEDVDDHRPSKKKVIYNEHKPMSEITSGLRCGIYHQGKLRVNRYNPFEAYVGSESIGDEIVIRGRSNMNRAFDGDIVAVELLPQDQWHESKSFIADDDEEEEDVHLVPNSADDAPRNTNSTQSTVGSSAPSISSRPVGRVMGIIKRNWNSYCGSLQPMPMPAGSGGVAHALFVSKDRRVPKIRIQTRQLENLVNKRIVVAVDSWDVLSRYPSGHYVRTIGDIGDKETETEVVLIENDINTRPFSTQVLACLPPLPWTLSPEDLANPNRQDLRQVRVFSVDPPGCRDIDDALHCTLLPNGNFEVGVHIADVTNFVHPGTPLDEEAAQRGTSVYLVGQRIDMLPKPLTEDVCSLRADVERLAFSVIWEMTPDADVISTRYTKSVIKSCAAMSYVEAQARMDDSRLVDPLTVDLRNLNSLAKIMRQRRCERGALTLASAEVKFEIDSETHDPLDIGIYQIREANQMIEEFMLAANVSVAEKILKHFPLCSLLRRHPSPTKEMLEPLLRTASSIGLNLDVSSSKALAESLDNAKSNDPYFNKLIRILATRCMTQAVYFCSGDLTFSEYYHYGLAASLYTHFTSPIRRYADVVVHRLLAAALNIAKLPPIFQDGPQLTGIADNLNYRHRNAQMASRASVELHTHIYFKTRPTDTEARIVKIKANGFIVFVPKFGIEGPIYLTPKGDKGGDWVVDEVHQRVTKPGTNISYAILQTVRIHMEVVEPQPHRPKLQLTLI

SEQ ID NO: 223112 - protein, 870 aa, Zea Mays
MLQSKSFVKKTKQGRIQKVVREHYLRDDIYCGFVPCTACAAAAERKLGAAAAAILVVDTNVVLHQIDLLENPAIEDVVLLSVVLDEVKNKNLSVFNRIKALCINKARRFYVFANEQHRDTYVKDMVGESSNDRNDRAIRVAARWYQSHLGESVKVLLITNDRDNKRKAIEEGLNAETVESYVRSLAQPGLLDLVVVPTSGDVSMEDVDDHRPSKKKVIYNEHKPMSEITSGLRCGIYHQGKLRVNRYNPFEAYVGSESIGDEIVIRGRSNMNRAFDGDIVAVELLPQDQWHESKSFIADDDEEEEEDVHLVPNSADDAPRNTNSTQSTVGSSAPSISSRPVGRVMGIIKRNWNSYCGSLQPMPMPAGSGGVAHALFVSKDRRVPKIRIQTRQLENLVNKRIVVAVDSWDVLSRYPSGHYVRTIGDIGDKETETEVVLIENDINTRPFSTQVLACLPPLPWTLSPEDLANPNRQDLRQVRVFSVDPPDVCSLRADVERLAFSVIWEMTPDADVISTRYTKSVIKSCAAMSYVEAQARMDDSRLVDPLTVDLRNLNSLAKIMRQRRCERGALTLASAEVKFEIDSETHDPLDIGIYQIREANQMIEEFMLAANVSVAEKILKHFPLCSLLRRHPSPTKEMLEPLLRTASSIGLNLDVSSSKALAESLDNAKSNDPYFNKLIRILATRCMTQAVYFCSGDLTFSEYYHYGLAASLYTHFTSPIRRYADVVVHRLLAAALNIAKLPPIFQDGPQLTGIADNLNYRHRNAQMASRASVELHTHIYFKTRPTDTEARIVKIKANGFIVFVPKFGIEGPIYLTPKGDKGGDWVVDEVHQRVTKPGTNISYAILQTVRIHMEVVEPQPHRPKLQLTLI

SEQ ID NO: 223113 - protein, 52 aa, Zea Mays
MEAARQSLIAISQSVPEVQGEAYLHLQPVARRAAYDVPSQQRRRLKSRVCVL

SEQ ID NO: 223114 - protein, 67 aa, Zea Mays
MASPTAAAAPAEFTQMEAARQSLIAISQSVPEVQGEAYLHLQPVARRAAYDVPSQQRRRLKSRVCVL

SEQ ID NO: 223115 - protein, 495 aa, Zea Mays
MGGDGADAHGASAQLESVLTSSSSSFPWAAAAIELRLLTRLAAPAVVTYMINYLMSMSTQIFSGHLGNLELAAASLGNTGVQIFAYGLMLGMGSAVETLCGQAYGAHKYEMLGIYLQRSAVLLCATGVPLAVIYAFSEPILVFLGQSPEIARAAAIFVYGLIPQIFAYAINFPIQKFMQAQSIVLPSAYISTATLALHVLLSWVVVYKVGLGLLGASLLLSLSWWLIVAAQFAYIVVSPRCRHTWTGFSFQAFSGLWGFLKLSAASAVMLCLEAWYYQVLVLIAGLLPNPELALDALSVCMTINGLVFMISVGFNAAASVRVSNELGAGHPKSAYFSVWVVTAISTIISIMLAIVILCLRNYISYIFTEGEVVSNAVADLCPLLAITLILNGIQPVLSGVAVGCGWQEFVAYVNIGCYYIVGVPLGAILGFVFKFGVKGIWSGMIGGTFMQTAILLWATLRTDWNKEKRLHKWEDQKTTTTEPLLAGVVGNGNAN

SEQ ID NO: 223116 - protein, 658 aa, Zea Mays
MEGHVAMGWKDPNPGQESSMVFQSRAVRPDTVEGHSNEDVEAGFEKHGLSAALNSPQHEGRSLPLTPQFGQNSSPGSSLAERMQARAGFKVPKLNMPFSTVAGDDSSVPGAPSPYLTIPPGLSPATLLESPVFISNALGQASPTTGKLFLFGSTNDNDPIRPGGPPVGDGTDAFSFKPLDLKSSHYTAEVMKSSVKTEAKTQAVQEANLLGQLNQQNHDGQTNMNSDGARDSKLSRLASGTGAGNEHASPPDYGQRAEEADAREDYPAAMAVTAPAEDGYSWRKYGQKQVKHSEYPRSYFKCTHPNCLVKKKVERSHEGHVTEIIYKGTHNHPKPTQSRRPGAGAHPLGGGAQADAADNLQGSQANAAEANQAWRAGVQDGVDATSPPSVPGELCDSAASMQVDCAARFGSPEGADVTSAVSDEVDGDDRVTLTHGGANAAEGDELESKRRKLESYAIDMSTASRAVREPRVVIQTTSEVDILDDGYRWRKYGQKVVKGNPNPRSYYKCTQPGCTVRKHVERASHDLKAVITTYEGKHNHEVPAARNSGHPSAAAAPGAGGPRRQEHPSVHDGLMRQHLGGCGVPFGLPPPPPPPRDPLAPMRNYPTYGFTALGAGSTSLPSLPMLPVLAPSSLHQHPLLRHRQAVQAAGLAWRPRPT

SEQ ID NO: 223117 - protein, 456 aa, Zea Mays
MEGHVAMGWKDPNPGQESSMVFQSRAVRPDTVEGHSNEDVEAGFEKHGLSAALNSPQHEGRSLPLTPQFGQNSSPGSSLAERMQARAGFKVPKLNMPFSTVAGDDSSVPGAPSPYLTIPPGLSPATLLESPVFISNALGQASPTTGKLFLFGSTNDNDPIRPGGPPVGDGTDAFSFKPLDLKSSHYTAEVMKEQNTQSSVKTEAKTQAVQEANLLGQLNQQNHDGQTNMNSDGARDSKLSRLASGTGAGNEHASPPDYGQRAEEADAREDYPAAMAVTAPAEDGYSWRKYGQKQVKHSEYPRSYFKCTHPNCLVKKKVERSHEGHVTEIIYKGTHNHPKPTQSRRPGAGAHPLGGGAQADAADNLQGSQANAAEANQAWRAGVQDGVDATSPPSVPGELCDSAASMQVDCAARFGSPEGADVTSAVSDEVDGDDRVTLTHGGANAAEGDELESKRR

SEQ ID NO: 223118 - protein, 126 aa, Zea Mays
MPMTAVPRTGPGCLGSPPAQALSSSLAGVQGAPKRLGASKPSWIVRTESNVRRERAKRPDPPCTICKGTGRIDCRNCFGRGRTNHADVAMLPNGEWPQWCRICGGSGLDYCLRCHGTAFITKAMER

SEQ ID NO: 223119 - protein, 170 aa, Zea Mays
MPMWPCFRTANGHNGVEFVVVVDWITASGAMELIFWRKGFGSPCPCVRLGLFTCFSLASSWRRKTEKGERPRGTSTTERPPRQQPHLLFSLTAFWQQGHSKLWELQNMEELEICFGSITSIGFDHWSPHMATASTIAEQGGTPHEAINCDTQEDGDTNECEVSPVNPNGK

SEQ ID NO: 223120 - protein, 104 aa, Zea Mays
MEMALQDAMRVCNPDVNTPFQSIEDAVNRLHMARRCLVSTDHTMTRGPHLLIPRLCMQVVEKLMEGADSTYLILFHWLSAIHVFLICRDVTYFVGTQCLLTSST

SEQ ID NO: 223121 - protein, 169 aa, Zea Mays
MGNCQAAEVATVLLQHPGGRVERLYWSTSAAEVMRANPGHYVALVTLRVAEDRQDAPGGQRRTVRLTRVKLLKPKETLLLGHVYRLITTQEVTKAVQARKQDKQRKAQQQLLEPRQGQGVASGAAAEEEDDDDEAALDASLDQDNGSRSSSARHRQWRPSLQSIDEATT

SEQ ID NO: 223122 - protein, 564 aa, Zea Mays
MIMMICSAACLGVRVPARRSTERCHLCSPSPSPSPSPSNVTRLGARGMNSRRQEQQARRTIRALLAKNGALCTGVWRCRSGGADIASRAPTMATTAVSVDEKLDKLRAEVAKLDQISENEKSGFISLVSRYLSGEAEQIEWSKIQTPTDEVVVPYDTVASPPEDLEETKKLLDKLVVLKLNGGLGTTMGCTGPKSVIEVRNGFTFLDLIVIQIESLNKKYGCNVPLLLMNSFNTHDDTQKIVEKYSNSNIEIHTFNQSQYPRIVTEDFLPLPSKGKSGKDGWYPPGHGDVFPSLNNSGKLDILLAQGKEYVFVANSDNLGAIVDIKILNHLINNQNEYCMEVTPKTLADVKGGTLISYEGRVQLLEIAQVPDEHVNEFKSIEKFKIFNTNNLWVNLKAIKRLVEAEALKMEIIPNPKEVDGVKVLQLETAAGAAIRFFDKAIGINVPRSRFLPVKATSDLLLVQSDLYTLVDGFVIRNPSRANPANPSIELGPEFKKVANFLARFKSIPSIVELDSLKVSGDVWFGSGITLKGKVTIIAKPGVKLEIPDGDVLENKDVNGPEDL

SEQ ID NO: 223123 - protein, 654 aa, Zea Mays
MGTGGDGSKAGPALPLEALLALGLDQRTAENALVNAKVTANLASVIAEAGIKECDKSVGNLLYAVATKYPTNALVHRPVLISYVLSTKIKNPAQLDAALSFLTNTGPDSLDVVKFEEACGVGVVVSIEEIKSTVTDVLEENMEAIKEQRYHINVGTLCGQVRKRHPWGDAKAIKEEIDKRLAEILGPKTEADNIKPVKKKKEKPAKVEEKKVAVATAAPPSEEELNPYTIFPQPEENFKVHTEIFFSDGNIWRAHNTKEILEKHLKATGGKVMTRFPPEPNGYLHIGHAKAMFIDFGLAKERNGHCYLRFDDTNPEAEKKEYIDHIQEIVHWMGWEPYKVTYTSDYFQALYEHAVELIQKGLAYVDHQTAEEIKEYREKKMDSPWRGRPIEESLKLFEDMRRGLIAEGAATLRMKQDMQNENKNMSDLIAYRIKFTPHPHAGDKWCVYPSYDYAHCMVDSLENITHSLCTLEFDIRRPSYYWLLVALGLYQPYVWEYSRLNISNTVMSKRKLNRLVTEKWVDGWDDPRLLTLAGLRRRGVSSTAINSFIRGIGITRSDNSLIRVDRLEYHIREELNKTAPRTMVVLRPLKVVITNLEEGKVLDLDGKMWPDASDTDASSHYKVPFSRTVYIEKTDFRLKDSKDYYGLAPGMRSP

SEQ ID NO: 223124 - protein, 95 aa, Zea Mays
MTQNKVDAQQGFTLQDARLCIEAKTSCVLCCVRSLELYKSLSCPWLSISFSELRKTVSISGLLRTAGRGKPEPKTLFRTHLLCSRLQHPRRSENA

SEQ ID NO: 223125 - protein, 696 aa, Zea Mays
MMMQLAKSSWILHLNCNKRRVAPIAALLSAVLHPAIFCNLEMHQTNEKGPGPLKWFVENLLNEGSKSPRTIRLAALHLSGLWLMYPKTLRFYMEELKLLSLYGSVAFDEDFEAELSENHEARFEVSMLAQSPDREFTEVFINTELYARVSVAVLFHQLWKQIKEHSILETEEALECGKLFLLELLDSAVNSKDLSKELYKKYSSVHRRKVRVWQMICVLSHYVEDDIVGEVTSSIHICLYRNNLPAVRQYLETFAILLYLKFPTLAEEQLIPIFHDKGMRQQALSSYVFIAANVILHSRQSVQIYHLNQLLPPILPFLTSHHHSLRGFTQLLVHSVLSRLWPTLHPETSEDAVFERRCFQELKDYLAENSDCVRLRVSIEGFLDVFDPNASGTPPGIFSARPEVSDFECVPVSVMERVIEFLNDVREDLRQAIANDTVTIKNEDLAVGEHHKSDESVSEMVKTGQEVLDFQKKITPHRGDSEQALNLNTRGHSGVGDEYISRIISEMEEDDQVFDLALEARLHAAETIKQSRQELIVVASLVERIPNLAGLTRTCEVFRAAGLVVADKSVLQDKQFRLISVTAEKWLPVTEVPVDSVKAYLERKRGDGYSVIGLEQTANSMPLDRFGFPDRTVLVLGREKEGIPVDIIHILDACVEIPQLGRGEVAQCPCQRRHSRLGVHASTTQSALACCLFLLH

SEQ ID NO: 223126 - protein, 570 aa, Zea Mays
MLAQSPDREFTEVFINTELYARVSVAVLFHQLWKQIKEHSILETEEALECGKLFLLELLDSAVNSKDLSKELYKKYSSVHRRKVRVWQMICVLSHYVEDDIVGEVTSSIHICLYRNNLPAVRQYLETFAILLYLKFPTLAEEQLIPIFHDKGMRQQALSSYVFIAANVILHSRQSVQIYHLNQLLPPILPFLTSHHHSLRGFTQLLVHSVLSRLWPTLHPETSEDAVFERRCFQELKDYLAENSDCVRLRVSIEGFLDVFDPNASGTPPGIFSARPEVSDFECVPVSVMERVIEFLNDVREDLRQAIANDTVTIKNEDLAVGEHHKSDESVSEMVKTGQEVLDFQKKITPHRGDSEQALNLNTRGHSGVGDEYISRIISEMEEDDQVFDLALEARLHAAETIKQSRQELIVVASLVERIPNLAGLTRTCEVFRAAGLVVADKSVLQDKQFRLISVTAEKWLPVTEVPVDSVKAYLERKRGDGYSVIGLEQTANSMPLDRFGFPDRTVLVLGREKEGIPVDIIHILDACVEIPQLGRGEVAQCPCQRRHSRLGVHASTTQSALACCLFLLH

SEQ ID NO: 223127 - protein, 1758 aa, Zea Mays
MASPPEREVAALESCFRALSAADAVPAVVDCVLASSASSSPSQLFHALLRSFPPSQREQGLQAQSDRHAAICHAAALRHLLAQLDSPPKVREALRLLLWRVFLPLLQDIIEPTHPAHFDLVIEMMCNAVSDTGCWDLLGATIVSFCIRSSVVAMGLSAADANSILYQSIMEADFPAETLSCLLPLSNSSSVLASLLVDMLERRRTIPTSQEGAADLAALVQNLTWDLAKLVLKMFTHAQEYRSCATRVLLQPVLISLTDVSSVTVSFGAVQHKLSRFGFLECIWNSCISLFPLGPGERLDAYRILSVYFSTLKSGHQAAVLGVGIVQEFDLKNVSEFWDELRRGLVDKDSLVRKQAFYVLTISLSIFTSSSGNDSCQHFSSRSPAALPAQIKANAGETKRERWANKEAKSLGVGEMDQSGENCSNGQDRWKVFLLLYEMLQEYGTHLVEAAWTHHVVRLFECTLQNDYLNHTSCGAFHAQMESWERILYWMAVLWERGFSHENPQVRCLVMQSFLDIAWERYKVCTHIIPRGFVLGPLIRGLNDVVHHKDFGIGGAYSSKTIKDAQRFFRTYTHNLARCDRIHLVWSLASAAKQDSFGRAGLMTLASCVASCTRQSETNDVPCAISGKAVTKCDGCVPTEVRPTDLLDVLWILSERSKQHFNPKYRLKVCEQVIQVATSLINATEIPLNQLLHFIATIPREFTDYIGPLRVVVQKWFFQKEECSPGDTLLSKLIDFSATFVSQKRNEGSNVFDDEDVDAWEAEARRWARTLLLVTEEEEHLKRIFRFLEAYGYKLSEQCPSGDFIPIKFFIIVLSFIEELELRQRKLVCRSNTILRGSDTLNGLVLDDLNKMFTESLLLILENMVAFSKLSCSIFWLDVDNKDLPPSIKGKLGGPSQRRLATSITSSVLQGIWSMRCVSSVASWCNPYNSDDSVSSAFSVLWDFYLNVTHHSTIANEIGAELHLAAYEALAYVLAVLSTASSTQFLDFVEAKQTDQAHKFSLDILVTTFLDNINHLLTEGTLTRSRRAVLMTWKWLCMDSLLSISSCYSDNESQMKRLEPLFSDSTLRCIFLDIIESLENTGENSVLSILRCVRSVLRLLHLNEGNTIFSSLGISYEFVENLLNEGSKSPRTIRLAALHLSGLWLMYPKTLRFYMEELKLLSLYGSVAFDEDFEAELSENHEARFEVSMLAQSPDREFTEVFINTELYARVSVAVLFHQLWKQIKEHSILETEEALECGKLFLLELLDSAVNSKDLSKELYKKYSSVHRRKVRVWQMICVLSHYVEDDIVGEVTSSIHICLYRNNLPAVRQYLETFAILLYLKFPTLAEEQLIPIFHDKGMRQQALSSYVFIAANVILHSRQSVQIYHLNQLLPPILPFLTSHHHSLRGFTQLLVHSVLSRLWPTLHPETSEDAVFERRCFQELKDYLAENSDCVRLRVSIEGFLDVFDPNASGTPPGIFSARPEVSDFECVPVSVMERVIEFLNDVREDLRQAIANDTVTIKNEDLAVGEHHKSDESVSEMVKTGQEVLDFQKKITPHRGDSEQALNLNTRGHSGVGDEYISRIISEMEEDDQVFDLALEARLHAAETIKQSRQELIVVASLVERIPNLAGLTRTCEVFRAAGLVVADKSVLQDKQFRLISVTAEKWLPVTEVPVDSVKAYLERKRGDGYSVIGLEQTANSMPLDRFGFPDRTVLVLGREKEGIPVDIIHILDACVEIPQLGRGEVAQCPCQRRHSRLGVHASTTQSALACCLFLLH

SEQ ID NO: 223128 - protein, 58 aa, Zea Mays
MQRKRKMLLSPQRARPPRRRKRRTRVQRREEKKHKKQPRGQRRLPVQDLMKKIPLLWT

SEQ ID NO: 223129 - protein, 196 aa, Zea Mays
MGQMMKPRKTEITEKLRQEINKVVNRYIDEGIAELVPGVLFIDEVHMLDIECFSYLNRALESPLSPIVILATNRGICNVRGTDMTSPHGIPVDLLDRLVIIRTETYGPTEMIQILAIRAQVEEIDIDEESLAYLGEIGQQTSLRHAIQLLSPASVVAKTNGREKMCKADLEEVSGLYLDAKSSARLLQEQQERYIT

SEQ ID NO: 223130 - protein, 242 aa, Zea Mays
MGRGKVQLKRIENKINRQVTFSKRRSGLLKKAHEISVLCDAEVALIIFSTKGKLYEYSTDSCMDKILERYERYSYAEKVLISAEYETQGNWCHEYRKLKAKVETIQKCQKHLMGEDLETLNLKELQQLEQQLESSLKHIRTRKSQLMVESISALQRKEENKVLQKEKALLLHAARGEAERPAAASATGPNSTADQFVFHVLHVKGSCPNNKCQHLPCGSRREGGGRGSSAAAGSRWTATMDA

SEQ ID NO: 223131 - protein, 105 aa, Zea Mays
MSSLKLNPRRSSLVYHIQVPLIGGLLEFSCMKCCMDVHLFEERTGKGHFIISCTKTLHFQVAFREIPLLDLVQVLLQTISSNIPFLKIYTGHSSVAWSPQSLMFH

SEQ ID NO: 223132 - protein, 295 aa, Zea Mays
MALAHASAMFPPSSPSHKTWEDPSFFKWRKREAHVPLRSQDTLEAALKYWHERRNVNYHNADTAVWNDDAVRGALESAAFWSKGLPYAKSLSGYWKFLLSPSAESIPERFYYAHFDDSNWSGLPVPSNWQMHGFDRPIYTNVTYPFPLNPPFVPADNPTGCYRTVFHIPKEWKGRRILLHFEAVDSAFFAWVNGVLVGYSQDSRLPAEFEITDCCHPCDSDKENVLAVQVMRWSDGSYLEDQDHWRLSGIHRDVLLLSKPQIFITDYFFKATLDENFSLADIEVTLIPILAGLCE

SEQ ID NO: 223133 - protein, 130 aa, Zea Mays
MLELLNQLDGFSSDERIKVIAATNRADILDPALMRSGRLDRKIEFPHPSEEARARILQIHSRKMNVNPDVNFEELARSTDDFNGAQLKAVCVEAGMLALRRDATEVTHEDFNEGIVQVQAKKKSSLNYYA

SEQ ID NO: 223134 - protein, 592 aa, Zea Mays
MKSVYRGFDEERGVEVAWNQASLADVLRSPDAVQRMYSEVQLLSELRHDGIIGFHASWVDVPGRSFNFITELFSSGTLRSYRLRYPRVNLRAVRSWARQLLGGLAYLHARDPPVIHRDLKCDNIFVNGHQGHVKIGDLGLAAVLRRGGAAHSVIGTPEFMAPEMYDEEYDERVDVYAFGMCMLEMLTVEYPYSECTNPAQIYKKVTAGRLPDAFYRVDDDDARRFIGRCLVPAANRPSAAELLLDPFLLHHHHHAAAAAGTVPVPSPLPTTAVAAGAPPPSTCSSSAADDDVVSALDDDDEVDVPPRNDMTITGKLNAEEDTIFLKVQIADEASGHARNIYFPFDMASDTAAEVAQEMVKELDITDRHASEIAAMIQQEIGRLLPGRAQQHEYTYASRGGDYDDEERPPPFYYLSSSPASSHGSHCGVGPYAFGGFSGPCGSAWTKGAGHEEAPASSSGSSKTRFGGGGSGSAAALARQLERQCSVSPQHAGRPRRREDDDDRAGRRRRMTRNRSMVDMRSQLLHRTLVEELNRRLFFNTVGAVENIGFRAPTTTAASSSSSARGGLDRGRRPGGGGKQRQLDDKEQQYFML

SEQ ID NO: 223135 - protein, 472 aa, Zea Mays
MAIQEHSYYGSFGYHVTNFFAPSSRFGTPEELKSLIDRAHELGLLVLMDVVHSHASSNTLDGLNGFDGTDTHYFHSGPRGHHWMWDSRLFNYGNWEVLRFLLSNARWWLEEYKFDGFRFDGVTSMMYTHHGLQVTFTGNFNEYFGFATDVDAVVYLMLVNDLIHGLYPEAVTIGEDVSGMPTFALPVHDGGVGFDYRMHMAVADKWIDLLKQSDETWKMGDIVHTLTNRRWLEKCVTYAESHDQALVGDKTIAFWLMDKDMYDFMALDRPSTPTIDRGIALHKMIRLITMGLGGEGYLNFMGNEFGHPEWIDFPRGPQRLPSGKFIPGNNNSYDKCRRRFDLGDADYLRYHGMQEFDQAMQHLEQKYEFMTSDHQYISRKHEEDKVIVFEKGDLVFVFNFHCNNSYFDYRIGCRKPGVYKVVLDSDAGLFGGFSRIHHAAEHFTADCSHDNRPYSFSVYTPSRTCVVYAPVE

SEQ ID NO: 223136 - protein, 399 aa, Zea Mays
MVLMVQIHITFTVVHVAITGCGILAYLTMGTGKWWLEEYKFDGFRFDGVTSMMYTHHGLQVTFTGNFNEYFGFATDVDAVVYLMLVNDLIHGLYPEAVTIGEDVSGMPTFALPVHDGGVGFDYRMHMAVADKWIDLLKQSDETWKMGDIVHTLTNRRWLEKCVTYAESHDQALVGDKTIAFWLMDKDMYDFMALDRPSTPTIDRGIALHKMIRLITMGLGGEGYLNFMGNEFGHPEWIDFPRGPQRLPSGKFIPGNNNSYDKCRRRFDLGDADYLRYHGMQEFDQAMQHLEQKYEFMTSDHQYISRKHEEDKVIVFEKGDLVFVFNFHCNNSYFDYRIGCRKPGVYKVVLDSDAGLFGGFSRIHHAAEHFTADCSHDNRPYSFSVYTPSRTCVVYAPVE

SEQ ID NO: 223137 - protein, 71 aa, Zea Mays
MAEDERIKYQGLHHGSSYLEHLNFLSAIRAQGASGPSVNLSDGLLSVAVGVAGQLSIEQGRFVTMEEVLGL

SEQ ID NO: 223138 - protein, 173 aa, Zea Mays
MEGNHRMGMVAIDSATGTVADCGCEVEISECEPLPDGRFYLEVEGTRRFRIVRSWDQDGYRVAEVEWLKDIPLPEGSQGRRELMELANGASELARAYIRHARDTVRTARRTRHLDLEGMPGPQDPEKFSFWLANLISLRPSDRLDTLRLRDTRERISSSISLLRDSEQGCRVQ

SEQ ID NO: 223139 - protein, 90 aa, Zea Mays
MELANGASELARAYIRHARDTVRTARRTRHLDLEGMPGPQDPEKFSFWLANLISLRPSDRLDTLRLRDTRERISSSISLLRDSEQGCRVQ

SEQ ID NO: 223140 - protein, 181 aa, Zea Mays
MSRFAGQTSTRPWVGMAGSGATASEPAAADVARDDATAAMRGAGAGAGTNASAISFGFAATAVLVSMFLLMAIFEHLIKPGLASSSSRGASGSHEDAADDDGEGRGHRHRMGGSPPARLRERDDAAPDKLCHLPKVLLCLLTSHYRNATVLSSCSPCIATYPRPAHLCSCGSIYPSMSHTL

SEQ ID NO: 223141 - protein, 806 aa, Zea Mays
MAGGGGGARGSDRAGAARSPTTTTAIQSTIQSIKEVVVGHSDADILDTLRESNMDPNETAQKLLNQDPFHEVKRKRDKKKESAGQKSFADSTAQVEQNSQWMKPHTQKMENDQRTPKQGQMSGPTREFRVVRDNRFQHGVVENRPELGHKGSANVQMSDRSTLVQSGRNRSPATTSGDQITHQNAMQNSNSDTTQGKRDAQGTTEKHVKPYLKNPQNEQHFPGSDPAHGSANVRIAGGTVGPAQRHVGVVNSTRQFAARSGSQMHAPSGSYANIQRGSFTSVGASGRYSAFMSRNIQQNQRPDTMFRGRPTVRSFVAQNTNRYHQGSTSNQKAVHPIKEWKPKSTKKSPTIDADNSIADATSPSASNCESANTLNVNELPEKISQTNLHEVEHVIIPEHLRVPEYEQTKLRFGSFTSGLDSEQVSASTPQDTEQPEHVQESVQQASEYDSLDAGPDDMDEQARSSQHLSTSTAEISLPPSEDSDRMSGQVENDDGLGLVQSDTPIGAADGDNTQITSTLTAFSAYSHEDPNMHTNNEAQLYGLVEPNVHPQVLASSSQALNPQIVSNSPVSISSQQQQHISQQQAAAQMYPQMHVQHFPNFMPYRQLYSPVYPMPMPNYSPNVPYPSNGNNYLQMPSGGSHLTAGSVKYGVSQFKPLPSGNPSGYGNYTHPAGFTMGSPGVIGATVGVDDVNRMKYKDNIYASTPQVETSDIWIQQAREMPPMQVPSYYNIPGQATPGAFVPNPANASFNATAQSSHVQFPGLYHPQQPPSIGFSVLCNLMQCDNLVRVLCNWVHLDDSLEQESTT

SEQ ID NO: 223142 - protein, 538 aa, Zea Mays
MYTMCSTCKSHESFPSNKIIFCKGPCKRACHEKCLEPPLNKSVLPTSSHGWLCKFCLCKVRILETINAHLGTSFTVKCHFEDIFKETTELIDSEDALDEDWLSEYSGDEDYDPDENEASGDCMDSGEKIMSDDSNGSGSPLYSPNDDIPDFISADLNVVEGFCHTNLDLGIDAVEDDFAQILTYQRPRRDVDYRRLNEEMFGKITGNEEQSEDEDWGHERRKKRTHSGVAGDNSVGFLNVISDEKSQKKGRKLFRIPPAAVEVLRRAFAENELPPRDVKENLSRELGISFEKIDKWFKNTRCAALRDRKAEGNSHNTAPSKSSKNKGKAGISGKTGRNGHVTGPCNNLRTNEEKTGISGKFDSGDNSCLVPFSEVINVPTRLPHNFEMRKMESTRSPARLHNKGGFLSATVQIKESTLLPTGKPCWQSEMSHPTTNEVSTSAQATTWIDAGACAEEQEPTPWVDIGVSDYQPFLDVIDDMCGLEWRLQRLKENMLSSSIDGQTAASESDKRNQTVVLVPTAELKEKLPHDGLFGHYCP

SEQ ID NO: 223143 - protein, 334 aa, Zea Mays
MEAWRSLLASFVLAVLAAQALVAVVESRTGPVEQASEGDDVKKPDCVPGMDPRSFPGTGGGHGITPVTPSHGGSSSPTPSHGGGGGYVPTPSHGGTLPFPSHGGSGSGSSPTSPSTGGGAYGGSPSTPGGGAYGGSPPSTPSGGGAYGGSPSTPSGGGAYGGGSPSPAHGAGGAYGSSPTPAYGDSPLHGGIGTSSPTTFVPMDPHSFGTCDSIIVDRPSSYWRSHPMEIWSAVGGRFPSTSSSMGHFFGAAAGSVGGADVMSIQDAVGNTRADGTGALLREGAAALLNSMTRAGFPYTTEQVRDAFAAAAAAGSDGAAAAQAAAFRKANEGKA

SEQ ID NO: 223144 - protein, 191 aa, Zea Mays
MSAEKPAPVRVLYCGVCGLPAEYCEFGPDFERCKPWLRAHAPGVYPDDLVAASSSPGGGDKDVDKVGDRLQGVGISDGSTSAAGDASASKPQEAKRLPGGKLKKKEKQEVVIEKIVRNKRKCVTVVKGLELFGVKLSDASKKLGKKFATGASVVKGPTEKEQIDVQGDISYDIVEFITDTWPDQSPCAGVG

SEQ ID NO: 223145 - protein, 1434 aa, Zea Mays
MSSGNPVSESLNLRSLHPAAAWIPSPPTSVRMWRSSSPQPPITSTRSKLTSKLASPPSNRLCTSSSCGALAWRHRSSPSTPPSIRSAPRSPRWGSAGPPTPVWMDLDNPVSSVRTGLDPEGSLLLKNLQIAHVLGPASRITTGIVGTCTPVPTLTTRSREAGDSSRRPDPVHGDSSYAGRSSWKSAVPQSARWDPSRGLAPESSKTPTQPAPTIDSKVASLRSYRRASGLCQYCAEKWNKGHKCSPTVQLHAVQEMWELFDHDQSDTDPDFQDSSDQFAVMLSQAAISTPAKAQAFRLQGCLQGVELLMLLDSGSSHCFLNTNSVAAITGLTLVSTPLMVTVANGEVLTCTSELVEADWTLQGVPFRTTFKLLSLPHYDAILGMDWLQQFSPMLIDWKNKWLSIPFQDQLIVLRDCQSLVPAGSLLEIRSVSSTSTPQHLFSATTSAVPEPVRSLLQQFDALFQPPTTLPPSRACDHSIPLVDGARPVNIRPYRLSPALKDEVESQVAEMLQNGIIQNSSSAFSSPVLMVKKKDNSWRFCVDYRHLNALTVKSKYPVPIIDELLDELAGACWFSILDLRAGFHQILLKPGEEYKTAFQTHTGHYEFRVMAFGLTGAPGTFQKAMNHTLAPLLRKCTIVFFDDILVYSRSLQDHFTHLQQVFELLSSDHWKIKMSKCSFAQPQVTYLGHIISSAGVATDPAKIQAIVAWPVPKCVKELRSFLGLSGYYRKFIRHYGVICQPLTALLKKGALYVWTADHDTAFCTLKQAMSSAPVLALPDFNVIFQIETDASANGVGAVLSQQGHPLAFLSKALGVKSRGLSTYEKEYLAVQQWRAYLQHQKFVIITDHKSLSQLNEQRLHTPWQHKVFTKLLGLQYRVQYRPGTENRAADALSRYGPAEINAVSVVIPQWLTDIQQTYDSDSKTKELVAKLAIDPAAVAHFSLKDGLIRYKNRLWIGEDPHLQAKIVSALHSSPIGGHSGVPVTYSRVKSIFAWKNMKSFVRSFVQQCQICLQAKPDRAAYPGKLQPLPVPPSAWHTISMDFVEGLPRSGSWDCILVVVDKFSKFGHFVPLSHPYTAHSVAQLFLSHIYRLHGFPAAIVSDRDPIFTSAFWRQLFQLAGTELRLSSSYHPQSDGQTERLNQCLETFLRCFVSACPKKWSSWLPAAEYWYNTSLHSALGCSPFEVLYGRKPRSLGLSFDAAAPVALSAWLQERSVMQNLIHQHLIRAQTRMKKQADKHRSERSFSVGDWVYMKLQPYVQSSVLPRAHQKLSYKFFGPYRVANRVGSVAYRLELPNSSRIHPVVHVSQLKLAKGFSGSATSSLPDELPEFSIPLRILQTRGFAKGKRFVKQVLVQWSNLPTELATWEDQDNLRQCYPFAPAWGQAGFQGGENVNNESMDSPTVSRGVPNGEPEAAPVVRTRRVCRANVRQQGPEWVQ

SEQ ID NO: 223146 - protein, 1883 aa, Zea Mays
MLKLDENVPKRIHSLIEKLDADVWIQVPCKDIPYSQQPTSPTSVMSKISRCNLIAEDLYFINGMETVIGVVDQLISIGNESKMYKGNASQFLDHRSFCEGNPDPNECTNLTISIKDLMILLGQSKAKGLALERIATANMEFDVSAVLVGEKPERIDFDVVSLTLQSPGGYTLISIVSDGPLSPVFFKFTKHHTGQDEILLSVPLFEIWLYLQDWNTIINHSHSYIKTEVNSMPVEHAAALSQFPEMVSSPLIASEFGSPDDFNLVVTCETISGVLHIPIWGKEENHTSNHMGVTPASFPMEVGTHETDDIQYCEPKGCKFVTLTFDTKHFVVMSGDSCINFRCDLERLKVLLEMIQENKGTSVPFVHISKVKSSGYVRQSERNLEHLSVDLQAEYMDVSFSHQIFNFWHNMELKFPAASSASSFYSVAFKAGLRKGSLLLSDGRWSSHGPVIETLLKNLTVQFSQMKDRTEVSAFVDLLVNYNNIDKVMWEPFVEPSRFQLNMLRKCGDCGLDISPSTDVCLSSSKQLNLNISEPLIEALLRLNQMITDSLDPSNGSGIWEDPGILRLNHDDVRTRRYAPYFLSNDTSLPFRFKVYRGAVNSDDIGSFSVIDENSVPAGYAVPIYVEETPDEFFFQHREARSSDHLIEKRMSALSHYMISIEFDGTSGPSKPMSMDLVGIYFFEVNFSSSKKPILGEESLGAFSSNAKGNDGLIVPVVLDVSLQNYSKRIRVYSTVILYNATSMPLELRFDIPFGLASKVIGPIPPNKEIPLPVHLSEAGQIRWHPVGRTYLWSETRSLSSLLSRENRVGFMKSSVCYPSHPSNDPFRCCVSVEEYNVPSSVSTKKKQLCSERLNTQVSGSSTPNTFKQNLTRTHFIRHVKLNTPLLIKNYLPVYISLAIDNGGSARVISLKEVGSASILFVDPSNDLGITIDIQDYRSLNIKFPRAESFSTTAKLNGFKFSITESITFYSNLSNFPLNVMLEKSMDARSGARELYLSVPFLLYNCTDLLLTVTESSSERSGPTLVIPPSFELDGYARHMLEKGGLSLVNPSVQCFTGKMPQIYLMDGHCSSSDISCTRNSESVKKDLDNSVKAYMFAPDGHTPATELSVKLNASPPNNGTETTRRNWSNPFLLVPASGSTNVTIPQSSTSGAFLVAVASIPVSTELFGRTRAIAFRPRYVICNACSNDLFFRQKGTRFSKHLSSGQHSFLHWSDTARDLLVSIRIDGPGWQWSGSFFPDHLGDAQLKMRNSASGLSYMVRVEVQNADLDLNSNRFSGKNNINTGTVLILLSDDKTGFVPYRIDNFSMEKLRIYQQRCESIETIVYPYTSCQYAWDEPCYPHRLTVEIPGERSLGTFNLDILNDDVHVSLPSTSEKAARQFCISIHAEGAIKVLSVLDSNCHNKETNEKDFLGSKEPKVVDHKLELDMNFAEVIKLHLPFIGISLISSCPQELLFASAKEMTVVAMQSLDQQRFTVQIQSMQIDNQFPDSPHPVMLSFEGSHKGKSMNFFKSKDTKLKSANDILSSTSEPVLQFAAAKWRTKDVSFVSYQYINISLAPLRLELEERLVLSMIEFFRSVSSRINIGHLEKSIELSIGGATDMLREYEKISKNISDKLLVQDSELLPSVVPVGAPWQQIHLLARKQKKVYIELFQLTPVKLTFSFTSTPWLNRNEGGSDPSVGFNNATAIQRGLMALLDVEGVPVYLGEIIVENLMASWQSVQDILMRHYSRQILHELYKVLGSAGVIGNPMGFARNVGFGLKDFISASRKGKLQSPVELLNGIAQGSKTLIGSTVYAVSSATSHFSKTAYKGLVAFTYDEQAASKMEERERQLGLHGEGVLNGFLEGLTGLLQSPIRGAEKHGLPGVISGTTIVLSIYIQFVPI

SEQ ID NO: 223147 - protein, 3243 aa, Zea Mays
MAYTASSLMTRSRQDEVNKIIEISNVGIYCHQLEEEQDLCHVGALENDHSRDYLVNPFCVTVSVLANKAAKLDGTPQYNMTAELTALALSVDEIQLQQILNLCDYFTICALRTKYGRYRPSQSSLSKRCKGWYRMWWQYAQNSVLADVRRRLKKTSWRYLKQRLNHQLRYVKLYRMKLELLQKGQIVSEDILQELENMDRECDIDDILNYRTIAEQQLQESLVKSSIDTHSPGSPRSDEQLAGASQGWLNWLSLGMLGVGGTADSSSFAGVISEDIIKDIYEGTEFRPVSSAENCLKKENYYSLFVRLSISQIVTTVTSRRFGTKLVDTMFSGLGMECKIWDDAATILAWLDSLRVINPLNKTKILWAEKCSTGDGLGAPVVSIQVDFPKSNERSEASTRVVVQEFNAIYEPEFFVNVLYIYNVFSAFQFQHDRRQPVGRWSSGGCGMRGGDMRQLWLGGEVLSSLNRFNNLGTRLVSKLKYMSANRKKLIWDLRIYHFVIRIPSQNCERKELAMVIDAGDVFIQSKDTIDDISRTQESNSFLDHISKSLPSYFSDDLLLGIQLDELYNQFELGLTGFQVKVLLPDRHNVSSTLIKLDASIALRLCVFLDEPVLKQLEVGFIVSSIDAYLSQTMYSTIVNLPRMKETNLFKNSVFDNTKTHVPKKLALNVSVSLKLAKLGLHVDLDGNFEESSGLIVGIEDIDIRYAICELSDLSLAMKTVNVTFRYWKDKSDSHVLCLSGNLTRCPENSVETCLDLHYRTHKHDDQIHHVYRLILCDVDLHVNPSVIGQIRMFLRKLDSGPSIGSDVESTMIGQSSMKSGAANGILPMFFLSNLCGADGTVFAGVSVDHFPFLVADHSCGYNFGCLGTQNVEAQESLYSKNEHCHDTSGLNGYHASDLTSNTYGKTQRSDCSSGSSNDPKNASRTVLDLSLISVRIHFPESCGTLVTITIPESISTLTYFDASSWDLLLSANNLTLASPWTPPNVNELVWGTASHRNASVLNVRVKKDLPALSTEVCVGIQNVCCVLPSKLLAMFVGFFLLDDWNRIAEQEFLVADNNLEGLRESHDCVTYKFDISDCVVFFPVEEQGLSCLKLEVPHFFCEFIANGSSVEFAKRIPKEFFSSECIVSRRVDVICIYARNASISLLIVSDQTDFMLKLDENVPKRIHSLIEKLDADVWIQVPCKDIPYSQQPTSPTSVMSKISRCNLIAEDLYFINGMETVIGVVDQLISIGNESKMYKGNASQFLDHRSFCEGNPDPNECTNLTISIKDLMILLGQSKAKGLALERIATANMEFDVSAVLVGEKPERIDFDVVSLTLQSPGGYTLISIVSDGPLSPVFFKFTKHHTGQDEILLSVPLFEIWLYLQDWNTIINHSHSYIKTEVNSMPVEHAAALSQFPEMVSSPLIASEFGSPDDFNLVVTCETISGVLHIPIWGKEENHTSNHMGVTPASFPMEVGTHETDDIQYCEPKGCKFVTLTFDTKHFVVMSGDSCINFRCDLERLKVLLEMIQENKGTSVPFVHISKVKSSGYVRQSERNLEHLSVDLQAEYMDVSFSHQIFNFWHNMELKFPAASSASSFYSVAFKAGLRKGSLLLSDGRWSSHGPVIETLLKNLTVQFSQMKDRTEVSAFVDLLVNYNNIDKVMWEPFVEPSRFQLNMLRKCGDCGLDISPSTDVCLSSSKQLNLNISEPLIEALLRLNQMITDSLDPSNGSGIWEDPGILRLNHDDVRTRRYAPYFLSNDTSLPFRFKVYRGAVNSDDIGSFSVIDENSVPAGYAVPIYVEETPDEFFFQHREARSSDHLIEKRMSALSHYMISIEFDGTSGPSKPMSMDLVGIYFFEVNFSSSKKPILGEESLGAFSSNAKGNDGLIVPVVLDVSLQNYSKRIRVYSTVILYNATSMPLELRFDIPFGLASKVIGPIPPNKEIPLPVHLSEAGQIRWHPVGRTYLWSETRSLSSLLSRENRVGFMKSSVCYPSHPSNDPFRCCVSVEEYNVPSSVSTKKKQLCSERLNTQVSGSSTPNTFKQNLTRTHFIRHVKLNTPLLIKNYLPVYISLAIDNGGSARVISLKEVGSASILFVDPSNDLGITIDIQDYRSLNIKFPRAESFSTTAKLNGFKFSITESITFYSNLSNFPLNVMLEKSMDARSGARELYLSVPFLLYNCTDLLLTVTESSSERSGPTLVIPPSFELDGYARHMLEKGGLSLVNPSVQCFTGKMPQIYLMDGHCSSSDISCTRNSESVKKDLDNSVKAYMFAPDGHTPATELSVKLNASPPNNGTETTRRNWSNPFLLVPASGSTNVTIPQSSTSGAFLVAVASIPVSTELFGRTRAIAFRPRYVICNACSNDLFFRQKGTRFSKHLSSGQHSFLHWSDTARDLLVSIRIDGPGWQWSGSFFPDHLGDAQLKMRNSASGLSYMVRVEVQNADLDLNSNRFSGKNNINTGTVLILLSDDKTGFVPYRIDNFSMEKLRIYQQRCESIETIVYPYTSCQYAWDEPCYPHRLTVEIPGERSLGTFNLDILNDDVHVSLPSTSEKAARQFCISIHAEGAIKVLSVLDSNCHNKETNEKDFLGSKEPKVVDHKLELDMNFAEVIKLHLPFIGISLISSCPQELLFASAKEMTVVAMQSLDQQRFTVQIQSMQIDNQFPDSPHPVMLSFEGSHKGKSMNFFKSKDTKLKSANDILSSTSEPVLQFAAAKWRTKDVSFVSYQYINISLAPLRLELEERLVLSMIEFFRSVSSRINIGHLEKSIELSIGGATDMLREYEKISKNISDKLLVQDSELLPSVVPVGAPWQQIHLLARKQKKVYIELFQLTPVKLTFSFTSTPWLNRNEGGSDPSVGFNNATAIQRGLMALLDVEGVPVYLGEIIVENLMASWQSVQDILMRHYSRQILHELYKVLGSAGVIGNPMGFARNVGFGLKDFISASRKGKLQSPVELLNGIAQGSKTLIGSTVYAVSSATSHFSKTAYKGLVAFTYDEQAASKMEERERQLGLHGEGVLNGFLEGLTGLLQSPIRGAEKHGLPGVISGLAMGTAGLVARPMASILEATGRTAQSIRNRSNPHESNYLRVRFPRPVARDRPLFPYSWEEAIGESLLAQADSGRLKEETFVMCKTLKGAGKFLVLTEKLLLLVSSPYLVDLGSPRFIGVPPDPQWSIDTEMHLKSVVHLDRSQEVVNIVGSNGQTSPRDKRGGTRNRVMSSAFVPLFHLSIELPNEEDAEGTVQVLQALIEKGKARRWDKNILHRSNIS

SEQ ID NO: 223148 - protein, 3011 aa, Zea Mays
MAYTASSLMTRSRQDEVNKIIEISNVGIYCHQLEEEQDLCHVGALENDHSRDYLVNPFCVTVSVLANKAAKLDGTPQYNMTAELTALALSVDEIQLQQILNLCDYFTICALRTKYGRYRPSQSSLSKRCKGWYRMWWQYAQNSVLADVRRRLKKTSWRYLKQRLNHQLRYVKLYRMKLELLQKGQIVSEDILQELENMDRECDIDDILNYRTIAEQQLQESLVKSSIDTHSPGSPRSDEQLAGASQGWLNWLSLGMLGVGGTADSSSFAGVISEDIIKDIYEGTEFRPVSSAENCLKKENYYSLFVRLSISQIVTTVTSRRFGTKLVDTMFSGLGMECKIWDDAATILAWLDSLRVINPLNKTKILWAEKCSTGDGLGAPVVSIQVDFPKSNERSEASTRVVVQEFNAIYEPEFFVNVLYIYNVFSAFQFQHDRVLSSLNRFNNLGTRLVSKLKYMSANRKKLIWDLRIYHFVIRIPSQNCERKELAMVIDAGDVFIQSKDTIDDISRTQESNSFLDHISKSLPSYFSDDLLLGIQLDELYNQFELGLTGFQVKVLLPDRHNVSSTLIKLDASIALRLCVFLDEPVLKQLEVGFIVSSIDAYLSQTMYSTIVNLPRMKETNLFKNSVFDNTKTHVPKKLALNVSVSLKLAKLGLHVDLDGNFEESSGLIVGIEDIDIRYAICELSDLSLAMKTVNVTFRYWKDKSDSHVLCLSGNLTRCPENSVETCLDLHYRTHKHDDQIHHVYRLILCDVDLHVNPSVIGQIRMFLRKLDSGPSIGSDVESTMIGQSSMKSGAANGILPMFFLSNLCGADGTVFAGVSVDHFPFLVADHSCGYNFGCLGTQNVEAQESLYSKNEHCHDTSGLNGYHASDLTSNTYGKTQRSDCSSGSSNDPKNASRTVLDLSLISVRIHFPESCGTLVTITIPESISTLTYFDASSWDLLLSANNLTLASPWTPPNVNELVWGTASHRNASVLNVRVKKDLPALSTEVCVGIQNVCCVLPSKLLAMFVGFFLLDDWNRIAEQEFLVADNNLEGLRESHDCVTYKFDISDCVVFFPVEEQGLSCLKLEVPHFFCEFIANGSSVEFAKRIPKEFFSSECIVSRRVDVICIYARNASISLLIVSDQTDFMLKLDENVPKRIHSLIEKLDADVWIQVPCKDIPYSQQPTSPTSVMSKISRCNLIAEDLYFINGMETVIGVVDQLISIGNESKMYKGNASQFLDHRSFCEGNPDPNECTNLTISIKDLMILLGQSKAKGLALERIATANMEFDVSAVLVGEKPERIDFDVVSLTLQSPGGYTLISIVSDGPLSPVFFKFTKHHTGQDEILLSVPLFEIWLYLQDWNTIINHSHSYIKTEVNSMPVEHAAALSQFPEMVSSPLIASEFGSPDDFNLVVTCETISGVLHIPIWGKEENHTSNHMGVTPASFPMEVGTHETDDIQYCEPKGCKFVTLTFDTKHFVVMSGDSCINFRCDLERLKVLLEMIQENKGTSVPFVHISKVKSSGYVRQSERNLEHLSVDLQAEYMDVSFSHQIFNFWHNMELKFPAASSASSFYSVAFKAGLRKGSLLLSDGRWSSHGPVIETLLKNLTVQFSQMKDRTEVSAFVDLLVNYNNIDKVMWEPFVEPSRFQLNMLRKCGDCGLDISPSTDVCLSSSKQLNLNISEPLIEALLRLNQMITDSLDPSNGSGIWEDPGILRLNHDDVRTRRYAPYFLSNDTSLPFRFKVYRGAVNSDDIGSFSVIDENSVPAGYAVPIYVEETPDEFFFQHREARSSDHLIEKRMSALSHYMISIEFDGTSGPSKPMSMDLVGIYFFEVNFSSSKKPILGEESLGAFSSNAKGNDGLIVPVVLDVSLQNYSKRIRVYSTVILYNATSMPLELRFDIPFGLASKVIGPIPPNKEIPLPVHLSEAGQIRWHPVGRTYLWSETRSLSSLLSRENRVGFMKSSVCYPSHPSNDPFRCCVSVEEYNVPSSVSTKKKQLCSERLNTQVSGSSTPNTFKQNLTRTHFIRHVKLNTPLLIKNYLPVYISLAIDNGGSARVISLKEVGSASILFVDPSNDLGITIDIQDYRSLNIKFPRAESFSTTAKLNGFKFSITESITFYSNLSNFPLNVMLEKSMDARSGARELYLSVPFLLYNCTDLLLTVTESSSERSGPTLVIPPSFELDGYARHMLEKGGLSLVNPSVQCFTGKMPQIYLMDGHCSSSDISCTRNSESVKKDLDNSVKAYMFAPDGHTPATELSVKLNASPPNNGTETTRRNWSNPFLLVPASGSTNVTIPQSSTSGAFLVAVASIPVSTELFGRTRAIAFRPRYVICNACSNDLFFRQKGTRFSKHLSSGQHSFLHWSDTARDLLVSIRIDGPGWQWSGSFFPDHLGDAQLKMRNSASGLSYMVRVEVQNADLDLNSNRFSGKNNINTGTVLILLSDDKTGFVPYRIDNFSMEKLRIYQQRCESIETIVYPYTSCQYAWDEPCYPHRLTVEIPGERSLGTFNLDILNDDVHVSLPSTSEKAARQFCISIHAEGAIKVLSVLDSNCHNKETNEKDFLGSKEPKVVDHKLELDMNFAEVIKLHLPFIGISLISSCPQELLFASAKEMTVVAMQSLDQQRFTVQIQSMQIDNQFPDSPHPVMLSFEGSHKGKSMNFFKSKDTKLKSANDILSSTSEPVLQFAAAKWRTKDVSFVSYQYINISLAPLRLELEERLVLSMIEFFRSVSSRINIGHLEKSIELSIGGATDMLREYEKISKNISDKLLVQDSELLPSVVPVGAPWQQIHLLARKQKKVYIELFQLTPVKLTFSFTSTPWLNRNEGGSDPSVGFNNATAIQRGLMALLDVEGVPVYLGEIIVENLMASWQSVQDILMRHYSRQILHELYKVLGSAGVIGNPMGFARNVGFGLKDFISASRKGKLQSPVELLNGIAQGSKTLIGSTVYAVSSATSHFSKTAYKGLVAFTYDEQAASKMEERERQLGLHGEGVLNGFLEGLTGLLQSPIRGAEKHGLPGVISGTTIVLSIYIQFVPI

SEQ ID NO: 223149 - protein, 3195 aa, Zea Mays
MFEGVVSQVLYGLLRRYVKGIQKEQLKIGIWKEEILLENVELILEAFDYLQLPFALKNGRIGKLSIRIPWKKLGWDPIIIVIEDVYVCACPREDSEWSSDSLDKRELAGKLAKLNAIELAKFSRRVTDNQTGQSFLSYISAKILDSIQVSMRNVHIVYMDTHNGQGNFVFGLEFTSLSIQTDTQKQSFTISLMTRSRQDEVNKIIEISNVGIYCHQLEEEQDLCHVGALENDHSRDYLVNPFCVTVSVLANKAAKLDGTPQYNMTAELTALALSVDEIQLQQILNLCDYFTICALRTKYGRYRPSQSSLSKRCKGWYRMWWQYAQNSVLADVRRRLKKTSWRYLKQRLNHQLRYVKLYRMKLELLQKGQIVSEDILQELENMDRECDIDDILNYRTIAEQQLQESLVKSSIDTHSPGSPRSDEQLAGASQGWLNWLSLGMLGVGGTADSSSFAGVISEDIIKDIYEGTEFRPVSSAENCLKKENYYSLFVRLSISQIVTTVTSRRFGTKLVDTMFSGLGMECKIWDDAATILAWLDSLRVINPLNKTKILWAEKCSTGDGLGAPVVSIQVDFPKSNERSEASTRVVVQEFNAIYEPEFFVNVLYIYNVFSAFQFQHDRVLSSLNRFNNLGTRLVSKLKYMSANRKKLIWDLRIYHFVIRIPSQNCERKELAMVIDAGDVFIQSKDTIDDISRTQESNSFLDHISKSLPSYFSDDLLLGIQLDELYNQFELGLTGFQVKVLLPDRHNVSSTLIKLDASIALRLCVFLDEPVLKQLEVGFIVSSIDAYLSQTMYSTIVNLPRMKETNLFKNSVFDNTKTHVPKKLALNVSVSLKLAKLGLHVDLDGNFEESSGLIVGIEDIDIRYAICELSDLSLAMKTVNVTFRYWKDKSDSHVLCLSGNLTRCPENSVETCLDLHYRTHKHDDQIHHVYRLILCDVDLHVNPSVIGQIRMFLRKLDSGPSIGSDVESTMIGQSSMKSGAANGILPMFFLSNLCGADGTVFAGVSVDHFPFLVADHSCGYNFGCLGTQNVEAQESLYSKNEHCHDTSGLNGYHASDLTSNTYGKTQRSDCSSGSSNDPKNASRTVLDLSLISVRIHFPESCGTLVTITIPESISTLTYFDASSWDLLLSANNLTLASPWTPPNVNELVWGTASHRNASVLNVRVKKDLPALSTEVCVGIQNVCCVLPSKLLAMFVGFFLLDDWNRIAEQEFLVADNNLEGLRESHDCVTYKFDISDCVVFFPVEEQGLSCLKLEVPHFFCEFIANGSSVEFAKRIPKEFFSSECIVSRRVDVICIYARNASISLLIVSDQTDFMLKLDENVPKRIHSLIEKLDADVWIQVPCKDIPYSQQPTSPTSVMSKISRCNLIAEDLYFINGMETVIGVVDQLISIGNESKMYKGNASQFLDHRSFCEGNPDPNECTNLTISIKDLMILLGQSKAKGLALERIATANMEFDVSAVLVGEKPERIDFDVVSLTLQSPGGYTLISIVSDGPLSPVFFKFTKHHTGQDEILLSVPLFEIWLYLQDWNTIINHSHSYIKTEVNSMPVEHAAALSQFPEMVSSPLIASEFGSPDDFNLVVTCETISGVLHIPIWGKEENHTSNHMGVTPASFPMEVGTHETDDIQYCEPKGCKFVTLTFDTKHFVVMSGDSCINFRCDLERLKVLLEMIQENKGTSVPFVHISKVKSSGYVRQSERNLEHLSVDLQAEYMDVSFSHQIFNFWHNMELKFPAASSASSFYSVAFKAGLRKGSLLLSDGRWSSHGPVIETLLKNLTVQFSQMKDRTEVSAFVDLLVNYNNIDKVMWEPFVEPSRFQLNMLRKCGDCGLDISPSTDVCLSSSKQLNLNISEPLIEALLRLNQMITDSLDPSNGSGIWEDPGILRLNHDDVRTRRYAPYFLSNDTSLPFRFKVYRGAVNSDDIGSFSVIDENSVPAGYAVPIYVEETPDEFFFQHREARSSDHLIEKRMSALSHYMISIEFDGTSGPSKPMSMDLVGIYFFEVNFSSSKKPILGEESLGAFSSNAKGNDGLIVPVVLDVSLQNYSKRIRVYSTVILYNATSMPLELRFDIPFGLASKVIGPIPPNKEIPLPVHLSEAGQIRWHPVGRTYLWSETRSLSSLLSRENRVGFMKSSVCYPSHPSNDPFRCCVSVEEYNVPSSVSTKKKQLCSERLNTQVSGSSTPNTFKQNLTRTHFIRHVKLNTPLLIKNYLPVYISLAIDNGGSARVISLKEVGSASILFVDPSNDLGITIDIQDYRSLNIKFPRAESFSTTAKLNGFKFSITESITFYSNLSNFPLNVMLEKSMDARSGARELYLSVPFLLYNCTDLLLTVTESSSERSGPTLVIPPSFELDGYARHMLEKGGLSLVNPSVQCFTGKMPQIYLMDGHCSSSDISCTRNSESVKKDLDNSVKAYMFAPDGHTPATELSVKLNASPPNNGTETTRRNWSNPFLLVPASGSTNVTIPQSSTSGAFLVAVASIPVSTELFGRTRAIAFRPRYVICNACSNDLFFRQKGTRFSKHLSSGQHSFLHWSDTARDLLVSIRIDGPGWQWSGSFFPDHLGDAQLKMRNSASGLSYMVRVEVQNADLDLNSNRFSGKNNINTGTVLILLSDDKTGFVPYRIDNFSMEKLRIYQQRCESIETIVYPYTSCQYAWDEPCYPHRLTVEIPGERSLGTFNLDILNDDVHVSLPSTSEKAARQFCISIHAEGAIKVLSVLDSNCHNKETNEKDFLGSKEPKVVDHKLELDMNFAEVIKLHLPFIGISLISSCPQELLFASAKEMTVVAMQSLDQQRFTVQIQSMQIDNQFPDSPHPVMLSFEGSHKGKSMNFFKSKDTKLKSANDILSSTSEPVLQFAAAKWRTKDVSFVSYQYINISLAPLRLELEERLVLSMIEFFRSVSSRINIGHLEKSIELSIGGATDMLREYEKISKNISDKLLVQDSELLPSVVPVGAPWQQIHLLARKQKKVYIELFQLTPVKLTFSFTSTPWLNRNEGGSDPSVGFNNATAIQRGLMALLDVEGVPVYLGEIIVENLMASWQSVQDILMRHYSRQILHELYKVLGSAGVIGNPMGFARNVGFGLKDFISASRKGKLQSPVELLNGIAQGSKTLIGSTVYAVSSATSHFSKTAYKGLVAFTYDEQAASKMEERERQLGLHGEGVLNGFLEGLTGLLQSPIRGAEKHGLPGVISGTTIVLSIYIQFVPI

SEQ ID NO: 223150 - protein, 3398 aa, Zea Mays
MFEGVVSQVLYGLLRRYVKGIQKEQLKIGIWKEEILLENVELILEAFDYLQLPFALKNGRIGKLSIRIPWKKLGWDPIIIVIEDWSSDSLDKRELAGKLAKLNAIELAKFSRRVTDNQTGQSFLSYISAKILDSIQVSMRNVHIVYMDTHNGQGNFVFGLEFTSLSIQTDTQKQSFTISLMTRSRQDEVNKIIEISNVGIYCHQLEEEQDLCHVGALENDHSRDYLVNPFCVTVSVLANKAAKLDGTPQYNMTAELTALALSVDEIQLQQILNLCDYFTICALRTKYGRYRPSQSSLSKRCKGWYRMWWQYAQNSVLADVRRRLKKTSWRYLKQRLNHQLRYVKLYRMKLELLQKGQIVSEDILQELENMDRECDIDDILNYRTIAEQQLQVVDGSVRRTLRESLVKSSIDTHSPGSPRSDEQLAGASQGWLNWLSLGMLGVGGTADSSSFAGVISEDIIKDIYEGTEFRPVSSAENCLKKENYYSLFVRLSISQIVTTVTSRFGTKLVDTMFSGLGMECKIWDDAATILAWLDSLRVINPLNKTKILWAEKCSTGDGLGAPVVSIQVDFPKSNERSEASTRVVVQEFNAIYEPEFFVNVLYIYNVFSAFQFQHDRVLSSLNRFNNLGTRLVSKLKYMSANRKKLIWDLRIYHFVIRIPSQNCERKELAMVIDAGDVFIQSKDTIDDISRTQESNSFLDHISKSLPSYFSDDLLLGIQLDELYNQFELGLTGFQVKVLLPDRHNVSSTLIKLDASIALRLCVFLDEPVLKQLEVGFIVSSIDAYLSQTMYSTIVNLPRMKETNLFKNSVFDNTKTHVPKKLALNVSVSLKLAKLGLHVDLDGNFEESSGLIVGIEDIDIRYAICELSDLSLAMKTVNVTFRYWKDKSDSHVLCLSGNLTRCPENSVETCLDLHYRTHKHDDQIHHVYRLILCDVDLHVNPSVIGQIRMFLRKLDSGPSIGSDVESTMIGQSSMKSGAANGILPMFFLSNLCGADGTVFAGVSVDHFPFLVADHSCGYNFGCLGTQNVEAQESLYSKNEHCHDTSGLNGYHASDLTSNTYGKTQRSDCSSGSSNDPKNASRTVLDLSLISVRIHFPESCGTLVTITIPESISTLTYFDASSWDLLLSANNLTLASPWTPPNVNELVWGTASHRNASVLNVRVKKDLPALSTEVCVGIQNVCCVLPSKLLAMFVGFFLLDDWNRIAEQEFLVADNNLEGLRESHDCVTYKFDISDCVVFFPVEEQGLSCLKLEVPHFFCEFIANGSSVEFAKRIPKEFFSSECIVSRRVDVICIYARNASISLLIVSDQTDFMLKLDENVPKRIHSLIEKLDADVWIQVPCKDIPYSQQPTSPTSVMSKISRCNLIAEDLYFINGMETVIGVVDQLISIGNESKMYKGNASQFLDHRSFCEGNPDPNECTNLTISIKDLMILLGQSKAKGLALERIATANMEFDVSAVLVGEKPERIDFDVVSLTLQSPGGYTLISIVSDGPLSPVFFKFTKHHTGQDEILLSVPLFEIWLYLQDWNTIINHSHSYIKTEVNSMPVEHAAALSQFPEMVSSPLIASEFGSPDDFNLVVTCETISGVLHIPIWGKEENHTSNHMGVTPASFPMEVGTHETDDIQYCEPKGCKFVTLTFDTKHFVVMSGDSCINFRCDLERLKVLLEMIQENKGTSVPFVHISKVKSSGYVRQSERNLEHLSVDLQAEYMDVSFSHQIFNFWHNMELKFPAASSASSFYSVAFKAGLRKGSLLLSDGRWSSHGPVIETLLKNLTVQFSQMKDRTEVSAFVDLLVNYNNIDKVMWEPFVEPSRFQLNMLRKCGDCGLDISPSTDVCLSSSKQLNLNISEPLIEALLRLNQMITDSLDPSNGSGIWEDPGILRLNHDDVRTRRYAPYFLSNDTSLPFRFKVYRGAVNSDDIGSFSVIDENSVPAGYAVPIYVEETPDEFFFQHREARSSDHLIEKRMSALSHYMISIEFDGTSGPSKPMSMDLVGIYFFEVNFSSSKKPILGEESLGAFSSNAKGNDGLIVPVVLDVSLQNYSKRIRVYSTVILYNATSMPLELRFDIPFGLASKVIGPIPPNKEIPLPVHLSEAGQIRWHPVGRTYLWSETRSLSSLLSRENRVGFMKSSVCYPSHPSNDPFRCCVSVEEYNVPSSVSTKKKQLCSERLNTQVSGSSTPNTFKQNLTRTHFIRHVKLNTPLLIKNYLPVYISLAIDNGGSARVISLKEVGSASILFVDPSNDLGITIDIQDYRSLNIKFPRAESFSTTAKLNGFKFSITESITFYSNLSNFPLNVMLEKSMDARSGARELYLSVPFLLYNCTDLLLTVTESSSERSGPTLVIPPSFELDGYARHMLEKGGLSLVNPSVQCFTGKMPQIYLMDGHCSSSDISCTRNSESVKKDLDNSVKAYMFAPDGHTPATELSVKLNASPPNNGTETTRRNWSNPFLLVPASGSTNVTIPQSSTSGAFLVAVASIPVSTELFGRTRAIAFRPRYVICNACSNDLFFRQKGTRFSKHLSSGQHSFLHWSDTARDLLVSIRIDGPGWQWSGSFFPDHLGDAQLKMRNSASGLSYMVRVEVQNADLDLNSNRFSGKNNINTGTVLILLSDDKTGFVPYRIDNFSMEKLRIYQQRCESIETIVYPYTSCQYAWDEPCYPHRLTVEIPGERSLGTFNLDILNDDVHVSLPSTSEKAARQFCISIHAEGAIKVLSVLDSNCHNKETNEKDFLGSKEPKVVDHKLELDMNFAEVIKLHLPFIGISLISSCPQELLFASAKEMTVVAMQSLDQQRFTVQIQSMQIDNQFPDSPHPVMLSFEGSHKGKSMNFFKSKDTKLKSANDILSSTSEPVLQFAAAKWRTKDVSFVSYQYINISLAPLRLELEERLVLSMIEFFRSVSSRINIGHLEKSIELSIGGATDMLREYEKISKNISDKLLVQDSELLPSVVPVGAPWQQIHLLARKQKKVYIELFQLTPVKLTFSFTSTPWLNRNEGGSDPSVGFNNATAIQRGLMALLDVEGVPVYLGEIIVENLMASWQSVQDILMRHYSRQILHELYKVLGSAGVIGNPMGFARNVGFGLKDFISASRKGKLQSPVELLNGIAQGSKTLIGSTVYAVSSATSHFSKTAYKGLVAFTYDEQAASKMEERERQLGLHGEGVLNGFLEGLTGLLQSPIRGAEKHGLPGVISGLAMGTAGLVARPMASILEATGRTAQSIRNRSNPHESNYLRVRFPRPVARDRPLFPYSWEEAIGESLLAQADSGRLKEETFVMCKTLKGAGKFLVLTEKLLLLVSSPYLVDLGSPRFIGVPPDPQWSIDTEMHLKSVVHLDRSQEVVNIVGSNGQTSPRDKRGGTRNRVMSSAFVPLFHLSIELPNEEDAEGTVQVLQALIEKGKARRWDKNILHRSNIS

SEQ ID NO: 223151 - protein, 3415 aa, Zea Mays
MFEGVVSQVLYGLLRRYVKGIQKEQLKIGIWKEEILLENVELILEAFDYLQLPFALKNGRIGKLSIRIPWKKLGWDPIIIVIEDWSSDSLDKRELAGKLAKLNAIELAKFSRRVTDNQTGQSFLSYISAKILDSIQVSMRNVHIVYMDTHNGQGNFVFGLEFTSLSIQTDTQKQSFTISLMTRSRQDEVNKIIEISNVGIYCHQLEEEQDLCHVGALENDHSRDYLVNPFCVTVSVLANKAAKLDGTPQYNMTAELTALALSVDEIQLQQILNLCDYFTICALRTKYGRYRPSQSSLSKRCKGWYRMWWQYAQNSVLADVRRRLKKTSWRYLKQRLNHQLRYVKLYRMKLELLQKGQIVSEDILQELENMDRECDIDDILNYRTIAEQQLQESLVKSSIDTHSPGSPRSDEQLAGASQGWLNWLSLGMLGVGGTADSSSFAGVISEDIIKDIYEGTEFRPVSSAENCLKKENYYSLFVRLSISQIVTTVTSRRFGTKLVDTMFSGLGMECKIWDDAATILAWLDSLRVINPLNKTKILWAEKCSTGDGLGAPVVSIQVDFPKSNERSEASTRVVVQEFNAIYEPEFFVNVLYIYNVFSAFQFQHDRRQPVGRWSSGGCGMRGGDMRQLWLGGEVLSSLNRFNNLGTRLVSKLKYMSANRKKLIWDLRIYHFVIRIPSQNCERKELAMVIDAGDVFIQSKDTIDDISRTQESNSFLDHISKSLPSYFSDDLLLGIQLDELYNQFELGLTGFQVKVLLPDRHNVSSTLIKLDASIALRLCVFLDEPVLKQLEVGFIVSSIDAYLSQTMYSTIVNLPRMKETNLFKNSVFDNTKTHVPKKLALNVSVSLKLAKLGLHVDLDGNFEESSGLIVGIEDIDIRYAICELSDLSLAMKTVNVTFRYWKDKSDSHVLCLSGNLTRCPENSVETCLDLHYRTHKHDDQIHHVYRLILCDVDLHVNPSVIGQIRMFLRKLDSGPSIGSDVESTMIGQSSMKSGAANGILPMFFLSNLCGADGTVFAGVSVDHFPFLVADHSCGYNFGCLGTQNVEAQESLYSKNEHCHDTSGLNGYHASDLTSNTYGKTQRSDCSSGSSNDPKNASRTVLDLSLISVRIHFPESCGTLVTITIPESISTLTYFDASSWDLLLSANNLTLASPWTPPNVNELVWGTASHRNASVLNVRVKKDLPALSTEVCVGIQNVCCVLPSKLLAMFVGFFLLDDWNRIAEQEFLVADNNLEGLRESHDCVTYKFDISDCVVFFPVEEQGLSCLKLEVPHFFCEFIANGSSVEFAKRIPKEFFSSECIVSRRVDVICIYARNASISLLIVSDQTDFMLKLDENVPKRIHSLIEKLDADVWIQVPCKDIPYSQQPTSPTSVMSKISRCNLIAEDLYFINGMETVIGVVDQLISIGNESKMYKGNASQFLDHRSFCEGNPDPNECTNLTISIKDLMILLGQSKAKGLALERIATANMEFDVSAVLVGEKPERIDFDVVSLTLQSPGGYTLISIVSDGPLSPVFFKFTKHHTGQDEILLSVPLFEIWLYLQDWNTIINHSHSYIKTEVNSMPVEHAAALSQFPEMVSSPLIASEFGSPDDFNLVVTCETISGVLHIPIWGKEENHTSNHMGVTPASFPMEVGTHETDDIQYCEPKGCKFVTLTFDTKHFVVMSGDSCINFRCDLERLKVLLEMIQENKGTSVPFVHISKVKSSGYVRQSERNLEHLSVDLQAEYMDVSFSHQIFNFWHNMELKFPAASSASSFYSVAFKAGLRKGSLLLSDGRWSSHGPVIETLLKNLTVQFSQMKDRTEVSAFVDLLVNYNNIDKVMWEPFVEPSRFQLNMLRKCGDCGLDISPSTDVCLSSSKQLNLNISEPLIEALLRLNQMITDSLDPSNGSGIWEDPGILRLNHDDVRTRRYAPYFLSNDTSLPFRFKVYRGAVNSDDIGSFSVIDENSVPAGYAVPIYVEETPDEFFFQHREARSSDHLIEKRMSALSHYMISIEFDGTSGPSKPMSMDLVGIYFFEVNFSSSKKPILGEESLGAFSSNAKGNDGLIVPVVLDVSLQNYSKRIRVYSTVILYNATSMPLELRFDIPFGLASKVIGPIPPNKEIPLPVHLSEAGQIRWHPVGRTYLWSETRSLSSLLSRENRVGFMKSSVCYPSHPSNDPFRCCVSVEEYNVPSSVSTKKKQLCSERLNTQVSGSSTPNTFKQNLTRTHFIRHVKLNTPLLIKNYLPVYISLAIDNGGSARVISLKEVGSASILFVDPSNDLGITIDIQDYRSLNIKFPRAESFSTTAKLNGFKFSITESITFYSNLSNFPLNVMLEKSMDARSGARELYLSVPFLLYNCTDLLLTVTESSSERSGPTLVIPPSFELDGYARHMLEKGGLSLVNPSVQCFTGKMPQIYLMDGHCSSSDISCTRNSESVKKDLDNSVKAYMFAPDGHTPATELSVKLNASPPNNGTETTRRNWSNPFLLVPASGSTNVTIPQSSTSGAFLVAVASIPVSTELFGRTRAIAFRPRYVICNACSNDLFFRQKGTRFSKHLSSGQHSFLHWSDTARDLLVSIRIDGPGWQWSGSFFPDHLGDAQLKMRNSASGLSYMVRVEVQNADLDLNSNRFSGKNNINTGTVLILLSDDKTGFVPYRIDNFSMEKLRIYQQRCESIETIVYPYTSCQYAWDEPCYPHRLTVEIPGERSLGTFNLDILNDDVHVSLPSTSEKAARQFCISIHAEGAIKVLSVLDSNCHNKETNEKDFLGSKEPKVVDHKLELDMNFAEVIKLHLPFIGISLISSCPQELLFASAKEMTVVAMQSLDQQRFTVQIQSMQIDNQFPDSPHPVMLSFEGSHKGKSMNFFKSKDTKLKSANDILSSTSEPVLQFAAAKWRTKDVSFVSYQYINISLAPLRLELEERLVLSMIEFFRSVSSRINIGHLEKSIELSIGGATDMLREYEKISKNISDKLLVQDSELLPSVVPVGAPWQQIHLLARKQKKVYIELFQLTPVKLTFSFTSTPWLNRNEGGSDPSVGFNNATAIQRGLMALLDVEGVPVYLGEIIVENLMASWQSVQDILMRHYSRQILHELYKVLGSAGVIGNPMGFARNVGFGLKDFISASRKGKLQSPVELLNGIAQGSKTLIGSTVYAVSSATSHFSKTAYKGLVAFTYDEQAASKMEERERQLGLHGEGVLNGFLEGLTGLLQSPIRGAEKHGLPGVISGLAMGTAGLVARPMASILEATGRTAQSIRNRSNPHESNYLRVRFPRPVARDRPLFPYSWEEAIGESLLAQADSGRLKEETFVMCKTLKGAGKFLVLTEKLLLLVSSPYLVDLGSPRFIGVPPDPQWSIDTEMHLKSVVHLDRSQEVVNIVGSNGQTSPRDKRGGTRNRVMSSAFVPLFHLSIELPNEEDAEGTVQVLQALIEKGKARRWDKNILHRSNIS

SEQ ID NO: 223152 - protein, 2065 aa, Zea Mays
MDHDDTDFQSQNFQLAGEGSNKFSSDTEAFFSVQGHGNSWIEVLSTGSSVVDFSSSAAESCSISKTNNVWSEATSTESVEMLLKSVGENETTGDMDNNAHLKLSGMDSQIDQSSVHPKSSNSLPDSTVVPTEEDQSLSTHSRMTDDLDRSQISHSIMTADLSNTESQLEHFRPFLMDKKAEQAVDSVGEKCIAGEKLSSSNNAPGSYPAIDNYFGAGHDDRSLDKLNIPSTGVDSKNLNNEPFPELAPLQNIYTDSYHFKEDTTESEAGVTPQDSKFRHINENKVEGGLQELQSLSCAGQSLGAVNLSSQASNETLLSESSDGLLEAITNPVKMLHRSDDTCNKVNSTPQPSFSAVQHGAEGLENSVHRSNEFVVKEFSIGSNSLLSHQPEADPKFFNPHPISSLSPKSKISDATCVPEETKNVGSNSINTCCTGDESKHVVLENRQYSVDNLKSGDMGEKMSGEEIPAVSGNIDQMIENDHEEKAANATGTSKDKVDPSDSIALENFAADTFNASEDSDIPSLNHKRSFEEHESSALGVEPKNTNLLQSTSGLQEKISASVISSSSGITPTIVTDNFDISEDKNGCSIGVSSVDSPALLAEKDLNMSTVNTEEPFKEGVKSALGDQHNGISSGSGQGGEMPAVPMDSKIAVYSGTVSATEREKFKEQPNSLGCLTTGETQDKSDSMDPTTASTLGGKVAVKIVKTPLNASDDLNAHMQDIVLNQGTDCSSGTVPSQGNEGSSLLEPGNGDGICTGVTCGSPSVISCAESCPQEGGHGSTALLHHTLCGQSEDPEDHGASVDGIQSSKQCNTRNIESAPGSQETSAAGGDRSFSFEVGAPPNVAEKAHSPVWSPFPKYITSQSSKMATENTQAGGSLKDTSDDSKKISTVESGKEQLSERKVTESSGGGLSDNCNIDDIIKGRSSPPRQHPIPECSVSSADLVNFPFTDPQHLQLRAQIFVYGALIQGTPPGEAYMVAAFGEPVGGGKPTWEAAWRAAFERFQYKKSPHVSLETPTSSLIGSSVPEKASKGTAITTVPASKKVGKTVAPAHPAVTLHSPTSDFPFGSSTFNLQRGTHLDFSQAVSPFAYNSHMRHPSPGVAPWYTQSPGPRPAAWLIPPQNLIFDSSMQPVIPTNETAKGASSKNISVSHTVSSGVLPSLAPSIVSSPIAVVSDGKQKAASSSKRGTTSQKSRKKKKASASSEQQPVIASPHLKMNMPSFTPAIKHTAGLTLCGSKPVPNMGQIASEHNYQITGGMDSDQRIIFSEQIRGAVEQSAAQAKSASIDSVEAVKHKEGIWSHLSTISRNKLPPKVEEKLTSVAAAAEAAVSVAKAAAEAAKMASEAALQAKMMADEALSSSISVMSMHHEADQYNVISSPPILSSSTPASSLKTKNKSHAPGSIISVAREAARKRVEEASAAAKRAENLDAILKAAELAAEAVFRAGTIIGMGEPLPFTLRELLEAGPNGYWKSASARNKSGSCNDNPVTETLEVDAPANFNKSGRKRGRKPKYDQALPNSEPSSSCKELQSYGIHSGVGHGVVEDVPITVSPNGNNVTSPINIIWNGIEKGSAVEVLSDKGGFGVAWFSAKVIDINGNNVFVNYDNHNGSGPHEEWVPLRQEGDKPPQIRLAHPATLSKFKTRKRLRETAGSCLWVIGDHVDAWVNNSCWREGVISQNYETDETKYDVHFSVGGGGESLVVDAWSLRPSRVWKDGQWVEWSHARERKSKSNKGDSPPEKRQRIDLLQTGGNLSVLGEVGGSSKDNNINNAKNPEELKPLSLSQGEIVFNIGKSVVENKSDSLAFRRPGLQKEGSKVVYGVPKHGKKKKFMEVSKHYDAGQSDKISEGNSSNRFVKHLMPQLPRPRENASKVDPIRGRRVGETRSRLPKPTKSHNVGASSVPGKDSLPMQMHVPNSGVSERSSSFAGSSTSTSNNEKPTSENNNPVLGVGLRTEVSSGPELQTASTVPSSKPNVSTTNRAKRKYVPTVSNTNRGILKTSEKSSSDSAEPRRTTSDSAEPRRSNRRIQPTSRLLEGLQSSLVISKVPGEKVHRSNYKSASSRGRTQAHG

SEQ ID NO: 223153 - protein, 2061 aa, Zea Mays
MDHDDTDFQSQNFQLAGEGSNKFSSDTEAFFSVQGHGNSWIEVLSTGSSVVDFSSSAAESCSISKTNNVWSEATSTESVEMLLKSVGENETTGDMDNNAHLKLSGMDSQIDQSSVHPKSSNSLPDSTVVPTEEDQSLSTHSRMTDDLDRSQISHSIMTADLSNTESQLEHFRPFLMDKKAEQAVDSVGEKCIAGEKLSSSNNAPGSYPAIDNYFGAGHDDRSLDKLNIPSTGVDSKNLNNEPFPELAPLQNIYTDSYHFKEDTTESEAGVTPQDSKFRHINENKVEGGLQELQSLSCAGQSLGAVNLSSQASNETLLSESSDGLLEAITNPVKMLHRSDDTCNKVNSTPQPSFSAVQHGAEGLENSVHRSNEFVVKEFSIGSNSLLSHQPEADPKFFNPHPISSLSPKSKISDATCVPEETKNVGSNSINTCCTGDESKHVVLENRQYSVDNLKSGDMGEKMSGEEIPAVSGNIDQMIENDHEEKAANATGTSKDKVDPSDSIALENFAADTFNASEDSDIPSLNHKRSFEEHESSALGVEPKNTNLLQSTSGLQEKISASVISSSSGITPTIVTDNFDISEDKNGCSIGVSSVDSPALLAEKDLNMSTVNTEEPFKEGVKSALGDQHNGISSGSGQGGEMPAVPMDSKIAVYSGTVSATEREKFKEQPNSLGCLTTGETQDKSDSMDPTTASTLGGKVAVKIVKTPLNASDDLNAHMQDIVLNQGTDCSSGTVPSQGNEGSSLLEPGNGDGICTGVTCGSPSVISCAESCPQEGGHGSTALLHHTLCGQSEDPEDHGASVDGIQSSKQCNTRNIESAPGSQETSAAGGDRSFSFEVGAPPNVAEKAHSPVWSPFPKYITSQSSKMATENTQAGGSLKDTSDDSKKISTVESGKEQLSERKVTESSGGGLSDNCNIDDIIKGRSSPPRQHPIPECSDLVNFPFTDPQHLQLRAQIFVYGALIQGTPPGEAYMVAAFGEPVGGGKPTWEAAWRAAFERFQYKKSPHVSLETPTSSLIGSSVPEKASKGTAITTVPASKKVGKTVAPAHPAVTLHSPTSDFPFGSSTFNLQRGTHLDFSQAVSPFAYNSHMRHPSPGVAPWYTQSPGPRPAAWLIPPQNLIFDSSMQPVIPTNETAKGASSKNISVSHTVSSGVLPSLAPSIVSSPIAVVSDGKQKAASSSKRGTTSQKSRKKKKASASSEQQPVIASPHLKMNMPSFTPAIKHTAGLTLCGSKPVPNMGQIASEHNYQITGGMDSDQRIIFSEQIRGAVEQSAAQAKSASIDSVEAVKHKEGIWSHLSTISRNKLPPKVEEKLTSVAAAAEAAVSVAKAAAEAAKMASEAALQAKMMADEALSSSISVMSMHHEADQYNVISSPPILSSSTPASSLKTKNKSHAPGSIISVAREAARKRVEEASAAAKRAENLDAILKAAELAAEAVFRAGTIIGMGEPLPFTLRELLEAGPNGYWKSASARNKSGSCNDNPVTETLEVDAPANFNKSGRKRGRKPKYDQALPNSEPSSSCKELQSYGIHSGVGHGVVEDVPITVSPNGNNVTSPINIIWNGIEKGSAVEVLSDKGGFGVAWFSAKVIDINGNNVFVNYDNHNGSGPHEEWVPLRQEGDKPPQIRLAHPATLSKFKTRKRLRETAGSCLWVIGDHVDAWVNNSCWREGVISQNYETDETKYDVHFSVGGGGESLVVDAWSLRPSRVWKDGQWVEWSHARERKSKSNKGDSPPEKRQRIDLLQTGGNLSVLGEVGGSSKDNNINNAKNPEELKPLSLSQGEIVFNIGKSVVENKSDSLAFRRPGLQKEGSKVVYGVPKHGKKKKFMEVSKHYDAGQSDKISEGNSSNRFVKHLMPQLPRPRENASKVDPIRGRRVGETRSRLPKPTKSHNVGASSVPGKDSLPMQMHVPNSGVSERSSSFAGSSTSTSNNEKPTSENNNPVLGVGLRTEVSSGPELQTASTVPSSKPNVSTTNRAKRKYVPTVSNTNRGILKTSEKSSSDSAEPRRTTSDSAEPRRSNRRIQPTSRLLEGLQSSLVISKVPGEKVHRSNYKSASSRGRTQAHG

SEQ ID NO: 223154 - protein, 2085 aa, Zea Mays
MDHDDTDFQSQNFQLAGEGSNKFSSGLRPFALPKLDIEDQLQGHLRFDNLIDTEAFFSVQGHGNSWIEVLSTGSSVVDFSSSAAESCSISKTNNVWSEATSTESVEMLLKSVGENETTGDMDNNAHLKLSGMDSQIDQSSVHPKSSNSLPDSTVVPTEEDQSLSTHSRMTDDLDRSQISHSIMTADLSNTESQLEHFRPFLMDKKAEQAVDSVGEKCIAGEKLSSSNNAPGSYPAIDNYFGAGHDDRSLDKLNIPSTGVDSKNLNNEPFPELAPLQNIYTDSYHFKEDTTESEAGVTPQDSKFRHINENKVEGGLQELQSLSCAGQSLGAVNLSSQASNETLLSESSDGLLEAITNPVKMLHRSDDTCNKVNSTPQPSFSAVQHGAEGLENSVHRSNEFVVKEFSIGSNSLLSHQPEADPKFFNPHPISSLSPKSKISDATCVPEETKNVGSNSINTCCTGDESKHVVLENRQYSVDNLKSGDMGEKMSGEEIPAVSGNIDQMIENDHEEKAANATGTSKDKVDPSDSIALENFAADTFNASEDSDIPSLNHKRSFEEHESSALGVEPKNTNLLQSTSGLQEKISASVISSSSGITPTIVTDNFDISEDKNGCSIGVSSVDSPALLAEKDLNMSTVNTEEPFKEGVKSALGDQHNGISSGSGQGGEMPAVPMDSKIAVYSGTVSATEREKFKEQPNSLGCLTTGETQDKSDSMDPTTASTLGGKVAVKIVKTPLNASDDLNAHMQDIVLNQGTDCSSGTVPSQGNEGSSLLEPGNGDGICTGVTCGSPSVISCAESCPQEGGHGSTALLHHTLCGQSEDPEDHGASVDGIQSSKQCNTRNIESAPGSQETSAAGGDRSFSFEVGAPPNVAEKAHSPVWSPFPKYITSQSSKMATENTQAGGSLKDTSDDSKKISTVESGKEQLSERKVTESSGGGLSDNCNIDDIIKGRSSPPRQHPIPECSDLVNFPFTDPQHLQLRAQIFVYGALIQGTPPGEAYMVAAFGEPVGGGKPTWEAAWRAAFERFQYKKSPHVSLETPTSSLIGSSVPEKASKGTAITTVPASKKVGKTVAPAHPAVTLHSPTSDFPFGSSTFNLQRGTHLDFSQAVSPFAYNSHMRHPSPGVAPWYTQSPGPRPAAWLIPPQNLIFDSSMQPVIPTNETAKGASSKNISVSHTVSSGVLPSLAPSIVSSPIAVVSDGKQKAASSSKRGTTSQKSRKKKKASASSEQQPVIASPHLKMNMPSFTPAIKHTAGLTLCGSKPVPNMGQIASEHNYQITGGMDSDQRIIFSEQIRGAVEQSAAQAKSASIDSVEAVKHKEGIWSHLSTISRNKLPPKVEEKLTSVAAAAEAAVSVAKAAAEAAKMASEAALQAKMMADEALSSSISVMSMHHEADQYNVISSPPILSSSTPASSLKTKNKSHAPGSIISVAREAARKRVEEASAAAKRAENLDAILKAAELAAEAVFRAGTIIGMGEPLPFTLRELLEAGPNGYWKSASARNKSGSCNDNPVTETLEVDAPANFNKSGRKRGRKPKYDQALPNSEPSSSCKELQSYGIHSGHGVVEDVPITVSPNGNNVTSPINIIWNGIEKGSAVEVLSDKGGFGVAWFSAKVIDINGNNVFVNYDNHNGSGPHEEWVPLRQEGDKPPQIRLAHPATLSKFKTRKRLRETAGSCLWVIGDHVDAWVNNSCWREGVISQNYETDETKYDVHFSVGGGGESLVVDAWSLRPSRVWKDGQWVEWSHARERKSKSNKGDSPPEKRQRIDLLQTGGNLSVLGEVGGSSKDNNINNAKNPEELKPLSLSQGEIVFNIGKSVVENKSDSLAFRRPGLQKEGSKVVYGVPKHGKKKKFMEVSKHYDAGQSDKISEGNSSNRFVKHLMPQLPRPRENASKVDPIRGRRVGETRSRLPKPTKSHNVGASSVPGKDSLPMQMHVPNSGVSERSSSFAGSSTSTSNNEKPTSENNNPVLGVGLRTEVSSGPELQTASTVPSSKPNVSTTNRAKRKYVPTVSNTNRGILKTSEKSSSDSAEPRRTTSDSAEPRRSNRRIQPTSRLLEGLQSSLVISKVPGEKVHRSNYKSASSRGRTQAHG

SEQ ID NO: 223155 - protein, 2086 aa, Zea Mays
MDHDDTDFQSQNFQLAGEGSNKFSSGLRPFALPKLDIEDQLQGHLRFDNLIDTEAFFSVQGHGNSWIEVLSTGSSVVDFSSSAAESCSISKTNNVWSEATSTESVEMLLKSVGENETTGDMDNNAHLKLSGMDSQIDQSSVHPKSSNSLPDSTVVPTEEDQSLSTHSRMTDDLDRSQISHSIMTADLSNTESQLEHFRPFLMDKKAEQAVDSVGEKCIAGEKLSSSNNAPGSYPAIDNYFGAGHDDRSLDKLNIPSTGVDSKNLNNEPFPELAPLQNIYTDSYHFKEDTTESEAGVTPQDSKFRHINENKVEGGLQELQSLSCAGQSLGAVNLSSQASNETLLSESSDGLLEAITNPVKMLHRSDDTCNKVNSTPQPSFSAVQHGAEGLENSVHRSNEFVVKEFSIGSNSLLSHQPEADPKFFNPHPISSLSPKSKISDATCVPEETKNVGSNSINTCCTGDESKHVVLENRQYSVDNLKSGDMGEKMSGEEIPAVSGNIDQMIENDHEEKAANATGTSKDKVDPSDSIALENFAADTFNASEDSDIPSLNHKRSFEEHESSALGVEPKNTNLLQSTSGLQEKISASVISSSSGITPTIVTDNFDISEDKNGCSIGVSSVDSPALLAEKDLNMSTVNTEEPFKEGVKSALGDQHNGISSGSGQGGEMPAVPMDSKIAVYSGTVSATEREKFKEQPNSLGCLTTGETQDKSDSMDPTTASTLGGKVAVKIVKTPLNASDDLNAHMQDIVLNQGTDCSSGTVPSQGNEGSSLLEPGNGDGICTGVTCGSPSVISCAESCPQEGGHGSTALLHHTLCGQSEDPEDHGASVDGIQSSKQCNTRNIESAPGSQETSAAGGDRSFSFEVGAPPNVAEKAHSPVWSPFPKYITSQSSKMATENTQAGGSLKDTSDDSKKISTVESGKEQLSERKVTESSGGGLSDNCNIDDIIKGRSSPPRQHPIPECSDLVNFPFTDPQHLQLRAQIFVYGALIQGTPPGEAYMVAAFGEPGGGKPTWEAAWRAAFERFQYKKSPHVSLETPTSSLIGSSVPEKASKGTAITTVPASKKVGKTVAPAHPAVTLHSPTSDFPFGSSTFNLQRGTHLDFSQAVSPFAYNSHMRHPSPGVAPWYTQSPGPRPAAWLIPPQNLIFDSSMQPVIPTNETAKGASSKNISVSHTVSSGVLPSLAPSIVSSPIAVVSDGKQKAASSSKRGTTSQKSRKKKKASASSEQQPVIASPHLKMNMPSFTPAIKHTAGLTLCGSKPVPNMGQIASEHNYQITGGMDSDQRIIFSEQIRGAVEQSAAQAKSASIDSVEAVKHKEGIWSHLSTISRNKLPPKVEEKLTSVAAAAEAAVSVAKAAAEAAKMASEAALQAKMMADEALSSSISVMSMHHEADQYNVISSPPILSSSTPASSLKTKNKSHAPGSIISVAREAARKRVEEASAAAKRAENLDAILKAAELAAEAVFRAGTIIGMGEPLPFTLRELLEAGPNGYWKSASARNKSGSCNDNPVTETLEVDAPANFNKSGRKRGRKPKYDQALPNSEPSSSCKELQSYGIHSGVGHGVVEDVPITVSPNGNNVTSPINIIWNGIEKGSAVEVLSDKGGFGVAWFSAKVIDINGNNVFVNYDNHNGSGPHEEWVPLRQEGDKPPQIRLAHPATLSKFKTRKRLRETAGSCLWVIGDHVDAWVNNSCWREGVISQNYETDETKYDVHFSVGGGGESLVVDAWSLRPSRVWKDGQWVEWSHARERKSKSNKGDSPPEKRQRIDLLQTGGNLSVLGEVGGSSKDNNINNAKNPEELKPLSLSQGEIVFNIGKSVVENKSDSLAFRRPGLQKEGSKVVYGVPKHGKKKKFMEVSKHYDAGQSDKISEGNSSNRFVKHLMPQLPRPRENASKVDPIRGRRVGETRSRLPKPTKSHNVGASSVPGKDSLPMQMHVPNSGVSERSSSFAGSSTSTSNNEKPTSENNNPVLGVGLRTEVSSGPELQTASTVPSSKPNVSTTNRAKRKYVPTVSNTNRGILKTSEKSSSDSAEPRRTTSDSAEPRRSNRRIQPTSRLLEGLQSSLVISKVPGEKVHRSNYKSASSRGRTQAHG

SEQ ID NO: 223156 - protein, 117 aa, Zea Mays
MRYKKTYQYDAVFALGFVTVYDQLMEGYPSNEDRDSIFKAYITALNEDPDQYRADALKMEEWARSQNGSSLVDFSSRDGEIEAILKDISERAKGKGNFSYSRFFAVGLFRLLDFALH

SEQ ID NO: 223157 - protein, 216 aa, Zea Mays
MTTAYEKKWPLYLSTKNTILKKYDGRFKDIFQEVYEADWKSKFEAAGIWYEHRLIDDMVAYALKSEGGYVWACKNYDGDVQSDFLAQGFGSLGLMTSVLVCPDGKTIEAEAAHGTVTRHFRVHQKGGETSTNSIASIFAWTRGLAHRAKLDDNARLLDFALKLEAACVGAVESGKMTKDLALLVHGSSKVTRSHYLNTEEFIDAVATELRSRLGAN

SEQ ID NO: 223158 - protein, 399 aa, Zea Mays
MDEGDEMTRVFWQSIKDKLIFPFLDLDIKYYDLGILHRDATDDKVTVEAAEATLKYNVAIKCATITPDETRVKEFNLKHMWKSPNGTIRNIINGTVFREPIICKNVPRLVPGWTKPICIGRHAFGDQYRATDAVLKGPGKLKLVFEGKEEQIDLEVFNFTGAGGVALSMYNTDESIRAFAAASMTTAYEKKWPLYLSTKNTILKKYDGRFKDIFQEVYEADWKSKFEAAGIWYEHRLIDDMVAYALKSEGGYVWACKNYDGDVQSDFLAQGFGSLGLMTSVLVCPDGKTIEAEAAHGTVTRHFRVHQKGGETSTNSIASIFAWTRGLAHRAKLDDNARLLDFALKLEAACVGAVESGKMTKDLALLVHGSSKVTRSHYLNTEEFIDAVATELRSRLGAN

SEQ ID NO: 223159 - protein, 218 aa, Zea Mays
MFILTEEPKPKPATASLLFCSLDSGHESATNSARKIVPPMCPRDAAPVAPRPQATRRLTRGGVPTRPRRSSAVYIHTRLASHLCTAAQAKSPKERRPRDEQGGEGGQRPRTSAHAQCREHRARTRSARRRRRRTSRWAAGRTARARTCGRGRTRAPSRSRRCRTRPMPGQPAPAQARDFVPFRSVPDRVCTIALCPLLGCSVSARVECVKPFCKKCTC

SEQ ID NO: 223160 - protein, 408 aa, Zea Mays
MDPVRKSVCVTGAGGFVASELVKLLLSRGQYAVRGTVRDPDADRETWECGTAFFLEVERSSRFFIKKGASKNAHLKVLEGAEERLQLLKADLMDYDSIASAVAGCEGVFHVASPVLSHRPSNPEVEVIAPAVIGTTNVLEGAGERLQLVKADLLDYSSVASAIAGCEGVFHVASPVPSGRSSNPEVEVIGPAVTGTTNVLKACYEAKVGRVVVVSSCAAVYANPNYPKGKVFDEDCWSDEAYCRKNEDWYFVSKTLAEREAFAYAAKTGLDVVTICPSLVFGPLMQPTVNSSSKIILKYFTGDRETVENILRNMVDVRDVADALLLAYEKPEASGRYICSSHAIKVADMINILKTLYPSYPYPKNFVEDDDNSVYSSEKLQKLGWSFKPIEESLRDTVESYKAFGILN

SEQ ID NO: 223161 - protein, 371 aa, Zea Mays
MDPVRKSVCVTGAGGFVASELVKLLLSRGQYAVRGTVRDPGASKNAHLKVLEGAEERLQLLKADLMDYDSIASAVAGCEGVFHVRGTVRDPGASKNAHLKVLEGAGERLQLVKADLLDYSSVASAIAGCEGVFHVASPVPSGRSSNPEVEVIGPAVTGTTNVLKACYEAKVGRVVVVSSCAAVYANPNYPKGKVFDEDCWSDEAYCRKNEDWYFVSKTLAEREAFAYAAKTGLDVVTICPSLVFGPLMQPTVNSSSKIILKYFTGDRETVENILRNMVDVRDVADALLLAYEKPEASGRYICSSHAIKVADMINILKTLYPSYPYPKNFVEDDDNSVYSSEKLQKLGWSFKPIEESLRDTVESYKAFGILN

SEQ ID NO: 223162 - protein, 343 aa, Zea Mays
MEKLVYFATIISLSMAALLVPLRVQCEEAARAAAARSCHAGTGASASAPAAAAAWKRSCGGGKAGKQQPQVEGMFVFGSSLVDNGNNNFLNGSGVRADYLPYGVDFPLGPSGRFSNGRNVIDALGELLGLPGLVPPFADPRTRRARAALRGVNFASGGSGILEHTGQGKVVSLRQQITNFESVTLPDLRAQLRGPAAAANHWIKGQDSFHKCYLSKCLFVIGTGGNDYLLDYFNPGNGTQGGPPLSEFTASLITKLSGHLQGDEQSLLRDVEELVGRAVQEAGAHLQRPDGVRLLRRAAPDGRRERQDRAQGLRLQLARPRLPHQRQEASHAVALVEASHACL

SEQ ID NO: 223163 - protein, 663 aa, Zea Mays
MMRKLPRYVGRLFAVLMSMLLDVQDEPAWHAAVSEEEDAGETGSYVFAQECLDRLSIAVGGNTILSVAAELLPSFFSSEDWKRRHAALVTIAQIAEGSAKMMIKNLEQVVGMVLNSFQDPHPRVRWAAINAIGQLSTDLGPELQNQLHHVVLPSLASAMDDVQNPRVQAHAASAILNFSENCRPDILTPYLDVIVGKLLLLLQTGNQMVQEAALTALASAADSSQEHFQKYYDAVMPYLKAILMNATDKSNRMLRAKSMECISLVGMAVGKQKFKDDAKQVMEVLMTLQGSQMEADDPITSYMLQAWARLCKCLGQDFLPYMSVVMPPLLQSAQLKPDVSVTSAGPEDENGESDDEGVETITLGDKRIGIRTSLLEEKATACNMLCCYADELKEGFFPWIDQVTTTLVPLIKFYFHEEVRKAAISAMPELLRSAKLAIEKGQAQGRDKSYLKQLSDYIVPALVEAMHKEPEPQICASILESLNESIQLSGTLLDQNQVRSAVEGVKEVIVASTNRRIERTERARAEDFDSEEEELLREENEQEDEIFDQIGDCLGTLVKTFKTSFIPFFDELSMYLTPMLGKNKSPEERRIAICIFDDVAEHCREAAVRYYDTYLPSLLEACMSENPDVRQAAVYGIGICAECGGSAFRPHTGGMRPYPDYTM

SEQ ID NO: 223164 - protein, 109 aa, Zea Mays
MQNNRLYCHGLHRLLTWVHFSSLPVHSGDTDAVVPVTATRYSIDALKLPTLVNWYPWYDHGKVGGWSQVYKGLTLITIAGAGHEVPLHRPRQALIMFRHFLQNKPMPAQ

SEQ ID NO: 223165 - protein, 958 aa, Zea Mays
MQLLKETNNILKSSMSSLGGGSPEEIERFWSACVLYCVSRLSKAGRSKEDGSVSLCQILRASKLNIVDFFKEMPQFCIKVAHILTGLYGSDWEKRLELKELQANVVHLSLLSSYYKRAYQELFLSNDGKSSDNSSESNNQEASDYYRFGWLLFLVLRIQTFSRFKDLVTSTNELVSVLAVLIIHVPVRLRNFDIKDSSYFGKKSDRGVSLIASLCEKHHTSEDELSKALEKTNTLIMDILKKKPCPATSACQQDNLSFIDPEGLTVFKDLLQGDSLKPSLIILEKEYENAINTKGELDERMFANDEDSLLGSGSLSGGAINLPGTKRKYDVMASPAKSISSPNPMSPPRFCLSPKGNGFCNSKMAPSTPVSTAMTTAKWLRNTVSPLPSRPSGELLRFFSACDKDLTDDIAHRAGIILGAIFTSSSFGERICTSMRSASRMDAIWTEQRKMEALKLYYRVLESMCRAESQILSGNNLTSLLSNERFHRCMIACSAELVLATHKTVTMMFPAVLEKTGITAFDLSKVIEGFVRHEDTLPRELKRHLNSLEERLLESMAWEKGSSMYNSLIVARPALSVEISRLGLLAEPMPSLDAIAAHHNISLGGLPPLPFQKQERLQDKDEVRSPKRACTERRNVLVDSNSLRSPVKDIIKPKLPPLQSAFASPTRPNPAAGGETCAETGIGVFFSKISKLAAIRIRSLCERLQLPQQVLERVYSLVQQILSQQTGLFFNRHIDQIILCSIYGVAKISQLELSFKEIIFGYRKQPQCKPQVFRSVYVHWPPRSRNGKTGEDHVDIITFYNEVFIPAVKSLLVEVGPGASASPKKKEEEKVGPFPESPRLARFPNLPDMSPKKVSATHNVYVSPLRSSKMDTLLSPSSKSYYACVGESTYAFQSPSKDLKAINNRLNSVSGGKKVSGRLNFDVVSDLVVASSLGSDRDAKPAADPAKTTPVKCEPSDS

SEQ ID NO: 223166 - protein, 503 aa, Zea Mays
MGSTRTSHPSFPVLLLFLLATAAAAGSNKAEEVDDLQYLIDNSEDIPPNDPDGWPEGGGGGDYDDDLLFQDQDQDLPDYEPQIDETHVVVLTAANFSSFLAATRHVMVEFYAPWCGHCRELAPEYAAAAAHLAVHHNQTDLALAKADATEETDLAQRYDVQGFPTIILFIDGVPKDYNGARTKDAIVDWINKKLGPAVQDVTSVHEAERILTGDDKAVIAFLDTLTGAHSDELAAASRLEDSINFYQTSIPDVAKLFHIDPAAKRPSIVLLKKEEEKLTFYDGKFKASAIADFVSANKLPLVTTLTQETSPSIFGNAIKKQILLFAVASESSKFLSIFKEAAKPFKGKLLFVFVERDNDEVGEPVANYFGLTGQETTVLAYTGNEDARKFFLDGEVSLEAIKDFAEGFLEDKLTPFYKSEPVPESNDGDVKIVVGKSLDVIVLDESKDVLLEIYAPWCGHCQSLEPTYNKLAKHLSGVDSLVIAKMDGTTNEHPRAKCSAHGF

SEQ ID NO: 223167 - protein, 1490 aa, Zea Mays
MHGWRGAEGCDVRRRRLVRLMWPAARVEAEAPPPPAQGPATSPSGSSATHPRTTYRPESSAQKQECIDLPCPVSSDSFVKDGREIRVGDCALFRAVDVPPFIGLIRWIEKKEEGYPKLRVSWLYRPNDVKLNKGIQLNAAPNEIFYSFHQDEASAVSLLHPCKVAFLRKGVELPAGIASFVCWRVYDIDNKCLWWLTDRDYINEEVNRLLYRTRLEMRAALQSGGRSPKRLNSPSASQQLKTASDGTQNGGLSRGKKRERSEQGVDPAKRDRDRLLKVDDGEPGSFNLDDIKSEIAKITEKGGLPNAEAVAKLVHLMQLDRTEQKIDHSGRVILADVIAATDSPDCLGRFVQSRGLPVLDSWLQEAHKGKSGDGSSPKEADKPIDELLLALLRALAKLPINLSALQSCSIGKSVNHLRSHKNLEIQKKAKCLVENWKKRVDAEMKSNDVKPLVSGQSVSWSGKAGFQEISNVGTKRGGSSENSPKNSVPTLSSSKVLTDKPGGTDAAAKLNPGVSALSNLQHVQSTHVTTNLKEQPCKSTGGTGCPELPTVKEEKSSSSSQSPNNSQSISSEPSKDARSSTAASGGASKTSGSSSRSHRRANNGLVSGNLKEPSVGRSVSLDRSLLQDKSSQTGTASEKGIDMPSDHGNNHRLIVRFPNPGRSPARSASAGSFDDPSVTGGRASSPVVADRHDQTERRVKVKTENSRPHLASDANAESWHSNDIKGATGSEEGDKSPCAILDDDNSRTPDHSVKDAHASRAACSSYMNEKGVSETKVGTSFSPMNALIEIKYSEASHSLQAGDDTAMNLLASVAGEISKSELASSPSTSVKKLVCEGVNTGKVKVESDMGPSHPGQADAKKVAMGNEVKNDACLVPKEEQHQTAPSPELADSKAVKSSAKIEIHEGHANKCNSQHASIDSKGENRDGCTAHGKVEDGSTNKDGAMESAFGSQRSLVVSSKNSRLVLAGESSLSAADKQTQGLLKSTNHKHLLSVSDNPGAFDRHDSMAGKLDLMAAEVKKADVVGNSSVLQNDTEKKEHVSPSSADVPKLVPAASPVGVANGNNEMKESNGSSSESNSHVKSEGVNSQQSEQSAKQSSKKSSDGVCGKEDHVLSDEEGSSLAAHTKSNATAKLDFDLNEGIPGDDGHQSETTASPVVCSSAIHLTGLLPFTSPTTSGLPPAPITVAAPAKGPFVPPENLLRAKPEIGWKGSAATSAFRPAEPRKILEMPAATRDIPVSHAAGKQSRPTLGFDLNVADDQALEEDFPQSSAQTTCSESGNTRSRDGSSRSAGIELDLNRADEVADNGQFVPNASHRVEVPLFSTRSLPRVLSNAGANSSRDFDLNSGPDLYDVGTEPAPRSLPSKNTSSIQFLPQVPVRMNSDAMSNNISPWLVSTSPCGPVAIQSFLPSREQPYPLEAAPGAQRIIAPTADGGQFGGDPCRPPVISTSPAMVFHPPAYQSSIFSNSFLLSCWASRSVAFPTFKAVCHKSC

SEQ ID NO: 223168 - protein, 232 aa, Zea Mays
MSSPVAQPPRQLGIRRGRSQVSNWLQESEGRAQHYIAKIWATVTISMFYNLEVEGMENLPPNSCPGVYVANHQSFLDIYTLLTLGRCFKFISKTSIFMFPIIGWAMYLLGVIPLRRMDSRSQLDCLKRCVDLVGKGASVFFFPEGTRSRDGKLGVFKRGAFSVAAKTGAPVIAITLIGTGKLMPSGMEGILNSGSVKVIIHRPIQGNDAETLCSEARNVIADTLLLHGYGAH

SEQ ID NO: 223169 - protein, 596 aa, Zea Mays
MLQRAASNAYSWWWASHIRTTQSKWLDANLQDMENRVKIMLKLLGQEADSFGKRAEMYYHTRPEVISHVEQVYRAYRALVERYDHISKELHKANHTIATACPEEVQYAMLEEEDHDFPKAITPIKTHKSLVQEILNAKRQGPSGSGWNKPPSHPRMSAEEAQEEIGRLQKSILVLQTEKEYVKSSYESGIARYREIEKQIADTQNEICLIQDRFDAHAAIGDDEARALMTITALRSCQGTIAELVRHFEELIKLAAVELEKTKSLRAQLYAMMDGDTDTCSREASSTDTSVVARSYPVTKAILELQPIYEKLDKFFSSGSESSAEEIAENVDELVDKVINLELKFPKQTAQINQLIQENENLKNKLDELQDEMALRDDQSELNEQIKQLEDEFSTVRVLERSILEEEASVSTGFSEVFSCIINISKALGSFGPEDLHNLSAAVEDGAMVPRDVFLEQSAEESKGGDFRDIEAPTLRHSLGQDREDVSEVVSDNGNDGIHGSRNANEEIIPGSCLMQQVRYKLRLHFDDHIDPLFSSENENIVHDSGEGNVDSSSGKVFQSSSETENGSRNFPNGEIMRGEYPLGIVGQTHLLHSVV

SEQ ID NO: 223170 - protein, 439 aa, Zea Mays
MPANDHHPNGLLQESAPGLQHDDMENQQQQVCWERFLLKDTLNVLLVESDASTRQVVSALLRCCMYQVISAKNGQQAWAYLEDKGNNIDLVLTEVFMPGVSGISLLSRIMRHNIFKNIPVIMMSSSDDMSTVFKCLSKGAVDFLVKPIRKNELKNLWQHVWRQRCHSSSGSGSESGIQTQKCAKSKGVNESGNNSGSNDDEAGMGLNARDDSDNGSGTQDLNDLVGLGGVQRMAQNSWTKLAVEIDSPQATSLDQLADPPNSTCAQVIHSKSEICSNRWLPDKSNRNCKKPKNTNDDFKGKDLEIGGPENLYMGHQSSPNGRSIKAADHENNSKESMMENLEEPTVRAADLIGSMAKNMDTPQAARAAEDTPNFSSKVPEGKGKNNQNDKYVLPSLELSLKRSRSCGDGANNKNTVKDDEQRNCVLRRSNLSAFTRCKT

SEQ ID NO: 223171 - protein, 406 aa, Zea Mays
MLIGGSVFIAGSVFGGAATNIPMLLMNRILLGIGLGFTNQSIPLYLSEMAPPRYRGAINNGFELCISLGILFANVLNYFVIKITAGWGWRISLSMAALPAAFLTIGAIFLPETPSFIIQRDGNNTDKARVLLQKLRGTASVQKELDDLVRASDLSRATRYPFRSILERKYRPQLVVALLVPFFNQVSGINVVNFYAPVMFRTIGLKESASLLSSVVTRLCATSANVVAMVVVDRVGRRKLFLAGGVQMILSQFTVGAILAAKFRDYEEMGDGYAYLVLTTLCVFVAGFAWSWGPLTFLVPAEVCPLEIRSAGQSIVVAVVFLMTFVISQTFLEVLCRVKSATFFVFGGWICLMTLFVYLFLPETKKLPMEQMEQVWKTHWFWKKVVGEEADRKEAGAGNIALSGLS

SEQ ID NO: 223172 - protein, 198 aa, Zea Mays
MFGVAGSPAYVAPEVLSGSYSEKVDIWGAGVLLHVLLLGSLPFQGGSLDAVFESIKTLELDFSSTPWESISVLGRDLIGRMLNRDVSCRMTADEVLSHPWVVFYTECPLKVVAANLCLPNKVIAPKIPWDRHKSECDSVSDASQRSEDQDECGIVDALAAAITRVRISEPKRSRLCSPAITIQQECSSNLKNNLCTAF

SEQ ID NO: 223173 - protein, 69 aa, Zea Mays
MWQCPIFVIIICQGIILFACASLFANAGVLEQVFHPRTLTPPPQLSSVSRASLREIKAKVTCLCLVIML

SEQ ID NO: 223174 - protein, 311 aa, Zea Mays
MMADLCGHHGPSAANSIFCSWMALGNILGYSSGSTNNWHKWFPFLMTNACCEACANLKGAFLVAVVFLVMCLTITLFFAKEVPYRGNQNLPTKANGEVETEPSGPLAVLKGFKNLPTGMPSVLLVTGLTWLSWFPFILYDTDWMGREIYHGDPKGSNAQISAFDEGVRVGSFGLLLNSIVLGFSSFLIEPMCRKDAITASTSIKAVCLVLFAFLGVPLAILYSVPFAVTAQLAATKGGGQGLCTGVLNISIVIPQVIIALGAGPWDALFGKGNIPAFGVASGFALIGGVVGVFLLPKISKRQFRAVSAGGH

SEQ ID NO: 223175 - protein, 346 aa, Zea Mays
MPLAEPPQWRRKATDFFSTSSVKLKQAGQSAGDNIADVAGKVGSAVKSRWVVFQEARQQQQQQRPPHETVQERIITAAATTGLLFRKGISETKEKVAVGKVKVEEAAKKTADKSKSILNNIERWQKGVASTDVFGVPIEATVQREQSGKAVPLVLVRCADYLVISDSGASLPEGVNPIDVGALVKCYLASIPEPLTTFSLYDELRAARVSIPDLRDILKKLPNVNYMTIEFVTALLLRVSHKSSLNKMDSRSLAVEFAPLIMWRQGDAGTDLRNHLKLTLKPPPKIVDTTSNTATWDLFDEDGEDASSQIPLDDASPPDYNSIEVIQCLIEHHNAIFTDANETVWR

SEQ ID NO: 223176 - protein, 212 aa, Zea Mays
MYEGILVDLPFATFFLSKLKQKYNFLNDLPSLDPELYRHLLFLKHYNGDISELELYFVIVNNEYGEQCEEELLPGGRHMRVTNDNVITFIHLVANHRLNYQIRAQSTHFLRGFQQLIPKDWIDMFNEHEIQVLISGSLESLDIDDLRSNTNYSAGYHPDHELIEMFWEVLKSLSSDNQKKFLNISNQNSAFRELVFQGWRSMQTACLHQLPA

SEQ ID NO: 223177 - protein, 472 aa, Zea Mays
MARAALRLGVRALALLVFVSVALLPLVSSDDGYRHCEGVVRGWADASSGRVKDGDKLSLKDLLFFLHIPRTGGRTYFHCFLKKLYTNAQECPRSYDKLRFDPSHPDCKLVVSHDDYSLTSKLPRERTSVVTILRNPVDRVFSTYEFSVEVAARFLVHPNLTSAKLMTTRVLTKSRAVSTLDIWPWKYLVPWMREDLFARRDARGVYKVHSSKKVNAYDVDDMVMPLHRYINDPVAHEIIHNGATFQITGLTNNSYFDGAHEVRHCVRKHPDLGRIVLEVAKNRLDQMLYVGLTEDHEESARLFAHMVGAQVLSQSGTLTLDLKEDLPIETDSHPSMEPEDEETNGHLNSTHGWQNNEAMNSTNDEHGKGNMTVGKLMEAYETCIAKLWKSQSGRRKISLKKVQEANFSKEARKLVSEAILNQIISLNRLDMELYDHAKKIFTQEHLMLKAQQSMVGQHRQFGEQKNVQMDLA

SEQ ID NO: 223178 - protein, 65 aa, Zea Mays
MLIYVAQGIRQLLNILFLAYFVVNYCPRILAYVKLRNIYFKYHYWLGSDYSCFLVLVRTNEYSLL

SEQ ID NO: 223179 - protein, 65 aa, Zea Mays; identical to SEQ ID NO: 223178

SEQ ID NO: 223180 - protein, 65 aa, Zea Mays; identical to SEQ ID NO: 223178

SEQ ID NO: 223181 - protein, 649 aa, Zea Mays
MPNKPVINEISEDDVNGLSDQIRQLKDELIRTKSGDTTTCKARYFSAQSARESLHTLRVSLNRSLIFPHIEVDSEEEMDVDEEDVQELRDQISKIHSSSEDTLDDFMDAESGDESTPCSVGRSEDDQVIIDDFEGPQQEEQKEVSNNTNANEDLGSDRKSNLSIIASTRLSPIQDPTLCSSPKIHNKARMSITSLGLSPSKIRISDSPGDRNVEMCTNSAFRSSLQSSKLSPTDSLAASLQRGLHIIEYHQQNPAPRKSFIGLSFDHFARQSVAKISSAVQALPEDQGNNLCSFCKKPMNTNDNQTENDGNITKEIASKRETELEALCEEQRAKIQELSSLIDQYKNRSEELTSEGKVSVSLSVNEREVLLAEIQSLREQLKNQTTVSTTGSLLDQLRNGSTDQEYELDKERQKWMESESKWISLTEELRVDLESNRMHAEKTEMELCNEKKCTAELDDALQRAMYGHARMVEHYVELQELYNDLLEKHRRVMEAISEVKRAAARAGRKGCGTAFAAALAAELSTVRIDREKERAQLKEQNRRLRIQLRDTAEAVHAAGELLVRLRETEEASTLEKERTAALLQENEKLKKQLEKLRKKHEMELETMKVHLAESRLPESALGAFYHHENERTPDDDLSWRAAFASAYSD

SEQ ID NO: 223182 - protein, 322 aa, Zea Mays
MLVPSSPLLSSSPPLHSPEPPPHLRMGGSTTTVVVMLIVVLHYYMLLVDGASWDEVSSEADGPAPAEGPDDELWLPRAGPPPRVVNVDDYGAADAGVDAAEAFLAAWSEACNSSAGRSVFLVPEGKAYLLMPVSFRGPCRAASVAAMIKGTLEAPSDRSVWLERGLQEWITFEGVDRLRVLGGGTLDGNGMQWWINSCKLNRSARCVTGPTALYLRRCTRLVVEELQVRDSMQMHVAIAYSRDVAVSRLSITAPAWSPNTDGIHVSNSREVSISRCTIATGDDCVSIVTGSTFVRVTSIFCGPGHGISSTTVPVPVPVPQHW

SEQ ID NO: 223183 - protein, 56 aa, Zea Mays
MRPPVSFLLSRAGIFCLWHSSATITIWWWKKFLKGVVSLTCEYLKLISVLLIVVCE

SEQ ID NO: 223184 - protein, 143 aa, Zea Mays
MYDSIFYVGTAYIYVGAAPTSAPGRRLGGTCTQGSSSDVVAVRRASAVACPAPPRMPARSVSRSTHTEWPVFKVVLILSSWLNETINVWMFIDLLGFMLFFDLTLVHLGQYFTKVSGMIGHLSWQSGGITSRGLVCWRKMASC

SEQ ID NO: 223185 - protein, 114 aa, Zea Mays
MPRPAAHACAVGVPQHPHRVACLQSRPHPLLLAQRDHQRLDVHRPARVHAVLRPHPGAPRPVLHQGVWYDWAPLLAVRRDNKQRFSLLEEDGELLIRANQGHTLKKYSLEVTSM

SEQ ID NO: 223186 - protein, 84 aa, Zea Mays
MQALCMILGQGNHGCLVLSPWLLLRRQITASNIWTVLCCKNILLFCLHHRESKSASHSLHIHKVLLDCDDVQADALIVDRLASL

SEQ ID NO: 223187 - protein, 345 aa, Zea Mays
MFLPEVPFEILVRKQIGRLLDPSLQCAQFIYDELIKVCPQCLISELQKFPALKKRLSEVVCSFLRDGLRPAETMITHIIEMEMDYINTSHPSFVGGTKVVELAKHEVLPPKTSASLSGRKDGTIVGSEIQLAAERSQKSRAVFARDAIRRVTSEQASVEAETSLTGGNQIGNSQVGESSSKLPSIIPLKEPPITLKPSETEQDATEVAVVKLLIKSYYDIVRKNIEDAIPKAVMHFLVNHTKRDLHNFLIRKLYRENLLNELMRETDEVLMRRQRIQEMLEILEQAHRTLEEFPFEVDKLEKGYNLTEHATGLSKIHGVSGDSTNVIYTSSPNCYSPHRASHMVL

SEQ ID NO: 223188 - protein, 238 aa, Zea Mays
MKFYLPKHQLHYQDGTIVGSEIQLAAERSQKSRAVFARDAIRRVTSEQASVEAETSLTGGNQIGNSQVGESSSKLPSIIPLKEPPITLKPSETEQDATEVAVVKLLIKSYYDIVRKNIEDAIPKAVMHFLVNHTKRDLHNFLIRKLYRENLLNELMRETDEVLMRRQRIQEMLEILEQAHRTLEEFPFEVDKLEKGYNLTEHATGLSKIHGVSGDSTNVIYTSSPNCYSPHRASHMVL

SEQ ID NO: 223189 - protein, 363 aa, Zea Mays
MVLFKMLNRGVFNNINGCISTGKEANVYHATKTDGQELAIKVYKTSVLVFKDRDRYVQGDYRFRHGYCKHNPRKMVKTWAEKEMRNLLRVRAAGIRCPAPLLLRLHVLVMEFIGKGGWAAPRLKDAVLSDDKLHESYFEGHLYIIDVSQSVDLDHPSALDFLKEDCLHVSDFFKKRGVPVMTVTDLFNFVIDQSISDEGVDDYLEKAQQKILENGGAVPNDDEITPTVMVQTLDYVKQCEADIVNMSIMQRSSSGYEPTADKLYDQPLLGFVRTKNTHTEKEQGQPARNLVEVEEDESESCSSSDEDDSWHEDDPKVGPEERKAARKENKKKVKEEKREARKTKIPKAEKKKRKKMAKAKCKR

SEQ ID NO: 223190 - protein, 166 aa, Zea Mays
MVRLAKFYLVCYNSLQSLGWFVSLLRLLPCLVPPFPVHSAYVVAGDLICFLQTCAILETVHAAIGLVPTAPLLAFLQWGGRIHFILAVVRQIPEVQSSPSVFITFIAWSISEVIRYSHYALTTLKVCPAWLTYLRYTAFIPLYPIGVGPGESKLKMSSHKSVITLD

SEQ ID NO: 223191 - protein, 162 aa, Zea Mays
MLSLQRRGCRIRLLCKLLMLWSNRFLTGSSIWCGPWRVASTCRTRERNLDPSETSLKPDELSLLRRICDAYYLPDWCSPSDYVNIAKSLSLEDIKTADWSENVAPFWPAVIKSALTWKGFTSLLTTGWKTIRGAMVMPLMIQGYKKGLIKFTIITCRKPGAA

SEQ ID NO: 223192 - protein, 150 aa, Zea Mays
MESGEHMPDKRKFVSELARVAAPGGTIIIVTWCHRNLDPSETSLKPDELSLLRRICDAYYLPDWCSPSDYVNIAKSLSLEDIKTADWSENVAPFWPAVIKSALTWKGFTSLLTTGWKTIRGAMVMPLMIQGYKKGLIKFTIITCRKPGAA

SEQ ID NO: 223193 - protein, 162 aa, Zea Mays
MPHTPTVPPGVAAGVPVPTRRPSSVTSPHSPSVPFLASVRGYPSRRRTSIATFWTRRGAIDSRERTERGDSQGSRRTLEEGTGDRRWRGTPAAGWTGRAWRRPPPGQSARSSAPPCSTRSTSARPSSRPSFRRTRARRNIAILKDSTWRRVEQSLLEQQPIC

SEQ ID NO: 223194 - protein, 277 aa, Zea Mays
MPPILASFQPASPRYPSFQDANGKRRNVPCYQRQQTPQVEARSMEEVYDTLAEHLLSVLKNIEHLDSKYIVGLAGPPGAGKSTVASEVVRRVNTFWSQKHTKGSGAPLPTKEIAAMLPMDGFHLYRAQLDAMEDPKEAHARRGAPWTFNPSLFLKCLHTLRTEGSVYAPSFDHGVGDPVENDIFVKPQHKIVIVEGNYLLLEEDVWTEIRDLFDEKWFIDIDIDISMQRVLKRHIATGKEPDVAAWRISYNDRPNAELILESRKNADLVIRSVDFSS

SEQ ID NO: 223195 - protein, 878 aa, Zea Mays
MMGRFRKFINDVGLIDTPLIGRKYTWSNHQSSPTLVRLDRVLCTTDWEALFPNHLLQSAASEDSDHCPLILGLNSMCSGKRRFHFESFWPKLEGFQEVVLEAWNSVNERSCPFLTFELKLKSTAKALQRWSAKKVGHVSSQLALAREILHQLEIAQDSRLLSPLEVWLLRGLKKHSLALASLKRTIARLRSRISWIKEGDANSKLFHMHARHRQRKNFVAKIVSGMNTFTDHGEKARAVDEFYFKLLGCKADRSLTVDLDYLGLPSHDLTDLDAQIDENEVLESIMQLPSDKAPGPDGYTGRFYKVCWPIIKTDVMAVIAAIWCRKFQQFGRLNTAFVTLIPKKEGAEEVKDFRPISLVHSIAKLVTKLMANRLSQRLHDLVSLRQSAFIKGRFIQDNFMLVQQTARLLHQQGQPRVLLKLDITKAFDSVSWPFLLEVLQRLGFGQIWRDILSGLLATSSTQVLLNGVPGNTIPHKRGLRQGDPLSPMLFILVMDILGCIVAKADEEGQLEPLSSKPLHHRISLYADDAVLFFHPRESEIHTVLGILNLFGEASGLKTNIQKSSVYPIRCGQDELDILNDWLPCELSSFPCKYLGLPLSLKKLSNNQLQPIIDKVADQLSGWKADLMTRAGRRVQVQYVMTGMLIYLVMAVDIPTGSLKAIDKIRKGFLWRGRKEVRGGHCLVAWGRVCRPLEIGGLGISSLKELGWALRMRWLWLRKTDPDKPWSSLPMQISNKIKAFFCTALLTEIGNGSSTLFWLDRWVHGKNIEDIAPRLLAAVPKRIRNSRTVLEALTDRRWLTDIKGALTVGVFADLLDLWDELQSVQLHSDREDKHIFRFANDGIYSAKAAYKGAGQQIVCRREVLAILTNVSCVTKSKKP

SEQ ID NO: 223196 - protein, 104 aa, Zea Mays
MKIMLYVLHKWKQTIYIKSNKTKHISPKYFYPHELQIEGEVKILQVKSCDNLADLFTKSLPVVTFRKCVRGIGMRHLRDLQVQGEITSELQPLLFDLKIVYYRP

SEQ ID NO: 223197 - protein, 832 aa, Zea Mays
MAEQERRDAEAGGDAAGAAVASHTSSMQRVKVYRLADGGKWDDQGTGHVSIDYIEGSKELGLTVLDEDDNETLLMHNITSDDIYRKQEETIISWRDREAATDLALSFQEAAGCSYIWEHICEIQRNLQFSNLGAPEVGRRQSSESLEASRIMHSNDDSFRSANGEFRELPPVELSNLPFILKTVLEGGITDQIHMAELITQDRDFFPKLVDIFRMCEDLENIDDLHMIFKLVKGIILLNSPSIFDKIFSDEFILDIIGALEYDPEVPRVQKHRAFLKDHVVFKEAIHIENVSVISKIHQTYRIGYLKVLFLHEFCTLSKSLPVVQQLRLFRDLSGEGVFEIISDVLQSQDRKIVSDPNLLRSYIVQQEGNSLLGLLVKGMVTDFGEEMHCQFLEILRILMDSFTMSGAHRDVIIEIFYERHLDYLVDVIASSCPPRSLSRPRSNSVRVGGNAEGHHIKPEILLNVCELLCFCVVHHPYRIKCNFLMNNAIEKILTLTQRREKFLVVAAVRFMRTIISRNDEHLIRHVVKFNLLKPIIDIFVDNGERYNMLHSGVLELLEYIRKENIKALTIYVIESFWYELVKFEHFGSIQAFKLKYQQYVESAEPMLNASVPNMRKKAEQRGLEKEEEDYFNKDSDEEDSGSGRRDKHAQNQHSKPKPKVPNGSEADDTDGASRPKSAGLVDYDDDDDEDFNPPPMEPSTPAEDDVPLNISPVKRKPVDVKHADGEGRRRQKIETRISCAKIAAVTSTIIKHTDLQNKHACYLPTSAAPSTEPNGVFRERGTNSEEHQHSVENTETSRQAGGDCIKDGGSMSPEKAVNTTTTSDSEPYSVR

SEQ ID NO: 223198 - protein, 896 aa, Zea Mays
MAEQERRDAEAGGDAAGAAVASHTSSMQRVKVYRLADGGKWDDQGTGHVSIDYIEGSKELGLTVLDEDDNETLLMHNITSDDIYRKQEETIISWRDREAATDLALSFQEAAGCSYIWEHICEIQRNLQFSNLGAPEVGRRQSSESLEASRIMHSNDDSFRSANGEFRELPPVELSNLPFILKTVLEGGITDQIHMAELITQDRDFFPKLVDIFRMCEDLENIDDLHMIFKLVKGIILLNSPSIFDKIFSDEFILDIIGALEYDPEVPRVQKHRAFLKDHVVFKEAIHIENVSVISKIHQTYRIGYLKDVILPRILDDATLGSFNTMIHSNNASDDTPFIRQLFARMRSSDISMESKRELVLFLHEFCTLSKSLPVVQQLRLFRDLSGEGVFEIISDVLQSQDRKIVSAGTDMLILFLNQDPNLLRSYIVQQEGNSLLGLLVKGMVTDFGEEMHCQFLEILRILMDSFTMSGAHRDVIIEIFYERHLDYLVDVIASSCPPRSLSRPRSNSVRVGGNAEGHHIKPEILLNVCELLCFCVVHHPYRIKCNFLMNNAIEKILTLTQRREKFLVVAAVRFMRTIISRNDEHLIRHVVKFNLLKPIIDIFVDNGERYNMLHSGVLELLEYIRKENIKALTIYVIESFWYELVKFEHFGSIQAFKLKYQQYVESAEPMLNASVPNMRKKAEQRGLEKEEEDYFNKDSDEEDSGSGRRDKHAQNQHSKPKPKVPNGSEADDTDGASRPKSAGLVDYDDDDDEDFNPPPMEPSTPAEDDVPLNISPVKRKPVDVKHADGEGRRRQKIETRISCAKIAAVTSTIIKHTDLQNKHACYLPTSAAPSTEPNGVFRERGTNSEEHQHSVENTETSRQAGGDCIKDGGSMSPEKAVNTTTTSDSEPYSVR

SEQ ID NO: 223199 - protein, 533 aa, Zea Mays
MNFAHLARVYQLFSNCDCFGDLSGEGVFEIISDVLQSQDRKIVSAGTDMLILFLNQDPNLLRSYIVQQEGNSLLGLLVKGMVTDFGEEMHCQFLEILRILMDSFTMSGAHRDVIIEIFYERHLDYLVDVIASSCPPRSLSRPRSNSVRVGGNAEGHHIKPEILLNVCELLCFCVVHHPYRIKCNFLMNNAIEKILTLTQRREKFLVVAAVRFMRTIISRNDEHLIRHVVKFNLLKPIIDIFVDNGERYNMLHSGVLELLEYIRKENIKALTIYVIESFWYELVKFEHFGSIQAFKLKYQQYVESAEPMLNASVPNMRKKAEQRGLEKEEEDYFNKDSDEEDSGSGRRDKHAQNQHSKPKPKVPNGSEADDTDGASRPKSAGLVDYDDDDDEDFNPPPMEPSTPAEDDVPLNISPVKRKPVDVKHADGEGRRRQKIETRISCAKIAAVTSTIIKHTDLQNKHACYLPTSAAPSTEPNGVFRERGTNSEEHQHSVENTETSRQAGGDCIKDGGSMSPEKAVNTTTTSDSEPYSVR

SEQ ID NO: 223200 - protein, 143 aa, Zea Mays
MQGSGALPGLTGTGRGGGFLPCGSLGKRTPAGRRGATSVRAVDGASVAAAASAAADSPLPPVQVTWQIAVGALAGVTPFVVAGVEFGKRIIAQKKCQVCGGSGLVTKNDYYVRCQKWFSSVAVLAKILHGVNVVSDQWSSVLN

SEQ ID NO: 223201 - protein, 234 aa, Zea Mays
MSSLLLLQALAPAMTVPRHHFLISPLRLASAATVPFARRFSNAASSNKPEPLLSEPDLESGLYLVSTPIGNLEDITLRALRVLKCANVILSEDTRHSGKLLQHYNIKTPLLSFHKFNEREREPTILRRLHEGEAVALISDAGTPGISDPGMELARLCATEKIPVIPIPGPSAAIAALSASGLPSNEFTFEIGLRYLLVKLLHKYSMFLPMAFSSFLLMLLHLLAIPGIVWSQGR

SEQ ID NO: 223202 - protein, 326 aa, Zea Mays
MPARASHPALATSRARGWPRLRALGIAPDGGRWRCLPHFAPISEPARHLSPRAPASASPPARPHPAIKASPSPTLAAAAAAAAAATSSLPSFSARRRSTGMAGITKRRTSPASTSSSSGDVLPQRVTRKRRSARRGPRSTARRPSAPPPMNELDLNTAALDPDHYATGLRVLLQKELRNSDVSQLGRIVLPKKEAESYLPILMAKDGKSLCMHDLLNSQLWTFKYRYWFNNKSRMYVLENTGDYVKAHDLQQGDFIVIYKDDENNRFEQRRQEMSRPPLYLKSMNTCTSLPHCQLHKRSMTMQAPSQQKLVCSRSCHRVTRYSTAY

SEQ ID NO: 223203 - protein, 321 aa, Zea Mays
MLYKYCEERGVAHKRISKLIVATGAAEVPKLDMLLRNAKENGVDDLQLMEGSEAMEMEPELRCLKALLSPSTGIIDSHSLMLSLLADAENLGTTISYNTSVISGHVGSNGLELHVCESKELQNYHVGSHVNAQLVLLPKLVINSAGLSAVLLAKQFHGLDQEFVPTPHYARGCYFTLSQTKSPFSRLIYPLPEDGGIGVHVTLDLNGLVRFGPDVEWISDGGKDHVSCFLNKFDYSVNPNRCSVFYPVVRKYFPNLKDGSLEPGYSGIRPKLSGPGQPPSDFVIQGWDVHGVPGLVNLFGIESPGLTSSLAIAEHIVSKYL

SEQ ID NO: 223204 - protein, 321 aa, Zea Mays; identical to SEQ ID NO: 223203

SEQ ID NO: 223205 - protein, 298 aa, Zea Mays
MAQKTKEAEITEQDSLLLTRNLLRIAIYNISYIRGLFHEKYFSDKSVPALEMKIKKLMPMDAESRRLIDWMEKGVYDALQKKYLKTLLFCICEKEEGPMIEEYAFSFSYPNTSTEEVAMNMSRTGSKKGSTTFTSNASEVTPDQMRSSACKMIRTLVSLMRTLDPMPEERTILMKLLYYDDVTPEDYEPPFFKCCADNEAISIWNKNPLKMEVGNVNSKHLVLALKVKSVLDPCDDDNVNSEGDGMTVDNESDHDDDFSDTEVHPPKADHYIIAPNEGKDKDQDTGTISEVVCAHLLL

SEQ ID NO: 223206 - protein, 555 aa, Zea Mays
MKIKKLMPMDAESRRLIDWMEKGVYDALQKKYLKTLLFCICEKEEGPMIEEYAFSFSYPNTSTEEVAMNMSRTGSKKGSTTFTSNASEVTPDQMRSSACKMIRTLVSLMRTLDPMPEERTILMKLLYYDDVTPEDYEPPFFKCCADNEAISIWNKNPLKMEVGNVNSKHLVLALKVKSVLDPCDDDNVNSEGDGMTVDNESDHDDDFSDTEVHPPKADHYIIAPNEGKDKDQDTGTISEDDTQDTAHEEELTSQVKEWICSRDSGTINVSDVLSNFPDISMELVEDIMDRLLKDGILSRASKDGYTVNQKADPKTPHIKKEAIMPDVSPTNVTKHNNGDLLYMKALYHALPMDYVTIAKLQGKLDGEASQNTVRKLIDKMVQDGYVKNSANRRLGKAVIHSESTNKRLLEIKKILEVNEGEKMAIDTNTEHPEPEHKDLLRVYEVGDGSTMGCLHSIGSDLTRTRELPELQQNVSMQSGQEASTVGKDSSRTPTSVRELAVPVCSLESGVLGKRIKRSLTGGNEMQSTQDKRSRKASMVKEAILQHVKCQNPQAQ

SEQ ID NO: 223207 - protein, 306 aa, Zea Mays
MPPPSPPASQVRTCDAGAAQSPTRGTVSEMARYFRSSNLASRVFERQLISPRPGATVNTIRQFYENLVPSYTIYDIDCPDYSFRKFTDDGKYFVAFSRNHQDLIVYRPIWLTYSCNEECDPHELPPKAKKFDSFFKQLYSIPLASGNEYICKDFFLYMECHRFGLFATSTAQSNESTATEGAIHGVPLIEKITFHLVRLEDGVILDEKAFCNDFINLAHSIGAYMYEDLLCIVSLRYQTIHILQIRDSGNLVEVRSIGAFCREDDELFLHSHVQTGYAGSFLPGIKQRLLSYIFCKTWNEVPDQTL

SEQ ID NO: 223208 - protein, 687 aa, Zea Mays
MGTSVQVTPLSGAYGEGPLCYLLAVDGFRFLLDCGWTDLCDTSQLQPLAKVAPTVDAVLLSHPDMMHLGALPYAMKHLGLSAPVYATEPVFRLGLLTMYDHFLSRWQVSDFDLFTLDDVDAAFQNVVRLKYSQNYLLNDKGEGVVIAPHVAGHLLGGTVWKITKDGEDVVYAVDFNHRKERHLNGTVLGSFVRPAVLITDAYNALNNQGYRKKQDQDFIESLIKVLATGGSVLLPVDTAGRVLELLLLLDMYWDERRLQYPIYFLTNVSTSTVDYVKSFLEWMGDQIAKSFESSRANAFLLKKVTLIINKEELEKLGDAPKVVLASMASLEVGFSHDIFVEMANEARNLVLFTEKGQFGTLARMLQVDPPPKALKVTMSKRIPLVGNELKAYEEEQERIKKEKSLKASLVKEEELKASHGSNTKASEPMVIDASSSRKSVNASHFGGNNDILIDGFVPPLTSVAPMFPFFENTAEWDDFGEVINPDDYMMKQEEMDNTLMLGPGDGLDGRIDDGSARLLLDSTPSKVISNEMTVQVKCSLVYMDFEGRSDGRSVKSIIAHVAPLKLILVHGSAEATEHLKMHCAKNLDLHVYAPQIEETIDVTSDLCAYKVQLSEKLMSNIISKKLGEHEIAWVDAEVGKEDEKLILLPPSSTPPPHKPVLVGDLKLSDFKQFLENKGLCCPKFGVG

SEQ ID NO: 223209 - protein, 52 aa, Zea Mays
MTVLTTKWSKNDDNASIQRRTKTTTTKRPPIFHLGVQSIRSEMGNACIIFSL

SEQ ID NO: 223210 - protein, 323 aa, Zea Mays
MLSLCGNEALRELSSPGKSGSFFYLTNDDRYMIKTMKKSEVKMLLKMLPAYYNHVRAFENTLVTKFFGLHCVKLAGANQKKVRFVIMGNLFCSEYPIHRRFDLKGSSLGRTTDKPHTEIDQYTTLKDLDLNFIFRLKKQWFHEFQRQVDRDCEFLEQEKIMDYSLLVGVHFRDNTEKLLTEGSIDFDIINNVPTPRLSKGNTDRFLAGPNRSPKIKLGANMPSRAELTARKSDCEPRMIGEPTGECYDVILYFGIIDILQDYDISKRLEHAYKSFQHDPTSMSAVDPRQYSRRFKEFVYRVFQEDGCAAADALRLWRCRSLHV

SEQ ID NO: 223211 - protein, 366 aa, Zea Mays
MGSPAPSASPNVRPDDPDYLMKLKMAQMQQSSGHRPMELQQPHQQNTRKRKPTSSGAANSSGTGNTVGPSPPSTPSTHTPGGGVPVASNVNILQKSSMICGVDATGGLASSSNQMDALDSFVDFDENVDSFLSNDDVDGRGMFAALEKGSSEHNTESLKGLSLSEVGNNRTSNNKVVCCHFSSDGKLLASAGHEKKVFLWNMDNFKMDTKIEDHTNFITDIRFRTNSTQLATSSSDGTVRLWNAADESGALQTFHGHRSHVTSVDFHPRLTEVLCSCDDNGEILFWTVGQTTSTHVLRVKQGGTGRVRFEPRSGQLLAVAAGSMVNIFDVEKQSSLPCPPKVIDMHETLCRLRNVKVVNCFCCCLI

SEQ ID NO: 223212 - protein, 67 aa, Zea Mays
MFVYITLQLLTCCAFDFAIVTIALSKYTSNQQVSKSHLFLTVFAWSLTNKLICTTYNFYLEHVCFLR

SEQ ID NO: 223213 - protein, 348 aa, Zea Mays
MAGLLHLQSTLLPSASALRRRAGAPVPCSSRRRCRVEAKIREIFMPALSSTMTEGKIVSWTAAEGDRLSKGDPVVVVESDKADMDVETFHDGFLAAVLVPAGESAPVGSAIALLAESEEEIPVAQSQAASFSSSSPSPPPPQETAQEASPSPPPPPPSAPVAVSAPALPSPATQGGGRVVASPYAKKLAKDLGVDLFSVTGSGPGGRIVAKDVEAALAAPKKAAPVTAARPDVPLGSTVPFTTMQGAVSKNMVESLAVPTFRVGYTITTDALDQLYKKIKSKGVTMTALLAKATAMALVQHPVVNCSCRDGKSFTYNKSINIAVAVAIDGGLITPVLQDADKEMEGVG

SEQ ID NO: 223214 - protein, 109 aa, Zea Mays
MDLLRSLNQKIASQCLHLYSSLPRYDLSVYDSFSCWIYSDGKSTIPLWEFKNLCMQIFLLEGSQFLDIFLFLILSPRLILLSSPKKLLLCKTCSLLFLFVGWSISMPCL

SEQ ID NO: 223215 - protein, 109 aa, Zea Mays; identical to SEQ ID NO: 223214

SEQ ID NO: 223216 - protein, 59 aa, Zea Mays
MRRCTALGLVSPDVIFYPGSALFLSRTGDPSVHGCSYQLCFWDDFGFIYHPLTFILYVI

SEQ ID NO: 223217 - protein, 712 aa, Zea Mays
MLNKFAETNLMEEKVLVNLGPAGHQEIIAGNSNMQTSKFNVSYTPQIAGEYEIWVLCGNIVLNGGNPYAMTVLPVAINTSLSRVVQFDPKVRLSIENEVVVRLVDSFMNPVESSKSKLKFRLTSASTTTPVTTTTSFVAKEFVNNSDGSYTGHYAAGGLGSYGICVLFEDKQLPPCPFEVTVHADEYFSDVKNDTVSVWEDESVSFDVLSNDRIAGSKAEIANSSSPLHGSVLQFGQTYRYTPFQGFFGNDSFSYTVRDEHNNVVTATVFISVLCRPPQFVSLPEKLHVTEDTISPLFGGFPGMKMVYSDTTENISVTVTAQSGSVSFDPVRIKLGQFSEDVLSISSRGGKDLVLQGTVEAVNGALDSLLYTGNEDFHGDDVVALNASSRNGVRRTQFPTFVEPINDPSVILAPSSILLSGNESWEGYRIFDKNRDTFEFSIVDPDIYNFPGKKSSFFLVLSLEVLEGTLTVTLPSSVIAAASMKTEAGSCWQPVQTYVTIANRFIVRGTAIRFRGSVRDCNRAMRQLRYYQGPTHGTTLSIAVNDQANHGCYPDCSERMTMPLSTAKTIRLVPLPVVAGALGHVSSRRAILFRWLAAAGIVVMLCQGCVLMCCLFKCMRALKSERRHKTYGQIRAPEQTAPFRQNMCASTSQREDVGYSPATATASQLGASRSSLRQRSPRSCNQEMELQPVSGAVNNRNEGSRPVSYKDK

SEQ ID NO: 223218 - protein, 339 aa, Zea Mays
MTTVPKPQQVAHSRARLAPRAIGALLEFAPASSSLRFAVHRCRTARLEVKASGNTFGNYFQVATYGESHGGGVGCVISGCPPRIPLTEADLQVELDRRRPGQSRITSTRKETDTCKILSGTHEGVTTGTPILVIVPNTDQIGSDHREIANVYRPSHADATYDFKYGVRAVQGGGRSSGRETVGRVAAGALAKKILKLKCGLEIESNIVRCPDPEYAEKMIDAIDRVRVRGDSVGGVITCVARNVPRGLGSPVFDKLESELAKAMLSIPASNGFEIGSGFAGTDLTGSEHNDEFYMDKAGSVRTRTNRSGGVQGGISNGEIVHFKVAFKPTPSIGVSSDS

SEQ ID NO: 223219 - protein, 338 aa, Zea Mays
MPKTHHCLNMRLTVEYFKSGSNHVDQLNDQKLESPALHHYVMFSRNVLAASTTINSTVMNSQDSDHIVFHVFTDAQNFYAMKYWFDKNSYLESTVRVTNIEDNQKLSKDVDSLEMQQLWPTEEYRVTIRNHSEPFQRQMKTKYISIFGLSHFLLPDLLPGLNRVVVLDDDLIVQKDLSPLWNLDMGGKVIGAVQFCGVRLGQLKPYIADHNVDDDSCVWLSGLNVIELDKWRDTGITSLHDQSVQKLRKDSLKSQRLQALPAGLLAFQDLIYPLEDSWVESGLGHDYGISHVDIEKAATLHYNGVMKPWLDLGILDYKNYWRKYMTSGEKFMTECNIH

SEQ ID NO: 223220 - protein, 243 aa, Zea Mays
MWFAEYLFLERSWAKDEKTLKWGLQRLKDFPRPFWLALFVEGTRFTPAKLLAAQEYAASQGLPAPRNVLIPRTKGFVSAVSIMRDFVPAIYDTTVIVPKDSPQPTMLRILKGQSSVIHVRMKRHAMSEMPKSDEDVSKWCKDIFVAKDALLDKHLATGTFDEEIRPIGRPVKSLLVTLFWSCLLLFGAIEFFKWTQLLSTWRGVAFTAAGMALVTGVMHVFIMFSQAERSSSARAARNRVKKE

SEQ ID NO: 223221 - protein, 305 aa, Zea Mays
MDIEADGRFGNKRVHNRLGPGSGGAPPSTNGKVCNYWRAGRCNRFPCPFLHSELPEAAPPKRPTGPGGNVWRNPNTGGRGGGHHNRWGKGPGGGSGIASHKPPERPCKYFLAGTECSYGERCRYPHSYCISDSIAMLTLLKGHEQGVTGIALPAGSDKLYSGSKDGTVRMWDCQTGQCAGVITMGREVGCMIIEGPWLFVGIPDAVKVWNMQTAAEMSLTGPTGQVYALAVASELLFAATQAGRILAWRFSAATNCFEPAASLDGHKLAVVSLIVGGMRLYSASMDKTIRLELVCERKEVHYSTV

SEQ ID NO: 223222 - protein, 237 aa, Zea Mays
MDIEADGRFGNKRVHNRLGPGSGGAPPSTNGKVCNYWRAGRCNRFPCPFLHSELPEAAPPKRPTGPGGNVWRNPNTGGRGGGHHNRWGKGPGGGSGIASHKPPERPCKYFLAGTECSYGERCRYPHSYCISDSIAMLTLLKGHEQGVTGIALPAGSDKLYSGSKDGTVRMWDCQTGQCAGVITMGREVGCMIIEGPWLFVGIPDAVKSFTSGLEYANSSGNEPYWTNWASLCTRRCQ

SEQ ID NO: 223223 - protein, 394 aa, Zea Mays
MQSLLTGMSKCLIGKQIHLLIQLTISEDLGQIEYILSDKTGTLTENKMIFKQCCISDTLYGNDNGDALNDVRLVNAVSSNDPDVIKFLLVMALCNTVVPIKSNDGTVSYKAQSQDEEALVNAAAKLNMMLISKDTITAEICFNGSKFWYELLDILEFTSDRKRMSVVVKEGETGKILLLSKGADEALLPRACPGQQIQRYLEAVEMYSQLGLRTLCLGWRDLKENEYKEWSKNFQKASCSLDNREFKIAEVCNSLEQDLQILGVTAIEDRLQDGVPETIKLLRNAGINVWMLTGDKQNTAIQIGLLCNLITSGPNSQLLSISGKTEEDVLRSLERALFIMKNTSETKGLAFVLDGWALELILKHSKESFTRLAMLSKTAICCRMTPLQKAQSSG

SEQ ID NO: 223224 - protein, 1033 aa, Zea Mays
MNQYFLLIACLQLWSRITPVSPATTWGPLIIIFIVSASKEAWDDYNRYLSDKKANERKIWLVKDGVRIQIKAQEVHVGDLVWLHENDEIPCDLVLIGTSDRQGICYVETAALDGETDLKTRTIPPISANLSVEQLGKVKGVIECPNPDNDIRRFDANMRLFLPIIDNEKSPLTINNTLLQSCYLRYTEWACGVAVYTGNETKSGISRGAAEPKFTAADVIIDKLTIAIFMFQVVVVLVLGYFGNTWKDTQGLKQWYLMYPMEVEGPWYDFLIIPLRFELLCSIMIPISIKVTLDLAKGLYAKFIDWDEQMFDWETNTPAHSANTAISEDLGQIEYILSDKTGTLTENKMIFKQCCISDTLYGNDNGDALNDVRLVNAVSSNDPDVIKFLLVMALCNTVVPIKSNDGTVSYKAQSQDEEALVNAAAKLNMMLISKDTITAEICFNGSKFWYELLDILEFTSDRKRMSVVVKEGETGKILLLSKGADEALLPRACPGQQIQRYLEAVEMYSQLGLRTLCLGWRDLKENEYKEWSKNFQKASCSLDNREFKIAEVCNSLEQDLQILGVTAIEDRLQDGVPETIKLLRNAGINVWMLTGDKQNTAIQIGLLCNLITSGPNSQLLSISGKTEEDVLRSLERALFIMKNTSETKGLAFVLDGWALELILKHSKESFTRLAMLSKTAICCRMTPLQKAQLVAILKSVGYLTLAIGDGGNDVRMIQEANIGVGISGREGLQAARAADYSIGKFKFLKRLILIHGRYSYNRTAFISQYSFYKSLLMCFIQILFAFLSGLSGTSLFNSISLMAYNVFYTSLPVMTIIFDKDISETTVMQYPQILLHSQAGRLLNLTTFCGWFGRSLYHALVVFFITICAYSDEKSEMQELSMVALSGCIWLQAFVVTMDTNSFTCPQILLIWGNFVAFYMINLILSTVPSLQLYTITFRLCSQPSYWISMALTVAVGMGPVVAFRYLKNLYQPSAVNILQQVEQRNGSIRTSGNLESAGANLTNLLTGSRKNRDSNYRPLLSESAESVSASGS

SEQ ID NO: 223225 - protein, 523 aa, Zea Mays
MFQVVVVLVLGYFGNTWKDTQGLKQWYLMYPMEVEGPWYDFLIIPLRFELLCSIMIPISIKVTLDLAKGLYAKFIDWDEQMFDWETNTPAHSANTAISEDLGQIEYILSDKTGTLTENKMIFKQCCISDTLYGNDNGDALNDVRLVNAVSSNDPDVIKFLLVMALCNTVVPIKSNDGTVSYKAQSQDEEALVNAAAKLNMMLISKDTITAEICFNGSKFWYELLDILEFTSDRKRMSVVVKEGETGKILLLSKGADEALLPRACPGQQIQRYLEAVEMYSQLGLRTLCLGWRDLKENEYKEWSKNFQKASCSLDNREFKIAEVCNSLEQDLQILGVTAIEDRLQDGVPETIKLLRNAGINVWMLTGDKQNTAIQIGLLCNLITSGPNSQLLSISGKTEEDVLRSLERALFIMKNTSETKGLAFVLDGWALELILKHSKESFTRLAMLSKTAICCRMTPLQKAQLVAILKSVGYLTLAIGDGGNDVRMIQEANIGVGISGREGLQAARAADYSIGSKHTSSWHK

SEQ ID NO: 223226 - protein, 144 aa, Zea Mays
MAHWSGSSDARARITLTGWWGIAVSANAATVTAQADKKKTAKAGNKHTLEATADGTEGTSKVDEEPAPESKRASESAEYGASQLHQFSQGAGEEDGDIVDGQVALPDVLMMTPSGSELGAEQDDDDSERRSQSISKKLWSFFTT

SEQ ID NO: 223227 - protein, 214 aa, Zea Mays
MKIAAGAAKGLEYLHDKTSPPVIYRDFKSSNILLGEGFHPKLSDFGLAKLGPVGDKTHVSTRVMGTYGYCAPEYAMTGQLTVKSDVYSFGVVFLELITGRKAIDNTKTQGEQNLVAWARPLFKDRRKFPKMADPMLQGRFPMRGLYQALAVAAMCLQEQAATRPHIGDVVTALSYLASQAYDPNAPVQHSRSNASTPRPAAEGPCQGIQVWSRG

SEQ ID NO: 223228 - protein, 227 aa, Zea Mays
MRGSSRRPVAVVMAWVRRQPPKVKAFLAVVAGMAALVFIRFIVHDHDNLFVAAEAAHALGIAVLIYKLTKEKTCAGLSLKSQDLTALFLAVRLYCSFVMEYDIHTILDTATLAATLFVIYMIRFKLRSTYMLDKDNFALYYVVLPCAVLALLVHPSTSHNIVNRICWAFCVYLEAVSVLPQLRLMQNTKIVEPFTAHYVFALGVARFLSCAHWVLQLDYGLNRCKGL

SEQ ID NO: 223229 - protein, 232 aa, Zea Mays
MLRGCFTPVWRIRTGQCLRRLERAHSKGVTSVTFSRDGTQILSTSFDTTARVHGLKSGKMLKEFRGHSSYVNYAIFTTDGSRVITASSDCTVKVWDTKTTDCLHTFKPPPPLRGGDASVNSVHLFPKNTDHIVVCNKTSSIFIMTLQGQVVKSFSSGKREGGDFVAASVSPKGEWIYCVGEDMNMYCFSYQSGKLEHLMKVHEKDVIGITHHPHRNLVATIAEDCMMKIWKP

SEQ ID NO: 223230 - protein, 119 aa, Zea Mays
MLHRRVIRDDDKGVDEPLGEVVCLDGSCKGLTVRGTYYVKVDKIGHGAHWRRTYGQQVYSPYLLAFTHEDETSWKSYNVAKQSTMDENYSLPDNVAIITLQNLDDDTTLLRLAHLFQVY

SEQ ID NO: 223231 - protein, 497 aa, Zea Mays
MICAISGEVPDEPVVSKKSGLLFERRLIERYIEDHGKCPITKDELTMDDIVPVNTNKVVKPRPLQAASIPGLLGIFQNHDAACRVIARLKKERDEARALLAQAERQIPASVAGAAPAAVVSNGKRAMEDEIGPDGKKIRPGINPVMIDELTECNTMLSAQRKKRQVPPTLAPLDALERYTQISSHPLHKTNKPGILSMDVHPSKDVVATGGIDTNAVIFDRSSGQILCTLTGHSKKITTLKFVPRDQLFVTGSADKTVRIWQENENGNYNCVHTLKDHTAEVEAVTVHATQKYFVSASKDNSWCFYDISTGSCLTQVGEASGQEGYTSASFHPDGLILGTGTTDAVVKIWDVKTQSNVAKFEGHVGPVTAMSFSENGYFLATAAHDGVKLWDLRKLRNFRTFSPYDSDTPTNTVEFDFSGNYLAIGGSDIRVYQVANVKAEWNLIKTLPDLSGTGKVTSVKFGADAKYIAVGSMDRNLRIFGLPGDDQMEESTTAAE

SEQ ID NO: 223232 - protein, 512 aa, Zea Mays
MICAISGEVPDEPVVSKKSGLLFERRLIERYIEDHGKCPITKDELTMDDIVPVNTNKVVKPRPLQAASIPGLLGIFQNQLHTARQELSHALYQHDAACRVIARLKKERDEARALLAQAERQIPASVAGAAPAAVVSNGKRAMEDEIGPDGKKIRPGINPVMIDELTECNTMLSAQRKKRQVPPTLAPLDALERYTQISSHPLHKTNKPGILSMDVHPSKDVVATGGIDTNAVIFDRSSGQILCTLTGHSKKITTLKFVPRDQLFVTGSADKTVRIWQENENGNYNCVHTLKDHTAEVEAVTVHATQKYFVSASKDNSWCFYDISTGSCLTQVGEASGQEGYTSASFHPDGLILGTGTTDAVVKIWDVKTQSNVAKFEGHVGPVTAMSFSENGYFLATAAHDGVKLWDLRKLRNFRTFSPYDSDTPTNTVEFDFSGNYLAIGGSDIRVYQVANVKAEWNLIKTLPDLSGTGKVTSVKFGADAKYIAVGSMDRNLRIFGLPGDDQMEESTTAAE

SEQ ID NO: 223233 - protein, 100 aa, Zea Mays
MEKKPCFSSTRSRCLMEWMNRRSLLLLRNLSLFSVGTLAENRAKRRVWIKTTHKTMSANEPEDGWTKRMSKRKLIVKWPSSNNTNIVFISGKPRCICHLL

SEQ ID NO: 223234 - protein, 82 aa, Zea Mays
MAFSAALAWAATQLLRGSLPPARFAAAVSPLTYSSSRQLCSTPIANDSSAAGPWDEAETEILRDVEPIVNIVKDIIHSRRWG

SEQ ID NO: 223235 - protein, 220 aa, Zea Mays
MGQQRTLVYSFVARGTIVLADHAEVSGNFASVAAQCLQKLPANNNRFNYNCDGHTFNYHIHDGFTYCVVATESAGRQLPVGFIERVKDDFSKKYSGGKAKTANANGLKREYGPKLKEHMKYCDQHPEEIDKLAKVKAQVTEVKGVMMQNIEKVLDRGEKIELLVDKTEDLRAQAQDFRQQGTKIRRKMWWENMKMKLIVFGIVVALILLIVLTVCKDFDC

SEQ ID NO: 223236 - protein, 178 aa, Zea Mays
MPELRSNTRQARLRSKKLDDLQPGEPLAKPVSPALPSARKRAPTRAARGRKGAAGRGVPPAPKPRRKGVDIVVLEADPACETPLKAFKGLEVAAAAPKNLPLKQVAEVGVPKMNGESGEKIVGAEDESTATPVPERVQVGNSPEYITDRKLGKGGPPIRYGGASHQEMRDGASSRNQF

SEQ ID NO: 223237 - protein, 106 aa, Zea Mays
MPKDKNGHMKLSDFGLCKPIDCSKLSTLSEDEPMGDDNMRESMDIDSSLSNTANGRRWRSQHEQLQHWQMNRRKLAFSTVGTPDYIAPEVLLKKGCGMECDWRDHV

SEQ ID NO: 223238 - protein, 859 aa, Zea Mays
MNLSGTLAPEIGLLPQLKTLDFMWNNLTGNIPKEVGNITTLKLITLNGNLLSGSLPDEIGYLMNLNRLQIDENNISGPIPKSFANLTSIKHLHMNNNSLSGQIPSELSSLPALLHLLVDNNNLSGPLPPELADTRSLEILQADNNNFSGSSIPAEYSNIRTLLKLSLRNCSLQGAVPDLSVVPKFGYLDLSWNQLKGSIPTNRLASNITTIDLSHNFLQGTVPSNFSGLPNIQYLSVNGNLLNGSVPPTIWSNITFTGNRALVLDFQNNSLDTIPPVFEPPQNVTVLLYGNPVCTASNAARAANLCQPTSVTDAPSGEGKQVSTTCFPCPTNFEYNPSSPIPCFCAAPLGVGFRLKSPGISDFRPYKEAFENDLTSLLELRVYQLYIERYIWEAGPRLNTHLKLFPNNTNLFDMAEVVRLREVLAGWQITLLDVFGPYELLNFTLGFYADEFRTAASPGLKGGALAGILVGTIVAAIAVSVFSTVFIMKRRRKQRTISRRSLLSRFSVKVDGVKCFTFDEMAVATRDFDISAQVGQGGYGKVYRGNLADGTTVAIKRAHEDSLQGSKEFCTEIELLSRLHHRNLVSLVGYCDEEDEQMLVYEFMPNGTLRDHLSAKTERPLSFGQRVHIALGAAKGLLYLHTEANPPIFHRDVKASNILLDSKFVAKVADFGLSRLAPVPDIEGTLPAHISTVVKGTPGYLDPEYFLTHKLTERSDVYSLGVVFLELLTGMKPIQHGKNIVREVNIAYQSGDVSGIIDSRMSSYPPECVKRFLSLAIRCCRDDTEERPYMADIVRELETIRSMLPEGEDVLSSTSGSGLLAKSMSSSSTTTTGALYVSSHISGSGQADSGIPSGMVAPR

SEQ ID NO: 223239 - protein, 156 aa, Zea Mays
MLPAEPAEEEPIYVNAKQYHAILRRRQTRAKLEAQNKMVKGRKPYLHESRHRHAMKRARGSGGRFLNTKQQPQEQNQQYQASSGSMCSKTIGNSVISQSGPICTPSSDAAGASAASQDRGCLPSVGFRPTANFSEQGGGGSKLVVNGMQQRVSTIR

SEQ ID NO: 223240 - protein, 61 aa, Zea Mays
MGMNMGQNLHPLGKRVWVWEAKIRTRLPMGISYVYTYHVCMNELRPSRPPSVARQRTRPKF

SEQ ID NO: 223241 - protein, 61 aa, Zea Mays; identical to SEQ ID NO: 223240

SEQ ID NO: 223242 - protein, 168 aa, Zea Mays
MEKRKLMNLLLLGAISLPTVGMVVPYGAFFVPAGSGNGGGGTYAKDKLGNDITVEEWLNTHGPNDRTLAQGLKGDPTYLVVEQDKTLATYGINAVCTHLGCVVPWNGAENKFICPCHGSQYNNQGKVVRGPAPLSLALVHADVDDGKVLFVPWVETDFRTGQDPWWSA

SEQ ID NO: 223243 - protein, 162 aa, Zea Mays
MAEAIVGPLVGKLQEMAVSEAKALVAVNDDIRGLRDRLMWMQAFLRHADPRRRDTSDELIRVWLKQTRDVAFDAEDAIDDYSLKVDLSRYPNWSQSIVCFFSGFTTQVSIRHNLSRKIAEINLRLEDIINNKEKYKIEAAPNDFPLVTWKPSTDISTVAKSL

SEQ ID NO: 223244 - protein, 108 aa, Zea Mays
METGNGLTFATGTRWWTSSRRTGNRQRPIPKRWNQSHCLPIAIVHLYGWPLRACTVVFNVEALKVFKGVICKKILEPSLREETPLARKPSSNRRLTSHCTNLSSVLSI

SEQ ID NO: 223245 - protein, 235 aa, Zea Mays
MDCSCLILVFSSSATVYGWPKEVPCTEEFPLCATNPYGRTKLVIEDICRDVHRSDPDWKIILLRYFNPVGAHPSGYIGEDPCGVPNNLMPYVQQVAVGRLPHLTVYGTDYSTKDGTGVRDYIHVVDLADGHIAALRKLYEDSDKIGCEVYNLGTGKGTSVLEMVAAFEKASGKKIPLVFAGRRPGDAEIVYAATAKAEKELKWKAKYGIEEMCRDLWNWASKNPYGYAGSRDNSK

SEQ ID NO: 223246 - protein, 141 aa, Zea Mays
MNLFTCQWRPLNSEPKALIFLCHGTGTRLAQAGFVVHGMDYEGHGKSSGLQGYINSFDDIVVDCSKYFASVCEKEEYKKQKRFLLGESMGGAIVLMLHRKEPTFWDGAILVAPMCKVTLPFIIVHGGDDAVTDPTENPRKT

SEQ ID NO: 223247 - protein, 249 aa, Zea Mays
MDNDDIKYDEEYVLNARGMNLFTCQWRPLNSEPKALIFLCHGYAMECSISMRGTGTRLAQAGFVVHGMDYEGHGKSSGLQGYINSFDDIVVDCSKYFASVCEKEEYKKQKRFLLGESMGGAIVLMLHRKEPTFWDGAILVAPMCKILDDMKPHPIMMSILSKLSNVIPTWRIIPNEDIIDRAIKCEERREEVRNNHYCYKGKPRVKTGHEIFMASLDIESNLDKVTLPFIIVHGGDDAVTDPTENPRKT

SEQ ID NO: 223248 - protein, 119 aa, Zea Mays
MSSPLDLGTPPEAAIAVCRRRPRFNTRGALPDSPTGVWIVCRGESGAWTRGVRGIARRPLPPAVKPPRSVGKFIIKPIVSPPCGAKTSLIPRDFNSEHIRIKQGPVRIQKETPKKPSQD

SEQ ID NO: 223249 - protein, 100 aa, Zea Mays
MSSPLDLGTPPEAAIAVCRRRPRFNTRGALPDSPTGVWIVCRGESGAWTRGVRGIARRPLPPAVKPPRSVGKFIIKPIVSPPCGAKTSLIPRDFNSEHIR

SEQ ID NO: 223250 - protein, 181 aa, Zea Mays
MVMRARAMGLSSIRREVLVSAVFTALLVASILLLPSLLLTGAGPIRWPSLSPSKDAGIGEEEEQQARYPVTFAYLISASTGDASRAARLLAALYHPGNVWIVGRPNLVTYRGPTMLTTTLHAVAVLLRLRRRWDWFINLSASDYPLVTQDDLMEAFAGLPRDLNFIQHTSHLGWKISGRGR

SEQ ID NO: 223251 - protein, 160 aa, Zea Mays
MRVIWRRGEPQTIFRWQRCPAKTSGRIRPRPSRDRKKSSCLPSLPYPLSFLSWRRRRRRRAAVQSRGQQGAAVRPGAGERPSVQRRLAAIRPGELRAGVRPNELRASVQASVQRAAQLFYAQHIPRTTVDFDLRFTYVLAGWEGSTHDALVLRDALEREN

SEQ ID NO: 223252 - protein, 100 aa, Zea Mays
MLALASGSGSSSSSSRNIYHALLHLHCTTARELNVLVLVLPLPNTSDDSHCLFEICRVLSLVMDKATKLLIYGASAHMLLSMMAMVIESRKRKRYSRRVG

SEQ ID NO: 223253 - protein, 97 aa, Zea Mays
MCVEEQVAMFLNTVGHNLRNRLVGTNYGRSGETVSRYFNKVLRAIGELRAELIRPPSLETPSKIAGNPRWDPYFKPLILIFDSHMSWLVGRVQHMML

SEQ ID NO: 223254 - protein, 71 aa, Zea Mays
MATPLIAGLAVAAAALAGRYSIQAWNAYKARPVVPRMRKFYEGGFQPTMTRREAALILGVRSVTALLPSFR

SEQ ID NO: 223255 - protein, 69 aa, Zea Mays
MATPLIAGLAVAAAALAGRYSIQAWNAYKARPVVPRMRKFYEGGFQPTMTRREAALILGVRTRPQETVK

SEQ ID NO: 223256 - protein, 923 aa, Zea Mays
MKSLFKSKIRWQHRSNDPASPSGQPQPQPQQALGPPSPSPSSSPSSAAPLSVSTAATSSPSSPPSAAATPTGAGAAAAAGAGAAGEDYIASEEEFQMQLAMALSASSNSDCVGDLDGEQIRKAKLISLDRFAAHRDEGHTAESLSRRYWDYNFLDYHEKVIDGFYDIFGSMESSRQGNMPSLADLQTGIGDLGFEVIVVNRAIDSTLQEMEQVAQCILLDFPVANIALLVQRIAELVTDNMGGPVKDANDMLTRWLEKSTELRTSLQTSLLPIGCIKIGLSRHRALLFKILADSVGILCKLVKGSNYTGGDDDDAINIIKMDNEREFLVDLMAAPGALIPADILSWKGNSLNSNRKLGLSQTAGSSSTVGANMGPSVLPLEPKGDQLPLFSSGDWISESGSGYGAAETAASTQTSSGATSSVPAGSAFDSSWMLINHDQSDGPSTSAGTSSQQKVVPQNEHPRNLNRLPDLQEIPESKNLFADLNPFGDTKSKKTSVPFKGPDQRNNELQKRRENIVPNGGRPQQRLVMKNWSPYNDVSNNKQYNYVEDSFARRNVGNNAASSSSQITQQAARSNLNSGLRNDASYHNYDSIMAGTSATNITSTAETGKVPERVLRGDLDKGQTNYRLQDQHVVGQPPQERLPWGNPAEGRVPMNRFQNQAKQHMGNIDTKQDHKKLLPDPKKSPLDRFMDTSLPSRNLDVRSQRLDFDDVSECEIPWEDLVIGERIGLGSYGEVYRADWNGTEVAVKKFLDQDFYGDALDEFRSEVRIMRRLRHPNIVLFMGAVTRPPNLSIVSEYLPRCDVYSFGVILWELATLRMPWSGMNPMQVVGAVGFQDRRLDIPKEVDPLVARIIFECWQKDPNLRPSFAQLTSALKTVQRLVTPSHQETQSPHPANAGAACRLSAPGGGRHSAVCDKDPVVGYV

SEQ ID NO: 223257 - protein, 407 aa, Zea Mays
MGISSKWIKSLVGIRKQEKAQNAEKQEKGWNAESSETKSSANQSLHKRKHSLDPGAALAVEEITVQSEALTDNKSAQMVSNSFFSDSTPLDVHISQAEHHSNEDLAATVVQSAFRAFLARRALRALKGIVLLQALIRGHSVRRQTAETLQCMQALVKAKARVRARQVRVALENQVARKKIPEQDDHENHVREVEGGWCGSIGSMEEMQAKALKRREAAAKRERAMAYALTHQRQAGSKQQNSLSLQGLELGENHWESNWLDRWMAVRPWENRLLDCNAKESLPTHEDKDEEANSQITPKGKVSTSNTPGLSKKKGVNHKKSYSDVSCTSFARPANVLPSTSLGSSKQKAKAVGEVFEEVSSQPTDIGSKDVHNSKDKLVQVNGPAKKRLSLPNNVQPCMRLGVRGIS

SEQ ID NO: 223258 - protein, 278 aa, Zea Mays
MQALVKAKARVRARQVRVALENQVARKKIPEQDDHENHVREVEGGWCGSIGSMEEMQAKALKRREAAAKRERAMAYALTHQRQAGSKQQNSLSLQGLELGENHWESNWLDRWMAVRPWENRLLDCNAKESLPTHEDKDEEANSQITPKGKVSTSNTPGLSKKKGVNHKKSYSDVSCTSFARPANVLPSTSLGSSKQKAKAVGEVFEEVSSQPTDIGSKDVHNSKDKLVQVNGPAKKRLSLPNNVGRESGKGPTRRNSLNRSAPKARADSPNQGDELEA

SEQ ID NO: 223259 - protein, 269 aa, Zea Mays
MDGGEHEAEESSYKRRERLLALRSAANASPAGAPPPTAAGSILPDPDLPGDEAASVCPTPPQRFDYYTNPAAAFTSSSGGATNPTWSHKRKSPPACYAPPPPPPAYGNYGSDYHRPHQQPTSWQVHSTSPMPQDAARSSPWQSPMQFQDPMSGYQGGPPSAPRPWGSHSGPGGRGSYSNPPNFGFRHPNPSRGGSPMNYGPRGGPYSSYGRGRGPNYFGSPGSRGRGGRVGCHGRSYFNKSMLDDPWLDLQPGVGNILIPRGCGLTDGE

SEQ ID NO: 223260 - protein, 377 aa, Zea Mays
MVARSPNAKPDRQKAAALAAAAALNPALLRETLKKELQYTVAGGAKVVSGVSLSPRSTRGYLRTSLRCKQETVRMRGGASAQKRSPSGKFGGGVGGEGAQWRRMSLPAMLLGETVLEIVQASQFARDIVTAAGATNREPPRTPKPAPRTRKPAAGEPTPLRARRAREKQSHRGGAATRGADAATPPSRSRVRSRIQFKPVSPVAVGRPSVSANRVSPKNRPWAKKAVMFPNPTFHASTSAATDPCATPSPSKKQKRLYKTRSPVAARQTPHKFLVKSPPSALGSKLRMHGKALPARPAAVSPPPPVKAQASPAKTRRCSFSPSRLATRLMSPIKARLSLGRSRDSGVGVGGGPMSGLKQRPGVSLTVRTVSSKISSR

SEQ ID NO: 223261 - protein, 534 aa, Zea Mays
MSSSPSSAHWLSLVGSVWLQTVNGPNADFAVYSSQLKETKGISQVQLNFLAFASDAGKLFGWLAGVAALRLPLWVVALTGATFGLVGYGVQFLFLDRAGLAYWHMFALTSLAGNGICWVNTVCYLLCINNFPAHSRVAVSLATSYLGLSAKFYTTMADTIPRAARARYSTAEVYLLLNAVVPMAVALVAAPSLRVVELKEGRRRRTEAPFLAMFVITLATGACAVVGSVGAKSIGLSSRAHMVSLYVLLALPLLIPVWLRVREGTAKIRESMWENRVHDHDSDGPESETAVPAPVSVVEIQAEDKQEEAGAELQRQNNGQQEEVGGLRLLRLFDFWLYFLSYMFSGTLGLVFLNNLGQIADSRGLTDASTLVSLSSSFGFFGRLLPAFLDYYTANGYSLSRTASMAWLMAPMPGAFLLLLHPKNMSLYASTAVVGTCTGAITSVAASTTNELFGTKNFGVNHNVVVANIPLGSLCFGYLAAFLYQRGAHGGNRCLGAACYRDSFILWGATCALGTALCTVLYVRSRRSPGRLPR

SEQ ID NO: 223262 - protein, 270 aa, Zea Mays
MACGYDYSGYGQSSGKPSEHNTYADIEAAYKCLIEKFGAKEEEIILYGQSVGSGPTVDLASRLSQLRAVVLHSPILSGLRVMYPVKRTYWFDIYKNIDKIPQVTCPVLIIHGTADEVVDWSHGKQLWELCKDKYEPLWLRGGKHCDLELFPEYIRHLKNFFHSLEKSPSHRQAWRENVDRIEPSRKSTDFFEPSRKSTDQRKKSRSTRDKTRNTEHRYSNVEKVDKLKISFDQFEKSRRSVDIFERPKRNIEQLDCGRKSVDRLDRIWAS

SEQ ID NO: 223263 - protein, 112 aa, Zea Mays
MDYSNLRRQAASMKKTLFDQGYLDEQFCQVEDLQDEASPNFAEEVVTLFFKDSARLISNAEQALEKYPKDFNRWDAYMQQLKGSCSSIGASRMKSECVSFRDYCGQGNVEVV

SEQ ID NO: 223264 - protein, 351 aa, Zea Mays
MTDGGEDGNAAAPRAPSRRRGPVRASLDADEFMALMHGSDPVRVELTRLENELRDKERELGEAQTEIRALRLSERAREKAVEELTDELEKMAEKLKLTESLLESKNLEVKKINDERKAALAAQFAAEATLRRVHAAQKDDDMPPIEAILAPLEAELKLSRQEIANLQDDNRALDRLTKQKEAALLEAERTVQIAMAKAAMVDDLQNKNQELIKQIEICHEENKILDKLHRQKIAEVEKLSQTVRELEEAVLQGGATANVVRDYQRRFQEINEEKRTLDRELARAKVTANRVASVVANEWKDSNDKVMPVKQWLEERRFLQGEMQQLRDKLAVAERTARSEAQLKQLGPEAC

SEQ ID NO: 223265 - protein, 586 aa, Zea Mays
MPTVFALSARSRFPPPPESRSTPNSPKAAPAMAAPPPTTPRLLSPTSKDLLTAASFTSPPSPTSDDPASPLDAFASDPVLSAFLSPSFSPSVFSSAALSSGLAASRAEQLQDAIRLLRRHLRVEEGEPLITERVWDAIVKAFASQMKTTFTASSFVKEIFTLGYPRLFSMVENLLERISRDTDVKGTLPALTPEGKDHMISAIEMFQTAFLALCHSRLSDYVNSIFPMSNRGTIPSKDQISRLVSRIQEEIEVVRTHGHLLVLVLREIGKTLLLLAQRAEYQISTGPEARQVTGTATAAQLKNFALCLHLQEVHMRISSVLSTLPNVASEVLSPSLGVVYGVACDSVTSLFQAMLDRLESCILKMHEQDFAGQGMDASMDNNASAYMEELQKCAVHFRSEFLSKLLPSSSSRSETICTIMVRRMASRVLIFFIRHASLVRPLSEAGKLRMARDMAELELAVGQNLFPVEQLGAPYRALRAFRPVLFLETSQLDKFPLLQDLPPSVILHHLYSRGPDELQSPLQRNKLTPLQYSLWLDSQGKDQIWKGVKATLDDYEMRVRSRGDKEFSPVYPLMLQIGSSLSQPNT

SEQ ID NO: 223266 - protein, 754 aa, Zea Mays
MRKIVLAVARADKAGRQADAPQEALQVLDIVLRELPTARYSPVGRSFYSPNLGRRQQLGEGLESWRGFYQSIRPTQMGLSLNIDMSSTAFIEPLPVIDFVAQLLNRDISVRPLSDSDRVKIKKALRGVKVEVTHRGNMRRKYRISGLTSQATRELSFPVDDRGTVKTVVQYFMETYGFSIQHTTLPCLQVGNQQRPNYLPMEVCKIVEGQRYSKRLNEKQITALLKVTCQRPQERELDILQTVHHNAYYEDPYAQEFGIRIDERLAAVEARVLPPPRLKYHDSGREKDVLPRVGQWNMMNKKMVNGGRVSNWACINFSRNVQDSAARGFCHELAIMCQISGMDFSLEPVLPPVTARPEHVERALKARYQDAMNILRPQGRELDLLIVILPDINGSLYGDLKRICETDLGLVSQCCLTKHVFKMSKQYLANVALKINVKVGGRNTVLVDALTRRIPLVSDRPTIIFGADVTHPHPGEDSSPSIAAVVASQDWPEVTKYAGLVSAQAHRQELIQDLFKVWQDPQRRTVTGGMIKELLISFKRATGQKPQRIIFYRDGVSEGQFYQVLLYELDAIRKACASLEPNYQPPVTFVVVQKRHHTRLFANNHNDQRTVDRSGNILPGTVVDSKICHPTEFDFYLCSHAGIQGTSRPAHYHVLWDENKFTADELQTLTNNLCYTYARCTRSVSIVPPAYYAHLAAFRARFYMEPDTSDSGSMASGARGPPPGAARSMRGAGSVAVRPLPALKENVKRVMFYC

SEQ ID NO: 223267 - protein, 929 aa, Zea Mays
MVRKKRTGPGGSGETSGESSGASGQVQQQFEQLAIHGQSSMSQEVQVAPASSKSVRFPLRPGKGTYGDRCIVKANHFFAELPDKDLHQYDVTITPEVTSRGVNRAVMGELVTLYRQSHLGGRLPAYDGRKSLYTAGPLPFTSMTFEITLQDEEDSVGGGQGGQRRERVFRVVIKFAARADLHHLAMFLAGRQADAPQEALQVLDIVLRELPTARYSPVGRSFYSPNLGRRQQLGEGLESWRGFYQSIRPTQMGLSLNIDMSSTAFIEPLPVIDFVAQLLNRDISVRPLSDSDRVKIKKALRGVKVEVTHRGNMRRKYRISGLTSQATRELSFPVDDRGTVKTVVQYFMETYGFSIQHTTLPCLQVGNQQRPNYLPMEVCKIVEGQRYSKRLNEKQITALLKVTCQRPQERELDILQTVHHNAYYEDPYAQEFGIRIDERLAAVEARVLPPPRLKYHDSGREKDVLPRVGQWNMMNKKMVNGGRVSNWACINFSRNVQDSAARGFCHELAIMCQISGMDFSLEPVLPPVTARPEHVERALKARYQDAMNILRPQGRELDLLIVILPDINGSLYGDLKRICETDLGLVSQCCLTKHVFKMSKQYLANVALKINVKVGGRNTVLVDALTRRIPLVSDRPTIIFGADVTHPHPGEDSSPSIAAVVASQDWPEVTKYAGLVSAQAHRQELIQDLFKVWQDPQRRTVTGGMIKELLISFKRATGQKPQRIIFYRDGVSEGQFYQVLLYELDAIRKACASLEPNYQPPVTFVVVQKRHHTRLFANNHNDQRTVDRSGNILPGTVVDSKICHPTEFDFYLCSHAGIQGTSRPAHYHVLWDENKFTADELQTLTNNLCYTYARCTRSVSIVPPAYYAHLAAFRARFYMEPDTSDSGSMASGARGPPPGAARSMRGAGSVAVRPLPALKENVKRVMFYC

SEQ ID NO: 223268 - protein, 287 aa, Zea Mays
MLLEELNKISGAIGKTVEDLDVADLNLGKYESFNPSKSWLPNSSKVFPETGKGVGQLAGILHDFLERPNDMVNGTDDSLLYTLPHEELFELFLTLSGQLSLLWNAFLKFHRLNKTKILDYLHDAWAIGRKAEWSIWTIHSKIEIPHRYLQSMSDDSPHRYSLRVSGSRKFHDDHVQSSASRAELHRKSIAQMKINPHYVQDMHIYGDPSRVPVVLIEQHVMVVPQHSSSKDMASNVSEQKDTIVVPKLQGEPLVPKSSAGKKSGRILRAVIFVHGFQKPMASIGSWS

SEQ ID NO: 223269 - protein, 67 aa, Zea Mays
MSDFGDDEYKRMVCVEAAAIEKTVTLKPGEEWTGKLELSAVPSSYYSGQLDPDRVIQDSTVPEDSIS

SEQ ID NO: 223270 - protein, 1377 aa, Zea Mays
MTTAAPPPLLMAHREGGDVPISLFLDTDLGTHLALLVAPDTDIRGLKSQVAVEHAVAFPDLGPVTVKSFQVRRKGVLYRLSDSMTVMSAFTKIKGGCFLHVNMAEATAATHCCQDAPATDTRRLNGVSLGIYEKNHVQELPAVAPDVACDMLPRGLEGCNDDAVLNTVQTHDVLPNCTLVPSSSQLNTEVPKNNAVGLASYTEAGIAQVIDKAKSYSGQIKHANQTEGAYIISTSKACVDKSLNESNMSHAVEELHASRDHGVGDDVSDKKQVMVEEQLLEEIQAKDNLSQAKEHKKCRTSSFDTSCMDLLETGTTSLVESLNTSNHQEVHDTLHEESIQLENPSTVGKKKKRKRRQLSPSKSASAQETTEPSATAVDLLIPTGDKAYNAELTSKGETVVEASGLPLSSYEHNDGNQGGKSVKFVSDDQASTDLISEQEKFDHALKGCRDPLIADDIYSTGENVAIEGKTTKGSCAPLNGGDRHEEIKHLNEGCHNAGVPETSNMEKDGKSTDVSDKRQTSQNTSQVKKRKKSKVGSVDMPSVDASGEKDHRYSENATKQDTASTKREIVHEPSMQQMSNIVHQGDSNVIENPSGDGKKKKKRRHHSESLKGMNPSQDLTKSSGFVTNESSIQCTGAAPINAKQTNLVIIEGETVTGHRKLSENLDVAATHVVDEVLADLRSKDGLSKDLDENLLPGQTHLGSNQNGIEVPESIAVKVGSTTAALPPKYPATVHSASPVNSPRQRKSKGKKLKVLSTMADSSHQSSGVPEEDANRKLKESDSLRFADKTSDHEDIVTANVVAQADEKRKATKRQRKKGSVKQVLDTLDLKEVNDTEENLVQGGSVVDTPLSTAGNVEQKDWSSETLSPKEQETNCSTHGLDSHTAKDSQDEYVTDTIGTHDNENAAGTPALHVVQKDAMALKSASPNSQKEQETSLNSELQSQDCPLEHGFSADLVNSRTEKGVRTTSSASAVKSDYNTMFHPANGRINVLDHFSRSNLNDGSSIVAESKQNNEDGSLREVKNKKKKRKQGTGSVEPNDVIESLPSEIASLTGHFGTSKAVVSSVATENMNGGNENVNKGKEKKRKGKSNMEVPTAGKDHPNCDTQFIDIGTQESLISIVQKERTGQDNGKESNSKATQNASIMQHEPEDATWNRSPEKNHHQSVDDDQNKLLTEKDHAHINKEVRKFTPQTKAHAKIRKPDGSTIKEKVAPNPKPVTNLVKDFSMSPRASSDSTEGMPQSANRYRVAVRKVPSKRYEETSGNSNKASRKVGSGAIFNDSISEGSGDELDTKTVMERSPNKSSTSADSGISSAASGESEVPDDDGTVSLSQKSFKGLHISSILRGSRSYKKALKRQMELLDDDTIVPDSQPADGLWG

SEQ ID NO: 223271 - protein, 434 aa, Zea Mays
MPTKSGKVPCFWCCSARSGLYAASVGMLNLRCLAIVFDLDETLIVANTMKSFEDRIEMLSRRMDVEDDPIRIAGMSAEIKRYIEDKELLKEFIDMDTVTDNGKIVGTQKEEVQPMSGGQERVFRPVIRLPDRNAILTRINPENRDTSVFVKLRPAWEELRSYLTAKGRKRFEVYVCTMAERDYALEMWRLLDPEGNLISPQQLSERVNCVKSGSKKSLQNVFRDRRCHPKMAMVIDDRLNVWDDKDQHRVHVVPAYIPYYAPQAEMANAVPVLCVARNVACNVRGGFFREFDENLLRKVFELYYENGLLDLPYAPDVGDYLVCEDTSFVPGNKDQAPIPEGMRGTEVEKRLNGQSYRWEQREGQQMPSSIRSPDDEGMPIRGTGGVRNIQPNGGSLAITPSVYVTVLQEIGRLCDSKVFWHVIVLACICFPIWP

SEQ ID NO: 223272 - protein, 884 aa, Zea Mays
MSHWKQPSKLAMLVVLLLLLCHAVDRVHCSTHHNNSQDFHSLLEFHKGITSDPHGALSNWNPSIHFCHWHGVNCSSTRPYRVTELNLNGQSLAGQISSSLGNLTFLQTLDLSNNSFIGPLPLLNKLRNLDVLFLGSNLLEDVIPDWLTNCSNLVQLDLSENNLTGHIPSNIDILKKLEYIGLYYNNLTGVIPPTLGNISTLDVVDLSMNQLSGSIPDDVWKISNITQLFLQQNNLSGGILDTLSKLSSLVILNLHTNMLGGTLPSNIGDVLPNLQELYLGKNNFVGTIPNSLGNPSSLKIIDLSINYFRGKIPNSFGNLSHLQSLNLEVNMLGSRDSEGLQFFDALANCRSLVTLSVSNNQLHGPIPNSIANLSTSLGQLVMGWNSLSGTIPPTIGKLSGLYRLSLQNNNLTGTIEEWIGKMTNLQFLTLQSNNFIGKIPPSIGNLTQLIDIFSVAKNNLSGFVPSNFWNLKISKLDLSHNNFQGSIPVQFSNLELIWLNLSSNKFSGEIPGTLGQLEQIQTIQMDQNILTGNIPPIFSRLYSLNLLNLSHNNLSGPMPTFLSGLNLSKLDLSYNNFQGQIPRTGVFNNPTIVSLDGNPELCGGAMDLHMPPCHDTSKRVGRSNLLIKILIPIFGFMSLVLLAYFLLLEKRTSRRESRLELSYCEHFETVTYNDLAQATRDFSESNLIGRGSYGSVYRGKLKESKIEVAVKVFDLKMRGAERSFLSECEALRSIQHRNLLPIITACSTVDNVGNVFKALIYEFMPNGSLDAWLHHKGDEETAKCLGLTQRISIAINIADALDYLHHDCGRPTVHCDLKPSNILLDDDMNALLGDFGISRFYHDSQSKWAGSISSIGVKGTIGYIPPGTEEVAMHQRLGMFIVLG

SEQ ID NO: 223273 - protein, 248 aa, Zea Mays
MPCAIRRRRRCSPLSPTSSPRRRSSMKRRSTGSSASRYLGPPRPACSHRRVRFFGPNPDDVPRRSVFGQGEQLRRAVADRLRRHNRAILVKADQSAARRLREKAAEAEREARRGAELEERLARLRGEAAAWQAKALSEQAAAVALHAQLQQAAAAARASVEELTAAAAAGDAGPAESSASAFVDPRRAGPPPDHACLACRLRPASVVLLPCRHLSLCGECFAAGDADAAMPCPVCLCVRTGSVEAILC

SEQ ID NO: 223274 - protein, 59 aa, Zea Mays
MVRSGEREQGTNQLPLSFLTSSWRGGASCRRLRPCRHRRRRRRTSCSRAPGASSWCSSS

SEQ ID NO: 223275 - protein, 163 aa, Zea Mays
MEFGRKPLSLVELCVRKAIDNLRYMGSVDGVEMDLLKRILPHCTMEQLTRVENSTEMDLSLVTDPLWRRFYQREFGQEHTSKVIARLKELGQKTPYTWRELFAAKKEKQKEVEDKMLDKFTKKFQAERAEKQSKQIKLCTKVPPSSKRSFFGVYPVPATRALY

SEQ ID NO: 223276 - protein, 115 aa, Zea Mays
MRRPVFLRIMNAVEEHDNYFVQKRNAAGVLGLSSLQKVVAAFRMLAYGVPADALDEYIRIGESTALEALRKFVVAVVEVFGPEYMRLPNEQDTARLLAIGASRGFPGLLYLQGLL

SEQ ID NO: 223277 - protein, 147 aa, Zea Mays
MRRPVFLRIMNAVEEHDNYFVQKRNAAGVLGLSSLQKVVAAFRMLAYGVPADALDEYIRIGESTALEALRKFVVAVVEVFGPEYMRLPNEQDTARLLAIGASRGFPGMLGSIDCMHWSWKNCPTAWHGMYRGHKKEPTIILEAVASK

SEQ ID NO: 223278 - protein, 881 aa, Zea Mays
MRLQGKLIKMRSFPHLLLILALLLVLENVRAQPKPLLINCGSGSSADVDGRTWVGDAHPDGGAGFTVTLAGATATRARKPVDEGGGGGDAAYGELYRTARVFNASSAYRFSVAAGSYFLRLHFSRLFSSNLSGDATAKEAVFDVTANGLRLLSRFSVAGEIYWRNSRTNSTSDVAVKEYLLNVTAARPLEVEFAPDAGSFAFVNAMEVVPVPGNSIFGSVNKVGGVGLKGPFSLGESGVETMYRVCVGGGKIERKEDDPRLWRRWDSDERYIFSMNAAHSIRNTSSISYVSRDGADSVPAPLRLYETARVTEETFVVDRKFNVSWRFGVDPGFEYLVRLHFCELEYGSAEQRRFKIYINGKTAAENYDVVAKAGGKNKAFHEDFLDDDDAAPASETDTLWVQLGSESSATSSAASDALLNGMEIFKVSRNGNLGHPTVRIGGVSGGLEDDRRKRSPRWVLVGAAAGVVIFVSVAAAVYLCFYLHRKKNTNTSAANKKTKTKTKDDNLPATTTAPGLRAAGTFGSCRMGRRFSIAEIKAATMDFDESLVIGVGGFGKVYRGETDTGTPVAVKRGHAESQQGAKEFETEIEMLSRLRHRHLVSLIGYCDEQDEMILVYEHMANGTLRSHLYGSESESDHLPALTWRQRLEICIGAARGLHYLHTGLDRGGVIHRDVKTTNILLDGSLRGEGGGLRHLEARPAAGPHPRQHRREGQLRVPGPGVLHEAAADAELRRVLVRRRPAGGPLRPARHQPGPAEGPGQPPPSGLWSGRGGACSRPWSTVGWTEATTWSPSGSWLRSPRSASRMRDGTGLPSVRSCGTSRPLCSCTKRICRAHQPQLLRVIWSPLMARLLATASGAPKRQQKPLVKNRYHRMRRMKDAVT

SEQ ID NO: 223279 - protein, 130 aa, Zea Mays
MLTALLVPYIFFTLPNVLFSLIRGEVGKWIAIIAVILRLFFPRHFPDWLELPGSIILLTVVAPSLFADSFRGDLVGVFICLVIGCYLLQEHIKASGGFRNAFRKGNGVSNSIGILLLFIYPVWAGVLQVL

SEQ ID NO: 223280 - protein, 664 aa, Zea Mays
MVAMEGKGDASVTPVRTSDRLRQRPKYYARGYMYYNPAMRKKVKSKKRTAASQIAKKLLRKPAARPPPADCVAANLRRSTRKRRISVNLEGYDTDSSSMEDDDLMRPRYRSSKSKGGNNAAHNEVSARPKRQKLSNSIPRREGLRPRRSLRGQRLHPYHESEDDQESSDEQGAEDQRENGNEIEEDVGDEEEVDGGDEAEGDGDDEDGEEEQEGRRRYDLRERSEVRRPSPRKEGKHRPQSPRRVLVHGIGPKNSKYLKKGGSRMHKRPRFSLPDDSDDSLLVDEPDEGPSMPWMRSGRGSMPWLMGGLDMHSPAAWGLSVGASGWGHQGDTSTSLMPGVQTAGPSSKGGADIQPLQVDENVSFKDIGGLSEYIDALKEMVFFPLLYPDFFANYHITPPRGVLLCGPPGTGKTLIARALACAASKAGQKVSFYMRKGADVLSKWVGEAERQLKLLFEEAQKNQPSIIFFDEIDGLAPVRSSKQEQIHNSIVSTLLALMDGLDSRGQVVLIGATNRIDAIDGALRRPGRFDREFYFPLPGYEARAEILDIHTRKWKDPPPKELKMELAASCVGYCGADLKALCTEAAIRAFREKYPQVYTSDDKFVIDVDSVSVEKYHFLEAMSTITPAAHRGSIVHSRPLSTILASSLLSPMDLPSLLFIDLAF

SEQ ID NO: 223281 - protein, 889 aa, Zea Mays
MLITLPIVLMQLALLWILHHHADHGNVETYFVDWQHLSLQLGLLNRSSLACAQRGWVNVDMDKIECESCGTHLIFNALTSWSPVEVANAGESFAEQLDAAHQNSCPWRGNNCADSLVQLHLTQSALIGGFKDRCDGLLQFTSLPVIAPSAIENMKLTRSVQIDHLLSQSITFLSGILGCRAESTAGIDIHQDFSCSYSQAQKLISLCGWEPRWLPNVQDCEENSTHSAKNLPSVGPDERLYPHFVEHNKNSFSASAKKDKGKGKLPVGDSGCSMRSPLLDCNLCGATVRMRDFRPVLCPSRFSPNNIVVPGTGRKLTLTHGVSAASGINEWVTDGVERGQDEGRDEAATNEGKPLSLVGVDLNLTMAGGLPSPQSAMPAMSERFNNGGMGRDLMIGQPTGSEVGDCETSYESRGPSSRKRNLEEGGSTADNPQDRLQHADSIQGNFIDRDGEEVDDAAQDSDVPNKKSRGFDLFDAYRPSSGAGPSRNLSFGPHEDAGMFSHSRAIDLAAVERPTARDSLRASSVIAMHTIHTSEEDSMESVEYYPGDGNDIDMPSSSTQRNIEMNDALDLNYSNQAQQSANAHAGAGSDAREIGGSSTNEGEEVINAETVPPFGRDQLSLGISGGSVGMGASHEAEIHGNAGSLHRTESVVGDAEPIAELTETMGQTGESAPGPGLMDEFVPEVDRDEPHGDSQDTVSRSVGQADSGSKIYGYTKADSVESGEKIGHATGNGSSMRPSLSCNAGMCAGFDLSKDDVTHTGKILTTDDALMGLDYDPGNGLGATNGENDYESGLLEFDPVKHHNTYCPWVNGNVAAACCNNIGSSSSSSAPSGWQLTIDAVDTYQSLGQAQNQIMQSDSAASLYMQDDQITHNRKVGRRPSVSRSFGKC

SEQ ID NO: 223282 - protein, 427 aa, Zea Mays
MRIAFFTNLYGLHDPFLKGAVKRGDWYRTKDLVIKGADWIVNEMKKSGLRGRGGAGFPSGLKWSFMPKVSDGRPSYLVVNADESEPGTCKDREIMRQDPHKLLEGCLIAGVGMRASAAYIYIRGEYVNERLNLEKARQEAYAAGLLGKNACGSGYDFDVHIHFGAGAYICGEETALLESLEGKQGKPRLKPPFPANAGLYGCPTTVTNVETVAVSPTILRRGPEWFASFGRKNNSGTKLYCISGHVNKPCTVEEEMSIPLKELLERHCGGVRGGWDNLLAVIPGGSSVPLLPKHICDDVLMDYDALKAVQSGLGTAAVIVMDKSTDVVDAIARLSYFYKHESCGQCTPCREGTPWLWMIMERLKVGDAKLEEIDMLQEVTKQIEGHTICALGDAAAWPVQGLIRHFRPELERRIRERAERELLAASA

SEQ ID NO: 223283 - protein, 397 aa, Zea Mays
MSTALILLILQSATGVLVLVLCFVERKEFCLQIVSKLGSSFSVVPFVIVVASCTILAMVASLPIAQLLFFHILLIKKGISTYDYIIALREQEQDDLSGQQSPQMSRVSSYTGLSSTSSFGPLRRGSWCTPPRLFLEDQFDVIPSEAASSHNSAMKRKEDEGKRKKGSGAVQISPWALARLNAEEVSRVAAEARKKSKVLLPIRKDDYSRDHETDSSYGGMSNGRIDLGTDSKRRTNRRGRQPSDLSLKPVAKISTDVIDSTSRDMAPEALSNLAPLQLEALSAFHPSRAASCVNAGGSSPDSSLDSPDLHLYRVSAVSSSGAEDLQLTALTAPGSTPQQGIQLSRSTSDGYEASGGEDSDRIPSRIVHRSSNWASIILNSDQSASSSGILVPKNRLS

SEQ ID NO: 223284 - protein, 154 aa, Zea Mays
MLPVEPAEEPIYVNAKQYHAILRRRQTRAKLEAQNKMVKNRKPYLHESRHRHAMKRARGSGGRFLNTKQLQEQNQQYQASSGSLCSKIIANSIISQSGPTCTPSSGTAGASTAGQDRSCLPSVGFRPTTNFSDQGRGGLKLAVIGMQQRVSTIR

SEQ ID NO: 223285 - protein, 290 aa, Zea Mays
MRFVLHLTDNQVNKIFSENAFDAVMHFAAVAYVGESTMEPLRYYHNITSNTLTVLEAMAAHNVNTLIYSSTCATYGEPDTMPIVETTPQNPINPYGKAKKMAEDIILDFTKSKKQSNMAVMILRYFNVIGSDPEGRLGEAPRPELREHGRISGACFDAALGIIPGLKVRGTDYSTADGTCVRDYIDVTDLVDAHVKALGKAQPGKVGIYNVGTGQGRSVTEFVEACKKATGASIKVEYLARRPGDYAEVYSDPSKIHMELNWTAQYTDLGQSLAQAWKWQKAHPNGYGPA

SEQ ID NO: 223286 - protein, 137 aa, Zea Mays
MATPNGPSASPMVYPVYLSGVFPQQGGDDQAQGPGIYAIQQNQLAAAMGMGCYAPTTLIPLTYNIPTIGAPAGEENVQDARQQNVPQRQVVVRRFHFAFQLDLTLIFLLAAVVFLLARKAQNKGYFFSYCLHHSIYF

SEQ ID NO: 223287 - protein, 138 aa, Zea Mays
MTAIFLFVIRSKLSFVLGKESGFACSVWYPDAAVQKTPAAIPSFDESHMKDMKKHGRRLMYTDNEIRQKKEACYTDVEKYSPTEKENCVLRCLSPECYDLIYGGDPLEEGELDYVRSQEYKYCMHKLKDHIVVKVVKS

SEQ ID NO: 223288 - protein, 73 aa, Zea Mays
MATPLIAGLAIAATALAGRYGVQAWQAYKARPIVPRMRKFYEGGFQPTMNRREAALILGVRYSISCSSFQHTE

SEQ ID NO: 223289 - protein, 62 aa, Zea Mays
MATPLIAGLAIAATALAGRYGVQAWQAYKARPIVPRMRKFYEGGFQPTMNRREAALILGVSL

SEQ ID NO: 223290 - protein, 92 aa, Zea Mays
MVPWMPAPLLAAPAFLLALPPAMDTVGPPVPISPHPHPLAAAPSYSWWLSLLPWTPIAAAHSFCSPWMKAQASAPPLGFLQSQQHVEPLQPR

SEQ ID NO: 223291 - protein, 92 aa, Zea Mays; identical to SEQ ID NO: 223290

SEQ ID NO: 223292 - protein, 271 aa, Zea Mays
MNAVAEEDRAAELAGPLRDLLPPVDFCCAYGSTLLHARPDGTSMVDYIIGVADPLQWHSENLERNPAHYSRWMAGFGAGAITGLADHVGVGVYFNPFVEWRDKRIKYGVVRMRDLAMDVLTWDRFYLSGRLQKPVHVLVDNWDIRKVNSINLEMATSASLLLLPAEFTEYDLYAQICSLSYMGDLRMLFAEDKDKVKKIVEGSFQSFQLMYSPLLQEYIAEGLLKTSSHGQYKTFRQDCGPCTTNELFSVLPWTIQSQMQGRHTLHGKGDA

SEQ ID NO: 223293 - protein, 130 aa, Zea Mays
MLDAAVLDLVDDEASGMQAQKTRYHWMKVISQAMFGSEGRRPESKNKVTQYGLDMTEQQYLEHSIPWIAANDAAWRALCHYWASPPPIPTSPSTEHQTPPATLPTHEQEDGLDFVETLFNSGGIDHHSSL

SEQ ID NO: 223294 - protein, 203 aa, Zea Mays
MLALRSTRRRRQPRLRSMVEEVVDISNWEKKVCGKKRKLQSFRDEEYYISSVPQNHHLEAGLSVRDNEGFVENRLDAAVLDLVDDEASGMQAQKTRYHWMKVISQAMFGSEGRRPESKNKVTQYGLDMTEQQYLEHSIPWIAANDAAWRALCHYWASPPPIPTSPSTEHQTPPATLPTHEQEDGLDFVETLFNSGGIDHHSSL

SEQ ID NO: 223295 - protein, 301 aa, Zea Mays
MHDQESKHEEKNDENSGSNPVEVHKHDLDKEHVEEVDQKSSSNHVEISAHDMCEDNEHVEKIDHVERIDQNSSRDPVKAIMQEMIKVCLVSGSVEKVEEEDSSKKDLEKEIAPKDNKDMEASDGSKLGVNGPETGGAVADTEEDDTVAETEDVVTDTEDTVTDTEDALAETEAEKGERAIADKGELEQDEKKDLVALPELASSPALSSLVKPTVVKKELDFPRPNETGMKTEQDYTNGELREHNDLVSKVQGEGGVATTMESRSSALMIILALIFALATGITIVVRLYSPSRATKLQMDLP

SEQ ID NO: 223296 - protein, 485 aa, Zea Mays
MEGGGWAVGGHALGAAQEPRGQQQHREEEKAAGAAAERKGAGAGGGGGMKFRVRARAPHGVGALLLIGGAAVVGAAVLAWRRSRHGNKGGSVDQPDRRLPAKVEGLDGGIVEDGKGGSLVQKLSQSNEILSVGNTDIGSGRLDGNASEESHQIHKDGEITADQSESKHDGKIDENSGINPAEVQMHDQESKHEEKNDENSGSNPVEVHKHDLDKEHVEEVDQKSSSNHVEISAHDMCEDNEHVEKIDHVERIDQNSSRDPVKAIMQEMIKVCLVSGSVEKVEEEDSSKKDLEKEIAPKDNKDMEASDGSKLGVNGPETGGAVADTEEDDTVAETEDVVTDTEDTVTDTEDALAETEAEKGERAIADKGELEQDEKKDLVALPELASSPALSSLVKPTVVKKELDFPRPNETGMKTEQDYTNGELREHNDLVSKVQGEGGVATTMESRSSALMIILALIFALATGITIVVRLYSPSRATKLQMDLP

SEQ ID NO: 223297 - protein, 479 aa, Zea Mays
MEGGGWAVGGHALGAAQEPRGQQQHREEEKAAGAAAERKGAGAGGGGGMKFRVRARAPHGVGALLLIGGAAVVGAAVLAWRRSRHGNKGGSVDQPDRRLPAKVEGLDGGIVEDGKKLSQSNEILSVGNTDIGSGRLDGNASEESHQIHKDGEITADQSESKHDGKIDENSGINPAEVQMHDQESKHEEKNDENSGSNPVEVHKHDLDKEHVEEVDQKSSSNHVEISAHDMCEDNEHVEKIDHVERIDQNSSRDPVKAIMQEMIKVCLVSGSVEKVEEEDSSKKDLEKEIAPKDNKDMEASDGSKLGVNGPETGGAVADTEEDDTVAETEDVVTDTEDTVTDTEDALAETEAEKGERAIADKGELEQDEKKDLVALPELASSPALSSLVKPTVVKKELDFPRPNETGMKTEQDYTNGELREHNDLVSKVQGEGGVATTMESRSSALMIILALIFALATGITIVVRLYSPSRATKLQMDLP

SEQ ID NO: 223298 - protein, 1041 aa, Zea Mays
MQKHEKPGGSTEYSCKLQLPCNAPFEKLEGPICSSIRLAQQAVCLAACKKLHEMGAFTDMLLPDRGSGEGEKTEQNDEGDPLPGTARHREFFPEGVAEILHGEWILSGRDGYQSSQFIKLYLYSVNCVNIGTSKDPFVTQLSNFALIFGNELDAEVLSTTMDLFVARTIITKASLVFRGPIEITESQLILLKSFHVRLMSIVLDVDVDPSTTPWDPAKAYLFVPVGAEKCMDLLREIDWTLVNSIVNSDAWNNPLQRARPDVYLGTNERTLGGDRREYGFGKLRHGTAFGQKAHPTYGIRGAIAEFDVVKASGLVPGRGWGHFNDYQNKGKLFMADSCWDAKDLAGMVVTAAHSGKRFYVDSICYNMNAENSFPRKEGYLGPLEYSSFADYYKQKYGVELVYKKQPLIRARGVSYCKNLLSPRFEHSEASNGEFSENLDKTYYVYLPPELCLVHPLPGSLVRGAQRLPSIMRRVESMLLAIQLKDIIGYPVPANKILEALTAASCQETFCYERAELLGDAYLKWVVSRFLFLKYPQKHEGQLTRMRQQMVSNMILYQYALNKNLQSYIQADRFAPSRWAAPGVLPVFDEETRDSEPSIFDEEFTPSSELQKNLYDDYDGDSMQEDGEIEGDSSCYRVLSSKTLADVVEALIGVYYVAGGKIATNHLMKWIGINAELDPQEIPSSKPYNIPESIIKSINFDTLEGALGIKFQNKGLLVEAITHASRPSSGVSCYQRLEFVGDAVLDHLITKHLFFTYTDLPPGRLTDLRAAAVNNENFARVAVKHKLHVHLRHGSSALETQIREFVKDVQEELSKPGFNSFGLGDCKAPKVLGDIFESIAGAIFLDSGCATSVVWKVFQPLLDPMVTPDTLPMHPVRELQERCQQQAEGLEYKASRTGNVATVEVLVDGIQIGVAQNPQKKMAQKLAARNALVVLKEKETAAKKDTEKDGEKKNGSQFTRQTLNDICLRRQWPMPQYRCINEGGPAHAKRFVYAVRVNTSDSGWTDECIGEPMPSVKKAKDSAAVLLLELLNRNYRGKPDGK

SEQ ID NO: 223299 - protein, 1041 aa, Zea Mays; identical to SEQ ID NO: 223298

SEQ ID NO: 223300 - protein, 146 aa, Zea Mays
MGVAGSLPFGGGDRPHQTSLRRVPFCLPSWPVRGHKRCPPPVNATVGSTPPPGPASVLTRSRFVHTLRRHREEPVLAFVTEKRSICRSSGGPLHPRRTMFSYCERGYMQGRAWSRALHRRPLPHVSALSRMGVGAVIGQRFVPSCL

SEQ ID NO: 223301 - protein, 172 aa, Zea Mays
MRARNVCVASVDLFSQNSAVATAAREDGIQCVTLLTYLAAAQIYRTNRSRHYRVMVLDNAHHSTPAGVSCSAADGVRDLDLAKASVDTVIWVLAAWGNFVATWRRTIAILRFRSSVTLCAYTLDLLRDNFSPVLCDVLPYYAIYRAMPDSPCVRVARCHEAKRPRHSAIAQG

SEQ ID NO: 223302 - protein, 395 aa, Zea Mays
MSVSLSRRQVRLLSHQSDSPPSGTHPLLLPVTGLYKREGIICRPFFTTLLGIKDMKAVPLPRPRAATRRRAWMLAVAAFIFVALVWAYLYPPPRYTSPVRDWLPGRLPAEPAREFTDEERASRVVFRQILTTPPVRSKNSKIAFMFLTPGTLPFERLWEKFFEVTWGTISMVDAERRLLANALQDMDNQHFILLSDSCVPLHNFDYVYDYLMGANLSFIDCFYDPGPHGNFRYSKNMLPEVTEADFRKGSQWFSVKRQHALMIIADSLYYTKFKLHCRPGMEDGRNCYADEHYLPTVFHMMDPDGIANWSVTHVDWSEGKWHPKAYRAKDVTFELLKNITSIDISHHVTSDSKKVVTEKACLWNETKRPCYLFARKFYPESINNLLTLFANYTLI

SEQ ID NO: 223303 - protein, 464 aa, Zea Mays
MPKMNPQGIYVNKNVKLDDLQVYGFDYDYTLSHYSEHLQCLIYDLAKRHLVNELKYPESCLQYEYDRTFPIRGLYYDRLKGCLLKLDFFGSIEPDGCFFGRQRLSLSEIKELYGTRHIGRDQARHLVGLMDVFCFSEACLIADIVQHFIDAKLEFDPSYIYEDVNQSIQHVHRSGLIHRQILSEPEKFLIKKSQVFRFLKMLKEKGKKLFLLTNSPFYFVDGGMRYLLEDQHFDGNSWRELFDVVIAQANKPTFYNSDHPFRVYDTQKDTLTFTAVDKFLPDQVYYHGCLKSFLQITKWKGSEVIYFGDHLLSDLRGPSKAGWRTAAVIRELEDEIEIQNGDSYRFQQAKLSIIHDLLGKVHAAVVSTEKGQVYKALLNELNAERRQCRSGMRDLFNTSFGATFLTDTGRESSFSYHIHQYADIYTSKLENFLSYAPESWLHPPHDIKIMPHNAKVPASLFSTS

SEQ ID NO: 223304 - protein, 490 aa, Zea Mays
MPKMNPQGIYVNKNVKLDDLQVYGFDYDYTLSHYSEHLQCLIYDLAKRHLVNELKYPESCLQYEYDRTFPIRGLYYDRLKGCLLKLDFFGSIEPDGCFFGRQRLSLSEIKELYGTRHIGRDQARHLVGLMDVFCFSEACLIADIVQHFIDAKLEFDPSYIYEDVNQSIQHVHRSGLIHRQILSEPEKFLIKKSQVFRFLKMLKEKGKKLFLLTNSPFYFVDGGMRYLLEDQHFDGNSWRELFDVVIAQANKPTFYNSDHPFRVYDTQKDTLTFTAVDKFLPDQVYYHGCLKSFLQITKWKGSEVIYFGDHLLSDLRGPSKAGWRTAAVIRELEDEIEIQNGDSYRFQQIGTVRGNCSCRTVDRYNLKGTVGACLAKLSIIHDLLGKVHAAVVSTEKGQVYKALLNELNAERRQCRSGMRDLFNTSFGATFLTDTGRESSFSYHIHQYADIYTSKLENFLSYAPESWLHPPHDIKIMPHNAKVPASLFSTS

SEQ ID NO: 223305 - protein, 579 aa, Zea Mays
MGLCLGKSAAVQEPAVAEDNSVADGAAAGCGDGPPVKAPRTPKQPKFSFYLPSPLQPSSYKGSPANSSAASTPARGGFKRPFPPPSPAKHIRALLARRHGSVKPNEASIPEGGELDLGLDKSFGYSRHFAAKYDLGREVGRGHFGFTCAAKCKKGELKGEDVAVKVLPKAKMTTAIAIEDVRREVRILSSLAGHINLVQFYDAFEDEENVYVVMELCKGGELLDRILARGGKYSEGDAKVIIHQILSVASFCHLQGVVHRDLKPEDENSALKVIDFGLSDFVKPDDRLNDIVGSAYYVAPEVLHRSYGTEADMWSIGVIAYILLCGSRPFWARTESGIFRAVLKAEPSFDEIPWPTLSAEAKDFVRRLLNKDYRKRMTAAQALCHPWIRGTQEVKINLDMIIYRLMRAYISSSSLRKSALRALAKALTTDQLFYLREQFTLLGPNKSGHISLQNMKTALIKNSSGAMNDSRILDFVNSICNIQYGMIDFEEFSAAAISVYQMEGLETWEEHAQQAYELFDKEGNRPIVIEELASELGLGPSISLHVVLKDWIRHSDGNLSFLGFIKLLHGVSSRAITKV

SEQ ID NO: 223306 - protein, 734 aa, Zea Mays
MPRLSRAFLAVAVTVGQGLVQFSGFSVHKRVKHSPPLPTSQACSLLSAKLPRPRGDWGTSFPSPGSAAAMLAQLLLVHLLLLPAASSADHHRHYRGRRALHEPLFPLESTPTLPPPPPAPFFPFLPGAAAPPTPVAPPEVGSASTPADTGAGDASSSPHPTAPANISSLAPLPVSHGAPLRAFLSSHRLLTVLVLVVAVAAAVLTAALVYILARRQRRHSPKEEAAVYAKPSSLAPANPVPYDGGDQHGRGSTATVSSASSPELRPMPPLPRQFQQTQMNLSSCSKSVLDAGAGGKRPSEGAPPPPPPPPPPPLLPPMPPVKDKGGATAATAPPAPPPPLPRAGNGSGWLPRRHSERPATTVIRASASAVHPEESPGRAPSEKPADADADADALPKLKPLHWDKVRASSGRPTVWDQLKASSFRVNEEMIETLFVSNSTWRSSKSGIKAPNSSSCSQENKVLDPKKSQNIAIMLRALNATKEEVCRALLDGQAESLGSELLEMLLKMAPSREEEIKLKECREDAVSKLGPAESFLKAVLAIPFAFKRVEAMLYITNFDLEVDYLKTSYKTLEAACEELQGSRLFHKILDAVLKTGNRMNTGTNRGNAHAFKLDALLKLVDVKGVDGKTTLLHFVVEEIIRSEGANILATGQTSGQAGALADDLQCRKVGLKIVASLGGELSSVKKAAAMDSSTLGSCVSKLSSGAGRISEVLHLSSASEDGCKCKRFRASIGTL

SEQ ID NO: 223307 - protein, 190 aa, Zea Mays
MFCLRGYWSPSLAPVREGPVRHHIKFNSVVVCGARGPRPRYPRVWKTRKKIGTISKSQKLVECIKGLSNVKEEVYGALDSFVAWELEFPLIVVKKALKKLEDEKEWKRIIQVIKWMFNKGQGKTMGSYYTLLNALIEDGRIEEAEELFGMVFSRYMEGLPRTFFMRMISFYYSVEAYDKMFEKRLCSTET

SEQ ID NO: 223308 - protein, 125 aa, Zea Mays
MSILCPGATNKPQELDDAVLRRLVKRIYVPLPDPNVRRLLLKNQLKGQAFKLSRYSGSDLRAVCEEAAMMPIRELGPQSILAIKANQLRPLKYEDFKNAMAVIRPSLQKSKWDELEKWNEEFGSS

SEQ ID NO: 223309 - protein, 253 aa, Zea Mays
MRRRHRRRTTHLPRYDTWASASYECYKGSNRCFFWCHKLRTAGLKNIEAGIGCGVGIGHGFGIGIALKPRVLHGIQSSVGEIMSKWTSKLKDTPETPSSSNPMVHSLSSNEQTHNSMSMDLEAKDAESNLNQTSSYEMSKVQSTQPEALTVSRTKKVIANFLQDPLFQNDTKVDFRDAPGNLHGMDSVLQLVLKHQKVIEELQEENENLRQILIEELKISPTKLQIGHKNGVKAYYPCSDCFECRRRSRRTTR

SEQ ID NO: 223310 - protein, 170 aa, Zea Mays
MHLQLSTTCNKRPEDSDYTVDVLTRCSVTKDNSGKKTMKIDGLSSIRMYIPKDLIPVEVRENTLRKVEEVLLRFAKDGVPLLDPEEDMKVQSKSFRKATRRIEALESLFEKHDIRNSPHIQQKLKVFHAKQELSAKIKSIKKTMRSSTALAFKDELKARKRVLRRLGAYV

SEQ ID NO: 223311 - protein, 189 aa, Zea Mays
MHLQLSTTCNKRPEDSDYTVDVLTRCSVTKDNSGKKTMKVVPLKARGEPVVVSLSLSQIDGLSSIRMYIPKDLIPVEVRENTLRKVEEVLLRFAKDGVPLLDPEEDMKVQSKSFRKATRRIEALESLFEKHDIRNSPHIQQKLKVFHAKQELSAKIKSIKKTMRSSTALAFKDELKARKRVLRRLGAYV

SEQ ID NO: 223312 - protein, 432 aa, Zea Mays
METLKRKAVDSPGDAYQASSLKPPLAAAAVEPRAPTTLAAAEPVACVHDVSYPEGYDPSASTSRAIAGGADASEPAKKFPFQLDPFQAEAIRCLDNGESVMVSAHTSAGKTVVALYAIAMSLRNQQRVIYTSPIKALSNQKYREFKEEFSDVGLMTGDVTIEPNASCLVMTTEIWRSMQYKGSEVMREVAWVIFDEVHYMRDRERGVVWEESIVMAPKNSRFVFLSATVPNAKEFADWVAKVHKQPCHIVYTDYRPTPLQHYVFPSGGDGLYLVVDEKGKFREDSFQKALNALVPASDSAKKKENGKRQKFTMAGTSSEESDIFKMVKMIIQRQYDPVILFSFSKRECEFLAMQMAKMDLNEDDEKANIETIFWSAMDMLSDDDKKLPQVSNMLPLLKRGIGVHHSGLLPILKEVIEILFQEGLIKKHSVLV

SEQ ID NO: 223313 - protein, 94 aa, Zea Mays
MGRSPCCEKAHTNKGAWTKEEDQRLVAYIKAHGEGCWRSLPKAAGLLRCGKSCRLRWINYLRPDLKRGNFTQEEDDVIIKLHQVLGNNGWNETH

SEQ ID NO: 223314 - protein, 83 aa, Zea Mays
MMSYFQTTTCKPQSRVVVNKPIPGLGSTSQHPLYSHALRFHRLQQKVYPRLLLVAASHKRLTPVCVLSGKGNAGTADDNCHTP

SEQ ID NO: 223315 - protein, 312 aa, Zea Mays
MPKRLDQDPGGILTTICNHSFHCSCISKWTDSSCPVCRYCQQQPEKSMCSICGTSENLWICLICGHVGCGRYKGGHAIEHWKETQHCYSLELETQKVWDYAGDNYVHRLIQSKTDGKLVEYNFHGDHTAESTCSLCSGDAAMDEALLNSKFEAIVEEYNDLVTFQLEKQRNYYESLLLEVKEETEKEISAATEKAMSTKLQKLEVKFDKCMEEKKFLDEVNGNLVKNQEMWIETIRKAQAREQAALRLKDEKIEKLQEELRGLIAHFDCQSDTAQASNAISSDIPGGMILPVASESSSSGGVVGGTGNGEQN

SEQ ID NO: 223316 - protein, 309 aa, Zea Mays
MAAPPSPSSRSPSSEVAVHRFSGTLDVSSSPSRTELLSMVKKHSHLIGWTIIGAEDDASDVGMDDKFWHEMLDLFFVRGRQSKRSEEDDLVFFVNNMKLHGYGFNDNMEDPPPFFVRRWAPTLEKISINTVEVDWERSFYLNLIAHTSYTVTVAIFGIEDLRNRAVKNKQLPPVYKVTKNVYASPSRVNFHLDRRKAVETLPAYPNIFFSVDDFDDTFDAVVLSDPEHCYCVILNAHDGAAFPEESECKNPVSNTQPGMSCGSAQEKPPKRTLFSAYVGYQNVRGAYDDQNLGVSSHLGMTTISSTDFL

SEQ ID NO: 223317 - protein, 384 aa, Zea Mays
MKAVGYSPYDSSGTDDDLPPAQNRGLRGRSFSGNVVASAGAFPYMRANNDLESEIHRVEQDAYTGILRAFKVQSDAISWEKESLITELRKELRVSDEEHRELLNKVNEDGTIRRMRELRQAGGSPSGLHHGNMVLYGAEPGSTTKRQRASHSIPLQSAGLQSPMMPSHSVSSAKWGPLQARGTKARTPIPLALPSVDPSSLINHKVYTRWPEDNNFYEATITRYNPVTGEHGLVYDMGTQAESWESVRLCDMAPEDIRWGFDGHLSNRDVWSPSGPMLMRHMTNNGAMAGSIKGRGRLSINETIKDYAPPENGTNRNFDHVDIPNTGSVVMEVKRVLFNPNMPEIEKARKLLKDQEQSLLDAIARLDEASDSDNEFLDESFERL

SEQ ID NO: 223318 - protein, 1356 aa, Zea Mays
MGRTVLSDEEDEFEADEEDPRPSRRNRDDMDERDDDDDDDEDGQDEFEKDDFIVDDEEEEVEGEEEEQKSDDERRRKKKKKKRESDDFMLDEDDYMLLQDNNITGISRPKPGNKFKRLKKAGRESEMDEHSGFSDGDGTGKKRSGKERVEYSLFGDHQDAAPFEEDFEDDQQAGEGEEEVGDDEDEMADFIVEEDEIDGNGQVVRRKKFKKKVPRQAAGVSSSALQEAQDIFGDVDELLALRKQELEREALNSGELRGARLEDEFEPFILAEKYMTSKDEQIKENDVPERMQLSEELTGYPPTDKTTIEEESSWIHSHLTGDGFLSFFGNEHINKDIDQKDIVNVVTMLHANKFEIPFIAMYRKESCPTLLSFDSDEDNEDIESDARKLRWHKLLWAVQALDRKWLLLQKRKVALQLYYEKRFDDEKRRIDDVTRQELNSQLYNSIIEALKDAKSEKEVEDVDAKFNLHFPPGEVEEEGQFKRPKRKSLYSICHKAGLWEVANQFGRSAEQLGHHLTLTKIPEAGELESGRHSPEEVAANFTCAMFETSQDVLRGARHMVIFKIVEDHPRDVNAQMENFSIVYGDESVPRLYENSRISSDQLPGQSGIVKRAVALGRYLQNPLAMIATLCGPGKEILSWKLHALEQFLTPDEKYEIVEQVMVDATNQIGFDVNLAASHEWHFSTLQFIAGLGPRKASALQKDLVREGSIFSRKELVKPLGRKVFMNASGFLRVRRSGAAAASAQLIDLLEDTRIHPESYVLAKNLAKDVYVEDAQHEINEMDDEEQEMAIEHVRERPSMLRSLKIVEYIKSITEEYRKLETLRDIKFELLCGFSDWRIPYTEPSPDEEFWLLSGETDDTISEGRIVQVTVRNIQDNKIICTFDSGLKAIVMADNYSDEGFDPESSQLREGDVLTGKIRNVNKNRFMVYLTCKASEMRRRPFSRGEQDPYYHEQDMTSQTVEDKARKQKELAKKHFKPRMIVHPHFQNLTAEEAMQFLSDKEHGEKLIRPSSRGPSFLTLTLKIFDGVYAHKEIAESGKDHKDITSLLRLGKTLTIDNETFEDLDEVIDRYVDPLVGHLKSMLSYRKFRKGLKNEVDEMLRAEKAENPMRIVYSFGISHEHPGTFILSYIRSTNPHHEYIGLYPKGFRFRKRDFDNIDRLVSYFQKNIDKPPPDAGPSMRNVAAMVPMKNSAWGSGGGGDANGGWRGDGSNDRDRPFSGRSGGRFDSRNSSGGRGRGRGRGRGNFGDDDNAGGGWSGGGGGGNSGRWTDNIGTGGSGGSSWGGGGGGDDSNRGGGGGGWGSAGGGADNAGGGNGAWGAAAGGSDDPGLGSAKKVVPAQDGGTGWGSEGGGGGGGGGW

SEQ ID NO: 223319 - protein, 1531 aa, Zea Mays
MGRTVLSDEEDEFEADEEDPRPSRRNRDDMDERDDDDDDDEDGQDEFEKDDFIVDDEEEEVEGEEEEQKSDDERRRKKKKKKRESDDFMLDEDDYMLLQDNNITGISRPKPGNKFKRLKKAGRESEMDEHSGFSDGDGTGKKRSGKERVEYSLFGDHQDAAPFEEDFEDDQQAGEGEEEVGDDEDEMADFIVEEDEIDGNGQVVRRKKFKKKVPRQAAGVSSSALQEAQDIFGDVDELLALRKQELEREALNSGELRGARLEDEFEPFILAEKYMTSKDEQIKENDVPERMQLSEELTGYPPTDKTTIEEESSWIHSHLTGDGFLSFFGNEHINKDIDQKDIVNVVTMLHANKFEIPFIAMYRKESCPTLLSFDSDEDNEDIESDARKLRWHKLLWAVQALDRKWLLLQKRKVALQLYYEKRFDDEKRRIDDVTRQELNSQLYNSIIEALKDAKSEKEVEDVDAKFNLHFPPGEVEEEGQFKRPKRKSLYSICHKAGLWEVANQFGRSAEQLGHHLTLTKIPEAGELESGRHSPEEVAANFTCAMFETSQDVLRGARHMAAVEIGCEPIVRKHVRGIFMNKAVVSTSPTSEGNTIIDPYHQLSGVKWLREKPLSKFVDAQWLLIQKAEEEKLLKVTVKLPEDAKKKLMSEARENYLSDCVSKSAQLWDEQRKMILDDAFFNFLLPSMEKEARSLLMTKAKHWLHMEYGKQLWNKVTVAPWKKKDADKKDADIDLDDESELRVMACCWGPGKPATTFVMLDSSGELVDVLYAGSISNRSQGVAEQQRKKNDQQRVLKFMTDHQPHVVCVGASNYNCRQLKDDLYEVIFKIVEDHPRDVNAQMENFSIVYGDESVPRLYENSRISSDQLPGQSGIVKRAVALGRYLQNPLAMIATLCGPGKEILSWKLHALEQFLTPDEKYEIVEQVMVDATNQIGFDVNLAASHEWHFSTLQFIAGLGPRKASALQKDLVREGSIFSRKELVKPLGRKVFMNASGFLRVRRSGAAAASAQLIDLLEDTRIHPESYVLAKNLAKDVYVEDAQHEINEMDDEEQEMAIEHVRERPSMLRSLKIVEYIKSITEEYRKLETLRDIKFELLCGFSDWRIPYTEPSPDEEFWLLSGETDDTISEGRIVQVTVRNIQDNKIICTFDSGLKAIVMADNYSDEGFDPESSQLREGDVLTGKIRNVNKNRFMVYLTCKASEMRRRPFSRGEQDPYYHEQDMTSQTVEDKARKQKELAKKHFKPRMIVHPHFQNLTAEEAMQFLSDKEHGEKLIRPSSRGPSFLTLTLKIFDGVYAHKEIAESGKDHKDITSLLRLGKTLTIDNETFEDLDEVIDRYVDPLVGHLKSMLSYRKFRKGLKNEVDEMLRAEKAENPMRIVYSFGISHEHPGTFILSYIRSTNPHHEYIGLYPKGFRFRKRDFDNIDRLVSYFQKNIDKPPPDAGPSMRNVAAMVPMKNSAWGSGGGGDANGGWRGDGSNDRDRPFSGRSGGRFDSRNSSGGRGRGRGRGRGNFGDDDNAGNWAVPCVVVQTTATR

SEQ ID NO: 223320 - protein, 736 aa, Zea Mays
MSQRPRKKNREKTHPEKQTKNPQSMKPTTSAAAAAVAAVTVTTDDPSPSPSDSTSATFTVDRRGDASASCRWTLPDFPRTRARTFYSRYFEVGGFDCRLLLYPRGDSQALPGYLSLYLQVLDPKAPVSSSSSTTTTTSSKWDCFLSYRLSVVHPTDPAKSLGRDSWHRFSSKKRSHGWCDFAPSSSAPFLFQPHDALVISADISVLSEAASFSDADGRFNWKVLNFGLFREMIRTQKIMSPAFFPASASAGGTDCGLRISVYQSNVSGAEHLSVCLESKEPVVQVASGSSALASGGTGSGVPDGDRGCWCLFRISILNQRSGGSHIHKDSYGRFGADSASLGWGEYIKMDEFLAADGGYLVDGAVVFSASVHVIKESNSFSRSLPMVPGICGAGGGRAGARKSDGHFGKFVWRIESFTRLKELLKKRKIAGLCIKSRRFQVGNRDCRLIVYPRGQSQPPCHLSVFLEVTDPRNTTTEWSCFVSHRLSVINQKVEEKSIMKESQNRYSKSAKDWGWREFVTLTSLFDQDAGFLVQDTVVFSAEVLILKETATMQELTDEDSETCSSTYGCQIEALPKRPSFTWKVENFVSFKEIMESRKIFSKFFQAGGCELRIGVYESFDTICIYLESDQSSGYDPDKNFWVHYKMAIVNQKNSAKTVCKESSICTKTWNNSVLQFMKTSDMVDTDAGFLVRDTVIFTCEIIDCCPWFDFSDLEVWPQMMTRMNCRQILMNCDRRK

SEQ ID NO: 223321 - protein, 846 aa, Zea Mays
MLLPTKVSTKSGGTKDTSKCDSSSSSTSLITLLMGISALKQAIIDLLLDIMVECCQPSEESGSSASTKAFPDSNGASSPPELSVEGDLTEYACSDVYARVESNSDDIRDSPVICNAGLAATEIAVNNIEHSCFPPETSAADLPADEGSEQASWSKCPEQSEELLGLIVNSLRALDSTVPHGCCEPRRRPQAVRKIALVLEKAPKQLQQDLISLVPKLVDGSEHSLAACALLDHLQRPDAEPSLRLPVFGALSELELESDIWKQASVHALELLSDSNDEPLVAAITYVLKAASQCEHLSVAVRAVRWRLKDLGTEVPHCVLDFLSKTIQTQLDVAEAILKDIDSDCEPENNCLASTSPSSTCSTDGLSAEGMYSWQEQAVHGRSHLSDVFALIEMLSMPGLFVEVAQVIERALLRGSFGLQLVAMVLERRHSYRSSSKSGSVVNDSQNKEVLLDGQFEPLSVQENDFTSVLALGEVLSLSTETKVQDFVRMLYAIIFKIYAEDHHRYRILKGLVERATNTSDNCRAVDIDMDVLVFLVKEEYGIARPVLNMMCEVAEVAQADRANLWHQICATEDENIRLREDMEMEQTNFTNEKIALNQRLTELEATIGSLRSELKAERDRFTREKKALSDQMREIENQLEWVRSEKDDQIAKLSSEKRNLHDRLNDAESQLALVKARKREELKKVTKEKNTLAEQLKNAEASRKRFDDELKRYAAETQTREEIRKSLENEVRRLTQTVGQTEGEKREKEEQITRCEAYIDGMESKLQVCQQYIRTLETSLQEEVARHAPLYGVGVESLSFNELEALANIHEQSLRQIKAIQQRKGMHGNGHHMNSTTGGRWFNPS

SEQ ID NO: 223322 - protein, 170 aa, Zea Mays
MMNVEKLKKMAGAVRTGGKGSMRRKKKAVHKTATTDDKRLQSTLKRIGVNTIPGIEEVNIFKDDIVIQFQNPKVQASIPANTWVVSGVPQTKSLQDLLPTIINQLGPDNLENLKRLAEHFQKQVPGAEASASAAAQDDDDVPELVPGETFEEAAEVKEVPEAEPEEKKES

SEQ ID NO: 223323 - protein, 879 aa, Zea Mays
MSASEFRIPYQQVSSSQPVENVNQFKTCRCGEGDPNSTSETGDSPPASCPNCQVLKSGHLLLSSKGIGWTSWKKRWFILTRASLVFFRSDPNVPPPRGAEPIVTLGGIDLNSSGSVAVKEERKLLTVFFPDGRDGRTFTLKAETTEDLNEWRNALESALAQAPSVANTMGQNPIFSTDVAAEPAEAPAEQSEDSSVIGRPAEFALVDADGSPSFLEKALKFIEDHGVKVEGILRQSADVEEVKRRIQDYEKGKNEFSPEEDAHVIGDCIKYVLREMPSSPVPASCCTALVKAYRSDKARRLDEISRVIYEVFPEPNRQLLQRTLKMMQIVESHKAVNRMSQSALAACMAPLLLRPLLLGECDIDNEFSMGGDSSFQLLQAAAAANHAQAIVIIMMEEFDQIFDDLEEGSCSSDAYTESEDDDVDKEYSTDNDINDDDDGSYDSGEDDIEEDLDYSDDSEHDSKINTNVKDGKVKNNISETAEVAQAKGASHMETNSQSNQKQESCGPNGSKDRILRSTSRSSSSREKSMEKSCSSAHRGKRTLWGRTSARKDLSTEEIECCSDDESLIEKLESNKVDLQSKIAKEAKENAILQSSLEKRKEELHERRLALEKEVENLREQLQKERSLRTSLESGVMNLRRGQVSLPSTTDSKTKADLEEVATAESDIINLKQEVSDLRGQVSGQQLCCESCNKRLLNTDRLGGPESSSVAASPTIGSDSASGMVKKEQKTFQGDIEQSRKQTAQDSPSSTDKPGHEAVGGSSQRAPQRRQSIAREGQDGWSSSSSNSKWNLAQKQYSNSPLIRGLHGSSRLEDFGGSIPPAASSALVKLTNRLNFLKERRALLASEMQSLDLGRPPAAAAAPSAKSPTPKGHERKKSRD

SEQ ID NO: 223324 - protein, 360 aa, Zea Mays
MGRYGPFPAAAGDGGGCLPLPIVAAEGALAVLDGAIATAAFVQLARIHRHNQLQGWTRQKIFHFMIGLSNIVFLVYFVSTIIATCQRWICWVHGCGFVLMASPQILLLASFLLLLSFWVDLCHQTNDEDEEDGRSQSHHEALLDRTKAKPGIHPVNIRQRCCPGIQLGSRQKFVILVLLLSFVVMLAFAILIWVGRGDNPIDSSLLKRVYLDVFSVVVIVLGGALACYGAVLFSKMSKVRSETVSTEKWKVASLAAVSLICFSSSAILALVTNVPVLLYWYSTDVDIINNAVILFIYYFIGSSVPSGFVLWIMREMPHRQVVERSVESRVVTLFRERPSTTQDPQWRTAVTSSNKDLLNI

SEQ ID NO: 223325 - protein, 109 aa, Zea Mays
MAAFNKLGGLLRHSALVSGITGGSSPAVFNAARLMSTKLFIGGLDWGVDDVKLREAFSSFGEVTEARVITDRETGRSRGFGFVNYSDSDAAKEAISAMDGKCIHIHVTC

SEQ ID NO: 223326 - protein, 637 aa, Zea Mays
MPTVPQDSPSSRQNQETLLKPRELQLPSFPKHFIQAPAMEASAAVESSAAVSVFEVVSSKQRRPPDTAKLVLNSPSPPSLREELVGVVGKAFRPRAHAGAAAGAGGRPPPRRAWVLTALQCVFPVLQWGRSYTLESFRSDVMAGLTLASLGIPQSIGYANLAKLDPQYGLYTSVVPPLIYAVMGTSREIAIGPVAVVSLLLSSMIQKVVDPAADPATYRSLVFTVTFLAGVFQVSFGLFRLGFLVDFLSHAAIVGFMGGAAIVIGMQQLKGLLGLAHFTNSTDVVSVLKAVCSALRHDPWHPGNFLIGCSFLIFILTTRFIGRRYKKLFWLSAISPLLSVILSTAAVYATRADRHGVKIIQKVHAGLNPSSVKQIHLNGPHTTECAKIAVICAVIALTEAIAVGRSFASVRGYRLDGNKEMLAMGFSNVAGSLSSCYVATGSFSRTAVNFSAGARSTVSNIVMSITVFVTLELFMKLLYYTPMAVLASIILSALPGLIDIKEACSIWKIDKMDFLTCLGAFVGVLFGSVEIGLAVALGISFAKIIIQSLRPQVEILGRLQGTDIFCSVRQYPVACLTPTVLPIRVDTSFLCFINATSVKERITEWVWEGVETSNGKARERIQAVVLDMSIQKYVYPC

SEQ ID NO: 223327 - protein, 224 aa, Zea Mays
MPHEPSYSKKTTDADGTTNGDVSENLLSRKPSSDELKALLADSERSRLLRRLSEANQYNRFLKRQLQIKDDAVVKFKGELAVLELEMQALVGLAEEVANFDVPLGSRKINGKYIQSHLLSRLEAVHDKIMEQVKSVDALKTQEIPVYWIGMAENVQIMGSFDGWSQGEAMSMEYSGDYGRFSATLKLRPGRYEIKFLVDGEWRLSPEYPTAGDGLTQNNILVVE

SEQ ID NO: 223328 - protein, 138 aa, Zea Mays
MQALVGLAEEVANFDVPLGSRKINGKYIQSHLLSRLEAVHDKIMEQVKSVDALKTQEIPVYWIGMAENVQIMGSFDGWSQGEAMSMEYSGDYGRFSATLKLRPGRYEIKFLVDGEWRLSPEYPTAGDGLTQNNILVVE

SEQ ID NO: 223329 - protein, 766 aa, Zea Mays
MAAAVAMRGGSSDSGGFDKVPGMDSGKYVRYTPEQVEVLERLYIDCPKPSSSRRQQLLRECPILSNIEPKQIKVWFQNRRCRDKQRKESSRLQAVNRKLTAMNKLLMEENERLQKQVSQLVHENAHMRQQLQNTSLANDTSCESNVTAPPNAIRDASNPSGLLAIAEETFTEFLSKATGTAIDWVQMPGMKPGPDSVGIVAISHGCRGVAARACGLVNLEPTKVIEILKDRPSWFRDCRSLEVFTMFPAGNGGTIELIYMQMYAPTTLVPARDFWTLRYTTTMEDGSLVVCERSLTGSGGGPNAASAQQFVRAEMLPSGYLVRPCEGGGSIVHIVDHLDLEAWSVPEVLRPLYESSRVVAQKMTTVALRHLRQIAQETSGEVVYALGRQPAVLRTFSQRLSRGFNDAISGFNDDGWSVMGGDGIEDVVVACNSTKKIRNNSNAGITFGAPGGIICAKASMLLQSVPPAVLVRFLREHRSEWADYNIDAYLASSLKTSACSLPGLRPMRFSGGQMIMPLAHTVENEEILEVVRLEGQPLTHDEALLSRDIHLLQLCTGIDEKSVGSSFQLVFAPIDEHFPDDAPLISSGFRVIPLDMKTDGVSSGRTLDLASSLDVGSAAPQASGDAPPDDCNLRSVLTIAFQFPYEMHLQDSVATMARQYVRSVVSAVQRVSMAISPSQSGLNAGQRMLSGFPEAATLARWVCQSYHYHLGVELLNQSDEAGEALLKMLWHHPDAVLCCSFKVPEELYSSPQYSNLLKQRQIPLTS

SEQ ID NO: 223330 - protein, 55 aa, Zea Mays
MSPWASSSGNKHMAKRVRGHDIVFQFQTVMMCRGKGSFRVHHSSSQRFCVKHEGH

SEQ ID NO: 223331 - protein, 96 aa, Zea Mays
MRGAEEERSGTATDAGGEEEKQERSVGLMAGLMDKAKGFVVEKVMQIPKPEAALDHVSFRSISREGVELHSHVDISNPYSHRIPICEITYTFKSAG

SEQ ID NO: 223332 - protein, 153 aa, Zea Mays
MATVTNVKSPVNKWRCGAAPISSMMTVQRWSRGPSATQIGKPAVHMASVDLKGKAYDVLRQNSSRFLLEDVYRNPGPLQFEGPGADSKPISLCVEDQDYMGRIKKLQEYLEKVKSIVKPGCSQDVLKAALSAMSSVTETLNIMTSSSTGQTAL

SEQ ID NO: 223333 - protein, 245 aa, Zea Mays
MGSTVDDDEACELVSGSDLVIGEGDDSVSAYLFKAVKNNNGTGILLLSDIFGFQDSATRDFAYRVACNGYNVLVPDLFRGNPWKLNVPFDGDSFERWRAGQAPGRVSGDIDACTRWLVDEFKAAGVSKKLGVIGFCYGGGRLVETLARDAESCFSAGVCFYGSRMDASLGDRVAAPVLFVCGDGDPLCPVETVRELEGRARGARAAVYAGRGHGFAHRPQSVEEDGDAEDAFNAMRGWLHDHLLA

SEQ ID NO: 223334 - protein, 136 aa, Zea Mays
MSSSNEDDTTSQGNAGGGAAASAAETEGDEMAVVAAEAEAEADEQVGSAETEEHIQRILLAIDNYTRQVSDMLDAGRALFKDLAADFEDRLCSIHKERVERWEEEIRELRARDVANEQARALLHNAQLHLLHTVRD

SEQ ID NO: 223335 - protein, 136 aa, Zea Mays
MEAGRESSKAKRARAAMSNEDDTTSQGNAGGGAAASAAEAEADEQVGSAETEEHIQRILLAIDNYTRQVSDMLDAGRALFKDLAADFEDRLCSIHKERVERWEEEIRELRARDVANEQARALLHNAQLHLLHTVRD

SEQ ID NO: 223336 - protein, 101 aa, Zea Mays
METVKSLLKPKPTPQQQLREWQRRLRNEGRNIDRQIRDVQREEKKVEKAIREAAKRNDMGSAKALAMEVVRSRKAVNRLYENKAQLNSISMHLGEIVGTNN

SEQ ID NO: 223337 - protein, 175 aa, Zea Mays
MRVRYHGPRTVKSLAAFYTDVSGINASVKSTAGEAMVHPLDDIEHKKDAEQENCPFWWARSPENILQQDTYLALATVFVILRLLYRIFPKIDSFTRWAWRRHNMFAKLMGAHEYFLTYLEQARQKFHRLYPSSSKRGNLQEGAMNATAWASKSLASVSIGEPSAIGRTNSTSELR

SEQ ID NO: 223338 - protein, 147 aa, Zea Mays
MTEDHRVTSATERARIARTGQPLRDGEARLSGLNLARMFGDKFLKEQDPRFSSEPYVSQAVRITKACTAFAVIASDGLWDVISTKRAVQLVVEGKERRSSGDATSAAARVASRVLDEARSLRTKDNTSVIFVDFDVLRRDPCISPVD

SEQ ID NO: 223339 - protein, 286 aa, Zea Mays
MRGEEHRAALRQKRLKKAKCFKWRPSKGDMDSKVEAGGAGSGQVCDDAVLCSLSTASFSGLVSWQRVRTLGKVAEGCDAADPPVPRKLRSAINKRAGRFASAPSRHVKKRRHLSAISAQISSVGQETRSNGSSLFTEQEEAIADVLLSLSQVPSHSEVTADKAVADSSNTNDASTSFSKGPTKEDDQTAELPSAANELASQCACINKAVEQSNIVPNADPVAAAANQSSNSIPLLSANEQMQDLSMETAVNLPSPSKDTSINSTMNCSLMIANVTLHRSQRLLFGW

SEQ ID NO: 223340 - protein, 123 aa, Zea Mays
MDHSPNVLDGRSLRVNSGPPPPRDRSSPSPQRPRGDANRVYVGNLSWGVDNSALANLFSEQGEVLEARIIYDRESGRSRGFGFVTYGSAEEVENAISNLDGADLDGRQIRVTVAESKPPRQQY

SEQ ID NO: 223341 - protein, 156 aa, Zea Mays
MLDEAIDYLKSLQLQLQMLVMGKGGGMAPVVPPELQQYMHYITADPAHQMMPPPLRPSAGQLQPAAGRQFQITQAAAAAANNDNDPQRRRQSNVESDFLSQMQNLHPSDQPPHHHNFLRPPRLQLFTPRGGGGGLPTTSHNAGWISGRSSSYNFME

SEQ ID NO: 223342 - protein, 69 aa, Zea Mays
MTSRWIAAQQKSPQPSVEGHNGCTRRPGCVPSYRDPGKQIFGCNSRGPLIDSYDHVIGVNTTTLTRKGW

SEQ ID NO: 223343 - protein, 230 aa, Zea Mays
MEGMTHFFHYNAFVVSRLWQQLSPFEVFIISYGVLNFMWLKFFLIWRYFRFWSLVGGVETPENMPRCINNCHDLESFWKSWHASFNKWLVRYLYIPLGGSQRKLLSIWVIFTFVAVWHDLEWKLISWAWLTCLFFIPEILVKSLSSKFQATSSLGMLVHREFKAIAGAVTISCLMVANLVGYVVGPSGIKVLISRMAGKDALPSLAFIFTTFYVGVKLMFHIRDASKNQG

SEQ ID NO: 223344 - protein, 272 aa, Zea Mays
MGGVPWNRVELTLLVLYALGFYLVVIWRSLRLSHEYSGRLYGLRVGSLAGHLNDLSDAQWRNFRGNLPILTVVMGAFLILVNTLRYCYGLKGRGTALLWLILSLSYLCYLHGACVVFVLLIALINYSIVKLFAHYKYCTSLIWSFNLSVLILNRVYEGYSFSLFGQNMAFLDNYRGTFRWHICFNFVVLRMISFGCDYCWTIHSSHFDFKKHMQRCQVCYSGKTCYFALQERGLSLDRYTFLMYLCYLTYAPVYIAGPIVGYNAFAAQRSCS

SEQ ID NO: 223345 - protein, 225 aa, Zea Mays
MGKELVREITDLAHRHDIYVSTGDWAEHLLRQGPSSFKQYVEECKALGFDTIELNAGSLNLPEEALLRLVRLIKSSGLRAKPMFSVKFDSSDIPASGDRAFGAYIAPVKGKTSERVEDVDLLIRRAERCLEAGADMIMIDADDVCQRAESLRTDIIAKIVGRLGLDKTMFEASNSNTSEWFVRRYGPRVNLFVEHSDVMNLERLRGFNMRRSNSASRFASPFFLI

SEQ ID NO: 223346 - protein, 365 aa, Zea Mays
MPRWTENSASTKSAELVKQQDRLEFDDPDEVDEEEEVEYEEVEEEVEYEETEDEYGQTEAVRQVDAKHDSKMVDADTDEGGKGSHDELLALPPHGSEVYVGGIASDVSSDDLKKLCESVGEVVEVRMPGKSGRLYAFVNFRTKELASKAIQKLNNKDLKGKKIRVSSSQAKNRLFIGNIPYNWTENEFKKAAEEVGPGVLKVNLVKAPHSDTNKGYGFIEYYNQACAEYAKKMMSTPEFKLDKNAPNVSWADTKNGGESASTAQVKSLYVKNLPKAVTQEQLKKLFEHLGEVTKVVIPPAKAGHENRYGFVHFKERSMAMKALEDTERFELDGQLLDCSLAKPLADKKDDTSAPKGAFSSPHLRS

SEQ ID NO: 223347 - protein, 365 aa, Zea Mays; identical to SEQ ID NO: 223346

SEQ ID NO: 223348 - protein, 419 aa, Zea Mays
MPRWTENSASTKSAELVKQQDRLEFDDPDEVDEEEEVEYEEVEEEVEYEETEDEYGQTEAVRQVDAKHDSKMVDADTDEGGKGSHDELLALPPHGSEVYVGGIASDVSSDDLKKLCESVGEVVEVRMPGKSGRLYAFVNFRTKELASKAIQKLNNKDLKGKKIRVSSSQAKNRLFIGNIPYNWTENEFKKAAEEVGPGVLKVNLVKAPHSDTNKGYGFIEYYNQACAEYAKKMMSTPEFKLDKNAPNVSWADTKNGGESASTAQVKSLYVKNLPKAVTQEQLKKLFEHLGEVTKVVIPPAKAGHENRYGFVHFKERSMAMKALEDTERFELDGQLLDCSLAKPLADKKDDTSAPKGGPLLPSYTPVGYGLMGAYNPLGNGLAVAGAYNPYGNGLAGAYGVLGAHAAQLEPAVRASPLAA

SEQ ID NO: 223349 - protein, 419 aa, Zea Mays; identical to SEQ ID NO: 223348

SEQ ID NO: 223350 - protein, 83 aa, Zea Mays
MAPGKRSAWTSRKPEEPMPTDYEKIRAMNMMKNNQLFQRLGLGQLKSLVTATAANNKDDSPQQSESLYDGENTDNSNEEAQFT

SEQ ID NO: 223351 - protein, 471 aa, Zea Mays
MAGGGAAYQSSSASPDWLNKGDNAWQMTSATLVGLQSMPGLVILYGSIVKKKWAINSAFMALYAFAAVWLCWVVWAYNMSFGDRLLPFWGKARPALGQRFLVAQSQLTATAVRYRDGSLEAEMLHPFYPAATMVYFQCVFASITVIILAGSLLGRMDIKAWMAFVPLWITFSYTVSAFSLWGGGFLFQWGVIDYSGGYVIHLSSGIAGLTAAYWVGPRSASDRERFPPNNILLVLAGAGLLWLGWTGFNGGDPYSANIDSSMAVLNTHICASTSLLMWTLLDVFFFGKPSVIGAVQGMITGLVCITPGAGLVQGWAAIVMGILSGSIPWYTMMVLHKKWSFMQRIDDTLGVFHTHAVAGLLGGATTGLFAEPVLCNLFLAIPDSRGAFYGGDGGSQFGKQIAGALFVIGWNIVITSIICVLIGLVLPLRIPDAQLLIGDDAVHGEEAYAIWAEGELNDVTRQDESRHGSVV

SEQ ID NO: 223352 - protein, 620 aa, Zea Mays
MIESKKDGTPMLLVQDNGGGMNPDKMRHCMSLGYSAKSKVKNTIGQYGNGFKTSTMRLGADVLVFSCSRGIEGTRPTQSVGMLSYTFLRSTNRDDIIVPMIDYEKENEWKRKARTTLTDWCMSLETIIQWSPYSTEAELIQEFGSIGEQGTRIIIYNLWEDDEGELELDFDADANDIQIRGVNRDQNKIKKANQFPNSKHFFTYRHSLRSYASILYLMLPDNFQMILRGKKIDHHNIINDLMLKKQLTYNPTVGDGLPKDMHVAAKVTIGFVKDARQHIDIQGFNVYHKNRLIKPFWRVWTSAGVAGRGIIGVLEVNFVEPAHDKQDFERTNCLARLEARLNRMQKKYWSDNRHRIGYGTNDASTDSVKRKTGLSLRPFGQGSWKSGYLQTIRSDGRSCSNTTNNIMNASMSSPETSKLSGPNREFSSTTVCQHRAEKSANTIRSERSVLHGLSNTDGGKTETANAPSKSTSPILRTSLPPTPNEGKRSERIAAKYQSKQVNATTNGDRESIVDPEAIIKKLKEENSSLKERILMVQESLSRELQIERDKNKSLTERFEDVERQLELAIKEQEATVELFAEERKCHDQEVENLKRKLTEASSTIQDLMEQLNAARNCCKR

SEQ ID NO: 223353 - protein, 694 aa, Zea Mays
MAPTAVDPGPSDHLLAPAPAAMAGGGDGGDGQMEVVFNVSSSDTDSDDLGAGGGKRSRPVAGQGGGRDREDKKARILAAAATVPAGFLEPLSPVRLLPPPAPGRSVTKQFWKAGDYVGKPDHLLAVVAAQHSDSGMDHVRVHPKFLHSNATSHKWALGAFAELLDNSLDEVVHGATYVNIDMIESKKDGTPMLLVQDNGGGMNPDKMRHCMSLGYSAKSKVKNTIGQYGNGFKTSTMRLGADVLVFSCSRGIEGTRPTQSVGMLSYTFLRSTNRDDIIVPMIDYEKENEWKRKARTTLTDWCMSLETIIQWSPYSTEAELIQEFGSIGEQGTRIIIYNLWEDDEGELELDFDADANIRGVNRDQNKIKKANQFPNSKHFFTYRHSLRSYASILYLMLPDNFQMILRGKKIDHHNIINDLMLKKQLTYNPTVGDGLPKDMHVAAKVTIGFVKDARQHIDIQGFNVYHKNRLIKPFWRVWTSAGVAGRGIIGVLEVNFVEPAHDKQDFERTNCLARLEARLNRMQKKYWSDNRHRIGYGTNDASTDSVKRKTGLSLRPFGQGSWKSGYLQTIRSDGRSCSNTTNNIMNASMSSPETSKLSGPNREFSSTTVCQHRAEKSANTIRSERSVLHGLSNTDGGKTETANAPSKSTSPILRTSLPPTPNEGKRSERIAAKYQSKNLDGAGIIIKGTANRAG

SEQ ID NO: 223354 - protein, 119 aa, Zea Mays
MISSQSGPGLLFPKGGWENDETVEEAAAREAIEEAGVRGDLVPEATCRAAIFALHVKEELASWPEQSTRQRSWLTVPEAAERSRYPWMQEALVTGFSAWLENWRNGGGGGGGCVDRTER

SEQ ID NO: 223355 - protein, 106 aa, Zea Mays
MARIKVHELRGKSKTDLQAQLKELKSELSLLRVAKVTGGAPNKLSKIKVVRTSIARVLTVISQKQKSALREAYKKKNLLPLDLRPKKTRAIRRRLTKHQSSSLKEH

SEQ ID NO: 223356 - protein, 50 aa, Zea Mays
MILQRADPTFRSSLRKWTRLMHTHRLNRTHSFYLSRQRSGLGLLKACGRG

SEQ ID NO: 223357 - protein, 409 aa, Zea Mays
MPSSTIRSISITVSDDDGAAAAPSRRPRAGRRKAVARSLGQRAVRLVARWWPVLLLLPAVALLLFEASRLRASSPGPSPPVSSLGRLDPTTRLVHGVREPCLKLLSPKSLANVVFPEGTRLDSVVSRITYKTDDDDYDTYHSEANSTYLLQHAEATRFDLFTGFQTLAEREDSFKVNETVSVHCGFYSDNGGFKISEEDRRYMRACKVVVSTCAFGGGDDLYQPIGMANSSIGRVCYVAFWDEVTLAAQEAEGKVIGDDSMIGRWRIIVVRSLPFVDQRLNGKIPKMLTHRLFTEARYSIWVDSKYQLRRDPIGMLEALLWRTNSTFAISEHGARSNIYDEGKAIVQKHKATPEEVEVQLTRYRQDGMPDTKRLHGLKALAEASVIVRELTPATNHFMCAWFNEVGSCE

SEQ ID NO: 223358 - protein, 562 aa, Zea Mays
MPSSTIRSISITVSDDDGAAAAPSRRPRAGRRKAVARSLGQRAVRLVARWWPVLLLLPAVALLLFEASRLRASSPGPSPPVSSLGRLDPTTRLVHGVREPCLKLLSPKSLANVVFPEGTRLDSVVSRITYKTDDDDYDTYHSEANSTYLLQHAEATRFDLFTGFQTLAEREDSFKVNETVSVHCGFYSDNGGFKISEEDRRYMRACKVVVSTCAFGGGDDLYQPIGMANSSIGRVCYVAFWDEVTLAAQEAEGKVIGDDSMIGRWRIIVVRSLPFVDQRLNGKIPKMLTHRLFTEARYSIWVDSKYQLRRDPIGMLEALLWRTNSTFAISEHGARSNIYDEGKAIVQKHKATPEEVEVQLTRYRQDGMPDTKRLHGLKALAEASVIVRELTPATNHFMCAWFNEVDIWNTTWYPKAADHVTTEKTWYVVDATDKILGRLASTIAVHIRGKNEPTYTPSVDMGAFVIVVNADKVAVSGKKRSQKLYRRHSGRPGGMKEETFDQLQKRIPERIIEHAVRGMLPKGRLGRRLFTHLKVYKGTEHPHEAQKPVPLPIRDKRIQKTG

SEQ ID NO: 223359 - protein, 304 aa, Zea Mays
MPSSTIRSISITVSDDDGAAAAPSRRPRAGRRKAVARSLGQRAVRLVARWWPVLLLLPAVALLLFEASRLRASSPGPSPPVSSLGRLDPTTRLVHGVREPCLKLLSPKSLANVVFPEGTRLDSVVSRITYKTDDDDYDTYHSEANSTYLLQHAEATRFDLFTGFQTLAEREDSFKVNETVSVHCGFYSDNGGFKISEEDRRYMRACKVVVSTCAFGGGDDLYQPIGMANSSIGRVCYVAFWDEVTLAAQEAEGKVIGDDSMIGRWRIIVVRSLPFVDQRLNGKIPKRQGTLYGLTLNTNYEEIL

SEQ ID NO: 223360 - protein, 407 aa, Zea Mays
MPVAVALAAAAALVVLLVLSAVAAAVFFARTRGARPPSLSRVEHAPSSASGSSRAASSARKEKVGADQVAEPGAASSGVASSSAAASSLESPVKRKAEAVRVGGGGGGAAAGVEMEVGWGRWYDLTELEIATGGFCPANVVGEGGYGTVYRGILAGGEVVAVKDLFDHKGQAEKEFKVEVEAIGKVRHKHLVGLIGYCAEGPKRMLLYEFVENGNLEQWLHGDVGPVSPLTWEIRMKIAVGTAKGVPARRPGAEGGAPRHQVEQHPAGQEMEPQGVGLRHGQGAGARVQLRDDPRDGHVRVRGPRVRVDGHAEREQRRLQLRRAAHGAHLRAEPRGLQPAGRRGEPGGVVQGHGGRPARGGPGGPADPRAAAASAGAQPGAARLPPMHRRRRAQAAPDGADRAHARG

SEQ ID NO: 223361 - protein, 117 aa, Zea Mays
MPPRRVRARTGGAIEILDLFVIRDNLRAWGIHWVVMVVFLAFPGEVIHRSTSNCSPEIVLRRGPPSVVNQAWRDIIQGQEQVPQDEVHGGCCDVFVRGLGRRLPVNFGLLDRCLLIM

SEQ ID NO: 223362 - protein, 696 aa, Zea Mays
MADDQSVVGRRRIYYDPIGNEALICSDSDEEIPEPEEEKHFFTEGEDQLIWRATQEHGLNREVVNVLCQFIDSTPSEIEERSEVLFEKNEKNSGSSDKIERQLSLDKTMDAVLDSFDNLFCRRCLVFDCRLHGCSQNLVFPSEKQPYSFEPDENKKPCGRQCYLRWREGFQEIHDVGLSGCATYNMESGTVSHKVDVSIMSESEDSNREKGNIRSMTLVGTSGSKIISSVSAEESTTPPSADTSETENASSDMPPSSLRKYKISKRGPRYRERSPGKRQKVFTYDISFASNILNKLSIPEIRDTRLESREPGGDKLQILDESTKKTSSKDICGESPITTTENVGRESKKVSSTKNFLEHTLSCWSALERDLYLKGIEIFGKNSCLIARNLLSGMKTCMEVANYMYNNGAAMAKRPLLNKSISGDFAETEQDYMEQDMVARTRIYRRRGRNRKLKYTWKSAGHPTVRKRIGDGKQWCSKSCKNKFRGCHCAKSQCRSRQCPCFAASRECDPDVCRNCWVSCGDGSLGEPPARGDGYQCGNMKLLLKQQQRILLGRSDVAGWGAFIKNPVNKNDYLGEYTGELISHKEADKRGKIYDRANSSFLFDLNDQYVLDAYRKGDKLKFANHSSNPNCYAKVMLVAGDHRVGIYAKEHIEASEELFYDYRYGPDQAPAWARRPEGSKKDEASVSHHRAHKVAR

SEQ ID NO: 223363 - protein, 859 aa, Zea Mays
MTENSSLSIESSRASSSSSSCSSFSSLDGNKSVQQELPYINEELFVQRSLKTSPSLKESDMNTKSGHPNVGFRDIVKDSINRDPGGLTVKTSVQEARRNGQYKDSPRPLLLSKSMDGTCIIGIDRTTKVPANVTESGRCLQERSRFSCDDRRLLRPAETQECKRPSSRLKELPRLSLDSRKESLSPGSRQKSISYKRTDDILLDTLRPQDSPSNRRANSVIAKLMGLEEATNATGVLTADSCEPTRSPRPAQATQHERPSRSPKNTCQDSCSMQPKNQLKAKPSQRIATEAAPWRQQDRSANNTKAEQCREAEGRARTASVYADIERSGGFNFLECNNKDFRALRILGALNAKDAKSKNDSSGGSVAIHRTGYDLTTSSGSFQAPIVVMKPARTTEKHGVSLASVAPIAGLRSLRKLPAGRYSSFTGTNDKMQLRMSRDQSKSEETVSSASSPRPTSSSSPRNVLKKSEPERRSRPPVSPKSPSKKSNEAVSPKGRTRSKPSQVKCHRDEVLQITGNRISLAKQVDVSIMDCPKPLGGNSTFVPEGNTAATASQKAASILGSDQNIHSLDNIPSPVSVLDASFYHKRISDSFKDGETHSSEECWNPNSLPDTPQSKANSEVNQIKPENLEVLIQKLEQLQSMSEEDASIKEVMASVAANKDHQYIYEIMLASGLLHKEHSVTALPGQLQPSNYPINPELFLILEQTRPVSVSAFQTVGGAKRSCKPCAGKLHRRLVFDLVNETIAQKMSICRSGSQPVKFLRSRKLSGWQLFKDLCAVVDRLTKCSEEEENENMVLDEDAINGTKDWMSFDTVLHGMVWEIERSIFKGLIDEVVSGETTEKMRFGQRKLQRQLSFGSTN

SEQ ID NO: 223364 - protein, 52 aa, Zea Mays
MLRDMVFCQRNMTASLLSTFIHRSLQQLFCFWLVRLGMVSSNTLKARKAKAR

SEQ ID NO: 223365 - protein, 570 aa, Zea Mays
MLSVVRVHLPSEIPIVGCEVTPYVLLRRPDGAVSTDDVPETAPADGQFMRYRWYRIQSDRKVPICSVHPMEQATIQCLGCLKSKIPVAKSYHCSAKCFSDAWQHHKVLHERASSAQNENGAEEEELCGSGTDKNSGETWYEVGRLRTYTPTAADIGHALKFECVAVDSEKRSPIGPPTSVMTSHVIPAPTPTPRRLIQVNGDVLGHLDLDSQTSSLGTFTVLSYNILADTYATSDAYSYCPTWALTWTYRRQNLLREIIGYHADIICLQEVQVNHFEDFFSPELDRHGYQALYKKRTTEVYSGNPMAIDGCATFFRRDKFSHVKKYEVEFNKAAQSLTDAIIPSAQKRLALNRLIKDNIALIAVLEAKFANHGAENPGKRQLLCVANTHINVHQDLKDVKLWEVHTLLKGLEKIAVSADIPMLVCGDFNSPPGSSPHALLAMGKVDQHHPDLAIDPLGILRPPSKLNHQLPLVSAYSAFARMVGVGYDLEHQRRRTDPATNEPLFTNCTRDFTGTVDYIFYTADSLTVDSLLELLDEESLRKDTALPSPGWSSDHIALLAEFRCKPRIRS

SEQ ID NO: 223366 - protein, 65 aa, Zea Mays
MILKLPMCTITSYRRKYLREILKASLETLFFPRYFYFSRGNEIFFRGKIEISRKNEVPKLALKGL

SEQ ID NO: 223367 - protein, 455 aa, Zea Mays
MTGKKAPVPPPPPPQAPKPPGVVPPPPPPSSKISNAPAPPPLLGRGRGNTTGPTKGRGIGLAQQSNPPKKASLKPLHWVKVTRAMQGSLWADAQKQGNQARSPDIDLSELESLFSTAVVTSTSEKGATRRGSAINKPEIVHLVDMRRANNCEIMLTKIKMPLPDMINAILALDTSVLDNDQVENLIKFCPTKEEIEMLKGYNGNKEMLGKCEQFFLELMKVPRVEAKLRVFAFRITFSTQVDELRTNLTTINDATKEVKESLKLRQIMKTILTLGNALNQGTARGSAVGFRLDSLLKLSDTRSRNNKMTLMHYLCKLLAEKMPELLDFDKDLIYLEAASKIQLKLLAEEMQAINKGLEKVEQELAASESDGAISVGFRKALKSFLDAAEAEGRNADSLAQYFGEDPARCPFEQVTSILVIFVNMFKKSRDENARNAEAEKKKLEKEKEKASVSAK

SEQ ID NO: 223368 - protein, 170 aa, Zea Mays
MTGKKAPVPPPPPPQAPKPPGVVPPPPPPSSKISNAPAPPPLLGRGRGNTTGPTKGRGIGLAQQSNPPKKASLKPLHWVKVTRAMQGSLWADAQKQGNQARSPDIDLSELESLFSTAVVTSTSEKGATRRGSAINKPEIVHLVDMRRANNCEIMLTKIKMPLPDMICCNL

SEQ ID NO: 223369 - protein, 159 aa, Zea Mays
MISTPNRADMVFPKGGWEDDEDVYQAACRETTEEAGVKGIINRAALGHWVFKSKSSQNSTTSTSGACKGYIFGMEVTEELESWPEQDTHDRRWVSPAEAYQLCRYDWMREALTALLERLSVLQPVAAAAAAATPELAADQSGMYMMLQASSDGGAVALC

SEQ ID NO: 223370 - protein, 860 aa, Zea Mays
MAMAPSTAAASTLLPVLLLIATATQCTAADSFSSQDAAALLNLSAAVADPSGYLSTHWTPDTAVCSWPRVSCDATDTRVISLDLSGLNLSGPIPAAALSSFPYLQSLNLSNNILNSTAFPDEIIASLKSLRVLDLYNNNLTGSLPAALPNLTDLVHVHLGGNFFSGSIPRSYGQWSRIRYLALSGNELTGEIPEELGNLTTLRELYLGYYNNFTGGIPPELGRLRALVRLDMANCGISEEIPPELANLTSLDTLFLQINALSGRLPTEIGAMGSLKSLDLSNNLFVGEIPASFASLKNLTLLNLFRNRLAGEIPEFIGDLPNLEVLQLWENNFTGGIPTNLGVAATRLRIVDVSTNKLTGVLPSELCAGQRLETFIALGNSLFGDVPDGLAGCPSLTRIRLGENFLNGTIPAKLFTLPNLTQVELHNNLLSGELRLDGGKVSSSIGELSLFNNRLTGQVPTGIGGLLGLQKLLLAGNMLSGELPPEVGKLQQLSKADLSGNLLSGAVPPAIGRCRLLTFLDISSNKLSGSIPPELGSLRILNYLNVSHNALQGEIPPAIAGMQSLTAVDFSYNNLSGEVPSTGQFGYFNATSFAGNAGLCGAFLSPCRSVGVATSALGSLSSTSKLLLVLGLLALSVVFAGAAVLKARSLKRSAEARAWRLTAFQRLDFAVDDVLDCLKEENVIGKGGSGIVYKGAMPGGAVVAVKRLPAIGRAGAAHDDYGFSAEIQTLGRIRHRHIVRLLGFAANRETNLLVYEYMPNGSLGEVLHGKKGGHLQWATRFKIAVEAAKGLCYLHHDCSPPILHRDVKSNNILLDADFEAHVADFGLAKFLRGNAGGSECMSAIAGSYGYIAPDASYIPC

SEQ ID NO: 223371 - protein, 129 aa, Zea Mays
MFGSLNFGTLNPYYSPPIKIGRNTKGSNQYPYVSPSGPGSAAGAVACIACPTLYAYLKKTDPGVPAQLLEYDERFGQYGCDFTFYDYNRPEELPAAMKHAYRVIVADPPYLVLFLPYQRLPIKKCLISS

SEQ ID NO: 223372 - protein, 291 aa, Zea Mays
MCSKALSIWRVLARNYSAGLWKDLSENDSCGTLVTKRSGEEIAAVEAAKILKALSDEDLVLEHLGWVADIDQDLAIAVLTSETRENQLSPEKVVASVDAEKVVIHQRYLQWLIEGQGCDDPHYHTSYALSLAKSAIEAVDMESKYRGKDDSEIDSDAQFVYSVRESLQLFLQASDLYDPEDVLDVIAESELWLEKAILYRKMGQENIVLQILAFWRIVKLLSSIAQRLVEMMLIFSFWACIWTLKTGRSLCLQQLYDFFIIMVNRWTPYKYWRNYLLICLSSWHQTQFYGH

SEQ ID NO: 223373 - protein, 77 aa, Zea Mays
MNAIDLILKKLSLDVHYPANLSSPFPYAGLTFPSYPGVPVGYMIPQVPYNNAVNYGPNNGYGGRYQNNKYKLEVSNF

SEQ ID NO: 223374 - protein, 218 aa, Zea Mays
MLGLAKRVGARILLTSTSEVYGDPLEHPQTEAYWGNVNPIGVRSCYDEGKRVAETLMFDYHRQHGIEIRIARIFNTYGPRMNIDDGRVVSNFIAQAVRGEPLTVQKPGTQTRSFCYVADMVDGLIRLMNGNNTGPINLGNPGEFTMLELAENVKELINPDITVTMTENTPDDPRQRKPDITKAKEVLGWEPKIVLKDGLVLMEDDFRERLAVPKKTKA

SEQ ID NO: 223375 - protein, 98 aa, Zea Mays
MDEEDDQSATLDQVLNDTTRVGYFKGYLNSVAQAIKDGADVRGYFAWSFLDNFEWAMGYTKRFGIVYVDYKNGLSRHPKASALWFSRLLRGEAGTGTS

SEQ ID NO: 223376 - protein, 159 aa, Zea Mays
MTQATVDGKKNKVYGQNLCYLAKLFLDHKTLYYDVDLFLFYVLCECDDRGCHMVGYFSKEKHSEESYNLACILTLPPYQRKGYGKFLIAFSYELSKKEGKVGTPERPLSDLGLLSYRGYWTRVLLEILKKHKGNISIKVTPFHPDIPFSLYKFRKLIEL

SEQ ID NO: 223377 - protein, 692 aa, Zea Mays
MISPGWAAAFASPPVAMALAMMAAGASGTETRTPPRNTLNRRDKALPERKAAAKLQTFSSFQMPMETASNKPGSTLKDKAAAKAAALAAARDLERTAKIGSRRGLSAVAMATSGQRRSSGDIERAKRWNTSEAMSAAWVECLQSDDSKSVVGRDFSALSYKYVAVLVSCLALARNLQRAEMERQTLVDVLIRHRASTGLRAWRHLLHCLTEMGRLYGPFEHLCTPDRVFWKLDFTESSSRMRRFVKRNYKGCDHLGAAADYEDRKLLNTSAQSNEHNSEDANSSLTSTLPSSASVIMADAMSMNDRNVENEQLETDTTRSSVDDDQLQHSSAADQQSVKGSIGSRTSDICADRNLVRSTVLAPSYVPSEADERIIVELPSLMVRPLKVVRGTFQVTSKRINFIIDERSNDSNIDDAASTSGQCDQQDKDRSWLVSSLYQIYSRRYLLRRSALELFMVDRSNFFFDFADIDARKNAYRAIVHTKPPNLNDIFLATQRAEQILKRTQLMERWANWEINNFEYLMELNTLAGRSYNDITQYPVFPWVVADYKSRVLNLDDPLSYRDLSKPIGALNPERLKKFQERYSTFEDPIIPKFHYGSHYSSAGTVLYYLFRVEPFTTLSIQLQDGKFDHADRMFSDLSGTWDSVLEDMSDVKELVPEMFYLPEVFTNINGIDFGTTQLGGKLDINRGAKKR

SEQ ID NO: 223378 - protein, 447 aa, Zea Mays
MKDILSWKGNSLNSNRKLGLNRTAGSSSTVDANVDPTVLPLEPKGGQLPLFSSGDWMSDIDSGYEAAEIAASTQTSSGVTPYLCSAGSVFGSSWMLVNHDQSDGPSTSAGTSSQQKVVPQSEHQRNLNRLPDLQEIPESKNLFADLVPSGDNKSKKTSVPFKGPDHRNNELQKRRENIVPNAGRPHQRLVMKNWSPYNDVSNNKQYNYVEDSFARRNVGNNAAPSSSQMPRPAARSNLNSRLHNDASYHNYDSIMAGTSAMNITSTAETGKVPERVMRGDLDKGQTNYRLEDQHVIVQPPQGRLPWGIPAEGSVPMNRVQSQAKQHLENMDAKQDHKKLLPDPKKSPLDKFMDTSLPSRNMDMRSQRLDFDDVSECEIPWEDLVIGERIGLGSYGEIYCADWNGTEVAVKKFLDQDFYGDALDEFRSEAATRICIRREEWGGRWSCC

SEQ ID NO: 223379 - protein, 159 aa, Zea Mays
MRESINRPPTPSAVEDRDKEPSLVEIINIKFVESGEKEKLTELLRERLVECGWMDEMKAFCSISACFGEGRTPATYPVLHGYHTSVVIYRDGWSYMYHCTNTGRSILLGTKGAGTEHEKDQCDLHDAIDMFLVRQAVGVISGVATRSYNPEYCTVKGTL

SEQ ID NO: 223380 - protein, 1142 aa, Zea Mays
MSNPPPKKAIRNPGGGAGGPAGGPRGPAGNTVKFARRTSSGRYVSLSREDIDMEGELAADYTNYTVQIPPTPDNQPMMDPASVAMKAEEQYVSNSLFTGGFNSVTRAHLMDKVIESEVTHPQMAGSKGSRCAMPACDGKVMRNERGEDIDPCECRFKICRDCYLDAQKEGCLCPGCKEHYKIGEYADDDPNDASSGKHYLPGPGGGMMNNSKSLLARNQNGEFDHNRWLFESSGTYGYGNAFWPKGGMYDDDLDDEGGPGGGGGDGMLPEQKPFKPLTRKIPMPTSIISPYRIFIVIRMFVLIFYLTWRVRNPNMEALWLWGMSIVCELWFAFSWLLDMLPKVNPVNRSTDLAVLKEKFETPSPSNPHGRSDLPGLDVFVSTADPDKEPVLTTATTILSILAADYPVEKLACYVSDDGGALLTFEAMAEAASFANIWVPFCKKHDIEPRQPDSYFSIKGDPTKGKRRSDFVKDRRKVKREFDEFKVRINGLPDSIRRRSDAFNAREDMKMLKHLRETGADPAEQPKVKKATWMADGTHWPGTWAVSAPDHAKGNHAGILQPPSPDPLYGMHDEEQLIDFSDVDIRLPMLVYMSREKRPGYDHNKKAGAMNALVRCSAVMSNGPFILNFDCDHYINYAQAIREAMCFVMDRGGERIAYIQFPQRFEGIDPSDRYANNNTVFFDGNMRALDGLQGPMYVGTGCMFRRFALYGFDPPRTTEYTGWLFKKKKVTTFGKADQGETDTQSLNSKGAEDFDAELTSMLVPRRFGNSSALMASIPVAEFQARPLADHPAVLHGRPPGSLTVPRPPLDPPTVAEAVSVISCWYEDKTEWGDRVGWIYGSVTEDVVSGYRMHNRGWRSVYCIPKRDAFLGTAPINLTDRLHQVLRWATGSVEIFFSRNNAFLASRRLMFLQRVAYLNVGIYPFTSIFLLVYCFIPALSLFSGFFIVQTLNVAFLCYLLTITVTLIALGVLEVKWSGIELEDWWRNEQFWLISGTSAHLYAVVQGLLKVMAGIEISFTLTAKAAVDDNEDIYADLYVVKWSSLLIPPITIGMINVIAIAFAFARTVYSDNPRWGKFIGGGFFSFWVLAHLYPFAKGLMGRRGKTPTIVFVWSGLISITISLLWVAISPPEASAGGRGAGFQFP

SEQ ID NO: 223381 - protein, 69 aa, Zea Mays
MGVGGHALEEVMDKVKNRHYQVACTLTFEATHGVSCDSGINHPNQYFSESQKVLRAKNQTMESQSQSAT

SEQ ID NO: 223382 - protein, 84 aa, Zea Mays
MSLGIEENLRAALNKMGVGGHALEEVMDKVKNRHYQVACTLTFEATHGVSCDSGINHPNQYFSESQKVLRAKNQTMESQSQSAT

SEQ ID NO: 223383 - protein, 313 aa, Zea Mays
MGFAGWVSMLLFLLVAGAVANDQIFTTSGVPFGRSSREPSYRVEFHPVDSPFHPENGQESVPMASHDGKRYKCFLPVEETKTMKSMLPQNATNVIIESERRIKPKEPDELLEVLKDQCFYRHEGWWSYEFCYHGKIRQVHVDDDKVIQEFVLGEFDDDATAAYHENITSELVDDDHHVKDISQRYHVHLYTNGTVCDLTDIPRETEVRFVCSEPTVLISSVKEISSCRYVVTIQSPMLCKNPKKNEPSPSTAMSCLLERNPARRMTRFQKKLRFPSSPIRMSYMISQPMLLDLPPIIMFDVEKKTPFWRRRGN

SEQ ID NO: 223384 - protein, 251 aa, Zea Mays
MELPGHICSHFRIGPLRCWPGGLCLSRSIGDQDVGEFIIPVPYVKQIKLSNAGGRLIISSDGVWDALTAEMAFKCARGLPPEAAAEQIVKEAVEAKGLRDDTTCIVIDIISPEKPKRTIQSQRTPGKGLVLLKNFFLRKTTSDSLSLPDKDNYPEPDLEEVFEDGCPSLSRRLNSEYPVRDMFKLFACAICQIDLESGQGISIHEGLSRPGKLRPWDGPFLCHSCQEKKEAMEGKRHSRDSSSRNSGSSES

SEQ ID NO: 223385 - protein, 139 aa, Zea Mays
MDAFLQRLKRLDAYPKVNEDFYKRTLSGGIVTLVAAVVMLLLFISETRSYFYSATETKLVVDTSRGERLRVNFDITFLSIPCTLLSVDTMDISGEQHQDIVRSEVIFLCDALLIYFLIFHIMILLFSFPCRGMTSKRYD

SEQ ID NO: 223386 - protein, 378 aa, Zea Mays
MESEMAEESPAAVSAAAARARPLEAVAEEGQEVAEQHEVAVGSTKTMERVAAAKKFIEDHYRAQMKNLQERKERRLILEQQLASSQVPREEQINLIKDLERKETEYMRLKRHRICVDDFDLLTIIGKGAYGQVQLCREKSTGNIYAMKKLKKTDMLVRGQVEHVRAERNLLAEVGSHCIVKLYYSFQDAEYLYLIMEYLPGGDMMTLLMREDTLTENVARFYIAETILAIESIHKHNYIHRDIKPDNLLLDKNGHMKLSDFGLCKPIDCSKLSTLNENEPMTDENLRESMDIDHSLSDTANGRRWRSPNEQLQHWQNNRRKLAFSTVGTPDYIAPEVLLKKGYGLECDWWSLGAIMYEMLVGYPPFYSDDPLVTCQKV

SEQ ID NO: 223387 - protein, 320 aa, Zea Mays
MCAIPFLVIDPRTDSRRIVFRLIDALELMRHGVKRFLVRKSGSWKGITKRFSVLYNGKWLKNMESTSPSAASSSSTQLSPRSGSAEKFCCLSREDVLRFLIGCLGALAPIPLTQISSLGAINPQYSYVEASAPAMEAIQKIPQDPCAVAVVETMPDGTRSILGDISTYKLWKCDYVSAAWALANLSAGQFVIGADENGSTPISVFPEPPISPSSPVEEISPGRSPRAKKFSSRSIGFLNNTQMSAWRTRSMYHRGRSTPLMCKTTSTLAAVMAQMLSHRATHVWVTDAESEEDGVVVGVVGYTEIFNAATRSTCPSPTAS

SEQ ID NO: 223388 - protein, 308 aa, Zea Mays
MAALLRTAAALAPPPSSPPSAREPRGRCLRLACSRRAPVRPLRAWPLPTPHVFCLAGGRLRRLGATEADEAAQTATQEDLETEVTGDSAADDSAGSTDETPSIIVTTLQSYREALINDDEAKAAEIESFLLSIEDEKNSLLNKITALDAELATQRERILRISADFDNFRKRTENEKLNMMENVQGELIESFLPVLDNFERAKVQIKVETEGEEKINNSYQSIYKQFIEILNSLGVEDVETVGKPFDPMEFRKGFKLGERLLRPAMVKVSAGPGPEKFGDDDPTAVEGSVAPQKVDEVEDDGFGAGDAE

SEQ ID NO: 223389 - protein, 83 aa, Zea Mays
MPRMGPGCSLRAAMLDLLIMKPIMTNAFICHLSVHWILCMFAAYCAKWQLKEALKHASCTQTSTGLVAKLAVTTFQYKLDHHL

SEQ ID NO: 223390 - protein, 357 aa, Zea Mays
MNKTQLKSMLWNLIQDIEPLDLSVIQKDVAPETVDAMKRTISGMLGLLPSDQFRVIVEALWNPFFKLLVSSIMTGYTLRNAEYRLSFERNLELSEEVAECQKSDVIEDNHHDINLGTPVTIFRLAEEDMPQDPEKTDDESSYENMGEELGDLTLQAEEYIIQMQSRLDAMKKELHDLRRKNSALQMQRFVGEEKNDLLDYLRSLTPEKVAELSESSCPGVQEAIHSVVHGLLATLSPKIHSKAPPPLDNTSGGVLNLGGEDDDCAELVENASLPFQPLISVPRDYLARLLFWYCEADLIGIVMFIYHVATEHRHFQLFRCMLLGHYIRGLEYRLELAQLLRISSDVGSFSGGDDHVV

SEQ ID NO: 223391 - protein, 366 aa, Zea Mays
MPTAYSLRAPPSTAQQRLRLPPPPLPLCPAGGGAARRRRVVGVASASASPFDELYARGRPAHGPSKKSMLWNLIQDIEPLDLSVIQKDVAPETEALWNPFFKLLVSSIMTGYTLRNAEYRLSFERNLELSEEVAECQKSDVIEDNHHDINLGTPVTIFRLAEEDMPQDPEKTDDESSYENMGEELGDLTLQAEEYIIQMQSRLDAMKKELHDLRRKNSALQMQRFVGEEKNDLLDYLRSLTPEKVAELSESSCPGVQEAIHSVVHGLLATLSPKIHSKAPPPLDNTSGGVLNLGGEDDDCAELVENASLPFQPLISVPRDYLARLLFWCMLLGHYIRGLEYRLELAQLLRISSDVGSFSGGDDHVV

SEQ ID NO: 223392 - protein, 127 aa, Zea Mays
MWHGCITTKELGTVMRSLGQNPTEAELQDMINEVDADGNGTIDFPEFLNLMARKMKDTDSEEELKEAFRVFDKDQNGFISAAELRHVMTNLGEKLTDEEVDEMIREADVDGDGQINYEEFVKVMMAK

SEQ ID NO: 223393 - protein, 338 aa, Zea Mays
MTRIFVQRGTAGSSSSSGRSGSQSAQQPAAAAREELPLQPQPQLPELLAIDDVTEHLNEGNENNSSRIKFLRTDDTISESSSYAEERAAREKPPKDDSNVINPTSLVEEPIVLHTPDQIEHGNSVPSGTNSSQMVGAASHPPPPPAPPPKSLLGNSGLWRMGPGSSNSVRIGSPRRPVAWPPVAARTSASGSRPSSPRSLVDGEGYNSADEQGPCYASSYDDSERERMFEHDLRRVKGLEIRKTAEDGNCLFRAVADQVYGDAEAYDMARQMCVDYMERERDHFSQFITESFTLYCKRKRRDKVYGNNVEIQAFAEMYNRPIHIYSYSTALYMFAVIT

SEQ ID NO: 223394 - protein, 285 aa, Zea Mays
MTRIFVQRGTAGSSSSSGRSGSQSAQQPAAAAREELPLQPQPQLPELLAIDDVTEHLNEGNENNSSRIKFLRTDDTISESSSYAEERAAREKPPKDDSNVINPTSLVEEPIVLHTPDQIEHGNSVPSGTNSSQMVGAASHPPPPPAPPPKSLLGNSGLWRMGPGSSNSVRIGSPRRPVAWPPVAARTSASGSRPSSPRSLVDGEGYNSADEQGPCYASSYDDSERERMFEHDLRRVKGLEIRKTAEDGNCLFRAVADQVYGDAEAYDMARQMCVDYMISACAAMN

SEQ ID NO: 223395 - protein, 50 aa, Zea Mays
MAYGLECPIIRARSVFTFGSIGCVQDIRKQQSSDLIFERNKKKASIHSCI

SEQ ID NO: 223396 - protein, 223 aa, Zea Mays
MPGRLLSVRIPSLAKLGAPSRCAKSMASDTGKKLIQIDVSSDTVCPWCFVGKKNLEKAMEQSRDKFDFEVRWHPFFLNPDAPKEGVRKSDFYKAKFGPVQYERVISRMAEIFRGLGLEYDMSGLTGDTMDSHRLIALAGHQGYDKQNALVGELFLNYFCEGKYIGDKQVLLDAARKVGIEGAEELFQDPTKGVDEINDKYQLSGGQPPNVFMRAFEMAAKDGA

SEQ ID NO: 223397 - protein, 129 aa, Zea Mays
MAPPLVPAAVPANAVGLRVQRGADRALFPLACGPLRGGGGGGRRRPTAQGERIEKCQYLESSGCVGMCVNMCKVPTQDFFTNEFGLPLTMNPNFEDMSCEMIYGQVPPLLEEDPASKQACYPSHCEFHV

SEQ ID NO: 223398 - protein, 515 aa, Zea Mays
MAIYSFLSVRKRPVVVVAAVTLFIVVSSLFLLFSPAPTALPFFSSSSSHLSSQASIAAVSSNAFPPETPTSVVSNWVSSNTSADRVSADASPPVVGTAIASDAVSNSTADPPRPDTTAAAGDAKADVSQPDHGMPPAATEASGSAGNGETAAGVSSERDEEGQGGGGAVEELPSWELCKVGKGVAAADYIPCLDNVKAVKALKSLRHMEHRERHCPTDPRPRCLVPLPERYRRPVPWPRSRDMIWYNNVPHPKLVEYKKDQNWVRKSGNYFVFPGGGTQFKNGVASYIKFIEQILPNIQWGIHTRTVLDVGCGVASFGGYLLDRNVITMSVAPKDEHEAQIQFALERGIPAFLAVIGTQKLPFPDNSFDVIHCARCRVHWYADGGKPLLELNRVLRPGGYYIWSATPVYRKNPRDIDDWNAVVALTKSICWRTVVRSRDINKIGVVIYQKPTSNSCSLERKNNEPPLCSESDGSRFPCFLKKKLILIQVIGRTLFQKYISTNLQLIGLVFAMLWT

SEQ ID NO: 223399 - protein, 457 aa, Zea Mays
MVMDILGPSLWDVWNNNSHSMSVEMVACIGIEAISILEKMHSKGYVHGDVKPENFLLGPPGTPEEKKLFLVDLGLATKWKDAGTGHHVEYDQRPDIFRGTVRYASVHAHLGRTGSRRDDLESLAYTLIFLLRGRLPWQGYQGENKGFLVCKKKMATSPESLCISLFDGIVGPNPDIRPINTDGAQKLVYQVGQKRGRLIVDENDDEQPKKKIRMGMPATQWISVYNARRPMKQRYHYNVADNRLVQHIQKGNEDGLFISSVASSSNLWALIMDAGTGFTSQVYELSSYFLHKEWIMEQWERNFYITALAGANNGSSLVIMSRGTQYAQQSYKVSDTFPFKWINKKWKEGFYVTAMATAGSRWAVVMSRNAGFTSQVVELDFLYPSEGIHMRWDNGYRITATAATWDQAAFILSIPRRKPTDETQETLRTSAFPSQHVKDKWSNNLYLASICYGRSVS

SEQ ID NO: 223400 - protein, 294 aa, Zea Mays
MSGKFTTLLVGTMVSHGYTTKESRESFTSWLWIFWDQAYGMFGIIIPTRGMSVEMVACIGIEAISILEKMHSKGYVHGDVKPENFLLGPPGTPEEKKLFLVDLGLATKWKDAGTGHHVEYDQRPDIFRGTVRYASVHAHLGRTGSRRDDLESLAYTLIFLLRGRLPWQGYQGENKGFLVCKKKMATSPESLCGICPQPFRNFVEYVVNLKFDEEPNYARCISLFDGIVGPNPDIRPINTDGAQKLVYQVGQKRGRLIVDENDDEQPKKKIRMGMPATQWISVYNARRPMKQRSA

SEQ ID NO: 223401 - protein, 357 aa, Zea Mays
MVHIGNSPTYRLERKLGKGGFGQVYVGRRISAPRLSDRNPGSNALEVALKFEHQSSKGCNFGAPYEWQVYNTLSGNHGVPRVHYKGKQGEFYIMVMDILGPSLWDVWNNNSHSMSVEMVACIGIEAISILEKMHSKGYVHGDVKPENFLLGPPGTPEEKKLFLVDLGLATKWKDAGTGHHVEYDQRPDIFRGTVRYASVHAHLGRTGSRRDDLESLAYTLIFLLRGRLPWQGYQGENKGFLVCKKKMATSPESLCGICPQPFRNFVEYVVNLKFDEEPNYARCISLFDGIVGPNPDIRPINTDGAQKLVYQVGQKRGRLIVDENDDEQPKKKIRMGMPATQWISVYNARRPMKQRSA

SEQ ID NO: 223402 - protein, 168 aa, Zea Mays
MAERKIGVAMDFSPSSKKALRWAIDNLVRRGDTLVLLHVRHHGREEGKNVLWSRTGSRKSLLDCLALSLVPLEELMEPPVRQRYDVPYDAEVFDMLNAAARQKEMRVVVKMYWGDPREKVCDAVEELQIESLVMGSRGLGQIQRILLGSVTNYVLSNASCPVTVVKSK

SEQ ID NO: 223403 - protein, 155 aa, Zea Mays
MRRHSSDSVREHNERAHAPDVSLTVAAHTMTFTWTPSQPRPDPSWPSNQSGQRENMYEAMSPRRALLAILLAVALASASSAPQPPPCSRSCAALNCDSLGIRYGKYCGVGWSGCDGEEPCDDLDACCRDHDRCVERKGYVSFIPGLRLLCSLIRV

SEQ ID NO: 223404 - protein, 403 aa, Zea Mays
MRENITTPNGSAVTVDPNASTHADRLTKIKGILSGETSIQLTLQFLYSHNRSDLQILKTIKQAVEMRNSVCHSATICSNAIMHAGTTVDTFLRENLEWLGRATNWAKFSATAGLGVIHRGHLQQGRALMAPYLPQNGAGGSGSPYSEGGALYALGLIHANHGEGIKEFLRESLRNTTSEVVQHGACLGLGLAALGTSDEEICEDIKNILYTDSAVAGEAAGIGLGLLMVGTASEKATEMLAYAHDTQHEKIIRGLSLGIALTVYGREEEADTLIEQMTRDQDPILRYGGMYALALAYRGTANNKAIHQLLHFAVSDVSDDVRRTAVLALGFVLYNEPEQTPRIVSLLSESYNPHVRYGAALAVGISCAGSGLSEAISLLEPLTSDVVDFVRQGALIAMAMRER

SEQ ID NO: 223405 - protein, 404 aa, Zea Mays
MEAPPGPGPMELDAPPPAAAAAAIPPAGSDKDGEGGDAVTGHIISTTIGGKNGEPKRTISYMAERVVGTGSFGIVFQAKCLETGETFAIKKVLQDRRYKNRELQLMRAMEHPNVICLKHCFFSTTSRDELFLNLVMEFVPETLYRVLKHYSNANQRMPLIYVKLYMYQLFRGLAYIHNVPGVCHRDVKPQNVLVDPLTHQVKLCDFGSAKVLIPGEPNISYICSRYYRAPELIFGATEYTSSIDIWSAGCVLAELLLGQPLFPGESAVDQLVEIIKVLGTPTREEIRCMNPNYTEFRFPQIKAHPWHKIFHKRMPPEAIDLASRLLQYSPSLRCSALDACAHPFFDELRTPNARLPNGRPFPPLFNFKHELANASPDLVSRRCDGRSFRSWFPLLESGRGSSST

SEQ ID NO: 223406 - protein, 345 aa, Zea Mays
MRGAPPRRRRIGRAPLVRCSRSTGCPNPRPASSSSSDINLATTEHLMKFIAKDPDGFVPISVVASFRKIREIVYDRSLLVAALRTSSELVVSEDGKHVKRLQPFNAEEVQSRIVVAENLPEDQKHQTLMKIFSAVGNVKSIRTCYPQDISPAAANRTSRIEMIFANKLHSFVEYSTVEDAEKAVAEFGGGGNWREGIRVRSLLGCLKHGLGQGRKGGDEEYAADEDGPDTTDHPRDFGTDVTAQISEAHFDHQAEDGTHDKGGMRQQGRGRGRGGRGRGRGQHYGHNSRDGHHPIGTPPSEHPAVPKPPPGPRMPDGTKGFTMGRGKPLSITIDAAANPTTTDAA

SEQ ID NO: 223407 - protein, 451 aa, Zea Mays
MHSTNEMILEKRNLSCEIQIPVACSAVDALKLLDHIIEAARVVYMDELELYFAGDDVGPFSARNELESLNLLLKTMKKLLLTSNTAAKEVLQILHDEIVVKLKSVGKSDNAWMVVQTQNHDAEDSLLKWGEHLGIKSRLQIAYFQGAGRGMIASESIGVGDIALEIPESLIISDELLCQSEVFLSLKDFNNITSETMLLLWSMRERYNLGSKFKPYFDTLPANFNTGLSFGIDALAALEGTLLFDEIIQARQHLRQQYDELFPLLCTNFPEIFRKDVCTWDDFLWACELWYSNSMMIVLSSGKLSTCLVPVAGLLNHSVSPHILNYGRVDEATKSLKFPLSRPCDAGEQCFLSYGKHPGSHLLTFYGFLPRGDNPYDVIPLDLDTSADDEDITAQSSATTSQTTHMVRGTWLSTSGGFPTYGLPQPLLTYLRAALGCEVDEPAAEADVRVL

SEQ ID NO: 223408 - protein, 255 aa, Zea Mays
MKKLLLTSNTAAKEVLQILHDEIVVKLKSVGKSDNAWMVVQTQNHDAEDSLLKWGEHLGIKSRLQIAYFQGAGRGMIASESIGVGDIALEIPESLIISDELLCQSEVFLSLKDFNNITSETMLLLWSMRERYNLGSKFKPYFDTLPANFNTGLSFGIDALAALEGTLLFDEIIQARQHLRQQYDELFPLLCTNFPEIFRKDVCTWDDFLWACELWYSNSMMIVLSSGKLSTCLVPVAGLLNHSVCSSAPLEVFFY

SEQ ID NO: 223409 - protein, 136 aa, Zea Mays
MDGQQNQREDAETAAGVPQGVRPPSRPVPAGRDELRAERGHQAPDGVHRVAVRGGLQRLVGAALRHHRDGVPGEGEDDPRRGPQDQDPHLDQGDGGTDRGHQGALRRRHEQGQEPGRVRGRQGRHRRRQVLADLVN

SEQ ID NO: 223410 - protein, 184 aa, Zea Mays
MLEEKERKERERRNEIIAEAEEFKRSFLDKRRLNCETNRTQNRDREKLSLANQERFHKEADQQYYWKAIAELVPREIPGLEKRGKRKEQERKPGIVVVQGPKPGKATDLSRMRQVLLKLKDKPPSHMVPPPPQAKEEKEKDGDKDAKKDGNKQEEKKDGKQQAAGPAEKKTDGPEMASAAGSPP

SEQ ID NO: 223411 - protein, 180 aa, Zea Mays
MFFEKKGMELIGKSASTLRKQYEPKEIPPDITSWIGYKFTFVVRVLSKKSVKTIDPSFEVLMIKEKYQKEPIISFISSSGVVPAESSSSTMAEYKELPLLVPITSKDIEKKERSTSQPEHTEETQDMDIEPSGIWEESQISNKRSFGDPNYDKQETTDDKDDLPQFKKIRSTHSQGKSKK

SEQ ID NO: 223412 - protein, 207 aa, Zea Mays
MVKLNKRTIVLEDKDQIQGFPKYTFSLTPLDKLDQYKNKTDRFIDVIAKISGVSNVAKVPTTSGDQQMRRVVLLEDLKGNMIELSLSGKRALEFDGDQVLDVGQQHHVIAIFVGTLVKLYKGEYTFLSGTSACRWYINENDIAEIKAFQKSLPSEPVPIKKTYLQNDDATHKFEEKSLEQLKHVDPFLDMVKFYFTKTIMLCKMLHE

SEQ ID NO: 223413 - protein, 582 aa, Zea Mays
MPTDSAPPNAASLSEDDRLLVAHCATLSFPSSSPTAAAATTHSASSFQVHHASHPYPCAAFVFPPSWSAADWMGGDGGHPPFGDAEVDPALFPSLRAVGSGIPARTNAAFLGNFRRLLDGSTLQSEVSRAVAEEKRVVFTGHSSGGSIATLAAIWFLEKCTRRGSVNQAHPFCVTFGAPLIGDNIFNHAVKREGWSQCILHFLLPLDIVPRIPLTPLASFREETQAVLDRLSSQTPNNSPAGRSLVIPEYYETLLRSTLSIASYEACSFMGCTSSILGTLTSFIDLSPYRPCGTYHFLTSSEQLIVLANSDAVLQLLFYCLQLDPQQQLLDAAARSLSAHWQYEPIKYCIQDIVCVDYLGTISSAVPGRQAGRVALGSIELSREAILHLSAAAQWEKQRQRNQTKIDESCQKIQEALRSLNEYKRSRELDGVSYYDSFKLQREEWVSLGTLFRRLVEPLDIANYYRHSKNEDTGSYLSKGRPRRYKYTQKWHEQLQRVPVGSSLESCFWAVVEELQAEMADGRAFEDLRERLVKLENDAHGWYNSGSLGKDVFLGSSSFVAWWRTLPEQHRAASSIAKLVSL

SEQ ID NO: 223414 - protein, 154 aa, Zea Mays
MLRRRELPDGFEAREEWVSLGTLFRRLVEPLDIANYYRHSKNEDTGSYLSKGRPRRYKYTQKWHEQLQRVPVGSSLESCFWAVVEELQAEMADGRAFEDLRERLVKLENDAHGWYNSGSLGKDVFLGSSSFVAWWRTLPEQHRAASSIAKLVSL

SEQ ID NO: 223415 - protein, 108 aa, Zea Mays
MFRGPMMVCSLLCMTGRDLQKMSGNSTAKVGHWTTDEIKALRTRFQLSKRVQNEEVPMAEEALAMISQSFRQVVLDVKVGPPSFEKGLAEDILSLENKLQELSCLGKK

SEQ ID NO: 223416 - protein, 107 aa, Zea Mays
MHFLTNYLHLTQYLGLHHLVVDGFPVFNRRAESQEQNSGVGDWHLPPLSHGYRATHTTHVGCLPPPRPLLHQGGGGGGSVARGRGAAAAVALLQPDCGNLLCRGHAN

SEQ ID NO: 223417 - protein, 83 aa, Zea Mays
MATGRPIRLMLDASLLLDPSSTREAAAVALWPGVEELLRRLHYSNLTVAICYAEGMPTNENGIMLTKMNEKSVISNGKAVSYC

SEQ ID NO: 223418 - protein, 118 aa, Zea Mays
MQQHPVPQGGPGAEGAPLRLPELRPPGGRGQQLRVPERGAPQRRGVHPGAPGRGRRPHAAPHQVRALLLLRPRRGRLLPGHCERGGRDDALLRLLQPELRQPLERIMDGSSGATARTT

SEQ ID NO: 223419 - protein, 194 aa, Zea Mays
MVWKQMWGRERMEQKTIDVVDDRVLGKAPRRDLSPAERPELRRGDGEVHPVAPGTRAGGQHGEVPEEGLSLERAPGEGRVHRCPGRAITDADVLGTLLVQNPSLRVLSMGAPTLAPPPKTPRVLSPARPSLHSSNTPLFSCWSRIACAREGTGVRTRQDAETQCTITQGRAHDTAGFVRRGVLGDVNPCPRLAW

SEQ ID NO: 223420 - protein, 98 aa, Zea Mays
MYRVVSKEWDHEDREDDHGKAQGRRRRASRPSRHLHLLVLKHKRIGNQQLVSLVILKNHLLPNVVQRLLNSQTHETQKYRKTKYSHSSILFTGYNKWW

SEQ ID NO: 223421 - protein, 98 aa, Zea Mays; identical to SEQ ID NO: 223420

SEQ ID NO: 223422 - protein, 132 aa, Zea Mays
MGSKEVLTVLSQESTAGLESKRCMSRTDLKLVGSFADMILIPDTRVPDKRRTSALFILTNPGQLNFYDGGSLFSVQNSKEGNPLPEAQKFPVAIPTLDPNITVTGLYSLTESEFPNISVKVHYAQIWIFYSI

SEQ ID NO: 223423 - protein, 98 aa, Zea Mays
MLGMRLPWPLERIGIREDKFVMIYMAFRLNPTSWCPWMRAEQCLIGCTENDITFRQFALLSSGSGVLLSRSVRLGHKMIPNGPRCWIFGQRKVDSDLC

SEQ ID NO: 223424 - protein, 1052 aa, Zea Mays
MAPKSRRGKAKGEKKKKDEKVLPVAIDITVNLPDQSHVILKGISTDRIIDVRRLLCVNTATCAITNYSLTHEMRDGALKDAADIATLKPCTLTLVEEEYSEESAVEHVRRLLDIVACTTCFGPAPPPPPPPSPKDADAAKETSSSSSTSKAVASASSGGRRTASPPPASPSSAAAKESSAAKEAAAKESAAAVELEAEMSGACPRLGAFYEFFSLANLTPPLQFVRRVLQPRQEEQPSDDHLFFLEAKLCSGKFLVVEARRKGFFSLGKQRVLCHNLVDLLRHLSRAFDNAYEDLMKAFLERNKFGNFPYGFRANTWLVPPIAAQSPSTFPPLPAEDETWGGSGGGWGRDGKSDMVPWADEFLYLTSMPCKTAEERELRDRRAFLLHSLFVDVAIFRAIAAVRHVMEGTELSASTNIDEVLYSETVGHFSITVTRDSSDASCKMDTKIDGNRATGMDSKDLAERNLLKGITADENTAAHDVDSLGIINLRYCGYVAVAKVDNIDKTKVNASIKPMNIADQPEGGAHALNINSLRMLLNEATSTGEKKISNLSQNHRQEELIAAQTFVEKLLKESLQKLEEEENVKHSFMRWELGACWVQHLQDQKNSDKDKKQGGEKDKKKTLDKSKEPKIEGLGKPLKALKNAKNVDSADLGSSAGPKSSAESQKDKPSDVKLPQGESSASENENLLKDLLPESAFTRLKESETGLHQKSPPELIEMALKYYDEVALPKLVADFGSLELSPVDGRTLTDFMHTRGLQMRSLGRVVKLSEKLSHVQSLCVHEMIVRAFKHIVRSVIAAISDIRQLALTIAAALNLLLGVPESDVSGSSPNVHPLVWRWLVIFLKKRYEFELTEKHYHDVRKYAVLRGLCHKVGIDFAPRDFIMDCSFPFHKQDIISLVPVHKQVACSSADGRQLLESSKTALDKGKLEDAVNYGTKALSKLITVCGPYHRMTAGAYSLLAVVLYHTGDFNQATIYQQKALDINERELGLDHPDTMKSYGDLAVFYYRLQHTELALNCYIYQCSYDGRRIGQCACSSKILAQSFKMQPEITRA

SEQ ID NO: 223425 - protein, 1123 aa, Zea Mays
MAPKSRRGKAKGEKKKKDEKVLPVAIDITVNLPDQSHVILKGISTDRIIDVRRLLCVNTATCAITNYSLTHEMRDGALKDAADIATLKPCTLTLVEEEYSEESAVEHVRRLLDIVACTTCFGPAPPPPPPPSPKDADAAKETSSSSSTSKAVASASSGGRRTASPPPASPSSAAAKESSAAKEAAAKESAAAVELEAEMSGACPRLGAFYEFFSLANLTPPLQFVRRVLQPRQEEQPSDDHLFFLEAKLCSGKFLVVEARRKGFFSLGKQRVLCHNLVDLLRHLSRAFDNAYEDLMKAFLERNKFGNFPYGFRANTWLVPPIAAQSPSTFPPLPAEDETWGGSGGGWGRDGKSDMVPWADEFLYLTSMPCKTAEERELRDRRAFLLHSLFVDVAIFRAIAAVRHVMEGTELSASTNIDEVLYSETVGHFSITVTRDSSDASCKMDTKIDGNRATGMDSKDLAERNLLKGITADENTAAHDVDSLGIINLRYCGYVAVAKVDNIDKTKVNASIKPMNIADQPEGGAHALNINSLRMLLNEATSTGEKKISNLSQNHRQEELIAAQTFVEKLLKESLQKLEEEENVKHSFMRWELGACWVQHLQDQKNSDKDKKQGGEKDKKKTLDKSKEPKIEGLGKPLKALKNAKNVDSADLGSSAGPKSSAESQKDKPSDVKLPQGESSASENENLLKDLLPESAFTRLKESETGLHQKSPPELIEMALKYYDEVALPKLVADFGSLELSPVDGRTLTDFMHTRGLQMRSLGRVVKLSEKLSHVQSLCVHEMIVRAFKHIVRSVIAAISDIRQLALTIAAALNLLLGVPESDVSGSSPNVHPLVWRWLVIFLKKRYEFELTEKHYHDVRKYAVLRGLCHKVGIDFAPRDFIMDCSFPFHKQDIISLVPVHKQVACSSADGRQLLESSKTALDKGKLEDAVNYGTKALSKLITVCGPYHRMTAGAYSLLAVVLYHTGDFNQATIYQQKALDINERELGLDHPDTMKSYGDLAVFYYRLQHTELALKYVKRALYLLHLTCGPSHPNTAATYINVAMMEEGLGNVHVALRYLHKALKCNQKLLGPDHIQTAASYHAIAIALSLMEAYSLSVQHEQTTLQILRAKLGPDDLRTQCI

SEQ ID NO: 223426 - protein, 1333 aa, Zea Mays
MAPKSRRGKAKGEKKKKDEKVLPVAIDITVNLPDQSHVILKGISTDRIIDVRRLLCVNTATCAITNYSLTHEMRDGALKDAADIATLKPCTLTLVEEEYSEESAVEHVRRLLDIVACTTCFGPAPPPPPPPSPKDADAAKETSSSSSTSKAVASASSGGRRTASPPPASPSSAAAKESSAAKEAAAKESAAAVELEAEMSGACPRLGAFYEFFSLANLTPPLQFVRRVLQPRQEEQPSDDHLFFLEAKLCSGKFLVVEARRKGFFSLGKQRVLCHNLVDLLRHLSRAFDNAYEDLMKAFLERNKFGNFPYGFRANTWLVPPIAAQSPSTFPPLPAEDETWGGSGGGWGRDGKSDMVPWADEFLYLTSMPCKTAEERELRDRRAFLLHSLFVDVAIFRAIAAVRHVMEGTELSASTNIDEVLYSETVGHFSITVTRDSSDASCKMDTKIDGNRATGMDSKDLAERNLLKGITADENTAAHDVDSLGIINLRYCGYVAVAKVDNIDKTKVNASIKPMNIADQPEGGAHALNINSLRMLLNEATSTGEKKISNLSQNHRQEELIAAQTFVEKLLKESLQKLEEEENVKHSFMRWELGACWVQHLQDQKNSDKDKKQGGEKDKKKTLDKSKEPKIEGLGKPLKALKNAKNVDSADLGSSAGPKSSAESQKDKPSDVKLPQGESSASENENLLKDLLPESAFTRLKESETGLHQKSPPELIEMALKYYDEVALPKLVADFGSLELSPVDGRTLTDFMHTRGLQMRSLGRVVKLSEKLSHVQSLCVHEMIVRAFKHIVRSVIAAISDIRQLALTIAAALNLLLGVPESDVSGSSPNVHPLVWRWLVIFLKKRYEFELTEKHYHDVRKYAVLRGLCHKVGIDFAPRDFIMDCSFPFHKQDIISLVPVHKQVACSSADGRQLLESSKTALDKGKLEDAVNYGTKALSKLITVCGPYHRMTAGAYSLLAVVLYHTGDFNQATIYQQKALDINERELGLDHPDTMKSYGDLAVFYYRLQHTELALKYVKRALYLLHLTCGPSHPNTAATYINVAMMEEGLGNVHVALRYLHKALKCNQKLLGPDHIQTAASYHAIAIALSLMEAYSLSVQHEQTTLQILRAKLGPDDLRTQDAAAWLEYFESKVIEQQEAARNGTRKPDASIASKGHLSVSDLLDYINPDQESKGRDSEFGKRRYSSIKVLSHSNESSNGASPEISPRDSNPIIDEEQQVKEPSKDDSTKSISEAEVKQTPESFEHPAPSEPQLEIVEANINAPKEVIEVENSEPEDGWQPVQRPKSAGGSGKQMKHYRPTTRKVYDPDSHDPTYTSQYKVWSQDLQGCDLSG

SEQ ID NO: 223427 - protein, 192 aa, Zea Mays
MRDFSFSISKAKLSEYSEKIEALASRLAASVPENEKPIIESKDEISYEEAKPESPISLSSGLRRRSTAHAVVGTSHQENKEDIGAPIKLDAEAQAHIEKHRKLQEDLTDEMVELARQLKESSLMMNQSVQETEKILDSTERAVEHSLASTGHATSRAAEVYSLASKTTCFQWLLMFVMTCMFVMVVLLIRIT

SEQ ID NO: 223428 - protein, 521 aa, Zea Mays
MKPSLSKKKGKKKKKSSLPAAAPAPPPAEGAADTEACPPLPGTITLTAATAAAAVVSETESSSSGEASTCPSACFTASSSGTASSHSFSALSSSASTASSSAAGEERRDLTWLLDAFASATFDQIDSAYREAGGDPFVAAGILSSTQDTHPPQPPQPAPQPPPPPDLSPRSGSGGRKAGRRPKRVAVAATGMVADVIGKEYTRPAANSVVSMPNAWKGRDGESDGSGSGGRKDSVEEAEQFLCSMLGDNSELGMGVVRDVLGQYGYDVEKALDALLDISGVSSVENMETNHQSARRNDTCHLDMFSGNGLSVENLTAGNRRSLRQLTDEISNTGLQSELGHEFLWGEPQISYAEAVKEAPRSSTLPSRSTVMKAGPQQVLDSLFKIPETRTYEPSSMDWKKVVKKLQTINYTAASNNHERPKDGGGYRELRGVAARHYDKMKEYYQKAAFAYSKGDRSYASYLAEEGKHYRELGRIEDEKASRNIFEASCLTEGNYRLWFRRYREGKNKALGYRACGEGTY

SEQ ID NO: 223429 - protein, 150 aa, Zea Mays
MRLRCEIFRSGKAMPDKVFDVLNEVVVDRGSNPYLSKIECYEHNHLITKVHPNVPCMLFTPICPHSLSFRPVILPDSARLELKIPDEARSNAWVSFDGKRRQQLSRGDSVRISMSQHPLPTVNKSDQTGDWFRSLIRCLNWNERLDQKAL

SEQ ID NO: 223430 - protein, 85 aa, Zea Mays
MDSYLGQIVDREGWAEWPGAEPGRADTVYFGEYGNDGPGADTGGRVGWAGVRQMEYDEAAQFAVENFIYGDEWLGATSFPYDDDV

SEQ ID NO: 223431 - protein, 151 aa, Zea Mays
MSVQEYLGKHLLSRKSEEALNTAVRAKAPNPALFIVGHMRREAPTVITRVRARQILDGRSAPAVEVELHTNKAVHRASTASVGALEGAAADAAGASERRKFLARGVAYAVRVINDKVSEALVGMDPQQQTQIDQAIMHLTGRATRFHSTSI

SEQ ID NO: 223432 - protein, 473 aa, Zea Mays
MGAQDATALSVQQGRARTAAENLVHVPAAQVSLPGALALGNFEQELGEDALLPPVLSQEQQDAVKRYNHLMGVHVAYFRVCIDPTVASSRRLLQQAIQDLKNHCAGDALVAHYYVNNRNNNDPADQPDTTTAIRQQAIARSADASSRQHHGACRGFNDHHGGGVVPSVHREEEEALAAPVVAMSMSPALRLVDIKGKVAAFCADRNGSRFVQQALEAAAPEEIAMVYKEIMPCVRTLAVDMFGNHAIQKILEHGPRSCKRGVISNLIGHLLPLSLDKYSCRVVQKSFDVGEHDQKVAMAKELGSKVLRCVRDQFANHVVQKCVECLPSKDIHSILRSFYGRAKALSTHPFGCHVIQKVLARCKDHEIYHALTAEIMENVNKLAADRFGNYVVQQLVEHGGGAMRSAMVRRFAGRVVGMSYHKFASNVVEKCLAFGSQEDRRLIADEIVAGGGGGQQQHLDHLVCIVCECVLCT

SEQ ID NO: 223433 - protein, 241 aa, Zea Mays
MGNSSLPDSASGFSLSLYNYHYLLLPHAPCSNLTKVGSADCFLCFFGVSRSSLDAGKIKIGINGFGRIGRLVARVALQSEDVELVAVNDPFITTDYMTYMFKYDTVHGHWKHSDITLKDSKTLLFGDKPVTVFGIRNPEEIPWGEAGAEYVVESTGVFTDKDKAAAHLKGGAKKVVISAPSKDAPMFVVGVNEDKYTSDVNIVSNASCTTNCLAPLAKVIHDNFGIVEGLMTTVHAITENC

SEQ ID NO: 223434 - protein, 194 aa, Zea Mays
MGLLSNRIGRESLKAGDHIYSWRAAWVYAHHGIYVGDDKVIHFTRGRGQEVGTGTVVDIILVSSTPKRSNTPCPVCTDETSDSSTETNGVVSSCLSCFLAGGALYRFEYAVNPALFLAKARGGTCTLAPSDPDDTVARRARYLLSNGFRCYNLFKSNCEDFAIYCKTGLLVAEQGVVGQSGQAISIIAVRSRES

SEQ ID NO: 223435 - protein, 113 aa, Zea Mays
MKKEAPSPLSQSFRSISDGSGRAAATPSYFLCPISQVVMRDPHMAADGFTYEADALRYWLDSGHATSPVTNRSLSNRDTIPNHALRSAIQEYLRQNELQEPFSQWQEDFGVVN

SEQ ID NO: 223436 - protein, 153 aa, Zea Mays
MNEIIDKYNTHSKNLGKTEQPSLDLNLEHSKYANLNEQLAEASLRLRQMRGEELEGLNVEELQQLEKNLESGLHRVLQTKSTQLAEENMQLRNQVSQIPPAGKQAVADTENVIAEEGQSSESVMTALHSGSSQDNDDGSDVSLKLGLPCVAWK

SEQ ID NO: 223437 - protein, 184 aa, Zea Mays
MDDDLREMRLSLLTEIERRKQAEETLEIWQKEWKKLSHHLSHVALSLPSPSIAEDTDDSSVDPGAELCQQITVSQLVAAAISQDFARAEVASEMEAVIATKNFEIARLSDRVQYYEAANREMSQRNQEAIETSRQQRKERKKRQKWFWGSVGLAVTLGATAIAWSYLPSSQPRASADSNSTVSD

SEQ ID NO: 223438 - protein, 262 aa, Zea Mays
MVATGVLLETVQMMGMDTYAKGKSKRVGGGDGGDGGAAGDSADDGDAKGSGDDADADKDSKRMRTKFEELCNEDKILVFFKKLLNEWNQELDEMTELEKRTAKGKSMVATFKQCARYLSPLFEFCRKKVLPDDIRRALLVIVECCMKRDYLAAMDQYIKLAIGNAPWPIGVTMVGIHERSAREKIYTNSVAHIMNDETTRKYLQSIKRLMTLSQRRYPALPSKSVEFNSLANGSDLQALLSEENGSGKASEERLRLMPALKE

SEQ ID NO: 223439 - protein, 282 aa, Zea Mays
MTEGQTNDFLRDMTEGQTNDFLRDMIEMRKRQKSGRDTYAKGKSKRVGGGDGGDGGAAGDSADDGDAKGSGDDADADKDSKRMRTKFEELCNEDKILVFFKKLLNEWNQELDEMTELEKRTAKGKSMVATFKQCARYLSPLFEFCRKKVLPDDIRRALLVIVECCMKRDYLAAMDQYIKLAIGNAPWPIGVTMVGIHERSAREKIYTNSVAHIMNDETTRKYLQSIKRLMTLSQRRYPALPSKSVEFNSLANGSDLQALLSEENGSGKASEERLRLMPALKE

SEQ ID NO: 223440 - protein, 193 aa, Zea Mays
MHASKEYMGEVGANFEVYRNDEITVEEIKKISPRGILISPGPGTPQDSGISLQTVTELGPSIPLFGVCMGLQCIGEAFGGKVVRSPYGVVHGKGSLVHYDEKLDGTLFYDIPNPFQAGRYHSLVIEKDSFPHDTLEIVAWTDDGLIMAARHRIYKHIQGVQFHPESIITTEGRLMVNNFIKIIEGYEASNCSP

SEQ ID NO: 223441 - protein, 198 aa, Zea Mays
MIASHIIYASTWERLELILRFIAMMRSLWKKLRSWISPRGILISPGPGTPQDSGISLQTVTELGPSIPLFGVCMGLQCIGEAFGGKVVRSPYGVVHGKGSLVHYDEKLDGTLFYDIPNPFQAGRYHSLVIEKDSFPHDTLEIVAWTDDGLIMAARHRIYKHIQGVQFHPESIITTEGRLMVNNFIKIIEGYEASNCSP

SEQ ID NO: 223442 - protein, 273 aa, Zea Mays
MFAGHSVLVLETPRHTAGHGCYYFAGCGAISTGALSRSTTVQRQKFVAKSAISAVESGDTFVGVKQNTRPIIVIDNYDSFTYNLCQYMGEVGANFEVYRNDEITVEEIKKISPRGILISPGPGTPQDSGISLQTVTELGPSIPLFGVCMGLQCIGEAFGGKVVRSPYGVVHGKGSLVHYDEKLDGTLFYDIPNPFQAGRYHSLVIEKDSFPHDTLEIVAWTDDGLIMAARHRIYKHIQGVQFHPESIITTEGRLMVNNFIKIIEGYEASNCSP

SEQ ID NO: 223443 - protein, 764 aa, Zea Mays
MEAKPSSAAHGDAPAVEAPRRRGSGGKRKSAGSSFTPSKRQAKERNAAFHVPQHLLHSGPLTRAARHSPHKLAGTPPESGPASSSAATGDGVSGGQAEVDAIRPETEETPAPELPLVDEMLEAVRSRGPGVHVVPTFAGWFSWKEIHSVEKQILPSFFNGKSVKRTPEVYLAIRNSIMMKFHANPQLQLESKDLAELSIGESDARQEVLEFLDHWGLINFHPFPPAGHEESKPEESQDNSNDEKASLIEQLFKFESVQSYMTPLLNKEDVGAPPPLPSLFPEPVLIENMVAAAEPSVEYHCNSCSVDCSRKRYHCRTQADFDLCCVCYNEGKFDPGMAKTDFILMDSAEVSGASGTSWTDEETLLLLEGLEIFGGKWAEIAEHVATKTKAQCMLHFLQMQIEDRFHDGDDINQNIPVSTEQATTEKAIVETPEKMEVGDKVEGRDNADEKASEKTEGSCEETKTEDANVVNKDTQKSGGKDSGASPSTEEAKQSSDDQPIVKENSVDVDTSGEKLSNVAIDILKCAFEAAGHSPEYEGSFADAGNPVIALAAYLAGLVEDGNATTSFRSSLKSISEVPPALQLASRHCFILEDPPNELKDICVSVSKKNTDADQTKDEDMISNSIANEKKEINEKEDKSLSVEKTNNSSMSQNDHQESNIKSVSRDDCSSVEPKGNNAKESSDSTGIGDMSAIGTTKDVVAGNSKQVNDSPSVEVEAPDDSSLKSKDELNDTEDAVATPATVQEQKHSQTLENGDKAAHPRRLP

SEQ ID NO: 223444 - protein, 567 aa, Zea Mays
MAKTDFILMDSAEVSGASGTSWTDEETLLLLEGLEIFGGKWAEIAEHVATKTKAQCMLHFLQMQIEDRFHDGDDINQNIPVSTEQATTEKAIVETPEKMEVGDKVEGRDNADEKASEKTEGSCEETKTEDANVVNKDTQKSGGKDSGASPSTEEAKQSSDDQPIVKENSVDVDTSGEKLSNVAIDILKCAFEAAGHSPEYEGSFADAGNPVIALAAYLAGLVEDGNATTSFRSSLKSISEVPPALQLASRHCFILEDPPNELKDICVSVSKKNTDADQTKDEDMISNSIANEKKEINEKEDKSLSVEKTNNSSMSQNDHQESNIKSVSRDDCSSVEPKGNNAKESSDSTGIGDMSAIGTTKDVVAGNSKQVNDSPSVEVEAPDDSSLKSKDELNDTEDAVATPATVQEQKHSQTLENGDKAEPNNIERVVVHEKGSIVTANQNDSITRLKRAAATAVSAAAVKAKFLGDQEEYHIRRLTALMIEKLFQKLEVKMSLFSEIEQVVLRTREYTEKTRKKLLMERNAIIAARMGALPSRPNQPGVAGNRLPPGYGNPPLRSPNAMPRPSS

SEQ ID NO: 223445 - protein, 902 aa, Zea Mays
MEAKPSSAAHGDAPAVEAPRRRGSGGKRKSAGSSFTPSKRQAKERNAAFHVPQHLLHSGPLTRAARHSPHKLAGTPPESGPASSSAATGDGVSGGQAEVDAIRPETEETPAPELPLVDEMLEAVRSRGPGVHVVPTFAGWFSWKEIHSVEKQILPSFFNGKSVKRTPEVYLAIRNSIMMKFHANPQLQLESKDLAELSIGESDARQEVLEFLDHWGLINFHPFPPAGHEESKPEESQDNSNDEKASLIEQLFKFESVQSYMTPLLNKEDVGAPPPLPSLFPEPVLIENMVAAAEPSVEYHCNSCSVDCSRKRYHCRTQADFDLCCVCYNEGKFDPGMAKTDFILMDSAEVSGASGTSWTDEETLLLLEGLEIFGGKWAEIAEHVATKTKAQCMLHFLQMQIEDRFHDGDDINQNIPVSTEQATTEKAIVETPEKMEVGDKVEGRDNADEKASEKTEGSCEETKTEDANVVNKDTQKSGGKDSGASPSTEEAKQSSDDQPIVKENSVDVDTSGEKLSNVAIDILKCAFEAAGHSPEYEGSFADAGNPVIALAAYLAGLVEDGNATTSFRSSLKSISEVPPALQLASRHCFILEDPPNELKDICVSVSKKNTDADQTKDEDMISNSIANEKKEINEKEDKSLSVEKTNNSSMSQNDHQESNIKSVSRDDCSSVEPKGNNAKESSDSTGIGDMSAIGTTKDVVAGNSKQVNDSPSVEVEAPDDSSLKSKDELNDTEDAVATPATVQEQKHSQTLENGDKEPNNIERVVVHEKGSIVTANQNDSITRLKRAAATAVSAAAVKAKFLGDQEEYHIRRLTALMIEKLFQKLEVKMSLFSEIEQVVLRTREYTEKTRKKLLMERNAIIAARMGALPSRPNQPGVAGNRLPPGYGNPPLRSPNAMPRPSS

SEQ ID NO: 223446 - protein, 552 aa, Zea Mays
MEAKPSSAAHGDAPAVEAPRRRGSGGKRKSAGSSFTPSKRQAKERNAAFHVPQHLLHSGPLTRAARHSPHKLAGTPPESGPASSSAATGDGVSGGQAEVDAIRPETEETPAPELPLVDEMLEAVRSRGPGVHVVPTFAGWFSWKEIHSVEKQILPSFFNGKSVKRTPEVYLAIRNSIMMKFHANPQLQLESKDLAELSIGESDARQEVLEFLDHWGLINFHPFPPAGHEESKPEESQDNSNDEKASLIEQLFKFESVQSYMTPLLNKEDVGAPPPLPSLFPEPVLIENMVAAAEPSVEYHCNSCSVDCSRKRYHCRTQADFDLCCVCYNEGKFDPGMAKTDFILMDSAEVSGASGTSWTDEETLLLLEGLEIFGGKWAEIAEHVATKTKAQCMLHFLQMQIEDRFHDGDDINQNIPVSTEQATTEKAIVETPEKMEVGDKVEGRDNADEKASEKTEGSCEETKTEDANVVNKDTQKSGGKDSGASPSTEEAKQSSDDQPIVKENSVDVDTSGEKLSNVAIDILKCAFEAAGHSPEYEGSFADAGNPVIALRI

SEQ ID NO: 223447 - protein, 105 aa, Zea Mays
MIKAGYRACSSHPHEIHSALPPFHQVLVRFPGFGVEEAEWIDVRTCTLRQRSVPYKATECADVHIWDPVLCYKDIVSLKKLRRRYVEYDYKPQTSYELPKGTKIA

SEQ ID NO: 223448 - protein, 50 aa, Zea Mays
MVLEVLAMQGSIYMYVCRIQNGLLASLAVQTIFLCTMETLNNSKSISTLL

SEQ ID NO: 223449 - protein, 188 aa, Zea Mays
MGSRDYYEILNVDRSAIDDDLRRAYRRLAMRWHPDKNPAGKAEAETRFKEITEAYNRRRQEGGVRPVRGGGPPGRCAAARRRRRHRRHLRGVLREHAVHVLQHGQQREAAPTAPEVGQRVWQGVPARPGWWWWCRVVENGAAAAARGEQAGVHPGRALHGRHQEDEDLPELGRCQRVTKLKMRSTNRR

SEQ ID NO: 223450 - protein, 164 aa, Zea Mays
MILATSTVSTFVKYIFYVSDMLMEGQWEKKAVYTFYLVRELYVTFRNFRIRIADYVRYRKITSNMNERFPDATSEELDVSDATCIICREEMATAKKLLDGHLFHVHCLRETGEQAEEEVPLRLLHGSFSSTGRILSTGTVPCCLPQCARPHFAINHEDLTLLFP

SEQ ID NO: 223451 - protein, 555 aa, Zea Mays
MHACTRPDGNRSPKDQKESELRSSDAAVSCRPTPHTCTGWFRPCLHLRTLWIPGLDRDPPLFLSLSILASSLHLRLRESRTHMHFPLHSPRSQATPRSSSGPVDGPMLRAVDLPDRFDRVAPPTDNGAGSEEAAVKDTGPKPVVPLLNVSAGGRVHEIQTFAHYVATQIGFEDLNECPHLCALSYDYLKKTEGYEQNLLAFFHNKMNPDALLVQLIEEMDKCILGYFSFHWKYATHIITQVLTHEQPRRKLRRMVMEATRKMRFERVTRELKVTRLFTTLVEELKAIGVHCQHDHNRAGTDVMVPAAHSDRSPVLLLMGGGMGAGKSTVLKQIMKEVFWTEAAANAVVVEADAFKESDVIYQAISSRGHHTDMLQTAELVHQSSTDAAASLLVTALNEGRDVILDGTLSWEPFVRQTIAMARSVHRQRYRMGVGYKVAPDGTTTEKYWEPVEEDGEQQAGRAGRTRKPYRVELVGIICDAYLAVVRGIRRAIISGRAVRVNSQLKSHKRFAGAFRKYCDLVDNARLYSTNTIAGAKPATGGRGRDRAAGPGEPDQ

SEQ ID NO: 223452 - protein, 79 aa, Zea Mays
MYVCHHPIPIPPITLSLYSNHSAESYLTQPSSSSPGSPPAMSAAFKAFLNSPVGPKTTHFWGPVSNWGIILATIFVACA

SEQ ID NO: 223453 - protein, 861 aa, Zea Mays
MDRSINFRGIAGSAGNIMQGMGKFVFGNEGLDSKEDSYVERYLDRISNGTIPDDRRSAMTELQSLVAESRLAQMSFGAMGFPILLNIFKEDREDVELVRGALETFVSALTPIEMSQGPKTEVQPASVNSDLLSRETENISLLLSLLSEEDFYVRYYTIQLLTALLTNSLKRLQEAILLIPRGITVLMDMLMDREVIRNEALLLLTYLTRDAEEIQKIVVFEGVFEKIFSIIREEGYSDGGVVVQDCLELLNNLIRHNASNQMLLKETMGFDPLISILKIRRGSAFNFTQQKTVNLLAALNTVELLLMVGPSGEAGKDANKNANQTALAQKNILDHLLLLGVESQWAPVALRCMRNPNGQALLASTIAPHPNQGDIHEPASDMPFGSVLLQALVSSDVNGDMEACCRASSVLSHIIKDNLQSKDRVLQIQLETSTASLGRTEPVLHRIVTCLSIAASMEGENDQNNQLEEPYIQPFILRLLIIWLVDCSNAVNCLLESAVHLNFIIELASNKRYAACVRGLAAVVLGACILYNASREKGRDAFAVADAISQKIGLTTYFLRFDELRKSLAHPLSEQHHRKELSRSSANSMSDFQEIEEDETNKGDQHPVLSEIFDSQFVNLLTKLEADIRENIMDIFSRTKTATAVLPTELEQKNGEVDEEYIKRLKSFVEKQCNEMQDLLARNAMLAEELLRTGGGTTTDTSQKPSSGRERVQIEALRQELEGAKRQIGALKSEKSQIEAEANNQRNLSVKLESDLKSLSEAYNSIEQANYRLDAEVKALRQGGSVPYPDVEAIKAQAKEEAEKDSEAELNDLLVCLGQEQTKVEKLSTRLAELGEDVDTLLQGIGDDTAIPDDDDEDDEE

SEQ ID NO: 223454 - protein, 737 aa, Zea Mays
MDMLMDREVIRNEALLLLTYLTRDAEEIQKIVVFEGVFEKIFSIIREEGYSDGGVVVQDCLELLNNLIRHNASNQMLLKETMGFDPLISILKIRRGSAFNFTQQKTVNLLAALNTVELLLMVGPSGEAGKDANKNANQTALAQKNILDHLLLLGVESQWAPVALRCMALRCIGNLVLRNPQNLDSLARKQVGEEPHVQPALNAILSIILRTSIAQEFVAADYVFKCFCERNPNGQALLASTIAPHPNQGDIHEPASDMPFGSVLLQALVSSDVNGDMEACCRASSVLSHIIKDNLQSKDRVLQIQLETSTASLGRTEPVLHRIVTCLSIAASMEGENDQNNQLEEPYIQPFILRLLIIWLVDCSNAVNCLLESAVHLNFIIELASNKRYAACVRGLAAVVLGACILYNASREKGRDAFAVADAISQKIGLTTYFLRFDELRKSLAHPLSEQHHRKELSRSSANSMSDFQEIEEDETNKGDQHPVLSEIFDSQFVNLLTKLEADIRENIMDIFSRTKTATAVLPTELEQKNGEVDEEYIKRLKSFVEKQCNEMQDLLARNAMLAEELLRTGGGTTTDTSQKPSSGRERVQIEALRQELEGAKRQIGALKSEKSQIEAEANNQRNLSVKLESDLKSLSEAYNSIEQANYRLDAEVKALRQGGSVPYPDVEAIKAQAKEEAEKDSEAELNDLLVCLGQEQTKVEKLSTRLAELGEDVDTLLQGIGDDTAIPDDDDEDDEE

SEQ ID NO: 223455 - protein, 923 aa, Zea Mays
MDRSINFRGIAGSAGNIMQGMGKFVFGNEGLDSKEDSYVERYLDRISNGTIPDDRRSAMTELQSLVAESRLAQMSFGAMGFPILLNIFKEDREDVELVRGALETFVSALTPIEMSQGPKTEVQPASVNSDLLSRETENISLLLSLLSEEDFYVRYYTIQLLTALLTNSLKRLQEAILLIPRGITVLMDMLMDREVIRNEALLLLTYLTRDAEEIQKIVVFEGVFEKIFSIIREEGYSDGGVVVQHLTPSLNSTSFDDWWEEMLLKETMGFDPLISILKIRRGSAFNFTQQKTVNLLAALNTVELLLMVGPSGEAGKDANKNANQTALAQKNILDHLLLLGVESQWAPVALRCMALRCIGNLVLRNPQNLDSLARKQVGEEPHVQPALNAILSIILRTSIAQEFVAADYVFKCFCERNPNGQALLASTIAPHPNQGDIHEPASDMPFGSVLLQALVSSDVNGDMEACCRASSVLSHIIKDNLQSKDRVLQIQLETSTASLGRTEPVLHRIVTCLSIAASMEGENDQNNQLEEPYIQPFILRLLIIWLVDCSNAVNCLLESAVHLNFIIELASNKRYAACVRGLAAVVLGACILYNASREKGRDAFAVADAISQKIGLTTYFLRFDELRKSLAHPLSEQHHRKELSRSSANSMSDFQEIEEDETNKGDQHPVLSEIFDSQFVNLLTKLEADIRENIMDIFSRTKTATAVLPTELEQKNGEVDEEYIKRLKSFVEKQCNEMQDLLARNAMLAEELLRTGGGTTTDTSQKPSSGRERVQIEALRQELEGAKRQIGALKSEKSQIEAEANNQRNLSVKLESDLKSLSEAYNSIEQANYRLDAEVKALRQGGSVPYPDVEAIKAQAKEEAEKDSEAELNDLLVCLGQEQTKVEKLSTRLAELGEDVDTLLQGIGDDTAIPDDDDEDDEE

SEQ ID NO: 223456 - protein, 764 aa, Zea Mays
MLILVHIWPWRLACRPLHHRDSVNIRRTIHQHLKEVIRNEALLLLTYLTRDAEEIQKIVVFEGVFEKIFSIIREEGYSDGGVVVQDCLELLNNLIRHNASNQMLLKETMGFDPLISILKIRRGSAFNFTQQKTVNLLAALNTVELLLMVGPSGEAGKDANKNANQTALAQKNILDHLLLLGVESQWAPVALRCMALRCIGNLVLRNPQNLDSLARKQVGEEPHVQPALNAILSIILRTSIAQEFVAADYVFKCFCERNPNGQALLASTIAPHPNQGDIHEPASDMPFGSVLLQALVSSDVNGDMEACCRASSVLSHIIKDNLQSKDRVLQIQLETSTASLGRTEPVLHRIVTCLSIAASMEGENDQNNQLEEPYIQPFILRLLIIWLVDCSNAVNCLLESAVHLNFIIELASNKRYAACVRGLAAVVLGACILYNASREKGRDAFAVADAISQKIGLTTYFLRFDELRKSLAHPLSEQHHRKELSRSSANSMSDFQEIEEDETNKGDQHPVLSEIFDSQFVNLLTKLEADIRENIMDIFSRTKTATAVLPTELEQKNGEVDEEYIKRLKSFVEKQCNEMQDLLARNAMLAEELLRTGGGTTTDTSQKPSSGRERVQIEALRQELEGAKRQIGALKSEKSQIEAEANNQRNLSVKLESDLKSLSEAYNSIEQANYRLDAEVKALRQGGSVPYPDVEAIKAQAKEEAEKDSEAELNDLLVCLGQEQTKVEKLSTRLAELGEDVDTLLQGIGDDTAIPDDDDEDDEE

SEQ ID NO: 223457 - protein, 689 aa, Zea Mays
MDDATLRLRIEFNFSLDAQLNAVIRNEALLLLTYLTRDAEEIQKIVVFEGVFEKIFSIIREEGYSDGGVVVQHLTPSLNSTSFDDWWEEMLLKETMGFDPLISILKIRRGSAFNFTQQKTVNLLAALNTVELLLMVGPSGEAGKDANKNANQTALAQKNILDHLLLLGVESQWAPVALRCMRNPNGQALLASTIAPHPNQGDIHEPASDMPFGSVLLQALVSSDVNGDMEACCRASSVLSHIIKDNLQSKDRVLQIQLETSTASLGRTEPVLHRIVTCLSIAASMEGENDQNNQLEEPYIQPFILRLLIIWLVDCSNAVNCLLESAVHLNFIIELASNKRYAACVRGLAAVVLGACILYNASREKGRDAFAVADAISQKIGLTTYFLRFDELRKSLAHPLSEQHHRKELSRSSANSMSDFQEIEEDETNKGDQHPVLSEIFDSQFVNLLTKLEADIRENIMDIFSRTKTATAVLPTELEQKNGEVDEEYIKRLKSFVEKQCNEMQDLLARNAMLAEELLRTGGGTTTDTSQKPSSGRERVQIEALRQELEGAKRQIGALKSEKSQIEAEANNQRNLSVKLESDLKSLSEAYNSIEQANYRLDAEVKALRQGGSVPYPDVEAIKAQAKEEAEKDSEAELNDLLVCLGQEQTKVEKLSTRLAELGEDVDTLLQGIGDDTAIPDDDDEDDEE

SEQ ID NO: 223458 - protein, 221 aa, Zea Mays
MMIFVIRNEALLLLTYLTRDAEEIQKIVVFEGVFEKIFSIIREEGYSDGGVVVQHLTPSLNSTSFDDWWEEMLLKETMGFDPLISILKIRRGSAFNFTQQKTVNLLAALNTVELLLMVGPSGEAGKDANKNANQTALAQKNILDHLLLLGVESQWAPVALRCMALRCIGNLVLRNPQNLDSLARKQVGEEPHVQPALNAILSIILRTSIAQEFVAADYVFK

SEQ ID NO: 223459 - protein, 442 aa, Zea Mays
MNLLVTCLLEVYFCKLWFLVMSMEIWRHAAEHLAFFLTLSRTTCKARIVLQIQLETSTASLGRTEPVLHRIVTCLSIAASMEGENDQNNQLEEPYIQPFILRLLIIWLVDCSNAVNCLLESAVHLNFIIELASNKRYAACVRGLAAVVLGACILYNASREKGRDAFAVADAISQKIGLTTYFLRFDELRKSLAHPLSEQHHRKELSRSSANSMSDFQEIEEDETNKGDQHPVLSEIFDSQFVNLLTKLEADIRENIMDIFSRTKTATAVLPTELEQKNGEVDEEYIKRLKSFVEKQCNEMQDLLARNAMLAEELLRTGGGTTTDTSQKPSSGRERVQIEALRQELEGAKRQIGALKSEKSQIEAEANNQRNLSVKLESDLKSLSEAYNSIEQANYRLDAEEQTKVEKLSTRLAELGEDVDTLLQGIGDDTAIPDDDDEDDEE

SEQ ID NO: 223460 - protein, 257 aa, Zea Mays
MVIYLSTPKTDKVSEDGENDKLKFGLSSMQGWRATMEDAGPHSDFTGPNCGSTACVALVRNRQLVVANAGDSRCVISRNGQAYNLSRDHKPELEAERERIQSAGGYIKMGHVNGSLNLSRAIGDMELKQNKFLSPDKQILTANPDINIVELCDDDEFIVLACDGIWDCMSSQQLVDFIREHINTEESLSAVCEGVLDRCLAPSTMGGEGCDNMTMILVQFKKPFAQVKDASDAEQLTGDAGCSETHGAEENDSDKQI

SEQ ID NO: 223461 - protein, 257 aa, Zea Mays
MVIYLSTPKTDKVSEDGENDKLKFGLSSMQGWRATMEDAHSALLDLDNDTASFGVFDGHGGKVVAKFCAKYLHIEVLHTEAYAAGDLGAAVHRAYLRMDEMMRGQRGWQELQALGDKINQFTGITEGLIWSPKASDSNDRHDDWAFEEVELCDDDEFIVLACDGIWDCMSSQQLVDFIREHINTEESLSAVCEGVLDRCLAPSTMGGEGCDNMTMILVQFKKPFAQVKDASDAEQLTGDAGCSETHGAEENDSDKQI

SEQ ID NO: 223462 - protein, 270 aa, Zea Mays
MSSSSDLEQQVATALRRVTPVAAAPAVDRGGAPDLAAAIQRRMASQRARGADAFYAKFASARSLADQTFSRRRVQLKGLKDQLRDLQSQLRESLTLQSCKEWKYRIATEPMSEATATNERLRSWVADFRDKRNKGAAIVFEQLQAVESLEANSNEDAEMAEKVPKAVLWYNKFLGFRVIGGERGVKFVFDKIDPQRPEKEYSFRVSPRSQCELKLLQVSGHQAMCLCYIIRFVPSIFHMHIFLKVIALSHQSSIVILMSRTLMNWRRIWI

SEQ ID NO: 223463 - protein, 51 aa, Zea Mays
MTDMNLPMTHQQTIVSSQQVMMPQHTLSPLLWMYFPFTQRSPERLLISAWI

SEQ ID NO: 223464 - protein, 305 aa, Zea Mays
MDRNDYYGGDSTSLNLNQLWKRFKGEETPPAHIGASRDYNVDMVPKFMMANGTLVRVLIHTGVTKYMSFKAVDGSYVFNKGKIHKVPSTDMEALKSPLMGLFEKRRAGKFFLYVQDYKENDPSTHKGYNLTKLTTKELISKYGLDDNTIDFIGHAVALHRDDSYLTEPAIDTVKRMKLYAESVARFQGGSPYIYPLYGLGELPQGFARLSAVYGGTYMLSKPECKVEFDDEGKVCGVTSEGETAKCKKVVCDPSYLPDKVKKIGKVFRAIAIMSHPIPNTAESHSVQIILPQKQLGRRSDITSGD

SEQ ID NO: 223465 - protein, 441 aa, Zea Mays
MDVEYDVIVLGTGLKECILSGLLSVDRLKVLHMDRNDYYGGDSTSLNLNQLWKRFKGEETPPAHIGASRDYNVDMVPKFMMANGTLVRVLIHTGVTKYMSFKAVDGSYVFNKGKIHKVPSTDMEALKSPLMGLFEKRRAGKFFLYVQDYKENDPSTHKGYNLTKLTTKELISKYGLDDNTIDFIGHAVALHRDDSYLTEPAIDTVKRMKLYAESVARFQGGSPYIYPLYGLGELPQGFARLSAVYGGTYMLSKPECKVEFDDEGKVCGVTSEGETAKCKKVVCDPSYLPDKVKKIGKVFRAIAIMSHPIPNTAESHSVQIILPQKQLGRRSDMYVFCCSYSHNVASKGKFIAFVSAQAETDNPEKELKPGIDLLGKVDELFIDIYDRYEPTNDSSADNCFISTSYDATTHFESTVMDVLSLYTKITGKRVPCQATVQFFIW

SEQ ID NO: 223466 - protein, 163 aa, Zea Mays
MGAGIRVLAALLAALAAATAGVTAQLRQDYYAAVCPDLESIVRAAVSKKVQAQPVAVGATIRLFFHDCFVEGCDASVILVSTGNNTAEKDHPSNLSLAGDGFDTVIQAKAAVDAVPACANQVSCADILALATRDVIELRRTRWGSRTAARSRTGSSRSRWTRR

SEQ ID NO: 223467 - protein, 290 aa, Zea Mays
MLPGPASQARCVSPKPPTSPSFSLLPAAARRDPGRQDRVGKPRRRRRRRRRAQAAQRRCWPHPGASRQAPPPGAPFFLLRGLPRPPPPPPRPPPAVLGRREGGGENVDSDRRWVIGVLTEEGFENKDTFYGSSGFLCAAHPIFRMLPPSGKEKNFMYCHLHPQIRAYEANPKPVGLAFGGTIGNERIFLDEDFSGVLVRHHAVDKTYQHGSLIPNQGYLPVEASVLDVEVWGLGGEATKRQQNMYKKREDIFSEQRRKVDLKTFASWEDSPEKMMMDMMSDPNTVRREDR

SEQ ID NO: 223468 - protein, 245 aa, Zea Mays
MANIEWNGGSDTMDEILVRIQQLEEAVVKRERAMAYTFNHQWRARSATSLGNFSYEVGKGGWGWSWMDRWIVARPWESRSMVHPENPKKAQAKKENTTNPLALKLQGSITLSNNINDRKTLKKKPLPSASLTDQKKPSPSPSSDQKKPVPKEQRAKAAGTPPKPKAKYMKGSQEKKPQPQQRVSPPLSQEAKAYAQENGLFFMETSAKIATNVNDVFYEIAKKLLQGQQVQNPQGGMVLNQRPPE

SEQ ID NO: 223469 - protein, 457 aa, Zea Mays
MLRVLPMKSSSVPRPSALDLLFTSVSATTVSSMIAVEMESFSNAQLLLMTLLMLLGGEVFTSMLGLHFTCTKLRNKRETPHNNLHGNSLEQSRRRHRPMEMEAQAAAVQMELAGFNKDGHGDFASMARLLMFIVLGYILVVHIAGYALILIYLSVVGSARAVLVRKRISLSTFSVFTVVSSFANCGFVPTNEGMVSFKSFPGMLLLVMPHILLGNTLFPIFLRLSITALERVTRWRDLCELLRDRGPGGGPAAAAAAAAIGYDHLLPGPRTWFLALTVAVFLAVQLVLYCAMEWGSGGLGGLNAFQKLVAAVFMSVNSRHSGEMVVDLATVSSAVVVLYVLMMYLPPYTTFLPVAVEDDQQQQNEAQPHDNSTSKSSTSISIWHNLLMSPLSCLTIFIVVICITERRQIARDPINFSVLNIVVEVISAYGNVGFSTGYSCSRLKKFSMLGGQAWRLN

SEQ ID NO: 223470 - protein, 607 aa, Zea Mays
MPFEKLAMSMESPVVLRSTKALLDRLEKRLVISHSVASSSVENVDHLLKRLGSPPRRKAPPSREGKTRAVVKRPAKSSEASIKLPRYSLRVVLCAYMILAHPSAVLSGQGEREKQLIESAANFIKEFELLIKVILDGPGQSSGVTGQRKFRAQLANFDKAWCSYLYSFVVWKVKDARLLEEDLVRAACKLELSMMQTCKLTADRHSQNNLTHDMKAIQKQVIDDQKLLRDKVQHLSGDAGLERMNSALSDTRSKFFEAKENGSPLTAPVANVSTPLSINSSGKAPLSEVPESSRTNVVGTSSVVRSLFSASSSSVSSSPEKQPTENEKMVNEMLHEDASAFAGRSDSASTAEEEFQNKVRETMEKAFWDMVTNSMRGERPDYSQLINLVKEVRDSLHDLAPKEWKEKILENIDLEILSQVLGSGSQDAQYLGQILEYSLDMVRKLSAAAKEDEMKKNHDKLLSELSTNSEVNGDGINSFVIAVIKGLRFILEEIKELKAEVSKARIQMMQQIIKESAGVEYLQKAFADRYGPPETAPASLPLTLQWILTSKNIAEEEWSEHSDCLSVMPAAGQAPALVPVLRSGHGAPVGQPSPSAGDTSGQPECKD

SEQ ID NO: 223471 - protein, 281 aa, Zea Mays
MAPVSPAAAAAAVSASHHGRHLLPSSPRRLPRPRPRSRPHLRLAACHADTLLPSSSSEARAAPGPAVEPSSESATDCFVDWLRARGLPPGKVDIRERPVPCLRDGKDQPLRYVSAVVDLQAGDVAFEVSMSLVVTLERVLGDESIAELLTNNKLSELACLALYLMYEKKQGKDSFWYPYIKELDRHRGRGQLAVESPLLWTESELDYLTGSPLKDEVVARDEAIRREYNELDTLWFMAGSLFQQYPFDIPTEAFPFEIFKQAFVAVQSCVVHLQCLIGRSK

SEQ ID NO: 223472 - protein, 562 aa, Zea Mays
MKGGTQAISLMVHLAVPWLCLASWAALLPALASGNVGAAAPILRADYIKLNFSTASATPDKYKSFIASVRAGLAGRSVSLKMDVSRAYFVAYVAGQRSCLLKRSGRTFSSAICYYGGPWGTSSAPVTRPAAAAGDGEDPGVAAWRARDLDEAISSLFLFPTGNATEEELRRGVAACDMMVASAATFPYVERRMSAGMWDSNGVANDPSLRGLQARWPWLSAAVQQSYQGAFAAPVPVQRSNGKWMRVDNVRSAVPLVSFLEHGSCNRTRGAPALLIRSVVQEPDEDMQPGGGARATTAACGLPAEPTVRLVGPEGRCVDVPYGYYYNGNQVQLWSCKSTSAVNQLWTLKRDGTIRSNGKCLTSSGDAAGARAVVDDCPRFPTGRVVWEVRVDGTVALKWSRGLVLAVTSSTLFAGLTVRQDDRGTGQSWTPTNVTAPLDAAIVGFRDLCLQADYAGSVSVAACRDGVQWSLYPDGSVRPPAWLLLQWQCLAADASGGVTVKLCDGAGSSCERWVFRNDGTIFNTGTGMVLDARPSAGANATASQVIVSPATGSPTQQWTLML

SEQ ID NO: 223473 - protein, 115 aa, Zea Mays
MQIFVKTLTGKTITLEVESSDTIDNVKAKIQDKEGIPPDQQRLIFAGKQLEDGRTLADYNIQKESTLHLVLRLRGGIIEPSLQALARKYNQDKMICRKAVNCRKKKCGHSNQICI

SEQ ID NO: 223474 - protein, 350 aa, Zea Mays
MEVGDARNGSAAAALTKGGADDAARKPLPPCCVKAKARVPETEANCHDTVVSGWFTEPRSRFGEAHSLKVEKILFQGKSPYQEILVFESSTYGNVLVLDGIVQLTDKDECAYQEMVTHLPLCSIPAPKNVLVVGGGDGGVLREIARHDSVETIDICEIDQLVIDVSKEFFPNLSIGFKDPRVRLHVGDGPAQALVEKPFIQTIARALKPGGVLCNLAESMWLHTHLIQDMLAICRQTFKGAVHYAWTSVPTYPSGVIGFLLCAKEGRAVNFLTPANPIEKIEGAAKAGRELRFYNSEIHRAAFVLPTFVRRELEAYTTPISSAENEKPKESVSEPQKIKILSNNAILTAS

SEQ ID NO: 223475 - protein, 554 aa, Zea Mays
MGLNMPAKTVVFTSVKKWDGDSNRYIGSGEYIQMSGRAGRRGKDERGICVIMIDEKMEMSVIKDMVLGKPAPLVSTFRLSYYTILNLMSRVEGQFTAEHVIRHSFHEFQYEKALPEIAQKITRLENEATLLDSSGETDLAEYHKLGLDISELEKKIMSEMIRPERALLYLVPGRLVRVRDGSTDWGWGVVVNVVKKPPASGTLPPALSASRSNNYTVDTLLHCSSNSSENGSRSKPCPPRPGEKGEMHVVPVPLPLVSGLSSVRINIPPDLRPPEARQNILSAVQELGKRYPQGLPKLHPINDMGIQEPELVDLVHKLEDLEQKQCSHRLHKSGQSEQELSWYQKKADLNTEIQQLKSKMRDSQLQKFRDELRNRSRVLKMLGHIDADGVLQLKGRAACLIDTGDELLITELMFNGTFNDLDHHQVASLASCFVPCDKSSEQIRLRNELSRPMMQLQEAARKIAEVQRECKLEVNVEEYVESTCRPYLMDVIYCWSRGATFAEVMEMTDIFEGSVIRLARRLDEFLNQLRAAAEAVGEVNLEKKFKNASESLRR

SEQ ID NO: 223476 - protein, 962 aa, Zea Mays
MGEEAESNCKRKAPDSSVEEQPSLAPAPAQSQADPAAKRPNISRSCVHEVAVPNGYESVKDEAVHGTLASPAFNGEMAKQYPFKLDPFQSVSIACLERNESVLVSAHTSAGKTVVAEYAIAMAFRDKQRVIYTSPLKALSNQKYRELSQEFTDVGLMTGDVTLHPNATCLVMTTEILRAMLYRGSEVIKEVAWVIFDEIHYMKDRERGVVWEESIIFLPPAIKMVFLSATMSNATEFAEWICSLHKQPCHVVYTDFRPTPLQHYMFPIGGSGLYLVVDENGQFREDNFAKLQDSFAKPNNQLDGRKGGGPKASGRIAKGGSASGNSDIYRIVKMIMERKFQPVIIFSFSRRECEHHAMSMSKLDFSTEEEKECIEQVFCNAIGCLVEEDRSLPAIELMLPLLKRGIAVHHSGLLPIIKELVELLFQEGLVKALFATETFAMGLNMPAKTVVFTSVKKWDGDSNRYIGSGEYIQMSGRAGRRGKDERGICVIMIDEKMEMSVIKDMVLGKPAPLVSTFRLSYYTILNLMSRVEGQFTAEHVIRHSFHEFQYEKALPEIAQKITRLENEATLLDSSGETDLAEYHKLGLDISELEKKIMSEMIRPERALLYLVPGRLVRVRDGSTDWGWGVVVNVVKKPPASGTLPPALSASRSNNYTVDTLLHCSSNSSENGSRSKPCPPRPGEKGEMHVVPVPLPLVSGLSSVRINIPPDLRPPEARQNILSAVQELGKRYPQGLPKLHPINDMGIQEPELVDLVHKLEDLEQKQCSHRLHKSGQSEQELSWYQKKADLNTEIQQLKSKMRDSQLQKFRDELRNRSRVLKMLGHIDADGVLQLKGRAACLIDTGDELLITELMFNGTFNDLDHHQVASLASCFVPCDKSSEQIRLRNELSRPMMQLQEAARKIAEGATFAEVMEMTDIFEGSVIRLARRLDEFLNQLRAAAEAVGEVNLEKKFKNASESLRR

SEQ ID NO: 223477 - protein, 309 aa, Zea Mays
MKLLKESRRHVVADAGKAHLFYLPYSSQQLRLTLYEAGSHNLRPLAAYLRNFVRGLASKYPFWNRTRGADHFLVACHDWGPYTTTAHRDLRKNAIKALCNADSSEGIFTPGKDVSLPETTIRTPRRPLRYVGGLPVSRRSILAFFAGNVHGRVRPVLLRHWGNGQDDDMRVYSLLPSRVSRRMNYIQHMKNSRFCLCPMGYEVNSPRIVEALYYECVPVIIADNFVLPFSEVLDWSAFSVVIAEKDIPDLKKILKGISLRRYVAMHDSVKRLQRHFLWHARPIKYDLFHMILHSIWLSRVNQVQVQLEG

SEQ ID NO: 223478 - protein, 67 aa, Zea Mays
MTEAPFLPRERLFKLQHHFQNMTKHTYLKGRYDVITSVAIPLALAASSMFMIGRGVYNMSHGIGKKE

SEQ ID NO: 223479 - protein, 67 aa, Zea Mays; identical to SEQ ID NO: 223478

SEQ ID NO: 223480 - protein, 67 aa, Zea Mays; identical to SEQ ID NO: 223478

SEQ ID NO: 223481 - protein, 68 aa, Zea Mays
MMTEAPFLPRERLFKLQHHFQNMTKHTYLKGRYDVITSVAIPLALAASSMFMIGRGVYNMSHGIGKKE

SEQ ID NO: 223482 - protein, 831 aa, Zea Mays
MELRQILVFIWTKILSLDKSCQVDLVKDGGHTYFVRFLDSLDAYPEQRAMAAFVLAVIVDGHRTGQEACMNAGLIDVCLRHLQPENPHDSQTEPLLLQWLCLCLGKLWEDFPDVQLLTLQTNTPEIVLCLLSEPQPEVRAAAVFALGTLLDTTSSNGADDDSDYDEKVKAEINVVRSLLQISSDASPLVRSEVAIALTRFALGHNKHLKSVAAEYWKPQSNSLLKSLPSLANINNPNNVYSPNNILQGSIGPVLRVGSDSSAAGRDGRMSTSSPIATSSIMHGSPQSDDSSQLSDSGLLLRENASNGGPGYTRSRPVDNVIYSQFISTMCSFAKDPYPRIATIGRRALSLIGVEQVVMKNTRFNSGGAHRGETSASNFGMARSSSWLDMNSGNNLIKFRTPPVSPPQHDFLPGLRRVCSMEFGQHPISSPDGLAVPLLSSAAATSNAELSILPQSTIYNWSCGHFSRPLLIGSDDNEEANARREERERLALDYIAKCQRSSCKMTNQIASWDTRFELGTKTALLLPFSPIVVAADENEQIRVWNYDDALPVNSYQNHNLSDRGLSKLLLINELDESLLLAASSDGNVRVWKNFTQKGGQKLVTAFSSVQGHRTAGRSIVIDWQQQSGYLYASGDMSSILLWDLDKEQQLSTIQSSGDSAISSLSASQVCSGHFAAGFAAGSVRIYDIRSPDRVVYTARPHAPRTEKVVGIGFQPGFDPYKIVSASQAGDIQFLDVRRSAEPYLTIEAHRGSLTALAVHRHAPVVASGSAKQMIKVFSLEGEQLTIIRYQPSFMGQRIGTVNCLSFHPYKSLLSAGAGDNALVSIYAEENYK

SEQ ID NO: 223483 - protein, 434 aa, Zea Mays
MLTVRSNSRASSSRKEDSVPVRRGGNAAHGPAQIFSFRELAVATKNFRRDCLLGEGGFGRVYKGHMENGQVIAVKQLDRNGFQGNREFLVEVLMLSLLHHPNLVRLIGYCADGDQRLLVYEYMLLGSLENRLFGPAGKEPLDWNTRMKIAAGAAKGLEYLHDKANPPVIYRDFKSSNILLGEDYYPKLSDFGLAKLGPVGDKTHVSTRVMGTYGYCAPEYAMTGQLTLKSDVYSFGVVFLELITGRKAIDHTQPSGEQNLVAWARPLFRDRRKFCQLADPLLHGGYPKRGLYQALAVAAMCLQEQAASRPLIGDVVTALSYLAAHPYDPNAPSTKDSKTCPSTPRAKTHRRTTSVPDAQHAAESLILNFPDMRKETVRGGEFEKDRTEGSGSSSSSGRNDCLDVPRLLSVPNGKVCGEGNNIQKSTVKVGAREN

SEQ ID NO: 223484 - protein, 353 aa, Zea Mays
MDIPLSAMCKSPESTHSPNSLLSEKSSPQGSHVIVNLVPMNGLHCASSGHSAPVDNQAILSDMGVFDGELHESVSGRSVDAYDMLPIAELRKKMASARRNCAVQHTEEQHVKSLRVKKCISNSKDKKTRPIQELMGEIQLKGNKNFSRDFVLALGVSRDGPTTLSPDRLVSIGPKRCSSTKVLACKKLAKRRGSKELCSPNSSLDVTRTDQQGGRKEVAEAMKECSLALECPKSDAQGQLDRTLEDAKNITELSNQENLLSMLPPGFKSVSNRKGTNIHDAQLGEEPAVMTNNSLIEPNGNDDMCTDHAATTKLAENYNVMETAIMSIDCPAQQPCGEVDERLCSSRAHLCGI

SEQ ID NO: 223485 - protein, 153 aa, Zea Mays
MPRRQALEEEQCREEKGISTVPKHKYASKACSPKATILRGQAVSTYGSATYTLSMLTLRDACSMVASLSSSYNSCSPVEDENNPSEQTSAKKMEDRVSKVVEVFAGRIQKMENDFISLNKRASTNRTTGRLVDLIGSDALVVPLKPTRPTNRD

SEQ ID NO: 223486 - protein, 100 aa, Zea Mays
MLYYGCSEASNFSVYCNTWVHLVTLRQLIAAWFSRRYTRFKKRSADFHGRAADLVHSLRGTAMPRRQALEEEQCREEKGISTVPKHKYASKACSPKVLKT

SEQ ID NO: 223487 - protein, 112 aa, Zea Mays
MMSLFWSSGAEPWPNIVPQEAAVAKVFGSRSVERYGPRLTLLEATMRTDDAGGSAFVKLVKQGSAALLNAYARRGFPFDSWEVKALLLEALVSEDAAVVQAERFEQANESCV

SEQ ID NO: 223488 - protein, 197 aa, Zea Mays
MDVAASEFYSDKDQTYDLNFKEENNDGSQKISGDSLKNVYKSFVSEYPIVSIEDPFDQDDWVHYAKMTEEIGEQVQIVGDDLLVTNPTRVAKAIKEKSCNALLLKVNQIGSVTESIEAVKMSKRAGWGVMTSHRSGETEDTFIADLAVGLSTGQIKTGAPCRSERLAKYNQLLRIEEELGAIAVYAGAKFRAPVEPY

SEQ ID NO: 223489 - protein, 538 aa, Zea Mays
MTKAKLAFWLGWIALLQGCMVKSSLPYEYDYSASIECLPEPLEPQYGGGVLRNADFSAGLRGWSAFGYGSIAESTSAAGNGFAVALNRTRPYQSVSQKVYLQADTHYTLSAWLQVSDGGADVRAVVKTVGDFVHAGGGVAKAGCWSMLKGGLTAASSGPAELYFESNATVDLWVDSVSLKPFSKDEWTAHRAESVSAARKKAVRLQATDSAGNPLEGAAVSLDAVRTNFPLGAAVSRYILTNSAYQTWFASRFAVATFENEMKWYSTEPAPGQEDYTVPDAMMAFAKSNGIAVRGHNVFWDQPSQQPRWVQSLPYPQLLAAASRRIRSVVSRYAGQVIGWDVVNENLHFNFYEGRFGWDASTAFYAAARLLDAGSALMFMNEFNTVEQPGDMAALPARYLQRLQQIIAAYPENGAGMAIGLEGHFTTNPNIPYMRAALDTLAQAGIPVWLTEGCYVMCLTDNSFNNLPQGDVVDRLIAEWRATPRAGSTDAQGYFEAELVHGEYKVTVSHPALNSSISRSVKVELGSGSDHYFIDMQV

SEQ ID NO: 223490 - protein, 285 aa, Zea Mays
MNLTIRHMAQINIFIRFFYLHPQSRPHGFDRQMPFASWWFLLLSGHLEATMLQKLQLRREAYQFYHQEPISQGSGVLLDLLAFLFFGLLKQPHQNSLILHAFTDLVCSYVRVNLLLSSKVNRQGNISRMADMYLTGRSLHAKNNNVRATEFTIKQGWLHTGDIGYFDEGGQLFVVDRLKELIKYKGFQIAPAELEGLLLSHLEIMDAVVIPLPNAKAGEVPIAYIVRSPDSSLTEVDVQKFIEKQVTTTSPTGTHKLANPKGEVATARAAAACNTIMVTFCFLCE

SEQ ID NO: 223491 - protein, 507 aa, Zea Mays
MESYRGPRGLVGGTPHVLHCEREARGGGEGDAARSCERRRAFELFATYPSLLPFIFLEDFFGLTHLLLQSNSQTHTGNQLAEPAPPPFLGVGASRGTARLPLPFSFLSSPEDPIHHRGLAGKNQGYIDNIQTKVPPEPRAGGKSPAVGGEEMSDGAGSRTGVAGALGLSVTSSVAIVICNKYLISTLGFFFGHDDADELAPHGDLLHAVRCAAAALLRAKADRRAHRHLLRPAQRHLHWPPQPLPRVQLCWLLPDDQAGHHTLHHSLGNPLSEQEVQSIKASLMVLLLGVGIASVTDLQLNLLGSIIAVLTIAATCVGQILTNQIQRRLKVSSTQLLYQSSPYQSAVLLVTGPFVDKLLTKRDVFAFSYTTQVVVFILLSCSIAVCVNFSTFLVIGTTSPVTYQVLGHLKTCLVLSFGYIILKDPFSARNVVGILIAIFGMGLYSYYSVVESRKKTEDASSLPVAAQMSEKDSAPLLGAKSSPRTENKAEETFDYMPRTAKSAFTGR

SEQ ID NO: 223492 - protein, 94 aa, Zea Mays
MTDEFELDSIKKLSREYAEAKELALAAPITWTEESQTVEVEDAKHLLQSVRGCWATRWTKSSKNGMSRRTEGGVLPEDRIILIPWRPAHGGRQR

SEQ ID NO: 223493 - protein, 94 aa, Zea Mays; identical to SEQ ID NO: 223492

SEQ ID NO: 223494 - protein, 301 aa, Zea Mays
MSSCGQYMLHRVRKLDTLAGVAIKYGVEVADIKRLNGLSTDLQMFAHKTLRIPLPGRHPPSSYQQNGSYESDDRECTPRRIHDDILESILKTPNSKVSPAMSLLQGYYGLEPPPKRDQTSEGTEMAVHSKGKSAFLDVEPWLEPPNSDPFPLQNRKNRSLMIGSFLDGGTDENGDSERFIRRRQKADGELLPREENGGDFLASVGKGLALRPKSSNRPDMNKSQQNLFAMAEPLFGNGLQTVRKSSSTPEFQEPETNTSSSIWSASKWSINTDAFALPLPIPRFDNIPKPIAAWRNKPARD

SEQ ID NO: 223495 - protein, 173 aa, Zea Mays
MVEMAWVKDVYGISTAEVMELLEHFLAMNPDNDGRVKAEDFWAHFGLDCSPLCKKIFHYFDLDIKGLITFRQFLVGCAHLRKQPLFQGSCETAFEKCRGPETSEISRAQLADLLRLSMVPPSDDKMLELFKTFDVDGDEKISRDDFMACLGRFPFLIAFFAALINGEVYIEIV

SEQ ID NO: 223496 - protein, 391 aa, Zea Mays
MYHWIRKKGRPAPRELAPIVVSNHISYIEPIFFFYELFPTIVSSDSHDALPFVGTIIRAMQVIYVDRFSPASRKAAVNEIKRKAACNSFPRVLLFPEGTTTNGRFLISFQHGAFIPGYPVQPVVVHYPHVHFDQSWGNISLLKLMFKMFTQFHNFMEVEYLPVVYPPEIKQENALHFAEDTSYAMARALNALPTYYSYGDSMIMARAVEAGKVNCSNYMVEMAWVKDVYGISTAEVMELLEHFLAMNPDNDGRVKAEDFWAHFGLDCSPLCKKIFHYFDLDIKGLITFRQFLVGCAHLRKQPLFQGSCETAFEKCRGPETSEISRAQLADLLRLSMVPPSDDKMLELFKTFDVDGDEKISRDDFMACLGRFPFLIAFFAALINGEVYIEIV

SEQ ID NO: 223497 - protein, 636 aa, Zea Mays
MFVKKKLWTFQFTYPSSNIKQVYKILRHETAMLIYAHMTSWPLLLIVHQFSTASYKDALPEILEVLRAACLTHKLPLAQTWVTCTQQGKRGSRHSDENYRYCISTIDEACFVNEAEMRGFHEACSEHHLLRGEGVAGKALTTNQPCFLPDIGSSTKLEYPLSHHAKIFRLKGAVAIRLRCTRTGIADFVLEFFLPTDCEALEEQKTVLDSLSGTMRSVCQTLRVVTDREMEGEAALEMNELNSFTPPEKDKDELSFGGNSADRRGASWTSLAGTSQQEPELAALRMHGTFSPVGQGPSLSGVQATAEGSKTKRRTKAEKTVSLQVLRQYFAGSLKDAARSLGVCPTTLKRICRQHGITRWPSRKIKKVDHSLRKLQQIIDSVHGAETAFQLNTLYKDLTDTSISSDNNLSGSVTVPPTNQSNLTDFNKHQPHKSSSNMPSTSHSHSSCSHGSQSSPSCSVGATEHAQQGIIDLMKSENPVKDSSIQTMQTENTSLYEHFSVHEAPIDLLQDVTEKANGAHHSSRSLSSPNPKQNTDANMRVKATFGSEKVRFRLNPECNFQGLKHELAKRLSIVDTNPLVLKYLDDDSEWVLMTCDADLQECLHVYKLADIQTIKISVHLAVSPATRVTAGHTGLS

SEQ ID NO: 223498 - protein, 273 aa, Zea Mays
MAVRTIKVTNVPLSATAENMKEFFSFSGEIEYVEMRRDSETSQVAYVTFKEFHGADTALLLSGSSMCGDVSVNIAPVEDYELPPEAYSHAGARSPGPGTPTGEAVKKAEEVVSTMLARGFVLSKDALRRAQSFDGRHQQLLSTATARVASLDRRLGLSDKFSLGTAAARGAARGVDERFQVTERAWGAFSAAGEVVAGSPYASRGAAWVSAAVGAVARAASDVGAMTMEKVGRAEEEGEASAAEHGHYASSRVDVHDGQGGGAAQHGDHNKAM

SEQ ID NO: 223499 - protein, 84 aa, Zea Mays
MPTLNLSTNVPVDAVVAADILRDCSKAVARIIGKPESRRAGGVRRARVHRRHRPRRQRQAERRRRRGTRGQALRQQVQILHQVR

SEQ ID NO: 223500 - protein, 298 aa, Zea Mays
MSRSLSMRGSMRARRDLPPPEKTIERLESMVDGGNFYEAQQMYKSTSARYIAAQKYSEALDILQSGALVQLKHGQVTCGGELAVLFVDTLITGELPYSEQIFDRIRKMYEAFPRVTVPHFLGDDYDDEGHQLSEAISAAKVRAESCSSFMKAAIRWSAEFGTSRNGSSELHVMLAEYIYSESPETDMTKVSSHFVRGNDPKKFASMLVNFMGKCYPGEDDTAIARGVLMYLSQGNLRDANLLMDEMNEQLKSANSEFPKTDLIQFIKYLLPTALPFCEEAFGSRSITTPIWKHRNACV

SEQ ID NO: 223501 - protein, 113 aa, Zea Mays
MMPMTWVHSQHPNRYLSQGNLRDANLLMDEMNEQLKSANSEFPKTDLIQFIKYLLPTLERDAYPLFRTLRQKYKTSTDRDAVFQELLDEIAAKFYNIQRQNPLEGLFSEMFKI

SEQ ID NO: 223502 - protein, 620 aa, Zea Mays
MVCMQLYSKEIESPPGASSATSILSRNLQTHGFDSKKSSEVKARMHDESLRYVLPDQAIAALAVSLPKGPTEVFAVIAETDLSISSMYPSLSSPSPLVVAHVKELCYLLDDITTSMDSIFKSLLEKYKDPSGLCRLSVYNYNLITHLSLKQTSMFSVAPSGKKLTALPNKKVSRDLFIKKFSCKSPVYHNCRIYASDGRLLCYCDRKKLEWYIQRNLAKLIENSPPAIMLLFEPKGRPEDEDNEFYIQSKKNICVGCGEKSHYIRYRIIPSCYRMHFPEHLKSHRSHDIVLLCVDCHEIAHSAAEKYKRRIAEEFGIPLFVQKIMNSGDISLITNTSVSEDKLNGTGVSPLQLRTAAMALLRHGSTMPLKRCEELMQIVKSYYGGRDVTPEDLEMALLVGMSPHERRRLEKKKGYSFRAQAQTIIRKSSSNTISEDSGHGSENCHALSARFPEVGTGSNGQQEFDETGNQNQLENLTLSQGSSSLPVSMEDTTSDHDTVTLETDTEQQARGACTPGNSHDDKEQSICDNSSQVISKNAEKISLLGHGHHGKQVVELLFSNGGEEFVNQFCQRWRQIFVEAVHPRYLPSGWNINHSGRRDFGDFSVYKPPRKDPQSATARD

SEQ ID NO: 223503 - protein, 453 aa, Zea Mays
MPGAATLRSRVAVAAAACLAVFAAVALLHRKRRWNRAPSSSRRLGVGGRPRRACEEEEKPQDRFKRVLADNSYSPFKHPRRKSAQLGSAEGEAPLPPPQELSQKGHPFEEEITSLLKNPPGFHSFMLCDQCPEMSATYNWVHTETQLEHLARLLGEERAFAVDTEQHSIRSFLGYTALMQISTQNEDYLIDTIALHDVMGILRPVFANSSICKIFHGADNDILWLQRDFHIYVVNMFDTAKACEILLKPQKSLAYLLEVYCEVTTDKTMQREDWRLRPLTPEMIEYARTDAHYLLYIANCLASELHAKAYTSSDKINFFFEASHRSNMVCMQLYSKEIESPPGASSATSILSRNLQTHGFDSKKSSEVKDLVWKFCAWRDLMARMHDESLRYVLPDQAIAALAVSLPKGPTEVFAVIAETDLSISRFMLVMEDYFATVTAKNWNGTFSVIWRN

SEQ ID NO: 223504 - protein, 477 aa, Zea Mays
MADVDDDAVLSDVDEDPLPPPSTSSASSHKSLPQAQPQSQSDAQAQQQRLLDLAAELEEERRLRRAAEASLAEAEPRVARFKAFALQAEAATASSMLSSGFERISAKASPSSPPAPLPTSQKYSSGLPALAYGVLKRANDIVDELLAQIDAANRDRDRAREQMEHRNYQIAIEVSELEASLASRSAEGESLSKSLSQREAEISELRDKITSLEGKLAAQRPVLAEQIGCTSKLYHEMREVVKLVDAEAVSALSDSVFVWKETDVEESLKVSLEGTKLAYELAAIALEKVGACIDDKESKLRRLENMVDGLIKEKEHISVLLRNALQATTSEVLKVAEDGLREAGIEIGLNERKEHMLGSVEKDEVYTLAGALENTMKESQVKIIELQHLVEALRAESGLLRTRLEGQEKEIGQLRKQIKNLEEKEKVANESVEGLMMDVTAAEEEIKRWKMAAEEEAEAGRSIEQEFQIQRFPSVDC

SEQ ID NO: 223505 - protein, 120 aa, Zea Mays
MEVLISSLRKELDEANRAMVELENKLKFKEETAAAAMAARDAAEKSLKLADTRSSRLRERLEELNKQLEESDTRTESVNRNGHRYMCWPWQWLGLNYVQLPLAETDQTSNEMELSEPLII

SEQ ID NO: 223506 - protein, 224 aa, Zea Mays
MPSHLALLSCLLVLLLSFDKFLFHYLKRRWFSGGSGATVPRPPAKSRRNMAAAKWSETAMLVIDMQKDFVDPAMRSPMLVAGGEAVVPAVAGAVAVARERGIFVVWVVREHDPSGRDVELFRRHHYSGGKGPTVKGLKGAELADGLVIKEGEYKLVKTRFSAFFATHLDSVLKTAGIKNLVIVGVQTPNCIRQTVFDAIALDYEKVTVLIDATAAARPEIHLYI

SEQ ID NO: 223507 - protein, 117 aa, Zea Mays
MAPLGLLCLLAAPANGDDLLYEMHAAPPCIYFFASNLRLTARTLLYCYTQCGRTIADGGIWYMQTCNPSYVEFSSPYHVMCLLSRRSRWQYGTQSTPHALLSSFFMSRQMMPKLLKK

SEQ ID NO: 223508 - protein, 338 aa, Zea Mays
MDDSDGGLSFDFEGGLDSAPASGGGGPVPSSTDPGAGVGGGGDGLGMHGRGRGRGSYRQTVCRHWLRGLCMKGEACGFLHQFDKARMPVCRFFRDFGECREPDCAYKHSYDDVKECNMYKMGFCPNGPNCRYKHIKLPGPPPSVEEVLQKILQMRSFNRYSQNRNNNYNHQGERPQHPQGSGLPNQNSAENATAVDPPAGGQQAQTLNQQPPQQQQKPNTNDQAQGVSNGHQATRIATPLPQGPSRYFIVKSCNRENLEISVQQGIWATQRSNEAKLNEAFESTENVILIFSINRTRNFQGCAKMTSRIGGYIGGGNWKSAHGTAHFGRNFSMQWLKV

SEQ ID NO: 223509 - protein, 317 aa, Zea Mays
MASRAHLPGSPASIAVLILSFFQGSVCGITFTFTNRCGDTVWPGLLSGSGTPPLETTGFALAPGQSRSLYAPQGWSGRFWGRSGCAFDASGKGSCATGDCGSGEVECRGAGASPPATLAEFTLDGDGGKDFYDVSLVDGYNLPMLVQPAAAGCPDTGCLVDLNERCPDELRADGGRACRSACEAFGSPEYCCNGAYGNPNTCHPSQYSQLFKSACPKSYSYAYDDATSTFTCNHTDYTITFCPESTPSRSKHSSRRPSHEQLEDSVWLASLKASGASSMKITSWWSAPTVFRSGLAIAVATLLGAQIAPDHPVVGLL

SEQ ID NO: 223510 - protein, 991 aa, Zea Mays
MPHFLSISVALLSLPVAALALATTRTRRAAPIRLDFAGGDVRQRQLDQQLSRRHPRCRQGRRGRGRGRRQGPGRRLGRGPALAAPPRARPLLPRALLCRGGHHRLRRDRPLQDLAPGERDAEPAGEEHAAGEHDLEDLEPRQEEEGEMSEDLFEGVKGEDAGDPSVAYGDSTTGNTPRTSLFDKLYIVLISLHGLIRGENMELGRDSDTGGQVKYVVELAKALSSCPGVYRVDLLTRQILAPNFDRGYGELDELLASTSFKNFRCERGENSGAHIIRIPFGPKDKHLAKENIWPFIQEFVDGALGHIVRMSKTIGEETGSVCPVWPTVIHGHYASAGVAAALLSGALNVPMLFTGHFLGKDKLEELLKQGRQTREQINVTYKIMRRIEAEELSLDASEIIIASTRQEIEEQWNLYDGFEVMLARKLRALVKRGANCYGRYMPRMVIIPPGVEFGQLIHDFDMYGDEDNQSPALDPSIWFEIMRFFTNPRKPMILAIARPYSEKNIATLVKAFGECHPLRELANLTLIMGNREAISKMNKISAAVLTSVLTLIDEYDLYGQVAYPKLHKHSEVPDIYRLAARTKGAFVNVAYFEQFGVTLIEAAMHGLPVIATKNGAPVEIYQVLENGLLVDPHDQHAIADALYKMLSEKQFWSRCRENGLKNIHQFSWPEHCKNYLSRISSLGPRHPAFACKEDHKVPVKCRKHISIIAVDSVNKEDLIQIIRNSVEATRTGTMSGSTGFVLSTSLTIAELQSVIVRTGMLPTDFDAFICNSGSDIYYPLQSSDVPSNSRVTFALDHNYRSHIEYRWGGEGLRKYLVKWASSVVERRGRTEKQVIFEDSEHSSTYCLAFRVVNPNHLPPLKELQKLMRIQSLRCHALYNHGATRLSVIPMHASRSQALRYLSIRWGIELPNAVVIVGETGDSDYEELFGGLHKTVILKGGFNTPANRIHTVRRYPLQDVVALDSSNIIGIEGFSTGDIRSAMQQQLGIPTQ

SEQ ID NO: 223511 - protein, 428 aa, Zea Mays
MDSARSWLQKLQPRDKDRERGAKTPAPASPNGGAGNSARMAAAAGEEALSSATKQKVAAAKQYIENHYKSQMKSLQERKERRWMLERKLADADVSEEEQNNILKDLEKKETEYMRLRRHKMGVDDFELLTIIGRGAFGEVRLCREKATSNVYAMKKLKKSEMLRRGQVEHVRAERDLLAEVDSPYIVKLYCSFQDDEFLYLIMEYLPGGDMMTLLMRKDTLTEDESKFYVAETILAIESIHKRIYIHRDIKPDNLLLDRSGHLKLSDFGLCKPLDSSCFPNLSDLDYAAGKSTNPSSDGDKQSSNSTAPRRTQQEQLLHWQKNRRMLAYSTVGTPDYIAPEVLLKKGYGMECDWWSLGAIMFEMLVGYPPFYSEDPMSTCRKIVNWRSHLKFPEEASLSLEAKDLISKLLCNVDQRIGTKGTSMVCRC

SEQ ID NO: 223512 - protein, 372 aa, Zea Mays
MRRADRKLKLSHNIIGEEDGTDGKGGDPGIEASDMRSIIFGLHLFDPADTATETIDEDITAETFSVEKLAKLKTMSEKVVMMRSHESSEKDERAFEINPNMTDDSGTVIRRASDSIRIDPGLNEAAYLSWVKKFKEASISSEDATVGFGRQRAAPEEKLLKHDVNKQKIEEKRLAKWESLGYQTLAVKEPDITASQNISDAGSIQFVYGDCTNPSKVCPAKPAIIFSCIDNSGTWGHGGMFDALTSLSTCIPDAYHRASEFDDLHMGDLHLIQLDEGNCTRSLDAPLWVALAIVQSYNPRRKVPRSEISMSDLELCISKAAFSAAQHSAAIHMPRIGYQGGSQRSEWYTIERLLRKHSSLHGIDIFVYAMRT

SEQ ID NO: 223513 - protein, 264 aa, Zea Mays
MISVPMVMSYHTHLPAYIPRYNLNWLLEPTWSFIRCLHRSADLTLVPSVAIAEDFETAKVVPANRIRLWNKGVDSESFHTKYRRHEMRVRLSGGEPEKPLVIHVGRFGREKNLDFLKRVMERLPGARIAFVGDGPYRSELEKMFTGMPAVFTGMLQGEELSQAYASGDVFAMPSESETLGQVVLESMASGVPVVAARAGGIPDIIPKDKEEKRWRSVTGGQPRRKSATSTTAPRYRTGGRRWARLTRPPCFRILLSLPSPTSCC

SEQ ID NO: 223514 - protein, 276 aa, Zea Mays
MKFDLSMEMDDSHGTMVNKSEENDFEKKGTSDPVVYQLVRVEGDGTLVPATEDDVLQFEHFLHNEKVDLPPIEDADHVEEFFNNDCMLLKKPDLEDGSSKLETVEAHTQKLGANLEVSSENEHAEAVDSKGVRNLQAKVCSAVSKPKIKHGLTRKHHRAWTLSEVVKLVDGVARYGAGKWSEIRKLSFASYSYRTSVDLKDKWRNLIRATQTQLPAQKDGACPRKTNPSIIPIPPSILLRVKELHELQSQGGGFTAPVKFSGQDGKVLQGKGSGFL

SEQ ID NO: 223515 - protein, 186 aa, Zea Mays
MQLLGVLESLKGITSNQVASQCVLQSYTSGNAQLVNRTDVQTLSQFTAHFISDTDEDRGCNFAAYVPLEEGTPLQMAEWIKYLGTFTNSENRANAVYDAVKTNYLCLSKVAANLGTRFKPVVAWIEFTQVCSCKPVKWECGHLLKKVTSYSMSQMQEQKLLMQLLRIRDLIVQIQRIWITSMLFCV

SEQ ID NO: 223516 - protein, 495 aa, Zea Mays
MLFRSLGGTMLWNMFQWFFAAAKGCGFGVFPIFGLEAYKHGFYFDFSMSNIGIGMLCPYTITVSMFIGSVVSWGLVSPYLATKAGVWYSSHLSPSSLSGIRGYKVFIGVSMILADGLFNFLSIVAYTLHTMRKRRSRQQPIIIQGGGCGGGSEADDGDTQPLPFHCLNAAAEQPKKSFDDRRRAQVFLRDHISNSVNIACYVLLSMVSVAAIPYLYPQMRRAHVALIYLAAPVVAFCDAYAFGVTDMNLSSTYGKLAMVLVGSSVGRNDGGVVAGLVACGIVMGTMSNANNLMQDLKTGYLTLTSPHTVFISQAIGTALGCVVNPVMFWAFYRVVQNGDTDVFDAPYARVYRSIAMLSAGQDGIPMHSLWLCKLFFALALALSVFREVAMWKRWRVARYIPSIICVAIAFVVPARIPIDMFVGSLVLYLWRRADPSKAPTFSMAVASGMICGDGLGMLLSSTMALMHARAPICIKFMSRTDNVKLDAFLATLPVT

SEQ ID NO: 223517 - protein, 554 aa, Zea Mays
MVLESYERAYNNMVRVQQLSELEEVIDYCTLPMESPIADGRRELIRNMWNERIKGTKRNVEVWQALLAVRELVLPPNEDRDTWIKFAELCWKNGRISQARSTLVKLLQFDPESSPELTLYHAHPQVALAYLKYQYAVGDELKRRDAFSKLQELSVQVATTMGNLPGTSANHGTMSNAGVPLIARVYLTLGSWKKALSPALDDDSIQEILISYHNATLSAKDWGKAWHIWALFNTEVMSRYTFRGRPDIAGKYVVAAVTGYFYSIACASTTKGVDDSLQDILRLLTLWFNHGDTSEVQTALQKGFSLVKIEMWLVVLPQIIARIHSNNRVVRELIQSLLVRIGKGHPQALMYPLLVACKSISILRQRAAQEVVDKIRQHSGGLVDQAQLVSKELIRVAILWHEMWHEALEEASRMYFGEHNIEGMLAVLEPLHAMLERGDETIKENAFIQAYGHELLEAHECCLKYRATGEDAELTKAWDLYYHVFRRIDKQLPSLTTLDLHSVSPELLKCRKLELAVPGTYAADSPLVTIEYFVPQLICYNVQTKAKKADNSWK

SEQ ID NO: 223518 - protein, 959 aa, Zea Mays
MDHILFVLRTPDERASGFVALGEMAGALGVELVPYLPAITSHLQDAIAPRRGRPSLEAISCVGSFAKAMGPAMEPHIRSGLLDAMFFAGLSDKLIDALESISTSIPSLLPTIQERLLDCISQALPKSSIRPGASVGRASRSNNLQQFVDSNSPVLVQLALWTLANFNFKGHELLEFARESVILYLEDEDSSTRKAASLCCCKLVAHSLSASSASQFGSNRTNRIGGAKRRRLVEEIVEKLLMAAVADADVGVRSSVFKALYRNPAFDDFLAQADILTSIFVALNDEEYDVRELAISVAGRLSEKNPAYVLPALRRYLIQLLTYLDQSMDSKCREESARLLGCLIRSCARLILPYIAPVHKALVTRLCEGTGPNANNALAAGVLATVGELAKVGGFAMRQYLPELMPVVVDSLLDGGAVSKREVAVSTLGQIIQSTGYVIAPYNEYPPLLGLLLKLLNGELEWSTRLEVLKVLGIMGALDPHAHKRNQHNLPGQHREVLRPTIETAQHIVSMEELPTDYWPSFSASEDYYSTVAISSLMRILRDPSLSSYHQMVVGSLIFIFKSMGLGCVPYLPKVLPDLFRAVRMCEDGALKEFITWKLGTLISIVRQHIRKYLQDILSLISELWTSSFSLAAPNRTIQGPQGSPVLHLVEQLCLALNDEFRMYLLHILPSCIQVLGDAERCNDYYYVPDILHTLEVFGGNLDEHMHLVAPVLVRLFKVELVDIRRRAIVTLTNLIPKVQVGTHVSALVHHLKLVLDGNNDDLRKDAAEALCCLAHALGEDFTIFIPSIRKILVKHHLRYRKWDEIENRLLRRELLITENLSVQKYTQCPPDVIRDPLDDCDGTPSEIADDTQRQARSHQVNDVRLRSAGEASQRSTREDWAEWMRHFSIALLKESPSPALRTCARLAQLQPSVGRELFAAGFASCWAQMSESSQEQLVRSLKTAFSSQTFLLKFLPRC

SEQ ID NO: 223519 - protein, 959 aa, Zea Mays; identical to SEQ ID NO: 223518

SEQ ID NO: 223520 - protein, 718 aa, Zea Mays
MAAVADADVGVRSSVFKALYRNPAFDDFLAQADILTSIFVALNDEEYDVRELAISVAGRLSEKNPAYVLPALRRYLIQLLTYLDQSMDSKCREESARLLGCLIRSCARLILPYIAPVHKALVTRLCEGTGPNANNALAAGVLATVGELAKVGGFAMRQYLPELMPVVVDSLLDGGAVSKREVAVSTLGQIIQSTGYVIAPYNEYPPLLGLLLKLLNGELEWSTRLEVLKVLGIMGALDPHAHKRNQHNLPGQHREVLRPTIETAQHIVSMEELPTDYWPSFSASEDYYSTVAISSLMRILRDPSLSSYHQMVVGSLIFIFKSMGLGCVPYLPKVLPDLFRAVRMCEDGALKEFITWKLGTLISIVRQHIRKYLQDILSLISELWTSSFSLAAPNRTIQGPQGSPVLHLVEQLCLALNDEFRMYLLHILPSCIQVLGDAERCNDYYYVPDILHTLEVFGGNLDEHMHLVAPVLVRLFKVELVDIRRRAIVTLTNLIPKVQVGTHVSALVHHLKLVLDGNNDDLRKDAAEALCCLAHALGEDFTIFIPSIRKILVKHHLRYRKWDEIENRLLRRELLITENLSVQKYTQCPPDVIRDPLDDCDGTPSEIADDTQRQARSHQVNDVRLRSAGEASQRSTREDWAEWMRHFSIALLKESPSPALRTCARLAQLQPSVGRELFAAGFASCWAQMSESSQEQLVRSLKTAFSSQTFLLKFLPRC

SEQ ID NO: 223521 - protein, 560 aa, Zea Mays
MAFLFGAFLGLVVGVAVVMAFARFENSRAEQRRELAATAAAFSKLTVQDLRKLIPPEFYPSWVSFTQKQKLKWLNQELTKIWPFVNEAASELIKTSVEPIFEQYKSFILASLHFSKLTLGTVAPQFTGVSILESDDSAIIMELELQWDGNPNIVLDIQTTLGISLPVQVKNIGFTGVLRLIFKPLVSEFPCFGAVCCSLREKVEFTLKVIGGEMTAIPGISDAIEGTIRDTIEDTLTWPNRIIVPIVPGDYSDLELKPTGVLEVKLVEARDLKNKDLVGKSDPFALIYIRPLHDKTKKSKTINNDLNPIWNEHYEFVVEDISTQHLTVKIYDDEGLQSSEIIGCARVDLADIQPGKVKDLWLDLVKDLEIQRDKKPRGQVHLELLYYPYAKHEGVPNPFANQIQLTSLEKVLKTESNGYDINQRKNVIMRGVLSVTVISAEELPPMDIGGKADPFVVLYLKKGETKKKTRVVTDTLNPIWNQTFDFMVEDALHDLLMVEVWDHDTFGKDYIGRCILTLTRVILEGEFQDTFVLQGAKSGKLNLHFKWTPQPIYRDRDRDQ

SEQ ID NO: 223522 - protein, 947 aa, Zea Mays
MVSRGLFGWSPPHVQPLTPVSETSEPPESPSPYAADLGLGGDGAPPPDDDAQPPLDDADDDPDPPPAAVPFKRLFACADRLDWALMVAGSLAAAAHGVALVVYLHLFGKAINSLHAHGRHTHDLFHDINQHALYFLYIAIGVFFAAWIEVSCWILTGERQTAVIRSKYVQVLLNQDMSFFDTYGNNGDIVSQVLSDVLLIQSALSEKVGNYIHNMATFFGGLVIGLVNCWQIALLTLATGPFIVAAGGISNIFLHRLAENIQDAYGDAASIAEQAILYIRTLYSFTNETLAKYSYATSLQATLRYGILISLVQGLGLGFTYGLAICSCALQLWVGRFLISHGRANGGEVVVALFAIILSGLGLNQAATNFYSFEQGRIAAYRLYEMISRSTSTVNQDGSTLSSVQGNIEFRNVYFSYLSRPEIPILSGFYLTVPARKTVALVGRNGSGKSSIIPLMERFYDPTLGEVLLDGENIKNLKLEWLRSQIGLVTQEPALLSLSIMENIAYGRCATTDQIEEAAKTAHVHAFISSLEKGYETQVGRAGLSLTEEQKIKLSIARAVLSNPSILLLDEVTGALDFEAEKAVQEALDILMLGRSTIIIARRLSLIRNADYIAVMEEGQLVEMGTHEELLNLDGLYAELLRCEEAAKLPKRTPMRNYKEPSSFQIERDSSAGHNFQESSSPKMSKSPSLQKTHGFLTFRTSDANHNSHESPNIQSPPSEQMAEARLPMVASERAPSIKRQDSFEMKLPDLPKIDVPLHRQSSNTSDPESPISPLLTSDPKNERSHSKTFSRPLVIFDSFHAEDSKQQHTKAPSFWRLAELSFAEYFYALLGSAGAACFGSFNPLLAYTISLIVVAYYKIGVRDVHAEVNKYCSFIVGMGIITVLANFLQHFYFGIMGEKMTERVRRMMFSGYIGHSCCTSSWYVTTMACCSCCIGNVTHPYHFCGC

SEQ ID NO: 223523 - protein, 328 aa, Zea Mays
MGNPPELYHKILNIPKDTSPHEIRAAYKNLVKKWHPDKHPPSSRPEAEARFKAISEAYEENRGVFELCNDGRAGERTRGAFGGAGGGGGGGLGAGVGARMERTRSDGFCTRSAPGTPAREFKKVYSSGDPGGRRAFAEFSSSIVRKAPPLERKLECTLEELCRGCKKEVSFTRDVVTKNGSTVKKEVTQTVVVKPGWRKGKQVVLEGMGDERPGCLPGDAILTVSEKRHPAFKRVGDDLVLKAEVPLVGALTGWSFSFRLLGGRKVSCSFQDEVVRPGYEKVIAGEGMPVPGQKGARGDLRVKLDVVFPKELTPEQRAGLAEILRGSC

SEQ ID NO: 223524 - protein, 124 aa, Zea Mays
MASSSSSTPAAVREMQKDLEVQANALSKIQKDIAKNHQVRKQYTIQELELLSDGANVYKLIGPVLVKQDLAEAKANVKKRIEYISAELSKRMDRALKDLEEKQNSKKESIFKLQQRMQAVQAKA

SEQ ID NO: 223525 - protein, 55 aa, Zea Mays
MASLLCRNEYGKDGADLSVVFIFTWYRCELFPSRHFMTVYSCLALLHLMFTVRNF

SEQ ID NO: 223526 - protein, 170 aa, Zea Mays
MFDISMAGPVAGAALSFSMFFVGLLLSSNPVGASDLVEVPSQLFQGSLLLGLISRATLGYRAMHAATVSIHPLVIAGWCGLTTSAFNMLPVGCLDGGRALQLGGPLSLPWGLYVLICQRTPEKPCLNDVSDVGSWRRAALIASVFLVVLTLIPLWDELAEELGVGLVSSF

SEQ ID NO: 223527 - protein, 387 aa, Zea Mays
MVPTSPVEIMYHCPEEEIAFGPSCWLWDYLRRSQASGFLLPLSGGADSSSVAAIVGCMCQLVIKDIEKGDEQVKADALRIGQYKDGAIPMDSRELAKRLFYTVYMGTENSSEDTRSRAKRLAEEIGSFHLNVPIDSIVSAFLSLFETLTGKRPRYKVDGGSNTENLGLQNIQARIRMVLAFMMASLMPWVHNKSGFYLVLGSSNVDEGLRGYLTKYDCSSADVNPIGSVSKQDLRAFLRWAAIHLKYSSLAEVEAAPPTAELEPIRANYNQNLCHSWCGRLSPSEVADKVKHFFKYYAINRHKMTVLTPSYHAESYSPEDNRFDLRQFLYNSRWPYQFRKINELVQEMDKDGKWGTSAEGKLGAQTGAQGTGMGVVAAGSANPSAGF

SEQ ID NO: 223528 - protein, 537 aa, Zea Mays
MNASGSHHQLRKLNLRIDSIRSATQTCGGVYMYANQQGCDGGRLYYDGCCCIAVNGDLVGQGSQFSLKDVEVLDALVDLDAVSSYRASVSSFREQASHKTNVPFVKVPYKLCQPFRSGMVPTSPVEIMYHCPEEEIAFGPSCWLWDYLRRSQASGFLLPLSGGADSSSVAAIVGCMCQLVIKDIEKGDEQVKADALRIGQYKDGAIPMDSRELAKRLFYTVYMGTENSSEDTRSRAKRLAEEIGSFHLNVPIDSIVSAFLSLFETLTGKRPRYKVDGGSNTENLGLQNIQARIRMVLAFMMASLMPWVHNKSGFYLVLGSSNVDEGLRGYLTKYDCSSADVNPIGSVSKQDLRAFLRWAAIHLKYSSLAEVEAAPPTAELEPIRANYNQLDEIDMGMTYEELSIYGRLRKIFRCGPVSMFQNLCHSWCGRLSPSEVADKVKHFFKYYAINRHKMTVLTPSYHAESYSPEDNRFDLRQFLYNSRWPYQFRKINELVQEMDKDGKWGTSAEGKLGAQTGAQGTGMGVVAAGSANPSAGF

SEQ ID NO: 223529 - protein, 388 aa, Zea Mays
MRLLRVATCNLNQWAMDFDTNLRNVKESIKRAKAAGAVIRVGPELELTGYGCEDHFLEQDTTAHAWECLKDILTGDYTDNILCSIGMPVIFNSVRYNCQVFCLNRKIIMIRPKMSLANDGNYREFRWFSAWTFKGEIVDFQLPVEVSEAISQDTVPFGYGYMRFIDVSLAAETCEELFTANAPRIDLALNGVEVFMNASGSHHQLRKLNLRIDSIRSATQTCGGVYMYANQQGCDGGRLYYDGCCCIAVNGDLVGQGSQFSLKDVEVLDALVDLDAVSSYRASVSSFREQASHKTNVPFVKVPYKLCQPFRSGMVPTSPVEIMYHCPEEEIAFGPSCWLWDYLRRSQASGFLLPLSGGADSSSVAAIVGCMCQLVIKVLKIPDHVPKG

SEQ ID NO: 223530 - protein, 561 aa, Zea Mays
MRLLRVATCNLNQWAMDFDTNLRNVKESIKRAKAAGAVIRVGPELELTGYGCEDHFLEQDTTAHAWECLKDILTGDYTDNILCSIGMPVIFNSVRYNCQVFCLNRKIIMIRPKMSLANDGNYREFRWFSAWTFKGEIVDFQLPVEVSEAISQDTVPFGYGYMRFIDVSLAAETCEELFTANAPRIDLALNGVEVFMNASGSHHQLRKLNLRIDSIRSATQTCGGVYMYANQQGCDGGRLYYDGCCCIAVNGDLVGQGSQFSLKDVEVLDALVDLDAVSSYRASVSSFREQASHKTNVPFVKVPYKLCQPFRSGMVPTSPVEIMYHCPEEEIAFGPSCWLWDYLRRSQASGFLLPLSGGADSSSVAAIVGCMCQLVIKDIEKGDEQVKADALRIGQYKDGAIPMDSRELAKRLFYTVYMGTENSSEDTRSRAKRLAEEIGSFHLNVPIDSIVSAFLSLFETLTGKRPRYKVDGGSNTENLGLQNIQARIRMVLAFMMASLMPWVHNKSGFYLVLGSSNVDEGLRGYLTKQFILSILPWPRLKLHHLLPSLSQYEQTTISWMK

SEQ ID NO: 223531 - protein, 587 aa, Zea Mays
MRLLRVATCNLNQWAMDFDTNLRNVKESIKRAKAAGAVIRVGPELELTGYGCEDHFLEQDTTAHAWECLKDILTGDYTDNILCSIGMPVIFNSVRYNCQVFCLNRKIIMIRPKMSLANDGNYREFRWFSAWTFKGEIVDFQLPVEVSEAISQDTVPFGYGYMRFIDVSLAAETCEELFTANAPRIDLALNGVEVFMNASGSHHQLRKLNLRIDSIRSATQTCGGVYMYANQQGCDGGRLYYDGCCCIAVNGDLVGQGSQFSLKDVEVLDALVDLDAVSSYRASVSSFREQASHKTNVPFVKVPYKLCQPFRSGMVPTSPVEIMYHCPEEEIAFGPSCWLWDYLRRSQASGFLLPLSGGADSSSVAAIVGCMCQLVIKDIEKGDEQVKADALRIGQYKDGAIPMDSRELAKRLFYTVYMGTENSSEDTRSRAKRLAEEIGSFHLNVPIDSIVSAFLSLFETLTGKRPRYKVDGGSNTENLGLQNIQARIRMVLAFMMASLMPWVHNKSGFYLVLGSSNVDEGLRGYLTKYDCSSADVNPIGSVSKQDLRAFLRWAAIHLKYSSLAEVEAAPPTAELEPIRANYNQTWE

SEQ ID NO: 223532 - protein, 149 aa, Zea Mays
MSMGAVSREVSSACERLCFICPSLRTRSRHPVKRYKKLLAEIFPRTQDEGPNDRKIGKLCEYISRNPMRVPKITVYLEQKCYKEFRAERYGSVKVVMAIYRKVDSTYMFNLENQIPKLCHLAQEMGEKEKICILHAAGLQALSSMVFVS

SEQ ID NO: 223533 - protein, 645 aa, Zea Mays
MAAAAALLLGEDGRGYELARRLEACGAWREWLGDDSAHAALAQHLTSPATWDAFLYPAASPSPPPRPLLLLQLRVRALLFDKASAALLLPPRGAAPVSLHSINANYLRLHGDDIYFSLEDEQEDNTQHQVHSRTAFSPSRDGSMLSQRHNRYEELPDTWYKPYADKFRIWHSKLHSGDKEIPKRTPEGMSDYLKICSVHKRKRAVFMDDPSISAPILENGPSLHSKNAGEFSNSTDELIPEIRFPSDCVPESAIPKTSGISRANKIEVHGVLDNLPAPSSRNTAMLERFGMVPEYYKTGNKYRGKDGSRVEGKSLSQEQALLMTKQLVARYLANSGFESGTVVSIDVLSEIIIKHICKLGRNLKLLTDSYRKQFSSIELLKMFLQTVGYSNIGSLMEITKMGNRVANYPIHQDAQVLQTQNAISIHAQQLPRQFPPQMLQNLTPQQQQQLQNLTPQQQQLLQQQQWLRRNQLCSPRGPLTMADKNQPMVNVKQQLLHQQQQQLQQQQLQQQQQQLQQQQHQQQLNQQQQQLQQQQQQLQQQQQQFTQQQQLQQQQQQLQQINQQQHLQQQQQQQLNQQQLQQQQQQMTMSGNQNAQLAQQFKQVSSMSAYGMRMPPVKVEAFHELVSGDSSLKHDNDPNKLTSPK

SEQ ID NO: 223534 - protein, 373 aa, Zea Mays
MARKCSSCGNNGHNSRTCGGHSRTAAAFENNGGGVRLFGVQLHVGSSSPVAVAMKRCFSMECLSPPPPLPPPPAAPAYYAAALAAANSSSPSASASASSSSSLVSVEEAQAPEKMASGYLSDGLVGRAQAERKKEACLSYVNNLSKKKVFFSGFSDRPSPGVPWTEDEHRRFLAGLEKLGKGDWRGISRHFVTTRTPTQVASHAQKYFLRQSSLAHKKRRSSLFDVVENAAERATTTSSRERPRLTVTDAIIATASAAAPGTTTAALPALSLGIRRPARPEYHAALPPNSLSLQLPRCSAAMGSASPSPSLALALAGPKHKHPSPSSLTAAKASSSGQAPDLELKISTGRQSEHQVQTGSPPRTPFLGTIRVT

SEQ ID NO: 223535 - protein, 239 aa, Zea Mays
MAVSTTRSPAAIDRHAVRLITRVSIAMVVVATLSLLYLLRHASIYCFPASHQPALTISLAPFPRSSCDAASRRLVPPDHRLAKLRASPRWRRRAASLATSAFPPLRGLGILAAPSRVLCLAAGAGHAVDAFRAAGTRDAIGVDLVEFPPLVRRADPHHPPFSDGAFDLVFSDDPSATSGALFPSRLAREAERAVRRGGGIALAFDREIETVAVATLFKRSRVLDVKDVTLDGSQASGRS

SEQ ID NO: 223536 - protein, 75 aa, Zea Mays
MHPIRAGEEGERGEQQWRRNLRPRRKRNWGADHHARIVGGTGTDGTPIIAGIAKFMDILTTGLVTSPLSCNTKLQ

SEQ ID NO: 223537 - protein, 495 aa, Zea Mays
MALNRSCFLMIQFLPHIFGCRLGQFHLALLSQVNTLHISCPEKAAHDQSQGKDNLFVSSTDIRKKQDSVVPELAPKIRNDRALPCGTLTDRRETLGGDRKRKHTKMSQDPSAFLPSKNDLLHLKSKVPATTSNVALSFDDDPLCLQQGNNTICVTEGDMDKAPSFSFPSKVSCGGNGCTSSKFASLIPFEEMVRENCLKLLNLDDDADEEKFRKAKERPHSPNLSIIRPRRTKLPTYAEPHSLGRSLNGCPALGSDAIDSKTRSKASEVKEPVIQKSTQNYIQLDPSSNTIECSGIAKPLFVNDKSNAAVNVSCSTSLVVVPASTSFDSLLHEHVAQNSVASSAEALDSISRPMLSGGGHSDSILHLSKEVSNKNNSHLICDKSSPGLQANVRTSETTVTKPNNSVSNSLLRHHHGSENPPLHLVGFTRMKRSKMINIFRYWEILSSQSQKHSDEASVDGPLLDKVSTDTMLPIEFTEETFVDGNFASSAFSSSG

SEQ ID NO: 223538 - protein, 106 aa, Zea Mays
MATPTSTSAWARSCNVNLNTLMNMFSVLGAGGGLGGRNASNGSGPPCLRRTRDVHAAIAREQLRQPHRRVAPALVSQARVTVGADTEEGMIHAEQPKARCHLRCHA

SEQ ID NO: 223539 - protein, 87 aa, Zea Mays
MGHCSIDGVYRNDLNCHFGQNHNSSTYVRKSKDLSVFHGLKFMMSKFDLFLIVYHILRIILLPIQQIPWGEHLIQLAGKQDLVGSAL

SEQ ID NO: 223540 - protein, 62 aa, Zea Mays
MIVVSALRKSWRANYSYLQVHPTWSFKNCVSSPIDQYYPSGYQRHPSLSSQVNSVAKSYEKI

SEQ ID NO: 223541 - protein, 62 aa, Zea Mays; identical to SEQ ID NO: 223540

SEQ ID NO: 223542 - protein, 62 aa, Zea Mays; identical to SEQ ID NO: 223540

SEQ ID NO: 223543 - protein, 221 aa, Zea Mays
MYIAIKRITPLAVLVAGCMRGKGKPPTQVILSVICTANGVLVAALGDFSFDLYGYYMALTSVFFQTMYLILVEKSGAEDGLSSVDLMFYNSILSLPFLFFLIIATREFPHSLTVLSAKAASLMFGVVLVISLMMGIVLNFTMFWCTIVNSALTTTIVGVLKGVGSTTLGFDLLGGVEVHALNVTGLVINTFGGLWYSYAKYKQKRKTPRKIQHDVESHAHK

SEQ ID NO: 223544 - protein, 169 aa, Zea Mays
MKITSPPTGSEIALALRVLEGCCLLYSRCTALAHKYKAVKVLLNILASRGPTEQGVCLDTLISLMLDSPSNQMDFEEYSGLEKVAELLKDVQVEKHIRLKCGEFLLLLIGHVFVKENSPIHEQMKNLFGEQCASLIWAASRFGSTLDAEQRQTTLQIQAMRVVESLEPY

SEQ ID NO: 223545 - protein, 139 aa, Zea Mays
MNTQDGRRSPGAFCYWHLAVAPYLLGGFASFFLLPRLRCICIQLAALLALLCVIWANLTAFWAQLVVAYPVGPCSQLLSQAYSEWVASQPNMCSMFTKSWARMFSQYKEKNIFYVYQLWLKLVFSSSTIKTQHSSFIIF

SEQ ID NO: 223546 - protein, 117 aa, Zea Mays
MTAKAKATEPARGGGVNAHAVQAELIGIPRLWSVCAPPPAAGAMAMGSLAFATALVFVFVFAIAVPAVAAAAQAPAPAPTSDGTSIDQGIAYLLMIMALVLTYLIHPLDASAPYKLF

SEQ ID NO: 223547 - protein, 732 aa, Zea Mays
MGGLCDYVGAVAWTQFRSVLNFNFNPQDQYLKIKMVNFGKKLMADQIPEWKGYYINYKLMKKKVKQYGQQLQQGEKDRRRVLKDFSKMLDDQIEKIVLFLLEQQGLLASRIEKLGKQRAILQEQPDISGIAELREAYREVGINLIKLLKFVDLNATGIRKILKKFDKRFGYRFTDYYVTSRSNHPYSQLQQVFKHVGVGAVVGALSRNLAELQERQGSYLSIYDQPSSALKDPIIDMINSSVDKLTRSTNFLRFLGQHAMIVDEESPSTAGEEEIEDQKYHFMSLMLNLVNTFLYMVNTYIIVPTADDYSVSLGAASTVCGVVIGSMAVAQIFSSIYFSAWSNKSYFKPLVFSSIVLFLGNICYAMAYDMKSLTVLIIGRLLCGMGSARAVNRRYISDCVPARIRMQASAGFVSASALGMACGPALAGLLQWKFKVYMVTFNQSTLPGWVMAVAWLLYLIWLWFSFKEPNRATEVNEAPQNPASGQTVDIGRLENGIAQPLLKDSVDKQNEDEDEVDDIEETADDSRKPATSIGSAYRLLTPSVKVQLLIYFMLKYAMEILLSESSVITNHYFSWNTSAVAIFLAILGLTVLPVNAVVGTYISNMFEDRQLLMVSQITLLVGIIFSFKVTSTYYVVQYVVSALVTFVSAEVLEGVNLSLLSSVMSSRLSRGTYNGGLLSTEAGTLARVVADCTITAAGYLGVGKLLNVTLLPSLVICVASIACTFLTYNSLF

SEQ ID NO: 223548 - protein, 697 aa, Zea Mays
MGGLCDYVGAVAWTQFRSVLNFNFNPQDQYLKIKMVNFGKKLMADQIPEWKGYYINYKLMKKKVKQYGQQLQQGEKDRRRVLKDFSKMLDDQIEKIVLFLLEQQGLLASRIEKLGKQRAILQEQPDISGIAELREAYREVGINLIKLLKFVDLNATGIRKILKKFDKRFGYRFTDYYVTSRSNHPYSQLQQVFKHVDPIIDMINSSVDKLTRSTNFLRFLGQHAMIVDEESPSTAGEEEIEDQKYHFMSLMLNLVNTFLYMVNTYIIVPTADDYSVSLGAASTVCGVVIGSMAVAQIFSSIYFSAWSNKSYFKPLVFSSIVLFLGNICYAMAYDMKSLTVLIIGRLLCGMGSARAVNRRYISDCVPARIRMQASAGFVSASALGMACGPALAGLLQWKFKVYMVTFNQSTLPGWVMAVAWLLYLIWLWFSFKEPNRATEVNEAPQNPASGQTVDIGRLENGIAQPLLKDSVDKQNEDEDEVDDIEETADDSRKPATSIGSAYRLLTPSVKVQLLIYFMLKYAMEILLSESSVITNHYFSWNTSAVAIFLAILGLTVLPVNAVVGTYISNMFEDRQLLMVSQITLLVGIIFSFKVTSTYYVVQYVVSALVTFVSAEVLEGVNLSLLSSVMSSRLSRGTYNGGLLSTEAGTLARVVADCTITAAGYLGVGKLLNVTLLPSLVICVASIACTFLTYNSLF

SEQ ID NO: 223549 - protein, 153 aa, Zea Mays
MVVYVGDGNNIVHSWLLLAAVLPFHFVCACPKGFEPDANTVEIARSAGISKIEITNSPREAVKGADIVYTDVWASMGQKEEADYRKQKFQGFTVDEALMEIAGPQAYLMHCLPAERGVEVTDGAIEAPNSIVFPQAENRMHAQNAIMLHVLGA

SEQ ID NO: 223550 - protein, 266 aa, Zea Mays
MAPAPAAASAGRKSHVTVLLLYVVCGLILLLLLASYSPRLQPHAHGRSLHRRLKLHPKSSLPSDASSGGNGGQQKTQHQNHHAASFDPTIAELERRLDDKEWEREHYSLLHGGEPDDHMKEWEEFLKEEEDFINDDDRFNIADRIRALFPKIDVAPQDGFVSLDELTAWNLQQARADQHHRSAREMELYNKNGDEIVSFEAFNALRQESHGEGNMLGFEWWKEDHFNASDANADGFLDKTEFNDFLNPSDSDNPKIINLLCKQEIR

SEQ ID NO: 223551 - protein, 94 aa, Zea Mays
MNSIISGRMSQSSELAHPIEKHSIGCMSAPWTGDGCAELLEGKGSLYSCLVISVISTEVTAYPRGLPRHVNPSRGAGTFSLGLELVIKDIWLSI

SEQ ID NO: 223552 - protein, 381 aa, Zea Mays
MKDIETRFMCIVEAGNKVSRMLETKKILLDICAKIPGHCIADSEEQKVHVIAASQHNHGVVWSSYARKARATARFTRESKATTKRCAGIIHLQKLARRPWWVVSLEEELMAASSCIACNNGSTDEKEEKRKCDLVGYEALPEWLKDNEFIHGYYRCEWPMKETVLSIFSIHNETLNVWSHLLGFLLFLCLAIFTAMVIPRNGSSRSSNSAAYQLGDLVEMANMTVALRHEALAACFLLPPSAAALSEDGQQQIPTSCPPNTSSSHHHAIQIQHWYGGHRGRRHRRRPHHAVAAVRVPGRRDGVPADEQRVSPDPVPLGAHGVRDAPARLRRHRRADRHLFLPARLLLLPLQPGAAAALHGLHHGAGRRRRDGVAGPRVPGA

SEQ ID NO: 223553 - protein, 300 aa, Zea Mays
MADQLGSYTIRSHGMILARLHMYDWIILLLLAVIDGLLNIIEPFHRFVGKDMMTDLRYPMKGNTVPFWAVPLIGIILPWAIFVGIYFKKKNFYDLHHGILVITDAIKDGVGRPRPDFFWRCFPNGNDVYDNITTGVICNGVKSVIKEGHKSFPSGHSSWSFAGLGFLAWYLAGKLTAFDRKGHIAKLCIVFLPLLTAALVAVSRVDDYWHHWQDVFAGGLIGLTVASFCYLQFFPYPFDGDALWPHAYAVRLAEEGNSRNANSYSVRPTEIETVDIPGHGGIITLRDTLNDVESGSARRL

SEQ ID NO: 223554 - protein, 88 aa, Zea Mays
MMAMAWFCVLYGNICRWELIIKNPWLADAAAAVLLSSHACENFFSGSSSVISRHLVSLYPSAVGCSTMWSESNATTTTTPPSRSLMNL

SEQ ID NO: 223555 - protein, 90 aa, Zea Mays
MQIHRDANGSTLLKGFRKPSPNNNLLEGSLLKQLANKSISGGVAAVLAERDKEEMEMDIAKLEVGSMETSVICRSDGPLILAYLRKPRQT

SEQ ID NO: 223556 - protein, 568 aa, Zea Mays
MSEAPQKHQKYVASVLGLPQSKVVCKTKRIGGGFGGKETRSAIFAAAASVPSFCLRRPVKLVLDRDVDMISTGQRHSFLGKYKVGFTNEGKILALDLEIYNNGGHSLDLSLAVLERAMFHSENVYDIENIRINGQVCFTNFPSNTAFRGFGGPQGLLIAENWIHHIATELQRSPEEIKELNFHNDGVVLHYGQLLQNCTISSVWDELKASCNFVEARKAINNFNSNNRWRKRGIAMIPTKFGISFTAKFMNQAGALVQVYTDGTVLVTHGGVEMGQGLHTKVAQVAASSFNIPLSSVFISETSTDKVPNASPTAASASSDLYGAAVLDACQQIKVRMEPIASKGTHNSFAELAQACYMERVDLSAHGFYATPNIGFDWTIGKGTPFNYFTYGAAFAEVEIDTLTGDFYTRTADIVMDLGFSINPAIDIGQIEGAFIQGLGWAAIEELKWGDDNHKWIRPGHLFTCGPGSYKIPSVNDIPLNFKVSLLKGVPNPKAIHSSKAVGEPPFFLGSAVLFAIKDAISAARAEEGHLDWFPLDNPATPERIRMACVDSITKKFAGIDYRSKLSV

SEQ ID NO: 223557 - protein, 320 aa, Zea Mays
MLVPSAADGEDRAGILAMFQVTSFKCGGVCVGAAIHHTAADGLAALDFVNTWAAIASKGVDEAAPAPRPWLDRTLLRARSPPDVRFDHSEYSPRGGGGPKTARVPFDSAILPMSKTQVDALRAGKKVSTFKAVVAHVWRCACIARGLAGDEDTRLYMTADARSRVRPPLPEGYLGNAIFRASAVATAGDVVSEQLDAVAGRVSGATARLDDEYVRSLVDYLEQVVGDVAGLRKGEWVMPETDLWVISWQGLPIYDADFGWGRPAFMGRACLQFSGLVYLVPGPDGDGRLDVVVAMEPKSLARFKELLYELKGAGVPCTAD

SEQ ID NO: 223558 - protein, 525 aa, Zea Mays
MRNTTHQLVTARTLVGIMDDYFDGYFSEEMIESQVDQLVLEELVREKFPKLANHLDYLGLQVAWVTGPWFLSIFTNVLPWESVLRVWDVLLFDGNRVMLFRTALALLEFYGPALVTTKDAGDAVTLLQSLAGSTFDSSQLVLTARMGYQSVNETILQELSNKHRPPVISAMEERAKGLGVWTDTNGLASKLYNFKRDPEPLVSLSDSTDQLSDVGDGDTNQESDLGNMDDEYGGVIVNSEIDSLPDPKDQVAWLKLELCRLIEERRSAVLRADELETALMEMVKQDNRRQLSAKVEQFEQEISELRQALSDKQEQEQAMFQVLMRVEQELKIAEEARISAEQDAAAQRYAANVLQEKYEEAMASLAQMENRAVMAETMLEATLQYQSSQQKAMSPCPSPRPSMLDASPSQSSQNSSQEFQPRRKNLLGPFSLSWRDKNKEKPNNADDSTNTKSTNNDEMVETSNTNDEKHRETLDLNSEQRAESPKADVKMRAETPEKDNDLPGVQLVTDDLNGHHEQMQEIKLD

SEQ ID NO: 223559 - protein, 231 aa, Zea Mays
MATTAPLLSPQRACPTHLRRRLSPLHLVFPLDASARRLRLRRAPPPCSAKFGKFDASDAPAEAEEAGGATDGGLAQPVEEDDSCLPSDLEGAIRQSGKASADFVNSGGMRAIAELLIPQLEFLNEEGAQAELWALSKIFLDTLVQETGQKVTAIFPDAGAAALLKHQWKDAQFKCASLGDRKPVGPEDEVAVMIIPDHQMLEAVERITSQLSDDPVWNLCLIRLQISADPV

SEQ ID NO: 223560 - protein, 130 aa, Zea Mays
MERCTIQVCQIRPLVMWNPRLVSGDVGVGFNVRNLRRNFLSTFTTVYSMRPLPTGAVFRCFPGQWKVFYDDPNRPNRYLLARELTSRPDATDIERIFGGADEQSEEAPSLMNNVMGVFSSVSRFMRVISK

SEQ ID NO: 223561 - protein, 513 aa, Zea Mays
MSPPLHVSTLSCFLPSSFLPVRLAKGSRLSKQPNLKAAKESRRSSGARAAHPKQAEQSKAGKQPWSSGGGARPCGRRPANAQRVNRTSTRAQQEGRGSHQPGKTAARRKQKPETEVGRRPRTDRRSAGRASRERTSCAAAAVLRRLCCAGCVGWAAEYLDFTFLLGRVEVWRGPYLAITGPPPLLIRTVQNHYQKHLENHTQQNKHQHFILCLGIPIIIMWKRNPFGGKAHSGLDGRTIVVRSLKISVRNVIAQGGFSCVYLACDTVHPSKMYALKHIICNDSESLDLVMKEIQVMNLLKGHPNVVTLVAHDVVDMGRTKEALLVMEFCEKSLVSAMESRGSGYYEEKKVLLIFRDVCNAVFAMHGQSLPIAHRDLKAENVLLGSDGAWKICDFGSTSTNHKCFNKPEEMGIEEDVIRKHTTPDYRAPEMWDLYRREVISEKVDIWALGCLLYRICYFKSAFDGESKLQVLNGNYHIPEQPKYSIAVTGLIKDMLEASPNARPDITQARALID

SEQ ID NO: 223562 - protein, 316 aa, Zea Mays
MKLIKHPNVVQLHEVMASKTKIYMVLEFVDGGELFDKIEDGLLHTTCGTPNYVAPEVLADKGYDGMAADVWSCGIILFVLMAGYLPFDDANLMRLYKLICQAYFSCPPWFSSGAKKFIKRILDPNPDTRITIAEILEDEWFKKDYKPPRFEQGEDVSLDDIDAAFNDSEDRLVAEKREKPESMNAFALISRSQGFNLGNLFEKEMMGMVKRETSFTSQCTAQEIMTKIEDACGPLGFNVRKQNYKMKLKGDKSGRKGHLSVATEVFEVAPSLHMVELRKTGGDTLEFHSFYKNFSSELKDIVWKAESDANNKQTNK

SEQ ID NO: 223563 - protein, 694 aa, Zea Mays
MKQEGRRRQHQHQHHRPPPRLELAMAHARGGGGHGHGHEEEAEAAVCLDGDSEAGEARSAGRAPPWRDQLTARGMVASLAVGAMYSVIVMKLGLTTGLVPTLNVSAALIAFVILRGWTQALARFGVATRPFTRQENTVVQTCAVACYSIAVGGGFGSFLLALNKRTYEMAGEDTEGNLPGSYKEPGIGWMTGFLFAVSFVGIVALIPLRKIMIIDYKLTYPSGTATAVLINGFHTTHGDATAKQQVNGFTKYFAISFFWSFFQWFYSGGDNCGFSQFPTFGLRAWKQTFFFDFSLTYVGAGMICSHLVNLSLLLGALLSWGIMWPLVSDLKGDWYPADMPESSMRSLQGYKAFICIALLLGDGLYNFVKVVAFTVKSLLGRSRLKNAKKDIPVLDEIQRNEIFTRDSIPTWLAYSGYLALSAVAVFAIPLMFHEMKWYYVIIAYLLAPALGFCNAYGAGLTDINMAYNYGKVALFILAAWAGKDSGVVAGLVGCGLVKSLVSISADLMHDFKTGHLTLTSPRSMIIAQAIGTAMGCVIGPLTFLLFYKAFDIGNPDGYWKAPYALIYRNMAILGVQGFSALPLHCLQLCYGFFGFAVAANLMRDLLPPKYGKWVPLPMAMGVPFLVGASFAIDMCVGSLMVFIWHIIDRSKASLMVPAVASGLICGDGLWIFPESLLALAKISPPLCMAFRSSH

SEQ ID NO: 223564 - protein, 189 aa, Zea Mays
MDSSSVGEPFYVVRKGDVIGIYKTLSECQAQVSNSVRDPSVTVFKGYSLRKDTEEYLAARGLRNALYAIDATDARDELFDDLVPCPFQQPDGAASSTLKRSQEIEIGPSKKHPKVDEQVPLPDSHLSCILEFDGASKGNPGKAGAGAIIRQPRKGSSIFVLKATLSLFVTRSKISGVLRMIIWLASARK

SEQ ID NO: 223565 - protein, 218 aa, Zea Mays
MDSSSVGEPFYVVRKGDVIGIYKTLSECQAQVSNSVRDPSVTVFKGYSLRKDTEEYLAARGLRNALYAIDATDARDELFDDLVPCPFQQPDGAASSTLKRSQEIEIGPSKKHPKVDEQVPLPDSHLSCILEFDGASKGNPGKAGAGAIIRQVDGSVVCSQLIAQLREGLGIATNNAAEYRALILGLTYAAKKGFKYIRAQGDSKLVCNQVSCDSFVIL

SEQ ID NO: 223566 - protein, 89 aa, Zea Mays
MEATVVVAAAVEAEEEEAAAAAASTPQRSGRKRPRAIGSGRYRSVSRQAVGQGRMDGDDGWKPQPLASHTADRARKRKKRCLHGLGLPT

SEQ ID NO: 223567 - protein, 563 aa, Zea Mays
MQIPASDKVYEYILFRGTDIKDLQVKSSPPPPPPQAASLHNDPAIIQSHYSQPASTSSNLPSAGGAVLPDLSSQAVQYGLQRPTFQSNLPLYQPGNAPRGSSAAPPAGNAPWGSSAEPPAGTTLSVPSMYWHGYYAPSSGLPPHLQQPLLLQPTPGLSVPQNLQYPGLNPSLPSGMQKLSELQPSLMPPINSQGSSGILPTTTAPASATLLAPESSKPQVPNMGSLFTPATSLGATFPYPSQPTPVAETSATVSQNITSFSSNKATALPGSTLSYQTASQSVSSTIAPSSSAQVEMAVPLLASSGQLLQNTSSMLSSSHSMQAPLQVASKEVKPVEPKAKVAEPLLPDPLLPDPPSQSLPENKEPILPLPKQTPQKYNGSGLHNHHNFRGRGRGRGSAFSQSVTTFTEEFDFTAMNEKFNKDEVWGHLGKKSQSRDKDGEVGDDVFDEDLEVEETDNPELSVKPVYVKDDFFDSLSSGTFGRGGPNGRGRPSERRRVDTETFGEFPRHRQPYRGGARGYRGGGRSRGSYYGGRGYGNTGTGGYGNTGTGGPGNSYSHRGYGRD

SEQ ID NO: 223568 - protein, 131 aa, Zea Mays
MGRDKSRRLYGSRHFRQRLVLATLTSTAVTIEDIRSGDASPGLRPYEVSLLRLLDKISDHHTIDLNETGTKLRYRPGVIIGGKGLEHDCGVHRGIGYFLEPLILLGLFSRAPISIRLKALWCSSGWFRSKY

SEQ ID NO: 223569 - protein, 166 aa, Zea Mays
MQADSTLPAAQRRNYKNAFHALYRISADEGVLALWKGAGPTVVRAMALNMGMLASYDQSVELFRDKFGAGEISTVVGASAVSGFFASACSLPFDYVKTQIQKMQPDANGKYPYTGSLDCAVKTFKSGGPFKFYTGFPVYCVRIAPHVMMTWIFLNQIQKFEKKIGI

SEQ ID NO: 223570 - protein, 435 aa, Zea Mays
MAVDKQADAKEREKIDAVRKLLRKQAPLSIKQAQYCDDACVERFLRWRGESVKKAAKHLRTVLSWRETVGADHIMADEFSAELADGVAFVSGHDDDGRPVFRIKQEYPKFRSPKSFVRLLVLTLEVAVACMSRSVDQLVLLFDASFFRSASAFLNLLMGTLKIVADYYPGRLHRAFVIDAPSLFSVLWKGVRPFVELAPATAVVCSLDFEDSLEDASFTAYPRTASLRFEPPPAAVTGKAGVGSASSRFSVTPTDNPVKPWYLCTIPASVGSRSVVPTSSSSPSLVGASPLSARSFSFASPAALRSTPFPRGGGAPPTPSSAVTGHKIPPPPQFPRTPRPSFLQSPSTLFAFRKDGQQTSRVERERGSFLPYLRFYRRPYDEISYRAMMRPPLGGLIPIVEKFKHKPVQQTLRRHAGLHQHQQQQHHHYQQQQRI

SEQ ID NO: 223571 - protein, 453 aa, Zea Mays
MREIISIHIGQAGIQVGNSCWELYCLEHGIQPDGLMPSDTSVGIARDAFNTFFSETGAGKHVPRALFVDLEPTVIDEVKTGAYRQLFHPEQLISHKEDAANNFARGHYTVGREVIDLCLDRIRKLADNCTGLQGFLVFNAVGGGTGSGLGSLLLERLSVDYGRKSKLGFTIYPSPQISTAVVEPYNSVLSTHSLIEHTDVVVLLDNEAIYDICKRSLDIERPTYTNLNRLISQVISSLTTSLRFEGAINVDITEFQTNLVPYPRIHFMLSSYAPIISVEKAYHEQHSVPEITNSVFEPSSVMAKCDPRHGKYMACCLMYRGDVVPKDVNAAVHSIKTKRAVQFVDWCPTGFKCGINYQPPTVVPGGDLAKGWKKGSSQRQGRILQHWRRIMRKSELKLKMRTRKLSIESSIWMHGYFPLVSVNQACLSCMVVPPIYSMFAIALHLFMVGIVEV

SEQ ID NO: 223572 - protein, 469 aa, Zea Mays
MREIISIHIGQAGIQVGNSCWELYCLEHGIQPDGLMPSDTSVGIARDAFNTFFSETGAGKHVPRALFVDLEPTVIDEVKTGAYRQLFHPEQLISHKEDAANNFARGHYTVGREVIDLCLDRIRKLADNCTGLQGFLVFNAVGGGTGSGLGSLLLERLSVDYGRKSKLGFTIYPSPQISTAVVEPYNSVLSTHSLIEHTDVVVLLDNEAIYDICKRSLDIERPTYTNLNRLISQVISSLTTSLRFEGAINVDITEFQTNLVPYPRIHFMLSSYAPIISVEKAYHEQHSVPEITNSVFEPSSVMAKCDPRHGKYMACCLMYRGDVVPKDVNAAVHSIKTKRAVQFVDWCPTGFKCGINYQPPTVVPGGDLAKVQRAVCMISNNTAVAEGWKKGSSQRQGRILQHWRRIMRKSELKLKMRTRKLSIESSIWMHGYFPLVSVNQACLSCMVVPPIYSMFAIALHLFMVGIVEV

SEQ ID NO: 223573 - protein, 144 aa, Zea Mays
MGISRDSMHKRRATGGKQKAWRKKRKYELGRQPANTKLSSNKTVRRVRVRGGNVKWRALRLDTGNYSWGSEAVTRKTRILDVVYNASNNELVRTQTLVKSAIVQVDAAPFKQWYLTHYGVDIGRKKKTPAAKKDNAEGFSSSYQ

SEQ ID NO: 223574 - protein, 225 aa, Zea Mays
MQSGDEWSQVAYVTFKDAQGAETALLLSGATIVDLSVIIAPAPEYQPPPTASAPPMSGTRVPVGGGDNNVVHKAEDVVSTMLAKGFVLGKDAVGKAKAFDEKHGFTSTAGATVASIDKKIGLTDKITTGTSLVSGKVKEMDQKFQVSDKTKSALAAAEQKVSSAGSAIMKNRYVFTGASWVTSAFNKVAKTATDVGTMTKEKMAAEEHHKGSGPSSGGHSYTPIR

SEQ ID NO: 223575 - protein, 269 aa, Zea Mays
MPVRGRRRTLPPVRTVKVTNVSLSATVQDIKEFFSFSGDIDHVEMQSGDEWSQVAYVTFKDAQGAETALLLSGATIVDLSVIIAPAPEYQPPPTASAPPMSGTRVPVGGGDNNVVHKAEDVVSTMLAKGFVLGKDAVGKAKAFDEKHGFTSTAGATVASIDKKIGLTDKITTGTSLVSGKVKEMDQKFQVSDKTKSALAAAEQKVSSAGSAIMKNRYVFTGASWVTSAFNKVAKTATDVGTMTKEKMAAEEHHKGSGPSSGGHSYTPIR

SEQ ID NO: 223576 - protein, 401 aa, Zea Mays
MWLKKTHRNPLYKAMEKMKEEMMLLGFISLLLAATSRIISGICIDSKYYNSRFSPCTKEEVQESINAEHAIAHARKHLLEVILHHSPRRNLKTSYHNHEGCREGYESFVSHEGLEQLHRFIFVMAVTHVTYSCLTMLLAILKIHKWRKWEDEAFRDNHESFSQIAYESATRRQPALTKSYSFRSWSQNNVVMWLVCFIAQFGQSVVRADYLILRKGFIMTHNLPPTYDFHNYMIRSMEEEFEKIVGVSGLLWGFVVAFMLFNVDGSNLYFWIAILPVTLVLLVGAKLQHVIATLTAEGAKMSTYGPRIQPRDDLFWFKKPEFLLWLIHFVLFQNAFELASFFWFWWQFGYDSCFIKNHLLVYCRLILGFAGQFLCSYSTLPVYALVTQYIQEGLVMHVAKW

SEQ ID NO: 223577 - protein, 75 aa, Zea Mays
MPVREMVRSDALLTKKEEERKQPLSFKESKGEKNHNSEQTFNDKTAQLTVACRFRPSLSADSELFVVSYSWRMKP

SEQ ID NO: 223578 - protein, 75 aa, Zea Mays; identical to SEQ ID NO: 223577

SEQ ID NO: 223579 - protein, 117 aa, Zea Mays
MAVGLYSLGLSPPPRLDTILFPQLRPHLRRRVPARVAAAGTSWSPAAGDSEDGVGGWWFPEYEKSMKQARGRIGFKRAVVVGLGASAAIALAGLAWRFPSSQKPANIKWICGHWTGT

SEQ ID NO: 223580 - protein, 113 aa, Zea Mays
MAVGLYSLGLSPPPRLDTILFPQLRPHLRRRVPARVAAAGTSWSPAAGDSEDGVGGWWFPEYEKSMKQARGRIGFKRAVVVGLGASAAIALAGLAWRFPSSQKRTFDVCSRNL

SEQ ID NO: 223581 - protein, 110 aa, Zea Mays
MAVGLYSLGLSPPPRLDTILFPQLRPHLRRRVPARVAAAGTSWSPAAGDSEDGVGGWWFPEYEKSMKQARGRIGFKRAVVVGLGASAAIALAGLAWRFPSSQKLRFCSGM

SEQ ID NO: 223582 - protein, 164 aa, Zea Mays
MTISFPAAAGFYERSPDLLEAAVAHIQLIIVTKFIEKVHQEIPGHGVKEQLQALCNVYALYILHKHLGDFLATGCITPRQGALANEQLGKLYAQVRPNAVALVDAFNYTDHYLGSVLGRYDGDVYPALYEEAWKDPLNETVVPEGYHEYLRPLIKQQQLKLSRL

SEQ ID NO: 223583 - protein, 70 aa, Zea Mays
MSATKHRRPTTCALRPKIANDKCIQLVHCKIQARNREKQTNRIVGVVLVFDSTESPRLKSCQAGAWCPME

SEQ ID NO: 223584 - protein, 219 aa, Zea Mays
MMRRWTPLTTASTTATSSASGTTVTSARPPVTPPPSPCPGPAAGRSVCRKTTLHRLRHATETEEAMRRRLARQPTVAPMSSTPPRCTFLIVGVLLEPGHLTSKSDVYSFGVVLLEMLTGRRSMDKKRPTGEQNLVAWARPYLNDRRRLYQLVDPRLGLNYSVKGVQKVAQICHYCLTRDSKSRPSMDEVVKQLTPLQDLNDMASASPRPRSTQRGKVHR

SEQ ID NO: 223585 - protein, 182 aa, Zea Mays
MMRRWTPLTTASTTATSSASGTTVTSARPPVTPPPSPCPGPAAGRSVCRKTTLHRLRHATGHLTSKSDVYSFGVVLLEMLTGRRSMDKKRPTGEQNLVAWARPYLNDRRRLYQLVDPRLGLNYSVKGVQKVAQICHYCLTRDSKSRPSMDEVVKQLTPLQDLNDMASASPRPRSTQRGKVHR

SEQ ID NO: 223586 - protein, 117 aa, Zea Mays
MLVWFNCIAKLGVDLFCLMPTGGGKSMCYQISALVKTCIVLVISSMIGHRLLGIVDDDHVELNNLHRQVHDKLACIVEMEKKNASLVWVSTGCAMPPPPVRDADRDPGFSLLRPRPI

SEQ ID NO: 223587 - protein, 788 aa, Zea Mays
MSRVASLSPSLSGDEVEVEEEDDEGVDGYRKGGYHAVRPGDQFAAGRYVAQRKLGWGNFSTVWLAFDVQSQRYVALKIQKSAPEFAQAALHEIEFLSEITKRDPLNCKCTIQLIDHFKHTGPNGQHICLVFELLGDSLLKLVQYNRYKGIGFDRVRQICKSILVGLDYLHNELGIIHSDLKLENILLVSTIDPSKDPIRSGLKPNLERPEGYPNGEAGLNAIENKLKMRARRVLAKLAEKRKSAVESSRSERSLDGIDLTCKIVDFGNACWADKQFTDFIQTRQYRAPEIILGAGYSFSVDMWSFACIAFELATGEILFTPKEGHGYSEDEDHLALMMELLGKMPKKIATMGTRSKEYFDRHGDLKRIRRLKLSSIERVLVDKYKISESDAREFANFLCPLLDFAPEKRPTALDCLKHPWLKHDEDKTCGSLNNNDAKSIDLVQSTGSITTVDCTNIDLTSKKGSSTGTCDKTVDAKYNTRSITSNATMNTYVQPTSGSFANRLAKNVDVNPNIGSISNRDAKSSDMKAHMGSNTISDAKSSIVKLDTGNITDRNAKPVDIKPNSDNISSRDDKSSNVDTTTSCVVKKDVKHSIRSVVNSYIKNFDAKCNTASTANSDASNSSEIKPSTRIFTSTDNAKCMDIKPISESAKSNDTSAKSNDTINANVKSNTGIVANTDAKSTDEQTNTGSVDSSGDYSADSKQNIGRVAASIQRLESSMSKVQIGKYRLRIWQVPAGVIVYLSIPANCTKLCICTQNVHGVVENIAVPFMVDALEREELYSDQPQHLF

SEQ ID NO: 223588 - protein, 407 aa, Zea Mays
MNPSPNPPPAGVDLVAATQMQLLQQMANTMIEMAQMRQECQEMRQELQEMRQELRQERLERQQQQPLPPPPPAPPRDKHREFMSHKPPTFSNSPDPLQADDWLKTVDKMLNIAQCTDQEKVLYASGRLTGPAADWWDSYCAAHAAANTITWAEFSTQFRNYHIPASLMKIKKKEFLSLKQGNMTVSEYHDKFIQLSRYAPDEVADDERKQEQFMEGLIGPLQYQLVSHTFSSFQRLLDKAIAVEHKRVQLGEMKRKTITQGQGSSSVRRRYVPPQGTPARPGGGQQSYQRPAQQTPQATPQTPHTRQDAPTVTPARPTGQGTATDTICFKCGEIGHYANVCPKRNPNTPARGNSQVKQTQTLGSNRGYSIAKVNQINVEATEDGPNIVIGEEQVVQEEVYNEEYELI

SEQ ID NO: 223589 - protein, 407 aa, Zea Mays; identical to SEQ ID NO: 223588

SEQ ID NO: 223590 - protein, 252 aa, Zea Mays
MNYNFIRPDLIVGSCLQSPLDVDKLRKIGVKTVFCLQQDSDLEYFGVDIRAIQDYSLQFKDIVHCRAEIRDFDAFDLRLRLPAVVSKLHKLINCNGGVTYIHCTAGLGRAPAVALAYMFWILGYSLNEGHRLLQSKRACFPKLEAIKLATADILTGLSKNTITLKWEADGSSSVEISGLDIGWGQRIPLTYDEEKGAWFLEKELPEGRYEYKYVVDGKWLCNEHELITKPNADGHVNNYVQVRSSCPVKWMP

SEQ ID NO: 223591 - protein, 90 aa, Zea Mays
MSRSVMCVITRHGVGEAISGDKEGQDHAAVRWEATLARQEKHQAQEETLQDGILLSSTLVPLKFCSAAHFVAEVVSIAVNRNHGWCTSVN

SEQ ID NO: 223592 - protein, 468 aa, Zea Mays
MEESDAAEGVAVQLIDGEGEFAAEGAERFMAAAGVAGCGLSYAVVSIMGPQSSGKSTLLNQLFGTNFREMDAFRGRSQTTKGIWIARCVGVEPCTVVLDLEGTDGRERGEDDTAFEKQSSLFALAISDIVLINMWCHDIGREQAANKPLLKTVFQTPLEHLEPVLREDIQKIWNSVAKPEAHKDTPINEFFNVQVTALSSFEEKEDQFREQVQQLRQRFSNSIAPGGLAGDRRGVVPASGFLFSSQQIWKVIRENKDLDLPAHKVMVATVRCDEIANEKFGCITSDTEWLDVESAVQSGPVPGFGKKLGNIVDVHLQEYDKEAVYFDEAVRKGKRQHLESRILNLVQPAFQKMLTHLRVKALEKFKTGLNSSLESGKGFAVSARDNTECSLKEFEQGCADAIIKQANWDCSKMLEKVRRDIEDHALSIRESKLSEMTRHAKVMYGKLKEILITSLAMHNFLLDLFAYL

SEQ ID NO: 223593 - protein, 1057 aa, Zea Mays
MAPSAAVPGGSEVEGSPRMAKFLCSFGGSILPRPLDGCLRYVGGETRIVMLPRDISYADLAARMRELYKDADIIKYQQPDEDLDALVSVVNDDDVVNMMEEYDKVIATGEAFTRLRIFLFSQHLDDDAASVDVHYNVDERETERRYVDALNSLGDVKSPSSPVSVEQLFGIGGNDSGIPDFAGLRHLNVPRPTHSQRYGEMDSPWSPAYVSPGQYGVHDPRDFPISPSSARFQVGAEDFDERTPDDFVRQSPKYRHYEAHSPSHMDNLVWLPPGAVIQQNAGFPGNLSRSNNFLDGSNGCDHCRSPFHKVQGSVNDPIYMNPRWTRPVQQHFDQPSMINDYPGHHANSCPDYCRPGDHYVGGQDVRLENGVYVKEQNGGHPPMFYNESHPHDRVWHVHTKQSHQRYEDPRLHHPANGRVIEPYIMDANKVYEVHSASLARSSHESPHYYHGSSEVINDTYHNQQVGGSGSYVQPAGFEESPSHHYNHSSAYGADSFYQMQQNLPPIQSLRRRANSPVHTASPYDSPHLPISNGTINTNFVRNTGDVSPRIPGLPGYDRMPNTWTPPNGSIPYRVVGHDVHAASMENTSAFGPRSNPTAAQYVQHFIAPESIQHQPGAPLREVHPERSYPEPMPSSYVDGKVAVSALPLTDQLSRLDTNTIKKPEGPDDVNSTQNVNETTPLHAVDEPSTLPHHVVVVHEVDTKQGKPTEHESRQKQHEAGATALQECGDISEDRLNFLPELIASVKKAALEDAAETRIAQSDANGAVSPVPDDDDDNEKKLDAAAAGTTDANQDPDLQGSIDRQKSSKIESTTAEAEALSKGLQTIKNDDLEEIRELGSGTYGAVYHGKWRGCDVAVKRIKASCFVGRPSERERLIADFWKEALILSSLHHPNVVSFYGVVRDGPDGSLATVTEFMINGSLKQFLRKKDRTIDRRKRVILAMDAAFGMEYLHGKNIVHFDLKCENLLVNMRDPQRPICKIGDLGLSKVKQHTLVSGGVRGTLPWMAPELLSGKSNMVSDKIDVYSFGIVMWELLTGEEPYSGMRAAEIIALKEQIRP

SEQ ID NO: 223594 - protein, 182 aa, Zea Mays
MPPLLTSPASLPSASPLLVSCIGALHRPGPFLHQRAAASVHFLAPHRKTRPPPAMSWLGKLGLSGLGGSPRASEASAALAQGPDEDQPAPGNEFAQFGAGCFWGVELAFQRVPGVTRTEVGYSQGNIHDPTYEDVCTGTTNHNEVVRVQYDPAACKYDDLLDTFWARHDPTTPNRQVRDILL

SEQ ID NO: 223595 - protein, 467 aa, Zea Mays
MRFLHMLSKAHFKMVSQICSVLNQTPMVVWRSAGLREQAQPSPTTGTLPFLMATNDKSTISPAAKITEDSTFDNDVFSFQPHLGSEQTGFSTAEKDYGAYERKQSLSNIHQQESSLQSSFTAVKDNTSATIVKAKPSSSSMFSDSHYSADQQQADETNIKVQGKGVEARSAAFAPVSAHSDASLLESQEALDVSSTLSNEEDERATHGTVSIECDGDEADAVSKRRKLELDALEATATATTSTTNTIDMGPAASRAVREPRVVVQTTSEVDILDDGYRWRKYGQKVVKGNPNPRSYYKCTNPGCSVRKHVERASHDLKSVITTYEGKHNHEVPAARNSGQGSSSAPSASQAVGSHRRQEPAQASFAHFGTASFSSFGLPPSGQLGPTTGNFGFGMVPPGMTIPVPSLGSLAPVKMVGNSSTMQGYPGLMVPGEPKAEPVSQPLIQMANASPPAYQQILSRPPFGHQM

SEQ ID NO: 223596 - protein, 82 aa, Zea Mays
MTPPTRMELIQIPAATSASRIATFLLVTIPSPSRVAGMSMESPMAAPVLASPCGGSQAPPRLLASRSEARHQVAWRTSLQST

SEQ ID NO: 223597 - protein, 550 aa, Zea Mays
MRLLLVGALLLCATAAVESKPPLDTLGIPPQDEAYYRGGVIKCRDGSGRFSREQLNDDFCDCPDGTDEPGTSACPEAKFYCKNAGHTPVTIFSSRVNDGICDCCDGSDEYDSNITCKNTCWEAGKAAREKLKKKVATYKSGVVIRNQEVERAKEAYAKDEAELAKLKGEEKILQGLVDKLKEQKRLIEKAEEEERLRKEKEEKRIKEAEKQAADEKGTPDASPDVDSKETHDHVQEDENKDHSSDNPEGLSREELGRMVASRWTGESVSEVSKDDKKGHEDEQEIPEPAKEALEDELEIPEPAEENYDGYHSEVEDDRHKYEDEEFDHESEDEYVDDHDEHVESYKSDDDQKDLTEPGHASWLDKIQQTVQNVFQKFNFFRTPVDLSEASRVRKEYDDANSKLSKIQSKISNLAEKLKHDFGKDKEFYSFYDQCFETKEGKYTYKVCAYKKASQAEGHSSTNLGRWDKFEESYRVMHFSGGDKCWNGPDRSLKVRLRCGLSNELNDVDEPSRCEYVAVLSTPALCVEEKLKELQNKLDAMSSKQPGHDEL

SEQ ID NO: 223598 - protein, 594 aa, Zea Mays
MEVVEDLYKRRQPLPSLDAIYFIQPTKENIVMFLSDMSGRSPLYKKAYVFFSSPVHKELVAQIKKDSSVLPRIAALSEMNLEYFAIDSQGFITDHERALEELFSENAEGSHKYNACLNTMATRISTVFASMREFPRVHYRIAKTIDASTMTTLRDLVPTKLAASVWNCLAKYKTTIPEFPQTETCELLIVDRSIDQIAPIIHEWTYDAMCHDLLCMDGNKYVHEVPTKNGSATEKKEVLLEDHDPVWLELRHAHIADASERLHDKMTNFISKNKAAQLHQARTDGELSTRDLQKMVQALPQYSDQIDKLSLHVEIAGKLNNIIREQCLRDVGQLEQDLVFGDAGTKELINFLRTQLVVSRENKLRLLMIYAALNPEKFESDKGAKLMQLAGLSADDMIAVNNMRCLCGPDTKKSSVGGFTLKFDVHKKKHTNRKERTGEESTWALSRFYPILEQLIENLSKGELPKDEYNCMNDPSPTVHGLPTSSSARTSPAHSMRSRRTGGTWARPRGSDDGYSSDSVLKHASSDFRKLGQRIFVFVIGGATRSELRAAHKLSSKLKRDIILGSSSLDDPPQFITKLKLMSVEELTLDDLQL

SEQ ID NO: 223599 - protein, 205 aa, Zea Mays
MATRISTVFASMREFPRVHYRIAKTIDASTMTTLRDLVPTKLAASVWNCLAKYKTTIPEFPQTETCELLIVDRSIDQIAPIIHEWTYDAMCHDLLCMDGNKYVHEVPTKNGSATEKKEVLLEDHDPVWLELRHAHIADASERLHDKMTNFISKNKAAQLHQARTDGELSTRDLQKMVQALPQYSDQIDKLSLHVEDHRTRAVIGT

SEQ ID NO: 223600 - protein, 281 aa, Zea Mays
MHIREEEATPSTVTGIMSTLTSAGQQKLKEPISPGGGSASVAGSAAERNNGGRGKGKTEIKRIENTTNRQVTFCKRRNGLLKKAYELSVLCDAEVALIVFSSRGRLYDVKGTIERYKKATSDNSSAAGTIAEVTIQHYKQESARLRQQIVNLQNSNRALIGDSITTMSHKELKHLETRLDKALGKIRAKKNDVLCSEVEYMQRREMELQNDNLYLRSRVDENERAQQTANMMGAPSTSEYQQHGFTPYDPIRSFLQFNIVQQPQFYSQQEDRKDFNDQGGR

SEQ ID NO: 223601 - protein, 115 aa, Zea Mays
MSHKELKHLETRLDKALGKIRAKKNDVLCSEVEYMQRREMELQNDNLYLRSRVDENERAQQTANMMGAPSTSEYQQHGFTPYDPIRSFLQFNIVQQPQFYSQQEDRKDFNDQGGR

SEQ ID NO: 223602 - protein, 283 aa, Zea Mays
MSRRSRENTGELPFDEDRTPASPISALKILPANSLSCKKVERRSCISLEEFICNYFLRDTPVIISGTIDHWPARTKWKDIEYLKKIAGDRTVPVEVGKNYVCSEWKQELITFSQFLDRMSSTVCPSNLTYLAQHPLFEQIKELSEDIIVPEYCYAGGGALQSLNAWFGPEGTVTPLHHDPHHNILAQVLGRKYIRLYPAFIAEDLYPHTETMLSNTSQVDLDNIDLKEFPRVENLEFIDCILEEGDLLYIPPKWWHYVRSLSTSFSVTPLLNGCTHVITNVHC

SEQ ID NO: 223603 - protein, 390 aa, Zea Mays
MRGVKFCEESYTAILLGSRFWLQAGEKAVGCGATNVSELDELSFVKELHLGTLDQLGLDRSIVCGLLDELEQLLKGIAMMKELTLRTRDYLVSFGECMSTRIFAALLNKIGVKARQYDAFDLGFITTDDFTNADILEATYPAVARRLHVEWINDPAIPIVTGFLGKGWRSGAITTLGRGGSDLTATTIGKALGLREIQVWKDVDGVLTCDPNIHPKAKPVPYLTFDEAAELAYFGAQVLHPQSMRPAREGDVPVRVKNSYNRRAPGTLITKARDMSKELDDVIEELEKIAVVHLLQNRSIISLIGNVQRSSLILEKAFNVLRRNGVNVQMISQGASKVNISLVVHDSEAKQCVQALHSAFFENGFLLEADELDVLHDGFTSHSNGTIHSH

SEQ ID NO: 223604 - protein, 253 aa, Zea Mays
MDLERPPPASAAEAAGAAACSICLDPVLACVAGRSVAKLQCGHEFHLDCIGSAFNAKGAMQCPNCRKIEKGRWLYASGRHPPADIDMGGWVTSDNYDITSELPFGFQWCPFSGFTQLASMLGVREAEPTYHTTGDHSSAASSSLVCPYLALRGFLHPVNVPSTSNSGAESTSFHRHSTGLEGHVTPDLNNAPVFHATESRNHDSEHRHLSNLPVSGTPEYSMTPFGIGVPRYDSGSQQGFRSYAHHHPLIHSR

SEQ ID NO: 223605 - protein, 270 aa, Zea Mays
MDLERPPPASAAEAAGAAACSICLDPVLACVAGRSVAKLQCGHEFHLDCIGSAFNAKGAMQCPNCRKIEKGRWLYASGRHPPADIDMGGWVTSDNYDITSELPFGFQWCPFSGFTQLASMLGVREAEPTYHTTGDHSSAASSSLVCPYLALRGFLHPVNVPSTSNSGAESTSFHRHSTGLEGHVTPDLNNAPVFHATESRNHDSEHRHLSNLPVSGTPEYSMTPFGIGVPRYDSGSQQGFRSYAHHHPLIHRSSLFSMERMGQMVCRVWH

SEQ ID NO: 223606 - protein, 167 aa, Zea Mays
MADGEDIGHARPQHPMKQSRFDFTKLRALSSACDTHPPEHLISGCECHESDTQQTTNSGTPLLFSAVNCWLKCMLLEPYNQTDHPECKSRPDSGLSAITELDPGYITGSVRVNGPVTDSRYPAHQQIPQAYGYRQMPARLDSTNPSQAMGGYTLQSQKETLFEELPF

SEQ ID NO: 223607 - protein, 198 aa, Zea Mays
MEAMTRCGRNDHVLQAHHLGLLPGGPPTDVPARRRRLLVVPGDAEDGRELGDRRAPGVLFHRVMVVVERPRVPVLLPLLLVLLLQAVAVGADEAAAAAAGGRDGGGGGCAAPGAERRPGVAGGHRVGAVHVAVARQAQPRGVGPAVHHGRQAHAVVASRRLLAAGRVRVGHGFRHLRRITAADKTPGGSGWDERDLLQ

SEQ ID NO: 223608 - protein, 130 aa, Zea Mays
MEGGDSSGAGAGSGGAVAAAAKWRSDASRSFQYYLDRSTPHATGRWLGTLAAAAIYALRVYMAQGFYIVTYGLGIYLLNLLIGFLSPMVDPELDPSAAAEGPALPTRGSDEFKPFIRRLPEFKFCARLCI

SEQ ID NO: 223609 - protein, 230 aa, Zea Mays
MLTRTRSMPSIRLAKYAKWFDDSSEDIRSLCGKALQMLRTHYGWESVDVTVPEIEEMRLAHYVTMGSECTASLAAKYLDSMDRSEVGWDVRIALSAYGSFSSRDYLSAQRLRCRQMYFHEKIFETADAIVTPMTGVTAYALQDDALSTGELDYINGAALVRYSIAGNFLGLPAITVPVGYDRGGLPVGLQFIGRPWSEATLLHLAYAMQEACGKKVLRKPKVHYDLLTKE

SEQ ID NO: 223610 - protein, 282 aa, Zea Mays
MRVLNLSKAKSGDVEVSFDTSHSHSSSNIETPQNESFQSEALELVVATKKEEYGNHATSDHVSMLSVTNVAINGSEVVPEESQENLISKEPEDNGIKNLDIPIQFSETTPYPSHESFASSDHQPAIPTLVEGDKETCKEQFDVQIHGQSNDTEVACDSSVTTCEAVPDHATTELDVKSDSLDNSQSLPSSIQECEPIYQGEEHILGTTNMVYENQEPVYEGEVVLAEQADKIGESSSSGDDKATEHQFSSVYKRDLTKVSFVSSSAITTLTPCSSTTEVYIS

SEQ ID NO: 223611 - protein, 221 aa, Zea Mays
MWTNIFKIGELQTVSWFQFLPIEPDASAASEKSSKVEQKDALNSIVLSAYLHLQSEGFLSTWTNSFVGPWDPSQGEHNPDEKIKLWLFLPGCHSSVSEIAQPAVNKLRVASNGLWVAPGNSEEVAAALSQALRNSLERSLKGLSYARFGDVFTKYNPPTRNQNSFRRAQPTVEFVFAATEEAIFVHVVISARYVRNLCSDDIEKVLAHSPPSIGEGLPANH

SEQ ID NO: 223612 - protein, 226 aa, Zea Mays
MLVKMFLEACPKLIERFREREENVKPSLVAEARGPKVVKSINRQLREKSIKTKVGTFSVLKELVVVLPDCLADHFGSLVPGIEKALNDKSSTSNLKIEALVLTRLVMASHSPSVFHPYIKWMNMPDLLEVIDFKDTFLDANHVQQSFPDYQEMYEDARQVATDAVGSIGTVASFCVEKRVVAAYRDKCEALRKQGIRMRIFSAYWNSGSDFSVQACISRAHRPALT

SEQ ID NO: 223613 - protein, 754 aa, Zea Mays
MGCHVAADRGRRRSQEDRAVCALGIRIPFVENMRIKEVDVGVVAIFDGHNGAEASEMASKLFLDYFLLHVYFLLDGIHSLRFRKSTGKLTYREVTIFNNVFNLYKHGQSDHAERSCWASPAILDRSFHTEILKESLMRAVHDIDLTFSKEALQNNFESGSTATVVLIADGQIISANVGDSKAFLCSEGYNLHHRNRKRRRKRNSINHEEFALANYDGPLYHARELTKDHHPNREDERNRVEAAGGYVLEWAGVYRVNGELALSRAIGDVPYKRYGVISTPELTGWQILSENDSFLIASSDGIFEKMTMQDVCDLMLHAKIRVKHDFGSSAITQRNLADYVVHVALQKGTTDNVAAVVVPLGSPGSTGTTLKDSSQFEEDLKISISPMLNVPYGLKPDHGHSSAVIDMEYFKRSSIKFQRFLVEAKPKKLGCFYLSESLDEDMDYIFRVPEAYQREEVHDFNHIPAETALYSDGNLEKYKDKHFCLYLGPEDGEMGQCNGPEAFANFFGLLDSLPHNGSKPNGSHSFGNTIDFRYKLKRRFDRGSYGEVWLAFHWNCSEDTDVHKEPPHFTNISQSEMYNCTSSGRMSSDEDHGSGTVNGDLFILKRIMVERGNAAYLSGLREKYFGELFSNASRTLEGLSRIESSTISVDMLYDPDIHLEKNLSATEEPLKHVARFIESFESESREIWLVYHNEGHSLSKLIYTAEETKLVTGNNNERVRHIQVLHPSKWWHWLRTTKAGLKQMQNLLWQLASD

SEQ ID NO: 223614 - protein, 720 aa, Zea Mays
MRIKEVDVGVVAIFDGHNGAEASEMASKLFLDYFLLHVYFLLDGIHSLRFRKSTGKLTYREVTIFNNVFNLYKHGQSDHAERSCWASPAILDRSFHTEILKESLMRAVHDIDLTFSKEALQNNFESGSTATVVLIADGQIISANVGDSKAFLCSEGYNLHHRNRKRRRKRNSINHEEFALANYDGPLYHARELTKDHHPNREDERNRVEAAGGYVLEWAGVYRVNGELALSRAIGDVPYKRYGVISTPELTGWQILSENDSFLIASSDGIFEKMTMQDVCDLMLHAKIRVKHDFGSSAITQRNLADYVVHVALQKGTTDNVAAVVVPLGSPGSTGTTLKDSSQFEEDLKISISPMLNVPYGLKPDHGHSSAVIDMEYFKRSSIKFQRFLVEAKPKKLGCFYLSESLDEDMDYIFRVPEAYQREEVHDFNHIPAETALYSDGNLEKYKDKHFCLYLGPEDGEMGQCNGPEAFANFFGLLDSLPHNGSKPNGSHSFGNTIDFRYKLKRRFDRGSYGEVWLAFHWNCSEDTDVHKEPPHFTNISQSEMYNCTSSGRMSSDEDHGSGTVNGDLFILKRIMVERGNAAYLSGLREKYFGELFSNASRTLEGLSRIESSTISVDMLYDPDIHLEKNLSATEEPLKHVARFIESFESESREIWLVYHNEGHSLSKLIYTAEETKLVTGNNNERVRHIQVLHPSKWWHWLRTTKAGLKQMQNLLWQLI

SEQ ID NO: 223615 - protein, 448 aa, Zea Mays
MTMQDVCDLMLHAKIRVKHDFGSSAITQRNLADYVVHVALQKGTTDNVAAVVVPLGSPGSTGTTLKDSSQFEEDLKISISPMLNVPYGLKPDHGHSSAVIDMEYFKRSSIKFQRFLVEAKPKKLGCFYLSESLDEDMDYIFRVPEAYQREEVHDFNHIPAETALYSDGNLEKYKDKHFCLYLGPEDGEMGQCNGPEAFANFFGLLDSLPHNGSKPNGSHSFGNTIDFRYKLKRRFDRGSYGEVWLAFHWNCSEDTDVHKEPPHFTNISQSEMYNCTSSGRMSSDEDHGSGTVNGDLFILKRIMVERGNAAYLSGLREKYFGELFSNASRTLEGLSRIESSTISVDMLYDPDIHLEKNLSATEEPLKHVARFIESFESESREIWLVYHNEGHSLSKLIYTAEETKLVTGNNNERVRHIQVLHPSKWWHWLRTTKAGLKQMQNLLWQLRT

SEQ ID NO: 223616 - protein, 800 aa, Zea Mays
MGCSASKCCSQLKCSLCSNGCLGQAPDSPRESRGKSSRGRGRVDSSGSDDSSGDDLGEDDDAFNHMNATRESTAGISRLSRVSSQFLPPDASRKVQVPLGNYDLRYSFLSQRGYYPESLDKANQDSYCVHTPFGPSPDDHLFGVFDGHGEYGAQCSQFVKRRLCENLLRDNRFRTDAVLALHSAFVATNTQLHADNLDDSMSGTTAVTILVRGKTIYVANTGDSRAVIAEKQGDDIVAVDLSIDQTPYRFDELERVKECGARVLTLDQIEGLKNPDVQCWGTEESDDGDPPRLWVQNGMYPGTAFTRSIGDSVAESIGVIADPEIFVLDLNSNNPFFVLASDGVFEFLSSQTVVDMVSKYKDPRDACAEIVAESYRLWLQYETRTDDITIILVHINGLTDKESTQTVTKVTLQPSQQVVGLAGPESPLIVSSNTNNQRSKHDLSRARLRALESSLENGQLWVPPSPSHRKTWEEQAHIERVLHDHFLFRKLTDSQCHVLLDCMQRVEVKPRDIVVQQGGEGDCFYVVGSGEYEVLAIQEENGKEITKVLHRYTADKLSSFGELALMHNKPLQASVRAVTSGTLWALKREDFRGILMSEFSNIPSLKLLRSVQLFTRFTVLQLSQLAESLVEVSFADGQIIVDKNDKFSSLYIIQRGRVRLILATDQMTSDTWDLISAETKQAQSSRENGNYVLDIDEGGHFGEWSLIGETIAFTAIAVGDVTCSTIMKEKFDSIVGPFPKLSQADSKIKESLVTLENVADGDFPFRRVKLSDLEWKMCIYAADCSEIGLVQVRGYEVHYL

SEQ ID NO: 223617 - protein, 387 aa, Zea Mays
MSSPSKRREMDLMKLMMSDYKVEMVNDGMQEFFVEFKGPAESIYQGGVWKVRVELPDAYPYKSPSIGFINKIYHPNVDEMSGSVCLDVINQTWSPMFDLVNVFEVFLPQLLLYPNPSDPLNGEAAALMMRDRPVYEQKGKGEGRTTTRTHRQSLQAAQSLSPSYPQGEELRGGGGPSAAVLVSPLSKMSSPSKRREMDLMKLMMSDYKVEMVNDGMQEFFVEFKGPAEIIVYHRILPNKFVLNLVGIYQGGVWKVRVELPDAYPYKSPSIGFINKIYHPNVDEMSGSVCLDVINQTWSPMFDLVNVFEVFLPQLLLYPNPSDPLNGEAAALMMRDRPVYEQKVKEYCEKYAKPEDAGITPEDKSSDEELSEEEDDSGDEAILGNPDP

SEQ ID NO: 223618 - protein, 252 aa, Zea Mays
MSSPSKRREMDLMKLMMSDYKVEMVNDGMQEFFVEFKGPAESIYQGGVWKVRVELPDAYPYKSPSIGFINKIYHPNVDEMSGSVCLDVINQTWSPMFDLVNVFEVFLPQLLLYPNPSDPLNGEAAALMMRDRPVYEQKGKGEGRTTTRTHRQSLQAAQSLSPSYPQGEELRGGGGPSAAVLVSPLSKMSSPSKRREMDLMKLMMSDYKVEMVNDGMQEFFVEFKGPAESNSPRAESRLLFSLPASRADGARS

SEQ ID NO: 223619 - protein, 242 aa, Zea Mays
MASRDFLRVFGAGEGAGPPGDAGAGQPDDDELSLGLSLGGRFGTDRWRRREMQSRRRLEARRKRVERRNSMGSVSVAPADAVSGRRSNASQGSNSASTTEQGIGGSMFNQSADAKSPSTSDNRNQNDMLPPTKAAEKPLNGTATEQQPRLRTLGSLTTRTGSTSDIRKLMMEDMPMVSSKVEGPNARRIDGFLYRYKKGEDVRIVCVCHGSFLTPAEFVKHAGGGDVPNPLRHIVVNPAPFS

SEQ ID NO: 223620 - protein, 946 aa, Zea Mays
MSLSMKDLDTAFHGAGQKDGLMVWRIENFKPVPVPTSLHGKFYMGDSYIILKTTALKNGSFRHDIHYWLGKDTSQDEAGTAAILTVELDAALGGRAVQYRESQGNETERFLSYFRPCIMPQSGGVVSGFNHVEVNDQKHVTRLYVCRGKHVVHVKEVPFTRSSLNHEDIFILDTKSKIFQFNGSNSCIQERAKALEVVQYIRDTFHEGKCEVAGVEDGKLMADAEAGEFWALFGGFAPLPKKTLSEDNGEDKEIIIKLMCINQGKLEQINFESLARELLEPNKCYLLDCGAEIYVWMGRSASLQERKGASKIAEKLLIDASRTKSHVIKVIEGFETVTFKSKFIEWPPTPDLKLSSEDGRVKVAALLKSQGLDVKGLMKTAPVKEEPRPYIDCTGHLQVWRVNGNGKTLLSCADQSKFYTGDCYIFQYTYSGDDKEECLIGTWFGKRSIEVERVSALSLASKMVQASKFQAIQARLYEGKEPIQFFVIFQSFQLFKGGLSSGYKNFVVENDIVDDTYSEGGIALFRIQGSGSENMQALQVDPLASSLNSSYCYILHNGNTVFTWIGNVTTSLDHDLVERQLDVIKPELPSRSLKEGRETDQFWEVLGGKSKYPNQKVERENENDPHLFSCIISKGNIRVKEIHHFTQDDLMTEDVFILDCHSDIFVWVGQKVDTKVKSQAMDIGEKFLVHDFLMEKLSRETPIFIVSEGSEPQFFTRFFNWDSTKSLVHGSSYQRKLGVLKGGAPPTVDKPKRRTPAFTGRSSGQDKSHRSRSMSTSPDRPRVRGRSPAFNMLTSAFENTSNTRNLSTPPPVVRKPFSKSGCPEHSRVSPKKSAISSLTRSFEGHMKSTIPKSVKVSPELEKATQEEGATSGANENKQEDDEGRVIYPYERLTTTAEDPAPDIDVTKRETYLSSAEFKDKFNMIRAEFYKLPKWKQSKLKSCVQLF

SEQ ID NO: 223621 - protein, 183 aa, Zea Mays
MRQFVKYSRFKQFALRALASTLNEEELSDLKDQFDAIDIDKSGSISIEEMRHALAKDLPWRLKGPRVLEIIQAIDSNTDGLVDFKEFVAATLHIHQMAELDSERWGIRCQAAFSKFDLDGDGYITPEELRMHTGLKGSIEPLLEEADIDKDGKISLSEFRKLLRTASMSNVPSPRGPPNPQAL

SEQ ID NO: 223622 - protein, 374 aa, Zea Mays
MEETIQRPSASTTATSQSPFGILALPAPPSSSSKAPAIPASSIDLLSGDDYVKPEPANSLALVPVTEYSAADKNVLAFADMFEQNTANNSNHNLPYSFLSSTSNSTISTSQTYHAPVRPVLPQHSAAYPNGARSNAIVPYDQQAQSNSTGSRNGQTAYGGNHQKQALNYGTGDQNGDIPPAPWGTKRSTNPFDDDQLGGMAVQPKGMQPQPVQPSQHGNKFMSAPPMPRGQPGRMQLQQVPGAQLGALQPTQATLNMQYRGMHPSMQMNHGMGMYSQPTFGGYYGMNQTQLYGVHMSGYGYGQQSGGYYIPNAAYAYTSANELAQRMNDLSVQNGDPNGAAANKQSRPEDALFGDLLSIAKMKQNKPAAGKVGG

SEQ ID NO: 223623 - protein, 336 aa, Zea Mays
MMYYLIHSKMPLNHIPGGAGSEKLLKLLTHHMEEQRKRKALMSCLEGKAMSEFEEAMSQIVGLQELKMQLRRWARGMFFDEKRRAMGLGIAKRRAPHMAFLGNPGTGKTMVARILGKLLHMVGILPTDKVTEVQRTDLVGEFVGHTGPKTRRKIHDAEGGILFVDEAYRLIPMQKSDDKDYGLEALEEIMSVMDSGKIVVVFAGYCEPMKRVIASNDGFCRRVTKFFYFDDFSTTELAEILHMKMKSPSDCSLLYGFKLHPSCSIEAIGELIAREITEEQRKQMNGGLVDTLLINARENLDSRLDFSCNDADTMITITLEDLEAGLRQISRQRHLQ

SEQ ID NO: 223624 - protein, 132 aa, Zea Mays
MSTSSQCTLMEGAISLPRNTSRIAVVTGANRGIGLEVCRQLAGNGVTVVLTAVDEELGAKAVGNLQGLALSDVLSHQLDITDASSIARLANFLKARFGKLDILVNNAAVAGVVYSQDHLDDLEPREEKGSEA

SEQ ID NO: 223625 - protein, 685 aa, Zea Mays
MNAISDALLCVLQVDTLSLYNVTGEIVCIPLPYAVSSIWPLPFGLLLQKSTDGGHMVSSSSSLLNARDLNRPSKEYGLTYNIPFQANILETDNKANGAIISSHLILKHPFEEPQATYVEEKDKLTMMRDFDEKTIWTSDVIPLIASYHKGKFQHSVWQIDGASYQEAMNENTMLPVDISSHKCAFRKIWQGKCSHSAASKVFLATDIDGMPIISFLLHEQKILLAVRIQVDDATEEAFGDIKPHMSWNIPAFAAAPVVVTRPRVRVGVLPFTDILVLSSDNDLLLYSGKQCLCRYTLPNELGKGFFSNHELNSDISDTYSDLKITSIADAVEGRINVTCSNGLMLRCSLRKNPSSSLDEHSSDVSYNIRFMRETLETLHALYENLKLNILRKEDLGCLASLLCTVASSLGEHSYVDYYCRDFPLNLTESPSLVSSNSLTTPPSLFRWFEYCLRHGLNSAKLEDIPTLMRKQKVSAVSWSRKVLSFYSLLLGAERKGKNLSSGVYCEVASGSARNTEELTVLAMVAEKFGHRQLDLLPVGVSLVLRHALDKCRDSPPDDWPATAYVLVGREDLATAKMGTVRKENLLWNNDNLTSMSVPYMLHLQPVIIPTTAPDIPASEVLNSDDSDSVYKSVEDGMEHIFTSTTQLRFGHDLRLNEVRRLLCSARPVPIQTPTNPSVSDQDLHQ

SEQ ID NO: 223626 - protein, 742 aa, Zea Mays
MVSSSSSLLNARDLNRPSKEYGLTYNIPFQANILETDNKANGAIISSHLILKHPFEEPQATYVEEKDKLTMMRDFDEKTIWTSDVIPLIASYHKGKFQHSVWQIDGASYQEAMNENTMLPVDISSHKCAFRKIWQGKCSHSAASKVFLATDIDGMPIISFLLHEQKILLAVRIQVDDATEEAFGDIKPHMSWNIPAFAAAPVVVTRPRVRVGVLPFTDILVLSSDNDLLLYSGKQCLCRYTLPNELGKGFFSNHELNSDISDTYSDLKITSIADAVEGRINVTCSNGLMLRCSLRKNPSSSLVSDCITAMAEGLQSCFYNQFISLFWGSDAAYLYSSSQVDSEWEFFSHEIKRVCTKYGQTLSTKSLTFPSKAWDFLINSKYHSQYCKRALSSSNSFLPVSYNTGKTVFNSFLQDEHSSDVSYNIRFMRETLETLHALYENLKLNILRKEDLGCLASLLCTVASSLGEHSYVDYYCRDFPLNLTESPSLVSSNSLTTPPSLFRWFEYCLRHGLNSAKLEDIPTLMRKQKVSAVSWSRKVLSFYSLLLGAERKGKNLSSGVYCEVASGSARNTEELTVLAMVAEKFGHRQLDLLPVGVSLVLRHALDKCRDSPPDDWPATAYVLVGREDLATAKMGTVRKENLLWNNDNLTSMSVPYMLHLQPVIIPTTAPDIPASEVLNSDDSDSVYKSVEDGMEHIFTSTTQLRFGHDLRLNEVRRLLCSARPVPIQTPTNPSVSDQDLHQ

SEQ ID NO: 223627 - protein, 979 aa, Zea Mays
MAPGSLKIPCPKPKSAAPKIFPPSLGFRPIAGNRLKRPKGRQLASFRLTPPIVHTALRLLPGADSFPLLLDAAAASSGIMASVGSRRLTVLREFRPHGLAVEEADGQGVPGAPPPQDYDYFLFDPALAISPTPDPSDEASSSGADGDHELFIRDNQIIWSNGSRVHKRYVSPNTVIMACWCRMNAISDALLCVLQVDTLSLYNVTGEIVCIPLPYAVSSIWPLPFGLLLQKSTDGGHMVSSSSSLLNARDLNRPSKEYGLTYNIPFQANILETDNKANGAIISSHLILKHPFEEPQATYVEEKDKLTMMRDFDEKTIWTSDVIPLIASYHKGKFQHSVWQIDGASYQEAMNENTMLPVDISSHKCAFRKIWQGKCSHSAASKVFLATDIDGMPIISFLLHEQKILLAVRIQVDDATEEAFGDIKPHMSWNIPAFAAAPVVVTRPRVRVGVLPFTDILVLSSDNDLLLYSGKQCLCRYTLPNELGKGFFSNHELNSDISDTYSDLKITSIADAVEGRINVTCSNGLMLRCSLRKNPSSSLVSDCITAMAEGLQSCFYNQFISLFWGSDAAYLYSSSQVDSEWEFFSHEIKRVCTKYGQTLSTKSLTFPSKAWDFLINSKYHSQYCKRALSSSNSFLPVSYNTGKTVFNSFLQDEHSSDVSYNIRFMRETLETLHALYENLKLNILRKEDLGCLASLLCTVASSLGEHSYVDYYCRDFPLNLTESPSLVSSNSLTTPPSLFRWFEYCLRHGLNSAKLEDIPTLMRKQKVSAVSWSRKVLSFYSLLLGAERKGKNLSSGVYCEVASGSARNTEELTVLAMVAEKFGHRQLDLLPVGVSLVLRHALDKCRDSPPDDWPATAYVLVGREDLATAKMGTVRKENLLWNNDNLTSMSVPYMLHLQPVIIPTTAPDIPASEVLNSDDSDSVYKSVEDGMEHIFTSTTQLRFGHDLRLNEVRRLLCSARPVPIQTPTNPSVSDQDLHQ

SEQ ID NO: 223628 - protein, 144 aa, Zea Mays
MARRGLPPFVQGFGVCVVVFLLALCGPSGEVVHCVELNNNDSGRALYLGLPLPVLFRHYVSAPTRYAMIYEAGLAEESKLTYVEEQLGDAIVGESEQLQRPLGNPRLKEGTSLRISTAKLAKLKSNCISMIRQEVVYLRASDSS

SEQ ID NO: 223629 - protein, 278 aa, Zea Mays
MLANLIGCCRERGGPNCSLRSVSSFSPTSTTTTPTRPHASLALSRIVVAENLPEDQKHQTLMKIFSAVGNVKSIRTCYPQDISLAAANKTSRIEMIFANKLHSFVEYSTVGDAEKAVAEFGGGGNWREGIRVRSLLGCLKHGLGQGRKGGDEEYAADEDGPDTTDHPRDFGTDVTAQISEAHFDHQAEDGTHDKGGMRQQGRGRGRGGRGRGRGQHYGHNSRDGHHPIGTPPSEHPAVLKPPLGPRITDGTKGLLLRESSTGHSPHAPSSRNYNADQQ

SEQ ID NO: 223630 - protein, 295 aa, Zea Mays
MCIQELDEYDTFYKKNMENSGYSSIYIQRSGDKRDGCGIFYKPKSAELVQKEVILYNDLVEKYVPSDNVNSALENNSSAEEDKNAKPDNSKRGDPNDPRVRLKRDCVGLLAAFKLSDPCDQILIVANTHIYWDPQWIDVKLAQAKYLLSRVSQFEQLISNKYNCKPSVIIAGDFNSTPGDKLELSLEENYSELCFLLMEVYNYLLSANLGSTDEAPIKLRSLYAANGGEPEYTNYTPGFTGTLDYIFLSDGSSIKPTSLLRLPRGDSEDVKGGLPNFRHPSDHLPIGADFLVVNI

SEQ ID NO: 223631 - protein, 585 aa, Zea Mays
MPRPGRLQRSGSKRGLDPTGGGGGGDNDDHAPKRPRIPALARSSPKRIEGPDGRNLQLQFRSQLALPIFTGGKVEGPESFAKLDILVLEGDFNKDEDEDWTEEEFESNIVKEREGKRPLLTGDLQVTLKEGVGTIGELTFTDNSSWIRSRKFILGLRIAPGFYEGIRVREAKTEAFPVKDHRGELYKKHYPPTLKDDVWRLEKIGKDGAFHKKLNASGIYTVEDFLQLLVRDQQRLRSILGSGMSNKMWDSLVDHAKTCVLSGKHYVYYARDSRNVGAIFNNIYEFTGLIADDQFISAENLTDNQKGYADALVKKAYEDWMQVVEYDGKALLSFKQKKKSVMTRSDAAVASTNHPASNGSAISQKQLSLPAKAGQTSSAGIMNEDGTRNAYNANGNQSARYAATTQNIPANVAMQYDRSAVSPESQFSGSSLQSQASRGSNTLALGPPQQHQSFAFPALGQSMRPTGLNPFEEWPQQQENCGGVDDYLMEEIRMRSHEILENEEMQQMLRLLSTGGAGTNLTEDGFSFPSYMPAPSPKLSYEDDRTRAPGKAVVGWLKIKAAMRWGIFVRKKAAERRAQLVELDD

SEQ ID NO: 223632 - protein, 175 aa, Zea Mays
MKFNIANPSTGCQKKLEIDDDQKLRAFYDRRISQEVSGDALGEEFKGYVFKIMGGCDKQGFPMKQGVLTSGRVRLLLHRGTPCFRGYGRRNGERRRKSVRGCIVSQDLSVINLVIVKKGENDLPGLTDTEKPRMRGPKRASKIRKLFNLNKDDDVRKYVNTYRRTFTTKNGQQGT
